United States Patent Application Publication US 2015/0232836 A1 - sequence listing, part 19

SEQ ID NO: 672306 - DNA, 15 bp, Homo sapiens
cttcttctgcctcag

SEQ ID NO: 672307 - DNA, 15 bp, Homo sapiens
tagctgggactatag

SEQ ID NO: 672308 - DNA, 15 bp, Homo sapiens
agctgggactatagg

SEQ ID NO: 672309 - DNA, 15 bp, Homo sapiens
gctgggactataggc

SEQ ID NO: 672310 - DNA, 15 bp, Homo sapiens
ctgggactataggca

SEQ ID NO: 672311 - DNA, 15 bp, Homo sapiens
tgggactataggcac

SEQ ID NO: 672312 - DNA, 15 bp, Homo sapiens
gggactataggcacg

SEQ ID NO: 672313 - DNA, 15 bp, Homo sapiens
ggactataggcacgt

SEQ ID NO: 672314 - DNA, 15 bp, Homo sapiens
gactataggcacgtc

SEQ ID NO: 672315 - DNA, 15 bp, Homo sapiens
actataggcacgtcc

SEQ ID NO: 672316 - DNA, 15 bp, Homo sapiens
ctataggcacgtccc

SEQ ID NO: 672317 - DNA, 15 bp, Homo sapiens
tataggcacgtccca

SEQ ID NO: 672318 - DNA, 15 bp, Homo sapiens
ataggcacgtcccac

SEQ ID NO: 672319 - DNA, 15 bp, Homo sapiens
taggcacgtcccact

SEQ ID NO: 672320 - DNA, 15 bp, Homo sapiens
aggcacgtcccacta

SEQ ID NO: 672321 - DNA, 15 bp, Homo sapiens
ggcacgtcccactac

SEQ ID NO: 672322 - DNA, 15 bp, Homo sapiens
gcacgtcccactacg

SEQ ID NO: 672323 - DNA, 15 bp, Homo sapiens
cacgtcccactacgc

SEQ ID NO: 672324 - DNA, 15 bp, Homo sapiens
acgtcccactacgcc

SEQ ID NO: 672325 - DNA, 15 bp, Homo sapiens
cgtcccactacgccc

SEQ ID NO: 672326 - DNA, 15 bp, Homo sapiens
gtcccactacgccca

SEQ ID NO: 672327 - DNA, 15 bp, Homo sapiens
tcccactacgcccag

SEQ ID NO: 672328 - DNA, 15 bp, Homo sapiens
cccactacgcccagc

SEQ ID NO: 672329 - DNA, 15 bp, Homo sapiens
ccactacgcccagct

SEQ ID NO: 672330 - DNA, 15 bp, Homo sapiens
cactacgcccagcta

SEQ ID NO: 672331 - DNA, 15 bp, Homo sapiens
actacgcccagctaa

SEQ ID NO: 672332 - DNA, 15 bp, Homo sapiens
ctacgcccagctaat

SEQ ID NO: 672333 - DNA, 15 bp, Homo sapiens
tacgcccagctaatt

SEQ ID NO: 672334 - DNA, 15 bp, Homo sapiens
tttttgtatttttta

SEQ ID NO: 672335 - DNA, 15 bp, Homo sapiens
ttttgtattttttag

SEQ ID NO: 672336 - DNA, 15 bp, Homo sapiens
tttgtattttttagt

SEQ ID NO: 672337 - DNA, 15 bp, Homo sapiens
ggtttcactatgtta

SEQ ID NO: 672338 - DNA, 15 bp, Homo sapiens
gtttcactatgttag

SEQ ID NO: 672339 - DNA, 15 bp, Homo sapiens
tttcactatgttagc

SEQ ID NO: 672340 - DNA, 15 bp, Homo sapiens
ttcactatgttagcc

SEQ ID NO: 672341 - DNA, 15 bp, Homo sapiens
tcactatgttagcca

SEQ ID NO: 672342 - DNA, 15 bp, Homo sapiens
cactatgttagccag

SEQ ID NO: 672343 - DNA, 15 bp, Homo sapiens
actatgttagccagg

SEQ ID NO: 672344 - DNA, 15 bp, Homo sapiens
ctatgttagccagga

SEQ ID NO: 672345 - DNA, 15 bp, Homo sapiens
tatgttagccaggat

SEQ ID NO: 672346 - DNA, 15 bp, Homo sapiens
ctgacctcgtgatct

SEQ ID NO: 672347 - DNA, 15 bp, Homo sapiens
tgacctcgtgatctg

SEQ ID NO: 672348 - DNA, 15 bp, Homo sapiens
gacctcgtgatctgc

SEQ ID NO: 672349 - DNA, 15 bp, Homo sapiens
acctcgtgatctgcc

SEQ ID NO: 672350 - DNA, 15 bp, Homo sapiens
cctcgtgatctgcct

SEQ ID NO: 672351 - DNA, 15 bp, Homo sapiens
ctcgtgatctgcctg

SEQ ID NO: 672352 - DNA, 15 bp, Homo sapiens
tcgtgatctgcctgc

SEQ ID NO: 672353 - DNA, 15 bp, Homo sapiens
cgtgatctgcctgcc

SEQ ID NO: 672354 - DNA, 15 bp, Homo sapiens
tgatctgcctgcctt

SEQ ID NO: 672355 - DNA, 15 bp, Homo sapiens
tctgcctgccttggg

SEQ ID NO: 672356 - DNA, 15 bp, Homo sapiens
ctgcctgccttgggc

SEQ ID NO: 672357 - DNA, 15 bp, Homo sapiens
tgcctgccttgggct

SEQ ID NO: 672358 - DNA, 15 bp, Homo sapiens
gcctgccttgggctc

SEQ ID NO: 672359 - DNA, 15 bp, Homo sapiens
cctgccttgggctcc

SEQ ID NO: 672360 - DNA, 15 bp, Homo sapiens
ctgccttgggctccc

SEQ ID NO: 672361 - DNA, 15 bp, Homo sapiens
tgccttgggctccca

SEQ ID NO: 672362 - DNA, 15 bp, Homo sapiens
gccttgggctcccaa

SEQ ID NO: 672363 - DNA, 15 bp, Homo sapiens
ccttgggctcccaaa

SEQ ID NO: 672364 - DNA, 15 bp, Homo sapiens
cttgggctcccaaag

SEQ ID NO: 672365 - DNA, 15 bp, Homo sapiens
ttgggctcccaaagt

SEQ ID NO: 672366 - DNA, 15 bp, Homo sapiens
tgggctcccaaagtg

SEQ ID NO: 672367 - DNA, 15 bp, Homo sapiens
gggctcccaaagtgt

SEQ ID NO: 672368 - DNA, 15 bp, Homo sapiens
ggctcccaaagtgtt

SEQ ID NO: 672369 - DNA, 15 bp, Homo sapiens
gctcccaaagtgttg

SEQ ID NO: 672370 - DNA, 15 bp, Homo sapiens
aagtgttgggattat

SEQ ID NO: 672371 - DNA, 15 bp, Homo sapiens
agtgttgggattatg

SEQ ID NO: 672372 - DNA, 15 bp, Homo sapiens
gtgttgggattatgg

SEQ ID NO: 672373 - DNA, 15 bp, Homo sapiens
tgttgggattatggg

SEQ ID NO: 672374 - DNA, 15 bp, Homo sapiens
gttgggattatgggc

SEQ ID NO: 672375 - DNA, 15 bp, Homo sapiens
ttgggattatgggca

SEQ ID NO: 672376 - DNA, 15 bp, Homo sapiens
tgggattatgggcat

SEQ ID NO: 672377 - DNA, 15 bp, Homo sapiens
gggattatgggcatg

SEQ ID NO: 672378 - DNA, 15 bp, Homo sapiens
ggattatgggcatga

SEQ ID NO: 672379 - DNA, 15 bp, Homo sapiens
gattatgggcatgag

SEQ ID NO: 672380 - DNA, 15 bp, Homo sapiens
attatgggcatgagc

SEQ ID NO: 672381 - DNA, 15 bp, Homo sapiens
ttatgggcatgagcc

SEQ ID NO: 672382 - DNA, 15 bp, Homo sapiens
tatgggcatgagcca

SEQ ID NO: 672383 - DNA, 15 bp, Homo sapiens
atgggcatgagccac

SEQ ID NO: 672384 - DNA, 15 bp, Homo sapiens
tgggcatgagccact

SEQ ID NO: 672385 - DNA, 15 bp, Homo sapiens
gccactgcacctggc

SEQ ID NO: 672386 - DNA, 15 bp, Homo sapiens
ccactgcacctggcc

SEQ ID NO: 672387 - DNA, 15 bp, Homo sapiens
cactgcacctggcct

SEQ ID NO: 672388 - DNA, 15 bp, Homo sapiens
actgcacctggcctt

SEQ ID NO: 672389 - DNA, 15 bp, Homo sapiens
ctgcacctggccttt

SEQ ID NO: 672390 - DNA, 15 bp, Homo sapiens
tgcacctggcctttt

SEQ ID NO: 672391 - DNA, 15 bp, Homo sapiens
gcacctggccttttt

SEQ ID NO: 672392 - DNA, 15 bp, Homo sapiens
cacctggcctttttt

SEQ ID NO: 672393 - DNA, 15 bp, Homo sapiens
acctggccttttttt

SEQ ID NO: 672394 - DNA, 15 bp, Homo sapiens
cctggcctttttttt

SEQ ID NO: 672395 - DNA, 15 bp, Homo sapiens
ctggccttttttttt

SEQ ID NO: 672396 - DNA, 15 bp, Homo sapiens
tggcctttttttttt

SEQ ID NO: 672397 - DNA, 15 bp, Homo sapiens
ggccttttttttttt

SEQ ID NO: 672398 - DNA, 15 bp, Homo sapiens
gcctttttttttttt

SEQ ID NO: 672399 - DNA, 15 bp, Homo sapiens
ttttgagatggagtt

SEQ ID NO: 672400 - DNA, 15 bp, Homo sapiens
tttgagatggagttt

SEQ ID NO: 672401 - DNA, 15 bp, Homo sapiens
ttgagatggagtttc

SEQ ID NO: 672402 - DNA, 15 bp, Homo sapiens
tgagatggagtttcg

SEQ ID NO: 672403 - DNA, 15 bp, Homo sapiens
gagatggagtttcgc

SEQ ID NO: 672404 - DNA, 15 bp, Homo sapiens
agatggagtttcgct

SEQ ID NO: 672405 - DNA, 15 bp, Homo sapiens
gatggagtttcgctc

SEQ ID NO: 672406 - DNA, 15 bp, Homo sapiens
atggagtttcgctct

SEQ ID NO: 672407 - DNA, 15 bp, Homo sapiens
tggagtttcgctctt

SEQ ID NO: 672408 - DNA, 15 bp, Homo sapiens
ggagtttcgctcttg

SEQ ID NO: 672409 - DNA, 15 bp, Homo sapiens
gagtttcgctcttgt

SEQ ID NO: 672410 - DNA, 15 bp, Homo sapiens
agtttcgctcttgtt

SEQ ID NO: 672411 - DNA, 15 bp, Homo sapiens
gtttcgctcttgttg

SEQ ID NO: 672412 - DNA, 15 bp, Homo sapiens
ttcgctcttgttgcc

SEQ ID NO: 672413 - DNA, 15 bp, Homo sapiens
tcgctcttgttgccc

SEQ ID NO: 672414 - DNA, 15 bp, Homo sapiens
cgctcttgttgccca

SEQ ID NO: 672415 - DNA, 15 bp, Homo sapiens
gctcttgttgcccag

SEQ ID NO: 672416 - DNA, 15 bp, Homo sapiens
ctcttgttgcccagg

SEQ ID NO: 672417 - DNA, 15 bp, Homo sapiens
tcttgttgcccaggc

SEQ ID NO: 672418 - DNA, 15 bp, Homo sapiens
cttgttgcccaggct

SEQ ID NO: 672419 - DNA, 15 bp, Homo sapiens
ttgttgcccaggctg

SEQ ID NO: 672420 - DNA, 15 bp, Homo sapiens
ggagtgcaatggtgt

SEQ ID NO: 672421 - DNA, 15 bp, Homo sapiens
gagtgcaatggtgtg

SEQ ID NO: 672422 - DNA, 15 bp, Homo sapiens
agtgcaatggtgtga

SEQ ID NO: 672423 - DNA, 15 bp, Homo sapiens
gtgcaatggtgtgat

SEQ ID NO: 672424 - DNA, 15 bp, Homo sapiens
tgcaatggtgtgatc

SEQ ID NO: 672425 - DNA, 15 bp, Homo sapiens
gcaatggtgtgatct

SEQ ID NO: 672426 - DNA, 15 bp, Homo sapiens
caatggtgtgatctc

SEQ ID NO: 672427 - DNA, 15 bp, Homo sapiens
aatggtgtgatctcg

SEQ ID NO: 672428 - DNA, 15 bp, Homo sapiens
atggtgtgatctcgg

SEQ ID NO: 672429 - DNA, 15 bp, Homo sapiens
tggtgtgatctcggc

SEQ ID NO: 672430 - DNA, 15 bp, Homo sapiens
ggtgtgatctcggct

SEQ ID NO: 672431 - DNA, 15 bp, Homo sapiens
gtgtgatctcggctc

SEQ ID NO: 672432 - DNA, 15 bp, Homo sapiens
tgtgatctcggctca

SEQ ID NO: 672433 - DNA, 15 bp, Homo sapiens
tcctgggttcaagca

SEQ ID NO: 672434 - DNA, 15 bp, Homo sapiens
cctgggttcaagcaa

SEQ ID NO: 672435 - DNA, 15 bp, Homo sapiens
ggattacaggcacct

SEQ ID NO: 672436 - DNA, 15 bp, Homo sapiens
gattacaggcacctg

SEQ ID NO: 672437 - DNA, 15 bp, Homo sapiens
attacaggcacctgc

SEQ ID NO: 672438 - DNA, 15 bp, Homo sapiens
ttacaggcacctgcc

SEQ ID NO: 672439 - DNA, 15 bp, Homo sapiens
tacaggcacctgcca

SEQ ID NO: 672440 - DNA, 15 bp, Homo sapiens
acaggcacctgccac

SEQ ID NO: 672441 - DNA, 15 bp, Homo sapiens
caggcacctgccacc

SEQ ID NO: 672442 - DNA, 15 bp, Homo sapiens
aggcacctgccacca

SEQ ID NO: 672443 - DNA, 15 bp, Homo sapiens
ggcacctgccaccac

SEQ ID NO: 672444 - DNA, 15 bp, Homo sapiens
gcacctgccaccacg

SEQ ID NO: 672445 - DNA, 15 bp, Homo sapiens
cacctgccaccacgc

SEQ ID NO: 672446 - DNA, 15 bp, Homo sapiens
acctgccaccacgcc

SEQ ID NO: 672447 - DNA, 15 bp, Homo sapiens
cctgccaccacgcct

SEQ ID NO: 672448 - DNA, 15 bp, Homo sapiens
ctgccaccacgcctg

SEQ ID NO: 672449 - DNA, 15 bp, Homo sapiens
tgccaccacgcctgg

SEQ ID NO: 672450 - DNA, 15 bp, Homo sapiens
ggctaatttttgtac

SEQ ID NO: 672451 - DNA, 15 bp, Homo sapiens
gctaatttttgtact

SEQ ID NO: 672452 - DNA, 15 bp, Homo sapiens
ctaatttttgtactt

SEQ ID NO: 672453 - DNA, 15 bp, Homo sapiens
taatttttgtacttt

SEQ ID NO: 672454 - DNA, 15 bp, Homo sapiens
aatttttgtactttt

SEQ ID NO: 672455 - DNA, 15 bp, Homo sapiens
atttttgtactttta

SEQ ID NO: 672456 - DNA, 15 bp, Homo sapiens
tttttgtacttttag

SEQ ID NO: 672457 - DNA, 15 bp, Homo sapiens
cttttagtagagacg

SEQ ID NO: 672458 - DNA, 15 bp, Homo sapiens
agagacggggtttct

SEQ ID NO: 672459 - DNA, 15 bp, Homo sapiens
gagacggggtttctc

SEQ ID NO: 672460 - DNA, 15 bp, Homo sapiens
agacggggtttctcc

SEQ ID NO: 672461 - DNA, 15 bp, Homo sapiens
gacggggtttctcca

SEQ ID NO: 672462 - DNA, 15 bp, Homo sapiens
acggggtttctccat

SEQ ID NO: 672463 - DNA, 15 bp, Homo sapiens
cggggtttctccatg

SEQ ID NO: 672464 - DNA, 15 bp, Homo sapiens
gtcaggctggtctca

SEQ ID NO: 672465 - DNA, 15 bp, Homo sapiens
tcaggctggtctcaa

SEQ ID NO: 672466 - DNA, 15 bp, Homo sapiens
caggtgatccaccca

SEQ ID NO: 672467 - DNA, 15 bp, Homo sapiens
aggtgatccacccac

SEQ ID NO: 672468 - DNA, 15 bp, Homo sapiens
ggtgatccacccacc

SEQ ID NO: 672469 - DNA, 15 bp, Homo sapiens
gtgatccacccacct

SEQ ID NO: 672470 - DNA, 15 bp, Homo sapiens
tgatccacccacctc

SEQ ID NO: 672471 - DNA, 15 bp, Homo sapiens
gatccacccacctcg

SEQ ID NO: 672472 - DNA, 15 bp, Homo sapiens
atccacccacctcgg

SEQ ID NO: 672473 - DNA, 15 bp, Homo sapiens
tccacccacctcggc

SEQ ID NO: 672474 - DNA, 15 bp, Homo sapiens
ccacccacctcggcc

SEQ ID NO: 672475 - DNA, 15 bp, Homo sapiens
cacccacctcggcct

SEQ ID NO: 672476 - DNA, 15 bp, Homo sapiens
acccacctcggcctc

SEQ ID NO: 672477 - DNA, 15 bp, Homo sapiens
cggcctcccaaagtt

SEQ ID NO: 672478 - DNA, 15 bp, Homo sapiens
ggcctcccaaagttc

SEQ ID NO: 672479 - DNA, 15 bp, Homo sapiens
gcctcccaaagttct

SEQ ID NO: 672480 - DNA, 15 bp, Homo sapiens
cctcccaaagttctg

SEQ ID NO: 672481 - DNA, 15 bp, Homo sapiens
ttctgggattacaga

SEQ ID NO: 672482 - DNA, 15 bp, Homo sapiens
tctgggattacagac

SEQ ID NO: 672483 - DNA, 15 bp, Homo sapiens
tgggattacagacat

SEQ ID NO: 672484 - DNA, 15 bp, Homo sapiens
gggattacagacatg

SEQ ID NO: 672485 - DNA, 15 bp, Homo sapiens
ggattacagacatga

SEQ ID NO: 672486 - DNA, 15 bp, Homo sapiens
gattacagacatgag

SEQ ID NO: 672487 - DNA, 15 bp, Homo sapiens
attacagacatgagc

SEQ ID NO: 672488 - DNA, 15 bp, Homo sapiens
ttacagacatgagcc

SEQ ID NO: 672489 - DNA, 15 bp, Homo sapiens
tacagacatgagcca

SEQ ID NO: 672490 - DNA, 15 bp, Homo sapiens
acagacatgagccac

SEQ ID NO: 672491 - DNA, 15 bp, Homo sapiens
cagacatgagccacc

SEQ ID NO: 672492 - DNA, 15 bp, Homo sapiens
agacatgagccaccg

SEQ ID NO: 672493 - DNA, 15 bp, Homo sapiens
gacatgagccaccgc

SEQ ID NO: 672494 - DNA, 15 bp, Homo sapiens
acatgagccaccgcg

SEQ ID NO: 672495 - DNA, 15 bp, Homo sapiens
tgagccaccgcgcct

SEQ ID NO: 672496 - DNA, 15 bp, Homo sapiens
gagccaccgcgcctg

SEQ ID NO: 672497 - DNA, 15 bp, Homo sapiens
agccaccgcgcctgg

SEQ ID NO: 672498 - DNA, 15 bp, Homo sapiens
gccaccgcgcctggc

SEQ ID NO: 672499 - DNA, 15 bp, Homo sapiens
ccaccgcgcctggcc

SEQ ID NO: 672500 - DNA, 15 bp, Homo sapiens
caccgcgcctggccg

SEQ ID NO: 672501 - DNA, 15 bp, Homo sapiens
accgcgcctggccgt

SEQ ID NO: 672502 - DNA, 15 bp, Homo sapiens
ccgcgcctggccgtg

SEQ ID NO: 672503 - DNA, 15 bp, Homo sapiens
cgcgcctggccgtgt

SEQ ID NO: 672504 - DNA, 15 bp, Homo sapiens
gcgcctggccgtgtc

SEQ ID NO: 672505 - DNA, 15 bp, Homo sapiens
cgcctggccgtgtct

SEQ ID NO: 672506 - DNA, 15 bp, Homo sapiens
gcctggccgtgtctg

SEQ ID NO: 672507 - DNA, 15 bp, Homo sapiens
cctggccgtgtctgg

SEQ ID NO: 672508 - DNA, 15 bp, Homo sapiens
ctggccgtgtctggc

SEQ ID NO: 672509 - DNA, 15 bp, Homo sapiens
tggccgtgtctggcc

SEQ ID NO: 672510 - DNA, 15 bp, Homo sapiens
ggccgtgtctggcct

SEQ ID NO: 672511 - DNA, 15 bp, Homo sapiens
gccgtgtctggcctt

SEQ ID NO: 672512 - DNA, 15 bp, Homo sapiens
ccgtgtctggccttt

SEQ ID NO: 672513 - DNA, 15 bp, Homo sapiens
cgtgtctggcctttt

SEQ ID NO: 672514 - DNA, 15 bp, Homo sapiens
gtgtctggccttttt

SEQ ID NO: 672515 - DNA, 15 bp, Homo sapiens
tgtctggcctttttt

SEQ ID NO: 672516 - DNA, 15 bp, Homo sapiens
gtctggcctttttta

SEQ ID NO: 672517 - DNA, 15 bp, Homo sapiens
tctggccttttttag

SEQ ID NO: 672518 - DNA, 15 bp, Homo sapiens
ctggccttttttagt

SEQ ID NO: 672519 - DNA, 15 bp, Homo sapiens
tggccttttttagtt

SEQ ID NO: 672520 - DNA, 15 bp, Homo sapiens
ggccttttttagtta

SEQ ID NO: 672521 - DNA, 15 bp, Homo sapiens
gccttttttagttat

SEQ ID NO: 672522 - DNA, 15 bp, Homo sapiens
ccttttttagttatt

SEQ ID NO: 672523 - DNA, 15 bp, Homo sapiens
cttttttagttattt

SEQ ID NO: 672524 - DNA, 15 bp, Homo sapiens
ttttttagttatttc

SEQ ID NO: 672525 - DNA, 15 bp, Homo sapiens
tttttagttatttct

SEQ ID NO: 672526 - DNA, 15 bp, Homo sapiens
ttttagttatttctt

SEQ ID NO: 672527 - DNA, 15 bp, Homo sapiens
tttagttatttcttt

SEQ ID NO: 672528 - DNA, 15 bp, Homo sapiens
ttagttatttctttt

SEQ ID NO: 672529 - DNA, 15 bp, Homo sapiens
tagttatttcttttt

SEQ ID NO: 672530 - DNA, 15 bp, Homo sapiens
agttatttctttttt

SEQ ID NO: 672531 - DNA, 15 bp, Homo sapiens
gttatttcttttttt

SEQ ID NO: 672532 - DNA, 15 bp, Homo sapiens
ttatttctttttttt

SEQ ID NO: 672533 - DNA, 15 bp, Homo sapiens
tatttcttttttttt

SEQ ID NO: 672534 - DNA, 15 bp, Homo sapiens
atttctttttttttt

SEQ ID NO: 672535 - DNA, 15 bp, Homo sapiens
ttgagacagagtctt

SEQ ID NO: 672536 - DNA, 15 bp, Homo sapiens
tgagacagagtctta

SEQ ID NO: 672537 - DNA, 15 bp, Homo sapiens
gagacagagtcttac

SEQ ID NO: 672538 - DNA, 15 bp, Homo sapiens
agacagagtcttact

SEQ ID NO: 672539 - DNA, 15 bp, Homo sapiens
gacagagtcttactc

SEQ ID NO: 672540 - DNA, 15 bp, Homo sapiens
acagagtcttactcc

SEQ ID NO: 672541 - DNA, 15 bp, Homo sapiens
cagagtcttactccg

SEQ ID NO: 672542 - DNA, 15 bp, Homo sapiens
agagtcttactccgt

SEQ ID NO: 672543 - DNA, 15 bp, Homo sapiens
gagtcttactccgtc

SEQ ID NO: 672544 - DNA, 15 bp, Homo sapiens
agtcttactccgtcg

SEQ ID NO: 672545 - DNA, 15 bp, Homo sapiens
gtcttactccgtcgc

SEQ ID NO: 672546 - DNA, 15 bp, Homo sapiens
tcttactccgtcgcc

SEQ ID NO: 672547 - DNA, 15 bp, Homo sapiens
cttactccgtcgccc

SEQ ID NO: 672548 - DNA, 15 bp, Homo sapiens
ttactccgtcgccca

SEQ ID NO: 672549 - DNA, 15 bp, Homo sapiens
tactccgtcgcccag

SEQ ID NO: 672550 - DNA, 15 bp, Homo sapiens
actccgtcgcccagg

SEQ ID NO: 672551 - DNA, 15 bp, Homo sapiens
ctccgtcgcccaggc

SEQ ID NO: 672552 - DNA, 15 bp, Homo sapiens
tccgtcgcccaggct

SEQ ID NO: 672553 - DNA, 15 bp, Homo sapiens
ccgtcgcccaggctg

SEQ ID NO: 672554 - DNA, 15 bp, Homo sapiens
cgtcgcccaggctgg

SEQ ID NO: 672555 - DNA, 15 bp, Homo sapiens
aggctggagtgcagc

SEQ ID NO: 672556 - DNA, 15 bp, Homo sapiens
ggctggagtgcagcg

SEQ ID NO: 672557 - DNA, 15 bp, Homo sapiens
gctggagtgcagcgg

SEQ ID NO: 672558 - DNA, 15 bp, Homo sapiens
ctggagtgcagcggt

SEQ ID NO: 672559 - DNA, 15 bp, Homo sapiens
tggagtgcagcggtg

SEQ ID NO: 672560 - DNA, 15 bp, Homo sapiens
ggagtgcagcggtgc

SEQ ID NO: 672561 - DNA, 15 bp, Homo sapiens
gagtgcagcggtgcg

SEQ ID NO: 672562 - DNA, 15 bp, Homo sapiens
agtgcagcggtgcga

SEQ ID NO: 672563 - DNA, 15 bp, Homo sapiens
gtgcagcggtgcgat

SEQ ID NO: 672564 - DNA, 15 bp, Homo sapiens
tgcagcggtgcgatg

SEQ ID NO: 672565 - DNA, 15 bp, Homo sapiens
gcagcggtgcgatgt

SEQ ID NO: 672566 - DNA, 15 bp, Homo sapiens
cagcggtgcgatgtc

SEQ ID NO: 672567 - DNA, 15 bp, Homo sapiens
agcggtgcgatgtct

SEQ ID NO: 672568 - DNA, 15 bp, Homo sapiens
gcggtgcgatgtctg

SEQ ID NO: 672569 - DNA, 15 bp, Homo sapiens
cggtgcgatgtctgc

SEQ ID NO: 672570 - DNA, 15 bp, Homo sapiens
ggtgcgatgtctgcg

SEQ ID NO: 672571 - DNA, 15 bp, Homo sapiens
gtgcgatgtctgcgc

SEQ ID NO: 672572 - DNA, 15 bp, Homo sapiens
tgcgatgtctgcgca

SEQ ID NO: 672573 - DNA, 15 bp, Homo sapiens
gcgatgtctgcgcac

SEQ ID NO: 672574 - DNA, 15 bp, Homo sapiens
cgatgtctgcgcact

SEQ ID NO: 672575 - DNA, 15 bp, Homo sapiens
gatgtctgcgcactg

SEQ ID NO: 672576 - DNA, 15 bp, Homo sapiens
atgtctgcgcactgc

SEQ ID NO: 672577 - DNA, 15 bp, Homo sapiens
tgtctgcgcactgca

SEQ ID NO: 672578 - DNA, 15 bp, Homo sapiens
gtctgcgcactgcaa

SEQ ID NO: 672579 - DNA, 15 bp, Homo sapiens
tctgcgcactgcaag

SEQ ID NO: 672580 - DNA, 15 bp, Homo sapiens
ctgcgcactgcaagc

SEQ ID NO: 672581 - DNA, 15 bp, Homo sapiens
tgcgcactgcaagct

SEQ ID NO: 672582 - DNA, 15 bp, Homo sapiens
gcgcactgcaagctc

SEQ ID NO: 672583 - DNA, 15 bp, Homo sapiens
cgcactgcaagctcc

SEQ ID NO: 672584 - DNA, 15 bp, Homo sapiens
gcactgcaagctccg

SEQ ID NO: 672585 - DNA, 15 bp, Homo sapiens
ctgcaagctccgccc

SEQ ID NO: 672586 - DNA, 15 bp, Homo sapiens
tgcaagctccgcccc

SEQ ID NO: 672587 - DNA, 15 bp, Homo sapiens
gcaagctccgccccc

SEQ ID NO: 672588 - DNA, 15 bp, Homo sapiens
caagctccgccccct

SEQ ID NO: 672589 - DNA, 15 bp, Homo sapiens
aagctccgccccctg

SEQ ID NO: 672590 - DNA, 15 bp, Homo sapiens
agctccgccccctgg

SEQ ID NO: 672591 - DNA, 15 bp, Homo sapiens
gctccgccccctggg

SEQ ID NO: 672592 - DNA, 15 bp, Homo sapiens
ctccgccccctgggt

SEQ ID NO: 672593 - DNA, 15 bp, Homo sapiens
tccgccccctgggtt

SEQ ID NO: 672594 - DNA, 15 bp, Homo sapiens
ccgccccctgggttc

SEQ ID NO: 672595 - DNA, 15 bp, Homo sapiens
cgccccctgggttca

SEQ ID NO: 672596 - DNA, 15 bp, Homo sapiens
gccccctgggttcat

SEQ ID NO: 672597 - DNA, 15 bp, Homo sapiens
ccccctgggttcatg

SEQ ID NO: 672598 - DNA, 15 bp, Homo sapiens
cccctgggttcatgc

SEQ ID NO: 672599 - DNA, 15 bp, Homo sapiens
ccctgggttcatgcc

SEQ ID NO: 672600 - DNA, 15 bp, Homo sapiens
tgcctcagccttctg

SEQ ID NO: 672601 - DNA, 15 bp, Homo sapiens
gcctcagccttctga

SEQ ID NO: 672602 - DNA, 15 bp, Homo sapiens
cctcagccttctgag

SEQ ID NO: 672603 - DNA, 15 bp, Homo sapiens
ctcagccttctgagt

SEQ ID NO: 672604 - DNA, 15 bp, Homo sapiens
tcagccttctgagta

SEQ ID NO: 672605 - DNA, 15 bp, Homo sapiens
cagccttctgagtag

SEQ ID NO: 672606 - DNA, 15 bp, Homo sapiens
agccttctgagtagc

SEQ ID NO: 672607 - DNA, 15 bp, Homo sapiens
gccttctgagtagct

SEQ ID NO: 672608 - DNA, 15 bp, Homo sapiens
gagtagctgggactg

SEQ ID NO: 672609 - DNA, 15 bp, Homo sapiens
agtagctgggactgc

SEQ ID NO: 672610 - DNA, 15 bp, Homo sapiens
gtagctgggactgca

SEQ ID NO: 672611 - DNA, 15 bp, Homo sapiens
tagctgggactgcag

SEQ ID NO: 672612 - DNA, 15 bp, Homo sapiens
agctgggactgcagg

SEQ ID NO: 672613 - DNA, 15 bp, Homo sapiens
gctgggactgcaggc

SEQ ID NO: 672614 - DNA, 15 bp, Homo sapiens
ctgggactgcaggcg

SEQ ID NO: 672615 - DNA, 15 bp, Homo sapiens
tgggactgcaggcgc

SEQ ID NO: 672616 - DNA, 15 bp, Homo sapiens
gggactgcaggcgcc

SEQ ID NO: 672617 - DNA, 15 bp, Homo sapiens
ggactgcaggcgcct

SEQ ID NO: 672618 - DNA, 15 bp, Homo sapiens
gactgcaggcgcctg

SEQ ID NO: 672619 - DNA, 15 bp, Homo sapiens
actgcaggcgcctgc

SEQ ID NO: 672620 - DNA, 15 bp, Homo sapiens
ctgcaggcgcctgcc

SEQ ID NO: 672621 - DNA, 15 bp, Homo sapiens
tgcaggcgcctgcca

SEQ ID NO: 672622 - DNA, 15 bp, Homo sapiens
gcaggcgcctgccac

SEQ ID NO: 672623 - DNA, 15 bp, Homo sapiens
caggcgcctgccact

SEQ ID NO: 672624 - DNA, 15 bp, Homo sapiens
aggcgcctgccacta

SEQ ID NO: 672625 - DNA, 15 bp, Homo sapiens
ggcgcctgccactac

SEQ ID NO: 672626 - DNA, 15 bp, Homo sapiens
gcgcctgccactacg

SEQ ID NO: 672627 - DNA, 15 bp, Homo sapiens
cgcctgccactacgc

SEQ ID NO: 672628 - DNA, 15 bp, Homo sapiens
gcctgccactacgcc

SEQ ID NO: 672629 - DNA, 15 bp, Homo sapiens
cctgccactacgccc

SEQ ID NO: 672630 - DNA, 15 bp, Homo sapiens
ctgccactacgcccg

SEQ ID NO: 672631 - DNA, 15 bp, Homo sapiens
tgccactacgcccgg

SEQ ID NO: 672632 - DNA, 15 bp, Homo sapiens
gccactacgcccggc

SEQ ID NO: 672633 - DNA, 15 bp, Homo sapiens
ccactacgcccggct

SEQ ID NO: 672634 - DNA, 15 bp, Homo sapiens
cactacgcccggcta

SEQ ID NO: 672635 - DNA, 15 bp, Homo sapiens
actacgcccggctac

SEQ ID NO: 672636 - DNA, 15 bp, Homo sapiens
ctacgcccggctact

SEQ ID NO: 672637 - DNA, 15 bp, Homo sapiens
tacgcccggctactt

SEQ ID NO: 672638 - DNA, 15 bp, Homo sapiens
acgcccggctacttt

SEQ ID NO: 672639 - DNA, 15 bp, Homo sapiens
cgcccggctactttt

SEQ ID NO: 672640 - DNA, 15 bp, Homo sapiens
gcccggctacttttt

SEQ ID NO: 672641 - DNA, 15 bp, Homo sapiens
cccggctactttttt

SEQ ID NO: 672642 - DNA, 15 bp, Homo sapiens
ccggctacttttttg

SEQ ID NO: 672643 - DNA, 15 bp, Homo sapiens
cggctacttttttgt

SEQ ID NO: 672644 - DNA, 15 bp, Homo sapiens
ggctacttttttgta

SEQ ID NO: 672645 - DNA, 15 bp, Homo sapiens
gctacttttttgtat

SEQ ID NO: 672646 - DNA, 15 bp, Homo sapiens
ctacttttttgtata

SEQ ID NO: 672647 - DNA, 15 bp, Homo sapiens
tacttttttgtatat

SEQ ID NO: 672648 - DNA, 15 bp, Homo sapiens
acttttttgtatatt

SEQ ID NO: 672649 - DNA, 15 bp, Homo sapiens
cttttttgtatattt

SEQ ID NO: 672650 - DNA, 15 bp, Homo sapiens
ttttttgtatattta

SEQ ID NO: 672651 - DNA, 15 bp, Homo sapiens
tttttgtatatttag

SEQ ID NO: 672652 - DNA, 15 bp, Homo sapiens
ttttgtatatttagt

SEQ ID NO: 672653 - DNA, 15 bp, Homo sapiens
tttgtatatttagta

SEQ ID NO: 672654 - DNA, 15 bp, Homo sapiens
ttgtatatttagtag

SEQ ID NO: 672655 - DNA, 15 bp, Homo sapiens
tgtatatttagtaga

SEQ ID NO: 672656 - DNA, 15 bp, Homo sapiens
gtatatttagtagag

SEQ ID NO: 672657 - DNA, 15 bp, Homo sapiens
tatatttagtagaga

SEQ ID NO: 672658 - DNA, 15 bp, Homo sapiens
atatttagtagagat

SEQ ID NO: 672659 - DNA, 15 bp, Homo sapiens
tttagtagagatgga

SEQ ID NO: 672660 - DNA, 15 bp, Homo sapiens
ttagtagagatggag

SEQ ID NO: 672661 - DNA, 15 bp, Homo sapiens
tagtagagatggagt

SEQ ID NO: 672662 - DNA, 15 bp, Homo sapiens
agtagagatggagtt

SEQ ID NO: 672663 - DNA, 15 bp, Homo sapiens
gtagagatggagttt

SEQ ID NO: 672664 - DNA, 15 bp, Homo sapiens
tagagatggagtttc

SEQ ID NO: 672665 - DNA, 15 bp, Homo sapiens
agagatggagtttca

SEQ ID NO: 672666 - DNA, 15 bp, Homo sapiens
gagatggagtttcac

SEQ ID NO: 672667 - DNA, 15 bp, Homo sapiens
agatggagtttcact

SEQ ID NO: 672668 - DNA, 15 bp, Homo sapiens
gatggagtttcactg

SEQ ID NO: 672669 - DNA, 15 bp, Homo sapiens
atggagtttcactgt

SEQ ID NO: 672670 - DNA, 15 bp, Homo sapiens
tggagtttcactgtg

SEQ ID NO: 672671 - DNA, 15 bp, Homo sapiens
ggagtttcactgtgt

SEQ ID NO: 672672 - DNA, 15 bp, Homo sapiens
gagtttcactgtgtt

SEQ ID NO: 672673 - DNA, 15 bp, Homo sapiens
agtttcactgtgtta

SEQ ID NO: 672674 - DNA, 15 bp, Homo sapiens
cgatctcctgacttt

SEQ ID NO: 672675 - DNA, 15 bp, Homo sapiens
gatctcctgactttg

SEQ ID NO: 672676 - DNA, 15 bp, Homo sapiens
atctcctgactttgt

SEQ ID NO: 672677 - DNA, 15 bp, Homo sapiens
tctcctgactttgtg

SEQ ID NO: 672678 - DNA, 15 bp, Homo sapiens
ctcctgactttgtga

SEQ ID NO: 672679 - DNA, 15 bp, Homo sapiens
tcctgactttgtgat

SEQ ID NO: 672680 - DNA, 15 bp, Homo sapiens
cctgactttgtgatc

SEQ ID NO: 672681 - DNA, 15 bp, Homo sapiens
ctgactttgtgatcc

SEQ ID NO: 672682 - DNA, 15 bp, Homo sapiens
tgactttgtgatccg

SEQ ID NO: 672683 - DNA, 15 bp, Homo sapiens
gactttgtgatccgc

SEQ ID NO: 672684 - DNA, 15 bp, Homo sapiens
actttgtgatccgcc

SEQ ID NO: 672685 - DNA, 15 bp, Homo sapiens
ctttgtgatccgccc

SEQ ID NO: 672686 - DNA, 15 bp, Homo sapiens
tttgtgatccgcccg

SEQ ID NO: 672687 - DNA, 15 bp, Homo sapiens
ttgtgatccgcccgc

SEQ ID NO: 672688 - DNA, 15 bp, Homo sapiens
tgtgatccgcccgcc

SEQ ID NO: 672689 - DNA, 15 bp, Homo sapiens
gtgatccgcccgcct

SEQ ID NO: 672690 - DNA, 15 bp, Homo sapiens
tgatccgcccgcctc

SEQ ID NO: 672691 - DNA, 15 bp, Homo sapiens
gatccgcccgcctcg

SEQ ID NO: 672692 - DNA, 15 bp, Homo sapiens
atccgcccgcctcgg

SEQ ID NO: 672693 - DNA, 15 bp, Homo sapiens
tccgcccgcctcggc

SEQ ID NO: 672694 - DNA, 15 bp, Homo sapiens
ccgcccgcctcggcc

SEQ ID NO: 672695 - DNA, 15 bp, Homo sapiens
cgcccgcctcggcct

SEQ ID NO: 672696 - DNA, 15 bp, Homo sapiens
gcccgcctcggcctc

SEQ ID NO: 672697 - DNA, 15 bp, Homo sapiens
tgagccaccatgcca

SEQ ID NO: 672698 - DNA, 15 bp, Homo sapiens
gagccaccatgccag

SEQ ID NO: 672699 - DNA, 15 bp, Homo sapiens
agccaccatgccagg

SEQ ID NO: 672700 - DNA, 15 bp, Homo sapiens
gccaccatgccaggc

SEQ ID NO: 672701 - DNA, 15 bp, Homo sapiens
ccaccatgccaggct

SEQ ID NO: 672702 - DNA, 15 bp, Homo sapiens
caccatgccaggctt

SEQ ID NO: 672703 - DNA, 15 bp, Homo sapiens
accatgccaggcttt

SEQ ID NO: 672704 - DNA, 15 bp, Homo sapiens
ccatgccaggctttt

SEQ ID NO: 672705 - DNA, 15 bp, Homo sapiens
catgccaggcttttt

SEQ ID NO: 672706 - DNA, 15 bp, Homo sapiens
atgccaggctttttt

SEQ ID NO: 672707 - DNA, 15 bp, Homo sapiens
tgccaggcttttttt

SEQ ID NO: 672708 - DNA, 15 bp, Homo sapiens
gccaggctttttttt

SEQ ID NO: 672709 - DNA, 15 bp, Homo sapiens
ccaggcttttttttt

SEQ ID NO: 672710 - DNA, 15 bp, Homo sapiens
caggctttttttttt

SEQ ID NO: 672711 - DNA, 15 bp, Homo sapiens
aggcttttttttttt

SEQ ID NO: 672712 - DNA, 15 bp, Homo sapiens
tcttgctctgtcgcc

SEQ ID NO: 672713 - DNA, 15 bp, Homo sapiens
cttgctctgtcgccc

SEQ ID NO: 672714 - DNA, 15 bp, Homo sapiens
ttgctctgtcgccca

SEQ ID NO: 672715 - DNA, 15 bp, Homo sapiens
tgctctgtcgcccag

SEQ ID NO: 672716 - DNA, 15 bp, Homo sapiens
gctggagtgcagtgc

SEQ ID NO: 672717 - DNA, 15 bp, Homo sapiens
ctggagtgcagtgcc

SEQ ID NO: 672718 - DNA, 15 bp, Homo sapiens
tggagtgcagtgcca

SEQ ID NO: 672719 - DNA, 15 bp, Homo sapiens
ggagtgcagtgccat

SEQ ID NO: 672720 - DNA, 15 bp, Homo sapiens
gagtgcagtgccatg

SEQ ID NO: 672721 - DNA, 15 bp, Homo sapiens
agtgcagtgccatga

SEQ ID NO: 672722 - DNA, 15 bp, Homo sapiens
gtgcagtgccatgat

SEQ ID NO: 672723 - DNA, 15 bp, Homo sapiens
tgcagtgccatgatc

SEQ ID NO: 672724 - DNA, 15 bp, Homo sapiens
gcagtgccatgatct

SEQ ID NO: 672725 - DNA, 15 bp, Homo sapiens
cagtgccatgatctc

SEQ ID NO: 672726 - DNA, 15 bp, Homo sapiens
agtgccatgatctca

SEQ ID NO: 672727 - DNA, 15 bp, Homo sapiens
gtgccatgatctcag

SEQ ID NO: 672728 - DNA, 15 bp, Homo sapiens
tgccatgatctcagc

SEQ ID NO: 672729 - DNA, 15 bp, Homo sapiens
gccatgatctcagct

SEQ ID NO: 672730 - DNA, 15 bp, Homo sapiens
ccatgatctcagctc

SEQ ID NO: 672731 - DNA, 15 bp, Homo sapiens
catgatctcagctca

SEQ ID NO: 672732 - DNA, 15 bp, Homo sapiens
atgatctcagctcac

SEQ ID NO: 672733 - DNA, 15 bp, Homo sapiens
tcactgcaagctcca

SEQ ID NO: 672734 - DNA, 15 bp, Homo sapiens
cactgcaagctccac

SEQ ID NO: 672735 - DNA, 15 bp, Homo sapiens
actgcaagctccact

SEQ ID NO: 672736 - DNA, 15 bp, Homo sapiens
ctgcaagctccactt

SEQ ID NO: 672737 - DNA, 15 bp, Homo sapiens
tgcaagctccacttc

SEQ ID NO: 672738 - DNA, 15 bp, Homo sapiens
gcaagctccacttcc

SEQ ID NO: 672739 - DNA, 15 bp, Homo sapiens
caagctccacttccc

SEQ ID NO: 672740 - DNA, 15 bp, Homo sapiens
aagctccacttccca

SEQ ID NO: 672741 - DNA, 15 bp, Homo sapiens
agctccacttcccag

SEQ ID NO: 672742 - DNA, 15 bp, Homo sapiens
gctccacttcccagg

SEQ ID NO: 672743 - DNA, 15 bp, Homo sapiens
ctccacttcccaggc

SEQ ID NO: 672744 - DNA, 15 bp, Homo sapiens
tccacttcccaggct

SEQ ID NO: 672745 - DNA, 15 bp, Homo sapiens
ccacttcccaggctc

SEQ ID NO: 672746 - DNA, 15 bp, Homo sapiens
cacttcccaggctca

SEQ ID NO: 672747 - DNA, 15 bp, Homo sapiens
acttcccaggctcac

SEQ ID NO: 672748 - DNA, 15 bp, Homo sapiens
cttcccaggctcacg

SEQ ID NO: 672749 - DNA, 15 bp, Homo sapiens
ttcccaggctcacgc

SEQ ID NO: 672750 - DNA, 15 bp, Homo sapiens
tcccaggctcacgcc

SEQ ID NO: 672751 - DNA, 15 bp, Homo sapiens
cccaggctcacgcca

SEQ ID NO: 672752 - DNA, 15 bp, Homo sapiens
ccaggctcacgccat

SEQ ID NO: 672753 - DNA, 15 bp, Homo sapiens
caggctcacgccatt

SEQ ID NO: 672754 - DNA, 15 bp, Homo sapiens
aggctcacgccattc

SEQ ID NO: 672755 - DNA, 15 bp, Homo sapiens
ggctcacgccattct

SEQ ID NO: 672756 - DNA, 15 bp, Homo sapiens
gctcacgccattctc

SEQ ID NO: 672757 - DNA, 15 bp, Homo sapiens
ctcacgccattctcc

SEQ ID NO: 672758 - DNA, 15 bp, Homo sapiens
tcacgccattctcca

SEQ ID NO: 672759 - DNA, 15 bp, Homo sapiens
cacgccattctccag

SEQ ID NO: 672760 - DNA, 15 bp, Homo sapiens
acgccattctccagc

SEQ ID NO: 672761 - DNA, 15 bp, Homo sapiens
cgccattctccagcc

SEQ ID NO: 672762 - DNA, 15 bp, Homo sapiens
gccattctccagcct

SEQ ID NO: 672763 - DNA, 15 bp, Homo sapiens
ccattctccagcctc

SEQ ID NO: 672764 - DNA, 15 bp, Homo sapiens
cattctccagcctca

SEQ ID NO: 672765 - DNA, 15 bp, Homo sapiens
attctccagcctcag

SEQ ID NO: 672766 - DNA, 15 bp, Homo sapiens
ttctccagcctcagc

SEQ ID NO: 672767 - DNA, 15 bp, Homo sapiens
tctccagcctcagcc

SEQ ID NO: 672768 - DNA, 15 bp, Homo sapiens
gccaccgcgcccaga

SEQ ID NO: 672769 - DNA, 15 bp, Homo sapiens
ccaccgcgcccagac

SEQ ID NO: 672770 - DNA, 15 bp, Homo sapiens
caccgcgcccagacc

SEQ ID NO: 672771 - DNA, 15 bp, Homo sapiens
accgcgcccagacca

SEQ ID NO: 672772 - DNA, 15 bp, Homo sapiens
ccgcgcccagaccaa

SEQ ID NO: 672773 - DNA, 15 bp, Homo sapiens
cgcgcccagaccaaa

SEQ ID NO: 672774 - DNA, 15 bp, Homo sapiens
gcgcccagaccaaaa

SEQ ID NO: 672775 - DNA, 15 bp, Homo sapiens
cgcccagaccaaaat

SEQ ID NO: 672776 - DNA, 15 bp, Homo sapiens
gcccagaccaaaata

SEQ ID NO: 672777 - DNA, 15 bp, Homo sapiens
cccagaccaaaatat

SEQ ID NO: 672778 - DNA, 15 bp, Homo sapiens
ccagaccaaaatatg

SEQ ID NO: 672779 - DNA, 15 bp, Homo sapiens
cagaccaaaatatgc

SEQ ID NO: 672780 - DNA, 15 bp, Homo sapiens
agaccaaaatatgct

SEQ ID NO: 672781 - DNA, 15 bp, Homo sapiens
gaccaaaatatgctc

SEQ ID NO: 672782 - DNA, 15 bp, Homo sapiens
accaaaatatgctca

SEQ ID NO: 672783 - DNA, 15 bp, Homo sapiens
ccaaaatatgctcat

SEQ ID NO: 672784 - DNA, 15 bp, Homo sapiens
caaaatatgctcatt

SEQ ID NO: 672785 - DNA, 15 bp, Homo sapiens
aaaatatgctcattt

SEQ ID NO: 672786 - DNA, 15 bp, Homo sapiens
aaatatgctcatttt

SEQ ID NO: 672787 - DNA, 15 bp, Homo sapiens
aatatgctcatttta

SEQ ID NO: 672788 - DNA, 15 bp, Homo sapiens
atatgctcattttaa

SEQ ID NO: 672789 - DNA, 15 bp, Homo sapiens
tatgctcattttaat

SEQ ID NO: 672790 - DNA, 15 bp, Homo sapiens
atgctcattttaata

SEQ ID NO: 672791 - DNA, 15 bp, Homo sapiens
tgctcattttaataa

SEQ ID NO: 672792 - DNA, 15 bp, Homo sapiens
gctcattttaataaa

SEQ ID NO: 672793 - DNA, 15 bp, Homo sapiens
ctcattttaataaaa

SEQ ID NO: 672794 - DNA, 15 bp, Homo sapiens
tcattttaataaaat

SEQ ID NO: 672795 - DNA, 15 bp, Homo sapiens
cattttaataaaatg

SEQ ID NO: 672796 - DNA, 15 bp, Homo sapiens
attttaataaaatgc

SEQ ID NO: 672797 - DNA, 15 bp, Homo sapiens
ttttaataaaatgca

SEQ ID NO: 672798 - DNA, 15 bp, Homo sapiens
tttaataaaatgcac

SEQ ID NO: 672799 - DNA, 15 bp, Homo sapiens
ttaataaaatgcaca

SEQ ID NO: 672800 - DNA, 15 bp, Homo sapiens
taataaaatgcacaa

SEQ ID NO: 672801 - DNA, 15 bp, Homo sapiens
aataaaatgcacaag

SEQ ID NO: 672802 - DNA, 15 bp, Homo sapiens
ataaaatgcacaagt

SEQ ID NO: 672803 - DNA, 15 bp, Homo sapiens
taaaatgcacaagta

SEQ ID NO: 672804 - DNA, 15 bp, Homo sapiens
aaaatgcacaagtag

SEQ ID NO: 672805 - DNA, 15 bp, Homo sapiens
aaatgcacaagtagg

SEQ ID NO: 672806 - DNA, 15 bp, Homo sapiens
aatgcacaagtaggt

SEQ ID NO: 672807 - DNA, 15 bp, Homo sapiens
atgcacaagtaggtt

SEQ ID NO: 672808 - DNA, 15 bp, Homo sapiens
tgcacaagtaggttg

SEQ ID NO: 672809 - DNA, 15 bp, Homo sapiens
gcacaagtaggttga

SEQ ID NO: 672810 - DNA, 15 bp, Homo sapiens
cacaagtaggttgac

SEQ ID NO: 672811 - DNA, 15 bp, Homo sapiens
acaagtaggttgaca

SEQ ID NO: 672812 - DNA, 15 bp, Homo sapiens
caagtaggttgacaa

SEQ ID NO: 672813 - DNA, 15 bp, Homo sapiens
aagtaggttgacaag

SEQ ID NO: 672814 - DNA, 15 bp, Homo sapiens
agtaggttgacaaga

SEQ ID NO: 672815 - DNA, 15 bp, Homo sapiens
gtaggttgacaagaa

SEQ ID NO: 672816 - DNA, 15 bp, Homo sapiens
taggttgacaagaat

SEQ ID NO: 672817 - DNA, 15 bp, Homo sapiens
aggttgacaagaatt

SEQ ID NO: 672818 - DNA, 15 bp, Homo sapiens
ggttgacaagaattt

SEQ ID NO: 672819 - DNA, 15 bp, Homo sapiens
gttgacaagaatttc

SEQ ID NO: 672820 - DNA, 15 bp, Homo sapiens
ttgacaagaatttca

SEQ ID NO: 672821 - DNA, 15 bp, Homo sapiens
tgacaagaatttcac

SEQ ID NO: 672822 - DNA, 15 bp, Homo sapiens
gacaagaatttcacc

SEQ ID NO: 672823 - DNA, 15 bp, Homo sapiens
acaagaatttcacct

SEQ ID NO: 672824 - DNA, 15 bp, Homo sapiens
caagaatttcacctg

SEQ ID NO: 672825 - DNA, 15 bp, Homo sapiens
aagaatttcacctgc

SEQ ID NO: 672826 - DNA, 15 bp, Homo sapiens
agaatttcacctgca

SEQ ID NO: 672827 - DNA, 15 bp, Homo sapiens
gaatttcacctgcaa

SEQ ID NO: 672828 - DNA, 15 bp, Homo sapiens
aatttcacctgcaac

SEQ ID NO: 672829 - DNA, 15 bp, Homo sapiens
atttcacctgcaacc

SEQ ID NO: 672830 - DNA, 15 bp, Homo sapiens
tttcacctgcaacct

SEQ ID NO: 672831 - DNA, 15 bp, Homo sapiens
ttcacctgcaacctt

SEQ ID NO: 672832 - DNA, 15 bp, Homo sapiens
tcacctgcaaccttg

SEQ ID NO: 672833 - DNA, 15 bp, Homo sapiens
cacctgcaaccttgt

SEQ ID NO: 672834 - DNA, 15 bp, Homo sapiens
acctgcaaccttgtc

SEQ ID NO: 672835 - DNA, 15 bp, Homo sapiens
cctgcaaccttgtca

SEQ ID NO: 672836 - DNA, 15 bp, Homo sapiens
ctgcaaccttgtcaa

SEQ ID NO: 672837 - DNA, 15 bp, Homo sapiens
tgcaaccttgtcaac

SEQ ID NO: 672838 - DNA, 15 bp, Homo sapiens
gcaaccttgtcaacc

SEQ ID NO: 672839 - DNA, 15 bp, Homo sapiens
caaccttgtcaacca

SEQ ID NO: 672840 - DNA, 15 bp, Homo sapiens
aaccttgtcaaccac

SEQ ID NO: 672841 - DNA, 15 bp, Homo sapiens
accttgtcaaccacc

SEQ ID NO: 672842 - DNA, 15 bp, Homo sapiens
ccttgtcaaccacct

SEQ ID NO: 672843 - DNA, 15 bp, Homo sapiens
cttgtcaaccaccta

SEQ ID NO: 672844 - DNA, 15 bp, Homo sapiens
ttgtcaaccacctag

SEQ ID NO: 672845 - DNA, 15 bp, Homo sapiens
tgtcaaccacctaga

SEQ ID NO: 672846 - DNA, 15 bp, Homo sapiens
gtcaaccacctagaa

SEQ ID NO: 672847 - DNA, 15 bp, Homo sapiens
tcaaccacctagaat

SEQ ID NO: 672848 - DNA, 15 bp, Homo sapiens
caaccacctagaata

SEQ ID NO: 672849 - DNA, 15 bp, Homo sapiens
aaccacctagaataa

SEQ ID NO: 672850 - DNA, 15 bp, Homo sapiens
accacctagaataaa

SEQ ID NO: 672851 - DNA, 15 bp, Homo sapiens
ccacctagaataaaa

SEQ ID NO: 672852 - DNA, 15 bp, Homo sapiens
cacctagaataaaag

SEQ ID NO: 672853 - DNA, 15 bp, Homo sapiens
acctagaataaaagc

SEQ ID NO: 672854 - DNA, 15 bp, Homo sapiens
cctagaataaaagcc

SEQ ID NO: 672855 - DNA, 15 bp, Homo sapiens
ctagaataaaagcct

SEQ ID NO: 672856 - DNA, 15 bp, Homo sapiens
tagaataaaagcctc

SEQ ID NO: 672857 - DNA, 15 bp, Homo sapiens
agaataaaagcctct

SEQ ID NO: 672858 - DNA, 15 bp, Homo sapiens
gaataaaagcctctg

SEQ ID NO: 672859 - DNA, 15 bp, Homo sapiens
aataaaagcctctgc

SEQ ID NO: 672860 - DNA, 15 bp, Homo sapiens
ataaaagcctctgca

SEQ ID NO: 672861 - DNA, 15 bp, Homo sapiens
taaaagcctctgcag

SEQ ID NO: 672862 - DNA, 15 bp, Homo sapiens
aaaagcctctgcagc

SEQ ID NO: 672863 - DNA, 15 bp, Homo sapiens
aaagcctctgcagcc

SEQ ID NO: 672864 - DNA, 15 bp, Homo sapiens
aagcctctgcagccc

SEQ ID NO: 672865 - DNA, 15 bp, Homo sapiens
agcctctgcagccct

SEQ ID NO: 672866 - DNA, 15 bp, Homo sapiens
gcctctgcagccctc

SEQ ID NO: 672867 - DNA, 15 bp, Homo sapiens
cctctgcagccctcc

SEQ ID NO: 672868 - DNA, 15 bp, Homo sapiens
ctctgcagccctccc

SEQ ID NO: 672869 - DNA, 15 bp, Homo sapiens
tctgcagccctcccc

SEQ ID NO: 672870 - DNA, 15 bp, Homo sapiens
ctgcagccctcccct

SEQ ID NO: 672871 - DNA, 15 bp, Homo sapiens
tgcagccctccccta

SEQ ID NO: 672872 - DNA, 15 bp, Homo sapiens
gcagccctcccctaa

SEQ ID NO: 672873 - DNA, 15 bp, Homo sapiens
cagccctcccctaaa

SEQ ID NO: 672874 - DNA, 15 bp, Homo sapiens
agccctcccctaaag

SEQ ID NO: 672875 - DNA, 15 bp, Homo sapiens
gccctcccctaaaga

SEQ ID NO: 672876 - DNA, 15 bp, Homo sapiens
ccctcccctaaagac

SEQ ID NO: 672877 - DNA, 15 bp, Homo sapiens
cctcccctaaagact

SEQ ID NO: 672878 - DNA, 15 bp, Homo sapiens
ctcccctaaagactc

SEQ ID NO: 672879 - DNA, 15 bp, Homo sapiens
tcccctaaagactca

SEQ ID NO: 672880 - DNA, 15 bp, Homo sapiens
cccctaaagactcat

SEQ ID NO: 672881 - DNA, 15 bp, Homo sapiens
ccctaaagactcatc

SEQ ID NO: 672882 - DNA, 15 bp, Homo sapiens
cctaaagactcatca

SEQ ID NO: 672883 - DNA, 15 bp, Homo sapiens
ctaaagactcatcaa

SEQ ID NO: 672884 - DNA, 15 bp, Homo sapiens
taaagactcatcaat

SEQ ID NO: 672885 - DNA, 15 bp, Homo sapiens
aaagactcatcaatg

SEQ ID NO: 672886 - DNA, 15 bp, Homo sapiens
aagactcatcaatgt

SEQ ID NO: 672887 - DNA, 15 bp, Homo sapiens
agactcatcaatgtg

SEQ ID NO: 672888 - DNA, 15 bp, Homo sapiens
gactcatcaatgtga

SEQ ID NO: 672889 - DNA, 15 bp, Homo sapiens
actcatcaatgtgag

SEQ ID NO: 672890 - DNA, 15 bp, Homo sapiens
ctcatcaatgtgagg

SEQ ID NO: 672891 - DNA, 15 bp, Homo sapiens
tcatcaatgtgaggc

SEQ ID NO: 672892 - DNA, 15 bp, Homo sapiens
catcaatgtgaggct

SEQ ID NO: 672893 - DNA, 15 bp, Homo sapiens
atcaatgtgaggctc

SEQ ID NO: 672894 - DNA, 15 bp, Homo sapiens
tcaatgtgaggctca

SEQ ID NO: 672895 - DNA, 15 bp, Homo sapiens
caatgtgaggctcaa

SEQ ID NO: 672896 - DNA, 15 bp, Homo sapiens
aatgtgaggctcaag

SEQ ID NO: 672897 - DNA, 15 bp, Homo sapiens
atgtgaggctcaaga

SEQ ID NO: 672898 - DNA, 15 bp, Homo sapiens
tgtgaggctcaagaa

SEQ ID NO: 672899 - DNA, 15 bp, Homo sapiens
gtgaggctcaagaac

SEQ ID NO: 672900 - DNA, 15 bp, Homo sapiens
tgaggctcaagaacc

SEQ ID NO: 672901 - DNA, 15 bp, Homo sapiens
gaggctcaagaacct

SEQ ID NO: 672902 - DNA, 15 bp, Homo sapiens
aggctcaagaacctt

SEQ ID NO: 672903 - DNA, 15 bp, Homo sapiens
ggctcaagaaccttc

SEQ ID NO: 672904 - DNA, 15 bp, Homo sapiens
gctcaagaaccttct

SEQ ID NO: 672905 - DNA, 15 bp, Homo sapiens
ctcaagaaccttctt

SEQ ID NO: 672906 - DNA, 15 bp, Homo sapiens
tcaagaaccttctta

SEQ ID NO: 672907 - DNA, 15 bp, Homo sapiens
caagaaccttcttag

SEQ ID NO: 672908 - DNA, 15 bp, Homo sapiens
aagaaccttcttagg

SEQ ID NO: 672909 - DNA, 15 bp, Homo sapiens
agaaccttcttaggc

SEQ ID NO: 672910 - DNA, 15 bp, Homo sapiens
gaaccttcttaggct

SEQ ID NO: 672911 - DNA, 15 bp, Homo sapiens
aaccttcttaggctg

SEQ ID NO: 672912 - DNA, 15 bp, Homo sapiens
accttcttaggctgg

SEQ ID NO: 672913 - DNA, 15 bp, Homo sapiens
ccttcttaggctggg

SEQ ID NO: 672914 - DNA, 15 bp, Homo sapiens
cttcttaggctgggc

SEQ ID NO: 672915 - DNA, 15 bp, Homo sapiens
ttcttaggctgggct

SEQ ID NO: 672916 - DNA, 15 bp, Homo sapiens
tcttaggctgggctc

SEQ ID NO: 672917 - DNA, 15 bp, Homo sapiens
cttaggctgggctcg

SEQ ID NO: 672918 - DNA, 15 bp, Homo sapiens
ttaggctgggctcgg

SEQ ID NO: 672919 - DNA, 15 bp, Homo sapiens
taggctgggctcggt

SEQ ID NO: 672920 - DNA, 15 bp, Homo sapiens
aggctgggctcggtg

SEQ ID NO: 672921 - DNA, 15 bp, Homo sapiens
ggctgggctcggtgg

SEQ ID NO: 672922 - DNA, 15 bp, Homo sapiens
gctgggctcggtggc

SEQ ID NO: 672923 - DNA, 15 bp, Homo sapiens
ctgggctcggtggct

SEQ ID NO: 672924 - DNA, 15 bp, Homo sapiens
tgggctcggtggctc

SEQ ID NO: 672925 - DNA, 15 bp, Homo sapiens
gggctcggtggctca

SEQ ID NO: 672926 - DNA, 15 bp, Homo sapiens
ggctcggtggctcat

SEQ ID NO: 672927 - DNA, 15 bp, Homo sapiens
gctcggtggctcatt

SEQ ID NO: 672928 - DNA, 15 bp, Homo sapiens
ctcggtggctcattt

SEQ ID NO: 672929 - DNA, 15 bp, Homo sapiens
tcggtggctcatttc

SEQ ID NO: 672930 - DNA, 15 bp, Homo sapiens
cggtggctcatttct

SEQ ID NO: 672931 - DNA, 15 bp, Homo sapiens
ggtggctcatttctg

SEQ ID NO: 672932 - DNA, 15 bp, Homo sapiens
gtggctcatttctgt

SEQ ID NO: 672933 - DNA, 15 bp, Homo sapiens
tggctcatttctgta

SEQ ID NO: 672934 - DNA, 15 bp, Homo sapiens
ggctcatttctgtaa

SEQ ID NO: 672935 - DNA, 15 bp, Homo sapiens
gctcatttctgtaat

SEQ ID NO: 672936 - DNA, 15 bp, Homo sapiens
ctcatttctgtaatc

SEQ ID NO: 672937 - DNA, 15 bp, Homo sapiens
tcatttctgtaatcc

SEQ ID NO: 672938 - DNA, 15 bp, Homo sapiens
catttctgtaatccc

SEQ ID NO: 672939 - DNA, 15 bp, Homo sapiens
atttctgtaatccct

SEQ ID NO: 672940 - DNA, 15 bp, Homo sapiens
tttctgtaatccctg

SEQ ID NO: 672941 - DNA, 15 bp, Homo sapiens
ttctgtaatccctgc

SEQ ID NO: 672942 - DNA, 15 bp, Homo sapiens
tctgtaatccctgca

SEQ ID NO: 672943 - DNA, 15 bp, Homo sapiens
ctgtaatccctgcac

SEQ ID NO: 672944 - DNA, 15 bp, Homo sapiens
tgtaatccctgcact

SEQ ID NO: 672945 - DNA, 15 bp, Homo sapiens
gtaatccctgcactt

SEQ ID NO: 672946 - DNA, 15 bp, Homo sapiens
taatccctgcacttt

SEQ ID NO: 672947 - DNA, 15 bp, Homo sapiens
aatccctgcactttg

SEQ ID NO: 672948 - DNA, 15 bp, Homo sapiens
atccctgcactttgg

SEQ ID NO: 672949 - DNA, 15 bp, Homo sapiens
tccctgcactttgga

SEQ ID NO: 672950 - DNA, 15 bp, Homo sapiens
ccctgcactttggaa

SEQ ID NO: 672951 - DNA, 15 bp, Homo sapiens
cctgcactttggaag

SEQ ID NO: 672952 - DNA, 15 bp, Homo sapiens
ctgcactttggaagg

SEQ ID NO: 672953 - DNA, 15 bp, Homo sapiens
tgcactttggaaggc

SEQ ID NO: 672954 - DNA, 15 bp, Homo sapiens
gcactttggaaggct

SEQ ID NO: 672955 - DNA, 15 bp, Homo sapiens
cactttggaaggctg

SEQ ID NO: 672956 - DNA, 15 bp, Homo sapiens
actttggaaggctga

SEQ ID NO: 672957 - DNA, 15 bp, Homo sapiens
ctttggaaggctgag

SEQ ID NO: 672958 - DNA, 15 bp, Homo sapiens
tttggaaggctgagg

SEQ ID NO: 672959 - DNA, 15 bp, Homo sapiens
gaggcaggaggatct

SEQ ID NO: 672960 - DNA, 15 bp, Homo sapiens
aggcaggaggatctc

SEQ ID NO: 672961 - DNA, 15 bp, Homo sapiens
ggcaggaggatctct

SEQ ID NO: 672962 - DNA, 15 bp, Homo sapiens
gaggatctcttgagg

SEQ ID NO: 672963 - DNA, 15 bp, Homo sapiens
aggatctcttgaggc

SEQ ID NO: 672964 - DNA, 15 bp, Homo sapiens
ggatctcttgaggcc

SEQ ID NO: 672965 - DNA, 15 bp, Homo sapiens
gatctcttgaggcca

SEQ ID NO: 672966 - DNA, 15 bp, Homo sapiens
atctcttgaggccag

SEQ ID NO: 672967 - DNA, 15 bp, Homo sapiens
tctcttgaggccagg

SEQ ID NO: 672968 - DNA, 15 bp, Homo sapiens
ctcttgaggccagga

SEQ ID NO: 672969 - DNA, 15 bp, Homo sapiens
tcttgaggccaggag

SEQ ID NO: 672970 - DNA, 15 bp, Homo sapiens
cttgaggccaggagt

SEQ ID NO: 672971 - DNA, 15 bp, Homo sapiens
ttgaggccaggagtt

SEQ ID NO: 672972 - DNA, 15 bp, Homo sapiens
tgaggccaggagttc

SEQ ID NO: 672973 - DNA, 15 bp, Homo sapiens
gaggccaggagttca

SEQ ID NO: 672974 - DNA, 15 bp, Homo sapiens
aggccaggagttcaa

SEQ ID NO: 672975 - DNA, 15 bp, Homo sapiens
ggccaggagttcaag

SEQ ID NO: 672976 - DNA, 15 bp, Homo sapiens
gccaggagttcaaga

SEQ ID NO: 672977 - DNA, 15 bp, Homo sapiens
caggagttcaagaca

SEQ ID NO: 672978 - DNA, 15 bp, Homo sapiens
aggagttcaagacaa

SEQ ID NO: 672979 - DNA, 15 bp, Homo sapiens
ggagttcaagacaag

SEQ ID NO: 672980 - DNA, 15 bp, Homo sapiens
gagttcaagacaagc

SEQ ID NO: 672981 - DNA, 15 bp, Homo sapiens
agttcaagacaagcc

SEQ ID NO: 672982 - DNA, 15 bp, Homo sapiens
gttcaagacaagcct

SEQ ID NO: 672983 - DNA, 15 bp, Homo sapiens
ttcaagacaagcctg

SEQ ID NO: 672984 - DNA, 15 bp, Homo sapiens
tcaagacaagcctgg

SEQ ID NO: 672985 - DNA, 15 bp, Homo sapiens
caagacaagcctggg

SEQ ID NO: 672986 - DNA, 15 bp, Homo sapiens
aagacaagcctgggc

SEQ ID NO: 672987 - DNA, 15 bp, Homo sapiens
agacaagcctgggca

SEQ ID NO: 672988 - DNA, 15 bp, Homo sapiens
gacaagcctgggcaa

SEQ ID NO: 672989 - DNA, 15 bp, Homo sapiens
acaagcctgggcaac

SEQ ID NO: 672990 - DNA, 15 bp, Homo sapiens
caagcctgggcaaca

SEQ ID NO: 672991 - DNA, 15 bp, Homo sapiens
aagcctgggcaacat

SEQ ID NO: 672992 - DNA, 15 bp, Homo sapiens
ctgggcaacatagcc

SEQ ID NO: 672993 - DNA, 15 bp, Homo sapiens
tgggcaacatagcca

SEQ ID NO: 672994 - DNA, 15 bp, Homo sapiens
gggcaacatagccag

SEQ ID NO: 672995 - DNA, 15 bp, Homo sapiens
ggcaacatagccaga

SEQ ID NO: 672996 - DNA, 15 bp, Homo sapiens
gcaacatagccagac

SEQ ID NO: 672997 - DNA, 15 bp, Homo sapiens
caacatagccagacc

SEQ ID NO: 672998 - DNA, 15 bp, Homo sapiens
aacatagccagacct

SEQ ID NO: 672999 - DNA, 15 bp, Homo sapiens
acatagccagacctc

SEQ ID NO: 673000 - DNA, 15 bp, Homo sapiens
catagccagacctct

SEQ ID NO: 673001 - DNA, 15 bp, Homo sapiens
atagccagacctctg

SEQ ID NO: 673002 - DNA, 15 bp, Homo sapiens
tagccagacctctgt

SEQ ID NO: 673003 - DNA, 15 bp, Homo sapiens
agccagacctctgtt

SEQ ID NO: 673004 - DNA, 15 bp, Homo sapiens
gccagacctctgttt

SEQ ID NO: 673005 - DNA, 15 bp, Homo sapiens
ccagacctctgtttc

SEQ ID NO: 673006 - DNA, 15 bp, Homo sapiens
cagacctctgtttct

SEQ ID NO: 673007 - DNA, 15 bp, Homo sapiens
agacctctgtttcta

SEQ ID NO: 673008 - DNA, 15 bp, Homo sapiens
gacctctgtttctat

SEQ ID NO: 673009 - DNA, 15 bp, Homo sapiens
acctctgtttctatc

SEQ ID NO: 673010 - DNA, 15 bp, Homo sapiens
cctctgtttctatcc

SEQ ID NO: 673011 - DNA, 15 bp, Homo sapiens
ctctgtttctatccc

SEQ ID NO: 673012 - DNA, 15 bp, Homo sapiens
tctgtttctatcccc

SEQ ID NO: 673013 - DNA, 15 bp, Homo sapiens
ctgtttctatccccc

SEQ ID NO: 673014 - DNA, 15 bp, Homo sapiens
tgtttctatccccca

SEQ ID NO: 673015 - DNA, 15 bp, Homo sapiens
gtttctatcccccac

SEQ ID NO: 673016 - DNA, 15 bp, Homo sapiens
tttctatcccccaca

SEQ ID NO: 673017 - DNA, 15 bp, Homo sapiens
ttctatcccccacaa

SEQ ID NO: 673018 - DNA, 15 bp, Homo sapiens
tctatcccccacaaa

SEQ ID NO: 673019 - DNA, 15 bp, Homo sapiens
ctatcccccacaaaa

SEQ ID NO: 673020 - DNA, 15 bp, Homo sapiens
tatcccccacaaaaa

SEQ ID NO: 673021 - DNA, 15 bp, Homo sapiens
atcccccacaaaaag

SEQ ID NO: 673022 - DNA, 15 bp, Homo sapiens
tcccccacaaaaaga

SEQ ID NO: 673023 - DNA, 15 bp, Homo sapiens
cccccacaaaaagaa

SEQ ID NO: 673024 - DNA, 15 bp, Homo sapiens
ccccacaaaaagaac

SEQ ID NO: 673025 - DNA, 15 bp, Homo sapiens
cccacaaaaagaacc

SEQ ID NO: 673026 - DNA, 15 bp, Homo sapiens
ccacaaaaagaacct

SEQ ID NO: 673027 - DNA, 15 bp, Homo sapiens
cacaaaaagaacctt

SEQ ID NO: 673028 - DNA, 15 bp, Homo sapiens
acaaaaagaaccttc

SEQ ID NO: 673029 - DNA, 15 bp, Homo sapiens
caaaaagaaccttct

SEQ ID NO: 673030 - DNA, 15 bp, Homo sapiens
aaaaagaaccttctt

SEQ ID NO: 673031 - DNA, 15 bp, Homo sapiens
aaaagaaccttctta

SEQ ID NO: 673032 - DNA, 15 bp, Homo sapiens
aaagaaccttcttaa

SEQ ID NO: 673033 - DNA, 15 bp, Homo sapiens
aagaaccttcttaaa

SEQ ID NO: 673034 - DNA, 15 bp, Homo sapiens
agaaccttcttaaac

SEQ ID NO: 673035 - DNA, 15 bp, Homo sapiens
gaaccttcttaaacc

SEQ ID NO: 673036 - DNA, 15 bp, Homo sapiens
aaccttcttaaaccg

SEQ ID NO: 673037 - DNA, 15 bp, Homo sapiens
accttcttaaaccgg

SEQ ID NO: 673038 - DNA, 15 bp, Homo sapiens
ccttcttaaaccgga

SEQ ID NO: 673039 - DNA, 15 bp, Homo sapiens
cttcttaaaccggaa

SEQ ID NO: 673040 - DNA, 15 bp, Homo sapiens
ttcttaaaccggaat

SEQ ID NO: 673041 - DNA, 15 bp, Homo sapiens
tcttaaaccggaatt

SEQ ID NO: 673042 - DNA, 15 bp, Homo sapiens
cttaaaccggaattg

SEQ ID NO: 673043 - DNA, 15 bp, Homo sapiens
ttaaaccggaattga

SEQ ID NO: 673044 - DNA, 15 bp, Homo sapiens
taaaccggaattgag

SEQ ID NO: 673045 - DNA, 15 bp, Homo sapiens
aaaccggaattgagt

SEQ ID NO: 673046 - DNA, 15 bp, Homo sapiens
aaccggaattgagtc

SEQ ID NO: 673047 - DNA, 15 bp, Homo sapiens
accggaattgagtcc

SEQ ID NO: 673048 - DNA, 15 bp, Homo sapiens
ccggaattgagtcct

SEQ ID NO: 673049 - DNA, 15 bp, Homo sapiens
cggaattgagtccta

SEQ ID NO: 673050 - DNA, 15 bp, Homo sapiens
ggaattgagtcctac

SEQ ID NO: 673051 - DNA, 15 bp, Homo sapiens
gaattgagtcctaca

SEQ ID NO: 673052 - DNA, 15 bp, Homo sapiens
aattgagtcctacaa

SEQ ID NO: 673053 - DNA, 15 bp, Homo sapiens
attgagtcctacaac

SEQ ID NO: 673054 - DNA, 15 bp, Homo sapiens
ttgagtcctacaacc

SEQ ID NO: 673055 - DNA, 15 bp, Homo sapiens
tgagtcctacaacct

SEQ ID NO: 673056 - DNA, 15 bp, Homo sapiens
gagtcctacaacctc

SEQ ID NO: 673057 - DNA, 15 bp, Homo sapiens
agtcctacaacctcg

SEQ ID NO: 673058 - DNA, 15 bp, Homo sapiens
gtcctacaacctcga

SEQ ID NO: 673059 - DNA, 15 bp, Homo sapiens
tcctacaacctcgat

SEQ ID NO: 673060 - DNA, 15 bp, Homo sapiens
cctacaacctcgata

SEQ ID NO: 673061 - DNA, 15 bp, Homo sapiens
ctacaacctcgataa

SEQ ID NO: 673062 - DNA, 15 bp, Homo sapiens
tacaacctcgataac

SEQ ID NO: 673063 - DNA, 15 bp, Homo sapiens
acaacctcgataact

SEQ ID NO: 673064 - DNA, 15 bp, Homo sapiens
caacctcgataactc

SEQ ID NO: 673065 - DNA, 15 bp, Homo sapiens
aacctcgataactca

SEQ ID NO: 673066 - DNA, 15 bp, Homo sapiens
acctcgataactcac

SEQ ID NO: 673067 - DNA, 15 bp, Homo sapiens
cctcgataactcaca

SEQ ID NO: 673068 - DNA, 15 bp, Homo sapiens
ctcgataactcacaa

SEQ ID NO: 673069 - DNA, 15 bp, Homo sapiens
tcgataactcacaaa

SEQ ID NO: 673070 - DNA, 15 bp, Homo sapiens
cgataactcacaaat

SEQ ID NO: 673071 - DNA, 15 bp, Homo sapiens
gataactcacaaata

SEQ ID NO: 673072 - DNA, 15 bp, Homo sapiens
ataactcacaaataa

SEQ ID NO: 673073 - DNA, 15 bp, Homo sapiens
taactcacaaataag

SEQ ID NO: 673074 - DNA, 15 bp, Homo sapiens
aactcacaaataagc

SEQ ID NO: 673075 - DNA, 15 bp, Homo sapiens
actcacaaataagcc

SEQ ID NO: 673076 - DNA, 15 bp, Homo sapiens
ctcacaaataagccc

SEQ ID NO: 673077 - DNA, 15 bp, Homo sapiens
tcacaaataagcccg

SEQ ID NO: 673078 - DNA, 15 bp, Homo sapiens
cacaaataagcccgt

SEQ ID NO: 673079 - DNA, 15 bp, Homo sapiens
acaaataagcccgtg

SEQ ID NO: 673080 - DNA, 15 bp, Homo sapiens
caaataagcccgtgt

SEQ ID NO: 673081 - DNA, 15 bp, Homo sapiens
aaataagcccgtgtg

SEQ ID NO: 673082 - DNA, 15 bp, Homo sapiens
aataagcccgtgtgg

SEQ ID NO: 673083 - DNA, 15 bp, Homo sapiens
ataagcccgtgtggc

SEQ ID NO: 673084 - DNA, 15 bp, Homo sapiens
taagcccgtgtggcc

SEQ ID NO: 673085 - DNA, 15 bp, Homo sapiens
aagcccgtgtggcct

SEQ ID NO: 673086 - DNA, 15 bp, Homo sapiens
agcccgtgtggcctc

SEQ ID NO: 673087 - DNA, 15 bp, Homo sapiens
gcccgtgtggcctct

SEQ ID NO: 673088 - DNA, 15 bp, Homo sapiens
cccgtgtggcctctc

SEQ ID NO: 673089 - DNA, 15 bp, Homo sapiens
ccgtgtggcctctca

SEQ ID NO: 673090 - DNA, 15 bp, Homo sapiens
cgtgtggcctctcac

SEQ ID NO: 673091 - DNA, 15 bp, Homo sapiens
gtgtggcctctcaca

SEQ ID NO: 673092 - DNA, 15 bp, Homo sapiens
tgtggcctctcacag

SEQ ID NO: 673093 - DNA, 15 bp, Homo sapiens
gtggcctctcacaga

SEQ ID NO: 673094 - DNA, 15 bp, Homo sapiens
tggcctctcacagac

SEQ ID NO: 673095 - DNA, 15 bp, Homo sapiens
ggcctctcacagact

SEQ ID NO: 673096 - DNA, 15 bp, Homo sapiens
gcctctcacagactt

SEQ ID NO: 673097 - DNA, 15 bp, Homo sapiens
cctctcacagacttg

SEQ ID NO: 673098 - DNA, 15 bp, Homo sapiens
ctctcacagacttgg

SEQ ID NO: 673099 - DNA, 15 bp, Homo sapiens
tctcacagacttggg

SEQ ID NO: 673100 - DNA, 15 bp, Homo sapiens
ctcacagacttggga

SEQ ID NO: 673101 - DNA, 15 bp, Homo sapiens
tcacagacttgggaa

SEQ ID NO: 673102 - DNA, 15 bp, Homo sapiens
cacagacttgggaag

SEQ ID NO: 673103 - DNA, 15 bp, Homo sapiens
acagacttgggaagt

SEQ ID NO: 673104 - DNA, 15 bp, Homo sapiens
cagacttgggaagtt

SEQ ID NO: 673105 - DNA, 15 bp, Homo sapiens
agacttgggaagttc

SEQ ID NO: 673106 - DNA, 15 bp, Homo sapiens
gacttgggaagttct

SEQ ID NO: 673107 - DNA, 15 bp, Homo sapiens
acttgggaagttctc

SEQ ID NO: 673108 - DNA, 15 bp, Homo sapiens
cttgggaagttctcc

SEQ ID NO: 673109 - DNA, 15 bp, Homo sapiens
ttgggaagttctcca

SEQ ID NO: 673110 - DNA, 15 bp, Homo sapiens
tgggaagttctccaa

SEQ ID NO: 673111 - DNA, 15 bp, Homo sapiens
gggaagttctccaag

SEQ ID NO: 673112 - DNA, 15 bp, Homo sapiens
ggaagttctccaagt

SEQ ID NO: 673113 - DNA, 15 bp, Homo sapiens
gaagttctccaagtg

SEQ ID NO: 673114 - DNA, 15 bp, Homo sapiens
aagttctccaagtgt

SEQ ID NO: 673115 - DNA, 15 bp, Homo sapiens
agttctccaagtgtc

SEQ ID NO: 673116 - DNA, 15 bp, Homo sapiens
gttctccaagtgtcc

SEQ ID NO: 673117 - DNA, 15 bp, Homo sapiens
ttctccaagtgtcca

SEQ ID NO: 673118 - DNA, 15 bp, Homo sapiens
tctccaagtgtccag

SEQ ID NO: 673119 - DNA, 15 bp, Homo sapiens
ctccaagtgtccagg

SEQ ID NO: 673120 - DNA, 15 bp, Homo sapiens
tccaagtgtccaggg

SEQ ID NO: 673121 - DNA, 15 bp, Homo sapiens
ccaagtgtccaggga

SEQ ID NO: 673122 - DNA, 15 bp, Homo sapiens
caagtgtccagggag

SEQ ID NO: 673123 - DNA, 15 bp, Homo sapiens
aagtgtccagggaga

SEQ ID NO: 673124 - DNA, 15 bp, Homo sapiens
agtgtccagggagat

SEQ ID NO: 673125 - DNA, 15 bp, Homo sapiens
gtgtccagggagatg

SEQ ID NO: 673126 - DNA, 15 bp, Homo sapiens
tgtccagggagatgt

SEQ ID NO: 673127 - DNA, 15 bp, Homo sapiens
gtccagggagatgtg

SEQ ID NO: 673128 - DNA, 15 bp, Homo sapiens
tccagggagatgtgc

SEQ ID NO: 673129 - DNA, 15 bp, Homo sapiens
ccagggagatgtgcc

SEQ ID NO: 673130 - DNA, 15 bp, Homo sapiens
cagggagatgtgcca

SEQ ID NO: 673131 - DNA, 15 bp, Homo sapiens
agggagatgtgccag

SEQ ID NO: 673132 - DNA, 15 bp, Homo sapiens
gggagatgtgccagg

SEQ ID NO: 673133 - DNA, 15 bp, Homo sapiens
ggagatgtgccaggc

SEQ ID NO: 673134 - DNA, 15 bp, Homo sapiens
gagatgtgccaggcg

SEQ ID NO: 673135 - DNA, 15 bp, Homo sapiens
agatgtgccaggcgc

SEQ ID NO: 673136 - DNA, 15 bp, Homo sapiens
gatgtgccaggcgct

SEQ ID NO: 673137 - DNA, 15 bp, Homo sapiens
atgtgccaggcgctt

SEQ ID NO: 673138 - DNA, 15 bp, Homo sapiens
tgtgccaggcgcttt

SEQ ID NO: 673139 - DNA, 15 bp, Homo sapiens
gtgccaggcgctttc

SEQ ID NO: 673140 - DNA, 15 bp, Homo sapiens
tgccaggcgctttcc

SEQ ID NO: 673141 - DNA, 15 bp, Homo sapiens
gccaggcgctttcct

SEQ ID NO: 673142 - DNA, 15 bp, Homo sapiens
ccaggcgctttcctg

SEQ ID NO: 673143 - DNA, 15 bp, Homo sapiens
caggcgctttcctgc

SEQ ID NO: 673144 - DNA, 15 bp, Homo sapiens
aggcgctttcctgcc

SEQ ID NO: 673145 - DNA, 15 bp, Homo sapiens
ggcgctttcctgccg

SEQ ID NO: 673146 - DNA, 15 bp, Homo sapiens
gcgctttcctgccgt

SEQ ID NO: 673147 - DNA, 15 bp, Homo sapiens
cgctttcctgccgtg

SEQ ID NO: 673148 - DNA, 15 bp, Homo sapiens
gctttcctgccgtga

SEQ ID NO: 673149 - DNA, 15 bp, Homo sapiens
ctttcctgccgtgac

SEQ ID NO: 673150 - DNA, 15 bp, Homo sapiens
tttcctgccgtgacc

SEQ ID NO: 673151 - DNA, 15 bp, Homo sapiens
ttcctgccgtgacca

SEQ ID NO: 673152 - DNA, 15 bp, Homo sapiens
tcctgccgtgaccac

SEQ ID NO: 673153 - DNA, 15 bp, Homo sapiens
cctgccgtgaccacc

SEQ ID NO: 673154 - DNA, 15 bp, Homo sapiens
ctgccgtgaccaccg

SEQ ID NO: 673155 - DNA, 15 bp, Homo sapiens
tgccgtgaccaccgt

SEQ ID NO: 673156 - DNA, 15 bp, Homo sapiens
gccgtgaccaccgtc

SEQ ID NO: 673157 - DNA, 15 bp, Homo sapiens
ccgtgaccaccgtcc

SEQ ID NO: 673158 - DNA, 15 bp, Homo sapiens
cgtgaccaccgtcct

SEQ ID NO: 673159 - DNA, 15 bp, Homo sapiens
gtgaccaccgtcctc

SEQ ID NO: 673160 - DNA, 15 bp, Homo sapiens
tgaccaccgtcctct

SEQ ID NO: 673161 - DNA, 15 bp, Homo sapiens
gaccaccgtcctctg

SEQ ID NO: 673162 - DNA, 15 bp, Homo sapiens
accaccgtcctctgc

SEQ ID NO: 673163 - DNA, 15 bp, Homo sapiens
ccaccgtcctctgcc

SEQ ID NO: 673164 - DNA, 15 bp, Homo sapiens
caccgtcctctgcct

SEQ ID NO: 673165 - DNA, 15 bp, Homo sapiens
accgtcctctgcctg

SEQ ID NO: 673166 - DNA, 15 bp, Homo sapiens
ccgtcctctgcctgc

SEQ ID NO: 673167 - DNA, 15 bp, Homo sapiens
cgtcctctgcctgct

SEQ ID NO: 673168 - DNA, 15 bp, Homo sapiens
gtcctctgcctgctc

SEQ ID NO: 673169 - DNA, 15 bp, Homo sapiens
tcctctgcctgctcc

SEQ ID NO: 673170 - DNA, 15 bp, Homo sapiens
cctctgcctgctcca

SEQ ID NO: 673171 - DNA, 15 bp, Homo sapiens
ctctgcctgctccat

SEQ ID NO: 673172 - DNA, 15 bp, Homo sapiens
tctgcctgctccatt

SEQ ID NO: 673173 - DNA, 15 bp, Homo sapiens
ctgcctgctccattt

SEQ ID NO: 673174 - DNA, 15 bp, Homo sapiens
tgcctgctccatttc

SEQ ID NO: 673175 - DNA, 15 bp, Homo sapiens
gcctgctccatttct

SEQ ID NO: 673176 - DNA, 15 bp, Homo sapiens
cctgctccatttctt

SEQ ID NO: 673177 - DNA, 15 bp, Homo sapiens
ctgctccatttcttg

SEQ ID NO: 673178 - DNA, 15 bp, Homo sapiens
tgctccatttcttgg

SEQ ID NO: 673179 - DNA, 15 bp, Homo sapiens
gctccatttcttggt

SEQ ID NO: 673180 - DNA, 15 bp, Homo sapiens
ctccatttcttggtg

SEQ ID NO: 673181 - DNA, 15 bp, Homo sapiens
tccatttcttggtgg

SEQ ID NO: 673182 - DNA, 15 bp, Homo sapiens
ccatttcttggtggc

SEQ ID NO: 673183 - DNA, 15 bp, Homo sapiens
catttcttggtggcc

SEQ ID NO: 673184 - DNA, 15 bp, Homo sapiens
atttcttggtggcct

SEQ ID NO: 673185 - DNA, 15 bp, Homo sapiens
tttcttggtggcctt

SEQ ID NO: 673186 - DNA, 15 bp, Homo sapiens
ttcttggtggccttc

SEQ ID NO: 673187 - DNA, 15 bp, Homo sapiens
tcttggtggccttcc

SEQ ID NO: 673188 - DNA, 15 bp, Homo sapiens
cttggtggccttcct

SEQ ID NO: 673189 - DNA, 15 bp, Homo sapiens
ttggtggccttcctt

SEQ ID NO: 673190 - DNA, 15 bp, Homo sapiens
tggtggccttccttt

SEQ ID NO: 673191 - DNA, 15 bp, Homo sapiens
ggtggccttccttta

SEQ ID NO: 673192 - DNA, 15 bp, Homo sapiens
gtggccttcctttag

SEQ ID NO: 673193 - DNA, 15 bp, Homo sapiens
tggccttcctttaga

SEQ ID NO: 673194 - DNA, 15 bp, Homo sapiens
ggccttcctttagac

SEQ ID NO: 673195 - DNA, 15 bp, Homo sapiens
gccttcctttagacc

SEQ ID NO: 673196 - DNA, 15 bp, Homo sapiens
ccttcctttagacct

SEQ ID NO: 673197 - DNA, 15 bp, Homo sapiens
cttcctttagacctg

SEQ ID NO: 673198 - DNA, 15 bp, Homo sapiens
ttcctttagacctgg

SEQ ID NO: 673199 - DNA, 15 bp, Homo sapiens
tcctttagacctggg

SEQ ID NO: 673200 - DNA, 15 bp, Homo sapiens
cctttagacctgggc

SEQ ID NO: 673201 - DNA, 15 bp, Homo sapiens
ctttagacctgggcc

SEQ ID NO: 673202 - DNA, 15 bp, Homo sapiens
tttagacctgggcct

SEQ ID NO: 673203 - DNA, 15 bp, Homo sapiens
ttagacctgggcctc

SEQ ID NO: 673204 - DNA, 15 bp, Homo sapiens
tagacctgggcctca

SEQ ID NO: 673205 - DNA, 15 bp, Homo sapiens
agacctgggcctcac

SEQ ID NO: 673206 - DNA, 15 bp, Homo sapiens
gacctgggcctcact

SEQ ID NO: 673207 - DNA, 15 bp, Homo sapiens
acctgggcctcactc

SEQ ID NO: 673208 - DNA, 15 bp, Homo sapiens
cctgggcctcactct

SEQ ID NO: 673209 - DNA, 15 bp, Homo sapiens
ctgggcctcactctt

SEQ ID NO: 673210 - DNA, 15 bp, Homo sapiens
tgggcctcactcttg

SEQ ID NO: 673211 - DNA, 15 bp, Homo sapiens
gggcctcactcttgc

SEQ ID NO: 673212 - DNA, 15 bp, Homo sapiens
ggcctcactcttgct

SEQ ID NO: 673213 - DNA, 15 bp, Homo sapiens
gcctcactcttgctt

SEQ ID NO: 673214 - DNA, 15 bp, Homo sapiens
cctcactcttgcttc

SEQ ID NO: 673215 - DNA, 15 bp, Homo sapiens
ctcactcttgcttct

SEQ ID NO: 673216 - DNA, 15 bp, Homo sapiens
tcactcttgcttctc

SEQ ID NO: 673217 - DNA, 15 bp, Homo sapiens
cactcttgcttctct

SEQ ID NO: 673218 - DNA, 15 bp, Homo sapiens
actcttgcttctctc

SEQ ID NO: 673219 - DNA, 15 bp, Homo sapiens
ctcttgcttctctcc

SEQ ID NO: 673220 - DNA, 15 bp, Homo sapiens
tcttgcttctctcct

SEQ ID NO: 673221 - DNA, 15 bp, Homo sapiens
cttgcttctctcctg

SEQ ID NO: 673222 - DNA, 15 bp, Homo sapiens
ttgcttctctcctgc

SEQ ID NO: 673223 - DNA, 15 bp, Homo sapiens
tgcttctctcctgca

SEQ ID NO: 673224 - DNA, 15 bp, Homo sapiens
gcttctctcctgcag

SEQ ID NO: 673225 - DNA, 15 bp, Homo sapiens
cttctctcctgcagc

SEQ ID NO: 673226 - DNA, 15 bp, Homo sapiens
ttctctcctgcagct

SEQ ID NO: 673227 - DNA, 15 bp, Homo sapiens
tctctcctgcagctc

SEQ ID NO: 673228 - DNA, 15 bp, Homo sapiens
ctctcctgcagctct

SEQ ID NO: 673229 - DNA, 15 bp, Homo sapiens
tctcctgcagctctg

SEQ ID NO: 673230 - DNA, 15 bp, Homo sapiens
ctcctgcagctctgg

SEQ ID NO: 673231 - DNA, 15 bp, Homo sapiens
tcctgcagctctggg

SEQ ID NO: 673232 - DNA, 15 bp, Homo sapiens
cctgcagctctgggc

SEQ ID NO: 673233 - DNA, 15 bp, Homo sapiens
ctgcagctctgggcg

SEQ ID NO: 673234 - DNA, 15 bp, Homo sapiens
tgcagctctgggcga

SEQ ID NO: 673235 - DNA, 15 bp, Homo sapiens
gcagctctgggcgac

SEQ ID NO: 673236 - DNA, 15 bp, Homo sapiens
cagctctgggcgacg

SEQ ID NO: 673237 - DNA, 15 bp, Homo sapiens
agctctgggcgacgt

SEQ ID NO: 673238 - DNA, 15 bp, Homo sapiens
gctctgggcgacgtt

SEQ ID NO: 673239 - DNA, 15 bp, Homo sapiens
ctctgggcgacgttg

SEQ ID NO: 673240 - DNA, 15 bp, Homo sapiens
tctgggcgacgttgc

SEQ ID NO: 673241 - DNA, 15 bp, Homo sapiens
ctgggcgacgttgct

SEQ ID NO: 673242 - DNA, 15 bp, Homo sapiens
tgggcgacgttgctg

SEQ ID NO: 673243 - DNA, 15 bp, Homo sapiens
gggcgacgttgctgg

SEQ ID NO: 673244 - DNA, 15 bp, Homo sapiens
ggcgacgttgctggc

SEQ ID NO: 673245 - DNA, 15 bp, Homo sapiens
gcgacgttgctggca

SEQ ID NO: 673246 - DNA, 15 bp, Homo sapiens
cgacgttgctggcag

SEQ ID NO: 673247 - DNA, 15 bp, Homo sapiens
gacgttgctggcaga

SEQ ID NO: 673248 - DNA, 15 bp, Homo sapiens
acgttgctggcagag

SEQ ID NO: 673249 - DNA, 15 bp, Homo sapiens
cgttgctggcagagg

SEQ ID NO: 673250 - DNA, 15 bp, Homo sapiens
gttgctggcagagga

SEQ ID NO: 673251 - DNA, 15 bp, Homo sapiens
ttgctggcagaggaa

SEQ ID NO: 673252 - DNA, 15 bp, Homo sapiens
tgctggcagaggaaa

SEQ ID NO: 673253 - DNA, 15 bp, Homo sapiens
gctggcagaggaaat

SEQ ID NO: 673254 - DNA, 15 bp, Homo sapiens
ctggcagaggaaatg

SEQ ID NO: 673255 - DNA, 15 bp, Homo sapiens
tggcagaggaaatga

SEQ ID NO: 673256 - DNA, 15 bp, Homo sapiens
ggcagaggaaatgag

SEQ ID NO: 673257 - DNA, 15 bp, Homo sapiens
gcagaggaaatgaga

SEQ ID NO: 673258 - DNA, 15 bp, Homo sapiens
cagaggaaatgagaa

SEQ ID NO: 673259 - DNA, 15 bp, Homo sapiens
agaggaaatgagaag

SEQ ID NO: 673260 - DNA, 15 bp, Homo sapiens
gaggaaatgagaaga

SEQ ID NO: 673261 - DNA, 15 bp, Homo sapiens
aggaaatgagaagaa

SEQ ID NO: 673262 - DNA, 15 bp, Homo sapiens
ggaaatgagaagaag

SEQ ID NO: 673263 - DNA, 15 bp, Homo sapiens
gaaatgagaagaagc

SEQ ID NO: 673264 - DNA, 15 bp, Homo sapiens
aaatgagaagaagcc

SEQ ID NO: 673265 - DNA, 15 bp, Homo sapiens
aatgagaagaagccc

SEQ ID NO: 673266 - DNA, 15 bp, Homo sapiens
atgagaagaagccca

SEQ ID NO: 673267 - DNA, 15 bp, Homo sapiens
tgagaagaagcccag

SEQ ID NO: 673268 - DNA, 15 bp, Homo sapiens
gagaagaagcccagt

SEQ ID NO: 673269 - DNA, 15 bp, Homo sapiens
agaagaagcccagta

SEQ ID NO: 673270 - DNA, 15 bp, Homo sapiens
gaagaagcccagtag

SEQ ID NO: 673271 - DNA, 15 bp, Homo sapiens
aagaagcccagtagc

SEQ ID NO: 673272 - DNA, 15 bp, Homo sapiens
agaagcccagtagcg

SEQ ID NO: 673273 - DNA, 15 bp, Homo sapiens
gaagcccagtagcgt

SEQ ID NO: 673274 - DNA, 15 bp, Homo sapiens
aagcccagtagcgtg

SEQ ID NO: 673275 - DNA, 15 bp, Homo sapiens
agcccagtagcgtga

SEQ ID NO: 673276 - DNA, 15 bp, Homo sapiens
gcccagtagcgtgag

SEQ ID NO: 673277 - DNA, 15 bp, Homo sapiens
cccagtagcgtgagg

SEQ ID NO: 673278 - DNA, 15 bp, Homo sapiens
ccagtagcgtgaggg

SEQ ID NO: 673279 - DNA, 15 bp, Homo sapiens
cagtagcgtgagggc

SEQ ID NO: 673280 - DNA, 15 bp, Homo sapiens
agtagcgtgagggct

SEQ ID NO: 673281 - DNA, 15 bp, Homo sapiens
gtagcgtgagggctc

SEQ ID NO: 673282 - DNA, 15 bp, Homo sapiens
tagcgtgagggctct

SEQ ID NO: 673283 - DNA, 15 bp, Homo sapiens
agcgtgagggctctg

SEQ ID NO: 673284 - DNA, 15 bp, Homo sapiens
gcgtgagggctctgt

SEQ ID NO: 673285 - DNA, 15 bp, Homo sapiens
cgtgagggctctgtc

SEQ ID NO: 673286 - DNA, 15 bp, Homo sapiens
gtgagggctctgtcc

SEQ ID NO: 673287 - DNA, 15 bp, Homo sapiens
tgagggctctgtcca

SEQ ID NO: 673288 - DNA, 15 bp, Homo sapiens
gagggctctgtccat

SEQ ID NO: 673289 - DNA, 15 bp, Homo sapiens
agggctctgtccatt

SEQ ID NO: 673290 - DNA, 15 bp, Homo sapiens
gggctctgtccattg

SEQ ID NO: 673291 - DNA, 15 bp, Homo sapiens
ggctctgtccattgt

SEQ ID NO: 673292 - DNA, 15 bp, Homo sapiens
gctctgtccattgtc

SEQ ID NO: 673293 - DNA, 15 bp, Homo sapiens
ctctgtccattgtcc

SEQ ID NO: 673294 - DNA, 15 bp, Homo sapiens
tctgtccattgtcct

SEQ ID NO: 673295 - DNA, 15 bp, Homo sapiens
ctgtccattgtcctc

SEQ ID NO: 673296 - DNA, 15 bp, Homo sapiens
tgtccattgtcctcc

SEQ ID NO: 673297 - DNA, 15 bp, Homo sapiens
gtccattgtcctccc

SEQ ID NO: 673298 - DNA, 15 bp, Homo sapiens
tccattgtcctcccc

SEQ ID NO: 673299 - DNA, 15 bp, Homo sapiens
ccattgtcctcccca

SEQ ID NO: 673300 - DNA, 15 bp, Homo sapiens
cattgtcctccccat

SEQ ID NO: 673301 - DNA, 15 bp, Homo sapiens
attgtcctccccatc

SEQ ID NO: 673302 - DNA, 15 bp, Homo sapiens
ttgtcctccccatcg

SEQ ID NO: 673303 - DNA, 15 bp, Homo sapiens
tgtcctccccatcgg

SEQ ID NO: 673304 - DNA, 15 bp, Homo sapiens
gtcctccccatcggt

SEQ ID NO: 673305 - DNA, 15 bp, Homo sapiens
tcctccccatcggta

SEQ ID NO: 673306 - DNA, 15 bp, Homo sapiens
cctccccatcggtaa

SEQ ID NO: 673307 - DNA, 15 bp, Homo sapiens
ctccccatcggtaag

SEQ ID NO: 673308 - DNA, 15 bp, Homo sapiens
tccccatcggtaagc

SEQ ID NO: 673309 - DNA, 15 bp, Homo sapiens
ccccatcggtaagcg

SEQ ID NO: 673310 - DNA, 15 bp, Homo sapiens
cccatcggtaagcgc

SEQ ID NO: 673311 - DNA, 15 bp, Homo sapiens
ccatcggtaagcgcg

SEQ ID NO: 673312 - DNA, 15 bp, Homo sapiens
catcggtaagcgcgg

SEQ ID NO: 673313 - DNA, 15 bp, Homo sapiens
atcggtaagcgcggg

SEQ ID NO: 673314 - DNA, 15 bp, Homo sapiens
tcggtaagcgcgggc

SEQ ID NO: 673315 - DNA, 15 bp, Homo sapiens
cggtaagcgcgggcc

SEQ ID NO: 673316 - DNA, 15 bp, Homo sapiens
ggtaagcgcgggccg

SEQ ID NO: 673317 - DNA, 15 bp, Homo sapiens
gtaagcgcgggccgg

SEQ ID NO: 673318 - DNA, 15 bp, Homo sapiens
taagcgcgggccggt

SEQ ID NO: 673319 - DNA, 15 bp, Homo sapiens
aagcgcgggccggtc

SEQ ID NO: 673320 - DNA, 15 bp, Homo sapiens
agcgcgggccggtcc

SEQ ID NO: 673321 - DNA, 15 bp, Homo sapiens
gcgcgggccggtccc

SEQ ID NO: 673322 - DNA, 15 bp, Homo sapiens
cgcgggccggtcccc

SEQ ID NO: 673323 - DNA, 15 bp, Homo sapiens
gcgggccggtccccc

SEQ ID NO: 673324 - DNA, 15 bp, Homo sapiens
cgggccggtccccca

SEQ ID NO: 673325 - DNA, 15 bp, Homo sapiens
gggccggtcccccag

SEQ ID NO: 673326 - DNA, 15 bp, Homo sapiens
ggccggtcccccagc

SEQ ID NO: 673327 - DNA, 15 bp, Homo sapiens
gccggtcccccagcg

SEQ ID NO: 673328 - DNA, 15 bp, Homo sapiens
ccggtcccccagcgt

SEQ ID NO: 673329 - DNA, 15 bp, Homo sapiens
cggtcccccagcgtc

SEQ ID NO: 673330 - DNA, 15 bp, Homo sapiens
ggtcccccagcgtcc

SEQ ID NO: 673331 - DNA, 15 bp, Homo sapiens
gtcccccagcgtccc

SEQ ID NO: 673332 - DNA, 15 bp, Homo sapiens
tcccccagcgtcccc

SEQ ID NO: 673333 - DNA, 15 bp, Homo sapiens
cccccagcgtccccc

SEQ ID NO: 673334 - DNA, 15 bp, Homo sapiens
ccccagcgtccccca

SEQ ID NO: 673335 - DNA, 15 bp, Homo sapiens
cccagcgtcccccag

SEQ ID NO: 673336 - DNA, 15 bp, Homo sapiens
ccagcgtcccccagg

SEQ ID NO: 673337 - DNA, 15 bp, Homo sapiens
cagcgtcccccaggt

SEQ ID NO: 673338 - DNA, 15 bp, Homo sapiens
agcgtcccccaggtc

SEQ ID NO: 673339 - DNA, 15 bp, Homo sapiens
gcgtcccccaggtca

SEQ ID NO: 673340 - DNA, 15 bp, Homo sapiens
cgtcccccaggtcac

SEQ ID NO: 673341 - DNA, 15 bp, Homo sapiens
gtcccccaggtcaca

SEQ ID NO: 673342 - DNA, 15 bp, Homo sapiens
tcccccaggtcacag

SEQ ID NO: 673343 - DNA, 15 bp, Homo sapiens
cccccaggtcacagc

SEQ ID NO: 673344 - DNA, 15 bp, Homo sapiens
ccccaggtcacagcc

SEQ ID NO: 673345 - DNA, 15 bp, Homo sapiens
cccaggtcacagcct

SEQ ID NO: 673346 - DNA, 15 bp, Homo sapiens
ccaggtcacagcctc

SEQ ID NO: 673347 - DNA, 15 bp, Homo sapiens
caggtcacagcctcc

SEQ ID NO: 673348 - DNA, 15 bp, Homo sapiens
aggtcacagcctccc

SEQ ID NO: 673349 - DNA, 15 bp, Homo sapiens
ggtcacagcctcccg

SEQ ID NO: 673350 - DNA, 15 bp, Homo sapiens
gtcacagcctcccgc

SEQ ID NO: 673351 - DNA, 15 bp, Homo sapiens
tcacagcctcccgct

SEQ ID NO: 673352 - DNA, 15 bp, Homo sapiens
cacagcctcccgcta

SEQ ID NO: 673353 - DNA, 15 bp, Homo sapiens
acagcctcccgctat

SEQ ID NO: 673354 - DNA, 15 bp, Homo sapiens
cagcctcccgctatg

SEQ ID NO: 673355 - DNA, 15 bp, Homo sapiens
agcctcccgctatgt

SEQ ID NO: 673356 - DNA, 15 bp, Homo sapiens
gcctcccgctatgtg

SEQ ID NO: 673357 - DNA, 15 bp, Homo sapiens
cctcccgctatgtga

SEQ ID NO: 673358 - DNA, 15 bp, Homo sapiens
ctcccgctatgtgac

SEQ ID NO: 673359 - DNA, 15 bp, Homo sapiens
tcccgctatgtgacc

SEQ ID NO: 673360 - DNA, 15 bp, Homo sapiens
cccgctatgtgacct

SEQ ID NO: 673361 - DNA, 15 bp, Homo sapiens
ccgctatgtgacctc

SEQ ID NO: 673362 - DNA, 15 bp, Homo sapiens
cgctatgtgacctcg

SEQ ID NO: 673363 - DNA, 15 bp, Homo sapiens
gctatgtgacctcgt

SEQ ID NO: 673364 - DNA, 15 bp, Homo sapiens
ctatgtgacctcgtg

SEQ ID NO: 673365 - DNA, 15 bp, Homo sapiens
tatgtgacctcgtgc

SEQ ID NO: 673366 - DNA, 15 bp, Homo sapiens
atgtgacctcgtgcc

SEQ ID NO: 673367 - DNA, 15 bp, Homo sapiens
tgtgacctcgtgcct

SEQ ID NO: 673368 - DNA, 15 bp, Homo sapiens
gtgacctcgtgcctg

SEQ ID NO: 673369 - DNA, 15 bp, Homo sapiens
tgacctcgtgcctgg

SEQ ID NO: 673370 - DNA, 15 bp, Homo sapiens
gacctcgtgcctggc

SEQ ID NO: 673371 - DNA, 15 bp, Homo sapiens
acctcgtgcctggct

SEQ ID NO: 673372 - DNA, 15 bp, Homo sapiens
cctcgtgcctggctg

SEQ ID NO: 673373 - DNA, 15 bp, Homo sapiens
ctcgtgcctggctgg

SEQ ID NO: 673374 - DNA, 15 bp, Homo sapiens
tcgtgcctggctggt

SEQ ID NO: 673375 - DNA, 15 bp, Homo sapiens
cgtgcctggctggtt

SEQ ID NO: 673376 - DNA, 15 bp, Homo sapiens
gtgcctggctggttg

SEQ ID NO: 673377 - DNA, 15 bp, Homo sapiens
tgcctggctggttgg

SEQ ID NO: 673378 - DNA, 15 bp, Homo sapiens
gcctggctggttggg

SEQ ID NO: 673379 - DNA, 15 bp, Homo sapiens
cctggctggttgggc

SEQ ID NO: 673380 - DNA, 15 bp, Homo sapiens
ctggctggttgggcc

SEQ ID NO: 673381 - DNA, 15 bp, Homo sapiens
tggctggttgggcct

SEQ ID NO: 673382 - DNA, 15 bp, Homo sapiens
ggctggttgggcctg

SEQ ID NO: 673383 - DNA, 15 bp, Homo sapiens
gctggttgggcctgt

SEQ ID NO: 673384 - DNA, 15 bp, Homo sapiens
ctggttgggcctgtt

SEQ ID NO: 673385 - DNA, 15 bp, Homo sapiens
tggttgggcctgttc

SEQ ID NO: 673386 - DNA, 15 bp, Homo sapiens
ggttgggcctgttca

SEQ ID NO: 673387 - DNA, 15 bp, Homo sapiens
gttgggcctgttcac

SEQ ID NO: 673388 - DNA, 15 bp, Homo sapiens
ttgggcctgttcact

SEQ ID NO: 673389 - DNA, 15 bp, Homo sapiens
tgggcctgttcactt

SEQ ID NO: 673390 - DNA, 15 bp, Homo sapiens
gggcctgttcacttt

SEQ ID NO: 673391 - DNA, 15 bp, Homo sapiens
ggcctgttcactttt

SEQ ID NO: 673392 - DNA, 15 bp, Homo sapiens
gcctgttcacttttt

SEQ ID NO: 673393 - DNA, 15 bp, Homo sapiens
cctgttcactttttc

SEQ ID NO: 673394 - DNA, 15 bp, Homo sapiens
ctgttcactttttct

SEQ ID NO: 673395 - DNA, 15 bp, Homo sapiens
tgttcactttttctc

SEQ ID NO: 673396 - DNA, 15 bp, Homo sapiens
gttcactttttctcc

SEQ ID NO: 673397 - DNA, 15 bp, Homo sapiens
ttcactttttctcct

SEQ ID NO: 673398 - DNA, 15 bp, Homo sapiens
tcactttttctcctg

SEQ ID NO: 673399 - DNA, 15 bp, Homo sapiens
cactttttctcctgg

SEQ ID NO: 673400 - DNA, 15 bp, Homo sapiens
actttttctcctgga

SEQ ID NO: 673401 - DNA, 15 bp, Homo sapiens
ctttttctcctggac

SEQ ID NO: 673402 - DNA, 15 bp, Homo sapiens
tttttctcctggaca

SEQ ID NO: 673403 - DNA, 15 bp, Homo sapiens
ttttctcctggacag

SEQ ID NO: 673404 - DNA, 15 bp, Homo sapiens
tttctcctggacagg

SEQ ID NO: 673405 - DNA, 15 bp, Homo sapiens
ttctcctggacaggg

SEQ ID NO: 673406 - DNA, 15 bp, Homo sapiens
tctcctggacaggga

SEQ ID NO: 673407 - DNA, 15 bp, Homo sapiens
ctcctggacagggaa

SEQ ID NO: 673408 - DNA, 15 bp, Homo sapiens
tcctggacagggaac

SEQ ID NO: 673409 - DNA, 15 bp, Homo sapiens
cctggacagggaaca

SEQ ID NO: 673410 - DNA, 15 bp, Homo sapiens
ctggacagggaacag

SEQ ID NO: 673411 - DNA, 15 bp, Homo sapiens
tggacagggaacagc

SEQ ID NO: 673412 - DNA, 15 bp, Homo sapiens
ggacagggaacagcc

SEQ ID NO: 673413 - DNA, 15 bp, Homo sapiens
gacagggaacagccc

SEQ ID NO: 673414 - DNA, 15 bp, Homo sapiens
acagggaacagcccc

SEQ ID NO: 673415 - DNA, 15 bp, Homo sapiens
cagggaacagcccca

SEQ ID NO: 673416 - DNA, 15 bp, Homo sapiens
agggaacagccccac

SEQ ID NO: 673417 - DNA, 15 bp, Homo sapiens
gggaacagccccact

SEQ ID NO: 673418 - DNA, 15 bp, Homo sapiens
ggaacagccccactg

SEQ ID NO: 673419 - DNA, 15 bp, Homo sapiens
gaacagccccactgg

SEQ ID NO: 673420 - DNA, 15 bp, Homo sapiens
aacagccccactggt

SEQ ID NO: 673421 - DNA, 15 bp, Homo sapiens
acagccccactggtg

SEQ ID NO: 673422 - DNA, 15 bp, Homo sapiens
cagccccactggtgt

SEQ ID NO: 673423 - DNA, 15 bp, Homo sapiens
agccccactggtgtc

SEQ ID NO: 673424 - DNA, 15 bp, Homo sapiens
gccccactggtgtcc

SEQ ID NO: 673425 - DNA, 15 bp, Homo sapiens
ccccactggtgtcct

SEQ ID NO: 673426 - DNA, 15 bp, Homo sapiens
cccactggtgtcctt

SEQ ID NO: 673427 - DNA, 15 bp, Homo sapiens
ccactggtgtccttt

SEQ ID NO: 673428 - DNA, 15 bp, Homo sapiens
cactggtgtccttta

SEQ ID NO: 673429 - DNA, 15 bp, Homo sapiens
actggtgtcctttat

SEQ ID NO: 673430 - DNA, 15 bp, Homo sapiens
ctggtgtcctttatc

SEQ ID NO: 673431 - DNA, 15 bp, Homo sapiens
tggtgtcctttatca

SEQ ID NO: 673432 - DNA, 15 bp, Homo sapiens
ggtgtcctttatcac

SEQ ID NO: 673433 - DNA, 15 bp, Homo sapiens
gtgtcctttatcacc

SEQ ID NO: 673434 - DNA, 15 bp, Homo sapiens
tgtcctttatcaccc

SEQ ID NO: 673435 - DNA, 15 bp, Homo sapiens
gtcctttatcacccc

SEQ ID NO: 673436 - DNA, 15 bp, Homo sapiens
tcctttatcaccccc

SEQ ID NO: 673437 - DNA, 15 bp, Homo sapiens
cctttatcaccccca

SEQ ID NO: 673438 - DNA, 15 bp, Homo sapiens
ctttatcacccccac

SEQ ID NO: 673439 - DNA, 15 bp, Homo sapiens
tttatcacccccacg

SEQ ID NO: 673440 - DNA, 15 bp, Homo sapiens
ttatcacccccacgg

SEQ ID NO: 673441 - DNA, 15 bp, Homo sapiens
tatcacccccacggc

SEQ ID NO: 673442 - DNA, 15 bp, Homo sapiens
atcacccccacggcc

SEQ ID NO: 673443 - DNA, 15 bp, Homo sapiens
tcacccccacggcct

SEQ ID NO: 673444 - DNA, 15 bp, Homo sapiens
cacccccacggcctc

SEQ ID NO: 673445 - DNA, 15 bp, Homo sapiens
acccccacggcctct

SEQ ID NO: 673446 - DNA, 15 bp, Homo sapiens
cccccacggcctctc

SEQ ID NO: 673447 - DNA, 15 bp, Homo sapiens
ccccacggcctctcc

SEQ ID NO: 673448 - DNA, 15 bp, Homo sapiens
cccacggcctctcct

SEQ ID NO: 673449 - DNA, 15 bp, Homo sapiens
ccacggcctctcctg

SEQ ID NO: 673450 - DNA, 15 bp, Homo sapiens
cacggcctctcctgg

SEQ ID NO: 673451 - DNA, 15 bp, Homo sapiens
acggcctctcctggc

SEQ ID NO: 673452 - DNA, 15 bp, Homo sapiens
cggcctctcctggct

SEQ ID NO: 673453 - DNA, 15 bp, Homo sapiens
ggcctctcctggctt

SEQ ID NO: 673454 - DNA, 15 bp, Homo sapiens
gcctctcctggcttg

SEQ ID NO: 673455 - DNA, 15 bp, Homo sapiens
cctctcctggcttgg

SEQ ID NO: 673456 - DNA, 15 bp, Homo sapiens
ctctcctggcttggg

SEQ ID NO: 673457 - DNA, 15 bp, Homo sapiens
tctcctggcttgggg

SEQ ID NO: 673458 - DNA, 15 bp, Homo sapiens
ctcctggcttggggc

SEQ ID NO: 673459 - DNA, 15 bp, Homo sapiens
tcctggcttggggct

SEQ ID NO: 673460 - DNA, 15 bp, Homo sapiens
cctggcttggggctg

SEQ ID NO: 673461 - DNA, 15 bp, Homo sapiens
ctggcttggggctga

SEQ ID NO: 673462 - DNA, 15 bp, Homo sapiens
tggcttggggctgac

SEQ ID NO: 673463 - DNA, 15 bp, Homo sapiens
ggcttggggctgaca

SEQ ID NO: 673464 - DNA, 15 bp, Homo sapiens
gcttggggctgacag

SEQ ID NO: 673465 - DNA, 15 bp, Homo sapiens
cttggggctgacagt

SEQ ID NO: 673466 - DNA, 15 bp, Homo sapiens
ttggggctgacagtg

SEQ ID NO: 673467 - DNA, 15 bp, Homo sapiens
tggggctgacagtga

SEQ ID NO: 673468 - DNA, 15 bp, Homo sapiens
ggggctgacagtgac

SEQ ID NO: 673469 - DNA, 15 bp, Homo sapiens
gggctgacagtgaca

SEQ ID NO: 673470 - DNA, 15 bp, Homo sapiens
ggctgacagtgacaa

SEQ ID NO: 673471 - DNA, 15 bp, Homo sapiens
gctgacagtgacaag

SEQ ID NO: 673472 - DNA, 15 bp, Homo sapiens
ctgacagtgacaaga

SEQ ID NO: 673473 - DNA, 15 bp, Homo sapiens
tgacagtgacaagat

SEQ ID NO: 673474 - DNA, 15 bp, Homo sapiens
gacagtgacaagatc

SEQ ID NO: 673475 - DNA, 15 bp, Homo sapiens
acagtgacaagatca

SEQ ID NO: 673476 - DNA, 15 bp, Homo sapiens
cagtgacaagatcag

SEQ ID NO: 673477 - DNA, 15 bp, Homo sapiens
agtgacaagatcaga

SEQ ID NO: 673478 - DNA, 15 bp, Homo sapiens
gtgacaagatcagac

SEQ ID NO: 673479 - DNA, 15 bp, Homo sapiens
tgacaagatcagaca

SEQ ID NO: 673480 - DNA, 15 bp, Homo sapiens
gacaagatcagacag

SEQ ID NO: 673481 - DNA, 15 bp, Homo sapiens
acaagatcagacagc

SEQ ID NO: 673482 - DNA, 15 bp, Homo sapiens
caagatcagacagct

SEQ ID NO: 673483 - DNA, 15 bp, Homo sapiens
aagatcagacagcta

SEQ ID NO: 673484 - DNA, 15 bp, Homo sapiens
agatcagacagctaa

SEQ ID NO: 673485 - DNA, 15 bp, Homo sapiens
gatcagacagctaag

SEQ ID NO: 673486 - DNA, 15 bp, Homo sapiens
atcagacagctaagg

SEQ ID NO: 673487 - DNA, 15 bp, Homo sapiens
tcagacagctaaggg

SEQ ID NO: 673488 - DNA, 15 bp, Homo sapiens
cagacagctaagggg

SEQ ID NO: 673489 - DNA, 15 bp, Homo sapiens
agacagctaaggggt

SEQ ID NO: 673490 - DNA, 15 bp, Homo sapiens
gacagctaaggggtc

SEQ ID NO: 673491 - DNA, 15 bp, Homo sapiens
acagctaaggggtca

SEQ ID NO: 673492 - DNA, 15 bp, Homo sapiens
cagctaaggggtcag

SEQ ID NO: 673493 - DNA, 15 bp, Homo sapiens
agctaaggggtcaga

SEQ ID NO: 673494 - DNA, 15 bp, Homo sapiens
gctaaggggtcagat

SEQ ID NO: 673495 - DNA, 15 bp, Homo sapiens
ctaaggggtcagatg

SEQ ID NO: 673496 - DNA, 15 bp, Homo sapiens
taaggggtcagatgg

SEQ ID NO: 673497 - DNA, 15 bp, Homo sapiens
aaggggtcagatgga

SEQ ID NO: 673498 - DNA, 15 bp, Homo sapiens
aggggtcagatggag

SEQ ID NO: 673499 - DNA, 15 bp, Homo sapiens
ggggtcagatggagg

SEQ ID NO: 673500 - DNA, 15 bp, Homo sapiens
gggtcagatggagga

SEQ ID NO: 673501 - DNA, 15 bp, Homo sapiens
ggtcagatggaggat

SEQ ID NO: 673502 - DNA, 15 bp, Homo sapiens
gtcagatggaggatg

SEQ ID NO: 673503 - DNA, 15 bp, Homo sapiens
tcagatggaggatgt

SEQ ID NO: 673504 - DNA, 15 bp, Homo sapiens
cagatggaggatgtg

SEQ ID NO: 673505 - DNA, 15 bp, Homo sapiens
agatggaggatgtgg

SEQ ID NO: 673506 - DNA, 15 bp, Homo sapiens
gatggaggatgtgga

SEQ ID NO: 673507 - DNA, 15 bp, Homo sapiens
atggaggatgtggag

SEQ ID NO: 673508 - DNA, 15 bp, Homo sapiens
tggaggatgtggagc

SEQ ID NO: 673509 - DNA, 15 bp, Homo sapiens
ggaggatgtggagct

SEQ ID NO: 673510 - DNA, 15 bp, Homo sapiens
gaggatgtggagctg

SEQ ID NO: 673511 - DNA, 15 bp, Homo sapiens
aggatgtggagctgg

SEQ ID NO: 673512 - DNA, 15 bp, Homo sapiens
ggatgtggagctggg

SEQ ID NO: 673513 - DNA, 15 bp, Homo sapiens
gatgtggagctgggt

SEQ ID NO: 673514 - DNA, 15 bp, Homo sapiens
atgtggagctgggtc

SEQ ID NO: 673515 - DNA, 15 bp, Homo sapiens
tgtggagctgggtcc

SEQ ID NO: 673516 - DNA, 15 bp, Homo sapiens
gtggagctgggtccc

SEQ ID NO: 673517 - DNA, 15 bp, Homo sapiens
tggagctgggtcccg

SEQ ID NO: 673518 - DNA, 15 bp, Homo sapiens
ggagctgggtcccgt

SEQ ID NO: 673519 - DNA, 15 bp, Homo sapiens
gagctgggtcccgtg

SEQ ID NO: 673520 - DNA, 15 bp, Homo sapiens
agctgggtcccgtgc

SEQ ID NO: 673521 - DNA, 15 bp, Homo sapiens
gctgggtcccgtgct

SEQ ID NO: 673522 - DNA, 15 bp, Homo sapiens
ctgggtcccgtgctg

SEQ ID NO: 673523 - DNA, 15 bp, Homo sapiens
tgggtcccgtgctgt

SEQ ID NO: 673524 - DNA, 15 bp, Homo sapiens
gggtcccgtgctgtg

SEQ ID NO: 673525 - DNA, 15 bp, Homo sapiens
ggtcccgtgctgtgg

SEQ ID NO: 673526 - DNA, 15 bp, Homo sapiens
gtcccgtgctgtgga

SEQ ID NO: 673527 - DNA, 15 bp, Homo sapiens
tcccgtgctgtggaa

SEQ ID NO: 673528 - DNA, 15 bp, Homo sapiens
cccgtgctgtggaat

SEQ ID NO: 673529 - DNA, 15 bp, Homo sapiens
ccgtgctgtggaata

SEQ ID NO: 673530 - DNA, 15 bp, Homo sapiens
cgtgctgtggaatag

SEQ ID NO: 673531 - DNA, 15 bp, Homo sapiens
gtgctgtggaatagc

SEQ ID NO: 673532 - DNA, 15 bp, Homo sapiens
tgctgtggaatagcc

SEQ ID NO: 673533 - DNA, 15 bp, Homo sapiens
gctgtggaatagcct

SEQ ID NO: 673534 - DNA, 15 bp, Homo sapiens
ctgtggaatagcctc

SEQ ID NO: 673535 - DNA, 15 bp, Homo sapiens
tgtggaatagcctca

SEQ ID NO: 673536 - DNA, 15 bp, Homo sapiens
gtggaatagcctcac

SEQ ID NO: 673537 - DNA, 15 bp, Homo sapiens
tggaatagcctcacc

SEQ ID NO: 673538 - DNA, 15 bp, Homo sapiens
ggaatagcctcaccg

SEQ ID NO: 673539 - DNA, 15 bp, Homo sapiens
gaatagcctcaccga

SEQ ID NO: 673540 - DNA, 15 bp, Homo sapiens
aatagcctcaccgag

SEQ ID NO: 673541 - DNA, 15 bp, Homo sapiens
atagcctcaccgaga

SEQ ID NO: 673542 - DNA, 15 bp, Homo sapiens
tagcctcaccgagat

SEQ ID NO: 673543 - DNA, 15 bp, Homo sapiens
agcctcaccgagatt

SEQ ID NO: 673544 - DNA, 15 bp, Homo sapiens
gcctcaccgagattt

SEQ ID NO: 673545 - DNA, 15 bp, Homo sapiens
cctcaccgagatttg

SEQ ID NO: 673546 - DNA, 15 bp, Homo sapiens
ctcaccgagatttga

SEQ ID NO: 673547 - DNA, 15 bp, Homo sapiens
tcaccgagatttgag

SEQ ID NO: 673548 - DNA, 15 bp, Homo sapiens
caccgagatttgagt

SEQ ID NO: 673549 - DNA, 15 bp, Homo sapiens
accgagatttgagtg

SEQ ID NO: 673550 - DNA, 15 bp, Homo sapiens
ccgagatttgagtgc

SEQ ID NO: 673551 - DNA, 15 bp, Homo sapiens
cgagatttgagtgcc

SEQ ID NO: 673552 - DNA, 15 bp, Homo sapiens
gagatttgagtgcct

SEQ ID NO: 673553 - DNA, 15 bp, Homo sapiens
agatttgagtgcctt

SEQ ID NO: 673554 - DNA, 15 bp, Homo sapiens
gatttgagtgccttc

SEQ ID NO: 673555 - DNA, 15 bp, Homo sapiens
atttgagtgccttct

SEQ ID NO: 673556 - DNA, 15 bp, Homo sapiens
tttgagtgccttctg

SEQ ID NO: 673557 - DNA, 15 bp, Homo sapiens
ttgagtgccttctgg

SEQ ID NO: 673558 - DNA, 15 bp, Homo sapiens
tgagtgccttctggg

SEQ ID NO: 673559 - DNA, 15 bp, Homo sapiens
gagtgccttctgggg

SEQ ID NO: 673560 - DNA, 15 bp, Homo sapiens
agtgccttctgggga

SEQ ID NO: 673561 - DNA, 15 bp, Homo sapiens
gtgccttctggggaa

SEQ ID NO: 673562 - DNA, 15 bp, Homo sapiens
tgccttctggggaac

SEQ ID NO: 673563 - DNA, 15 bp, Homo sapiens
gccttctggggaact

SEQ ID NO: 673564 - DNA, 15 bp, Homo sapiens
ccttctggggaactg

SEQ ID NO: 673565 - DNA, 15 bp, Homo sapiens
cttctggggaactgg

SEQ ID NO: 673566 - DNA, 15 bp, Homo sapiens
ttctggggaactggt

SEQ ID NO: 673567 - DNA, 15 bp, Homo sapiens
tctggggaactggtt

SEQ ID NO: 673568 - DNA, 15 bp, Homo sapiens
ctggggaactggttc

SEQ ID NO: 673569 - DNA, 15 bp, Homo sapiens
tggggaactggttcc

SEQ ID NO: 673570 - DNA, 15 bp, Homo sapiens
ggggaactggttccc

SEQ ID NO: 673571 - DNA, 15 bp, Homo sapiens
gggaactggttccct

SEQ ID NO: 673572 - DNA, 15 bp, Homo sapiens
ggaactggttccctt

SEQ ID NO: 673573 - DNA, 15 bp, Homo sapiens
gaactggttcccttg

SEQ ID NO: 673574 - DNA, 15 bp, Homo sapiens
aactggttcccttgc

SEQ ID NO: 673575 - DNA, 15 bp, Homo sapiens
actggttcccttgca

SEQ ID NO: 673576 - DNA, 15 bp, Homo sapiens
ctggttcccttgcag

SEQ ID NO: 673577 - DNA, 15 bp, Homo sapiens
tggttcccttgcagg

SEQ ID NO: 673578 - DNA, 15 bp, Homo sapiens
ggttcccttgcaggg

SEQ ID NO: 673579 - DNA, 15 bp, Homo sapiens
gttcccttgcagggg

SEQ ID NO: 673580 - DNA, 15 bp, Homo sapiens
ttcccttgcaggggg

SEQ ID NO: 673581 - DNA, 15 bp, Homo sapiens
tcccttgcagggggc

SEQ ID NO: 673582 - DNA, 15 bp, Homo sapiens
cccttgcagggggct

SEQ ID NO: 673583 - DNA, 15 bp, Homo sapiens
ccttgcagggggctg

SEQ ID NO: 673584 - DNA, 15 bp, Homo sapiens
cttgcagggggctgt

SEQ ID NO: 673585 - DNA, 15 bp, Homo sapiens
ttgcagggggctgtg

SEQ ID NO: 673586 - DNA, 15 bp, Homo sapiens
tgcagggggctgtgt

SEQ ID NO: 673587 - DNA, 15 bp, Homo sapiens
gcagggggctgtgtg

SEQ ID NO: 673588 - DNA, 15 bp, Homo sapiens
cagggggctgtgtgg

SEQ ID NO: 673589 - DNA, 15 bp, Homo sapiens
agggggctgtgtgga

SEQ ID NO: 673590 - DNA, 15 bp, Homo sapiens
gggggctgtgtggag

SEQ ID NO: 673591 - DNA, 15 bp, Homo sapiens
ggggctgtgtggaga

SEQ ID NO: 673592 - DNA, 15 bp, Homo sapiens
gggctgtgtggagag

SEQ ID NO: 673593 - DNA, 15 bp, Homo sapiens
ggctgtgtggagagg

SEQ ID NO: 673594 - DNA, 15 bp, Homo sapiens
gctgtgtggagaggc

SEQ ID NO: 673595 - DNA, 15 bp, Homo sapiens
ctgtgtggagaggcg

SEQ ID NO: 673596 - DNA, 15 bp, Homo sapiens
tgtgtggagaggcgc

SEQ ID NO: 673597 - DNA, 15 bp, Homo sapiens
gtgtggagaggcgcg

SEQ ID NO: 673598 - DNA, 15 bp, Homo sapiens
tgtggagaggcgcgc

SEQ ID NO: 673599 - DNA, 15 bp, Homo sapiens
gtggagaggcgcgct

SEQ ID NO: 673600 - DNA, 15 bp, Homo sapiens
tggagaggcgcgctc

SEQ ID NO: 673601 - DNA, 15 bp, Homo sapiens
ggagaggcgcgctct

SEQ ID NO: 673602 - DNA, 15 bp, Homo sapiens
gagaggcgcgctctc

SEQ ID NO: 673603 - DNA, 15 bp, Homo sapiens
agaggcgcgctctcc

SEQ ID NO: 673604 - DNA, 15 bp, Homo sapiens
gaggcgcgctctccc

SEQ ID NO: 673605 - DNA, 15 bp, Homo sapiens
aggcgcgctctccct

SEQ ID NO: 673606 - DNA, 15 bp, Homo sapiens
ggcgcgctctccctg

SEQ ID NO: 673607 - DNA, 15 bp, Homo sapiens
gcgcgctctccctgc

SEQ ID NO: 673608 - DNA, 15 bp, Homo sapiens
cgcgctctccctgcc

SEQ ID NO: 673609 - DNA, 15 bp, Homo sapiens
gcgctctccctgcct

SEQ ID NO: 673610 - DNA, 15 bp, Homo sapiens
cgctctccctgcctc

SEQ ID NO: 673611 - DNA, 15 bp, Homo sapiens
gctctccctgcctca

SEQ ID NO: 673612 - DNA, 15 bp, Homo sapiens
ctctccctgcctcac

SEQ ID NO: 673613 - DNA, 15 bp, Homo sapiens
tctccctgcctcacc

SEQ ID NO: 673614 - DNA, 15 bp, Homo sapiens
ctccctgcctcaccc

SEQ ID NO: 673615 - DNA, 15 bp, Homo sapiens
tccctgcctcaccca

SEQ ID NO: 673616 - DNA, 15 bp, Homo sapiens
ccctgcctcacccat

SEQ ID NO: 673617 - DNA, 15 bp, Homo sapiens
cctgcctcacccatg

SEQ ID NO: 673618 - DNA, 15 bp, Homo sapiens
ctgcctcacccatgc

SEQ ID NO: 673619 - DNA, 15 bp, Homo sapiens
tgcctcacccatgct

SEQ ID NO: 673620 - DNA, 15 bp, Homo sapiens
gcctcacccatgctc

SEQ ID NO: 673621 - DNA, 15 bp, Homo sapiens
cctcacccatgctca

SEQ ID NO: 673622 - DNA, 15 bp, Homo sapiens
ctcacccatgctcat

SEQ ID NO: 673623 - DNA, 15 bp, Homo sapiens
tcacccatgctcatc

SEQ ID NO: 673624 - DNA, 15 bp, Homo sapiens
cacccatgctcatcc

SEQ ID NO: 673625 - DNA, 15 bp, Homo sapiens
acccatgctcatcct

SEQ ID NO: 673626 - DNA, 15 bp, Homo sapiens
cccatgctcatccta

SEQ ID NO: 673627 - DNA, 15 bp, Homo sapiens
ccatgctcatcctaa

SEQ ID NO: 673628 - DNA, 15 bp, Homo sapiens
catgctcatcctaac

SEQ ID NO: 673629 - DNA, 15 bp, Homo sapiens
atgctcatcctaact

SEQ ID NO: 673630 - DNA, 15 bp, Homo sapiens
tgctcatcctaactc

SEQ ID NO: 673631 - DNA, 15 bp, Homo sapiens
gctcatcctaactcg

SEQ ID NO: 673632 - DNA, 15 bp, Homo sapiens
ctcatcctaactcgg

SEQ ID NO: 673633 - DNA, 15 bp, Homo sapiens
tcatcctaactcggt

SEQ ID NO: 673634 - DNA, 15 bp, Homo sapiens
catcctaactcggtt

SEQ ID NO: 673635 - DNA, 15 bp, Homo sapiens
atcctaactcggtta

SEQ ID NO: 673636 - DNA, 15 bp, Homo sapiens
tcctaactcggttac

SEQ ID NO: 673637 - DNA, 15 bp, Homo sapiens
cctaactcggttacc

SEQ ID NO: 673638 - DNA, 15 bp, Homo sapiens
ctaactcggttacca

SEQ ID NO: 673639 - DNA, 15 bp, Homo sapiens
taactcggttaccat

SEQ ID NO: 673640 - DNA, 15 bp, Homo sapiens
aactcggttaccatc

SEQ ID NO: 673641 - DNA, 15 bp, Homo sapiens
actcggttaccatca

SEQ ID NO: 673642 - DNA, 15 bp, Homo sapiens
ctcggttaccatcac

SEQ ID NO: 673643 - DNA, 15 bp, Homo sapiens
tcggttaccatcaca

SEQ ID NO: 673644 - DNA, 15 bp, Homo sapiens
cggttaccatcacat

SEQ ID NO: 673645 - DNA, 15 bp, Homo sapiens
ggttaccatcacatc

SEQ ID NO: 673646 - DNA, 15 bp, Homo sapiens
gttaccatcacatct

SEQ ID NO: 673647 - DNA, 15 bp, Homo sapiens
ttaccatcacatctc

SEQ ID NO: 673648 - DNA, 15 bp, Homo sapiens
taccatcacatctct

SEQ ID NO: 673649 - DNA, 15 bp, Homo sapiens
accatcacatctctt

SEQ ID NO: 673650 - DNA, 15 bp, Homo sapiens
ccatcacatctcttt

SEQ ID NO: 673651 - DNA, 15 bp, Homo sapiens
catcacatctctttt

SEQ ID NO: 673652 - DNA, 15 bp, Homo sapiens
atcacatctcttttt

SEQ ID NO: 673653 - DNA, 15 bp, Homo sapiens
tcacatctctttttt

SEQ ID NO: 673654 - DNA, 15 bp, Homo sapiens
cacatctcttttttc

SEQ ID NO: 673655 - DNA, 15 bp, Homo sapiens
acatctcttttttct

SEQ ID NO: 673656 - DNA, 15 bp, Homo sapiens
catctcttttttctt

SEQ ID NO: 673657 - DNA, 15 bp, Homo sapiens
atctcttttttcttt

SEQ ID NO: 673658 - DNA, 15 bp, Homo sapiens
tctcttttttctttt

SEQ ID NO: 673659 - DNA, 15 bp, Homo sapiens
ctcttttttcttttt

SEQ ID NO: 673660 - DNA, 15 bp, Homo sapiens
ttttttctttttttc

SEQ ID NO: 673661 - DNA, 15 bp, Homo sapiens
tttttctttttttct

SEQ ID NO: 673662 - DNA, 15 bp, Homo sapiens
ttttctttttttctt

SEQ ID NO: 673663 - DNA, 15 bp, Homo sapiens
tttctttttttctta

SEQ ID NO: 673664 - DNA, 15 bp, Homo sapiens
ttctttttttcttaa

SEQ ID NO: 673665 - DNA, 15 bp, Homo sapiens
tctttttttcttaaa

SEQ ID NO: 673666 - DNA, 15 bp, Homo sapiens
ctttttttcttaaat

SEQ ID NO: 673667 - DNA, 15 bp, Homo sapiens
tttttttcttaaatt

SEQ ID NO: 673668 - DNA, 15 bp, Homo sapiens
ttttttcttaaattt

SEQ ID NO: 673669 - DNA, 15 bp, Homo sapiens
tttttcttaaatttt

SEQ ID NO: 673670 - DNA, 15 bp, Homo sapiens
ttttcttaaatttta

SEQ ID NO: 673671 - DNA, 15 bp, Homo sapiens
tttcttaaattttaa

SEQ ID NO: 673672 - DNA, 15 bp, Homo sapiens
ttcttaaattttaag

SEQ ID NO: 673673 - DNA, 15 bp, Homo sapiens
tcttaaattttaaga

SEQ ID NO: 673674 - DNA, 15 bp, Homo sapiens
cttaaattttaagaa

SEQ ID NO: 673675 - DNA, 15 bp, Homo sapiens
ttaaattttaagaaa

SEQ ID NO: 673676 - DNA, 15 bp, Homo sapiens
taaattttaagaaaa

SEQ ID NO: 673677 - DNA, 15 bp, Homo sapiens
aaattttaagaaaaa

SEQ ID NO: 673678 - DNA, 15 bp, Homo sapiens
aattttaagaaaaaa

SEQ ID NO: 673679 - DNA, 15 bp, Homo sapiens
attttaagaaaaaag

SEQ ID NO: 673680 - DNA, 15 bp, Homo sapiens
ttttaagaaaaaaga

SEQ ID NO: 673681 - DNA, 15 bp, Homo sapiens
tttaagaaaaaagaa

SEQ ID NO: 673682 - DNA, 15 bp, Homo sapiens
ttaagaaaaaagaaa

SEQ ID NO: 673683 - DNA, 15 bp, Homo sapiens
taagaaaaaagaaat

SEQ ID NO: 673684 - DNA, 15 bp, Homo sapiens
aagaaaaaagaaatt

SEQ ID NO: 673685 - DNA, 15 bp, Homo sapiens
agaaaaaagaaattt

SEQ ID NO: 673686 - DNA, 15 bp, Homo sapiens
gaaaaaagaaattta

SEQ ID NO: 673687 - DNA, 15 bp, Homo sapiens
aaaaaagaaatttaa

SEQ ID NO: 673688 - DNA, 15 bp, Homo sapiens
aaaaagaaatttaat

SEQ ID NO: 673689 - DNA, 15 bp, Homo sapiens
aaaagaaatttaatt

SEQ ID NO: 673690 - DNA, 15 bp, Homo sapiens
aaagaaatttaattt

SEQ ID NO: 673691 - DNA, 15 bp, Homo sapiens
aagaaatttaatttt

SEQ ID NO: 673692 - DNA, 15 bp, Homo sapiens
agaaatttaattttt

SEQ ID NO: 673693 - DNA, 15 bp, Homo sapiens
gaaatttaatttttt

SEQ ID NO: 673694 - DNA, 15 bp, Homo sapiens
aaatttaattttttt

SEQ ID NO: 673695 - DNA, 15 bp, Homo sapiens
aatttaatttttttg

SEQ ID NO: 673696 - DNA, 15 bp, Homo sapiens
atttaatttttttga

SEQ ID NO: 673697 - DNA, 15 bp, Homo sapiens
tttaatttttttgag

SEQ ID NO: 673698 - DNA, 15 bp, Homo sapiens
ttaatttttttgaga

SEQ ID NO: 673699 - DNA, 15 bp, Homo sapiens
taatttttttgagag

SEQ ID NO: 673700 - DNA, 15 bp, Homo sapiens
aatttttttgagaga

SEQ ID NO: 673701 - DNA, 15 bp, Homo sapiens
atttttttgagagac

SEQ ID NO: 673702 - DNA, 15 bp, Homo sapiens
tttttttgagagaca

SEQ ID NO: 673703 - DNA, 15 bp, Homo sapiens
ttttttgagagacag

SEQ ID NO: 673704 - DNA, 15 bp, Homo sapiens
tttttgagagacaga

SEQ ID NO: 673705 - DNA, 15 bp, Homo sapiens
ttttgagagacagag

SEQ ID NO: 673706 - DNA, 15 bp, Homo sapiens
tttgagagacagagt

SEQ ID NO: 673707 - DNA, 15 bp, Homo sapiens
ttgagagacagagtc

SEQ ID NO: 673708 - DNA, 15 bp, Homo sapiens
tgagagacagagtct

SEQ ID NO: 673709 - DNA, 15 bp, Homo sapiens
gagagacagagtctt

SEQ ID NO: 673710 - DNA, 15 bp, Homo sapiens
agagacagagtcttg

SEQ ID NO: 673711 - DNA, 15 bp, Homo sapiens
gagacagagtcttgc

SEQ ID NO: 673712 - DNA, 15 bp, Homo sapiens
agacagagtcttgct

SEQ ID NO: 673713 - DNA, 15 bp, Homo sapiens
gacagagtcttgctc

SEQ ID NO: 673714 - DNA, 15 bp, Homo sapiens
agtcttgctctgtca

SEQ ID NO: 673715 - DNA, 15 bp, Homo sapiens
gtcttgctctgtcac

SEQ ID NO: 673716 - DNA, 15 bp, Homo sapiens
tcttgctctgtcacc

SEQ ID NO: 673717 - DNA, 15 bp, Homo sapiens
cttgctctgtcaccc

SEQ ID NO: 673718 - DNA, 15 bp, Homo sapiens
ttgctctgtcaccca

SEQ ID NO: 673719 - DNA, 15 bp, Homo sapiens
tgctctgtcacccag

SEQ ID NO: 673720 - DNA, 15 bp, Homo sapiens
gctctgtcacccagg

SEQ ID NO: 673721 - DNA, 15 bp, Homo sapiens
gagtgcagtggcacc

SEQ ID NO: 673722 - DNA, 15 bp, Homo sapiens
agtgcagtggcacca

SEQ ID NO: 673723 - DNA, 15 bp, Homo sapiens
gtgcagtggcaccat

SEQ ID NO: 673724 - DNA, 15 bp, Homo sapiens
tgcagtggcaccatc

SEQ ID NO: 673725 - DNA, 15 bp, Homo sapiens
gcagtggcaccatca

SEQ ID NO: 673726 - DNA, 15 bp, Homo sapiens
cagtggcaccatcat

SEQ ID NO: 673727 - DNA, 15 bp, Homo sapiens
agtggcaccatcatg

SEQ ID NO: 673728 - DNA, 15 bp, Homo sapiens
gtggcaccatcatgc

SEQ ID NO: 673729 - DNA, 15 bp, Homo sapiens
tggcaccatcatgcc

SEQ ID NO: 673730 - DNA, 15 bp, Homo sapiens
ggcaccatcatgcct

SEQ ID NO: 673731 - DNA, 15 bp, Homo sapiens
gcaccatcatgcctc

SEQ ID NO: 673732 - DNA, 15 bp, Homo sapiens
caccatcatgcctcg

SEQ ID NO: 673733 - DNA, 15 bp, Homo sapiens
accatcatgcctcgc

SEQ ID NO: 673734 - DNA, 15 bp, Homo sapiens
ccatcatgcctcgct

SEQ ID NO: 673735 - DNA, 15 bp, Homo sapiens
catcatgcctcgctg

SEQ ID NO: 673736 - DNA, 15 bp, Homo sapiens
atcatgcctcgctgc

SEQ ID NO: 673737 - DNA, 15 bp, Homo sapiens
tcatgcctcgctgca

SEQ ID NO: 673738 - DNA, 15 bp, Homo sapiens
catgcctcgctgcag

SEQ ID NO: 673739 - DNA, 15 bp, Homo sapiens
atgcctcgctgcagc

SEQ ID NO: 673740 - DNA, 15 bp, Homo sapiens
tgcctcgctgcagcc

SEQ ID NO: 673741 - DNA, 15 bp, Homo sapiens
gcctcgctgcagcct

SEQ ID NO: 673742 - DNA, 15 bp, Homo sapiens
cctcgctgcagcctc

SEQ ID NO: 673743 - DNA, 15 bp, Homo sapiens
ctcgctgcagcctca

SEQ ID NO: 673744 - DNA, 15 bp, Homo sapiens
tcgctgcagcctcaa

SEQ ID NO: 673745 - DNA, 15 bp, Homo sapiens
cgctgcagcctcaat

SEQ ID NO: 673746 - DNA, 15 bp, Homo sapiens
gctgcagcctcaatg

SEQ ID NO: 673747 - DNA, 15 bp, Homo sapiens
ctgcagcctcaatgt

SEQ ID NO: 673748 - DNA, 15 bp, Homo sapiens
tgcagcctcaatgtc

SEQ ID NO: 673749 - DNA, 15 bp, Homo sapiens
gcagcctcaatgtct

SEQ ID NO: 673750 - DNA, 15 bp, Homo sapiens
cagcctcaatgtctg

SEQ ID NO: 673751 - DNA, 15 bp, Homo sapiens
agcctcaatgtctgg

SEQ ID NO: 673752 - DNA, 15 bp, Homo sapiens
gcctcaatgtctggg

SEQ ID NO: 673753 - DNA, 15 bp, Homo sapiens
cctcaatgtctgggc

SEQ ID NO: 673754 - DNA, 15 bp, Homo sapiens
ctcaatgtctgggct

SEQ ID NO: 673755 - DNA, 15 bp, Homo sapiens
tcaatgtctgggctc

SEQ ID NO: 673756 - DNA, 15 bp, Homo sapiens
caatgtctgggctca

SEQ ID NO: 673757 - DNA, 15 bp, Homo sapiens
aatgtctgggctcaa

SEQ ID NO: 673758 - DNA, 15 bp, Homo sapiens
atgtctgggctcaag

SEQ ID NO: 673759 - DNA, 15 bp, Homo sapiens
tgtctgggctcaagc

SEQ ID NO: 673760 - DNA, 15 bp, Homo sapiens
gtctgggctcaagcg

SEQ ID NO: 673761 - DNA, 15 bp, Homo sapiens
tctgggctcaagcga

SEQ ID NO: 673762 - DNA, 15 bp, Homo sapiens
caagcgatcctccca

SEQ ID NO: 673763 - DNA, 15 bp, Homo sapiens
aagcgatcctcccac

SEQ ID NO: 673764 - DNA, 15 bp, Homo sapiens
agcgatcctcccacc

SEQ ID NO: 673765 - DNA, 15 bp, Homo sapiens
gcgatcctcccacct

SEQ ID NO: 673766 - DNA, 15 bp, Homo sapiens
cgatcctcccacctc

SEQ ID NO: 673767 - DNA, 15 bp, Homo sapiens
ccacctcagcctcct

SEQ ID NO: 673768 - DNA, 15 bp, Homo sapiens
cacctcagcctcctg

SEQ ID NO: 673769 - DNA, 15 bp, Homo sapiens
tcctgagtagctggt

SEQ ID NO: 673770 - DNA, 15 bp, Homo sapiens
cctgagtagctggtg

SEQ ID NO: 673771 - DNA, 15 bp, Homo sapiens
ctgagtagctggtgc

SEQ ID NO: 673772 - DNA, 15 bp, Homo sapiens
tgagtagctggtgca

SEQ ID NO: 673773 - DNA, 15 bp, Homo sapiens
gagtagctggtgcaa

SEQ ID NO: 673774 - DNA, 15 bp, Homo sapiens
agtagctggtgcaag

SEQ ID NO: 673775 - DNA, 15 bp, Homo sapiens
gtagctggtgcaagc

SEQ ID NO: 673776 - DNA, 15 bp, Homo sapiens
tagctggtgcaagcc

SEQ ID NO: 673777 - DNA, 15 bp, Homo sapiens
agctggtgcaagcca

SEQ ID NO: 673778 - DNA, 15 bp, Homo sapiens
gctggtgcaagccac

SEQ ID NO: 673779 - DNA, 15 bp, Homo sapiens
ctggtgcaagccact

SEQ ID NO: 673780 - DNA, 15 bp, Homo sapiens
tggtgcaagccacta

SEQ ID NO: 673781 - DNA, 15 bp, Homo sapiens
ggtgcaagccactat

SEQ ID NO: 673782 - DNA, 15 bp, Homo sapiens
gtgcaagccactata

SEQ ID NO: 673783 - DNA, 15 bp, Homo sapiens
tgcaagccactatac

SEQ ID NO: 673784 - DNA, 15 bp, Homo sapiens
gcaagccactatacc

SEQ ID NO: 673785 - DNA, 15 bp, Homo sapiens
caagccactataccc

SEQ ID NO: 673786 - DNA, 15 bp, Homo sapiens
aagccactatacccc

SEQ ID NO: 673787 - DNA, 15 bp, Homo sapiens
agccactatacccca

SEQ ID NO: 673788 - DNA, 15 bp, Homo sapiens
gccactataccccac

SEQ ID NO: 673789 - DNA, 15 bp, Homo sapiens
ccactataccccact

SEQ ID NO: 673790 - DNA, 15 bp, Homo sapiens
cactataccccactt

SEQ ID NO: 673791 - DNA, 15 bp, Homo sapiens
actataccccacttc

SEQ ID NO: 673792 - DNA, 15 bp, Homo sapiens
ctataccccacttcc

SEQ ID NO: 673793 - DNA, 15 bp, Homo sapiens
tataccccacttcct

SEQ ID NO: 673794 - DNA, 15 bp, Homo sapiens
ataccccacttccta

SEQ ID NO: 673795 - DNA, 15 bp, Homo sapiens
taccccacttcctat

SEQ ID NO: 673796 - DNA, 15 bp, Homo sapiens
accccacttcctatt

SEQ ID NO: 673797 - DNA, 15 bp, Homo sapiens
ccccacttcctattt

SEQ ID NO: 673798 - DNA, 15 bp, Homo sapiens
cccacttcctatttc

SEQ ID NO: 673799 - DNA, 15 bp, Homo sapiens
ccacttcctatttct

SEQ ID NO: 673800 - DNA, 15 bp, Homo sapiens
cacttcctatttctt

SEQ ID NO: 673801 - DNA, 15 bp, Homo sapiens
acttcctatttctta

SEQ ID NO: 673802 - DNA, 15 bp, Homo sapiens
cttcctatttcttaa

SEQ ID NO: 673803 - DNA, 15 bp, Homo sapiens
ttcctatttcttaaa

SEQ ID NO: 673804 - DNA, 15 bp, Homo sapiens
tcctatttcttaaaa

SEQ ID NO: 673805 - DNA, 15 bp, Homo sapiens
cctatttcttaaaaa

SEQ ID NO: 673806 - DNA, 15 bp, Homo sapiens
ctatttcttaaaaag

SEQ ID NO: 673807 - DNA, 15 bp, Homo sapiens
tatttcttaaaaagt

SEQ ID NO: 673808 - DNA, 15 bp, Homo sapiens
atttcttaaaaagtc

SEQ ID NO: 673809 - DNA, 15 bp, Homo sapiens
tttcttaaaaagtca

SEQ ID NO: 673810 - DNA, 15 bp, Homo sapiens
ttcttaaaaagtcac

SEQ ID NO: 673811 - DNA, 15 bp, Homo sapiens
tcttaaaaagtcaca

SEQ ID NO: 673812 - DNA, 15 bp, Homo sapiens
cttaaaaagtcacag

SEQ ID NO: 673813 - DNA, 15 bp, Homo sapiens
ttaaaaagtcacagc

SEQ ID NO: 673814 - DNA, 15 bp, Homo sapiens
taaaaagtcacagcc

SEQ ID NO: 673815 - DNA, 15 bp, Homo sapiens
aaaaagtcacagccc

SEQ ID NO: 673816 - DNA, 15 bp, Homo sapiens
aaaagtcacagccct

SEQ ID NO: 673817 - DNA, 15 bp, Homo sapiens
aaagtcacagccctg

SEQ ID NO: 673818 - DNA, 15 bp, Homo sapiens
aagtcacagccctgt

SEQ ID NO: 673819 - DNA, 15 bp, Homo sapiens
agtcacagccctgtg

SEQ ID NO: 673820 - DNA, 15 bp, Homo sapiens
gtcacagccctgtgt

SEQ ID NO: 673821 - DNA, 15 bp, Homo sapiens
tcacagccctgtgtg

SEQ ID NO: 673822 - DNA, 15 bp, Homo sapiens
cacagccctgtgtgt

SEQ ID NO: 673823 - DNA, 15 bp, Homo sapiens
acagccctgtgtgtg

SEQ ID NO: 673824 - DNA, 15 bp, Homo sapiens
cagccctgtgtgtgg

SEQ ID NO: 673825 - DNA, 15 bp, Homo sapiens
agccctgtgtgtggc

SEQ ID NO: 673826 - DNA, 15 bp, Homo sapiens
gccctgtgtgtggct

SEQ ID NO: 673827 - DNA, 15 bp, Homo sapiens
ccctgtgtgtggcta

SEQ ID NO: 673828 - DNA, 15 bp, Homo sapiens
cctgtgtgtggctaa

SEQ ID NO: 673829 - DNA, 15 bp, Homo sapiens
ctgtgtgtggctaat

SEQ ID NO: 673830 - DNA, 15 bp, Homo sapiens
tgtgtgtggctaatc

SEQ ID NO: 673831 - DNA, 15 bp, Homo sapiens
gtgtgtggctaatcc

SEQ ID NO: 673832 - DNA, 15 bp, Homo sapiens
tgtgtggctaatcct

SEQ ID NO: 673833 - DNA, 15 bp, Homo sapiens
gtgtggctaatcctg

SEQ ID NO: 673834 - DNA, 15 bp, Homo sapiens
tgtggctaatcctgg

SEQ ID NO: 673835 - DNA, 15 bp, Homo sapiens
gtggctaatcctgga

SEQ ID NO: 673836 - DNA, 15 bp, Homo sapiens
tggctaatcctggac

SEQ ID NO: 673837 - DNA, 15 bp, Homo sapiens
ggctaatcctggaca

SEQ ID NO: 673838 - DNA, 15 bp, Homo sapiens
gctaatcctggacag

SEQ ID NO: 673839 - DNA, 15 bp, Homo sapiens
ctaatcctggacaga

SEQ ID NO: 673840 - DNA, 15 bp, Homo sapiens
taatcctggacagaa

SEQ ID NO: 673841 - DNA, 15 bp, Homo sapiens
aatcctggacagaaa

SEQ ID NO: 673842 - DNA, 15 bp, Homo sapiens
atcctggacagaaat

SEQ ID NO: 673843 - DNA, 15 bp, Homo sapiens
tcctggacagaaatc

SEQ ID NO: 673844 - DNA, 15 bp, Homo sapiens
cctggacagaaatct

SEQ ID NO: 673845 - DNA, 15 bp, Homo sapiens
ctggacagaaatcta

SEQ ID NO: 673846 - DNA, 15 bp, Homo sapiens
tggacagaaatctag

SEQ ID NO: 673847 - DNA, 15 bp, Homo sapiens
ggacagaaatctaga

SEQ ID NO: 673848 - DNA, 15 bp, Homo sapiens
gacagaaatctagaa

SEQ ID NO: 673849 - DNA, 15 bp, Homo sapiens
acagaaatctagaag

SEQ ID NO: 673850 - DNA, 15 bp, Homo sapiens
cagaaatctagaaga

SEQ ID NO: 673851 - DNA, 15 bp, Homo sapiens
agaaatctagaagaa

SEQ ID NO: 673852 - DNA, 15 bp, Homo sapiens
gaaatctagaagaag

SEQ ID NO: 673853 - DNA, 15 bp, Homo sapiens
aaatctagaagaagt

SEQ ID NO: 673854 - DNA, 15 bp, Homo sapiens
aatctagaagaagtc

SEQ ID NO: 673855 - DNA, 15 bp, Homo sapiens
atctagaagaagtca

SEQ ID NO: 673856 - DNA, 15 bp, Homo sapiens
tctagaagaagtcag

SEQ ID NO: 673857 - DNA, 15 bp, Homo sapiens
ctagaagaagtcagc

SEQ ID NO: 673858 - DNA, 15 bp, Homo sapiens
tagaagaagtcagct

SEQ ID NO: 673859 - DNA, 15 bp, Homo sapiens
agaagaagtcagcta

SEQ ID NO: 673860 - DNA, 15 bp, Homo sapiens
gaagaagtcagctac

SEQ ID NO: 673861 - DNA, 15 bp, Homo sapiens
aagaagtcagctact

SEQ ID NO: 673862 - DNA, 15 bp, Homo sapiens
agaagtcagctactt

SEQ ID NO: 673863 - DNA, 15 bp, Homo sapiens
gaagtcagctacttc

SEQ ID NO: 673864 - DNA, 15 bp, Homo sapiens
aagtcagctacttct

SEQ ID NO: 673865 - DNA, 15 bp, Homo sapiens
agtcagctacttctg

SEQ ID NO: 673866 - DNA, 15 bp, Homo sapiens
gtcagctacttctgg

SEQ ID NO: 673867 - DNA, 15 bp, Homo sapiens
tcagctacttctggg

SEQ ID NO: 673868 - DNA, 15 bp, Homo sapiens
cagctacttctgggg

SEQ ID NO: 673869 - DNA, 15 bp, Homo sapiens
agctacttctggggc

SEQ ID NO: 673870 - DNA, 15 bp, Homo sapiens
gctacttctggggcg

SEQ ID NO: 673871 - DNA, 15 bp, Homo sapiens
ctacttctggggcgt

SEQ ID NO: 673872 - DNA, 15 bp, Homo sapiens
tacttctggggcgtg

SEQ ID NO: 673873 - DNA, 15 bp, Homo sapiens
acttctggggcgtgg

SEQ ID NO: 673874 - DNA, 15 bp, Homo sapiens
cttctggggcgtggc

SEQ ID NO: 673875 - DNA, 15 bp, Homo sapiens
ttctggggcgtggct

SEQ ID NO: 673876 - DNA, 15 bp, Homo sapiens
tctggggcgtggctc

SEQ ID NO: 673877 - DNA, 15 bp, Homo sapiens
ctggggcgtggctca

SEQ ID NO: 673878 - DNA, 15 bp, Homo sapiens
tggggcgtggctcac

SEQ ID NO: 673879 - DNA, 15 bp, Homo sapiens
ggggcgtggctcacc

SEQ ID NO: 673880 - DNA, 15 bp, Homo sapiens
gggcgtggctcaccc

SEQ ID NO: 673881 - DNA, 15 bp, Homo sapiens
ggcgtggctcaccca

SEQ ID NO: 673882 - DNA, 15 bp, Homo sapiens
gcgtggctcacccag

SEQ ID NO: 673883 - DNA, 15 bp, Homo sapiens
cgtggctcacccagt

SEQ ID NO: 673884 - DNA, 15 bp, Homo sapiens
gtggctcacccagtg

SEQ ID NO: 673885 - DNA, 15 bp, Homo sapiens
tggctcacccagtgg

SEQ ID NO: 673886 - DNA, 15 bp, Homo sapiens
ggctcacccagtggg

SEQ ID NO: 673887 - DNA, 15 bp, Homo sapiens
gctcacccagtgggc

SEQ ID NO: 673888 - DNA, 15 bp, Homo sapiens
ctcacccagtgggct

SEQ ID NO: 673889 - DNA, 15 bp, Homo sapiens
tcacccagtgggctt

SEQ ID NO: 673890 - DNA, 15 bp, Homo sapiens
cacccagtgggcttc

SEQ ID NO: 673891 - DNA, 15 bp, Homo sapiens
acccagtgggcttca

SEQ ID NO: 673892 - DNA, 15 bp, Homo sapiens
cccagtgggcttcag

SEQ ID NO: 673893 - DNA, 15 bp, Homo sapiens
ccagtgggcttcagg

SEQ ID NO: 673894 - DNA, 15 bp, Homo sapiens
cagtgggcttcaggt

SEQ ID NO: 673895 - DNA, 15 bp, Homo sapiens
agtgggcttcaggtt

SEQ ID NO: 673896 - DNA, 15 bp, Homo sapiens
gtgggcttcaggtta

SEQ ID NO: 673897 - DNA, 15 bp, Homo sapiens
tgggcttcaggttag

SEQ ID NO: 673898 - DNA, 15 bp, Homo sapiens
gggcttcaggttaga

SEQ ID NO: 673899 - DNA, 15 bp, Homo sapiens
ggcttcaggttagat

SEQ ID NO: 673900 - DNA, 15 bp, Homo sapiens
gcttcaggttagata

SEQ ID NO: 673901 - DNA, 15 bp, Homo sapiens
cttcaggttagatat

SEQ ID NO: 673902 - DNA, 15 bp, Homo sapiens
ttcaggttagatatt

SEQ ID NO: 673903 - DNA, 15 bp, Homo sapiens
tcaggttagatattt

SEQ ID NO: 673904 - DNA, 15 bp, Homo sapiens
caggttagatatttc

SEQ ID NO: 673905 - DNA, 15 bp, Homo sapiens
aggttagatatttct

SEQ ID NO: 673906 - DNA, 15 bp, Homo sapiens
ggttagatatttctt

SEQ ID NO: 673907 - DNA, 15 bp, Homo sapiens
gttagatatttctta

SEQ ID NO: 673908 - DNA, 15 bp, Homo sapiens
ttagatatttcttat

SEQ ID NO: 673909 - DNA, 15 bp, Homo sapiens
tagatatttcttata

SEQ ID NO: 673910 - DNA, 15 bp, Homo sapiens
agatatttcttatac

SEQ ID NO: 673911 - DNA, 15 bp, Homo sapiens
gatatttcttatact

SEQ ID NO: 673912 - DNA, 15 bp, Homo sapiens
atatttcttatactt

SEQ ID NO: 673913 - DNA, 15 bp, Homo sapiens
tatttcttatactta

SEQ ID NO: 673914 - DNA, 15 bp, Homo sapiens
atttcttatacttat

SEQ ID NO: 673915 - DNA, 15 bp, Homo sapiens
tttcttatacttatg

SEQ ID NO: 673916 - DNA, 15 bp, Homo sapiens
ttcttatacttatga

SEQ ID NO: 673917 - DNA, 15 bp, Homo sapiens
tcttatacttatgag

SEQ ID NO: 673918 - DNA, 15 bp, Homo sapiens
cttatacttatgagg

SEQ ID NO: 673919 - DNA, 15 bp, Homo sapiens
ttatacttatgaggc

SEQ ID NO: 673920 - DNA, 15 bp, Homo sapiens
tatacttatgaggct

SEQ ID NO: 673921 - DNA, 15 bp, Homo sapiens
atacttatgaggctg

SEQ ID NO: 673922 - DNA, 15 bp, Homo sapiens
tacttatgaggctgg

SEQ ID NO: 673923 - DNA, 15 bp, Homo sapiens
acttatgaggctggg

SEQ ID NO: 673924 - DNA, 15 bp, Homo sapiens
cttatgaggctgggt

SEQ ID NO: 673925 - DNA, 15 bp, Homo sapiens
ttatgaggctgggtg

SEQ ID NO: 673926 - DNA, 15 bp, Homo sapiens
tatgaggctgggtgt

SEQ ID NO: 673927 - DNA, 15 bp, Homo sapiens
atgaggctgggtgtg

SEQ ID NO: 673928 - DNA, 15 bp, Homo sapiens
tgaggctgggtgtgg

SEQ ID NO: 673929 - DNA, 15 bp, Homo sapiens
gaggctgggtgtggt

SEQ ID NO: 673930 - DNA, 15 bp, Homo sapiens
aggctgggtgtggtg

SEQ ID NO: 673931 - DNA, 15 bp, Homo sapiens
ggctgggtgtggtgg

SEQ ID NO: 673932 - DNA, 15 bp, Homo sapiens
gctgggtgtggtggc

SEQ ID NO: 673933 - DNA, 15 bp, Homo sapiens
ctgggtgtggtggct

SEQ ID NO: 673934 - DNA, 15 bp, Homo sapiens
tgggtgtggtggctt

SEQ ID NO: 673935 - DNA, 15 bp, Homo sapiens
gggtgtggtggctta

SEQ ID NO: 673936 - DNA, 15 bp, Homo sapiens
ggtgtggtggcttat

SEQ ID NO: 673937 - DNA, 15 bp, Homo sapiens
gtgtggtggcttatg

SEQ ID NO: 673938 - DNA, 15 bp, Homo sapiens
tgtggtggcttatgc

SEQ ID NO: 673939 - DNA, 15 bp, Homo sapiens
gtggtggcttatgcc

SEQ ID NO: 673940 - DNA, 15 bp, Homo sapiens
tggtggcttatgcct

SEQ ID NO: 673941 - DNA, 15 bp, Homo sapiens
ggtggcttatgcctg

SEQ ID NO: 673942 - DNA, 15 bp, Homo sapiens
gtggcttatgcctgt

SEQ ID NO: 673943 - DNA, 15 bp, Homo sapiens
tggcttatgcctgta

SEQ ID NO: 673944 - DNA, 15 bp, Homo sapiens
ggcttatgcctgtaa

SEQ ID NO: 673945 - DNA, 15 bp, Homo sapiens
gcttatgcctgtaat

SEQ ID NO: 673946 - DNA, 15 bp, Homo sapiens
cttatgcctgtaatc

SEQ ID NO: 673947 - DNA, 15 bp, Homo sapiens
ttatgcctgtaatcc

SEQ ID NO: 673948 - DNA, 15 bp, Homo sapiens
tatgcctgtaatccc

SEQ ID NO: 673949 - DNA, 15 bp, Homo sapiens
ctttgggaggctgaa

SEQ ID NO: 673950 - DNA, 15 bp, Homo sapiens
tttgggaggctgaag

SEQ ID NO: 673951 - DNA, 15 bp, Homo sapiens
ttgggaggctgaagt

SEQ ID NO: 673952 - DNA, 15 bp, Homo sapiens
tgggaggctgaagtg

SEQ ID NO: 673953 - DNA, 15 bp, Homo sapiens
gggaggctgaagtgg

SEQ ID NO: 673954 - DNA, 15 bp, Homo sapiens
ggaggctgaagtggg

SEQ ID NO: 673955 - DNA, 15 bp, Homo sapiens
gaggctgaagtgggt

SEQ ID NO: 673956 - DNA, 15 bp, Homo sapiens
aggctgaagtgggtg

SEQ ID NO: 673957 - DNA, 15 bp, Homo sapiens
ggctgaagtgggtgg

SEQ ID NO: 673958 - DNA, 15 bp, Homo sapiens
gctgaagtgggtgga

SEQ ID NO: 673959 - DNA, 15 bp, Homo sapiens
ctgaagtgggtggat

SEQ ID NO: 673960 - DNA, 15 bp, Homo sapiens
tgaagtgggtggatt

SEQ ID NO: 673961 - DNA, 15 bp, Homo sapiens
gaagtgggtggattg

SEQ ID NO: 673962 - DNA, 15 bp, Homo sapiens
aagtgggtggattgc

SEQ ID NO: 673963 - DNA, 15 bp, Homo sapiens
agtgggtggattgct

SEQ ID NO: 673964 - DNA, 15 bp, Homo sapiens
gggtggattgcttgg

SEQ ID NO: 673965 - DNA, 15 bp, Homo sapiens
ggtggattgcttggg

SEQ ID NO: 673966 - DNA, 15 bp, Homo sapiens
gtggattgcttgggc

SEQ ID NO: 673967 - DNA, 15 bp, Homo sapiens
tggattgcttgggct

SEQ ID NO: 673968 - DNA, 15 bp, Homo sapiens
ggattgcttgggctc

SEQ ID NO: 673969 - DNA, 15 bp, Homo sapiens
gattgcttgggctca

SEQ ID NO: 673970 - DNA, 15 bp, Homo sapiens
attgcttgggctcag

SEQ ID NO: 673971 - DNA, 15 bp, Homo sapiens
ttgcttgggctcagg

SEQ ID NO: 673972 - DNA, 15 bp, Homo sapiens
tgcttgggctcagga

SEQ ID NO: 673973 - DNA, 15 bp, Homo sapiens
gcttgggctcaggag

SEQ ID NO: 673974 - DNA, 15 bp, Homo sapiens
cttgggctcaggagt

SEQ ID NO: 673975 - DNA, 15 bp, Homo sapiens
ttgggctcaggagtt

SEQ ID NO: 673976 - DNA, 15 bp, Homo sapiens
tgggctcaggagttc

SEQ ID NO: 673977 - DNA, 15 bp, Homo sapiens
gggctcaggagttcg

SEQ ID NO: 673978 - DNA, 15 bp, Homo sapiens
ggctcaggagttcga

SEQ ID NO: 673979 - DNA, 15 bp, Homo sapiens
gctcaggagttcgag

SEQ ID NO: 673980 - DNA, 15 bp, Homo sapiens
ctcaggagttcgaga

SEQ ID NO: 673981 - DNA, 15 bp, Homo sapiens
ggagttcgagaccaa

SEQ ID NO: 673982 - DNA, 15 bp, Homo sapiens
gagttcgagaccaac

SEQ ID NO: 673983 - DNA, 15 bp, Homo sapiens
agttcgagaccaacc

SEQ ID NO: 673984 - DNA, 15 bp, Homo sapiens
gttcgagaccaacct

SEQ ID NO: 673985 - DNA, 15 bp, Homo sapiens
ttcgagaccaacctg

SEQ ID NO: 673986 - DNA, 15 bp, Homo sapiens
tcgagaccaacctgg

SEQ ID NO: 673987 - DNA, 15 bp, Homo sapiens
cgagaccaacctggg

SEQ ID NO: 673988 - DNA, 15 bp, Homo sapiens
gagaccaacctgggc

SEQ ID NO: 673989 - DNA, 15 bp, Homo sapiens
agaccaacctgggca

SEQ ID NO: 673990 - DNA, 15 bp, Homo sapiens
gaccaacctgggcaa

SEQ ID NO: 673991 - DNA, 15 bp, Homo sapiens
accaacctgggcaac

SEQ ID NO: 673992 - DNA, 15 bp, Homo sapiens
caacctgggcaacat

SEQ ID NO: 673993 - DNA, 15 bp, Homo sapiens
aacctgggcaacatg

SEQ ID NO: 673994 - DNA, 15 bp, Homo sapiens
acctgggcaacatgg

SEQ ID NO: 673995 - DNA, 15 bp, Homo sapiens
cctgggcaacatggc

SEQ ID NO: 673996 - DNA, 15 bp, Homo sapiens
ctgggcaacatggcg

SEQ ID NO: 673997 - DNA, 15 bp, Homo sapiens
tgggcaacatggcga

SEQ ID NO: 673998 - DNA, 15 bp, Homo sapiens
gggcaacatggcgaa

SEQ ID NO: 673999 - DNA, 15 bp, Homo sapiens
ggcaacatggcgaaa

SEQ ID NO: 674000 - DNA, 15 bp, Homo sapiens
gcaacatggcgaaac

SEQ ID NO: 674001 - DNA, 15 bp, Homo sapiens
caacatggcgaaacc

SEQ ID NO: 674002 - DNA, 15 bp, Homo sapiens
acatggcgaaaccct

SEQ ID NO: 674003 - DNA, 15 bp, Homo sapiens
catggcgaaaccctg

SEQ ID NO: 674004 - DNA, 15 bp, Homo sapiens
atggcgaaaccctgt

SEQ ID NO: 674005 - DNA, 15 bp, Homo sapiens
tggcgaaaccctgtt

SEQ ID NO: 674006 - DNA, 15 bp, Homo sapiens
ggcgaaaccctgttt

SEQ ID NO: 674007 - DNA, 15 bp, Homo sapiens
gcgaaaccctgtttc

SEQ ID NO: 674008 - DNA, 15 bp, Homo sapiens
cgaaaccctgtttct

SEQ ID NO: 674009 - DNA, 15 bp, Homo sapiens
gaaaccctgtttcta

SEQ ID NO: 674010 - DNA, 15 bp, Homo sapiens
aaaccctgtttctag

SEQ ID NO: 674011 - DNA, 15 bp, Homo sapiens
aaccctgtttctaga

SEQ ID NO: 674012 - DNA, 15 bp, Homo sapiens
accctgtttctagaa

SEQ ID NO: 674013 - DNA, 15 bp, Homo sapiens
ccctgtttctagaaa

SEQ ID NO: 674014 - DNA, 15 bp, Homo sapiens
cctgtttctagaaaa

SEQ ID NO: 674015 - DNA, 15 bp, Homo sapiens
ctgtttctagaaaag

SEQ ID NO: 674016 - DNA, 15 bp, Homo sapiens
tgtttctagaaaagg

SEQ ID NO: 674017 - DNA, 15 bp, Homo sapiens
gtttctagaaaaggt

SEQ ID NO: 674018 - DNA, 15 bp, Homo sapiens
tttctagaaaaggta

SEQ ID NO: 674019 - DNA, 15 bp, Homo sapiens
ttctagaaaaggtac

SEQ ID NO: 674020 - DNA, 15 bp, Homo sapiens
tctagaaaaggtaca

SEQ ID NO: 674021 - DNA, 15 bp, Homo sapiens
ctagaaaaggtacaa

SEQ ID NO: 674022 - DNA, 15 bp, Homo sapiens
tagaaaaggtacaaa

SEQ ID NO: 674023 - DNA, 15 bp, Homo sapiens
agaaaaggtacaaaa

SEQ ID NO: 674024 - DNA, 15 bp, Homo sapiens
gaaaaggtacaaaaa

SEQ ID NO: 674025 - DNA, 15 bp, Homo sapiens
aaaaggtacaaaaat

SEQ ID NO: 674026 - DNA, 15 bp, Homo sapiens
aaaggtacaaaaatt

SEQ ID NO: 674027 - DNA, 15 bp, Homo sapiens
aaggtacaaaaatta

SEQ ID NO: 674028 - DNA, 15 bp, Homo sapiens
aggtacaaaaattag

SEQ ID NO: 674029 - DNA, 15 bp, Homo sapiens
ggtacaaaaattagc

SEQ ID NO: 674030 - DNA, 15 bp, Homo sapiens
gtacaaaaattagct

SEQ ID NO: 674031 - DNA, 15 bp, Homo sapiens
aaattagctgggcag

SEQ ID NO: 674032 - DNA, 15 bp, Homo sapiens
aattagctgggcagg

SEQ ID NO: 674033 - DNA, 15 bp, Homo sapiens
attagctgggcaggt

SEQ ID NO: 674034 - DNA, 15 bp, Homo sapiens
ttagctgggcaggtg

SEQ ID NO: 674035 - DNA, 15 bp, Homo sapiens
tagctgggcaggtgg

SEQ ID NO: 674036 - DNA, 15 bp, Homo sapiens
agctgggcaggtggc

SEQ ID NO: 674037 - DNA, 15 bp, Homo sapiens
gctgggcaggtggca

SEQ ID NO: 674038 - DNA, 15 bp, Homo sapiens
ctgggcaggtggcac

SEQ ID NO: 674039 - DNA, 15 bp, Homo sapiens
tgggcaggtggcacg

SEQ ID NO: 674040 - DNA, 15 bp, Homo sapiens
gggcaggtggcacgt

SEQ ID NO: 674041 - DNA, 15 bp, Homo sapiens
ggcaggtggcacgtg

SEQ ID NO: 674042 - DNA, 15 bp, Homo sapiens
gcaggtggcacgtgc

SEQ ID NO: 674043 - DNA, 15 bp, Homo sapiens
caggtggcacgtgcc

SEQ ID NO: 674044 - DNA, 15 bp, Homo sapiens
aggtggcacgtgcct

SEQ ID NO: 674045 - DNA, 15 bp, Homo sapiens
ggtggcacgtgcctg

SEQ ID NO: 674046 - DNA, 15 bp, Homo sapiens
gtggcacgtgcctgt

SEQ ID NO: 674047 - DNA, 15 bp, Homo sapiens
tggcacgtgcctgtg

SEQ ID NO: 674048 - DNA, 15 bp, Homo sapiens
ggcacgtgcctgtgg

SEQ ID NO: 674049 - DNA, 15 bp, Homo sapiens
gcacgtgcctgtggt

SEQ ID NO: 674050 - DNA, 15 bp, Homo sapiens
cacgtgcctgtggta

SEQ ID NO: 674051 - DNA, 15 bp, Homo sapiens
acgtgcctgtggtac

SEQ ID NO: 674052 - DNA, 15 bp, Homo sapiens
cgtgcctgtggtacc

SEQ ID NO: 674053 - DNA, 15 bp, Homo sapiens
gtgcctgtggtacca

SEQ ID NO: 674054 - DNA, 15 bp, Homo sapiens
tgcctgtggtaccag

SEQ ID NO: 674055 - DNA, 15 bp, Homo sapiens
gcctgtggtaccagc

SEQ ID NO: 674056 - DNA, 15 bp, Homo sapiens
cctgtggtaccagct

SEQ ID NO: 674057 - DNA, 15 bp, Homo sapiens
ctgtggtaccagcta

SEQ ID NO: 674058 - DNA, 15 bp, Homo sapiens
tgtggtaccagctac

SEQ ID NO: 674059 - DNA, 15 bp, Homo sapiens
gtggtaccagctact

SEQ ID NO: 674060 - DNA, 15 bp, Homo sapiens
tggtaccagctactt

SEQ ID NO: 674061 - DNA, 15 bp, Homo sapiens
ggtaccagctacttg

SEQ ID NO: 674062 - DNA, 15 bp, Homo sapiens
gtaccagctacttga

SEQ ID NO: 674063 - DNA, 15 bp, Homo sapiens
taccagctacttgag

SEQ ID NO: 674064 - DNA, 15 bp, Homo sapiens
accagctacttgagg

SEQ ID NO: 674065 - DNA, 15 bp, Homo sapiens
ccagctacttgaggg

SEQ ID NO: 674066 - DNA, 15 bp, Homo sapiens
cagctacttgagggc

SEQ ID NO: 674067 - DNA, 15 bp, Homo sapiens
agctacttgagggcc

SEQ ID NO: 674068 - DNA, 15 bp, Homo sapiens
gctacttgagggcct

SEQ ID NO: 674069 - DNA, 15 bp, Homo sapiens
ctacttgagggcctg

SEQ ID NO: 674070 - DNA, 15 bp, Homo sapiens
tacttgagggcctga

SEQ ID NO: 674071 - DNA, 15 bp, Homo sapiens
acttgagggcctgag

SEQ ID NO: 674072 - DNA, 15 bp, Homo sapiens
cttgagggcctgagg

SEQ ID NO: 674073 - DNA, 15 bp, Homo sapiens
ttgagggcctgaggc

SEQ ID NO: 674074 - DNA, 15 bp, Homo sapiens
tgagggcctgaggca

SEQ ID NO: 674075 - DNA, 15 bp, Homo sapiens
gagggcctgaggcag

SEQ ID NO: 674076 - DNA, 15 bp, Homo sapiens
agggcctgaggcagg

SEQ ID NO: 674077 - DNA, 15 bp, Homo sapiens
gggcctgaggcagga

SEQ ID NO: 674078 - DNA, 15 bp, Homo sapiens
ggcctgaggcaggag

SEQ ID NO: 674079 - DNA, 15 bp, Homo sapiens
gcctgaggcaggagg

SEQ ID NO: 674080 - DNA, 15 bp, Homo sapiens
cctgaggcaggagga

SEQ ID NO: 674081 - DNA, 15 bp, Homo sapiens
ggaggatcgcttgaa

SEQ ID NO: 674082 - DNA, 15 bp, Homo sapiens
gaggatcgcttgaac

SEQ ID NO: 674083 - DNA, 15 bp, Homo sapiens
aggatcgcttgaacc

SEQ ID NO: 674084 - DNA, 15 bp, Homo sapiens
ggatcgcttgaacct

SEQ ID NO: 674085 - DNA, 15 bp, Homo sapiens
gatcgcttgaacctg

SEQ ID NO: 674086 - DNA, 15 bp, Homo sapiens
tgaacctgggaggtc

SEQ ID NO: 674087 - DNA, 15 bp, Homo sapiens
gaacctgggaggtcg

SEQ ID NO: 674088 - DNA, 15 bp, Homo sapiens
aacctgggaggtcga

SEQ ID NO: 674089 - DNA, 15 bp, Homo sapiens
acctgggaggtcgag

SEQ ID NO: 674090 - DNA, 15 bp, Homo sapiens
cctgggaggtcgagg

SEQ ID NO: 674091 - DNA, 15 bp, Homo sapiens
ctgggaggtcgaggt

SEQ ID NO: 674092 - DNA, 15 bp, Homo sapiens
tgggaggtcgaggtt

SEQ ID NO: 674093 - DNA, 15 bp, Homo sapiens
gggaggtcgaggttg

SEQ ID NO: 674094 - DNA, 15 bp, Homo sapiens
ggaggtcgaggttgc

SEQ ID NO: 674095 - DNA, 15 bp, Homo sapiens
gaggtcgaggttgca

SEQ ID NO: 674096 - DNA, 15 bp, Homo sapiens
aggtcgaggttgcag

SEQ ID NO: 674097 - DNA, 15 bp, Homo sapiens
ggtcgaggttgcagt

SEQ ID NO: 674098 - DNA, 15 bp, Homo sapiens
gtcgaggttgcagtg

SEQ ID NO: 674099 - DNA, 15 bp, Homo sapiens
tcgaggttgcagtga

SEQ ID NO: 674100 - DNA, 15 bp, Homo sapiens
cgaggttgcagtgaa

SEQ ID NO: 674101 - DNA, 15 bp, Homo sapiens
gaggttgcagtgaac

SEQ ID NO: 674102 - DNA, 15 bp, Homo sapiens
aggttgcagtgaact

SEQ ID NO: 674103 - DNA, 15 bp, Homo sapiens
ggttgcagtgaactg

SEQ ID NO: 674104 - DNA, 15 bp, Homo sapiens
cagtgaactgagatc

SEQ ID NO: 674105 - DNA, 15 bp, Homo sapiens
agtgaactgagatca

SEQ ID NO: 674106 - DNA, 15 bp, Homo sapiens
gtgaactgagatcat

SEQ ID NO: 674107 - DNA, 15 bp, Homo sapiens
tgaactgagatcatg

SEQ ID NO: 674108 - DNA, 15 bp, Homo sapiens
gaactgagatcatgt

SEQ ID NO: 674109 - DNA, 15 bp, Homo sapiens
aactgagatcatgtc

SEQ ID NO: 674110 - DNA, 15 bp, Homo sapiens
actgagatcatgtca

SEQ ID NO: 674111 - DNA, 15 bp, Homo sapiens
ctgagatcatgtcac

SEQ ID NO: 674112 - DNA, 15 bp, Homo sapiens
tgagatcatgtcact

SEQ ID NO: 674113 - DNA, 15 bp, Homo sapiens
gagatcatgtcactg

SEQ ID NO: 674114 - DNA, 15 bp, Homo sapiens
agatcatgtcactgc

SEQ ID NO: 674115 - DNA, 15 bp, Homo sapiens
gatcatgtcactgca

SEQ ID NO: 674116 - DNA, 15 bp, Homo sapiens
atcatgtcactgcac

SEQ ID NO: 674117 - DNA, 15 bp, Homo sapiens
tcatgtcactgcact

SEQ ID NO: 674118 - DNA, 15 bp, Homo sapiens
catgtcactgcactc

SEQ ID NO: 674119 - DNA, 15 bp, Homo sapiens
atgtcactgcactcc

SEQ ID NO: 674120 - DNA, 15 bp, Homo sapiens
tgtcactgcactcca

SEQ ID NO: 674121 - DNA, 15 bp, Homo sapiens
gtcactgcactccag

SEQ ID NO: 674122 - DNA, 15 bp, Homo sapiens
tcactgcactccagc

SEQ ID NO: 674123 - DNA, 15 bp, Homo sapiens
gcactccagcctggt

SEQ ID NO: 674124 - DNA, 15 bp, Homo sapiens
cactccagcctggtg

SEQ ID NO: 674125 - DNA, 15 bp, Homo sapiens
actccagcctggtga

SEQ ID NO: 674126 - DNA, 15 bp, Homo sapiens
ctccagcctggtgac

SEQ ID NO: 674127 - DNA, 15 bp, Homo sapiens
tccagcctggtgaca

SEQ ID NO: 674128 - DNA, 15 bp, Homo sapiens
ccagcctggtgacag

SEQ ID NO: 674129 - DNA, 15 bp, Homo sapiens
cagcctggtgacaga

SEQ ID NO: 674130 - DNA, 15 bp, Homo sapiens
agcctggtgacagag

SEQ ID NO: 674131 - DNA, 15 bp, Homo sapiens
gcctggtgacagagc

SEQ ID NO: 674132 - DNA, 15 bp, Homo sapiens
cctggtgacagagca

SEQ ID NO: 674133 - DNA, 15 bp, Homo sapiens
ctggtgacagagcaa

SEQ ID NO: 674134 - DNA, 15 bp, Homo sapiens
tggtgacagagcaag

SEQ ID NO: 674135 - DNA, 15 bp, Homo sapiens
tgacagagcaagacc

SEQ ID NO: 674136 - DNA, 15 bp, Homo sapiens
gacagagcaagaccc

SEQ ID NO: 674137 - DNA, 15 bp, Homo sapiens
acagagcaagacccc

SEQ ID NO: 674138 - DNA, 15 bp, Homo sapiens
cagagcaagaccccg

SEQ ID NO: 674139 - DNA, 15 bp, Homo sapiens
agagcaagaccccgt

SEQ ID NO: 674140 - DNA, 15 bp, Homo sapiens
gagcaagaccccgtc

SEQ ID NO: 674141 - DNA, 15 bp, Homo sapiens
agcaagaccccgtct

SEQ ID NO: 674142 - DNA, 15 bp, Homo sapiens
gcaagaccccgtctc

SEQ ID NO: 674143 - DNA, 15 bp, Homo sapiens
caagaccccgtctca

SEQ ID NO: 674144 - DNA, 15 bp, Homo sapiens
aagaccccgtctcaa

SEQ ID NO: 674145 - DNA, 15 bp, Homo sapiens
agaccccgtctcaaa

SEQ ID NO: 674146 - DNA, 15 bp, Homo sapiens
gaccccgtctcaaaa

SEQ ID NO: 674147 - DNA, 15 bp, Homo sapiens
accccgtctcaaaaa

SEQ ID NO: 674148 - DNA, 15 bp, Homo sapiens
ccccgtctcaaaaaa

SEQ ID NO: 674149 - DNA, 15 bp, Homo sapiens
cccgtctcaaaaaaa

SEQ ID NO: 674150 - DNA, 15 bp, Homo sapiens
aaaaaagaaagaaaa

SEQ ID NO: 674151 - DNA, 15 bp, Homo sapiens
aaaaagaaagaaaaa

SEQ ID NO: 674152 - DNA, 15 bp, Homo sapiens
aaaagaaagaaaaaa

SEQ ID NO: 674153 - DNA, 15 bp, Homo sapiens
aaagaaagaaaaaaa

SEQ ID NO: 674154 - DNA, 15 bp, Homo sapiens
aagaaagaaaaaaat

SEQ ID NO: 674155 - DNA, 15 bp, Homo sapiens
agaaagaaaaaaatt

SEQ ID NO: 674156 - DNA, 15 bp, Homo sapiens
gaaagaaaaaaattc

SEQ ID NO: 674157 - DNA, 15 bp, Homo sapiens
aaagaaaaaaattct

SEQ ID NO: 674158 - DNA, 15 bp, Homo sapiens
aagaaaaaaattctt

SEQ ID NO: 674159 - DNA, 15 bp, Homo sapiens
agaaaaaaattctta

SEQ ID NO: 674160 - DNA, 15 bp, Homo sapiens
gaaaaaaattcttat

SEQ ID NO: 674161 - DNA, 15 bp, Homo sapiens
aaaaaaattcttatg

SEQ ID NO: 674162 - DNA, 15 bp, Homo sapiens
aaaaaattcttatgc

SEQ ID NO: 674163 - DNA, 15 bp, Homo sapiens
aaaaattcttatgca

SEQ ID NO: 674164 - DNA, 15 bp, Homo sapiens
aaaattcttatgcat

SEQ ID NO: 674165 - DNA, 15 bp, Homo sapiens
aaattcttatgcata

SEQ ID NO: 674166 - DNA, 15 bp, Homo sapiens
aattcttatgcatag

SEQ ID NO: 674167 - DNA, 15 bp, Homo sapiens
attcttatgcataga

SEQ ID NO: 674168 - DNA, 15 bp, Homo sapiens
ttcttatgcatagat

SEQ ID NO: 674169 - DNA, 15 bp, Homo sapiens
tcttatgcatagatt

SEQ ID NO: 674170 - DNA, 15 bp, Homo sapiens
cttatgcatagattt

SEQ ID NO: 674171 - DNA, 15 bp, Homo sapiens
ttatgcatagatttg

SEQ ID NO: 674172 - DNA, 15 bp, Homo sapiens
tatgcatagatttgc

SEQ ID NO: 674173 - DNA, 15 bp, Homo sapiens
atgcatagatttgcc

SEQ ID NO: 674174 - DNA, 15 bp, Homo sapiens
tgcatagatttgcct

SEQ ID NO: 674175 - DNA, 15 bp, Homo sapiens
gcatagatttgcctc

SEQ ID NO: 674176 - DNA, 15 bp, Homo sapiens
catagatttgcctct

SEQ ID NO: 674177 - DNA, 15 bp, Homo sapiens
atagatttgcctctt

SEQ ID NO: 674178 - DNA, 15 bp, Homo sapiens
tagatttgcctcttt

SEQ ID NO: 674179 - DNA, 15 bp, Homo sapiens
agatttgcctctttt

SEQ ID NO: 674180 - DNA, 15 bp, Homo sapiens
gatttgcctcttttc

SEQ ID NO: 674181 - DNA, 15 bp, Homo sapiens
atttgcctcttttct

SEQ ID NO: 674182 - DNA, 15 bp, Homo sapiens
tttgcctcttttctg

SEQ ID NO: 674183 - DNA, 15 bp, Homo sapiens
ttgcctcttttctgt

SEQ ID NO: 674184 - DNA, 15 bp, Homo sapiens
tgcctcttttctgtt

SEQ ID NO: 674185 - DNA, 15 bp, Homo sapiens
gcctcttttctgttt

SEQ ID NO: 674186 - DNA, 15 bp, Homo sapiens
cctcttttctgtttg

SEQ ID NO: 674187 - DNA, 15 bp, Homo sapiens
ctcttttctgtttgt

SEQ ID NO: 674188 - DNA, 15 bp, Homo sapiens
tcttttctgtttgtt

SEQ ID NO: 674189 - DNA, 15 bp, Homo sapiens
cttttctgtttgttt

SEQ ID NO: 674190 - DNA, 15 bp, Homo sapiens
ttttctgtttgtttg

SEQ ID NO: 674191 - DNA, 15 bp, Homo sapiens
tttctgtttgtttgt

SEQ ID NO: 674192 - DNA, 15 bp, Homo sapiens
ttctgtttgtttgtt

SEQ ID NO: 674193 - DNA, 15 bp, Homo sapiens
tctgtttgtttgttt

SEQ ID NO: 674194 - DNA, 15 bp, Homo sapiens
ctgtttgtttgtttt

SEQ ID NO: 674195 - DNA, 15 bp, Homo sapiens
tgtttgtttgttttg

SEQ ID NO: 674196 - DNA, 15 bp, Homo sapiens
gtttgtttgttttga

SEQ ID NO: 674197 - DNA, 15 bp, Homo sapiens
tgtttgttttgagat

SEQ ID NO: 674198 - DNA, 15 bp, Homo sapiens
gtttgttttgagatg

SEQ ID NO: 674199 - DNA, 15 bp, Homo sapiens
tttgttttgagatgg

SEQ ID NO: 674200 - DNA, 15 bp, Homo sapiens
ttgttttgagatgga

SEQ ID NO: 674201 - DNA, 15 bp, Homo sapiens
tgttttgagatggag

SEQ ID NO: 674202 - DNA, 15 bp, Homo sapiens
gttttgagatggagt

SEQ ID NO: 674203 - DNA, 15 bp, Homo sapiens
tggagtacagtggct

SEQ ID NO: 674204 - DNA, 15 bp, Homo sapiens
ggagtacagtggctc

SEQ ID NO: 674205 - DNA, 15 bp, Homo sapiens
gagtacagtggctca

SEQ ID NO: 674206 - DNA, 15 bp, Homo sapiens
agtacagtggctcaa

SEQ ID NO: 674207 - DNA, 15 bp, Homo sapiens
gtacagtggctcaac

SEQ ID NO: 674208 - DNA, 15 bp, Homo sapiens
tacagtggctcaacc

SEQ ID NO: 674209 - DNA, 15 bp, Homo sapiens
acagtggctcaacct

SEQ ID NO: 674210 - DNA, 15 bp, Homo sapiens
cagtggctcaacctc

SEQ ID NO: 674211 - DNA, 15 bp, Homo sapiens
agtggctcaacctcg

SEQ ID NO: 674212 - DNA, 15 bp, Homo sapiens
gtggctcaacctcgg

SEQ ID NO: 674213 - DNA, 15 bp, Homo sapiens
tggctcaacctcggc

SEQ ID NO: 674214 - DNA, 15 bp, Homo sapiens
ggctcaacctcggct

SEQ ID NO: 674215 - DNA, 15 bp, Homo sapiens
gctcaacctcggctc

SEQ ID NO: 674216 - DNA, 15 bp, Homo sapiens
ctcaacctcggctca

SEQ ID NO: 674217 - DNA, 15 bp, Homo sapiens
tcaacctcggctcac

SEQ ID NO: 674218 - DNA, 15 bp, Homo sapiens
caacctcggctcact

SEQ ID NO: 674219 - DNA, 15 bp, Homo sapiens
aacctcggctcactg

SEQ ID NO: 674220 - DNA, 15 bp, Homo sapiens
acctcggctcactgc

SEQ ID NO: 674221 - DNA, 15 bp, Homo sapiens
cctcggctcactgca

SEQ ID NO: 674222 - DNA, 15 bp, Homo sapiens
aacctctgcctcccg

SEQ ID NO: 674223 - DNA, 15 bp, Homo sapiens
acctctgcctcccgg

SEQ ID NO: 674224 - DNA, 15 bp, Homo sapiens
cctctgcctcccggg

SEQ ID NO: 674225 - DNA, 15 bp, Homo sapiens
ctctgcctcccgggt

SEQ ID NO: 674226 - DNA, 15 bp, Homo sapiens
tctgcctcccgggtt

SEQ ID NO: 674227 - DNA, 15 bp, Homo sapiens
ctgcctcccgggttc

SEQ ID NO: 674228 - DNA, 15 bp, Homo sapiens
tgcctcccgggttca

SEQ ID NO: 674229 - DNA, 15 bp, Homo sapiens
tcccgggttcaagca

SEQ ID NO: 674230 - DNA, 15 bp, Homo sapiens
cccgggttcaagcaa

SEQ ID NO: 674231 - DNA, 15 bp, Homo sapiens
ccgggttcaagcaat

SEQ ID NO: 674232 - DNA, 15 bp, Homo sapiens
cgggttcaagcaatt

SEQ ID NO: 674233 - DNA, 15 bp, Homo sapiens
ggcgcccgccaccat

SEQ ID NO: 674234 - DNA, 15 bp, Homo sapiens
cccgccaccatgccc

SEQ ID NO: 674235 - DNA, 15 bp, Homo sapiens
ccgccaccatgccca

SEQ ID NO: 674236 - DNA, 15 bp, Homo sapiens
cgccaccatgcccag

SEQ ID NO: 674237 - DNA, 15 bp, Homo sapiens
caccatgcccagcta

SEQ ID NO: 674238 - DNA, 15 bp, Homo sapiens
accatgcccagctaa

SEQ ID NO: 674239 - DNA, 15 bp, Homo sapiens
ccatgcccagctaat

SEQ ID NO: 674240 - DNA, 15 bp, Homo sapiens
tttagtagagactga

SEQ ID NO: 674241 - DNA, 15 bp, Homo sapiens
ttagtagagactgac

SEQ ID NO: 674242 - DNA, 15 bp, Homo sapiens
tagtagagactgact

SEQ ID NO: 674243 - DNA, 15 bp, Homo sapiens
ctgactgggtttcat

SEQ ID NO: 674244 - DNA, 15 bp, Homo sapiens
tgactgggtttcatc

SEQ ID NO: 674245 - DNA, 15 bp, Homo sapiens
gactgggtttcatca

SEQ ID NO: 674246 - DNA, 15 bp, Homo sapiens
actgggtttcatcat

SEQ ID NO: 674247 - DNA, 15 bp, Homo sapiens
ctgggtttcatcatg

SEQ ID NO: 674248 - DNA, 15 bp, Homo sapiens
tgggtttcatcatgt

SEQ ID NO: 674249 - DNA, 15 bp, Homo sapiens
gggtttcatcatgtt

SEQ ID NO: 674250 - DNA, 15 bp, Homo sapiens
ggtttcatcatgttg

SEQ ID NO: 674251 - DNA, 15 bp, Homo sapiens
gtttcatcatgttgg

SEQ ID NO: 674252 - DNA, 15 bp, Homo sapiens
tttcatcatgttggc

SEQ ID NO: 674253 - DNA, 15 bp, Homo sapiens
ttcatcatgttggcc

SEQ ID NO: 674254 - DNA, 15 bp, Homo sapiens
tcatcatgttggcca

SEQ ID NO: 674255 - DNA, 15 bp, Homo sapiens
catcatgttggccag

SEQ ID NO: 674256 - DNA, 15 bp, Homo sapiens
atcatgttggccagg

SEQ ID NO: 674257 - DNA, 15 bp, Homo sapiens
tcatgttggccaggc

SEQ ID NO: 674258 - DNA, 15 bp, Homo sapiens
ctggtctcgaactct

SEQ ID NO: 674259 - DNA, 15 bp, Homo sapiens
tggtctcgaactctt

SEQ ID NO: 674260 - DNA, 15 bp, Homo sapiens
ggtctcgaactcttg

SEQ ID NO: 674261 - DNA, 15 bp, Homo sapiens
gtctcgaactcttga

SEQ ID NO: 674262 - DNA, 15 bp, Homo sapiens
tctcgaactcttgac

SEQ ID NO: 674263 - DNA, 15 bp, Homo sapiens
ctcgaactcttgacc

SEQ ID NO: 674264 - DNA, 15 bp, Homo sapiens
tcgaactcttgacct

SEQ ID NO: 674265 - DNA, 15 bp, Homo sapiens
cgaactcttgacctc

SEQ ID NO: 674266 - DNA, 15 bp, Homo sapiens
aactcttgacctcat

SEQ ID NO: 674267 - DNA, 15 bp, Homo sapiens
actcttgacctcatg

SEQ ID NO: 674268 - DNA, 15 bp, Homo sapiens
ctcttgacctcatga

SEQ ID NO: 674269 - DNA, 15 bp, Homo sapiens
tcttgacctcatgat

SEQ ID NO: 674270 - DNA, 15 bp, Homo sapiens
cttgacctcatgatc

SEQ ID NO: 674271 - DNA, 15 bp, Homo sapiens
ttgacctcatgatcc

SEQ ID NO: 674272 - DNA, 15 bp, Homo sapiens
ctcatgatccgcccg

SEQ ID NO: 674273 - DNA, 15 bp, Homo sapiens
tcatgatccgcccgc

SEQ ID NO: 674274 - DNA, 15 bp, Homo sapiens
catgatccgcccgcc

SEQ ID NO: 674275 - DNA, 15 bp, Homo sapiens
atgatccgcccgcct

SEQ ID NO: 674276 - DNA, 15 bp, Homo sapiens
gatccgcccgcctca

SEQ ID NO: 674277 - DNA, 15 bp, Homo sapiens
atccgcccgcctcag

SEQ ID NO: 674278 - DNA, 15 bp, Homo sapiens
tccgcccgcctcagc

SEQ ID NO: 674279 - DNA, 15 bp, Homo sapiens
ccgcccgcctcagcc

SEQ ID NO: 674280 - DNA, 15 bp, Homo sapiens
cgcccgcctcagcct

SEQ ID NO: 674281 - DNA, 15 bp, Homo sapiens
gcccgcctcagcctc

SEQ ID NO: 674282 - DNA, 15 bp, Homo sapiens
ctcagcctcccaaaa

SEQ ID NO: 674283 - DNA, 15 bp, Homo sapiens
tcagcctcccaaaat

SEQ ID NO: 674284 - DNA, 15 bp, Homo sapiens
cagcctcccaaaatg

SEQ ID NO: 674285 - DNA, 15 bp, Homo sapiens
agcctcccaaaatgc

SEQ ID NO: 674286 - DNA, 15 bp, Homo sapiens
tcccaaaatgctggg

SEQ ID NO: 674287 - DNA, 15 bp, Homo sapiens
cccaaaatgctggga

SEQ ID NO: 674288 - DNA, 15 bp, Homo sapiens
ccaaaatgctgggat

SEQ ID NO: 674289 - DNA, 15 bp, Homo sapiens
caaaatgctgggatt

SEQ ID NO: 674290 - DNA, 15 bp, Homo sapiens
aaaatgctgggatta

SEQ ID NO: 674291 - DNA, 15 bp, Homo sapiens
aaatgctgggattac

SEQ ID NO: 674292 - DNA, 15 bp, Homo sapiens
aatgctgggattaca

SEQ ID NO: 674293 - DNA, 15 bp, Homo sapiens
atgctgggattacag

SEQ ID NO: 674294 - DNA, 15 bp, Homo sapiens
ggcgtgagccaccag

SEQ ID NO: 674295 - DNA, 15 bp, Homo sapiens
gcgtgagccaccagg

SEQ ID NO: 674296 - DNA, 15 bp, Homo sapiens
cgtgagccaccaggc

SEQ ID NO: 674297 - DNA, 15 bp, Homo sapiens
gtgagccaccaggcc

SEQ ID NO: 674298 - DNA, 15 bp, Homo sapiens
tgagccaccaggccc

SEQ ID NO: 674299 - DNA, 15 bp, Homo sapiens
gagccaccaggccca

SEQ ID NO: 674300 - DNA, 15 bp, Homo sapiens
agccaccaggcccag

SEQ ID NO: 674301 - DNA, 15 bp, Homo sapiens
gccaccaggcccagg

SEQ ID NO: 674302 - DNA, 15 bp, Homo sapiens
ccaccaggcccaggc

SEQ ID NO: 674303 - DNA, 15 bp, Homo sapiens
caccaggcccaggcc

SEQ ID NO: 674304 - DNA, 15 bp, Homo sapiens
accaggcccaggccg

SEQ ID NO: 674305 - DNA, 15 bp, Homo sapiens
ccaggcccaggccgc

SEQ ID NO: 674306 - DNA, 15 bp, Homo sapiens
caggcccaggccgca

SEQ ID NO: 674307 - DNA, 15 bp, Homo sapiens
aggcccaggccgcaa

SEQ ID NO: 674308 - DNA, 15 bp, Homo sapiens
ggcccaggccgcaag

SEQ ID NO: 674309 - DNA, 15 bp, Homo sapiens
gcccaggccgcaagg

SEQ ID NO: 674310 - DNA, 15 bp, Homo sapiens
cccaggccgcaaggc

SEQ ID NO: 674311 - DNA, 15 bp, Homo sapiens
ccaggccgcaaggcg

SEQ ID NO: 674312 - DNA, 15 bp, Homo sapiens
caggccgcaaggcga

SEQ ID NO: 674313 - DNA, 15 bp, Homo sapiens
aggccgcaaggcgat

SEQ ID NO: 674314 - DNA, 15 bp, Homo sapiens
ggccgcaaggcgatc

SEQ ID NO: 674315 - DNA, 15 bp, Homo sapiens
gccgcaaggcgatct

SEQ ID NO: 674316 - DNA, 15 bp, Homo sapiens
ccgcaaggcgatctc

SEQ ID NO: 674317 - DNA, 15 bp, Homo sapiens
cgcaaggcgatctct

SEQ ID NO: 674318 - DNA, 15 bp, Homo sapiens
gcaaggcgatctcta

SEQ ID NO: 674319 - DNA, 15 bp, Homo sapiens
caaggcgatctctaa

SEQ ID NO: 674320 - DNA, 15 bp, Homo sapiens
aaggcgatctctaaa

SEQ ID NO: 674321 - DNA, 15 bp, Homo sapiens
aggcgatctctaaac

SEQ ID NO: 674322 - DNA, 15 bp, Homo sapiens
ggcgatctctaaaca

SEQ ID NO: 674323 - DNA, 15 bp, Homo sapiens
gcgatctctaaacaa

SEQ ID NO: 674324 - DNA, 15 bp, Homo sapiens
cgatctctaaacaaa

SEQ ID NO: 674325 - DNA, 15 bp, Homo sapiens
gatctctaaacaaac

SEQ ID NO: 674326 - DNA, 15 bp, Homo sapiens
atctctaaacaaaca

SEQ ID NO: 674327 - DNA, 15 bp, Homo sapiens
tctctaaacaaacat

SEQ ID NO: 674328 - DNA, 15 bp, Homo sapiens
ctctaaacaaacata

SEQ ID NO: 674329 - DNA, 15 bp, Homo sapiens
tctaaacaaacataa

SEQ ID NO: 674330 - DNA, 15 bp, Homo sapiens
ctaaacaaacataaa

SEQ ID NO: 674331 - DNA, 15 bp, Homo sapiens
taaacaaacataaaa

SEQ ID NO: 674332 - DNA, 15 bp, Homo sapiens
aaacaaacataaaag

SEQ ID NO: 674333 - DNA, 15 bp, Homo sapiens
aacaaacataaaaga

SEQ ID NO: 674334 - DNA, 15 bp, Homo sapiens
acaaacataaaagac

SEQ ID NO: 674335 - DNA, 15 bp, Homo sapiens
caaacataaaagacc

SEQ ID NO: 674336 - DNA, 15 bp, Homo sapiens
aaacataaaagacca

SEQ ID NO: 674337 - DNA, 15 bp, Homo sapiens
aacataaaagaccag

SEQ ID NO: 674338 - DNA, 15 bp, Homo sapiens
acataaaagaccagg

SEQ ID NO: 674339 - DNA, 15 bp, Homo sapiens
cataaaagaccagga

SEQ ID NO: 674340 - DNA, 15 bp, Homo sapiens
ataaaagaccaggag

SEQ ID NO: 674341 - DNA, 15 bp, Homo sapiens
taaaagaccaggagt

SEQ ID NO: 674342 - DNA, 15 bp, Homo sapiens
aaaagaccaggagtc

SEQ ID NO: 674343 - DNA, 15 bp, Homo sapiens
aaagaccaggagtca

SEQ ID NO: 674344 - DNA, 15 bp, Homo sapiens
aagaccaggagtcaa

SEQ ID NO: 674345 - DNA, 15 bp, Homo sapiens
agaccaggagtcaag

SEQ ID NO: 674346 - DNA, 15 bp, Homo sapiens
gaccaggagtcaagg

SEQ ID NO: 674347 - DNA, 15 bp, Homo sapiens
accaggagtcaaggt

SEQ ID NO: 674348 - DNA, 15 bp, Homo sapiens
ccaggagtcaaggtt

SEQ ID NO: 674349 - DNA, 15 bp, Homo sapiens
caggagtcaaggtta

SEQ ID NO: 674350 - DNA, 15 bp, Homo sapiens
aggagtcaaggttat

SEQ ID NO: 674351 - DNA, 15 bp, Homo sapiens
ggagtcaaggttatg

SEQ ID NO: 674352 - DNA, 15 bp, Homo sapiens
gagtcaaggttatgg

SEQ ID NO: 674353 - DNA, 15 bp, Homo sapiens
agtcaaggttatggt

SEQ ID NO: 674354 - DNA, 15 bp, Homo sapiens
gtcaaggttatggta

SEQ ID NO: 674355 - DNA, 15 bp, Homo sapiens
tcaaggttatggtac

SEQ ID NO: 674356 - DNA, 15 bp, Homo sapiens
caaggttatggtacg

SEQ ID NO: 674357 - DNA, 15 bp, Homo sapiens
aaggttatggtacga

SEQ ID NO: 674358 - DNA, 15 bp, Homo sapiens
aggttatggtacgat

SEQ ID NO: 674359 - DNA, 15 bp, Homo sapiens
ggttatggtacgatg

SEQ ID NO: 674360 - DNA, 15 bp, Homo sapiens
gttatggtacgatgc

SEQ ID NO: 674361 - DNA, 15 bp, Homo sapiens
ttatggtacgatgcc

SEQ ID NO: 674362 - DNA, 15 bp, Homo sapiens
tatggtacgatgccc

SEQ ID NO: 674363 - DNA, 15 bp, Homo sapiens
atggtacgatgcccg

SEQ ID NO: 674364 - DNA, 15 bp, Homo sapiens
tggtacgatgcccgt

SEQ ID NO: 674365 - DNA, 15 bp, Homo sapiens
ggtacgatgcccgtg

SEQ ID NO: 674366 - DNA, 15 bp, Homo sapiens
gtacgatgcccgtgt

SEQ ID NO: 674367 - DNA, 15 bp, Homo sapiens
tacgatgcccgtgtt

SEQ ID NO: 674368 - DNA, 15 bp, Homo sapiens
acgatgcccgtgttt

SEQ ID NO: 674369 - DNA, 15 bp, Homo sapiens
cgatgcccgtgtttt

SEQ ID NO: 674370 - DNA, 15 bp, Homo sapiens
gatgcccgtgttttc

SEQ ID NO: 674371 - DNA, 15 bp, Homo sapiens
atgcccgtgttttca

SEQ ID NO: 674372 - DNA, 15 bp, Homo sapiens
tgcccgtgttttcac

SEQ ID NO: 674373 - DNA, 15 bp, Homo sapiens
gcccgtgttttcact

SEQ ID NO: 674374 - DNA, 15 bp, Homo sapiens
cccgtgttttcactc

SEQ ID NO: 674375 - DNA, 15 bp, Homo sapiens
ccgtgttttcactcc

SEQ ID NO: 674376 - DNA, 15 bp, Homo sapiens
cgtgttttcactcca

SEQ ID NO: 674377 - DNA, 15 bp, Homo sapiens
gtgttttcactccag

SEQ ID NO: 674378 - DNA, 15 bp, Homo sapiens
tgttttcactccagc

SEQ ID NO: 674379 - DNA, 15 bp, Homo sapiens
gttttcactccagcc

SEQ ID NO: 674380 - DNA, 15 bp, Homo sapiens
ttttcactccagcca

SEQ ID NO: 674381 - DNA, 15 bp, Homo sapiens
tttcactccagccac

SEQ ID NO: 674382 - DNA, 15 bp, Homo sapiens
ttcactccagccacg

SEQ ID NO: 674383 - DNA, 15 bp, Homo sapiens
tcactccagccacgg

SEQ ID NO: 674384 - DNA, 15 bp, Homo sapiens
cactccagccacgga

SEQ ID NO: 674385 - DNA, 15 bp, Homo sapiens
actccagccacggag

SEQ ID NO: 674386 - DNA, 15 bp, Homo sapiens
ctccagccacggagc

SEQ ID NO: 674387 - DNA, 15 bp, Homo sapiens
tccagccacggagct

SEQ ID NO: 674388 - DNA, 15 bp, Homo sapiens
ccagccacggagctg

SEQ ID NO: 674389 - DNA, 15 bp, Homo sapiens
cagccacggagctgg

SEQ ID NO: 674390 - DNA, 15 bp, Homo sapiens
agccacggagctggg

SEQ ID NO: 674391 - DNA, 15 bp, Homo sapiens
gccacggagctgggt

SEQ ID NO: 674392 - DNA, 15 bp, Homo sapiens
ccacggagctgggtc

SEQ ID NO: 674393 - DNA, 15 bp, Homo sapiens
cacggagctgggtct

SEQ ID NO: 674394 - DNA, 15 bp, Homo sapiens
acggagctgggtctc

SEQ ID NO: 674395 - DNA, 15 bp, Homo sapiens
cggagctgggtctct

SEQ ID NO: 674396 - DNA, 15 bp, Homo sapiens
ggagctgggtctctg

SEQ ID NO: 674397 - DNA, 15 bp, Homo sapiens
gagctgggtctctgg

SEQ ID NO: 674398 - DNA, 15 bp, Homo sapiens
agctgggtctctggt

SEQ ID NO: 674399 - DNA, 15 bp, Homo sapiens
gctgggtctctggtc

SEQ ID NO: 674400 - DNA, 15 bp, Homo sapiens
ctgggtctctggtct

SEQ ID NO: 674401 - DNA, 15 bp, Homo sapiens
tgggtctctggtctc

SEQ ID NO: 674402 - DNA, 15 bp, Homo sapiens
gggtctctggtctcg

SEQ ID NO: 674403 - DNA, 15 bp, Homo sapiens
ggtctctggtctcgg

SEQ ID NO: 674404 - DNA, 15 bp, Homo sapiens
gtctctggtctcggg

SEQ ID NO: 674405 - DNA, 15 bp, Homo sapiens
tctctggtctcgggg

SEQ ID NO: 674406 - DNA, 15 bp, Homo sapiens
ctctggtctcggggg

SEQ ID NO: 674407 - DNA, 15 bp, Homo sapiens
tctggtctcgggggc

SEQ ID NO: 674408 - DNA, 15 bp, Homo sapiens
ctggtctcgggggca

SEQ ID NO: 674409 - DNA, 15 bp, Homo sapiens
tggtctcgggggcag

SEQ ID NO: 674410 - DNA, 15 bp, Homo sapiens
ggtctcgggggcagc

SEQ ID NO: 674411 - DNA, 15 bp, Homo sapiens
gtctcgggggcagct

SEQ ID NO: 674412 - DNA, 15 bp, Homo sapiens
tctcgggggcagctg

SEQ ID NO: 674413 - DNA, 15 bp, Homo sapiens
ctcgggggcagctgt

SEQ ID NO: 674414 - DNA, 15 bp, Homo sapiens
tcgggggcagctgtg

SEQ ID NO: 674415 - DNA, 15 bp, Homo sapiens
cgggggcagctgtgt

SEQ ID NO: 674416 - DNA, 15 bp, Homo sapiens
gggggcagctgtgtg

SEQ ID NO: 674417 - DNA, 15 bp, Homo sapiens
ggggcagctgtgtga

SEQ ID NO: 674418 - DNA, 15 bp, Homo sapiens
gggcagctgtgtgac

SEQ ID NO: 674419 - DNA, 15 bp, Homo sapiens
ggcagctgtgtgaca

SEQ ID NO: 674420 - DNA, 15 bp, Homo sapiens
gcagctgtgtgacag

SEQ ID NO: 674421 - DNA, 15 bp, Homo sapiens
cagctgtgtgacaga

SEQ ID NO: 674422 - DNA, 15 bp, Homo sapiens
agctgtgtgacagag

SEQ ID NO: 674423 - DNA, 15 bp, Homo sapiens
gctgtgtgacagagc

SEQ ID NO: 674424 - DNA, 15 bp, Homo sapiens
ctgtgtgacagagcg

SEQ ID NO: 674425 - DNA, 15 bp, Homo sapiens
tgtgtgacagagcgt

SEQ ID NO: 674426 - DNA, 15 bp, Homo sapiens
gtgtgacagagcgtg

SEQ ID NO: 674427 - DNA, 15 bp, Homo sapiens
tgtgacagagcgtgc

SEQ ID NO: 674428 - DNA, 15 bp, Homo sapiens
gtgacagagcgtgcc

SEQ ID NO: 674429 - DNA, 15 bp, Homo sapiens
tgacagagcgtgcct

SEQ ID NO: 674430 - DNA, 15 bp, Homo sapiens
gacagagcgtgcctc

SEQ ID NO: 674431 - DNA, 15 bp, Homo sapiens
acagagcgtgcctct

SEQ ID NO: 674432 - DNA, 15 bp, Homo sapiens
cagagcgtgcctctc

SEQ ID NO: 674433 - DNA, 15 bp, Homo sapiens
agagcgtgcctctcc

SEQ ID NO: 674434 - DNA, 15 bp, Homo sapiens
gagcgtgcctctccc

SEQ ID NO: 674435 - DNA, 15 bp, Homo sapiens
agcgtgcctctccct

SEQ ID NO: 674436 - DNA, 15 bp, Homo sapiens
gcgtgcctctcccta

SEQ ID NO: 674437 - DNA, 15 bp, Homo sapiens
cgtgcctctccctac

SEQ ID NO: 674438 - DNA, 15 bp, Homo sapiens
gtgcctctccctaca

SEQ ID NO: 674439 - DNA, 15 bp, Homo sapiens
tgcctctccctacag

SEQ ID NO: 674440 - DNA, 15 bp, Homo sapiens
gcctctccctacagt

SEQ ID NO: 674441 - DNA, 15 bp, Homo sapiens
cctctccctacagtg

SEQ ID NO: 674442 - DNA, 15 bp, Homo sapiens
ctctccctacagtgc

SEQ ID NO: 674443 - DNA, 15 bp, Homo sapiens
tctccctacagtgct

SEQ ID NO: 674444 - DNA, 15 bp, Homo sapiens
ctccctacagtgctc

SEQ ID NO: 674445 - DNA, 15 bp, Homo sapiens
tccctacagtgctcc

SEQ ID NO: 674446 - DNA, 15 bp, Homo sapiens
ccctacagtgctcct

SEQ ID NO: 674447 - DNA, 15 bp, Homo sapiens
cctacagtgctcctc

SEQ ID NO: 674448 - DNA, 15 bp, Homo sapiens
ctacagtgctcctcg

SEQ ID NO: 674449 - DNA, 15 bp, Homo sapiens
tacagtgctcctcgt

SEQ ID NO: 674450 - DNA, 15 bp, Homo sapiens
acagtgctcctcgtc

SEQ ID NO: 674451 - DNA, 15 bp, Homo sapiens
cagtgctcctcgtct

SEQ ID NO: 674452 - DNA, 15 bp, Homo sapiens
agtgctcctcgtctt

SEQ ID NO: 674453 - DNA, 15 bp, Homo sapiens
gtgctcctcgtcttc

SEQ ID NO: 674454 - DNA, 15 bp, Homo sapiens
tgctcctcgtcttcc

SEQ ID NO: 674455 - DNA, 15 bp, Homo sapiens
gctcctcgtcttcct

SEQ ID NO: 674456 - DNA, 15 bp, Homo sapiens
ctcctcgtcttcctt

SEQ ID NO: 674457 - DNA, 15 bp, Homo sapiens
tcctcgtcttccttt

SEQ ID NO: 674458 - DNA, 15 bp, Homo sapiens
cctcgtcttcctttg

SEQ ID NO: 674459 - DNA, 15 bp, Homo sapiens
ctcgtcttcctttgc

SEQ ID NO: 674460 - DNA, 15 bp, Homo sapiens
tcgtcttcctttgcc

SEQ ID NO: 674461 - DNA, 15 bp, Homo sapiens
cgtcttcctttgcct

SEQ ID NO: 674462 - DNA, 15 bp, Homo sapiens
gtcttcctttgcctg

SEQ ID NO: 674463 - DNA, 15 bp, Homo sapiens
tcttcctttgcctgg

SEQ ID NO: 674464 - DNA, 15 bp, Homo sapiens
cttcctttgcctggg

SEQ ID NO: 674465 - DNA, 15 bp, Homo sapiens
ttcctttgcctgggg

SEQ ID NO: 674466 - DNA, 15 bp, Homo sapiens
tcctttgcctggggg

SEQ ID NO: 674467 - DNA, 15 bp, Homo sapiens
cctttgcctgggggt

SEQ ID NO: 674468 - DNA, 15 bp, Homo sapiens
ctttgcctgggggtc

SEQ ID NO: 674469 - DNA, 15 bp, Homo sapiens
tttgcctgggggtct

SEQ ID NO: 674470 - DNA, 15 bp, Homo sapiens
ttgcctgggggtctt

SEQ ID NO: 674471 - DNA, 15 bp, Homo sapiens
tgcctgggggtcttc

SEQ ID NO: 674472 - DNA, 15 bp, Homo sapiens
gcctgggggtcttcc

SEQ ID NO: 674473 - DNA, 15 bp, Homo sapiens
cctgggggtcttcct

SEQ ID NO: 674474 - DNA, 15 bp, Homo sapiens
ctgggggtcttcctt

SEQ ID NO: 674475 - DNA, 15 bp, Homo sapiens
tgggggtcttccttc

SEQ ID NO: 674476 - DNA, 15 bp, Homo sapiens
gggggtcttccttct

SEQ ID NO: 674477 - DNA, 15 bp, Homo sapiens
ggggtcttccttcta

SEQ ID NO: 674478 - DNA, 15 bp, Homo sapiens
gggtcttccttctat

SEQ ID NO: 674479 - DNA, 15 bp, Homo sapiens
ggtcttccttctatg

SEQ ID NO: 674480 - DNA, 15 bp, Homo sapiens
gtcttccttctatgg

SEQ ID NO: 674481 - DNA, 15 bp, Homo sapiens
tcttccttctatgga

SEQ ID NO: 674482 - DNA, 15 bp, Homo sapiens
cttccttctatggaa

SEQ ID NO: 674483 - DNA, 15 bp, Homo sapiens
ttccttctatggaag

SEQ ID NO: 674484 - DNA, 15 bp, Homo sapiens
tccttctatggaaga

SEQ ID NO: 674485 - DNA, 15 bp, Homo sapiens
ccttctatggaagaa

SEQ ID NO: 674486 - DNA, 15 bp, Homo sapiens
cttctatggaagaac

SEQ ID NO: 674487 - DNA, 15 bp, Homo sapiens
ttctatggaagaact

SEQ ID NO: 674488 - DNA, 15 bp, Homo sapiens
tctatggaagaactg

SEQ ID NO: 674489 - DNA, 15 bp, Homo sapiens
ctatggaagaactgg

SEQ ID NO: 674490 - DNA, 15 bp, Homo sapiens
tatggaagaactggc

SEQ ID NO: 674491 - DNA, 15 bp, Homo sapiens
atggaagaactggcg

SEQ ID NO: 674492 - DNA, 15 bp, Homo sapiens
tggaagaactggcgg

SEQ ID NO: 674493 - DNA, 15 bp, Homo sapiens
ggaagaactggcggc

SEQ ID NO: 674494 - DNA, 15 bp, Homo sapiens
gaagaactggcggct

SEQ ID NO: 674495 - DNA, 15 bp, Homo sapiens
aagaactggcggctt

SEQ ID NO: 674496 - DNA, 15 bp, Homo sapiens
agaactggcggctta

SEQ ID NO: 674497 - DNA, 15 bp, Homo sapiens
gaactggcggcttaa

SEQ ID NO: 674498 - DNA, 15 bp, Homo sapiens
aactggcggcttaag

SEQ ID NO: 674499 - DNA, 15 bp, Homo sapiens
actggcggcttaaga

SEQ ID NO: 674500 - DNA, 15 bp, Homo sapiens
ctggcggcttaagaa

SEQ ID NO: 674501 - DNA, 15 bp, Homo sapiens
tggcggcttaagaac

SEQ ID NO: 674502 - DNA, 15 bp, Homo sapiens
ggcggcttaagaaca

SEQ ID NO: 674503 - DNA, 15 bp, Homo sapiens
gcggcttaagaacat

SEQ ID NO: 674504 - DNA, 15 bp, Homo sapiens
cggcttaagaacatc

SEQ ID NO: 674505 - DNA, 15 bp, Homo sapiens
ggcttaagaacatca

SEQ ID NO: 674506 - DNA, 15 bp, Homo sapiens
gcttaagaacatcaa

SEQ ID NO: 674507 - DNA, 15 bp, Homo sapiens
cttaagaacatcaac

SEQ ID NO: 674508 - DNA, 15 bp, Homo sapiens
ttaagaacatcaaca

SEQ ID NO: 674509 - DNA, 15 bp, Homo sapiens
taagaacatcaacag

SEQ ID NO: 674510 - DNA, 15 bp, Homo sapiens
aagaacatcaacagc

SEQ ID NO: 674511 - DNA, 15 bp, Homo sapiens
agaacatcaacagca

SEQ ID NO: 674512 - DNA, 15 bp, Homo sapiens
gaacatcaacagcat

SEQ ID NO: 674513 - DNA, 15 bp, Homo sapiens
aacatcaacagcatc

SEQ ID NO: 674514 - DNA, 15 bp, Homo sapiens
acatcaacagcatca

SEQ ID NO: 674515 - DNA, 15 bp, Homo sapiens
catcaacagcatcaa

SEQ ID NO: 674516 - DNA, 15 bp, Homo sapiens
atcaacagcatcaac

SEQ ID NO: 674517 - DNA, 15 bp, Homo sapiens
tcaacagcatcaact

SEQ ID NO: 674518 - DNA, 15 bp, Homo sapiens
caacagcatcaactt

SEQ ID NO: 674519 - DNA, 15 bp, Homo sapiens
aacagcatcaacttt

SEQ ID NO: 674520 - DNA, 15 bp, Homo sapiens
acagcatcaactttg

SEQ ID NO: 674521 - DNA, 15 bp, Homo sapiens
cagcatcaactttga

SEQ ID NO: 674522 - DNA, 15 bp, Homo sapiens
agcatcaactttgac

SEQ ID NO: 674523 - DNA, 15 bp, Homo sapiens
gcatcaactttgaca

SEQ ID NO: 674524 - DNA, 15 bp, Homo sapiens
catcaactttgacaa

SEQ ID NO: 674525 - DNA, 15 bp, Homo sapiens
atcaactttgacaac

SEQ ID NO: 674526 - DNA, 15 bp, Homo sapiens
tcaactttgacaacc

SEQ ID NO: 674527 - DNA, 15 bp, Homo sapiens
caactttgacaaccc

SEQ ID NO: 674528 - DNA, 15 bp, Homo sapiens
aactttgacaacccc

SEQ ID NO: 674529 - DNA, 15 bp, Homo sapiens
actttgacaaccccg

SEQ ID NO: 674530 - DNA, 15 bp, Homo sapiens
ctttgacaaccccgt

SEQ ID NO: 674531 - DNA, 15 bp, Homo sapiens
tttgacaaccccgtc

SEQ ID NO: 674532 - DNA, 15 bp, Homo sapiens
ttgacaaccccgtct

SEQ ID NO: 674533 - DNA, 15 bp, Homo sapiens
tgacaaccccgtcta

SEQ ID NO: 674534 - DNA, 15 bp, Homo sapiens
gacaaccccgtctat

SEQ ID NO: 674535 - DNA, 15 bp, Homo sapiens
acaaccccgtctatc

SEQ ID NO: 674536 - DNA, 15 bp, Homo sapiens
caaccccgtctatca

SEQ ID NO: 674537 - DNA, 15 bp, Homo sapiens
aaccccgtctatcag

SEQ ID NO: 674538 - DNA, 15 bp, Homo sapiens
accccgtctatcaga

SEQ ID NO: 674539 - DNA, 15 bp, Homo sapiens
ccccgtctatcagaa

SEQ ID NO: 674540 - DNA, 15 bp, Homo sapiens
cccgtctatcagaag

SEQ ID NO: 674541 - DNA, 15 bp, Homo sapiens
ccgtctatcagaaga

SEQ ID NO: 674542 - DNA, 15 bp, Homo sapiens
cgtctatcagaagac

SEQ ID NO: 674543 - DNA, 15 bp, Homo sapiens
gtctatcagaagacc

SEQ ID NO: 674544 - DNA, 15 bp, Homo sapiens
tctatcagaagacca

SEQ ID NO: 674545 - DNA, 15 bp, Homo sapiens
ctatcagaagaccac

SEQ ID NO: 674546 - DNA, 15 bp, Homo sapiens
tatcagaagaccaca

SEQ ID NO: 674547 - DNA, 15 bp, Homo sapiens
atcagaagaccacag

SEQ ID NO: 674548 - DNA, 15 bp, Homo sapiens
tcagaagaccacaga

SEQ ID NO: 674549 - DNA, 15 bp, Homo sapiens
cagaagaccacagag

SEQ ID NO: 674550 - DNA, 15 bp, Homo sapiens
agaagaccacagagg

SEQ ID NO: 674551 - DNA, 15 bp, Homo sapiens
gaagaccacagagga

SEQ ID NO: 674552 - DNA, 15 bp, Homo sapiens
aagaccacagaggat

SEQ ID NO: 674553 - DNA, 15 bp, Homo sapiens
agaccacagaggatg

SEQ ID NO: 674554 - DNA, 15 bp, Homo sapiens
gaccacagaggatga

SEQ ID NO: 674555 - DNA, 15 bp, Homo sapiens
accacagaggatgag

SEQ ID NO: 674556 - DNA, 15 bp, Homo sapiens
ccacagaggatgagg

SEQ ID NO: 674557 - DNA, 15 bp, Homo sapiens
cacagaggatgaggt

SEQ ID NO: 674558 - DNA, 15 bp, Homo sapiens
acagaggatgaggtc

SEQ ID NO: 674559 - DNA, 15 bp, Homo sapiens
cagaggatgaggtcc

SEQ ID NO: 674560 - DNA, 15 bp, Homo sapiens
agaggatgaggtcca

SEQ ID NO: 674561 - DNA, 15 bp, Homo sapiens
gaggatgaggtccac

SEQ ID NO: 674562 - DNA, 15 bp, Homo sapiens
aggatgaggtccaca

SEQ ID NO: 674563 - DNA, 15 bp, Homo sapiens
ggatgaggtccacat

SEQ ID NO: 674564 - DNA, 15 bp, Homo sapiens
gatgaggtccacatt

SEQ ID NO: 674565 - DNA, 15 bp, Homo sapiens
atgaggtccacattt

SEQ ID NO: 674566 - DNA, 15 bp, Homo sapiens
tgaggtccacatttg

SEQ ID NO: 674567 - DNA, 15 bp, Homo sapiens
gaggtccacatttgc

SEQ ID NO: 674568 - DNA, 15 bp, Homo sapiens
aggtccacatttgcc

SEQ ID NO: 674569 - DNA, 15 bp, Homo sapiens
ggtccacatttgcca

SEQ ID NO: 674570 - DNA, 15 bp, Homo sapiens
gtccacatttgccac

SEQ ID NO: 674571 - DNA, 15 bp, Homo sapiens
tccacatttgccaca

SEQ ID NO: 674572 - DNA, 15 bp, Homo sapiens
ccacatttgccacaa

SEQ ID NO: 674573 - DNA, 15 bp, Homo sapiens
cacatttgccacaac

SEQ ID NO: 674574 - DNA, 15 bp, Homo sapiens
acatttgccacaacc

SEQ ID NO: 674575 - DNA, 15 bp, Homo sapiens
catttgccacaacca

SEQ ID NO: 674576 - DNA, 15 bp, Homo sapiens
atttgccacaaccag

SEQ ID NO: 674577 - DNA, 15 bp, Homo sapiens
tttgccacaaccagg

SEQ ID NO: 674578 - DNA, 15 bp, Homo sapiens
ttgccacaaccagga

SEQ ID NO: 674579 - DNA, 15 bp, Homo sapiens
tgccacaaccaggac

SEQ ID NO: 674580 - DNA, 15 bp, Homo sapiens
gccacaaccaggacg

SEQ ID NO: 674581 - DNA, 15 bp, Homo sapiens
ccacaaccaggacgg

SEQ ID NO: 674582 - DNA, 15 bp, Homo sapiens
cacaaccaggacggc

SEQ ID NO: 674583 - DNA, 15 bp, Homo sapiens
acaaccaggacggct

SEQ ID NO: 674584 - DNA, 15 bp, Homo sapiens
caaccaggacggcta

SEQ ID NO: 674585 - DNA, 15 bp, Homo sapiens
aaccaggacggctac

SEQ ID NO: 674586 - DNA, 15 bp, Homo sapiens
accaggacggctaca

SEQ ID NO: 674587 - DNA, 15 bp, Homo sapiens
ccaggacggctacag

SEQ ID NO: 674588 - DNA, 15 bp, Homo sapiens
caggacggctacagc

SEQ ID NO: 674589 - DNA, 15 bp, Homo sapiens
aggacggctacagct

SEQ ID NO: 674590 - DNA, 15 bp, Homo sapiens
ggacggctacagcta

SEQ ID NO: 674591 - DNA, 15 bp, Homo sapiens
gacggctacagctac

SEQ ID NO: 674592 - DNA, 15 bp, Homo sapiens
acggctacagctacc

SEQ ID NO: 674593 - DNA, 15 bp, Homo sapiens
cggctacagctaccc

SEQ ID NO: 674594 - DNA, 15 bp, Homo sapiens
ggctacagctacccc

SEQ ID NO: 674595 - DNA, 15 bp, Homo sapiens
gctacagctacccct

SEQ ID NO: 674596 - DNA, 15 bp, Homo sapiens
ctacagctacccctc

SEQ ID NO: 674597 - DNA, 15 bp, Homo sapiens
tacagctacccctcg

SEQ ID NO: 674598 - DNA, 15 bp, Homo sapiens
acagctacccctcgg

SEQ ID NO: 674599 - DNA, 15 bp, Homo sapiens
cagctacccctcggt

SEQ ID NO: 674600 - DNA, 15 bp, Homo sapiens
agctacccctcggtg

SEQ ID NO: 674601 - DNA, 15 bp, Homo sapiens
gctacccctcggtga

SEQ ID NO: 674602 - DNA, 15 bp, Homo sapiens
ctacccctcggtgag

SEQ ID NO: 674603 - DNA, 15 bp, Homo sapiens
tacccctcggtgagt

SEQ ID NO: 674604 - DNA, 15 bp, Homo sapiens
acccctcggtgagtg

SEQ ID NO: 674605 - DNA, 15 bp, Homo sapiens
cccctcggtgagtga

SEQ ID NO: 674606 - DNA, 15 bp, Homo sapiens
ccctcggtgagtgac

SEQ ID NO: 674607 - DNA, 15 bp, Homo sapiens
cctcggtgagtgacc

SEQ ID NO: 674608 - DNA, 15 bp, Homo sapiens
ctcggtgagtgaccc

SEQ ID NO: 674609 - DNA, 15 bp, Homo sapiens
tcggtgagtgaccct

SEQ ID NO: 674610 - DNA, 15 bp, Homo sapiens
cggtgagtgaccctc

SEQ ID NO: 674611 - DNA, 15 bp, Homo sapiens
ggtgagtgaccctct

SEQ ID NO: 674612 - DNA, 15 bp, Homo sapiens
gtgagtgaccctctc

SEQ ID NO: 674613 - DNA, 15 bp, Homo sapiens
tgagtgaccctctct

SEQ ID NO: 674614 - DNA, 15 bp, Homo sapiens
gagtgaccctctcta

SEQ ID NO: 674615 - DNA, 15 bp, Homo sapiens
agtgaccctctctag

SEQ ID NO: 674616 - DNA, 15 bp, Homo sapiens
gtgaccctctctaga

SEQ ID NO: 674617 - DNA, 15 bp, Homo sapiens
tgaccctctctagaa

SEQ ID NO: 674618 - DNA, 15 bp, Homo sapiens
gaccctctctagaaa

SEQ ID NO: 674619 - DNA, 15 bp, Homo sapiens
accctctctagaaag

SEQ ID NO: 674620 - DNA, 15 bp, Homo sapiens
ccctctctagaaagc

SEQ ID NO: 674621 - DNA, 15 bp, Homo sapiens
cctctctagaaagcc

SEQ ID NO: 674622 - DNA, 15 bp, Homo sapiens
ctctctagaaagcca

SEQ ID NO: 674623 - DNA, 15 bp, Homo sapiens
tctctagaaagccag

SEQ ID NO: 674624 - DNA, 15 bp, Homo sapiens
ctctagaaagccaga

SEQ ID NO: 674625 - DNA, 15 bp, Homo sapiens
tctagaaagccagag

SEQ ID NO: 674626 - DNA, 15 bp, Homo sapiens
ctagaaagccagagc

SEQ ID NO: 674627 - DNA, 15 bp, Homo sapiens
tagaaagccagagcc

SEQ ID NO: 674628 - DNA, 15 bp, Homo sapiens
agaaagccagagccc

SEQ ID NO: 674629 - DNA, 15 bp, Homo sapiens
gaaagccagagccca

SEQ ID NO: 674630 - DNA, 15 bp, Homo sapiens
aaagccagagcccat

SEQ ID NO: 674631 - DNA, 15 bp, Homo sapiens
aagccagagcccatg

SEQ ID NO: 674632 - DNA, 15 bp, Homo sapiens
agccagagcccatgg

SEQ ID NO: 674633 - DNA, 15 bp, Homo sapiens
gccagagcccatggc

SEQ ID NO: 674634 - DNA, 15 bp, Homo sapiens
ccagagcccatggcg

SEQ ID NO: 674635 - DNA, 15 bp, Homo sapiens
cagagcccatggcgg

SEQ ID NO: 674636 - DNA, 15 bp, Homo sapiens
agagcccatggcggc

SEQ ID NO: 674637 - DNA, 15 bp, Homo sapiens
gagcccatggcggcc

SEQ ID NO: 674638 - DNA, 15 bp, Homo sapiens
agcccatggcggccc

SEQ ID NO: 674639 - DNA, 15 bp, Homo sapiens
gcccatggcggcccc

SEQ ID NO: 674640 - DNA, 15 bp, Homo sapiens
cccatggcggccccc

SEQ ID NO: 674641 - DNA, 15 bp, Homo sapiens
ccatggcggccccct

SEQ ID NO: 674642 - DNA, 15 bp, Homo sapiens
catggcggccccctc

SEQ ID NO: 674643 - DNA, 15 bp, Homo sapiens
atggcggccccctcc

SEQ ID NO: 674644 - DNA, 15 bp, Homo sapiens
tggcggccccctccc

SEQ ID NO: 674645 - DNA, 15 bp, Homo sapiens
ggcggccccctccca

SEQ ID NO: 674646 - DNA, 15 bp, Homo sapiens
gcggccccctcccag

SEQ ID NO: 674647 - DNA, 15 bp, Homo sapiens
cggccccctcccagc

SEQ ID NO: 674648 - DNA, 15 bp, Homo sapiens
ggccccctcccagct

SEQ ID NO: 674649 - DNA, 15 bp, Homo sapiens
gccccctcccagctg

SEQ ID NO: 674650 - DNA, 15 bp, Homo sapiens
ccccctcccagctgg

SEQ ID NO: 674651 - DNA, 15 bp, Homo sapiens
cccctcccagctgga

SEQ ID NO: 674652 - DNA, 15 bp, Homo sapiens
ccctcccagctggag

SEQ ID NO: 674653 - DNA, 15 bp, Homo sapiens
cctcccagctggagg

SEQ ID NO: 674654 - DNA, 15 bp, Homo sapiens
ctcccagctggaggc

SEQ ID NO: 674655 - DNA, 15 bp, Homo sapiens
tcccagctggaggca

SEQ ID NO: 674656 - DNA, 15 bp, Homo sapiens
cccagctggaggcat

SEQ ID NO: 674657 - DNA, 15 bp, Homo sapiens
ccagctggaggcata

SEQ ID NO: 674658 - DNA, 15 bp, Homo sapiens
cagctggaggcatat

SEQ ID NO: 674659 - DNA, 15 bp, Homo sapiens
agctggaggcatatg

SEQ ID NO: 674660 - DNA, 15 bp, Homo sapiens
gctggaggcatatga

SEQ ID NO: 674661 - DNA, 15 bp, Homo sapiens
ctggaggcatatgat

SEQ ID NO: 674662 - DNA, 15 bp, Homo sapiens
tggaggcatatgatc

SEQ ID NO: 674663 - DNA, 15 bp, Homo sapiens
ggaggcatatgatcc

SEQ ID NO: 674664 - DNA, 15 bp, Homo sapiens
gaggcatatgatcct

SEQ ID NO: 674665 - DNA, 15 bp, Homo sapiens
aggcatatgatcctc

SEQ ID NO: 674666 - DNA, 15 bp, Homo sapiens
ggcatatgatcctca

SEQ ID NO: 674667 - DNA, 15 bp, Homo sapiens
gcatatgatcctcaa

SEQ ID NO: 674668 - DNA, 15 bp, Homo sapiens
catatgatcctcaag

SEQ ID NO: 674669 - DNA, 15 bp, Homo sapiens
atatgatcctcaagg

SEQ ID NO: 674670 - DNA, 15 bp, Homo sapiens
tatgatcctcaaggg

SEQ ID NO: 674671 - DNA, 15 bp, Homo sapiens
atgatcctcaaggga

SEQ ID NO: 674672 - DNA, 15 bp, Homo sapiens
tgatcctcaagggac

SEQ ID NO: 674673 - DNA, 15 bp, Homo sapiens
gatcctcaagggacc

SEQ ID NO: 674674 - DNA, 15 bp, Homo sapiens
atcctcaagggacca

SEQ ID NO: 674675 - DNA, 15 bp, Homo sapiens
tcctcaagggaccag

SEQ ID NO: 674676 - DNA, 15 bp, Homo sapiens
cctcaagggaccagg

SEQ ID NO: 674677 - DNA, 15 bp, Homo sapiens
ctcaagggaccaggc

SEQ ID NO: 674678 - DNA, 15 bp, Homo sapiens
tcaagggaccaggcc

SEQ ID NO: 674679 - DNA, 15 bp, Homo sapiens
caagggaccaggccg

SEQ ID NO: 674680 - DNA, 15 bp, Homo sapiens
aagggaccaggccga

SEQ ID NO: 674681 - DNA, 15 bp, Homo sapiens
agggaccaggccgag

SEQ ID NO: 674682 - DNA, 15 bp, Homo sapiens
gggaccaggccgagg

SEQ ID NO: 674683 - DNA, 15 bp, Homo sapiens
ggaccaggccgaggc

SEQ ID NO: 674684 - DNA, 15 bp, Homo sapiens
gaccaggccgaggct

SEQ ID NO: 674685 - DNA, 15 bp, Homo sapiens
accaggccgaggctt

SEQ ID NO: 674686 - DNA, 15 bp, Homo sapiens
ccaggccgaggcttc

SEQ ID NO: 674687 - DNA, 15 bp, Homo sapiens
caggccgaggcttcc

SEQ ID NO: 674688 - DNA, 15 bp, Homo sapiens
aggccgaggcttccc

SEQ ID NO: 674689 - DNA, 15 bp, Homo sapiens
ggccgaggcttcccc

SEQ ID NO: 674690 - DNA, 15 bp, Homo sapiens
gccgaggcttcccca

SEQ ID NO: 674691 - DNA, 15 bp, Homo sapiens
ccgaggcttccccag

SEQ ID NO: 674692 - DNA, 15 bp, Homo sapiens
cgaggcttccccagc

SEQ ID NO: 674693 - DNA, 15 bp, Homo sapiens
gaggcttccccagcc

SEQ ID NO: 674694 - DNA, 15 bp, Homo sapiens
aggcttccccagccc

SEQ ID NO: 674695 - DNA, 15 bp, Homo sapiens
ggcttccccagccct

SEQ ID NO: 674696 - DNA, 15 bp, Homo sapiens
gcttccccagccctc

SEQ ID NO: 674697 - DNA, 15 bp, Homo sapiens
cttccccagccctcc

SEQ ID NO: 674698 - DNA, 15 bp, Homo sapiens
ttccccagccctcca

SEQ ID NO: 674699 - DNA, 15 bp, Homo sapiens
tccccagccctccag

SEQ ID NO: 674700 - DNA, 15 bp, Homo sapiens
ccccagccctccaga

SEQ ID NO: 674701 - DNA, 15 bp, Homo sapiens
cccagccctccagat

SEQ ID NO: 674702 - DNA, 15 bp, Homo sapiens
ccagccctccagatc

SEQ ID NO: 674703 - DNA, 15 bp, Homo sapiens
cagccctccagatcg

SEQ ID NO: 674704 - DNA, 15 bp, Homo sapiens
agccctccagatcga

SEQ ID NO: 674705 - DNA, 15 bp, Homo sapiens
gccctccagatcgag

SEQ ID NO: 674706 - DNA, 15 bp, Homo sapiens
ccctccagatcgagg

SEQ ID NO: 674707 - DNA, 15 bp, Homo sapiens
cctccagatcgagga

SEQ ID NO: 674708 - DNA, 15 bp, Homo sapiens
ctccagatcgaggac

SEQ ID NO: 674709 - DNA, 15 bp, Homo sapiens
tccagatcgaggaca

SEQ ID NO: 674710 - DNA, 15 bp, Homo sapiens
ccagatcgaggacag

SEQ ID NO: 674711 - DNA, 15 bp, Homo sapiens
cagatcgaggacagc

SEQ ID NO: 674712 - DNA, 15 bp, Homo sapiens
agatcgaggacagca

SEQ ID NO: 674713 - DNA, 15 bp, Homo sapiens
gatcgaggacagcat

SEQ ID NO: 674714 - DNA, 15 bp, Homo sapiens
atcgaggacagcatt

SEQ ID NO: 674715 - DNA, 15 bp, Homo sapiens
tcgaggacagcatta

SEQ ID NO: 674716 - DNA, 15 bp, Homo sapiens
cgaggacagcattag

SEQ ID NO: 674717 - DNA, 15 bp, Homo sapiens
gaggacagcattagg

SEQ ID NO: 674718 - DNA, 15 bp, Homo sapiens
aggacagcattaggt

SEQ ID NO: 674719 - DNA, 15 bp, Homo sapiens
ggacagcattaggtg

SEQ ID NO: 674720 - DNA, 15 bp, Homo sapiens
gacagcattaggtga

SEQ ID NO: 674721 - DNA, 15 bp, Homo sapiens
acagcattaggtgaa

SEQ ID NO: 674722 - DNA, 15 bp, Homo sapiens
cagcattaggtgaat

SEQ ID NO: 674723 - DNA, 15 bp, Homo sapiens
agcattaggtgaatg

SEQ ID NO: 674724 - DNA, 15 bp, Homo sapiens
gcattaggtgaatgc

SEQ ID NO: 674725 - DNA, 15 bp, Homo sapiens
cattaggtgaatgct

SEQ ID NO: 674726 - DNA, 15 bp, Homo sapiens
attaggtgaatgctt

SEQ ID NO: 674727 - DNA, 15 bp, Homo sapiens
ttaggtgaatgcttc

SEQ ID NO: 674728 - DNA, 15 bp, Homo sapiens
taggtgaatgcttct

SEQ ID NO: 674729 - DNA, 15 bp, Homo sapiens
aggtgaatgcttctg

SEQ ID NO: 674730 - DNA, 15 bp, Homo sapiens
ggtgaatgcttctgt

SEQ ID NO: 674731 - DNA, 15 bp, Homo sapiens
gtgaatgcttctgtg

SEQ ID NO: 674732 - DNA, 15 bp, Homo sapiens
tgaatgcttctgtgc

SEQ ID NO: 674733 - DNA, 15 bp, Homo sapiens
gaatgcttctgtgcg

SEQ ID NO: 674734 - DNA, 15 bp, Homo sapiens
aatgcttctgtgcgc

SEQ ID NO: 674735 - DNA, 15 bp, Homo sapiens
atgcttctgtgcgct

SEQ ID NO: 674736 - DNA, 15 bp, Homo sapiens
tgcttctgtgcgctc

SEQ ID NO: 674737 - DNA, 15 bp, Homo sapiens
gcttctgtgcgctca

SEQ ID NO: 674738 - DNA, 15 bp, Homo sapiens
cttctgtgcgctcat

SEQ ID NO: 674739 - DNA, 15 bp, Homo sapiens
ttctgtgcgctcatt

SEQ ID NO: 674740 - DNA, 15 bp, Homo sapiens
tctgtgcgctcattc

SEQ ID NO: 674741 - DNA, 15 bp, Homo sapiens
ctgtgcgctcattca

SEQ ID NO: 674742 - DNA, 15 bp, Homo sapiens
tgtgcgctcattcag

SEQ ID NO: 674743 - DNA, 15 bp, Homo sapiens
gtgcgctcattcaga

SEQ ID NO: 674744 - DNA, 15 bp, Homo sapiens
tgcgctcattcagaa

SEQ ID NO: 674745 - DNA, 15 bp, Homo sapiens
gcgctcattcagaat

SEQ ID NO: 674746 - DNA, 15 bp, Homo sapiens
cgctcattcagaatg

SEQ ID NO: 674747 - DNA, 15 bp, Homo sapiens
gctcattcagaatgt

SEQ ID NO: 674748 - DNA, 15 bp, Homo sapiens
ctcattcagaatgtc

SEQ ID NO: 674749 - DNA, 15 bp, Homo sapiens
tcattcagaatgtca

SEQ ID NO: 674750 - DNA, 15 bp, Homo sapiens
cattcagaatgtcag

SEQ ID NO: 674751 - DNA, 15 bp, Homo sapiens
attcagaatgtcagc

SEQ ID NO: 674752 - DNA, 15 bp, Homo sapiens
ttcagaatgtcagcg

SEQ ID NO: 674753 - DNA, 15 bp, Homo sapiens
tcagaatgtcagcgg

SEQ ID NO: 674754 - DNA, 15 bp, Homo sapiens
cagaatgtcagcgga

SEQ ID NO: 674755 - DNA, 15 bp, Homo sapiens
agaatgtcagcggac

SEQ ID NO: 674756 - DNA, 15 bp, Homo sapiens
gaatgtcagcggaca

SEQ ID NO: 674757 - DNA, 15 bp, Homo sapiens
aatgtcagcggacaa

SEQ ID NO: 674758 - DNA, 15 bp, Homo sapiens
atgtcagcggacaat

SEQ ID NO: 674759 - DNA, 15 bp, Homo sapiens
tgtcagcggacaatg

SEQ ID NO: 674760 - DNA, 15 bp, Homo sapiens
gtcagcggacaatgg

SEQ ID NO: 674761 - DNA, 15 bp, Homo sapiens
tcagcggacaatggc

SEQ ID NO: 674762 - DNA, 15 bp, Homo sapiens
cagcggacaatggcc

SEQ ID NO: 674763 - DNA, 15 bp, Homo sapiens
agcggacaatggcct

SEQ ID NO: 674764 - DNA, 15 bp, Homo sapiens
gcggacaatggcctt

SEQ ID NO: 674765 - DNA, 15 bp, Homo sapiens
cggacaatggccttg

SEQ ID NO: 674766 - DNA, 15 bp, Homo sapiens
ggacaatggccttgg

SEQ ID NO: 674767 - DNA, 15 bp, Homo sapiens
gacaatggccttggt

SEQ ID NO: 674768 - DNA, 15 bp, Homo sapiens
acaatggccttggtg

SEQ ID NO: 674769 - DNA, 15 bp, Homo sapiens
caatggccttggtgg

SEQ ID NO: 674770 - DNA, 15 bp, Homo sapiens
aatggccttggtggt

SEQ ID NO: 674771 - DNA, 15 bp, Homo sapiens
atggccttggtggtg

SEQ ID NO: 674772 - DNA, 15 bp, Homo sapiens
tggccttggtggtgt

SEQ ID NO: 674773 - DNA, 15 bp, Homo sapiens
ggccttggtggtgta

SEQ ID NO: 674774 - DNA, 15 bp, Homo sapiens
gccttggtggtgtag

SEQ ID NO: 674775 - DNA, 15 bp, Homo sapiens
ccttggtggtgtaga

SEQ ID NO: 674776 - DNA, 15 bp, Homo sapiens
cttggtggtgtagag

SEQ ID NO: 674777 - DNA, 15 bp, Homo sapiens
ttggtggtgtagagg

SEQ ID NO: 674778 - DNA, 15 bp, Homo sapiens
tggtggtgtagagga

SEQ ID NO: 674779 - DNA, 15 bp, Homo sapiens
ggtggtgtagaggaa

SEQ ID NO: 674780 - DNA, 15 bp, Homo sapiens
gtggtgtagaggaat

SEQ ID NO: 674781 - DNA, 15 bp, Homo sapiens
tggtgtagaggaatg

SEQ ID NO: 674782 - DNA, 15 bp, Homo sapiens
ggtgtagaggaatgt

SEQ ID NO: 674783 - DNA, 15 bp, Homo sapiens
gtgtagaggaatgtt

SEQ ID NO: 674784 - DNA, 15 bp, Homo sapiens
tgtagaggaatgttg

SEQ ID NO: 674785 - DNA, 15 bp, Homo sapiens
gtagaggaatgttgg

SEQ ID NO: 674786 - DNA, 15 bp, Homo sapiens
tagaggaatgttgga

SEQ ID NO: 674787 - DNA, 15 bp, Homo sapiens
agaggaatgttggat

SEQ ID NO: 674788 - DNA, 15 bp, Homo sapiens
gaggaatgttggata

SEQ ID NO: 674789 - DNA, 15 bp, Homo sapiens
aggaatgttggataa

SEQ ID NO: 674790 - DNA, 15 bp, Homo sapiens
ggaatgttggataag

SEQ ID NO: 674791 - DNA, 15 bp, Homo sapiens
gaatgttggataagc

SEQ ID NO: 674792 - DNA, 15 bp, Homo sapiens
aatgttggataagca

SEQ ID NO: 674793 - DNA, 15 bp, Homo sapiens
atgttggataagcaa

SEQ ID NO: 674794 - DNA, 15 bp, Homo sapiens
tgttggataagcaaa

SEQ ID NO: 674795 - DNA, 15 bp, Homo sapiens
gttggataagcaaat

SEQ ID NO: 674796 - DNA, 15 bp, Homo sapiens
ttggataagcaaata

SEQ ID NO: 674797 - DNA, 15 bp, Homo sapiens
tggataagcaaatag

SEQ ID NO: 674798 - DNA, 15 bp, Homo sapiens
ggataagcaaataga

SEQ ID NO: 674799 - DNA, 15 bp, Homo sapiens
gataagcaaatagag

SEQ ID NO: 674800 - DNA, 15 bp, Homo sapiens
ataagcaaatagaga

SEQ ID NO: 674801 - DNA, 15 bp, Homo sapiens
taagcaaatagagag

SEQ ID NO: 674802 - DNA, 15 bp, Homo sapiens
aagcaaatagagagc

SEQ ID NO: 674803 - DNA, 15 bp, Homo sapiens
agcaaatagagagct

SEQ ID NO: 674804 - DNA, 15 bp, Homo sapiens
gcaaatagagagctc

SEQ ID NO: 674805 - DNA, 15 bp, Homo sapiens
caaatagagagctcc

SEQ ID NO: 674806 - DNA, 15 bp, Homo sapiens
aaatagagagctcca

SEQ ID NO: 674807 - DNA, 15 bp, Homo sapiens
aatagagagctccat

SEQ ID NO: 674808 - DNA, 15 bp, Homo sapiens
atagagagctccatc

SEQ ID NO: 674809 - DNA, 15 bp, Homo sapiens
tagagagctccatca

SEQ ID NO: 674810 - DNA, 15 bp, Homo sapiens
agagagctccatcag

SEQ ID NO: 674811 - DNA, 15 bp, Homo sapiens
gagagctccatcaga

SEQ ID NO: 674812 - DNA, 15 bp, Homo sapiens
agagctccatcagat

SEQ ID NO: 674813 - DNA, 15 bp, Homo sapiens
gagctccatcagatg

SEQ ID NO: 674814 - DNA, 15 bp, Homo sapiens
agctccatcagatgg

SEQ ID NO: 674815 - DNA, 15 bp, Homo sapiens
gctccatcagatggt

SEQ ID NO: 674816 - DNA, 15 bp, Homo sapiens
ctccatcagatggtg

SEQ ID NO: 674817 - DNA, 15 bp, Homo sapiens
tccatcagatggtga

SEQ ID NO: 674818 - DNA, 15 bp, Homo sapiens
ccatcagatggtgac

SEQ ID NO: 674819 - DNA, 15 bp, Homo sapiens
catcagatggtgaca

SEQ ID NO: 674820 - DNA, 15 bp, Homo sapiens
atcagatggtgacag

SEQ ID NO: 674821 - DNA, 15 bp, Homo sapiens
tcagatggtgacagg

SEQ ID NO: 674822 - DNA, 15 bp, Homo sapiens
cagatggtgacaggg

SEQ ID NO: 674823 - DNA, 15 bp, Homo sapiens
agatggtgacagggc

SEQ ID NO: 674824 - DNA, 15 bp, Homo sapiens
gatggtgacagggca

SEQ ID NO: 674825 - DNA, 15 bp, Homo sapiens
atggtgacagggcaa

SEQ ID NO: 674826 - DNA, 15 bp, Homo sapiens
tggtgacagggcaaa

SEQ ID NO: 674827 - DNA, 15 bp, Homo sapiens
ggtgacagggcaaag

SEQ ID NO: 674828 - DNA, 15 bp, Homo sapiens
gtgacagggcaaaga

SEQ ID NO: 674829 - DNA, 15 bp, Homo sapiens
tgacagggcaaagaa

SEQ ID NO: 674830 - DNA, 15 bp, Homo sapiens
gacagggcaaagaaa

SEQ ID NO: 674831 - DNA, 15 bp, Homo sapiens
acagggcaaagaaag

SEQ ID NO: 674832 - DNA, 15 bp, Homo sapiens
cagggcaaagaaagt

SEQ ID NO: 674833 - DNA, 15 bp, Homo sapiens
agggcaaagaaagtc

SEQ ID NO: 674834 - DNA, 15 bp, Homo sapiens
gggcaaagaaagtca

SEQ ID NO: 674835 - DNA, 15 bp, Homo sapiens
ggcaaagaaagtcaa

SEQ ID NO: 674836 - DNA, 15 bp, Homo sapiens
gcaaagaaagtcaaa

SEQ ID NO: 674837 - DNA, 15 bp, Homo sapiens
caaagaaagtcaaaa

SEQ ID NO: 674838 - DNA, 15 bp, Homo sapiens
aaagaaagtcaaaag

SEQ ID NO: 674839 - DNA, 15 bp, Homo sapiens
aagaaagtcaaaagg

SEQ ID NO: 674840 - DNA, 15 bp, Homo sapiens
agaaagtcaaaagga

SEQ ID NO: 674841 - DNA, 15 bp, Homo sapiens
gaaagtcaaaaggag

SEQ ID NO: 674842 - DNA, 15 bp, Homo sapiens
aaagtcaaaaggagt

SEQ ID NO: 674843 - DNA, 15 bp, Homo sapiens
aagtcaaaaggagtt

SEQ ID NO: 674844 - DNA, 15 bp, Homo sapiens
agtcaaaaggagttc

SEQ ID NO: 674845 - DNA, 15 bp, Homo sapiens
gtcaaaaggagttca

SEQ ID NO: 674846 - DNA, 15 bp, Homo sapiens
tcaaaaggagttcag

SEQ ID NO: 674847 - DNA, 15 bp, Homo sapiens
caaaaggagttcaga

SEQ ID NO: 674848 - DNA, 15 bp, Homo sapiens
aaaaggagttcagag

SEQ ID NO: 674849 - DNA, 15 bp, Homo sapiens
aaaggagttcagagg

SEQ ID NO: 674850 - DNA, 15 bp, Homo sapiens
aaggagttcagaggc

SEQ ID NO: 674851 - DNA, 15 bp, Homo sapiens
aggagttcagaggcc

SEQ ID NO: 674852 - DNA, 15 bp, Homo sapiens
ggagttcagaggccg

SEQ ID NO: 674853 - DNA, 15 bp, Homo sapiens
gagttcagaggccgg

SEQ ID NO: 674854 - DNA, 15 bp, Homo sapiens
agttcagaggccggg

SEQ ID NO: 674855 - DNA, 15 bp, Homo sapiens
gttcagaggccgggc

SEQ ID NO: 674856 - DNA, 15 bp, Homo sapiens
ttcagaggccgggcg

SEQ ID NO: 674857 - DNA, 15 bp, Homo sapiens
tcagaggccgggcgc

SEQ ID NO: 674858 - DNA, 15 bp, Homo sapiens
cagaggccgggcgcg

SEQ ID NO: 674859 - DNA, 15 bp, Homo sapiens
agaggccgggcgcgg

SEQ ID NO: 674860 - DNA, 15 bp, Homo sapiens
gaggccgggcgcggt

SEQ ID NO: 674861 - DNA, 15 bp, Homo sapiens
aggccgggcgcggtg

SEQ ID NO: 674862 - DNA, 15 bp, Homo sapiens
ggccgggcgcggtgg

SEQ ID NO: 674863 - DNA, 15 bp, Homo sapiens
gccgggcgcggtggc

SEQ ID NO: 674864 - DNA, 15 bp, Homo sapiens
ccgggcgcggtggct

SEQ ID NO: 674865 - DNA, 15 bp, Homo sapiens
cgggcgcggtggctc

SEQ ID NO: 674866 - DNA, 15 bp, Homo sapiens
gggcgcggtggctca

SEQ ID NO: 674867 - DNA, 15 bp, Homo sapiens
ggcgcggtggctcat

SEQ ID NO: 674868 - DNA, 15 bp, Homo sapiens
gcgcggtggctcatg

SEQ ID NO: 674869 - DNA, 15 bp, Homo sapiens
cgcggtggctcatgc

SEQ ID NO: 674870 - DNA, 15 bp, Homo sapiens
gcggtggctcatgcc

SEQ ID NO: 674871 - DNA, 15 bp, Homo sapiens
cggtggctcatgcct

SEQ ID NO: 674872 - DNA, 15 bp, Homo sapiens
gcctgtaatcccagg

SEQ ID NO: 674873 - DNA, 15 bp, Homo sapiens
cctgtaatcccagga

SEQ ID NO: 674874 - DNA, 15 bp, Homo sapiens
ctgtaatcccaggac

SEQ ID NO: 674875 - DNA, 15 bp, Homo sapiens
tgtaatcccaggact

SEQ ID NO: 674876 - DNA, 15 bp, Homo sapiens
gtaatcccaggactt

SEQ ID NO: 674877 - DNA, 15 bp, Homo sapiens
tcccaggactttggg

SEQ ID NO: 674878 - DNA, 15 bp, Homo sapiens
cccaggactttggga

SEQ ID NO: 674879 - DNA, 15 bp, Homo sapiens
ccaggactttgggag

SEQ ID NO: 674880 - DNA, 15 bp, Homo sapiens
caggactttgggagg

SEQ ID NO: 674881 - DNA, 15 bp, Homo sapiens
aggactttgggaggc

SEQ ID NO: 674882 - DNA, 15 bp, Homo sapiens
ggactttgggaggcc

SEQ ID NO: 674883 - DNA, 15 bp, Homo sapiens
gactttgggaggccg

SEQ ID NO: 674884 - DNA, 15 bp, Homo sapiens
tgggaggccgaggct

SEQ ID NO: 674885 - DNA, 15 bp, Homo sapiens
gggaggccgaggctg

SEQ ID NO: 674886 - DNA, 15 bp, Homo sapiens
ggaggccgaggctgg

SEQ ID NO: 674887 - DNA, 15 bp, Homo sapiens
gaggccgaggctggc

SEQ ID NO: 674888 - DNA, 15 bp, Homo sapiens
aggccgaggctggcg

SEQ ID NO: 674889 - DNA, 15 bp, Homo sapiens
ggccgaggctggcgg

SEQ ID NO: 674890 - DNA, 15 bp, Homo sapiens
gccgaggctggcgga

SEQ ID NO: 674891 - DNA, 15 bp, Homo sapiens
ccgaggctggcggat

SEQ ID NO: 674892 - DNA, 15 bp, Homo sapiens
cgaggctggcggatc

SEQ ID NO: 674893 - DNA, 15 bp, Homo sapiens
gaggctggcggatca

SEQ ID NO: 674894 - DNA, 15 bp, Homo sapiens
aggctggcggatcac

SEQ ID NO: 674895 - DNA, 15 bp, Homo sapiens
ggctggcggatcacc

SEQ ID NO: 674896 - DNA, 15 bp, Homo sapiens
gctggcggatcacct

SEQ ID NO: 674897 - DNA, 15 bp, Homo sapiens
ctggcggatcacctg

SEQ ID NO: 674898 - DNA, 15 bp, Homo sapiens
tggcggatcacctga

SEQ ID NO: 674899 - DNA, 15 bp, Homo sapiens
ggcggatcacctgaa

SEQ ID NO: 674900 - DNA, 15 bp, Homo sapiens
gcggatcacctgaag

SEQ ID NO: 674901 - DNA, 15 bp, Homo sapiens
cggatcacctgaagt

SEQ ID NO: 674902 - DNA, 15 bp, Homo sapiens
ggatcacctgaagtc

SEQ ID NO: 674903 - DNA, 15 bp, Homo sapiens
gatcacctgaagtca

SEQ ID NO: 674904 - DNA, 15 bp, Homo sapiens
atcacctgaagtcag

SEQ ID NO: 674905 - DNA, 15 bp, Homo sapiens
tcacctgaagtcagg

SEQ ID NO: 674906 - DNA, 15 bp, Homo sapiens
cacctgaagtcagga

SEQ ID NO: 674907 - DNA, 15 bp, Homo sapiens
acctgaagtcaggag

SEQ ID NO: 674908 - DNA, 15 bp, Homo sapiens
cctgaagtcaggagt

SEQ ID NO: 674909 - DNA, 15 bp, Homo sapiens
ctgaagtcaggagtt

SEQ ID NO: 674910 - DNA, 15 bp, Homo sapiens
tgaagtcaggagttt

SEQ ID NO: 674911 - DNA, 15 bp, Homo sapiens
gaagtcaggagtttg

SEQ ID NO: 674912 - DNA, 15 bp, Homo sapiens
aagtcaggagtttga

SEQ ID NO: 674913 - DNA, 15 bp, Homo sapiens
agtcaggagtttgag

SEQ ID NO: 674914 - DNA, 15 bp, Homo sapiens
agtttgagaccagct

SEQ ID NO: 674915 - DNA, 15 bp, Homo sapiens
gtttgagaccagctt

SEQ ID NO: 674916 - DNA, 15 bp, Homo sapiens
tttgagaccagcttg

SEQ ID NO: 674917 - DNA, 15 bp, Homo sapiens
ttgagaccagcttgg

SEQ ID NO: 674918 - DNA, 15 bp, Homo sapiens
tgagaccagcttggc

SEQ ID NO: 674919 - DNA, 15 bp, Homo sapiens
gagaccagcttggcc

SEQ ID NO: 674920 - DNA, 15 bp, Homo sapiens
agaccagcttggcca

SEQ ID NO: 674921 - DNA, 15 bp, Homo sapiens
gaccagcttggccat

SEQ ID NO: 674922 - DNA, 15 bp, Homo sapiens
accagcttggccatc

SEQ ID NO: 674923 - DNA, 15 bp, Homo sapiens
ccagcttggccatca

SEQ ID NO: 674924 - DNA, 15 bp, Homo sapiens
cagcttggccatcat

SEQ ID NO: 674925 - DNA, 15 bp, Homo sapiens
agcttggccatcatg

SEQ ID NO: 674926 - DNA, 15 bp, Homo sapiens
gcttggccatcatga

SEQ ID NO: 674927 - DNA, 15 bp, Homo sapiens
cttggccatcatgac

SEQ ID NO: 674928 - DNA, 15 bp, Homo sapiens
ttggccatcatgaca

SEQ ID NO: 674929 - DNA, 15 bp, Homo sapiens
tggccatcatgacaa

SEQ ID NO: 674930 - DNA, 15 bp, Homo sapiens
ggccatcatgacaaa

SEQ ID NO: 674931 - DNA, 15 bp, Homo sapiens
gccatcatgacaaaa

SEQ ID NO: 674932 - DNA, 15 bp, Homo sapiens
ccatcatgacaaaac

SEQ ID NO: 674933 - DNA, 15 bp, Homo sapiens
catcatgacaaaacc

SEQ ID NO: 674934 - DNA, 15 bp, Homo sapiens
atcatgacaaaaccc

SEQ ID NO: 674935 - DNA, 15 bp, Homo sapiens
tcatgacaaaacccc

SEQ ID NO: 674936 - DNA, 15 bp, Homo sapiens
catgacaaaaccccg

SEQ ID NO: 674937 - DNA, 15 bp, Homo sapiens
atgacaaaaccccgt

SEQ ID NO: 674938 - DNA, 15 bp, Homo sapiens
tgacaaaaccccgtc

SEQ ID NO: 674939 - DNA, 15 bp, Homo sapiens
gacaaaaccccgtct

SEQ ID NO: 674940 - DNA, 15 bp, Homo sapiens
acaaaaccccgtctc

SEQ ID NO: 674941 - DNA, 15 bp, Homo sapiens
caaaaccccgtctct

SEQ ID NO: 674942 - DNA, 15 bp, Homo sapiens
aaaaccccgtctcta

SEQ ID NO: 674943 - DNA, 15 bp, Homo sapiens
ttagccaggcgtggg

SEQ ID NO: 674944 - DNA, 15 bp, Homo sapiens
tagccaggcgtggga

SEQ ID NO: 674945 - DNA, 15 bp, Homo sapiens
agccaggcgtgggag

SEQ ID NO: 674946 - DNA, 15 bp, Homo sapiens
gccaggcgtgggagt

SEQ ID NO: 674947 - DNA, 15 bp, Homo sapiens
ccaggcgtgggagtg

SEQ ID NO: 674948 - DNA, 15 bp, Homo sapiens
caggcgtgggagtgg

SEQ ID NO: 674949 - DNA, 15 bp, Homo sapiens
aggcgtgggagtggg

SEQ ID NO: 674950 - DNA, 15 bp, Homo sapiens
ggcgtgggagtgggc

SEQ ID NO: 674951 - DNA, 15 bp, Homo sapiens
gcgtgggagtgggcg

SEQ ID NO: 674952 - DNA, 15 bp, Homo sapiens
cgtgggagtgggcgc

SEQ ID NO: 674953 - DNA, 15 bp, Homo sapiens
gtgggagtgggcgcc

SEQ ID NO: 674954 - DNA, 15 bp, Homo sapiens
tgggagtgggcgcct

SEQ ID NO: 674955 - DNA, 15 bp, Homo sapiens
gggagtgggcgcctg

SEQ ID NO: 674956 - DNA, 15 bp, Homo sapiens
ggagtgggcgcctgt

SEQ ID NO: 674957 - DNA, 15 bp, Homo sapiens
gagtgggcgcctgta

SEQ ID NO: 674958 - DNA, 15 bp, Homo sapiens
agtgggcgcctgtaa

SEQ ID NO: 674959 - DNA, 15 bp, Homo sapiens
gctactcgggaggcc

SEQ ID NO: 674960 - DNA, 15 bp, Homo sapiens
ctactcgggaggccg

SEQ ID NO: 674961 - DNA, 15 bp, Homo sapiens
tactcgggaggccga

SEQ ID NO: 674962 - DNA, 15 bp, Homo sapiens
actcgggaggccgag

SEQ ID NO: 674963 - DNA, 15 bp, Homo sapiens
ctcgggaggccgagg

SEQ ID NO: 674964 - DNA, 15 bp, Homo sapiens
tcgggaggccgaggt

SEQ ID NO: 674965 - DNA, 15 bp, Homo sapiens
cgggaggccgaggta

SEQ ID NO: 674966 - DNA, 15 bp, Homo sapiens
gggaggccgaggtag

SEQ ID NO: 674967 - DNA, 15 bp, Homo sapiens
ggaggccgaggtaga

SEQ ID NO: 674968 - DNA, 15 bp, Homo sapiens
gaggccgaggtagaa

SEQ ID NO: 674969 - DNA, 15 bp, Homo sapiens
aggccgaggtagaaa

SEQ ID NO: 674970 - DNA, 15 bp, Homo sapiens
ggccgaggtagaaaa

SEQ ID NO: 674971 - DNA, 15 bp, Homo sapiens
gccgaggtagaaaaa

SEQ ID NO: 674972 - DNA, 15 bp, Homo sapiens
ccgaggtagaaaaat

SEQ ID NO: 674973 - DNA, 15 bp, Homo sapiens
cgaggtagaaaaatc

SEQ ID NO: 674974 - DNA, 15 bp, Homo sapiens
gaggtagaaaaatcg

SEQ ID NO: 674975 - DNA, 15 bp, Homo sapiens
aggtagaaaaatcgc

SEQ ID NO: 674976 - DNA, 15 bp, Homo sapiens
ggtagaaaaatcgct

SEQ ID NO: 674977 - DNA, 15 bp, Homo sapiens
gtagaaaaatcgctt

SEQ ID NO: 674978 - DNA, 15 bp, Homo sapiens
tagaaaaatcgcttg

SEQ ID NO: 674979 - DNA, 15 bp, Homo sapiens
agaaaaatcgcttga

SEQ ID NO: 674980 - DNA, 15 bp, Homo sapiens
gaaaaatcgcttgaa

SEQ ID NO: 674981 - DNA, 15 bp, Homo sapiens
aaaaatcgcttgaac

SEQ ID NO: 674982 - DNA, 15 bp, Homo sapiens
aaaatcgcttgaacc

SEQ ID NO: 674983 - DNA, 15 bp, Homo sapiens
aaatcgcttgaacct

SEQ ID NO: 674984 - DNA, 15 bp, Homo sapiens
aatcgcttgaaccta

SEQ ID NO: 674985 - DNA, 15 bp, Homo sapiens
atcgcttgaacctag

SEQ ID NO: 674986 - DNA, 15 bp, Homo sapiens
tcgcttgaacctagg

SEQ ID NO: 674987 - DNA, 15 bp, Homo sapiens
cgcttgaacctagga

SEQ ID NO: 674988 - DNA, 15 bp, Homo sapiens
gcttgaacctaggag

SEQ ID NO: 674989 - DNA, 15 bp, Homo sapiens
cttgaacctaggagg

SEQ ID NO: 674990 - DNA, 15 bp, Homo sapiens
ttgaacctaggaggc

SEQ ID NO: 674991 - DNA, 15 bp, Homo sapiens
tgaacctaggaggca

SEQ ID NO: 674992 - DNA, 15 bp, Homo sapiens
gaacctaggaggcag

SEQ ID NO: 674993 - DNA, 15 bp, Homo sapiens
aacctaggaggcaga

SEQ ID NO: 674994 - DNA, 15 bp, Homo sapiens
acctaggaggcagag

SEQ ID NO: 674995 - DNA, 15 bp, Homo sapiens
cctaggaggcagagg

SEQ ID NO: 674996 - DNA, 15 bp, Homo sapiens
ctaggaggcagaggt

SEQ ID NO: 674997 - DNA, 15 bp, Homo sapiens
taggaggcagaggtt

SEQ ID NO: 674998 - DNA, 15 bp, Homo sapiens
aggaggcagaggttg

SEQ ID NO: 674999 - DNA, 15 bp, Homo sapiens
atcgcgccactgcat

SEQ ID NO: 675000 - DNA, 15 bp, Homo sapiens
tcgcgccactgcatt

SEQ ID NO: 675001 - DNA, 15 bp, Homo sapiens
cgcgccactgcattc

SEQ ID NO: 675002 - DNA, 15 bp, Homo sapiens
gcgccactgcattcc

SEQ ID NO: 675003 - DNA, 15 bp, Homo sapiens
cgccactgcattcca

SEQ ID NO: 675004 - DNA, 15 bp, Homo sapiens
actgcattccagccc

SEQ ID NO: 675005 - DNA, 15 bp, Homo sapiens
ctgcattccagcccg

SEQ ID NO: 675006 - DNA, 15 bp, Homo sapiens
tgcattccagcccgg

SEQ ID NO: 675007 - DNA, 15 bp, Homo sapiens
gcattccagcccggg

SEQ ID NO: 675008 - DNA, 15 bp, Homo sapiens
cattccagcccggga

SEQ ID NO: 675009 - DNA, 15 bp, Homo sapiens
attccagcccgggag

SEQ ID NO: 675010 - DNA, 15 bp, Homo sapiens
ttccagcccgggagg

SEQ ID NO: 675011 - DNA, 15 bp, Homo sapiens
tccagcccgggaggc

SEQ ID NO: 675012 - DNA, 15 bp, Homo sapiens
ccagcccgggaggca

SEQ ID NO: 675013 - DNA, 15 bp, Homo sapiens
cagcccgggaggcaa

SEQ ID NO: 675014 - DNA, 15 bp, Homo sapiens
agcccgggaggcaag

SEQ ID NO: 675015 - DNA, 15 bp, Homo sapiens
gcccgggaggcaaga

SEQ ID NO: 675016 - DNA, 15 bp, Homo sapiens
cccgggaggcaagag

SEQ ID NO: 675017 - DNA, 15 bp, Homo sapiens
ccgggaggcaagagc

SEQ ID NO: 675018 - DNA, 15 bp, Homo sapiens
cgggaggcaagagca

SEQ ID NO: 675019 - DNA, 15 bp, Homo sapiens
gggaggcaagagcaa

SEQ ID NO: 675020 - DNA, 15 bp, Homo sapiens
ggaggcaagagcaaa

SEQ ID NO: 675021 - DNA, 15 bp, Homo sapiens
gaggcaagagcaaaa

SEQ ID NO: 675022 - DNA, 15 bp, Homo sapiens
aggcaagagcaaaac

SEQ ID NO: 675023 - DNA, 15 bp, Homo sapiens
ggcaagagcaaaact

SEQ ID NO: 675024 - DNA, 15 bp, Homo sapiens
gcaagagcaaaactc

SEQ ID NO: 675025 - DNA, 15 bp, Homo sapiens
caagagcaaaactcc

SEQ ID NO: 675026 - DNA, 15 bp, Homo sapiens
aagagcaaaactcca

SEQ ID NO: 675027 - DNA, 15 bp, Homo sapiens
agagcaaaactccat

SEQ ID NO: 675028 - DNA, 15 bp, Homo sapiens
gagcaaaactccatc

SEQ ID NO: 675029 - DNA, 15 bp, Homo sapiens
agcaaaactccatct

SEQ ID NO: 675030 - DNA, 15 bp, Homo sapiens
gcaaaactccatctc

SEQ ID NO: 675031 - DNA, 15 bp, Homo sapiens
caaaactccatctca

SEQ ID NO: 675032 - DNA, 15 bp, Homo sapiens
aaaactccatctcaa

SEQ ID NO: 675033 - DNA, 15 bp, Homo sapiens
aaactccatctcaaa

SEQ ID NO: 675034 - DNA, 15 bp, Homo sapiens
aactccatctcaaaa

SEQ ID NO: 675035 - DNA, 15 bp, Homo sapiens
actccatctcaaaaa

SEQ ID NO: 675036 - DNA, 15 bp, Homo sapiens
ctccatctcaaaaaa

SEQ ID NO: 675037 - DNA, 15 bp, Homo sapiens
tccatctcaaaaaaa

SEQ ID NO: 675038 - DNA, 15 bp, Homo sapiens
ccatctcaaaaaaaa

SEQ ID NO: 675039 - DNA, 15 bp, Homo sapiens
catctcaaaaaaaaa

SEQ ID NO: 675040 - DNA, 15 bp, Homo sapiens
atctcaaaaaaaaaa

SEQ ID NO: 675041 - DNA, 15 bp, Homo sapiens
aaaaaaaaaaaaagg

SEQ ID NO: 675042 - DNA, 15 bp, Homo sapiens
aaaaaaaaaaaagga

SEQ ID NO: 675043 - DNA, 15 bp, Homo sapiens
aaaaaaaaaaaggag

SEQ ID NO: 675044 - DNA, 15 bp, Homo sapiens
aaaaaaaaaaggagt

SEQ ID NO: 675045 - DNA, 15 bp, Homo sapiens
aaaaaaaaaggagtt

SEQ ID NO: 675046 - DNA, 15 bp, Homo sapiens
aaaaaaaaggagttc

SEQ ID NO: 675047 - DNA, 15 bp, Homo sapiens
aaaaaaaggagttca

SEQ ID NO: 675048 - DNA, 15 bp, Homo sapiens
aaaaaaggagttcag

SEQ ID NO: 675049 - DNA, 15 bp, Homo sapiens
aaaaaggagttcaga

SEQ ID NO: 675050 - DNA, 15 bp, Homo sapiens
ggagttcagaggccc

SEQ ID NO: 675051 - DNA, 15 bp, Homo sapiens
gagttcagaggcccg

SEQ ID NO: 675052 - DNA, 15 bp, Homo sapiens
agttcagaggcccgg

SEQ ID NO: 675053 - DNA, 15 bp, Homo sapiens
gttcagaggcccggc

SEQ ID NO: 675054 - DNA, 15 bp, Homo sapiens
ttcagaggcccggca

SEQ ID NO: 675055 - DNA, 15 bp, Homo sapiens
tcagaggcccggcat

SEQ ID NO: 675056 - DNA, 15 bp, Homo sapiens
cagaggcccggcatg

SEQ ID NO: 675057 - DNA, 15 bp, Homo sapiens
agaggcccggcatgg

SEQ ID NO: 675058 - DNA, 15 bp, Homo sapiens
gaggcccggcatggt

SEQ ID NO: 675059 - DNA, 15 bp, Homo sapiens
aggcccggcatggtg

SEQ ID NO: 675060 - DNA, 15 bp, Homo sapiens
ggcccggcatggtgg

SEQ ID NO: 675061 - DNA, 15 bp, Homo sapiens
gcccggcatggtggt

SEQ ID NO: 675062 - DNA, 15 bp, Homo sapiens
cccggcatggtggtt

SEQ ID NO: 675063 - DNA, 15 bp, Homo sapiens
ccggcatggtggttc

SEQ ID NO: 675064 - DNA, 15 bp, Homo sapiens
cggcatggtggttca

SEQ ID NO: 675065 - DNA, 15 bp, Homo sapiens
ggcatggtggttcac

SEQ ID NO: 675066 - DNA, 15 bp, Homo sapiens
gcatggtggttcaca

SEQ ID NO: 675067 - DNA, 15 bp, Homo sapiens
catggtggttcacac

SEQ ID NO: 675068 - DNA, 15 bp, Homo sapiens
atggtggttcacaca

SEQ ID NO: 675069 - DNA, 15 bp, Homo sapiens
tggtggttcacacat

SEQ ID NO: 675070 - DNA, 15 bp, Homo sapiens
ggtggttcacacatg

SEQ ID NO: 675071 - DNA, 15 bp, Homo sapiens
gtggttcacacatgt

SEQ ID NO: 675072 - DNA, 15 bp, Homo sapiens
tggttcacacatgtg

SEQ ID NO: 675073 - DNA, 15 bp, Homo sapiens
ggttcacacatgtga

SEQ ID NO: 675074 - DNA, 15 bp, Homo sapiens
gttcacacatgtgat

SEQ ID NO: 675075 - DNA, 15 bp, Homo sapiens
ttcacacatgtgatc

SEQ ID NO: 675076 - DNA, 15 bp, Homo sapiens
tcacacatgtgatcc

SEQ ID NO: 675077 - DNA, 15 bp, Homo sapiens
cacacatgtgatccc

SEQ ID NO: 675078 - DNA, 15 bp, Homo sapiens
acacatgtgatccca

SEQ ID NO: 675079 - DNA, 15 bp, Homo sapiens
cacatgtgatcccag

SEQ ID NO: 675080 - DNA, 15 bp, Homo sapiens
acatgtgatcccaga

SEQ ID NO: 675081 - DNA, 15 bp, Homo sapiens
catgtgatcccagaa

SEQ ID NO: 675082 - DNA, 15 bp, Homo sapiens
atgtgatcccagaac

SEQ ID NO: 675083 - DNA, 15 bp, Homo sapiens
tgtgatcccagaact

SEQ ID NO: 675084 - DNA, 15 bp, Homo sapiens
gtgatcccagaactt

SEQ ID NO: 675085 - DNA, 15 bp, Homo sapiens
tgatcccagaacttg

SEQ ID NO: 675086 - DNA, 15 bp, Homo sapiens
gatcccagaacttgg

SEQ ID NO: 675087 - DNA, 15 bp, Homo sapiens
atcccagaacttggg

SEQ ID NO: 675088 - DNA, 15 bp, Homo sapiens
tcccagaacttgggg

SEQ ID NO: 675089 - DNA, 15 bp, Homo sapiens
cccagaacttgggga

SEQ ID NO: 675090 - DNA, 15 bp, Homo sapiens
ccagaacttggggag

SEQ ID NO: 675091 - DNA, 15 bp, Homo sapiens
cagaacttggggagg

SEQ ID NO: 675092 - DNA, 15 bp, Homo sapiens
agaacttggggaggt

SEQ ID NO: 675093 - DNA, 15 bp, Homo sapiens
gaacttggggaggtt

SEQ ID NO: 675094 - DNA, 15 bp, Homo sapiens
aacttggggaggttg

SEQ ID NO: 675095 - DNA, 15 bp, Homo sapiens
acttggggaggttga

SEQ ID NO: 675096 - DNA, 15 bp, Homo sapiens
cttggggaggttgag

SEQ ID NO: 675097 - DNA, 15 bp, Homo sapiens
ttggggaggttgagg

SEQ ID NO: 675098 - DNA, 15 bp, Homo sapiens
tggggaggttgaggc

SEQ ID NO: 675099 - DNA, 15 bp, Homo sapiens
ggggaggttgaggca

SEQ ID NO: 675100 - DNA, 15 bp, Homo sapiens
gggaggttgaggcag

SEQ ID NO: 675101 - DNA, 15 bp, Homo sapiens
ggaggttgaggcagg

SEQ ID NO: 675102 - DNA, 15 bp, Homo sapiens
gaggttgaggcagga

SEQ ID NO: 675103 - DNA, 15 bp, Homo sapiens
aggttgaggcaggag

SEQ ID NO: 675104 - DNA, 15 bp, Homo sapiens
ggttgaggcaggaga

SEQ ID NO: 675105 - DNA, 15 bp, Homo sapiens
gttgaggcaggagaa

SEQ ID NO: 675106 - DNA, 15 bp, Homo sapiens
ttgaggcaggagaat

SEQ ID NO: 675107 - DNA, 15 bp, Homo sapiens
ggcaggagaatcacc

SEQ ID NO: 675108 - DNA, 15 bp, Homo sapiens
gcaggagaatcacct

SEQ ID NO: 675109 - DNA, 15 bp, Homo sapiens
caggagaatcacctg

SEQ ID NO: 675110 - DNA, 15 bp, Homo sapiens
aggagaatcacctga

SEQ ID NO: 675111 - DNA, 15 bp, Homo sapiens
ggagaatcacctgag

SEQ ID NO: 675112 - DNA, 15 bp, Homo sapiens
gagaatcacctgagc

SEQ ID NO: 675113 - DNA, 15 bp, Homo sapiens
agaatcacctgagct

SEQ ID NO: 675114 - DNA, 15 bp, Homo sapiens
gaatcacctgagctc

SEQ ID NO: 675115 - DNA, 15 bp, Homo sapiens
aatcacctgagctca

SEQ ID NO: 675116 - DNA, 15 bp, Homo sapiens
atcacctgagctcag

SEQ ID NO: 675117 - DNA, 15 bp, Homo sapiens
tcacctgagctcaga

SEQ ID NO: 675118 - DNA, 15 bp, Homo sapiens
cacctgagctcagag

SEQ ID NO: 675119 - DNA, 15 bp, Homo sapiens
acctgagctcagagt

SEQ ID NO: 675120 - DNA, 15 bp, Homo sapiens
cctgagctcagagtt

SEQ ID NO: 675121 - DNA, 15 bp, Homo sapiens
ctgagctcagagttc

SEQ ID NO: 675122 - DNA, 15 bp, Homo sapiens
tgagctcagagttca

SEQ ID NO: 675123 - DNA, 15 bp, Homo sapiens
gagctcagagttcaa

SEQ ID NO: 675124 - DNA, 15 bp, Homo sapiens
agctcagagttcaag

SEQ ID NO: 675125 - DNA, 15 bp, Homo sapiens
gctcagagttcaaga

SEQ ID NO: 675126 - DNA, 15 bp, Homo sapiens
ctcagagttcaagac

SEQ ID NO: 675127 - DNA, 15 bp, Homo sapiens
tcagagttcaagacc

SEQ ID NO: 675128 - DNA, 15 bp, Homo sapiens
cagagttcaagacca

SEQ ID NO: 675129 - DNA, 15 bp, Homo sapiens
caagaccagcctggg

SEQ ID NO: 675130 - DNA, 15 bp, Homo sapiens
aagaccagcctgggc

SEQ ID NO: 675131 - DNA, 15 bp, Homo sapiens
gaccagcctgggcag

SEQ ID NO: 675132 - DNA, 15 bp, Homo sapiens
accagcctgggcagc

SEQ ID NO: 675133 - DNA, 15 bp, Homo sapiens
ccagcctgggcagca

SEQ ID NO: 675134 - DNA, 15 bp, Homo sapiens
cagcctgggcagcac

SEQ ID NO: 675135 - DNA, 15 bp, Homo sapiens
agcctgggcagcaca

SEQ ID NO: 675136 - DNA, 15 bp, Homo sapiens
gcctgggcagcacag

SEQ ID NO: 675137 - DNA, 15 bp, Homo sapiens
cctgggcagcacagc

SEQ ID NO: 675138 - DNA, 15 bp, Homo sapiens
ctgggcagcacagca

SEQ ID NO: 675139 - DNA, 15 bp, Homo sapiens
tgggcagcacagcaa

SEQ ID NO: 675140 - DNA, 15 bp, Homo sapiens
gggcagcacagcaag

SEQ ID NO: 675141 - DNA, 15 bp, Homo sapiens
ggcagcacagcaaga

SEQ ID NO: 675142 - DNA, 15 bp, Homo sapiens
gcagcacagcaagac

SEQ ID NO: 675143 - DNA, 15 bp, Homo sapiens
cagcacagcaagacc

SEQ ID NO: 675144 - DNA, 15 bp, Homo sapiens
agcacagcaagaccc

SEQ ID NO: 675145 - DNA, 15 bp, Homo sapiens
gcacagcaagacccc

SEQ ID NO: 675146 - DNA, 15 bp, Homo sapiens
cacagcaagacccca

SEQ ID NO: 675147 - DNA, 15 bp, Homo sapiens
acagcaagaccccat

SEQ ID NO: 675148 - DNA, 15 bp, Homo sapiens
cagcaagaccccatc

SEQ ID NO: 675149 - DNA, 15 bp, Homo sapiens
agcaagaccccatct

SEQ ID NO: 675150 - DNA, 15 bp, Homo sapiens
gcaagaccccatctc

SEQ ID NO: 675151 - DNA, 15 bp, Homo sapiens
caagaccccatctct

SEQ ID NO: 675152 - DNA, 15 bp, Homo sapiens
aagaccccatctctg

SEQ ID NO: 675153 - DNA, 15 bp, Homo sapiens
agaccccatctctgc

SEQ ID NO: 675154 - DNA, 15 bp, Homo sapiens
gaccccatctctgca

SEQ ID NO: 675155 - DNA, 15 bp, Homo sapiens
accccatctctgcaa

SEQ ID NO: 675156 - DNA, 15 bp, Homo sapiens
ccccatctctgcaaa

SEQ ID NO: 675157 - DNA, 15 bp, Homo sapiens
cccatctctgcaaaa

SEQ ID NO: 675158 - DNA, 15 bp, Homo sapiens
ccatctctgcaaaaa

SEQ ID NO: 675159 - DNA, 15 bp, Homo sapiens
catctctgcaaaaaa

SEQ ID NO: 675160 - DNA, 15 bp, Homo sapiens
atctctgcaaaaaat

SEQ ID NO: 675161 - DNA, 15 bp, Homo sapiens
ctgcaaaaaataaaa

SEQ ID NO: 675162 - DNA, 15 bp, Homo sapiens
tgcaaaaaataaaaa

SEQ ID NO: 675163 - DNA, 15 bp, Homo sapiens
gcaaaaaataaaaat

SEQ ID NO: 675164 - DNA, 15 bp, Homo sapiens
caaaaaataaaaatt

SEQ ID NO: 675165 - DNA, 15 bp, Homo sapiens
aaaaaataaaaattt

SEQ ID NO: 675166 - DNA, 15 bp, Homo sapiens
aaaaataaaaattta

SEQ ID NO: 675167 - DNA, 15 bp, Homo sapiens
aaaataaaaatttag

SEQ ID NO: 675168 - DNA, 15 bp, Homo sapiens
aaataaaaatttagc

SEQ ID NO: 675169 - DNA, 15 bp, Homo sapiens
aataaaaatttagcc

SEQ ID NO: 675170 - DNA, 15 bp, Homo sapiens
ataaaaatttagccc

SEQ ID NO: 675171 - DNA, 15 bp, Homo sapiens
taaaaatttagccca

SEQ ID NO: 675172 - DNA, 15 bp, Homo sapiens
aaaaatttagcccag

SEQ ID NO: 675173 - DNA, 15 bp, Homo sapiens
aaaatttagcccagt

SEQ ID NO: 675174 - DNA, 15 bp, Homo sapiens
aaatttagcccagtg

SEQ ID NO: 675175 - DNA, 15 bp, Homo sapiens
aatttagcccagtgt

SEQ ID NO: 675176 - DNA, 15 bp, Homo sapiens
atttagcccagtgtg

SEQ ID NO: 675177 - DNA, 15 bp, Homo sapiens
tttagcccagtgtgg

SEQ ID NO: 675178 - DNA, 15 bp, Homo sapiens
ttagcccagtgtggt

SEQ ID NO: 675179 - DNA, 15 bp, Homo sapiens
tagcccagtgtggtg

SEQ ID NO: 675180 - DNA, 15 bp, Homo sapiens
agcccagtgtggtga

SEQ ID NO: 675181 - DNA, 15 bp, Homo sapiens
gcccagtgtggtgat

SEQ ID NO: 675182 - DNA, 15 bp, Homo sapiens
cccagtgtggtgatg

SEQ ID NO: 675183 - DNA, 15 bp, Homo sapiens
ccagtgtggtgatga

SEQ ID NO: 675184 - DNA, 15 bp, Homo sapiens
cagtgtggtgatgag

SEQ ID NO: 675185 - DNA, 15 bp, Homo sapiens
agtgtggtgatgagc

SEQ ID NO: 675186 - DNA, 15 bp, Homo sapiens
gtgtggtgatgagcg

SEQ ID NO: 675187 - DNA, 15 bp, Homo sapiens
tgtggtgatgagcgc

SEQ ID NO: 675188 - DNA, 15 bp, Homo sapiens
gtggtgatgagcgcc

SEQ ID NO: 675189 - DNA, 15 bp, Homo sapiens
tggtgatgagcgcct

SEQ ID NO: 675190 - DNA, 15 bp, Homo sapiens
ggtgatgagcgccta

SEQ ID NO: 675191 - DNA, 15 bp, Homo sapiens
gtgatgagcgcctag

SEQ ID NO: 675192 - DNA, 15 bp, Homo sapiens
tgatgagcgcctagt

SEQ ID NO: 675193 - DNA, 15 bp, Homo sapiens
gatgagcgcctagtt

SEQ ID NO: 675194 - DNA, 15 bp, Homo sapiens
atgagcgcctagttc

SEQ ID NO: 675195 - DNA, 15 bp, Homo sapiens
tgagcgcctagttcc

SEQ ID NO: 675196 - DNA, 15 bp, Homo sapiens
gagcgcctagttcca

SEQ ID NO: 675197 - DNA, 15 bp, Homo sapiens
agcgcctagttccag

SEQ ID NO: 675198 - DNA, 15 bp, Homo sapiens
gcgcctagttccagc

SEQ ID NO: 675199 - DNA, 15 bp, Homo sapiens
cgcctagttccagct

SEQ ID NO: 675200 - DNA, 15 bp, Homo sapiens
gcctagttccagcta

SEQ ID NO: 675201 - DNA, 15 bp, Homo sapiens
cctagttccagctac

SEQ ID NO: 675202 - DNA, 15 bp, Homo sapiens
ctagttccagctact

SEQ ID NO: 675203 - DNA, 15 bp, Homo sapiens
tagttccagctacta

SEQ ID NO: 675204 - DNA, 15 bp, Homo sapiens
agttccagctactag

SEQ ID NO: 675205 - DNA, 15 bp, Homo sapiens
gttccagctactagg

SEQ ID NO: 675206 - DNA, 15 bp, Homo sapiens
ttccagctactaggg

SEQ ID NO: 675207 - DNA, 15 bp, Homo sapiens
tccagctactaggga

SEQ ID NO: 675208 - DNA, 15 bp, Homo sapiens
ccagctactagggag

SEQ ID NO: 675209 - DNA, 15 bp, Homo sapiens
cagctactagggagg

SEQ ID NO: 675210 - DNA, 15 bp, Homo sapiens
agctactagggaggc

SEQ ID NO: 675211 - DNA, 15 bp, Homo sapiens
gctactagggaggct

SEQ ID NO: 675212 - DNA, 15 bp, Homo sapiens
ctactagggaggcta

SEQ ID NO: 675213 - DNA, 15 bp, Homo sapiens
tactagggaggctaa

SEQ ID NO: 675214 - DNA, 15 bp, Homo sapiens
actagggaggctaag

SEQ ID NO: 675215 - DNA, 15 bp, Homo sapiens
ctagggaggctaagg

SEQ ID NO: 675216 - DNA, 15 bp, Homo sapiens
tagggaggctaaggc

SEQ ID NO: 675217 - DNA, 15 bp, Homo sapiens
agggaggctaaggca

SEQ ID NO: 675218 - DNA, 15 bp, Homo sapiens
gggaggctaaggcag

SEQ ID NO: 675219 - DNA, 15 bp, Homo sapiens
ggaggctaaggcagg

SEQ ID NO: 675220 - DNA, 15 bp, Homo sapiens
gaggctaaggcagga

SEQ ID NO: 675221 - DNA, 15 bp, Homo sapiens
aggctaaggcaggag

SEQ ID NO: 675222 - DNA, 15 bp, Homo sapiens
ggctaaggcaggagg

SEQ ID NO: 675223 - DNA, 15 bp, Homo sapiens
gctaaggcaggagga

SEQ ID NO: 675224 - DNA, 15 bp, Homo sapiens
ctaaggcaggaggat

SEQ ID NO: 675225 - DNA, 15 bp, Homo sapiens
taaggcaggaggatt

SEQ ID NO: 675226 - DNA, 15 bp, Homo sapiens
aaggcaggaggattg

SEQ ID NO: 675227 - DNA, 15 bp, Homo sapiens
aggattgcttgaggc

SEQ ID NO: 675228 - DNA, 15 bp, Homo sapiens
ggattgcttgaggct

SEQ ID NO: 675229 - DNA, 15 bp, Homo sapiens
gattgcttgaggcta

SEQ ID NO: 675230 - DNA, 15 bp, Homo sapiens
attgcttgaggctaa

SEQ ID NO: 675231 - DNA, 15 bp, Homo sapiens
ttgcttgaggctaag

SEQ ID NO: 675232 - DNA, 15 bp, Homo sapiens
tgcttgaggctaagg

SEQ ID NO: 675233 - DNA, 15 bp, Homo sapiens
gcttgaggctaaggt

SEQ ID NO: 675234 - DNA, 15 bp, Homo sapiens
cttgaggctaaggta

SEQ ID NO: 675235 - DNA, 15 bp, Homo sapiens
ttgaggctaaggtag

SEQ ID NO: 675236 - DNA, 15 bp, Homo sapiens
tgaggctaaggtagg

SEQ ID NO: 675237 - DNA, 15 bp, Homo sapiens
gaggctaaggtagga

SEQ ID NO: 675238 - DNA, 15 bp, Homo sapiens
aggctaaggtaggag

SEQ ID NO: 675239 - DNA, 15 bp, Homo sapiens
ggctaaggtaggaga

SEQ ID NO: 675240 - DNA, 15 bp, Homo sapiens
gctaaggtaggagat

SEQ ID NO: 675241 - DNA, 15 bp, Homo sapiens
ctaaggtaggagatt

SEQ ID NO: 675242 - DNA, 15 bp, Homo sapiens
taaggtaggagattg

SEQ ID NO: 675243 - DNA, 15 bp, Homo sapiens
aaggtaggagattga

SEQ ID NO: 675244 - DNA, 15 bp, Homo sapiens
aggtaggagattgag

SEQ ID NO: 675245 - DNA, 15 bp, Homo sapiens
ggtaggagattgaga

SEQ ID NO: 675246 - DNA, 15 bp, Homo sapiens
gtaggagattgagac

SEQ ID NO: 675247 - DNA, 15 bp, Homo sapiens
taggagattgagact

SEQ ID NO: 675248 - DNA, 15 bp, Homo sapiens
aggagattgagactg

SEQ ID NO: 675249 - DNA, 15 bp, Homo sapiens
ggagattgagactgc

SEQ ID NO: 675250 - DNA, 15 bp, Homo sapiens
gagattgagactgca

SEQ ID NO: 675251 - DNA, 15 bp, Homo sapiens
agattgagactgcag

SEQ ID NO: 675252 - DNA, 15 bp, Homo sapiens
gattgagactgcagt

SEQ ID NO: 675253 - DNA, 15 bp, Homo sapiens
attgagactgcagtg

SEQ ID NO: 675254 - DNA, 15 bp, Homo sapiens
ttgagactgcagtga

SEQ ID NO: 675255 - DNA, 15 bp, Homo sapiens
tgagactgcagtgac

SEQ ID NO: 675256 - DNA, 15 bp, Homo sapiens
gagactgcagtgact

SEQ ID NO: 675257 - DNA, 15 bp, Homo sapiens
agactgcagtgactt

SEQ ID NO: 675258 - DNA, 15 bp, Homo sapiens
gactgcagtgacttg

SEQ ID NO: 675259 - DNA, 15 bp, Homo sapiens
actgcagtgacttgt

SEQ ID NO: 675260 - DNA, 15 bp, Homo sapiens
ctgcagtgacttgtg

SEQ ID NO: 675261 - DNA, 15 bp, Homo sapiens
tgcagtgacttgtga

SEQ ID NO: 675262 - DNA, 15 bp, Homo sapiens
gcagtgacttgtgat

SEQ ID NO: 675263 - DNA, 15 bp, Homo sapiens
cagtgacttgtgatt

SEQ ID NO: 675264 - DNA, 15 bp, Homo sapiens
agtgacttgtgattg

SEQ ID NO: 675265 - DNA, 15 bp, Homo sapiens
gtgacttgtgattgc

SEQ ID NO: 675266 - DNA, 15 bp, Homo sapiens
tgacttgtgattgcg

SEQ ID NO: 675267 - DNA, 15 bp, Homo sapiens
gacttgtgattgcgt

SEQ ID NO: 675268 - DNA, 15 bp, Homo sapiens
acttgtgattgcgtc

SEQ ID NO: 675269 - DNA, 15 bp, Homo sapiens
cttgtgattgcgtca

SEQ ID NO: 675270 - DNA, 15 bp, Homo sapiens
ttgtgattgcgtcac

SEQ ID NO: 675271 - DNA, 15 bp, Homo sapiens
tgtgattgcgtcact

SEQ ID NO: 675272 - DNA, 15 bp, Homo sapiens
gtgattgcgtcactg

SEQ ID NO: 675273 - DNA, 15 bp, Homo sapiens
tgattgcgtcactgc

SEQ ID NO: 675274 - DNA, 15 bp, Homo sapiens
gattgcgtcactgcg

SEQ ID NO: 675275 - DNA, 15 bp, Homo sapiens
attgcgtcactgcgc

SEQ ID NO: 675276 - DNA, 15 bp, Homo sapiens
ttgcgtcactgcgct

SEQ ID NO: 675277 - DNA, 15 bp, Homo sapiens
tgcgtcactgcgctc

SEQ ID NO: 675278 - DNA, 15 bp, Homo sapiens
gcgtcactgcgctcc

SEQ ID NO: 675279 - DNA, 15 bp, Homo sapiens
cgtcactgcgctcca

SEQ ID NO: 675280 - DNA, 15 bp, Homo sapiens
gtcactgcgctccag

SEQ ID NO: 675281 - DNA, 15 bp, Homo sapiens
tcactgcgctccagc

SEQ ID NO: 675282 - DNA, 15 bp, Homo sapiens
cactgcgctccagcc

SEQ ID NO: 675283 - DNA, 15 bp, Homo sapiens
actgcgctccagcct

SEQ ID NO: 675284 - DNA, 15 bp, Homo sapiens
ctgcgctccagcctg

SEQ ID NO: 675285 - DNA, 15 bp, Homo sapiens
tgcgctccagcctgg

SEQ ID NO: 675286 - DNA, 15 bp, Homo sapiens
gcgctccagcctggg

SEQ ID NO: 675287 - DNA, 15 bp, Homo sapiens
cgctccagcctgggt

SEQ ID NO: 675288 - DNA, 15 bp, Homo sapiens
gctccagcctgggtg

SEQ ID NO: 675289 - DNA, 15 bp, Homo sapiens
ggtgacagagcaagc

SEQ ID NO: 675290 - DNA, 15 bp, Homo sapiens
gtgacagagcaagcc

SEQ ID NO: 675291 - DNA, 15 bp, Homo sapiens
tgacagagcaagccc

SEQ ID NO: 675292 - DNA, 15 bp, Homo sapiens
gacagagcaagccct

SEQ ID NO: 675293 - DNA, 15 bp, Homo sapiens
acagagcaagccctt

SEQ ID NO: 675294 - DNA, 15 bp, Homo sapiens
cagagcaagcccttg

SEQ ID NO: 675295 - DNA, 15 bp, Homo sapiens
agagcaagcccttgt

SEQ ID NO: 675296 - DNA, 15 bp, Homo sapiens
gagcaagcccttgtc

SEQ ID NO: 675297 - DNA, 15 bp, Homo sapiens
agcaagcccttgtct

SEQ ID NO: 675298 - DNA, 15 bp, Homo sapiens
gcaagcccttgtctc

SEQ ID NO: 675299 - DNA, 15 bp, Homo sapiens
caagcccttgtctct

SEQ ID NO: 675300 - DNA, 15 bp, Homo sapiens
aagcccttgtctctt

SEQ ID NO: 675301 - DNA, 15 bp, Homo sapiens
agcccttgtctctta

SEQ ID NO: 675302 - DNA, 15 bp, Homo sapiens
gcccttgtctcttaa

SEQ ID NO: 675303 - DNA, 15 bp, Homo sapiens
cccttgtctcttaaa

SEQ ID NO: 675304 - DNA, 15 bp, Homo sapiens
ccttgtctcttaaaa

SEQ ID NO: 675305 - DNA, 15 bp, Homo sapiens
cttgtctcttaaaaa

SEQ ID NO: 675306 - DNA, 15 bp, Homo sapiens
ttgtctcttaaaaaa

SEQ ID NO: 675307 - DNA, 15 bp, Homo sapiens
tgtctcttaaaaaaa

SEQ ID NO: 675308 - DNA, 15 bp, Homo sapiens
gtctcttaaaaaaaa

SEQ ID NO: 675309 - DNA, 15 bp, Homo sapiens
tctcttaaaaaaaaa

SEQ ID NO: 675310 - DNA, 15 bp, Homo sapiens
ctcttaaaaaaaaaa

SEQ ID NO: 675311 - DNA, 15 bp, Homo sapiens
tcttaaaaaaaaaaa

SEQ ID NO: 675312 - DNA, 15 bp, Homo sapiens
cttaaaaaaaaaaaa

SEQ ID NO: 675313 - DNA, 15 bp, Homo sapiens
ttaaaaaaaaaaaaa

SEQ ID NO: 675314 - DNA, 15 bp, Homo sapiens
taaaaaaaaaaaaaa

SEQ ID NO: 675315 - DNA, 15 bp, Homo sapiens
aaaaaaaaaaattca

SEQ ID NO: 675316 - DNA, 15 bp, Homo sapiens
aaaaaaaaaattcaa

SEQ ID NO: 675317 - DNA, 15 bp, Homo sapiens
aaaaaaaaattcaaa

SEQ ID NO: 675318 - DNA, 15 bp, Homo sapiens
aaaaaaaattcaaag

SEQ ID NO: 675319 - DNA, 15 bp, Homo sapiens
aaaaaaattcaaaga

SEQ ID NO: 675320 - DNA, 15 bp, Homo sapiens
aaaaaattcaaagaa

SEQ ID NO: 675321 - DNA, 15 bp, Homo sapiens
aaaaattcaaagaag

SEQ ID NO: 675322 - DNA, 15 bp, Homo sapiens
aaaattcaaagaagg

SEQ ID NO: 675323 - DNA, 15 bp, Homo sapiens
aaattcaaagaaggg

SEQ ID NO: 675324 - DNA, 15 bp, Homo sapiens
aattcaaagaagggt

SEQ ID NO: 675325 - DNA, 15 bp, Homo sapiens
attcaaagaagggtt

SEQ ID NO: 675326 - DNA, 15 bp, Homo sapiens
ttcaaagaagggttt

SEQ ID NO: 675327 - DNA, 15 bp, Homo sapiens
tcaaagaagggtttc

SEQ ID NO: 675328 - DNA, 15 bp, Homo sapiens
caaagaagggtttcc

SEQ ID NO: 675329 - DNA, 15 bp, Homo sapiens
aaagaagggtttcca

SEQ ID NO: 675330 - DNA, 15 bp, Homo sapiens
aagaagggtttccag

SEQ ID NO: 675331 - DNA, 15 bp, Homo sapiens
agaagggtttccaga

SEQ ID NO: 675332 - DNA, 15 bp, Homo sapiens
gaagggtttccagag

SEQ ID NO: 675333 - DNA, 15 bp, Homo sapiens
aagggtttccagagg

SEQ ID NO: 675334 - DNA, 15 bp, Homo sapiens
agggtttccagaggg

SEQ ID NO: 675335 - DNA, 15 bp, Homo sapiens
gggtttccagagggc

SEQ ID NO: 675336 - DNA, 15 bp, Homo sapiens
ggtttccagagggcc

SEQ ID NO: 675337 - DNA, 15 bp, Homo sapiens
gtttccagagggcca

SEQ ID NO: 675338 - DNA, 15 bp, Homo sapiens
tttccagagggccag

SEQ ID NO: 675339 - DNA, 15 bp, Homo sapiens
ttccagagggccagg

SEQ ID NO: 675340 - DNA, 15 bp, Homo sapiens
tccagagggccagga

SEQ ID NO: 675341 - DNA, 15 bp, Homo sapiens
ccagagggccaggag

SEQ ID NO: 675342 - DNA, 15 bp, Homo sapiens
atctctaagccaaac

SEQ ID NO: 675343 - DNA, 15 bp, Homo sapiens
tctctaagccaaacc

SEQ ID NO: 675344 - DNA, 15 bp, Homo sapiens
ctctaagccaaaccc

SEQ ID NO: 675345 - DNA, 15 bp, Homo sapiens
tctaagccaaacccc

SEQ ID NO: 675346 - DNA, 15 bp, Homo sapiens
ctaagccaaacccct

SEQ ID NO: 675347 - DNA, 15 bp, Homo sapiens
taagccaaaccccta

SEQ ID NO: 675348 - DNA, 15 bp, Homo sapiens
aagccaaacccctaa

SEQ ID NO: 675349 - DNA, 15 bp, Homo sapiens
agccaaacccctaaa

SEQ ID NO: 675350 - DNA, 15 bp, Homo sapiens
gccaaacccctaaac

SEQ ID NO: 675351 - DNA, 15 bp, Homo sapiens
ccaaacccctaaact

SEQ ID NO: 675352 - DNA, 15 bp, Homo sapiens
caaacccctaaactc

SEQ ID NO: 675353 - DNA, 15 bp, Homo sapiens
aaacccctaaactca

SEQ ID NO: 675354 - DNA, 15 bp, Homo sapiens
aacccctaaactcag

SEQ ID NO: 675355 - DNA, 15 bp, Homo sapiens
acccctaaactcagg

SEQ ID NO: 675356 - DNA, 15 bp, Homo sapiens
cccctaaactcagga

SEQ ID NO: 675357 - DNA, 15 bp, Homo sapiens
ccctaaactcaggag

SEQ ID NO: 675358 - DNA, 15 bp, Homo sapiens
cctaaactcaggagt

SEQ ID NO: 675359 - DNA, 15 bp, Homo sapiens
ctaaactcaggagtc

SEQ ID NO: 675360 - DNA, 15 bp, Homo sapiens
taaactcaggagtca

SEQ ID NO: 675361 - DNA, 15 bp, Homo sapiens
aaactcaggagtcaa

SEQ ID NO: 675362 - DNA, 15 bp, Homo sapiens
aactcaggagtcaac

SEQ ID NO: 675363 - DNA, 15 bp, Homo sapiens
actcaggagtcaacg

SEQ ID NO: 675364 - DNA, 15 bp, Homo sapiens
ctcaggagtcaacgt

SEQ ID NO: 675365 - DNA, 15 bp, Homo sapiens
tcaggagtcaacgtg

SEQ ID NO: 675366 - DNA, 15 bp, Homo sapiens
caggagtcaacgtgt

SEQ ID NO: 675367 - DNA, 15 bp, Homo sapiens
aggagtcaacgtgtt

SEQ ID NO: 675368 - DNA, 15 bp, Homo sapiens
ggagtcaacgtgttt

SEQ ID NO: 675369 - DNA, 15 bp, Homo sapiens
gagtcaacgtgttta

SEQ ID NO: 675370 - DNA, 15 bp, Homo sapiens
agtcaacgtgtttac

SEQ ID NO: 675371 - DNA, 15 bp, Homo sapiens
gtcaacgtgtttacc

SEQ ID NO: 675372 - DNA, 15 bp, Homo sapiens
tcaacgtgtttacct

SEQ ID NO: 675373 - DNA, 15 bp, Homo sapiens
caacgtgtttacctc

SEQ ID NO: 675374 - DNA, 15 bp, Homo sapiens
aacgtgtttacctct

SEQ ID NO: 675375 - DNA, 15 bp, Homo sapiens
acgtgtttacctctt

SEQ ID NO: 675376 - DNA, 15 bp, Homo sapiens
cgtgtttacctcttc

SEQ ID NO: 675377 - DNA, 15 bp, Homo sapiens
gtgtttacctcttct

SEQ ID NO: 675378 - DNA, 15 bp, Homo sapiens
tgtttacctcttcta

SEQ ID NO: 675379 - DNA, 15 bp, Homo sapiens
gtttacctcttctat

SEQ ID NO: 675380 - DNA, 15 bp, Homo sapiens
tttacctcttctatg

SEQ ID NO: 675381 - DNA, 15 bp, Homo sapiens
ttacctcttctatgc

SEQ ID NO: 675382 - DNA, 15 bp, Homo sapiens
tacctcttctatgca

SEQ ID NO: 675383 - DNA, 15 bp, Homo sapiens
acctcttctatgcaa

SEQ ID NO: 675384 - DNA, 15 bp, Homo sapiens
cctcttctatgcaag

SEQ ID NO: 675385 - DNA, 15 bp, Homo sapiens
ctcttctatgcaagc

SEQ ID NO: 675386 - DNA, 15 bp, Homo sapiens
tcttctatgcaagcc

SEQ ID NO: 675387 - DNA, 15 bp, Homo sapiens
cttctatgcaagcct

SEQ ID NO: 675388 - DNA, 15 bp, Homo sapiens
ttctatgcaagcctt

SEQ ID NO: 675389 - DNA, 15 bp, Homo sapiens
tctatgcaagccttg

SEQ ID NO: 675390 - DNA, 15 bp, Homo sapiens
ctatgcaagccttgc

SEQ ID NO: 675391 - DNA, 15 bp, Homo sapiens
tatgcaagccttgct

SEQ ID NO: 675392 - DNA, 15 bp, Homo sapiens
atgcaagccttgcta

SEQ ID NO: 675393 - DNA, 15 bp, Homo sapiens
tgcaagccttgctag

SEQ ID NO: 675394 - DNA, 15 bp, Homo sapiens
gcaagccttgctaga

SEQ ID NO: 675395 - DNA, 15 bp, Homo sapiens
caagccttgctagac

SEQ ID NO: 675396 - DNA, 15 bp, Homo sapiens
aagccttgctagaca

SEQ ID NO: 675397 - DNA, 15 bp, Homo sapiens
agccttgctagacag

SEQ ID NO: 675398 - DNA, 15 bp, Homo sapiens
gccttgctagacagc

SEQ ID NO: 675399 - DNA, 15 bp, Homo sapiens
ccttgctagacagcc

SEQ ID NO: 675400 - DNA, 15 bp, Homo sapiens
cttgctagacagcca

SEQ ID NO: 675401 - DNA, 15 bp, Homo sapiens
ttgctagacagccag

SEQ ID NO: 675402 - DNA, 15 bp, Homo sapiens
tgctagacagccagg

SEQ ID NO: 675403 - DNA, 15 bp, Homo sapiens
gctagacagccaggt

SEQ ID NO: 675404 - DNA, 15 bp, Homo sapiens
ctagacagccaggtt

SEQ ID NO: 675405 - DNA, 15 bp, Homo sapiens
tagacagccaggtta

SEQ ID NO: 675406 - DNA, 15 bp, Homo sapiens
agacagccaggttag

SEQ ID NO: 675407 - DNA, 15 bp, Homo sapiens
gacagccaggttagc

SEQ ID NO: 675408 - DNA, 15 bp, Homo sapiens
acagccaggttagcc

SEQ ID NO: 675409 - DNA, 15 bp, Homo sapiens
cagccaggttagcct

SEQ ID NO: 675410 - DNA, 15 bp, Homo sapiens
agccaggttagcctt

SEQ ID NO: 675411 - DNA, 15 bp, Homo sapiens
gccaggttagccttt

SEQ ID NO: 675412 - DNA, 15 bp, Homo sapiens
ccaggttagcctttg

SEQ ID NO: 675413 - DNA, 15 bp, Homo sapiens
caggttagcctttgc

SEQ ID NO: 675414 - DNA, 15 bp, Homo sapiens
aggttagcctttgcc

SEQ ID NO: 675415 - DNA, 15 bp, Homo sapiens
ggttagcctttgccc

SEQ ID NO: 675416 - DNA, 15 bp, Homo sapiens
gttagcctttgccct

SEQ ID NO: 675417 - DNA, 15 bp, Homo sapiens
ttagcctttgccctg

SEQ ID NO: 675418 - DNA, 15 bp, Homo sapiens
tagcctttgccctgt

SEQ ID NO: 675419 - DNA, 15 bp, Homo sapiens
agcctttgccctgtc

SEQ ID NO: 675420 - DNA, 15 bp, Homo sapiens
gcctttgccctgtca

SEQ ID NO: 675421 - DNA, 15 bp, Homo sapiens
cctttgccctgtcac

SEQ ID NO: 675422 - DNA, 15 bp, Homo sapiens
ctttgccctgtcacc

SEQ ID NO: 675423 - DNA, 15 bp, Homo sapiens
tttgccctgtcaccc

SEQ ID NO: 675424 - DNA, 15 bp, Homo sapiens
ttgccctgtcacccc

SEQ ID NO: 675425 - DNA, 15 bp, Homo sapiens
tgccctgtcaccccc

SEQ ID NO: 675426 - DNA, 15 bp, Homo sapiens
gccctgtcacccccg

SEQ ID NO: 675427 - DNA, 15 bp, Homo sapiens
ccctgtcacccccga

SEQ ID NO: 675428 - DNA, 15 bp, Homo sapiens
cctgtcacccccgaa

SEQ ID NO: 675429 - DNA, 15 bp, Homo sapiens
ctgtcacccccgaat

SEQ ID NO: 675430 - DNA, 15 bp, Homo sapiens
tgtcacccccgaatc

SEQ ID NO: 675431 - DNA, 15 bp, Homo sapiens
gtcacccccgaatca

SEQ ID NO: 675432 - DNA, 15 bp, Homo sapiens
tcacccccgaatcat

SEQ ID NO: 675433 - DNA, 15 bp, Homo sapiens
cacccccgaatcatg

SEQ ID NO: 675434 - DNA, 15 bp, Homo sapiens
acccccgaatcatga

SEQ ID NO: 675435 - DNA, 15 bp, Homo sapiens
cccccgaatcatgac

SEQ ID NO: 675436 - DNA, 15 bp, Homo sapiens
ccccgaatcatgacc

SEQ ID NO: 675437 - DNA, 15 bp, Homo sapiens
cccgaatcatgaccc

SEQ ID NO: 675438 - DNA, 15 bp, Homo sapiens
ccgaatcatgaccca

SEQ ID NO: 675439 - DNA, 15 bp, Homo sapiens
cgaatcatgacccac

SEQ ID NO: 675440 - DNA, 15 bp, Homo sapiens
gaatcatgacccacc

SEQ ID NO: 675441 - DNA, 15 bp, Homo sapiens
aatcatgacccaccc

SEQ ID NO: 675442 - DNA, 15 bp, Homo sapiens
atcatgacccaccca

SEQ ID NO: 675443 - DNA, 15 bp, Homo sapiens
tcatgacccacccag

SEQ ID NO: 675444 - DNA, 15 bp, Homo sapiens
catgacccacccagt

SEQ ID NO: 675445 - DNA, 15 bp, Homo sapiens
atgacccacccagtg

SEQ ID NO: 675446 - DNA, 15 bp, Homo sapiens
tgacccacccagtgt

SEQ ID NO: 675447 - DNA, 15 bp, Homo sapiens
gacccacccagtgtc

SEQ ID NO: 675448 - DNA, 15 bp, Homo sapiens
acccacccagtgtct

SEQ ID NO: 675449 - DNA, 15 bp, Homo sapiens
cccacccagtgtctt

SEQ ID NO: 675450 - DNA, 15 bp, Homo sapiens
ccacccagtgtcttt

SEQ ID NO: 675451 - DNA, 15 bp, Homo sapiens
cacccagtgtctttc

SEQ ID NO: 675452 - DNA, 15 bp, Homo sapiens
acccagtgtctttcg

SEQ ID NO: 675453 - DNA, 15 bp, Homo sapiens
cccagtgtctttcga

SEQ ID NO: 675454 - DNA, 15 bp, Homo sapiens
ccagtgtctttcgag

SEQ ID NO: 675455 - DNA, 15 bp, Homo sapiens
cagtgtctttcgagg

SEQ ID NO: 675456 - DNA, 15 bp, Homo sapiens
agtgtctttcgaggt

SEQ ID NO: 675457 - DNA, 15 bp, Homo sapiens
gtgtctttcgaggtg

SEQ ID NO: 675458 - DNA, 15 bp, Homo sapiens
tgtctttcgaggtgg

SEQ ID NO: 675459 - DNA, 15 bp, Homo sapiens
gtctttcgaggtggg

SEQ ID NO: 675460 - DNA, 15 bp, Homo sapiens
tctttcgaggtgggt

SEQ ID NO: 675461 - DNA, 15 bp, Homo sapiens
ctttcgaggtgggtt

SEQ ID NO: 675462 - DNA, 15 bp, Homo sapiens
tttcgaggtgggttt

SEQ ID NO: 675463 - DNA, 15 bp, Homo sapiens
ttcgaggtgggtttg

SEQ ID NO: 675464 - DNA, 15 bp, Homo sapiens
tcgaggtgggtttgt

SEQ ID NO: 675465 - DNA, 15 bp, Homo sapiens
cgaggtgggtttgta

SEQ ID NO: 675466 - DNA, 15 bp, Homo sapiens
gaggtgggtttgtac

SEQ ID NO: 675467 - DNA, 15 bp, Homo sapiens
aggtgggtttgtacc

SEQ ID NO: 675468 - DNA, 15 bp, Homo sapiens
ggtgggtttgtacct

SEQ ID NO: 675469 - DNA, 15 bp, Homo sapiens
gtgggtttgtacctt

SEQ ID NO: 675470 - DNA, 15 bp, Homo sapiens
tgggtttgtaccttc

SEQ ID NO: 675471 - DNA, 15 bp, Homo sapiens
gggtttgtaccttcc

SEQ ID NO: 675472 - DNA, 15 bp, Homo sapiens
ggtttgtaccttcct

SEQ ID NO: 675473 - DNA, 15 bp, Homo sapiens
gtttgtaccttcctt

SEQ ID NO: 675474 - DNA, 15 bp, Homo sapiens
tttgtaccttcctta

SEQ ID NO: 675475 - DNA, 15 bp, Homo sapiens
ttgtaccttccttaa

SEQ ID NO: 675476 - DNA, 15 bp, Homo sapiens
tgtaccttccttaag

SEQ ID NO: 675477 - DNA, 15 bp, Homo sapiens
gtaccttccttaagc

SEQ ID NO: 675478 - DNA, 15 bp, Homo sapiens
taccttccttaagcc

SEQ ID NO: 675479 - DNA, 15 bp, Homo sapiens
accttccttaagcca

SEQ ID NO: 675480 - DNA, 15 bp, Homo sapiens
ccttccttaagccag

SEQ ID NO: 675481 - DNA, 15 bp, Homo sapiens
cttccttaagccagg

SEQ ID NO: 675482 - DNA, 15 bp, Homo sapiens
ttccttaagccagga

SEQ ID NO: 675483 - DNA, 15 bp, Homo sapiens
tccttaagccaggaa

SEQ ID NO: 675484 - DNA, 15 bp, Homo sapiens
ccttaagccaggaaa

SEQ ID NO: 675485 - DNA, 15 bp, Homo sapiens
cttaagccaggaaag

SEQ ID NO: 675486 - DNA, 15 bp, Homo sapiens
ttaagccaggaaagg

SEQ ID NO: 675487 - DNA, 15 bp, Homo sapiens
taagccaggaaaggg

SEQ ID NO: 675488 - DNA, 15 bp, Homo sapiens
aagccaggaaaggga

SEQ ID NO: 675489 - DNA, 15 bp, Homo sapiens
agccaggaaagggat

SEQ ID NO: 675490 - DNA, 15 bp, Homo sapiens
gccaggaaagggatt

SEQ ID NO: 675491 - DNA, 15 bp, Homo sapiens
ccaggaaagggattc

SEQ ID NO: 675492 - DNA, 15 bp, Homo sapiens
caggaaagggattca

SEQ ID NO: 675493 - DNA, 15 bp, Homo sapiens
aggaaagggattcat

SEQ ID NO: 675494 - DNA, 15 bp, Homo sapiens
ggaaagggattcatg

SEQ ID NO: 675495 - DNA, 15 bp, Homo sapiens
gaaagggattcatgg

SEQ ID NO: 675496 - DNA, 15 bp, Homo sapiens
aaagggattcatggc

SEQ ID NO: 675497 - DNA, 15 bp, Homo sapiens
aagggattcatggcg

SEQ ID NO: 675498 - DNA, 15 bp, Homo sapiens
agggattcatggcgt

SEQ ID NO: 675499 - DNA, 15 bp, Homo sapiens
gggattcatggcgtc

SEQ ID NO: 675500 - DNA, 15 bp, Homo sapiens
ggattcatggcgtcg

SEQ ID NO: 675501 - DNA, 15 bp, Homo sapiens
gattcatggcgtcgg

SEQ ID NO: 675502 - DNA, 15 bp, Homo sapiens
attcatggcgtcgga

SEQ ID NO: 675503 - DNA, 15 bp, Homo sapiens
ttcatggcgtcggaa

SEQ ID NO: 675504 - DNA, 15 bp, Homo sapiens
tcatggcgtcggaaa

SEQ ID NO: 675505 - DNA, 15 bp, Homo sapiens
catggcgtcggaaat

SEQ ID NO: 675506 - DNA, 15 bp, Homo sapiens
atggcgtcggaaatg

SEQ ID NO: 675507 - DNA, 15 bp, Homo sapiens
tggcgtcggaaatga

SEQ ID NO: 675508 - DNA, 15 bp, Homo sapiens
ggcgtcggaaatgat

SEQ ID NO: 675509 - DNA, 15 bp, Homo sapiens
gcgtcggaaatgatc

SEQ ID NO: 675510 - DNA, 15 bp, Homo sapiens
cgtcggaaatgatct

SEQ ID NO: 675511 - DNA, 15 bp, Homo sapiens
gtcggaaatgatctg

SEQ ID NO: 675512 - DNA, 15 bp, Homo sapiens
tcggaaatgatctgg

SEQ ID NO: 675513 - DNA, 15 bp, Homo sapiens
cggaaatgatctggc

SEQ ID NO: 675514 - DNA, 15 bp, Homo sapiens
ggaaatgatctggct

SEQ ID NO: 675515 - DNA, 15 bp, Homo sapiens
gaaatgatctggctg

SEQ ID NO: 675516 - DNA, 15 bp, Homo sapiens
aaatgatctggctga

SEQ ID NO: 675517 - DNA, 15 bp, Homo sapiens
aatgatctggctgaa

SEQ ID NO: 675518 - DNA, 15 bp, Homo sapiens
atgatctggctgaat

SEQ ID NO: 675519 - DNA, 15 bp, Homo sapiens
tgatctggctgaatc

SEQ ID NO: 675520 - DNA, 15 bp, Homo sapiens
gatctggctgaatcc

SEQ ID NO: 675521 - DNA, 15 bp, Homo sapiens
atctggctgaatccg

SEQ ID NO: 675522 - DNA, 15 bp, Homo sapiens
tctggctgaatccgt

SEQ ID NO: 675523 - DNA, 15 bp, Homo sapiens
ctggctgaatccgtg

SEQ ID NO: 675524 - DNA, 15 bp, Homo sapiens
tggctgaatccgtgg

SEQ ID NO: 675525 - DNA, 15 bp, Homo sapiens
ggctgaatccgtggt

SEQ ID NO: 675526 - DNA, 15 bp, Homo sapiens
gctgaatccgtggtg

SEQ ID NO: 675527 - DNA, 15 bp, Homo sapiens
ctgaatccgtggtgg

SEQ ID NO: 675528 - DNA, 15 bp, Homo sapiens
tgaatccgtggtggc

SEQ ID NO: 675529 - DNA, 15 bp, Homo sapiens
gaatccgtggtggca

SEQ ID NO: 675530 - DNA, 15 bp, Homo sapiens
aatccgtggtggcac

SEQ ID NO: 675531 - DNA, 15 bp, Homo sapiens
atccgtggtggcacc

SEQ ID NO: 675532 - DNA, 15 bp, Homo sapiens
tccgtggtggcaccg

SEQ ID NO: 675533 - DNA, 15 bp, Homo sapiens
ccgtggtggcaccga

SEQ ID NO: 675534 - DNA, 15 bp, Homo sapiens
cgtggtggcaccgag

SEQ ID NO: 675535 - DNA, 15 bp, Homo sapiens
gtggtggcaccgaga

SEQ ID NO: 675536 - DNA, 15 bp, Homo sapiens
tggtggcaccgagac

SEQ ID NO: 675537 - DNA, 15 bp, Homo sapiens
ggtggcaccgagacc

SEQ ID NO: 675538 - DNA, 15 bp, Homo sapiens
gtggcaccgagacca

SEQ ID NO: 675539 - DNA, 15 bp, Homo sapiens
tggcaccgagaccaa

SEQ ID NO: 675540 - DNA, 15 bp, Homo sapiens
ggcaccgagaccaaa

SEQ ID NO: 675541 - DNA, 15 bp, Homo sapiens
gcaccgagaccaaac

SEQ ID NO: 675542 - DNA, 15 bp, Homo sapiens
caccgagaccaaact

SEQ ID NO: 675543 - DNA, 15 bp, Homo sapiens
accgagaccaaactc

SEQ ID NO: 675544 - DNA, 15 bp, Homo sapiens
ccgagaccaaactca

SEQ ID NO: 675545 - DNA, 15 bp, Homo sapiens
cgagaccaaactcat

SEQ ID NO: 675546 - DNA, 15 bp, Homo sapiens
gagaccaaactcatt

SEQ ID NO: 675547 - DNA, 15 bp, Homo sapiens
agaccaaactcattc

SEQ ID NO: 675548 - DNA, 15 bp, Homo sapiens
gaccaaactcattca

SEQ ID NO: 675549 - DNA, 15 bp, Homo sapiens
accaaactcattcac

SEQ ID NO: 675550 - DNA, 15 bp, Homo sapiens
ccaaactcattcacc

SEQ ID NO: 675551 - DNA, 15 bp, Homo sapiens
caaactcattcacca

SEQ ID NO: 675552 - DNA, 15 bp, Homo sapiens
aaactcattcaccaa

SEQ ID NO: 675553 - DNA, 15 bp, Homo sapiens
aactcattcaccaaa

SEQ ID NO: 675554 - DNA, 15 bp, Homo sapiens
actcattcaccaaat

SEQ ID NO: 675555 - DNA, 15 bp, Homo sapiens
ctcattcaccaaatg

SEQ ID NO: 675556 - DNA, 15 bp, Homo sapiens
tcattcaccaaatga

SEQ ID NO: 675557 - DNA, 15 bp, Homo sapiens
cattcaccaaatgat

SEQ ID NO: 675558 - DNA, 15 bp, Homo sapiens
attcaccaaatgatg

SEQ ID NO: 675559 - DNA, 15 bp, Homo sapiens
ttcaccaaatgatgc

SEQ ID NO: 675560 - DNA, 15 bp, Homo sapiens
tcaccaaatgatgcc

SEQ ID NO: 675561 - DNA, 15 bp, Homo sapiens
caccaaatgatgcca

SEQ ID NO: 675562 - DNA, 15 bp, Homo sapiens
accaaatgatgccac

SEQ ID NO: 675563 - DNA, 15 bp, Homo sapiens
ccaaatgatgccact

SEQ ID NO: 675564 - DNA, 15 bp, Homo sapiens
caaatgatgccactt

SEQ ID NO: 675565 - DNA, 15 bp, Homo sapiens
aaatgatgccacttc

SEQ ID NO: 675566 - DNA, 15 bp, Homo sapiens
aatgatgccacttcc

SEQ ID NO: 675567 - DNA, 15 bp, Homo sapiens
atgatgccacttccc

SEQ ID NO: 675568 - DNA, 15 bp, Homo sapiens
tgatgccacttccca

SEQ ID NO: 675569 - DNA, 15 bp, Homo sapiens
gatgccacttcccag

SEQ ID NO: 675570 - DNA, 15 bp, Homo sapiens
atgccacttcccaga

SEQ ID NO: 675571 - DNA, 15 bp, Homo sapiens
tgccacttcccagag

SEQ ID NO: 675572 - DNA, 15 bp, Homo sapiens
gccacttcccagagg

SEQ ID NO: 675573 - DNA, 15 bp, Homo sapiens
ccacttcccagaggc

SEQ ID NO: 675574 - DNA, 15 bp, Homo sapiens
cacttcccagaggca

SEQ ID NO: 675575 - DNA, 15 bp, Homo sapiens
acttcccagaggcag

SEQ ID NO: 675576 - DNA, 15 bp, Homo sapiens
cttcccagaggcaga

SEQ ID NO: 675577 - DNA, 15 bp, Homo sapiens
ttcccagaggcagag

SEQ ID NO: 675578 - DNA, 15 bp, Homo sapiens
tcccagaggcagagc

SEQ ID NO: 675579 - DNA, 15 bp, Homo sapiens
cccagaggcagagcc

SEQ ID NO: 675580 - DNA, 15 bp, Homo sapiens
ccagaggcagagcct

SEQ ID NO: 675581 - DNA, 15 bp, Homo sapiens
cagaggcagagcctg

SEQ ID NO: 675582 - DNA, 15 bp, Homo sapiens
agaggcagagcctga

SEQ ID NO: 675583 - DNA, 15 bp, Homo sapiens
gaggcagagcctgag

SEQ ID NO: 675584 - DNA, 15 bp, Homo sapiens
aggcagagcctgagt

SEQ ID NO: 675585 - DNA, 15 bp, Homo sapiens
ggcagagcctgagtc

SEQ ID NO: 675586 - DNA, 15 bp, Homo sapiens
gcagagcctgagtca

SEQ ID NO: 675587 - DNA, 15 bp, Homo sapiens
cagagcctgagtcac

SEQ ID NO: 675588 - DNA, 15 bp, Homo sapiens
agagcctgagtcact

SEQ ID NO: 675589 - DNA, 15 bp, Homo sapiens
gagcctgagtcactg

SEQ ID NO: 675590 - DNA, 15 bp, Homo sapiens
agcctgagtcactgg

SEQ ID NO: 675591 - DNA, 15 bp, Homo sapiens
gcctgagtcactggt

SEQ ID NO: 675592 - DNA, 15 bp, Homo sapiens
cctgagtcactggtc

SEQ ID NO: 675593 - DNA, 15 bp, Homo sapiens
ctgagtcactggtca

SEQ ID NO: 675594 - DNA, 15 bp, Homo sapiens
tgagtcactggtcac

SEQ ID NO: 675595 - DNA, 15 bp, Homo sapiens
gagtcactggtcacc

SEQ ID NO: 675596 - DNA, 15 bp, Homo sapiens
agtcactggtcaccc

SEQ ID NO: 675597 - DNA, 15 bp, Homo sapiens
gtcactggtcaccct

SEQ ID NO: 675598 - DNA, 15 bp, Homo sapiens
tcactggtcaccctt

SEQ ID NO: 675599 - DNA, 15 bp, Homo sapiens
cactggtcaccctta

SEQ ID NO: 675600 - DNA, 15 bp, Homo sapiens
actggtcacccttaa

SEQ ID NO: 675601 - DNA, 15 bp, Homo sapiens
ctggtcacccttaat

SEQ ID NO: 675602 - DNA, 15 bp, Homo sapiens
tggtcacccttaata

SEQ ID NO: 675603 - DNA, 15 bp, Homo sapiens
ggtcacccttaatat

SEQ ID NO: 675604 - DNA, 15 bp, Homo sapiens
gtcacccttaatatt

SEQ ID NO: 675605 - DNA, 15 bp, Homo sapiens
tcacccttaatattt

SEQ ID NO: 675606 - DNA, 15 bp, Homo sapiens
cacccttaatattta

SEQ ID NO: 675607 - DNA, 15 bp, Homo sapiens
acccttaatatttat

SEQ ID NO: 675608 - DNA, 15 bp, Homo sapiens
cccttaatatttatt

SEQ ID NO: 675609 - DNA, 15 bp, Homo sapiens
ccttaatatttatta

SEQ ID NO: 675610 - DNA, 15 bp, Homo sapiens
cttaatatttattaa

SEQ ID NO: 675611 - DNA, 15 bp, Homo sapiens
ttaatatttattaag

SEQ ID NO: 675612 - DNA, 15 bp, Homo sapiens
taatatttattaagt

SEQ ID NO: 675613 - DNA, 15 bp, Homo sapiens
aatatttattaagtg

SEQ ID NO: 675614 - DNA, 15 bp, Homo sapiens
atatttattaagtgc

SEQ ID NO: 675615 - DNA, 15 bp, Homo sapiens
tatttattaagtgcc

SEQ ID NO: 675616 - DNA, 15 bp, Homo sapiens
atttattaagtgcct

SEQ ID NO: 675617 - DNA, 15 bp, Homo sapiens
tttattaagtgcctg

SEQ ID NO: 675618 - DNA, 15 bp, Homo sapiens
ttattaagtgcctga

SEQ ID NO: 675619 - DNA, 15 bp, Homo sapiens
tattaagtgcctgag

SEQ ID NO: 675620 - DNA, 15 bp, Homo sapiens
attaagtgcctgaga

SEQ ID NO: 675621 - DNA, 15 bp, Homo sapiens
ttaagtgcctgagac

SEQ ID NO: 675622 - DNA, 15 bp, Homo sapiens
taagtgcctgagaca

SEQ ID NO: 675623 - DNA, 15 bp, Homo sapiens
aagtgcctgagacac

SEQ ID NO: 675624 - DNA, 15 bp, Homo sapiens
agtgcctgagacacc

SEQ ID NO: 675625 - DNA, 15 bp, Homo sapiens
gtgcctgagacaccc

SEQ ID NO: 675626 - DNA, 15 bp, Homo sapiens
tgcctgagacacccg

SEQ ID NO: 675627 - DNA, 15 bp, Homo sapiens
gcctgagacacccgg

SEQ ID NO: 675628 - DNA, 15 bp, Homo sapiens
cctgagacacccggt

SEQ ID NO: 675629 - DNA, 15 bp, Homo sapiens
ctgagacacccggtt

SEQ ID NO: 675630 - DNA, 15 bp, Homo sapiens
tgagacacccggtta

SEQ ID NO: 675631 - DNA, 15 bp, Homo sapiens
gagacacccggttac

SEQ ID NO: 675632 - DNA, 15 bp, Homo sapiens
agacacccggttacc

SEQ ID NO: 675633 - DNA, 15 bp, Homo sapiens
gacacccggttacct

SEQ ID NO: 675634 - DNA, 15 bp, Homo sapiens
acacccggttacctt

SEQ ID NO: 675635 - DNA, 15 bp, Homo sapiens
cacccggttaccttg

SEQ ID NO: 675636 - DNA, 15 bp, Homo sapiens
acccggttaccttgg

SEQ ID NO: 675637 - DNA, 15 bp, Homo sapiens
cccggttaccttggc

SEQ ID NO: 675638 - DNA, 15 bp, Homo sapiens
ccggttaccttggcc

SEQ ID NO: 675639 - DNA, 15 bp, Homo sapiens
cggttaccttggccg

SEQ ID NO: 675640 - DNA, 15 bp, Homo sapiens
ggttaccttggccgt

SEQ ID NO: 675641 - DNA, 15 bp, Homo sapiens
gttaccttggccgtg

SEQ ID NO: 675642 - DNA, 15 bp, Homo sapiens
ttaccttggccgtga

SEQ ID NO: 675643 - DNA, 15 bp, Homo sapiens
taccttggccgtgag

SEQ ID NO: 675644 - DNA, 15 bp, Homo sapiens
accttggccgtgagg

SEQ ID NO: 675645 - DNA, 15 bp, Homo sapiens
ccttggccgtgagga

SEQ ID NO: 675646 - DNA, 15 bp, Homo sapiens
cttggccgtgaggac

SEQ ID NO: 675647 - DNA, 15 bp, Homo sapiens
ttggccgtgaggaca

SEQ ID NO: 675648 - DNA, 15 bp, Homo sapiens
tggccgtgaggacac

SEQ ID NO: 675649 - DNA, 15 bp, Homo sapiens
ggccgtgaggacacg

SEQ ID NO: 675650 - DNA, 15 bp, Homo sapiens
gccgtgaggacacgt

SEQ ID NO: 675651 - DNA, 15 bp, Homo sapiens
ccgtgaggacacgtg

SEQ ID NO: 675652 - DNA, 15 bp, Homo sapiens
cgtgaggacacgtgg

SEQ ID NO: 675653 - DNA, 15 bp, Homo sapiens
gtgaggacacgtggc

SEQ ID NO: 675654 - DNA, 15 bp, Homo sapiens
tgaggacacgtggcc

SEQ ID NO: 675655 - DNA, 15 bp, Homo sapiens
gaggacacgtggcct

SEQ ID NO: 675656 - DNA, 15 bp, Homo sapiens
aggacacgtggcctg

SEQ ID NO: 675657 - DNA, 15 bp, Homo sapiens
ggacacgtggcctgc

SEQ ID NO: 675658 - DNA, 15 bp, Homo sapiens
gacacgtggcctgca

SEQ ID NO: 675659 - DNA, 15 bp, Homo sapiens
acacgtggcctgcac

SEQ ID NO: 675660 - DNA, 15 bp, Homo sapiens
cacgtggcctgcacc

SEQ ID NO: 675661 - DNA, 15 bp, Homo sapiens
acgtggcctgcaccc

SEQ ID NO: 675662 - DNA, 15 bp, Homo sapiens
cgtggcctgcaccca

SEQ ID NO: 675663 - DNA, 15 bp, Homo sapiens
gtggcctgcacccag

SEQ ID NO: 675664 - DNA, 15 bp, Homo sapiens
tggcctgcacccagg

SEQ ID NO: 675665 - DNA, 15 bp, Homo sapiens
ggcctgcacccaggt

SEQ ID NO: 675666 - DNA, 15 bp, Homo sapiens
gcctgcacccaggtg

SEQ ID NO: 675667 - DNA, 15 bp, Homo sapiens
cctgcacccaggtgt

SEQ ID NO: 675668 - DNA, 15 bp, Homo sapiens
ctgcacccaggtgtg

SEQ ID NO: 675669 - DNA, 15 bp, Homo sapiens
tgcacccaggtgtgg

SEQ ID NO: 675670 - DNA, 15 bp, Homo sapiens
gcacccaggtgtggc

SEQ ID NO: 675671 - DNA, 15 bp, Homo sapiens
cacccaggtgtggct

SEQ ID NO: 675672 - DNA, 15 bp, Homo sapiens
acccaggtgtggctg

SEQ ID NO: 675673 - DNA, 15 bp, Homo sapiens
cccaggtgtggctgt

SEQ ID NO: 675674 - DNA, 15 bp, Homo sapiens
ccaggtgtggctgtc

SEQ ID NO: 675675 - DNA, 15 bp, Homo sapiens
caggtgtggctgtca

SEQ ID NO: 675676 - DNA, 15 bp, Homo sapiens
aggtgtggctgtcag

SEQ ID NO: 675677 - DNA, 15 bp, Homo sapiens
ggtgtggctgtcagg

SEQ ID NO: 675678 - DNA, 15 bp, Homo sapiens
gtgtggctgtcagga

SEQ ID NO: 675679 - DNA, 15 bp, Homo sapiens
tgtggctgtcaggac

SEQ ID NO: 675680 - DNA, 15 bp, Homo sapiens
gtggctgtcaggaca

SEQ ID NO: 675681 - DNA, 15 bp, Homo sapiens
tggctgtcaggacac

SEQ ID NO: 675682 - DNA, 15 bp, Homo sapiens
ggctgtcaggacacc

SEQ ID NO: 675683 - DNA, 15 bp, Homo sapiens
gctgtcaggacacca

SEQ ID NO: 675684 - DNA, 15 bp, Homo sapiens
ctgtcaggacaccag

SEQ ID NO: 675685 - DNA, 15 bp, Homo sapiens
tgtcaggacaccagc

SEQ ID NO: 675686 - DNA, 15 bp, Homo sapiens
gtcaggacaccagcc

SEQ ID NO: 675687 - DNA, 15 bp, Homo sapiens
tcaggacaccagcct

SEQ ID NO: 675688 - DNA, 15 bp, Homo sapiens
caggacaccagcctg

SEQ ID NO: 675689 - DNA, 15 bp, Homo sapiens
aggacaccagcctgg

SEQ ID NO: 675690 - DNA, 15 bp, Homo sapiens
ggacaccagcctggt

SEQ ID NO: 675691 - DNA, 15 bp, Homo sapiens
gacaccagcctggtg

SEQ ID NO: 675692 - DNA, 15 bp, Homo sapiens
acaccagcctggtgc

SEQ ID NO: 675693 - DNA, 15 bp, Homo sapiens
caccagcctggtgcc

SEQ ID NO: 675694 - DNA, 15 bp, Homo sapiens
accagcctggtgccc

SEQ ID NO: 675695 - DNA, 15 bp, Homo sapiens
ccagcctggtgccca

SEQ ID NO: 675696 - DNA, 15 bp, Homo sapiens
cagcctggtgcccat

SEQ ID NO: 675697 - DNA, 15 bp, Homo sapiens
agcctggtgcccatc

SEQ ID NO: 675698 - DNA, 15 bp, Homo sapiens
gcctggtgcccatcc

SEQ ID NO: 675699 - DNA, 15 bp, Homo sapiens
cctggtgcccatcct

SEQ ID NO: 675700 - DNA, 15 bp, Homo sapiens
ctggtgcccatcctc

SEQ ID NO: 675701 - DNA, 15 bp, Homo sapiens
tggtgcccatcctcc

SEQ ID NO: 675702 - DNA, 15 bp, Homo sapiens
ggtgcccatcctccc

SEQ ID NO: 675703 - DNA, 15 bp, Homo sapiens
gtgcccatcctcccg

SEQ ID NO: 675704 - DNA, 15 bp, Homo sapiens
tgcccatcctcccga

SEQ ID NO: 675705 - DNA, 15 bp, Homo sapiens
gcccatcctcccgac

SEQ ID NO: 675706 - DNA, 15 bp, Homo sapiens
cccatcctcccgacc

SEQ ID NO: 675707 - DNA, 15 bp, Homo sapiens
ccatcctcccgaccc

SEQ ID NO: 675708 - DNA, 15 bp, Homo sapiens
catcctcccgacccc

SEQ ID NO: 675709 - DNA, 15 bp, Homo sapiens
atcctcccgacccct

SEQ ID NO: 675710 - DNA, 15 bp, Homo sapiens
tcctcccgaccccta

SEQ ID NO: 675711 - DNA, 15 bp, Homo sapiens
cctcccgacccctac

SEQ ID NO: 675712 - DNA, 15 bp, Homo sapiens
ctcccgacccctacc

SEQ ID NO: 675713 - DNA, 15 bp, Homo sapiens
tcccgacccctaccc

SEQ ID NO: 675714 - DNA, 15 bp, Homo sapiens
cccgacccctaccca

SEQ ID NO: 675715 - DNA, 15 bp, Homo sapiens
ccgacccctacccac

SEQ ID NO: 675716 - DNA, 15 bp, Homo sapiens
cgacccctacccact

SEQ ID NO: 675717 - DNA, 15 bp, Homo sapiens
gacccctacccactt

SEQ ID NO: 675718 - DNA, 15 bp, Homo sapiens
acccctacccacttc

SEQ ID NO: 675719 - DNA, 15 bp, Homo sapiens
cccctacccacttcc

SEQ ID NO: 675720 - DNA, 15 bp, Homo sapiens
ccctacccacttcca

SEQ ID NO: 675721 - DNA, 15 bp, Homo sapiens
cctacccacttccat

SEQ ID NO: 675722 - DNA, 15 bp, Homo sapiens
ctacccacttccatt

SEQ ID NO: 675723 - DNA, 15 bp, Homo sapiens
tacccacttccattc

SEQ ID NO: 675724 - DNA, 15 bp, Homo sapiens
acccacttccattcc

SEQ ID NO: 675725 - DNA, 15 bp, Homo sapiens
cccacttccattccc

SEQ ID NO: 675726 - DNA, 15 bp, Homo sapiens
ccacttccattcccg

SEQ ID NO: 675727 - DNA, 15 bp, Homo sapiens
cacttccattcccgt

SEQ ID NO: 675728 - DNA, 15 bp, Homo sapiens
acttccattcccgtg

SEQ ID NO: 675729 - DNA, 15 bp, Homo sapiens
cttccattcccgtgg

SEQ ID NO: 675730 - DNA, 15 bp, Homo sapiens
ttccattcccgtggt

SEQ ID NO: 675731 - DNA, 15 bp, Homo sapiens
tccattcccgtggtc

SEQ ID NO: 675732 - DNA, 15 bp, Homo sapiens
ccattcccgtggtct

SEQ ID NO: 675733 - DNA, 15 bp, Homo sapiens
cattcccgtggtctc

SEQ ID NO: 675734 - DNA, 15 bp, Homo sapiens
attcccgtggtctcc

SEQ ID NO: 675735 - DNA, 15 bp, Homo sapiens
ttcccgtggtctcct

SEQ ID NO: 675736 - DNA, 15 bp, Homo sapiens
tcccgtggtctcctt

SEQ ID NO: 675737 - DNA, 15 bp, Homo sapiens
cccgtggtctccttg

SEQ ID NO: 675738 - DNA, 15 bp, Homo sapiens
ccgtggtctccttgc

SEQ ID NO: 675739 - DNA, 15 bp, Homo sapiens
cgtggtctccttgca

SEQ ID NO: 675740 - DNA, 15 bp, Homo sapiens
gtggtctccttgcac

SEQ ID NO: 675741 - DNA, 15 bp, Homo sapiens
tggtctccttgcact

SEQ ID NO: 675742 - DNA, 15 bp, Homo sapiens
ggtctccttgcactt

SEQ ID NO: 675743 - DNA, 15 bp, Homo sapiens
gtctccttgcacttt

SEQ ID NO: 675744 - DNA, 15 bp, Homo sapiens
tctccttgcactttc

SEQ ID NO: 675745 - DNA, 15 bp, Homo sapiens
ctccttgcactttct

SEQ ID NO: 675746 - DNA, 15 bp, Homo sapiens
tccttgcactttctc

SEQ ID NO: 675747 - DNA, 15 bp, Homo sapiens
ccttgcactttctca

SEQ ID NO: 675748 - DNA, 15 bp, Homo sapiens
cttgcactttctcag

SEQ ID NO: 675749 - DNA, 15 bp, Homo sapiens
ttgcactttctcagt

SEQ ID NO: 675750 - DNA, 15 bp, Homo sapiens
tgcactttctcagtt

SEQ ID NO: 675751 - DNA, 15 bp, Homo sapiens
gcactttctcagttc

SEQ ID NO: 675752 - DNA, 15 bp, Homo sapiens
cactttctcagttca

SEQ ID NO: 675753 - DNA, 15 bp, Homo sapiens
actttctcagttcag

SEQ ID NO: 675754 - DNA, 15 bp, Homo sapiens
ctttctcagttcaga

SEQ ID NO: 675755 - DNA, 15 bp, Homo sapiens
tttctcagttcagag

SEQ ID NO: 675756 - DNA, 15 bp, Homo sapiens
ttctcagttcagagt

SEQ ID NO: 675757 - DNA, 15 bp, Homo sapiens
tctcagttcagagtt

SEQ ID NO: 675758 - DNA, 15 bp, Homo sapiens
ctcagttcagagttg

SEQ ID NO: 675759 - DNA, 15 bp, Homo sapiens
tcagttcagagttgt

SEQ ID NO: 675760 - DNA, 15 bp, Homo sapiens
cagttcagagttgta

SEQ ID NO: 675761 - DNA, 15 bp, Homo sapiens
agttcagagttgtac

SEQ ID NO: 675762 - DNA, 15 bp, Homo sapiens
gttcagagttgtaca

SEQ ID NO: 675763 - DNA, 15 bp, Homo sapiens
ttcagagttgtacac

SEQ ID NO: 675764 - DNA, 15 bp, Homo sapiens
tcagagttgtacact

SEQ ID NO: 675765 - DNA, 15 bp, Homo sapiens
cagagttgtacactg

SEQ ID NO: 675766 - DNA, 15 bp, Homo sapiens
agagttgtacactgt

SEQ ID NO: 675767 - DNA, 15 bp, Homo sapiens
gagttgtacactgtg

SEQ ID NO: 675768 - DNA, 15 bp, Homo sapiens
agttgtacactgtgt

SEQ ID NO: 675769 - DNA, 15 bp, Homo sapiens
gttgtacactgtgta

SEQ ID NO: 675770 - DNA, 15 bp, Homo sapiens
ttgtacactgtgtac

SEQ ID NO: 675771 - DNA, 15 bp, Homo sapiens
tgtacactgtgtaca

SEQ ID NO: 675772 - DNA, 15 bp, Homo sapiens
gtacactgtgtacat

SEQ ID NO: 675773 - DNA, 15 bp, Homo sapiens
tacactgtgtacatt

SEQ ID NO: 675774 - DNA, 15 bp, Homo sapiens
acactgtgtacattt

SEQ ID NO: 675775 - DNA, 15 bp, Homo sapiens
cactgtgtacatttg

SEQ ID NO: 675776 - DNA, 15 bp, Homo sapiens
actgtgtacatttgg

SEQ ID NO: 675777 - DNA, 15 bp, Homo sapiens
ctgtgtacatttggc

SEQ ID NO: 675778 - DNA, 15 bp, Homo sapiens
tgtgtacatttggca

SEQ ID NO: 675779 - DNA, 15 bp, Homo sapiens
gtgtacatttggcat

SEQ ID NO: 675780 - DNA, 15 bp, Homo sapiens
tgtacatttggcatt

SEQ ID NO: 675781 - DNA, 15 bp, Homo sapiens
gtacatttggcattt

SEQ ID NO: 675782 - DNA, 15 bp, Homo sapiens
tacatttggcatttg

SEQ ID NO: 675783 - DNA, 15 bp, Homo sapiens
acatttggcatttgt

SEQ ID NO: 675784 - DNA, 15 bp, Homo sapiens
catttggcatttgtg

SEQ ID NO: 675785 - DNA, 15 bp, Homo sapiens
atttggcatttgtgt

SEQ ID NO: 675786 - DNA, 15 bp, Homo sapiens
tttggcatttgtgtt

SEQ ID NO: 675787 - DNA, 15 bp, Homo sapiens
ttggcatttgtgtta

SEQ ID NO: 675788 - DNA, 15 bp, Homo sapiens
tggcatttgtgttat

SEQ ID NO: 675789 - DNA, 15 bp, Homo sapiens
ggcatttgtgttatt

SEQ ID NO: 675790 - DNA, 15 bp, Homo sapiens
gcatttgtgttatta

SEQ ID NO: 675791 - DNA, 15 bp, Homo sapiens
catttgtgttattat

SEQ ID NO: 675792 - DNA, 15 bp, Homo sapiens
atttgtgttattatt

SEQ ID NO: 675793 - DNA, 15 bp, Homo sapiens
tttgtgttattattt

SEQ ID NO: 675794 - DNA, 15 bp, Homo sapiens
ttgtgttattatttt

SEQ ID NO: 675795 - DNA, 15 bp, Homo sapiens
tgtgttattattttg

SEQ ID NO: 675796 - DNA, 15 bp, Homo sapiens
gtgttattattttgc

SEQ ID NO: 675797 - DNA, 15 bp, Homo sapiens
tgttattattttgca

SEQ ID NO: 675798 - DNA, 15 bp, Homo sapiens
gttattattttgcac

SEQ ID NO: 675799 - DNA, 15 bp, Homo sapiens
ttattattttgcact

SEQ ID NO: 675800 - DNA, 15 bp, Homo sapiens
tattattttgcactg

SEQ ID NO: 675801 - DNA, 15 bp, Homo sapiens
attattttgcactgt

SEQ ID NO: 675802 - DNA, 15 bp, Homo sapiens
ttattttgcactgtt

SEQ ID NO: 675803 - DNA, 15 bp, Homo sapiens
tattttgcactgttt

SEQ ID NO: 675804 - DNA, 15 bp, Homo sapiens
attttgcactgtttt

SEQ ID NO: 675805 - DNA, 15 bp, Homo sapiens
ttttgcactgttttc

SEQ ID NO: 675806 - DNA, 15 bp, Homo sapiens
tttgcactgttttct

SEQ ID NO: 675807 - DNA, 15 bp, Homo sapiens
ttgcactgttttctg

SEQ ID NO: 675808 - DNA, 15 bp, Homo sapiens
tgcactgttttctgt

SEQ ID NO: 675809 - DNA, 15 bp, Homo sapiens
gcactgttttctgtc

SEQ ID NO: 675810 - DNA, 15 bp, Homo sapiens
cactgttttctgtcg

SEQ ID NO: 675811 - DNA, 15 bp, Homo sapiens
actgttttctgtcgt

SEQ ID NO: 675812 - DNA, 15 bp, Homo sapiens
ctgttttctgtcgtg

SEQ ID NO: 675813 - DNA, 15 bp, Homo sapiens
tgttttctgtcgtgt

SEQ ID NO: 675814 - DNA, 15 bp, Homo sapiens
gttttctgtcgtgtg

SEQ ID NO: 675815 - DNA, 15 bp, Homo sapiens
ttttctgtcgtgtgt

SEQ ID NO: 675816 - DNA, 15 bp, Homo sapiens
tttctgtcgtgtgtg

SEQ ID NO: 675817 - DNA, 15 bp, Homo sapiens
ttctgtcgtgtgtgt

SEQ ID NO: 675818 - DNA, 15 bp, Homo sapiens
tctgtcgtgtgtgtt

SEQ ID NO: 675819 - DNA, 15 bp, Homo sapiens
ctgtcgtgtgtgttg

SEQ ID NO: 675820 - DNA, 15 bp, Homo sapiens
tgtcgtgtgtgttgg

SEQ ID NO: 675821 - DNA, 15 bp, Homo sapiens
gtcgtgtgtgttggg

SEQ ID NO: 675822 - DNA, 15 bp, Homo sapiens
tcgtgtgtgttggga

SEQ ID NO: 675823 - DNA, 15 bp, Homo sapiens
cgtgtgtgttgggat

SEQ ID NO: 675824 - DNA, 15 bp, Homo sapiens
gtgtgtgttgggatg

SEQ ID NO: 675825 - DNA, 15 bp, Homo sapiens
tgtgtgttgggatgg

SEQ ID NO: 675826 - DNA, 15 bp, Homo sapiens
gtgtgttgggatggg

SEQ ID NO: 675827 - DNA, 15 bp, Homo sapiens
tgtgttgggatggga

SEQ ID NO: 675828 - DNA, 15 bp, Homo sapiens
gtgttgggatgggat

SEQ ID NO: 675829 - DNA, 15 bp, Homo sapiens
tgttgggatgggatc

SEQ ID NO: 675830 - DNA, 15 bp, Homo sapiens
gttgggatgggatcc

SEQ ID NO: 675831 - DNA, 15 bp, Homo sapiens
ttgggatgggatccc

SEQ ID NO: 675832 - DNA, 15 bp, Homo sapiens
tgggatgggatccca

SEQ ID NO: 675833 - DNA, 15 bp, Homo sapiens
gggatgggatcccag

SEQ ID NO: 675834 - DNA, 15 bp, Homo sapiens
ggatgggatcccagg

SEQ ID NO: 675835 - DNA, 15 bp, Homo sapiens
gatgggatcccaggc

SEQ ID NO: 675836 - DNA, 15 bp, Homo sapiens
atgggatcccaggcc

SEQ ID NO: 675837 - DNA, 15 bp, Homo sapiens
tgggatcccaggcca

SEQ ID NO: 675838 - DNA, 15 bp, Homo sapiens
gggatcccaggccag

SEQ ID NO: 675839 - DNA, 15 bp, Homo sapiens
ggatcccaggccagg

SEQ ID NO: 675840 - DNA, 15 bp, Homo sapiens
gatcccaggccaggg

SEQ ID NO: 675841 - DNA, 15 bp, Homo sapiens
atcccaggccaggga

SEQ ID NO: 675842 - DNA, 15 bp, Homo sapiens
tcccaggccagggaa

SEQ ID NO: 675843 - DNA, 15 bp, Homo sapiens
cccaggccagggaaa

SEQ ID NO: 675844 - DNA, 15 bp, Homo sapiens
ccaggccagggaaag

SEQ ID NO: 675845 - DNA, 15 bp, Homo sapiens
caggccagggaaagc

SEQ ID NO: 675846 - DNA, 15 bp, Homo sapiens
aggccagggaaagcc

SEQ ID NO: 675847 - DNA, 15 bp, Homo sapiens
ggccagggaaagccc

SEQ ID NO: 675848 - DNA, 15 bp, Homo sapiens
gccagggaaagcccg

SEQ ID NO: 675849 - DNA, 15 bp, Homo sapiens
ccagggaaagcccgt

SEQ ID NO: 675850 - DNA, 15 bp, Homo sapiens
cagggaaagcccgtg

SEQ ID NO: 675851 - DNA, 15 bp, Homo sapiens
agggaaagcccgtgt

SEQ ID NO: 675852 - DNA, 15 bp, Homo sapiens
gggaaagcccgtgtc

SEQ ID NO: 675853 - DNA, 15 bp, Homo sapiens
ggaaagcccgtgtca

SEQ ID NO: 675854 - DNA, 15 bp, Homo sapiens
gaaagcccgtgtcaa

SEQ ID NO: 675855 - DNA, 15 bp, Homo sapiens
aaagcccgtgtcaat

SEQ ID NO: 675856 - DNA, 15 bp, Homo sapiens
aagcccgtgtcaatg

SEQ ID NO: 675857 - DNA, 15 bp, Homo sapiens
agcccgtgtcaatga

SEQ ID NO: 675858 - DNA, 15 bp, Homo sapiens
gcccgtgtcaatgaa

SEQ ID NO: 675859 - DNA, 15 bp, Homo sapiens
cccgtgtcaatgaat

SEQ ID NO: 675860 - DNA, 15 bp, Homo sapiens
ccgtgtcaatgaatg

SEQ ID NO: 675861 - DNA, 15 bp, Homo sapiens
cgtgtcaatgaatgc

SEQ ID NO: 675862 - DNA, 15 bp, Homo sapiens
gtgtcaatgaatgcc

SEQ ID NO: 675863 - DNA, 15 bp, Homo sapiens
tgtcaatgaatgccg

SEQ ID NO: 675864 - DNA, 15 bp, Homo sapiens
gtcaatgaatgccgg

SEQ ID NO: 675865 - DNA, 15 bp, Homo sapiens
tcaatgaatgccggg

SEQ ID NO: 675866 - DNA, 15 bp, Homo sapiens
caatgaatgccgggg

SEQ ID NO: 675867 - DNA, 15 bp, Homo sapiens
aatgaatgccgggga

SEQ ID NO: 675868 - DNA, 15 bp, Homo sapiens
atgaatgccggggac

SEQ ID NO: 675869 - DNA, 15 bp, Homo sapiens
tgaatgccggggaca

SEQ ID NO: 675870 - DNA, 15 bp, Homo sapiens
gaatgccggggacag

SEQ ID NO: 675871 - DNA, 15 bp, Homo sapiens
aatgccggggacaga

SEQ ID NO: 675872 - DNA, 15 bp, Homo sapiens
atgccggggacagag

SEQ ID NO: 675873 - DNA, 15 bp, Homo sapiens
tgccggggacagaga

SEQ ID NO: 675874 - DNA, 15 bp, Homo sapiens
gccggggacagagag

SEQ ID NO: 675875 - DNA, 15 bp, Homo sapiens
ccggggacagagagg

SEQ ID NO: 675876 - DNA, 15 bp, Homo sapiens
cggggacagagaggg

SEQ ID NO: 675877 - DNA, 15 bp, Homo sapiens
ggggacagagagggg

SEQ ID NO: 675878 - DNA, 15 bp, Homo sapiens
gggacagagaggggc

SEQ ID NO: 675879 - DNA, 15 bp, Homo sapiens
ggacagagaggggca

SEQ ID NO: 675880 - DNA, 15 bp, Homo sapiens
gacagagaggggcag

SEQ ID NO: 675881 - DNA, 15 bp, Homo sapiens
acagagaggggcagg

SEQ ID NO: 675882 - DNA, 15 bp, Homo sapiens
cagagaggggcaggt

SEQ ID NO: 675883 - DNA, 15 bp, Homo sapiens
agagaggggcaggtt

SEQ ID NO: 675884 - DNA, 15 bp, Homo sapiens
gagaggggcaggttg

SEQ ID NO: 675885 - DNA, 15 bp, Homo sapiens
agaggggcaggttga

SEQ ID NO: 675886 - DNA, 15 bp, Homo sapiens
gaggggcaggttgac

SEQ ID NO: 675887 - DNA, 15 bp, Homo sapiens
aggggcaggttgacc

SEQ ID NO: 675888 - DNA, 15 bp, Homo sapiens
ggggcaggttgaccg

SEQ ID NO: 675889 - DNA, 15 bp, Homo sapiens
gggcaggttgaccgg

SEQ ID NO: 675890 - DNA, 15 bp, Homo sapiens
ggcaggttgaccggg

SEQ ID NO: 675891 - DNA, 15 bp, Homo sapiens
gcaggttgaccggga

SEQ ID NO: 675892 - DNA, 15 bp, Homo sapiens
caggttgaccgggac

SEQ ID NO: 675893 - DNA, 15 bp, Homo sapiens
aggttgaccgggact

SEQ ID NO: 675894 - DNA, 15 bp, Homo sapiens
ggttgaccgggactt

SEQ ID NO: 675895 - DNA, 15 bp, Homo sapiens
gttgaccgggacttc

SEQ ID NO: 675896 - DNA, 15 bp, Homo sapiens
ttgaccgggacttca

SEQ ID NO: 675897 - DNA, 15 bp, Homo sapiens
tgaccgggacttcaa

SEQ ID NO: 675898 - DNA, 15 bp, Homo sapiens
gaccgggacttcaaa

SEQ ID NO: 675899 - DNA, 15 bp, Homo sapiens
accgggacttcaaag

SEQ ID NO: 675900 - DNA, 15 bp, Homo sapiens
ccgggacttcaaagc

SEQ ID NO: 675901 - DNA, 15 bp, Homo sapiens
cgggacttcaaagcc

SEQ ID NO: 675902 - DNA, 15 bp, Homo sapiens
gggacttcaaagccg

SEQ ID NO: 675903 - DNA, 15 bp, Homo sapiens
ggacttcaaagccgt

SEQ ID NO: 675904 - DNA, 15 bp, Homo sapiens
gacttcaaagccgtg

SEQ ID NO: 675905 - DNA, 15 bp, Homo sapiens
acttcaaagccgtga

SEQ ID NO: 675906 - DNA, 15 bp, Homo sapiens
cttcaaagccgtgat

SEQ ID NO: 675907 - DNA, 15 bp, Homo sapiens
ttcaaagccgtgatc

SEQ ID NO: 675908 - DNA, 15 bp, Homo sapiens
tcaaagccgtgatcg

SEQ ID NO: 675909 - DNA, 15 bp, Homo sapiens
caaagccgtgatcgt

SEQ ID NO: 675910 - DNA, 15 bp, Homo sapiens
aaagccgtgatcgtg

SEQ ID NO: 675911 - DNA, 15 bp, Homo sapiens
aagccgtgatcgtga

SEQ ID NO: 675912 - DNA, 15 bp, Homo sapiens
agccgtgatcgtgaa

SEQ ID NO: 675913 - DNA, 15 bp, Homo sapiens
gccgtgatcgtgaat

SEQ ID NO: 675914 - DNA, 15 bp, Homo sapiens
ccgtgatcgtgaata

SEQ ID NO: 675915 - DNA, 15 bp, Homo sapiens
cgtgatcgtgaatat

SEQ ID NO: 675916 - DNA, 15 bp, Homo sapiens
gtgatcgtgaatatc

SEQ ID NO: 675917 - DNA, 15 bp, Homo sapiens
tgatcgtgaatatcg

SEQ ID NO: 675918 - DNA, 15 bp, Homo sapiens
gatcgtgaatatcga

SEQ ID NO: 675919 - DNA, 15 bp, Homo sapiens
atcgtgaatatcgag

SEQ ID NO: 675920 - DNA, 15 bp, Homo sapiens
tcgtgaatatcgaga

SEQ ID NO: 675921 - DNA, 15 bp, Homo sapiens
cgtgaatatcgagaa

SEQ ID NO: 675922 - DNA, 15 bp, Homo sapiens
gtgaatatcgagaac

SEQ ID NO: 675923 - DNA, 15 bp, Homo sapiens
tgaatatcgagaact

SEQ ID NO: 675924 - DNA, 15 bp, Homo sapiens
gaatatcgagaactg

SEQ ID NO: 675925 - DNA, 15 bp, Homo sapiens
aatatcgagaactgc

SEQ ID NO: 675926 - DNA, 15 bp, Homo sapiens
atatcgagaactgcc

SEQ ID NO: 675927 - DNA, 15 bp, Homo sapiens
tatcgagaactgcca

SEQ ID NO: 675928 - DNA, 15 bp, Homo sapiens
atcgagaactgccat

SEQ ID NO: 675929 - DNA, 15 bp, Homo sapiens
tcgagaactgccatt

SEQ ID NO: 675930 - DNA, 15 bp, Homo sapiens
cgagaactgccattg

SEQ ID NO: 675931 - DNA, 15 bp, Homo sapiens
gagaactgccattgt

SEQ ID NO: 675932 - DNA, 15 bp, Homo sapiens
agaactgccattgtc

SEQ ID NO: 675933 - DNA, 15 bp, Homo sapiens
gaactgccattgtcg

SEQ ID NO: 675934 - DNA, 15 bp, Homo sapiens
aactgccattgtcgt

SEQ ID NO: 675935 - DNA, 15 bp, Homo sapiens
actgccattgtcgtc

SEQ ID NO: 675936 - DNA, 15 bp, Homo sapiens
ctgccattgtcgtct

SEQ ID NO: 675937 - DNA, 15 bp, Homo sapiens
tgccattgtcgtctt

SEQ ID NO: 675938 - DNA, 15 bp, Homo sapiens
gccattgtcgtcttt

SEQ ID NO: 675939 - DNA, 15 bp, Homo sapiens
ccattgtcgtcttta

SEQ ID NO: 675940 - DNA, 15 bp, Homo sapiens
cattgtcgtctttat

SEQ ID NO: 675941 - DNA, 15 bp, Homo sapiens
attgtcgtctttatg

SEQ ID NO: 675942 - DNA, 15 bp, Homo sapiens
ttgtcgtctttatgt

SEQ ID NO: 675943 - DNA, 15 bp, Homo sapiens
tgtcgtctttatgtc

SEQ ID NO: 675944 - DNA, 15 bp, Homo sapiens
gtcgtctttatgtcc

SEQ ID NO: 675945 - DNA, 15 bp, Homo sapiens
tcgtctttatgtccg

SEQ ID NO: 675946 - DNA, 15 bp, Homo sapiens
cgtctttatgtccgc

SEQ ID NO: 675947 - DNA, 15 bp, Homo sapiens
gtctttatgtccgcc

SEQ ID NO: 675948 - DNA, 15 bp, Homo sapiens
tctttatgtccgccc

SEQ ID NO: 675949 - DNA, 15 bp, Homo sapiens
ctttatgtccgccca

SEQ ID NO: 675950 - DNA, 15 bp, Homo sapiens
tttatgtccgcccac

SEQ ID NO: 675951 - DNA, 15 bp, Homo sapiens
ttatgtccgcccacc

SEQ ID NO: 675952 - DNA, 15 bp, Homo sapiens
tatgtccgcccacct

SEQ ID NO: 675953 - DNA, 15 bp, Homo sapiens
atgtccgcccaccta

SEQ ID NO: 675954 - DNA, 15 bp, Homo sapiens
tgtccgcccacctag

SEQ ID NO: 675955 - DNA, 15 bp, Homo sapiens
gtccgcccacctagt

SEQ ID NO: 675956 - DNA, 15 bp, Homo sapiens
tccgcccacctagtg

SEQ ID NO: 675957 - DNA, 15 bp, Homo sapiens
ccgcccacctagtgc

SEQ ID NO: 675958 - DNA, 15 bp, Homo sapiens
cgcccacctagtgct

SEQ ID NO: 675959 - DNA, 15 bp, Homo sapiens
gcccacctagtgctt

SEQ ID NO: 675960 - DNA, 15 bp, Homo sapiens
cccacctagtgcttc

SEQ ID NO: 675961 - DNA, 15 bp, Homo sapiens
ccacctagtgcttcc

SEQ ID NO: 675962 - DNA, 15 bp, Homo sapiens
cacctagtgcttcca

SEQ ID NO: 675963 - DNA, 15 bp, Homo sapiens
acctagtgcttccac

SEQ ID NO: 675964 - DNA, 15 bp, Homo sapiens
cctagtgcttccact

SEQ ID NO: 675965 - DNA, 15 bp, Homo sapiens
ctagtgcttccactt

SEQ ID NO: 675966 - DNA, 15 bp, Homo sapiens
tagtgcttccacttc

SEQ ID NO: 675967 - DNA, 15 bp, Homo sapiens
agtgcttccacttct

SEQ ID NO: 675968 - DNA, 15 bp, Homo sapiens
gtgcttccacttcta

SEQ ID NO: 675969 - DNA, 15 bp, Homo sapiens
tgcttccacttctat

SEQ ID NO: 675970 - DNA, 15 bp, Homo sapiens
gcttccacttctatg

SEQ ID NO: 675971 - DNA, 15 bp, Homo sapiens
cttccacttctatgc

SEQ ID NO: 675972 - DNA, 15 bp, Homo sapiens
ttccacttctatgca

SEQ ID NO: 675973 - DNA, 15 bp, Homo sapiens
tccacttctatgcaa

SEQ ID NO: 675974 - DNA, 15 bp, Homo sapiens
ccacttctatgcaaa

SEQ ID NO: 675975 - DNA, 15 bp, Homo sapiens
cacttctatgcaaat

SEQ ID NO: 675976 - DNA, 15 bp, Homo sapiens
acttctatgcaaatg

SEQ ID NO: 675977 - DNA, 15 bp, Homo sapiens
cttctatgcaaatgc

SEQ ID NO: 675978 - DNA, 15 bp, Homo sapiens
ttctatgcaaatgcc

SEQ ID NO: 675979 - DNA, 15 bp, Homo sapiens
tctatgcaaatgcct

SEQ ID NO: 675980 - DNA, 15 bp, Homo sapiens
ctatgcaaatgcctc

SEQ ID NO: 675981 - DNA, 15 bp, Homo sapiens
tatgcaaatgcctcc

SEQ ID NO: 675982 - DNA, 15 bp, Homo sapiens
atgcaaatgcctcca

SEQ ID NO: 675983 - DNA, 15 bp, Homo sapiens
tgcaaatgcctccaa

SEQ ID NO: 675984 - DNA, 15 bp, Homo sapiens
gcaaatgcctccaag

SEQ ID NO: 675985 - DNA, 15 bp, Homo sapiens
caaatgcctccaagc

SEQ ID NO: 675986 - DNA, 15 bp, Homo sapiens
aaatgcctccaagcc

SEQ ID NO: 675987 - DNA, 15 bp, Homo sapiens
aatgcctccaagcca

SEQ ID NO: 675988 - DNA, 15 bp, Homo sapiens
atgcctccaagccat

SEQ ID NO: 675989 - DNA, 15 bp, Homo sapiens
tgcctccaagccatt

SEQ ID NO: 675990 - DNA, 15 bp, Homo sapiens
gcctccaagccattc

SEQ ID NO: 675991 - DNA, 15 bp, Homo sapiens
cctccaagccattca

SEQ ID NO: 675992 - DNA, 15 bp, Homo sapiens
ctccaagccattcac

SEQ ID NO: 675993 - DNA, 15 bp, Homo sapiens
tccaagccattcact

SEQ ID NO: 675994 - DNA, 15 bp, Homo sapiens
ccaagccattcactt

SEQ ID NO: 675995 - DNA, 15 bp, Homo sapiens
caagccattcacttc

SEQ ID NO: 675996 - DNA, 15 bp, Homo sapiens
aagccattcacttcc

SEQ ID NO: 675997 - DNA, 15 bp, Homo sapiens
agccattcacttccc

SEQ ID NO: 675998 - DNA, 15 bp, Homo sapiens
gccattcacttcccc

SEQ ID NO: 675999 - DNA, 15 bp, Homo sapiens
ccattcacttcccca

SEQ ID NO: 676000 - DNA, 15 bp, Homo sapiens
cattcacttccccaa

SEQ ID NO: 676001 - DNA, 15 bp, Homo sapiens
attcacttccccaat

SEQ ID NO: 676002 - DNA, 15 bp, Homo sapiens
ttcacttccccaatc

SEQ ID NO: 676003 - DNA, 15 bp, Homo sapiens
tcacttccccaatct

SEQ ID NO: 676004 - DNA, 15 bp, Homo sapiens
cacttccccaatctt

SEQ ID NO: 676005 - DNA, 15 bp, Homo sapiens
acttccccaatcttg

SEQ ID NO: 676006 - DNA, 15 bp, Homo sapiens
cttccccaatcttgt

SEQ ID NO: 676007 - DNA, 15 bp, Homo sapiens
ttccccaatcttgtc

SEQ ID NO: 676008 - DNA, 15 bp, Homo sapiens
tccccaatcttgtcg

SEQ ID NO: 676009 - DNA, 15 bp, Homo sapiens
ccccaatcttgtcgt

SEQ ID NO: 676010 - DNA, 15 bp, Homo sapiens
cccaatcttgtcgtt

SEQ ID NO: 676011 - DNA, 15 bp, Homo sapiens
ccaatcttgtcgttg

SEQ ID NO: 676012 - DNA, 15 bp, Homo sapiens
caatcttgtcgttga

SEQ ID NO: 676013 - DNA, 15 bp, Homo sapiens
aatcttgtcgttgat

SEQ ID NO: 676014 - DNA, 15 bp, Homo sapiens
atcttgtcgttgatg

SEQ ID NO: 676015 - DNA, 15 bp, Homo sapiens
tcttgtcgttgatgg

SEQ ID NO: 676016 - DNA, 15 bp, Homo sapiens
cttgtcgttgatggg

SEQ ID NO: 676017 - DNA, 15 bp, Homo sapiens
ttgtcgttgatgggt

SEQ ID NO: 676018 - DNA, 15 bp, Homo sapiens
tgtcgttgatgggta

SEQ ID NO: 676019 - DNA, 15 bp, Homo sapiens
gtcgttgatgggtat

SEQ ID NO: 676020 - DNA, 15 bp, Homo sapiens
tcgttgatgggtatg

SEQ ID NO: 676021 - DNA, 15 bp, Homo sapiens
cgttgatgggtatgt

SEQ ID NO: 676022 - DNA, 15 bp, Homo sapiens
gttgatgggtatgtg

SEQ ID NO: 676023 - DNA, 15 bp, Homo sapiens
ttgatgggtatgtgt

SEQ ID NO: 676024 - DNA, 15 bp, Homo sapiens
tgatgggtatgtgtt

SEQ ID NO: 676025 - DNA, 15 bp, Homo sapiens
gatgggtatgtgttt

SEQ ID NO: 676026 - DNA, 15 bp, Homo sapiens
atgggtatgtgttta

SEQ ID NO: 676027 - DNA, 15 bp, Homo sapiens
tgggtatgtgtttaa

SEQ ID NO: 676028 - DNA, 15 bp, Homo sapiens
gggtatgtgtttaaa

SEQ ID NO: 676029 - DNA, 15 bp, Homo sapiens
ggtatgtgtttaaaa

SEQ ID NO: 676030 - DNA, 15 bp, Homo sapiens
gtatgtgtttaaaac

SEQ ID NO: 676031 - DNA, 15 bp, Homo sapiens
tatgtgtttaaaaca

SEQ ID NO: 676032 - DNA, 15 bp, Homo sapiens
atgtgtttaaaacat

SEQ ID NO: 676033 - DNA, 15 bp, Homo sapiens
tgtgtttaaaacatg

SEQ ID NO: 676034 - DNA, 15 bp, Homo sapiens
gtgtttaaaacatgc

SEQ ID NO: 676035 - DNA, 15 bp, Homo sapiens
tgtttaaaacatgca

SEQ ID NO: 676036 - DNA, 15 bp, Homo sapiens
gtttaaaacatgcac

SEQ ID NO: 676037 - DNA, 15 bp, Homo sapiens
tttaaaacatgcacg

SEQ ID NO: 676038 - DNA, 15 bp, Homo sapiens
ttaaaacatgcacgg

SEQ ID NO: 676039 - DNA, 15 bp, Homo sapiens
taaaacatgcacggt

SEQ ID NO: 676040 - DNA, 15 bp, Homo sapiens
aaaacatgcacggtg

SEQ ID NO: 676041 - DNA, 15 bp, Homo sapiens
aaacatgcacggtga

SEQ ID NO: 676042 - DNA, 15 bp, Homo sapiens
aacatgcacggtgag

SEQ ID NO: 676043 - DNA, 15 bp, Homo sapiens
acatgcacggtgagg

SEQ ID NO: 676044 - DNA, 15 bp, Homo sapiens
catgcacggtgaggc

SEQ ID NO: 676045 - DNA, 15 bp, Homo sapiens
atgcacggtgaggcc

SEQ ID NO: 676046 - DNA, 15 bp, Homo sapiens
tgcacggtgaggccg

SEQ ID NO: 676047 - DNA, 15 bp, Homo sapiens
gcacggtgaggccgg

SEQ ID NO: 676048 - DNA, 15 bp, Homo sapiens
cacggtgaggccggg

SEQ ID NO: 676049 - DNA, 15 bp, Homo sapiens
acggtgaggccgggc

SEQ ID NO: 676050 - DNA, 15 bp, Homo sapiens
cggtgaggccgggcg

SEQ ID NO: 676051 - DNA, 15 bp, Homo sapiens
ggtgaggccgggcgc

SEQ ID NO: 676052 - DNA, 15 bp, Homo sapiens
gtgaggccgggcgca

SEQ ID NO: 676053 - DNA, 15 bp, Homo sapiens
tgaggccgggcgcag

SEQ ID NO: 676054 - DNA, 15 bp, Homo sapiens
gaggccgggcgcagt

SEQ ID NO: 676055 - DNA, 15 bp, Homo sapiens
aggccgggcgcagtg

SEQ ID NO: 676056 - DNA, 15 bp, Homo sapiens
ggccgggcgcagtgg

SEQ ID NO: 676057 - DNA, 15 bp, Homo sapiens
gccgggcgcagtggc

SEQ ID NO: 676058 - DNA, 15 bp, Homo sapiens
ccgggcgcagtggct

SEQ ID NO: 676059 - DNA, 15 bp, Homo sapiens
cgggcgcagtggctc

SEQ ID NO: 676060 - DNA, 15 bp, Homo sapiens
gaggccgaggcgggt

SEQ ID NO: 676061 - DNA, 15 bp, Homo sapiens
aggccgaggcgggtg

SEQ ID NO: 676062 - DNA, 15 bp, Homo sapiens
ggccgaggcgggtgg

SEQ ID NO: 676063 - DNA, 15 bp, Homo sapiens
gccgaggcgggtgga

SEQ ID NO: 676064 - DNA, 15 bp, Homo sapiens
ccgaggcgggtggat

SEQ ID NO: 676065 - DNA, 15 bp, Homo sapiens
cgaggcgggtggatc

SEQ ID NO: 676066 - DNA, 15 bp, Homo sapiens
aggcgggtggatcat

SEQ ID NO: 676067 - DNA, 15 bp, Homo sapiens
ggcgggtggatcatg

SEQ ID NO: 676068 - DNA, 15 bp, Homo sapiens
tttccagtccacctc

SEQ ID NO: 676069 - DNA, 15 bp, Homo sapiens
ttccagtccacctct

SEQ ID NO: 676070 - DNA, 15 bp, Homo sapiens
tccagtccacctctt

SEQ ID NO: 676071 - DNA, 15 bp, Homo sapiens
ccagtccacctctta

SEQ ID NO: 676072 - DNA, 15 bp, Homo sapiens
cagtccacctcttaa

SEQ ID NO: 676073 - DNA, 15 bp, Homo sapiens
agtccacctcttaaa

SEQ ID NO: 676074 - DNA, 15 bp, Homo sapiens
gtccacctcttaaat

SEQ ID NO: 676075 - DNA, 15 bp, Homo sapiens
tccacctcttaaatt

SEQ ID NO: 676076 - DNA, 15 bp, Homo sapiens
ccacctcttaaattt

SEQ ID NO: 676077 - DNA, 15 bp, Homo sapiens
cacctcttaaatttt

SEQ ID NO: 676078 - DNA, 15 bp, Homo sapiens
acctcttaaattttt

SEQ ID NO: 676079 - DNA, 15 bp, Homo sapiens
cctcttaaatttttt

SEQ ID NO: 676080 - DNA, 15 bp, Homo sapiens
ctcttaaattttttc

SEQ ID NO: 676081 - DNA, 15 bp, Homo sapiens
tcttaaattttttcc

SEQ ID NO: 676082 - DNA, 15 bp, Homo sapiens
cttaaattttttcct

SEQ ID NO: 676083 - DNA, 15 bp, Homo sapiens
ttaaattttttcctc

SEQ ID NO: 676084 - DNA, 15 bp, Homo sapiens
taaattttttcctcc

SEQ ID NO: 676085 - DNA, 15 bp, Homo sapiens
aaattttttcctcct

SEQ ID NO: 676086 - DNA, 15 bp, Homo sapiens
aattttttcctcctc

SEQ ID NO: 676087 - DNA, 15 bp, Homo sapiens
attttttcctcctct

SEQ ID NO: 676088 - DNA, 15 bp, Homo sapiens
ttttttcctcctctt

SEQ ID NO: 676089 - DNA, 15 bp, Homo sapiens
tttttcctcctcttc

SEQ ID NO: 676090 - DNA, 15 bp, Homo sapiens
ttttcctcctcttcc

SEQ ID NO: 676091 - DNA, 15 bp, Homo sapiens
tttcctcctcttcct

SEQ ID NO: 676092 - DNA, 15 bp, Homo sapiens
ttcctcctcttcctc

SEQ ID NO: 676093 - DNA, 15 bp, Homo sapiens
tcctcctcttcctct

SEQ ID NO: 676094 - DNA, 15 bp, Homo sapiens
cctcctcttcctcta

SEQ ID NO: 676095 - DNA, 15 bp, Homo sapiens
ctcctcttcctctat

SEQ ID NO: 676096 - DNA, 15 bp, Homo sapiens
tcctcttcctctata

SEQ ID NO: 676097 - DNA, 15 bp, Homo sapiens
cctcttcctctatac

SEQ ID NO: 676098 - DNA, 15 bp, Homo sapiens
ctcttcctctatact

SEQ ID NO: 676099 - DNA, 15 bp, Homo sapiens
tcttcctctatacta

SEQ ID NO: 676100 - DNA, 15 bp, Homo sapiens
cttcctctatactaa

SEQ ID NO: 676101 - DNA, 15 bp, Homo sapiens
ttcctctatactaac

SEQ ID NO: 676102 - DNA, 15 bp, Homo sapiens
tcctctatactaaca

SEQ ID NO: 676103 - DNA, 15 bp, Homo sapiens
cctctatactaacat

SEQ ID NO: 676104 - DNA, 15 bp, Homo sapiens
ctctatactaacatg

SEQ ID NO: 676105 - DNA, 15 bp, Homo sapiens
tctatactaacatga

SEQ ID NO: 676106 - DNA, 15 bp, Homo sapiens
ctatactaacatgag

SEQ ID NO: 676107 - DNA, 15 bp, Homo sapiens
tatactaacatgagt

SEQ ID NO: 676108 - DNA, 15 bp, Homo sapiens
atactaacatgagtg

SEQ ID NO: 676109 - DNA, 15 bp, Homo sapiens
tactaacatgagtgt

SEQ ID NO: 676110 - DNA, 15 bp, Homo sapiens
actaacatgagtgtg

SEQ ID NO: 676111 - DNA, 15 bp, Homo sapiens
ctaacatgagtgtgg

SEQ ID NO: 676112 - DNA, 15 bp, Homo sapiens
taacatgagtgtgga

SEQ ID NO: 676113 - DNA, 15 bp, Homo sapiens
aacatgagtgtggat

SEQ ID NO: 676114 - DNA, 15 bp, Homo sapiens
acatgagtgtggatc

SEQ ID NO: 676115 - DNA, 15 bp, Homo sapiens
catgagtgtggatcc

SEQ ID NO: 676116 - DNA, 15 bp, Homo sapiens
atgagtgtggatcca

SEQ ID NO: 676117 - DNA, 15 bp, Homo sapiens
tgagtgtggatccag

SEQ ID NO: 676118 - DNA, 15 bp, Homo sapiens
gagtgtggatccagc

SEQ ID NO: 676119 - DNA, 15 bp, Homo sapiens
agtgtggatccagct

SEQ ID NO: 676120 - DNA, 15 bp, Homo sapiens
gtgtggatccagctt

SEQ ID NO: 676121 - DNA, 15 bp, Homo sapiens
tgtggatccagcttg

SEQ ID NO: 676122 - DNA, 15 bp, Homo sapiens
gtggatccagcttgt

SEQ ID NO: 676123 - DNA, 15 bp, Homo sapiens
tggatccagcttgtc

SEQ ID NO: 676124 - DNA, 15 bp, Homo sapiens
ggatccagcttgtcc

SEQ ID NO: 676125 - DNA, 15 bp, Homo sapiens
gatccagcttgtccc

SEQ ID NO: 676126 - DNA, 15 bp, Homo sapiens
atccagcttgtcccc

SEQ ID NO: 676127 - DNA, 15 bp, Homo sapiens
tccagcttgtcccca

SEQ ID NO: 676128 - DNA, 15 bp, Homo sapiens
ccagcttgtccccaa

SEQ ID NO: 676129 - DNA, 15 bp, Homo sapiens
cagcttgtccccaaa

SEQ ID NO: 676130 - DNA, 15 bp, Homo sapiens
agcttgtccccaaag

SEQ ID NO: 676131 - DNA, 15 bp, Homo sapiens
gcttgtccccaaagc

SEQ ID NO: 676132 - DNA, 15 bp, Homo sapiens
cttgtccccaaagct

SEQ ID NO: 676133 - DNA, 15 bp, Homo sapiens
ttgtccccaaagctt

SEQ ID NO: 676134 - DNA, 15 bp, Homo sapiens
tgtccccaaagcttg

SEQ ID NO: 676135 - DNA, 15 bp, Homo sapiens
gtccccaaagcttgc

SEQ ID NO: 676136 - DNA, 15 bp, Homo sapiens
tccccaaagcttgcc

SEQ ID NO: 676137 - DNA, 15 bp, Homo sapiens
ccccaaagcttgcct

SEQ ID NO: 676138 - DNA, 15 bp, Homo sapiens
cccaaagcttgcctt

SEQ ID NO: 676139 - DNA, 15 bp, Homo sapiens
ccaaagcttgccttg

SEQ ID NO: 676140 - DNA, 15 bp, Homo sapiens
caaagcttgccttgc

SEQ ID NO: 676141 - DNA, 15 bp, Homo sapiens
aaagcttgccttgct

SEQ ID NO: 676142 - DNA, 15 bp, Homo sapiens
aagcttgccttgctt

SEQ ID NO: 676143 - DNA, 15 bp, Homo sapiens
agcttgccttgcttt

SEQ ID NO: 676144 - DNA, 15 bp, Homo sapiens
gcttgccttgctttg

SEQ ID NO: 676145 - DNA, 15 bp, Homo sapiens
cttgccttgctttga

SEQ ID NO: 676146 - DNA, 15 bp, Homo sapiens
ttgccttgctttgaa

SEQ ID NO: 676147 - DNA, 15 bp, Homo sapiens
tgccttgctttgaag

SEQ ID NO: 676148 - DNA, 15 bp, Homo sapiens
gccttgctttgaagc

SEQ ID NO: 676149 - DNA, 15 bp, Homo sapiens
gcctgtgatttgtgg

SEQ ID NO: 676150 - DNA, 15 bp, Homo sapiens
cctgtgatttgtggg

SEQ ID NO: 676151 - DNA, 15 bp, Homo sapiens
ctgtgatttgtgggc

SEQ ID NO: 676152 - DNA, 15 bp, Homo sapiens
tgtgatttgtgggcc

SEQ ID NO: 676153 - DNA, 15 bp, Homo sapiens
gtgatttgtgggcct

SEQ ID NO: 676154 - DNA, 15 bp, Homo sapiens
tgatttgtgggcctg

SEQ ID NO: 676155 - DNA, 15 bp, Homo sapiens
gatttgtgggcctga

SEQ ID NO: 676156 - DNA, 15 bp, Homo sapiens
atttgtgggcctgaa

SEQ ID NO: 676157 - DNA, 15 bp, Homo sapiens
tttgtgggcctgaag

SEQ ID NO: 676158 - DNA, 15 bp, Homo sapiens
ttgtgggcctgaaga

SEQ ID NO: 676159 - DNA, 15 bp, Homo sapiens
tgtgggcctgaagaa

SEQ ID NO: 676160 - DNA, 15 bp, Homo sapiens
gtgggcctgaagaaa

SEQ ID NO: 676161 - DNA, 15 bp, Homo sapiens
tgggcctgaagaaaa

SEQ ID NO: 676162 - DNA, 15 bp, Homo sapiens
gggcctgaagaaaac

SEQ ID NO: 676163 - DNA, 15 bp, Homo sapiens
ggcctgaagaaaact

SEQ ID NO: 676164 - DNA, 15 bp, Homo sapiens
gcctgaagaaaacta

SEQ ID NO: 676165 - DNA, 15 bp, Homo sapiens
cctgaagaaaactat

SEQ ID NO: 676166 - DNA, 15 bp, Homo sapiens
ctgaagaaaactatc

SEQ ID NO: 676167 - DNA, 15 bp, Homo sapiens
tgaagaaaactatcc

SEQ ID NO: 676168 - DNA, 15 bp, Homo sapiens
gaagaaaactatcca

SEQ ID NO: 676169 - DNA, 15 bp, Homo sapiens
aagaaaactatccat

SEQ ID NO: 676170 - DNA, 15 bp, Homo sapiens
agaaaactatccatc

SEQ ID NO: 676171 - DNA, 15 bp, Homo sapiens
gaaaactatccatcc

SEQ ID NO: 676172 - DNA, 15 bp, Homo sapiens
aaaactatccatcct

SEQ ID NO: 676173 - DNA, 15 bp, Homo sapiens
aaactatccatcctt

SEQ ID NO: 676174 - DNA, 15 bp, Homo sapiens
aactatccatccttg

SEQ ID NO: 676175 - DNA, 15 bp, Homo sapiens
actatccatccttgc

SEQ ID NO: 676176 - DNA, 15 bp, Homo sapiens
ctatccatccttgca

SEQ ID NO: 676177 - DNA, 15 bp, Homo sapiens
tatccatccttgcaa

SEQ ID NO: 676178 - DNA, 15 bp, Homo sapiens
atccatccttgcaaa

SEQ ID NO: 676179 - DNA, 15 bp, Homo sapiens
tccatccttgcaaat

SEQ ID NO: 676180 - DNA, 15 bp, Homo sapiens
ccatccttgcaaatg

SEQ ID NO: 676181 - DNA, 15 bp, Homo sapiens
catccttgcaaatgt

SEQ ID NO: 676182 - DNA, 15 bp, Homo sapiens
atccttgcaaatgtc

SEQ ID NO: 676183 - DNA, 15 bp, Homo sapiens
tccttgcaaatgtct

SEQ ID NO: 676184 - DNA, 15 bp, Homo sapiens
ccttgcaaatgtctt

SEQ ID NO: 676185 - DNA, 15 bp, Homo sapiens
cttgcaaatgtcttc

SEQ ID NO: 676186 - DNA, 15 bp, Homo sapiens
ttgcaaatgtcttct

SEQ ID NO: 676187 - DNA, 15 bp, Homo sapiens
tgcaaatgtcttctg

SEQ ID NO: 676188 - DNA, 15 bp, Homo sapiens
gcaaatgtcttctgc

SEQ ID NO: 676189 - DNA, 15 bp, Homo sapiens
caaatgtcttctgct

SEQ ID NO: 676190 - DNA, 15 bp, Homo sapiens
aaatgtcttctgctg

SEQ ID NO: 676191 - DNA, 15 bp, Homo sapiens
aatgtcttctgctga

SEQ ID NO: 676192 - DNA, 15 bp, Homo sapiens
atgtcttctgctgag

SEQ ID NO: 676193 - DNA, 15 bp, Homo sapiens
tgtcttctgctgaga

SEQ ID NO: 676194 - DNA, 15 bp, Homo sapiens
gtcttctgctgagat

SEQ ID NO: 676195 - DNA, 15 bp, Homo sapiens
tcttctgctgagatg

SEQ ID NO: 676196 - DNA, 15 bp, Homo sapiens
cttctgctgagatgc

SEQ ID NO: 676197 - DNA, 15 bp, Homo sapiens
ttctgctgagatgcc

SEQ ID NO: 676198 - DNA, 15 bp, Homo sapiens
tctgctgagatgcct

SEQ ID NO: 676199 - DNA, 15 bp, Homo sapiens
ctgctgagatgcctc

SEQ ID NO: 676200 - DNA, 15 bp, Homo sapiens
tgctgagatgcctca

SEQ ID NO: 676201 - DNA, 15 bp, Homo sapiens
gctgagatgcctcac

SEQ ID NO: 676202 - DNA, 15 bp, Homo sapiens
ctgagatgcctcaca

SEQ ID NO: 676203 - DNA, 15 bp, Homo sapiens
tgagatgcctcacac

SEQ ID NO: 676204 - DNA, 15 bp, Homo sapiens
gagatgcctcacacg

SEQ ID NO: 676205 - DNA, 15 bp, Homo sapiens
agatgcctcacacgg

SEQ ID NO: 676206 - DNA, 15 bp, Homo sapiens
gatgcctcacacgga

SEQ ID NO: 676207 - DNA, 15 bp, Homo sapiens
atgcctcacacggag

SEQ ID NO: 676208 - DNA, 15 bp, Homo sapiens
tgcctcacacggaga

SEQ ID NO: 676209 - DNA, 15 bp, Homo sapiens
gcctcacacggagac

SEQ ID NO: 676210 - DNA, 15 bp, Homo sapiens
cctcacacggagact

SEQ ID NO: 676211 - DNA, 15 bp, Homo sapiens
ctcacacggagactg

SEQ ID NO: 676212 - DNA, 15 bp, Homo sapiens
tcacacggagactgg

SEQ ID NO: 676213 - DNA, 15 bp, Homo sapiens
cacacggagactggt

SEQ ID NO: 676214 - DNA, 15 bp, Homo sapiens
acacggagactggta

SEQ ID NO: 676215 - DNA, 15 bp, Homo sapiens
cacggagactggtaa

SEQ ID NO: 676216 - DNA, 15 bp, Homo sapiens
acggagactggtaag

SEQ ID NO: 676217 - DNA, 15 bp, Homo sapiens
cggagactggtaaga

SEQ ID NO: 676218 - DNA, 15 bp, Homo sapiens
ggagactggtaagaa

SEQ ID NO: 676219 - DNA, 15 bp, Homo sapiens
gagactggtaagaaa

SEQ ID NO: 676220 - DNA, 15 bp, Homo sapiens
agactggtaagaaag

SEQ ID NO: 676221 - DNA, 15 bp, Homo sapiens
gactggtaagaaaga

SEQ ID NO: 676222 - DNA, 15 bp, Homo sapiens
actggtaagaaagaa

SEQ ID NO: 676223 - DNA, 15 bp, Homo sapiens
ctggtaagaaagaaa

SEQ ID NO: 676224 - DNA, 15 bp, Homo sapiens
tggtaagaaagaaat

SEQ ID NO: 676225 - DNA, 15 bp, Homo sapiens
ggtaagaaagaaatt

SEQ ID NO: 676226 - DNA, 15 bp, Homo sapiens
gtaagaaagaaattt

SEQ ID NO: 676227 - DNA, 15 bp, Homo sapiens
taagaaagaaattta

SEQ ID NO: 676228 - DNA, 15 bp, Homo sapiens
aagaaagaaatttat

SEQ ID NO: 676229 - DNA, 15 bp, Homo sapiens
agaaagaaatttatc

SEQ ID NO: 676230 - DNA, 15 bp, Homo sapiens
gaaagaaatttatcc

SEQ ID NO: 676231 - DNA, 15 bp, Homo sapiens
aaagaaatttatcct

SEQ ID NO: 676232 - DNA, 15 bp, Homo sapiens
aagaaatttatcctt

SEQ ID NO: 676233 - DNA, 15 bp, Homo sapiens
agaaatttatccttg

SEQ ID NO: 676234 - DNA, 15 bp, Homo sapiens
gaaatttatccttga

SEQ ID NO: 676235 - DNA, 15 bp, Homo sapiens
aaatttatccttgaa

SEQ ID NO: 676236 - DNA, 15 bp, Homo sapiens
aatttatccttgaaa

SEQ ID NO: 676237 - DNA, 15 bp, Homo sapiens
atttatccttgaaag

SEQ ID NO: 676238 - DNA, 15 bp, Homo sapiens
tttatccttgaaagg

SEQ ID NO: 676239 - DNA, 15 bp, Homo sapiens
ttatccttgaaaggc

SEQ ID NO: 676240 - DNA, 15 bp, Homo sapiens
tatccttgaaaggcc

SEQ ID NO: 676241 - DNA, 15 bp, Homo sapiens
atccttgaaaggcca

SEQ ID NO: 676242 - DNA, 15 bp, Homo sapiens
tccttgaaaggccaa

SEQ ID NO: 676243 - DNA, 15 bp, Homo sapiens
ccttgaaaggccaag

SEQ ID NO: 676244 - DNA, 15 bp, Homo sapiens
cttgaaaggccaagt

SEQ ID NO: 676245 - DNA, 15 bp, Homo sapiens
ttgaaaggccaagtt

SEQ ID NO: 676246 - DNA, 15 bp, Homo sapiens
tgaaaggccaagttc

SEQ ID NO: 676247 - DNA, 15 bp, Homo sapiens
gaaaggccaagttcc

SEQ ID NO: 676248 - DNA, 15 bp, Homo sapiens
aaaggccaagttcct

SEQ ID NO: 676249 - DNA, 15 bp, Homo sapiens
aaggccaagttcctt

SEQ ID NO: 676250 - DNA, 15 bp, Homo sapiens
aggccaagttcctta

SEQ ID NO: 676251 - DNA, 15 bp, Homo sapiens
ggccaagttccttaa

SEQ ID NO: 676252 - DNA, 15 bp, Homo sapiens
gccaagttccttaag

SEQ ID NO: 676253 - DNA, 15 bp, Homo sapiens
ccaagttccttaagg

SEQ ID NO: 676254 - DNA, 15 bp, Homo sapiens
caagttccttaaggg

SEQ ID NO: 676255 - DNA, 15 bp, Homo sapiens
aagttccttaaggga

SEQ ID NO: 676256 - DNA, 15 bp, Homo sapiens
agttccttaagggaa

SEQ ID NO: 676257 - DNA, 15 bp, Homo sapiens
gttccttaagggaaa

SEQ ID NO: 676258 - DNA, 15 bp, Homo sapiens
ttccttaagggaaaa

SEQ ID NO: 676259 - DNA, 15 bp, Homo sapiens
tccttaagggaaaag

SEQ ID NO: 676260 - DNA, 15 bp, Homo sapiens
ccttaagggaaaaga

SEQ ID NO: 676261 - DNA, 15 bp, Homo sapiens
cttaagggaaaagag

SEQ ID NO: 676262 - DNA, 15 bp, Homo sapiens
ttaagggaaaagaga

SEQ ID NO: 676263 - DNA, 15 bp, Homo sapiens
taagggaaaagagag

SEQ ID NO: 676264 - DNA, 15 bp, Homo sapiens
aagggaaaagagaga

SEQ ID NO: 676265 - DNA, 15 bp, Homo sapiens
agggaaaagagagaa

SEQ ID NO: 676266 - DNA, 15 bp, Homo sapiens
gggaaaagagagaag

SEQ ID NO: 676267 - DNA, 15 bp, Homo sapiens
ggaaaagagagaagg

SEQ ID NO: 676268 - DNA, 15 bp, Homo sapiens
gaaaagagagaagga

SEQ ID NO: 676269 - DNA, 15 bp, Homo sapiens
aaaagagagaaggag

SEQ ID NO: 676270 - DNA, 15 bp, Homo sapiens
aaagagagaaggaga

SEQ ID NO: 676271 - DNA, 15 bp, Homo sapiens
aagagagaaggagag

SEQ ID NO: 676272 - DNA, 15 bp, Homo sapiens
agagagaaggagaga

SEQ ID NO: 676273 - DNA, 15 bp, Homo sapiens
gagagaaggagagag

SEQ ID NO: 676274 - DNA, 15 bp, Homo sapiens
agagaaggagagagg

SEQ ID NO: 676275 - DNA, 15 bp, Homo sapiens
gagaaggagagaggg

SEQ ID NO: 676276 - DNA, 15 bp, Homo sapiens
agaaggagagagggt

SEQ ID NO: 676277 - DNA, 15 bp, Homo sapiens
gaaggagagagggtt

SEQ ID NO: 676278 - DNA, 15 bp, Homo sapiens
aaggagagagggtta

SEQ ID NO: 676279 - DNA, 15 bp, Homo sapiens
aggagagagggttaa

SEQ ID NO: 676280 - DNA, 15 bp, Homo sapiens
ggagagagggttaag

SEQ ID NO: 676281 - DNA, 15 bp, Homo sapiens
gagagagggttaagg

SEQ ID NO: 676282 - DNA, 15 bp, Homo sapiens
agagagggttaaggg

SEQ ID NO: 676283 - DNA, 15 bp, Homo sapiens
gagagggttaaggga

SEQ ID NO: 676284 - DNA, 15 bp, Homo sapiens
agagggttaagggat

SEQ ID NO: 676285 - DNA, 15 bp, Homo sapiens
gagggttaagggatc

SEQ ID NO: 676286 - DNA, 15 bp, Homo sapiens
agggttaagggatca

SEQ ID NO: 676287 - DNA, 15 bp, Homo sapiens
gggttaagggatcat

SEQ ID NO: 676288 - DNA, 15 bp, Homo sapiens
ggttaagggatcatt

SEQ ID NO: 676289 - DNA, 15 bp, Homo sapiens
gttaagggatcattt

SEQ ID NO: 676290 - DNA, 15 bp, Homo sapiens
ttaagggatcatttc

SEQ ID NO: 676291 - DNA, 15 bp, Homo sapiens
taagggatcatttcc

SEQ ID NO: 676292 - DNA, 15 bp, Homo sapiens
aagggatcatttccc

SEQ ID NO: 676293 - DNA, 15 bp, Homo sapiens
agggatcatttccct

SEQ ID NO: 676294 - DNA, 15 bp, Homo sapiens
gggatcatttccctc

SEQ ID NO: 676295 - DNA, 15 bp, Homo sapiens
ggatcatttccctct

SEQ ID NO: 676296 - DNA, 15 bp, Homo sapiens
gatcatttccctctt

SEQ ID NO: 676297 - DNA, 15 bp, Homo sapiens
atcatttccctcttg

SEQ ID NO: 676298 - DNA, 15 bp, Homo sapiens
tcatttccctcttga

SEQ ID NO: 676299 - DNA, 15 bp, Homo sapiens
catttccctcttgag

SEQ ID NO: 676300 - DNA, 15 bp, Homo sapiens
atttccctcttgagc

SEQ ID NO: 676301 - DNA, 15 bp, Homo sapiens
tttccctcttgagca

SEQ ID NO: 676302 - DNA, 15 bp, Homo sapiens
ttccctcttgagcaa

SEQ ID NO: 676303 - DNA, 15 bp, Homo sapiens
tccctcttgagcaat

SEQ ID NO: 676304 - DNA, 15 bp, Homo sapiens
ccctcttgagcaatg

SEQ ID NO: 676305 - DNA, 15 bp, Homo sapiens
cctcttgagcaatga

SEQ ID NO: 676306 - DNA, 15 bp, Homo sapiens
ctcttgagcaatgat

SEQ ID NO: 676307 - DNA, 15 bp, Homo sapiens
tcttgagcaatgatg

SEQ ID NO: 676308 - DNA, 15 bp, Homo sapiens
cttgagcaatgatgg

SEQ ID NO: 676309 - DNA, 15 bp, Homo sapiens
ttgagcaatgatgga

SEQ ID NO: 676310 - DNA, 15 bp, Homo sapiens
tgagcaatgatggac

SEQ ID NO: 676311 - DNA, 15 bp, Homo sapiens
gagcaatgatggacc

SEQ ID NO: 676312 - DNA, 15 bp, Homo sapiens
agcaatgatggacca

SEQ ID NO: 676313 - DNA, 15 bp, Homo sapiens
gcaatgatggaccat

SEQ ID NO: 676314 - DNA, 15 bp, Homo sapiens
caatgatggaccatt

SEQ ID NO: 676315 - DNA, 15 bp, Homo sapiens
aatgatggaccatta

SEQ ID NO: 676316 - DNA, 15 bp, Homo sapiens
atgatggaccattac

SEQ ID NO: 676317 - DNA, 15 bp, Homo sapiens
tgatggaccattact

SEQ ID NO: 676318 - DNA, 15 bp, Homo sapiens
gatggaccattacta

SEQ ID NO: 676319 - DNA, 15 bp, Homo sapiens
atggaccattactat

SEQ ID NO: 676320 - DNA, 15 bp, Homo sapiens
tggaccattactata

SEQ ID NO: 676321 - DNA, 15 bp, Homo sapiens
ggaccattactataa

SEQ ID NO: 676322 - DNA, 15 bp, Homo sapiens
gaccattactataaa

SEQ ID NO: 676323 - DNA, 15 bp, Homo sapiens
accattactataaag

SEQ ID NO: 676324 - DNA, 15 bp, Homo sapiens
ccattactataaaga

SEQ ID NO: 676325 - DNA, 15 bp, Homo sapiens
cattactataaagaa

SEQ ID NO: 676326 - DNA, 15 bp, Homo sapiens
attactataaagaag

SEQ ID NO: 676327 - DNA, 15 bp, Homo sapiens
ttactataaagaagt

SEQ ID NO: 676328 - DNA, 15 bp, Homo sapiens
tactataaagaagtg

SEQ ID NO: 676329 - DNA, 15 bp, Homo sapiens
actataaagaagtgt

SEQ ID NO: 676330 - DNA, 15 bp, Homo sapiens
ctataaagaagtgtt

SEQ ID NO: 676331 - DNA, 15 bp, Homo sapiens
tataaagaagtgtta

SEQ ID NO: 676332 - DNA, 15 bp, Homo sapiens
ataaagaagtgttat

SEQ ID NO: 676333 - DNA, 15 bp, Homo sapiens
taaagaagtgttatt

SEQ ID NO: 676334 - DNA, 15 bp, Homo sapiens
aaagaagtgttatta

SEQ ID NO: 676335 - DNA, 15 bp, Homo sapiens
aagaagtgttattat

SEQ ID NO: 676336 - DNA, 15 bp, Homo sapiens
agaagtgttattatc

SEQ ID NO: 676337 - DNA, 15 bp, Homo sapiens
gaagtgttattatca

SEQ ID NO: 676338 - DNA, 15 bp, Homo sapiens
aagtgttattatcaa

SEQ ID NO: 676339 - DNA, 15 bp, Homo sapiens
agtgttattatcaac

SEQ ID NO: 676340 - DNA, 15 bp, Homo sapiens
gtgttattatcaact

SEQ ID NO: 676341 - DNA, 15 bp, Homo sapiens
tgttattatcaacta

SEQ ID NO: 676342 - DNA, 15 bp, Homo sapiens
gttattatcaactaa

SEQ ID NO: 676343 - DNA, 15 bp, Homo sapiens
ttattatcaactaat

SEQ ID NO: 676344 - DNA, 15 bp, Homo sapiens
tattatcaactaatc

SEQ ID NO: 676345 - DNA, 15 bp, Homo sapiens
attatcaactaatcc

SEQ ID NO: 676346 - DNA, 15 bp, Homo sapiens
ttatcaactaatcct

SEQ ID NO: 676347 - DNA, 15 bp, Homo sapiens
tatcaactaatcctc

SEQ ID NO: 676348 - DNA, 15 bp, Homo sapiens
atcaactaatcctct

SEQ ID NO: 676349 - DNA, 15 bp, Homo sapiens
tcaactaatcctctg

SEQ ID NO: 676350 - DNA, 15 bp, Homo sapiens
caactaatcctctgg

SEQ ID NO: 676351 - DNA, 15 bp, Homo sapiens
aactaatcctctgga

SEQ ID NO: 676352 - DNA, 15 bp, Homo sapiens
actaatcctctggaa

SEQ ID NO: 676353 - DNA, 15 bp, Homo sapiens
ctaatcctctggaaa

SEQ ID NO: 676354 - DNA, 15 bp, Homo sapiens
taatcctctggaaac

SEQ ID NO: 676355 - DNA, 15 bp, Homo sapiens
aatcctctggaaacc

SEQ ID NO: 676356 - DNA, 15 bp, Homo sapiens
atcctctggaaaccc

SEQ ID NO: 676357 - DNA, 15 bp, Homo sapiens
tcctctggaaacccc

SEQ ID NO: 676358 - DNA, 15 bp, Homo sapiens
cctctggaaacccct

SEQ ID NO: 676359 - DNA, 15 bp, Homo sapiens
ctctggaaacccctt

SEQ ID NO: 676360 - DNA, 15 bp, Homo sapiens
tctggaaaccccttt

SEQ ID NO: 676361 - DNA, 15 bp, Homo sapiens
ctggaaacccctttt

SEQ ID NO: 676362 - DNA, 15 bp, Homo sapiens
tggaaaccccttttt

SEQ ID NO: 676363 - DNA, 15 bp, Homo sapiens
ggaaacccctttttc

SEQ ID NO: 676364 - DNA, 15 bp, Homo sapiens
gaaacccctttttcc

SEQ ID NO: 676365 - DNA, 15 bp, Homo sapiens
aaacccctttttcca

SEQ ID NO: 676366 - DNA, 15 bp, Homo sapiens
aacccctttttccat

SEQ ID NO: 676367 - DNA, 15 bp, Homo sapiens
acccctttttccatt

SEQ ID NO: 676368 - DNA, 15 bp, Homo sapiens
cccctttttccatta

SEQ ID NO: 676369 - DNA, 15 bp, Homo sapiens
ccctttttccattat

SEQ ID NO: 676370 - DNA, 15 bp, Homo sapiens
cctttttccattata

SEQ ID NO: 676371 - DNA, 15 bp, Homo sapiens
ctttttccattataa

SEQ ID NO: 676372 - DNA, 15 bp, Homo sapiens
tttttccattataac

SEQ ID NO: 676373 - DNA, 15 bp, Homo sapiens
ttttccattataact

SEQ ID NO: 676374 - DNA, 15 bp, Homo sapiens
tttccattataactt

SEQ ID NO: 676375 - DNA, 15 bp, Homo sapiens
ttccattataacttg

SEQ ID NO: 676376 - DNA, 15 bp, Homo sapiens
tccattataacttgg

SEQ ID NO: 676377 - DNA, 15 bp, Homo sapiens
ccattataacttggt

SEQ ID NO: 676378 - DNA, 15 bp, Homo sapiens
cattataacttggtg

SEQ ID NO: 676379 - DNA, 15 bp, Homo sapiens
attataacttggtgg

SEQ ID NO: 676380 - DNA, 15 bp, Homo sapiens
ttataacttggtggc

SEQ ID NO: 676381 - DNA, 15 bp, Homo sapiens
tataacttggtggca

SEQ ID NO: 676382 - DNA, 15 bp, Homo sapiens
ataacttggtggcac

SEQ ID NO: 676383 - DNA, 15 bp, Homo sapiens
taacttggtggcacc

SEQ ID NO: 676384 - DNA, 15 bp, Homo sapiens
aacttggtggcacct

SEQ ID NO: 676385 - DNA, 15 bp, Homo sapiens
acttggtggcacctg

SEQ ID NO: 676386 - DNA, 15 bp, Homo sapiens
cttggtggcacctgc

SEQ ID NO: 676387 - DNA, 15 bp, Homo sapiens
ttggtggcacctgcc

SEQ ID NO: 676388 - DNA, 15 bp, Homo sapiens
tggtggcacctgccc

SEQ ID NO: 676389 - DNA, 15 bp, Homo sapiens
ggtggcacctgccct

SEQ ID NO: 676390 - DNA, 15 bp, Homo sapiens
gtggcacctgccctt

SEQ ID NO: 676391 - DNA, 15 bp, Homo sapiens
tggcacctgcccttt

SEQ ID NO: 676392 - DNA, 15 bp, Homo sapiens
ggcacctgccctttg

SEQ ID NO: 676393 - DNA, 15 bp, Homo sapiens
gcacctgccctttga

SEQ ID NO: 676394 - DNA, 15 bp, Homo sapiens
cacctgccctttgaa

SEQ ID NO: 676395 - DNA, 15 bp, Homo sapiens
acctgccctttgaac

SEQ ID NO: 676396 - DNA, 15 bp, Homo sapiens
cctgccctttgaact

SEQ ID NO: 676397 - DNA, 15 bp, Homo sapiens
ctgccctttgaacta

SEQ ID NO: 676398 - DNA, 15 bp, Homo sapiens
tgccctttgaactat

SEQ ID NO: 676399 - DNA, 15 bp, Homo sapiens
gccctttgaactatg

SEQ ID NO: 676400 - DNA, 15 bp, Homo sapiens
ccctttgaactatgt

SEQ ID NO: 676401 - DNA, 15 bp, Homo sapiens
cctttgaactatgtc

SEQ ID NO: 676402 - DNA, 15 bp, Homo sapiens
ctttgaactatgtcc

SEQ ID NO: 676403 - DNA, 15 bp, Homo sapiens
tttgaactatgtccc

SEQ ID NO: 676404 - DNA, 15 bp, Homo sapiens
ttgaactatgtccca

SEQ ID NO: 676405 - DNA, 15 bp, Homo sapiens
tgaactatgtcccag

SEQ ID NO: 676406 - DNA, 15 bp, Homo sapiens
gaactatgtcccagg

SEQ ID NO: 676407 - DNA, 15 bp, Homo sapiens
aactatgtcccaggt

SEQ ID NO: 676408 - DNA, 15 bp, Homo sapiens
actatgtcccaggtc

SEQ ID NO: 676409 - DNA, 15 bp, Homo sapiens
ctatgtcccaggtct

SEQ ID NO: 676410 - DNA, 15 bp, Homo sapiens
tatgtcccaggtctc

SEQ ID NO: 676411 - DNA, 15 bp, Homo sapiens
atgtcccaggtctca

SEQ ID NO: 676412 - DNA, 15 bp, Homo sapiens
tgtcccaggtctcag

SEQ ID NO: 676413 - DNA, 15 bp, Homo sapiens
gtcccaggtctcagg

SEQ ID NO: 676414 - DNA, 15 bp, Homo sapiens
tcccaggtctcagga

SEQ ID NO: 676415 - DNA, 15 bp, Homo sapiens
cccaggtctcaggag

SEQ ID NO: 676416 - DNA, 15 bp, Homo sapiens
ccaggtctcaggagt

SEQ ID NO: 676417 - DNA, 15 bp, Homo sapiens
caggtctcaggagtg

SEQ ID NO: 676418 - DNA, 15 bp, Homo sapiens
aggtctcaggagtgt

SEQ ID NO: 676419 - DNA, 15 bp, Homo sapiens
ggtctcaggagtgtg

SEQ ID NO: 676420 - DNA, 15 bp, Homo sapiens
gtctcaggagtgtgc

SEQ ID NO: 676421 - DNA, 15 bp, Homo sapiens
tctcaggagtgtgca

SEQ ID NO: 676422 - DNA, 15 bp, Homo sapiens
ctcaggagtgtgcat

SEQ ID NO: 676423 - DNA, 15 bp, Homo sapiens
tcaggagtgtgcatt

SEQ ID NO: 676424 - DNA, 15 bp, Homo sapiens
caggagtgtgcattg

SEQ ID NO: 676425 - DNA, 15 bp, Homo sapiens
aggagtgtgcattga

SEQ ID NO: 676426 - DNA, 15 bp, Homo sapiens
ggagtgtgcattgag

SEQ ID NO: 676427 - DNA, 15 bp, Homo sapiens
gagtgtgcattgagt

SEQ ID NO: 676428 - DNA, 15 bp, Homo sapiens
agtgtgcattgagtt

SEQ ID NO: 676429 - DNA, 15 bp, Homo sapiens
gtgtgcattgagttg

SEQ ID NO: 676430 - DNA, 15 bp, Homo sapiens
tgtgcattgagttga

SEQ ID NO: 676431 - DNA, 15 bp, Homo sapiens
gtgcattgagttgaa

SEQ ID NO: 676432 - DNA, 15 bp, Homo sapiens
tgcattgagttgaag

SEQ ID NO: 676433 - DNA, 15 bp, Homo sapiens
gcattgagttgaagg

SEQ ID NO: 676434 - DNA, 15 bp, Homo sapiens
cattgagttgaagga

SEQ ID NO: 676435 - DNA, 15 bp, Homo sapiens
attgagttgaaggac

SEQ ID NO: 676436 - DNA, 15 bp, Homo sapiens
ttgagttgaaggaca

SEQ ID NO: 676437 - DNA, 15 bp, Homo sapiens
tgagttgaaggacac

SEQ ID NO: 676438 - DNA, 15 bp, Homo sapiens
gagttgaaggacaca

SEQ ID NO: 676439 - DNA, 15 bp, Homo sapiens
agttgaaggacacag

SEQ ID NO: 676440 - DNA, 15 bp, Homo sapiens
gttgaaggacacaga

SEQ ID NO: 676441 - DNA, 15 bp, Homo sapiens
ttgaaggacacagaa

SEQ ID NO: 676442 - DNA, 15 bp, Homo sapiens
tgaaggacacagaat

SEQ ID NO: 676443 - DNA, 15 bp, Homo sapiens
gaaggacacagaatt

SEQ ID NO: 676444 - DNA, 15 bp, Homo sapiens
aaggacacagaattc

SEQ ID NO: 676445 - DNA, 15 bp, Homo sapiens
aggacacagaattcg

SEQ ID NO: 676446 - DNA, 15 bp, Homo sapiens
ggacacagaattcgg

SEQ ID NO: 676447 - DNA, 15 bp, Homo sapiens
gacacagaattcggc

SEQ ID NO: 676448 - DNA, 15 bp, Homo sapiens
acacagaattcggca

SEQ ID NO: 676449 - DNA, 15 bp, Homo sapiens
cacagaattcggcag

SEQ ID NO: 676450 - DNA, 15 bp, Homo sapiens
acagaattcggcagt

SEQ ID NO: 676451 - DNA, 15 bp, Homo sapiens
cagaattcggcagtt

SEQ ID NO: 676452 - DNA, 15 bp, Homo sapiens
agaattcggcagttg

SEQ ID NO: 676453 - DNA, 15 bp, Homo sapiens
gaattcggcagttga

SEQ ID NO: 676454 - DNA, 15 bp, Homo sapiens
aattcggcagttgaa

SEQ ID NO: 676455 - DNA, 15 bp, Homo sapiens
attcggcagttgaac

SEQ ID NO: 676456 - DNA, 15 bp, Homo sapiens
ttcggcagttgaaca

SEQ ID NO: 676457 - DNA, 15 bp, Homo sapiens
tcggcagttgaacag

SEQ ID NO: 676458 - DNA, 15 bp, Homo sapiens
cggcagttgaacagt

SEQ ID NO: 676459 - DNA, 15 bp, Homo sapiens
ggcagttgaacagtg

SEQ ID NO: 676460 - DNA, 15 bp, Homo sapiens
gcagttgaacagtgt

SEQ ID NO: 676461 - DNA, 15 bp, Homo sapiens
cagttgaacagtgtg

SEQ ID NO: 676462 - DNA, 15 bp, Homo sapiens
agttgaacagtgtgc

SEQ ID NO: 676463 - DNA, 15 bp, Homo sapiens
gttgaacagtgtgca

SEQ ID NO: 676464 - DNA, 15 bp, Homo sapiens
ttgaacagtgtgcag

SEQ ID NO: 676465 - DNA, 15 bp, Homo sapiens
tgaacagtgtgcagt

SEQ ID NO: 676466 - DNA, 15 bp, Homo sapiens
gaacagtgtgcagta

SEQ ID NO: 676467 - DNA, 15 bp, Homo sapiens
aacagtgtgcagtaa

SEQ ID NO: 676468 - DNA, 15 bp, Homo sapiens
acagtgtgcagtaag

SEQ ID NO: 676469 - DNA, 15 bp, Homo sapiens
cagtgtgcagtaagt

SEQ ID NO: 676470 - DNA, 15 bp, Homo sapiens
agtgtgcagtaagtt

SEQ ID NO: 676471 - DNA, 15 bp, Homo sapiens
gtgtgcagtaagttt

SEQ ID NO: 676472 - DNA, 15 bp, Homo sapiens
tgtgcagtaagtttg

SEQ ID NO: 676473 - DNA, 15 bp, Homo sapiens
gtgcagtaagtttga

SEQ ID NO: 676474 - DNA, 15 bp, Homo sapiens
tgcagtaagtttgag

SEQ ID NO: 676475 - DNA, 15 bp, Homo sapiens
gcagtaagtttgaga

SEQ ID NO: 676476 - DNA, 15 bp, Homo sapiens
cagtaagtttgagaa

SEQ ID NO: 676477 - DNA, 15 bp, Homo sapiens
agtaagtttgagaac

SEQ ID NO: 676478 - DNA, 15 bp, Homo sapiens
gtaagtttgagaacc

SEQ ID NO: 676479 - DNA, 15 bp, Homo sapiens
taagtttgagaacct

SEQ ID NO: 676480 - DNA, 15 bp, Homo sapiens
aagtttgagaaccta

SEQ ID NO: 676481 - DNA, 15 bp, Homo sapiens
agtttgagaacctat

SEQ ID NO: 676482 - DNA, 15 bp, Homo sapiens
gtttgagaacctatg

SEQ ID NO: 676483 - DNA, 15 bp, Homo sapiens
tttgagaacctatgg

SEQ ID NO: 676484 - DNA, 15 bp, Homo sapiens
ttgagaacctatggg

SEQ ID NO: 676485 - DNA, 15 bp, Homo sapiens
tgagaacctatgggc

SEQ ID NO: 676486 - DNA, 15 bp, Homo sapiens
gagaacctatgggct

SEQ ID NO: 676487 - DNA, 15 bp, Homo sapiens
agaacctatgggctt

SEQ ID NO: 676488 - DNA, 15 bp, Homo sapiens
gaacctatgggctta

SEQ ID NO: 676489 - DNA, 15 bp, Homo sapiens
aacctatgggcttag

SEQ ID NO: 676490 - DNA, 15 bp, Homo sapiens
acctatgggcttagg

SEQ ID NO: 676491 - DNA, 15 bp, Homo sapiens
cctatgggcttaggc

SEQ ID NO: 676492 - DNA, 15 bp, Homo sapiens
ctatgggcttaggca

SEQ ID NO: 676493 - DNA, 15 bp, Homo sapiens
tatgggcttaggcat

SEQ ID NO: 676494 - DNA, 15 bp, Homo sapiens
atgggcttaggcatg

SEQ ID NO: 676495 - DNA, 15 bp, Homo sapiens
tgggcttaggcatgg

SEQ ID NO: 676496 - DNA, 15 bp, Homo sapiens
gggcttaggcatggt

SEQ ID NO: 676497 - DNA, 15 bp, Homo sapiens
ggcttaggcatggtg

SEQ ID NO: 676498 - DNA, 15 bp, Homo sapiens
gcttaggcatggtgg

SEQ ID NO: 676499 - DNA, 15 bp, Homo sapiens
cttaggcatggtgga

SEQ ID NO: 676500 - DNA, 15 bp, Homo sapiens
ttaggcatggtggaa

SEQ ID NO: 676501 - DNA, 15 bp, Homo sapiens
taggcatggtggaaa

SEQ ID NO: 676502 - DNA, 15 bp, Homo sapiens
aggcatggtggaaac

SEQ ID NO: 676503 - DNA, 15 bp, Homo sapiens
ggcatggtggaaaca

SEQ ID NO: 676504 - DNA, 15 bp, Homo sapiens
gcatggtggaaacaa

SEQ ID NO: 676505 - DNA, 15 bp, Homo sapiens
catggtggaaacaaa

SEQ ID NO: 676506 - DNA, 15 bp, Homo sapiens
atggtggaaacaaaa

SEQ ID NO: 676507 - DNA, 15 bp, Homo sapiens
tggtggaaacaaaaa

SEQ ID NO: 676508 - DNA, 15 bp, Homo sapiens
ggtggaaacaaaaat

SEQ ID NO: 676509 - DNA, 15 bp, Homo sapiens
gtggaaacaaaaatg

SEQ ID NO: 676510 - DNA, 15 bp, Homo sapiens
tggaaacaaaaatgt

SEQ ID NO: 676511 - DNA, 15 bp, Homo sapiens
ggaaacaaaaatgta

SEQ ID NO: 676512 - DNA, 15 bp, Homo sapiens
gaaacaaaaatgtat

SEQ ID NO: 676513 - DNA, 15 bp, Homo sapiens
aaacaaaaatgtatc

SEQ ID NO: 676514 - DNA, 15 bp, Homo sapiens
aacaaaaatgtatcg

SEQ ID NO: 676515 - DNA, 15 bp, Homo sapiens
acaaaaatgtatcgt

SEQ ID NO: 676516 - DNA, 15 bp, Homo sapiens
caaaaatgtatcgtt

SEQ ID NO: 676517 - DNA, 15 bp, Homo sapiens
aaaaatgtatcgtta

SEQ ID NO: 676518 - DNA, 15 bp, Homo sapiens
aaaatgtatcgttat

SEQ ID NO: 676519 - DNA, 15 bp, Homo sapiens
aaatgtatcgttata

SEQ ID NO: 676520 - DNA, 15 bp, Homo sapiens
aatgtatcgttatag

SEQ ID NO: 676521 - DNA, 15 bp, Homo sapiens
atgtatcgttatagt

SEQ ID NO: 676522 - DNA, 15 bp, Homo sapiens
tgtatcgttatagtt

SEQ ID NO: 676523 - DNA, 15 bp, Homo sapiens
gtatcgttatagtta

SEQ ID NO: 676524 - DNA, 15 bp, Homo sapiens
tatcgttatagttaa

SEQ ID NO: 676525 - DNA, 15 bp, Homo sapiens
atcgttatagttaaa

SEQ ID NO: 676526 - DNA, 15 bp, Homo sapiens
tcgttatagttaaat

SEQ ID NO: 676527 - DNA, 15 bp, Homo sapiens
cgttatagttaaatg

SEQ ID NO: 676528 - DNA, 15 bp, Homo sapiens
gttatagttaaatga

SEQ ID NO: 676529 - DNA, 15 bp, Homo sapiens
ttatagttaaatgaa

SEQ ID NO: 676530 - DNA, 15 bp, Homo sapiens
tatagttaaatgaag

SEQ ID NO: 676531 - DNA, 15 bp, Homo sapiens
atagttaaatgaagg

SEQ ID NO: 676532 - DNA, 15 bp, Homo sapiens
tagttaaatgaaggt

SEQ ID NO: 676533 - DNA, 15 bp, Homo sapiens
agttaaatgaaggtg

SEQ ID NO: 676534 - DNA, 15 bp, Homo sapiens
gttaaatgaaggtga

SEQ ID NO: 676535 - DNA, 15 bp, Homo sapiens
ttaaatgaaggtgat

SEQ ID NO: 676536 - DNA, 15 bp, Homo sapiens
taaatgaaggtgatg

SEQ ID NO: 676537 - DNA, 15 bp, Homo sapiens
aaatgaaggtgatgt

SEQ ID NO: 676538 - DNA, 15 bp, Homo sapiens
aatgaaggtgatgtg

SEQ ID NO: 676539 - DNA, 15 bp, Homo sapiens
atgaaggtgatgtgt

SEQ ID NO: 676540 - DNA, 15 bp, Homo sapiens
tgaaggtgatgtgta

SEQ ID NO: 676541 - DNA, 15 bp, Homo sapiens
gaaggtgatgtgtac

SEQ ID NO: 676542 - DNA, 15 bp, Homo sapiens
aaggtgatgtgtaca

SEQ ID NO: 676543 - DNA, 15 bp, Homo sapiens
aggtgatgtgtacat

SEQ ID NO: 676544 - DNA, 15 bp, Homo sapiens
ggtgatgtgtacatc

SEQ ID NO: 676545 - DNA, 15 bp, Homo sapiens
gtgatgtgtacatct

SEQ ID NO: 676546 - DNA, 15 bp, Homo sapiens
tgatgtgtacatctt

SEQ ID NO: 676547 - DNA, 15 bp, Homo sapiens
gatgtgtacatcttc

SEQ ID NO: 676548 - DNA, 15 bp, Homo sapiens
atgtgtacatcttca

SEQ ID NO: 676549 - DNA, 15 bp, Homo sapiens
tgtgtacatcttcac

SEQ ID NO: 676550 - DNA, 15 bp, Homo sapiens
gtgtacatcttcaca

SEQ ID NO: 676551 - DNA, 15 bp, Homo sapiens
tgtacatcttcacat

SEQ ID NO: 676552 - DNA, 15 bp, Homo sapiens
gtacatcttcacata

SEQ ID NO: 676553 - DNA, 15 bp, Homo sapiens
tacatcttcacatag

SEQ ID NO: 676554 - DNA, 15 bp, Homo sapiens
acatcttcacatagt

SEQ ID NO: 676555 - DNA, 15 bp, Homo sapiens
catcttcacatagtg

SEQ ID NO: 676556 - DNA, 15 bp, Homo sapiens
atcttcacatagtgc

SEQ ID NO: 676557 - DNA, 15 bp, Homo sapiens
tcttcacatagtgct

SEQ ID NO: 676558 - DNA, 15 bp, Homo sapiens
cttcacatagtgctg

SEQ ID NO: 676559 - DNA, 15 bp, Homo sapiens
ttcacatagtgctgg

SEQ ID NO: 676560 - DNA, 15 bp, Homo sapiens
tcacatagtgctgga

SEQ ID NO: 676561 - DNA, 15 bp, Homo sapiens
cacatagtgctggac

SEQ ID NO: 676562 - DNA, 15 bp, Homo sapiens
acatagtgctggaca

SEQ ID NO: 676563 - DNA, 15 bp, Homo sapiens
catagtgctggacac

SEQ ID NO: 676564 - DNA, 15 bp, Homo sapiens
atagtgctggacaca

SEQ ID NO: 676565 - DNA, 15 bp, Homo sapiens
tagtgctggacacat

SEQ ID NO: 676566 - DNA, 15 bp, Homo sapiens
agtgctggacacatg

SEQ ID NO: 676567 - DNA, 15 bp, Homo sapiens
gtgctggacacatgt

SEQ ID NO: 676568 - DNA, 15 bp, Homo sapiens
tgctggacacatgtg

SEQ ID NO: 676569 - DNA, 15 bp, Homo sapiens
gctggacacatgtga

SEQ ID NO: 676570 - DNA, 15 bp, Homo sapiens
ctggacacatgtgaa

SEQ ID NO: 676571 - DNA, 15 bp, Homo sapiens
tggacacatgtgaat

SEQ ID NO: 676572 - DNA, 15 bp, Homo sapiens
ggacacatgtgaata

SEQ ID NO: 676573 - DNA, 15 bp, Homo sapiens
gacacatgtgaataa

SEQ ID NO: 676574 - DNA, 15 bp, Homo sapiens
acacatgtgaataaa

SEQ ID NO: 676575 - DNA, 15 bp, Homo sapiens
cacatgtgaataaat

SEQ ID NO: 676576 - DNA, 15 bp, Homo sapiens
acatgtgaataaata

SEQ ID NO: 676577 - DNA, 15 bp, Homo sapiens
catgtgaataaatag

SEQ ID NO: 676578 - DNA, 15 bp, Homo sapiens
atgtgaataaatagc

SEQ ID NO: 676579 - DNA, 15 bp, Homo sapiens
tgtgaataaatagca

SEQ ID NO: 676580 - DNA, 15 bp, Homo sapiens
gtgaataaatagcag

SEQ ID NO: 676581 - DNA, 15 bp, Homo sapiens
tgaataaatagcaga

SEQ ID NO: 676582 - DNA, 15 bp, Homo sapiens
gaataaatagcagat

SEQ ID NO: 676583 - DNA, 15 bp, Homo sapiens
aataaatagcagatt

SEQ ID NO: 676584 - DNA, 15 bp, Homo sapiens
ataaatagcagattt

SEQ ID NO: 676585 - DNA, 15 bp, Homo sapiens
taaatagcagattta

SEQ ID NO: 676586 - DNA, 15 bp, Homo sapiens
aaatagcagatttat

SEQ ID NO: 676587 - DNA, 15 bp, Homo sapiens
aatagcagatttatt

SEQ ID NO: 676588 - DNA, 15 bp, Homo sapiens
atagcagatttattg

SEQ ID NO: 676589 - DNA, 15 bp, Homo sapiens
tagcagatttattgc

SEQ ID NO: 676590 - DNA, 15 bp, Homo sapiens
agcagatttattgct

SEQ ID NO: 676591 - DNA, 15 bp, Homo sapiens
gcagatttattgcta

SEQ ID NO: 676592 - DNA, 15 bp, Homo sapiens
cagatttattgctaa

SEQ ID NO: 676593 - DNA, 15 bp, Homo sapiens
agatttattgctaat

SEQ ID NO: 676594 - DNA, 15 bp, Homo sapiens
gatttattgctaatt

SEQ ID NO: 676595 - DNA, 15 bp, Homo sapiens
atttattgctaatta

SEQ ID NO: 676596 - DNA, 15 bp, Homo sapiens
tttattgctaattag

SEQ ID NO: 676597 - DNA, 15 bp, Homo sapiens
ttattgctaattagc

SEQ ID NO: 676598 - DNA, 15 bp, Homo sapiens
tattgctaattagcc

SEQ ID NO: 676599 - DNA, 15 bp, Homo sapiens
attgctaattagcca

SEQ ID NO: 676600 - DNA, 15 bp, Homo sapiens
ttgctaattagccag

SEQ ID NO: 676601 - DNA, 15 bp, Homo sapiens
tgctaattagccaga

SEQ ID NO: 676602 - DNA, 15 bp, Homo sapiens
gctaattagccagaa

SEQ ID NO: 676603 - DNA, 15 bp, Homo sapiens
ctaattagccagaag

SEQ ID NO: 676604 - DNA, 15 bp, Homo sapiens
taattagccagaaga

SEQ ID NO: 676605 - DNA, 15 bp, Homo sapiens
aattagccagaagac

SEQ ID NO: 676606 - DNA, 15 bp, Homo sapiens
attagccagaagacc

SEQ ID NO: 676607 - DNA, 15 bp, Homo sapiens
ttagccagaagacct

SEQ ID NO: 676608 - DNA, 15 bp, Homo sapiens
tagccagaagaccta

SEQ ID NO: 676609 - DNA, 15 bp, Homo sapiens
agccagaagacctaa

SEQ ID NO: 676610 - DNA, 15 bp, Homo sapiens
gccagaagacctaac

SEQ ID NO: 676611 - DNA, 15 bp, Homo sapiens
ccagaagacctaacg

SEQ ID NO: 676612 - DNA, 15 bp, Homo sapiens
cagaagacctaacgt

SEQ ID NO: 676613 - DNA, 15 bp, Homo sapiens
agaagacctaacgtc

SEQ ID NO: 676614 - DNA, 15 bp, Homo sapiens
gaagacctaacgtca

SEQ ID NO: 676615 - DNA, 15 bp, Homo sapiens
aagacctaacgtcat

SEQ ID NO: 676616 - DNA, 15 bp, Homo sapiens
agacctaacgtcata

SEQ ID NO: 676617 - DNA, 15 bp, Homo sapiens
gacctaacgtcatag

SEQ ID NO: 676618 - DNA, 15 bp, Homo sapiens
acctaacgtcatagc

SEQ ID NO: 676619 - DNA, 15 bp, Homo sapiens
cctaacgtcatagct

SEQ ID NO: 676620 - DNA, 15 bp, Homo sapiens
ctaacgtcatagctc

SEQ ID NO: 676621 - DNA, 15 bp, Homo sapiens
taacgtcatagctca

SEQ ID NO: 676622 - DNA, 15 bp, Homo sapiens
aacgtcatagctcag

SEQ ID NO: 676623 - DNA, 15 bp, Homo sapiens
acgtcatagctcagg

SEQ ID NO: 676624 - DNA, 15 bp, Homo sapiens
cgtcatagctcaggg

SEQ ID NO: 676625 - DNA, 15 bp, Homo sapiens
gtcatagctcaggga

SEQ ID NO: 676626 - DNA, 15 bp, Homo sapiens
tcatagctcagggat

SEQ ID NO: 676627 - DNA, 15 bp, Homo sapiens
catagctcagggatg

SEQ ID NO: 676628 - DNA, 15 bp, Homo sapiens
atagctcagggatga

SEQ ID NO: 676629 - DNA, 15 bp, Homo sapiens
tagctcagggatgag

SEQ ID NO: 676630 - DNA, 15 bp, Homo sapiens
agctcagggatgagc

SEQ ID NO: 676631 - DNA, 15 bp, Homo sapiens
gctcagggatgagca

SEQ ID NO: 676632 - DNA, 15 bp, Homo sapiens
ctcagggatgagcat

SEQ ID NO: 676633 - DNA, 15 bp, Homo sapiens
tcagggatgagcatg

SEQ ID NO: 676634 - DNA, 15 bp, Homo sapiens
cagggatgagcatga

SEQ ID NO: 676635 - DNA, 15 bp, Homo sapiens
agggatgagcatgat

SEQ ID NO: 676636 - DNA, 15 bp, Homo sapiens
gggatgagcatgatt

SEQ ID NO: 676637 - DNA, 15 bp, Homo sapiens
ggatgagcatgattt

SEQ ID NO: 676638 - DNA, 15 bp, Homo sapiens
gatgagcatgatttt

SEQ ID NO: 676639 - DNA, 15 bp, Homo sapiens
atgagcatgattttg

SEQ ID NO: 676640 - DNA, 15 bp, Homo sapiens
tgagcatgattttgt

SEQ ID NO: 676641 - DNA, 15 bp, Homo sapiens
gagcatgattttgtt

SEQ ID NO: 676642 - DNA, 15 bp, Homo sapiens
agcatgattttgttt

SEQ ID NO: 676643 - DNA, 15 bp, Homo sapiens
gcatgattttgtttt

SEQ ID NO: 676644 - DNA, 15 bp, Homo sapiens
catgattttgttttg

SEQ ID NO: 676645 - DNA, 15 bp, Homo sapiens
atgattttgttttgc

SEQ ID NO: 676646 - DNA, 15 bp, Homo sapiens
tgattttgttttgcc

SEQ ID NO: 676647 - DNA, 15 bp, Homo sapiens
gattttgttttgcca

SEQ ID NO: 676648 - DNA, 15 bp, Homo sapiens
attttgttttgccaa

SEQ ID NO: 676649 - DNA, 15 bp, Homo sapiens
ttttgttttgccaaa

SEQ ID NO: 676650 - DNA, 15 bp, Homo sapiens
tttgttttgccaaaa

SEQ ID NO: 676651 - DNA, 15 bp, Homo sapiens
ttgttttgccaaaaa

SEQ ID NO: 676652 - DNA, 15 bp, Homo sapiens
tgttttgccaaaaat

SEQ ID NO: 676653 - DNA, 15 bp, Homo sapiens
gttttgccaaaaatg

SEQ ID NO: 676654 - DNA, 15 bp, Homo sapiens
ttttgccaaaaatgg

SEQ ID NO: 676655 - DNA, 15 bp, Homo sapiens
tttgccaaaaatggc

SEQ ID NO: 676656 - DNA, 15 bp, Homo sapiens
ttgccaaaaatggca

SEQ ID NO: 676657 - DNA, 15 bp, Homo sapiens
tgccaaaaatggcat

SEQ ID NO: 676658 - DNA, 15 bp, Homo sapiens
gccaaaaatggcatg

SEQ ID NO: 676659 - DNA, 15 bp, Homo sapiens
ccaaaaatggcatgg

SEQ ID NO: 676660 - DNA, 15 bp, Homo sapiens
caaaaatggcatggc

SEQ ID NO: 676661 - DNA, 15 bp, Homo sapiens
aaaaatggcatggca

SEQ ID NO: 676662 - DNA, 15 bp, Homo sapiens
aaaatggcatggcaa

SEQ ID NO: 676663 - DNA, 15 bp, Homo sapiens
aaatggcatggcaaa

SEQ ID NO: 676664 - DNA, 15 bp, Homo sapiens
aatggcatggcaaat

SEQ ID NO: 676665 - DNA, 15 bp, Homo sapiens
atggcatggcaaatc

SEQ ID NO: 676666 - DNA, 15 bp, Homo sapiens
tggcatggcaaatca

SEQ ID NO: 676667 - DNA, 15 bp, Homo sapiens
ggcatggcaaatcac

SEQ ID NO: 676668 - DNA, 15 bp, Homo sapiens
gcatggcaaatcacg

SEQ ID NO: 676669 - DNA, 15 bp, Homo sapiens
catggcaaatcacga

SEQ ID NO: 676670 - DNA, 15 bp, Homo sapiens
atggcaaatcacgat

SEQ ID NO: 676671 - DNA, 15 bp, Homo sapiens
tggcaaatcacgatg

SEQ ID NO: 676672 - DNA, 15 bp, Homo sapiens
ggcaaatcacgatga

SEQ ID NO: 676673 - DNA, 15 bp, Homo sapiens
gcaaatcacgatgag

SEQ ID NO: 676674 - DNA, 15 bp, Homo sapiens
caaatcacgatgaga

SEQ ID NO: 676675 - DNA, 15 bp, Homo sapiens
aaatcacgatgagat

SEQ ID NO: 676676 - DNA, 15 bp, Homo sapiens
aatcacgatgagatt

SEQ ID NO: 676677 - DNA, 15 bp, Homo sapiens
atcacgatgagattt

SEQ ID NO: 676678 - DNA, 15 bp, Homo sapiens
tcacgatgagatttc

SEQ ID NO: 676679 - DNA, 15 bp, Homo sapiens
cacgatgagatttct

SEQ ID NO: 676680 - DNA, 15 bp, Homo sapiens
acgatgagatttctg

SEQ ID NO: 676681 - DNA, 15 bp, Homo sapiens
cgatgagatttctgt

SEQ ID NO: 676682 - DNA, 15 bp, Homo sapiens
gatgagatttctgta

SEQ ID NO: 676683 - DNA, 15 bp, Homo sapiens
atgagatttctgtaa

SEQ ID NO: 676684 - DNA, 15 bp, Homo sapiens
tgagatttctgtaat

SEQ ID NO: 676685 - DNA, 15 bp, Homo sapiens
gagatttctgtaata

SEQ ID NO: 676686 - DNA, 15 bp, Homo sapiens
agatttctgtaatac

SEQ ID NO: 676687 - DNA, 15 bp, Homo sapiens
gatttctgtaataca

SEQ ID NO: 676688 - DNA, 15 bp, Homo sapiens
atttctgtaatacat

SEQ ID NO: 676689 - DNA, 15 bp, Homo sapiens
tttctgtaatacata

SEQ ID NO: 676690 - DNA, 15 bp, Homo sapiens
ttctgtaatacataa

SEQ ID NO: 676691 - DNA, 15 bp, Homo sapiens
tctgtaatacataat

SEQ ID NO: 676692 - DNA, 15 bp, Homo sapiens
ctgtaatacataatt

SEQ ID NO: 676693 - DNA, 15 bp, Homo sapiens
tgtaatacataattt

SEQ ID NO: 676694 - DNA, 15 bp, Homo sapiens
gtaatacataatttg

SEQ ID NO: 676695 - DNA, 15 bp, Homo sapiens
taatacataatttgg

SEQ ID NO: 676696 - DNA, 15 bp, Homo sapiens
aatacataatttggg

SEQ ID NO: 676697 - DNA, 15 bp, Homo sapiens
atacataatttgggt

SEQ ID NO: 676698 - DNA, 15 bp, Homo sapiens
tacataatttgggta

SEQ ID NO: 676699 - DNA, 15 bp, Homo sapiens
acataatttgggtaa

SEQ ID NO: 676700 - DNA, 15 bp, Homo sapiens
cataatttgggtaat

SEQ ID NO: 676701 - DNA, 15 bp, Homo sapiens
ataatttgggtaatt

SEQ ID NO: 676702 - DNA, 15 bp, Homo sapiens
taatttgggtaattc

SEQ ID NO: 676703 - DNA, 15 bp, Homo sapiens
aatttgggtaattct

SEQ ID NO: 676704 - DNA, 15 bp, Homo sapiens
atttgggtaattctt

SEQ ID NO: 676705 - DNA, 15 bp, Homo sapiens
tttgggtaattcttt

SEQ ID NO: 676706 - DNA, 15 bp, Homo sapiens
ttgggtaattctttc

SEQ ID NO: 676707 - DNA, 15 bp, Homo sapiens
tgggtaattctttct

SEQ ID NO: 676708 - DNA, 15 bp, Homo sapiens
gggtaattctttcta

SEQ ID NO: 676709 - DNA, 15 bp, Homo sapiens
ggtaattctttctat

SEQ ID NO: 676710 - DNA, 15 bp, Homo sapiens
gtaattctttctatg

SEQ ID NO: 676711 - DNA, 15 bp, Homo sapiens
taattctttctatgt

SEQ ID NO: 676712 - DNA, 15 bp, Homo sapiens
aattctttctatgtc

SEQ ID NO: 676713 - DNA, 15 bp, Homo sapiens
attctttctatgtca

SEQ ID NO: 676714 - DNA, 15 bp, Homo sapiens
ttctttctatgtcag

SEQ ID NO: 676715 - DNA, 15 bp, Homo sapiens
tctttctatgtcagt

SEQ ID NO: 676716 - DNA, 15 bp, Homo sapiens
ctttctatgtcagta

SEQ ID NO: 676717 - DNA, 15 bp, Homo sapiens
tttctatgtcagtaa

SEQ ID NO: 676718 - DNA, 15 bp, Homo sapiens
ttctatgtcagtaac

SEQ ID NO: 676719 - DNA, 15 bp, Homo sapiens
tctatgtcagtaacg

SEQ ID NO: 676720 - DNA, 15 bp, Homo sapiens
ctatgtcagtaacgg

SEQ ID NO: 676721 - DNA, 15 bp, Homo sapiens
tatgtcagtaacggc

SEQ ID NO: 676722 - DNA, 15 bp, Homo sapiens
atgtcagtaacggct

SEQ ID NO: 676723 - DNA, 15 bp, Homo sapiens
tgtcagtaacggctg

SEQ ID NO: 676724 - DNA, 15 bp, Homo sapiens
gtcagtaacggctgt

SEQ ID NO: 676725 - DNA, 15 bp, Homo sapiens
tcagtaacggctgtc

SEQ ID NO: 676726 - DNA, 15 bp, Homo sapiens
cagtaacggctgtct

SEQ ID NO: 676727 - DNA, 15 bp, Homo sapiens
agtaacggctgtctc

SEQ ID NO: 676728 - DNA, 15 bp, Homo sapiens
gtaacggctgtctct

SEQ ID NO: 676729 - DNA, 15 bp, Homo sapiens
taacggctgtctctt

SEQ ID NO: 676730 - DNA, 15 bp, Homo sapiens
aacggctgtctcttc

SEQ ID NO: 676731 - DNA, 15 bp, Homo sapiens
acggctgtctcttct

SEQ ID NO: 676732 - DNA, 15 bp, Homo sapiens
cggctgtctcttctc

SEQ ID NO: 676733 - DNA, 15 bp, Homo sapiens
ggctgtctcttctcc

SEQ ID NO: 676734 - DNA, 15 bp, Homo sapiens
gctgtctcttctcca

SEQ ID NO: 676735 - DNA, 15 bp, Homo sapiens
ctgtctcttctccat

SEQ ID NO: 676736 - DNA, 15 bp, Homo sapiens
tgtctcttctccatt

SEQ ID NO: 676737 - DNA, 15 bp, Homo sapiens
gtctcttctccattc

SEQ ID NO: 676738 - DNA, 15 bp, Homo sapiens
tctcttctccattct

SEQ ID NO: 676739 - DNA, 15 bp, Homo sapiens
ctcttctccattctc

SEQ ID NO: 676740 - DNA, 15 bp, Homo sapiens
tcttctccattctct

SEQ ID NO: 676741 - DNA, 15 bp, Homo sapiens
cttctccattctctg

SEQ ID NO: 676742 - DNA, 15 bp, Homo sapiens
ttctccattctctgg

SEQ ID NO: 676743 - DNA, 15 bp, Homo sapiens
tctccattctctggg

SEQ ID NO: 676744 - DNA, 15 bp, Homo sapiens
ctccattctctgggt

SEQ ID NO: 676745 - DNA, 15 bp, Homo sapiens
tccattctctgggtt

SEQ ID NO: 676746 - DNA, 15 bp, Homo sapiens
ccattctctgggttt

SEQ ID NO: 676747 - DNA, 15 bp, Homo sapiens
cattctctgggtttg

SEQ ID NO: 676748 - DNA, 15 bp, Homo sapiens
attctctgggtttgt

SEQ ID NO: 676749 - DNA, 15 bp, Homo sapiens
ttctctgggtttgtg

SEQ ID NO: 676750 - DNA, 15 bp, Homo sapiens
tctctgggtttgtgg

SEQ ID NO: 676751 - DNA, 15 bp, Homo sapiens
ctctgggtttgtgga

SEQ ID NO: 676752 - DNA, 15 bp, Homo sapiens
tctgggtttgtggat

SEQ ID NO: 676753 - DNA, 15 bp, Homo sapiens
ctgggtttgtggatg

SEQ ID NO: 676754 - DNA, 15 bp, Homo sapiens
tgggtttgtggatgt

SEQ ID NO: 676755 - DNA, 15 bp, Homo sapiens
gggtttgtggatgtt

SEQ ID NO: 676756 - DNA, 15 bp, Homo sapiens
ggtttgtggatgtta

SEQ ID NO: 676757 - DNA, 15 bp, Homo sapiens
gtttgtggatgttac

SEQ ID NO: 676758 - DNA, 15 bp, Homo sapiens
tttgtggatgttact

SEQ ID NO: 676759 - DNA, 15 bp, Homo sapiens
ttgtggatgttactg

SEQ ID NO: 676760 - DNA, 15 bp, Homo sapiens
tgtggatgttactgg

SEQ ID NO: 676761 - DNA, 15 bp, Homo sapiens
gtggatgttactggg

SEQ ID NO: 676762 - DNA, 15 bp, Homo sapiens
tggatgttactgggc

SEQ ID NO: 676763 - DNA, 15 bp, Homo sapiens
ggatgttactgggca

SEQ ID NO: 676764 - DNA, 15 bp, Homo sapiens
gatgttactgggcag

SEQ ID NO: 676765 - DNA, 15 bp, Homo sapiens
atgttactgggcagc

SEQ ID NO: 676766 - DNA, 15 bp, Homo sapiens
tgttactgggcagct

SEQ ID NO: 676767 - DNA, 15 bp, Homo sapiens
gttactgggcagctc

SEQ ID NO: 676768 - DNA, 15 bp, Homo sapiens
ttactgggcagctct

SEQ ID NO: 676769 - DNA, 15 bp, Homo sapiens
tactgggcagctctg

SEQ ID NO: 676770 - DNA, 15 bp, Homo sapiens
actgggcagctctga

SEQ ID NO: 676771 - DNA, 15 bp, Homo sapiens
ctgggcagctctgag

SEQ ID NO: 676772 - DNA, 15 bp, Homo sapiens
tgggcagctctgagt

SEQ ID NO: 676773 - DNA, 15 bp, Homo sapiens
gggcagctctgagtt

SEQ ID NO: 676774 - DNA, 15 bp, Homo sapiens
ggcagctctgagttt

SEQ ID NO: 676775 - DNA, 15 bp, Homo sapiens
gcagctctgagtttg

SEQ ID NO: 676776 - DNA, 15 bp, Homo sapiens
cagctctgagtttgg

SEQ ID NO: 676777 - DNA, 15 bp, Homo sapiens
agctctgagtttggg

SEQ ID NO: 676778 - DNA, 15 bp, Homo sapiens
gctctgagtttggga

SEQ ID NO: 676779 - DNA, 15 bp, Homo sapiens
ctctgagtttgggag

SEQ ID NO: 676780 - DNA, 15 bp, Homo sapiens
tctgagtttgggagc

SEQ ID NO: 676781 - DNA, 15 bp, Homo sapiens
ctgagtttgggagca

SEQ ID NO: 676782 - DNA, 15 bp, Homo sapiens
tgagtttgggagcac

SEQ ID NO: 676783 - DNA, 15 bp, Homo sapiens
gagtttgggagcacc

SEQ ID NO: 676784 - DNA, 15 bp, Homo sapiens
agtttgggagcacct

SEQ ID NO: 676785 - DNA, 15 bp, Homo sapiens
gtttgggagcacctc

SEQ ID NO: 676786 - DNA, 15 bp, Homo sapiens
tttgggagcacctcc

SEQ ID NO: 676787 - DNA, 15 bp, Homo sapiens
ttgggagcacctccc

SEQ ID NO: 676788 - DNA, 15 bp, Homo sapiens
tgggagcacctccca

SEQ ID NO: 676789 - DNA, 15 bp, Homo sapiens
gggagcacctcccat

SEQ ID NO: 676790 - DNA, 15 bp, Homo sapiens
ggagcacctcccatg

SEQ ID NO: 676791 - DNA, 15 bp, Homo sapiens
gagcacctcccatgt

SEQ ID NO: 676792 - DNA, 15 bp, Homo sapiens
agcacctcccatgtc

SEQ ID NO: 676793 - DNA, 15 bp, Homo sapiens
gcacctcccatgtct

SEQ ID NO: 676794 - DNA, 15 bp, Homo sapiens
cacctcccatgtcta

SEQ ID NO: 676795 - DNA, 15 bp, Homo sapiens
acctcccatgtctaa

SEQ ID NO: 676796 - DNA, 15 bp, Homo sapiens
cctcccatgtctaat

SEQ ID NO: 676797 - DNA, 15 bp, Homo sapiens
ctcccatgtctaatt

SEQ ID NO: 676798 - DNA, 15 bp, Homo sapiens
tcccatgtctaattc

SEQ ID NO: 676799 - DNA, 15 bp, Homo sapiens
cccatgtctaattct

SEQ ID NO: 676800 - DNA, 15 bp, Homo sapiens
ccatgtctaattctc

SEQ ID NO: 676801 - DNA, 15 bp, Homo sapiens
catgtctaattctcc

SEQ ID NO: 676802 - DNA, 15 bp, Homo sapiens
atgtctaattctcct

SEQ ID NO: 676803 - DNA, 15 bp, Homo sapiens
tgtctaattctccta

SEQ ID NO: 676804 - DNA, 15 bp, Homo sapiens
gtctaattctcctaa

SEQ ID NO: 676805 - DNA, 15 bp, Homo sapiens
tctaattctcctaag

SEQ ID NO: 676806 - DNA, 15 bp, Homo sapiens
ctaattctcctaagt

SEQ ID NO: 676807 - DNA, 15 bp, Homo sapiens
taattctcctaagtc

SEQ ID NO: 676808 - DNA, 15 bp, Homo sapiens
aattctcctaagtcc

SEQ ID NO: 676809 - DNA, 15 bp, Homo sapiens
attctcctaagtcct

SEQ ID NO: 676810 - DNA, 15 bp, Homo sapiens
ttctcctaagtcctg

SEQ ID NO: 676811 - DNA, 15 bp, Homo sapiens
tctcctaagtcctgg

SEQ ID NO: 676812 - DNA, 15 bp, Homo sapiens
ctcctaagtcctggg

SEQ ID NO: 676813 - DNA, 15 bp, Homo sapiens
tcctaagtcctggga

SEQ ID NO: 676814 - DNA, 15 bp, Homo sapiens
cctaagtcctgggaa

SEQ ID NO: 676815 - DNA, 15 bp, Homo sapiens
ctaagtcctgggaag

SEQ ID NO: 676816 - DNA, 15 bp, Homo sapiens
taagtcctgggaagc

SEQ ID NO: 676817 - DNA, 15 bp, Homo sapiens
aagtcctgggaagcg

SEQ ID NO: 676818 - DNA, 15 bp, Homo sapiens
agtcctgggaagcgt

SEQ ID NO: 676819 - DNA, 15 bp, Homo sapiens
gtcctgggaagcgtt

SEQ ID NO: 676820 - DNA, 15 bp, Homo sapiens
tcctgggaagcgttg

SEQ ID NO: 676821 - DNA, 15 bp, Homo sapiens
cctgggaagcgttga

SEQ ID NO: 676822 - DNA, 15 bp, Homo sapiens
ctgggaagcgttgac

SEQ ID NO: 676823 - DNA, 15 bp, Homo sapiens
tgggaagcgttgacc

SEQ ID NO: 676824 - DNA, 15 bp, Homo sapiens
gggaagcgttgaccc

SEQ ID NO: 676825 - DNA, 15 bp, Homo sapiens
ggaagcgttgaccca

SEQ ID NO: 676826 - DNA, 15 bp, Homo sapiens
gaagcgttgacccaa

SEQ ID NO: 676827 - DNA, 15 bp, Homo sapiens
aagcgttgacccaac

SEQ ID NO: 676828 - DNA, 15 bp, Homo sapiens
agcgttgacccaact

SEQ ID NO: 676829 - DNA, 15 bp, Homo sapiens
gcgttgacccaactt

SEQ ID NO: 676830 - DNA, 15 bp, Homo sapiens
cgttgacccaacttt

SEQ ID NO: 676831 - DNA, 15 bp, Homo sapiens
gttgacccaacttta

SEQ ID NO: 676832 - DNA, 15 bp, Homo sapiens
ttgacccaactttat

SEQ ID NO: 676833 - DNA, 15 bp, Homo sapiens
tgacccaactttatg

SEQ ID NO: 676834 - DNA, 15 bp, Homo sapiens
gacccaactttatgg

SEQ ID NO: 676835 - DNA, 15 bp, Homo sapiens
acccaactttatggt

SEQ ID NO: 676836 - DNA, 15 bp, Homo sapiens
cccaactttatggta

SEQ ID NO: 676837 - DNA, 15 bp, Homo sapiens
ccaactttatggtaa

SEQ ID NO: 676838 - DNA, 15 bp, Homo sapiens
caactttatggtaaa

SEQ ID NO: 676839 - DNA, 15 bp, Homo sapiens
aactttatggtaaag

SEQ ID NO: 676840 - DNA, 15 bp, Homo sapiens
actttatggtaaaga

SEQ ID NO: 676841 - DNA, 15 bp, Homo sapiens
ctttatggtaaagat

SEQ ID NO: 676842 - DNA, 15 bp, Homo sapiens
tttatggtaaagata

SEQ ID NO: 676843 - DNA, 15 bp, Homo sapiens
ttatggtaaagataa

SEQ ID NO: 676844 - DNA, 15 bp, Homo sapiens
tatggtaaagataat

SEQ ID NO: 676845 - DNA, 15 bp, Homo sapiens
atggtaaagataatt

SEQ ID NO: 676846 - DNA, 15 bp, Homo sapiens
tggtaaagataattc

SEQ ID NO: 676847 - DNA, 15 bp, Homo sapiens
ggtaaagataattcc

SEQ ID NO: 676848 - DNA, 15 bp, Homo sapiens
gtaaagataattcca

SEQ ID NO: 676849 - DNA, 15 bp, Homo sapiens
taaagataattccag

SEQ ID NO: 676850 - DNA, 15 bp, Homo sapiens
aaagataattccaga

SEQ ID NO: 676851 - DNA, 15 bp, Homo sapiens
aagataattccagaa

SEQ ID NO: 676852 - DNA, 15 bp, Homo sapiens
agataattccagaaa

SEQ ID NO: 676853 - DNA, 15 bp, Homo sapiens
gataattccagaaag

SEQ ID NO: 676854 - DNA, 15 bp, Homo sapiens
ataattccagaaagt

SEQ ID NO: 676855 - DNA, 15 bp, Homo sapiens
taattccagaaagtt

SEQ ID NO: 676856 - DNA, 15 bp, Homo sapiens
aattccagaaagttt

SEQ ID NO: 676857 - DNA, 15 bp, Homo sapiens
attccagaaagttta

SEQ ID NO: 676858 - DNA, 15 bp, Homo sapiens
ttccagaaagtttaa

SEQ ID NO: 676859 - DNA, 15 bp, Homo sapiens
tccagaaagtttaat

SEQ ID NO: 676860 - DNA, 15 bp, Homo sapiens
ccagaaagtttaatc

SEQ ID NO: 676861 - DNA, 15 bp, Homo sapiens
cagaaagtttaatct

SEQ ID NO: 676862 - DNA, 15 bp, Homo sapiens
agaaagtttaatcta

SEQ ID NO: 676863 - DNA, 15 bp, Homo sapiens
gaaagtttaatctac

SEQ ID NO: 676864 - DNA, 15 bp, Homo sapiens
aaagtttaatctact

SEQ ID NO: 676865 - DNA, 15 bp, Homo sapiens
aagtttaatctactg

SEQ ID NO: 676866 - DNA, 15 bp, Homo sapiens
agtttaatctactga

SEQ ID NO: 676867 - DNA, 15 bp, Homo sapiens
gtttaatctactgac

SEQ ID NO: 676868 - DNA, 15 bp, Homo sapiens
tttaatctactgaca

SEQ ID NO: 676869 - DNA, 15 bp, Homo sapiens
ttaatctactgacag

SEQ ID NO: 676870 - DNA, 15 bp, Homo sapiens
taatctactgacagt

SEQ ID NO: 676871 - DNA, 15 bp, Homo sapiens
aatctactgacagtc

SEQ ID NO: 676872 - DNA, 15 bp, Homo sapiens
atctactgacagtca

SEQ ID NO: 676873 - DNA, 15 bp, Homo sapiens
tctactgacagtcaa

SEQ ID NO: 676874 - DNA, 15 bp, Homo sapiens
ctactgacagtcaaa

SEQ ID NO: 676875 - DNA, 15 bp, Homo sapiens
tactgacagtcaaac

SEQ ID NO: 676876 - DNA, 15 bp, Homo sapiens
actgacagtcaaaca

SEQ ID NO: 676877 - DNA, 15 bp, Homo sapiens
ctgacagtcaaacag

SEQ ID NO: 676878 - DNA, 15 bp, Homo sapiens
tgacagtcaaacaga

SEQ ID NO: 676879 - DNA, 15 bp, Homo sapiens
gacagtcaaacagaa

SEQ ID NO: 676880 - DNA, 15 bp, Homo sapiens
acagtcaaacagaat

SEQ ID NO: 676881 - DNA, 15 bp, Homo sapiens
cagtcaaacagaatg

SEQ ID NO: 676882 - DNA, 15 bp, Homo sapiens
agtcaaacagaatgt

SEQ ID NO: 676883 - DNA, 15 bp, Homo sapiens
gtcaaacagaatgta

SEQ ID NO: 676884 - DNA, 15 bp, Homo sapiens
tcaaacagaatgtag

SEQ ID NO: 676885 - DNA, 15 bp, Homo sapiens
caaacagaatgtagc

SEQ ID NO: 676886 - DNA, 15 bp, Homo sapiens
aaacagaatgtagct

SEQ ID NO: 676887 - DNA, 15 bp, Homo sapiens
aacagaatgtagcta

SEQ ID NO: 676888 - DNA, 15 bp, Homo sapiens
acagaatgtagctag

SEQ ID NO: 676889 - DNA, 15 bp, Homo sapiens
cagaatgtagctaga

SEQ ID NO: 676890 - DNA, 15 bp, Homo sapiens
agaatgtagctagaa

SEQ ID NO: 676891 - DNA, 15 bp, Homo sapiens
gaatgtagctagaag

SEQ ID NO: 676892 - DNA, 15 bp, Homo sapiens
aatgtagctagaagt

SEQ ID NO: 676893 - DNA, 15 bp, Homo sapiens
atgtagctagaagtc

SEQ ID NO: 676894 - DNA, 15 bp, Homo sapiens
tgtagctagaagtcc

SEQ ID NO: 676895 - DNA, 15 bp, Homo sapiens
gtagctagaagtcca

SEQ ID NO: 676896 - DNA, 15 bp, Homo sapiens
tagctagaagtccag

SEQ ID NO: 676897 - DNA, 15 bp, Homo sapiens
agctagaagtccagt

SEQ ID NO: 676898 - DNA, 15 bp, Homo sapiens
gctagaagtccagtt

SEQ ID NO: 676899 - DNA, 15 bp, Homo sapiens
ctagaagtccagttt

SEQ ID NO: 676900 - DNA, 15 bp, Homo sapiens
tagaagtccagtttg

SEQ ID NO: 676901 - DNA, 15 bp, Homo sapiens
agaagtccagtttgg

SEQ ID NO: 676902 - DNA, 15 bp, Homo sapiens
gaagtccagtttggc

SEQ ID NO: 676903 - DNA, 15 bp, Homo sapiens
aagtccagtttggct

SEQ ID NO: 676904 - DNA, 15 bp, Homo sapiens
agtccagtttggctt

SEQ ID NO: 676905 - DNA, 15 bp, Homo sapiens
gtccagtttggcttc

SEQ ID NO: 676906 - DNA, 15 bp, Homo sapiens
tccagtttggcttca

SEQ ID NO: 676907 - DNA, 15 bp, Homo sapiens
ccagtttggcttcaa

SEQ ID NO: 676908 - DNA, 15 bp, Homo sapiens
cagtttggcttcaaa

SEQ ID NO: 676909 - DNA, 15 bp, Homo sapiens
agtttggcttcaaaa

SEQ ID NO: 676910 - DNA, 15 bp, Homo sapiens
gtttggcttcaaaac

SEQ ID NO: 676911 - DNA, 15 bp, Homo sapiens
tttggcttcaaaacc

SEQ ID NO: 676912 - DNA, 15 bp, Homo sapiens
ttggcttcaaaacct

SEQ ID NO: 676913 - DNA, 15 bp, Homo sapiens
tggcttcaaaacctg

SEQ ID NO: 676914 - DNA, 15 bp, Homo sapiens
ggcttcaaaacctgt

SEQ ID NO: 676915 - DNA, 15 bp, Homo sapiens
gcttcaaaacctgtg

SEQ ID NO: 676916 - DNA, 15 bp, Homo sapiens
cttcaaaacctgtgc

SEQ ID NO: 676917 - DNA, 15 bp, Homo sapiens
ttcaaaacctgtgct

SEQ ID NO: 676918 - DNA, 15 bp, Homo sapiens
tcaaaacctgtgcta

SEQ ID NO: 676919 - DNA, 15 bp, Homo sapiens
caaaacctgtgctag

SEQ ID NO: 676920 - DNA, 15 bp, Homo sapiens
aaaacctgtgctagt

SEQ ID NO: 676921 - DNA, 15 bp, Homo sapiens
aaacctgtgctagta

SEQ ID NO: 676922 - DNA, 15 bp, Homo sapiens
aacctgtgctagtac

SEQ ID NO: 676923 - DNA, 15 bp, Homo sapiens
acctgtgctagtact

SEQ ID NO: 676924 - DNA, 15 bp, Homo sapiens
cctgtgctagtactc

SEQ ID NO: 676925 - DNA, 15 bp, Homo sapiens
ctgtgctagtactca

SEQ ID NO: 676926 - DNA, 15 bp, Homo sapiens
tgtgctagtactcat

SEQ ID NO: 676927 - DNA, 15 bp, Homo sapiens
gtgctagtactcatg

SEQ ID NO: 676928 - DNA, 15 bp, Homo sapiens
tgctagtactcatgc

SEQ ID NO: 676929 - DNA, 15 bp, Homo sapiens
gctagtactcatgct

SEQ ID NO: 676930 - DNA, 15 bp, Homo sapiens
ctagtactcatgctt

SEQ ID NO: 676931 - DNA, 15 bp, Homo sapiens
tagtactcatgcttc

SEQ ID NO: 676932 - DNA, 15 bp, Homo sapiens
agtactcatgcttct

SEQ ID NO: 676933 - DNA, 15 bp, Homo sapiens
gtactcatgcttctg

SEQ ID NO: 676934 - DNA, 15 bp, Homo sapiens
tactcatgcttctga

SEQ ID NO: 676935 - DNA, 15 bp, Homo sapiens
actcatgcttctgac

SEQ ID NO: 676936 - DNA, 15 bp, Homo sapiens
ctcatgcttctgact

SEQ ID NO: 676937 - DNA, 15 bp, Homo sapiens
tcatgcttctgactg

SEQ ID NO: 676938 - DNA, 15 bp, Homo sapiens
catgcttctgactgg

SEQ ID NO: 676939 - DNA, 15 bp, Homo sapiens
atgcttctgactggt

SEQ ID NO: 676940 - DNA, 15 bp, Homo sapiens
tgcttctgactggta

SEQ ID NO: 676941 - DNA, 15 bp, Homo sapiens
gcttctgactggtag

SEQ ID NO: 676942 - DNA, 15 bp, Homo sapiens
cttctgactggtagc

SEQ ID NO: 676943 - DNA, 15 bp, Homo sapiens
ttctgactggtagct

SEQ ID NO: 676944 - DNA, 15 bp, Homo sapiens
tctgactggtagctg

SEQ ID NO: 676945 - DNA, 15 bp, Homo sapiens
ctgactggtagctgc

SEQ ID NO: 676946 - DNA, 15 bp, Homo sapiens
tgactggtagctgca

SEQ ID NO: 676947 - DNA, 15 bp, Homo sapiens
gactggtagctgcaa

SEQ ID NO: 676948 - DNA, 15 bp, Homo sapiens
actggtagctgcaag

SEQ ID NO: 676949 - DNA, 15 bp, Homo sapiens
ctggtagctgcaagg

SEQ ID NO: 676950 - DNA, 15 bp, Homo sapiens
tggtagctgcaaggg

SEQ ID NO: 676951 - DNA, 15 bp, Homo sapiens
ggtagctgcaagggg

SEQ ID NO: 676952 - DNA, 15 bp, Homo sapiens
gtagctgcaaggggt

SEQ ID NO: 676953 - DNA, 15 bp, Homo sapiens
tagctgcaaggggtg

SEQ ID NO: 676954 - DNA, 15 bp, Homo sapiens
agctgcaaggggtgg

SEQ ID NO: 676955 - DNA, 15 bp, Homo sapiens
gctgcaaggggtggg

SEQ ID NO: 676956 - DNA, 15 bp, Homo sapiens
ctgcaaggggtgggg

SEQ ID NO: 676957 - DNA, 15 bp, Homo sapiens
tgcaaggggtggggg

SEQ ID NO: 676958 - DNA, 15 bp, Homo sapiens
gcaaggggtggggga

SEQ ID NO: 676959 - DNA, 15 bp, Homo sapiens
caaggggtgggggat

SEQ ID NO: 676960 - DNA, 15 bp, Homo sapiens
aaggggtgggggata

SEQ ID NO: 676961 - DNA, 15 bp, Homo sapiens
aggggtgggggatac

SEQ ID NO: 676962 - DNA, 15 bp, Homo sapiens
ggggtgggggatact

SEQ ID NO: 676963 - DNA, 15 bp, Homo sapiens
gggtgggggatactc

SEQ ID NO: 676964 - DNA, 15 bp, Homo sapiens
ggtgggggatactcg

SEQ ID NO: 676965 - DNA, 15 bp, Homo sapiens
gtgggggatactcgg

SEQ ID NO: 676966 - DNA, 15 bp, Homo sapiens
tgggggatactcggg

SEQ ID NO: 676967 - DNA, 15 bp, Homo sapiens
gggggatactcggga

SEQ ID NO: 676968 - DNA, 15 bp, Homo sapiens
ggggatactcgggat

SEQ ID NO: 676969 - DNA, 15 bp, Homo sapiens
gggatactcgggata

SEQ ID NO: 676970 - DNA, 15 bp, Homo sapiens
ggatactcgggatac

SEQ ID NO: 676971 - DNA, 15 bp, Homo sapiens
gatactcgggatact

SEQ ID NO: 676972 - DNA, 15 bp, Homo sapiens
atactcgggatactc

SEQ ID NO: 676973 - DNA, 15 bp, Homo sapiens
tactcgggatactca

SEQ ID NO: 676974 - DNA, 15 bp, Homo sapiens
actcgggatactcat

SEQ ID NO: 676975 - DNA, 15 bp, Homo sapiens
ctcgggatactcata

SEQ ID NO: 676976 - DNA, 15 bp, Homo sapiens
tcgggatactcataa

SEQ ID NO: 676977 - DNA, 15 bp, Homo sapiens
cgggatactcataaa

SEQ ID NO: 676978 - DNA, 15 bp, Homo sapiens
gggatactcataaag

SEQ ID NO: 676979 - DNA, 15 bp, Homo sapiens
ggatactcataaagc

SEQ ID NO: 676980 - DNA, 15 bp, Homo sapiens
gatactcataaagcc

SEQ ID NO: 676981 - DNA, 15 bp, Homo sapiens
atactcataaagccg

SEQ ID NO: 676982 - DNA, 15 bp, Homo sapiens
tactcataaagccgc

SEQ ID NO: 676983 - DNA, 15 bp, Homo sapiens
actcataaagccgct

SEQ ID NO: 676984 - DNA, 15 bp, Homo sapiens
ctcataaagccgcta

SEQ ID NO: 676985 - DNA, 15 bp, Homo sapiens
tcataaagccgctac

SEQ ID NO: 676986 - DNA, 15 bp, Homo sapiens
cataaagccgctacc

SEQ ID NO: 676987 - DNA, 15 bp, Homo sapiens
ataaagccgctacca

SEQ ID NO: 676988 - DNA, 15 bp, Homo sapiens
taaagccgctaccac

SEQ ID NO: 676989 - DNA, 15 bp, Homo sapiens
aaagccgctaccact

SEQ ID NO: 676990 - DNA, 15 bp, Homo sapiens
aagccgctaccactt

SEQ ID NO: 676991 - DNA, 15 bp, Homo sapiens
agccgctaccacttt

SEQ ID NO: 676992 - DNA, 15 bp, Homo sapiens
gccgctaccactttt

SEQ ID NO: 676993 - DNA, 15 bp, Homo sapiens
ccgctaccacttttt

SEQ ID NO: 676994 - DNA, 15 bp, Homo sapiens
cgctaccactttttt

SEQ ID NO: 676995 - DNA, 15 bp, Homo sapiens
gctaccacttttttg

SEQ ID NO: 676996 - DNA, 15 bp, Homo sapiens
ctaccacttttttga

SEQ ID NO: 676997 - DNA, 15 bp, Homo sapiens
taccacttttttgaa

SEQ ID NO: 676998 - DNA, 15 bp, Homo sapiens
accacttttttgaaa

SEQ ID NO: 676999 - DNA, 15 bp, Homo sapiens
ccacttttttgaaaa

SEQ ID NO: 677000 - DNA, 15 bp, Homo sapiens
cacttttttgaaaat

SEQ ID NO: 677001 - DNA, 15 bp, Homo sapiens
acttttttgaaaatc

SEQ ID NO: 677002 - DNA, 15 bp, Homo sapiens
cttttttgaaaatca

SEQ ID NO: 677003 - DNA, 15 bp, Homo sapiens
ttttttgaaaatcaa

SEQ ID NO: 677004 - DNA, 15 bp, Homo sapiens
tttttgaaaatcaat

SEQ ID NO: 677005 - DNA, 15 bp, Homo sapiens
ttttgaaaatcaatt

SEQ ID NO: 677006 - DNA, 15 bp, Homo sapiens
tttgaaaatcaattt

SEQ ID NO: 677007 - DNA, 15 bp, Homo sapiens
ttgaaaatcaatttt

SEQ ID NO: 677008 - DNA, 15 bp, Homo sapiens
tgaaaatcaattttt

SEQ ID NO: 677009 - DNA, 15 bp, Homo sapiens
gaaaatcaatttttc

SEQ ID NO: 677010 - DNA, 15 bp, Homo sapiens
aaaatcaatttttca

SEQ ID NO: 677011 - DNA, 15 bp, Homo sapiens
aaatcaatttttcag

SEQ ID NO: 677012 - DNA, 15 bp, Homo sapiens
aatcaatttttcagt

SEQ ID NO: 677013 - DNA, 15 bp, Homo sapiens
atcaatttttcagta

SEQ ID NO: 677014 - DNA, 15 bp, Homo sapiens
tcaatttttcagtag

SEQ ID NO: 677015 - DNA, 15 bp, Homo sapiens
caatttttcagtagt

SEQ ID NO: 677016 - DNA, 15 bp, Homo sapiens
aatttttcagtagtt

SEQ ID NO: 677017 - DNA, 15 bp, Homo sapiens
atttttcagtagttt

SEQ ID NO: 677018 - DNA, 15 bp, Homo sapiens
tttttcagtagtttt

SEQ ID NO: 677019 - DNA, 15 bp, Homo sapiens
ttttcagtagttttc

SEQ ID NO: 677020 - DNA, 15 bp, Homo sapiens
tttcagtagttttca

SEQ ID NO: 677021 - DNA, 15 bp, Homo sapiens
ttcagtagttttcaa

SEQ ID NO: 677022 - DNA, 15 bp, Homo sapiens
tcagtagttttcaaa

SEQ ID NO: 677023 - DNA, 15 bp, Homo sapiens
cagtagttttcaaaa

SEQ ID NO: 677024 - DNA, 15 bp, Homo sapiens
agtagttttcaaaaa

SEQ ID NO: 677025 - DNA, 15 bp, Homo sapiens
gtagttttcaaaaac

SEQ ID NO: 677026 - DNA, 15 bp, Homo sapiens
tagttttcaaaaact

SEQ ID NO: 677027 - DNA, 15 bp, Homo sapiens
agttttcaaaaactt

SEQ ID NO: 677028 - DNA, 15 bp, Homo sapiens
gttttcaaaaacttg

SEQ ID NO: 677029 - DNA, 15 bp, Homo sapiens
ttttcaaaaacttga

SEQ ID NO: 677030 - DNA, 15 bp, Homo sapiens
tttcaaaaacttgag

SEQ ID NO: 677031 - DNA, 15 bp, Homo sapiens
ttcaaaaacttgaga

SEQ ID NO: 677032 - DNA, 15 bp, Homo sapiens
tcaaaaacttgagaa

SEQ ID NO: 677033 - DNA, 15 bp, Homo sapiens
caaaaacttgagaat

SEQ ID NO: 677034 - DNA, 15 bp, Homo sapiens
aaaaacttgagaatg

SEQ ID NO: 677035 - DNA, 15 bp, Homo sapiens
aaaacttgagaatga

SEQ ID NO: 677036 - DNA, 15 bp, Homo sapiens
aaacttgagaatgaa

SEQ ID NO: 677037 - DNA, 15 bp, Homo sapiens
aacttgagaatgaac

SEQ ID NO: 677038 - DNA, 15 bp, Homo sapiens
acttgagaatgaacc

SEQ ID NO: 677039 - DNA, 15 bp, Homo sapiens
cttgagaatgaacca

SEQ ID NO: 677040 - DNA, 15 bp, Homo sapiens
ttgagaatgaaccaa

SEQ ID NO: 677041 - DNA, 15 bp, Homo sapiens
tgagaatgaaccaac

SEQ ID NO: 677042 - DNA, 15 bp, Homo sapiens
gagaatgaaccaact

SEQ ID NO: 677043 - DNA, 15 bp, Homo sapiens
agaatgaaccaactt

SEQ ID NO: 677044 - DNA, 15 bp, Homo sapiens
gaatgaaccaacttt

SEQ ID NO: 677045 - DNA, 15 bp, Homo sapiens
aatgaaccaacttta

SEQ ID NO: 677046 - DNA, 15 bp, Homo sapiens
atgaaccaactttac

SEQ ID NO: 677047 - DNA, 15 bp, Homo sapiens
tgaaccaactttacc

SEQ ID NO: 677048 - DNA, 15 bp, Homo sapiens
gaaccaactttacca

SEQ ID NO: 677049 - DNA, 15 bp, Homo sapiens
aaccaactttaccaa

SEQ ID NO: 677050 - DNA, 15 bp, Homo sapiens
accaactttaccaag

SEQ ID NO: 677051 - DNA, 15 bp, Homo sapiens
ccaactttaccaaga

SEQ ID NO: 677052 - DNA, 15 bp, Homo sapiens
caactttaccaagaa

SEQ ID NO: 677053 - DNA, 15 bp, Homo sapiens
aactttaccaagaat

SEQ ID NO: 677054 - DNA, 15 bp, Homo sapiens
actttaccaagaatg

SEQ ID NO: 677055 - DNA, 15 bp, Homo sapiens
ctttaccaagaatgc

SEQ ID NO: 677056 - DNA, 15 bp, Homo sapiens
tttaccaagaatgcc

SEQ ID NO: 677057 - DNA, 15 bp, Homo sapiens
ttaccaagaatgcca

SEQ ID NO: 677058 - DNA, 15 bp, Homo sapiens
taccaagaatgccat

SEQ ID NO: 677059 - DNA, 15 bp, Homo sapiens
accaagaatgccatt

SEQ ID NO: 677060 - DNA, 15 bp, Homo sapiens
ccaagaatgccattg

SEQ ID NO: 677061 - DNA, 15 bp, Homo sapiens
caagaatgccattgg

SEQ ID NO: 677062 - DNA, 15 bp, Homo sapiens
aagaatgccattggt

SEQ ID NO: 677063 - DNA, 15 bp, Homo sapiens
agaatgccattggta

SEQ ID NO: 677064 - DNA, 15 bp, Homo sapiens
gaatgccattggtaa

SEQ ID NO: 677065 - DNA, 15 bp, Homo sapiens
aatgccattggtaac

SEQ ID NO: 677066 - DNA, 15 bp, Homo sapiens
atgccattggtaaca

SEQ ID NO: 677067 - DNA, 15 bp, Homo sapiens
tgccattggtaacac

SEQ ID NO: 677068 - DNA, 15 bp, Homo sapiens
gccattggtaacact

SEQ ID NO: 677069 - DNA, 15 bp, Homo sapiens
ccattggtaacactg

SEQ ID NO: 677070 - DNA, 15 bp, Homo sapiens
cattggtaacactga

SEQ ID NO: 677071 - DNA, 15 bp, Homo sapiens
attggtaacactgaa

SEQ ID NO: 677072 - DNA, 15 bp, Homo sapiens
ttggtaacactgaac

SEQ ID NO: 677073 - DNA, 15 bp, Homo sapiens
tggtaacactgaacg

SEQ ID NO: 677074 - DNA, 15 bp, Homo sapiens
ggtaacactgaacgc

SEQ ID NO: 677075 - DNA, 15 bp, Homo sapiens
gtaacactgaacgct

SEQ ID NO: 677076 - DNA, 15 bp, Homo sapiens
taacactgaacgctg

SEQ ID NO: 677077 - DNA, 15 bp, Homo sapiens
aacactgaacgctgt

SEQ ID NO: 677078 - DNA, 15 bp, Homo sapiens
acactgaacgctgta

SEQ ID NO: 677079 - DNA, 15 bp, Homo sapiens
cactgaacgctgtaa

SEQ ID NO: 677080 - DNA, 15 bp, Homo sapiens
actgaacgctgtaaa

SEQ ID NO: 677081 - DNA, 15 bp, Homo sapiens
ctgaacgctgtaaaa

SEQ ID NO: 677082 - DNA, 15 bp, Homo sapiens
tgaacgctgtaaaat

SEQ ID NO: 677083 - DNA, 15 bp, Homo sapiens
gaacgctgtaaaata

SEQ ID NO: 677084 - DNA, 15 bp, Homo sapiens
aacgctgtaaaatag

SEQ ID NO: 677085 - DNA, 15 bp, Homo sapiens
acgctgtaaaatagc

SEQ ID NO: 677086 - DNA, 15 bp, Homo sapiens
cgctgtaaaatagct

SEQ ID NO: 677087 - DNA, 15 bp, Homo sapiens
gctgtaaaatagctt

SEQ ID NO: 677088 - DNA, 15 bp, Homo sapiens
ctgtaaaatagctta

SEQ ID NO: 677089 - DNA, 15 bp, Homo sapiens
tgtaaaatagcttaa

SEQ ID NO: 677090 - DNA, 15 bp, Homo sapiens
gtaaaatagcttaaa

SEQ ID NO: 677091 - DNA, 15 bp, Homo sapiens
taaaatagcttaaaa

SEQ ID NO: 677092 - DNA, 15 bp, Homo sapiens
aaaatagcttaaaaa

SEQ ID NO: 677093 - DNA, 15 bp, Homo sapiens
aaatagcttaaaaag

SEQ ID NO: 677094 - DNA, 15 bp, Homo sapiens
aatagcttaaaaagc

SEQ ID NO: 677095 - DNA, 15 bp, Homo sapiens
atagcttaaaaagcg

SEQ ID NO: 677096 - DNA, 15 bp, Homo sapiens
tagcttaaaaagcgc

SEQ ID NO: 677097 - DNA, 15 bp, Homo sapiens
agcttaaaaagcgca

SEQ ID NO: 677098 - DNA, 15 bp, Homo sapiens
gcttaaaaagcgcat

SEQ ID NO: 677099 - DNA, 15 bp, Homo sapiens
cttaaaaagcgcatt

SEQ ID NO: 677100 - DNA, 15 bp, Homo sapiens
ttaaaaagcgcattt

SEQ ID NO: 677101 - DNA, 15 bp, Homo sapiens
taaaaagcgcattta

SEQ ID NO: 677102 - DNA, 15 bp, Homo sapiens
aaaaagcgcatttac

SEQ ID NO: 677103 - DNA, 15 bp, Homo sapiens
aaaagcgcatttaca

SEQ ID NO: 677104 - DNA, 15 bp, Homo sapiens
aaagcgcatttacat

SEQ ID NO: 677105 - DNA, 15 bp, Homo sapiens
aagcgcatttacatt

SEQ ID NO: 677106 - DNA, 15 bp, Homo sapiens
agcgcatttacatta

SEQ ID NO: 677107 - DNA, 15 bp, Homo sapiens
gcgcatttacattat

SEQ ID NO: 677108 - DNA, 15 bp, Homo sapiens
cgcatttacattatg

SEQ ID NO: 677109 - DNA, 15 bp, Homo sapiens
gcatttacattatga

SEQ ID NO: 677110 - DNA, 15 bp, Homo sapiens
catttacattatgac

SEQ ID NO: 677111 - DNA, 15 bp, Homo sapiens
atttacattatgact

SEQ ID NO: 677112 - DNA, 15 bp, Homo sapiens
tttacattatgacta

SEQ ID NO: 677113 - DNA, 15 bp, Homo sapiens
ttacattatgactac

SEQ ID NO: 677114 - DNA, 15 bp, Homo sapiens
tacattatgactaca

SEQ ID NO: 677115 - DNA, 15 bp, Homo sapiens
acattatgactacag

SEQ ID NO: 677116 - DNA, 15 bp, Homo sapiens
cattatgactacagt

SEQ ID NO: 677117 - DNA, 15 bp, Homo sapiens
attatgactacagtt

SEQ ID NO: 677118 - DNA, 15 bp, Homo sapiens
ttatgactacagttg

SEQ ID NO: 677119 - DNA, 15 bp, Homo sapiens
tatgactacagttgt

SEQ ID NO: 677120 - DNA, 15 bp, Homo sapiens
atgactacagttgta

SEQ ID NO: 677121 - DNA, 15 bp, Homo sapiens
tgactacagttgtaa

SEQ ID NO: 677122 - DNA, 15 bp, Homo sapiens
gactacagttgtaaa

SEQ ID NO: 677123 - DNA, 15 bp, Homo sapiens
actacagttgtaaag

SEQ ID NO: 677124 - DNA, 15 bp, Homo sapiens
ctacagttgtaaaga

SEQ ID NO: 677125 - DNA, 15 bp, Homo sapiens
tacagttgtaaagag

SEQ ID NO: 677126 - DNA, 15 bp, Homo sapiens
acagttgtaaagagt

SEQ ID NO: 677127 - DNA, 15 bp, Homo sapiens
cagttgtaaagagta

SEQ ID NO: 677128 - DNA, 15 bp, Homo sapiens
agttgtaaagagtag

SEQ ID NO: 677129 - DNA, 15 bp, Homo sapiens
gttgtaaagagtagg

SEQ ID NO: 677130 - DNA, 15 bp, Homo sapiens
ttgtaaagagtaggt

SEQ ID NO: 677131 - DNA, 15 bp, Homo sapiens
tgtaaagagtaggtt

SEQ ID NO: 677132 - DNA, 15 bp, Homo sapiens
gtaaagagtaggttg

SEQ ID NO: 677133 - DNA, 15 bp, Homo sapiens
taaagagtaggttgt

SEQ ID NO: 677134 - DNA, 15 bp, Homo sapiens
aaagagtaggttgtg

SEQ ID NO: 677135 - DNA, 15 bp, Homo sapiens
aagagtaggttgtgg

SEQ ID NO: 677136 - DNA, 15 bp, Homo sapiens
agagtaggttgtgga

SEQ ID NO: 677137 - DNA, 15 bp, Homo sapiens
gagtaggttgtggaa

SEQ ID NO: 677138 - DNA, 15 bp, Homo sapiens
agtaggttgtggaaa

SEQ ID NO: 677139 - DNA, 15 bp, Homo sapiens
gtaggttgtggaaaa

SEQ ID NO: 677140 - DNA, 15 bp, Homo sapiens
taggttgtggaaaag

SEQ ID NO: 677141 - DNA, 15 bp, Homo sapiens
aggttgtggaaaagg

SEQ ID NO: 677142 - DNA, 15 bp, Homo sapiens
ggttgtggaaaagga

SEQ ID NO: 677143 - DNA, 15 bp, Homo sapiens
gttgtggaaaaggaa

SEQ ID NO: 677144 - DNA, 15 bp, Homo sapiens
ttgtggaaaaggaat

SEQ ID NO: 677145 - DNA, 15 bp, Homo sapiens
tgtggaaaaggaata

SEQ ID NO: 677146 - DNA, 15 bp, Homo sapiens
gtggaaaaggaataa

SEQ ID NO: 677147 - DNA, 15 bp, Homo sapiens
tggaaaaggaataag

SEQ ID NO: 677148 - DNA, 15 bp, Homo sapiens
ggaaaaggaataagt

SEQ ID NO: 677149 - DNA, 15 bp, Homo sapiens
gaaaaggaataagta

SEQ ID NO: 677150 - DNA, 15 bp, Homo sapiens
aaaaggaataagtaa

SEQ ID NO: 677151 - DNA, 15 bp, Homo sapiens
aaaggaataagtaaa

SEQ ID NO: 677152 - DNA, 15 bp, Homo sapiens
aaggaataagtaaac

SEQ ID NO: 677153 - DNA, 15 bp, Homo sapiens
aggaataagtaaaca

SEQ ID NO: 677154 - DNA, 15 bp, Homo sapiens
ggaataagtaaacat

SEQ ID NO: 677155 - DNA, 15 bp, Homo sapiens
gaataagtaaacatg

SEQ ID NO: 677156 - DNA, 15 bp, Homo sapiens
aataagtaaacatga

SEQ ID NO: 677157 - DNA, 15 bp, Homo sapiens
ataagtaaacatgat

SEQ ID NO: 677158 - DNA, 15 bp, Homo sapiens
taagtaaacatgatt

SEQ ID NO: 677159 - DNA, 15 bp, Homo sapiens
aagtaaacatgattg

SEQ ID NO: 677160 - DNA, 15 bp, Homo sapiens
agtaaacatgattgc

SEQ ID NO: 677161 - DNA, 15 bp, Homo sapiens
gtaaacatgattgct

SEQ ID NO: 677162 - DNA, 15 bp, Homo sapiens
taaacatgattgcta

SEQ ID NO: 677163 - DNA, 15 bp, Homo sapiens
aaacatgattgctat

SEQ ID NO: 677164 - DNA, 15 bp, Homo sapiens
aacatgattgctata

SEQ ID NO: 677165 - DNA, 15 bp, Homo sapiens
acatgattgctatat

SEQ ID NO: 677166 - DNA, 15 bp, Homo sapiens
catgattgctatatt

SEQ ID NO: 677167 - DNA, 15 bp, Homo sapiens
atgattgctatattt

SEQ ID NO: 677168 - DNA, 15 bp, Homo sapiens
tgattgctatatttg

SEQ ID NO: 677169 - DNA, 15 bp, Homo sapiens
gattgctatatttga

SEQ ID NO: 677170 - DNA, 15 bp, Homo sapiens
attgctatatttgag

SEQ ID NO: 677171 - DNA, 15 bp, Homo sapiens
ttgctatatttgagc

SEQ ID NO: 677172 - DNA, 15 bp, Homo sapiens
tgctatatttgagcc

SEQ ID NO: 677173 - DNA, 15 bp, Homo sapiens
gctatatttgagcct

SEQ ID NO: 677174 - DNA, 15 bp, Homo sapiens
ctatatttgagcctc

SEQ ID NO: 677175 - DNA, 15 bp, Homo sapiens
tatatttgagcctca

SEQ ID NO: 677176 - DNA, 15 bp, Homo sapiens
atatttgagcctcag

SEQ ID NO: 677177 - DNA, 15 bp, Homo sapiens
tatttgagcctcaga

SEQ ID NO: 677178 - DNA, 15 bp, Homo sapiens
atttgagcctcagat

SEQ ID NO: 677179 - DNA, 15 bp, Homo sapiens
tttgagcctcagatt

SEQ ID NO: 677180 - DNA, 15 bp, Homo sapiens
ttgagcctcagattt

SEQ ID NO: 677181 - DNA, 15 bp, Homo sapiens
tgagcctcagatttg

SEQ ID NO: 677182 - DNA, 15 bp, Homo sapiens
gagcctcagatttga

SEQ ID NO: 677183 - DNA, 15 bp, Homo sapiens
agcctcagatttgaa

SEQ ID NO: 677184 - DNA, 15 bp, Homo sapiens
gcctcagatttgaat

SEQ ID NO: 677185 - DNA, 15 bp, Homo sapiens
cctcagatttgaatg

SEQ ID NO: 677186 - DNA, 15 bp, Homo sapiens
ctcagatttgaatgt

SEQ ID NO: 677187 - DNA, 15 bp, Homo sapiens
tcagatttgaatgtc

SEQ ID NO: 677188 - DNA, 15 bp, Homo sapiens
cagatttgaatgtca

SEQ ID NO: 677189 - DNA, 15 bp, Homo sapiens
agatttgaatgtcac

SEQ ID NO: 677190 - DNA, 15 bp, Homo sapiens
gatttgaatgtcacc

SEQ ID NO: 677191 - DNA, 15 bp, Homo sapiens
atttgaatgtcaccc

SEQ ID NO: 677192 - DNA, 15 bp, Homo sapiens
tttgaatgtcaccct

SEQ ID NO: 677193 - DNA, 15 bp, Homo sapiens
ttgaatgtcaccctg

SEQ ID NO: 677194 - DNA, 15 bp, Homo sapiens
tgaatgtcaccctgc

SEQ ID NO: 677195 - DNA, 15 bp, Homo sapiens
gaatgtcaccctgct

SEQ ID NO: 677196 - DNA, 15 bp, Homo sapiens
aatgtcaccctgctt

SEQ ID NO: 677197 - DNA, 15 bp, Homo sapiens
atgtcaccctgcttt

SEQ ID NO: 677198 - DNA, 15 bp, Homo sapiens
tgtcaccctgctttt

SEQ ID NO: 677199 - DNA, 15 bp, Homo sapiens
gtcaccctgcttttc

SEQ ID NO: 677200 - DNA, 15 bp, Homo sapiens
tcaccctgcttttcc

SEQ ID NO: 677201 - DNA, 15 bp, Homo sapiens
caccctgcttttcct

SEQ ID NO: 677202 - DNA, 15 bp, Homo sapiens
accctgcttttcctc

SEQ ID NO: 677203 - DNA, 15 bp, Homo sapiens
ccctgcttttcctct

SEQ ID NO: 677204 - DNA, 15 bp, Homo sapiens
cctgcttttcctctt

SEQ ID NO: 677205 - DNA, 15 bp, Homo sapiens
ctgcttttcctcttt

SEQ ID NO: 677206 - DNA, 15 bp, Homo sapiens
tgcttttcctctttt

SEQ ID NO: 677207 - DNA, 15 bp, Homo sapiens
gcttttcctcttttt

SEQ ID NO: 677208 - DNA, 15 bp, Homo sapiens
cttttcctctttttt

SEQ ID NO: 677209 - DNA, 15 bp, Homo sapiens
ttttcctctttttta

SEQ ID NO: 677210 - DNA, 15 bp, Homo sapiens
tttcctcttttttag

SEQ ID NO: 677211 - DNA, 15 bp, Homo sapiens
ttcctcttttttaga

SEQ ID NO: 677212 - DNA, 15 bp, Homo sapiens
tcctcttttttagaa

SEQ ID NO: 677213 - DNA, 15 bp, Homo sapiens
cctcttttttagaat

SEQ ID NO: 677214 - DNA, 15 bp, Homo sapiens
ctcttttttagaatc

SEQ ID NO: 677215 - DNA, 15 bp, Homo sapiens
tcttttttagaatca

SEQ ID NO: 677216 - DNA, 15 bp, Homo sapiens
cttttttagaatcag

SEQ ID NO: 677217 - DNA, 15 bp, Homo sapiens
ttttttagaatcagg

SEQ ID NO: 677218 - DNA, 15 bp, Homo sapiens
tttttagaatcaggg

SEQ ID NO: 677219 - DNA, 15 bp, Homo sapiens
ttttagaatcaggga

SEQ ID NO: 677220 - DNA, 15 bp, Homo sapiens
tttagaatcagggac

SEQ ID NO: 677221 - DNA, 15 bp, Homo sapiens
ttagaatcagggact

SEQ ID NO: 677222 - DNA, 15 bp, Homo sapiens
tagaatcagggactc

SEQ ID NO: 677223 - DNA, 15 bp, Homo sapiens
agaatcagggactca

SEQ ID NO: 677224 - DNA, 15 bp, Homo sapiens
gaatcagggactcac

SEQ ID NO: 677225 - DNA, 15 bp, Homo sapiens
aatcagggactcact

SEQ ID NO: 677226 - DNA, 15 bp, Homo sapiens
atcagggactcactt

SEQ ID NO: 677227 - DNA, 15 bp, Homo sapiens
tcagggactcacttt

SEQ ID NO: 677228 - DNA, 15 bp, Homo sapiens
cagggactcactttg

SEQ ID NO: 677229 - DNA, 15 bp, Homo sapiens
agggactcactttgt

SEQ ID NO: 677230 - DNA, 15 bp, Homo sapiens
gggactcactttgtc

SEQ ID NO: 677231 - DNA, 15 bp, Homo sapiens
ggactcactttgtca

SEQ ID NO: 677232 - DNA, 15 bp, Homo sapiens
gactcactttgtcac

SEQ ID NO: 677233 - DNA, 15 bp, Homo sapiens
actcactttgtcaca

SEQ ID NO: 677234 - DNA, 15 bp, Homo sapiens
ctcactttgtcacat

SEQ ID NO: 677235 - DNA, 15 bp, Homo sapiens
tcactttgtcacata

SEQ ID NO: 677236 - DNA, 15 bp, Homo sapiens
cactttgtcacatag

SEQ ID NO: 677237 - DNA, 15 bp, Homo sapiens
actttgtcacatagg

SEQ ID NO: 677238 - DNA, 15 bp, Homo sapiens
ctttgtcacataggc

SEQ ID NO: 677239 - DNA, 15 bp, Homo sapiens
tttgtcacataggct

SEQ ID NO: 677240 - DNA, 15 bp, Homo sapiens
ttgtcacataggctg

SEQ ID NO: 677241 - DNA, 15 bp, Homo sapiens
tgtcacataggctgg

SEQ ID NO: 677242 - DNA, 15 bp, Homo sapiens
gtcacataggctgga

SEQ ID NO: 677243 - DNA, 15 bp, Homo sapiens
tcacataggctggag

SEQ ID NO: 677244 - DNA, 15 bp, Homo sapiens
cacataggctggagt

SEQ ID NO: 677245 - DNA, 15 bp, Homo sapiens
acataggctggagtg

SEQ ID NO: 677246 - DNA, 15 bp, Homo sapiens
cataggctggagtgc

SEQ ID NO: 677247 - DNA, 15 bp, Homo sapiens
ataggctggagtgca

SEQ ID NO: 677248 - DNA, 15 bp, Homo sapiens
taggctggagtgcaa

SEQ ID NO: 677249 - DNA, 15 bp, Homo sapiens
aggctggagtgcaat

SEQ ID NO: 677250 - DNA, 15 bp, Homo sapiens
ggctggagtgcaatg

SEQ ID NO: 677251 - DNA, 15 bp, Homo sapiens
gctggagtgcaatgg

SEQ ID NO: 677252 - DNA, 15 bp, Homo sapiens
ctggagtgcaatggt

SEQ ID NO: 677253 - DNA, 15 bp, Homo sapiens
tggagtgcaatggtg

SEQ ID NO: 677254 - DNA, 15 bp, Homo sapiens
ggagtgcaatggtgt

SEQ ID NO: 677255 - DNA, 15 bp, Homo sapiens
gagtgcaatggtgtg

SEQ ID NO: 677256 - DNA, 15 bp, Homo sapiens
agtgcaatggtgtga

SEQ ID NO: 677257 - DNA, 15 bp, Homo sapiens
gtgcaatggtgtgat

SEQ ID NO: 677258 - DNA, 15 bp, Homo sapiens
tgcaatggtgtgatc

SEQ ID NO: 677259 - DNA, 15 bp, Homo sapiens
gcaatggtgtgatca

SEQ ID NO: 677260 - DNA, 15 bp, Homo sapiens
caatggtgtgatcat

SEQ ID NO: 677261 - DNA, 15 bp, Homo sapiens
aatggtgtgatcatg

SEQ ID NO: 677262 - DNA, 15 bp, Homo sapiens
atggtgtgatcatgg

SEQ ID NO: 677263 - DNA, 15 bp, Homo sapiens
tggtgtgatcatgga

SEQ ID NO: 677264 - DNA, 15 bp, Homo sapiens
ggtgtgatcatggat

SEQ ID NO: 677265 - DNA, 15 bp, Homo sapiens
gtgtgatcatggatc

SEQ ID NO: 677266 - DNA, 15 bp, Homo sapiens
tgtgatcatggatca

SEQ ID NO: 677267 - DNA, 15 bp, Homo sapiens
gtgatcatggatcac

SEQ ID NO: 677268 - DNA, 15 bp, Homo sapiens
tgatcatggatcacc

SEQ ID NO: 677269 - DNA, 15 bp, Homo sapiens
gatcatggatcaccg

SEQ ID NO: 677270 - DNA, 15 bp, Homo sapiens
atcatggatcaccgc

SEQ ID NO: 677271 - DNA, 15 bp, Homo sapiens
tcatggatcaccgca

SEQ ID NO: 677272 - DNA, 15 bp, Homo sapiens
catggatcaccgcag

SEQ ID NO: 677273 - DNA, 15 bp, Homo sapiens
atggatcaccgcagc

SEQ ID NO: 677274 - DNA, 15 bp, Homo sapiens
tggatcaccgcagcc

SEQ ID NO: 677275 - DNA, 15 bp, Homo sapiens
ggatcaccgcagcct

SEQ ID NO: 677276 - DNA, 15 bp, Homo sapiens
gatcaccgcagcctc

SEQ ID NO: 677277 - DNA, 15 bp, Homo sapiens
atcaccgcagcctca

SEQ ID NO: 677278 - DNA, 15 bp, Homo sapiens
tcaccgcagcctcaa

SEQ ID NO: 677279 - DNA, 15 bp, Homo sapiens
caccgcagcctcaac

SEQ ID NO: 677280 - DNA, 15 bp, Homo sapiens
accgcagcctcaacc

SEQ ID NO: 677281 - DNA, 15 bp, Homo sapiens
ccgcagcctcaaccc

SEQ ID NO: 677282 - DNA, 15 bp, Homo sapiens
cgcagcctcaaccct

SEQ ID NO: 677283 - DNA, 15 bp, Homo sapiens
gcagcctcaaccctg

SEQ ID NO: 677284 - DNA, 15 bp, Homo sapiens
cagcctcaaccctga

SEQ ID NO: 677285 - DNA, 15 bp, Homo sapiens
agcctcaaccctgag

SEQ ID NO: 677286 - DNA, 15 bp, Homo sapiens
gcctcaaccctgaga

SEQ ID NO: 677287 - DNA, 15 bp, Homo sapiens
cctcaaccctgagat

SEQ ID NO: 677288 - DNA, 15 bp, Homo sapiens
ctcaaccctgagatc

SEQ ID NO: 677289 - DNA, 15 bp, Homo sapiens
tcaaccctgagatca

SEQ ID NO: 677290 - DNA, 15 bp, Homo sapiens
caaccctgagatcaa

SEQ ID NO: 677291 - DNA, 15 bp, Homo sapiens
aaccctgagatcaag

SEQ ID NO: 677292 - DNA, 15 bp, Homo sapiens
accctgagatcaagt

SEQ ID NO: 677293 - DNA, 15 bp, Homo sapiens
ccctgagatcaagtg

SEQ ID NO: 677294 - DNA, 15 bp, Homo sapiens
cctgagatcaagtga

SEQ ID NO: 677295 - DNA, 15 bp, Homo sapiens
ctgagatcaagtgat

SEQ ID NO: 677296 - DNA, 15 bp, Homo sapiens
tgagatcaagtgatc

SEQ ID NO: 677297 - DNA, 15 bp, Homo sapiens
gagatcaagtgatcc

SEQ ID NO: 677298 - DNA, 15 bp, Homo sapiens
agatcaagtgatcct

SEQ ID NO: 677299 - DNA, 15 bp, Homo sapiens
gatcaagtgatcctc

SEQ ID NO: 677300 - DNA, 15 bp, Homo sapiens
atcaagtgatcctct

SEQ ID NO: 677301 - DNA, 15 bp, Homo sapiens
tcaagtgatcctctt

SEQ ID NO: 677302 - DNA, 15 bp, Homo sapiens
caagtgatcctcttg

SEQ ID NO: 677303 - DNA, 15 bp, Homo sapiens
aagtgatcctcttgc

SEQ ID NO: 677304 - DNA, 15 bp, Homo sapiens
agtgatcctcttgcc

SEQ ID NO: 677305 - DNA, 15 bp, Homo sapiens
gtgatcctcttgcct

SEQ ID NO: 677306 - DNA, 15 bp, Homo sapiens
tgatcctcttgcctc

SEQ ID NO: 677307 - DNA, 15 bp, Homo sapiens
gatcctcttgcctca

SEQ ID NO: 677308 - DNA, 15 bp, Homo sapiens
atcctcttgcctcag

SEQ ID NO: 677309 - DNA, 15 bp, Homo sapiens
tcctcttgcctcagc

SEQ ID NO: 677310 - DNA, 15 bp, Homo sapiens
cctcttgcctcagcc

SEQ ID NO: 677311 - DNA, 15 bp, Homo sapiens
ctcttgcctcagcct

SEQ ID NO: 677312 - DNA, 15 bp, Homo sapiens
tcttgcctcagcctc

SEQ ID NO: 677313 - DNA, 15 bp, Homo sapiens
cttgcctcagcctcc

SEQ ID NO: 677314 - DNA, 15 bp, Homo sapiens
ttgcctcagcctccc

SEQ ID NO: 677315 - DNA, 15 bp, Homo sapiens
cctcagcctcccaac

SEQ ID NO: 677316 - DNA, 15 bp, Homo sapiens
ctcagcctcccaact

SEQ ID NO: 677317 - DNA, 15 bp, Homo sapiens
tcagcctcccaacta

SEQ ID NO: 677318 - DNA, 15 bp, Homo sapiens
cagcctcccaactac

SEQ ID NO: 677319 - DNA, 15 bp, Homo sapiens
agcctcccaactact

SEQ ID NO: 677320 - DNA, 15 bp, Homo sapiens
gcctcccaactacta

SEQ ID NO: 677321 - DNA, 15 bp, Homo sapiens
cctcccaactactag

SEQ ID NO: 677322 - DNA, 15 bp, Homo sapiens
ctcccaactactagg

SEQ ID NO: 677323 - DNA, 15 bp, Homo sapiens
tcccaactactagga

SEQ ID NO: 677324 - DNA, 15 bp, Homo sapiens
cccaactactaggac

SEQ ID NO: 677325 - DNA, 15 bp, Homo sapiens
ccaactactaggaca

SEQ ID NO: 677326 - DNA, 15 bp, Homo sapiens
caactactaggacaa

SEQ ID NO: 677327 - DNA, 15 bp, Homo sapiens
aactactaggacaag

SEQ ID NO: 677328 - DNA, 15 bp, Homo sapiens
actactaggacaaga

SEQ ID NO: 677329 - DNA, 15 bp, Homo sapiens
ctactaggacaagag

SEQ ID NO: 677330 - DNA, 15 bp, Homo sapiens
tactaggacaagagg

SEQ ID NO: 677331 - DNA, 15 bp, Homo sapiens
actaggacaagaggc

SEQ ID NO: 677332 - DNA, 15 bp, Homo sapiens
ctaggacaagaggcg

SEQ ID NO: 677333 - DNA, 15 bp, Homo sapiens
taggacaagaggcgt

SEQ ID NO: 677334 - DNA, 15 bp, Homo sapiens
aggacaagaggcgtg

SEQ ID NO: 677335 - DNA, 15 bp, Homo sapiens
ggacaagaggcgtgt

SEQ ID NO: 677336 - DNA, 15 bp, Homo sapiens
gacaagaggcgtgtg

SEQ ID NO: 677337 - DNA, 15 bp, Homo sapiens
acaagaggcgtgtgt

SEQ ID NO: 677338 - DNA, 15 bp, Homo sapiens
caagaggcgtgtgtc

SEQ ID NO: 677339 - DNA, 15 bp, Homo sapiens
aagaggcgtgtgtca

SEQ ID NO: 677340 - DNA, 15 bp, Homo sapiens
agaggcgtgtgtcac

SEQ ID NO: 677341 - DNA, 15 bp, Homo sapiens
gaggcgtgtgtcact

SEQ ID NO: 677342 - DNA, 15 bp, Homo sapiens
aggcgtgtgtcacta

SEQ ID NO: 677343 - DNA, 15 bp, Homo sapiens
ggcgtgtgtcactat

SEQ ID NO: 677344 - DNA, 15 bp, Homo sapiens
gcgtgtgtcactatg

SEQ ID NO: 677345 - DNA, 15 bp, Homo sapiens
cgtgtgtcactatgc

SEQ ID NO: 677346 - DNA, 15 bp, Homo sapiens
gtgtgtcactatgcc

SEQ ID NO: 677347 - DNA, 15 bp, Homo sapiens
tgtgtcactatgccc

SEQ ID NO: 677348 - DNA, 15 bp, Homo sapiens
gtgtcactatgccca

SEQ ID NO: 677349 - DNA, 15 bp, Homo sapiens
tgtcactatgcccag

SEQ ID NO: 677350 - DNA, 15 bp, Homo sapiens
gtcactatgcccagc

SEQ ID NO: 677351 - DNA, 15 bp, Homo sapiens
tcactatgcccagct

SEQ ID NO: 677352 - DNA, 15 bp, Homo sapiens
cactatgcccagcta

SEQ ID NO: 677353 - DNA, 15 bp, Homo sapiens
actatgcccagctaa

SEQ ID NO: 677354 - DNA, 15 bp, Homo sapiens
ctatgcccagctaat

SEQ ID NO: 677355 - DNA, 15 bp, Homo sapiens
tatgcccagctaatt

SEQ ID NO: 677356 - DNA, 15 bp, Homo sapiens
atgcccagctaatta

SEQ ID NO: 677357 - DNA, 15 bp, Homo sapiens
tgcccagctaattaa

SEQ ID NO: 677358 - DNA, 15 bp, Homo sapiens
gcccagctaattaaa

SEQ ID NO: 677359 - DNA, 15 bp, Homo sapiens
cccagctaattaaaa

SEQ ID NO: 677360 - DNA, 15 bp, Homo sapiens
ccagctaattaaaaa

SEQ ID NO: 677361 - DNA, 15 bp, Homo sapiens
cagctaattaaaaaa

SEQ ID NO: 677362 - DNA, 15 bp, Homo sapiens
agctaattaaaaaat

SEQ ID NO: 677363 - DNA, 15 bp, Homo sapiens
gctaattaaaaaatt

SEQ ID NO: 677364 - DNA, 15 bp, Homo sapiens
ctaattaaaaaatta

SEQ ID NO: 677365 - DNA, 15 bp, Homo sapiens
taattaaaaaattat

SEQ ID NO: 677366 - DNA, 15 bp, Homo sapiens
aattaaaaaattatt

SEQ ID NO: 677367 - DNA, 15 bp, Homo sapiens
attaaaaaattattt

SEQ ID NO: 677368 - DNA, 15 bp, Homo sapiens
ttaaaaaattatttt

SEQ ID NO: 677369 - DNA, 15 bp, Homo sapiens
taaaaaattattttt

SEQ ID NO: 677370 - DNA, 15 bp, Homo sapiens
aaaaaattatttttg

SEQ ID NO: 677371 - DNA, 15 bp, Homo sapiens
aaaaattatttttgt

SEQ ID NO: 677372 - DNA, 15 bp, Homo sapiens
aaaattatttttgta

SEQ ID NO: 677373 - DNA, 15 bp, Homo sapiens
aaattatttttgtag

SEQ ID NO: 677374 - DNA, 15 bp, Homo sapiens
aattatttttgtaga

SEQ ID NO: 677375 - DNA, 15 bp, Homo sapiens
attatttttgtagag

SEQ ID NO: 677376 - DNA, 15 bp, Homo sapiens
ttatttttgtagaga

SEQ ID NO: 677377 - DNA, 15 bp, Homo sapiens
tatttttgtagagac

SEQ ID NO: 677378 - DNA, 15 bp, Homo sapiens
atttttgtagagaca

SEQ ID NO: 677379 - DNA, 15 bp, Homo sapiens
tttttgtagagacag

SEQ ID NO: 677380 - DNA, 15 bp, Homo sapiens
ttttgtagagacagg

SEQ ID NO: 677381 - DNA, 15 bp, Homo sapiens
tttgtagagacaggg

SEQ ID NO: 677382 - DNA, 15 bp, Homo sapiens
ttgtagagacagggt

SEQ ID NO: 677383 - DNA, 15 bp, Homo sapiens
tgtagagacagggtc

SEQ ID NO: 677384 - DNA, 15 bp, Homo sapiens
gtagagacagggtct

SEQ ID NO: 677385 - DNA, 15 bp, Homo sapiens
tagagacagggtctc

SEQ ID NO: 677386 - DNA, 15 bp, Homo sapiens
agagacagggtctca

SEQ ID NO: 677387 - DNA, 15 bp, Homo sapiens
gagacagggtctcac

SEQ ID NO: 677388 - DNA, 15 bp, Homo sapiens
agacagggtctcact

SEQ ID NO: 677389 - DNA, 15 bp, Homo sapiens
gacagggtctcactt

SEQ ID NO: 677390 - DNA, 15 bp, Homo sapiens
acagggtctcacttt

SEQ ID NO: 677391 - DNA, 15 bp, Homo sapiens
cagggtctcactttg

SEQ ID NO: 677392 - DNA, 15 bp, Homo sapiens
agggtctcactttgc

SEQ ID NO: 677393 - DNA, 15 bp, Homo sapiens
gggtctcactttgca

SEQ ID NO: 677394 - DNA, 15 bp, Homo sapiens
ggtctcactttgcag

SEQ ID NO: 677395 - DNA, 15 bp, Homo sapiens
gtctcactttgcagc

SEQ ID NO: 677396 - DNA, 15 bp, Homo sapiens
tctcactttgcagct

SEQ ID NO: 677397 - DNA, 15 bp, Homo sapiens
ctcactttgcagctc

SEQ ID NO: 677398 - DNA, 15 bp, Homo sapiens
tcactttgcagctcg

SEQ ID NO: 677399 - DNA, 15 bp, Homo sapiens
cactttgcagctcgg

SEQ ID NO: 677400 - DNA, 15 bp, Homo sapiens
actttgcagctcggg

SEQ ID NO: 677401 - DNA, 15 bp, Homo sapiens
ctttgcagctcgggc

SEQ ID NO: 677402 - DNA, 15 bp, Homo sapiens
tttgcagctcgggct

SEQ ID NO: 677403 - DNA, 15 bp, Homo sapiens
ttgcagctcgggctg

SEQ ID NO: 677404 - DNA, 15 bp, Homo sapiens
tgcagctcgggctgg

SEQ ID NO: 677405 - DNA, 15 bp, Homo sapiens
gcagctcgggctggt

SEQ ID NO: 677406 - DNA, 15 bp, Homo sapiens
cagctcgggctggtc

SEQ ID NO: 677407 - DNA, 15 bp, Homo sapiens
agctcgggctggtct

SEQ ID NO: 677408 - DNA, 15 bp, Homo sapiens
gctcgggctggtctt

SEQ ID NO: 677409 - DNA, 15 bp, Homo sapiens
ctcgggctggtcttg

SEQ ID NO: 677410 - DNA, 15 bp, Homo sapiens
tcgggctggtcttga

SEQ ID NO: 677411 - DNA, 15 bp, Homo sapiens
cgggctggtcttgaa

SEQ ID NO: 677412 - DNA, 15 bp, Homo sapiens
gggctggtcttgaac

SEQ ID NO: 677413 - DNA, 15 bp, Homo sapiens
tcttgaactcctgac

SEQ ID NO: 677414 - DNA, 15 bp, Homo sapiens
cttgaactcctgacc

SEQ ID NO: 677415 - DNA, 15 bp, Homo sapiens
ttgaactcctgacct

SEQ ID NO: 677416 - DNA, 15 bp, Homo sapiens
tgaactcctgacctc

SEQ ID NO: 677417 - DNA, 15 bp, Homo sapiens
tgacctcaagtgatc

SEQ ID NO: 677418 - DNA, 15 bp, Homo sapiens
gacctcaagtgatcc

SEQ ID NO: 677419 - DNA, 15 bp, Homo sapiens
acctcaagtgatcct

SEQ ID NO: 677420 - DNA, 15 bp, Homo sapiens
cctcaagtgatcctc

SEQ ID NO: 677421 - DNA, 15 bp, Homo sapiens
ctcaagtgatcctcc

SEQ ID NO: 677422 - DNA, 15 bp, Homo sapiens
tcaagtgatcctcca

SEQ ID NO: 677423 - DNA, 15 bp, Homo sapiens
caagtgatcctccac

SEQ ID NO: 677424 - DNA, 15 bp, Homo sapiens
aagtgatcctccacc

SEQ ID NO: 677425 - DNA, 15 bp, Homo sapiens
agtgatcctccaccc

SEQ ID NO: 677426 - DNA, 15 bp, Homo sapiens
gtgatcctccaccct

SEQ ID NO: 677427 - DNA, 15 bp, Homo sapiens
tgatcctccaccctc

SEQ ID NO: 677428 - DNA, 15 bp, Homo sapiens
gatcctccaccctca

SEQ ID NO: 677429 - DNA, 15 bp, Homo sapiens
atcctccaccctcag

SEQ ID NO: 677430 - DNA, 15 bp, Homo sapiens
tcctccaccctcagc

SEQ ID NO: 677431 - DNA, 15 bp, Homo sapiens
cctccaccctcagct

SEQ ID NO: 677432 - DNA, 15 bp, Homo sapiens
ctccaccctcagctt

SEQ ID NO: 677433 - DNA, 15 bp, Homo sapiens
tccaccctcagcttc

SEQ ID NO: 677434 - DNA, 15 bp, Homo sapiens
ccaccctcagcttcc

SEQ ID NO: 677435 - DNA, 15 bp, Homo sapiens
caccctcagcttccc

SEQ ID NO: 677436 - DNA, 15 bp, Homo sapiens
accctcagcttccca

SEQ ID NO: 677437 - DNA, 15 bp, Homo sapiens
ccctcagcttcccaa

SEQ ID NO: 677438 - DNA, 15 bp, Homo sapiens
cctcagcttcccaag

SEQ ID NO: 677439 - DNA, 15 bp, Homo sapiens
ctcagcttcccaagt

SEQ ID NO: 677440 - DNA, 15 bp, Homo sapiens
tcagcttcccaagtc

SEQ ID NO: 677441 - DNA, 15 bp, Homo sapiens
cagcttcccaagtcg

SEQ ID NO: 677442 - DNA, 15 bp, Homo sapiens
agcttcccaagtcgc

SEQ ID NO: 677443 - DNA, 15 bp, Homo sapiens
gcttcccaagtcgct

SEQ ID NO: 677444 - DNA, 15 bp, Homo sapiens
cttcccaagtcgctg

SEQ ID NO: 677445 - DNA, 15 bp, Homo sapiens
ttcccaagtcgctgg

SEQ ID NO: 677446 - DNA, 15 bp, Homo sapiens
tcccaagtcgctggg

SEQ ID NO: 677447 - DNA, 15 bp, Homo sapiens
cccaagtcgctggga

SEQ ID NO: 677448 - DNA, 15 bp, Homo sapiens
ccaagtcgctgggat

SEQ ID NO: 677449 - DNA, 15 bp, Homo sapiens
caagtcgctgggatt

SEQ ID NO: 677450 - DNA, 15 bp, Homo sapiens
aagtcgctgggatta

SEQ ID NO: 677451 - DNA, 15 bp, Homo sapiens
agtcgctgggattac

SEQ ID NO: 677452 - DNA, 15 bp, Homo sapiens
gtcgctgggattaca

SEQ ID NO: 677453 - DNA, 15 bp, Homo sapiens
tcgctgggattacag

SEQ ID NO: 677454 - DNA, 15 bp, Homo sapiens
cgctgggattacagg

SEQ ID NO: 677455 - DNA, 15 bp, Homo sapiens
ggattacaggcgctg

SEQ ID NO: 677456 - DNA, 15 bp, Homo sapiens
gattacaggcgctga

SEQ ID NO: 677457 - DNA, 15 bp, Homo sapiens
attacaggcgctgac

SEQ ID NO: 677458 - DNA, 15 bp, Homo sapiens
ttacaggcgctgacc

SEQ ID NO: 677459 - DNA, 15 bp, Homo sapiens
tacaggcgctgaccc

SEQ ID NO: 677460 - DNA, 15 bp, Homo sapiens
acaggcgctgaccca

SEQ ID NO: 677461 - DNA, 15 bp, Homo sapiens
caggcgctgacccac

SEQ ID NO: 677462 - DNA, 15 bp, Homo sapiens
aggcgctgacccact

SEQ ID NO: 677463 - DNA, 15 bp, Homo sapiens
ggcgctgacccactc

SEQ ID NO: 677464 - DNA, 15 bp, Homo sapiens
gcgctgacccactct

SEQ ID NO: 677465 - DNA, 15 bp, Homo sapiens
cgctgacccactctg

SEQ ID NO: 677466 - DNA, 15 bp, Homo sapiens
gctgacccactctgc

SEQ ID NO: 677467 - DNA, 15 bp, Homo sapiens
ctgacccactctgca

SEQ ID NO: 677468 - DNA, 15 bp, Homo sapiens
tgacccactctgcat

SEQ ID NO: 677469 - DNA, 15 bp, Homo sapiens
gacccactctgcatg

SEQ ID NO: 677470 - DNA, 15 bp, Homo sapiens
acccactctgcatgg

SEQ ID NO: 677471 - DNA, 15 bp, Homo sapiens
cccactctgcatggc

SEQ ID NO: 677472 - DNA, 15 bp, Homo sapiens
ccactctgcatggct

SEQ ID NO: 677473 - DNA, 15 bp, Homo sapiens
cactctgcatggcta

SEQ ID NO: 677474 - DNA, 15 bp, Homo sapiens
actctgcatggctat

SEQ ID NO: 677475 - DNA, 15 bp, Homo sapiens
ctctgcatggctatt

SEQ ID NO: 677476 - DNA, 15 bp, Homo sapiens
tctgcatggctattc

SEQ ID NO: 677477 - DNA, 15 bp, Homo sapiens
ctgcatggctattca

SEQ ID NO: 677478 - DNA, 15 bp, Homo sapiens
tgcatggctattcac

SEQ ID NO: 677479 - DNA, 15 bp, Homo sapiens
gcatggctattcacc

SEQ ID NO: 677480 - DNA, 15 bp, Homo sapiens
catggctattcaccc

SEQ ID NO: 677481 - DNA, 15 bp, Homo sapiens
atggctattcaccca

SEQ ID NO: 677482 - DNA, 15 bp, Homo sapiens
tggctattcacccag

SEQ ID NO: 677483 - DNA, 15 bp, Homo sapiens
ggctattcacccagt

SEQ ID NO: 677484 - DNA, 15 bp, Homo sapiens
gctattcacccagtt

SEQ ID NO: 677485 - DNA, 15 bp, Homo sapiens
ctattcacccagttt

SEQ ID NO: 677486 - DNA, 15 bp, Homo sapiens
tattcacccagtttt

SEQ ID NO: 677487 - DNA, 15 bp, Homo sapiens
attcacccagttttt

SEQ ID NO: 677488 - DNA, 15 bp, Homo sapiens
ttcacccagtttttc

SEQ ID NO: 677489 - DNA, 15 bp, Homo sapiens
tcacccagtttttct

SEQ ID NO: 677490 - DNA, 15 bp, Homo sapiens
cacccagtttttcta

SEQ ID NO: 677491 - DNA, 15 bp, Homo sapiens
acccagtttttctaa

SEQ ID NO: 677492 - DNA, 15 bp, Homo sapiens
cccagtttttctaaa

SEQ ID NO: 677493 - DNA, 15 bp, Homo sapiens
ccagtttttctaaac

SEQ ID NO: 677494 - DNA, 15 bp, Homo sapiens
cagtttttctaaact

SEQ ID NO: 677495 - DNA, 15 bp, Homo sapiens
agtttttctaaacta

SEQ ID NO: 677496 - DNA, 15 bp, Homo sapiens
gtttttctaaactat

SEQ ID NO: 677497 - DNA, 15 bp, Homo sapiens
tttttctaaactatg

SEQ ID NO: 677498 - DNA, 15 bp, Homo sapiens
ttttctaaactatgc

SEQ ID NO: 677499 - DNA, 15 bp, Homo sapiens
tttctaaactatgca

SEQ ID NO: 677500 - DNA, 15 bp, Homo sapiens
ttctaaactatgcat

SEQ ID NO: 677501 - DNA, 15 bp, Homo sapiens
tctaaactatgcatt

SEQ ID NO: 677502 - DNA, 15 bp, Homo sapiens
ctaaactatgcatta

SEQ ID NO: 677503 - DNA, 15 bp, Homo sapiens
taaactatgcattaa

SEQ ID NO: 677504 - DNA, 15 bp, Homo sapiens
aaactatgcattaat

SEQ ID NO: 677505 - DNA, 15 bp, Homo sapiens
aactatgcattaatg

SEQ ID NO: 677506 - DNA, 15 bp, Homo sapiens
actatgcattaatgt

SEQ ID NO: 677507 - DNA, 15 bp, Homo sapiens
ctatgcattaatgtt

SEQ ID NO: 677508 - DNA, 15 bp, Homo sapiens
tatgcattaatgttc

SEQ ID NO: 677509 - DNA, 15 bp, Homo sapiens
atgcattaatgttct

SEQ ID NO: 677510 - DNA, 15 bp, Homo sapiens
tgcattaatgttctt

SEQ ID NO: 677511 - DNA, 15 bp, Homo sapiens
gcattaatgttcttg

SEQ ID NO: 677512 - DNA, 15 bp, Homo sapiens
cattaatgttcttgc

SEQ ID NO: 677513 - DNA, 15 bp, Homo sapiens
attaatgttcttgcc

SEQ ID NO: 677514 - DNA, 15 bp, Homo sapiens
ttaatgttcttgcct

SEQ ID NO: 677515 - DNA, 15 bp, Homo sapiens
taatgttcttgcctt

SEQ ID NO: 677516 - DNA, 15 bp, Homo sapiens
aatgttcttgccttt

SEQ ID NO: 677517 - DNA, 15 bp, Homo sapiens
atgttcttgccttta

SEQ ID NO: 677518 - DNA, 15 bp, Homo sapiens
tgttcttgcctttat

SEQ ID NO: 677519 - DNA, 15 bp, Homo sapiens
gttcttgcctttata

SEQ ID NO: 677520 - DNA, 15 bp, Homo sapiens
ttcttgcctttataa

SEQ ID NO: 677521 - DNA, 15 bp, Homo sapiens
tcttgcctttataat

SEQ ID NO: 677522 - DNA, 15 bp, Homo sapiens
cttgcctttataatt

SEQ ID NO: 677523 - DNA, 15 bp, Homo sapiens
ttgcctttataattt

SEQ ID NO: 677524 - DNA, 15 bp, Homo sapiens
tgcctttataatttc

SEQ ID NO: 677525 - DNA, 15 bp, Homo sapiens
gcctttataatttct

SEQ ID NO: 677526 - DNA, 15 bp, Homo sapiens
cctttataatttctt

SEQ ID NO: 677527 - DNA, 15 bp, Homo sapiens
ctttataatttcttt

SEQ ID NO: 677528 - DNA, 15 bp, Homo sapiens
tttataatttctttc

SEQ ID NO: 677529 - DNA, 15 bp, Homo sapiens
ttataatttctttct

SEQ ID NO: 677530 - DNA, 15 bp, Homo sapiens
tataatttctttctt

SEQ ID NO: 677531 - DNA, 15 bp, Homo sapiens
ataatttctttcttt

SEQ ID NO: 677532 - DNA, 15 bp, Homo sapiens
taatttctttctttc

SEQ ID NO: 677533 - DNA, 15 bp, Homo sapiens
aatttctttctttct

SEQ ID NO: 677534 - DNA, 15 bp, Homo sapiens
atttctttctttctt

SEQ ID NO: 677535 - DNA, 15 bp, Homo sapiens
tctttctttcttttt

SEQ ID NO: 677536 - DNA, 15 bp, Homo sapiens
ctttctttctttttt

SEQ ID NO: 677537 - DNA, 15 bp, Homo sapiens
tttctttcttttttt

SEQ ID NO: 677538 - DNA, 15 bp, Homo sapiens
ttctttctttttttt

SEQ ID NO: 677539 - DNA, 15 bp, Homo sapiens
tctttcttttttttt

SEQ ID NO: 677540 - DNA, 15 bp, Homo sapiens
ctttctttttttttt

SEQ ID NO: 677541 - DNA, 15 bp, Homo sapiens
ctttttttttttttg

SEQ ID NO: 677542 - DNA, 15 bp, Homo sapiens
ttttttttgagacag

SEQ ID NO: 677543 - DNA, 15 bp, Homo sapiens
tttttttgagacagg

SEQ ID NO: 677544 - DNA, 15 bp, Homo sapiens
ttttttgagacaggg

SEQ ID NO: 677545 - DNA, 15 bp, Homo sapiens
tttttgagacagggt

SEQ ID NO: 677546 - DNA, 15 bp, Homo sapiens
ttttgagacagggtc

SEQ ID NO: 677547 - DNA, 15 bp, Homo sapiens
tttgagacagggtct

SEQ ID NO: 677548 - DNA, 15 bp, Homo sapiens
ttgagacagggtctc

SEQ ID NO: 677549 - DNA, 15 bp, Homo sapiens
tgagacagggtctca

SEQ ID NO: 677550 - DNA, 15 bp, Homo sapiens
gagacagggtctcat

SEQ ID NO: 677551 - DNA, 15 bp, Homo sapiens
agacagggtctcatt

SEQ ID NO: 677552 - DNA, 15 bp, Homo sapiens
gacagggtctcattc

SEQ ID NO: 677553 - DNA, 15 bp, Homo sapiens
acagggtctcattct

SEQ ID NO: 677554 - DNA, 15 bp, Homo sapiens
cagggtctcattctg

SEQ ID NO: 677555 - DNA, 15 bp, Homo sapiens
agggtctcattctgt

SEQ ID NO: 677556 - DNA, 15 bp, Homo sapiens
gggtctcattctgtt

SEQ ID NO: 677557 - DNA, 15 bp, Homo sapiens
ggtctcattctgttg

SEQ ID NO: 677558 - DNA, 15 bp, Homo sapiens
gtctcattctgttgc

SEQ ID NO: 677559 - DNA, 15 bp, Homo sapiens
tctcattctgttgcc

SEQ ID NO: 677560 - DNA, 15 bp, Homo sapiens
ctcattctgttgccc

SEQ ID NO: 677561 - DNA, 15 bp, Homo sapiens
tcattctgttgccca

SEQ ID NO: 677562 - DNA, 15 bp, Homo sapiens
cattctgttgcccac

SEQ ID NO: 677563 - DNA, 15 bp, Homo sapiens
attctgttgcccacg

SEQ ID NO: 677564 - DNA, 15 bp, Homo sapiens
ttctgttgcccacgc

SEQ ID NO: 677565 - DNA, 15 bp, Homo sapiens
tctgttgcccacgcg

SEQ ID NO: 677566 - DNA, 15 bp, Homo sapiens
ctgttgcccacgcgg

SEQ ID NO: 677567 - DNA, 15 bp, Homo sapiens
tgttgcccacgcggg

SEQ ID NO: 677568 - DNA, 15 bp, Homo sapiens
gttgcccacgcggga

SEQ ID NO: 677569 - DNA, 15 bp, Homo sapiens
ttgcccacgcgggag

SEQ ID NO: 677570 - DNA, 15 bp, Homo sapiens
tgcccacgcgggagt

SEQ ID NO: 677571 - DNA, 15 bp, Homo sapiens
gcccacgcgggagtg

SEQ ID NO: 677572 - DNA, 15 bp, Homo sapiens
cccacgcgggagtgc

SEQ ID NO: 677573 - DNA, 15 bp, Homo sapiens
ccacgcgggagtgca

SEQ ID NO: 677574 - DNA, 15 bp, Homo sapiens
cacgcgggagtgcag

SEQ ID NO: 677575 - DNA, 15 bp, Homo sapiens
acgcgggagtgcagt

SEQ ID NO: 677576 - DNA, 15 bp, Homo sapiens
cgcgggagtgcagtg

SEQ ID NO: 677577 - DNA, 15 bp, Homo sapiens
gcgggagtgcagtgg

SEQ ID NO: 677578 - DNA, 15 bp, Homo sapiens
cgggagtgcagtggc

SEQ ID NO: 677579 - DNA, 15 bp, Homo sapiens
gggagtgcagtggcg

SEQ ID NO: 677580 - DNA, 15 bp, Homo sapiens
cagtggcgtgatctt

SEQ ID NO: 677581 - DNA, 15 bp, Homo sapiens
agtggcgtgatcttg

SEQ ID NO: 677582 - DNA, 15 bp, Homo sapiens
gtggcgtgatcttgg

SEQ ID NO: 677583 - DNA, 15 bp, Homo sapiens
tgatcttggctcact

SEQ ID NO: 677584 - DNA, 15 bp, Homo sapiens
gatcttggctcactg

SEQ ID NO: 677585 - DNA, 15 bp, Homo sapiens
tcactgcaacctccg

SEQ ID NO: 677586 - DNA, 15 bp, Homo sapiens
cactgcaacctccgc

SEQ ID NO: 677587 - DNA, 15 bp, Homo sapiens
actgcaacctccgcc

SEQ ID NO: 677588 - DNA, 15 bp, Homo sapiens
gcaacctccgcctcc

SEQ ID NO: 677589 - DNA, 15 bp, Homo sapiens
caacctccgcctcct

SEQ ID NO: 677590 - DNA, 15 bp, Homo sapiens
aacctccgcctccta

SEQ ID NO: 677591 - DNA, 15 bp, Homo sapiens
acctccgcctcctag

SEQ ID NO: 677592 - DNA, 15 bp, Homo sapiens
cctccgcctcctagg

SEQ ID NO: 677593 - DNA, 15 bp, Homo sapiens
ctccgcctcctaggt

SEQ ID NO: 677594 - DNA, 15 bp, Homo sapiens
tccgcctcctaggtt

SEQ ID NO: 677595 - DNA, 15 bp, Homo sapiens
ccgcctcctaggttc

SEQ ID NO: 677596 - DNA, 15 bp, Homo sapiens
cgcctcctaggttca

SEQ ID NO: 677597 - DNA, 15 bp, Homo sapiens
gcctcctaggttcag

SEQ ID NO: 677598 - DNA, 15 bp, Homo sapiens
cctcctaggttcagg

SEQ ID NO: 677599 - DNA, 15 bp, Homo sapiens
ctcctaggttcaggt

SEQ ID NO: 677600 - DNA, 15 bp, Homo sapiens
tcctaggttcaggtg

SEQ ID NO: 677601 - DNA, 15 bp, Homo sapiens
cctaggttcaggtga

SEQ ID NO: 677602 - DNA, 15 bp, Homo sapiens
ctaggttcaggtgat

SEQ ID NO: 677603 - DNA, 15 bp, Homo sapiens
taggttcaggtgatt

SEQ ID NO: 677604 - DNA, 15 bp, Homo sapiens
aggttcaggtgattt

SEQ ID NO: 677605 - DNA, 15 bp, Homo sapiens
ggttcaggtgatttc

SEQ ID NO: 677606 - DNA, 15 bp, Homo sapiens
gttcaggtgatttct

SEQ ID NO: 677607 - DNA, 15 bp, Homo sapiens
ttcaggtgatttctc

SEQ ID NO: 677608 - DNA, 15 bp, Homo sapiens
tcaggtgatttctcc

SEQ ID NO: 677609 - DNA, 15 bp, Homo sapiens
caggtgatttctcct

SEQ ID NO: 677610 - DNA, 15 bp, Homo sapiens
aggtgatttctcctg

SEQ ID NO: 677611 - DNA, 15 bp, Homo sapiens
ggtgatttctcctgt

SEQ ID NO: 677612 - DNA, 15 bp, Homo sapiens
gtgatttctcctgtc

SEQ ID NO: 677613 - DNA, 15 bp, Homo sapiens
tgatttctcctgtct

SEQ ID NO: 677614 - DNA, 15 bp, Homo sapiens
gatttctcctgtctc

SEQ ID NO: 677615 - DNA, 15 bp, Homo sapiens
atttctcctgtctca

SEQ ID NO: 677616 - DNA, 15 bp, Homo sapiens
tttctcctgtctcag

SEQ ID NO: 677617 - DNA, 15 bp, Homo sapiens
ttctcctgtctcagt

SEQ ID NO: 677618 - DNA, 15 bp, Homo sapiens
tctcctgtctcagtc

SEQ ID NO: 677619 - DNA, 15 bp, Homo sapiens
ctcctgtctcagtct

SEQ ID NO: 677620 - DNA, 15 bp, Homo sapiens
tcctgtctcagtctc

SEQ ID NO: 677621 - DNA, 15 bp, Homo sapiens
cctgtctcagtctct

SEQ ID NO: 677622 - DNA, 15 bp, Homo sapiens
ctgtctcagtctctc

SEQ ID NO: 677623 - DNA, 15 bp, Homo sapiens
tgtctcagtctctcg

SEQ ID NO: 677624 - DNA, 15 bp, Homo sapiens
gtctcagtctctcga

SEQ ID NO: 677625 - DNA, 15 bp, Homo sapiens
tctcagtctctcgag

SEQ ID NO: 677626 - DNA, 15 bp, Homo sapiens
ctcagtctctcgagt

SEQ ID NO: 677627 - DNA, 15 bp, Homo sapiens
tcagtctctcgagta

SEQ ID NO: 677628 - DNA, 15 bp, Homo sapiens
cagtctctcgagtag

SEQ ID NO: 677629 - DNA, 15 bp, Homo sapiens
agtctctcgagtagc

SEQ ID NO: 677630 - DNA, 15 bp, Homo sapiens
gtctctcgagtagca

SEQ ID NO: 677631 - DNA, 15 bp, Homo sapiens
tctctcgagtagcag

SEQ ID NO: 677632 - DNA, 15 bp, Homo sapiens
ctctcgagtagcagg

SEQ ID NO: 677633 - DNA, 15 bp, Homo sapiens
tctcgagtagcaggt

SEQ ID NO: 677634 - DNA, 15 bp, Homo sapiens
ctcgagtagcaggta

SEQ ID NO: 677635 - DNA, 15 bp, Homo sapiens
tcgagtagcaggtat

SEQ ID NO: 677636 - DNA, 15 bp, Homo sapiens
cgagtagcaggtatt

SEQ ID NO: 677637 - DNA, 15 bp, Homo sapiens
gagtagcaggtatta

SEQ ID NO: 677638 - DNA, 15 bp, Homo sapiens
agtagcaggtattac

SEQ ID NO: 677639 - DNA, 15 bp, Homo sapiens
gtagcaggtattaca

SEQ ID NO: 677640 - DNA, 15 bp, Homo sapiens
tagcaggtattacag

SEQ ID NO: 677641 - DNA, 15 bp, Homo sapiens
agcaggtattacaga

SEQ ID NO: 677642 - DNA, 15 bp, Homo sapiens
gcaggtattacagat

SEQ ID NO: 677643 - DNA, 15 bp, Homo sapiens
caggtattacagatg

SEQ ID NO: 677644 - DNA, 15 bp, Homo sapiens
aggtattacagatgt

SEQ ID NO: 677645 - DNA, 15 bp, Homo sapiens
ggtattacagatgta

SEQ ID NO: 677646 - DNA, 15 bp, Homo sapiens
gtattacagatgtat

SEQ ID NO: 677647 - DNA, 15 bp, Homo sapiens
tattacagatgtatg

SEQ ID NO: 677648 - DNA, 15 bp, Homo sapiens
attacagatgtatgc

SEQ ID NO: 677649 - DNA, 15 bp, Homo sapiens
ttacagatgtatgcc

SEQ ID NO: 677650 - DNA, 15 bp, Homo sapiens
tacagatgtatgcca

SEQ ID NO: 677651 - DNA, 15 bp, Homo sapiens
acagatgtatgccac

SEQ ID NO: 677652 - DNA, 15 bp, Homo sapiens
cagatgtatgccacc

SEQ ID NO: 677653 - DNA, 15 bp, Homo sapiens
agatgtatgccacca

SEQ ID NO: 677654 - DNA, 15 bp, Homo sapiens
gatgtatgccaccac

SEQ ID NO: 677655 - DNA, 15 bp, Homo sapiens
atgtatgccaccacg

SEQ ID NO: 677656 - DNA, 15 bp, Homo sapiens
tgtatgccaccacgc

SEQ ID NO: 677657 - DNA, 15 bp, Homo sapiens
gtatgccaccacgcc

SEQ ID NO: 677658 - DNA, 15 bp, Homo sapiens
tatgccaccacgcct

SEQ ID NO: 677659 - DNA, 15 bp, Homo sapiens
atgccaccacgccta

SEQ ID NO: 677660 - DNA, 15 bp, Homo sapiens
tgccaccacgcctag

SEQ ID NO: 677661 - DNA, 15 bp, Homo sapiens
gccaccacgcctagc

SEQ ID NO: 677662 - DNA, 15 bp, Homo sapiens
ccaccacgcctagct

SEQ ID NO: 677663 - DNA, 15 bp, Homo sapiens
caccacgcctagcta

SEQ ID NO: 677664 - DNA, 15 bp, Homo sapiens
accacgcctagctaa

SEQ ID NO: 677665 - DNA, 15 bp, Homo sapiens
ccacgcctagctaat

SEQ ID NO: 677666 - DNA, 15 bp, Homo sapiens
cacgcctagctaatt

SEQ ID NO: 677667 - DNA, 15 bp, Homo sapiens
acgcctagctaattt

SEQ ID NO: 677668 - DNA, 15 bp, Homo sapiens
cgcctagctaatttt

SEQ ID NO: 677669 - DNA, 15 bp, Homo sapiens
gcctagctaattttt

SEQ ID NO: 677670 - DNA, 15 bp, Homo sapiens
cctagctaatttttg

SEQ ID NO: 677671 - DNA, 15 bp, Homo sapiens
ctagctaatttttgt

SEQ ID NO: 677672 - DNA, 15 bp, Homo sapiens
tagctaatttttgta

SEQ ID NO: 677673 - DNA, 15 bp, Homo sapiens
agctaatttttgtag

SEQ ID NO: 677674 - DNA, 15 bp, Homo sapiens
gctaatttttgtagt

SEQ ID NO: 677675 - DNA, 15 bp, Homo sapiens
ctaatttttgtagtt

SEQ ID NO: 677676 - DNA, 15 bp, Homo sapiens
taatttttgtagttc

SEQ ID NO: 677677 - DNA, 15 bp, Homo sapiens
aatttttgtagttct

SEQ ID NO: 677678 - DNA, 15 bp, Homo sapiens
atttttgtagttctt

SEQ ID NO: 677679 - DNA, 15 bp, Homo sapiens
tttttgtagttctta

SEQ ID NO: 677680 - DNA, 15 bp, Homo sapiens
ttttgtagttcttag

SEQ ID NO: 677681 - DNA, 15 bp, Homo sapiens
tttgtagttcttagt

SEQ ID NO: 677682 - DNA, 15 bp, Homo sapiens
ttgtagttcttagta

SEQ ID NO: 677683 - DNA, 15 bp, Homo sapiens
tgtagttcttagtag

SEQ ID NO: 677684 - DNA, 15 bp, Homo sapiens
gtagttcttagtaga

SEQ ID NO: 677685 - DNA, 15 bp, Homo sapiens
tagttcttagtagag

SEQ ID NO: 677686 - DNA, 15 bp, Homo sapiens
agttcttagtagaga

SEQ ID NO: 677687 - DNA, 15 bp, Homo sapiens
gttcttagtagagaa

SEQ ID NO: 677688 - DNA, 15 bp, Homo sapiens
ttcttagtagagaag

SEQ ID NO: 677689 - DNA, 15 bp, Homo sapiens
tcttagtagagaagg

SEQ ID NO: 677690 - DNA, 15 bp, Homo sapiens
cttagtagagaaggg

SEQ ID NO: 677691 - DNA, 15 bp, Homo sapiens
ttagtagagaagggg

SEQ ID NO: 677692 - DNA, 15 bp, Homo sapiens
tagtagagaaggggt

SEQ ID NO: 677693 - DNA, 15 bp, Homo sapiens
agtagagaaggggtt

SEQ ID NO: 677694 - DNA, 15 bp, Homo sapiens
gtagagaaggggttt

SEQ ID NO: 677695 - DNA, 15 bp, Homo sapiens
tagagaaggggtttc

SEQ ID NO: 677696 - DNA, 15 bp, Homo sapiens
agagaaggggtttcg

SEQ ID NO: 677697 - DNA, 15 bp, Homo sapiens
gagaaggggtttcgg

SEQ ID NO: 677698 - DNA, 15 bp, Homo sapiens
agaaggggtttcggt

SEQ ID NO: 677699 - DNA, 15 bp, Homo sapiens
gaaggggtttcggtg

SEQ ID NO: 677700 - DNA, 15 bp, Homo sapiens
aaggggtttcggtgt

SEQ ID NO: 677701 - DNA, 15 bp, Homo sapiens
aggggtttcggtgtg

SEQ ID NO: 677702 - DNA, 15 bp, Homo sapiens
ggggtttcggtgtgt

SEQ ID NO: 677703 - DNA, 15 bp, Homo sapiens
gggtttcggtgtgtt

SEQ ID NO: 677704 - DNA, 15 bp, Homo sapiens
ggtttcggtgtgttg

SEQ ID NO: 677705 - DNA, 15 bp, Homo sapiens
gtttcggtgtgttgg

SEQ ID NO: 677706 - DNA, 15 bp, Homo sapiens
tttcggtgtgttggc

SEQ ID NO: 677707 - DNA, 15 bp, Homo sapiens
ttcggtgtgttggcc

SEQ ID NO: 677708 - DNA, 15 bp, Homo sapiens
tcggtgtgttggcca

SEQ ID NO: 677709 - DNA, 15 bp, Homo sapiens
cggtgtgttggccag

SEQ ID NO: 677710 - DNA, 15 bp, Homo sapiens
ggtgtgttggccagg

SEQ ID NO: 677711 - DNA, 15 bp, Homo sapiens
gtgtgttggccaggc

SEQ ID NO: 677712 - DNA, 15 bp, Homo sapiens
tgtgttggccaggct

SEQ ID NO: 677713 - DNA, 15 bp, Homo sapiens
gtgttggccaggctg

SEQ ID NO: 677714 - DNA, 15 bp, Homo sapiens
ggccaggctggtctc

SEQ ID NO: 677715 - DNA, 15 bp, Homo sapiens
gccaggctggtctca

SEQ ID NO: 677716 - DNA, 15 bp, Homo sapiens
ccaggctggtctcaa

SEQ ID NO: 677717 - DNA, 15 bp, Homo sapiens
caggctggtctcaaa

SEQ ID NO: 677718 - DNA, 15 bp, Homo sapiens
aggctggtctcaaac

SEQ ID NO: 677719 - DNA, 15 bp, Homo sapiens
ggctggtctcaaact

SEQ ID NO: 677720 - DNA, 15 bp, Homo sapiens
gctggtctcaaactc

SEQ ID NO: 677721 - DNA, 15 bp, Homo sapiens
ctggtctcaaactcc

SEQ ID NO: 677722 - DNA, 15 bp, Homo sapiens
tggtctcaaactcct

SEQ ID NO: 677723 - DNA, 15 bp, Homo sapiens
ggtctcaaactcctg

SEQ ID NO: 677724 - DNA, 15 bp, Homo sapiens
gtctcaaactcctga

SEQ ID NO: 677725 - DNA, 15 bp, Homo sapiens
tctcaaactcctgac

SEQ ID NO: 677726 - DNA, 15 bp, Homo sapiens
ctcaaactcctgacc

SEQ ID NO: 677727 - DNA, 15 bp, Homo sapiens
aaactcctgacctca

SEQ ID NO: 677728 - DNA, 15 bp, Homo sapiens
gacctcaagtgattc

SEQ ID NO: 677729 - DNA, 15 bp, Homo sapiens
acctcaagtgattca

SEQ ID NO: 677730 - DNA, 15 bp, Homo sapiens
cctcaagtgattcac

SEQ ID NO: 677731 - DNA, 15 bp, Homo sapiens
ctcaagtgattcacc

SEQ ID NO: 677732 - DNA, 15 bp, Homo sapiens
tcaagtgattcacct

SEQ ID NO: 677733 - DNA, 15 bp, Homo sapiens
caagtgattcacctg

SEQ ID NO: 677734 - DNA, 15 bp, Homo sapiens
aagtgattcacctgc

SEQ ID NO: 677735 - DNA, 15 bp, Homo sapiens
agtgattcacctgcc

SEQ ID NO: 677736 - DNA, 15 bp, Homo sapiens
gtgattcacctgcct

SEQ ID NO: 677737 - DNA, 15 bp, Homo sapiens
tgattcacctgcctt

SEQ ID NO: 677738 - DNA, 15 bp, Homo sapiens
gattcacctgccttg

SEQ ID NO: 677739 - DNA, 15 bp, Homo sapiens
attcacctgccttgg

SEQ ID NO: 677740 - DNA, 15 bp, Homo sapiens
ttcacctgccttggc

SEQ ID NO: 677741 - DNA, 15 bp, Homo sapiens
tcacctgccttggct

SEQ ID NO: 677742 - DNA, 15 bp, Homo sapiens
cacctgccttggctg

SEQ ID NO: 677743 - DNA, 15 bp, Homo sapiens
acctgccttggctgg

SEQ ID NO: 677744 - DNA, 15 bp, Homo sapiens
cctgccttggctggg

SEQ ID NO: 677745 - DNA, 15 bp, Homo sapiens
ctgccttggctgggc

SEQ ID NO: 677746 - DNA, 15 bp, Homo sapiens
tgccttggctgggca

SEQ ID NO: 677747 - DNA, 15 bp, Homo sapiens
gccttggctgggcac

SEQ ID NO: 677748 - DNA, 15 bp, Homo sapiens
ccttggctgggcacc

SEQ ID NO: 677749 - DNA, 15 bp, Homo sapiens
cttggctgggcaccg

SEQ ID NO: 677750 - DNA, 15 bp, Homo sapiens
ttggctgggcaccgc

SEQ ID NO: 677751 - DNA, 15 bp, Homo sapiens
tggctgggcaccgcg

SEQ ID NO: 677752 - DNA, 15 bp, Homo sapiens
ggctgggcaccgcgc

SEQ ID NO: 677753 - DNA, 15 bp, Homo sapiens
gctgggcaccgcgcc

SEQ ID NO: 677754 - DNA, 15 bp, Homo sapiens
ctgggcaccgcgcct

SEQ ID NO: 677755 - DNA, 15 bp, Homo sapiens
tgggcaccgcgcctg

SEQ ID NO: 677756 - DNA, 15 bp, Homo sapiens
gggcaccgcgcctgg

SEQ ID NO: 677757 - DNA, 15 bp, Homo sapiens
ggcaccgcgcctggc

SEQ ID NO: 677758 - DNA, 15 bp, Homo sapiens
gcaccgcgcctggcc

SEQ ID NO: 677759 - DNA, 15 bp, Homo sapiens
caccgcgcctggcca

SEQ ID NO: 677760 - DNA, 15 bp, Homo sapiens
accgcgcctggccac

SEQ ID NO: 677761 - DNA, 15 bp, Homo sapiens
ccgcgcctggccacc

SEQ ID NO: 677762 - DNA, 15 bp, Homo sapiens
cgcgcctggccacct

SEQ ID NO: 677763 - DNA, 15 bp, Homo sapiens
gcgcctggccacctt

SEQ ID NO: 677764 - DNA, 15 bp, Homo sapiens
cgcctggccaccttt

SEQ ID NO: 677765 - DNA, 15 bp, Homo sapiens
gcctggccaccttta

SEQ ID NO: 677766 - DNA, 15 bp, Homo sapiens
cctggccacctttat

SEQ ID NO: 677767 - DNA, 15 bp, Homo sapiens
ctggccacctttata

SEQ ID NO: 677768 - DNA, 15 bp, Homo sapiens
tggccacctttataa

SEQ ID NO: 677769 - DNA, 15 bp, Homo sapiens
ggccacctttataat

SEQ ID NO: 677770 - DNA, 15 bp, Homo sapiens
gccacctttataatt

SEQ ID NO: 677771 - DNA, 15 bp, Homo sapiens
ccacctttataattt

SEQ ID NO: 677772 - DNA, 15 bp, Homo sapiens
cacctttataatttc

SEQ ID NO: 677773 - DNA, 15 bp, Homo sapiens
acctttataatttca

SEQ ID NO: 677774 - DNA, 15 bp, Homo sapiens
cctttataatttcaa

SEQ ID NO: 677775 - DNA, 15 bp, Homo sapiens
ctttataatttcaaa

SEQ ID NO: 677776 - DNA, 15 bp, Homo sapiens
tttataatttcaaat

SEQ ID NO: 677777 - DNA, 15 bp, Homo sapiens
ttataatttcaaatg

SEQ ID NO: 677778 - DNA, 15 bp, Homo sapiens
tataatttcaaatgt

SEQ ID NO: 677779 - DNA, 15 bp, Homo sapiens
ataatttcaaatgtt

SEQ ID NO: 677780 - DNA, 15 bp, Homo sapiens
taatttcaaatgtta

SEQ ID NO: 677781 - DNA, 15 bp, Homo sapiens
aatttcaaatgttaa

SEQ ID NO: 677782 - DNA, 15 bp, Homo sapiens
atttcaaatgttaaa

SEQ ID NO: 677783 - DNA, 15 bp, Homo sapiens
tttcaaatgttaaaa

SEQ ID NO: 677784 - DNA, 15 bp, Homo sapiens
ttcaaatgttaaaaa

SEQ ID NO: 677785 - DNA, 15 bp, Homo sapiens
tcaaatgttaaaaat

SEQ ID NO: 677786 - DNA, 15 bp, Homo sapiens
caaatgttaaaaata

SEQ ID NO: 677787 - DNA, 15 bp, Homo sapiens
aaatgttaaaaatac

SEQ ID NO: 677788 - DNA, 15 bp, Homo sapiens
aatgttaaaaataca

SEQ ID NO: 677789 - DNA, 15 bp, Homo sapiens
atgttaaaaatacat

SEQ ID NO: 677790 - DNA, 15 bp, Homo sapiens
tgttaaaaatacatt

SEQ ID NO: 677791 - DNA, 15 bp, Homo sapiens
gttaaaaatacattg

SEQ ID NO: 677792 - DNA, 15 bp, Homo sapiens
ttaaaaatacattgc

SEQ ID NO: 677793 - DNA, 15 bp, Homo sapiens
taaaaatacattgct

SEQ ID NO: 677794 - DNA, 15 bp, Homo sapiens
aaaaatacattgctg

SEQ ID NO: 677795 - DNA, 15 bp, Homo sapiens
aaaatacattgctgg

SEQ ID NO: 677796 - DNA, 15 bp, Homo sapiens
aaatacattgctggg

SEQ ID NO: 677797 - DNA, 15 bp, Homo sapiens
aatacattgctgggt

SEQ ID NO: 677798 - DNA, 15 bp, Homo sapiens
atacattgctgggtt

SEQ ID NO: 677799 - DNA, 15 bp, Homo sapiens
tacattgctgggttt

SEQ ID NO: 677800 - DNA, 15 bp, Homo sapiens
acattgctgggtttg

SEQ ID NO: 677801 - DNA, 15 bp, Homo sapiens
cattgctgggtttgg

SEQ ID NO: 677802 - DNA, 15 bp, Homo sapiens
attgctgggtttggg

SEQ ID NO: 677803 - DNA, 15 bp, Homo sapiens
ttgctgggtttggga

SEQ ID NO: 677804 - DNA, 15 bp, Homo sapiens
tgctgggtttgggaa

SEQ ID NO: 677805 - DNA, 15 bp, Homo sapiens
gctgggtttgggaat

SEQ ID NO: 677806 - DNA, 15 bp, Homo sapiens
ctgggtttgggaatg

SEQ ID NO: 677807 - DNA, 15 bp, Homo sapiens
tgggtttgggaatga

SEQ ID NO: 677808 - DNA, 15 bp, Homo sapiens
gggtttgggaatgag

SEQ ID NO: 677809 - DNA, 15 bp, Homo sapiens
ggtttgggaatgagc

SEQ ID NO: 677810 - DNA, 15 bp, Homo sapiens
gtttgggaatgagca

SEQ ID NO: 677811 - DNA, 15 bp, Homo sapiens
tttgggaatgagcaa

SEQ ID NO: 677812 - DNA, 15 bp, Homo sapiens
ttgggaatgagcaag

SEQ ID NO: 677813 - DNA, 15 bp, Homo sapiens
tgggaatgagcaagt

SEQ ID NO: 677814 - DNA, 15 bp, Homo sapiens
gggaatgagcaagtg

SEQ ID NO: 677815 - DNA, 15 bp, Homo sapiens
ggaatgagcaagtgg

SEQ ID NO: 677816 - DNA, 15 bp, Homo sapiens
gaatgagcaagtggg

SEQ ID NO: 677817 - DNA, 15 bp, Homo sapiens
aatgagcaagtgggg

SEQ ID NO: 677818 - DNA, 15 bp, Homo sapiens
atgagcaagtgggga

SEQ ID NO: 677819 - DNA, 15 bp, Homo sapiens
tgagcaagtggggat

SEQ ID NO: 677820 - DNA, 15 bp, Homo sapiens
gagcaagtggggatg

SEQ ID NO: 677821 - DNA, 15 bp, Homo sapiens
agcaagtggggatgt

SEQ ID NO: 677822 - DNA, 15 bp, Homo sapiens
gcaagtggggatgtg

SEQ ID NO: 677823 - DNA, 15 bp, Homo sapiens
caagtggggatgtgt

SEQ ID NO: 677824 - DNA, 15 bp, Homo sapiens
aagtggggatgtgtt

SEQ ID NO: 677825 - DNA, 15 bp, Homo sapiens
agtggggatgtgttt

SEQ ID NO: 677826 - DNA, 15 bp, Homo sapiens
gtggggatgtgtttt

SEQ ID NO: 677827 - DNA, 15 bp, Homo sapiens
tggggatgtgttttc

SEQ ID NO: 677828 - DNA, 15 bp, Homo sapiens
ggggatgtgttttct

SEQ ID NO: 677829 - DNA, 15 bp, Homo sapiens
gggatgtgttttctt

SEQ ID NO: 677830 - DNA, 15 bp, Homo sapiens
ggatgtgttttcttt

SEQ ID NO: 677831 - DNA, 15 bp, Homo sapiens
gatgtgttttcttta

SEQ ID NO: 677832 - DNA, 15 bp, Homo sapiens
atgtgttttctttag

SEQ ID NO: 677833 - DNA, 15 bp, Homo sapiens
tgtgttttctttagc

SEQ ID NO: 677834 - DNA, 15 bp, Homo sapiens
gtgttttctttagca

SEQ ID NO: 677835 - DNA, 15 bp, Homo sapiens
tgttttctttagcac

SEQ ID NO: 677836 - DNA, 15 bp, Homo sapiens
gttttctttagcaca

SEQ ID NO: 677837 - DNA, 15 bp, Homo sapiens
ttttctttagcacac

SEQ ID NO: 677838 - DNA, 15 bp, Homo sapiens
tttctttagcacaca

SEQ ID NO: 677839 - DNA, 15 bp, Homo sapiens
ttctttagcacacat

SEQ ID NO: 677840 - DNA, 15 bp, Homo sapiens
tctttagcacacatc

SEQ ID NO: 677841 - DNA, 15 bp, Homo sapiens
ctttagcacacatca

SEQ ID NO: 677842 - DNA, 15 bp, Homo sapiens
tttagcacacatcaa

SEQ ID NO: 677843 - DNA, 15 bp, Homo sapiens
ttagcacacatcaag

SEQ ID NO: 677844 - DNA, 15 bp, Homo sapiens
tagcacacatcaagt

SEQ ID NO: 677845 - DNA, 15 bp, Homo sapiens
agcacacatcaagtg

SEQ ID NO: 677846 - DNA, 15 bp, Homo sapiens
gcacacatcaagtga

SEQ ID NO: 677847 - DNA, 15 bp, Homo sapiens
cacacatcaagtgac

SEQ ID NO: 677848 - DNA, 15 bp, Homo sapiens
acacatcaagtgaca

SEQ ID NO: 677849 - DNA, 15 bp, Homo sapiens
cacatcaagtgacag

SEQ ID NO: 677850 - DNA, 15 bp, Homo sapiens
acatcaagtgacagt

SEQ ID NO: 677851 - DNA, 15 bp, Homo sapiens
catcaagtgacagtt

SEQ ID NO: 677852 - DNA, 15 bp, Homo sapiens
atcaagtgacagttt

SEQ ID NO: 677853 - DNA, 15 bp, Homo sapiens
tcaagtgacagttta

SEQ ID NO: 677854 - DNA, 15 bp, Homo sapiens
caagtgacagtttat

SEQ ID NO: 677855 - DNA, 15 bp, Homo sapiens
aagtgacagtttata

SEQ ID NO: 677856 - DNA, 15 bp, Homo sapiens
agtgacagtttatat

SEQ ID NO: 677857 - DNA, 15 bp, Homo sapiens
gtgacagtttatata

SEQ ID NO: 677858 - DNA, 15 bp, Homo sapiens
tgacagtttatatag

SEQ ID NO: 677859 - DNA, 15 bp, Homo sapiens
gacagtttatatagg

SEQ ID NO: 677860 - DNA, 15 bp, Homo sapiens
acagtttatataggt

SEQ ID NO: 677861 - DNA, 15 bp, Homo sapiens
cagtttatataggta

SEQ ID NO: 677862 - DNA, 15 bp, Homo sapiens
agtttatataggtag

SEQ ID NO: 677863 - DNA, 15 bp, Homo sapiens
gtttatataggtagc

SEQ ID NO: 677864 - DNA, 15 bp, Homo sapiens
tttatataggtagct

SEQ ID NO: 677865 - DNA, 15 bp, Homo sapiens
ttatataggtagcta

SEQ ID NO: 677866 - DNA, 15 bp, Homo sapiens
tatataggtagctaa

SEQ ID NO: 677867 - DNA, 15 bp, Homo sapiens
atataggtagctaat

SEQ ID NO: 677868 - DNA, 15 bp, Homo sapiens
tataggtagctaata

SEQ ID NO: 677869 - DNA, 15 bp, Homo sapiens
ataggtagctaatat

SEQ ID NO: 677870 - DNA, 15 bp, Homo sapiens
taggtagctaatatt

SEQ ID NO: 677871 - DNA, 15 bp, Homo sapiens
aggtagctaatattt

SEQ ID NO: 677872 - DNA, 15 bp, Homo sapiens
ggtagctaatattta

SEQ ID NO: 677873 - DNA, 15 bp, Homo sapiens
gtagctaatatttag

SEQ ID NO: 677874 - DNA, 15 bp, Homo sapiens
tagctaatatttagg

SEQ ID NO: 677875 - DNA, 15 bp, Homo sapiens
agctaatatttagga

SEQ ID NO: 677876 - DNA, 15 bp, Homo sapiens
gctaatatttaggat

SEQ ID NO: 677877 - DNA, 15 bp, Homo sapiens
ctaatatttaggatt

SEQ ID NO: 677878 - DNA, 15 bp, Homo sapiens
taatatttaggattt

SEQ ID NO: 677879 - DNA, 15 bp, Homo sapiens
aatatttaggatttt

SEQ ID NO: 677880 - DNA, 15 bp, Homo sapiens
atatttaggattttc

SEQ ID NO: 677881 - DNA, 15 bp, Homo sapiens
tatttaggattttcc

SEQ ID NO: 677882 - DNA, 15 bp, Homo sapiens
atttaggattttccc

SEQ ID NO: 677883 - DNA, 15 bp, Homo sapiens
tttaggattttcccc

SEQ ID NO: 677884 - DNA, 15 bp, Homo sapiens
ttaggattttcccca

SEQ ID NO: 677885 - DNA, 15 bp, Homo sapiens
taggattttccccaa

SEQ ID NO: 677886 - DNA, 15 bp, Homo sapiens
aggattttccccaat

SEQ ID NO: 677887 - DNA, 15 bp, Homo sapiens
ggattttccccaatt

SEQ ID NO: 677888 - DNA, 15 bp, Homo sapiens
gattttccccaattc

SEQ ID NO: 677889 - DNA, 15 bp, Homo sapiens
attttccccaattct

SEQ ID NO: 677890 - DNA, 15 bp, Homo sapiens
ttttccccaattcta

SEQ ID NO: 677891 - DNA, 15 bp, Homo sapiens
tttccccaattctaa

SEQ ID NO: 677892 - DNA, 15 bp, Homo sapiens
ttccccaattctaat

SEQ ID NO: 677893 - DNA, 15 bp, Homo sapiens
tccccaattctaatc

SEQ ID NO: 677894 - DNA, 15 bp, Homo sapiens
ccccaattctaatca

SEQ ID NO: 677895 - DNA, 15 bp, Homo sapiens
cccaattctaatcat

SEQ ID NO: 677896 - DNA, 15 bp, Homo sapiens
ccaattctaatcatt

SEQ ID NO: 677897 - DNA, 15 bp, Homo sapiens
caattctaatcatta

SEQ ID NO: 677898 - DNA, 15 bp, Homo sapiens
aattctaatcattag

SEQ ID NO: 677899 - DNA, 15 bp, Homo sapiens
attctaatcattagt

SEQ ID NO: 677900 - DNA, 15 bp, Homo sapiens
ttctaatcattagtt

SEQ ID NO: 677901 - DNA, 15 bp, Homo sapiens
tctaatcattagttg

SEQ ID NO: 677902 - DNA, 15 bp, Homo sapiens
ctaatcattagttga

SEQ ID NO: 677903 - DNA, 15 bp, Homo sapiens
taatcattagttgaa

SEQ ID NO: 677904 - DNA, 15 bp, Homo sapiens
aatcattagttgaaa

SEQ ID NO: 677905 - DNA, 15 bp, Homo sapiens
atcattagttgaaag

SEQ ID NO: 677906 - DNA, 15 bp, Homo sapiens
tcattagttgaaagg

SEQ ID NO: 677907 - DNA, 15 bp, Homo sapiens
cattagttgaaaggc

SEQ ID NO: 677908 - DNA, 15 bp, Homo sapiens
attagttgaaaggct

SEQ ID NO: 677909 - DNA, 15 bp, Homo sapiens
ttagttgaaaggctt

SEQ ID NO: 677910 - DNA, 15 bp, Homo sapiens
tagttgaaaggcttc

SEQ ID NO: 677911 - DNA, 15 bp, Homo sapiens
agttgaaaggcttcc

SEQ ID NO: 677912 - DNA, 15 bp, Homo sapiens
gttgaaaggcttcct

SEQ ID NO: 677913 - DNA, 15 bp, Homo sapiens
ttgaaaggcttcctc

SEQ ID NO: 677914 - DNA, 15 bp, Homo sapiens
tgaaaggcttcctct

SEQ ID NO: 677915 - DNA, 15 bp, Homo sapiens
gaaaggcttcctctg

SEQ ID NO: 677916 - DNA, 15 bp, Homo sapiens
aaaggcttcctctgc

SEQ ID NO: 677917 - DNA, 15 bp, Homo sapiens
aaggcttcctctgct

SEQ ID NO: 677918 - DNA, 15 bp, Homo sapiens
aggcttcctctgctt

SEQ ID NO: 677919 - DNA, 15 bp, Homo sapiens
ggcttcctctgcttt

SEQ ID NO: 677920 - DNA, 15 bp, Homo sapiens
gcttcctctgctttt

SEQ ID NO: 677921 - DNA, 15 bp, Homo sapiens
cttcctctgcttttc

SEQ ID NO: 677922 - DNA, 15 bp, Homo sapiens
ttcctctgcttttca

SEQ ID NO: 677923 - DNA, 15 bp, Homo sapiens
tcctctgcttttcag

SEQ ID NO: 677924 - DNA, 15 bp, Homo sapiens
cctctgcttttcaga

SEQ ID NO: 677925 - DNA, 15 bp, Homo sapiens
ctctgcttttcagat

SEQ ID NO: 677926 - DNA, 15 bp, Homo sapiens
tctgcttttcagatc

SEQ ID NO: 677927 - DNA, 15 bp, Homo sapiens
ctgcttttcagatct

SEQ ID NO: 677928 - DNA, 15 bp, Homo sapiens
tgcttttcagatcta

SEQ ID NO: 677929 - DNA, 15 bp, Homo sapiens
gcttttcagatctac

SEQ ID NO: 677930 - DNA, 15 bp, Homo sapiens
cttttcagatctact

SEQ ID NO: 677931 - DNA, 15 bp, Homo sapiens
ttttcagatctactt

SEQ ID NO: 677932 - DNA, 15 bp, Homo sapiens
tttcagatctacttg

SEQ ID NO: 677933 - DNA, 15 bp, Homo sapiens
ttcagatctacttgc

SEQ ID NO: 677934 - DNA, 15 bp, Homo sapiens
tcagatctacttgca

SEQ ID NO: 677935 - DNA, 15 bp, Homo sapiens
cagatctacttgcaa

SEQ ID NO: 677936 - DNA, 15 bp, Homo sapiens
agatctacttgcaag

SEQ ID NO: 677937 - DNA, 15 bp, Homo sapiens
gatctacttgcaaga

SEQ ID NO: 677938 - DNA, 15 bp, Homo sapiens
atctacttgcaagag

SEQ ID NO: 677939 - DNA, 15 bp, Homo sapiens
tctacttgcaagaga

SEQ ID NO: 677940 - DNA, 15 bp, Homo sapiens
ctacttgcaagagag

SEQ ID NO: 677941 - DNA, 15 bp, Homo sapiens
tacttgcaagagaga

SEQ ID NO: 677942 - DNA, 15 bp, Homo sapiens
acttgcaagagagaa

SEQ ID NO: 677943 - DNA, 15 bp, Homo sapiens
cttgcaagagagaag

SEQ ID NO: 677944 - DNA, 15 bp, Homo sapiens
ttgcaagagagaaga

SEQ ID NO: 677945 - DNA, 15 bp, Homo sapiens
tgcaagagagaagag

SEQ ID NO: 677946 - DNA, 15 bp, Homo sapiens
gcaagagagaagaga

SEQ ID NO: 677947 - DNA, 15 bp, Homo sapiens
caagagagaagagat

SEQ ID NO: 677948 - DNA, 15 bp, Homo sapiens
aagagagaagagatt

SEQ ID NO: 677949 - DNA, 15 bp, Homo sapiens
agagagaagagattg

SEQ ID NO: 677950 - DNA, 15 bp, Homo sapiens
gagagaagagattgt

SEQ ID NO: 677951 - DNA, 15 bp, Homo sapiens
agagaagagattgtt

SEQ ID NO: 677952 - DNA, 15 bp, Homo sapiens
gagaagagattgtta

SEQ ID NO: 677953 - DNA, 15 bp, Homo sapiens
agaagagattgttaa

SEQ ID NO: 677954 - DNA, 15 bp, Homo sapiens
gaagagattgttaat

SEQ ID NO: 677955 - DNA, 15 bp, Homo sapiens
aagagattgttaatt

SEQ ID NO: 677956 - DNA, 15 bp, Homo sapiens
agagattgttaattt

SEQ ID NO: 677957 - DNA, 15 bp, Homo sapiens
gagattgttaatttt

SEQ ID NO: 677958 - DNA, 15 bp, Homo sapiens
agattgttaattttt

SEQ ID NO: 677959 - DNA, 15 bp, Homo sapiens
gattgttaatttttg

SEQ ID NO: 677960 - DNA, 15 bp, Homo sapiens
attgttaatttttgc

SEQ ID NO: 677961 - DNA, 15 bp, Homo sapiens
ttgttaatttttgct

SEQ ID NO: 677962 - DNA, 15 bp, Homo sapiens
tgttaatttttgctg

SEQ ID NO: 677963 - DNA, 15 bp, Homo sapiens
gttaatttttgctgt

SEQ ID NO: 677964 - DNA, 15 bp, Homo sapiens
ttaatttttgctgtt

SEQ ID NO: 677965 - DNA, 15 bp, Homo sapiens
taatttttgctgttt

SEQ ID NO: 677966 - DNA, 15 bp, Homo sapiens
aatttttgctgtttt

SEQ ID NO: 677967 - DNA, 15 bp, Homo sapiens
atttttgctgtttta

SEQ ID NO: 677968 - DNA, 15 bp, Homo sapiens
tttttgctgttttag

SEQ ID NO: 677969 - DNA, 15 bp, Homo sapiens
ttttgctgttttaga

SEQ ID NO: 677970 - DNA, 15 bp, Homo sapiens
tttgctgttttagag

SEQ ID NO: 677971 - DNA, 15 bp, Homo sapiens
ttgctgttttagagc

SEQ ID NO: 677972 - DNA, 15 bp, Homo sapiens
tgctgttttagagcc

SEQ ID NO: 677973 - DNA, 15 bp, Homo sapiens
gctgttttagagcct

SEQ ID NO: 677974 - DNA, 15 bp, Homo sapiens
ctgttttagagcctg

SEQ ID NO: 677975 - DNA, 15 bp, Homo sapiens
tgttttagagcctgt

SEQ ID NO: 677976 - DNA, 15 bp, Homo sapiens
gttttagagcctgtc

SEQ ID NO: 677977 - DNA, 15 bp, Homo sapiens
ttttagagcctgtcc

SEQ ID NO: 677978 - DNA, 15 bp, Homo sapiens
tttagagcctgtccc

SEQ ID NO: 677979 - DNA, 15 bp, Homo sapiens
ttagagcctgtccct

SEQ ID NO: 677980 - DNA, 15 bp, Homo sapiens
tagagcctgtccctt

SEQ ID NO: 677981 - DNA, 15 bp, Homo sapiens
agagcctgtcccttt

SEQ ID NO: 677982 - DNA, 15 bp, Homo sapiens
gagcctgtccctttg

SEQ ID NO: 677983 - DNA, 15 bp, Homo sapiens
agcctgtccctttgt

SEQ ID NO: 677984 - DNA, 15 bp, Homo sapiens
gcctgtccctttgtt

SEQ ID NO: 677985 - DNA, 15 bp, Homo sapiens
cctgtccctttgtta

SEQ ID NO: 677986 - DNA, 15 bp, Homo sapiens
ctgtccctttgttat

SEQ ID NO: 677987 - DNA, 15 bp, Homo sapiens
tgtccctttgttatg

SEQ ID NO: 677988 - DNA, 15 bp, Homo sapiens
gtccctttgttatgt

SEQ ID NO: 677989 - DNA, 15 bp, Homo sapiens
tccctttgttatgtg

SEQ ID NO: 677990 - DNA, 15 bp, Homo sapiens
ccctttgttatgtga

SEQ ID NO: 677991 - DNA, 15 bp, Homo sapiens
cctttgttatgtgac

SEQ ID NO: 677992 - DNA, 15 bp, Homo sapiens
ctttgttatgtgact

SEQ ID NO: 677993 - DNA, 15 bp, Homo sapiens
tttgttatgtgactg

SEQ ID NO: 677994 - DNA, 15 bp, Homo sapiens
ttgttatgtgactgc

SEQ ID NO: 677995 - DNA, 15 bp, Homo sapiens
tgttatgtgactgca

SEQ ID NO: 677996 - DNA, 15 bp, Homo sapiens
gttatgtgactgcag

SEQ ID NO: 677997 - DNA, 15 bp, Homo sapiens
ttatgtgactgcagg

SEQ ID NO: 677998 - DNA, 15 bp, Homo sapiens
tatgtgactgcaggg

SEQ ID NO: 677999 - DNA, 15 bp, Homo sapiens
atgtgactgcagggg

SEQ ID NO: 678000 - DNA, 15 bp, Homo sapiens
tgtgactgcaggggt

SEQ ID NO: 678001 - DNA, 15 bp, Homo sapiens
gtgactgcaggggta

SEQ ID NO: 678002 - DNA, 15 bp, Homo sapiens
tgactgcaggggtag

SEQ ID NO: 678003 - DNA, 15 bp, Homo sapiens
gactgcaggggtaga

SEQ ID NO: 678004 - DNA, 15 bp, Homo sapiens
actgcaggggtagaa

SEQ ID NO: 678005 - DNA, 15 bp, Homo sapiens
ctgcaggggtagaat

SEQ ID NO: 678006 - DNA, 15 bp, Homo sapiens
tgcaggggtagaatt

SEQ ID NO: 678007 - DNA, 15 bp, Homo sapiens
gcaggggtagaattg

SEQ ID NO: 678008 - DNA, 15 bp, Homo sapiens
caggggtagaattga

SEQ ID NO: 678009 - DNA, 15 bp, Homo sapiens
aggggtagaattgag

SEQ ID NO: 678010 - DNA, 15 bp, Homo sapiens
ggggtagaattgaga

SEQ ID NO: 678011 - DNA, 15 bp, Homo sapiens
gggtagaattgagag

SEQ ID NO: 678012 - DNA, 15 bp, Homo sapiens
ggtagaattgagagt

SEQ ID NO: 678013 - DNA, 15 bp, Homo sapiens
gtagaattgagagtt

SEQ ID NO: 678014 - DNA, 15 bp, Homo sapiens
tagaattgagagttg

SEQ ID NO: 678015 - DNA, 15 bp, Homo sapiens
agaattgagagttga

SEQ ID NO: 678016 - DNA, 15 bp, Homo sapiens
gaattgagagttgaa

SEQ ID NO: 678017 - DNA, 15 bp, Homo sapiens
aattgagagttgaac

SEQ ID NO: 678018 - DNA, 15 bp, Homo sapiens
attgagagttgaaca

SEQ ID NO: 678019 - DNA, 15 bp, Homo sapiens
ttgagagttgaacac

SEQ ID NO: 678020 - DNA, 15 bp, Homo sapiens
tgagagttgaacact

SEQ ID NO: 678021 - DNA, 15 bp, Homo sapiens
gagagttgaacactg

SEQ ID NO: 678022 - DNA, 15 bp, Homo sapiens
agagttgaacactgg

SEQ ID NO: 678023 - DNA, 15 bp, Homo sapiens
gagttgaacactggg

SEQ ID NO: 678024 - DNA, 15 bp, Homo sapiens
agttgaacactggga

SEQ ID NO: 678025 - DNA, 15 bp, Homo sapiens
gttgaacactgggaa

SEQ ID NO: 678026 - DNA, 15 bp, Homo sapiens
ttgaacactgggaaa

SEQ ID NO: 678027 - DNA, 15 bp, Homo sapiens
tgaacactgggaaaa

SEQ ID NO: 678028 - DNA, 15 bp, Homo sapiens
gaacactgggaaaac

SEQ ID NO: 678029 - DNA, 15 bp, Homo sapiens
aacactgggaaaacc

SEQ ID NO: 678030 - DNA, 15 bp, Homo sapiens
acactgggaaaaccg

SEQ ID NO: 678031 - DNA, 15 bp, Homo sapiens
cactgggaaaaccgc

SEQ ID NO: 678032 - DNA, 15 bp, Homo sapiens
actgggaaaaccgca

SEQ ID NO: 678033 - DNA, 15 bp, Homo sapiens
ctgggaaaaccgcag

SEQ ID NO: 678034 - DNA, 15 bp, Homo sapiens
tgggaaaaccgcaga

SEQ ID NO: 678035 - DNA, 15 bp, Homo sapiens
gggaaaaccgcagag

SEQ ID NO: 678036 - DNA, 15 bp, Homo sapiens
ggaaaaccgcagagc

SEQ ID NO: 678037 - DNA, 15 bp, Homo sapiens
gaaaaccgcagagca

SEQ ID NO: 678038 - DNA, 15 bp, Homo sapiens
aaaaccgcagagcaa

SEQ ID NO: 678039 - DNA, 15 bp, Homo sapiens
aaaccgcagagcaat

SEQ ID NO: 678040 - DNA, 15 bp, Homo sapiens
aaccgcagagcaatt

SEQ ID NO: 678041 - DNA, 15 bp, Homo sapiens
accgcagagcaatta

SEQ ID NO: 678042 - DNA, 15 bp, Homo sapiens
ccgcagagcaattag

SEQ ID NO: 678043 - DNA, 15 bp, Homo sapiens
cgcagagcaattagg

SEQ ID NO: 678044 - DNA, 15 bp, Homo sapiens
gcagagcaattaggt

SEQ ID NO: 678045 - DNA, 15 bp, Homo sapiens
cagagcaattaggta

SEQ ID NO: 678046 - DNA, 15 bp, Homo sapiens
agagcaattaggtat

SEQ ID NO: 678047 - DNA, 15 bp, Homo sapiens
gagcaattaggtata

SEQ ID NO: 678048 - DNA, 15 bp, Homo sapiens
agcaattaggtatat

SEQ ID NO: 678049 - DNA, 15 bp, Homo sapiens
gcaattaggtatata

SEQ ID NO: 678050 - DNA, 15 bp, Homo sapiens
caattaggtatataa

SEQ ID NO: 678051 - DNA, 15 bp, Homo sapiens
aattaggtatataag

SEQ ID NO: 678052 - DNA, 15 bp, Homo sapiens
attaggtatataagt

SEQ ID NO: 678053 - DNA, 15 bp, Homo sapiens
ttaggtatataagtg

SEQ ID NO: 678054 - DNA, 15 bp, Homo sapiens
taggtatataagtga

SEQ ID NO: 678055 - DNA, 15 bp, Homo sapiens
aggtatataagtgat

SEQ ID NO: 678056 - DNA, 15 bp, Homo sapiens
ggtatataagtgatg

SEQ ID NO: 678057 - DNA, 15 bp, Homo sapiens
gtatataagtgatga

SEQ ID NO: 678058 - DNA, 15 bp, Homo sapiens
tatataagtgatgac

SEQ ID NO: 678059 - DNA, 15 bp, Homo sapiens
atataagtgatgact

SEQ ID NO: 678060 - DNA, 15 bp, Homo sapiens
tataagtgatgacta

SEQ ID NO: 678061 - DNA, 15 bp, Homo sapiens
ataagtgatgactaa

SEQ ID NO: 678062 - DNA, 15 bp, Homo sapiens
taagtgatgactaaa

SEQ ID NO: 678063 - DNA, 15 bp, Homo sapiens
aagtgatgactaaat

SEQ ID NO: 678064 - DNA, 15 bp, Homo sapiens
agtgatgactaaatc

SEQ ID NO: 678065 - DNA, 15 bp, Homo sapiens
gtgatgactaaatct

SEQ ID NO: 678066 - DNA, 15 bp, Homo sapiens
tgatgactaaatcta

SEQ ID NO: 678067 - DNA, 15 bp, Homo sapiens
gatgactaaatctag

SEQ ID NO: 678068 - DNA, 15 bp, Homo sapiens
atgactaaatctaga

SEQ ID NO: 678069 - DNA, 15 bp, Homo sapiens
tgactaaatctagat

SEQ ID NO: 678070 - DNA, 15 bp, Homo sapiens
gactaaatctagata

SEQ ID NO: 678071 - DNA, 15 bp, Homo sapiens
actaaatctagatat

SEQ ID NO: 678072 - DNA, 15 bp, Homo sapiens
ctaaatctagatatt

SEQ ID NO: 678073 - DNA, 15 bp, Homo sapiens
taaatctagatattc

SEQ ID NO: 678074 - DNA, 15 bp, Homo sapiens
aaatctagatattca

SEQ ID NO: 678075 - DNA, 15 bp, Homo sapiens
aatctagatattcat

SEQ ID NO: 678076 - DNA, 15 bp, Homo sapiens
atctagatattcatt

SEQ ID NO: 678077 - DNA, 15 bp, Homo sapiens
tctagatattcattt

SEQ ID NO: 678078 - DNA, 15 bp, Homo sapiens
ctagatattcatttc

SEQ ID NO: 678079 - DNA, 15 bp, Homo sapiens
tagatattcatttct

SEQ ID NO: 678080 - DNA, 15 bp, Homo sapiens
agatattcatttcta

SEQ ID NO: 678081 - DNA, 15 bp, Homo sapiens
gatattcatttctag

SEQ ID NO: 678082 - DNA, 15 bp, Homo sapiens
atattcatttctagt

SEQ ID NO: 678083 - DNA, 15 bp, Homo sapiens
tattcatttctagtt

SEQ ID NO: 678084 - DNA, 15 bp, Homo sapiens
attcatttctagtta

SEQ ID NO: 678085 - DNA, 15 bp, Homo sapiens
ttcatttctagttac

SEQ ID NO: 678086 - DNA, 15 bp, Homo sapiens
tcatttctagttaca

SEQ ID NO: 678087 - DNA, 15 bp, Homo sapiens
catttctagttacaa

SEQ ID NO: 678088 - DNA, 15 bp, Homo sapiens
atttctagttacaaa

SEQ ID NO: 678089 - DNA, 15 bp, Homo sapiens
tttctagttacaaaa

SEQ ID NO: 678090 - DNA, 15 bp, Homo sapiens
ttctagttacaaaat

SEQ ID NO: 678091 - DNA, 15 bp, Homo sapiens
tctagttacaaaatc

SEQ ID NO: 678092 - DNA, 15 bp, Homo sapiens
ctagttacaaaatca

SEQ ID NO: 678093 - DNA, 15 bp, Homo sapiens
tagttacaaaatcag

SEQ ID NO: 678094 - DNA, 15 bp, Homo sapiens
agttacaaaatcagt

SEQ ID NO: 678095 - DNA, 15 bp, Homo sapiens
gttacaaaatcagta

SEQ ID NO: 678096 - DNA, 15 bp, Homo sapiens
ttacaaaatcagtaa

SEQ ID NO: 678097 - DNA, 15 bp, Homo sapiens
tacaaaatcagtaaa

SEQ ID NO: 678098 - DNA, 15 bp, Homo sapiens
acaaaatcagtaaat

SEQ ID NO: 678099 - DNA, 15 bp, Homo sapiens
caaaatcagtaaatg

SEQ ID NO: 678100 - DNA, 15 bp, Homo sapiens
aaaatcagtaaatgc

SEQ ID NO: 678101 - DNA, 15 bp, Homo sapiens
aaatcagtaaatgcc

SEQ ID NO: 678102 - DNA, 15 bp, Homo sapiens
aatcagtaaatgcca

SEQ ID NO: 678103 - DNA, 15 bp, Homo sapiens
atcagtaaatgccag

SEQ ID NO: 678104 - DNA, 15 bp, Homo sapiens
tcagtaaatgccagg

SEQ ID NO: 678105 - DNA, 15 bp, Homo sapiens
cagtaaatgccaggc

SEQ ID NO: 678106 - DNA, 15 bp, Homo sapiens
agtaaatgccaggcc

SEQ ID NO: 678107 - DNA, 15 bp, Homo sapiens
gtaaatgccaggccc

SEQ ID NO: 678108 - DNA, 15 bp, Homo sapiens
taaatgccaggccct

SEQ ID NO: 678109 - DNA, 15 bp, Homo sapiens
aaatgccaggcccta

SEQ ID NO: 678110 - DNA, 15 bp, Homo sapiens
aatgccaggccctat

SEQ ID NO: 678111 - DNA, 15 bp, Homo sapiens
atgccaggccctatg

SEQ ID NO: 678112 - DNA, 15 bp, Homo sapiens
tgccaggccctatgc

SEQ ID NO: 678113 - DNA, 15 bp, Homo sapiens
gccaggccctatgct

SEQ ID NO: 678114 - DNA, 15 bp, Homo sapiens
ccaggccctatgcta

SEQ ID NO: 678115 - DNA, 15 bp, Homo sapiens
caggccctatgctag

SEQ ID NO: 678116 - DNA, 15 bp, Homo sapiens
aggccctatgctaga

SEQ ID NO: 678117 - DNA, 15 bp, Homo sapiens
ggccctatgctagag

SEQ ID NO: 678118 - DNA, 15 bp, Homo sapiens
gccctatgctagaga

SEQ ID NO: 678119 - DNA, 15 bp, Homo sapiens
agacaatgatgatga

SEQ ID NO: 678120 - DNA, 15 bp, Homo sapiens
gacaatgatgatgat

SEQ ID NO: 678121 - DNA, 15 bp, Homo sapiens
acaatgatgatgatc

SEQ ID NO: 678122 - DNA, 15 bp, Homo sapiens
caatgatgatgatca

SEQ ID NO: 678123 - DNA, 15 bp, Homo sapiens
aatgatgatgatcac

SEQ ID NO: 678124 - DNA, 15 bp, Homo sapiens
atgatgatgatcact

SEQ ID NO: 678125 - DNA, 15 bp, Homo sapiens
tgatgatgatcactt

SEQ ID NO: 678126 - DNA, 15 bp, Homo sapiens
gatgatgatcacttc

SEQ ID NO: 678127 - DNA, 15 bp, Homo sapiens
atgatgatcacttca

SEQ ID NO: 678128 - DNA, 15 bp, Homo sapiens
tgatgatcacttcaa

SEQ ID NO: 678129 - DNA, 15 bp, Homo sapiens
gatgatcacttcaaa

SEQ ID NO: 678130 - DNA, 15 bp, Homo sapiens
atgatcacttcaaaa

SEQ ID NO: 678131 - DNA, 15 bp, Homo sapiens
tgatcacttcaaaat

SEQ ID NO: 678132 - DNA, 15 bp, Homo sapiens
gatcacttcaaaatg

SEQ ID NO: 678133 - DNA, 15 bp, Homo sapiens
atcacttcaaaatga

SEQ ID NO: 678134 - DNA, 15 bp, Homo sapiens
tcacttcaaaatgaa

SEQ ID NO: 678135 - DNA, 15 bp, Homo sapiens
cacttcaaaatgaat

SEQ ID NO: 678136 - DNA, 15 bp, Homo sapiens
acttcaaaatgaatt

SEQ ID NO: 678137 - DNA, 15 bp, Homo sapiens
cttcaaaatgaattc

SEQ ID NO: 678138 - DNA, 15 bp, Homo sapiens
ttcaaaatgaattca

SEQ ID NO: 678139 - DNA, 15 bp, Homo sapiens
tcaaaatgaattcag

SEQ ID NO: 678140 - DNA, 15 bp, Homo sapiens
caaaatgaattcagg

SEQ ID NO: 678141 - DNA, 15 bp, Homo sapiens
aaaatgaattcagga

SEQ ID NO: 678142 - DNA, 15 bp, Homo sapiens
aaatgaattcaggat

SEQ ID NO: 678143 - DNA, 15 bp, Homo sapiens
aatgaattcaggatt

SEQ ID NO: 678144 - DNA, 15 bp, Homo sapiens
atgaattcaggattg

SEQ ID NO: 678145 - DNA, 15 bp, Homo sapiens
tgaattcaggattgt

SEQ ID NO: 678146 - DNA, 15 bp, Homo sapiens
gaattcaggattgta

SEQ ID NO: 678147 - DNA, 15 bp, Homo sapiens
aattcaggattgtaa

SEQ ID NO: 678148 - DNA, 15 bp, Homo sapiens
attcaggattgtaat

SEQ ID NO: 678149 - DNA, 15 bp, Homo sapiens
ttcaggattgtaatg

SEQ ID NO: 678150 - DNA, 15 bp, Homo sapiens
tcaggattgtaatgt

SEQ ID NO: 678151 - DNA, 15 bp, Homo sapiens
caggattgtaatgta

SEQ ID NO: 678152 - DNA, 15 bp, Homo sapiens
aggattgtaatgtaa

SEQ ID NO: 678153 - DNA, 15 bp, Homo sapiens
ggattgtaatgtaaa

SEQ ID NO: 678154 - DNA, 15 bp, Homo sapiens
gattgtaatgtaaaa

SEQ ID NO: 678155 - DNA, 15 bp, Homo sapiens
attgtaatgtaaaat

SEQ ID NO: 678156 - DNA, 15 bp, Homo sapiens
ttgtaatgtaaaatt

SEQ ID NO: 678157 - DNA, 15 bp, Homo sapiens
tgtaatgtaaaattt

SEQ ID NO: 678158 - DNA, 15 bp, Homo sapiens
gtaatgtaaaatttt

SEQ ID NO: 678159 - DNA, 15 bp, Homo sapiens
taatgtaaaatttta

SEQ ID NO: 678160 - DNA, 15 bp, Homo sapiens
aatgtaaaattttag

SEQ ID NO: 678161 - DNA, 15 bp, Homo sapiens
atgtaaaattttagt

SEQ ID NO: 678162 - DNA, 15 bp, Homo sapiens
tgtaaaattttagta

SEQ ID NO: 678163 - DNA, 15 bp, Homo sapiens
gtaaaattttagtac

SEQ ID NO: 678164 - DNA, 15 bp, Homo sapiens
taaaattttagtact

SEQ ID NO: 678165 - DNA, 15 bp, Homo sapiens
aaaattttagtactc

SEQ ID NO: 678166 - DNA, 15 bp, Homo sapiens
aaattttagtactct

SEQ ID NO: 678167 - DNA, 15 bp, Homo sapiens
aattttagtactctc

SEQ ID NO: 678168 - DNA, 15 bp, Homo sapiens
attttagtactctct

SEQ ID NO: 678169 - DNA, 15 bp, Homo sapiens
ttttagtactctctc

SEQ ID NO: 678170 - DNA, 15 bp, Homo sapiens
tttagtactctctca

SEQ ID NO: 678171 - DNA, 15 bp, Homo sapiens
ttagtactctctcac

SEQ ID NO: 678172 - DNA, 15 bp, Homo sapiens
tagtactctctcaca

SEQ ID NO: 678173 - DNA, 15 bp, Homo sapiens
agtactctctcacag

SEQ ID NO: 678174 - DNA, 15 bp, Homo sapiens
gtactctctcacagt

SEQ ID NO: 678175 - DNA, 15 bp, Homo sapiens
tactctctcacagta

SEQ ID NO: 678176 - DNA, 15 bp, Homo sapiens
actctctcacagtat

SEQ ID NO: 678177 - DNA, 15 bp, Homo sapiens
ctctctcacagtatg

SEQ ID NO: 678178 - DNA, 15 bp, Homo sapiens
tctctcacagtatgg

SEQ ID NO: 678179 - DNA, 15 bp, Homo sapiens
ctctcacagtatgga

SEQ ID NO: 678180 - DNA, 15 bp, Homo sapiens
tctcacagtatggat

SEQ ID NO: 678181 - DNA, 15 bp, Homo sapiens
ctcacagtatggatt

SEQ ID NO: 678182 - DNA, 15 bp, Homo sapiens
tcacagtatggattc

SEQ ID NO: 678183 - DNA, 15 bp, Homo sapiens
cacagtatggattct

SEQ ID NO: 678184 - DNA, 15 bp, Homo sapiens
acagtatggattcta

SEQ ID NO: 678185 - DNA, 15 bp, Homo sapiens
cagtatggattctaa

SEQ ID NO: 678186 - DNA, 15 bp, Homo sapiens
agtatggattctaac

SEQ ID NO: 678187 - DNA, 15 bp, Homo sapiens
gtatggattctaaca

SEQ ID NO: 678188 - DNA, 15 bp, Homo sapiens
tatggattctaacat

SEQ ID NO: 678189 - DNA, 15 bp, Homo sapiens
atggattctaacatg

SEQ ID NO: 678190 - DNA, 15 bp, Homo sapiens
tggattctaacatgg

SEQ ID NO: 678191 - DNA, 15 bp, Homo sapiens
ggattctaacatggc

SEQ ID NO: 678192 - DNA, 15 bp, Homo sapiens
gattctaacatggct

SEQ ID NO: 678193 - DNA, 15 bp, Homo sapiens
attctaacatggctt

SEQ ID NO: 678194 - DNA, 15 bp, Homo sapiens
ttctaacatggcttc

SEQ ID NO: 678195 - DNA, 15 bp, Homo sapiens
tctaacatggcttct

SEQ ID NO: 678196 - DNA, 15 bp, Homo sapiens
ctaacatggcttcta

SEQ ID NO: 678197 - DNA, 15 bp, Homo sapiens
taacatggcttctaa

SEQ ID NO: 678198 - DNA, 15 bp, Homo sapiens
aacatggcttctaac

SEQ ID NO: 678199 - DNA, 15 bp, Homo sapiens
acatggcttctaacc

SEQ ID NO: 678200 - DNA, 15 bp, Homo sapiens
catggcttctaaccc

SEQ ID NO: 678201 - DNA, 15 bp, Homo sapiens
atggcttctaaccca

SEQ ID NO: 678202 - DNA, 15 bp, Homo sapiens
tggcttctaacccaa

SEQ ID NO: 678203 - DNA, 15 bp, Homo sapiens
ggcttctaacccaaa

SEQ ID NO: 678204 - DNA, 15 bp, Homo sapiens
gcttctaacccaaac

SEQ ID NO: 678205 - DNA, 15 bp, Homo sapiens
cttctaacccaaact

SEQ ID NO: 678206 - DNA, 15 bp, Homo sapiens
ttctaacccaaacta

SEQ ID NO: 678207 - DNA, 15 bp, Homo sapiens
tctaacccaaactaa

SEQ ID NO: 678208 - DNA, 15 bp, Homo sapiens
ctaacccaaactaac

SEQ ID NO: 678209 - DNA, 15 bp, Homo sapiens
taacccaaactaaca

SEQ ID NO: 678210 - DNA, 15 bp, Homo sapiens
aacccaaactaacat

SEQ ID NO: 678211 - DNA, 15 bp, Homo sapiens
acccaaactaacatt

SEQ ID NO: 678212 - DNA, 15 bp, Homo sapiens
cccaaactaacatta

SEQ ID NO: 678213 - DNA, 15 bp, Homo sapiens
ccaaactaacattag

SEQ ID NO: 678214 - DNA, 15 bp, Homo sapiens
caaactaacattagt

SEQ ID NO: 678215 - DNA, 15 bp, Homo sapiens
aaactaacattagta

SEQ ID NO: 678216 - DNA, 15 bp, Homo sapiens
aactaacattagtag

SEQ ID NO: 678217 - DNA, 15 bp, Homo sapiens
actaacattagtagc

SEQ ID NO: 678218 - DNA, 15 bp, Homo sapiens
ctaacattagtagct

SEQ ID NO: 678219 - DNA, 15 bp, Homo sapiens
taacattagtagctc

SEQ ID NO: 678220 - DNA, 15 bp, Homo sapiens
aacattagtagctct

SEQ ID NO: 678221 - DNA, 15 bp, Homo sapiens
acattagtagctcta

SEQ ID NO: 678222 - DNA, 15 bp, Homo sapiens
cattagtagctctaa

SEQ ID NO: 678223 - DNA, 15 bp, Homo sapiens
attagtagctctaac

SEQ ID NO: 678224 - DNA, 15 bp, Homo sapiens
ttagtagctctaact

SEQ ID NO: 678225 - DNA, 15 bp, Homo sapiens
tagtagctctaacta

SEQ ID NO: 678226 - DNA, 15 bp, Homo sapiens
agtagctctaactat

SEQ ID NO: 678227 - DNA, 15 bp, Homo sapiens
gtagctctaactata

SEQ ID NO: 678228 - DNA, 15 bp, Homo sapiens
tagctctaactataa

SEQ ID NO: 678229 - DNA, 15 bp, Homo sapiens
agctctaactataaa

SEQ ID NO: 678230 - DNA, 15 bp, Homo sapiens
gctctaactataaac

SEQ ID NO: 678231 - DNA, 15 bp, Homo sapiens
ctctaactataaact

SEQ ID NO: 678232 - DNA, 15 bp, Homo sapiens
tctaactataaactt

SEQ ID NO: 678233 - DNA, 15 bp, Homo sapiens
ctaactataaacttc

SEQ ID NO: 678234 - DNA, 15 bp, Homo sapiens
taactataaacttca

SEQ ID NO: 678235 - DNA, 15 bp, Homo sapiens
aactataaacttcaa

SEQ ID NO: 678236 - DNA, 15 bp, Homo sapiens
actataaacttcaaa

SEQ ID NO: 678237 - DNA, 15 bp, Homo sapiens
ctataaacttcaaat

SEQ ID NO: 678238 - DNA, 15 bp, Homo sapiens
tataaacttcaaatt

SEQ ID NO: 678239 - DNA, 15 bp, Homo sapiens
ataaacttcaaattt

SEQ ID NO: 678240 - DNA, 15 bp, Homo sapiens
taaacttcaaatttc

SEQ ID NO: 678241 - DNA, 15 bp, Homo sapiens
aaacttcaaatttca

SEQ ID NO: 678242 - DNA, 15 bp, Homo sapiens
aacttcaaatttcag

SEQ ID NO: 678243 - DNA, 15 bp, Homo sapiens
acttcaaatttcagt

SEQ ID NO: 678244 - DNA, 15 bp, Homo sapiens
cttcaaatttcagta

SEQ ID NO: 678245 - DNA, 15 bp, Homo sapiens
ttcaaatttcagtag

SEQ ID NO: 678246 - DNA, 15 bp, Homo sapiens
tcaaatttcagtaga

SEQ ID NO: 678247 - DNA, 15 bp, Homo sapiens
caaatttcagtagat

SEQ ID NO: 678248 - DNA, 15 bp, Homo sapiens
aaatttcagtagatg

SEQ ID NO: 678249 - DNA, 15 bp, Homo sapiens
aatttcagtagatgc

SEQ ID NO: 678250 - DNA, 15 bp, Homo sapiens
atttcagtagatgca

SEQ ID NO: 678251 - DNA, 15 bp, Homo sapiens
tttcagtagatgcaa

SEQ ID NO: 678252 - DNA, 15 bp, Homo sapiens
ttcagtagatgcaac

SEQ ID NO: 678253 - DNA, 15 bp, Homo sapiens
tcagtagatgcaacc

SEQ ID NO: 678254 - DNA, 15 bp, Homo sapiens
cagtagatgcaacct

SEQ ID NO: 678255 - DNA, 15 bp, Homo sapiens
agtagatgcaaccta

SEQ ID NO: 678256 - DNA, 15 bp, Homo sapiens
gtagatgcaacctac

SEQ ID NO: 678257 - DNA, 15 bp, Homo sapiens
tagatgcaacctact

SEQ ID NO: 678258 - DNA, 15 bp, Homo sapiens
agatgcaacctactc

SEQ ID NO: 678259 - DNA, 15 bp, Homo sapiens
gatgcaacctactcc

SEQ ID NO: 678260 - DNA, 15 bp, Homo sapiens
atgcaacctactcct

SEQ ID NO: 678261 - DNA, 15 bp, Homo sapiens
tgcaacctactcctt

SEQ ID NO: 678262 - DNA, 15 bp, Homo sapiens
gcaacctactccttt

SEQ ID NO: 678263 - DNA, 15 bp, Homo sapiens
caacctactccttta

SEQ ID NO: 678264 - DNA, 15 bp, Homo sapiens
aacctactcctttaa

SEQ ID NO: 678265 - DNA, 15 bp, Homo sapiens
acctactcctttaaa

SEQ ID NO: 678266 - DNA, 15 bp, Homo sapiens
cctactcctttaaaa

SEQ ID NO: 678267 - DNA, 15 bp, Homo sapiens
ctactcctttaaaat

SEQ ID NO: 678268 - DNA, 15 bp, Homo sapiens
tactcctttaaaatg

SEQ ID NO: 678269 - DNA, 15 bp, Homo sapiens
actcctttaaaatga

SEQ ID NO: 678270 - DNA, 15 bp, Homo sapiens
ctcctttaaaatgaa

SEQ ID NO: 678271 - DNA, 15 bp, Homo sapiens
tcctttaaaatgaaa

SEQ ID NO: 678272 - DNA, 15 bp, Homo sapiens
cctttaaaatgaaac

SEQ ID NO: 678273 - DNA, 15 bp, Homo sapiens
ctttaaaatgaaaca

SEQ ID NO: 678274 - DNA, 15 bp, Homo sapiens
tttaaaatgaaacag

SEQ ID NO: 678275 - DNA, 15 bp, Homo sapiens
ttaaaatgaaacaga

SEQ ID NO: 678276 - DNA, 15 bp, Homo sapiens
taaaatgaaacagaa

SEQ ID NO: 678277 - DNA, 15 bp, Homo sapiens
aaaatgaaacagaag

SEQ ID NO: 678278 - DNA, 15 bp, Homo sapiens
aaatgaaacagaaga

SEQ ID NO: 678279 - DNA, 15 bp, Homo sapiens
aatgaaacagaagat

SEQ ID NO: 678280 - DNA, 15 bp, Homo sapiens
atgaaacagaagatt

SEQ ID NO: 678281 - DNA, 15 bp, Homo sapiens
tgaaacagaagattg

SEQ ID NO: 678282 - DNA, 15 bp, Homo sapiens
gaaacagaagattga

SEQ ID NO: 678283 - DNA, 15 bp, Homo sapiens
aaacagaagattgaa

SEQ ID NO: 678284 - DNA, 15 bp, Homo sapiens
aacagaagattgaaa

SEQ ID NO: 678285 - DNA, 15 bp, Homo sapiens
acagaagattgaaat

SEQ ID NO: 678286 - DNA, 15 bp, Homo sapiens
cagaagattgaaatt

SEQ ID NO: 678287 - DNA, 15 bp, Homo sapiens
agaagattgaaatta

SEQ ID NO: 678288 - DNA, 15 bp, Homo sapiens
gaagattgaaattat

SEQ ID NO: 678289 - DNA, 15 bp, Homo sapiens
aagattgaaattatt

SEQ ID NO: 678290 - DNA, 15 bp, Homo sapiens
agattgaaattatta

SEQ ID NO: 678291 - DNA, 15 bp, Homo sapiens
gattgaaattattaa

SEQ ID NO: 678292 - DNA, 15 bp, Homo sapiens
attgaaattattaaa

SEQ ID NO: 678293 - DNA, 15 bp, Homo sapiens
ttgaaattattaaat

SEQ ID NO: 678294 - DNA, 15 bp, Homo sapiens
tgaaattattaaatt

SEQ ID NO: 678295 - DNA, 15 bp, Homo sapiens
gaaattattaaatta

SEQ ID NO: 678296 - DNA, 15 bp, Homo sapiens
aaattattaaattat

SEQ ID NO: 678297 - DNA, 15 bp, Homo sapiens
aattattaaattatc

SEQ ID NO: 678298 - DNA, 15 bp, Homo sapiens
attattaaattatca

SEQ ID NO: 678299 - DNA, 15 bp, Homo sapiens
ttattaaattatcaa

SEQ ID NO: 678300 - DNA, 15 bp, Homo sapiens
tattaaattatcaaa

SEQ ID NO: 678301 - DNA, 15 bp, Homo sapiens
attaaattatcaaaa

SEQ ID NO: 678302 - DNA, 15 bp, Homo sapiens
ttaaattatcaaaaa

SEQ ID NO: 678303 - DNA, 15 bp, Homo sapiens
taaattatcaaaaag

SEQ ID NO: 678304 - DNA, 15 bp, Homo sapiens
aaattatcaaaaaga

SEQ ID NO: 678305 - DNA, 15 bp, Homo sapiens
aattatcaaaaagaa

SEQ ID NO: 678306 - DNA, 15 bp, Homo sapiens
attatcaaaaagaaa

SEQ ID NO: 678307 - DNA, 15 bp, Homo sapiens
ttatcaaaaagaaaa

SEQ ID NO: 678308 - DNA, 15 bp, Homo sapiens
tatcaaaaagaaaat

SEQ ID NO: 678309 - DNA, 15 bp, Homo sapiens
atcaaaaagaaaatg

SEQ ID NO: 678310 - DNA, 15 bp, Homo sapiens
tcaaaaagaaaatga

SEQ ID NO: 678311 - DNA, 15 bp, Homo sapiens
caaaaagaaaatgat

SEQ ID NO: 678312 - DNA, 15 bp, Homo sapiens
aaaaagaaaatgatc

SEQ ID NO: 678313 - DNA, 15 bp, Homo sapiens
aaaagaaaatgatcc

SEQ ID NO: 678314 - DNA, 15 bp, Homo sapiens
aaagaaaatgatcca

SEQ ID NO: 678315 - DNA, 15 bp, Homo sapiens
aagaaaatgatccac

SEQ ID NO: 678316 - DNA, 15 bp, Homo sapiens
agaaaatgatccacg

SEQ ID NO: 678317 - DNA, 15 bp, Homo sapiens
gaaaatgatccacgc

SEQ ID NO: 678318 - DNA, 15 bp, Homo sapiens
aaaatgatccacgct

SEQ ID NO: 678319 - DNA, 15 bp, Homo sapiens
aaatgatccacgctc

SEQ ID NO: 678320 - DNA, 15 bp, Homo sapiens
aatgatccacgctct

SEQ ID NO: 678321 - DNA, 15 bp, Homo sapiens
atgatccacgctctt

SEQ ID NO: 678322 - DNA, 15 bp, Homo sapiens
tgatccacgctctta

SEQ ID NO: 678323 - DNA, 15 bp, Homo sapiens
gatccacgctcttag

SEQ ID NO: 678324 - DNA, 15 bp, Homo sapiens
atccacgctcttagt

SEQ ID NO: 678325 - DNA, 15 bp, Homo sapiens
tccacgctcttagtt

SEQ ID NO: 678326 - DNA, 15 bp, Homo sapiens
ccacgctcttagttg

SEQ ID NO: 678327 - DNA, 15 bp, Homo sapiens
cacgctcttagttga

SEQ ID NO: 678328 - DNA, 15 bp, Homo sapiens
acgctcttagttgaa

SEQ ID NO: 678329 - DNA, 15 bp, Homo sapiens
cgctcttagttgaaa

SEQ ID NO: 678330 - DNA, 15 bp, Homo sapiens
gctcttagttgaaat

SEQ ID NO: 678331 - DNA, 15 bp, Homo sapiens
ctcttagttgaaatt

SEQ ID NO: 678332 - DNA, 15 bp, Homo sapiens
tcttagttgaaattt

SEQ ID NO: 678333 - DNA, 15 bp, Homo sapiens
cttagttgaaatttc

SEQ ID NO: 678334 - DNA, 15 bp, Homo sapiens
ttagttgaaatttca

SEQ ID NO: 678335 - DNA, 15 bp, Homo sapiens
tagttgaaatttcat

SEQ ID NO: 678336 - DNA, 15 bp, Homo sapiens
agttgaaatttcatg

SEQ ID NO: 678337 - DNA, 15 bp, Homo sapiens
gttgaaatttcatgt

SEQ ID NO: 678338 - DNA, 15 bp, Homo sapiens
ttgaaatttcatgta

SEQ ID NO: 678339 - DNA, 15 bp, Homo sapiens
tgaaatttcatgtaa

SEQ ID NO: 678340 - DNA, 15 bp, Homo sapiens
gaaatttcatgtaag

SEQ ID NO: 678341 - DNA, 15 bp, Homo sapiens
aaatttcatgtaaga

SEQ ID NO: 678342 - DNA, 15 bp, Homo sapiens
aatttcatgtaagat

SEQ ID NO: 678343 - DNA, 15 bp, Homo sapiens
atttcatgtaagatt

SEQ ID NO: 678344 - DNA, 15 bp, Homo sapiens
tttcatgtaagattc

SEQ ID NO: 678345 - DNA, 15 bp, Homo sapiens
ttcatgtaagattcc

SEQ ID NO: 678346 - DNA, 15 bp, Homo sapiens
tcatgtaagattcca

SEQ ID NO: 678347 - DNA, 15 bp, Homo sapiens
catgtaagattccat

SEQ ID NO: 678348 - DNA, 15 bp, Homo sapiens
atgtaagattccatg

SEQ ID NO: 678349 - DNA, 15 bp, Homo sapiens
tgtaagattccatgc

SEQ ID NO: 678350 - DNA, 15 bp, Homo sapiens
gtaagattccatgca

SEQ ID NO: 678351 - DNA, 15 bp, Homo sapiens
taagattccatgcaa

SEQ ID NO: 678352 - DNA, 15 bp, Homo sapiens
aagattccatgcaat

SEQ ID NO: 678353 - DNA, 15 bp, Homo sapiens
agattccatgcaata

SEQ ID NO: 678354 - DNA, 15 bp, Homo sapiens
gattccatgcaataa

SEQ ID NO: 678355 - DNA, 15 bp, Homo sapiens
attccatgcaataaa

SEQ ID NO: 678356 - DNA, 15 bp, Homo sapiens
ttccatgcaataaat

SEQ ID NO: 678357 - DNA, 15 bp, Homo sapiens
tccatgcaataaata

SEQ ID NO: 678358 - DNA, 15 bp, Homo sapiens
ccatgcaataaatag

SEQ ID NO: 678359 - DNA, 15 bp, Homo sapiens
catgcaataaatagg

SEQ ID NO: 678360 - DNA, 15 bp, Homo sapiens
atgcaataaatagga

SEQ ID NO: 678361 - DNA, 15 bp, Homo sapiens
tgcaataaataggag

SEQ ID NO: 678362 - DNA, 15 bp, Homo sapiens
gcaataaataggagt

SEQ ID NO: 678363 - DNA, 15 bp, Homo sapiens
caataaataggagtg

SEQ ID NO: 678364 - DNA, 15 bp, Homo sapiens
aataaataggagtgc

SEQ ID NO: 678365 - DNA, 15 bp, Homo sapiens
ataaataggagtgcc

SEQ ID NO: 678366 - DNA, 15 bp, Homo sapiens
taaataggagtgcca

SEQ ID NO: 678367 - DNA, 15 bp, Homo sapiens
aaataggagtgccat

SEQ ID NO: 678368 - DNA, 15 bp, Homo sapiens
aataggagtgccata

SEQ ID NO: 678369 - DNA, 15 bp, Homo sapiens
ataggagtgccataa

SEQ ID NO: 678370 - DNA, 15 bp, Homo sapiens
taggagtgccataaa

SEQ ID NO: 678371 - DNA, 15 bp, Homo sapiens
aggagtgccataaat

SEQ ID NO: 678372 - DNA, 15 bp, Homo sapiens
ggagtgccataaatg

SEQ ID NO: 678373 - DNA, 15 bp, Homo sapiens
gagtgccataaatgg

SEQ ID NO: 678374 - DNA, 15 bp, Homo sapiens
agtgccataaatgga

SEQ ID NO: 678375 - DNA, 15 bp, Homo sapiens
gtgccataaatggaa

SEQ ID NO: 678376 - DNA, 15 bp, Homo sapiens
tgccataaatggaat

SEQ ID NO: 678377 - DNA, 15 bp, Homo sapiens
gccataaatggaatg

SEQ ID NO: 678378 - DNA, 15 bp, Homo sapiens
ccataaatggaatga

SEQ ID NO: 678379 - DNA, 15 bp, Homo sapiens
cataaatggaatgat

SEQ ID NO: 678380 - DNA, 15 bp, Homo sapiens
ataaatggaatgatg

SEQ ID NO: 678381 - DNA, 15 bp, Homo sapiens
taaatggaatgatga

SEQ ID NO: 678382 - DNA, 15 bp, Homo sapiens
aaatggaatgatgaa

SEQ ID NO: 678383 - DNA, 15 bp, Homo sapiens
aatggaatgatgaaa

SEQ ID NO: 678384 - DNA, 15 bp, Homo sapiens
atggaatgatgaaat

SEQ ID NO: 678385 - DNA, 15 bp, Homo sapiens
tggaatgatgaaata

SEQ ID NO: 678386 - DNA, 15 bp, Homo sapiens
ggaatgatgaaatat

SEQ ID NO: 678387 - DNA, 15 bp, Homo sapiens
gaatgatgaaatatg

SEQ ID NO: 678388 - DNA, 15 bp, Homo sapiens
aatgatgaaatatga

SEQ ID NO: 678389 - DNA, 15 bp, Homo sapiens
atgatgaaatatgac

SEQ ID NO: 678390 - DNA, 15 bp, Homo sapiens
tgatgaaatatgact

SEQ ID NO: 678391 - DNA, 15 bp, Homo sapiens
gatgaaatatgacta

SEQ ID NO: 678392 - DNA, 15 bp, Homo sapiens
atgaaatatgactag

SEQ ID NO: 678393 - DNA, 15 bp, Homo sapiens
tgaaatatgactaga

SEQ ID NO: 678394 - DNA, 15 bp, Homo sapiens
gaaatatgactagag

SEQ ID NO: 678395 - DNA, 15 bp, Homo sapiens
aaatatgactagagg

SEQ ID NO: 678396 - DNA, 15 bp, Homo sapiens
aatatgactagagga

SEQ ID NO: 678397 - DNA, 15 bp, Homo sapiens
atatgactagaggag

SEQ ID NO: 678398 - DNA, 15 bp, Homo sapiens
tatgactagaggagg

SEQ ID NO: 678399 - DNA, 15 bp, Homo sapiens
atgactagaggagga

SEQ ID NO: 678400 - DNA, 15 bp, Homo sapiens
tgactagaggaggag

SEQ ID NO: 678401 - DNA, 15 bp, Homo sapiens
gactagaggaggaga

SEQ ID NO: 678402 - DNA, 15 bp, Homo sapiens
actagaggaggagaa

SEQ ID NO: 678403 - DNA, 15 bp, Homo sapiens
ctagaggaggagaaa

SEQ ID NO: 678404 - DNA, 15 bp, Homo sapiens
tagaggaggagaaag

SEQ ID NO: 678405 - DNA, 15 bp, Homo sapiens
agaggaggagaaagg

SEQ ID NO: 678406 - DNA, 15 bp, Homo sapiens
gaggaggagaaaggc

SEQ ID NO: 678407 - DNA, 15 bp, Homo sapiens
aggaggagaaaggct

SEQ ID NO: 678408 - DNA, 15 bp, Homo sapiens
ggaggagaaaggctt

SEQ ID NO: 678409 - DNA, 15 bp, Homo sapiens
gaggagaaaggcttc

SEQ ID NO: 678410 - DNA, 15 bp, Homo sapiens
aggagaaaggcttcc

SEQ ID NO: 678411 - DNA, 15 bp, Homo sapiens
ggagaaaggcttcct

SEQ ID NO: 678412 - DNA, 15 bp, Homo sapiens
gagaaaggcttccta

SEQ ID NO: 678413 - DNA, 15 bp, Homo sapiens
agaaaggcttcctag

SEQ ID NO: 678414 - DNA, 15 bp, Homo sapiens
gaaaggcttcctaga

SEQ ID NO: 678415 - DNA, 15 bp, Homo sapiens
aaaggcttcctagat

SEQ ID NO: 678416 - DNA, 15 bp, Homo sapiens
aaggcttcctagatg

SEQ ID NO: 678417 - DNA, 15 bp, Homo sapiens
aggcttcctagatga

SEQ ID NO: 678418 - DNA, 15 bp, Homo sapiens
ggcttcctagatgag

SEQ ID NO: 678419 - DNA, 15 bp, Homo sapiens
gcttcctagatgaga

SEQ ID NO: 678420 - DNA, 15 bp, Homo sapiens
cttcctagatgagat

SEQ ID NO: 678421 - DNA, 15 bp, Homo sapiens
ttcctagatgagatg

SEQ ID NO: 678422 - DNA, 15 bp, Homo sapiens
tcctagatgagatgg

SEQ ID NO: 678423 - DNA, 15 bp, Homo sapiens
cctagatgagatgga

SEQ ID NO: 678424 - DNA, 15 bp, Homo sapiens
ctagatgagatggaa

SEQ ID NO: 678425 - DNA, 15 bp, Homo sapiens
tagatgagatggaat

SEQ ID NO: 678426 - DNA, 15 bp, Homo sapiens
agatgagatggaatt

SEQ ID NO: 678427 - DNA, 15 bp, Homo sapiens
gatgagatggaattt

SEQ ID NO: 678428 - DNA, 15 bp, Homo sapiens
atgagatggaatttt

SEQ ID NO: 678429 - DNA, 15 bp, Homo sapiens
tgagatggaatttta

SEQ ID NO: 678430 - DNA, 15 bp, Homo sapiens
gagatggaattttag

SEQ ID NO: 678431 - DNA, 15 bp, Homo sapiens
agatggaattttagt

SEQ ID NO: 678432 - DNA, 15 bp, Homo sapiens
gatggaattttagtc

SEQ ID NO: 678433 - DNA, 15 bp, Homo sapiens
atggaattttagtca

SEQ ID NO: 678434 - DNA, 15 bp, Homo sapiens
tggaattttagtcat

SEQ ID NO: 678435 - DNA, 15 bp, Homo sapiens
ggaattttagtcatc

SEQ ID NO: 678436 - DNA, 15 bp, Homo sapiens
gaattttagtcatcc

SEQ ID NO: 678437 - DNA, 15 bp, Homo sapiens
aattttagtcatccg

SEQ ID NO: 678438 - DNA, 15 bp, Homo sapiens
attttagtcatccgt

SEQ ID NO: 678439 - DNA, 15 bp, Homo sapiens
ttttagtcatccgtg

SEQ ID NO: 678440 - DNA, 15 bp, Homo sapiens
tttagtcatccgtgt

SEQ ID NO: 678441 - DNA, 15 bp, Homo sapiens
ttagtcatccgtgtc

SEQ ID NO: 678442 - DNA, 15 bp, Homo sapiens
tagtcatccgtgtct

SEQ ID NO: 678443 - DNA, 15 bp, Homo sapiens
agtcatccgtgtctc

SEQ ID NO: 678444 - DNA, 15 bp, Homo sapiens
gtcatccgtgtctca

SEQ ID NO: 678445 - DNA, 15 bp, Homo sapiens
tcatccgtgtctcat

SEQ ID NO: 678446 - DNA, 15 bp, Homo sapiens
catccgtgtctcatg

SEQ ID NO: 678447 - DNA, 15 bp, Homo sapiens
atccgtgtctcatga

SEQ ID NO: 678448 - DNA, 15 bp, Homo sapiens
tccgtgtctcatgaa

SEQ ID NO: 678449 - DNA, 15 bp, Homo sapiens
ccgtgtctcatgaag

SEQ ID NO: 678450 - DNA, 15 bp, Homo sapiens
cgtgtctcatgaaga

SEQ ID NO: 678451 - DNA, 15 bp, Homo sapiens
gtgtctcatgaagaa

SEQ ID NO: 678452 - DNA, 15 bp, Homo sapiens
tgtctcatgaagaat

SEQ ID NO: 678453 - DNA, 15 bp, Homo sapiens
gtctcatgaagaatc

SEQ ID NO: 678454 - DNA, 15 bp, Homo sapiens
tctcatgaagaatca

SEQ ID NO: 678455 - DNA, 15 bp, Homo sapiens
ctcatgaagaatcag

SEQ ID NO: 678456 - DNA, 15 bp, Homo sapiens
tcatgaagaatcaga

SEQ ID NO: 678457 - DNA, 15 bp, Homo sapiens
catgaagaatcagat

SEQ ID NO: 678458 - DNA, 15 bp, Homo sapiens
atgaagaatcagatg

SEQ ID NO: 678459 - DNA, 15 bp, Homo sapiens
tgaagaatcagatgt

SEQ ID NO: 678460 - DNA, 15 bp, Homo sapiens
gaagaatcagatgtg

SEQ ID NO: 678461 - DNA, 15 bp, Homo sapiens
aagaatcagatgtgt

SEQ ID NO: 678462 - DNA, 15 bp, Homo sapiens
agaatcagatgtgta

SEQ ID NO: 678463 - DNA, 15 bp, Homo sapiens
gaatcagatgtgtac

SEQ ID NO: 678464 - DNA, 15 bp, Homo sapiens
aatcagatgtgtaca

SEQ ID NO: 678465 - DNA, 15 bp, Homo sapiens
atcagatgtgtacac

SEQ ID NO: 678466 - DNA, 15 bp, Homo sapiens
tcagatgtgtacact

SEQ ID NO: 678467 - DNA, 15 bp, Homo sapiens
cagatgtgtacacta

SEQ ID NO: 678468 - DNA, 15 bp, Homo sapiens
agatgtgtacactaa

SEQ ID NO: 678469 - DNA, 15 bp, Homo sapiens
gatgtgtacactaag

SEQ ID NO: 678470 - DNA, 15 bp, Homo sapiens
atgtgtacactaagc

SEQ ID NO: 678471 - DNA, 15 bp, Homo sapiens
tgtgtacactaagca

SEQ ID NO: 678472 - DNA, 15 bp, Homo sapiens
gtgtacactaagcaa

SEQ ID NO: 678473 - DNA, 15 bp, Homo sapiens
tgtacactaagcaaa

SEQ ID NO: 678474 - DNA, 15 bp, Homo sapiens
gtacactaagcaaaa

SEQ ID NO: 678475 - DNA, 15 bp, Homo sapiens
tacactaagcaaaac

SEQ ID NO: 678476 - DNA, 15 bp, Homo sapiens
acactaagcaaaaca

SEQ ID NO: 678477 - DNA, 15 bp, Homo sapiens
cactaagcaaaacag

SEQ ID NO: 678478 - DNA, 15 bp, Homo sapiens
actaagcaaaacagt

SEQ ID NO: 678479 - DNA, 15 bp, Homo sapiens
ctaagcaaaacagtt

SEQ ID NO: 678480 - DNA, 15 bp, Homo sapiens
taagcaaaacagtta

SEQ ID NO: 678481 - DNA, 15 bp, Homo sapiens
aagcaaaacagttaa

SEQ ID NO: 678482 - DNA, 15 bp, Homo sapiens
agcaaaacagttaaa

SEQ ID NO: 678483 - DNA, 15 bp, Homo sapiens
gcaaaacagttaaaa

SEQ ID NO: 678484 - DNA, 15 bp, Homo sapiens
caaaacagttaaaaa

SEQ ID NO: 678485 - DNA, 15 bp, Homo sapiens
aaaacagttaaaaaa

SEQ ID NO: 678486 - DNA, 15 bp, Homo sapiens
aaacagttaaaaaaa

SEQ ID NO: 678487 - DNA, 15 bp, Homo sapiens
aacagttaaaaaaaa

SEQ ID NO: 678488 - DNA, 15 bp, Homo sapiens
acagttaaaaaaaaa

SEQ ID NO: 678489 - DNA, 15 bp, Homo sapiens
cagttaaaaaaaaaa

SEQ ID NO: 678490 - DNA, 15 bp, Homo sapiens
agttaaaaaaaaaac

SEQ ID NO: 678491 - DNA, 15 bp, Homo sapiens
gttaaaaaaaaaacc

SEQ ID NO: 678492 - DNA, 15 bp, Homo sapiens
ttaaaaaaaaaacct

SEQ ID NO: 678493 - DNA, 15 bp, Homo sapiens
taaaaaaaaaacctc

SEQ ID NO: 678494 - DNA, 15 bp, Homo sapiens
aaaaaaaaaacctcc

SEQ ID NO: 678495 - DNA, 15 bp, Homo sapiens
aaaaaaaaacctcca

SEQ ID NO: 678496 - DNA, 15 bp, Homo sapiens
aaaaaaaacctccaa

SEQ ID NO: 678497 - DNA, 15 bp, Homo sapiens
aaaaaaacctccaag

SEQ ID NO: 678498 - DNA, 15 bp, Homo sapiens
aaaaaacctccaagt

SEQ ID NO: 678499 - DNA, 15 bp, Homo sapiens
aaaaacctccaagtg

SEQ ID NO: 678500 - DNA, 15 bp, Homo sapiens
aaaacctccaagtga

SEQ ID NO: 678501 - DNA, 15 bp, Homo sapiens
aaacctccaagtgag

SEQ ID NO: 678502 - DNA, 15 bp, Homo sapiens
aacctccaagtgagt

SEQ ID NO: 678503 - DNA, 15 bp, Homo sapiens
acctccaagtgagtc

SEQ ID NO: 678504 - DNA, 15 bp, Homo sapiens
cctccaagtgagtct

SEQ ID NO: 678505 - DNA, 15 bp, Homo sapiens
ctccaagtgagtctc

SEQ ID NO: 678506 - DNA, 15 bp, Homo sapiens
tccaagtgagtctct

SEQ ID NO: 678507 - DNA, 15 bp, Homo sapiens
ccaagtgagtctctt

SEQ ID NO: 678508 - DNA, 15 bp, Homo sapiens
caagtgagtctctta

SEQ ID NO: 678509 - DNA, 15 bp, Homo sapiens
aagtgagtctcttat

SEQ ID NO: 678510 - DNA, 15 bp, Homo sapiens
agtgagtctcttatt

SEQ ID NO: 678511 - DNA, 15 bp, Homo sapiens
gtgagtctcttattt

SEQ ID NO: 678512 - DNA, 15 bp, Homo sapiens
tgagtctcttattta

SEQ ID NO: 678513 - DNA, 15 bp, Homo sapiens
gagtctcttatttat

SEQ ID NO: 678514 - DNA, 15 bp, Homo sapiens
agtctcttatttatt

SEQ ID NO: 678515 - DNA, 15 bp, Homo sapiens
gtctcttatttattt

SEQ ID NO: 678516 - DNA, 15 bp, Homo sapiens
tctcttatttatttt

SEQ ID NO: 678517 - DNA, 15 bp, Homo sapiens
ctcttatttattttt

SEQ ID NO: 678518 - DNA, 15 bp, Homo sapiens
tcttatttatttttt

SEQ ID NO: 678519 - DNA, 15 bp, Homo sapiens
cttatttattttttt

SEQ ID NO: 678520 - DNA, 15 bp, Homo sapiens
ttatttatttttttc

SEQ ID NO: 678521 - DNA, 15 bp, Homo sapiens
tatttatttttttct

SEQ ID NO: 678522 - DNA, 15 bp, Homo sapiens
atttatttttttctt

SEQ ID NO: 678523 - DNA, 15 bp, Homo sapiens
tttatttttttctta

SEQ ID NO: 678524 - DNA, 15 bp, Homo sapiens
ttatttttttcttat

SEQ ID NO: 678525 - DNA, 15 bp, Homo sapiens
tatttttttcttata

SEQ ID NO: 678526 - DNA, 15 bp, Homo sapiens
atttttttcttataa

SEQ ID NO: 678527 - DNA, 15 bp, Homo sapiens
tttttttcttataag

SEQ ID NO: 678528 - DNA, 15 bp, Homo sapiens
ttttttcttataaga

SEQ ID NO: 678529 - DNA, 15 bp, Homo sapiens
tttttcttataagac

SEQ ID NO: 678530 - DNA, 15 bp, Homo sapiens
ttttcttataagact

SEQ ID NO: 678531 - DNA, 15 bp, Homo sapiens
tttcttataagactt

SEQ ID NO: 678532 - DNA, 15 bp, Homo sapiens
ttcttataagacttc

SEQ ID NO: 678533 - DNA, 15 bp, Homo sapiens
tcttataagacttct

SEQ ID NO: 678534 - DNA, 15 bp, Homo sapiens
cttataagacttcta

SEQ ID NO: 678535 - DNA, 15 bp, Homo sapiens
ttataagacttctac

SEQ ID NO: 678536 - DNA, 15 bp, Homo sapiens
tataagacttctaca

SEQ ID NO: 678537 - DNA, 15 bp, Homo sapiens
ataagacttctacaa

SEQ ID NO: 678538 - DNA, 15 bp, Homo sapiens
taagacttctacaaa

SEQ ID NO: 678539 - DNA, 15 bp, Homo sapiens
aagacttctacaaat

SEQ ID NO: 678540 - DNA, 15 bp, Homo sapiens
agacttctacaaatt

SEQ ID NO: 678541 - DNA, 15 bp, Homo sapiens
gacttctacaaattg

SEQ ID NO: 678542 - DNA, 15 bp, Homo sapiens
acttctacaaattga

SEQ ID NO: 678543 - DNA, 15 bp, Homo sapiens
cttctacaaattgag

SEQ ID NO: 678544 - DNA, 15 bp, Homo sapiens
ttctacaaattgagg

SEQ ID NO: 678545 - DNA, 15 bp, Homo sapiens
tctacaaattgaggt

SEQ ID NO: 678546 - DNA, 15 bp, Homo sapiens
ctacaaattgaggta

SEQ ID NO: 678547 - DNA, 15 bp, Homo sapiens
tacaaattgaggtac

SEQ ID NO: 678548 - DNA, 15 bp, Homo sapiens
acaaattgaggtacc

SEQ ID NO: 678549 - DNA, 15 bp, Homo sapiens
caaattgaggtacct

SEQ ID NO: 678550 - DNA, 15 bp, Homo sapiens
aaattgaggtacctg

SEQ ID NO: 678551 - DNA, 15 bp, Homo sapiens
aattgaggtacctgg

SEQ ID NO: 678552 - DNA, 15 bp, Homo sapiens
attgaggtacctggt

SEQ ID NO: 678553 - DNA, 15 bp, Homo sapiens
ttgaggtacctggtg

SEQ ID NO: 678554 - DNA, 15 bp, Homo sapiens
tgaggtacctggtgt

SEQ ID NO: 678555 - DNA, 15 bp, Homo sapiens
gaggtacctggtgta

SEQ ID NO: 678556 - DNA, 15 bp, Homo sapiens
aggtacctggtgtag

SEQ ID NO: 678557 - DNA, 15 bp, Homo sapiens
ggtacctggtgtagt

SEQ ID NO: 678558 - DNA, 15 bp, Homo sapiens
gtacctggtgtagtt

SEQ ID NO: 678559 - DNA, 15 bp, Homo sapiens
tacctggtgtagttt

SEQ ID NO: 678560 - DNA, 15 bp, Homo sapiens
acctggtgtagtttt

SEQ ID NO: 678561 - DNA, 15 bp, Homo sapiens
cctggtgtagtttta

SEQ ID NO: 678562 - DNA, 15 bp, Homo sapiens
ctggtgtagttttat

SEQ ID NO: 678563 - DNA, 15 bp, Homo sapiens
tggtgtagttttatt

SEQ ID NO: 678564 - DNA, 15 bp, Homo sapiens
ggtgtagttttattt

SEQ ID NO: 678565 - DNA, 15 bp, Homo sapiens
gtgtagttttatttc

SEQ ID NO: 678566 - DNA, 15 bp, Homo sapiens
tgtagttttatttca

SEQ ID NO: 678567 - DNA, 15 bp, Homo sapiens
gtagttttatttcag

SEQ ID NO: 678568 - DNA, 15 bp, Homo sapiens
tagttttatttcagg

SEQ ID NO: 678569 - DNA, 15 bp, Homo sapiens
agttttatttcaggt

SEQ ID NO: 678570 - DNA, 15 bp, Homo sapiens
gttttatttcaggtt

SEQ ID NO: 678571 - DNA, 15 bp, Homo sapiens
ttttatttcaggttt

SEQ ID NO: 678572 - DNA, 15 bp, Homo sapiens
tttatttcaggtttt

SEQ ID NO: 678573 - DNA, 15 bp, Homo sapiens
ttatttcaggtttta

SEQ ID NO: 678574 - DNA, 15 bp, Homo sapiens
tatttcaggttttat

SEQ ID NO: 678575 - DNA, 15 bp, Homo sapiens
atttcaggttttatg

SEQ ID NO: 678576 - DNA, 15 bp, Homo sapiens
tttcaggttttatgc

SEQ ID NO: 678577 - DNA, 15 bp, Homo sapiens
ttcaggttttatgct

SEQ ID NO: 678578 - DNA, 15 bp, Homo sapiens
tcaggttttatgctg

SEQ ID NO: 678579 - DNA, 15 bp, Homo sapiens
caggttttatgctgt

SEQ ID NO: 678580 - DNA, 15 bp, Homo sapiens
aggttttatgctgtc

SEQ ID NO: 678581 - DNA, 15 bp, Homo sapiens
ggttttatgctgtca

SEQ ID NO: 678582 - DNA, 15 bp, Homo sapiens
gttttatgctgtcat

SEQ ID NO: 678583 - DNA, 15 bp, Homo sapiens
ttttatgctgtcatt

SEQ ID NO: 678584 - DNA, 15 bp, Homo sapiens
tttatgctgtcattt

SEQ ID NO: 678585 - DNA, 15 bp, Homo sapiens
ttatgctgtcatttt

SEQ ID NO: 678586 - DNA, 15 bp, Homo sapiens
tatgctgtcattttc

SEQ ID NO: 678587 - DNA, 15 bp, Homo sapiens
atgctgtcattttcc

SEQ ID NO: 678588 - DNA, 15 bp, Homo sapiens
tgctgtcattttcct

SEQ ID NO: 678589 - DNA, 15 bp, Homo sapiens
gctgtcattttcctg

SEQ ID NO: 678590 - DNA, 15 bp, Homo sapiens
ctgtcattttcctgt

SEQ ID NO: 678591 - DNA, 15 bp, Homo sapiens
tgtcattttcctgta

SEQ ID NO: 678592 - DNA, 15 bp, Homo sapiens
gtcattttcctgtaa

SEQ ID NO: 678593 - DNA, 15 bp, Homo sapiens
tcattttcctgtaat

SEQ ID NO: 678594 - DNA, 15 bp, Homo sapiens
cattttcctgtaatg

SEQ ID NO: 678595 - DNA, 15 bp, Homo sapiens
attttcctgtaatgc

SEQ ID NO: 678596 - DNA, 15 bp, Homo sapiens
ttttcctgtaatgct

SEQ ID NO: 678597 - DNA, 15 bp, Homo sapiens
tttcctgtaatgcta

SEQ ID NO: 678598 - DNA, 15 bp, Homo sapiens
ttcctgtaatgctaa

SEQ ID NO: 678599 - DNA, 15 bp, Homo sapiens
tcctgtaatgctaag

SEQ ID NO: 678600 - DNA, 15 bp, Homo sapiens
cctgtaatgctaagg

SEQ ID NO: 678601 - DNA, 15 bp, Homo sapiens
ctgtaatgctaagga

SEQ ID NO: 678602 - DNA, 15 bp, Homo sapiens
tgtaatgctaaggac

SEQ ID NO: 678603 - DNA, 15 bp, Homo sapiens
gtaatgctaaggact

SEQ ID NO: 678604 - DNA, 15 bp, Homo sapiens
taatgctaaggactt

SEQ ID NO: 678605 - DNA, 15 bp, Homo sapiens
aatgctaaggactta

SEQ ID NO: 678606 - DNA, 15 bp, Homo sapiens
atgctaaggacttag

SEQ ID NO: 678607 - DNA, 15 bp, Homo sapiens
tgctaaggacttagg

SEQ ID NO: 678608 - DNA, 15 bp, Homo sapiens
gctaaggacttagga

SEQ ID NO: 678609 - DNA, 15 bp, Homo sapiens
ctaaggacttaggac

SEQ ID NO: 678610 - DNA, 15 bp, Homo sapiens
taaggacttaggaca

SEQ ID NO: 678611 - DNA, 15 bp, Homo sapiens
aaggacttaggacat

SEQ ID NO: 678612 - DNA, 15 bp, Homo sapiens
aggacttaggacata

SEQ ID NO: 678613 - DNA, 15 bp, Homo sapiens
ggacttaggacataa

SEQ ID NO: 678614 - DNA, 15 bp, Homo sapiens
gacttaggacataac

SEQ ID NO: 678615 - DNA, 15 bp, Homo sapiens
acttaggacataact

SEQ ID NO: 678616 - DNA, 15 bp, Homo sapiens
cttaggacataactg

SEQ ID NO: 678617 - DNA, 15 bp, Homo sapiens
ttaggacataactga

SEQ ID NO: 678618 - DNA, 15 bp, Homo sapiens
taggacataactgaa

SEQ ID NO: 678619 - DNA, 15 bp, Homo sapiens
aggacataactgaat

SEQ ID NO: 678620 - DNA, 15 bp, Homo sapiens
ggacataactgaatt

SEQ ID NO: 678621 - DNA, 15 bp, Homo sapiens
gacataactgaattt

SEQ ID NO: 678622 - DNA, 15 bp, Homo sapiens
acataactgaatttt

SEQ ID NO: 678623 - DNA, 15 bp, Homo sapiens
cataactgaattttc

SEQ ID NO: 678624 - DNA, 15 bp, Homo sapiens
ataactgaattttct

SEQ ID NO: 678625 - DNA, 15 bp, Homo sapiens
taactgaattttcta

SEQ ID NO: 678626 - DNA, 15 bp, Homo sapiens
aactgaattttctat

SEQ ID NO: 678627 - DNA, 15 bp, Homo sapiens
actgaattttctatt

SEQ ID NO: 678628 - DNA, 15 bp, Homo sapiens
ctgaattttctattt

SEQ ID NO: 678629 - DNA, 15 bp, Homo sapiens
tgaattttctatttt

SEQ ID NO: 678630 - DNA, 15 bp, Homo sapiens
gaattttctattttc

SEQ ID NO: 678631 - DNA, 15 bp, Homo sapiens
aattttctattttcc

SEQ ID NO: 678632 - DNA, 15 bp, Homo sapiens
attttctattttcca

SEQ ID NO: 678633 - DNA, 15 bp, Homo sapiens
ttttctattttccac

SEQ ID NO: 678634 - DNA, 15 bp, Homo sapiens
tttctattttccact

SEQ ID NO: 678635 - DNA, 15 bp, Homo sapiens
ttctattttccactt

SEQ ID NO: 678636 - DNA, 15 bp, Homo sapiens
tctattttccacttc

SEQ ID NO: 678637 - DNA, 15 bp, Homo sapiens
ctattttccacttct

SEQ ID NO: 678638 - DNA, 15 bp, Homo sapiens
tattttccacttctt

SEQ ID NO: 678639 - DNA, 15 bp, Homo sapiens
attttccacttcttt

SEQ ID NO: 678640 - DNA, 15 bp, Homo sapiens
ttttccacttctttt

SEQ ID NO: 678641 - DNA, 15 bp, Homo sapiens
tttccacttcttttc

SEQ ID NO: 678642 - DNA, 15 bp, Homo sapiens
ttccacttcttttct

SEQ ID NO: 678643 - DNA, 15 bp, Homo sapiens
tccacttcttttctg

SEQ ID NO: 678644 - DNA, 15 bp, Homo sapiens
ccacttcttttctgg

SEQ ID NO: 678645 - DNA, 15 bp, Homo sapiens
cacttcttttctggt

SEQ ID NO: 678646 - DNA, 15 bp, Homo sapiens
acttcttttctggtg

SEQ ID NO: 678647 - DNA, 15 bp, Homo sapiens
cttcttttctggtgt

SEQ ID NO: 678648 - DNA, 15 bp, Homo sapiens
ttcttttctggtgtg

SEQ ID NO: 678649 - DNA, 15 bp, Homo sapiens
tcttttctggtgtgt

SEQ ID NO: 678650 - DNA, 15 bp, Homo sapiens
cttttctggtgtgtg

SEQ ID NO: 678651 - DNA, 15 bp, Homo sapiens
ttttctggtgtgtgt

SEQ ID NO: 678652 - DNA, 15 bp, Homo sapiens
tttctggtgtgtgtg

SEQ ID NO: 678653 - DNA, 15 bp, Homo sapiens
ttctggtgtgtgtgt

SEQ ID NO: 678654 - DNA, 15 bp, Homo sapiens
tctggtgtgtgtgta

SEQ ID NO: 678655 - DNA, 15 bp, Homo sapiens
ctggtgtgtgtgtat

SEQ ID NO: 678656 - DNA, 15 bp, Homo sapiens
tggtgtgtgtgtata

SEQ ID NO: 678657 - DNA, 15 bp, Homo sapiens
ggtgtgtgtgtatat

SEQ ID NO: 678658 - DNA, 15 bp, Homo sapiens
gtgtgtgtgtatata

SEQ ID NO: 678659 - DNA, 15 bp, Homo sapiens
tgtgtgtgtatatat

SEQ ID NO: 678660 - DNA, 15 bp, Homo sapiens
gtgtgtgtatatata

SEQ ID NO: 678661 - DNA, 15 bp, Homo sapiens
tgtgtgtatatatat

SEQ ID NO: 678662 - DNA, 15 bp, Homo sapiens
gtgtgtatatatata

SEQ ID NO: 678663 - DNA, 15 bp, Homo sapiens
tgtgtatatatatat

SEQ ID NO: 678664 - DNA, 15 bp, Homo sapiens
gtgtatatatatatg

SEQ ID NO: 678665 - DNA, 15 bp, Homo sapiens
tgtatatatatatgt

SEQ ID NO: 678666 - DNA, 15 bp, Homo sapiens
gtatatatatatgta

SEQ ID NO: 678667 - DNA, 15 bp, Homo sapiens
tatatatatatgtat

SEQ ID NO: 678668 - DNA, 15 bp, Homo sapiens
atatatatatgtata

SEQ ID NO: 678669 - DNA, 15 bp, Homo sapiens
tatatatatgtatat

SEQ ID NO: 678670 - DNA, 15 bp, Homo sapiens
atatatatgtatata

SEQ ID NO: 678671 - DNA, 15 bp, Homo sapiens
tatatatgtatatat

SEQ ID NO: 678672 - DNA, 15 bp, Homo sapiens
atatatgtatatata

SEQ ID NO: 678673 - DNA, 15 bp, Homo sapiens
tatatgtatatatac

SEQ ID NO: 678674 - DNA, 15 bp, Homo sapiens
atatgtatatataca

SEQ ID NO: 678675 - DNA, 15 bp, Homo sapiens
tatgtatatatacac

SEQ ID NO: 678676 - DNA, 15 bp, Homo sapiens
atgtatatatacaca

SEQ ID NO: 678677 - DNA, 15 bp, Homo sapiens
tgtatatatacacac

SEQ ID NO: 678678 - DNA, 15 bp, Homo sapiens
gtatatatacacaca

SEQ ID NO: 678679 - DNA, 15 bp, Homo sapiens
tatatatacacacac

SEQ ID NO: 678680 - DNA, 15 bp, Homo sapiens
atatatacacacaca

SEQ ID NO: 678681 - DNA, 15 bp, Homo sapiens
tatatacacacacac

SEQ ID NO: 678682 - DNA, 15 bp, Homo sapiens
atatacacacacaca

SEQ ID NO: 678683 - DNA, 15 bp, Homo sapiens
tatacacacacacat

SEQ ID NO: 678684 - DNA, 15 bp, Homo sapiens
atacacacacacata

SEQ ID NO: 678685 - DNA, 15 bp, Homo sapiens
tacacacacacatat

SEQ ID NO: 678686 - DNA, 15 bp, Homo sapiens
acacacacacatata

SEQ ID NO: 678687 - DNA, 15 bp, Homo sapiens
cacacacacatatac

SEQ ID NO: 678688 - DNA, 15 bp, Homo sapiens
acacacacatataca

SEQ ID NO: 678689 - DNA, 15 bp, Homo sapiens
cacacacatatacat

SEQ ID NO: 678690 - DNA, 15 bp, Homo sapiens
acacacatatacata

SEQ ID NO: 678691 - DNA, 15 bp, Homo sapiens
cacacatatacatat

SEQ ID NO: 678692 - DNA, 15 bp, Homo sapiens
acacatatacatata

SEQ ID NO: 678693 - DNA, 15 bp, Homo sapiens
cacatatacatatat

SEQ ID NO: 678694 - DNA, 15 bp, Homo sapiens
acatatacatatata

SEQ ID NO: 678695 - DNA, 15 bp, Homo sapiens
catatacatatatat

SEQ ID NO: 678696 - DNA, 15 bp, Homo sapiens
atatacatatatata

SEQ ID NO: 678697 - DNA, 15 bp, Homo sapiens
tatacatatatatat

SEQ ID NO: 678698 - DNA, 15 bp, Homo sapiens
atacatatatatatt

SEQ ID NO: 678699 - DNA, 15 bp, Homo sapiens
tacatatatatattt

SEQ ID NO: 678700 - DNA, 15 bp, Homo sapiens
acatatatatatttt

SEQ ID NO: 678701 - DNA, 15 bp, Homo sapiens
catatatatattttt

SEQ ID NO: 678702 - DNA, 15 bp, Homo sapiens
atatatatatttttt

SEQ ID NO: 678703 - DNA, 15 bp, Homo sapiens
tatatatatttttta

SEQ ID NO: 678704 - DNA, 15 bp, Homo sapiens
atatatattttttag

SEQ ID NO: 678705 - DNA, 15 bp, Homo sapiens
tatatattttttagt

SEQ ID NO: 678706 - DNA, 15 bp, Homo sapiens
atatattttttagta

SEQ ID NO: 678707 - DNA, 15 bp, Homo sapiens
tatattttttagtat

SEQ ID NO: 678708 - DNA, 15 bp, Homo sapiens
atattttttagtatc

SEQ ID NO: 678709 - DNA, 15 bp, Homo sapiens
tattttttagtatct

SEQ ID NO: 678710 - DNA, 15 bp, Homo sapiens
attttttagtatctc

SEQ ID NO: 678711 - DNA, 15 bp, Homo sapiens
ttttttagtatctca

SEQ ID NO: 678712 - DNA, 15 bp, Homo sapiens
tttttagtatctcac

SEQ ID NO: 678713 - DNA, 15 bp, Homo sapiens
ttttagtatctcacc

SEQ ID NO: 678714 - DNA, 15 bp, Homo sapiens
tttagtatctcaccc

SEQ ID NO: 678715 - DNA, 15 bp, Homo sapiens
ttagtatctcaccct

SEQ ID NO: 678716 - DNA, 15 bp, Homo sapiens
tagtatctcaccctc

SEQ ID NO: 678717 - DNA, 15 bp, Homo sapiens
agtatctcaccctca

SEQ ID NO: 678718 - DNA, 15 bp, Homo sapiens
gtatctcaccctcac

SEQ ID NO: 678719 - DNA, 15 bp, Homo sapiens
tatctcaccctcaca

SEQ ID NO: 678720 - DNA, 15 bp, Homo sapiens
atctcaccctcacat

SEQ ID NO: 678721 - DNA, 15 bp, Homo sapiens
tctcaccctcacatg

SEQ ID NO: 678722 - DNA, 15 bp, Homo sapiens
ctcaccctcacatgc

SEQ ID NO: 678723 - DNA, 15 bp, Homo sapiens
tcaccctcacatgct

SEQ ID NO: 678724 - DNA, 15 bp, Homo sapiens
caccctcacatgctc

SEQ ID NO: 678725 - DNA, 15 bp, Homo sapiens
accctcacatgctcc

SEQ ID NO: 678726 - DNA, 15 bp, Homo sapiens
ccctcacatgctcct

SEQ ID NO: 678727 - DNA, 15 bp, Homo sapiens
cctcacatgctcctc

SEQ ID NO: 678728 - DNA, 15 bp, Homo sapiens
ctcacatgctcctcc

SEQ ID NO: 678729 - DNA, 15 bp, Homo sapiens
tcacatgctcctccc

SEQ ID NO: 678730 - DNA, 15 bp, Homo sapiens
cacatgctcctccct

SEQ ID NO: 678731 - DNA, 15 bp, Homo sapiens
acatgctcctccctg

SEQ ID NO: 678732 - DNA, 15 bp, Homo sapiens
catgctcctccctga

SEQ ID NO: 678733 - DNA, 15 bp, Homo sapiens
atgctcctccctgag

SEQ ID NO: 678734 - DNA, 15 bp, Homo sapiens
tgctcctccctgagc

SEQ ID NO: 678735 - DNA, 15 bp, Homo sapiens
gctcctccctgagca

SEQ ID NO: 678736 - DNA, 15 bp, Homo sapiens
ctcctccctgagcac

SEQ ID NO: 678737 - DNA, 15 bp, Homo sapiens
tcctccctgagcact

SEQ ID NO: 678738 - DNA, 15 bp, Homo sapiens
cctccctgagcacta

SEQ ID NO: 678739 - DNA, 15 bp, Homo sapiens
ctccctgagcactac

SEQ ID NO: 678740 - DNA, 15 bp, Homo sapiens
tccctgagcactacc

SEQ ID NO: 678741 - DNA, 15 bp, Homo sapiens
ccctgagcactaccc

SEQ ID NO: 678742 - DNA, 15 bp, Homo sapiens
cctgagcactaccca

SEQ ID NO: 678743 - DNA, 15 bp, Homo sapiens
ctgagcactacccat

SEQ ID NO: 678744 - DNA, 15 bp, Homo sapiens
tgagcactacccatg

SEQ ID NO: 678745 - DNA, 15 bp, Homo sapiens
gagcactacccatga

SEQ ID NO: 678746 - DNA, 15 bp, Homo sapiens
agcactacccatgat

SEQ ID NO: 678747 - DNA, 15 bp, Homo sapiens
gcactacccatgata

SEQ ID NO: 678748 - DNA, 15 bp, Homo sapiens
cactacccatgatag

SEQ ID NO: 678749 - DNA, 15 bp, Homo sapiens
actacccatgataga

SEQ ID NO: 678750 - DNA, 15 bp, Homo sapiens
ctacccatgatagat

SEQ ID NO: 678751 - DNA, 15 bp, Homo sapiens
tacccatgatagatg

SEQ ID NO: 678752 - DNA, 15 bp, Homo sapiens
acccatgatagatgt

SEQ ID NO: 678753 - DNA, 15 bp, Homo sapiens
cccatgatagatgtt

SEQ ID NO: 678754 - DNA, 15 bp, Homo sapiens
ccatgatagatgtta

SEQ ID NO: 678755 - DNA, 15 bp, Homo sapiens
catgatagatgttaa

SEQ ID NO: 678756 - DNA, 15 bp, Homo sapiens
atgatagatgttaaa

SEQ ID NO: 678757 - DNA, 15 bp, Homo sapiens
tgatagatgttaaac

SEQ ID NO: 678758 - DNA, 15 bp, Homo sapiens
gatagatgttaaaca

SEQ ID NO: 678759 - DNA, 15 bp, Homo sapiens
atagatgttaaacaa

SEQ ID NO: 678760 - DNA, 15 bp, Homo sapiens
tagatgttaaacaaa

SEQ ID NO: 678761 - DNA, 15 bp, Homo sapiens
agatgttaaacaaaa

SEQ ID NO: 678762 - DNA, 15 bp, Homo sapiens
gatgttaaacaaaag

SEQ ID NO: 678763 - DNA, 15 bp, Homo sapiens
atgttaaacaaaagc

SEQ ID NO: 678764 - DNA, 15 bp, Homo sapiens
tgttaaacaaaagca

SEQ ID NO: 678765 - DNA, 15 bp, Homo sapiens
gttaaacaaaagcaa

SEQ ID NO: 678766 - DNA, 15 bp, Homo sapiens
ttaaacaaaagcaaa

SEQ ID NO: 678767 - DNA, 15 bp, Homo sapiens
taaacaaaagcaaag

SEQ ID NO: 678768 - DNA, 15 bp, Homo sapiens
aaacaaaagcaaaga

SEQ ID NO: 678769 - DNA, 15 bp, Homo sapiens
aacaaaagcaaagat

SEQ ID NO: 678770 - DNA, 15 bp, Homo sapiens
acaaaagcaaagatg

SEQ ID NO: 678771 - DNA, 15 bp, Homo sapiens
caaaagcaaagatga

SEQ ID NO: 678772 - DNA, 15 bp, Homo sapiens
aaaagcaaagatgaa

SEQ ID NO: 678773 - DNA, 15 bp, Homo sapiens
aaagcaaagatgaaa

SEQ ID NO: 678774 - DNA, 15 bp, Homo sapiens
aagcaaagatgaaat

SEQ ID NO: 678775 - DNA, 15 bp, Homo sapiens
agcaaagatgaaatt

SEQ ID NO: 678776 - DNA, 15 bp, Homo sapiens
gcaaagatgaaattc

SEQ ID NO: 678777 - DNA, 15 bp, Homo sapiens
caaagatgaaattcc

SEQ ID NO: 678778 - DNA, 15 bp, Homo sapiens
aaagatgaaattcca

SEQ ID NO: 678779 - DNA, 15 bp, Homo sapiens
aagatgaaattccaa

SEQ ID NO: 678780 - DNA, 15 bp, Homo sapiens
agatgaaattccaac

SEQ ID NO: 678781 - DNA, 15 bp, Homo sapiens
gatgaaattccaact

SEQ ID NO: 678782 - DNA, 15 bp, Homo sapiens
atgaaattccaactg

SEQ ID NO: 678783 - DNA, 15 bp, Homo sapiens
tgaaattccaactgt

SEQ ID NO: 678784 - DNA, 15 bp, Homo sapiens
gaaattccaactgtc

SEQ ID NO: 678785 - DNA, 15 bp, Homo sapiens
aaattccaactgtca

SEQ ID NO: 678786 - DNA, 15 bp, Homo sapiens
aattccaactgtcaa

SEQ ID NO: 678787 - DNA, 15 bp, Homo sapiens
attccaactgtcaaa

SEQ ID NO: 678788 - DNA, 15 bp, Homo sapiens
ttccaactgtcaaaa

SEQ ID NO: 678789 - DNA, 15 bp, Homo sapiens
tccaactgtcaaaat

SEQ ID NO: 678790 - DNA, 15 bp, Homo sapiens
ccaactgtcaaaatc

SEQ ID NO: 678791 - DNA, 15 bp, Homo sapiens
caactgtcaaaatct

SEQ ID NO: 678792 - DNA, 15 bp, Homo sapiens
aactgtcaaaatctc

SEQ ID NO: 678793 - DNA, 15 bp, Homo sapiens
actgtcaaaatctcc

SEQ ID NO: 678794 - DNA, 15 bp, Homo sapiens
ctgtcaaaatctccc

SEQ ID NO: 678795 - DNA, 15 bp, Homo sapiens
tgtcaaaatctccct

SEQ ID NO: 678796 - DNA, 15 bp, Homo sapiens
gtcaaaatctccctt

SEQ ID NO: 678797 - DNA, 15 bp, Homo sapiens
tcaaaatctcccttc

SEQ ID NO: 678798 - DNA, 15 bp, Homo sapiens
caaaatctcccttcc

SEQ ID NO: 678799 - DNA, 15 bp, Homo sapiens
aaaatctcccttcca

SEQ ID NO: 678800 - DNA, 15 bp, Homo sapiens
aaatctcccttccat

SEQ ID NO: 678801 - DNA, 15 bp, Homo sapiens
aatctcccttccatc

SEQ ID NO: 678802 - DNA, 15 bp, Homo sapiens
atctcccttccatct

SEQ ID NO: 678803 - DNA, 15 bp, Homo sapiens
tctcccttccatcta

SEQ ID NO: 678804 - DNA, 15 bp, Homo sapiens
ctcccttccatctaa

SEQ ID NO: 678805 - DNA, 15 bp, Homo sapiens
tcccttccatctaat

SEQ ID NO: 678806 - DNA, 15 bp, Homo sapiens
cccttccatctaatt

SEQ ID NO: 678807 - DNA, 15 bp, Homo sapiens
ccttccatctaatta

SEQ ID NO: 678808 - DNA, 15 bp, Homo sapiens
cttccatctaattaa

SEQ ID NO: 678809 - DNA, 15 bp, Homo sapiens
ttccatctaattaat

SEQ ID NO: 678810 - DNA, 15 bp, Homo sapiens
tccatctaattaatt

SEQ ID NO: 678811 - DNA, 15 bp, Homo sapiens
ccatctaattaattc

SEQ ID NO: 678812 - DNA, 15 bp, Homo sapiens
catctaattaattcc

SEQ ID NO: 678813 - DNA, 15 bp, Homo sapiens
atctaattaattcct

SEQ ID NO: 678814 - DNA, 15 bp, Homo sapiens
tctaattaattcctc

SEQ ID NO: 678815 - DNA, 15 bp, Homo sapiens
ctaattaattcctca

SEQ ID NO: 678816 - DNA, 15 bp, Homo sapiens
taattaattcctcat

SEQ ID NO: 678817 - DNA, 15 bp, Homo sapiens
aattaattcctcatc

SEQ ID NO: 678818 - DNA, 15 bp, Homo sapiens
attaattcctcatcc

SEQ ID NO: 678819 - DNA, 15 bp, Homo sapiens
ttaattcctcatcca

SEQ ID NO: 678820 - DNA, 15 bp, Homo sapiens
taattcctcatccaa

SEQ ID NO: 678821 - DNA, 15 bp, Homo sapiens
aattcctcatccaac

SEQ ID NO: 678822 - DNA, 15 bp, Homo sapiens
attcctcatccaact

SEQ ID NO: 678823 - DNA, 15 bp, Homo sapiens
ttcctcatccaacta

SEQ ID NO: 678824 - DNA, 15 bp, Homo sapiens
tcctcatccaactat

SEQ ID NO: 678825 - DNA, 15 bp, Homo sapiens
cctcatccaactatg

SEQ ID NO: 678826 - DNA, 15 bp, Homo sapiens
ctcatccaactatgt

SEQ ID NO: 678827 - DNA, 15 bp, Homo sapiens
tcatccaactatgtt

SEQ ID NO: 678828 - DNA, 15 bp, Homo sapiens
catccaactatgttc

SEQ ID NO: 678829 - DNA, 15 bp, Homo sapiens
atccaactatgttcc

SEQ ID NO: 678830 - DNA, 15 bp, Homo sapiens
tccaactatgttcca

SEQ ID NO: 678831 - DNA, 15 bp, Homo sapiens
ccaactatgttccaa

SEQ ID NO: 678832 - DNA, 15 bp, Homo sapiens
caactatgttccaaa

SEQ ID NO: 678833 - DNA, 15 bp, Homo sapiens
aactatgttccaaaa

SEQ ID NO: 678834 - DNA, 15 bp, Homo sapiens
actatgttccaaaac

SEQ ID NO: 678835 - DNA, 15 bp, Homo sapiens
ctatgttccaaaacg

SEQ ID NO: 678836 - DNA, 15 bp, Homo sapiens
tatgttccaaaacga

SEQ ID NO: 678837 - DNA, 15 bp, Homo sapiens
atgttccaaaacgag

SEQ ID NO: 678838 - DNA, 15 bp, Homo sapiens
tgttccaaaacgaga

SEQ ID NO: 678839 - DNA, 15 bp, Homo sapiens
gttccaaaacgagaa

SEQ ID NO: 678840 - DNA, 15 bp, Homo sapiens
ttccaaaacgagaat

SEQ ID NO: 678841 - DNA, 15 bp, Homo sapiens
tccaaaacgagaata

SEQ ID NO: 678842 - DNA, 15 bp, Homo sapiens
ccaaaacgagaatag

SEQ ID NO: 678843 - DNA, 15 bp, Homo sapiens
caaaacgagaataga

SEQ ID NO: 678844 - DNA, 15 bp, Homo sapiens
aaaacgagaatagaa

SEQ ID NO: 678845 - DNA, 15 bp, Homo sapiens
aaacgagaatagaaa

SEQ ID NO: 678846 - DNA, 15 bp, Homo sapiens
aacgagaatagaaaa

SEQ ID NO: 678847 - DNA, 15 bp, Homo sapiens
acgagaatagaaaat

SEQ ID NO: 678848 - DNA, 15 bp, Homo sapiens
cgagaatagaaaatt

SEQ ID NO: 678849 - DNA, 15 bp, Homo sapiens
gagaatagaaaatta

SEQ ID NO: 678850 - DNA, 15 bp, Homo sapiens
agaatagaaaattag

SEQ ID NO: 678851 - DNA, 15 bp, Homo sapiens
gaatagaaaattagc

SEQ ID NO: 678852 - DNA, 15 bp, Homo sapiens
aatagaaaattagcc

SEQ ID NO: 678853 - DNA, 15 bp, Homo sapiens
atagaaaattagccc

SEQ ID NO: 678854 - DNA, 15 bp, Homo sapiens
tagaaaattagcccc

SEQ ID NO: 678855 - DNA, 15 bp, Homo sapiens
agaaaattagcccca

SEQ ID NO: 678856 - DNA, 15 bp, Homo sapiens
gaaaattagccccaa

SEQ ID NO: 678857 - DNA, 15 bp, Homo sapiens
aaaattagccccaat

SEQ ID NO: 678858 - DNA, 15 bp, Homo sapiens
aaattagccccaata

SEQ ID NO: 678859 - DNA, 15 bp, Homo sapiens
aattagccccaataa

SEQ ID NO: 678860 - DNA, 15 bp, Homo sapiens
attagccccaataag

SEQ ID NO: 678861 - DNA, 15 bp, Homo sapiens
ttagccccaataagc

SEQ ID NO: 678862 - DNA, 15 bp, Homo sapiens
tagccccaataagcc

SEQ ID NO: 678863 - DNA, 15 bp, Homo sapiens
agccccaataagccc

SEQ ID NO: 678864 - DNA, 15 bp, Homo sapiens
gccccaataagccca

SEQ ID NO: 678865 - DNA, 15 bp, Homo sapiens
ccccaataagcccag

SEQ ID NO: 678866 - DNA, 15 bp, Homo sapiens
cccaataagcccagg

SEQ ID NO: 678867 - DNA, 15 bp, Homo sapiens
ccaataagcccaggc

SEQ ID NO: 678868 - DNA, 15 bp, Homo sapiens
caataagcccaggca

SEQ ID NO: 678869 - DNA, 15 bp, Homo sapiens
aataagcccaggcaa

SEQ ID NO: 678870 - DNA, 15 bp, Homo sapiens
ataagcccaggcaac

SEQ ID NO: 678871 - DNA, 15 bp, Homo sapiens
taagcccaggcaact

SEQ ID NO: 678872 - DNA, 15 bp, Homo sapiens
aagcccaggcaactg

SEQ ID NO: 678873 - DNA, 15 bp, Homo sapiens
agcccaggcaactga

SEQ ID NO: 678874 - DNA, 15 bp, Homo sapiens
gcccaggcaactgaa

SEQ ID NO: 678875 - DNA, 15 bp, Homo sapiens
cccaggcaactgaaa

SEQ ID NO: 678876 - DNA, 15 bp, Homo sapiens
ccaggcaactgaaaa

SEQ ID NO: 678877 - DNA, 15 bp, Homo sapiens
caggcaactgaaaag

SEQ ID NO: 678878 - DNA, 15 bp, Homo sapiens
aggcaactgaaaagt

SEQ ID NO: 678879 - DNA, 15 bp, Homo sapiens
ggcaactgaaaagta

SEQ ID NO: 678880 - DNA, 15 bp, Homo sapiens
gcaactgaaaagtaa

SEQ ID NO: 678881 - DNA, 15 bp, Homo sapiens
caactgaaaagtaaa

SEQ ID NO: 678882 - DNA, 15 bp, Homo sapiens
aactgaaaagtaaat

SEQ ID NO: 678883 - DNA, 15 bp, Homo sapiens
actgaaaagtaaatg

SEQ ID NO: 678884 - DNA, 15 bp, Homo sapiens
ctgaaaagtaaatgc

SEQ ID NO: 678885 - DNA, 15 bp, Homo sapiens
tgaaaagtaaatgct

SEQ ID NO: 678886 - DNA, 15 bp, Homo sapiens
gaaaagtaaatgcta

SEQ ID NO: 678887 - DNA, 15 bp, Homo sapiens
aaaagtaaatgctat

SEQ ID NO: 678888 - DNA, 15 bp, Homo sapiens
aaagtaaatgctatg

SEQ ID NO: 678889 - DNA, 15 bp, Homo sapiens
aagtaaatgctatgt

SEQ ID NO: 678890 - DNA, 15 bp, Homo sapiens
agtaaatgctatgtt

SEQ ID NO: 678891 - DNA, 15 bp, Homo sapiens
gtaaatgctatgttg

SEQ ID NO: 678892 - DNA, 15 bp, Homo sapiens
taaatgctatgttgt

SEQ ID NO: 678893 - DNA, 15 bp, Homo sapiens
aaatgctatgttgta

SEQ ID NO: 678894 - DNA, 15 bp, Homo sapiens
aatgctatgttgtac

SEQ ID NO: 678895 - DNA, 15 bp, Homo sapiens
atgctatgttgtact

SEQ ID NO: 678896 - DNA, 15 bp, Homo sapiens
tgctatgttgtactt

SEQ ID NO: 678897 - DNA, 15 bp, Homo sapiens
gctatgttgtacttt

SEQ ID NO: 678898 - DNA, 15 bp, Homo sapiens
ctatgttgtactttg

SEQ ID NO: 678899 - DNA, 15 bp, Homo sapiens
tatgttgtactttga

SEQ ID NO: 678900 - DNA, 15 bp, Homo sapiens
atgttgtactttgat

SEQ ID NO: 678901 - DNA, 15 bp, Homo sapiens
tgttgtactttgatc

SEQ ID NO: 678902 - DNA, 15 bp, Homo sapiens
gttgtactttgatcc

SEQ ID NO: 678903 - DNA, 15 bp, Homo sapiens
ttgtactttgatcca

SEQ ID NO: 678904 - DNA, 15 bp, Homo sapiens
tgtactttgatccat

SEQ ID NO: 678905 - DNA, 15 bp, Homo sapiens
gtactttgatccatg

SEQ ID NO: 678906 - DNA, 15 bp, Homo sapiens
tactttgatccatgg

SEQ ID NO: 678907 - DNA, 15 bp, Homo sapiens
actttgatccatggt

SEQ ID NO: 678908 - DNA, 15 bp, Homo sapiens
ctttgatccatggtc

SEQ ID NO: 678909 - DNA, 15 bp, Homo sapiens
tttgatccatggtca

SEQ ID NO: 678910 - DNA, 15 bp, Homo sapiens
ttgatccatggtcac

SEQ ID NO: 678911 - DNA, 15 bp, Homo sapiens
tgatccatggtcaca

SEQ ID NO: 678912 - DNA, 15 bp, Homo sapiens
gatccatggtcacaa

SEQ ID NO: 678913 - DNA, 15 bp, Homo sapiens
atccatggtcacaac

SEQ ID NO: 678914 - DNA, 15 bp, Homo sapiens
tccatggtcacaact

SEQ ID NO: 678915 - DNA, 15 bp, Homo sapiens
ccatggtcacaactc

SEQ ID NO: 678916 - DNA, 15 bp, Homo sapiens
catggtcacaactca

SEQ ID NO: 678917 - DNA, 15 bp, Homo sapiens
atggtcacaactcat

SEQ ID NO: 678918 - DNA, 15 bp, Homo sapiens
tggtcacaactcata

SEQ ID NO: 678919 - DNA, 15 bp, Homo sapiens
ggtcacaactcataa

SEQ ID NO: 678920 - DNA, 15 bp, Homo sapiens
gtcacaactcataat

SEQ ID NO: 678921 - DNA, 15 bp, Homo sapiens
tcacaactcataatc

SEQ ID NO: 678922 - DNA, 15 bp, Homo sapiens
cacaactcataatct

SEQ ID NO: 678923 - DNA, 15 bp, Homo sapiens
acaactcataatctt

SEQ ID NO: 678924 - DNA, 15 bp, Homo sapiens
caactcataatcttg

SEQ ID NO: 678925 - DNA, 15 bp, Homo sapiens
aactcataatcttgg

SEQ ID NO: 678926 - DNA, 15 bp, Homo sapiens
actcataatcttgga

SEQ ID NO: 678927 - DNA, 15 bp, Homo sapiens
ctcataatcttggaa

SEQ ID NO: 678928 - DNA, 15 bp, Homo sapiens
tcataatcttggaaa

SEQ ID NO: 678929 - DNA, 15 bp, Homo sapiens
cataatcttggaaaa

SEQ ID NO: 678930 - DNA, 15 bp, Homo sapiens
ataatcttggaaaag

SEQ ID NO: 678931 - DNA, 15 bp, Homo sapiens
taatcttggaaaagt

SEQ ID NO: 678932 - DNA, 15 bp, Homo sapiens
aatcttggaaaagtg

SEQ ID NO: 678933 - DNA, 15 bp, Homo sapiens
atcttggaaaagtgg

SEQ ID NO: 678934 - DNA, 15 bp, Homo sapiens
tcttggaaaagtgga

SEQ ID NO: 678935 - DNA, 15 bp, Homo sapiens
cttggaaaagtggac

SEQ ID NO: 678936 - DNA, 15 bp, Homo sapiens
ttggaaaagtggaca

SEQ ID NO: 678937 - DNA, 15 bp, Homo sapiens
tggaaaagtggacag

SEQ ID NO: 678938 - DNA, 15 bp, Homo sapiens
ggaaaagtggacaga

SEQ ID NO: 678939 - DNA, 15 bp, Homo sapiens
gaaaagtggacagaa

SEQ ID NO: 678940 - DNA, 15 bp, Homo sapiens
aaaagtggacagaaa

SEQ ID NO: 678941 - DNA, 15 bp, Homo sapiens
aaagtggacagaaaa

SEQ ID NO: 678942 - DNA, 15 bp, Homo sapiens
aagtggacagaaaag

SEQ ID NO: 678943 - DNA, 15 bp, Homo sapiens
agtggacagaaaaga

SEQ ID NO: 678944 - DNA, 15 bp, Homo sapiens
gtggacagaaaagac

SEQ ID NO: 678945 - DNA, 15 bp, Homo sapiens
tggacagaaaagaca

SEQ ID NO: 678946 - DNA, 15 bp, Homo sapiens
ggacagaaaagacaa

SEQ ID NO: 678947 - DNA, 15 bp, Homo sapiens
gacagaaaagacaaa

SEQ ID NO: 678948 - DNA, 15 bp, Homo sapiens
acagaaaagacaaaa

SEQ ID NO: 678949 - DNA, 15 bp, Homo sapiens
cagaaaagacaaaag

SEQ ID NO: 678950 - DNA, 15 bp, Homo sapiens
agaaaagacaaaaga

SEQ ID NO: 678951 - DNA, 15 bp, Homo sapiens
gaaaagacaaaagag

SEQ ID NO: 678952 - DNA, 15 bp, Homo sapiens
aaaagacaaaagagt

SEQ ID NO: 678953 - DNA, 15 bp, Homo sapiens
aaagacaaaagagtg

SEQ ID NO: 678954 - DNA, 15 bp, Homo sapiens
aagacaaaagagtga

SEQ ID NO: 678955 - DNA, 15 bp, Homo sapiens
agacaaaagagtgaa

SEQ ID NO: 678956 - DNA, 15 bp, Homo sapiens
gacaaaagagtgaac

SEQ ID NO: 678957 - DNA, 15 bp, Homo sapiens
acaaaagagtgaact

SEQ ID NO: 678958 - DNA, 15 bp, Homo sapiens
caaaagagtgaactt

SEQ ID NO: 678959 - DNA, 15 bp, Homo sapiens
aaaagagtgaacttt

SEQ ID NO: 678960 - DNA, 15 bp, Homo sapiens
aaagagtgaacttta

SEQ ID NO: 678961 - DNA, 15 bp, Homo sapiens
aagagtgaactttaa

SEQ ID NO: 678962 - DNA, 15 bp, Homo sapiens
agagtgaactttaaa

SEQ ID NO: 678963 - DNA, 15 bp, Homo sapiens
gagtgaactttaaaa

SEQ ID NO: 678964 - DNA, 15 bp, Homo sapiens
agtgaactttaaaac

SEQ ID NO: 678965 - DNA, 15 bp, Homo sapiens
gtgaactttaaaact

SEQ ID NO: 678966 - DNA, 15 bp, Homo sapiens
tgaactttaaaactc

SEQ ID NO: 678967 - DNA, 15 bp, Homo sapiens
gaactttaaaactcg

SEQ ID NO: 678968 - DNA, 15 bp, Homo sapiens
aactttaaaactcga

SEQ ID NO: 678969 - DNA, 15 bp, Homo sapiens
actttaaaactcgaa

SEQ ID NO: 678970 - DNA, 15 bp, Homo sapiens
ctttaaaactcgaat

SEQ ID NO: 678971 - DNA, 15 bp, Homo sapiens
tttaaaactcgaatt

SEQ ID NO: 678972 - DNA, 15 bp, Homo sapiens
ttaaaactcgaattt

SEQ ID NO: 678973 - DNA, 15 bp, Homo sapiens
taaaactcgaattta

SEQ ID NO: 678974 - DNA, 15 bp, Homo sapiens
aaaactcgaatttat

SEQ ID NO: 678975 - DNA, 15 bp, Homo sapiens
aaactcgaatttatt

SEQ ID NO: 678976 - DNA, 15 bp, Homo sapiens
aactcgaatttattt

SEQ ID NO: 678977 - DNA, 15 bp, Homo sapiens
actcgaatttatttt

SEQ ID NO: 678978 - DNA, 15 bp, Homo sapiens
ctcgaatttatttta

SEQ ID NO: 678979 - DNA, 15 bp, Homo sapiens
tcgaatttattttac

SEQ ID NO: 678980 - DNA, 15 bp, Homo sapiens
cgaatttattttacc

SEQ ID NO: 678981 - DNA, 15 bp, Homo sapiens
gaatttattttacca

SEQ ID NO: 678982 - DNA, 15 bp, Homo sapiens
aatttattttaccag

SEQ ID NO: 678983 - DNA, 15 bp, Homo sapiens
atttattttaccagt

SEQ ID NO: 678984 - DNA, 15 bp, Homo sapiens
tttattttaccagta

SEQ ID NO: 678985 - DNA, 15 bp, Homo sapiens
ttattttaccagtat

SEQ ID NO: 678986 - DNA, 15 bp, Homo sapiens
tattttaccagtatc

SEQ ID NO: 678987 - DNA, 15 bp, Homo sapiens
attttaccagtatct

SEQ ID NO: 678988 - DNA, 15 bp, Homo sapiens
ttttaccagtatctc

SEQ ID NO: 678989 - DNA, 15 bp, Homo sapiens
tttaccagtatctcc

SEQ ID NO: 678990 - DNA, 15 bp, Homo sapiens
ttaccagtatctcct

SEQ ID NO: 678991 - DNA, 15 bp, Homo sapiens
taccagtatctccta

SEQ ID NO: 678992 - DNA, 15 bp, Homo sapiens
accagtatctcctat

SEQ ID NO: 678993 - DNA, 15 bp, Homo sapiens
ccagtatctcctatg

SEQ ID NO: 678994 - DNA, 15 bp, Homo sapiens
cagtatctcctatga

SEQ ID NO: 678995 - DNA, 15 bp, Homo sapiens
agtatctcctatgaa

SEQ ID NO: 678996 - DNA, 15 bp, Homo sapiens
gtatctcctatgaag

SEQ ID NO: 678997 - DNA, 15 bp, Homo sapiens
tatctcctatgaagg

SEQ ID NO: 678998 - DNA, 15 bp, Homo sapiens
atctcctatgaaggg

SEQ ID NO: 678999 - DNA, 15 bp, Homo sapiens
tctcctatgaagggc

SEQ ID NO: 679000 - DNA, 15 bp, Homo sapiens
ctcctatgaagggct

SEQ ID NO: 679001 - DNA, 15 bp, Homo sapiens
tcctatgaagggcta

SEQ ID NO: 679002 - DNA, 15 bp, Homo sapiens
cctatgaagggctag

SEQ ID NO: 679003 - DNA, 15 bp, Homo sapiens
ctatgaagggctagt

SEQ ID NO: 679004 - DNA, 15 bp, Homo sapiens
tatgaagggctagta

SEQ ID NO: 679005 - DNA, 15 bp, Homo sapiens
atgaagggctagtaa

SEQ ID NO: 679006 - DNA, 15 bp, Homo sapiens
tgaagggctagtaac

SEQ ID NO: 679007 - DNA, 15 bp, Homo sapiens
gaagggctagtaacc

SEQ ID NO: 679008 - DNA, 15 bp, Homo sapiens
aagggctagtaacca

SEQ ID NO: 679009 - DNA, 15 bp, Homo sapiens
agggctagtaaccaa

SEQ ID NO: 679010 - DNA, 15 bp, Homo sapiens
gggctagtaaccaaa

SEQ ID NO: 679011 - DNA, 15 bp, Homo sapiens
ggctagtaaccaaaa

SEQ ID NO: 679012 - DNA, 15 bp, Homo sapiens
gctagtaaccaaaat

SEQ ID NO: 679013 - DNA, 15 bp, Homo sapiens
ctagtaaccaaaata

SEQ ID NO: 679014 - DNA, 15 bp, Homo sapiens
tagtaaccaaaataa

SEQ ID NO: 679015 - DNA, 15 bp, Homo sapiens
agtaaccaaaataat

SEQ ID NO: 679016 - DNA, 15 bp, Homo sapiens
gtaaccaaaataatc

SEQ ID NO: 679017 - DNA, 15 bp, Homo sapiens
taaccaaaataatcc

SEQ ID NO: 679018 - DNA, 15 bp, Homo sapiens
aaccaaaataatcca

SEQ ID NO: 679019 - DNA, 15 bp, Homo sapiens
accaaaataatccac

SEQ ID NO: 679020 - DNA, 15 bp, Homo sapiens
ccaaaataatccacg

SEQ ID NO: 679021 - DNA, 15 bp, Homo sapiens
caaaataatccacgc

SEQ ID NO: 679022 - DNA, 15 bp, Homo sapiens
aaaataatccacgca

SEQ ID NO: 679023 - DNA, 15 bp, Homo sapiens
aaataatccacgcat

SEQ ID NO: 679024 - DNA, 15 bp, Homo sapiens
aataatccacgcatc

SEQ ID NO: 679025 - DNA, 15 bp, Homo sapiens
ataatccacgcatca

SEQ ID NO: 679026 - DNA, 15 bp, Homo sapiens
taatccacgcatcag

SEQ ID NO: 679027 - DNA, 15 bp, Homo sapiens
aatccacgcatcagg

SEQ ID NO: 679028 - DNA, 15 bp, Homo sapiens
atccacgcatcaggg

SEQ ID NO: 679029 - DNA, 15 bp, Homo sapiens
tccacgcatcaggga

SEQ ID NO: 679030 - DNA, 15 bp, Homo sapiens
ccacgcatcagggag

SEQ ID NO: 679031 - DNA, 15 bp, Homo sapiens
cacgcatcagggaga

SEQ ID NO: 679032 - DNA, 15 bp, Homo sapiens
acgcatcagggagag

SEQ ID NO: 679033 - DNA, 15 bp, Homo sapiens
cgcatcagggagaga

SEQ ID NO: 679034 - DNA, 15 bp, Homo sapiens
gcatcagggagagaa

SEQ ID NO: 679035 - DNA, 15 bp, Homo sapiens
catcagggagagaaa

SEQ ID NO: 679036 - DNA, 15 bp, Homo sapiens
atcagggagagaaat

SEQ ID NO: 679037 - DNA, 15 bp, Homo sapiens
tcagggagagaaatg

SEQ ID NO: 679038 - DNA, 15 bp, Homo sapiens
cagggagagaaatgc

SEQ ID NO: 679039 - DNA, 15 bp, Homo sapiens
agggagagaaatgcc

SEQ ID NO: 679040 - DNA, 15 bp, Homo sapiens
gggagagaaatgcct

SEQ ID NO: 679041 - DNA, 15 bp, Homo sapiens
ggagagaaatgcctt

SEQ ID NO: 679042 - DNA, 15 bp, Homo sapiens
gagagaaatgcctta

SEQ ID NO: 679043 - DNA, 15 bp, Homo sapiens
agagaaatgccttaa

SEQ ID NO: 679044 - DNA, 15 bp, Homo sapiens
gagaaatgccttaag

SEQ ID NO: 679045 - DNA, 15 bp, Homo sapiens
agaaatgccttaagg

SEQ ID NO: 679046 - DNA, 15 bp, Homo sapiens
gaaatgccttaaggc

SEQ ID NO: 679047 - DNA, 15 bp, Homo sapiens
aaatgccttaaggca

SEQ ID NO: 679048 - DNA, 15 bp, Homo sapiens
aatgccttaaggcat

SEQ ID NO: 679049 - DNA, 15 bp, Homo sapiens
atgccttaaggcata

SEQ ID NO: 679050 - DNA, 15 bp, Homo sapiens
tgccttaaggcatac

SEQ ID NO: 679051 - DNA, 15 bp, Homo sapiens
gccttaaggcatacg

SEQ ID NO: 679052 - DNA, 15 bp, Homo sapiens
ccttaaggcatacgt

SEQ ID NO: 679053 - DNA, 15 bp, Homo sapiens
cttaaggcatacgtt

SEQ ID NO: 679054 - DNA, 15 bp, Homo sapiens
ttaaggcatacgttt

SEQ ID NO: 679055 - DNA, 15 bp, Homo sapiens
taaggcatacgtttt

SEQ ID NO: 679056 - DNA, 15 bp, Homo sapiens
aaggcatacgttttg

SEQ ID NO: 679057 - DNA, 15 bp, Homo sapiens
aggcatacgttttgg

SEQ ID NO: 679058 - DNA, 15 bp, Homo sapiens
ggcatacgttttgga

SEQ ID NO: 679059 - DNA, 15 bp, Homo sapiens
gcatacgttttggac

SEQ ID NO: 679060 - DNA, 15 bp, Homo sapiens
catacgttttggaca

SEQ ID NO: 679061 - DNA, 15 bp, Homo sapiens
atacgttttggacat

SEQ ID NO: 679062 - DNA, 15 bp, Homo sapiens
tacgttttggacatt

SEQ ID NO: 679063 - DNA, 15 bp, Homo sapiens
acgttttggacattt

SEQ ID NO: 679064 - DNA, 15 bp, Homo sapiens
cgttttggacattta

SEQ ID NO: 679065 - DNA, 15 bp, Homo sapiens
gttttggacatttag

SEQ ID NO: 679066 - DNA, 15 bp, Homo sapiens
ttttggacatttagc

SEQ ID NO: 679067 - DNA, 15 bp, Homo sapiens
tttggacatttagcg

SEQ ID NO: 679068 - DNA, 15 bp, Homo sapiens
ttggacatttagcgt

SEQ ID NO: 679069 - DNA, 15 bp, Homo sapiens
tggacatttagcgtc

SEQ ID NO: 679070 - DNA, 15 bp, Homo sapiens
ggacatttagcgtcc

SEQ ID NO: 679071 - DNA, 15 bp, Homo sapiens
gacatttagcgtccc

SEQ ID NO: 679072 - DNA, 15 bp, Homo sapiens
acatttagcgtccct

SEQ ID NO: 679073 - DNA, 15 bp, Homo sapiens
catttagcgtccctg

SEQ ID NO: 679074 - DNA, 15 bp, Homo sapiens
atttagcgtccctgc

SEQ ID NO: 679075 - DNA, 15 bp, Homo sapiens
tttagcgtccctgca

SEQ ID NO: 679076 - DNA, 15 bp, Homo sapiens
ttagcgtccctgcaa

SEQ ID NO: 679077 - DNA, 15 bp, Homo sapiens
tagcgtccctgcaaa

SEQ ID NO: 679078 - DNA, 15 bp, Homo sapiens
agcgtccctgcaaat

SEQ ID NO: 679079 - DNA, 15 bp, Homo sapiens
gcgtccctgcaaatt

SEQ ID NO: 679080 - DNA, 15 bp, Homo sapiens
cgtccctgcaaattc

SEQ ID NO: 679081 - DNA, 15 bp, Homo sapiens
gtccctgcaaattct

SEQ ID NO: 679082 - DNA, 15 bp, Homo sapiens
tccctgcaaattctg

SEQ ID NO: 679083 - DNA, 15 bp, Homo sapiens
ccctgcaaattctgg

SEQ ID NO: 679084 - DNA, 15 bp, Homo sapiens
cctgcaaattctggc

SEQ ID NO: 679085 - DNA, 15 bp, Homo sapiens
ctgcaaattctggcc

SEQ ID NO: 679086 - DNA, 15 bp, Homo sapiens
tgcaaattctggcca

SEQ ID NO: 679087 - DNA, 15 bp, Homo sapiens
gcaaattctggccat

SEQ ID NO: 679088 - DNA, 15 bp, Homo sapiens
caaattctggccatc

SEQ ID NO: 679089 - DNA, 15 bp, Homo sapiens
aaattctggccatcg

SEQ ID NO: 679090 - DNA, 15 bp, Homo sapiens
aattctggccatcgc

SEQ ID NO: 679091 - DNA, 15 bp, Homo sapiens
attctggccatcgcc

SEQ ID NO: 679092 - DNA, 15 bp, Homo sapiens
ttctggccatcgccg

SEQ ID NO: 679093 - DNA, 15 bp, Homo sapiens
tctggccatcgccgc

SEQ ID NO: 679094 - DNA, 15 bp, Homo sapiens
ctggccatcgccgct

SEQ ID NO: 679095 - DNA, 15 bp, Homo sapiens
tggccatcgccgctt

SEQ ID NO: 679096 - DNA, 15 bp, Homo sapiens
ggccatcgccgcttc

SEQ ID NO: 679097 - DNA, 15 bp, Homo sapiens
gccatcgccgcttcc

SEQ ID NO: 679098 - DNA, 15 bp, Homo sapiens
ccatcgccgcttcct

SEQ ID NO: 679099 - DNA, 15 bp, Homo sapiens
catcgccgcttcctt

SEQ ID NO: 679100 - DNA, 15 bp, Homo sapiens
atcgccgcttccttt

SEQ ID NO: 679101 - DNA, 15 bp, Homo sapiens
tcgccgcttcctttg

SEQ ID NO: 679102 - DNA, 15 bp, Homo sapiens
cgccgcttcctttgt

SEQ ID NO: 679103 - DNA, 15 bp, Homo sapiens
gccgcttcctttgtc

SEQ ID NO: 679104 - DNA, 15 bp, Homo sapiens
ccgcttcctttgtcc

SEQ ID NO: 679105 - DNA, 15 bp, Homo sapiens
cgcttcctttgtcca

SEQ ID NO: 679106 - DNA, 15 bp, Homo sapiens
gcttcctttgtccat

SEQ ID NO: 679107 - DNA, 15 bp, Homo sapiens
cttcctttgtccatc

SEQ ID NO: 679108 - DNA, 15 bp, Homo sapiens
ttcctttgtccatca

SEQ ID NO: 679109 - DNA, 15 bp, Homo sapiens
tcctttgtccatcag

SEQ ID NO: 679110 - DNA, 15 bp, Homo sapiens
cctttgtccatcaga

SEQ ID NO: 679111 - DNA, 15 bp, Homo sapiens
ctttgtccatcagaa

SEQ ID NO: 679112 - DNA, 15 bp, Homo sapiens
tttgtccatcagaag

SEQ ID NO: 679113 - DNA, 15 bp, Homo sapiens
ttgtccatcagaagg

SEQ ID NO: 679114 - DNA, 15 bp, Homo sapiens
tgtccatcagaaggc

SEQ ID NO: 679115 - DNA, 15 bp, Homo sapiens
gtccatcagaaggca

SEQ ID NO: 679116 - DNA, 15 bp, Homo sapiens
tccatcagaaggcag

SEQ ID NO: 679117 - DNA, 15 bp, Homo sapiens
ccatcagaaggcagg

SEQ ID NO: 679118 - DNA, 15 bp, Homo sapiens
catcagaaggcagga

SEQ ID NO: 679119 - DNA, 15 bp, Homo sapiens
atcagaaggcaggaa

SEQ ID NO: 679120 - DNA, 15 bp, Homo sapiens
tcagaaggcaggaaa

SEQ ID NO: 679121 - DNA, 15 bp, Homo sapiens
cagaaggcaggaaac

SEQ ID NO: 679122 - DNA, 15 bp, Homo sapiens
agaaggcaggaaact

SEQ ID NO: 679123 - DNA, 15 bp, Homo sapiens
gaaggcaggaaactt

SEQ ID NO: 679124 - DNA, 15 bp, Homo sapiens
aaggcaggaaacttt

SEQ ID NO: 679125 - DNA, 15 bp, Homo sapiens
aggcaggaaacttta

SEQ ID NO: 679126 - DNA, 15 bp, Homo sapiens
ggcaggaaactttat

SEQ ID NO: 679127 - DNA, 15 bp, Homo sapiens
gcaggaaactttata

SEQ ID NO: 679128 - DNA, 15 bp, Homo sapiens
caggaaactttatat

SEQ ID NO: 679129 - DNA, 15 bp, Homo sapiens
aggaaactttatatt

SEQ ID NO: 679130 - DNA, 15 bp, Homo sapiens
ggaaactttatattg

SEQ ID NO: 679131 - DNA, 15 bp, Homo sapiens
gaaactttatattgg

SEQ ID NO: 679132 - DNA, 15 bp, Homo sapiens
aaactttatattggt

SEQ ID NO: 679133 - DNA, 15 bp, Homo sapiens
aactttatattggtg

SEQ ID NO: 679134 - DNA, 15 bp, Homo sapiens
actttatattggtga

SEQ ID NO: 679135 - DNA, 15 bp, Homo sapiens
ctttatattggtgac

SEQ ID NO: 679136 - DNA, 15 bp, Homo sapiens
tttatattggtgacc

SEQ ID NO: 679137 - DNA, 15 bp, Homo sapiens
ttatattggtgaccc

SEQ ID NO: 679138 - DNA, 15 bp, Homo sapiens
tatattggtgacccg

SEQ ID NO: 679139 - DNA, 15 bp, Homo sapiens
atattggtgacccgt

SEQ ID NO: 679140 - DNA, 15 bp, Homo sapiens
tattggtgacccgtg

SEQ ID NO: 679141 - DNA, 15 bp, Homo sapiens
attggtgacccgtgg

SEQ ID NO: 679142 - DNA, 15 bp, Homo sapiens
ttggtgacccgtgga

SEQ ID NO: 679143 - DNA, 15 bp, Homo sapiens
tggtgacccgtggag

SEQ ID NO: 679144 - DNA, 15 bp, Homo sapiens
ggtgacccgtggagc

SEQ ID NO: 679145 - DNA, 15 bp, Homo sapiens
gtgacccgtggagct

SEQ ID NO: 679146 - DNA, 15 bp, Homo sapiens
tgacccgtggagctc

SEQ ID NO: 679147 - DNA, 15 bp, Homo sapiens
gacccgtggagctca

SEQ ID NO: 679148 - DNA, 15 bp, Homo sapiens
acccgtggagctcac

SEQ ID NO: 679149 - DNA, 15 bp, Homo sapiens
cccgtggagctcaca

SEQ ID NO: 679150 - DNA, 15 bp, Homo sapiens
ccgtggagctcacat

SEQ ID NO: 679151 - DNA, 15 bp, Homo sapiens
cgtggagctcacatt

SEQ ID NO: 679152 - DNA, 15 bp, Homo sapiens
gtggagctcacatta

SEQ ID NO: 679153 - DNA, 15 bp, Homo sapiens
tggagctcacattaa

SEQ ID NO: 679154 - DNA, 15 bp, Homo sapiens
ggagctcacattaac

SEQ ID NO: 679155 - DNA, 15 bp, Homo sapiens
gagctcacattaact

SEQ ID NO: 679156 - DNA, 15 bp, Homo sapiens
agctcacattaacta

SEQ ID NO: 679157 - DNA, 15 bp, Homo sapiens
gctcacattaactat

SEQ ID NO: 679158 - DNA, 15 bp, Homo sapiens
ctcacattaactatt

SEQ ID NO: 679159 - DNA, 15 bp, Homo sapiens
tcacattaactattt

SEQ ID NO: 679160 - DNA, 15 bp, Homo sapiens
cacattaactattta

SEQ ID NO: 679161 - DNA, 15 bp, Homo sapiens
acattaactatttac

SEQ ID NO: 679162 - DNA, 15 bp, Homo sapiens
cattaactatttaca

SEQ ID NO: 679163 - DNA, 15 bp, Homo sapiens
attaactatttacag

SEQ ID NO: 679164 - DNA, 15 bp, Homo sapiens
ttaactatttacagg

SEQ ID NO: 679165 - DNA, 15 bp, Homo sapiens
taactatttacaggg

SEQ ID NO: 679166 - DNA, 15 bp, Homo sapiens
aactatttacagggt

SEQ ID NO: 679167 - DNA, 15 bp, Homo sapiens
actatttacagggta

SEQ ID NO: 679168 - DNA, 15 bp, Homo sapiens
ctatttacagggtaa

SEQ ID NO: 679169 - DNA, 15 bp, Homo sapiens
tatttacagggtaac

SEQ ID NO: 679170 - DNA, 15 bp, Homo sapiens
atttacagggtaact

SEQ ID NO: 679171 - DNA, 15 bp, Homo sapiens
tttacagggtaactg

SEQ ID NO: 679172 - DNA, 15 bp, Homo sapiens
ttacagggtaactgc

SEQ ID NO: 679173 - DNA, 15 bp, Homo sapiens
tacagggtaactgct

SEQ ID NO: 679174 - DNA, 15 bp, Homo sapiens
acagggtaactgctt

SEQ ID NO: 679175 - DNA, 15 bp, Homo sapiens
cagggtaactgctta

SEQ ID NO: 679176 - DNA, 15 bp, Homo sapiens
agggtaactgcttag

SEQ ID NO: 679177 - DNA, 15 bp, Homo sapiens
gggtaactgcttagg

SEQ ID NO: 679178 - DNA, 15 bp, Homo sapiens
ggtaactgcttagga

SEQ ID NO: 679179 - DNA, 15 bp, Homo sapiens
gtaactgcttaggac

SEQ ID NO: 679180 - DNA, 15 bp, Homo sapiens
taactgcttaggacc

SEQ ID NO: 679181 - DNA, 15 bp, Homo sapiens
aactgcttaggacca

SEQ ID NO: 679182 - DNA, 15 bp, Homo sapiens
actgcttaggaccag

SEQ ID NO: 679183 - DNA, 15 bp, Homo sapiens
ctgcttaggaccagt

SEQ ID NO: 679184 - DNA, 15 bp, Homo sapiens
tgcttaggaccagta

SEQ ID NO: 679185 - DNA, 15 bp, Homo sapiens
gcttaggaccagtat

SEQ ID NO: 679186 - DNA, 15 bp, Homo sapiens
cttaggaccagtatt

SEQ ID NO: 679187 - DNA, 15 bp, Homo sapiens
ttaggaccagtatta

SEQ ID NO: 679188 - DNA, 15 bp, Homo sapiens
taggaccagtattat

SEQ ID NO: 679189 - DNA, 15 bp, Homo sapiens
aggaccagtattatg

SEQ ID NO: 679190 - DNA, 15 bp, Homo sapiens
ggaccagtattatga

SEQ ID NO: 679191 - DNA, 15 bp, Homo sapiens
gaccagtattatgag

SEQ ID NO: 679192 - DNA, 15 bp, Homo sapiens
accagtattatgagg

SEQ ID NO: 679193 - DNA, 15 bp, Homo sapiens
ccagtattatgagga

SEQ ID NO: 679194 - DNA, 15 bp, Homo sapiens
cagtattatgaggag

SEQ ID NO: 679195 - DNA, 15 bp, Homo sapiens
agtattatgaggaga

SEQ ID NO: 679196 - DNA, 15 bp, Homo sapiens
gtattatgaggagaa

SEQ ID NO: 679197 - DNA, 15 bp, Homo sapiens
tattatgaggagaat

SEQ ID NO: 679198 - DNA, 15 bp, Homo sapiens
attatgaggagaatt

SEQ ID NO: 679199 - DNA, 15 bp, Homo sapiens
ttatgaggagaattt

SEQ ID NO: 679200 - DNA, 15 bp, Homo sapiens
tatgaggagaattta

SEQ ID NO: 679201 - DNA, 15 bp, Homo sapiens
atgaggagaatttac

SEQ ID NO: 679202 - DNA, 15 bp, Homo sapiens
tgaggagaatttacc

SEQ ID NO: 679203 - DNA, 15 bp, Homo sapiens
gaggagaatttacct

SEQ ID NO: 679204 - DNA, 15 bp, Homo sapiens
aggagaatttacctt

SEQ ID NO: 679205 - DNA, 15 bp, Homo sapiens
ggagaatttaccttt

SEQ ID NO: 679206 - DNA, 15 bp, Homo sapiens
gagaatttacctttc

SEQ ID NO: 679207 - DNA, 15 bp, Homo sapiens
agaatttacctttcc

SEQ ID NO: 679208 - DNA, 15 bp, Homo sapiens
gaatttacctttccc

SEQ ID NO: 679209 - DNA, 15 bp, Homo sapiens
aatttacctttcccg

SEQ ID NO: 679210 - DNA, 15 bp, Homo sapiens
atttacctttcccgc

SEQ ID NO: 679211 - DNA, 15 bp, Homo sapiens
tttacctttcccgcc

SEQ ID NO: 679212 - DNA, 15 bp, Homo sapiens
ttacctttcccgcct

SEQ ID NO: 679213 - DNA, 15 bp, Homo sapiens
tacctttcccgcctc

SEQ ID NO: 679214 - DNA, 15 bp, Homo sapiens
acctttcccgcctct

SEQ ID NO: 679215 - DNA, 15 bp, Homo sapiens
cctttcccgcctctc

SEQ ID NO: 679216 - DNA, 15 bp, Homo sapiens
ctttcccgcctctct

SEQ ID NO: 679217 - DNA, 15 bp, Homo sapiens
tttcccgcctctctt

SEQ ID NO: 679218 - DNA, 15 bp, Homo sapiens
ttcccgcctctcttt

SEQ ID NO: 679219 - DNA, 15 bp, Homo sapiens
tcccgcctctctttc

SEQ ID NO: 679220 - DNA, 15 bp, Homo sapiens
cccgcctctctttcc

SEQ ID NO: 679221 - DNA, 15 bp, Homo sapiens
ccgcctctctttcca

SEQ ID NO: 679222 - DNA, 15 bp, Homo sapiens
cgcctctctttccaa

SEQ ID NO: 679223 - DNA, 15 bp, Homo sapiens
gcctctctttccaag

SEQ ID NO: 679224 - DNA, 15 bp, Homo sapiens
cctctctttccaaga

SEQ ID NO: 679225 - DNA, 15 bp, Homo sapiens
ctctctttccaagaa

SEQ ID NO: 679226 - DNA, 15 bp, Homo sapiens
tctctttccaagaaa

SEQ ID NO: 679227 - DNA, 15 bp, Homo sapiens
ctctttccaagaaac

SEQ ID NO: 679228 - DNA, 15 bp, Homo sapiens
tctttccaagaaaca

SEQ ID NO: 679229 - DNA, 15 bp, Homo sapiens
ctttccaagaaacaa

SEQ ID NO: 679230 - DNA, 15 bp, Homo sapiens
tttccaagaaacaag

SEQ ID NO: 679231 - DNA, 15 bp, Homo sapiens
ttccaagaaacaagg

SEQ ID NO: 679232 - DNA, 15 bp, Homo sapiens
tccaagaaacaagga

SEQ ID NO: 679233 - DNA, 15 bp, Homo sapiens
ccaagaaacaaggag

SEQ ID NO: 679234 - DNA, 15 bp, Homo sapiens
caagaaacaaggagg

SEQ ID NO: 679235 - DNA, 15 bp, Homo sapiens
aagaaacaaggaggg

SEQ ID NO: 679236 - DNA, 15 bp, Homo sapiens
agaaacaaggagggg

SEQ ID NO: 679237 - DNA, 15 bp, Homo sapiens
gaaacaaggaggggg

SEQ ID NO: 679238 - DNA, 15 bp, Homo sapiens
aaacaaggagggggt

SEQ ID NO: 679239 - DNA, 15 bp, Homo sapiens
aacaaggagggggtg

SEQ ID NO: 679240 - DNA, 15 bp, Homo sapiens
acaaggagggggtga

SEQ ID NO: 679241 - DNA, 15 bp, Homo sapiens
caaggagggggtgaa

SEQ ID NO: 679242 - DNA, 15 bp, Homo sapiens
aaggagggggtgaag

SEQ ID NO: 679243 - DNA, 15 bp, Homo sapiens
aggagggggtgaagg

SEQ ID NO: 679244 - DNA, 15 bp, Homo sapiens
ggagggggtgaaggt

SEQ ID NO: 679245 - DNA, 15 bp, Homo sapiens
gagggggtgaaggta

SEQ ID NO: 679246 - DNA, 15 bp, Homo sapiens
agggggtgaaggtac

SEQ ID NO: 679247 - DNA, 15 bp, Homo sapiens
gggggtgaaggtacg

SEQ ID NO: 679248 - DNA, 15 bp, Homo sapiens
ggggtgaaggtacgg

SEQ ID NO: 679249 - DNA, 15 bp, Homo sapiens
gggtgaaggtacgga

SEQ ID NO: 679250 - DNA, 15 bp, Homo sapiens
ggtgaaggtacggag

SEQ ID NO: 679251 - DNA, 15 bp, Homo sapiens
gtgaaggtacggaga

SEQ ID NO: 679252 - DNA, 15 bp, Homo sapiens
tgaaggtacggagaa

SEQ ID NO: 679253 - DNA, 15 bp, Homo sapiens
gaaggtacggagaac

SEQ ID NO: 679254 - DNA, 15 bp, Homo sapiens
aaggtacggagaaca

SEQ ID NO: 679255 - DNA, 15 bp, Homo sapiens
aggtacggagaacag

SEQ ID NO: 679256 - DNA, 15 bp, Homo sapiens
ggtacggagaacagt

SEQ ID NO: 679257 - DNA, 15 bp, Homo sapiens
gtacggagaacagta

SEQ ID NO: 679258 - DNA, 15 bp, Homo sapiens
tacggagaacagtat

SEQ ID NO: 679259 - DNA, 15 bp, Homo sapiens
acggagaacagtatt

SEQ ID NO: 679260 - DNA, 15 bp, Homo sapiens
cggagaacagtattt

SEQ ID NO: 679261 - DNA, 15 bp, Homo sapiens
ggagaacagtatttc

SEQ ID NO: 679262 - DNA, 15 bp, Homo sapiens
gagaacagtatttct

SEQ ID NO: 679263 - DNA, 15 bp, Homo sapiens
agaacagtatttctt

SEQ ID NO: 679264 - DNA, 15 bp, Homo sapiens
gaacagtatttcttc

SEQ ID NO: 679265 - DNA, 15 bp, Homo sapiens
aacagtatttcttct

SEQ ID NO: 679266 - DNA, 15 bp, Homo sapiens
acagtatttcttctg

SEQ ID NO: 679267 - DNA, 15 bp, Homo sapiens
cagtatttcttctgt

SEQ ID NO: 679268 - DNA, 15 bp, Homo sapiens
agtatttcttctgtt

SEQ ID NO: 679269 - DNA, 15 bp, Homo sapiens
gtatttcttctgttg

SEQ ID NO: 679270 - DNA, 15 bp, Homo sapiens
tatttcttctgttga

SEQ ID NO: 679271 - DNA, 15 bp, Homo sapiens
atttcttctgttgaa

SEQ ID NO: 679272 - DNA, 15 bp, Homo sapiens
tttcttctgttgaaa

SEQ ID NO: 679273 - DNA, 15 bp, Homo sapiens
ttcttctgttgaaag

SEQ ID NO: 679274 - DNA, 15 bp, Homo sapiens
tcttctgttgaaagc

SEQ ID NO: 679275 - DNA, 15 bp, Homo sapiens
cttctgttgaaagca

SEQ ID NO: 679276 - DNA, 15 bp, Homo sapiens
ttctgttgaaagcaa

SEQ ID NO: 679277 - DNA, 15 bp, Homo sapiens
tctgttgaaagcaac

SEQ ID NO: 679278 - DNA, 15 bp, Homo sapiens
ctgttgaaagcaact

SEQ ID NO: 679279 - DNA, 15 bp, Homo sapiens
tgttgaaagcaactt

SEQ ID NO: 679280 - DNA, 15 bp, Homo sapiens
gttgaaagcaactta

SEQ ID NO: 679281 - DNA, 15 bp, Homo sapiens
ttgaaagcaacttag

SEQ ID NO: 679282 - DNA, 15 bp, Homo sapiens
tgaaagcaacttagc

SEQ ID NO: 679283 - DNA, 15 bp, Homo sapiens
gaaagcaacttagct

SEQ ID NO: 679284 - DNA, 15 bp, Homo sapiens
aaagcaacttagcta

SEQ ID NO: 679285 - DNA, 15 bp, Homo sapiens
aagcaacttagctac

SEQ ID NO: 679286 - DNA, 15 bp, Homo sapiens
agcaacttagctaca

SEQ ID NO: 679287 - DNA, 15 bp, Homo sapiens
gcaacttagctacaa

SEQ ID NO: 679288 - DNA, 15 bp, Homo sapiens
caacttagctacaaa

SEQ ID NO: 679289 - DNA, 15 bp, Homo sapiens
aacttagctacaaag

SEQ ID NO: 679290 - DNA, 15 bp, Homo sapiens
acttagctacaaaga

SEQ ID NO: 679291 - DNA, 15 bp, Homo sapiens
cttagctacaaagat

SEQ ID NO: 679292 - DNA, 15 bp, Homo sapiens
ttagctacaaagata

SEQ ID NO: 679293 - DNA, 15 bp, Homo sapiens
tagctacaaagataa

SEQ ID NO: 679294 - DNA, 15 bp, Homo sapiens
agctacaaagataaa

SEQ ID NO: 679295 - DNA, 15 bp, Homo sapiens
gctacaaagataaat

SEQ ID NO: 679296 - DNA, 15 bp, Homo sapiens
ctacaaagataaatt

SEQ ID NO: 679297 - DNA, 15 bp, Homo sapiens
tacaaagataaatta

SEQ ID NO: 679298 - DNA, 15 bp, Homo sapiens
acaaagataaattac

SEQ ID NO: 679299 - DNA, 15 bp, Homo sapiens
caaagataaattaca

SEQ ID NO: 679300 - DNA, 15 bp, Homo sapiens
aaagataaattacag

SEQ ID NO: 679301 - DNA, 15 bp, Homo sapiens
aagataaattacagc

SEQ ID NO: 679302 - DNA, 15 bp, Homo sapiens
agataaattacagct

SEQ ID NO: 679303 - DNA, 15 bp, Homo sapiens
gataaattacagcta

SEQ ID NO: 679304 - DNA, 15 bp, Homo sapiens
ataaattacagctat

SEQ ID NO: 679305 - DNA, 15 bp, Homo sapiens
taaattacagctatg

SEQ ID NO: 679306 - DNA, 15 bp, Homo sapiens
aaattacagctatgt

SEQ ID NO: 679307 - DNA, 15 bp, Homo sapiens
aattacagctatgta

SEQ ID NO: 679308 - DNA, 15 bp, Homo sapiens
attacagctatgtac

SEQ ID NO: 679309 - DNA, 15 bp, Homo sapiens
ttacagctatgtaca

SEQ ID NO: 679310 - DNA, 15 bp, Homo sapiens
tacagctatgtacac

SEQ ID NO: 679311 - DNA, 15 bp, Homo sapiens
acagctatgtacact

SEQ ID NO: 679312 - DNA, 15 bp, Homo sapiens
cagctatgtacactg

SEQ ID NO: 679313 - DNA, 15 bp, Homo sapiens
agctatgtacactga

SEQ ID NO: 679314 - DNA, 15 bp, Homo sapiens
gctatgtacactgaa

SEQ ID NO: 679315 - DNA, 15 bp, Homo sapiens
ctatgtacactgaag

SEQ ID NO: 679316 - DNA, 15 bp, Homo sapiens
tatgtacactgaagg

SEQ ID NO: 679317 - DNA, 15 bp, Homo sapiens
atgtacactgaaggt

SEQ ID NO: 679318 - DNA, 15 bp, Homo sapiens
tgtacactgaaggta

SEQ ID NO: 679319 - DNA, 15 bp, Homo sapiens
gtacactgaaggtag

SEQ ID NO: 679320 - DNA, 15 bp, Homo sapiens
tacactgaaggtagc

SEQ ID NO: 679321 - DNA, 15 bp, Homo sapiens
acactgaaggtagct

SEQ ID NO: 679322 - DNA, 15 bp, Homo sapiens
cactgaaggtagcta

SEQ ID NO: 679323 - DNA, 15 bp, Homo sapiens
actgaaggtagctat

SEQ ID NO: 679324 - DNA, 15 bp, Homo sapiens
ctgaaggtagctatt

SEQ ID NO: 679325 - DNA, 15 bp, Homo sapiens
tgaaggtagctattt

SEQ ID NO: 679326 - DNA, 15 bp, Homo sapiens
gaaggtagctatttc

SEQ ID NO: 679327 - DNA, 15 bp, Homo sapiens
aaggtagctatttca

SEQ ID NO: 679328 - DNA, 15 bp, Homo sapiens
aggtagctatttcat

SEQ ID NO: 679329 - DNA, 15 bp, Homo sapiens
ggtagctatttcatt

SEQ ID NO: 679330 - DNA, 15 bp, Homo sapiens
gtagctatttcattc

SEQ ID NO: 679331 - DNA, 15 bp, Homo sapiens
tagctatttcattcc

SEQ ID NO: 679332 - DNA, 15 bp, Homo sapiens
agctatttcattcca

SEQ ID NO: 679333 - DNA, 15 bp, Homo sapiens
gctatttcattccac

SEQ ID NO: 679334 - DNA, 15 bp, Homo sapiens
ctatttcattccaca

SEQ ID NO: 679335 - DNA, 15 bp, Homo sapiens
tatttcattccacaa

SEQ ID NO: 679336 - DNA, 15 bp, Homo sapiens
atttcattccacaaa

SEQ ID NO: 679337 - DNA, 15 bp, Homo sapiens
tttcattccacaaaa

SEQ ID NO: 679338 - DNA, 15 bp, Homo sapiens
ttcattccacaaaat

SEQ ID NO: 679339 - DNA, 15 bp, Homo sapiens
tcattccacaaaata

SEQ ID NO: 679340 - DNA, 15 bp, Homo sapiens
cattccacaaaataa

SEQ ID NO: 679341 - DNA, 15 bp, Homo sapiens
attccacaaaataag

SEQ ID NO: 679342 - DNA, 15 bp, Homo sapiens
ttccacaaaataaga

SEQ ID NO: 679343 - DNA, 15 bp, Homo sapiens
tccacaaaataagag

SEQ ID NO: 679344 - DNA, 15 bp, Homo sapiens
ccacaaaataagagt

SEQ ID NO: 679345 - DNA, 15 bp, Homo sapiens
cacaaaataagagtt

SEQ ID NO: 679346 - DNA, 15 bp, Homo sapiens
acaaaataagagttt

SEQ ID NO: 679347 - DNA, 15 bp, Homo sapiens
caaaataagagtttt

SEQ ID NO: 679348 - DNA, 15 bp, Homo sapiens
aaaataagagttttt

SEQ ID NO: 679349 - DNA, 15 bp, Homo sapiens
aaataagagtttttt

SEQ ID NO: 679350 - DNA, 15 bp, Homo sapiens
aataagagtttttta

SEQ ID NO: 679351 - DNA, 15 bp, Homo sapiens
ataagagttttttaa

SEQ ID NO: 679352 - DNA, 15 bp, Homo sapiens
taagagttttttaaa

SEQ ID NO: 679353 - DNA, 15 bp, Homo sapiens
aagagttttttaaaa

SEQ ID NO: 679354 - DNA, 15 bp, Homo sapiens
agagttttttaaaaa

SEQ ID NO: 679355 - DNA, 15 bp, Homo sapiens
gagttttttaaaaag

SEQ ID NO: 679356 - DNA, 15 bp, Homo sapiens
agttttttaaaaagc

SEQ ID NO: 679357 - DNA, 15 bp, Homo sapiens
gttttttaaaaagct

SEQ ID NO: 679358 - DNA, 15 bp, Homo sapiens
ttttttaaaaagcta

SEQ ID NO: 679359 - DNA, 15 bp, Homo sapiens
tttttaaaaagctat

SEQ ID NO: 679360 - DNA, 15 bp, Homo sapiens
ttttaaaaagctatg

SEQ ID NO: 679361 - DNA, 15 bp, Homo sapiens
tttaaaaagctatgt

SEQ ID NO: 679362 - DNA, 15 bp, Homo sapiens
ttaaaaagctatgta

SEQ ID NO: 679363 - DNA, 15 bp, Homo sapiens
taaaaagctatgtat

SEQ ID NO: 679364 - DNA, 15 bp, Homo sapiens
aaaaagctatgtatg

SEQ ID NO: 679365 - DNA, 15 bp, Homo sapiens
aaaagctatgtatgt

SEQ ID NO: 679366 - DNA, 15 bp, Homo sapiens
aaagctatgtatgta

SEQ ID NO: 679367 - DNA, 15 bp, Homo sapiens
aagctatgtatgtat

SEQ ID NO: 679368 - DNA, 15 bp, Homo sapiens
agctatgtatgtatg

SEQ ID NO: 679369 - DNA, 15 bp, Homo sapiens
gctatgtatgtatgt

SEQ ID NO: 679370 - DNA, 15 bp, Homo sapiens
ctatgtatgtatgtg

SEQ ID NO: 679371 - DNA, 15 bp, Homo sapiens
tatgtatgtatgtgc

SEQ ID NO: 679372 - DNA, 15 bp, Homo sapiens
atgtatgtatgtgct

SEQ ID NO: 679373 - DNA, 15 bp, Homo sapiens
tgtatgtatgtgctg

SEQ ID NO: 679374 - DNA, 15 bp, Homo sapiens
gtatgtatgtgctgc

SEQ ID NO: 679375 - DNA, 15 bp, Homo sapiens
tatgtatgtgctgca

SEQ ID NO: 679376 - DNA, 15 bp, Homo sapiens
atgtatgtgctgcat

SEQ ID NO: 679377 - DNA, 15 bp, Homo sapiens
tgtatgtgctgcata

SEQ ID NO: 679378 - DNA, 15 bp, Homo sapiens
gtatgtgctgcatat

SEQ ID NO: 679379 - DNA, 15 bp, Homo sapiens
tatgtgctgcatata

SEQ ID NO: 679380 - DNA, 15 bp, Homo sapiens
atgtgctgcatatag

SEQ ID NO: 679381 - DNA, 15 bp, Homo sapiens
tgtgctgcatataga

SEQ ID NO: 679382 - DNA, 15 bp, Homo sapiens
gtgctgcatatagag

SEQ ID NO: 679383 - DNA, 15 bp, Homo sapiens
tgctgcatatagagc

SEQ ID NO: 679384 - DNA, 15 bp, Homo sapiens
gctgcatatagagca

SEQ ID NO: 679385 - DNA, 15 bp, Homo sapiens
ctgcatatagagcag

SEQ ID NO: 679386 - DNA, 15 bp, Homo sapiens
tgcatatagagcaga

SEQ ID NO: 679387 - DNA, 15 bp, Homo sapiens
gcatatagagcagat

SEQ ID NO: 679388 - DNA, 15 bp, Homo sapiens
catatagagcagata

SEQ ID NO: 679389 - DNA, 15 bp, Homo sapiens
atatagagcagatat

SEQ ID NO: 679390 - DNA, 15 bp, Homo sapiens
tatagagcagatata

SEQ ID NO: 679391 - DNA, 15 bp, Homo sapiens
atagagcagatatac

SEQ ID NO: 679392 - DNA, 15 bp, Homo sapiens
tagagcagatataca

SEQ ID NO: 679393 - DNA, 15 bp, Homo sapiens
agagcagatatacag

SEQ ID NO: 679394 - DNA, 15 bp, Homo sapiens
gagcagatatacagc

SEQ ID NO: 679395 - DNA, 15 bp, Homo sapiens
agcagatatacagcc

SEQ ID NO: 679396 - DNA, 15 bp, Homo sapiens
gcagatatacagcct

SEQ ID NO: 679397 - DNA, 15 bp, Homo sapiens
cagatatacagccta

SEQ ID NO: 679398 - DNA, 15 bp, Homo sapiens
agatatacagcctat

SEQ ID NO: 679399 - DNA, 15 bp, Homo sapiens
gatatacagcctatt

SEQ ID NO: 679400 - DNA, 15 bp, Homo sapiens
atatacagcctatta

SEQ ID NO: 679401 - DNA, 15 bp, Homo sapiens
tatacagcctattaa

SEQ ID NO: 679402 - DNA, 15 bp, Homo sapiens
atacagcctattaag

SEQ ID NO: 679403 - DNA, 15 bp, Homo sapiens
tacagcctattaagc

SEQ ID NO: 679404 - DNA, 15 bp, Homo sapiens
acagcctattaagcg

SEQ ID NO: 679405 - DNA, 15 bp, Homo sapiens
cagcctattaagcgt

SEQ ID NO: 679406 - DNA, 15 bp, Homo sapiens
agcctattaagcgtc

SEQ ID NO: 679407 - DNA, 15 bp, Homo sapiens
gcctattaagcgtcg

SEQ ID NO: 679408 - DNA, 15 bp, Homo sapiens
cctattaagcgtcgt

SEQ ID NO: 679409 - DNA, 15 bp, Homo sapiens
ctattaagcgtcgtc

SEQ ID NO: 679410 - DNA, 15 bp, Homo sapiens
tattaagcgtcgtca

SEQ ID NO: 679411 - DNA, 15 bp, Homo sapiens
attaagcgtcgtcac

SEQ ID NO: 679412 - DNA, 15 bp, Homo sapiens
ttaagcgtcgtcact

SEQ ID NO: 679413 - DNA, 15 bp, Homo sapiens
taagcgtcgtcacta

SEQ ID NO: 679414 - DNA, 15 bp, Homo sapiens
aagcgtcgtcactaa

SEQ ID NO: 679415 - DNA, 15 bp, Homo sapiens
agcgtcgtcactaaa

SEQ ID NO: 679416 - DNA, 15 bp, Homo sapiens
gcgtcgtcactaaaa

SEQ ID NO: 679417 - DNA, 15 bp, Homo sapiens
cgtcgtcactaaaac

SEQ ID NO: 679418 - DNA, 15 bp, Homo sapiens
gtcgtcactaaaaca

SEQ ID NO: 679419 - DNA, 15 bp, Homo sapiens
tcgtcactaaaacat

SEQ ID NO: 679420 - DNA, 15 bp, Homo sapiens
cgtcactaaaacata

SEQ ID NO: 679421 - DNA, 15 bp, Homo sapiens
gtcactaaaacataa

SEQ ID NO: 679422 - DNA, 15 bp, Homo sapiens
tcactaaaacataaa

SEQ ID NO: 679423 - DNA, 15 bp, Homo sapiens
cactaaaacataaaa

SEQ ID NO: 679424 - DNA, 15 bp, Homo sapiens
actaaaacataaaac

SEQ ID NO: 679425 - DNA, 15 bp, Homo sapiens
ctaaaacataaaaca

SEQ ID NO: 679426 - DNA, 15 bp, Homo sapiens
taaaacataaaacat

SEQ ID NO: 679427 - DNA, 15 bp, Homo sapiens
aaaacataaaacatg

SEQ ID NO: 679428 - DNA, 15 bp, Homo sapiens
aaacataaaacatgt

SEQ ID NO: 679429 - DNA, 15 bp, Homo sapiens
aacataaaacatgtc

SEQ ID NO: 679430 - DNA, 15 bp, Homo sapiens
acataaaacatgtca

SEQ ID NO: 679431 - DNA, 15 bp, Homo sapiens
cataaaacatgtcag

SEQ ID NO: 679432 - DNA, 15 bp, Homo sapiens
ataaaacatgtcagc

SEQ ID NO: 679433 - DNA, 15 bp, Homo sapiens
taaaacatgtcagcc

SEQ ID NO: 679434 - DNA, 15 bp, Homo sapiens
aaaacatgtcagcct

SEQ ID NO: 679435 - DNA, 15 bp, Homo sapiens
aaacatgtcagcctt

SEQ ID NO: 679436 - DNA, 15 bp, Homo sapiens
aacatgtcagccttt

SEQ ID NO: 679437 - DNA, 15 bp, Homo sapiens
acatgtcagcctttc

SEQ ID NO: 679438 - DNA, 15 bp, Homo sapiens
catgtcagcctttct

SEQ ID NO: 679439 - DNA, 15 bp, Homo sapiens
atgtcagcctttctt

SEQ ID NO: 679440 - DNA, 15 bp, Homo sapiens
tgtcagcctttctta

SEQ ID NO: 679441 - DNA, 15 bp, Homo sapiens
gtcagcctttcttaa

SEQ ID NO: 679442 - DNA, 15 bp, Homo sapiens
tcagcctttcttaac

SEQ ID NO: 679443 - DNA, 15 bp, Homo sapiens
cagcctttcttaacc

SEQ ID NO: 679444 - DNA, 15 bp, Homo sapiens
agcctttcttaacct

SEQ ID NO: 679445 - DNA, 15 bp, Homo sapiens
gcctttcttaacctt

SEQ ID NO: 679446 - DNA, 15 bp, Homo sapiens
cctttcttaacctta

SEQ ID NO: 679447 - DNA, 15 bp, Homo sapiens
ctttcttaaccttac

SEQ ID NO: 679448 - DNA, 15 bp, Homo sapiens
tttcttaaccttact

SEQ ID NO: 679449 - DNA, 15 bp, Homo sapiens
ttcttaaccttactc

SEQ ID NO: 679450 - DNA, 15 bp, Homo sapiens
tcttaaccttactcg

SEQ ID NO: 679451 - DNA, 15 bp, Homo sapiens
cttaaccttactcgc

SEQ ID NO: 679452 - DNA, 15 bp, Homo sapiens
ttaaccttactcgcc

SEQ ID NO: 679453 - DNA, 15 bp, Homo sapiens
taaccttactcgccc

SEQ ID NO: 679454 - DNA, 15 bp, Homo sapiens
aaccttactcgcccc

SEQ ID NO: 679455 - DNA, 15 bp, Homo sapiens
accttactcgcccca

SEQ ID NO: 679456 - DNA, 15 bp, Homo sapiens
ccttactcgccccag

SEQ ID NO: 679457 - DNA, 15 bp, Homo sapiens
cttactcgccccagt

SEQ ID NO: 679458 - DNA, 15 bp, Homo sapiens
ttactcgccccagtc

SEQ ID NO: 679459 - DNA, 15 bp, Homo sapiens
tactcgccccagtct

SEQ ID NO: 679460 - DNA, 15 bp, Homo sapiens
actcgccccagtctg

SEQ ID NO: 679461 - DNA, 15 bp, Homo sapiens
ctcgccccagtctgt

SEQ ID NO: 679462 - DNA, 15 bp, Homo sapiens
tcgccccagtctgtc

SEQ ID NO: 679463 - DNA, 15 bp, Homo sapiens
cgccccagtctgtcc

SEQ ID NO: 679464 - DNA, 15 bp, Homo sapiens
gccccagtctgtccc

SEQ ID NO: 679465 - DNA, 15 bp, Homo sapiens
ccccagtctgtcccg

SEQ ID NO: 679466 - DNA, 15 bp, Homo sapiens
cccagtctgtcccga

SEQ ID NO: 679467 - DNA, 15 bp, Homo sapiens
ccagtctgtcccgac

SEQ ID NO: 679468 - DNA, 15 bp, Homo sapiens
cagtctgtcccgacg

SEQ ID NO: 679469 - DNA, 15 bp, Homo sapiens
agtctgtcccgacgt

SEQ ID NO: 679470 - DNA, 15 bp, Homo sapiens
gtctgtcccgacgtg

SEQ ID NO: 679471 - DNA, 15 bp, Homo sapiens
tctgtcccgacgtga

SEQ ID NO: 679472 - DNA, 15 bp, Homo sapiens
ctgtcccgacgtgac

SEQ ID NO: 679473 - DNA, 15 bp, Homo sapiens
tgtcccgacgtgact

SEQ ID NO: 679474 - DNA, 15 bp, Homo sapiens
gtcccgacgtgactt

SEQ ID NO: 679475 - DNA, 15 bp, Homo sapiens
tcccgacgtgacttc

SEQ ID NO: 679476 - DNA, 15 bp, Homo sapiens
cccgacgtgacttcc

SEQ ID NO: 679477 - DNA, 15 bp, Homo sapiens
ccgacgtgacttcct

SEQ ID NO: 679478 - DNA, 15 bp, Homo sapiens
cgacgtgacttcctc

SEQ ID NO: 679479 - DNA, 15 bp, Homo sapiens
gacgtgacttcctcg

SEQ ID NO: 679480 - DNA, 15 bp, Homo sapiens
acgtgacttcctcga

SEQ ID NO: 679481 - DNA, 15 bp, Homo sapiens
cgtgacttcctcgac

SEQ ID NO: 679482 - DNA, 15 bp, Homo sapiens
gtgacttcctcgacc

SEQ ID NO: 679483 - DNA, 15 bp, Homo sapiens
tgacttcctcgaccc

SEQ ID NO: 679484 - DNA, 15 bp, Homo sapiens
gacttcctcgaccct

SEQ ID NO: 679485 - DNA, 15 bp, Homo sapiens
acttcctcgaccctc

SEQ ID NO: 679486 - DNA, 15 bp, Homo sapiens
cttcctcgaccctct

SEQ ID NO: 679487 - DNA, 15 bp, Homo sapiens
ttcctcgaccctcta

SEQ ID NO: 679488 - DNA, 15 bp, Homo sapiens
tcctcgaccctctaa

SEQ ID NO: 679489 - DNA, 15 bp, Homo sapiens
cctcgaccctctaaa

SEQ ID NO: 679490 - DNA, 15 bp, Homo sapiens
ctcgaccctctaaag

SEQ ID NO: 679491 - DNA, 15 bp, Homo sapiens
tcgaccctctaaaga

SEQ ID NO: 679492 - DNA, 15 bp, Homo sapiens
cgaccctctaaagac

SEQ ID NO: 679493 - DNA, 15 bp, Homo sapiens
gaccctctaaagacg

SEQ ID NO: 679494 - DNA, 15 bp, Homo sapiens
accctctaaagacgt

SEQ ID NO: 679495 - DNA, 15 bp, Homo sapiens
ccctctaaagacgta

SEQ ID NO: 679496 - DNA, 15 bp, Homo sapiens
cctctaaagacgtac

SEQ ID NO: 679497 - DNA, 15 bp, Homo sapiens
ctctaaagacgtaca

SEQ ID NO: 679498 - DNA, 15 bp, Homo sapiens
tctaaagacgtacag

SEQ ID NO: 679499 - DNA, 15 bp, Homo sapiens
ctaaagacgtacaga

SEQ ID NO: 679500 - DNA, 15 bp, Homo sapiens
taaagacgtacagac

SEQ ID NO: 679501 - DNA, 15 bp, Homo sapiens
aaagacgtacagacc

SEQ ID NO: 679502 - DNA, 15 bp, Homo sapiens
aagacgtacagacca

SEQ ID NO: 679503 - DNA, 15 bp, Homo sapiens
agacgtacagaccag

SEQ ID NO: 679504 - DNA, 15 bp, Homo sapiens
gacgtacagaccaga

SEQ ID NO: 679505 - DNA, 15 bp, Homo sapiens
acgtacagaccagac

SEQ ID NO: 679506 - DNA, 15 bp, Homo sapiens
cgtacagaccagaca

SEQ ID NO: 679507 - DNA, 15 bp, Homo sapiens
gtacagaccagacac

SEQ ID NO: 679508 - DNA, 15 bp, Homo sapiens
tacagaccagacacg

SEQ ID NO: 679509 - DNA, 15 bp, Homo sapiens
acagaccagacacgg

SEQ ID NO: 679510 - DNA, 15 bp, Homo sapiens
cagaccagacacggc

SEQ ID NO: 679511 - DNA, 15 bp, Homo sapiens
agaccagacacggcg

SEQ ID NO: 679512 - DNA, 15 bp, Homo sapiens
gaccagacacggcgg

SEQ ID NO: 679513 - DNA, 15 bp, Homo sapiens
accagacacggcggc

SEQ ID NO: 679514 - DNA, 15 bp, Homo sapiens
ccagacacggcggcg

SEQ ID NO: 679515 - DNA, 15 bp, Homo sapiens
cagacacggcggcgg

SEQ ID NO: 679516 - DNA, 15 bp, Homo sapiens
agacacggcggcggc

SEQ ID NO: 679517 - DNA, 15 bp, Homo sapiens
gacacggcggcggcg

SEQ ID NO: 679518 - DNA, 15 bp, Homo sapiens
acacggcggcggcgg

SEQ ID NO: 679519 - DNA, 15 bp, Homo sapiens
cacggcggcggcggc

SEQ ID NO: 679520 - DNA, 15 bp, Homo sapiens
acggcggcggcggcg

SEQ ID NO: 679521 - DNA, 15 bp, Homo sapiens
cggcggcggcggcgg

SEQ ID NO: 679522 - DNA, 15 bp, Homo sapiens
ggcggcggcggcggg

SEQ ID NO: 679523 - DNA, 15 bp, Homo sapiens
gcggcggcggcggga

SEQ ID NO: 679524 - DNA, 15 bp, Homo sapiens
cggcggcggcgggag

SEQ ID NO: 679525 - DNA, 15 bp, Homo sapiens
ggcggcggcgggaga

SEQ ID NO: 679526 - DNA, 15 bp, Homo sapiens
gcggcggcgggagag

SEQ ID NO: 679527 - DNA, 15 bp, Homo sapiens
cggcggcgggagagg

SEQ ID NO: 679528 - DNA, 15 bp, Homo sapiens
ggcggcgggagaggg

SEQ ID NO: 679529 - DNA, 15 bp, Homo sapiens
gcggcgggagagggg

SEQ ID NO: 679530 - DNA, 15 bp, Homo sapiens
cggcgggagagggga

SEQ ID NO: 679531 - DNA, 15 bp, Homo sapiens
ggcgggagaggggat

SEQ ID NO: 679532 - DNA, 15 bp, Homo sapiens
gcgggagaggggatt

SEQ ID NO: 679533 - DNA, 15 bp, Homo sapiens
cgggagaggggattc

SEQ ID NO: 679534 - DNA, 15 bp, Homo sapiens
gggagaggggattcc

SEQ ID NO: 679535 - DNA, 15 bp, Homo sapiens
ggagaggggattccc

SEQ ID NO: 679536 - DNA, 15 bp, Homo sapiens
gagaggggattccct

SEQ ID NO: 679537 - DNA, 15 bp, Homo sapiens
agaggggattccctg

SEQ ID NO: 679538 - DNA, 15 bp, Homo sapiens
gaggggattccctgc

SEQ ID NO: 679539 - DNA, 15 bp, Homo sapiens
aggggattccctgcg

SEQ ID NO: 679540 - DNA, 15 bp, Homo sapiens
ggggattccctgcgc

SEQ ID NO: 679541 - DNA, 15 bp, Homo sapiens
gggattccctgcgcc

SEQ ID NO: 679542 - DNA, 15 bp, Homo sapiens
ggattccctgcgccc

SEQ ID NO: 679543 - DNA, 15 bp, Homo sapiens
gattccctgcgcccc

SEQ ID NO: 679544 - DNA, 15 bp, Homo sapiens
attccctgcgccccc

SEQ ID NO: 679545 - DNA, 15 bp, Homo sapiens
ttccctgcgcccccg

SEQ ID NO: 679546 - DNA, 15 bp, Homo sapiens
tccctgcgcccccgg

SEQ ID NO: 679547 - DNA, 15 bp, Homo sapiens
ccctgcgcccccgga

SEQ ID NO: 679548 - DNA, 15 bp, Homo sapiens
cctgcgcccccggac

SEQ ID NO: 679549 - DNA, 15 bp, Homo sapiens
ctgcgcccccggacc

SEQ ID NO: 679550 - DNA, 15 bp, Homo sapiens
tgcgcccccggacct

SEQ ID NO: 679551 - DNA, 15 bp, Homo sapiens
gcgcccccggacctc

SEQ ID NO: 679552 - DNA, 15 bp, Homo sapiens
cgcccccggacctca

SEQ ID NO: 679553 - DNA, 15 bp, Homo sapiens
gcccccggacctcag

SEQ ID NO: 679554 - DNA, 15 bp, Homo sapiens
cccccggacctcagg

SEQ ID NO: 679555 - DNA, 15 bp, Homo sapiens
ccccggacctcaggg

SEQ ID NO: 679556 - DNA, 15 bp, Homo sapiens
cccggacctcagggc

SEQ ID NO: 679557 - DNA, 15 bp, Homo sapiens
ccggacctcagggcc

SEQ ID NO: 679558 - DNA, 15 bp, Homo sapiens
cggacctcagggccg

SEQ ID NO: 679559 - DNA, 15 bp, Homo sapiens
ggacctcagggccgc

SEQ ID NO: 679560 - DNA, 15 bp, Homo sapiens
gacctcagggccgct

SEQ ID NO: 679561 - DNA, 15 bp, Homo sapiens
acctcagggccgctc

SEQ ID NO: 679562 - DNA, 15 bp, Homo sapiens
cctcagggccgctca

SEQ ID NO: 679563 - DNA, 15 bp, Homo sapiens
ctcagggccgctcag

SEQ ID NO: 679564 - DNA, 15 bp, Homo sapiens
tcagggccgctcaga

SEQ ID NO: 679565 - DNA, 15 bp, Homo sapiens
cagggccgctcagat

SEQ ID NO: 679566 - DNA, 15 bp, Homo sapiens
agggccgctcagatt

SEQ ID NO: 679567 - DNA, 15 bp, Homo sapiens
gggccgctcagattc

SEQ ID NO: 679568 - DNA, 15 bp, Homo sapiens
ggccgctcagattcc

SEQ ID NO: 679569 - DNA, 15 bp, Homo sapiens
gccgctcagattcct

SEQ ID NO: 679570 - DNA, 15 bp, Homo sapiens
ccgctcagattcctg

SEQ ID NO: 679571 - DNA, 15 bp, Homo sapiens
cgctcagattcctgg

SEQ ID NO: 679572 - DNA, 15 bp, Homo sapiens
gctcagattcctgga

SEQ ID NO: 679573 - DNA, 15 bp, Homo sapiens
ctcagattcctggag

SEQ ID NO: 679574 - DNA, 15 bp, Homo sapiens
tcagattcctggaga

SEQ ID NO: 679575 - DNA, 15 bp, Homo sapiens
cagattcctggagag

SEQ ID NO: 679576 - DNA, 15 bp, Homo sapiens
agattcctggagagg

SEQ ID NO: 679577 - DNA, 15 bp, Homo sapiens
gattcctggagagga

SEQ ID NO: 679578 - DNA, 15 bp, Homo sapiens
attcctggagaggaa

SEQ ID NO: 679579 - DNA, 15 bp, Homo sapiens
ttcctggagaggaag

SEQ ID NO: 679580 - DNA, 15 bp, Homo sapiens
tcctggagaggaagc

SEQ ID NO: 679581 - DNA, 15 bp, Homo sapiens
cctggagaggaagcc

SEQ ID NO: 679582 - DNA, 15 bp, Homo sapiens
ctggagaggaagcca

SEQ ID NO: 679583 - DNA, 15 bp, Homo sapiens
tggagaggaagccaa

SEQ ID NO: 679584 - DNA, 15 bp, Homo sapiens
ggagaggaagccaag

SEQ ID NO: 679585 - DNA, 15 bp, Homo sapiens
gagaggaagccaagt

SEQ ID NO: 679586 - DNA, 15 bp, Homo sapiens
agaggaagccaagtg

SEQ ID NO: 679587 - DNA, 15 bp, Homo sapiens
gaggaagccaagtgt

SEQ ID NO: 679588 - DNA, 15 bp, Homo sapiens
aggaagccaagtgtc

SEQ ID NO: 679589 - DNA, 15 bp, Homo sapiens
ggaagccaagtgtcc

SEQ ID NO: 679590 - DNA, 15 bp, Homo sapiens
gaagccaagtgtcct

SEQ ID NO: 679591 - DNA, 15 bp, Homo sapiens
aagccaagtgtcctt

SEQ ID NO: 679592 - DNA, 15 bp, Homo sapiens
agccaagtgtccttc

SEQ ID NO: 679593 - DNA, 15 bp, Homo sapiens
gccaagtgtccttct

SEQ ID NO: 679594 - DNA, 15 bp, Homo sapiens
ccaagtgtccttctg

SEQ ID NO: 679595 - DNA, 15 bp, Homo sapiens
caagtgtccttctgc

SEQ ID NO: 679596 - DNA, 15 bp, Homo sapiens
aagtgtccttctgcc

SEQ ID NO: 679597 - DNA, 15 bp, Homo sapiens
agtgtccttctgccc

SEQ ID NO: 679598 - DNA, 15 bp, Homo sapiens
gtgtccttctgccct

SEQ ID NO: 679599 - DNA, 15 bp, Homo sapiens
tgtccttctgccctc

SEQ ID NO: 679600 - DNA, 15 bp, Homo sapiens
gtccttctgccctcc

SEQ ID NO: 679601 - DNA, 15 bp, Homo sapiens
tccttctgccctccc

SEQ ID NO: 679602 - DNA, 15 bp, Homo sapiens
ccttctgccctcccc

SEQ ID NO: 679603 - DNA, 15 bp, Homo sapiens
cttctgccctccccc

SEQ ID NO: 679604 - DNA, 15 bp, Homo sapiens
ttctgccctcccccg

SEQ ID NO: 679605 - DNA, 15 bp, Homo sapiens
tctgccctcccccgg

SEQ ID NO: 679606 - DNA, 15 bp, Homo sapiens
ctgccctcccccggt

SEQ ID NO: 679607 - DNA, 15 bp, Homo sapiens
tgccctcccccggta

SEQ ID NO: 679608 - DNA, 15 bp, Homo sapiens
gccctcccccggtat

SEQ ID NO: 679609 - DNA, 15 bp, Homo sapiens
ccctcccccggtatc

SEQ ID NO: 679610 - DNA, 15 bp, Homo sapiens
cctcccccggtatcc

SEQ ID NO: 679611 - DNA, 15 bp, Homo sapiens
ctcccccggtatccc

SEQ ID NO: 679612 - DNA, 15 bp, Homo sapiens
tcccccggtatccca

SEQ ID NO: 679613 - DNA, 15 bp, Homo sapiens
cccccggtatcccat

SEQ ID NO: 679614 - DNA, 15 bp, Homo sapiens
ccccggtatcccatc

SEQ ID NO: 679615 - DNA, 15 bp, Homo sapiens
cccggtatcccatcc

SEQ ID NO: 679616 - DNA, 15 bp, Homo sapiens
ccggtatcccatcca

SEQ ID NO: 679617 - DNA, 15 bp, Homo sapiens
cggtatcccatccaa

SEQ ID NO: 679618 - DNA, 15 bp, Homo sapiens
ggtatcccatccaag

SEQ ID NO: 679619 - DNA, 15 bp, Homo sapiens
gtatcccatccaagg

SEQ ID NO: 679620 - DNA, 15 bp, Homo sapiens
tatcccatccaaggc

SEQ ID NO: 679621 - DNA, 15 bp, Homo sapiens
atcccatccaaggcg

SEQ ID NO: 679622 - DNA, 15 bp, Homo sapiens
tcccatccaaggcga

SEQ ID NO: 679623 - DNA, 15 bp, Homo sapiens
cccatccaaggcgat

SEQ ID NO: 679624 - DNA, 15 bp, Homo sapiens
ccatccaaggcgatc

SEQ ID NO: 679625 - DNA, 15 bp, Homo sapiens
catccaaggcgatca

SEQ ID NO: 679626 - DNA, 15 bp, Homo sapiens
atccaaggcgatcag

SEQ ID NO: 679627 - DNA, 15 bp, Homo sapiens
tccaaggcgatcagt

SEQ ID NO: 679628 - DNA, 15 bp, Homo sapiens
ccaaggcgatcagtc

SEQ ID NO: 679629 - DNA, 15 bp, Homo sapiens
caaggcgatcagtcc

SEQ ID NO: 679630 - DNA, 15 bp, Homo sapiens
aaggcgatcagtcca

SEQ ID NO: 679631 - DNA, 15 bp, Homo sapiens
aggcgatcagtccag

SEQ ID NO: 679632 - DNA, 15 bp, Homo sapiens
ggcgatcagtccaga

SEQ ID NO: 679633 - DNA, 15 bp, Homo sapiens
gcgatcagtccagaa

SEQ ID NO: 679634 - DNA, 15 bp, Homo sapiens
cgatcagtccagaac

SEQ ID NO: 679635 - DNA, 15 bp, Homo sapiens
gatcagtccagaact

SEQ ID NO: 679636 - DNA, 15 bp, Homo sapiens
atcagtccagaactg

SEQ ID NO: 679637 - DNA, 15 bp, Homo sapiens
tcagtccagaactgg

SEQ ID NO: 679638 - DNA, 15 bp, Homo sapiens
cagtccagaactggc

SEQ ID NO: 679639 - DNA, 15 bp, Homo sapiens
agtccagaactggct

SEQ ID NO: 679640 - DNA, 15 bp, Homo sapiens
gtccagaactggctc

SEQ ID NO: 679641 - DNA, 15 bp, Homo sapiens
tccagaactggctct

SEQ ID NO: 679642 - DNA, 15 bp, Homo sapiens
ccagaactggctctc

SEQ ID NO: 679643 - DNA, 15 bp, Homo sapiens
cagaactggctctcg

SEQ ID NO: 679644 - DNA, 15 bp, Homo sapiens
agaactggctctcgg

SEQ ID NO: 679645 - DNA, 15 bp, Homo sapiens
gaactggctctcgga

SEQ ID NO: 679646 - DNA, 15 bp, Homo sapiens
aactggctctcggaa

SEQ ID NO: 679647 - DNA, 15 bp, Homo sapiens
actggctctcggaag

SEQ ID NO: 679648 - DNA, 15 bp, Homo sapiens
ctggctctcggaagc

SEQ ID NO: 679649 - DNA, 15 bp, Homo sapiens
tggctctcggaagcg

SEQ ID NO: 679650 - DNA, 15 bp, Homo sapiens
ggctctcggaagcgc

SEQ ID NO: 679651 - DNA, 15 bp, Homo sapiens
gctctcggaagcgct

SEQ ID NO: 679652 - DNA, 15 bp, Homo sapiens
ctctcggaagcgctc

SEQ ID NO: 679653 - DNA, 15 bp, Homo sapiens
tctcggaagcgctcg

SEQ ID NO: 679654 - DNA, 15 bp, Homo sapiens
ctcggaagcgctcgg

SEQ ID NO: 679655 - DNA, 15 bp, Homo sapiens
tcggaagcgctcggg

SEQ ID NO: 679656 - DNA, 15 bp, Homo sapiens
cggaagcgctcgggc

SEQ ID NO: 679657 - DNA, 15 bp, Homo sapiens
ggaagcgctcgggca

SEQ ID NO: 679658 - DNA, 15 bp, Homo sapiens
gaagcgctcgggcaa

SEQ ID NO: 679659 - DNA, 15 bp, Homo sapiens
aagcgctcgggcaaa

SEQ ID NO: 679660 - DNA, 15 bp, Homo sapiens
agcgctcgggcaaag

SEQ ID NO: 679661 - DNA, 15 bp, Homo sapiens
gcgctcgggcaaaga

SEQ ID NO: 679662 - DNA, 15 bp, Homo sapiens
cgctcgggcaaagac

SEQ ID NO: 679663 - DNA, 15 bp, Homo sapiens
gctcgggcaaagact

SEQ ID NO: 679664 - DNA, 15 bp, Homo sapiens
ctcgggcaaagactg

SEQ ID NO: 679665 - DNA, 15 bp, Homo sapiens
tcgggcaaagactgc

SEQ ID NO: 679666 - DNA, 15 bp, Homo sapiens
cgggcaaagactgcg

SEQ ID NO: 679667 - DNA, 15 bp, Homo sapiens
gggcaaagactgcga

SEQ ID NO: 679668 - DNA, 15 bp, Homo sapiens
ggcaaagactgcgaa

SEQ ID NO: 679669 - DNA, 15 bp, Homo sapiens
gcaaagactgcgaag

SEQ ID NO: 679670 - DNA, 15 bp, Homo sapiens
caaagactgcgaaga

SEQ ID NO: 679671 - DNA, 15 bp, Homo sapiens
aaagactgcgaagaa

SEQ ID NO: 679672 - DNA, 15 bp, Homo sapiens
aagactgcgaagaag

SEQ ID NO: 679673 - DNA, 15 bp, Homo sapiens
agactgcgaagaaga

SEQ ID NO: 679674 - DNA, 15 bp, Homo sapiens
gactgcgaagaagaa

SEQ ID NO: 679675 - DNA, 15 bp, Homo sapiens
actgcgaagaagaaa

SEQ ID NO: 679676 - DNA, 15 bp, Homo sapiens
ctgcgaagaagaaaa

SEQ ID NO: 679677 - DNA, 15 bp, Homo sapiens
tgcgaagaagaaaag

SEQ ID NO: 679678 - DNA, 15 bp, Homo sapiens
gcgaagaagaaaaga

SEQ ID NO: 679679 - DNA, 15 bp, Homo sapiens
cgaagaagaaaagac

SEQ ID NO: 679680 - DNA, 15 bp, Homo sapiens
gaagaagaaaagaca

SEQ ID NO: 679681 - DNA, 15 bp, Homo sapiens
aagaagaaaagacat

SEQ ID NO: 679682 - DNA, 15 bp, Homo sapiens
agaagaaaagacatc

SEQ ID NO: 679683 - DNA, 15 bp, Homo sapiens
gaagaaaagacatct

SEQ ID NO: 679684 - DNA, 15 bp, Homo sapiens
aagaaaagacatctg

SEQ ID NO: 679685 - DNA, 15 bp, Homo sapiens
agaaaagacatctgg

SEQ ID NO: 679686 - DNA, 15 bp, Homo sapiens
gaaaagacatctggc

SEQ ID NO: 679687 - DNA, 15 bp, Homo sapiens
aaaagacatctggcg

SEQ ID NO: 679688 - DNA, 15 bp, Homo sapiens
aaagacatctggcgg

SEQ ID NO: 679689 - DNA, 15 bp, Homo sapiens
aagacatctggcgga

SEQ ID NO: 679690 - DNA, 15 bp, Homo sapiens
agacatctggcggaa

SEQ ID NO: 679691 - DNA, 15 bp, Homo sapiens
gacatctggcggaaa

SEQ ID NO: 679692 - DNA, 15 bp, Homo sapiens
acatctggcggaaac

SEQ ID NO: 679693 - DNA, 15 bp, Homo sapiens
catctggcggaaacc

SEQ ID NO: 679694 - DNA, 15 bp, Homo sapiens
atctggcggaaacct

SEQ ID NO: 679695 - DNA, 15 bp, Homo sapiens
tctggcggaaacctg

SEQ ID NO: 679696 - DNA, 15 bp, Homo sapiens
ctggcggaaacctgt

SEQ ID NO: 679697 - DNA, 15 bp, Homo sapiens
tggcggaaacctgtg

SEQ ID NO: 679698 - DNA, 15 bp, Homo sapiens
ggcggaaacctgtgc

SEQ ID NO: 679699 - DNA, 15 bp, Homo sapiens
gcggaaacctgtgcg

SEQ ID NO: 679700 - DNA, 15 bp, Homo sapiens
cggaaacctgtgcgc

SEQ ID NO: 679701 - DNA, 15 bp, Homo sapiens
ggaaacctgtgcgcc

SEQ ID NO: 679702 - DNA, 15 bp, Homo sapiens
gaaacctgtgcgcct

SEQ ID NO: 679703 - DNA, 15 bp, Homo sapiens
aaacctgtgcgcctg

SEQ ID NO: 679704 - DNA, 15 bp, Homo sapiens
aacctgtgcgcctgg

SEQ ID NO: 679705 - DNA, 15 bp, Homo sapiens
acctgtgcgcctggg

SEQ ID NO: 679706 - DNA, 15 bp, Homo sapiens
cctgtgcgcctgggg

SEQ ID NO: 679707 - DNA, 15 bp, Homo sapiens
ctgtgcgcctggggc

SEQ ID NO: 679708 - DNA, 15 bp, Homo sapiens
tgtgcgcctggggcg

SEQ ID NO: 679709 - DNA, 15 bp, Homo sapiens
gtgcgcctggggcgg

SEQ ID NO: 679710 - DNA, 15 bp, Homo sapiens
tgcgcctggggcggt

SEQ ID NO: 679711 - DNA, 15 bp, Homo sapiens
gcgcctggggcggtg

SEQ ID NO: 679712 - DNA, 15 bp, Homo sapiens
cgcctggggcggtgg

SEQ ID NO: 679713 - DNA, 15 bp, Homo sapiens
gcctggggcggtgga

SEQ ID NO: 679714 - DNA, 15 bp, Homo sapiens
cctggggcggtggaa

SEQ ID NO: 679715 - DNA, 15 bp, Homo sapiens
ctggggcggtggaac

SEQ ID NO: 679716 - DNA, 15 bp, Homo sapiens
tggggcggtggaact

SEQ ID NO: 679717 - DNA, 15 bp, Homo sapiens
ggggcggtggaactc

SEQ ID NO: 679718 - DNA, 15 bp, Homo sapiens
gggcggtggaactcg

SEQ ID NO: 679719 - DNA, 15 bp, Homo sapiens
ggcggtggaactcgg

SEQ ID NO: 679720 - DNA, 15 bp, Homo sapiens
gcggtggaactcggg

SEQ ID NO: 679721 - DNA, 15 bp, Homo sapiens
cggtggaactcgggg

SEQ ID NO: 679722 - DNA, 15 bp, Homo sapiens
ggtggaactcgggga

SEQ ID NO: 679723 - DNA, 15 bp, Homo sapiens
gtggaactcggggag

SEQ ID NO: 679724 - DNA, 15 bp, Homo sapiens
tggaactcggggagg

SEQ ID NO: 679725 - DNA, 15 bp, Homo sapiens
ggaactcggggagga

SEQ ID NO: 679726 - DNA, 15 bp, Homo sapiens
gaactcggggaggag

SEQ ID NO: 679727 - DNA, 15 bp, Homo sapiens
aactcggggaggaga

SEQ ID NO: 679728 - DNA, 15 bp, Homo sapiens
actcggggaggagag

SEQ ID NO: 679729 - DNA, 15 bp, Homo sapiens
ctcggggaggagagg

SEQ ID NO: 679730 - DNA, 15 bp, Homo sapiens
tcggggaggagaggg

SEQ ID NO: 679731 - DNA, 15 bp, Homo sapiens
cggggaggagaggga

SEQ ID NO: 679732 - DNA, 15 bp, Homo sapiens
ggggaggagagggag

SEQ ID NO: 679733 - DNA, 15 bp, Homo sapiens
gggaggagagggagg

SEQ ID NO: 679734 - DNA, 15 bp, Homo sapiens
ggaggagagggaggg

SEQ ID NO: 679735 - DNA, 15 bp, Homo sapiens
gaggagagggaggga

SEQ ID NO: 679736 - DNA, 15 bp, Homo sapiens
aggagagggagggat

SEQ ID NO: 679737 - DNA, 15 bp, Homo sapiens
ggagagggagggatc

SEQ ID NO: 679738 - DNA, 15 bp, Homo sapiens
gagagggagggatca

SEQ ID NO: 679739 - DNA, 15 bp, Homo sapiens
agagggagggatcag

SEQ ID NO: 679740 - DNA, 15 bp, Homo sapiens
gagggagggatcaga

SEQ ID NO: 679741 - DNA, 15 bp, Homo sapiens
agggagggatcagac

SEQ ID NO: 679742 - DNA, 15 bp, Homo sapiens
gggagggatcagaca

SEQ ID NO: 679743 - DNA, 15 bp, Homo sapiens
ggagggatcagacag

SEQ ID NO: 679744 - DNA, 15 bp, Homo sapiens
gagggatcagacagg

SEQ ID NO: 679745 - DNA, 15 bp, Homo sapiens
agggatcagacagga

SEQ ID NO: 679746 - DNA, 15 bp, Homo sapiens
gggatcagacaggag

SEQ ID NO: 679747 - DNA, 15 bp, Homo sapiens
ggatcagacaggaga

SEQ ID NO: 679748 - DNA, 15 bp, Homo sapiens
gatcagacaggagag

SEQ ID NO: 679749 - DNA, 15 bp, Homo sapiens
atcagacaggagagt

SEQ ID NO: 679750 - DNA, 15 bp, Homo sapiens
tcagacaggagagtg

SEQ ID NO: 679751 - DNA, 15 bp, Homo sapiens
cagacaggagagtgg

SEQ ID NO: 679752 - DNA, 15 bp, Homo sapiens
agacaggagagtggg

SEQ ID NO: 679753 - DNA, 15 bp, Homo sapiens
gacaggagagtgggg

SEQ ID NO: 679754 - DNA, 15 bp, Homo sapiens
acaggagagtgggga

SEQ ID NO: 679755 - DNA, 15 bp, Homo sapiens
caggagagtggggac

SEQ ID NO: 679756 - DNA, 15 bp, Homo sapiens
aggagagtggggact

SEQ ID NO: 679757 - DNA, 15 bp, Homo sapiens
ggagagtggggacta

SEQ ID NO: 679758 - DNA, 15 bp, Homo sapiens
gagagtggggactac

SEQ ID NO: 679759 - DNA, 15 bp, Homo sapiens
agagtggggactacc

SEQ ID NO: 679760 - DNA, 15 bp, Homo sapiens
gagtggggactaccc

SEQ ID NO: 679761 - DNA, 15 bp, Homo sapiens
agtggggactacccc

SEQ ID NO: 679762 - DNA, 15 bp, Homo sapiens
gtggggactaccccc

SEQ ID NO: 679763 - DNA, 15 bp, Homo sapiens
tggggactaccccct

SEQ ID NO: 679764 - DNA, 15 bp, Homo sapiens
ggggactaccccctc

SEQ ID NO: 679765 - DNA, 15 bp, Homo sapiens
gggactaccccctct

SEQ ID NO: 679766 - DNA, 15 bp, Homo sapiens
ggactaccccctctg

SEQ ID NO: 679767 - DNA, 15 bp, Homo sapiens
gactaccccctctgc

SEQ ID NO: 679768 - DNA, 15 bp, Homo sapiens
actaccccctctgct

SEQ ID NO: 679769 - DNA, 15 bp, Homo sapiens
ctaccccctctgctc

SEQ ID NO: 679770 - DNA, 15 bp, Homo sapiens
taccccctctgctcc

SEQ ID NO: 679771 - DNA, 15 bp, Homo sapiens
accccctctgctccc

SEQ ID NO: 679772 - DNA, 15 bp, Homo sapiens
ccccctctgctccca

SEQ ID NO: 679773 - DNA, 15 bp, Homo sapiens
cccctctgctcccaa

SEQ ID NO: 679774 - DNA, 15 bp, Homo sapiens
ccctctgctcccaaa

SEQ ID NO: 679775 - DNA, 15 bp, Homo sapiens
cctctgctcccaaat

SEQ ID NO: 679776 - DNA, 15 bp, Homo sapiens
ctctgctcccaaatt

SEQ ID NO: 679777 - DNA, 15 bp, Homo sapiens
tctgctcccaaattg

SEQ ID NO: 679778 - DNA, 15 bp, Homo sapiens
ctgctcccaaattgg

SEQ ID NO: 679779 - DNA, 15 bp, Homo sapiens
tgctcccaaattggg

SEQ ID NO: 679780 - DNA, 15 bp, Homo sapiens
gctcccaaattgggg

SEQ ID NO: 679781 - DNA, 15 bp, Homo sapiens
ctcccaaattggggc

SEQ ID NO: 679782 - DNA, 15 bp, Homo sapiens
tcccaaattggggca

SEQ ID NO: 679783 - DNA, 15 bp, Homo sapiens
cccaaattggggcag

SEQ ID NO: 679784 - DNA, 15 bp, Homo sapiens
ccaaattggggcagc

SEQ ID NO: 679785 - DNA, 15 bp, Homo sapiens
caaattggggcagct

SEQ ID NO: 679786 - DNA, 15 bp, Homo sapiens
aaattggggcagctt

SEQ ID NO: 679787 - DNA, 15 bp, Homo sapiens
aattggggcagcttc

SEQ ID NO: 679788 - DNA, 15 bp, Homo sapiens
attggggcagcttcc

SEQ ID NO: 679789 - DNA, 15 bp, Homo sapiens
ttggggcagcttcct

SEQ ID NO: 679790 - DNA, 15 bp, Homo sapiens
tggggcagcttcctg

SEQ ID NO: 679791 - DNA, 15 bp, Homo sapiens
ggggcagcttcctgg

SEQ ID NO: 679792 - DNA, 15 bp, Homo sapiens
gggcagcttcctggg

SEQ ID NO: 679793 - DNA, 15 bp, Homo sapiens
ggcagcttcctgggt

SEQ ID NO: 679794 - DNA, 15 bp, Homo sapiens
gcagcttcctgggtt

SEQ ID NO: 679795 - DNA, 15 bp, Homo sapiens
cagcttcctgggttt

SEQ ID NO: 679796 - DNA, 15 bp, Homo sapiens
agcttcctgggtttc

SEQ ID NO: 679797 - DNA, 15 bp, Homo sapiens
gcttcctgggtttcc

SEQ ID NO: 679798 - DNA, 15 bp, Homo sapiens
cttcctgggtttccg

SEQ ID NO: 679799 - DNA, 15 bp, Homo sapiens
ttcctgggtttccga

SEQ ID NO: 679800 - DNA, 15 bp, Homo sapiens
tcctgggtttccgat

SEQ ID NO: 679801 - DNA, 15 bp, Homo sapiens
cctgggtttccgatt

SEQ ID NO: 679802 - DNA, 15 bp, Homo sapiens
ctgggtttccgattt

SEQ ID NO: 679803 - DNA, 15 bp, Homo sapiens
tgggtttccgatttt

SEQ ID NO: 679804 - DNA, 15 bp, Homo sapiens
gggtttccgattttc

SEQ ID NO: 679805 - DNA, 15 bp, Homo sapiens
ggtttccgattttct

SEQ ID NO: 679806 - DNA, 15 bp, Homo sapiens
gtttccgattttctc

SEQ ID NO: 679807 - DNA, 15 bp, Homo sapiens
tttccgattttctca

SEQ ID NO: 679808 - DNA, 15 bp, Homo sapiens
ttccgattttctcat

SEQ ID NO: 679809 - DNA, 15 bp, Homo sapiens
tccgattttctcatt

SEQ ID NO: 679810 - DNA, 15 bp, Homo sapiens
ccgattttctcattt

SEQ ID NO: 679811 - DNA, 15 bp, Homo sapiens
cgattttctcatttc

SEQ ID NO: 679812 - DNA, 15 bp, Homo sapiens
gattttctcatttcc

SEQ ID NO: 679813 - DNA, 15 bp, Homo sapiens
attttctcatttccg

SEQ ID NO: 679814 - DNA, 15 bp, Homo sapiens
ttttctcatttccgt

SEQ ID NO: 679815 - DNA, 15 bp, Homo sapiens
tttctcatttccgtg

SEQ ID NO: 679816 - DNA, 15 bp, Homo sapiens
ttctcatttccgtgg

SEQ ID NO: 679817 - DNA, 15 bp, Homo sapiens
tctcatttccgtggg

SEQ ID NO: 679818 - DNA, 15 bp, Homo sapiens
ctcatttccgtgggt

SEQ ID NO: 679819 - DNA, 15 bp, Homo sapiens
tcatttccgtgggta

SEQ ID NO: 679820 - DNA, 15 bp, Homo sapiens
catttccgtgggtaa

SEQ ID NO: 679821 - DNA, 15 bp, Homo sapiens
atttccgtgggtaaa

SEQ ID NO: 679822 - DNA, 15 bp, Homo sapiens
tttccgtgggtaaaa

SEQ ID NO: 679823 - DNA, 15 bp, Homo sapiens
ttccgtgggtaaaaa

SEQ ID NO: 679824 - DNA, 15 bp, Homo sapiens
tccgtgggtaaaaaa

SEQ ID NO: 679825 - DNA, 15 bp, Homo sapiens
ccgtgggtaaaaaac

SEQ ID NO: 679826 - DNA, 15 bp, Homo sapiens
cgtgggtaaaaaacc

SEQ ID NO: 679827 - DNA, 15 bp, Homo sapiens
gtgggtaaaaaaccc

SEQ ID NO: 679828 - DNA, 15 bp, Homo sapiens
tgggtaaaaaaccct

SEQ ID NO: 679829 - DNA, 15 bp, Homo sapiens
gggtaaaaaaccctg

SEQ ID NO: 679830 - DNA, 15 bp, Homo sapiens
ggtaaaaaaccctgc

SEQ ID NO: 679831 - DNA, 15 bp, Homo sapiens
gtaaaaaaccctgcc

SEQ ID NO: 679832 - DNA, 15 bp, Homo sapiens
taaaaaaccctgccc

SEQ ID NO: 679833 - DNA, 15 bp, Homo sapiens
aaaaaaccctgcccc

SEQ ID NO: 679834 - DNA, 15 bp, Homo sapiens
aaaaaccctgccccc

SEQ ID NO: 679835 - DNA, 15 bp, Homo sapiens
aaaaccctgccccca

SEQ ID NO: 679836 - DNA, 15 bp, Homo sapiens
aaaccctgcccccac

SEQ ID NO: 679837 - DNA, 15 bp, Homo sapiens
aaccctgcccccacc

SEQ ID NO: 679838 - DNA, 15 bp, Homo sapiens
accctgcccccaccg

SEQ ID NO: 679839 - DNA, 15 bp, Homo sapiens
ccctgcccccaccgg

SEQ ID NO: 679840 - DNA, 15 bp, Homo sapiens
cctgcccccaccggg

SEQ ID NO: 679841 - DNA, 15 bp, Homo sapiens
ctgcccccaccgggc

SEQ ID NO: 679842 - DNA, 15 bp, Homo sapiens
tgcccccaccgggct

SEQ ID NO: 679843 - DNA, 15 bp, Homo sapiens
gcccccaccgggctt

SEQ ID NO: 679844 - DNA, 15 bp, Homo sapiens
cccccaccgggctta

SEQ ID NO: 679845 - DNA, 15 bp, Homo sapiens
ccccaccgggcttac

SEQ ID NO: 679846 - DNA, 15 bp, Homo sapiens
cccaccgggcttacg

SEQ ID NO: 679847 - DNA, 15 bp, Homo sapiens
ccaccgggcttacgc

SEQ ID NO: 679848 - DNA, 15 bp, Homo sapiens
caccgggcttacgca

SEQ ID NO: 679849 - DNA, 15 bp, Homo sapiens
accgggcttacgcaa

SEQ ID NO: 679850 - DNA, 15 bp, Homo sapiens
ccgggcttacgcaat

SEQ ID NO: 679851 - DNA, 15 bp, Homo sapiens
cgggcttacgcaatt

SEQ ID NO: 679852 - DNA, 15 bp, Homo sapiens
gggcttacgcaattt

SEQ ID NO: 679853 - DNA, 15 bp, Homo sapiens
ggcttacgcaatttt

SEQ ID NO: 679854 - DNA, 15 bp, Homo sapiens
gcttacgcaattttt

SEQ ID NO: 679855 - DNA, 15 bp, Homo sapiens
cttacgcaatttttt

SEQ ID NO: 679856 - DNA, 15 bp, Homo sapiens
ttacgcaattttttt

SEQ ID NO: 679857 - DNA, 15 bp, Homo sapiens
tacgcaattttttta

SEQ ID NO: 679858 - DNA, 15 bp, Homo sapiens
acgcaatttttttaa

SEQ ID NO: 679859 - DNA, 15 bp, Homo sapiens
cgcaatttttttaag

SEQ ID NO: 679860 - DNA, 15 bp, Homo sapiens
gcaatttttttaagg

SEQ ID NO: 679861 - DNA, 15 bp, Homo sapiens
caatttttttaaggg

SEQ ID NO: 679862 - DNA, 15 bp, Homo sapiens
aatttttttaagggg

SEQ ID NO: 679863 - DNA, 15 bp, Homo sapiens
atttttttaagggga

SEQ ID NO: 679864 - DNA, 15 bp, Homo sapiens
tttttttaaggggag

SEQ ID NO: 679865 - DNA, 15 bp, Homo sapiens
ttttttaaggggaga

SEQ ID NO: 679866 - DNA, 15 bp, Homo sapiens
tttttaaggggagag

SEQ ID NO: 679867 - DNA, 15 bp, Homo sapiens
ttttaaggggagagg

SEQ ID NO: 679868 - DNA, 15 bp, Homo sapiens
tttaaggggagagga

SEQ ID NO: 679869 - DNA, 15 bp, Homo sapiens
ttaaggggagaggag

SEQ ID NO: 679870 - DNA, 15 bp, Homo sapiens
taaggggagaggagg

SEQ ID NO: 679871 - DNA, 15 bp, Homo sapiens
aaggggagaggaggg

SEQ ID NO: 679872 - DNA, 15 bp, Homo sapiens
aggggagaggaggga

SEQ ID NO: 679873 - DNA, 15 bp, Homo sapiens
ggggagaggagggaa

SEQ ID NO: 679874 - DNA, 15 bp, Homo sapiens
gggagaggagggaaa

SEQ ID NO: 679875 - DNA, 15 bp, Homo sapiens
ggagaggagggaaaa

SEQ ID NO: 679876 - DNA, 15 bp, Homo sapiens
gagaggagggaaaaa

SEQ ID NO: 679877 - DNA, 15 bp, Homo sapiens
agaggagggaaaaat

SEQ ID NO: 679878 - DNA, 15 bp, Homo sapiens
gaggagggaaaaatt

SEQ ID NO: 679879 - DNA, 15 bp, Homo sapiens
aggagggaaaaattt

SEQ ID NO: 679880 - DNA, 15 bp, Homo sapiens
ggagggaaaaatttg

SEQ ID NO: 679881 - DNA, 15 bp, Homo sapiens
gagggaaaaatttgt

SEQ ID NO: 679882 - DNA, 15 bp, Homo sapiens
agggaaaaatttgtg

SEQ ID NO: 679883 - DNA, 15 bp, Homo sapiens
gggaaaaatttgtgg

SEQ ID NO: 679884 - DNA, 15 bp, Homo sapiens
ggaaaaatttgtggg

SEQ ID NO: 679885 - DNA, 15 bp, Homo sapiens
gaaaaatttgtgggg

SEQ ID NO: 679886 - DNA, 15 bp, Homo sapiens
aaaaatttgtggggg

SEQ ID NO: 679887 - DNA, 15 bp, Homo sapiens
aaaatttgtgggggg

SEQ ID NO: 679888 - DNA, 15 bp, Homo sapiens
aaatttgtggggggt

SEQ ID NO: 679889 - DNA, 15 bp, Homo sapiens
aatttgtggggggta

SEQ ID NO: 679890 - DNA, 15 bp, Homo sapiens
atttgtggggggtac

SEQ ID NO: 679891 - DNA, 15 bp, Homo sapiens
tttgtggggggtacg

SEQ ID NO: 679892 - DNA, 15 bp, Homo sapiens
ttgtggggggtacga

SEQ ID NO: 679893 - DNA, 15 bp, Homo sapiens
tgtggggggtacgaa

SEQ ID NO: 679894 - DNA, 15 bp, Homo sapiens
gtggggggtacgaaa

SEQ ID NO: 679895 - DNA, 15 bp, Homo sapiens
tggggggtacgaaaa

SEQ ID NO: 679896 - DNA, 15 bp, Homo sapiens
ggggggtacgaaaag

SEQ ID NO: 679897 - DNA, 15 bp, Homo sapiens
gggggtacgaaaagg

SEQ ID NO: 679898 - DNA, 15 bp, Homo sapiens
ggggtacgaaaaggc

SEQ ID NO: 679899 - DNA, 15 bp, Homo sapiens
gggtacgaaaaggcg

SEQ ID NO: 679900 - DNA, 15 bp, Homo sapiens
ggtacgaaaaggcgg

SEQ ID NO: 679901 - DNA, 15 bp, Homo sapiens
gtacgaaaaggcgga

SEQ ID NO: 679902 - DNA, 15 bp, Homo sapiens
tacgaaaaggcggaa

SEQ ID NO: 679903 - DNA, 15 bp, Homo sapiens
acgaaaaggcggaaa

SEQ ID NO: 679904 - DNA, 15 bp, Homo sapiens
cgaaaaggcggaaag

SEQ ID NO: 679905 - DNA, 15 bp, Homo sapiens
gaaaaggcggaaaga

SEQ ID NO: 679906 - DNA, 15 bp, Homo sapiens
aaaaggcggaaagaa

SEQ ID NO: 679907 - DNA, 15 bp, Homo sapiens
aaaggcggaaagaaa

SEQ ID NO: 679908 - DNA, 15 bp, Homo sapiens
aaggcggaaagaaac

SEQ ID NO: 679909 - DNA, 15 bp, Homo sapiens
aggcggaaagaaaca

SEQ ID NO: 679910 - DNA, 15 bp, Homo sapiens
ggcggaaagaaacag

SEQ ID NO: 679911 - DNA, 15 bp, Homo sapiens
gcggaaagaaacagt

SEQ ID NO: 679912 - DNA, 15 bp, Homo sapiens
cggaaagaaacagtc

SEQ ID NO: 679913 - DNA, 15 bp, Homo sapiens
ggaaagaaacagtca

SEQ ID NO: 679914 - DNA, 15 bp, Homo sapiens
gaaagaaacagtcat

SEQ ID NO: 679915 - DNA, 15 bp, Homo sapiens
aaagaaacagtcatt

SEQ ID NO: 679916 - DNA, 15 bp, Homo sapiens
aagaaacagtcattt

SEQ ID NO: 679917 - DNA, 15 bp, Homo sapiens
agaaacagtcatttc

SEQ ID NO: 679918 - DNA, 15 bp, Homo sapiens
gaaacagtcatttcg

SEQ ID NO: 679919 - DNA, 15 bp, Homo sapiens
aaacagtcatttcgt

SEQ ID NO: 679920 - DNA, 15 bp, Homo sapiens
aacagtcatttcgtc

SEQ ID NO: 679921 - DNA, 15 bp, Homo sapiens
acagtcatttcgtca

SEQ ID NO: 679922 - DNA, 15 bp, Homo sapiens
cagtcatttcgtcac

SEQ ID NO: 679923 - DNA, 15 bp, Homo sapiens
agtcatttcgtcaca

SEQ ID NO: 679924 - DNA, 15 bp, Homo sapiens
gtcatttcgtcacat

SEQ ID NO: 679925 - DNA, 15 bp, Homo sapiens
tcatttcgtcacatg

SEQ ID NO: 679926 - DNA, 15 bp, Homo sapiens
catttcgtcacatgg

SEQ ID NO: 679927 - DNA, 15 bp, Homo sapiens
atttcgtcacatggg

SEQ ID NO: 679928 - DNA, 15 bp, Homo sapiens
tttcgtcacatgggc

SEQ ID NO: 679929 - DNA, 15 bp, Homo sapiens
ttcgtcacatgggct

SEQ ID NO: 679930 - DNA, 15 bp, Homo sapiens
tcgtcacatgggctt

SEQ ID NO: 679931 - DNA, 15 bp, Homo sapiens
cgtcacatgggcttg

SEQ ID NO: 679932 - DNA, 15 bp, Homo sapiens
gtcacatgggcttgg

SEQ ID NO: 679933 - DNA, 15 bp, Homo sapiens
tcacatgggcttggt

SEQ ID NO: 679934 - DNA, 15 bp, Homo sapiens
cacatgggcttggtt

SEQ ID NO: 679935 - DNA, 15 bp, Homo sapiens
acatgggcttggttt

SEQ ID NO: 679936 - DNA, 15 bp, Homo sapiens
catgggcttggtttt

SEQ ID NO: 679937 - DNA, 15 bp, Homo sapiens
atgggcttggttttc

SEQ ID NO: 679938 - DNA, 15 bp, Homo sapiens
tgggcttggttttca

SEQ ID NO: 679939 - DNA, 15 bp, Homo sapiens
gggcttggttttcag

SEQ ID NO: 679940 - DNA, 15 bp, Homo sapiens
ggcttggttttcagt

SEQ ID NO: 679941 - DNA, 15 bp, Homo sapiens
gcttggttttcagtc

SEQ ID NO: 679942 - DNA, 15 bp, Homo sapiens
cttggttttcagtct

SEQ ID NO: 679943 - DNA, 15 bp, Homo sapiens
ttggttttcagtctt

SEQ ID NO: 679944 - DNA, 15 bp, Homo sapiens
tggttttcagtctta

SEQ ID NO: 679945 - DNA, 15 bp, Homo sapiens
ggttttcagtcttat

SEQ ID NO: 679946 - DNA, 15 bp, Homo sapiens
gttttcagtcttata

SEQ ID NO: 679947 - DNA, 15 bp, Homo sapiens
ttttcagtcttataa

SEQ ID NO: 679948 - DNA, 15 bp, Homo sapiens
tttcagtcttataaa

SEQ ID NO: 679949 - DNA, 15 bp, Homo sapiens
ttcagtcttataaaa

SEQ ID NO: 679950 - DNA, 15 bp, Homo sapiens
tcagtcttataaaaa

SEQ ID NO: 679951 - DNA, 15 bp, Homo sapiens
cagtcttataaaaag

SEQ ID NO: 679952 - DNA, 15 bp, Homo sapiens
agtcttataaaaagg

SEQ ID NO: 679953 - DNA, 15 bp, Homo sapiens
gtcttataaaaagga

SEQ ID NO: 679954 - DNA, 15 bp, Homo sapiens
tcttataaaaaggaa

SEQ ID NO: 679955 - DNA, 15 bp, Homo sapiens
cttataaaaaggaag

SEQ ID NO: 679956 - DNA, 15 bp, Homo sapiens
ttataaaaaggaagg

SEQ ID NO: 679957 - DNA, 15 bp, Homo sapiens
tataaaaaggaaggt

SEQ ID NO: 679958 - DNA, 15 bp, Homo sapiens
ataaaaaggaaggtt

SEQ ID NO: 679959 - DNA, 15 bp, Homo sapiens
taaaaaggaaggttc

SEQ ID NO: 679960 - DNA, 15 bp, Homo sapiens
aaaaaggaaggttct

SEQ ID NO: 679961 - DNA, 15 bp, Homo sapiens
aaaaggaaggttctc

SEQ ID NO: 679962 - DNA, 15 bp, Homo sapiens
aaaggaaggttctct

SEQ ID NO: 679963 - DNA, 15 bp, Homo sapiens
aaggaaggttctctc

SEQ ID NO: 679964 - DNA, 15 bp, Homo sapiens
aggaaggttctctcg

SEQ ID NO: 679965 - DNA, 15 bp, Homo sapiens
ggaaggttctctcgg

SEQ ID NO: 679966 - DNA, 15 bp, Homo sapiens
gaaggttctctcggt

SEQ ID NO: 679967 - DNA, 15 bp, Homo sapiens
aaggttctctcggtt

SEQ ID NO: 679968 - DNA, 15 bp, Homo sapiens
aggttctctcggtta

SEQ ID NO: 679969 - DNA, 15 bp, Homo sapiens
ggttctctcggttag

SEQ ID NO: 679970 - DNA, 15 bp, Homo sapiens
gttctctcggttagc

SEQ ID NO: 679971 - DNA, 15 bp, Homo sapiens
ttctctcggttagcg

SEQ ID NO: 679972 - DNA, 15 bp, Homo sapiens
tctctcggttagcga

SEQ ID NO: 679973 - DNA, 15 bp, Homo sapiens
ctctcggttagcgac

SEQ ID NO: 679974 - DNA, 15 bp, Homo sapiens
tctcggttagcgacc

SEQ ID NO: 679975 - DNA, 15 bp, Homo sapiens
ctcggttagcgacca

SEQ ID NO: 679976 - DNA, 15 bp, Homo sapiens
tcggttagcgaccaa

SEQ ID NO: 679977 - DNA, 15 bp, Homo sapiens
cggttagcgaccaat

SEQ ID NO: 679978 - DNA, 15 bp, Homo sapiens
ggttagcgaccaatt

SEQ ID NO: 679979 - DNA, 15 bp, Homo sapiens
gttagcgaccaattg

SEQ ID NO: 679980 - DNA, 15 bp, Homo sapiens
ttagcgaccaattgt

SEQ ID NO: 679981 - DNA, 15 bp, Homo sapiens
tagcgaccaattgtc

SEQ ID NO: 679982 - DNA, 15 bp, Homo sapiens
agcgaccaattgtca

SEQ ID NO: 679983 - DNA, 15 bp, Homo sapiens
gcgaccaattgtcat

SEQ ID NO: 679984 - DNA, 15 bp, Homo sapiens
cgaccaattgtcata

SEQ ID NO: 679985 - DNA, 15 bp, Homo sapiens
gaccaattgtcatac

SEQ ID NO: 679986 - DNA, 15 bp, Homo sapiens
accaattgtcatacg

SEQ ID NO: 679987 - DNA, 15 bp, Homo sapiens
ccaattgtcatacga

SEQ ID NO: 679988 - DNA, 15 bp, Homo sapiens
caattgtcatacgac

SEQ ID NO: 679989 - DNA, 15 bp, Homo sapiens
aattgtcatacgact

SEQ ID NO: 679990 - DNA, 15 bp, Homo sapiens
attgtcatacgactt

SEQ ID NO: 679991 - DNA, 15 bp, Homo sapiens
ttgtcatacgacttg

SEQ ID NO: 679992 - DNA, 15 bp, Homo sapiens
tgtcatacgacttgc

SEQ ID NO: 679993 - DNA, 15 bp, Homo sapiens
gtcatacgacttgca

SEQ ID NO: 679994 - DNA, 15 bp, Homo sapiens
tcatacgacttgcag

SEQ ID NO: 679995 - DNA, 15 bp, Homo sapiens
catacgacttgcagt

SEQ ID NO: 679996 - DNA, 15 bp, Homo sapiens
atacgacttgcagtg

SEQ ID NO: 679997 - DNA, 15 bp, Homo sapiens
tacgacttgcagtga

SEQ ID NO: 679998 - DNA, 15 bp, Homo sapiens
acgacttgcagtgag

SEQ ID NO: 679999 - DNA, 15 bp, Homo sapiens
cgacttgcagtgagc

SEQ ID NO: 680000 - DNA, 15 bp, Homo sapiens
gacttgcagtgagcg

SEQ ID NO: 680001 - DNA, 15 bp, Homo sapiens
acttgcagtgagcgt

SEQ ID NO: 680002 - DNA, 15 bp, Homo sapiens
cttgcagtgagcgtc

SEQ ID NO: 680003 - DNA, 15 bp, Homo sapiens
ttgcagtgagcgtca

SEQ ID NO: 680004 - DNA, 15 bp, Homo sapiens
tgcagtgagcgtcag

SEQ ID NO: 680005 - DNA, 15 bp, Homo sapiens
gcagtgagcgtcagg

SEQ ID NO: 680006 - DNA, 15 bp, Homo sapiens
cagtgagcgtcagga

SEQ ID NO: 680007 - DNA, 15 bp, Homo sapiens
agtgagcgtcaggag

SEQ ID NO: 680008 - DNA, 15 bp, Homo sapiens
gtgagcgtcaggagc

SEQ ID NO: 680009 - DNA, 15 bp, Homo sapiens
tgagcgtcaggagca

SEQ ID NO: 680010 - DNA, 15 bp, Homo sapiens
gagcgtcaggagcac

SEQ ID NO: 680011 - DNA, 15 bp, Homo sapiens
agcgtcaggagcacg

SEQ ID NO: 680012 - DNA, 15 bp, Homo sapiens
gcgtcaggagcacgt

SEQ ID NO: 680013 - DNA, 15 bp, Homo sapiens
cgtcaggagcacgtc

SEQ ID NO: 680014 - DNA, 15 bp, Homo sapiens
gtcaggagcacgtcc

SEQ ID NO: 680015 - DNA, 15 bp, Homo sapiens
tcaggagcacgtcca

SEQ ID NO: 680016 - DNA, 15 bp, Homo sapiens
caggagcacgtccag

SEQ ID NO: 680017 - DNA, 15 bp, Homo sapiens
aggagcacgtccagg

SEQ ID NO: 680018 - DNA, 15 bp, Homo sapiens
ggagcacgtccagga

SEQ ID NO: 680019 - DNA, 15 bp, Homo sapiens
gagcacgtccaggaa

SEQ ID NO: 680020 - DNA, 15 bp, Homo sapiens
agcacgtccaggaac

SEQ ID NO: 680021 - DNA, 15 bp, Homo sapiens
gcacgtccaggaact

SEQ ID NO: 680022 - DNA, 15 bp, Homo sapiens
cacgtccaggaactc

SEQ ID NO: 680023 - DNA, 15 bp, Homo sapiens
acgtccaggaactcc

SEQ ID NO: 680024 - DNA, 15 bp, Homo sapiens
cgtccaggaactcct

SEQ ID NO: 680025 - DNA, 15 bp, Homo sapiens
gtccaggaactcctc

SEQ ID NO: 680026 - DNA, 15 bp, Homo sapiens
tccaggaactcctca

SEQ ID NO: 680027 - DNA, 15 bp, Homo sapiens
ccaggaactcctcag

SEQ ID NO: 680028 - DNA, 15 bp, Homo sapiens
caggaactcctcagc

SEQ ID NO: 680029 - DNA, 15 bp, Homo sapiens
aggaactcctcagca

SEQ ID NO: 680030 - DNA, 15 bp, Homo sapiens
ggaactcctcagcag

SEQ ID NO: 680031 - DNA, 15 bp, Homo sapiens
gaactcctcagcagc

SEQ ID NO: 680032 - DNA, 15 bp, Homo sapiens
aactcctcagcagcg

SEQ ID NO: 680033 - DNA, 15 bp, Homo sapiens
actcctcagcagcgc

SEQ ID NO: 680034 - DNA, 15 bp, Homo sapiens
ctcctcagcagcgcc

SEQ ID NO: 680035 - DNA, 15 bp, Homo sapiens
tcctcagcagcgcct

SEQ ID NO: 680036 - DNA, 15 bp, Homo sapiens
cctcagcagcgcctc

SEQ ID NO: 680037 - DNA, 15 bp, Homo sapiens
ctcagcagcgcctcc

SEQ ID NO: 680038 - DNA, 15 bp, Homo sapiens
tcagcagcgcctcct

SEQ ID NO: 680039 - DNA, 15 bp, Homo sapiens
cagcagcgcctcctt

SEQ ID NO: 680040 - DNA, 15 bp, Homo sapiens
agcagcgcctccttc

SEQ ID NO: 680041 - DNA, 15 bp, Homo sapiens
gcagcgcctccttca

SEQ ID NO: 680042 - DNA, 15 bp, Homo sapiens
cagcgcctccttcag

SEQ ID NO: 680043 - DNA, 15 bp, Homo sapiens
agcgcctccttcagc

SEQ ID NO: 680044 - DNA, 15 bp, Homo sapiens
gcgcctccttcagct

SEQ ID NO: 680045 - DNA, 15 bp, Homo sapiens
cgcctccttcagctc

SEQ ID NO: 680046 - DNA, 15 bp, Homo sapiens
gcctccttcagctcc

SEQ ID NO: 680047 - DNA, 15 bp, Homo sapiens
cctccttcagctcca

SEQ ID NO: 680048 - DNA, 15 bp, Homo sapiens
ctccttcagctccac

SEQ ID NO: 680049 - DNA, 15 bp, Homo sapiens
tccttcagctccaca

SEQ ID NO: 680050 - DNA, 15 bp, Homo sapiens
ccttcagctccacag

SEQ ID NO: 680051 - DNA, 15 bp, Homo sapiens
cttcagctccacagc

SEQ ID NO: 680052 - DNA, 15 bp, Homo sapiens
ttcagctccacagcc

SEQ ID NO: 680053 - DNA, 15 bp, Homo sapiens
tcagctccacagcca

SEQ ID NO: 680054 - DNA, 15 bp, Homo sapiens
cagctccacagccag

SEQ ID NO: 680055 - DNA, 15 bp, Homo sapiens
agctccacagccaga

SEQ ID NO: 680056 - DNA, 15 bp, Homo sapiens
gctccacagccagac

SEQ ID NO: 680057 - DNA, 15 bp, Homo sapiens
ctccacagccagacg

SEQ ID NO: 680058 - DNA, 15 bp, Homo sapiens
tccacagccagacgc

SEQ ID NO: 680059 - DNA, 15 bp, Homo sapiens
ccacagccagacgcc

SEQ ID NO: 680060 - DNA, 15 bp, Homo sapiens
cacagccagacgccc

SEQ ID NO: 680061 - DNA, 15 bp, Homo sapiens
acagccagacgccct

SEQ ID NO: 680062 - DNA, 15 bp, Homo sapiens
cagccagacgccctc

SEQ ID NO: 680063 - DNA, 15 bp, Homo sapiens
agccagacgccctca

SEQ ID NO: 680064 - DNA, 15 bp, Homo sapiens
gccagacgccctcag

SEQ ID NO: 680065 - DNA, 15 bp, Homo sapiens
ccagacgccctcaga

SEQ ID NO: 680066 - DNA, 15 bp, Homo sapiens
cagacgccctcagac

SEQ ID NO: 680067 - DNA, 15 bp, Homo sapiens
agacgccctcagaca

SEQ ID NO: 680068 - DNA, 15 bp, Homo sapiens
gacgccctcagacag

SEQ ID NO: 680069 - DNA, 15 bp, Homo sapiens
acgccctcagacagc

SEQ ID NO: 680070 - DNA, 15 bp, Homo sapiens
cgccctcagacagca

SEQ ID NO: 680071 - DNA, 15 bp, Homo sapiens
gccctcagacagcaa

SEQ ID NO: 680072 - DNA, 15 bp, Homo sapiens
ccctcagacagcaaa

SEQ ID NO: 680073 - DNA, 15 bp, Homo sapiens
cctcagacagcaaag

SEQ ID NO: 680074 - DNA, 15 bp, Homo sapiens
ctcagacagcaaagc

SEQ ID NO: 680075 - DNA, 15 bp, Homo sapiens
tcagacagcaaagcc

SEQ ID NO: 680076 - DNA, 15 bp, Homo sapiens
cagacagcaaagcct

SEQ ID NO: 680077 - DNA, 15 bp, Homo sapiens
agacagcaaagccta

SEQ ID NO: 680078 - DNA, 15 bp, Homo sapiens
gacagcaaagcctac

SEQ ID NO: 680079 - DNA, 15 bp, Homo sapiens
acagcaaagcctacc

SEQ ID NO: 680080 - DNA, 15 bp, Homo sapiens
cagcaaagcctaccc

SEQ ID NO: 680081 - DNA, 15 bp, Homo sapiens
agcaaagcctacccc

SEQ ID NO: 680082 - DNA, 15 bp, Homo sapiens
gcaaagcctaccccc

SEQ ID NO: 680083 - DNA, 15 bp, Homo sapiens
caaagcctacccccg

SEQ ID NO: 680084 - DNA, 15 bp, Homo sapiens
aaagcctacccccgc

SEQ ID NO: 680085 - DNA, 15 bp, Homo sapiens
aagcctacccccgcg

SEQ ID NO: 680086 - DNA, 15 bp, Homo sapiens
agcctacccccgcgc

SEQ ID NO: 680087 - DNA, 15 bp, Homo sapiens
gcctacccccgcgcc

SEQ ID NO: 680088 - DNA, 15 bp, Homo sapiens
cctacccccgcgccg

SEQ ID NO: 680089 - DNA, 15 bp, Homo sapiens
ctacccccgcgccgc

SEQ ID NO: 680090 - DNA, 15 bp, Homo sapiens
tacccccgcgccgcg

SEQ ID NO: 680091 - DNA, 15 bp, Homo sapiens
acccccgcgccgcgc

SEQ ID NO: 680092 - DNA, 15 bp, Homo sapiens
cccccgcgccgcgcc

SEQ ID NO: 680093 - DNA, 15 bp, Homo sapiens
ccccgcgccgcgccc

SEQ ID NO: 680094 - DNA, 15 bp, Homo sapiens
cccgcgccgcgccct

SEQ ID NO: 680095 - DNA, 15 bp, Homo sapiens
ccgcgccgcgccctg

SEQ ID NO: 680096 - DNA, 15 bp, Homo sapiens
cgcgccgcgccctgc

SEQ ID NO: 680097 - DNA, 15 bp, Homo sapiens
gcgccgcgccctgcc

SEQ ID NO: 680098 - DNA, 15 bp, Homo sapiens
cgccgcgccctgccc

SEQ ID NO: 680099 - DNA, 15 bp, Homo sapiens
gccgcgccctgcccg

SEQ ID NO: 680100 - DNA, 15 bp, Homo sapiens
ccgcgccctgcccgc

SEQ ID NO: 680101 - DNA, 15 bp, Homo sapiens
cgcgccctgcccgcc

SEQ ID NO: 680102 - DNA, 15 bp, Homo sapiens
gcgccctgcccgccg

SEQ ID NO: 680103 - DNA, 15 bp, Homo sapiens
cgccctgcccgccgc

SEQ ID NO: 680104 - DNA, 15 bp, Homo sapiens
gccctgcccgccgct

SEQ ID NO: 680105 - DNA, 15 bp, Homo sapiens
ccctgcccgccgctg

SEQ ID NO: 680106 - DNA, 15 bp, Homo sapiens
cctgcccgccgctgc

SEQ ID NO: 680107 - DNA, 15 bp, Homo sapiens
ctgcccgccgctgcg

SEQ ID NO: 680108 - DNA, 15 bp, Homo sapiens
tgcccgccgctgcga

SEQ ID NO: 680109 - DNA, 15 bp, Homo sapiens
gcccgccgctgcgat

SEQ ID NO: 680110 - DNA, 15 bp, Homo sapiens
cccgccgctgcgatg

SEQ ID NO: 680111 - DNA, 15 bp, Homo sapiens
ccgccgctgcgatgc

SEQ ID NO: 680112 - DNA, 15 bp, Homo sapiens
cgccgctgcgatgct

SEQ ID NO: 680113 - DNA, 15 bp, Homo sapiens
gccgctgcgatgctc

SEQ ID NO: 680114 - DNA, 15 bp, Homo sapiens
ccgctgcgatgctcg

SEQ ID NO: 680115 - DNA, 15 bp, Homo sapiens
cgctgcgatgctcgc

SEQ ID NO: 680116 - DNA, 15 bp, Homo sapiens
gctgcgatgctcgcc

SEQ ID NO: 680117 - DNA, 15 bp, Homo sapiens
ctgcgatgctcgccc

SEQ ID NO: 680118 - DNA, 15 bp, Homo sapiens
tgcgatgctcgcccg

SEQ ID NO: 680119 - DNA, 15 bp, Homo sapiens
gcgatgctcgcccgc

SEQ ID NO: 680120 - DNA, 15 bp, Homo sapiens
cgatgctcgcccgcg

SEQ ID NO: 680121 - DNA, 15 bp, Homo sapiens
gatgctcgcccgcgc

SEQ ID NO: 680122 - DNA, 15 bp, Homo sapiens
atgctcgcccgcgcc

SEQ ID NO: 680123 - DNA, 15 bp, Homo sapiens
tgctcgcccgcgccc

SEQ ID NO: 680124 - DNA, 15 bp, Homo sapiens
gctcgcccgcgccct

SEQ ID NO: 680125 - DNA, 15 bp, Homo sapiens
ctcgcccgcgccctg

SEQ ID NO: 680126 - DNA, 15 bp, Homo sapiens
tcgcccgcgccctgc

SEQ ID NO: 680127 - DNA, 15 bp, Homo sapiens
cgcccgcgccctgct

SEQ ID NO: 680128 - DNA, 15 bp, Homo sapiens
gcccgcgccctgctg

SEQ ID NO: 680129 - DNA, 15 bp, Homo sapiens
cccgcgccctgctgc

SEQ ID NO: 680130 - DNA, 15 bp, Homo sapiens
ccgcgccctgctgct

SEQ ID NO: 680131 - DNA, 15 bp, Homo sapiens
cgcgccctgctgctg

SEQ ID NO: 680132 - DNA, 15 bp, Homo sapiens
gcgccctgctgctgt

SEQ ID NO: 680133 - DNA, 15 bp, Homo sapiens
cgccctgctgctgtg

SEQ ID NO: 680134 - DNA, 15 bp, Homo sapiens
gccctgctgctgtgc

SEQ ID NO: 680135 - DNA, 15 bp, Homo sapiens
ccctgctgctgtgcg

SEQ ID NO: 680136 - DNA, 15 bp, Homo sapiens
cctgctgctgtgcgc

SEQ ID NO: 680137 - DNA, 15 bp, Homo sapiens
ctgctgctgtgcgcg

SEQ ID NO: 680138 - DNA, 15 bp, Homo sapiens
tgctgctgtgcgcgg

SEQ ID NO: 680139 - DNA, 15 bp, Homo sapiens
gctgctgtgcgcggt

SEQ ID NO: 680140 - DNA, 15 bp, Homo sapiens
ctgctgtgcgcggtc

SEQ ID NO: 680141 - DNA, 15 bp, Homo sapiens
tgctgtgcgcggtcc

SEQ ID NO: 680142 - DNA, 15 bp, Homo sapiens
gctgtgcgcggtcct

SEQ ID NO: 680143 - DNA, 15 bp, Homo sapiens
ctgtgcgcggtcctg

SEQ ID NO: 680144 - DNA, 15 bp, Homo sapiens
tgtgcgcggtcctgg

SEQ ID NO: 680145 - DNA, 15 bp, Homo sapiens
gtgcgcggtcctggc

SEQ ID NO: 680146 - DNA, 15 bp, Homo sapiens
tgcgcggtcctggcg

SEQ ID NO: 680147 - DNA, 15 bp, Homo sapiens
gcgcggtcctggcgc

SEQ ID NO: 680148 - DNA, 15 bp, Homo sapiens
cgcggtcctggcgct

SEQ ID NO: 680149 - DNA, 15 bp, Homo sapiens
gcggtcctggcgctc

SEQ ID NO: 680150 - DNA, 15 bp, Homo sapiens
cggtcctggcgctca

SEQ ID NO: 680151 - DNA, 15 bp, Homo sapiens
ggtcctggcgctcag

SEQ ID NO: 680152 - DNA, 15 bp, Homo sapiens
gtcctggcgctcagc

SEQ ID NO: 680153 - DNA, 15 bp, Homo sapiens
tcctggcgctcagcc

SEQ ID NO: 680154 - DNA, 15 bp, Homo sapiens
cctggcgctcagcca

SEQ ID NO: 680155 - DNA, 15 bp, Homo sapiens
ctggcgctcagccat

SEQ ID NO: 680156 - DNA, 15 bp, Homo sapiens
tggcgctcagccata

SEQ ID NO: 680157 - DNA, 15 bp, Homo sapiens
ggcgctcagccatac

SEQ ID NO: 680158 - DNA, 15 bp, Homo sapiens
gcgctcagccataca

SEQ ID NO: 680159 - DNA, 15 bp, Homo sapiens
cgctcagccatacag

SEQ ID NO: 680160 - DNA, 15 bp, Homo sapiens
gctcagccatacagg

SEQ ID NO: 680161 - DNA, 15 bp, Homo sapiens
ctcagccatacaggt

SEQ ID NO: 680162 - DNA, 15 bp, Homo sapiens
tcagccatacaggtg

SEQ ID NO: 680163 - DNA, 15 bp, Homo sapiens
cagccatacaggtga

SEQ ID NO: 680164 - DNA, 15 bp, Homo sapiens
agccatacaggtgag

SEQ ID NO: 680165 - DNA, 15 bp, Homo sapiens
gccatacaggtgagt

SEQ ID NO: 680166 - DNA, 15 bp, Homo sapiens
ccatacaggtgagta

SEQ ID NO: 680167 - DNA, 15 bp, Homo sapiens
catacaggtgagtac

SEQ ID NO: 680168 - DNA, 15 bp, Homo sapiens
atacaggtgagtacc

SEQ ID NO: 680169 - DNA, 15 bp, Homo sapiens
tacaggtgagtacct

SEQ ID NO: 680170 - DNA, 15 bp, Homo sapiens
acaggtgagtacctg

SEQ ID NO: 680171 - DNA, 15 bp, Homo sapiens
caggtgagtacctgg

SEQ ID NO: 680172 - DNA, 15 bp, Homo sapiens
aggtgagtacctggc

SEQ ID NO: 680173 - DNA, 15 bp, Homo sapiens
ggtgagtacctggcg

SEQ ID NO: 680174 - DNA, 15 bp, Homo sapiens
gtgagtacctggcgc

SEQ ID NO: 680175 - DNA, 15 bp, Homo sapiens
tgagtacctggcgcc

SEQ ID NO: 680176 - DNA, 15 bp, Homo sapiens
gagtacctggcgccg

SEQ ID NO: 680177 - DNA, 15 bp, Homo sapiens
agtacctggcgccgc

SEQ ID NO: 680178 - DNA, 15 bp, Homo sapiens
gtacctggcgccgcg

SEQ ID NO: 680179 - DNA, 15 bp, Homo sapiens
tacctggcgccgcgc

SEQ ID NO: 680180 - DNA, 15 bp, Homo sapiens
acctggcgccgcgca

SEQ ID NO: 680181 - DNA, 15 bp, Homo sapiens
cctggcgccgcgcac

SEQ ID NO: 680182 - DNA, 15 bp, Homo sapiens
ctggcgccgcgcacc

SEQ ID NO: 680183 - DNA, 15 bp, Homo sapiens
tggcgccgcgcaccg

SEQ ID NO: 680184 - DNA, 15 bp, Homo sapiens
ggcgccgcgcaccgg

SEQ ID NO: 680185 - DNA, 15 bp, Homo sapiens
gcgccgcgcaccggg

SEQ ID NO: 680186 - DNA, 15 bp, Homo sapiens
cgccgcgcaccgggg

SEQ ID NO: 680187 - DNA, 15 bp, Homo sapiens
gccgcgcaccgggga

SEQ ID NO: 680188 - DNA, 15 bp, Homo sapiens
ccgcgcaccggggac

SEQ ID NO: 680189 - DNA, 15 bp, Homo sapiens
cgcgcaccggggact

SEQ ID NO: 680190 - DNA, 15 bp, Homo sapiens
gcgcaccggggactc

SEQ ID NO: 680191 - DNA, 15 bp, Homo sapiens
cgcaccggggactcc

SEQ ID NO: 680192 - DNA, 15 bp, Homo sapiens
gcaccggggactccg

SEQ ID NO: 680193 - DNA, 15 bp, Homo sapiens
caccggggactccgg

SEQ ID NO: 680194 - DNA, 15 bp, Homo sapiens
accggggactccggt

SEQ ID NO: 680195 - DNA, 15 bp, Homo sapiens
ccggggactccggtt

SEQ ID NO: 680196 - DNA, 15 bp, Homo sapiens
cggggactccggttc

SEQ ID NO: 680197 - DNA, 15 bp, Homo sapiens
ggggactccggttcc

SEQ ID NO: 680198 - DNA, 15 bp, Homo sapiens
gggactccggttcca

SEQ ID NO: 680199 - DNA, 15 bp, Homo sapiens
ggactccggttccac

SEQ ID NO: 680200 - DNA, 15 bp, Homo sapiens
gactccggttccacg

SEQ ID NO: 680201 - DNA, 15 bp, Homo sapiens
actccggttccacgc

SEQ ID NO: 680202 - DNA, 15 bp, Homo sapiens
ctccggttccacgca

SEQ ID NO: 680203 - DNA, 15 bp, Homo sapiens
tccggttccacgcac

SEQ ID NO: 680204 - DNA, 15 bp, Homo sapiens
ccggttccacgcacc

SEQ ID NO: 680205 - DNA, 15 bp, Homo sapiens
cggttccacgcaccc

SEQ ID NO: 680206 - DNA, 15 bp, Homo sapiens
ggttccacgcacccg

SEQ ID NO: 680207 - DNA, 15 bp, Homo sapiens
gttccacgcacccgg

SEQ ID NO: 680208 - DNA, 15 bp, Homo sapiens
ttccacgcacccggg

SEQ ID NO: 680209 - DNA, 15 bp, Homo sapiens
tccacgcacccgggc

SEQ ID NO: 680210 - DNA, 15 bp, Homo sapiens
ccacgcacccgggca

SEQ ID NO: 680211 - DNA, 15 bp, Homo sapiens
cacgcacccgggcag

SEQ ID NO: 680212 - DNA, 15 bp, Homo sapiens
acgcacccgggcaga

SEQ ID NO: 680213 - DNA, 15 bp, Homo sapiens
cgcacccgggcagag

SEQ ID NO: 680214 - DNA, 15 bp, Homo sapiens
gcacccgggcagagt

SEQ ID NO: 680215 - DNA, 15 bp, Homo sapiens
cacccgggcagagtt

SEQ ID NO: 680216 - DNA, 15 bp, Homo sapiens
acccgggcagagttt

SEQ ID NO: 680217 - DNA, 15 bp, Homo sapiens
cccgggcagagtttc

SEQ ID NO: 680218 - DNA, 15 bp, Homo sapiens
ccgggcagagtttcc

SEQ ID NO: 680219 - DNA, 15 bp, Homo sapiens
cgggcagagtttccg

SEQ ID NO: 680220 - DNA, 15 bp, Homo sapiens
gggcagagtttccgc

SEQ ID NO: 680221 - DNA, 15 bp, Homo sapiens
ggcagagtttccgct

SEQ ID NO: 680222 - DNA, 15 bp, Homo sapiens
gcagagtttccgctc

SEQ ID NO: 680223 - DNA, 15 bp, Homo sapiens
cagagtttccgctct

SEQ ID NO: 680224 - DNA, 15 bp, Homo sapiens
agagtttccgctctg

SEQ ID NO: 680225 - DNA, 15 bp, Homo sapiens
gagtttccgctctga

SEQ ID NO: 680226 - DNA, 15 bp, Homo sapiens
agtttccgctctgac

SEQ ID NO: 680227 - DNA, 15 bp, Homo sapiens
gtttccgctctgacc

SEQ ID NO: 680228 - DNA, 15 bp, Homo sapiens
tttccgctctgacct

SEQ ID NO: 680229 - DNA, 15 bp, Homo sapiens
ttccgctctgacctc

SEQ ID NO: 680230 - DNA, 15 bp, Homo sapiens
tccgctctgacctcc

SEQ ID NO: 680231 - DNA, 15 bp, Homo sapiens
ccgctctgacctcct

SEQ ID NO: 680232 - DNA, 15 bp, Homo sapiens
cgctctgacctcctg

SEQ ID NO: 680233 - DNA, 15 bp, Homo sapiens
gctctgacctcctgg

SEQ ID NO: 680234 - DNA, 15 bp, Homo sapiens
ctctgacctcctggg

SEQ ID NO: 680235 - DNA, 15 bp, Homo sapiens
tctgacctcctgggt

SEQ ID NO: 680236 - DNA, 15 bp, Homo sapiens
ctgacctcctgggtc

SEQ ID NO: 680237 - DNA, 15 bp, Homo sapiens
tgacctcctgggtct

SEQ ID NO: 680238 - DNA, 15 bp, Homo sapiens
gacctcctgggtcta

SEQ ID NO: 680239 - DNA, 15 bp, Homo sapiens
acctcctgggtctat

SEQ ID NO: 680240 - DNA, 15 bp, Homo sapiens
cctcctgggtctatc

SEQ ID NO: 680241 - DNA, 15 bp, Homo sapiens
ctcctgggtctatcc

SEQ ID NO: 680242 - DNA, 15 bp, Homo sapiens
tcctgggtctatccc

SEQ ID NO: 680243 - DNA, 15 bp, Homo sapiens
cctgggtctatccca

SEQ ID NO: 680244 - DNA, 15 bp, Homo sapiens
ctgggtctatcccag

SEQ ID NO: 680245 - DNA, 15 bp, Homo sapiens
tgggtctatcccagt

SEQ ID NO: 680246 - DNA, 15 bp, Homo sapiens
gggtctatcccagta

SEQ ID NO: 680247 - DNA, 15 bp, Homo sapiens
ggtctatcccagtac

SEQ ID NO: 680248 - DNA, 15 bp, Homo sapiens
gtctatcccagtact

SEQ ID NO: 680249 - DNA, 15 bp, Homo sapiens
tctatcccagtactc

SEQ ID NO: 680250 - DNA, 15 bp, Homo sapiens
ctatcccagtactcc

SEQ ID NO: 680251 - DNA, 15 bp, Homo sapiens
tatcccagtactccg

SEQ ID NO: 680252 - DNA, 15 bp, Homo sapiens
atcccagtactccga

SEQ ID NO: 680253 - DNA, 15 bp, Homo sapiens
tcccagtactccgac

SEQ ID NO: 680254 - DNA, 15 bp, Homo sapiens
cccagtactccgact

SEQ ID NO: 680255 - DNA, 15 bp, Homo sapiens
ccagtactccgactt

SEQ ID NO: 680256 - DNA, 15 bp, Homo sapiens
cagtactccgacttc

SEQ ID NO: 680257 - DNA, 15 bp, Homo sapiens
agtactccgacttct

SEQ ID NO: 680258 - DNA, 15 bp, Homo sapiens
gtactccgacttctc

SEQ ID NO: 680259 - DNA, 15 bp, Homo sapiens
tactccgacttctct

SEQ ID NO: 680260 - DNA, 15 bp, Homo sapiens
actccgacttctctc

SEQ ID NO: 680261 - DNA, 15 bp, Homo sapiens
ctccgacttctctcc

SEQ ID NO: 680262 - DNA, 15 bp, Homo sapiens
tccgacttctctccg

SEQ ID NO: 680263 - DNA, 15 bp, Homo sapiens
ccgacttctctccga

SEQ ID NO: 680264 - DNA, 15 bp, Homo sapiens
cgacttctctccgaa

SEQ ID NO: 680265 - DNA, 15 bp, Homo sapiens
gacttctctccgaat

SEQ ID NO: 680266 - DNA, 15 bp, Homo sapiens
acttctctccgaata

SEQ ID NO: 680267 - DNA, 15 bp, Homo sapiens
cttctctccgaatag

SEQ ID NO: 680268 - DNA, 15 bp, Homo sapiens
ttctctccgaataga

SEQ ID NO: 680269 - DNA, 15 bp, Homo sapiens
tctctccgaatagag

SEQ ID NO: 680270 - DNA, 15 bp, Homo sapiens
ctctccgaatagaga

SEQ ID NO: 680271 - DNA, 15 bp, Homo sapiens
tctccgaatagagaa

SEQ ID NO: 680272 - DNA, 15 bp, Homo sapiens
ctccgaatagagaag

SEQ ID NO: 680273 - DNA, 15 bp, Homo sapiens
tccgaatagagaagc

SEQ ID NO: 680274 - DNA, 15 bp, Homo sapiens
ccgaatagagaagct

SEQ ID NO: 680275 - DNA, 15 bp, Homo sapiens
cgaatagagaagcta

SEQ ID NO: 680276 - DNA, 15 bp, Homo sapiens
gaatagagaagctac

SEQ ID NO: 680277 - DNA, 15 bp, Homo sapiens
aatagagaagctacg

SEQ ID NO: 680278 - DNA, 15 bp, Homo sapiens
atagagaagctacgt

SEQ ID NO: 680279 - DNA, 15 bp, Homo sapiens
tagagaagctacgtg

SEQ ID NO: 680280 - DNA, 15 bp, Homo sapiens
agagaagctacgtga

SEQ ID NO: 680281 - DNA, 15 bp, Homo sapiens
gagaagctacgtgac

SEQ ID NO: 680282 - DNA, 15 bp, Homo sapiens
agaagctacgtgact

SEQ ID NO: 680283 - DNA, 15 bp, Homo sapiens
gaagctacgtgactt

SEQ ID NO: 680284 - DNA, 15 bp, Homo sapiens
aagctacgtgacttg

SEQ ID NO: 680285 - DNA, 15 bp, Homo sapiens
agctacgtgacttgg

SEQ ID NO: 680286 - DNA, 15 bp, Homo sapiens
gctacgtgacttggg

SEQ ID NO: 680287 - DNA, 15 bp, Homo sapiens
ctacgtgacttggga

SEQ ID NO: 680288 - DNA, 15 bp, Homo sapiens
tacgtgacttgggaa

SEQ ID NO: 680289 - DNA, 15 bp, Homo sapiens
acgtgacttgggaaa

SEQ ID NO: 680290 - DNA, 15 bp, Homo sapiens
cgtgacttgggaaag

SEQ ID NO: 680291 - DNA, 15 bp, Homo sapiens
gtgacttgggaaaga

SEQ ID NO: 680292 - DNA, 15 bp, Homo sapiens
tgacttgggaaagag

SEQ ID NO: 680293 - DNA, 15 bp, Homo sapiens
gacttgggaaagagc

SEQ ID NO: 680294 - DNA, 15 bp, Homo sapiens
acttgggaaagagct

SEQ ID NO: 680295 - DNA, 15 bp, Homo sapiens
cttgggaaagagctt

SEQ ID NO: 680296 - DNA, 15 bp, Homo sapiens
ttgggaaagagcttg

SEQ ID NO: 680297 - DNA, 15 bp, Homo sapiens
tgggaaagagcttgg

SEQ ID NO: 680298 - DNA, 15 bp, Homo sapiens
gggaaagagcttgga

SEQ ID NO: 680299 - DNA, 15 bp, Homo sapiens
ggaaagagcttggac

SEQ ID NO: 680300 - DNA, 15 bp, Homo sapiens
gaaagagcttggacc

SEQ ID NO: 680301 - DNA, 15 bp, Homo sapiens
aaagagcttggaccg

SEQ ID NO: 680302 - DNA, 15 bp, Homo sapiens
aagagcttggaccgc

SEQ ID NO: 680303 - DNA, 15 bp, Homo sapiens
agagcttggaccgct

SEQ ID NO: 680304 - DNA, 15 bp, Homo sapiens
gagcttggaccgcta

SEQ ID NO: 680305 - DNA, 15 bp, Homo sapiens
agcttggaccgctag

SEQ ID NO: 680306 - DNA, 15 bp, Homo sapiens
gcttggaccgctaga

SEQ ID NO: 680307 - DNA, 15 bp, Homo sapiens
cttggaccgctagag

SEQ ID NO: 680308 - DNA, 15 bp, Homo sapiens
ttggaccgctagagt

SEQ ID NO: 680309 - DNA, 15 bp, Homo sapiens
tggaccgctagagtt

SEQ ID NO: 680310 - DNA, 15 bp, Homo sapiens
ggaccgctagagttc

SEQ ID NO: 680311 - DNA, 15 bp, Homo sapiens
gaccgctagagttcg

SEQ ID NO: 680312 - DNA, 15 bp, Homo sapiens
accgctagagttcga

SEQ ID NO: 680313 - DNA, 15 bp, Homo sapiens
ccgctagagttcgaa

SEQ ID NO: 680314 - DNA, 15 bp, Homo sapiens
cgctagagttcgaaa

SEQ ID NO: 680315 - DNA, 15 bp, Homo sapiens
gctagagttcgaaag

SEQ ID NO: 680316 - DNA, 15 bp, Homo sapiens
ctagagttcgaaaga

SEQ ID NO: 680317 - DNA, 15 bp, Homo sapiens
tagagttcgaaagaa

SEQ ID NO: 680318 - DNA, 15 bp, Homo sapiens
agagttcgaaagaac

SEQ ID NO: 680319 - DNA, 15 bp, Homo sapiens
gagttcgaaagaact

SEQ ID NO: 680320 - DNA, 15 bp, Homo sapiens
agttcgaaagaactc

SEQ ID NO: 680321 - DNA, 15 bp, Homo sapiens
gttcgaaagaactcc

SEQ ID NO: 680322 - DNA, 15 bp, Homo sapiens
ttcgaaagaactccg

SEQ ID NO: 680323 - DNA, 15 bp, Homo sapiens
tcgaaagaactccgt

SEQ ID NO: 680324 - DNA, 15 bp, Homo sapiens
cgaaagaactccgtg

SEQ ID NO: 680325 - DNA, 15 bp, Homo sapiens
gaaagaactccgtgg

SEQ ID NO: 680326 - DNA, 15 bp, Homo sapiens
aaagaactccgtgga

SEQ ID NO: 680327 - DNA, 15 bp, Homo sapiens
aagaactccgtggat

SEQ ID NO: 680328 - DNA, 15 bp, Homo sapiens
agaactccgtggata

SEQ ID NO: 680329 - DNA, 15 bp, Homo sapiens
gaactccgtggatat

SEQ ID NO: 680330 - DNA, 15 bp, Homo sapiens
aactccgtggatatt

SEQ ID NO: 680331 - DNA, 15 bp, Homo sapiens
actccgtggatattc

SEQ ID NO: 680332 - DNA, 15 bp, Homo sapiens
ctccgtggatattcc

SEQ ID NO: 680333 - DNA, 15 bp, Homo sapiens
tccgtggatattcca

SEQ ID NO: 680334 - DNA, 15 bp, Homo sapiens
ccgtggatattccag

SEQ ID NO: 680335 - DNA, 15 bp, Homo sapiens
cgtggatattccagc

SEQ ID NO: 680336 - DNA, 15 bp, Homo sapiens
gtggatattccagct

SEQ ID NO: 680337 - DNA, 15 bp, Homo sapiens
tggatattccagctt

SEQ ID NO: 680338 - DNA, 15 bp, Homo sapiens
ggatattccagcttt

SEQ ID NO: 680339 - DNA, 15 bp, Homo sapiens
gatattccagctttc

SEQ ID NO: 680340 - DNA, 15 bp, Homo sapiens
atattccagctttcc

SEQ ID NO: 680341 - DNA, 15 bp, Homo sapiens
tattccagctttccc

SEQ ID NO: 680342 - DNA, 15 bp, Homo sapiens
attccagctttccca

SEQ ID NO: 680343 - DNA, 15 bp, Homo sapiens
ttccagctttcccac

SEQ ID NO: 680344 - DNA, 15 bp, Homo sapiens
tccagctttcccaca

SEQ ID NO: 680345 - DNA, 15 bp, Homo sapiens
ccagctttcccacaa

SEQ ID NO: 680346 - DNA, 15 bp, Homo sapiens
cagctttcccacaag

SEQ ID NO: 680347 - DNA, 15 bp, Homo sapiens
agctttcccacaagc

SEQ ID NO: 680348 - DNA, 15 bp, Homo sapiens
gctttcccacaagca

SEQ ID NO: 680349 - DNA, 15 bp, Homo sapiens
ctttcccacaagcac

SEQ ID NO: 680350 - DNA, 15 bp, Homo sapiens
tttcccacaagcact

SEQ ID NO: 680351 - DNA, 15 bp, Homo sapiens
ttcccacaagcactg

SEQ ID NO: 680352 - DNA, 15 bp, Homo sapiens
tcccacaagcactga

SEQ ID NO: 680353 - DNA, 15 bp, Homo sapiens
cccacaagcactgat

SEQ ID NO: 680354 - DNA, 15 bp, Homo sapiens
ccacaagcactgatc

SEQ ID NO: 680355 - DNA, 15 bp, Homo sapiens
cacaagcactgatca

SEQ ID NO: 680356 - DNA, 15 bp, Homo sapiens
acaagcactgatcat

SEQ ID NO: 680357 - DNA, 15 bp, Homo sapiens
caagcactgatcatt

SEQ ID NO: 680358 - DNA, 15 bp, Homo sapiens
aagcactgatcatta

SEQ ID NO: 680359 - DNA, 15 bp, Homo sapiens
agcactgatcattat

SEQ ID NO: 680360 - DNA, 15 bp, Homo sapiens
gcactgatcattatg

SEQ ID NO: 680361 - DNA, 15 bp, Homo sapiens
cactgatcattatga

SEQ ID NO: 680362 - DNA, 15 bp, Homo sapiens
actgatcattatgag

SEQ ID NO: 680363 - DNA, 15 bp, Homo sapiens
ctgatcattatgagc

SEQ ID NO: 680364 - DNA, 15 bp, Homo sapiens
tgatcattatgagcc

SEQ ID NO: 680365 - DNA, 15 bp, Homo sapiens
gatcattatgagcca

SEQ ID NO: 680366 - DNA, 15 bp, Homo sapiens
atcattatgagccag

SEQ ID NO: 680367 - DNA, 15 bp, Homo sapiens
tcattatgagccagt

SEQ ID NO: 680368 - DNA, 15 bp, Homo sapiens
cattatgagccagtt

SEQ ID NO: 680369 - DNA, 15 bp, Homo sapiens
attatgagccagtta

SEQ ID NO: 680370 - DNA, 15 bp, Homo sapiens
ttatgagccagttac

SEQ ID NO: 680371 - DNA, 15 bp, Homo sapiens
tatgagccagttact

SEQ ID NO: 680372 - DNA, 15 bp, Homo sapiens
atgagccagttactt

SEQ ID NO: 680373 - DNA, 15 bp, Homo sapiens
tgagccagttactta

SEQ ID NO: 680374 - DNA, 15 bp, Homo sapiens
gagccagttacttaa

SEQ ID NO: 680375 - DNA, 15 bp, Homo sapiens
agccagttacttaac

SEQ ID NO: 680376 - DNA, 15 bp, Homo sapiens
gccagttacttaacc

SEQ ID NO: 680377 - DNA, 15 bp, Homo sapiens
ccagttacttaaccg

SEQ ID NO: 680378 - DNA, 15 bp, Homo sapiens
cagttacttaaccga

SEQ ID NO: 680379 - DNA, 15 bp, Homo sapiens
agttacttaaccgat

SEQ ID NO: 680380 - DNA, 15 bp, Homo sapiens
gttacttaaccgatc

SEQ ID NO: 680381 - DNA, 15 bp, Homo sapiens
ttacttaaccgatct

SEQ ID NO: 680382 - DNA, 15 bp, Homo sapiens
tacttaaccgatctg

SEQ ID NO: 680383 - DNA, 15 bp, Homo sapiens
acttaaccgatctga

SEQ ID NO: 680384 - DNA, 15 bp, Homo sapiens
cttaaccgatctgag

SEQ ID NO: 680385 - DNA, 15 bp, Homo sapiens
ttaaccgatctgaga

SEQ ID NO: 680386 - DNA, 15 bp, Homo sapiens
taaccgatctgagac

SEQ ID NO: 680387 - DNA, 15 bp, Homo sapiens
aaccgatctgagaca

SEQ ID NO: 680388 - DNA, 15 bp, Homo sapiens
accgatctgagacac

SEQ ID NO: 680389 - DNA, 15 bp, Homo sapiens
ccgatctgagacact

SEQ ID NO: 680390 - DNA, 15 bp, Homo sapiens
cgatctgagacactc

SEQ ID NO: 680391 - DNA, 15 bp, Homo sapiens
gatctgagacactct

SEQ ID NO: 680392 - DNA, 15 bp, Homo sapiens
atctgagacactctc

SEQ ID NO: 680393 - DNA, 15 bp, Homo sapiens
tctgagacactctca

SEQ ID NO: 680394 - DNA, 15 bp, Homo sapiens
ctgagacactctcac

SEQ ID NO: 680395 - DNA, 15 bp, Homo sapiens
tgagacactctcacc

SEQ ID NO: 680396 - DNA, 15 bp, Homo sapiens
gagacactctcacct

SEQ ID NO: 680397 - DNA, 15 bp, Homo sapiens
agacactctcacctc

SEQ ID NO: 680398 - DNA, 15 bp, Homo sapiens
gacactctcacctcc

SEQ ID NO: 680399 - DNA, 15 bp, Homo sapiens
acactctcacctcct

SEQ ID NO: 680400 - DNA, 15 bp, Homo sapiens
cactctcacctccta

SEQ ID NO: 680401 - DNA, 15 bp, Homo sapiens
actctcacctcctaa

SEQ ID NO: 680402 - DNA, 15 bp, Homo sapiens
ctctcacctcctaaa

SEQ ID NO: 680403 - DNA, 15 bp, Homo sapiens
tctcacctcctaaat

SEQ ID NO: 680404 - DNA, 15 bp, Homo sapiens
ctcacctcctaaata

SEQ ID NO: 680405 - DNA, 15 bp, Homo sapiens
tcacctcctaaatag

SEQ ID NO: 680406 - DNA, 15 bp, Homo sapiens
cacctcctaaatagg

SEQ ID NO: 680407 - DNA, 15 bp, Homo sapiens
acctcctaaataggg

SEQ ID NO: 680408 - DNA, 15 bp, Homo sapiens
cctcctaaataggga

SEQ ID NO: 680409 - DNA, 15 bp, Homo sapiens
ctcctaaatagggat

SEQ ID NO: 680410 - DNA, 15 bp, Homo sapiens
tcctaaatagggata

SEQ ID NO: 680411 - DNA, 15 bp, Homo sapiens
cctaaatagggatag

SEQ ID NO: 680412 - DNA, 15 bp, Homo sapiens
ctaaatagggataga

SEQ ID NO: 680413 - DNA, 15 bp, Homo sapiens
taaatagggatagat

SEQ ID NO: 680414 - DNA, 15 bp, Homo sapiens
aaatagggatagatg

SEQ ID NO: 680415 - DNA, 15 bp, Homo sapiens
aatagggatagatga

SEQ ID NO: 680416 - DNA, 15 bp, Homo sapiens
atagggatagatgat

SEQ ID NO: 680417 - DNA, 15 bp, Homo sapiens
tagggatagatgata

SEQ ID NO: 680418 - DNA, 15 bp, Homo sapiens
agggatagatgatac

SEQ ID NO: 680419 - DNA, 15 bp, Homo sapiens
gggatagatgatact

SEQ ID NO: 680420 - DNA, 15 bp, Homo sapiens
ggatagatgatacta

SEQ ID NO: 680421 - DNA, 15 bp, Homo sapiens
gatagatgatactaa

SEQ ID NO: 680422 - DNA, 15 bp, Homo sapiens
atagatgatactaat

SEQ ID NO: 680423 - DNA, 15 bp, Homo sapiens
tagatgatactaatt

SEQ ID NO: 680424 - DNA, 15 bp, Homo sapiens
agatgatactaattt

SEQ ID NO: 680425 - DNA, 15 bp, Homo sapiens
gatgatactaatttg

SEQ ID NO: 680426 - DNA, 15 bp, Homo sapiens
atgatactaatttgc

SEQ ID NO: 680427 - DNA, 15 bp, Homo sapiens
tgatactaatttgca

SEQ ID NO: 680428 - DNA, 15 bp, Homo sapiens
gatactaatttgcag

SEQ ID NO: 680429 - DNA, 15 bp, Homo sapiens
atactaatttgcagg

SEQ ID NO: 680430 - DNA, 15 bp, Homo sapiens
tactaatttgcaggt

SEQ ID NO: 680431 - DNA, 15 bp, Homo sapiens
actaatttgcaggtt

SEQ ID NO: 680432 - DNA, 15 bp, Homo sapiens
ctaatttgcaggttg

SEQ ID NO: 680433 - DNA, 15 bp, Homo sapiens
taatttgcaggttgt

SEQ ID NO: 680434 - DNA, 15 bp, Homo sapiens
aatttgcaggttgtc

SEQ ID NO: 680435 - DNA, 15 bp, Homo sapiens
atttgcaggttgtca

SEQ ID NO: 680436 - DNA, 15 bp, Homo sapiens
tttgcaggttgtcat

SEQ ID NO: 680437 - DNA, 15 bp, Homo sapiens
ttgcaggttgtcatt

SEQ ID NO: 680438 - DNA, 15 bp, Homo sapiens
tgcaggttgtcatta

SEQ ID NO: 680439 - DNA, 15 bp, Homo sapiens
gcaggttgtcattat

SEQ ID NO: 680440 - DNA, 15 bp, Homo sapiens
caggttgtcattatg

SEQ ID NO: 680441 - DNA, 15 bp, Homo sapiens
aggttgtcattatga

SEQ ID NO: 680442 - DNA, 15 bp, Homo sapiens
ggttgtcattatgat

SEQ ID NO: 680443 - DNA, 15 bp, Homo sapiens
gttgtcattatgata

SEQ ID NO: 680444 - DNA, 15 bp, Homo sapiens
ttgtcattatgataa

SEQ ID NO: 680445 - DNA, 15 bp, Homo sapiens
tgtcattatgataag

SEQ ID NO: 680446 - DNA, 15 bp, Homo sapiens
gtcattatgataaga

SEQ ID NO: 680447 - DNA, 15 bp, Homo sapiens
tcattatgataagac

SEQ ID NO: 680448 - DNA, 15 bp, Homo sapiens
cattatgataagaca

SEQ ID NO: 680449 - DNA, 15 bp, Homo sapiens
attatgataagacag

SEQ ID NO: 680450 - DNA, 15 bp, Homo sapiens
ttatgataagacagg

SEQ ID NO: 680451 - DNA, 15 bp, Homo sapiens
tatgataagacagga

SEQ ID NO: 680452 - DNA, 15 bp, Homo sapiens
atgataagacaggat

SEQ ID NO: 680453 - DNA, 15 bp, Homo sapiens
tgataagacaggatc

SEQ ID NO: 680454 - DNA, 15 bp, Homo sapiens
gataagacaggatct

SEQ ID NO: 680455 - DNA, 15 bp, Homo sapiens
ataagacaggatctg

SEQ ID NO: 680456 - DNA, 15 bp, Homo sapiens
taagacaggatctga

SEQ ID NO: 680457 - DNA, 15 bp, Homo sapiens
aagacaggatctgat

SEQ ID NO: 680458 - DNA, 15 bp, Homo sapiens
agacaggatctgatc

SEQ ID NO: 680459 - DNA, 15 bp, Homo sapiens
gacaggatctgatca

SEQ ID NO: 680460 - DNA, 15 bp, Homo sapiens
acaggatctgatcaa

SEQ ID NO: 680461 - DNA, 15 bp, Homo sapiens
caggatctgatcaat

SEQ ID NO: 680462 - DNA, 15 bp, Homo sapiens
aggatctgatcaata

SEQ ID NO: 680463 - DNA, 15 bp, Homo sapiens
ggatctgatcaatat

SEQ ID NO: 680464 - DNA, 15 bp, Homo sapiens
gatctgatcaatata

SEQ ID NO: 680465 - DNA, 15 bp, Homo sapiens
atctgatcaatatat

SEQ ID NO: 680466 - DNA, 15 bp, Homo sapiens
tctgatcaatatatg

SEQ ID NO: 680467 - DNA, 15 bp, Homo sapiens
ctgatcaatatatgt

SEQ ID NO: 680468 - DNA, 15 bp, Homo sapiens
tgatcaatatatgtg

SEQ ID NO: 680469 - DNA, 15 bp, Homo sapiens
gatcaatatatgtga

SEQ ID NO: 680470 - DNA, 15 bp, Homo sapiens
atcaatatatgtgaa

SEQ ID NO: 680471 - DNA, 15 bp, Homo sapiens
tcaatatatgtgaat

SEQ ID NO: 680472 - DNA, 15 bp, Homo sapiens
caatatatgtgaatt

SEQ ID NO: 680473 - DNA, 15 bp, Homo sapiens
aatatatgtgaattg

SEQ ID NO: 680474 - DNA, 15 bp, Homo sapiens
atatatgtgaattgt

SEQ ID NO: 680475 - DNA, 15 bp, Homo sapiens
tatatgtgaattgtt

SEQ ID NO: 680476 - DNA, 15 bp, Homo sapiens
atatgtgaattgttt

SEQ ID NO: 680477 - DNA, 15 bp, Homo sapiens
tatgtgaattgttta

SEQ ID NO: 680478 - DNA, 15 bp, Homo sapiens
atgtgaattgtttat

SEQ ID NO: 680479 - DNA, 15 bp, Homo sapiens
tgtgaattgtttata

SEQ ID NO: 680480 - DNA, 15 bp, Homo sapiens
gtgaattgtttatat

SEQ ID NO: 680481 - DNA, 15 bp, Homo sapiens
tgaattgtttatatt

SEQ ID NO: 680482 - DNA, 15 bp, Homo sapiens
gaattgtttatattt

SEQ ID NO: 680483 - DNA, 15 bp, Homo sapiens
aattgtttatatttg

SEQ ID NO: 680484 - DNA, 15 bp, Homo sapiens
attgtttatatttgg

SEQ ID NO: 680485 - DNA, 15 bp, Homo sapiens
ttgtttatatttgga

SEQ ID NO: 680486 - DNA, 15 bp, Homo sapiens
tgtttatatttggaa

SEQ ID NO: 680487 - DNA, 15 bp, Homo sapiens
gtttatatttggaac

SEQ ID NO: 680488 - DNA, 15 bp, Homo sapiens
tttatatttggaacc

SEQ ID NO: 680489 - DNA, 15 bp, Homo sapiens
ttatatttggaacct

SEQ ID NO: 680490 - DNA, 15 bp, Homo sapiens
tatatttggaacctt

SEQ ID NO: 680491 - DNA, 15 bp, Homo sapiens
atatttggaaccttt

SEQ ID NO: 680492 - DNA, 15 bp, Homo sapiens
tatttggaacctttt

SEQ ID NO: 680493 - DNA, 15 bp, Homo sapiens
atttggaaccttttt

SEQ ID NO: 680494 - DNA, 15 bp, Homo sapiens
tttggaaccttttta

SEQ ID NO: 680495 - DNA, 15 bp, Homo sapiens
ttggaacctttttat

SEQ ID NO: 680496 - DNA, 15 bp, Homo sapiens
tggaacctttttatt

SEQ ID NO: 680497 - DNA, 15 bp, Homo sapiens
ggaacctttttattg

SEQ ID NO: 680498 - DNA, 15 bp, Homo sapiens
gaacctttttattga

SEQ ID NO: 680499 - DNA, 15 bp, Homo sapiens
aacctttttattgag

SEQ ID NO: 680500 - DNA, 15 bp, Homo sapiens
acctttttattgagt

SEQ ID NO: 680501 - DNA, 15 bp, Homo sapiens
cctttttattgagtg

SEQ ID NO: 680502 - DNA, 15 bp, Homo sapiens
ctttttattgagtgg

SEQ ID NO: 680503 - DNA, 15 bp, Homo sapiens
tttttattgagtgga

SEQ ID NO: 680504 - DNA, 15 bp, Homo sapiens
ttttattgagtggaa

SEQ ID NO: 680505 - DNA, 15 bp, Homo sapiens
tttattgagtggaag

SEQ ID NO: 680506 - DNA, 15 bp, Homo sapiens
ttattgagtggaaga

SEQ ID NO: 680507 - DNA, 15 bp, Homo sapiens
tattgagtggaagaa

SEQ ID NO: 680508 - DNA, 15 bp, Homo sapiens
attgagtggaagaag

SEQ ID NO: 680509 - DNA, 15 bp, Homo sapiens
ttgagtggaagaagt

SEQ ID NO: 680510 - DNA, 15 bp, Homo sapiens
tgagtggaagaagtt

SEQ ID NO: 680511 - DNA, 15 bp, Homo sapiens
gagtggaagaagttg

SEQ ID NO: 680512 - DNA, 15 bp, Homo sapiens
agtggaagaagttgt

SEQ ID NO: 680513 - DNA, 15 bp, Homo sapiens
gtggaagaagttgtt

SEQ ID NO: 680514 - DNA, 15 bp, Homo sapiens
tggaagaagttgttt

SEQ ID NO: 680515 - DNA, 15 bp, Homo sapiens
ggaagaagttgtttt

SEQ ID NO: 680516 - DNA, 15 bp, Homo sapiens
gaagaagttgtttta

SEQ ID NO: 680517 - DNA, 15 bp, Homo sapiens
aagaagttgttttaa

SEQ ID NO: 680518 - DNA, 15 bp, Homo sapiens
agaagttgttttaaa

SEQ ID NO: 680519 - DNA, 15 bp, Homo sapiens
gaagttgttttaaat

SEQ ID NO: 680520 - DNA, 15 bp, Homo sapiens
aagttgttttaaata

SEQ ID NO: 680521 - DNA, 15 bp, Homo sapiens
agttgttttaaatat

SEQ ID NO: 680522 - DNA, 15 bp, Homo sapiens
gttgttttaaatatt

SEQ ID NO: 680523 - DNA, 15 bp, Homo sapiens
ttgttttaaatattc

SEQ ID NO: 680524 - DNA, 15 bp, Homo sapiens
tgttttaaatattct

SEQ ID NO: 680525 - DNA, 15 bp, Homo sapiens
gttttaaatattcta

SEQ ID NO: 680526 - DNA, 15 bp, Homo sapiens
ttttaaatattctag

SEQ ID NO: 680527 - DNA, 15 bp, Homo sapiens
tttaaatattctagt

SEQ ID NO: 680528 - DNA, 15 bp, Homo sapiens
ttaaatattctagtc

SEQ ID NO: 680529 - DNA, 15 bp, Homo sapiens
taaatattctagtca

SEQ ID NO: 680530 - DNA, 15 bp, Homo sapiens
aaatattctagtcag

SEQ ID NO: 680531 - DNA, 15 bp, Homo sapiens
aatattctagtcagt

SEQ ID NO: 680532 - DNA, 15 bp, Homo sapiens
atattctagtcagtt

SEQ ID NO: 680533 - DNA, 15 bp, Homo sapiens
tattctagtcagttc

SEQ ID NO: 680534 - DNA, 15 bp, Homo sapiens
attctagtcagttct

SEQ ID NO: 680535 - DNA, 15 bp, Homo sapiens
ttctagtcagttctt

SEQ ID NO: 680536 - DNA, 15 bp, Homo sapiens
tctagtcagttcttt

SEQ ID NO: 680537 - DNA, 15 bp, Homo sapiens
ctagtcagttctttc

SEQ ID NO: 680538 - DNA, 15 bp, Homo sapiens
tagtcagttctttcc

SEQ ID NO: 680539 - DNA, 15 bp, Homo sapiens
agtcagttctttcct

SEQ ID NO: 680540 - DNA, 15 bp, Homo sapiens
gtcagttctttcctg

SEQ ID NO: 680541 - DNA, 15 bp, Homo sapiens
tcagttctttcctgc

SEQ ID NO: 680542 - DNA, 15 bp, Homo sapiens
cagttctttcctgct

SEQ ID NO: 680543 - DNA, 15 bp, Homo sapiens
agttctttcctgctc

SEQ ID NO: 680544 - DNA, 15 bp, Homo sapiens
gttctttcctgctcc

SEQ ID NO: 680545 - DNA, 15 bp, Homo sapiens
ttctttcctgctccc

SEQ ID NO: 680546 - DNA, 15 bp, Homo sapiens
tctttcctgctccca

SEQ ID NO: 680547 - DNA, 15 bp, Homo sapiens
ctttcctgctcccag

SEQ ID NO: 680548 - DNA, 15 bp, Homo sapiens
tttcctgctcccagg

SEQ ID NO: 680549 - DNA, 15 bp, Homo sapiens
ttcctgctcccagga

SEQ ID NO: 680550 - DNA, 15 bp, Homo sapiens
tcctgctcccaggaa

SEQ ID NO: 680551 - DNA, 15 bp, Homo sapiens
cctgctcccaggaaa

SEQ ID NO: 680552 - DNA, 15 bp, Homo sapiens
ctgctcccaggaaag

SEQ ID NO: 680553 - DNA, 15 bp, Homo sapiens
tgctcccaggaaagc

SEQ ID NO: 680554 - DNA, 15 bp, Homo sapiens
gctcccaggaaagcc

SEQ ID NO: 680555 - DNA, 15 bp, Homo sapiens
ctcccaggaaagccc

SEQ ID NO: 680556 - DNA, 15 bp, Homo sapiens
tcccaggaaagcccg

SEQ ID NO: 680557 - DNA, 15 bp, Homo sapiens
cccaggaaagcccgg

SEQ ID NO: 680558 - DNA, 15 bp, Homo sapiens
ccaggaaagcccgga

SEQ ID NO: 680559 - DNA, 15 bp, Homo sapiens
caggaaagcccggat

SEQ ID NO: 680560 - DNA, 15 bp, Homo sapiens
aggaaagcccggatt

SEQ ID NO: 680561 - DNA, 15 bp, Homo sapiens
ggaaagcccggatta

SEQ ID NO: 680562 - DNA, 15 bp, Homo sapiens
gaaagcccggattat

SEQ ID NO: 680563 - DNA, 15 bp, Homo sapiens
aaagcccggattatg

SEQ ID NO: 680564 - DNA, 15 bp, Homo sapiens
aagcccggattatgt

SEQ ID NO: 680565 - DNA, 15 bp, Homo sapiens
agcccggattatgtt

SEQ ID NO: 680566 - DNA, 15 bp, Homo sapiens
gcccggattatgttt

SEQ ID NO: 680567 - DNA, 15 bp, Homo sapiens
cccggattatgtttt

SEQ ID NO: 680568 - DNA, 15 bp, Homo sapiens
ccggattatgtttta

SEQ ID NO: 680569 - DNA, 15 bp, Homo sapiens
cggattatgttttaa

SEQ ID NO: 680570 - DNA, 15 bp, Homo sapiens
ggattatgttttaag

SEQ ID NO: 680571 - DNA, 15 bp, Homo sapiens
gattatgttttaaga

SEQ ID NO: 680572 - DNA, 15 bp, Homo sapiens
attatgttttaagat

SEQ ID NO: 680573 - DNA, 15 bp, Homo sapiens
ttatgttttaagata

SEQ ID NO: 680574 - DNA, 15 bp, Homo sapiens
tatgttttaagataa

SEQ ID NO: 680575 - DNA, 15 bp, Homo sapiens
atgttttaagataag

SEQ ID NO: 680576 - DNA, 15 bp, Homo sapiens
tgttttaagataagc

SEQ ID NO: 680577 - DNA, 15 bp, Homo sapiens
gttttaagataagca

SEQ ID NO: 680578 - DNA, 15 bp, Homo sapiens
ttttaagataagcaa

SEQ ID NO: 680579 - DNA, 15 bp, Homo sapiens
tttaagataagcaaa

SEQ ID NO: 680580 - DNA, 15 bp, Homo sapiens
ttaagataagcaaaa

SEQ ID NO: 680581 - DNA, 15 bp, Homo sapiens
taagataagcaaaat

SEQ ID NO: 680582 - DNA, 15 bp, Homo sapiens
aagataagcaaaatg

SEQ ID NO: 680583 - DNA, 15 bp, Homo sapiens
agataagcaaaatgt

SEQ ID NO: 680584 - DNA, 15 bp, Homo sapiens
gataagcaaaatgtc

SEQ ID NO: 680585 - DNA, 15 bp, Homo sapiens
ataagcaaaatgtct

SEQ ID NO: 680586 - DNA, 15 bp, Homo sapiens
taagcaaaatgtctt

SEQ ID NO: 680587 - DNA, 15 bp, Homo sapiens
aagcaaaatgtctta

SEQ ID NO: 680588 - DNA, 15 bp, Homo sapiens
agcaaaatgtcttaa

SEQ ID NO: 680589 - DNA, 15 bp, Homo sapiens
gcaaaatgtcttaaa

SEQ ID NO: 680590 - DNA, 15 bp, Homo sapiens
caaaatgtcttaaaa

SEQ ID NO: 680591 - DNA, 15 bp, Homo sapiens
aaaatgtcttaaaag

SEQ ID NO: 680592 - DNA, 15 bp, Homo sapiens
aaatgtcttaaaagt

SEQ ID NO: 680593 - DNA, 15 bp, Homo sapiens
aatgtcttaaaagta

SEQ ID NO: 680594 - DNA, 15 bp, Homo sapiens
atgtcttaaaagtaa

SEQ ID NO: 680595 - DNA, 15 bp, Homo sapiens
tgtcttaaaagtaag

SEQ ID NO: 680596 - DNA, 15 bp, Homo sapiens
gtcttaaaagtaagc

SEQ ID NO: 680597 - DNA, 15 bp, Homo sapiens
tcttaaaagtaagct

SEQ ID NO: 680598 - DNA, 15 bp, Homo sapiens
cttaaaagtaagctg

SEQ ID NO: 680599 - DNA, 15 bp, Homo sapiens
ttaaaagtaagctgt

SEQ ID NO: 680600 - DNA, 15 bp, Homo sapiens
taaaagtaagctgtt

SEQ ID NO: 680601 - DNA, 15 bp, Homo sapiens
aaaagtaagctgttt

SEQ ID NO: 680602 - DNA, 15 bp, Homo sapiens
aaagtaagctgtttt

SEQ ID NO: 680603 - DNA, 15 bp, Homo sapiens
aagtaagctgtttta

SEQ ID NO: 680604 - DNA, 15 bp, Homo sapiens
agtaagctgttttac

SEQ ID NO: 680605 - DNA, 15 bp, Homo sapiens
gtaagctgttttact

SEQ ID NO: 680606 - DNA, 15 bp, Homo sapiens
taagctgttttactt

SEQ ID NO: 680607 - DNA, 15 bp, Homo sapiens
aagctgttttacttt

SEQ ID NO: 680608 - DNA, 15 bp, Homo sapiens
agctgttttactttg

SEQ ID NO: 680609 - DNA, 15 bp, Homo sapiens
gctgttttactttga

SEQ ID NO: 680610 - DNA, 15 bp, Homo sapiens
ctgttttactttgaa

SEQ ID NO: 680611 - DNA, 15 bp, Homo sapiens
tgttttactttgaat

SEQ ID NO: 680612 - DNA, 15 bp, Homo sapiens
gttttactttgaatt

SEQ ID NO: 680613 - DNA, 15 bp, Homo sapiens
ttttactttgaattt

SEQ ID NO: 680614 - DNA, 15 bp, Homo sapiens
tttactttgaatttt

SEQ ID NO: 680615 - DNA, 15 bp, Homo sapiens
ttactttgaattttt

SEQ ID NO: 680616 - DNA, 15 bp, Homo sapiens
tactttgaatttttc

SEQ ID NO: 680617 - DNA, 15 bp, Homo sapiens
actttgaatttttcc

SEQ ID NO: 680618 - DNA, 15 bp, Homo sapiens
ctttgaatttttccc

SEQ ID NO: 680619 - DNA, 15 bp, Homo sapiens
tttgaatttttccct

SEQ ID NO: 680620 - DNA, 15 bp, Homo sapiens
ttgaatttttcccta

SEQ ID NO: 680621 - DNA, 15 bp, Homo sapiens
tgaatttttccctaa

SEQ ID NO: 680622 - DNA, 15 bp, Homo sapiens
gaatttttccctaaa

SEQ ID NO: 680623 - DNA, 15 bp, Homo sapiens
aatttttccctaaat

SEQ ID NO: 680624 - DNA, 15 bp, Homo sapiens
atttttccctaaatg

SEQ ID NO: 680625 - DNA, 15 bp, Homo sapiens
tttttccctaaatgt

SEQ ID NO: 680626 - DNA, 15 bp, Homo sapiens
ttttccctaaatgtt

SEQ ID NO: 680627 - DNA, 15 bp, Homo sapiens
tttccctaaatgttg

SEQ ID NO: 680628 - DNA, 15 bp, Homo sapiens
ttccctaaatgttga

SEQ ID NO: 680629 - DNA, 15 bp, Homo sapiens
tccctaaatgttgat

SEQ ID NO: 680630 - DNA, 15 bp, Homo sapiens
ccctaaatgttgatt

SEQ ID NO: 680631 - DNA, 15 bp, Homo sapiens
cctaaatgttgatta

SEQ ID NO: 680632 - DNA, 15 bp, Homo sapiens
ctaaatgttgattag

SEQ ID NO: 680633 - DNA, 15 bp, Homo sapiens
taaatgttgattagt

SEQ ID NO: 680634 - DNA, 15 bp, Homo sapiens
aaatgttgattagtg

SEQ ID NO: 680635 - DNA, 15 bp, Homo sapiens
aatgttgattagtgt

SEQ ID NO: 680636 - DNA, 15 bp, Homo sapiens
atgttgattagtgta

SEQ ID NO: 680637 - DNA, 15 bp, Homo sapiens
tgttgattagtgtac

SEQ ID NO: 680638 - DNA, 15 bp, Homo sapiens
gttgattagtgtact

SEQ ID NO: 680639 - DNA, 15 bp, Homo sapiens
ttgattagtgtacta

SEQ ID NO: 680640 - DNA, 15 bp, Homo sapiens
tgattagtgtactag

SEQ ID NO: 680641 - DNA, 15 bp, Homo sapiens
gattagtgtactaga

SEQ ID NO: 680642 - DNA, 15 bp, Homo sapiens
attagtgtactagat

SEQ ID NO: 680643 - DNA, 15 bp, Homo sapiens
ttagtgtactagatc

SEQ ID NO: 680644 - DNA, 15 bp, Homo sapiens
tagtgtactagatcc

SEQ ID NO: 680645 - DNA, 15 bp, Homo sapiens
agtgtactagatcca

SEQ ID NO: 680646 - DNA, 15 bp, Homo sapiens
gtgtactagatccat

SEQ ID NO: 680647 - DNA, 15 bp, Homo sapiens
tgtactagatccatt

SEQ ID NO: 680648 - DNA, 15 bp, Homo sapiens
gtactagatccattt

SEQ ID NO: 680649 - DNA, 15 bp, Homo sapiens
tactagatccatttt

SEQ ID NO: 680650 - DNA, 15 bp, Homo sapiens
actagatccatttta

SEQ ID NO: 680651 - DNA, 15 bp, Homo sapiens
ctagatccattttaa

SEQ ID NO: 680652 - DNA, 15 bp, Homo sapiens
tagatccattttaat

SEQ ID NO: 680653 - DNA, 15 bp, Homo sapiens
agatccattttaatt

SEQ ID NO: 680654 - DNA, 15 bp, Homo sapiens
gatccattttaattt

SEQ ID NO: 680655 - DNA, 15 bp, Homo sapiens
atccattttaatttg

SEQ ID NO: 680656 - DNA, 15 bp, Homo sapiens
tccattttaatttgg

SEQ ID NO: 680657 - DNA, 15 bp, Homo sapiens
ccattttaatttgga

SEQ ID NO: 680658 - DNA, 15 bp, Homo sapiens
cattttaatttggaa

SEQ ID NO: 680659 - DNA, 15 bp, Homo sapiens
attttaatttggaaa

SEQ ID NO: 680660 - DNA, 15 bp, Homo sapiens
ttttaatttggaaag

SEQ ID NO: 680661 - DNA, 15 bp, Homo sapiens
tttaatttggaaagt

SEQ ID NO: 680662 - DNA, 15 bp, Homo sapiens
ttaatttggaaagtg

SEQ ID NO: 680663 - DNA, 15 bp, Homo sapiens
taatttggaaagtga

SEQ ID NO: 680664 - DNA, 15 bp, Homo sapiens
aatttggaaagtgaa

SEQ ID NO: 680665 - DNA, 15 bp, Homo sapiens
atttggaaagtgaag

SEQ ID NO: 680666 - DNA, 15 bp, Homo sapiens
tttggaaagtgaagt

SEQ ID NO: 680667 - DNA, 15 bp, Homo sapiens
ttggaaagtgaagtg

SEQ ID NO: 680668 - DNA, 15 bp, Homo sapiens
tggaaagtgaagtgc

SEQ ID NO: 680669 - DNA, 15 bp, Homo sapiens
ggaaagtgaagtgct

SEQ ID NO: 680670 - DNA, 15 bp, Homo sapiens
gaaagtgaagtgcta

SEQ ID NO: 680671 - DNA, 15 bp, Homo sapiens
aaagtgaagtgctac

SEQ ID NO: 680672 - DNA, 15 bp, Homo sapiens
aagtgaagtgctact

SEQ ID NO: 680673 - DNA, 15 bp, Homo sapiens
agtgaagtgctactt

SEQ ID NO: 680674 - DNA, 15 bp, Homo sapiens
gtgaagtgctactta

SEQ ID NO: 680675 - DNA, 15 bp, Homo sapiens
tgaagtgctacttat

SEQ ID NO: 680676 - DNA, 15 bp, Homo sapiens
gaagtgctacttatt

SEQ ID NO: 680677 - DNA, 15 bp, Homo sapiens
aagtgctacttattt

SEQ ID NO: 680678 - DNA, 15 bp, Homo sapiens
agtgctacttatttg

SEQ ID NO: 680679 - DNA, 15 bp, Homo sapiens
gtgctacttatttga

SEQ ID NO: 680680 - DNA, 15 bp, Homo sapiens
tgctacttatttgaa

SEQ ID NO: 680681 - DNA, 15 bp, Homo sapiens
gctacttatttgaac

SEQ ID NO: 680682 - DNA, 15 bp, Homo sapiens
ctacttatttgaact

SEQ ID NO: 680683 - DNA, 15 bp, Homo sapiens
tacttatttgaactt

SEQ ID NO: 680684 - DNA, 15 bp, Homo sapiens
acttatttgaacttc

SEQ ID NO: 680685 - DNA, 15 bp, Homo sapiens
cttatttgaacttct

SEQ ID NO: 680686 - DNA, 15 bp, Homo sapiens
ttatttgaacttctt

SEQ ID NO: 680687 - DNA, 15 bp, Homo sapiens
tatttgaacttctta

SEQ ID NO: 680688 - DNA, 15 bp, Homo sapiens
atttgaacttcttaa

SEQ ID NO: 680689 - DNA, 15 bp, Homo sapiens
tttgaacttcttaaa

SEQ ID NO: 680690 - DNA, 15 bp, Homo sapiens
ttgaacttcttaaaa

SEQ ID NO: 680691 - DNA, 15 bp, Homo sapiens
tgaacttcttaaaaa

SEQ ID NO: 680692 - DNA, 15 bp, Homo sapiens
gaacttcttaaaaat

SEQ ID NO: 680693 - DNA, 15 bp, Homo sapiens
aacttcttaaaaatg

SEQ ID NO: 680694 - DNA, 15 bp, Homo sapiens
acttcttaaaaatgc

SEQ ID NO: 680695 - DNA, 15 bp, Homo sapiens
cttcttaaaaatgct

SEQ ID NO: 680696 - DNA, 15 bp, Homo sapiens
ttcttaaaaatgcta

SEQ ID NO: 680697 - DNA, 15 bp, Homo sapiens
tcttaaaaatgctaa

SEQ ID NO: 680698 - DNA, 15 bp, Homo sapiens
cttaaaaatgctaat

SEQ ID NO: 680699 - DNA, 15 bp, Homo sapiens
ttaaaaatgctaatt

SEQ ID NO: 680700 - DNA, 15 bp, Homo sapiens
taaaaatgctaattt

SEQ ID NO: 680701 - DNA, 15 bp, Homo sapiens
aaaaatgctaatttt

SEQ ID NO: 680702 - DNA, 15 bp, Homo sapiens
aaaatgctaatttta

SEQ ID NO: 680703 - DNA, 15 bp, Homo sapiens
aaatgctaattttaa

SEQ ID NO: 680704 - DNA, 15 bp, Homo sapiens
aatgctaattttaac

SEQ ID NO: 680705 - DNA, 15 bp, Homo sapiens
atgctaattttaaca

SEQ ID NO: 680706 - DNA, 15 bp, Homo sapiens
tgctaattttaacat

SEQ ID NO: 680707 - DNA, 15 bp, Homo sapiens
gctaattttaacatc

SEQ ID NO: 680708 - DNA, 15 bp, Homo sapiens
ctaattttaacatct

SEQ ID NO: 680709 - DNA, 15 bp, Homo sapiens
taattttaacatcta

SEQ ID NO: 680710 - DNA, 15 bp, Homo sapiens
aattttaacatctaa

SEQ ID NO: 680711 - DNA, 15 bp, Homo sapiens
attttaacatctaaa

SEQ ID NO: 680712 - DNA, 15 bp, Homo sapiens
ttttaacatctaaag

SEQ ID NO: 680713 - DNA, 15 bp, Homo sapiens
tttaacatctaaaga

SEQ ID NO: 680714 - DNA, 15 bp, Homo sapiens
ttaacatctaaagag

SEQ ID NO: 680715 - DNA, 15 bp, Homo sapiens
taacatctaaagagt

SEQ ID NO: 680716 - DNA, 15 bp, Homo sapiens
aacatctaaagagtt

SEQ ID NO: 680717 - DNA, 15 bp, Homo sapiens
acatctaaagagtta

SEQ ID NO: 680718 - DNA, 15 bp, Homo sapiens
catctaaagagttaa

SEQ ID NO: 680719 - DNA, 15 bp, Homo sapiens
atctaaagagttaac

SEQ ID NO: 680720 - DNA, 15 bp, Homo sapiens
tctaaagagttaact

SEQ ID NO: 680721 - DNA, 15 bp, Homo sapiens
ctaaagagttaacta

SEQ ID NO: 680722 - DNA, 15 bp, Homo sapiens
taaagagttaactaa

SEQ ID NO: 680723 - DNA, 15 bp, Homo sapiens
aaagagttaactaag

SEQ ID NO: 680724 - DNA, 15 bp, Homo sapiens
aagagttaactaaga

SEQ ID NO: 680725 - DNA, 15 bp, Homo sapiens
agagttaactaagaa

SEQ ID NO: 680726 - DNA, 15 bp, Homo sapiens
gagttaactaagaaa

SEQ ID NO: 680727 - DNA, 15 bp, Homo sapiens
agttaactaagaaaa

SEQ ID NO: 680728 - DNA, 15 bp, Homo sapiens
gttaactaagaaaag

SEQ ID NO: 680729 - DNA, 15 bp, Homo sapiens
ttaactaagaaaagc

SEQ ID NO: 680730 - DNA, 15 bp, Homo sapiens
taactaagaaaagct

SEQ ID NO: 680731 - DNA, 15 bp, Homo sapiens
aactaagaaaagctt

SEQ ID NO: 680732 - DNA, 15 bp, Homo sapiens
actaagaaaagctta

SEQ ID NO: 680733 - DNA, 15 bp, Homo sapiens
ctaagaaaagcttag

SEQ ID NO: 680734 - DNA, 15 bp, Homo sapiens
taagaaaagcttagt

SEQ ID NO: 680735 - DNA, 15 bp, Homo sapiens
aagaaaagcttagta

SEQ ID NO: 680736 - DNA, 15 bp, Homo sapiens
agaaaagcttagtaa

SEQ ID NO: 680737 - DNA, 15 bp, Homo sapiens
gaaaagcttagtaac

SEQ ID NO: 680738 - DNA, 15 bp, Homo sapiens
aaaagcttagtaaca

SEQ ID NO: 680739 - DNA, 15 bp, Homo sapiens
aaagcttagtaacat

SEQ ID NO: 680740 - DNA, 15 bp, Homo sapiens
aagcttagtaacatg

SEQ ID NO: 680741 - DNA, 15 bp, Homo sapiens
agcttagtaacatga

SEQ ID NO: 680742 - DNA, 15 bp, Homo sapiens
gcttagtaacatgat

SEQ ID NO: 680743 - DNA, 15 bp, Homo sapiens
cttagtaacatgatg

SEQ ID NO: 680744 - DNA, 15 bp, Homo sapiens
ttagtaacatgatgt

SEQ ID NO: 680745 - DNA, 15 bp, Homo sapiens
tagtaacatgatgta

SEQ ID NO: 680746 - DNA, 15 bp, Homo sapiens
agtaacatgatgtac

SEQ ID NO: 680747 - DNA, 15 bp, Homo sapiens
gtaacatgatgtacc

SEQ ID NO: 680748 - DNA, 15 bp, Homo sapiens
taacatgatgtacca

SEQ ID NO: 680749 - DNA, 15 bp, Homo sapiens
aacatgatgtaccaa

SEQ ID NO: 680750 - DNA, 15 bp, Homo sapiens
acatgatgtaccaag

SEQ ID NO: 680751 - DNA, 15 bp, Homo sapiens
catgatgtaccaagt

SEQ ID NO: 680752 - DNA, 15 bp, Homo sapiens
atgatgtaccaagtt

SEQ ID NO: 680753 - DNA, 15 bp, Homo sapiens
tgatgtaccaagttg

SEQ ID NO: 680754 - DNA, 15 bp, Homo sapiens
gatgtaccaagttga

SEQ ID NO: 680755 - DNA, 15 bp, Homo sapiens
atgtaccaagttgaa

SEQ ID NO: 680756 - DNA, 15 bp, Homo sapiens
tgtaccaagttgaat

SEQ ID NO: 680757 - DNA, 15 bp, Homo sapiens
gtaccaagttgaata

SEQ ID NO: 680758 - DNA, 15 bp, Homo sapiens
taccaagttgaatat

SEQ ID NO: 680759 - DNA, 15 bp, Homo sapiens
accaagttgaatatg

SEQ ID NO: 680760 - DNA, 15 bp, Homo sapiens
ccaagttgaatatgc

SEQ ID NO: 680761 - DNA, 15 bp, Homo sapiens
caagttgaatatgct

SEQ ID NO: 680762 - DNA, 15 bp, Homo sapiens
aagttgaatatgctg

SEQ ID NO: 680763 - DNA, 15 bp, Homo sapiens
agttgaatatgctgt

SEQ ID NO: 680764 - DNA, 15 bp, Homo sapiens
gttgaatatgctgtt

SEQ ID NO: 680765 - DNA, 15 bp, Homo sapiens
ttgaatatgctgtta

SEQ ID NO: 680766 - DNA, 15 bp, Homo sapiens
tgaatatgctgttat

SEQ ID NO: 680767 - DNA, 15 bp, Homo sapiens
gaatatgctgttatc

SEQ ID NO: 680768 - DNA, 15 bp, Homo sapiens
aatatgctgttatcc

SEQ ID NO: 680769 - DNA, 15 bp, Homo sapiens
atatgctgttatcct

SEQ ID NO: 680770 - DNA, 15 bp, Homo sapiens
tatgctgttatcctt

SEQ ID NO: 680771 - DNA, 15 bp, Homo sapiens
atgctgttatcctta

SEQ ID NO: 680772 - DNA, 15 bp, Homo sapiens
tgctgttatccttat

SEQ ID NO: 680773 - DNA, 15 bp, Homo sapiens
gctgttatccttatt

SEQ ID NO: 680774 - DNA, 15 bp, Homo sapiens
ctgttatccttattt

SEQ ID NO: 680775 - DNA, 15 bp, Homo sapiens
tgttatccttattta

SEQ ID NO: 680776 - DNA, 15 bp, Homo sapiens
gttatccttatttag

SEQ ID NO: 680777 - DNA, 15 bp, Homo sapiens
ttatccttatttaga

SEQ ID NO: 680778 - DNA, 15 bp, Homo sapiens
tatccttatttagaa

SEQ ID NO: 680779 - DNA, 15 bp, Homo sapiens
atccttatttagaat

SEQ ID NO: 680780 - DNA, 15 bp, Homo sapiens
tccttatttagaata

SEQ ID NO: 680781 - DNA, 15 bp, Homo sapiens
ccttatttagaatag

SEQ ID NO: 680782 - DNA, 15 bp, Homo sapiens
cttatttagaataga

SEQ ID NO: 680783 - DNA, 15 bp, Homo sapiens
ttatttagaatagaa

SEQ ID NO: 680784 - DNA, 15 bp, Homo sapiens
tatttagaatagaaa

SEQ ID NO: 680785 - DNA, 15 bp, Homo sapiens
atttagaatagaaaa

SEQ ID NO: 680786 - DNA, 15 bp, Homo sapiens
tttagaatagaaaat

SEQ ID NO: 680787 - DNA, 15 bp, Homo sapiens
ttagaatagaaaatt

SEQ ID NO: 680788 - DNA, 15 bp, Homo sapiens
tagaatagaaaattg

SEQ ID NO: 680789 - DNA, 15 bp, Homo sapiens
agaatagaaaattgg

SEQ ID NO: 680790 - DNA, 15 bp, Homo sapiens
gaatagaaaattggt

SEQ ID NO: 680791 - DNA, 15 bp, Homo sapiens
aatagaaaattggta

SEQ ID NO: 680792 - DNA, 15 bp, Homo sapiens
atagaaaattggtat

SEQ ID NO: 680793 - DNA, 15 bp, Homo sapiens
tagaaaattggtatt

SEQ ID NO: 680794 - DNA, 15 bp, Homo sapiens
agaaaattggtattt

SEQ ID NO: 680795 - DNA, 15 bp, Homo sapiens
gaaaattggtatttc

SEQ ID NO: 680796 - DNA, 15 bp, Homo sapiens
aaaattggtatttct

SEQ ID NO: 680797 - DNA, 15 bp, Homo sapiens
aaattggtatttcta

SEQ ID NO: 680798 - DNA, 15 bp, Homo sapiens
aattggtatttctac

SEQ ID NO: 680799 - DNA, 15 bp, Homo sapiens
attggtatttctacg

SEQ ID NO: 680800 - DNA, 15 bp, Homo sapiens
ttggtatttctacgt

SEQ ID NO: 680801 - DNA, 15 bp, Homo sapiens
tggtatttctacgtt

SEQ ID NO: 680802 - DNA, 15 bp, Homo sapiens
ggtatttctacgttt

SEQ ID NO: 680803 - DNA, 15 bp, Homo sapiens
gtatttctacgtttt

SEQ ID NO: 680804 - DNA, 15 bp, Homo sapiens
tatttctacgtttta

SEQ ID NO: 680805 - DNA, 15 bp, Homo sapiens
atttctacgttttat

SEQ ID NO: 680806 - DNA, 15 bp, Homo sapiens
tttctacgttttatc

SEQ ID NO: 680807 - DNA, 15 bp, Homo sapiens
ttctacgttttatcc

SEQ ID NO: 680808 - DNA, 15 bp, Homo sapiens
tctacgttttatcca

SEQ ID NO: 680809 - DNA, 15 bp, Homo sapiens
ctacgttttatccat

SEQ ID NO: 680810 - DNA, 15 bp, Homo sapiens
tacgttttatccatt

SEQ ID NO: 680811 - DNA, 15 bp, Homo sapiens
acgttttatccattc

SEQ ID NO: 680812 - DNA, 15 bp, Homo sapiens
cgttttatccattct

SEQ ID NO: 680813 - DNA, 15 bp, Homo sapiens
gttttatccattcta

SEQ ID NO: 680814 - DNA, 15 bp, Homo sapiens
ttttatccattctaa

SEQ ID NO: 680815 - DNA, 15 bp, Homo sapiens
tttatccattctaag

SEQ ID NO: 680816 - DNA, 15 bp, Homo sapiens
ttatccattctaagg

SEQ ID NO: 680817 - DNA, 15 bp, Homo sapiens
tatccattctaaggc

SEQ ID NO: 680818 - DNA, 15 bp, Homo sapiens
atccattctaaggca

SEQ ID NO: 680819 - DNA, 15 bp, Homo sapiens
tccattctaaggcag

SEQ ID NO: 680820 - DNA, 15 bp, Homo sapiens
ccattctaaggcagg

SEQ ID NO: 680821 - DNA, 15 bp, Homo sapiens
cattctaaggcaggt

SEQ ID NO: 680822 - DNA, 15 bp, Homo sapiens
attctaaggcaggtt

SEQ ID NO: 680823 - DNA, 15 bp, Homo sapiens
ttctaaggcaggtta

SEQ ID NO: 680824 - DNA, 15 bp, Homo sapiens
tctaaggcaggttaa

SEQ ID NO: 680825 - DNA, 15 bp, Homo sapiens
ctaaggcaggttaaa

SEQ ID NO: 680826 - DNA, 15 bp, Homo sapiens
taaggcaggttaaaa

SEQ ID NO: 680827 - DNA, 15 bp, Homo sapiens
aaggcaggttaaaaa

SEQ ID NO: 680828 - DNA, 15 bp, Homo sapiens
aggcaggttaaaaaa

SEQ ID NO: 680829 - DNA, 15 bp, Homo sapiens
ggcaggttaaaaaat

SEQ ID NO: 680830 - DNA, 15 bp, Homo sapiens
gcaggttaaaaaatt

SEQ ID NO: 680831 - DNA, 15 bp, Homo sapiens
caggttaaaaaattg

SEQ ID NO: 680832 - DNA, 15 bp, Homo sapiens
aggttaaaaaattgt

SEQ ID NO: 680833 - DNA, 15 bp, Homo sapiens
ggttaaaaaattgta

SEQ ID NO: 680834 - DNA, 15 bp, Homo sapiens
gttaaaaaattgtat

SEQ ID NO: 680835 - DNA, 15 bp, Homo sapiens
ttaaaaaattgtatt

SEQ ID NO: 680836 - DNA, 15 bp, Homo sapiens
taaaaaattgtattt

SEQ ID NO: 680837 - DNA, 15 bp, Homo sapiens
aaaaaattgtatttc

SEQ ID NO: 680838 - DNA, 15 bp, Homo sapiens
aaaaattgtatttcc

SEQ ID NO: 680839 - DNA, 15 bp, Homo sapiens
aaaattgtatttcca

SEQ ID NO: 680840 - DNA, 15 bp, Homo sapiens
aaattgtatttccat

SEQ ID NO: 680841 - DNA, 15 bp, Homo sapiens
aattgtatttccatg

SEQ ID NO: 680842 - DNA, 15 bp, Homo sapiens
attgtatttccatga

SEQ ID NO: 680843 - DNA, 15 bp, Homo sapiens
ttgtatttccatgac

SEQ ID NO: 680844 - DNA, 15 bp, Homo sapiens
tgtatttccatgact

SEQ ID NO: 680845 - DNA, 15 bp, Homo sapiens
gtatttccatgacta

SEQ ID NO: 680846 - DNA, 15 bp, Homo sapiens
tatttccatgactac

SEQ ID NO: 680847 - DNA, 15 bp, Homo sapiens
atttccatgactacc

SEQ ID NO: 680848 - DNA, 15 bp, Homo sapiens
tttccatgactacct

SEQ ID NO: 680849 - DNA, 15 bp, Homo sapiens
ttccatgactaccta

SEQ ID NO: 680850 - DNA, 15 bp, Homo sapiens
tccatgactacctat

SEQ ID NO: 680851 - DNA, 15 bp, Homo sapiens
ccatgactacctata

SEQ ID NO: 680852 - DNA, 15 bp, Homo sapiens
catgactacctatat

SEQ ID NO: 680853 - DNA, 15 bp, Homo sapiens
atgactacctatata

SEQ ID NO: 680854 - DNA, 15 bp, Homo sapiens
tgactacctatatat

SEQ ID NO: 680855 - DNA, 15 bp, Homo sapiens
gactacctatatatt

SEQ ID NO: 680856 - DNA, 15 bp, Homo sapiens
actacctatatattt

SEQ ID NO: 680857 - DNA, 15 bp, Homo sapiens
ctacctatatatttc

SEQ ID NO: 680858 - DNA, 15 bp, Homo sapiens
tacctatatatttct

SEQ ID NO: 680859 - DNA, 15 bp, Homo sapiens
acctatatatttctt

SEQ ID NO: 680860 - DNA, 15 bp, Homo sapiens
cctatatatttcttg

SEQ ID NO: 680861 - DNA, 15 bp, Homo sapiens
ctatatatttcttga

SEQ ID NO: 680862 - DNA, 15 bp, Homo sapiens
tatatatttcttgaa

SEQ ID NO: 680863 - DNA, 15 bp, Homo sapiens
atatatttcttgaat

SEQ ID NO: 680864 - DNA, 15 bp, Homo sapiens
tatatttcttgaatt

SEQ ID NO: 680865 - DNA, 15 bp, Homo sapiens
atatttcttgaattt

SEQ ID NO: 680866 - DNA, 15 bp, Homo sapiens
tatttcttgaattta

SEQ ID NO: 680867 - DNA, 15 bp, Homo sapiens
atttcttgaatttat

SEQ ID NO: 680868 - DNA, 15 bp, Homo sapiens
tttcttgaatttatt

SEQ ID NO: 680869 - DNA, 15 bp, Homo sapiens
ttcttgaatttatta

SEQ ID NO: 680870 - DNA, 15 bp, Homo sapiens
tcttgaatttattat

SEQ ID NO: 680871 - DNA, 15 bp, Homo sapiens
cttgaatttattatt

SEQ ID NO: 680872 - DNA, 15 bp, Homo sapiens
ttgaatttattattg

SEQ ID NO: 680873 - DNA, 15 bp, Homo sapiens
tgaatttattattgt

SEQ ID NO: 680874 - DNA, 15 bp, Homo sapiens
gaatttattattgta

SEQ ID NO: 680875 - DNA, 15 bp, Homo sapiens
aatttattattgtaa

SEQ ID NO: 680876 - DNA, 15 bp, Homo sapiens
atttattattgtaaa

SEQ ID NO: 680877 - DNA, 15 bp, Homo sapiens
tttattattgtaaag

SEQ ID NO: 680878 - DNA, 15 bp, Homo sapiens
ttattattgtaaagt

SEQ ID NO: 680879 - DNA, 15 bp, Homo sapiens
tattattgtaaagtt

SEQ ID NO: 680880 - DNA, 15 bp, Homo sapiens
attattgtaaagttg

SEQ ID NO: 680881 - DNA, 15 bp, Homo sapiens
ttattgtaaagttga

SEQ ID NO: 680882 - DNA, 15 bp, Homo sapiens
tattgtaaagttgat

SEQ ID NO: 680883 - DNA, 15 bp, Homo sapiens
attgtaaagttgatt

SEQ ID NO: 680884 - DNA, 15 bp, Homo sapiens
ttgtaaagttgattc

SEQ ID NO: 680885 - DNA, 15 bp, Homo sapiens
tgtaaagttgattca

SEQ ID NO: 680886 - DNA, 15 bp, Homo sapiens
gtaaagttgattcat

SEQ ID NO: 680887 - DNA, 15 bp, Homo sapiens
taaagttgattcata

SEQ ID NO: 680888 - DNA, 15 bp, Homo sapiens
aaagttgattcatag

SEQ ID NO: 680889 - DNA, 15 bp, Homo sapiens
aagttgattcatagt

SEQ ID NO: 680890 - DNA, 15 bp, Homo sapiens
agttgattcatagtc

SEQ ID NO: 680891 - DNA, 15 bp, Homo sapiens
gttgattcatagtca

SEQ ID NO: 680892 - DNA, 15 bp, Homo sapiens
ttgattcatagtcaa

SEQ ID NO: 680893 - DNA, 15 bp, Homo sapiens
tgattcatagtcaaa

SEQ ID NO: 680894 - DNA, 15 bp, Homo sapiens
gattcatagtcaaac

SEQ ID NO: 680895 - DNA, 15 bp, Homo sapiens
attcatagtcaaaca

SEQ ID NO: 680896 - DNA, 15 bp, Homo sapiens
ttcatagtcaaacaa

SEQ ID NO: 680897 - DNA, 15 bp, Homo sapiens
tcatagtcaaacaat

SEQ ID NO: 680898 - DNA, 15 bp, Homo sapiens
catagtcaaacaatt

SEQ ID NO: 680899 - DNA, 15 bp, Homo sapiens
atagtcaaacaatta

SEQ ID NO: 680900 - DNA, 15 bp, Homo sapiens
tagtcaaacaattaa

SEQ ID NO: 680901 - DNA, 15 bp, Homo sapiens
agtcaaacaattaaa

SEQ ID NO: 680902 - DNA, 15 bp, Homo sapiens
gtcaaacaattaaat

SEQ ID NO: 680903 - DNA, 15 bp, Homo sapiens
tcaaacaattaaatg

SEQ ID NO: 680904 - DNA, 15 bp, Homo sapiens
caaacaattaaatgt

SEQ ID NO: 680905 - DNA, 15 bp, Homo sapiens
aaacaattaaatgtt

SEQ ID NO: 680906 - DNA, 15 bp, Homo sapiens
aacaattaaatgttt

SEQ ID NO: 680907 - DNA, 15 bp, Homo sapiens
acaattaaatgttta

SEQ ID NO: 680908 - DNA, 15 bp, Homo sapiens
caattaaatgtttaa

SEQ ID NO: 680909 - DNA, 15 bp, Homo sapiens
aattaaatgtttaaa

SEQ ID NO: 680910 - DNA, 15 bp, Homo sapiens
attaaatgtttaaat

SEQ ID NO: 680911 - DNA, 15 bp, Homo sapiens
ttaaatgtttaaatt

SEQ ID NO: 680912 - DNA, 15 bp, Homo sapiens
taaatgtttaaatta

SEQ ID NO: 680913 - DNA, 15 bp, Homo sapiens
aaatgtttaaattaa

SEQ ID NO: 680914 - DNA, 15 bp, Homo sapiens
aatgtttaaattaag

SEQ ID NO: 680915 - DNA, 15 bp, Homo sapiens
atgtttaaattaaga

SEQ ID NO: 680916 - DNA, 15 bp, Homo sapiens
tgtttaaattaagat

SEQ ID NO: 680917 - DNA, 15 bp, Homo sapiens
gtttaaattaagatt

SEQ ID NO: 680918 - DNA, 15 bp, Homo sapiens
tttaaattaagatta

SEQ ID NO: 680919 - DNA, 15 bp, Homo sapiens
ttaaattaagattaa

SEQ ID NO: 680920 - DNA, 15 bp, Homo sapiens
taaattaagattaag

SEQ ID NO: 680921 - DNA, 15 bp, Homo sapiens
aaattaagattaaga

SEQ ID NO: 680922 - DNA, 15 bp, Homo sapiens
aattaagattaagac

SEQ ID NO: 680923 - DNA, 15 bp, Homo sapiens
attaagattaagaca

SEQ ID NO: 680924 - DNA, 15 bp, Homo sapiens
ttaagattaagacac

SEQ ID NO: 680925 - DNA, 15 bp, Homo sapiens
taagattaagacact

SEQ ID NO: 680926 - DNA, 15 bp, Homo sapiens
aagattaagacacta

SEQ ID NO: 680927 - DNA, 15 bp, Homo sapiens
agattaagacactag

SEQ ID NO: 680928 - DNA, 15 bp, Homo sapiens
gattaagacactaga

SEQ ID NO: 680929 - DNA, 15 bp, Homo sapiens
attaagacactagag

SEQ ID NO: 680930 - DNA, 15 bp, Homo sapiens
ttaagacactagaga

SEQ ID NO: 680931 - DNA, 15 bp, Homo sapiens
taagacactagagaa

SEQ ID NO: 680932 - DNA, 15 bp, Homo sapiens
aagacactagagaat

SEQ ID NO: 680933 - DNA, 15 bp, Homo sapiens
agacactagagaatg

SEQ ID NO: 680934 - DNA, 15 bp, Homo sapiens
gacactagagaatga

SEQ ID NO: 680935 - DNA, 15 bp, Homo sapiens
acactagagaatgat

SEQ ID NO: 680936 - DNA, 15 bp, Homo sapiens
cactagagaatgatt

SEQ ID NO: 680937 - DNA, 15 bp, Homo sapiens
actagagaatgattt

SEQ ID NO: 680938 - DNA, 15 bp, Homo sapiens
ctagagaatgattta

SEQ ID NO: 680939 - DNA, 15 bp, Homo sapiens
tagagaatgatttat

SEQ ID NO: 680940 - DNA, 15 bp, Homo sapiens
agagaatgatttatt

SEQ ID NO: 680941 - DNA, 15 bp, Homo sapiens
gagaatgatttattt

SEQ ID NO: 680942 - DNA, 15 bp, Homo sapiens
agaatgatttatttg

SEQ ID NO: 680943 - DNA, 15 bp, Homo sapiens
gaatgatttatttgc

SEQ ID NO: 680944 - DNA, 15 bp, Homo sapiens
aatgatttatttgct

SEQ ID NO: 680945 - DNA, 15 bp, Homo sapiens
atgatttatttgctg

SEQ ID NO: 680946 - DNA, 15 bp, Homo sapiens
tgatttatttgctgt

SEQ ID NO: 680947 - DNA, 15 bp, Homo sapiens
gatttatttgctgtc

SEQ ID NO: 680948 - DNA, 15 bp, Homo sapiens
atttatttgctgtcc

SEQ ID NO: 680949 - DNA, 15 bp, Homo sapiens
tttatttgctgtcct

SEQ ID NO: 680950 - DNA, 15 bp, Homo sapiens
ttatttgctgtcctt

SEQ ID NO: 680951 - DNA, 15 bp, Homo sapiens
tatttgctgtccttt

SEQ ID NO: 680952 - DNA, 15 bp, Homo sapiens
atttgctgtccttta

SEQ ID NO: 680953 - DNA, 15 bp, Homo sapiens
tttgctgtcctttaa

SEQ ID NO: 680954 - DNA, 15 bp, Homo sapiens
ttgctgtcctttaat

SEQ ID NO: 680955 - DNA, 15 bp, Homo sapiens
tgctgtcctttaatt

SEQ ID NO: 680956 - DNA, 15 bp, Homo sapiens
gctgtcctttaattg

SEQ ID NO: 680957 - DNA, 15 bp, Homo sapiens
ctgtcctttaattgc

SEQ ID NO: 680958 - DNA, 15 bp, Homo sapiens
tgtcctttaattgca

SEQ ID NO: 680959 - DNA, 15 bp, Homo sapiens
gtcctttaattgcag

SEQ ID NO: 680960 - DNA, 15 bp, Homo sapiens
tcctttaattgcagc

SEQ ID NO: 680961 - DNA, 15 bp, Homo sapiens
cctttaattgcagca

SEQ ID NO: 680962 - DNA, 15 bp, Homo sapiens
ctttaattgcagcaa

SEQ ID NO: 680963 - DNA, 15 bp, Homo sapiens
tttaattgcagcaaa

SEQ ID NO: 680964 - DNA, 15 bp, Homo sapiens
ttaattgcagcaaat

SEQ ID NO: 680965 - DNA, 15 bp, Homo sapiens
taattgcagcaaatc

SEQ ID NO: 680966 - DNA, 15 bp, Homo sapiens
aattgcagcaaatcc

SEQ ID NO: 680967 - DNA, 15 bp, Homo sapiens
attgcagcaaatcct

SEQ ID NO: 680968 - DNA, 15 bp, Homo sapiens
ttgcagcaaatcctt

SEQ ID NO: 680969 - DNA, 15 bp, Homo sapiens
tgcagcaaatccttg

SEQ ID NO: 680970 - DNA, 15 bp, Homo sapiens
gcagcaaatccttgc

SEQ ID NO: 680971 - DNA, 15 bp, Homo sapiens
cagcaaatccttgct

SEQ ID NO: 680972 - DNA, 15 bp, Homo sapiens
agcaaatccttgctg

SEQ ID NO: 680973 - DNA, 15 bp, Homo sapiens
gcaaatccttgctgt

SEQ ID NO: 680974 - DNA, 15 bp, Homo sapiens
caaatccttgctgtt

SEQ ID NO: 680975 - DNA, 15 bp, Homo sapiens
aaatccttgctgttc

SEQ ID NO: 680976 - DNA, 15 bp, Homo sapiens
aatccttgctgttcc

SEQ ID NO: 680977 - DNA, 15 bp, Homo sapiens
atccttgctgttccc

SEQ ID NO: 680978 - DNA, 15 bp, Homo sapiens
tccttgctgttccca

SEQ ID NO: 680979 - DNA, 15 bp, Homo sapiens
ccttgctgttcccac

SEQ ID NO: 680980 - DNA, 15 bp, Homo sapiens
cttgctgttcccacc

SEQ ID NO: 680981 - DNA, 15 bp, Homo sapiens
ttgctgttcccaccc

SEQ ID NO: 680982 - DNA, 15 bp, Homo sapiens
tgctgttcccaccca

SEQ ID NO: 680983 - DNA, 15 bp, Homo sapiens
gctgttcccacccat

SEQ ID NO: 680984 - DNA, 15 bp, Homo sapiens
ctgttcccacccatg

SEQ ID NO: 680985 - DNA, 15 bp, Homo sapiens
tgttcccacccatgt

SEQ ID NO: 680986 - DNA, 15 bp, Homo sapiens
gttcccacccatgtc

SEQ ID NO: 680987 - DNA, 15 bp, Homo sapiens
ttcccacccatgtca

SEQ ID NO: 680988 - DNA, 15 bp, Homo sapiens
tcccacccatgtcaa

SEQ ID NO: 680989 - DNA, 15 bp, Homo sapiens
cccacccatgtcaaa

SEQ ID NO: 680990 - DNA, 15 bp, Homo sapiens
ccacccatgtcaaaa

SEQ ID NO: 680991 - DNA, 15 bp, Homo sapiens
cacccatgtcaaaac

SEQ ID NO: 680992 - DNA, 15 bp, Homo sapiens
acccatgtcaaaacc

SEQ ID NO: 680993 - DNA, 15 bp, Homo sapiens
cccatgtcaaaaccg

SEQ ID NO: 680994 - DNA, 15 bp, Homo sapiens
ccatgtcaaaaccga

SEQ ID NO: 680995 - DNA, 15 bp, Homo sapiens
catgtcaaaaccgag

SEQ ID NO: 680996 - DNA, 15 bp, Homo sapiens
atgtcaaaaccgagg

SEQ ID NO: 680997 - DNA, 15 bp, Homo sapiens
tgtcaaaaccgaggt

SEQ ID NO: 680998 - DNA, 15 bp, Homo sapiens
gtcaaaaccgaggtg

SEQ ID NO: 680999 - DNA, 15 bp, Homo sapiens
tcaaaaccgaggtgt

SEQ ID NO: 681000 - DNA, 15 bp, Homo sapiens
caaaaccgaggtgta

SEQ ID NO: 681001 - DNA, 15 bp, Homo sapiens
aaaaccgaggtgtat

SEQ ID NO: 681002 - DNA, 15 bp, Homo sapiens
aaaccgaggtgtatg

SEQ ID NO: 681003 - DNA, 15 bp, Homo sapiens
aaccgaggtgtatgt

SEQ ID NO: 681004 - DNA, 15 bp, Homo sapiens
accgaggtgtatgta

SEQ ID NO: 681005 - DNA, 15 bp, Homo sapiens
ccgaggtgtatgtat

SEQ ID NO: 681006 - DNA, 15 bp, Homo sapiens
cgaggtgtatgtatg

SEQ ID NO: 681007 - DNA, 15 bp, Homo sapiens
gaggtgtatgtatga

SEQ ID NO: 681008 - DNA, 15 bp, Homo sapiens
aggtgtatgtatgag

SEQ ID NO: 681009 - DNA, 15 bp, Homo sapiens
ggtgtatgtatgagt

SEQ ID NO: 681010 - DNA, 15 bp, Homo sapiens
gtgtatgtatgagtg

SEQ ID NO: 681011 - DNA, 15 bp, Homo sapiens
tgtatgtatgagtgt

SEQ ID NO: 681012 - DNA, 15 bp, Homo sapiens
gtatgtatgagtgtg

SEQ ID NO: 681013 - DNA, 15 bp, Homo sapiens
tatgtatgagtgtgg

SEQ ID NO: 681014 - DNA, 15 bp, Homo sapiens
atgtatgagtgtggg

SEQ ID NO: 681015 - DNA, 15 bp, Homo sapiens
tgtatgagtgtggga

SEQ ID NO: 681016 - DNA, 15 bp, Homo sapiens
gtatgagtgtgggat

SEQ ID NO: 681017 - DNA, 15 bp, Homo sapiens
tatgagtgtgggatt

SEQ ID NO: 681018 - DNA, 15 bp, Homo sapiens
atgagtgtgggattt

SEQ ID NO: 681019 - DNA, 15 bp, Homo sapiens
tgagtgtgggatttg

SEQ ID NO: 681020 - DNA, 15 bp, Homo sapiens
gagtgtgggatttga

SEQ ID NO: 681021 - DNA, 15 bp, Homo sapiens
agtgtgggatttgac

SEQ ID NO: 681022 - DNA, 15 bp, Homo sapiens
gtgtgggatttgacc

SEQ ID NO: 681023 - DNA, 15 bp, Homo sapiens
tgtgggatttgacca

SEQ ID NO: 681024 - DNA, 15 bp, Homo sapiens
gtgggatttgaccag

SEQ ID NO: 681025 - DNA, 15 bp, Homo sapiens
tgggatttgaccagt

SEQ ID NO: 681026 - DNA, 15 bp, Homo sapiens
gggatttgaccagta

SEQ ID NO: 681027 - DNA, 15 bp, Homo sapiens
ggatttgaccagtat

SEQ ID NO: 681028 - DNA, 15 bp, Homo sapiens
gatttgaccagtata

SEQ ID NO: 681029 - DNA, 15 bp, Homo sapiens
atttgaccagtataa

SEQ ID NO: 681030 - DNA, 15 bp, Homo sapiens
tttgaccagtataag

SEQ ID NO: 681031 - DNA, 15 bp, Homo sapiens
ttgaccagtataagt

SEQ ID NO: 681032 - DNA, 15 bp, Homo sapiens
tgaccagtataagtg

SEQ ID NO: 681033 - DNA, 15 bp, Homo sapiens
gaccagtataagtgc

SEQ ID NO: 681034 - DNA, 15 bp, Homo sapiens
accagtataagtgcg

SEQ ID NO: 681035 - DNA, 15 bp, Homo sapiens
ccagtataagtgcga

SEQ ID NO: 681036 - DNA, 15 bp, Homo sapiens
cagtataagtgcgat

SEQ ID NO: 681037 - DNA, 15 bp, Homo sapiens
agtataagtgcgatt

SEQ ID NO: 681038 - DNA, 15 bp, Homo sapiens
gtataagtgcgattg

SEQ ID NO: 681039 - DNA, 15 bp, Homo sapiens
tataagtgcgattgt

SEQ ID NO: 681040 - DNA, 15 bp, Homo sapiens
ataagtgcgattgta

SEQ ID NO: 681041 - DNA, 15 bp, Homo sapiens
taagtgcgattgtac

SEQ ID NO: 681042 - DNA, 15 bp, Homo sapiens
aagtgcgattgtacc

SEQ ID NO: 681043 - DNA, 15 bp, Homo sapiens
agtgcgattgtaccc

SEQ ID NO: 681044 - DNA, 15 bp, Homo sapiens
gtgcgattgtacccg

SEQ ID NO: 681045 - DNA, 15 bp, Homo sapiens
tgcgattgtacccgg

SEQ ID NO: 681046 - DNA, 15 bp, Homo sapiens
gcgattgtacccgga

SEQ ID NO: 681047 - DNA, 15 bp, Homo sapiens
cgattgtacccggac

SEQ ID NO: 681048 - DNA, 15 bp, Homo sapiens
gattgtacccggaca

SEQ ID NO: 681049 - DNA, 15 bp, Homo sapiens
attgtacccggacag

SEQ ID NO: 681050 - DNA, 15 bp, Homo sapiens
ttgtacccggacagg

SEQ ID NO: 681051 - DNA, 15 bp, Homo sapiens
tgtacccggacagga

SEQ ID NO: 681052 - DNA, 15 bp, Homo sapiens
gtacccggacaggat

SEQ ID NO: 681053 - DNA, 15 bp, Homo sapiens
tacccggacaggatt

SEQ ID NO: 681054 - DNA, 15 bp, Homo sapiens
acccggacaggattc

SEQ ID NO: 681055 - DNA, 15 bp, Homo sapiens
cccggacaggattct

SEQ ID NO: 681056 - DNA, 15 bp, Homo sapiens
ccggacaggattcta

SEQ ID NO: 681057 - DNA, 15 bp, Homo sapiens
cggacaggattctat

SEQ ID NO: 681058 - DNA, 15 bp, Homo sapiens
ggacaggattctatg

SEQ ID NO: 681059 - DNA, 15 bp, Homo sapiens
gacaggattctatgg

SEQ ID NO: 681060 - DNA, 15 bp, Homo sapiens
acaggattctatgga

SEQ ID NO: 681061 - DNA, 15 bp, Homo sapiens
caggattctatggag

SEQ ID NO: 681062 - DNA, 15 bp, Homo sapiens
aggattctatggaga

SEQ ID NO: 681063 - DNA, 15 bp, Homo sapiens
ggattctatggagaa

SEQ ID NO: 681064 - DNA, 15 bp, Homo sapiens
gattctatggagaaa

SEQ ID NO: 681065 - DNA, 15 bp, Homo sapiens
attctatggagaaaa

SEQ ID NO: 681066 - DNA, 15 bp, Homo sapiens
ttctatggagaaaac

SEQ ID NO: 681067 - DNA, 15 bp, Homo sapiens
tctatggagaaaact

SEQ ID NO: 681068 - DNA, 15 bp, Homo sapiens
ctatggagaaaactg

SEQ ID NO: 681069 - DNA, 15 bp, Homo sapiens
tatggagaaaactgc

SEQ ID NO: 681070 - DNA, 15 bp, Homo sapiens
atggagaaaactgct

SEQ ID NO: 681071 - DNA, 15 bp, Homo sapiens
tggagaaaactgctc

SEQ ID NO: 681072 - DNA, 15 bp, Homo sapiens
ggagaaaactgctca

SEQ ID NO: 681073 - DNA, 15 bp, Homo sapiens
gagaaaactgctcaa

SEQ ID NO: 681074 - DNA, 15 bp, Homo sapiens
agaaaactgctcaac

SEQ ID NO: 681075 - DNA, 15 bp, Homo sapiens
gaaaactgctcaaca

SEQ ID NO: 681076 - DNA, 15 bp, Homo sapiens
aaaactgctcaacac

SEQ ID NO: 681077 - DNA, 15 bp, Homo sapiens
aaactgctcaacacg

SEQ ID NO: 681078 - DNA, 15 bp, Homo sapiens
aactgctcaacacgt

SEQ ID NO: 681079 - DNA, 15 bp, Homo sapiens
actgctcaacacgta

SEQ ID NO: 681080 - DNA, 15 bp, Homo sapiens
ctgctcaacacgtaa

SEQ ID NO: 681081 - DNA, 15 bp, Homo sapiens
tgctcaacacgtaag

SEQ ID NO: 681082 - DNA, 15 bp, Homo sapiens
gctcaacacgtaagt

SEQ ID NO: 681083 - DNA, 15 bp, Homo sapiens
ctcaacacgtaagtt

SEQ ID NO: 681084 - DNA, 15 bp, Homo sapiens
tcaacacgtaagttt

SEQ ID NO: 681085 - DNA, 15 bp, Homo sapiens
caacacgtaagtttg

SEQ ID NO: 681086 - DNA, 15 bp, Homo sapiens
tttaactgatgttta

SEQ ID NO: 681087 - DNA, 15 bp, Homo sapiens
ttaactgatgtttat

SEQ ID NO: 681088 - DNA, 15 bp, Homo sapiens
taactgatgtttatt

SEQ ID NO: 681089 - DNA, 15 bp, Homo sapiens
aactgatgtttattt

SEQ ID NO: 681090 - DNA, 15 bp, Homo sapiens
actgatgtttattta

SEQ ID NO: 681091 - DNA, 15 bp, Homo sapiens
ctgatgtttatttat

SEQ ID NO: 681092 - DNA, 15 bp, Homo sapiens
tgatgtttatttatt

SEQ ID NO: 681093 - DNA, 15 bp, Homo sapiens
gatgtttatttattt

SEQ ID NO: 681094 - DNA, 15 bp, Homo sapiens
atgtttatttattta

SEQ ID NO: 681095 - DNA, 15 bp, Homo sapiens
tgtttatttatttat

SEQ ID NO: 681096 - DNA, 15 bp, Homo sapiens
gtttatttatttatt

SEQ ID NO: 681097 - DNA, 15 bp, Homo sapiens
tttatttatttattt

SEQ ID NO: 681098 - DNA, 15 bp, Homo sapiens
ttatttatttattta

SEQ ID NO: 681099 - DNA, 15 bp, Homo sapiens
tatttatttatttat

SEQ ID NO: 681100 - DNA, 15 bp, Homo sapiens
atttatttatttatt

SEQ ID NO: 681101 - DNA, 15 bp, Homo sapiens
ttatttatttatttt

SEQ ID NO: 681102 - DNA, 15 bp, Homo sapiens
tatttatttattttt

SEQ ID NO: 681103 - DNA, 15 bp, Homo sapiens
atttatttatttttt

SEQ ID NO: 681104 - DNA, 15 bp, Homo sapiens
tttatttattttttt

SEQ ID NO: 681105 - DNA, 15 bp, Homo sapiens
ttatttattttttta

SEQ ID NO: 681106 - DNA, 15 bp, Homo sapiens
tatttatttttttag

SEQ ID NO: 681107 - DNA, 15 bp, Homo sapiens
atttatttttttaga

SEQ ID NO: 681108 - DNA, 15 bp, Homo sapiens
tttatttttttagat

SEQ ID NO: 681109 - DNA, 15 bp, Homo sapiens
ttatttttttagata

SEQ ID NO: 681110 - DNA, 15 bp, Homo sapiens
tatttttttagataa

SEQ ID NO: 681111 - DNA, 15 bp, Homo sapiens
atttttttagataat

SEQ ID NO: 681112 - DNA, 15 bp, Homo sapiens
tttttttagataatt

SEQ ID NO: 681113 - DNA, 15 bp, Homo sapiens
ttttttagataattg

SEQ ID NO: 681114 - DNA, 15 bp, Homo sapiens
tttttagataattga

SEQ ID NO: 681115 - DNA, 15 bp, Homo sapiens
ttttagataattgat

SEQ ID NO: 681116 - DNA, 15 bp, Homo sapiens
tttagataattgatg

SEQ ID NO: 681117 - DNA, 15 bp, Homo sapiens
ttagataattgatgg

SEQ ID NO: 681118 - DNA, 15 bp, Homo sapiens
tagataattgatgga

SEQ ID NO: 681119 - DNA, 15 bp, Homo sapiens
agataattgatggag

SEQ ID NO: 681120 - DNA, 15 bp, Homo sapiens
gataattgatggaga

SEQ ID NO: 681121 - DNA, 15 bp, Homo sapiens
ataattgatggagag

SEQ ID NO: 681122 - DNA, 15 bp, Homo sapiens
taattgatggagaga

SEQ ID NO: 681123 - DNA, 15 bp, Homo sapiens
aattgatggagagat

SEQ ID NO: 681124 - DNA, 15 bp, Homo sapiens
attgatggagagatg

SEQ ID NO: 681125 - DNA, 15 bp, Homo sapiens
ttgatggagagatgt

SEQ ID NO: 681126 - DNA, 15 bp, Homo sapiens
tgatggagagatgta

SEQ ID NO: 681127 - DNA, 15 bp, Homo sapiens
gatggagagatgtat

SEQ ID NO: 681128 - DNA, 15 bp, Homo sapiens
atggagagatgtatc

SEQ ID NO: 681129 - DNA, 15 bp, Homo sapiens
tggagagatgtatcc

SEQ ID NO: 681130 - DNA, 15 bp, Homo sapiens
ggagagatgtatcct

SEQ ID NO: 681131 - DNA, 15 bp, Homo sapiens
gagagatgtatcctc

SEQ ID NO: 681132 - DNA, 15 bp, Homo sapiens
agagatgtatcctcc

SEQ ID NO: 681133 - DNA, 15 bp, Homo sapiens
gagatgtatcctccc

SEQ ID NO: 681134 - DNA, 15 bp, Homo sapiens
agatgtatcctccca

SEQ ID NO: 681135 - DNA, 15 bp, Homo sapiens
gatgtatcctcccac

SEQ ID NO: 681136 - DNA, 15 bp, Homo sapiens
atgtatcctcccaca

SEQ ID NO: 681137 - DNA, 15 bp, Homo sapiens
tgtatcctcccacag

SEQ ID NO: 681138 - DNA, 15 bp, Homo sapiens
gtatcctcccacagt

SEQ ID NO: 681139 - DNA, 15 bp, Homo sapiens
tatcctcccacagtc

SEQ ID NO: 681140 - DNA, 15 bp, Homo sapiens
atcctcccacagtca

SEQ ID NO: 681141 - DNA, 15 bp, Homo sapiens
tcctcccacagtcaa

SEQ ID NO: 681142 - DNA, 15 bp, Homo sapiens
cctcccacagtcaaa

SEQ ID NO: 681143 - DNA, 15 bp, Homo sapiens
ctcccacagtcaaag

SEQ ID NO: 681144 - DNA, 15 bp, Homo sapiens
tcccacagtcaaaga

SEQ ID NO: 681145 - DNA, 15 bp, Homo sapiens
cccacagtcaaagat

SEQ ID NO: 681146 - DNA, 15 bp, Homo sapiens
ccacagtcaaagata

SEQ ID NO: 681147 - DNA, 15 bp, Homo sapiens
cacagtcaaagatac

SEQ ID NO: 681148 - DNA, 15 bp, Homo sapiens
acagtcaaagatact

SEQ ID NO: 681149 - DNA, 15 bp, Homo sapiens
cagtcaaagatactc

SEQ ID NO: 681150 - DNA, 15 bp, Homo sapiens
agtcaaagatactca

SEQ ID NO: 681151 - DNA, 15 bp, Homo sapiens
gtcaaagatactcag

SEQ ID NO: 681152 - DNA, 15 bp, Homo sapiens
tcaaagatactcagg

SEQ ID NO: 681153 - DNA, 15 bp, Homo sapiens
caaagatactcaggc

SEQ ID NO: 681154 - DNA, 15 bp, Homo sapiens
aaagatactcaggca

SEQ ID NO: 681155 - DNA, 15 bp, Homo sapiens
aagatactcaggcag

SEQ ID NO: 681156 - DNA, 15 bp, Homo sapiens
agatactcaggcaga

SEQ ID NO: 681157 - DNA, 15 bp, Homo sapiens
gatactcaggcagag

SEQ ID NO: 681158 - DNA, 15 bp, Homo sapiens
atactcaggcagaga

SEQ ID NO: 681159 - DNA, 15 bp, Homo sapiens
tactcaggcagagat

SEQ ID NO: 681160 - DNA, 15 bp, Homo sapiens
actcaggcagagatg

SEQ ID NO: 681161 - DNA, 15 bp, Homo sapiens
ctcaggcagagatga

SEQ ID NO: 681162 - DNA, 15 bp, Homo sapiens
tcaggcagagatgat

SEQ ID NO: 681163 - DNA, 15 bp, Homo sapiens
caggcagagatgatc

SEQ ID NO: 681164 - DNA, 15 bp, Homo sapiens
aggcagagatgatct

SEQ ID NO: 681165 - DNA, 15 bp, Homo sapiens
ggcagagatgatcta

SEQ ID NO: 681166 - DNA, 15 bp, Homo sapiens
gcagagatgatctac

SEQ ID NO: 681167 - DNA, 15 bp, Homo sapiens
cagagatgatctacc

SEQ ID NO: 681168 - DNA, 15 bp, Homo sapiens
agagatgatctaccc

SEQ ID NO: 681169 - DNA, 15 bp, Homo sapiens
gagatgatctaccct

SEQ ID NO: 681170 - DNA, 15 bp, Homo sapiens
agatgatctaccctc

SEQ ID NO: 681171 - DNA, 15 bp, Homo sapiens
gatgatctaccctcc

SEQ ID NO: 681172 - DNA, 15 bp, Homo sapiens
atgatctaccctcct

SEQ ID NO: 681173 - DNA, 15 bp, Homo sapiens
tgatctaccctcctc

SEQ ID NO: 681174 - DNA, 15 bp, Homo sapiens
gatctaccctcctca

SEQ ID NO: 681175 - DNA, 15 bp, Homo sapiens
atctaccctcctcaa

SEQ ID NO: 681176 - DNA, 15 bp, Homo sapiens
tctaccctcctcaag

SEQ ID NO: 681177 - DNA, 15 bp, Homo sapiens
ctaccctcctcaagt

SEQ ID NO: 681178 - DNA, 15 bp, Homo sapiens
taccctcctcaagtc

SEQ ID NO: 681179 - DNA, 15 bp, Homo sapiens
accctcctcaagtcc

SEQ ID NO: 681180 - DNA, 15 bp, Homo sapiens
ccctcctcaagtccc

SEQ ID NO: 681181 - DNA, 15 bp, Homo sapiens
cctcctcaagtccct

SEQ ID NO: 681182 - DNA, 15 bp, Homo sapiens
ctcctcaagtccctg

SEQ ID NO: 681183 - DNA, 15 bp, Homo sapiens
tcctcaagtccctga

SEQ ID NO: 681184 - DNA, 15 bp, Homo sapiens
cctcaagtccctgag

SEQ ID NO: 681185 - DNA, 15 bp, Homo sapiens
ctcaagtccctgagc

SEQ ID NO: 681186 - DNA, 15 bp, Homo sapiens
tcaagtccctgagca

SEQ ID NO: 681187 - DNA, 15 bp, Homo sapiens
caagtccctgagcat

SEQ ID NO: 681188 - DNA, 15 bp, Homo sapiens
aagtccctgagcatc

SEQ ID NO: 681189 - DNA, 15 bp, Homo sapiens
agtccctgagcatct

SEQ ID NO: 681190 - DNA, 15 bp, Homo sapiens
gtccctgagcatcta

SEQ ID NO: 681191 - DNA, 15 bp, Homo sapiens
tccctgagcatctac

SEQ ID NO: 681192 - DNA, 15 bp, Homo sapiens
ccctgagcatctacg

SEQ ID NO: 681193 - DNA, 15 bp, Homo sapiens
cctgagcatctacgg

SEQ ID NO: 681194 - DNA, 15 bp, Homo sapiens
ctgagcatctacggt

SEQ ID NO: 681195 - DNA, 15 bp, Homo sapiens
tgagcatctacggtt

SEQ ID NO: 681196 - DNA, 15 bp, Homo sapiens
gagcatctacggttt

SEQ ID NO: 681197 - DNA, 15 bp, Homo sapiens
agcatctacggtttg

SEQ ID NO: 681198 - DNA, 15 bp, Homo sapiens
gcatctacggtttgc

SEQ ID NO: 681199 - DNA, 15 bp, Homo sapiens
catctacggtttgct

SEQ ID NO: 681200 - DNA, 15 bp, Homo sapiens
atctacggtttgctg

SEQ ID NO: 681201 - DNA, 15 bp, Homo sapiens
tctacggtttgctgt

SEQ ID NO: 681202 - DNA, 15 bp, Homo sapiens
ctacggtttgctgtg

SEQ ID NO: 681203 - DNA, 15 bp, Homo sapiens
tacggtttgctgtgg

SEQ ID NO: 681204 - DNA, 15 bp, Homo sapiens
acggtttgctgtggg

SEQ ID NO: 681205 - DNA, 15 bp, Homo sapiens
cggtttgctgtgggg

SEQ ID NO: 681206 - DNA, 15 bp, Homo sapiens
ggtttgctgtggggc

SEQ ID NO: 681207 - DNA, 15 bp, Homo sapiens
gtttgctgtggggca

SEQ ID NO: 681208 - DNA, 15 bp, Homo sapiens
tttgctgtggggcag

SEQ ID NO: 681209 - DNA, 15 bp, Homo sapiens
ttgctgtggggcagg

SEQ ID NO: 681210 - DNA, 15 bp, Homo sapiens
tgctgtggggcagga

SEQ ID NO: 681211 - DNA, 15 bp, Homo sapiens
gctgtggggcaggag

SEQ ID NO: 681212 - DNA, 15 bp, Homo sapiens
ctgtggggcaggagg

SEQ ID NO: 681213 - DNA, 15 bp, Homo sapiens
tgtggggcaggaggt

SEQ ID NO: 681214 - DNA, 15 bp, Homo sapiens
gtggggcaggaggtc

SEQ ID NO: 681215 - DNA, 15 bp, Homo sapiens
tggggcaggaggtct

SEQ ID NO: 681216 - DNA, 15 bp, Homo sapiens
ggggcaggaggtctt

SEQ ID NO: 681217 - DNA, 15 bp, Homo sapiens
gggcaggaggtcttt

SEQ ID NO: 681218 - DNA, 15 bp, Homo sapiens
ggcaggaggtctttg

SEQ ID NO: 681219 - DNA, 15 bp, Homo sapiens
gcaggaggtctttgg

SEQ ID NO: 681220 - DNA, 15 bp, Homo sapiens
caggaggtctttggt

SEQ ID NO: 681221 - DNA, 15 bp, Homo sapiens
aggaggtctttggtc

SEQ ID NO: 681222 - DNA, 15 bp, Homo sapiens
ggaggtctttggtct

SEQ ID NO: 681223 - DNA, 15 bp, Homo sapiens
gaggtctttggtctg

SEQ ID NO: 681224 - DNA, 15 bp, Homo sapiens
aggtctttggtctgg

SEQ ID NO: 681225 - DNA, 15 bp, Homo sapiens
ggtctttggtctggt

SEQ ID NO: 681226 - DNA, 15 bp, Homo sapiens
gtctttggtctggtg

SEQ ID NO: 681227 - DNA, 15 bp, Homo sapiens
tctttggtctggtgc

SEQ ID NO: 681228 - DNA, 15 bp, Homo sapiens
ctttggtctggtgcc

SEQ ID NO: 681229 - DNA, 15 bp, Homo sapiens
tttggtctggtgcct

SEQ ID NO: 681230 - DNA, 15 bp, Homo sapiens
ttggtctggtgcctg

SEQ ID NO: 681231 - DNA, 15 bp, Homo sapiens
tggtctggtgcctgg

SEQ ID NO: 681232 - DNA, 15 bp, Homo sapiens
ggtctggtgcctggt

SEQ ID NO: 681233 - DNA, 15 bp, Homo sapiens
gtctggtgcctggtc

SEQ ID NO: 681234 - DNA, 15 bp, Homo sapiens
tctggtgcctggtct

SEQ ID NO: 681235 - DNA, 15 bp, Homo sapiens
ctggtgcctggtctg

SEQ ID NO: 681236 - DNA, 15 bp, Homo sapiens
tggtgcctggtctga

SEQ ID NO: 681237 - DNA, 15 bp, Homo sapiens
ggtgcctggtctgat

SEQ ID NO: 681238 - DNA, 15 bp, Homo sapiens
gtgcctggtctgatg

SEQ ID NO: 681239 - DNA, 15 bp, Homo sapiens
tgcctggtctgatga

SEQ ID NO: 681240 - DNA, 15 bp, Homo sapiens
gcctggtctgatgat

SEQ ID NO: 681241 - DNA, 15 bp, Homo sapiens
cctggtctgatgatg

SEQ ID NO: 681242 - DNA, 15 bp, Homo sapiens
ctggtctgatgatgt

SEQ ID NO: 681243 - DNA, 15 bp, Homo sapiens
tggtctgatgatgta

SEQ ID NO: 681244 - DNA, 15 bp, Homo sapiens
ggtctgatgatgtat

SEQ ID NO: 681245 - DNA, 15 bp, Homo sapiens
gtctgatgatgtatg

SEQ ID NO: 681246 - DNA, 15 bp, Homo sapiens
tctgatgatgtatgc

SEQ ID NO: 681247 - DNA, 15 bp, Homo sapiens
ctgatgatgtatgcc

SEQ ID NO: 681248 - DNA, 15 bp, Homo sapiens
tgatgatgtatgcca

SEQ ID NO: 681249 - DNA, 15 bp, Homo sapiens
gatgatgtatgccac

SEQ ID NO: 681250 - DNA, 15 bp, Homo sapiens
atgatgtatgccaca

SEQ ID NO: 681251 - DNA, 15 bp, Homo sapiens
tgatgtatgccacaa

SEQ ID NO: 681252 - DNA, 15 bp, Homo sapiens
gatgtatgccacaat

SEQ ID NO: 681253 - DNA, 15 bp, Homo sapiens
atgtatgccacaatc

SEQ ID NO: 681254 - DNA, 15 bp, Homo sapiens
tgtatgccacaatct

SEQ ID NO: 681255 - DNA, 15 bp, Homo sapiens
gtatgccacaatctg

SEQ ID NO: 681256 - DNA, 15 bp, Homo sapiens
tatgccacaatctgg

SEQ ID NO: 681257 - DNA, 15 bp, Homo sapiens
atgccacaatctggc

SEQ ID NO: 681258 - DNA, 15 bp, Homo sapiens
tgccacaatctggct

SEQ ID NO: 681259 - DNA, 15 bp, Homo sapiens
gccacaatctggctg

SEQ ID NO: 681260 - DNA, 15 bp, Homo sapiens
ccacaatctggctgc

SEQ ID NO: 681261 - DNA, 15 bp, Homo sapiens
cacaatctggctgcg

SEQ ID NO: 681262 - DNA, 15 bp, Homo sapiens
acaatctggctgcgg

SEQ ID NO: 681263 - DNA, 15 bp, Homo sapiens
caatctggctgcggg

SEQ ID NO: 681264 - DNA, 15 bp, Homo sapiens
aatctggctgcggga

SEQ ID NO: 681265 - DNA, 15 bp, Homo sapiens
atctggctgcgggaa

SEQ ID NO: 681266 - DNA, 15 bp, Homo sapiens
tctggctgcgggaac

SEQ ID NO: 681267 - DNA, 15 bp, Homo sapiens
ctggctgcgggaaca

SEQ ID NO: 681268 - DNA, 15 bp, Homo sapiens
tggctgcgggaacac

SEQ ID NO: 681269 - DNA, 15 bp, Homo sapiens
ggctgcgggaacaca

SEQ ID NO: 681270 - DNA, 15 bp, Homo sapiens
gctgcgggaacacaa

SEQ ID NO: 681271 - DNA, 15 bp, Homo sapiens
ctgcgggaacacaac

SEQ ID NO: 681272 - DNA, 15 bp, Homo sapiens
tgcgggaacacaaca

SEQ ID NO: 681273 - DNA, 15 bp, Homo sapiens
gcgggaacacaacag

SEQ ID NO: 681274 - DNA, 15 bp, Homo sapiens
cgggaacacaacaga

SEQ ID NO: 681275 - DNA, 15 bp, Homo sapiens
gggaacacaacagag

SEQ ID NO: 681276 - DNA, 15 bp, Homo sapiens
ggaacacaacagagt

SEQ ID NO: 681277 - DNA, 15 bp, Homo sapiens
gaacacaacagagta

SEQ ID NO: 681278 - DNA, 15 bp, Homo sapiens
aacacaacagagtat

SEQ ID NO: 681279 - DNA, 15 bp, Homo sapiens
acacaacagagtatg

SEQ ID NO: 681280 - DNA, 15 bp, Homo sapiens
cacaacagagtatgc

SEQ ID NO: 681281 - DNA, 15 bp, Homo sapiens
acaacagagtatgcg

SEQ ID NO: 681282 - DNA, 15 bp, Homo sapiens
caacagagtatgcga

SEQ ID NO: 681283 - DNA, 15 bp, Homo sapiens
aacagagtatgcgat

SEQ ID NO: 681284 - DNA, 15 bp, Homo sapiens
acagagtatgcgatg

SEQ ID NO: 681285 - DNA, 15 bp, Homo sapiens
cagagtatgcgatgt

SEQ ID NO: 681286 - DNA, 15 bp, Homo sapiens
agagtatgcgatgtg

SEQ ID NO: 681287 - DNA, 15 bp, Homo sapiens
gagtatgcgatgtgc

SEQ ID NO: 681288 - DNA, 15 bp, Homo sapiens
agtatgcgatgtgct

SEQ ID NO: 681289 - DNA, 15 bp, Homo sapiens
gtatgcgatgtgctt

SEQ ID NO: 681290 - DNA, 15 bp, Homo sapiens
tatgcgatgtgctta

SEQ ID NO: 681291 - DNA, 15 bp, Homo sapiens
atgcgatgtgcttaa

SEQ ID NO: 681292 - DNA, 15 bp, Homo sapiens
tgcgatgtgcttaaa

SEQ ID NO: 681293 - DNA, 15 bp, Homo sapiens
gcgatgtgcttaaac

SEQ ID NO: 681294 - DNA, 15 bp, Homo sapiens
cgatgtgcttaaaca

SEQ ID NO: 681295 - DNA, 15 bp, Homo sapiens
gatgtgcttaaacag

SEQ ID NO: 681296 - DNA, 15 bp, Homo sapiens
atgtgcttaaacagg

SEQ ID NO: 681297 - DNA, 15 bp, Homo sapiens
tgtgcttaaacagga

SEQ ID NO: 681298 - DNA, 15 bp, Homo sapiens
gtgcttaaacaggag

SEQ ID NO: 681299 - DNA, 15 bp, Homo sapiens
tgcttaaacaggagc

SEQ ID NO: 681300 - DNA, 15 bp, Homo sapiens
gcttaaacaggagca

SEQ ID NO: 681301 - DNA, 15 bp, Homo sapiens
cttaaacaggagcat

SEQ ID NO: 681302 - DNA, 15 bp, Homo sapiens
ttaaacaggagcatc

SEQ ID NO: 681303 - DNA, 15 bp, Homo sapiens
taaacaggagcatcc

SEQ ID NO: 681304 - DNA, 15 bp, Homo sapiens
aaacaggagcatcct

SEQ ID NO: 681305 - DNA, 15 bp, Homo sapiens
aacaggagcatcctg

SEQ ID NO: 681306 - DNA, 15 bp, Homo sapiens
acaggagcatcctga

SEQ ID NO: 681307 - DNA, 15 bp, Homo sapiens
caggagcatcctgaa

SEQ ID NO: 681308 - DNA, 15 bp, Homo sapiens
aggagcatcctgaat

SEQ ID NO: 681309 - DNA, 15 bp, Homo sapiens
ggagcatcctgaatg

SEQ ID NO: 681310 - DNA, 15 bp, Homo sapiens
gagcatcctgaatgg

SEQ ID NO: 681311 - DNA, 15 bp, Homo sapiens
agcatcctgaatggg

SEQ ID NO: 681312 - DNA, 15 bp, Homo sapiens
gcatcctgaatgggg

SEQ ID NO: 681313 - DNA, 15 bp, Homo sapiens
catcctgaatggggt

SEQ ID NO: 681314 - DNA, 15 bp, Homo sapiens
atcctgaatggggtg

SEQ ID NO: 681315 - DNA, 15 bp, Homo sapiens
tcctgaatggggtga

SEQ ID NO: 681316 - DNA, 15 bp, Homo sapiens
cctgaatggggtgat

SEQ ID NO: 681317 - DNA, 15 bp, Homo sapiens
ctgaatggggtgatg

SEQ ID NO: 681318 - DNA, 15 bp, Homo sapiens
tgaatggggtgatga

SEQ ID NO: 681319 - DNA, 15 bp, Homo sapiens
gaatggggtgatgag

SEQ ID NO: 681320 - DNA, 15 bp, Homo sapiens
aatggggtgatgagc

SEQ ID NO: 681321 - DNA, 15 bp, Homo sapiens
atggggtgatgagca

SEQ ID NO: 681322 - DNA, 15 bp, Homo sapiens
tggggtgatgagcag

SEQ ID NO: 681323 - DNA, 15 bp, Homo sapiens
ggggtgatgagcagt

SEQ ID NO: 681324 - DNA, 15 bp, Homo sapiens
gggtgatgagcagtt

SEQ ID NO: 681325 - DNA, 15 bp, Homo sapiens
ggtgatgagcagttg

SEQ ID NO: 681326 - DNA, 15 bp, Homo sapiens
gtgatgagcagttgt

SEQ ID NO: 681327 - DNA, 15 bp, Homo sapiens
tgatgagcagttgtt

SEQ ID NO: 681328 - DNA, 15 bp, Homo sapiens
gatgagcagttgttc

SEQ ID NO: 681329 - DNA, 15 bp, Homo sapiens
atgagcagttgttcc

SEQ ID NO: 681330 - DNA, 15 bp, Homo sapiens
tgagcagttgttcca

SEQ ID NO: 681331 - DNA, 15 bp, Homo sapiens
gagcagttgttccag

SEQ ID NO: 681332 - DNA, 15 bp, Homo sapiens
agcagttgttccaga

SEQ ID NO: 681333 - DNA, 15 bp, Homo sapiens
gcagttgttccagac

SEQ ID NO: 681334 - DNA, 15 bp, Homo sapiens
cagttgttccagaca

SEQ ID NO: 681335 - DNA, 15 bp, Homo sapiens
agttgttccagacaa

SEQ ID NO: 681336 - DNA, 15 bp, Homo sapiens
gttgttccagacaag

SEQ ID NO: 681337 - DNA, 15 bp, Homo sapiens
ttgttccagacaagc

SEQ ID NO: 681338 - DNA, 15 bp, Homo sapiens
tgttccagacaagca

SEQ ID NO: 681339 - DNA, 15 bp, Homo sapiens
gttccagacaagcag

SEQ ID NO: 681340 - DNA, 15 bp, Homo sapiens
ttccagacaagcagg

SEQ ID NO: 681341 - DNA, 15 bp, Homo sapiens
tccagacaagcaggc

SEQ ID NO: 681342 - DNA, 15 bp, Homo sapiens
ccagacaagcaggct

SEQ ID NO: 681343 - DNA, 15 bp, Homo sapiens
cagacaagcaggcta

SEQ ID NO: 681344 - DNA, 15 bp, Homo sapiens
agacaagcaggctaa

SEQ ID NO: 681345 - DNA, 15 bp, Homo sapiens
gacaagcaggctaat

SEQ ID NO: 681346 - DNA, 15 bp, Homo sapiens
acaagcaggctaata

SEQ ID NO: 681347 - DNA, 15 bp, Homo sapiens
caagcaggctaatac

SEQ ID NO: 681348 - DNA, 15 bp, Homo sapiens
aagcaggctaatact

SEQ ID NO: 681349 - DNA, 15 bp, Homo sapiens
agcaggctaatactg

SEQ ID NO: 681350 - DNA, 15 bp, Homo sapiens
gcaggctaatactga

SEQ ID NO: 681351 - DNA, 15 bp, Homo sapiens
caggctaatactgat

SEQ ID NO: 681352 - DNA, 15 bp, Homo sapiens
aggctaatactgata

SEQ ID NO: 681353 - DNA, 15 bp, Homo sapiens
ggctaatactgatag

SEQ ID NO: 681354 - DNA, 15 bp, Homo sapiens
gctaatactgatagg

SEQ ID NO: 681355 - DNA, 15 bp, Homo sapiens
ctaatactgataggt

SEQ ID NO: 681356 - DNA, 15 bp, Homo sapiens
taatactgataggta

SEQ ID NO: 681357 - DNA, 15 bp, Homo sapiens
aatactgataggtaa

SEQ ID NO: 681358 - DNA, 15 bp, Homo sapiens
atactgataggtaaa

SEQ ID NO: 681359 - DNA, 15 bp, Homo sapiens
tactgataggtaaac

SEQ ID NO: 681360 - DNA, 15 bp, Homo sapiens
actgataggtaaaca

SEQ ID NO: 681361 - DNA, 15 bp, Homo sapiens
ctgataggtaaacaa

SEQ ID NO: 681362 - DNA, 15 bp, Homo sapiens
tgataggtaaacaag

SEQ ID NO: 681363 - DNA, 15 bp, Homo sapiens
gataggtaaacaaga

SEQ ID NO: 681364 - DNA, 15 bp, Homo sapiens
ataggtaaacaagaa

SEQ ID NO: 681365 - DNA, 15 bp, Homo sapiens
taggtaaacaagaaa

SEQ ID NO: 681366 - DNA, 15 bp, Homo sapiens
aggtaaacaagaaaa

SEQ ID NO: 681367 - DNA, 15 bp, Homo sapiens
ggtaaacaagaaaat

SEQ ID NO: 681368 - DNA, 15 bp, Homo sapiens
gtaaacaagaaaatg

SEQ ID NO: 681369 - DNA, 15 bp, Homo sapiens
taaacaagaaaatga

SEQ ID NO: 681370 - DNA, 15 bp, Homo sapiens
aaacaagaaaatgat

SEQ ID NO: 681371 - DNA, 15 bp, Homo sapiens
aacaagaaaatgatt

SEQ ID NO: 681372 - DNA, 15 bp, Homo sapiens
acaagaaaatgattt

SEQ ID NO: 681373 - DNA, 15 bp, Homo sapiens
caagaaaatgattta

SEQ ID NO: 681374 - DNA, 15 bp, Homo sapiens
aagaaaatgatttat

SEQ ID NO: 681375 - DNA, 15 bp, Homo sapiens
agaaaatgatttata

SEQ ID NO: 681376 - DNA, 15 bp, Homo sapiens
gaaaatgatttatat

SEQ ID NO: 681377 - DNA, 15 bp, Homo sapiens
aaaatgatttatata

SEQ ID NO: 681378 - DNA, 15 bp, Homo sapiens
aaatgatttatataa

SEQ ID NO: 681379 - DNA, 15 bp, Homo sapiens
aatgatttatataaa

SEQ ID NO: 681380 - DNA, 15 bp, Homo sapiens
atgatttatataaaa

SEQ ID NO: 681381 - DNA, 15 bp, Homo sapiens
tgatttatataaaac

SEQ ID NO: 681382 - DNA, 15 bp, Homo sapiens
gatttatataaaacc

SEQ ID NO: 681383 - DNA, 15 bp, Homo sapiens
atttatataaaaccc

SEQ ID NO: 681384 - DNA, 15 bp, Homo sapiens
tttatataaaaccct

SEQ ID NO: 681385 - DNA, 15 bp, Homo sapiens
ttatataaaaccctc

SEQ ID NO: 681386 - DNA, 15 bp, Homo sapiens
tatataaaaccctct

SEQ ID NO: 681387 - DNA, 15 bp, Homo sapiens
atataaaaccctctt

SEQ ID NO: 681388 - DNA, 15 bp, Homo sapiens
tataaaaccctcttc

SEQ ID NO: 681389 - DNA, 15 bp, Homo sapiens
ataaaaccctcttcc

SEQ ID NO: 681390 - DNA, 15 bp, Homo sapiens
taaaaccctcttccc

SEQ ID NO: 681391 - DNA, 15 bp, Homo sapiens
aaaaccctcttcccc

SEQ ID NO: 681392 - DNA, 15 bp, Homo sapiens
aaaccctcttcccca

SEQ ID NO: 681393 - DNA, 15 bp, Homo sapiens
aaccctcttccccag

SEQ ID NO: 681394 - DNA, 15 bp, Homo sapiens
accctcttccccagg

SEQ ID NO: 681395 - DNA, 15 bp, Homo sapiens
ccctcttccccaggg

SEQ ID NO: 681396 - DNA, 15 bp, Homo sapiens
cctcttccccaggga

SEQ ID NO: 681397 - DNA, 15 bp, Homo sapiens
ctcttccccagggaa

SEQ ID NO: 681398 - DNA, 15 bp, Homo sapiens
tcttccccagggaaa

SEQ ID NO: 681399 - DNA, 15 bp, Homo sapiens
cttccccagggaaaa

SEQ ID NO: 681400 - DNA, 15 bp, Homo sapiens
ttccccagggaaaat

SEQ ID NO: 681401 - DNA, 15 bp, Homo sapiens
tccccagggaaaatt

SEQ ID NO: 681402 - DNA, 15 bp, Homo sapiens
ccccagggaaaatta

SEQ ID NO: 681403 - DNA, 15 bp, Homo sapiens
cccagggaaaattag

SEQ ID NO: 681404 - DNA, 15 bp, Homo sapiens
ccagggaaaattagt

SEQ ID NO: 681405 - DNA, 15 bp, Homo sapiens
cagggaaaattagtg

SEQ ID NO: 681406 - DNA, 15 bp, Homo sapiens
agggaaaattagtgt

SEQ ID NO: 681407 - DNA, 15 bp, Homo sapiens
gggaaaattagtgtg

SEQ ID NO: 681408 - DNA, 15 bp, Homo sapiens
ggaaaattagtgtgc

SEQ ID NO: 681409 - DNA, 15 bp, Homo sapiens
gaaaattagtgtgct

SEQ ID NO: 681410 - DNA, 15 bp, Homo sapiens
aaaattagtgtgcta

SEQ ID NO: 681411 - DNA, 15 bp, Homo sapiens
aaattagtgtgctat

SEQ ID NO: 681412 - DNA, 15 bp, Homo sapiens
aattagtgtgctatc

SEQ ID NO: 681413 - DNA, 15 bp, Homo sapiens
attagtgtgctatct

SEQ ID NO: 681414 - DNA, 15 bp, Homo sapiens
ttagtgtgctatctt

SEQ ID NO: 681415 - DNA, 15 bp, Homo sapiens
tagtgtgctatcttt

SEQ ID NO: 681416 - DNA, 15 bp, Homo sapiens
agtgtgctatctttg

SEQ ID NO: 681417 - DNA, 15 bp, Homo sapiens
gtgtgctatctttgt

SEQ ID NO: 681418 - DNA, 15 bp, Homo sapiens
tgtgctatctttgtt

SEQ ID NO: 681419 - DNA, 15 bp, Homo sapiens
gtgctatctttgtta

SEQ ID NO: 681420 - DNA, 15 bp, Homo sapiens
tgctatctttgttat

SEQ ID NO: 681421 - DNA, 15 bp, Homo sapiens
gctatctttgttatg

SEQ ID NO: 681422 - DNA, 15 bp, Homo sapiens
ctatctttgttatgt

SEQ ID NO: 681423 - DNA, 15 bp, Homo sapiens
tatctttgttatgtt

SEQ ID NO: 681424 - DNA, 15 bp, Homo sapiens
atctttgttatgttt

SEQ ID NO: 681425 - DNA, 15 bp, Homo sapiens
tctttgttatgtttt

SEQ ID NO: 681426 - DNA, 15 bp, Homo sapiens
ctttgttatgttttg

SEQ ID NO: 681427 - DNA, 15 bp, Homo sapiens
tttgttatgttttga

SEQ ID NO: 681428 - DNA, 15 bp, Homo sapiens
ttgttatgttttgag

SEQ ID NO: 681429 - DNA, 15 bp, Homo sapiens
tgttatgttttgagt

SEQ ID NO: 681430 - DNA, 15 bp, Homo sapiens
gttatgttttgagta

SEQ ID NO: 681431 - DNA, 15 bp, Homo sapiens
ttatgttttgagtaa

SEQ ID NO: 681432 - DNA, 15 bp, Homo sapiens
tatgttttgagtaaa

SEQ ID NO: 681433 - DNA, 15 bp, Homo sapiens
atgttttgagtaaat

SEQ ID NO: 681434 - DNA, 15 bp, Homo sapiens
tgttttgagtaaatg

SEQ ID NO: 681435 - DNA, 15 bp, Homo sapiens
gttttgagtaaatga

SEQ ID NO: 681436 - DNA, 15 bp, Homo sapiens
ttttgagtaaatgac

SEQ ID NO: 681437 - DNA, 15 bp, Homo sapiens
tttgagtaaatgaca

SEQ ID NO: 681438 - DNA, 15 bp, Homo sapiens
ttgagtaaatgacaa

SEQ ID NO: 681439 - DNA, 15 bp, Homo sapiens
tgagtaaatgacaag

SEQ ID NO: 681440 - DNA, 15 bp, Homo sapiens
gagtaaatgacaaga

SEQ ID NO: 681441 - DNA, 15 bp, Homo sapiens
agtaaatgacaagat

SEQ ID NO: 681442 - DNA, 15 bp, Homo sapiens
gtaaatgacaagatg

SEQ ID NO: 681443 - DNA, 15 bp, Homo sapiens
taaatgacaagatgt

SEQ ID NO: 681444 - DNA, 15 bp, Homo sapiens
tggcatccccttctg

SEQ ID NO: 681445 - DNA, 15 bp, Homo sapiens
ggcatccccttctgc

SEQ ID NO: 681446 - DNA, 15 bp, Homo sapiens
gcatccccttctgcc

SEQ ID NO: 681447 - DNA, 15 bp, Homo sapiens
catccccttctgcct

SEQ ID NO: 681448 - DNA, 15 bp, Homo sapiens
atccccttctgcctg

SEQ ID NO: 681449 - DNA, 15 bp, Homo sapiens
tccccttctgcctga

SEQ ID NO: 681450 - DNA, 15 bp, Homo sapiens
ccccttctgcctgac

SEQ ID NO: 681451 - DNA, 15 bp, Homo sapiens
cccttctgcctgaca

SEQ ID NO: 681452 - DNA, 15 bp, Homo sapiens
ccttctgcctgacac

SEQ ID NO: 681453 - DNA, 15 bp, Homo sapiens
cttctgcctgacacc

SEQ ID NO: 681454 - DNA, 15 bp, Homo sapiens
ttctgcctgacacct

SEQ ID NO: 681455 - DNA, 15 bp, Homo sapiens
tctgcctgacacctt

SEQ ID NO: 681456 - DNA, 15 bp, Homo sapiens
ctgcctgacaccttt

SEQ ID NO: 681457 - DNA, 15 bp, Homo sapiens
tgcctgacacctttc

SEQ ID NO: 681458 - DNA, 15 bp, Homo sapiens
gcctgacacctttca

SEQ ID NO: 681459 - DNA, 15 bp, Homo sapiens
cctgacacctttcaa

SEQ ID NO: 681460 - DNA, 15 bp, Homo sapiens
ctgacacctttcaaa

SEQ ID NO: 681461 - DNA, 15 bp, Homo sapiens
tgacacctttcaaat

SEQ ID NO: 681462 - DNA, 15 bp, Homo sapiens
gacacctttcaaatt

SEQ ID NO: 681463 - DNA, 15 bp, Homo sapiens
acacctttcaaattc

SEQ ID NO: 681464 - DNA, 15 bp, Homo sapiens
cacctttcaaattca

SEQ ID NO: 681465 - DNA, 15 bp, Homo sapiens
acctttcaaattcat

SEQ ID NO: 681466 - DNA, 15 bp, Homo sapiens
cctttcaaattcatg

SEQ ID NO: 681467 - DNA, 15 bp, Homo sapiens
ctttcaaattcatga

SEQ ID NO: 681468 - DNA, 15 bp, Homo sapiens
tttcaaattcatgac

SEQ ID NO: 681469 - DNA, 15 bp, Homo sapiens
ttcaaattcatgacc

SEQ ID NO: 681470 - DNA, 15 bp, Homo sapiens
tcaaattcatgacca

SEQ ID NO: 681471 - DNA, 15 bp, Homo sapiens
caaattcatgaccag

SEQ ID NO: 681472 - DNA, 15 bp, Homo sapiens
aaattcatgaccaga

SEQ ID NO: 681473 - DNA, 15 bp, Homo sapiens
aattcatgaccagaa

SEQ ID NO: 681474 - DNA, 15 bp, Homo sapiens
attcatgaccagaaa

SEQ ID NO: 681475 - DNA, 15 bp, Homo sapiens
ttcatgaccagaaat

SEQ ID NO: 681476 - DNA, 15 bp, Homo sapiens
tcatgaccagaaata

SEQ ID NO: 681477 - DNA, 15 bp, Homo sapiens
catgaccagaaatac

SEQ ID NO: 681478 - DNA, 15 bp, Homo sapiens
atgaccagaaataca

SEQ ID NO: 681479 - DNA, 15 bp, Homo sapiens
tgaccagaaatacaa

SEQ ID NO: 681480 - DNA, 15 bp, Homo sapiens
gaccagaaatacaac

SEQ ID NO: 681481 - DNA, 15 bp, Homo sapiens
accagaaatacaact

SEQ ID NO: 681482 - DNA, 15 bp, Homo sapiens
ccagaaatacaacta

SEQ ID NO: 681483 - DNA, 15 bp, Homo sapiens
cagaaatacaactat

SEQ ID NO: 681484 - DNA, 15 bp, Homo sapiens
agaaatacaactatc

SEQ ID NO: 681485 - DNA, 15 bp, Homo sapiens
gaaatacaactatca

SEQ ID NO: 681486 - DNA, 15 bp, Homo sapiens
aaatacaactatcaa

SEQ ID NO: 681487 - DNA, 15 bp, Homo sapiens
aatacaactatcaac

SEQ ID NO: 681488 - DNA, 15 bp, Homo sapiens
atacaactatcaaca

SEQ ID NO: 681489 - DNA, 15 bp, Homo sapiens
tacaactatcaacag

SEQ ID NO: 681490 - DNA, 15 bp, Homo sapiens
acaactatcaacagt

SEQ ID NO: 681491 - DNA, 15 bp, Homo sapiens
caactatcaacagtt

SEQ ID NO: 681492 - DNA, 15 bp, Homo sapiens
aactatcaacagttt

SEQ ID NO: 681493 - DNA, 15 bp, Homo sapiens
actatcaacagttta

SEQ ID NO: 681494 - DNA, 15 bp, Homo sapiens
ctatcaacagtttat

SEQ ID NO: 681495 - DNA, 15 bp, Homo sapiens
tatcaacagtttatc

SEQ ID NO: 681496 - DNA, 15 bp, Homo sapiens
atcaacagtttatct

SEQ ID NO: 681497 - DNA, 15 bp, Homo sapiens
tcaacagtttatcta

SEQ ID NO: 681498 - DNA, 15 bp, Homo sapiens
caacagtttatctac

SEQ ID NO: 681499 - DNA, 15 bp, Homo sapiens
aacagtttatctaca

SEQ ID NO: 681500 - DNA, 15 bp, Homo sapiens
acagtttatctacaa

SEQ ID NO: 681501 - DNA, 15 bp, Homo sapiens
cagtttatctacaac

SEQ ID NO: 681502 - DNA, 15 bp, Homo sapiens
agtttatctacaaca

SEQ ID NO: 681503 - DNA, 15 bp, Homo sapiens
gtttatctacaacaa

SEQ ID NO: 681504 - DNA, 15 bp, Homo sapiens
tttatctacaacaac

SEQ ID NO: 681505 - DNA, 15 bp, Homo sapiens
ttatctacaacaact

SEQ ID NO: 681506 - DNA, 15 bp, Homo sapiens
tatctacaacaactc

SEQ ID NO: 681507 - DNA, 15 bp, Homo sapiens
atctacaacaactct

SEQ ID NO: 681508 - DNA, 15 bp, Homo sapiens
tctacaacaactcta

SEQ ID NO: 681509 - DNA, 15 bp, Homo sapiens
ctacaacaactctat

SEQ ID NO: 681510 - DNA, 15 bp, Homo sapiens
tacaacaactctata

SEQ ID NO: 681511 - DNA, 15 bp, Homo sapiens
acaacaactctatat

SEQ ID NO: 681512 - DNA, 15 bp, Homo sapiens
caacaactctatatt

SEQ ID NO: 681513 - DNA, 15 bp, Homo sapiens
aacaactctatattg

SEQ ID NO: 681514 - DNA, 15 bp, Homo sapiens
acaactctatattgc

SEQ ID NO: 681515 - DNA, 15 bp, Homo sapiens
caactctatattgct

SEQ ID NO: 681516 - DNA, 15 bp, Homo sapiens
aactctatattgctg

SEQ ID NO: 681517 - DNA, 15 bp, Homo sapiens
actctatattgctgg

SEQ ID NO: 681518 - DNA, 15 bp, Homo sapiens
ctctatattgctgga

SEQ ID NO: 681519 - DNA, 15 bp, Homo sapiens
tctatattgctggaa

SEQ ID NO: 681520 - DNA, 15 bp, Homo sapiens
ctatattgctggaac

SEQ ID NO: 681521 - DNA, 15 bp, Homo sapiens
tatattgctggaaca

SEQ ID NO: 681522 - DNA, 15 bp, Homo sapiens
atattgctggaacat

SEQ ID NO: 681523 - DNA, 15 bp, Homo sapiens
tattgctggaacatg

SEQ ID NO: 681524 - DNA, 15 bp, Homo sapiens
attgctggaacatgg

SEQ ID NO: 681525 - DNA, 15 bp, Homo sapiens
ttgctggaacatgga

SEQ ID NO: 681526 - DNA, 15 bp, Homo sapiens
tgctggaacatggaa

SEQ ID NO: 681527 - DNA, 15 bp, Homo sapiens
gctggaacatggaat

SEQ ID NO: 681528 - DNA, 15 bp, Homo sapiens
ctggaacatggaatt

SEQ ID NO: 681529 - DNA, 15 bp, Homo sapiens
tggaacatggaatta

SEQ ID NO: 681530 - DNA, 15 bp, Homo sapiens
ggaacatggaattac

SEQ ID NO: 681531 - DNA, 15 bp, Homo sapiens
gaacatggaattacc

SEQ ID NO: 681532 - DNA, 15 bp, Homo sapiens
aacatggaattaccc

SEQ ID NO: 681533 - DNA, 15 bp, Homo sapiens
acatggaattaccca

SEQ ID NO: 681534 - DNA, 15 bp, Homo sapiens
catggaattacccag

SEQ ID NO: 681535 - DNA, 15 bp, Homo sapiens
atggaattacccagt

SEQ ID NO: 681536 - DNA, 15 bp, Homo sapiens
tggaattacccagtt

SEQ ID NO: 681537 - DNA, 15 bp, Homo sapiens
ggaattacccagttt

SEQ ID NO: 681538 - DNA, 15 bp, Homo sapiens
gaattacccagtttg

SEQ ID NO: 681539 - DNA, 15 bp, Homo sapiens
aattacccagtttgt

SEQ ID NO: 681540 - DNA, 15 bp, Homo sapiens
attacccagtttgtt

SEQ ID NO: 681541 - DNA, 15 bp, Homo sapiens
ttacccagtttgttg

SEQ ID NO: 681542 - DNA, 15 bp, Homo sapiens
tacccagtttgttga

SEQ ID NO: 681543 - DNA, 15 bp, Homo sapiens
acccagtttgttgaa

SEQ ID NO: 681544 - DNA, 15 bp, Homo sapiens
cccagtttgttgaat

SEQ ID NO: 681545 - DNA, 15 bp, Homo sapiens
ccagtttgttgaatc

SEQ ID NO: 681546 - DNA, 15 bp, Homo sapiens
cagtttgttgaatca

SEQ ID NO: 681547 - DNA, 15 bp, Homo sapiens
agtttgttgaatcat

SEQ ID NO: 681548 - DNA, 15 bp, Homo sapiens
gtttgttgaatcatt

SEQ ID NO: 681549 - DNA, 15 bp, Homo sapiens
tttgttgaatcattc

SEQ ID NO: 681550 - DNA, 15 bp, Homo sapiens
ttgttgaatcattca

SEQ ID NO: 681551 - DNA, 15 bp, Homo sapiens
tgttgaatcattcac

SEQ ID NO: 681552 - DNA, 15 bp, Homo sapiens
gttgaatcattcacc

SEQ ID NO: 681553 - DNA, 15 bp, Homo sapiens
ttgaatcattcacca

SEQ ID NO: 681554 - DNA, 15 bp, Homo sapiens
tgaatcattcaccag

SEQ ID NO: 681555 - DNA, 15 bp, Homo sapiens
gaatcattcaccagg

SEQ ID NO: 681556 - DNA, 15 bp, Homo sapiens
aatcattcaccaggc

SEQ ID NO: 681557 - DNA, 15 bp, Homo sapiens
atcattcaccaggca

SEQ ID NO: 681558 - DNA, 15 bp, Homo sapiens
tcattcaccaggcaa

SEQ ID NO: 681559 - DNA, 15 bp, Homo sapiens
cattcaccaggcaaa

SEQ ID NO: 681560 - DNA, 15 bp, Homo sapiens
attcaccaggcaaat

SEQ ID NO: 681561 - DNA, 15 bp, Homo sapiens
ttcaccaggcaaatt

SEQ ID NO: 681562 - DNA, 15 bp, Homo sapiens
tcaccaggcaaattg

SEQ ID NO: 681563 - DNA, 15 bp, Homo sapiens
caccaggcaaattgc

SEQ ID NO: 681564 - DNA, 15 bp, Homo sapiens
accaggcaaattgct

SEQ ID NO: 681565 - DNA, 15 bp, Homo sapiens
ccaggcaaattgctg

SEQ ID NO: 681566 - DNA, 15 bp, Homo sapiens
caggcaaattgctgg

SEQ ID NO: 681567 - DNA, 15 bp, Homo sapiens
aggcaaattgctggc

SEQ ID NO: 681568 - DNA, 15 bp, Homo sapiens
ggcaaattgctggca

SEQ ID NO: 681569 - DNA, 15 bp, Homo sapiens
gcaaattgctggcag

SEQ ID NO: 681570 - DNA, 15 bp, Homo sapiens
caaattgctggcagg

SEQ ID NO: 681571 - DNA, 15 bp, Homo sapiens
aaattgctggcaggg

SEQ ID NO: 681572 - DNA, 15 bp, Homo sapiens
aattgctggcagggt

SEQ ID NO: 681573 - DNA, 15 bp, Homo sapiens
attgctggcagggta

SEQ ID NO: 681574 - DNA, 15 bp, Homo sapiens
ttgctggcagggtaa

SEQ ID NO: 681575 - DNA, 15 bp, Homo sapiens
tgctggcagggtaag

SEQ ID NO: 681576 - DNA, 15 bp, Homo sapiens
gctggcagggtaagc

SEQ ID NO: 681577 - DNA, 15 bp, Homo sapiens
ctggcagggtaagca

SEQ ID NO: 681578 - DNA, 15 bp, Homo sapiens
tggcagggtaagcat

SEQ ID NO: 681579 - DNA, 15 bp, Homo sapiens
ggcagggtaagcatt

SEQ ID NO: 681580 - DNA, 15 bp, Homo sapiens
gcagggtaagcatta

SEQ ID NO: 681581 - DNA, 15 bp, Homo sapiens
cagggtaagcattat

SEQ ID NO: 681582 - DNA, 15 bp, Homo sapiens
agggtaagcattatt

SEQ ID NO: 681583 - DNA, 15 bp, Homo sapiens
gggtaagcattatta

SEQ ID NO: 681584 - DNA, 15 bp, Homo sapiens
ggtaagcattattat

SEQ ID NO: 681585 - DNA, 15 bp, Homo sapiens
gtaagcattattatt

SEQ ID NO: 681586 - DNA, 15 bp, Homo sapiens
taagcattattattg

SEQ ID NO: 681587 - DNA, 15 bp, Homo sapiens
aagcattattattga

SEQ ID NO: 681588 - DNA, 15 bp, Homo sapiens
agcattattattgaa

SEQ ID NO: 681589 - DNA, 15 bp, Homo sapiens
gcattattattgaaa

SEQ ID NO: 681590 - DNA, 15 bp, Homo sapiens
cattattattgaaaa

SEQ ID NO: 681591 - DNA, 15 bp, Homo sapiens
attattattgaaaac

SEQ ID NO: 681592 - DNA, 15 bp, Homo sapiens
ttattattgaaaacc

SEQ ID NO: 681593 - DNA, 15 bp, Homo sapiens
tattattgaaaacca

SEQ ID NO: 681594 - DNA, 15 bp, Homo sapiens
attattgaaaaccaa

SEQ ID NO: 681595 - DNA, 15 bp, Homo sapiens
ttattgaaaaccaaa

SEQ ID NO: 681596 - DNA, 15 bp, Homo sapiens
tattgaaaaccaaaa

SEQ ID NO: 681597 - DNA, 15 bp, Homo sapiens
attgaaaaccaaaac

SEQ ID NO: 681598 - DNA, 15 bp, Homo sapiens
ttgaaaaccaaaaca

SEQ ID NO: 681599 - DNA, 15 bp, Homo sapiens
tgaaaaccaaaacaa

SEQ ID NO: 681600 - DNA, 15 bp, Homo sapiens
gaaaaccaaaacaaa

SEQ ID NO: 681601 - DNA, 15 bp, Homo sapiens
aaaaccaaaacaaaa

SEQ ID NO: 681602 - DNA, 15 bp, Homo sapiens
aaaccaaaacaaaag

SEQ ID NO: 681603 - DNA, 15 bp, Homo sapiens
aaccaaaacaaaaga

SEQ ID NO: 681604 - DNA, 15 bp, Homo sapiens
accaaaacaaaagac

SEQ ID NO: 681605 - DNA, 15 bp, Homo sapiens
ccaaaacaaaagact

SEQ ID NO: 681606 - DNA, 15 bp, Homo sapiens
caaaacaaaagacta

SEQ ID NO: 681607 - DNA, 15 bp, Homo sapiens
aaaacaaaagactag

SEQ ID NO: 681608 - DNA, 15 bp, Homo sapiens
aaacaaaagactagt

SEQ ID NO: 681609 - DNA, 15 bp, Homo sapiens
aacaaaagactagtc

SEQ ID NO: 681610 - DNA, 15 bp, Homo sapiens
acaaaagactagtca

SEQ ID NO: 681611 - DNA, 15 bp, Homo sapiens
caaaagactagtcag

SEQ ID NO: 681612 - DNA, 15 bp, Homo sapiens
aaaagactagtcagt

SEQ ID NO: 681613 - DNA, 15 bp, Homo sapiens
aaagactagtcagta

SEQ ID NO: 681614 - DNA, 15 bp, Homo sapiens
aagactagtcagtaa

SEQ ID NO: 681615 - DNA, 15 bp, Homo sapiens
agactagtcagtaac

SEQ ID NO: 681616 - DNA, 15 bp, Homo sapiens
gactagtcagtaact

SEQ ID NO: 681617 - DNA, 15 bp, Homo sapiens
actagtcagtaactt

SEQ ID NO: 681618 - DNA, 15 bp, Homo sapiens
ctagtcagtaacttt

SEQ ID NO: 681619 - DNA, 15 bp, Homo sapiens
tagtcagtaacttta

SEQ ID NO: 681620 - DNA, 15 bp, Homo sapiens
agtcagtaactttag

SEQ ID NO: 681621 - DNA, 15 bp, Homo sapiens
gtcagtaactttaga

SEQ ID NO: 681622 - DNA, 15 bp, Homo sapiens
tcagtaactttagaa

SEQ ID NO: 681623 - DNA, 15 bp, Homo sapiens
cagtaactttagaat

SEQ ID NO: 681624 - DNA, 15 bp, Homo sapiens
agtaactttagaatt

SEQ ID NO: 681625 - DNA, 15 bp, Homo sapiens
gtaactttagaattt

SEQ ID NO: 681626 - DNA, 15 bp, Homo sapiens
taactttagaatttc

SEQ ID NO: 681627 - DNA, 15 bp, Homo sapiens
aactttagaatttct

SEQ ID NO: 681628 - DNA, 15 bp, Homo sapiens
actttagaatttctg

SEQ ID NO: 681629 - DNA, 15 bp, Homo sapiens
ctttagaatttctgc

SEQ ID NO: 681630 - DNA, 15 bp, Homo sapiens
tttagaatttctgcc

SEQ ID NO: 681631 - DNA, 15 bp, Homo sapiens
ttagaatttctgcca

SEQ ID NO: 681632 - DNA, 15 bp, Homo sapiens
tagaatttctgccac

SEQ ID NO: 681633 - DNA, 15 bp, Homo sapiens
agaatttctgccacg

SEQ ID NO: 681634 - DNA, 15 bp, Homo sapiens
gaatttctgccacgg

SEQ ID NO: 681635 - DNA, 15 bp, Homo sapiens
aatttctgccacgga

SEQ ID NO: 681636 - DNA, 15 bp, Homo sapiens
atttctgccacggaa

SEQ ID NO: 681637 - DNA, 15 bp, Homo sapiens
tttctgccacggaaa

SEQ ID NO: 681638 - DNA, 15 bp, Homo sapiens
ttctgccacggaaat

SEQ ID NO: 681639 - DNA, 15 bp, Homo sapiens
tctgccacggaaatt

SEQ ID NO: 681640 - DNA, 15 bp, Homo sapiens
ctgccacggaaatta

SEQ ID NO: 681641 - DNA, 15 bp, Homo sapiens
tgccacggaaattat

SEQ ID NO: 681642 - DNA, 15 bp, Homo sapiens
gccacggaaattatt

SEQ ID NO: 681643 - DNA, 15 bp, Homo sapiens
ccacggaaattattt

SEQ ID NO: 681644 - DNA, 15 bp, Homo sapiens
cacggaaattatttt

SEQ ID NO: 681645 - DNA, 15 bp, Homo sapiens
acggaaattattttt

SEQ ID NO: 681646 - DNA, 15 bp, Homo sapiens
cggaaattatttttc

SEQ ID NO: 681647 - DNA, 15 bp, Homo sapiens
ggaaattatttttct

SEQ ID NO: 681648 - DNA, 15 bp, Homo sapiens
gaaattatttttctt

SEQ ID NO: 681649 - DNA, 15 bp, Homo sapiens
aaattatttttctta

SEQ ID NO: 681650 - DNA, 15 bp, Homo sapiens
aattatttttcttaa

SEQ ID NO: 681651 - DNA, 15 bp, Homo sapiens
attatttttcttaaa

SEQ ID NO: 681652 - DNA, 15 bp, Homo sapiens
ttatttttcttaaac

SEQ ID NO: 681653 - DNA, 15 bp, Homo sapiens
tatttttcttaaact

SEQ ID NO: 681654 - DNA, 15 bp, Homo sapiens
atttttcttaaactt

SEQ ID NO: 681655 - DNA, 15 bp, Homo sapiens
tttttcttaaactta

SEQ ID NO: 681656 - DNA, 15 bp, Homo sapiens
ttttcttaaacttac

SEQ ID NO: 681657 - DNA, 15 bp, Homo sapiens
tttcttaaacttact

SEQ ID NO: 681658 - DNA, 15 bp, Homo sapiens
ttcttaaacttacta

SEQ ID NO: 681659 - DNA, 15 bp, Homo sapiens
tcttaaacttactaa

SEQ ID NO: 681660 - DNA, 15 bp, Homo sapiens
cttaaacttactaaa

SEQ ID NO: 681661 - DNA, 15 bp, Homo sapiens
ttaaacttactaaaa

SEQ ID NO: 681662 - DNA, 15 bp, Homo sapiens
taaacttactaaaag

SEQ ID NO: 681663 - DNA, 15 bp, Homo sapiens
aaacttactaaaaga

SEQ ID NO: 681664 - DNA, 15 bp, Homo sapiens
aacttactaaaagag

SEQ ID NO: 681665 - DNA, 15 bp, Homo sapiens
acttactaaaagagt

SEQ ID NO: 681666 - DNA, 15 bp, Homo sapiens
cttactaaaagagta

SEQ ID NO: 681667 - DNA, 15 bp, Homo sapiens
ttactaaaagagtag

SEQ ID NO: 681668 - DNA, 15 bp, Homo sapiens
tactaaaagagtagt

SEQ ID NO: 681669 - DNA, 15 bp, Homo sapiens
actaaaagagtagtt

SEQ ID NO: 681670 - DNA, 15 bp, Homo sapiens
ctaaaagagtagtta

SEQ ID NO: 681671 - DNA, 15 bp, Homo sapiens
taaaagagtagttag

SEQ ID NO: 681672 - DNA, 15 bp, Homo sapiens
aaaagagtagttagt

SEQ ID NO: 681673 - DNA, 15 bp, Homo sapiens
aaagagtagttagtt

SEQ ID NO: 681674 - DNA, 15 bp, Homo sapiens
aagagtagttagtta

SEQ ID NO: 681675 - DNA, 15 bp, Homo sapiens
agagtagttagttat

SEQ ID NO: 681676 - DNA, 15 bp, Homo sapiens
gagtagttagttata

SEQ ID NO: 681677 - DNA, 15 bp, Homo sapiens
agtagttagttatat

SEQ ID NO: 681678 - DNA, 15 bp, Homo sapiens
gtagttagttatatt

SEQ ID NO: 681679 - DNA, 15 bp, Homo sapiens
tagttagttatattg

SEQ ID NO: 681680 - DNA, 15 bp, Homo sapiens
agttagttatattgc

SEQ ID NO: 681681 - DNA, 15 bp, Homo sapiens
gttagttatattgct

SEQ ID NO: 681682 - DNA, 15 bp, Homo sapiens
ttagttatattgcta

SEQ ID NO: 681683 - DNA, 15 bp, Homo sapiens
tagttatattgctag

SEQ ID NO: 681684 - DNA, 15 bp, Homo sapiens
agttatattgctagt

SEQ ID NO: 681685 - DNA, 15 bp, Homo sapiens
gttatattgctagta

SEQ ID NO: 681686 - DNA, 15 bp, Homo sapiens
ttatattgctagtaa

SEQ ID NO: 681687 - DNA, 15 bp, Homo sapiens
tatattgctagtaaa

SEQ ID NO: 681688 - DNA, 15 bp, Homo sapiens
atattgctagtaaaa

SEQ ID NO: 681689 - DNA, 15 bp, Homo sapiens
tattgctagtaaaat

SEQ ID NO: 681690 - DNA, 15 bp, Homo sapiens
attgctagtaaaatt

SEQ ID NO: 681691 - DNA, 15 bp, Homo sapiens
ttgctagtaaaatta

SEQ ID NO: 681692 - DNA, 15 bp, Homo sapiens
tgctagtaaaattat

SEQ ID NO: 681693 - DNA, 15 bp, Homo sapiens
gctagtaaaattatt

SEQ ID NO: 681694 - DNA, 15 bp, Homo sapiens
ctagtaaaattattt

SEQ ID NO: 681695 - DNA, 15 bp, Homo sapiens
tagtaaaattatttt

SEQ ID NO: 681696 - DNA, 15 bp, Homo sapiens
agtaaaattatttta

SEQ ID NO: 681697 - DNA, 15 bp, Homo sapiens
gtaaaattattttat

SEQ ID NO: 681698 - DNA, 15 bp, Homo sapiens
taaaattattttatt

SEQ ID NO: 681699 - DNA, 15 bp, Homo sapiens
aaaattattttattg

SEQ ID NO: 681700 - DNA, 15 bp, Homo sapiens
aaattattttattga

SEQ ID NO: 681701 - DNA, 15 bp, Homo sapiens
aattattttattgat

SEQ ID NO: 681702 - DNA, 15 bp, Homo sapiens
attattttattgata

SEQ ID NO: 681703 - DNA, 15 bp, Homo sapiens
ttattttattgatat

SEQ ID NO: 681704 - DNA, 15 bp, Homo sapiens
tattttattgatata

SEQ ID NO: 681705 - DNA, 15 bp, Homo sapiens
attttattgatataa

SEQ ID NO: 681706 - DNA, 15 bp, Homo sapiens
ttttattgatataag

SEQ ID NO: 681707 - DNA, 15 bp, Homo sapiens
tttattgatataaga

SEQ ID NO: 681708 - DNA, 15 bp, Homo sapiens
ttattgatataagaa

SEQ ID NO: 681709 - DNA, 15 bp, Homo sapiens
tattgatataagaag

SEQ ID NO: 681710 - DNA, 15 bp, Homo sapiens
attgatataagaagc

SEQ ID NO: 681711 - DNA, 15 bp, Homo sapiens
ttgatataagaagcc

SEQ ID NO: 681712 - DNA, 15 bp, Homo sapiens
tgatataagaagcct

SEQ ID NO: 681713 - DNA, 15 bp, Homo sapiens
gatataagaagccta

SEQ ID NO: 681714 - DNA, 15 bp, Homo sapiens
atataagaagcctaa

SEQ ID NO: 681715 - DNA, 15 bp, Homo sapiens
tataagaagcctaac

SEQ ID NO: 681716 - DNA, 15 bp, Homo sapiens
ataagaagcctaact

SEQ ID NO: 681717 - DNA, 15 bp, Homo sapiens
taagaagcctaactt

SEQ ID NO: 681718 - DNA, 15 bp, Homo sapiens
aagaagcctaacttt

SEQ ID NO: 681719 - DNA, 15 bp, Homo sapiens
agaagcctaactttg

SEQ ID NO: 681720 - DNA, 15 bp, Homo sapiens
gaagcctaactttgt

SEQ ID NO: 681721 - DNA, 15 bp, Homo sapiens
aagcctaactttgtt

SEQ ID NO: 681722 - DNA, 15 bp, Homo sapiens
agcctaactttgttt

SEQ ID NO: 681723 - DNA, 15 bp, Homo sapiens
gcctaactttgtttg

SEQ ID NO: 681724 - DNA, 15 bp, Homo sapiens
cctaactttgtttga

SEQ ID NO: 681725 - DNA, 15 bp, Homo sapiens
ctaactttgtttgaa

SEQ ID NO: 681726 - DNA, 15 bp, Homo sapiens
taactttgtttgaaa

SEQ ID NO: 681727 - DNA, 15 bp, Homo sapiens
aactttgtttgaaaa

SEQ ID NO: 681728 - DNA, 15 bp, Homo sapiens
actttgtttgaaaag

SEQ ID NO: 681729 - DNA, 15 bp, Homo sapiens
ctttgtttgaaaagt

SEQ ID NO: 681730 - DNA, 15 bp, Homo sapiens
tttgtttgaaaagtc

SEQ ID NO: 681731 - DNA, 15 bp, Homo sapiens
ttgtttgaaaagtct

SEQ ID NO: 681732 - DNA, 15 bp, Homo sapiens
tgtttgaaaagtcta

SEQ ID NO: 681733 - DNA, 15 bp, Homo sapiens
gtttgaaaagtctaa

SEQ ID NO: 681734 - DNA, 15 bp, Homo sapiens
tttgaaaagtctaaa

SEQ ID NO: 681735 - DNA, 15 bp, Homo sapiens
ttgaaaagtctaaac

SEQ ID NO: 681736 - DNA, 15 bp, Homo sapiens
tgaaaagtctaaact

SEQ ID NO: 681737 - DNA, 15 bp, Homo sapiens
gaaaagtctaaactt

SEQ ID NO: 681738 - DNA, 15 bp, Homo sapiens
aaaagtctaaacttt

SEQ ID NO: 681739 - DNA, 15 bp, Homo sapiens
aaagtctaaactttt

SEQ ID NO: 681740 - DNA, 15 bp, Homo sapiens
aagtctaaactttta

SEQ ID NO: 681741 - DNA, 15 bp, Homo sapiens
agtctaaacttttag

SEQ ID NO: 681742 - DNA, 15 bp, Homo sapiens
gtctaaacttttagt

SEQ ID NO: 681743 - DNA, 15 bp, Homo sapiens
tctaaacttttagtc

SEQ ID NO: 681744 - DNA, 15 bp, Homo sapiens
ctaaacttttagtct

SEQ ID NO: 681745 - DNA, 15 bp, Homo sapiens
taaacttttagtcta

SEQ ID NO: 681746 - DNA, 15 bp, Homo sapiens
aaacttttagtctag

SEQ ID NO: 681747 - DNA, 15 bp, Homo sapiens
aacttttagtctagt

SEQ ID NO: 681748 - DNA, 15 bp, Homo sapiens
acttttagtctagtc

SEQ ID NO: 681749 - DNA, 15 bp, Homo sapiens
cttttagtctagtct

SEQ ID NO: 681750 - DNA, 15 bp, Homo sapiens
ttttagtctagtcta

SEQ ID NO: 681751 - DNA, 15 bp, Homo sapiens
tttagtctagtctac

SEQ ID NO: 681752 - DNA, 15 bp, Homo sapiens
ttagtctagtctaca

SEQ ID NO: 681753 - DNA, 15 bp, Homo sapiens
tagtctagtctacag

SEQ ID NO: 681754 - DNA, 15 bp, Homo sapiens
agtctagtctacagt

SEQ ID NO: 681755 - DNA, 15 bp, Homo sapiens
gtctagtctacagtt

SEQ ID NO: 681756 - DNA, 15 bp, Homo sapiens
tctagtctacagttg

SEQ ID NO: 681757 - DNA, 15 bp, Homo sapiens
ctagtctacagttgt

SEQ ID NO: 681758 - DNA, 15 bp, Homo sapiens
tagtctacagttgtc

SEQ ID NO: 681759 - DNA, 15 bp, Homo sapiens
agtctacagttgtca

SEQ ID NO: 681760 - DNA, 15 bp, Homo sapiens
gtctacagttgtcag

SEQ ID NO: 681761 - DNA, 15 bp, Homo sapiens
tctacagttgtcaga

SEQ ID NO: 681762 - DNA, 15 bp, Homo sapiens
ctacagttgtcagac

SEQ ID NO: 681763 - DNA, 15 bp, Homo sapiens
tacagttgtcagaca

SEQ ID NO: 681764 - DNA, 15 bp, Homo sapiens
acagttgtcagacaa

SEQ ID NO: 681765 - DNA, 15 bp, Homo sapiens
cagttgtcagacaaa

SEQ ID NO: 681766 - DNA, 15 bp, Homo sapiens
agttgtcagacaaat

SEQ ID NO: 681767 - DNA, 15 bp, Homo sapiens
gttgtcagacaaata

SEQ ID NO: 681768 - DNA, 15 bp, Homo sapiens
ttgtcagacaaatag

SEQ ID NO: 681769 - DNA, 15 bp, Homo sapiens
tgtcagacaaatagc

SEQ ID NO: 681770 - DNA, 15 bp, Homo sapiens
gtcagacaaatagca

SEQ ID NO: 681771 - DNA, 15 bp, Homo sapiens
tcagacaaatagcaa

SEQ ID NO: 681772 - DNA, 15 bp, Homo sapiens
cagacaaatagcaaa

SEQ ID NO: 681773 - DNA, 15 bp, Homo sapiens
agacaaatagcaaat

SEQ ID NO: 681774 - DNA, 15 bp, Homo sapiens
gacaaatagcaaatt

SEQ ID NO: 681775 - DNA, 15 bp, Homo sapiens
acaaatagcaaattg

SEQ ID NO: 681776 - DNA, 15 bp, Homo sapiens
caaatagcaaattgt

SEQ ID NO: 681777 - DNA, 15 bp, Homo sapiens
aaatagcaaattgta

SEQ ID NO: 681778 - DNA, 15 bp, Homo sapiens
aatagcaaattgtac

SEQ ID NO: 681779 - DNA, 15 bp, Homo sapiens
atagcaaattgtacc

SEQ ID NO: 681780 - DNA, 15 bp, Homo sapiens
tagcaaattgtaccc

SEQ ID NO: 681781 - DNA, 15 bp, Homo sapiens
agcaaattgtacccc

SEQ ID NO: 681782 - DNA, 15 bp, Homo sapiens
gcaaattgtacccct

SEQ ID NO: 681783 - DNA, 15 bp, Homo sapiens
caaattgtaccccta

SEQ ID NO: 681784 - DNA, 15 bp, Homo sapiens
aaattgtacccctac

SEQ ID NO: 681785 - DNA, 15 bp, Homo sapiens
aattgtacccctacc

SEQ ID NO: 681786 - DNA, 15 bp, Homo sapiens
attgtacccctacct

SEQ ID NO: 681787 - DNA, 15 bp, Homo sapiens
ttgtacccctacctt

SEQ ID NO: 681788 - DNA, 15 bp, Homo sapiens
tgtacccctacctta

SEQ ID NO: 681789 - DNA, 15 bp, Homo sapiens
gtacccctaccttaa

SEQ ID NO: 681790 - DNA, 15 bp, Homo sapiens
tacccctaccttaaa

SEQ ID NO: 681791 - DNA, 15 bp, Homo sapiens
acccctaccttaaaa

SEQ ID NO: 681792 - DNA, 15 bp, Homo sapiens
cccctaccttaaaaa

SEQ ID NO: 681793 - DNA, 15 bp, Homo sapiens
ccctaccttaaaaat

SEQ ID NO: 681794 - DNA, 15 bp, Homo sapiens
cctaccttaaaaata

SEQ ID NO: 681795 - DNA, 15 bp, Homo sapiens
ctaccttaaaaatat

SEQ ID NO: 681796 - DNA, 15 bp, Homo sapiens
taccttaaaaatatt

SEQ ID NO: 681797 - DNA, 15 bp, Homo sapiens
accttaaaaatattt

SEQ ID NO: 681798 - DNA, 15 bp, Homo sapiens
ccttaaaaatatttt

SEQ ID NO: 681799 - DNA, 15 bp, Homo sapiens
cttaaaaatattttc

SEQ ID NO: 681800 - DNA, 15 bp, Homo sapiens
ttaaaaatattttca

SEQ ID NO: 681801 - DNA, 15 bp, Homo sapiens
taaaaatattttcaa

SEQ ID NO: 681802 - DNA, 15 bp, Homo sapiens
aaaaatattttcaaa

SEQ ID NO: 681803 - DNA, 15 bp, Homo sapiens
aaaatattttcaaaa

SEQ ID NO: 681804 - DNA, 15 bp, Homo sapiens
aaatattttcaaaaa

SEQ ID NO: 681805 - DNA, 15 bp, Homo sapiens
aatattttcaaaaag

SEQ ID NO: 681806 - DNA, 15 bp, Homo sapiens
atattttcaaaaagt

SEQ ID NO: 681807 - DNA, 15 bp, Homo sapiens
tattttcaaaaagta

SEQ ID NO: 681808 - DNA, 15 bp, Homo sapiens
attttcaaaaagtat

SEQ ID NO: 681809 - DNA, 15 bp, Homo sapiens
ttttcaaaaagtatc

SEQ ID NO: 681810 - DNA, 15 bp, Homo sapiens
tttcaaaaagtatct

SEQ ID NO: 681811 - DNA, 15 bp, Homo sapiens
ttcaaaaagtatcta

SEQ ID NO: 681812 - DNA, 15 bp, Homo sapiens
tcaaaaagtatctat

SEQ ID NO: 681813 - DNA, 15 bp, Homo sapiens
caaaaagtatctata

SEQ ID NO: 681814 - DNA, 15 bp, Homo sapiens
aaaaagtatctataa

SEQ ID NO: 681815 - DNA, 15 bp, Homo sapiens
aaaagtatctataat

SEQ ID NO: 681816 - DNA, 15 bp, Homo sapiens
aaagtatctataatc

SEQ ID NO: 681817 - DNA, 15 bp, Homo sapiens
aagtatctataatct

SEQ ID NO: 681818 - DNA, 15 bp, Homo sapiens
agtatctataatctt

SEQ ID NO: 681819 - DNA, 15 bp, Homo sapiens
gtatctataatctta

SEQ ID NO: 681820 - DNA, 15 bp, Homo sapiens
tatctataatcttat

SEQ ID NO: 681821 - DNA, 15 bp, Homo sapiens
atctataatcttata

SEQ ID NO: 681822 - DNA, 15 bp, Homo sapiens
tctataatcttatag

SEQ ID NO: 681823 - DNA, 15 bp, Homo sapiens
ctataatcttatagg

SEQ ID NO: 681824 - DNA, 15 bp, Homo sapiens
tataatcttatagga

SEQ ID NO: 681825 - DNA, 15 bp, Homo sapiens
ataatcttataggaa

SEQ ID NO: 681826 - DNA, 15 bp, Homo sapiens
taatcttataggaat

SEQ ID NO: 681827 - DNA, 15 bp, Homo sapiens
aatcttataggaata

SEQ ID NO: 681828 - DNA, 15 bp, Homo sapiens
atcttataggaataa

SEQ ID NO: 681829 - DNA, 15 bp, Homo sapiens
tcttataggaataaa

SEQ ID NO: 681830 - DNA, 15 bp, Homo sapiens
cttataggaataaat

SEQ ID NO: 681831 - DNA, 15 bp, Homo sapiens
ttataggaataaata

SEQ ID NO: 681832 - DNA, 15 bp, Homo sapiens
tataggaataaatat

SEQ ID NO: 681833 - DNA, 15 bp, Homo sapiens
ataggaataaatatt

SEQ ID NO: 681834 - DNA, 15 bp, Homo sapiens
taggaataaatattt

SEQ ID NO: 681835 - DNA, 15 bp, Homo sapiens
aggaataaatatttt

SEQ ID NO: 681836 - DNA, 15 bp, Homo sapiens
ggaataaatatttta

SEQ ID NO: 681837 - DNA, 15 bp, Homo sapiens
gaataaatattttag

SEQ ID NO: 681838 - DNA, 15 bp, Homo sapiens
atatcagcatttcta

SEQ ID NO: 681839 - DNA, 15 bp, Homo sapiens
tatcagcatttctac

SEQ ID NO: 681840 - DNA, 15 bp, Homo sapiens
atcagcatttctacc

SEQ ID NO: 681841 - DNA, 15 bp, Homo sapiens
tcagcatttctacct

SEQ ID NO: 681842 - DNA, 15 bp, Homo sapiens
cagcatttctacctt

SEQ ID NO: 681843 - DNA, 15 bp, Homo sapiens
agcatttctaccttc

SEQ ID NO: 681844 - DNA, 15 bp, Homo sapiens
gcatttctaccttct

SEQ ID NO: 681845 - DNA, 15 bp, Homo sapiens
catttctaccttctc

SEQ ID NO: 681846 - DNA, 15 bp, Homo sapiens
atttctaccttctct

SEQ ID NO: 681847 - DNA, 15 bp, Homo sapiens
tttctaccttctctg

SEQ ID NO: 681848 - DNA, 15 bp, Homo sapiens
ttctaccttctctgt

SEQ ID NO: 681849 - DNA, 15 bp, Homo sapiens
tctaccttctctgta

SEQ ID NO: 681850 - DNA, 15 bp, Homo sapiens
ctaccttctctgtag

SEQ ID NO: 681851 - DNA, 15 bp, Homo sapiens
taccttctctgtagg

SEQ ID NO: 681852 - DNA, 15 bp, Homo sapiens
accttctctgtaggt

SEQ ID NO: 681853 - DNA, 15 bp, Homo sapiens
ccttctctgtaggtt

SEQ ID NO: 681854 - DNA, 15 bp, Homo sapiens
cttctctgtaggttg

SEQ ID NO: 681855 - DNA, 15 bp, Homo sapiens
ttctctgtaggttgg

SEQ ID NO: 681856 - DNA, 15 bp, Homo sapiens
tctctgtaggttggc

SEQ ID NO: 681857 - DNA, 15 bp, Homo sapiens
ctctgtaggttggct

SEQ ID NO: 681858 - DNA, 15 bp, Homo sapiens
tctgtaggttggctt

SEQ ID NO: 681859 - DNA, 15 bp, Homo sapiens
ctgtaggttggcttg

SEQ ID NO: 681860 - DNA, 15 bp, Homo sapiens
tgtaggttggcttgc

SEQ ID NO: 681861 - DNA, 15 bp, Homo sapiens
gtaggttggcttgcc

SEQ ID NO: 681862 - DNA, 15 bp, Homo sapiens
taggttggcttgcct

SEQ ID NO: 681863 - DNA, 15 bp, Homo sapiens
aggttggcttgcctc

SEQ ID NO: 681864 - DNA, 15 bp, Homo sapiens
ggttggcttgcctca

SEQ ID NO: 681865 - DNA, 15 bp, Homo sapiens
gttggcttgcctcac

SEQ ID NO: 681866 - DNA, 15 bp, Homo sapiens
ttggcttgcctcacg

SEQ ID NO: 681867 - DNA, 15 bp, Homo sapiens
tggcttgcctcacgt

SEQ ID NO: 681868 - DNA, 15 bp, Homo sapiens
ggcttgcctcacgtt

SEQ ID NO: 681869 - DNA, 15 bp, Homo sapiens
gcttgcctcacgtta

SEQ ID NO: 681870 - DNA, 15 bp, Homo sapiens
cttgcctcacgttac

SEQ ID NO: 681871 - DNA, 15 bp, Homo sapiens
ttgcctcacgttaca

SEQ ID NO: 681872 - DNA, 15 bp, Homo sapiens
tgcctcacgttacaa

SEQ ID NO: 681873 - DNA, 15 bp, Homo sapiens
gcctcacgttacaat

SEQ ID NO: 681874 - DNA, 15 bp, Homo sapiens
cctcacgttacaatg

SEQ ID NO: 681875 - DNA, 15 bp, Homo sapiens
ctcacgttacaatgg

SEQ ID NO: 681876 - DNA, 15 bp, Homo sapiens
tcacgttacaatggc

SEQ ID NO: 681877 - DNA, 15 bp, Homo sapiens
cacgttacaatggct

SEQ ID NO: 681878 - DNA, 15 bp, Homo sapiens
acgttacaatggctg

SEQ ID NO: 681879 - DNA, 15 bp, Homo sapiens
cgttacaatggctgc

SEQ ID NO: 681880 - DNA, 15 bp, Homo sapiens
gttacaatggctgca

SEQ ID NO: 681881 - DNA, 15 bp, Homo sapiens
ttacaatggctgcag

SEQ ID NO: 681882 - DNA, 15 bp, Homo sapiens
tacaatggctgcagc

SEQ ID NO: 681883 - DNA, 15 bp, Homo sapiens
acaatggctgcagca

SEQ ID NO: 681884 - DNA, 15 bp, Homo sapiens
caatggctgcagcaa

SEQ ID NO: 681885 - DNA, 15 bp, Homo sapiens
aatggctgcagcaat

SEQ ID NO: 681886 - DNA, 15 bp, Homo sapiens
atggctgcagcaatc

SEQ ID NO: 681887 - DNA, 15 bp, Homo sapiens
tggctgcagcaatca

SEQ ID NO: 681888 - DNA, 15 bp, Homo sapiens
ggctgcagcaatcag

SEQ ID NO: 681889 - DNA, 15 bp, Homo sapiens
gctgcagcaatcaga

SEQ ID NO: 681890 - DNA, 15 bp, Homo sapiens
ctgcagcaatcagaa

SEQ ID NO: 681891 - DNA, 15 bp, Homo sapiens
tgcagcaatcagaag

SEQ ID NO: 681892 - DNA, 15 bp, Homo sapiens
gcagcaatcagaagt

SEQ ID NO: 681893 - DNA, 15 bp, Homo sapiens
cagcaatcagaagtg

SEQ ID NO: 681894 - DNA, 15 bp, Homo sapiens
agcaatcagaagtgt

SEQ ID NO: 681895 - DNA, 15 bp, Homo sapiens
gcaatcagaagtgtc

SEQ ID NO: 681896 - DNA, 15 bp, Homo sapiens
caatcagaagtgtca

SEQ ID NO: 681897 - DNA, 15 bp, Homo sapiens
aatcagaagtgtcac

SEQ ID NO: 681898 - DNA, 15 bp, Homo sapiens
atcagaagtgtcaca

SEQ ID NO: 681899 - DNA, 15 bp, Homo sapiens
tcagaagtgtcacat

SEQ ID NO: 681900 - DNA, 15 bp, Homo sapiens
cagaagtgtcacatc

SEQ ID NO: 681901 - DNA, 15 bp, Homo sapiens
agaagtgtcacatcc

SEQ ID NO: 681902 - DNA, 15 bp, Homo sapiens
gaagtgtcacatcct

SEQ ID NO: 681903 - DNA, 15 bp, Homo sapiens
aagtgtcacatcctc

SEQ ID NO: 681904 - DNA, 15 bp, Homo sapiens
agtgtcacatcctca

SEQ ID NO: 681905 - DNA, 15 bp, Homo sapiens
gtgtcacatcctcag

SEQ ID NO: 681906 - DNA, 15 bp, Homo sapiens
tgtcacatcctcagt

SEQ ID NO: 681907 - DNA, 15 bp, Homo sapiens
gtcacatcctcagta

SEQ ID NO: 681908 - DNA, 15 bp, Homo sapiens
tcacatcctcagtaa

SEQ ID NO: 681909 - DNA, 15 bp, Homo sapiens
cacatcctcagtaat

SEQ ID NO: 681910 - DNA, 15 bp, Homo sapiens
acatcctcagtaata

SEQ ID NO: 681911 - DNA, 15 bp, Homo sapiens
catcctcagtaatac

SEQ ID NO: 681912 - DNA, 15 bp, Homo sapiens
atcctcagtaatact

SEQ ID NO: 681913 - DNA, 15 bp, Homo sapiens
tcctcagtaatactt

SEQ ID NO: 681914 - DNA, 15 bp, Homo sapiens
cctcagtaatactta

SEQ ID NO: 681915 - DNA, 15 bp, Homo sapiens
ctcagtaatacttaa

SEQ ID NO: 681916 - DNA, 15 bp, Homo sapiens
tcagtaatacttaat

SEQ ID NO: 681917 - DNA, 15 bp, Homo sapiens
cagtaatacttaata

SEQ ID NO: 681918 - DNA, 15 bp, Homo sapiens
agtaatacttaatat

SEQ ID NO: 681919 - DNA, 15 bp, Homo sapiens
gtaatacttaatatt

SEQ ID NO: 681920 - DNA, 15 bp, Homo sapiens
taatacttaatatta

SEQ ID NO: 681921 - DNA, 15 bp, Homo sapiens
aatacttaatattat

SEQ ID NO: 681922 - DNA, 15 bp, Homo sapiens
atacttaatattatt

SEQ ID NO: 681923 - DNA, 15 bp, Homo sapiens
tacttaatattatta

SEQ ID NO: 681924 - DNA, 15 bp, Homo sapiens
acttaatattattac

SEQ ID NO: 681925 - DNA, 15 bp, Homo sapiens
cttaatattattact

SEQ ID NO: 681926 - DNA, 15 bp, Homo sapiens
ttaatattattacta

SEQ ID NO: 681927 - DNA, 15 bp, Homo sapiens
taatattattactat

SEQ ID NO: 681928 - DNA, 15 bp, Homo sapiens
aatattattactatt

SEQ ID NO: 681929 - DNA, 15 bp, Homo sapiens
atattattactatta

SEQ ID NO: 681930 - DNA, 15 bp, Homo sapiens
tattattactattat

SEQ ID NO: 681931 - DNA, 15 bp, Homo sapiens
attattactattatt

SEQ ID NO: 681932 - DNA, 15 bp, Homo sapiens
ttattactattattt

SEQ ID NO: 681933 - DNA, 15 bp, Homo sapiens
tattactattattta

SEQ ID NO: 681934 - DNA, 15 bp, Homo sapiens
attactattatttaa

SEQ ID NO: 681935 - DNA, 15 bp, Homo sapiens
ttactattatttaat

SEQ ID NO: 681936 - DNA, 15 bp, Homo sapiens
tactattatttaata

SEQ ID NO: 681937 - DNA, 15 bp, Homo sapiens
actattatttaataa

SEQ ID NO: 681938 - DNA, 15 bp, Homo sapiens
ctattatttaataat

SEQ ID NO: 681939 - DNA, 15 bp, Homo sapiens
tattatttaataata

SEQ ID NO: 681940 - DNA, 15 bp, Homo sapiens
attatttaataatat

SEQ ID NO: 681941 - DNA, 15 bp, Homo sapiens
ttatttaataatatt

SEQ ID NO: 681942 - DNA, 15 bp, Homo sapiens
tatttaataatattt

SEQ ID NO: 681943 - DNA, 15 bp, Homo sapiens
atttaataatattta

SEQ ID NO: 681944 - DNA, 15 bp, Homo sapiens
tttaataatatttag

SEQ ID NO: 681945 - DNA, 15 bp, Homo sapiens
ttaataatatttaga

SEQ ID NO: 681946 - DNA, 15 bp, Homo sapiens
taataatatttagaa

SEQ ID NO: 681947 - DNA, 15 bp, Homo sapiens
aataatatttagaac

SEQ ID NO: 681948 - DNA, 15 bp, Homo sapiens
ataatatttagaact

SEQ ID NO: 681949 - DNA, 15 bp, Homo sapiens
taatatttagaactg

SEQ ID NO: 681950 - DNA, 15 bp, Homo sapiens
aatatttagaactgt

SEQ ID NO: 681951 - DNA, 15 bp, Homo sapiens
atatttagaactgtg

SEQ ID NO: 681952 - DNA, 15 bp, Homo sapiens
tatttagaactgtgc

SEQ ID NO: 681953 - DNA, 15 bp, Homo sapiens
atttagaactgtgcc

SEQ ID NO: 681954 - DNA, 15 bp, Homo sapiens
tttagaactgtgcca

SEQ ID NO: 681955 - DNA, 15 bp, Homo sapiens
ttagaactgtgccat

SEQ ID NO: 681956 - DNA, 15 bp, Homo sapiens
tagaactgtgccatc

SEQ ID NO: 681957 - DNA, 15 bp, Homo sapiens
agaactgtgccatcc

SEQ ID NO: 681958 - DNA, 15 bp, Homo sapiens
gaactgtgccatccc

SEQ ID NO: 681959 - DNA, 15 bp, Homo sapiens
aactgtgccatccct

SEQ ID NO: 681960 - DNA, 15 bp, Homo sapiens
actgtgccatccctg

SEQ ID NO: 681961 - DNA, 15 bp, Homo sapiens
ctgtgccatccctgt

SEQ ID NO: 681962 - DNA, 15 bp, Homo sapiens
tgtgccatccctgtt

SEQ ID NO: 681963 - DNA, 15 bp, Homo sapiens
gtgccatccctgttt

SEQ ID NO: 681964 - DNA, 15 bp, Homo sapiens
tgccatccctgtttc

SEQ ID NO: 681965 - DNA, 15 bp, Homo sapiens
gccatccctgtttca

SEQ ID NO: 681966 - DNA, 15 bp, Homo sapiens
ccatccctgtttcaa

SEQ ID NO: 681967 - DNA, 15 bp, Homo sapiens
catccctgtttcaat

SEQ ID NO: 681968 - DNA, 15 bp, Homo sapiens
atccctgtttcaatt

SEQ ID NO: 681969 - DNA, 15 bp, Homo sapiens
tccctgtttcaattt

SEQ ID NO: 681970 - DNA, 15 bp, Homo sapiens
ccctgtttcaattta

SEQ ID NO: 681971 - DNA, 15 bp, Homo sapiens
cctgtttcaatttat

SEQ ID NO: 681972 - DNA, 15 bp, Homo sapiens
ctgtttcaatttatc

SEQ ID NO: 681973 - DNA, 15 bp, Homo sapiens
tgtttcaatttatca

SEQ ID NO: 681974 - DNA, 15 bp, Homo sapiens
gtttcaatttatcag

SEQ ID NO: 681975 - DNA, 15 bp, Homo sapiens
tttcaatttatcagg

SEQ ID NO: 681976 - DNA, 15 bp, Homo sapiens
ttcaatttatcaggc

SEQ ID NO: 681977 - DNA, 15 bp, Homo sapiens
tcaatttatcaggct

SEQ ID NO: 681978 - DNA, 15 bp, Homo sapiens
caatttatcaggctc

SEQ ID NO: 681979 - DNA, 15 bp, Homo sapiens
aatttatcaggctcc

SEQ ID NO: 681980 - DNA, 15 bp, Homo sapiens
atttatcaggctccc

SEQ ID NO: 681981 - DNA, 15 bp, Homo sapiens
tttatcaggctccca

SEQ ID NO: 681982 - DNA, 15 bp, Homo sapiens
ttatcaggctcccag

SEQ ID NO: 681983 - DNA, 15 bp, Homo sapiens
tatcaggctcccagc

SEQ ID NO: 681984 - DNA, 15 bp, Homo sapiens
atcaggctcccagca

SEQ ID NO: 681985 - DNA, 15 bp, Homo sapiens
tcaggctcccagcag

SEQ ID NO: 681986 - DNA, 15 bp, Homo sapiens
caggctcccagcaga

SEQ ID NO: 681987 - DNA, 15 bp, Homo sapiens
aggctcccagcagac

SEQ ID NO: 681988 - DNA, 15 bp, Homo sapiens
ggctcccagcagact

SEQ ID NO: 681989 - DNA, 15 bp, Homo sapiens
gctcccagcagacta

SEQ ID NO: 681990 - DNA, 15 bp, Homo sapiens
ctcccagcagactac

SEQ ID NO: 681991 - DNA, 15 bp, Homo sapiens
tcccagcagactact

SEQ ID NO: 681992 - DNA, 15 bp, Homo sapiens
cccagcagactactc

SEQ ID NO: 681993 - DNA, 15 bp, Homo sapiens
ccagcagactactcc

SEQ ID NO: 681994 - DNA, 15 bp, Homo sapiens
cagcagactactcct

SEQ ID NO: 681995 - DNA, 15 bp, Homo sapiens
agcagactactcctt

SEQ ID NO: 681996 - DNA, 15 bp, Homo sapiens
gcagactactcctta

SEQ ID NO: 681997 - DNA, 15 bp, Homo sapiens
cagactactccttat

SEQ ID NO: 681998 - DNA, 15 bp, Homo sapiens
agactactccttatc

SEQ ID NO: 681999 - DNA, 15 bp, Homo sapiens
gactactccttatct

SEQ ID NO: 682000 - DNA, 15 bp, Homo sapiens
actactccttatctt

SEQ ID NO: 682001 - DNA, 15 bp, Homo sapiens
ctactccttatcttt

SEQ ID NO: 682002 - DNA, 15 bp, Homo sapiens
tactccttatctttc

SEQ ID NO: 682003 - DNA, 15 bp, Homo sapiens
actccttatctttca

SEQ ID NO: 682004 - DNA, 15 bp, Homo sapiens
ctccttatctttcaa

SEQ ID NO: 682005 - DNA, 15 bp, Homo sapiens
tccttatctttcaaa

SEQ ID NO: 682006 - DNA, 15 bp, Homo sapiens
ccttatctttcaaat

SEQ ID NO: 682007 - DNA, 15 bp, Homo sapiens
cttatctttcaaatg

SEQ ID NO: 682008 - DNA, 15 bp, Homo sapiens
ttatctttcaaatgt

SEQ ID NO: 682009 - DNA, 15 bp, Homo sapiens
tatctttcaaatgtc

SEQ ID NO: 682010 - DNA, 15 bp, Homo sapiens
atctttcaaatgtca

SEQ ID NO: 682011 - DNA, 15 bp, Homo sapiens
tctttcaaatgtcaa

SEQ ID NO: 682012 - DNA, 15 bp, Homo sapiens
ctttcaaatgtcaaa

SEQ ID NO: 682013 - DNA, 15 bp, Homo sapiens
tttcaaatgtcaaaa

SEQ ID NO: 682014 - DNA, 15 bp, Homo sapiens
ttcaaatgtcaaaac

SEQ ID NO: 682015 - DNA, 15 bp, Homo sapiens
tcaaatgtcaaaact

SEQ ID NO: 682016 - DNA, 15 bp, Homo sapiens
caaatgtcaaaactg

SEQ ID NO: 682017 - DNA, 15 bp, Homo sapiens
aaatgtcaaaactgc

SEQ ID NO: 682018 - DNA, 15 bp, Homo sapiens
aatgtcaaaactgca

SEQ ID NO: 682019 - DNA, 15 bp, Homo sapiens
atgtcaaaactgcat

SEQ ID NO: 682020 - DNA, 15 bp, Homo sapiens
tgtcaaaactgcatc

SEQ ID NO: 682021 - DNA, 15 bp, Homo sapiens
gtcaaaactgcatcc

SEQ ID NO: 682022 - DNA, 15 bp, Homo sapiens
tcaaaactgcatcct

SEQ ID NO: 682023 - DNA, 15 bp, Homo sapiens
caaaactgcatcctg

SEQ ID NO: 682024 - DNA, 15 bp, Homo sapiens
aaaactgcatcctga

SEQ ID NO: 682025 - DNA, 15 bp, Homo sapiens
aaactgcatcctgag

SEQ ID NO: 682026 - DNA, 15 bp, Homo sapiens
aactgcatcctgagc

SEQ ID NO: 682027 - DNA, 15 bp, Homo sapiens
actgcatcctgagct

SEQ ID NO: 682028 - DNA, 15 bp, Homo sapiens
ctgcatcctgagctc

SEQ ID NO: 682029 - DNA, 15 bp, Homo sapiens
tgcatcctgagctct

SEQ ID NO: 682030 - DNA, 15 bp, Homo sapiens
gcatcctgagctctt

SEQ ID NO: 682031 - DNA, 15 bp, Homo sapiens
catcctgagctcttg

SEQ ID NO: 682032 - DNA, 15 bp, Homo sapiens
atcctgagctcttgc

SEQ ID NO: 682033 - DNA, 15 bp, Homo sapiens
tcctgagctcttgcc

SEQ ID NO: 682034 - DNA, 15 bp, Homo sapiens
cctgagctcttgcct

SEQ ID NO: 682035 - DNA, 15 bp, Homo sapiens
ctgagctcttgccta

SEQ ID NO: 682036 - DNA, 15 bp, Homo sapiens
tgagctcttgcctaa

SEQ ID NO: 682037 - DNA, 15 bp, Homo sapiens
gagctcttgcctaaa

SEQ ID NO: 682038 - DNA, 15 bp, Homo sapiens
agctcttgcctaaac

SEQ ID NO: 682039 - DNA, 15 bp, Homo sapiens
gctcttgcctaaact

SEQ ID NO: 682040 - DNA, 15 bp, Homo sapiens
ctcttgcctaaacta

SEQ ID NO: 682041 - DNA, 15 bp, Homo sapiens
tcttgcctaaactaa

SEQ ID NO: 682042 - DNA, 15 bp, Homo sapiens
cttgcctaaactaat

SEQ ID NO: 682043 - DNA, 15 bp, Homo sapiens
ttgcctaaactaatc

SEQ ID NO: 682044 - DNA, 15 bp, Homo sapiens
tgcctaaactaatct

SEQ ID NO: 682045 - DNA, 15 bp, Homo sapiens
gcctaaactaatctg

SEQ ID NO: 682046 - DNA, 15 bp, Homo sapiens
cctaaactaatctgg

SEQ ID NO: 682047 - DNA, 15 bp, Homo sapiens
ctaaactaatctggg

SEQ ID NO: 682048 - DNA, 15 bp, Homo sapiens
taaactaatctgggg

SEQ ID NO: 682049 - DNA, 15 bp, Homo sapiens
aaactaatctggggt

SEQ ID NO: 682050 - DNA, 15 bp, Homo sapiens
aactaatctggggtg

SEQ ID NO: 682051 - DNA, 15 bp, Homo sapiens
actaatctggggtga

SEQ ID NO: 682052 - DNA, 15 bp, Homo sapiens
ctaatctggggtgag

SEQ ID NO: 682053 - DNA, 15 bp, Homo sapiens
taatctggggtgagg

SEQ ID NO: 682054 - DNA, 15 bp, Homo sapiens
aatctggggtgaggt

SEQ ID NO: 682055 - DNA, 15 bp, Homo sapiens
atctggggtgaggtg

SEQ ID NO: 682056 - DNA, 15 bp, Homo sapiens
tctggggtgaggtga

SEQ ID NO: 682057 - DNA, 15 bp, Homo sapiens
ctggggtgaggtgaa

SEQ ID NO: 682058 - DNA, 15 bp, Homo sapiens
tggggtgaggtgaat

SEQ ID NO: 682059 - DNA, 15 bp, Homo sapiens
ggggtgaggtgaatg

SEQ ID NO: 682060 - DNA, 15 bp, Homo sapiens
gggtgaggtgaatgg

SEQ ID NO: 682061 - DNA, 15 bp, Homo sapiens
ggtgaggtgaatgga

SEQ ID NO: 682062 - DNA, 15 bp, Homo sapiens
gtgaggtgaatggaa

SEQ ID NO: 682063 - DNA, 15 bp, Homo sapiens
tgaggtgaatggaag

SEQ ID NO: 682064 - DNA, 15 bp, Homo sapiens
gaggtgaatggaagt

SEQ ID NO: 682065 - DNA, 15 bp, Homo sapiens
aggtgaatggaagta

SEQ ID NO: 682066 - DNA, 15 bp, Homo sapiens
ggtgaatggaagtag

SEQ ID NO: 682067 - DNA, 15 bp, Homo sapiens
gtgaatggaagtagc

SEQ ID NO: 682068 - DNA, 15 bp, Homo sapiens
tgaatggaagtagca

SEQ ID NO: 682069 - DNA, 15 bp, Homo sapiens
gaatggaagtagcac

SEQ ID NO: 682070 - DNA, 15 bp, Homo sapiens
aatggaagtagcact

SEQ ID NO: 682071 - DNA, 15 bp, Homo sapiens
atggaagtagcactt

SEQ ID NO: 682072 - DNA, 15 bp, Homo sapiens
tggaagtagcacttt

SEQ ID NO: 682073 - DNA, 15 bp, Homo sapiens
ggaagtagcacttta

SEQ ID NO: 682074 - DNA, 15 bp, Homo sapiens
gaagtagcactttaa

SEQ ID NO: 682075 - DNA, 15 bp, Homo sapiens
aagtagcactttaat

SEQ ID NO: 682076 - DNA, 15 bp, Homo sapiens
agtagcactttaatt

SEQ ID NO: 682077 - DNA, 15 bp, Homo sapiens
gtagcactttaattg

SEQ ID NO: 682078 - DNA, 15 bp, Homo sapiens
tagcactttaattgt

SEQ ID NO: 682079 - DNA, 15 bp, Homo sapiens
agcactttaattgta

SEQ ID NO: 682080 - DNA, 15 bp, Homo sapiens
gcactttaattgtat

SEQ ID NO: 682081 - DNA, 15 bp, Homo sapiens
cactttaattgtatt

SEQ ID NO: 682082 - DNA, 15 bp, Homo sapiens
actttaattgtattc

SEQ ID NO: 682083 - DNA, 15 bp, Homo sapiens
ctttaattgtattca

SEQ ID NO: 682084 - DNA, 15 bp, Homo sapiens
tttaattgtattcat

SEQ ID NO: 682085 - DNA, 15 bp, Homo sapiens
ttaattgtattcatt

SEQ ID NO: 682086 - DNA, 15 bp, Homo sapiens
taattgtattcattc

SEQ ID NO: 682087 - DNA, 15 bp, Homo sapiens
aattgtattcattct

SEQ ID NO: 682088 - DNA, 15 bp, Homo sapiens
attgtattcattctt

SEQ ID NO: 682089 - DNA, 15 bp, Homo sapiens
ttgtattcattcttt

SEQ ID NO: 682090 - DNA, 15 bp, Homo sapiens
tgtattcattctttg

SEQ ID NO: 682091 - DNA, 15 bp, Homo sapiens
gtattcattctttgt

SEQ ID NO: 682092 - DNA, 15 bp, Homo sapiens
tattcattctttgta

SEQ ID NO: 682093 - DNA, 15 bp, Homo sapiens
attcattctttgtag

SEQ ID NO: 682094 - DNA, 15 bp, Homo sapiens
ttcattctttgtagc

SEQ ID NO: 682095 - DNA, 15 bp, Homo sapiens
tcattctttgtagct

SEQ ID NO: 682096 - DNA, 15 bp, Homo sapiens
cattctttgtagctg

SEQ ID NO: 682097 - DNA, 15 bp, Homo sapiens
attctttgtagctgg

SEQ ID NO: 682098 - DNA, 15 bp, Homo sapiens
ttctttgtagctgga

SEQ ID NO: 682099 - DNA, 15 bp, Homo sapiens
tctttgtagctggac

SEQ ID NO: 682100 - DNA, 15 bp, Homo sapiens
ctttgtagctggacc

SEQ ID NO: 682101 - DNA, 15 bp, Homo sapiens
tttgtagctggacct

SEQ ID NO: 682102 - DNA, 15 bp, Homo sapiens
ttgtagctggacctg

SEQ ID NO: 682103 - DNA, 15 bp, Homo sapiens
tgtagctggacctgg

SEQ ID NO: 682104 - DNA, 15 bp, Homo sapiens
gtagctggacctggg

SEQ ID NO: 682105 - DNA, 15 bp, Homo sapiens
tagctggacctgggc

SEQ ID NO: 682106 - DNA, 15 bp, Homo sapiens
agctggacctgggcc

SEQ ID NO: 682107 - DNA, 15 bp, Homo sapiens
gctggacctgggcct

SEQ ID NO: 682108 - DNA, 15 bp, Homo sapiens
ctggacctgggcctg

SEQ ID NO: 682109 - DNA, 15 bp, Homo sapiens
tggacctgggcctgg

SEQ ID NO: 682110 - DNA, 15 bp, Homo sapiens
ggacctgggcctggg

SEQ ID NO: 682111 - DNA, 15 bp, Homo sapiens
gacctgggcctgggc

SEQ ID NO: 682112 - DNA, 15 bp, Homo sapiens
acctgggcctgggcc

SEQ ID NO: 682113 - DNA, 15 bp, Homo sapiens
cctgggcctgggccc

SEQ ID NO: 682114 - DNA, 15 bp, Homo sapiens
ctgggcctgggccct

SEQ ID NO: 682115 - DNA, 15 bp, Homo sapiens
tgggcctgggcccta

SEQ ID NO: 682116 - DNA, 15 bp, Homo sapiens
gggcctgggccctat

SEQ ID NO: 682117 - DNA, 15 bp, Homo sapiens
ggcctgggccctatc

SEQ ID NO: 682118 - DNA, 15 bp, Homo sapiens
gcctgggccctatct

SEQ ID NO: 682119 - DNA, 15 bp, Homo sapiens
cctgggccctatctc

SEQ ID NO: 682120 - DNA, 15 bp, Homo sapiens
ctgggccctatctcc

SEQ ID NO: 682121 - DNA, 15 bp, Homo sapiens
tgggccctatctcct

SEQ ID NO: 682122 - DNA, 15 bp, Homo sapiens
gggccctatctcctg

SEQ ID NO: 682123 - DNA, 15 bp, Homo sapiens
ggccctatctcctga

SEQ ID NO: 682124 - DNA, 15 bp, Homo sapiens
gccctatctcctgac

SEQ ID NO: 682125 - DNA, 15 bp, Homo sapiens
ccctatctcctgaca

SEQ ID NO: 682126 - DNA, 15 bp, Homo sapiens
cctatctcctgacat

SEQ ID NO: 682127 - DNA, 15 bp, Homo sapiens
ctatctcctgacatt

SEQ ID NO: 682128 - DNA, 15 bp, Homo sapiens
tatctcctgacattt

SEQ ID NO: 682129 - DNA, 15 bp, Homo sapiens
atctcctgacatttg

SEQ ID NO: 682130 - DNA, 15 bp, Homo sapiens
tctcctgacatttgc

SEQ ID NO: 682131 - DNA, 15 bp, Homo sapiens
ctcctgacatttgcc

SEQ ID NO: 682132 - DNA, 15 bp, Homo sapiens
tcctgacatttgccc

SEQ ID NO: 682133 - DNA, 15 bp, Homo sapiens
cctgacatttgccca

SEQ ID NO: 682134 - DNA, 15 bp, Homo sapiens
ctgacatttgcccac

SEQ ID NO: 682135 - DNA, 15 bp, Homo sapiens
tgacatttgcccaca

SEQ ID NO: 682136 - DNA, 15 bp, Homo sapiens
gacatttgcccacaa

SEQ ID NO: 682137 - DNA, 15 bp, Homo sapiens
acatttgcccacaag

SEQ ID NO: 682138 - DNA, 15 bp, Homo sapiens
catttgcccacaaga

SEQ ID NO: 682139 - DNA, 15 bp, Homo sapiens
atttgcccacaagaa

SEQ ID NO: 682140 - DNA, 15 bp, Homo sapiens
tttgcccacaagaaa

SEQ ID NO: 682141 - DNA, 15 bp, Homo sapiens
ttgcccacaagaaag

SEQ ID NO: 682142 - DNA, 15 bp, Homo sapiens
tgcccacaagaaaga

SEQ ID NO: 682143 - DNA, 15 bp, Homo sapiens
gcccacaagaaagat

SEQ ID NO: 682144 - DNA, 15 bp, Homo sapiens
cccacaagaaagatt

SEQ ID NO: 682145 - DNA, 15 bp, Homo sapiens
ccacaagaaagattt

SEQ ID NO: 682146 - DNA, 15 bp, Homo sapiens
cacaagaaagatttc

SEQ ID NO: 682147 - DNA, 15 bp, Homo sapiens
acaagaaagatttct

SEQ ID NO: 682148 - DNA, 15 bp, Homo sapiens
caagaaagatttctg

SEQ ID NO: 682149 - DNA, 15 bp, Homo sapiens
aagaaagatttctga

SEQ ID NO: 682150 - DNA, 15 bp, Homo sapiens
agaaagatttctgaa

SEQ ID NO: 682151 - DNA, 15 bp, Homo sapiens
gaaagatttctgaag

SEQ ID NO: 682152 - DNA, 15 bp, Homo sapiens
aaagatttctgaagt

SEQ ID NO: 682153 - DNA, 15 bp, Homo sapiens
aagatttctgaagtt

SEQ ID NO: 682154 - DNA, 15 bp, Homo sapiens
agatttctgaagtta

SEQ ID NO: 682155 - DNA, 15 bp, Homo sapiens
gatttctgaagttag

SEQ ID NO: 682156 - DNA, 15 bp, Homo sapiens
atttctgaagttagg

SEQ ID NO: 682157 - DNA, 15 bp, Homo sapiens
tttctgaagttaggt

SEQ ID NO: 682158 - DNA, 15 bp, Homo sapiens
ttctgaagttaggta

SEQ ID NO: 682159 - DNA, 15 bp, Homo sapiens
tctgaagttaggtag

SEQ ID NO: 682160 - DNA, 15 bp, Homo sapiens
ctgaagttaggtagg

SEQ ID NO: 682161 - DNA, 15 bp, Homo sapiens
tgaagttaggtagga

SEQ ID NO: 682162 - DNA, 15 bp, Homo sapiens
gaagttaggtaggac

SEQ ID NO: 682163 - DNA, 15 bp, Homo sapiens
aagttaggtaggact

SEQ ID NO: 682164 - DNA, 15 bp, Homo sapiens
agttaggtaggactg

SEQ ID NO: 682165 - DNA, 15 bp, Homo sapiens
gttaggtaggactgg

SEQ ID NO: 682166 - DNA, 15 bp, Homo sapiens
ttaggtaggactggc

SEQ ID NO: 682167 - DNA, 15 bp, Homo sapiens
taggtaggactggct

SEQ ID NO: 682168 - DNA, 15 bp, Homo sapiens
aggtaggactggctg

SEQ ID NO: 682169 - DNA, 15 bp, Homo sapiens
ggtaggactggctgt

SEQ ID NO: 682170 - DNA, 15 bp, Homo sapiens
gtaggactggctgtt

SEQ ID NO: 682171 - DNA, 15 bp, Homo sapiens
taggactggctgttg

SEQ ID NO: 682172 - DNA, 15 bp, Homo sapiens
aggactggctgttga

SEQ ID NO: 682173 - DNA, 15 bp, Homo sapiens
ggactggctgttgag

SEQ ID NO: 682174 - DNA, 15 bp, Homo sapiens
gactggctgttgagt

SEQ ID NO: 682175 - DNA, 15 bp, Homo sapiens
actggctgttgagta

SEQ ID NO: 682176 - DNA, 15 bp, Homo sapiens
ctggctgttgagtag

SEQ ID NO: 682177 - DNA, 15 bp, Homo sapiens
tggctgttgagtagg

SEQ ID NO: 682178 - DNA, 15 bp, Homo sapiens
ggctgttgagtaggc

SEQ ID NO: 682179 - DNA, 15 bp, Homo sapiens
gctgttgagtaggcc

SEQ ID NO: 682180 - DNA, 15 bp, Homo sapiens
ctgttgagtaggcca

SEQ ID NO: 682181 - DNA, 15 bp, Homo sapiens
tgttgagtaggccag

SEQ ID NO: 682182 - DNA, 15 bp, Homo sapiens
gttgagtaggccagt

SEQ ID NO: 682183 - DNA, 15 bp, Homo sapiens
ttgagtaggccagtg

SEQ ID NO: 682184 - DNA, 15 bp, Homo sapiens
tgagtaggccagtgc

SEQ ID NO: 682185 - DNA, 15 bp, Homo sapiens
gagtaggccagtgct

SEQ ID NO: 682186 - DNA, 15 bp, Homo sapiens
agtaggccagtgctt

SEQ ID NO: 682187 - DNA, 15 bp, Homo sapiens
gtaggccagtgcttg

SEQ ID NO: 682188 - DNA, 15 bp, Homo sapiens
taggccagtgcttgc

SEQ ID NO: 682189 - DNA, 15 bp, Homo sapiens
aggccagtgcttgcc

SEQ ID NO: 682190 - DNA, 15 bp, Homo sapiens
ggccagtgcttgcca

SEQ ID NO: 682191 - DNA, 15 bp, Homo sapiens
gccagtgcttgccaa

SEQ ID NO: 682192 - DNA, 15 bp, Homo sapiens
ccagtgcttgccaaa

SEQ ID NO: 682193 - DNA, 15 bp, Homo sapiens
cagtgcttgccaaac

SEQ ID NO: 682194 - DNA, 15 bp, Homo sapiens
agtgcttgccaaacc

SEQ ID NO: 682195 - DNA, 15 bp, Homo sapiens
gtgcttgccaaacct

SEQ ID NO: 682196 - DNA, 15 bp, Homo sapiens
tgcttgccaaacctt

SEQ ID NO: 682197 - DNA, 15 bp, Homo sapiens
gcttgccaaaccttt

SEQ ID NO: 682198 - DNA, 15 bp, Homo sapiens
cttgccaaaccttta

SEQ ID NO: 682199 - DNA, 15 bp, Homo sapiens
ttgccaaacctttac

SEQ ID NO: 682200 - DNA, 15 bp, Homo sapiens
tgccaaacctttaca

SEQ ID NO: 682201 - DNA, 15 bp, Homo sapiens
gccaaacctttacac

SEQ ID NO: 682202 - DNA, 15 bp, Homo sapiens
ccaaacctttacaca

SEQ ID NO: 682203 - DNA, 15 bp, Homo sapiens
caaacctttacacat

SEQ ID NO: 682204 - DNA, 15 bp, Homo sapiens
aaacctttacacatc

SEQ ID NO: 682205 - DNA, 15 bp, Homo sapiens
aacctttacacatcc

SEQ ID NO: 682206 - DNA, 15 bp, Homo sapiens
acctttacacatcct

SEQ ID NO: 682207 - DNA, 15 bp, Homo sapiens
cctttacacatcctc

SEQ ID NO: 682208 - DNA, 15 bp, Homo sapiens
ctttacacatcctca

SEQ ID NO: 682209 - DNA, 15 bp, Homo sapiens
tttacacatcctcac

SEQ ID NO: 682210 - DNA, 15 bp, Homo sapiens
ttacacatcctcaca

SEQ ID NO: 682211 - DNA, 15 bp, Homo sapiens
tacacatcctcacat

SEQ ID NO: 682212 - DNA, 15 bp, Homo sapiens
acacatcctcacata

SEQ ID NO: 682213 - DNA, 15 bp, Homo sapiens
cacatcctcacatat

SEQ ID NO: 682214 - DNA, 15 bp, Homo sapiens
acatcctcacatatg

SEQ ID NO: 682215 - DNA, 15 bp, Homo sapiens
catcctcacatatgt

SEQ ID NO: 682216 - DNA, 15 bp, Homo sapiens
atcctcacatatgtc

SEQ ID NO: 682217 - DNA, 15 bp, Homo sapiens
tcctcacatatgtca

SEQ ID NO: 682218 - DNA, 15 bp, Homo sapiens
cctcacatatgtcat

SEQ ID NO: 682219 - DNA, 15 bp, Homo sapiens
ctcacatatgtcata

SEQ ID NO: 682220 - DNA, 15 bp, Homo sapiens
tcacatatgtcataa

SEQ ID NO: 682221 - DNA, 15 bp, Homo sapiens
cacatatgtcataat

SEQ ID NO: 682222 - DNA, 15 bp, Homo sapiens
acatatgtcataata

SEQ ID NO: 682223 - DNA, 15 bp, Homo sapiens
catatgtcataatat

SEQ ID NO: 682224 - DNA, 15 bp, Homo sapiens
atatgtcataatatg

SEQ ID NO: 682225 - DNA, 15 bp, Homo sapiens
tatgtcataatatgc

SEQ ID NO: 682226 - DNA, 15 bp, Homo sapiens
atgtcataatatgca

SEQ ID NO: 682227 - DNA, 15 bp, Homo sapiens
tgtcataatatgcag

SEQ ID NO: 682228 - DNA, 15 bp, Homo sapiens
gtcataatatgcaga

SEQ ID NO: 682229 - DNA, 15 bp, Homo sapiens
tcataatatgcagat

SEQ ID NO: 682230 - DNA, 15 bp, Homo sapiens
cataatatgcagata

SEQ ID NO: 682231 - DNA, 15 bp, Homo sapiens
ataatatgcagataa

SEQ ID NO: 682232 - DNA, 15 bp, Homo sapiens
taatatgcagataaa

SEQ ID NO: 682233 - DNA, 15 bp, Homo sapiens
aatatgcagataaaa

SEQ ID NO: 682234 - DNA, 15 bp, Homo sapiens
atatgcagataaaaa

SEQ ID NO: 682235 - DNA, 15 bp, Homo sapiens
tatgcagataaaaag

SEQ ID NO: 682236 - DNA, 15 bp, Homo sapiens
atgcagataaaaaga

SEQ ID NO: 682237 - DNA, 15 bp, Homo sapiens
tgcagataaaaagat

SEQ ID NO: 682238 - DNA, 15 bp, Homo sapiens
gcagataaaaagata

SEQ ID NO: 682239 - DNA, 15 bp, Homo sapiens
cagataaaaagataa

SEQ ID NO: 682240 - DNA, 15 bp, Homo sapiens
agataaaaagataat

SEQ ID NO: 682241 - DNA, 15 bp, Homo sapiens
gataaaaagataatc

SEQ ID NO: 682242 - DNA, 15 bp, Homo sapiens
ataaaaagataatcc

SEQ ID NO: 682243 - DNA, 15 bp, Homo sapiens
taaaaagataatccc

SEQ ID NO: 682244 - DNA, 15 bp, Homo sapiens
aaaaagataatccct

SEQ ID NO: 682245 - DNA, 15 bp, Homo sapiens
aaaagataatccctt

SEQ ID NO: 682246 - DNA, 15 bp, Homo sapiens
aaagataatccctta

SEQ ID NO: 682247 - DNA, 15 bp, Homo sapiens
aagataatcccttat

SEQ ID NO: 682248 - DNA, 15 bp, Homo sapiens
agataatcccttata

SEQ ID NO: 682249 - DNA, 15 bp, Homo sapiens
gataatcccttatac

SEQ ID NO: 682250 - DNA, 15 bp, Homo sapiens
ataatcccttataca

SEQ ID NO: 682251 - DNA, 15 bp, Homo sapiens
taatcccttatacaa

SEQ ID NO: 682252 - DNA, 15 bp, Homo sapiens
aatcccttatacaac

SEQ ID NO: 682253 - DNA, 15 bp, Homo sapiens
atcccttatacaact

SEQ ID NO: 682254 - DNA, 15 bp, Homo sapiens
tcccttatacaactt

SEQ ID NO: 682255 - DNA, 15 bp, Homo sapiens
cccttatacaacttg

SEQ ID NO: 682256 - DNA, 15 bp, Homo sapiens
ccttatacaacttgc

SEQ ID NO: 682257 - DNA, 15 bp, Homo sapiens
cttatacaacttgct

SEQ ID NO: 682258 - DNA, 15 bp, Homo sapiens
ttatacaacttgctg

SEQ ID NO: 682259 - DNA, 15 bp, Homo sapiens
tatacaacttgctgg

SEQ ID NO: 682260 - DNA, 15 bp, Homo sapiens
atacaacttgctggg

SEQ ID NO: 682261 - DNA, 15 bp, Homo sapiens
tacaacttgctggga

SEQ ID NO: 682262 - DNA, 15 bp, Homo sapiens
acaacttgctgggat

SEQ ID NO: 682263 - DNA, 15 bp, Homo sapiens
caacttgctgggata

SEQ ID NO: 682264 - DNA, 15 bp, Homo sapiens
aacttgctgggataa

SEQ ID NO: 682265 - DNA, 15 bp, Homo sapiens
acttgctgggataaa

SEQ ID NO: 682266 - DNA, 15 bp, Homo sapiens
cttgctgggataaac

SEQ ID NO: 682267 - DNA, 15 bp, Homo sapiens
ttgctgggataaact

SEQ ID NO: 682268 - DNA, 15 bp, Homo sapiens
tgctgggataaactc

SEQ ID NO: 682269 - DNA, 15 bp, Homo sapiens
gctgggataaactca

SEQ ID NO: 682270 - DNA, 15 bp, Homo sapiens
ctgggataaactcag

SEQ ID NO: 682271 - DNA, 15 bp, Homo sapiens
tgggataaactcagg

SEQ ID NO: 682272 - DNA, 15 bp, Homo sapiens
gggataaactcagga

SEQ ID NO: 682273 - DNA, 15 bp, Homo sapiens
ggataaactcaggag

SEQ ID NO: 682274 - DNA, 15 bp, Homo sapiens
gataaactcaggagg

SEQ ID NO: 682275 - DNA, 15 bp, Homo sapiens
ataaactcaggaggc

SEQ ID NO: 682276 - DNA, 15 bp, Homo sapiens
taaactcaggaggct

SEQ ID NO: 682277 - DNA, 15 bp, Homo sapiens
aaactcaggaggctt

SEQ ID NO: 682278 - DNA, 15 bp, Homo sapiens
aactcaggaggctta

SEQ ID NO: 682279 - DNA, 15 bp, Homo sapiens
actcaggaggcttac

SEQ ID NO: 682280 - DNA, 15 bp, Homo sapiens
ctcaggaggcttaca

SEQ ID NO: 682281 - DNA, 15 bp, Homo sapiens
tcaggaggcttacag

SEQ ID NO: 682282 - DNA, 15 bp, Homo sapiens
caggaggcttacagc

SEQ ID NO: 682283 - DNA, 15 bp, Homo sapiens
aggaggcttacagcc

SEQ ID NO: 682284 - DNA, 15 bp, Homo sapiens
ggaggcttacagcca

SEQ ID NO: 682285 - DNA, 15 bp, Homo sapiens
gaggcttacagccat

SEQ ID NO: 682286 - DNA, 15 bp, Homo sapiens
aggcttacagccatg

SEQ ID NO: 682287 - DNA, 15 bp, Homo sapiens
ggcttacagccatga

SEQ ID NO: 682288 - DNA, 15 bp, Homo sapiens
gcttacagccatgac

SEQ ID NO: 682289 - DNA, 15 bp, Homo sapiens
cttacagccatgacc

SEQ ID NO: 682290 - DNA, 15 bp, Homo sapiens
ttacagccatgacct

SEQ ID NO: 682291 - DNA, 15 bp, Homo sapiens
tacagccatgacctg

SEQ ID NO: 682292 - DNA, 15 bp, Homo sapiens
acagccatgacctgc

SEQ ID NO: 682293 - DNA, 15 bp, Homo sapiens
cagccatgacctgct

SEQ ID NO: 682294 - DNA, 15 bp, Homo sapiens
agccatgacctgctt

SEQ ID NO: 682295 - DNA, 15 bp, Homo sapiens
gccatgacctgcttg

SEQ ID NO: 682296 - DNA, 15 bp, Homo sapiens
ccatgacctgcttga

SEQ ID NO: 682297 - DNA, 15 bp, Homo sapiens
catgacctgcttgaa

SEQ ID NO: 682298 - DNA, 15 bp, Homo sapiens
atgacctgcttgaag

SEQ ID NO: 682299 - DNA, 15 bp, Homo sapiens
tgacctgcttgaagg

SEQ ID NO: 682300 - DNA, 15 bp, Homo sapiens
gacctgcttgaaggt

SEQ ID NO: 682301 - DNA, 15 bp, Homo sapiens
acctgcttgaaggtt

SEQ ID NO: 682302 - DNA, 15 bp, Homo sapiens
cctgcttgaaggttc

SEQ ID NO: 682303 - DNA, 15 bp, Homo sapiens
ctgcttgaaggttct

SEQ ID NO: 682304 - DNA, 15 bp, Homo sapiens
tgcttgaaggttctt

SEQ ID NO: 682305 - DNA, 15 bp, Homo sapiens
gcttgaaggttcttc

SEQ ID NO: 682306 - DNA, 15 bp, Homo sapiens
cttgaaggttcttcc

SEQ ID NO: 682307 - DNA, 15 bp, Homo sapiens
ttgaaggttcttcct

SEQ ID NO: 682308 - DNA, 15 bp, Homo sapiens
tgaaggttcttcctg

SEQ ID NO: 682309 - DNA, 15 bp, Homo sapiens
gaaggttcttcctgc

SEQ ID NO: 682310 - DNA, 15 bp, Homo sapiens
aaggttcttcctgcc

SEQ ID NO: 682311 - DNA, 15 bp, Homo sapiens
aggttcttcctgcct

SEQ ID NO: 682312 - DNA, 15 bp, Homo sapiens
ggttcttcctgcctt

SEQ ID NO: 682313 - DNA, 15 bp, Homo sapiens
gttcttcctgcctta

SEQ ID NO: 682314 - DNA, 15 bp, Homo sapiens
ttcttcctgccttag

SEQ ID NO: 682315 - DNA, 15 bp, Homo sapiens
tcttcctgccttaga

SEQ ID NO: 682316 - DNA, 15 bp, Homo sapiens
cttcctgccttagac

SEQ ID NO: 682317 - DNA, 15 bp, Homo sapiens
ttcctgccttagacc

SEQ ID NO: 682318 - DNA, 15 bp, Homo sapiens
tcctgccttagacct

SEQ ID NO: 682319 - DNA, 15 bp, Homo sapiens
cctgccttagacctt

SEQ ID NO: 682320 - DNA, 15 bp, Homo sapiens
ctgccttagaccttg

SEQ ID NO: 682321 - DNA, 15 bp, Homo sapiens
tgccttagaccttgc

SEQ ID NO: 682322 - DNA, 15 bp, Homo sapiens
gccttagaccttgct

SEQ ID NO: 682323 - DNA, 15 bp, Homo sapiens
ccttagaccttgctc

SEQ ID NO: 682324 - DNA, 15 bp, Homo sapiens
cttagaccttgctca

SEQ ID NO: 682325 - DNA, 15 bp, Homo sapiens
ttagaccttgctcag

SEQ ID NO: 682326 - DNA, 15 bp, Homo sapiens
tagaccttgctcagc

SEQ ID NO: 682327 - DNA, 15 bp, Homo sapiens
agaccttgctcagct

SEQ ID NO: 682328 - DNA, 15 bp, Homo sapiens
gaccttgctcagctg

SEQ ID NO: 682329 - DNA, 15 bp, Homo sapiens
accttgctcagctgc

SEQ ID NO: 682330 - DNA, 15 bp, Homo sapiens
ccttgctcagctgct

SEQ ID NO: 682331 - DNA, 15 bp, Homo sapiens
cttgctcagctgctc

SEQ ID NO: 682332 - DNA, 15 bp, Homo sapiens
ttgctcagctgctcc

SEQ ID NO: 682333 - DNA, 15 bp, Homo sapiens
tgctcagctgctcca

SEQ ID NO: 682334 - DNA, 15 bp, Homo sapiens
gctcagctgctccag

SEQ ID NO: 682335 - DNA, 15 bp, Homo sapiens
ctcagctgctccagg

SEQ ID NO: 682336 - DNA, 15 bp, Homo sapiens
tcagctgctccagga

SEQ ID NO: 682337 - DNA, 15 bp, Homo sapiens
cagctgctccaggat

SEQ ID NO: 682338 - DNA, 15 bp, Homo sapiens
agctgctccaggatg

SEQ ID NO: 682339 - DNA, 15 bp, Homo sapiens
gctgctccaggatga

SEQ ID NO: 682340 - DNA, 15 bp, Homo sapiens
ctgctccaggatgag

SEQ ID NO: 682341 - DNA, 15 bp, Homo sapiens
tgctccaggatgagg

SEQ ID NO: 682342 - DNA, 15 bp, Homo sapiens
gctccaggatgaggg

SEQ ID NO: 682343 - DNA, 15 bp, Homo sapiens
ctccaggatgagggg

SEQ ID NO: 682344 - DNA, 15 bp, Homo sapiens
tccaggatgagggga

SEQ ID NO: 682345 - DNA, 15 bp, Homo sapiens
ccaggatgaggggat

SEQ ID NO: 682346 - DNA, 15 bp, Homo sapiens
caggatgaggggatt

SEQ ID NO: 682347 - DNA, 15 bp, Homo sapiens
aggatgaggggattt

SEQ ID NO: 682348 - DNA, 15 bp, Homo sapiens
ggatgaggggattta

SEQ ID NO: 682349 - DNA, 15 bp, Homo sapiens
gatgaggggatttac

SEQ ID NO: 682350 - DNA, 15 bp, Homo sapiens
atgaggggatttaca

SEQ ID NO: 682351 - DNA, 15 bp, Homo sapiens
tgaggggatttacat

SEQ ID NO: 682352 - DNA, 15 bp, Homo sapiens
gaggggatttacatc

SEQ ID NO: 682353 - DNA, 15 bp, Homo sapiens
aggggatttacatca

SEQ ID NO: 682354 - DNA, 15 bp, Homo sapiens
ggggatttacatcac

SEQ ID NO: 682355 - DNA, 15 bp, Homo sapiens
gggatttacatcaca

SEQ ID NO: 682356 - DNA, 15 bp, Homo sapiens
ggatttacatcacag

SEQ ID NO: 682357 - DNA, 15 bp, Homo sapiens
gatttacatcacagc

SEQ ID NO: 682358 - DNA, 15 bp, Homo sapiens
atttacatcacagca

SEQ ID NO: 682359 - DNA, 15 bp, Homo sapiens
tttacatcacagcac

SEQ ID NO: 682360 - DNA, 15 bp, Homo sapiens
ttacatcacagcaca

SEQ ID NO: 682361 - DNA, 15 bp, Homo sapiens
tacatcacagcacaa

SEQ ID NO: 682362 - DNA, 15 bp, Homo sapiens
acatcacagcacaac

SEQ ID NO: 682363 - DNA, 15 bp, Homo sapiens
catcacagcacaact

SEQ ID NO: 682364 - DNA, 15 bp, Homo sapiens
atcacagcacaactg

SEQ ID NO: 682365 - DNA, 15 bp, Homo sapiens
tcacagcacaactgt

SEQ ID NO: 682366 - DNA, 15 bp, Homo sapiens
cacagcacaactgta

SEQ ID NO: 682367 - DNA, 15 bp, Homo sapiens
acagcacaactgtat

SEQ ID NO: 682368 - DNA, 15 bp, Homo sapiens
cagcacaactgtatt

SEQ ID NO: 682369 - DNA, 15 bp, Homo sapiens
agcacaactgtattt

SEQ ID NO: 682370 - DNA, 15 bp, Homo sapiens
gcacaactgtatttt

SEQ ID NO: 682371 - DNA, 15 bp, Homo sapiens
cacaactgtatttta

SEQ ID NO: 682372 - DNA, 15 bp, Homo sapiens
acaactgtattttat

SEQ ID NO: 682373 - DNA, 15 bp, Homo sapiens
caactgtattttatt

SEQ ID NO: 682374 - DNA, 15 bp, Homo sapiens
aactgtattttattc

SEQ ID NO: 682375 - DNA, 15 bp, Homo sapiens
actgtattttattca

SEQ ID NO: 682376 - DNA, 15 bp, Homo sapiens
ctgtattttattcac

SEQ ID NO: 682377 - DNA, 15 bp, Homo sapiens
tgtattttattcaca

SEQ ID NO: 682378 - DNA, 15 bp, Homo sapiens
gtattttattcacag

SEQ ID NO: 682379 - DNA, 15 bp, Homo sapiens
tattttattcacagc

SEQ ID NO: 682380 - DNA, 15 bp, Homo sapiens
attttattcacagca

SEQ ID NO: 682381 - DNA, 15 bp, Homo sapiens
ttttattcacagcat

SEQ ID NO: 682382 - DNA, 15 bp, Homo sapiens
tttattcacagcata

SEQ ID NO: 682383 - DNA, 15 bp, Homo sapiens
ttattcacagcataa

SEQ ID NO: 682384 - DNA, 15 bp, Homo sapiens
tattcacagcataaa

SEQ ID NO: 682385 - DNA, 15 bp, Homo sapiens
attcacagcataaac

SEQ ID NO: 682386 - DNA, 15 bp, Homo sapiens
ttcacagcataaacc

SEQ ID NO: 682387 - DNA, 15 bp, Homo sapiens
tcacagcataaacca

SEQ ID NO: 682388 - DNA, 15 bp, Homo sapiens
cacagcataaaccat

SEQ ID NO: 682389 - DNA, 15 bp, Homo sapiens
acagcataaaccatc

SEQ ID NO: 682390 - DNA, 15 bp, Homo sapiens
cagcataaaccatct

SEQ ID NO: 682391 - DNA, 15 bp, Homo sapiens
agcataaaccatctc

SEQ ID NO: 682392 - DNA, 15 bp, Homo sapiens
gcataaaccatctct

SEQ ID NO: 682393 - DNA, 15 bp, Homo sapiens
cataaaccatctctt

SEQ ID NO: 682394 - DNA, 15 bp, Homo sapiens
ataaaccatctcttt

SEQ ID NO: 682395 - DNA, 15 bp, Homo sapiens
taaaccatctctttc

SEQ ID NO: 682396 - DNA, 15 bp, Homo sapiens
aaaccatctctttcc

SEQ ID NO: 682397 - DNA, 15 bp, Homo sapiens
aaccatctctttcct

SEQ ID NO: 682398 - DNA, 15 bp, Homo sapiens
accatctctttcctt

SEQ ID NO: 682399 - DNA, 15 bp, Homo sapiens
ccatctctttccttc

SEQ ID NO: 682400 - DNA, 15 bp, Homo sapiens
catctctttccttct

SEQ ID NO: 682401 - DNA, 15 bp, Homo sapiens
atctctttccttctc

SEQ ID NO: 682402 - DNA, 15 bp, Homo sapiens
tctctttccttctca

SEQ ID NO: 682403 - DNA, 15 bp, Homo sapiens
ctctttccttctcag

SEQ ID NO: 682404 - DNA, 15 bp, Homo sapiens
tctttccttctcagt

SEQ ID NO: 682405 - DNA, 15 bp, Homo sapiens
ctttccttctcagtt

SEQ ID NO: 682406 - DNA, 15 bp, Homo sapiens
tttccttctcagttg

SEQ ID NO: 682407 - DNA, 15 bp, Homo sapiens
ttccttctcagttga

SEQ ID NO: 682408 - DNA, 15 bp, Homo sapiens
tccttctcagttgac

SEQ ID NO: 682409 - DNA, 15 bp, Homo sapiens
ccttctcagttgacg

SEQ ID NO: 682410 - DNA, 15 bp, Homo sapiens
cttctcagttgacga

SEQ ID NO: 682411 - DNA, 15 bp, Homo sapiens
ttctcagttgacgag

SEQ ID NO: 682412 - DNA, 15 bp, Homo sapiens
tctcagttgacgagt

SEQ ID NO: 682413 - DNA, 15 bp, Homo sapiens
ctcagttgacgagtt

SEQ ID NO: 682414 - DNA, 15 bp, Homo sapiens
tcagttgacgagttc

SEQ ID NO: 682415 - DNA, 15 bp, Homo sapiens
cagttgacgagttca

SEQ ID NO: 682416 - DNA, 15 bp, Homo sapiens
agttgacgagttcag

SEQ ID NO: 682417 - DNA, 15 bp, Homo sapiens
gttgacgagttcaga

SEQ ID NO: 682418 - DNA, 15 bp, Homo sapiens
ttgacgagttcagat

SEQ ID NO: 682419 - DNA, 15 bp, Homo sapiens
tgacgagttcagatg

SEQ ID NO: 682420 - DNA, 15 bp, Homo sapiens
gacgagttcagatgg

SEQ ID NO: 682421 - DNA, 15 bp, Homo sapiens
acgagttcagatggg

SEQ ID NO: 682422 - DNA, 15 bp, Homo sapiens
cgagttcagatgggc

SEQ ID NO: 682423 - DNA, 15 bp, Homo sapiens
gagttcagatgggca

SEQ ID NO: 682424 - DNA, 15 bp, Homo sapiens
agttcagatgggcaa

SEQ ID NO: 682425 - DNA, 15 bp, Homo sapiens
gttcagatgggcaat

SEQ ID NO: 682426 - DNA, 15 bp, Homo sapiens
ttcagatgggcaata

SEQ ID NO: 682427 - DNA, 15 bp, Homo sapiens
tcagatgggcaataa

SEQ ID NO: 682428 - DNA, 15 bp, Homo sapiens
cagatgggcaataac

SEQ ID NO: 682429 - DNA, 15 bp, Homo sapiens
agatgggcaataaca

SEQ ID NO: 682430 - DNA, 15 bp, Homo sapiens
gatgggcaataacag

SEQ ID NO: 682431 - DNA, 15 bp, Homo sapiens
atgggcaataacagt

SEQ ID NO: 682432 - DNA, 15 bp, Homo sapiens
tgggcaataacagtg

SEQ ID NO: 682433 - DNA, 15 bp, Homo sapiens
gggcaataacagtgt

SEQ ID NO: 682434 - DNA, 15 bp, Homo sapiens
ggcaataacagtgtc

SEQ ID NO: 682435 - DNA, 15 bp, Homo sapiens
gcaataacagtgtct

SEQ ID NO: 682436 - DNA, 15 bp, Homo sapiens
caataacagtgtctg

SEQ ID NO: 682437 - DNA, 15 bp, Homo sapiens
aataacagtgtctgc

SEQ ID NO: 682438 - DNA, 15 bp, Homo sapiens
ataacagtgtctgcc

SEQ ID NO: 682439 - DNA, 15 bp, Homo sapiens
taacagtgtctgcca

SEQ ID NO: 682440 - DNA, 15 bp, Homo sapiens
aacagtgtctgccaa

SEQ ID NO: 682441 - DNA, 15 bp, Homo sapiens
acagtgtctgccaaa

SEQ ID NO: 682442 - DNA, 15 bp, Homo sapiens
cagtgtctgccaaag

SEQ ID NO: 682443 - DNA, 15 bp, Homo sapiens
agtgtctgccaaaga

SEQ ID NO: 682444 - DNA, 15 bp, Homo sapiens
gtgtctgccaaagag

SEQ ID NO: 682445 - DNA, 15 bp, Homo sapiens
tgtctgccaaagaga

SEQ ID NO: 682446 - DNA, 15 bp, Homo sapiens
gtctgccaaagagaa

SEQ ID NO: 682447 - DNA, 15 bp, Homo sapiens
tctgccaaagagaaa

SEQ ID NO: 682448 - DNA, 15 bp, Homo sapiens
ctgccaaagagaaaa

SEQ ID NO: 682449 - DNA, 15 bp, Homo sapiens
tgccaaagagaaaaa

SEQ ID NO: 682450 - DNA, 15 bp, Homo sapiens
gccaaagagaaaaaa

SEQ ID NO: 682451 - DNA, 15 bp, Homo sapiens
ccaaagagaaaaaaa

SEQ ID NO: 682452 - DNA, 15 bp, Homo sapiens
caaagagaaaaaaaa

SEQ ID NO: 682453 - DNA, 15 bp, Homo sapiens
aaagagaaaaaaaaa

SEQ ID NO: 682454 - DNA, 15 bp, Homo sapiens
aagagaaaaaaaaat

SEQ ID NO: 682455 - DNA, 15 bp, Homo sapiens
agagaaaaaaaaatg

SEQ ID NO: 682456 - DNA, 15 bp, Homo sapiens
gagaaaaaaaaatgt

SEQ ID NO: 682457 - DNA, 15 bp, Homo sapiens
agaaaaaaaaatgta

SEQ ID NO: 682458 - DNA, 15 bp, Homo sapiens
gaaaaaaaaatgtat

SEQ ID NO: 682459 - DNA, 15 bp, Homo sapiens
aaaaaaaaatgtatt

SEQ ID NO: 682460 - DNA, 15 bp, Homo sapiens
aaaaaaaatgtattc

SEQ ID NO: 682461 - DNA, 15 bp, Homo sapiens
aaaaaaatgtattca

SEQ ID NO: 682462 - DNA, 15 bp, Homo sapiens
aaaaaatgtattcaa

SEQ ID NO: 682463 - DNA, 15 bp, Homo sapiens
aaaaatgtattcaaa

SEQ ID NO: 682464 - DNA, 15 bp, Homo sapiens
aaaatgtattcaaac

SEQ ID NO: 682465 - DNA, 15 bp, Homo sapiens
aaatgtattcaaact

SEQ ID NO: 682466 - DNA, 15 bp, Homo sapiens
aatgtattcaaacta

SEQ ID NO: 682467 - DNA, 15 bp, Homo sapiens
atgtattcaaactag

SEQ ID NO: 682468 - DNA, 15 bp, Homo sapiens
tgtattcaaactaga

SEQ ID NO: 682469 - DNA, 15 bp, Homo sapiens
gtattcaaactagat

SEQ ID NO: 682470 - DNA, 15 bp, Homo sapiens
tattcaaactagata

SEQ ID NO: 682471 - DNA, 15 bp, Homo sapiens
attcaaactagataa

SEQ ID NO: 682472 - DNA, 15 bp, Homo sapiens
ttcaaactagataat

SEQ ID NO: 682473 - DNA, 15 bp, Homo sapiens
tcaaactagataatc

SEQ ID NO: 682474 - DNA, 15 bp, Homo sapiens
caaactagataatct

SEQ ID NO: 682475 - DNA, 15 bp, Homo sapiens
aaactagataatcta

SEQ ID NO: 682476 - DNA, 15 bp, Homo sapiens
aactagataatctat

SEQ ID NO: 682477 - DNA, 15 bp, Homo sapiens
actagataatctatt

SEQ ID NO: 682478 - DNA, 15 bp, Homo sapiens
ctagataatctattg

SEQ ID NO: 682479 - DNA, 15 bp, Homo sapiens
tagataatctattgg

SEQ ID NO: 682480 - DNA, 15 bp, Homo sapiens
agataatctattggt

SEQ ID NO: 682481 - DNA, 15 bp, Homo sapiens
gataatctattggta

SEQ ID NO: 682482 - DNA, 15 bp, Homo sapiens
ataatctattggtac

SEQ ID NO: 682483 - DNA, 15 bp, Homo sapiens
taatctattggtaca

SEQ ID NO: 682484 - DNA, 15 bp, Homo sapiens
aatctattggtacaa

SEQ ID NO: 682485 - DNA, 15 bp, Homo sapiens
atctattggtacaaa

SEQ ID NO: 682486 - DNA, 15 bp, Homo sapiens
tctattggtacaaat

SEQ ID NO: 682487 - DNA, 15 bp, Homo sapiens
ctattggtacaaata

SEQ ID NO: 682488 - DNA, 15 bp, Homo sapiens
tattggtacaaatac

SEQ ID NO: 682489 - DNA, 15 bp, Homo sapiens
attggtacaaatacc

SEQ ID NO: 682490 - DNA, 15 bp, Homo sapiens
ttggtacaaataccg

SEQ ID NO: 682491 - DNA, 15 bp, Homo sapiens
tggtacaaataccga

SEQ ID NO: 682492 - DNA, 15 bp, Homo sapiens
ggtacaaataccgag

SEQ ID NO: 682493 - DNA, 15 bp, Homo sapiens
gtacaaataccgaga

SEQ ID NO: 682494 - DNA, 15 bp, Homo sapiens
tacaaataccgagac

SEQ ID NO: 682495 - DNA, 15 bp, Homo sapiens
acaaataccgagaca

SEQ ID NO: 682496 - DNA, 15 bp, Homo sapiens
caaataccgagacac

SEQ ID NO: 682497 - DNA, 15 bp, Homo sapiens
aaataccgagacaca

SEQ ID NO: 682498 - DNA, 15 bp, Homo sapiens
aataccgagacacag

SEQ ID NO: 682499 - DNA, 15 bp, Homo sapiens
ataccgagacacaga

SEQ ID NO: 682500 - DNA, 15 bp, Homo sapiens
taccgagacacagaa

SEQ ID NO: 682501 - DNA, 15 bp, Homo sapiens
accgagacacagaag

SEQ ID NO: 682502 - DNA, 15 bp, Homo sapiens
ccgagacacagaagt

SEQ ID NO: 682503 - DNA, 15 bp, Homo sapiens
cgagacacagaagtg

SEQ ID NO: 682504 - DNA, 15 bp, Homo sapiens
gagacacagaagtga

SEQ ID NO: 682505 - DNA, 15 bp, Homo sapiens
agacacagaagtgat

SEQ ID NO: 682506 - DNA, 15 bp, Homo sapiens
gacacagaagtgata

SEQ ID NO: 682507 - DNA, 15 bp, Homo sapiens
acacagaagtgataa

SEQ ID NO: 682508 - DNA, 15 bp, Homo sapiens
cacagaagtgataac

SEQ ID NO: 682509 - DNA, 15 bp, Homo sapiens
acagaagtgataaca

SEQ ID NO: 682510 - DNA, 15 bp, Homo sapiens
cagaagtgataacag

SEQ ID NO: 682511 - DNA, 15 bp, Homo sapiens
agaagtgataacagc

SEQ ID NO: 682512 - DNA, 15 bp, Homo sapiens
gaagtgataacagct

SEQ ID NO: 682513 - DNA, 15 bp, Homo sapiens
aagtgataacagctt

SEQ ID NO: 682514 - DNA, 15 bp, Homo sapiens
agtgataacagcttt

SEQ ID NO: 682515 - DNA, 15 bp, Homo sapiens
gtgataacagcttta

SEQ ID NO: 682516 - DNA, 15 bp, Homo sapiens
tgataacagctttaa

SEQ ID NO: 682517 - DNA, 15 bp, Homo sapiens
gataacagctttaag

SEQ ID NO: 682518 - DNA, 15 bp, Homo sapiens
ataacagctttaagc

SEQ ID NO: 682519 - DNA, 15 bp, Homo sapiens
taacagctttaagcc

SEQ ID NO: 682520 - DNA, 15 bp, Homo sapiens
aacagctttaagcca

SEQ ID NO: 682521 - DNA, 15 bp, Homo sapiens
acagctttaagccaa

SEQ ID NO: 682522 - DNA, 15 bp, Homo sapiens
cagctttaagccaat

SEQ ID NO: 682523 - DNA, 15 bp, Homo sapiens
agctttaagccaatg

SEQ ID NO: 682524 - DNA, 15 bp, Homo sapiens
gctttaagccaatgt

SEQ ID NO: 682525 - DNA, 15 bp, Homo sapiens
ctttaagccaatgtt

SEQ ID NO: 682526 - DNA, 15 bp, Homo sapiens
tttaagccaatgttt

SEQ ID NO: 682527 - DNA, 15 bp, Homo sapiens
ttaagccaatgtttg

SEQ ID NO: 682528 - DNA, 15 bp, Homo sapiens
taagccaatgtttga

SEQ ID NO: 682529 - DNA, 15 bp, Homo sapiens
aagccaatgtttgat

SEQ ID NO: 682530 - DNA, 15 bp, Homo sapiens
agccaatgtttgatg

SEQ ID NO: 682531 - DNA, 15 bp, Homo sapiens
gccaatgtttgatgg

SEQ ID NO: 682532 - DNA, 15 bp, Homo sapiens
ccaatgtttgatggt

SEQ ID NO: 682533 - DNA, 15 bp, Homo sapiens
caatgtttgatggtg

SEQ ID NO: 682534 - DNA, 15 bp, Homo sapiens
aatgtttgatggtgg

SEQ ID NO: 682535 - DNA, 15 bp, Homo sapiens
atgtttgatggtggt

SEQ ID NO: 682536 - DNA, 15 bp, Homo sapiens
tgtttgatggtggta

SEQ ID NO: 682537 - DNA, 15 bp, Homo sapiens
gtttgatggtggtag

SEQ ID NO: 682538 - DNA, 15 bp, Homo sapiens
tttgatggtggtagt

SEQ ID NO: 682539 - DNA, 15 bp, Homo sapiens
ttgatggtggtagtc

SEQ ID NO: 682540 - DNA, 15 bp, Homo sapiens
tgatggtggtagtcc

SEQ ID NO: 682541 - DNA, 15 bp, Homo sapiens
gatggtggtagtccc

SEQ ID NO: 682542 - DNA, 15 bp, Homo sapiens
atggtggtagtccca

SEQ ID NO: 682543 - DNA, 15 bp, Homo sapiens
tggtggtagtcccag

SEQ ID NO: 682544 - DNA, 15 bp, Homo sapiens
ggtggtagtcccagc

SEQ ID NO: 682545 - DNA, 15 bp, Homo sapiens
gtggtagtcccagca

SEQ ID NO: 682546 - DNA, 15 bp, Homo sapiens
tggtagtcccagcaa

SEQ ID NO: 682547 - DNA, 15 bp, Homo sapiens
ggtagtcccagcaag

SEQ ID NO: 682548 - DNA, 15 bp, Homo sapiens
gtagtcccagcaagc

SEQ ID NO: 682549 - DNA, 15 bp, Homo sapiens
tagtcccagcaagct

SEQ ID NO: 682550 - DNA, 15 bp, Homo sapiens
agtcccagcaagctc

SEQ ID NO: 682551 - DNA, 15 bp, Homo sapiens
gtcccagcaagctct

SEQ ID NO: 682552 - DNA, 15 bp, Homo sapiens
tcccagcaagctctt

SEQ ID NO: 682553 - DNA, 15 bp, Homo sapiens
cccagcaagctcttt

SEQ ID NO: 682554 - DNA, 15 bp, Homo sapiens
ccagcaagctctttt

SEQ ID NO: 682555 - DNA, 15 bp, Homo sapiens
cagcaagctcttttc

SEQ ID NO: 682556 - DNA, 15 bp, Homo sapiens
agcaagctcttttct

SEQ ID NO: 682557 - DNA, 15 bp, Homo sapiens
gcaagctcttttctg

SEQ ID NO: 682558 - DNA, 15 bp, Homo sapiens
caagctcttttctga

SEQ ID NO: 682559 - DNA, 15 bp, Homo sapiens
aagctcttttctgat

SEQ ID NO: 682560 - DNA, 15 bp, Homo sapiens
agctcttttctgatg

SEQ ID NO: 682561 - DNA, 15 bp, Homo sapiens
gctcttttctgatgt

SEQ ID NO: 682562 - DNA, 15 bp, Homo sapiens
ctcttttctgatgtc

SEQ ID NO: 682563 - DNA, 15 bp, Homo sapiens
tcttttctgatgtct

SEQ ID NO: 682564 - DNA, 15 bp, Homo sapiens
cttttctgatgtctt

SEQ ID NO: 682565 - DNA, 15 bp, Homo sapiens
ttttctgatgtcttt

SEQ ID NO: 682566 - DNA, 15 bp, Homo sapiens
tttctgatgtctttg

SEQ ID NO: 682567 - DNA, 15 bp, Homo sapiens
ttctgatgtctttgt

SEQ ID NO: 682568 - DNA, 15 bp, Homo sapiens
tctgatgtctttgtg

SEQ ID NO: 682569 - DNA, 15 bp, Homo sapiens
ctgatgtctttgtgc

SEQ ID NO: 682570 - DNA, 15 bp, Homo sapiens
tgatgtctttgtgcc

SEQ ID NO: 682571 - DNA, 15 bp, Homo sapiens
gatgtctttgtgcct

SEQ ID NO: 682572 - DNA, 15 bp, Homo sapiens
atgtctttgtgcctt

SEQ ID NO: 682573 - DNA, 15 bp, Homo sapiens
tgtctttgtgccttt

SEQ ID NO: 682574 - DNA, 15 bp, Homo sapiens
gtctttgtgcctttg

SEQ ID NO: 682575 - DNA, 15 bp, Homo sapiens
tctttgtgcctttgc

SEQ ID NO: 682576 - DNA, 15 bp, Homo sapiens
ctttgtgcctttgca

SEQ ID NO: 682577 - DNA, 15 bp, Homo sapiens
tttgtgcctttgcac

SEQ ID NO: 682578 - DNA, 15 bp, Homo sapiens
ttgtgcctttgcaca

SEQ ID NO: 682579 - DNA, 15 bp, Homo sapiens
tgtgcctttgcacat

SEQ ID NO: 682580 - DNA, 15 bp, Homo sapiens
gtgcctttgcacatg

SEQ ID NO: 682581 - DNA, 15 bp, Homo sapiens
tgcctttgcacatgc

SEQ ID NO: 682582 - DNA, 15 bp, Homo sapiens
gcctttgcacatgct

SEQ ID NO: 682583 - DNA, 15 bp, Homo sapiens
cctttgcacatgctc

SEQ ID NO: 682584 - DNA, 15 bp, Homo sapiens
ctttgcacatgctcc

SEQ ID NO: 682585 - DNA, 15 bp, Homo sapiens
tttgcacatgctcct

SEQ ID NO: 682586 - DNA, 15 bp, Homo sapiens
ttgcacatgctcctt

SEQ ID NO: 682587 - DNA, 15 bp, Homo sapiens
tgcacatgctccttc

SEQ ID NO: 682588 - DNA, 15 bp, Homo sapiens
gcacatgctccttct

SEQ ID NO: 682589 - DNA, 15 bp, Homo sapiens
cacatgctccttctc

SEQ ID NO: 682590 - DNA, 15 bp, Homo sapiens
acatgctccttctct

SEQ ID NO: 682591 - DNA, 15 bp, Homo sapiens
catgctccttctctg

SEQ ID NO: 682592 - DNA, 15 bp, Homo sapiens
atgctccttctctgt

SEQ ID NO: 682593 - DNA, 15 bp, Homo sapiens
tgctccttctctgtc

SEQ ID NO: 682594 - DNA, 15 bp, Homo sapiens
gctccttctctgtca

SEQ ID NO: 682595 - DNA, 15 bp, Homo sapiens
ctccttctctgtcac

SEQ ID NO: 682596 - DNA, 15 bp, Homo sapiens
tccttctctgtcact

SEQ ID NO: 682597 - DNA, 15 bp, Homo sapiens
ccttctctgtcactg

SEQ ID NO: 682598 - DNA, 15 bp, Homo sapiens
cttctctgtcactgt

SEQ ID NO: 682599 - DNA, 15 bp, Homo sapiens
ttctctgtcactgtt

SEQ ID NO: 682600 - DNA, 15 bp, Homo sapiens
tctctgtcactgttt

SEQ ID NO: 682601 - DNA, 15 bp, Homo sapiens
ctctgtcactgtttt

SEQ ID NO: 682602 - DNA, 15 bp, Homo sapiens
tctgtcactgttttc

SEQ ID NO: 682603 - DNA, 15 bp, Homo sapiens
ctgtcactgttttct

SEQ ID NO: 682604 - DNA, 15 bp, Homo sapiens
tgtcactgttttctt

SEQ ID NO: 682605 - DNA, 15 bp, Homo sapiens
gtcactgttttcttc

SEQ ID NO: 682606 - DNA, 15 bp, Homo sapiens
tcactgttttcttca

SEQ ID NO: 682607 - DNA, 15 bp, Homo sapiens
cactgttttcttcat

SEQ ID NO: 682608 - DNA, 15 bp, Homo sapiens
actgttttcttcatc

SEQ ID NO: 682609 - DNA, 15 bp, Homo sapiens
ctgttttcttcatca

SEQ ID NO: 682610 - DNA, 15 bp, Homo sapiens
tgttttcttcatcaa

SEQ ID NO: 682611 - DNA, 15 bp, Homo sapiens
gttttcttcatcaaa

SEQ ID NO: 682612 - DNA, 15 bp, Homo sapiens
ttttcttcatcaaac

SEQ ID NO: 682613 - DNA, 15 bp, Homo sapiens
tttcttcatcaaaca

SEQ ID NO: 682614 - DNA, 15 bp, Homo sapiens
ttcttcatcaaacat

SEQ ID NO: 682615 - DNA, 15 bp, Homo sapiens
tcttcatcaaacata

SEQ ID NO: 682616 - DNA, 15 bp, Homo sapiens
cttcatcaaacataa

SEQ ID NO: 682617 - DNA, 15 bp, Homo sapiens
ttcatcaaacataat

SEQ ID NO: 682618 - DNA, 15 bp, Homo sapiens
tcatcaaacataata

SEQ ID NO: 682619 - DNA, 15 bp, Homo sapiens
catcaaacataatat

SEQ ID NO: 682620 - DNA, 15 bp, Homo sapiens
atcaaacataatata

SEQ ID NO: 682621 - DNA, 15 bp, Homo sapiens
tcaaacataatataa

SEQ ID NO: 682622 - DNA, 15 bp, Homo sapiens
caaacataatataat

SEQ ID NO: 682623 - DNA, 15 bp, Homo sapiens
aaacataatataatg

SEQ ID NO: 682624 - DNA, 15 bp, Homo sapiens
aacataatataatgg

SEQ ID NO: 682625 - DNA, 15 bp, Homo sapiens
acataatataatgga

SEQ ID NO: 682626 - DNA, 15 bp, Homo sapiens
cataatataatggac

SEQ ID NO: 682627 - DNA, 15 bp, Homo sapiens
ataatataatggaca

SEQ ID NO: 682628 - DNA, 15 bp, Homo sapiens
taatataatggacaa

SEQ ID NO: 682629 - DNA, 15 bp, Homo sapiens
aatataatggacaag

SEQ ID NO: 682630 - DNA, 15 bp, Homo sapiens
atataatggacaagt

SEQ ID NO: 682631 - DNA, 15 bp, Homo sapiens
tataatggacaagtg

SEQ ID NO: 682632 - DNA, 15 bp, Homo sapiens
ataatggacaagtgg

SEQ ID NO: 682633 - DNA, 15 bp, Homo sapiens
taatggacaagtgga

SEQ ID NO: 682634 - DNA, 15 bp, Homo sapiens
aatggacaagtggaa

SEQ ID NO: 682635 - DNA, 15 bp, Homo sapiens
atggacaagtggaat

SEQ ID NO: 682636 - DNA, 15 bp, Homo sapiens
tggacaagtggaatc

SEQ ID NO: 682637 - DNA, 15 bp, Homo sapiens
ggacaagtggaatca

SEQ ID NO: 682638 - DNA, 15 bp, Homo sapiens
gacaagtggaatcaa

SEQ ID NO: 682639 - DNA, 15 bp, Homo sapiens
acaagtggaatcaaa

SEQ ID NO: 682640 - DNA, 15 bp, Homo sapiens
caagtggaatcaaat

SEQ ID NO: 682641 - DNA, 15 bp, Homo sapiens
aagtggaatcaaata

SEQ ID NO: 682642 - DNA, 15 bp, Homo sapiens
agtggaatcaaatag

SEQ ID NO: 682643 - DNA, 15 bp, Homo sapiens
gtggaatcaaataga

SEQ ID NO: 682644 - DNA, 15 bp, Homo sapiens
tggaatcaaatagaa

SEQ ID NO: 682645 - DNA, 15 bp, Homo sapiens
ggaatcaaatagaat

SEQ ID NO: 682646 - DNA, 15 bp, Homo sapiens
gaatcaaatagaatt

SEQ ID NO: 682647 - DNA, 15 bp, Homo sapiens
aatcaaatagaattg

SEQ ID NO: 682648 - DNA, 15 bp, Homo sapiens
atcaaatagaattga

SEQ ID NO: 682649 - DNA, 15 bp, Homo sapiens
tcaaatagaattgag

SEQ ID NO: 682650 - DNA, 15 bp, Homo sapiens
caaatagaattgagt

SEQ ID NO: 682651 - DNA, 15 bp, Homo sapiens
aaatagaattgagtt

SEQ ID NO: 682652 - DNA, 15 bp, Homo sapiens
aatagaattgagttc

SEQ ID NO: 682653 - DNA, 15 bp, Homo sapiens
atagaattgagttca

SEQ ID NO: 682654 - DNA, 15 bp, Homo sapiens
tagaattgagttcaa

SEQ ID NO: 682655 - DNA, 15 bp, Homo sapiens
agaattgagttcaaa

SEQ ID NO: 682656 - DNA, 15 bp, Homo sapiens
gaattgagttcaaat

SEQ ID NO: 682657 - DNA, 15 bp, Homo sapiens
aattgagttcaaatt

SEQ ID NO: 682658 - DNA, 15 bp, Homo sapiens
attgagttcaaattc

SEQ ID NO: 682659 - DNA, 15 bp, Homo sapiens
ttgagttcaaattct

SEQ ID NO: 682660 - DNA, 15 bp, Homo sapiens
tgagttcaaattctc

SEQ ID NO: 682661 - DNA, 15 bp, Homo sapiens
gagttcaaattctct

SEQ ID NO: 682662 - DNA, 15 bp, Homo sapiens
agttcaaattctctg

SEQ ID NO: 682663 - DNA, 15 bp, Homo sapiens
gttcaaattctctgc

SEQ ID NO: 682664 - DNA, 15 bp, Homo sapiens
ttcaaattctctgct

SEQ ID NO: 682665 - DNA, 15 bp, Homo sapiens
tcaaattctctgcta

SEQ ID NO: 682666 - DNA, 15 bp, Homo sapiens
caaattctctgctac

SEQ ID NO: 682667 - DNA, 15 bp, Homo sapiens
aaattctctgctacc

SEQ ID NO: 682668 - DNA, 15 bp, Homo sapiens
aattctctgctaccc

SEQ ID NO: 682669 - DNA, 15 bp, Homo sapiens
attctctgctaccca

SEQ ID NO: 682670 - DNA, 15 bp, Homo sapiens
ttctctgctacccat

SEQ ID NO: 682671 - DNA, 15 bp, Homo sapiens
tctctgctacccatc

SEQ ID NO: 682672 - DNA, 15 bp, Homo sapiens
ctctgctacccatcg

SEQ ID NO: 682673 - DNA, 15 bp, Homo sapiens
tctgctacccatcgg

SEQ ID NO: 682674 - DNA, 15 bp, Homo sapiens
ctgctacccatcggc

SEQ ID NO: 682675 - DNA, 15 bp, Homo sapiens
tgctacccatcggcc

SEQ ID NO: 682676 - DNA, 15 bp, Homo sapiens
gctacccatcggccc

SEQ ID NO: 682677 - DNA, 15 bp, Homo sapiens
ctacccatcggccct

SEQ ID NO: 682678 - DNA, 15 bp, Homo sapiens
tacccatcggccctg

SEQ ID NO: 682679 - DNA, 15 bp, Homo sapiens
acccatcggccctgg

SEQ ID NO: 682680 - DNA, 15 bp, Homo sapiens
cccatcggccctggt

SEQ ID NO: 682681 - DNA, 15 bp, Homo sapiens
ccatcggccctggta

SEQ ID NO: 682682 - DNA, 15 bp, Homo sapiens
catcggccctggtat

SEQ ID NO: 682683 - DNA, 15 bp, Homo sapiens
atcggccctggtatt

SEQ ID NO: 682684 - DNA, 15 bp, Homo sapiens
tcggccctggtattg

SEQ ID NO: 682685 - DNA, 15 bp, Homo sapiens
cggccctggtattgg

SEQ ID NO: 682686 - DNA, 15 bp, Homo sapiens
ggccctggtattgga

SEQ ID NO: 682687 - DNA, 15 bp, Homo sapiens
gccctggtattggac

SEQ ID NO: 682688 - DNA, 15 bp, Homo sapiens
ccctggtattggaca

SEQ ID NO: 682689 - DNA, 15 bp, Homo sapiens
cctggtattggacaa

SEQ ID NO: 682690 - DNA, 15 bp, Homo sapiens
ctggtattggacaaa

SEQ ID NO: 682691 - DNA, 15 bp, Homo sapiens
tggtattggacaaat

SEQ ID NO: 682692 - DNA, 15 bp, Homo sapiens
ggtattggacaaatt

SEQ ID NO: 682693 - DNA, 15 bp, Homo sapiens
gtattggacaaatta

SEQ ID NO: 682694 - DNA, 15 bp, Homo sapiens
tattggacaaattaa

SEQ ID NO: 682695 - DNA, 15 bp, Homo sapiens
attggacaaattaac

SEQ ID NO: 682696 - DNA, 15 bp, Homo sapiens
ttggacaaattaact

SEQ ID NO: 682697 - DNA, 15 bp, Homo sapiens
tggacaaattaactc

SEQ ID NO: 682698 - DNA, 15 bp, Homo sapiens
ggacaaattaactcc

SEQ ID NO: 682699 - DNA, 15 bp, Homo sapiens
gacaaattaactcct

SEQ ID NO: 682700 - DNA, 15 bp, Homo sapiens
acaaattaactcctc

SEQ ID NO: 682701 - DNA, 15 bp, Homo sapiens
caaattaactcctct

SEQ ID NO: 682702 - DNA, 15 bp, Homo sapiens
aaattaactcctctg

SEQ ID NO: 682703 - DNA, 15 bp, Homo sapiens
aattaactcctctga

SEQ ID NO: 682704 - DNA, 15 bp, Homo sapiens
attaactcctctgag

SEQ ID NO: 682705 - DNA, 15 bp, Homo sapiens
ttaactcctctgagc

SEQ ID NO: 682706 - DNA, 15 bp, Homo sapiens
taactcctctgagcc

SEQ ID NO: 682707 - DNA, 15 bp, Homo sapiens
aactcctctgagcct

SEQ ID NO: 682708 - DNA, 15 bp, Homo sapiens
actcctctgagcctg

SEQ ID NO: 682709 - DNA, 15 bp, Homo sapiens
ctcctctgagcctgt

SEQ ID NO: 682710 - DNA, 15 bp, Homo sapiens
tcctctgagcctgtt

SEQ ID NO: 682711 - DNA, 15 bp, Homo sapiens
cctctgagcctgttt

SEQ ID NO: 682712 - DNA, 15 bp, Homo sapiens
ctctgagcctgtttc

SEQ ID NO: 682713 - DNA, 15 bp, Homo sapiens
tctgagcctgtttcc

SEQ ID NO: 682714 - DNA, 15 bp, Homo sapiens
ctgagcctgtttcct

SEQ ID NO: 682715 - DNA, 15 bp, Homo sapiens
tgagcctgtttcctc

SEQ ID NO: 682716 - DNA, 15 bp, Homo sapiens
gagcctgtttcctca

SEQ ID NO: 682717 - DNA, 15 bp, Homo sapiens
agcctgtttcctcat

SEQ ID NO: 682718 - DNA, 15 bp, Homo sapiens
gcctgtttcctcatc

SEQ ID NO: 682719 - DNA, 15 bp, Homo sapiens
cctgtttcctcatct

SEQ ID NO: 682720 - DNA, 15 bp, Homo sapiens
ctgtttcctcatctg

SEQ ID NO: 682721 - DNA, 15 bp, Homo sapiens
tgtttcctcatctgc

SEQ ID NO: 682722 - DNA, 15 bp, Homo sapiens
gtttcctcatctgca

SEQ ID NO: 682723 - DNA, 15 bp, Homo sapiens
tttcctcatctgcaa

SEQ ID NO: 682724 - DNA, 15 bp, Homo sapiens
ttcctcatctgcaac

SEQ ID NO: 682725 - DNA, 15 bp, Homo sapiens
tcctcatctgcaacg

SEQ ID NO: 682726 - DNA, 15 bp, Homo sapiens
cctcatctgcaacgt

SEQ ID NO: 682727 - DNA, 15 bp, Homo sapiens
ctcatctgcaacgta

SEQ ID NO: 682728 - DNA, 15 bp, Homo sapiens
tcatctgcaacgtag

SEQ ID NO: 682729 - DNA, 15 bp, Homo sapiens
catctgcaacgtaga

SEQ ID NO: 682730 - DNA, 15 bp, Homo sapiens
atctgcaacgtagac

SEQ ID NO: 682731 - DNA, 15 bp, Homo sapiens
tctgcaacgtagact

SEQ ID NO: 682732 - DNA, 15 bp, Homo sapiens
ctgcaacgtagacta

SEQ ID NO: 682733 - DNA, 15 bp, Homo sapiens
tgcaacgtagactag

SEQ ID NO: 682734 - DNA, 15 bp, Homo sapiens
gcaacgtagactagc

SEQ ID NO: 682735 - DNA, 15 bp, Homo sapiens
caacgtagactagct

SEQ ID NO: 682736 - DNA, 15 bp, Homo sapiens
aacgtagactagcta

SEQ ID NO: 682737 - DNA, 15 bp, Homo sapiens
acgtagactagctaa

SEQ ID NO: 682738 - DNA, 15 bp, Homo sapiens
cgtagactagctaat

SEQ ID NO: 682739 - DNA, 15 bp, Homo sapiens
gtagactagctaata

SEQ ID NO: 682740 - DNA, 15 bp, Homo sapiens
tagactagctaatac

SEQ ID NO: 682741 - DNA, 15 bp, Homo sapiens
agactagctaatact

SEQ ID NO: 682742 - DNA, 15 bp, Homo sapiens
gactagctaatacta

SEQ ID NO: 682743 - DNA, 15 bp, Homo sapiens
actagctaatactac

SEQ ID NO: 682744 - DNA, 15 bp, Homo sapiens
ctagctaatactacc

SEQ ID NO: 682745 - DNA, 15 bp, Homo sapiens
tagctaatactaccc

SEQ ID NO: 682746 - DNA, 15 bp, Homo sapiens
agctaatactaccca

SEQ ID NO: 682747 - DNA, 15 bp, Homo sapiens
gctaatactacccat

SEQ ID NO: 682748 - DNA, 15 bp, Homo sapiens
ctaatactacccatt

SEQ ID NO: 682749 - DNA, 15 bp, Homo sapiens
taatactacccattg

SEQ ID NO: 682750 - DNA, 15 bp, Homo sapiens
aatactacccattgg

SEQ ID NO: 682751 - DNA, 15 bp, Homo sapiens
atactacccattgga

SEQ ID NO: 682752 - DNA, 15 bp, Homo sapiens
tactacccattggaa

SEQ ID NO: 682753 - DNA, 15 bp, Homo sapiens
actacccattggaaa

SEQ ID NO: 682754 - DNA, 15 bp, Homo sapiens
ctacccattggaaag

SEQ ID NO: 682755 - DNA, 15 bp, Homo sapiens
tacccattggaaagc

SEQ ID NO: 682756 - DNA, 15 bp, Homo sapiens
acccattggaaagcg

SEQ ID NO: 682757 - DNA, 15 bp, Homo sapiens
cccattggaaagcgt

SEQ ID NO: 682758 - DNA, 15 bp, Homo sapiens
ccattggaaagcgtt

SEQ ID NO: 682759 - DNA, 15 bp, Homo sapiens
cattggaaagcgttg

SEQ ID NO: 682760 - DNA, 15 bp, Homo sapiens
attggaaagcgttgt

SEQ ID NO: 682761 - DNA, 15 bp, Homo sapiens
ttggaaagcgttgtt

SEQ ID NO: 682762 - DNA, 15 bp, Homo sapiens
tggaaagcgttgttt

SEQ ID NO: 682763 - DNA, 15 bp, Homo sapiens
ggaaagcgttgtttc

SEQ ID NO: 682764 - DNA, 15 bp, Homo sapiens
gaaagcgttgtttct

SEQ ID NO: 682765 - DNA, 15 bp, Homo sapiens
aaagcgttgtttctt

SEQ ID NO: 682766 - DNA, 15 bp, Homo sapiens
aagcgttgtttctta

SEQ ID NO: 682767 - DNA, 15 bp, Homo sapiens
agcgttgtttcttag

SEQ ID NO: 682768 - DNA, 15 bp, Homo sapiens
gcgttgtttcttagc

SEQ ID NO: 682769 - DNA, 15 bp, Homo sapiens
cgttgtttcttagct

SEQ ID NO: 682770 - DNA, 15 bp, Homo sapiens
gttgtttcttagcta

SEQ ID NO: 682771 - DNA, 15 bp, Homo sapiens
ttgtttcttagctaa

SEQ ID NO: 682772 - DNA, 15 bp, Homo sapiens
tgtttcttagctaat

SEQ ID NO: 682773 - DNA, 15 bp, Homo sapiens
gtttcttagctaatg

SEQ ID NO: 682774 - DNA, 15 bp, Homo sapiens
tttcttagctaatgc

SEQ ID NO: 682775 - DNA, 15 bp, Homo sapiens
ttcttagctaatgca

SEQ ID NO: 682776 - DNA, 15 bp, Homo sapiens
tcttagctaatgcat

SEQ ID NO: 682777 - DNA, 15 bp, Homo sapiens
cttagctaatgcatg

SEQ ID NO: 682778 - DNA, 15 bp, Homo sapiens
ttagctaatgcatgc

SEQ ID NO: 682779 - DNA, 15 bp, Homo sapiens
tagctaatgcatgca

SEQ ID NO: 682780 - DNA, 15 bp, Homo sapiens
agctaatgcatgcaa

SEQ ID NO: 682781 - DNA, 15 bp, Homo sapiens
gctaatgcatgcaag

SEQ ID NO: 682782 - DNA, 15 bp, Homo sapiens
ctaatgcatgcaagg

SEQ ID NO: 682783 - DNA, 15 bp, Homo sapiens
taatgcatgcaaggc

SEQ ID NO: 682784 - DNA, 15 bp, Homo sapiens
aatgcatgcaaggct

SEQ ID NO: 682785 - DNA, 15 bp, Homo sapiens
atgcatgcaaggctt

SEQ ID NO: 682786 - DNA, 15 bp, Homo sapiens
tgcatgcaaggctta

SEQ ID NO: 682787 - DNA, 15 bp, Homo sapiens
gcatgcaaggcttaa

SEQ ID NO: 682788 - DNA, 15 bp, Homo sapiens
catgcaaggcttaaa

SEQ ID NO: 682789 - DNA, 15 bp, Homo sapiens
atgcaaggcttaaaa

SEQ ID NO: 682790 - DNA, 15 bp, Homo sapiens
tgcaaggcttaaaac

SEQ ID NO: 682791 - DNA, 15 bp, Homo sapiens
gcaaggcttaaaacc

SEQ ID NO: 682792 - DNA, 15 bp, Homo sapiens
caaggcttaaaacct

SEQ ID NO: 682793 - DNA, 15 bp, Homo sapiens
aaggcttaaaaccta

SEQ ID NO: 682794 - DNA, 15 bp, Homo sapiens
aggcttaaaacctag

SEQ ID NO: 682795 - DNA, 15 bp, Homo sapiens
ggcttaaaacctaga

SEQ ID NO: 682796 - DNA, 15 bp, Homo sapiens
gcttaaaacctagat

SEQ ID NO: 682797 - DNA, 15 bp, Homo sapiens
cttaaaacctagatg

SEQ ID NO: 682798 - DNA, 15 bp, Homo sapiens
ttaaaacctagatga

SEQ ID NO: 682799 - DNA, 15 bp, Homo sapiens
taaaacctagatgac

SEQ ID NO: 682800 - DNA, 15 bp, Homo sapiens
aaaacctagatgacg

SEQ ID NO: 682801 - DNA, 15 bp, Homo sapiens
aaacctagatgacgg

SEQ ID NO: 682802 - DNA, 15 bp, Homo sapiens
aacctagatgacggg

SEQ ID NO: 682803 - DNA, 15 bp, Homo sapiens
acctagatgacgggt

SEQ ID NO: 682804 - DNA, 15 bp, Homo sapiens
cctagatgacgggtt

SEQ ID NO: 682805 - DNA, 15 bp, Homo sapiens
ctagatgacgggttg

SEQ ID NO: 682806 - DNA, 15 bp, Homo sapiens
tagatgacgggttga

SEQ ID NO: 682807 - DNA, 15 bp, Homo sapiens
agatgacgggttgat

SEQ ID NO: 682808 - DNA, 15 bp, Homo sapiens
gatgacgggttgata

SEQ ID NO: 682809 - DNA, 15 bp, Homo sapiens
atgacgggttgatag

SEQ ID NO: 682810 - DNA, 15 bp, Homo sapiens
tgacgggttgatagg

SEQ ID NO: 682811 - DNA, 15 bp, Homo sapiens
gacgggttgataggt

SEQ ID NO: 682812 - DNA, 15 bp, Homo sapiens
acgggttgataggtg

SEQ ID NO: 682813 - DNA, 15 bp, Homo sapiens
cgggttgataggtgc

SEQ ID NO: 682814 - DNA, 15 bp, Homo sapiens
gggttgataggtgca

SEQ ID NO: 682815 - DNA, 15 bp, Homo sapiens
ggttgataggtgcag

SEQ ID NO: 682816 - DNA, 15 bp, Homo sapiens
gttgataggtgcagc

SEQ ID NO: 682817 - DNA, 15 bp, Homo sapiens
ttgataggtgcagca

SEQ ID NO: 682818 - DNA, 15 bp, Homo sapiens
tgataggtgcagcaa

SEQ ID NO: 682819 - DNA, 15 bp, Homo sapiens
gataggtgcagcaaa

SEQ ID NO: 682820 - DNA, 15 bp, Homo sapiens
ataggtgcagcaaac

SEQ ID NO: 682821 - DNA, 15 bp, Homo sapiens
taggtgcagcaaacc

SEQ ID NO: 682822 - DNA, 15 bp, Homo sapiens
aggtgcagcaaacct

SEQ ID NO: 682823 - DNA, 15 bp, Homo sapiens
ggtgcagcaaacctc

SEQ ID NO: 682824 - DNA, 15 bp, Homo sapiens
gtgcagcaaacctcc

SEQ ID NO: 682825 - DNA, 15 bp, Homo sapiens
tgcagcaaacctcca

SEQ ID NO: 682826 - DNA, 15 bp, Homo sapiens
gcagcaaacctccat

SEQ ID NO: 682827 - DNA, 15 bp, Homo sapiens
cagcaaacctccatg

SEQ ID NO: 682828 - DNA, 15 bp, Homo sapiens
agcaaacctccatgg

SEQ ID NO: 682829 - DNA, 15 bp, Homo sapiens
gcaaacctccatggc

SEQ ID NO: 682830 - DNA, 15 bp, Homo sapiens
caaacctccatggca

SEQ ID NO: 682831 - DNA, 15 bp, Homo sapiens
aaacctccatggcat

SEQ ID NO: 682832 - DNA, 15 bp, Homo sapiens
aacctccatggcata

SEQ ID NO: 682833 - DNA, 15 bp, Homo sapiens
acctccatggcatac

SEQ ID NO: 682834 - DNA, 15 bp, Homo sapiens
cctccatggcatacg

SEQ ID NO: 682835 - DNA, 15 bp, Homo sapiens
ctccatggcatacgt

SEQ ID NO: 682836 - DNA, 15 bp, Homo sapiens
tccatggcatacgta

SEQ ID NO: 682837 - DNA, 15 bp, Homo sapiens
ccatggcatacgtat

SEQ ID NO: 682838 - DNA, 15 bp, Homo sapiens
catggcatacgtatg

SEQ ID NO: 682839 - DNA, 15 bp, Homo sapiens
atggcatacgtatgc

SEQ ID NO: 682840 - DNA, 15 bp, Homo sapiens
tggcatacgtatgcc

SEQ ID NO: 682841 - DNA, 15 bp, Homo sapiens
ggcatacgtatgcct

SEQ ID NO: 682842 - DNA, 15 bp, Homo sapiens
gcatacgtatgccta

SEQ ID NO: 682843 - DNA, 15 bp, Homo sapiens
catacgtatgcctat

SEQ ID NO: 682844 - DNA, 15 bp, Homo sapiens
atacgtatgcctatg

SEQ ID NO: 682845 - DNA, 15 bp, Homo sapiens
tacgtatgcctatgt

SEQ ID NO: 682846 - DNA, 15 bp, Homo sapiens
acgtatgcctatgta

SEQ ID NO: 682847 - DNA, 15 bp, Homo sapiens
cgtatgcctatgtaa

SEQ ID NO: 682848 - DNA, 15 bp, Homo sapiens
gtatgcctatgtaac

SEQ ID NO: 682849 - DNA, 15 bp, Homo sapiens
tatgcctatgtaaca

SEQ ID NO: 682850 - DNA, 15 bp, Homo sapiens
atgcctatgtaacaa

SEQ ID NO: 682851 - DNA, 15 bp, Homo sapiens
tgcctatgtaacaaa

SEQ ID NO: 682852 - DNA, 15 bp, Homo sapiens
gcctatgtaacaaac

SEQ ID NO: 682853 - DNA, 15 bp, Homo sapiens
cctatgtaacaaacc

SEQ ID NO: 682854 - DNA, 15 bp, Homo sapiens
ctatgtaacaaacct

SEQ ID NO: 682855 - DNA, 15 bp, Homo sapiens
tatgtaacaaaccta

SEQ ID NO: 682856 - DNA, 15 bp, Homo sapiens
atgtaacaaacctac

SEQ ID NO: 682857 - DNA, 15 bp, Homo sapiens
tgtaacaaacctaca

SEQ ID NO: 682858 - DNA, 15 bp, Homo sapiens
gtaacaaacctacac

SEQ ID NO: 682859 - DNA, 15 bp, Homo sapiens
taacaaacctacacg

SEQ ID NO: 682860 - DNA, 15 bp, Homo sapiens
aacaaacctacacgt

SEQ ID NO: 682861 - DNA, 15 bp, Homo sapiens
acaaacctacacgtt

SEQ ID NO: 682862 - DNA, 15 bp, Homo sapiens
caaacctacacgttc

SEQ ID NO: 682863 - DNA, 15 bp, Homo sapiens
aaacctacacgttct

SEQ ID NO: 682864 - DNA, 15 bp, Homo sapiens
aacctacacgttctg

SEQ ID NO: 682865 - DNA, 15 bp, Homo sapiens
acctacacgttctgc

SEQ ID NO: 682866 - DNA, 15 bp, Homo sapiens
cctacacgttctgca

SEQ ID NO: 682867 - DNA, 15 bp, Homo sapiens
ctacacgttctgcac

SEQ ID NO: 682868 - DNA, 15 bp, Homo sapiens
tacacgttctgcact

SEQ ID NO: 682869 - DNA, 15 bp, Homo sapiens
acacgttctgcactt

SEQ ID NO: 682870 - DNA, 15 bp, Homo sapiens
cacgttctgcacttg

SEQ ID NO: 682871 - DNA, 15 bp, Homo sapiens
acgttctgcacttgt

SEQ ID NO: 682872 - DNA, 15 bp, Homo sapiens
cgttctgcacttgta

SEQ ID NO: 682873 - DNA, 15 bp, Homo sapiens
gttctgcacttgtat

SEQ ID NO: 682874 - DNA, 15 bp, Homo sapiens
ttctgcacttgtatc

SEQ ID NO: 682875 - DNA, 15 bp, Homo sapiens
tctgcacttgtatcc

SEQ ID NO: 682876 - DNA, 15 bp, Homo sapiens
ctgcacttgtatccc

SEQ ID NO: 682877 - DNA, 15 bp, Homo sapiens
tgcacttgtatcccg

SEQ ID NO: 682878 - DNA, 15 bp, Homo sapiens
gcacttgtatcccgg

SEQ ID NO: 682879 - DNA, 15 bp, Homo sapiens
cacttgtatcccgga

SEQ ID NO: 682880 - DNA, 15 bp, Homo sapiens
acttgtatcccggaa

SEQ ID NO: 682881 - DNA, 15 bp, Homo sapiens
cttgtatcccggaac

SEQ ID NO: 682882 - DNA, 15 bp, Homo sapiens
ttgtatcccggaact

SEQ ID NO: 682883 - DNA, 15 bp, Homo sapiens
tgtatcccggaactt

SEQ ID NO: 682884 - DNA, 15 bp, Homo sapiens
gtatcccggaactta

SEQ ID NO: 682885 - DNA, 15 bp, Homo sapiens
tatcccggaacttaa

SEQ ID NO: 682886 - DNA, 15 bp, Homo sapiens
atcccggaacttaaa

SEQ ID NO: 682887 - DNA, 15 bp, Homo sapiens
tcccggaacttaaag

SEQ ID NO: 682888 - DNA, 15 bp, Homo sapiens
cccggaacttaaagt

SEQ ID NO: 682889 - DNA, 15 bp, Homo sapiens
ccggaacttaaagta

SEQ ID NO: 682890 - DNA, 15 bp, Homo sapiens
cggaacttaaagtaa

SEQ ID NO: 682891 - DNA, 15 bp, Homo sapiens
ggaacttaaagtaaa

SEQ ID NO: 682892 - DNA, 15 bp, Homo sapiens
gaacttaaagtaaaa

SEQ ID NO: 682893 - DNA, 15 bp, Homo sapiens
aacttaaagtaaaaa

SEQ ID NO: 682894 - DNA, 15 bp, Homo sapiens
acttaaagtaaaaaa

SEQ ID NO: 682895 - DNA, 15 bp, Homo sapiens
cttaaagtaaaaaaa

SEQ ID NO: 682896 - DNA, 15 bp, Homo sapiens
ttaaagtaaaaaaaa

SEQ ID NO: 682897 - DNA, 15 bp, Homo sapiens
taaagtaaaaaaaaa

SEQ ID NO: 682898 - DNA, 15 bp, Homo sapiens
aaagtaaaaaaaaaa

SEQ ID NO: 682899 - DNA, 15 bp, Homo sapiens
aagtaaaaaaaaaaa

SEQ ID NO: 682900 - DNA, 15 bp, Homo sapiens
agtaaaaaaaaaaaa

SEQ ID NO: 682901 - DNA, 15 bp, Homo sapiens
gtaaaaaaaaaaaaa

SEQ ID NO: 682902 - DNA, 15 bp, Homo sapiens
taaaaaaaaaaaaaa

SEQ ID NO: 682903 - DNA, 15 bp, Homo sapiens
aaaaaaaaaaaaaaa

SEQ ID NO: 682904 - DNA, 15 bp, Homo sapiens
aaaaaaaaaaaaaag

SEQ ID NO: 682905 - DNA, 15 bp, Homo sapiens
aaaaaaaaaaaaaga

SEQ ID NO: 682906 - DNA, 15 bp, Homo sapiens
aaaaaaaaaaaagaa

SEQ ID NO: 682907 - DNA, 15 bp, Homo sapiens
aaaaaaaaaaagaaa

SEQ ID NO: 682908 - DNA, 15 bp, Homo sapiens
aaaaaaaaaagaaaa

SEQ ID NO: 682909 - DNA, 15 bp, Homo sapiens
aaaaaaaaagaaaag

SEQ ID NO: 682910 - DNA, 15 bp, Homo sapiens
aaaaaaaagaaaaga

SEQ ID NO: 682911 - DNA, 15 bp, Homo sapiens
aaaaaaagaaaagaa

SEQ ID NO: 682912 - DNA, 15 bp, Homo sapiens
aaaaaagaaaagaaa

SEQ ID NO: 682913 - DNA, 15 bp, Homo sapiens
aaaaagaaaagaaag

SEQ ID NO: 682914 - DNA, 15 bp, Homo sapiens
aaaagaaaagaaaga

SEQ ID NO: 682915 - DNA, 15 bp, Homo sapiens
aaagaaaagaaagaa

SEQ ID NO: 682916 - DNA, 15 bp, Homo sapiens
aagaaaagaaagaaa

SEQ ID NO: 682917 - DNA, 15 bp, Homo sapiens
agaaaagaaagaaag

SEQ ID NO: 682918 - DNA, 15 bp, Homo sapiens
gaaaagaaagaaaga

SEQ ID NO: 682919 - DNA, 15 bp, Homo sapiens
aaaagaaagaaagaa

SEQ ID NO: 682920 - DNA, 15 bp, Homo sapiens
aaagaaagaaagaaa

SEQ ID NO: 682921 - DNA, 15 bp, Homo sapiens
aagaaagaaagaaaa

SEQ ID NO: 682922 - DNA, 15 bp, Homo sapiens
agaaagaaagaaaaa

SEQ ID NO: 682923 - DNA, 15 bp, Homo sapiens
gaaagaaagaaaaag

SEQ ID NO: 682924 - DNA, 15 bp, Homo sapiens
aaagaaagaaaaaga

SEQ ID NO: 682925 - DNA, 15 bp, Homo sapiens
aagaaagaaaaagaa

SEQ ID NO: 682926 - DNA, 15 bp, Homo sapiens
agaaagaaaaagaaa

SEQ ID NO: 682927 - DNA, 15 bp, Homo sapiens
gaaagaaaaagaaaa

SEQ ID NO: 682928 - DNA, 15 bp, Homo sapiens
aaagaaaaagaaaaa

SEQ ID NO: 682929 - DNA, 15 bp, Homo sapiens
aagaaaaagaaaaaa

SEQ ID NO: 682930 - DNA, 15 bp, Homo sapiens
agaaaaagaaaaaaa

SEQ ID NO: 682931 - DNA, 15 bp, Homo sapiens
gaaaaagaaaaaaaa

SEQ ID NO: 682932 - DNA, 15 bp, Homo sapiens
aaaaagaaaaaaaag

SEQ ID NO: 682933 - DNA, 15 bp, Homo sapiens
aaaagaaaaaaaagg

SEQ ID NO: 682934 - DNA, 15 bp, Homo sapiens
aaagaaaaaaaaggc

SEQ ID NO: 682935 - DNA, 15 bp, Homo sapiens
aagaaaaaaaaggct

SEQ ID NO: 682936 - DNA, 15 bp, Homo sapiens
agaaaaaaaaggctg

SEQ ID NO: 682937 - DNA, 15 bp, Homo sapiens
gaaaaaaaaggctgt

SEQ ID NO: 682938 - DNA, 15 bp, Homo sapiens
aaaaaaaaggctgtt

SEQ ID NO: 682939 - DNA, 15 bp, Homo sapiens
aaaaaaaggctgttt

SEQ ID NO: 682940 - DNA, 15 bp, Homo sapiens
aaaaaaggctgtttc

SEQ ID NO: 682941 - DNA, 15 bp, Homo sapiens
aaaaaggctgtttct

SEQ ID NO: 682942 - DNA, 15 bp, Homo sapiens
aaaaggctgtttctg

SEQ ID NO: 682943 - DNA, 15 bp, Homo sapiens
aaaggctgtttctgg

SEQ ID NO: 682944 - DNA, 15 bp, Homo sapiens
aaggctgtttctggg

SEQ ID NO: 682945 - DNA, 15 bp, Homo sapiens
aggctgtttctgggg

SEQ ID NO: 682946 - DNA, 15 bp, Homo sapiens
ggctgtttctgggga

SEQ ID NO: 682947 - DNA, 15 bp, Homo sapiens
gctgtttctggggat

SEQ ID NO: 682948 - DNA, 15 bp, Homo sapiens
ctgtttctggggatt

SEQ ID NO: 682949 - DNA, 15 bp, Homo sapiens
tgtttctggggatta

SEQ ID NO: 682950 - DNA, 15 bp, Homo sapiens
gtttctggggattaa

SEQ ID NO: 682951 - DNA, 15 bp, Homo sapiens
tttctggggattaaa

SEQ ID NO: 682952 - DNA, 15 bp, Homo sapiens
ttctggggattaaat

SEQ ID NO: 682953 - DNA, 15 bp, Homo sapiens
tctggggattaaata

SEQ ID NO: 682954 - DNA, 15 bp, Homo sapiens
ctggggattaaataa

SEQ ID NO: 682955 - DNA, 15 bp, Homo sapiens
tggggattaaataag

SEQ ID NO: 682956 - DNA, 15 bp, Homo sapiens
ggggattaaataaga

SEQ ID NO: 682957 - DNA, 15 bp, Homo sapiens
gggattaaataagac

SEQ ID NO: 682958 - DNA, 15 bp, Homo sapiens
ggattaaataagaca

SEQ ID NO: 682959 - DNA, 15 bp, Homo sapiens
gattaaataagacaa

SEQ ID NO: 682960 - DNA, 15 bp, Homo sapiens
attaaataagacaat

SEQ ID NO: 682961 - DNA, 15 bp, Homo sapiens
ttaaataagacaatt

SEQ ID NO: 682962 - DNA, 15 bp, Homo sapiens
taaataagacaatta

SEQ ID NO: 682963 - DNA, 15 bp, Homo sapiens
aaataagacaattat

SEQ ID NO: 682964 - DNA, 15 bp, Homo sapiens
aataagacaattatg

SEQ ID NO: 682965 - DNA, 15 bp, Homo sapiens
ataagacaattatgt

SEQ ID NO: 682966 - DNA, 15 bp, Homo sapiens
taagacaattatgta

SEQ ID NO: 682967 - DNA, 15 bp, Homo sapiens
aagacaattatgtaa

SEQ ID NO: 682968 - DNA, 15 bp, Homo sapiens
agacaattatgtaag

SEQ ID NO: 682969 - DNA, 15 bp, Homo sapiens
gacaattatgtaagg

SEQ ID NO: 682970 - DNA, 15 bp, Homo sapiens
acaattatgtaaggt

SEQ ID NO: 682971 - DNA, 15 bp, Homo sapiens
caattatgtaaggtg

SEQ ID NO: 682972 - DNA, 15 bp, Homo sapiens
aattatgtaaggtgg

SEQ ID NO: 682973 - DNA, 15 bp, Homo sapiens
attatgtaaggtggc

SEQ ID NO: 682974 - DNA, 15 bp, Homo sapiens
ttatgtaaggtggcc

SEQ ID NO: 682975 - DNA, 15 bp, Homo sapiens
tatgtaaggtggcca

SEQ ID NO: 682976 - DNA, 15 bp, Homo sapiens
atgtaaggtggccag

SEQ ID NO: 682977 - DNA, 15 bp, Homo sapiens
tgtaaggtggccagc

SEQ ID NO: 682978 - DNA, 15 bp, Homo sapiens
gtaaggtggccagca

SEQ ID NO: 682979 - DNA, 15 bp, Homo sapiens
taaggtggccagcac

SEQ ID NO: 682980 - DNA, 15 bp, Homo sapiens
aaggtggccagcaca

SEQ ID NO: 682981 - DNA, 15 bp, Homo sapiens
aggtggccagcacag

SEQ ID NO: 682982 - DNA, 15 bp, Homo sapiens
ggtggccagcacagt

SEQ ID NO: 682983 - DNA, 15 bp, Homo sapiens
gtggccagcacagtt

SEQ ID NO: 682984 - DNA, 15 bp, Homo sapiens
tggccagcacagttc

SEQ ID NO: 682985 - DNA, 15 bp, Homo sapiens
ggccagcacagttcc

SEQ ID NO: 682986 - DNA, 15 bp, Homo sapiens
gccagcacagttcct

SEQ ID NO: 682987 - DNA, 15 bp, Homo sapiens
ccagcacagttcctg

SEQ ID NO: 682988 - DNA, 15 bp, Homo sapiens
cagcacagttcctgg

SEQ ID NO: 682989 - DNA, 15 bp, Homo sapiens
agcacagttcctggt

SEQ ID NO: 682990 - DNA, 15 bp, Homo sapiens
gcacagttcctggta

SEQ ID NO: 682991 - DNA, 15 bp, Homo sapiens
cacagttcctggtac

SEQ ID NO: 682992 - DNA, 15 bp, Homo sapiens
acagttcctggtaca

SEQ ID NO: 682993 - DNA, 15 bp, Homo sapiens
cagttcctggtacat

SEQ ID NO: 682994 - DNA, 15 bp, Homo sapiens
agttcctggtacata

SEQ ID NO: 682995 - DNA, 15 bp, Homo sapiens
gttcctggtacatag

SEQ ID NO: 682996 - DNA, 15 bp, Homo sapiens
ttcctggtacatagt

SEQ ID NO: 682997 - DNA, 15 bp, Homo sapiens
tcctggtacatagta

SEQ ID NO: 682998 - DNA, 15 bp, Homo sapiens
cctggtacatagtaa

SEQ ID NO: 682999 - DNA, 15 bp, Homo sapiens
ctggtacatagtaaa

SEQ ID NO: 683000 - DNA, 15 bp, Homo sapiens
tggtacatagtaaat

SEQ ID NO: 683001 - DNA, 15 bp, Homo sapiens
ggtacatagtaaatg

SEQ ID NO: 683002 - DNA, 15 bp, Homo sapiens
gtacatagtaaatgt

SEQ ID NO: 683003 - DNA, 15 bp, Homo sapiens
tacatagtaaatgtc

SEQ ID NO: 683004 - DNA, 15 bp, Homo sapiens
acatagtaaatgtca

SEQ ID NO: 683005 - DNA, 15 bp, Homo sapiens
catagtaaatgtcag

SEQ ID NO: 683006 - DNA, 15 bp, Homo sapiens
atagtaaatgtcagg

SEQ ID NO: 683007 - DNA, 15 bp, Homo sapiens
tagtaaatgtcaggc

SEQ ID NO: 683008 - DNA, 15 bp, Homo sapiens
agtaaatgtcaggcc

SEQ ID NO: 683009 - DNA, 15 bp, Homo sapiens
gtaaatgtcaggcct

SEQ ID NO: 683010 - DNA, 15 bp, Homo sapiens
taaatgtcaggcctg

SEQ ID NO: 683011 - DNA, 15 bp, Homo sapiens
aaatgtcaggcctgc

SEQ ID NO: 683012 - DNA, 15 bp, Homo sapiens
aatgtcaggcctgcc

SEQ ID NO: 683013 - DNA, 15 bp, Homo sapiens
atgtcaggcctgcct

SEQ ID NO: 683014 - DNA, 15 bp, Homo sapiens
tgtcaggcctgcctg

SEQ ID NO: 683015 - DNA, 15 bp, Homo sapiens
gtcaggcctgcctga

SEQ ID NO: 683016 - DNA, 15 bp, Homo sapiens
tcaggcctgcctgac

SEQ ID NO: 683017 - DNA, 15 bp, Homo sapiens
caggcctgcctgaca

SEQ ID NO: 683018 - DNA, 15 bp, Homo sapiens
aggcctgcctgacag

SEQ ID NO: 683019 - DNA, 15 bp, Homo sapiens
ggcctgcctgacaga

SEQ ID NO: 683020 - DNA, 15 bp, Homo sapiens
gcctgcctgacagac

SEQ ID NO: 683021 - DNA, 15 bp, Homo sapiens
cctgcctgacagact

SEQ ID NO: 683022 - DNA, 15 bp, Homo sapiens
ctgcctgacagactt

SEQ ID NO: 683023 - DNA, 15 bp, Homo sapiens
tgcctgacagacttc

SEQ ID NO: 683024 - DNA, 15 bp, Homo sapiens
gcctgacagacttct

SEQ ID NO: 683025 - DNA, 15 bp, Homo sapiens
cctgacagacttcta

SEQ ID NO: 683026 - DNA, 15 bp, Homo sapiens
ctgacagacttctat

SEQ ID NO: 683027 - DNA, 15 bp, Homo sapiens
tgacagacttctatt

SEQ ID NO: 683028 - DNA, 15 bp, Homo sapiens
gacagacttctattc

SEQ ID NO: 683029 - DNA, 15 bp, Homo sapiens
acagacttctattca

SEQ ID NO: 683030 - DNA, 15 bp, Homo sapiens
cagacttctattcag

SEQ ID NO: 683031 - DNA, 15 bp, Homo sapiens
agacttctattcagc

SEQ ID NO: 683032 - DNA, 15 bp, Homo sapiens
gacttctattcagca

SEQ ID NO: 683033 - DNA, 15 bp, Homo sapiens
acttctattcagcag

SEQ ID NO: 683034 - DNA, 15 bp, Homo sapiens
cttctattcagcagc

SEQ ID NO: 683035 - DNA, 15 bp, Homo sapiens
ttctattcagcagct

SEQ ID NO: 683036 - DNA, 15 bp, Homo sapiens
tctattcagcagcta

SEQ ID NO: 683037 - DNA, 15 bp, Homo sapiens
ctattcagcagctac

SEQ ID NO: 683038 - DNA, 15 bp, Homo sapiens
tattcagcagctact

SEQ ID NO: 683039 - DNA, 15 bp, Homo sapiens
attcagcagctactg

SEQ ID NO: 683040 - DNA, 15 bp, Homo sapiens
ttcagcagctactgc

SEQ ID NO: 683041 - DNA, 15 bp, Homo sapiens
tcagcagctactgct

SEQ ID NO: 683042 - DNA, 15 bp, Homo sapiens
cagcagctactgctc

SEQ ID NO: 683043 - DNA, 15 bp, Homo sapiens
agcagctactgctcc

SEQ ID NO: 683044 - DNA, 15 bp, Homo sapiens
gcagctactgctccc

SEQ ID NO: 683045 - DNA, 15 bp, Homo sapiens
cagctactgctcccc

SEQ ID NO: 683046 - DNA, 15 bp, Homo sapiens
agctactgctcccct

SEQ ID NO: 683047 - DNA, 15 bp, Homo sapiens
gctactgctcccctg

SEQ ID NO: 683048 - DNA, 15 bp, Homo sapiens
ctactgctcccctga

SEQ ID NO: 683049 - DNA, 15 bp, Homo sapiens
tactgctcccctgaa

SEQ ID NO: 683050 - DNA, 15 bp, Homo sapiens
actgctcccctgaaa

SEQ ID NO: 683051 - DNA, 15 bp, Homo sapiens
ctgctcccctgaaaa

SEQ ID NO: 683052 - DNA, 15 bp, Homo sapiens
tgctcccctgaaaat

SEQ ID NO: 683053 - DNA, 15 bp, Homo sapiens
gctcccctgaaaatc

SEQ ID NO: 683054 - DNA, 15 bp, Homo sapiens
ctcccctgaaaatct

SEQ ID NO: 683055 - DNA, 15 bp, Homo sapiens
tcccctgaaaatctt

SEQ ID NO: 683056 - DNA, 15 bp, Homo sapiens
cccctgaaaatcttc

SEQ ID NO: 683057 - DNA, 15 bp, Homo sapiens
ccctgaaaatcttcc

SEQ ID NO: 683058 - DNA, 15 bp, Homo sapiens
cctgaaaatcttcct

SEQ ID NO: 683059 - DNA, 15 bp, Homo sapiens
ctgaaaatcttcctc

SEQ ID NO: 683060 - DNA, 15 bp, Homo sapiens
tgaaaatcttcctca

SEQ ID NO: 683061 - DNA, 15 bp, Homo sapiens
gaaaatcttcctcag

SEQ ID NO: 683062 - DNA, 15 bp, Homo sapiens
aaaatcttcctcaga

SEQ ID NO: 683063 - DNA, 15 bp, Homo sapiens
aaatcttcctcagac

SEQ ID NO: 683064 - DNA, 15 bp, Homo sapiens
aatcttcctcagacg

SEQ ID NO: 683065 - DNA, 15 bp, Homo sapiens
atcttcctcagacgt

SEQ ID NO: 683066 - DNA, 15 bp, Homo sapiens
tcttcctcagacgtt

SEQ ID NO: 683067 - DNA, 15 bp, Homo sapiens
cttcctcagacgttt

SEQ ID NO: 683068 - DNA, 15 bp, Homo sapiens
ttcctcagacgtttc

SEQ ID NO: 683069 - DNA, 15 bp, Homo sapiens
tcctcagacgtttcc

SEQ ID NO: 683070 - DNA, 15 bp, Homo sapiens
cctcagacgtttcca

SEQ ID NO: 683071 - DNA, 15 bp, Homo sapiens
ctcagacgtttccac

SEQ ID NO: 683072 - DNA, 15 bp, Homo sapiens
tcagacgtttccacg

SEQ ID NO: 683073 - DNA, 15 bp, Homo sapiens
cagacgtttccacgg

SEQ ID NO: 683074 - DNA, 15 bp, Homo sapiens
agacgtttccacggt

SEQ ID NO: 683075 - DNA, 15 bp, Homo sapiens
gacgtttccacggtg

SEQ ID NO: 683076 - DNA, 15 bp, Homo sapiens
acgtttccacggtgc

SEQ ID NO: 683077 - DNA, 15 bp, Homo sapiens
cgtttccacggtgct

SEQ ID NO: 683078 - DNA, 15 bp, Homo sapiens
gtttccacggtgctt

SEQ ID NO: 683079 - DNA, 15 bp, Homo sapiens
tttccacggtgcttc

SEQ ID NO: 683080 - DNA, 15 bp, Homo sapiens
ttccacggtgcttcc

SEQ ID NO: 683081 - DNA, 15 bp, Homo sapiens
tccacggtgcttccc

SEQ ID NO: 683082 - DNA, 15 bp, Homo sapiens
ccacggtgcttcccg

SEQ ID NO: 683083 - DNA, 15 bp, Homo sapiens
cacggtgcttcccgt

SEQ ID NO: 683084 - DNA, 15 bp, Homo sapiens
acggtgcttcccgtt

SEQ ID NO: 683085 - DNA, 15 bp, Homo sapiens
cggtgcttcccgttc

SEQ ID NO: 683086 - DNA, 15 bp, Homo sapiens
ggtgcttcccgttct

SEQ ID NO: 683087 - DNA, 15 bp, Homo sapiens
gtgcttcccgttctt

SEQ ID NO: 683088 - DNA, 15 bp, Homo sapiens
tgcttcccgttctta

SEQ ID NO: 683089 - DNA, 15 bp, Homo sapiens
gcttcccgttcttac

SEQ ID NO: 683090 - DNA, 15 bp, Homo sapiens
cttcccgttcttaca

SEQ ID NO: 683091 - DNA, 15 bp, Homo sapiens
ttcccgttcttacac

SEQ ID NO: 683092 - DNA, 15 bp, Homo sapiens
tcccgttcttacacc

SEQ ID NO: 683093 - DNA, 15 bp, Homo sapiens
cccgttcttacacca

SEQ ID NO: 683094 - DNA, 15 bp, Homo sapiens
ccgttcttacaccac

SEQ ID NO: 683095 - DNA, 15 bp, Homo sapiens
cgttcttacaccact

SEQ ID NO: 683096 - DNA, 15 bp, Homo sapiens
gttcttacaccacta

SEQ ID NO: 683097 - DNA, 15 bp, Homo sapiens
ttcttacaccactac

SEQ ID NO: 683098 - DNA, 15 bp, Homo sapiens
tcttacaccactaca

SEQ ID NO: 683099 - DNA, 15 bp, Homo sapiens
cttacaccactacaa

SEQ ID NO: 683100 - DNA, 15 bp, Homo sapiens
ttacaccactacaat

SEQ ID NO: 683101 - DNA, 15 bp, Homo sapiens
tacaccactacaatc

SEQ ID NO: 683102 - DNA, 15 bp, Homo sapiens
acaccactacaatcc

SEQ ID NO: 683103 - DNA, 15 bp, Homo sapiens
caccactacaatcct

SEQ ID NO: 683104 - DNA, 15 bp, Homo sapiens
accactacaatcctt

SEQ ID NO: 683105 - DNA, 15 bp, Homo sapiens
ccactacaatccttt

SEQ ID NO: 683106 - DNA, 15 bp, Homo sapiens
cactacaatccttta

SEQ ID NO: 683107 - DNA, 15 bp, Homo sapiens
actacaatcctttat

SEQ ID NO: 683108 - DNA, 15 bp, Homo sapiens
ctacaatcctttatt

SEQ ID NO: 683109 - DNA, 15 bp, Homo sapiens
tacaatcctttatta

SEQ ID NO: 683110 - DNA, 15 bp, Homo sapiens
acaatcctttattac

SEQ ID NO: 683111 - DNA, 15 bp, Homo sapiens
caatcctttattaca

SEQ ID NO: 683112 - DNA, 15 bp, Homo sapiens
aatcctttattacac

SEQ ID NO: 683113 - DNA, 15 bp, Homo sapiens
atcctttattacact

SEQ ID NO: 683114 - DNA, 15 bp, Homo sapiens
tcctttattacacta

SEQ ID NO: 683115 - DNA, 15 bp, Homo sapiens
cctttattacactac

SEQ ID NO: 683116 - DNA, 15 bp, Homo sapiens
ctttattacactact

SEQ ID NO: 683117 - DNA, 15 bp, Homo sapiens
tttattacactacta

SEQ ID NO: 683118 - DNA, 15 bp, Homo sapiens
ttattacactactat

SEQ ID NO: 683119 - DNA, 15 bp, Homo sapiens
tattacactactatc

SEQ ID NO: 683120 - DNA, 15 bp, Homo sapiens
attacactactatcc

SEQ ID NO: 683121 - DNA, 15 bp, Homo sapiens
ttacactactatccg

SEQ ID NO: 683122 - DNA, 15 bp, Homo sapiens
tacactactatccgt

SEQ ID NO: 683123 - DNA, 15 bp, Homo sapiens
acactactatccgtt

SEQ ID NO: 683124 - DNA, 15 bp, Homo sapiens
cactactatccgttc

SEQ ID NO: 683125 - DNA, 15 bp, Homo sapiens
actactatccgttca

SEQ ID NO: 683126 - DNA, 15 bp, Homo sapiens
ctactatccgttcat

SEQ ID NO: 683127 - DNA, 15 bp, Homo sapiens
tactatccgttcatt

SEQ ID NO: 683128 - DNA, 15 bp, Homo sapiens
actatccgttcattc

SEQ ID NO: 683129 - DNA, 15 bp, Homo sapiens
ctatccgttcattcc

SEQ ID NO: 683130 - DNA, 15 bp, Homo sapiens
tatccgttcattccc

SEQ ID NO: 683131 - DNA, 15 bp, Homo sapiens
atccgttcattcccc

SEQ ID NO: 683132 - DNA, 15 bp, Homo sapiens
tccgttcattcccca

SEQ ID NO: 683133 - DNA, 15 bp, Homo sapiens
ccgttcattccccac

SEQ ID NO: 683134 - DNA, 15 bp, Homo sapiens
cgttcattccccaca

SEQ ID NO: 683135 - DNA, 15 bp, Homo sapiens
gttcattccccacag

SEQ ID NO: 683136 - DNA, 15 bp, Homo sapiens
ttcattccccacagc

SEQ ID NO: 683137 - DNA, 15 bp, Homo sapiens
tcattccccacagct

SEQ ID NO: 683138 - DNA, 15 bp, Homo sapiens
cattccccacagctc

SEQ ID NO: 683139 - DNA, 15 bp, Homo sapiens
attccccacagctcc

SEQ ID NO: 683140 - DNA, 15 bp, Homo sapiens
ttccccacagctccc

SEQ ID NO: 683141 - DNA, 15 bp, Homo sapiens
tccccacagctccct

SEQ ID NO: 683142 - DNA, 15 bp, Homo sapiens
ccccacagctccctc

SEQ ID NO: 683143 - DNA, 15 bp, Homo sapiens
cccacagctccctcc

SEQ ID NO: 683144 - DNA, 15 bp, Homo sapiens
ccacagctccctccc

SEQ ID NO: 683145 - DNA, 15 bp, Homo sapiens
cacagctccctccct

SEQ ID NO: 683146 - DNA, 15 bp, Homo sapiens
acagctccctccctt

SEQ ID NO: 683147 - DNA, 15 bp, Homo sapiens
cagctccctcccttc

SEQ ID NO: 683148 - DNA, 15 bp, Homo sapiens
agctccctcccttcc

SEQ ID NO: 683149 - DNA, 15 bp, Homo sapiens
gctccctcccttcct

SEQ ID NO: 683150 - DNA, 15 bp, Homo sapiens
ctccctcccttcctt

SEQ ID NO: 683151 - DNA, 15 bp, Homo sapiens
tccctcccttccttt

SEQ ID NO: 683152 - DNA, 15 bp, Homo sapiens
ccctcccttcctttc

SEQ ID NO: 683153 - DNA, 15 bp, Homo sapiens
cctcccttcctttcc

SEQ ID NO: 683154 - DNA, 15 bp, Homo sapiens
ctcccttcctttccc

SEQ ID NO: 683155 - DNA, 15 bp, Homo sapiens
tcccttcctttccct

SEQ ID NO: 683156 - DNA, 15 bp, Homo sapiens
cccttcctttcccta

SEQ ID NO: 683157 - DNA, 15 bp, Homo sapiens
ccttcctttccctaa

SEQ ID NO: 683158 - DNA, 15 bp, Homo sapiens
cttcctttccctaac

SEQ ID NO: 683159 - DNA, 15 bp, Homo sapiens
ttcctttccctaacc

SEQ ID NO: 683160 - DNA, 15 bp, Homo sapiens
tcctttccctaacca

SEQ ID NO: 683161 - DNA, 15 bp, Homo sapiens
cctttccctaaccag

SEQ ID NO: 683162 - DNA, 15 bp, Homo sapiens
ctttccctaaccagt

SEQ ID NO: 683163 - DNA, 15 bp, Homo sapiens
tttccctaaccagtg

SEQ ID NO: 683164 - DNA, 15 bp, Homo sapiens
ttccctaaccagtga

SEQ ID NO: 683165 - DNA, 15 bp, Homo sapiens
tccctaaccagtgat

SEQ ID NO: 683166 - DNA, 15 bp, Homo sapiens
ccctaaccagtgatc

SEQ ID NO: 683167 - DNA, 15 bp, Homo sapiens
cctaaccagtgatcc

SEQ ID NO: 683168 - DNA, 15 bp, Homo sapiens
ctaaccagtgatccc

SEQ ID NO: 683169 - DNA, 15 bp, Homo sapiens
taaccagtgatccca

SEQ ID NO: 683170 - DNA, 15 bp, Homo sapiens
aaccagtgatcccaa

SEQ ID NO: 683171 - DNA, 15 bp, Homo sapiens
accagtgatcccaaa

SEQ ID NO: 683172 - DNA, 15 bp, Homo sapiens
ccagtgatcccaaaa

SEQ ID NO: 683173 - DNA, 15 bp, Homo sapiens
cagtgatcccaaaag

SEQ ID NO: 683174 - DNA, 15 bp, Homo sapiens
agtgatcccaaaagg

SEQ ID NO: 683175 - DNA, 15 bp, Homo sapiens
gtgatcccaaaaggc

SEQ ID NO: 683176 - DNA, 15 bp, Homo sapiens
tgatcccaaaaggcc

SEQ ID NO: 683177 - DNA, 15 bp, Homo sapiens
gatcccaaaaggcca

SEQ ID NO: 683178 - DNA, 15 bp, Homo sapiens
atcccaaaaggccag

SEQ ID NO: 683179 - DNA, 15 bp, Homo sapiens
tcccaaaaggccagc

SEQ ID NO: 683180 - DNA, 15 bp, Homo sapiens
cccaaaaggccagca

SEQ ID NO: 683181 - DNA, 15 bp, Homo sapiens
ccaaaaggccagcaa

SEQ ID NO: 683182 - DNA, 15 bp, Homo sapiens
caaaaggccagcaag

SEQ ID NO: 683183 - DNA, 15 bp, Homo sapiens
aaaaggccagcaagt

SEQ ID NO: 683184 - DNA, 15 bp, Homo sapiens
aaaggccagcaagtg

SEQ ID NO: 683185 - DNA, 15 bp, Homo sapiens
aaggccagcaagtgt

SEQ ID NO: 683186 - DNA, 15 bp, Homo sapiens
aggccagcaagtgtc

SEQ ID NO: 683187 - DNA, 15 bp, Homo sapiens
ggccagcaagtgtct

SEQ ID NO: 683188 - DNA, 15 bp, Homo sapiens
gccagcaagtgtcta

SEQ ID NO: 683189 - DNA, 15 bp, Homo sapiens
ccagcaagtgtctaa

SEQ ID NO: 683190 - DNA, 15 bp, Homo sapiens
cagcaagtgtctaac

SEQ ID NO: 683191 - DNA, 15 bp, Homo sapiens
agcaagtgtctaaca

SEQ ID NO: 683192 - DNA, 15 bp, Homo sapiens
gcaagtgtctaacat

SEQ ID NO: 683193 - DNA, 15 bp, Homo sapiens
caagtgtctaacatt

SEQ ID NO: 683194 - DNA, 15 bp, Homo sapiens
aagtgtctaacattt

SEQ ID NO: 683195 - DNA, 15 bp, Homo sapiens
agtgtctaacatttt

SEQ ID NO: 683196 - DNA, 15 bp, Homo sapiens
gtgtctaacattttc

SEQ ID NO: 683197 - DNA, 15 bp, Homo sapiens
tgtctaacattttct

SEQ ID NO: 683198 - DNA, 15 bp, Homo sapiens
gtctaacattttcta

SEQ ID NO: 683199 - DNA, 15 bp, Homo sapiens
tctaacattttctat

SEQ ID NO: 683200 - DNA, 15 bp, Homo sapiens
ctaacattttctatc

SEQ ID NO: 683201 - DNA, 15 bp, Homo sapiens
taacattttctatct

SEQ ID NO: 683202 - DNA, 15 bp, Homo sapiens
aacattttctatctt

SEQ ID NO: 683203 - DNA, 15 bp, Homo sapiens
acattttctatcttc

SEQ ID NO: 683204 - DNA, 15 bp, Homo sapiens
cattttctatcttct

SEQ ID NO: 683205 - DNA, 15 bp, Homo sapiens
attttctatcttcta

SEQ ID NO: 683206 - DNA, 15 bp, Homo sapiens
ttttctatcttctaa

SEQ ID NO: 683207 - DNA, 15 bp, Homo sapiens
tttctatcttctaag

SEQ ID NO: 683208 - DNA, 15 bp, Homo sapiens
ttctatcttctaagt

SEQ ID NO: 683209 - DNA, 15 bp, Homo sapiens
tctatcttctaagtg

SEQ ID NO: 683210 - DNA, 15 bp, Homo sapiens
ctatcttctaagtga

SEQ ID NO: 683211 - DNA, 15 bp, Homo sapiens
tatcttctaagtgac

SEQ ID NO: 683212 - DNA, 15 bp, Homo sapiens
atcttctaagtgact

SEQ ID NO: 683213 - DNA, 15 bp, Homo sapiens
tcttctaagtgactg

SEQ ID NO: 683214 - DNA, 15 bp, Homo sapiens
cttctaagtgactgg

SEQ ID NO: 683215 - DNA, 15 bp, Homo sapiens
ttctaagtgactggt

SEQ ID NO: 683216 - DNA, 15 bp, Homo sapiens
tctaagtgactggta

SEQ ID NO: 683217 - DNA, 15 bp, Homo sapiens
ctaagtgactggtaa

SEQ ID NO: 683218 - DNA, 15 bp, Homo sapiens
taagtgactggtaaa

SEQ ID NO: 683219 - DNA, 15 bp, Homo sapiens
aagtgactggtaaag

SEQ ID NO: 683220 - DNA, 15 bp, Homo sapiens
agtgactggtaaagt

SEQ ID NO: 683221 - DNA, 15 bp, Homo sapiens
gtgactggtaaagtt

SEQ ID NO: 683222 - DNA, 15 bp, Homo sapiens
tgactggtaaagttc

SEQ ID NO: 683223 - DNA, 15 bp, Homo sapiens
gactggtaaagttcc

SEQ ID NO: 683224 - DNA, 15 bp, Homo sapiens
actggtaaagttccg

SEQ ID NO: 683225 - DNA, 15 bp, Homo sapiens
ctggtaaagttccgc

SEQ ID NO: 683226 - DNA, 15 bp, Homo sapiens
tggtaaagttccgca

SEQ ID NO: 683227 - DNA, 15 bp, Homo sapiens
ggtaaagttccgcac

SEQ ID NO: 683228 - DNA, 15 bp, Homo sapiens
gtaaagttccgcacc

SEQ ID NO: 683229 - DNA, 15 bp, Homo sapiens
taaagttccgcacct

SEQ ID NO: 683230 - DNA, 15 bp, Homo sapiens
aaagttccgcaccta

SEQ ID NO: 683231 - DNA, 15 bp, Homo sapiens
aagttccgcacctat

SEQ ID NO: 683232 - DNA, 15 bp, Homo sapiens
agttccgcacctatc

SEQ ID NO: 683233 - DNA, 15 bp, Homo sapiens
gttccgcacctatca

SEQ ID NO: 683234 - DNA, 15 bp, Homo sapiens
ttccgcacctatcag

SEQ ID NO: 683235 - DNA, 15 bp, Homo sapiens
tccgcacctatcagc

SEQ ID NO: 683236 - DNA, 15 bp, Homo sapiens
ccgcacctatcagcg

SEQ ID NO: 683237 - DNA, 15 bp, Homo sapiens
cgcacctatcagcgc

SEQ ID NO: 683238 - DNA, 15 bp, Homo sapiens
gcacctatcagcgct

SEQ ID NO: 683239 - DNA, 15 bp, Homo sapiens
cacctatcagcgctc

SEQ ID NO: 683240 - DNA, 15 bp, Homo sapiens
acctatcagcgctcc

SEQ ID NO: 683241 - DNA, 15 bp, Homo sapiens
cctatcagcgctcca

SEQ ID NO: 683242 - DNA, 15 bp, Homo sapiens
ctatcagcgctccaa

SEQ ID NO: 683243 - DNA, 15 bp, Homo sapiens
tatcagcgctccaag

SEQ ID NO: 683244 - DNA, 15 bp, Homo sapiens
atcagcgctccaagt

SEQ ID NO: 683245 - DNA, 15 bp, Homo sapiens
tcagcgctccaagtt

SEQ ID NO: 683246 - DNA, 15 bp, Homo sapiens
cagcgctccaagttt

SEQ ID NO: 683247 - DNA, 15 bp, Homo sapiens
agcgctccaagtttg

SEQ ID NO: 683248 - DNA, 15 bp, Homo sapiens
gcgctccaagtttgt

SEQ ID NO: 683249 - DNA, 15 bp, Homo sapiens
cgctccaagtttgtt

SEQ ID NO: 683250 - DNA, 15 bp, Homo sapiens
gctccaagtttgttt

SEQ ID NO: 683251 - DNA, 15 bp, Homo sapiens
ctccaagtttgtttt

SEQ ID NO: 683252 - DNA, 15 bp, Homo sapiens
tccaagtttgttttt

SEQ ID NO: 683253 - DNA, 15 bp, Homo sapiens
ccaagtttgtttttg

SEQ ID NO: 683254 - DNA, 15 bp, Homo sapiens
caagtttgtttttgt

SEQ ID NO: 683255 - DNA, 15 bp, Homo sapiens
aagtttgtttttgtt

SEQ ID NO: 683256 - DNA, 15 bp, Homo sapiens
agtttgtttttgttt

SEQ ID NO: 683257 - DNA, 15 bp, Homo sapiens
gtttgtttttgtttt

SEQ ID NO: 683258 - DNA, 15 bp, Homo sapiens
tttgtttttgttttg

SEQ ID NO: 683259 - DNA, 15 bp, Homo sapiens
ttgtttttgttttgg

SEQ ID NO: 683260 - DNA, 15 bp, Homo sapiens
tgtttttgttttggc

SEQ ID NO: 683261 - DNA, 15 bp, Homo sapiens
gtttttgttttggcc

SEQ ID NO: 683262 - DNA, 15 bp, Homo sapiens
tttttgttttggccg

SEQ ID NO: 683263 - DNA, 15 bp, Homo sapiens
ttttgttttggccga

SEQ ID NO: 683264 - DNA, 15 bp, Homo sapiens
tttgttttggccgac

SEQ ID NO: 683265 - DNA, 15 bp, Homo sapiens
ttgttttggccgact

SEQ ID NO: 683266 - DNA, 15 bp, Homo sapiens
tgttttggccgactt

SEQ ID NO: 683267 - DNA, 15 bp, Homo sapiens
gttttggccgacttt

SEQ ID NO: 683268 - DNA, 15 bp, Homo sapiens
ttttggccgactttg

SEQ ID NO: 683269 - DNA, 15 bp, Homo sapiens
tttggccgactttgc

SEQ ID NO: 683270 - DNA, 15 bp, Homo sapiens
ttggccgactttgca

SEQ ID NO: 683271 - DNA, 15 bp, Homo sapiens
tggccgactttgcaa

SEQ ID NO: 683272 - DNA, 15 bp, Homo sapiens
ggccgactttgcaaa

SEQ ID NO: 683273 - DNA, 15 bp, Homo sapiens
gccgactttgcaaaa

SEQ ID NO: 683274 - DNA, 15 bp, Homo sapiens
ccgactttgcaaaac

SEQ ID NO: 683275 - DNA, 15 bp, Homo sapiens
cgactttgcaaaacg

SEQ ID NO: 683276 - DNA, 15 bp, Homo sapiens
gactttgcaaaacgg

SEQ ID NO: 683277 - DNA, 15 bp, Homo sapiens
actttgcaaaacgga

SEQ ID NO: 683278 - DNA, 15 bp, Homo sapiens
ctttgcaaaacggat

SEQ ID NO: 683279 - DNA, 15 bp, Homo sapiens
tttgcaaaacggatt

SEQ ID NO: 683280 - DNA, 15 bp, Homo sapiens
ttgcaaaacggattg

SEQ ID NO: 683281 - DNA, 15 bp, Homo sapiens
tgcaaaacggattgg

SEQ ID NO: 683282 - DNA, 15 bp, Homo sapiens
gcaaaacggattggg

SEQ ID NO: 683283 - DNA, 15 bp, Homo sapiens
caaaacggattgggc

SEQ ID NO: 683284 - DNA, 15 bp, Homo sapiens
aaaacggattgggcg

SEQ ID NO: 683285 - DNA, 15 bp, Homo sapiens
aaacggattgggcgg

SEQ ID NO: 683286 - DNA, 15 bp, Homo sapiens
aacggattgggcggg

SEQ ID NO: 683287 - DNA, 15 bp, Homo sapiens
acggattgggcggga

SEQ ID NO: 683288 - DNA, 15 bp, Homo sapiens
cggattgggcgggat

SEQ ID NO: 683289 - DNA, 15 bp, Homo sapiens
ggattgggcgggatg

SEQ ID NO: 683290 - DNA, 15 bp, Homo sapiens
gattgggcgggatga

SEQ ID NO: 683291 - DNA, 15 bp, Homo sapiens
attgggcgggatgag

SEQ ID NO: 683292 - DNA, 15 bp, Homo sapiens
ttgggcgggatgaga

SEQ ID NO: 683293 - DNA, 15 bp, Homo sapiens
tgggcgggatgagag

SEQ ID NO: 683294 - DNA, 15 bp, Homo sapiens
gggcgggatgagagg

SEQ ID NO: 683295 - DNA, 15 bp, Homo sapiens
ggcgggatgagaggt

SEQ ID NO: 683296 - DNA, 15 bp, Homo sapiens
gcgggatgagaggtg

SEQ ID NO: 683297 - DNA, 15 bp, Homo sapiens
cgggatgagaggtgg

SEQ ID NO: 683298 - DNA, 15 bp, Homo sapiens
gggatgagaggtggg

SEQ ID NO: 683299 - DNA, 15 bp, Homo sapiens
ggatgagaggtgggg

SEQ ID NO: 683300 - DNA, 15 bp, Homo sapiens
gatgagaggtggggg

SEQ ID NO: 683301 - DNA, 15 bp, Homo sapiens
atgagaggtgggggg

SEQ ID NO: 683302 - DNA, 15 bp, Homo sapiens
tgagaggtggggggc

SEQ ID NO: 683303 - DNA, 15 bp, Homo sapiens
gagaggtggggggcg

SEQ ID NO: 683304 - DNA, 15 bp, Homo sapiens
agaggtggggggcgc

SEQ ID NO: 683305 - DNA, 15 bp, Homo sapiens
gaggtggggggcgcc

SEQ ID NO: 683306 - DNA, 15 bp, Homo sapiens
aggtggggggcgccg

SEQ ID NO: 683307 - DNA, 15 bp, Homo sapiens
ggtggggggcgccgc

SEQ ID NO: 683308 - DNA, 15 bp, Homo sapiens
gtggggggcgccgcc

SEQ ID NO: 683309 - DNA, 15 bp, Homo sapiens
tggggggcgccgccc

SEQ ID NO: 683310 - DNA, 15 bp, Homo sapiens
ggggggcgccgccca

SEQ ID NO: 683311 - DNA, 15 bp, Homo sapiens
gggggcgccgcccaa

SEQ ID NO: 683312 - DNA, 15 bp, Homo sapiens
ggggcgccgcccaag

SEQ ID NO: 683313 - DNA, 15 bp, Homo sapiens
gggcgccgcccaagg

SEQ ID NO: 683314 - DNA, 15 bp, Homo sapiens
ggcgccgcccaagga

SEQ ID NO: 683315 - DNA, 15 bp, Homo sapiens
gcgccgcccaaggag

SEQ ID NO: 683316 - DNA, 15 bp, Homo sapiens
cgccgcccaaggagg

SEQ ID NO: 683317 - DNA, 15 bp, Homo sapiens
gccgcccaaggaggg

SEQ ID NO: 683318 - DNA, 15 bp, Homo sapiens
ccgcccaaggaggga

SEQ ID NO: 683319 - DNA, 15 bp, Homo sapiens
cgcccaaggagggag

SEQ ID NO: 683320 - DNA, 15 bp, Homo sapiens
gcccaaggagggaga

SEQ ID NO: 683321 - DNA, 15 bp, Homo sapiens
cccaaggagggagag

SEQ ID NO: 683322 - DNA, 15 bp, Homo sapiens
ccaaggagggagagt

SEQ ID NO: 683323 - DNA, 15 bp, Homo sapiens
caaggagggagagtg

SEQ ID NO: 683324 - DNA, 15 bp, Homo sapiens
aaggagggagagtgg

SEQ ID NO: 683325 - DNA, 15 bp, Homo sapiens
aggagggagagtggc

SEQ ID NO: 683326 - DNA, 15 bp, Homo sapiens
ggagggagagtggcg

SEQ ID NO: 683327 - DNA, 15 bp, Homo sapiens
gagggagagtggcgc

SEQ ID NO: 683328 - DNA, 15 bp, Homo sapiens
agggagagtggcgct

SEQ ID NO: 683329 - DNA, 15 bp, Homo sapiens
gggagagtggcgctc

SEQ ID NO: 683330 - DNA, 15 bp, Homo sapiens
ggagagtggcgctcc

SEQ ID NO: 683331 - DNA, 15 bp, Homo sapiens
gagagtggcgctccc

SEQ ID NO: 683332 - DNA, 15 bp, Homo sapiens
agagtggcgctcccg

SEQ ID NO: 683333 - DNA, 15 bp, Homo sapiens
gagtggcgctcccgc

SEQ ID NO: 683334 - DNA, 15 bp, Homo sapiens
agtggcgctcccgcc

SEQ ID NO: 683335 - DNA, 15 bp, Homo sapiens
gtggcgctcccgccg

SEQ ID NO: 683336 - DNA, 15 bp, Homo sapiens
tggcgctcccgccga

SEQ ID NO: 683337 - DNA, 15 bp, Homo sapiens
ggcgctcccgccgag

SEQ ID NO: 683338 - DNA, 15 bp, Homo sapiens
gcgctcccgccgagg

SEQ ID NO: 683339 - DNA, 15 bp, Homo sapiens
cgctcccgccgaggg

SEQ ID NO: 683340 - DNA, 15 bp, Homo sapiens
gctcccgccgagggt

SEQ ID NO: 683341 - DNA, 15 bp, Homo sapiens
ctcccgccgagggtg

SEQ ID NO: 683342 - DNA, 15 bp, Homo sapiens
tcccgccgagggtgc

SEQ ID NO: 683343 - DNA, 15 bp, Homo sapiens
cccgccgagggtgca

SEQ ID NO: 683344 - DNA, 15 bp, Homo sapiens
ccgccgagggtgcac

SEQ ID NO: 683345 - DNA, 15 bp, Homo sapiens
cgccgagggtgcact

SEQ ID NO: 683346 - DNA, 15 bp, Homo sapiens
gccgagggtgcacta

SEQ ID NO: 683347 - DNA, 15 bp, Homo sapiens
ccgagggtgcactag

SEQ ID NO: 683348 - DNA, 15 bp, Homo sapiens
cgagggtgcactagc

SEQ ID NO: 683349 - DNA, 15 bp, Homo sapiens
gagggtgcactagcc

SEQ ID NO: 683350 - DNA, 15 bp, Homo sapiens
agggtgcactagcca

SEQ ID NO: 683351 - DNA, 15 bp, Homo sapiens
gggtgcactagccag

SEQ ID NO: 683352 - DNA, 15 bp, Homo sapiens
ggtgcactagccaga

SEQ ID NO: 683353 - DNA, 15 bp, Homo sapiens
gtgcactagccagat

SEQ ID NO: 683354 - DNA, 15 bp, Homo sapiens
tgcactagccagata

SEQ ID NO: 683355 - DNA, 15 bp, Homo sapiens
gcactagccagatat

SEQ ID NO: 683356 - DNA, 15 bp, Homo sapiens
cactagccagatatt

SEQ ID NO: 683357 - DNA, 15 bp, Homo sapiens
actagccagatattc

SEQ ID NO: 683358 - DNA, 15 bp, Homo sapiens
ctagccagatattcc

SEQ ID NO: 683359 - DNA, 15 bp, Homo sapiens
tagccagatattccc

SEQ ID NO: 683360 - DNA, 15 bp, Homo sapiens
agccagatattccct

SEQ ID NO: 683361 - DNA, 15 bp, Homo sapiens
gccagatattccctg

SEQ ID NO: 683362 - DNA, 15 bp, Homo sapiens
ccagatattccctgc

SEQ ID NO: 683363 - DNA, 15 bp, Homo sapiens
cagatattccctgcg

SEQ ID NO: 683364 - DNA, 15 bp, Homo sapiens
agatattccctgcgg

SEQ ID NO: 683365 - DNA, 15 bp, Homo sapiens
gatattccctgcggg

SEQ ID NO: 683366 - DNA, 15 bp, Homo sapiens
atattccctgcgggg

SEQ ID NO: 683367 - DNA, 15 bp, Homo sapiens
tattccctgcggggc

SEQ ID NO: 683368 - DNA, 15 bp, Homo sapiens
attccctgcggggcc

SEQ ID NO: 683369 - DNA, 15 bp, Homo sapiens
ttccctgcggggccc

SEQ ID NO: 683370 - DNA, 15 bp, Homo sapiens
tccctgcggggcccg

SEQ ID NO: 683371 - DNA, 15 bp, Homo sapiens
ccctgcggggcccga

SEQ ID NO: 683372 - DNA, 15 bp, Homo sapiens
cctgcggggcccgag

SEQ ID NO: 683373 - DNA, 15 bp, Homo sapiens
ctgcggggcccgaga

SEQ ID NO: 683374 - DNA, 15 bp, Homo sapiens
tgcggggcccgagag

SEQ ID NO: 683375 - DNA, 15 bp, Homo sapiens
gcggggcccgagagt

SEQ ID NO: 683376 - DNA, 15 bp, Homo sapiens
cggggcccgagagtc

SEQ ID NO: 683377 - DNA, 15 bp, Homo sapiens
ggggcccgagagtct

SEQ ID NO: 683378 - DNA, 15 bp, Homo sapiens
gggcccgagagtctt

SEQ ID NO: 683379 - DNA, 15 bp, Homo sapiens
ggcccgagagtcttc

SEQ ID NO: 683380 - DNA, 15 bp, Homo sapiens
gcccgagagtcttcc

SEQ ID NO: 683381 - DNA, 15 bp, Homo sapiens
cccgagagtcttccc

SEQ ID NO: 683382 - DNA, 15 bp, Homo sapiens
ccgagagtcttccct

SEQ ID NO: 683383 - DNA, 15 bp, Homo sapiens
cgagagtcttcccta

SEQ ID NO: 683384 - DNA, 15 bp, Homo sapiens
gagagtcttccctat

SEQ ID NO: 683385 - DNA, 15 bp, Homo sapiens
agagtcttccctatc

SEQ ID NO: 683386 - DNA, 15 bp, Homo sapiens
gagtcttccctatca

SEQ ID NO: 683387 - DNA, 15 bp, Homo sapiens
agtcttccctatcag

SEQ ID NO: 683388 - DNA, 15 bp, Homo sapiens
gtcttccctatcaga

SEQ ID NO: 683389 - DNA, 15 bp, Homo sapiens
tcttccctatcagac

SEQ ID NO: 683390 - DNA, 15 bp, Homo sapiens
cttccctatcagacc

SEQ ID NO: 683391 - DNA, 15 bp, Homo sapiens
ttccctatcagaccc

SEQ ID NO: 683392 - DNA, 15 bp, Homo sapiens
tccctatcagacccc

SEQ ID NO: 683393 - DNA, 15 bp, Homo sapiens
ccctatcagaccccg

SEQ ID NO: 683394 - DNA, 15 bp, Homo sapiens
cctatcagaccccgg

SEQ ID NO: 683395 - DNA, 15 bp, Homo sapiens
ctatcagaccccggg

SEQ ID NO: 683396 - DNA, 15 bp, Homo sapiens
tatcagaccccggga

SEQ ID NO: 683397 - DNA, 15 bp, Homo sapiens
atcagaccccgggat

SEQ ID NO: 683398 - DNA, 15 bp, Homo sapiens
tcagaccccgggata

SEQ ID NO: 683399 - DNA, 15 bp, Homo sapiens
cagaccccgggatag

SEQ ID NO: 683400 - DNA, 15 bp, Homo sapiens
agaccccgggatagg

SEQ ID NO: 683401 - DNA, 15 bp, Homo sapiens
gaccccgggataggg

SEQ ID NO: 683402 - DNA, 15 bp, Homo sapiens
accccgggataggga

SEQ ID NO: 683403 - DNA, 15 bp, Homo sapiens
ccccgggatagggat

SEQ ID NO: 683404 - DNA, 15 bp, Homo sapiens
cccgggatagggatg

SEQ ID NO: 683405 - DNA, 15 bp, Homo sapiens
ccgggatagggatga

SEQ ID NO: 683406 - DNA, 15 bp, Homo sapiens
cgggatagggatgag

SEQ ID NO: 683407 - DNA, 15 bp, Homo sapiens
gggatagggatgagg

SEQ ID NO: 683408 - DNA, 15 bp, Homo sapiens
ggatagggatgaggc

SEQ ID NO: 683409 - DNA, 15 bp, Homo sapiens
gatagggatgaggcc

SEQ ID NO: 683410 - DNA, 15 bp, Homo sapiens
atagggatgaggccc

SEQ ID NO: 683411 - DNA, 15 bp, Homo sapiens
tagggatgaggccca

SEQ ID NO: 683412 - DNA, 15 bp, Homo sapiens
agggatgaggcccac

SEQ ID NO: 683413 - DNA, 15 bp, Homo sapiens
gggatgaggcccaca

SEQ ID NO: 683414 - DNA, 15 bp, Homo sapiens
ggatgaggcccacag

SEQ ID NO: 683415 - DNA, 15 bp, Homo sapiens
gatgaggcccacagt

SEQ ID NO: 683416 - DNA, 15 bp, Homo sapiens
atgaggcccacagtc

SEQ ID NO: 683417 - DNA, 15 bp, Homo sapiens
tgaggcccacagtca

SEQ ID NO: 683418 - DNA, 15 bp, Homo sapiens
gaggcccacagtcac

SEQ ID NO: 683419 - DNA, 15 bp, Homo sapiens
aggcccacagtcacc

SEQ ID NO: 683420 - DNA, 15 bp, Homo sapiens
ggcccacagtcaccc

SEQ ID NO: 683421 - DNA, 15 bp, Homo sapiens
gcccacagtcaccca

SEQ ID NO: 683422 - DNA, 15 bp, Homo sapiens
cccacagtcacccac

SEQ ID NO: 683423 - DNA, 15 bp, Homo sapiens
ccacagtcacccacc

SEQ ID NO: 683424 - DNA, 15 bp, Homo sapiens
cacagtcacccacca

SEQ ID NO: 683425 - DNA, 15 bp, Homo sapiens
acagtcacccaccag

SEQ ID NO: 683426 - DNA, 15 bp, Homo sapiens
cagtcacccaccaga

SEQ ID NO: 683427 - DNA, 15 bp, Homo sapiens
agtcacccaccagac

SEQ ID NO: 683428 - DNA, 15 bp, Homo sapiens
gtcacccaccagact

SEQ ID NO: 683429 - DNA, 15 bp, Homo sapiens
tcacccaccagactc

SEQ ID NO: 683430 - DNA, 15 bp, Homo sapiens
cacccaccagactct

SEQ ID NO: 683431 - DNA, 15 bp, Homo sapiens
acccaccagactctt

SEQ ID NO: 683432 - DNA, 15 bp, Homo sapiens
cccaccagactcttt

SEQ ID NO: 683433 - DNA, 15 bp, Homo sapiens
ccaccagactctttg

SEQ ID NO: 683434 - DNA, 15 bp, Homo sapiens
caccagactctttgt

SEQ ID NO: 683435 - DNA, 15 bp, Homo sapiens
accagactctttgta

SEQ ID NO: 683436 - DNA, 15 bp, Homo sapiens
ccagactctttgtat

SEQ ID NO: 683437 - DNA, 15 bp, Homo sapiens
cagactctttgtata

SEQ ID NO: 683438 - DNA, 15 bp, Homo sapiens
agactctttgtatag

SEQ ID NO: 683439 - DNA, 15 bp, Homo sapiens
gactctttgtatagc

SEQ ID NO: 683440 - DNA, 15 bp, Homo sapiens
actctttgtatagcc

SEQ ID NO: 683441 - DNA, 15 bp, Homo sapiens
ctctttgtatagccc

SEQ ID NO: 683442 - DNA, 15 bp, Homo sapiens
tctttgtatagcccc

SEQ ID NO: 683443 - DNA, 15 bp, Homo sapiens
ctttgtatagccccg

SEQ ID NO: 683444 - DNA, 15 bp, Homo sapiens
tttgtatagccccgt

SEQ ID NO: 683445 - DNA, 15 bp, Homo sapiens
ttgtatagccccgtt

SEQ ID NO: 683446 - DNA, 15 bp, Homo sapiens
tgtatagccccgtta

SEQ ID NO: 683447 - DNA, 15 bp, Homo sapiens
gtatagccccgttaa

SEQ ID NO: 683448 - DNA, 15 bp, Homo sapiens
tatagccccgttaag

SEQ ID NO: 683449 - DNA, 15 bp, Homo sapiens
atagccccgttaagt

SEQ ID NO: 683450 - DNA, 15 bp, Homo sapiens
tagccccgttaagtg

SEQ ID NO: 683451 - DNA, 15 bp, Homo sapiens
agccccgttaagtgc

SEQ ID NO: 683452 - DNA, 15 bp, Homo sapiens
gccccgttaagtgca

SEQ ID NO: 683453 - DNA, 15 bp, Homo sapiens
ccccgttaagtgcac

SEQ ID NO: 683454 - DNA, 15 bp, Homo sapiens
cccgttaagtgcacc

SEQ ID NO: 683455 - DNA, 15 bp, Homo sapiens
ccgttaagtgcaccc

SEQ ID NO: 683456 - DNA, 15 bp, Homo sapiens
cgttaagtgcacccc

SEQ ID NO: 683457 - DNA, 15 bp, Homo sapiens
gttaagtgcaccccg

SEQ ID NO: 683458 - DNA, 15 bp, Homo sapiens
ttaagtgcaccccgg

SEQ ID NO: 683459 - DNA, 15 bp, Homo sapiens
taagtgcaccccggc

SEQ ID NO: 683460 - DNA, 15 bp, Homo sapiens
aagtgcaccccggcc

SEQ ID NO: 683461 - DNA, 15 bp, Homo sapiens
agtgcaccccggcct

SEQ ID NO: 683462 - DNA, 15 bp, Homo sapiens
gtgcaccccggcctg

SEQ ID NO: 683463 - DNA, 15 bp, Homo sapiens
tgcaccccggcctgg

SEQ ID NO: 683464 - DNA, 15 bp, Homo sapiens
gcaccccggcctgga

SEQ ID NO: 683465 - DNA, 15 bp, Homo sapiens
caccccggcctggag

SEQ ID NO: 683466 - DNA, 15 bp, Homo sapiens
accccggcctggagg

SEQ ID NO: 683467 - DNA, 15 bp, Homo sapiens
ccccggcctggaggg

SEQ ID NO: 683468 - DNA, 15 bp, Homo sapiens
cccggcctggagggg

SEQ ID NO: 683469 - DNA, 15 bp, Homo sapiens
ccggcctggaggggg

SEQ ID NO: 683470 - DNA, 15 bp, Homo sapiens
cggcctggagggggt

SEQ ID NO: 683471 - DNA, 15 bp, Homo sapiens
ggcctggagggggtg

SEQ ID NO: 683472 - DNA, 15 bp, Homo sapiens
gcctggagggggtgg

SEQ ID NO: 683473 - DNA, 15 bp, Homo sapiens
cctggagggggtggt

SEQ ID NO: 683474 - DNA, 15 bp, Homo sapiens
ctggagggggtggtt

SEQ ID NO: 683475 - DNA, 15 bp, Homo sapiens
tggagggggtggttc

SEQ ID NO: 683476 - DNA, 15 bp, Homo sapiens
ggagggggtggttct

SEQ ID NO: 683477 - DNA, 15 bp, Homo sapiens
gagggggtggttctg

SEQ ID NO: 683478 - DNA, 15 bp, Homo sapiens
agggggtggttctgg

SEQ ID NO: 683479 - DNA, 15 bp, Homo sapiens
gggggtggttctggg

SEQ ID NO: 683480 - DNA, 15 bp, Homo sapiens
ggggtggttctgggt

SEQ ID NO: 683481 - DNA, 15 bp, Homo sapiens
gggtggttctgggta

SEQ ID NO: 683482 - DNA, 15 bp, Homo sapiens
ggtggttctgggtag

SEQ ID NO: 683483 - DNA, 15 bp, Homo sapiens
gtggttctgggtaga

SEQ ID NO: 683484 - DNA, 15 bp, Homo sapiens
tggttctgggtagaa

SEQ ID NO: 683485 - DNA, 15 bp, Homo sapiens
ggttctgggtagaag

SEQ ID NO: 683486 - DNA, 15 bp, Homo sapiens
gttctgggtagaagc

SEQ ID NO: 683487 - DNA, 15 bp, Homo sapiens
ttctgggtagaagca

SEQ ID NO: 683488 - DNA, 15 bp, Homo sapiens
tctgggtagaagcac

SEQ ID NO: 683489 - DNA, 15 bp, Homo sapiens
ctgggtagaagcacg

SEQ ID NO: 683490 - DNA, 15 bp, Homo sapiens
tgggtagaagcacgt

SEQ ID NO: 683491 - DNA, 15 bp, Homo sapiens
gggtagaagcacgtc

SEQ ID NO: 683492 - DNA, 15 bp, Homo sapiens
ggtagaagcacgtcc

SEQ ID NO: 683493 - DNA, 15 bp, Homo sapiens
gtagaagcacgtccg

SEQ ID NO: 683494 - DNA, 15 bp, Homo sapiens
tagaagcacgtccgg

SEQ ID NO: 683495 - DNA, 15 bp, Homo sapiens
agaagcacgtccggg

SEQ ID NO: 683496 - DNA, 15 bp, Homo sapiens
gaagcacgtccgggc

SEQ ID NO: 683497 - DNA, 15 bp, Homo sapiens
aagcacgtccgggcc

SEQ ID NO: 683498 - DNA, 15 bp, Homo sapiens
agcacgtccgggccg

SEQ ID NO: 683499 - DNA, 15 bp, Homo sapiens
gcacgtccgggccgc

SEQ ID NO: 683500 - DNA, 15 bp, Homo sapiens
cacgtccgggccgcg

SEQ ID NO: 683501 - DNA, 15 bp, Homo sapiens
acgtccgggccgcgc

SEQ ID NO: 683502 - DNA, 15 bp, Homo sapiens
cgtccgggccgcgcc

SEQ ID NO: 683503 - DNA, 15 bp, Homo sapiens
gtccgggccgcgccg

SEQ ID NO: 683504 - DNA, 15 bp, Homo sapiens
tccgggccgcgccgg

SEQ ID NO: 683505 - DNA, 15 bp, Homo sapiens
ccgggccgcgccgga

SEQ ID NO: 683506 - DNA, 15 bp, Homo sapiens
cgggccgcgccggat

SEQ ID NO: 683507 - DNA, 15 bp, Homo sapiens
gggccgcgccggatg

SEQ ID NO: 683508 - DNA, 15 bp, Homo sapiens
ggccgcgccggatgc

SEQ ID NO: 683509 - DNA, 15 bp, Homo sapiens
gccgcgccggatgcc

SEQ ID NO: 683510 - DNA, 15 bp, Homo sapiens
ccgcgccggatgcct

SEQ ID NO: 683511 - DNA, 15 bp, Homo sapiens
cgcgccggatgcctc

SEQ ID NO: 683512 - DNA, 15 bp, Homo sapiens
gcgccggatgcctcc

SEQ ID NO: 683513 - DNA, 15 bp, Homo sapiens
cgccggatgcctcct

SEQ ID NO: 683514 - DNA, 15 bp, Homo sapiens
gccggatgcctcctg

SEQ ID NO: 683515 - DNA, 15 bp, Homo sapiens
ccggatgcctcctgg

SEQ ID NO: 683516 - DNA, 15 bp, Homo sapiens
cggatgcctcctgga

SEQ ID NO: 683517 - DNA, 15 bp, Homo sapiens
ggatgcctcctggaa

SEQ ID NO: 683518 - DNA, 15 bp, Homo sapiens
gatgcctcctggaag

SEQ ID NO: 683519 - DNA, 15 bp, Homo sapiens
atgcctcctggaagg

SEQ ID NO: 683520 - DNA, 15 bp, Homo sapiens
tgcctcctggaaggc

SEQ ID NO: 683521 - DNA, 15 bp, Homo sapiens
gcctcctggaaggcg

SEQ ID NO: 683522 - DNA, 15 bp, Homo sapiens
cctcctggaaggcgc

SEQ ID NO: 683523 - DNA, 15 bp, Homo sapiens
ctcctggaaggcgcc

SEQ ID NO: 683524 - DNA, 15 bp, Homo sapiens
tcctggaaggcgcct

SEQ ID NO: 683525 - DNA, 15 bp, Homo sapiens
cctggaaggcgcctg

SEQ ID NO: 683526 - DNA, 15 bp, Homo sapiens
ctggaaggcgcctgg

SEQ ID NO: 683527 - DNA, 15 bp, Homo sapiens
tggaaggcgcctgga

SEQ ID NO: 683528 - DNA, 15 bp, Homo sapiens
ggaaggcgcctggac

SEQ ID NO: 683529 - DNA, 15 bp, Homo sapiens
gaaggcgcctggacc

SEQ ID NO: 683530 - DNA, 15 bp, Homo sapiens
aaggcgcctggaccc

SEQ ID NO: 683531 - DNA, 15 bp, Homo sapiens
aggcgcctggaccca

SEQ ID NO: 683532 - DNA, 15 bp, Homo sapiens
ggcgcctggacccac

SEQ ID NO: 683533 - DNA, 15 bp, Homo sapiens
gcgcctggacccacg

SEQ ID NO: 683534 - DNA, 15 bp, Homo sapiens
cgcctggacccacgc

SEQ ID NO: 683535 - DNA, 15 bp, Homo sapiens
gcctggacccacgcc

SEQ ID NO: 683536 - DNA, 15 bp, Homo sapiens
cctggacccacgcca

SEQ ID NO: 683537 - DNA, 15 bp, Homo sapiens
ctggacccacgccag

SEQ ID NO: 683538 - DNA, 15 bp, Homo sapiens
tggacccacgccagg

SEQ ID NO: 683539 - DNA, 15 bp, Homo sapiens
ggacccacgccaggt

SEQ ID NO: 683540 - DNA, 15 bp, Homo sapiens
gacccacgccaggtt

SEQ ID NO: 683541 - DNA, 15 bp, Homo sapiens
acccacgccaggttt

SEQ ID NO: 683542 - DNA, 15 bp, Homo sapiens
cccacgccaggtttc

SEQ ID NO: 683543 - DNA, 15 bp, Homo sapiens
ccacgccaggtttcc

SEQ ID NO: 683544 - DNA, 15 bp, Homo sapiens
cacgccaggtttccc

SEQ ID NO: 683545 - DNA, 15 bp, Homo sapiens
acgccaggtttccca

SEQ ID NO: 683546 - DNA, 15 bp, Homo sapiens
cgccaggtttcccag

SEQ ID NO: 683547 - DNA, 15 bp, Homo sapiens
gccaggtttcccagt

SEQ ID NO: 683548 - DNA, 15 bp, Homo sapiens
ccaggtttcccagtt

SEQ ID NO: 683549 - DNA, 15 bp, Homo sapiens
caggtttcccagttt

SEQ ID NO: 683550 - DNA, 15 bp, Homo sapiens
aggtttcccagttta

SEQ ID NO: 683551 - DNA, 15 bp, Homo sapiens
ggtttcccagtttaa

SEQ ID NO: 683552 - DNA, 15 bp, Homo sapiens
gtttcccagtttaat

SEQ ID NO: 683553 - DNA, 15 bp, Homo sapiens
tttcccagtttaatt

SEQ ID NO: 683554 - DNA, 15 bp, Homo sapiens
ttcccagtttaattc

SEQ ID NO: 683555 - DNA, 15 bp, Homo sapiens
tcccagtttaattcc

SEQ ID NO: 683556 - DNA, 15 bp, Homo sapiens
cccagtttaattcct

SEQ ID NO: 683557 - DNA, 15 bp, Homo sapiens
ccagtttaattcctc

SEQ ID NO: 683558 - DNA, 15 bp, Homo sapiens
cagtttaattcctca

SEQ ID NO: 683559 - DNA, 15 bp, Homo sapiens
agtttaattcctcat

SEQ ID NO: 683560 - DNA, 15 bp, Homo sapiens
gtttaattcctcatg

SEQ ID NO: 683561 - DNA, 15 bp, Homo sapiens
tttaattcctcatga

SEQ ID NO: 683562 - DNA, 15 bp, Homo sapiens
ttaattcctcatgac

SEQ ID NO: 683563 - DNA, 15 bp, Homo sapiens
taattcctcatgact

SEQ ID NO: 683564 - DNA, 15 bp, Homo sapiens
aattcctcatgactt

SEQ ID NO: 683565 - DNA, 15 bp, Homo sapiens
attcctcatgactta

SEQ ID NO: 683566 - DNA, 15 bp, Homo sapiens
ttcctcatgacttag

SEQ ID NO: 683567 - DNA, 15 bp, Homo sapiens
tcctcatgacttagc

SEQ ID NO: 683568 - DNA, 15 bp, Homo sapiens
cctcatgacttagcg

SEQ ID NO: 683569 - DNA, 15 bp, Homo sapiens
ctcatgacttagcgt

SEQ ID NO: 683570 - DNA, 15 bp, Homo sapiens
tcatgacttagcgtc

SEQ ID NO: 683571 - DNA, 15 bp, Homo sapiens
catgacttagcgtcc

SEQ ID NO: 683572 - DNA, 15 bp, Homo sapiens
atgacttagcgtccc

SEQ ID NO: 683573 - DNA, 15 bp, Homo sapiens
tgacttagcgtccca

SEQ ID NO: 683574 - DNA, 15 bp, Homo sapiens
gacttagcgtcccag

SEQ ID NO: 683575 - DNA, 15 bp, Homo sapiens
acttagcgtcccagc

SEQ ID NO: 683576 - DNA, 15 bp, Homo sapiens
cttagcgtcccagcc

SEQ ID NO: 683577 - DNA, 15 bp, Homo sapiens
ttagcgtcccagccc

SEQ ID NO: 683578 - DNA, 15 bp, Homo sapiens
tagcgtcccagcccg

SEQ ID NO: 683579 - DNA, 15 bp, Homo sapiens
agcgtcccagcccgc

SEQ ID NO: 683580 - DNA, 15 bp, Homo sapiens
gcgtcccagcccgcg

SEQ ID NO: 683581 - DNA, 15 bp, Homo sapiens
cgtcccagcccgcgc

SEQ ID NO: 683582 - DNA, 15 bp, Homo sapiens
gtcccagcccgcgca

SEQ ID NO: 683583 - DNA, 15 bp, Homo sapiens
tcccagcccgcgcac

SEQ ID NO: 683584 - DNA, 15 bp, Homo sapiens
cccagcccgcgcacc

SEQ ID NO: 683585 - DNA, 15 bp, Homo sapiens
ccagcccgcgcaccg

SEQ ID NO: 683586 - DNA, 15 bp, Homo sapiens
cagcccgcgcaccga

SEQ ID NO: 683587 - DNA, 15 bp, Homo sapiens
agcccgcgcaccgac

SEQ ID NO: 683588 - DNA, 15 bp, Homo sapiens
gcccgcgcaccgacc

SEQ ID NO: 683589 - DNA, 15 bp, Homo sapiens
cccgcgcaccgacca

SEQ ID NO: 683590 - DNA, 15 bp, Homo sapiens
ccgcgcaccgaccag

SEQ ID NO: 683591 - DNA, 15 bp, Homo sapiens
cgcgcaccgaccagc

SEQ ID NO: 683592 - DNA, 15 bp, Homo sapiens
gcgcaccgaccagcg

SEQ ID NO: 683593 - DNA, 15 bp, Homo sapiens
cgcaccgaccagcgc

SEQ ID NO: 683594 - DNA, 15 bp, Homo sapiens
gcaccgaccagcgcc

SEQ ID NO: 683595 - DNA, 15 bp, Homo sapiens
caccgaccagcgccc

SEQ ID NO: 683596 - DNA, 15 bp, Homo sapiens
accgaccagcgcccc

SEQ ID NO: 683597 - DNA, 15 bp, Homo sapiens
ccgaccagcgcccca

SEQ ID NO: 683598 - DNA, 15 bp, Homo sapiens
cgaccagcgccccag

SEQ ID NO: 683599 - DNA, 15 bp, Homo sapiens
gaccagcgccccagt

SEQ ID NO: 683600 - DNA, 15 bp, Homo sapiens
accagcgccccagtt

SEQ ID NO: 683601 - DNA, 15 bp, Homo sapiens
ccagcgccccagttc

SEQ ID NO: 683602 - DNA, 15 bp, Homo sapiens
cagcgccccagttcc

SEQ ID NO: 683603 - DNA, 15 bp, Homo sapiens
agcgccccagttccc

SEQ ID NO: 683604 - DNA, 15 bp, Homo sapiens
gcgccccagttcccc

SEQ ID NO: 683605 - DNA, 15 bp, Homo sapiens
cgccccagttcccca

SEQ ID NO: 683606 - DNA, 15 bp, Homo sapiens
gccccagttccccac

SEQ ID NO: 683607 - DNA, 15 bp, Homo sapiens
ccccagttccccaca

SEQ ID NO: 683608 - DNA, 15 bp, Homo sapiens
cccagttccccacag

SEQ ID NO: 683609 - DNA, 15 bp, Homo sapiens
ccagttccccacaga

SEQ ID NO: 683610 - DNA, 15 bp, Homo sapiens
cagttccccacagac

SEQ ID NO: 683611 - DNA, 15 bp, Homo sapiens
agttccccacagacg

SEQ ID NO: 683612 - DNA, 15 bp, Homo sapiens
gttccccacagacgc

SEQ ID NO: 683613 - DNA, 15 bp, Homo sapiens
ttccccacagacgcc

SEQ ID NO: 683614 - DNA, 15 bp, Homo sapiens
tccccacagacgccg

SEQ ID NO: 683615 - DNA, 15 bp, Homo sapiens
ccccacagacgccgg

SEQ ID NO: 683616 - DNA, 15 bp, Homo sapiens
cccacagacgccggc

SEQ ID NO: 683617 - DNA, 15 bp, Homo sapiens
ccacagacgccggcg

SEQ ID NO: 683618 - DNA, 15 bp, Homo sapiens
cacagacgccggcgg

SEQ ID NO: 683619 - DNA, 15 bp, Homo sapiens
acagacgccggcggg

SEQ ID NO: 683620 - DNA, 15 bp, Homo sapiens
cagacgccggcgggc

SEQ ID NO: 683621 - DNA, 15 bp, Homo sapiens
agacgccggcgggcc

SEQ ID NO: 683622 - DNA, 15 bp, Homo sapiens
gacgccggcgggccc

SEQ ID NO: 683623 - DNA, 15 bp, Homo sapiens
acgccggcgggcccg

SEQ ID NO: 683624 - DNA, 15 bp, Homo sapiens
cgccggcgggcccgg

SEQ ID NO: 683625 - DNA, 15 bp, Homo sapiens
gccggcgggcccggg

SEQ ID NO: 683626 - DNA, 15 bp, Homo sapiens
ccggcgggcccggga

SEQ ID NO: 683627 - DNA, 15 bp, Homo sapiens
cggcgggcccgggag

SEQ ID NO: 683628 - DNA, 15 bp, Homo sapiens
ggcgggcccgggagc

SEQ ID NO: 683629 - DNA, 15 bp, Homo sapiens
gcgggcccgggagcc

SEQ ID NO: 683630 - DNA, 15 bp, Homo sapiens
cgggcccgggagcct

SEQ ID NO: 683631 - DNA, 15 bp, Homo sapiens
gggcccgggagcctc

SEQ ID NO: 683632 - DNA, 15 bp, Homo sapiens
ggcccgggagcctcg

SEQ ID NO: 683633 - DNA, 15 bp, Homo sapiens
gcccgggagcctcgc

SEQ ID NO: 683634 - DNA, 15 bp, Homo sapiens
cccgggagcctcgcg

SEQ ID NO: 683635 - DNA, 15 bp, Homo sapiens
ccgggagcctcgcgg

SEQ ID NO: 683636 - DNA, 15 bp, Homo sapiens
cgggagcctcgcgga

SEQ ID NO: 683637 - DNA, 15 bp, Homo sapiens
gggagcctcgcggac

SEQ ID NO: 683638 - DNA, 15 bp, Homo sapiens
ggagcctcgcggacg

SEQ ID NO: 683639 - DNA, 15 bp, Homo sapiens
gagcctcgcggacgt

SEQ ID NO: 683640 - DNA, 15 bp, Homo sapiens
agcctcgcggacgtg

SEQ ID NO: 683641 - DNA, 15 bp, Homo sapiens
gcctcgcggacgtga

SEQ ID NO: 683642 - DNA, 15 bp, Homo sapiens
cctcgcggacgtgac

SEQ ID NO: 683643 - DNA, 15 bp, Homo sapiens
ctcgcggacgtgacg

SEQ ID NO: 683644 - DNA, 15 bp, Homo sapiens
tcgcggacgtgacgc

SEQ ID NO: 683645 - DNA, 15 bp, Homo sapiens
cgcggacgtgacgcc

SEQ ID NO: 683646 - DNA, 15 bp, Homo sapiens
gcggacgtgacgccg

SEQ ID NO: 683647 - DNA, 15 bp, Homo sapiens
cggacgtgacgccgc

SEQ ID NO: 683648 - DNA, 15 bp, Homo sapiens
ggacgtgacgccgcg

SEQ ID NO: 683649 - DNA, 15 bp, Homo sapiens
gacgtgacgccgcgg

SEQ ID NO: 683650 - DNA, 15 bp, Homo sapiens
acgtgacgccgcggg

SEQ ID NO: 683651 - DNA, 15 bp, Homo sapiens
cgtgacgccgcgggc

SEQ ID NO: 683652 - DNA, 15 bp, Homo sapiens
gtgacgccgcgggcg

SEQ ID NO: 683653 - DNA, 15 bp, Homo sapiens
tgacgccgcgggcgg

SEQ ID NO: 683654 - DNA, 15 bp, Homo sapiens
gacgccgcgggcgga

SEQ ID NO: 683655 - DNA, 15 bp, Homo sapiens
acgccgcgggcggaa

SEQ ID NO: 683656 - DNA, 15 bp, Homo sapiens
cgccgcgggcggaag

SEQ ID NO: 683657 - DNA, 15 bp, Homo sapiens
gccgcgggcggaagt

SEQ ID NO: 683658 - DNA, 15 bp, Homo sapiens
ccgcgggcggaagtg

SEQ ID NO: 683659 - DNA, 15 bp, Homo sapiens
cgcgggcggaagtga

SEQ ID NO: 683660 - DNA, 15 bp, Homo sapiens
gcgggcggaagtgac

SEQ ID NO: 683661 - DNA, 15 bp, Homo sapiens
cgggcggaagtgacg

SEQ ID NO: 683662 - DNA, 15 bp, Homo sapiens
gggcggaagtgacgt

SEQ ID NO: 683663 - DNA, 15 bp, Homo sapiens
ggcggaagtgacgtt

SEQ ID NO: 683664 - DNA, 15 bp, Homo sapiens
gcggaagtgacgttt

SEQ ID NO: 683665 - DNA, 15 bp, Homo sapiens
cggaagtgacgtttt

SEQ ID NO: 683666 - DNA, 15 bp, Homo sapiens
ggaagtgacgttttc

SEQ ID NO: 683667 - DNA, 15 bp, Homo sapiens
gaagtgacgttttcc

SEQ ID NO: 683668 - DNA, 15 bp, Homo sapiens
aagtgacgttttccc

SEQ ID NO: 683669 - DNA, 15 bp, Homo sapiens
agtgacgttttcccg

SEQ ID NO: 683670 - DNA, 15 bp, Homo sapiens
gtgacgttttcccgc

SEQ ID NO: 683671 - DNA, 15 bp, Homo sapiens
tgacgttttcccgcg

SEQ ID NO: 683672 - DNA, 15 bp, Homo sapiens
gacgttttcccgcgg

SEQ ID NO: 683673 - DNA, 15 bp, Homo sapiens
acgttttcccgcggt

SEQ ID NO: 683674 - DNA, 15 bp, Homo sapiens
cgttttcccgcggtt

SEQ ID NO: 683675 - DNA, 15 bp, Homo sapiens
gttttcccgcggttg

SEQ ID NO: 683676 - DNA, 15 bp, Homo sapiens
ttttcccgcggttgg

SEQ ID NO: 683677 - DNA, 15 bp, Homo sapiens
tttcccgcggttgga

SEQ ID NO: 683678 - DNA, 15 bp, Homo sapiens
ttcccgcggttggac

SEQ ID NO: 683679 - DNA, 15 bp, Homo sapiens
tcccgcggttggacg

SEQ ID NO: 683680 - DNA, 15 bp, Homo sapiens
cccgcggttggacgc

SEQ ID NO: 683681 - DNA, 15 bp, Homo sapiens
ccgcggttggacgcg

SEQ ID NO: 683682 - DNA, 15 bp, Homo sapiens
cgcggttggacgcgg

SEQ ID NO: 683683 - DNA, 15 bp, Homo sapiens
gcggttggacgcggc

SEQ ID NO: 683684 - DNA, 15 bp, Homo sapiens
cggttggacgcggcg

SEQ ID NO: 683685 - DNA, 15 bp, Homo sapiens
ggttggacgcggcgc

SEQ ID NO: 683686 - DNA, 15 bp, Homo sapiens
gttggacgcggcgct

SEQ ID NO: 683687 - DNA, 15 bp, Homo sapiens
ttggacgcggcgctc

SEQ ID NO: 683688 - DNA, 15 bp, Homo sapiens
tggacgcggcgctca

SEQ ID NO: 683689 - DNA, 15 bp, Homo sapiens
ggacgcggcgctcag

SEQ ID NO: 683690 - DNA, 15 bp, Homo sapiens
gacgcggcgctcagt

SEQ ID NO: 683691 - DNA, 15 bp, Homo sapiens
acgcggcgctcagtt

SEQ ID NO: 683692 - DNA, 15 bp, Homo sapiens
cgcggcgctcagttg

SEQ ID NO: 683693 - DNA, 15 bp, Homo sapiens
gcggcgctcagttgc

SEQ ID NO: 683694 - DNA, 15 bp, Homo sapiens
cggcgctcagttgcc

SEQ ID NO: 683695 - DNA, 15 bp, Homo sapiens
ggcgctcagttgccg

SEQ ID NO: 683696 - DNA, 15 bp, Homo sapiens
gcgctcagttgccgg

SEQ ID NO: 683697 - DNA, 15 bp, Homo sapiens
cgctcagttgccggg

SEQ ID NO: 683698 - DNA, 15 bp, Homo sapiens
gctcagttgccgggc

SEQ ID NO: 683699 - DNA, 15 bp, Homo sapiens
ctcagttgccgggcg

SEQ ID NO: 683700 - DNA, 15 bp, Homo sapiens
tcagttgccgggcgg

SEQ ID NO: 683701 - DNA, 15 bp, Homo sapiens
cagttgccgggcggg

SEQ ID NO: 683702 - DNA, 15 bp, Homo sapiens
agttgccgggcgggg

SEQ ID NO: 683703 - DNA, 15 bp, Homo sapiens
gttgccgggcggggg

SEQ ID NO: 683704 - DNA, 15 bp, Homo sapiens
ttgccgggcggggga

SEQ ID NO: 683705 - DNA, 15 bp, Homo sapiens
tgccgggcgggggag

SEQ ID NO: 683706 - DNA, 15 bp, Homo sapiens
gccgggcgggggagg

SEQ ID NO: 683707 - DNA, 15 bp, Homo sapiens
ccgggcgggggaggg

SEQ ID NO: 683708 - DNA, 15 bp, Homo sapiens
cgggcgggggagggc

SEQ ID NO: 683709 - DNA, 15 bp, Homo sapiens
gggcgggggagggcg

SEQ ID NO: 683710 - DNA, 15 bp, Homo sapiens
ggcgggggagggcgc

SEQ ID NO: 683711 - DNA, 15 bp, Homo sapiens
gcgggggagggcgcg

SEQ ID NO: 683712 - DNA, 15 bp, Homo sapiens
cgggggagggcgcgt

SEQ ID NO: 683713 - DNA, 15 bp, Homo sapiens
gggggagggcgcgtc

SEQ ID NO: 683714 - DNA, 15 bp, Homo sapiens
ggggagggcgcgtcc

SEQ ID NO: 683715 - DNA, 15 bp, Homo sapiens
gggagggcgcgtccg

SEQ ID NO: 683716 - DNA, 15 bp, Homo sapiens
ggagggcgcgtccgg

SEQ ID NO: 683717 - DNA, 15 bp, Homo sapiens
gagggcgcgtccggt

SEQ ID NO: 683718 - DNA, 15 bp, Homo sapiens
agggcgcgtccggtt

SEQ ID NO: 683719 - DNA, 15 bp, Homo sapiens
gggcgcgtccggttt

SEQ ID NO: 683720 - DNA, 15 bp, Homo sapiens
ggcgcgtccggtttt

SEQ ID NO: 683721 - DNA, 15 bp, Homo sapiens
gcgcgtccggttttt

SEQ ID NO: 683722 - DNA, 15 bp, Homo sapiens
cgcgtccggtttttc

SEQ ID NO: 683723 - DNA, 15 bp, Homo sapiens
gcgtccggtttttct

SEQ ID NO: 683724 - DNA, 15 bp, Homo sapiens
cgtccggtttttctc

SEQ ID NO: 683725 - DNA, 15 bp, Homo sapiens
gtccggtttttctca

SEQ ID NO: 683726 - DNA, 15 bp, Homo sapiens
tccggtttttctcag

SEQ ID NO: 683727 - DNA, 15 bp, Homo sapiens
ccggtttttctcagg

SEQ ID NO: 683728 - DNA, 15 bp, Homo sapiens
cggtttttctcaggg

SEQ ID NO: 683729 - DNA, 15 bp, Homo sapiens
ggtttttctcagggg

SEQ ID NO: 683730 - DNA, 15 bp, Homo sapiens
gtttttctcagggga

SEQ ID NO: 683731 - DNA, 15 bp, Homo sapiens
tttttctcaggggac

SEQ ID NO: 683732 - DNA, 15 bp, Homo sapiens
ttttctcaggggacg

SEQ ID NO: 683733 - DNA, 15 bp, Homo sapiens
tttctcaggggacgt

SEQ ID NO: 683734 - DNA, 15 bp, Homo sapiens
ttctcaggggacgtt

SEQ ID NO: 683735 - DNA, 15 bp, Homo sapiens
tctcaggggacgttg

SEQ ID NO: 683736 - DNA, 15 bp, Homo sapiens
ctcaggggacgttga

SEQ ID NO: 683737 - DNA, 15 bp, Homo sapiens
tcaggggacgttgaa

SEQ ID NO: 683738 - DNA, 15 bp, Homo sapiens
caggggacgttgaaa

SEQ ID NO: 683739 - DNA, 15 bp, Homo sapiens
aggggacgttgaaat

SEQ ID NO: 683740 - DNA, 15 bp, Homo sapiens
ggggacgttgaaatt

SEQ ID NO: 683741 - DNA, 15 bp, Homo sapiens
gggacgttgaaatta

SEQ ID NO: 683742 - DNA, 15 bp, Homo sapiens
ggacgttgaaattat

SEQ ID NO: 683743 - DNA, 15 bp, Homo sapiens
gacgttgaaattatt

SEQ ID NO: 683744 - DNA, 15 bp, Homo sapiens
acgttgaaattattt

SEQ ID NO: 683745 - DNA, 15 bp, Homo sapiens
cgttgaaattatttt

SEQ ID NO: 683746 - DNA, 15 bp, Homo sapiens
gttgaaattattttt

SEQ ID NO: 683747 - DNA, 15 bp, Homo sapiens
ttgaaattatttttg

SEQ ID NO: 683748 - DNA, 15 bp, Homo sapiens
tgaaattatttttgt

SEQ ID NO: 683749 - DNA, 15 bp, Homo sapiens
gaaattatttttgta

SEQ ID NO: 683750 - DNA, 15 bp, Homo sapiens
aaattatttttgtaa

SEQ ID NO: 683751 - DNA, 15 bp, Homo sapiens
aattatttttgtaac

SEQ ID NO: 683752 - DNA, 15 bp, Homo sapiens
attatttttgtaacg

SEQ ID NO: 683753 - DNA, 15 bp, Homo sapiens
ttatttttgtaacgg

SEQ ID NO: 683754 - DNA, 15 bp, Homo sapiens
tatttttgtaacggg

SEQ ID NO: 683755 - DNA, 15 bp, Homo sapiens
atttttgtaacggga

SEQ ID NO: 683756 - DNA, 15 bp, Homo sapiens
tttttgtaacgggag

SEQ ID NO: 683757 - DNA, 15 bp, Homo sapiens
ttttgtaacgggagt

SEQ ID NO: 683758 - DNA, 15 bp, Homo sapiens
tttgtaacgggagtc

SEQ ID NO: 683759 - DNA, 15 bp, Homo sapiens
ttgtaacgggagtcg

SEQ ID NO: 683760 - DNA, 15 bp, Homo sapiens
tgtaacgggagtcgg

SEQ ID NO: 683761 - DNA, 15 bp, Homo sapiens
gtaacgggagtcggg

SEQ ID NO: 683762 - DNA, 15 bp, Homo sapiens
taacgggagtcggga

SEQ ID NO: 683763 - DNA, 15 bp, Homo sapiens
aacgggagtcgggag

SEQ ID NO: 683764 - DNA, 15 bp, Homo sapiens
acgggagtcgggaga

SEQ ID NO: 683765 - DNA, 15 bp, Homo sapiens
cgggagtcgggagag

SEQ ID NO: 683766 - DNA, 15 bp, Homo sapiens
gggagtcgggagagg

SEQ ID NO: 683767 - DNA, 15 bp, Homo sapiens
ggagtcgggagagga

SEQ ID NO: 683768 - DNA, 15 bp, Homo sapiens
gagtcgggagaggac

SEQ ID NO: 683769 - DNA, 15 bp, Homo sapiens
agtcgggagaggacg

SEQ ID NO: 683770 - DNA, 15 bp, Homo sapiens
gtcgggagaggacgg

SEQ ID NO: 683771 - DNA, 15 bp, Homo sapiens
tcgggagaggacggg

SEQ ID NO: 683772 - DNA, 15 bp, Homo sapiens
cgggagaggacgggg

SEQ ID NO: 683773 - DNA, 15 bp, Homo sapiens
gggagaggacggggc

SEQ ID NO: 683774 - DNA, 15 bp, Homo sapiens
ggagaggacggggcg

SEQ ID NO: 683775 - DNA, 15 bp, Homo sapiens
gagaggacggggcgt

SEQ ID NO: 683776 - DNA, 15 bp, Homo sapiens
agaggacggggcgtg

SEQ ID NO: 683777 - DNA, 15 bp, Homo sapiens
gaggacggggcgtgc

SEQ ID NO: 683778 - DNA, 15 bp, Homo sapiens
aggacggggcgtgcc

SEQ ID NO: 683779 - DNA, 15 bp, Homo sapiens
ggacggggcgtgccc

SEQ ID NO: 683780 - DNA, 15 bp, Homo sapiens
gacggggcgtgcccc

SEQ ID NO: 683781 - DNA, 15 bp, Homo sapiens
acggggcgtgccccg

SEQ ID NO: 683782 - DNA, 15 bp, Homo sapiens
cggggcgtgccccga

SEQ ID NO: 683783 - DNA, 15 bp, Homo sapiens
ggggcgtgccccgac

SEQ ID NO: 683784 - DNA, 15 bp, Homo sapiens
gggcgtgccccgacg

SEQ ID NO: 683785 - DNA, 15 bp, Homo sapiens
ggcgtgccccgacgt

SEQ ID NO: 683786 - DNA, 15 bp, Homo sapiens
gcgtgccccgacgtg

SEQ ID NO: 683787 - DNA, 15 bp, Homo sapiens
cgtgccccgacgtgc

SEQ ID NO: 683788 - DNA, 15 bp, Homo sapiens
gtgccccgacgtgcg

SEQ ID NO: 683789 - DNA, 15 bp, Homo sapiens
tgccccgacgtgcgc

SEQ ID NO: 683790 - DNA, 15 bp, Homo sapiens
gccccgacgtgcgcg

SEQ ID NO: 683791 - DNA, 15 bp, Homo sapiens
ccccgacgtgcgcgc

SEQ ID NO: 683792 - DNA, 15 bp, Homo sapiens
cccgacgtgcgcgcg

SEQ ID NO: 683793 - DNA, 15 bp, Homo sapiens
ccgacgtgcgcgcgc

SEQ ID NO: 683794 - DNA, 15 bp, Homo sapiens
cgacgtgcgcgcgcg

SEQ ID NO: 683795 - DNA, 15 bp, Homo sapiens
gacgtgcgcgcgcgt

SEQ ID NO: 683796 - DNA, 15 bp, Homo sapiens
acgtgcgcgcgcgtc

SEQ ID NO: 683797 - DNA, 15 bp, Homo sapiens
cgtgcgcgcgcgtcg

SEQ ID NO: 683798 - DNA, 15 bp, Homo sapiens
gtgcgcgcgcgtcgt

SEQ ID NO: 683799 - DNA, 15 bp, Homo sapiens
tgcgcgcgcgtcgtc

SEQ ID NO: 683800 - DNA, 15 bp, Homo sapiens
gcgcgcgcgtcgtcc

SEQ ID NO: 683801 - DNA, 15 bp, Homo sapiens
cgcgcgcgtcgtcct

SEQ ID NO: 683802 - DNA, 15 bp, Homo sapiens
gcgcgcgtcgtcctc

SEQ ID NO: 683803 - DNA, 15 bp, Homo sapiens
cgcgcgtcgtcctcc

SEQ ID NO: 683804 - DNA, 15 bp, Homo sapiens
gcgcgtcgtcctccc

SEQ ID NO: 683805 - DNA, 15 bp, Homo sapiens
cgcgtcgtcctcccc

SEQ ID NO: 683806 - DNA, 15 bp, Homo sapiens
gcgtcgtcctccccg

SEQ ID NO: 683807 - DNA, 15 bp, Homo sapiens
cgtcgtcctccccgg

SEQ ID NO: 683808 - DNA, 15 bp, Homo sapiens
gtcgtcctccccggc

SEQ ID NO: 683809 - DNA, 15 bp, Homo sapiens
tcgtcctccccggcg

SEQ ID NO: 683810 - DNA, 15 bp, Homo sapiens
cgtcctccccggcgc

SEQ ID NO: 683811 - DNA, 15 bp, Homo sapiens
gtcctccccggcgct

SEQ ID NO: 683812 - DNA, 15 bp, Homo sapiens
tcctccccggcgctc

SEQ ID NO: 683813 - DNA, 15 bp, Homo sapiens
cctccccggcgctcc

SEQ ID NO: 683814 - DNA, 15 bp, Homo sapiens
ctccccggcgctcct

SEQ ID NO: 683815 - DNA, 15 bp, Homo sapiens
tccccggcgctcctc

SEQ ID NO: 683816 - DNA, 15 bp, Homo sapiens
ccccggcgctcctcc

SEQ ID NO: 683817 - DNA, 15 bp, Homo sapiens
cccggcgctcctcca

SEQ ID NO: 683818 - DNA, 15 bp, Homo sapiens
ccggcgctcctccac

SEQ ID NO: 683819 - DNA, 15 bp, Homo sapiens
cggcgctcctccaca

SEQ ID NO: 683820 - DNA, 15 bp, Homo sapiens
ggcgctcctccacag

SEQ ID NO: 683821 - DNA, 15 bp, Homo sapiens
gcgctcctccacagc

SEQ ID NO: 683822 - DNA, 15 bp, Homo sapiens
cgctcctccacagct

SEQ ID NO: 683823 - DNA, 15 bp, Homo sapiens
gctcctccacagctc

SEQ ID NO: 683824 - DNA, 15 bp, Homo sapiens
ctcctccacagctcg

SEQ ID NO: 683825 - DNA, 15 bp, Homo sapiens
tcctccacagctcgc

SEQ ID NO: 683826 - DNA, 15 bp, Homo sapiens
cctccacagctcgct

SEQ ID NO: 683827 - DNA, 15 bp, Homo sapiens
ctccacagctcgctg

SEQ ID NO: 683828 - DNA, 15 bp, Homo sapiens
tccacagctcgctgg

SEQ ID NO: 683829 - DNA, 15 bp, Homo sapiens
ccacagctcgctggc

SEQ ID NO: 683830 - DNA, 15 bp, Homo sapiens
cacagctcgctggct

SEQ ID NO: 683831 - DNA, 15 bp, Homo sapiens
acagctcgctggctc

SEQ ID NO: 683832 - DNA, 15 bp, Homo sapiens
cagctcgctggctcc

SEQ ID NO: 683833 - DNA, 15 bp, Homo sapiens
agctcgctggctccc

SEQ ID NO: 683834 - DNA, 15 bp, Homo sapiens
gctcgctggctcccg

SEQ ID NO: 683835 - DNA, 15 bp, Homo sapiens
ctcgctggctcccgc

SEQ ID NO: 683836 - DNA, 15 bp, Homo sapiens
tcgctggctcccgcc

SEQ ID NO: 683837 - DNA, 15 bp, Homo sapiens
cgctggctcccgccg

SEQ ID NO: 683838 - DNA, 15 bp, Homo sapiens
gctggctcccgccgc

SEQ ID NO: 683839 - DNA, 15 bp, Homo sapiens
ctggctcccgccgcg

SEQ ID NO: 683840 - DNA, 15 bp, Homo sapiens
tggctcccgccgcgg

SEQ ID NO: 683841 - DNA, 15 bp, Homo sapiens
ggctcccgccgcgga

SEQ ID NO: 683842 - DNA, 15 bp, Homo sapiens
gctcccgccgcggaa

SEQ ID NO: 683843 - DNA, 15 bp, Homo sapiens
ctcccgccgcggaaa

SEQ ID NO: 683844 - DNA, 15 bp, Homo sapiens
tcccgccgcggaaag

SEQ ID NO: 683845 - DNA, 15 bp, Homo sapiens
cccgccgcggaaagg

SEQ ID NO: 683846 - DNA, 15 bp, Homo sapiens
ccgccgcggaaaggc

SEQ ID NO: 683847 - DNA, 15 bp, Homo sapiens
cgccgcggaaaggcg

SEQ ID NO: 683848 - DNA, 15 bp, Homo sapiens
gccgcggaaaggcgt

SEQ ID NO: 683849 - DNA, 15 bp, Homo sapiens
ccgcggaaaggcgtc

SEQ ID NO: 683850 - DNA, 15 bp, Homo sapiens
cgcggaaaggcgtca

SEQ ID NO: 683851 - DNA, 15 bp, Homo sapiens
gcggaaaggcgtcat

SEQ ID NO: 683852 - DNA, 15 bp, Homo sapiens
cggaaaggcgtcatg

SEQ ID NO: 683853 - DNA, 15 bp, Homo sapiens
ggaaaggcgtcatgc

SEQ ID NO: 683854 - DNA, 15 bp, Homo sapiens
gaaaggcgtcatgcc

SEQ ID NO: 683855 - DNA, 15 bp, Homo sapiens
aaaggcgtcatgccg

SEQ ID NO: 683856 - DNA, 15 bp, Homo sapiens
aaggcgtcatgccgc

SEQ ID NO: 683857 - DNA, 15 bp, Homo sapiens
aggcgtcatgccgcc

SEQ ID NO: 683858 - DNA, 15 bp, Homo sapiens
ggcgtcatgccgccc

SEQ ID NO: 683859 - DNA, 15 bp, Homo sapiens
gcgtcatgccgccca

SEQ ID NO: 683860 - DNA, 15 bp, Homo sapiens
cgtcatgccgcccaa

SEQ ID NO: 683861 - DNA, 15 bp, Homo sapiens
gtcatgccgcccaaa

SEQ ID NO: 683862 - DNA, 15 bp, Homo sapiens
tcatgccgcccaaaa

SEQ ID NO: 683863 - DNA, 15 bp, Homo sapiens
catgccgcccaaaac

SEQ ID NO: 683864 - DNA, 15 bp, Homo sapiens
atgccgcccaaaacc

SEQ ID NO: 683865 - DNA, 15 bp, Homo sapiens
tgccgcccaaaaccc

SEQ ID NO: 683866 - DNA, 15 bp, Homo sapiens
gccgcccaaaacccc

SEQ ID NO: 683867 - DNA, 15 bp, Homo sapiens
ccgcccaaaaccccc

SEQ ID NO: 683868 - DNA, 15 bp, Homo sapiens
cgcccaaaacccccc

SEQ ID NO: 683869 - DNA, 15 bp, Homo sapiens
gcccaaaaccccccg

SEQ ID NO: 683870 - DNA, 15 bp, Homo sapiens
cccaaaaccccccga

SEQ ID NO: 683871 - DNA, 15 bp, Homo sapiens
ccaaaaccccccgaa

SEQ ID NO: 683872 - DNA, 15 bp, Homo sapiens
caaaaccccccgaaa

SEQ ID NO: 683873 - DNA, 15 bp, Homo sapiens
aaaaccccccgaaaa

SEQ ID NO: 683874 - DNA, 15 bp, Homo sapiens
aaaccccccgaaaaa

SEQ ID NO: 683875 - DNA, 15 bp, Homo sapiens
aaccccccgaaaaac

SEQ ID NO: 683876 - DNA, 15 bp, Homo sapiens
accccccgaaaaacg

SEQ ID NO: 683877 - DNA, 15 bp, Homo sapiens
ccccccgaaaaacgg

SEQ ID NO: 683878 - DNA, 15 bp, Homo sapiens
cccccgaaaaacggc

SEQ ID NO: 683879 - DNA, 15 bp, Homo sapiens
ccccgaaaaacggcc

SEQ ID NO: 683880 - DNA, 15 bp, Homo sapiens
cccgaaaaacggccg

SEQ ID NO: 683881 - DNA, 15 bp, Homo sapiens
ccgaaaaacggccgc

SEQ ID NO: 683882 - DNA, 15 bp, Homo sapiens
cgaaaaacggccgcc

SEQ ID NO: 683883 - DNA, 15 bp, Homo sapiens
gaaaaacggccgcca

SEQ ID NO: 683884 - DNA, 15 bp, Homo sapiens
aaaaacggccgccac

SEQ ID NO: 683885 - DNA, 15 bp, Homo sapiens
aaaacggccgccacc

SEQ ID NO: 683886 - DNA, 15 bp, Homo sapiens
aaacggccgccaccg

SEQ ID NO: 683887 - DNA, 15 bp, Homo sapiens
aacggccgccaccgc

SEQ ID NO: 683888 - DNA, 15 bp, Homo sapiens
acggccgccaccgcc

SEQ ID NO: 683889 - DNA, 15 bp, Homo sapiens
cggccgccaccgccg

SEQ ID NO: 683890 - DNA, 15 bp, Homo sapiens
ggccgccaccgccgc

SEQ ID NO: 683891 - DNA, 15 bp, Homo sapiens
gccgccaccgccgcc

SEQ ID NO: 683892 - DNA, 15 bp, Homo sapiens
ccgccaccgccgccg

SEQ ID NO: 683893 - DNA, 15 bp, Homo sapiens
cgccaccgccgccgc

SEQ ID NO: 683894 - DNA, 15 bp, Homo sapiens
gccaccgccgccgct

SEQ ID NO: 683895 - DNA, 15 bp, Homo sapiens
ccaccgccgccgctg

SEQ ID NO: 683896 - DNA, 15 bp, Homo sapiens
caccgccgccgctgc

SEQ ID NO: 683897 - DNA, 15 bp, Homo sapiens
accgccgccgctgcc

SEQ ID NO: 683898 - DNA, 15 bp, Homo sapiens
ccgccgccgctgccg

SEQ ID NO: 683899 - DNA, 15 bp, Homo sapiens
cgccgccgctgccgc

SEQ ID NO: 683900 - DNA, 15 bp, Homo sapiens
gccgccgctgccgcc

SEQ ID NO: 683901 - DNA, 15 bp, Homo sapiens
ccgccgctgccgccg

SEQ ID NO: 683902 - DNA, 15 bp, Homo sapiens
cgccgctgccgccgc

SEQ ID NO: 683903 - DNA, 15 bp, Homo sapiens
gccgctgccgccgcg

SEQ ID NO: 683904 - DNA, 15 bp, Homo sapiens
ccgctgccgccgcgg

SEQ ID NO: 683905 - DNA, 15 bp, Homo sapiens
cgctgccgccgcgga

SEQ ID NO: 683906 - DNA, 15 bp, Homo sapiens
gctgccgccgcggaa

SEQ ID NO: 683907 - DNA, 15 bp, Homo sapiens
ctgccgccgcggaac

SEQ ID NO: 683908 - DNA, 15 bp, Homo sapiens
tgccgccgcggaacc

SEQ ID NO: 683909 - DNA, 15 bp, Homo sapiens
gccgccgcggaaccc

SEQ ID NO: 683910 - DNA, 15 bp, Homo sapiens
ccgccgcggaacccc

SEQ ID NO: 683911 - DNA, 15 bp, Homo sapiens
cgccgcggaaccccc

SEQ ID NO: 683912 - DNA, 15 bp, Homo sapiens
gccgcggaacccccg

SEQ ID NO: 683913 - DNA, 15 bp, Homo sapiens
ccgcggaacccccgg

SEQ ID NO: 683914 - DNA, 15 bp, Homo sapiens
cgcggaacccccggc

SEQ ID NO: 683915 - DNA, 15 bp, Homo sapiens
gcggaacccccggca

SEQ ID NO: 683916 - DNA, 15 bp, Homo sapiens
cggaacccccggcac

SEQ ID NO: 683917 - DNA, 15 bp, Homo sapiens
ggaacccccggcacc

SEQ ID NO: 683918 - DNA, 15 bp, Homo sapiens
gaacccccggcaccg

SEQ ID NO: 683919 - DNA, 15 bp, Homo sapiens
aacccccggcaccgc

SEQ ID NO: 683920 - DNA, 15 bp, Homo sapiens
acccccggcaccgcc

SEQ ID NO: 683921 - DNA, 15 bp, Homo sapiens
cccccggcaccgccg

SEQ ID NO: 683922 - DNA, 15 bp, Homo sapiens
ccccggcaccgccgc

SEQ ID NO: 683923 - DNA, 15 bp, Homo sapiens
cccggcaccgccgcc

SEQ ID NO: 683924 - DNA, 15 bp, Homo sapiens
ccggcaccgccgccg

SEQ ID NO: 683925 - DNA, 15 bp, Homo sapiens
cggcaccgccgccgc

SEQ ID NO: 683926 - DNA, 15 bp, Homo sapiens
ggcaccgccgccgcc

SEQ ID NO: 683927 - DNA, 15 bp, Homo sapiens
gcaccgccgccgccg

SEQ ID NO: 683928 - DNA, 15 bp, Homo sapiens
caccgccgccgccgc

SEQ ID NO: 683929 - DNA, 15 bp, Homo sapiens
accgccgccgccgcc

SEQ ID NO: 683930 - DNA, 15 bp, Homo sapiens
ccgccgccgccgccc

SEQ ID NO: 683931 - DNA, 15 bp, Homo sapiens
cgccgccgccgcccc

SEQ ID NO: 683932 - DNA, 15 bp, Homo sapiens
gccgccgccgccccc

SEQ ID NO: 683933 - DNA, 15 bp, Homo sapiens
ccgccgccgccccct

SEQ ID NO: 683934 - DNA, 15 bp, Homo sapiens
cgccgccgccccctc

SEQ ID NO: 683935 - DNA, 15 bp, Homo sapiens
gccgccgccccctcc

SEQ ID NO: 683936 - DNA, 15 bp, Homo sapiens
ccgccgccccctcct

SEQ ID NO: 683937 - DNA, 15 bp, Homo sapiens
cgccgccccctcctg

SEQ ID NO: 683938 - DNA, 15 bp, Homo sapiens
gccgccccctcctga

SEQ ID NO: 683939 - DNA, 15 bp, Homo sapiens
ccgccccctcctgag

SEQ ID NO: 683940 - DNA, 15 bp, Homo sapiens
cgccccctcctgagg

SEQ ID NO: 683941 - DNA, 15 bp, Homo sapiens
gccccctcctgagga

SEQ ID NO: 683942 - DNA, 15 bp, Homo sapiens
ccccctcctgaggag

SEQ ID NO: 683943 - DNA, 15 bp, Homo sapiens
cccctcctgaggagg

SEQ ID NO: 683944 - DNA, 15 bp, Homo sapiens
ccctcctgaggagga

SEQ ID NO: 683945 - DNA, 15 bp, Homo sapiens
cctcctgaggaggac

SEQ ID NO: 683946 - DNA, 15 bp, Homo sapiens
ctcctgaggaggacc

SEQ ID NO: 683947 - DNA, 15 bp, Homo sapiens
tcctgaggaggaccc

SEQ ID NO: 683948 - DNA, 15 bp, Homo sapiens
cctgaggaggaccca

SEQ ID NO: 683949 - DNA, 15 bp, Homo sapiens
ctgaggaggacccag

SEQ ID NO: 683950 - DNA, 15 bp, Homo sapiens
tgaggaggacccaga

SEQ ID NO: 683951 - DNA, 15 bp, Homo sapiens
gaggaggacccagag

SEQ ID NO: 683952 - DNA, 15 bp, Homo sapiens
aggaggacccagagc

SEQ ID NO: 683953 - DNA, 15 bp, Homo sapiens
ggaggacccagagca

SEQ ID NO: 683954 - DNA, 15 bp, Homo sapiens
gaggacccagagcag

SEQ ID NO: 683955 - DNA, 15 bp, Homo sapiens
aggacccagagcagg

SEQ ID NO: 683956 - DNA, 15 bp, Homo sapiens
ggacccagagcagga

SEQ ID NO: 683957 - DNA, 15 bp, Homo sapiens
gacccagagcaggac

SEQ ID NO: 683958 - DNA, 15 bp, Homo sapiens
acccagagcaggaca

SEQ ID NO: 683959 - DNA, 15 bp, Homo sapiens
cccagagcaggacag

SEQ ID NO: 683960 - DNA, 15 bp, Homo sapiens
ccagagcaggacagc

SEQ ID NO: 683961 - DNA, 15 bp, Homo sapiens
cagagcaggacagcg

SEQ ID NO: 683962 - DNA, 15 bp, Homo sapiens
agagcaggacagcgg

SEQ ID NO: 683963 - DNA, 15 bp, Homo sapiens
gagcaggacagcggc

SEQ ID NO: 683964 - DNA, 15 bp, Homo sapiens
agcaggacagcggcc

SEQ ID NO: 683965 - DNA, 15 bp, Homo sapiens
gcaggacagcggccc

SEQ ID NO: 683966 - DNA, 15 bp, Homo sapiens
caggacagcggcccg

SEQ ID NO: 683967 - DNA, 15 bp, Homo sapiens
aggacagcggcccgg

SEQ ID NO: 683968 - DNA, 15 bp, Homo sapiens
ggacagcggcccgga

SEQ ID NO: 683969 - DNA, 15 bp, Homo sapiens
gacagcggcccggag

SEQ ID NO: 683970 - DNA, 15 bp, Homo sapiens
acagcggcccggagg

SEQ ID NO: 683971 - DNA, 15 bp, Homo sapiens
cagcggcccggagga

SEQ ID NO: 683972 - DNA, 15 bp, Homo sapiens
agcggcccggaggac

SEQ ID NO: 683973 - DNA, 15 bp, Homo sapiens
gcggcccggaggacc

SEQ ID NO: 683974 - DNA, 15 bp, Homo sapiens
cggcccggaggacct

SEQ ID NO: 683975 - DNA, 15 bp, Homo sapiens
ggcccggaggacctg

SEQ ID NO: 683976 - DNA, 15 bp, Homo sapiens
gcccggaggacctgc

SEQ ID NO: 683977 - DNA, 15 bp, Homo sapiens
cccggaggacctgcc

SEQ ID NO: 683978 - DNA, 15 bp, Homo sapiens
ccggaggacctgcct

SEQ ID NO: 683979 - DNA, 15 bp, Homo sapiens
cggaggacctgcctc

SEQ ID NO: 683980 - DNA, 15 bp, Homo sapiens
ggaggacctgcctct

SEQ ID NO: 683981 - DNA, 15 bp, Homo sapiens
gaggacctgcctctc

SEQ ID NO: 683982 - DNA, 15 bp, Homo sapiens
aggacctgcctctcg

SEQ ID NO: 683983 - DNA, 15 bp, Homo sapiens
ggacctgcctctcgt

SEQ ID NO: 683984 - DNA, 15 bp, Homo sapiens
gacctgcctctcgtc

SEQ ID NO: 683985 - DNA, 15 bp, Homo sapiens
acctgcctctcgtca

SEQ ID NO: 683986 - DNA, 15 bp, Homo sapiens
cctgcctctcgtcag

SEQ ID NO: 683987 - DNA, 15 bp, Homo sapiens
ctgcctctcgtcagg

SEQ ID NO: 683988 - DNA, 15 bp, Homo sapiens
tgcctctcgtcaggt

SEQ ID NO: 683989 - DNA, 15 bp, Homo sapiens
gcctctcgtcaggtg

SEQ ID NO: 683990 - DNA, 15 bp, Homo sapiens
cctctcgtcaggtga

SEQ ID NO: 683991 - DNA, 15 bp, Homo sapiens
ctctcgtcaggtgag

SEQ ID NO: 683992 - DNA, 15 bp, Homo sapiens
tctcgtcaggtgagc

SEQ ID NO: 683993 - DNA, 15 bp, Homo sapiens
ctcgtcaggtgagcg

SEQ ID NO: 683994 - DNA, 15 bp, Homo sapiens
tcgtcaggtgagcga

SEQ ID NO: 683995 - DNA, 15 bp, Homo sapiens
cgtcaggtgagcgag

SEQ ID NO: 683996 - DNA, 15 bp, Homo sapiens
gtcaggtgagcgagc

SEQ ID NO: 683997 - DNA, 15 bp, Homo sapiens
tcaggtgagcgagca

SEQ ID NO: 683998 - DNA, 15 bp, Homo sapiens
caggtgagcgagcag

SEQ ID NO: 683999 - DNA, 15 bp, Homo sapiens
aggtgagcgagcaga

SEQ ID NO: 684000 - DNA, 15 bp, Homo sapiens
ggtgagcgagcagag

SEQ ID NO: 684001 - DNA, 15 bp, Homo sapiens
gtgagcgagcagagc

SEQ ID NO: 684002 - DNA, 15 bp, Homo sapiens
tgagcgagcagagcc

SEQ ID NO: 684003 - DNA, 15 bp, Homo sapiens
gagcgagcagagccg

SEQ ID NO: 684004 - DNA, 15 bp, Homo sapiens
agcgagcagagccgc

SEQ ID NO: 684005 - DNA, 15 bp, Homo sapiens
gcgagcagagccgcc

SEQ ID NO: 684006 - DNA, 15 bp, Homo sapiens
cgagcagagccgccg

SEQ ID NO: 684007 - DNA, 15 bp, Homo sapiens
gagcagagccgccgt

SEQ ID NO: 684008 - DNA, 15 bp, Homo sapiens
agcagagccgccgtc

SEQ ID NO: 684009 - DNA, 15 bp, Homo sapiens
gcagagccgccgtcg

SEQ ID NO: 684010 - DNA, 15 bp, Homo sapiens
cagagccgccgtcgc

SEQ ID NO: 684011 - DNA, 15 bp, Homo sapiens
agagccgccgtcgcc

SEQ ID NO: 684012 - DNA, 15 bp, Homo sapiens
gagccgccgtcgcct

SEQ ID NO: 684013 - DNA, 15 bp, Homo sapiens
agccgccgtcgcctc

SEQ ID NO: 684014 - DNA, 15 bp, Homo sapiens
gccgccgtcgcctca

SEQ ID NO: 684015 - DNA, 15 bp, Homo sapiens
ccgccgtcgcctcac

SEQ ID NO: 684016 - DNA, 15 bp, Homo sapiens
cgccgtcgcctcacg

SEQ ID NO: 684017 - DNA, 15 bp, Homo sapiens
gccgtcgcctcacgc

SEQ ID NO: 684018 - DNA, 15 bp, Homo sapiens
ccgtcgcctcacgcg

SEQ ID NO: 684019 - DNA, 15 bp, Homo sapiens
cgtcgcctcacgcgg

SEQ ID NO: 684020 - DNA, 15 bp, Homo sapiens
gtcgcctcacgcggg

SEQ ID NO: 684021 - DNA, 15 bp, Homo sapiens
tcgcctcacgcggga

SEQ ID NO: 684022 - DNA, 15 bp, Homo sapiens
cgcctcacgcgggaa

SEQ ID NO: 684023 - DNA, 15 bp, Homo sapiens
gcctcacgcgggaag

SEQ ID NO: 684024 - DNA, 15 bp, Homo sapiens
cctcacgcgggaagg

SEQ ID NO: 684025 - DNA, 15 bp, Homo sapiens
ctcacgcgggaaggg

SEQ ID NO: 684026 - DNA, 15 bp, Homo sapiens
tcacgcgggaagggc

SEQ ID NO: 684027 - DNA, 15 bp, Homo sapiens
cacgcgggaagggcg

SEQ ID NO: 684028 - DNA, 15 bp, Homo sapiens
acgcgggaagggcgc

SEQ ID NO: 684029 - DNA, 15 bp, Homo sapiens
cgcgggaagggcgcc

SEQ ID NO: 684030 - DNA, 15 bp, Homo sapiens
gcgggaagggcgccc

SEQ ID NO: 684031 - DNA, 15 bp, Homo sapiens
cgggaagggcgcccc

SEQ ID NO: 684032 - DNA, 15 bp, Homo sapiens
gggaagggcgccccg

SEQ ID NO: 684033 - DNA, 15 bp, Homo sapiens
ggaagggcgccccgg

SEQ ID NO: 684034 - DNA, 15 bp, Homo sapiens
gaagggcgccccggg

SEQ ID NO: 684035 - DNA, 15 bp, Homo sapiens
aagggcgccccgggt

SEQ ID NO: 684036 - DNA, 15 bp, Homo sapiens
agggcgccccgggtg

SEQ ID NO: 684037 - DNA, 15 bp, Homo sapiens
gggcgccccgggtgt

SEQ ID NO: 684038 - DNA, 15 bp, Homo sapiens
ggcgccccgggtgtg

SEQ ID NO: 684039 - DNA, 15 bp, Homo sapiens
gcgccccgggtgtgc

SEQ ID NO: 684040 - DNA, 15 bp, Homo sapiens
cgccccgggtgtgcg

SEQ ID NO: 684041 - DNA, 15 bp, Homo sapiens
gccccgggtgtgcgt

SEQ ID NO: 684042 - DNA, 15 bp, Homo sapiens
ccccgggtgtgcgta

SEQ ID NO: 684043 - DNA, 15 bp, Homo sapiens
cccgggtgtgcgtag

SEQ ID NO: 684044 - DNA, 15 bp, Homo sapiens
ccgggtgtgcgtagg

SEQ ID NO: 684045 - DNA, 15 bp, Homo sapiens
cgggtgtgcgtaggg

SEQ ID NO: 684046 - DNA, 15 bp, Homo sapiens
gggtgtgcgtagggc

SEQ ID NO: 684047 - DNA, 15 bp, Homo sapiens
ggtgtgcgtagggcg

SEQ ID NO: 684048 - DNA, 15 bp, Homo sapiens
gtgtgcgtagggcgg

SEQ ID NO: 684049 - DNA, 15 bp, Homo sapiens
tgtgcgtagggcggg

SEQ ID NO: 684050 - DNA, 15 bp, Homo sapiens
gtgcgtagggcgggc

SEQ ID NO: 684051 - DNA, 15 bp, Homo sapiens
tgcgtagggcgggcg

SEQ ID NO: 684052 - DNA, 15 bp, Homo sapiens
gcgtagggcgggcgc

SEQ ID NO: 684053 - DNA, 15 bp, Homo sapiens
cgtagggcgggcgcc

SEQ ID NO: 684054 - DNA, 15 bp, Homo sapiens
gtagggcgggcgcca

SEQ ID NO: 684055 - DNA, 15 bp, Homo sapiens
tagggcgggcgccaa

SEQ ID NO: 684056 - DNA, 15 bp, Homo sapiens
agggcgggcgccaag

SEQ ID NO: 684057 - DNA, 15 bp, Homo sapiens
gggcgggcgccaagg

SEQ ID NO: 684058 - DNA, 15 bp, Homo sapiens
ggcgggcgccaaggc

SEQ ID NO: 684059 - DNA, 15 bp, Homo sapiens
gcgggcgccaaggcg

SEQ ID NO: 684060 - DNA, 15 bp, Homo sapiens
cgggcgccaaggcgg

SEQ ID NO: 684061 - DNA, 15 bp, Homo sapiens
gggcgccaaggcggc

SEQ ID NO: 684062 - DNA, 15 bp, Homo sapiens
ggcgccaaggcggct

SEQ ID NO: 684063 - DNA, 15 bp, Homo sapiens
gcgccaaggcggctc

SEQ ID NO: 684064 - DNA, 15 bp, Homo sapiens
cgccaaggcggctcg

SEQ ID NO: 684065 - DNA, 15 bp, Homo sapiens
gccaaggcggctcgg

SEQ ID NO: 684066 - DNA, 15 bp, Homo sapiens
ccaaggcggctcggc

SEQ ID NO: 684067 - DNA, 15 bp, Homo sapiens
caaggcggctcggcg

SEQ ID NO: 684068 - DNA, 15 bp, Homo sapiens
aaggcggctcggcgg

SEQ ID NO: 684069 - DNA, 15 bp, Homo sapiens
aggcggctcggcggg

SEQ ID NO: 684070 - DNA, 15 bp, Homo sapiens
ggcggctcggcgggg

SEQ ID NO: 684071 - DNA, 15 bp, Homo sapiens
gcggctcggcgggga

SEQ ID NO: 684072 - DNA, 15 bp, Homo sapiens
cggctcggcggggat

SEQ ID NO: 684073 - DNA, 15 bp, Homo sapiens
ggctcggcggggatc

SEQ ID NO: 684074 - DNA, 15 bp, Homo sapiens
gctcggcggggatcc

SEQ ID NO: 684075 - DNA, 15 bp, Homo sapiens
ctcggcggggatccg

SEQ ID NO: 684076 - DNA, 15 bp, Homo sapiens
tcggcggggatccgt

SEQ ID NO: 684077 - DNA, 15 bp, Homo sapiens
cggcggggatccgtc

SEQ ID NO: 684078 - DNA, 15 bp, Homo sapiens
ggcggggatccgtcc

SEQ ID NO: 684079 - DNA, 15 bp, Homo sapiens
gcggggatccgtcct

SEQ ID NO: 684080 - DNA, 15 bp, Homo sapiens
cggggatccgtcctc

SEQ ID NO: 684081 - DNA, 15 bp, Homo sapiens
ggggatccgtcctcg

SEQ ID NO: 684082 - DNA, 15 bp, Homo sapiens
gggatccgtcctcgc

SEQ ID NO: 684083 - DNA, 15 bp, Homo sapiens
ggatccgtcctcgcc

SEQ ID NO: 684084 - DNA, 15 bp, Homo sapiens
gatccgtcctcgcca

SEQ ID NO: 684085 - DNA, 15 bp, Homo sapiens
atccgtcctcgccag

SEQ ID NO: 684086 - DNA, 15 bp, Homo sapiens
tccgtcctcgccagg

SEQ ID NO: 684087 - DNA, 15 bp, Homo sapiens
ccgtcctcgccaggg

SEQ ID NO: 684088 - DNA, 15 bp, Homo sapiens
cgtcctcgccagggg

SEQ ID NO: 684089 - DNA, 15 bp, Homo sapiens
gtcctcgccaggggc

SEQ ID NO: 684090 - DNA, 15 bp, Homo sapiens
tcctcgccaggggcc

SEQ ID NO: 684091 - DNA, 15 bp, Homo sapiens
cctcgccaggggccg

SEQ ID NO: 684092 - DNA, 15 bp, Homo sapiens
ctcgccaggggccgg

SEQ ID NO: 684093 - DNA, 15 bp, Homo sapiens
tcgccaggggccggg

SEQ ID NO: 684094 - DNA, 15 bp, Homo sapiens
cgccaggggccgggt

SEQ ID NO: 684095 - DNA, 15 bp, Homo sapiens
gccaggggccgggtc

SEQ ID NO: 684096 - DNA, 15 bp, Homo sapiens
ccaggggccgggtcc

SEQ ID NO: 684097 - DNA, 15 bp, Homo sapiens
caggggccgggtccc

SEQ ID NO: 684098 - DNA, 15 bp, Homo sapiens
aggggccgggtcccg

SEQ ID NO: 684099 - DNA, 15 bp, Homo sapiens
ggggccgggtcccgg

SEQ ID NO: 684100 - DNA, 15 bp, Homo sapiens
gggccgggtcccggc

SEQ ID NO: 684101 - DNA, 15 bp, Homo sapiens
ggccgggtcccggcg

SEQ ID NO: 684102 - DNA, 15 bp, Homo sapiens
gccgggtcccggcgg

SEQ ID NO: 684103 - DNA, 15 bp, Homo sapiens
ccgggtcccggcggg

SEQ ID NO: 684104 - DNA, 15 bp, Homo sapiens
cgggtcccggcggga

SEQ ID NO: 684105 - DNA, 15 bp, Homo sapiens
gggtcccggcgggag

SEQ ID NO: 684106 - DNA, 15 bp, Homo sapiens
ggtcccggcgggagg

SEQ ID NO: 684107 - DNA, 15 bp, Homo sapiens
gtcccggcgggagga

SEQ ID NO: 684108 - DNA, 15 bp, Homo sapiens
tcccggcgggaggag

SEQ ID NO: 684109 - DNA, 15 bp, Homo sapiens
cccggcgggaggagg

SEQ ID NO: 684110 - DNA, 15 bp, Homo sapiens
ccggcgggaggaggc

SEQ ID NO: 684111 - DNA, 15 bp, Homo sapiens
cggcgggaggaggcg

SEQ ID NO: 684112 - DNA, 15 bp, Homo sapiens
ggcgggaggaggcgc

SEQ ID NO: 684113 - DNA, 15 bp, Homo sapiens
gcgggaggaggcgcc

SEQ ID NO: 684114 - DNA, 15 bp, Homo sapiens
cgggaggaggcgccc

SEQ ID NO: 684115 - DNA, 15 bp, Homo sapiens
gggaggaggcgccct

SEQ ID NO: 684116 - DNA, 15 bp, Homo sapiens
ggaggaggcgccctc

SEQ ID NO: 684117 - DNA, 15 bp, Homo sapiens
gaggaggcgccctcc

SEQ ID NO: 684118 - DNA, 15 bp, Homo sapiens
aggaggcgccctccc

SEQ ID NO: 684119 - DNA, 15 bp, Homo sapiens
ggaggcgccctccct

SEQ ID NO: 684120 - DNA, 15 bp, Homo sapiens
gaggcgccctccctg

SEQ ID NO: 684121 - DNA, 15 bp, Homo sapiens
aggcgccctccctgc

SEQ ID NO: 684122 - DNA, 15 bp, Homo sapiens
ggcgccctccctgcc

SEQ ID NO: 684123 - DNA, 15 bp, Homo sapiens
attctactctgtctc

SEQ ID NO: 684124 - DNA, 15 bp, Homo sapiens
ttctactctgtctcc

SEQ ID NO: 684125 - DNA, 15 bp, Homo sapiens
tctactctgtctcca

SEQ ID NO: 684126 - DNA, 15 bp, Homo sapiens
ctactctgtctccat

SEQ ID NO: 684127 - DNA, 15 bp, Homo sapiens
tactctgtctccatg

SEQ ID NO: 684128 - DNA, 15 bp, Homo sapiens
actctgtctccatga

SEQ ID NO: 684129 - DNA, 15 bp, Homo sapiens
ctctgtctccatgag

SEQ ID NO: 684130 - DNA, 15 bp, Homo sapiens
tctgtctccatgagt

SEQ ID NO: 684131 - DNA, 15 bp, Homo sapiens
ctgtctccatgagtt

SEQ ID NO: 684132 - DNA, 15 bp, Homo sapiens
tgtctccatgagttc

SEQ ID NO: 684133 - DNA, 15 bp, Homo sapiens
gtctccatgagttca

SEQ ID NO: 684134 - DNA, 15 bp, Homo sapiens
tctccatgagttcaa

SEQ ID NO: 684135 - DNA, 15 bp, Homo sapiens
ctccatgagttcaat

SEQ ID NO: 684136 - DNA, 15 bp, Homo sapiens
tccatgagttcaata

SEQ ID NO: 684137 - DNA, 15 bp, Homo sapiens
ccatgagttcaatat

SEQ ID NO: 684138 - DNA, 15 bp, Homo sapiens
catgagttcaatatt

SEQ ID NO: 684139 - DNA, 15 bp, Homo sapiens
atgagttcaatattt

SEQ ID NO: 684140 - DNA, 15 bp, Homo sapiens
tgagttcaatatttt

SEQ ID NO: 684141 - DNA, 15 bp, Homo sapiens
gagttcaatattttt

SEQ ID NO: 684142 - DNA, 15 bp, Homo sapiens
agttcaatatttttt

SEQ ID NO: 684143 - DNA, 15 bp, Homo sapiens
gttcaatattttttt

SEQ ID NO: 684144 - DNA, 15 bp, Homo sapiens
ttcaatatttttttt

SEQ ID NO: 684145 - DNA, 15 bp, Homo sapiens
tcaatattttttttt

SEQ ID NO: 684146 - DNA, 15 bp, Homo sapiens
caatatttttttttt

SEQ ID NO: 684147 - DNA, 15 bp, Homo sapiens
aatattttttttttt

SEQ ID NO: 684148 - DNA, 15 bp, Homo sapiens
atatttttttttttt

SEQ ID NO: 684149 - DNA, 15 bp, Homo sapiens
tattttttttttttt

SEQ ID NO: 684150 - DNA, 15 bp, Homo sapiens
tttttttttttttta

SEQ ID NO: 684151 - DNA, 15 bp, Homo sapiens
tttttttttttttaa

SEQ ID NO: 684152 - DNA, 15 bp, Homo sapiens
ttttttttttttaag

SEQ ID NO: 684153 - DNA, 15 bp, Homo sapiens
tttttttttttaagc

SEQ ID NO: 684154 - DNA, 15 bp, Homo sapiens
ttttttttttaagct

SEQ ID NO: 684155 - DNA, 15 bp, Homo sapiens
tttttttttaagctc

SEQ ID NO: 684156 - DNA, 15 bp, Homo sapiens
ttttttttaagctct

SEQ ID NO: 684157 - DNA, 15 bp, Homo sapiens
tttttttaagctctt

SEQ ID NO: 684158 - DNA, 15 bp, Homo sapiens
ttttttaagctcttg

SEQ ID NO: 684159 - DNA, 15 bp, Homo sapiens
tttttaagctcttgc

SEQ ID NO: 684160 - DNA, 15 bp, Homo sapiens
ttttaagctcttgct

SEQ ID NO: 684161 - DNA, 15 bp, Homo sapiens
tttaagctcttgctt

SEQ ID NO: 684162 - DNA, 15 bp, Homo sapiens
ttaagctcttgcttg

SEQ ID NO: 684163 - DNA, 15 bp, Homo sapiens
taagctcttgcttgt

SEQ ID NO: 684164 - DNA, 15 bp, Homo sapiens
aagctcttgcttgta

SEQ ID NO: 684165 - DNA, 15 bp, Homo sapiens
agctcttgcttgtaa

SEQ ID NO: 684166 - DNA, 15 bp, Homo sapiens
gctcttgcttgtaag

SEQ ID NO: 684167 - DNA, 15 bp, Homo sapiens
ctcttgcttgtaagt

SEQ ID NO: 684168 - DNA, 15 bp, Homo sapiens
tcttgcttgtaagtg

SEQ ID NO: 684169 - DNA, 15 bp, Homo sapiens
cttgcttgtaagtga

SEQ ID NO: 684170 - DNA, 15 bp, Homo sapiens
ttgcttgtaagtgag

SEQ ID NO: 684171 - DNA, 15 bp, Homo sapiens
tgcttgtaagtgaga

SEQ ID NO: 684172 - DNA, 15 bp, Homo sapiens
gcttgtaagtgagaa

SEQ ID NO: 684173 - DNA, 15 bp, Homo sapiens
cttgtaagtgagaac

SEQ ID NO: 684174 - DNA, 15 bp, Homo sapiens
ttgtaagtgagaaca

SEQ ID NO: 684175 - DNA, 15 bp, Homo sapiens
tgtaagtgagaacat

SEQ ID NO: 684176 - DNA, 15 bp, Homo sapiens
gtaagtgagaacatg

SEQ ID NO: 684177 - DNA, 15 bp, Homo sapiens
taagtgagaacatgt

SEQ ID NO: 684178 - DNA, 15 bp, Homo sapiens
aagtgagaacatgta

SEQ ID NO: 684179 - DNA, 15 bp, Homo sapiens
agtgagaacatgtac

SEQ ID NO: 684180 - DNA, 15 bp, Homo sapiens
gtgagaacatgtact

SEQ ID NO: 684181 - DNA, 15 bp, Homo sapiens
tgagaacatgtactt

SEQ ID NO: 684182 - DNA, 15 bp, Homo sapiens
gagaacatgtacttg

SEQ ID NO: 684183 - DNA, 15 bp, Homo sapiens
agaacatgtacttgt

SEQ ID NO: 684184 - DNA, 15 bp, Homo sapiens
gaacatgtacttgtc

SEQ ID NO: 684185 - DNA, 15 bp, Homo sapiens
aacatgtacttgtcc

SEQ ID NO: 684186 - DNA, 15 bp, Homo sapiens
acatgtacttgtcct

SEQ ID NO: 684187 - DNA, 15 bp, Homo sapiens
catgtacttgtcctt

SEQ ID NO: 684188 - DNA, 15 bp, Homo sapiens
atgtacttgtccttc

SEQ ID NO: 684189 - DNA, 15 bp, Homo sapiens
tgtacttgtccttct

SEQ ID NO: 684190 - DNA, 15 bp, Homo sapiens
gtacttgtccttctg

SEQ ID NO: 684191 - DNA, 15 bp, Homo sapiens
tacttgtccttctgt

SEQ ID NO: 684192 - DNA, 15 bp, Homo sapiens
acttgtccttctgtg

SEQ ID NO: 684193 - DNA, 15 bp, Homo sapiens
cttgtccttctgtgc

SEQ ID NO: 684194 - DNA, 15 bp, Homo sapiens
ttgtccttctgtgcc

SEQ ID NO: 684195 - DNA, 15 bp, Homo sapiens
tgtccttctgtgcct

SEQ ID NO: 684196 - DNA, 15 bp, Homo sapiens
gtccttctgtgcctg

SEQ ID NO: 684197 - DNA, 15 bp, Homo sapiens
tccttctgtgcctgg

SEQ ID NO: 684198 - DNA, 15 bp, Homo sapiens
ccttctgtgcctggc

SEQ ID NO: 684199 - DNA, 15 bp, Homo sapiens
cttctgtgcctggct

SEQ ID NO: 684200 - DNA, 15 bp, Homo sapiens
ttctgtgcctggctt

SEQ ID NO: 684201 - DNA, 15 bp, Homo sapiens
tctgtgcctggctta

SEQ ID NO: 684202 - DNA, 15 bp, Homo sapiens
ctgtgcctggcttat

SEQ ID NO: 684203 - DNA, 15 bp, Homo sapiens
tgtgcctggcttatt

SEQ ID NO: 684204 - DNA, 15 bp, Homo sapiens
gtgcctggcttattt

SEQ ID NO: 684205 - DNA, 15 bp, Homo sapiens
tgcctggcttatttc

SEQ ID NO: 684206 - DNA, 15 bp, Homo sapiens
gcctggcttatttca

SEQ ID NO: 684207 - DNA, 15 bp, Homo sapiens
cctggcttatttcac

SEQ ID NO: 684208 - DNA, 15 bp, Homo sapiens
ctggcttatttcact

SEQ ID NO: 684209 - DNA, 15 bp, Homo sapiens
tggcttatttcactt

SEQ ID NO: 684210 - DNA, 15 bp, Homo sapiens
ggcttatttcactta

SEQ ID NO: 684211 - DNA, 15 bp, Homo sapiens
gcttatttcacttaa

SEQ ID NO: 684212 - DNA, 15 bp, Homo sapiens
cttatttcacttaac

SEQ ID NO: 684213 - DNA, 15 bp, Homo sapiens
ttatttcacttaaca

SEQ ID NO: 684214 - DNA, 15 bp, Homo sapiens
tatttcacttaacat

SEQ ID NO: 684215 - DNA, 15 bp, Homo sapiens
atttcacttaacatg

SEQ ID NO: 684216 - DNA, 15 bp, Homo sapiens
tttcacttaacatga

SEQ ID NO: 684217 - DNA, 15 bp, Homo sapiens
ttcacttaacatgat

SEQ ID NO: 684218 - DNA, 15 bp, Homo sapiens
tcacttaacatgatg

SEQ ID NO: 684219 - DNA, 15 bp, Homo sapiens
cacttaacatgatgt

SEQ ID NO: 684220 - DNA, 15 bp, Homo sapiens
acttaacatgatgtt

SEQ ID NO: 684221 - DNA, 15 bp, Homo sapiens
cttaacatgatgttc

SEQ ID NO: 684222 - DNA, 15 bp, Homo sapiens
ttaacatgatgttct

SEQ ID NO: 684223 - DNA, 15 bp, Homo sapiens
taacatgatgttctc

SEQ ID NO: 684224 - DNA, 15 bp, Homo sapiens
aacatgatgttctct

SEQ ID NO: 684225 - DNA, 15 bp, Homo sapiens
acatgatgttctctg

SEQ ID NO: 684226 - DNA, 15 bp, Homo sapiens
catgatgttctctgg

SEQ ID NO: 684227 - DNA, 15 bp, Homo sapiens
atgatgttctctggt

SEQ ID NO: 684228 - DNA, 15 bp, Homo sapiens
tgatgttctctggtt

SEQ ID NO: 684229 - DNA, 15 bp, Homo sapiens
gatgttctctggttc

SEQ ID NO: 684230 - DNA, 15 bp, Homo sapiens
atgttctctggttcc

SEQ ID NO: 684231 - DNA, 15 bp, Homo sapiens
tgttctctggttcca

SEQ ID NO: 684232 - DNA, 15 bp, Homo sapiens
gttctctggttccaa

SEQ ID NO: 684233 - DNA, 15 bp, Homo sapiens
ttctctggttccaaa

SEQ ID NO: 684234 - DNA, 15 bp, Homo sapiens
tctctggttccaaat

SEQ ID NO: 684235 - DNA, 15 bp, Homo sapiens
ctctggttccaaatg

SEQ ID NO: 684236 - DNA, 15 bp, Homo sapiens
tctggttccaaatga

SEQ ID NO: 684237 - DNA, 15 bp, Homo sapiens
ctggttccaaatgac

SEQ ID NO: 684238 - DNA, 15 bp, Homo sapiens
tggttccaaatgaca

SEQ ID NO: 684239 - DNA, 15 bp, Homo sapiens
ggttccaaatgacag

SEQ ID NO: 684240 - DNA, 15 bp, Homo sapiens
gttccaaatgacagg

SEQ ID NO: 684241 - DNA, 15 bp, Homo sapiens
ttccaaatgacagga

SEQ ID NO: 684242 - DNA, 15 bp, Homo sapiens
tccaaatgacaggat

SEQ ID NO: 684243 - DNA, 15 bp, Homo sapiens
ccaaatgacaggatt

SEQ ID NO: 684244 - DNA, 15 bp, Homo sapiens
caaatgacaggattt

SEQ ID NO: 684245 - DNA, 15 bp, Homo sapiens
aaatgacaggatttc

SEQ ID NO: 684246 - DNA, 15 bp, Homo sapiens
aatgacaggatttca

SEQ ID NO: 684247 - DNA, 15 bp, Homo sapiens
atgacaggatttcat

SEQ ID NO: 684248 - DNA, 15 bp, Homo sapiens
tgacaggatttcatt

SEQ ID NO: 684249 - DNA, 15 bp, Homo sapiens
gacaggatttcattc

SEQ ID NO: 684250 - DNA, 15 bp, Homo sapiens
acaggatttcattct

SEQ ID NO: 684251 - DNA, 15 bp, Homo sapiens
caggatttcattctg

SEQ ID NO: 684252 - DNA, 15 bp, Homo sapiens
aggatttcattctgt

SEQ ID NO: 684253 - DNA, 15 bp, Homo sapiens
ggatttcattctgtt

SEQ ID NO: 684254 - DNA, 15 bp, Homo sapiens
gatttcattctgttt

SEQ ID NO: 684255 - DNA, 15 bp, Homo sapiens
atttcattctgtttt

SEQ ID NO: 684256 - DNA, 15 bp, Homo sapiens
tttcattctgtttta

SEQ ID NO: 684257 - DNA, 15 bp, Homo sapiens
ttcattctgttttat

SEQ ID NO: 684258 - DNA, 15 bp, Homo sapiens
tcattctgttttatg

SEQ ID NO: 684259 - DNA, 15 bp, Homo sapiens
cattctgttttatgg

SEQ ID NO: 684260 - DNA, 15 bp, Homo sapiens
attctgttttatggc

SEQ ID NO: 684261 - DNA, 15 bp, Homo sapiens
ttctgttttatggct

SEQ ID NO: 684262 - DNA, 15 bp, Homo sapiens
tctgttttatggctg

SEQ ID NO: 684263 - DNA, 15 bp, Homo sapiens
ctgttttatggctga

SEQ ID NO: 684264 - DNA, 15 bp, Homo sapiens
tgttttatggctgaa

SEQ ID NO: 684265 - DNA, 15 bp, Homo sapiens
gttttatggctgaat

SEQ ID NO: 684266 - DNA, 15 bp, Homo sapiens
ttatggctgaataac

SEQ ID NO: 684267 - DNA, 15 bp, Homo sapiens
tatggctgaataaca

SEQ ID NO: 684268 - DNA, 15 bp, Homo sapiens
atggctgaataacat

SEQ ID NO: 684269 - DNA, 15 bp, Homo sapiens
tggctgaataacatt

SEQ ID NO: 684270 - DNA, 15 bp, Homo sapiens
ggctgaataacattc

SEQ ID NO: 684271 - DNA, 15 bp, Homo sapiens
gctgaataacattcc

SEQ ID NO: 684272 - DNA, 15 bp, Homo sapiens
ctgaataacattcca

SEQ ID NO: 684273 - DNA, 15 bp, Homo sapiens
tgaataacattccat

SEQ ID NO: 684274 - DNA, 15 bp, Homo sapiens
gaataacattccatt

SEQ ID NO: 684275 - DNA, 15 bp, Homo sapiens
aataacattccattg

SEQ ID NO: 684276 - DNA, 15 bp, Homo sapiens
ataacattccattgt

SEQ ID NO: 684277 - DNA, 15 bp, Homo sapiens
taacattccattgtt

SEQ ID NO: 684278 - DNA, 15 bp, Homo sapiens
aacattccattgttt

SEQ ID NO: 684279 - DNA, 15 bp, Homo sapiens
acattccattgttta

SEQ ID NO: 684280 - DNA, 15 bp, Homo sapiens
cattccattgtttat

SEQ ID NO: 684281 - DNA, 15 bp, Homo sapiens
tccattgtttatatg

SEQ ID NO: 684282 - DNA, 15 bp, Homo sapiens
ccattgtttatatgt

SEQ ID NO: 684283 - DNA, 15 bp, Homo sapiens
cattgtttatatgta

SEQ ID NO: 684284 - DNA, 15 bp, Homo sapiens
attgtttatatgtac

SEQ ID NO: 684285 - DNA, 15 bp, Homo sapiens
ttgtttatatgtacc

SEQ ID NO: 684286 - DNA, 15 bp, Homo sapiens
tgtttatatgtacca

SEQ ID NO: 684287 - DNA, 15 bp, Homo sapiens
gtttatatgtaccac

SEQ ID NO: 684288 - DNA, 15 bp, Homo sapiens
tttatatgtaccaca

SEQ ID NO: 684289 - DNA, 15 bp, Homo sapiens
ttatatgtaccacat

SEQ ID NO: 684290 - DNA, 15 bp, Homo sapiens
tatatgtaccacatt

SEQ ID NO: 684291 - DNA, 15 bp, Homo sapiens
atatgtaccacattt

SEQ ID NO: 684292 - DNA, 15 bp, Homo sapiens
tatgtaccacatttt

SEQ ID NO: 684293 - DNA, 15 bp, Homo sapiens
atgtaccacattttc

SEQ ID NO: 684294 - DNA, 15 bp, Homo sapiens
tgtaccacattttct

SEQ ID NO: 684295 - DNA, 15 bp, Homo sapiens
gtaccacattttctt

SEQ ID NO: 684296 - DNA, 15 bp, Homo sapiens
taccacattttcttt

SEQ ID NO: 684297 - DNA, 15 bp, Homo sapiens
accacattttcttta

SEQ ID NO: 684298 - DNA, 15 bp, Homo sapiens
ccacattttctttat

SEQ ID NO: 684299 - DNA, 15 bp, Homo sapiens
cacattttctttatc

SEQ ID NO: 684300 - DNA, 15 bp, Homo sapiens
acattttctttatcc

SEQ ID NO: 684301 - DNA, 15 bp, Homo sapiens
cattttctttatcca

SEQ ID NO: 684302 - DNA, 15 bp, Homo sapiens
attttctttatccat

SEQ ID NO: 684303 - DNA, 15 bp, Homo sapiens
ttttctttatccatg

SEQ ID NO: 684304 - DNA, 15 bp, Homo sapiens
tttctttatccatgc

SEQ ID NO: 684305 - DNA, 15 bp, Homo sapiens
ttctttatccatgca

SEQ ID NO: 684306 - DNA, 15 bp, Homo sapiens
tctttatccatgcat

SEQ ID NO: 684307 - DNA, 15 bp, Homo sapiens
ctttatccatgcatc

SEQ ID NO: 684308 - DNA, 15 bp, Homo sapiens
tttatccatgcatcc

SEQ ID NO: 684309 - DNA, 15 bp, Homo sapiens
ttatccatgcatcca

SEQ ID NO: 684310 - DNA, 15 bp, Homo sapiens
tatccatgcatccat

SEQ ID NO: 684311 - DNA, 15 bp, Homo sapiens
atccatgcatccatt

SEQ ID NO: 684312 - DNA, 15 bp, Homo sapiens
tccatgcatccatta

SEQ ID NO: 684313 - DNA, 15 bp, Homo sapiens
ccatgcatccattaa

SEQ ID NO: 684314 - DNA, 15 bp, Homo sapiens
catgcatccattaat

SEQ ID NO: 684315 - DNA, 15 bp, Homo sapiens
atgcatccattaatg

SEQ ID NO: 684316 - DNA, 15 bp, Homo sapiens
tgcatccattaatgg

SEQ ID NO: 684317 - DNA, 15 bp, Homo sapiens
gcatccattaatggg

SEQ ID NO: 684318 - DNA, 15 bp, Homo sapiens
catccattaatgggc

SEQ ID NO: 684319 - DNA, 15 bp, Homo sapiens
atccattaatgggca

SEQ ID NO: 684320 - DNA, 15 bp, Homo sapiens
tccattaatgggcat

SEQ ID NO: 684321 - DNA, 15 bp, Homo sapiens
ccattaatgggcatt

SEQ ID NO: 684322 - DNA, 15 bp, Homo sapiens
cattaatgggcattc

SEQ ID NO: 684323 - DNA, 15 bp, Homo sapiens
attaatgggcattca

SEQ ID NO: 684324 - DNA, 15 bp, Homo sapiens
ttaatgggcattcag

SEQ ID NO: 684325 - DNA, 15 bp, Homo sapiens
taatgggcattcagg

SEQ ID NO: 684326 - DNA, 15 bp, Homo sapiens
aatgggcattcaggt

SEQ ID NO: 684327 - DNA, 15 bp, Homo sapiens
atgggcattcaggtt

SEQ ID NO: 684328 - DNA, 15 bp, Homo sapiens
tgggcattcaggtta

SEQ ID NO: 684329 - DNA, 15 bp, Homo sapiens
gggcattcaggttaa

SEQ ID NO: 684330 - DNA, 15 bp, Homo sapiens
ggcattcaggttaat

SEQ ID NO: 684331 - DNA, 15 bp, Homo sapiens
gcattcaggttaatt

SEQ ID NO: 684332 - DNA, 15 bp, Homo sapiens
cattcaggttaattc

SEQ ID NO: 684333 - DNA, 15 bp, Homo sapiens
attcaggttaattcc

SEQ ID NO: 684334 - DNA, 15 bp, Homo sapiens
ttcaggttaattcca

SEQ ID NO: 684335 - DNA, 15 bp, Homo sapiens
tcaggttaattccat

SEQ ID NO: 684336 - DNA, 15 bp, Homo sapiens
caggttaattccatg

SEQ ID NO: 684337 - DNA, 15 bp, Homo sapiens
aggttaattccatgt

SEQ ID NO: 684338 - DNA, 15 bp, Homo sapiens
ggttaattccatgtc

SEQ ID NO: 684339 - DNA, 15 bp, Homo sapiens
gttaattccatgtct

SEQ ID NO: 684340 - DNA, 15 bp, Homo sapiens
ttaattccatgtctt

SEQ ID NO: 684341 - DNA, 15 bp, Homo sapiens
taattccatgtcttg

SEQ ID NO: 684342 - DNA, 15 bp, Homo sapiens
aattccatgtcttgg

SEQ ID NO: 684343 - DNA, 15 bp, Homo sapiens
attccatgtcttggc

SEQ ID NO: 684344 - DNA, 15 bp, Homo sapiens
ttccatgtcttggct

SEQ ID NO: 684345 - DNA, 15 bp, Homo sapiens
tccatgtcttggctg

SEQ ID NO: 684346 - DNA, 15 bp, Homo sapiens
ccatgtcttggctgt

SEQ ID NO: 684347 - DNA, 15 bp, Homo sapiens
catgtcttggctgtt

SEQ ID NO: 684348 - DNA, 15 bp, Homo sapiens
atgtcttggctgttg

SEQ ID NO: 684349 - DNA, 15 bp, Homo sapiens
tgtcttggctgttgg

SEQ ID NO: 684350 - DNA, 15 bp, Homo sapiens
gtcttggctgttggg

SEQ ID NO: 684351 - DNA, 15 bp, Homo sapiens
tcttggctgttggga

SEQ ID NO: 684352 - DNA, 15 bp, Homo sapiens
cttggctgttgggaa

SEQ ID NO: 684353 - DNA, 15 bp, Homo sapiens
ttggctgttgggaaa

SEQ ID NO: 684354 - DNA, 15 bp, Homo sapiens
tggctgttgggaaaa

SEQ ID NO: 684355 - DNA, 15 bp, Homo sapiens
ggctgttgggaaaaa

SEQ ID NO: 684356 - DNA, 15 bp, Homo sapiens
gctgttgggaaaaat

SEQ ID NO: 684357 - DNA, 15 bp, Homo sapiens
ctgttgggaaaaatg

SEQ ID NO: 684358 - DNA, 15 bp, Homo sapiens
tgttgggaaaaatgc

SEQ ID NO: 684359 - DNA, 15 bp, Homo sapiens
gttgggaaaaatgca

SEQ ID NO: 684360 - DNA, 15 bp, Homo sapiens
ttgggaaaaatgcag

SEQ ID NO: 684361 - DNA, 15 bp, Homo sapiens
tgggaaaaatgcagc

SEQ ID NO: 684362 - DNA, 15 bp, Homo sapiens
gggaaaaatgcagca

SEQ ID NO: 684363 - DNA, 15 bp, Homo sapiens
ggaaaaatgcagcat

SEQ ID NO: 684364 - DNA, 15 bp, Homo sapiens
gaaaaatgcagcatt

SEQ ID NO: 684365 - DNA, 15 bp, Homo sapiens
aaaaatgcagcattc

SEQ ID NO: 684366 - DNA, 15 bp, Homo sapiens
aaaatgcagcattca

SEQ ID NO: 684367 - DNA, 15 bp, Homo sapiens
aaatgcagcattcaa

SEQ ID NO: 684368 - DNA, 15 bp, Homo sapiens
aatgcagcattcaac

SEQ ID NO: 684369 - DNA, 15 bp, Homo sapiens
atgcagcattcaaca

SEQ ID NO: 684370 - DNA, 15 bp, Homo sapiens
tgcagcattcaacat

SEQ ID NO: 684371 - DNA, 15 bp, Homo sapiens
gcagcattcaacatg

SEQ ID NO: 684372 - DNA, 15 bp, Homo sapiens
cagcattcaacatgg

SEQ ID NO: 684373 - DNA, 15 bp, Homo sapiens
agcattcaacatggg

SEQ ID NO: 684374 - DNA, 15 bp, Homo sapiens
gcattcaacatggga

SEQ ID NO: 684375 - DNA, 15 bp, Homo sapiens
cattcaacatgggaa

SEQ ID NO: 684376 - DNA, 15 bp, Homo sapiens
attcaacatgggaat

SEQ ID NO: 684377 - DNA, 15 bp, Homo sapiens
ttcaacatgggaatg

SEQ ID NO: 684378 - DNA, 15 bp, Homo sapiens
tcaacatgggaatgc

SEQ ID NO: 684379 - DNA, 15 bp, Homo sapiens
caacatgggaatgca

SEQ ID NO: 684380 - DNA, 15 bp, Homo sapiens
aacatgggaatgcag

SEQ ID NO: 684381 - DNA, 15 bp, Homo sapiens
acatgggaatgcaga

SEQ ID NO: 684382 - DNA, 15 bp, Homo sapiens
catgggaatgcagat

SEQ ID NO: 684383 - DNA, 15 bp, Homo sapiens
atgggaatgcagata

SEQ ID NO: 684384 - DNA, 15 bp, Homo sapiens
tgggaatgcagatat

SEQ ID NO: 684385 - DNA, 15 bp, Homo sapiens
gggaatgcagatatc

SEQ ID NO: 684386 - DNA, 15 bp, Homo sapiens
ggaatgcagatatct

SEQ ID NO: 684387 - DNA, 15 bp, Homo sapiens
gaatgcagatatctc

SEQ ID NO: 684388 - DNA, 15 bp, Homo sapiens
aatgcagatatctct

SEQ ID NO: 684389 - DNA, 15 bp, Homo sapiens
atgcagatatctctt

SEQ ID NO: 684390 - DNA, 15 bp, Homo sapiens
tgcagatatctcttt

SEQ ID NO: 684391 - DNA, 15 bp, Homo sapiens
gcagatatctctttg

SEQ ID NO: 684392 - DNA, 15 bp, Homo sapiens
cagatatctctttga

SEQ ID NO: 684393 - DNA, 15 bp, Homo sapiens
agatatctctttgat

SEQ ID NO: 684394 - DNA, 15 bp, Homo sapiens
gatatctctttgata

SEQ ID NO: 684395 - DNA, 15 bp, Homo sapiens
atatctctttgatat

SEQ ID NO: 684396 - DNA, 15 bp, Homo sapiens
tatctctttgatata

SEQ ID NO: 684397 - DNA, 15 bp, Homo sapiens
atctctttgatatac

SEQ ID NO: 684398 - DNA, 15 bp, Homo sapiens
tctctttgatatact

SEQ ID NO: 684399 - DNA, 15 bp, Homo sapiens
ctctttgatatactg

SEQ ID NO: 684400 - DNA, 15 bp, Homo sapiens
tctttgatatactgt

SEQ ID NO: 684401 - DNA, 15 bp, Homo sapiens
ctttgatatactgtt

SEQ ID NO: 684402 - DNA, 15 bp, Homo sapiens
tttgatatactgttt

SEQ ID NO: 684403 - DNA, 15 bp, Homo sapiens
ttgatatactgtttt

SEQ ID NO: 684404 - DNA, 15 bp, Homo sapiens
tgatatactgttttt

SEQ ID NO: 684405 - DNA, 15 bp, Homo sapiens
gatatactgttttta

SEQ ID NO: 684406 - DNA, 15 bp, Homo sapiens
atatactgtttttat

SEQ ID NO: 684407 - DNA, 15 bp, Homo sapiens
tatactgtttttatt

SEQ ID NO: 684408 - DNA, 15 bp, Homo sapiens
atactgtttttattt

SEQ ID NO: 684409 - DNA, 15 bp, Homo sapiens
tactgtttttatttc

SEQ ID NO: 684410 - DNA, 15 bp, Homo sapiens
actgtttttatttct

SEQ ID NO: 684411 - DNA, 15 bp, Homo sapiens
ctgtttttatttctt

SEQ ID NO: 684412 - DNA, 15 bp, Homo sapiens
tgtttttatttcttt

SEQ ID NO: 684413 - DNA, 15 bp, Homo sapiens
gtttttatttctttt

SEQ ID NO: 684414 - DNA, 15 bp, Homo sapiens
tttttatttcttttg

SEQ ID NO: 684415 - DNA, 15 bp, Homo sapiens
ttttatttcttttgg

SEQ ID NO: 684416 - DNA, 15 bp, Homo sapiens
tttatttcttttgga

SEQ ID NO: 684417 - DNA, 15 bp, Homo sapiens
ttatttcttttggat

SEQ ID NO: 684418 - DNA, 15 bp, Homo sapiens
tatttcttttggata

SEQ ID NO: 684419 - DNA, 15 bp, Homo sapiens
atttcttttggatat

SEQ ID NO: 684420 - DNA, 15 bp, Homo sapiens
tttcttttggatata

SEQ ID NO: 684421 - DNA, 15 bp, Homo sapiens
ttcttttggatatat

SEQ ID NO: 684422 - DNA, 15 bp, Homo sapiens
tcttttggatatata

SEQ ID NO: 684423 - DNA, 15 bp, Homo sapiens
cttttggatatatac

SEQ ID NO: 684424 - DNA, 15 bp, Homo sapiens
ttttggatatatacc

SEQ ID NO: 684425 - DNA, 15 bp, Homo sapiens
tttggatatataccc

SEQ ID NO: 684426 - DNA, 15 bp, Homo sapiens
ttggatatataccca

SEQ ID NO: 684427 - DNA, 15 bp, Homo sapiens
tggatatatacccag

SEQ ID NO: 684428 - DNA, 15 bp, Homo sapiens
ggatatatacccagt

SEQ ID NO: 684429 - DNA, 15 bp, Homo sapiens
gatatatacccagtg

SEQ ID NO: 684430 - DNA, 15 bp, Homo sapiens
atatatacccagtgg

SEQ ID NO: 684431 - DNA, 15 bp, Homo sapiens
tatatacccagtggt

SEQ ID NO: 684432 - DNA, 15 bp, Homo sapiens
atatacccagtggtg

SEQ ID NO: 684433 - DNA, 15 bp, Homo sapiens
tatacccagtggtgg

SEQ ID NO: 684434 - DNA, 15 bp, Homo sapiens
atacccagtggtggg

SEQ ID NO: 684435 - DNA, 15 bp, Homo sapiens
tacccagtggtggga

SEQ ID NO: 684436 - DNA, 15 bp, Homo sapiens
acccagtggtgggat

SEQ ID NO: 684437 - DNA, 15 bp, Homo sapiens
cccagtggtgggatt

SEQ ID NO: 684438 - DNA, 15 bp, Homo sapiens
ccagtggtgggattg

SEQ ID NO: 684439 - DNA, 15 bp, Homo sapiens
cagtggtgggattgc

SEQ ID NO: 684440 - DNA, 15 bp, Homo sapiens
agtggtgggattgct

SEQ ID NO: 684441 - DNA, 15 bp, Homo sapiens
gtggtgggattgctg

SEQ ID NO: 684442 - DNA, 15 bp, Homo sapiens
tggtgggattgctgt

SEQ ID NO: 684443 - DNA, 15 bp, Homo sapiens
ggtgggattgctgta

SEQ ID NO: 684444 - DNA, 15 bp, Homo sapiens
gtgggattgctgtat

SEQ ID NO: 684445 - DNA, 15 bp, Homo sapiens
tgggattgctgtatc

SEQ ID NO: 684446 - DNA, 15 bp, Homo sapiens
gggattgctgtatca

SEQ ID NO: 684447 - DNA, 15 bp, Homo sapiens
ggattgctgtatcat

SEQ ID NO: 684448 - DNA, 15 bp, Homo sapiens
gattgctgtatcata

SEQ ID NO: 684449 - DNA, 15 bp, Homo sapiens
attgctgtatcatat

SEQ ID NO: 684450 - DNA, 15 bp, Homo sapiens
ttgctgtatcatatg

SEQ ID NO: 684451 - DNA, 15 bp, Homo sapiens
tgctgtatcatatgg

SEQ ID NO: 684452 - DNA, 15 bp, Homo sapiens
gctgtatcatatggt

SEQ ID NO: 684453 - DNA, 15 bp, Homo sapiens
ctgtatcatatggta

SEQ ID NO: 684454 - DNA, 15 bp, Homo sapiens
tgtatcatatggtag

SEQ ID NO: 684455 - DNA, 15 bp, Homo sapiens
gtatcatatggtagt

SEQ ID NO: 684456 - DNA, 15 bp, Homo sapiens
tatcatatggtagtt

SEQ ID NO: 684457 - DNA, 15 bp, Homo sapiens
atcatatggtagttt

SEQ ID NO: 684458 - DNA, 15 bp, Homo sapiens
tcatatggtagtttt

SEQ ID NO: 684459 - DNA, 15 bp, Homo sapiens
catatggtagtttta

SEQ ID NO: 684460 - DNA, 15 bp, Homo sapiens
atatggtagttttat

SEQ ID NO: 684461 - DNA, 15 bp, Homo sapiens
tatggtagttttatt

SEQ ID NO: 684462 - DNA, 15 bp, Homo sapiens
atggtagttttattt

SEQ ID NO: 684463 - DNA, 15 bp, Homo sapiens
tggtagttttatttt

SEQ ID NO: 684464 - DNA, 15 bp, Homo sapiens
ggtagttttattttt

SEQ ID NO: 684465 - DNA, 15 bp, Homo sapiens
gtagttttattttta

SEQ ID NO: 684466 - DNA, 15 bp, Homo sapiens
tagttttatttttat

SEQ ID NO: 684467 - DNA, 15 bp, Homo sapiens
agttttatttttatt

SEQ ID NO: 684468 - DNA, 15 bp, Homo sapiens
gttttatttttattt

SEQ ID NO: 684469 - DNA, 15 bp, Homo sapiens
ttttatttttatttt

SEQ ID NO: 684470 - DNA, 15 bp, Homo sapiens
tttatttttattttt

SEQ ID NO: 684471 - DNA, 15 bp, Homo sapiens
ttatttttatttttt

SEQ ID NO: 684472 - DNA, 15 bp, Homo sapiens
tatttttattttttt

SEQ ID NO: 684473 - DNA, 15 bp, Homo sapiens
atttttatttttttg

SEQ ID NO: 684474 - DNA, 15 bp, Homo sapiens
tttttatttttttga

SEQ ID NO: 684475 - DNA, 15 bp, Homo sapiens
ttttatttttttgag

SEQ ID NO: 684476 - DNA, 15 bp, Homo sapiens
tttatttttttgagg

SEQ ID NO: 684477 - DNA, 15 bp, Homo sapiens
ttatttttttgagga

SEQ ID NO: 684478 - DNA, 15 bp, Homo sapiens
tatttttttgaggaa

SEQ ID NO: 684479 - DNA, 15 bp, Homo sapiens
atttttttgaggaac

SEQ ID NO: 684480 - DNA, 15 bp, Homo sapiens
tttttttgaggaacc

SEQ ID NO: 684481 - DNA, 15 bp, Homo sapiens
ttttttgaggaacct

SEQ ID NO: 684482 - DNA, 15 bp, Homo sapiens
tttttgaggaacctc

SEQ ID NO: 684483 - DNA, 15 bp, Homo sapiens
ttttgaggaacctct

SEQ ID NO: 684484 - DNA, 15 bp, Homo sapiens
tttgaggaacctcta

SEQ ID NO: 684485 - DNA, 15 bp, Homo sapiens
ttgaggaacctctaa

SEQ ID NO: 684486 - DNA, 15 bp, Homo sapiens
tgaggaacctctaaa

SEQ ID NO: 684487 - DNA, 15 bp, Homo sapiens
gaggaacctctaaac

SEQ ID NO: 684488 - DNA, 15 bp, Homo sapiens
aggaacctctaaact

SEQ ID NO: 684489 - DNA, 15 bp, Homo sapiens
ggaacctctaaacta

SEQ ID NO: 684490 - DNA, 15 bp, Homo sapiens
gaacctctaaactat

SEQ ID NO: 684491 - DNA, 15 bp, Homo sapiens
aacctctaaactatt

SEQ ID NO: 684492 - DNA, 15 bp, Homo sapiens
acctctaaactattc

SEQ ID NO: 684493 - DNA, 15 bp, Homo sapiens
cctctaaactattct

SEQ ID NO: 684494 - DNA, 15 bp, Homo sapiens
ctctaaactattctt

SEQ ID NO: 684495 - DNA, 15 bp, Homo sapiens
tctaaactattcttt

SEQ ID NO: 684496 - DNA, 15 bp, Homo sapiens
ctaaactattctttt

SEQ ID NO: 684497 - DNA, 15 bp, Homo sapiens
taaactattctttta

SEQ ID NO: 684498 - DNA, 15 bp, Homo sapiens
aaactattcttttat

SEQ ID NO: 684499 - DNA, 15 bp, Homo sapiens
aactattcttttata

SEQ ID NO: 684500 - DNA, 15 bp, Homo sapiens
actattcttttatag

SEQ ID NO: 684501 - DNA, 15 bp, Homo sapiens
ctattcttttatagt

SEQ ID NO: 684502 - DNA, 15 bp, Homo sapiens
tattcttttatagtg

SEQ ID NO: 684503 - DNA, 15 bp, Homo sapiens
attcttttatagtgg

SEQ ID NO: 684504 - DNA, 15 bp, Homo sapiens
ttcttttatagtggc

SEQ ID NO: 684505 - DNA, 15 bp, Homo sapiens
tcttttatagtggct

SEQ ID NO: 684506 - DNA, 15 bp, Homo sapiens
cttttatagtggctc

SEQ ID NO: 684507 - DNA, 15 bp, Homo sapiens
ttttatagtggctct

SEQ ID NO: 684508 - DNA, 15 bp, Homo sapiens
tttatagtggctcta

SEQ ID NO: 684509 - DNA, 15 bp, Homo sapiens
ttatagtggctctac

SEQ ID NO: 684510 - DNA, 15 bp, Homo sapiens
tatagtggctctact

SEQ ID NO: 684511 - DNA, 15 bp, Homo sapiens
atagtggctctacta

SEQ ID NO: 684512 - DNA, 15 bp, Homo sapiens
tagtggctctactaa

SEQ ID NO: 684513 - DNA, 15 bp, Homo sapiens
agtggctctactaat

SEQ ID NO: 684514 - DNA, 15 bp, Homo sapiens
gtggctctactaatt

SEQ ID NO: 684515 - DNA, 15 bp, Homo sapiens
tggctctactaattt

SEQ ID NO: 684516 - DNA, 15 bp, Homo sapiens
ggctctactaattta

SEQ ID NO: 684517 - DNA, 15 bp, Homo sapiens
gctctactaatttac

SEQ ID NO: 684518 - DNA, 15 bp, Homo sapiens
ctctactaatttaca

SEQ ID NO: 684519 - DNA, 15 bp, Homo sapiens
tctactaatttacat

SEQ ID NO: 684520 - DNA, 15 bp, Homo sapiens
ctactaatttacatt

SEQ ID NO: 684521 - DNA, 15 bp, Homo sapiens
tactaatttacattg

SEQ ID NO: 684522 - DNA, 15 bp, Homo sapiens
actaatttacattgc

SEQ ID NO: 684523 - DNA, 15 bp, Homo sapiens
ctaatttacattgcc

SEQ ID NO: 684524 - DNA, 15 bp, Homo sapiens
taatttacattgcca

SEQ ID NO: 684525 - DNA, 15 bp, Homo sapiens
aatttacattgccac

SEQ ID NO: 684526 - DNA, 15 bp, Homo sapiens
atttacattgccaca

SEQ ID NO: 684527 - DNA, 15 bp, Homo sapiens
tttacattgccacaa

SEQ ID NO: 684528 - DNA, 15 bp, Homo sapiens
ttacattgccacaag

SEQ ID NO: 684529 - DNA, 15 bp, Homo sapiens
tacattgccacaagc

SEQ ID NO: 684530 - DNA, 15 bp, Homo sapiens
acattgccacaagca

SEQ ID NO: 684531 - DNA, 15 bp, Homo sapiens
cattgccacaagcag

SEQ ID NO: 684532 - DNA, 15 bp, Homo sapiens
attgccacaagcagt

SEQ ID NO: 684533 - DNA, 15 bp, Homo sapiens
ttgccacaagcagtt

SEQ ID NO: 684534 - DNA, 15 bp, Homo sapiens
tgccacaagcagttg

SEQ ID NO: 684535 - DNA, 15 bp, Homo sapiens
gccacaagcagttgt

SEQ ID NO: 684536 - DNA, 15 bp, Homo sapiens
ccacaagcagttgtg

SEQ ID NO: 684537 - DNA, 15 bp, Homo sapiens
cacaagcagttgtgc

SEQ ID NO: 684538 - DNA, 15 bp, Homo sapiens
acaagcagttgtgct

SEQ ID NO: 684539 - DNA, 15 bp, Homo sapiens
caagcagttgtgctt

SEQ ID NO: 684540 - DNA, 15 bp, Homo sapiens
aagcagttgtgcttt

SEQ ID NO: 684541 - DNA, 15 bp, Homo sapiens
agcagttgtgctttt

SEQ ID NO: 684542 - DNA, 15 bp, Homo sapiens
gcagttgtgcttttg

SEQ ID NO: 684543 - DNA, 15 bp, Homo sapiens
cagttgtgcttttgt

SEQ ID NO: 684544 - DNA, 15 bp, Homo sapiens
agttgtgcttttgtt

SEQ ID NO: 684545 - DNA, 15 bp, Homo sapiens
gttgtgcttttgttt

SEQ ID NO: 684546 - DNA, 15 bp, Homo sapiens
ttgtgcttttgtttt

SEQ ID NO: 684547 - DNA, 15 bp, Homo sapiens
tgtgcttttgttttt

SEQ ID NO: 684548 - DNA, 15 bp, Homo sapiens
gtgcttttgtttttt

SEQ ID NO: 684549 - DNA, 15 bp, Homo sapiens
tgcttttgttttttt

SEQ ID NO: 684550 - DNA, 15 bp, Homo sapiens
gcttttgtttttttt

SEQ ID NO: 684551 - DNA, 15 bp, Homo sapiens
cttttgttttttttt

SEQ ID NO: 684552 - DNA, 15 bp, Homo sapiens
tttgttttttttttg

SEQ ID NO: 684553 - DNA, 15 bp, Homo sapiens
ttgttttttttttgt

SEQ ID NO: 684554 - DNA, 15 bp, Homo sapiens
tgttttttttttgtt

SEQ ID NO: 684555 - DNA, 15 bp, Homo sapiens
gttttttttttgttt

SEQ ID NO: 684556 - DNA, 15 bp, Homo sapiens
ttttttttttgtttg

SEQ ID NO: 684557 - DNA, 15 bp, Homo sapiens
tttttttttgtttgt

SEQ ID NO: 684558 - DNA, 15 bp, Homo sapiens
ttttttttgtttgtt

SEQ ID NO: 684559 - DNA, 15 bp, Homo sapiens
tttttttgtttgttt

SEQ ID NO: 684560 - DNA, 15 bp, Homo sapiens
ttttttgtttgtttg

SEQ ID NO: 684561 - DNA, 15 bp, Homo sapiens
tttttgtttgtttgt

SEQ ID NO: 684562 - DNA, 15 bp, Homo sapiens
ttttgtttgtttgtt

SEQ ID NO: 684563 - DNA, 15 bp, Homo sapiens
tttgtttgtttgttt

SEQ ID NO: 684564 - DNA, 15 bp, Homo sapiens
ttgtttgtttgtttt

SEQ ID NO: 684565 - DNA, 15 bp, Homo sapiens
tgtttgtttgttttt

SEQ ID NO: 684566 - DNA, 15 bp, Homo sapiens
gtttgtttgtttttg

SEQ ID NO: 684567 - DNA, 15 bp, Homo sapiens
tttgtttgtttttgt

SEQ ID NO: 684568 - DNA, 15 bp, Homo sapiens
ttgtttgtttttgtt

SEQ ID NO: 684569 - DNA, 15 bp, Homo sapiens
tgtttgtttttgttt

SEQ ID NO: 684570 - DNA, 15 bp, Homo sapiens
tttgtttttgttttt

SEQ ID NO: 684571 - DNA, 15 bp, Homo sapiens
ttgtttttgtttttg

SEQ ID NO: 684572 - DNA, 15 bp, Homo sapiens
tgtttttgtttttgt

SEQ ID NO: 684573 - DNA, 15 bp, Homo sapiens
gtttttgtttttgtt

SEQ ID NO: 684574 - DNA, 15 bp, Homo sapiens
tttttgtttttgttt

SEQ ID NO: 684575 - DNA, 15 bp, Homo sapiens
ttttgtttttgtttt

SEQ ID NO: 684576 - DNA, 15 bp, Homo sapiens
ttgtttttgtttttt

SEQ ID NO: 684577 - DNA, 15 bp, Homo sapiens
tgtttttgttttttt

SEQ ID NO: 684578 - DNA, 15 bp, Homo sapiens
gtttttgtttttttt

SEQ ID NO: 684579 - DNA, 15 bp, Homo sapiens
ttttgttttttttta

SEQ ID NO: 684580 - DNA, 15 bp, Homo sapiens
tttgtttttttttac

SEQ ID NO: 684581 - DNA, 15 bp, Homo sapiens
ttgtttttttttact

SEQ ID NO: 684582 - DNA, 15 bp, Homo sapiens
tgtttttttttactg

SEQ ID NO: 684583 - DNA, 15 bp, Homo sapiens
gtttttttttactgt

SEQ ID NO: 684584 - DNA, 15 bp, Homo sapiens
tttttttttactgtt

SEQ ID NO: 684585 - DNA, 15 bp, Homo sapiens
ttttttttactgttt

SEQ ID NO: 684586 - DNA, 15 bp, Homo sapiens
tttttttactgtttt

SEQ ID NO: 684587 - DNA, 15 bp, Homo sapiens
ttttttactgtttta

SEQ ID NO: 684588 - DNA, 15 bp, Homo sapiens
tttttactgttttaa

SEQ ID NO: 684589 - DNA, 15 bp, Homo sapiens
ttttactgttttaac

SEQ ID NO: 684590 - DNA, 15 bp, Homo sapiens
tttactgttttaaca

SEQ ID NO: 684591 - DNA, 15 bp, Homo sapiens
ttactgttttaacat

SEQ ID NO: 684592 - DNA, 15 bp, Homo sapiens
tactgttttaacata

SEQ ID NO: 684593 - DNA, 15 bp, Homo sapiens
actgttttaacataa

SEQ ID NO: 684594 - DNA, 15 bp, Homo sapiens
ctgttttaacataat

SEQ ID NO: 684595 - DNA, 15 bp, Homo sapiens
tgttttaacataatt

SEQ ID NO: 684596 - DNA, 15 bp, Homo sapiens
gttttaacataatta

SEQ ID NO: 684597 - DNA, 15 bp, Homo sapiens
ttttaacataattat

SEQ ID NO: 684598 - DNA, 15 bp, Homo sapiens
tttaacataattatt

SEQ ID NO: 684599 - DNA, 15 bp, Homo sapiens
ttaacataattattt

SEQ ID NO: 684600 - DNA, 15 bp, Homo sapiens
taacataattatttg

SEQ ID NO: 684601 - DNA, 15 bp, Homo sapiens
aacataattatttgg

SEQ ID NO: 684602 - DNA, 15 bp, Homo sapiens
acataattatttgga

SEQ ID NO: 684603 - DNA, 15 bp, Homo sapiens
cataattatttggag

SEQ ID NO: 684604 - DNA, 15 bp, Homo sapiens
ataattatttggagc

SEQ ID NO: 684605 - DNA, 15 bp, Homo sapiens
taattatttggagct

SEQ ID NO: 684606 - DNA, 15 bp, Homo sapiens
aattatttggagctt

SEQ ID NO: 684607 - DNA, 15 bp, Homo sapiens
attatttggagcttc

SEQ ID NO: 684608 - DNA, 15 bp, Homo sapiens
ttatttggagcttca

SEQ ID NO: 684609 - DNA, 15 bp, Homo sapiens
tatttggagcttcat

SEQ ID NO: 684610 - DNA, 15 bp, Homo sapiens
atttggagcttcatt

SEQ ID NO: 684611 - DNA, 15 bp, Homo sapiens
tttggagcttcattc

SEQ ID NO: 684612 - DNA, 15 bp, Homo sapiens
ttggagcttcattca

SEQ ID NO: 684613 - DNA, 15 bp, Homo sapiens
tggagcttcattcat

SEQ ID NO: 684614 - DNA, 15 bp, Homo sapiens
ggagcttcattcatg

SEQ ID NO: 684615 - DNA, 15 bp, Homo sapiens
gagcttcattcatga

SEQ ID NO: 684616 - DNA, 15 bp, Homo sapiens
agcttcattcatgat

SEQ ID NO: 684617 - DNA, 15 bp, Homo sapiens
gcttcattcatgatg

SEQ ID NO: 684618 - DNA, 15 bp, Homo sapiens
cttcattcatgatgg

SEQ ID NO: 684619 - DNA, 15 bp, Homo sapiens
ttcattcatgatggc

SEQ ID NO: 684620 - DNA, 15 bp, Homo sapiens
tcattcatgatggca

SEQ ID NO: 684621 - DNA, 15 bp, Homo sapiens
cattcatgatggcat

SEQ ID NO: 684622 - DNA, 15 bp, Homo sapiens
attcatgatggcata

SEQ ID NO: 684623 - DNA, 15 bp, Homo sapiens
ttcatgatggcatat

SEQ ID NO: 684624 - DNA, 15 bp, Homo sapiens
tcatgatggcatatg

SEQ ID NO: 684625 - DNA, 15 bp, Homo sapiens
catgatggcatatgc

SEQ ID NO: 684626 - DNA, 15 bp, Homo sapiens
atgatggcatatgca

SEQ ID NO: 684627 - DNA, 15 bp, Homo sapiens
tgatggcatatgcat

SEQ ID NO: 684628 - DNA, 15 bp, Homo sapiens
gatggcatatgcatc

SEQ ID NO: 684629 - DNA, 15 bp, Homo sapiens
atggcatatgcatca

SEQ ID NO: 684630 - DNA, 15 bp, Homo sapiens
tggcatatgcatcaa

SEQ ID NO: 684631 - DNA, 15 bp, Homo sapiens
ggcatatgcatcaac

SEQ ID NO: 684632 - DNA, 15 bp, Homo sapiens
gcatatgcatcaaca

SEQ ID NO: 684633 - DNA, 15 bp, Homo sapiens
catatgcatcaacaa

SEQ ID NO: 684634 - DNA, 15 bp, Homo sapiens
atatgcatcaacaat

SEQ ID NO: 684635 - DNA, 15 bp, Homo sapiens
tatgcatcaacaatt

SEQ ID NO: 684636 - DNA, 15 bp, Homo sapiens
atgcatcaacaattt

SEQ ID NO: 684637 - DNA, 15 bp, Homo sapiens
tgcatcaacaattta

SEQ ID NO: 684638 - DNA, 15 bp, Homo sapiens
gcatcaacaatttat

SEQ ID NO: 684639 - DNA, 15 bp, Homo sapiens
catcaacaatttatt

SEQ ID NO: 684640 - DNA, 15 bp, Homo sapiens
atcaacaatttattt

SEQ ID NO: 684641 - DNA, 15 bp, Homo sapiens
tcaacaatttattta

SEQ ID NO: 684642 - DNA, 15 bp, Homo sapiens
caacaatttatttat

SEQ ID NO: 684643 - DNA, 15 bp, Homo sapiens
aacaatttatttatt

SEQ ID NO: 684644 - DNA, 15 bp, Homo sapiens
acaatttatttattc

SEQ ID NO: 684645 - DNA, 15 bp, Homo sapiens
caatttatttattct

SEQ ID NO: 684646 - DNA, 15 bp, Homo sapiens
aatttatttattctc

SEQ ID NO: 684647 - DNA, 15 bp, Homo sapiens
atttatttattctca

SEQ ID NO: 684648 - DNA, 15 bp, Homo sapiens
tttatttattctcat

SEQ ID NO: 684649 - DNA, 15 bp, Homo sapiens
ttatttattctcatt

SEQ ID NO: 684650 - DNA, 15 bp, Homo sapiens
tatttattctcatta

SEQ ID NO: 684651 - DNA, 15 bp, Homo sapiens
atttattctcattac

SEQ ID NO: 684652 - DNA, 15 bp, Homo sapiens
tttattctcattact

SEQ ID NO: 684653 - DNA, 15 bp, Homo sapiens
ttattctcattactg

SEQ ID NO: 684654 - DNA, 15 bp, Homo sapiens
tattctcattactga

SEQ ID NO: 684655 - DNA, 15 bp, Homo sapiens
attctcattactgag

SEQ ID NO: 684656 - DNA, 15 bp, Homo sapiens
ttctcattactgagt

SEQ ID NO: 684657 - DNA, 15 bp, Homo sapiens
tctcattactgagta

SEQ ID NO: 684658 - DNA, 15 bp, Homo sapiens
ctcattactgagtag

SEQ ID NO: 684659 - DNA, 15 bp, Homo sapiens
tcattactgagtagt

SEQ ID NO: 684660 - DNA, 15 bp, Homo sapiens
cattactgagtagta

SEQ ID NO: 684661 - DNA, 15 bp, Homo sapiens
attactgagtagtat

SEQ ID NO: 684662 - DNA, 15 bp, Homo sapiens
ttactgagtagtatc

SEQ ID NO: 684663 - DNA, 15 bp, Homo sapiens
tactgagtagtatct

SEQ ID NO: 684664 - DNA, 15 bp, Homo sapiens
actgagtagtatctc

SEQ ID NO: 684665 - DNA, 15 bp, Homo sapiens
ctgagtagtatctca

SEQ ID NO: 684666 - DNA, 15 bp, Homo sapiens
tgagtagtatctcac

SEQ ID NO: 684667 - DNA, 15 bp, Homo sapiens
gagtagtatctcact

SEQ ID NO: 684668 - DNA, 15 bp, Homo sapiens
agtagtatctcactg

SEQ ID NO: 684669 - DNA, 15 bp, Homo sapiens
gtagtatctcactgc

SEQ ID NO: 684670 - DNA, 15 bp, Homo sapiens
tagtatctcactgca

SEQ ID NO: 684671 - DNA, 15 bp, Homo sapiens
agtatctcactgcat

SEQ ID NO: 684672 - DNA, 15 bp, Homo sapiens
gtatctcactgcatg

SEQ ID NO: 684673 - DNA, 15 bp, Homo sapiens
tatctcactgcatgg

SEQ ID NO: 684674 - DNA, 15 bp, Homo sapiens
atctcactgcatggg

SEQ ID NO: 684675 - DNA, 15 bp, Homo sapiens
tctcactgcatggga

SEQ ID NO: 684676 - DNA, 15 bp, Homo sapiens
ctcactgcatgggat

SEQ ID NO: 684677 - DNA, 15 bp, Homo sapiens
tcactgcatgggatt

SEQ ID NO: 684678 - DNA, 15 bp, Homo sapiens
cactgcatgggattt

SEQ ID NO: 684679 - DNA, 15 bp, Homo sapiens
actgcatgggatttg

SEQ ID NO: 684680 - DNA, 15 bp, Homo sapiens
ctgcatgggatttgt

SEQ ID NO: 684681 - DNA, 15 bp, Homo sapiens
tgcatgggatttgtt

SEQ ID NO: 684682 - DNA, 15 bp, Homo sapiens
gcatgggatttgttt

SEQ ID NO: 684683 - DNA, 15 bp, Homo sapiens
catgggatttgtttt

SEQ ID NO: 684684 - DNA, 15 bp, Homo sapiens
atgggatttgttttt

SEQ ID NO: 684685 - DNA, 15 bp, Homo sapiens
tgggatttgtttttt

SEQ ID NO: 684686 - DNA, 15 bp, Homo sapiens
gggatttgttttttt

SEQ ID NO: 684687 - DNA, 15 bp, Homo sapiens
ggatttgtttttttt

SEQ ID NO: 684688 - DNA, 15 bp, Homo sapiens
gatttgttttttttt

SEQ ID NO: 684689 - DNA, 15 bp, Homo sapiens
atttgtttttttttt

SEQ ID NO: 684690 - DNA, 15 bp, Homo sapiens
ttgttttttttttta

SEQ ID NO: 684691 - DNA, 15 bp, Homo sapiens
tgtttttttttttaa

SEQ ID NO: 684692 - DNA, 15 bp, Homo sapiens
gtttttttttttaag

SEQ ID NO: 684693 - DNA, 15 bp, Homo sapiens
tttttttttttaagt

SEQ ID NO: 684694 - DNA, 15 bp, Homo sapiens
ttttttttttaagtt

SEQ ID NO: 684695 - DNA, 15 bp, Homo sapiens
tttttttttaagttc

SEQ ID NO: 684696 - DNA, 15 bp, Homo sapiens
ttttttttaagttca

SEQ ID NO: 684697 - DNA, 15 bp, Homo sapiens
tttttttaagttcag

SEQ ID NO: 684698 - DNA, 15 bp, Homo sapiens
ttttttaagttcagg

SEQ ID NO: 684699 - DNA, 15 bp, Homo sapiens
tttttaagttcaggg

SEQ ID NO: 684700 - DNA, 15 bp, Homo sapiens
ttttaagttcagggg

SEQ ID NO: 684701 - DNA, 15 bp, Homo sapiens
tttaagttcaggggt

SEQ ID NO: 684702 - DNA, 15 bp, Homo sapiens
ttaagttcaggggta

SEQ ID NO: 684703 - DNA, 15 bp, Homo sapiens
taagttcaggggtac

SEQ ID NO: 684704 - DNA, 15 bp, Homo sapiens
aagttcaggggtaca

SEQ ID NO: 684705 - DNA, 15 bp, Homo sapiens
agttcaggggtacat

SEQ ID NO: 684706 - DNA, 15 bp, Homo sapiens
gttcaggggtacatg

SEQ ID NO: 684707 - DNA, 15 bp, Homo sapiens
ttcaggggtacatgt

SEQ ID NO: 684708 - DNA, 15 bp, Homo sapiens
tcaggggtacatgtg

SEQ ID NO: 684709 - DNA, 15 bp, Homo sapiens
caggggtacatgtgc

SEQ ID NO: 684710 - DNA, 15 bp, Homo sapiens
aggggtacatgtgca

SEQ ID NO: 684711 - DNA, 15 bp, Homo sapiens
ggggtacatgtgcag

SEQ ID NO: 684712 - DNA, 15 bp, Homo sapiens
gggtacatgtgcagt

SEQ ID NO: 684713 - DNA, 15 bp, Homo sapiens
ggtacatgtgcagtt

SEQ ID NO: 684714 - DNA, 15 bp, Homo sapiens
gtacatgtgcagttt

SEQ ID NO: 684715 - DNA, 15 bp, Homo sapiens
tacatgtgcagtttt

SEQ ID NO: 684716 - DNA, 15 bp, Homo sapiens
acatgtgcagttttg

SEQ ID NO: 684717 - DNA, 15 bp, Homo sapiens
catgtgcagttttgt

SEQ ID NO: 684718 - DNA, 15 bp, Homo sapiens
atgtgcagttttgtt

SEQ ID NO: 684719 - DNA, 15 bp, Homo sapiens
tgtgcagttttgtta

SEQ ID NO: 684720 - DNA, 15 bp, Homo sapiens
gtgcagttttgttac

SEQ ID NO: 684721 - DNA, 15 bp, Homo sapiens
tgcagttttgttaca

SEQ ID NO: 684722 - DNA, 15 bp, Homo sapiens
gcagttttgttacat

SEQ ID NO: 684723 - DNA, 15 bp, Homo sapiens
cagttttgttacata

SEQ ID NO: 684724 - DNA, 15 bp, Homo sapiens
agttttgttacatag

SEQ ID NO: 684725 - DNA, 15 bp, Homo sapiens
gttttgttacatagg

SEQ ID NO: 684726 - DNA, 15 bp, Homo sapiens
ttttgttacataggt

SEQ ID NO: 684727 - DNA, 15 bp, Homo sapiens
tttgttacataggta

SEQ ID NO: 684728 - DNA, 15 bp, Homo sapiens
ttgttacataggtaa

SEQ ID NO: 684729 - DNA, 15 bp, Homo sapiens
tgttacataggtaaa

SEQ ID NO: 684730 - DNA, 15 bp, Homo sapiens
gttacataggtaaac

SEQ ID NO: 684731 - DNA, 15 bp, Homo sapiens
ttacataggtaaact

SEQ ID NO: 684732 - DNA, 15 bp, Homo sapiens
tacataggtaaactt

SEQ ID NO: 684733 - DNA, 15 bp, Homo sapiens
acataggtaaactta

SEQ ID NO: 684734 - DNA, 15 bp, Homo sapiens
cataggtaaacttat

SEQ ID NO: 684735 - DNA, 15 bp, Homo sapiens
ataggtaaacttatg

SEQ ID NO: 684736 - DNA, 15 bp, Homo sapiens
taggtaaacttatgt

SEQ ID NO: 684737 - DNA, 15 bp, Homo sapiens
aggtaaacttatgtc

SEQ ID NO: 684738 - DNA, 15 bp, Homo sapiens
ggtaaacttatgtca

SEQ ID NO: 684739 - DNA, 15 bp, Homo sapiens
gtaaacttatgtcat

SEQ ID NO: 684740 - DNA, 15 bp, Homo sapiens
taaacttatgtcatg

SEQ ID NO: 684741 - DNA, 15 bp, Homo sapiens
aaacttatgtcatgg

SEQ ID NO: 684742 - DNA, 15 bp, Homo sapiens
aacttatgtcatggg

SEQ ID NO: 684743 - DNA, 15 bp, Homo sapiens
acttatgtcatgggg

SEQ ID NO: 684744 - DNA, 15 bp, Homo sapiens
cttatgtcatggggg

SEQ ID NO: 684745 - DNA, 15 bp, Homo sapiens
ttatgtcatgggggt

SEQ ID NO: 684746 - DNA, 15 bp, Homo sapiens
tatgtcatgggggtt

SEQ ID NO: 684747 - DNA, 15 bp, Homo sapiens
atgtcatgggggttt

SEQ ID NO: 684748 - DNA, 15 bp, Homo sapiens
tgtcatgggggtttg

SEQ ID NO: 684749 - DNA, 15 bp, Homo sapiens
gtcatgggggtttgt

SEQ ID NO: 684750 - DNA, 15 bp, Homo sapiens
tcatgggggtttgtt

SEQ ID NO: 684751 - DNA, 15 bp, Homo sapiens
catgggggtttgttg

SEQ ID NO: 684752 - DNA, 15 bp, Homo sapiens
atgggggtttgttgt

SEQ ID NO: 684753 - DNA, 15 bp, Homo sapiens
tgggggtttgttgta

SEQ ID NO: 684754 - DNA, 15 bp, Homo sapiens
gggggtttgttgtac

SEQ ID NO: 684755 - DNA, 15 bp, Homo sapiens
ggggtttgttgtaca

SEQ ID NO: 684756 - DNA, 15 bp, Homo sapiens
gggtttgttgtacag

SEQ ID NO: 684757 - DNA, 15 bp, Homo sapiens
ggtttgttgtacaga

SEQ ID NO: 684758 - DNA, 15 bp, Homo sapiens
gtttgttgtacagat

SEQ ID NO: 684759 - DNA, 15 bp, Homo sapiens
tttgttgtacagatt

SEQ ID NO: 684760 - DNA, 15 bp, Homo sapiens
ttgttgtacagatta

SEQ ID NO: 684761 - DNA, 15 bp, Homo sapiens
tgttgtacagattat

SEQ ID NO: 684762 - DNA, 15 bp, Homo sapiens
gttgtacagattatt

SEQ ID NO: 684763 - DNA, 15 bp, Homo sapiens
ttgtacagattattt

SEQ ID NO: 684764 - DNA, 15 bp, Homo sapiens
tgtacagattatttc

SEQ ID NO: 684765 - DNA, 15 bp, Homo sapiens
gtacagattatttca

SEQ ID NO: 684766 - DNA, 15 bp, Homo sapiens
tacagattatttcat

SEQ ID NO: 684767 - DNA, 15 bp, Homo sapiens
acagattatttcatt

SEQ ID NO: 684768 - DNA, 15 bp, Homo sapiens
cagattatttcattg

SEQ ID NO: 684769 - DNA, 15 bp, Homo sapiens
agattatttcattgc

SEQ ID NO: 684770 - DNA, 15 bp, Homo sapiens
gattatttcattgcc

SEQ ID NO: 684771 - DNA, 15 bp, Homo sapiens
attatttcattgccc

SEQ ID NO: 684772 - DNA, 15 bp, Homo sapiens
ttatttcattgccca

SEQ ID NO: 684773 - DNA, 15 bp, Homo sapiens
tatttcattgcccag

SEQ ID NO: 684774 - DNA, 15 bp, Homo sapiens
atttcattgcccagg

SEQ ID NO: 684775 - DNA, 15 bp, Homo sapiens
tttcattgcccagga

SEQ ID NO: 684776 - DNA, 15 bp, Homo sapiens
ttcattgcccaggaa

SEQ ID NO: 684777 - DNA, 15 bp, Homo sapiens
tcattgcccaggaat

SEQ ID NO: 684778 - DNA, 15 bp, Homo sapiens
cattgcccaggaatg

SEQ ID NO: 684779 - DNA, 15 bp, Homo sapiens
attgcccaggaatga

SEQ ID NO: 684780 - DNA, 15 bp, Homo sapiens
ttgcccaggaatgaa

SEQ ID NO: 684781 - DNA, 15 bp, Homo sapiens
tgcccaggaatgaag

SEQ ID NO: 684782 - DNA, 15 bp, Homo sapiens
gcccaggaatgaagt

SEQ ID NO: 684783 - DNA, 15 bp, Homo sapiens
cccaggaatgaagtc

SEQ ID NO: 684784 - DNA, 15 bp, Homo sapiens
ccaggaatgaagtcc

SEQ ID NO: 684785 - DNA, 15 bp, Homo sapiens
caggaatgaagtcca

SEQ ID NO: 684786 - DNA, 15 bp, Homo sapiens
aggaatgaagtccaa

SEQ ID NO: 684787 - DNA, 15 bp, Homo sapiens
ggaatgaagtccaat

SEQ ID NO: 684788 - DNA, 15 bp, Homo sapiens
gaatgaagtccaata

SEQ ID NO: 684789 - DNA, 15 bp, Homo sapiens
aatgaagtccaatac

SEQ ID NO: 684790 - DNA, 15 bp, Homo sapiens
atgaagtccaatacc

SEQ ID NO: 684791 - DNA, 15 bp, Homo sapiens
tgaagtccaatacct

SEQ ID NO: 684792 - DNA, 15 bp, Homo sapiens
gaagtccaataccta

SEQ ID NO: 684793 - DNA, 15 bp, Homo sapiens
aagtccaatacctac

SEQ ID NO: 684794 - DNA, 15 bp, Homo sapiens
agtccaatacctact

SEQ ID NO: 684795 - DNA, 15 bp, Homo sapiens
gtccaatacctacta

SEQ ID NO: 684796 - DNA, 15 bp, Homo sapiens
tccaatacctactag

SEQ ID NO: 684797 - DNA, 15 bp, Homo sapiens
ccaatacctactagt

SEQ ID NO: 684798 - DNA, 15 bp, Homo sapiens
caatacctactagtt

SEQ ID NO: 684799 - DNA, 15 bp, Homo sapiens
aatacctactagttg

SEQ ID NO: 684800 - DNA, 15 bp, Homo sapiens
atacctactagttgt

SEQ ID NO: 684801 - DNA, 15 bp, Homo sapiens
tacctactagttgtt

SEQ ID NO: 684802 - DNA, 15 bp, Homo sapiens
acctactagttgttt

SEQ ID NO: 684803 - DNA, 15 bp, Homo sapiens
cctactagttgtttg

SEQ ID NO: 684804 - DNA, 15 bp, Homo sapiens
ctactagttgtttgt

SEQ ID NO: 684805 - DNA, 15 bp, Homo sapiens
tactagttgtttgtc

SEQ ID NO: 684806 - DNA, 15 bp, Homo sapiens
actagttgtttgtcc

SEQ ID NO: 684807 - DNA, 15 bp, Homo sapiens
ctagttgtttgtcct

SEQ ID NO: 684808 - DNA, 15 bp, Homo sapiens
tagttgtttgtccta

SEQ ID NO: 684809 - DNA, 15 bp, Homo sapiens
agttgtttgtcctaa

SEQ ID NO: 684810 - DNA, 15 bp, Homo sapiens
gttgtttgtcctaat

SEQ ID NO: 684811 - DNA, 15 bp, Homo sapiens
ttgtttgtcctaatc

SEQ ID NO: 684812 - DNA, 15 bp, Homo sapiens
tgtttgtcctaatcc

SEQ ID NO: 684813 - DNA, 15 bp, Homo sapiens
gtttgtcctaatccg

SEQ ID NO: 684814 - DNA, 15 bp, Homo sapiens
tttgtcctaatccgc

SEQ ID NO: 684815 - DNA, 15 bp, Homo sapiens
ttgtcctaatccgct

SEQ ID NO: 684816 - DNA, 15 bp, Homo sapiens
tgtcctaatccgctt

SEQ ID NO: 684817 - DNA, 15 bp, Homo sapiens
gtcctaatccgcttc

SEQ ID NO: 684818 - DNA, 15 bp, Homo sapiens
tcctaatccgcttcc

SEQ ID NO: 684819 - DNA, 15 bp, Homo sapiens
cctaatccgcttcct

SEQ ID NO: 684820 - DNA, 15 bp, Homo sapiens
ctaatccgcttcctc

SEQ ID NO: 684821 - DNA, 15 bp, Homo sapiens
taatccgcttcctct

SEQ ID NO: 684822 - DNA, 15 bp, Homo sapiens
aatccgcttcctctc

SEQ ID NO: 684823 - DNA, 15 bp, Homo sapiens
atccgcttcctctcc

SEQ ID NO: 684824 - DNA, 15 bp, Homo sapiens
tccgcttcctctccc

SEQ ID NO: 684825 - DNA, 15 bp, Homo sapiens
ccgcttcctctccca

SEQ ID NO: 684826 - DNA, 15 bp, Homo sapiens
cgcttcctctcccac

SEQ ID NO: 684827 - DNA, 15 bp, Homo sapiens
gcttcctctcccacc

SEQ ID NO: 684828 - DNA, 15 bp, Homo sapiens
cttcctctcccaccc

SEQ ID NO: 684829 - DNA, 15 bp, Homo sapiens
ttcctctcccaccct

SEQ ID NO: 684830 - DNA, 15 bp, Homo sapiens
tcctctcccaccctc

SEQ ID NO: 684831 - DNA, 15 bp, Homo sapiens
cctctcccaccctcc

SEQ ID NO: 684832 - DNA, 15 bp, Homo sapiens
ctctcccaccctcca

SEQ ID NO: 684833 - DNA, 15 bp, Homo sapiens
tctcccaccctccac

SEQ ID NO: 684834 - DNA, 15 bp, Homo sapiens
ctcccaccctccacc

SEQ ID NO: 684835 - DNA, 15 bp, Homo sapiens
tcccaccctccaccc

SEQ ID NO: 684836 - DNA, 15 bp, Homo sapiens
cccaccctccaccct

SEQ ID NO: 684837 - DNA, 15 bp, Homo sapiens
ccaccctccaccctc

SEQ ID NO: 684838 - DNA, 15 bp, Homo sapiens
caccctccaccctct

SEQ ID NO: 684839 - DNA, 15 bp, Homo sapiens
accctccaccctctg

SEQ ID NO: 684840 - DNA, 15 bp, Homo sapiens
ccctccaccctctga

SEQ ID NO: 684841 - DNA, 15 bp, Homo sapiens
cctccaccctctgat

SEQ ID NO: 684842 - DNA, 15 bp, Homo sapiens
ctccaccctctgata

SEQ ID NO: 684843 - DNA, 15 bp, Homo sapiens
tccaccctctgatag

SEQ ID NO: 684844 - DNA, 15 bp, Homo sapiens
ccaccctctgatagg

SEQ ID NO: 684845 - DNA, 15 bp, Homo sapiens
caccctctgataggt

SEQ ID NO: 684846 - DNA, 15 bp, Homo sapiens
accctctgataggtc

SEQ ID NO: 684847 - DNA, 15 bp, Homo sapiens
ccctctgataggtcc

SEQ ID NO: 684848 - DNA, 15 bp, Homo sapiens
cctctgataggtccc

SEQ ID NO: 684849 - DNA, 15 bp, Homo sapiens
ctctgataggtccca

SEQ ID NO: 684850 - DNA, 15 bp, Homo sapiens
tctgataggtcccag

SEQ ID NO: 684851 - DNA, 15 bp, Homo sapiens
ctgataggtcccagt

SEQ ID NO: 684852 - DNA, 15 bp, Homo sapiens
tgataggtcccagtg

SEQ ID NO: 684853 - DNA, 15 bp, Homo sapiens
gataggtcccagtgt

SEQ ID NO: 684854 - DNA, 15 bp, Homo sapiens
ataggtcccagtgtg

SEQ ID NO: 684855 - DNA, 15 bp, Homo sapiens
taggtcccagtgtgt

SEQ ID NO: 684856 - DNA, 15 bp, Homo sapiens
aggtcccagtgtgtc

SEQ ID NO: 684857 - DNA, 15 bp, Homo sapiens
ggtcccagtgtgtct

SEQ ID NO: 684858 - DNA, 15 bp, Homo sapiens
gtcccagtgtgtctt

SEQ ID NO: 684859 - DNA, 15 bp, Homo sapiens
tcccagtgtgtcttg

SEQ ID NO: 684860 - DNA, 15 bp, Homo sapiens
cccagtgtgtcttgt

SEQ ID NO: 684861 - DNA, 15 bp, Homo sapiens
ccagtgtgtcttgtt

SEQ ID NO: 684862 - DNA, 15 bp, Homo sapiens
cagtgtgtcttgttc

SEQ ID NO: 684863 - DNA, 15 bp, Homo sapiens
agtgtgtcttgttcc

SEQ ID NO: 684864 - DNA, 15 bp, Homo sapiens
gtgtgtcttgttccc

SEQ ID NO: 684865 - DNA, 15 bp, Homo sapiens
tgtgtcttgttcccc

SEQ ID NO: 684866 - DNA, 15 bp, Homo sapiens
gtgtcttgttcccct

SEQ ID NO: 684867 - DNA, 15 bp, Homo sapiens
tgtcttgttcccctg

SEQ ID NO: 684868 - DNA, 15 bp, Homo sapiens
gtcttgttcccctgt

SEQ ID NO: 684869 - DNA, 15 bp, Homo sapiens
tcttgttcccctgtg

SEQ ID NO: 684870 - DNA, 15 bp, Homo sapiens
cttgttcccctgtgt

SEQ ID NO: 684871 - DNA, 15 bp, Homo sapiens
ttgttcccctgtgtg

SEQ ID NO: 684872 - DNA, 15 bp, Homo sapiens
tgttcccctgtgtgt

SEQ ID NO: 684873 - DNA, 15 bp, Homo sapiens
gttcccctgtgtgtg

SEQ ID NO: 684874 - DNA, 15 bp, Homo sapiens
ttcccctgtgtgtgt

SEQ ID NO: 684875 - DNA, 15 bp, Homo sapiens
tcccctgtgtgtgtc

SEQ ID NO: 684876 - DNA, 15 bp, Homo sapiens
cccctgtgtgtgtcc

SEQ ID NO: 684877 - DNA, 15 bp, Homo sapiens
ccctgtgtgtgtcca

SEQ ID NO: 684878 - DNA, 15 bp, Homo sapiens
cctgtgtgtgtccat

SEQ ID NO: 684879 - DNA, 15 bp, Homo sapiens
ctgtgtgtgtccatg

SEQ ID NO: 684880 - DNA, 15 bp, Homo sapiens
tgtgtgtgtccatgt

SEQ ID NO: 684881 - DNA, 15 bp, Homo sapiens
gtgtgtgtccatgtg

SEQ ID NO: 684882 - DNA, 15 bp, Homo sapiens
tgtgtgtccatgtgt

SEQ ID NO: 684883 - DNA, 15 bp, Homo sapiens
gtgtgtccatgtgtt

SEQ ID NO: 684884 - DNA, 15 bp, Homo sapiens
tgtgtccatgtgttc

SEQ ID NO: 684885 - DNA, 15 bp, Homo sapiens
gtgtccatgtgttct

SEQ ID NO: 684886 - DNA, 15 bp, Homo sapiens
catgtgttctcatta

SEQ ID NO: 684887 - DNA, 15 bp, Homo sapiens
atgtgttctcattat

SEQ ID NO: 684888 - DNA, 15 bp, Homo sapiens
tgtgttctcattatc

SEQ ID NO: 684889 - DNA, 15 bp, Homo sapiens
gtgttctcattatct

SEQ ID NO: 684890 - DNA, 15 bp, Homo sapiens
tgttctcattatcta

SEQ ID NO: 684891 - DNA, 15 bp, Homo sapiens
gttctcattatctag

SEQ ID NO: 684892 - DNA, 15 bp, Homo sapiens
ttctcattatctagc

SEQ ID NO: 684893 - DNA, 15 bp, Homo sapiens
tctcattatctagct

SEQ ID NO: 684894 - DNA, 15 bp, Homo sapiens
ctcattatctagctc

SEQ ID NO: 684895 - DNA, 15 bp, Homo sapiens
tcattatctagctcc

SEQ ID NO: 684896 - DNA, 15 bp, Homo sapiens
cattatctagctcct

SEQ ID NO: 684897 - DNA, 15 bp, Homo sapiens
attatctagctccta

SEQ ID NO: 684898 - DNA, 15 bp, Homo sapiens
ttatctagctcctac

SEQ ID NO: 684899 - DNA, 15 bp, Homo sapiens
tatctagctcctact

SEQ ID NO: 684900 - DNA, 15 bp, Homo sapiens
atctagctcctactt

SEQ ID NO: 684901 - DNA, 15 bp, Homo sapiens
tctagctcctactta

SEQ ID NO: 684902 - DNA, 15 bp, Homo sapiens
ctagctcctacttat

SEQ ID NO: 684903 - DNA, 15 bp, Homo sapiens
tagctcctacttata

SEQ ID NO: 684904 - DNA, 15 bp, Homo sapiens
agctcctacttataa

SEQ ID NO: 684905 - DNA, 15 bp, Homo sapiens
gctcctacttataag

SEQ ID NO: 684906 - DNA, 15 bp, Homo sapiens
ctcctacttataagt

SEQ ID NO: 684907 - DNA, 15 bp, Homo sapiens
tcctacttataagtg

SEQ ID NO: 684908 - DNA, 15 bp, Homo sapiens
cctacttataagtga

SEQ ID NO: 684909 - DNA, 15 bp, Homo sapiens
ctacttataagtgag

SEQ ID NO: 684910 - DNA, 15 bp, Homo sapiens
tacttataagtgaga

SEQ ID NO: 684911 - DNA, 15 bp, Homo sapiens
gtgagaacatgcagc

SEQ ID NO: 684912 - DNA, 15 bp, Homo sapiens
tgagaacatgcagca

SEQ ID NO: 684913 - DNA, 15 bp, Homo sapiens
gagaacatgcagcat

SEQ ID NO: 684914 - DNA, 15 bp, Homo sapiens
agaacatgcagcatt

SEQ ID NO: 684915 - DNA, 15 bp, Homo sapiens
gaacatgcagcattt

SEQ ID NO: 684916 - DNA, 15 bp, Homo sapiens
aacatgcagcatttg

SEQ ID NO: 684917 - DNA, 15 bp, Homo sapiens
acatgcagcatttgg

SEQ ID NO: 684918 - DNA, 15 bp, Homo sapiens
catgcagcatttggt

SEQ ID NO: 684919 - DNA, 15 bp, Homo sapiens
atgcagcatttggtt

SEQ ID NO: 684920 - DNA, 15 bp, Homo sapiens
tgcagcatttggttt

SEQ ID NO: 684921 - DNA, 15 bp, Homo sapiens
gcagcatttggtttt

SEQ ID NO: 684922 - DNA, 15 bp, Homo sapiens
cagcatttggttttc

SEQ ID NO: 684923 - DNA, 15 bp, Homo sapiens
agcatttggttttct

SEQ ID NO: 684924 - DNA, 15 bp, Homo sapiens
gcatttggttttctg

SEQ ID NO: 684925 - DNA, 15 bp, Homo sapiens
catttggttttctgt

SEQ ID NO: 684926 - DNA, 15 bp, Homo sapiens
atttggttttctgtt

SEQ ID NO: 684927 - DNA, 15 bp, Homo sapiens
tgcgttagtttgcta

SEQ ID NO: 684928 - DNA, 15 bp, Homo sapiens
gcgttagtttgctaa

SEQ ID NO: 684929 - DNA, 15 bp, Homo sapiens
cgttagtttgctaag

SEQ ID NO: 684930 - DNA, 15 bp, Homo sapiens
gttagtttgctaagg

SEQ ID NO: 684931 - DNA, 15 bp, Homo sapiens
ttagtttgctaagga

SEQ ID NO: 684932 - DNA, 15 bp, Homo sapiens
tagtttgctaaggat

SEQ ID NO: 684933 - DNA, 15 bp, Homo sapiens
agtttgctaaggata

SEQ ID NO: 684934 - DNA, 15 bp, Homo sapiens
gtttgctaaggataa

SEQ ID NO: 684935 - DNA, 15 bp, Homo sapiens
tttgctaaggataat

SEQ ID NO: 684936 - DNA, 15 bp, Homo sapiens
ttgctaaggataatg

SEQ ID NO: 684937 - DNA, 15 bp, Homo sapiens
tgctaaggataatgg

SEQ ID NO: 684938 - DNA, 15 bp, Homo sapiens
gctaaggataatggc

SEQ ID NO: 684939 - DNA, 15 bp, Homo sapiens
ctaaggataatggcc

SEQ ID NO: 684940 - DNA, 15 bp, Homo sapiens
taaggataatggcct

SEQ ID NO: 684941 - DNA, 15 bp, Homo sapiens
aaggataatggcctc

SEQ ID NO: 684942 - DNA, 15 bp, Homo sapiens
aggataatggcctcc

SEQ ID NO: 684943 - DNA, 15 bp, Homo sapiens
ggataatggcctcca

SEQ ID NO: 684944 - DNA, 15 bp, Homo sapiens
gataatggcctccag

SEQ ID NO: 684945 - DNA, 15 bp, Homo sapiens
ataatggcctccagc

SEQ ID NO: 684946 - DNA, 15 bp, Homo sapiens
taatggcctccagct

SEQ ID NO: 684947 - DNA, 15 bp, Homo sapiens
aatggcctccagctc

SEQ ID NO: 684948 - DNA, 15 bp, Homo sapiens
atggcctccagctct

SEQ ID NO: 684949 - DNA, 15 bp, Homo sapiens
tggcctccagctcta

SEQ ID NO: 684950 - DNA, 15 bp, Homo sapiens
ggcctccagctctat

SEQ ID NO: 684951 - DNA, 15 bp, Homo sapiens
gcctccagctctatc

SEQ ID NO: 684952 - DNA, 15 bp, Homo sapiens
cctccagctctatcc

SEQ ID NO: 684953 - DNA, 15 bp, Homo sapiens
ctccagctctatcca

SEQ ID NO: 684954 - DNA, 15 bp, Homo sapiens
tccagctctatccat

SEQ ID NO: 684955 - DNA, 15 bp, Homo sapiens
ccagctctatccatg

SEQ ID NO: 684956 - DNA, 15 bp, Homo sapiens
cagctctatccatgt

SEQ ID NO: 684957 - DNA, 15 bp, Homo sapiens
agctctatccatgtc

SEQ ID NO: 684958 - DNA, 15 bp, Homo sapiens
gctctatccatgtcc

SEQ ID NO: 684959 - DNA, 15 bp, Homo sapiens
ctctatccatgtccc

SEQ ID NO: 684960 - DNA, 15 bp, Homo sapiens
tctatccatgtccct

SEQ ID NO: 684961 - DNA, 15 bp, Homo sapiens
ctatccatgtccctg

SEQ ID NO: 684962 - DNA, 15 bp, Homo sapiens
tatccatgtccctga

SEQ ID NO: 684963 - DNA, 15 bp, Homo sapiens
atccatgtccctgaa

SEQ ID NO: 684964 - DNA, 15 bp, Homo sapiens
tccatgtccctgaaa

SEQ ID NO: 684965 - DNA, 15 bp, Homo sapiens
ccatgtccctgaaaa

SEQ ID NO: 684966 - DNA, 15 bp, Homo sapiens
catgtccctgaaaaa

SEQ ID NO: 684967 - DNA, 15 bp, Homo sapiens
atgtccctgaaaaac

SEQ ID NO: 684968 - DNA, 15 bp, Homo sapiens
tgtccctgaaaaaca

SEQ ID NO: 684969 - DNA, 15 bp, Homo sapiens
gtccctgaaaaacat

SEQ ID NO: 684970 - DNA, 15 bp, Homo sapiens
tccctgaaaaacatt

SEQ ID NO: 684971 - DNA, 15 bp, Homo sapiens
ccctgaaaaacattg

SEQ ID NO: 684972 - DNA, 15 bp, Homo sapiens
cctgaaaaacattgc

SEQ ID NO: 684973 - DNA, 15 bp, Homo sapiens
ctgaaaaacattgct

SEQ ID NO: 684974 - DNA, 15 bp, Homo sapiens
tgaaaaacattgctc

SEQ ID NO: 684975 - DNA, 15 bp, Homo sapiens
gaaaaacattgctct

SEQ ID NO: 684976 - DNA, 15 bp, Homo sapiens
aaaaacattgctctt

SEQ ID NO: 684977 - DNA, 15 bp, Homo sapiens
aaaacattgctcttt

SEQ ID NO: 684978 - DNA, 15 bp, Homo sapiens
aaacattgctctttt

SEQ ID NO: 684979 - DNA, 15 bp, Homo sapiens
aacattgctcttttt

SEQ ID NO: 684980 - DNA, 15 bp, Homo sapiens
acattgctctttttc

SEQ ID NO: 684981 - DNA, 15 bp, Homo sapiens
cattgctctttttct

SEQ ID NO: 684982 - DNA, 15 bp, Homo sapiens
attgctctttttcta

SEQ ID NO: 684983 - DNA, 15 bp, Homo sapiens
ttgctctttttctat

SEQ ID NO: 684984 - DNA, 15 bp, Homo sapiens
tgctctttttctatt

SEQ ID NO: 684985 - DNA, 15 bp, Homo sapiens
gctctttttctattc

SEQ ID NO: 684986 - DNA, 15 bp, Homo sapiens
ctctttttctattcc

SEQ ID NO: 684987 - DNA, 15 bp, Homo sapiens
tctttttctattcct

SEQ ID NO: 684988 - DNA, 15 bp, Homo sapiens
ctttttctattccta

SEQ ID NO: 684989 - DNA, 15 bp, Homo sapiens
tttttctattcctag

SEQ ID NO: 684990 - DNA, 15 bp, Homo sapiens
ttttctattcctagt

SEQ ID NO: 684991 - DNA, 15 bp, Homo sapiens
tttctattcctagtt

SEQ ID NO: 684992 - DNA, 15 bp, Homo sapiens
ttctattcctagtta

SEQ ID NO: 684993 - DNA, 15 bp, Homo sapiens
tctattcctagttat

SEQ ID NO: 684994 - DNA, 15 bp, Homo sapiens
ctattcctagttata

SEQ ID NO: 684995 - DNA, 15 bp, Homo sapiens
tattcctagttatat

SEQ ID NO: 684996 - DNA, 15 bp, Homo sapiens
attcctagttatatc

SEQ ID NO: 684997 - DNA, 15 bp, Homo sapiens
ttcctagttatatcc

SEQ ID NO: 684998 - DNA, 15 bp, Homo sapiens
tcctagttatatcca

SEQ ID NO: 684999 - DNA, 15 bp, Homo sapiens
cctagttatatccat

SEQ ID NO: 685000 - DNA, 15 bp, Homo sapiens
ctagttatatccata

SEQ ID NO: 685001 - DNA, 15 bp, Homo sapiens
tagttatatccatag

SEQ ID NO: 685002 - DNA, 15 bp, Homo sapiens
agttatatccataga

SEQ ID NO: 685003 - DNA, 15 bp, Homo sapiens
gttatatccatagaa

SEQ ID NO: 685004 - DNA, 15 bp, Homo sapiens
ttatatccatagaaa

SEQ ID NO: 685005 - DNA, 15 bp, Homo sapiens
tatatccatagaaat

SEQ ID NO: 685006 - DNA, 15 bp, Homo sapiens
atatccatagaaatg

SEQ ID NO: 685007 - DNA, 15 bp, Homo sapiens
tatccatagaaatga

SEQ ID NO: 685008 - DNA, 15 bp, Homo sapiens
atccatagaaatgac

SEQ ID NO: 685009 - DNA, 15 bp, Homo sapiens
tccatagaaatgacc

SEQ ID NO: 685010 - DNA, 15 bp, Homo sapiens
ccatagaaatgacca

SEQ ID NO: 685011 - DNA, 15 bp, Homo sapiens
catagaaatgaccat

SEQ ID NO: 685012 - DNA, 15 bp, Homo sapiens
atagaaatgaccatt

SEQ ID NO: 685013 - DNA, 15 bp, Homo sapiens
tagaaatgaccattg

SEQ ID NO: 685014 - DNA, 15 bp, Homo sapiens
agaaatgaccattga

SEQ ID NO: 685015 - DNA, 15 bp, Homo sapiens
gaaatgaccattgat

SEQ ID NO: 685016 - DNA, 15 bp, Homo sapiens
aaatgaccattgata

SEQ ID NO: 685017 - DNA, 15 bp, Homo sapiens
aatgaccattgatag

SEQ ID NO: 685018 - DNA, 15 bp, Homo sapiens
atgaccattgatagt

SEQ ID NO: 685019 - DNA, 15 bp, Homo sapiens
tgaccattgatagtt

SEQ ID NO: 685020 - DNA, 15 bp, Homo sapiens
gaccattgatagttt

SEQ ID NO: 685021 - DNA, 15 bp, Homo sapiens
accattgatagtttt

SEQ ID NO: 685022 - DNA, 15 bp, Homo sapiens
ccattgatagttttt

SEQ ID NO: 685023 - DNA, 15 bp, Homo sapiens
cattgatagtttttg

SEQ ID NO: 685024 - DNA, 15 bp, Homo sapiens
attgatagtttttgc

SEQ ID NO: 685025 - DNA, 15 bp, Homo sapiens
ttgatagtttttgct

SEQ ID NO: 685026 - DNA, 15 bp, Homo sapiens
tgatagtttttgctt

SEQ ID NO: 685027 - DNA, 15 bp, Homo sapiens
gatagtttttgctta

SEQ ID NO: 685028 - DNA, 15 bp, Homo sapiens
atagtttttgcttac

SEQ ID NO: 685029 - DNA, 15 bp, Homo sapiens
tagtttttgcttact

SEQ ID NO: 685030 - DNA, 15 bp, Homo sapiens
agtttttgcttactc

SEQ ID NO: 685031 - DNA, 15 bp, Homo sapiens
gtttttgcttactct

SEQ ID NO: 685032 - DNA, 15 bp, Homo sapiens
tttttgcttactctg

SEQ ID NO: 685033 - DNA, 15 bp, Homo sapiens
ttttgcttactctgt

SEQ ID NO: 685034 - DNA, 15 bp, Homo sapiens
tttgcttactctgtc

SEQ ID NO: 685035 - DNA, 15 bp, Homo sapiens
ttgcttactctgtcc

SEQ ID NO: 685036 - DNA, 15 bp, Homo sapiens
tgcttactctgtccc

SEQ ID NO: 685037 - DNA, 15 bp, Homo sapiens
gcttactctgtccct

SEQ ID NO: 685038 - DNA, 15 bp, Homo sapiens
cttactctgtccctc

SEQ ID NO: 685039 - DNA, 15 bp, Homo sapiens
ttactctgtccctcc

SEQ ID NO: 685040 - DNA, 15 bp, Homo sapiens
tactctgtccctcca

SEQ ID NO: 685041 - DNA, 15 bp, Homo sapiens
actctgtccctccag

SEQ ID NO: 685042 - DNA, 15 bp, Homo sapiens
ctctgtccctccagt

SEQ ID NO: 685043 - DNA, 15 bp, Homo sapiens
tctgtccctccagtt

SEQ ID NO: 685044 - DNA, 15 bp, Homo sapiens
ctgtccctccagttt

SEQ ID NO: 685045 - DNA, 15 bp, Homo sapiens
tgtccctccagtttt

SEQ ID NO: 685046 - DNA, 15 bp, Homo sapiens
gtccctccagttttt

SEQ ID NO: 685047 - DNA, 15 bp, Homo sapiens
tccctccagtttttc

SEQ ID NO: 685048 - DNA, 15 bp, Homo sapiens
ccctccagtttttcc

SEQ ID NO: 685049 - DNA, 15 bp, Homo sapiens
cctccagtttttcct

SEQ ID NO: 685050 - DNA, 15 bp, Homo sapiens
ctccagtttttcctt

SEQ ID NO: 685051 - DNA, 15 bp, Homo sapiens
tccagtttttccttc

SEQ ID NO: 685052 - DNA, 15 bp, Homo sapiens
ccagtttttccttcc

SEQ ID NO: 685053 - DNA, 15 bp, Homo sapiens
cagtttttccttcct

SEQ ID NO: 685054 - DNA, 15 bp, Homo sapiens
agtttttccttcctc

SEQ ID NO: 685055 - DNA, 15 bp, Homo sapiens
gtttttccttcctcc

SEQ ID NO: 685056 - DNA, 15 bp, Homo sapiens
tttttccttcctcca

SEQ ID NO: 685057 - DNA, 15 bp, Homo sapiens
ttttccttcctccag

SEQ ID NO: 685058 - DNA, 15 bp, Homo sapiens
tttccttcctccagc

SEQ ID NO: 685059 - DNA, 15 bp, Homo sapiens
ttccttcctccagca

SEQ ID NO: 685060 - DNA, 15 bp, Homo sapiens
tccttcctccagcat

SEQ ID NO: 685061 - DNA, 15 bp, Homo sapiens
ccttcctccagcata

SEQ ID NO: 685062 - DNA, 15 bp, Homo sapiens
cttcctccagcatat

SEQ ID NO: 685063 - DNA, 15 bp, Homo sapiens
ttcctccagcatata

SEQ ID NO: 685064 - DNA, 15 bp, Homo sapiens
tcctccagcatatac

SEQ ID NO: 685065 - DNA, 15 bp, Homo sapiens
cctccagcatataca

SEQ ID NO: 685066 - DNA, 15 bp, Homo sapiens
ctccagcatatacac

SEQ ID NO: 685067 - DNA, 15 bp, Homo sapiens
tccagcatatacaca

SEQ ID NO: 685068 - DNA, 15 bp, Homo sapiens
ccagcatatacacaa

SEQ ID NO: 685069 - DNA, 15 bp, Homo sapiens
cagcatatacacaag

SEQ ID NO: 685070 - DNA, 15 bp, Homo sapiens
agcatatacacaagg

SEQ ID NO: 685071 - DNA, 15 bp, Homo sapiens
gcatatacacaagga

SEQ ID NO: 685072 - DNA, 15 bp, Homo sapiens
catatacacaaggat

SEQ ID NO: 685073 - DNA, 15 bp, Homo sapiens
atatacacaaggatt

SEQ ID NO: 685074 - DNA, 15 bp, Homo sapiens
tatacacaaggattt

SEQ ID NO: 685075 - DNA, 15 bp, Homo sapiens
atacacaaggatttt

SEQ ID NO: 685076 - DNA, 15 bp, Homo sapiens
tacacaaggatttta

SEQ ID NO: 685077 - DNA, 15 bp, Homo sapiens
acacaaggattttaa

SEQ ID NO: 685078 - DNA, 15 bp, Homo sapiens
cacaaggattttaat

SEQ ID NO: 685079 - DNA, 15 bp, Homo sapiens
acaaggattttaatt

SEQ ID NO: 685080 - DNA, 15 bp, Homo sapiens
caaggattttaattt

SEQ ID NO: 685081 - DNA, 15 bp, Homo sapiens
aaggattttaatttt

SEQ ID NO: 685082 - DNA, 15 bp, Homo sapiens
aggattttaatttta

SEQ ID NO: 685083 - DNA, 15 bp, Homo sapiens
ggattttaattttac

SEQ ID NO: 685084 - DNA, 15 bp, Homo sapiens
gattttaattttacc

SEQ ID NO: 685085 - DNA, 15 bp, Homo sapiens
attttaattttaccc

SEQ ID NO: 685086 - DNA, 15 bp, Homo sapiens
ttttaattttaccca

SEQ ID NO: 685087 - DNA, 15 bp, Homo sapiens
tttaattttacccaa

SEQ ID NO: 685088 - DNA, 15 bp, Homo sapiens
ttaattttacccaat

SEQ ID NO: 685089 - DNA, 15 bp, Homo sapiens
taattttacccaatt

SEQ ID NO: 685090 - DNA, 15 bp, Homo sapiens
aattttacccaattg

SEQ ID NO: 685091 - DNA, 15 bp, Homo sapiens
attttacccaattga

SEQ ID NO: 685092 - DNA, 15 bp, Homo sapiens
ttttacccaattgaa

SEQ ID NO: 685093 - DNA, 15 bp, Homo sapiens
tttacccaattgaag

SEQ ID NO: 685094 - DNA, 15 bp, Homo sapiens
ttacccaattgaagt

SEQ ID NO: 685095 - DNA, 15 bp, Homo sapiens
tacccaattgaagtc

SEQ ID NO: 685096 - DNA, 15 bp, Homo sapiens
acccaattgaagtct

SEQ ID NO: 685097 - DNA, 15 bp, Homo sapiens
cccaattgaagtctt

SEQ ID NO: 685098 - DNA, 15 bp, Homo sapiens
ccaattgaagtctta

SEQ ID NO: 685099 - DNA, 15 bp, Homo sapiens
caattgaagtcttac

SEQ ID NO: 685100 - DNA, 15 bp, Homo sapiens
aattgaagtcttact

SEQ ID NO: 685101 - DNA, 15 bp, Homo sapiens
attgaagtcttactt

SEQ ID NO: 685102 - DNA, 15 bp, Homo sapiens
ttgaagtcttactta

SEQ ID NO: 685103 - DNA, 15 bp, Homo sapiens
tgaagtcttacttat

SEQ ID NO: 685104 - DNA, 15 bp, Homo sapiens
gaagtcttacttatc

SEQ ID NO: 685105 - DNA, 15 bp, Homo sapiens
aagtcttacttatct

SEQ ID NO: 685106 - DNA, 15 bp, Homo sapiens
agtcttacttatcta

SEQ ID NO: 685107 - DNA, 15 bp, Homo sapiens
gtcttacttatctac

SEQ ID NO: 685108 - DNA, 15 bp, Homo sapiens
tcttacttatctaca

SEQ ID NO: 685109 - DNA, 15 bp, Homo sapiens
cttacttatctacac

SEQ ID NO: 685110 - DNA, 15 bp, Homo sapiens
ttacttatctacacc

SEQ ID NO: 685111 - DNA, 15 bp, Homo sapiens
tacttatctacacct

SEQ ID NO: 685112 - DNA, 15 bp, Homo sapiens
acttatctacacctt

SEQ ID NO: 685113 - DNA, 15 bp, Homo sapiens
cttatctacaccttt

SEQ ID NO: 685114 - DNA, 15 bp, Homo sapiens
ttatctacacctttt

SEQ ID NO: 685115 - DNA, 15 bp, Homo sapiens
tatctacacctttta

SEQ ID NO: 685116 - DNA, 15 bp, Homo sapiens
atctacaccttttaa

SEQ ID NO: 685117 - DNA, 15 bp, Homo sapiens
tctacaccttttaac

SEQ ID NO: 685118 - DNA, 15 bp, Homo sapiens
ctacaccttttaaca

SEQ ID NO: 685119 - DNA, 15 bp, Homo sapiens
tacaccttttaacaa

SEQ ID NO: 685120 - DNA, 15 bp, Homo sapiens
acaccttttaacaag

SEQ ID NO: 685121 - DNA, 15 bp, Homo sapiens
caccttttaacaagt

SEQ ID NO: 685122 - DNA, 15 bp, Homo sapiens
accttttaacaagtc

SEQ ID NO: 685123 - DNA, 15 bp, Homo sapiens
ccttttaacaagtca

SEQ ID NO: 685124 - DNA, 15 bp, Homo sapiens
cttttaacaagtcat

SEQ ID NO: 685125 - DNA, 15 bp, Homo sapiens
ttttaacaagtcatc

SEQ ID NO: 685126 - DNA, 15 bp, Homo sapiens
tttaacaagtcatca

SEQ ID NO: 685127 - DNA, 15 bp, Homo sapiens
ttaacaagtcatcat

SEQ ID NO: 685128 - DNA, 15 bp, Homo sapiens
taacaagtcatcatc

SEQ ID NO: 685129 - DNA, 15 bp, Homo sapiens
aacaagtcatcatca

SEQ ID NO: 685130 - DNA, 15 bp, Homo sapiens
acaagtcatcatcag

SEQ ID NO: 685131 - DNA, 15 bp, Homo sapiens
caagtcatcatcagt

SEQ ID NO: 685132 - DNA, 15 bp, Homo sapiens
aagtcatcatcagta

SEQ ID NO: 685133 - DNA, 15 bp, Homo sapiens
agtcatcatcagtaa

SEQ ID NO: 685134 - DNA, 15 bp, Homo sapiens
gtcatcatcagtaat

SEQ ID NO: 685135 - DNA, 15 bp, Homo sapiens
tcatcatcagtaatt

SEQ ID NO: 685136 - DNA, 15 bp, Homo sapiens
catcatcagtaattt

SEQ ID NO: 685137 - DNA, 15 bp, Homo sapiens
atcatcagtaatttt

SEQ ID NO: 685138 - DNA, 15 bp, Homo sapiens
tcatcagtaattttg

SEQ ID NO: 685139 - DNA, 15 bp, Homo sapiens
catcagtaattttgg

SEQ ID NO: 685140 - DNA, 15 bp, Homo sapiens
atcagtaattttgga

SEQ ID NO: 685141 - DNA, 15 bp, Homo sapiens
tcagtaattttggaa

SEQ ID NO: 685142 - DNA, 15 bp, Homo sapiens
cagtaattttggaat

SEQ ID NO: 685143 - DNA, 15 bp, Homo sapiens
agtaattttggaata

SEQ ID NO: 685144 - DNA, 15 bp, Homo sapiens
gtaattttggaatag

SEQ ID NO: 685145 - DNA, 15 bp, Homo sapiens
taattttggaatagg

SEQ ID NO: 685146 - DNA, 15 bp, Homo sapiens
aattttggaataggc

SEQ ID NO: 685147 - DNA, 15 bp, Homo sapiens
attttggaataggca

SEQ ID NO: 685148 - DNA, 15 bp, Homo sapiens
ttttggaataggcat

SEQ ID NO: 685149 - DNA, 15 bp, Homo sapiens
tttggaataggcatt

SEQ ID NO: 685150 - DNA, 15 bp, Homo sapiens
ttggaataggcatta

SEQ ID NO: 685151 - DNA, 15 bp, Homo sapiens
tggaataggcattag

SEQ ID NO: 685152 - DNA, 15 bp, Homo sapiens
ggaataggcattaga

SEQ ID NO: 685153 - DNA, 15 bp, Homo sapiens
gaataggcattagat

SEQ ID NO: 685154 - DNA, 15 bp, Homo sapiens
aataggcattagatt

SEQ ID NO: 685155 - DNA, 15 bp, Homo sapiens
ataggcattagattc

SEQ ID NO: 685156 - DNA, 15 bp, Homo sapiens
taggcattagattca

SEQ ID NO: 685157 - DNA, 15 bp, Homo sapiens
aggcattagattcac

SEQ ID NO: 685158 - DNA, 15 bp, Homo sapiens
ggcattagattcaca

SEQ ID NO: 685159 - DNA, 15 bp, Homo sapiens
gcattagattcacat

SEQ ID NO: 685160 - DNA, 15 bp, Homo sapiens
cattagattcacatg

SEQ ID NO: 685161 - DNA, 15 bp, Homo sapiens
attagattcacatgg

SEQ ID NO: 685162 - DNA, 15 bp, Homo sapiens
ttagattcacatggt

SEQ ID NO: 685163 - DNA, 15 bp, Homo sapiens
tagattcacatggtt

SEQ ID NO: 685164 - DNA, 15 bp, Homo sapiens
agattcacatggttc

SEQ ID NO: 685165 - DNA, 15 bp, Homo sapiens
gattcacatggttca

SEQ ID NO: 685166 - DNA, 15 bp, Homo sapiens
attcacatggttcaa

SEQ ID NO: 685167 - DNA, 15 bp, Homo sapiens
ttcacatggttcaag

SEQ ID NO: 685168 - DNA, 15 bp, Homo sapiens
tcacatggttcaaga

SEQ ID NO: 685169 - DNA, 15 bp, Homo sapiens
cacatggttcaagat

SEQ ID NO: 685170 - DNA, 15 bp, Homo sapiens
acatggttcaagatt

SEQ ID NO: 685171 - DNA, 15 bp, Homo sapiens
catggttcaagattc

SEQ ID NO: 685172 - DNA, 15 bp, Homo sapiens
atggttcaagattca

SEQ ID NO: 685173 - DNA, 15 bp, Homo sapiens
tggttcaagattcaa

SEQ ID NO: 685174 - DNA, 15 bp, Homo sapiens
ggttcaagattcaaa

SEQ ID NO: 685175 - DNA, 15 bp, Homo sapiens
gttcaagattcaaac

SEQ ID NO: 685176 - DNA, 15 bp, Homo sapiens
ttcaagattcaaacg

SEQ ID NO: 685177 - DNA, 15 bp, Homo sapiens
tcaagattcaaacga

SEQ ID NO: 685178 - DNA, 15 bp, Homo sapiens
caagattcaaacgaa

SEQ ID NO: 685179 - DNA, 15 bp, Homo sapiens
aagattcaaacgaaa

SEQ ID NO: 685180 - DNA, 15 bp, Homo sapiens
agattcaaacgaaag

SEQ ID NO: 685181 - DNA, 15 bp, Homo sapiens
gattcaaacgaaaga

SEQ ID NO: 685182 - DNA, 15 bp, Homo sapiens
attcaaacgaaagaa

SEQ ID NO: 685183 - DNA, 15 bp, Homo sapiens
ttcaaacgaaagaaa

SEQ ID NO: 685184 - DNA, 15 bp, Homo sapiens
tcaaacgaaagaaaa

SEQ ID NO: 685185 - DNA, 15 bp, Homo sapiens
caaacgaaagaaaag

SEQ ID NO: 685186 - DNA, 15 bp, Homo sapiens
aaacgaaagaaaagt

SEQ ID NO: 685187 - DNA, 15 bp, Homo sapiens
aacgaaagaaaagta

SEQ ID NO: 685188 - DNA, 15 bp, Homo sapiens
acgaaagaaaagtat

SEQ ID NO: 685189 - DNA, 15 bp, Homo sapiens
cgaaagaaaagtata

SEQ ID NO: 685190 - DNA, 15 bp, Homo sapiens
gaaagaaaagtataa

SEQ ID NO: 685191 - DNA, 15 bp, Homo sapiens
aaagaaaagtataaa

SEQ ID NO: 685192 - DNA, 15 bp, Homo sapiens
aagaaaagtataaac

SEQ ID NO: 685193 - DNA, 15 bp, Homo sapiens
agaaaagtataaaca

SEQ ID NO: 685194 - DNA, 15 bp, Homo sapiens
gaaaagtataaacag

SEQ ID NO: 685195 - DNA, 15 bp, Homo sapiens
aaaagtataaacagt

SEQ ID NO: 685196 - DNA, 15 bp, Homo sapiens
aaagtataaacagta

SEQ ID NO: 685197 - DNA, 15 bp, Homo sapiens
aagtataaacagtaa

SEQ ID NO: 685198 - DNA, 15 bp, Homo sapiens
agtataaacagtaaa

SEQ ID NO: 685199 - DNA, 15 bp, Homo sapiens
gtataaacagtaaaa

SEQ ID NO: 685200 - DNA, 15 bp, Homo sapiens
tataaacagtaaaaa

SEQ ID NO: 685201 - DNA, 15 bp, Homo sapiens
ataaacagtaaaaag

SEQ ID NO: 685202 - DNA, 15 bp, Homo sapiens
taaacagtaaaaagt

SEQ ID NO: 685203 - DNA, 15 bp, Homo sapiens
aaacagtaaaaagtc

SEQ ID NO: 685204 - DNA, 15 bp, Homo sapiens
aacagtaaaaagtct

SEQ ID NO: 685205 - DNA, 15 bp, Homo sapiens
acagtaaaaagtctc

SEQ ID NO: 685206 - DNA, 15 bp, Homo sapiens
cagtaaaaagtctcc

SEQ ID NO: 685207 - DNA, 15 bp, Homo sapiens
agtaaaaagtctcct

SEQ ID NO: 685208 - DNA, 15 bp, Homo sapiens
gtaaaaagtctcctc

SEQ ID NO: 685209 - DNA, 15 bp, Homo sapiens
taaaaagtctcctca

SEQ ID NO: 685210 - DNA, 15 bp, Homo sapiens
aaaaagtctcctcat

SEQ ID NO: 685211 - DNA, 15 bp, Homo sapiens
aaaagtctcctcatt

SEQ ID NO: 685212 - DNA, 15 bp, Homo sapiens
aaagtctcctcattc

SEQ ID NO: 685213 - DNA, 15 bp, Homo sapiens
aagtctcctcattcc

SEQ ID NO: 685214 - DNA, 15 bp, Homo sapiens
agtctcctcattcct

SEQ ID NO: 685215 - DNA, 15 bp, Homo sapiens
gtctcctcattcctt

SEQ ID NO: 685216 - DNA, 15 bp, Homo sapiens
tctcctcattccttt

SEQ ID NO: 685217 - DNA, 15 bp, Homo sapiens
ctcctcattcctttc

SEQ ID NO: 685218 - DNA, 15 bp, Homo sapiens
tcctcattcctttcc

SEQ ID NO: 685219 - DNA, 15 bp, Homo sapiens
cctcattcctttccc

SEQ ID NO: 685220 - DNA, 15 bp, Homo sapiens
ctcattcctttccct

SEQ ID NO: 685221 - DNA, 15 bp, Homo sapiens
tcattcctttcccta

SEQ ID NO: 685222 - DNA, 15 bp, Homo sapiens
cattcctttccctaa

SEQ ID NO: 685223 - DNA, 15 bp, Homo sapiens
attcctttccctaag

SEQ ID NO: 685224 - DNA, 15 bp, Homo sapiens
ttcctttccctaagc

SEQ ID NO: 685225 - DNA, 15 bp, Homo sapiens
tcctttccctaagcc

SEQ ID NO: 685226 - DNA, 15 bp, Homo sapiens
cctttccctaagcca

SEQ ID NO: 685227 - DNA, 15 bp, Homo sapiens
ctttccctaagccac

SEQ ID NO: 685228 - DNA, 15 bp, Homo sapiens
tttccctaagccacc

SEQ ID NO: 685229 - DNA, 15 bp, Homo sapiens
ttccctaagccaccc

SEQ ID NO: 685230 - DNA, 15 bp, Homo sapiens
tccctaagccaccca

SEQ ID NO: 685231 - DNA, 15 bp, Homo sapiens
ccctaagccacccac

SEQ ID NO: 685232 - DNA, 15 bp, Homo sapiens
cctaagccacccact

SEQ ID NO: 685233 - DNA, 15 bp, Homo sapiens
ctaagccacccactt

SEQ ID NO: 685234 - DNA, 15 bp, Homo sapiens
taagccacccacttc

SEQ ID NO: 685235 - DNA, 15 bp, Homo sapiens
aagccacccacttct

SEQ ID NO: 685236 - DNA, 15 bp, Homo sapiens
agccacccacttctc

SEQ ID NO: 685237 - DNA, 15 bp, Homo sapiens
gccacccacttctct

SEQ ID NO: 685238 - DNA, 15 bp, Homo sapiens
ccacccacttctctt

SEQ ID NO: 685239 - DNA, 15 bp, Homo sapiens
cacccacttctcttc

SEQ ID NO: 685240 - DNA, 15 bp, Homo sapiens
acccacttctcttca

SEQ ID NO: 685241 - DNA, 15 bp, Homo sapiens
cccacttctcttcag

SEQ ID NO: 685242 - DNA, 15 bp, Homo sapiens
ccacttctcttcaga

SEQ ID NO: 685243 - DNA, 15 bp, Homo sapiens
cacttctcttcagag

SEQ ID NO: 685244 - DNA, 15 bp, Homo sapiens
acttctcttcagagg

SEQ ID NO: 685245 - DNA, 15 bp, Homo sapiens
cttctcttcagaggc

SEQ ID NO: 685246 - DNA, 15 bp, Homo sapiens
ttctcttcagaggca

SEQ ID NO: 685247 - DNA, 15 bp, Homo sapiens
tctcttcagaggcaa

SEQ ID NO: 685248 - DNA, 15 bp, Homo sapiens
ctcttcagaggcaac

SEQ ID NO: 685249 - DNA, 15 bp, Homo sapiens
tcttcagaggcaact

SEQ ID NO: 685250 - DNA, 15 bp, Homo sapiens
cttcagaggcaacta

SEQ ID NO: 685251 - DNA, 15 bp, Homo sapiens
ttcagaggcaactaa

SEQ ID NO: 685252 - DNA, 15 bp, Homo sapiens
tcagaggcaactaat

SEQ ID NO: 685253 - DNA, 15 bp, Homo sapiens
cagaggcaactaata

SEQ ID NO: 685254 - DNA, 15 bp, Homo sapiens
agaggcaactaataa

SEQ ID NO: 685255 - DNA, 15 bp, Homo sapiens
gaggcaactaataaa

SEQ ID NO: 685256 - DNA, 15 bp, Homo sapiens
aggcaactaataaaa

SEQ ID NO: 685257 - DNA, 15 bp, Homo sapiens
ggcaactaataaaag

SEQ ID NO: 685258 - DNA, 15 bp, Homo sapiens
gcaactaataaaagt

SEQ ID NO: 685259 - DNA, 15 bp, Homo sapiens
caactaataaaagtt

SEQ ID NO: 685260 - DNA, 15 bp, Homo sapiens
aactaataaaagttt

SEQ ID NO: 685261 - DNA, 15 bp, Homo sapiens
actaataaaagtttc

SEQ ID NO: 685262 - DNA, 15 bp, Homo sapiens
ctaataaaagtttct

SEQ ID NO: 685263 - DNA, 15 bp, Homo sapiens
taataaaagtttcta

SEQ ID NO: 685264 - DNA, 15 bp, Homo sapiens
aataaaagtttctag

SEQ ID NO: 685265 - DNA, 15 bp, Homo sapiens
ataaaagtttctagt

SEQ ID NO: 685266 - DNA, 15 bp, Homo sapiens
taaaagtttctagtt

SEQ ID NO: 685267 - DNA, 15 bp, Homo sapiens
aaaagtttctagttt

SEQ ID NO: 685268 - DNA, 15 bp, Homo sapiens
aaagtttctagtttt

SEQ ID NO: 685269 - DNA, 15 bp, Homo sapiens
aagtttctagttttg

SEQ ID NO: 685270 - DNA, 15 bp, Homo sapiens
agtttctagttttgc

SEQ ID NO: 685271 - DNA, 15 bp, Homo sapiens
gtttctagttttgca

SEQ ID NO: 685272 - DNA, 15 bp, Homo sapiens
tttctagttttgcat

SEQ ID NO: 685273 - DNA, 15 bp, Homo sapiens
ttctagttttgcatt

SEQ ID NO: 685274 - DNA, 15 bp, Homo sapiens
tctagttttgcatta

SEQ ID NO: 685275 - DNA, 15 bp, Homo sapiens
ctagttttgcattat

SEQ ID NO: 685276 - DNA, 15 bp, Homo sapiens
tagttttgcattatt

SEQ ID NO: 685277 - DNA, 15 bp, Homo sapiens
agttttgcattattc

SEQ ID NO: 685278 - DNA, 15 bp, Homo sapiens
gttttgcattattct

SEQ ID NO: 685279 - DNA, 15 bp, Homo sapiens
ttttgcattattcta

SEQ ID NO: 685280 - DNA, 15 bp, Homo sapiens
tttgcattattctac

SEQ ID NO: 685281 - DNA, 15 bp, Homo sapiens
ttgcattattctaca

SEQ ID NO: 685282 - DNA, 15 bp, Homo sapiens
tgcattattctacac

SEQ ID NO: 685283 - DNA, 15 bp, Homo sapiens
gcattattctacacc

SEQ ID NO: 685284 - DNA, 15 bp, Homo sapiens
cattattctacacct

SEQ ID NO: 685285 - DNA, 15 bp, Homo sapiens
attattctacacctt

SEQ ID NO: 685286 - DNA, 15 bp, Homo sapiens
ttattctacaccttg

SEQ ID NO: 685287 - DNA, 15 bp, Homo sapiens
tattctacaccttgc

SEQ ID NO: 685288 - DNA, 15 bp, Homo sapiens
attctacaccttgct

SEQ ID NO: 685289 - DNA, 15 bp, Homo sapiens
ttctacaccttgctt

SEQ ID NO: 685290 - DNA, 15 bp, Homo sapiens
tctacaccttgcttt

SEQ ID NO: 685291 - DNA, 15 bp, Homo sapiens
ctacaccttgctttt

SEQ ID NO: 685292 - DNA, 15 bp, Homo sapiens
tacaccttgcttttt

SEQ ID NO: 685293 - DNA, 15 bp, Homo sapiens
acaccttgctttttt

SEQ ID NO: 685294 - DNA, 15 bp, Homo sapiens
caccttgcttttttc

SEQ ID NO: 685295 - DNA, 15 bp, Homo sapiens
accttgcttttttca

SEQ ID NO: 685296 - DNA, 15 bp, Homo sapiens
ccttgcttttttcat

SEQ ID NO: 685297 - DNA, 15 bp, Homo sapiens
cttgcttttttcatt

SEQ ID NO: 685298 - DNA, 15 bp, Homo sapiens
ttgcttttttcattt

SEQ ID NO: 685299 - DNA, 15 bp, Homo sapiens
tgcttttttcattta

SEQ ID NO: 685300 - DNA, 15 bp, Homo sapiens
gcttttttcatttag

SEQ ID NO: 685301 - DNA, 15 bp, Homo sapiens
cttttttcatttagc

SEQ ID NO: 685302 - DNA, 15 bp, Homo sapiens
ttttttcatttagca

SEQ ID NO: 685303 - DNA, 15 bp, Homo sapiens
tttttcatttagcaa

SEQ ID NO: 685304 - DNA, 15 bp, Homo sapiens
ttttcatttagcaat

SEQ ID NO: 685305 - DNA, 15 bp, Homo sapiens
tttcatttagcaata

SEQ ID NO: 685306 - DNA, 15 bp, Homo sapiens
ttcatttagcaatat

SEQ ID NO: 685307 - DNA, 15 bp, Homo sapiens
tcatttagcaatata

SEQ ID NO: 685308 - DNA, 15 bp, Homo sapiens
catttagcaatatat

SEQ ID NO: 685309 - DNA, 15 bp, Homo sapiens
atttagcaatatatc

SEQ ID NO: 685310 - DNA, 15 bp, Homo sapiens
tttagcaatatatct

SEQ ID NO: 685311 - DNA, 15 bp, Homo sapiens
ttagcaatatatctt

SEQ ID NO: 685312 - DNA, 15 bp, Homo sapiens
tagcaatatatcttg

SEQ ID NO: 685313 - DNA, 15 bp, Homo sapiens
agcaatatatcttga

SEQ ID NO: 685314 - DNA, 15 bp, Homo sapiens
gcaatatatcttgaa

SEQ ID NO: 685315 - DNA, 15 bp, Homo sapiens
caatatatcttgaag

SEQ ID NO: 685316 - DNA, 15 bp, Homo sapiens
aatatatcttgaaga

SEQ ID NO: 685317 - DNA, 15 bp, Homo sapiens
atatatcttgaagag

SEQ ID NO: 685318 - DNA, 15 bp, Homo sapiens
tatatcttgaagagc

SEQ ID NO: 685319 - DNA, 15 bp, Homo sapiens
atatcttgaagagca

SEQ ID NO: 685320 - DNA, 15 bp, Homo sapiens
tatcttgaagagcac

SEQ ID NO: 685321 - DNA, 15 bp, Homo sapiens
atcttgaagagcaca

SEQ ID NO: 685322 - DNA, 15 bp, Homo sapiens
tcttgaagagcacat

SEQ ID NO: 685323 - DNA, 15 bp, Homo sapiens
cttgaagagcacatc

SEQ ID NO: 685324 - DNA, 15 bp, Homo sapiens
ttgaagagcacatct

SEQ ID NO: 685325 - DNA, 15 bp, Homo sapiens
tgaagagcacatctc

SEQ ID NO: 685326 - DNA, 15 bp, Homo sapiens
gaagagcacatctcc

SEQ ID NO: 685327 - DNA, 15 bp, Homo sapiens
aagagcacatctccc

SEQ ID NO: 685328 - DNA, 15 bp, Homo sapiens
agagcacatctccct

SEQ ID NO: 685329 - DNA, 15 bp, Homo sapiens
gagcacatctccctc

SEQ ID NO: 685330 - DNA, 15 bp, Homo sapiens
agcacatctccctct

SEQ ID NO: 685331 - DNA, 15 bp, Homo sapiens
gcacatctccctctg

SEQ ID NO: 685332 - DNA, 15 bp, Homo sapiens
cacatctccctctgt

SEQ ID NO: 685333 - DNA, 15 bp, Homo sapiens
acatctccctctgta

SEQ ID NO: 685334 - DNA, 15 bp, Homo sapiens
catctccctctgtat

SEQ ID NO: 685335 - DNA, 15 bp, Homo sapiens
atctccctctgtatt

SEQ ID NO: 685336 - DNA, 15 bp, Homo sapiens
tctccctctgtattt

SEQ ID NO: 685337 - DNA, 15 bp, Homo sapiens
ctccctctgtattta

SEQ ID NO: 685338 - DNA, 15 bp, Homo sapiens
tccctctgtatttag

SEQ ID NO: 685339 - DNA, 15 bp, Homo sapiens
ccctctgtatttagc

SEQ ID NO: 685340 - DNA, 15 bp, Homo sapiens
cctctgtatttagct

SEQ ID NO: 685341 - DNA, 15 bp, Homo sapiens
ctctgtatttagctt

SEQ ID NO: 685342 - DNA, 15 bp, Homo sapiens
tctgtatttagctta

SEQ ID NO: 685343 - DNA, 15 bp, Homo sapiens
ctgtatttagcttaa

SEQ ID NO: 685344 - DNA, 15 bp, Homo sapiens
tgtatttagcttaat

SEQ ID NO: 685345 - DNA, 15 bp, Homo sapiens
gtatttagcttaatc

SEQ ID NO: 685346 - DNA, 15 bp, Homo sapiens
tatttagcttaatcc

SEQ ID NO: 685347 - DNA, 15 bp, Homo sapiens
atttagcttaatcct

SEQ ID NO: 685348 - DNA, 15 bp, Homo sapiens
tttagcttaatcctt

SEQ ID NO: 685349 - DNA, 15 bp, Homo sapiens
ttagcttaatccttt

SEQ ID NO: 685350 - DNA, 15 bp, Homo sapiens
tagcttaatcctttt

SEQ ID NO: 685351 - DNA, 15 bp, Homo sapiens
agcttaatcctttta

SEQ ID NO: 685352 - DNA, 15 bp, Homo sapiens
gcttaatccttttag

SEQ ID NO: 685353 - DNA, 15 bp, Homo sapiens
cttaatccttttagt

SEQ ID NO: 685354 - DNA, 15 bp, Homo sapiens
ttaatccttttagtg

SEQ ID NO: 685355 - DNA, 15 bp, Homo sapiens
taatccttttagtgg

SEQ ID NO: 685356 - DNA, 15 bp, Homo sapiens
aatccttttagtgga

SEQ ID NO: 685357 - DNA, 15 bp, Homo sapiens
atccttttagtggat

SEQ ID NO: 685358 - DNA, 15 bp, Homo sapiens
tccttttagtggatt

SEQ ID NO: 685359 - DNA, 15 bp, Homo sapiens
ccttttagtggattt

SEQ ID NO: 685360 - DNA, 15 bp, Homo sapiens
cttttagtggatttt

SEQ ID NO: 685361 - DNA, 15 bp, Homo sapiens
ttttagtggattttt

SEQ ID NO: 685362 - DNA, 15 bp, Homo sapiens
tttagtggatttttt

SEQ ID NO: 685363 - DNA, 15 bp, Homo sapiens
ttagtggattttttt

SEQ ID NO: 685364 - DNA, 15 bp, Homo sapiens
tagtggatttttttt

SEQ ID NO: 685365 - DNA, 15 bp, Homo sapiens
agtggattttttttt

SEQ ID NO: 685366 - DNA, 15 bp, Homo sapiens
gtggatttttttttt

SEQ ID NO: 685367 - DNA, 15 bp, Homo sapiens
tggatttttttttta

SEQ ID NO: 685368 - DNA, 15 bp, Homo sapiens
ggattttttttttat

SEQ ID NO: 685369 - DNA, 15 bp, Homo sapiens
gattttttttttatt

SEQ ID NO: 685370 - DNA, 15 bp, Homo sapiens
attttttttttattt

SEQ ID NO: 685371 - DNA, 15 bp, Homo sapiens
ttttttttttatttt

SEQ ID NO: 685372 - DNA, 15 bp, Homo sapiens
tttttttttattttt

SEQ ID NO: 685373 - DNA, 15 bp, Homo sapiens
ttttttttatttttt

SEQ ID NO: 685374 - DNA, 15 bp, Homo sapiens
tttttttattttttg

SEQ ID NO: 685375 - DNA, 15 bp, Homo sapiens
ttttttattttttgg

SEQ ID NO: 685376 - DNA, 15 bp, Homo sapiens
tttttattttttggg

SEQ ID NO: 685377 - DNA, 15 bp, Homo sapiens
ttttattttttgggt

SEQ ID NO: 685378 - DNA, 15 bp, Homo sapiens
tttattttttgggta

SEQ ID NO: 685379 - DNA, 15 bp, Homo sapiens
ttattttttgggtat

SEQ ID NO: 685380 - DNA, 15 bp, Homo sapiens
tattttttgggtata

SEQ ID NO: 685381 - DNA, 15 bp, Homo sapiens
attttttgggtatat

SEQ ID NO: 685382 - DNA, 15 bp, Homo sapiens
ttttttgggtatatc

SEQ ID NO: 685383 - DNA, 15 bp, Homo sapiens
tttttgggtatatca

SEQ ID NO: 685384 - DNA, 15 bp, Homo sapiens
ttttgggtatatcat

SEQ ID NO: 685385 - DNA, 15 bp, Homo sapiens
tttgggtatatcata

SEQ ID NO: 685386 - DNA, 15 bp, Homo sapiens
ttgggtatatcataa

SEQ ID NO: 685387 - DNA, 15 bp, Homo sapiens
tgggtatatcataat

SEQ ID NO: 685388 - DNA, 15 bp, Homo sapiens
gggtatatcataatt

SEQ ID NO: 685389 - DNA, 15 bp, Homo sapiens
ggtatatcataattt

SEQ ID NO: 685390 - DNA, 15 bp, Homo sapiens
gtatatcataattta

SEQ ID NO: 685391 - DNA, 15 bp, Homo sapiens
tatatcataatttat

SEQ ID NO: 685392 - DNA, 15 bp, Homo sapiens
atatcataatttatt

SEQ ID NO: 685393 - DNA, 15 bp, Homo sapiens
tatcataatttattt

SEQ ID NO: 685394 - DNA, 15 bp, Homo sapiens
atcataatttattta

SEQ ID NO: 685395 - DNA, 15 bp, Homo sapiens
tcataatttatttat

SEQ ID NO: 685396 - DNA, 15 bp, Homo sapiens
cataatttatttatg

SEQ ID NO: 685397 - DNA, 15 bp, Homo sapiens
ataatttatttatga

SEQ ID NO: 685398 - DNA, 15 bp, Homo sapiens
taatttatttatgaa

SEQ ID NO: 685399 - DNA, 15 bp, Homo sapiens
aatttatttatgaat

SEQ ID NO: 685400 - DNA, 15 bp, Homo sapiens
atttatttatgaatt

SEQ ID NO: 685401 - DNA, 15 bp, Homo sapiens
tttatttatgaattt

SEQ ID NO: 685402 - DNA, 15 bp, Homo sapiens
ttatttatgaatttc

SEQ ID NO: 685403 - DNA, 15 bp, Homo sapiens
tatttatgaatttca

SEQ ID NO: 685404 - DNA, 15 bp, Homo sapiens
atttatgaatttcat

SEQ ID NO: 685405 - DNA, 15 bp, Homo sapiens
tttatgaatttcatt

SEQ ID NO: 685406 - DNA, 15 bp, Homo sapiens
ttatgaatttcattg

SEQ ID NO: 685407 - DNA, 15 bp, Homo sapiens
tatgaatttcattgt

SEQ ID NO: 685408 - DNA, 15 bp, Homo sapiens
atgaatttcattgtt

SEQ ID NO: 685409 - DNA, 15 bp, Homo sapiens
tgaatttcattgttg

SEQ ID NO: 685410 - DNA, 15 bp, Homo sapiens
gaatttcattgttga

SEQ ID NO: 685411 - DNA, 15 bp, Homo sapiens
aatttcattgttgag

SEQ ID NO: 685412 - DNA, 15 bp, Homo sapiens
atttcattgttgaga

SEQ ID NO: 685413 - DNA, 15 bp, Homo sapiens
tttcattgttgagag

SEQ ID NO: 685414 - DNA, 15 bp, Homo sapiens
ttcattgttgagaga

SEQ ID NO: 685415 - DNA, 15 bp, Homo sapiens
tcattgttgagagac

SEQ ID NO: 685416 - DNA, 15 bp, Homo sapiens
cattgttgagagaca

SEQ ID NO: 685417 - DNA, 15 bp, Homo sapiens
attgttgagagacat

SEQ ID NO: 685418 - DNA, 15 bp, Homo sapiens
ttgttgagagacatt

SEQ ID NO: 685419 - DNA, 15 bp, Homo sapiens
tgttgagagacattt

SEQ ID NO: 685420 - DNA, 15 bp, Homo sapiens
gttgagagacattta

SEQ ID NO: 685421 - DNA, 15 bp, Homo sapiens
ttgagagacatttag

SEQ ID NO: 685422 - DNA, 15 bp, Homo sapiens
tgagagacatttagt

SEQ ID NO: 685423 - DNA, 15 bp, Homo sapiens
gagagacatttagtt

SEQ ID NO: 685424 - DNA, 15 bp, Homo sapiens
agagacatttagttt

SEQ ID NO: 685425 - DNA, 15 bp, Homo sapiens
gagacatttagtttg

SEQ ID NO: 685426 - DNA, 15 bp, Homo sapiens
agacatttagtttgt

SEQ ID NO: 685427 - DNA, 15 bp, Homo sapiens
gacatttagtttgtt

SEQ ID NO: 685428 - DNA, 15 bp, Homo sapiens
acatttagtttgttt

SEQ ID NO: 685429 - DNA, 15 bp, Homo sapiens
catttagtttgtttt

SEQ ID NO: 685430 - DNA, 15 bp, Homo sapiens
atttagtttgttttt

SEQ ID NO: 685431 - DNA, 15 bp, Homo sapiens
tttagtttgtttttg

SEQ ID NO: 685432 - DNA, 15 bp, Homo sapiens
ttagtttgtttttga

SEQ ID NO: 685433 - DNA, 15 bp, Homo sapiens
tagtttgtttttgaa

SEQ ID NO: 685434 - DNA, 15 bp, Homo sapiens
agtttgtttttgaat

SEQ ID NO: 685435 - DNA, 15 bp, Homo sapiens
gtttgtttttgaatg

SEQ ID NO: 685436 - DNA, 15 bp, Homo sapiens
tttgtttttgaatgt

SEQ ID NO: 685437 - DNA, 15 bp, Homo sapiens
ttgtttttgaatgtg

SEQ ID NO: 685438 - DNA, 15 bp, Homo sapiens
tgtttttgaatgtgt

SEQ ID NO: 685439 - DNA, 15 bp, Homo sapiens
gtttttgaatgtgta

SEQ ID NO: 685440 - DNA, 15 bp, Homo sapiens
tttttgaatgtgtaa

SEQ ID NO: 685441 - DNA, 15 bp, Homo sapiens
ttttgaatgtgtaat

SEQ ID NO: 685442 - DNA, 15 bp, Homo sapiens
tttgaatgtgtaata

SEQ ID NO: 685443 - DNA, 15 bp, Homo sapiens
ttgaatgtgtaatac

SEQ ID NO: 685444 - DNA, 15 bp, Homo sapiens
tgaatgtgtaatact

SEQ ID NO: 685445 - DNA, 15 bp, Homo sapiens
gaatgtgtaatacta

SEQ ID NO: 685446 - DNA, 15 bp, Homo sapiens
aatgtgtaatactac

SEQ ID NO: 685447 - DNA, 15 bp, Homo sapiens
atgtgtaatactaca

SEQ ID NO: 685448 - DNA, 15 bp, Homo sapiens
tgtgtaatactacaa

SEQ ID NO: 685449 - DNA, 15 bp, Homo sapiens
gtgtaatactacaaa

SEQ ID NO: 685450 - DNA, 15 bp, Homo sapiens
tgtaatactacaaac

SEQ ID NO: 685451 - DNA, 15 bp, Homo sapiens
gtaatactacaaacc

SEQ ID NO: 685452 - DNA, 15 bp, Homo sapiens
taatactacaaaccg

SEQ ID NO: 685453 - DNA, 15 bp, Homo sapiens
aatactacaaaccgt

SEQ ID NO: 685454 - DNA, 15 bp, Homo sapiens
atactacaaaccgtt

SEQ ID NO: 685455 - DNA, 15 bp, Homo sapiens
tactacaaaccgttg

SEQ ID NO: 685456 - DNA, 15 bp, Homo sapiens
actacaaaccgttgc

SEQ ID NO: 685457 - DNA, 15 bp, Homo sapiens
ctacaaaccgttgcg

SEQ ID NO: 685458 - DNA, 15 bp, Homo sapiens
tacaaaccgttgcgg

SEQ ID NO: 685459 - DNA, 15 bp, Homo sapiens
acaaaccgttgcggt

SEQ ID NO: 685460 - DNA, 15 bp, Homo sapiens
caaaccgttgcggtg

SEQ ID NO: 685461 - DNA, 15 bp, Homo sapiens
aaaccgttgcggtga

SEQ ID NO: 685462 - DNA, 15 bp, Homo sapiens
aaccgttgcggtgaa

SEQ ID NO: 685463 - DNA, 15 bp, Homo sapiens
accgttgcggtgaat

SEQ ID NO: 685464 - DNA, 15 bp, Homo sapiens
ccgttgcggtgaatt

SEQ ID NO: 685465 - DNA, 15 bp, Homo sapiens
cgttgcggtgaatta

SEQ ID NO: 685466 - DNA, 15 bp, Homo sapiens
gttgcggtgaattat

SEQ ID NO: 685467 - DNA, 15 bp, Homo sapiens
ttgcggtgaattatc

SEQ ID NO: 685468 - DNA, 15 bp, Homo sapiens
tgcggtgaattatcc

SEQ ID NO: 685469 - DNA, 15 bp, Homo sapiens
gcggtgaattatcct

SEQ ID NO: 685470 - DNA, 15 bp, Homo sapiens
cggtgaattatcctt

SEQ ID NO: 685471 - DNA, 15 bp, Homo sapiens
ggtgaattatcctta

SEQ ID NO: 685472 - DNA, 15 bp, Homo sapiens
gtgaattatccttat

SEQ ID NO: 685473 - DNA, 15 bp, Homo sapiens
tgaattatccttata

SEQ ID NO: 685474 - DNA, 15 bp, Homo sapiens
gaattatccttatat

SEQ ID NO: 685475 - DNA, 15 bp, Homo sapiens
aattatccttatata

SEQ ID NO: 685476 - DNA, 15 bp, Homo sapiens
attatccttatatat

SEQ ID NO: 685477 - DNA, 15 bp, Homo sapiens
ttatccttatatata

SEQ ID NO: 685478 - DNA, 15 bp, Homo sapiens
tatccttatatatac

SEQ ID NO: 685479 - DNA, 15 bp, Homo sapiens
atccttatatataca

SEQ ID NO: 685480 - DNA, 15 bp, Homo sapiens
tccttatatatacat

SEQ ID NO: 685481 - DNA, 15 bp, Homo sapiens
ccttatatatacatt

SEQ ID NO: 685482 - DNA, 15 bp, Homo sapiens
cttatatatacattt

SEQ ID NO: 685483 - DNA, 15 bp, Homo sapiens
ttatatatacatttt

SEQ ID NO: 685484 - DNA, 15 bp, Homo sapiens
tatatatacattttc

SEQ ID NO: 685485 - DNA, 15 bp, Homo sapiens
atatatacattttca

SEQ ID NO: 685486 - DNA, 15 bp, Homo sapiens
tatatacattttcat

SEQ ID NO: 685487 - DNA, 15 bp, Homo sapiens
atatacattttcatg

SEQ ID NO: 685488 - DNA, 15 bp, Homo sapiens
tatacattttcatgc

SEQ ID NO: 685489 - DNA, 15 bp, Homo sapiens
atacattttcatgca

SEQ ID NO: 685490 - DNA, 15 bp, Homo sapiens
tacattttcatgcac

SEQ ID NO: 685491 - DNA, 15 bp, Homo sapiens
acattttcatgcaca

SEQ ID NO: 685492 - DNA, 15 bp, Homo sapiens
cattttcatgcacaa

SEQ ID NO: 685493 - DNA, 15 bp, Homo sapiens
attttcatgcacaaa

SEQ ID NO: 685494 - DNA, 15 bp, Homo sapiens
ttttcatgcacaaat

SEQ ID NO: 685495 - DNA, 15 bp, Homo sapiens
tttcatgcacaaatg

SEQ ID NO: 685496 - DNA, 15 bp, Homo sapiens
ttcatgcacaaatga

SEQ ID NO: 685497 - DNA, 15 bp, Homo sapiens
tcatgcacaaatgag

SEQ ID NO: 685498 - DNA, 15 bp, Homo sapiens
catgcacaaatgaga

SEQ ID NO: 685499 - DNA, 15 bp, Homo sapiens
atgcacaaatgagag

SEQ ID NO: 685500 - DNA, 15 bp, Homo sapiens
tgcacaaatgagagt

SEQ ID NO: 685501 - DNA, 15 bp, Homo sapiens
gcacaaatgagagta

SEQ ID NO: 685502 - DNA, 15 bp, Homo sapiens
cacaaatgagagtac

SEQ ID NO: 685503 - DNA, 15 bp, Homo sapiens
acaaatgagagtact

SEQ ID NO: 685504 - DNA, 15 bp, Homo sapiens
caaatgagagtactt

SEQ ID NO: 685505 - DNA, 15 bp, Homo sapiens
aaatgagagtacttt

SEQ ID NO: 685506 - DNA, 15 bp, Homo sapiens
aatgagagtactttt

SEQ ID NO: 685507 - DNA, 15 bp, Homo sapiens
atgagagtactttta

SEQ ID NO: 685508 - DNA, 15 bp, Homo sapiens
tgagagtacttttat

SEQ ID NO: 685509 - DNA, 15 bp, Homo sapiens
gagagtacttttata

SEQ ID NO: 685510 - DNA, 15 bp, Homo sapiens
agagtacttttatag

SEQ ID NO: 685511 - DNA, 15 bp, Homo sapiens
gagtacttttatagt

SEQ ID NO: 685512 - DNA, 15 bp, Homo sapiens
agtacttttatagtg

SEQ ID NO: 685513 - DNA, 15 bp, Homo sapiens
gtacttttatagtgt

SEQ ID NO: 685514 - DNA, 15 bp, Homo sapiens
tacttttatagtgta

SEQ ID NO: 685515 - DNA, 15 bp, Homo sapiens
acttttatagtgtag

SEQ ID NO: 685516 - DNA, 15 bp, Homo sapiens
cttttatagtgtaga

SEQ ID NO: 685517 - DNA, 15 bp, Homo sapiens
ttttatagtgtagat

SEQ ID NO: 685518 - DNA, 15 bp, Homo sapiens
tttatagtgtagatt

SEQ ID NO: 685519 - DNA, 15 bp, Homo sapiens
ttatagtgtagattc

SEQ ID NO: 685520 - DNA, 15 bp, Homo sapiens
tatagtgtagattcc

SEQ ID NO: 685521 - DNA, 15 bp, Homo sapiens
atagtgtagattcct

SEQ ID NO: 685522 - DNA, 15 bp, Homo sapiens
tagtgtagattccta

SEQ ID NO: 685523 - DNA, 15 bp, Homo sapiens
agtgtagattcctag

SEQ ID NO: 685524 - DNA, 15 bp, Homo sapiens
gtgtagattcctaga

SEQ ID NO: 685525 - DNA, 15 bp, Homo sapiens
tgtagattcctagaa

SEQ ID NO: 685526 - DNA, 15 bp, Homo sapiens
gtagattcctagaag

SEQ ID NO: 685527 - DNA, 15 bp, Homo sapiens
tagattcctagaagt

SEQ ID NO: 685528 - DNA, 15 bp, Homo sapiens
agattcctagaagta

SEQ ID NO: 685529 - DNA, 15 bp, Homo sapiens
gattcctagaagtag

SEQ ID NO: 685530 - DNA, 15 bp, Homo sapiens
attcctagaagtaga

SEQ ID NO: 685531 - DNA, 15 bp, Homo sapiens
ttcctagaagtagaa

SEQ ID NO: 685532 - DNA, 15 bp, Homo sapiens
tcctagaagtagaac

SEQ ID NO: 685533 - DNA, 15 bp, Homo sapiens
cctagaagtagaact

SEQ ID NO: 685534 - DNA, 15 bp, Homo sapiens
ctagaagtagaactg

SEQ ID NO: 685535 - DNA, 15 bp, Homo sapiens
tagaagtagaactgc

SEQ ID NO: 685536 - DNA, 15 bp, Homo sapiens
agaagtagaactgct

SEQ ID NO: 685537 - DNA, 15 bp, Homo sapiens
gaagtagaactgcta

SEQ ID NO: 685538 - DNA, 15 bp, Homo sapiens
aagtagaactgctag

SEQ ID NO: 685539 - DNA, 15 bp, Homo sapiens
agtagaactgctagg

SEQ ID NO: 685540 - DNA, 15 bp, Homo sapiens
gtagaactgctaggt

SEQ ID NO: 685541 - DNA, 15 bp, Homo sapiens
tagaactgctaggtc

SEQ ID NO: 685542 - DNA, 15 bp, Homo sapiens
agaactgctaggtca

SEQ ID NO: 685543 - DNA, 15 bp, Homo sapiens
gaactgctaggtcag

SEQ ID NO: 685544 - DNA, 15 bp, Homo sapiens
aactgctaggtcaga

SEQ ID NO: 685545 - DNA, 15 bp, Homo sapiens
actgctaggtcagaa

SEQ ID NO: 685546 - DNA, 15 bp, Homo sapiens
ctgctaggtcagaag

SEQ ID NO: 685547 - DNA, 15 bp, Homo sapiens
tgctaggtcagaagg

SEQ ID NO: 685548 - DNA, 15 bp, Homo sapiens
gctaggtcagaaggt

SEQ ID NO: 685549 - DNA, 15 bp, Homo sapiens
ctaggtcagaaggta

SEQ ID NO: 685550 - DNA, 15 bp, Homo sapiens
taggtcagaaggtat

SEQ ID NO: 685551 - DNA, 15 bp, Homo sapiens
aggtcagaaggtatt

SEQ ID NO: 685552 - DNA, 15 bp, Homo sapiens
ggtcagaaggtattc

SEQ ID NO: 685553 - DNA, 15 bp, Homo sapiens
gtcagaaggtattca

SEQ ID NO: 685554 - DNA, 15 bp, Homo sapiens
tcagaaggtattcac

SEQ ID NO: 685555 - DNA, 15 bp, Homo sapiens
cagaaggtattcaca

SEQ ID NO: 685556 - DNA, 15 bp, Homo sapiens
agaaggtattcacat

SEQ ID NO: 685557 - DNA, 15 bp, Homo sapiens
gaaggtattcacatt

SEQ ID NO: 685558 - DNA, 15 bp, Homo sapiens
aaggtattcacattt

SEQ ID NO: 685559 - DNA, 15 bp, Homo sapiens
aggtattcacattta

SEQ ID NO: 685560 - DNA, 15 bp, Homo sapiens
ggtattcacatttaa

SEQ ID NO: 685561 - DNA, 15 bp, Homo sapiens
gtattcacatttaaa

SEQ ID NO: 685562 - DNA, 15 bp, Homo sapiens
tattcacatttaaaa

SEQ ID NO: 685563 - DNA, 15 bp, Homo sapiens
attcacatttaaaaa

SEQ ID NO: 685564 - DNA, 15 bp, Homo sapiens
ttcacatttaaaaat

SEQ ID NO: 685565 - DNA, 15 bp, Homo sapiens
tcacatttaaaaatt

SEQ ID NO: 685566 - DNA, 15 bp, Homo sapiens
cacatttaaaaattt

SEQ ID NO: 685567 - DNA, 15 bp, Homo sapiens
acatttaaaaatttt

SEQ ID NO: 685568 - DNA, 15 bp, Homo sapiens
catttaaaaatttta

SEQ ID NO: 685569 - DNA, 15 bp, Homo sapiens
atttaaaaattttaa

SEQ ID NO: 685570 - DNA, 15 bp, Homo sapiens
tttaaaaattttaaa

SEQ ID NO: 685571 - DNA, 15 bp, Homo sapiens
ttaaaaattttaaat

SEQ ID NO: 685572 - DNA, 15 bp, Homo sapiens
taaaaattttaaatt

SEQ ID NO: 685573 - DNA, 15 bp, Homo sapiens
aaaaattttaaattt

SEQ ID NO: 685574 - DNA, 15 bp, Homo sapiens
aaaattttaaatttg

SEQ ID NO: 685575 - DNA, 15 bp, Homo sapiens
aaattttaaatttgc

SEQ ID NO: 685576 - DNA, 15 bp, Homo sapiens
aattttaaatttgct

SEQ ID NO: 685577 - DNA, 15 bp, Homo sapiens
attttaaatttgctc

SEQ ID NO: 685578 - DNA, 15 bp, Homo sapiens
ttttaaatttgctca

SEQ ID NO: 685579 - DNA, 15 bp, Homo sapiens
tttaaatttgctcat

SEQ ID NO: 685580 - DNA, 15 bp, Homo sapiens
ttaaatttgctcata

SEQ ID NO: 685581 - DNA, 15 bp, Homo sapiens
taaatttgctcatag

SEQ ID NO: 685582 - DNA, 15 bp, Homo sapiens
aaatttgctcataga

SEQ ID NO: 685583 - DNA, 15 bp, Homo sapiens
aatttgctcatagaa

SEQ ID NO: 685584 - DNA, 15 bp, Homo sapiens
atttgctcatagaat

SEQ ID NO: 685585 - DNA, 15 bp, Homo sapiens
tttgctcatagaatg

SEQ ID NO: 685586 - DNA, 15 bp, Homo sapiens
ttgctcatagaatga

SEQ ID NO: 685587 - DNA, 15 bp, Homo sapiens
tgctcatagaatgaa

SEQ ID NO: 685588 - DNA, 15 bp, Homo sapiens
gctcatagaatgaag

SEQ ID NO: 685589 - DNA, 15 bp, Homo sapiens
ctcatagaatgaagt

SEQ ID NO: 685590 - DNA, 15 bp, Homo sapiens
tcatagaatgaagtc

SEQ ID NO: 685591 - DNA, 15 bp, Homo sapiens
catagaatgaagtct

SEQ ID NO: 685592 - DNA, 15 bp, Homo sapiens
atagaatgaagtctt

SEQ ID NO: 685593 - DNA, 15 bp, Homo sapiens
tagaatgaagtcttt

SEQ ID NO: 685594 - DNA, 15 bp, Homo sapiens
agaatgaagtctttg

SEQ ID NO: 685595 - DNA, 15 bp, Homo sapiens
gaatgaagtctttgc

SEQ ID NO: 685596 - DNA, 15 bp, Homo sapiens
aatgaagtctttgct

SEQ ID NO: 685597 - DNA, 15 bp, Homo sapiens
atgaagtctttgctc

SEQ ID NO: 685598 - DNA, 15 bp, Homo sapiens
tgaagtctttgctca

SEQ ID NO: 685599 - DNA, 15 bp, Homo sapiens
gaagtctttgctcat

SEQ ID NO: 685600 - DNA, 15 bp, Homo sapiens
aagtctttgctcata

SEQ ID NO: 685601 - DNA, 15 bp, Homo sapiens
agtctttgctcatag

SEQ ID NO: 685602 - DNA, 15 bp, Homo sapiens
gtctttgctcataga

SEQ ID NO: 685603 - DNA, 15 bp, Homo sapiens
tctttgctcatagaa

SEQ ID NO: 685604 - DNA, 15 bp, Homo sapiens
ctttgctcatagaat

SEQ ID NO: 685605 - DNA, 15 bp, Homo sapiens
tttgctcatagaata

SEQ ID NO: 685606 - DNA, 15 bp, Homo sapiens
ttgctcatagaatag

SEQ ID NO: 685607 - DNA, 15 bp, Homo sapiens
tgctcatagaatagt

SEQ ID NO: 685608 - DNA, 15 bp, Homo sapiens
gctcatagaatagtc

SEQ ID NO: 685609 - DNA, 15 bp, Homo sapiens
ctcatagaatagtct

SEQ ID NO: 685610 - DNA, 15 bp, Homo sapiens
tcatagaatagtctt

SEQ ID NO: 685611 - DNA, 15 bp, Homo sapiens
catagaatagtcttt

SEQ ID NO: 685612 - DNA, 15 bp, Homo sapiens
atagaatagtctttg

SEQ ID NO: 685613 - DNA, 15 bp, Homo sapiens
tagaatagtctttgc

SEQ ID NO: 685614 - DNA, 15 bp, Homo sapiens
agaatagtctttgct

SEQ ID NO: 685615 - DNA, 15 bp, Homo sapiens
gaatagtctttgctc

SEQ ID NO: 685616 - DNA, 15 bp, Homo sapiens
aatagtctttgctca

SEQ ID NO: 685617 - DNA, 15 bp, Homo sapiens
atagtctttgctcaa

SEQ ID NO: 685618 - DNA, 15 bp, Homo sapiens
tagtctttgctcaaa

SEQ ID NO: 685619 - DNA, 15 bp, Homo sapiens
agtctttgctcaaat

SEQ ID NO: 685620 - DNA, 15 bp, Homo sapiens
gtctttgctcaaatc

SEQ ID NO: 685621 - DNA, 15 bp, Homo sapiens
tctttgctcaaatct

SEQ ID NO: 685622 - DNA, 15 bp, Homo sapiens
ctttgctcaaatctc

SEQ ID NO: 685623 - DNA, 15 bp, Homo sapiens
tttgctcaaatctca

SEQ ID NO: 685624 - DNA, 15 bp, Homo sapiens
ttgctcaaatctcac

SEQ ID NO: 685625 - DNA, 15 bp, Homo sapiens
tgctcaaatctcact

SEQ ID NO: 685626 - DNA, 15 bp, Homo sapiens
gctcaaatctcactt

SEQ ID NO: 685627 - DNA, 15 bp, Homo sapiens
ctcaaatctcacttt

SEQ ID NO: 685628 - DNA, 15 bp, Homo sapiens
tcaaatctcacttta

SEQ ID NO: 685629 - DNA, 15 bp, Homo sapiens
caaatctcactttac

SEQ ID NO: 685630 - DNA, 15 bp, Homo sapiens
aaatctcactttacc

SEQ ID NO: 685631 - DNA, 15 bp, Homo sapiens
aatctcactttacca

SEQ ID NO: 685632 - DNA, 15 bp, Homo sapiens
atctcactttaccaa

SEQ ID NO: 685633 - DNA, 15 bp, Homo sapiens
tctcactttaccaaa

SEQ ID NO: 685634 - DNA, 15 bp, Homo sapiens
ctcactttaccaaag

SEQ ID NO: 685635 - DNA, 15 bp, Homo sapiens
tcactttaccaaaga

SEQ ID NO: 685636 - DNA, 15 bp, Homo sapiens
cactttaccaaagag

SEQ ID NO: 685637 - DNA, 15 bp, Homo sapiens
actttaccaaagagg

SEQ ID NO: 685638 - DNA, 15 bp, Homo sapiens
ctttaccaaagaggc

SEQ ID NO: 685639 - DNA, 15 bp, Homo sapiens
tttaccaaagaggcc

SEQ ID NO: 685640 - DNA, 15 bp, Homo sapiens
ttaccaaagaggcct

SEQ ID NO: 685641 - DNA, 15 bp, Homo sapiens
taccaaagaggccta

SEQ ID NO: 685642 - DNA, 15 bp, Homo sapiens
accaaagaggcctat

SEQ ID NO: 685643 - DNA, 15 bp, Homo sapiens
ccaaagaggcctatc

SEQ ID NO: 685644 - DNA, 15 bp, Homo sapiens
caaagaggcctatcg

SEQ ID NO: 685645 - DNA, 15 bp, Homo sapiens
aaagaggcctatcgt

SEQ ID NO: 685646 - DNA, 15 bp, Homo sapiens
aagaggcctatcgtg

SEQ ID NO: 685647 - DNA, 15 bp, Homo sapiens
agaggcctatcgtga

SEQ ID NO: 685648 - DNA, 15 bp, Homo sapiens
gaggcctatcgtgac

SEQ ID NO: 685649 - DNA, 15 bp, Homo sapiens
aggcctatcgtgacc

SEQ ID NO: 685650 - DNA, 15 bp, Homo sapiens
ggcctatcgtgacca

SEQ ID NO: 685651 - DNA, 15 bp, Homo sapiens
gcctatcgtgaccac

SEQ ID NO: 685652 - DNA, 15 bp, Homo sapiens
cctatcgtgaccact

SEQ ID NO: 685653 - DNA, 15 bp, Homo sapiens
ctatcgtgaccactc

SEQ ID NO: 685654 - DNA, 15 bp, Homo sapiens
tatcgtgaccactct

SEQ ID NO: 685655 - DNA, 15 bp, Homo sapiens
atcgtgaccactctg

SEQ ID NO: 685656 - DNA, 15 bp, Homo sapiens
tcgtgaccactctgc

SEQ ID NO: 685657 - DNA, 15 bp, Homo sapiens
cgtgaccactctgct

SEQ ID NO: 685658 - DNA, 15 bp, Homo sapiens
gtgaccactctgctt

SEQ ID NO: 685659 - DNA, 15 bp, Homo sapiens
tgaccactctgctta

SEQ ID NO: 685660 - DNA, 15 bp, Homo sapiens
gaccactctgcttaa

SEQ ID NO: 685661 - DNA, 15 bp, Homo sapiens
accactctgcttaat

SEQ ID NO: 685662 - DNA, 15 bp, Homo sapiens
ccactctgcttaata

SEQ ID NO: 685663 - DNA, 15 bp, Homo sapiens
cactctgcttaatac

SEQ ID NO: 685664 - DNA, 15 bp, Homo sapiens
actctgcttaatact

SEQ ID NO: 685665 - DNA, 15 bp, Homo sapiens
ctctgcttaatactg

SEQ ID NO: 685666 - DNA, 15 bp, Homo sapiens
tctgcttaatactgt

SEQ ID NO: 685667 - DNA, 15 bp, Homo sapiens
ctgcttaatactgta

SEQ ID NO: 685668 - DNA, 15 bp, Homo sapiens
tgcttaatactgtaa

SEQ ID NO: 685669 - DNA, 15 bp, Homo sapiens
gcttaatactgtaac

SEQ ID NO: 685670 - DNA, 15 bp, Homo sapiens
cttaatactgtaacc

SEQ ID NO: 685671 - DNA, 15 bp, Homo sapiens
ttaatactgtaacct

SEQ ID NO: 685672 - DNA, 15 bp, Homo sapiens
taatactgtaacctg

SEQ ID NO: 685673 - DNA, 15 bp, Homo sapiens
aatactgtaacctgc

SEQ ID NO: 685674 - DNA, 15 bp, Homo sapiens
atactgtaacctgcc

SEQ ID NO: 685675 - DNA, 15 bp, Homo sapiens
tactgtaacctgccc

SEQ ID NO: 685676 - DNA, 15 bp, Homo sapiens
actgtaacctgcccc

SEQ ID NO: 685677 - DNA, 15 bp, Homo sapiens
ctgtaacctgcccct

SEQ ID NO: 685678 - DNA, 15 bp, Homo sapiens
tgtaacctgccccta

SEQ ID NO: 685679 - DNA, 15 bp, Homo sapiens
gtaacctgcccctac

SEQ ID NO: 685680 - DNA, 15 bp, Homo sapiens
taacctgcccctact

SEQ ID NO: 685681 - DNA, 15 bp, Homo sapiens
aacctgcccctactt

SEQ ID NO: 685682 - DNA, 15 bp, Homo sapiens
acctgcccctacttc

SEQ ID NO: 685683 - DNA, 15 bp, Homo sapiens
cctgcccctacttct

SEQ ID NO: 685684 - DNA, 15 bp, Homo sapiens
ctgcccctacttctc

SEQ ID NO: 685685 - DNA, 15 bp, Homo sapiens
tgcccctacttctcc

SEQ ID NO: 685686 - DNA, 15 bp, Homo sapiens
gcccctacttctccc

SEQ ID NO: 685687 - DNA, 15 bp, Homo sapiens
cccctacttctccct

SEQ ID NO: 685688 - DNA, 15 bp, Homo sapiens
ccctacttctccctg

SEQ ID NO: 685689 - DNA, 15 bp, Homo sapiens
cctacttctccctga

SEQ ID NO: 685690 - DNA, 15 bp, Homo sapiens
ctacttctccctgaa

SEQ ID NO: 685691 - DNA, 15 bp, Homo sapiens
tacttctccctgaac

SEQ ID NO: 685692 - DNA, 15 bp, Homo sapiens
acttctccctgaact

SEQ ID NO: 685693 - DNA, 15 bp, Homo sapiens
cttctccctgaactt

SEQ ID NO: 685694 - DNA, 15 bp, Homo sapiens
ttctccctgaacttc

SEQ ID NO: 685695 - DNA, 15 bp, Homo sapiens
tctccctgaacttct

SEQ ID NO: 685696 - DNA, 15 bp, Homo sapiens
ctccctgaacttctc

SEQ ID NO: 685697 - DNA, 15 bp, Homo sapiens
tccctgaacttctct

SEQ ID NO: 685698 - DNA, 15 bp, Homo sapiens
ccctgaacttctcta

SEQ ID NO: 685699 - DNA, 15 bp, Homo sapiens
cctgaacttctctat

SEQ ID NO: 685700 - DNA, 15 bp, Homo sapiens
ctgaacttctctatc

SEQ ID NO: 685701 - DNA, 15 bp, Homo sapiens
tgaacttctctatcc

SEQ ID NO: 685702 - DNA, 15 bp, Homo sapiens
gaacttctctatcca

SEQ ID NO: 685703 - DNA, 15 bp, Homo sapiens
aacttctctatccat

SEQ ID NO: 685704 - DNA, 15 bp, Homo sapiens
acttctctatccatt

SEQ ID NO: 685705 - DNA, 15 bp, Homo sapiens
cttctctatccattg

SEQ ID NO: 685706 - DNA, 15 bp, Homo sapiens
ttctctatccattgc

SEQ ID NO: 685707 - DNA, 15 bp, Homo sapiens
tctctatccattgca

SEQ ID NO: 685708 - DNA, 15 bp, Homo sapiens
ctctatccattgcac

SEQ ID NO: 685709 - DNA, 15 bp, Homo sapiens
tctatccattgcact

SEQ ID NO: 685710 - DNA, 15 bp, Homo sapiens
ctatccattgcactc

SEQ ID NO: 685711 - DNA, 15 bp, Homo sapiens
tatccattgcactct

SEQ ID NO: 685712 - DNA, 15 bp, Homo sapiens
atccattgcactcta

SEQ ID NO: 685713 - DNA, 15 bp, Homo sapiens
tccattgcactctat

SEQ ID NO: 685714 - DNA, 15 bp, Homo sapiens
ccattgcactctatt

SEQ ID NO: 685715 - DNA, 15 bp, Homo sapiens
cattgcactctattc

SEQ ID NO: 685716 - DNA, 15 bp, Homo sapiens
attgcactctattcc

SEQ ID NO: 685717 - DNA, 15 bp, Homo sapiens
ttgcactctattcct

SEQ ID NO: 685718 - DNA, 15 bp, Homo sapiens
tgcactctattcctt

SEQ ID NO: 685719 - DNA, 15 bp, Homo sapiens
gcactctattccttt

SEQ ID NO: 685720 - DNA, 15 bp, Homo sapiens
cactctattcctttt

SEQ ID NO: 685721 - DNA, 15 bp, Homo sapiens
actctattccttttc

SEQ ID NO: 685722 - DNA, 15 bp, Homo sapiens
ctctattccttttct

SEQ ID NO: 685723 - DNA, 15 bp, Homo sapiens
tctattccttttcta

SEQ ID NO: 685724 - DNA, 15 bp, Homo sapiens
ctattccttttctag

SEQ ID NO: 685725 - DNA, 15 bp, Homo sapiens
tattccttttctagc

SEQ ID NO: 685726 - DNA, 15 bp, Homo sapiens
attccttttctagca

SEQ ID NO: 685727 - DNA, 15 bp, Homo sapiens
ttccttttctagcat

SEQ ID NO: 685728 - DNA, 15 bp, Homo sapiens
tccttttctagcata

SEQ ID NO: 685729 - DNA, 15 bp, Homo sapiens
ccttttctagcatag

SEQ ID NO: 685730 - DNA, 15 bp, Homo sapiens
cttttctagcatagt

SEQ ID NO: 685731 - DNA, 15 bp, Homo sapiens
ttttctagcatagta

SEQ ID NO: 685732 - DNA, 15 bp, Homo sapiens
tttctagcatagtat

SEQ ID NO: 685733 - DNA, 15 bp, Homo sapiens
ttctagcatagtata

SEQ ID NO: 685734 - DNA, 15 bp, Homo sapiens
tctagcatagtatat

SEQ ID NO: 685735 - DNA, 15 bp, Homo sapiens
ctagcatagtatatg

SEQ ID NO: 685736 - DNA, 15 bp, Homo sapiens
tagcatagtatatgg

SEQ ID NO: 685737 - DNA, 15 bp, Homo sapiens
agcatagtatatggt

SEQ ID NO: 685738 - DNA, 15 bp, Homo sapiens
gcatagtatatggtt

SEQ ID NO: 685739 - DNA, 15 bp, Homo sapiens
catagtatatggttt

SEQ ID NO: 685740 - DNA, 15 bp, Homo sapiens
atagtatatggttta

SEQ ID NO: 685741 - DNA, 15 bp, Homo sapiens
tagtatatggtttac

SEQ ID NO: 685742 - DNA, 15 bp, Homo sapiens
agtatatggtttacc

SEQ ID NO: 685743 - DNA, 15 bp, Homo sapiens
gtatatggtttacct

SEQ ID NO: 685744 - DNA, 15 bp, Homo sapiens
tatatggtttaccta

SEQ ID NO: 685745 - DNA, 15 bp, Homo sapiens
atatggtttacctat

SEQ ID NO: 685746 - DNA, 15 bp, Homo sapiens
tatggtttacctatt

SEQ ID NO: 685747 - DNA, 15 bp, Homo sapiens
atggtttacctattt

SEQ ID NO: 685748 - DNA, 15 bp, Homo sapiens
tggtttacctattta

SEQ ID NO: 685749 - DNA, 15 bp, Homo sapiens
ggtttacctatttat

SEQ ID NO: 685750 - DNA, 15 bp, Homo sapiens
gtttacctatttata

SEQ ID NO: 685751 - DNA, 15 bp, Homo sapiens
tttacctatttatac

SEQ ID NO: 685752 - DNA, 15 bp, Homo sapiens
ttacctatttatact

SEQ ID NO: 685753 - DNA, 15 bp, Homo sapiens
tacctatttatactg

SEQ ID NO: 685754 - DNA, 15 bp, Homo sapiens
acctatttatactgc

SEQ ID NO: 685755 - DNA, 15 bp, Homo sapiens
cctatttatactgct

SEQ ID NO: 685756 - DNA, 15 bp, Homo sapiens
ctatttatactgctt

SEQ ID NO: 685757 - DNA, 15 bp, Homo sapiens
tatttatactgcttt

SEQ ID NO: 685758 - DNA, 15 bp, Homo sapiens
atttatactgctttt

SEQ ID NO: 685759 - DNA, 15 bp, Homo sapiens
tttatactgcttttt

SEQ ID NO: 685760 - DNA, 15 bp, Homo sapiens
ttatactgctttttg

SEQ ID NO: 685761 - DNA, 15 bp, Homo sapiens
tatactgctttttgg

SEQ ID NO: 685762 - DNA, 15 bp, Homo sapiens
atactgctttttggt

SEQ ID NO: 685763 - DNA, 15 bp, Homo sapiens
tactgctttttggtt

SEQ ID NO: 685764 - DNA, 15 bp, Homo sapiens
actgctttttggtta

SEQ ID NO: 685765 - DNA, 15 bp, Homo sapiens
ctgctttttggttac

SEQ ID NO: 685766 - DNA, 15 bp, Homo sapiens
tgctttttggttact

SEQ ID NO: 685767 - DNA, 15 bp, Homo sapiens
gctttttggttactg

SEQ ID NO: 685768 - DNA, 15 bp, Homo sapiens
ctttttggttactgt

SEQ ID NO: 685769 - DNA, 15 bp, Homo sapiens
tttttggttactgtc

SEQ ID NO: 685770 - DNA, 15 bp, Homo sapiens
ttttggttactgtct

SEQ ID NO: 685771 - DNA, 15 bp, Homo sapiens
tttggttactgtctt

SEQ ID NO: 685772 - DNA, 15 bp, Homo sapiens
ttggttactgtcttt

SEQ ID NO: 685773 - DNA, 15 bp, Homo sapiens
tggttactgtctttt

SEQ ID NO: 685774 - DNA, 15 bp, Homo sapiens
ggttactgtcttttt

SEQ ID NO: 685775 - DNA, 15 bp, Homo sapiens
gttactgtctttttc

SEQ ID NO: 685776 - DNA, 15 bp, Homo sapiens
ttactgtctttttcc

SEQ ID NO: 685777 - DNA, 15 bp, Homo sapiens
tactgtctttttccc

SEQ ID NO: 685778 - DNA, 15 bp, Homo sapiens
actgtctttttccct

SEQ ID NO: 685779 - DNA, 15 bp, Homo sapiens
ctgtctttttccctc

SEQ ID NO: 685780 - DNA, 15 bp, Homo sapiens
tgtctttttccctct

SEQ ID NO: 685781 - DNA, 15 bp, Homo sapiens
gtctttttccctctg

SEQ ID NO: 685782 - DNA, 15 bp, Homo sapiens
tctttttccctctgc

SEQ ID NO: 685783 - DNA, 15 bp, Homo sapiens
ctttttccctctgct

SEQ ID NO: 685784 - DNA, 15 bp, Homo sapiens
tttttccctctgctc

SEQ ID NO: 685785 - DNA, 15 bp, Homo sapiens
ttttccctctgctcc

SEQ ID NO: 685786 - DNA, 15 bp, Homo sapiens
tttccctctgctcca

SEQ ID NO: 685787 - DNA, 15 bp, Homo sapiens
ttccctctgctccaa

SEQ ID NO: 685788 - DNA, 15 bp, Homo sapiens
tccctctgctccaag

SEQ ID NO: 685789 - DNA, 15 bp, Homo sapiens
ccctctgctccaaga

SEQ ID NO: 685790 - DNA, 15 bp, Homo sapiens
cctctgctccaagaa

SEQ ID NO: 685791 - DNA, 15 bp, Homo sapiens
ctctgctccaagaaa

SEQ ID NO: 685792 - DNA, 15 bp, Homo sapiens
tctgctccaagaaac

SEQ ID NO: 685793 - DNA, 15 bp, Homo sapiens
ctgctccaagaaaca

SEQ ID NO: 685794 - DNA, 15 bp, Homo sapiens
tgctccaagaaacag

SEQ ID NO: 685795 - DNA, 15 bp, Homo sapiens
gctccaagaaacagg

SEQ ID NO: 685796 - DNA, 15 bp, Homo sapiens
ctccaagaaacagga

SEQ ID NO: 685797 - DNA, 15 bp, Homo sapiens
tccaagaaacaggaa

SEQ ID NO: 685798 - DNA, 15 bp, Homo sapiens
ccaagaaacaggaat

SEQ ID NO: 685799 - DNA, 15 bp, Homo sapiens
caagaaacaggaatg

SEQ ID NO: 685800 - DNA, 15 bp, Homo sapiens
aagaaacaggaatgt

SEQ ID NO: 685801 - DNA, 15 bp, Homo sapiens
agaaacaggaatgtt

SEQ ID NO: 685802 - DNA, 15 bp, Homo sapiens
gaaacaggaatgttt

SEQ ID NO: 685803 - DNA, 15 bp, Homo sapiens
aaacaggaatgtttg

SEQ ID NO: 685804 - DNA, 15 bp, Homo sapiens
aacaggaatgtttgt

SEQ ID NO: 685805 - DNA, 15 bp, Homo sapiens
acaggaatgtttgtt

SEQ ID NO: 685806 - DNA, 15 bp, Homo sapiens
caggaatgtttgttt

SEQ ID NO: 685807 - DNA, 15 bp, Homo sapiens
aggaatgtttgtttt

SEQ ID NO: 685808 - DNA, 15 bp, Homo sapiens
ggaatgtttgttttg

SEQ ID NO: 685809 - DNA, 15 bp, Homo sapiens
gaatgtttgttttgt

SEQ ID NO: 685810 - DNA, 15 bp, Homo sapiens
aatgtttgttttgtt

SEQ ID NO: 685811 - DNA, 15 bp, Homo sapiens
atgtttgttttgttc

SEQ ID NO: 685812 - DNA, 15 bp, Homo sapiens
tgtttgttttgttca

SEQ ID NO: 685813 - DNA, 15 bp, Homo sapiens
gtttgttttgttcac

SEQ ID NO: 685814 - DNA, 15 bp, Homo sapiens
tttgttttgttcact

SEQ ID NO: 685815 - DNA, 15 bp, Homo sapiens
ttgttttgttcacta

SEQ ID NO: 685816 - DNA, 15 bp, Homo sapiens
tgttttgttcactaa

SEQ ID NO: 685817 - DNA, 15 bp, Homo sapiens
gttttgttcactaat

SEQ ID NO: 685818 - DNA, 15 bp, Homo sapiens
ttttgttcactaata

SEQ ID NO: 685819 - DNA, 15 bp, Homo sapiens
tttgttcactaatat

SEQ ID NO: 685820 - DNA, 15 bp, Homo sapiens
ttgttcactaatata

SEQ ID NO: 685821 - DNA, 15 bp, Homo sapiens
tgttcactaatatat

SEQ ID NO: 685822 - DNA, 15 bp, Homo sapiens
gttcactaatatata

SEQ ID NO: 685823 - DNA, 15 bp, Homo sapiens
ttcactaatatatat

SEQ ID NO: 685824 - DNA, 15 bp, Homo sapiens
tcactaatatatatt

SEQ ID NO: 685825 - DNA, 15 bp, Homo sapiens
cactaatatatattt

SEQ ID NO: 685826 - DNA, 15 bp, Homo sapiens
actaatatatatttc

SEQ ID NO: 685827 - DNA, 15 bp, Homo sapiens
ctaatatatatttct

SEQ ID NO: 685828 - DNA, 15 bp, Homo sapiens
taatatatatttcta

SEQ ID NO: 685829 - DNA, 15 bp, Homo sapiens
aatatatatttctag

SEQ ID NO: 685830 - DNA, 15 bp, Homo sapiens
atatatatttctagc

SEQ ID NO: 685831 - DNA, 15 bp, Homo sapiens
tatatatttctagca

SEQ ID NO: 685832 - DNA, 15 bp, Homo sapiens
atatatttctagcag

SEQ ID NO: 685833 - DNA, 15 bp, Homo sapiens
tatatttctagcagt

SEQ ID NO: 685834 - DNA, 15 bp, Homo sapiens
atatttctagcagtt

SEQ ID NO: 685835 - DNA, 15 bp, Homo sapiens
tatttctagcagtta

SEQ ID NO: 685836 - DNA, 15 bp, Homo sapiens
atttctagcagttag

SEQ ID NO: 685837 - DNA, 15 bp, Homo sapiens
tttctagcagttaga

SEQ ID NO: 685838 - DNA, 15 bp, Homo sapiens
ttctagcagttagaa

SEQ ID NO: 685839 - DNA, 15 bp, Homo sapiens
tctagcagttagaat

SEQ ID NO: 685840 - DNA, 15 bp, Homo sapiens
ctagcagttagaata

SEQ ID NO: 685841 - DNA, 15 bp, Homo sapiens
tagcagttagaatag

SEQ ID NO: 685842 - DNA, 15 bp, Homo sapiens
agcagttagaatagt

SEQ ID NO: 685843 - DNA, 15 bp, Homo sapiens
gcagttagaatagtg

SEQ ID NO: 685844 - DNA, 15 bp, Homo sapiens
cagttagaatagtgt

SEQ ID NO: 685845 - DNA, 15 bp, Homo sapiens
agttagaatagtgtt

SEQ ID NO: 685846 - DNA, 15 bp, Homo sapiens
gttagaatagtgttt

SEQ ID NO: 685847 - DNA, 15 bp, Homo sapiens
ttagaatagtgtttg

SEQ ID NO: 685848 - DNA, 15 bp, Homo sapiens
tagaatagtgtttga

SEQ ID NO: 685849 - DNA, 15 bp, Homo sapiens
agaatagtgtttgat

SEQ ID NO: 685850 - DNA, 15 bp, Homo sapiens
gaatagtgtttgatg

SEQ ID NO: 685851 - DNA, 15 bp, Homo sapiens
aatagtgtttgatgc

SEQ ID NO: 685852 - DNA, 15 bp, Homo sapiens
atagtgtttgatgct

SEQ ID NO: 685853 - DNA, 15 bp, Homo sapiens
tagtgtttgatgctt

SEQ ID NO: 685854 - DNA, 15 bp, Homo sapiens
agtgtttgatgctta

SEQ ID NO: 685855 - DNA, 15 bp, Homo sapiens
gtgtttgatgcttag

SEQ ID NO: 685856 - DNA, 15 bp, Homo sapiens
tgtttgatgcttagt

SEQ ID NO: 685857 - DNA, 15 bp, Homo sapiens
gtttgatgcttagta

SEQ ID NO: 685858 - DNA, 15 bp, Homo sapiens
tttgatgcttagtag

SEQ ID NO: 685859 - DNA, 15 bp, Homo sapiens
ttgatgcttagtagg

SEQ ID NO: 685860 - DNA, 15 bp, Homo sapiens
tgatgcttagtaggc

SEQ ID NO: 685861 - DNA, 15 bp, Homo sapiens
gatgcttagtaggca

SEQ ID NO: 685862 - DNA, 15 bp, Homo sapiens
atgcttagtaggcat

SEQ ID NO: 685863 - DNA, 15 bp, Homo sapiens
tgcttagtaggcatt

SEQ ID NO: 685864 - DNA, 15 bp, Homo sapiens
gcttagtaggcattt

SEQ ID NO: 685865 - DNA, 15 bp, Homo sapiens
cttagtaggcattta

SEQ ID NO: 685866 - DNA, 15 bp, Homo sapiens
ttagtaggcatttag

SEQ ID NO: 685867 - DNA, 15 bp, Homo sapiens
tagtaggcatttagt

SEQ ID NO: 685868 - DNA, 15 bp, Homo sapiens
agtaggcatttagta

SEQ ID NO: 685869 - DNA, 15 bp, Homo sapiens
gtaggcatttagtaa

SEQ ID NO: 685870 - DNA, 15 bp, Homo sapiens
taggcatttagtaaa

SEQ ID NO: 685871 - DNA, 15 bp, Homo sapiens
aggcatttagtaaat

SEQ ID NO: 685872 - DNA, 15 bp, Homo sapiens
ggcatttagtaaata

SEQ ID NO: 685873 - DNA, 15 bp, Homo sapiens
gcatttagtaaatat

SEQ ID NO: 685874 - DNA, 15 bp, Homo sapiens
catttagtaaatatt

SEQ ID NO: 685875 - DNA, 15 bp, Homo sapiens
atttagtaaatattt

SEQ ID NO: 685876 - DNA, 15 bp, Homo sapiens
tttagtaaatattta

SEQ ID NO: 685877 - DNA, 15 bp, Homo sapiens
ttagtaaatatttat

SEQ ID NO: 685878 - DNA, 15 bp, Homo sapiens
tagtaaatatttatt

SEQ ID NO: 685879 - DNA, 15 bp, Homo sapiens
agtaaatatttattg

SEQ ID NO: 685880 - DNA, 15 bp, Homo sapiens
gtaaatatttattga

SEQ ID NO: 685881 - DNA, 15 bp, Homo sapiens
taaatatttattgaa

SEQ ID NO: 685882 - DNA, 15 bp, Homo sapiens
aaatatttattgaat

SEQ ID NO: 685883 - DNA, 15 bp, Homo sapiens
aatatttattgaata

SEQ ID NO: 685884 - DNA, 15 bp, Homo sapiens
atatttattgaataa

SEQ ID NO: 685885 - DNA, 15 bp, Homo sapiens
tatttattgaataaa

SEQ ID NO: 685886 - DNA, 15 bp, Homo sapiens
atttattgaataaat

SEQ ID NO: 685887 - DNA, 15 bp, Homo sapiens
tttattgaataaatc

SEQ ID NO: 685888 - DNA, 15 bp, Homo sapiens
ttattgaataaatcg

SEQ ID NO: 685889 - DNA, 15 bp, Homo sapiens
tattgaataaatcga

SEQ ID NO: 685890 - DNA, 15 bp, Homo sapiens
attgaataaatcgaa

SEQ ID NO: 685891 - DNA, 15 bp, Homo sapiens
ttgaataaatcgaat

SEQ ID NO: 685892 - DNA, 15 bp, Homo sapiens
tgaataaatcgaata

SEQ ID NO: 685893 - DNA, 15 bp, Homo sapiens
gaataaatcgaatac

SEQ ID NO: 685894 - DNA, 15 bp, Homo sapiens
aataaatcgaataca

SEQ ID NO: 685895 - DNA, 15 bp, Homo sapiens
ataaatcgaatacat

SEQ ID NO: 685896 - DNA, 15 bp, Homo sapiens
taaatcgaatacata

SEQ ID NO: 685897 - DNA, 15 bp, Homo sapiens
aaatcgaatacataa

SEQ ID NO: 685898 - DNA, 15 bp, Homo sapiens
aatcgaatacataag

SEQ ID NO: 685899 - DNA, 15 bp, Homo sapiens
atcgaatacataagc

SEQ ID NO: 685900 - DNA, 15 bp, Homo sapiens
tcgaatacataagca

SEQ ID NO: 685901 - DNA, 15 bp, Homo sapiens
cgaatacataagcaa

SEQ ID NO: 685902 - DNA, 15 bp, Homo sapiens
gaatacataagcaaa

SEQ ID NO: 685903 - DNA, 15 bp, Homo sapiens
aatacataagcaaac

SEQ ID NO: 685904 - DNA, 15 bp, Homo sapiens
atacataagcaaaca

SEQ ID NO: 685905 - DNA, 15 bp, Homo sapiens
tacataagcaaacag

SEQ ID NO: 685906 - DNA, 15 bp, Homo sapiens
acataagcaaacagt

SEQ ID NO: 685907 - DNA, 15 bp, Homo sapiens
cataagcaaacagta

SEQ ID NO: 685908 - DNA, 15 bp, Homo sapiens
ataagcaaacagtat

SEQ ID NO: 685909 - DNA, 15 bp, Homo sapiens
taagcaaacagtatc

SEQ ID NO: 685910 - DNA, 15 bp, Homo sapiens
aagcaaacagtatcc

SEQ ID NO: 685911 - DNA, 15 bp, Homo sapiens
agcaaacagtatcca

SEQ ID NO: 685912 - DNA, 15 bp, Homo sapiens
gcaaacagtatccaa

SEQ ID NO: 685913 - DNA, 15 bp, Homo sapiens
caaacagtatccaaa

SEQ ID NO: 685914 - DNA, 15 bp, Homo sapiens
aaacagtatccaaaa

SEQ ID NO: 685915 - DNA, 15 bp, Homo sapiens
aacagtatccaaaat

SEQ ID NO: 685916 - DNA, 15 bp, Homo sapiens
acagtatccaaaatt

SEQ ID NO: 685917 - DNA, 15 bp, Homo sapiens
cagtatccaaaatta

SEQ ID NO: 685918 - DNA, 15 bp, Homo sapiens
agtatccaaaattat

SEQ ID NO: 685919 - DNA, 15 bp, Homo sapiens
gtatccaaaattatc

SEQ ID NO: 685920 - DNA, 15 bp, Homo sapiens
tatccaaaattatcc

SEQ ID NO: 685921 - DNA, 15 bp, Homo sapiens
atccaaaattatcct

SEQ ID NO: 685922 - DNA, 15 bp, Homo sapiens
tccaaaattatcctc

SEQ ID NO: 685923 - DNA, 15 bp, Homo sapiens
ccaaaattatcctcc

SEQ ID NO: 685924 - DNA, 15 bp, Homo sapiens
caaaattatcctccg

SEQ ID NO: 685925 - DNA, 15 bp, Homo sapiens
aaaattatcctccgt

SEQ ID NO: 685926 - DNA, 15 bp, Homo sapiens
aaattatcctccgta

SEQ ID NO: 685927 - DNA, 15 bp, Homo sapiens
aattatcctccgtaa

SEQ ID NO: 685928 - DNA, 15 bp, Homo sapiens
attatcctccgtaaa

SEQ ID NO: 685929 - DNA, 15 bp, Homo sapiens
ttatcctccgtaaaa

SEQ ID NO: 685930 - DNA, 15 bp, Homo sapiens
tatcctccgtaaaaa

SEQ ID NO: 685931 - DNA, 15 bp, Homo sapiens
atcctccgtaaaaat

SEQ ID NO: 685932 - DNA, 15 bp, Homo sapiens
tcctccgtaaaaatg

SEQ ID NO: 685933 - DNA, 15 bp, Homo sapiens
cctccgtaaaaatgc

SEQ ID NO: 685934 - DNA, 15 bp, Homo sapiens
ctccgtaaaaatgcc

SEQ ID NO: 685935 - DNA, 15 bp, Homo sapiens
tccgtaaaaatgcct

SEQ ID NO: 685936 - DNA, 15 bp, Homo sapiens
ccgtaaaaatgccta

SEQ ID NO: 685937 - DNA, 15 bp, Homo sapiens
cgtaaaaatgcctaa

SEQ ID NO: 685938 - DNA, 15 bp, Homo sapiens
gtaaaaatgcctaat

SEQ ID NO: 685939 - DNA, 15 bp, Homo sapiens
taaaaatgcctaatt

SEQ ID NO: 685940 - DNA, 15 bp, Homo sapiens
aaaaatgcctaattt

SEQ ID NO: 685941 - DNA, 15 bp, Homo sapiens
aaaatgcctaatttc

SEQ ID NO: 685942 - DNA, 15 bp, Homo sapiens
aaatgcctaatttct

SEQ ID NO: 685943 - DNA, 15 bp, Homo sapiens
aatgcctaatttctt

SEQ ID NO: 685944 - DNA, 15 bp, Homo sapiens
atgcctaatttcttt

SEQ ID NO: 685945 - DNA, 15 bp, Homo sapiens
tgcctaatttctttt

SEQ ID NO: 685946 - DNA, 15 bp, Homo sapiens
gcctaatttcttttt

SEQ ID NO: 685947 - DNA, 15 bp, Homo sapiens
cctaatttctttttt

SEQ ID NO: 685948 - DNA, 15 bp, Homo sapiens
ctaatttcttttttt

SEQ ID NO: 685949 - DNA, 15 bp, Homo sapiens
taatttctttttttt

SEQ ID NO: 685950 - DNA, 15 bp, Homo sapiens
aatttcttttttttc

SEQ ID NO: 685951 - DNA, 15 bp, Homo sapiens
atttcttttttttcc

SEQ ID NO: 685952 - DNA, 15 bp, Homo sapiens
tttcttttttttcct

SEQ ID NO: 685953 - DNA, 15 bp, Homo sapiens
ttcttttttttcctc

SEQ ID NO: 685954 - DNA, 15 bp, Homo sapiens
tcttttttttcctct

SEQ ID NO: 685955 - DNA, 15 bp, Homo sapiens
cttttttttcctctg

SEQ ID NO: 685956 - DNA, 15 bp, Homo sapiens
ttttttttcctctgt

SEQ ID NO: 685957 - DNA, 15 bp, Homo sapiens
tttttttcctctgta

SEQ ID NO: 685958 - DNA, 15 bp, Homo sapiens
ttttttcctctgtat

SEQ ID NO: 685959 - DNA, 15 bp, Homo sapiens
tttttcctctgtatc

SEQ ID NO: 685960 - DNA, 15 bp, Homo sapiens
ttttcctctgtatct

SEQ ID NO: 685961 - DNA, 15 bp, Homo sapiens
tttcctctgtatctc

SEQ ID NO: 685962 - DNA, 15 bp, Homo sapiens
ttcctctgtatctca

SEQ ID NO: 685963 - DNA, 15 bp, Homo sapiens
tcctctgtatctcaa

SEQ ID NO: 685964 - DNA, 15 bp, Homo sapiens
cctctgtatctcaat

SEQ ID NO: 685965 - DNA, 15 bp, Homo sapiens
ctctgtatctcaatg

SEQ ID NO: 685966 - DNA, 15 bp, Homo sapiens
tctgtatctcaatga

SEQ ID NO: 685967 - DNA, 15 bp, Homo sapiens
ctgtatctcaatgaa

SEQ ID NO: 685968 - DNA, 15 bp, Homo sapiens
tgtatctcaatgaat

SEQ ID NO: 685969 - DNA, 15 bp, Homo sapiens
gtatctcaatgaata

SEQ ID NO: 685970 - DNA, 15 bp, Homo sapiens
tatctcaatgaataa

SEQ ID NO: 685971 - DNA, 15 bp, Homo sapiens
atctcaatgaataaa

SEQ ID NO: 685972 - DNA, 15 bp, Homo sapiens
tctcaatgaataaaa

SEQ ID NO: 685973 - DNA, 15 bp, Homo sapiens
ctcaatgaataaaaa

SEQ ID NO: 685974 - DNA, 15 bp, Homo sapiens
tcaatgaataaaaaa

SEQ ID NO: 685975 - DNA, 15 bp, Homo sapiens
caatgaataaaaaaa

SEQ ID NO: 685976 - DNA, 15 bp, Homo sapiens
aatgaataaaaaaaa

SEQ ID NO: 685977 - DNA, 15 bp, Homo sapiens
atgaataaaaaaaaa

SEQ ID NO: 685978 - DNA, 15 bp, Homo sapiens
tgaataaaaaaaaat

SEQ ID NO: 685979 - DNA, 15 bp, Homo sapiens
gaataaaaaaaaata

SEQ ID NO: 685980 - DNA, 15 bp, Homo sapiens
aataaaaaaaaatac

SEQ ID NO: 685981 - DNA, 15 bp, Homo sapiens
ataaaaaaaaatact

SEQ ID NO: 685982 - DNA, 15 bp, Homo sapiens
taaaaaaaaatactg

SEQ ID NO: 685983 - DNA, 15 bp, Homo sapiens
aaaaaaaaatactgt

SEQ ID NO: 685984 - DNA, 15 bp, Homo sapiens
aaaaaaaatactgtc

SEQ ID NO: 685985 - DNA, 15 bp, Homo sapiens
aaaaaaatactgtct

SEQ ID NO: 685986 - DNA, 15 bp, Homo sapiens
aaaaaatactgtctt

SEQ ID NO: 685987 - DNA, 15 bp, Homo sapiens
aaaaatactgtcttt

SEQ ID NO: 685988 - DNA, 15 bp, Homo sapiens
aaaatactgtctttc

SEQ ID NO: 685989 - DNA, 15 bp, Homo sapiens
aaatactgtctttct

SEQ ID NO: 685990 - DNA, 15 bp, Homo sapiens
aatactgtctttctt

SEQ ID NO: 685991 - DNA, 15 bp, Homo sapiens
atactgtctttcttt

SEQ ID NO: 685992 - DNA, 15 bp, Homo sapiens
tactgtctttcttta

SEQ ID NO: 685993 - DNA, 15 bp, Homo sapiens
actgtctttctttac

SEQ ID NO: 685994 - DNA, 15 bp, Homo sapiens
ctgtctttctttacc

SEQ ID NO: 685995 - DNA, 15 bp, Homo sapiens
tgtctttctttaccc

SEQ ID NO: 685996 - DNA, 15 bp, Homo sapiens
gtctttctttaccca

SEQ ID NO: 685997 - DNA, 15 bp, Homo sapiens
tctttctttacccac

SEQ ID NO: 685998 - DNA, 15 bp, Homo sapiens
ctttctttacccact

SEQ ID NO: 685999 - DNA, 15 bp, Homo sapiens
tttctttacccactt

SEQ ID NO: 686000 - DNA, 15 bp, Homo sapiens
ttctttacccactta

SEQ ID NO: 686001 - DNA, 15 bp, Homo sapiens
tctttacccacttat

SEQ ID NO: 686002 - DNA, 15 bp, Homo sapiens
ctttacccacttatt

SEQ ID NO: 686003 - DNA, 15 bp, Homo sapiens
tttacccacttattt

SEQ ID NO: 686004 - DNA, 15 bp, Homo sapiens
ttacccacttatttt

SEQ ID NO: 686005 - DNA, 15 bp, Homo sapiens
tacccacttattttg

SEQ ID NO: 686006 - DNA, 15 bp, Homo sapiens
acccacttattttgg

SEQ ID NO: 686007 - DNA, 15 bp, Homo sapiens
cccacttattttgga

SEQ ID NO: 686008 - DNA, 15 bp, Homo sapiens
ccacttattttggat

SEQ ID NO: 686009 - DNA, 15 bp, Homo sapiens
cacttattttggatt

SEQ ID NO: 686010 - DNA, 15 bp, Homo sapiens
acttattttggattt

SEQ ID NO: 686011 - DNA, 15 bp, Homo sapiens
cttattttggatttt

SEQ ID NO: 686012 - DNA, 15 bp, Homo sapiens
ttattttggattttt

SEQ ID NO: 686013 - DNA, 15 bp, Homo sapiens
tattttggatttttt

SEQ ID NO: 686014 - DNA, 15 bp, Homo sapiens
attttggattttttt

SEQ ID NO: 686015 - DNA, 15 bp, Homo sapiens
ttttggatttttttg

SEQ ID NO: 686016 - DNA, 15 bp, Homo sapiens
tttggatttttttgg

SEQ ID NO: 686017 - DNA, 15 bp, Homo sapiens
ttggatttttttggt

SEQ ID NO: 686018 - DNA, 15 bp, Homo sapiens
tggatttttttggtc

SEQ ID NO: 686019 - DNA, 15 bp, Homo sapiens
ggatttttttggtct

SEQ ID NO: 686020 - DNA, 15 bp, Homo sapiens
gatttttttggtctt

SEQ ID NO: 686021 - DNA, 15 bp, Homo sapiens
atttttttggtcttg

SEQ ID NO: 686022 - DNA, 15 bp, Homo sapiens
tttttttggtcttgt

SEQ ID NO: 686023 - DNA, 15 bp, Homo sapiens
ttttttggtcttgtt

SEQ ID NO: 686024 - DNA, 15 bp, Homo sapiens
tttttggtcttgttt

SEQ ID NO: 686025 - DNA, 15 bp, Homo sapiens
ttttggtcttgtttt

SEQ ID NO: 686026 - DNA, 15 bp, Homo sapiens
tttggtcttgttttt

SEQ ID NO: 686027 - DNA, 15 bp, Homo sapiens
ttggtcttgtttttt

SEQ ID NO: 686028 - DNA, 15 bp, Homo sapiens
tggtcttgttttttg

SEQ ID NO: 686029 - DNA, 15 bp, Homo sapiens
ggtcttgttttttgt

SEQ ID NO: 686030 - DNA, 15 bp, Homo sapiens
gtcttgttttttgtt

SEQ ID NO: 686031 - DNA, 15 bp, Homo sapiens
tcttgttttttgttt

SEQ ID NO: 686032 - DNA, 15 bp, Homo sapiens
cttgttttttgtttg

SEQ ID NO: 686033 - DNA, 15 bp, Homo sapiens
ttgttttttgtttgt

SEQ ID NO: 686034 - DNA, 15 bp, Homo sapiens
tgttttttgtttgtt

SEQ ID NO: 686035 - DNA, 15 bp, Homo sapiens
gttttttgtttgttt

SEQ ID NO: 686036 - DNA, 15 bp, Homo sapiens
ttgtttgtttgtttg

SEQ ID NO: 686037 - DNA, 15 bp, Homo sapiens
tgtttgtttgtttgt

SEQ ID NO: 686038 - DNA, 15 bp, Homo sapiens
gtttgtttgtttgtt

SEQ ID NO: 686039 - DNA, 15 bp, Homo sapiens
tttgtttgtttttga

SEQ ID NO: 686040 - DNA, 15 bp, Homo sapiens
ttgtttgtttttgag

SEQ ID NO: 686041 - DNA, 15 bp, Homo sapiens
tgtttgtttttgagt

SEQ ID NO: 686042 - DNA, 15 bp, Homo sapiens
gtttgtttttgagtt

SEQ ID NO: 686043 - DNA, 15 bp, Homo sapiens
tttgtttttgagttt

SEQ ID NO: 686044 - DNA, 15 bp, Homo sapiens
ttgtttttgagtttg

SEQ ID NO: 686045 - DNA, 15 bp, Homo sapiens
tgtttttgagtttga

SEQ ID NO: 686046 - DNA, 15 bp, Homo sapiens
gtttttgagtttgac

SEQ ID NO: 686047 - DNA, 15 bp, Homo sapiens
tttttgagtttgaca

SEQ ID NO: 686048 - DNA, 15 bp, Homo sapiens
ttttgagtttgacaa

SEQ ID NO: 686049 - DNA, 15 bp, Homo sapiens
tttgagtttgacaaa

SEQ ID NO: 686050 - DNA, 15 bp, Homo sapiens
ttgagtttgacaaat

SEQ ID NO: 686051 - DNA, 15 bp, Homo sapiens
tgagtttgacaaatt

SEQ ID NO: 686052 - DNA, 15 bp, Homo sapiens
gagtttgacaaattt

SEQ ID NO: 686053 - DNA, 15 bp, Homo sapiens
agtttgacaaattta

SEQ ID NO: 686054 - DNA, 15 bp, Homo sapiens
gtttgacaaatttat

SEQ ID NO: 686055 - DNA, 15 bp, Homo sapiens
tttgacaaatttatt

SEQ ID NO: 686056 - DNA, 15 bp, Homo sapiens
ttgacaaatttattg

SEQ ID NO: 686057 - DNA, 15 bp, Homo sapiens
tgacaaatttattgg

SEQ ID NO: 686058 - DNA, 15 bp, Homo sapiens
gacaaatttattggt

SEQ ID NO: 686059 - DNA, 15 bp, Homo sapiens
acaaatttattggta

SEQ ID NO: 686060 - DNA, 15 bp, Homo sapiens
caaatttattggtat

SEQ ID NO: 686061 - DNA, 15 bp, Homo sapiens
aaatttattggtatt

SEQ ID NO: 686062 - DNA, 15 bp, Homo sapiens
aatttattggtattt

SEQ ID NO: 686063 - DNA, 15 bp, Homo sapiens
atttattggtatttt

SEQ ID NO: 686064 - DNA, 15 bp, Homo sapiens
tttattggtatttta

SEQ ID NO: 686065 - DNA, 15 bp, Homo sapiens
ttattggtattttat

SEQ ID NO: 686066 - DNA, 15 bp, Homo sapiens
tattggtattttatt

SEQ ID NO: 686067 - DNA, 15 bp, Homo sapiens
attggtattttatta

SEQ ID NO: 686068 - DNA, 15 bp, Homo sapiens
ttggtattttattaa

SEQ ID NO: 686069 - DNA, 15 bp, Homo sapiens
tggtattttattaaa

SEQ ID NO: 686070 - DNA, 15 bp, Homo sapiens
ggtattttattaaag

SEQ ID NO: 686071 - DNA, 15 bp, Homo sapiens
gtattttattaaaga

SEQ ID NO: 686072 - DNA, 15 bp, Homo sapiens
tattttattaaagac

SEQ ID NO: 686073 - DNA, 15 bp, Homo sapiens
attttattaaagaca

SEQ ID NO: 686074 - DNA, 15 bp, Homo sapiens
ttttattaaagacat

SEQ ID NO: 686075 - DNA, 15 bp, Homo sapiens
tttattaaagacatt

SEQ ID NO: 686076 - DNA, 15 bp, Homo sapiens
ttattaaagacattc

SEQ ID NO: 686077 - DNA, 15 bp, Homo sapiens
tattaaagacattca

SEQ ID NO: 686078 - DNA, 15 bp, Homo sapiens
attaaagacattcat

SEQ ID NO: 686079 - DNA, 15 bp, Homo sapiens
ttaaagacattcatc

SEQ ID NO: 686080 - DNA, 15 bp, Homo sapiens
taaagacattcatct

SEQ ID NO: 686081 - DNA, 15 bp, Homo sapiens
aaagacattcatctc

SEQ ID NO: 686082 - DNA, 15 bp, Homo sapiens
aagacattcatctca

SEQ ID NO: 686083 - DNA, 15 bp, Homo sapiens
agacattcatctcag

SEQ ID NO: 686084 - DNA, 15 bp, Homo sapiens
gacattcatctcagt

SEQ ID NO: 686085 - DNA, 15 bp, Homo sapiens
acattcatctcagtt

SEQ ID NO: 686086 - DNA, 15 bp, Homo sapiens
cattcatctcagttg

SEQ ID NO: 686087 - DNA, 15 bp, Homo sapiens
attcatctcagttgt

SEQ ID NO: 686088 - DNA, 15 bp, Homo sapiens
ttcatctcagttgtt

SEQ ID NO: 686089 - DNA, 15 bp, Homo sapiens
tcatctcagttgttt

SEQ ID NO: 686090 - DNA, 15 bp, Homo sapiens
catctcagttgtttc

SEQ ID NO: 686091 - DNA, 15 bp, Homo sapiens
atctcagttgtttct

SEQ ID NO: 686092 - DNA, 15 bp, Homo sapiens
tctcagttgtttctc

SEQ ID NO: 686093 - DNA, 15 bp, Homo sapiens
ctcagttgtttctct

SEQ ID NO: 686094 - DNA, 15 bp, Homo sapiens
tcagttgtttctctc

SEQ ID NO: 686095 - DNA, 15 bp, Homo sapiens
cagttgtttctctct

SEQ ID NO: 686096 - DNA, 15 bp, Homo sapiens
agttgtttctctctc

SEQ ID NO: 686097 - DNA, 15 bp, Homo sapiens
gttgtttctctctcc

SEQ ID NO: 686098 - DNA, 15 bp, Homo sapiens
ttgtttctctctccc

SEQ ID NO: 686099 - DNA, 15 bp, Homo sapiens
tgtttctctctccca

SEQ ID NO: 686100 - DNA, 15 bp, Homo sapiens
gtttctctctcccag

SEQ ID NO: 686101 - DNA, 15 bp, Homo sapiens
tttctctctcccagc

SEQ ID NO: 686102 - DNA, 15 bp, Homo sapiens
ttctctctcccagct

SEQ ID NO: 686103 - DNA, 15 bp, Homo sapiens
tctctctcccagctt

SEQ ID NO: 686104 - DNA, 15 bp, Homo sapiens
ctctctcccagcttg

SEQ ID NO: 686105 - DNA, 15 bp, Homo sapiens
tctctcccagcttga

SEQ ID NO: 686106 - DNA, 15 bp, Homo sapiens
ctctcccagcttgac

SEQ ID NO: 686107 - DNA, 15 bp, Homo sapiens
tctcccagcttgacc

SEQ ID NO: 686108 - DNA, 15 bp, Homo sapiens
ctcccagcttgacct

SEQ ID NO: 686109 - DNA, 15 bp, Homo sapiens
tcccagcttgacctt

SEQ ID NO: 686110 - DNA, 15 bp, Homo sapiens
cccagcttgacctta

SEQ ID NO: 686111 - DNA, 15 bp, Homo sapiens
ccagcttgaccttag

SEQ ID NO: 686112 - DNA, 15 bp, Homo sapiens
cagcttgaccttagg

SEQ ID NO: 686113 - DNA, 15 bp, Homo sapiens
agcttgaccttaggt

SEQ ID NO: 686114 - DNA, 15 bp, Homo sapiens
gcttgaccttaggtt

SEQ ID NO: 686115 - DNA, 15 bp, Homo sapiens
cttgaccttaggtta

SEQ ID NO: 686116 - DNA, 15 bp, Homo sapiens
ttgaccttaggttaa

SEQ ID NO: 686117 - DNA, 15 bp, Homo sapiens
tgaccttaggttaat

SEQ ID NO: 686118 - DNA, 15 bp, Homo sapiens
gaccttaggttaata

SEQ ID NO: 686119 - DNA, 15 bp, Homo sapiens
accttaggttaatat

SEQ ID NO: 686120 - DNA, 15 bp, Homo sapiens
ccttaggttaatatt

SEQ ID NO: 686121 - DNA, 15 bp, Homo sapiens
cttaggttaatattt

SEQ ID NO: 686122 - DNA, 15 bp, Homo sapiens
ttaggttaatatttc

SEQ ID NO: 686123 - DNA, 15 bp, Homo sapiens
taggttaatatttca

SEQ ID NO: 686124 - DNA, 15 bp, Homo sapiens
aggttaatatttcat

SEQ ID NO: 686125 - DNA, 15 bp, Homo sapiens
ggttaatatttcatt

SEQ ID NO: 686126 - DNA, 15 bp, Homo sapiens
gttaatatttcattt

SEQ ID NO: 686127 - DNA, 15 bp, Homo sapiens
ttaatatttcatttg

SEQ ID NO: 686128 - DNA, 15 bp, Homo sapiens
taatatttcatttgg

SEQ ID NO: 686129 - DNA, 15 bp, Homo sapiens
aatatttcatttggg

SEQ ID NO: 686130 - DNA, 15 bp, Homo sapiens
atatttcatttgggt

SEQ ID NO: 686131 - DNA, 15 bp, Homo sapiens
tatttcatttgggtc

SEQ ID NO: 686132 - DNA, 15 bp, Homo sapiens
atttcatttgggtca

SEQ ID NO: 686133 - DNA, 15 bp, Homo sapiens
tttcatttgggtcaa

SEQ ID NO: 686134 - DNA, 15 bp, Homo sapiens
ttcatttgggtcaag

SEQ ID NO: 686135 - DNA, 15 bp, Homo sapiens
tcatttgggtcaaga

SEQ ID NO: 686136 - DNA, 15 bp, Homo sapiens
catttgggtcaagaa

SEQ ID NO: 686137 - DNA, 15 bp, Homo sapiens
atttgggtcaagaaa

SEQ ID NO: 686138 - DNA, 15 bp, Homo sapiens
tttgggtcaagaaaa

SEQ ID NO: 686139 - DNA, 15 bp, Homo sapiens
ttgggtcaagaaaag

SEQ ID NO: 686140 - DNA, 15 bp, Homo sapiens
tgggtcaagaaaaga

SEQ ID NO: 686141 - DNA, 15 bp, Homo sapiens
gggtcaagaaaagaa

SEQ ID NO: 686142 - DNA, 15 bp, Homo sapiens
ggtcaagaaaagaat

SEQ ID NO: 686143 - DNA, 15 bp, Homo sapiens
gtcaagaaaagaata

SEQ ID NO: 686144 - DNA, 15 bp, Homo sapiens
tcaagaaaagaatat

SEQ ID NO: 686145 - DNA, 15 bp, Homo sapiens
caagaaaagaatatc

SEQ ID NO: 686146 - DNA, 15 bp, Homo sapiens
aagaaaagaatatca

SEQ ID NO: 686147 - DNA, 15 bp, Homo sapiens
agaaaagaatatcag

SEQ ID NO: 686148 - DNA, 15 bp, Homo sapiens
gaaaagaatatcaga

SEQ ID NO: 686149 - DNA, 15 bp, Homo sapiens
aaaagaatatcagaa

SEQ ID NO: 686150 - DNA, 15 bp, Homo sapiens
aaagaatatcagaag

SEQ ID NO: 686151 - DNA, 15 bp, Homo sapiens
aagaatatcagaaga

SEQ ID NO: 686152 - DNA, 15 bp, Homo sapiens
agaatatcagaagag

SEQ ID NO: 686153 - DNA, 15 bp, Homo sapiens
gaatatcagaagagg

SEQ ID NO: 686154 - DNA, 15 bp, Homo sapiens
aatatcagaagaggt

SEQ ID NO: 686155 - DNA, 15 bp, Homo sapiens
atatcagaagaggta

SEQ ID NO: 686156 - DNA, 15 bp, Homo sapiens
tatcagaagaggtat

SEQ ID NO: 686157 - DNA, 15 bp, Homo sapiens
atcagaagaggtatg

SEQ ID NO: 686158 - DNA, 15 bp, Homo sapiens
tcagaagaggtatgt

SEQ ID NO: 686159 - DNA, 15 bp, Homo sapiens
cagaagaggtatgtt

SEQ ID NO: 686160 - DNA, 15 bp, Homo sapiens
agaagaggtatgtta

SEQ ID NO: 686161 - DNA, 15 bp, Homo sapiens
gaagaggtatgttat

SEQ ID NO: 686162 - DNA, 15 bp, Homo sapiens
aagaggtatgttatt

SEQ ID NO: 686163 - DNA, 15 bp, Homo sapiens
agaggtatgttattt

SEQ ID NO: 686164 - DNA, 15 bp, Homo sapiens
gaggtatgttatttt

SEQ ID NO: 686165 - DNA, 15 bp, Homo sapiens
aggtatgttatttta

SEQ ID NO: 686166 - DNA, 15 bp, Homo sapiens
ggtatgttattttaa

SEQ ID NO: 686167 - DNA, 15 bp, Homo sapiens
gtatgttattttaac

SEQ ID NO: 686168 - DNA, 15 bp, Homo sapiens
tatgttattttaaca

SEQ ID NO: 686169 - DNA, 15 bp, Homo sapiens
atgttattttaacaa

SEQ ID NO: 686170 - DNA, 15 bp, Homo sapiens
tgttattttaacaaa

SEQ ID NO: 686171 - DNA, 15 bp, Homo sapiens
gttattttaacaaac

SEQ ID NO: 686172 - DNA, 15 bp, Homo sapiens
ttattttaacaaaca

SEQ ID NO: 686173 - DNA, 15 bp, Homo sapiens
tattttaacaaacag

SEQ ID NO: 686174 - DNA, 15 bp, Homo sapiens
attttaacaaacagg

SEQ ID NO: 686175 - DNA, 15 bp, Homo sapiens
ttttaacaaacagga

SEQ ID NO: 686176 - DNA, 15 bp, Homo sapiens
tttaacaaacaggaa

SEQ ID NO: 686177 - DNA, 15 bp, Homo sapiens
ttaacaaacaggaaa

SEQ ID NO: 686178 - DNA, 15 bp, Homo sapiens
taacaaacaggaaaa

SEQ ID NO: 686179 - DNA, 15 bp, Homo sapiens
aacaaacaggaaaat

SEQ ID NO: 686180 - DNA, 15 bp, Homo sapiens
acaaacaggaaaatg

SEQ ID NO: 686181 - DNA, 15 bp, Homo sapiens
caaacaggaaaatgg

SEQ ID NO: 686182 - DNA, 15 bp, Homo sapiens
aaacaggaaaatgga

SEQ ID NO: 686183 - DNA, 15 bp, Homo sapiens
aacaggaaaatggac

SEQ ID NO: 686184 - DNA, 15 bp, Homo sapiens
acaggaaaatggaca

SEQ ID NO: 686185 - DNA, 15 bp, Homo sapiens
caggaaaatggacaa

SEQ ID NO: 686186 - DNA, 15 bp, Homo sapiens
aggaaaatggacaaa

SEQ ID NO: 686187 - DNA, 15 bp, Homo sapiens
ggaaaatggacaaaa

SEQ ID NO: 686188 - DNA, 15 bp, Homo sapiens
gaaaatggacaaaaa

SEQ ID NO: 686189 - DNA, 15 bp, Homo sapiens
aaaatggacaaaaat

SEQ ID NO: 686190 - DNA, 15 bp, Homo sapiens
aaatggacaaaaatg

SEQ ID NO: 686191 - DNA, 15 bp, Homo sapiens
aatggacaaaaatgg

SEQ ID NO: 686192 - DNA, 15 bp, Homo sapiens
atggacaaaaatgga

SEQ ID NO: 686193 - DNA, 15 bp, Homo sapiens
tggacaaaaatggat

SEQ ID NO: 686194 - DNA, 15 bp, Homo sapiens
ggacaaaaatggata

SEQ ID NO: 686195 - DNA, 15 bp, Homo sapiens
gacaaaaatggatag

SEQ ID NO: 686196 - DNA, 15 bp, Homo sapiens
acaaaaatggatagt

SEQ ID NO: 686197 - DNA, 15 bp, Homo sapiens
caaaaatggatagtt

SEQ ID NO: 686198 - DNA, 15 bp, Homo sapiens
aaaaatggatagttt

SEQ ID NO: 686199 - DNA, 15 bp, Homo sapiens
aaaatggatagtttg

SEQ ID NO: 686200 - DNA, 15 bp, Homo sapiens
aaatggatagtttgc

SEQ ID NO: 686201 - DNA, 15 bp, Homo sapiens
aatggatagtttgcc

SEQ ID NO: 686202 - DNA, 15 bp, Homo sapiens
atggatagtttgcct

SEQ ID NO: 686203 - DNA, 15 bp, Homo sapiens
tggatagtttgccta

SEQ ID NO: 686204 - DNA, 15 bp, Homo sapiens
ggatagtttgcctac

SEQ ID NO: 686205 - DNA, 15 bp, Homo sapiens
gatagtttgcctaca

SEQ ID NO: 686206 - DNA, 15 bp, Homo sapiens
atagtttgcctacat

SEQ ID NO: 686207 - DNA, 15 bp, Homo sapiens
tagtttgcctacatt

SEQ ID NO: 686208 - DNA, 15 bp, Homo sapiens
agtttgcctacatta

SEQ ID NO: 686209 - DNA, 15 bp, Homo sapiens
gtttgcctacattaa

SEQ ID NO: 686210 - DNA, 15 bp, Homo sapiens
tttgcctacattaaa

SEQ ID NO: 686211 - DNA, 15 bp, Homo sapiens
ttgcctacattaaag

SEQ ID NO: 686212 - DNA, 15 bp, Homo sapiens
tgcctacattaaagt

SEQ ID NO: 686213 - DNA, 15 bp, Homo sapiens
gcctacattaaagtg

SEQ ID NO: 686214 - DNA, 15 bp, Homo sapiens
cctacattaaagtga

SEQ ID NO: 686215 - DNA, 15 bp, Homo sapiens
ctacattaaagtgag

SEQ ID NO: 686216 - DNA, 15 bp, Homo sapiens
tacattaaagtgagt

SEQ ID NO: 686217 - DNA, 15 bp, Homo sapiens
acattaaagtgagtt

SEQ ID NO: 686218 - DNA, 15 bp, Homo sapiens
cattaaagtgagtta

SEQ ID NO: 686219 - DNA, 15 bp, Homo sapiens
attaaagtgagttaa

SEQ ID NO: 686220 - DNA, 15 bp, Homo sapiens
ttaaagtgagttaaa

SEQ ID NO: 686221 - DNA, 15 bp, Homo sapiens
taaagtgagttaaat

SEQ ID NO: 686222 - DNA, 15 bp, Homo sapiens
aaagtgagttaaatt

SEQ ID NO: 686223 - DNA, 15 bp, Homo sapiens
aagtgagttaaattc

SEQ ID NO: 686224 - DNA, 15 bp, Homo sapiens
agtgagttaaattca

SEQ ID NO: 686225 - DNA, 15 bp, Homo sapiens
gtgagttaaattcaa

SEQ ID NO: 686226 - DNA, 15 bp, Homo sapiens
tgagttaaattcaag

SEQ ID NO: 686227 - DNA, 15 bp, Homo sapiens
gagttaaattcaagt

SEQ ID NO: 686228 - DNA, 15 bp, Homo sapiens
agttaaattcaagta

SEQ ID NO: 686229 - DNA, 15 bp, Homo sapiens
gttaaattcaagtat

SEQ ID NO: 686230 - DNA, 15 bp, Homo sapiens
ttaaattcaagtatc

SEQ ID NO: 686231 - DNA, 15 bp, Homo sapiens
taaattcaagtatct

SEQ ID NO: 686232 - DNA, 15 bp, Homo sapiens
aaattcaagtatctt

SEQ ID NO: 686233 - DNA, 15 bp, Homo sapiens
aattcaagtatcttg

SEQ ID NO: 686234 - DNA, 15 bp, Homo sapiens
attcaagtatcttga

SEQ ID NO: 686235 - DNA, 15 bp, Homo sapiens
ttcaagtatcttgat

SEQ ID NO: 686236 - DNA, 15 bp, Homo sapiens
tcaagtatcttgata

SEQ ID NO: 686237 - DNA, 15 bp, Homo sapiens
caagtatcttgatat

SEQ ID NO: 686238 - DNA, 15 bp, Homo sapiens
aagtatcttgatata

SEQ ID NO: 686239 - DNA, 15 bp, Homo sapiens
agtatcttgatataa

SEQ ID NO: 686240 - DNA, 15 bp, Homo sapiens
gtatcttgatataat

SEQ ID NO: 686241 - DNA, 15 bp, Homo sapiens
tatcttgatataatt

SEQ ID NO: 686242 - DNA, 15 bp, Homo sapiens
atcttgatataatta

SEQ ID NO: 686243 - DNA, 15 bp, Homo sapiens
tcttgatataattaa

SEQ ID NO: 686244 - DNA, 15 bp, Homo sapiens
cttgatataattaaa

SEQ ID NO: 686245 - DNA, 15 bp, Homo sapiens
ttgatataattaaat

SEQ ID NO: 686246 - DNA, 15 bp, Homo sapiens
tgatataattaaatc

SEQ ID NO: 686247 - DNA, 15 bp, Homo sapiens
gatataattaaatca

SEQ ID NO: 686248 - DNA, 15 bp, Homo sapiens
atataattaaatcat

SEQ ID NO: 686249 - DNA, 15 bp, Homo sapiens
tataattaaatcata

SEQ ID NO: 686250 - DNA, 15 bp, Homo sapiens
ataattaaatcatat

SEQ ID NO: 686251 - DNA, 15 bp, Homo sapiens
taattaaatcatata

SEQ ID NO: 686252 - DNA, 15 bp, Homo sapiens
aattaaatcatataa

SEQ ID NO: 686253 - DNA, 15 bp, Homo sapiens
attaaatcatataag

SEQ ID NO: 686254 - DNA, 15 bp, Homo sapiens
ttaaatcatataaga

SEQ ID NO: 686255 - DNA, 15 bp, Homo sapiens
taaatcatataagaa

SEQ ID NO: 686256 - DNA, 15 bp, Homo sapiens
aaatcatataagaac

SEQ ID NO: 686257 - DNA, 15 bp, Homo sapiens
aatcatataagaact

SEQ ID NO: 686258 - DNA, 15 bp, Homo sapiens
atcatataagaacta

SEQ ID NO: 686259 - DNA, 15 bp, Homo sapiens
tcatataagaactaa

SEQ ID NO: 686260 - DNA, 15 bp, Homo sapiens
catataagaactaag

SEQ ID NO: 686261 - DNA, 15 bp, Homo sapiens
atataagaactaaga

SEQ ID NO: 686262 - DNA, 15 bp, Homo sapiens
tataagaactaagag

SEQ ID NO: 686263 - DNA, 15 bp, Homo sapiens
ataagaactaagagt

SEQ ID NO: 686264 - DNA, 15 bp, Homo sapiens
taagaactaagagtt

SEQ ID NO: 686265 - DNA, 15 bp, Homo sapiens
aagaactaagagttc

SEQ ID NO: 686266 - DNA, 15 bp, Homo sapiens
agaactaagagttct

SEQ ID NO: 686267 - DNA, 15 bp, Homo sapiens
gaactaagagttcta

SEQ ID NO: 686268 - DNA, 15 bp, Homo sapiens
aactaagagttctat

SEQ ID NO: 686269 - DNA, 15 bp, Homo sapiens
actaagagttctata

SEQ ID NO: 686270 - DNA, 15 bp, Homo sapiens
ctaagagttctatat

SEQ ID NO: 686271 - DNA, 15 bp, Homo sapiens
taagagttctatata

SEQ ID NO: 686272 - DNA, 15 bp, Homo sapiens
aagagttctatatac

SEQ ID NO: 686273 - DNA, 15 bp, Homo sapiens
agagttctatataca

SEQ ID NO: 686274 - DNA, 15 bp, Homo sapiens
gagttctatatacat

SEQ ID NO: 686275 - DNA, 15 bp, Homo sapiens
agttctatatacatt

SEQ ID NO: 686276 - DNA, 15 bp, Homo sapiens
gttctatatacattt

SEQ ID NO: 686277 - DNA, 15 bp, Homo sapiens
ttctatatacatttc

SEQ ID NO: 686278 - DNA, 15 bp, Homo sapiens
tctatatacatttcc

SEQ ID NO: 686279 - DNA, 15 bp, Homo sapiens
ctatatacatttcca

SEQ ID NO: 686280 - DNA, 15 bp, Homo sapiens
tatatacatttccat

SEQ ID NO: 686281 - DNA, 15 bp, Homo sapiens
atatacatttccatt

SEQ ID NO: 686282 - DNA, 15 bp, Homo sapiens
tatacatttccattg

SEQ ID NO: 686283 - DNA, 15 bp, Homo sapiens
atacatttccattgt

SEQ ID NO: 686284 - DNA, 15 bp, Homo sapiens
tacatttccattgtt

SEQ ID NO: 686285 - DNA, 15 bp, Homo sapiens
acatttccattgttt

SEQ ID NO: 686286 - DNA, 15 bp, Homo sapiens
catttccattgtttt

SEQ ID NO: 686287 - DNA, 15 bp, Homo sapiens
atttccattgtttta

SEQ ID NO: 686288 - DNA, 15 bp, Homo sapiens
tttccattgttttac

SEQ ID NO: 686289 - DNA, 15 bp, Homo sapiens
ttccattgttttacc

SEQ ID NO: 686290 - DNA, 15 bp, Homo sapiens
tccattgttttacct

SEQ ID NO: 686291 - DNA, 15 bp, Homo sapiens
ccattgttttacctg

SEQ ID NO: 686292 - DNA, 15 bp, Homo sapiens
cattgttttacctgg

SEQ ID NO: 686293 - DNA, 15 bp, Homo sapiens
attgttttacctggg

SEQ ID NO: 686294 - DNA, 15 bp, Homo sapiens
ttgttttacctgggg

SEQ ID NO: 686295 - DNA, 15 bp, Homo sapiens
tgttttacctggggc

SEQ ID NO: 686296 - DNA, 15 bp, Homo sapiens
gttttacctggggct

SEQ ID NO: 686297 - DNA, 15 bp, Homo sapiens
ttttacctggggctt

SEQ ID NO: 686298 - DNA, 15 bp, Homo sapiens
tttacctggggctta

SEQ ID NO: 686299 - DNA, 15 bp, Homo sapiens
ttacctggggcttat

SEQ ID NO: 686300 - DNA, 15 bp, Homo sapiens
tacctggggcttatt

SEQ ID NO: 686301 - DNA, 15 bp, Homo sapiens
acctggggcttattc

SEQ ID NO: 686302 - DNA, 15 bp, Homo sapiens
cctggggcttattct

SEQ ID NO: 686303 - DNA, 15 bp, Homo sapiens
ctggggcttattcta

SEQ ID NO: 686304 - DNA, 15 bp, Homo sapiens
tggggcttattctaa

SEQ ID NO: 686305 - DNA, 15 bp, Homo sapiens
ggggcttattctaaa

SEQ ID NO: 686306 - DNA, 15 bp, Homo sapiens
gggcttattctaaac

SEQ ID NO: 686307 - DNA, 15 bp, Homo sapiens
ggcttattctaaact

SEQ ID NO: 686308 - DNA, 15 bp, Homo sapiens
gcttattctaaactt

SEQ ID NO: 686309 - DNA, 15 bp, Homo sapiens
cttattctaaactta

SEQ ID NO: 686310 - DNA, 15 bp, Homo sapiens
ttattctaaacttaa

SEQ ID NO: 686311 - DNA, 15 bp, Homo sapiens
tattctaaacttaaa

SEQ ID NO: 686312 - DNA, 15 bp, Homo sapiens
attctaaacttaaat

SEQ ID NO: 686313 - DNA, 15 bp, Homo sapiens
ttctaaacttaaata

SEQ ID NO: 686314 - DNA, 15 bp, Homo sapiens
tctaaacttaaatac

SEQ ID NO: 686315 - DNA, 15 bp, Homo sapiens
ctaaacttaaatact

SEQ ID NO: 686316 - DNA, 15 bp, Homo sapiens
taaacttaaatacta

SEQ ID NO: 686317 - DNA, 15 bp, Homo sapiens
aaacttaaatactag

SEQ ID NO: 686318 - DNA, 15 bp, Homo sapiens
aacttaaatactagt

SEQ ID NO: 686319 - DNA, 15 bp, Homo sapiens
acttaaatactagtt

SEQ ID NO: 686320 - DNA, 15 bp, Homo sapiens
cttaaatactagtta

SEQ ID NO: 686321 - DNA, 15 bp, Homo sapiens
ttaaatactagttaa

SEQ ID NO: 686322 - DNA, 15 bp, Homo sapiens
taaatactagttaac

SEQ ID NO: 686323 - DNA, 15 bp, Homo sapiens
aaatactagttaaca

SEQ ID NO: 686324 - DNA, 15 bp, Homo sapiens
aatactagttaacaa

SEQ ID NO: 686325 - DNA, 15 bp, Homo sapiens
atactagttaacaaa

SEQ ID NO: 686326 - DNA, 15 bp, Homo sapiens
tactagttaacaaag

SEQ ID NO: 686327 - DNA, 15 bp, Homo sapiens
actagttaacaaaga

SEQ ID NO: 686328 - DNA, 15 bp, Homo sapiens
ctagttaacaaagag

SEQ ID NO: 686329 - DNA, 15 bp, Homo sapiens
tagttaacaaagagt

SEQ ID NO: 686330 - DNA, 15 bp, Homo sapiens
agttaacaaagagtt

SEQ ID NO: 686331 - DNA, 15 bp, Homo sapiens
gttaacaaagagtta

SEQ ID NO: 686332 - DNA, 15 bp, Homo sapiens
ttaacaaagagttag

SEQ ID NO: 686333 - DNA, 15 bp, Homo sapiens
taacaaagagttagg

SEQ ID NO: 686334 - DNA, 15 bp, Homo sapiens
aacaaagagttagga

SEQ ID NO: 686335 - DNA, 15 bp, Homo sapiens
acaaagagttaggaa

SEQ ID NO: 686336 - DNA, 15 bp, Homo sapiens
caaagagttaggaat

SEQ ID NO: 686337 - DNA, 15 bp, Homo sapiens
aaagagttaggaata

SEQ ID NO: 686338 - DNA, 15 bp, Homo sapiens
aagagttaggaatat

SEQ ID NO: 686339 - DNA, 15 bp, Homo sapiens
agagttaggaatata

SEQ ID NO: 686340 - DNA, 15 bp, Homo sapiens
gagttaggaatatac

SEQ ID NO: 686341 - DNA, 15 bp, Homo sapiens
agttaggaatataca

SEQ ID NO: 686342 - DNA, 15 bp, Homo sapiens
gttaggaatatacac

SEQ ID NO: 686343 - DNA, 15 bp, Homo sapiens
ttaggaatatacaca

SEQ ID NO: 686344 - DNA, 15 bp, Homo sapiens
taggaatatacacag

SEQ ID NO: 686345 - DNA, 15 bp, Homo sapiens
aggaatatacacagg

SEQ ID NO: 686346 - DNA, 15 bp, Homo sapiens
ggaatatacacaggt

SEQ ID NO: 686347 - DNA, 15 bp, Homo sapiens
gaatatacacaggtt

SEQ ID NO: 686348 - DNA, 15 bp, Homo sapiens
aatatacacaggttg

SEQ ID NO: 686349 - DNA, 15 bp, Homo sapiens
atatacacaggttgc

SEQ ID NO: 686350 - DNA, 15 bp, Homo sapiens
tatacacaggttgct

SEQ ID NO: 686351 - DNA, 15 bp, Homo sapiens
atacacaggttgctt

SEQ ID NO: 686352 - DNA, 15 bp, Homo sapiens
tacacaggttgcttc

SEQ ID NO: 686353 - DNA, 15 bp, Homo sapiens
acacaggttgcttct

SEQ ID NO: 686354 - DNA, 15 bp, Homo sapiens
cacaggttgcttctc

SEQ ID NO: 686355 - DNA, 15 bp, Homo sapiens
acaggttgcttctct

SEQ ID NO: 686356 - DNA, 15 bp, Homo sapiens
caggttgcttctctg

SEQ ID NO: 686357 - DNA, 15 bp, Homo sapiens
aggttgcttctctga

SEQ ID NO: 686358 - DNA, 15 bp, Homo sapiens
ggttgcttctctgag

SEQ ID NO: 686359 - DNA, 15 bp, Homo sapiens
gttgcttctctgagt

SEQ ID NO: 686360 - DNA, 15 bp, Homo sapiens
ttgcttctctgagtt

SEQ ID NO: 686361 - DNA, 15 bp, Homo sapiens
tgcttctctgagtta

SEQ ID NO: 686362 - DNA, 15 bp, Homo sapiens
gcttctctgagttat

SEQ ID NO: 686363 - DNA, 15 bp, Homo sapiens
cttctctgagttatt

SEQ ID NO: 686364 - DNA, 15 bp, Homo sapiens
ttctctgagttatta

SEQ ID NO: 686365 - DNA, 15 bp, Homo sapiens
tctctgagttattac

SEQ ID NO: 686366 - DNA, 15 bp, Homo sapiens
ctctgagttattacc

SEQ ID NO: 686367 - DNA, 15 bp, Homo sapiens
tctgagttattaccg

SEQ ID NO: 686368 - DNA, 15 bp, Homo sapiens
ctgagttattaccga

SEQ ID NO: 686369 - DNA, 15 bp, Homo sapiens
tgagttattaccgac

SEQ ID NO: 686370 - DNA, 15 bp, Homo sapiens
gagttattaccgact

SEQ ID NO: 686371 - DNA, 15 bp, Homo sapiens
agttattaccgacta

SEQ ID NO: 686372 - DNA, 15 bp, Homo sapiens
gttattaccgactaa

SEQ ID NO: 686373 - DNA, 15 bp, Homo sapiens
ttattaccgactaaa

SEQ ID NO: 686374 - DNA, 15 bp, Homo sapiens
tattaccgactaaaa

SEQ ID NO: 686375 - DNA, 15 bp, Homo sapiens
attaccgactaaaag

SEQ ID NO: 686376 - DNA, 15 bp, Homo sapiens
ttaccgactaaaaga

SEQ ID NO: 686377 - DNA, 15 bp, Homo sapiens
taccgactaaaagag

SEQ ID NO: 686378 - DNA, 15 bp, Homo sapiens
accgactaaaagagc

SEQ ID NO: 686379 - DNA, 15 bp, Homo sapiens
ccgactaaaagagct

SEQ ID NO: 686380 - DNA, 15 bp, Homo sapiens
cgactaaaagagctc

SEQ ID NO: 686381 - DNA, 15 bp, Homo sapiens
gactaaaagagctca

SEQ ID NO: 686382 - DNA, 15 bp, Homo sapiens
actaaaagagctcag

SEQ ID NO: 686383 - DNA, 15 bp, Homo sapiens
ctaaaagagctcagc

SEQ ID NO: 686384 - DNA, 15 bp, Homo sapiens
taaaagagctcagcg

SEQ ID NO: 686385 - DNA, 15 bp, Homo sapiens
aaaagagctcagcga

SEQ ID NO: 686386 - DNA, 15 bp, Homo sapiens
aaagagctcagcgag

SEQ ID NO: 686387 - DNA, 15 bp, Homo sapiens
aagagctcagcgagc

SEQ ID NO: 686388 - DNA, 15 bp, Homo sapiens
agagctcagcgagca

SEQ ID NO: 686389 - DNA, 15 bp, Homo sapiens
gagctcagcgagcag

SEQ ID NO: 686390 - DNA, 15 bp, Homo sapiens
agctcagcgagcagt

SEQ ID NO: 686391 - DNA, 15 bp, Homo sapiens
gctcagcgagcagtt

SEQ ID NO: 686392 - DNA, 15 bp, Homo sapiens
ctcagcgagcagtta

SEQ ID NO: 686393 - DNA, 15 bp, Homo sapiens
tcagcgagcagttac

SEQ ID NO: 686394 - DNA, 15 bp, Homo sapiens
cagcgagcagttacc

SEQ ID NO: 686395 - DNA, 15 bp, Homo sapiens
agcgagcagttacca

SEQ ID NO: 686396 - DNA, 15 bp, Homo sapiens
gcgagcagttaccac

SEQ ID NO: 686397 - DNA, 15 bp, Homo sapiens
cgagcagttaccacc

SEQ ID NO: 686398 - DNA, 15 bp, Homo sapiens
gagcagttaccacca

SEQ ID NO: 686399 - DNA, 15 bp, Homo sapiens
agcagttaccaccaa

SEQ ID NO: 686400 - DNA, 15 bp, Homo sapiens
gcagttaccaccaat

SEQ ID NO: 686401 - DNA, 15 bp, Homo sapiens
cagttaccaccaata

SEQ ID NO: 686402 - DNA, 15 bp, Homo sapiens
agttaccaccaataa

SEQ ID NO: 686403 - DNA, 15 bp, Homo sapiens
gttaccaccaataaa

SEQ ID NO: 686404 - DNA, 15 bp, Homo sapiens
ttaccaccaataaaa

SEQ ID NO: 686405 - DNA, 15 bp, Homo sapiens
taccaccaataaaac

SEQ ID NO: 686406 - DNA, 15 bp, Homo sapiens
accaccaataaaacg

SEQ ID NO: 686407 - DNA, 15 bp, Homo sapiens
ccaccaataaaacgg

SEQ ID NO: 686408 - DNA, 15 bp, Homo sapiens
caccaataaaacggt

SEQ ID NO: 686409 - DNA, 15 bp, Homo sapiens
accaataaaacggtc

SEQ ID NO: 686410 - DNA, 15 bp, Homo sapiens
ccaataaaacggtct

SEQ ID NO: 686411 - DNA, 15 bp, Homo sapiens
caataaaacggtctg

SEQ ID NO: 686412 - DNA, 15 bp, Homo sapiens
aataaaacggtctga

SEQ ID NO: 686413 - DNA, 15 bp, Homo sapiens
ataaaacggtctgaa

SEQ ID NO: 686414 - DNA, 15 bp, Homo sapiens
taaaacggtctgaag

SEQ ID NO: 686415 - DNA, 15 bp, Homo sapiens
aaaacggtctgaagc

SEQ ID NO: 686416 - DNA, 15 bp, Homo sapiens
aaacggtctgaagct

SEQ ID NO: 686417 - DNA, 15 bp, Homo sapiens
aacggtctgaagctg

SEQ ID NO: 686418 - DNA, 15 bp, Homo sapiens
acggtctgaagctgc

SEQ ID NO: 686419 - DNA, 15 bp, Homo sapiens
cggtctgaagctgcc

SEQ ID NO: 686420 - DNA, 15 bp, Homo sapiens
ggtctgaagctgcct

SEQ ID NO: 686421 - DNA, 15 bp, Homo sapiens
gtctgaagctgcctc

SEQ ID NO: 686422 - DNA, 15 bp, Homo sapiens
tctgaagctgcctcc

SEQ ID NO: 686423 - DNA, 15 bp, Homo sapiens
ctgaagctgcctcca

SEQ ID NO: 686424 - DNA, 15 bp, Homo sapiens
tgaagctgcctccaa

SEQ ID NO: 686425 - DNA, 15 bp, Homo sapiens
gaagctgcctccaaa

SEQ ID NO: 686426 - DNA, 15 bp, Homo sapiens
aagctgcctccaaat

SEQ ID NO: 686427 - DNA, 15 bp, Homo sapiens
agctgcctccaaata

SEQ ID NO: 686428 - DNA, 15 bp, Homo sapiens
gctgcctccaaatac

SEQ ID NO: 686429 - DNA, 15 bp, Homo sapiens
ctgcctccaaataca

SEQ ID NO: 686430 - DNA, 15 bp, Homo sapiens
tgcctccaaatacaa

SEQ ID NO: 686431 - DNA, 15 bp, Homo sapiens
gcctccaaatacaat

SEQ ID NO: 686432 - DNA, 15 bp, Homo sapiens
cctccaaatacaata

SEQ ID NO: 686433 - DNA, 15 bp, Homo sapiens
ctccaaatacaatat

SEQ ID NO: 686434 - DNA, 15 bp, Homo sapiens
tccaaatacaatatt

SEQ ID NO: 686435 - DNA, 15 bp, Homo sapiens
ccaaatacaatattg

SEQ ID NO: 686436 - DNA, 15 bp, Homo sapiens
caaatacaatattgt

SEQ ID NO: 686437 - DNA, 15 bp, Homo sapiens
aaatacaatattgta

SEQ ID NO: 686438 - DNA, 15 bp, Homo sapiens
aatacaatattgtag

SEQ ID NO: 686439 - DNA, 15 bp, Homo sapiens
atacaatattgtagt

SEQ ID NO: 686440 - DNA, 15 bp, Homo sapiens
tacaatattgtagta

SEQ ID NO: 686441 - DNA, 15 bp, Homo sapiens
acaatattgtagtag

SEQ ID NO: 686442 - DNA, 15 bp, Homo sapiens
caatattgtagtagg

SEQ ID NO: 686443 - DNA, 15 bp, Homo sapiens
aatattgtagtagga

SEQ ID NO: 686444 - DNA, 15 bp, Homo sapiens
atattgtagtaggag

SEQ ID NO: 686445 - DNA, 15 bp, Homo sapiens
tattgtagtaggagt

SEQ ID NO: 686446 - DNA, 15 bp, Homo sapiens
attgtagtaggagtt

SEQ ID NO: 686447 - DNA, 15 bp, Homo sapiens
ttgtagtaggagttt

SEQ ID NO: 686448 - DNA, 15 bp, Homo sapiens
tgtagtaggagtttt

SEQ ID NO: 686449 - DNA, 15 bp, Homo sapiens
gtagtaggagttttc

SEQ ID NO: 686450 - DNA, 15 bp, Homo sapiens
tagtaggagttttca

SEQ ID NO: 686451 - DNA, 15 bp, Homo sapiens
agtaggagttttcaa

SEQ ID NO: 686452 - DNA, 15 bp, Homo sapiens
gtaggagttttcaag

SEQ ID NO: 686453 - DNA, 15 bp, Homo sapiens
taggagttttcaagg

SEQ ID NO: 686454 - DNA, 15 bp, Homo sapiens
aggagttttcaagga

SEQ ID NO: 686455 - DNA, 15 bp, Homo sapiens
ggagttttcaaggaa

SEQ ID NO: 686456 - DNA, 15 bp, Homo sapiens
gagttttcaaggaaa

SEQ ID NO: 686457 - DNA, 15 bp, Homo sapiens
agttttcaaggaaat

SEQ ID NO: 686458 - DNA, 15 bp, Homo sapiens
gttttcaaggaaatt

SEQ ID NO: 686459 - DNA, 15 bp, Homo sapiens
ttttcaaggaaattt

SEQ ID NO: 686460 - DNA, 15 bp, Homo sapiens
tttcaaggaaatttt

SEQ ID NO: 686461 - DNA, 15 bp, Homo sapiens
ttcaaggaaattttt

SEQ ID NO: 686462 - DNA, 15 bp, Homo sapiens
tcaaggaaattttta

SEQ ID NO: 686463 - DNA, 15 bp, Homo sapiens
caaggaaatttttat

SEQ ID NO: 686464 - DNA, 15 bp, Homo sapiens
aaggaaatttttata

SEQ ID NO: 686465 - DNA, 15 bp, Homo sapiens
aggaaatttttatac

SEQ ID NO: 686466 - DNA, 15 bp, Homo sapiens
ggaaatttttatact

SEQ ID NO: 686467 - DNA, 15 bp, Homo sapiens
gaaatttttatactg

SEQ ID NO: 686468 - DNA, 15 bp, Homo sapiens
aaatttttatactgt

SEQ ID NO: 686469 - DNA, 15 bp, Homo sapiens
aatttttatactgta

SEQ ID NO: 686470 - DNA, 15 bp, Homo sapiens
atttttatactgtat

SEQ ID NO: 686471 - DNA, 15 bp, Homo sapiens
tttttatactgtatt

SEQ ID NO: 686472 - DNA, 15 bp, Homo sapiens
ttttatactgtattt

SEQ ID NO: 686473 - DNA, 15 bp, Homo sapiens
tttatactgtatttt

SEQ ID NO: 686474 - DNA, 15 bp, Homo sapiens
ttatactgtattttt

SEQ ID NO: 686475 - DNA, 15 bp, Homo sapiens
tatactgtatttttt

SEQ ID NO: 686476 - DNA, 15 bp, Homo sapiens
atactgtattttttt

SEQ ID NO: 686477 - DNA, 15 bp, Homo sapiens
tactgtatttttttt

SEQ ID NO: 686478 - DNA, 15 bp, Homo sapiens
actgtattttttttt

SEQ ID NO: 686479 - DNA, 15 bp, Homo sapiens
ctgtatttttttttg

SEQ ID NO: 686480 - DNA, 15 bp, Homo sapiens
tgtatttttttttgt

SEQ ID NO: 686481 - DNA, 15 bp, Homo sapiens
gtatttttttttgtc

SEQ ID NO: 686482 - DNA, 15 bp, Homo sapiens
tatttttttttgtct

SEQ ID NO: 686483 - DNA, 15 bp, Homo sapiens
atttttttttgtctg

SEQ ID NO: 686484 - DNA, 15 bp, Homo sapiens
tttttttttgtctgt

SEQ ID NO: 686485 - DNA, 15 bp, Homo sapiens
ttttttttgtctgtg

SEQ ID NO: 686486 - DNA, 15 bp, Homo sapiens
tttttttgtctgtga

SEQ ID NO: 686487 - DNA, 15 bp, Homo sapiens
ttttttgtctgtgac

SEQ ID NO: 686488 - DNA, 15 bp, Homo sapiens
tttttgtctgtgact

SEQ ID NO: 686489 - DNA, 15 bp, Homo sapiens
ttttgtctgtgactg

SEQ ID NO: 686490 - DNA, 15 bp, Homo sapiens
tttgtctgtgactgt

SEQ ID NO: 686491 - DNA, 15 bp, Homo sapiens
ttgtctgtgactgtg

SEQ ID NO: 686492 - DNA, 15 bp, Homo sapiens
tgtctgtgactgtgc

SEQ ID NO: 686493 - DNA, 15 bp, Homo sapiens
gtctgtgactgtgct

SEQ ID NO: 686494 - DNA, 15 bp, Homo sapiens
tctgtgactgtgctt

SEQ ID NO: 686495 - DNA, 15 bp, Homo sapiens
ctgtgactgtgcttt

SEQ ID NO: 686496 - DNA, 15 bp, Homo sapiens
tgtgactgtgctttt

SEQ ID NO: 686497 - DNA, 15 bp, Homo sapiens
gtgactgtgctttta

SEQ ID NO: 686498 - DNA, 15 bp, Homo sapiens
tgactgtgcttttaa

SEQ ID NO: 686499 - DNA, 15 bp, Homo sapiens
gactgtgcttttaaa

SEQ ID NO: 686500 - DNA, 15 bp, Homo sapiens
actgtgcttttaaag

SEQ ID NO: 686501 - DNA, 15 bp, Homo sapiens
ctgtgcttttaaaga

SEQ ID NO: 686502 - DNA, 15 bp, Homo sapiens
tgtgcttttaaagat

SEQ ID NO: 686503 - DNA, 15 bp, Homo sapiens
gtgcttttaaagatg

SEQ ID NO: 686504 - DNA, 15 bp, Homo sapiens
tgcttttaaagatgt

SEQ ID NO: 686505 - DNA, 15 bp, Homo sapiens
gcttttaaagatgtg

SEQ ID NO: 686506 - DNA, 15 bp, Homo sapiens
cttttaaagatgtgt

SEQ ID NO: 686507 - DNA, 15 bp, Homo sapiens
ttttaaagatgtgtt

SEQ ID NO: 686508 - DNA, 15 bp, Homo sapiens
tttaaagatgtgttt

SEQ ID NO: 686509 - DNA, 15 bp, Homo sapiens
ttaaagatgtgttta

SEQ ID NO: 686510 - DNA, 15 bp, Homo sapiens
taaagatgtgtttaa

SEQ ID NO: 686511 - DNA, 15 bp, Homo sapiens
aaagatgtgtttaac

SEQ ID NO: 686512 - DNA, 15 bp, Homo sapiens
aagatgtgtttaact

SEQ ID NO: 686513 - DNA, 15 bp, Homo sapiens
agatgtgtttaactg

SEQ ID NO: 686514 - DNA, 15 bp, Homo sapiens
gatgtgtttaactgt

SEQ ID NO: 686515 - DNA, 15 bp, Homo sapiens
atgtgtttaactgtc

SEQ ID NO: 686516 - DNA, 15 bp, Homo sapiens
tgtgtttaactgtca

SEQ ID NO: 686517 - DNA, 15 bp, Homo sapiens
gtgtttaactgtcac

SEQ ID NO: 686518 - DNA, 15 bp, Homo sapiens
tgtttaactgtcaca

SEQ ID NO: 686519 - DNA, 15 bp, Homo sapiens
gtttaactgtcacat

SEQ ID NO: 686520 - DNA, 15 bp, Homo sapiens
tttaactgtcacatt

SEQ ID NO: 686521 - DNA, 15 bp, Homo sapiens
ttaactgtcacatta

SEQ ID NO: 686522 - DNA, 15 bp, Homo sapiens
taactgtcacattaa

SEQ ID NO: 686523 - DNA, 15 bp, Homo sapiens
aactgtcacattaaa

SEQ ID NO: 686524 - DNA, 15 bp, Homo sapiens
actgtcacattaaaa

SEQ ID NO: 686525 - DNA, 15 bp, Homo sapiens
ctgtcacattaaaaa

SEQ ID NO: 686526 - DNA, 15 bp, Homo sapiens
tgtcacattaaaaaa

SEQ ID NO: 686527 - DNA, 15 bp, Homo sapiens
gtcacattaaaaaaa

SEQ ID NO: 686528 - DNA, 15 bp, Homo sapiens
tcacattaaaaaaaa

SEQ ID NO: 686529 - DNA, 15 bp, Homo sapiens
cacattaaaaaaaaa

SEQ ID NO: 686530 - DNA, 15 bp, Homo sapiens
acattaaaaaaaaag

SEQ ID NO: 686531 - DNA, 15 bp, Homo sapiens
cattaaaaaaaaagt

SEQ ID NO: 686532 - DNA, 15 bp, Homo sapiens
attaaaaaaaaagtt

SEQ ID NO: 686533 - DNA, 15 bp, Homo sapiens
ttaaaaaaaaagttc

SEQ ID NO: 686534 - DNA, 15 bp, Homo sapiens
taaaaaaaaagttcg

SEQ ID NO: 686535 - DNA, 15 bp, Homo sapiens
aaaaaaaaagttcgt

SEQ ID NO: 686536 - DNA, 15 bp, Homo sapiens
aaaaaaaagttcgta

SEQ ID NO: 686537 - DNA, 15 bp, Homo sapiens
aaaaaaagttcgtat

SEQ ID NO: 686538 - DNA, 15 bp, Homo sapiens
aaaaaagttcgtata

SEQ ID NO: 686539 - DNA, 15 bp, Homo sapiens
aaaaagttcgtatac

SEQ ID NO: 686540 - DNA, 15 bp, Homo sapiens
aaaagttcgtataca

SEQ ID NO: 686541 - DNA, 15 bp, Homo sapiens
aaagttcgtatacaa

SEQ ID NO: 686542 - DNA, 15 bp, Homo sapiens
aagttcgtatacaat

SEQ ID NO: 686543 - DNA, 15 bp, Homo sapiens
agttcgtatacaata

SEQ ID NO: 686544 - DNA, 15 bp, Homo sapiens
gttcgtatacaatac

SEQ ID NO: 686545 - DNA, 15 bp, Homo sapiens
ttcgtatacaataca

SEQ ID NO: 686546 - DNA, 15 bp, Homo sapiens
tcgtatacaatacaa

SEQ ID NO: 686547 - DNA, 15 bp, Homo sapiens
cgtatacaatacaaa

SEQ ID NO: 686548 - DNA, 15 bp, Homo sapiens
gtatacaatacaaaa

SEQ ID NO: 686549 - DNA, 15 bp, Homo sapiens
tatacaatacaaaaa

SEQ ID NO: 686550 - DNA, 15 bp, Homo sapiens
atacaatacaaaaat

SEQ ID NO: 686551 - DNA, 15 bp, Homo sapiens
tacaatacaaaaata

SEQ ID NO: 686552 - DNA, 15 bp, Homo sapiens
acaatacaaaaatac

SEQ ID NO: 686553 - DNA, 15 bp, Homo sapiens
caatacaaaaataca

SEQ ID NO: 686554 - DNA, 15 bp, Homo sapiens
aatacaaaaatacaa

SEQ ID NO: 686555 - DNA, 15 bp, Homo sapiens
atacaaaaatacaaa

SEQ ID NO: 686556 - DNA, 15 bp, Homo sapiens
tacaaaaatacaaaa

SEQ ID NO: 686557 - DNA, 15 bp, Homo sapiens
acaaaaatacaaaaa

SEQ ID NO: 686558 - DNA, 15 bp, Homo sapiens
caaaaatacaaaaag

SEQ ID NO: 686559 - DNA, 15 bp, Homo sapiens
aaaaatacaaaaaga

SEQ ID NO: 686560 - DNA, 15 bp, Homo sapiens
aaaatacaaaaagaa

SEQ ID NO: 686561 - DNA, 15 bp, Homo sapiens
aaatacaaaaagaaa

SEQ ID NO: 686562 - DNA, 15 bp, Homo sapiens
aatacaaaaagaaaa

SEQ ID NO: 686563 - DNA, 15 bp, Homo sapiens
atacaaaaagaaaac

SEQ ID NO: 686564 - DNA, 15 bp, Homo sapiens
tacaaaaagaaaaca

SEQ ID NO: 686565 - DNA, 15 bp, Homo sapiens
acaaaaagaaaacac

SEQ ID NO: 686566 - DNA, 15 bp, Homo sapiens
caaaaagaaaacacc

SEQ ID NO: 686567 - DNA, 15 bp, Homo sapiens
aaaaagaaaacaccc

SEQ ID NO: 686568 - DNA, 15 bp, Homo sapiens
aaaagaaaacaccct

SEQ ID NO: 686569 - DNA, 15 bp, Homo sapiens
aaagaaaacacccta

SEQ ID NO: 686570 - DNA, 15 bp, Homo sapiens
aagaaaacaccctac

SEQ ID NO: 686571 - DNA, 15 bp, Homo sapiens
agaaaacaccctaca

SEQ ID NO: 686572 - DNA, 15 bp, Homo sapiens
gaaaacaccctacaa

SEQ ID NO: 686573 - DNA, 15 bp, Homo sapiens
aaaacaccctacaat

SEQ ID NO: 686574 - DNA, 15 bp, Homo sapiens
aaacaccctacaata

SEQ ID NO: 686575 - DNA, 15 bp, Homo sapiens
aacaccctacaatac

SEQ ID NO: 686576 - DNA, 15 bp, Homo sapiens
acaccctacaataca

SEQ ID NO: 686577 - DNA, 15 bp, Homo sapiens
caccctacaatacac

SEQ ID NO: 686578 - DNA, 15 bp, Homo sapiens
accctacaatacaca

SEQ ID NO: 686579 - DNA, 15 bp, Homo sapiens
ccctacaatacacaa

SEQ ID NO: 686580 - DNA, 15 bp, Homo sapiens
cctacaatacacaaa

SEQ ID NO: 686581 - DNA, 15 bp, Homo sapiens
ctacaatacacaaat

SEQ ID NO: 686582 - DNA, 15 bp, Homo sapiens
tacaatacacaaatt

SEQ ID NO: 686583 - DNA, 15 bp, Homo sapiens
acaatacacaaattc

SEQ ID NO: 686584 - DNA, 15 bp, Homo sapiens
caatacacaaattca

SEQ ID NO: 686585 - DNA, 15 bp, Homo sapiens
aatacacaaattcac

SEQ ID NO: 686586 - DNA, 15 bp, Homo sapiens
atacacaaattcaca

SEQ ID NO: 686587 - DNA, 15 bp, Homo sapiens
tacacaaattcacaa

SEQ ID NO: 686588 - DNA, 15 bp, Homo sapiens
acacaaattcacaaa

SEQ ID NO: 686589 - DNA, 15 bp, Homo sapiens
cacaaattcacaaag

SEQ ID NO: 686590 - DNA, 15 bp, Homo sapiens
acaaattcacaaagt

SEQ ID NO: 686591 - DNA, 15 bp, Homo sapiens
caaattcacaaagta

SEQ ID NO: 686592 - DNA, 15 bp, Homo sapiens
aaattcacaaagtat

SEQ ID NO: 686593 - DNA, 15 bp, Homo sapiens
aattcacaaagtatg

SEQ ID NO: 686594 - DNA, 15 bp, Homo sapiens
attcacaaagtatgt

SEQ ID NO: 686595 - DNA, 15 bp, Homo sapiens
ttcacaaagtatgtg

SEQ ID NO: 686596 - DNA, 15 bp, Homo sapiens
tcacaaagtatgtgt

SEQ ID NO: 686597 - DNA, 15 bp, Homo sapiens
cacaaagtatgtgtg

SEQ ID NO: 686598 - DNA, 15 bp, Homo sapiens
acaaagtatgtgtgg

SEQ ID NO: 686599 - DNA, 15 bp, Homo sapiens
caaagtatgtgtggt

SEQ ID NO: 686600 - DNA, 15 bp, Homo sapiens
aaagtatgtgtggtg

SEQ ID NO: 686601 - DNA, 15 bp, Homo sapiens
aagtatgtgtggtga

SEQ ID NO: 686602 - DNA, 15 bp, Homo sapiens
agtatgtgtggtgag

SEQ ID NO: 686603 - DNA, 15 bp, Homo sapiens
gtatgtgtggtgaga

SEQ ID NO: 686604 - DNA, 15 bp, Homo sapiens
tatgtgtggtgagat

SEQ ID NO: 686605 - DNA, 15 bp, Homo sapiens
atgtgtggtgagatt

SEQ ID NO: 686606 - DNA, 15 bp, Homo sapiens
tgtgtggtgagattc

SEQ ID NO: 686607 - DNA, 15 bp, Homo sapiens
gtgtggtgagattcc

SEQ ID NO: 686608 - DNA, 15 bp, Homo sapiens
tgtggtgagattcca

SEQ ID NO: 686609 - DNA, 15 bp, Homo sapiens
gtggtgagattccaa

SEQ ID NO: 686610 - DNA, 15 bp, Homo sapiens
tggtgagattccaaa

SEQ ID NO: 686611 - DNA, 15 bp, Homo sapiens
ggtgagattccaaaa

SEQ ID NO: 686612 - DNA, 15 bp, Homo sapiens
gtgagattccaaaaa

SEQ ID NO: 686613 - DNA, 15 bp, Homo sapiens
tgagattccaaaaaa

SEQ ID NO: 686614 - DNA, 15 bp, Homo sapiens
gagattccaaaaaat

SEQ ID NO: 686615 - DNA, 15 bp, Homo sapiens
agattccaaaaaatg

SEQ ID NO: 686616 - DNA, 15 bp, Homo sapiens
gattccaaaaaatgt

SEQ ID NO: 686617 - DNA, 15 bp, Homo sapiens
attccaaaaaatgtt

SEQ ID NO: 686618 - DNA, 15 bp, Homo sapiens
ttccaaaaaatgttt

SEQ ID NO: 686619 - DNA, 15 bp, Homo sapiens
tccaaaaaatgtttg

SEQ ID NO: 686620 - DNA, 15 bp, Homo sapiens
ccaaaaaatgtttga

SEQ ID NO: 686621 - DNA, 15 bp, Homo sapiens
caaaaaatgtttgaa

SEQ ID NO: 686622 - DNA, 15 bp, Homo sapiens
aaaaaatgtttgaag

SEQ ID NO: 686623 - DNA, 15 bp, Homo sapiens
aaaaatgtttgaaga

SEQ ID NO: 686624 - DNA, 15 bp, Homo sapiens
aaaatgtttgaagat

SEQ ID NO: 686625 - DNA, 15 bp, Homo sapiens
aaatgtttgaagatg

SEQ ID NO: 686626 - DNA, 15 bp, Homo sapiens
aatgtttgaagatgc

SEQ ID NO: 686627 - DNA, 15 bp, Homo sapiens
atgtttgaagatgca

SEQ ID NO: 686628 - DNA, 15 bp, Homo sapiens
tgtttgaagatgcat

SEQ ID NO: 686629 - DNA, 15 bp, Homo sapiens
gtttgaagatgcatt

SEQ ID NO: 686630 - DNA, 15 bp, Homo sapiens
tttgaagatgcattt

SEQ ID NO: 686631 - DNA, 15 bp, Homo sapiens
ttgaagatgcatttt

SEQ ID NO: 686632 - DNA, 15 bp, Homo sapiens
tgaagatgcattttc

SEQ ID NO: 686633 - DNA, 15 bp, Homo sapiens
gaagatgcattttct

SEQ ID NO: 686634 - DNA, 15 bp, Homo sapiens
aagatgcattttctt

SEQ ID NO: 686635 - DNA, 15 bp, Homo sapiens
agatgcattttcttt

SEQ ID NO: 686636 - DNA, 15 bp, Homo sapiens
gatgcattttctttc

SEQ ID NO: 686637 - DNA, 15 bp, Homo sapiens
atgcattttctttcc

SEQ ID NO: 686638 - DNA, 15 bp, Homo sapiens
tgcattttctttcct

SEQ ID NO: 686639 - DNA, 15 bp, Homo sapiens
gcattttctttcctt

SEQ ID NO: 686640 - DNA, 15 bp, Homo sapiens
cattttctttccttc

SEQ ID NO: 686641 - DNA, 15 bp, Homo sapiens
attttctttccttct

SEQ ID NO: 686642 - DNA, 15 bp, Homo sapiens
ttttctttccttcta

SEQ ID NO: 686643 - DNA, 15 bp, Homo sapiens
tttctttccttctat

SEQ ID NO: 686644 - DNA, 15 bp, Homo sapiens
ttctttccttctatt

SEQ ID NO: 686645 - DNA, 15 bp, Homo sapiens
tctttccttctattt

SEQ ID NO: 686646 - DNA, 15 bp, Homo sapiens
ctttccttctatttc

SEQ ID NO: 686647 - DNA, 15 bp, Homo sapiens
tttccttctatttca

SEQ ID NO: 686648 - DNA, 15 bp, Homo sapiens
ttccttctatttcag

SEQ ID NO: 686649 - DNA, 15 bp, Homo sapiens
tccttctatttcagt

SEQ ID NO: 686650 - DNA, 15 bp, Homo sapiens
ccttctatttcagta

SEQ ID NO: 686651 - DNA, 15 bp, Homo sapiens
cttctatttcagtat

SEQ ID NO: 686652 - DNA, 15 bp, Homo sapiens
ttctatttcagtatc

SEQ ID NO: 686653 - DNA, 15 bp, Homo sapiens
tctatttcagtatct

SEQ ID NO: 686654 - DNA, 15 bp, Homo sapiens
ctatttcagtatcta

SEQ ID NO: 686655 - DNA, 15 bp, Homo sapiens
tatttcagtatctaa

SEQ ID NO: 686656 - DNA, 15 bp, Homo sapiens
atttcagtatctaaa

SEQ ID NO: 686657 - DNA, 15 bp, Homo sapiens
tttcagtatctaaaa

SEQ ID NO: 686658 - DNA, 15 bp, Homo sapiens
ttcagtatctaaaat

SEQ ID NO: 686659 - DNA, 15 bp, Homo sapiens
tcagtatctaaaatg

SEQ ID NO: 686660 - DNA, 15 bp, Homo sapiens
cagtatctaaaatgt

SEQ ID NO: 686661 - DNA, 15 bp, Homo sapiens
agtatctaaaatgtg

SEQ ID NO: 686662 - DNA, 15 bp, Homo sapiens
gtatctaaaatgtgc

SEQ ID NO: 686663 - DNA, 15 bp, Homo sapiens
tatctaaaatgtgct

SEQ ID NO: 686664 - DNA, 15 bp, Homo sapiens
atctaaaatgtgctt

SEQ ID NO: 686665 - DNA, 15 bp, Homo sapiens
tctaaaatgtgcttt

SEQ ID NO: 686666 - DNA, 15 bp, Homo sapiens
ctaaaatgtgctttt

SEQ ID NO: 686667 - DNA, 15 bp, Homo sapiens
taaaatgtgcttttt

SEQ ID NO: 686668 - DNA, 15 bp, Homo sapiens
aaaatgtgctttttg

SEQ ID NO: 686669 - DNA, 15 bp, Homo sapiens
aaatgtgctttttga

SEQ ID NO: 686670 - DNA, 15 bp, Homo sapiens
aatgtgctttttgag

SEQ ID NO: 686671 - DNA, 15 bp, Homo sapiens
atgtgctttttgaga

SEQ ID NO: 686672 - DNA, 15 bp, Homo sapiens
tgtgctttttgagag

SEQ ID NO: 686673 - DNA, 15 bp, Homo sapiens
gtgctttttgagagg

SEQ ID NO: 686674 - DNA, 15 bp, Homo sapiens
tgctttttgagaggc

SEQ ID NO: 686675 - DNA, 15 bp, Homo sapiens
gctttttgagaggcc

SEQ ID NO: 686676 - DNA, 15 bp, Homo sapiens
ctttttgagaggcca

SEQ ID NO: 686677 - DNA, 15 bp, Homo sapiens
tttttgagaggccat

SEQ ID NO: 686678 - DNA, 15 bp, Homo sapiens
ttttgagaggccatt

SEQ ID NO: 686679 - DNA, 15 bp, Homo sapiens
tttgagaggccattg

SEQ ID NO: 686680 - DNA, 15 bp, Homo sapiens
ttgagaggccattgg

SEQ ID NO: 686681 - DNA, 15 bp, Homo sapiens
tgagaggccattggt

SEQ ID NO: 686682 - DNA, 15 bp, Homo sapiens
gagaggccattggtc

SEQ ID NO: 686683 - DNA, 15 bp, Homo sapiens
agaggccattggtca

SEQ ID NO: 686684 - DNA, 15 bp, Homo sapiens
gaggccattggtcaa

SEQ ID NO: 686685 - DNA, 15 bp, Homo sapiens
aggccattggtcaat

SEQ ID NO: 686686 - DNA, 15 bp, Homo sapiens
ggccattggtcaata

SEQ ID NO: 686687 - DNA, 15 bp, Homo sapiens
gccattggtcaatat

SEQ ID NO: 686688 - DNA, 15 bp, Homo sapiens
ccattggtcaatatg

SEQ ID NO: 686689 - DNA, 15 bp, Homo sapiens
cattggtcaatatgt

SEQ ID NO: 686690 - DNA, 15 bp, Homo sapiens
attggtcaatatgta

SEQ ID NO: 686691 - DNA, 15 bp, Homo sapiens
ttggtcaatatgtat

SEQ ID NO: 686692 - DNA, 15 bp, Homo sapiens
tggtcaatatgtata

SEQ ID NO: 686693 - DNA, 15 bp, Homo sapiens
ggtcaatatgtatac

SEQ ID NO: 686694 - DNA, 15 bp, Homo sapiens
gtcaatatgtataca

SEQ ID NO: 686695 - DNA, 15 bp, Homo sapiens
tcaatatgtatacat

SEQ ID NO: 686696 - DNA, 15 bp, Homo sapiens
caatatgtatacatt

SEQ ID NO: 686697 - DNA, 15 bp, Homo sapiens
aatatgtatacattt

SEQ ID NO: 686698 - DNA, 15 bp, Homo sapiens
atatgtatacattta

SEQ ID NO: 686699 - DNA, 15 bp, Homo sapiens
tatgtatacatttaa

SEQ ID NO: 686700 - DNA, 15 bp, Homo sapiens
atgtatacatttaaa

SEQ ID NO: 686701 - DNA, 15 bp, Homo sapiens
tgtatacatttaaaa

SEQ ID NO: 686702 - DNA, 15 bp, Homo sapiens
gtatacatttaaaat

SEQ ID NO: 686703 - DNA, 15 bp, Homo sapiens
tatacatttaaaata

SEQ ID NO: 686704 - DNA, 15 bp, Homo sapiens
atacatttaaaataa

SEQ ID NO: 686705 - DNA, 15 bp, Homo sapiens
tacatttaaaataaa

SEQ ID NO: 686706 - DNA, 15 bp, Homo sapiens
acatttaaaataaac

SEQ ID NO: 686707 - DNA, 15 bp, Homo sapiens
catttaaaataaacc

SEQ ID NO: 686708 - DNA, 15 bp, Homo sapiens
atttaaaataaacca

SEQ ID NO: 686709 - DNA, 15 bp, Homo sapiens
tttaaaataaaccat

SEQ ID NO: 686710 - DNA, 15 bp, Homo sapiens
ttaaaataaaccata

SEQ ID NO: 686711 - DNA, 15 bp, Homo sapiens
taaaataaaccatat

SEQ ID NO: 686712 - DNA, 15 bp, Homo sapiens
aaaataaaccatata

SEQ ID NO: 686713 - DNA, 15 bp, Homo sapiens
aaataaaccatataa

SEQ ID NO: 686714 - DNA, 15 bp, Homo sapiens
aataaaccatataat

SEQ ID NO: 686715 - DNA, 15 bp, Homo sapiens
ataaaccatataatt

SEQ ID NO: 686716 - DNA, 15 bp, Homo sapiens
taaaccatataattt

SEQ ID NO: 686717 - DNA, 15 bp, Homo sapiens
aaaccatataatttt

SEQ ID NO: 686718 - DNA, 15 bp, Homo sapiens
aaccatataatttta

SEQ ID NO: 686719 - DNA, 15 bp, Homo sapiens
accatataattttac

SEQ ID NO: 686720 - DNA, 15 bp, Homo sapiens
ccatataattttact

SEQ ID NO: 686721 - DNA, 15 bp, Homo sapiens
catataattttacta

SEQ ID NO: 686722 - DNA, 15 bp, Homo sapiens
atataattttactag

SEQ ID NO: 686723 - DNA, 15 bp, Homo sapiens
tataattttactagt

SEQ ID NO: 686724 - DNA, 15 bp, Homo sapiens
ataattttactagta

SEQ ID NO: 686725 - DNA, 15 bp, Homo sapiens
taattttactagtaa

SEQ ID NO: 686726 - DNA, 15 bp, Homo sapiens
aattttactagtaag

SEQ ID NO: 686727 - DNA, 15 bp, Homo sapiens
attttactagtaaga

SEQ ID NO: 686728 - DNA, 15 bp, Homo sapiens
ttttactagtaagaa

SEQ ID NO: 686729 - DNA, 15 bp, Homo sapiens
tttactagtaagaaa

SEQ ID NO: 686730 - DNA, 15 bp, Homo sapiens
ttactagtaagaaag

SEQ ID NO: 686731 - DNA, 15 bp, Homo sapiens
tactagtaagaaagc

SEQ ID NO: 686732 - DNA, 15 bp, Homo sapiens
actagtaagaaagcc

SEQ ID NO: 686733 - DNA, 15 bp, Homo sapiens
ctagtaagaaagcca

SEQ ID NO: 686734 - DNA, 15 bp, Homo sapiens
tagtaagaaagccag

SEQ ID NO: 686735 - DNA, 15 bp, Homo sapiens
agtaagaaagccagt

SEQ ID NO: 686736 - DNA, 15 bp, Homo sapiens
gtaagaaagccagta

SEQ ID NO: 686737 - DNA, 15 bp, Homo sapiens
taagaaagccagtag

SEQ ID NO: 686738 - DNA, 15 bp, Homo sapiens
aagaaagccagtagt

SEQ ID NO: 686739 - DNA, 15 bp, Homo sapiens
agaaagccagtagtt

SEQ ID NO: 686740 - DNA, 15 bp, Homo sapiens
gaaagccagtagtta

SEQ ID NO: 686741 - DNA, 15 bp, Homo sapiens
aaagccagtagttaa

SEQ ID NO: 686742 - DNA, 15 bp, Homo sapiens
aagccagtagttaag

SEQ ID NO: 686743 - DNA, 15 bp, Homo sapiens
agccagtagttaagt

SEQ ID NO: 686744 - DNA, 15 bp, Homo sapiens
gccagtagttaagtt

SEQ ID NO: 686745 - DNA, 15 bp, Homo sapiens
ccagtagttaagttc

SEQ ID NO: 686746 - DNA, 15 bp, Homo sapiens
cagtagttaagttca

SEQ ID NO: 686747 - DNA, 15 bp, Homo sapiens
agtagttaagttcaa

SEQ ID NO: 686748 - DNA, 15 bp, Homo sapiens
gtagttaagttcaat

SEQ ID NO: 686749 - DNA, 15 bp, Homo sapiens
tagttaagttcaatt

SEQ ID NO: 686750 - DNA, 15 bp, Homo sapiens
agttaagttcaattc

SEQ ID NO: 686751 - DNA, 15 bp, Homo sapiens
gttaagttcaattca

SEQ ID NO: 686752 - DNA, 15 bp, Homo sapiens
ttaagttcaattcaa

SEQ ID NO: 686753 - DNA, 15 bp, Homo sapiens
taagttcaattcaaa

SEQ ID NO: 686754 - DNA, 15 bp, Homo sapiens
aagttcaattcaaat

SEQ ID NO: 686755 - DNA, 15 bp, Homo sapiens
agttcaattcaaatt

SEQ ID NO: 686756 - DNA, 15 bp, Homo sapiens
gttcaattcaaattg

SEQ ID NO: 686757 - DNA, 15 bp, Homo sapiens
ttcaattcaaattgg

SEQ ID NO: 686758 - DNA, 15 bp, Homo sapiens
tcaattcaaattgga

SEQ ID NO: 686759 - DNA, 15 bp, Homo sapiens
caattcaaattggat

SEQ ID NO: 686760 - DNA, 15 bp, Homo sapiens
aattcaaattggatt

SEQ ID NO: 686761 - DNA, 15 bp, Homo sapiens
attcaaattggattt

SEQ ID NO: 686762 - DNA, 15 bp, Homo sapiens
ttcaaattggatttc

SEQ ID NO: 686763 - DNA, 15 bp, Homo sapiens
tcaaattggatttca

SEQ ID NO: 686764 - DNA, 15 bp, Homo sapiens
caaattggatttcac

SEQ ID NO: 686765 - DNA, 15 bp, Homo sapiens
aaattggatttcaca

SEQ ID NO: 686766 - DNA, 15 bp, Homo sapiens
aattggatttcacaa

SEQ ID NO: 686767 - DNA, 15 bp, Homo sapiens
attggatttcacaag

SEQ ID NO: 686768 - DNA, 15 bp, Homo sapiens
ttggatttcacaagt

SEQ ID NO: 686769 - DNA, 15 bp, Homo sapiens
tggatttcacaagtt

SEQ ID NO: 686770 - DNA, 15 bp, Homo sapiens
ggatttcacaagtta

SEQ ID NO: 686771 - DNA, 15 bp, Homo sapiens
gatttcacaagttag

SEQ ID NO: 686772 - DNA, 15 bp, Homo sapiens
atttcacaagttagt

SEQ ID NO: 686773 - DNA, 15 bp, Homo sapiens
tttcacaagttagta

SEQ ID NO: 686774 - DNA, 15 bp, Homo sapiens
ttcacaagttagtaa

SEQ ID NO: 686775 - DNA, 15 bp, Homo sapiens
tcacaagttagtaat

SEQ ID NO: 686776 - DNA, 15 bp, Homo sapiens
cacaagttagtaatt

SEQ ID NO: 686777 - DNA, 15 bp, Homo sapiens
acaagttagtaattt

SEQ ID NO: 686778 - DNA, 15 bp, Homo sapiens
caagttagtaattta

SEQ ID NO: 686779 - DNA, 15 bp, Homo sapiens
aagttagtaatttaa

SEQ ID NO: 686780 - DNA, 15 bp, Homo sapiens
agttagtaatttaaa

SEQ ID NO: 686781 - DNA, 15 bp, Homo sapiens
gttagtaatttaaat

SEQ ID NO: 686782 - DNA, 15 bp, Homo sapiens
ttagtaatttaaatc

SEQ ID NO: 686783 - DNA, 15 bp, Homo sapiens
tagtaatttaaatcc

SEQ ID NO: 686784 - DNA, 15 bp, Homo sapiens
agtaatttaaatcct

SEQ ID NO: 686785 - DNA, 15 bp, Homo sapiens
gtaatttaaatcctt

SEQ ID NO: 686786 - DNA, 15 bp, Homo sapiens
taatttaaatccttg

SEQ ID NO: 686787 - DNA, 15 bp, Homo sapiens
aatttaaatccttgg

SEQ ID NO: 686788 - DNA, 15 bp, Homo sapiens
atttaaatccttgga

SEQ ID NO: 686789 - DNA, 15 bp, Homo sapiens
tttaaatccttggac

SEQ ID NO: 686790 - DNA, 15 bp, Homo sapiens
ttaaatccttggaca

SEQ ID NO: 686791 - DNA, 15 bp, Homo sapiens
taaatccttggacaa

SEQ ID NO: 686792 - DNA, 15 bp, Homo sapiens
aaatccttggacaaa

SEQ ID NO: 686793 - DNA, 15 bp, Homo sapiens
aatccttggacaaag

SEQ ID NO: 686794 - DNA, 15 bp, Homo sapiens
atccttggacaaagt

SEQ ID NO: 686795 - DNA, 15 bp, Homo sapiens
tccttggacaaagtt

SEQ ID NO: 686796 - DNA, 15 bp, Homo sapiens
ccttggacaaagtta

SEQ ID NO: 686797 - DNA, 15 bp, Homo sapiens
cttggacaaagttac

SEQ ID NO: 686798 - DNA, 15 bp, Homo sapiens
ttggacaaagttaca

SEQ ID NO: 686799 - DNA, 15 bp, Homo sapiens
tggacaaagttacag

SEQ ID NO: 686800 - DNA, 15 bp, Homo sapiens
ggacaaagttacaga

SEQ ID NO: 686801 - DNA, 15 bp, Homo sapiens
gacaaagttacagaa

SEQ ID NO: 686802 - DNA, 15 bp, Homo sapiens
acaaagttacagaaa

SEQ ID NO: 686803 - DNA, 15 bp, Homo sapiens
caaagttacagaaag

SEQ ID NO: 686804 - DNA, 15 bp, Homo sapiens
aaagttacagaaagt

SEQ ID NO: 686805 - DNA, 15 bp, Homo sapiens
aagttacagaaagtg

SEQ ID NO: 686806 - DNA, 15 bp, Homo sapiens
agttacagaaagtgc

SEQ ID NO: 686807 - DNA, 15 bp, Homo sapiens
gttacagaaagtgca

SEQ ID NO: 686808 - DNA, 15 bp, Homo sapiens
ttacagaaagtgcat

SEQ ID NO: 686809 - DNA, 15 bp, Homo sapiens
tacagaaagtgcatc

SEQ ID NO: 686810 - DNA, 15 bp, Homo sapiens
acagaaagtgcatct

SEQ ID NO: 686811 - DNA, 15 bp, Homo sapiens
cagaaagtgcatctt

SEQ ID NO: 686812 - DNA, 15 bp, Homo sapiens
agaaagtgcatcttc

SEQ ID NO: 686813 - DNA, 15 bp, Homo sapiens
gaaagtgcatcttct

SEQ ID NO: 686814 - DNA, 15 bp, Homo sapiens
aaagtgcatcttctt

SEQ ID NO: 686815 - DNA, 15 bp, Homo sapiens
aagtgcatcttcttg

SEQ ID NO: 686816 - DNA, 15 bp, Homo sapiens
agtgcatcttcttgt

SEQ ID NO: 686817 - DNA, 15 bp, Homo sapiens
gtgcatcttcttgtt

SEQ ID NO: 686818 - DNA, 15 bp, Homo sapiens
tgcatcttcttgttt

SEQ ID NO: 686819 - DNA, 15 bp, Homo sapiens
gcatcttcttgtttt

SEQ ID NO: 686820 - DNA, 15 bp, Homo sapiens
catcttcttgttttc

SEQ ID NO: 686821 - DNA, 15 bp, Homo sapiens
atcttcttgttttcc

SEQ ID NO: 686822 - DNA, 15 bp, Homo sapiens
tcttcttgttttcca

SEQ ID NO: 686823 - DNA, 15 bp, Homo sapiens
cttcttgttttccat

SEQ ID NO: 686824 - DNA, 15 bp, Homo sapiens
ttcttgttttccatc

SEQ ID NO: 686825 - DNA, 15 bp, Homo sapiens
tcttgttttccatct

SEQ ID NO: 686826 - DNA, 15 bp, Homo sapiens
cttgttttccatctt

SEQ ID NO: 686827 - DNA, 15 bp, Homo sapiens
ttgttttccatcttc

SEQ ID NO: 686828 - DNA, 15 bp, Homo sapiens
tgttttccatcttca

SEQ ID NO: 686829 - DNA, 15 bp, Homo sapiens
gttttccatcttcat

SEQ ID NO: 686830 - DNA, 15 bp, Homo sapiens
ttttccatcttcata

SEQ ID NO: 686831 - DNA, 15 bp, Homo sapiens
tttccatcttcatac

SEQ ID NO: 686832 - DNA, 15 bp, Homo sapiens
ttccatcttcataca

SEQ ID NO: 686833 - DNA, 15 bp, Homo sapiens
tccatcttcatacaa

SEQ ID NO: 686834 - DNA, 15 bp, Homo sapiens
ccatcttcatacaat

SEQ ID NO: 686835 - DNA, 15 bp, Homo sapiens
catcttcatacaatg

SEQ ID NO: 686836 - DNA, 15 bp, Homo sapiens
atcttcatacaatgt

SEQ ID NO: 686837 - DNA, 15 bp, Homo sapiens
tcttcatacaatgtt

SEQ ID NO: 686838 - DNA, 15 bp, Homo sapiens
cttcatacaatgtta

SEQ ID NO: 686839 - DNA, 15 bp, Homo sapiens
ttcatacaatgttaa

SEQ ID NO: 686840 - DNA, 15 bp, Homo sapiens
tcatacaatgttaaa

SEQ ID NO: 686841 - DNA, 15 bp, Homo sapiens
catacaatgttaaat

SEQ ID NO: 686842 - DNA, 15 bp, Homo sapiens
atacaatgttaaatt

SEQ ID NO: 686843 - DNA, 15 bp, Homo sapiens
tacaatgttaaattt

SEQ ID NO: 686844 - DNA, 15 bp, Homo sapiens
acaatgttaaatttt

SEQ ID NO: 686845 - DNA, 15 bp, Homo sapiens
caatgttaaattttt

SEQ ID NO: 686846 - DNA, 15 bp, Homo sapiens
aatgttaaatttttt

SEQ ID NO: 686847 - DNA, 15 bp, Homo sapiens
atgttaaattttttt

SEQ ID NO: 686848 - DNA, 15 bp, Homo sapiens
tgttaaatttttttt

SEQ ID NO: 686849 - DNA, 15 bp, Homo sapiens
gttaaattttttttt

SEQ ID NO: 686850 - DNA, 15 bp, Homo sapiens
ttaaatttttttttt

SEQ ID NO: 686851 - DNA, 15 bp, Homo sapiens
taaattttttttttt

SEQ ID NO: 686852 - DNA, 15 bp, Homo sapiens
aaatttttttttttt

SEQ ID NO: 686853 - DNA, 15 bp, Homo sapiens
aattttttttttttg

SEQ ID NO: 686854 - DNA, 15 bp, Homo sapiens
attttttttttttgg

SEQ ID NO: 686855 - DNA, 15 bp, Homo sapiens
ttttttttttttggt

SEQ ID NO: 686856 - DNA, 15 bp, Homo sapiens
tttttttttttggtg

SEQ ID NO: 686857 - DNA, 15 bp, Homo sapiens
ttttttttttggtgt

SEQ ID NO: 686858 - DNA, 15 bp, Homo sapiens
tttttttttggtgtt

SEQ ID NO: 686859 - DNA, 15 bp, Homo sapiens
ttttttttggtgttt

SEQ ID NO: 686860 - DNA, 15 bp, Homo sapiens
tttttttggtgttta

SEQ ID NO: 686861 - DNA, 15 bp, Homo sapiens
ttttttggtgtttat

SEQ ID NO: 686862 - DNA, 15 bp, Homo sapiens
tttttggtgtttata

SEQ ID NO: 686863 - DNA, 15 bp, Homo sapiens
ttttggtgtttatac

SEQ ID NO: 686864 - DNA, 15 bp, Homo sapiens
tttggtgtttatacc

SEQ ID NO: 686865 - DNA, 15 bp, Homo sapiens
ttggtgtttatacct

SEQ ID NO: 686866 - DNA, 15 bp, Homo sapiens
tggtgtttatacctt

SEQ ID NO: 686867 - DNA, 15 bp, Homo sapiens
ggtgtttataccttt

SEQ ID NO: 686868 - DNA, 15 bp, Homo sapiens
gtgtttatacctttt

SEQ ID NO: 686869 - DNA, 15 bp, Homo sapiens
tgtttatacctttta

SEQ ID NO: 686870 - DNA, 15 bp, Homo sapiens
gtttataccttttaa

SEQ ID NO: 686871 - DNA, 15 bp, Homo sapiens
tttataccttttaaa

SEQ ID NO: 686872 - DNA, 15 bp, Homo sapiens
ttataccttttaaaa

SEQ ID NO: 686873 - DNA, 15 bp, Homo sapiens
tataccttttaaaaa

SEQ ID NO: 686874 - DNA, 15 bp, Homo sapiens
ataccttttaaaaaa

SEQ ID NO: 686875 - DNA, 15 bp, Homo sapiens
taccttttaaaaaat

SEQ ID NO: 686876 - DNA, 15 bp, Homo sapiens
accttttaaaaaata

SEQ ID NO: 686877 - DNA, 15 bp, Homo sapiens
ccttttaaaaaataa

SEQ ID NO: 686878 - DNA, 15 bp, Homo sapiens
cttttaaaaaataaa

SEQ ID NO: 686879 - DNA, 15 bp, Homo sapiens
ttttaaaaaataaaa

SEQ ID NO: 686880 - DNA, 15 bp, Homo sapiens
tttaaaaaataaaag

SEQ ID NO: 686881 - DNA, 15 bp, Homo sapiens
ttaaaaaataaaagc

SEQ ID NO: 686882 - DNA, 15 bp, Homo sapiens
taaaaaataaaagca

SEQ ID NO: 686883 - DNA, 15 bp, Homo sapiens
aaaaaataaaagcag

SEQ ID NO: 686884 - DNA, 15 bp, Homo sapiens
aaaaataaaagcagc

SEQ ID NO: 686885 - DNA, 15 bp, Homo sapiens
aaaataaaagcagcc

SEQ ID NO: 686886 - DNA, 15 bp, Homo sapiens
aaataaaagcagcca

SEQ ID NO: 686887 - DNA, 15 bp, Homo sapiens
aataaaagcagccaa

SEQ ID NO: 686888 - DNA, 15 bp, Homo sapiens
ataaaagcagccaaa

SEQ ID NO: 686889 - DNA, 15 bp, Homo sapiens
taaaagcagccaaat

SEQ ID NO: 686890 - DNA, 15 bp, Homo sapiens
aaaagcagccaaata

SEQ ID NO: 686891 - DNA, 15 bp, Homo sapiens
aaagcagccaaatac

SEQ ID NO: 686892 - DNA, 15 bp, Homo sapiens
aagcagccaaatact

SEQ ID NO: 686893 - DNA, 15 bp, Homo sapiens
agcagccaaatactt

SEQ ID NO: 686894 - DNA, 15 bp, Homo sapiens
gcagccaaatactta

SEQ ID NO: 686895 - DNA, 15 bp, Homo sapiens
cagccaaatacttaa

SEQ ID NO: 686896 - DNA, 15 bp, Homo sapiens
agccaaatacttaag

SEQ ID NO: 686897 - DNA, 15 bp, Homo sapiens
gccaaatacttaagc

SEQ ID NO: 686898 - DNA, 15 bp, Homo sapiens
ccaaatacttaagca

SEQ ID NO: 686899 - DNA, 15 bp, Homo sapiens
caaatacttaagcaa

SEQ ID NO: 686900 - DNA, 15 bp, Homo sapiens
aaatacttaagcaat

SEQ ID NO: 686901 - DNA, 15 bp, Homo sapiens
aatacttaagcaata

SEQ ID NO: 686902 - DNA, 15 bp, Homo sapiens
atacttaagcaatat

SEQ ID NO: 686903 - DNA, 15 bp, Homo sapiens
tacttaagcaatatg

SEQ ID NO: 686904 - DNA, 15 bp, Homo sapiens
acttaagcaatatgt

SEQ ID NO: 686905 - DNA, 15 bp, Homo sapiens
cttaagcaatatgta

SEQ ID NO: 686906 - DNA, 15 bp, Homo sapiens
ttaagcaatatgtac

SEQ ID NO: 686907 - DNA, 15 bp, Homo sapiens
taagcaatatgtaca

SEQ ID NO: 686908 - DNA, 15 bp, Homo sapiens
aagcaatatgtacat

SEQ ID NO: 686909 - DNA, 15 bp, Homo sapiens
agcaatatgtacatt

SEQ ID NO: 686910 - DNA, 15 bp, Homo sapiens
gcaatatgtacattt

SEQ ID NO: 686911 - DNA, 15 bp, Homo sapiens
caatatgtacattta

SEQ ID NO: 686912 - DNA, 15 bp, Homo sapiens
aatatgtacatttaa

SEQ ID NO: 686913 - DNA, 15 bp, Homo sapiens
atatgtacatttaaa

SEQ ID NO: 686914 - DNA, 15 bp, Homo sapiens
tatgtacatttaaat

SEQ ID NO: 686915 - DNA, 15 bp, Homo sapiens
atgtacatttaaatt

SEQ ID NO: 686916 - DNA, 15 bp, Homo sapiens
tgtacatttaaattt

SEQ ID NO: 686917 - DNA, 15 bp, Homo sapiens
gtacatttaaatttt

SEQ ID NO: 686918 - DNA, 15 bp, Homo sapiens
tacatttaaattttt

SEQ ID NO: 686919 - DNA, 15 bp, Homo sapiens
acatttaaatttttg

SEQ ID NO: 686920 - DNA, 15 bp, Homo sapiens
catttaaatttttgg

SEQ ID NO: 686921 - DNA, 15 bp, Homo sapiens
atttaaatttttggt

SEQ ID NO: 686922 - DNA, 15 bp, Homo sapiens
tttaaatttttggtg

SEQ ID NO: 686923 - DNA, 15 bp, Homo sapiens
ttaaatttttggtgg

SEQ ID NO: 686924 - DNA, 15 bp, Homo sapiens
taaatttttggtggt

SEQ ID NO: 686925 - DNA, 15 bp, Homo sapiens
aaatttttggtggtg

SEQ ID NO: 686926 - DNA, 15 bp, Homo sapiens
aatttttggtggtgg

SEQ ID NO: 686927 - DNA, 15 bp, Homo sapiens
atttttggtggtggt

SEQ ID NO: 686928 - DNA, 15 bp, Homo sapiens
tttggtggtggtttg

SEQ ID NO: 686929 - DNA, 15 bp, Homo sapiens
ttggtggtggtttgt

SEQ ID NO: 686930 - DNA, 15 bp, Homo sapiens
tggtggtggtttgta

SEQ ID NO: 686931 - DNA, 15 bp, Homo sapiens
ggtggtggtttgtat

SEQ ID NO: 686932 - DNA, 15 bp, Homo sapiens
gtggtggtttgtatt

SEQ ID NO: 686933 - DNA, 15 bp, Homo sapiens
tggtggtttgtattt

SEQ ID NO: 686934 - DNA, 15 bp, Homo sapiens
ggtggtttgtatttt

SEQ ID NO: 686935 - DNA, 15 bp, Homo sapiens
gtggtttgtatttta

SEQ ID NO: 686936 - DNA, 15 bp, Homo sapiens
tggtttgtattttaa

SEQ ID NO: 686937 - DNA, 15 bp, Homo sapiens
ggtttgtattttaaa

SEQ ID NO: 686938 - DNA, 15 bp, Homo sapiens
gtttgtattttaaaa

SEQ ID NO: 686939 - DNA, 15 bp, Homo sapiens
tttgtattttaaaag

SEQ ID NO: 686940 - DNA, 15 bp, Homo sapiens
ttgtattttaaaaga

SEQ ID NO: 686941 - DNA, 15 bp, Homo sapiens
tgtattttaaaagaa

SEQ ID NO: 686942 - DNA, 15 bp, Homo sapiens
gtattttaaaagaaa

SEQ ID NO: 686943 - DNA, 15 bp, Homo sapiens
tattttaaaagaaac

SEQ ID NO: 686944 - DNA, 15 bp, Homo sapiens
attttaaaagaaaca

SEQ ID NO: 686945 - DNA, 15 bp, Homo sapiens
ttttaaaagaaacag

SEQ ID NO: 686946 - DNA, 15 bp, Homo sapiens
tttaaaagaaacagt

SEQ ID NO: 686947 - DNA, 15 bp, Homo sapiens
ttaaaagaaacagtt

SEQ ID NO: 686948 - DNA, 15 bp, Homo sapiens
taaaagaaacagttt

SEQ ID NO: 686949 - DNA, 15 bp, Homo sapiens
aaaagaaacagtttt

SEQ ID NO: 686950 - DNA, 15 bp, Homo sapiens
aaagaaacagttttc

SEQ ID NO: 686951 - DNA, 15 bp, Homo sapiens
aagaaacagttttct

SEQ ID NO: 686952 - DNA, 15 bp, Homo sapiens
agaaacagttttctt

SEQ ID NO: 686953 - DNA, 15 bp, Homo sapiens
gaaacagttttctta

SEQ ID NO: 686954 - DNA, 15 bp, Homo sapiens
aaacagttttcttat

SEQ ID NO: 686955 - DNA, 15 bp, Homo sapiens
aacagttttcttatg

SEQ ID NO: 686956 - DNA, 15 bp, Homo sapiens
acagttttcttatga

SEQ ID NO: 686957 - DNA, 15 bp, Homo sapiens
cagttttcttatgat

SEQ ID NO: 686958 - DNA, 15 bp, Homo sapiens
agttttcttatgatt

SEQ ID NO: 686959 - DNA, 15 bp, Homo sapiens
gttttcttatgattc

SEQ ID NO: 686960 - DNA, 15 bp, Homo sapiens
ttttcttatgattcg

SEQ ID NO: 686961 - DNA, 15 bp, Homo sapiens
tttcttatgattcgc

SEQ ID NO: 686962 - DNA, 15 bp, Homo sapiens
ttcttatgattcgct

SEQ ID NO: 686963 - DNA, 15 bp, Homo sapiens
tcttatgattcgctt

SEQ ID NO: 686964 - DNA, 15 bp, Homo sapiens
cttatgattcgcttc

SEQ ID NO: 686965 - DNA, 15 bp, Homo sapiens
ttatgattcgcttca

SEQ ID NO: 686966 - DNA, 15 bp, Homo sapiens
tatgattcgcttcaa

SEQ ID NO: 686967 - DNA, 15 bp, Homo sapiens
atgattcgcttcaag

SEQ ID NO: 686968 - DNA, 15 bp, Homo sapiens
tgattcgcttcaagt

SEQ ID NO: 686969 - DNA, 15 bp, Homo sapiens
gattcgcttcaagtt

SEQ ID NO: 686970 - DNA, 15 bp, Homo sapiens
attcgcttcaagttc

SEQ ID NO: 686971 - DNA, 15 bp, Homo sapiens
ttcgcttcaagttct

SEQ ID NO: 686972 - DNA, 15 bp, Homo sapiens
tcgcttcaagttctg

SEQ ID NO: 686973 - DNA, 15 bp, Homo sapiens
cgcttcaagttctgg

SEQ ID NO: 686974 - DNA, 15 bp, Homo sapiens
gcttcaagttctggt

SEQ ID NO: 686975 - DNA, 15 bp, Homo sapiens
cttcaagttctggtg

SEQ ID NO: 686976 - DNA, 15 bp, Homo sapiens
ttcaagttctggtgg

SEQ ID NO: 686977 - DNA, 15 bp, Homo sapiens
tcaagttctggtgga

SEQ ID NO: 686978 - DNA, 15 bp, Homo sapiens
caagttctggtggaa

SEQ ID NO: 686979 - DNA, 15 bp, Homo sapiens
aagttctggtggaaa

SEQ ID NO: 686980 - DNA, 15 bp, Homo sapiens
agttctggtggaaat

SEQ ID NO: 686981 - DNA, 15 bp, Homo sapiens
gttctggtggaaatg

SEQ ID NO: 686982 - DNA, 15 bp, Homo sapiens
ttctggtggaaatgc

SEQ ID NO: 686983 - DNA, 15 bp, Homo sapiens
tctggtggaaatgct

SEQ ID NO: 686984 - DNA, 15 bp, Homo sapiens
ctggtggaaatgctt

SEQ ID NO: 686985 - DNA, 15 bp, Homo sapiens
tggtggaaatgctta

SEQ ID NO: 686986 - DNA, 15 bp, Homo sapiens
ggtggaaatgcttac

SEQ ID NO: 686987 - DNA, 15 bp, Homo sapiens
gtggaaatgcttaca

SEQ ID NO: 686988 - DNA, 15 bp, Homo sapiens
tggaaatgcttacag

SEQ ID NO: 686989 - DNA, 15 bp, Homo sapiens
ggaaatgcttacagg

SEQ ID NO: 686990 - DNA, 15 bp, Homo sapiens
gaaatgcttacagga

SEQ ID NO: 686991 - DNA, 15 bp, Homo sapiens
aaatgcttacaggaa

SEQ ID NO: 686992 - DNA, 15 bp, Homo sapiens
aatgcttacaggaac

SEQ ID NO: 686993 - DNA, 15 bp, Homo sapiens
atgcttacaggaact

SEQ ID NO: 686994 - DNA, 15 bp, Homo sapiens
tgcttacaggaacta

SEQ ID NO: 686995 - DNA, 15 bp, Homo sapiens
gcttacaggaactag

SEQ ID NO: 686996 - DNA, 15 bp, Homo sapiens
cttacaggaactagc

SEQ ID NO: 686997 - DNA, 15 bp, Homo sapiens
ttacaggaactagct

SEQ ID NO: 686998 - DNA, 15 bp, Homo sapiens
tacaggaactagcta

SEQ ID NO: 686999 - DNA, 15 bp, Homo sapiens
acaggaactagctaa

SEQ ID NO: 687000 - DNA, 15 bp, Homo sapiens
caggaactagctaat

SEQ ID NO: 687001 - DNA, 15 bp, Homo sapiens
aggaactagctaata

SEQ ID NO: 687002 - DNA, 15 bp, Homo sapiens
ggaactagctaataa

SEQ ID NO: 687003 - DNA, 15 bp, Homo sapiens
gaactagctaataaa

SEQ ID NO: 687004 - DNA, 15 bp, Homo sapiens
aactagctaataaac

SEQ ID NO: 687005 - DNA, 15 bp, Homo sapiens
actagctaataaaca

SEQ ID NO: 687006 - DNA, 15 bp, Homo sapiens
ctagctaataaacaa

SEQ ID NO: 687007 - DNA, 15 bp, Homo sapiens
tagctaataaacaaa

SEQ ID NO: 687008 - DNA, 15 bp, Homo sapiens
agctaataaacaaaa

SEQ ID NO: 687009 - DNA, 15 bp, Homo sapiens
gctaataaacaaaaa

SEQ ID NO: 687010 - DNA, 15 bp, Homo sapiens
ctaataaacaaaaaa

SEQ ID NO: 687011 - DNA, 15 bp, Homo sapiens
taataaacaaaaaac

SEQ ID NO: 687012 - DNA, 15 bp, Homo sapiens
aataaacaaaaaaca

SEQ ID NO: 687013 - DNA, 15 bp, Homo sapiens
ataaacaaaaaacaa

SEQ ID NO: 687014 - DNA, 15 bp, Homo sapiens
taaacaaaaaacaag

SEQ ID NO: 687015 - DNA, 15 bp, Homo sapiens
aaacaaaaaacaaga

SEQ ID NO: 687016 - DNA, 15 bp, Homo sapiens
aacaaaaaacaagag

SEQ ID NO: 687017 - DNA, 15 bp, Homo sapiens
acaaaaaacaagaga

SEQ ID NO: 687018 - DNA, 15 bp, Homo sapiens
caaaaaacaagagaa

SEQ ID NO: 687019 - DNA, 15 bp, Homo sapiens
aaaaaacaagagaag

SEQ ID NO: 687020 - DNA, 15 bp, Homo sapiens
aaaaacaagagaagc

SEQ ID NO: 687021 - DNA, 15 bp, Homo sapiens
aaaacaagagaagca

SEQ ID NO: 687022 - DNA, 15 bp, Homo sapiens
aaacaagagaagcac

SEQ ID NO: 687023 - DNA, 15 bp, Homo sapiens
aacaagagaagcaca

SEQ ID NO: 687024 - DNA, 15 bp, Homo sapiens
acaagagaagcacat

SEQ ID NO: 687025 - DNA, 15 bp, Homo sapiens
caagagaagcacatt

SEQ ID NO: 687026 - DNA, 15 bp, Homo sapiens
aagagaagcacattc

SEQ ID NO: 687027 - DNA, 15 bp, Homo sapiens
agagaagcacattca

SEQ ID NO: 687028 - DNA, 15 bp, Homo sapiens
gagaagcacattcaa

SEQ ID NO: 687029 - DNA, 15 bp, Homo sapiens
agaagcacattcaaa

SEQ ID NO: 687030 - DNA, 15 bp, Homo sapiens
gaagcacattcaaaa

SEQ ID NO: 687031 - DNA, 15 bp, Homo sapiens
aagcacattcaaaat

SEQ ID NO: 687032 - DNA, 15 bp, Homo sapiens
agcacattcaaaata

SEQ ID NO: 687033 - DNA, 15 bp, Homo sapiens
gcacattcaaaatac

SEQ ID NO: 687034 - DNA, 15 bp, Homo sapiens
cacattcaaaatact

SEQ ID NO: 687035 - DNA, 15 bp, Homo sapiens
acattcaaaatactg

SEQ ID NO: 687036 - DNA, 15 bp, Homo sapiens
cattcaaaatactga

SEQ ID NO: 687037 - DNA, 15 bp, Homo sapiens
attcaaaatactgat

SEQ ID NO: 687038 - DNA, 15 bp, Homo sapiens
ttcaaaatactgatt

SEQ ID NO: 687039 - DNA, 15 bp, Homo sapiens
tcaaaatactgattt

SEQ ID NO: 687040 - DNA, 15 bp, Homo sapiens
caaaatactgattta

SEQ ID NO: 687041 - DNA, 15 bp, Homo sapiens
aaaatactgatttac

SEQ ID NO: 687042 - DNA, 15 bp, Homo sapiens
aaatactgatttact

SEQ ID NO: 687043 - DNA, 15 bp, Homo sapiens
aatactgatttactt

SEQ ID NO: 687044 - DNA, 15 bp, Homo sapiens
atactgatttacttt

SEQ ID NO: 687045 - DNA, 15 bp, Homo sapiens
tactgatttactttg

SEQ ID NO: 687046 - DNA, 15 bp, Homo sapiens
actgatttactttgg

SEQ ID NO: 687047 - DNA, 15 bp, Homo sapiens
ctgatttactttggt

SEQ ID NO: 687048 - DNA, 15 bp, Homo sapiens
tgatttactttggta

SEQ ID NO: 687049 - DNA, 15 bp, Homo sapiens
gatttactttggtag

SEQ ID NO: 687050 - DNA, 15 bp, Homo sapiens
atttactttggtagc

SEQ ID NO: 687051 - DNA, 15 bp, Homo sapiens
tttactttggtagca

SEQ ID NO: 687052 - DNA, 15 bp, Homo sapiens
agtggctccaaaggt

SEQ ID NO: 687053 - DNA, 15 bp, Homo sapiens
gtggctccaaaggta

SEQ ID NO: 687054 - DNA, 15 bp, Homo sapiens
tggctccaaaggtag

SEQ ID NO: 687055 - DNA, 15 bp, Homo sapiens
ggctccaaaggtagt

SEQ ID NO: 687056 - DNA, 15 bp, Homo sapiens
gctccaaaggtagtc

SEQ ID NO: 687057 - DNA, 15 bp, Homo sapiens
ctccaaaggtagtct

SEQ ID NO: 687058 - DNA, 15 bp, Homo sapiens
tccaaaggtagtctt

SEQ ID NO: 687059 - DNA, 15 bp, Homo sapiens
ccaaaggtagtctta

SEQ ID NO: 687060 - DNA, 15 bp, Homo sapiens
caaaggtagtcttat

SEQ ID NO: 687061 - DNA, 15 bp, Homo sapiens
aaaggtagtcttata

SEQ ID NO: 687062 - DNA, 15 bp, Homo sapiens
aaggtagtcttatac

SEQ ID NO: 687063 - DNA, 15 bp, Homo sapiens
aggtagtcttatacc

SEQ ID NO: 687064 - DNA, 15 bp, Homo sapiens
ggtagtcttatacca

SEQ ID NO: 687065 - DNA, 15 bp, Homo sapiens
gtagtcttataccat

SEQ ID NO: 687066 - DNA, 15 bp, Homo sapiens
tagtcttataccatt

SEQ ID NO: 687067 - DNA, 15 bp, Homo sapiens
agtcttataccattc

SEQ ID NO: 687068 - DNA, 15 bp, Homo sapiens
gtcttataccattct

SEQ ID NO: 687069 - DNA, 15 bp, Homo sapiens
tcttataccattctt

SEQ ID NO: 687070 - DNA, 15 bp, Homo sapiens
cttataccattctta

SEQ ID NO: 687071 - DNA, 15 bp, Homo sapiens
ttataccattcttaa

SEQ ID NO: 687072 - DNA, 15 bp, Homo sapiens
tataccattcttaaa

SEQ ID NO: 687073 - DNA, 15 bp, Homo sapiens
ataccattcttaaaa

SEQ ID NO: 687074 - DNA, 15 bp, Homo sapiens
taccattcttaaaaa

SEQ ID NO: 687075 - DNA, 15 bp, Homo sapiens
accattcttaaaaaa

SEQ ID NO: 687076 - DNA, 15 bp, Homo sapiens
ccattcttaaaaaaa

SEQ ID NO: 687077 - DNA, 15 bp, Homo sapiens
cattcttaaaaaaag

SEQ ID NO: 687078 - DNA, 15 bp, Homo sapiens
attcttaaaaaaagg

SEQ ID NO: 687079 - DNA, 15 bp, Homo sapiens
ttcttaaaaaaagga

SEQ ID NO: 687080 - DNA, 15 bp, Homo sapiens
tcttaaaaaaaggaa

SEQ ID NO: 687081 - DNA, 15 bp, Homo sapiens
cttaaaaaaaggaaa

SEQ ID NO: 687082 - DNA, 15 bp, Homo sapiens
ttaaaaaaaggaaac

SEQ ID NO: 687083 - DNA, 15 bp, Homo sapiens
taaaaaaaggaaact

SEQ ID NO: 687084 - DNA, 15 bp, Homo sapiens
aaaaaaaggaaactg

SEQ ID NO: 687085 - DNA, 15 bp, Homo sapiens
aaaaaaggaaactgt

SEQ ID NO: 687086 - DNA, 15 bp, Homo sapiens
aaaaaggaaactgtt

SEQ ID NO: 687087 - DNA, 15 bp, Homo sapiens
aaaaggaaactgttc

SEQ ID NO: 687088 - DNA, 15 bp, Homo sapiens
aaaggaaactgttct

SEQ ID NO: 687089 - DNA, 15 bp, Homo sapiens
aaggaaactgttctt

SEQ ID NO: 687090 - DNA, 15 bp, Homo sapiens
aggaaactgttcttt

SEQ ID NO: 687091 - DNA, 15 bp, Homo sapiens
ggaaactgttctttt

SEQ ID NO: 687092 - DNA, 15 bp, Homo sapiens
gaaactgttcttttt

SEQ ID NO: 687093 - DNA, 15 bp, Homo sapiens
aaactgttcttttta

SEQ ID NO: 687094 - DNA, 15 bp, Homo sapiens
aactgttctttttaa

SEQ ID NO: 687095 - DNA, 15 bp, Homo sapiens
actgttctttttaac

SEQ ID NO: 687096 - DNA, 15 bp, Homo sapiens
ctgttctttttaact

SEQ ID NO: 687097 - DNA, 15 bp, Homo sapiens
tgttctttttaactt

SEQ ID NO: 687098 - DNA, 15 bp, Homo sapiens
gttctttttaacttt

SEQ ID NO: 687099 - DNA, 15 bp, Homo sapiens
ttctttttaacttta

SEQ ID NO: 687100 - DNA, 15 bp, Homo sapiens
tctttttaactttat

SEQ ID NO: 687101 - DNA, 15 bp, Homo sapiens
ctttttaactttata

SEQ ID NO: 687102 - DNA, 15 bp, Homo sapiens
tttttaactttatac

SEQ ID NO: 687103 - DNA, 15 bp, Homo sapiens
ttttaactttatacc

SEQ ID NO: 687104 - DNA, 15 bp, Homo sapiens
tttaactttataccc

SEQ ID NO: 687105 - DNA, 15 bp, Homo sapiens
ttaactttataccca

SEQ ID NO: 687106 - DNA, 15 bp, Homo sapiens
taactttatacccac

SEQ ID NO: 687107 - DNA, 15 bp, Homo sapiens
aactttatacccacc

SEQ ID NO: 687108 - DNA, 15 bp, Homo sapiens
actttatacccaccc

SEQ ID NO: 687109 - DNA, 15 bp, Homo sapiens
ctttatacccaccca

SEQ ID NO: 687110 - DNA, 15 bp, Homo sapiens
tttatacccacccac

SEQ ID NO: 687111 - DNA, 15 bp, Homo sapiens
ttatacccacccaca

SEQ ID NO: 687112 - DNA, 15 bp, Homo sapiens
tatacccacccacac

SEQ ID NO: 687113 - DNA, 15 bp, Homo sapiens
atacccacccacacc

SEQ ID NO: 687114 - DNA, 15 bp, Homo sapiens
tacccacccacaccc

SEQ ID NO: 687115 - DNA, 15 bp, Homo sapiens
acccacccacacccc

SEQ ID NO: 687116 - DNA, 15 bp, Homo sapiens
cccacccacacccca

SEQ ID NO: 687117 - DNA, 15 bp, Homo sapiens
ccacccacaccccaa

SEQ ID NO: 687118 - DNA, 15 bp, Homo sapiens
cacccacaccccaat

SEQ ID NO: 687119 - DNA, 15 bp, Homo sapiens
acccacaccccaatt

SEQ ID NO: 687120 - DNA, 15 bp, Homo sapiens
cccacaccccaattt

SEQ ID NO: 687121 - DNA, 15 bp, Homo sapiens
ccacaccccaatttc

SEQ ID NO: 687122 - DNA, 15 bp, Homo sapiens
cacaccccaatttca

SEQ ID NO: 687123 - DNA, 15 bp, Homo sapiens
acaccccaatttcaa

SEQ ID NO: 687124 - DNA, 15 bp, Homo sapiens
caccccaatttcaaa

SEQ ID NO: 687125 - DNA, 15 bp, Homo sapiens
accccaatttcaaaa

SEQ ID NO: 687126 - DNA, 15 bp, Homo sapiens
ccccaatttcaaaac

SEQ ID NO: 687127 - DNA, 15 bp, Homo sapiens
cccaatttcaaaaca

SEQ ID NO: 687128 - DNA, 15 bp, Homo sapiens
ccaatttcaaaacat

SEQ ID NO: 687129 - DNA, 15 bp, Homo sapiens
caatttcaaaacatc

SEQ ID NO: 687130 - DNA, 15 bp, Homo sapiens
aatttcaaaacatca

SEQ ID NO: 687131 - DNA, 15 bp, Homo sapiens
atttcaaaacatcat

SEQ ID NO: 687132 - DNA, 15 bp, Homo sapiens
tttcaaaacatcatt

SEQ ID NO: 687133 - DNA, 15 bp, Homo sapiens
ttcaaaacatcattt

SEQ ID NO: 687134 - DNA, 15 bp, Homo sapiens
tcaaaacatcattta

SEQ ID NO: 687135 - DNA, 15 bp, Homo sapiens
caaaacatcatttaa

SEQ ID NO: 687136 - DNA, 15 bp, Homo sapiens
aaaacatcatttaat

SEQ ID NO: 687137 - DNA, 15 bp, Homo sapiens
aaacatcatttaatt

SEQ ID NO: 687138 - DNA, 15 bp, Homo sapiens
aacatcatttaattg

SEQ ID NO: 687139 - DNA, 15 bp, Homo sapiens
acatcatttaattgt

SEQ ID NO: 687140 - DNA, 15 bp, Homo sapiens
catcatttaattgtc

SEQ ID NO: 687141 - DNA, 15 bp, Homo sapiens
atcatttaattgtct

SEQ ID NO: 687142 - DNA, 15 bp, Homo sapiens
tcatttaattgtctt

SEQ ID NO: 687143 - DNA, 15 bp, Homo sapiens
catttaattgtcttg

SEQ ID NO: 687144 - DNA, 15 bp, Homo sapiens
atttaattgtcttgg

SEQ ID NO: 687145 - DNA, 15 bp, Homo sapiens
tttaattgtcttggt

SEQ ID NO: 687146 - DNA, 15 bp, Homo sapiens
ttaattgtcttggtc

SEQ ID NO: 687147 - DNA, 15 bp, Homo sapiens
taattgtcttggtca

SEQ ID NO: 687148 - DNA, 15 bp, Homo sapiens
aattgtcttggtcat

SEQ ID NO: 687149 - DNA, 15 bp, Homo sapiens
attgtcttggtcata

SEQ ID NO: 687150 - DNA, 15 bp, Homo sapiens
ttgtcttggtcatag

SEQ ID NO: 687151 - DNA, 15 bp, Homo sapiens
tgtcttggtcataga

SEQ ID NO: 687152 - DNA, 15 bp, Homo sapiens
gtcttggtcatagac

SEQ ID NO: 687153 - DNA, 15 bp, Homo sapiens
tcttggtcatagaca

SEQ ID NO: 687154 - DNA, 15 bp, Homo sapiens
cttggtcatagacat

SEQ ID NO: 687155 - DNA, 15 bp, Homo sapiens
ttggtcatagacatt

SEQ ID NO: 687156 - DNA, 15 bp, Homo sapiens
tggtcatagacattt

SEQ ID NO: 687157 - DNA, 15 bp, Homo sapiens
ggtcatagacatttc

SEQ ID NO: 687158 - DNA, 15 bp, Homo sapiens
gtcatagacatttcg

SEQ ID NO: 687159 - DNA, 15 bp, Homo sapiens
tcatagacatttcga

SEQ ID NO: 687160 - DNA, 15 bp, Homo sapiens
catagacatttcgaa

SEQ ID NO: 687161 - DNA, 15 bp, Homo sapiens
atagacatttcgaag

SEQ ID NO: 687162 - DNA, 15 bp, Homo sapiens
tagacatttcgaaga

SEQ ID NO: 687163 - DNA, 15 bp, Homo sapiens
agacatttcgaagat

SEQ ID NO: 687164 - DNA, 15 bp, Homo sapiens
gacatttcgaagatg

SEQ ID NO: 687165 - DNA, 15 bp, Homo sapiens
acatttcgaagatga

SEQ ID NO: 687166 - DNA, 15 bp, Homo sapiens
catttcgaagatgag

SEQ ID NO: 687167 - DNA, 15 bp, Homo sapiens
atttcgaagatgaga

SEQ ID NO: 687168 - DNA, 15 bp, Homo sapiens
tttcgaagatgagat

SEQ ID NO: 687169 - DNA, 15 bp, Homo sapiens
ttcgaagatgagatt

SEQ ID NO: 687170 - DNA, 15 bp, Homo sapiens
tcgaagatgagattt

SEQ ID NO: 687171 - DNA, 15 bp, Homo sapiens
cgaagatgagatttt

SEQ ID NO: 687172 - DNA, 15 bp, Homo sapiens
gaagatgagatttta

SEQ ID NO: 687173 - DNA, 15 bp, Homo sapiens
aagatgagattttat

SEQ ID NO: 687174 - DNA, 15 bp, Homo sapiens
agatgagattttata

SEQ ID NO: 687175 - DNA, 15 bp, Homo sapiens
gatgagattttatat

SEQ ID NO: 687176 - DNA, 15 bp, Homo sapiens
atgagattttatatt

SEQ ID NO: 687177 - DNA, 15 bp, Homo sapiens
tgagattttatattc

SEQ ID NO: 687178 - DNA, 15 bp, Homo sapiens
gagattttatattcc

SEQ ID NO: 687179 - DNA, 15 bp, Homo sapiens
agattttatattcca

SEQ ID NO: 687180 - DNA, 15 bp, Homo sapiens
gattttatattccac

SEQ ID NO: 687181 - DNA, 15 bp, Homo sapiens
attttatattccact

SEQ ID NO: 687182 - DNA, 15 bp, Homo sapiens
ttttatattccactc

SEQ ID NO: 687183 - DNA, 15 bp, Homo sapiens
tttatattccactcc

SEQ ID NO: 687184 - DNA, 15 bp, Homo sapiens
ttatattccactccc

SEQ ID NO: 687185 - DNA, 15 bp, Homo sapiens
tatattccactccca

SEQ ID NO: 687186 - DNA, 15 bp, Homo sapiens
atattccactcccat

SEQ ID NO: 687187 - DNA, 15 bp, Homo sapiens
tattccactcccata

SEQ ID NO: 687188 - DNA, 15 bp, Homo sapiens
attccactcccatag

SEQ ID NO: 687189 - DNA, 15 bp, Homo sapiens
ttccactcccatagc

SEQ ID NO: 687190 - DNA, 15 bp, Homo sapiens
tccactcccatagct

SEQ ID NO: 687191 - DNA, 15 bp, Homo sapiens
ccactcccatagctt

SEQ ID NO: 687192 - DNA, 15 bp, Homo sapiens
cactcccatagcttc

SEQ ID NO: 687193 - DNA, 15 bp, Homo sapiens
actcccatagcttct

SEQ ID NO: 687194 - DNA, 15 bp, Homo sapiens
ctcccatagcttctg

SEQ ID NO: 687195 - DNA, 15 bp, Homo sapiens
tcccatagcttctgg

SEQ ID NO: 687196 - DNA, 15 bp, Homo sapiens
cccatagcttctggt

SEQ ID NO: 687197 - DNA, 15 bp, Homo sapiens
ccatagcttctggtt

SEQ ID NO: 687198 - DNA, 15 bp, Homo sapiens
catagcttctggtta

SEQ ID NO: 687199 - DNA, 15 bp, Homo sapiens
atagcttctggttat

SEQ ID NO: 687200 - DNA, 15 bp, Homo sapiens
tagcttctggttatc

SEQ ID NO: 687201 - DNA, 15 bp, Homo sapiens
agcttctggttatca

SEQ ID NO: 687202 - DNA, 15 bp, Homo sapiens
gcttctggttatcag

SEQ ID NO: 687203 - DNA, 15 bp, Homo sapiens
cttctggttatcaga

SEQ ID NO: 687204 - DNA, 15 bp, Homo sapiens
ttctggttatcagaa

SEQ ID NO: 687205 - DNA, 15 bp, Homo sapiens
tctggttatcagaaa

SEQ ID NO: 687206 - DNA, 15 bp, Homo sapiens
ctggttatcagaaaa

SEQ ID NO: 687207 - DNA, 15 bp, Homo sapiens
tggttatcagaaaac

SEQ ID NO: 687208 - DNA, 15 bp, Homo sapiens
ggttatcagaaaacc

SEQ ID NO: 687209 - DNA, 15 bp, Homo sapiens
gttatcagaaaaccc

SEQ ID NO: 687210 - DNA, 15 bp, Homo sapiens
ttatcagaaaaccca

SEQ ID NO: 687211 - DNA, 15 bp, Homo sapiens
tatcagaaaacccat

SEQ ID NO: 687212 - DNA, 15 bp, Homo sapiens
atcagaaaacccatg

SEQ ID NO: 687213 - DNA, 15 bp, Homo sapiens
tcagaaaacccatgc

SEQ ID NO: 687214 - DNA, 15 bp, Homo sapiens
cagaaaacccatgct

SEQ ID NO: 687215 - DNA, 15 bp, Homo sapiens
agaaaacccatgctt

SEQ ID NO: 687216 - DNA, 15 bp, Homo sapiens
gaaaacccatgcttt

SEQ ID NO: 687217 - DNA, 15 bp, Homo sapiens
aaaacccatgctttc

SEQ ID NO: 687218 - DNA, 15 bp, Homo sapiens
aaacccatgctttcc

SEQ ID NO: 687219 - DNA, 15 bp, Homo sapiens
aacccatgctttcct

SEQ ID NO: 687220 - DNA, 15 bp, Homo sapiens
acccatgctttcctt

SEQ ID NO: 687221 - DNA, 15 bp, Homo sapiens
cccatgctttccttt

SEQ ID NO: 687222 - DNA, 15 bp, Homo sapiens
ccatgctttccttta

SEQ ID NO: 687223 - DNA, 15 bp, Homo sapiens
catgctttcctttat

SEQ ID NO: 687224 - DNA, 15 bp, Homo sapiens
atgctttcctttatt

SEQ ID NO: 687225 - DNA, 15 bp, Homo sapiens
tgctttcctttattg

SEQ ID NO: 687226 - DNA, 15 bp, Homo sapiens
gctttcctttattga

SEQ ID NO: 687227 - DNA, 15 bp, Homo sapiens
ctttcctttattgaa

SEQ ID NO: 687228 - DNA, 15 bp, Homo sapiens
tttcctttattgaag

SEQ ID NO: 687229 - DNA, 15 bp, Homo sapiens
ttcctttattgaagg

SEQ ID NO: 687230 - DNA, 15 bp, Homo sapiens
tcctttattgaagga

SEQ ID NO: 687231 - DNA, 15 bp, Homo sapiens
cctttattgaaggag

SEQ ID NO: 687232 - DNA, 15 bp, Homo sapiens
ctttattgaaggagt

SEQ ID NO: 687233 - DNA, 15 bp, Homo sapiens
tttattgaaggagtt

SEQ ID NO: 687234 - DNA, 15 bp, Homo sapiens
ttattgaaggagttt

SEQ ID NO: 687235 - DNA, 15 bp, Homo sapiens
tattgaaggagtttg

SEQ ID NO: 687236 - DNA, 15 bp, Homo sapiens
attgaaggagtttgg

SEQ ID NO: 687237 - DNA, 15 bp, Homo sapiens
ttgaaggagtttggt

SEQ ID NO: 687238 - DNA, 15 bp, Homo sapiens
tgaaggagtttggtc

SEQ ID NO: 687239 - DNA, 15 bp, Homo sapiens
gaaggagtttggtcc

SEQ ID NO: 687240 - DNA, 15 bp, Homo sapiens
aaggagtttggtcca

SEQ ID NO: 687241 - DNA, 15 bp, Homo sapiens
aggagtttggtccag

SEQ ID NO: 687242 - DNA, 15 bp, Homo sapiens
ggagtttggtccagc

SEQ ID NO: 687243 - DNA, 15 bp, Homo sapiens
gagtttggtccagct

SEQ ID NO: 687244 - DNA, 15 bp, Homo sapiens
agtttggtccagctg

SEQ ID NO: 687245 - DNA, 15 bp, Homo sapiens
gtttggtccagctga

SEQ ID NO: 687246 - DNA, 15 bp, Homo sapiens
tttggtccagctgat

SEQ ID NO: 687247 - DNA, 15 bp, Homo sapiens
ttggtccagctgatg

SEQ ID NO: 687248 - DNA, 15 bp, Homo sapiens
tggtccagctgatgt

SEQ ID NO: 687249 - DNA, 15 bp, Homo sapiens
ggtccagctgatgtt

SEQ ID NO: 687250 - DNA, 15 bp, Homo sapiens
gtccagctgatgttg

SEQ ID NO: 687251 - DNA, 15 bp, Homo sapiens
tccagctgatgttgg

SEQ ID NO: 687252 - DNA, 15 bp, Homo sapiens
ccagctgatgttggt

SEQ ID NO: 687253 - DNA, 15 bp, Homo sapiens
cagctgatgttggtg

SEQ ID NO: 687254 - DNA, 15 bp, Homo sapiens
agctgatgttggtgt

SEQ ID NO: 687255 - DNA, 15 bp, Homo sapiens
gctgatgttggtgta

SEQ ID NO: 687256 - DNA, 15 bp, Homo sapiens
ctgatgttggtgtat

SEQ ID NO: 687257 - DNA, 15 bp, Homo sapiens
tgatgttggtgtatc

SEQ ID NO: 687258 - DNA, 15 bp, Homo sapiens
gatgttggtgtatcc

SEQ ID NO: 687259 - DNA, 15 bp, Homo sapiens
atgttggtgtatccc

SEQ ID NO: 687260 - DNA, 15 bp, Homo sapiens
tgttggtgtatccct

SEQ ID NO: 687261 - DNA, 15 bp, Homo sapiens
gttggtgtatccctt

SEQ ID NO: 687262 - DNA, 15 bp, Homo sapiens
ttggtgtatcccttg

SEQ ID NO: 687263 - DNA, 15 bp, Homo sapiens
tggtgtatcccttgc

SEQ ID NO: 687264 - DNA, 15 bp, Homo sapiens
ggtgtatcccttgca

SEQ ID NO: 687265 - DNA, 15 bp, Homo sapiens
gtgtatcccttgcaa

SEQ ID NO: 687266 - DNA, 15 bp, Homo sapiens
tgtatcccttgcaat

SEQ ID NO: 687267 - DNA, 15 bp, Homo sapiens
gtatcccttgcaata

SEQ ID NO: 687268 - DNA, 15 bp, Homo sapiens
tatcccttgcaatat

SEQ ID NO: 687269 - DNA, 15 bp, Homo sapiens
atcccttgcaatatt

SEQ ID NO: 687270 - DNA, 15 bp, Homo sapiens
tcccttgcaatattc

SEQ ID NO: 687271 - DNA, 15 bp, Homo sapiens
cccttgcaatattct

SEQ ID NO: 687272 - DNA, 15 bp, Homo sapiens
ccttgcaatattctt

SEQ ID NO: 687273 - DNA, 15 bp, Homo sapiens
cttgcaatattcttc

SEQ ID NO: 687274 - DNA, 15 bp, Homo sapiens
ttgcaatattcttca

SEQ ID NO: 687275 - DNA, 15 bp, Homo sapiens
tgcaatattcttcat

SEQ ID NO: 687276 - DNA, 15 bp, Homo sapiens
gcaatattcttcatc

SEQ ID NO: 687277 - DNA, 15 bp, Homo sapiens
caatattcttcatcc

SEQ ID NO: 687278 - DNA, 15 bp, Homo sapiens
aatattcttcatcct

SEQ ID NO: 687279 - DNA, 15 bp, Homo sapiens
atattcttcatcctc

SEQ ID NO: 687280 - DNA, 15 bp, Homo sapiens
tattcttcatcctca

SEQ ID NO: 687281 - DNA, 15 bp, Homo sapiens
attcttcatcctcat

SEQ ID NO: 687282 - DNA, 15 bp, Homo sapiens
ttcttcatcctcatc

SEQ ID NO: 687283 - DNA, 15 bp, Homo sapiens
tcttcatcctcatct

SEQ ID NO: 687284 - DNA, 15 bp, Homo sapiens
cttcatcctcatctt

SEQ ID NO: 687285 - DNA, 15 bp, Homo sapiens
ttcatcctcatcttt

SEQ ID NO: 687286 - DNA, 15 bp, Homo sapiens
tcatcctcatctttg

SEQ ID NO: 687287 - DNA, 15 bp, Homo sapiens
catcctcatctttgc

SEQ ID NO: 687288 - DNA, 15 bp, Homo sapiens
atcctcatctttgct

SEQ ID NO: 687289 - DNA, 15 bp, Homo sapiens
tcctcatctttgctt

SEQ ID NO: 687290 - DNA, 15 bp, Homo sapiens
cctcatctttgcttc

SEQ ID NO: 687291 - DNA, 15 bp, Homo sapiens
ctcatctttgcttct

SEQ ID NO: 687292 - DNA, 15 bp, Homo sapiens
tcatctttgcttctg

SEQ ID NO: 687293 - DNA, 15 bp, Homo sapiens
catctttgcttctgg

SEQ ID NO: 687294 - DNA, 15 bp, Homo sapiens
atctttgcttctgga

SEQ ID NO: 687295 - DNA, 15 bp, Homo sapiens
tctttgcttctggag

SEQ ID NO: 687296 - DNA, 15 bp, Homo sapiens
ctttgcttctggagg

SEQ ID NO: 687297 - DNA, 15 bp, Homo sapiens
tttgcttctggaggc

SEQ ID NO: 687298 - DNA, 15 bp, Homo sapiens
ttgcttctggaggcc

SEQ ID NO: 687299 - DNA, 15 bp, Homo sapiens
tgcttctggaggcct

SEQ ID NO: 687300 - DNA, 15 bp, Homo sapiens
gcttctggaggcctt

SEQ ID NO: 687301 - DNA, 15 bp, Homo sapiens
cttctggaggccttt

SEQ ID NO: 687302 - DNA, 15 bp, Homo sapiens
ttctggaggcctttc

SEQ ID NO: 687303 - DNA, 15 bp, Homo sapiens
tctggaggcctttcc

SEQ ID NO: 687304 - DNA, 15 bp, Homo sapiens
ctggaggcctttcct

SEQ ID NO: 687305 - DNA, 15 bp, Homo sapiens
tggaggcctttcctc

SEQ ID NO: 687306 - DNA, 15 bp, Homo sapiens
ggaggcctttcctct

SEQ ID NO: 687307 - DNA, 15 bp, Homo sapiens
gaggcctttcctctg

SEQ ID NO: 687308 - DNA, 15 bp, Homo sapiens
aggcctttcctctga

SEQ ID NO: 687309 - DNA, 15 bp, Homo sapiens
ggcctttcctctgat

SEQ ID NO: 687310 - DNA, 15 bp, Homo sapiens
gcctttcctctgatt

SEQ ID NO: 687311 - DNA, 15 bp, Homo sapiens
cctttcctctgattc

SEQ ID NO: 687312 - DNA, 15 bp, Homo sapiens
ctttcctctgattca

SEQ ID NO: 687313 - DNA, 15 bp, Homo sapiens
tttcctctgattcac

SEQ ID NO: 687314 - DNA, 15 bp, Homo sapiens
ttcctctgattcact

SEQ ID NO: 687315 - DNA, 15 bp, Homo sapiens
tcctctgattcacta

SEQ ID NO: 687316 - DNA, 15 bp, Homo sapiens
cctctgattcactat

SEQ ID NO: 687317 - DNA, 15 bp, Homo sapiens
ctctgattcactatc

SEQ ID NO: 687318 - DNA, 15 bp, Homo sapiens
tctgattcactatct

SEQ ID NO: 687319 - DNA, 15 bp, Homo sapiens
ctgattcactatctt

SEQ ID NO: 687320 - DNA, 15 bp, Homo sapiens
tgattcactatcttc

SEQ ID NO: 687321 - DNA, 15 bp, Homo sapiens
gattcactatcttca

SEQ ID NO: 687322 - DNA, 15 bp, Homo sapiens
attcactatcttcat

SEQ ID NO: 687323 - DNA, 15 bp, Homo sapiens
ttcactatcttcatc

SEQ ID NO: 687324 - DNA, 15 bp, Homo sapiens
tcactatcttcatct

SEQ ID NO: 687325 - DNA, 15 bp, Homo sapiens
cactatcttcatctt

SEQ ID NO: 687326 - DNA, 15 bp, Homo sapiens
actatcttcatcttc

SEQ ID NO: 687327 - DNA, 15 bp, Homo sapiens
ctatcttcatcttca

SEQ ID NO: 687328 - DNA, 15 bp, Homo sapiens
tatcttcatcttcat

SEQ ID NO: 687329 - DNA, 15 bp, Homo sapiens
atcttcatcttcatt

SEQ ID NO: 687330 - DNA, 15 bp, Homo sapiens
tcttcatcttcatta

SEQ ID NO: 687331 - DNA, 15 bp, Homo sapiens
cttcatcttcattaa

SEQ ID NO: 687332 - DNA, 15 bp, Homo sapiens
ttcatcttcattaaa

SEQ ID NO: 687333 - DNA, 15 bp, Homo sapiens
tcatcttcattaaaa

SEQ ID NO: 687334 - DNA, 15 bp, Homo sapiens
catcttcattaaaag

SEQ ID NO: 687335 - DNA, 15 bp, Homo sapiens
atcttcattaaaagc

SEQ ID NO: 687336 - DNA, 15 bp, Homo sapiens
tcttcattaaaagct

SEQ ID NO: 687337 - DNA, 15 bp, Homo sapiens
cttcattaaaagctg

SEQ ID NO: 687338 - DNA, 15 bp, Homo sapiens
ttcattaaaagctgc

SEQ ID NO: 687339 - DNA, 15 bp, Homo sapiens
tcattaaaagctgct

SEQ ID NO: 687340 - DNA, 15 bp, Homo sapiens
cattaaaagctgctg

SEQ ID NO: 687341 - DNA, 15 bp, Homo sapiens
attaaaagctgctgc

SEQ ID NO: 687342 - DNA, 15 bp, Homo sapiens
ttaaaagctgctgct

SEQ ID NO: 687343 - DNA, 15 bp, Homo sapiens
taaaagctgctgcta

SEQ ID NO: 687344 - DNA, 15 bp, Homo sapiens
aaaagctgctgctac

SEQ ID NO: 687345 - DNA, 15 bp, Homo sapiens
aaagctgctgctact

SEQ ID NO: 687346 - DNA, 15 bp, Homo sapiens
aagctgctgctactg

SEQ ID NO: 687347 - DNA, 15 bp, Homo sapiens
agctgctgctactga

SEQ ID NO: 687348 - DNA, 15 bp, Homo sapiens
gctgctgctactgaa

SEQ ID NO: 687349 - DNA, 15 bp, Homo sapiens
ctgctgctactgaaa

SEQ ID NO: 687350 - DNA, 15 bp, Homo sapiens
tgctgctactgaaag

SEQ ID NO: 687351 - DNA, 15 bp, Homo sapiens
gctgctactgaaaga

SEQ ID NO: 687352 - DNA, 15 bp, Homo sapiens
ctgctactgaaagag

SEQ ID NO: 687353 - DNA, 15 bp, Homo sapiens
tgctactgaaagagt

SEQ ID NO: 687354 - DNA, 15 bp, Homo sapiens
gctactgaaagagtt

SEQ ID NO: 687355 - DNA, 15 bp, Homo sapiens
ctactgaaagagttt

SEQ ID NO: 687356 - DNA, 15 bp, Homo sapiens
tactgaaagagtttt

SEQ ID NO: 687357 - DNA, 15 bp, Homo sapiens
actgaaagagttttt

SEQ ID NO: 687358 - DNA, 15 bp, Homo sapiens
ctgaaagagtttttg

SEQ ID NO: 687359 - DNA, 15 bp, Homo sapiens
tgaaagagtttttgg

SEQ ID NO: 687360 - DNA, 15 bp, Homo sapiens
gaaagagtttttgga

SEQ ID NO: 687361 - DNA, 15 bp, Homo sapiens
aaagagtttttggag

SEQ ID NO: 687362 - DNA, 15 bp, Homo sapiens
aagagtttttggagc

SEQ ID NO: 687363 - DNA, 15 bp, Homo sapiens
agagtttttggagca

SEQ ID NO: 687364 - DNA, 15 bp, Homo sapiens
gagtttttggagcaa

SEQ ID NO: 687365 - DNA, 15 bp, Homo sapiens
agtttttggagcaag

SEQ ID NO: 687366 - DNA, 15 bp, Homo sapiens
gtttttggagcaaga

SEQ ID NO: 687367 - DNA, 15 bp, Homo sapiens
tttttggagcaagag

SEQ ID NO: 687368 - DNA, 15 bp, Homo sapiens
ttttggagcaagagt

SEQ ID NO: 687369 - DNA, 15 bp, Homo sapiens
tttggagcaagagtt

SEQ ID NO: 687370 - DNA, 15 bp, Homo sapiens
ttggagcaagagttg

SEQ ID NO: 687371 - DNA, 15 bp, Homo sapiens
tggagcaagagttgg

SEQ ID NO: 687372 - DNA, 15 bp, Homo sapiens
ggagcaagagttgga

SEQ ID NO: 687373 - DNA, 15 bp, Homo sapiens
gagcaagagttggaa

SEQ ID NO: 687374 - DNA, 15 bp, Homo sapiens
agcaagagttggaac

SEQ ID NO: 687375 - DNA, 15 bp, Homo sapiens
gcaagagttggaaca

SEQ ID NO: 687376 - DNA, 15 bp, Homo sapiens
caagagttggaacag

SEQ ID NO: 687377 - DNA, 15 bp, Homo sapiens
aagagttggaacagt

SEQ ID NO: 687378 - DNA, 15 bp, Homo sapiens
agagttggaacagtt

SEQ ID NO: 687379 - DNA, 15 bp, Homo sapiens
gagttggaacagttt

SEQ ID NO: 687380 - DNA, 15 bp, Homo sapiens
agttggaacagtttc

SEQ ID NO: 687381 - DNA, 15 bp, Homo sapiens
gttggaacagtttct

SEQ ID NO: 687382 - DNA, 15 bp, Homo sapiens
ttggaacagtttctt

SEQ ID NO: 687383 - DNA, 15 bp, Homo sapiens
tggaacagtttcttt

SEQ ID NO: 687384 - DNA, 15 bp, Homo sapiens
ggaacagtttcttta

SEQ ID NO: 687385 - DNA, 15 bp, Homo sapiens
gaacagtttctttag

SEQ ID NO: 687386 - DNA, 15 bp, Homo sapiens
aacagtttctttagg

SEQ ID NO: 687387 - DNA, 15 bp, Homo sapiens
acagtttctttaggc

SEQ ID NO: 687388 - DNA, 15 bp, Homo sapiens
cagtttctttaggct

SEQ ID NO: 687389 - DNA, 15 bp, Homo sapiens
agtttctttaggctt

SEQ ID NO: 687390 - DNA, 15 bp, Homo sapiens
gtttctttaggctta

SEQ ID NO: 687391 - DNA, 15 bp, Homo sapiens
tttctttaggcttac

SEQ ID NO: 687392 - DNA, 15 bp, Homo sapiens
ttctttaggcttact

SEQ ID NO: 687393 - DNA, 15 bp, Homo sapiens
tctttaggcttactt

SEQ ID NO: 687394 - DNA, 15 bp, Homo sapiens
ctttaggcttacttg

SEQ ID NO: 687395 - DNA, 15 bp, Homo sapiens
tttaggcttacttga

SEQ ID NO: 687396 - DNA, 15 bp, Homo sapiens
ttaggcttacttgat

SEQ ID NO: 687397 - DNA, 15 bp, Homo sapiens
taggcttacttgatc

SEQ ID NO: 687398 - DNA, 15 bp, Homo sapiens
aggcttacttgatcc

SEQ ID NO: 687399 - DNA, 15 bp, Homo sapiens
ggcttacttgatcca

SEQ ID NO: 687400 - DNA, 15 bp, Homo sapiens
gcttacttgatccaa

SEQ ID NO: 687401 - DNA, 15 bp, Homo sapiens
cttacttgatccaag

SEQ ID NO: 687402 - DNA, 15 bp, Homo sapiens
ttacttgatccaagt

SEQ ID NO: 687403 - DNA, 15 bp, Homo sapiens
tacttgatccaagtt

SEQ ID NO: 687404 - DNA, 15 bp, Homo sapiens
acttgatccaagttt

SEQ ID NO: 687405 - DNA, 15 bp, Homo sapiens
cttgatccaagtttg

SEQ ID NO: 687406 - DNA, 15 bp, Homo sapiens
ttgatccaagtttga

SEQ ID NO: 687407 - DNA, 15 bp, Homo sapiens
tgatccaagtttgat

SEQ ID NO: 687408 - DNA, 15 bp, Homo sapiens
gatccaagtttgatg

SEQ ID NO: 687409 - DNA, 15 bp, Homo sapiens
atccaagtttgatgg

SEQ ID NO: 687410 - DNA, 15 bp, Homo sapiens
tccaagtttgatgga

SEQ ID NO: 687411 - DNA, 15 bp, Homo sapiens
ccaagtttgatggat

SEQ ID NO: 687412 - DNA, 15 bp, Homo sapiens
caagtttgatggata

SEQ ID NO: 687413 - DNA, 15 bp, Homo sapiens
aagtttgatggatat

SEQ ID NO: 687414 - DNA, 15 bp, Homo sapiens
agtttgatggatatg

SEQ ID NO: 687415 - DNA, 15 bp, Homo sapiens
gtttgatggatatgg

SEQ ID NO: 687416 - DNA, 15 bp, Homo sapiens
tttgatggatatggg

SEQ ID NO: 687417 - DNA, 15 bp, Homo sapiens
ttgatggatatgggt

SEQ ID NO: 687418 - DNA, 15 bp, Homo sapiens
tgatggatatgggtg

SEQ ID NO: 687419 - DNA, 15 bp, Homo sapiens
gatggatatgggtga

SEQ ID NO: 687420 - DNA, 15 bp, Homo sapiens
atggatatgggtgat

SEQ ID NO: 687421 - DNA, 15 bp, Homo sapiens
tggatatgggtgatg

SEQ ID NO: 687422 - DNA, 15 bp, Homo sapiens
ggatatgggtgatgc

SEQ ID NO: 687423 - DNA, 15 bp, Homo sapiens
gatatgggtgatgct

SEQ ID NO: 687424 - DNA, 15 bp, Homo sapiens
atatgggtgatgctt

SEQ ID NO: 687425 - DNA, 15 bp, Homo sapiens
tatgggtgatgcttt

SEQ ID NO: 687426 - DNA, 15 bp, Homo sapiens
atgggtgatgctttc

SEQ ID NO: 687427 - DNA, 15 bp, Homo sapiens
tgggtgatgctttct

SEQ ID NO: 687428 - DNA, 15 bp, Homo sapiens
gggtgatgctttctt

SEQ ID NO: 687429 - DNA, 15 bp, Homo sapiens
ggtgatgctttcttt

SEQ ID NO: 687430 - DNA, 15 bp, Homo sapiens
gtgatgctttctttg

SEQ ID NO: 687431 - DNA, 15 bp, Homo sapiens
tgatgctttctttgt

SEQ ID NO: 687432 - DNA, 15 bp, Homo sapiens
gatgctttctttgtc

SEQ ID NO: 687433 - DNA, 15 bp, Homo sapiens
atgctttctttgtcg

SEQ ID NO: 687434 - DNA, 15 bp, Homo sapiens
tgctttctttgtcgt

SEQ ID NO: 687435 - DNA, 15 bp, Homo sapiens
gctttctttgtcgtc

SEQ ID NO: 687436 - DNA, 15 bp, Homo sapiens
ctttctttgtcgtct

SEQ ID NO: 687437 - DNA, 15 bp, Homo sapiens
tttctttgtcgtctg

SEQ ID NO: 687438 - DNA, 15 bp, Homo sapiens
ttctttgtcgtctga

SEQ ID NO: 687439 - DNA, 15 bp, Homo sapiens
tctttgtcgtctgac

SEQ ID NO: 687440 - DNA, 15 bp, Homo sapiens
ctttgtcgtctgact

SEQ ID NO: 687441 - DNA, 15 bp, Homo sapiens
tttgtcgtctgacta

SEQ ID NO: 687442 - DNA, 15 bp, Homo sapiens
ttgtcgtctgactac

SEQ ID NO: 687443 - DNA, 15 bp, Homo sapiens
tgtcgtctgactacc

SEQ ID NO: 687444 - DNA, 15 bp, Homo sapiens
gtcgtctgactacct

SEQ ID NO: 687445 - DNA, 15 bp, Homo sapiens
tcgtctgactaccta

SEQ ID NO: 687446 - DNA, 15 bp, Homo sapiens
cgtctgactacctat

SEQ ID NO: 687447 - DNA, 15 bp, Homo sapiens
gtctgactacctatg

SEQ ID NO: 687448 - DNA, 15 bp, Homo sapiens
tctgactacctatgg

SEQ ID NO: 687449 - DNA, 15 bp, Homo sapiens
ctgactacctatggc

SEQ ID NO: 687450 - DNA, 15 bp, Homo sapiens
tgactacctatggca

SEQ ID NO: 687451 - DNA, 15 bp, Homo sapiens
gactacctatggcaa

SEQ ID NO: 687452 - DNA, 15 bp, Homo sapiens
actacctatggcaaa

SEQ ID NO: 687453 - DNA, 15 bp, Homo sapiens
ctacctatggcaaat

SEQ ID NO: 687454 - DNA, 15 bp, Homo sapiens
tacctatggcaaatc

SEQ ID NO: 687455 - DNA, 15 bp, Homo sapiens
acctatggcaaatcc

SEQ ID NO: 687456 - DNA, 15 bp, Homo sapiens
cctatggcaaatcca

SEQ ID NO: 687457 - DNA, 15 bp, Homo sapiens
ctatggcaaatccaa

SEQ ID NO: 687458 - DNA, 15 bp, Homo sapiens
tatggcaaatccaaa

SEQ ID NO: 687459 - DNA, 15 bp, Homo sapiens
atggcaaatccaaag

SEQ ID NO: 687460 - DNA, 15 bp, Homo sapiens
tggcaaatccaaagt

SEQ ID NO: 687461 - DNA, 15 bp, Homo sapiens
ggcaaatccaaagtt

SEQ ID NO: 687462 - DNA, 15 bp, Homo sapiens
gcaaatccaaagttg

SEQ ID NO: 687463 - DNA, 15 bp, Homo sapiens
caaatccaaagttgg

SEQ ID NO: 687464 - DNA, 15 bp, Homo sapiens
aaatccaaagttgga

SEQ ID NO: 687465 - DNA, 15 bp, Homo sapiens
aatccaaagttggag

SEQ ID NO: 687466 - DNA, 15 bp, Homo sapiens
atccaaagttggaga

SEQ ID NO: 687467 - DNA, 15 bp, Homo sapiens
tccaaagttggagat

SEQ ID NO: 687468 - DNA, 15 bp, Homo sapiens
ccaaagttggagatc

SEQ ID NO: 687469 - DNA, 15 bp, Homo sapiens
caaagttggagatct

SEQ ID NO: 687470 - DNA, 15 bp, Homo sapiens
aaagttggagatctt

SEQ ID NO: 687471 - DNA, 15 bp, Homo sapiens
aagttggagatcttt

SEQ ID NO: 687472 - DNA, 15 bp, Homo sapiens
agttggagatctttg

SEQ ID NO: 687473 - DNA, 15 bp, Homo sapiens
gttggagatctttgc

SEQ ID NO: 687474 - DNA, 15 bp, Homo sapiens
ttggagatctttgca

SEQ ID NO: 687475 - DNA, 15 bp, Homo sapiens
tggagatctttgcag

SEQ ID NO: 687476 - DNA, 15 bp, Homo sapiens
ggagatctttgcagg

SEQ ID NO: 687477 - DNA, 15 bp, Homo sapiens
gagatctttgcaggc

SEQ ID NO: 687478 - DNA, 15 bp, Homo sapiens
agatctttgcaggct

SEQ ID NO: 687479 - DNA, 15 bp, Homo sapiens
gatctttgcaggctt

SEQ ID NO: 687480 - DNA, 15 bp, Homo sapiens
atctttgcaggcttt

SEQ ID NO: 687481 - DNA, 15 bp, Homo sapiens
tctttgcaggctttg

SEQ ID NO: 687482 - DNA, 15 bp, Homo sapiens
ctttgcaggctttgt

SEQ ID NO: 687483 - DNA, 15 bp, Homo sapiens
tttgcaggctttgtt

SEQ ID NO: 687484 - DNA, 15 bp, Homo sapiens
ttgcaggctttgttg

SEQ ID NO: 687485 - DNA, 15 bp, Homo sapiens
tgcaggctttgttgg

SEQ ID NO: 687486 - DNA, 15 bp, Homo sapiens
gcaggctttgttgga

SEQ ID NO: 687487 - DNA, 15 bp, Homo sapiens
caggctttgttggag

SEQ ID NO: 687488 - DNA, 15 bp, Homo sapiens
aggctttgttggagg

SEQ ID NO: 687489 - DNA, 15 bp, Homo sapiens
ggctttgttggaggt

SEQ ID NO: 687490 - DNA, 15 bp, Homo sapiens
gctttgttggaggtc

SEQ ID NO: 687491 - DNA, 15 bp, Homo sapiens
ctttgttggaggtct

SEQ ID NO: 687492 - DNA, 15 bp, Homo sapiens
tttgttggaggtctg

SEQ ID NO: 687493 - DNA, 15 bp, Homo sapiens
ttgttggaggtctgc

SEQ ID NO: 687494 - DNA, 15 bp, Homo sapiens
tgttggaggtctgca

SEQ ID NO: 687495 - DNA, 15 bp, Homo sapiens
gttggaggtctgcag

SEQ ID NO: 687496 - DNA, 15 bp, Homo sapiens
ttggaggtctgcagc

SEQ ID NO: 687497 - DNA, 15 bp, Homo sapiens
tggaggtctgcagct

SEQ ID NO: 687498 - DNA, 15 bp, Homo sapiens
ggaggtctgcagctt

SEQ ID NO: 687499 - DNA, 15 bp, Homo sapiens
gaggtctgcagcttc

SEQ ID NO: 687500 - DNA, 15 bp, Homo sapiens
aggtctgcagcttct

SEQ ID NO: 687501 - DNA, 15 bp, Homo sapiens
ggtctgcagcttctt

SEQ ID NO: 687502 - DNA, 15 bp, Homo sapiens
gtctgcagcttcttc

SEQ ID NO: 687503 - DNA, 15 bp, Homo sapiens
tctgcagcttcttct

SEQ ID NO: 687504 - DNA, 15 bp, Homo sapiens
ctgcagcttcttctt

SEQ ID NO: 687505 - DNA, 15 bp, Homo sapiens
tgcagcttcttcttc

SEQ ID NO: 687506 - DNA, 15 bp, Homo sapiens
gcagcttcttcttca

SEQ ID NO: 687507 - DNA, 15 bp, Homo sapiens
cagcttcttcttcag

SEQ ID NO: 687508 - DNA, 15 bp, Homo sapiens
agcttcttcttcagc

SEQ ID NO: 687509 - DNA, 15 bp, Homo sapiens
gcttcttcttcagct

SEQ ID NO: 687510 - DNA, 15 bp, Homo sapiens
cttcttcttcagctg

SEQ ID NO: 687511 - DNA, 15 bp, Homo sapiens
ttcttcttcagctga

SEQ ID NO: 687512 - DNA, 15 bp, Homo sapiens
tcttcttcagctgat

SEQ ID NO: 687513 - DNA, 15 bp, Homo sapiens
cttcttcagctgatc

SEQ ID NO: 687514 - DNA, 15 bp, Homo sapiens
ttcttcagctgatcg

SEQ ID NO: 687515 - DNA, 15 bp, Homo sapiens
tcttcagctgatcgc

SEQ ID NO: 687516 - DNA, 15 bp, Homo sapiens
cttcagctgatcgct

SEQ ID NO: 687517 - DNA, 15 bp, Homo sapiens
ttcagctgatcgctt

SEQ ID NO: 687518 - DNA, 15 bp, Homo sapiens
tcagctgatcgcttc

SEQ ID NO: 687519 - DNA, 15 bp, Homo sapiens
cagctgatcgcttct

SEQ ID NO: 687520 - DNA, 15 bp, Homo sapiens
agctgatcgcttctc

SEQ ID NO: 687521 - DNA, 15 bp, Homo sapiens
gctgatcgcttctca

SEQ ID NO: 687522 - DNA, 15 bp, Homo sapiens
ctgatcgcttctcag

SEQ ID NO: 687523 - DNA, 15 bp, Homo sapiens
tgatcgcttctcagc

SEQ ID NO: 687524 - DNA, 15 bp, Homo sapiens
gatcgcttctcagcg

SEQ ID NO: 687525 - DNA, 15 bp, Homo sapiens
atcgcttctcagcgc

SEQ ID NO: 687526 - DNA, 15 bp, Homo sapiens
tcgcttctcagcgct

SEQ ID NO: 687527 - DNA, 15 bp, Homo sapiens
cgcttctcagcgctg

SEQ ID NO: 687528 - DNA, 15 bp, Homo sapiens
gcttctcagcgctgc

SEQ ID NO: 687529 - DNA, 15 bp, Homo sapiens
cttctcagcgctgcg

SEQ ID NO: 687530 - DNA, 15 bp, Homo sapiens
ttctcagcgctgcgg

SEQ ID NO: 687531 - DNA, 15 bp, Homo sapiens
tctcagcgctgcggc

SEQ ID NO: 687532 - DNA, 15 bp, Homo sapiens
ctcagcgctgcggct

SEQ ID NO: 687533 - DNA, 15 bp, Homo sapiens
tcagcgctgcggctg

SEQ ID NO: 687534 - DNA, 15 bp, Homo sapiens
cagcgctgcggctgg

SEQ ID NO: 687535 - DNA, 15 bp, Homo sapiens
agcgctgcggctgga

SEQ ID NO: 687536 - DNA, 15 bp, Homo sapiens
gcgctgcggctggaa

SEQ ID NO: 687537 - DNA, 15 bp, Homo sapiens
cgctgcggctggaac

SEQ ID NO: 687538 - DNA, 15 bp, Homo sapiens
gctgcggctggaact

SEQ ID NO: 687539 - DNA, 15 bp, Homo sapiens
caatctttttttctc

SEQ ID NO: 687540 - DNA, 15 bp, Homo sapiens
aatctttttttctcc

SEQ ID NO: 687541 - DNA, 15 bp, Homo sapiens
atctttttttctcct

SEQ ID NO: 687542 - DNA, 15 bp, Homo sapiens
tctttttttctcctt

SEQ ID NO: 687543 - DNA, 15 bp, Homo sapiens
ctttttttctccttt

SEQ ID NO: 687544 - DNA, 15 bp, Homo sapiens
tttttttctccttta

SEQ ID NO: 687545 - DNA, 15 bp, Homo sapiens
ttttttctcctttaa

SEQ ID NO: 687546 - DNA, 15 bp, Homo sapiens
tttttctcctttaaa

SEQ ID NO: 687547 - DNA, 15 bp, Homo sapiens
ttttctcctttaaaa

SEQ ID NO: 687548 - DNA, 15 bp, Homo sapiens
tttctcctttaaaag

SEQ ID NO: 687549 - DNA, 15 bp, Homo sapiens
ttctcctttaaaagg

SEQ ID NO: 687550 - DNA, 15 bp, Homo sapiens
tctcctttaaaagga

SEQ ID NO: 687551 - DNA, 15 bp, Homo sapiens
ctcctttaaaaggat

SEQ ID NO: 687552 - DNA, 15 bp, Homo sapiens
tcctttaaaaggatt

SEQ ID NO: 687553 - DNA, 15 bp, Homo sapiens
cctttaaaaggatta

SEQ ID NO: 687554 - DNA, 15 bp, Homo sapiens
ctttaaaaggattat

SEQ ID NO: 687555 - DNA, 15 bp, Homo sapiens
tttaaaaggattata

SEQ ID NO: 687556 - DNA, 15 bp, Homo sapiens
ttaaaaggattatag

SEQ ID NO: 687557 - DNA, 15 bp, Homo sapiens
taaaaggattatagt

SEQ ID NO: 687558 - DNA, 15 bp, Homo sapiens
aaaaggattatagtt

SEQ ID NO: 687559 - DNA, 15 bp, Homo sapiens
aaaggattatagttt

SEQ ID NO: 687560 - DNA, 15 bp, Homo sapiens
aaggattatagtttt

SEQ ID NO: 687561 - DNA, 15 bp, Homo sapiens
aggattatagtttta

SEQ ID NO: 687562 - DNA, 15 bp, Homo sapiens
ggattatagttttaa

SEQ ID NO: 687563 - DNA, 15 bp, Homo sapiens
gattatagttttaat

SEQ ID NO: 687564 - DNA, 15 bp, Homo sapiens
attatagttttaata

SEQ ID NO: 687565 - DNA, 15 bp, Homo sapiens
ttatagttttaatat

SEQ ID NO: 687566 - DNA, 15 bp, Homo sapiens
tatagttttaatata

SEQ ID NO: 687567 - DNA, 15 bp, Homo sapiens
atagttttaatataa

SEQ ID NO: 687568 - DNA, 15 bp, Homo sapiens
tagttttaatataaa

SEQ ID NO: 687569 - DNA, 15 bp, Homo sapiens
agttttaatataaat

SEQ ID NO: 687570 - DNA, 15 bp, Homo sapiens
gttttaatataaatc

SEQ ID NO: 687571 - DNA, 15 bp, Homo sapiens
ttttaatataaatct

SEQ ID NO: 687572 - DNA, 15 bp, Homo sapiens
tttaatataaatctt

SEQ ID NO: 687573 - DNA, 15 bp, Homo sapiens
ttaatataaatctta

SEQ ID NO: 687574 - DNA, 15 bp, Homo sapiens
taatataaatcttaa

SEQ ID NO: 687575 - DNA, 15 bp, Homo sapiens
aatataaatcttaag

SEQ ID NO: 687576 - DNA, 15 bp, Homo sapiens
atataaatcttaaga

SEQ ID NO: 687577 - DNA, 15 bp, Homo sapiens
tataaatcttaagag

SEQ ID NO: 687578 - DNA, 15 bp, Homo sapiens
ataaatcttaagagt

SEQ ID NO: 687579 - DNA, 15 bp, Homo sapiens
taaatcttaagagta

SEQ ID NO: 687580 - DNA, 15 bp, Homo sapiens
aaatcttaagagtaa

SEQ ID NO: 687581 - DNA, 15 bp, Homo sapiens
aatcttaagagtaat

SEQ ID NO: 687582 - DNA, 15 bp, Homo sapiens
atcttaagagtaatt

SEQ ID NO: 687583 - DNA, 15 bp, Homo sapiens
tcttaagagtaattt

SEQ ID NO: 687584 - DNA, 15 bp, Homo sapiens
cttaagagtaatttt

SEQ ID NO: 687585 - DNA, 15 bp, Homo sapiens
ttaagagtaatttta

SEQ ID NO: 687586 - DNA, 15 bp, Homo sapiens
taagagtaattttac

SEQ ID NO: 687587 - DNA, 15 bp, Homo sapiens
aagagtaattttact

SEQ ID NO: 687588 - DNA, 15 bp, Homo sapiens
agagtaattttactt

SEQ ID NO: 687589 - DNA, 15 bp, Homo sapiens
gagtaattttacttt

SEQ ID NO: 687590 - DNA, 15 bp, Homo sapiens
agtaattttactttt

SEQ ID NO: 687591 - DNA, 15 bp, Homo sapiens
gtaattttacttttt

SEQ ID NO: 687592 - DNA, 15 bp, Homo sapiens
taattttactttttc

SEQ ID NO: 687593 - DNA, 15 bp, Homo sapiens
aattttactttttct

SEQ ID NO: 687594 - DNA, 15 bp, Homo sapiens
attttactttttctc

SEQ ID NO: 687595 - DNA, 15 bp, Homo sapiens
ttttactttttctcc

SEQ ID NO: 687596 - DNA, 15 bp, Homo sapiens
tttactttttctcca

SEQ ID NO: 687597 - DNA, 15 bp, Homo sapiens
ttactttttctccaa

SEQ ID NO: 687598 - DNA, 15 bp, Homo sapiens
tactttttctccaat

SEQ ID NO: 687599 - DNA, 15 bp, Homo sapiens
actttttctccaata

SEQ ID NO: 687600 - DNA, 15 bp, Homo sapiens
ctttttctccaatat

SEQ ID NO: 687601 - DNA, 15 bp, Homo sapiens
tttttctccaatatt

SEQ ID NO: 687602 - DNA, 15 bp, Homo sapiens
ttttctccaatattt

SEQ ID NO: 687603 - DNA, 15 bp, Homo sapiens
tttctccaatatttc

SEQ ID NO: 687604 - DNA, 15 bp, Homo sapiens
ttctccaatatttca

SEQ ID NO: 687605 - DNA, 15 bp, Homo sapiens
tctccaatatttcac

SEQ ID NO: 687606 - DNA, 15 bp, Homo sapiens
ctccaatatttcaca

SEQ ID NO: 687607 - DNA, 15 bp, Homo sapiens
tccaatatttcacat

SEQ ID NO: 687608 - DNA, 15 bp, Homo sapiens
ccaatatttcacata

SEQ ID NO: 687609 - DNA, 15 bp, Homo sapiens
caatatttcacataa

SEQ ID NO: 687610 - DNA, 15 bp, Homo sapiens
aatatttcacataat

SEQ ID NO: 687611 - DNA, 15 bp, Homo sapiens
atatttcacataata

SEQ ID NO: 687612 - DNA, 15 bp, Homo sapiens
tatttcacataatat

SEQ ID NO: 687613 - DNA, 15 bp, Homo sapiens
atttcacataatata

SEQ ID NO: 687614 - DNA, 15 bp, Homo sapiens
tttcacataatatag

SEQ ID NO: 687615 - DNA, 15 bp, Homo sapiens
ttcacataatatagc

SEQ ID NO: 687616 - DNA, 15 bp, Homo sapiens
tcacataatatagcc

SEQ ID NO: 687617 - DNA, 15 bp, Homo sapiens
cacataatatagcca

SEQ ID NO: 687618 - DNA, 15 bp, Homo sapiens
acataatatagccaa

SEQ ID NO: 687619 - DNA, 15 bp, Homo sapiens
cataatatagccaat

SEQ ID NO: 687620 - DNA, 15 bp, Homo sapiens
ataatatagccaatc

SEQ ID NO: 687621 - DNA, 15 bp, Homo sapiens
taatatagccaatca

SEQ ID NO: 687622 - DNA, 15 bp, Homo sapiens
aatatagccaatcaa

SEQ ID NO: 687623 - DNA, 15 bp, Homo sapiens
atatagccaatcaat

SEQ ID NO: 687624 - DNA, 15 bp, Homo sapiens
tatagccaatcaata

SEQ ID NO: 687625 - DNA, 15 bp, Homo sapiens
atagccaatcaatag

SEQ ID NO: 687626 - DNA, 15 bp, Homo sapiens
tagccaatcaataga

SEQ ID NO: 687627 - DNA, 15 bp, Homo sapiens
agccaatcaatagat

SEQ ID NO: 687628 - DNA, 15 bp, Homo sapiens
gccaatcaatagatg

SEQ ID NO: 687629 - DNA, 15 bp, Homo sapiens
ccaatcaatagatga

SEQ ID NO: 687630 - DNA, 15 bp, Homo sapiens
caatcaatagatgac

SEQ ID NO: 687631 - DNA, 15 bp, Homo sapiens
aatcaatagatgact

SEQ ID NO: 687632 - DNA, 15 bp, Homo sapiens
atcaatagatgactg

SEQ ID NO: 687633 - DNA, 15 bp, Homo sapiens
tcaatagatgactgg

SEQ ID NO: 687634 - DNA, 15 bp, Homo sapiens
caatagatgactggt

SEQ ID NO: 687635 - DNA, 15 bp, Homo sapiens
aatagatgactggta

SEQ ID NO: 687636 - DNA, 15 bp, Homo sapiens
atagatgactggtaa

SEQ ID NO: 687637 - DNA, 15 bp, Homo sapiens
tagatgactggtaat

SEQ ID NO: 687638 - DNA, 15 bp, Homo sapiens
agatgactggtaatt

SEQ ID NO: 687639 - DNA, 15 bp, Homo sapiens
gatgactggtaatta

SEQ ID NO: 687640 - DNA, 15 bp, Homo sapiens
atgactggtaattag

SEQ ID NO: 687641 - DNA, 15 bp, Homo sapiens
tgactggtaattagt

SEQ ID NO: 687642 - DNA, 15 bp, Homo sapiens
gactggtaattagtg

SEQ ID NO: 687643 - DNA, 15 bp, Homo sapiens
actggtaattagtgc

SEQ ID NO: 687644 - DNA, 15 bp, Homo sapiens
ctggtaattagtgcc

SEQ ID NO: 687645 - DNA, 15 bp, Homo sapiens
tggtaattagtgcct

SEQ ID NO: 687646 - DNA, 15 bp, Homo sapiens
ggtaattagtgcctc

SEQ ID NO: 687647 - DNA, 15 bp, Homo sapiens
gtaattagtgcctca

SEQ ID NO: 687648 - DNA, 15 bp, Homo sapiens
taattagtgcctcaa

SEQ ID NO: 687649 - DNA, 15 bp, Homo sapiens
aattagtgcctcaac

SEQ ID NO: 687650 - DNA, 15 bp, Homo sapiens
attagtgcctcaact

SEQ ID NO: 687651 - DNA, 15 bp, Homo sapiens
ttagtgcctcaacta

SEQ ID NO: 687652 - DNA, 15 bp, Homo sapiens
tagtgcctcaactaa

SEQ ID NO: 687653 - DNA, 15 bp, Homo sapiens
agtgcctcaactaag

SEQ ID NO: 687654 - DNA, 15 bp, Homo sapiens
gtgcctcaactaagg

SEQ ID NO: 687655 - DNA, 15 bp, Homo sapiens
tgcctcaactaaggt

SEQ ID NO: 687656 - DNA, 15 bp, Homo sapiens
gcctcaactaaggta

SEQ ID NO: 687657 - DNA, 15 bp, Homo sapiens
cctcaactaaggtag

SEQ ID NO: 687658 - DNA, 15 bp, Homo sapiens
ctcaactaaggtagg

SEQ ID NO: 687659 - DNA, 15 bp, Homo sapiens
tcaactaaggtagga

SEQ ID NO: 687660 - DNA, 15 bp, Homo sapiens
caactaaggtaggac

SEQ ID NO: 687661 - DNA, 15 bp, Homo sapiens
aactaaggtaggaca

SEQ ID NO: 687662 - DNA, 15 bp, Homo sapiens
actaaggtaggacag

SEQ ID NO: 687663 - DNA, 15 bp, Homo sapiens
ctaaggtaggacagg

SEQ ID NO: 687664 - DNA, 15 bp, Homo sapiens
taaggtaggacagga

SEQ ID NO: 687665 - DNA, 15 bp, Homo sapiens
aaggtaggacaggaa

SEQ ID NO: 687666 - DNA, 15 bp, Homo sapiens
aggtaggacaggaac

SEQ ID NO: 687667 - DNA, 15 bp, Homo sapiens
ggtaggacaggaaca

SEQ ID NO: 687668 - DNA, 15 bp, Homo sapiens
gtaggacaggaacaa

SEQ ID NO: 687669 - DNA, 15 bp, Homo sapiens
taggacaggaacaat

SEQ ID NO: 687670 - DNA, 15 bp, Homo sapiens
aggacaggaacaatg

SEQ ID NO: 687671 - DNA, 15 bp, Homo sapiens
ggacaggaacaatga

SEQ ID NO: 687672 - DNA, 15 bp, Homo sapiens
gacaggaacaatgat

SEQ ID NO: 687673 - DNA, 15 bp, Homo sapiens
acaggaacaatgatt

SEQ ID NO: 687674 - DNA, 15 bp, Homo sapiens
caggaacaatgatta

SEQ ID NO: 687675 - DNA, 15 bp, Homo sapiens
aggaacaatgattaa

SEQ ID NO: 687676 - DNA, 15 bp, Homo sapiens
ggaacaatgattaaa

SEQ ID NO: 687677 - DNA, 15 bp, Homo sapiens
gaacaatgattaaac

SEQ ID NO: 687678 - DNA, 15 bp, Homo sapiens
aacaatgattaaaca

SEQ ID NO: 687679 - DNA, 15 bp, Homo sapiens
acaatgattaaacat

SEQ ID NO: 687680 - DNA, 15 bp, Homo sapiens
caatgattaaacata

SEQ ID NO: 687681 - DNA, 15 bp, Homo sapiens
aatgattaaacataa

SEQ ID NO: 687682 - DNA, 15 bp, Homo sapiens
atgattaaacataag

SEQ ID NO: 687683 - DNA, 15 bp, Homo sapiens
tgattaaacataagc

SEQ ID NO: 687684 - DNA, 15 bp, Homo sapiens
gattaaacataagca

SEQ ID NO: 687685 - DNA, 15 bp, Homo sapiens
attaaacataagcat

SEQ ID NO: 687686 - DNA, 15 bp, Homo sapiens
ttaaacataagcatg

SEQ ID NO: 687687 - DNA, 15 bp, Homo sapiens
taaacataagcatgg

SEQ ID NO: 687688 - DNA, 15 bp, Homo sapiens
aaacataagcatgga

SEQ ID NO: 687689 - DNA, 15 bp, Homo sapiens
aacataagcatggat

SEQ ID NO: 687690 - DNA, 15 bp, Homo sapiens
acataagcatggatt

SEQ ID NO: 687691 - DNA, 15 bp, Homo sapiens
cataagcatggatta

SEQ ID NO: 687692 - DNA, 15 bp, Homo sapiens
ataagcatggattac

SEQ ID NO: 687693 - DNA, 15 bp, Homo sapiens
taagcatggattact

SEQ ID NO: 687694 - DNA, 15 bp, Homo sapiens
aagcatggattactg

SEQ ID NO: 687695 - DNA, 15 bp, Homo sapiens
agcatggattactgt

SEQ ID NO: 687696 - DNA, 15 bp, Homo sapiens
gcatggattactgtt

SEQ ID NO: 687697 - DNA, 15 bp, Homo sapiens
catggattactgttc

SEQ ID NO: 687698 - DNA, 15 bp, Homo sapiens
atggattactgttct

SEQ ID NO: 687699 - DNA, 15 bp, Homo sapiens
tggattactgttcta

SEQ ID NO: 687700 - DNA, 15 bp, Homo sapiens
ggattactgttctat

SEQ ID NO: 687701 - DNA, 15 bp, Homo sapiens
gattactgttctatc

SEQ ID NO: 687702 - DNA, 15 bp, Homo sapiens
attactgttctatct

SEQ ID NO: 687703 - DNA, 15 bp, Homo sapiens
ttactgttctatcta

SEQ ID NO: 687704 - DNA, 15 bp, Homo sapiens
tactgttctatctaa

SEQ ID NO: 687705 - DNA, 15 bp, Homo sapiens
actgttctatctaat

SEQ ID NO: 687706 - DNA, 15 bp, Homo sapiens
ctgttctatctaata

SEQ ID NO: 687707 - DNA, 15 bp, Homo sapiens
tgttctatctaatac

SEQ ID NO: 687708 - DNA, 15 bp, Homo sapiens
gttctatctaataca

SEQ ID NO: 687709 - DNA, 15 bp, Homo sapiens
ttctatctaatacat

SEQ ID NO: 687710 - DNA, 15 bp, Homo sapiens
tctatctaatacatt

SEQ ID NO: 687711 - DNA, 15 bp, Homo sapiens
ctatctaatacattt

SEQ ID NO: 687712 - DNA, 15 bp, Homo sapiens
tatctaatacattta

SEQ ID NO: 687713 - DNA, 15 bp, Homo sapiens
atctaatacatttat

SEQ ID NO: 687714 - DNA, 15 bp, Homo sapiens
tctaatacatttatg

SEQ ID NO: 687715 - DNA, 15 bp, Homo sapiens
ctaatacatttatga

SEQ ID NO: 687716 - DNA, 15 bp, Homo sapiens
taatacatttatgaa

SEQ ID NO: 687717 - DNA, 15 bp, Homo sapiens
aatacatttatgaag

SEQ ID NO: 687718 - DNA, 15 bp, Homo sapiens
atacatttatgaaga

SEQ ID NO: 687719 - DNA, 15 bp, Homo sapiens
tacatttatgaagat

SEQ ID NO: 687720 - DNA, 15 bp, Homo sapiens
acatttatgaagatt

SEQ ID NO: 687721 - DNA, 15 bp, Homo sapiens
catttatgaagatta

SEQ ID NO: 687722 - DNA, 15 bp, Homo sapiens
atttatgaagattaa

SEQ ID NO: 687723 - DNA, 15 bp, Homo sapiens
tttatgaagattaat

SEQ ID NO: 687724 - DNA, 15 bp, Homo sapiens
ttatgaagattaatg

SEQ ID NO: 687725 - DNA, 15 bp, Homo sapiens
tatgaagattaatga

SEQ ID NO: 687726 - DNA, 15 bp, Homo sapiens
atgaagattaatgaa

SEQ ID NO: 687727 - DNA, 15 bp, Homo sapiens
tgaagattaatgaaa

SEQ ID NO: 687728 - DNA, 15 bp, Homo sapiens
gaagattaatgaaaa

SEQ ID NO: 687729 - DNA, 15 bp, Homo sapiens
aagattaatgaaaag

SEQ ID NO: 687730 - DNA, 15 bp, Homo sapiens
agattaatgaaaagt

SEQ ID NO: 687731 - DNA, 15 bp, Homo sapiens
gattaatgaaaagtt

SEQ ID NO: 687732 - DNA, 15 bp, Homo sapiens
attaatgaaaagttt

SEQ ID NO: 687733 - DNA, 15 bp, Homo sapiens
ttaatgaaaagtttg

SEQ ID NO: 687734 - DNA, 15 bp, Homo sapiens
taatgaaaagtttgc

SEQ ID NO: 687735 - DNA, 15 bp, Homo sapiens
aatgaaaagtttgca

SEQ ID NO: 687736 - DNA, 15 bp, Homo sapiens
atgaaaagtttgcat

SEQ ID NO: 687737 - DNA, 15 bp, Homo sapiens
tgaaaagtttgcatt

SEQ ID NO: 687738 - DNA, 15 bp, Homo sapiens
gaaaagtttgcattt

SEQ ID NO: 687739 - DNA, 15 bp, Homo sapiens
aaaagtttgcattta

SEQ ID NO: 687740 - DNA, 15 bp, Homo sapiens
aaagtttgcatttaa

SEQ ID NO: 687741 - DNA, 15 bp, Homo sapiens
aagtttgcatttaat

SEQ ID NO: 687742 - DNA, 15 bp, Homo sapiens
agtttgcatttaatt

SEQ ID NO: 687743 - DNA, 15 bp, Homo sapiens
gtttgcatttaattg

SEQ ID NO: 687744 - DNA, 15 bp, Homo sapiens
tttgcatttaattgg

SEQ ID NO: 687745 - DNA, 15 bp, Homo sapiens
ttgcatttaattgga

SEQ ID NO: 687746 - DNA, 15 bp, Homo sapiens
tgcatttaattggat

SEQ ID NO: 687747 - DNA, 15 bp, Homo sapiens
gcatttaattggatt

SEQ ID NO: 687748 - DNA, 15 bp, Homo sapiens
catttaattggattt

SEQ ID NO: 687749 - DNA, 15 bp, Homo sapiens
atttaattggatttc

SEQ ID NO: 687750 - DNA, 15 bp, Homo sapiens
tttaattggatttct

SEQ ID NO: 687751 - DNA, 15 bp, Homo sapiens
ttaattggatttctt

SEQ ID NO: 687752 - DNA, 15 bp, Homo sapiens
taattggatttcttc

SEQ ID NO: 687753 - DNA, 15 bp, Homo sapiens
aattggatttcttcc

SEQ ID NO: 687754 - DNA, 15 bp, Homo sapiens
attggatttcttcct

SEQ ID NO: 687755 - DNA, 15 bp, Homo sapiens
ttggatttcttccta

SEQ ID NO: 687756 - DNA, 15 bp, Homo sapiens
tggatttcttcctat

SEQ ID NO: 687757 - DNA, 15 bp, Homo sapiens
ggatttcttcctatc

SEQ ID NO: 687758 - DNA, 15 bp, Homo sapiens
gatttcttcctatca

SEQ ID NO: 687759 - DNA, 15 bp, Homo sapiens
atttcttcctatcac

SEQ ID NO: 687760 - DNA, 15 bp, Homo sapiens
tttcttcctatcact

SEQ ID NO: 687761 - DNA, 15 bp, Homo sapiens
ttcttcctatcactc

SEQ ID NO: 687762 - DNA, 15 bp, Homo sapiens
tcttcctatcactcc

SEQ ID NO: 687763 - DNA, 15 bp, Homo sapiens
cttcctatcactcct

SEQ ID NO: 687764 - DNA, 15 bp, Homo sapiens
ttcctatcactcctt

SEQ ID NO: 687765 - DNA, 15 bp, Homo sapiens
tcctatcactccttt

SEQ ID NO: 687766 - DNA, 15 bp, Homo sapiens
cctatcactcctttt

SEQ ID NO: 687767 - DNA, 15 bp, Homo sapiens
ctatcactcctttta

SEQ ID NO: 687768 - DNA, 15 bp, Homo sapiens
tatcactccttttaa

SEQ ID NO: 687769 - DNA, 15 bp, Homo sapiens
atcactccttttaaa

SEQ ID NO: 687770 - DNA, 15 bp, Homo sapiens
tcactccttttaaaa

SEQ ID NO: 687771 - DNA, 15 bp, Homo sapiens
cactccttttaaaat

SEQ ID NO: 687772 - DNA, 15 bp, Homo sapiens
actccttttaaaatg

SEQ ID NO: 687773 - DNA, 15 bp, Homo sapiens
ctccttttaaaatgc

SEQ ID NO: 687774 - DNA, 15 bp, Homo sapiens
tccttttaaaatgca

SEQ ID NO: 687775 - DNA, 15 bp, Homo sapiens
ccttttaaaatgcaa

SEQ ID NO: 687776 - DNA, 15 bp, Homo sapiens
cttttaaaatgcaat

SEQ ID NO: 687777 - DNA, 15 bp, Homo sapiens
ttttaaaatgcaatt

SEQ ID NO: 687778 - DNA, 15 bp, Homo sapiens
tttaaaatgcaattt

SEQ ID NO: 687779 - DNA, 15 bp, Homo sapiens
ttaaaatgcaatttt

SEQ ID NO: 687780 - DNA, 15 bp, Homo sapiens
taaaatgcaatttta

SEQ ID NO: 687781 - DNA, 15 bp, Homo sapiens
aaaatgcaattttac

SEQ ID NO: 687782 - DNA, 15 bp, Homo sapiens
aaatgcaattttact

SEQ ID NO: 687783 - DNA, 15 bp, Homo sapiens
aatgcaattttactt

SEQ ID NO: 687784 - DNA, 15 bp, Homo sapiens
atgcaattttacttc

SEQ ID NO: 687785 - DNA, 15 bp, Homo sapiens
tgcaattttacttct

SEQ ID NO: 687786 - DNA, 15 bp, Homo sapiens
gcaattttacttctc

SEQ ID NO: 687787 - DNA, 15 bp, Homo sapiens
caattttacttctct

SEQ ID NO: 687788 - DNA, 15 bp, Homo sapiens
aattttacttctctg

SEQ ID NO: 687789 - DNA, 15 bp, Homo sapiens
attttacttctctga

SEQ ID NO: 687790 - DNA, 15 bp, Homo sapiens
ttttacttctctgag

SEQ ID NO: 687791 - DNA, 15 bp, Homo sapiens
tttacttctctgagg

SEQ ID NO: 687792 - DNA, 15 bp, Homo sapiens
ttacttctctgaggt

SEQ ID NO: 687793 - DNA, 15 bp, Homo sapiens
tacttctctgaggtt

SEQ ID NO: 687794 - DNA, 15 bp, Homo sapiens
acttctctgaggttg

SEQ ID NO: 687795 - DNA, 15 bp, Homo sapiens
cttctctgaggttgg

SEQ ID NO: 687796 - DNA, 15 bp, Homo sapiens
ttctctgaggttgga

SEQ ID NO: 687797 - DNA, 15 bp, Homo sapiens
tctctgaggttggaa

SEQ ID NO: 687798 - DNA, 15 bp, Homo sapiens
ctctgaggttggaat

SEQ ID NO: 687799 - DNA, 15 bp, Homo sapiens
tctgaggttggaatc

SEQ ID NO: 687800 - DNA, 15 bp, Homo sapiens
ctgaggttggaatca

SEQ ID NO: 687801 - DNA, 15 bp, Homo sapiens
tgaggttggaatcac

SEQ ID NO: 687802 - DNA, 15 bp, Homo sapiens
gaggttggaatcact

SEQ ID NO: 687803 - DNA, 15 bp, Homo sapiens
aggttggaatcactt

SEQ ID NO: 687804 - DNA, 15 bp, Homo sapiens
ggttggaatcacttt

SEQ ID NO: 687805 - DNA, 15 bp, Homo sapiens
gttggaatcactttg

SEQ ID NO: 687806 - DNA, 15 bp, Homo sapiens
ttggaatcactttgg

SEQ ID NO: 687807 - DNA, 15 bp, Homo sapiens
tggaatcactttggc

SEQ ID NO: 687808 - DNA, 15 bp, Homo sapiens
ggaatcactttggcg

SEQ ID NO: 687809 - DNA, 15 bp, Homo sapiens
gaatcactttggcgt

SEQ ID NO: 687810 - DNA, 15 bp, Homo sapiens
aatcactttggcgtt

SEQ ID NO: 687811 - DNA, 15 bp, Homo sapiens
atcactttggcgtta

SEQ ID NO: 687812 - DNA, 15 bp, Homo sapiens
tcactttggcgttaa

SEQ ID NO: 687813 - DNA, 15 bp, Homo sapiens
cactttggcgttaaa

SEQ ID NO: 687814 - DNA, 15 bp, Homo sapiens
actttggcgttaaaa

SEQ ID NO: 687815 - DNA, 15 bp, Homo sapiens
ctttggcgttaaaag

SEQ ID NO: 687816 - DNA, 15 bp, Homo sapiens
tttggcgttaaaagt

SEQ ID NO: 687817 - DNA, 15 bp, Homo sapiens
ttggcgttaaaagtc

SEQ ID NO: 687818 - DNA, 15 bp, Homo sapiens
tggcgttaaaagtca

SEQ ID NO: 687819 - DNA, 15 bp, Homo sapiens
ggcgttaaaagtcac

SEQ ID NO: 687820 - DNA, 15 bp, Homo sapiens
gcgttaaaagtcaca

SEQ ID NO: 687821 - DNA, 15 bp, Homo sapiens
cgttaaaagtcacag

SEQ ID NO: 687822 - DNA, 15 bp, Homo sapiens
gttaaaagtcacagt

SEQ ID NO: 687823 - DNA, 15 bp, Homo sapiens
ttaaaagtcacagta

SEQ ID NO: 687824 - DNA, 15 bp, Homo sapiens
taaaagtcacagtag

SEQ ID NO: 687825 - DNA, 15 bp, Homo sapiens
aaaagtcacagtaga

SEQ ID NO: 687826 - DNA, 15 bp, Homo sapiens
aaagtcacagtagaa

SEQ ID NO: 687827 - DNA, 15 bp, Homo sapiens
aagtcacagtagaag

SEQ ID NO: 687828 - DNA, 15 bp, Homo sapiens
agtcacagtagaagg

SEQ ID NO: 687829 - DNA, 15 bp, Homo sapiens
gtcacagtagaaggc

SEQ ID NO: 687830 - DNA, 15 bp, Homo sapiens
tcacagtagaaggca

SEQ ID NO: 687831 - DNA, 15 bp, Homo sapiens
cacagtagaaggcat

SEQ ID NO: 687832 - DNA, 15 bp, Homo sapiens
acagtagaaggcatg

SEQ ID NO: 687833 - DNA, 15 bp, Homo sapiens
cagtagaaggcatgc

SEQ ID NO: 687834 - DNA, 15 bp, Homo sapiens
agtagaaggcatgcc

SEQ ID NO: 687835 - DNA, 15 bp, Homo sapiens
gtagaaggcatgcca

SEQ ID NO: 687836 - DNA, 15 bp, Homo sapiens
tagaaggcatgccaa

SEQ ID NO: 687837 - DNA, 15 bp, Homo sapiens
agaaggcatgccaat

SEQ ID NO: 687838 - DNA, 15 bp, Homo sapiens
gaaggcatgccaata

SEQ ID NO: 687839 - DNA, 15 bp, Homo sapiens
aaggcatgccaatag

SEQ ID NO: 687840 - DNA, 15 bp, Homo sapiens
aggcatgccaatagt

SEQ ID NO: 687841 - DNA, 15 bp, Homo sapiens
ggcatgccaatagtt

SEQ ID NO: 687842 - DNA, 15 bp, Homo sapiens
gcatgccaatagttt

SEQ ID NO: 687843 - DNA, 15 bp, Homo sapiens
catgccaatagtttt

SEQ ID NO: 687844 - DNA, 15 bp, Homo sapiens
atgccaatagttttc

SEQ ID NO: 687845 - DNA, 15 bp, Homo sapiens
tgccaatagttttct

SEQ ID NO: 687846 - DNA, 15 bp, Homo sapiens
gccaatagttttctc

SEQ ID NO: 687847 - DNA, 15 bp, Homo sapiens
ccaatagttttctct

SEQ ID NO: 687848 - DNA, 15 bp, Homo sapiens
caatagttttctctt

SEQ ID NO: 687849 - DNA, 15 bp, Homo sapiens
aatagttttctcttg

SEQ ID NO: 687850 - DNA, 15 bp, Homo sapiens
atagttttctcttgg

SEQ ID NO: 687851 - DNA, 15 bp, Homo sapiens
tagttttctcttggg

SEQ ID NO: 687852 - DNA, 15 bp, Homo sapiens
agttttctcttgggc

SEQ ID NO: 687853 - DNA, 15 bp, Homo sapiens
gttttctcttgggca

SEQ ID NO: 687854 - DNA, 15 bp, Homo sapiens
ttttctcttgggcat

SEQ ID NO: 687855 - DNA, 15 bp, Homo sapiens
tttctcttgggcatt

SEQ ID NO: 687856 - DNA, 15 bp, Homo sapiens
ttctcttgggcattg

SEQ ID NO: 687857 - DNA, 15 bp, Homo sapiens
tctcttgggcattgg

SEQ ID NO: 687858 - DNA, 15 bp, Homo sapiens
ctcttgggcattggt

SEQ ID NO: 687859 - DNA, 15 bp, Homo sapiens
tcttgggcattggtt

SEQ ID NO: 687860 - DNA, 15 bp, Homo sapiens
cttgggcattggttt

SEQ ID NO: 687861 - DNA, 15 bp, Homo sapiens
ttgggcattggtttt

SEQ ID NO: 687862 - DNA, 15 bp, Homo sapiens
tgggcattggttttt

SEQ ID NO: 687863 - DNA, 15 bp, Homo sapiens
gggcattggttttta

SEQ ID NO: 687864 - DNA, 15 bp, Homo sapiens
ggcattggtttttaa

SEQ ID NO: 687865 - DNA, 15 bp, Homo sapiens
gcattggtttttaaa

SEQ ID NO: 687866 - DNA, 15 bp, Homo sapiens
cattggtttttaaag

SEQ ID NO: 687867 - DNA, 15 bp, Homo sapiens
attggtttttaaagt

SEQ ID NO: 687868 - DNA, 15 bp, Homo sapiens
ttggtttttaaagta

SEQ ID NO: 687869 - DNA, 15 bp, Homo sapiens
tggtttttaaagtat

SEQ ID NO: 687870 - DNA, 15 bp, Homo sapiens
ggtttttaaagtata

SEQ ID NO: 687871 - DNA, 15 bp, Homo sapiens
gtttttaaagtataa

SEQ ID NO: 687872 - DNA, 15 bp, Homo sapiens
tttttaaagtataat

SEQ ID NO: 687873 - DNA, 15 bp, Homo sapiens
ttttaaagtataatt

SEQ ID NO: 687874 - DNA, 15 bp, Homo sapiens
tttaaagtataatta

SEQ ID NO: 687875 - DNA, 15 bp, Homo sapiens
ttaaagtataattaa

SEQ ID NO: 687876 - DNA, 15 bp, Homo sapiens
taaagtataattaaa

SEQ ID NO: 687877 - DNA, 15 bp, Homo sapiens
aaagtataattaaaa

SEQ ID NO: 687878 - DNA, 15 bp, Homo sapiens
aagtataattaaaaa

SEQ ID NO: 687879 - DNA, 15 bp, Homo sapiens
agtataattaaaaaa

SEQ ID NO: 687880 - DNA, 15 bp, Homo sapiens
gtataattaaaaaat

SEQ ID NO: 687881 - DNA, 15 bp, Homo sapiens
tataattaaaaaatt

SEQ ID NO: 687882 - DNA, 15 bp, Homo sapiens
ataattaaaaaatta

SEQ ID NO: 687883 - DNA, 15 bp, Homo sapiens
taattaaaaaattat

SEQ ID NO: 687884 - DNA, 15 bp, Homo sapiens
aattaaaaaattatg

SEQ ID NO: 687885 - DNA, 15 bp, Homo sapiens
attaaaaaattatgg

SEQ ID NO: 687886 - DNA, 15 bp, Homo sapiens
ttaaaaaattatgga

SEQ ID NO: 687887 - DNA, 15 bp, Homo sapiens
taaaaaattatggat

SEQ ID NO: 687888 - DNA, 15 bp, Homo sapiens
aaaaaattatggatc

SEQ ID NO: 687889 - DNA, 15 bp, Homo sapiens
aaaaattatggatca

SEQ ID NO: 687890 - DNA, 15 bp, Homo sapiens
aaaattatggatcag

SEQ ID NO: 687891 - DNA, 15 bp, Homo sapiens
aaattatggatcaga

SEQ ID NO: 687892 - DNA, 15 bp, Homo sapiens
aattatggatcagaa

SEQ ID NO: 687893 - DNA, 15 bp, Homo sapiens
attatggatcagaac

SEQ ID NO: 687894 - DNA, 15 bp, Homo sapiens
ttatggatcagaact

SEQ ID NO: 687895 - DNA, 15 bp, Homo sapiens
tatggatcagaactg

SEQ ID NO: 687896 - DNA, 15 bp, Homo sapiens
atggatcagaactga

SEQ ID NO: 687897 - DNA, 15 bp, Homo sapiens
tggatcagaactgat

SEQ ID NO: 687898 - DNA, 15 bp, Homo sapiens
ggatcagaactgatg

SEQ ID NO: 687899 - DNA, 15 bp, Homo sapiens
gatcagaactgatga

SEQ ID NO: 687900 - DNA, 15 bp, Homo sapiens
atcagaactgatgaa

SEQ ID NO: 687901 - DNA, 15 bp, Homo sapiens
tcagaactgatgaaa

SEQ ID NO: 687902 - DNA, 15 bp, Homo sapiens
cagaactgatgaaag

SEQ ID NO: 687903 - DNA, 15 bp, Homo sapiens
agaactgatgaaaga

SEQ ID NO: 687904 - DNA, 15 bp, Homo sapiens
gaactgatgaaagat

SEQ ID NO: 687905 - DNA, 15 bp, Homo sapiens
aactgatgaaagatt

SEQ ID NO: 687906 - DNA, 15 bp, Homo sapiens
actgatgaaagattt

SEQ ID NO: 687907 - DNA, 15 bp, Homo sapiens
ctgatgaaagattta

SEQ ID NO: 687908 - DNA, 15 bp, Homo sapiens
tgatgaaagatttac

SEQ ID NO: 687909 - DNA, 15 bp, Homo sapiens
gatgaaagatttaca

SEQ ID NO: 687910 - DNA, 15 bp, Homo sapiens
atgaaagatttacaa

SEQ ID NO: 687911 - DNA, 15 bp, Homo sapiens
tgaaagatttacaaa

SEQ ID NO: 687912 - DNA, 15 bp, Homo sapiens
gaaagatttacaaat

SEQ ID NO: 687913 - DNA, 15 bp, Homo sapiens
aaagatttacaaatt

SEQ ID NO: 687914 - DNA, 15 bp, Homo sapiens
aagatttacaaattc

SEQ ID NO: 687915 - DNA, 15 bp, Homo sapiens
agatttacaaattct

SEQ ID NO: 687916 - DNA, 15 bp, Homo sapiens
gatttacaaattcta

SEQ ID NO: 687917 - DNA, 15 bp, Homo sapiens
atttacaaattctag

SEQ ID NO: 687918 - DNA, 15 bp, Homo sapiens
tttacaaattctagc

SEQ ID NO: 687919 - DNA, 15 bp, Homo sapiens
ttacaaattctagca

SEQ ID NO: 687920 - DNA, 15 bp, Homo sapiens
tacaaattctagcaa

SEQ ID NO: 687921 - DNA, 15 bp, Homo sapiens
acaaattctagcaat

SEQ ID NO: 687922 - DNA, 15 bp, Homo sapiens
caaattctagcaatt

SEQ ID NO: 687923 - DNA, 15 bp, Homo sapiens
aaattctagcaattg

SEQ ID NO: 687924 - DNA, 15 bp, Homo sapiens
aattctagcaattga

SEQ ID NO: 687925 - DNA, 15 bp, Homo sapiens
attctagcaattgaa

SEQ ID NO: 687926 - DNA, 15 bp, Homo sapiens
ttctagcaattgaaa

SEQ ID NO: 687927 - DNA, 15 bp, Homo sapiens
tctagcaattgaaaa

SEQ ID NO: 687928 - DNA, 15 bp, Homo sapiens
ctagcaattgaaaaa

SEQ ID NO: 687929 - DNA, 15 bp, Homo sapiens
tagcaattgaaaaag

SEQ ID NO: 687930 - DNA, 15 bp, Homo sapiens
agcaattgaaaaagt

SEQ ID NO: 687931 - DNA, 15 bp, Homo sapiens
gcaattgaaaaagta

SEQ ID NO: 687932 - DNA, 15 bp, Homo sapiens
caattgaaaaagtat

SEQ ID NO: 687933 - DNA, 15 bp, Homo sapiens
aattgaaaaagtatc

SEQ ID NO: 687934 - DNA, 15 bp, Homo sapiens
attgaaaaagtatct

SEQ ID NO: 687935 - DNA, 15 bp, Homo sapiens
ttgaaaaagtatcta

SEQ ID NO: 687936 - DNA, 15 bp, Homo sapiens
tgaaaaagtatctaa

SEQ ID NO: 687937 - DNA, 15 bp, Homo sapiens
gaaaaagtatctaag

SEQ ID NO: 687938 - DNA, 15 bp, Homo sapiens
aaaaagtatctaaga

SEQ ID NO: 687939 - DNA, 15 bp, Homo sapiens
aaaagtatctaagat

SEQ ID NO: 687940 - DNA, 15 bp, Homo sapiens
aaagtatctaagatt

SEQ ID NO: 687941 - DNA, 15 bp, Homo sapiens
aagtatctaagattg

SEQ ID NO: 687942 - DNA, 15 bp, Homo sapiens
agtatctaagattgg

SEQ ID NO: 687943 - DNA, 15 bp, Homo sapiens
gtatctaagattggg

SEQ ID NO: 687944 - DNA, 15 bp, Homo sapiens
tatctaagattggga

SEQ ID NO: 687945 - DNA, 15 bp, Homo sapiens
atctaagattgggaa

SEQ ID NO: 687946 - DNA, 15 bp, Homo sapiens
tctaagattgggaat

SEQ ID NO: 687947 - DNA, 15 bp, Homo sapiens
ctaagattgggaata

SEQ ID NO: 687948 - DNA, 15 bp, Homo sapiens
taagattgggaataa

SEQ ID NO: 687949 - DNA, 15 bp, Homo sapiens
aagattgggaataaa

SEQ ID NO: 687950 - DNA, 15 bp, Homo sapiens
agattgggaataaat

SEQ ID NO: 687951 - DNA, 15 bp, Homo sapiens
gattgggaataaatt

SEQ ID NO: 687952 - DNA, 15 bp, Homo sapiens
attgggaataaattg

SEQ ID NO: 687953 - DNA, 15 bp, Homo sapiens
ttgggaataaattgt

SEQ ID NO: 687954 - DNA, 15 bp, Homo sapiens
tgggaataaattgtg

SEQ ID NO: 687955 - DNA, 15 bp, Homo sapiens
gggaataaattgtgc

SEQ ID NO: 687956 - DNA, 15 bp, Homo sapiens
ggaataaattgtgca

SEQ ID NO: 687957 - DNA, 15 bp, Homo sapiens
gaataaattgtgcaa

SEQ ID NO: 687958 - DNA, 15 bp, Homo sapiens
aataaattgtgcaag

SEQ ID NO: 687959 - DNA, 15 bp, Homo sapiens
ataaattgtgcaagt

SEQ ID NO: 687960 - DNA, 15 bp, Homo sapiens
taaattgtgcaagtg

SEQ ID NO: 687961 - DNA, 15 bp, Homo sapiens
aaattgtgcaagtgt

SEQ ID NO: 687962 - DNA, 15 bp, Homo sapiens
aattgtgcaagtgtg

SEQ ID NO: 687963 - DNA, 15 bp, Homo sapiens
attgtgcaagtgtgt

SEQ ID NO: 687964 - DNA, 15 bp, Homo sapiens
ttgtgcaagtgtgtt

SEQ ID NO: 687965 - DNA, 15 bp, Homo sapiens
tgtgcaagtgtgtta

SEQ ID NO: 687966 - DNA, 15 bp, Homo sapiens
gtgcaagtgtgttaa

SEQ ID NO: 687967 - DNA, 15 bp, Homo sapiens
tgcaagtgtgttaat

SEQ ID NO: 687968 - DNA, 15 bp, Homo sapiens
gcaagtgtgttaatt

SEQ ID NO: 687969 - DNA, 15 bp, Homo sapiens
caagtgtgttaattg

SEQ ID NO: 687970 - DNA, 15 bp, Homo sapiens
aagtgtgttaattga

SEQ ID NO: 687971 - DNA, 15 bp, Homo sapiens
agtgtgttaattgaa

SEQ ID NO: 687972 - DNA, 15 bp, Homo sapiens
gtgtgttaattgaac

SEQ ID NO: 687973 - DNA, 15 bp, Homo sapiens
tgtgttaattgaact

SEQ ID NO: 687974 - DNA, 15 bp, Homo sapiens
gtgttaattgaactg

SEQ ID NO: 687975 - DNA, 15 bp, Homo sapiens
tgttaattgaactga

SEQ ID NO: 687976 - DNA, 15 bp, Homo sapiens
gttaattgaactgat

SEQ ID NO: 687977 - DNA, 15 bp, Homo sapiens
ttaattgaactgata

SEQ ID NO: 687978 - DNA, 15 bp, Homo sapiens
taattgaactgataa

SEQ ID NO: 687979 - DNA, 15 bp, Homo sapiens
aattgaactgataaa

SEQ ID NO: 687980 - DNA, 15 bp, Homo sapiens
attgaactgataaat

SEQ ID NO: 687981 - DNA, 15 bp, Homo sapiens
ttgaactgataaatt

SEQ ID NO: 687982 - DNA, 15 bp, Homo sapiens
tgaactgataaattg

SEQ ID NO: 687983 - DNA, 15 bp, Homo sapiens
gaactgataaattga

SEQ ID NO: 687984 - DNA, 15 bp, Homo sapiens
aactgataaattgag

SEQ ID NO: 687985 - DNA, 15 bp, Homo sapiens
actgataaattgagc

SEQ ID NO: 687986 - DNA, 15 bp, Homo sapiens
ctgataaattgagct

SEQ ID NO: 687987 - DNA, 15 bp, Homo sapiens
tgataaattgagcta

SEQ ID NO: 687988 - DNA, 15 bp, Homo sapiens
gataaattgagctaa

SEQ ID NO: 687989 - DNA, 15 bp, Homo sapiens
ataaattgagctaat

SEQ ID NO: 687990 - DNA, 15 bp, Homo sapiens
taaattgagctaatt

SEQ ID NO: 687991 - DNA, 15 bp, Homo sapiens
aaattgagctaattg

SEQ ID NO: 687992 - DNA, 15 bp, Homo sapiens
aattgagctaattgt

SEQ ID NO: 687993 - DNA, 15 bp, Homo sapiens
attgagctaattgtc

SEQ ID NO: 687994 - DNA, 15 bp, Homo sapiens
ttgagctaattgtct

SEQ ID NO: 687995 - DNA, 15 bp, Homo sapiens
tgagctaattgtctt

SEQ ID NO: 687996 - DNA, 15 bp, Homo sapiens
gagctaattgtcttg

SEQ ID NO: 687997 - DNA, 15 bp, Homo sapiens
agctaattgtcttgc

SEQ ID NO: 687998 - DNA, 15 bp, Homo sapiens
gctaattgtcttgcc

SEQ ID NO: 687999 - DNA, 15 bp, Homo sapiens
ctaattgtcttgccc

SEQ ID NO: 688000 - DNA, 15 bp, Homo sapiens
taattgtcttgccca

SEQ ID NO: 688001 - DNA, 15 bp, Homo sapiens
aattgtcttgcccaa

SEQ ID NO: 688002 - DNA, 15 bp, Homo sapiens
attgtcttgcccaag

SEQ ID NO: 688003 - DNA, 15 bp, Homo sapiens
ttgtcttgcccaaga

SEQ ID NO: 688004 - DNA, 15 bp, Homo sapiens
tgtcttgcccaagat

SEQ ID NO: 688005 - DNA, 15 bp, Homo sapiens
gtcttgcccaagata

SEQ ID NO: 688006 - DNA, 15 bp, Homo sapiens
tcttgcccaagatac

SEQ ID NO: 688007 - DNA, 15 bp, Homo sapiens
cttgcccaagatact

SEQ ID NO: 688008 - DNA, 15 bp, Homo sapiens
ttgcccaagatactt

SEQ ID NO: 688009 - DNA, 15 bp, Homo sapiens
tgcccaagatactta

SEQ ID NO: 688010 - DNA, 15 bp, Homo sapiens
gcccaagatacttaa

SEQ ID NO: 688011 - DNA, 15 bp, Homo sapiens
cccaagatacttaac

SEQ ID NO: 688012 - DNA, 15 bp, Homo sapiens
ccaagatacttaact

SEQ ID NO: 688013 - DNA, 15 bp, Homo sapiens
caagatacttaactg

SEQ ID NO: 688014 - DNA, 15 bp, Homo sapiens
aagatacttaactga

SEQ ID NO: 688015 - DNA, 15 bp, Homo sapiens
agatacttaactgaa

SEQ ID NO: 688016 - DNA, 15 bp, Homo sapiens
gatacttaactgaag

SEQ ID NO: 688017 - DNA, 15 bp, Homo sapiens
atacttaactgaagg

SEQ ID NO: 688018 - DNA, 15 bp, Homo sapiens
tacttaactgaaggg

SEQ ID NO: 688019 - DNA, 15 bp, Homo sapiens
acttaactgaagggt

SEQ ID NO: 688020 - DNA, 15 bp, Homo sapiens
cttaactgaagggta

SEQ ID NO: 688021 - DNA, 15 bp, Homo sapiens
ttaactgaagggtac

SEQ ID NO: 688022 - DNA, 15 bp, Homo sapiens
taactgaagggtact

SEQ ID NO: 688023 - DNA, 15 bp, Homo sapiens
aactgaagggtactg

SEQ ID NO: 688024 - DNA, 15 bp, Homo sapiens
actgaagggtactgg

SEQ ID NO: 688025 - DNA, 15 bp, Homo sapiens
ctgaagggtactgga

SEQ ID NO: 688026 - DNA, 15 bp, Homo sapiens
tgaagggtactggag

SEQ ID NO: 688027 - DNA, 15 bp, Homo sapiens
gaagggtactggagt

SEQ ID NO: 688028 - DNA, 15 bp, Homo sapiens
aagggtactggagtg

SEQ ID NO: 688029 - DNA, 15 bp, Homo sapiens
agggtactggagtga

SEQ ID NO: 688030 - DNA, 15 bp, Homo sapiens
gggtactggagtgaa

SEQ ID NO: 688031 - DNA, 15 bp, Homo sapiens
ggtactggagtgaac

SEQ ID NO: 688032 - DNA, 15 bp, Homo sapiens
gtactggagtgaacc

SEQ ID NO: 688033 - DNA, 15 bp, Homo sapiens
tactggagtgaacca

SEQ ID NO: 688034 - DNA, 15 bp, Homo sapiens
actggagtgaaccaa

SEQ ID NO: 688035 - DNA, 15 bp, Homo sapiens
ctggagtgaaccaaa

SEQ ID NO: 688036 - DNA, 15 bp, Homo sapiens
tggagtgaaccaaag

SEQ ID NO: 688037 - DNA, 15 bp, Homo sapiens
ggagtgaaccaaagg

SEQ ID NO: 688038 - DNA, 15 bp, Homo sapiens
gagtgaaccaaaggg

SEQ ID NO: 688039 - DNA, 15 bp, Homo sapiens
agtgaaccaaagggt

SEQ ID NO: 688040 - DNA, 15 bp, Homo sapiens
gtgaaccaaagggtt

SEQ ID NO: 688041 - DNA, 15 bp, Homo sapiens
tgaaccaaagggttt

SEQ ID NO: 688042 - DNA, 15 bp, Homo sapiens
gaaccaaagggttta

SEQ ID NO: 688043 - DNA, 15 bp, Homo sapiens
aaccaaagggtttag

SEQ ID NO: 688044 - DNA, 15 bp, Homo sapiens
accaaagggtttaga

SEQ ID NO: 688045 - DNA, 15 bp, Homo sapiens
ccaaagggtttagaa

SEQ ID NO: 688046 - DNA, 15 bp, Homo sapiens
caaagggtttagaaa

SEQ ID NO: 688047 - DNA, 15 bp, Homo sapiens
aaagggtttagaaaa

SEQ ID NO: 688048 - DNA, 15 bp, Homo sapiens
aagggtttagaaaac

SEQ ID NO: 688049 - DNA, 15 bp, Homo sapiens
agggtttagaaaaca

SEQ ID NO: 688050 - DNA, 15 bp, Homo sapiens
gggtttagaaaacat

SEQ ID NO: 688051 - DNA, 15 bp, Homo sapiens
ggtttagaaaacatt

SEQ ID NO: 688052 - DNA, 15 bp, Homo sapiens
gtttagaaaacattg

SEQ ID NO: 688053 - DNA, 15 bp, Homo sapiens
tttagaaaacattgg

SEQ ID NO: 688054 - DNA, 15 bp, Homo sapiens
ttagaaaacattggt

SEQ ID NO: 688055 - DNA, 15 bp, Homo sapiens
tagaaaacattggta

SEQ ID NO: 688056 - DNA, 15 bp, Homo sapiens
agaaaacattggtag

SEQ ID NO: 688057 - DNA, 15 bp, Homo sapiens
gaaaacattggtaga

SEQ ID NO: 688058 - DNA, 15 bp, Homo sapiens
aaaacattggtagaa

SEQ ID NO: 688059 - DNA, 15 bp, Homo sapiens
aaacattggtagaat

SEQ ID NO: 688060 - DNA, 15 bp, Homo sapiens
aacattggtagaata

SEQ ID NO: 688061 - DNA, 15 bp, Homo sapiens
acattggtagaatat

SEQ ID NO: 688062 - DNA, 15 bp, Homo sapiens
cattggtagaatatg

SEQ ID NO: 688063 - DNA, 15 bp, Homo sapiens
attggtagaatatgt

SEQ ID NO: 688064 - DNA, 15 bp, Homo sapiens
ttggtagaatatgta

SEQ ID NO: 688065 - DNA, 15 bp, Homo sapiens
tggtagaatatgtaa

SEQ ID NO: 688066 - DNA, 15 bp, Homo sapiens
ggtagaatatgtaat

SEQ ID NO: 688067 - DNA, 15 bp, Homo sapiens
gtagaatatgtaatc

SEQ ID NO: 688068 - DNA, 15 bp, Homo sapiens
tagaatatgtaatca

SEQ ID NO: 688069 - DNA, 15 bp, Homo sapiens
agaatatgtaatcaa

SEQ ID NO: 688070 - DNA, 15 bp, Homo sapiens
gaatatgtaatcaag

SEQ ID NO: 688071 - DNA, 15 bp, Homo sapiens
aatatgtaatcaaga

SEQ ID NO: 688072 - DNA, 15 bp, Homo sapiens
atatgtaatcaagag

SEQ ID NO: 688073 - DNA, 15 bp, Homo sapiens
tatgtaatcaagagg

SEQ ID NO: 688074 - DNA, 15 bp, Homo sapiens
atgtaatcaagagga

SEQ ID NO: 688075 - DNA, 15 bp, Homo sapiens
tgtaatcaagaggat

SEQ ID NO: 688076 - DNA, 15 bp, Homo sapiens
gtaatcaagaggatt

SEQ ID NO: 688077 - DNA, 15 bp, Homo sapiens
taatcaagaggattt

SEQ ID NO: 688078 - DNA, 15 bp, Homo sapiens
aatcaagaggatttg

SEQ ID NO: 688079 - DNA, 15 bp, Homo sapiens
atcaagaggatttgc

SEQ ID NO: 688080 - DNA, 15 bp, Homo sapiens
tcaagaggatttgca

SEQ ID NO: 688081 - DNA, 15 bp, Homo sapiens
caagaggatttgcaa

SEQ ID NO: 688082 - DNA, 15 bp, Homo sapiens
aagaggatttgcaac

SEQ ID NO: 688083 - DNA, 15 bp, Homo sapiens
agaggatttgcaaca

SEQ ID NO: 688084 - DNA, 15 bp, Homo sapiens
gaggatttgcaacaa

SEQ ID NO: 688085 - DNA, 15 bp, Homo sapiens
aggatttgcaacaat

SEQ ID NO: 688086 - DNA, 15 bp, Homo sapiens
ggatttgcaacaatg

SEQ ID NO: 688087 - DNA, 15 bp, Homo sapiens
gatttgcaacaatgt

SEQ ID NO: 688088 - DNA, 15 bp, Homo sapiens
atttgcaacaatgtt

SEQ ID NO: 688089 - DNA, 15 bp, Homo sapiens
tttgcaacaatgttt

SEQ ID NO: 688090 - DNA, 15 bp, Homo sapiens
ttgcaacaatgtttg

SEQ ID NO: 688091 - DNA, 15 bp, Homo sapiens
tgcaacaatgtttga

SEQ ID NO: 688092 - DNA, 15 bp, Homo sapiens
gcaacaatgtttgaa

SEQ ID NO: 688093 - DNA, 15 bp, Homo sapiens
caacaatgtttgaaa

SEQ ID NO: 688094 - DNA, 15 bp, Homo sapiens
aacaatgtttgaaaa

SEQ ID NO: 688095 - DNA, 15 bp, Homo sapiens
acaatgtttgaaaaa

SEQ ID NO: 688096 - DNA, 15 bp, Homo sapiens
caatgtttgaaaaaa

SEQ ID NO: 688097 - DNA, 15 bp, Homo sapiens
aatgtttgaaaaaat

SEQ ID NO: 688098 - DNA, 15 bp, Homo sapiens
atgtttgaaaaaata

SEQ ID NO: 688099 - DNA, 15 bp, Homo sapiens
tgtttgaaaaaatat

SEQ ID NO: 688100 - DNA, 15 bp, Homo sapiens
gtttgaaaaaatatt

SEQ ID NO: 688101 - DNA, 15 bp, Homo sapiens
tttgaaaaaatattt

SEQ ID NO: 688102 - DNA, 15 bp, Homo sapiens
ttgaaaaaatatttt

SEQ ID NO: 688103 - DNA, 15 bp, Homo sapiens
tgaaaaaatatttta

SEQ ID NO: 688104 - DNA, 15 bp, Homo sapiens
gaaaaaatattttat

SEQ ID NO: 688105 - DNA, 15 bp, Homo sapiens
aaaaaatattttata

SEQ ID NO: 688106 - DNA, 15 bp, Homo sapiens
aaaaatattttatat

SEQ ID NO: 688107 - DNA, 15 bp, Homo sapiens
aaaatattttatatt

SEQ ID NO: 688108 - DNA, 15 bp, Homo sapiens
aaatattttatattg

SEQ ID NO: 688109 - DNA, 15 bp, Homo sapiens
aatattttatattga

SEQ ID NO: 688110 - DNA, 15 bp, Homo sapiens
atattttatattgat

SEQ ID NO: 688111 - DNA, 15 bp, Homo sapiens
tattttatattgata

SEQ ID NO: 688112 - DNA, 15 bp, Homo sapiens
attttatattgataa

SEQ ID NO: 688113 - DNA, 15 bp, Homo sapiens
ttttatattgataag

SEQ ID NO: 688114 - DNA, 15 bp, Homo sapiens
tttatattgataagc

SEQ ID NO: 688115 - DNA, 15 bp, Homo sapiens
ttatattgataagca

SEQ ID NO: 688116 - DNA, 15 bp, Homo sapiens
tatattgataagcat

SEQ ID NO: 688117 - DNA, 15 bp, Homo sapiens
atattgataagcata

SEQ ID NO: 688118 - DNA, 15 bp, Homo sapiens
tattgataagcataa

SEQ ID NO: 688119 - DNA, 15 bp, Homo sapiens
attgataagcataaa

SEQ ID NO: 688120 - DNA, 15 bp, Homo sapiens
ttgataagcataaaa

SEQ ID NO: 688121 - DNA, 15 bp, Homo sapiens
tgataagcataaaag

SEQ ID NO: 688122 - DNA, 15 bp, Homo sapiens
gataagcataaaaga

SEQ ID NO: 688123 - DNA, 15 bp, Homo sapiens
ataagcataaaagat

SEQ ID NO: 688124 - DNA, 15 bp, Homo sapiens
taagcataaaagatt

SEQ ID NO: 688125 - DNA, 15 bp, Homo sapiens
aagcataaaagatta

SEQ ID NO: 688126 - DNA, 15 bp, Homo sapiens
agcataaaagattaa

SEQ ID NO: 688127 - DNA, 15 bp, Homo sapiens
gcataaaagattaaa

SEQ ID NO: 688128 - DNA, 15 bp, Homo sapiens
cataaaagattaaaa

SEQ ID NO: 688129 - DNA, 15 bp, Homo sapiens
ataaaagattaaaag

SEQ ID NO: 688130 - DNA, 15 bp, Homo sapiens
taaaagattaaaagc

SEQ ID NO: 688131 - DNA, 15 bp, Homo sapiens
aaaagattaaaagca

SEQ ID NO: 688132 - DNA, 15 bp, Homo sapiens
aaagattaaaagcag

SEQ ID NO: 688133 - DNA, 15 bp, Homo sapiens
aagattaaaagcagg

SEQ ID NO: 688134 - DNA, 15 bp, Homo sapiens
agattaaaagcaggc

SEQ ID NO: 688135 - DNA, 15 bp, Homo sapiens
gattaaaagcaggct

SEQ ID NO: 688136 - DNA, 15 bp, Homo sapiens
attaaaagcaggctg

SEQ ID NO: 688137 - DNA, 15 bp, Homo sapiens
ttaaaagcaggctgg

SEQ ID NO: 688138 - DNA, 15 bp, Homo sapiens
taaaagcaggctggg

SEQ ID NO: 688139 - DNA, 15 bp, Homo sapiens
aaaagcaggctgggc

SEQ ID NO: 688140 - DNA, 15 bp, Homo sapiens
aaagcaggctgggcg

SEQ ID NO: 688141 - DNA, 15 bp, Homo sapiens
aagcaggctgggcgc

SEQ ID NO: 688142 - DNA, 15 bp, Homo sapiens
agcaggctgggcgcg

SEQ ID NO: 688143 - DNA, 15 bp, Homo sapiens
gcaggctgggcgcgg

SEQ ID NO: 688144 - DNA, 15 bp, Homo sapiens
caggctgggcgcggt

SEQ ID NO: 688145 - DNA, 15 bp, Homo sapiens
aggctgggcgcggtg

SEQ ID NO: 688146 - DNA, 15 bp, Homo sapiens
cgcggtggctcacgc

SEQ ID NO: 688147 - DNA, 15 bp, Homo sapiens
gcggtggctcacgcc

SEQ ID NO: 688148 - DNA, 15 bp, Homo sapiens
cggtggctcacgcct

SEQ ID NO: 688149 - DNA, 15 bp, Homo sapiens
ggtggctcacgcctg

SEQ ID NO: 688150 - DNA, 15 bp, Homo sapiens
gtggctcacgcctgt

SEQ ID NO: 688151 - DNA, 15 bp, Homo sapiens
ctcacgcctgtaatt

SEQ ID NO: 688152 - DNA, 15 bp, Homo sapiens
tcacgcctgtaattc

SEQ ID NO: 688153 - DNA, 15 bp, Homo sapiens
cacgcctgtaattct

SEQ ID NO: 688154 - DNA, 15 bp, Homo sapiens
acgcctgtaattcta

SEQ ID NO: 688155 - DNA, 15 bp, Homo sapiens
cgcctgtaattctag

SEQ ID NO: 688156 - DNA, 15 bp, Homo sapiens
gcctgtaattctagt

SEQ ID NO: 688157 - DNA, 15 bp, Homo sapiens
cctgtaattctagta

SEQ ID NO: 688158 - DNA, 15 bp, Homo sapiens
ctgtaattctagtac

SEQ ID NO: 688159 - DNA, 15 bp, Homo sapiens
tgtaattctagtact

SEQ ID NO: 688160 - DNA, 15 bp, Homo sapiens
gtaattctagtactt

SEQ ID NO: 688161 - DNA, 15 bp, Homo sapiens
taattctagtacttt

SEQ ID NO: 688162 - DNA, 15 bp, Homo sapiens
aattctagtactttg

SEQ ID NO: 688163 - DNA, 15 bp, Homo sapiens
attctagtactttgg

SEQ ID NO: 688164 - DNA, 15 bp, Homo sapiens
ttctagtactttggg

SEQ ID NO: 688165 - DNA, 15 bp, Homo sapiens
tctagtactttggga

SEQ ID NO: 688166 - DNA, 15 bp, Homo sapiens
ctagtactttgggag

SEQ ID NO: 688167 - DNA, 15 bp, Homo sapiens
tagtactttgggagg

SEQ ID NO: 688168 - DNA, 15 bp, Homo sapiens
agtactttgggaggc

SEQ ID NO: 688169 - DNA, 15 bp, Homo sapiens
gtactttgggaggcc

SEQ ID NO: 688170 - DNA, 15 bp, Homo sapiens
tactttgggaggccg

SEQ ID NO: 688171 - DNA, 15 bp, Homo sapiens
ttgggaggccgaggc

SEQ ID NO: 688172 - DNA, 15 bp, Homo sapiens
tgggaggccgaggca

SEQ ID NO: 688173 - DNA, 15 bp, Homo sapiens
gggaggccgaggcag

SEQ ID NO: 688174 - DNA, 15 bp, Homo sapiens
ggaggccgaggcagg

SEQ ID NO: 688175 - DNA, 15 bp, Homo sapiens
gaggccgaggcaggt

SEQ ID NO: 688176 - DNA, 15 bp, Homo sapiens
aggccgaggcaggtg

SEQ ID NO: 688177 - DNA, 15 bp, Homo sapiens
ggccgaggcaggtgg

SEQ ID NO: 688178 - DNA, 15 bp, Homo sapiens
gccgaggcaggtgga

SEQ ID NO: 688179 - DNA, 15 bp, Homo sapiens
ccgaggcaggtggat

SEQ ID NO: 688180 - DNA, 15 bp, Homo sapiens
cgaggcaggtggatc

SEQ ID NO: 688181 - DNA, 15 bp, Homo sapiens
gaggcaggtggatca

SEQ ID NO: 688182 - DNA, 15 bp, Homo sapiens
aggcaggtggatcac

SEQ ID NO: 688183 - DNA, 15 bp, Homo sapiens
ggcaggtggatcacc

SEQ ID NO: 688184 - DNA, 15 bp, Homo sapiens
gcaggtggatcacct

SEQ ID NO: 688185 - DNA, 15 bp, Homo sapiens
caggtggatcacctg

SEQ ID NO: 688186 - DNA, 15 bp, Homo sapiens
aggtggatcacctga

SEQ ID NO: 688187 - DNA, 15 bp, Homo sapiens
gaggtcaggagttca

SEQ ID NO: 688188 - DNA, 15 bp, Homo sapiens
aggtcaggagttcaa

SEQ ID NO: 688189 - DNA, 15 bp, Homo sapiens
ggtcaggagttcaag

SEQ ID NO: 688190 - DNA, 15 bp, Homo sapiens
gtcaggagttcaaga

SEQ ID NO: 688191 - DNA, 15 bp, Homo sapiens
tcaggagttcaagac

SEQ ID NO: 688192 - DNA, 15 bp, Homo sapiens
caggagttcaagacc

SEQ ID NO: 688193 - DNA, 15 bp, Homo sapiens
aggagttcaagacca

SEQ ID NO: 688194 - DNA, 15 bp, Homo sapiens
ggagttcaagaccag

SEQ ID NO: 688195 - DNA, 15 bp, Homo sapiens
gagttcaagaccagc

SEQ ID NO: 688196 - DNA, 15 bp, Homo sapiens
agttcaagaccagct

SEQ ID NO: 688197 - DNA, 15 bp, Homo sapiens
gttcaagaccagctt

SEQ ID NO: 688198 - DNA, 15 bp, Homo sapiens
ttcaagaccagcttg

SEQ ID NO: 688199 - DNA, 15 bp, Homo sapiens
tcaagaccagcttgg

SEQ ID NO: 688200 - DNA, 15 bp, Homo sapiens
caagaccagcttggc

SEQ ID NO: 688201 - DNA, 15 bp, Homo sapiens
aagaccagcttggcc

SEQ ID NO: 688202 - DNA, 15 bp, Homo sapiens
agaccagcttggcca

SEQ ID NO: 688203 - DNA, 15 bp, Homo sapiens
gaccagcttggccaa

SEQ ID NO: 688204 - DNA, 15 bp, Homo sapiens
accagcttggccaac

SEQ ID NO: 688205 - DNA, 15 bp, Homo sapiens
ccagcttggccaaca

SEQ ID NO: 688206 - DNA, 15 bp, Homo sapiens
cagcttggccaacat

SEQ ID NO: 688207 - DNA, 15 bp, Homo sapiens
agcttggccaacatg

SEQ ID NO: 688208 - DNA, 15 bp, Homo sapiens
gcttggccaacatgg

SEQ ID NO: 688209 - DNA, 15 bp, Homo sapiens
cttggccaacatggc

SEQ ID NO: 688210 - DNA, 15 bp, Homo sapiens
ttggccaacatggcg

SEQ ID NO: 688211 - DNA, 15 bp, Homo sapiens
tggccaacatggcga

SEQ ID NO: 688212 - DNA, 15 bp, Homo sapiens
ggccaacatggcgaa

SEQ ID NO: 688213 - DNA, 15 bp, Homo sapiens
gccaacatggcgaaa

SEQ ID NO: 688214 - DNA, 15 bp, Homo sapiens
ccaacatggcgaaac

SEQ ID NO: 688215 - DNA, 15 bp, Homo sapiens
caacatggcgaaacc

SEQ ID NO: 688216 - DNA, 15 bp, Homo sapiens
aacatggcgaaaccc

SEQ ID NO: 688217 - DNA, 15 bp, Homo sapiens
acatggcgaaacccc

SEQ ID NO: 688218 - DNA, 15 bp, Homo sapiens
catggcgaaaccccg

SEQ ID NO: 688219 - DNA, 15 bp, Homo sapiens
atggcgaaaccccgt

SEQ ID NO: 688220 - DNA, 15 bp, Homo sapiens
tggcgaaaccccgtc

SEQ ID NO: 688221 - DNA, 15 bp, Homo sapiens
ggcgaaaccccgtct

SEQ ID NO: 688222 - DNA, 15 bp, Homo sapiens
gcgaaaccccgtctc

SEQ ID NO: 688223 - DNA, 15 bp, Homo sapiens
cgaaaccccgtctct

SEQ ID NO: 688224 - DNA, 15 bp, Homo sapiens
cccgtctctactaaa

SEQ ID NO: 688225 - DNA, 15 bp, Homo sapiens
ccgtctctactaaaa

SEQ ID NO: 688226 - DNA, 15 bp, Homo sapiens
cgtctctactaaaaa

SEQ ID NO: 688227 - DNA, 15 bp, Homo sapiens
aaaattagccgggca

SEQ ID NO: 688228 - DNA, 15 bp, Homo sapiens
aaattagccgggcat

SEQ ID NO: 688229 - DNA, 15 bp, Homo sapiens
aattagccgggcatg

SEQ ID NO: 688230 - DNA, 15 bp, Homo sapiens
attagccgggcatgg

SEQ ID NO: 688231 - DNA, 15 bp, Homo sapiens
ttagccgggcatggt

SEQ ID NO: 688232 - DNA, 15 bp, Homo sapiens
tagccgggcatggta

SEQ ID NO: 688233 - DNA, 15 bp, Homo sapiens
agccgggcatggtag

SEQ ID NO: 688234 - DNA, 15 bp, Homo sapiens
gccgggcatggtagc

SEQ ID NO: 688235 - DNA, 15 bp, Homo sapiens
ccgggcatggtagca

SEQ ID NO: 688236 - DNA, 15 bp, Homo sapiens
cgggcatggtagcag

SEQ ID NO: 688237 - DNA, 15 bp, Homo sapiens
gggcatggtagcagg

SEQ ID NO: 688238 - DNA, 15 bp, Homo sapiens
ggcatggtagcaggt

SEQ ID NO: 688239 - DNA, 15 bp, Homo sapiens
gcatggtagcaggta

SEQ ID NO: 688240 - DNA, 15 bp, Homo sapiens
catggtagcaggtac

SEQ ID NO: 688241 - DNA, 15 bp, Homo sapiens
atggtagcaggtacc

SEQ ID NO: 688242 - DNA, 15 bp, Homo sapiens
tggtagcaggtacct

SEQ ID NO: 688243 - DNA, 15 bp, Homo sapiens
ggtagcaggtaccta

SEQ ID NO: 688244 - DNA, 15 bp, Homo sapiens
gtagcaggtacctat

SEQ ID NO: 688245 - DNA, 15 bp, Homo sapiens
tagcaggtacctata

SEQ ID NO: 688246 - DNA, 15 bp, Homo sapiens
agcaggtacctataa

SEQ ID NO: 688247 - DNA, 15 bp, Homo sapiens
gcaggtacctataat

SEQ ID NO: 688248 - DNA, 15 bp, Homo sapiens
caggtacctataatc

SEQ ID NO: 688249 - DNA, 15 bp, Homo sapiens
aggtacctataatcc

SEQ ID NO: 688250 - DNA, 15 bp, Homo sapiens
ggtacctataatccc

SEQ ID NO: 688251 - DNA, 15 bp, Homo sapiens
gtacctataatccca

SEQ ID NO: 688252 - DNA, 15 bp, Homo sapiens
tacctataatcccag

SEQ ID NO: 688253 - DNA, 15 bp, Homo sapiens
acctataatcccagc

SEQ ID NO: 688254 - DNA, 15 bp, Homo sapiens
cctataatcccagct

SEQ ID NO: 688255 - DNA, 15 bp, Homo sapiens
ctataatcccagcta

SEQ ID NO: 688256 - DNA, 15 bp, Homo sapiens
tataatcccagctac

SEQ ID NO: 688257 - DNA, 15 bp, Homo sapiens
ataatcccagctact

SEQ ID NO: 688258 - DNA, 15 bp, Homo sapiens
aatcccagctactcg

SEQ ID NO: 688259 - DNA, 15 bp, Homo sapiens
atcccagctactcgg

SEQ ID NO: 688260 - DNA, 15 bp, Homo sapiens
tcccagctactcggg

SEQ ID NO: 688261 - DNA, 15 bp, Homo sapiens
cccagctactcggga

SEQ ID NO: 688262 - DNA, 15 bp, Homo sapiens
ccagctactcgggag

SEQ ID NO: 688263 - DNA, 15 bp, Homo sapiens
cagctactcgggagg

SEQ ID NO: 688264 - DNA, 15 bp, Homo sapiens
agctactcgggaggc

SEQ ID NO: 688265 - DNA, 15 bp, Homo sapiens
gctactcgggaggct

SEQ ID NO: 688266 - DNA, 15 bp, Homo sapiens
ctactcgggaggctg

SEQ ID NO: 688267 - DNA, 15 bp, Homo sapiens
tactcgggaggctga

SEQ ID NO: 688268 - DNA, 15 bp, Homo sapiens
actcgggaggctgag

SEQ ID NO: 688269 - DNA, 15 bp, Homo sapiens
ctcgggaggctgagg

SEQ ID NO: 688270 - DNA, 15 bp, Homo sapiens
tcgggaggctgaggc

SEQ ID NO: 688271 - DNA, 15 bp, Homo sapiens
cgggaggctgaggca

SEQ ID NO: 688272 - DNA, 15 bp, Homo sapiens
aggctgaggcaggaa

SEQ ID NO: 688273 - DNA, 15 bp, Homo sapiens
ggctgaggcaggaaa

SEQ ID NO: 688274 - DNA, 15 bp, Homo sapiens
gctgaggcaggaaag

SEQ ID NO: 688275 - DNA, 15 bp, Homo sapiens
ctgaggcaggaaagt

SEQ ID NO: 688276 - DNA, 15 bp, Homo sapiens
tgaggcaggaaagtt

SEQ ID NO: 688277 - DNA, 15 bp, Homo sapiens
gaggcaggaaagttg

SEQ ID NO: 688278 - DNA, 15 bp, Homo sapiens
aggcaggaaagttgc

SEQ ID NO: 688279 - DNA, 15 bp, Homo sapiens
ggcaggaaagttgct

SEQ ID NO: 688280 - DNA, 15 bp, Homo sapiens
gcaggaaagttgctt

SEQ ID NO: 688281 - DNA, 15 bp, Homo sapiens
caggaaagttgcttg

SEQ ID NO: 688282 - DNA, 15 bp, Homo sapiens
aggaaagttgcttga

SEQ ID NO: 688283 - DNA, 15 bp, Homo sapiens
ggaaagttgcttgaa

SEQ ID NO: 688284 - DNA, 15 bp, Homo sapiens
gaaagttgcttgaac

SEQ ID NO: 688285 - DNA, 15 bp, Homo sapiens
aaagttgcttgaacc

SEQ ID NO: 688286 - DNA, 15 bp, Homo sapiens
aagttgcttgaaccc

SEQ ID NO: 688287 - DNA, 15 bp, Homo sapiens
agttgcttgaacccc

SEQ ID NO: 688288 - DNA, 15 bp, Homo sapiens
gttgcttgaaccccg

SEQ ID NO: 688289 - DNA, 15 bp, Homo sapiens
ttgcttgaaccccgg

SEQ ID NO: 688290 - DNA, 15 bp, Homo sapiens
tgcttgaaccccggg

SEQ ID NO: 688291 - DNA, 15 bp, Homo sapiens
gcttgaaccccgggg

SEQ ID NO: 688292 - DNA, 15 bp, Homo sapiens
cttgaaccccggggg

SEQ ID NO: 688293 - DNA, 15 bp, Homo sapiens
ttgaaccccgggggc

SEQ ID NO: 688294 - DNA, 15 bp, Homo sapiens
tgaaccccgggggca

SEQ ID NO: 688295 - DNA, 15 bp, Homo sapiens
gaaccccgggggcag

SEQ ID NO: 688296 - DNA, 15 bp, Homo sapiens
aaccccgggggcaga

SEQ ID NO: 688297 - DNA, 15 bp, Homo sapiens
accccgggggcagag

SEQ ID NO: 688298 - DNA, 15 bp, Homo sapiens
ccccgggggcagagg

SEQ ID NO: 688299 - DNA, 15 bp, Homo sapiens
cccgggggcagaggt

SEQ ID NO: 688300 - DNA, 15 bp, Homo sapiens
ccgggggcagaggtg

SEQ ID NO: 688301 - DNA, 15 bp, Homo sapiens
cgggggcagaggtgg

SEQ ID NO: 688302 - DNA, 15 bp, Homo sapiens
gggggcagaggtggc

SEQ ID NO: 688303 - DNA, 15 bp, Homo sapiens
ggggcagaggtggca

SEQ ID NO: 688304 - DNA, 15 bp, Homo sapiens
gggcagaggtggcag

SEQ ID NO: 688305 - DNA, 15 bp, Homo sapiens
ggcagaggtggcagt

SEQ ID NO: 688306 - DNA, 15 bp, Homo sapiens
gcagaggtggcagtg

SEQ ID NO: 688307 - DNA, 15 bp, Homo sapiens
cagaggtggcagtga

SEQ ID NO: 688308 - DNA, 15 bp, Homo sapiens
agaggtggcagtgag

SEQ ID NO: 688309 - DNA, 15 bp, Homo sapiens
gaggtggcagtgagc

SEQ ID NO: 688310 - DNA, 15 bp, Homo sapiens
aggtggcagtgagcc

SEQ ID NO: 688311 - DNA, 15 bp, Homo sapiens
ggtggcagtgagccg

SEQ ID NO: 688312 - DNA, 15 bp, Homo sapiens
gtggcagtgagccga

SEQ ID NO: 688313 - DNA, 15 bp, Homo sapiens
tggcagtgagccgag

SEQ ID NO: 688314 - DNA, 15 bp, Homo sapiens
ggcagtgagccgaga

SEQ ID NO: 688315 - DNA, 15 bp, Homo sapiens
gcagtgagccgagat

SEQ ID NO: 688316 - DNA, 15 bp, Homo sapiens
cagtgagccgagatt

SEQ ID NO: 688317 - DNA, 15 bp, Homo sapiens
agtgagccgagattg

SEQ ID NO: 688318 - DNA, 15 bp, Homo sapiens
gtgagccgagattgt

SEQ ID NO: 688319 - DNA, 15 bp, Homo sapiens
tgagccgagattgtg

SEQ ID NO: 688320 - DNA, 15 bp, Homo sapiens
gagccgagattgtgc

SEQ ID NO: 688321 - DNA, 15 bp, Homo sapiens
agccgagattgtgcc

SEQ ID NO: 688322 - DNA, 15 bp, Homo sapiens
gccgagattgtgcca

SEQ ID NO: 688323 - DNA, 15 bp, Homo sapiens
ccgagattgtgccac

SEQ ID NO: 688324 - DNA, 15 bp, Homo sapiens
cgagattgtgccact

SEQ ID NO: 688325 - DNA, 15 bp, Homo sapiens
gagattgtgccactg

SEQ ID NO: 688326 - DNA, 15 bp, Homo sapiens
agattgtgccactgc

SEQ ID NO: 688327 - DNA, 15 bp, Homo sapiens
gattgtgccactgca

SEQ ID NO: 688328 - DNA, 15 bp, Homo sapiens
attgtgccactgcac

SEQ ID NO: 688329 - DNA, 15 bp, Homo sapiens
ttgtgccactgcact

SEQ ID NO: 688330 - DNA, 15 bp, Homo sapiens
tgtgccactgcactc

SEQ ID NO: 688331 - DNA, 15 bp, Homo sapiens
actccagcctgggcg

SEQ ID NO: 688332 - DNA, 15 bp, Homo sapiens
ctccagcctgggcga

SEQ ID NO: 688333 - DNA, 15 bp, Homo sapiens
tccagcctgggcgaa

SEQ ID NO: 688334 - DNA, 15 bp, Homo sapiens
ccagcctgggcgaaa

SEQ ID NO: 688335 - DNA, 15 bp, Homo sapiens
cagcctgggcgaaag

SEQ ID NO: 688336 - DNA, 15 bp, Homo sapiens
agcctgggcgaaaga

SEQ ID NO: 688337 - DNA, 15 bp, Homo sapiens
gcctgggcgaaagag

SEQ ID NO: 688338 - DNA, 15 bp, Homo sapiens
cctgggcgaaagagc

SEQ ID NO: 688339 - DNA, 15 bp, Homo sapiens
ctgggcgaaagagcg

SEQ ID NO: 688340 - DNA, 15 bp, Homo sapiens
tgggcgaaagagcga

SEQ ID NO: 688341 - DNA, 15 bp, Homo sapiens
gggcgaaagagcgaa

SEQ ID NO: 688342 - DNA, 15 bp, Homo sapiens
ggcgaaagagcgaaa

SEQ ID NO: 688343 - DNA, 15 bp, Homo sapiens
gcgaaagagcgaaac

SEQ ID NO: 688344 - DNA, 15 bp, Homo sapiens
cgaaagagcgaaact

SEQ ID NO: 688345 - DNA, 15 bp, Homo sapiens
gaaagagcgaaactc

SEQ ID NO: 688346 - DNA, 15 bp, Homo sapiens
aaagagcgaaactcc

SEQ ID NO: 688347 - DNA, 15 bp, Homo sapiens
aagagcgaaactcca

SEQ ID NO: 688348 - DNA, 15 bp, Homo sapiens
agagcgaaactccat

SEQ ID NO: 688349 - DNA, 15 bp, Homo sapiens
gagcgaaactccatc

SEQ ID NO: 688350 - DNA, 15 bp, Homo sapiens
agcgaaactccatct

SEQ ID NO: 688351 - DNA, 15 bp, Homo sapiens
gcgaaactccatctc

SEQ ID NO: 688352 - DNA, 15 bp, Homo sapiens
cgaaactccatctca

SEQ ID NO: 688353 - DNA, 15 bp, Homo sapiens
gaaactccatctcaa

SEQ ID NO: 688354 - DNA, 15 bp, Homo sapiens
aaactccatctcaaa

SEQ ID NO: 688355 - DNA, 15 bp, Homo sapiens
aactccatctcaaaa

SEQ ID NO: 688356 - DNA, 15 bp, Homo sapiens
aaaaaaaaaaaagat

SEQ ID NO: 688357 - DNA, 15 bp, Homo sapiens
aaaaaaaaaaagatt

SEQ ID NO: 688358 - DNA, 15 bp, Homo sapiens
aaaaaaaaaagatta

SEQ ID NO: 688359 - DNA, 15 bp, Homo sapiens
aaaaaaaaagattaa

SEQ ID NO: 688360 - DNA, 15 bp, Homo sapiens
aaaaaaaagattaaa

SEQ ID NO: 688361 - DNA, 15 bp, Homo sapiens
aaaaaaagattaaaa

SEQ ID NO: 688362 - DNA, 15 bp, Homo sapiens
aaaaaagattaaaag

SEQ ID NO: 688363 - DNA, 15 bp, Homo sapiens
aaaaagattaaaagt

SEQ ID NO: 688364 - DNA, 15 bp, Homo sapiens
aaaagattaaaagta

SEQ ID NO: 688365 - DNA, 15 bp, Homo sapiens
aaagattaaaagtaa

SEQ ID NO: 688366 - DNA, 15 bp, Homo sapiens
aagattaaaagtaaa

SEQ ID NO: 688367 - DNA, 15 bp, Homo sapiens
agattaaaagtaaag

SEQ ID NO: 688368 - DNA, 15 bp, Homo sapiens
gattaaaagtaaagc

SEQ ID NO: 688369 - DNA, 15 bp, Homo sapiens
attaaaagtaaagca

SEQ ID NO: 688370 - DNA, 15 bp, Homo sapiens
ttaaaagtaaagcat

SEQ ID NO: 688371 - DNA, 15 bp, Homo sapiens
taaaagtaaagcata

SEQ ID NO: 688372 - DNA, 15 bp, Homo sapiens
aaaagtaaagcatat

SEQ ID NO: 688373 - DNA, 15 bp, Homo sapiens
aaagtaaagcatata

SEQ ID NO: 688374 - DNA, 15 bp, Homo sapiens
aagtaaagcatatat

SEQ ID NO: 688375 - DNA, 15 bp, Homo sapiens
agtaaagcatatatg

SEQ ID NO: 688376 - DNA, 15 bp, Homo sapiens
gtaaagcatatatgg

SEQ ID NO: 688377 - DNA, 15 bp, Homo sapiens
taaagcatatatggg

SEQ ID NO: 688378 - DNA, 15 bp, Homo sapiens
aaagcatatatggga

SEQ ID NO: 688379 - DNA, 15 bp, Homo sapiens
aagcatatatgggat

SEQ ID NO: 688380 - DNA, 15 bp, Homo sapiens
agcatatatgggatg

SEQ ID NO: 688381 - DNA, 15 bp, Homo sapiens
gcatatatgggatgt

SEQ ID NO: 688382 - DNA, 15 bp, Homo sapiens
catatatgggatgtt

SEQ ID NO: 688383 - DNA, 15 bp, Homo sapiens
atatatgggatgttt

SEQ ID NO: 688384 - DNA, 15 bp, Homo sapiens
tatatgggatgtttg

SEQ ID NO: 688385 - DNA, 15 bp, Homo sapiens
atatgggatgtttgg

SEQ ID NO: 688386 - DNA, 15 bp, Homo sapiens
tatgggatgtttgga

SEQ ID NO: 688387 - DNA, 15 bp, Homo sapiens
atgggatgtttggaa

SEQ ID NO: 688388 - DNA, 15 bp, Homo sapiens
tgggatgtttggaaa

SEQ ID NO: 688389 - DNA, 15 bp, Homo sapiens
gggatgtttggaaaa

SEQ ID NO: 688390 - DNA, 15 bp, Homo sapiens
ggatgtttggaaaat

SEQ ID NO: 688391 - DNA, 15 bp, Homo sapiens
gatgtttggaaaatc

SEQ ID NO: 688392 - DNA, 15 bp, Homo sapiens
atgtttggaaaatct

SEQ ID NO: 688393 - DNA, 15 bp, Homo sapiens
tgtttggaaaatctt

SEQ ID NO: 688394 - DNA, 15 bp, Homo sapiens
gtttggaaaatcttg

SEQ ID NO: 688395 - DNA, 15 bp, Homo sapiens
tttggaaaatcttgg

SEQ ID NO: 688396 - DNA, 15 bp, Homo sapiens
ttggaaaatcttggc

SEQ ID NO: 688397 - DNA, 15 bp, Homo sapiens
tggaaaatcttggca

SEQ ID NO: 688398 - DNA, 15 bp, Homo sapiens
ggaaaatcttggcag

SEQ ID NO: 688399 - DNA, 15 bp, Homo sapiens
gaaaatcttggcagt

SEQ ID NO: 688400 - DNA, 15 bp, Homo sapiens
aaaatcttggcagtt

SEQ ID NO: 688401 - DNA, 15 bp, Homo sapiens
aaatcttggcagtta

SEQ ID NO: 688402 - DNA, 15 bp, Homo sapiens
aatcttggcagttaa

SEQ ID NO: 688403 - DNA, 15 bp, Homo sapiens
atcttggcagttaaa

SEQ ID NO: 688404 - DNA, 15 bp, Homo sapiens
tcttggcagttaaac

SEQ ID NO: 688405 - DNA, 15 bp, Homo sapiens
cttggcagttaaaca

SEQ ID NO: 688406 - DNA, 15 bp, Homo sapiens
ttggcagttaaacag

SEQ ID NO: 688407 - DNA, 15 bp, Homo sapiens
tggcagttaaacagt

SEQ ID NO: 688408 - DNA, 15 bp, Homo sapiens
ggcagttaaacagtt

SEQ ID NO: 688409 - DNA, 15 bp, Homo sapiens
gcagttaaacagtta

SEQ ID NO: 688410 - DNA, 15 bp, Homo sapiens
cagttaaacagttat

SEQ ID NO: 688411 - DNA, 15 bp, Homo sapiens
agttaaacagttatt

SEQ ID NO: 688412 - DNA, 15 bp, Homo sapiens
gttaaacagttatta

SEQ ID NO: 688413 - DNA, 15 bp, Homo sapiens
ttaaacagttattat

SEQ ID NO: 688414 - DNA, 15 bp, Homo sapiens
taaacagttattata

SEQ ID NO: 688415 - DNA, 15 bp, Homo sapiens
aaacagttattataa

SEQ ID NO: 688416 - DNA, 15 bp, Homo sapiens
aacagttattataat

SEQ ID NO: 688417 - DNA, 15 bp, Homo sapiens
acagttattataata

SEQ ID NO: 688418 - DNA, 15 bp, Homo sapiens
cagttattataatac

SEQ ID NO: 688419 - DNA, 15 bp, Homo sapiens
agttattataatacc

SEQ ID NO: 688420 - DNA, 15 bp, Homo sapiens
gttattataatacct

SEQ ID NO: 688421 - DNA, 15 bp, Homo sapiens
ttattataataccta

SEQ ID NO: 688422 - DNA, 15 bp, Homo sapiens
tattataatacctat

SEQ ID NO: 688423 - DNA, 15 bp, Homo sapiens
attataatacctatt

SEQ ID NO: 688424 - DNA, 15 bp, Homo sapiens
ttataatacctattt

SEQ ID NO: 688425 - DNA, 15 bp, Homo sapiens
tataatacctatttt

SEQ ID NO: 688426 - DNA, 15 bp, Homo sapiens
ataatacctattttt

SEQ ID NO: 688427 - DNA, 15 bp, Homo sapiens
taatacctattttta

SEQ ID NO: 688428 - DNA, 15 bp, Homo sapiens
aatacctatttttat

SEQ ID NO: 688429 - DNA, 15 bp, Homo sapiens
atacctatttttatc

SEQ ID NO: 688430 - DNA, 15 bp, Homo sapiens
tacctatttttatct

SEQ ID NO: 688431 - DNA, 15 bp, Homo sapiens
acctatttttatctt

SEQ ID NO: 688432 - DNA, 15 bp, Homo sapiens
cctatttttatctta

SEQ ID NO: 688433 - DNA, 15 bp, Homo sapiens
ctatttttatcttag

SEQ ID NO: 688434 - DNA, 15 bp, Homo sapiens
tatttttatcttagg

SEQ ID NO: 688435 - DNA, 15 bp, Homo sapiens
atttttatcttaggt

SEQ ID NO: 688436 - DNA, 15 bp, Homo sapiens
tttttatcttaggta

SEQ ID NO: 688437 - DNA, 15 bp, Homo sapiens
ttttatcttaggtac

SEQ ID NO: 688438 - DNA, 15 bp, Homo sapiens
tttatcttaggtact

SEQ ID NO: 688439 - DNA, 15 bp, Homo sapiens
ttatcttaggtactg

SEQ ID NO: 688440 - DNA, 15 bp, Homo sapiens
tatcttaggtactgt

SEQ ID NO: 688441 - DNA, 15 bp, Homo sapiens
atcttaggtactgtt

SEQ ID NO: 688442 - DNA, 15 bp, Homo sapiens
tcttaggtactgttt

SEQ ID NO: 688443 - DNA, 15 bp, Homo sapiens
cttaggtactgtttt

SEQ ID NO: 688444 - DNA, 15 bp, Homo sapiens
ttaggtactgttttg

SEQ ID NO: 688445 - DNA, 15 bp, Homo sapiens
taggtactgttttgt

SEQ ID NO: 688446 - DNA, 15 bp, Homo sapiens
aggtactgttttgta

SEQ ID NO: 688447 - DNA, 15 bp, Homo sapiens
ggtactgttttgtag

SEQ ID NO: 688448 - DNA, 15 bp, Homo sapiens
gtactgttttgtagc

SEQ ID NO: 688449 - DNA, 15 bp, Homo sapiens
tactgttttgtagca

SEQ ID NO: 688450 - DNA, 15 bp, Homo sapiens
actgttttgtagcat

SEQ ID NO: 688451 - DNA, 15 bp, Homo sapiens
ctgttttgtagcatt

SEQ ID NO: 688452 - DNA, 15 bp, Homo sapiens
tgttttgtagcattg

SEQ ID NO: 688453 - DNA, 15 bp, Homo sapiens
gttttgtagcattgg

SEQ ID NO: 688454 - DNA, 15 bp, Homo sapiens
ttttgtagcattggc

SEQ ID NO: 688455 - DNA, 15 bp, Homo sapiens
tttgtagcattggct

SEQ ID NO: 688456 - DNA, 15 bp, Homo sapiens
ttgtagcattggcta

SEQ ID NO: 688457 - DNA, 15 bp, Homo sapiens
tgtagcattggctat

SEQ ID NO: 688458 - DNA, 15 bp, Homo sapiens
gtagcattggctatc

SEQ ID NO: 688459 - DNA, 15 bp, Homo sapiens
tagcattggctatct

SEQ ID NO: 688460 - DNA, 15 bp, Homo sapiens
agcattggctatctt

SEQ ID NO: 688461 - DNA, 15 bp, Homo sapiens
gcattggctatcttt

SEQ ID NO: 688462 - DNA, 15 bp, Homo sapiens
cattggctatctttg

SEQ ID NO: 688463 - DNA, 15 bp, Homo sapiens
attggctatctttgt

SEQ ID NO: 688464 - DNA, 15 bp, Homo sapiens
ttggctatctttgtc

SEQ ID NO: 688465 - DNA, 15 bp, Homo sapiens
tggctatctttgtct

SEQ ID NO: 688466 - DNA, 15 bp, Homo sapiens
ggctatctttgtcta

SEQ ID NO: 688467 - DNA, 15 bp, Homo sapiens
gctatctttgtctac

SEQ ID NO: 688468 - DNA, 15 bp, Homo sapiens
ctatctttgtctaca

SEQ ID NO: 688469 - DNA, 15 bp, Homo sapiens
tatctttgtctacat

SEQ ID NO: 688470 - DNA, 15 bp, Homo sapiens
atctttgtctacata

SEQ ID NO: 688471 - DNA, 15 bp, Homo sapiens
tctttgtctacataa

SEQ ID NO: 688472 - DNA, 15 bp, Homo sapiens
ctttgtctacataaa

SEQ ID NO: 688473 - DNA, 15 bp, Homo sapiens
tttgtctacataaaa

SEQ ID NO: 688474 - DNA, 15 bp, Homo sapiens
ttgtctacataaaat

SEQ ID NO: 688475 - DNA, 15 bp, Homo sapiens
tgtctacataaaatt

SEQ ID NO: 688476 - DNA, 15 bp, Homo sapiens
gtctacataaaattc

SEQ ID NO: 688477 - DNA, 15 bp, Homo sapiens
tctacataaaattct

SEQ ID NO: 688478 - DNA, 15 bp, Homo sapiens
ctacataaaattcta

SEQ ID NO: 688479 - DNA, 15 bp, Homo sapiens
tacataaaattctaa

SEQ ID NO: 688480 - DNA, 15 bp, Homo sapiens
acataaaattctaat

SEQ ID NO: 688481 - DNA, 15 bp, Homo sapiens
cataaaattctaata

SEQ ID NO: 688482 - DNA, 15 bp, Homo sapiens
ataaaattctaataa

SEQ ID NO: 688483 - DNA, 15 bp, Homo sapiens
taaaattctaataaa

SEQ ID NO: 688484 - DNA, 15 bp, Homo sapiens
aaaattctaataaat

SEQ ID NO: 688485 - DNA, 15 bp, Homo sapiens
aaattctaataaata

SEQ ID NO: 688486 - DNA, 15 bp, Homo sapiens
aattctaataaatat

SEQ ID NO: 688487 - DNA, 15 bp, Homo sapiens
attctaataaatatt

SEQ ID NO: 688488 - DNA, 15 bp, Homo sapiens
ttctaataaatattt

SEQ ID NO: 688489 - DNA, 15 bp, Homo sapiens
tctaataaatatttt

SEQ ID NO: 688490 - DNA, 15 bp, Homo sapiens
ctaataaatattttc

SEQ ID NO: 688491 - DNA, 15 bp, Homo sapiens
taataaatattttct

SEQ ID NO: 688492 - DNA, 15 bp, Homo sapiens
aataaatattttcta

SEQ ID NO: 688493 - DNA, 15 bp, Homo sapiens
ataaatattttctat

SEQ ID NO: 688494 - DNA, 15 bp, Homo sapiens
taaatattttctatg

SEQ ID NO: 688495 - DNA, 15 bp, Homo sapiens
aaatattttctatgc

SEQ ID NO: 688496 - DNA, 15 bp, Homo sapiens
aatattttctatgca

SEQ ID NO: 688497 - DNA, 15 bp, Homo sapiens
atattttctatgcac

SEQ ID NO: 688498 - DNA, 15 bp, Homo sapiens
tattttctatgcacg

SEQ ID NO: 688499 - DNA, 15 bp, Homo sapiens
attttctatgcacga

SEQ ID NO: 688500 - DNA, 15 bp, Homo sapiens
ttttctatgcacgaa

SEQ ID NO: 688501 - DNA, 15 bp, Homo sapiens
tttctatgcacgaaa

SEQ ID NO: 688502 - DNA, 15 bp, Homo sapiens
ttctatgcacgaaat

SEQ ID NO: 688503 - DNA, 15 bp, Homo sapiens
tctatgcacgaaata

SEQ ID NO: 688504 - DNA, 15 bp, Homo sapiens
ctatgcacgaaatag

SEQ ID NO: 688505 - DNA, 15 bp, Homo sapiens
tatgcacgaaataga

SEQ ID NO: 688506 - DNA, 15 bp, Homo sapiens
atgcacgaaatagac

SEQ ID NO: 688507 - DNA, 15 bp, Homo sapiens
tgcacgaaatagacc

SEQ ID NO: 688508 - DNA, 15 bp, Homo sapiens
gcacgaaatagacct

SEQ ID NO: 688509 - DNA, 15 bp, Homo sapiens
cacgaaatagaccta

SEQ ID NO: 688510 - DNA, 15 bp, Homo sapiens
acgaaatagacctaa

SEQ ID NO: 688511 - DNA, 15 bp, Homo sapiens
cgaaatagacctaaa

SEQ ID NO: 688512 - DNA, 15 bp, Homo sapiens
gaaatagacctaaaa

SEQ ID NO: 688513 - DNA, 15 bp, Homo sapiens
aaatagacctaaaat

SEQ ID NO: 688514 - DNA, 15 bp, Homo sapiens
aatagacctaaaatc

SEQ ID NO: 688515 - DNA, 15 bp, Homo sapiens
atagacctaaaatca

SEQ ID NO: 688516 - DNA, 15 bp, Homo sapiens
tagacctaaaatcaa

SEQ ID NO: 688517 - DNA, 15 bp, Homo sapiens
agacctaaaatcaaa

SEQ ID NO: 688518 - DNA, 15 bp, Homo sapiens
gacctaaaatcaaag

SEQ ID NO: 688519 - DNA, 15 bp, Homo sapiens
acctaaaatcaaagt

SEQ ID NO: 688520 - DNA, 15 bp, Homo sapiens
cctaaaatcaaagtt

SEQ ID NO: 688521 - DNA, 15 bp, Homo sapiens
ctaaaatcaaagttg

SEQ ID NO: 688522 - DNA, 15 bp, Homo sapiens
taaaatcaaagttga

SEQ ID NO: 688523 - DNA, 15 bp, Homo sapiens
aaaatcaaagttgaa

SEQ ID NO: 688524 - DNA, 15 bp, Homo sapiens
aaatcaaagttgaac

SEQ ID NO: 688525 - DNA, 15 bp, Homo sapiens
aatcaaagttgaaca

SEQ ID NO: 688526 - DNA, 15 bp, Homo sapiens
atcaaagttgaacaa

SEQ ID NO: 688527 - DNA, 15 bp, Homo sapiens
tcaaagttgaacaaa

SEQ ID NO: 688528 - DNA, 15 bp, Homo sapiens
caaagttgaacaaat

SEQ ID NO: 688529 - DNA, 15 bp, Homo sapiens
aaagttgaacaaatg

SEQ ID NO: 688530 - DNA, 15 bp, Homo sapiens
aagttgaacaaatgt

SEQ ID NO: 688531 - DNA, 15 bp, Homo sapiens
agttgaacaaatgtt

SEQ ID NO: 688532 - DNA, 15 bp, Homo sapiens
gttgaacaaatgttg

SEQ ID NO: 688533 - DNA, 15 bp, Homo sapiens
ttgaacaaatgttgc

SEQ ID NO: 688534 - DNA, 15 bp, Homo sapiens
tgaacaaatgttgca

SEQ ID NO: 688535 - DNA, 15 bp, Homo sapiens
gaacaaatgttgcaa

SEQ ID NO: 688536 - DNA, 15 bp, Homo sapiens
aacaaatgttgcaat

SEQ ID NO: 688537 - DNA, 15 bp, Homo sapiens
acaaatgttgcaatt

SEQ ID NO: 688538 - DNA, 15 bp, Homo sapiens
caaatgttgcaattt

SEQ ID NO: 688539 - DNA, 15 bp, Homo sapiens
aaatgttgcaatttt

SEQ ID NO: 688540 - DNA, 15 bp, Homo sapiens
aatgttgcaattttc

SEQ ID NO: 688541 - DNA, 15 bp, Homo sapiens
atgttgcaattttct

SEQ ID NO: 688542 - DNA, 15 bp, Homo sapiens
tgttgcaattttctg

SEQ ID NO: 688543 - DNA, 15 bp, Homo sapiens
gttgcaattttctgt

SEQ ID NO: 688544 - DNA, 15 bp, Homo sapiens
ttgcaattttctgta

SEQ ID NO: 688545 - DNA, 15 bp, Homo sapiens
tgcaattttctgtac

SEQ ID NO: 688546 - DNA, 15 bp, Homo sapiens
gcaattttctgtacc

SEQ ID NO: 688547 - DNA, 15 bp, Homo sapiens
caattttctgtacct

SEQ ID NO: 688548 - DNA, 15 bp, Homo sapiens
aattttctgtacctc

SEQ ID NO: 688549 - DNA, 15 bp, Homo sapiens
attttctgtacctca

SEQ ID NO: 688550 - DNA, 15 bp, Homo sapiens
ttttctgtacctcac

SEQ ID NO: 688551 - DNA, 15 bp, Homo sapiens
tttctgtacctcact

SEQ ID NO: 688552 - DNA, 15 bp, Homo sapiens
ttctgtacctcactt

SEQ ID NO: 688553 - DNA, 15 bp, Homo sapiens
tctgtacctcacttt

SEQ ID NO: 688554 - DNA, 15 bp, Homo sapiens
ctgtacctcactttt

SEQ ID NO: 688555 - DNA, 15 bp, Homo sapiens
tgtacctcactttta

SEQ ID NO: 688556 - DNA, 15 bp, Homo sapiens
gtacctcacttttag

SEQ ID NO: 688557 - DNA, 15 bp, Homo sapiens
tacctcacttttaga

SEQ ID NO: 688558 - DNA, 15 bp, Homo sapiens
acctcacttttagat

SEQ ID NO: 688559 - DNA, 15 bp, Homo sapiens
cctcacttttagata

SEQ ID NO: 688560 - DNA, 15 bp, Homo sapiens
ctcacttttagatag

SEQ ID NO: 688561 - DNA, 15 bp, Homo sapiens
tcacttttagataga

SEQ ID NO: 688562 - DNA, 15 bp, Homo sapiens
cacttttagatagac

SEQ ID NO: 688563 - DNA, 15 bp, Homo sapiens
acttttagatagacc

SEQ ID NO: 688564 - DNA, 15 bp, Homo sapiens
cttttagatagacct

SEQ ID NO: 688565 - DNA, 15 bp, Homo sapiens
ttttagatagacctt

SEQ ID NO: 688566 - DNA, 15 bp, Homo sapiens
tttagatagacctta

SEQ ID NO: 688567 - DNA, 15 bp, Homo sapiens
ttagatagaccttat

SEQ ID NO: 688568 - DNA, 15 bp, Homo sapiens
tagatagaccttatt

SEQ ID NO: 688569 - DNA, 15 bp, Homo sapiens
agatagaccttattt

SEQ ID NO: 688570 - DNA, 15 bp, Homo sapiens
gatagaccttattta

SEQ ID NO: 688571 - DNA, 15 bp, Homo sapiens
atagaccttatttat

SEQ ID NO: 688572 - DNA, 15 bp, Homo sapiens
tagaccttatttata

SEQ ID NO: 688573 - DNA, 15 bp, Homo sapiens
agaccttatttatat

SEQ ID NO: 688574 - DNA, 15 bp, Homo sapiens
gaccttatttatatt

SEQ ID NO: 688575 - DNA, 15 bp, Homo sapiens
accttatttatattg

SEQ ID NO: 688576 - DNA, 15 bp, Homo sapiens
ccttatttatattgc

SEQ ID NO: 688577 - DNA, 15 bp, Homo sapiens
cttatttatattgca

SEQ ID NO: 688578 - DNA, 15 bp, Homo sapiens
ttatttatattgcat

SEQ ID NO: 688579 - DNA, 15 bp, Homo sapiens
tatttatattgcatg

SEQ ID NO: 688580 - DNA, 15 bp, Homo sapiens
atttatattgcatgc

SEQ ID NO: 688581 - DNA, 15 bp, Homo sapiens
tttatattgcatgcg

SEQ ID NO: 688582 - DNA, 15 bp, Homo sapiens
ttatattgcatgcga

SEQ ID NO: 688583 - DNA, 15 bp, Homo sapiens
tatattgcatgcgaa

SEQ ID NO: 688584 - DNA, 15 bp, Homo sapiens
atattgcatgcgaac

SEQ ID NO: 688585 - DNA, 15 bp, Homo sapiens
tattgcatgcgaact

SEQ ID NO: 688586 - DNA, 15 bp, Homo sapiens
attgcatgcgaactc

SEQ ID NO: 688587 - DNA, 15 bp, Homo sapiens
ttgcatgcgaactca

SEQ ID NO: 688588 - DNA, 15 bp, Homo sapiens
tgcatgcgaactcag

SEQ ID NO: 688589 - DNA, 15 bp, Homo sapiens
gcatgcgaactcagt

SEQ ID NO: 688590 - DNA, 15 bp, Homo sapiens
catgcgaactcagtg

SEQ ID NO: 688591 - DNA, 15 bp, Homo sapiens
atgcgaactcagtgt

SEQ ID NO: 688592 - DNA, 15 bp, Homo sapiens
tgcgaactcagtgta

SEQ ID NO: 688593 - DNA, 15 bp, Homo sapiens
gcgaactcagtgtat

SEQ ID NO: 688594 - DNA, 15 bp, Homo sapiens
cgaactcagtgtata

SEQ ID NO: 688595 - DNA, 15 bp, Homo sapiens
gaactcagtgtatat

SEQ ID NO: 688596 - DNA, 15 bp, Homo sapiens
aactcagtgtatatt

SEQ ID NO: 688597 - DNA, 15 bp, Homo sapiens
actcagtgtatatta

SEQ ID NO: 688598 - DNA, 15 bp, Homo sapiens
ctcagtgtatattac

SEQ ID NO: 688599 - DNA, 15 bp, Homo sapiens
tcagtgtatattaca

SEQ ID NO: 688600 - DNA, 15 bp, Homo sapiens
cagtgtatattacaa

SEQ ID NO: 688601 - DNA, 15 bp, Homo sapiens
agtgtatattacaaa

SEQ ID NO: 688602 - DNA, 15 bp, Homo sapiens
gtgtatattacaaaa

SEQ ID NO: 688603 - DNA, 15 bp, Homo sapiens
tgtatattacaaaat

SEQ ID NO: 688604 - DNA, 15 bp, Homo sapiens
gtatattacaaaatt

SEQ ID NO: 688605 - DNA, 15 bp, Homo sapiens
tatattacaaaatta

SEQ ID NO: 688606 - DNA, 15 bp, Homo sapiens
atattacaaaattaa

SEQ ID NO: 688607 - DNA, 15 bp, Homo sapiens
tattacaaaattaaa

SEQ ID NO: 688608 - DNA, 15 bp, Homo sapiens
attacaaaattaaat

SEQ ID NO: 688609 - DNA, 15 bp, Homo sapiens
ttacaaaattaaatg

SEQ ID NO: 688610 - DNA, 15 bp, Homo sapiens
tacaaaattaaatgt

SEQ ID NO: 688611 - DNA, 15 bp, Homo sapiens
acaaaattaaatgta

SEQ ID NO: 688612 - DNA, 15 bp, Homo sapiens
caaaattaaatgtat

SEQ ID NO: 688613 - DNA, 15 bp, Homo sapiens
aaaattaaatgtata

SEQ ID NO: 688614 - DNA, 15 bp, Homo sapiens
aaattaaatgtatat

SEQ ID NO: 688615 - DNA, 15 bp, Homo sapiens
aattaaatgtatatt

SEQ ID NO: 688616 - DNA, 15 bp, Homo sapiens
attaaatgtatatta

SEQ ID NO: 688617 - DNA, 15 bp, Homo sapiens
ttaaatgtatattat

SEQ ID NO: 688618 - DNA, 15 bp, Homo sapiens
taaatgtatattata

SEQ ID NO: 688619 - DNA, 15 bp, Homo sapiens
aaatgtatattatac

SEQ ID NO: 688620 - DNA, 15 bp, Homo sapiens
aatgtatattataca

SEQ ID NO: 688621 - DNA, 15 bp, Homo sapiens
atgtatattatacaa

SEQ ID NO: 688622 - DNA, 15 bp, Homo sapiens
tgtatattatacaaa

SEQ ID NO: 688623 - DNA, 15 bp, Homo sapiens
gtatattatacaaaa

SEQ ID NO: 688624 - DNA, 15 bp, Homo sapiens
tatattatacaaaaa

SEQ ID NO: 688625 - DNA, 15 bp, Homo sapiens
atattatacaaaaat

SEQ ID NO: 688626 - DNA, 15 bp, Homo sapiens
tattatacaaaaatt

SEQ ID NO: 688627 - DNA, 15 bp, Homo sapiens
attatacaaaaattc

SEQ ID NO: 688628 - DNA, 15 bp, Homo sapiens
ttatacaaaaattct

SEQ ID NO: 688629 - DNA, 15 bp, Homo sapiens
tatacaaaaattctt

SEQ ID NO: 688630 - DNA, 15 bp, Homo sapiens
atacaaaaattcttt

SEQ ID NO: 688631 - DNA, 15 bp, Homo sapiens
tacaaaaattcttta

SEQ ID NO: 688632 - DNA, 15 bp, Homo sapiens
acaaaaattctttaa

SEQ ID NO: 688633 - DNA, 15 bp, Homo sapiens
caaaaattctttaat

SEQ ID NO: 688634 - DNA, 15 bp, Homo sapiens
aaaaattctttaatg

SEQ ID NO: 688635 - DNA, 15 bp, Homo sapiens
aaaattctttaatga

SEQ ID NO: 688636 - DNA, 15 bp, Homo sapiens
aaattctttaatgaa

SEQ ID NO: 688637 - DNA, 15 bp, Homo sapiens
aattctttaatgaaa

SEQ ID NO: 688638 - DNA, 15 bp, Homo sapiens
attctttaatgaaat

SEQ ID NO: 688639 - DNA, 15 bp, Homo sapiens
ttctttaatgaaatc

SEQ ID NO: 688640 - DNA, 15 bp, Homo sapiens
tctttaatgaaatct

SEQ ID NO: 688641 - DNA, 15 bp, Homo sapiens
ctttaatgaaatctg

SEQ ID NO: 688642 - DNA, 15 bp, Homo sapiens
tttaatgaaatctgt

SEQ ID NO: 688643 - DNA, 15 bp, Homo sapiens
ttaatgaaatctgtg

SEQ ID NO: 688644 - DNA, 15 bp, Homo sapiens
taatgaaatctgtgc

SEQ ID NO: 688645 - DNA, 15 bp, Homo sapiens
aatgaaatctgtgcc

SEQ ID NO: 688646 - DNA, 15 bp, Homo sapiens
atgaaatctgtgcct

SEQ ID NO: 688647 - DNA, 15 bp, Homo sapiens
tgaaatctgtgcctc

SEQ ID NO: 688648 - DNA, 15 bp, Homo sapiens
gaaatctgtgcctct

SEQ ID NO: 688649 - DNA, 15 bp, Homo sapiens
aaatctgtgcctctg

SEQ ID NO: 688650 - DNA, 15 bp, Homo sapiens
aatctgtgcctctgt

SEQ ID NO: 688651 - DNA, 15 bp, Homo sapiens
atctgtgcctctgtg

SEQ ID NO: 688652 - DNA, 15 bp, Homo sapiens
tctgtgcctctgtgt

SEQ ID NO: 688653 - DNA, 15 bp, Homo sapiens
ctgtgcctctgtgtg

SEQ ID NO: 688654 - DNA, 15 bp, Homo sapiens
tgtgcctctgtgtgc

SEQ ID NO: 688655 - DNA, 15 bp, Homo sapiens
gtgcctctgtgtgct

SEQ ID NO: 688656 - DNA, 15 bp, Homo sapiens
tgcctctgtgtgctg

SEQ ID NO: 688657 - DNA, 15 bp, Homo sapiens
gcctctgtgtgctga

SEQ ID NO: 688658 - DNA, 15 bp, Homo sapiens
cctctgtgtgctgag

SEQ ID NO: 688659 - DNA, 15 bp, Homo sapiens
ctctgtgtgctgaga

SEQ ID NO: 688660 - DNA, 15 bp, Homo sapiens
tctgtgtgctgagag

SEQ ID NO: 688661 - DNA, 15 bp, Homo sapiens
ctgtgtgctgagaga

SEQ ID NO: 688662 - DNA, 15 bp, Homo sapiens
tgtgtgctgagagat

SEQ ID NO: 688663 - DNA, 15 bp, Homo sapiens
gtgtgctgagagatg

SEQ ID NO: 688664 - DNA, 15 bp, Homo sapiens
tgtgctgagagatgt

SEQ ID NO: 688665 - DNA, 15 bp, Homo sapiens
gtgctgagagatgta

SEQ ID NO: 688666 - DNA, 15 bp, Homo sapiens
tgctgagagatgtaa

SEQ ID NO: 688667 - DNA, 15 bp, Homo sapiens
gctgagagatgtaat

SEQ ID NO: 688668 - DNA, 15 bp, Homo sapiens
ctgagagatgtaatg

SEQ ID NO: 688669 - DNA, 15 bp, Homo sapiens
tgagagatgtaatga

SEQ ID NO: 688670 - DNA, 15 bp, Homo sapiens
gagagatgtaatgac

SEQ ID NO: 688671 - DNA, 15 bp, Homo sapiens
agagatgtaatgaca

SEQ ID NO: 688672 - DNA, 15 bp, Homo sapiens
gagatgtaatgacat

SEQ ID NO: 688673 - DNA, 15 bp, Homo sapiens
agatgtaatgacatg

SEQ ID NO: 688674 - DNA, 15 bp, Homo sapiens
gatgtaatgacatgt

SEQ ID NO: 688675 - DNA, 15 bp, Homo sapiens
atgtaatgacatgta

SEQ ID NO: 688676 - DNA, 15 bp, Homo sapiens
tgtaatgacatgtaa

SEQ ID NO: 688677 - DNA, 15 bp, Homo sapiens
gtaatgacatgtaaa

SEQ ID NO: 688678 - DNA, 15 bp, Homo sapiens
taatgacatgtaaag

SEQ ID NO: 688679 - DNA, 15 bp, Homo sapiens
aatgacatgtaaagg

SEQ ID NO: 688680 - DNA, 15 bp, Homo sapiens
atgacatgtaaagga

SEQ ID NO: 688681 - DNA, 15 bp, Homo sapiens
tgacatgtaaaggat

SEQ ID NO: 688682 - DNA, 15 bp, Homo sapiens
gacatgtaaaggata

SEQ ID NO: 688683 - DNA, 15 bp, Homo sapiens
acatgtaaaggataa

SEQ ID NO: 688684 - DNA, 15 bp, Homo sapiens
catgtaaaggataat

SEQ ID NO: 688685 - DNA, 15 bp, Homo sapiens
atgtaaaggataatt

SEQ ID NO: 688686 - DNA, 15 bp, Homo sapiens
tgtaaaggataattg

SEQ ID NO: 688687 - DNA, 15 bp, Homo sapiens
gtaaaggataattgt

SEQ ID NO: 688688 - DNA, 15 bp, Homo sapiens
taaaggataattgtc

SEQ ID NO: 688689 - DNA, 15 bp, Homo sapiens
aaaggataattgtca

SEQ ID NO: 688690 - DNA, 15 bp, Homo sapiens
aaggataattgtcag

SEQ ID NO: 688691 - DNA, 15 bp, Homo sapiens
aggataattgtcagt

SEQ ID NO: 688692 - DNA, 15 bp, Homo sapiens
ggataattgtcagtg

SEQ ID NO: 688693 - DNA, 15 bp, Homo sapiens
gataattgtcagtga

SEQ ID NO: 688694 - DNA, 15 bp, Homo sapiens
ataattgtcagtgac

SEQ ID NO: 688695 - DNA, 15 bp, Homo sapiens
taattgtcagtgact

SEQ ID NO: 688696 - DNA, 15 bp, Homo sapiens
aattgtcagtgactt

SEQ ID NO: 688697 - DNA, 15 bp, Homo sapiens
attgtcagtgacttt

SEQ ID NO: 688698 - DNA, 15 bp, Homo sapiens
ttgtcagtgactttt

SEQ ID NO: 688699 - DNA, 15 bp, Homo sapiens
tgtcagtgacttttt

SEQ ID NO: 688700 - DNA, 15 bp, Homo sapiens
gtcagtgactttttt

SEQ ID NO: 688701 - DNA, 15 bp, Homo sapiens
tcagtgacttttttc

SEQ ID NO: 688702 - DNA, 15 bp, Homo sapiens
cagtgacttttttct

SEQ ID NO: 688703 - DNA, 15 bp, Homo sapiens
agtgacttttttctt

SEQ ID NO: 688704 - DNA, 15 bp, Homo sapiens
gtgacttttttcttt

SEQ ID NO: 688705 - DNA, 15 bp, Homo sapiens
tgacttttttctttc

SEQ ID NO: 688706 - DNA, 15 bp, Homo sapiens
gacttttttctttca

SEQ ID NO: 688707 - DNA, 15 bp, Homo sapiens
acttttttctttcaa

SEQ ID NO: 688708 - DNA, 15 bp, Homo sapiens
cttttttctttcaag

SEQ ID NO: 688709 - DNA, 15 bp, Homo sapiens
ttttttctttcaagg

SEQ ID NO: 688710 - DNA, 15 bp, Homo sapiens
tttttctttcaaggt

SEQ ID NO: 688711 - DNA, 15 bp, Homo sapiens
ttttctttcaaggtt

SEQ ID NO: 688712 - DNA, 15 bp, Homo sapiens
tttctttcaaggttg

SEQ ID NO: 688713 - DNA, 15 bp, Homo sapiens
ttctttcaaggttga

SEQ ID NO: 688714 - DNA, 15 bp, Homo sapiens
tctttcaaggttgaa

SEQ ID NO: 688715 - DNA, 15 bp, Homo sapiens
ctttcaaggttgaaa

SEQ ID NO: 688716 - DNA, 15 bp, Homo sapiens
tttcaaggttgaaaa

SEQ ID NO: 688717 - DNA, 15 bp, Homo sapiens
ttcaaggttgaaaat

SEQ ID NO: 688718 - DNA, 15 bp, Homo sapiens
tcaaggttgaaaatc

SEQ ID NO: 688719 - DNA, 15 bp, Homo sapiens
caaggttgaaaatct

SEQ ID NO: 688720 - DNA, 15 bp, Homo sapiens
aaggttgaaaatctt

SEQ ID NO: 688721 - DNA, 15 bp, Homo sapiens
aggttgaaaatcttt

SEQ ID NO: 688722 - DNA, 15 bp, Homo sapiens
ggttgaaaatctttc

SEQ ID NO: 688723 - DNA, 15 bp, Homo sapiens
gttgaaaatctttct

SEQ ID NO: 688724 - DNA, 15 bp, Homo sapiens
ttgaaaatctttcta

SEQ ID NO: 688725 - DNA, 15 bp, Homo sapiens
tgaaaatctttctaa

SEQ ID NO: 688726 - DNA, 15 bp, Homo sapiens
gaaaatctttctaaa

SEQ ID NO: 688727 - DNA, 15 bp, Homo sapiens
aaaatctttctaaac

SEQ ID NO: 688728 - DNA, 15 bp, Homo sapiens
aaatctttctaaacg

SEQ ID NO: 688729 - DNA, 15 bp, Homo sapiens
aatctttctaaacga

SEQ ID NO: 688730 - DNA, 15 bp, Homo sapiens
atctttctaaacgat

SEQ ID NO: 688731 - DNA, 15 bp, Homo sapiens
tctttctaaacgata

SEQ ID NO: 688732 - DNA, 15 bp, Homo sapiens
ctttctaaacgatac

SEQ ID NO: 688733 - DNA, 15 bp, Homo sapiens
tttctaaacgatacg

SEQ ID NO: 688734 - DNA, 15 bp, Homo sapiens
ttctaaacgatacga

SEQ ID NO: 688735 - DNA, 15 bp, Homo sapiens
tctaaacgatacgaa

SEQ ID NO: 688736 - DNA, 15 bp, Homo sapiens
ctaaacgatacgaag

SEQ ID NO: 688737 - DNA, 15 bp, Homo sapiens
taaacgatacgaaga

SEQ ID NO: 688738 - DNA, 15 bp, Homo sapiens
aaacgatacgaagaa

SEQ ID NO: 688739 - DNA, 15 bp, Homo sapiens
aacgatacgaagaaa

SEQ ID NO: 688740 - DNA, 15 bp, Homo sapiens
acgatacgaagaaat

SEQ ID NO: 688741 - DNA, 15 bp, Homo sapiens
cgatacgaagaaatt

SEQ ID NO: 688742 - DNA, 15 bp, Homo sapiens
gatacgaagaaattt

SEQ ID NO: 688743 - DNA, 15 bp, Homo sapiens
atacgaagaaattta

SEQ ID NO: 688744 - DNA, 15 bp, Homo sapiens
tacgaagaaatttat

SEQ ID NO: 688745 - DNA, 15 bp, Homo sapiens
acgaagaaatttatc

SEQ ID NO: 688746 - DNA, 15 bp, Homo sapiens
cgaagaaatttatct

SEQ ID NO: 688747 - DNA, 15 bp, Homo sapiens
gaagaaatttatctt

SEQ ID NO: 688748 - DNA, 15 bp, Homo sapiens
aagaaatttatctta

SEQ ID NO: 688749 - DNA, 15 bp, Homo sapiens
agaaatttatcttaa

SEQ ID NO: 688750 - DNA, 15 bp, Homo sapiens
gaaatttatcttaaa

SEQ ID NO: 688751 - DNA, 15 bp, Homo sapiens
aaatttatcttaaaa

SEQ ID NO: 688752 - DNA, 15 bp, Homo sapiens
aatttatcttaaaaa

SEQ ID NO: 688753 - DNA, 15 bp, Homo sapiens
atttatcttaaaaat

SEQ ID NO: 688754 - DNA, 15 bp, Homo sapiens
tttatcttaaaaata

SEQ ID NO: 688755 - DNA, 15 bp, Homo sapiens
ttatcttaaaaataa

SEQ ID NO: 688756 - DNA, 15 bp, Homo sapiens
tatcttaaaaataaa

SEQ ID NO: 688757 - DNA, 15 bp, Homo sapiens
atcttaaaaataaag

SEQ ID NO: 688758 - DNA, 15 bp, Homo sapiens
tcttaaaaataaaga

SEQ ID NO: 688759 - DNA, 15 bp, Homo sapiens
cttaaaaataaagat

SEQ ID NO: 688760 - DNA, 15 bp, Homo sapiens
ttaaaaataaagatc

SEQ ID NO: 688761 - DNA, 15 bp, Homo sapiens
taaaaataaagatct

SEQ ID NO: 688762 - DNA, 15 bp, Homo sapiens
aaaaataaagatcta

SEQ ID NO: 688763 - DNA, 15 bp, Homo sapiens
aaaataaagatctag

SEQ ID NO: 688764 - DNA, 15 bp, Homo sapiens
aaataaagatctaga

SEQ ID NO: 688765 - DNA, 15 bp, Homo sapiens
aataaagatctagat

SEQ ID NO: 688766 - DNA, 15 bp, Homo sapiens
ataaagatctagatg

SEQ ID NO: 688767 - DNA, 15 bp, Homo sapiens
taaagatctagatgc

SEQ ID NO: 688768 - DNA, 15 bp, Homo sapiens
aaagatctagatgca

SEQ ID NO: 688769 - DNA, 15 bp, Homo sapiens
aagatctagatgcaa

SEQ ID NO: 688770 - DNA, 15 bp, Homo sapiens
agatctagatgcaag

SEQ ID NO: 688771 - DNA, 15 bp, Homo sapiens
gatctagatgcaaga

SEQ ID NO: 688772 - DNA, 15 bp, Homo sapiens
atctagatgcaagat

SEQ ID NO: 688773 - DNA, 15 bp, Homo sapiens
tctagatgcaagatt

SEQ ID NO: 688774 - DNA, 15 bp, Homo sapiens
ctagatgcaagatta

SEQ ID NO: 688775 - DNA, 15 bp, Homo sapiens
tagatgcaagattat

SEQ ID NO: 688776 - DNA, 15 bp, Homo sapiens
agatgcaagattatt

SEQ ID NO: 688777 - DNA, 15 bp, Homo sapiens
gatgcaagattattt

SEQ ID NO: 688778 - DNA, 15 bp, Homo sapiens
atgcaagattatttt

SEQ ID NO: 688779 - DNA, 15 bp, Homo sapiens
tgcaagattattttt

SEQ ID NO: 688780 - DNA, 15 bp, Homo sapiens
gcaagattatttttg

SEQ ID NO: 688781 - DNA, 15 bp, Homo sapiens
caagattatttttgg

SEQ ID NO: 688782 - DNA, 15 bp, Homo sapiens
aagattatttttgga

SEQ ID NO: 688783 - DNA, 15 bp, Homo sapiens
agattatttttggat

SEQ ID NO: 688784 - DNA, 15 bp, Homo sapiens
gattatttttggatc

SEQ ID NO: 688785 - DNA, 15 bp, Homo sapiens
attatttttggatca

SEQ ID NO: 688786 - DNA, 15 bp, Homo sapiens
ttatttttggatcat

SEQ ID NO: 688787 - DNA, 15 bp, Homo sapiens
tatttttggatcatg

SEQ ID NO: 688788 - DNA, 15 bp, Homo sapiens
atttttggatcatga

SEQ ID NO: 688789 - DNA, 15 bp, Homo sapiens
tttttggatcatgat

SEQ ID NO: 688790 - DNA, 15 bp, Homo sapiens
ttttggatcatgata

SEQ ID NO: 688791 - DNA, 15 bp, Homo sapiens
tttggatcatgataa

SEQ ID NO: 688792 - DNA, 15 bp, Homo sapiens
ttggatcatgataaa

SEQ ID NO: 688793 - DNA, 15 bp, Homo sapiens
tggatcatgataaaa

SEQ ID NO: 688794 - DNA, 15 bp, Homo sapiens
ggatcatgataaaac

SEQ ID NO: 688795 - DNA, 15 bp, Homo sapiens
gatcatgataaaact

SEQ ID NO: 688796 - DNA, 15 bp, Homo sapiens
atcatgataaaactc

SEQ ID NO: 688797 - DNA, 15 bp, Homo sapiens
tcatgataaaactct

SEQ ID NO: 688798 - DNA, 15 bp, Homo sapiens
catgataaaactctt

SEQ ID NO: 688799 - DNA, 15 bp, Homo sapiens
atgataaaactcttc

SEQ ID NO: 688800 - DNA, 15 bp, Homo sapiens
tgataaaactcttca

SEQ ID NO: 688801 - DNA, 15 bp, Homo sapiens
gataaaactcttcag

SEQ ID NO: 688802 - DNA, 15 bp, Homo sapiens
ataaaactcttcaga

SEQ ID NO: 688803 - DNA, 15 bp, Homo sapiens
taaaactcttcagac

SEQ ID NO: 688804 - DNA, 15 bp, Homo sapiens
aaaactcttcagact

SEQ ID NO: 688805 - DNA, 15 bp, Homo sapiens
aaactcttcagactg

SEQ ID NO: 688806 - DNA, 15 bp, Homo sapiens
aactcttcagactga

SEQ ID NO: 688807 - DNA, 15 bp, Homo sapiens
actcttcagactgat

SEQ ID NO: 688808 - DNA, 15 bp, Homo sapiens
ctcttcagactgatt

SEQ ID NO: 688809 - DNA, 15 bp, Homo sapiens
tcttcagactgattc

SEQ ID NO: 688810 - DNA, 15 bp, Homo sapiens
cttcagactgattct

SEQ ID NO: 688811 - DNA, 15 bp, Homo sapiens
ttcagactgattcta

SEQ ID NO: 688812 - DNA, 15 bp, Homo sapiens
tcagactgattctat

SEQ ID NO: 688813 - DNA, 15 bp, Homo sapiens
cagactgattctata

SEQ ID NO: 688814 - DNA, 15 bp, Homo sapiens
agactgattctatag

SEQ ID NO: 688815 - DNA, 15 bp, Homo sapiens
gactgattctataga

SEQ ID NO: 688816 - DNA, 15 bp, Homo sapiens
actgattctatagac

SEQ ID NO: 688817 - DNA, 15 bp, Homo sapiens
ctgattctatagaca

SEQ ID NO: 688818 - DNA, 15 bp, Homo sapiens
tgattctatagacag

SEQ ID NO: 688819 - DNA, 15 bp, Homo sapiens
gattctatagacagg

SEQ ID NO: 688820 - DNA, 15 bp, Homo sapiens
attctatagacaggt

SEQ ID NO: 688821 - DNA, 15 bp, Homo sapiens
ttctatagacaggta

SEQ ID NO: 688822 - DNA, 15 bp, Homo sapiens
tctatagacaggtat

SEQ ID NO: 688823 - DNA, 15 bp, Homo sapiens
ctatagacaggtatt

SEQ ID NO: 688824 - DNA, 15 bp, Homo sapiens
tatagacaggtattg

SEQ ID NO: 688825 - DNA, 15 bp, Homo sapiens
atagacaggtattgc

SEQ ID NO: 688826 - DNA, 15 bp, Homo sapiens
tagacaggtattgca

SEQ ID NO: 688827 - DNA, 15 bp, Homo sapiens
agacaggtattgcac

SEQ ID NO: 688828 - DNA, 15 bp, Homo sapiens
gacaggtattgcaca

SEQ ID NO: 688829 - DNA, 15 bp, Homo sapiens
acaggtattgcacat

SEQ ID NO: 688830 - DNA, 15 bp, Homo sapiens
caggtattgcacatg

SEQ ID NO: 688831 - DNA, 15 bp, Homo sapiens
aggtattgcacatgg

SEQ ID NO: 688832 - DNA, 15 bp, Homo sapiens
ggtattgcacatggt

SEQ ID NO: 688833 - DNA, 15 bp, Homo sapiens
gtattgcacatggta

SEQ ID NO: 688834 - DNA, 15 bp, Homo sapiens
tattgcacatggtat

SEQ ID NO: 688835 - DNA, 15 bp, Homo sapiens
attgcacatggtata

SEQ ID NO: 688836 - DNA, 15 bp, Homo sapiens
ttgcacatggtatat

SEQ ID NO: 688837 - DNA, 15 bp, Homo sapiens
tgcacatggtatatt

SEQ ID NO: 688838 - DNA, 15 bp, Homo sapiens
gcacatggtatattt

SEQ ID NO: 688839 - DNA, 15 bp, Homo sapiens
cacatggtatatttg

SEQ ID NO: 688840 - DNA, 15 bp, Homo sapiens
acatggtatatttga

SEQ ID NO: 688841 - DNA, 15 bp, Homo sapiens
catggtatatttgat

SEQ ID NO: 688842 - DNA, 15 bp, Homo sapiens
atggtatatttgatt

SEQ ID NO: 688843 - DNA, 15 bp, Homo sapiens
tggtatatttgattg

SEQ ID NO: 688844 - DNA, 15 bp, Homo sapiens
ggtatatttgattga

SEQ ID NO: 688845 - DNA, 15 bp, Homo sapiens
gtatatttgattgat

SEQ ID NO: 688846 - DNA, 15 bp, Homo sapiens
tatatttgattgatt

SEQ ID NO: 688847 - DNA, 15 bp, Homo sapiens
atatttgattgattt

SEQ ID NO: 688848 - DNA, 15 bp, Homo sapiens
tatttgattgatttg

SEQ ID NO: 688849 - DNA, 15 bp, Homo sapiens
atttgattgatttgc

SEQ ID NO: 688850 - DNA, 15 bp, Homo sapiens
tttgattgatttgct

SEQ ID NO: 688851 - DNA, 15 bp, Homo sapiens
ttgattgatttgctt

SEQ ID NO: 688852 - DNA, 15 bp, Homo sapiens
tgattgatttgcttt

SEQ ID NO: 688853 - DNA, 15 bp, Homo sapiens
gattgatttgcttta

SEQ ID NO: 688854 - DNA, 15 bp, Homo sapiens
attgatttgctttag

SEQ ID NO: 688855 - DNA, 15 bp, Homo sapiens
ttgatttgctttaga

SEQ ID NO: 688856 - DNA, 15 bp, Homo sapiens
tgatttgctttagat

SEQ ID NO: 688857 - DNA, 15 bp, Homo sapiens
gatttgctttagata

SEQ ID NO: 688858 - DNA, 15 bp, Homo sapiens
atttgctttagatat

SEQ ID NO: 688859 - DNA, 15 bp, Homo sapiens
tttgctttagatata

SEQ ID NO: 688860 - DNA, 15 bp, Homo sapiens
ttgctttagatatag

SEQ ID NO: 688861 - DNA, 15 bp, Homo sapiens
tgctttagatatagg

SEQ ID NO: 688862 - DNA, 15 bp, Homo sapiens
gctttagatataggt

SEQ ID NO: 688863 - DNA, 15 bp, Homo sapiens
ctttagatataggtt

SEQ ID NO: 688864 - DNA, 15 bp, Homo sapiens
tttagatataggttg

SEQ ID NO: 688865 - DNA, 15 bp, Homo sapiens
ttagatataggttga

SEQ ID NO: 688866 - DNA, 15 bp, Homo sapiens
tagatataggttgat

SEQ ID NO: 688867 - DNA, 15 bp, Homo sapiens
agatataggttgata

SEQ ID NO: 688868 - DNA, 15 bp, Homo sapiens
gatataggttgatac

SEQ ID NO: 688869 - DNA, 15 bp, Homo sapiens
atataggttgatact

SEQ ID NO: 688870 - DNA, 15 bp, Homo sapiens
tataggttgatactg

SEQ ID NO: 688871 - DNA, 15 bp, Homo sapiens
ataggttgatactga

SEQ ID NO: 688872 - DNA, 15 bp, Homo sapiens
taggttgatactgat

SEQ ID NO: 688873 - DNA, 15 bp, Homo sapiens
aggttgatactgata

SEQ ID NO: 688874 - DNA, 15 bp, Homo sapiens
ggttgatactgatat

SEQ ID NO: 688875 - DNA, 15 bp, Homo sapiens
gttgatactgatata

SEQ ID NO: 688876 - DNA, 15 bp, Homo sapiens
ttgatactgatatag

SEQ ID NO: 688877 - DNA, 15 bp, Homo sapiens
tgatactgatatagg

SEQ ID NO: 688878 - DNA, 15 bp, Homo sapiens
gatactgatataggt

SEQ ID NO: 688879 - DNA, 15 bp, Homo sapiens
atactgatataggta

SEQ ID NO: 688880 - DNA, 15 bp, Homo sapiens
tactgatataggtag

SEQ ID NO: 688881 - DNA, 15 bp, Homo sapiens
actgatataggtaga

SEQ ID NO: 688882 - DNA, 15 bp, Homo sapiens
ctgatataggtagat

SEQ ID NO: 688883 - DNA, 15 bp, Homo sapiens
tgatataggtagatt

SEQ ID NO: 688884 - DNA, 15 bp, Homo sapiens
gatataggtagatta

SEQ ID NO: 688885 - DNA, 15 bp, Homo sapiens
atataggtagattat

SEQ ID NO: 688886 - DNA, 15 bp, Homo sapiens
tataggtagattata

SEQ ID NO: 688887 - DNA, 15 bp, Homo sapiens
ataggtagattatat

SEQ ID NO: 688888 - DNA, 15 bp, Homo sapiens
taggtagattatata

SEQ ID NO: 688889 - DNA, 15 bp, Homo sapiens
aggtagattatatag

SEQ ID NO: 688890 - DNA, 15 bp, Homo sapiens
ggtagattatatagt

SEQ ID NO: 688891 - DNA, 15 bp, Homo sapiens
gtagattatatagtc

SEQ ID NO: 688892 - DNA, 15 bp, Homo sapiens
tagattatatagtct

SEQ ID NO: 688893 - DNA, 15 bp, Homo sapiens
agattatatagtctt

SEQ ID NO: 688894 - DNA, 15 bp, Homo sapiens
gattatatagtcttt

SEQ ID NO: 688895 - DNA, 15 bp, Homo sapiens
attatatagtcttta

SEQ ID NO: 688896 - DNA, 15 bp, Homo sapiens
ttatatagtctttag

SEQ ID NO: 688897 - DNA, 15 bp, Homo sapiens
tatatagtctttagc

SEQ ID NO: 688898 - DNA, 15 bp, Homo sapiens
atatagtctttagct

SEQ ID NO: 688899 - DNA, 15 bp, Homo sapiens
tatagtctttagctt

SEQ ID NO: 688900 - DNA, 15 bp, Homo sapiens
atagtctttagctta

SEQ ID NO: 688901 - DNA, 15 bp, Homo sapiens
tagtctttagcttag

SEQ ID NO: 688902 - DNA, 15 bp, Homo sapiens
agtctttagcttagt

SEQ ID NO: 688903 - DNA, 15 bp, Homo sapiens
gtctttagcttagtg

SEQ ID NO: 688904 - DNA, 15 bp, Homo sapiens
tctttagcttagtga

SEQ ID NO: 688905 - DNA, 15 bp, Homo sapiens
ctttagcttagtgac

SEQ ID NO: 688906 - DNA, 15 bp, Homo sapiens
tttagcttagtgacc

SEQ ID NO: 688907 - DNA, 15 bp, Homo sapiens
ttagcttagtgacct

SEQ ID NO: 688908 - DNA, 15 bp, Homo sapiens
tagcttagtgacctt

SEQ ID NO: 688909 - DNA, 15 bp, Homo sapiens
agcttagtgaccttt

SEQ ID NO: 688910 - DNA, 15 bp, Homo sapiens
gcttagtgaccttta

SEQ ID NO: 688911 - DNA, 15 bp, Homo sapiens
cttagtgacctttag

SEQ ID NO: 688912 - DNA, 15 bp, Homo sapiens
ttagtgacctttaga

SEQ ID NO: 688913 - DNA, 15 bp, Homo sapiens
tagtgacctttagat

SEQ ID NO: 688914 - DNA, 15 bp, Homo sapiens
agtgacctttagata

SEQ ID NO: 688915 - DNA, 15 bp, Homo sapiens
gtgacctttagatat

SEQ ID NO: 688916 - DNA, 15 bp, Homo sapiens
tgacctttagatatc

SEQ ID NO: 688917 - DNA, 15 bp, Homo sapiens
gacctttagatatca

SEQ ID NO: 688918 - DNA, 15 bp, Homo sapiens
acctttagatatcat

SEQ ID NO: 688919 - DNA, 15 bp, Homo sapiens
cctttagatatcatt

SEQ ID NO: 688920 - DNA, 15 bp, Homo sapiens
ctttagatatcattt

SEQ ID NO: 688921 - DNA, 15 bp, Homo sapiens
tttagatatcattta

SEQ ID NO: 688922 - DNA, 15 bp, Homo sapiens
ttagatatcatttat

SEQ ID NO: 688923 - DNA, 15 bp, Homo sapiens
tagatatcatttata

SEQ ID NO: 688924 - DNA, 15 bp, Homo sapiens
agatatcatttataa

SEQ ID NO: 688925 - DNA, 15 bp, Homo sapiens
gatatcatttataac

SEQ ID NO: 688926 - DNA, 15 bp, Homo sapiens
atatcatttataaca

SEQ ID NO: 688927 - DNA, 15 bp, Homo sapiens
tatcatttataacaa

SEQ ID NO: 688928 - DNA, 15 bp, Homo sapiens
atcatttataacaaa

SEQ ID NO: 688929 - DNA, 15 bp, Homo sapiens
tcatttataacaaat

SEQ ID NO: 688930 - DNA, 15 bp, Homo sapiens
catttataacaaatt

SEQ ID NO: 688931 - DNA, 15 bp, Homo sapiens
atttataacaaatta

SEQ ID NO: 688932 - DNA, 15 bp, Homo sapiens
tttataacaaattac

SEQ ID NO: 688933 - DNA, 15 bp, Homo sapiens
ttataacaaattact

SEQ ID NO: 688934 - DNA, 15 bp, Homo sapiens
tataacaaattactt

SEQ ID NO: 688935 - DNA, 15 bp, Homo sapiens
ataacaaattacttt

SEQ ID NO: 688936 - DNA, 15 bp, Homo sapiens
taacaaattactttc

SEQ ID NO: 688937 - DNA, 15 bp, Homo sapiens
aacaaattactttca

SEQ ID NO: 688938 - DNA, 15 bp, Homo sapiens
acaaattactttcaa

SEQ ID NO: 688939 - DNA, 15 bp, Homo sapiens
caaattactttcaaa

SEQ ID NO: 688940 - DNA, 15 bp, Homo sapiens
aaattactttcaaat

SEQ ID NO: 688941 - DNA, 15 bp, Homo sapiens
aattactttcaaatg

SEQ ID NO: 688942 - DNA, 15 bp, Homo sapiens
attactttcaaatgt

SEQ ID NO: 688943 - DNA, 15 bp, Homo sapiens
ttactttcaaatgtc

SEQ ID NO: 688944 - DNA, 15 bp, Homo sapiens
tactttcaaatgtct

SEQ ID NO: 688945 - DNA, 15 bp, Homo sapiens
actttcaaatgtctt

SEQ ID NO: 688946 - DNA, 15 bp, Homo sapiens
ctttcaaatgtcttt

SEQ ID NO: 688947 - DNA, 15 bp, Homo sapiens
tttcaaatgtcttta

SEQ ID NO: 688948 - DNA, 15 bp, Homo sapiens
ttcaaatgtctttat

SEQ ID NO: 688949 - DNA, 15 bp, Homo sapiens
tcaaatgtctttata

SEQ ID NO: 688950 - DNA, 15 bp, Homo sapiens
caaatgtctttatac

SEQ ID NO: 688951 - DNA, 15 bp, Homo sapiens
aaatgtctttataca

SEQ ID NO: 688952 - DNA, 15 bp, Homo sapiens
aatgtctttatacaa

SEQ ID NO: 688953 - DNA, 15 bp, Homo sapiens
atgtctttatacaaa

SEQ ID NO: 688954 - DNA, 15 bp, Homo sapiens
tgtctttatacaaag

SEQ ID NO: 688955 - DNA, 15 bp, Homo sapiens
gtctttatacaaaga

SEQ ID NO: 688956 - DNA, 15 bp, Homo sapiens
tctttatacaaagaa

SEQ ID NO: 688957 - DNA, 15 bp, Homo sapiens
ctttatacaaagaaa

SEQ ID NO: 688958 - DNA, 15 bp, Homo sapiens
tttatacaaagaaaa

SEQ ID NO: 688959 - DNA, 15 bp, Homo sapiens
ttatacaaagaaaag

SEQ ID NO: 688960 - DNA, 15 bp, Homo sapiens
tatacaaagaaaagt

SEQ ID NO: 688961 - DNA, 15 bp, Homo sapiens
atacaaagaaaagtt

SEQ ID NO: 688962 - DNA, 15 bp, Homo sapiens
tacaaagaaaagttt

SEQ ID NO: 688963 - DNA, 15 bp, Homo sapiens
acaaagaaaagttta

SEQ ID NO: 688964 - DNA, 15 bp, Homo sapiens
caaagaaaagtttaa

SEQ ID NO: 688965 - DNA, 15 bp, Homo sapiens
aaagaaaagtttaac

SEQ ID NO: 688966 - DNA, 15 bp, Homo sapiens
aagaaaagtttaaca

SEQ ID NO: 688967 - DNA, 15 bp, Homo sapiens
agaaaagtttaacag

SEQ ID NO: 688968 - DNA, 15 bp, Homo sapiens
gaaaagtttaacagt

SEQ ID NO: 688969 - DNA, 15 bp, Homo sapiens
aaaagtttaacagta

SEQ ID NO: 688970 - DNA, 15 bp, Homo sapiens
aaagtttaacagtat

SEQ ID NO: 688971 - DNA, 15 bp, Homo sapiens
aagtttaacagtatt

SEQ ID NO: 688972 - DNA, 15 bp, Homo sapiens
agtttaacagtattt

SEQ ID NO: 688973 - DNA, 15 bp, Homo sapiens
gtttaacagtatttt

SEQ ID NO: 688974 - DNA, 15 bp, Homo sapiens
tttaacagtatttta

SEQ ID NO: 688975 - DNA, 15 bp, Homo sapiens
ttaacagtattttaa

SEQ ID NO: 688976 - DNA, 15 bp, Homo sapiens
taacagtattttaag

SEQ ID NO: 688977 - DNA, 15 bp, Homo sapiens
aacagtattttaagc

SEQ ID NO: 688978 - DNA, 15 bp, Homo sapiens
acagtattttaagca

SEQ ID NO: 688979 - DNA, 15 bp, Homo sapiens
cagtattttaagcat

SEQ ID NO: 688980 - DNA, 15 bp, Homo sapiens
agtattttaagcata

SEQ ID NO: 688981 - DNA, 15 bp, Homo sapiens
gtattttaagcatat

SEQ ID NO: 688982 - DNA, 15 bp, Homo sapiens
tattttaagcatata

SEQ ID NO: 688983 - DNA, 15 bp, Homo sapiens
attttaagcatataa

SEQ ID NO: 688984 - DNA, 15 bp, Homo sapiens
ttttaagcatataac

SEQ ID NO: 688985 - DNA, 15 bp, Homo sapiens
tttaagcatataact

SEQ ID NO: 688986 - DNA, 15 bp, Homo sapiens
ttaagcatataactt

SEQ ID NO: 688987 - DNA, 15 bp, Homo sapiens
taagcatataactta

SEQ ID NO: 688988 - DNA, 15 bp, Homo sapiens
aagcatataacttat

SEQ ID NO: 688989 - DNA, 15 bp, Homo sapiens
agcatataacttatc

SEQ ID NO: 688990 - DNA, 15 bp, Homo sapiens
gcatataacttatct

SEQ ID NO: 688991 - DNA, 15 bp, Homo sapiens
catataacttatcta

SEQ ID NO: 688992 - DNA, 15 bp, Homo sapiens
atataacttatctac

SEQ ID NO: 688993 - DNA, 15 bp, Homo sapiens
tataacttatctaca

SEQ ID NO: 688994 - DNA, 15 bp, Homo sapiens
ataacttatctacaa

SEQ ID NO: 688995 - DNA, 15 bp, Homo sapiens
taacttatctacaaa

SEQ ID NO: 688996 - DNA, 15 bp, Homo sapiens
aacttatctacaaat

SEQ ID NO: 688997 - DNA, 15 bp, Homo sapiens
acttatctacaaata

SEQ ID NO: 688998 - DNA, 15 bp, Homo sapiens
cttatctacaaatat

SEQ ID NO: 688999 - DNA, 15 bp, Homo sapiens
ttatctacaaatata

SEQ ID NO: 689000 - DNA, 15 bp, Homo sapiens
tatctacaaatatag

SEQ ID NO: 689001 - DNA, 15 bp, Homo sapiens
atctacaaatataga

SEQ ID NO: 689002 - DNA, 15 bp, Homo sapiens
tctacaaatatagat

SEQ ID NO: 689003 - DNA, 15 bp, Homo sapiens
ctacaaatatagatt

SEQ ID NO: 689004 - DNA, 15 bp, Homo sapiens
tacaaatatagattt

SEQ ID NO: 689005 - DNA, 15 bp, Homo sapiens
acaaatatagattta

SEQ ID NO: 689006 - DNA, 15 bp, Homo sapiens
caaatatagatttaa

SEQ ID NO: 689007 - DNA, 15 bp, Homo sapiens
aaatatagatttaat

SEQ ID NO: 689008 - DNA, 15 bp, Homo sapiens
aatatagatttaatg

SEQ ID NO: 689009 - DNA, 15 bp, Homo sapiens
atatagatttaatgt

SEQ ID NO: 689010 - DNA, 15 bp, Homo sapiens
tatagatttaatgtg

SEQ ID NO: 689011 - DNA, 15 bp, Homo sapiens
atagatttaatgtga

SEQ ID NO: 689012 - DNA, 15 bp, Homo sapiens
tagatttaatgtgaa

SEQ ID NO: 689013 - DNA, 15 bp, Homo sapiens
agatttaatgtgaat

SEQ ID NO: 689014 - DNA, 15 bp, Homo sapiens
gatttaatgtgaatt

SEQ ID NO: 689015 - DNA, 15 bp, Homo sapiens
atttaatgtgaattg

SEQ ID NO: 689016 - DNA, 15 bp, Homo sapiens
tttaatgtgaattgt

SEQ ID NO: 689017 - DNA, 15 bp, Homo sapiens
ttaatgtgaattgtg

SEQ ID NO: 689018 - DNA, 15 bp, Homo sapiens
taatgtgaattgtgt

SEQ ID NO: 689019 - DNA, 15 bp, Homo sapiens
aatgtgaattgtgtg

SEQ ID NO: 689020 - DNA, 15 bp, Homo sapiens
atgtgaattgtgtgt

SEQ ID NO: 689021 - DNA, 15 bp, Homo sapiens
tgtgaattgtgtgtc

SEQ ID NO: 689022 - DNA, 15 bp, Homo sapiens
gtgaattgtgtgtcc

SEQ ID NO: 689023 - DNA, 15 bp, Homo sapiens
tgaattgtgtgtcct

SEQ ID NO: 689024 - DNA, 15 bp, Homo sapiens
gaattgtgtgtccta

SEQ ID NO: 689025 - DNA, 15 bp, Homo sapiens
aattgtgtgtcctat

SEQ ID NO: 689026 - DNA, 15 bp, Homo sapiens
attgtgtgtcctata

SEQ ID NO: 689027 - DNA, 15 bp, Homo sapiens
ttgtgtgtcctataa

SEQ ID NO: 689028 - DNA, 15 bp, Homo sapiens
tgtgtgtcctataac

SEQ ID NO: 689029 - DNA, 15 bp, Homo sapiens
gtgtgtcctataaca

SEQ ID NO: 689030 - DNA, 15 bp, Homo sapiens
tgtgtcctataacag

SEQ ID NO: 689031 - DNA, 15 bp, Homo sapiens
gtgtcctataacagt

SEQ ID NO: 689032 - DNA, 15 bp, Homo sapiens
tgtcctataacagtt

SEQ ID NO: 689033 - DNA, 15 bp, Homo sapiens
gtcctataacagtta

SEQ ID NO: 689034 - DNA, 15 bp, Homo sapiens
tcctataacagttac

SEQ ID NO: 689035 - DNA, 15 bp, Homo sapiens
cctataacagttacc

SEQ ID NO: 689036 - DNA, 15 bp, Homo sapiens
ctataacagttacct

SEQ ID NO: 689037 - DNA, 15 bp, Homo sapiens
tataacagttacctt

SEQ ID NO: 689038 - DNA, 15 bp, Homo sapiens
ataacagttaccttt

SEQ ID NO: 689039 - DNA, 15 bp, Homo sapiens
taacagttacctttt

SEQ ID NO: 689040 - DNA, 15 bp, Homo sapiens
aacagttaccttttt

SEQ ID NO: 689041 - DNA, 15 bp, Homo sapiens
acagttacctttttg

SEQ ID NO: 689042 - DNA, 15 bp, Homo sapiens
cagttacctttttgc

SEQ ID NO: 689043 - DNA, 15 bp, Homo sapiens
agttacctttttgca

SEQ ID NO: 689044 - DNA, 15 bp, Homo sapiens
gttacctttttgcag

SEQ ID NO: 689045 - DNA, 15 bp, Homo sapiens
ttacctttttgcagt

SEQ ID NO: 689046 - DNA, 15 bp, Homo sapiens
tacctttttgcagtt

SEQ ID NO: 689047 - DNA, 15 bp, Homo sapiens
acctttttgcagtta

SEQ ID NO: 689048 - DNA, 15 bp, Homo sapiens
cctttttgcagttaa

SEQ ID NO: 689049 - DNA, 15 bp, Homo sapiens
ctttttgcagttaac

SEQ ID NO: 689050 - DNA, 15 bp, Homo sapiens
tttttgcagttaact

SEQ ID NO: 689051 - DNA, 15 bp, Homo sapiens
ttttgcagttaactg

SEQ ID NO: 689052 - DNA, 15 bp, Homo sapiens
tttgcagttaactga

SEQ ID NO: 689053 - DNA, 15 bp, Homo sapiens
ttgcagttaactgaa

SEQ ID NO: 689054 - DNA, 15 bp, Homo sapiens
tgcagttaactgaat

SEQ ID NO: 689055 - DNA, 15 bp, Homo sapiens
gcagttaactgaata

SEQ ID NO: 689056 - DNA, 15 bp, Homo sapiens
cagttaactgaatat

SEQ ID NO: 689057 - DNA, 15 bp, Homo sapiens
agttaactgaatata

SEQ ID NO: 689058 - DNA, 15 bp, Homo sapiens
gttaactgaatataa

SEQ ID NO: 689059 - DNA, 15 bp, Homo sapiens
ttaactgaatataat

SEQ ID NO: 689060 - DNA, 15 bp, Homo sapiens
taactgaatataatt

SEQ ID NO: 689061 - DNA, 15 bp, Homo sapiens
aactgaatataattt

SEQ ID NO: 689062 - DNA, 15 bp, Homo sapiens
actgaatataatttt

SEQ ID NO: 689063 - DNA, 15 bp, Homo sapiens
ctgaatataattttt

SEQ ID NO: 689064 - DNA, 15 bp, Homo sapiens
tgaatataatttttt

SEQ ID NO: 689065 - DNA, 15 bp, Homo sapiens
gaatataatttttta

SEQ ID NO: 689066 - DNA, 15 bp, Homo sapiens
aatataattttttaa

SEQ ID NO: 689067 - DNA, 15 bp, Homo sapiens
atataattttttaaa

SEQ ID NO: 689068 - DNA, 15 bp, Homo sapiens
tataattttttaaaa

SEQ ID NO: 689069 - DNA, 15 bp, Homo sapiens
ataattttttaaaat

SEQ ID NO: 689070 - DNA, 15 bp, Homo sapiens
taattttttaaaatg

SEQ ID NO: 689071 - DNA, 15 bp, Homo sapiens
aattttttaaaatgt

SEQ ID NO: 689072 - DNA, 15 bp, Homo sapiens
attttttaaaatgtg

SEQ ID NO: 689073 - DNA, 15 bp, Homo sapiens
ttttttaaaatgtgc

SEQ ID NO: 689074 - DNA, 15 bp, Homo sapiens
tttttaaaatgtgca

SEQ ID NO: 689075 - DNA, 15 bp, Homo sapiens
ttttaaaatgtgcac

SEQ ID NO: 689076 - DNA, 15 bp, Homo sapiens
tttaaaatgtgcacc

SEQ ID NO: 689077 - DNA, 15 bp, Homo sapiens
ttaaaatgtgcacca

SEQ ID NO: 689078 - DNA, 15 bp, Homo sapiens
taaaatgtgcaccaa

SEQ ID NO: 689079 - DNA, 15 bp, Homo sapiens
aaaatgtgcaccaaa

SEQ ID NO: 689080 - DNA, 15 bp, Homo sapiens
aaatgtgcaccaaaa

SEQ ID NO: 689081 - DNA, 15 bp, Homo sapiens
aatgtgcaccaaaag

SEQ ID NO: 689082 - DNA, 15 bp, Homo sapiens
atgtgcaccaaaaga

SEQ ID NO: 689083 - DNA, 15 bp, Homo sapiens
tgtgcaccaaaagat

SEQ ID NO: 689084 - DNA, 15 bp, Homo sapiens
gtgcaccaaaagata

SEQ ID NO: 689085 - DNA, 15 bp, Homo sapiens
tgcaccaaaagataa

SEQ ID NO: 689086 - DNA, 15 bp, Homo sapiens
gcaccaaaagataat

SEQ ID NO: 689087 - DNA, 15 bp, Homo sapiens
caccaaaagataatg

SEQ ID NO: 689088 - DNA, 15 bp, Homo sapiens
accaaaagataatgg

SEQ ID NO: 689089 - DNA, 15 bp, Homo sapiens
ccaaaagataatggc

SEQ ID NO: 689090 - DNA, 15 bp, Homo sapiens
caaaagataatggct

SEQ ID NO: 689091 - DNA, 15 bp, Homo sapiens
aaaagataatggcta

SEQ ID NO: 689092 - DNA, 15 bp, Homo sapiens
aaagataatggctaa

SEQ ID NO: 689093 - DNA, 15 bp, Homo sapiens
aagataatggctaaa

SEQ ID NO: 689094 - DNA, 15 bp, Homo sapiens
agataatggctaaag

SEQ ID NO: 689095 - DNA, 15 bp, Homo sapiens
gataatggctaaagt

SEQ ID NO: 689096 - DNA, 15 bp, Homo sapiens
ataatggctaaagta

SEQ ID NO: 689097 - DNA, 15 bp, Homo sapiens
taatggctaaagtaa

SEQ ID NO: 689098 - DNA, 15 bp, Homo sapiens
aatggctaaagtaat

SEQ ID NO: 689099 - DNA, 15 bp, Homo sapiens
atggctaaagtaatt

SEQ ID NO: 689100 - DNA, 15 bp, Homo sapiens
tggctaaagtaatta

SEQ ID NO: 689101 - DNA, 15 bp, Homo sapiens
ggctaaagtaattag

SEQ ID NO: 689102 - DNA, 15 bp, Homo sapiens
gctaaagtaattagt

SEQ ID NO: 689103 - DNA, 15 bp, Homo sapiens
ctaaagtaattagtt

SEQ ID NO: 689104 - DNA, 15 bp, Homo sapiens
taaagtaattagttt

SEQ ID NO: 689105 - DNA, 15 bp, Homo sapiens
aaagtaattagtttc

SEQ ID NO: 689106 - DNA, 15 bp, Homo sapiens
aagtaattagtttct

SEQ ID NO: 689107 - DNA, 15 bp, Homo sapiens
agtaattagtttctt

SEQ ID NO: 689108 - DNA, 15 bp, Homo sapiens
gtaattagtttcttc

SEQ ID NO: 689109 - DNA, 15 bp, Homo sapiens
taattagtttcttca

SEQ ID NO: 689110 - DNA, 15 bp, Homo sapiens
aattagtttcttcaa

SEQ ID NO: 689111 - DNA, 15 bp, Homo sapiens
attagtttcttcaaa

SEQ ID NO: 689112 - DNA, 15 bp, Homo sapiens
ttagtttcttcaaat

SEQ ID NO: 689113 - DNA, 15 bp, Homo sapiens
tagtttcttcaaata

SEQ ID NO: 689114 - DNA, 15 bp, Homo sapiens
agtttcttcaaatag

SEQ ID NO: 689115 - DNA, 15 bp, Homo sapiens
gtttcttcaaatagt

SEQ ID NO: 689116 - DNA, 15 bp, Homo sapiens
tttcttcaaatagtg

SEQ ID NO: 689117 - DNA, 15 bp, Homo sapiens
ttcttcaaatagtgg

SEQ ID NO: 689118 - DNA, 15 bp, Homo sapiens
tcttcaaatagtggt

SEQ ID NO: 689119 - DNA, 15 bp, Homo sapiens
cttcaaatagtggtc

SEQ ID NO: 689120 - DNA, 15 bp, Homo sapiens
ttcaaatagtggtct

SEQ ID NO: 689121 - DNA, 15 bp, Homo sapiens
tcaaatagtggtctc

SEQ ID NO: 689122 - DNA, 15 bp, Homo sapiens
caaatagtggtctct

SEQ ID NO: 689123 - DNA, 15 bp, Homo sapiens
aaatagtggtctcta

SEQ ID NO: 689124 - DNA, 15 bp, Homo sapiens
aatagtggtctctac

SEQ ID NO: 689125 - DNA, 15 bp, Homo sapiens
atagtggtctctacc

SEQ ID NO: 689126 - DNA, 15 bp, Homo sapiens
tagtggtctctacct

SEQ ID NO: 689127 - DNA, 15 bp, Homo sapiens
agtggtctctacctt

SEQ ID NO: 689128 - DNA, 15 bp, Homo sapiens
gtggtctctacctta

SEQ ID NO: 689129 - DNA, 15 bp, Homo sapiens
tggtctctaccttat

SEQ ID NO: 689130 - DNA, 15 bp, Homo sapiens
ggtctctaccttatt

SEQ ID NO: 689131 - DNA, 15 bp, Homo sapiens
gtctctaccttattt

SEQ ID NO: 689132 - DNA, 15 bp, Homo sapiens
tctctaccttatttc

SEQ ID NO: 689133 - DNA, 15 bp, Homo sapiens
ctctaccttatttct

SEQ ID NO: 689134 - DNA, 15 bp, Homo sapiens
tctaccttatttcta

SEQ ID NO: 689135 - DNA, 15 bp, Homo sapiens
ctaccttatttctat

SEQ ID NO: 689136 - DNA, 15 bp, Homo sapiens
taccttatttctatc

SEQ ID NO: 689137 - DNA, 15 bp, Homo sapiens
accttatttctatcc

SEQ ID NO: 689138 - DNA, 15 bp, Homo sapiens
ccttatttctatcct

SEQ ID NO: 689139 - DNA, 15 bp, Homo sapiens
cttatttctatcctt

SEQ ID NO: 689140 - DNA, 15 bp, Homo sapiens
ttatttctatccttt

SEQ ID NO: 689141 - DNA, 15 bp, Homo sapiens
tatttctatcctttc

SEQ ID NO: 689142 - DNA, 15 bp, Homo sapiens
atttctatcctttca

SEQ ID NO: 689143 - DNA, 15 bp, Homo sapiens
tttctatcctttcat

SEQ ID NO: 689144 - DNA, 15 bp, Homo sapiens
ttctatcctttcata

SEQ ID NO: 689145 - DNA, 15 bp, Homo sapiens
tctatcctttcatat

SEQ ID NO: 689146 - DNA, 15 bp, Homo sapiens
ctatcctttcatata

SEQ ID NO: 689147 - DNA, 15 bp, Homo sapiens
tatcctttcatatac

SEQ ID NO: 689148 - DNA, 15 bp, Homo sapiens
atcctttcatatact

SEQ ID NO: 689149 - DNA, 15 bp, Homo sapiens
tcctttcatatacta

SEQ ID NO: 689150 - DNA, 15 bp, Homo sapiens
cctttcatatactat

SEQ ID NO: 689151 - DNA, 15 bp, Homo sapiens
ctttcatatactatt

SEQ ID NO: 689152 - DNA, 15 bp, Homo sapiens
tttcatatactattg

SEQ ID NO: 689153 - DNA, 15 bp, Homo sapiens
ttcatatactattgc

SEQ ID NO: 689154 - DNA, 15 bp, Homo sapiens
tcatatactattgcc

SEQ ID NO: 689155 - DNA, 15 bp, Homo sapiens
catatactattgcct

SEQ ID NO: 689156 - DNA, 15 bp, Homo sapiens
atatactattgcctg

SEQ ID NO: 689157 - DNA, 15 bp, Homo sapiens
tatactattgcctgc

SEQ ID NO: 689158 - DNA, 15 bp, Homo sapiens
atactattgcctgcc

SEQ ID NO: 689159 - DNA, 15 bp, Homo sapiens
tactattgcctgcct

SEQ ID NO: 689160 - DNA, 15 bp, Homo sapiens
actattgcctgcctg

SEQ ID NO: 689161 - DNA, 15 bp, Homo sapiens
ctattgcctgcctgg

SEQ ID NO: 689162 - DNA, 15 bp, Homo sapiens
tattgcctgcctggt

SEQ ID NO: 689163 - DNA, 15 bp, Homo sapiens
attgcctgcctggtt

SEQ ID NO: 689164 - DNA, 15 bp, Homo sapiens
ttgcctgcctggttt

SEQ ID NO: 689165 - DNA, 15 bp, Homo sapiens
tgcctgcctggttta

SEQ ID NO: 689166 - DNA, 15 bp, Homo sapiens
gcctgcctggtttat

SEQ ID NO: 689167 - DNA, 15 bp, Homo sapiens
cctgcctggtttatt

SEQ ID NO: 689168 - DNA, 15 bp, Homo sapiens
ctgcctggtttattt

SEQ ID NO: 689169 - DNA, 15 bp, Homo sapiens
tgcctggtttattta

SEQ ID NO: 689170 - DNA, 15 bp, Homo sapiens
gcctggtttatttaa

SEQ ID NO: 689171 - DNA, 15 bp, Homo sapiens
cctggtttatttaaa

SEQ ID NO: 689172 - DNA, 15 bp, Homo sapiens
ctggtttatttaaaa

SEQ ID NO: 689173 - DNA, 15 bp, Homo sapiens
tggtttatttaaaaa

SEQ ID NO: 689174 - DNA, 15 bp, Homo sapiens
ggtttatttaaaaaa

SEQ ID NO: 689175 - DNA, 15 bp, Homo sapiens
gtttatttaaaaaag

SEQ ID NO: 689176 - DNA, 15 bp, Homo sapiens
tttatttaaaaaagt

SEQ ID NO: 689177 - DNA, 15 bp, Homo sapiens
ttatttaaaaaagtt

SEQ ID NO: 689178 - DNA, 15 bp, Homo sapiens
tatttaaaaaagttt

SEQ ID NO: 689179 - DNA, 15 bp, Homo sapiens
atttaaaaaagttta

SEQ ID NO: 689180 - DNA, 15 bp, Homo sapiens
tttaaaaaagtttat

SEQ ID NO: 689181 - DNA, 15 bp, Homo sapiens
ttaaaaaagtttata

SEQ ID NO: 689182 - DNA, 15 bp, Homo sapiens
taaaaaagtttatac

SEQ ID NO: 689183 - DNA, 15 bp, Homo sapiens
aaaaaagtttataca

SEQ ID NO: 689184 - DNA, 15 bp, Homo sapiens
aaaaagtttatacaa

SEQ ID NO: 689185 - DNA, 15 bp, Homo sapiens
aaaagtttatacaaa

SEQ ID NO: 689186 - DNA, 15 bp, Homo sapiens
aaagtttatacaaaa

SEQ ID NO: 689187 - DNA, 15 bp, Homo sapiens
aagtttatacaaaag

SEQ ID NO: 689188 - DNA, 15 bp, Homo sapiens
agtttatacaaaagt

SEQ ID NO: 689189 - DNA, 15 bp, Homo sapiens
gtttatacaaaagtg

SEQ ID NO: 689190 - DNA, 15 bp, Homo sapiens
tttatacaaaagtgt

SEQ ID NO: 689191 - DNA, 15 bp, Homo sapiens
ttatacaaaagtgta

SEQ ID NO: 689192 - DNA, 15 bp, Homo sapiens
tatacaaaagtgtag

SEQ ID NO: 689193 - DNA, 15 bp, Homo sapiens
atacaaaagtgtagt

SEQ ID NO: 689194 - DNA, 15 bp, Homo sapiens
tacaaaagtgtagtc

SEQ ID NO: 689195 - DNA, 15 bp, Homo sapiens
acaaaagtgtagtct

SEQ ID NO: 689196 - DNA, 15 bp, Homo sapiens
caaaagtgtagtctc

SEQ ID NO: 689197 - DNA, 15 bp, Homo sapiens
aaaagtgtagtctct

SEQ ID NO: 689198 - DNA, 15 bp, Homo sapiens
aaagtgtagtctctg

SEQ ID NO: 689199 - DNA, 15 bp, Homo sapiens
aagtgtagtctctgt

SEQ ID NO: 689200 - DNA, 15 bp, Homo sapiens
agtgtagtctctgtt

SEQ ID NO: 689201 - DNA, 15 bp, Homo sapiens
gtgtagtctctgtta

SEQ ID NO: 689202 - DNA, 15 bp, Homo sapiens
tgtagtctctgttat

SEQ ID NO: 689203 - DNA, 15 bp, Homo sapiens
gtagtctctgttatt

SEQ ID NO: 689204 - DNA, 15 bp, Homo sapiens
tagtctctgttatta

SEQ ID NO: 689205 - DNA, 15 bp, Homo sapiens
agtctctgttattat

SEQ ID NO: 689206 - DNA, 15 bp, Homo sapiens
gtctctgttattatc

SEQ ID NO: 689207 - DNA, 15 bp, Homo sapiens
tctctgttattatca

SEQ ID NO: 689208 - DNA, 15 bp, Homo sapiens
ctctgttattatcat

SEQ ID NO: 689209 - DNA, 15 bp, Homo sapiens
tctgttattatcatg

SEQ ID NO: 689210 - DNA, 15 bp, Homo sapiens
ctgttattatcatgt

SEQ ID NO: 689211 - DNA, 15 bp, Homo sapiens
tgttattatcatgta

SEQ ID NO: 689212 - DNA, 15 bp, Homo sapiens
gttattatcatgtag

SEQ ID NO: 689213 - DNA, 15 bp, Homo sapiens
ttattatcatgtaga

SEQ ID NO: 689214 - DNA, 15 bp, Homo sapiens
tattatcatgtagaa

SEQ ID NO: 689215 - DNA, 15 bp, Homo sapiens
attatcatgtagaaa

SEQ ID NO: 689216 - DNA, 15 bp, Homo sapiens
ttatcatgtagaaac

SEQ ID NO: 689217 - DNA, 15 bp, Homo sapiens
tatcatgtagaaacc

SEQ ID NO: 689218 - DNA, 15 bp, Homo sapiens
atcatgtagaaacct

SEQ ID NO: 689219 - DNA, 15 bp, Homo sapiens
tcatgtagaaaccta

SEQ ID NO: 689220 - DNA, 15 bp, Homo sapiens
catgtagaaacctaa

SEQ ID NO: 689221 - DNA, 15 bp, Homo sapiens
atgtagaaacctaaa

SEQ ID NO: 689222 - DNA, 15 bp, Homo sapiens
tgtagaaacctaaaa

SEQ ID NO: 689223 - DNA, 15 bp, Homo sapiens
gtagaaacctaaaat

SEQ ID NO: 689224 - DNA, 15 bp, Homo sapiens
tagaaacctaaaatt

SEQ ID NO: 689225 - DNA, 15 bp, Homo sapiens
agaaacctaaaattg

SEQ ID NO: 689226 - DNA, 15 bp, Homo sapiens
gaaacctaaaattgg

SEQ ID NO: 689227 - DNA, 15 bp, Homo sapiens
aaacctaaaattgga

SEQ ID NO: 689228 - DNA, 15 bp, Homo sapiens
aacctaaaattggaa

SEQ ID NO: 689229 - DNA, 15 bp, Homo sapiens
acctaaaattggaat

SEQ ID NO: 689230 - DNA, 15 bp, Homo sapiens
cctaaaattggaatg

SEQ ID NO: 689231 - DNA, 15 bp, Homo sapiens
ctaaaattggaatgg

SEQ ID NO: 689232 - DNA, 15 bp, Homo sapiens
taaaattggaatggt

SEQ ID NO: 689233 - DNA, 15 bp, Homo sapiens
aaaattggaatggtt

SEQ ID NO: 689234 - DNA, 15 bp, Homo sapiens
aaattggaatggttg

SEQ ID NO: 689235 - DNA, 15 bp, Homo sapiens
aattggaatggttga

SEQ ID NO: 689236 - DNA, 15 bp, Homo sapiens
attggaatggttgag

SEQ ID NO: 689237 - DNA, 15 bp, Homo sapiens
ttggaatggttgaga

SEQ ID NO: 689238 - DNA, 15 bp, Homo sapiens
tggaatggttgagag

SEQ ID NO: 689239 - DNA, 15 bp, Homo sapiens
ggaatggttgagagt

SEQ ID NO: 689240 - DNA, 15 bp, Homo sapiens
gaatggttgagagtg

SEQ ID NO: 689241 - DNA, 15 bp, Homo sapiens
aatggttgagagtga

SEQ ID NO: 689242 - DNA, 15 bp, Homo sapiens
atggttgagagtgat

SEQ ID NO: 689243 - DNA, 15 bp, Homo sapiens
tggttgagagtgatt

SEQ ID NO: 689244 - DNA, 15 bp, Homo sapiens
ggttgagagtgattg

SEQ ID NO: 689245 - DNA, 15 bp, Homo sapiens
gttgagagtgattgt

SEQ ID NO: 689246 - DNA, 15 bp, Homo sapiens
ttgagagtgattgtt

SEQ ID NO: 689247 - DNA, 15 bp, Homo sapiens
tgagagtgattgtta

SEQ ID NO: 689248 - DNA, 15 bp, Homo sapiens
gagagtgattgttaa

SEQ ID NO: 689249 - DNA, 15 bp, Homo sapiens
agagtgattgttaaa

SEQ ID NO: 689250 - DNA, 15 bp, Homo sapiens
gagtgattgttaaaa

SEQ ID NO: 689251 - DNA, 15 bp, Homo sapiens
agtgattgttaaaat

SEQ ID NO: 689252 - DNA, 15 bp, Homo sapiens
gtgattgttaaaatt

SEQ ID NO: 689253 - DNA, 15 bp, Homo sapiens
tgattgttaaaattt

SEQ ID NO: 689254 - DNA, 15 bp, Homo sapiens
gattgttaaaatttt

SEQ ID NO: 689255 - DNA, 15 bp, Homo sapiens
attgttaaaattttt

SEQ ID NO: 689256 - DNA, 15 bp, Homo sapiens
ttgttaaaatttttg

SEQ ID NO: 689257 - DNA, 15 bp, Homo sapiens
tgttaaaatttttga

SEQ ID NO: 689258 - DNA, 15 bp, Homo sapiens
gttaaaatttttgac

SEQ ID NO: 689259 - DNA, 15 bp, Homo sapiens
ttaaaatttttgact

SEQ ID NO: 689260 - DNA, 15 bp, Homo sapiens
taaaatttttgactg

SEQ ID NO: 689261 - DNA, 15 bp, Homo sapiens
aaaatttttgactga

SEQ ID NO: 689262 - DNA, 15 bp, Homo sapiens
aaatttttgactgat

SEQ ID NO: 689263 - DNA, 15 bp, Homo sapiens
aatttttgactgatc

SEQ ID NO: 689264 - DNA, 15 bp, Homo sapiens
atttttgactgatca

SEQ ID NO: 689265 - DNA, 15 bp, Homo sapiens
tttttgactgatcat

SEQ ID NO: 689266 - DNA, 15 bp, Homo sapiens
ttttgactgatcata

SEQ ID NO: 689267 - DNA, 15 bp, Homo sapiens
tttgactgatcataa

SEQ ID NO: 689268 - DNA, 15 bp, Homo sapiens
ttgactgatcataag

SEQ ID NO: 689269 - DNA, 15 bp, Homo sapiens
tgactgatcataagt

SEQ ID NO: 689270 - DNA, 15 bp, Homo sapiens
gactgatcataagta

SEQ ID NO: 689271 - DNA, 15 bp, Homo sapiens
actgatcataagtaa

SEQ ID NO: 689272 - DNA, 15 bp, Homo sapiens
ctgatcataagtaaa

SEQ ID NO: 689273 - DNA, 15 bp, Homo sapiens
tgatcataagtaaag

SEQ ID NO: 689274 - DNA, 15 bp, Homo sapiens
gatcataagtaaagt

SEQ ID NO: 689275 - DNA, 15 bp, Homo sapiens
atcataagtaaagtt

SEQ ID NO: 689276 - DNA, 15 bp, Homo sapiens
tcataagtaaagtta

SEQ ID NO: 689277 - DNA, 15 bp, Homo sapiens
cataagtaaagttaa

SEQ ID NO: 689278 - DNA, 15 bp, Homo sapiens
ataagtaaagttaat

SEQ ID NO: 689279 - DNA, 15 bp, Homo sapiens
taagtaaagttaatt

SEQ ID NO: 689280 - DNA, 15 bp, Homo sapiens
aagtaaagttaattt

SEQ ID NO: 689281 - DNA, 15 bp, Homo sapiens
agtaaagttaatttt

SEQ ID NO: 689282 - DNA, 15 bp, Homo sapiens
gtaaagttaattttg

SEQ ID NO: 689283 - DNA, 15 bp, Homo sapiens
taaagttaattttgt

SEQ ID NO: 689284 - DNA, 15 bp, Homo sapiens
aaagttaattttgtg

SEQ ID NO: 689285 - DNA, 15 bp, Homo sapiens
aagttaattttgtgt

SEQ ID NO: 689286 - DNA, 15 bp, Homo sapiens
agttaattttgtgtc

SEQ ID NO: 689287 - DNA, 15 bp, Homo sapiens
gttaattttgtgtct

SEQ ID NO: 689288 - DNA, 15 bp, Homo sapiens
ttaattttgtgtctt

SEQ ID NO: 689289 - DNA, 15 bp, Homo sapiens
taattttgtgtcttt

SEQ ID NO: 689290 - DNA, 15 bp, Homo sapiens
aattttgtgtcttta

SEQ ID NO: 689291 - DNA, 15 bp, Homo sapiens
attttgtgtctttag

SEQ ID NO: 689292 - DNA, 15 bp, Homo sapiens
ttttgtgtctttagc

SEQ ID NO: 689293 - DNA, 15 bp, Homo sapiens
tttgtgtctttagca

SEQ ID NO: 689294 - DNA, 15 bp, Homo sapiens
ttgtgtctttagcat

SEQ ID NO: 689295 - DNA, 15 bp, Homo sapiens
tgtgtctttagcatg

SEQ ID NO: 689296 - DNA, 15 bp, Homo sapiens
gtgtctttagcatga

SEQ ID NO: 689297 - DNA, 15 bp, Homo sapiens
tgtctttagcatgaa

SEQ ID NO: 689298 - DNA, 15 bp, Homo sapiens
gtctttagcatgaac

SEQ ID NO: 689299 - DNA, 15 bp, Homo sapiens
tctttagcatgaact

SEQ ID NO: 689300 - DNA, 15 bp, Homo sapiens
ctttagcatgaactc

SEQ ID NO: 689301 - DNA, 15 bp, Homo sapiens
tttagcatgaactct

SEQ ID NO: 689302 - DNA, 15 bp, Homo sapiens
ttagcatgaactctt

SEQ ID NO: 689303 - DNA, 15 bp, Homo sapiens
tagcatgaactcttt

SEQ ID NO: 689304 - DNA, 15 bp, Homo sapiens
agcatgaactctttt

SEQ ID NO: 689305 - DNA, 15 bp, Homo sapiens
gcatgaactctttta

SEQ ID NO: 689306 - DNA, 15 bp, Homo sapiens
catgaactcttttaa

SEQ ID NO: 689307 - DNA, 15 bp, Homo sapiens
atgaactcttttaat

SEQ ID NO: 689308 - DNA, 15 bp, Homo sapiens
tgaactcttttaata

SEQ ID NO: 689309 - DNA, 15 bp, Homo sapiens
gaactcttttaatat

SEQ ID NO: 689310 - DNA, 15 bp, Homo sapiens
aactcttttaatatg

SEQ ID NO: 689311 - DNA, 15 bp, Homo sapiens
actcttttaatatga

SEQ ID NO: 689312 - DNA, 15 bp, Homo sapiens
ctcttttaatatgaa

SEQ ID NO: 689313 - DNA, 15 bp, Homo sapiens
tcttttaatatgaaa

SEQ ID NO: 689314 - DNA, 15 bp, Homo sapiens
cttttaatatgaaac

SEQ ID NO: 689315 - DNA, 15 bp, Homo sapiens
ttttaatatgaaact

SEQ ID NO: 689316 - DNA, 15 bp, Homo sapiens
tttaatatgaaactg

SEQ ID NO: 689317 - DNA, 15 bp, Homo sapiens
ttaatatgaaactga

SEQ ID NO: 689318 - DNA, 15 bp, Homo sapiens
taatatgaaactgaa

SEQ ID NO: 689319 - DNA, 15 bp, Homo sapiens
aatatgaaactgaaa

SEQ ID NO: 689320 - DNA, 15 bp, Homo sapiens
atatgaaactgaaaa

SEQ ID NO: 689321 - DNA, 15 bp, Homo sapiens
tatgaaactgaaaat

SEQ ID NO: 689322 - DNA, 15 bp, Homo sapiens
atgaaactgaaaata

SEQ ID NO: 689323 - DNA, 15 bp, Homo sapiens
tgaaactgaaaatat

SEQ ID NO: 689324 - DNA, 15 bp, Homo sapiens
gaaactgaaaatatg

SEQ ID NO: 689325 - DNA, 15 bp, Homo sapiens
aaactgaaaatatgc

SEQ ID NO: 689326 - DNA, 15 bp, Homo sapiens
aactgaaaatatgcg

SEQ ID NO: 689327 - DNA, 15 bp, Homo sapiens
actgaaaatatgcgt

SEQ ID NO: 689328 - DNA, 15 bp, Homo sapiens
ctgaaaatatgcgta

SEQ ID NO: 689329 - DNA, 15 bp, Homo sapiens
tgaaaatatgcgtaa

SEQ ID NO: 689330 - DNA, 15 bp, Homo sapiens
gaaaatatgcgtaat

SEQ ID NO: 689331 - DNA, 15 bp, Homo sapiens
aaaatatgcgtaatt

SEQ ID NO: 689332 - DNA, 15 bp, Homo sapiens
aaatatgcgtaattt

SEQ ID NO: 689333 - DNA, 15 bp, Homo sapiens
aatatgcgtaattta

SEQ ID NO: 689334 - DNA, 15 bp, Homo sapiens
atatgcgtaatttag

SEQ ID NO: 689335 - DNA, 15 bp, Homo sapiens
tatgcgtaatttaga

SEQ ID NO: 689336 - DNA, 15 bp, Homo sapiens
atgcgtaatttagaa

SEQ ID NO: 689337 - DNA, 15 bp, Homo sapiens
tgcgtaatttagaag

SEQ ID NO: 689338 - DNA, 15 bp, Homo sapiens
gcgtaatttagaagt

SEQ ID NO: 689339 - DNA, 15 bp, Homo sapiens
cgtaatttagaagtt

SEQ ID NO: 689340 - DNA, 15 bp, Homo sapiens
gtaatttagaagtta

SEQ ID NO: 689341 - DNA, 15 bp, Homo sapiens
taatttagaagttaa

SEQ ID NO: 689342 - DNA, 15 bp, Homo sapiens
aatttagaagttaaa

SEQ ID NO: 689343 - DNA, 15 bp, Homo sapiens
atttagaagttaaac

SEQ ID NO: 689344 - DNA, 15 bp, Homo sapiens
tttagaagttaaaca

SEQ ID NO: 689345 - DNA, 15 bp, Homo sapiens
ttagaagttaaacac

SEQ ID NO: 689346 - DNA, 15 bp, Homo sapiens
tagaagttaaacaca

SEQ ID NO: 689347 - DNA, 15 bp, Homo sapiens
agaagttaaacacag

SEQ ID NO: 689348 - DNA, 15 bp, Homo sapiens
gaagttaaacacagt

SEQ ID NO: 689349 - DNA, 15 bp, Homo sapiens
aagttaaacacagta

SEQ ID NO: 689350 - DNA, 15 bp, Homo sapiens
agttaaacacagtaa

SEQ ID NO: 689351 - DNA, 15 bp, Homo sapiens
gttaaacacagtaaa

SEQ ID NO: 689352 - DNA, 15 bp, Homo sapiens
ttaaacacagtaaaa

SEQ ID NO: 689353 - DNA, 15 bp, Homo sapiens
taaacacagtaaaat

SEQ ID NO: 689354 - DNA, 15 bp, Homo sapiens
aaacacagtaaaatg

SEQ ID NO: 689355 - DNA, 15 bp, Homo sapiens
aacacagtaaaatgt

SEQ ID NO: 689356 - DNA, 15 bp, Homo sapiens
acacagtaaaatgtt

SEQ ID NO: 689357 - DNA, 15 bp, Homo sapiens
cacagtaaaatgttt

SEQ ID NO: 689358 - DNA, 15 bp, Homo sapiens
acagtaaaatgtttt

SEQ ID NO: 689359 - DNA, 15 bp, Homo sapiens
cagtaaaatgtttta

SEQ ID NO: 689360 - DNA, 15 bp, Homo sapiens
agtaaaatgttttaa

SEQ ID NO: 689361 - DNA, 15 bp, Homo sapiens
gtaaaatgttttaaa

SEQ ID NO: 689362 - DNA, 15 bp, Homo sapiens
taaaatgttttaaat

SEQ ID NO: 689363 - DNA, 15 bp, Homo sapiens
aaaatgttttaaatt

SEQ ID NO: 689364 - DNA, 15 bp, Homo sapiens
aaatgttttaaattt

SEQ ID NO: 689365 - DNA, 15 bp, Homo sapiens
aatgttttaaatttt

SEQ ID NO: 689366 - DNA, 15 bp, Homo sapiens
atgttttaaatttta

SEQ ID NO: 689367 - DNA, 15 bp, Homo sapiens
tgttttaaattttat

SEQ ID NO: 689368 - DNA, 15 bp, Homo sapiens
gttttaaattttatt

SEQ ID NO: 689369 - DNA, 15 bp, Homo sapiens
ttttaaattttattt

SEQ ID NO: 689370 - DNA, 15 bp, Homo sapiens
tttaaattttattta

SEQ ID NO: 689371 - DNA, 15 bp, Homo sapiens
ttaaattttatttaa

SEQ ID NO: 689372 - DNA, 15 bp, Homo sapiens
taaattttatttaag

SEQ ID NO: 689373 - DNA, 15 bp, Homo sapiens
aaattttatttaagt

SEQ ID NO: 689374 - DNA, 15 bp, Homo sapiens
aattttatttaagtg

SEQ ID NO: 689375 - DNA, 15 bp, Homo sapiens
attttatttaagtgg

SEQ ID NO: 689376 - DNA, 15 bp, Homo sapiens
ttttatttaagtgga

SEQ ID NO: 689377 - DNA, 15 bp, Homo sapiens
tttatttaagtggaa

SEQ ID NO: 689378 - DNA, 15 bp, Homo sapiens
ttatttaagtggaaa

SEQ ID NO: 689379 - DNA, 15 bp, Homo sapiens
tatttaagtggaaat

SEQ ID NO: 689380 - DNA, 15 bp, Homo sapiens
atttaagtggaaata

SEQ ID NO: 689381 - DNA, 15 bp, Homo sapiens
tttaagtggaaataa

SEQ ID NO: 689382 - DNA, 15 bp, Homo sapiens
ttaagtggaaataaa

SEQ ID NO: 689383 - DNA, 15 bp, Homo sapiens
taagtggaaataaag

SEQ ID NO: 689384 - DNA, 15 bp, Homo sapiens
aagtggaaataaagt

SEQ ID NO: 689385 - DNA, 15 bp, Homo sapiens
agtggaaataaagtt

SEQ ID NO: 689386 - DNA, 15 bp, Homo sapiens
gtggaaataaagttt

SEQ ID NO: 689387 - DNA, 15 bp, Homo sapiens
tggaaataaagtttt

SEQ ID NO: 689388 - DNA, 15 bp, Homo sapiens
ggaaataaagttttt

SEQ ID NO: 689389 - DNA, 15 bp, Homo sapiens
gaaataaagttttta

SEQ ID NO: 689390 - DNA, 15 bp, Homo sapiens
aaataaagtttttag

SEQ ID NO: 689391 - DNA, 15 bp, Homo sapiens
aataaagtttttaga

SEQ ID NO: 689392 - DNA, 15 bp, Homo sapiens
ataaagtttttagaa

SEQ ID NO: 689393 - DNA, 15 bp, Homo sapiens
taaagtttttagaag

SEQ ID NO: 689394 - DNA, 15 bp, Homo sapiens
aaagtttttagaagg

SEQ ID NO: 689395 - DNA, 15 bp, Homo sapiens
aagtttttagaagga

SEQ ID NO: 689396 - DNA, 15 bp, Homo sapiens
agtttttagaaggaa

SEQ ID NO: 689397 - DNA, 15 bp, Homo sapiens
gtttttagaaggaat

SEQ ID NO: 689398 - DNA, 15 bp, Homo sapiens
tttttagaaggaata

SEQ ID NO: 689399 - DNA, 15 bp, Homo sapiens
ttttagaaggaataa

SEQ ID NO: 689400 - DNA, 15 bp, Homo sapiens
tttagaaggaataat

SEQ ID NO: 689401 - DNA, 15 bp, Homo sapiens
ttagaaggaataatg

SEQ ID NO: 689402 - DNA, 15 bp, Homo sapiens
tagaaggaataatgc

SEQ ID NO: 689403 - DNA, 15 bp, Homo sapiens
agaaggaataatgca

SEQ ID NO: 689404 - DNA, 15 bp, Homo sapiens
gaaggaataatgcat

SEQ ID NO: 689405 - DNA, 15 bp, Homo sapiens
aaggaataatgcatt

SEQ ID NO: 689406 - DNA, 15 bp, Homo sapiens
aggaataatgcattg

SEQ ID NO: 689407 - DNA, 15 bp, Homo sapiens
ggaataatgcattga

SEQ ID NO: 689408 - DNA, 15 bp, Homo sapiens
gaataatgcattgaa

SEQ ID NO: 689409 - DNA, 15 bp, Homo sapiens
aataatgcattgaaa

SEQ ID NO: 689410 - DNA, 15 bp, Homo sapiens
ataatgcattgaaaa

SEQ ID NO: 689411 - DNA, 15 bp, Homo sapiens
taatgcattgaaaaa

SEQ ID NO: 689412 - DNA, 15 bp, Homo sapiens
aatgcattgaaaaac

SEQ ID NO: 689413 - DNA, 15 bp, Homo sapiens
atgcattgaaaaact

SEQ ID NO: 689414 - DNA, 15 bp, Homo sapiens
tgcattgaaaaactt

SEQ ID NO: 689415 - DNA, 15 bp, Homo sapiens
gcattgaaaaacttg

SEQ ID NO: 689416 - DNA, 15 bp, Homo sapiens
cattgaaaaacttga

SEQ ID NO: 689417 - DNA, 15 bp, Homo sapiens
attgaaaaacttgag

SEQ ID NO: 689418 - DNA, 15 bp, Homo sapiens
ttgaaaaacttgagt

SEQ ID NO: 689419 - DNA, 15 bp, Homo sapiens
tgaaaaacttgagtt

SEQ ID NO: 689420 - DNA, 15 bp, Homo sapiens
gaaaaacttgagttt

SEQ ID NO: 689421 - DNA, 15 bp, Homo sapiens
aaaaacttgagtttt

SEQ ID NO: 689422 - DNA, 15 bp, Homo sapiens
aaaacttgagtttta

SEQ ID NO: 689423 - DNA, 15 bp, Homo sapiens
aaacttgagttttaa

SEQ ID NO: 689424 - DNA, 15 bp, Homo sapiens
aacttgagttttaat

SEQ ID NO: 689425 - DNA, 15 bp, Homo sapiens
acttgagttttaatg

SEQ ID NO: 689426 - DNA, 15 bp, Homo sapiens
cttgagttttaatgc

SEQ ID NO: 689427 - DNA, 15 bp, Homo sapiens
ttgagttttaatgct

SEQ ID NO: 689428 - DNA, 15 bp, Homo sapiens
tgagttttaatgctt

SEQ ID NO: 689429 - DNA, 15 bp, Homo sapiens
gagttttaatgcttt

SEQ ID NO: 689430 - DNA, 15 bp, Homo sapiens
agttttaatgctttt

SEQ ID NO: 689431 - DNA, 15 bp, Homo sapiens
gttttaatgcttttt

SEQ ID NO: 689432 - DNA, 15 bp, Homo sapiens
ttttaatgcttttta

SEQ ID NO: 689433 - DNA, 15 bp, Homo sapiens
tttaatgctttttaa

SEQ ID NO: 689434 - DNA, 15 bp, Homo sapiens
ttaatgctttttaat

SEQ ID NO: 689435 - DNA, 15 bp, Homo sapiens
taatgctttttaata

SEQ ID NO: 689436 - DNA, 15 bp, Homo sapiens
aatgctttttaatac

SEQ ID NO: 689437 - DNA, 15 bp, Homo sapiens
atgctttttaatact

SEQ ID NO: 689438 - DNA, 15 bp, Homo sapiens
tgctttttaatactg

SEQ ID NO: 689439 - DNA, 15 bp, Homo sapiens
gctttttaatactga

SEQ ID NO: 689440 - DNA, 15 bp, Homo sapiens
ctttttaatactgaa

SEQ ID NO: 689441 - DNA, 15 bp, Homo sapiens
tttttaatactgaac

SEQ ID NO: 689442 - DNA, 15 bp, Homo sapiens
ttttaatactgaaca

SEQ ID NO: 689443 - DNA, 15 bp, Homo sapiens
tttaatactgaacaa

SEQ ID NO: 689444 - DNA, 15 bp, Homo sapiens
ttaatactgaacaac

SEQ ID NO: 689445 - DNA, 15 bp, Homo sapiens
taatactgaacaact

SEQ ID NO: 689446 - DNA, 15 bp, Homo sapiens
aatactgaacaactt

SEQ ID NO: 689447 - DNA, 15 bp, Homo sapiens
atactgaacaacttg

SEQ ID NO: 689448 - DNA, 15 bp, Homo sapiens
tactgaacaacttgg

SEQ ID NO: 689449 - DNA, 15 bp, Homo sapiens
actgaacaacttggt

SEQ ID NO: 689450 - DNA, 15 bp, Homo sapiens
ctgaacaacttggtt

SEQ ID NO: 689451 - DNA, 15 bp, Homo sapiens
tgaacaacttggtta

SEQ ID NO: 689452 - DNA, 15 bp, Homo sapiens
gaacaacttggttat

SEQ ID NO: 689453 - DNA, 15 bp, Homo sapiens
aacaacttggttatc

SEQ ID NO: 689454 - DNA, 15 bp, Homo sapiens
acaacttggttatca

SEQ ID NO: 689455 - DNA, 15 bp, Homo sapiens
caacttggttatcaa

SEQ ID NO: 689456 - DNA, 15 bp, Homo sapiens
aacttggttatcaat

SEQ ID NO: 689457 - DNA, 15 bp, Homo sapiens
acttggttatcaata

SEQ ID NO: 689458 - DNA, 15 bp, Homo sapiens
cttggttatcaatac

SEQ ID NO: 689459 - DNA, 15 bp, Homo sapiens
ttggttatcaatacc

SEQ ID NO: 689460 - DNA, 15 bp, Homo sapiens
tggttatcaatacca

SEQ ID NO: 689461 - DNA, 15 bp, Homo sapiens
ggttatcaataccac

SEQ ID NO: 689462 - DNA, 15 bp, Homo sapiens
gttatcaataccacc

SEQ ID NO: 689463 - DNA, 15 bp, Homo sapiens
ttatcaataccacca

SEQ ID NO: 689464 - DNA, 15 bp, Homo sapiens
tatcaataccaccag

SEQ ID NO: 689465 - DNA, 15 bp, Homo sapiens
atcaataccaccagg

SEQ ID NO: 689466 - DNA, 15 bp, Homo sapiens
tcaataccaccaggg

SEQ ID NO: 689467 - DNA, 15 bp, Homo sapiens
caataccaccaggga

SEQ ID NO: 689468 - DNA, 15 bp, Homo sapiens
aataccaccagggag

SEQ ID NO: 689469 - DNA, 15 bp, Homo sapiens
ataccaccagggaga

SEQ ID NO: 689470 - DNA, 15 bp, Homo sapiens
taccaccagggagaa

SEQ ID NO: 689471 - DNA, 15 bp, Homo sapiens
accaccagggagaaa

SEQ ID NO: 689472 - DNA, 15 bp, Homo sapiens
ccaccagggagaaag

SEQ ID NO: 689473 - DNA, 15 bp, Homo sapiens
caccagggagaaagc

SEQ ID NO: 689474 - DNA, 15 bp, Homo sapiens
accagggagaaagca

SEQ ID NO: 689475 - DNA, 15 bp, Homo sapiens
ccagggagaaagcat

SEQ ID NO: 689476 - DNA, 15 bp, Homo sapiens
cagggagaaagcatc

SEQ ID NO: 689477 - DNA, 15 bp, Homo sapiens
agggagaaagcatct

SEQ ID NO: 689478 - DNA, 15 bp, Homo sapiens
gggagaaagcatctg

SEQ ID NO: 689479 - DNA, 15 bp, Homo sapiens
ggagaaagcatctga

SEQ ID NO: 689480 - DNA, 15 bp, Homo sapiens
gagaaagcatctgac

SEQ ID NO: 689481 - DNA, 15 bp, Homo sapiens
agaaagcatctgact

SEQ ID NO: 689482 - DNA, 15 bp, Homo sapiens
gaaagcatctgactt

SEQ ID NO: 689483 - DNA, 15 bp, Homo sapiens
aaagcatctgacttt

SEQ ID NO: 689484 - DNA, 15 bp, Homo sapiens
aagcatctgactttc

SEQ ID NO: 689485 - DNA, 15 bp, Homo sapiens
agcatctgactttca

SEQ ID NO: 689486 - DNA, 15 bp, Homo sapiens
gcatctgactttcac

SEQ ID NO: 689487 - DNA, 15 bp, Homo sapiens
catctgactttcact

SEQ ID NO: 689488 - DNA, 15 bp, Homo sapiens
atctgactttcactt

SEQ ID NO: 689489 - DNA, 15 bp, Homo sapiens
tctgactttcacttt

SEQ ID NO: 689490 - DNA, 15 bp, Homo sapiens
ctgactttcactttt

SEQ ID NO: 689491 - DNA, 15 bp, Homo sapiens
tgactttcactttta

SEQ ID NO: 689492 - DNA, 15 bp, Homo sapiens
gactttcacttttaa

SEQ ID NO: 689493 - DNA, 15 bp, Homo sapiens
actttcacttttaaa

SEQ ID NO: 689494 - DNA, 15 bp, Homo sapiens
ctttcacttttaaaa

SEQ ID NO: 689495 - DNA, 15 bp, Homo sapiens
tttcacttttaaaaa

SEQ ID NO: 689496 - DNA, 15 bp, Homo sapiens
ttcacttttaaaaaa

SEQ ID NO: 689497 - DNA, 15 bp, Homo sapiens
tcacttttaaaaaaa

SEQ ID NO: 689498 - DNA, 15 bp, Homo sapiens
cacttttaaaaaaag

SEQ ID NO: 689499 - DNA, 15 bp, Homo sapiens
acttttaaaaaaaga

SEQ ID NO: 689500 - DNA, 15 bp, Homo sapiens
cttttaaaaaaagac

SEQ ID NO: 689501 - DNA, 15 bp, Homo sapiens
ttttaaaaaaagact

SEQ ID NO: 689502 - DNA, 15 bp, Homo sapiens
tttaaaaaaagactt

SEQ ID NO: 689503 - DNA, 15 bp, Homo sapiens
ttaaaaaaagactta

SEQ ID NO: 689504 - DNA, 15 bp, Homo sapiens
taaaaaaagacttaa

SEQ ID NO: 689505 - DNA, 15 bp, Homo sapiens
aaaaaaagacttaat

SEQ ID NO: 689506 - DNA, 15 bp, Homo sapiens
aaaaaagacttaatg

SEQ ID NO: 689507 - DNA, 15 bp, Homo sapiens
aaaaagacttaatga

SEQ ID NO: 689508 - DNA, 15 bp, Homo sapiens
aaaagacttaatgat

SEQ ID NO: 689509 - DNA, 15 bp, Homo sapiens
aaagacttaatgatt

SEQ ID NO: 689510 - DNA, 15 bp, Homo sapiens
aagacttaatgattg

SEQ ID NO: 689511 - DNA, 15 bp, Homo sapiens
agacttaatgattgg

SEQ ID NO: 689512 - DNA, 15 bp, Homo sapiens
gacttaatgattggt

SEQ ID NO: 689513 - DNA, 15 bp, Homo sapiens
acttaatgattggta

SEQ ID NO: 689514 - DNA, 15 bp, Homo sapiens
gtaaataagtatatc

SEQ ID NO: 689515 - DNA, 15 bp, Homo sapiens
taaataagtatatct

SEQ ID NO: 689516 - DNA, 15 bp, Homo sapiens
aaataagtatatctg

SEQ ID NO: 689517 - DNA, 15 bp, Homo sapiens
aataagtatatctgt

SEQ ID NO: 689518 - DNA, 15 bp, Homo sapiens
ataagtatatctgtt

SEQ ID NO: 689519 - DNA, 15 bp, Homo sapiens
taagtatatctgttc

SEQ ID NO: 689520 - DNA, 15 bp, Homo sapiens
aagtatatctgttct

SEQ ID NO: 689521 - DNA, 15 bp, Homo sapiens
agtatatctgttcta

SEQ ID NO: 689522 - DNA, 15 bp, Homo sapiens
gtatatctgttctat

SEQ ID NO: 689523 - DNA, 15 bp, Homo sapiens
tatatctgttctata

SEQ ID NO: 689524 - DNA, 15 bp, Homo sapiens
atatctgttctataa

SEQ ID NO: 689525 - DNA, 15 bp, Homo sapiens
tatctgttctataac

SEQ ID NO: 689526 - DNA, 15 bp, Homo sapiens
atctgttctataact

SEQ ID NO: 689527 - DNA, 15 bp, Homo sapiens
tctgttctataacta

SEQ ID NO: 689528 - DNA, 15 bp, Homo sapiens
ctgttctataactat

SEQ ID NO: 689529 - DNA, 15 bp, Homo sapiens
tgttctataactata

SEQ ID NO: 689530 - DNA, 15 bp, Homo sapiens
gttctataactataa

SEQ ID NO: 689531 - DNA, 15 bp, Homo sapiens
ttctataactataaa

SEQ ID NO: 689532 - DNA, 15 bp, Homo sapiens
tctataactataaac

SEQ ID NO: 689533 - DNA, 15 bp, Homo sapiens
ctataactataaact

SEQ ID NO: 689534 - DNA, 15 bp, Homo sapiens
tataactataaactt

SEQ ID NO: 689535 - DNA, 15 bp, Homo sapiens
ataactataaactta

SEQ ID NO: 689536 - DNA, 15 bp, Homo sapiens
taactataaacttat

SEQ ID NO: 689537 - DNA, 15 bp, Homo sapiens
aactataaacttatt

SEQ ID NO: 689538 - DNA, 15 bp, Homo sapiens
actataaacttattg

SEQ ID NO: 689539 - DNA, 15 bp, Homo sapiens
ctataaacttattga

SEQ ID NO: 689540 - DNA, 15 bp, Homo sapiens
tataaacttattgat

SEQ ID NO: 689541 - DNA, 15 bp, Homo sapiens
ataaacttattgatt

SEQ ID NO: 689542 - DNA, 15 bp, Homo sapiens
taaacttattgattg

SEQ ID NO: 689543 - DNA, 15 bp, Homo sapiens
aaacttattgattgt

SEQ ID NO: 689544 - DNA, 15 bp, Homo sapiens
aacttattgattgtg

SEQ ID NO: 689545 - DNA, 15 bp, Homo sapiens
acttattgattgtga

SEQ ID NO: 689546 - DNA, 15 bp, Homo sapiens
cttattgattgtgaa

SEQ ID NO: 689547 - DNA, 15 bp, Homo sapiens
ttattgattgtgaat

SEQ ID NO: 689548 - DNA, 15 bp, Homo sapiens
tattgattgtgaata

SEQ ID NO: 689549 - DNA, 15 bp, Homo sapiens
attgattgtgaatac

SEQ ID NO: 689550 - DNA, 15 bp, Homo sapiens
ttgattgtgaataca

SEQ ID NO: 689551 - DNA, 15 bp, Homo sapiens
tgattgtgaatacat

SEQ ID NO: 689552 - DNA, 15 bp, Homo sapiens
gattgtgaatacata

SEQ ID NO: 689553 - DNA, 15 bp, Homo sapiens
attgtgaatacatat

SEQ ID NO: 689554 - DNA, 15 bp, Homo sapiens
ttgtgaatacatatt

SEQ ID NO: 689555 - DNA, 15 bp, Homo sapiens
tgtgaatacatattt

SEQ ID NO: 689556 - DNA, 15 bp, Homo sapiens
gtgaatacatatttt

SEQ ID NO: 689557 - DNA, 15 bp, Homo sapiens
tgaatacatattttc

SEQ ID NO: 689558 - DNA, 15 bp, Homo sapiens
gaatacatattttct

SEQ ID NO: 689559 - DNA, 15 bp, Homo sapiens
aatacatattttctt

SEQ ID NO: 689560 - DNA, 15 bp, Homo sapiens
atacatattttctta

SEQ ID NO: 689561 - DNA, 15 bp, Homo sapiens
tacatattttcttaa

SEQ ID NO: 689562 - DNA, 15 bp, Homo sapiens
acatattttcttaaa

SEQ ID NO: 689563 - DNA, 15 bp, Homo sapiens
catattttcttaaag

SEQ ID NO: 689564 - DNA, 15 bp, Homo sapiens
atattttcttaaaga

SEQ ID NO: 689565 - DNA, 15 bp, Homo sapiens
tattttcttaaagat

SEQ ID NO: 689566 - DNA, 15 bp, Homo sapiens
attttcttaaagatt

SEQ ID NO: 689567 - DNA, 15 bp, Homo sapiens
ttttcttaaagattt

SEQ ID NO: 689568 - DNA, 15 bp, Homo sapiens
tttcttaaagattta

SEQ ID NO: 689569 - DNA, 15 bp, Homo sapiens
ttcttaaagatttaa

SEQ ID NO: 689570 - DNA, 15 bp, Homo sapiens
tcttaaagatttaag

SEQ ID NO: 689571 - DNA, 15 bp, Homo sapiens
cttaaagatttaagt

SEQ ID NO: 689572 - DNA, 15 bp, Homo sapiens
ttaaagatttaagta

SEQ ID NO: 689573 - DNA, 15 bp, Homo sapiens
taaagatttaagtaa

SEQ ID NO: 689574 - DNA, 15 bp, Homo sapiens
aaagatttaagtaaa

SEQ ID NO: 689575 - DNA, 15 bp, Homo sapiens
aagatttaagtaaaa

SEQ ID NO: 689576 - DNA, 15 bp, Homo sapiens
agatttaagtaaaat

SEQ ID NO: 689577 - DNA, 15 bp, Homo sapiens
gatttaagtaaaatg

SEQ ID NO: 689578 - DNA, 15 bp, Homo sapiens
atttaagtaaaatgt

SEQ ID NO: 689579 - DNA, 15 bp, Homo sapiens
tttaagtaaaatgta

SEQ ID NO: 689580 - DNA, 15 bp, Homo sapiens
ttaagtaaaatgtaa

SEQ ID NO: 689581 - DNA, 15 bp, Homo sapiens
taagtaaaatgtaat

SEQ ID NO: 689582 - DNA, 15 bp, Homo sapiens
aagtaaaatgtaatt

SEQ ID NO: 689583 - DNA, 15 bp, Homo sapiens
agtaaaatgtaattt

SEQ ID NO: 689584 - DNA, 15 bp, Homo sapiens
gtaaaatgtaatttc

SEQ ID NO: 689585 - DNA, 15 bp, Homo sapiens
taaaatgtaatttct

SEQ ID NO: 689586 - DNA, 15 bp, Homo sapiens
aaaatgtaatttctt

SEQ ID NO: 689587 - DNA, 15 bp, Homo sapiens
aaatgtaatttctta

SEQ ID NO: 689588 - DNA, 15 bp, Homo sapiens
aatgtaatttcttat

SEQ ID NO: 689589 - DNA, 15 bp, Homo sapiens
atgtaatttcttata

SEQ ID NO: 689590 - DNA, 15 bp, Homo sapiens
tgtaatttcttataa

SEQ ID NO: 689591 - DNA, 15 bp, Homo sapiens
gtaatttcttataaa

SEQ ID NO: 689592 - DNA, 15 bp, Homo sapiens
taatttcttataaac

SEQ ID NO: 689593 - DNA, 15 bp, Homo sapiens
aatttcttataaacc

SEQ ID NO: 689594 - DNA, 15 bp, Homo sapiens
atttcttataaacca

SEQ ID NO: 689595 - DNA, 15 bp, Homo sapiens
tttcttataaaccac

SEQ ID NO: 689596 - DNA, 15 bp, Homo sapiens
ttcttataaaccaca

SEQ ID NO: 689597 - DNA, 15 bp, Homo sapiens
tcttataaaccacag

SEQ ID NO: 689598 - DNA, 15 bp, Homo sapiens
cttataaaccacagt

SEQ ID NO: 689599 - DNA, 15 bp, Homo sapiens
ttataaaccacagtc

SEQ ID NO: 689600 - DNA, 15 bp, Homo sapiens
tataaaccacagtct

SEQ ID NO: 689601 - DNA, 15 bp, Homo sapiens
ataaaccacagtctt

SEQ ID NO: 689602 - DNA, 15 bp, Homo sapiens
taaaccacagtctta

SEQ ID NO: 689603 - DNA, 15 bp, Homo sapiens
aaaccacagtcttat

SEQ ID NO: 689604 - DNA, 15 bp, Homo sapiens
aaccacagtcttatt

SEQ ID NO: 689605 - DNA, 15 bp, Homo sapiens
accacagtcttattt

SEQ ID NO: 689606 - DNA, 15 bp, Homo sapiens
ccacagtcttatttg

SEQ ID NO: 689607 - DNA, 15 bp, Homo sapiens
cacagtcttatttga

SEQ ID NO: 689608 - DNA, 15 bp, Homo sapiens
acagtcttatttgag

SEQ ID NO: 689609 - DNA, 15 bp, Homo sapiens
cagtcttatttgagg

SEQ ID NO: 689610 - DNA, 15 bp, Homo sapiens
agtcttatttgaggg

SEQ ID NO: 689611 - DNA, 15 bp, Homo sapiens
gtcttatttgaggga

SEQ ID NO: 689612 - DNA, 15 bp, Homo sapiens
tcttatttgagggaa

SEQ ID NO: 689613 - DNA, 15 bp, Homo sapiens
cttatttgagggaat

SEQ ID NO: 689614 - DNA, 15 bp, Homo sapiens
ttatttgagggaatg

SEQ ID NO: 689615 - DNA, 15 bp, Homo sapiens
tatttgagggaatgt

SEQ ID NO: 689616 - DNA, 15 bp, Homo sapiens
atttgagggaatgta

SEQ ID NO: 689617 - DNA, 15 bp, Homo sapiens
tttgagggaatgtag

SEQ ID NO: 689618 - DNA, 15 bp, Homo sapiens
ttgagggaatgtaga

SEQ ID NO: 689619 - DNA, 15 bp, Homo sapiens
tgagggaatgtagag

SEQ ID NO: 689620 - DNA, 15 bp, Homo sapiens
gagggaatgtagaga

SEQ ID NO: 689621 - DNA, 15 bp, Homo sapiens
agggaatgtagagac

SEQ ID NO: 689622 - DNA, 15 bp, Homo sapiens
gggaatgtagagaca

SEQ ID NO: 689623 - DNA, 15 bp, Homo sapiens
ggaatgtagagacaa

SEQ ID NO: 689624 - DNA, 15 bp, Homo sapiens
gaatgtagagacaag

SEQ ID NO: 689625 - DNA, 15 bp, Homo sapiens
aatgtagagacaagt

SEQ ID NO: 689626 - DNA, 15 bp, Homo sapiens
atgtagagacaagtg

SEQ ID NO: 689627 - DNA, 15 bp, Homo sapiens
tgtagagacaagtgg

SEQ ID NO: 689628 - DNA, 15 bp, Homo sapiens
gtagagacaagtggg

SEQ ID NO: 689629 - DNA, 15 bp, Homo sapiens
tagagacaagtggga

SEQ ID NO: 689630 - DNA, 15 bp, Homo sapiens
agagacaagtgggag

SEQ ID NO: 689631 - DNA, 15 bp, Homo sapiens
gagacaagtgggagg

SEQ ID NO: 689632 - DNA, 15 bp, Homo sapiens
agacaagtgggaggc

SEQ ID NO: 689633 - DNA, 15 bp, Homo sapiens
gacaagtgggaggca

SEQ ID NO: 689634 - DNA, 15 bp, Homo sapiens
acaagtgggaggcag

SEQ ID NO: 689635 - DNA, 15 bp, Homo sapiens
caagtgggaggcagt

SEQ ID NO: 689636 - DNA, 15 bp, Homo sapiens
aagtgggaggcagtg

SEQ ID NO: 689637 - DNA, 15 bp, Homo sapiens
agtgggaggcagtgt

SEQ ID NO: 689638 - DNA, 15 bp, Homo sapiens
gtgggaggcagtgta

SEQ ID NO: 689639 - DNA, 15 bp, Homo sapiens
tgggaggcagtgtat

SEQ ID NO: 689640 - DNA, 15 bp, Homo sapiens
gggaggcagtgtatt

SEQ ID NO: 689641 - DNA, 15 bp, Homo sapiens
ggaggcagtgtattt

SEQ ID NO: 689642 - DNA, 15 bp, Homo sapiens
gaggcagtgtatttg

SEQ ID NO: 689643 - DNA, 15 bp, Homo sapiens
aggcagtgtatttga

SEQ ID NO: 689644 - DNA, 15 bp, Homo sapiens
ggcagtgtatttgaa

SEQ ID NO: 689645 - DNA, 15 bp, Homo sapiens
gcagtgtatttgaag

SEQ ID NO: 689646 - DNA, 15 bp, Homo sapiens
cagtgtatttgaaga

SEQ ID NO: 689647 - DNA, 15 bp, Homo sapiens
agtgtatttgaagat

SEQ ID NO: 689648 - DNA, 15 bp, Homo sapiens
gtgtatttgaagata

SEQ ID NO: 689649 - DNA, 15 bp, Homo sapiens
tgtatttgaagatac

SEQ ID NO: 689650 - DNA, 15 bp, Homo sapiens
gtatttgaagataca

SEQ ID NO: 689651 - DNA, 15 bp, Homo sapiens
tatttgaagatacat

SEQ ID NO: 689652 - DNA, 15 bp, Homo sapiens
atttgaagatacatt

SEQ ID NO: 689653 - DNA, 15 bp, Homo sapiens
tttgaagatacattt

SEQ ID NO: 689654 - DNA, 15 bp, Homo sapiens
ttgaagatacattta

SEQ ID NO: 689655 - DNA, 15 bp, Homo sapiens
tgaagatacatttaa

SEQ ID NO: 689656 - DNA, 15 bp, Homo sapiens
gaagatacatttaac

SEQ ID NO: 689657 - DNA, 15 bp, Homo sapiens
aagatacatttaact

SEQ ID NO: 689658 - DNA, 15 bp, Homo sapiens
agatacatttaactt

SEQ ID NO: 689659 - DNA, 15 bp, Homo sapiens
gatacatttaacttg

SEQ ID NO: 689660 - DNA, 15 bp, Homo sapiens
atacatttaacttgg

SEQ ID NO: 689661 - DNA, 15 bp, Homo sapiens
tacatttaacttggg

SEQ ID NO: 689662 - DNA, 15 bp, Homo sapiens
acatttaacttggga

SEQ ID NO: 689663 - DNA, 15 bp, Homo sapiens
catttaacttgggag

SEQ ID NO: 689664 - DNA, 15 bp, Homo sapiens
atttaacttgggaga

SEQ ID NO: 689665 - DNA, 15 bp, Homo sapiens
tttaacttgggagat

SEQ ID NO: 689666 - DNA, 15 bp, Homo sapiens
ttaacttgggagatg

SEQ ID NO: 689667 - DNA, 15 bp, Homo sapiens
taacttgggagatgg

SEQ ID NO: 689668 - DNA, 15 bp, Homo sapiens
aacttgggagatgga

SEQ ID NO: 689669 - DNA, 15 bp, Homo sapiens
acttgggagatggaa

SEQ ID NO: 689670 - DNA, 15 bp, Homo sapiens
cttgggagatggaaa

SEQ ID NO: 689671 - DNA, 15 bp, Homo sapiens
ttgggagatggaaaa

SEQ ID NO: 689672 - DNA, 15 bp, Homo sapiens
tgggagatggaaaac

SEQ ID NO: 689673 - DNA, 15 bp, Homo sapiens
gggagatggaaaaca

SEQ ID NO: 689674 - DNA, 15 bp, Homo sapiens
ggagatggaaaacat

SEQ ID NO: 689675 - DNA, 15 bp, Homo sapiens
gagatggaaaacatt

SEQ ID NO: 689676 - DNA, 15 bp, Homo sapiens
agatggaaaacattt

SEQ ID NO: 689677 - DNA, 15 bp, Homo sapiens
gatggaaaacatttc

SEQ ID NO: 689678 - DNA, 15 bp, Homo sapiens
atggaaaacatttca

SEQ ID NO: 689679 - DNA, 15 bp, Homo sapiens
tggaaaacatttcat

SEQ ID NO: 689680 - DNA, 15 bp, Homo sapiens
ggaaaacatttcatt

SEQ ID NO: 689681 - DNA, 15 bp, Homo sapiens
gaaaacatttcattt

SEQ ID NO: 689682 - DNA, 15 bp, Homo sapiens
aaaacatttcatttt

SEQ ID NO: 689683 - DNA, 15 bp, Homo sapiens
aaacatttcattttt

SEQ ID NO: 689684 - DNA, 15 bp, Homo sapiens
aacatttcatttttt

SEQ ID NO: 689685 - DNA, 15 bp, Homo sapiens
acatttcattttttc

SEQ ID NO: 689686 - DNA, 15 bp, Homo sapiens
catttcattttttct

SEQ ID NO: 689687 - DNA, 15 bp, Homo sapiens
atttcattttttctt

SEQ ID NO: 689688 - DNA, 15 bp, Homo sapiens
ttcattttttctttt

SEQ ID NO: 689689 - DNA, 15 bp, Homo sapiens
tcattttttcttttt

SEQ ID NO: 689690 - DNA, 15 bp, Homo sapiens
cattttttctttttt

SEQ ID NO: 689691 - DNA, 15 bp, Homo sapiens
attttttcttttttt

SEQ ID NO: 689692 - DNA, 15 bp, Homo sapiens
ttttttctttttttc

SEQ ID NO: 689693 - DNA, 15 bp, Homo sapiens
tttttctttttttct

SEQ ID NO: 689694 - DNA, 15 bp, Homo sapiens
ttttctttttttctc

SEQ ID NO: 689695 - DNA, 15 bp, Homo sapiens
tttctttttttctcc

SEQ ID NO: 689696 - DNA, 15 bp, Homo sapiens
ttctttttttctccc

SEQ ID NO: 689697 - DNA, 15 bp, Homo sapiens
tctttttttctccct

SEQ ID NO: 689698 - DNA, 15 bp, Homo sapiens
ctttttttctccctt

SEQ ID NO: 689699 - DNA, 15 bp, Homo sapiens
tttttttctcccttc

SEQ ID NO: 689700 - DNA, 15 bp, Homo sapiens
ttttttctcccttca

SEQ ID NO: 689701 - DNA, 15 bp, Homo sapiens
tttttctcccttcat

SEQ ID NO: 689702 - DNA, 15 bp, Homo sapiens
ttttctcccttcatt

SEQ ID NO: 689703 - DNA, 15 bp, Homo sapiens
tttctcccttcattg

SEQ ID NO: 689704 - DNA, 15 bp, Homo sapiens
ttctcccttcattgc

SEQ ID NO: 689705 - DNA, 15 bp, Homo sapiens
tctcccttcattgct

SEQ ID NO: 689706 - DNA, 15 bp, Homo sapiens
ctcccttcattgctt

SEQ ID NO: 689707 - DNA, 15 bp, Homo sapiens
tcccttcattgctta

SEQ ID NO: 689708 - DNA, 15 bp, Homo sapiens
cccttcattgcttaa

SEQ ID NO: 689709 - DNA, 15 bp, Homo sapiens
ccttcattgcttaac

SEQ ID NO: 689710 - DNA, 15 bp, Homo sapiens
cttcattgcttaaca

SEQ ID NO: 689711 - DNA, 15 bp, Homo sapiens
ttcattgcttaacac

SEQ ID NO: 689712 - DNA, 15 bp, Homo sapiens
tcattgcttaacaca

SEQ ID NO: 689713 - DNA, 15 bp, Homo sapiens
cattgcttaacacat

SEQ ID NO: 689714 - DNA, 15 bp, Homo sapiens
attgcttaacacatt

SEQ ID NO: 689715 - DNA, 15 bp, Homo sapiens
ttgcttaacacattt

SEQ ID NO: 689716 - DNA, 15 bp, Homo sapiens
tgcttaacacatttt

SEQ ID NO: 689717 - DNA, 15 bp, Homo sapiens
gcttaacacattttc

SEQ ID NO: 689718 - DNA, 15 bp, Homo sapiens
cttaacacattttcc

SEQ ID NO: 689719 - DNA, 15 bp, Homo sapiens
ttaacacattttcct

SEQ ID NO: 689720 - DNA, 15 bp, Homo sapiens
taacacattttccta

SEQ ID NO: 689721 - DNA, 15 bp, Homo sapiens
aacacattttcctat

SEQ ID NO: 689722 - DNA, 15 bp, Homo sapiens
acacattttcctatt

SEQ ID NO: 689723 - DNA, 15 bp, Homo sapiens
cacattttcctattt

SEQ ID NO: 689724 - DNA, 15 bp, Homo sapiens
acattttcctatttt

SEQ ID NO: 689725 - DNA, 15 bp, Homo sapiens
cattttcctattttt

SEQ ID NO: 689726 - DNA, 15 bp, Homo sapiens
attttcctattttta

SEQ ID NO: 689727 - DNA, 15 bp, Homo sapiens
ttttcctatttttat

SEQ ID NO: 689728 - DNA, 15 bp, Homo sapiens
tttcctatttttatc

SEQ ID NO: 689729 - DNA, 15 bp, Homo sapiens
ttcctatttttatcc

SEQ ID NO: 689730 - DNA, 15 bp, Homo sapiens
tcctatttttatccc

SEQ ID NO: 689731 - DNA, 15 bp, Homo sapiens
cctatttttatcccc

SEQ ID NO: 689732 - DNA, 15 bp, Homo sapiens
ctatttttatcccct

SEQ ID NO: 689733 - DNA, 15 bp, Homo sapiens
tatttttatcccctc

SEQ ID NO: 689734 - DNA, 15 bp, Homo sapiens
atttttatcccctct

SEQ ID NO: 689735 - DNA, 15 bp, Homo sapiens
tttttatcccctcta

SEQ ID NO: 689736 - DNA, 15 bp, Homo sapiens
ttttatcccctctag

SEQ ID NO: 689737 - DNA, 15 bp, Homo sapiens
tttatcccctctagg

SEQ ID NO: 689738 - DNA, 15 bp, Homo sapiens
ttatcccctctagga

SEQ ID NO: 689739 - DNA, 15 bp, Homo sapiens
tatcccctctaggac

SEQ ID NO: 689740 - DNA, 15 bp, Homo sapiens
atcccctctaggact

SEQ ID NO: 689741 - DNA, 15 bp, Homo sapiens
tcccctctaggactg

SEQ ID NO: 689742 - DNA, 15 bp, Homo sapiens
cccctctaggactgt

SEQ ID NO: 689743 - DNA, 15 bp, Homo sapiens
ccctctaggactgtt

SEQ ID NO: 689744 - DNA, 15 bp, Homo sapiens
cctctaggactgtta

SEQ ID NO: 689745 - DNA, 15 bp, Homo sapiens
ctctaggactgttat

SEQ ID NO: 689746 - DNA, 15 bp, Homo sapiens
tctaggactgttatg

SEQ ID NO: 689747 - DNA, 15 bp, Homo sapiens
ctaggactgttatga

SEQ ID NO: 689748 - DNA, 15 bp, Homo sapiens
taggactgttatgaa

SEQ ID NO: 689749 - DNA, 15 bp, Homo sapiens
aggactgttatgaac

SEQ ID NO: 689750 - DNA, 15 bp, Homo sapiens
ggactgttatgaaca

SEQ ID NO: 689751 - DNA, 15 bp, Homo sapiens
gactgttatgaacac

SEQ ID NO: 689752 - DNA, 15 bp, Homo sapiens
actgttatgaacact

SEQ ID NO: 689753 - DNA, 15 bp, Homo sapiens
ctgttatgaacacta

SEQ ID NO: 689754 - DNA, 15 bp, Homo sapiens
tgttatgaacactat

SEQ ID NO: 689755 - DNA, 15 bp, Homo sapiens
gttatgaacactatc

SEQ ID NO: 689756 - DNA, 15 bp, Homo sapiens
ttatgaacactatcc

SEQ ID NO: 689757 - DNA, 15 bp, Homo sapiens
tatgaacactatcca

SEQ ID NO: 689758 - DNA, 15 bp, Homo sapiens
atgaacactatccaa

SEQ ID NO: 689759 - DNA, 15 bp, Homo sapiens
tgaacactatccaac

SEQ ID NO: 689760 - DNA, 15 bp, Homo sapiens
gaacactatccaaca

SEQ ID NO: 689761 - DNA, 15 bp, Homo sapiens
aacactatccaacaa

SEQ ID NO: 689762 - DNA, 15 bp, Homo sapiens
acactatccaacaat

SEQ ID NO: 689763 - DNA, 15 bp, Homo sapiens
cactatccaacaatt

SEQ ID NO: 689764 - DNA, 15 bp, Homo sapiens
actatccaacaatta

SEQ ID NO: 689765 - DNA, 15 bp, Homo sapiens
ctatccaacaattaa

SEQ ID NO: 689766 - DNA, 15 bp, Homo sapiens
tatccaacaattaat

SEQ ID NO: 689767 - DNA, 15 bp, Homo sapiens
atccaacaattaatg

SEQ ID NO: 689768 - DNA, 15 bp, Homo sapiens
tccaacaattaatga

SEQ ID NO: 689769 - DNA, 15 bp, Homo sapiens
ccaacaattaatgat

SEQ ID NO: 689770 - DNA, 15 bp, Homo sapiens
caacaattaatgatg

SEQ ID NO: 689771 - DNA, 15 bp, Homo sapiens
aacaattaatgatga

SEQ ID NO: 689772 - DNA, 15 bp, Homo sapiens
acaattaatgatgat

SEQ ID NO: 689773 - DNA, 15 bp, Homo sapiens
caattaatgatgatt

SEQ ID NO: 689774 - DNA, 15 bp, Homo sapiens
aattaatgatgattt

SEQ ID NO: 689775 - DNA, 15 bp, Homo sapiens
attaatgatgatttt

SEQ ID NO: 689776 - DNA, 15 bp, Homo sapiens
ttaatgatgatttta

SEQ ID NO: 689777 - DNA, 15 bp, Homo sapiens
taatgatgattttaa

SEQ ID NO: 689778 - DNA, 15 bp, Homo sapiens
aatgatgattttaaa

SEQ ID NO: 689779 - DNA, 15 bp, Homo sapiens
atgatgattttaaat

SEQ ID NO: 689780 - DNA, 15 bp, Homo sapiens
tgatgattttaaatt

SEQ ID NO: 689781 - DNA, 15 bp, Homo sapiens
gatgattttaaattc

SEQ ID NO: 689782 - DNA, 15 bp, Homo sapiens
atgattttaaattca

SEQ ID NO: 689783 - DNA, 15 bp, Homo sapiens
tgattttaaattcag

SEQ ID NO: 689784 - DNA, 15 bp, Homo sapiens
gattttaaattcagc

SEQ ID NO: 689785 - DNA, 15 bp, Homo sapiens
attttaaattcagca

SEQ ID NO: 689786 - DNA, 15 bp, Homo sapiens
ttttaaattcagcaa

SEQ ID NO: 689787 - DNA, 15 bp, Homo sapiens
tttaaattcagcaag

SEQ ID NO: 689788 - DNA, 15 bp, Homo sapiens
ttaaattcagcaagt

SEQ ID NO: 689789 - DNA, 15 bp, Homo sapiens
taaattcagcaagtg

SEQ ID NO: 689790 - DNA, 15 bp, Homo sapiens
aaattcagcaagtga

SEQ ID NO: 689791 - DNA, 15 bp, Homo sapiens
aattcagcaagtgat

SEQ ID NO: 689792 - DNA, 15 bp, Homo sapiens
attcagcaagtgatc

SEQ ID NO: 689793 - DNA, 15 bp, Homo sapiens
ttcagcaagtgatca

SEQ ID NO: 689794 - DNA, 15 bp, Homo sapiens
tcagcaagtgatcaa

SEQ ID NO: 689795 - DNA, 15 bp, Homo sapiens
cagcaagtgatcaac

SEQ ID NO: 689796 - DNA, 15 bp, Homo sapiens
agcaagtgatcaacc

SEQ ID NO: 689797 - DNA, 15 bp, Homo sapiens
gcaagtgatcaacct

SEQ ID NO: 689798 - DNA, 15 bp, Homo sapiens
caagtgatcaacctt

SEQ ID NO: 689799 - DNA, 15 bp, Homo sapiens
aagtgatcaaccttc

SEQ ID NO: 689800 - DNA, 15 bp, Homo sapiens
agtgatcaaccttca

SEQ ID NO: 689801 - DNA, 15 bp, Homo sapiens
gtgatcaaccttcag

SEQ ID NO: 689802 - DNA, 15 bp, Homo sapiens
tgatcaaccttcaga

SEQ ID NO: 689803 - DNA, 15 bp, Homo sapiens
gatcaaccttcagaa

SEQ ID NO: 689804 - DNA, 15 bp, Homo sapiens
atcaaccttcagaaa

SEQ ID NO: 689805 - DNA, 15 bp, Homo sapiens
tcaaccttcagaaaa

SEQ ID NO: 689806 - DNA, 15 bp, Homo sapiens
caaccttcagaaaat

SEQ ID NO: 689807 - DNA, 15 bp, Homo sapiens
aaccttcagaaaatc

SEQ ID NO: 689808 - DNA, 15 bp, Homo sapiens
accttcagaaaatct

SEQ ID NO: 689809 - DNA, 15 bp, Homo sapiens
ccttcagaaaatctg

SEQ ID NO: 689810 - DNA, 15 bp, Homo sapiens
cttcagaaaatctga

SEQ ID NO: 689811 - DNA, 15 bp, Homo sapiens
ttcagaaaatctgat

SEQ ID NO: 689812 - DNA, 15 bp, Homo sapiens
tcagaaaatctgatt

SEQ ID NO: 689813 - DNA, 15 bp, Homo sapiens
cagaaaatctgattt

SEQ ID NO: 689814 - DNA, 15 bp, Homo sapiens
agaaaatctgatttc

SEQ ID NO: 689815 - DNA, 15 bp, Homo sapiens
gaaaatctgatttcc

SEQ ID NO: 689816 - DNA, 15 bp, Homo sapiens
aaaatctgatttcct

SEQ ID NO: 689817 - DNA, 15 bp, Homo sapiens
aaatctgatttccta

SEQ ID NO: 689818 - DNA, 15 bp, Homo sapiens
aatctgatttcctat

SEQ ID NO: 689819 - DNA, 15 bp, Homo sapiens
atctgatttcctatt

SEQ ID NO: 689820 - DNA, 15 bp, Homo sapiens
tctgatttcctattt

SEQ ID NO: 689821 - DNA, 15 bp, Homo sapiens
ctgatttcctatttt

SEQ ID NO: 689822 - DNA, 15 bp, Homo sapiens
tgatttcctatttta

SEQ ID NO: 689823 - DNA, 15 bp, Homo sapiens
gatttcctattttaa

SEQ ID NO: 689824 - DNA, 15 bp, Homo sapiens
atttcctattttaac

SEQ ID NO: 689825 - DNA, 15 bp, Homo sapiens
tttcctattttaacg

SEQ ID NO: 689826 - DNA, 15 bp, Homo sapiens
ttcctattttaacgt

SEQ ID NO: 689827 - DNA, 15 bp, Homo sapiens
tcctattttaacgta

SEQ ID NO: 689828 - DNA, 15 bp, Homo sapiens
cctattttaacgtaa

SEQ ID NO: 689829 - DNA, 15 bp, Homo sapiens
ctattttaacgtaag

SEQ ID NO: 689830 - DNA, 15 bp, Homo sapiens
tattttaacgtaagc

SEQ ID NO: 689831 - DNA, 15 bp, Homo sapiens
attttaacgtaagcc

SEQ ID NO: 689832 - DNA, 15 bp, Homo sapiens
ttttaacgtaagcca

SEQ ID NO: 689833 - DNA, 15 bp, Homo sapiens
tttaacgtaagccat

SEQ ID NO: 689834 - DNA, 15 bp, Homo sapiens
ttaacgtaagccata

SEQ ID NO: 689835 - DNA, 15 bp, Homo sapiens
taacgtaagccatat

SEQ ID NO: 689836 - DNA, 15 bp, Homo sapiens
aacgtaagccatata

SEQ ID NO: 689837 - DNA, 15 bp, Homo sapiens
acgtaagccatatat

SEQ ID NO: 689838 - DNA, 15 bp, Homo sapiens
cgtaagccatatatg

SEQ ID NO: 689839 - DNA, 15 bp, Homo sapiens
gtaagccatatatga

SEQ ID NO: 689840 - DNA, 15 bp, Homo sapiens
taagccatatatgaa

SEQ ID NO: 689841 - DNA, 15 bp, Homo sapiens
aagccatatatgaaa

SEQ ID NO: 689842 - DNA, 15 bp, Homo sapiens
agccatatatgaaac

SEQ ID NO: 689843 - DNA, 15 bp, Homo sapiens
gccatatatgaaaca

SEQ ID NO: 689844 - DNA, 15 bp, Homo sapiens
ccatatatgaaacat

SEQ ID NO: 689845 - DNA, 15 bp, Homo sapiens
catatatgaaacatt

SEQ ID NO: 689846 - DNA, 15 bp, Homo sapiens
atatatgaaacatta

SEQ ID NO: 689847 - DNA, 15 bp, Homo sapiens
tatatgaaacattat

SEQ ID NO: 689848 - DNA, 15 bp, Homo sapiens
atatgaaacattatt

SEQ ID NO: 689849 - DNA, 15 bp, Homo sapiens
tatgaaacattattt

SEQ ID NO: 689850 - DNA, 15 bp, Homo sapiens
atgaaacattattta

SEQ ID NO: 689851 - DNA, 15 bp, Homo sapiens
tgaaacattatttat

SEQ ID NO: 689852 - DNA, 15 bp, Homo sapiens
gaaacattatttatt

SEQ ID NO: 689853 - DNA, 15 bp, Homo sapiens
aaacattatttattg

SEQ ID NO: 689854 - DNA, 15 bp, Homo sapiens
aacattatttattgt

SEQ ID NO: 689855 - DNA, 15 bp, Homo sapiens
acattatttattgta

SEQ ID NO: 689856 - DNA, 15 bp, Homo sapiens
cattatttattgtaa

SEQ ID NO: 689857 - DNA, 15 bp, Homo sapiens
attatttattgtaat

SEQ ID NO: 689858 - DNA, 15 bp, Homo sapiens
ttatttattgtaata

SEQ ID NO: 689859 - DNA, 15 bp, Homo sapiens
tatttattgtaatat

SEQ ID NO: 689860 - DNA, 15 bp, Homo sapiens
atttattgtaatatc

SEQ ID NO: 689861 - DNA, 15 bp, Homo sapiens
tttattgtaatatct

SEQ ID NO: 689862 - DNA, 15 bp, Homo sapiens
ttattgtaatatctt

SEQ ID NO: 689863 - DNA, 15 bp, Homo sapiens
tattgtaatatcttg

SEQ ID NO: 689864 - DNA, 15 bp, Homo sapiens
attgtaatatcttgg

SEQ ID NO: 689865 - DNA, 15 bp, Homo sapiens
ttgtaatatcttggc

SEQ ID NO: 689866 - DNA, 15 bp, Homo sapiens
tgtaatatcttggca

SEQ ID NO: 689867 - DNA, 15 bp, Homo sapiens
gtaatatcttggcaa

SEQ ID NO: 689868 - DNA, 15 bp, Homo sapiens
taatatcttggcaaa

SEQ ID NO: 689869 - DNA, 15 bp, Homo sapiens
aatatcttggcaaag

SEQ ID NO: 689870 - DNA, 15 bp, Homo sapiens
atatcttggcaaaga

SEQ ID NO: 689871 - DNA, 15 bp, Homo sapiens
tatcttggcaaagaa

SEQ ID NO: 689872 - DNA, 15 bp, Homo sapiens
atcttggcaaagaaa

SEQ ID NO: 689873 - DNA, 15 bp, Homo sapiens
tcttggcaaagaaac

SEQ ID NO: 689874 - DNA, 15 bp, Homo sapiens
cttggcaaagaaact

SEQ ID NO: 689875 - DNA, 15 bp, Homo sapiens
ttggcaaagaaactt

SEQ ID NO: 689876 - DNA, 15 bp, Homo sapiens
tggcaaagaaacttg

SEQ ID NO: 689877 - DNA, 15 bp, Homo sapiens
ggcaaagaaacttga

SEQ ID NO: 689878 - DNA, 15 bp, Homo sapiens
gcaaagaaacttgaa

SEQ ID NO: 689879 - DNA, 15 bp, Homo sapiens
caaagaaacttgaaa

SEQ ID NO: 689880 - DNA, 15 bp, Homo sapiens
aaagaaacttgaaat

SEQ ID NO: 689881 - DNA, 15 bp, Homo sapiens
aagaaacttgaaatt

SEQ ID NO: 689882 - DNA, 15 bp, Homo sapiens
agaaacttgaaatta

SEQ ID NO: 689883 - DNA, 15 bp, Homo sapiens
gaaacttgaaattaa

SEQ ID NO: 689884 - DNA, 15 bp, Homo sapiens
aaacttgaaattaaa

SEQ ID NO: 689885 - DNA, 15 bp, Homo sapiens
aacttgaaattaaaa

SEQ ID NO: 689886 - DNA, 15 bp, Homo sapiens
acttgaaattaaaag

SEQ ID NO: 689887 - DNA, 15 bp, Homo sapiens
cttgaaattaaaagt

SEQ ID NO: 689888 - DNA, 15 bp, Homo sapiens
ttgaaattaaaagtt

SEQ ID NO: 689889 - DNA, 15 bp, Homo sapiens
tgaaattaaaagtta

SEQ ID NO: 689890 - DNA, 15 bp, Homo sapiens
gaaattaaaagttaa

SEQ ID NO: 689891 - DNA, 15 bp, Homo sapiens
aaattaaaagttaaa

SEQ ID NO: 689892 - DNA, 15 bp, Homo sapiens
aattaaaagttaaag

SEQ ID NO: 689893 - DNA, 15 bp, Homo sapiens
attaaaagttaaagt

SEQ ID NO: 689894 - DNA, 15 bp, Homo sapiens
ttaaaagttaaagta

SEQ ID NO: 689895 - DNA, 15 bp, Homo sapiens
taaaagttaaagtac

SEQ ID NO: 689896 - DNA, 15 bp, Homo sapiens
aaaagttaaagtact

SEQ ID NO: 689897 - DNA, 15 bp, Homo sapiens
aaagttaaagtactg

SEQ ID NO: 689898 - DNA, 15 bp, Homo sapiens
aagttaaagtactga

SEQ ID NO: 689899 - DNA, 15 bp, Homo sapiens
agttaaagtactgag

SEQ ID NO: 689900 - DNA, 15 bp, Homo sapiens
gttaaagtactgagt

SEQ ID NO: 689901 - DNA, 15 bp, Homo sapiens
ttaaagtactgagtt

SEQ ID NO: 689902 - DNA, 15 bp, Homo sapiens
taaagtactgagttc

SEQ ID NO: 689903 - DNA, 15 bp, Homo sapiens
aaagtactgagttct

SEQ ID NO: 689904 - DNA, 15 bp, Homo sapiens
aagtactgagttctt

SEQ ID NO: 689905 - DNA, 15 bp, Homo sapiens
agtactgagttcttt

SEQ ID NO: 689906 - DNA, 15 bp, Homo sapiens
gtactgagttctttt

SEQ ID NO: 689907 - DNA, 15 bp, Homo sapiens
tactgagttcttttt

SEQ ID NO: 689908 - DNA, 15 bp, Homo sapiens
actgagttcttttta

SEQ ID NO: 689909 - DNA, 15 bp, Homo sapiens
ctgagttctttttaa

SEQ ID NO: 689910 - DNA, 15 bp, Homo sapiens
tgagttctttttaaa

SEQ ID NO: 689911 - DNA, 15 bp, Homo sapiens
gagttctttttaaaa

SEQ ID NO: 689912 - DNA, 15 bp, Homo sapiens
agttctttttaaaat

SEQ ID NO: 689913 - DNA, 15 bp, Homo sapiens
gttctttttaaaata

SEQ ID NO: 689914 - DNA, 15 bp, Homo sapiens
ttctttttaaaatac

SEQ ID NO: 689915 - DNA, 15 bp, Homo sapiens
tctttttaaaatact

SEQ ID NO: 689916 - DNA, 15 bp, Homo sapiens
ctttttaaaatacta

SEQ ID NO: 689917 - DNA, 15 bp, Homo sapiens
tttttaaaatactaa

SEQ ID NO: 689918 - DNA, 15 bp, Homo sapiens
ttttaaaatactaat

SEQ ID NO: 689919 - DNA, 15 bp, Homo sapiens
tttaaaatactaatc

SEQ ID NO: 689920 - DNA, 15 bp, Homo sapiens
ttaaaatactaatct

SEQ ID NO: 689921 - DNA, 15 bp, Homo sapiens
taaaatactaatctc

SEQ ID NO: 689922 - DNA, 15 bp, Homo sapiens
aaaatactaatctcc

SEQ ID NO: 689923 - DNA, 15 bp, Homo sapiens
aaatactaatctcct

SEQ ID NO: 689924 - DNA, 15 bp, Homo sapiens
aatactaatctccta

SEQ ID NO: 689925 - DNA, 15 bp, Homo sapiens
atactaatctcctat

SEQ ID NO: 689926 - DNA, 15 bp, Homo sapiens
tactaatctcctatc

SEQ ID NO: 689927 - DNA, 15 bp, Homo sapiens
actaatctcctatct

SEQ ID NO: 689928 - DNA, 15 bp, Homo sapiens
ctaatctcctatcta

SEQ ID NO: 689929 - DNA, 15 bp, Homo sapiens
taatctcctatctaa

SEQ ID NO: 689930 - DNA, 15 bp, Homo sapiens
aatctcctatctaac

SEQ ID NO: 689931 - DNA, 15 bp, Homo sapiens
atctcctatctaaca

SEQ ID NO: 689932 - DNA, 15 bp, Homo sapiens
tctcctatctaacat

SEQ ID NO: 689933 - DNA, 15 bp, Homo sapiens
ctcctatctaacatg

SEQ ID NO: 689934 - DNA, 15 bp, Homo sapiens
tcctatctaacatgt

SEQ ID NO: 689935 - DNA, 15 bp, Homo sapiens
cctatctaacatgta

SEQ ID NO: 689936 - DNA, 15 bp, Homo sapiens
ctatctaacatgtag

SEQ ID NO: 689937 - DNA, 15 bp, Homo sapiens
tatctaacatgtagt

SEQ ID NO: 689938 - DNA, 15 bp, Homo sapiens
atctaacatgtagtt

SEQ ID NO: 689939 - DNA, 15 bp, Homo sapiens
tctaacatgtagtta

SEQ ID NO: 689940 - DNA, 15 bp, Homo sapiens
ctaacatgtagttat

SEQ ID NO: 689941 - DNA, 15 bp, Homo sapiens
taacatgtagttatc

SEQ ID NO: 689942 - DNA, 15 bp, Homo sapiens
aacatgtagttatcc

SEQ ID NO: 689943 - DNA, 15 bp, Homo sapiens
acatgtagttatcca

SEQ ID NO: 689944 - DNA, 15 bp, Homo sapiens
catgtagttatccat

SEQ ID NO: 689945 - DNA, 15 bp, Homo sapiens
atgtagttatccata

SEQ ID NO: 689946 - DNA, 15 bp, Homo sapiens
tgtagttatccataa

SEQ ID NO: 689947 - DNA, 15 bp, Homo sapiens
gtagttatccataat

SEQ ID NO: 689948 - DNA, 15 bp, Homo sapiens
tagttatccataatc

SEQ ID NO: 689949 - DNA, 15 bp, Homo sapiens
agttatccataatct

SEQ ID NO: 689950 - DNA, 15 bp, Homo sapiens
gttatccataatctt

SEQ ID NO: 689951 - DNA, 15 bp, Homo sapiens
ttatccataatcttt

SEQ ID NO: 689952 - DNA, 15 bp, Homo sapiens
tatccataatctttt

SEQ ID NO: 689953 - DNA, 15 bp, Homo sapiens
atccataatcttttc

SEQ ID NO: 689954 - DNA, 15 bp, Homo sapiens
tccataatcttttct

SEQ ID NO: 689955 - DNA, 15 bp, Homo sapiens
ccataatcttttctt

SEQ ID NO: 689956 - DNA, 15 bp, Homo sapiens
cataatcttttcttg

SEQ ID NO: 689957 - DNA, 15 bp, Homo sapiens
ataatcttttcttgc

SEQ ID NO: 689958 - DNA, 15 bp, Homo sapiens
taatcttttcttgct

SEQ ID NO: 689959 - DNA, 15 bp, Homo sapiens
aatcttttcttgctt

SEQ ID NO: 689960 - DNA, 15 bp, Homo sapiens
atcttttcttgcttt

SEQ ID NO: 689961 - DNA, 15 bp, Homo sapiens
tcttttcttgctttt

SEQ ID NO: 689962 - DNA, 15 bp, Homo sapiens
cttttcttgcttttt

SEQ ID NO: 689963 - DNA, 15 bp, Homo sapiens
ttttcttgctttttt

SEQ ID NO: 689964 - DNA, 15 bp, Homo sapiens
tttcttgctttttta

SEQ ID NO: 689965 - DNA, 15 bp, Homo sapiens
ttcttgcttttttaa

SEQ ID NO: 689966 - DNA, 15 bp, Homo sapiens
tcttgcttttttaat

SEQ ID NO: 689967 - DNA, 15 bp, Homo sapiens
cttgcttttttaatc

SEQ ID NO: 689968 - DNA, 15 bp, Homo sapiens
ttgcttttttaatct

SEQ ID NO: 689969 - DNA, 15 bp, Homo sapiens
tgcttttttaatctt

SEQ ID NO: 689970 - DNA, 15 bp, Homo sapiens
gcttttttaatctta

SEQ ID NO: 689971 - DNA, 15 bp, Homo sapiens
cttttttaatcttac

SEQ ID NO: 689972 - DNA, 15 bp, Homo sapiens
ttttttaatcttaca

SEQ ID NO: 689973 - DNA, 15 bp, Homo sapiens
tttttaatcttacaa

SEQ ID NO: 689974 - DNA, 15 bp, Homo sapiens
ttttaatcttacaaa

SEQ ID NO: 689975 - DNA, 15 bp, Homo sapiens
tttaatcttacaaat

SEQ ID NO: 689976 - DNA, 15 bp, Homo sapiens
ttaatcttacaaatt

SEQ ID NO: 689977 - DNA, 15 bp, Homo sapiens
taatcttacaaatta

SEQ ID NO: 689978 - DNA, 15 bp, Homo sapiens
aatcttacaaattat

SEQ ID NO: 689979 - DNA, 15 bp, Homo sapiens
atcttacaaattata

SEQ ID NO: 689980 - DNA, 15 bp, Homo sapiens
tcttacaaattatat

SEQ ID NO: 689981 - DNA, 15 bp, Homo sapiens
cttacaaattatata

SEQ ID NO: 689982 - DNA, 15 bp, Homo sapiens
ttacaaattatatat

SEQ ID NO: 689983 - DNA, 15 bp, Homo sapiens
tacaaattatatatt

SEQ ID NO: 689984 - DNA, 15 bp, Homo sapiens
acaaattatatatta

SEQ ID NO: 689985 - DNA, 15 bp, Homo sapiens
caaattatatattat

SEQ ID NO: 689986 - DNA, 15 bp, Homo sapiens
aaattatatattatt

SEQ ID NO: 689987 - DNA, 15 bp, Homo sapiens
aattatatattatta

SEQ ID NO: 689988 - DNA, 15 bp, Homo sapiens
attatatattattag

SEQ ID NO: 689989 - DNA, 15 bp, Homo sapiens
ttatatattattagt

SEQ ID NO: 689990 - DNA, 15 bp, Homo sapiens
tatatattattagta

SEQ ID NO: 689991 - DNA, 15 bp, Homo sapiens
atatattattagtag

SEQ ID NO: 689992 - DNA, 15 bp, Homo sapiens
tatattattagtagt

SEQ ID NO: 689993 - DNA, 15 bp, Homo sapiens
atattattagtagta

SEQ ID NO: 689994 - DNA, 15 bp, Homo sapiens
tattattagtagtat

SEQ ID NO: 689995 - DNA, 15 bp, Homo sapiens
attattagtagtatt

SEQ ID NO: 689996 - DNA, 15 bp, Homo sapiens
ttattagtagtattg

SEQ ID NO: 689997 - DNA, 15 bp, Homo sapiens
tattagtagtattgt

SEQ ID NO: 689998 - DNA, 15 bp, Homo sapiens
attagtagtattgtt

SEQ ID NO: 689999 - DNA, 15 bp, Homo sapiens
ttagtagtattgttt

SEQ ID NO: 690000 - DNA, 15 bp, Homo sapiens
tagtagtattgtttt

SEQ ID NO: 690001 - DNA, 15 bp, Homo sapiens
agtagtattgtttta

SEQ ID NO: 690002 - DNA, 15 bp, Homo sapiens
gtagtattgttttat

SEQ ID NO: 690003 - DNA, 15 bp, Homo sapiens
tagtattgttttatt

SEQ ID NO: 690004 - DNA, 15 bp, Homo sapiens
agtattgttttattt

SEQ ID NO: 690005 - DNA, 15 bp, Homo sapiens
gtattgttttattta

SEQ ID NO: 690006 - DNA, 15 bp, Homo sapiens
tattgttttatttat

SEQ ID NO: 690007 - DNA, 15 bp, Homo sapiens
attgttttatttata

SEQ ID NO: 690008 - DNA, 15 bp, Homo sapiens
ttgttttatttatac

SEQ ID NO: 690009 - DNA, 15 bp, Homo sapiens
tgttttatttataca

SEQ ID NO: 690010 - DNA, 15 bp, Homo sapiens
gttttatttatacag

SEQ ID NO: 690011 - DNA, 15 bp, Homo sapiens
ttttatttatacagt

SEQ ID NO: 690012 - DNA, 15 bp, Homo sapiens
tttatttatacagtg

SEQ ID NO: 690013 - DNA, 15 bp, Homo sapiens
ttatttatacagtgt

SEQ ID NO: 690014 - DNA, 15 bp, Homo sapiens
tatttatacagtgtt

SEQ ID NO: 690015 - DNA, 15 bp, Homo sapiens
atttatacagtgtta

SEQ ID NO: 690016 - DNA, 15 bp, Homo sapiens
tttatacagtgttat

SEQ ID NO: 690017 - DNA, 15 bp, Homo sapiens
ttatacagtgttatt

SEQ ID NO: 690018 - DNA, 15 bp, Homo sapiens
tatacagtgttattt

SEQ ID NO: 690019 - DNA, 15 bp, Homo sapiens
atacagtgttattta

SEQ ID NO: 690020 - DNA, 15 bp, Homo sapiens
tacagtgttatttaa

SEQ ID NO: 690021 - DNA, 15 bp, Homo sapiens
acagtgttatttaaa

SEQ ID NO: 690022 - DNA, 15 bp, Homo sapiens
cagtgttatttaaaa

SEQ ID NO: 690023 - DNA, 15 bp, Homo sapiens
agtgttatttaaaac

SEQ ID NO: 690024 - DNA, 15 bp, Homo sapiens
gtgttatttaaaaca

SEQ ID NO: 690025 - DNA, 15 bp, Homo sapiens
tgttatttaaaacat

SEQ ID NO: 690026 - DNA, 15 bp, Homo sapiens
gttatttaaaacatt

SEQ ID NO: 690027 - DNA, 15 bp, Homo sapiens
ttatttaaaacattt

SEQ ID NO: 690028 - DNA, 15 bp, Homo sapiens
tatttaaaacatttt

SEQ ID NO: 690029 - DNA, 15 bp, Homo sapiens
atttaaaacattttt

SEQ ID NO: 690030 - DNA, 15 bp, Homo sapiens
tttaaaacattttta

SEQ ID NO: 690031 - DNA, 15 bp, Homo sapiens
ttaaaacatttttat

SEQ ID NO: 690032 - DNA, 15 bp, Homo sapiens
taaaacatttttatg

SEQ ID NO: 690033 - DNA, 15 bp, Homo sapiens
aaaacatttttatgt

SEQ ID NO: 690034 - DNA, 15 bp, Homo sapiens
aaacatttttatgtt

SEQ ID NO: 690035 - DNA, 15 bp, Homo sapiens
aacatttttatgttt

SEQ ID NO: 690036 - DNA, 15 bp, Homo sapiens
acatttttatgttta

SEQ ID NO: 690037 - DNA, 15 bp, Homo sapiens
catttttatgtttac

SEQ ID NO: 690038 - DNA, 15 bp, Homo sapiens
atttttatgtttacc

SEQ ID NO: 690039 - DNA, 15 bp, Homo sapiens
tttttatgtttacct

SEQ ID NO: 690040 - DNA, 15 bp, Homo sapiens
ttttatgtttaccta

SEQ ID NO: 690041 - DNA, 15 bp, Homo sapiens
tttatgtttacctat

SEQ ID NO: 690042 - DNA, 15 bp, Homo sapiens
ttatgtttacctatt

SEQ ID NO: 690043 - DNA, 15 bp, Homo sapiens
tatgtttacctattt

SEQ ID NO: 690044 - DNA, 15 bp, Homo sapiens
atgtttacctatttg

SEQ ID NO: 690045 - DNA, 15 bp, Homo sapiens
tgtttacctatttgc

SEQ ID NO: 690046 - DNA, 15 bp, Homo sapiens
gtttacctatttgcc

SEQ ID NO: 690047 - DNA, 15 bp, Homo sapiens
tttacctatttgcct

SEQ ID NO: 690048 - DNA, 15 bp, Homo sapiens
ttacctatttgcctt

SEQ ID NO: 690049 - DNA, 15 bp, Homo sapiens
tacctatttgccttg

SEQ ID NO: 690050 - DNA, 15 bp, Homo sapiens
acctatttgccttgc

SEQ ID NO: 690051 - DNA, 15 bp, Homo sapiens
cctatttgccttgct

SEQ ID NO: 690052 - DNA, 15 bp, Homo sapiens
ctatttgccttgctc

SEQ ID NO: 690053 - DNA, 15 bp, Homo sapiens
tatttgccttgctca

SEQ ID NO: 690054 - DNA, 15 bp, Homo sapiens
atttgccttgctcac

SEQ ID NO: 690055 - DNA, 15 bp, Homo sapiens
tttgccttgctcacc

SEQ ID NO: 690056 - DNA, 15 bp, Homo sapiens
ttgccttgctcacca

SEQ ID NO: 690057 - DNA, 15 bp, Homo sapiens
tgccttgctcaccat

SEQ ID NO: 690058 - DNA, 15 bp, Homo sapiens
gccttgctcaccatt

SEQ ID NO: 690059 - DNA, 15 bp, Homo sapiens
ccttgctcaccattc

SEQ ID NO: 690060 - DNA, 15 bp, Homo sapiens
cttgctcaccattct

SEQ ID NO: 690061 - DNA, 15 bp, Homo sapiens
ttgctcaccattctt

SEQ ID NO: 690062 - DNA, 15 bp, Homo sapiens
tgctcaccattcttc

SEQ ID NO: 690063 - DNA, 15 bp, Homo sapiens
gctcaccattcttcc

SEQ ID NO: 690064 - DNA, 15 bp, Homo sapiens
ctcaccattcttcct

SEQ ID NO: 690065 - DNA, 15 bp, Homo sapiens
tcaccattcttcctt

SEQ ID NO: 690066 - DNA, 15 bp, Homo sapiens
caccattcttccttg

SEQ ID NO: 690067 - DNA, 15 bp, Homo sapiens
accattcttccttgc

SEQ ID NO: 690068 - DNA, 15 bp, Homo sapiens
ccattcttccttgca

SEQ ID NO: 690069 - DNA, 15 bp, Homo sapiens
cattcttccttgcaa

SEQ ID NO: 690070 - DNA, 15 bp, Homo sapiens
attcttccttgcaac

SEQ ID NO: 690071 - DNA, 15 bp, Homo sapiens
ttcttccttgcaact

SEQ ID NO: 690072 - DNA, 15 bp, Homo sapiens
tcttccttgcaactt

SEQ ID NO: 690073 - DNA, 15 bp, Homo sapiens
cttccttgcaactta

SEQ ID NO: 690074 - DNA, 15 bp, Homo sapiens
ttccttgcaacttat

SEQ ID NO: 690075 - DNA, 15 bp, Homo sapiens
tccttgcaacttatg

SEQ ID NO: 690076 - DNA, 15 bp, Homo sapiens
ccttgcaacttatgc

SEQ ID NO: 690077 - DNA, 15 bp, Homo sapiens
cttgcaacttatgcc

SEQ ID NO: 690078 - DNA, 15 bp, Homo sapiens
ttgcaacttatgcct

SEQ ID NO: 690079 - DNA, 15 bp, Homo sapiens
tgcaacttatgcctc

SEQ ID NO: 690080 - DNA, 15 bp, Homo sapiens
gcaacttatgcctca

SEQ ID NO: 690081 - DNA, 15 bp, Homo sapiens
caacttatgcctcac

SEQ ID NO: 690082 - DNA, 15 bp, Homo sapiens
aacttatgcctcact

SEQ ID NO: 690083 - DNA, 15 bp, Homo sapiens
acttatgcctcactt

SEQ ID NO: 690084 - DNA, 15 bp, Homo sapiens
cttatgcctcacttc

SEQ ID NO: 690085 - DNA, 15 bp, Homo sapiens
ttatgcctcacttct

SEQ ID NO: 690086 - DNA, 15 bp, Homo sapiens
tatgcctcacttctg

SEQ ID NO: 690087 - DNA, 15 bp, Homo sapiens
atgcctcacttctga

SEQ ID NO: 690088 - DNA, 15 bp, Homo sapiens
tgcctcacttctgag

SEQ ID NO: 690089 - DNA, 15 bp, Homo sapiens
gcctcacttctgaga

SEQ ID NO: 690090 - DNA, 15 bp, Homo sapiens
cctcacttctgagat

SEQ ID NO: 690091 - DNA, 15 bp, Homo sapiens
ctcacttctgagata

SEQ ID NO: 690092 - DNA, 15 bp, Homo sapiens
tcacttctgagataa

SEQ ID NO: 690093 - DNA, 15 bp, Homo sapiens
cacttctgagataat

SEQ ID NO: 690094 - DNA, 15 bp, Homo sapiens
acttctgagataatt

SEQ ID NO: 690095 - DNA, 15 bp, Homo sapiens
cttctgagataattt

SEQ ID NO: 690096 - DNA, 15 bp, Homo sapiens
ttctgagataatttt

SEQ ID NO: 690097 - DNA, 15 bp, Homo sapiens
tctgagataattttt

SEQ ID NO: 690098 - DNA, 15 bp, Homo sapiens
ctgagataatttttt

SEQ ID NO: 690099 - DNA, 15 bp, Homo sapiens
tgagataattttttt

SEQ ID NO: 690100 - DNA, 15 bp, Homo sapiens
gagataatttttttc

SEQ ID NO: 690101 - DNA, 15 bp, Homo sapiens
agataatttttttct

SEQ ID NO: 690102 - DNA, 15 bp, Homo sapiens
gataatttttttctt

SEQ ID NO: 690103 - DNA, 15 bp, Homo sapiens
ataatttttttcttc

SEQ ID NO: 690104 - DNA, 15 bp, Homo sapiens
taatttttttcttct

SEQ ID NO: 690105 - DNA, 15 bp, Homo sapiens
aatttttttcttctt

SEQ ID NO: 690106 - DNA, 15 bp, Homo sapiens
atttttttcttcttc

SEQ ID NO: 690107 - DNA, 15 bp, Homo sapiens
tttttttcttcttca

SEQ ID NO: 690108 - DNA, 15 bp, Homo sapiens
ttttttcttcttcag

SEQ ID NO: 690109 - DNA, 15 bp, Homo sapiens
tttttcttcttcaga

SEQ ID NO: 690110 - DNA, 15 bp, Homo sapiens
ttttcttcttcagat

SEQ ID NO: 690111 - DNA, 15 bp, Homo sapiens
tttcttcttcagata

SEQ ID NO: 690112 - DNA, 15 bp, Homo sapiens
ttcttcttcagatat

SEQ ID NO: 690113 - DNA, 15 bp, Homo sapiens
tcttcttcagatata

SEQ ID NO: 690114 - DNA, 15 bp, Homo sapiens
cttcttcagatatat

SEQ ID NO: 690115 - DNA, 15 bp, Homo sapiens
ttcttcagatatatc

SEQ ID NO: 690116 - DNA, 15 bp, Homo sapiens
tcttcagatatatcc

SEQ ID NO: 690117 - DNA, 15 bp, Homo sapiens
cttcagatatatcct

SEQ ID NO: 690118 - DNA, 15 bp, Homo sapiens
ttcagatatatcctt

SEQ ID NO: 690119 - DNA, 15 bp, Homo sapiens
tcagatatatccttt

SEQ ID NO: 690120 - DNA, 15 bp, Homo sapiens
cagatatatcctttg

SEQ ID NO: 690121 - DNA, 15 bp, Homo sapiens
agatatatcctttga

SEQ ID NO: 690122 - DNA, 15 bp, Homo sapiens
gatatatcctttgat

SEQ ID NO: 690123 - DNA, 15 bp, Homo sapiens
atatatcctttgata

SEQ ID NO: 690124 - DNA, 15 bp, Homo sapiens
tatatcctttgataa

SEQ ID NO: 690125 - DNA, 15 bp, Homo sapiens
atatcctttgataat

SEQ ID NO: 690126 - DNA, 15 bp, Homo sapiens
tatcctttgataatt

SEQ ID NO: 690127 - DNA, 15 bp, Homo sapiens
atcctttgataatta

SEQ ID NO: 690128 - DNA, 15 bp, Homo sapiens
tcctttgataattac

SEQ ID NO: 690129 - DNA, 15 bp, Homo sapiens
cctttgataattact

SEQ ID NO: 690130 - DNA, 15 bp, Homo sapiens
ctttgataattactt

SEQ ID NO: 690131 - DNA, 15 bp, Homo sapiens
tttgataattacttt

SEQ ID NO: 690132 - DNA, 15 bp, Homo sapiens
ttgataattacttta

SEQ ID NO: 690133 - DNA, 15 bp, Homo sapiens
tgataattactttag

SEQ ID NO: 690134 - DNA, 15 bp, Homo sapiens
gataattactttagt

SEQ ID NO: 690135 - DNA, 15 bp, Homo sapiens
ataattactttagtg

SEQ ID NO: 690136 - DNA, 15 bp, Homo sapiens
taattactttagtgg

SEQ ID NO: 690137 - DNA, 15 bp, Homo sapiens
aattactttagtggt

SEQ ID NO: 690138 - DNA, 15 bp, Homo sapiens
attactttagtggta

SEQ ID NO: 690139 - DNA, 15 bp, Homo sapiens
ttactttagtggtat

SEQ ID NO: 690140 - DNA, 15 bp, Homo sapiens
tactttagtggtatt

SEQ ID NO: 690141 - DNA, 15 bp, Homo sapiens
actttagtggtatta

SEQ ID NO: 690142 - DNA, 15 bp, Homo sapiens
ctttagtggtattaa

SEQ ID NO: 690143 - DNA, 15 bp, Homo sapiens
tttagtggtattaat

SEQ ID NO: 690144 - DNA, 15 bp, Homo sapiens
ttagtggtattaatt

SEQ ID NO: 690145 - DNA, 15 bp, Homo sapiens
tagtggtattaattt

SEQ ID NO: 690146 - DNA, 15 bp, Homo sapiens
agtggtattaatttg

SEQ ID NO: 690147 - DNA, 15 bp, Homo sapiens
gtggtattaatttgg

SEQ ID NO: 690148 - DNA, 15 bp, Homo sapiens
tggtattaatttggg

SEQ ID NO: 690149 - DNA, 15 bp, Homo sapiens
ggtattaatttggga

SEQ ID NO: 690150 - DNA, 15 bp, Homo sapiens
gtattaatttgggat

SEQ ID NO: 690151 - DNA, 15 bp, Homo sapiens
tattaatttgggatg

SEQ ID NO: 690152 - DNA, 15 bp, Homo sapiens
attaatttgggatga

SEQ ID NO: 690153 - DNA, 15 bp, Homo sapiens
ttaatttgggatgaa

SEQ ID NO: 690154 - DNA, 15 bp, Homo sapiens
taatttgggatgaac

SEQ ID NO: 690155 - DNA, 15 bp, Homo sapiens
aatttgggatgaact

SEQ ID NO: 690156 - DNA, 15 bp, Homo sapiens
atttgggatgaactt

SEQ ID NO: 690157 - DNA, 15 bp, Homo sapiens
tttgggatgaacttt

SEQ ID NO: 690158 - DNA, 15 bp, Homo sapiens
ttgggatgaactttt

SEQ ID NO: 690159 - DNA, 15 bp, Homo sapiens
tgggatgaacttttt

SEQ ID NO: 690160 - DNA, 15 bp, Homo sapiens
gggatgaactttttg

SEQ ID NO: 690161 - DNA, 15 bp, Homo sapiens
ggatgaactttttga

SEQ ID NO: 690162 - DNA, 15 bp, Homo sapiens
gatgaactttttgag

SEQ ID NO: 690163 - DNA, 15 bp, Homo sapiens
atgaactttttgagg

SEQ ID NO: 690164 - DNA, 15 bp, Homo sapiens
tgaactttttgaggt

SEQ ID NO: 690165 - DNA, 15 bp, Homo sapiens
gaactttttgaggtt

SEQ ID NO: 690166 - DNA, 15 bp, Homo sapiens
aactttttgaggttt

SEQ ID NO: 690167 - DNA, 15 bp, Homo sapiens
actttttgaggtttt

SEQ ID NO: 690168 - DNA, 15 bp, Homo sapiens
ctttttgaggtttta

SEQ ID NO: 690169 - DNA, 15 bp, Homo sapiens
tttttgaggttttat

SEQ ID NO: 690170 - DNA, 15 bp, Homo sapiens
ttttgaggttttatt

SEQ ID NO: 690171 - DNA, 15 bp, Homo sapiens
tttgaggttttattt

SEQ ID NO: 690172 - DNA, 15 bp, Homo sapiens
ttgaggttttatttt

SEQ ID NO: 690173 - DNA, 15 bp, Homo sapiens
tgaggttttattttg

SEQ ID NO: 690174 - DNA, 15 bp, Homo sapiens
gaggttttattttgt

SEQ ID NO: 690175 - DNA, 15 bp, Homo sapiens
aggttttattttgtt

SEQ ID NO: 690176 - DNA, 15 bp, Homo sapiens
ggttttattttgttt

SEQ ID NO: 690177 - DNA, 15 bp, Homo sapiens
gttttattttgtttt

SEQ ID NO: 690178 - DNA, 15 bp, Homo sapiens
ttttattttgttttt

SEQ ID NO: 690179 - DNA, 15 bp, Homo sapiens
tttattttgtttttt

SEQ ID NO: 690180 - DNA, 15 bp, Homo sapiens
ttattttgttttttg

SEQ ID NO: 690181 - DNA, 15 bp, Homo sapiens
tattttgttttttga

SEQ ID NO: 690182 - DNA, 15 bp, Homo sapiens
attttgttttttgat

SEQ ID NO: 690183 - DNA, 15 bp, Homo sapiens
ttttgttttttgatc

SEQ ID NO: 690184 - DNA, 15 bp, Homo sapiens
tttgttttttgatct

SEQ ID NO: 690185 - DNA, 15 bp, Homo sapiens
ttgttttttgatctg

SEQ ID NO: 690186 - DNA, 15 bp, Homo sapiens
tgttttttgatctga

SEQ ID NO: 690187 - DNA, 15 bp, Homo sapiens
gttttttgatctgaa

SEQ ID NO: 690188 - DNA, 15 bp, Homo sapiens
ttttttgatctgaaa

SEQ ID NO: 690189 - DNA, 15 bp, Homo sapiens
tttttgatctgaaat

SEQ ID NO: 690190 - DNA, 15 bp, Homo sapiens
ttttgatctgaaatt

SEQ ID NO: 690191 - DNA, 15 bp, Homo sapiens
tttgatctgaaattt

SEQ ID NO: 690192 - DNA, 15 bp, Homo sapiens
ttgatctgaaatttt

SEQ ID NO: 690193 - DNA, 15 bp, Homo sapiens
tgatctgaaattttc

SEQ ID NO: 690194 - DNA, 15 bp, Homo sapiens
gatctgaaattttct

SEQ ID NO: 690195 - DNA, 15 bp, Homo sapiens
atctgaaattttctt

SEQ ID NO: 690196 - DNA, 15 bp, Homo sapiens
tctgaaattttcttt

SEQ ID NO: 690197 - DNA, 15 bp, Homo sapiens
ctgaaattttcttta

SEQ ID NO: 690198 - DNA, 15 bp, Homo sapiens
tgaaattttctttac

SEQ ID NO: 690199 - DNA, 15 bp, Homo sapiens
gaaattttctttacc

SEQ ID NO: 690200 - DNA, 15 bp, Homo sapiens
aaattttctttaccc

SEQ ID NO: 690201 - DNA, 15 bp, Homo sapiens
aattttctttaccct

SEQ ID NO: 690202 - DNA, 15 bp, Homo sapiens
attttctttaccctt

SEQ ID NO: 690203 - DNA, 15 bp, Homo sapiens
ttttctttaccctta

SEQ ID NO: 690204 - DNA, 15 bp, Homo sapiens
tttctttacccttat

SEQ ID NO: 690205 - DNA, 15 bp, Homo sapiens
ttctttacccttatt

SEQ ID NO: 690206 - DNA, 15 bp, Homo sapiens
tctttacccttattt

SEQ ID NO: 690207 - DNA, 15 bp, Homo sapiens
ctttacccttatttt

SEQ ID NO: 690208 - DNA, 15 bp, Homo sapiens
tttacccttattttt

SEQ ID NO: 690209 - DNA, 15 bp, Homo sapiens
ttacccttatttttt

SEQ ID NO: 690210 - DNA, 15 bp, Homo sapiens
tacccttattttttt

SEQ ID NO: 690211 - DNA, 15 bp, Homo sapiens
acccttatttttttg

SEQ ID NO: 690212 - DNA, 15 bp, Homo sapiens
cccttatttttttgt

SEQ ID NO: 690213 - DNA, 15 bp, Homo sapiens
ccttatttttttgtg

SEQ ID NO: 690214 - DNA, 15 bp, Homo sapiens
cttatttttttgtga

SEQ ID NO: 690215 - DNA, 15 bp, Homo sapiens
ttatttttttgtgag

SEQ ID NO: 690216 - DNA, 15 bp, Homo sapiens
tatttttttgtgaga

SEQ ID NO: 690217 - DNA, 15 bp, Homo sapiens
atttttttgtgagat

SEQ ID NO: 690218 - DNA, 15 bp, Homo sapiens
tttttttgtgagata

SEQ ID NO: 690219 - DNA, 15 bp, Homo sapiens
ttttttgtgagatag

SEQ ID NO: 690220 - DNA, 15 bp, Homo sapiens
tttttgtgagatagc

SEQ ID NO: 690221 - DNA, 15 bp, Homo sapiens
ttttgtgagatagct

SEQ ID NO: 690222 - DNA, 15 bp, Homo sapiens
tttgtgagatagctt

SEQ ID NO: 690223 - DNA, 15 bp, Homo sapiens
ttgtgagatagcttt

SEQ ID NO: 690224 - DNA, 15 bp, Homo sapiens
tgtgagatagctttg

SEQ ID NO: 690225 - DNA, 15 bp, Homo sapiens
gtgagatagctttgc

SEQ ID NO: 690226 - DNA, 15 bp, Homo sapiens
tgagatagctttgct

SEQ ID NO: 690227 - DNA, 15 bp, Homo sapiens
gagatagctttgctc

SEQ ID NO: 690228 - DNA, 15 bp, Homo sapiens
agatagctttgctcg

SEQ ID NO: 690229 - DNA, 15 bp, Homo sapiens
gatagctttgctcga

SEQ ID NO: 690230 - DNA, 15 bp, Homo sapiens
atagctttgctcgat

SEQ ID NO: 690231 - DNA, 15 bp, Homo sapiens
tagctttgctcgatc

SEQ ID NO: 690232 - DNA, 15 bp, Homo sapiens
agctttgctcgatct

SEQ ID NO: 690233 - DNA, 15 bp, Homo sapiens
gctttgctcgatctt

SEQ ID NO: 690234 - DNA, 15 bp, Homo sapiens
ctttgctcgatcttc

SEQ ID NO: 690235 - DNA, 15 bp, Homo sapiens
tttgctcgatcttca

SEQ ID NO: 690236 - DNA, 15 bp, Homo sapiens
ttgctcgatcttcaa

SEQ ID NO: 690237 - DNA, 15 bp, Homo sapiens
tgctcgatcttcaat

SEQ ID NO: 690238 - DNA, 15 bp, Homo sapiens
gctcgatcttcaatt

SEQ ID NO: 690239 - DNA, 15 bp, Homo sapiens
ctcgatcttcaattc

SEQ ID NO: 690240 - DNA, 15 bp, Homo sapiens
tcgatcttcaattcc

SEQ ID NO: 690241 - DNA, 15 bp, Homo sapiens
cgatcttcaattcca

SEQ ID NO: 690242 - DNA, 15 bp, Homo sapiens
gatcttcaattccag

SEQ ID NO: 690243 - DNA, 15 bp, Homo sapiens
atcttcaattccagg

SEQ ID NO: 690244 - DNA, 15 bp, Homo sapiens
tcttcaattccaggt

SEQ ID NO: 690245 - DNA, 15 bp, Homo sapiens
cttcaattccaggtt

SEQ ID NO: 690246 - DNA, 15 bp, Homo sapiens
ttcaattccaggttg

SEQ ID NO: 690247 - DNA, 15 bp, Homo sapiens
tcaattccaggttga

SEQ ID NO: 690248 - DNA, 15 bp, Homo sapiens
caattccaggttgac

SEQ ID NO: 690249 - DNA, 15 bp, Homo sapiens
aattccaggttgaca

SEQ ID NO: 690250 - DNA, 15 bp, Homo sapiens
attccaggttgacat

SEQ ID NO: 690251 - DNA, 15 bp, Homo sapiens
ttccaggttgacatt

SEQ ID NO: 690252 - DNA, 15 bp, Homo sapiens
tccaggttgacattt

SEQ ID NO: 690253 - DNA, 15 bp, Homo sapiens
ccaggttgacattta

SEQ ID NO: 690254 - DNA, 15 bp, Homo sapiens
caggttgacatttac

SEQ ID NO: 690255 - DNA, 15 bp, Homo sapiens
aggttgacatttact

SEQ ID NO: 690256 - DNA, 15 bp, Homo sapiens
ggttgacatttactt

SEQ ID NO: 690257 - DNA, 15 bp, Homo sapiens
gttgacatttacttt

SEQ ID NO: 690258 - DNA, 15 bp, Homo sapiens
ttgacatttactttt

SEQ ID NO: 690259 - DNA, 15 bp, Homo sapiens
tgacatttacttttt

SEQ ID NO: 690260 - DNA, 15 bp, Homo sapiens
gacatttacttttta

SEQ ID NO: 690261 - DNA, 15 bp, Homo sapiens
acatttactttttag

SEQ ID NO: 690262 - DNA, 15 bp, Homo sapiens
catttactttttaga

SEQ ID NO: 690263 - DNA, 15 bp, Homo sapiens
atttactttttagac

SEQ ID NO: 690264 - DNA, 15 bp, Homo sapiens
tttactttttagact

SEQ ID NO: 690265 - DNA, 15 bp, Homo sapiens
ttactttttagactc

SEQ ID NO: 690266 - DNA, 15 bp, Homo sapiens
tactttttagactct

SEQ ID NO: 690267 - DNA, 15 bp, Homo sapiens
actttttagactctt

SEQ ID NO: 690268 - DNA, 15 bp, Homo sapiens
ctttttagactctta

SEQ ID NO: 690269 - DNA, 15 bp, Homo sapiens
tttttagactcttat

SEQ ID NO: 690270 - DNA, 15 bp, Homo sapiens
ttttagactcttata

SEQ ID NO: 690271 - DNA, 15 bp, Homo sapiens
tttagactcttataa

SEQ ID NO: 690272 - DNA, 15 bp, Homo sapiens
ttagactcttataag

SEQ ID NO: 690273 - DNA, 15 bp, Homo sapiens
tagactcttataagt

SEQ ID NO: 690274 - DNA, 15 bp, Homo sapiens
agactcttataagtt

SEQ ID NO: 690275 - DNA, 15 bp, Homo sapiens
gactcttataagttt

SEQ ID NO: 690276 - DNA, 15 bp, Homo sapiens
actcttataagtttg

SEQ ID NO: 690277 - DNA, 15 bp, Homo sapiens
ctcttataagtttga

SEQ ID NO: 690278 - DNA, 15 bp, Homo sapiens
tcttataagtttgaa

SEQ ID NO: 690279 - DNA, 15 bp, Homo sapiens
cttataagtttgaag

SEQ ID NO: 690280 - DNA, 15 bp, Homo sapiens
ttataagtttgaaga

SEQ ID NO: 690281 - DNA, 15 bp, Homo sapiens
tataagtttgaagat

SEQ ID NO: 690282 - DNA, 15 bp, Homo sapiens
ataagtttgaagata

SEQ ID NO: 690283 - DNA, 15 bp, Homo sapiens
taagtttgaagataa

SEQ ID NO: 690284 - DNA, 15 bp, Homo sapiens
aagtttgaagataat

SEQ ID NO: 690285 - DNA, 15 bp, Homo sapiens
agtttgaagataata

SEQ ID NO: 690286 - DNA, 15 bp, Homo sapiens
gtttgaagataatac

SEQ ID NO: 690287 - DNA, 15 bp, Homo sapiens
tttgaagataataca

SEQ ID NO: 690288 - DNA, 15 bp, Homo sapiens
ttgaagataatacat

SEQ ID NO: 690289 - DNA, 15 bp, Homo sapiens
tgaagataatacatt

SEQ ID NO: 690290 - DNA, 15 bp, Homo sapiens
gaagataatacatta

SEQ ID NO: 690291 - DNA, 15 bp, Homo sapiens
aagataatacattac

SEQ ID NO: 690292 - DNA, 15 bp, Homo sapiens
agataatacattacc

SEQ ID NO: 690293 - DNA, 15 bp, Homo sapiens
gataatacattacct

SEQ ID NO: 690294 - DNA, 15 bp, Homo sapiens
ataatacattacctg

SEQ ID NO: 690295 - DNA, 15 bp, Homo sapiens
taatacattacctgg

SEQ ID NO: 690296 - DNA, 15 bp, Homo sapiens
aatacattacctgga

SEQ ID NO: 690297 - DNA, 15 bp, Homo sapiens
atacattacctggat

SEQ ID NO: 690298 - DNA, 15 bp, Homo sapiens
tacattacctggatc

SEQ ID NO: 690299 - DNA, 15 bp, Homo sapiens
acattacctggatcc

SEQ ID NO: 690300 - DNA, 15 bp, Homo sapiens
cattacctggatccc

SEQ ID NO: 690301 - DNA, 15 bp, Homo sapiens
attacctggatccca

SEQ ID NO: 690302 - DNA, 15 bp, Homo sapiens
ttacctggatcccat

SEQ ID NO: 690303 - DNA, 15 bp, Homo sapiens
tacctggatcccatt

SEQ ID NO: 690304 - DNA, 15 bp, Homo sapiens
acctggatcccattt

SEQ ID NO: 690305 - DNA, 15 bp, Homo sapiens
cctggatcccatttt

SEQ ID NO: 690306 - DNA, 15 bp, Homo sapiens
ctggatcccattttt

SEQ ID NO: 690307 - DNA, 15 bp, Homo sapiens
tggatcccatttttg

SEQ ID NO: 690308 - DNA, 15 bp, Homo sapiens
ggatcccatttttgc

SEQ ID NO: 690309 - DNA, 15 bp, Homo sapiens
gatcccatttttgct

SEQ ID NO: 690310 - DNA, 15 bp, Homo sapiens
atcccatttttgcta

SEQ ID NO: 690311 - DNA, 15 bp, Homo sapiens
tcccatttttgctaa

SEQ ID NO: 690312 - DNA, 15 bp, Homo sapiens
cccatttttgctaat

SEQ ID NO: 690313 - DNA, 15 bp, Homo sapiens
ccatttttgctaatt

SEQ ID NO: 690314 - DNA, 15 bp, Homo sapiens
catttttgctaatta

SEQ ID NO: 690315 - DNA, 15 bp, Homo sapiens
atttttgctaattaa

SEQ ID NO: 690316 - DNA, 15 bp, Homo sapiens
tttttgctaattaag

SEQ ID NO: 690317 - DNA, 15 bp, Homo sapiens
ttttgctaattaaga

SEQ ID NO: 690318 - DNA, 15 bp, Homo sapiens
tttgctaattaagaa

SEQ ID NO: 690319 - DNA, 15 bp, Homo sapiens
ttgctaattaagaag

SEQ ID NO: 690320 - DNA, 15 bp, Homo sapiens
tgctaattaagaagt

SEQ ID NO: 690321 - DNA, 15 bp, Homo sapiens
gctaattaagaagtc

SEQ ID NO: 690322 - DNA, 15 bp, Homo sapiens
ctaattaagaagtct

SEQ ID NO: 690323 - DNA, 15 bp, Homo sapiens
taattaagaagtctt

SEQ ID NO: 690324 - DNA, 15 bp, Homo sapiens
aattaagaagtctta

SEQ ID NO: 690325 - DNA, 15 bp, Homo sapiens
attaagaagtcttat

SEQ ID NO: 690326 - DNA, 15 bp, Homo sapiens
ttaagaagtcttatg

SEQ ID NO: 690327 - DNA, 15 bp, Homo sapiens
taagaagtcttatgc

SEQ ID NO: 690328 - DNA, 15 bp, Homo sapiens
aagaagtcttatgcc

SEQ ID NO: 690329 - DNA, 15 bp, Homo sapiens
agaagtcttatgcca

SEQ ID NO: 690330 - DNA, 15 bp, Homo sapiens
gaagtcttatgccac

SEQ ID NO: 690331 - DNA, 15 bp, Homo sapiens
aagtcttatgccact

SEQ ID NO: 690332 - DNA, 15 bp, Homo sapiens
agtcttatgccactc

SEQ ID NO: 690333 - DNA, 15 bp, Homo sapiens
gtcttatgccactca

SEQ ID NO: 690334 - DNA, 15 bp, Homo sapiens
tcttatgccactcaa

SEQ ID NO: 690335 - DNA, 15 bp, Homo sapiens
cttatgccactcaat

SEQ ID NO: 690336 - DNA, 15 bp, Homo sapiens
ttatgccactcaatc

SEQ ID NO: 690337 - DNA, 15 bp, Homo sapiens
tatgccactcaatct

SEQ ID NO: 690338 - DNA, 15 bp, Homo sapiens
atgccactcaatcta

SEQ ID NO: 690339 - DNA, 15 bp, Homo sapiens
tgccactcaatctaa

SEQ ID NO: 690340 - DNA, 15 bp, Homo sapiens
gccactcaatctaac

SEQ ID NO: 690341 - DNA, 15 bp, Homo sapiens
ccactcaatctaact

SEQ ID NO: 690342 - DNA, 15 bp, Homo sapiens
cactcaatctaactg

SEQ ID NO: 690343 - DNA, 15 bp, Homo sapiens
actcaatctaactgt

SEQ ID NO: 690344 - DNA, 15 bp, Homo sapiens
ctcaatctaactgtt

SEQ ID NO: 690345 - DNA, 15 bp, Homo sapiens
tcaatctaactgttg

SEQ ID NO: 690346 - DNA, 15 bp, Homo sapiens
caatctaactgttgt

SEQ ID NO: 690347 - DNA, 15 bp, Homo sapiens
aatctaactgttgtt

SEQ ID NO: 690348 - DNA, 15 bp, Homo sapiens
atctaactgttgttc

SEQ ID NO: 690349 - DNA, 15 bp, Homo sapiens
tctaactgttgttcc

SEQ ID NO: 690350 - DNA, 15 bp, Homo sapiens
ctaactgttgttcct

SEQ ID NO: 690351 - DNA, 15 bp, Homo sapiens
taactgttgttcctt

SEQ ID NO: 690352 - DNA, 15 bp, Homo sapiens
aactgttgttccttt

SEQ ID NO: 690353 - DNA, 15 bp, Homo sapiens
actgttgttcctttg

SEQ ID NO: 690354 - DNA, 15 bp, Homo sapiens
ctgttgttcctttgt

SEQ ID NO: 690355 - DNA, 15 bp, Homo sapiens
tgttgttcctttgta

SEQ ID NO: 690356 - DNA, 15 bp, Homo sapiens
gttgttcctttgtag

SEQ ID NO: 690357 - DNA, 15 bp, Homo sapiens
ttgttcctttgtagt

SEQ ID NO: 690358 - DNA, 15 bp, Homo sapiens
tgttcctttgtagtt

SEQ ID NO: 690359 - DNA, 15 bp, Homo sapiens
gttcctttgtagtta

SEQ ID NO: 690360 - DNA, 15 bp, Homo sapiens
ttcctttgtagttaa

SEQ ID NO: 690361 - DNA, 15 bp, Homo sapiens
tcctttgtagttaat

SEQ ID NO: 690362 - DNA, 15 bp, Homo sapiens
cctttgtagttaatc

SEQ ID NO: 690363 - DNA, 15 bp, Homo sapiens
ctttgtagttaatct

SEQ ID NO: 690364 - DNA, 15 bp, Homo sapiens
tttgtagttaatctg

SEQ ID NO: 690365 - DNA, 15 bp, Homo sapiens
ttgtagttaatctgt

SEQ ID NO: 690366 - DNA, 15 bp, Homo sapiens
tgtagttaatctgtc

SEQ ID NO: 690367 - DNA, 15 bp, Homo sapiens
gtagttaatctgtct

SEQ ID NO: 690368 - DNA, 15 bp, Homo sapiens
tagttaatctgtctt

SEQ ID NO: 690369 - DNA, 15 bp, Homo sapiens
agttaatctgtcttt

SEQ ID NO: 690370 - DNA, 15 bp, Homo sapiens
gttaatctgtctttt

SEQ ID NO: 690371 - DNA, 15 bp, Homo sapiens
ttaatctgtcttttt

SEQ ID NO: 690372 - DNA, 15 bp, Homo sapiens
taatctgtctttttc

SEQ ID NO: 690373 - DNA, 15 bp, Homo sapiens
aatctgtctttttct

SEQ ID NO: 690374 - DNA, 15 bp, Homo sapiens
atctgtctttttctc

SEQ ID NO: 690375 - DNA, 15 bp, Homo sapiens
tctgtctttttctct

SEQ ID NO: 690376 - DNA, 15 bp, Homo sapiens
ctgtctttttctctc

SEQ ID NO: 690377 - DNA, 15 bp, Homo sapiens
tgtctttttctctct

SEQ ID NO: 690378 - DNA, 15 bp, Homo sapiens
gtctttttctctctg

SEQ ID NO: 690379 - DNA, 15 bp, Homo sapiens
tctttttctctctgg

SEQ ID NO: 690380 - DNA, 15 bp, Homo sapiens
ctttttctctctggc

SEQ ID NO: 690381 - DNA, 15 bp, Homo sapiens
tttttctctctggct

SEQ ID NO: 690382 - DNA, 15 bp, Homo sapiens
ttttctctctggcta

SEQ ID NO: 690383 - DNA, 15 bp, Homo sapiens
tttctctctggctac

SEQ ID NO: 690384 - DNA, 15 bp, Homo sapiens
ttctctctggctact

SEQ ID NO: 690385 - DNA, 15 bp, Homo sapiens
tctctctggctactt

SEQ ID NO: 690386 - DNA, 15 bp, Homo sapiens
ctctctggctacttt

SEQ ID NO: 690387 - DNA, 15 bp, Homo sapiens
tctctggctactttt

SEQ ID NO: 690388 - DNA, 15 bp, Homo sapiens
ctctggctactttta

SEQ ID NO: 690389 - DNA, 15 bp, Homo sapiens
tctggctacttttaa

SEQ ID NO: 690390 - DNA, 15 bp, Homo sapiens
ctggctacttttaag

SEQ ID NO: 690391 - DNA, 15 bp, Homo sapiens
tggctacttttaaga

SEQ ID NO: 690392 - DNA, 15 bp, Homo sapiens
ggctacttttaagat

SEQ ID NO: 690393 - DNA, 15 bp, Homo sapiens
gctacttttaagatc

SEQ ID NO: 690394 - DNA, 15 bp, Homo sapiens
ctacttttaagatct

SEQ ID NO: 690395 - DNA, 15 bp, Homo sapiens
tacttttaagatctt

SEQ ID NO: 690396 - DNA, 15 bp, Homo sapiens
acttttaagatcttt

SEQ ID NO: 690397 - DNA, 15 bp, Homo sapiens
cttttaagatctttt

SEQ ID NO: 690398 - DNA, 15 bp, Homo sapiens
ttttaagatcttttc

SEQ ID NO: 690399 - DNA, 15 bp, Homo sapiens
tttaagatcttttct

SEQ ID NO: 690400 - DNA, 15 bp, Homo sapiens
ttaagatcttttctt

SEQ ID NO: 690401 - DNA, 15 bp, Homo sapiens
taagatcttttcttt

SEQ ID NO: 690402 - DNA, 15 bp, Homo sapiens
aagatcttttctttg

SEQ ID NO: 690403 - DNA, 15 bp, Homo sapiens
agatcttttctttga

SEQ ID NO: 690404 - DNA, 15 bp, Homo sapiens
gatcttttctttgaa

SEQ ID NO: 690405 - DNA, 15 bp, Homo sapiens
atcttttctttgaat

SEQ ID NO: 690406 - DNA, 15 bp, Homo sapiens
tcttttctttgaatg

SEQ ID NO: 690407 - DNA, 15 bp, Homo sapiens
cttttctttgaatgt

SEQ ID NO: 690408 - DNA, 15 bp, Homo sapiens
ttttctttgaatgta

SEQ ID NO: 690409 - DNA, 15 bp, Homo sapiens
tttctttgaatgtag

SEQ ID NO: 690410 - DNA, 15 bp, Homo sapiens
ttctttgaatgtagt

SEQ ID NO: 690411 - DNA, 15 bp, Homo sapiens
tctttgaatgtagta

SEQ ID NO: 690412 - DNA, 15 bp, Homo sapiens
ctttgaatgtagtat

SEQ ID NO: 690413 - DNA, 15 bp, Homo sapiens
tttgaatgtagtatt

SEQ ID NO: 690414 - DNA, 15 bp, Homo sapiens
ttgaatgtagtatta

SEQ ID NO: 690415 - DNA, 15 bp, Homo sapiens
tgaatgtagtattag

SEQ ID NO: 690416 - DNA, 15 bp, Homo sapiens
gaatgtagtattaga

SEQ ID NO: 690417 - DNA, 15 bp, Homo sapiens
aatgtagtattagat

SEQ ID NO: 690418 - DNA, 15 bp, Homo sapiens
atgtagtattagata

SEQ ID NO: 690419 - DNA, 15 bp, Homo sapiens
tgtagtattagatag

SEQ ID NO: 690420 - DNA, 15 bp, Homo sapiens
gtagtattagatagg

SEQ ID NO: 690421 - DNA, 15 bp, Homo sapiens
tagtattagatagga

SEQ ID NO: 690422 - DNA, 15 bp, Homo sapiens
agtattagataggac

SEQ ID NO: 690423 - DNA, 15 bp, Homo sapiens
gtattagataggact

SEQ ID NO: 690424 - DNA, 15 bp, Homo sapiens
tattagataggactt

SEQ ID NO: 690425 - DNA, 15 bp, Homo sapiens
attagataggactta

SEQ ID NO: 690426 - DNA, 15 bp, Homo sapiens
ttagataggacttaa

SEQ ID NO: 690427 - DNA, 15 bp, Homo sapiens
tagataggacttaac

SEQ ID NO: 690428 - DNA, 15 bp, Homo sapiens
agataggacttaaca

SEQ ID NO: 690429 - DNA, 15 bp, Homo sapiens
gataggacttaacat

SEQ ID NO: 690430 - DNA, 15 bp, Homo sapiens
ataggacttaacatt

SEQ ID NO: 690431 - DNA, 15 bp, Homo sapiens
taggacttaacattc

SEQ ID NO: 690432 - DNA, 15 bp, Homo sapiens
aggacttaacattcc

SEQ ID NO: 690433 - DNA, 15 bp, Homo sapiens
ggacttaacattccc

SEQ ID NO: 690434 - DNA, 15 bp, Homo sapiens
gacttaacattcccc

SEQ ID NO: 690435 - DNA, 15 bp, Homo sapiens
acttaacattcccca

SEQ ID NO: 690436 - DNA, 15 bp, Homo sapiens
cttaacattccccat

SEQ ID NO: 690437 - DNA, 15 bp, Homo sapiens
ttaacattccccata

SEQ ID NO: 690438 - DNA, 15 bp, Homo sapiens
taacattccccatac

SEQ ID NO: 690439 - DNA, 15 bp, Homo sapiens
aacattccccatacc

SEQ ID NO: 690440 - DNA, 15 bp, Homo sapiens
acattccccataccc

SEQ ID NO: 690441 - DNA, 15 bp, Homo sapiens
cattccccatacccc

SEQ ID NO: 690442 - DNA, 15 bp, Homo sapiens
attccccatacccct

SEQ ID NO: 690443 - DNA, 15 bp, Homo sapiens
ttccccataccccta

SEQ ID NO: 690444 - DNA, 15 bp, Homo sapiens
tccccatacccctac

SEQ ID NO: 690445 - DNA, 15 bp, Homo sapiens
ccccatacccctaca

SEQ ID NO: 690446 - DNA, 15 bp, Homo sapiens
cccatacccctacaa

SEQ ID NO: 690447 - DNA, 15 bp, Homo sapiens
ccatacccctacaat

SEQ ID NO: 690448 - DNA, 15 bp, Homo sapiens
catacccctacaatc

SEQ ID NO: 690449 - DNA, 15 bp, Homo sapiens
atacccctacaatct

SEQ ID NO: 690450 - DNA, 15 bp, Homo sapiens
tacccctacaatctt

SEQ ID NO: 690451 - DNA, 15 bp, Homo sapiens
acccctacaatcttt

SEQ ID NO: 690452 - DNA, 15 bp, Homo sapiens
cccctacaatctttt

SEQ ID NO: 690453 - DNA, 15 bp, Homo sapiens
ccctacaatcttttt

SEQ ID NO: 690454 - DNA, 15 bp, Homo sapiens
cctacaatctttttc

SEQ ID NO: 690455 - DNA, 15 bp, Homo sapiens
ctacaatctttttca

SEQ ID NO: 690456 - DNA, 15 bp, Homo sapiens
tacaatctttttcat

SEQ ID NO: 690457 - DNA, 15 bp, Homo sapiens
acaatctttttcatc

SEQ ID NO: 690458 - DNA, 15 bp, Homo sapiens
caatctttttcatcc

SEQ ID NO: 690459 - DNA, 15 bp, Homo sapiens
aatctttttcatcca

SEQ ID NO: 690460 - DNA, 15 bp, Homo sapiens
atctttttcatccaa

SEQ ID NO: 690461 - DNA, 15 bp, Homo sapiens
tctttttcatccaat

SEQ ID NO: 690462 - DNA, 15 bp, Homo sapiens
ctttttcatccaata

SEQ ID NO: 690463 - DNA, 15 bp, Homo sapiens
tttttcatccaatat

SEQ ID NO: 690464 - DNA, 15 bp, Homo sapiens
ttttcatccaatatt

SEQ ID NO: 690465 - DNA, 15 bp, Homo sapiens
tttcatccaatattt

SEQ ID NO: 690466 - DNA, 15 bp, Homo sapiens
ttcatccaatattta

SEQ ID NO: 690467 - DNA, 15 bp, Homo sapiens
tcatccaatatttaa

SEQ ID NO: 690468 - DNA, 15 bp, Homo sapiens
catccaatatttaac

SEQ ID NO: 690469 - DNA, 15 bp, Homo sapiens
atccaatatttaacc

SEQ ID NO: 690470 - DNA, 15 bp, Homo sapiens
tccaatatttaaccc

SEQ ID NO: 690471 - DNA, 15 bp, Homo sapiens
ccaatatttaaccca

SEQ ID NO: 690472 - DNA, 15 bp, Homo sapiens
caatatttaacccat

SEQ ID NO: 690473 - DNA, 15 bp, Homo sapiens
aatatttaacccatt

SEQ ID NO: 690474 - DNA, 15 bp, Homo sapiens
atatttaacccattt

SEQ ID NO: 690475 - DNA, 15 bp, Homo sapiens
tatttaacccatttt

SEQ ID NO: 690476 - DNA, 15 bp, Homo sapiens
atttaacccattttt

SEQ ID NO: 690477 - DNA, 15 bp, Homo sapiens
tttaacccattttta

SEQ ID NO: 690478 - DNA, 15 bp, Homo sapiens
ttaacccatttttat

SEQ ID NO: 690479 - DNA, 15 bp, Homo sapiens
taacccatttttatt

SEQ ID NO: 690480 - DNA, 15 bp, Homo sapiens
aacccatttttattt

SEQ ID NO: 690481 - DNA, 15 bp, Homo sapiens
acccatttttattta

SEQ ID NO: 690482 - DNA, 15 bp, Homo sapiens
cccatttttatttac

SEQ ID NO: 690483 - DNA, 15 bp, Homo sapiens
ccatttttatttaca

SEQ ID NO: 690484 - DNA, 15 bp, Homo sapiens
catttttatttacaa

SEQ ID NO: 690485 - DNA, 15 bp, Homo sapiens
atttttatttacaat

SEQ ID NO: 690486 - DNA, 15 bp, Homo sapiens
tttttatttacaatt

SEQ ID NO: 690487 - DNA, 15 bp, Homo sapiens
ttttatttacaattc

SEQ ID NO: 690488 - DNA, 15 bp, Homo sapiens
tttatttacaattct

SEQ ID NO: 690489 - DNA, 15 bp, Homo sapiens
ttatttacaattctt

SEQ ID NO: 690490 - DNA, 15 bp, Homo sapiens
tatttacaattctta

SEQ ID NO: 690491 - DNA, 15 bp, Homo sapiens
atttacaattcttac

SEQ ID NO: 690492 - DNA, 15 bp, Homo sapiens
tttacaattcttacc

SEQ ID NO: 690493 - DNA, 15 bp, Homo sapiens
ttacaattcttacct

SEQ ID NO: 690494 - DNA, 15 bp, Homo sapiens
tacaattcttacctg

SEQ ID NO: 690495 - DNA, 15 bp, Homo sapiens
acaattcttacctgg

SEQ ID NO: 690496 - DNA, 15 bp, Homo sapiens
caattcttacctggc

SEQ ID NO: 690497 - DNA, 15 bp, Homo sapiens
aattcttacctggcc

SEQ ID NO: 690498 - DNA, 15 bp, Homo sapiens
attcttacctggccc

SEQ ID NO: 690499 - DNA, 15 bp, Homo sapiens
ttcttacctggccct

SEQ ID NO: 690500 - DNA, 15 bp, Homo sapiens
tcttacctggccctg

SEQ ID NO: 690501 - DNA, 15 bp, Homo sapiens
cttacctggccctgt

SEQ ID NO: 690502 - DNA, 15 bp, Homo sapiens
ttacctggccctgtt

SEQ ID NO: 690503 - DNA, 15 bp, Homo sapiens
tacctggccctgtta

SEQ ID NO: 690504 - DNA, 15 bp, Homo sapiens
acctggccctgttag

SEQ ID NO: 690505 - DNA, 15 bp, Homo sapiens
cctggccctgttagc

SEQ ID NO: 690506 - DNA, 15 bp, Homo sapiens
ctggccctgttagca

SEQ ID NO: 690507 - DNA, 15 bp, Homo sapiens
tggccctgttagcat

SEQ ID NO: 690508 - DNA, 15 bp, Homo sapiens
ggccctgttagcatt

SEQ ID NO: 690509 - DNA, 15 bp, Homo sapiens
gccctgttagcatta

SEQ ID NO: 690510 - DNA, 15 bp, Homo sapiens
ccctgttagcattat

SEQ ID NO: 690511 - DNA, 15 bp, Homo sapiens
cctgttagcattata

SEQ ID NO: 690512 - DNA, 15 bp, Homo sapiens
ctgttagcattatag

SEQ ID NO: 690513 - DNA, 15 bp, Homo sapiens
tgttagcattatagt

SEQ ID NO: 690514 - DNA, 15 bp, Homo sapiens
gttagcattatagtt

SEQ ID NO: 690515 - DNA, 15 bp, Homo sapiens
ttagcattatagttt

SEQ ID NO: 690516 - DNA, 15 bp, Homo sapiens
tagcattatagtttg

SEQ ID NO: 690517 - DNA, 15 bp, Homo sapiens
agcattatagtttgc

SEQ ID NO: 690518 - DNA, 15 bp, Homo sapiens
gcattatagtttgca

SEQ ID NO: 690519 - DNA, 15 bp, Homo sapiens
cattatagtttgcaa

SEQ ID NO: 690520 - DNA, 15 bp, Homo sapiens
attatagtttgcaac

SEQ ID NO: 690521 - DNA, 15 bp, Homo sapiens
ttatagtttgcaact

SEQ ID NO: 690522 - DNA, 15 bp, Homo sapiens
tatagtttgcaactc

SEQ ID NO: 690523 - DNA, 15 bp, Homo sapiens
atagtttgcaactcc

SEQ ID NO: 690524 - DNA, 15 bp, Homo sapiens
tagtttgcaactcct

SEQ ID NO: 690525 - DNA, 15 bp, Homo sapiens
agtttgcaactcctg

SEQ ID NO: 690526 - DNA, 15 bp, Homo sapiens
gtttgcaactcctga

SEQ ID NO: 690527 - DNA, 15 bp, Homo sapiens
tttgcaactcctgat

SEQ ID NO: 690528 - DNA, 15 bp, Homo sapiens
ttgcaactcctgata

SEQ ID NO: 690529 - DNA, 15 bp, Homo sapiens
tgcaactcctgatag

SEQ ID NO: 690530 - DNA, 15 bp, Homo sapiens
gcaactcctgataga

SEQ ID NO: 690531 - DNA, 15 bp, Homo sapiens
caactcctgatagac

SEQ ID NO: 690532 - DNA, 15 bp, Homo sapiens
aactcctgatagaca

SEQ ID NO: 690533 - DNA, 15 bp, Homo sapiens
actcctgatagacaa

SEQ ID NO: 690534 - DNA, 15 bp, Homo sapiens
ctcctgatagacaat

SEQ ID NO: 690535 - DNA, 15 bp, Homo sapiens
tcctgatagacaata

SEQ ID NO: 690536 - DNA, 15 bp, Homo sapiens
cctgatagacaataa

SEQ ID NO: 690537 - DNA, 15 bp, Homo sapiens
ctgatagacaataag

SEQ ID NO: 690538 - DNA, 15 bp, Homo sapiens
tgatagacaataagt

SEQ ID NO: 690539 - DNA, 15 bp, Homo sapiens
gatagacaataagtt

SEQ ID NO: 690540 - DNA, 15 bp, Homo sapiens
atagacaataagttt

SEQ ID NO: 690541 - DNA, 15 bp, Homo sapiens
tagacaataagttta

SEQ ID NO: 690542 - DNA, 15 bp, Homo sapiens
agacaataagtttaa

SEQ ID NO: 690543 - DNA, 15 bp, Homo sapiens
gacaataagtttaat

SEQ ID NO: 690544 - DNA, 15 bp, Homo sapiens
acaataagtttaata

SEQ ID NO: 690545 - DNA, 15 bp, Homo sapiens
caataagtttaatat

SEQ ID NO: 690546 - DNA, 15 bp, Homo sapiens
aataagtttaatatc

SEQ ID NO: 690547 - DNA, 15 bp, Homo sapiens
ataagtttaatatct

SEQ ID NO: 690548 - DNA, 15 bp, Homo sapiens
taagtttaatatctg

SEQ ID NO: 690549 - DNA, 15 bp, Homo sapiens
aagtttaatatctga

SEQ ID NO: 690550 - DNA, 15 bp, Homo sapiens
agtttaatatctgaa

SEQ ID NO: 690551 - DNA, 15 bp, Homo sapiens
gtttaatatctgaag

SEQ ID NO: 690552 - DNA, 15 bp, Homo sapiens
tttaatatctgaagg

SEQ ID NO: 690553 - DNA, 15 bp, Homo sapiens
ttaatatctgaaggc

SEQ ID NO: 690554 - DNA, 15 bp, Homo sapiens
taatatctgaaggca

SEQ ID NO: 690555 - DNA, 15 bp, Homo sapiens
aatatctgaaggcat

SEQ ID NO: 690556 - DNA, 15 bp, Homo sapiens
atatctgaaggcatc

SEQ ID NO: 690557 - DNA, 15 bp, Homo sapiens
tatctgaaggcatct

SEQ ID NO: 690558 - DNA, 15 bp, Homo sapiens
atctgaaggcatctg

SEQ ID NO: 690559 - DNA, 15 bp, Homo sapiens
tctgaaggcatctga

SEQ ID NO: 690560 - DNA, 15 bp, Homo sapiens
ctgaaggcatctgat

SEQ ID NO: 690561 - DNA, 15 bp, Homo sapiens
tgaaggcatctgata

SEQ ID NO: 690562 - DNA, 15 bp, Homo sapiens
gaaggcatctgatac

SEQ ID NO: 690563 - DNA, 15 bp, Homo sapiens
aaggcatctgatacc

SEQ ID NO: 690564 - DNA, 15 bp, Homo sapiens
aggcatctgataccc

SEQ ID NO: 690565 - DNA, 15 bp, Homo sapiens
ggcatctgataccct

SEQ ID NO: 690566 - DNA, 15 bp, Homo sapiens
gcatctgataccctc

SEQ ID NO: 690567 - DNA, 15 bp, Homo sapiens
catctgataccctct

SEQ ID NO: 690568 - DNA, 15 bp, Homo sapiens
atctgataccctctc

SEQ ID NO: 690569 - DNA, 15 bp, Homo sapiens
tctgataccctctct

SEQ ID NO: 690570 - DNA, 15 bp, Homo sapiens
ctgataccctctctc

SEQ ID NO: 690571 - DNA, 15 bp, Homo sapiens
tgataccctctctcc

SEQ ID NO: 690572 - DNA, 15 bp, Homo sapiens
gataccctctctccc

SEQ ID NO: 690573 - DNA, 15 bp, Homo sapiens
ataccctctctcccc

SEQ ID NO: 690574 - DNA, 15 bp, Homo sapiens
taccctctctcccct

SEQ ID NO: 690575 - DNA, 15 bp, Homo sapiens
accctctctccccta

SEQ ID NO: 690576 - DNA, 15 bp, Homo sapiens
ccctctctcccctaa

SEQ ID NO: 690577 - DNA, 15 bp, Homo sapiens
cctctctcccctaaa

SEQ ID NO: 690578 - DNA, 15 bp, Homo sapiens
ctctctcccctaaag

SEQ ID NO: 690579 - DNA, 15 bp, Homo sapiens
tctctcccctaaaga

SEQ ID NO: 690580 - DNA, 15 bp, Homo sapiens
ctctcccctaaagac

SEQ ID NO: 690581 - DNA, 15 bp, Homo sapiens
tctcccctaaagaca

SEQ ID NO: 690582 - DNA, 15 bp, Homo sapiens
ctcccctaaagacaa

SEQ ID NO: 690583 - DNA, 15 bp, Homo sapiens
tcccctaaagacaag

SEQ ID NO: 690584 - DNA, 15 bp, Homo sapiens
cccctaaagacaagg

SEQ ID NO: 690585 - DNA, 15 bp, Homo sapiens
ccctaaagacaagga

SEQ ID NO: 690586 - DNA, 15 bp, Homo sapiens
cctaaagacaaggag

SEQ ID NO: 690587 - DNA, 15 bp, Homo sapiens
ctaaagacaaggaga

SEQ ID NO: 690588 - DNA, 15 bp, Homo sapiens
taaagacaaggagaa

SEQ ID NO: 690589 - DNA, 15 bp, Homo sapiens
aaagacaaggagaaa

SEQ ID NO: 690590 - DNA, 15 bp, Homo sapiens
aagacaaggagaaag

SEQ ID NO: 690591 - DNA, 15 bp, Homo sapiens
agacaaggagaaaga

SEQ ID NO: 690592 - DNA, 15 bp, Homo sapiens
gacaaggagaaagaa

SEQ ID NO: 690593 - DNA, 15 bp, Homo sapiens
acaaggagaaagaaa

SEQ ID NO: 690594 - DNA, 15 bp, Homo sapiens
caaggagaaagaaag

SEQ ID NO: 690595 - DNA, 15 bp, Homo sapiens
aaggagaaagaaaga

SEQ ID NO: 690596 - DNA, 15 bp, Homo sapiens
aggagaaagaaagag

SEQ ID NO: 690597 - DNA, 15 bp, Homo sapiens
ggagaaagaaagaga

SEQ ID NO: 690598 - DNA, 15 bp, Homo sapiens
gagaaagaaagagag

SEQ ID NO: 690599 - DNA, 15 bp, Homo sapiens
agaaagaaagagaga

SEQ ID NO: 690600 - DNA, 15 bp, Homo sapiens
gaaagaaagagagag

SEQ ID NO: 690601 - DNA, 15 bp, Homo sapiens
aaagaaagagagaga

SEQ ID NO: 690602 - DNA, 15 bp, Homo sapiens
aagaaagagagagaa

SEQ ID NO: 690603 - DNA, 15 bp, Homo sapiens
agaaagagagagaat

SEQ ID NO: 690604 - DNA, 15 bp, Homo sapiens
gaaagagagagaatg

SEQ ID NO: 690605 - DNA, 15 bp, Homo sapiens
aaagagagagaatga

SEQ ID NO: 690606 - DNA, 15 bp, Homo sapiens
aagagagagaatgaa

SEQ ID NO: 690607 - DNA, 15 bp, Homo sapiens
agagagagaatgaaa

SEQ ID NO: 690608 - DNA, 15 bp, Homo sapiens
gagagagaatgaaac

SEQ ID NO: 690609 - DNA, 15 bp, Homo sapiens
agagagaatgaaact

SEQ ID NO: 690610 - DNA, 15 bp, Homo sapiens
gagagaatgaaacta

SEQ ID NO: 690611 - DNA, 15 bp, Homo sapiens
agagaatgaaactat

SEQ ID NO: 690612 - DNA, 15 bp, Homo sapiens
gagaatgaaactatc

SEQ ID NO: 690613 - DNA, 15 bp, Homo sapiens
agaatgaaactatca

SEQ ID NO: 690614 - DNA, 15 bp, Homo sapiens
gaatgaaactatcat

SEQ ID NO: 690615 - DNA, 15 bp, Homo sapiens
aatgaaactatcatc

SEQ ID NO: 690616 - DNA, 15 bp, Homo sapiens
atgaaactatcatct

SEQ ID NO: 690617 - DNA, 15 bp, Homo sapiens
tgaaactatcatcta

SEQ ID NO: 690618 - DNA, 15 bp, Homo sapiens
gaaactatcatctat

SEQ ID NO: 690619 - DNA, 15 bp, Homo sapiens
aaactatcatctata

SEQ ID NO: 690620 - DNA, 15 bp, Homo sapiens
aactatcatctatat

SEQ ID NO: 690621 - DNA, 15 bp, Homo sapiens
actatcatctatatt

SEQ ID NO: 690622 - DNA, 15 bp, Homo sapiens
ctatcatctatattg

SEQ ID NO: 690623 - DNA, 15 bp, Homo sapiens
tatcatctatattgc

SEQ ID NO: 690624 - DNA, 15 bp, Homo sapiens
atcatctatattgct

SEQ ID NO: 690625 - DNA, 15 bp, Homo sapiens
tcatctatattgctt

SEQ ID NO: 690626 - DNA, 15 bp, Homo sapiens
catctatattgcttg

SEQ ID NO: 690627 - DNA, 15 bp, Homo sapiens
atctatattgcttgc

SEQ ID NO: 690628 - DNA, 15 bp, Homo sapiens
tctatattgcttgct

SEQ ID NO: 690629 - DNA, 15 bp, Homo sapiens
ctatattgcttgctt

SEQ ID NO: 690630 - DNA, 15 bp, Homo sapiens
tatattgcttgcttg

SEQ ID NO: 690631 - DNA, 15 bp, Homo sapiens
atattgcttgcttgc

SEQ ID NO: 690632 - DNA, 15 bp, Homo sapiens
tattgcttgcttgct

SEQ ID NO: 690633 - DNA, 15 bp, Homo sapiens
attgcttgcttgctc

SEQ ID NO: 690634 - DNA, 15 bp, Homo sapiens
ttgcttgcttgctcc

SEQ ID NO: 690635 - DNA, 15 bp, Homo sapiens
tgcttgcttgctcct

SEQ ID NO: 690636 - DNA, 15 bp, Homo sapiens
gcttgcttgctcctt

SEQ ID NO: 690637 - DNA, 15 bp, Homo sapiens
cttgcttgctccttc

SEQ ID NO: 690638 - DNA, 15 bp, Homo sapiens
ttgcttgctccttca

SEQ ID NO: 690639 - DNA, 15 bp, Homo sapiens
tgcttgctccttcac

SEQ ID NO: 690640 - DNA, 15 bp, Homo sapiens
gcttgctccttcact

SEQ ID NO: 690641 - DNA, 15 bp, Homo sapiens
cttgctccttcactc

SEQ ID NO: 690642 - DNA, 15 bp, Homo sapiens
ttgctccttcactcc

SEQ ID NO: 690643 - DNA, 15 bp, Homo sapiens
tgctccttcactcct

SEQ ID NO: 690644 - DNA, 15 bp, Homo sapiens
gctccttcactcctt

SEQ ID NO: 690645 - DNA, 15 bp, Homo sapiens
ctccttcactcctta

SEQ ID NO: 690646 - DNA, 15 bp, Homo sapiens
tccttcactccttac

SEQ ID NO: 690647 - DNA, 15 bp, Homo sapiens
ccttcactccttact

SEQ ID NO: 690648 - DNA, 15 bp, Homo sapiens
cttcactccttactt

SEQ ID NO: 690649 - DNA, 15 bp, Homo sapiens
ttcactccttactta

SEQ ID NO: 690650 - DNA, 15 bp, Homo sapiens
tcactccttacttaa

SEQ ID NO: 690651 - DNA, 15 bp, Homo sapiens
cactccttacttaaa

SEQ ID NO: 690652 - DNA, 15 bp, Homo sapiens
actccttacttaaac

SEQ ID NO: 690653 - DNA, 15 bp, Homo sapiens
ctccttacttaaact

SEQ ID NO: 690654 - DNA, 15 bp, Homo sapiens
tccttacttaaactc

SEQ ID NO: 690655 - DNA, 15 bp, Homo sapiens
ccttacttaaactca

SEQ ID NO: 690656 - DNA, 15 bp, Homo sapiens
cttacttaaactcag

SEQ ID NO: 690657 - DNA, 15 bp, Homo sapiens
ttacttaaactcaga

SEQ ID NO: 690658 - DNA, 15 bp, Homo sapiens
tacttaaactcagat

SEQ ID NO: 690659 - DNA, 15 bp, Homo sapiens
acttaaactcagatg

SEQ ID NO: 690660 - DNA, 15 bp, Homo sapiens
cttaaactcagatga

SEQ ID NO: 690661 - DNA, 15 bp, Homo sapiens
ttaaactcagatgag

SEQ ID NO: 690662 - DNA, 15 bp, Homo sapiens
taaactcagatgagg

SEQ ID NO: 690663 - DNA, 15 bp, Homo sapiens
aaactcagatgagga

SEQ ID NO: 690664 - DNA, 15 bp, Homo sapiens
aactcagatgaggat

SEQ ID NO: 690665 - DNA, 15 bp, Homo sapiens
actcagatgaggatt

SEQ ID NO: 690666 - DNA, 15 bp, Homo sapiens
ctcagatgaggattg

SEQ ID NO: 690667 - DNA, 15 bp, Homo sapiens
tcagatgaggattgg

SEQ ID NO: 690668 - DNA, 15 bp, Homo sapiens
cagatgaggattggg

SEQ ID NO: 690669 - DNA, 15 bp, Homo sapiens
agatgaggattggga

SEQ ID NO: 690670 - DNA, 15 bp, Homo sapiens
gatgaggattgggac

SEQ ID NO: 690671 - DNA, 15 bp, Homo sapiens
atgaggattgggacc

SEQ ID NO: 690672 - DNA, 15 bp, Homo sapiens
tgaggattgggaccc

SEQ ID NO: 690673 - DNA, 15 bp, Homo sapiens
gaggattgggaccca

SEQ ID NO: 690674 - DNA, 15 bp, Homo sapiens
aggattgggacccac

SEQ ID NO: 690675 - DNA, 15 bp, Homo sapiens
ggattgggacccact

SEQ ID NO: 690676 - DNA, 15 bp, Homo sapiens
gattgggacccactg

SEQ ID NO: 690677 - DNA, 15 bp, Homo sapiens
attgggacccactga

SEQ ID NO: 690678 - DNA, 15 bp, Homo sapiens
ttgggacccactgaa

SEQ ID NO: 690679 - DNA, 15 bp, Homo sapiens
tgggacccactgaaa

SEQ ID NO: 690680 - DNA, 15 bp, Homo sapiens
gggacccactgaaat

SEQ ID NO: 690681 - DNA, 15 bp, Homo sapiens
ggacccactgaaatg

SEQ ID NO: 690682 - DNA, 15 bp, Homo sapiens
gacccactgaaatgc

SEQ ID NO: 690683 - DNA, 15 bp, Homo sapiens
acccactgaaatgct

SEQ ID NO: 690684 - DNA, 15 bp, Homo sapiens
cccactgaaatgctc

SEQ ID NO: 690685 - DNA, 15 bp, Homo sapiens
ccactgaaatgctca

SEQ ID NO: 690686 - DNA, 15 bp, Homo sapiens
cactgaaatgctcat

SEQ ID NO: 690687 - DNA, 15 bp, Homo sapiens
actgaaatgctcatc

SEQ ID NO: 690688 - DNA, 15 bp, Homo sapiens
ctgaaatgctcatcc

SEQ ID NO: 690689 - DNA, 15 bp, Homo sapiens
tgaaatgctcatcca

SEQ ID NO: 690690 - DNA, 15 bp, Homo sapiens
gaaatgctcatccac

SEQ ID NO: 690691 - DNA, 15 bp, Homo sapiens
aaatgctcatccact

SEQ ID NO: 690692 - DNA, 15 bp, Homo sapiens
aatgctcatccacta

SEQ ID NO: 690693 - DNA, 15 bp, Homo sapiens
atgctcatccactaa

SEQ ID NO: 690694 - DNA, 15 bp, Homo sapiens
tgctcatccactaaa

SEQ ID NO: 690695 - DNA, 15 bp, Homo sapiens
gctcatccactaaaa

SEQ ID NO: 690696 - DNA, 15 bp, Homo sapiens
ctcatccactaaaat

SEQ ID NO: 690697 - DNA, 15 bp, Homo sapiens
tcatccactaaaatt

SEQ ID NO: 690698 - DNA, 15 bp, Homo sapiens
catccactaaaattg

SEQ ID NO: 690699 - DNA, 15 bp, Homo sapiens
atccactaaaattgg

SEQ ID NO: 690700 - DNA, 15 bp, Homo sapiens
tccactaaaattgga

SEQ ID NO: 690701 - DNA, 15 bp, Homo sapiens
ccactaaaattggac

SEQ ID NO: 690702 - DNA, 15 bp, Homo sapiens
cactaaaattggaca

SEQ ID NO: 690703 - DNA, 15 bp, Homo sapiens
actaaaattggacat

SEQ ID NO: 690704 - DNA, 15 bp, Homo sapiens
ctaaaattggacata

SEQ ID NO: 690705 - DNA, 15 bp, Homo sapiens
taaaattggacatag

SEQ ID NO: 690706 - DNA, 15 bp, Homo sapiens
aaaattggacatagg

SEQ ID NO: 690707 - DNA, 15 bp, Homo sapiens
aaattggacataggg

SEQ ID NO: 690708 - DNA, 15 bp, Homo sapiens
aattggacatagggt

SEQ ID NO: 690709 - DNA, 15 bp, Homo sapiens
attggacatagggtc

SEQ ID NO: 690710 - DNA, 15 bp, Homo sapiens
ttggacatagggtca

SEQ ID NO: 690711 - DNA, 15 bp, Homo sapiens
tggacatagggtcag

SEQ ID NO: 690712 - DNA, 15 bp, Homo sapiens
ggacatagggtcagg

SEQ ID NO: 690713 - DNA, 15 bp, Homo sapiens
gacatagggtcagga

SEQ ID NO: 690714 - DNA, 15 bp, Homo sapiens
acatagggtcaggag

SEQ ID NO: 690715 - DNA, 15 bp, Homo sapiens
catagggtcaggaga

SEQ ID NO: 690716 - DNA, 15 bp, Homo sapiens
atagggtcaggagac

SEQ ID NO: 690717 - DNA, 15 bp, Homo sapiens
tagggtcaggagact

SEQ ID NO: 690718 - DNA, 15 bp, Homo sapiens
agggtcaggagactt

SEQ ID NO: 690719 - DNA, 15 bp, Homo sapiens
gggtcaggagactta

SEQ ID NO: 690720 - DNA, 15 bp, Homo sapiens
ggtcaggagacttat

SEQ ID NO: 690721 - DNA, 15 bp, Homo sapiens
gtcaggagacttatt

SEQ ID NO: 690722 - DNA, 15 bp, Homo sapiens
tcaggagacttatta

SEQ ID NO: 690723 - DNA, 15 bp, Homo sapiens
caggagacttattaa

SEQ ID NO: 690724 - DNA, 15 bp, Homo sapiens
aggagacttattaaa

SEQ ID NO: 690725 - DNA, 15 bp, Homo sapiens
ggagacttattaaaa

SEQ ID NO: 690726 - DNA, 15 bp, Homo sapiens
gagacttattaaaat

SEQ ID NO: 690727 - DNA, 15 bp, Homo sapiens
agacttattaaaatt

SEQ ID NO: 690728 - DNA, 15 bp, Homo sapiens
gacttattaaaattt

SEQ ID NO: 690729 - DNA, 15 bp, Homo sapiens
acttattaaaatttg

SEQ ID NO: 690730 - DNA, 15 bp, Homo sapiens
cttattaaaatttgg

SEQ ID NO: 690731 - DNA, 15 bp, Homo sapiens
ttattaaaatttggc

SEQ ID NO: 690732 - DNA, 15 bp, Homo sapiens
tattaaaatttggct

SEQ ID NO: 690733 - DNA, 15 bp, Homo sapiens
attaaaatttggctt

SEQ ID NO: 690734 - DNA, 15 bp, Homo sapiens
ttaaaatttggctta

SEQ ID NO: 690735 - DNA, 15 bp, Homo sapiens
taaaatttggcttat

SEQ ID NO: 690736 - DNA, 15 bp, Homo sapiens
aaaatttggcttatt

SEQ ID NO: 690737 - DNA, 15 bp, Homo sapiens
aaatttggcttattt

SEQ ID NO: 690738 - DNA, 15 bp, Homo sapiens
aatttggcttatttc

SEQ ID NO: 690739 - DNA, 15 bp, Homo sapiens
atttggcttatttca

SEQ ID NO: 690740 - DNA, 15 bp, Homo sapiens
tttggcttatttcag

SEQ ID NO: 690741 - DNA, 15 bp, Homo sapiens
ttggcttatttcagc

SEQ ID NO: 690742 - DNA, 15 bp, Homo sapiens
tggcttatttcagca

SEQ ID NO: 690743 - DNA, 15 bp, Homo sapiens
ggcttatttcagcaa

SEQ ID NO: 690744 - DNA, 15 bp, Homo sapiens
gcttatttcagcaac

SEQ ID NO: 690745 - DNA, 15 bp, Homo sapiens
cttatttcagcaact

SEQ ID NO: 690746 - DNA, 15 bp, Homo sapiens
ttatttcagcaactg

SEQ ID NO: 690747 - DNA, 15 bp, Homo sapiens
tatttcagcaactgt

SEQ ID NO: 690748 - DNA, 15 bp, Homo sapiens
atttcagcaactgtg

SEQ ID NO: 690749 - DNA, 15 bp, Homo sapiens
tttcagcaactgtgc

SEQ ID NO: 690750 - DNA, 15 bp, Homo sapiens
ttcagcaactgtgct

SEQ ID NO: 690751 - DNA, 15 bp, Homo sapiens
tcagcaactgtgctt

SEQ ID NO: 690752 - DNA, 15 bp, Homo sapiens
cagcaactgtgcttt

SEQ ID NO: 690753 - DNA, 15 bp, Homo sapiens
agcaactgtgctttt

SEQ ID NO: 690754 - DNA, 15 bp, Homo sapiens
gcaactgtgcttttt

SEQ ID NO: 690755 - DNA, 15 bp, Homo sapiens
caactgtgctttttg

SEQ ID NO: 690756 - DNA, 15 bp, Homo sapiens
aactgtgctttttgt

SEQ ID NO: 690757 - DNA, 15 bp, Homo sapiens
actgtgctttttgta

SEQ ID NO: 690758 - DNA, 15 bp, Homo sapiens
ctgtgctttttgtac

SEQ ID NO: 690759 - DNA, 15 bp, Homo sapiens
tgtgctttttgtact

SEQ ID NO: 690760 - DNA, 15 bp, Homo sapiens
gtgctttttgtactt

SEQ ID NO: 690761 - DNA, 15 bp, Homo sapiens
tgctttttgtacttg

SEQ ID NO: 690762 - DNA, 15 bp, Homo sapiens
gctttttgtacttgt

SEQ ID NO: 690763 - DNA, 15 bp, Homo sapiens
ctttttgtacttgtt

SEQ ID NO: 690764 - DNA, 15 bp, Homo sapiens
tttttgtacttgtta

SEQ ID NO: 690765 - DNA, 15 bp, Homo sapiens
ttttgtacttgttaa

SEQ ID NO: 690766 - DNA, 15 bp, Homo sapiens
tttgtacttgttaac

SEQ ID NO: 690767 - DNA, 15 bp, Homo sapiens
ttgtacttgttaaca

SEQ ID NO: 690768 - DNA, 15 bp, Homo sapiens
tgtacttgttaacaa

SEQ ID NO: 690769 - DNA, 15 bp, Homo sapiens
gtacttgttaacaat

SEQ ID NO: 690770 - DNA, 15 bp, Homo sapiens
tacttgttaacaatt

SEQ ID NO: 690771 - DNA, 15 bp, Homo sapiens
acttgttaacaattc

SEQ ID NO: 690772 - DNA, 15 bp, Homo sapiens
cttgttaacaattca

SEQ ID NO: 690773 - DNA, 15 bp, Homo sapiens
ttgttaacaattcat

SEQ ID NO: 690774 - DNA, 15 bp, Homo sapiens
tgttaacaattcatt

SEQ ID NO: 690775 - DNA, 15 bp, Homo sapiens
gttaacaattcattc

SEQ ID NO: 690776 - DNA, 15 bp, Homo sapiens
ttaacaattcattca

SEQ ID NO: 690777 - DNA, 15 bp, Homo sapiens
taacaattcattcat

SEQ ID NO: 690778 - DNA, 15 bp, Homo sapiens
aacaattcattcatt

SEQ ID NO: 690779 - DNA, 15 bp, Homo sapiens
acaattcattcattg

SEQ ID NO: 690780 - DNA, 15 bp, Homo sapiens
caattcattcattgc

SEQ ID NO: 690781 - DNA, 15 bp, Homo sapiens
aattcattcattgcc

SEQ ID NO: 690782 - DNA, 15 bp, Homo sapiens
attcattcattgcca

SEQ ID NO: 690783 - DNA, 15 bp, Homo sapiens
ttcattcattgccat

SEQ ID NO: 690784 - DNA, 15 bp, Homo sapiens
tcattcattgccata

SEQ ID NO: 690785 - DNA, 15 bp, Homo sapiens
cattcattgccataa

SEQ ID NO: 690786 - DNA, 15 bp, Homo sapiens
attcattgccataac

SEQ ID NO: 690787 - DNA, 15 bp, Homo sapiens
ttcattgccataacc

SEQ ID NO: 690788 - DNA, 15 bp, Homo sapiens
tcattgccataacct

SEQ ID NO: 690789 - DNA, 15 bp, Homo sapiens
cattgccataacctg

SEQ ID NO: 690790 - DNA, 15 bp, Homo sapiens
attgccataacctgc

SEQ ID NO: 690791 - DNA, 15 bp, Homo sapiens
ttgccataacctgcc

SEQ ID NO: 690792 - DNA, 15 bp, Homo sapiens
tgccataacctgcct

SEQ ID NO: 690793 - DNA, 15 bp, Homo sapiens
gccataacctgcctg

SEQ ID NO: 690794 - DNA, 15 bp, Homo sapiens
ccataacctgcctgt

SEQ ID NO: 690795 - DNA, 15 bp, Homo sapiens
cataacctgcctgtg

SEQ ID NO: 690796 - DNA, 15 bp, Homo sapiens
ataacctgcctgtga

SEQ ID NO: 690797 - DNA, 15 bp, Homo sapiens
taacctgcctgtgat

SEQ ID NO: 690798 - DNA, 15 bp, Homo sapiens
aacctgcctgtgatt

SEQ ID NO: 690799 - DNA, 15 bp, Homo sapiens
acctgcctgtgattt

SEQ ID NO: 690800 - DNA, 15 bp, Homo sapiens
cctgcctgtgatttt

SEQ ID NO: 690801 - DNA, 15 bp, Homo sapiens
ctgcctgtgattttg

SEQ ID NO: 690802 - DNA, 15 bp, Homo sapiens
tgcctgtgattttgt

SEQ ID NO: 690803 - DNA, 15 bp, Homo sapiens
gcctgtgattttgtc

SEQ ID NO: 690804 - DNA, 15 bp, Homo sapiens
cctgtgattttgtca

SEQ ID NO: 690805 - DNA, 15 bp, Homo sapiens
ctgtgattttgtcat

SEQ ID NO: 690806 - DNA, 15 bp, Homo sapiens
tgtgattttgtcata

SEQ ID NO: 690807 - DNA, 15 bp, Homo sapiens
gtgattttgtcataa

SEQ ID NO: 690808 - DNA, 15 bp, Homo sapiens
tgattttgtcataat

SEQ ID NO: 690809 - DNA, 15 bp, Homo sapiens
gattttgtcataatc

SEQ ID NO: 690810 - DNA, 15 bp, Homo sapiens
attttgtcataatct

SEQ ID NO: 690811 - DNA, 15 bp, Homo sapiens
ttttgtcataatctg

SEQ ID NO: 690812 - DNA, 15 bp, Homo sapiens
tttgtcataatctgt

SEQ ID NO: 690813 - DNA, 15 bp, Homo sapiens
ttgtcataatctgtt

SEQ ID NO: 690814 - DNA, 15 bp, Homo sapiens
tgtcataatctgttg

SEQ ID NO: 690815 - DNA, 15 bp, Homo sapiens
gtcataatctgttgt

SEQ ID NO: 690816 - DNA, 15 bp, Homo sapiens
tcataatctgttgtc

SEQ ID NO: 690817 - DNA, 15 bp, Homo sapiens
cataatctgttgtca

SEQ ID NO: 690818 - DNA, 15 bp, Homo sapiens
ataatctgttgtcat

SEQ ID NO: 690819 - DNA, 15 bp, Homo sapiens
taatctgttgtcatc

SEQ ID NO: 690820 - DNA, 15 bp, Homo sapiens
aatctgttgtcatct

SEQ ID NO: 690821 - DNA, 15 bp, Homo sapiens
atctgttgtcatctc

SEQ ID NO: 690822 - DNA, 15 bp, Homo sapiens
tctgttgtcatctct

SEQ ID NO: 690823 - DNA, 15 bp, Homo sapiens
ctgttgtcatctctt

SEQ ID NO: 690824 - DNA, 15 bp, Homo sapiens
tgttgtcatctcttg

SEQ ID NO: 690825 - DNA, 15 bp, Homo sapiens
gttgtcatctcttgc

SEQ ID NO: 690826 - DNA, 15 bp, Homo sapiens
ttgtcatctcttgct

SEQ ID NO: 690827 - DNA, 15 bp, Homo sapiens
tgtcatctcttgcta

SEQ ID NO: 690828 - DNA, 15 bp, Homo sapiens
gtcatctcttgctat

SEQ ID NO: 690829 - DNA, 15 bp, Homo sapiens
tcatctcttgctatg

SEQ ID NO: 690830 - DNA, 15 bp, Homo sapiens
catctcttgctatgt

SEQ ID NO: 690831 - DNA, 15 bp, Homo sapiens
atctcttgctatgtt

SEQ ID NO: 690832 - DNA, 15 bp, Homo sapiens
tctcttgctatgttc

SEQ ID NO: 690833 - DNA, 15 bp, Homo sapiens
ctcttgctatgttcc

SEQ ID NO: 690834 - DNA, 15 bp, Homo sapiens
tcttgctatgttccc

SEQ ID NO: 690835 - DNA, 15 bp, Homo sapiens
cttgctatgttcccc

SEQ ID NO: 690836 - DNA, 15 bp, Homo sapiens
ttgctatgttccccc

SEQ ID NO: 690837 - DNA, 15 bp, Homo sapiens
tgctatgttccccca

SEQ ID NO: 690838 - DNA, 15 bp, Homo sapiens
gctatgttcccccag

SEQ ID NO: 690839 - DNA, 15 bp, Homo sapiens
ctatgttcccccagg

SEQ ID NO: 690840 - DNA, 15 bp, Homo sapiens
tatgttcccccagga

SEQ ID NO: 690841 - DNA, 15 bp, Homo sapiens
atgttcccccaggaa

SEQ ID NO: 690842 - DNA, 15 bp, Homo sapiens
tgttcccccaggaat

SEQ ID NO: 690843 - DNA, 15 bp, Homo sapiens
gttcccccaggaatt

SEQ ID NO: 690844 - DNA, 15 bp, Homo sapiens
ttcccccaggaatta

SEQ ID NO: 690845 - DNA, 15 bp, Homo sapiens
tcccccaggaattag

SEQ ID NO: 690846 - DNA, 15 bp, Homo sapiens
cccccaggaattagc

SEQ ID NO: 690847 - DNA, 15 bp, Homo sapiens
ccccaggaattagca

SEQ ID NO: 690848 - DNA, 15 bp, Homo sapiens
cccaggaattagcaa

SEQ ID NO: 690849 - DNA, 15 bp, Homo sapiens
ccaggaattagcaaa

SEQ ID NO: 690850 - DNA, 15 bp, Homo sapiens
caggaattagcaaag

SEQ ID NO: 690851 - DNA, 15 bp, Homo sapiens
aggaattagcaaagt

SEQ ID NO: 690852 - DNA, 15 bp, Homo sapiens
ggaattagcaaagta

SEQ ID NO: 690853 - DNA, 15 bp, Homo sapiens
gaattagcaaagtaa

SEQ ID NO: 690854 - DNA, 15 bp, Homo sapiens
aattagcaaagtaat

SEQ ID NO: 690855 - DNA, 15 bp, Homo sapiens
attagcaaagtaatt

SEQ ID NO: 690856 - DNA, 15 bp, Homo sapiens
ttagcaaagtaattt

SEQ ID NO: 690857 - DNA, 15 bp, Homo sapiens
tagcaaagtaatttc

SEQ ID NO: 690858 - DNA, 15 bp, Homo sapiens
agcaaagtaatttct

SEQ ID NO: 690859 - DNA, 15 bp, Homo sapiens
gcaaagtaatttctg

SEQ ID NO: 690860 - DNA, 15 bp, Homo sapiens
caaagtaatttctgt

SEQ ID NO: 690861 - DNA, 15 bp, Homo sapiens
aaagtaatttctgtc

SEQ ID NO: 690862 - DNA, 15 bp, Homo sapiens
aagtaatttctgtca

SEQ ID NO: 690863 - DNA, 15 bp, Homo sapiens
agtaatttctgtcat

SEQ ID NO: 690864 - DNA, 15 bp, Homo sapiens
gtaatttctgtcatc

SEQ ID NO: 690865 - DNA, 15 bp, Homo sapiens
taatttctgtcatca

SEQ ID NO: 690866 - DNA, 15 bp, Homo sapiens
aatttctgtcatcat

SEQ ID NO: 690867 - DNA, 15 bp, Homo sapiens
atttctgtcatcatg

SEQ ID NO: 690868 - DNA, 15 bp, Homo sapiens
tttctgtcatcatgt

SEQ ID NO: 690869 - DNA, 15 bp, Homo sapiens
ttctgtcatcatgtt

SEQ ID NO: 690870 - DNA, 15 bp, Homo sapiens
tctgtcatcatgttc

SEQ ID NO: 690871 - DNA, 15 bp, Homo sapiens
ctgtcatcatgttcg

SEQ ID NO: 690872 - DNA, 15 bp, Homo sapiens
tgtcatcatgttcgt

SEQ ID NO: 690873 - DNA, 15 bp, Homo sapiens
gtcatcatgttcgta

SEQ ID NO: 690874 - DNA, 15 bp, Homo sapiens
tcatcatgttcgtaa

SEQ ID NO: 690875 - DNA, 15 bp, Homo sapiens
catcatgttcgtaat

SEQ ID NO: 690876 - DNA, 15 bp, Homo sapiens
atcatgttcgtaatt

SEQ ID NO: 690877 - DNA, 15 bp, Homo sapiens
tcatgttcgtaattg

SEQ ID NO: 690878 - DNA, 15 bp, Homo sapiens
catgttcgtaattgt

SEQ ID NO: 690879 - DNA, 15 bp, Homo sapiens
atgttcgtaattgtt

SEQ ID NO: 690880 - DNA, 15 bp, Homo sapiens
tgttcgtaattgttt

SEQ ID NO: 690881 - DNA, 15 bp, Homo sapiens
gttcgtaattgtttt

SEQ ID NO: 690882 - DNA, 15 bp, Homo sapiens
ttcgtaattgttttg

SEQ ID NO: 690883 - DNA, 15 bp, Homo sapiens
tcgtaattgttttgg

SEQ ID NO: 690884 - DNA, 15 bp, Homo sapiens
cgtaattgttttggc

SEQ ID NO: 690885 - DNA, 15 bp, Homo sapiens
gtaattgttttggct

SEQ ID NO: 690886 - DNA, 15 bp, Homo sapiens
taattgttttggctc

SEQ ID NO: 690887 - DNA, 15 bp, Homo sapiens
aattgttttggctca

SEQ ID NO: 690888 - DNA, 15 bp, Homo sapiens
attgttttggctcag

SEQ ID NO: 690889 - DNA, 15 bp, Homo sapiens
ttgttttggctcaga

SEQ ID NO: 690890 - DNA, 15 bp, Homo sapiens
tgttttggctcagaa

SEQ ID NO: 690891 - DNA, 15 bp, Homo sapiens
gttttggctcagaat

SEQ ID NO: 690892 - DNA, 15 bp, Homo sapiens
ttttggctcagaatt

SEQ ID NO: 690893 - DNA, 15 bp, Homo sapiens
tttggctcagaattg

SEQ ID NO: 690894 - DNA, 15 bp, Homo sapiens
ttggctcagaattga

SEQ ID NO: 690895 - DNA, 15 bp, Homo sapiens
tggctcagaattgat

SEQ ID NO: 690896 - DNA, 15 bp, Homo sapiens
ggctcagaattgatt

SEQ ID NO: 690897 - DNA, 15 bp, Homo sapiens
gctcagaattgattt

SEQ ID NO: 690898 - DNA, 15 bp, Homo sapiens
ctcagaattgatttt

SEQ ID NO: 690899 - DNA, 15 bp, Homo sapiens
tcagaattgattttg

SEQ ID NO: 690900 - DNA, 15 bp, Homo sapiens
cagaattgattttgt

SEQ ID NO: 690901 - DNA, 15 bp, Homo sapiens
agaattgattttgtt

SEQ ID NO: 690902 - DNA, 15 bp, Homo sapiens
gaattgattttgttt

SEQ ID NO: 690903 - DNA, 15 bp, Homo sapiens
aattgattttgtttg

SEQ ID NO: 690904 - DNA, 15 bp, Homo sapiens
attgattttgtttgt

SEQ ID NO: 690905 - DNA, 15 bp, Homo sapiens
ttgattttgtttgtc

SEQ ID NO: 690906 - DNA, 15 bp, Homo sapiens
tgattttgtttgtcc

SEQ ID NO: 690907 - DNA, 15 bp, Homo sapiens
gattttgtttgtcca

SEQ ID NO: 690908 - DNA, 15 bp, Homo sapiens
attttgtttgtccaa

SEQ ID NO: 690909 - DNA, 15 bp, Homo sapiens
ttttgtttgtccaat

SEQ ID NO: 690910 - DNA, 15 bp, Homo sapiens
tttgtttgtccaata

SEQ ID NO: 690911 - DNA, 15 bp, Homo sapiens
ttgtttgtccaatat

SEQ ID NO: 690912 - DNA, 15 bp, Homo sapiens
tgtttgtccaatatg

SEQ ID NO: 690913 - DNA, 15 bp, Homo sapiens
gtttgtccaatatgc

SEQ ID NO: 690914 - DNA, 15 bp, Homo sapiens
tttgtccaatatgca

SEQ ID NO: 690915 - DNA, 15 bp, Homo sapiens
ttgtccaatatgcat

SEQ ID NO: 690916 - DNA, 15 bp, Homo sapiens
tgtccaatatgcata

SEQ ID NO: 690917 - DNA, 15 bp, Homo sapiens
gtccaatatgcataa

SEQ ID NO: 690918 - DNA, 15 bp, Homo sapiens
tccaatatgcataaa

SEQ ID NO: 690919 - DNA, 15 bp, Homo sapiens
ccaatatgcataaag

SEQ ID NO: 690920 - DNA, 15 bp, Homo sapiens
caatatgcataaagt

SEQ ID NO: 690921 - DNA, 15 bp, Homo sapiens
aatatgcataaagtc

SEQ ID NO: 690922 - DNA, 15 bp, Homo sapiens
atatgcataaagtcg

SEQ ID NO: 690923 - DNA, 15 bp, Homo sapiens
tatgcataaagtcgc

SEQ ID NO: 690924 - DNA, 15 bp, Homo sapiens
atgcataaagtcgct

SEQ ID NO: 690925 - DNA, 15 bp, Homo sapiens
tgcataaagtcgctt

SEQ ID NO: 690926 - DNA, 15 bp, Homo sapiens
gcataaagtcgcttt

SEQ ID NO: 690927 - DNA, 15 bp, Homo sapiens
cataaagtcgctttt

SEQ ID NO: 690928 - DNA, 15 bp, Homo sapiens
ataaagtcgcttttg

SEQ ID NO: 690929 - DNA, 15 bp, Homo sapiens
taaagtcgcttttgt

SEQ ID NO: 690930 - DNA, 15 bp, Homo sapiens
aaagtcgcttttgtt

SEQ ID NO: 690931 - DNA, 15 bp, Homo sapiens
aagtcgcttttgttt

SEQ ID NO: 690932 - DNA, 15 bp, Homo sapiens
agtcgcttttgttta

SEQ ID NO: 690933 - DNA, 15 bp, Homo sapiens
gtcgcttttgtttat

SEQ ID NO: 690934 - DNA, 15 bp, Homo sapiens
tcgcttttgtttatg

SEQ ID NO: 690935 - DNA, 15 bp, Homo sapiens
cgcttttgtttatga

SEQ ID NO: 690936 - DNA, 15 bp, Homo sapiens
gcttttgtttatgag

SEQ ID NO: 690937 - DNA, 15 bp, Homo sapiens
cttttgtttatgagt

SEQ ID NO: 690938 - DNA, 15 bp, Homo sapiens
ttttgtttatgagtt

SEQ ID NO: 690939 - DNA, 15 bp, Homo sapiens
tttgtttatgagtta

SEQ ID NO: 690940 - DNA, 15 bp, Homo sapiens
ttgtttatgagttat

SEQ ID NO: 690941 - DNA, 15 bp, Homo sapiens
tgtttatgagttatc

SEQ ID NO: 690942 - DNA, 15 bp, Homo sapiens
gtttatgagttatct

SEQ ID NO: 690943 - DNA, 15 bp, Homo sapiens
tttatgagttatcta

SEQ ID NO: 690944 - DNA, 15 bp, Homo sapiens
ttatgagttatctat

SEQ ID NO: 690945 - DNA, 15 bp, Homo sapiens
tatgagttatctata

SEQ ID NO: 690946 - DNA, 15 bp, Homo sapiens
atgagttatctatag

SEQ ID NO: 690947 - DNA, 15 bp, Homo sapiens
tgagttatctatagc

SEQ ID NO: 690948 - DNA, 15 bp, Homo sapiens
gagttatctatagca

SEQ ID NO: 690949 - DNA, 15 bp, Homo sapiens
agttatctatagcac

SEQ ID NO: 690950 - DNA, 15 bp, Homo sapiens
gttatctatagcaca

SEQ ID NO: 690951 - DNA, 15 bp, Homo sapiens
ttatctatagcacaa

SEQ ID NO: 690952 - DNA, 15 bp, Homo sapiens
tatctatagcacaag

SEQ ID NO: 690953 - DNA, 15 bp, Homo sapiens
atctatagcacaaga

SEQ ID NO: 690954 - DNA, 15 bp, Homo sapiens
tctatagcacaagaa

SEQ ID NO: 690955 - DNA, 15 bp, Homo sapiens
ctatagcacaagaat

SEQ ID NO: 690956 - DNA, 15 bp, Homo sapiens
tatagcacaagaata

SEQ ID NO: 690957 - DNA, 15 bp, Homo sapiens
atagcacaagaatat

SEQ ID NO: 690958 - DNA, 15 bp, Homo sapiens
tagcacaagaatata

SEQ ID NO: 690959 - DNA, 15 bp, Homo sapiens
agcacaagaatatat

SEQ ID NO: 690960 - DNA, 15 bp, Homo sapiens
gcacaagaatatatg

SEQ ID NO: 690961 - DNA, 15 bp, Homo sapiens
cacaagaatatatgc

SEQ ID NO: 690962 - DNA, 15 bp, Homo sapiens
acaagaatatatgcc

SEQ ID NO: 690963 - DNA, 15 bp, Homo sapiens
caagaatatatgcca

SEQ ID NO: 690964 - DNA, 15 bp, Homo sapiens
aagaatatatgccaa

SEQ ID NO: 690965 - DNA, 15 bp, Homo sapiens
agaatatatgccaaa

SEQ ID NO: 690966 - DNA, 15 bp, Homo sapiens
gaatatatgccaaaa

SEQ ID NO: 690967 - DNA, 15 bp, Homo sapiens
aatatatgccaaaac

SEQ ID NO: 690968 - DNA, 15 bp, Homo sapiens
atatatgccaaaaca

SEQ ID NO: 690969 - DNA, 15 bp, Homo sapiens
tatatgccaaaacat

SEQ ID NO: 690970 - DNA, 15 bp, Homo sapiens
atatgccaaaacata

SEQ ID NO: 690971 - DNA, 15 bp, Homo sapiens
tatgccaaaacatat

SEQ ID NO: 690972 - DNA, 15 bp, Homo sapiens
atgccaaaacatatg

SEQ ID NO: 690973 - DNA, 15 bp, Homo sapiens
tgccaaaacatatgt

SEQ ID NO: 690974 - DNA, 15 bp, Homo sapiens
gccaaaacatatgta

SEQ ID NO: 690975 - DNA, 15 bp, Homo sapiens
ccaaaacatatgtac

SEQ ID NO: 690976 - DNA, 15 bp, Homo sapiens
caaaacatatgtacc

SEQ ID NO: 690977 - DNA, 15 bp, Homo sapiens
aaaacatatgtaccc

SEQ ID NO: 690978 - DNA, 15 bp, Homo sapiens
aaacatatgtacccc

SEQ ID NO: 690979 - DNA, 15 bp, Homo sapiens
aacatatgtacccca

SEQ ID NO: 690980 - DNA, 15 bp, Homo sapiens
acatatgtaccccaa

SEQ ID NO: 690981 - DNA, 15 bp, Homo sapiens
catatgtaccccaat

SEQ ID NO: 690982 - DNA, 15 bp, Homo sapiens
atatgtaccccaatt

SEQ ID NO: 690983 - DNA, 15 bp, Homo sapiens
tatgtaccccaatta

SEQ ID NO: 690984 - DNA, 15 bp, Homo sapiens
atgtaccccaattac

SEQ ID NO: 690985 - DNA, 15 bp, Homo sapiens
tgtaccccaattacc

SEQ ID NO: 690986 - DNA, 15 bp, Homo sapiens
gtaccccaattacct

SEQ ID NO: 690987 - DNA, 15 bp, Homo sapiens
taccccaattaccta

SEQ ID NO: 690988 - DNA, 15 bp, Homo sapiens
accccaattacctaa

SEQ ID NO: 690989 - DNA, 15 bp, Homo sapiens
ccccaattacctaaa

SEQ ID NO: 690990 - DNA, 15 bp, Homo sapiens
cccaattacctaaac

SEQ ID NO: 690991 - DNA, 15 bp, Homo sapiens
ccaattacctaaacc

SEQ ID NO: 690992 - DNA, 15 bp, Homo sapiens
caattacctaaacct

SEQ ID NO: 690993 - DNA, 15 bp, Homo sapiens
aattacctaaacctt

SEQ ID NO: 690994 - DNA, 15 bp, Homo sapiens
attacctaaaccttt

SEQ ID NO: 690995 - DNA, 15 bp, Homo sapiens
ttacctaaacctttt

SEQ ID NO: 690996 - DNA, 15 bp, Homo sapiens
tacctaaacctttta

SEQ ID NO: 690997 - DNA, 15 bp, Homo sapiens
acctaaaccttttag

SEQ ID NO: 690998 - DNA, 15 bp, Homo sapiens
cctaaaccttttagc

SEQ ID NO: 690999 - DNA, 15 bp, Homo sapiens
ctaaaccttttagca

SEQ ID NO: 691000 - DNA, 15 bp, Homo sapiens
taaaccttttagcaa

SEQ ID NO: 691001 - DNA, 15 bp, Homo sapiens
aaaccttttagcaag

SEQ ID NO: 691002 - DNA, 15 bp, Homo sapiens
aaccttttagcaagg

SEQ ID NO: 691003 - DNA, 15 bp, Homo sapiens
accttttagcaaggg

SEQ ID NO: 691004 - DNA, 15 bp, Homo sapiens
ccttttagcaagggc

SEQ ID NO: 691005 - DNA, 15 bp, Homo sapiens
cttttagcaagggct

SEQ ID NO: 691006 - DNA, 15 bp, Homo sapiens
ttttagcaagggcta

SEQ ID NO: 691007 - DNA, 15 bp, Homo sapiens
tttagcaagggctaa

SEQ ID NO: 691008 - DNA, 15 bp, Homo sapiens
ttagcaagggctaat

SEQ ID NO: 691009 - DNA, 15 bp, Homo sapiens
tagcaagggctaatg

SEQ ID NO: 691010 - DNA, 15 bp, Homo sapiens
agcaagggctaatga

SEQ ID NO: 691011 - DNA, 15 bp, Homo sapiens
gcaagggctaatgaa

SEQ ID NO: 691012 - DNA, 15 bp, Homo sapiens
caagggctaatgaaa

SEQ ID NO: 691013 - DNA, 15 bp, Homo sapiens
aagggctaatgaaag

SEQ ID NO: 691014 - DNA, 15 bp, Homo sapiens
agggctaatgaaaga

SEQ ID NO: 691015 - DNA, 15 bp, Homo sapiens
gggctaatgaaagaa

SEQ ID NO: 691016 - DNA, 15 bp, Homo sapiens
ggctaatgaaagaat

SEQ ID NO: 691017 - DNA, 15 bp, Homo sapiens
gctaatgaaagaatt

SEQ ID NO: 691018 - DNA, 15 bp, Homo sapiens
ctaatgaaagaattt

SEQ ID NO: 691019 - DNA, 15 bp, Homo sapiens
taatgaaagaattta

SEQ ID NO: 691020 - DNA, 15 bp, Homo sapiens
aatgaaagaatttaa

SEQ ID NO: 691021 - DNA, 15 bp, Homo sapiens
atgaaagaatttaaa

SEQ ID NO: 691022 - DNA, 15 bp, Homo sapiens
tgaaagaatttaaaa

SEQ ID NO: 691023 - DNA, 15 bp, Homo sapiens
gaaagaatttaaaag

SEQ ID NO: 691024 - DNA, 15 bp, Homo sapiens
aaagaatttaaaaga

SEQ ID NO: 691025 - DNA, 15 bp, Homo sapiens
aagaatttaaaagaa

SEQ ID NO: 691026 - DNA, 15 bp, Homo sapiens
agaatttaaaagaat

SEQ ID NO: 691027 - DNA, 15 bp, Homo sapiens
gaatttaaaagaatg

SEQ ID NO: 691028 - DNA, 15 bp, Homo sapiens
aatttaaaagaatga

SEQ ID NO: 691029 - DNA, 15 bp, Homo sapiens
atttaaaagaatgat

SEQ ID NO: 691030 - DNA, 15 bp, Homo sapiens
tttaaaagaatgata

SEQ ID NO: 691031 - DNA, 15 bp, Homo sapiens
ttaaaagaatgataa

SEQ ID NO: 691032 - DNA, 15 bp, Homo sapiens
taaaagaatgataag

SEQ ID NO: 691033 - DNA, 15 bp, Homo sapiens
aaaagaatgataagc

SEQ ID NO: 691034 - DNA, 15 bp, Homo sapiens
aaagaatgataagcc

SEQ ID NO: 691035 - DNA, 15 bp, Homo sapiens
aagaatgataagccc

SEQ ID NO: 691036 - DNA, 15 bp, Homo sapiens
agaatgataagccct

SEQ ID NO: 691037 - DNA, 15 bp, Homo sapiens
gaatgataagccctt

SEQ ID NO: 691038 - DNA, 15 bp, Homo sapiens
aatgataagcccttt

SEQ ID NO: 691039 - DNA, 15 bp, Homo sapiens
atgataagccctttc

SEQ ID NO: 691040 - DNA, 15 bp, Homo sapiens
tgataagccctttct

SEQ ID NO: 691041 - DNA, 15 bp, Homo sapiens
gataagccctttctt

SEQ ID NO: 691042 - DNA, 15 bp, Homo sapiens
ataagccctttcttc

SEQ ID NO: 691043 - DNA, 15 bp, Homo sapiens
taagccctttcttct

SEQ ID NO: 691044 - DNA, 15 bp, Homo sapiens
aagccctttcttctc

SEQ ID NO: 691045 - DNA, 15 bp, Homo sapiens
agccctttcttctca

SEQ ID NO: 691046 - DNA, 15 bp, Homo sapiens
gccctttcttctcat

SEQ ID NO: 691047 - DNA, 15 bp, Homo sapiens
ccctttcttctcata

SEQ ID NO: 691048 - DNA, 15 bp, Homo sapiens
cctttcttctcatat

SEQ ID NO: 691049 - DNA, 15 bp, Homo sapiens
ctttcttctcatatc

SEQ ID NO: 691050 - DNA, 15 bp, Homo sapiens
tttcttctcatatca

SEQ ID NO: 691051 - DNA, 15 bp, Homo sapiens
ttcttctcatatcat

SEQ ID NO: 691052 - DNA, 15 bp, Homo sapiens
tcttctcatatcatt

SEQ ID NO: 691053 - DNA, 15 bp, Homo sapiens
cttctcatatcattt

SEQ ID NO: 691054 - DNA, 15 bp, Homo sapiens
ttctcatatcatttt

SEQ ID NO: 691055 - DNA, 15 bp, Homo sapiens
tctcatatcattttg

SEQ ID NO: 691056 - DNA, 15 bp, Homo sapiens
ctcatatcattttga

SEQ ID NO: 691057 - DNA, 15 bp, Homo sapiens
tcatatcattttgaa

SEQ ID NO: 691058 - DNA, 15 bp, Homo sapiens
catatcattttgaat

SEQ ID NO: 691059 - DNA, 15 bp, Homo sapiens
atatcattttgaata

SEQ ID NO: 691060 - DNA, 15 bp, Homo sapiens
tatcattttgaatac

SEQ ID NO: 691061 - DNA, 15 bp, Homo sapiens
atcattttgaatact

SEQ ID NO: 691062 - DNA, 15 bp, Homo sapiens
tcattttgaatactt

SEQ ID NO: 691063 - DNA, 15 bp, Homo sapiens
cattttgaatacttc

SEQ ID NO: 691064 - DNA, 15 bp, Homo sapiens
attttgaatacttcc

SEQ ID NO: 691065 - DNA, 15 bp, Homo sapiens
ttttgaatacttcct

SEQ ID NO: 691066 - DNA, 15 bp, Homo sapiens
tttgaatacttcctc

SEQ ID NO: 691067 - DNA, 15 bp, Homo sapiens
ttgaatacttcctcc

SEQ ID NO: 691068 - DNA, 15 bp, Homo sapiens
tgaatacttcctcca

SEQ ID NO: 691069 - DNA, 15 bp, Homo sapiens
gaatacttcctccaa

SEQ ID NO: 691070 - DNA, 15 bp, Homo sapiens
aatacttcctccaat

SEQ ID NO: 691071 - DNA, 15 bp, Homo sapiens
atacttcctccaata

SEQ ID NO: 691072 - DNA, 15 bp, Homo sapiens
tacttcctccaatat

SEQ ID NO: 691073 - DNA, 15 bp, Homo sapiens
acttcctccaatatt

SEQ ID NO: 691074 - DNA, 15 bp, Homo sapiens
cttcctccaatattt

SEQ ID NO: 691075 - DNA, 15 bp, Homo sapiens
ttcctccaatatttg

SEQ ID NO: 691076 - DNA, 15 bp, Homo sapiens
tcctccaatatttgg

SEQ ID NO: 691077 - DNA, 15 bp, Homo sapiens
cctccaatatttgga

SEQ ID NO: 691078 - DNA, 15 bp, Homo sapiens
ctccaatatttggag

SEQ ID NO: 691079 - DNA, 15 bp, Homo sapiens
tccaatatttggagt

SEQ ID NO: 691080 - DNA, 15 bp, Homo sapiens
ccaatatttggagta

SEQ ID NO: 691081 - DNA, 15 bp, Homo sapiens
caatatttggagtat

SEQ ID NO: 691082 - DNA, 15 bp, Homo sapiens
aatatttggagtatg

SEQ ID NO: 691083 - DNA, 15 bp, Homo sapiens
atatttggagtatgt

SEQ ID NO: 691084 - DNA, 15 bp, Homo sapiens
tatttggagtatgta

SEQ ID NO: 691085 - DNA, 15 bp, Homo sapiens
atttggagtatgtag

SEQ ID NO: 691086 - DNA, 15 bp, Homo sapiens
tttggagtatgtagg

SEQ ID NO: 691087 - DNA, 15 bp, Homo sapiens
ttggagtatgtagga

SEQ ID NO: 691088 - DNA, 15 bp, Homo sapiens
tggagtatgtaggag

SEQ ID NO: 691089 - DNA, 15 bp, Homo sapiens
ggagtatgtaggagt

SEQ ID NO: 691090 - DNA, 15 bp, Homo sapiens
gagtatgtaggagtt

SEQ ID NO: 691091 - DNA, 15 bp, Homo sapiens
agtatgtaggagttc

SEQ ID NO: 691092 - DNA, 15 bp, Homo sapiens
gtatgtaggagttct

SEQ ID NO: 691093 - DNA, 15 bp, Homo sapiens
tatgtaggagttctt

SEQ ID NO: 691094 - DNA, 15 bp, Homo sapiens
atgtaggagttcttt

SEQ ID NO: 691095 - DNA, 15 bp, Homo sapiens
tgtaggagttctttt

SEQ ID NO: 691096 - DNA, 15 bp, Homo sapiens
gtaggagttcttttt

SEQ ID NO: 691097 - DNA, 15 bp, Homo sapiens
taggagttctttttt

SEQ ID NO: 691098 - DNA, 15 bp, Homo sapiens
aggagttctttttta

SEQ ID NO: 691099 - DNA, 15 bp, Homo sapiens
ggagttcttttttat

SEQ ID NO: 691100 - DNA, 15 bp, Homo sapiens
gagttcttttttatt

SEQ ID NO: 691101 - DNA, 15 bp, Homo sapiens
agttcttttttattt

SEQ ID NO: 691102 - DNA, 15 bp, Homo sapiens
gttcttttttattta

SEQ ID NO: 691103 - DNA, 15 bp, Homo sapiens
ttcttttttatttaa

SEQ ID NO: 691104 - DNA, 15 bp, Homo sapiens
tcttttttatttaaa

SEQ ID NO: 691105 - DNA, 15 bp, Homo sapiens
cttttttatttaaaa

SEQ ID NO: 691106 - DNA, 15 bp, Homo sapiens
ttttttatttaaaaa

SEQ ID NO: 691107 - DNA, 15 bp, Homo sapiens
tttttatttaaaaaa

SEQ ID NO: 691108 - DNA, 15 bp, Homo sapiens
ttttatttaaaaaat

SEQ ID NO: 691109 - DNA, 15 bp, Homo sapiens
tttatttaaaaaatt

SEQ ID NO: 691110 - DNA, 15 bp, Homo sapiens
ttatttaaaaaattc

SEQ ID NO: 691111 - DNA, 15 bp, Homo sapiens
tatttaaaaaattct

SEQ ID NO: 691112 - DNA, 15 bp, Homo sapiens
atttaaaaaattctg

SEQ ID NO: 691113 - DNA, 15 bp, Homo sapiens
tttaaaaaattctgc

SEQ ID NO: 691114 - DNA, 15 bp, Homo sapiens
ttaaaaaattctgcc

SEQ ID NO: 691115 - DNA, 15 bp, Homo sapiens
taaaaaattctgcct

SEQ ID NO: 691116 - DNA, 15 bp, Homo sapiens
aaaaaattctgcctc

SEQ ID NO: 691117 - DNA, 15 bp, Homo sapiens
aaaaattctgcctca

SEQ ID NO: 691118 - DNA, 15 bp, Homo sapiens
aaaattctgcctcaa

SEQ ID NO: 691119 - DNA, 15 bp, Homo sapiens
aaattctgcctcaaa

SEQ ID NO: 691120 - DNA, 15 bp, Homo sapiens
aattctgcctcaaag

SEQ ID NO: 691121 - DNA, 15 bp, Homo sapiens
attctgcctcaaaga

SEQ ID NO: 691122 - DNA, 15 bp, Homo sapiens
ttctgcctcaaagac

SEQ ID NO: 691123 - DNA, 15 bp, Homo sapiens
tctgcctcaaagact

SEQ ID NO: 691124 - DNA, 15 bp, Homo sapiens
ctgcctcaaagactt

SEQ ID NO: 691125 - DNA, 15 bp, Homo sapiens
tgcctcaaagacttt

SEQ ID NO: 691126 - DNA, 15 bp, Homo sapiens
gcctcaaagactttt

SEQ ID NO: 691127 - DNA, 15 bp, Homo sapiens
cctcaaagacttttt

SEQ ID NO: 691128 - DNA, 15 bp, Homo sapiens
ctcaaagactttttt

SEQ ID NO: 691129 - DNA, 15 bp, Homo sapiens
tcaaagacttttttt

SEQ ID NO: 691130 - DNA, 15 bp, Homo sapiens
caaagactttttttt

SEQ ID NO: 691131 - DNA, 15 bp, Homo sapiens
aaagactttttttta

SEQ ID NO: 691132 - DNA, 15 bp, Homo sapiens
aagacttttttttaa

SEQ ID NO: 691133 - DNA, 15 bp, Homo sapiens
agacttttttttaaa

SEQ ID NO: 691134 - DNA, 15 bp, Homo sapiens
gacttttttttaaac

SEQ ID NO: 691135 - DNA, 15 bp, Homo sapiens
acttttttttaaact

SEQ ID NO: 691136 - DNA, 15 bp, Homo sapiens
cttttttttaaactt

SEQ ID NO: 691137 - DNA, 15 bp, Homo sapiens
ttttttttaaacttg

SEQ ID NO: 691138 - DNA, 15 bp, Homo sapiens
tttttttaaacttgg

SEQ ID NO: 691139 - DNA, 15 bp, Homo sapiens
ttttttaaacttgga

SEQ ID NO: 691140 - DNA, 15 bp, Homo sapiens
tttttaaacttggaa

SEQ ID NO: 691141 - DNA, 15 bp, Homo sapiens
ttttaaacttggaaa

SEQ ID NO: 691142 - DNA, 15 bp, Homo sapiens
tttaaacttggaaac

SEQ ID NO: 691143 - DNA, 15 bp, Homo sapiens
ttaaacttggaaact

SEQ ID NO: 691144 - DNA, 15 bp, Homo sapiens
taaacttggaaacta

SEQ ID NO: 691145 - DNA, 15 bp, Homo sapiens
aaacttggaaactat

SEQ ID NO: 691146 - DNA, 15 bp, Homo sapiens
aacttggaaactata

SEQ ID NO: 691147 - DNA, 15 bp, Homo sapiens
acttggaaactatat

SEQ ID NO: 691148 - DNA, 15 bp, Homo sapiens
cttggaaactatatg

SEQ ID NO: 691149 - DNA, 15 bp, Homo sapiens
ttggaaactatatga

SEQ ID NO: 691150 - DNA, 15 bp, Homo sapiens
tggaaactatatgat

SEQ ID NO: 691151 - DNA, 15 bp, Homo sapiens
ggaaactatatgatc

SEQ ID NO: 691152 - DNA, 15 bp, Homo sapiens
gaaactatatgatct

SEQ ID NO: 691153 - DNA, 15 bp, Homo sapiens
aaactatatgatctt

SEQ ID NO: 691154 - DNA, 15 bp, Homo sapiens
aactatatgatcttt

SEQ ID NO: 691155 - DNA, 15 bp, Homo sapiens
actatatgatctttt

SEQ ID NO: 691156 - DNA, 15 bp, Homo sapiens
ctatatgatcttttt

SEQ ID NO: 691157 - DNA, 15 bp, Homo sapiens
tatatgatctttttt

SEQ ID NO: 691158 - DNA, 15 bp, Homo sapiens
atatgatcttttttt

SEQ ID NO: 691159 - DNA, 15 bp, Homo sapiens
tatgatcttttttta

SEQ ID NO: 691160 - DNA, 15 bp, Homo sapiens
atgatctttttttat

SEQ ID NO: 691161 - DNA, 15 bp, Homo sapiens
tgatctttttttatg

SEQ ID NO: 691162 - DNA, 15 bp, Homo sapiens
gatctttttttatgt

SEQ ID NO: 691163 - DNA, 15 bp, Homo sapiens
atctttttttatgtt

SEQ ID NO: 691164 - DNA, 15 bp, Homo sapiens
tctttttttatgttt

SEQ ID NO: 691165 - DNA, 15 bp, Homo sapiens
ctttttttatgtttt

SEQ ID NO: 691166 - DNA, 15 bp, Homo sapiens
tttttttatgttttt

SEQ ID NO: 691167 - DNA, 15 bp, Homo sapiens
ttttttatgttttta

SEQ ID NO: 691168 - DNA, 15 bp, Homo sapiens
tttttatgtttttat

SEQ ID NO: 691169 - DNA, 15 bp, Homo sapiens
ttttatgtttttata

SEQ ID NO: 691170 - DNA, 15 bp, Homo sapiens
tttatgtttttatac

SEQ ID NO: 691171 - DNA, 15 bp, Homo sapiens
ttatgtttttataca

SEQ ID NO: 691172 - DNA, 15 bp, Homo sapiens
tatgtttttatacag

SEQ ID NO: 691173 - DNA, 15 bp, Homo sapiens
atgtttttatacagt

SEQ ID NO: 691174 - DNA, 15 bp, Homo sapiens
tgtttttatacagtt

SEQ ID NO: 691175 - DNA, 15 bp, Homo sapiens
gtttttatacagttt

SEQ ID NO: 691176 - DNA, 15 bp, Homo sapiens
tttttatacagtttt

SEQ ID NO: 691177 - DNA, 15 bp, Homo sapiens
ttttatacagttttt

SEQ ID NO: 691178 - DNA, 15 bp, Homo sapiens
tttatacagtttttc

SEQ ID NO: 691179 - DNA, 15 bp, Homo sapiens
ttatacagtttttca

SEQ ID NO: 691180 - DNA, 15 bp, Homo sapiens
tatacagtttttcaa

SEQ ID NO: 691181 - DNA, 15 bp, Homo sapiens
atacagtttttcaac

SEQ ID NO: 691182 - DNA, 15 bp, Homo sapiens
tacagtttttcaacc

SEQ ID NO: 691183 - DNA, 15 bp, Homo sapiens
acagtttttcaaccc

SEQ ID NO: 691184 - DNA, 15 bp, Homo sapiens
cagtttttcaaccct

SEQ ID NO: 691185 - DNA, 15 bp, Homo sapiens
agtttttcaaccctc

SEQ ID NO: 691186 - DNA, 15 bp, Homo sapiens
gtttttcaaccctcg

SEQ ID NO: 691187 - DNA, 15 bp, Homo sapiens
tttttcaaccctcgc

SEQ ID NO: 691188 - DNA, 15 bp, Homo sapiens
ttttcaaccctcgct

SEQ ID NO: 691189 - DNA, 15 bp, Homo sapiens
tttcaaccctcgctc

SEQ ID NO: 691190 - DNA, 15 bp, Homo sapiens
ttcaaccctcgctct

SEQ ID NO: 691191 - DNA, 15 bp, Homo sapiens
tcaaccctcgctctc

SEQ ID NO: 691192 - DNA, 15 bp, Homo sapiens
caaccctcgctctct

SEQ ID NO: 691193 - DNA, 15 bp, Homo sapiens
aaccctcgctctctt

SEQ ID NO: 691194 - DNA, 15 bp, Homo sapiens
accctcgctctcttc

SEQ ID NO: 691195 - DNA, 15 bp, Homo sapiens
ccctcgctctcttcc

SEQ ID NO: 691196 - DNA, 15 bp, Homo sapiens
cctcgctctcttcct

SEQ ID NO: 691197 - DNA, 15 bp, Homo sapiens
ctcgctctcttcctt

SEQ ID NO: 691198 - DNA, 15 bp, Homo sapiens
tcgctctcttccttc

SEQ ID NO: 691199 - DNA, 15 bp, Homo sapiens
cgctctcttccttcc

SEQ ID NO: 691200 - DNA, 15 bp, Homo sapiens
gctctcttccttccc

SEQ ID NO: 691201 - DNA, 15 bp, Homo sapiens
ctctcttccttccct

SEQ ID NO: 691202 - DNA, 15 bp, Homo sapiens
tctcttccttccctc

SEQ ID NO: 691203 - DNA, 15 bp, Homo sapiens
ctcttccttccctcc

SEQ ID NO: 691204 - DNA, 15 bp, Homo sapiens
tcttccttccctcct

SEQ ID NO: 691205 - DNA, 15 bp, Homo sapiens
cttccttccctcctc

SEQ ID NO: 691206 - DNA, 15 bp, Homo sapiens
ttccttccctcctcc

SEQ ID NO: 691207 - DNA, 15 bp, Homo sapiens
tccttccctcctccc

SEQ ID NO: 691208 - DNA, 15 bp, Homo sapiens
ccttccctcctccct

SEQ ID NO: 691209 - DNA, 15 bp, Homo sapiens
cttccctcctccctc

SEQ ID NO: 691210 - DNA, 15 bp, Homo sapiens
ttccctcctccctct

SEQ ID NO: 691211 - DNA, 15 bp, Homo sapiens
tccctcctccctcta

SEQ ID NO: 691212 - DNA, 15 bp, Homo sapiens
ccctcctccctctag

SEQ ID NO: 691213 - DNA, 15 bp, Homo sapiens
cctcctccctctagt

SEQ ID NO: 691214 - DNA, 15 bp, Homo sapiens
ctcctccctctagta

SEQ ID NO: 691215 - DNA, 15 bp, Homo sapiens
tcctccctctagtag

SEQ ID NO: 691216 - DNA, 15 bp, Homo sapiens
cctccctctagtagt

SEQ ID NO: 691217 - DNA, 15 bp, Homo sapiens
ctccctctagtagtc

SEQ ID NO: 691218 - DNA, 15 bp, Homo sapiens
tccctctagtagtct

SEQ ID NO: 691219 - DNA, 15 bp, Homo sapiens
ccctctagtagtctc

SEQ ID NO: 691220 - DNA, 15 bp, Homo sapiens
cctctagtagtctcc

SEQ ID NO: 691221 - DNA, 15 bp, Homo sapiens
ctctagtagtctcca

SEQ ID NO: 691222 - DNA, 15 bp, Homo sapiens
tctagtagtctccag

SEQ ID NO: 691223 - DNA, 15 bp, Homo sapiens
ctagtagtctccagt

SEQ ID NO: 691224 - DNA, 15 bp, Homo sapiens
tagtagtctccagtg

SEQ ID NO: 691225 - DNA, 15 bp, Homo sapiens
agtagtctccagtgt

SEQ ID NO: 691226 - DNA, 15 bp, Homo sapiens
gtagtctccagtgtc

SEQ ID NO: 691227 - DNA, 15 bp, Homo sapiens
tagtctccagtgtct

SEQ ID NO: 691228 - DNA, 15 bp, Homo sapiens
agtctccagtgtcta

SEQ ID NO: 691229 - DNA, 15 bp, Homo sapiens
gtctccagtgtctat

SEQ ID NO: 691230 - DNA, 15 bp, Homo sapiens
tctccagtgtctatt

SEQ ID NO: 691231 - DNA, 15 bp, Homo sapiens
ctccagtgtctattg

SEQ ID NO: 691232 - DNA, 15 bp, Homo sapiens
tccagtgtctattgc

SEQ ID NO: 691233 - DNA, 15 bp, Homo sapiens
ccagtgtctattgct

SEQ ID NO: 691234 - DNA, 15 bp, Homo sapiens
cagtgtctattgctg

SEQ ID NO: 691235 - DNA, 15 bp, Homo sapiens
agtgtctattgctgc

SEQ ID NO: 691236 - DNA, 15 bp, Homo sapiens
gtgtctattgctgcc

SEQ ID NO: 691237 - DNA, 15 bp, Homo sapiens
tgtctattgctgcca

SEQ ID NO: 691238 - DNA, 15 bp, Homo sapiens
gtctattgctgccat

SEQ ID NO: 691239 - DNA, 15 bp, Homo sapiens
tctattgctgccatc

SEQ ID NO: 691240 - DNA, 15 bp, Homo sapiens
ctattgctgccatct

SEQ ID NO: 691241 - DNA, 15 bp, Homo sapiens
tattgctgccatctt

SEQ ID NO: 691242 - DNA, 15 bp, Homo sapiens
attgctgccatcttt

SEQ ID NO: 691243 - DNA, 15 bp, Homo sapiens
ttgctgccatcttta

SEQ ID NO: 691244 - DNA, 15 bp, Homo sapiens
tgctgccatctttat

SEQ ID NO: 691245 - DNA, 15 bp, Homo sapiens
gctgccatctttatg

SEQ ID NO: 691246 - DNA, 15 bp, Homo sapiens
ctgccatctttatgt

SEQ ID NO: 691247 - DNA, 15 bp, Homo sapiens
tgccatctttatgtc

SEQ ID NO: 691248 - DNA, 15 bp, Homo sapiens
gccatctttatgtcc

SEQ ID NO: 691249 - DNA, 15 bp, Homo sapiens
ccatctttatgtcca

SEQ ID NO: 691250 - DNA, 15 bp, Homo sapiens
catctttatgtccat

SEQ ID NO: 691251 - DNA, 15 bp, Homo sapiens
atctttatgtccatg

SEQ ID NO: 691252 - DNA, 15 bp, Homo sapiens
tctttatgtccatga

SEQ ID NO: 691253 - DNA, 15 bp, Homo sapiens
ctttatgtccatgag

SEQ ID NO: 691254 - DNA, 15 bp, Homo sapiens
tttatgtccatgagt

SEQ ID NO: 691255 - DNA, 15 bp, Homo sapiens
ttatgtccatgagta

SEQ ID NO: 691256 - DNA, 15 bp, Homo sapiens
tatgtccatgagtac

SEQ ID NO: 691257 - DNA, 15 bp, Homo sapiens
atgtccatgagtacc

SEQ ID NO: 691258 - DNA, 15 bp, Homo sapiens
tgtccatgagtacct

SEQ ID NO: 691259 - DNA, 15 bp, Homo sapiens
gtccatgagtacctg

SEQ ID NO: 691260 - DNA, 15 bp, Homo sapiens
tccatgagtacctga

SEQ ID NO: 691261 - DNA, 15 bp, Homo sapiens
ccatgagtacctgat

SEQ ID NO: 691262 - DNA, 15 bp, Homo sapiens
catgagtacctgata

SEQ ID NO: 691263 - DNA, 15 bp, Homo sapiens
atgagtacctgatat

SEQ ID NO: 691264 - DNA, 15 bp, Homo sapiens
tgagtacctgatatt

SEQ ID NO: 691265 - DNA, 15 bp, Homo sapiens
gagtacctgatattt

SEQ ID NO: 691266 - DNA, 15 bp, Homo sapiens
agtacctgatattta

SEQ ID NO: 691267 - DNA, 15 bp, Homo sapiens
gtacctgatatttag

SEQ ID NO: 691268 - DNA, 15 bp, Homo sapiens
tacctgatatttagc

SEQ ID NO: 691269 - DNA, 15 bp, Homo sapiens
acctgatatttagct

SEQ ID NO: 691270 - DNA, 15 bp, Homo sapiens
cctgatatttagctc

SEQ ID NO: 691271 - DNA, 15 bp, Homo sapiens
ctgatatttagctcc

SEQ ID NO: 691272 - DNA, 15 bp, Homo sapiens
tgatatttagctccc

SEQ ID NO: 691273 - DNA, 15 bp, Homo sapiens
gatatttagctccca

SEQ ID NO: 691274 - DNA, 15 bp, Homo sapiens
atatttagctcccac

SEQ ID NO: 691275 - DNA, 15 bp, Homo sapiens
tatttagctcccact

SEQ ID NO: 691276 - DNA, 15 bp, Homo sapiens
atttagctcccactc

SEQ ID NO: 691277 - DNA, 15 bp, Homo sapiens
tttagctcccactca

SEQ ID NO: 691278 - DNA, 15 bp, Homo sapiens
ttagctcccactcat

SEQ ID NO: 691279 - DNA, 15 bp, Homo sapiens
tagctcccactcatt

SEQ ID NO: 691280 - DNA, 15 bp, Homo sapiens
agctcccactcatta

SEQ ID NO: 691281 - DNA, 15 bp, Homo sapiens
gctcccactcattag

SEQ ID NO: 691282 - DNA, 15 bp, Homo sapiens
ctcccactcattagt

SEQ ID NO: 691283 - DNA, 15 bp, Homo sapiens
tcccactcattagtg

SEQ ID NO: 691284 - DNA, 15 bp, Homo sapiens
cccactcattagtga

SEQ ID NO: 691285 - DNA, 15 bp, Homo sapiens
ccactcattagtgag

SEQ ID NO: 691286 - DNA, 15 bp, Homo sapiens
cactcattagtgaga

SEQ ID NO: 691287 - DNA, 15 bp, Homo sapiens
actcattagtgagaa

SEQ ID NO: 691288 - DNA, 15 bp, Homo sapiens
ctcattagtgagaac

SEQ ID NO: 691289 - DNA, 15 bp, Homo sapiens
tcattagtgagaaca

SEQ ID NO: 691290 - DNA, 15 bp, Homo sapiens
cattagtgagaacat

SEQ ID NO: 691291 - DNA, 15 bp, Homo sapiens
attagtgagaacatg

SEQ ID NO: 691292 - DNA, 15 bp, Homo sapiens
ttagtgagaacatgc

SEQ ID NO: 691293 - DNA, 15 bp, Homo sapiens
tagtgagaacatgca

SEQ ID NO: 691294 - DNA, 15 bp, Homo sapiens
tgagaacatgcagta

SEQ ID NO: 691295 - DNA, 15 bp, Homo sapiens
gagaacatgcagtat

SEQ ID NO: 691296 - DNA, 15 bp, Homo sapiens
agaacatgcagtatt

SEQ ID NO: 691297 - DNA, 15 bp, Homo sapiens
gaacatgcagtattt

SEQ ID NO: 691298 - DNA, 15 bp, Homo sapiens
aacatgcagtatttg

SEQ ID NO: 691299 - DNA, 15 bp, Homo sapiens
acatgcagtatttgg

SEQ ID NO: 691300 - DNA, 15 bp, Homo sapiens
catgcagtatttggt

SEQ ID NO: 691301 - DNA, 15 bp, Homo sapiens
atgcagtatttggtt

SEQ ID NO: 691302 - DNA, 15 bp, Homo sapiens
tgcagtatttggttt

SEQ ID NO: 691303 - DNA, 15 bp, Homo sapiens
gcagtatttggtttt

SEQ ID NO: 691304 - DNA, 15 bp, Homo sapiens
cagtatttggttttc

SEQ ID NO: 691305 - DNA, 15 bp, Homo sapiens
agtatttggttttct

SEQ ID NO: 691306 - DNA, 15 bp, Homo sapiens
gtatttggttttctt

SEQ ID NO: 691307 - DNA, 15 bp, Homo sapiens
tatttggttttcttt

SEQ ID NO: 691308 - DNA, 15 bp, Homo sapiens
atttggttttctttt

SEQ ID NO: 691309 - DNA, 15 bp, Homo sapiens
tggttttctttttct

SEQ ID NO: 691310 - DNA, 15 bp, Homo sapiens
ggttttctttttctg

SEQ ID NO: 691311 - DNA, 15 bp, Homo sapiens
gttttctttttctgt

SEQ ID NO: 691312 - DNA, 15 bp, Homo sapiens
ttttctttttctgta

SEQ ID NO: 691313 - DNA, 15 bp, Homo sapiens
tttctttttctgtat

SEQ ID NO: 691314 - DNA, 15 bp, Homo sapiens
ttctttttctgtatt

SEQ ID NO: 691315 - DNA, 15 bp, Homo sapiens
tctttttctgtatta

SEQ ID NO: 691316 - DNA, 15 bp, Homo sapiens
ctttttctgtattaa

SEQ ID NO: 691317 - DNA, 15 bp, Homo sapiens
tttttctgtattaat

SEQ ID NO: 691318 - DNA, 15 bp, Homo sapiens
ttttctgtattaatt

SEQ ID NO: 691319 - DNA, 15 bp, Homo sapiens
tttctgtattaattt

SEQ ID NO: 691320 - DNA, 15 bp, Homo sapiens
ttctgtattaatttg

SEQ ID NO: 691321 - DNA, 15 bp, Homo sapiens
tctgtattaatttgt

SEQ ID NO: 691322 - DNA, 15 bp, Homo sapiens
ctgtattaatttgtt

SEQ ID NO: 691323 - DNA, 15 bp, Homo sapiens
tgtattaatttgttt

SEQ ID NO: 691324 - DNA, 15 bp, Homo sapiens
gtattaatttgttta

SEQ ID NO: 691325 - DNA, 15 bp, Homo sapiens
tattaatttgtttag

SEQ ID NO: 691326 - DNA, 15 bp, Homo sapiens
attaatttgtttagg

SEQ ID NO: 691327 - DNA, 15 bp, Homo sapiens
ttaatttgtttagga

SEQ ID NO: 691328 - DNA, 15 bp, Homo sapiens
taatttgtttaggat

SEQ ID NO: 691329 - DNA, 15 bp, Homo sapiens
aatttgtttaggata

SEQ ID NO: 691330 - DNA, 15 bp, Homo sapiens
atttgtttaggataa

SEQ ID NO: 691331 - DNA, 15 bp, Homo sapiens
tttgtttaggataat

SEQ ID NO: 691332 - DNA, 15 bp, Homo sapiens
ttgtttaggataatg

SEQ ID NO: 691333 - DNA, 15 bp, Homo sapiens
tgtttaggataatga

SEQ ID NO: 691334 - DNA, 15 bp, Homo sapiens
gtttaggataatgac

SEQ ID NO: 691335 - DNA, 15 bp, Homo sapiens
tttaggataatgacc

SEQ ID NO: 691336 - DNA, 15 bp, Homo sapiens
ttaggataatgacct

SEQ ID NO: 691337 - DNA, 15 bp, Homo sapiens
taggataatgacctc

SEQ ID NO: 691338 - DNA, 15 bp, Homo sapiens
aggataatgacctcc

SEQ ID NO: 691339 - DNA, 15 bp, Homo sapiens
ggataatgacctcca

SEQ ID NO: 691340 - DNA, 15 bp, Homo sapiens
gataatgacctccag

SEQ ID NO: 691341 - DNA, 15 bp, Homo sapiens
ataatgacctccagc

SEQ ID NO: 691342 - DNA, 15 bp, Homo sapiens
taatgacctccagct

SEQ ID NO: 691343 - DNA, 15 bp, Homo sapiens
aatgacctccagcta

SEQ ID NO: 691344 - DNA, 15 bp, Homo sapiens
atgacctccagctac

SEQ ID NO: 691345 - DNA, 15 bp, Homo sapiens
tgacctccagctaca

SEQ ID NO: 691346 - DNA, 15 bp, Homo sapiens
gacctccagctacat

SEQ ID NO: 691347 - DNA, 15 bp, Homo sapiens
acctccagctacatc

SEQ ID NO: 691348 - DNA, 15 bp, Homo sapiens
cctccagctacatcc

SEQ ID NO: 691349 - DNA, 15 bp, Homo sapiens
ctccagctacatcca

SEQ ID NO: 691350 - DNA, 15 bp, Homo sapiens
tccagctacatccat

SEQ ID NO: 691351 - DNA, 15 bp, Homo sapiens
ccagctacatccatg

SEQ ID NO: 691352 - DNA, 15 bp, Homo sapiens
cagctacatccatgt

SEQ ID NO: 691353 - DNA, 15 bp, Homo sapiens
agctacatccatgtg

SEQ ID NO: 691354 - DNA, 15 bp, Homo sapiens
gctacatccatgtgg

SEQ ID NO: 691355 - DNA, 15 bp, Homo sapiens
ctacatccatgtggc

SEQ ID NO: 691356 - DNA, 15 bp, Homo sapiens
tacatccatgtggct

SEQ ID NO: 691357 - DNA, 15 bp, Homo sapiens
acatccatgtggctg

SEQ ID NO: 691358 - DNA, 15 bp, Homo sapiens
catccatgtggctgc

SEQ ID NO: 691359 - DNA, 15 bp, Homo sapiens
atccatgtggctgca

SEQ ID NO: 691360 - DNA, 15 bp, Homo sapiens
tccatgtggctgcaa

SEQ ID NO: 691361 - DNA, 15 bp, Homo sapiens
ccatgtggctgcaaa

SEQ ID NO: 691362 - DNA, 15 bp, Homo sapiens
catgtggctgcaaag

SEQ ID NO: 691363 - DNA, 15 bp, Homo sapiens
atgtggctgcaaagg

SEQ ID NO: 691364 - DNA, 15 bp, Homo sapiens
tgtggctgcaaaggg

SEQ ID NO: 691365 - DNA, 15 bp, Homo sapiens
gtggctgcaaagggc

SEQ ID NO: 691366 - DNA, 15 bp, Homo sapiens
tggctgcaaagggca

SEQ ID NO: 691367 - DNA, 15 bp, Homo sapiens
ggctgcaaagggcat

SEQ ID NO: 691368 - DNA, 15 bp, Homo sapiens
gctgcaaagggcata

SEQ ID NO: 691369 - DNA, 15 bp, Homo sapiens
ctgcaaagggcataa

SEQ ID NO: 691370 - DNA, 15 bp, Homo sapiens
tgcaaagggcataat

SEQ ID NO: 691371 - DNA, 15 bp, Homo sapiens
gcaaagggcataatt

SEQ ID NO: 691372 - DNA, 15 bp, Homo sapiens
caaagggcataattt

SEQ ID NO: 691373 - DNA, 15 bp, Homo sapiens
aaagggcataatttc

SEQ ID NO: 691374 - DNA, 15 bp, Homo sapiens
aagggcataatttca

SEQ ID NO: 691375 - DNA, 15 bp, Homo sapiens
agggcataatttcat

SEQ ID NO: 691376 - DNA, 15 bp, Homo sapiens
gggcataatttcatt

SEQ ID NO: 691377 - DNA, 15 bp, Homo sapiens
ggcataatttcattc

SEQ ID NO: 691378 - DNA, 15 bp, Homo sapiens
gcataatttcattct

SEQ ID NO: 691379 - DNA, 15 bp, Homo sapiens
cataatttcattctt

SEQ ID NO: 691380 - DNA, 15 bp, Homo sapiens
ataatttcattcttt

SEQ ID NO: 691381 - DNA, 15 bp, Homo sapiens
taatttcattctttt

SEQ ID NO: 691382 - DNA, 15 bp, Homo sapiens
aatttcattcttttt

SEQ ID NO: 691383 - DNA, 15 bp, Homo sapiens
atttcattctttttt

SEQ ID NO: 691384 - DNA, 15 bp, Homo sapiens
tttcattcttttttt

SEQ ID NO: 691385 - DNA, 15 bp, Homo sapiens
ttcattcttttttta

SEQ ID NO: 691386 - DNA, 15 bp, Homo sapiens
tcattctttttttat

SEQ ID NO: 691387 - DNA, 15 bp, Homo sapiens
cattctttttttatg

SEQ ID NO: 691388 - DNA, 15 bp, Homo sapiens
attctttttttatga

SEQ ID NO: 691389 - DNA, 15 bp, Homo sapiens
ttctttttttatgac

SEQ ID NO: 691390 - DNA, 15 bp, Homo sapiens
tctttttttatgact

SEQ ID NO: 691391 - DNA, 15 bp, Homo sapiens
ctttttttatgactg

SEQ ID NO: 691392 - DNA, 15 bp, Homo sapiens
tttttttatgactgt

SEQ ID NO: 691393 - DNA, 15 bp, Homo sapiens
ttttttatgactgta

SEQ ID NO: 691394 - DNA, 15 bp, Homo sapiens
tttttatgactgtat

SEQ ID NO: 691395 - DNA, 15 bp, Homo sapiens
ttttatgactgtata

SEQ ID NO: 691396 - DNA, 15 bp, Homo sapiens
tttatgactgtatag

SEQ ID NO: 691397 - DNA, 15 bp, Homo sapiens
ttatgactgtatagt

SEQ ID NO: 691398 - DNA, 15 bp, Homo sapiens
tatgactgtatagta

SEQ ID NO: 691399 - DNA, 15 bp, Homo sapiens
atgactgtatagtac

SEQ ID NO: 691400 - DNA, 15 bp, Homo sapiens
tgactgtatagtact

SEQ ID NO: 691401 - DNA, 15 bp, Homo sapiens
gactgtatagtactc

SEQ ID NO: 691402 - DNA, 15 bp, Homo sapiens
actgtatagtactcc

SEQ ID NO: 691403 - DNA, 15 bp, Homo sapiens
ctgtatagtactcca

SEQ ID NO: 691404 - DNA, 15 bp, Homo sapiens
tgtatagtactccat

SEQ ID NO: 691405 - DNA, 15 bp, Homo sapiens
gtatagtactccata

SEQ ID NO: 691406 - DNA, 15 bp, Homo sapiens
tatagtactccatag

SEQ ID NO: 691407 - DNA, 15 bp, Homo sapiens
atagtactccatagt

SEQ ID NO: 691408 - DNA, 15 bp, Homo sapiens
tagtactccatagtg

SEQ ID NO: 691409 - DNA, 15 bp, Homo sapiens
agtactccatagtgt

SEQ ID NO: 691410 - DNA, 15 bp, Homo sapiens
gtactccatagtgta

SEQ ID NO: 691411 - DNA, 15 bp, Homo sapiens
tactccatagtgtat

SEQ ID NO: 691412 - DNA, 15 bp, Homo sapiens
actccatagtgtata

SEQ ID NO: 691413 - DNA, 15 bp, Homo sapiens
ctccatagtgtataa

SEQ ID NO: 691414 - DNA, 15 bp, Homo sapiens
tccatagtgtataag

SEQ ID NO: 691415 - DNA, 15 bp, Homo sapiens
ccatagtgtataagt

SEQ ID NO: 691416 - DNA, 15 bp, Homo sapiens
catagtgtataagta

SEQ ID NO: 691417 - DNA, 15 bp, Homo sapiens
atagtgtataagtac

SEQ ID NO: 691418 - DNA, 15 bp, Homo sapiens
tagtgtataagtacc

SEQ ID NO: 691419 - DNA, 15 bp, Homo sapiens
agtgtataagtacca

SEQ ID NO: 691420 - DNA, 15 bp, Homo sapiens
gtgtataagtaccac

SEQ ID NO: 691421 - DNA, 15 bp, Homo sapiens
tgtataagtaccaca

SEQ ID NO: 691422 - DNA, 15 bp, Homo sapiens
gtataagtaccacat

SEQ ID NO: 691423 - DNA, 15 bp, Homo sapiens
tataagtaccacatt

SEQ ID NO: 691424 - DNA, 15 bp, Homo sapiens
ataagtaccacattt

SEQ ID NO: 691425 - DNA, 15 bp, Homo sapiens
taagtaccacatttt

SEQ ID NO: 691426 - DNA, 15 bp, Homo sapiens
aagtaccacattttc

SEQ ID NO: 691427 - DNA, 15 bp, Homo sapiens
agtaccacattttct

SEQ ID NO: 691428 - DNA, 15 bp, Homo sapiens
attttctttatccaa

SEQ ID NO: 691429 - DNA, 15 bp, Homo sapiens
ttttctttatccaat

SEQ ID NO: 691430 - DNA, 15 bp, Homo sapiens
tttctttatccaatc

SEQ ID NO: 691431 - DNA, 15 bp, Homo sapiens
ttctttatccaatcc

SEQ ID NO: 691432 - DNA, 15 bp, Homo sapiens
tctttatccaatcca

SEQ ID NO: 691433 - DNA, 15 bp, Homo sapiens
ctttatccaatccac

SEQ ID NO: 691434 - DNA, 15 bp, Homo sapiens
tttatccaatccacc

SEQ ID NO: 691435 - DNA, 15 bp, Homo sapiens
ttatccaatccacca

SEQ ID NO: 691436 - DNA, 15 bp, Homo sapiens
tatccaatccaccac

SEQ ID NO: 691437 - DNA, 15 bp, Homo sapiens
atccaatccaccact

SEQ ID NO: 691438 - DNA, 15 bp, Homo sapiens
tccaatccaccactg

SEQ ID NO: 691439 - DNA, 15 bp, Homo sapiens
ccaatccaccactga

SEQ ID NO: 691440 - DNA, 15 bp, Homo sapiens
caatccaccactgaa

SEQ ID NO: 691441 - DNA, 15 bp, Homo sapiens
aatccaccactgaag

SEQ ID NO: 691442 - DNA, 15 bp, Homo sapiens
atccaccactgaagg

SEQ ID NO: 691443 - DNA, 15 bp, Homo sapiens
tccaccactgaaggg

SEQ ID NO: 691444 - DNA, 15 bp, Homo sapiens
ccaccactgaagggc

SEQ ID NO: 691445 - DNA, 15 bp, Homo sapiens
caccactgaagggca

SEQ ID NO: 691446 - DNA, 15 bp, Homo sapiens
accactgaagggcac

SEQ ID NO: 691447 - DNA, 15 bp, Homo sapiens
ccactgaagggcacc

SEQ ID NO: 691448 - DNA, 15 bp, Homo sapiens
cactgaagggcacct

SEQ ID NO: 691449 - DNA, 15 bp, Homo sapiens
actgaagggcaccta

SEQ ID NO: 691450 - DNA, 15 bp, Homo sapiens
ctgaagggcacctag

SEQ ID NO: 691451 - DNA, 15 bp, Homo sapiens
tgaagggcacctagg

SEQ ID NO: 691452 - DNA, 15 bp, Homo sapiens
gaagggcacctaggt

SEQ ID NO: 691453 - DNA, 15 bp, Homo sapiens
aagggcacctaggtt

SEQ ID NO: 691454 - DNA, 15 bp, Homo sapiens
agggcacctaggttg

SEQ ID NO: 691455 - DNA, 15 bp, Homo sapiens
gggcacctaggttga

SEQ ID NO: 691456 - DNA, 15 bp, Homo sapiens
ggcacctaggttgat

SEQ ID NO: 691457 - DNA, 15 bp, Homo sapiens
gcacctaggttgatt

SEQ ID NO: 691458 - DNA, 15 bp, Homo sapiens
cacctaggttgattc

SEQ ID NO: 691459 - DNA, 15 bp, Homo sapiens
acctaggttgattcc

SEQ ID NO: 691460 - DNA, 15 bp, Homo sapiens
cctaggttgattcca

SEQ ID NO: 691461 - DNA, 15 bp, Homo sapiens
ctaggttgattccat

SEQ ID NO: 691462 - DNA, 15 bp, Homo sapiens
taggttgattccatg

SEQ ID NO: 691463 - DNA, 15 bp, Homo sapiens
aggttgattccatgt

SEQ ID NO: 691464 - DNA, 15 bp, Homo sapiens
ggttgattccatgtc

SEQ ID NO: 691465 - DNA, 15 bp, Homo sapiens
gttgattccatgtct

SEQ ID NO: 691466 - DNA, 15 bp, Homo sapiens
ttgattccatgtctt

SEQ ID NO: 691467 - DNA, 15 bp, Homo sapiens
tgattccatgtcttt

SEQ ID NO: 691468 - DNA, 15 bp, Homo sapiens
gattccatgtctttg

SEQ ID NO: 691469 - DNA, 15 bp, Homo sapiens
attccatgtctttgc

SEQ ID NO: 691470 - DNA, 15 bp, Homo sapiens
ttccatgtctttgct

SEQ ID NO: 691471 - DNA, 15 bp, Homo sapiens
tccatgtctttgcta

SEQ ID NO: 691472 - DNA, 15 bp, Homo sapiens
ccatgtctttgctat

SEQ ID NO: 691473 - DNA, 15 bp, Homo sapiens
catgtctttgctatt

SEQ ID NO: 691474 - DNA, 15 bp, Homo sapiens
atgtctttgctattg

SEQ ID NO: 691475 - DNA, 15 bp, Homo sapiens
tgtctttgctattgt

SEQ ID NO: 691476 - DNA, 15 bp, Homo sapiens
gtctttgctattgtg

SEQ ID NO: 691477 - DNA, 15 bp, Homo sapiens
tctttgctattgtga

SEQ ID NO: 691478 - DNA, 15 bp, Homo sapiens
ctttgctattgtgaa

SEQ ID NO: 691479 - DNA, 15 bp, Homo sapiens
tttgctattgtgaat

SEQ ID NO: 691480 - DNA, 15 bp, Homo sapiens
ttgctattgtgaata

SEQ ID NO: 691481 - DNA, 15 bp, Homo sapiens
tgctattgtgaatag

SEQ ID NO: 691482 - DNA, 15 bp, Homo sapiens
gctattgtgaatagc

SEQ ID NO: 691483 - DNA, 15 bp, Homo sapiens
ctattgtgaatagca

SEQ ID NO: 691484 - DNA, 15 bp, Homo sapiens
tattgtgaatagcat

SEQ ID NO: 691485 - DNA, 15 bp, Homo sapiens
attgtgaatagcata

SEQ ID NO: 691486 - DNA, 15 bp, Homo sapiens
ttgtgaatagcatac

SEQ ID NO: 691487 - DNA, 15 bp, Homo sapiens
tgtgaatagcatacc

SEQ ID NO: 691488 - DNA, 15 bp, Homo sapiens
gtgaatagcatacca

SEQ ID NO: 691489 - DNA, 15 bp, Homo sapiens
tgaatagcataccag

SEQ ID NO: 691490 - DNA, 15 bp, Homo sapiens
gaatagcataccagt

SEQ ID NO: 691491 - DNA, 15 bp, Homo sapiens
aatagcataccagtg

SEQ ID NO: 691492 - DNA, 15 bp, Homo sapiens
atagcataccagtga

SEQ ID NO: 691493 - DNA, 15 bp, Homo sapiens
tagcataccagtgaa

SEQ ID NO: 691494 - DNA, 15 bp, Homo sapiens
agcataccagtgaac

SEQ ID NO: 691495 - DNA, 15 bp, Homo sapiens
gcataccagtgaaca

SEQ ID NO: 691496 - DNA, 15 bp, Homo sapiens
cataccagtgaacat

SEQ ID NO: 691497 - DNA, 15 bp, Homo sapiens
ataccagtgaacata

SEQ ID NO: 691498 - DNA, 15 bp, Homo sapiens
taccagtgaacatat

SEQ ID NO: 691499 - DNA, 15 bp, Homo sapiens
accagtgaacatatg

SEQ ID NO: 691500 - DNA, 15 bp, Homo sapiens
ccagtgaacatatga

SEQ ID NO: 691501 - DNA, 15 bp, Homo sapiens
cagtgaacatatgag

SEQ ID NO: 691502 - DNA, 15 bp, Homo sapiens
agtgaacatatgagt

SEQ ID NO: 691503 - DNA, 15 bp, Homo sapiens
gtgaacatatgagtg

SEQ ID NO: 691504 - DNA, 15 bp, Homo sapiens
tgaacatatgagtgc

SEQ ID NO: 691505 - DNA, 15 bp, Homo sapiens
gaacatatgagtgca

SEQ ID NO: 691506 - DNA, 15 bp, Homo sapiens
aacatatgagtgcat

SEQ ID NO: 691507 - DNA, 15 bp, Homo sapiens
acatatgagtgcatg

SEQ ID NO: 691508 - DNA, 15 bp, Homo sapiens
catatgagtgcatgt

SEQ ID NO: 691509 - DNA, 15 bp, Homo sapiens
atatgagtgcatgtg

SEQ ID NO: 691510 - DNA, 15 bp, Homo sapiens
tatgagtgcatgtga

SEQ ID NO: 691511 - DNA, 15 bp, Homo sapiens
atgagtgcatgtgaa

SEQ ID NO: 691512 - DNA, 15 bp, Homo sapiens
tgagtgcatgtgaaa

SEQ ID NO: 691513 - DNA, 15 bp, Homo sapiens
gagtgcatgtgaaag

SEQ ID NO: 691514 - DNA, 15 bp, Homo sapiens
agtgcatgtgaaaga

SEQ ID NO: 691515 - DNA, 15 bp, Homo sapiens
gtgcatgtgaaagac

SEQ ID NO: 691516 - DNA, 15 bp, Homo sapiens
tgcatgtgaaagaca

SEQ ID NO: 691517 - DNA, 15 bp, Homo sapiens
gcatgtgaaagacat

SEQ ID NO: 691518 - DNA, 15 bp, Homo sapiens
catgtgaaagacatt

SEQ ID NO: 691519 - DNA, 15 bp, Homo sapiens
atgtgaaagacattt

SEQ ID NO: 691520 - DNA, 15 bp, Homo sapiens
tgtgaaagacatttt

SEQ ID NO: 691521 - DNA, 15 bp, Homo sapiens
gtgaaagacattttc

SEQ ID NO: 691522 - DNA, 15 bp, Homo sapiens
tgaaagacattttct

SEQ ID NO: 691523 - DNA, 15 bp, Homo sapiens
gaaagacattttcta

SEQ ID NO: 691524 - DNA, 15 bp, Homo sapiens
aaagacattttctag

SEQ ID NO: 691525 - DNA, 15 bp, Homo sapiens
aagacattttctaga

SEQ ID NO: 691526 - DNA, 15 bp, Homo sapiens
agacattttctagag

SEQ ID NO: 691527 - DNA, 15 bp, Homo sapiens
gacattttctagagc

SEQ ID NO: 691528 - DNA, 15 bp, Homo sapiens
acattttctagagct

SEQ ID NO: 691529 - DNA, 15 bp, Homo sapiens
cattttctagagctc

SEQ ID NO: 691530 - DNA, 15 bp, Homo sapiens
attttctagagctca

SEQ ID NO: 691531 - DNA, 15 bp, Homo sapiens
ttttctagagctcaa

SEQ ID NO: 691532 - DNA, 15 bp, Homo sapiens
tttctagagctcaat

SEQ ID NO: 691533 - DNA, 15 bp, Homo sapiens
ttctagagctcaatt

SEQ ID NO: 691534 - DNA, 15 bp, Homo sapiens
tctagagctcaattt

SEQ ID NO: 691535 - DNA, 15 bp, Homo sapiens
ctagagctcaattta

SEQ ID NO: 691536 - DNA, 15 bp, Homo sapiens
tagagctcaatttaa

SEQ ID NO: 691537 - DNA, 15 bp, Homo sapiens
agagctcaatttaaa

SEQ ID NO: 691538 - DNA, 15 bp, Homo sapiens
gagctcaatttaaag

SEQ ID NO: 691539 - DNA, 15 bp, Homo sapiens
agctcaatttaaagc

SEQ ID NO: 691540 - DNA, 15 bp, Homo sapiens
gctcaatttaaagct

SEQ ID NO: 691541 - DNA, 15 bp, Homo sapiens
ctcaatttaaagctt

SEQ ID NO: 691542 - DNA, 15 bp, Homo sapiens
tcaatttaaagctta

SEQ ID NO: 691543 - DNA, 15 bp, Homo sapiens
caatttaaagcttaa

SEQ ID NO: 691544 - DNA, 15 bp, Homo sapiens
aatttaaagcttaac

SEQ ID NO: 691545 - DNA, 15 bp, Homo sapiens
atttaaagcttaact

SEQ ID NO: 691546 - DNA, 15 bp, Homo sapiens
tttaaagcttaactt

SEQ ID NO: 691547 - DNA, 15 bp, Homo sapiens
ttaaagcttaacttt

SEQ ID NO: 691548 - DNA, 15 bp, Homo sapiens
taaagcttaactttt

SEQ ID NO: 691549 - DNA, 15 bp, Homo sapiens
aaagcttaactttta

SEQ ID NO: 691550 - DNA, 15 bp, Homo sapiens
aagcttaacttttaa

SEQ ID NO: 691551 - DNA, 15 bp, Homo sapiens
agcttaacttttaat

SEQ ID NO: 691552 - DNA, 15 bp, Homo sapiens
gcttaacttttaatg

SEQ ID NO: 691553 - DNA, 15 bp, Homo sapiens
cttaacttttaatga

SEQ ID NO: 691554 - DNA, 15 bp, Homo sapiens
ttaacttttaatgaa

SEQ ID NO: 691555 - DNA, 15 bp, Homo sapiens
taacttttaatgaag

SEQ ID NO: 691556 - DNA, 15 bp, Homo sapiens
aacttttaatgaagc

SEQ ID NO: 691557 - DNA, 15 bp, Homo sapiens
acttttaatgaagct

SEQ ID NO: 691558 - DNA, 15 bp, Homo sapiens
cttttaatgaagctt

SEQ ID NO: 691559 - DNA, 15 bp, Homo sapiens
ttttaatgaagctta

SEQ ID NO: 691560 - DNA, 15 bp, Homo sapiens
tttaatgaagcttaa

SEQ ID NO: 691561 - DNA, 15 bp, Homo sapiens
ttaatgaagcttaaa

SEQ ID NO: 691562 - DNA, 15 bp, Homo sapiens
taatgaagcttaaaa

SEQ ID NO: 691563 - DNA, 15 bp, Homo sapiens
aatgaagcttaaaag

SEQ ID NO: 691564 - DNA, 15 bp, Homo sapiens
atgaagcttaaaagc

SEQ ID NO: 691565 - DNA, 15 bp, Homo sapiens
tgaagcttaaaagct

SEQ ID NO: 691566 - DNA, 15 bp, Homo sapiens
gaagcttaaaagctt

SEQ ID NO: 691567 - DNA, 15 bp, Homo sapiens
aagcttaaaagctta

SEQ ID NO: 691568 - DNA, 15 bp, Homo sapiens
agcttaaaagcttaa

SEQ ID NO: 691569 - DNA, 15 bp, Homo sapiens
gcttaaaagcttaat

SEQ ID NO: 691570 - DNA, 15 bp, Homo sapiens
cttaaaagcttaatt

SEQ ID NO: 691571 - DNA, 15 bp, Homo sapiens
ttaaaagcttaatta

SEQ ID NO: 691572 - DNA, 15 bp, Homo sapiens
taaaagcttaattat

SEQ ID NO: 691573 - DNA, 15 bp, Homo sapiens
aaaagcttaattatg

SEQ ID NO: 691574 - DNA, 15 bp, Homo sapiens
aaagcttaattatgt

SEQ ID NO: 691575 - DNA, 15 bp, Homo sapiens
aagcttaattatgta

SEQ ID NO: 691576 - DNA, 15 bp, Homo sapiens
agcttaattatgtag

SEQ ID NO: 691577 - DNA, 15 bp, Homo sapiens
gcttaattatgtaga

SEQ ID NO: 691578 - DNA, 15 bp, Homo sapiens
cttaattatgtagat

SEQ ID NO: 691579 - DNA, 15 bp, Homo sapiens
ttaattatgtagatg

SEQ ID NO: 691580 - DNA, 15 bp, Homo sapiens
taattatgtagatga

SEQ ID NO: 691581 - DNA, 15 bp, Homo sapiens
aattatgtagatgat

SEQ ID NO: 691582 - DNA, 15 bp, Homo sapiens
attatgtagatgata

SEQ ID NO: 691583 - DNA, 15 bp, Homo sapiens
ttatgtagatgataa

SEQ ID NO: 691584 - DNA, 15 bp, Homo sapiens
tatgtagatgataag

SEQ ID NO: 691585 - DNA, 15 bp, Homo sapiens
atgtagatgataagt

SEQ ID NO: 691586 - DNA, 15 bp, Homo sapiens
tgtagatgataagtt

SEQ ID NO: 691587 - DNA, 15 bp, Homo sapiens
gtagatgataagttg

SEQ ID NO: 691588 - DNA, 15 bp, Homo sapiens
tagatgataagttgc

SEQ ID NO: 691589 - DNA, 15 bp, Homo sapiens
agatgataagttgca

SEQ ID NO: 691590 - DNA, 15 bp, Homo sapiens
gatgataagttgcat

SEQ ID NO: 691591 - DNA, 15 bp, Homo sapiens
atgataagttgcata

SEQ ID NO: 691592 - DNA, 15 bp, Homo sapiens
tgataagttgcatat

SEQ ID NO: 691593 - DNA, 15 bp, Homo sapiens
gataagttgcatatg

SEQ ID NO: 691594 - DNA, 15 bp, Homo sapiens
ataagttgcatatgt

SEQ ID NO: 691595 - DNA, 15 bp, Homo sapiens
taagttgcatatgtc

SEQ ID NO: 691596 - DNA, 15 bp, Homo sapiens
aagttgcatatgtca

SEQ ID NO: 691597 - DNA, 15 bp, Homo sapiens
agttgcatatgtcaa

SEQ ID NO: 691598 - DNA, 15 bp, Homo sapiens
gttgcatatgtcaaa

SEQ ID NO: 691599 - DNA, 15 bp, Homo sapiens
ttgcatatgtcaaag

SEQ ID NO: 691600 - DNA, 15 bp, Homo sapiens
tgcatatgtcaaagt

SEQ ID NO: 691601 - DNA, 15 bp, Homo sapiens
gcatatgtcaaagtg

SEQ ID NO: 691602 - DNA, 15 bp, Homo sapiens
catatgtcaaagtga

SEQ ID NO: 691603 - DNA, 15 bp, Homo sapiens
atatgtcaaagtgaa

SEQ ID NO: 691604 - DNA, 15 bp, Homo sapiens
tatgtcaaagtgaac

SEQ ID NO: 691605 - DNA, 15 bp, Homo sapiens
atgtcaaagtgaaca

SEQ ID NO: 691606 - DNA, 15 bp, Homo sapiens
tgtcaaagtgaacat

SEQ ID NO: 691607 - DNA, 15 bp, Homo sapiens
gtcaaagtgaacatg

SEQ ID NO: 691608 - DNA, 15 bp, Homo sapiens
tcaaagtgaacatgt

SEQ ID NO: 691609 - DNA, 15 bp, Homo sapiens
caaagtgaacatgtc

SEQ ID NO: 691610 - DNA, 15 bp, Homo sapiens
aaagtgaacatgtct

SEQ ID NO: 691611 - DNA, 15 bp, Homo sapiens
aagtgaacatgtctt

SEQ ID NO: 691612 - DNA, 15 bp, Homo sapiens
agtgaacatgtcttg

SEQ ID NO: 691613 - DNA, 15 bp, Homo sapiens
gtgaacatgtcttga

SEQ ID NO: 691614 - DNA, 15 bp, Homo sapiens
tgaacatgtcttgaa

SEQ ID NO: 691615 - DNA, 15 bp, Homo sapiens
gaacatgtcttgaag

SEQ ID NO: 691616 - DNA, 15 bp, Homo sapiens
aacatgtcttgaagg

SEQ ID NO: 691617 - DNA, 15 bp, Homo sapiens
acatgtcttgaaggt

SEQ ID NO: 691618 - DNA, 15 bp, Homo sapiens
catgtcttgaaggtc

SEQ ID NO: 691619 - DNA, 15 bp, Homo sapiens
atgtcttgaaggtca

SEQ ID NO: 691620 - DNA, 15 bp, Homo sapiens
tgtcttgaaggtcat

SEQ ID NO: 691621 - DNA, 15 bp, Homo sapiens
gtcttgaaggtcatt

SEQ ID NO: 691622 - DNA, 15 bp, Homo sapiens
tcttgaaggtcatta

SEQ ID NO: 691623 - DNA, 15 bp, Homo sapiens
cttgaaggtcattat

SEQ ID NO: 691624 - DNA, 15 bp, Homo sapiens
ttgaaggtcattatg

SEQ ID NO: 691625 - DNA, 15 bp, Homo sapiens
tgaaggtcattatgt

SEQ ID NO: 691626 - DNA, 15 bp, Homo sapiens
gaaggtcattatgtt

SEQ ID NO: 691627 - DNA, 15 bp, Homo sapiens
aaggtcattatgttt

SEQ ID NO: 691628 - DNA, 15 bp, Homo sapiens
aggtcattatgtttt

SEQ ID NO: 691629 - DNA, 15 bp, Homo sapiens
ggtcattatgttttt

SEQ ID NO: 691630 - DNA, 15 bp, Homo sapiens
gtcattatgtttttc

SEQ ID NO: 691631 - DNA, 15 bp, Homo sapiens
tcattatgtttttcc

SEQ ID NO: 691632 - DNA, 15 bp, Homo sapiens
cattatgtttttcct

SEQ ID NO: 691633 - DNA, 15 bp, Homo sapiens
attatgtttttcctt

SEQ ID NO: 691634 - DNA, 15 bp, Homo sapiens
ttatgtttttccttc

SEQ ID NO: 691635 - DNA, 15 bp, Homo sapiens
tatgtttttccttca

SEQ ID NO: 691636 - DNA, 15 bp, Homo sapiens
atgtttttccttcat

SEQ ID NO: 691637 - DNA, 15 bp, Homo sapiens
tgtttttccttcatt

SEQ ID NO: 691638 - DNA, 15 bp, Homo sapiens
gtttttccttcattt

SEQ ID NO: 691639 - DNA, 15 bp, Homo sapiens
tttttccttcatttt

SEQ ID NO: 691640 - DNA, 15 bp, Homo sapiens
ttttccttcatttta

SEQ ID NO: 691641 - DNA, 15 bp, Homo sapiens
tttccttcattttac

SEQ ID NO: 691642 - DNA, 15 bp, Homo sapiens
ttccttcattttact

SEQ ID NO: 691643 - DNA, 15 bp, Homo sapiens
tccttcattttactt

SEQ ID NO: 691644 - DNA, 15 bp, Homo sapiens
ccttcattttacttc

SEQ ID NO: 691645 - DNA, 15 bp, Homo sapiens
cttcattttacttcc

SEQ ID NO: 691646 - DNA, 15 bp, Homo sapiens
ttcattttacttcct

SEQ ID NO: 691647 - DNA, 15 bp, Homo sapiens
tcattttacttcctt

SEQ ID NO: 691648 - DNA, 15 bp, Homo sapiens
cattttacttcctta

SEQ ID NO: 691649 - DNA, 15 bp, Homo sapiens
attttacttccttat

SEQ ID NO: 691650 - DNA, 15 bp, Homo sapiens
ttttacttccttatt

SEQ ID NO: 691651 - DNA, 15 bp, Homo sapiens
tttacttccttatta

SEQ ID NO: 691652 - DNA, 15 bp, Homo sapiens
ttacttccttattag

SEQ ID NO: 691653 - DNA, 15 bp, Homo sapiens
tacttccttattagt

SEQ ID NO: 691654 - DNA, 15 bp, Homo sapiens
acttccttattagtt

SEQ ID NO: 691655 - DNA, 15 bp, Homo sapiens
cttccttattagttc

SEQ ID NO: 691656 - DNA, 15 bp, Homo sapiens
ttccttattagttca

SEQ ID NO: 691657 - DNA, 15 bp, Homo sapiens
tccttattagttcaa

SEQ ID NO: 691658 - DNA, 15 bp, Homo sapiens
ccttattagttcaaa

SEQ ID NO: 691659 - DNA, 15 bp, Homo sapiens
cttattagttcaaat

SEQ ID NO: 691660 - DNA, 15 bp, Homo sapiens
ttattagttcaaatt

SEQ ID NO: 691661 - DNA, 15 bp, Homo sapiens
tattagttcaaattt

SEQ ID NO: 691662 - DNA, 15 bp, Homo sapiens
attagttcaaatttc

SEQ ID NO: 691663 - DNA, 15 bp, Homo sapiens
ttagttcaaatttct

SEQ ID NO: 691664 - DNA, 15 bp, Homo sapiens
tagttcaaatttctt

SEQ ID NO: 691665 - DNA, 15 bp, Homo sapiens
agttcaaatttcttc

SEQ ID NO: 691666 - DNA, 15 bp, Homo sapiens
gttcaaatttcttca

SEQ ID NO: 691667 - DNA, 15 bp, Homo sapiens
ttcaaatttcttcat

SEQ ID NO: 691668 - DNA, 15 bp, Homo sapiens
tcaaatttcttcatt

SEQ ID NO: 691669 - DNA, 15 bp, Homo sapiens
caaatttcttcattt

SEQ ID NO: 691670 - DNA, 15 bp, Homo sapiens
aaatttcttcatttt

SEQ ID NO: 691671 - DNA, 15 bp, Homo sapiens
aatttcttcattttt

SEQ ID NO: 691672 - DNA, 15 bp, Homo sapiens
atttcttcattttta

SEQ ID NO: 691673 - DNA, 15 bp, Homo sapiens
tttcttcatttttaa

SEQ ID NO: 691674 - DNA, 15 bp, Homo sapiens
ttcttcatttttaaa

SEQ ID NO: 691675 - DNA, 15 bp, Homo sapiens
tcttcatttttaaaa

SEQ ID NO: 691676 - DNA, 15 bp, Homo sapiens
cttcatttttaaaat

SEQ ID NO: 691677 - DNA, 15 bp, Homo sapiens
ttcatttttaaaatt

SEQ ID NO: 691678 - DNA, 15 bp, Homo sapiens
tcatttttaaaatta

SEQ ID NO: 691679 - DNA, 15 bp, Homo sapiens
catttttaaaattaa

SEQ ID NO: 691680 - DNA, 15 bp, Homo sapiens
atttttaaaattaat

SEQ ID NO: 691681 - DNA, 15 bp, Homo sapiens
tttttaaaattaatg

SEQ ID NO: 691682 - DNA, 15 bp, Homo sapiens
ttttaaaattaatgc

SEQ ID NO: 691683 - DNA, 15 bp, Homo sapiens
tttaaaattaatgcc

SEQ ID NO: 691684 - DNA, 15 bp, Homo sapiens
ttaaaattaatgcca

SEQ ID NO: 691685 - DNA, 15 bp, Homo sapiens
taaaattaatgccac

SEQ ID NO: 691686 - DNA, 15 bp, Homo sapiens
aaaattaatgccacc

SEQ ID NO: 691687 - DNA, 15 bp, Homo sapiens
aaattaatgccacct

SEQ ID NO: 691688 - DNA, 15 bp, Homo sapiens
aattaatgccacctt

SEQ ID NO: 691689 - DNA, 15 bp, Homo sapiens
attaatgccaccttc

SEQ ID NO: 691690 - DNA, 15 bp, Homo sapiens
ttaatgccaccttcc

SEQ ID NO: 691691 - DNA, 15 bp, Homo sapiens
taatgccaccttccc

SEQ ID NO: 691692 - DNA, 15 bp, Homo sapiens
aatgccaccttccct

SEQ ID NO: 691693 - DNA, 15 bp, Homo sapiens
atgccaccttccctc

SEQ ID NO: 691694 - DNA, 15 bp, Homo sapiens
tgccaccttccctcc

SEQ ID NO: 691695 - DNA, 15 bp, Homo sapiens
gccaccttccctcca

SEQ ID NO: 691696 - DNA, 15 bp, Homo sapiens
ccaccttccctccat

SEQ ID NO: 691697 - DNA, 15 bp, Homo sapiens
caccttccctccatg

SEQ ID NO: 691698 - DNA, 15 bp, Homo sapiens
accttccctccatgt

SEQ ID NO: 691699 - DNA, 15 bp, Homo sapiens
ccttccctccatgta

SEQ ID NO: 691700 - DNA, 15 bp, Homo sapiens
cttccctccatgtaa

SEQ ID NO: 691701 - DNA, 15 bp, Homo sapiens
ttccctccatgtaaa

SEQ ID NO: 691702 - DNA, 15 bp, Homo sapiens
tccctccatgtaaaa

SEQ ID NO: 691703 - DNA, 15 bp, Homo sapiens
ccctccatgtaaaat

SEQ ID NO: 691704 - DNA, 15 bp, Homo sapiens
cctccatgtaaaatc

SEQ ID NO: 691705 - DNA, 15 bp, Homo sapiens
ctccatgtaaaatct

SEQ ID NO: 691706 - DNA, 15 bp, Homo sapiens
tccatgtaaaatctt

SEQ ID NO: 691707 - DNA, 15 bp, Homo sapiens
ccatgtaaaatctta

SEQ ID NO: 691708 - DNA, 15 bp, Homo sapiens
catgtaaaatcttag

SEQ ID NO: 691709 - DNA, 15 bp, Homo sapiens
atgtaaaatcttaga

SEQ ID NO: 691710 - DNA, 15 bp, Homo sapiens
tgtaaaatcttagaa

SEQ ID NO: 691711 - DNA, 15 bp, Homo sapiens
gtaaaatcttagaag

SEQ ID NO: 691712 - DNA, 15 bp, Homo sapiens
taaaatcttagaagc

SEQ ID NO: 691713 - DNA, 15 bp, Homo sapiens
aaaatcttagaagct

SEQ ID NO: 691714 - DNA, 15 bp, Homo sapiens
aaatcttagaagcta

SEQ ID NO: 691715 - DNA, 15 bp, Homo sapiens
aatcttagaagctat

SEQ ID NO: 691716 - DNA, 15 bp, Homo sapiens
atcttagaagctatg

SEQ ID NO: 691717 - DNA, 15 bp, Homo sapiens
tcttagaagctatga

SEQ ID NO: 691718 - DNA, 15 bp, Homo sapiens
cttagaagctatgaa

SEQ ID NO: 691719 - DNA, 15 bp, Homo sapiens
ttagaagctatgaac

SEQ ID NO: 691720 - DNA, 15 bp, Homo sapiens
tagaagctatgaaca

SEQ ID NO: 691721 - DNA, 15 bp, Homo sapiens
agaagctatgaacat

SEQ ID NO: 691722 - DNA, 15 bp, Homo sapiens
gaagctatgaacatt

SEQ ID NO: 691723 - DNA, 15 bp, Homo sapiens
gctatgaacatttta

SEQ ID NO: 691724 - DNA, 15 bp, Homo sapiens
ctatgaacattttaa

SEQ ID NO: 691725 - DNA, 15 bp, Homo sapiens
tatgaacattttaat

SEQ ID NO: 691726 - DNA, 15 bp, Homo sapiens
atgaacattttaatg

SEQ ID NO: 691727 - DNA, 15 bp, Homo sapiens
tgaacattttaatgg

SEQ ID NO: 691728 - DNA, 15 bp, Homo sapiens
gaacattttaatgga

SEQ ID NO: 691729 - DNA, 15 bp, Homo sapiens
aacattttaatggac

SEQ ID NO: 691730 - DNA, 15 bp, Homo sapiens
acattttaatggaca

SEQ ID NO: 691731 - DNA, 15 bp, Homo sapiens
cattttaatggacat

SEQ ID NO: 691732 - DNA, 15 bp, Homo sapiens
attttaatggacatt

SEQ ID NO: 691733 - DNA, 15 bp, Homo sapiens
ttttaatggacattt

SEQ ID NO: 691734 - DNA, 15 bp, Homo sapiens
tttaatggacatttt

SEQ ID NO: 691735 - DNA, 15 bp, Homo sapiens
ttaatggacattttg

SEQ ID NO: 691736 - DNA, 15 bp, Homo sapiens
taatggacattttgg

SEQ ID NO: 691737 - DNA, 15 bp, Homo sapiens
aatggacattttggc

SEQ ID NO: 691738 - DNA, 15 bp, Homo sapiens
atggacattttggca

SEQ ID NO: 691739 - DNA, 15 bp, Homo sapiens
tggacattttggcaa

SEQ ID NO: 691740 - DNA, 15 bp, Homo sapiens
ggacattttggcaac

SEQ ID NO: 691741 - DNA, 15 bp, Homo sapiens
gacattttggcaaca

SEQ ID NO: 691742 - DNA, 15 bp, Homo sapiens
acattttggcaacaa

SEQ ID NO: 691743 - DNA, 15 bp, Homo sapiens
cattttggcaacaat

SEQ ID NO: 691744 - DNA, 15 bp, Homo sapiens
attttggcaacaatt

SEQ ID NO: 691745 - DNA, 15 bp, Homo sapiens
ttttggcaacaattc

SEQ ID NO: 691746 - DNA, 15 bp, Homo sapiens
tttggcaacaattct

SEQ ID NO: 691747 - DNA, 15 bp, Homo sapiens
ttggcaacaattctt

SEQ ID NO: 691748 - DNA, 15 bp, Homo sapiens
tggcaacaattcttt

SEQ ID NO: 691749 - DNA, 15 bp, Homo sapiens
ggcaacaattctttt

SEQ ID NO: 691750 - DNA, 15 bp, Homo sapiens
gcaacaattctttta

SEQ ID NO: 691751 - DNA, 15 bp, Homo sapiens
caacaattcttttat

SEQ ID NO: 691752 - DNA, 15 bp, Homo sapiens
aacaattcttttatg

SEQ ID NO: 691753 - DNA, 15 bp, Homo sapiens
acaattcttttatga

SEQ ID NO: 691754 - DNA, 15 bp, Homo sapiens
caattcttttatgac

SEQ ID NO: 691755 - DNA, 15 bp, Homo sapiens
aattcttttatgaca

SEQ ID NO: 691756 - DNA, 15 bp, Homo sapiens
attcttttatgacag

SEQ ID NO: 691757 - DNA, 15 bp, Homo sapiens
ttcttttatgacagg

SEQ ID NO: 691758 - DNA, 15 bp, Homo sapiens
tcttttatgacagga

SEQ ID NO: 691759 - DNA, 15 bp, Homo sapiens
cttttatgacaggaa

SEQ ID NO: 691760 - DNA, 15 bp, Homo sapiens
ttttatgacaggaaa

SEQ ID NO: 691761 - DNA, 15 bp, Homo sapiens
tttatgacaggaaat

SEQ ID NO: 691762 - DNA, 15 bp, Homo sapiens
ttatgacaggaaatg

SEQ ID NO: 691763 - DNA, 15 bp, Homo sapiens
tatgacaggaaatgc

SEQ ID NO: 691764 - DNA, 15 bp, Homo sapiens
atgacaggaaatgct

SEQ ID NO: 691765 - DNA, 15 bp, Homo sapiens
tgacaggaaatgctt

SEQ ID NO: 691766 - DNA, 15 bp, Homo sapiens
gacaggaaatgcttg

SEQ ID NO: 691767 - DNA, 15 bp, Homo sapiens
acaggaaatgcttgt

SEQ ID NO: 691768 - DNA, 15 bp, Homo sapiens
caggaaatgcttgtt

SEQ ID NO: 691769 - DNA, 15 bp, Homo sapiens
aggaaatgcttgttt

SEQ ID NO: 691770 - DNA, 15 bp, Homo sapiens
ggaaatgcttgtttg

SEQ ID NO: 691771 - DNA, 15 bp, Homo sapiens
gaaatgcttgtttgt

SEQ ID NO: 691772 - DNA, 15 bp, Homo sapiens
aaatgcttgtttgtt

SEQ ID NO: 691773 - DNA, 15 bp, Homo sapiens
aatgcttgtttgtta

SEQ ID NO: 691774 - DNA, 15 bp, Homo sapiens
atgcttgtttgttat

SEQ ID NO: 691775 - DNA, 15 bp, Homo sapiens
tgcttgtttgttata

SEQ ID NO: 691776 - DNA, 15 bp, Homo sapiens
gcttgtttgttatat

SEQ ID NO: 691777 - DNA, 15 bp, Homo sapiens
cttgtttgttatatg

SEQ ID NO: 691778 - DNA, 15 bp, Homo sapiens
ttgtttgttatatgt

SEQ ID NO: 691779 - DNA, 15 bp, Homo sapiens
tgtttgttatatgtt

SEQ ID NO: 691780 - DNA, 15 bp, Homo sapiens
gtttgttatatgttt

SEQ ID NO: 691781 - DNA, 15 bp, Homo sapiens
tttgttatatgtttc

SEQ ID NO: 691782 - DNA, 15 bp, Homo sapiens
ttgttatatgtttct

SEQ ID NO: 691783 - DNA, 15 bp, Homo sapiens
tgttatatgtttcta

SEQ ID NO: 691784 - DNA, 15 bp, Homo sapiens
gttatatgtttctaa

SEQ ID NO: 691785 - DNA, 15 bp, Homo sapiens
ttatatgtttctaag

SEQ ID NO: 691786 - DNA, 15 bp, Homo sapiens
tatatgtttctaagt

SEQ ID NO: 691787 - DNA, 15 bp, Homo sapiens
atatgtttctaagtt

SEQ ID NO: 691788 - DNA, 15 bp, Homo sapiens
tatgtttctaagttt

SEQ ID NO: 691789 - DNA, 15 bp, Homo sapiens
atgtttctaagtttg

SEQ ID NO: 691790 - DNA, 15 bp, Homo sapiens
tgtttctaagtttgt

SEQ ID NO: 691791 - DNA, 15 bp, Homo sapiens
gtttctaagtttgtg

SEQ ID NO: 691792 - DNA, 15 bp, Homo sapiens
tttctaagtttgtgt

SEQ ID NO: 691793 - DNA, 15 bp, Homo sapiens
ttctaagtttgtgtg

SEQ ID NO: 691794 - DNA, 15 bp, Homo sapiens
tctaagtttgtgtgc

SEQ ID NO: 691795 - DNA, 15 bp, Homo sapiens
ctaagtttgtgtgct

SEQ ID NO: 691796 - DNA, 15 bp, Homo sapiens
taagtttgtgtgctg

SEQ ID NO: 691797 - DNA, 15 bp, Homo sapiens
aagtttgtgtgctgt

SEQ ID NO: 691798 - DNA, 15 bp, Homo sapiens
agtttgtgtgctgtt

SEQ ID NO: 691799 - DNA, 15 bp, Homo sapiens
gtttgtgtgctgttt

SEQ ID NO: 691800 - DNA, 15 bp, Homo sapiens
tttgtgtgctgtttt

SEQ ID NO: 691801 - DNA, 15 bp, Homo sapiens
ttgtgtgctgttttt

SEQ ID NO: 691802 - DNA, 15 bp, Homo sapiens
tgtgtgctgtttttt

SEQ ID NO: 691803 - DNA, 15 bp, Homo sapiens
gtgtgctgttttttt

SEQ ID NO: 691804 - DNA, 15 bp, Homo sapiens
tgtgctgtttttttt

SEQ ID NO: 691805 - DNA, 15 bp, Homo sapiens
gtgctgttttttttt

SEQ ID NO: 691806 - DNA, 15 bp, Homo sapiens
tgctgtttttttttt

SEQ ID NO: 691807 - DNA, 15 bp, Homo sapiens
gctgttttttttttt

SEQ ID NO: 691808 - DNA, 15 bp, Homo sapiens
ctgtttttttttttt

SEQ ID NO: 691809 - DNA, 15 bp, Homo sapiens
tgtttttttttttta

SEQ ID NO: 691810 - DNA, 15 bp, Homo sapiens
gttttttttttttag

SEQ ID NO: 691811 - DNA, 15 bp, Homo sapiens
ttttttttttttagg

SEQ ID NO: 691812 - DNA, 15 bp, Homo sapiens
tttttttttttagga

SEQ ID NO: 691813 - DNA, 15 bp, Homo sapiens
ttttttttttaggaa

SEQ ID NO: 691814 - DNA, 15 bp, Homo sapiens
tttttttttaggaat

SEQ ID NO: 691815 - DNA, 15 bp, Homo sapiens
ttttttttaggaata

SEQ ID NO: 691816 - DNA, 15 bp, Homo sapiens
tttttttaggaatat

SEQ ID NO: 691817 - DNA, 15 bp, Homo sapiens
ttttttaggaatata

SEQ ID NO: 691818 - DNA, 15 bp, Homo sapiens
tttttaggaatatag

SEQ ID NO: 691819 - DNA, 15 bp, Homo sapiens
ttttaggaatataga

SEQ ID NO: 691820 - DNA, 15 bp, Homo sapiens
tttaggaatatagaa

SEQ ID NO: 691821 - DNA, 15 bp, Homo sapiens
ttaggaatatagaat

SEQ ID NO: 691822 - DNA, 15 bp, Homo sapiens
taggaatatagaatt

SEQ ID NO: 691823 - DNA, 15 bp, Homo sapiens
aggaatatagaattg

SEQ ID NO: 691824 - DNA, 15 bp, Homo sapiens
ggaatatagaattgc

SEQ ID NO: 691825 - DNA, 15 bp, Homo sapiens
gaatatagaattgct

SEQ ID NO: 691826 - DNA, 15 bp, Homo sapiens
aatatagaattgctg

SEQ ID NO: 691827 - DNA, 15 bp, Homo sapiens
atatagaattgctga

SEQ ID NO: 691828 - DNA, 15 bp, Homo sapiens
tatagaattgctgat

SEQ ID NO: 691829 - DNA, 15 bp, Homo sapiens
atagaattgctgata

SEQ ID NO: 691830 - DNA, 15 bp, Homo sapiens
tagaattgctgatat

SEQ ID NO: 691831 - DNA, 15 bp, Homo sapiens
agaattgctgatatt

SEQ ID NO: 691832 - DNA, 15 bp, Homo sapiens
gaattgctgatattc

SEQ ID NO: 691833 - DNA, 15 bp, Homo sapiens
aattgctgatattct

SEQ ID NO: 691834 - DNA, 15 bp, Homo sapiens
attgctgatattcta

SEQ ID NO: 691835 - DNA, 15 bp, Homo sapiens
ttgctgatattctag

SEQ ID NO: 691836 - DNA, 15 bp, Homo sapiens
tgctgatattctaga

SEQ ID NO: 691837 - DNA, 15 bp, Homo sapiens
gctgatattctagaa

SEQ ID NO: 691838 - DNA, 15 bp, Homo sapiens
ctgatattctagaat

SEQ ID NO: 691839 - DNA, 15 bp, Homo sapiens
tgatattctagaatg

SEQ ID NO: 691840 - DNA, 15 bp, Homo sapiens
gatattctagaatgt

SEQ ID NO: 691841 - DNA, 15 bp, Homo sapiens
atattctagaatgtg

SEQ ID NO: 691842 - DNA, 15 bp, Homo sapiens
tattctagaatgtga

SEQ ID NO: 691843 - DNA, 15 bp, Homo sapiens
attctagaatgtgaa

SEQ ID NO: 691844 - DNA, 15 bp, Homo sapiens
ttctagaatgtgaaa

SEQ ID NO: 691845 - DNA, 15 bp, Homo sapiens
tctagaatgtgaaaa

SEQ ID NO: 691846 - DNA, 15 bp, Homo sapiens
ctagaatgtgaaaat

SEQ ID NO: 691847 - DNA, 15 bp, Homo sapiens
tagaatgtgaaaatg

SEQ ID NO: 691848 - DNA, 15 bp, Homo sapiens
agaatgtgaaaatgt

SEQ ID NO: 691849 - DNA, 15 bp, Homo sapiens
gaatgtgaaaatgtc

SEQ ID NO: 691850 - DNA, 15 bp, Homo sapiens
aatgtgaaaatgtcg

SEQ ID NO: 691851 - DNA, 15 bp, Homo sapiens
atgtgaaaatgtcgc

SEQ ID NO: 691852 - DNA, 15 bp, Homo sapiens
tgtgaaaatgtcgcc

SEQ ID NO: 691853 - DNA, 15 bp, Homo sapiens
gtgaaaatgtcgcca

SEQ ID NO: 691854 - DNA, 15 bp, Homo sapiens
tgaaaatgtcgccag

SEQ ID NO: 691855 - DNA, 15 bp, Homo sapiens
gaaaatgtcgccaga

SEQ ID NO: 691856 - DNA, 15 bp, Homo sapiens
aaaatgtcgccagac

SEQ ID NO: 691857 - DNA, 15 bp, Homo sapiens
aaatgtcgccagaca

SEQ ID NO: 691858 - DNA, 15 bp, Homo sapiens
aatgtcgccagacaa

SEQ ID NO: 691859 - DNA, 15 bp, Homo sapiens
atgtcgccagacaat

SEQ ID NO: 691860 - DNA, 15 bp, Homo sapiens
tgtcgccagacaatg

SEQ ID NO: 691861 - DNA, 15 bp, Homo sapiens
gtcgccagacaatgc

SEQ ID NO: 691862 - DNA, 15 bp, Homo sapiens
tcgccagacaatgca

SEQ ID NO: 691863 - DNA, 15 bp, Homo sapiens
cgccagacaatgcac

SEQ ID NO: 691864 - DNA, 15 bp, Homo sapiens
gccagacaatgcaca

SEQ ID NO: 691865 - DNA, 15 bp, Homo sapiens
ccagacaatgcacat

SEQ ID NO: 691866 - DNA, 15 bp, Homo sapiens
cagacaatgcacatt

SEQ ID NO: 691867 - DNA, 15 bp, Homo sapiens
agacaatgcacatta

SEQ ID NO: 691868 - DNA, 15 bp, Homo sapiens
gacaatgcacattac

SEQ ID NO: 691869 - DNA, 15 bp, Homo sapiens
acaatgcacattaca

SEQ ID NO: 691870 - DNA, 15 bp, Homo sapiens
caatgcacattacaa

SEQ ID NO: 691871 - DNA, 15 bp, Homo sapiens
aatgcacattacaat

SEQ ID NO: 691872 - DNA, 15 bp, Homo sapiens
atgcacattacaatg

SEQ ID NO: 691873 - DNA, 15 bp, Homo sapiens
tgcacattacaatga

SEQ ID NO: 691874 - DNA, 15 bp, Homo sapiens
gcacattacaatgaa

SEQ ID NO: 691875 - DNA, 15 bp, Homo sapiens
cacattacaatgaaa

SEQ ID NO: 691876 - DNA, 15 bp, Homo sapiens
acattacaatgaaaa

SEQ ID NO: 691877 - DNA, 15 bp, Homo sapiens
cattacaatgaaaat

SEQ ID NO: 691878 - DNA, 15 bp, Homo sapiens
attacaatgaaaatt

SEQ ID NO: 691879 - DNA, 15 bp, Homo sapiens
ttacaatgaaaatta

SEQ ID NO: 691880 - DNA, 15 bp, Homo sapiens
tacaatgaaaattat

SEQ ID NO: 691881 - DNA, 15 bp, Homo sapiens
acaatgaaaattata

SEQ ID NO: 691882 - DNA, 15 bp, Homo sapiens
caatgaaaattataa

SEQ ID NO: 691883 - DNA, 15 bp, Homo sapiens
aatgaaaattataat

SEQ ID NO: 691884 - DNA, 15 bp, Homo sapiens
atgaaaattataatc

SEQ ID NO: 691885 - DNA, 15 bp, Homo sapiens
tgaaaattataatct

SEQ ID NO: 691886 - DNA, 15 bp, Homo sapiens
gaaaattataatctt

SEQ ID NO: 691887 - DNA, 15 bp, Homo sapiens
aaaattataatctta

SEQ ID NO: 691888 - DNA, 15 bp, Homo sapiens
aaattataatcttat

SEQ ID NO: 691889 - DNA, 15 bp, Homo sapiens
aattataatcttatt

SEQ ID NO: 691890 - DNA, 15 bp, Homo sapiens
attataatcttattt

SEQ ID NO: 691891 - DNA, 15 bp, Homo sapiens
ttataatcttatttt

SEQ ID NO: 691892 - DNA, 15 bp, Homo sapiens
tataatcttattttt

SEQ ID NO: 691893 - DNA, 15 bp, Homo sapiens
ataatcttattttta

SEQ ID NO: 691894 - DNA, 15 bp, Homo sapiens
taatcttatttttat

SEQ ID NO: 691895 - DNA, 15 bp, Homo sapiens
aatcttatttttatt

SEQ ID NO: 691896 - DNA, 15 bp, Homo sapiens
atcttatttttattt

SEQ ID NO: 691897 - DNA, 15 bp, Homo sapiens
tcttatttttattta

SEQ ID NO: 691898 - DNA, 15 bp, Homo sapiens
cttatttttatttat

SEQ ID NO: 691899 - DNA, 15 bp, Homo sapiens
ttatttttatttata

SEQ ID NO: 691900 - DNA, 15 bp, Homo sapiens
tatttttatttatat

SEQ ID NO: 691901 - DNA, 15 bp, Homo sapiens
atttttatttatata

SEQ ID NO: 691902 - DNA, 15 bp, Homo sapiens
tttttatttatatat

SEQ ID NO: 691903 - DNA, 15 bp, Homo sapiens
ttttatttatatata

SEQ ID NO: 691904 - DNA, 15 bp, Homo sapiens
tttatttatatatat

SEQ ID NO: 691905 - DNA, 15 bp, Homo sapiens
ttatttatatatata

SEQ ID NO: 691906 - DNA, 15 bp, Homo sapiens
tatttatatatatat

SEQ ID NO: 691907 - DNA, 15 bp, Homo sapiens
atttatatatatata

SEQ ID NO: 691908 - DNA, 15 bp, Homo sapiens
tttatatatatatat

SEQ ID NO: 691909 - DNA, 15 bp, Homo sapiens
ttatatatatatata

SEQ ID NO: 691910 - DNA, 15 bp, Homo sapiens
atatatatatttttg

SEQ ID NO: 691911 - DNA, 15 bp, Homo sapiens
tatatatatttttga

SEQ ID NO: 691912 - DNA, 15 bp, Homo sapiens
atatatatttttgag

SEQ ID NO: 691913 - DNA, 15 bp, Homo sapiens
tatatatttttgaga

SEQ ID NO: 691914 - DNA, 15 bp, Homo sapiens
atatatttttgagac

SEQ ID NO: 691915 - DNA, 15 bp, Homo sapiens
tatatttttgagaca

SEQ ID NO: 691916 - DNA, 15 bp, Homo sapiens
atatttttgagacag

SEQ ID NO: 691917 - DNA, 15 bp, Homo sapiens
tatttttgagacaga

SEQ ID NO: 691918 - DNA, 15 bp, Homo sapiens
atttttgagacagag

SEQ ID NO: 691919 - DNA, 15 bp, Homo sapiens
ttttgagacagagtt

SEQ ID NO: 691920 - DNA, 15 bp, Homo sapiens
tttgagacagagttt

SEQ ID NO: 691921 - DNA, 15 bp, Homo sapiens
ttgagacagagtttc

SEQ ID NO: 691922 - DNA, 15 bp, Homo sapiens
tgagacagagtttca

SEQ ID NO: 691923 - DNA, 15 bp, Homo sapiens
gagacagagtttcac

SEQ ID NO: 691924 - DNA, 15 bp, Homo sapiens
agacagagtttcact

SEQ ID NO: 691925 - DNA, 15 bp, Homo sapiens
gacagagtttcactc

SEQ ID NO: 691926 - DNA, 15 bp, Homo sapiens
acagagtttcactct

SEQ ID NO: 691927 - DNA, 15 bp, Homo sapiens
cagagtttcactctg

SEQ ID NO: 691928 - DNA, 15 bp, Homo sapiens
agagtttcactctgt

SEQ ID NO: 691929 - DNA, 15 bp, Homo sapiens
gagtttcactctgtt

SEQ ID NO: 691930 - DNA, 15 bp, Homo sapiens
agtttcactctgttg

SEQ ID NO: 691931 - DNA, 15 bp, Homo sapiens
gtttcactctgttgc

SEQ ID NO: 691932 - DNA, 15 bp, Homo sapiens
tttcactctgttgcc

SEQ ID NO: 691933 - DNA, 15 bp, Homo sapiens
ttcactctgttgcct

SEQ ID NO: 691934 - DNA, 15 bp, Homo sapiens
tcactctgttgccta

SEQ ID NO: 691935 - DNA, 15 bp, Homo sapiens
cactctgttgcctag

SEQ ID NO: 691936 - DNA, 15 bp, Homo sapiens
actctgttgcctagg

SEQ ID NO: 691937 - DNA, 15 bp, Homo sapiens
ctctgttgcctaggc

SEQ ID NO: 691938 - DNA, 15 bp, Homo sapiens
tctgttgcctaggct

SEQ ID NO: 691939 - DNA, 15 bp, Homo sapiens
ctgttgcctaggctg

SEQ ID NO: 691940 - DNA, 15 bp, Homo sapiens
tgttgcctaggctgg

SEQ ID NO: 691941 - DNA, 15 bp, Homo sapiens
gttgcctaggctgga

SEQ ID NO: 691942 - DNA, 15 bp, Homo sapiens
ttgcctaggctggag

SEQ ID NO: 691943 - DNA, 15 bp, Homo sapiens
tgcctaggctggagt

SEQ ID NO: 691944 - DNA, 15 bp, Homo sapiens
cctaggctggagtga

SEQ ID NO: 691945 - DNA, 15 bp, Homo sapiens
ctaggctggagtgaa

SEQ ID NO: 691946 - DNA, 15 bp, Homo sapiens
taggctggagtgaaa

SEQ ID NO: 691947 - DNA, 15 bp, Homo sapiens
aggctggagtgaaat

SEQ ID NO: 691948 - DNA, 15 bp, Homo sapiens
ggctggagtgaaatg

SEQ ID NO: 691949 - DNA, 15 bp, Homo sapiens
gctggagtgaaatgg

SEQ ID NO: 691950 - DNA, 15 bp, Homo sapiens
ctggagtgaaatggc

SEQ ID NO: 691951 - DNA, 15 bp, Homo sapiens
tggagtgaaatggca

SEQ ID NO: 691952 - DNA, 15 bp, Homo sapiens
ggagtgaaatggcat

SEQ ID NO: 691953 - DNA, 15 bp, Homo sapiens
gagtgaaatggcatg

SEQ ID NO: 691954 - DNA, 15 bp, Homo sapiens
agtgaaatggcatga

SEQ ID NO: 691955 - DNA, 15 bp, Homo sapiens
gtgaaatggcatgat

SEQ ID NO: 691956 - DNA, 15 bp, Homo sapiens
tgaaatggcatgata

SEQ ID NO: 691957 - DNA, 15 bp, Homo sapiens
gaaatggcatgataa

SEQ ID NO: 691958 - DNA, 15 bp, Homo sapiens
aaatggcatgataat

SEQ ID NO: 691959 - DNA, 15 bp, Homo sapiens
aatggcatgataatt

SEQ ID NO: 691960 - DNA, 15 bp, Homo sapiens
atggcatgataattg

SEQ ID NO: 691961 - DNA, 15 bp, Homo sapiens
tggcatgataattgg

SEQ ID NO: 691962 - DNA, 15 bp, Homo sapiens
ggcatgataattggc

SEQ ID NO: 691963 - DNA, 15 bp, Homo sapiens
gcatgataattggct

SEQ ID NO: 691964 - DNA, 15 bp, Homo sapiens
catgataattggctc

SEQ ID NO: 691965 - DNA, 15 bp, Homo sapiens
atgataattggctca

SEQ ID NO: 691966 - DNA, 15 bp, Homo sapiens
tgataattggctcac

SEQ ID NO: 691967 - DNA, 15 bp, Homo sapiens
gataattggctcact

SEQ ID NO: 691968 - DNA, 15 bp, Homo sapiens
ataattggctcacta

SEQ ID NO: 691969 - DNA, 15 bp, Homo sapiens
taattggctcactac

SEQ ID NO: 691970 - DNA, 15 bp, Homo sapiens
aattggctcactaca

SEQ ID NO: 691971 - DNA, 15 bp, Homo sapiens
attggctcactacaa

SEQ ID NO: 691972 - DNA, 15 bp, Homo sapiens
ttggctcactacaac

SEQ ID NO: 691973 - DNA, 15 bp, Homo sapiens
tggctcactacaacc

SEQ ID NO: 691974 - DNA, 15 bp, Homo sapiens
ggctcactacaacct

SEQ ID NO: 691975 - DNA, 15 bp, Homo sapiens
gctcactacaacctc

SEQ ID NO: 691976 - DNA, 15 bp, Homo sapiens
ctcactacaacctcc

SEQ ID NO: 691977 - DNA, 15 bp, Homo sapiens
tcactacaacctcca

SEQ ID NO: 691978 - DNA, 15 bp, Homo sapiens
cactacaacctccat

SEQ ID NO: 691979 - DNA, 15 bp, Homo sapiens
actacaacctccatc

SEQ ID NO: 691980 - DNA, 15 bp, Homo sapiens
ctacaacctccatct

SEQ ID NO: 691981 - DNA, 15 bp, Homo sapiens
tacaacctccatctc

SEQ ID NO: 691982 - DNA, 15 bp, Homo sapiens
acaacctccatctcc

SEQ ID NO: 691983 - DNA, 15 bp, Homo sapiens
caacctccatctcct

SEQ ID NO: 691984 - DNA, 15 bp, Homo sapiens
aacctccatctcctg

SEQ ID NO: 691985 - DNA, 15 bp, Homo sapiens
acctccatctcctgg

SEQ ID NO: 691986 - DNA, 15 bp, Homo sapiens
cctccatctcctggg

SEQ ID NO: 691987 - DNA, 15 bp, Homo sapiens
ctccatctcctgggt

SEQ ID NO: 691988 - DNA, 15 bp, Homo sapiens
tccatctcctgggtt

SEQ ID NO: 691989 - DNA, 15 bp, Homo sapiens
ccatctcctgggttc

SEQ ID NO: 691990 - DNA, 15 bp, Homo sapiens
catctcctgggttca

SEQ ID NO: 691991 - DNA, 15 bp, Homo sapiens
atctcctgggttcaa

SEQ ID NO: 691992 - DNA, 15 bp, Homo sapiens
tctcctgggttcaag

SEQ ID NO: 691993 - DNA, 15 bp, Homo sapiens
ctcctgggttcaagc

SEQ ID NO: 691994 - DNA, 15 bp, Homo sapiens
tcctgggttcaagcg

SEQ ID NO: 691995 - DNA, 15 bp, Homo sapiens
cctgggttcaagcga

SEQ ID NO: 691996 - DNA, 15 bp, Homo sapiens
ctgggttcaagcgat

SEQ ID NO: 691997 - DNA, 15 bp, Homo sapiens
tgggttcaagcgatt

SEQ ID NO: 691998 - DNA, 15 bp, Homo sapiens
gggttcaagcgattc

SEQ ID NO: 691999 - DNA, 15 bp, Homo sapiens
ggttcaagcgattct

SEQ ID NO: 692000 - DNA, 15 bp, Homo sapiens
gttcaagcgattctt

SEQ ID NO: 692001 - DNA, 15 bp, Homo sapiens
ttcaagcgattcttg

SEQ ID NO: 692002 - DNA, 15 bp, Homo sapiens
tcaagcgattcttgt

SEQ ID NO: 692003 - DNA, 15 bp, Homo sapiens
caagcgattcttgtg

SEQ ID NO: 692004 - DNA, 15 bp, Homo sapiens
aagcgattcttgtga

SEQ ID NO: 692005 - DNA, 15 bp, Homo sapiens
agcgattcttgtgac

SEQ ID NO: 692006 - DNA, 15 bp, Homo sapiens
gcgattcttgtgact

SEQ ID NO: 692007 - DNA, 15 bp, Homo sapiens
cgattcttgtgactc

SEQ ID NO: 692008 - DNA, 15 bp, Homo sapiens
gattcttgtgactca

SEQ ID NO: 692009 - DNA, 15 bp, Homo sapiens
attcttgtgactcag

SEQ ID NO: 692010 - DNA, 15 bp, Homo sapiens
ttcttgtgactcagc

SEQ ID NO: 692011 - DNA, 15 bp, Homo sapiens
tcttgtgactcagcc

SEQ ID NO: 692012 - DNA, 15 bp, Homo sapiens
cttgtgactcagcct

SEQ ID NO: 692013 - DNA, 15 bp, Homo sapiens
ttgtgactcagcctc

SEQ ID NO: 692014 - DNA, 15 bp, Homo sapiens
tgtgactcagcctcc

SEQ ID NO: 692015 - DNA, 15 bp, Homo sapiens
gtgactcagcctccc

SEQ ID NO: 692016 - DNA, 15 bp, Homo sapiens
tgactcagcctccca

SEQ ID NO: 692017 - DNA, 15 bp, Homo sapiens
gactcagcctcccaa

SEQ ID NO: 692018 - DNA, 15 bp, Homo sapiens
actcagcctcccaag

SEQ ID NO: 692019 - DNA, 15 bp, Homo sapiens
ctcagcctcccaagt

SEQ ID NO: 692020 - DNA, 15 bp, Homo sapiens
tcagcctcccaagta

SEQ ID NO: 692021 - DNA, 15 bp, Homo sapiens
cagcctcccaagtag

SEQ ID NO: 692022 - DNA, 15 bp, Homo sapiens
agcctcccaagtagc

SEQ ID NO: 692023 - DNA, 15 bp, Homo sapiens
gcctcccaagtagct

SEQ ID NO: 692024 - DNA, 15 bp, Homo sapiens
cctcccaagtagctg

SEQ ID NO: 692025 - DNA, 15 bp, Homo sapiens
ctcccaagtagctgg

SEQ ID NO: 692026 - DNA, 15 bp, Homo sapiens
tcccaagtagctggg

SEQ ID NO: 692027 - DNA, 15 bp, Homo sapiens
cccaagtagctggga

SEQ ID NO: 692028 - DNA, 15 bp, Homo sapiens
ccaagtagctgggat

SEQ ID NO: 692029 - DNA, 15 bp, Homo sapiens
caagtagctgggatt

SEQ ID NO: 692030 - DNA, 15 bp, Homo sapiens
aagtagctgggattg

SEQ ID NO: 692031 - DNA, 15 bp, Homo sapiens
agtagctgggattgc

SEQ ID NO: 692032 - DNA, 15 bp, Homo sapiens
gtagctgggattgca

SEQ ID NO: 692033 - DNA, 15 bp, Homo sapiens
tagctgggattgcag

SEQ ID NO: 692034 - DNA, 15 bp, Homo sapiens
agctgggattgcaga

SEQ ID NO: 692035 - DNA, 15 bp, Homo sapiens
gctgggattgcagaa

SEQ ID NO: 692036 - DNA, 15 bp, Homo sapiens
ctgggattgcagaag

SEQ ID NO: 692037 - DNA, 15 bp, Homo sapiens
tgggattgcagaagc

SEQ ID NO: 692038 - DNA, 15 bp, Homo sapiens
gggattgcagaagcc

SEQ ID NO: 692039 - DNA, 15 bp, Homo sapiens
ggattgcagaagcct

SEQ ID NO: 692040 - DNA, 15 bp, Homo sapiens
gattgcagaagcctg

SEQ ID NO: 692041 - DNA, 15 bp, Homo sapiens
attgcagaagcctgc

SEQ ID NO: 692042 - DNA, 15 bp, Homo sapiens
ttgcagaagcctgct

SEQ ID NO: 692043 - DNA, 15 bp, Homo sapiens
tgcagaagcctgcta

SEQ ID NO: 692044 - DNA, 15 bp, Homo sapiens
gcagaagcctgctac

SEQ ID NO: 692045 - DNA, 15 bp, Homo sapiens
cagaagcctgctacc

SEQ ID NO: 692046 - DNA, 15 bp, Homo sapiens
agaagcctgctacca

SEQ ID NO: 692047 - DNA, 15 bp, Homo sapiens
gaagcctgctaccat

SEQ ID NO: 692048 - DNA, 15 bp, Homo sapiens
aagcctgctaccatg

SEQ ID NO: 692049 - DNA, 15 bp, Homo sapiens
agcctgctaccatgt

SEQ ID NO: 692050 - DNA, 15 bp, Homo sapiens
gcctgctaccatgtc

SEQ ID NO: 692051 - DNA, 15 bp, Homo sapiens
cctgctaccatgtcc

SEQ ID NO: 692052 - DNA, 15 bp, Homo sapiens
ctgctaccatgtcca

SEQ ID NO: 692053 - DNA, 15 bp, Homo sapiens
tgctaccatgtccag

SEQ ID NO: 692054 - DNA, 15 bp, Homo sapiens
gctaccatgtccagc

SEQ ID NO: 692055 - DNA, 15 bp, Homo sapiens
ctaccatgtccagct

SEQ ID NO: 692056 - DNA, 15 bp, Homo sapiens
taccatgtccagcta

SEQ ID NO: 692057 - DNA, 15 bp, Homo sapiens
accatgtccagctaa

SEQ ID NO: 692058 - DNA, 15 bp, Homo sapiens
ccatgtccagctaat

SEQ ID NO: 692059 - DNA, 15 bp, Homo sapiens
catgtccagctaatt

SEQ ID NO: 692060 - DNA, 15 bp, Homo sapiens
atgtccagctaatta

SEQ ID NO: 692061 - DNA, 15 bp, Homo sapiens
tgtccagctaattat

SEQ ID NO: 692062 - DNA, 15 bp, Homo sapiens
gtccagctaattatt

SEQ ID NO: 692063 - DNA, 15 bp, Homo sapiens
tccagctaattattg

SEQ ID NO: 692064 - DNA, 15 bp, Homo sapiens
ccagctaattattgt

SEQ ID NO: 692065 - DNA, 15 bp, Homo sapiens
cagctaattattgta

SEQ ID NO: 692066 - DNA, 15 bp, Homo sapiens
agctaattattgtaa

SEQ ID NO: 692067 - DNA, 15 bp, Homo sapiens
gctaattattgtaat

SEQ ID NO: 692068 - DNA, 15 bp, Homo sapiens
ctaattattgtaatt

SEQ ID NO: 692069 - DNA, 15 bp, Homo sapiens
taattattgtaattt

SEQ ID NO: 692070 - DNA, 15 bp, Homo sapiens
aattattgtaatttt

SEQ ID NO: 692071 - DNA, 15 bp, Homo sapiens
attattgtaattttt

SEQ ID NO: 692072 - DNA, 15 bp, Homo sapiens
ttattgtaatttttg

SEQ ID NO: 692073 - DNA, 15 bp, Homo sapiens
tattgtaatttttgt

SEQ ID NO: 692074 - DNA, 15 bp, Homo sapiens
attgtaatttttgtg

SEQ ID NO: 692075 - DNA, 15 bp, Homo sapiens
ttgtaatttttgtgg

SEQ ID NO: 692076 - DNA, 15 bp, Homo sapiens
tgtaatttttgtgga

SEQ ID NO: 692077 - DNA, 15 bp, Homo sapiens
gtaatttttgtggag

SEQ ID NO: 692078 - DNA, 15 bp, Homo sapiens
taatttttgtggaga

SEQ ID NO: 692079 - DNA, 15 bp, Homo sapiens
aatttttgtggagat

SEQ ID NO: 692080 - DNA, 15 bp, Homo sapiens
atttttgtggagatg

SEQ ID NO: 692081 - DNA, 15 bp, Homo sapiens
tttttgtggagatgg

SEQ ID NO: 692082 - DNA, 15 bp, Homo sapiens
ttttgtggagatggt

SEQ ID NO: 692083 - DNA, 15 bp, Homo sapiens
tttgtggagatggtg

SEQ ID NO: 692084 - DNA, 15 bp, Homo sapiens
ttgtggagatggtgt

SEQ ID NO: 692085 - DNA, 15 bp, Homo sapiens
tgtggagatggtgtt

SEQ ID NO: 692086 - DNA, 15 bp, Homo sapiens
gtggagatggtgttt

SEQ ID NO: 692087 - DNA, 15 bp, Homo sapiens
tggagatggtgtttc

SEQ ID NO: 692088 - DNA, 15 bp, Homo sapiens
ggagatggtgtttca

SEQ ID NO: 692089 - DNA, 15 bp, Homo sapiens
gagatggtgtttcac

SEQ ID NO: 692090 - DNA, 15 bp, Homo sapiens
agatggtgtttcaca

SEQ ID NO: 692091 - DNA, 15 bp, Homo sapiens
gatggtgtttcacaa

SEQ ID NO: 692092 - DNA, 15 bp, Homo sapiens
atggtgtttcacaat

SEQ ID NO: 692093 - DNA, 15 bp, Homo sapiens
tggtgtttcacaatg

SEQ ID NO: 692094 - DNA, 15 bp, Homo sapiens
ggtgtttcacaatgt

SEQ ID NO: 692095 - DNA, 15 bp, Homo sapiens
gtgtttcacaatgtt

SEQ ID NO: 692096 - DNA, 15 bp, Homo sapiens
tgtttcacaatgttt

SEQ ID NO: 692097 - DNA, 15 bp, Homo sapiens
gtttcacaatgtttc

SEQ ID NO: 692098 - DNA, 15 bp, Homo sapiens
tttcacaatgtttcc

SEQ ID NO: 692099 - DNA, 15 bp, Homo sapiens
ttcacaatgtttccc

SEQ ID NO: 692100 - DNA, 15 bp, Homo sapiens
tcacaatgtttccca

SEQ ID NO: 692101 - DNA, 15 bp, Homo sapiens
cacaatgtttcccag

SEQ ID NO: 692102 - DNA, 15 bp, Homo sapiens
acaatgtttcccagg

SEQ ID NO: 692103 - DNA, 15 bp, Homo sapiens
caatgtttcccaggc

SEQ ID NO: 692104 - DNA, 15 bp, Homo sapiens
aatgtttcccaggct

SEQ ID NO: 692105 - DNA, 15 bp, Homo sapiens
atgtttcccaggctg

SEQ ID NO: 692106 - DNA, 15 bp, Homo sapiens
tgtttcccaggctgg

SEQ ID NO: 692107 - DNA, 15 bp, Homo sapiens
gtttcccaggctggt

SEQ ID NO: 692108 - DNA, 15 bp, Homo sapiens
tttcccaggctggtc

SEQ ID NO: 692109 - DNA, 15 bp, Homo sapiens
ttcccaggctggtct

SEQ ID NO: 692110 - DNA, 15 bp, Homo sapiens
tcccaggctggtctc

SEQ ID NO: 692111 - DNA, 15 bp, Homo sapiens
cccaggctggtctca

SEQ ID NO: 692112 - DNA, 15 bp, Homo sapiens
ccaggctggtctcaa

SEQ ID NO: 692113 - DNA, 15 bp, Homo sapiens
caggctggtctcaaa

SEQ ID NO: 692114 - DNA, 15 bp, Homo sapiens
aggctggtctcaaac

SEQ ID NO: 692115 - DNA, 15 bp, Homo sapiens
ggctggtctcaaact

SEQ ID NO: 692116 - DNA, 15 bp, Homo sapiens
gctggtctcaaactc

SEQ ID NO: 692117 - DNA, 15 bp, Homo sapiens
tggtctcaaactcca

SEQ ID NO: 692118 - DNA, 15 bp, Homo sapiens
ggtctcaaactccag

SEQ ID NO: 692119 - DNA, 15 bp, Homo sapiens
gtctcaaactccaga

SEQ ID NO: 692120 - DNA, 15 bp, Homo sapiens
tctcaaactccagac

SEQ ID NO: 692121 - DNA, 15 bp, Homo sapiens
ctcaaactccagacc

SEQ ID NO: 692122 - DNA, 15 bp, Homo sapiens
tcaaactccagacct

SEQ ID NO: 692123 - DNA, 15 bp, Homo sapiens
caaactccagacctc

SEQ ID NO: 692124 - DNA, 15 bp, Homo sapiens
aaactccagacctca

SEQ ID NO: 692125 - DNA, 15 bp, Homo sapiens
aactccagacctcag

SEQ ID NO: 692126 - DNA, 15 bp, Homo sapiens
actccagacctcagg

SEQ ID NO: 692127 - DNA, 15 bp, Homo sapiens
ctccagacctcaggt

SEQ ID NO: 692128 - DNA, 15 bp, Homo sapiens
tccagacctcaggtg

SEQ ID NO: 692129 - DNA, 15 bp, Homo sapiens
ccagacctcaggtga

SEQ ID NO: 692130 - DNA, 15 bp, Homo sapiens
cagacctcaggtgat

SEQ ID NO: 692131 - DNA, 15 bp, Homo sapiens
agacctcaggtgatc

SEQ ID NO: 692132 - DNA, 15 bp, Homo sapiens
gacctcaggtgatct

SEQ ID NO: 692133 - DNA, 15 bp, Homo sapiens
acctcaggtgatctg

SEQ ID NO: 692134 - DNA, 15 bp, Homo sapiens
cctcaggtgatctgc

SEQ ID NO: 692135 - DNA, 15 bp, Homo sapiens
ctcaggtgatctgct

SEQ ID NO: 692136 - DNA, 15 bp, Homo sapiens
tcaggtgatctgctc

SEQ ID NO: 692137 - DNA, 15 bp, Homo sapiens
caggtgatctgctca

SEQ ID NO: 692138 - DNA, 15 bp, Homo sapiens
aggtgatctgctcac

SEQ ID NO: 692139 - DNA, 15 bp, Homo sapiens
ggtgatctgctcact

SEQ ID NO: 692140 - DNA, 15 bp, Homo sapiens
gtgatctgctcactt

SEQ ID NO: 692141 - DNA, 15 bp, Homo sapiens
tgatctgctcacttc

SEQ ID NO: 692142 - DNA, 15 bp, Homo sapiens
gatctgctcacttca

SEQ ID NO: 692143 - DNA, 15 bp, Homo sapiens
atctgctcacttcag

SEQ ID NO: 692144 - DNA, 15 bp, Homo sapiens
tctgctcacttcagt

SEQ ID NO: 692145 - DNA, 15 bp, Homo sapiens
ctgctcacttcagtt

SEQ ID NO: 692146 - DNA, 15 bp, Homo sapiens
tgctcacttcagttt

SEQ ID NO: 692147 - DNA, 15 bp, Homo sapiens
gctcacttcagtttt

SEQ ID NO: 692148 - DNA, 15 bp, Homo sapiens
ctcacttcagttttc

SEQ ID NO: 692149 - DNA, 15 bp, Homo sapiens
tcacttcagttttcc

SEQ ID NO: 692150 - DNA, 15 bp, Homo sapiens
cacttcagttttcca

SEQ ID NO: 692151 - DNA, 15 bp, Homo sapiens
acttcagttttccaa

SEQ ID NO: 692152 - DNA, 15 bp, Homo sapiens
cttcagttttccaaa

SEQ ID NO: 692153 - DNA, 15 bp, Homo sapiens
ttcagttttccaaag

SEQ ID NO: 692154 - DNA, 15 bp, Homo sapiens
tcagttttccaaagt

SEQ ID NO: 692155 - DNA, 15 bp, Homo sapiens
cagttttccaaagtg

SEQ ID NO: 692156 - DNA, 15 bp, Homo sapiens
agttttccaaagtgc

SEQ ID NO: 692157 - DNA, 15 bp, Homo sapiens
gttttccaaagtgcc

SEQ ID NO: 692158 - DNA, 15 bp, Homo sapiens
ttttccaaagtgccg

SEQ ID NO: 692159 - DNA, 15 bp, Homo sapiens
tttccaaagtgccgg

SEQ ID NO: 692160 - DNA, 15 bp, Homo sapiens
ttccaaagtgccggg

SEQ ID NO: 692161 - DNA, 15 bp, Homo sapiens
tccaaagtgccggga

SEQ ID NO: 692162 - DNA, 15 bp, Homo sapiens
ccaaagtgccgggat

SEQ ID NO: 692163 - DNA, 15 bp, Homo sapiens
caaagtgccgggatt

SEQ ID NO: 692164 - DNA, 15 bp, Homo sapiens
aaagtgccgggatta

SEQ ID NO: 692165 - DNA, 15 bp, Homo sapiens
aagtgccgggattac

SEQ ID NO: 692166 - DNA, 15 bp, Homo sapiens
agtgccgggattaca

SEQ ID NO: 692167 - DNA, 15 bp, Homo sapiens
gtgccgggattacag

SEQ ID NO: 692168 - DNA, 15 bp, Homo sapiens
tgccgggattacagt

SEQ ID NO: 692169 - DNA, 15 bp, Homo sapiens
gccgggattacagtc

SEQ ID NO: 692170 - DNA, 15 bp, Homo sapiens
ccgggattacagtca

SEQ ID NO: 692171 - DNA, 15 bp, Homo sapiens
cgggattacagtcat

SEQ ID NO: 692172 - DNA, 15 bp, Homo sapiens
gggattacagtcatg

SEQ ID NO: 692173 - DNA, 15 bp, Homo sapiens
ggattacagtcatga

SEQ ID NO: 692174 - DNA, 15 bp, Homo sapiens
gattacagtcatgag

SEQ ID NO: 692175 - DNA, 15 bp, Homo sapiens
attacagtcatgagc

SEQ ID NO: 692176 - DNA, 15 bp, Homo sapiens
ttacagtcatgagcc

SEQ ID NO: 692177 - DNA, 15 bp, Homo sapiens
tacagtcatgagcca

SEQ ID NO: 692178 - DNA, 15 bp, Homo sapiens
acagtcatgagccac

SEQ ID NO: 692179 - DNA, 15 bp, Homo sapiens
cagtcatgagccact

SEQ ID NO: 692180 - DNA, 15 bp, Homo sapiens
agtcatgagccactg

SEQ ID NO: 692181 - DNA, 15 bp, Homo sapiens
gtcatgagccactgt

SEQ ID NO: 692182 - DNA, 15 bp, Homo sapiens
tcatgagccactgtg

SEQ ID NO: 692183 - DNA, 15 bp, Homo sapiens
catgagccactgtgc

SEQ ID NO: 692184 - DNA, 15 bp, Homo sapiens
atgagccactgtgcc

SEQ ID NO: 692185 - DNA, 15 bp, Homo sapiens
cactgtgcctggcca

SEQ ID NO: 692186 - DNA, 15 bp, Homo sapiens
actgtgcctggccat

SEQ ID NO: 692187 - DNA, 15 bp, Homo sapiens
ctgtgcctggccata

SEQ ID NO: 692188 - DNA, 15 bp, Homo sapiens
tgtgcctggccataa

SEQ ID NO: 692189 - DNA, 15 bp, Homo sapiens
gtgcctggccataat

SEQ ID NO: 692190 - DNA, 15 bp, Homo sapiens
tgcctggccataatc

SEQ ID NO: 692191 - DNA, 15 bp, Homo sapiens
gcctggccataatct

SEQ ID NO: 692192 - DNA, 15 bp, Homo sapiens
cctggccataatctt

SEQ ID NO: 692193 - DNA, 15 bp, Homo sapiens
ctggccataatctta

SEQ ID NO: 692194 - DNA, 15 bp, Homo sapiens
tggccataatcttaa

SEQ ID NO: 692195 - DNA, 15 bp, Homo sapiens
ggccataatcttaat

SEQ ID NO: 692196 - DNA, 15 bp, Homo sapiens
gccataatcttaatt

SEQ ID NO: 692197 - DNA, 15 bp, Homo sapiens
ccataatcttaattt

SEQ ID NO: 692198 - DNA, 15 bp, Homo sapiens
cataatcttaatttt

SEQ ID NO: 692199 - DNA, 15 bp, Homo sapiens
ataatcttaatttta

SEQ ID NO: 692200 - DNA, 15 bp, Homo sapiens
taatcttaattttag

SEQ ID NO: 692201 - DNA, 15 bp, Homo sapiens
aatcttaattttaga

SEQ ID NO: 692202 - DNA, 15 bp, Homo sapiens
atcttaattttagaa

SEQ ID NO: 692203 - DNA, 15 bp, Homo sapiens
tcttaattttagaaa

SEQ ID NO: 692204 - DNA, 15 bp, Homo sapiens
cttaattttagaaac

SEQ ID NO: 692205 - DNA, 15 bp, Homo sapiens
ttaattttagaaact

SEQ ID NO: 692206 - DNA, 15 bp, Homo sapiens
taattttagaaactt

SEQ ID NO: 692207 - DNA, 15 bp, Homo sapiens
aattttagaaacttt

SEQ ID NO: 692208 - DNA, 15 bp, Homo sapiens
attttagaaacttta

SEQ ID NO: 692209 - DNA, 15 bp, Homo sapiens
ttttagaaactttat

SEQ ID NO: 692210 - DNA, 15 bp, Homo sapiens
tttagaaactttatt

SEQ ID NO: 692211 - DNA, 15 bp, Homo sapiens
ttagaaactttattt

SEQ ID NO: 692212 - DNA, 15 bp, Homo sapiens
tagaaactttatttt

SEQ ID NO: 692213 - DNA, 15 bp, Homo sapiens
agaaactttattttt

SEQ ID NO: 692214 - DNA, 15 bp, Homo sapiens
gaaactttatttttg

SEQ ID NO: 692215 - DNA, 15 bp, Homo sapiens
aaactttatttttga

SEQ ID NO: 692216 - DNA, 15 bp, Homo sapiens
aactttatttttgaa

SEQ ID NO: 692217 - DNA, 15 bp, Homo sapiens
actttatttttgaat

SEQ ID NO: 692218 - DNA, 15 bp, Homo sapiens
ctttatttttgaatg

SEQ ID NO: 692219 - DNA, 15 bp, Homo sapiens
tttatttttgaatgt

SEQ ID NO: 692220 - DNA, 15 bp, Homo sapiens
ttatttttgaatgta

SEQ ID NO: 692221 - DNA, 15 bp, Homo sapiens
tatttttgaatgtat

SEQ ID NO: 692222 - DNA, 15 bp, Homo sapiens
atttttgaatgtata

SEQ ID NO: 692223 - DNA, 15 bp, Homo sapiens
tttttgaatgtatat

SEQ ID NO: 692224 - DNA, 15 bp, Homo sapiens
ttttgaatgtatata

SEQ ID NO: 692225 - DNA, 15 bp, Homo sapiens
tttgaatgtatatat

SEQ ID NO: 692226 - DNA, 15 bp, Homo sapiens
ttgaatgtatatatt

SEQ ID NO: 692227 - DNA, 15 bp, Homo sapiens
tgaatgtatatattg

SEQ ID NO: 692228 - DNA, 15 bp, Homo sapiens
gaatgtatatattga

SEQ ID NO: 692229 - DNA, 15 bp, Homo sapiens
aatgtatatattgaa

SEQ ID NO: 692230 - DNA, 15 bp, Homo sapiens
atgtatatattgaat

SEQ ID NO: 692231 - DNA, 15 bp, Homo sapiens
tgtatatattgaatg

SEQ ID NO: 692232 - DNA, 15 bp, Homo sapiens
gtatatattgaatgt

SEQ ID NO: 692233 - DNA, 15 bp, Homo sapiens
tatatattgaatgtg

SEQ ID NO: 692234 - DNA, 15 bp, Homo sapiens
atatattgaatgtgt

SEQ ID NO: 692235 - DNA, 15 bp, Homo sapiens
tatattgaatgtgtt

SEQ ID NO: 692236 - DNA, 15 bp, Homo sapiens
atattgaatgtgttt

SEQ ID NO: 692237 - DNA, 15 bp, Homo sapiens
tattgaatgtgtttt

SEQ ID NO: 692238 - DNA, 15 bp, Homo sapiens
attgaatgtgtttta

SEQ ID NO: 692239 - DNA, 15 bp, Homo sapiens
ttgaatgtgttttat

SEQ ID NO: 692240 - DNA, 15 bp, Homo sapiens
tgaatgtgttttatg

SEQ ID NO: 692241 - DNA, 15 bp, Homo sapiens
gaatgtgttttatgt

SEQ ID NO: 692242 - DNA, 15 bp, Homo sapiens
aatgtgttttatgta

SEQ ID NO: 692243 - DNA, 15 bp, Homo sapiens
atgtgttttatgtat

SEQ ID NO: 692244 - DNA, 15 bp, Homo sapiens
tgtgttttatgtata

SEQ ID NO: 692245 - DNA, 15 bp, Homo sapiens
gtgttttatgtataa

SEQ ID NO: 692246 - DNA, 15 bp, Homo sapiens
tgttttatgtataaa

SEQ ID NO: 692247 - DNA, 15 bp, Homo sapiens
gttttatgtataaag

SEQ ID NO: 692248 - DNA, 15 bp, Homo sapiens
ttttatgtataaagg

SEQ ID NO: 692249 - DNA, 15 bp, Homo sapiens
tttatgtataaagga

SEQ ID NO: 692250 - DNA, 15 bp, Homo sapiens
ttatgtataaaggat

SEQ ID NO: 692251 - DNA, 15 bp, Homo sapiens
tatgtataaaggata

SEQ ID NO: 692252 - DNA, 15 bp, Homo sapiens
atgtataaaggataa

SEQ ID NO: 692253 - DNA, 15 bp, Homo sapiens
tgtataaaggataaa

SEQ ID NO: 692254 - DNA, 15 bp, Homo sapiens
gtataaaggataaaa

SEQ ID NO: 692255 - DNA, 15 bp, Homo sapiens
tataaaggataaaaa

SEQ ID NO: 692256 - DNA, 15 bp, Homo sapiens
ataaaggataaaaaa

SEQ ID NO: 692257 - DNA, 15 bp, Homo sapiens
taaaggataaaaaat

SEQ ID NO: 692258 - DNA, 15 bp, Homo sapiens
aaaggataaaaaata

SEQ ID NO: 692259 - DNA, 15 bp, Homo sapiens
aaggataaaaaatag

SEQ ID NO: 692260 - DNA, 15 bp, Homo sapiens
aggataaaaaataga

SEQ ID NO: 692261 - DNA, 15 bp, Homo sapiens
ggataaaaaatagaa

SEQ ID NO: 692262 - DNA, 15 bp, Homo sapiens
gataaaaaatagaat

SEQ ID NO: 692263 - DNA, 15 bp, Homo sapiens
ataaaaaatagaata

SEQ ID NO: 692264 - DNA, 15 bp, Homo sapiens
taaaaaatagaataa

SEQ ID NO: 692265 - DNA, 15 bp, Homo sapiens
aaaaaatagaataaa

SEQ ID NO: 692266 - DNA, 15 bp, Homo sapiens
aaaaatagaataaat

SEQ ID NO: 692267 - DNA, 15 bp, Homo sapiens
aaaatagaataaatc

SEQ ID NO: 692268 - DNA, 15 bp, Homo sapiens
aaatagaataaatct

SEQ ID NO: 692269 - DNA, 15 bp, Homo sapiens
aatagaataaatctt

SEQ ID NO: 692270 - DNA, 15 bp, Homo sapiens
atagaataaatcttt

SEQ ID NO: 692271 - DNA, 15 bp, Homo sapiens
tagaataaatctttg

SEQ ID NO: 692272 - DNA, 15 bp, Homo sapiens
agaataaatctttgt

SEQ ID NO: 692273 - DNA, 15 bp, Homo sapiens
gaataaatctttgta

SEQ ID NO: 692274 - DNA, 15 bp, Homo sapiens
aataaatctttgtag

SEQ ID NO: 692275 - DNA, 15 bp, Homo sapiens
ataaatctttgtagc

SEQ ID NO: 692276 - DNA, 15 bp, Homo sapiens
taaatctttgtagct

SEQ ID NO: 692277 - DNA, 15 bp, Homo sapiens
aaatctttgtagctg

SEQ ID NO: 692278 - DNA, 15 bp, Homo sapiens
aatctttgtagctga

SEQ ID NO: 692279 - DNA, 15 bp, Homo sapiens
atctttgtagctgat

SEQ ID NO: 692280 - DNA, 15 bp, Homo sapiens
tctttgtagctgatg

SEQ ID NO: 692281 - DNA, 15 bp, Homo sapiens
ctttgtagctgatga

SEQ ID NO: 692282 - DNA, 15 bp, Homo sapiens
tttgtagctgatgag

SEQ ID NO: 692283 - DNA, 15 bp, Homo sapiens
ttgtagctgatgaga

SEQ ID NO: 692284 - DNA, 15 bp, Homo sapiens
tgtagctgatgagaa

SEQ ID NO: 692285 - DNA, 15 bp, Homo sapiens
gtagctgatgagaat

SEQ ID NO: 692286 - DNA, 15 bp, Homo sapiens
tagctgatgagaatc

SEQ ID NO: 692287 - DNA, 15 bp, Homo sapiens
agctgatgagaatca

SEQ ID NO: 692288 - DNA, 15 bp, Homo sapiens
gctgatgagaatcat

SEQ ID NO: 692289 - DNA, 15 bp, Homo sapiens
ctgatgagaatcatg

SEQ ID NO: 692290 - DNA, 15 bp, Homo sapiens
tgatgagaatcatgc

SEQ ID NO: 692291 - DNA, 15 bp, Homo sapiens
gatgagaatcatgct

SEQ ID NO: 692292 - DNA, 15 bp, Homo sapiens
atgagaatcatgctg

SEQ ID NO: 692293 - DNA, 15 bp, Homo sapiens
tgagaatcatgctgt

SEQ ID NO: 692294 - DNA, 15 bp, Homo sapiens
gagaatcatgctgtg

SEQ ID NO: 692295 - DNA, 15 bp, Homo sapiens
agaatcatgctgtga

SEQ ID NO: 692296 - DNA, 15 bp, Homo sapiens
gaatcatgctgtgat

SEQ ID NO: 692297 - DNA, 15 bp, Homo sapiens
aatcatgctgtgatt

SEQ ID NO: 692298 - DNA, 15 bp, Homo sapiens
atcatgctgtgatta

SEQ ID NO: 692299 - DNA, 15 bp, Homo sapiens
tcatgctgtgattac

SEQ ID NO: 692300 - DNA, 15 bp, Homo sapiens
catgctgtgattact

SEQ ID NO: 692301 - DNA, 15 bp, Homo sapiens
atgctgtgattactt

SEQ ID NO: 692302 - DNA, 15 bp, Homo sapiens
tgctgtgattacttt

SEQ ID NO: 692303 - DNA, 15 bp, Homo sapiens
gctgtgattactttt

SEQ ID NO: 692304 - DNA, 15 bp, Homo sapiens
ctgtgattacttttt

SEQ ID NO: 692305 - DNA, 15 bp, Homo sapiens
tgtgattacttttta

SEQ ID NO: 692306 - DNA, 15 bp, Homo sapiens
gtgattactttttat

SEQ ID NO: 692307 - DNA, 15 bp, Homo sapiens
tgattactttttata

SEQ ID NO: 692308 - DNA, 15 bp, Homo sapiens
gattactttttatat

SEQ ID NO: 692309 - DNA, 15 bp, Homo sapiens
attactttttatata

SEQ ID NO: 692310 - DNA, 15 bp, Homo sapiens
ttactttttatatat

SEQ ID NO: 692311 - DNA, 15 bp, Homo sapiens
tactttttatatatc

SEQ ID NO: 692312 - DNA, 15 bp, Homo sapiens
actttttatatatca

SEQ ID NO: 692313 - DNA, 15 bp, Homo sapiens
ctttttatatatcat

SEQ ID NO: 692314 - DNA, 15 bp, Homo sapiens
tttttatatatcata

SEQ ID NO: 692315 - DNA, 15 bp, Homo sapiens
ttttatatatcataa

SEQ ID NO: 692316 - DNA, 15 bp, Homo sapiens
tttatatatcataat

SEQ ID NO: 692317 - DNA, 15 bp, Homo sapiens
ttatatatcataata

SEQ ID NO: 692318 - DNA, 15 bp, Homo sapiens
tatatatcataatat

SEQ ID NO: 692319 - DNA, 15 bp, Homo sapiens
atatatcataatatg

SEQ ID NO: 692320 - DNA, 15 bp, Homo sapiens
tatatcataatatga

SEQ ID NO: 692321 - DNA, 15 bp, Homo sapiens
atatcataatatgaa

SEQ ID NO: 692322 - DNA, 15 bp, Homo sapiens
tatcataatatgaat

SEQ ID NO: 692323 - DNA, 15 bp, Homo sapiens
atcataatatgaatt

SEQ ID NO: 692324 - DNA, 15 bp, Homo sapiens
tcataatatgaatta

SEQ ID NO: 692325 - DNA, 15 bp, Homo sapiens
cataatatgaattat

SEQ ID NO: 692326 - DNA, 15 bp, Homo sapiens
ataatatgaattata

SEQ ID NO: 692327 - DNA, 15 bp, Homo sapiens
taatatgaattatat

SEQ ID NO: 692328 - DNA, 15 bp, Homo sapiens
aatatgaattatata

SEQ ID NO: 692329 - DNA, 15 bp, Homo sapiens
atatgaattatataa

SEQ ID NO: 692330 - DNA, 15 bp, Homo sapiens
tatgaattatataat

SEQ ID NO: 692331 - DNA, 15 bp, Homo sapiens
atgaattatataata

SEQ ID NO: 692332 - DNA, 15 bp, Homo sapiens
tgaattatataatat

SEQ ID NO: 692333 - DNA, 15 bp, Homo sapiens
gaattatataatatt

SEQ ID NO: 692334 - DNA, 15 bp, Homo sapiens
aattatataatatta

SEQ ID NO: 692335 - DNA, 15 bp, Homo sapiens
attatataatattat

SEQ ID NO: 692336 - DNA, 15 bp, Homo sapiens
ttatataatattata

SEQ ID NO: 692337 - DNA, 15 bp, Homo sapiens
tatataatattatat

SEQ ID NO: 692338 - DNA, 15 bp, Homo sapiens
atataatattatata

SEQ ID NO: 692339 - DNA, 15 bp, Homo sapiens
tataatattatataa

SEQ ID NO: 692340 - DNA, 15 bp, Homo sapiens
ataatattatataat

SEQ ID NO: 692341 - DNA, 15 bp, Homo sapiens
taatattatataata

SEQ ID NO: 692342 - DNA, 15 bp, Homo sapiens
aatattatataatat

SEQ ID NO: 692343 - DNA, 15 bp, Homo sapiens
atattatataatatg

SEQ ID NO: 692344 - DNA, 15 bp, Homo sapiens
tattatataatatgc

SEQ ID NO: 692345 - DNA, 15 bp, Homo sapiens
attatataatatgca

SEQ ID NO: 692346 - DNA, 15 bp, Homo sapiens
ttatataatatgcat

SEQ ID NO: 692347 - DNA, 15 bp, Homo sapiens
tatataatatgcatt

SEQ ID NO: 692348 - DNA, 15 bp, Homo sapiens
atataatatgcattt

SEQ ID NO: 692349 - DNA, 15 bp, Homo sapiens
tataatatgcatttt

SEQ ID NO: 692350 - DNA, 15 bp, Homo sapiens
ataatatgcatttta

SEQ ID NO: 692351 - DNA, 15 bp, Homo sapiens
taatatgcattttaa

SEQ ID NO: 692352 - DNA, 15 bp, Homo sapiens
aatatgcattttaat

SEQ ID NO: 692353 - DNA, 15 bp, Homo sapiens
atatgcattttaata

SEQ ID NO: 692354 - DNA, 15 bp, Homo sapiens
tatgcattttaatac

SEQ ID NO: 692355 - DNA, 15 bp, Homo sapiens
atgcattttaataca

SEQ ID NO: 692356 - DNA, 15 bp, Homo sapiens
tgcattttaatacat

SEQ ID NO: 692357 - DNA, 15 bp, Homo sapiens
gcattttaatacatc

SEQ ID NO: 692358 - DNA, 15 bp, Homo sapiens
cattttaatacatca

SEQ ID NO: 692359 - DNA, 15 bp, Homo sapiens
attttaatacatcat

SEQ ID NO: 692360 - DNA, 15 bp, Homo sapiens
ttttaatacatcatc

SEQ ID NO: 692361 - DNA, 15 bp, Homo sapiens
tttaatacatcatct

SEQ ID NO: 692362 - DNA, 15 bp, Homo sapiens
ttaatacatcatctt

SEQ ID NO: 692363 - DNA, 15 bp, Homo sapiens
taatacatcatcttg

SEQ ID NO: 692364 - DNA, 15 bp, Homo sapiens
aatacatcatcttgt

SEQ ID NO: 692365 - DNA, 15 bp, Homo sapiens
atacatcatcttgtg

SEQ ID NO: 692366 - DNA, 15 bp, Homo sapiens
tacatcatcttgtga

SEQ ID NO: 692367 - DNA, 15 bp, Homo sapiens
acatcatcttgtgat

SEQ ID NO: 692368 - DNA, 15 bp, Homo sapiens
catcatcttgtgatg

SEQ ID NO: 692369 - DNA, 15 bp, Homo sapiens
atcatcttgtgatgt

SEQ ID NO: 692370 - DNA, 15 bp, Homo sapiens
tcatcttgtgatgtg

SEQ ID NO: 692371 - DNA, 15 bp, Homo sapiens
catcttgtgatgtgt

SEQ ID NO: 692372 - DNA, 15 bp, Homo sapiens
atcttgtgatgtgtt

SEQ ID NO: 692373 - DNA, 15 bp, Homo sapiens
tcttgtgatgtgttt

SEQ ID NO: 692374 - DNA, 15 bp, Homo sapiens
cttgtgatgtgtttt

SEQ ID NO: 692375 - DNA, 15 bp, Homo sapiens
ttgtgatgtgtttta

SEQ ID NO: 692376 - DNA, 15 bp, Homo sapiens
tgtgatgtgttttaa

SEQ ID NO: 692377 - DNA, 15 bp, Homo sapiens
gtgatgtgttttaat

SEQ ID NO: 692378 - DNA, 15 bp, Homo sapiens
tgatgtgttttaatt

SEQ ID NO: 692379 - DNA, 15 bp, Homo sapiens
gatgtgttttaatta

SEQ ID NO: 692380 - DNA, 15 bp, Homo sapiens
atgtgttttaattat

SEQ ID NO: 692381 - DNA, 15 bp, Homo sapiens
tgtgttttaattatt

SEQ ID NO: 692382 - DNA, 15 bp, Homo sapiens
gtgttttaattatta

SEQ ID NO: 692383 - DNA, 15 bp, Homo sapiens
tgttttaattattaa

SEQ ID NO: 692384 - DNA, 15 bp, Homo sapiens
gttttaattattaaa

SEQ ID NO: 692385 - DNA, 15 bp, Homo sapiens
ttttaattattaaag

SEQ ID NO: 692386 - DNA, 15 bp, Homo sapiens
tttaattattaaagt

SEQ ID NO: 692387 - DNA, 15 bp, Homo sapiens
ttaattattaaagtt

SEQ ID NO: 692388 - DNA, 15 bp, Homo sapiens
taattattaaagttg

SEQ ID NO: 692389 - DNA, 15 bp, Homo sapiens
aattattaaagttga

SEQ ID NO: 692390 - DNA, 15 bp, Homo sapiens
attattaaagttgaa

SEQ ID NO: 692391 - DNA, 15 bp, Homo sapiens
ttattaaagttgaat

SEQ ID NO: 692392 - DNA, 15 bp, Homo sapiens
tattaaagttgaata

SEQ ID NO: 692393 - DNA, 15 bp, Homo sapiens
attaaagttgaatag

SEQ ID NO: 692394 - DNA, 15 bp, Homo sapiens
ttaaagttgaatagc

SEQ ID NO: 692395 - DNA, 15 bp, Homo sapiens
taaagttgaatagcc

SEQ ID NO: 692396 - DNA, 15 bp, Homo sapiens
aaagttgaatagccc

SEQ ID NO: 692397 - DNA, 15 bp, Homo sapiens
aagttgaatagcccc

SEQ ID NO: 692398 - DNA, 15 bp, Homo sapiens
agttgaatagcccca

SEQ ID NO: 692399 - DNA, 15 bp, Homo sapiens
gttgaatagccccac

SEQ ID NO: 692400 - DNA, 15 bp, Homo sapiens
ttgaatagccccact

SEQ ID NO: 692401 - DNA, 15 bp, Homo sapiens
tgaatagccccactc

SEQ ID NO: 692402 - DNA, 15 bp, Homo sapiens
gaatagccccactcc

SEQ ID NO: 692403 - DNA, 15 bp, Homo sapiens
aatagccccactcca

SEQ ID NO: 692404 - DNA, 15 bp, Homo sapiens
atagccccactccaa

SEQ ID NO: 692405 - DNA, 15 bp, Homo sapiens
tagccccactccaaa

SEQ ID NO: 692406 - DNA, 15 bp, Homo sapiens
agccccactccaaat

SEQ ID NO: 692407 - DNA, 15 bp, Homo sapiens
gccccactccaaatg

SEQ ID NO: 692408 - DNA, 15 bp, Homo sapiens
ccccactccaaatga

SEQ ID NO: 692409 - DNA, 15 bp, Homo sapiens
cccactccaaatgat

SEQ ID NO: 692410 - DNA, 15 bp, Homo sapiens
ccactccaaatgata

SEQ ID NO: 692411 - DNA, 15 bp, Homo sapiens
cactccaaatgatac

SEQ ID NO: 692412 - DNA, 15 bp, Homo sapiens
actccaaatgataca

SEQ ID NO: 692413 - DNA, 15 bp, Homo sapiens
ctccaaatgatacat

SEQ ID NO: 692414 - DNA, 15 bp, Homo sapiens
tccaaatgatacatg

SEQ ID NO: 692415 - DNA, 15 bp, Homo sapiens
ccaaatgatacatgt

SEQ ID NO: 692416 - DNA, 15 bp, Homo sapiens
caaatgatacatgta

SEQ ID NO: 692417 - DNA, 15 bp, Homo sapiens
aaatgatacatgtat

SEQ ID NO: 692418 - DNA, 15 bp, Homo sapiens
aatgatacatgtatt

SEQ ID NO: 692419 - DNA, 15 bp, Homo sapiens
atgatacatgtattg

SEQ ID NO: 692420 - DNA, 15 bp, Homo sapiens
tgatacatgtattgg

SEQ ID NO: 692421 - DNA, 15 bp, Homo sapiens
gatacatgtattgga

SEQ ID NO: 692422 - DNA, 15 bp, Homo sapiens
atacatgtattggaa

SEQ ID NO: 692423 - DNA, 15 bp, Homo sapiens
tacatgtattggaac

SEQ ID NO: 692424 - DNA, 15 bp, Homo sapiens
acatgtattggaact

SEQ ID NO: 692425 - DNA, 15 bp, Homo sapiens
catgtattggaactt

SEQ ID NO: 692426 - DNA, 15 bp, Homo sapiens
atgtattggaacttc

SEQ ID NO: 692427 - DNA, 15 bp, Homo sapiens
tgtattggaacttct

SEQ ID NO: 692428 - DNA, 15 bp, Homo sapiens
gtattggaacttctt

SEQ ID NO: 692429 - DNA, 15 bp, Homo sapiens
tattggaacttcttt

SEQ ID NO: 692430 - DNA, 15 bp, Homo sapiens
attggaacttctttt

SEQ ID NO: 692431 - DNA, 15 bp, Homo sapiens
ttggaacttcttttg

SEQ ID NO: 692432 - DNA, 15 bp, Homo sapiens
tggaacttcttttgc

SEQ ID NO: 692433 - DNA, 15 bp, Homo sapiens
ggaacttcttttgca

SEQ ID NO: 692434 - DNA, 15 bp, Homo sapiens
gaacttcttttgcaa

SEQ ID NO: 692435 - DNA, 15 bp, Homo sapiens
aacttcttttgcaac

SEQ ID NO: 692436 - DNA, 15 bp, Homo sapiens
acttcttttgcaaca

SEQ ID NO: 692437 - DNA, 15 bp, Homo sapiens
cttcttttgcaacaa

SEQ ID NO: 692438 - DNA, 15 bp, Homo sapiens
ttcttttgcaacaat

SEQ ID NO: 692439 - DNA, 15 bp, Homo sapiens
tcttttgcaacaatt

SEQ ID NO: 692440 - DNA, 15 bp, Homo sapiens
cttttgcaacaattt

SEQ ID NO: 692441 - DNA, 15 bp, Homo sapiens
ttttgcaacaatttc

SEQ ID NO: 692442 - DNA, 15 bp, Homo sapiens
tttgcaacaatttcc

SEQ ID NO: 692443 - DNA, 15 bp, Homo sapiens
ttgcaacaatttccc

SEQ ID NO: 692444 - DNA, 15 bp, Homo sapiens
tgcaacaatttccct

SEQ ID NO: 692445 - DNA, 15 bp, Homo sapiens
gcaacaatttcccta

SEQ ID NO: 692446 - DNA, 15 bp, Homo sapiens
caacaatttccctat

SEQ ID NO: 692447 - DNA, 15 bp, Homo sapiens
aacaatttccctatc

SEQ ID NO: 692448 - DNA, 15 bp, Homo sapiens
acaatttccctatct

SEQ ID NO: 692449 - DNA, 15 bp, Homo sapiens
caatttccctatctt

SEQ ID NO: 692450 - DNA, 15 bp, Homo sapiens
aatttccctatcttg

SEQ ID NO: 692451 - DNA, 15 bp, Homo sapiens
atttccctatcttgt

SEQ ID NO: 692452 - DNA, 15 bp, Homo sapiens
tttccctatcttgta

SEQ ID NO: 692453 - DNA, 15 bp, Homo sapiens
ttccctatcttgtat

SEQ ID NO: 692454 - DNA, 15 bp, Homo sapiens
tccctatcttgtatt

SEQ ID NO: 692455 - DNA, 15 bp, Homo sapiens
ccctatcttgtattt

SEQ ID NO: 692456 - DNA, 15 bp, Homo sapiens
cctatcttgtatttc

SEQ ID NO: 692457 - DNA, 15 bp, Homo sapiens
ctatcttgtatttct

SEQ ID NO: 692458 - DNA, 15 bp, Homo sapiens
tatcttgtatttctg

SEQ ID NO: 692459 - DNA, 15 bp, Homo sapiens
atcttgtatttctga

SEQ ID NO: 692460 - DNA, 15 bp, Homo sapiens
tcttgtatttctgaa

SEQ ID NO: 692461 - DNA, 15 bp, Homo sapiens
cttgtatttctgaaa

SEQ ID NO: 692462 - DNA, 15 bp, Homo sapiens
ttgtatttctgaaaa

SEQ ID NO: 692463 - DNA, 15 bp, Homo sapiens
tgtatttctgaaaat

SEQ ID NO: 692464 - DNA, 15 bp, Homo sapiens
gtatttctgaaaatg

SEQ ID NO: 692465 - DNA, 15 bp, Homo sapiens
tatttctgaaaatgt

SEQ ID NO: 692466 - DNA, 15 bp, Homo sapiens
atttctgaaaatgta

SEQ ID NO: 692467 - DNA, 15 bp, Homo sapiens
tttctgaaaatgtaa

SEQ ID NO: 692468 - DNA, 15 bp, Homo sapiens
ttctgaaaatgtaat

SEQ ID NO: 692469 - DNA, 15 bp, Homo sapiens
tctgaaaatgtaatc

SEQ ID NO: 692470 - DNA, 15 bp, Homo sapiens
ctgaaaatgtaatca

SEQ ID NO: 692471 - DNA, 15 bp, Homo sapiens
tgaaaatgtaatcaa

SEQ ID NO: 692472 - DNA, 15 bp, Homo sapiens
gaaaatgtaatcaaa

SEQ ID NO: 692473 - DNA, 15 bp, Homo sapiens
aaaatgtaatcaaat

SEQ ID NO: 692474 - DNA, 15 bp, Homo sapiens
aaatgtaatcaaatg

SEQ ID NO: 692475 - DNA, 15 bp, Homo sapiens
aatgtaatcaaatga

SEQ ID NO: 692476 - DNA, 15 bp, Homo sapiens
atgtaatcaaatgat

SEQ ID NO: 692477 - DNA, 15 bp, Homo sapiens
tgtaatcaaatgatt

SEQ ID NO: 692478 - DNA, 15 bp, Homo sapiens
gtaatcaaatgattt

SEQ ID NO: 692479 - DNA, 15 bp, Homo sapiens
taatcaaatgattta

SEQ ID NO: 692480 - DNA, 15 bp, Homo sapiens
aatcaaatgatttag

SEQ ID NO: 692481 - DNA, 15 bp, Homo sapiens
atcaaatgatttagc

SEQ ID NO: 692482 - DNA, 15 bp, Homo sapiens
tcaaatgatttagct

SEQ ID NO: 692483 - DNA, 15 bp, Homo sapiens
caaatgatttagcta

SEQ ID NO: 692484 - DNA, 15 bp, Homo sapiens
aaatgatttagctaa

SEQ ID NO: 692485 - DNA, 15 bp, Homo sapiens
aatgatttagctaat

SEQ ID NO: 692486 - DNA, 15 bp, Homo sapiens
atgatttagctaatt

SEQ ID NO: 692487 - DNA, 15 bp, Homo sapiens
tgatttagctaattc

SEQ ID NO: 692488 - DNA, 15 bp, Homo sapiens
gatttagctaattca

SEQ ID NO: 692489 - DNA, 15 bp, Homo sapiens
atttagctaattcat

SEQ ID NO: 692490 - DNA, 15 bp, Homo sapiens
tttagctaattcata

SEQ ID NO: 692491 - DNA, 15 bp, Homo sapiens
ttagctaattcataa

SEQ ID NO: 692492 - DNA, 15 bp, Homo sapiens
tagctaattcataac

SEQ ID NO: 692493 - DNA, 15 bp, Homo sapiens
agctaattcataact

SEQ ID NO: 692494 - DNA, 15 bp, Homo sapiens
gctaattcataactc

SEQ ID NO: 692495 - DNA, 15 bp, Homo sapiens
ctaattcataactct

SEQ ID NO: 692496 - DNA, 15 bp, Homo sapiens
taattcataactctt

SEQ ID NO: 692497 - DNA, 15 bp, Homo sapiens
aattcataactcttt

SEQ ID NO: 692498 - DNA, 15 bp, Homo sapiens
attcataactctttc

SEQ ID NO: 692499 - DNA, 15 bp, Homo sapiens
ttcataactctttca

SEQ ID NO: 692500 - DNA, 15 bp, Homo sapiens
tcataactctttcaa

SEQ ID NO: 692501 - DNA, 15 bp, Homo sapiens
cataactctttcaaa

SEQ ID NO: 692502 - DNA, 15 bp, Homo sapiens
ataactctttcaaag

SEQ ID NO: 692503 - DNA, 15 bp, Homo sapiens
taactctttcaaagc

SEQ ID NO: 692504 - DNA, 15 bp, Homo sapiens
aactctttcaaagca

SEQ ID NO: 692505 - DNA, 15 bp, Homo sapiens
actctttcaaagcac

SEQ ID NO: 692506 - DNA, 15 bp, Homo sapiens
ctctttcaaagcacg

SEQ ID NO: 692507 - DNA, 15 bp, Homo sapiens
tctttcaaagcacgt

SEQ ID NO: 692508 - DNA, 15 bp, Homo sapiens
ctttcaaagcacgtt

SEQ ID NO: 692509 - DNA, 15 bp, Homo sapiens
tttcaaagcacgttt

SEQ ID NO: 692510 - DNA, 15 bp, Homo sapiens
ttcaaagcacgtttt

SEQ ID NO: 692511 - DNA, 15 bp, Homo sapiens
tcaaagcacgtttta

SEQ ID NO: 692512 - DNA, 15 bp, Homo sapiens
caaagcacgttttaa

SEQ ID NO: 692513 - DNA, 15 bp, Homo sapiens
aaagcacgttttaaa

SEQ ID NO: 692514 - DNA, 15 bp, Homo sapiens
aagcacgttttaaaa

SEQ ID NO: 692515 - DNA, 15 bp, Homo sapiens
agcacgttttaaaat

SEQ ID NO: 692516 - DNA, 15 bp, Homo sapiens
gcacgttttaaaatt

SEQ ID NO: 692517 - DNA, 15 bp, Homo sapiens
cacgttttaaaatta

SEQ ID NO: 692518 - DNA, 15 bp, Homo sapiens
acgttttaaaattag

SEQ ID NO: 692519 - DNA, 15 bp, Homo sapiens
cgttttaaaattagg

SEQ ID NO: 692520 - DNA, 15 bp, Homo sapiens
gttttaaaattagga

SEQ ID NO: 692521 - DNA, 15 bp, Homo sapiens
ttttaaaattaggaa

SEQ ID NO: 692522 - DNA, 15 bp, Homo sapiens
tttaaaattaggaaa

SEQ ID NO: 692523 - DNA, 15 bp, Homo sapiens
ttaaaattaggaaat

SEQ ID NO: 692524 - DNA, 15 bp, Homo sapiens
taaaattaggaaatg

SEQ ID NO: 692525 - DNA, 15 bp, Homo sapiens
aaaattaggaaatgg

SEQ ID NO: 692526 - DNA, 15 bp, Homo sapiens
aaattaggaaatggt

SEQ ID NO: 692527 - DNA, 15 bp, Homo sapiens
aattaggaaatggtc

SEQ ID NO: 692528 - DNA, 15 bp, Homo sapiens
attaggaaatggtcc

SEQ ID NO: 692529 - DNA, 15 bp, Homo sapiens
ttaggaaatggtccg

SEQ ID NO: 692530 - DNA, 15 bp, Homo sapiens
taggaaatggtccgg

SEQ ID NO: 692531 - DNA, 15 bp, Homo sapiens
aggaaatggtccggg

SEQ ID NO: 692532 - DNA, 15 bp, Homo sapiens
ggaaatggtccgggc

SEQ ID NO: 692533 - DNA, 15 bp, Homo sapiens
gaaatggtccgggca

SEQ ID NO: 692534 - DNA, 15 bp, Homo sapiens
aaatggtccgggcat

SEQ ID NO: 692535 - DNA, 15 bp, Homo sapiens
aatggtccgggcatg

SEQ ID NO: 692536 - DNA, 15 bp, Homo sapiens
atggtccgggcatgg

SEQ ID NO: 692537 - DNA, 15 bp, Homo sapiens
tggtccgggcatggt

SEQ ID NO: 692538 - DNA, 15 bp, Homo sapiens
ggtccgggcatggtg

SEQ ID NO: 692539 - DNA, 15 bp, Homo sapiens
gtccgggcatggtgg

SEQ ID NO: 692540 - DNA, 15 bp, Homo sapiens
tccgggcatggtggc

SEQ ID NO: 692541 - DNA, 15 bp, Homo sapiens
ccgggcatggtggct

SEQ ID NO: 692542 - DNA, 15 bp, Homo sapiens
cgggcatggtggctc

SEQ ID NO: 692543 - DNA, 15 bp, Homo sapiens
ttatgggactactgt

SEQ ID NO: 692544 - DNA, 15 bp, Homo sapiens
tatgggactactgtt

SEQ ID NO: 692545 - DNA, 15 bp, Homo sapiens
atgggactactgtta

SEQ ID NO: 692546 - DNA, 15 bp, Homo sapiens
tgggactactgttag

SEQ ID NO: 692547 - DNA, 15 bp, Homo sapiens
gggactactgttaga

SEQ ID NO: 692548 - DNA, 15 bp, Homo sapiens
ggactactgttagat

SEQ ID NO: 692549 - DNA, 15 bp, Homo sapiens
gactactgttagata

SEQ ID NO: 692550 - DNA, 15 bp, Homo sapiens
actactgttagatat

SEQ ID NO: 692551 - DNA, 15 bp, Homo sapiens
ctactgttagatatg

SEQ ID NO: 692552 - DNA, 15 bp, Homo sapiens
tactgttagatatgc

SEQ ID NO: 692553 - DNA, 15 bp, Homo sapiens
actgttagatatgca

SEQ ID NO: 692554 - DNA, 15 bp, Homo sapiens
ctgttagatatgcag

SEQ ID NO: 692555 - DNA, 15 bp, Homo sapiens
tgttagatatgcagt

SEQ ID NO: 692556 - DNA, 15 bp, Homo sapiens
gttagatatgcagtc

SEQ ID NO: 692557 - DNA, 15 bp, Homo sapiens
ttagatatgcagtca

SEQ ID NO: 692558 - DNA, 15 bp, Homo sapiens
tagatatgcagtcag

SEQ ID NO: 692559 - DNA, 15 bp, Homo sapiens
agatatgcagtcagt

SEQ ID NO: 692560 - DNA, 15 bp, Homo sapiens
gatatgcagtcagtt

SEQ ID NO: 692561 - DNA, 15 bp, Homo sapiens
atatgcagtcagtta

SEQ ID NO: 692562 - DNA, 15 bp, Homo sapiens
tatgcagtcagttat

SEQ ID NO: 692563 - DNA, 15 bp, Homo sapiens
atgcagtcagttatt

SEQ ID NO: 692564 - DNA, 15 bp, Homo sapiens
tgcagtcagttattg

SEQ ID NO: 692565 - DNA, 15 bp, Homo sapiens
gcagtcagttattga

SEQ ID NO: 692566 - DNA, 15 bp, Homo sapiens
cagtcagttattgac

SEQ ID NO: 692567 - DNA, 15 bp, Homo sapiens
agtcagttattgacc

SEQ ID NO: 692568 - DNA, 15 bp, Homo sapiens
gtcagttattgacca

SEQ ID NO: 692569 - DNA, 15 bp, Homo sapiens
tcagttattgaccaa

SEQ ID NO: 692570 - DNA, 15 bp, Homo sapiens
cagttattgaccaaa

SEQ ID NO: 692571 - DNA, 15 bp, Homo sapiens
agttattgaccaaaa

SEQ ID NO: 692572 - DNA, 15 bp, Homo sapiens
gttattgaccaaaaa

SEQ ID NO: 692573 - DNA, 15 bp, Homo sapiens
ttattgaccaaaaac

SEQ ID NO: 692574 - DNA, 15 bp, Homo sapiens
tattgaccaaaaacg

SEQ ID NO: 692575 - DNA, 15 bp, Homo sapiens
attgaccaaaaacgt

SEQ ID NO: 692576 - DNA, 15 bp, Homo sapiens
ttgaccaaaaacgtt

SEQ ID NO: 692577 - DNA, 15 bp, Homo sapiens
tgaccaaaaacgttg

SEQ ID NO: 692578 - DNA, 15 bp, Homo sapiens
gaccaaaaacgttgt

SEQ ID NO: 692579 - DNA, 15 bp, Homo sapiens
accaaaaacgttgtt

SEQ ID NO: 692580 - DNA, 15 bp, Homo sapiens
ccaaaaacgttgtta

SEQ ID NO: 692581 - DNA, 15 bp, Homo sapiens
caaaaacgttgttat

SEQ ID NO: 692582 - DNA, 15 bp, Homo sapiens
aaaaacgttgttatg

SEQ ID NO: 692583 - DNA, 15 bp, Homo sapiens
aaaacgttgttatgc

SEQ ID NO: 692584 - DNA, 15 bp, Homo sapiens
aaacgttgttatgcg

SEQ ID NO: 692585 - DNA, 15 bp, Homo sapiens
aacgttgttatgcgg

SEQ ID NO: 692586 - DNA, 15 bp, Homo sapiens
acgttgttatgcggt

SEQ ID NO: 692587 - DNA, 15 bp, Homo sapiens
cgttgttatgcggtg

SEQ ID NO: 692588 - DNA, 15 bp, Homo sapiens
gttgttatgcggtgc

SEQ ID NO: 692589 - DNA, 15 bp, Homo sapiens
ttgttatgcggtgca

SEQ ID NO: 692590 - DNA, 15 bp, Homo sapiens
tgttatgcggtgcat

SEQ ID NO: 692591 - DNA, 15 bp, Homo sapiens
gttatgcggtgcatg

SEQ ID NO: 692592 - DNA, 15 bp, Homo sapiens
ttatgcggtgcatga

SEQ ID NO: 692593 - DNA, 15 bp, Homo sapiens
tatgcggtgcatgat

SEQ ID NO: 692594 - DNA, 15 bp, Homo sapiens
atgcggtgcatgatt

SEQ ID NO: 692595 - DNA, 15 bp, Homo sapiens
tgcggtgcatgatta

SEQ ID NO: 692596 - DNA, 15 bp, Homo sapiens
gcggtgcatgattat

SEQ ID NO: 692597 - DNA, 15 bp, Homo sapiens
cggtgcatgattata

SEQ ID NO: 692598 - DNA, 15 bp, Homo sapiens
ggtgcatgattatat

SEQ ID NO: 692599 - DNA, 15 bp, Homo sapiens
gtgcatgattatata

SEQ ID NO: 692600 - DNA, 15 bp, Homo sapiens
tgcatgattatatat

SEQ ID NO: 692601 - DNA, 15 bp, Homo sapiens
gcatgattatatatg

SEQ ID NO: 692602 - DNA, 15 bp, Homo sapiens
catgattatatatga

SEQ ID NO: 692603 - DNA, 15 bp, Homo sapiens
atgattatatatgag

SEQ ID NO: 692604 - DNA, 15 bp, Homo sapiens
tgattatatatgaga

SEQ ID NO: 692605 - DNA, 15 bp, Homo sapiens
gattatatatgagat

SEQ ID NO: 692606 - DNA, 15 bp, Homo sapiens
attatatatgagatt

SEQ ID NO: 692607 - DNA, 15 bp, Homo sapiens
ttatatatgagattt

SEQ ID NO: 692608 - DNA, 15 bp, Homo sapiens
tatatatgagatttt

SEQ ID NO: 692609 - DNA, 15 bp, Homo sapiens
atatatgagattttt

SEQ ID NO: 692610 - DNA, 15 bp, Homo sapiens
tatatgagatttttg

SEQ ID NO: 692611 - DNA, 15 bp, Homo sapiens
atatgagatttttgc

SEQ ID NO: 692612 - DNA, 15 bp, Homo sapiens
tatgagatttttgct

SEQ ID NO: 692613 - DNA, 15 bp, Homo sapiens
atgagatttttgctc

SEQ ID NO: 692614 - DNA, 15 bp, Homo sapiens
tgagatttttgctct

SEQ ID NO: 692615 - DNA, 15 bp, Homo sapiens
gagatttttgctctt

SEQ ID NO: 692616 - DNA, 15 bp, Homo sapiens
agatttttgctctta

SEQ ID NO: 692617 - DNA, 15 bp, Homo sapiens
gatttttgctcttag

SEQ ID NO: 692618 - DNA, 15 bp, Homo sapiens
atttttgctcttagt

SEQ ID NO: 692619 - DNA, 15 bp, Homo sapiens
tttttgctcttagtt

SEQ ID NO: 692620 - DNA, 15 bp, Homo sapiens
ttttgctcttagttt

SEQ ID NO: 692621 - DNA, 15 bp, Homo sapiens
tttgctcttagtttg

SEQ ID NO: 692622 - DNA, 15 bp, Homo sapiens
ttgctcttagtttgg

SEQ ID NO: 692623 - DNA, 15 bp, Homo sapiens
tgctcttagtttgga

SEQ ID NO: 692624 - DNA, 15 bp, Homo sapiens
gctcttagtttggaa

SEQ ID NO: 692625 - DNA, 15 bp, Homo sapiens
ctcttagtttggaag

SEQ ID NO: 692626 - DNA, 15 bp, Homo sapiens
tcttagtttggaagg

SEQ ID NO: 692627 - DNA, 15 bp, Homo sapiens
cttagtttggaagga

SEQ ID NO: 692628 - DNA, 15 bp, Homo sapiens
ttagtttggaaggaa

SEQ ID NO: 692629 - DNA, 15 bp, Homo sapiens
tagtttggaaggaaa

SEQ ID NO: 692630 - DNA, 15 bp, Homo sapiens
agtttggaaggaaat

SEQ ID NO: 692631 - DNA, 15 bp, Homo sapiens
gtttggaaggaaata

SEQ ID NO: 692632 - DNA, 15 bp, Homo sapiens
tttggaaggaaataa

SEQ ID NO: 692633 - DNA, 15 bp, Homo sapiens
ttggaaggaaataat

SEQ ID NO: 692634 - DNA, 15 bp, Homo sapiens
tggaaggaaataata

SEQ ID NO: 692635 - DNA, 15 bp, Homo sapiens
ggaaggaaataatat

SEQ ID NO: 692636 - DNA, 15 bp, Homo sapiens
gaaggaaataatatg

SEQ ID NO: 692637 - DNA, 15 bp, Homo sapiens
aaggaaataatatgg

SEQ ID NO: 692638 - DNA, 15 bp, Homo sapiens
aggaaataatatggt

SEQ ID NO: 692639 - DNA, 15 bp, Homo sapiens
ggaaataatatggtg

SEQ ID NO: 692640 - DNA, 15 bp, Homo sapiens
gaaataatatggtgt

SEQ ID NO: 692641 - DNA, 15 bp, Homo sapiens
aaataatatggtgtg

SEQ ID NO: 692642 - DNA, 15 bp, Homo sapiens
aataatatggtgtgt

SEQ ID NO: 692643 - DNA, 15 bp, Homo sapiens
ataatatggtgtgtg

SEQ ID NO: 692644 - DNA, 15 bp, Homo sapiens
taatatggtgtgtgt

SEQ ID NO: 692645 - DNA, 15 bp, Homo sapiens
aatatggtgtgtgtt

SEQ ID NO: 692646 - DNA, 15 bp, Homo sapiens
atatggtgtgtgttt

SEQ ID NO: 692647 - DNA, 15 bp, Homo sapiens
tatggtgtgtgttta

SEQ ID NO: 692648 - DNA, 15 bp, Homo sapiens
atggtgtgtgtttat

SEQ ID NO: 692649 - DNA, 15 bp, Homo sapiens
tggtgtgtgtttata

SEQ ID NO: 692650 - DNA, 15 bp, Homo sapiens
ggtgtgtgtttatat

SEQ ID NO: 692651 - DNA, 15 bp, Homo sapiens
gtgtgtgtttatatt

SEQ ID NO: 692652 - DNA, 15 bp, Homo sapiens
tgtgtgtttatattt

SEQ ID NO: 692653 - DNA, 15 bp, Homo sapiens
gtgtgtttatatttc

SEQ ID NO: 692654 - DNA, 15 bp, Homo sapiens
tgtgtttatatttct

SEQ ID NO: 692655 - DNA, 15 bp, Homo sapiens
gtgtttatatttcta

SEQ ID NO: 692656 - DNA, 15 bp, Homo sapiens
tgtttatatttctaa

SEQ ID NO: 692657 - DNA, 15 bp, Homo sapiens
gtttatatttctaaa

SEQ ID NO: 692658 - DNA, 15 bp, Homo sapiens
tttatatttctaaaa

SEQ ID NO: 692659 - DNA, 15 bp, Homo sapiens
ttatatttctaaaat

SEQ ID NO: 692660 - DNA, 15 bp, Homo sapiens
tatatttctaaaatt

SEQ ID NO: 692661 - DNA, 15 bp, Homo sapiens
atatttctaaaattt

SEQ ID NO: 692662 - DNA, 15 bp, Homo sapiens
tatttctaaaatttg

SEQ ID NO: 692663 - DNA, 15 bp, Homo sapiens
atttctaaaatttgg

SEQ ID NO: 692664 - DNA, 15 bp, Homo sapiens
tttctaaaatttggt

SEQ ID NO: 692665 - DNA, 15 bp, Homo sapiens
ttctaaaatttggtt

SEQ ID NO: 692666 - DNA, 15 bp, Homo sapiens
tctaaaatttggtta

SEQ ID NO: 692667 - DNA, 15 bp, Homo sapiens
ctaaaatttggttat

SEQ ID NO: 692668 - DNA, 15 bp, Homo sapiens
taaaatttggttatt

SEQ ID NO: 692669 - DNA, 15 bp, Homo sapiens
aaaatttggttattc

SEQ ID NO: 692670 - DNA, 15 bp, Homo sapiens
aaatttggttattct

SEQ ID NO: 692671 - DNA, 15 bp, Homo sapiens
aatttggttattctt

SEQ ID NO: 692672 - DNA, 15 bp, Homo sapiens
atttggttattcttt

SEQ ID NO: 692673 - DNA, 15 bp, Homo sapiens
tttggttattctttc

SEQ ID NO: 692674 - DNA, 15 bp, Homo sapiens
ttggttattctttca

SEQ ID NO: 692675 - DNA, 15 bp, Homo sapiens
tggttattctttcaa

SEQ ID NO: 692676 - DNA, 15 bp, Homo sapiens
ggttattctttcaaa

SEQ ID NO: 692677 - DNA, 15 bp, Homo sapiens
gttattctttcaaat

SEQ ID NO: 692678 - DNA, 15 bp, Homo sapiens
ttattctttcaaata

SEQ ID NO: 692679 - DNA, 15 bp, Homo sapiens
tattctttcaaataa

SEQ ID NO: 692680 - DNA, 15 bp, Homo sapiens
attctttcaaataat

SEQ ID NO: 692681 - DNA, 15 bp, Homo sapiens
ttctttcaaataatg

SEQ ID NO: 692682 - DNA, 15 bp, Homo sapiens
tctttcaaataatgg

SEQ ID NO: 692683 - DNA, 15 bp, Homo sapiens
ctttcaaataatggg

SEQ ID NO: 692684 - DNA, 15 bp, Homo sapiens
tttcaaataatggga

SEQ ID NO: 692685 - DNA, 15 bp, Homo sapiens
ttcaaataatgggaa

SEQ ID NO: 692686 - DNA, 15 bp, Homo sapiens
tcaaataatgggaac

SEQ ID NO: 692687 - DNA, 15 bp, Homo sapiens
caaataatgggaact

SEQ ID NO: 692688 - DNA, 15 bp, Homo sapiens
aaataatgggaacta

SEQ ID NO: 692689 - DNA, 15 bp, Homo sapiens
aataatgggaactag

SEQ ID NO: 692690 - DNA, 15 bp, Homo sapiens
ataatgggaactagt

SEQ ID NO: 692691 - DNA, 15 bp, Homo sapiens
taatgggaactagtt

SEQ ID NO: 692692 - DNA, 15 bp, Homo sapiens
aatgggaactagtta

SEQ ID NO: 692693 - DNA, 15 bp, Homo sapiens
atgggaactagttat

SEQ ID NO: 692694 - DNA, 15 bp, Homo sapiens
tgggaactagttatt

SEQ ID NO: 692695 - DNA, 15 bp, Homo sapiens
gggaactagttattt

SEQ ID NO: 692696 - DNA, 15 bp, Homo sapiens
ggaactagttatttg

SEQ ID NO: 692697 - DNA, 15 bp, Homo sapiens
gaactagttatttgg

SEQ ID NO: 692698 - DNA, 15 bp, Homo sapiens
aactagttatttggc

SEQ ID NO: 692699 - DNA, 15 bp, Homo sapiens
actagttatttggct

SEQ ID NO: 692700 - DNA, 15 bp, Homo sapiens
ctagttatttggcta

SEQ ID NO: 692701 - DNA, 15 bp, Homo sapiens
tagttatttggctaa

SEQ ID NO: 692702 - DNA, 15 bp, Homo sapiens
agttatttggctaaa

SEQ ID NO: 692703 - DNA, 15 bp, Homo sapiens
gttatttggctaaaa

SEQ ID NO: 692704 - DNA, 15 bp, Homo sapiens
ttatttggctaaaac

SEQ ID NO: 692705 - DNA, 15 bp, Homo sapiens
tatttggctaaaact

SEQ ID NO: 692706 - DNA, 15 bp, Homo sapiens
atttggctaaaactt

SEQ ID NO: 692707 - DNA, 15 bp, Homo sapiens
tttggctaaaacttc

SEQ ID NO: 692708 - DNA, 15 bp, Homo sapiens
ttggctaaaacttct

SEQ ID NO: 692709 - DNA, 15 bp, Homo sapiens
tggctaaaacttctt

SEQ ID NO: 692710 - DNA, 15 bp, Homo sapiens
ggctaaaacttcttg

SEQ ID NO: 692711 - DNA, 15 bp, Homo sapiens
gctaaaacttcttgc

SEQ ID NO: 692712 - DNA, 15 bp, Homo sapiens
ctaaaacttcttgct

SEQ ID NO: 692713 - DNA, 15 bp, Homo sapiens
taaaacttcttgctc

SEQ ID NO: 692714 - DNA, 15 bp, Homo sapiens
aaaacttcttgctca

SEQ ID NO: 692715 - DNA, 15 bp, Homo sapiens
aaacttcttgctcat

SEQ ID NO: 692716 - DNA, 15 bp, Homo sapiens
aacttcttgctcata

SEQ ID NO: 692717 - DNA, 15 bp, Homo sapiens
acttcttgctcataa

SEQ ID NO: 692718 - DNA, 15 bp, Homo sapiens
cttcttgctcataag

SEQ ID NO: 692719 - DNA, 15 bp, Homo sapiens
ttcttgctcataagg

SEQ ID NO: 692720 - DNA, 15 bp, Homo sapiens
tcttgctcataaggt

SEQ ID NO: 692721 - DNA, 15 bp, Homo sapiens
cttgctcataaggtc

SEQ ID NO: 692722 - DNA, 15 bp, Homo sapiens
ttgctcataaggtca

SEQ ID NO: 692723 - DNA, 15 bp, Homo sapiens
tgctcataaggtcag

SEQ ID NO: 692724 - DNA, 15 bp, Homo sapiens
gctcataaggtcagt

SEQ ID NO: 692725 - DNA, 15 bp, Homo sapiens
ctcataaggtcagtt

SEQ ID NO: 692726 - DNA, 15 bp, Homo sapiens
tcataaggtcagttt

SEQ ID NO: 692727 - DNA, 15 bp, Homo sapiens
cataaggtcagtttg

SEQ ID NO: 692728 - DNA, 15 bp, Homo sapiens
ataaggtcagtttga

SEQ ID NO: 692729 - DNA, 15 bp, Homo sapiens
taaggtcagtttgat

SEQ ID NO: 692730 - DNA, 15 bp, Homo sapiens
aaggtcagtttgatc

SEQ ID NO: 692731 - DNA, 15 bp, Homo sapiens
aggtcagtttgatct

SEQ ID NO: 692732 - DNA, 15 bp, Homo sapiens
ggtcagtttgatctg

SEQ ID NO: 692733 - DNA, 15 bp, Homo sapiens
gtcagtttgatctga

SEQ ID NO: 692734 - DNA, 15 bp, Homo sapiens
tcagtttgatctgat

SEQ ID NO: 692735 - DNA, 15 bp, Homo sapiens
cagtttgatctgatt

SEQ ID NO: 692736 - DNA, 15 bp, Homo sapiens
agtttgatctgattt

SEQ ID NO: 692737 - DNA, 15 bp, Homo sapiens
gtttgatctgatttt

SEQ ID NO: 692738 - DNA, 15 bp, Homo sapiens
tttgatctgattttt

SEQ ID NO: 692739 - DNA, 15 bp, Homo sapiens
ttgatctgatttttg

SEQ ID NO: 692740 - DNA, 15 bp, Homo sapiens
tgatctgatttttgc

SEQ ID NO: 692741 - DNA, 15 bp, Homo sapiens
gatctgatttttgcc

SEQ ID NO: 692742 - DNA, 15 bp, Homo sapiens
atctgatttttgcct

SEQ ID NO: 692743 - DNA, 15 bp, Homo sapiens
tctgatttttgcctg

SEQ ID NO: 692744 - DNA, 15 bp, Homo sapiens
ctgatttttgcctgt

SEQ ID NO: 692745 - DNA, 15 bp, Homo sapiens
tgatttttgcctgtg

SEQ ID NO: 692746 - DNA, 15 bp, Homo sapiens
gatttttgcctgtgt

SEQ ID NO: 692747 - DNA, 15 bp, Homo sapiens
atttttgcctgtgtc

SEQ ID NO: 692748 - DNA, 15 bp, Homo sapiens
tttttgcctgtgtca

SEQ ID NO: 692749 - DNA, 15 bp, Homo sapiens
ttttgcctgtgtcag

SEQ ID NO: 692750 - DNA, 15 bp, Homo sapiens
tttgcctgtgtcagt

SEQ ID NO: 692751 - DNA, 15 bp, Homo sapiens
ttgcctgtgtcagtt

SEQ ID NO: 692752 - DNA, 15 bp, Homo sapiens
tgcctgtgtcagttt

SEQ ID NO: 692753 - DNA, 15 bp, Homo sapiens
gcctgtgtcagtttt

SEQ ID NO: 692754 - DNA, 15 bp, Homo sapiens
cctgtgtcagtttta

SEQ ID NO: 692755 - DNA, 15 bp, Homo sapiens
ctgtgtcagttttac

SEQ ID NO: 692756 - DNA, 15 bp, Homo sapiens
tgtgtcagttttact

SEQ ID NO: 692757 - DNA, 15 bp, Homo sapiens
gtgtcagttttacta

SEQ ID NO: 692758 - DNA, 15 bp, Homo sapiens
tgtcagttttactaa

SEQ ID NO: 692759 - DNA, 15 bp, Homo sapiens
gtcagttttactaaa

SEQ ID NO: 692760 - DNA, 15 bp, Homo sapiens
tcagttttactaaat

SEQ ID NO: 692761 - DNA, 15 bp, Homo sapiens
cagttttactaaatt

SEQ ID NO: 692762 - DNA, 15 bp, Homo sapiens
agttttactaaattt

SEQ ID NO: 692763 - DNA, 15 bp, Homo sapiens
gttttactaaattta

SEQ ID NO: 692764 - DNA, 15 bp, Homo sapiens
ttttactaaatttat

SEQ ID NO: 692765 - DNA, 15 bp, Homo sapiens
tttactaaatttatg

SEQ ID NO: 692766 - DNA, 15 bp, Homo sapiens
ttactaaatttatgg

SEQ ID NO: 692767 - DNA, 15 bp, Homo sapiens
tactaaatttatgga

SEQ ID NO: 692768 - DNA, 15 bp, Homo sapiens
actaaatttatggac

SEQ ID NO: 692769 - DNA, 15 bp, Homo sapiens
ctaaatttatggaca

SEQ ID NO: 692770 - DNA, 15 bp, Homo sapiens
taaatttatggacaa

SEQ ID NO: 692771 - DNA, 15 bp, Homo sapiens
aaatttatggacaaa

SEQ ID NO: 692772 - DNA, 15 bp, Homo sapiens
aatttatggacaaag

SEQ ID NO: 692773 - DNA, 15 bp, Homo sapiens
atttatggacaaaga

SEQ ID NO: 692774 - DNA, 15 bp, Homo sapiens
tttatggacaaagac

SEQ ID NO: 692775 - DNA, 15 bp, Homo sapiens
ttatggacaaagact

SEQ ID NO: 692776 - DNA, 15 bp, Homo sapiens
tatggacaaagactg

SEQ ID NO: 692777 - DNA, 15 bp, Homo sapiens
atggacaaagactgt

SEQ ID NO: 692778 - DNA, 15 bp, Homo sapiens
tggacaaagactgtc

SEQ ID NO: 692779 - DNA, 15 bp, Homo sapiens
ggacaaagactgtcc

SEQ ID NO: 692780 - DNA, 15 bp, Homo sapiens
gacaaagactgtcct

SEQ ID NO: 692781 - DNA, 15 bp, Homo sapiens
acaaagactgtcctc

SEQ ID NO: 692782 - DNA, 15 bp, Homo sapiens
caaagactgtcctct

SEQ ID NO: 692783 - DNA, 15 bp, Homo sapiens
aaagactgtcctctt

SEQ ID NO: 692784 - DNA, 15 bp, Homo sapiens
aagactgtcctctta

SEQ ID NO: 692785 - DNA, 15 bp, Homo sapiens
agactgtcctcttaa

SEQ ID NO: 692786 - DNA, 15 bp, Homo sapiens
gactgtcctcttaat

SEQ ID NO: 692787 - DNA, 15 bp, Homo sapiens
actgtcctcttaatc

SEQ ID NO: 692788 - DNA, 15 bp, Homo sapiens
ctgtcctcttaatcc

SEQ ID NO: 692789 - DNA, 15 bp, Homo sapiens
tgtcctcttaatcct

SEQ ID NO: 692790 - DNA, 15 bp, Homo sapiens
gtcctcttaatcctg

SEQ ID NO: 692791 - DNA, 15 bp, Homo sapiens
tcctcttaatcctgg

SEQ ID NO: 692792 - DNA, 15 bp, Homo sapiens
cctcttaatcctgga

SEQ ID NO: 692793 - DNA, 15 bp, Homo sapiens
ctcttaatcctggac

SEQ ID NO: 692794 - DNA, 15 bp, Homo sapiens
tcttaatcctggaca

SEQ ID NO: 692795 - DNA, 15 bp, Homo sapiens
cttaatcctggacag

SEQ ID NO: 692796 - DNA, 15 bp, Homo sapiens
ttaatcctggacagc

SEQ ID NO: 692797 - DNA, 15 bp, Homo sapiens
taatcctggacagct

SEQ ID NO: 692798 - DNA, 15 bp, Homo sapiens
aatcctggacagcta

SEQ ID NO: 692799 - DNA, 15 bp, Homo sapiens
atcctggacagctat

SEQ ID NO: 692800 - DNA, 15 bp, Homo sapiens
tcctggacagctatc

SEQ ID NO: 692801 - DNA, 15 bp, Homo sapiens
cctggacagctatct

SEQ ID NO: 692802 - DNA, 15 bp, Homo sapiens
ctggacagctatctt

SEQ ID NO: 692803 - DNA, 15 bp, Homo sapiens
tggacagctatcttg

SEQ ID NO: 692804 - DNA, 15 bp, Homo sapiens
ggacagctatcttga

SEQ ID NO: 692805 - DNA, 15 bp, Homo sapiens
gacagctatcttgaa

SEQ ID NO: 692806 - DNA, 15 bp, Homo sapiens
acagctatcttgaaa

SEQ ID NO: 692807 - DNA, 15 bp, Homo sapiens
cagctatcttgaaaa

SEQ ID NO: 692808 - DNA, 15 bp, Homo sapiens
agctatcttgaaaat

SEQ ID NO: 692809 - DNA, 15 bp, Homo sapiens
gctatcttgaaaata

SEQ ID NO: 692810 - DNA, 15 bp, Homo sapiens
ctatcttgaaaatac

SEQ ID NO: 692811 - DNA, 15 bp, Homo sapiens
tatcttgaaaataca

SEQ ID NO: 692812 - DNA, 15 bp, Homo sapiens
atcttgaaaatacat

SEQ ID NO: 692813 - DNA, 15 bp, Homo sapiens
tcttgaaaatacatg

SEQ ID NO: 692814 - DNA, 15 bp, Homo sapiens
cttgaaaatacatgt

SEQ ID NO: 692815 - DNA, 15 bp, Homo sapiens
ttgaaaatacatgtc

SEQ ID NO: 692816 - DNA, 15 bp, Homo sapiens
tgaaaatacatgtcc

SEQ ID NO: 692817 - DNA, 15 bp, Homo sapiens
gaaaatacatgtcct

SEQ ID NO: 692818 - DNA, 15 bp, Homo sapiens
aaaatacatgtccta

SEQ ID NO: 692819 - DNA, 15 bp, Homo sapiens
aaatacatgtcctag

SEQ ID NO: 692820 - DNA, 15 bp, Homo sapiens
aatacatgtcctagg

SEQ ID NO: 692821 - DNA, 15 bp, Homo sapiens
atacatgtcctaggt

SEQ ID NO: 692822 - DNA, 15 bp, Homo sapiens
tacatgtcctaggtc

SEQ ID NO: 692823 - DNA, 15 bp, Homo sapiens
acatgtcctaggtca

SEQ ID NO: 692824 - DNA, 15 bp, Homo sapiens
catgtcctaggtcat

SEQ ID NO: 692825 - DNA, 15 bp, Homo sapiens
atgtcctaggtcatg

SEQ ID NO: 692826 - DNA, 15 bp, Homo sapiens
tgtcctaggtcatga

SEQ ID NO: 692827 - DNA, 15 bp, Homo sapiens
gtcctaggtcatgag

SEQ ID NO: 692828 - DNA, 15 bp, Homo sapiens
tcctaggtcatgaga

SEQ ID NO: 692829 - DNA, 15 bp, Homo sapiens
cctaggtcatgagaa

SEQ ID NO: 692830 - DNA, 15 bp, Homo sapiens
ctaggtcatgagaaa

SEQ ID NO: 692831 - DNA, 15 bp, Homo sapiens
taggtcatgagaaat

SEQ ID NO: 692832 - DNA, 15 bp, Homo sapiens
aggtcatgagaaatg

SEQ ID NO: 692833 - DNA, 15 bp, Homo sapiens
ggtcatgagaaatgt

SEQ ID NO: 692834 - DNA, 15 bp, Homo sapiens
gtcatgagaaatgtt

SEQ ID NO: 692835 - DNA, 15 bp, Homo sapiens
tcatgagaaatgtta

SEQ ID NO: 692836 - DNA, 15 bp, Homo sapiens
catgagaaatgttat

SEQ ID NO: 692837 - DNA, 15 bp, Homo sapiens
atgagaaatgttata

SEQ ID NO: 692838 - DNA, 15 bp, Homo sapiens
tgagaaatgttatat

SEQ ID NO: 692839 - DNA, 15 bp, Homo sapiens
gagaaatgttatata

SEQ ID NO: 692840 - DNA, 15 bp, Homo sapiens
agaaatgttatataa

SEQ ID NO: 692841 - DNA, 15 bp, Homo sapiens
gaaatgttatataag

SEQ ID NO: 692842 - DNA, 15 bp, Homo sapiens
aaatgttatataagg

SEQ ID NO: 692843 - DNA, 15 bp, Homo sapiens
aatgttatataaggt

SEQ ID NO: 692844 - DNA, 15 bp, Homo sapiens
atgttatataaggta

SEQ ID NO: 692845 - DNA, 15 bp, Homo sapiens
tgttatataaggtac

SEQ ID NO: 692846 - DNA, 15 bp, Homo sapiens
gttatataaggtaca

SEQ ID NO: 692847 - DNA, 15 bp, Homo sapiens
ttatataaggtacat

SEQ ID NO: 692848 - DNA, 15 bp, Homo sapiens
tatataaggtacata

SEQ ID NO: 692849 - DNA, 15 bp, Homo sapiens
atataaggtacataa

SEQ ID NO: 692850 - DNA, 15 bp, Homo sapiens
tataaggtacataaa

SEQ ID NO: 692851 - DNA, 15 bp, Homo sapiens
ataaggtacataaag

SEQ ID NO: 692852 - DNA, 15 bp, Homo sapiens
taaggtacataaagt

SEQ ID NO: 692853 - DNA, 15 bp, Homo sapiens
aaggtacataaagtg

SEQ ID NO: 692854 - DNA, 15 bp, Homo sapiens
aggtacataaagtgc

SEQ ID NO: 692855 - DNA, 15 bp, Homo sapiens
ggtacataaagtgct

SEQ ID NO: 692856 - DNA, 15 bp, Homo sapiens
gtacataaagtgctt

SEQ ID NO: 692857 - DNA, 15 bp, Homo sapiens
tacataaagtgctta

SEQ ID NO: 692858 - DNA, 15 bp, Homo sapiens
acataaagtgcttaa

SEQ ID NO: 692859 - DNA, 15 bp, Homo sapiens
cataaagtgcttaaa

SEQ ID NO: 692860 - DNA, 15 bp, Homo sapiens
ataaagtgcttaaaa

SEQ ID NO: 692861 - DNA, 15 bp, Homo sapiens
taaagtgcttaaaat

SEQ ID NO: 692862 - DNA, 15 bp, Homo sapiens
aaagtgcttaaaata

SEQ ID NO: 692863 - DNA, 15 bp, Homo sapiens
aagtgcttaaaatag

SEQ ID NO: 692864 - DNA, 15 bp, Homo sapiens
agtgcttaaaatagt

SEQ ID NO: 692865 - DNA, 15 bp, Homo sapiens
gtgcttaaaatagta

SEQ ID NO: 692866 - DNA, 15 bp, Homo sapiens
tgcttaaaatagtac

SEQ ID NO: 692867 - DNA, 15 bp, Homo sapiens
gcttaaaatagtact

SEQ ID NO: 692868 - DNA, 15 bp, Homo sapiens
cttaaaatagtactg

SEQ ID NO: 692869 - DNA, 15 bp, Homo sapiens
ttaaaatagtactgg

SEQ ID NO: 692870 - DNA, 15 bp, Homo sapiens
taaaatagtactggg

SEQ ID NO: 692871 - DNA, 15 bp, Homo sapiens
aaaatagtactgggc

SEQ ID NO: 692872 - DNA, 15 bp, Homo sapiens
aaatagtactgggca

SEQ ID NO: 692873 - DNA, 15 bp, Homo sapiens
aatagtactgggcac

SEQ ID NO: 692874 - DNA, 15 bp, Homo sapiens
atagtactgggcaca

SEQ ID NO: 692875 - DNA, 15 bp, Homo sapiens
tagtactgggcacat

SEQ ID NO: 692876 - DNA, 15 bp, Homo sapiens
agtactgggcacata

SEQ ID NO: 692877 - DNA, 15 bp, Homo sapiens
gtactgggcacataa

SEQ ID NO: 692878 - DNA, 15 bp, Homo sapiens
tactgggcacataac

SEQ ID NO: 692879 - DNA, 15 bp, Homo sapiens
actgggcacataacc

SEQ ID NO: 692880 - DNA, 15 bp, Homo sapiens
ctgggcacataacct

SEQ ID NO: 692881 - DNA, 15 bp, Homo sapiens
tgggcacataaccta

SEQ ID NO: 692882 - DNA, 15 bp, Homo sapiens
gggcacataacctat

SEQ ID NO: 692883 - DNA, 15 bp, Homo sapiens
ggcacataacctatc

SEQ ID NO: 692884 - DNA, 15 bp, Homo sapiens
gcacataacctatct

SEQ ID NO: 692885 - DNA, 15 bp, Homo sapiens
cacataacctatctt

SEQ ID NO: 692886 - DNA, 15 bp, Homo sapiens
acataacctatcttt

SEQ ID NO: 692887 - DNA, 15 bp, Homo sapiens
cataacctatcttta

SEQ ID NO: 692888 - DNA, 15 bp, Homo sapiens
ataacctatctttag

SEQ ID NO: 692889 - DNA, 15 bp, Homo sapiens
taacctatctttagt

SEQ ID NO: 692890 - DNA, 15 bp, Homo sapiens
aacctatctttagta

SEQ ID NO: 692891 - DNA, 15 bp, Homo sapiens
acctatctttagtat

SEQ ID NO: 692892 - DNA, 15 bp, Homo sapiens
cctatctttagtatg

SEQ ID NO: 692893 - DNA, 15 bp, Homo sapiens
ctatctttagtatga

SEQ ID NO: 692894 - DNA, 15 bp, Homo sapiens
tatctttagtatgaa

SEQ ID NO: 692895 - DNA, 15 bp, Homo sapiens
atctttagtatgaat

SEQ ID NO: 692896 - DNA, 15 bp, Homo sapiens
tctttagtatgaatg

SEQ ID NO: 692897 - DNA, 15 bp, Homo sapiens
ctttagtatgaatga

SEQ ID NO: 692898 - DNA, 15 bp, Homo sapiens
tttagtatgaatgat

SEQ ID NO: 692899 - DNA, 15 bp, Homo sapiens
ttagtatgaatgata

SEQ ID NO: 692900 - DNA, 15 bp, Homo sapiens
tagtatgaatgatat

SEQ ID NO: 692901 - DNA, 15 bp, Homo sapiens
agtatgaatgatata

SEQ ID NO: 692902 - DNA, 15 bp, Homo sapiens
gtatgaatgatataa

SEQ ID NO: 692903 - DNA, 15 bp, Homo sapiens
tatgaatgatataaa

SEQ ID NO: 692904 - DNA, 15 bp, Homo sapiens
atgaatgatataaac

SEQ ID NO: 692905 - DNA, 15 bp, Homo sapiens
tgaatgatataaact

SEQ ID NO: 692906 - DNA, 15 bp, Homo sapiens
gaatgatataaactg

SEQ ID NO: 692907 - DNA, 15 bp, Homo sapiens
aatgatataaactga

SEQ ID NO: 692908 - DNA, 15 bp, Homo sapiens
atgatataaactgaa

SEQ ID NO: 692909 - DNA, 15 bp, Homo sapiens
tgatataaactgaaa

SEQ ID NO: 692910 - DNA, 15 bp, Homo sapiens
gatataaactgaaat

SEQ ID NO: 692911 - DNA, 15 bp, Homo sapiens
atataaactgaaatg

SEQ ID NO: 692912 - DNA, 15 bp, Homo sapiens
tataaactgaaatgg

SEQ ID NO: 692913 - DNA, 15 bp, Homo sapiens
ataaactgaaatgga

SEQ ID NO: 692914 - DNA, 15 bp, Homo sapiens
taaactgaaatggag

SEQ ID NO: 692915 - DNA, 15 bp, Homo sapiens
aaactgaaatggagt

SEQ ID NO: 692916 - DNA, 15 bp, Homo sapiens
aactgaaatggagtt

SEQ ID NO: 692917 - DNA, 15 bp, Homo sapiens
actgaaatggagtta

SEQ ID NO: 692918 - DNA, 15 bp, Homo sapiens
ctgaaatggagttaa

SEQ ID NO: 692919 - DNA, 15 bp, Homo sapiens
tgaaatggagttaag

SEQ ID NO: 692920 - DNA, 15 bp, Homo sapiens
gaaatggagttaagg

SEQ ID NO: 692921 - DNA, 15 bp, Homo sapiens
aaatggagttaagga

SEQ ID NO: 692922 - DNA, 15 bp, Homo sapiens
aatggagttaaggaa

SEQ ID NO: 692923 - DNA, 15 bp, Homo sapiens
atggagttaaggaaa

SEQ ID NO: 692924 - DNA, 15 bp, Homo sapiens
tggagttaaggaaat

SEQ ID NO: 692925 - DNA, 15 bp, Homo sapiens
ggagttaaggaaatc

SEQ ID NO: 692926 - DNA, 15 bp, Homo sapiens
gagttaaggaaatcc

SEQ ID NO: 692927 - DNA, 15 bp, Homo sapiens
agttaaggaaatcca

SEQ ID NO: 692928 - DNA, 15 bp, Homo sapiens
gttaaggaaatccag

SEQ ID NO: 692929 - DNA, 15 bp, Homo sapiens
ttaaggaaatccagg

SEQ ID NO: 692930 - DNA, 15 bp, Homo sapiens
taaggaaatccaggt

SEQ ID NO: 692931 - DNA, 15 bp, Homo sapiens
aaggaaatccaggta

SEQ ID NO: 692932 - DNA, 15 bp, Homo sapiens
aggaaatccaggtac

SEQ ID NO: 692933 - DNA, 15 bp, Homo sapiens
ggaaatccaggtact

SEQ ID NO: 692934 - DNA, 15 bp, Homo sapiens
gaaatccaggtactg

SEQ ID NO: 692935 - DNA, 15 bp, Homo sapiens
aaatccaggtactgg

SEQ ID NO: 692936 - DNA, 15 bp, Homo sapiens
aatccaggtactgga

SEQ ID NO: 692937 - DNA, 15 bp, Homo sapiens
atccaggtactggac

SEQ ID NO: 692938 - DNA, 15 bp, Homo sapiens
tccaggtactggacc

SEQ ID NO: 692939 - DNA, 15 bp, Homo sapiens
ccaggtactggacct

SEQ ID NO: 692940 - DNA, 15 bp, Homo sapiens
caggtactggaccta

SEQ ID NO: 692941 - DNA, 15 bp, Homo sapiens
aggtactggacctac

SEQ ID NO: 692942 - DNA, 15 bp, Homo sapiens
ggtactggacctacc

SEQ ID NO: 692943 - DNA, 15 bp, Homo sapiens
gtactggacctaccc

SEQ ID NO: 692944 - DNA, 15 bp, Homo sapiens
tactggacctaccct

SEQ ID NO: 692945 - DNA, 15 bp, Homo sapiens
actggacctaccctc

SEQ ID NO: 692946 - DNA, 15 bp, Homo sapiens
ctggacctaccctct

SEQ ID NO: 692947 - DNA, 15 bp, Homo sapiens
tggacctaccctctt

SEQ ID NO: 692948 - DNA, 15 bp, Homo sapiens
ggacctaccctcttg

SEQ ID NO: 692949 - DNA, 15 bp, Homo sapiens
gacctaccctcttgt

SEQ ID NO: 692950 - DNA, 15 bp, Homo sapiens
acctaccctcttgtt

SEQ ID NO: 692951 - DNA, 15 bp, Homo sapiens
cctaccctcttgtta

SEQ ID NO: 692952 - DNA, 15 bp, Homo sapiens
ctaccctcttgttaa

SEQ ID NO: 692953 - DNA, 15 bp, Homo sapiens
taccctcttgttaat

SEQ ID NO: 692954 - DNA, 15 bp, Homo sapiens
accctcttgttaatt

SEQ ID NO: 692955 - DNA, 15 bp, Homo sapiens
ccctcttgttaattt

SEQ ID NO: 692956 - DNA, 15 bp, Homo sapiens
cctcttgttaattta

SEQ ID NO: 692957 - DNA, 15 bp, Homo sapiens
ctcttgttaatttac

SEQ ID NO: 692958 - DNA, 15 bp, Homo sapiens
tcttgttaatttact

SEQ ID NO: 692959 - DNA, 15 bp, Homo sapiens
cttgttaatttactt

SEQ ID NO: 692960 - DNA, 15 bp, Homo sapiens
ttgttaatttacttg

SEQ ID NO: 692961 - DNA, 15 bp, Homo sapiens
tgttaatttacttgg

SEQ ID NO: 692962 - DNA, 15 bp, Homo sapiens
gttaatttacttggg

SEQ ID NO: 692963 - DNA, 15 bp, Homo sapiens
ttaatttacttggga

SEQ ID NO: 692964 - DNA, 15 bp, Homo sapiens
taatttacttgggaa

SEQ ID NO: 692965 - DNA, 15 bp, Homo sapiens
aatttacttgggaat

SEQ ID NO: 692966 - DNA, 15 bp, Homo sapiens
atttacttgggaatg

SEQ ID NO: 692967 - DNA, 15 bp, Homo sapiens
tttacttgggaatgt

SEQ ID NO: 692968 - DNA, 15 bp, Homo sapiens
ttacttgggaatgtt

SEQ ID NO: 692969 - DNA, 15 bp, Homo sapiens
tacttgggaatgtta

SEQ ID NO: 692970 - DNA, 15 bp, Homo sapiens
acttgggaatgttaa

SEQ ID NO: 692971 - DNA, 15 bp, Homo sapiens
cttgggaatgttaat

SEQ ID NO: 692972 - DNA, 15 bp, Homo sapiens
ttgggaatgttaatc

SEQ ID NO: 692973 - DNA, 15 bp, Homo sapiens
tgggaatgttaatca

SEQ ID NO: 692974 - DNA, 15 bp, Homo sapiens
gggaatgttaatcac

SEQ ID NO: 692975 - DNA, 15 bp, Homo sapiens
ggaatgttaatcacc

SEQ ID NO: 692976 - DNA, 15 bp, Homo sapiens
gaatgttaatcacca

SEQ ID NO: 692977 - DNA, 15 bp, Homo sapiens
aatgttaatcaccac

SEQ ID NO: 692978 - DNA, 15 bp, Homo sapiens
atgttaatcaccact

SEQ ID NO: 692979 - DNA, 15 bp, Homo sapiens
tgttaatcaccactt

SEQ ID NO: 692980 - DNA, 15 bp, Homo sapiens
gttaatcaccactta

SEQ ID NO: 692981 - DNA, 15 bp, Homo sapiens
ttaatcaccacttaa

SEQ ID NO: 692982 - DNA, 15 bp, Homo sapiens
taatcaccacttaat

SEQ ID NO: 692983 - DNA, 15 bp, Homo sapiens
aatcaccacttaata

SEQ ID NO: 692984 - DNA, 15 bp, Homo sapiens
atcaccacttaatac

SEQ ID NO: 692985 - DNA, 15 bp, Homo sapiens
tcaccacttaatact

SEQ ID NO: 692986 - DNA, 15 bp, Homo sapiens
caccacttaatactt

SEQ ID NO: 692987 - DNA, 15 bp, Homo sapiens
accacttaatactta

SEQ ID NO: 692988 - DNA, 15 bp, Homo sapiens
ccacttaatacttaa

SEQ ID NO: 692989 - DNA, 15 bp, Homo sapiens
cacttaatacttaag

SEQ ID NO: 692990 - DNA, 15 bp, Homo sapiens
acttaatacttaagt

SEQ ID NO: 692991 - DNA, 15 bp, Homo sapiens
cttaatacttaagtt

SEQ ID NO: 692992 - DNA, 15 bp, Homo sapiens
ttaatacttaagttg

SEQ ID NO: 692993 - DNA, 15 bp, Homo sapiens
taatacttaagttgt

SEQ ID NO: 692994 - DNA, 15 bp, Homo sapiens
aatacttaagttgtg

SEQ ID NO: 692995 - DNA, 15 bp, Homo sapiens
atacttaagttgtga

SEQ ID NO: 692996 - DNA, 15 bp, Homo sapiens
tacttaagttgtgag

SEQ ID NO: 692997 - DNA, 15 bp, Homo sapiens
acttaagttgtgagt

SEQ ID NO: 692998 - DNA, 15 bp, Homo sapiens
cttaagttgtgagtt

SEQ ID NO: 692999 - DNA, 15 bp, Homo sapiens
ttaagttgtgagttt

SEQ ID NO: 693000 - DNA, 15 bp, Homo sapiens
taagttgtgagtttt

SEQ ID NO: 693001 - DNA, 15 bp, Homo sapiens
aagttgtgagtttta

SEQ ID NO: 693002 - DNA, 15 bp, Homo sapiens
agttgtgagttttag

SEQ ID NO: 693003 - DNA, 15 bp, Homo sapiens
gttgtgagttttaga

SEQ ID NO: 693004 - DNA, 15 bp, Homo sapiens
ttgtgagttttagac

SEQ ID NO: 693005 - DNA, 15 bp, Homo sapiens
tgtgagttttagaca

SEQ ID NO: 693006 - DNA, 15 bp, Homo sapiens
gtgagttttagacaa

SEQ ID NO: 693007 - DNA, 15 bp, Homo sapiens
tgagttttagacaag

SEQ ID NO: 693008 - DNA, 15 bp, Homo sapiens
gagttttagacaagc

SEQ ID NO: 693009 - DNA, 15 bp, Homo sapiens
agttttagacaagct

SEQ ID NO: 693010 - DNA, 15 bp, Homo sapiens
gttttagacaagcta

SEQ ID NO: 693011 - DNA, 15 bp, Homo sapiens
ttttagacaagctag

SEQ ID NO: 693012 - DNA, 15 bp, Homo sapiens
tttagacaagctagc

SEQ ID NO: 693013 - DNA, 15 bp, Homo sapiens
ttagacaagctagct

SEQ ID NO: 693014 - DNA, 15 bp, Homo sapiens
tagacaagctagctt

SEQ ID NO: 693015 - DNA, 15 bp, Homo sapiens
agacaagctagcttt

SEQ ID NO: 693016 - DNA, 15 bp, Homo sapiens
gacaagctagctttt

SEQ ID NO: 693017 - DNA, 15 bp, Homo sapiens
acaagctagcttttg

SEQ ID NO: 693018 - DNA, 15 bp, Homo sapiens
caagctagcttttgt

SEQ ID NO: 693019 - DNA, 15 bp, Homo sapiens
aagctagcttttgtg

SEQ ID NO: 693020 - DNA, 15 bp, Homo sapiens
agctagcttttgtgt

SEQ ID NO: 693021 - DNA, 15 bp, Homo sapiens
gctagcttttgtgtt

SEQ ID NO: 693022 - DNA, 15 bp, Homo sapiens
ctagcttttgtgttg

SEQ ID NO: 693023 - DNA, 15 bp, Homo sapiens
tagcttttgtgttgt

SEQ ID NO: 693024 - DNA, 15 bp, Homo sapiens
agcttttgtgttgtc

SEQ ID NO: 693025 - DNA, 15 bp, Homo sapiens
gcttttgtgttgtct

SEQ ID NO: 693026 - DNA, 15 bp, Homo sapiens
cttttgtgttgtctt

SEQ ID NO: 693027 - DNA, 15 bp, Homo sapiens
ttttgtgttgtcttg

SEQ ID NO: 693028 - DNA, 15 bp, Homo sapiens
tttgtgttgtcttgg

SEQ ID NO: 693029 - DNA, 15 bp, Homo sapiens
ttgtgttgtcttggc

SEQ ID NO: 693030 - DNA, 15 bp, Homo sapiens
tgtgttgtcttggcg

SEQ ID NO: 693031 - DNA, 15 bp, Homo sapiens
gtgttgtcttggcgg

SEQ ID NO: 693032 - DNA, 15 bp, Homo sapiens
tgttgtcttggcggc

SEQ ID NO: 693033 - DNA, 15 bp, Homo sapiens
gttgtcttggcggcc

SEQ ID NO: 693034 - DNA, 15 bp, Homo sapiens
ttgtcttggcggcca

SEQ ID NO: 693035 - DNA, 15 bp, Homo sapiens
tgtcttggcggccat

SEQ ID NO: 693036 - DNA, 15 bp, Homo sapiens
gtcttggcggccata

SEQ ID NO: 693037 - DNA, 15 bp, Homo sapiens
tcttggcggccatat

SEQ ID NO: 693038 - DNA, 15 bp, Homo sapiens
cttggcggccatatt

SEQ ID NO: 693039 - DNA, 15 bp, Homo sapiens
ttggcggccatattt

SEQ ID NO: 693040 - DNA, 15 bp, Homo sapiens
tggcggccatatttg

SEQ ID NO: 693041 - DNA, 15 bp, Homo sapiens
ggcggccatatttgt

SEQ ID NO: 693042 - DNA, 15 bp, Homo sapiens
gcggccatatttgta

SEQ ID NO: 693043 - DNA, 15 bp, Homo sapiens
cggccatatttgtaa

SEQ ID NO: 693044 - DNA, 15 bp, Homo sapiens
ggccatatttgtaag

SEQ ID NO: 693045 - DNA, 15 bp, Homo sapiens
gccatatttgtaaga

SEQ ID NO: 693046 - DNA, 15 bp, Homo sapiens
ccatatttgtaagaa

SEQ ID NO: 693047 - DNA, 15 bp, Homo sapiens
catatttgtaagaag

SEQ ID NO: 693048 - DNA, 15 bp, Homo sapiens
atatttgtaagaagg

SEQ ID NO: 693049 - DNA, 15 bp, Homo sapiens
tatttgtaagaaggg

SEQ ID NO: 693050 - DNA, 15 bp, Homo sapiens
atttgtaagaagggt

SEQ ID NO: 693051 - DNA, 15 bp, Homo sapiens
tttgtaagaagggtg

SEQ ID NO: 693052 - DNA, 15 bp, Homo sapiens
ttgtaagaagggtga

SEQ ID NO: 693053 - DNA, 15 bp, Homo sapiens
tgtaagaagggtgag

SEQ ID NO: 693054 - DNA, 15 bp, Homo sapiens
gtaagaagggtgaga

SEQ ID NO: 693055 - DNA, 15 bp, Homo sapiens
taagaagggtgagaa

SEQ ID NO: 693056 - DNA, 15 bp, Homo sapiens
aagaagggtgagaag

SEQ ID NO: 693057 - DNA, 15 bp, Homo sapiens
agaagggtgagaagt

SEQ ID NO: 693058 - DNA, 15 bp, Homo sapiens
gaagggtgagaagta

SEQ ID NO: 693059 - DNA, 15 bp, Homo sapiens
aagggtgagaagtat

SEQ ID NO: 693060 - DNA, 15 bp, Homo sapiens
agggtgagaagtatg

SEQ ID NO: 693061 - DNA, 15 bp, Homo sapiens
gggtgagaagtatgt

SEQ ID NO: 693062 - DNA, 15 bp, Homo sapiens
ggtgagaagtatgtt

SEQ ID NO: 693063 - DNA, 15 bp, Homo sapiens
gtgagaagtatgttt

SEQ ID NO: 693064 - DNA, 15 bp, Homo sapiens
tgagaagtatgtttt

SEQ ID NO: 693065 - DNA, 15 bp, Homo sapiens
gagaagtatgtttta

SEQ ID NO: 693066 - DNA, 15 bp, Homo sapiens
agaagtatgttttaa

SEQ ID NO: 693067 - DNA, 15 bp, Homo sapiens
gaagtatgttttaag

SEQ ID NO: 693068 - DNA, 15 bp, Homo sapiens
aagtatgttttaaga

SEQ ID NO: 693069 - DNA, 15 bp, Homo sapiens
agtatgttttaagaa

SEQ ID NO: 693070 - DNA, 15 bp, Homo sapiens
gtatgttttaagaaa

SEQ ID NO: 693071 - DNA, 15 bp, Homo sapiens
tatgttttaagaaaa

SEQ ID NO: 693072 - DNA, 15 bp, Homo sapiens
atgttttaagaaaag

SEQ ID NO: 693073 - DNA, 15 bp, Homo sapiens
tgttttaagaaaagg

SEQ ID NO: 693074 - DNA, 15 bp, Homo sapiens
gttttaagaaaaggc

SEQ ID NO: 693075 - DNA, 15 bp, Homo sapiens
ttttaagaaaaggct

SEQ ID NO: 693076 - DNA, 15 bp, Homo sapiens
tttaagaaaaggctt

SEQ ID NO: 693077 - DNA, 15 bp, Homo sapiens
ttaagaaaaggcttt

SEQ ID NO: 693078 - DNA, 15 bp, Homo sapiens
taagaaaaggctttt

SEQ ID NO: 693079 - DNA, 15 bp, Homo sapiens
aagaaaaggcttttt

SEQ ID NO: 693080 - DNA, 15 bp, Homo sapiens
agaaaaggcttttta

SEQ ID NO: 693081 - DNA, 15 bp, Homo sapiens
gaaaaggctttttaa

SEQ ID NO: 693082 - DNA, 15 bp, Homo sapiens
aaaaggctttttaaa

SEQ ID NO: 693083 - DNA, 15 bp, Homo sapiens
aaaggctttttaaaa

SEQ ID NO: 693084 - DNA, 15 bp, Homo sapiens
aaggctttttaaaaa

SEQ ID NO: 693085 - DNA, 15 bp, Homo sapiens
aggctttttaaaaaa

SEQ ID NO: 693086 - DNA, 15 bp, Homo sapiens
ggctttttaaaaaat

SEQ ID NO: 693087 - DNA, 15 bp, Homo sapiens
gctttttaaaaaatt

SEQ ID NO: 693088 - DNA, 15 bp, Homo sapiens
ctttttaaaaaattt

SEQ ID NO: 693089 - DNA, 15 bp, Homo sapiens
tttttaaaaaatttt

SEQ ID NO: 693090 - DNA, 15 bp, Homo sapiens
ttttaaaaaatttta

SEQ ID NO: 693091 - DNA, 15 bp, Homo sapiens
tttaaaaaattttag

SEQ ID NO: 693092 - DNA, 15 bp, Homo sapiens
ttaaaaaattttagt

SEQ ID NO: 693093 - DNA, 15 bp, Homo sapiens
taaaaaattttagta

SEQ ID NO: 693094 - DNA, 15 bp, Homo sapiens
aaaaaattttagtaa

SEQ ID NO: 693095 - DNA, 15 bp, Homo sapiens
aaaaattttagtaat

SEQ ID NO: 693096 - DNA, 15 bp, Homo sapiens
aaaattttagtaatt

SEQ ID NO: 693097 - DNA, 15 bp, Homo sapiens
aaattttagtaattg

SEQ ID NO: 693098 - DNA, 15 bp, Homo sapiens
aattttagtaattgt

SEQ ID NO: 693099 - DNA, 15 bp, Homo sapiens
attttagtaattgtc

SEQ ID NO: 693100 - DNA, 15 bp, Homo sapiens
ttttagtaattgtca

SEQ ID NO: 693101 - DNA, 15 bp, Homo sapiens
tttagtaattgtcag

SEQ ID NO: 693102 - DNA, 15 bp, Homo sapiens
ttagtaattgtcagc

SEQ ID NO: 693103 - DNA, 15 bp, Homo sapiens
tagtaattgtcagct

SEQ ID NO: 693104 - DNA, 15 bp, Homo sapiens
agtaattgtcagctg

SEQ ID NO: 693105 - DNA, 15 bp, Homo sapiens
gtaattgtcagctgg

SEQ ID NO: 693106 - DNA, 15 bp, Homo sapiens
taattgtcagctggg

SEQ ID NO: 693107 - DNA, 15 bp, Homo sapiens
aattgtcagctgggt

SEQ ID NO: 693108 - DNA, 15 bp, Homo sapiens
attgtcagctgggta

SEQ ID NO: 693109 - DNA, 15 bp, Homo sapiens
ttgtcagctgggtat

SEQ ID NO: 693110 - DNA, 15 bp, Homo sapiens
tgtcagctgggtata

SEQ ID NO: 693111 - DNA, 15 bp, Homo sapiens
gtcagctgggtatag

SEQ ID NO: 693112 - DNA, 15 bp, Homo sapiens
tcagctgggtatagt

SEQ ID NO: 693113 - DNA, 15 bp, Homo sapiens
cagctgggtatagtg

SEQ ID NO: 693114 - DNA, 15 bp, Homo sapiens
agctgggtatagtgg

SEQ ID NO: 693115 - DNA, 15 bp, Homo sapiens
gctgggtatagtggt

SEQ ID NO: 693116 - DNA, 15 bp, Homo sapiens
ctgggtatagtggta

SEQ ID NO: 693117 - DNA, 15 bp, Homo sapiens
tgggtatagtggtac

SEQ ID NO: 693118 - DNA, 15 bp, Homo sapiens
gggtatagtggtaca

SEQ ID NO: 693119 - DNA, 15 bp, Homo sapiens
ggtatagtggtacat

SEQ ID NO: 693120 - DNA, 15 bp, Homo sapiens
gtatagtggtacatg

SEQ ID NO: 693121 - DNA, 15 bp, Homo sapiens
tatagtggtacatgc

SEQ ID NO: 693122 - DNA, 15 bp, Homo sapiens
atagtggtacatgcc

SEQ ID NO: 693123 - DNA, 15 bp, Homo sapiens
tagtggtacatgcct

SEQ ID NO: 693124 - DNA, 15 bp, Homo sapiens
agtggtacatgccta

SEQ ID NO: 693125 - DNA, 15 bp, Homo sapiens
gtggtacatgcctat

SEQ ID NO: 693126 - DNA, 15 bp, Homo sapiens
tggtacatgcctata

SEQ ID NO: 693127 - DNA, 15 bp, Homo sapiens
ggtacatgcctataa

SEQ ID NO: 693128 - DNA, 15 bp, Homo sapiens
gtacatgcctataat

SEQ ID NO: 693129 - DNA, 15 bp, Homo sapiens
tacatgcctataatc

SEQ ID NO: 693130 - DNA, 15 bp, Homo sapiens
acatgcctataatcc

SEQ ID NO: 693131 - DNA, 15 bp, Homo sapiens
catgcctataatccc

SEQ ID NO: 693132 - DNA, 15 bp, Homo sapiens
atgcctataatccca

SEQ ID NO: 693133 - DNA, 15 bp, Homo sapiens
cctataatcccagcc

SEQ ID NO: 693134 - DNA, 15 bp, Homo sapiens
ctataatcccagcct

SEQ ID NO: 693135 - DNA, 15 bp, Homo sapiens
tataatcccagcctc

SEQ ID NO: 693136 - DNA, 15 bp, Homo sapiens
ataatcccagcctct

SEQ ID NO: 693137 - DNA, 15 bp, Homo sapiens
taatcccagcctctt

SEQ ID NO: 693138 - DNA, 15 bp, Homo sapiens
aatcccagcctcttg

SEQ ID NO: 693139 - DNA, 15 bp, Homo sapiens
atcccagcctcttgg

SEQ ID NO: 693140 - DNA, 15 bp, Homo sapiens
tcccagcctcttggg

SEQ ID NO: 693141 - DNA, 15 bp, Homo sapiens
cccagcctcttggga

SEQ ID NO: 693142 - DNA, 15 bp, Homo sapiens
ccagcctcttgggag

SEQ ID NO: 693143 - DNA, 15 bp, Homo sapiens
cagcctcttgggagg

SEQ ID NO: 693144 - DNA, 15 bp, Homo sapiens
agcctcttgggaggc

SEQ ID NO: 693145 - DNA, 15 bp, Homo sapiens
gcctcttgggaggcc

SEQ ID NO: 693146 - DNA, 15 bp, Homo sapiens
cctcttgggaggcca

SEQ ID NO: 693147 - DNA, 15 bp, Homo sapiens
ctcttgggaggccaa

SEQ ID NO: 693148 - DNA, 15 bp, Homo sapiens
tcttgggaggccaaa

SEQ ID NO: 693149 - DNA, 15 bp, Homo sapiens
cttgggaggccaaag

SEQ ID NO: 693150 - DNA, 15 bp, Homo sapiens
ttgggaggccaaagc

SEQ ID NO: 693151 - DNA, 15 bp, Homo sapiens
tgggaggccaaagca

SEQ ID NO: 693152 - DNA, 15 bp, Homo sapiens
gggaggccaaagcag

SEQ ID NO: 693153 - DNA, 15 bp, Homo sapiens
ggaggccaaagcagg

SEQ ID NO: 693154 - DNA, 15 bp, Homo sapiens
gaggccaaagcagga

SEQ ID NO: 693155 - DNA, 15 bp, Homo sapiens
aggccaaagcaggag

SEQ ID NO: 693156 - DNA, 15 bp, Homo sapiens
ggccaaagcaggagg

SEQ ID NO: 693157 - DNA, 15 bp, Homo sapiens
gccaaagcaggagga

SEQ ID NO: 693158 - DNA, 15 bp, Homo sapiens
ccaaagcaggaggat

SEQ ID NO: 693159 - DNA, 15 bp, Homo sapiens
caaagcaggaggatc

SEQ ID NO: 693160 - DNA, 15 bp, Homo sapiens
aaagcaggaggatct

SEQ ID NO: 693161 - DNA, 15 bp, Homo sapiens
aagcaggaggatctc

SEQ ID NO: 693162 - DNA, 15 bp, Homo sapiens
agcaggaggatctct

SEQ ID NO: 693163 - DNA, 15 bp, Homo sapiens
gcaggaggatctctt

SEQ ID NO: 693164 - DNA, 15 bp, Homo sapiens
caggaggatctcttg

SEQ ID NO: 693165 - DNA, 15 bp, Homo sapiens
aggaggatctcttga

SEQ ID NO: 693166 - DNA, 15 bp, Homo sapiens
ggaggatctcttgag

SEQ ID NO: 693167 - DNA, 15 bp, Homo sapiens
gaggatctcttgagc

SEQ ID NO: 693168 - DNA, 15 bp, Homo sapiens
aggatctcttgagcc

SEQ ID NO: 693169 - DNA, 15 bp, Homo sapiens
ggatctcttgagccc

SEQ ID NO: 693170 - DNA, 15 bp, Homo sapiens
gatctcttgagccca

SEQ ID NO: 693171 - DNA, 15 bp, Homo sapiens
atctcttgagcccag

SEQ ID NO: 693172 - DNA, 15 bp, Homo sapiens
tctcttgagcccagg

SEQ ID NO: 693173 - DNA, 15 bp, Homo sapiens
ctcttgagcccagga

SEQ ID NO: 693174 - DNA, 15 bp, Homo sapiens
tcttgagcccaggag

SEQ ID NO: 693175 - DNA, 15 bp, Homo sapiens
ttgagcccaggagtg

SEQ ID NO: 693176 - DNA, 15 bp, Homo sapiens
tgagcccaggagtgt

SEQ ID NO: 693177 - DNA, 15 bp, Homo sapiens
gagcccaggagtgtg

SEQ ID NO: 693178 - DNA, 15 bp, Homo sapiens
agcccaggagtgtga

SEQ ID NO: 693179 - DNA, 15 bp, Homo sapiens
gcccaggagtgtgaa

SEQ ID NO: 693180 - DNA, 15 bp, Homo sapiens
cccaggagtgtgaag

SEQ ID NO: 693181 - DNA, 15 bp, Homo sapiens
ccaggagtgtgaagg

SEQ ID NO: 693182 - DNA, 15 bp, Homo sapiens
caggagtgtgaaggc

SEQ ID NO: 693183 - DNA, 15 bp, Homo sapiens
aggagtgtgaaggcc

SEQ ID NO: 693184 - DNA, 15 bp, Homo sapiens
ggagtgtgaaggcca

SEQ ID NO: 693185 - DNA, 15 bp, Homo sapiens
gagtgtgaaggccag

SEQ ID NO: 693186 - DNA, 15 bp, Homo sapiens
agtgtgaaggccagc

SEQ ID NO: 693187 - DNA, 15 bp, Homo sapiens
gtgtgaaggccagcc

SEQ ID NO: 693188 - DNA, 15 bp, Homo sapiens
tgtgaaggccagcct

SEQ ID NO: 693189 - DNA, 15 bp, Homo sapiens
gtgaaggccagcctg

SEQ ID NO: 693190 - DNA, 15 bp, Homo sapiens
tgaaggccagcctgg

SEQ ID NO: 693191 - DNA, 15 bp, Homo sapiens
gaaggccagcctggg

SEQ ID NO: 693192 - DNA, 15 bp, Homo sapiens
aaggccagcctgggc

SEQ ID NO: 693193 - DNA, 15 bp, Homo sapiens
gccagcctgggcaaa

SEQ ID NO: 693194 - DNA, 15 bp, Homo sapiens
cagcctgggcaaaac

SEQ ID NO: 693195 - DNA, 15 bp, Homo sapiens
agcctgggcaaaaca

SEQ ID NO: 693196 - DNA, 15 bp, Homo sapiens
gcctgggcaaaacag

SEQ ID NO: 693197 - DNA, 15 bp, Homo sapiens
cctgggcaaaacagt

SEQ ID NO: 693198 - DNA, 15 bp, Homo sapiens
ctgggcaaaacagtg

SEQ ID NO: 693199 - DNA, 15 bp, Homo sapiens
tgggcaaaacagtga

SEQ ID NO: 693200 - DNA, 15 bp, Homo sapiens
gggcaaaacagtgag

SEQ ID NO: 693201 - DNA, 15 bp, Homo sapiens
ggcaaaacagtgaga

SEQ ID NO: 693202 - DNA, 15 bp, Homo sapiens
gcaaaacagtgagac

SEQ ID NO: 693203 - DNA, 15 bp, Homo sapiens
caaaacagtgagact

SEQ ID NO: 693204 - DNA, 15 bp, Homo sapiens
aaaacagtgagactc

SEQ ID NO: 693205 - DNA, 15 bp, Homo sapiens
aaacagtgagactcc

SEQ ID NO: 693206 - DNA, 15 bp, Homo sapiens
aacagtgagactcca

SEQ ID NO: 693207 - DNA, 15 bp, Homo sapiens
acagtgagactccat

SEQ ID NO: 693208 - DNA, 15 bp, Homo sapiens
cagtgagactccatc

SEQ ID NO: 693209 - DNA, 15 bp, Homo sapiens
agtgagactccatct

SEQ ID NO: 693210 - DNA, 15 bp, Homo sapiens
gtgagactccatctc

SEQ ID NO: 693211 - DNA, 15 bp, Homo sapiens
tgagactccatctca

SEQ ID NO: 693212 - DNA, 15 bp, Homo sapiens
gagactccatctcaa

SEQ ID NO: 693213 - DNA, 15 bp, Homo sapiens
aaaaaaaaaaaattt

SEQ ID NO: 693214 - DNA, 15 bp, Homo sapiens
aaaaaaaaaaatttc

SEQ ID NO: 693215 - DNA, 15 bp, Homo sapiens
aaaaaaaaaatttca

SEQ ID NO: 693216 - DNA, 15 bp, Homo sapiens
aaaaaaaaatttcat

SEQ ID NO: 693217 - DNA, 15 bp, Homo sapiens
aaaaaaaatttcata

SEQ ID NO: 693218 - DNA, 15 bp, Homo sapiens
aaaaaaatttcataa

SEQ ID NO: 693219 - DNA, 15 bp, Homo sapiens
aaaaaatttcataat

SEQ ID NO: 693220 - DNA, 15 bp, Homo sapiens
aaaaatttcataatt

SEQ ID NO: 693221 - DNA, 15 bp, Homo sapiens
aaaatttcataattg

SEQ ID NO: 693222 - DNA, 15 bp, Homo sapiens
aaatttcataattgt

SEQ ID NO: 693223 - DNA, 15 bp, Homo sapiens
aatttcataattgtg

SEQ ID NO: 693224 - DNA, 15 bp, Homo sapiens
atttcataattgtga

SEQ ID NO: 693225 - DNA, 15 bp, Homo sapiens
tttcataattgtgat

SEQ ID NO: 693226 - DNA, 15 bp, Homo sapiens
ttcataattgtgatt

SEQ ID NO: 693227 - DNA, 15 bp, Homo sapiens
tcataattgtgattt

SEQ ID NO: 693228 - DNA, 15 bp, Homo sapiens
cataattgtgatttt

SEQ ID NO: 693229 - DNA, 15 bp, Homo sapiens
ataattgtgattttc

SEQ ID NO: 693230 - DNA, 15 bp, Homo sapiens
taattgtgattttct

SEQ ID NO: 693231 - DNA, 15 bp, Homo sapiens
aattgtgattttcta

SEQ ID NO: 693232 - DNA, 15 bp, Homo sapiens
attgtgattttctaa

SEQ ID NO: 693233 - DNA, 15 bp, Homo sapiens
ttgtgattttctaaa

SEQ ID NO: 693234 - DNA, 15 bp, Homo sapiens
tgtgattttctaaaa

SEQ ID NO: 693235 - DNA, 15 bp, Homo sapiens
gtgattttctaaaat

SEQ ID NO: 693236 - DNA, 15 bp, Homo sapiens
tgattttctaaaata

SEQ ID NO: 693237 - DNA, 15 bp, Homo sapiens
gattttctaaaatag

SEQ ID NO: 693238 - DNA, 15 bp, Homo sapiens
attttctaaaatagc

SEQ ID NO: 693239 - DNA, 15 bp, Homo sapiens
ttttctaaaatagca

SEQ ID NO: 693240 - DNA, 15 bp, Homo sapiens
tttctaaaatagcag

SEQ ID NO: 693241 - DNA, 15 bp, Homo sapiens
ttctaaaatagcagg

SEQ ID NO: 693242 - DNA, 15 bp, Homo sapiens
tctaaaatagcaggc

SEQ ID NO: 693243 - DNA, 15 bp, Homo sapiens
ctaaaatagcaggct

SEQ ID NO: 693244 - DNA, 15 bp, Homo sapiens
taaaatagcaggctc

SEQ ID NO: 693245 - DNA, 15 bp, Homo sapiens
aaaatagcaggctct

SEQ ID NO: 693246 - DNA, 15 bp, Homo sapiens
aaatagcaggctctt

SEQ ID NO: 693247 - DNA, 15 bp, Homo sapiens
aatagcaggctctta

SEQ ID NO: 693248 - DNA, 15 bp, Homo sapiens
atagcaggctcttat

SEQ ID NO: 693249 - DNA, 15 bp, Homo sapiens
tagcaggctcttatt

SEQ ID NO: 693250 - DNA, 15 bp, Homo sapiens
agcaggctcttattt

SEQ ID NO: 693251 - DNA, 15 bp, Homo sapiens
gcaggctcttatttt

SEQ ID NO: 693252 - DNA, 15 bp, Homo sapiens
caggctcttattttt

SEQ ID NO: 693253 - DNA, 15 bp, Homo sapiens
aggctcttatttttc

SEQ ID NO: 693254 - DNA, 15 bp, Homo sapiens
ggctcttatttttct

SEQ ID NO: 693255 - DNA, 15 bp, Homo sapiens
gctcttatttttctt

SEQ ID NO: 693256 - DNA, 15 bp, Homo sapiens
ctcttatttttcttt

SEQ ID NO: 693257 - DNA, 15 bp, Homo sapiens
tcttatttttctttt

SEQ ID NO: 693258 - DNA, 15 bp, Homo sapiens
cttatttttcttttt

SEQ ID NO: 693259 - DNA, 15 bp, Homo sapiens
ttatttttctttttg

SEQ ID NO: 693260 - DNA, 15 bp, Homo sapiens
tatttttctttttgt

SEQ ID NO: 693261 - DNA, 15 bp, Homo sapiens
atttttctttttgtt

SEQ ID NO: 693262 - DNA, 15 bp, Homo sapiens
tttttctttttgttt

SEQ ID NO: 693263 - DNA, 15 bp, Homo sapiens
ttttctttttgtttg

SEQ ID NO: 693264 - DNA, 15 bp, Homo sapiens
tttctttttgtttgt

SEQ ID NO: 693265 - DNA, 15 bp, Homo sapiens
ttctttttgtttgtt

SEQ ID NO: 693266 - DNA, 15 bp, Homo sapiens
tctttttgtttgttt

SEQ ID NO: 693267 - DNA, 15 bp, Homo sapiens
ctttttgtttgtttg

SEQ ID NO: 693268 - DNA, 15 bp, Homo sapiens
ttttgtttgtttgta

SEQ ID NO: 693269 - DNA, 15 bp, Homo sapiens
tttgtttgtttgtag

SEQ ID NO: 693270 - DNA, 15 bp, Homo sapiens
ttgtttgtttgtagc

SEQ ID NO: 693271 - DNA, 15 bp, Homo sapiens
tgtttgtttgtagcg

SEQ ID NO: 693272 - DNA, 15 bp, Homo sapiens
gtttgtttgtagcga

SEQ ID NO: 693273 - DNA, 15 bp, Homo sapiens
tttgtttgtagcgat

SEQ ID NO: 693274 - DNA, 15 bp, Homo sapiens
ttgtttgtagcgata

SEQ ID NO: 693275 - DNA, 15 bp, Homo sapiens
tgtttgtagcgatac

SEQ ID NO: 693276 - DNA, 15 bp, Homo sapiens
gtttgtagcgataca

SEQ ID NO: 693277 - DNA, 15 bp, Homo sapiens
tttgtagcgatacaa

SEQ ID NO: 693278 - DNA, 15 bp, Homo sapiens
ttgtagcgatacaaa

SEQ ID NO: 693279 - DNA, 15 bp, Homo sapiens
tgtagcgatacaaac

SEQ ID NO: 693280 - DNA, 15 bp, Homo sapiens
gtagcgatacaaact

SEQ ID NO: 693281 - DNA, 15 bp, Homo sapiens
tagcgatacaaactt

SEQ ID NO: 693282 - DNA, 15 bp, Homo sapiens
agcgatacaaacttg

SEQ ID NO: 693283 - DNA, 15 bp, Homo sapiens
gcgatacaaacttgg

SEQ ID NO: 693284 - DNA, 15 bp, Homo sapiens
cgatacaaacttgga

SEQ ID NO: 693285 - DNA, 15 bp, Homo sapiens
gatacaaacttggag

SEQ ID NO: 693286 - DNA, 15 bp, Homo sapiens
atacaaacttggagt

SEQ ID NO: 693287 - DNA, 15 bp, Homo sapiens
tacaaacttggagtt

SEQ ID NO: 693288 - DNA, 15 bp, Homo sapiens
acaaacttggagttc

SEQ ID NO: 693289 - DNA, 15 bp, Homo sapiens
caaacttggagttcg

SEQ ID NO: 693290 - DNA, 15 bp, Homo sapiens
aaacttggagttcgc

SEQ ID NO: 693291 - DNA, 15 bp, Homo sapiens
aacttggagttcgct

SEQ ID NO: 693292 - DNA, 15 bp, Homo sapiens
acttggagttcgctt

SEQ ID NO: 693293 - DNA, 15 bp, Homo sapiens
cttggagttcgcttg

SEQ ID NO: 693294 - DNA, 15 bp, Homo sapiens
ttggagttcgcttgt

SEQ ID NO: 693295 - DNA, 15 bp, Homo sapiens
tggagttcgcttgta

SEQ ID NO: 693296 - DNA, 15 bp, Homo sapiens
ggagttcgcttgtat

SEQ ID NO: 693297 - DNA, 15 bp, Homo sapiens
gagttcgcttgtatt

SEQ ID NO: 693298 - DNA, 15 bp, Homo sapiens
agttcgcttgtatta

SEQ ID NO: 693299 - DNA, 15 bp, Homo sapiens
gttcgcttgtattac

SEQ ID NO: 693300 - DNA, 15 bp, Homo sapiens
ttcgcttgtattacc

SEQ ID NO: 693301 - DNA, 15 bp, Homo sapiens
tcgcttgtattaccg

SEQ ID NO: 693302 - DNA, 15 bp, Homo sapiens
cgcttgtattaccga

SEQ ID NO: 693303 - DNA, 15 bp, Homo sapiens
gcttgtattaccgag

SEQ ID NO: 693304 - DNA, 15 bp, Homo sapiens
cttgtattaccgagt

SEQ ID NO: 693305 - DNA, 15 bp, Homo sapiens
ttgtattaccgagta

SEQ ID NO: 693306 - DNA, 15 bp, Homo sapiens
tgtattaccgagtaa

SEQ ID NO: 693307 - DNA, 15 bp, Homo sapiens
gtattaccgagtaat

SEQ ID NO: 693308 - DNA, 15 bp, Homo sapiens
tattaccgagtaatg

SEQ ID NO: 693309 - DNA, 15 bp, Homo sapiens
attaccgagtaatgg

SEQ ID NO: 693310 - DNA, 15 bp, Homo sapiens
ttaccgagtaatgga

SEQ ID NO: 693311 - DNA, 15 bp, Homo sapiens
taccgagtaatggaa

SEQ ID NO: 693312 - DNA, 15 bp, Homo sapiens
accgagtaatggaat

SEQ ID NO: 693313 - DNA, 15 bp, Homo sapiens
ccgagtaatggaatc

SEQ ID NO: 693314 - DNA, 15 bp, Homo sapiens
cgagtaatggaatcc

SEQ ID NO: 693315 - DNA, 15 bp, Homo sapiens
gagtaatggaatcca

SEQ ID NO: 693316 - DNA, 15 bp, Homo sapiens
agtaatggaatccat

SEQ ID NO: 693317 - DNA, 15 bp, Homo sapiens
gtaatggaatccatg

SEQ ID NO: 693318 - DNA, 15 bp, Homo sapiens
taatggaatccatgc

SEQ ID NO: 693319 - DNA, 15 bp, Homo sapiens
aatggaatccatgct

SEQ ID NO: 693320 - DNA, 15 bp, Homo sapiens
atggaatccatgctt

SEQ ID NO: 693321 - DNA, 15 bp, Homo sapiens
tggaatccatgctta

SEQ ID NO: 693322 - DNA, 15 bp, Homo sapiens
ggaatccatgcttaa

SEQ ID NO: 693323 - DNA, 15 bp, Homo sapiens
gaatccatgcttaaa

SEQ ID NO: 693324 - DNA, 15 bp, Homo sapiens
aatccatgcttaaat

SEQ ID NO: 693325 - DNA, 15 bp, Homo sapiens
atccatgcttaaatc

SEQ ID NO: 693326 - DNA, 15 bp, Homo sapiens
tccatgcttaaatca

SEQ ID NO: 693327 - DNA, 15 bp, Homo sapiens
ccatgcttaaatcag

SEQ ID NO: 693328 - DNA, 15 bp, Homo sapiens
catgcttaaatcagt

SEQ ID NO: 693329 - DNA, 15 bp, Homo sapiens
atgcttaaatcagta

SEQ ID NO: 693330 - DNA, 15 bp, Homo sapiens
tgcttaaatcagtaa

SEQ ID NO: 693331 - DNA, 15 bp, Homo sapiens
gcttaaatcagtaag

SEQ ID NO: 693332 - DNA, 15 bp, Homo sapiens
cttaaatcagtaagt

SEQ ID NO: 693333 - DNA, 15 bp, Homo sapiens
ttaaatcagtaagtt

SEQ ID NO: 693334 - DNA, 15 bp, Homo sapiens
taaatcagtaagtta

SEQ ID NO: 693335 - DNA, 15 bp, Homo sapiens
aaatcagtaagttaa

SEQ ID NO: 693336 - DNA, 15 bp, Homo sapiens
aatcagtaagttaaa

SEQ ID NO: 693337 - DNA, 15 bp, Homo sapiens
atcagtaagttaaaa

SEQ ID NO: 693338 - DNA, 15 bp, Homo sapiens
tcagtaagttaaaaa

SEQ ID NO: 693339 - DNA, 15 bp, Homo sapiens
cagtaagttaaaaac

SEQ ID NO: 693340 - DNA, 15 bp, Homo sapiens
agtaagttaaaaaca

SEQ ID NO: 693341 - DNA, 15 bp, Homo sapiens
gtaagttaaaaacaa

SEQ ID NO: 693342 - DNA, 15 bp, Homo sapiens
taagttaaaaacaat

SEQ ID NO: 693343 - DNA, 15 bp, Homo sapiens
aagttaaaaacaata

SEQ ID NO: 693344 - DNA, 15 bp, Homo sapiens
agttaaaaacaatat

SEQ ID NO: 693345 - DNA, 15 bp, Homo sapiens
gttaaaaacaatata

SEQ ID NO: 693346 - DNA, 15 bp, Homo sapiens
ttaaaaacaatataa

SEQ ID NO: 693347 - DNA, 15 bp, Homo sapiens
taaaaacaatataaa

SEQ ID NO: 693348 - DNA, 15 bp, Homo sapiens
aaaaacaatataaaa

SEQ ID NO: 693349 - DNA, 15 bp, Homo sapiens
aaaacaatataaaaa

SEQ ID NO: 693350 - DNA, 15 bp, Homo sapiens
aaacaatataaaaaa

SEQ ID NO: 693351 - DNA, 15 bp, Homo sapiens
aacaatataaaaaaa

SEQ ID NO: 693352 - DNA, 15 bp, Homo sapiens
acaatataaaaaaat

SEQ ID NO: 693353 - DNA, 15 bp, Homo sapiens
caatataaaaaaatt

SEQ ID NO: 693354 - DNA, 15 bp, Homo sapiens
aatataaaaaaattt

SEQ ID NO: 693355 - DNA, 15 bp, Homo sapiens
atataaaaaaatttc

SEQ ID NO: 693356 - DNA, 15 bp, Homo sapiens
tataaaaaaatttca

SEQ ID NO: 693357 - DNA, 15 bp, Homo sapiens
ataaaaaaatttcag

SEQ ID NO: 693358 - DNA, 15 bp, Homo sapiens
taaaaaaatttcagc

SEQ ID NO: 693359 - DNA, 15 bp, Homo sapiens
aaaaaaatttcagcc

SEQ ID NO: 693360 - DNA, 15 bp, Homo sapiens
aaaaaatttcagccg

SEQ ID NO: 693361 - DNA, 15 bp, Homo sapiens
aaaaatttcagccgg

SEQ ID NO: 693362 - DNA, 15 bp, Homo sapiens
aaaatttcagccggg

SEQ ID NO: 693363 - DNA, 15 bp, Homo sapiens
aaatttcagccgggc

SEQ ID NO: 693364 - DNA, 15 bp, Homo sapiens
aatttcagccgggcg

SEQ ID NO: 693365 - DNA, 15 bp, Homo sapiens
atttcagccgggcgc

SEQ ID NO: 693366 - DNA, 15 bp, Homo sapiens
tttcagccgggcgcg

SEQ ID NO: 693367 - DNA, 15 bp, Homo sapiens
ttcagccgggcgcgg

SEQ ID NO: 693368 - DNA, 15 bp, Homo sapiens
tcagccgggcgcggt

SEQ ID NO: 693369 - DNA, 15 bp, Homo sapiens
cagccgggcgcggtg

SEQ ID NO: 693370 - DNA, 15 bp, Homo sapiens
agccgggcgcggtgg

SEQ ID NO: 693371 - DNA, 15 bp, Homo sapiens
gccgggcgcggtggc

SEQ ID NO: 693372 - DNA, 15 bp, Homo sapiens
ccgggcgcggtggct

SEQ ID NO: 693373 - DNA, 15 bp, Homo sapiens
cgggcgcggtggctc

SEQ ID NO: 693374 - DNA, 15 bp, Homo sapiens
gtggctcacgcctgc

SEQ ID NO: 693375 - DNA, 15 bp, Homo sapiens
tggctcacgcctgca

SEQ ID NO: 693376 - DNA, 15 bp, Homo sapiens
ggctcacgcctgcaa

SEQ ID NO: 693377 - DNA, 15 bp, Homo sapiens
gctcacgcctgcaat

SEQ ID NO: 693378 - DNA, 15 bp, Homo sapiens
ctcacgcctgcaatc

SEQ ID NO: 693379 - DNA, 15 bp, Homo sapiens
tcacgcctgcaatcc

SEQ ID NO: 693380 - DNA, 15 bp, Homo sapiens
cacgcctgcaatccc

SEQ ID NO: 693381 - DNA, 15 bp, Homo sapiens
acgcctgcaatccca

SEQ ID NO: 693382 - DNA, 15 bp, Homo sapiens
cgcctgcaatcccag

SEQ ID NO: 693383 - DNA, 15 bp, Homo sapiens
gcctgcaatcccagc

SEQ ID NO: 693384 - DNA, 15 bp, Homo sapiens
cctgcaatcccagca

SEQ ID NO: 693385 - DNA, 15 bp, Homo sapiens
ctgcaatcccagcac

SEQ ID NO: 693386 - DNA, 15 bp, Homo sapiens
tgcaatcccagcact

SEQ ID NO: 693387 - DNA, 15 bp, Homo sapiens
gcaatcccagcactt

SEQ ID NO: 693388 - DNA, 15 bp, Homo sapiens
caatcccagcacttt

SEQ ID NO: 693389 - DNA, 15 bp, Homo sapiens
gaggccgaggtgggc

SEQ ID NO: 693390 - DNA, 15 bp, Homo sapiens
aggccgaggtgggca

SEQ ID NO: 693391 - DNA, 15 bp, Homo sapiens
ggccgaggtgggcag

SEQ ID NO: 693392 - DNA, 15 bp, Homo sapiens
gccgaggtgggcaga

SEQ ID NO: 693393 - DNA, 15 bp, Homo sapiens
ccgaggtgggcagat

SEQ ID NO: 693394 - DNA, 15 bp, Homo sapiens
cgaggtgggcagatc

SEQ ID NO: 693395 - DNA, 15 bp, Homo sapiens
gaggtgggcagatca

SEQ ID NO: 693396 - DNA, 15 bp, Homo sapiens
aggtgggcagatcag

SEQ ID NO: 693397 - DNA, 15 bp, Homo sapiens
ggtgggcagatcagg

SEQ ID NO: 693398 - DNA, 15 bp, Homo sapiens
gtgggcagatcagga

SEQ ID NO: 693399 - DNA, 15 bp, Homo sapiens
tgggcagatcaggag

SEQ ID NO: 693400 - DNA, 15 bp, Homo sapiens
gggcagatcaggagg

SEQ ID NO: 693401 - DNA, 15 bp, Homo sapiens
ggcagatcaggaggt

SEQ ID NO: 693402 - DNA, 15 bp, Homo sapiens
gcagatcaggaggtc

SEQ ID NO: 693403 - DNA, 15 bp, Homo sapiens
cagatcaggaggtca

SEQ ID NO: 693404 - DNA, 15 bp, Homo sapiens
agatcaggaggtcaa

SEQ ID NO: 693405 - DNA, 15 bp, Homo sapiens
gatcaggaggtcaag

SEQ ID NO: 693406 - DNA, 15 bp, Homo sapiens
atcaggaggtcaagg

SEQ ID NO: 693407 - DNA, 15 bp, Homo sapiens
tcaggaggtcaaggc

SEQ ID NO: 693408 - DNA, 15 bp, Homo sapiens
caggaggtcaaggca

SEQ ID NO: 693409 - DNA, 15 bp, Homo sapiens
aggaggtcaaggcat

SEQ ID NO: 693410 - DNA, 15 bp, Homo sapiens
ggaggtcaaggcatc

SEQ ID NO: 693411 - DNA, 15 bp, Homo sapiens
gaggtcaaggcatca

SEQ ID NO: 693412 - DNA, 15 bp, Homo sapiens
aggtcaaggcatcaa

SEQ ID NO: 693413 - DNA, 15 bp, Homo sapiens
ggtcaaggcatcaag

SEQ ID NO: 693414 - DNA, 15 bp, Homo sapiens
gtcaaggcatcaaga

SEQ ID NO: 693415 - DNA, 15 bp, Homo sapiens
tcaaggcatcaagat

SEQ ID NO: 693416 - DNA, 15 bp, Homo sapiens
caaggcatcaagatc

SEQ ID NO: 693417 - DNA, 15 bp, Homo sapiens
aaggcatcaagatca

SEQ ID NO: 693418 - DNA, 15 bp, Homo sapiens
aggcatcaagatcat

SEQ ID NO: 693419 - DNA, 15 bp, Homo sapiens
ggcatcaagatcatc

SEQ ID NO: 693420 - DNA, 15 bp, Homo sapiens
gcatcaagatcatcc

SEQ ID NO: 693421 - DNA, 15 bp, Homo sapiens
catcaagatcatcct

SEQ ID NO: 693422 - DNA, 15 bp, Homo sapiens
atcaagatcatcctg

SEQ ID NO: 693423 - DNA, 15 bp, Homo sapiens
tcaagatcatcctgg

SEQ ID NO: 693424 - DNA, 15 bp, Homo sapiens
caagatcatcctggc

SEQ ID NO: 693425 - DNA, 15 bp, Homo sapiens
aagatcatcctggcc

SEQ ID NO: 693426 - DNA, 15 bp, Homo sapiens
agatcatcctggcca

SEQ ID NO: 693427 - DNA, 15 bp, Homo sapiens
gatcatcctggccaa

SEQ ID NO: 693428 - DNA, 15 bp, Homo sapiens
atcatcctggccaaa

SEQ ID NO: 693429 - DNA, 15 bp, Homo sapiens
tcatcctggccaaaa

SEQ ID NO: 693430 - DNA, 15 bp, Homo sapiens
catcctggccaaaat

SEQ ID NO: 693431 - DNA, 15 bp, Homo sapiens
atcctggccaaaatg

SEQ ID NO: 693432 - DNA, 15 bp, Homo sapiens
tcctggccaaaatgg

SEQ ID NO: 693433 - DNA, 15 bp, Homo sapiens
cctggccaaaatggt

SEQ ID NO: 693434 - DNA, 15 bp, Homo sapiens
ctggccaaaatggtg

SEQ ID NO: 693435 - DNA, 15 bp, Homo sapiens
tggccaaaatggtga

SEQ ID NO: 693436 - DNA, 15 bp, Homo sapiens
ggccaaaatggtgaa

SEQ ID NO: 693437 - DNA, 15 bp, Homo sapiens
gccaaaatggtgaaa

SEQ ID NO: 693438 - DNA, 15 bp, Homo sapiens
ccaaaatggtgaaac

SEQ ID NO: 693439 - DNA, 15 bp, Homo sapiens
caaaatggtgaaacc

SEQ ID NO: 693440 - DNA, 15 bp, Homo sapiens
aaaatggtgaaaccc

SEQ ID NO: 693441 - DNA, 15 bp, Homo sapiens
aaatggtgaaaccct

SEQ ID NO: 693442 - DNA, 15 bp, Homo sapiens
aatggtgaaaccctg

SEQ ID NO: 693443 - DNA, 15 bp, Homo sapiens
tgtctctactaaaag

SEQ ID NO: 693444 - DNA, 15 bp, Homo sapiens
gtctctactaaaagt

SEQ ID NO: 693445 - DNA, 15 bp, Homo sapiens
tctctactaaaagta

SEQ ID NO: 693446 - DNA, 15 bp, Homo sapiens
ctctactaaaagtac

SEQ ID NO: 693447 - DNA, 15 bp, Homo sapiens
tctactaaaagtaca

SEQ ID NO: 693448 - DNA, 15 bp, Homo sapiens
ctactaaaagtacaa

SEQ ID NO: 693449 - DNA, 15 bp, Homo sapiens
tactaaaagtacaaa

SEQ ID NO: 693450 - DNA, 15 bp, Homo sapiens
actaaaagtacaaaa

SEQ ID NO: 693451 - DNA, 15 bp, Homo sapiens
ctaaaagtacaaaaa

SEQ ID NO: 693452 - DNA, 15 bp, Homo sapiens
taaaagtacaaaaat

SEQ ID NO: 693453 - DNA, 15 bp, Homo sapiens
aaaagtacaaaaatt

SEQ ID NO: 693454 - DNA, 15 bp, Homo sapiens
aaagtacaaaaatta

SEQ ID NO: 693455 - DNA, 15 bp, Homo sapiens
aagtacaaaaattag

SEQ ID NO: 693456 - DNA, 15 bp, Homo sapiens
agtacaaaaattagc

SEQ ID NO: 693457 - DNA, 15 bp, Homo sapiens
gtacaaaaattagct

SEQ ID NO: 693458 - DNA, 15 bp, Homo sapiens
gctgggcgtggtggt

SEQ ID NO: 693459 - DNA, 15 bp, Homo sapiens
ctgggcgtggtggtg

SEQ ID NO: 693460 - DNA, 15 bp, Homo sapiens
tgggcgtggtggtgt

SEQ ID NO: 693461 - DNA, 15 bp, Homo sapiens
gggcgtggtggtgta

SEQ ID NO: 693462 - DNA, 15 bp, Homo sapiens
ggcgtggtggtgtag

SEQ ID NO: 693463 - DNA, 15 bp, Homo sapiens
gcgtggtggtgtaga

SEQ ID NO: 693464 - DNA, 15 bp, Homo sapiens
cgtggtggtgtagac

SEQ ID NO: 693465 - DNA, 15 bp, Homo sapiens
gtggtggtgtagacc

SEQ ID NO: 693466 - DNA, 15 bp, Homo sapiens
tggtggtgtagacct

SEQ ID NO: 693467 - DNA, 15 bp, Homo sapiens
ggtggtgtagacctg

SEQ ID NO: 693468 - DNA, 15 bp, Homo sapiens
gtggtgtagacctgt

SEQ ID NO: 693469 - DNA, 15 bp, Homo sapiens
tggtgtagacctgta

SEQ ID NO: 693470 - DNA, 15 bp, Homo sapiens
ggtgtagacctgtag

SEQ ID NO: 693471 - DNA, 15 bp, Homo sapiens
gtgtagacctgtagt

SEQ ID NO: 693472 - DNA, 15 bp, Homo sapiens
tgtagacctgtagtc

SEQ ID NO: 693473 - DNA, 15 bp, Homo sapiens
gtagacctgtagtcc

SEQ ID NO: 693474 - DNA, 15 bp, Homo sapiens
tagacctgtagtccc

SEQ ID NO: 693475 - DNA, 15 bp, Homo sapiens
agacctgtagtccca

SEQ ID NO: 693476 - DNA, 15 bp, Homo sapiens
gacctgtagtcccag

SEQ ID NO: 693477 - DNA, 15 bp, Homo sapiens
acctgtagtcccagc

SEQ ID NO: 693478 - DNA, 15 bp, Homo sapiens
tcccagctacttggc

SEQ ID NO: 693479 - DNA, 15 bp, Homo sapiens
cccagctacttggca

SEQ ID NO: 693480 - DNA, 15 bp, Homo sapiens
ccagctacttggcag

SEQ ID NO: 693481 - DNA, 15 bp, Homo sapiens
cagctacttggcagg

SEQ ID NO: 693482 - DNA, 15 bp, Homo sapiens
agctacttggcaggc

SEQ ID NO: 693483 - DNA, 15 bp, Homo sapiens
gctacttggcaggct

SEQ ID NO: 693484 - DNA, 15 bp, Homo sapiens
ctacttggcaggctg

SEQ ID NO: 693485 - DNA, 15 bp, Homo sapiens
tacttggcaggctga

SEQ ID NO: 693486 - DNA, 15 bp, Homo sapiens
acttggcaggctgag

SEQ ID NO: 693487 - DNA, 15 bp, Homo sapiens
cttggcaggctgagg

SEQ ID NO: 693488 - DNA, 15 bp, Homo sapiens
ttggcaggctgaggc

SEQ ID NO: 693489 - DNA, 15 bp, Homo sapiens
tggcaggctgaggca

SEQ ID NO: 693490 - DNA, 15 bp, Homo sapiens
ggcaggctgaggcag

SEQ ID NO: 693491 - DNA, 15 bp, Homo sapiens
gcaggctgaggcagg

SEQ ID NO: 693492 - DNA, 15 bp, Homo sapiens
caggctgaggcagga

SEQ ID NO: 693493 - DNA, 15 bp, Homo sapiens
gaggcaggagaatcc

SEQ ID NO: 693494 - DNA, 15 bp, Homo sapiens
aggcaggagaatccc

SEQ ID NO: 693495 - DNA, 15 bp, Homo sapiens
ggcaggagaatccct

SEQ ID NO: 693496 - DNA, 15 bp, Homo sapiens
gcaggagaatccctt

SEQ ID NO: 693497 - DNA, 15 bp, Homo sapiens
caggagaatcccttg

SEQ ID NO: 693498 - DNA, 15 bp, Homo sapiens
aggagaatcccttga

SEQ ID NO: 693499 - DNA, 15 bp, Homo sapiens
ggagaatcccttgaa

SEQ ID NO: 693500 - DNA, 15 bp, Homo sapiens
gagaatcccttgaac

SEQ ID NO: 693501 - DNA, 15 bp, Homo sapiens
agaatcccttgaacc

SEQ ID NO: 693502 - DNA, 15 bp, Homo sapiens
gaatcccttgaacca

SEQ ID NO: 693503 - DNA, 15 bp, Homo sapiens
aatcccttgaaccag

SEQ ID NO: 693504 - DNA, 15 bp, Homo sapiens
atcccttgaaccagg

SEQ ID NO: 693505 - DNA, 15 bp, Homo sapiens
tcccttgaaccaggg

SEQ ID NO: 693506 - DNA, 15 bp, Homo sapiens
cccttgaaccaggga

SEQ ID NO: 693507 - DNA, 15 bp, Homo sapiens
ccttgaaccagggag

SEQ ID NO: 693508 - DNA, 15 bp, Homo sapiens
cttgaaccagggagg

SEQ ID NO: 693509 - DNA, 15 bp, Homo sapiens
ttgaaccagggaggt

SEQ ID NO: 693510 - DNA, 15 bp, Homo sapiens
tgaaccagggaggtg

SEQ ID NO: 693511 - DNA, 15 bp, Homo sapiens
gaaccagggaggtgg

SEQ ID NO: 693512 - DNA, 15 bp, Homo sapiens
aaccagggaggtgga

SEQ ID NO: 693513 - DNA, 15 bp, Homo sapiens
accagggaggtggag

SEQ ID NO: 693514 - DNA, 15 bp, Homo sapiens
ccagggaggtggagg

SEQ ID NO: 693515 - DNA, 15 bp, Homo sapiens
cagggaggtggaggt

SEQ ID NO: 693516 - DNA, 15 bp, Homo sapiens
agggaggtggaggtt

SEQ ID NO: 693517 - DNA, 15 bp, Homo sapiens
gggaggtggaggttg

SEQ ID NO: 693518 - DNA, 15 bp, Homo sapiens
ggaggtggaggttgc

SEQ ID NO: 693519 - DNA, 15 bp, Homo sapiens
gaggtggaggttgca

SEQ ID NO: 693520 - DNA, 15 bp, Homo sapiens
gtgagccaagattgt

SEQ ID NO: 693521 - DNA, 15 bp, Homo sapiens
tgagccaagattgtg

SEQ ID NO: 693522 - DNA, 15 bp, Homo sapiens
gagccaagattgtgc

SEQ ID NO: 693523 - DNA, 15 bp, Homo sapiens
agccaagattgtgcc

SEQ ID NO: 693524 - DNA, 15 bp, Homo sapiens
gccaagattgtgcca

SEQ ID NO: 693525 - DNA, 15 bp, Homo sapiens
ccaagattgtgccat

SEQ ID NO: 693526 - DNA, 15 bp, Homo sapiens
caagattgtgccatt

SEQ ID NO: 693527 - DNA, 15 bp, Homo sapiens
aagattgtgccattt

SEQ ID NO: 693528 - DNA, 15 bp, Homo sapiens
agattgtgccatttc

SEQ ID NO: 693529 - DNA, 15 bp, Homo sapiens
gattgtgccatttca

SEQ ID NO: 693530 - DNA, 15 bp, Homo sapiens
attgtgccatttcac

SEQ ID NO: 693531 - DNA, 15 bp, Homo sapiens
ttgtgccatttcacc

SEQ ID NO: 693532 - DNA, 15 bp, Homo sapiens
tgtgccatttcaccc

SEQ ID NO: 693533 - DNA, 15 bp, Homo sapiens
gtgccatttcacccc

SEQ ID NO: 693534 - DNA, 15 bp, Homo sapiens
tgccatttcacccca

SEQ ID NO: 693535 - DNA, 15 bp, Homo sapiens
gccatttcaccccag

SEQ ID NO: 693536 - DNA, 15 bp, Homo sapiens
ccatttcaccccagc

SEQ ID NO: 693537 - DNA, 15 bp, Homo sapiens
catttcaccccagcc

SEQ ID NO: 693538 - DNA, 15 bp, Homo sapiens
atttcaccccagcct

SEQ ID NO: 693539 - DNA, 15 bp, Homo sapiens
tttcaccccagcctg

SEQ ID NO: 693540 - DNA, 15 bp, Homo sapiens
ttcaccccagcctgg

SEQ ID NO: 693541 - DNA, 15 bp, Homo sapiens
tcaccccagcctggc

SEQ ID NO: 693542 - DNA, 15 bp, Homo sapiens
caccccagcctggca

SEQ ID NO: 693543 - DNA, 15 bp, Homo sapiens
accccagcctggcaa

SEQ ID NO: 693544 - DNA, 15 bp, Homo sapiens
ccccagcctggcaac

SEQ ID NO: 693545 - DNA, 15 bp, Homo sapiens
cccagcctggcaaca

SEQ ID NO: 693546 - DNA, 15 bp, Homo sapiens
cctggcaacagagca

SEQ ID NO: 693547 - DNA, 15 bp, Homo sapiens
ctggcaacagagcaa

SEQ ID NO: 693548 - DNA, 15 bp, Homo sapiens
tggcaacagagcaag

SEQ ID NO: 693549 - DNA, 15 bp, Homo sapiens
ggcaacagagcaaga

SEQ ID NO: 693550 - DNA, 15 bp, Homo sapiens
gcaacagagcaagac

SEQ ID NO: 693551 - DNA, 15 bp, Homo sapiens
caacagagcaagaca

SEQ ID NO: 693552 - DNA, 15 bp, Homo sapiens
aacagagcaagacac

SEQ ID NO: 693553 - DNA, 15 bp, Homo sapiens
acagagcaagacacc

SEQ ID NO: 693554 - DNA, 15 bp, Homo sapiens
cagagcaagacacca

SEQ ID NO: 693555 - DNA, 15 bp, Homo sapiens
agagcaagacaccat

SEQ ID NO: 693556 - DNA, 15 bp, Homo sapiens
gagcaagacaccatc

SEQ ID NO: 693557 - DNA, 15 bp, Homo sapiens
agcaagacaccatct

SEQ ID NO: 693558 - DNA, 15 bp, Homo sapiens
gcaagacaccatcta

SEQ ID NO: 693559 - DNA, 15 bp, Homo sapiens
caagacaccatctaa

SEQ ID NO: 693560 - DNA, 15 bp, Homo sapiens
aagacaccatctaaa

SEQ ID NO: 693561 - DNA, 15 bp, Homo sapiens
agacaccatctaaaa

SEQ ID NO: 693562 - DNA, 15 bp, Homo sapiens
gacaccatctaaaaa

SEQ ID NO: 693563 - DNA, 15 bp, Homo sapiens
acaccatctaaaaaa

SEQ ID NO: 693564 - DNA, 15 bp, Homo sapiens
caccatctaaaaaaa

SEQ ID NO: 693565 - DNA, 15 bp, Homo sapiens
accatctaaaaaaaa

SEQ ID NO: 693566 - DNA, 15 bp, Homo sapiens
ccatctaaaaaaaaa

SEQ ID NO: 693567 - DNA, 15 bp, Homo sapiens
catctaaaaaaaaaa

SEQ ID NO: 693568 - DNA, 15 bp, Homo sapiens
atctaaaaaaaaaaa

SEQ ID NO: 693569 - DNA, 15 bp, Homo sapiens
tctaaaaaaaaaaaa

SEQ ID NO: 693570 - DNA, 15 bp, Homo sapiens
ctaaaaaaaaaaaaa

SEQ ID NO: 693571 - DNA, 15 bp, Homo sapiens
aaaaaaaaaaaattc

SEQ ID NO: 693572 - DNA, 15 bp, Homo sapiens
aaaaaaaaaaattca

SEQ ID NO: 693573 - DNA, 15 bp, Homo sapiens
aaaaaaaaaattcaa

SEQ ID NO: 693574 - DNA, 15 bp, Homo sapiens
aaaaaaaaattcaat

SEQ ID NO: 693575 - DNA, 15 bp, Homo sapiens
aaaaaaaattcaatg

SEQ ID NO: 693576 - DNA, 15 bp, Homo sapiens
aaaaaaattcaatgc

SEQ ID NO: 693577 - DNA, 15 bp, Homo sapiens
aaaaaattcaatgct

SEQ ID NO: 693578 - DNA, 15 bp, Homo sapiens
aaaaattcaatgctg

SEQ ID NO: 693579 - DNA, 15 bp, Homo sapiens
aaaattcaatgctga

SEQ ID NO: 693580 - DNA, 15 bp, Homo sapiens
aaattcaatgctgac

SEQ ID NO: 693581 - DNA, 15 bp, Homo sapiens
aattcaatgctgaca

SEQ ID NO: 693582 - DNA, 15 bp, Homo sapiens
attcaatgctgacac

SEQ ID NO: 693583 - DNA, 15 bp, Homo sapiens
ttcaatgctgacaca

SEQ ID NO: 693584 - DNA, 15 bp, Homo sapiens
tcaatgctgacacaa

SEQ ID NO: 693585 - DNA, 15 bp, Homo sapiens
caatgctgacacaaa

SEQ ID NO: 693586 - DNA, 15 bp, Homo sapiens
aatgctgacacaaat

SEQ ID NO: 693587 - DNA, 15 bp, Homo sapiens
atgctgacacaaata

SEQ ID NO: 693588 - DNA, 15 bp, Homo sapiens
tgctgacacaaataa

SEQ ID NO: 693589 - DNA, 15 bp, Homo sapiens
gctgacacaaataag

SEQ ID NO: 693590 - DNA, 15 bp, Homo sapiens
ctgacacaaataagg

SEQ ID NO: 693591 - DNA, 15 bp, Homo sapiens
tgacacaaataaggt

SEQ ID NO: 693592 - DNA, 15 bp, Homo sapiens
gacacaaataaggtt

SEQ ID NO: 693593 - DNA, 15 bp, Homo sapiens
acacaaataaggttt

SEQ ID NO: 693594 - DNA, 15 bp, Homo sapiens
cacaaataaggtttc

SEQ ID NO: 693595 - DNA, 15 bp, Homo sapiens
acaaataaggtttca

SEQ ID NO: 693596 - DNA, 15 bp, Homo sapiens
caaataaggtttcaa

SEQ ID NO: 693597 - DNA, 15 bp, Homo sapiens
aaataaggtttcaat

SEQ ID NO: 693598 - DNA, 15 bp, Homo sapiens
aataaggtttcaatt

SEQ ID NO: 693599 - DNA, 15 bp, Homo sapiens
ataaggtttcaatta

SEQ ID NO: 693600 - DNA, 15 bp, Homo sapiens
taaggtttcaattaa

SEQ ID NO: 693601 - DNA, 15 bp, Homo sapiens
aaggtttcaattaaa

SEQ ID NO: 693602 - DNA, 15 bp, Homo sapiens
aggtttcaattaaac

SEQ ID NO: 693603 - DNA, 15 bp, Homo sapiens
ggtttcaattaaaca

SEQ ID NO: 693604 - DNA, 15 bp, Homo sapiens
gtttcaattaaacaa

SEQ ID NO: 693605 - DNA, 15 bp, Homo sapiens
tttcaattaaacaac

SEQ ID NO: 693606 - DNA, 15 bp, Homo sapiens
ttcaattaaacaact

SEQ ID NO: 693607 - DNA, 15 bp, Homo sapiens
tcaattaaacaactt

SEQ ID NO: 693608 - DNA, 15 bp, Homo sapiens
caattaaacaacttc

SEQ ID NO: 693609 - DNA, 15 bp, Homo sapiens
aattaaacaacttct

SEQ ID NO: 693610 - DNA, 15 bp, Homo sapiens
attaaacaacttctt

SEQ ID NO: 693611 - DNA, 15 bp, Homo sapiens
ttaaacaacttcttt

SEQ ID NO: 693612 - DNA, 15 bp, Homo sapiens
taaacaacttctttt

SEQ ID NO: 693613 - DNA, 15 bp, Homo sapiens
aaacaacttcttttt

SEQ ID NO: 693614 - DNA, 15 bp, Homo sapiens
aacaacttctttttt

SEQ ID NO: 693615 - DNA, 15 bp, Homo sapiens
acaacttcttttttt

SEQ ID NO: 693616 - DNA, 15 bp, Homo sapiens
caacttctttttttt

SEQ ID NO: 693617 - DNA, 15 bp, Homo sapiens
aacttcttttttttt

SEQ ID NO: 693618 - DNA, 15 bp, Homo sapiens
cttcttttttttttt

SEQ ID NO: 693619 - DNA, 15 bp, Homo sapiens
cttttttttttttta

SEQ ID NO: 693620 - DNA, 15 bp, Homo sapiens
ttttttttttttaaa

SEQ ID NO: 693621 - DNA, 15 bp, Homo sapiens
tttttttttttaaat

SEQ ID NO: 693622 - DNA, 15 bp, Homo sapiens
ttttttttttaaatt

SEQ ID NO: 693623 - DNA, 15 bp, Homo sapiens
tttttttttaaatta

SEQ ID NO: 693624 - DNA, 15 bp, Homo sapiens
ttttttttaaattat

SEQ ID NO: 693625 - DNA, 15 bp, Homo sapiens
tttttttaaattatc

SEQ ID NO: 693626 - DNA, 15 bp, Homo sapiens
ttttttaaattatct

SEQ ID NO: 693627 - DNA, 15 bp, Homo sapiens
tttttaaattatctg

SEQ ID NO: 693628 - DNA, 15 bp, Homo sapiens
ttttaaattatctgt

SEQ ID NO: 693629 - DNA, 15 bp, Homo sapiens
tttaaattatctgtt

SEQ ID NO: 693630 - DNA, 15 bp, Homo sapiens
ttaaattatctgttt

SEQ ID NO: 693631 - DNA, 15 bp, Homo sapiens
taaattatctgtttc

SEQ ID NO: 693632 - DNA, 15 bp, Homo sapiens
aaattatctgtttca

SEQ ID NO: 693633 - DNA, 15 bp, Homo sapiens
aattatctgtttcag

SEQ ID NO: 693634 - DNA, 15 bp, Homo sapiens
attatctgtttcagg

SEQ ID NO: 693635 - DNA, 15 bp, Homo sapiens
ttatctgtttcagga

SEQ ID NO: 693636 - DNA, 15 bp, Homo sapiens
tatctgtttcaggaa

SEQ ID NO: 693637 - DNA, 15 bp, Homo sapiens
atctgtttcaggaag

SEQ ID NO: 693638 - DNA, 15 bp, Homo sapiens
tctgtttcaggaaga

SEQ ID NO: 693639 - DNA, 15 bp, Homo sapiens
ctgtttcaggaagaa

SEQ ID NO: 693640 - DNA, 15 bp, Homo sapiens
tgtttcaggaagaag

SEQ ID NO: 693641 - DNA, 15 bp, Homo sapiens
gtttcaggaagaaga

SEQ ID NO: 693642 - DNA, 15 bp, Homo sapiens
tttcaggaagaagaa

SEQ ID NO: 693643 - DNA, 15 bp, Homo sapiens
ttcaggaagaagaac

SEQ ID NO: 693644 - DNA, 15 bp, Homo sapiens
tcaggaagaagaacg

SEQ ID NO: 693645 - DNA, 15 bp, Homo sapiens
caggaagaagaacga

SEQ ID NO: 693646 - DNA, 15 bp, Homo sapiens
aggaagaagaacgat

SEQ ID NO: 693647 - DNA, 15 bp, Homo sapiens
ggaagaagaacgatt

SEQ ID NO: 693648 - DNA, 15 bp, Homo sapiens
gaagaagaacgatta

SEQ ID NO: 693649 - DNA, 15 bp, Homo sapiens
aagaagaacgattat

SEQ ID NO: 693650 - DNA, 15 bp, Homo sapiens
agaagaacgattatc

SEQ ID NO: 693651 - DNA, 15 bp, Homo sapiens
gaagaacgattatcc

SEQ ID NO: 693652 - DNA, 15 bp, Homo sapiens
aagaacgattatcca

SEQ ID NO: 693653 - DNA, 15 bp, Homo sapiens
agaacgattatccat

SEQ ID NO: 693654 - DNA, 15 bp, Homo sapiens
gaacgattatccatt

SEQ ID NO: 693655 - DNA, 15 bp, Homo sapiens
aacgattatccattc

SEQ ID NO: 693656 - DNA, 15 bp, Homo sapiens
acgattatccattca

SEQ ID NO: 693657 - DNA, 15 bp, Homo sapiens
cgattatccattcaa

SEQ ID NO: 693658 - DNA, 15 bp, Homo sapiens
gattatccattcaaa

SEQ ID NO: 693659 - DNA, 15 bp, Homo sapiens
attatccattcaaaa

SEQ ID NO: 693660 - DNA, 15 bp, Homo sapiens
ttatccattcaaaat

SEQ ID NO: 693661 - DNA, 15 bp, Homo sapiens
tatccattcaaaatt

SEQ ID NO: 693662 - DNA, 15 bp, Homo sapiens
atccattcaaaattt

SEQ ID NO: 693663 - DNA, 15 bp, Homo sapiens
tccattcaaaatttt

SEQ ID NO: 693664 - DNA, 15 bp, Homo sapiens
ccattcaaaatttta

SEQ ID NO: 693665 - DNA, 15 bp, Homo sapiens
cattcaaaattttag

SEQ ID NO: 693666 - DNA, 15 bp, Homo sapiens
attcaaaattttagg

SEQ ID NO: 693667 - DNA, 15 bp, Homo sapiens
ttcaaaattttaggt

SEQ ID NO: 693668 - DNA, 15 bp, Homo sapiens
tcaaaattttaggta

SEQ ID NO: 693669 - DNA, 15 bp, Homo sapiens
caaaattttaggtaa

SEQ ID NO: 693670 - DNA, 15 bp, Homo sapiens
aaaattttaggtaaa

SEQ ID NO: 693671 - DNA, 15 bp, Homo sapiens
aaattttaggtaaat

SEQ ID NO: 693672 - DNA, 15 bp, Homo sapiens
aattttaggtaaatt

SEQ ID NO: 693673 - DNA, 15 bp, Homo sapiens
attttaggtaaattt

SEQ ID NO: 693674 - DNA, 15 bp, Homo sapiens
ttttaggtaaatttt

SEQ ID NO: 693675 - DNA, 15 bp, Homo sapiens
tttaggtaaattttt

SEQ ID NO: 693676 - DNA, 15 bp, Homo sapiens
ttaggtaaatttttt

SEQ ID NO: 693677 - DNA, 15 bp, Homo sapiens
taggtaaatttttta

SEQ ID NO: 693678 - DNA, 15 bp, Homo sapiens
aggtaaattttttac

SEQ ID NO: 693679 - DNA, 15 bp, Homo sapiens
ggtaaattttttact

SEQ ID NO: 693680 - DNA, 15 bp, Homo sapiens
gtaaattttttactt

SEQ ID NO: 693681 - DNA, 15 bp, Homo sapiens
taaattttttacttt

SEQ ID NO: 693682 - DNA, 15 bp, Homo sapiens
aaattttttactttt

SEQ ID NO: 693683 - DNA, 15 bp, Homo sapiens
aattttttactttta

SEQ ID NO: 693684 - DNA, 15 bp, Homo sapiens
attttttacttttag

SEQ ID NO: 693685 - DNA, 15 bp, Homo sapiens
ttttttacttttagt

SEQ ID NO: 693686 - DNA, 15 bp, Homo sapiens
tttttacttttagta

SEQ ID NO: 693687 - DNA, 15 bp, Homo sapiens
ttttacttttagtaa

SEQ ID NO: 693688 - DNA, 15 bp, Homo sapiens
tttacttttagtaaa

SEQ ID NO: 693689 - DNA, 15 bp, Homo sapiens
ttacttttagtaaaa

SEQ ID NO: 693690 - DNA, 15 bp, Homo sapiens
tacttttagtaaaaa

SEQ ID NO: 693691 - DNA, 15 bp, Homo sapiens
acttttagtaaaaaa

SEQ ID NO: 693692 - DNA, 15 bp, Homo sapiens
cttttagtaaaaaat

SEQ ID NO: 693693 - DNA, 15 bp, Homo sapiens
ttttagtaaaaaatt

SEQ ID NO: 693694 - DNA, 15 bp, Homo sapiens
tttagtaaaaaattt

SEQ ID NO: 693695 - DNA, 15 bp, Homo sapiens
ttagtaaaaaatttt

SEQ ID NO: 693696 - DNA, 15 bp, Homo sapiens
tagtaaaaaattttt

SEQ ID NO: 693697 - DNA, 15 bp, Homo sapiens
agtaaaaaatttttt

SEQ ID NO: 693698 - DNA, 15 bp, Homo sapiens
gtaaaaaattttttt

SEQ ID NO: 693699 - DNA, 15 bp, Homo sapiens
taaaaaatttttttc

SEQ ID NO: 693700 - DNA, 15 bp, Homo sapiens
aaaaaatttttttct

SEQ ID NO: 693701 - DNA, 15 bp, Homo sapiens
aaaaatttttttctt

SEQ ID NO: 693702 - DNA, 15 bp, Homo sapiens
aaaatttttttcttt

SEQ ID NO: 693703 - DNA, 15 bp, Homo sapiens
aaatttttttctttt

SEQ ID NO: 693704 - DNA, 15 bp, Homo sapiens
aatttttttcttttt

SEQ ID NO: 693705 - DNA, 15 bp, Homo sapiens
atttttttcttttta

SEQ ID NO: 693706 - DNA, 15 bp, Homo sapiens
tttttttctttttat

SEQ ID NO: 693707 - DNA, 15 bp, Homo sapiens
ttttttctttttata

SEQ ID NO: 693708 - DNA, 15 bp, Homo sapiens
tttttctttttatag

SEQ ID NO: 693709 - DNA, 15 bp, Homo sapiens
ttttctttttataga

SEQ ID NO: 693710 - DNA, 15 bp, Homo sapiens
tttctttttatagaa

SEQ ID NO: 693711 - DNA, 15 bp, Homo sapiens
ttctttttatagaag

SEQ ID NO: 693712 - DNA, 15 bp, Homo sapiens
tctttttatagaagt

SEQ ID NO: 693713 - DNA, 15 bp, Homo sapiens
ctttttatagaagta

SEQ ID NO: 693714 - DNA, 15 bp, Homo sapiens
tttttatagaagtaa

SEQ ID NO: 693715 - DNA, 15 bp, Homo sapiens
ttttatagaagtaag

SEQ ID NO: 693716 - DNA, 15 bp, Homo sapiens
tttatagaagtaagt

SEQ ID NO: 693717 - DNA, 15 bp, Homo sapiens
ttatagaagtaagta

SEQ ID NO: 693718 - DNA, 15 bp, Homo sapiens
tatagaagtaagtat

SEQ ID NO: 693719 - DNA, 15 bp, Homo sapiens
atagaagtaagtatt

SEQ ID NO: 693720 - DNA, 15 bp, Homo sapiens
tagaagtaagtattt

SEQ ID NO: 693721 - DNA, 15 bp, Homo sapiens
agaagtaagtatttt

SEQ ID NO: 693722 - DNA, 15 bp, Homo sapiens
gaagtaagtatttta

SEQ ID NO: 693723 - DNA, 15 bp, Homo sapiens
aagtaagtattttat

SEQ ID NO: 693724 - DNA, 15 bp, Homo sapiens
agtaagtattttata

SEQ ID NO: 693725 - DNA, 15 bp, Homo sapiens
gtaagtattttataa

SEQ ID NO: 693726 - DNA, 15 bp, Homo sapiens
taagtattttataat

SEQ ID NO: 693727 - DNA, 15 bp, Homo sapiens
aagtattttataatc

SEQ ID NO: 693728 - DNA, 15 bp, Homo sapiens
agtattttataatct

SEQ ID NO: 693729 - DNA, 15 bp, Homo sapiens
gtattttataatctt

SEQ ID NO: 693730 - DNA, 15 bp, Homo sapiens
tattttataatcttt

SEQ ID NO: 693731 - DNA, 15 bp, Homo sapiens
attttataatctttt

SEQ ID NO: 693732 - DNA, 15 bp, Homo sapiens
ttttataatcttttt

SEQ ID NO: 693733 - DNA, 15 bp, Homo sapiens
tttataatctttttt

SEQ ID NO: 693734 - DNA, 15 bp, Homo sapiens
ttataatcttttttt

SEQ ID NO: 693735 - DNA, 15 bp, Homo sapiens
tataatctttttttt

SEQ ID NO: 693736 - DNA, 15 bp, Homo sapiens
ataatcttttttttt

SEQ ID NO: 693737 - DNA, 15 bp, Homo sapiens
taatctttttttttt

SEQ ID NO: 693738 - DNA, 15 bp, Homo sapiens
aatcttttttttttt

SEQ ID NO: 693739 - DNA, 15 bp, Homo sapiens
atctttttttttttc

SEQ ID NO: 693740 - DNA, 15 bp, Homo sapiens
tctttttttttttcc

SEQ ID NO: 693741 - DNA, 15 bp, Homo sapiens
ctttttttttttcct

SEQ ID NO: 693742 - DNA, 15 bp, Homo sapiens
tttttttttccttta

SEQ ID NO: 693743 - DNA, 15 bp, Homo sapiens
ttttttttcctttag

SEQ ID NO: 693744 - DNA, 15 bp, Homo sapiens
tttttttcctttagc

SEQ ID NO: 693745 - DNA, 15 bp, Homo sapiens
ttttttcctttagca

SEQ ID NO: 693746 - DNA, 15 bp, Homo sapiens
tttttcctttagcaa

SEQ ID NO: 693747 - DNA, 15 bp, Homo sapiens
ttttcctttagcaaa

SEQ ID NO: 693748 - DNA, 15 bp, Homo sapiens
tttcctttagcaaac

SEQ ID NO: 693749 - DNA, 15 bp, Homo sapiens
ttcctttagcaaact

SEQ ID NO: 693750 - DNA, 15 bp, Homo sapiens
tcctttagcaaactt

SEQ ID NO: 693751 - DNA, 15 bp, Homo sapiens
cctttagcaaacttc

SEQ ID NO: 693752 - DNA, 15 bp, Homo sapiens
ctttagcaaacttct

SEQ ID NO: 693753 - DNA, 15 bp, Homo sapiens
tttagcaaacttctg

SEQ ID NO: 693754 - DNA, 15 bp, Homo sapiens
ttagcaaacttctga

SEQ ID NO: 693755 - DNA, 15 bp, Homo sapiens
tagcaaacttctgaa

SEQ ID NO: 693756 - DNA, 15 bp, Homo sapiens
agcaaacttctgaat

SEQ ID NO: 693757 - DNA, 15 bp, Homo sapiens
gcaaacttctgaatg

SEQ ID NO: 693758 - DNA, 15 bp, Homo sapiens
caaacttctgaatga

SEQ ID NO: 693759 - DNA, 15 bp, Homo sapiens
aaacttctgaatgac

SEQ ID NO: 693760 - DNA, 15 bp, Homo sapiens
aacttctgaatgaca

SEQ ID NO: 693761 - DNA, 15 bp, Homo sapiens
acttctgaatgacaa

SEQ ID NO: 693762 - DNA, 15 bp, Homo sapiens
cttctgaatgacaac

SEQ ID NO: 693763 - DNA, 15 bp, Homo sapiens
ttctgaatgacaaca

SEQ ID NO: 693764 - DNA, 15 bp, Homo sapiens
tctgaatgacaacat

SEQ ID NO: 693765 - DNA, 15 bp, Homo sapiens
ctgaatgacaacatt

SEQ ID NO: 693766 - DNA, 15 bp, Homo sapiens
tgaatgacaacattt

SEQ ID NO: 693767 - DNA, 15 bp, Homo sapiens
gaatgacaacatttt

SEQ ID NO: 693768 - DNA, 15 bp, Homo sapiens
aatgacaacattttt

SEQ ID NO: 693769 - DNA, 15 bp, Homo sapiens
atgacaacatttttc

SEQ ID NO: 693770 - DNA, 15 bp, Homo sapiens
tgacaacatttttca

SEQ ID NO: 693771 - DNA, 15 bp, Homo sapiens
gacaacatttttcat

SEQ ID NO: 693772 - DNA, 15 bp, Homo sapiens
acaacatttttcata

SEQ ID NO: 693773 - DNA, 15 bp, Homo sapiens
caacatttttcatat

SEQ ID NO: 693774 - DNA, 15 bp, Homo sapiens
aacatttttcatatg

SEQ ID NO: 693775 - DNA, 15 bp, Homo sapiens
acatttttcatatgt

SEQ ID NO: 693776 - DNA, 15 bp, Homo sapiens
catttttcatatgtc

SEQ ID NO: 693777 - DNA, 15 bp, Homo sapiens
atttttcatatgtct

SEQ ID NO: 693778 - DNA, 15 bp, Homo sapiens
tttttcatatgtctt

SEQ ID NO: 693779 - DNA, 15 bp, Homo sapiens
ttttcatatgtcttt

SEQ ID NO: 693780 - DNA, 15 bp, Homo sapiens
tttcatatgtcttta

SEQ ID NO: 693781 - DNA, 15 bp, Homo sapiens
ttcatatgtctttat

SEQ ID NO: 693782 - DNA, 15 bp, Homo sapiens
tcatatgtctttatt

SEQ ID NO: 693783 - DNA, 15 bp, Homo sapiens
catatgtctttattg

SEQ ID NO: 693784 - DNA, 15 bp, Homo sapiens
atatgtctttattgg

SEQ ID NO: 693785 - DNA, 15 bp, Homo sapiens
tatgtctttattggc

SEQ ID NO: 693786 - DNA, 15 bp, Homo sapiens
atgtctttattggcg

SEQ ID NO: 693787 - DNA, 15 bp, Homo sapiens
tgtctttattggcgt

SEQ ID NO: 693788 - DNA, 15 bp, Homo sapiens
gtctttattggcgtg

SEQ ID NO: 693789 - DNA, 15 bp, Homo sapiens
tctttattggcgtgc

SEQ ID NO: 693790 - DNA, 15 bp, Homo sapiens
ctttattggcgtgcg

SEQ ID NO: 693791 - DNA, 15 bp, Homo sapiens
tttattggcgtgcgc

SEQ ID NO: 693792 - DNA, 15 bp, Homo sapiens
ttattggcgtgcgct

SEQ ID NO: 693793 - DNA, 15 bp, Homo sapiens
tattggcgtgcgctc

SEQ ID NO: 693794 - DNA, 15 bp, Homo sapiens
attggcgtgcgctct

SEQ ID NO: 693795 - DNA, 15 bp, Homo sapiens
ttggcgtgcgctctt

SEQ ID NO: 693796 - DNA, 15 bp, Homo sapiens
tggcgtgcgctcttg

SEQ ID NO: 693797 - DNA, 15 bp, Homo sapiens
ggcgtgcgctcttga

SEQ ID NO: 693798 - DNA, 15 bp, Homo sapiens
gcgtgcgctcttgag

SEQ ID NO: 693799 - DNA, 15 bp, Homo sapiens
cgtgcgctcttgagg

SEQ ID NO: 693800 - DNA, 15 bp, Homo sapiens
gtgcgctcttgaggt

SEQ ID NO: 693801 - DNA, 15 bp, Homo sapiens
tgcgctcttgaggtt

SEQ ID NO: 693802 - DNA, 15 bp, Homo sapiens
gcgctcttgaggttg

SEQ ID NO: 693803 - DNA, 15 bp, Homo sapiens
cgctcttgaggttgt

SEQ ID NO: 693804 - DNA, 15 bp, Homo sapiens
gctcttgaggttgta

SEQ ID NO: 693805 - DNA, 15 bp, Homo sapiens
ctcttgaggttgtaa

SEQ ID NO: 693806 - DNA, 15 bp, Homo sapiens
tcttgaggttgtaat

SEQ ID NO: 693807 - DNA, 15 bp, Homo sapiens
cttgaggttgtaatg

SEQ ID NO: 693808 - DNA, 15 bp, Homo sapiens
ttgaggttgtaatgg

SEQ ID NO: 693809 - DNA, 15 bp, Homo sapiens
tgaggttgtaatggc

SEQ ID NO: 693810 - DNA, 15 bp, Homo sapiens
gaggttgtaatggcc

SEQ ID NO: 693811 - DNA, 15 bp, Homo sapiens
aggttgtaatggcca

SEQ ID NO: 693812 - DNA, 15 bp, Homo sapiens
ggttgtaatggccac

SEQ ID NO: 693813 - DNA, 15 bp, Homo sapiens
gttgtaatggccaca

SEQ ID NO: 693814 - DNA, 15 bp, Homo sapiens
ttgtaatggccacat

SEQ ID NO: 693815 - DNA, 15 bp, Homo sapiens
tgtaatggccacata

SEQ ID NO: 693816 - DNA, 15 bp, Homo sapiens
gtaatggccacatat

SEQ ID NO: 693817 - DNA, 15 bp, Homo sapiens
taatggccacatata

SEQ ID NO: 693818 - DNA, 15 bp, Homo sapiens
aatggccacatatag

SEQ ID NO: 693819 - DNA, 15 bp, Homo sapiens
atggccacatatagc

SEQ ID NO: 693820 - DNA, 15 bp, Homo sapiens
tggccacatatagca

SEQ ID NO: 693821 - DNA, 15 bp, Homo sapiens
ggccacatatagcag

SEQ ID NO: 693822 - DNA, 15 bp, Homo sapiens
gccacatatagcagt

SEQ ID NO: 693823 - DNA, 15 bp, Homo sapiens
ccacatatagcagta

SEQ ID NO: 693824 - DNA, 15 bp, Homo sapiens
cacatatagcagtaa

SEQ ID NO: 693825 - DNA, 15 bp, Homo sapiens
acatatagcagtaag

SEQ ID NO: 693826 - DNA, 15 bp, Homo sapiens
catatagcagtaagt

SEQ ID NO: 693827 - DNA, 15 bp, Homo sapiens
atatagcagtaagtt

SEQ ID NO: 693828 - DNA, 15 bp, Homo sapiens
tatagcagtaagtta

SEQ ID NO: 693829 - DNA, 15 bp, Homo sapiens
atagcagtaagttaa

SEQ ID NO: 693830 - DNA, 15 bp, Homo sapiens
tagcagtaagttaaa

SEQ ID NO: 693831 - DNA, 15 bp, Homo sapiens
agcagtaagttaaat

SEQ ID NO: 693832 - DNA, 15 bp, Homo sapiens
gcagtaagttaaatt

SEQ ID NO: 693833 - DNA, 15 bp, Homo sapiens
cagtaagttaaattt

SEQ ID NO: 693834 - DNA, 15 bp, Homo sapiens
agtaagttaaatttt

SEQ ID NO: 693835 - DNA, 15 bp, Homo sapiens
gtaagttaaattttc

SEQ ID NO: 693836 - DNA, 15 bp, Homo sapiens
taagttaaattttca

SEQ ID NO: 693837 - DNA, 15 bp, Homo sapiens
aagttaaattttcat

SEQ ID NO: 693838 - DNA, 15 bp, Homo sapiens
agttaaattttcata

SEQ ID NO: 693839 - DNA, 15 bp, Homo sapiens
gttaaattttcataa

SEQ ID NO: 693840 - DNA, 15 bp, Homo sapiens
ttaaattttcataaa

SEQ ID NO: 693841 - DNA, 15 bp, Homo sapiens
taaattttcataaat

SEQ ID NO: 693842 - DNA, 15 bp, Homo sapiens
aaattttcataaata

SEQ ID NO: 693843 - DNA, 15 bp, Homo sapiens
aattttcataaataa

SEQ ID NO: 693844 - DNA, 15 bp, Homo sapiens
attttcataaataaa

SEQ ID NO: 693845 - DNA, 15 bp, Homo sapiens
ttttcataaataaac

SEQ ID NO: 693846 - DNA, 15 bp, Homo sapiens
tttcataaataaaca

SEQ ID NO: 693847 - DNA, 15 bp, Homo sapiens
ttcataaataaacac

SEQ ID NO: 693848 - DNA, 15 bp, Homo sapiens
tcataaataaacact

SEQ ID NO: 693849 - DNA, 15 bp, Homo sapiens
cataaataaacactt

SEQ ID NO: 693850 - DNA, 15 bp, Homo sapiens
ataaataaacacttt

SEQ ID NO: 693851 - DNA, 15 bp, Homo sapiens
taaataaacactttt

SEQ ID NO: 693852 - DNA, 15 bp, Homo sapiens
aaataaacacttttg

SEQ ID NO: 693853 - DNA, 15 bp, Homo sapiens
aataaacacttttgt

SEQ ID NO: 693854 - DNA, 15 bp, Homo sapiens
ataaacacttttgtt

SEQ ID NO: 693855 - DNA, 15 bp, Homo sapiens
taaacacttttgttc

SEQ ID NO: 693856 - DNA, 15 bp, Homo sapiens
aaacacttttgttca

SEQ ID NO: 693857 - DNA, 15 bp, Homo sapiens
aacacttttgttcaa

SEQ ID NO: 693858 - DNA, 15 bp, Homo sapiens
acacttttgttcaat

SEQ ID NO: 693859 - DNA, 15 bp, Homo sapiens
cacttttgttcaatt

SEQ ID NO: 693860 - DNA, 15 bp, Homo sapiens
acttttgttcaattt

SEQ ID NO: 693861 - DNA, 15 bp, Homo sapiens
cttttgttcaattta

SEQ ID NO: 693862 - DNA, 15 bp, Homo sapiens
ttttgttcaatttaa

SEQ ID NO: 693863 - DNA, 15 bp, Homo sapiens
tttgttcaatttaaa

SEQ ID NO: 693864 - DNA, 15 bp, Homo sapiens
ttgttcaatttaaag

SEQ ID NO: 693865 - DNA, 15 bp, Homo sapiens
tgttcaatttaaagt

SEQ ID NO: 693866 - DNA, 15 bp, Homo sapiens
gttcaatttaaagtt

SEQ ID NO: 693867 - DNA, 15 bp, Homo sapiens
ttcaatttaaagtta

SEQ ID NO: 693868 - DNA, 15 bp, Homo sapiens
tcaatttaaagttaa

SEQ ID NO: 693869 - DNA, 15 bp, Homo sapiens
caatttaaagttaaa

SEQ ID NO: 693870 - DNA, 15 bp, Homo sapiens
aatttaaagttaaaa

SEQ ID NO: 693871 - DNA, 15 bp, Homo sapiens
atttaaagttaaaat

SEQ ID NO: 693872 - DNA, 15 bp, Homo sapiens
tttaaagttaaaatg

SEQ ID NO: 693873 - DNA, 15 bp, Homo sapiens
ttaaagttaaaatgt

SEQ ID NO: 693874 - DNA, 15 bp, Homo sapiens
taaagttaaaatgtg

SEQ ID NO: 693875 - DNA, 15 bp, Homo sapiens
aaagttaaaatgtgg

SEQ ID NO: 693876 - DNA, 15 bp, Homo sapiens
aagttaaaatgtggt

SEQ ID NO: 693877 - DNA, 15 bp, Homo sapiens
agttaaaatgtggtg

SEQ ID NO: 693878 - DNA, 15 bp, Homo sapiens
gttaaaatgtggtgt

SEQ ID NO: 693879 - DNA, 15 bp, Homo sapiens
ttaaaatgtggtgtg

SEQ ID NO: 693880 - DNA, 15 bp, Homo sapiens
taaaatgtggtgtgt

SEQ ID NO: 693881 - DNA, 15 bp, Homo sapiens
aaaatgtggtgtgtt

SEQ ID NO: 693882 - DNA, 15 bp, Homo sapiens
aaatgtggtgtgttt

SEQ ID NO: 693883 - DNA, 15 bp, Homo sapiens
aatgtggtgtgtttc

SEQ ID NO: 693884 - DNA, 15 bp, Homo sapiens
atgtggtgtgtttct

SEQ ID NO: 693885 - DNA, 15 bp, Homo sapiens
tgtggtgtgtttctt

SEQ ID NO: 693886 - DNA, 15 bp, Homo sapiens
gtggtgtgtttcttt

SEQ ID NO: 693887 - DNA, 15 bp, Homo sapiens
tggtgtgtttctttg

SEQ ID NO: 693888 - DNA, 15 bp, Homo sapiens
ggtgtgtttctttgg

SEQ ID NO: 693889 - DNA, 15 bp, Homo sapiens
gtgtgtttctttggt

SEQ ID NO: 693890 - DNA, 15 bp, Homo sapiens
tgtgtttctttggtc

SEQ ID NO: 693891 - DNA, 15 bp, Homo sapiens
gtgtttctttggtcg

SEQ ID NO: 693892 - DNA, 15 bp, Homo sapiens
tgtttctttggtcgg

SEQ ID NO: 693893 - DNA, 15 bp, Homo sapiens
gtttctttggtcggg

SEQ ID NO: 693894 - DNA, 15 bp, Homo sapiens
tttctttggtcgggg

SEQ ID NO: 693895 - DNA, 15 bp, Homo sapiens
ttctttggtcggggg

SEQ ID NO: 693896 - DNA, 15 bp, Homo sapiens
tctttggtcggggga

SEQ ID NO: 693897 - DNA, 15 bp, Homo sapiens
ctttggtcgggggag

SEQ ID NO: 693898 - DNA, 15 bp, Homo sapiens
tttggtcgggggaga

SEQ ID NO: 693899 - DNA, 15 bp, Homo sapiens
ttggtcgggggagag

SEQ ID NO: 693900 - DNA, 15 bp, Homo sapiens
tggtcgggggagagg

SEQ ID NO: 693901 - DNA, 15 bp, Homo sapiens
ggtcgggggagaggg

SEQ ID NO: 693902 - DNA, 15 bp, Homo sapiens
gtcgggggagaggga

SEQ ID NO: 693903 - DNA, 15 bp, Homo sapiens
tcgggggagagggat

SEQ ID NO: 693904 - DNA, 15 bp, Homo sapiens
cgggggagagggata

SEQ ID NO: 693905 - DNA, 15 bp, Homo sapiens
gggggagagggatag

SEQ ID NO: 693906 - DNA, 15 bp, Homo sapiens
ggggagagggatagt

SEQ ID NO: 693907 - DNA, 15 bp, Homo sapiens
gggagagggatagtg

SEQ ID NO: 693908 - DNA, 15 bp, Homo sapiens
ggagagggatagtgt

SEQ ID NO: 693909 - DNA, 15 bp, Homo sapiens
gagagggatagtgtg

SEQ ID NO: 693910 - DNA, 15 bp, Homo sapiens
agagggatagtgtga

SEQ ID NO: 693911 - DNA, 15 bp, Homo sapiens
gagggatagtgtgag

SEQ ID NO: 693912 - DNA, 15 bp, Homo sapiens
agggatagtgtgagg

SEQ ID NO: 693913 - DNA, 15 bp, Homo sapiens
gggatagtgtgaggt

SEQ ID NO: 693914 - DNA, 15 bp, Homo sapiens
ggatagtgtgaggtt

SEQ ID NO: 693915 - DNA, 15 bp, Homo sapiens
gatagtgtgaggtta

SEQ ID NO: 693916 - DNA, 15 bp, Homo sapiens
atagtgtgaggttaa

SEQ ID NO: 693917 - DNA, 15 bp, Homo sapiens
tagtgtgaggttaag

SEQ ID NO: 693918 - DNA, 15 bp, Homo sapiens
agtgtgaggttaagg

SEQ ID NO: 693919 - DNA, 15 bp, Homo sapiens
gtgtgaggttaagga

SEQ ID NO: 693920 - DNA, 15 bp, Homo sapiens
tgtgaggttaaggag

SEQ ID NO: 693921 - DNA, 15 bp, Homo sapiens
gtgaggttaaggaga

SEQ ID NO: 693922 - DNA, 15 bp, Homo sapiens
tgaggttaaggagaa

SEQ ID NO: 693923 - DNA, 15 bp, Homo sapiens
gaggttaaggagaag

SEQ ID NO: 693924 - DNA, 15 bp, Homo sapiens
aggttaaggagaagg

SEQ ID NO: 693925 - DNA, 15 bp, Homo sapiens
ggttaaggagaagga

SEQ ID NO: 693926 - DNA, 15 bp, Homo sapiens
gttaaggagaaggaa

SEQ ID NO: 693927 - DNA, 15 bp, Homo sapiens
ttaaggagaaggaat

SEQ ID NO: 693928 - DNA, 15 bp, Homo sapiens
taaggagaaggaatg

SEQ ID NO: 693929 - DNA, 15 bp, Homo sapiens
aaggagaaggaatgc

SEQ ID NO: 693930 - DNA, 15 bp, Homo sapiens
aggagaaggaatgct

SEQ ID NO: 693931 - DNA, 15 bp, Homo sapiens
ggagaaggaatgctt

SEQ ID NO: 693932 - DNA, 15 bp, Homo sapiens
gagaaggaatgctta

SEQ ID NO: 693933 - DNA, 15 bp, Homo sapiens
agaaggaatgcttat

SEQ ID NO: 693934 - DNA, 15 bp, Homo sapiens
gaaggaatgcttatt

SEQ ID NO: 693935 - DNA, 15 bp, Homo sapiens
aaggaatgcttattt

SEQ ID NO: 693936 - DNA, 15 bp, Homo sapiens
aggaatgcttatttt

SEQ ID NO: 693937 - DNA, 15 bp, Homo sapiens
ggaatgcttatttta

SEQ ID NO: 693938 - DNA, 15 bp, Homo sapiens
gaatgcttattttag

SEQ ID NO: 693939 - DNA, 15 bp, Homo sapiens
aatgcttattttaga

SEQ ID NO: 693940 - DNA, 15 bp, Homo sapiens
atgcttattttagat

SEQ ID NO: 693941 - DNA, 15 bp, Homo sapiens
tgcttattttagatc

SEQ ID NO: 693942 - DNA, 15 bp, Homo sapiens
gcttattttagatca

SEQ ID NO: 693943 - DNA, 15 bp, Homo sapiens
cttattttagatcac

SEQ ID NO: 693944 - DNA, 15 bp, Homo sapiens
ttattttagatcact

SEQ ID NO: 693945 - DNA, 15 bp, Homo sapiens
tattttagatcacta

SEQ ID NO: 693946 - DNA, 15 bp, Homo sapiens
attttagatcactat

SEQ ID NO: 693947 - DNA, 15 bp, Homo sapiens
ttttagatcactata

SEQ ID NO: 693948 - DNA, 15 bp, Homo sapiens
tttagatcactatat

SEQ ID NO: 693949 - DNA, 15 bp, Homo sapiens
ttagatcactatata

SEQ ID NO: 693950 - DNA, 15 bp, Homo sapiens
tagatcactatatac

SEQ ID NO: 693951 - DNA, 15 bp, Homo sapiens
agatcactatatact

SEQ ID NO: 693952 - DNA, 15 bp, Homo sapiens
gatcactatatactg

SEQ ID NO: 693953 - DNA, 15 bp, Homo sapiens
atcactatatactga

SEQ ID NO: 693954 - DNA, 15 bp, Homo sapiens
tcactatatactgaa

SEQ ID NO: 693955 - DNA, 15 bp, Homo sapiens
cactatatactgaag

SEQ ID NO: 693956 - DNA, 15 bp, Homo sapiens
actatatactgaaga

SEQ ID NO: 693957 - DNA, 15 bp, Homo sapiens
ctatatactgaagaa

SEQ ID NO: 693958 - DNA, 15 bp, Homo sapiens
tatatactgaagaat

SEQ ID NO: 693959 - DNA, 15 bp, Homo sapiens
atatactgaagaatg

SEQ ID NO: 693960 - DNA, 15 bp, Homo sapiens
tatactgaagaatgt

SEQ ID NO: 693961 - DNA, 15 bp, Homo sapiens
atactgaagaatgta

SEQ ID NO: 693962 - DNA, 15 bp, Homo sapiens
tactgaagaatgtaa

SEQ ID NO: 693963 - DNA, 15 bp, Homo sapiens
actgaagaatgtaat

SEQ ID NO: 693964 - DNA, 15 bp, Homo sapiens
ctgaagaatgtaatt

SEQ ID NO: 693965 - DNA, 15 bp, Homo sapiens
tgaagaatgtaattg

SEQ ID NO: 693966 - DNA, 15 bp, Homo sapiens
gaagaatgtaattgg

SEQ ID NO: 693967 - DNA, 15 bp, Homo sapiens
aagaatgtaattggt

SEQ ID NO: 693968 - DNA, 15 bp, Homo sapiens
agaatgtaattggtc

SEQ ID NO: 693969 - DNA, 15 bp, Homo sapiens
gaatgtaattggtca

SEQ ID NO: 693970 - DNA, 15 bp, Homo sapiens
aatgtaattggtcat

SEQ ID NO: 693971 - DNA, 15 bp, Homo sapiens
atgtaattggtcatt

SEQ ID NO: 693972 - DNA, 15 bp, Homo sapiens
tgtaattggtcatta

SEQ ID NO: 693973 - DNA, 15 bp, Homo sapiens
gtaattggtcattat

SEQ ID NO: 693974 - DNA, 15 bp, Homo sapiens
taattggtcattata

SEQ ID NO: 693975 - DNA, 15 bp, Homo sapiens
aattggtcattataa

SEQ ID NO: 693976 - DNA, 15 bp, Homo sapiens
attggtcattataag

SEQ ID NO: 693977 - DNA, 15 bp, Homo sapiens
ttggtcattataagc

SEQ ID NO: 693978 - DNA, 15 bp, Homo sapiens
tggtcattataagcc

SEQ ID NO: 693979 - DNA, 15 bp, Homo sapiens
ggtcattataagcca

SEQ ID NO: 693980 - DNA, 15 bp, Homo sapiens
gtcattataagccat

SEQ ID NO: 693981 - DNA, 15 bp, Homo sapiens
tcattataagccatt

SEQ ID NO: 693982 - DNA, 15 bp, Homo sapiens
cattataagccattt

SEQ ID NO: 693983 - DNA, 15 bp, Homo sapiens
attataagccattta

SEQ ID NO: 693984 - DNA, 15 bp, Homo sapiens
ttataagccatttaa

SEQ ID NO: 693985 - DNA, 15 bp, Homo sapiens
tataagccatttaag

SEQ ID NO: 693986 - DNA, 15 bp, Homo sapiens
ataagccatttaaga

SEQ ID NO: 693987 - DNA, 15 bp, Homo sapiens
taagccatttaagag

SEQ ID NO: 693988 - DNA, 15 bp, Homo sapiens
aagccatttaagagg

SEQ ID NO: 693989 - DNA, 15 bp, Homo sapiens
agccatttaagaggc

SEQ ID NO: 693990 - DNA, 15 bp, Homo sapiens
gccatttaagaggct

SEQ ID NO: 693991 - DNA, 15 bp, Homo sapiens
ccatttaagaggctt

SEQ ID NO: 693992 - DNA, 15 bp, Homo sapiens
catttaagaggctta

SEQ ID NO: 693993 - DNA, 15 bp, Homo sapiens
atttaagaggcttat

SEQ ID NO: 693994 - DNA, 15 bp, Homo sapiens
tttaagaggcttatt

SEQ ID NO: 693995 - DNA, 15 bp, Homo sapiens
ttaagaggcttattt

SEQ ID NO: 693996 - DNA, 15 bp, Homo sapiens
taagaggcttatttg

SEQ ID NO: 693997 - DNA, 15 bp, Homo sapiens
aagaggcttatttga

SEQ ID NO: 693998 - DNA, 15 bp, Homo sapiens
agaggcttatttgag

SEQ ID NO: 693999 - DNA, 15 bp, Homo sapiens
gaggcttatttgagt

SEQ ID NO: 694000 - DNA, 15 bp, Homo sapiens
aggcttatttgagtt

SEQ ID NO: 694001 - DNA, 15 bp, Homo sapiens
ggcttatttgagtta

SEQ ID NO: 694002 - DNA, 15 bp, Homo sapiens
gcttatttgagttat

SEQ ID NO: 694003 - DNA, 15 bp, Homo sapiens
cttatttgagttatt

SEQ ID NO: 694004 - DNA, 15 bp, Homo sapiens
ttatttgagttattt

SEQ ID NO: 694005 - DNA, 15 bp, Homo sapiens
tatttgagttatttg

SEQ ID NO: 694006 - DNA, 15 bp, Homo sapiens
atttgagttatttga

SEQ ID NO: 694007 - DNA, 15 bp, Homo sapiens
tttgagttatttgag

SEQ ID NO: 694008 - DNA, 15 bp, Homo sapiens
ttgagttatttgagg

SEQ ID NO: 694009 - DNA, 15 bp, Homo sapiens
tgagttatttgaggc

SEQ ID NO: 694010 - DNA, 15 bp, Homo sapiens
gagttatttgaggcc

SEQ ID NO: 694011 - DNA, 15 bp, Homo sapiens
agttatttgaggcca

SEQ ID NO: 694012 - DNA, 15 bp, Homo sapiens
gttatttgaggccat

SEQ ID NO: 694013 - DNA, 15 bp, Homo sapiens
ttatttgaggccatc

SEQ ID NO: 694014 - DNA, 15 bp, Homo sapiens
tatttgaggccatct

SEQ ID NO: 694015 - DNA, 15 bp, Homo sapiens
atttgaggccatctt

SEQ ID NO: 694016 - DNA, 15 bp, Homo sapiens
tttgaggccatcttg

SEQ ID NO: 694017 - DNA, 15 bp, Homo sapiens
ttgaggccatcttgg

SEQ ID NO: 694018 - DNA, 15 bp, Homo sapiens
tgaggccatcttggg

SEQ ID NO: 694019 - DNA, 15 bp, Homo sapiens
gaggccatcttgggg

SEQ ID NO: 694020 - DNA, 15 bp, Homo sapiens
aggccatcttgggga

SEQ ID NO: 694021 - DNA, 15 bp, Homo sapiens
ggccatcttggggat

SEQ ID NO: 694022 - DNA, 15 bp, Homo sapiens
gccatcttggggata

SEQ ID NO: 694023 - DNA, 15 bp, Homo sapiens
ccatcttggggataa

SEQ ID NO: 694024 - DNA, 15 bp, Homo sapiens
catcttggggataat

SEQ ID NO: 694025 - DNA, 15 bp, Homo sapiens
atcttggggataata

SEQ ID NO: 694026 - DNA, 15 bp, Homo sapiens
tcttggggataatat

SEQ ID NO: 694027 - DNA, 15 bp, Homo sapiens
cttggggataatatt

SEQ ID NO: 694028 - DNA, 15 bp, Homo sapiens
ttggggataatattt

SEQ ID NO: 694029 - DNA, 15 bp, Homo sapiens
tggggataatatttc

SEQ ID NO: 694030 - DNA, 15 bp, Homo sapiens
ggggataatatttca

SEQ ID NO: 694031 - DNA, 15 bp, Homo sapiens
gggataatatttcac

SEQ ID NO: 694032 - DNA, 15 bp, Homo sapiens
ggataatatttcact

SEQ ID NO: 694033 - DNA, 15 bp, Homo sapiens
gataatatttcacta

SEQ ID NO: 694034 - DNA, 15 bp, Homo sapiens
ataatatttcactag

SEQ ID NO: 694035 - DNA, 15 bp, Homo sapiens
taatatttcactagg

SEQ ID NO: 694036 - DNA, 15 bp, Homo sapiens
aatatttcactaggc

SEQ ID NO: 694037 - DNA, 15 bp, Homo sapiens
atatttcactaggct

SEQ ID NO: 694038 - DNA, 15 bp, Homo sapiens
tatttcactaggctt

SEQ ID NO: 694039 - DNA, 15 bp, Homo sapiens
atttcactaggcttc

SEQ ID NO: 694040 - DNA, 15 bp, Homo sapiens
tttcactaggcttct

SEQ ID NO: 694041 - DNA, 15 bp, Homo sapiens
ttcactaggcttctc

SEQ ID NO: 694042 - DNA, 15 bp, Homo sapiens
tcactaggcttctct

SEQ ID NO: 694043 - DNA, 15 bp, Homo sapiens
cactaggcttctctt

SEQ ID NO: 694044 - DNA, 15 bp, Homo sapiens
actaggcttctcttc

SEQ ID NO: 694045 - DNA, 15 bp, Homo sapiens
ctaggcttctcttct

SEQ ID NO: 694046 - DNA, 15 bp, Homo sapiens
taggcttctcttctg

SEQ ID NO: 694047 - DNA, 15 bp, Homo sapiens
aggcttctcttctga

SEQ ID NO: 694048 - DNA, 15 bp, Homo sapiens
ggcttctcttctgag

SEQ ID NO: 694049 - DNA, 15 bp, Homo sapiens
gcttctcttctgagt

SEQ ID NO: 694050 - DNA, 15 bp, Homo sapiens
cttctcttctgagta

SEQ ID NO: 694051 - DNA, 15 bp, Homo sapiens
ttctcttctgagtat

SEQ ID NO: 694052 - DNA, 15 bp, Homo sapiens
tctcttctgagtata

SEQ ID NO: 694053 - DNA, 15 bp, Homo sapiens
ctcttctgagtatac

SEQ ID NO: 694054 - DNA, 15 bp, Homo sapiens
tcttctgagtatact

SEQ ID NO: 694055 - DNA, 15 bp, Homo sapiens
cttctgagtatactg

SEQ ID NO: 694056 - DNA, 15 bp, Homo sapiens
ttctgagtatactgg

SEQ ID NO: 694057 - DNA, 15 bp, Homo sapiens
tctgagtatactggt

SEQ ID NO: 694058 - DNA, 15 bp, Homo sapiens
ctgagtatactggta

SEQ ID NO: 694059 - DNA, 15 bp, Homo sapiens
tgagtatactggtat

SEQ ID NO: 694060 - DNA, 15 bp, Homo sapiens
gagtatactggtata

SEQ ID NO: 694061 - DNA, 15 bp, Homo sapiens
agtatactggtatac

SEQ ID NO: 694062 - DNA, 15 bp, Homo sapiens
gtatactggtatact

SEQ ID NO: 694063 - DNA, 15 bp, Homo sapiens
tatactggtatactg

SEQ ID NO: 694064 - DNA, 15 bp, Homo sapiens
atactggtatactga

SEQ ID NO: 694065 - DNA, 15 bp, Homo sapiens
tactggtatactgaa

SEQ ID NO: 694066 - DNA, 15 bp, Homo sapiens
actggtatactgaat

SEQ ID NO: 694067 - DNA, 15 bp, Homo sapiens
ctggtatactgaatc

SEQ ID NO: 694068 - DNA, 15 bp, Homo sapiens
tggtatactgaatcc

SEQ ID NO: 694069 - DNA, 15 bp, Homo sapiens
ggtatactgaatcca

SEQ ID NO: 694070 - DNA, 15 bp, Homo sapiens
gtatactgaatccaa

SEQ ID NO: 694071 - DNA, 15 bp, Homo sapiens
tatactgaatccaaa

SEQ ID NO: 694072 - DNA, 15 bp, Homo sapiens
atactgaatccaaaa

SEQ ID NO: 694073 - DNA, 15 bp, Homo sapiens
tactgaatccaaaaa

SEQ ID NO: 694074 - DNA, 15 bp, Homo sapiens
actgaatccaaaaaa

SEQ ID NO: 694075 - DNA, 15 bp, Homo sapiens
ctgaatccaaaaaag

SEQ ID NO: 694076 - DNA, 15 bp, Homo sapiens
tgaatccaaaaaagg

SEQ ID NO: 694077 - DNA, 15 bp, Homo sapiens
gaatccaaaaaaggt

SEQ ID NO: 694078 - DNA, 15 bp, Homo sapiens
aatccaaaaaaggta

SEQ ID NO: 694079 - DNA, 15 bp, Homo sapiens
atccaaaaaaggtac

SEQ ID NO: 694080 - DNA, 15 bp, Homo sapiens
tccaaaaaaggtact

SEQ ID NO: 694081 - DNA, 15 bp, Homo sapiens
ccaaaaaaggtactt

SEQ ID NO: 694082 - DNA, 15 bp, Homo sapiens
caaaaaaggtacttt

SEQ ID NO: 694083 - DNA, 15 bp, Homo sapiens
aaaaaaggtactttt

SEQ ID NO: 694084 - DNA, 15 bp, Homo sapiens
aaaaaggtacttttt

SEQ ID NO: 694085 - DNA, 15 bp, Homo sapiens
aaaaggtactttttg

SEQ ID NO: 694086 - DNA, 15 bp, Homo sapiens
aaaggtactttttga

SEQ ID NO: 694087 - DNA, 15 bp, Homo sapiens
aaggtactttttgaa

SEQ ID NO: 694088 - DNA, 15 bp, Homo sapiens
aggtactttttgaaa

SEQ ID NO: 694089 - DNA, 15 bp, Homo sapiens
ggtactttttgaaat

SEQ ID NO: 694090 - DNA, 15 bp, Homo sapiens
gtactttttgaaatc

SEQ ID NO: 694091 - DNA, 15 bp, Homo sapiens
tactttttgaaatcc

SEQ ID NO: 694092 - DNA, 15 bp, Homo sapiens
actttttgaaatccc

SEQ ID NO: 694093 - DNA, 15 bp, Homo sapiens
ctttttgaaatccct

SEQ ID NO: 694094 - DNA, 15 bp, Homo sapiens
tttttgaaatccctc

SEQ ID NO: 694095 - DNA, 15 bp, Homo sapiens
ttttgaaatccctcc

SEQ ID NO: 694096 - DNA, 15 bp, Homo sapiens
tttgaaatccctccg

SEQ ID NO: 694097 - DNA, 15 bp, Homo sapiens
ttgaaatccctccga

SEQ ID NO: 694098 - DNA, 15 bp, Homo sapiens
tgaaatccctccgaa

SEQ ID NO: 694099 - DNA, 15 bp, Homo sapiens
gaaatccctccgaag

SEQ ID NO: 694100 - DNA, 15 bp, Homo sapiens
aaatccctccgaaga

SEQ ID NO: 694101 - DNA, 15 bp, Homo sapiens
aatccctccgaagac

SEQ ID NO: 694102 - DNA, 15 bp, Homo sapiens
atccctccgaagacc

SEQ ID NO: 694103 - DNA, 15 bp, Homo sapiens
tccctccgaagacct

SEQ ID NO: 694104 - DNA, 15 bp, Homo sapiens
ccctccgaagacctt

SEQ ID NO: 694105 - DNA, 15 bp, Homo sapiens
cctccgaagaccttt

SEQ ID NO: 694106 - DNA, 15 bp, Homo sapiens
ctccgaagacctttg

SEQ ID NO: 694107 - DNA, 15 bp, Homo sapiens
tccgaagacctttga

SEQ ID NO: 694108 - DNA, 15 bp, Homo sapiens
ccgaagacctttgag

SEQ ID NO: 694109 - DNA, 15 bp, Homo sapiens
cgaagacctttgaga

SEQ ID NO: 694110 - DNA, 15 bp, Homo sapiens
gaagacctttgagat

SEQ ID NO: 694111 - DNA, 15 bp, Homo sapiens
aagacctttgagatt

SEQ ID NO: 694112 - DNA, 15 bp, Homo sapiens
agacctttgagattg

SEQ ID NO: 694113 - DNA, 15 bp, Homo sapiens
gacctttgagattgt

SEQ ID NO: 694114 - DNA, 15 bp, Homo sapiens
acctttgagattgta

SEQ ID NO: 694115 - DNA, 15 bp, Homo sapiens
cctttgagattgtag

SEQ ID NO: 694116 - DNA, 15 bp, Homo sapiens
ctttgagattgtaga

SEQ ID NO: 694117 - DNA, 15 bp, Homo sapiens
tttgagattgtagag

SEQ ID NO: 694118 - DNA, 15 bp, Homo sapiens
ttgagattgtagagt

SEQ ID NO: 694119 - DNA, 15 bp, Homo sapiens
tgagattgtagagtg

SEQ ID NO: 694120 - DNA, 15 bp, Homo sapiens
gagattgtagagtgc

SEQ ID NO: 694121 - DNA, 15 bp, Homo sapiens
agattgtagagtgcc

SEQ ID NO: 694122 - DNA, 15 bp, Homo sapiens
gattgtagagtgcca

SEQ ID NO: 694123 - DNA, 15 bp, Homo sapiens
attgtagagtgccaa

SEQ ID NO: 694124 - DNA, 15 bp, Homo sapiens
ttgtagagtgccaaa

SEQ ID NO: 694125 - DNA, 15 bp, Homo sapiens
tgtagagtgccaaag

SEQ ID NO: 694126 - DNA, 15 bp, Homo sapiens
gtagagtgccaaagg

SEQ ID NO: 694127 - DNA, 15 bp, Homo sapiens
tagagtgccaaagga

SEQ ID NO: 694128 - DNA, 15 bp, Homo sapiens
agagtgccaaaggag

SEQ ID NO: 694129 - DNA, 15 bp, Homo sapiens
gagtgccaaaggagt

SEQ ID NO: 694130 - DNA, 15 bp, Homo sapiens
agtgccaaaggagta

SEQ ID NO: 694131 - DNA, 15 bp, Homo sapiens
gtgccaaaggagtat

SEQ ID NO: 694132 - DNA, 15 bp, Homo sapiens
tgccaaaggagtatt

SEQ ID NO: 694133 - DNA, 15 bp, Homo sapiens
gccaaaggagtattc

SEQ ID NO: 694134 - DNA, 15 bp, Homo sapiens
ccaaaggagtattca

SEQ ID NO: 694135 - DNA, 15 bp, Homo sapiens
caaaggagtattcaa

SEQ ID NO: 694136 - DNA, 15 bp, Homo sapiens
aaaggagtattcaag

SEQ ID NO: 694137 - DNA, 15 bp, Homo sapiens
aaggagtattcaaga

SEQ ID NO: 694138 - DNA, 15 bp, Homo sapiens
aggagtattcaagag

SEQ ID NO: 694139 - DNA, 15 bp, Homo sapiens
ggagtattcaagagt

SEQ ID NO: 694140 - DNA, 15 bp, Homo sapiens
gagtattcaagagtg

SEQ ID NO: 694141 - DNA, 15 bp, Homo sapiens
agtattcaagagtgg

SEQ ID NO: 694142 - DNA, 15 bp, Homo sapiens
gtattcaagagtggc

SEQ ID NO: 694143 - DNA, 15 bp, Homo sapiens
tattcaagagtggcc

SEQ ID NO: 694144 - DNA, 15 bp, Homo sapiens
attcaagagtggcct

SEQ ID NO: 694145 - DNA, 15 bp, Homo sapiens
ttcaagagtggcctc

SEQ ID NO: 694146 - DNA, 15 bp, Homo sapiens
tcaagagtggcctct

SEQ ID NO: 694147 - DNA, 15 bp, Homo sapiens
caagagtggcctcta

SEQ ID NO: 694148 - DNA, 15 bp, Homo sapiens
aagagtggcctctac

SEQ ID NO: 694149 - DNA, 15 bp, Homo sapiens
agagtggcctctact

SEQ ID NO: 694150 - DNA, 15 bp, Homo sapiens
gagtggcctctactg

SEQ ID NO: 694151 - DNA, 15 bp, Homo sapiens
agtggcctctactga

SEQ ID NO: 694152 - DNA, 15 bp, Homo sapiens
gtggcctctactgat

SEQ ID NO: 694153 - DNA, 15 bp, Homo sapiens
tggcctctactgata

SEQ ID NO: 694154 - DNA, 15 bp, Homo sapiens
ggcctctactgatat

SEQ ID NO: 694155 - DNA, 15 bp, Homo sapiens
gcctctactgatatg

SEQ ID NO: 694156 - DNA, 15 bp, Homo sapiens
cctctactgatatgg

SEQ ID NO: 694157 - DNA, 15 bp, Homo sapiens
ctctactgatatgga

SEQ ID NO: 694158 - DNA, 15 bp, Homo sapiens
tctactgatatggaa

SEQ ID NO: 694159 - DNA, 15 bp, Homo sapiens
ctactgatatggaag

SEQ ID NO: 694160 - DNA, 15 bp, Homo sapiens
tactgatatggaagc

SEQ ID NO: 694161 - DNA, 15 bp, Homo sapiens
actgatatggaagca

SEQ ID NO: 694162 - DNA, 15 bp, Homo sapiens
ctgatatggaagcac

SEQ ID NO: 694163 - DNA, 15 bp, Homo sapiens
tgatatggaagcact

SEQ ID NO: 694164 - DNA, 15 bp, Homo sapiens
gatatggaagcactg

SEQ ID NO: 694165 - DNA, 15 bp, Homo sapiens
atatggaagcactgc

SEQ ID NO: 694166 - DNA, 15 bp, Homo sapiens
tatggaagcactgct

SEQ ID NO: 694167 - DNA, 15 bp, Homo sapiens
atggaagcactgctg

SEQ ID NO: 694168 - DNA, 15 bp, Homo sapiens
tggaagcactgctgt

SEQ ID NO: 694169 - DNA, 15 bp, Homo sapiens
ggaagcactgctgta

SEQ ID NO: 694170 - DNA, 15 bp, Homo sapiens
gaagcactgctgtaa

SEQ ID NO: 694171 - DNA, 15 bp, Homo sapiens
aagcactgctgtaac

SEQ ID NO: 694172 - DNA, 15 bp, Homo sapiens
agcactgctgtaacc

SEQ ID NO: 694173 - DNA, 15 bp, Homo sapiens
gcactgctgtaacct

SEQ ID NO: 694174 - DNA, 15 bp, Homo sapiens
cactgctgtaacctc

SEQ ID NO: 694175 - DNA, 15 bp, Homo sapiens
actgctgtaacctcc

SEQ ID NO: 694176 - DNA, 15 bp, Homo sapiens
ctgctgtaacctcca

SEQ ID NO: 694177 - DNA, 15 bp, Homo sapiens
tgctgtaacctccat

SEQ ID NO: 694178 - DNA, 15 bp, Homo sapiens
gctgtaacctccatg

SEQ ID NO: 694179 - DNA, 15 bp, Homo sapiens
ctgtaacctccatgg

SEQ ID NO: 694180 - DNA, 15 bp, Homo sapiens
tgtaacctccatggt

SEQ ID NO: 694181 - DNA, 15 bp, Homo sapiens
gtaacctccatggtt

SEQ ID NO: 694182 - DNA, 15 bp, Homo sapiens
taacctccatggtta

SEQ ID NO: 694183 - DNA, 15 bp, Homo sapiens
aacctccatggttat

SEQ ID NO: 694184 - DNA, 15 bp, Homo sapiens
acctccatggttatg

SEQ ID NO: 694185 - DNA, 15 bp, Homo sapiens
cctccatggttatga

SEQ ID NO: 694186 - DNA, 15 bp, Homo sapiens
ctccatggttatgaa

SEQ ID NO: 694187 - DNA, 15 bp, Homo sapiens
tccatggttatgaaa

SEQ ID NO: 694188 - DNA, 15 bp, Homo sapiens
ccatggttatgaaac

SEQ ID NO: 694189 - DNA, 15 bp, Homo sapiens
catggttatgaaact

SEQ ID NO: 694190 - DNA, 15 bp, Homo sapiens
atggttatgaaacta

SEQ ID NO: 694191 - DNA, 15 bp, Homo sapiens
tggttatgaaactaa

SEQ ID NO: 694192 - DNA, 15 bp, Homo sapiens
ggttatgaaactaaa

SEQ ID NO: 694193 - DNA, 15 bp, Homo sapiens
gttatgaaactaaag

SEQ ID NO: 694194 - DNA, 15 bp, Homo sapiens
ttatgaaactaaaga

SEQ ID NO: 694195 - DNA, 15 bp, Homo sapiens
tatgaaactaaagat

SEQ ID NO: 694196 - DNA, 15 bp, Homo sapiens
atgaaactaaagatt

SEQ ID NO: 694197 - DNA, 15 bp, Homo sapiens
tgaaactaaagattg

SEQ ID NO: 694198 - DNA, 15 bp, Homo sapiens
gaaactaaagattga

SEQ ID NO: 694199 - DNA, 15 bp, Homo sapiens
aaactaaagattgaa

SEQ ID NO: 694200 - DNA, 15 bp, Homo sapiens
aactaaagattgaag

SEQ ID NO: 694201 - DNA, 15 bp, Homo sapiens
actaaagattgaagc

SEQ ID NO: 694202 - DNA, 15 bp, Homo sapiens
ctaaagattgaagct

SEQ ID NO: 694203 - DNA, 15 bp, Homo sapiens
taaagattgaagcta

SEQ ID NO: 694204 - DNA, 15 bp, Homo sapiens
aaagattgaagctag

SEQ ID NO: 694205 - DNA, 15 bp, Homo sapiens
aagattgaagctaga

SEQ ID NO: 694206 - DNA, 15 bp, Homo sapiens
agattgaagctagaa

SEQ ID NO: 694207 - DNA, 15 bp, Homo sapiens
gattgaagctagaat

SEQ ID NO: 694208 - DNA, 15 bp, Homo sapiens
attgaagctagaatc

SEQ ID NO: 694209 - DNA, 15 bp, Homo sapiens
ttgaagctagaatcc

SEQ ID NO: 694210 - DNA, 15 bp, Homo sapiens
tgaagctagaatcca

SEQ ID NO: 694211 - DNA, 15 bp, Homo sapiens
gaagctagaatccac

SEQ ID NO: 694212 - DNA, 15 bp, Homo sapiens
aagctagaatccact

SEQ ID NO: 694213 - DNA, 15 bp, Homo sapiens
agctagaatccactg

SEQ ID NO: 694214 - DNA, 15 bp, Homo sapiens
gctagaatccactgg

SEQ ID NO: 694215 - DNA, 15 bp, Homo sapiens
ctagaatccactgga

SEQ ID NO: 694216 - DNA, 15 bp, Homo sapiens
tagaatccactggat

SEQ ID NO: 694217 - DNA, 15 bp, Homo sapiens
agaatccactggata

SEQ ID NO: 694218 - DNA, 15 bp, Homo sapiens
gaatccactggataa

SEQ ID NO: 694219 - DNA, 15 bp, Homo sapiens
aatccactggataaa

SEQ ID NO: 694220 - DNA, 15 bp, Homo sapiens
atccactggataaac

SEQ ID NO: 694221 - DNA, 15 bp, Homo sapiens
tccactggataaaca

SEQ ID NO: 694222 - DNA, 15 bp, Homo sapiens
ccactggataaacag

SEQ ID NO: 694223 - DNA, 15 bp, Homo sapiens
cactggataaacaga

SEQ ID NO: 694224 - DNA, 15 bp, Homo sapiens
actggataaacagaa

SEQ ID NO: 694225 - DNA, 15 bp, Homo sapiens
ctggataaacagaac

SEQ ID NO: 694226 - DNA, 15 bp, Homo sapiens
tggataaacagaaca

SEQ ID NO: 694227 - DNA, 15 bp, Homo sapiens
ggataaacagaacaa

SEQ ID NO: 694228 - DNA, 15 bp, Homo sapiens
gataaacagaacaaa

SEQ ID NO: 694229 - DNA, 15 bp, Homo sapiens
ataaacagaacaaag

SEQ ID NO: 694230 - DNA, 15 bp, Homo sapiens
taaacagaacaaagg

SEQ ID NO: 694231 - DNA, 15 bp, Homo sapiens
aaacagaacaaaggc

SEQ ID NO: 694232 - DNA, 15 bp, Homo sapiens
aacagaacaaaggcc

SEQ ID NO: 694233 - DNA, 15 bp, Homo sapiens
acagaacaaaggcca

SEQ ID NO: 694234 - DNA, 15 bp, Homo sapiens
cagaacaaaggccaa

SEQ ID NO: 694235 - DNA, 15 bp, Homo sapiens
agaacaaaggccaat

SEQ ID NO: 694236 - DNA, 15 bp, Homo sapiens
gaacaaaggccaatt

SEQ ID NO: 694237 - DNA, 15 bp, Homo sapiens
aacaaaggccaatta

SEQ ID NO: 694238 - DNA, 15 bp, Homo sapiens
acaaaggccaattac

SEQ ID NO: 694239 - DNA, 15 bp, Homo sapiens
caaaggccaattaca

SEQ ID NO: 694240 - DNA, 15 bp, Homo sapiens
aaaggccaattacaa

SEQ ID NO: 694241 - DNA, 15 bp, Homo sapiens
aaggccaattacaat

SEQ ID NO: 694242 - DNA, 15 bp, Homo sapiens
aggccaattacaatg

SEQ ID NO: 694243 - DNA, 15 bp, Homo sapiens
ggccaattacaatgt

SEQ ID NO: 694244 - DNA, 15 bp, Homo sapiens
gccaattacaatgtt

SEQ ID NO: 694245 - DNA, 15 bp, Homo sapiens
ccaattacaatgttt

SEQ ID NO: 694246 - DNA, 15 bp, Homo sapiens
caattacaatgtttt

SEQ ID NO: 694247 - DNA, 15 bp, Homo sapiens
aattacaatgttttt

SEQ ID NO: 694248 - DNA, 15 bp, Homo sapiens
attacaatgttttta

SEQ ID NO: 694249 - DNA, 15 bp, Homo sapiens
ttacaatgtttttaa

SEQ ID NO: 694250 - DNA, 15 bp, Homo sapiens
tacaatgtttttaaa

SEQ ID NO: 694251 - DNA, 15 bp, Homo sapiens
acaatgtttttaaaa

SEQ ID NO: 694252 - DNA, 15 bp, Homo sapiens
caatgtttttaaaaa

SEQ ID NO: 694253 - DNA, 15 bp, Homo sapiens
aatgtttttaaaaac

SEQ ID NO: 694254 - DNA, 15 bp, Homo sapiens
atgtttttaaaaaca

SEQ ID NO: 694255 - DNA, 15 bp, Homo sapiens
tgtttttaaaaacat

SEQ ID NO: 694256 - DNA, 15 bp, Homo sapiens
gtttttaaaaacata

SEQ ID NO: 694257 - DNA, 15 bp, Homo sapiens
tttttaaaaacataa

SEQ ID NO: 694258 - DNA, 15 bp, Homo sapiens
ttttaaaaacataaa

SEQ ID NO: 694259 - DNA, 15 bp, Homo sapiens
tttaaaaacataaat

SEQ ID NO: 694260 - DNA, 15 bp, Homo sapiens
ttaaaaacataaatg

SEQ ID NO: 694261 - DNA, 15 bp, Homo sapiens
taaaaacataaatgt

SEQ ID NO: 694262 - DNA, 15 bp, Homo sapiens
aaaaacataaatgta

SEQ ID NO: 694263 - DNA, 15 bp, Homo sapiens
aaaacataaatgtat

SEQ ID NO: 694264 - DNA, 15 bp, Homo sapiens
aaacataaatgtata

SEQ ID NO: 694265 - DNA, 15 bp, Homo sapiens
aacataaatgtatat

SEQ ID NO: 694266 - DNA, 15 bp, Homo sapiens
acataaatgtatatc

SEQ ID NO: 694267 - DNA, 15 bp, Homo sapiens
cataaatgtatatca

SEQ ID NO: 694268 - DNA, 15 bp, Homo sapiens
ataaatgtatatcac

SEQ ID NO: 694269 - DNA, 15 bp, Homo sapiens
taaatgtatatcact

SEQ ID NO: 694270 - DNA, 15 bp, Homo sapiens
aaatgtatatcactt

SEQ ID NO: 694271 - DNA, 15 bp, Homo sapiens
aatgtatatcacttt

SEQ ID NO: 694272 - DNA, 15 bp, Homo sapiens
atgtatatcactttg

SEQ ID NO: 694273 - DNA, 15 bp, Homo sapiens
tgtatatcactttgc

SEQ ID NO: 694274 - DNA, 15 bp, Homo sapiens
gtatatcactttgca

SEQ ID NO: 694275 - DNA, 15 bp, Homo sapiens
tatatcactttgcaa

SEQ ID NO: 694276 - DNA, 15 bp, Homo sapiens
atatcactttgcaaa

SEQ ID NO: 694277 - DNA, 15 bp, Homo sapiens
tatcactttgcaaat

SEQ ID NO: 694278 - DNA, 15 bp, Homo sapiens
atcactttgcaaatt

SEQ ID NO: 694279 - DNA, 15 bp, Homo sapiens
tcactttgcaaatta

SEQ ID NO: 694280 - DNA, 15 bp, Homo sapiens
cactttgcaaattat

SEQ ID NO: 694281 - DNA, 15 bp, Homo sapiens
actttgcaaattatg

SEQ ID NO: 694282 - DNA, 15 bp, Homo sapiens
ctttgcaaattatgt

SEQ ID NO: 694283 - DNA, 15 bp, Homo sapiens
tttgcaaattatgtt

SEQ ID NO: 694284 - DNA, 15 bp, Homo sapiens
ttgcaaattatgttg

SEQ ID NO: 694285 - DNA, 15 bp, Homo sapiens
tgcaaattatgttgc

SEQ ID NO: 694286 - DNA, 15 bp, Homo sapiens
gcaaattatgttgca

SEQ ID NO: 694287 - DNA, 15 bp, Homo sapiens
caaattatgttgcaa

SEQ ID NO: 694288 - DNA, 15 bp, Homo sapiens
aaattatgttgcaaa

SEQ ID NO: 694289 - DNA, 15 bp, Homo sapiens
aattatgttgcaaat

SEQ ID NO: 694290 - DNA, 15 bp, Homo sapiens
attatgttgcaaatg

SEQ ID NO: 694291 - DNA, 15 bp, Homo sapiens
ttatgttgcaaatgt

SEQ ID NO: 694292 - DNA, 15 bp, Homo sapiens
tatgttgcaaatgtt

SEQ ID NO: 694293 - DNA, 15 bp, Homo sapiens
atgttgcaaatgtta

SEQ ID NO: 694294 - DNA, 15 bp, Homo sapiens
tgttgcaaatgttaa

SEQ ID NO: 694295 - DNA, 15 bp, Homo sapiens
gttgcaaatgttaaa

SEQ ID NO: 694296 - DNA, 15 bp, Homo sapiens
ttgcaaatgttaaaa

SEQ ID NO: 694297 - DNA, 15 bp, Homo sapiens
tgcaaatgttaaaag

SEQ ID NO: 694298 - DNA, 15 bp, Homo sapiens
gcaaatgttaaaaga

SEQ ID NO: 694299 - DNA, 15 bp, Homo sapiens
caaatgttaaaagaa

SEQ ID NO: 694300 - DNA, 15 bp, Homo sapiens
aaatgttaaaagaaa

SEQ ID NO: 694301 - DNA, 15 bp, Homo sapiens
aatgttaaaagaaag

SEQ ID NO: 694302 - DNA, 15 bp, Homo sapiens
atgttaaaagaaagt

SEQ ID NO: 694303 - DNA, 15 bp, Homo sapiens
tgttaaaagaaagtt

SEQ ID NO: 694304 - DNA, 15 bp, Homo sapiens
gttaaaagaaagttt

SEQ ID NO: 694305 - DNA, 15 bp, Homo sapiens
ttaaaagaaagtttt

SEQ ID NO: 694306 - DNA, 15 bp, Homo sapiens
taaaagaaagttttg

SEQ ID NO: 694307 - DNA, 15 bp, Homo sapiens
aaaagaaagttttgc

SEQ ID NO: 694308 - DNA, 15 bp, Homo sapiens
aaagaaagttttgct

SEQ ID NO: 694309 - DNA, 15 bp, Homo sapiens
aagaaagttttgctt

SEQ ID NO: 694310 - DNA, 15 bp, Homo sapiens
agaaagttttgcttg

SEQ ID NO: 694311 - DNA, 15 bp, Homo sapiens
gaaagttttgcttgc

SEQ ID NO: 694312 - DNA, 15 bp, Homo sapiens
aaagttttgcttgca

SEQ ID NO: 694313 - DNA, 15 bp, Homo sapiens
aagttttgcttgcag

SEQ ID NO: 694314 - DNA, 15 bp, Homo sapiens
agttttgcttgcaga

SEQ ID NO: 694315 - DNA, 15 bp, Homo sapiens
gttttgcttgcagaa

SEQ ID NO: 694316 - DNA, 15 bp, Homo sapiens
ttttgcttgcagaaa

SEQ ID NO: 694317 - DNA, 15 bp, Homo sapiens
tttgcttgcagaaac

SEQ ID NO: 694318 - DNA, 15 bp, Homo sapiens
ttgcttgcagaaaca

SEQ ID NO: 694319 - DNA, 15 bp, Homo sapiens
tgcttgcagaaacaa

SEQ ID NO: 694320 - DNA, 15 bp, Homo sapiens
gcttgcagaaacaaa

SEQ ID NO: 694321 - DNA, 15 bp, Homo sapiens
cttgcagaaacaaaa

SEQ ID NO: 694322 - DNA, 15 bp, Homo sapiens
ttgcagaaacaaaag

SEQ ID NO: 694323 - DNA, 15 bp, Homo sapiens
tgcagaaacaaaagg

SEQ ID NO: 694324 - DNA, 15 bp, Homo sapiens
gcagaaacaaaagga

SEQ ID NO: 694325 - DNA, 15 bp, Homo sapiens
cagaaacaaaaggaa

SEQ ID NO: 694326 - DNA, 15 bp, Homo sapiens
agaaacaaaaggaac

SEQ ID NO: 694327 - DNA, 15 bp, Homo sapiens
gaaacaaaaggaaca

SEQ ID NO: 694328 - DNA, 15 bp, Homo sapiens
aaacaaaaggaacat

SEQ ID NO: 694329 - DNA, 15 bp, Homo sapiens
aacaaaaggaacatt

SEQ ID NO: 694330 - DNA, 15 bp, Homo sapiens
acaaaaggaacattt

SEQ ID NO: 694331 - DNA, 15 bp, Homo sapiens
caaaaggaacatttg

SEQ ID NO: 694332 - DNA, 15 bp, Homo sapiens
aaaaggaacatttgt

SEQ ID NO: 694333 - DNA, 15 bp, Homo sapiens
aaaggaacatttgta

SEQ ID NO: 694334 - DNA, 15 bp, Homo sapiens
aaggaacatttgtat

SEQ ID NO: 694335 - DNA, 15 bp, Homo sapiens
aggaacatttgtata

SEQ ID NO: 694336 - DNA, 15 bp, Homo sapiens
ggaacatttgtataa

SEQ ID NO: 694337 - DNA, 15 bp, Homo sapiens
gaacatttgtataag

SEQ ID NO: 694338 - DNA, 15 bp, Homo sapiens
aacatttgtataagg

SEQ ID NO: 694339 - DNA, 15 bp, Homo sapiens
acatttgtataagga

SEQ ID NO: 694340 - DNA, 15 bp, Homo sapiens
catttgtataaggat

SEQ ID NO: 694341 - DNA, 15 bp, Homo sapiens
atttgtataaggatg

SEQ ID NO: 694342 - DNA, 15 bp, Homo sapiens
tttgtataaggatgc

SEQ ID NO: 694343 - DNA, 15 bp, Homo sapiens
ttgtataaggatgca

SEQ ID NO: 694344 - DNA, 15 bp, Homo sapiens
tgtataaggatgcaa

SEQ ID NO: 694345 - DNA, 15 bp, Homo sapiens
gtataaggatgcaaa

SEQ ID NO: 694346 - DNA, 15 bp, Homo sapiens
tataaggatgcaaaa

SEQ ID NO: 694347 - DNA, 15 bp, Homo sapiens
ataaggatgcaaaac

SEQ ID NO: 694348 - DNA, 15 bp, Homo sapiens
taaggatgcaaaaca

SEQ ID NO: 694349 - DNA, 15 bp, Homo sapiens
aaggatgcaaaacac

SEQ ID NO: 694350 - DNA, 15 bp, Homo sapiens
aggatgcaaaacaca

SEQ ID NO: 694351 - DNA, 15 bp, Homo sapiens
ggatgcaaaacacag

SEQ ID NO: 694352 - DNA, 15 bp, Homo sapiens
gatgcaaaacacaga

SEQ ID NO: 694353 - DNA, 15 bp, Homo sapiens
atgcaaaacacagaa

SEQ ID NO: 694354 - DNA, 15 bp, Homo sapiens
tgcaaaacacagaaa

SEQ ID NO: 694355 - DNA, 15 bp, Homo sapiens
gcaaaacacagaaaa

SEQ ID NO: 694356 - DNA, 15 bp, Homo sapiens
caaaacacagaaaaa

SEQ ID NO: 694357 - DNA, 15 bp, Homo sapiens
aaaacacagaaaaag

SEQ ID NO: 694358 - DNA, 15 bp, Homo sapiens
aaacacagaaaaaga

SEQ ID NO: 694359 - DNA, 15 bp, Homo sapiens
aacacagaaaaagag

SEQ ID NO: 694360 - DNA, 15 bp, Homo sapiens
acacagaaaaagagg

SEQ ID NO: 694361 - DNA, 15 bp, Homo sapiens
cacagaaaaagagga

SEQ ID NO: 694362 - DNA, 15 bp, Homo sapiens
acagaaaaagaggaa

SEQ ID NO: 694363 - DNA, 15 bp, Homo sapiens
cagaaaaagaggaac

SEQ ID NO: 694364 - DNA, 15 bp, Homo sapiens
agaaaaagaggaact

SEQ ID NO: 694365 - DNA, 15 bp, Homo sapiens
gaaaaagaggaactt

SEQ ID NO: 694366 - DNA, 15 bp, Homo sapiens
aaaaagaggaacttt

SEQ ID NO: 694367 - DNA, 15 bp, Homo sapiens
aaaagaggaactttt

SEQ ID NO: 694368 - DNA, 15 bp, Homo sapiens
aaagaggaactttta

SEQ ID NO: 694369 - DNA, 15 bp, Homo sapiens
aagaggaacttttag

SEQ ID NO: 694370 - DNA, 15 bp, Homo sapiens
agaggaacttttagt

SEQ ID NO: 694371 - DNA, 15 bp, Homo sapiens
gaggaacttttagtt

SEQ ID NO: 694372 - DNA, 15 bp, Homo sapiens
aggaacttttagttt

SEQ ID NO: 694373 - DNA, 15 bp, Homo sapiens
ggaacttttagtttc

SEQ ID NO: 694374 - DNA, 15 bp, Homo sapiens
gaacttttagtttcc

SEQ ID NO: 694375 - DNA, 15 bp, Homo sapiens
aacttttagtttcct

SEQ ID NO: 694376 - DNA, 15 bp, Homo sapiens
acttttagtttcctt

SEQ ID NO: 694377 - DNA, 15 bp, Homo sapiens
cttttagtttcctta

SEQ ID NO: 694378 - DNA, 15 bp, Homo sapiens
ttttagtttccttat

SEQ ID NO: 694379 - DNA, 15 bp, Homo sapiens
tttagtttccttatt

SEQ ID NO: 694380 - DNA, 15 bp, Homo sapiens
ttagtttccttatta

SEQ ID NO: 694381 - DNA, 15 bp, Homo sapiens
tagtttccttattag

SEQ ID NO: 694382 - DNA, 15 bp, Homo sapiens
agtttccttattagt

SEQ ID NO: 694383 - DNA, 15 bp, Homo sapiens
gtttccttattagta

SEQ ID NO: 694384 - DNA, 15 bp, Homo sapiens
tttccttattagtaa

SEQ ID NO: 694385 - DNA, 15 bp, Homo sapiens
ttccttattagtaaa

SEQ ID NO: 694386 - DNA, 15 bp, Homo sapiens
tccttattagtaaac

SEQ ID NO: 694387 - DNA, 15 bp, Homo sapiens
ccttattagtaaaca

SEQ ID NO: 694388 - DNA, 15 bp, Homo sapiens
cttattagtaaacag

SEQ ID NO: 694389 - DNA, 15 bp, Homo sapiens
ttattagtaaacaga

SEQ ID NO: 694390 - DNA, 15 bp, Homo sapiens
tattagtaaacagat

SEQ ID NO: 694391 - DNA, 15 bp, Homo sapiens
attagtaaacagata

SEQ ID NO: 694392 - DNA, 15 bp, Homo sapiens
ttagtaaacagataa

SEQ ID NO: 694393 - DNA, 15 bp, Homo sapiens
tagtaaacagataag

SEQ ID NO: 694394 - DNA, 15 bp, Homo sapiens
agtaaacagataagg

SEQ ID NO: 694395 - DNA, 15 bp, Homo sapiens
gtaaacagataagga

SEQ ID NO: 694396 - DNA, 15 bp, Homo sapiens
taaacagataaggaa

SEQ ID NO: 694397 - DNA, 15 bp, Homo sapiens
aaacagataaggaaa

SEQ ID NO: 694398 - DNA, 15 bp, Homo sapiens
aacagataaggaaaa

SEQ ID NO: 694399 - DNA, 15 bp, Homo sapiens
acagataaggaaaac

SEQ ID NO: 694400 - DNA, 15 bp, Homo sapiens
cagataaggaaaact

SEQ ID NO: 694401 - DNA, 15 bp, Homo sapiens
agataaggaaaactg

SEQ ID NO: 694402 - DNA, 15 bp, Homo sapiens
gataaggaaaactgt

SEQ ID NO: 694403 - DNA, 15 bp, Homo sapiens
ataaggaaaactgtg

SEQ ID NO: 694404 - DNA, 15 bp, Homo sapiens
taaggaaaactgtga

SEQ ID NO: 694405 - DNA, 15 bp, Homo sapiens
aaggaaaactgtgaa

SEQ ID NO: 694406 - DNA, 15 bp, Homo sapiens
aggaaaactgtgaat

SEQ ID NO: 694407 - DNA, 15 bp, Homo sapiens
ggaaaactgtgaatc

SEQ ID NO: 694408 - DNA, 15 bp, Homo sapiens
gaaaactgtgaatcc

SEQ ID NO: 694409 - DNA, 15 bp, Homo sapiens
aaaactgtgaatcct

SEQ ID NO: 694410 - DNA, 15 bp, Homo sapiens
aaactgtgaatcctc

SEQ ID NO: 694411 - DNA, 15 bp, Homo sapiens
aactgtgaatcctca

SEQ ID NO: 694412 - DNA, 15 bp, Homo sapiens
actgtgaatcctcat

SEQ ID NO: 694413 - DNA, 15 bp, Homo sapiens
ctgtgaatcctcatt

SEQ ID NO: 694414 - DNA, 15 bp, Homo sapiens
tgtgaatcctcattt

SEQ ID NO: 694415 - DNA, 15 bp, Homo sapiens
gtgaatcctcattta

SEQ ID NO: 694416 - DNA, 15 bp, Homo sapiens
tgaatcctcatttat

SEQ ID NO: 694417 - DNA, 15 bp, Homo sapiens
gaatcctcatttata

SEQ ID NO: 694418 - DNA, 15 bp, Homo sapiens
aatcctcatttataa

SEQ ID NO: 694419 - DNA, 15 bp, Homo sapiens
atcctcatttataac

SEQ ID NO: 694420 - DNA, 15 bp, Homo sapiens
tcctcatttataacc

SEQ ID NO: 694421 - DNA, 15 bp, Homo sapiens
cctcatttataacca

SEQ ID NO: 694422 - DNA, 15 bp, Homo sapiens
ctcatttataaccaa

SEQ ID NO: 694423 - DNA, 15 bp, Homo sapiens
tcatttataaccaag

SEQ ID NO: 694424 - DNA, 15 bp, Homo sapiens
catttataaccaaga

SEQ ID NO: 694425 - DNA, 15 bp, Homo sapiens
atttataaccaagaa

SEQ ID NO: 694426 - DNA, 15 bp, Homo sapiens
tttataaccaagaaa

SEQ ID NO: 694427 - DNA, 15 bp, Homo sapiens
ttataaccaagaaat

SEQ ID NO: 694428 - DNA, 15 bp, Homo sapiens
tataaccaagaaatg

SEQ ID NO: 694429 - DNA, 15 bp, Homo sapiens
ataaccaagaaatgc

SEQ ID NO: 694430 - DNA, 15 bp, Homo sapiens
taaccaagaaatgca

SEQ ID NO: 694431 - DNA, 15 bp, Homo sapiens
aaccaagaaatgcat

SEQ ID NO: 694432 - DNA, 15 bp, Homo sapiens
accaagaaatgcata

SEQ ID NO: 694433 - DNA, 15 bp, Homo sapiens
ccaagaaatgcatat

SEQ ID NO: 694434 - DNA, 15 bp, Homo sapiens
caagaaatgcatatt

SEQ ID NO: 694435 - DNA, 15 bp, Homo sapiens
aagaaatgcatattt

SEQ ID NO: 694436 - DNA, 15 bp, Homo sapiens
agaaatgcatatttt

SEQ ID NO: 694437 - DNA, 15 bp, Homo sapiens
gaaatgcatatttta

SEQ ID NO: 694438 - DNA, 15 bp, Homo sapiens
aaatgcatattttaa

SEQ ID NO: 694439 - DNA, 15 bp, Homo sapiens
aatgcatattttaat

SEQ ID NO: 694440 - DNA, 15 bp, Homo sapiens
atgcatattttaatg

SEQ ID NO: 694441 - DNA, 15 bp, Homo sapiens
tgcatattttaatga

SEQ ID NO: 694442 - DNA, 15 bp, Homo sapiens
gcatattttaatgag

SEQ ID NO: 694443 - DNA, 15 bp, Homo sapiens
catattttaatgaga

SEQ ID NO: 694444 - DNA, 15 bp, Homo sapiens
atattttaatgagat

SEQ ID NO: 694445 - DNA, 15 bp, Homo sapiens
tattttaatgagata

SEQ ID NO: 694446 - DNA, 15 bp, Homo sapiens
attttaatgagatac

SEQ ID NO: 694447 - DNA, 15 bp, Homo sapiens
ttttaatgagatacc

SEQ ID NO: 694448 - DNA, 15 bp, Homo sapiens
tttaatgagatacca

SEQ ID NO: 694449 - DNA, 15 bp, Homo sapiens
ttaatgagataccat

SEQ ID NO: 694450 - DNA, 15 bp, Homo sapiens
taatgagataccatt

SEQ ID NO: 694451 - DNA, 15 bp, Homo sapiens
aatgagataccattt

SEQ ID NO: 694452 - DNA, 15 bp, Homo sapiens
atgagataccatttt

SEQ ID NO: 694453 - DNA, 15 bp, Homo sapiens
tgagataccattttg

SEQ ID NO: 694454 - DNA, 15 bp, Homo sapiens
gagataccattttgt

SEQ ID NO: 694455 - DNA, 15 bp, Homo sapiens
agataccattttgta

SEQ ID NO: 694456 - DNA, 15 bp, Homo sapiens
gataccattttgtaa

SEQ ID NO: 694457 - DNA, 15 bp, Homo sapiens
ataccattttgtaac

SEQ ID NO: 694458 - DNA, 15 bp, Homo sapiens
taccattttgtaact

SEQ ID NO: 694459 - DNA, 15 bp, Homo sapiens
accattttgtaacta

SEQ ID NO: 694460 - DNA, 15 bp, Homo sapiens
ccattttgtaactaa

SEQ ID NO: 694461 - DNA, 15 bp, Homo sapiens
cattttgtaactaat

SEQ ID NO: 694462 - DNA, 15 bp, Homo sapiens
attttgtaactaatg

SEQ ID NO: 694463 - DNA, 15 bp, Homo sapiens
ttttgtaactaatga

SEQ ID NO: 694464 - DNA, 15 bp, Homo sapiens
tttgtaactaatgaa

SEQ ID NO: 694465 - DNA, 15 bp, Homo sapiens
ttgtaactaatgaaa

SEQ ID NO: 694466 - DNA, 15 bp, Homo sapiens
tgtaactaatgaaat

SEQ ID NO: 694467 - DNA, 15 bp, Homo sapiens
gtaactaatgaaatt

SEQ ID NO: 694468 - DNA, 15 bp, Homo sapiens
taactaatgaaatta

SEQ ID NO: 694469 - DNA, 15 bp, Homo sapiens
aactaatgaaattag

SEQ ID NO: 694470 - DNA, 15 bp, Homo sapiens
actaatgaaattagc

SEQ ID NO: 694471 - DNA, 15 bp, Homo sapiens
ctaatgaaattagca

SEQ ID NO: 694472 - DNA, 15 bp, Homo sapiens
taatgaaattagcag

SEQ ID NO: 694473 - DNA, 15 bp, Homo sapiens
aatgaaattagcaga

SEQ ID NO: 694474 - DNA, 15 bp, Homo sapiens
atgaaattagcagaa

SEQ ID NO: 694475 - DNA, 15 bp, Homo sapiens
tgaaattagcagaat

SEQ ID NO: 694476 - DNA, 15 bp, Homo sapiens
gaaattagcagaatc

SEQ ID NO: 694477 - DNA, 15 bp, Homo sapiens
aaattagcagaatct

SEQ ID NO: 694478 - DNA, 15 bp, Homo sapiens
aattagcagaatctt

SEQ ID NO: 694479 - DNA, 15 bp, Homo sapiens
attagcagaatcttg

SEQ ID NO: 694480 - DNA, 15 bp, Homo sapiens
ttagcagaatcttga

SEQ ID NO: 694481 - DNA, 15 bp, Homo sapiens
tagcagaatcttgaa

SEQ ID NO: 694482 - DNA, 15 bp, Homo sapiens
agcagaatcttgaag

SEQ ID NO: 694483 - DNA, 15 bp, Homo sapiens
gcagaatcttgaaga

SEQ ID NO: 694484 - DNA, 15 bp, Homo sapiens
cagaatcttgaagaa

SEQ ID NO: 694485 - DNA, 15 bp, Homo sapiens
agaatcttgaagaat

SEQ ID NO: 694486 - DNA, 15 bp, Homo sapiens
gaatcttgaagaatc

SEQ ID NO: 694487 - DNA, 15 bp, Homo sapiens
aatcttgaagaatct

SEQ ID NO: 694488 - DNA, 15 bp, Homo sapiens
atcttgaagaatctg

SEQ ID NO: 694489 - DNA, 15 bp, Homo sapiens
tcttgaagaatctgt

SEQ ID NO: 694490 - DNA, 15 bp, Homo sapiens
cttgaagaatctgtc

SEQ ID NO: 694491 - DNA, 15 bp, Homo sapiens
ttgaagaatctgtct

SEQ ID NO: 694492 - DNA, 15 bp, Homo sapiens
tgaagaatctgtcta

SEQ ID NO: 694493 - DNA, 15 bp, Homo sapiens
gaagaatctgtctat

SEQ ID NO: 694494 - DNA, 15 bp, Homo sapiens
aagaatctgtctatc

SEQ ID NO: 694495 - DNA, 15 bp, Homo sapiens
agaatctgtctatcc

SEQ ID NO: 694496 - DNA, 15 bp, Homo sapiens
gaatctgtctatcct

SEQ ID NO: 694497 - DNA, 15 bp, Homo sapiens
aatctgtctatcctc

SEQ ID NO: 694498 - DNA, 15 bp, Homo sapiens
atctgtctatcctct

SEQ ID NO: 694499 - DNA, 15 bp, Homo sapiens
tctgtctatcctctt

SEQ ID NO: 694500 - DNA, 15 bp, Homo sapiens
ctgtctatcctctta

SEQ ID NO: 694501 - DNA, 15 bp, Homo sapiens
tgtctatcctcttac

SEQ ID NO: 694502 - DNA, 15 bp, Homo sapiens
gtctatcctcttacc

SEQ ID NO: 694503 - DNA, 15 bp, Homo sapiens
tctatcctcttacca

SEQ ID NO: 694504 - DNA, 15 bp, Homo sapiens
ctatcctcttaccaa

SEQ ID NO: 694505 - DNA, 15 bp, Homo sapiens
tatcctcttaccaag

SEQ ID NO: 694506 - DNA, 15 bp, Homo sapiens
atcctcttaccaagg

SEQ ID NO: 694507 - DNA, 15 bp, Homo sapiens
tcctcttaccaagga

SEQ ID NO: 694508 - DNA, 15 bp, Homo sapiens
cctcttaccaaggat

SEQ ID NO: 694509 - DNA, 15 bp, Homo sapiens
ctcttaccaaggatt

SEQ ID NO: 694510 - DNA, 15 bp, Homo sapiens
tcttaccaaggatta

SEQ ID NO: 694511 - DNA, 15 bp, Homo sapiens
cttaccaaggattaa

SEQ ID NO: 694512 - DNA, 15 bp, Homo sapiens
ttaccaaggattaat

SEQ ID NO: 694513 - DNA, 15 bp, Homo sapiens
taccaaggattaatg

SEQ ID NO: 694514 - DNA, 15 bp, Homo sapiens
accaaggattaatga

SEQ ID NO: 694515 - DNA, 15 bp, Homo sapiens
ccaaggattaatgag

SEQ ID NO: 694516 - DNA, 15 bp, Homo sapiens
caaggattaatgaga

SEQ ID NO: 694517 - DNA, 15 bp, Homo sapiens
aaggattaatgagaa

SEQ ID NO: 694518 - DNA, 15 bp, Homo sapiens
aggattaatgagaat

SEQ ID NO: 694519 - DNA, 15 bp, Homo sapiens
ggattaatgagaatt

SEQ ID NO: 694520 - DNA, 15 bp, Homo sapiens
gattaatgagaatta

SEQ ID NO: 694521 - DNA, 15 bp, Homo sapiens
attaatgagaattaa

SEQ ID NO: 694522 - DNA, 15 bp, Homo sapiens
ttaatgagaattaaa

SEQ ID NO: 694523 - DNA, 15 bp, Homo sapiens
taatgagaattaaaa

SEQ ID NO: 694524 - DNA, 15 bp, Homo sapiens
aatgagaattaaaat

SEQ ID NO: 694525 - DNA, 15 bp, Homo sapiens
atgagaattaaaata

SEQ ID NO: 694526 - DNA, 15 bp, Homo sapiens
tgagaattaaaatag

SEQ ID NO: 694527 - DNA, 15 bp, Homo sapiens
gagaattaaaataga

SEQ ID NO: 694528 - DNA, 15 bp, Homo sapiens
agaattaaaatagat

SEQ ID NO: 694529 - DNA, 15 bp, Homo sapiens
gaattaaaatagata

SEQ ID NO: 694530 - DNA, 15 bp, Homo sapiens
aattaaaatagatat

SEQ ID NO: 694531 - DNA, 15 bp, Homo sapiens
attaaaatagatatg

SEQ ID NO: 694532 - DNA, 15 bp, Homo sapiens
ttaaaatagatatgc

SEQ ID NO: 694533 - DNA, 15 bp, Homo sapiens
taaaatagatatgcc

SEQ ID NO: 694534 - DNA, 15 bp, Homo sapiens
aaaatagatatgcca

SEQ ID NO: 694535 - DNA, 15 bp, Homo sapiens
aaatagatatgccaa

SEQ ID NO: 694536 - DNA, 15 bp, Homo sapiens
aatagatatgccaat

SEQ ID NO: 694537 - DNA, 15 bp, Homo sapiens
atagatatgccaatg

SEQ ID NO: 694538 - DNA, 15 bp, Homo sapiens
tagatatgccaatgg

SEQ ID NO: 694539 - DNA, 15 bp, Homo sapiens
agatatgccaatggc

SEQ ID NO: 694540 - DNA, 15 bp, Homo sapiens
gatatgccaatggct

SEQ ID NO: 694541 - DNA, 15 bp, Homo sapiens
atatgccaatggctg

SEQ ID NO: 694542 - DNA, 15 bp, Homo sapiens
tatgccaatggctga

SEQ ID NO: 694543 - DNA, 15 bp, Homo sapiens
atgccaatggctgat

SEQ ID NO: 694544 - DNA, 15 bp, Homo sapiens
tgccaatggctgata

SEQ ID NO: 694545 - DNA, 15 bp, Homo sapiens
gccaatggctgataa

SEQ ID NO: 694546 - DNA, 15 bp, Homo sapiens
ccaatggctgataag

SEQ ID NO: 694547 - DNA, 15 bp, Homo sapiens
caatggctgataaga

SEQ ID NO: 694548 - DNA, 15 bp, Homo sapiens
aatggctgataagat

SEQ ID NO: 694549 - DNA, 15 bp, Homo sapiens
atggctgataagata

SEQ ID NO: 694550 - DNA, 15 bp, Homo sapiens
tggctgataagatac

SEQ ID NO: 694551 - DNA, 15 bp, Homo sapiens
ggctgataagatact

SEQ ID NO: 694552 - DNA, 15 bp, Homo sapiens
gctgataagatacta

SEQ ID NO: 694553 - DNA, 15 bp, Homo sapiens
ctgataagatactaa

SEQ ID NO: 694554 - DNA, 15 bp, Homo sapiens
tgataagatactaaa

SEQ ID NO: 694555 - DNA, 15 bp, Homo sapiens
gataagatactaaac

SEQ ID NO: 694556 - DNA, 15 bp, Homo sapiens
ataagatactaaacc

SEQ ID NO: 694557 - DNA, 15 bp, Homo sapiens
taagatactaaacct

SEQ ID NO: 694558 - DNA, 15 bp, Homo sapiens
aagatactaaacctg

SEQ ID NO: 694559 - DNA, 15 bp, Homo sapiens
agatactaaacctgt

SEQ ID NO: 694560 - DNA, 15 bp, Homo sapiens
gatactaaacctgtt

SEQ ID NO: 694561 - DNA, 15 bp, Homo sapiens
atactaaacctgttc

SEQ ID NO: 694562 - DNA, 15 bp, Homo sapiens
tactaaacctgttcc

SEQ ID NO: 694563 - DNA, 15 bp, Homo sapiens
actaaacctgttcct

SEQ ID NO: 694564 - DNA, 15 bp, Homo sapiens
ctaaacctgttcctg

SEQ ID NO: 694565 - DNA, 15 bp, Homo sapiens
taaacctgttcctga

SEQ ID NO: 694566 - DNA, 15 bp, Homo sapiens
aaacctgttcctgat

SEQ ID NO: 694567 - DNA, 15 bp, Homo sapiens
aacctgttcctgata

SEQ ID NO: 694568 - DNA, 15 bp, Homo sapiens
acctgttcctgatat

SEQ ID NO: 694569 - DNA, 15 bp, Homo sapiens
cctgttcctgatata

SEQ ID NO: 694570 - DNA, 15 bp, Homo sapiens
ctgttcctgatataa

SEQ ID NO: 694571 - DNA, 15 bp, Homo sapiens
tgttcctgatataag

SEQ ID NO: 694572 - DNA, 15 bp, Homo sapiens
gttcctgatataagt

SEQ ID NO: 694573 - DNA, 15 bp, Homo sapiens
ttcctgatataagtt

SEQ ID NO: 694574 - DNA, 15 bp, Homo sapiens
tcctgatataagttt

SEQ ID NO: 694575 - DNA, 15 bp, Homo sapiens
cctgatataagttta

SEQ ID NO: 694576 - DNA, 15 bp, Homo sapiens
ctgatataagtttag

SEQ ID NO: 694577 - DNA, 15 bp, Homo sapiens
tgatataagtttagg

SEQ ID NO: 694578 - DNA, 15 bp, Homo sapiens
gatataagtttaggg

SEQ ID NO: 694579 - DNA, 15 bp, Homo sapiens
atataagtttagggt

SEQ ID NO: 694580 - DNA, 15 bp, Homo sapiens
tataagtttagggta

SEQ ID NO: 694581 - DNA, 15 bp, Homo sapiens
ataagtttagggtat

SEQ ID NO: 694582 - DNA, 15 bp, Homo sapiens
taagtttagggtatt

SEQ ID NO: 694583 - DNA, 15 bp, Homo sapiens
aagtttagggtattt

SEQ ID NO: 694584 - DNA, 15 bp, Homo sapiens
agtttagggtattta

SEQ ID NO: 694585 - DNA, 15 bp, Homo sapiens
gtttagggtatttaa

SEQ ID NO: 694586 - DNA, 15 bp, Homo sapiens
tttagggtatttaaa

SEQ ID NO: 694587 - DNA, 15 bp, Homo sapiens
ttagggtatttaaat

SEQ ID NO: 694588 - DNA, 15 bp, Homo sapiens
tagggtatttaaatc

SEQ ID NO: 694589 - DNA, 15 bp, Homo sapiens
agggtatttaaatct

SEQ ID NO: 694590 - DNA, 15 bp, Homo sapiens
gggtatttaaatctt

SEQ ID NO: 694591 - DNA, 15 bp, Homo sapiens
ggtatttaaatcttt

SEQ ID NO: 694592 - DNA, 15 bp, Homo sapiens
gtatttaaatctttg

SEQ ID NO: 694593 - DNA, 15 bp, Homo sapiens
tatttaaatctttga

SEQ ID NO: 694594 - DNA, 15 bp, Homo sapiens
atttaaatctttgaa

SEQ ID NO: 694595 - DNA, 15 bp, Homo sapiens
tttaaatctttgaaa

SEQ ID NO: 694596 - DNA, 15 bp, Homo sapiens
ttaaatctttgaaaa

SEQ ID NO: 694597 - DNA, 15 bp, Homo sapiens
taaatctttgaaaat

SEQ ID NO: 694598 - DNA, 15 bp, Homo sapiens
aaatctttgaaaatt

SEQ ID NO: 694599 - DNA, 15 bp, Homo sapiens
aatctttgaaaattt

SEQ ID NO: 694600 - DNA, 15 bp, Homo sapiens
atctttgaaaatttg

SEQ ID NO: 694601 - DNA, 15 bp, Homo sapiens
tctttgaaaatttga

SEQ ID NO: 694602 - DNA, 15 bp, Homo sapiens
ctttgaaaatttgag

SEQ ID NO: 694603 - DNA, 15 bp, Homo sapiens
tttgaaaatttgaga

SEQ ID NO: 694604 - DNA, 15 bp, Homo sapiens
ttgaaaatttgagat

SEQ ID NO: 694605 - DNA, 15 bp, Homo sapiens
tgaaaatttgagatc

SEQ ID NO: 694606 - DNA, 15 bp, Homo sapiens
gaaaatttgagatca

SEQ ID NO: 694607 - DNA, 15 bp, Homo sapiens
aaaatttgagatcag

SEQ ID NO: 694608 - DNA, 15 bp, Homo sapiens
aaatttgagatcagc

SEQ ID NO: 694609 - DNA, 15 bp, Homo sapiens
aatttgagatcagct

SEQ ID NO: 694610 - DNA, 15 bp, Homo sapiens
atttgagatcagcta

SEQ ID NO: 694611 - DNA, 15 bp, Homo sapiens
tttgagatcagctat

SEQ ID NO: 694612 - DNA, 15 bp, Homo sapiens
ttgagatcagctata

SEQ ID NO: 694613 - DNA, 15 bp, Homo sapiens
tgagatcagctataa

SEQ ID NO: 694614 - DNA, 15 bp, Homo sapiens
gagatcagctataag

SEQ ID NO: 694615 - DNA, 15 bp, Homo sapiens
agatcagctataagt

SEQ ID NO: 694616 - DNA, 15 bp, Homo sapiens
gatcagctataagtc

SEQ ID NO: 694617 - DNA, 15 bp, Homo sapiens
atcagctataagtcc

SEQ ID NO: 694618 - DNA, 15 bp, Homo sapiens
tcagctataagtcct

SEQ ID NO: 694619 - DNA, 15 bp, Homo sapiens
cagctataagtcctt

SEQ ID NO: 694620 - DNA, 15 bp, Homo sapiens
agctataagtccttt

SEQ ID NO: 694621 - DNA, 15 bp, Homo sapiens
gctataagtcctttc

SEQ ID NO: 694622 - DNA, 15 bp, Homo sapiens
ctataagtcctttct

SEQ ID NO: 694623 - DNA, 15 bp, Homo sapiens
tataagtcctttctc

SEQ ID NO: 694624 - DNA, 15 bp, Homo sapiens
ataagtcctttctct

SEQ ID NO: 694625 - DNA, 15 bp, Homo sapiens
taagtcctttctcta

SEQ ID NO: 694626 - DNA, 15 bp, Homo sapiens
aagtcctttctctag

SEQ ID NO: 694627 - DNA, 15 bp, Homo sapiens
agtcctttctctagg

SEQ ID NO: 694628 - DNA, 15 bp, Homo sapiens
gtcctttctctagga

SEQ ID NO: 694629 - DNA, 15 bp, Homo sapiens
tcctttctctaggaa

SEQ ID NO: 694630 - DNA, 15 bp, Homo sapiens
cctttctctaggaaa

SEQ ID NO: 694631 - DNA, 15 bp, Homo sapiens
ctttctctaggaaaa

SEQ ID NO: 694632 - DNA, 15 bp, Homo sapiens
tttctctaggaaaaa

SEQ ID NO: 694633 - DNA, 15 bp, Homo sapiens
ttctctaggaaaaac

SEQ ID NO: 694634 - DNA, 15 bp, Homo sapiens
tctctaggaaaaaca

SEQ ID NO: 694635 - DNA, 15 bp, Homo sapiens
ctctaggaaaaacac

SEQ ID NO: 694636 - DNA, 15 bp, Homo sapiens
tctaggaaaaacaca

SEQ ID NO: 694637 - DNA, 15 bp, Homo sapiens
ctaggaaaaacacag

SEQ ID NO: 694638 - DNA, 15 bp, Homo sapiens
taggaaaaacacaga

SEQ ID NO: 694639 - DNA, 15 bp, Homo sapiens
aggaaaaacacagat

SEQ ID NO: 694640 - DNA, 15 bp, Homo sapiens
ggaaaaacacagatt

SEQ ID NO: 694641 - DNA, 15 bp, Homo sapiens
gaaaaacacagattt

SEQ ID NO: 694642 - DNA, 15 bp, Homo sapiens
aaaaacacagatttg

SEQ ID NO: 694643 - DNA, 15 bp, Homo sapiens
aaaacacagatttgc

SEQ ID NO: 694644 - DNA, 15 bp, Homo sapiens
aaacacagatttgct

SEQ ID NO: 694645 - DNA, 15 bp, Homo sapiens
aacacagatttgctt

SEQ ID NO: 694646 - DNA, 15 bp, Homo sapiens
acacagatttgctta

SEQ ID NO: 694647 - DNA, 15 bp, Homo sapiens
cacagatttgcttac

SEQ ID NO: 694648 - DNA, 15 bp, Homo sapiens
acagatttgcttaca

SEQ ID NO: 694649 - DNA, 15 bp, Homo sapiens
cagatttgcttacac

SEQ ID NO: 694650 - DNA, 15 bp, Homo sapiens
agatttgcttacact

SEQ ID NO: 694651 - DNA, 15 bp, Homo sapiens
gatttgcttacactc

SEQ ID NO: 694652 - DNA, 15 bp, Homo sapiens
atttgcttacactca

SEQ ID NO: 694653 - DNA, 15 bp, Homo sapiens
tttgcttacactcaa

SEQ ID NO: 694654 - DNA, 15 bp, Homo sapiens
ttgcttacactcaaa

SEQ ID NO: 694655 - DNA, 15 bp, Homo sapiens
tgcttacactcaaaa

SEQ ID NO: 694656 - DNA, 15 bp, Homo sapiens
gcttacactcaaaat

SEQ ID NO: 694657 - DNA, 15 bp, Homo sapiens
cttacactcaaaatt

SEQ ID NO: 694658 - DNA, 15 bp, Homo sapiens
ttacactcaaaattg

SEQ ID NO: 694659 - DNA, 15 bp, Homo sapiens
tacactcaaaattgg

SEQ ID NO: 694660 - DNA, 15 bp, Homo sapiens
acactcaaaattgga

SEQ ID NO: 694661 - DNA, 15 bp, Homo sapiens
cactcaaaattggaa

SEQ ID NO: 694662 - DNA, 15 bp, Homo sapiens
actcaaaattggaag

SEQ ID NO: 694663 - DNA, 15 bp, Homo sapiens
ctcaaaattggaagg

SEQ ID NO: 694664 - DNA, 15 bp, Homo sapiens
tcaaaattggaaggc

SEQ ID NO: 694665 - DNA, 15 bp, Homo sapiens
caaaattggaaggct

SEQ ID NO: 694666 - DNA, 15 bp, Homo sapiens
aaaattggaaggcta

SEQ ID NO: 694667 - DNA, 15 bp, Homo sapiens
aaattggaaggctat

SEQ ID NO: 694668 - DNA, 15 bp, Homo sapiens
aattggaaggctatt

SEQ ID NO: 694669 - DNA, 15 bp, Homo sapiens
attggaaggctattt

SEQ ID NO: 694670 - DNA, 15 bp, Homo sapiens
ttggaaggctatttc

SEQ ID NO: 694671 - DNA, 15 bp, Homo sapiens
tggaaggctatttcc

SEQ ID NO: 694672 - DNA, 15 bp, Homo sapiens
ggaaggctatttcct

SEQ ID NO: 694673 - DNA, 15 bp, Homo sapiens
gaaggctatttccta

SEQ ID NO: 694674 - DNA, 15 bp, Homo sapiens
aaggctatttcctat

SEQ ID NO: 694675 - DNA, 15 bp, Homo sapiens
aggctatttcctatg

SEQ ID NO: 694676 - DNA, 15 bp, Homo sapiens
ggctatttcctatga

SEQ ID NO: 694677 - DNA, 15 bp, Homo sapiens
gctatttcctatgag

SEQ ID NO: 694678 - DNA, 15 bp, Homo sapiens
ctatttcctatgagt

SEQ ID NO: 694679 - DNA, 15 bp, Homo sapiens
tatttcctatgagtc

SEQ ID NO: 694680 - DNA, 15 bp, Homo sapiens
atttcctatgagtcc

SEQ ID NO: 694681 - DNA, 15 bp, Homo sapiens
tttcctatgagtccg

SEQ ID NO: 694682 - DNA, 15 bp, Homo sapiens
ttcctatgagtccgt

SEQ ID NO: 694683 - DNA, 15 bp, Homo sapiens
tcctatgagtccgta

SEQ ID NO: 694684 - DNA, 15 bp, Homo sapiens
cctatgagtccgtag

SEQ ID NO: 694685 - DNA, 15 bp, Homo sapiens
ctatgagtccgtaga

SEQ ID NO: 694686 - DNA, 15 bp, Homo sapiens
tatgagtccgtagac

SEQ ID NO: 694687 - DNA, 15 bp, Homo sapiens
atgagtccgtagact

SEQ ID NO: 694688 - DNA, 15 bp, Homo sapiens
tgagtccgtagactc

SEQ ID NO: 694689 - DNA, 15 bp, Homo sapiens
gagtccgtagactcc

SEQ ID NO: 694690 - DNA, 15 bp, Homo sapiens
agtccgtagactcca

SEQ ID NO: 694691 - DNA, 15 bp, Homo sapiens
gtccgtagactccaa

SEQ ID NO: 694692 - DNA, 15 bp, Homo sapiens
tccgtagactccaaa

SEQ ID NO: 694693 - DNA, 15 bp, Homo sapiens
ccgtagactccaaaa

SEQ ID NO: 694694 - DNA, 15 bp, Homo sapiens
cgtagactccaaaat

SEQ ID NO: 694695 - DNA, 15 bp, Homo sapiens
gtagactccaaaata

SEQ ID NO: 694696 - DNA, 15 bp, Homo sapiens
tagactccaaaataa

SEQ ID NO: 694697 - DNA, 15 bp, Homo sapiens
agactccaaaataaa

SEQ ID NO: 694698 - DNA, 15 bp, Homo sapiens
gactccaaaataaaa

SEQ ID NO: 694699 - DNA, 15 bp, Homo sapiens
actccaaaataaaaa

SEQ ID NO: 694700 - DNA, 15 bp, Homo sapiens
ctccaaaataaaaaa

SEQ ID NO: 694701 - DNA, 15 bp, Homo sapiens
tccaaaataaaaaat

SEQ ID NO: 694702 - DNA, 15 bp, Homo sapiens
ccaaaataaaaaatt

SEQ ID NO: 694703 - DNA, 15 bp, Homo sapiens
caaaataaaaaattc

SEQ ID NO: 694704 - DNA, 15 bp, Homo sapiens
aaaataaaaaattct

SEQ ID NO: 694705 - DNA, 15 bp, Homo sapiens
aaataaaaaattctg

SEQ ID NO: 694706 - DNA, 15 bp, Homo sapiens
aataaaaaattctgc

SEQ ID NO: 694707 - DNA, 15 bp, Homo sapiens
ataaaaaattctgct

SEQ ID NO: 694708 - DNA, 15 bp, Homo sapiens
taaaaaattctgctc

SEQ ID NO: 694709 - DNA, 15 bp, Homo sapiens
aaaaaattctgctct

SEQ ID NO: 694710 - DNA, 15 bp, Homo sapiens
aaaaattctgctcta

SEQ ID NO: 694711 - DNA, 15 bp, Homo sapiens
aaaattctgctctaa

SEQ ID NO: 694712 - DNA, 15 bp, Homo sapiens
aaattctgctctaaa

SEQ ID NO: 694713 - DNA, 15 bp, Homo sapiens
aattctgctctaaat

SEQ ID NO: 694714 - DNA, 15 bp, Homo sapiens
attctgctctaaata

SEQ ID NO: 694715 - DNA, 15 bp, Homo sapiens
ttctgctctaaataa

SEQ ID NO: 694716 - DNA, 15 bp, Homo sapiens
tctgctctaaataaa

SEQ ID NO: 694717 - DNA, 15 bp, Homo sapiens
ctgctctaaataaaa

SEQ ID NO: 694718 - DNA, 15 bp, Homo sapiens
tgctctaaataaaaa

SEQ ID NO: 694719 - DNA, 15 bp, Homo sapiens
gctctaaataaaaat

SEQ ID NO: 694720 - DNA, 15 bp, Homo sapiens
ctctaaataaaaatg

SEQ ID NO: 694721 - DNA, 15 bp, Homo sapiens
tctaaataaaaatgg

SEQ ID NO: 694722 - DNA, 15 bp, Homo sapiens
ctaaataaaaatggt

SEQ ID NO: 694723 - DNA, 15 bp, Homo sapiens
taaataaaaatggtt

SEQ ID NO: 694724 - DNA, 15 bp, Homo sapiens
aaataaaaatggttt

SEQ ID NO: 694725 - DNA, 15 bp, Homo sapiens
aataaaaatggttta

SEQ ID NO: 694726 - DNA, 15 bp, Homo sapiens
ataaaaatggtttaa

SEQ ID NO: 694727 - DNA, 15 bp, Homo sapiens
taaaaatggtttaac

SEQ ID NO: 694728 - DNA, 15 bp, Homo sapiens
aaaaatggtttaacc

SEQ ID NO: 694729 - DNA, 15 bp, Homo sapiens
aaaatggtttaacct

SEQ ID NO: 694730 - DNA, 15 bp, Homo sapiens
aaatggtttaacctt

SEQ ID NO: 694731 - DNA, 15 bp, Homo sapiens
aatggtttaaccttt

SEQ ID NO: 694732 - DNA, 15 bp, Homo sapiens
atggtttaacctttc

SEQ ID NO: 694733 - DNA, 15 bp, Homo sapiens
tggtttaacctttct

SEQ ID NO: 694734 - DNA, 15 bp, Homo sapiens
ggtttaacctttcta

SEQ ID NO: 694735 - DNA, 15 bp, Homo sapiens
gtttaacctttctac

SEQ ID NO: 694736 - DNA, 15 bp, Homo sapiens
tttaacctttctact

SEQ ID NO: 694737 - DNA, 15 bp, Homo sapiens
ttaacctttctactg

SEQ ID NO: 694738 - DNA, 15 bp, Homo sapiens
taacctttctactgt

SEQ ID NO: 694739 - DNA, 15 bp, Homo sapiens
aacctttctactgtt

SEQ ID NO: 694740 - DNA, 15 bp, Homo sapiens
acctttctactgttt

SEQ ID NO: 694741 - DNA, 15 bp, Homo sapiens
cctttctactgtttt

SEQ ID NO: 694742 - DNA, 15 bp, Homo sapiens
ctttctactgttttc

SEQ ID NO: 694743 - DNA, 15 bp, Homo sapiens
tttctactgttttct

SEQ ID NO: 694744 - DNA, 15 bp, Homo sapiens
ttctactgttttctt

SEQ ID NO: 694745 - DNA, 15 bp, Homo sapiens
tctactgttttcttt

SEQ ID NO: 694746 - DNA, 15 bp, Homo sapiens
ctactgttttctttg

SEQ ID NO: 694747 - DNA, 15 bp, Homo sapiens
tactgttttctttgt

SEQ ID NO: 694748 - DNA, 15 bp, Homo sapiens
actgttttctttgtc

SEQ ID NO: 694749 - DNA, 15 bp, Homo sapiens
ctgttttctttgtct

SEQ ID NO: 694750 - DNA, 15 bp, Homo sapiens
tgttttctttgtctg

SEQ ID NO: 694751 - DNA, 15 bp, Homo sapiens
gttttctttgtctga

SEQ ID NO: 694752 - DNA, 15 bp, Homo sapiens
ttttctttgtctgat

SEQ ID NO: 694753 - DNA, 15 bp, Homo sapiens
tttctttgtctgata

SEQ ID NO: 694754 - DNA, 15 bp, Homo sapiens
ttctttgtctgataa

SEQ ID NO: 694755 - DNA, 15 bp, Homo sapiens
tctttgtctgataat

SEQ ID NO: 694756 - DNA, 15 bp, Homo sapiens
ctttgtctgataata

SEQ ID NO: 694757 - DNA, 15 bp, Homo sapiens
tttgtctgataataa

SEQ ID NO: 694758 - DNA, 15 bp, Homo sapiens
ttgtctgataataac

SEQ ID NO: 694759 - DNA, 15 bp, Homo sapiens
tgtctgataataact

SEQ ID NO: 694760 - DNA, 15 bp, Homo sapiens
gtctgataataactt

SEQ ID NO: 694761 - DNA, 15 bp, Homo sapiens
tctgataataacttc

SEQ ID NO: 694762 - DNA, 15 bp, Homo sapiens
ctgataataacttcc

SEQ ID NO: 694763 - DNA, 15 bp, Homo sapiens
tgataataacttcca

SEQ ID NO: 694764 - DNA, 15 bp, Homo sapiens
gataataacttccaa

SEQ ID NO: 694765 - DNA, 15 bp, Homo sapiens
ataataacttccaaa

SEQ ID NO: 694766 - DNA, 15 bp, Homo sapiens
taataacttccaaaa

SEQ ID NO: 694767 - DNA, 15 bp, Homo sapiens
aataacttccaaaaa

SEQ ID NO: 694768 - DNA, 15 bp, Homo sapiens
ataacttccaaaaaa

SEQ ID NO: 694769 - DNA, 15 bp, Homo sapiens
taacttccaaaaaaa

SEQ ID NO: 694770 - DNA, 15 bp, Homo sapiens
aacttccaaaaaaat

SEQ ID NO: 694771 - DNA, 15 bp, Homo sapiens
acttccaaaaaaata

SEQ ID NO: 694772 - DNA, 15 bp, Homo sapiens
cttccaaaaaaatac

SEQ ID NO: 694773 - DNA, 15 bp, Homo sapiens
ttccaaaaaaatacc

SEQ ID NO: 694774 - DNA, 15 bp, Homo sapiens
tccaaaaaaatacct

SEQ ID NO: 694775 - DNA, 15 bp, Homo sapiens
ccaaaaaaataccta

SEQ ID NO: 694776 - DNA, 15 bp, Homo sapiens
caaaaaaatacctag

SEQ ID NO: 694777 - DNA, 15 bp, Homo sapiens
aaaaaaatacctagc

SEQ ID NO: 694778 - DNA, 15 bp, Homo sapiens
aaaaaatacctagct

SEQ ID NO: 694779 - DNA, 15 bp, Homo sapiens
aaaaatacctagctc

SEQ ID NO: 694780 - DNA, 15 bp, Homo sapiens
aaaatacctagctca

SEQ ID NO: 694781 - DNA, 15 bp, Homo sapiens
aaatacctagctcaa

SEQ ID NO: 694782 - DNA, 15 bp, Homo sapiens
aatacctagctcaag

SEQ ID NO: 694783 - DNA, 15 bp, Homo sapiens
atacctagctcaagg

SEQ ID NO: 694784 - DNA, 15 bp, Homo sapiens
tacctagctcaaggg

SEQ ID NO: 694785 - DNA, 15 bp, Homo sapiens
acctagctcaagggt

SEQ ID NO: 694786 - DNA, 15 bp, Homo sapiens
cctagctcaagggtt

SEQ ID NO: 694787 - DNA, 15 bp, Homo sapiens
ctagctcaagggtta

SEQ ID NO: 694788 - DNA, 15 bp, Homo sapiens
tagctcaagggttaa

SEQ ID NO: 694789 - DNA, 15 bp, Homo sapiens
agctcaagggttaat

SEQ ID NO: 694790 - DNA, 15 bp, Homo sapiens
gctcaagggttaata

SEQ ID NO: 694791 - DNA, 15 bp, Homo sapiens
ctcaagggttaatat

SEQ ID NO: 694792 - DNA, 15 bp, Homo sapiens
tcaagggttaatatt

SEQ ID NO: 694793 - DNA, 15 bp, Homo sapiens
caagggttaatattt

SEQ ID NO: 694794 - DNA, 15 bp, Homo sapiens
aagggttaatatttc

SEQ ID NO: 694795 - DNA, 15 bp, Homo sapiens
agggttaatatttca

SEQ ID NO: 694796 - DNA, 15 bp, Homo sapiens
gggttaatatttcat

SEQ ID NO: 694797 - DNA, 15 bp, Homo sapiens
ggttaatatttcata

SEQ ID NO: 694798 - DNA, 15 bp, Homo sapiens
gttaatatttcataa

SEQ ID NO: 694799 - DNA, 15 bp, Homo sapiens
ttaatatttcataaa

SEQ ID NO: 694800 - DNA, 15 bp, Homo sapiens
taatatttcataaat

SEQ ID NO: 694801 - DNA, 15 bp, Homo sapiens
aatatttcataaata

SEQ ID NO: 694802 - DNA, 15 bp, Homo sapiens
atatttcataaatag

SEQ ID NO: 694803 - DNA, 15 bp, Homo sapiens
tatttcataaatagt

SEQ ID NO: 694804 - DNA, 15 bp, Homo sapiens
atttcataaatagtt

SEQ ID NO: 694805 - DNA, 15 bp, Homo sapiens
tttcataaatagtta

SEQ ID NO: 694806 - DNA, 15 bp, Homo sapiens
ttcataaatagttac

SEQ ID NO: 694807 - DNA, 15 bp, Homo sapiens
tcataaatagttact

SEQ ID NO: 694808 - DNA, 15 bp, Homo sapiens
cataaatagttactt

SEQ ID NO: 694809 - DNA, 15 bp, Homo sapiens
ataaatagttacttt

SEQ ID NO: 694810 - DNA, 15 bp, Homo sapiens
taaatagttactttt

SEQ ID NO: 694811 - DNA, 15 bp, Homo sapiens
aaatagttacttttt

SEQ ID NO: 694812 - DNA, 15 bp, Homo sapiens
aatagttactttttt

SEQ ID NO: 694813 - DNA, 15 bp, Homo sapiens
atagttacttttttt

SEQ ID NO: 694814 - DNA, 15 bp, Homo sapiens
tagttactttttttt

SEQ ID NO: 694815 - DNA, 15 bp, Homo sapiens
agttacttttttttt

SEQ ID NO: 694816 - DNA, 15 bp, Homo sapiens
gttactttttttttt

SEQ ID NO: 694817 - DNA, 15 bp, Homo sapiens
ttacttttttttttc

SEQ ID NO: 694818 - DNA, 15 bp, Homo sapiens
tacttttttttttca

SEQ ID NO: 694819 - DNA, 15 bp, Homo sapiens
acttttttttttcat

SEQ ID NO: 694820 - DNA, 15 bp, Homo sapiens
cttttttttttcatt

SEQ ID NO: 694821 - DNA, 15 bp, Homo sapiens
ttttttttttcattt

SEQ ID NO: 694822 - DNA, 15 bp, Homo sapiens
tttttttttcatttt

SEQ ID NO: 694823 - DNA, 15 bp, Homo sapiens
ttttttttcattttt

SEQ ID NO: 694824 - DNA, 15 bp, Homo sapiens
tttttttcattttta

SEQ ID NO: 694825 - DNA, 15 bp, Homo sapiens
ttttttcatttttag

SEQ ID NO: 694826 - DNA, 15 bp, Homo sapiens
tttttcatttttagg

SEQ ID NO: 694827 - DNA, 15 bp, Homo sapiens
ttttcatttttagga

SEQ ID NO: 694828 - DNA, 15 bp, Homo sapiens
tttcatttttaggaa

SEQ ID NO: 694829 - DNA, 15 bp, Homo sapiens
ttcatttttaggaag

SEQ ID NO: 694830 - DNA, 15 bp, Homo sapiens
tcatttttaggaagt

SEQ ID NO: 694831 - DNA, 15 bp, Homo sapiens
catttttaggaagta

SEQ ID NO: 694832 - DNA, 15 bp, Homo sapiens
atttttaggaagtac

SEQ ID NO: 694833 - DNA, 15 bp, Homo sapiens
tttttaggaagtaca

SEQ ID NO: 694834 - DNA, 15 bp, Homo sapiens
ttttaggaagtacat

SEQ ID NO: 694835 - DNA, 15 bp, Homo sapiens
tttaggaagtacatc

SEQ ID NO: 694836 - DNA, 15 bp, Homo sapiens
ttaggaagtacatct

SEQ ID NO: 694837 - DNA, 15 bp, Homo sapiens
taggaagtacatctc

SEQ ID NO: 694838 - DNA, 15 bp, Homo sapiens
aggaagtacatctca

SEQ ID NO: 694839 - DNA, 15 bp, Homo sapiens
ggaagtacatctcag

SEQ ID NO: 694840 - DNA, 15 bp, Homo sapiens
gaagtacatctcaga

SEQ ID NO: 694841 - DNA, 15 bp, Homo sapiens
aagtacatctcagaa

SEQ ID NO: 694842 - DNA, 15 bp, Homo sapiens
agtacatctcagaat

SEQ ID NO: 694843 - DNA, 15 bp, Homo sapiens
gtacatctcagaatc

SEQ ID NO: 694844 - DNA, 15 bp, Homo sapiens
tacatctcagaatct

SEQ ID NO: 694845 - DNA, 15 bp, Homo sapiens
acatctcagaatctt

SEQ ID NO: 694846 - DNA, 15 bp, Homo sapiens
catctcagaatcttg

SEQ ID NO: 694847 - DNA, 15 bp, Homo sapiens
atctcagaatcttga

SEQ ID NO: 694848 - DNA, 15 bp, Homo sapiens
tctcagaatcttgat

SEQ ID NO: 694849 - DNA, 15 bp, Homo sapiens
ctcagaatcttgatt

SEQ ID NO: 694850 - DNA, 15 bp, Homo sapiens
tcagaatcttgattc

SEQ ID NO: 694851 - DNA, 15 bp, Homo sapiens
cagaatcttgattct

SEQ ID NO: 694852 - DNA, 15 bp, Homo sapiens
agaatcttgattctg

SEQ ID NO: 694853 - DNA, 15 bp, Homo sapiens
gaatcttgattctgg

SEQ ID NO: 694854 - DNA, 15 bp, Homo sapiens
aatcttgattctgga

SEQ ID NO: 694855 - DNA, 15 bp, Homo sapiens
atcttgattctggaa

SEQ ID NO: 694856 - DNA, 15 bp, Homo sapiens
tcttgattctggaac

SEQ ID NO: 694857 - DNA, 15 bp, Homo sapiens
cttgattctggaaca

SEQ ID NO: 694858 - DNA, 15 bp, Homo sapiens
ttgattctggaacag

SEQ ID NO: 694859 - DNA, 15 bp, Homo sapiens
tgattctggaacaga

SEQ ID NO: 694860 - DNA, 15 bp, Homo sapiens
gattctggaacagat

SEQ ID NO: 694861 - DNA, 15 bp, Homo sapiens
attctggaacagatt

SEQ ID NO: 694862 - DNA, 15 bp, Homo sapiens
ttctggaacagattt

SEQ ID NO: 694863 - DNA, 15 bp, Homo sapiens
tctggaacagatttg

SEQ ID NO: 694864 - DNA, 15 bp, Homo sapiens
ctggaacagatttgt

SEQ ID NO: 694865 - DNA, 15 bp, Homo sapiens
tggaacagatttgtc

SEQ ID NO: 694866 - DNA, 15 bp, Homo sapiens
ggaacagatttgtct

SEQ ID NO: 694867 - DNA, 15 bp, Homo sapiens
gaacagatttgtctt

SEQ ID NO: 694868 - DNA, 15 bp, Homo sapiens
aacagatttgtcttt

SEQ ID NO: 694869 - DNA, 15 bp, Homo sapiens
acagatttgtctttc

SEQ ID NO: 694870 - DNA, 15 bp, Homo sapiens
cagatttgtctttcc

SEQ ID NO: 694871 - DNA, 15 bp, Homo sapiens
agatttgtctttccc

SEQ ID NO: 694872 - DNA, 15 bp, Homo sapiens
gatttgtctttccca

SEQ ID NO: 694873 - DNA, 15 bp, Homo sapiens
atttgtctttcccat

SEQ ID NO: 694874 - DNA, 15 bp, Homo sapiens
tttgtctttcccatg

SEQ ID NO: 694875 - DNA, 15 bp, Homo sapiens
ttgtctttcccatgg

SEQ ID NO: 694876 - DNA, 15 bp, Homo sapiens
tgtctttcccatgga

SEQ ID NO: 694877 - DNA, 15 bp, Homo sapiens
gtctttcccatggat

SEQ ID NO: 694878 - DNA, 15 bp, Homo sapiens
tctttcccatggatt

SEQ ID NO: 694879 - DNA, 15 bp, Homo sapiens
ctttcccatggattc

SEQ ID NO: 694880 - DNA, 15 bp, Homo sapiens
tttcccatggattct

SEQ ID NO: 694881 - DNA, 15 bp, Homo sapiens
ttcccatggattctg

SEQ ID NO: 694882 - DNA, 15 bp, Homo sapiens
tcccatggattctga

SEQ ID NO: 694883 - DNA, 15 bp, Homo sapiens
cccatggattctgaa

SEQ ID NO: 694884 - DNA, 15 bp, Homo sapiens
ccatggattctgaat

SEQ ID NO: 694885 - DNA, 15 bp, Homo sapiens
catggattctgaatg

SEQ ID NO: 694886 - DNA, 15 bp, Homo sapiens
atggattctgaatgt

SEQ ID NO: 694887 - DNA, 15 bp, Homo sapiens
tggattctgaatgtg

SEQ ID NO: 694888 - DNA, 15 bp, Homo sapiens
ggattctgaatgtgc

SEQ ID NO: 694889 - DNA, 15 bp, Homo sapiens
gattctgaatgtgct

SEQ ID NO: 694890 - DNA, 15 bp, Homo sapiens
attctgaatgtgctt

SEQ ID NO: 694891 - DNA, 15 bp, Homo sapiens
ttctgaatgtgctta

SEQ ID NO: 694892 - DNA, 15 bp, Homo sapiens
tctgaatgtgcttaa

SEQ ID NO: 694893 - DNA, 15 bp, Homo sapiens
ctgaatgtgcttaat

SEQ ID NO: 694894 - DNA, 15 bp, Homo sapiens
tgaatgtgcttaatt

SEQ ID NO: 694895 - DNA, 15 bp, Homo sapiens
gaatgtgcttaattt

SEQ ID NO: 694896 - DNA, 15 bp, Homo sapiens
aatgtgcttaattta

SEQ ID NO: 694897 - DNA, 15 bp, Homo sapiens
atgtgcttaatttaa

SEQ ID NO: 694898 - DNA, 15 bp, Homo sapiens
tgtgcttaatttaaa

SEQ ID NO: 694899 - DNA, 15 bp, Homo sapiens
gtgcttaatttaaaa

SEQ ID NO: 694900 - DNA, 15 bp, Homo sapiens
tgcttaatttaaaag

SEQ ID NO: 694901 - DNA, 15 bp, Homo sapiens
gcttaatttaaaagc

SEQ ID NO: 694902 - DNA, 15 bp, Homo sapiens
cttaatttaaaagcc

SEQ ID NO: 694903 - DNA, 15 bp, Homo sapiens
ttaatttaaaagcct

SEQ ID NO: 694904 - DNA, 15 bp, Homo sapiens
taatttaaaagcctt

SEQ ID NO: 694905 - DNA, 15 bp, Homo sapiens
aatttaaaagccttt

SEQ ID NO: 694906 - DNA, 15 bp, Homo sapiens
atttaaaagcctttg

SEQ ID NO: 694907 - DNA, 15 bp, Homo sapiens
tttaaaagcctttga

SEQ ID NO: 694908 - DNA, 15 bp, Homo sapiens
ttaaaagcctttgat

SEQ ID NO: 694909 - DNA, 15 bp, Homo sapiens
taaaagcctttgatt

SEQ ID NO: 694910 - DNA, 15 bp, Homo sapiens
aaaagcctttgattt

SEQ ID NO: 694911 - DNA, 15 bp, Homo sapiens
aaagcctttgatttt

SEQ ID NO: 694912 - DNA, 15 bp, Homo sapiens
aagcctttgattttt

SEQ ID NO: 694913 - DNA, 15 bp, Homo sapiens
agcctttgattttta

SEQ ID NO: 694914 - DNA, 15 bp, Homo sapiens
gcctttgatttttac

SEQ ID NO: 694915 - DNA, 15 bp, Homo sapiens
cctttgatttttaca

SEQ ID NO: 694916 - DNA, 15 bp, Homo sapiens
ctttgatttttacaa

SEQ ID NO: 694917 - DNA, 15 bp, Homo sapiens
tttgatttttacaaa

SEQ ID NO: 694918 - DNA, 15 bp, Homo sapiens
ttgatttttacaaag

SEQ ID NO: 694919 - DNA, 15 bp, Homo sapiens
tgatttttacaaagt

SEQ ID NO: 694920 - DNA, 15 bp, Homo sapiens
gatttttacaaagtg

SEQ ID NO: 694921 - DNA, 15 bp, Homo sapiens
atttttacaaagtga

SEQ ID NO: 694922 - DNA, 15 bp, Homo sapiens
tttttacaaagtgat

SEQ ID NO: 694923 - DNA, 15 bp, Homo sapiens
ttttacaaagtgatc

SEQ ID NO: 694924 - DNA, 15 bp, Homo sapiens
tttacaaagtgatcg

SEQ ID NO: 694925 - DNA, 15 bp, Homo sapiens
ttacaaagtgatcga

SEQ ID NO: 694926 - DNA, 15 bp, Homo sapiens
tacaaagtgatcgaa

SEQ ID NO: 694927 - DNA, 15 bp, Homo sapiens
acaaagtgatcgaaa

SEQ ID NO: 694928 - DNA, 15 bp, Homo sapiens
caaagtgatcgaaag

SEQ ID NO: 694929 - DNA, 15 bp, Homo sapiens
aaagtgatcgaaagt

SEQ ID NO: 694930 - DNA, 15 bp, Homo sapiens
aagtgatcgaaagtt

SEQ ID NO: 694931 - DNA, 15 bp, Homo sapiens
agtgatcgaaagttt

SEQ ID NO: 694932 - DNA, 15 bp, Homo sapiens
gtgatcgaaagtttt

SEQ ID NO: 694933 - DNA, 15 bp, Homo sapiens
tgatcgaaagtttta

SEQ ID NO: 694934 - DNA, 15 bp, Homo sapiens
gatcgaaagttttat

SEQ ID NO: 694935 - DNA, 15 bp, Homo sapiens
atcgaaagttttatc

SEQ ID NO: 694936 - DNA, 15 bp, Homo sapiens
tcgaaagttttatca

SEQ ID NO: 694937 - DNA, 15 bp, Homo sapiens
cgaaagttttatcaa

SEQ ID NO: 694938 - DNA, 15 bp, Homo sapiens
gaaagttttatcaaa

SEQ ID NO: 694939 - DNA, 15 bp, Homo sapiens
aaagttttatcaaag

SEQ ID NO: 694940 - DNA, 15 bp, Homo sapiens
aagttttatcaaagc

SEQ ID NO: 694941 - DNA, 15 bp, Homo sapiens
agttttatcaaagca

SEQ ID NO: 694942 - DNA, 15 bp, Homo sapiens
gttttatcaaagcag

SEQ ID NO: 694943 - DNA, 15 bp, Homo sapiens
ttttatcaaagcaga

SEQ ID NO: 694944 - DNA, 15 bp, Homo sapiens
tttatcaaagcagaa

SEQ ID NO: 694945 - DNA, 15 bp, Homo sapiens
ttatcaaagcagaag

SEQ ID NO: 694946 - DNA, 15 bp, Homo sapiens
tatcaaagcagaagg

SEQ ID NO: 694947 - DNA, 15 bp, Homo sapiens
atcaaagcagaaggc

SEQ ID NO: 694948 - DNA, 15 bp, Homo sapiens
tcaaagcagaaggca

SEQ ID NO: 694949 - DNA, 15 bp, Homo sapiens
caaagcagaaggcaa

SEQ ID NO: 694950 - DNA, 15 bp, Homo sapiens
aaagcagaaggcaac

SEQ ID NO: 694951 - DNA, 15 bp, Homo sapiens
aagcagaaggcaact

SEQ ID NO: 694952 - DNA, 15 bp, Homo sapiens
agcagaaggcaactt

SEQ ID NO: 694953 - DNA, 15 bp, Homo sapiens
gcagaaggcaacttg

SEQ ID NO: 694954 - DNA, 15 bp, Homo sapiens
cagaaggcaacttga

SEQ ID NO: 694955 - DNA, 15 bp, Homo sapiens
agaaggcaacttgac

SEQ ID NO: 694956 - DNA, 15 bp, Homo sapiens
gaaggcaacttgaca

SEQ ID NO: 694957 - DNA, 15 bp, Homo sapiens
aaggcaacttgacaa

SEQ ID NO: 694958 - DNA, 15 bp, Homo sapiens
aggcaacttgacaag

SEQ ID NO: 694959 - DNA, 15 bp, Homo sapiens
ggcaacttgacaaga

SEQ ID NO: 694960 - DNA, 15 bp, Homo sapiens
gcaacttgacaagag

SEQ ID NO: 694961 - DNA, 15 bp, Homo sapiens
caacttgacaagaga

SEQ ID NO: 694962 - DNA, 15 bp, Homo sapiens
aacttgacaagagaa

SEQ ID NO: 694963 - DNA, 15 bp, Homo sapiens
acttgacaagagaaa

SEQ ID NO: 694964 - DNA, 15 bp, Homo sapiens
cttgacaagagaaat

SEQ ID NO: 694965 - DNA, 15 bp, Homo sapiens
ttgacaagagaaatg

SEQ ID NO: 694966 - DNA, 15 bp, Homo sapiens
tgacaagagaaatga

SEQ ID NO: 694967 - DNA, 15 bp, Homo sapiens
gacaagagaaatgat

SEQ ID NO: 694968 - DNA, 15 bp, Homo sapiens
acaagagaaatgata

SEQ ID NO: 694969 - DNA, 15 bp, Homo sapiens
caagagaaatgataa

SEQ ID NO: 694970 - DNA, 15 bp, Homo sapiens
aagagaaatgataaa

SEQ ID NO: 694971 - DNA, 15 bp, Homo sapiens
agagaaatgataaaa

SEQ ID NO: 694972 - DNA, 15 bp, Homo sapiens
gagaaatgataaaac

SEQ ID NO: 694973 - DNA, 15 bp, Homo sapiens
agaaatgataaaaca

SEQ ID NO: 694974 - DNA, 15 bp, Homo sapiens
gaaatgataaaacat

SEQ ID NO: 694975 - DNA, 15 bp, Homo sapiens
aaatgataaaacatt

SEQ ID NO: 694976 - DNA, 15 bp, Homo sapiens
aatgataaaacattt

SEQ ID NO: 694977 - DNA, 15 bp, Homo sapiens
atgataaaacattta

SEQ ID NO: 694978 - DNA, 15 bp, Homo sapiens
tgataaaacatttag

SEQ ID NO: 694979 - DNA, 15 bp, Homo sapiens
gataaaacatttaga

SEQ ID NO: 694980 - DNA, 15 bp, Homo sapiens
ataaaacatttagaa

SEQ ID NO: 694981 - DNA, 15 bp, Homo sapiens
taaaacatttagaac

SEQ ID NO: 694982 - DNA, 15 bp, Homo sapiens
aaaacatttagaacg

SEQ ID NO: 694983 - DNA, 15 bp, Homo sapiens
aaacatttagaacga

SEQ ID NO: 694984 - DNA, 15 bp, Homo sapiens
aacatttagaacgat

SEQ ID NO: 694985 - DNA, 15 bp, Homo sapiens
acatttagaacgatg

SEQ ID NO: 694986 - DNA, 15 bp, Homo sapiens
catttagaacgatgt

SEQ ID NO: 694987 - DNA, 15 bp, Homo sapiens
atttagaacgatgtg

SEQ ID NO: 694988 - DNA, 15 bp, Homo sapiens
tttagaacgatgtga

SEQ ID NO: 694989 - DNA, 15 bp, Homo sapiens
ttagaacgatgtgaa

SEQ ID NO: 694990 - DNA, 15 bp, Homo sapiens
tagaacgatgtgaac

SEQ ID NO: 694991 - DNA, 15 bp, Homo sapiens
agaacgatgtgaaca

SEQ ID NO: 694992 - DNA, 15 bp, Homo sapiens
gaacgatgtgaacat

SEQ ID NO: 694993 - DNA, 15 bp, Homo sapiens
aacgatgtgaacatc

SEQ ID NO: 694994 - DNA, 15 bp, Homo sapiens
acgatgtgaacatcg

SEQ ID NO: 694995 - DNA, 15 bp, Homo sapiens
cgatgtgaacatcga

SEQ ID NO: 694996 - DNA, 15 bp, Homo sapiens
gatgtgaacatcgaa

SEQ ID NO: 694997 - DNA, 15 bp, Homo sapiens
atgtgaacatcgaat

SEQ ID NO: 694998 - DNA, 15 bp, Homo sapiens
tgtgaacatcgaatc

SEQ ID NO: 694999 - DNA, 15 bp, Homo sapiens
gtgaacatcgaatca

SEQ ID NO: 695000 - DNA, 15 bp, Homo sapiens
tgaacatcgaatcat

SEQ ID NO: 695001 - DNA, 15 bp, Homo sapiens
gaacatcgaatcatg

SEQ ID NO: 695002 - DNA, 15 bp, Homo sapiens
aacatcgaatcatgg

SEQ ID NO: 695003 - DNA, 15 bp, Homo sapiens
acatcgaatcatgga

SEQ ID NO: 695004 - DNA, 15 bp, Homo sapiens
catcgaatcatggaa

SEQ ID NO: 695005 - DNA, 15 bp, Homo sapiens
atcgaatcatggaat

SEQ ID NO: 695006 - DNA, 15 bp, Homo sapiens
tcgaatcatggaatc

SEQ ID NO: 695007 - DNA, 15 bp, Homo sapiens
cgaatcatggaatcc

SEQ ID NO: 695008 - DNA, 15 bp, Homo sapiens
gaatcatggaatccc

SEQ ID NO: 695009 - DNA, 15 bp, Homo sapiens
aatcatggaatccct

SEQ ID NO: 695010 - DNA, 15 bp, Homo sapiens
atcatggaatccctt

SEQ ID NO: 695011 - DNA, 15 bp, Homo sapiens
tcatggaatcccttg

SEQ ID NO: 695012 - DNA, 15 bp, Homo sapiens
catggaatcccttgc

SEQ ID NO: 695013 - DNA, 15 bp, Homo sapiens
atggaatcccttgca

SEQ ID NO: 695014 - DNA, 15 bp, Homo sapiens
tggaatcccttgcat

SEQ ID NO: 695015 - DNA, 15 bp, Homo sapiens
ggaatcccttgcatg

SEQ ID NO: 695016 - DNA, 15 bp, Homo sapiens
gaatcccttgcatgg

SEQ ID NO: 695017 - DNA, 15 bp, Homo sapiens
aatcccttgcatggc

SEQ ID NO: 695018 - DNA, 15 bp, Homo sapiens
atcccttgcatggct

SEQ ID NO: 695019 - DNA, 15 bp, Homo sapiens
tcccttgcatggctc

SEQ ID NO: 695020 - DNA, 15 bp, Homo sapiens
cccttgcatggctct

SEQ ID NO: 695021 - DNA, 15 bp, Homo sapiens
ccttgcatggctctc

SEQ ID NO: 695022 - DNA, 15 bp, Homo sapiens
cttgcatggctctca

SEQ ID NO: 695023 - DNA, 15 bp, Homo sapiens
ttgcatggctctcag

SEQ ID NO: 695024 - DNA, 15 bp, Homo sapiens
tgcatggctctcagt

SEQ ID NO: 695025 - DNA, 15 bp, Homo sapiens
gcatggctctcagta

SEQ ID NO: 695026 - DNA, 15 bp, Homo sapiens
catggctctcagtaa

SEQ ID NO: 695027 - DNA, 15 bp, Homo sapiens
atggctctcagtaag

SEQ ID NO: 695028 - DNA, 15 bp, Homo sapiens
tggctctcagtaagt

SEQ ID NO: 695029 - DNA, 15 bp, Homo sapiens
ggctctcagtaagta

SEQ ID NO: 695030 - DNA, 15 bp, Homo sapiens
gctctcagtaagtag

SEQ ID NO: 695031 - DNA, 15 bp, Homo sapiens
ctctcagtaagtagc

SEQ ID NO: 695032 - DNA, 15 bp, Homo sapiens
tctcagtaagtagct

SEQ ID NO: 695033 - DNA, 15 bp, Homo sapiens
ctcagtaagtagcta

SEQ ID NO: 695034 - DNA, 15 bp, Homo sapiens
tcagtaagtagctaa

SEQ ID NO: 695035 - DNA, 15 bp, Homo sapiens
cagtaagtagctaaa

SEQ ID NO: 695036 - DNA, 15 bp, Homo sapiens
agtaagtagctaaat

SEQ ID NO: 695037 - DNA, 15 bp, Homo sapiens
gtaagtagctaaata

SEQ ID NO: 695038 - DNA, 15 bp, Homo sapiens
taagtagctaaataa

SEQ ID NO: 695039 - DNA, 15 bp, Homo sapiens
aagtagctaaataat

SEQ ID NO: 695040 - DNA, 15 bp, Homo sapiens
agtagctaaataatt

SEQ ID NO: 695041 - DNA, 15 bp, Homo sapiens
gtagctaaataattg

SEQ ID NO: 695042 - DNA, 15 bp, Homo sapiens
tagctaaataattga

SEQ ID NO: 695043 - DNA, 15 bp, Homo sapiens
agctaaataattgaa

SEQ ID NO: 695044 - DNA, 15 bp, Homo sapiens
gctaaataattgaag

SEQ ID NO: 695045 - DNA, 15 bp, Homo sapiens
ctaaataattgaaga

SEQ ID NO: 695046 - DNA, 15 bp, Homo sapiens
taaataattgaagaa

SEQ ID NO: 695047 - DNA, 15 bp, Homo sapiens
aaataattgaagaaa

SEQ ID NO: 695048 - DNA, 15 bp, Homo sapiens
aataattgaagaaat

SEQ ID NO: 695049 - DNA, 15 bp, Homo sapiens
ataattgaagaaatt

SEQ ID NO: 695050 - DNA, 15 bp, Homo sapiens
taattgaagaaattc

SEQ ID NO: 695051 - DNA, 15 bp, Homo sapiens
aattgaagaaattca

SEQ ID NO: 695052 - DNA, 15 bp, Homo sapiens
attgaagaaattcat

SEQ ID NO: 695053 - DNA, 15 bp, Homo sapiens
ttgaagaaattcatt

SEQ ID NO: 695054 - DNA, 15 bp, Homo sapiens
tgaagaaattcattc

SEQ ID NO: 695055 - DNA, 15 bp, Homo sapiens
gaagaaattcattca

SEQ ID NO: 695056 - DNA, 15 bp, Homo sapiens
aagaaattcattcat

SEQ ID NO: 695057 - DNA, 15 bp, Homo sapiens
agaaattcattcatg

SEQ ID NO: 695058 - DNA, 15 bp, Homo sapiens
gaaattcattcatgt

SEQ ID NO: 695059 - DNA, 15 bp, Homo sapiens
aaattcattcatgtg

SEQ ID NO: 695060 - DNA, 15 bp, Homo sapiens
aattcattcatgtgc

SEQ ID NO: 695061 - DNA, 15 bp, Homo sapiens
attcattcatgtgca

SEQ ID NO: 695062 - DNA, 15 bp, Homo sapiens
ttcattcatgtgcat

SEQ ID NO: 695063 - DNA, 15 bp, Homo sapiens
tcattcatgtgcata

SEQ ID NO: 695064 - DNA, 15 bp, Homo sapiens
cattcatgtgcatat

SEQ ID NO: 695065 - DNA, 15 bp, Homo sapiens
attcatgtgcatatg

SEQ ID NO: 695066 - DNA, 15 bp, Homo sapiens
ttcatgtgcatatgg

SEQ ID NO: 695067 - DNA, 15 bp, Homo sapiens
tcatgtgcatatggc

SEQ ID NO: 695068 - DNA, 15 bp, Homo sapiens
catgtgcatatggct

SEQ ID NO: 695069 - DNA, 15 bp, Homo sapiens
atgtgcatatggcta

SEQ ID NO: 695070 - DNA, 15 bp, Homo sapiens
tgtgcatatggctaa

SEQ ID NO: 695071 - DNA, 15 bp, Homo sapiens
gtgcatatggctaac

SEQ ID NO: 695072 - DNA, 15 bp, Homo sapiens
tgcatatggctaaca

SEQ ID NO: 695073 - DNA, 15 bp, Homo sapiens
gcatatggctaacaa

SEQ ID NO: 695074 - DNA, 15 bp, Homo sapiens
catatggctaacaaa

SEQ ID NO: 695075 - DNA, 15 bp, Homo sapiens
atatggctaacaaat

SEQ ID NO: 695076 - DNA, 15 bp, Homo sapiens
tatggctaacaaatt

SEQ ID NO: 695077 - DNA, 15 bp, Homo sapiens
atggctaacaaatta

SEQ ID NO: 695078 - DNA, 15 bp, Homo sapiens
tggctaacaaattat

SEQ ID NO: 695079 - DNA, 15 bp, Homo sapiens
ggctaacaaattatt

SEQ ID NO: 695080 - DNA, 15 bp, Homo sapiens
gctaacaaattattg

SEQ ID NO: 695081 - DNA, 15 bp, Homo sapiens
ctaacaaattattgt

SEQ ID NO: 695082 - DNA, 15 bp, Homo sapiens
taacaaattattgtt

SEQ ID NO: 695083 - DNA, 15 bp, Homo sapiens
aacaaattattgtta

SEQ ID NO: 695084 - DNA, 15 bp, Homo sapiens
acaaattattgttag

SEQ ID NO: 695085 - DNA, 15 bp, Homo sapiens
caaattattgttagt

SEQ ID NO: 695086 - DNA, 15 bp, Homo sapiens
aaattattgttagtg

SEQ ID NO: 695087 - DNA, 15 bp, Homo sapiens
aattattgttagtga

SEQ ID NO: 695088 - DNA, 15 bp, Homo sapiens
attattgttagtgag

SEQ ID NO: 695089 - DNA, 15 bp, Homo sapiens
ttattgttagtgaga

SEQ ID NO: 695090 - DNA, 15 bp, Homo sapiens
tattgttagtgagag

SEQ ID NO: 695091 - DNA, 15 bp, Homo sapiens
attgttagtgagagg

SEQ ID NO: 695092 - DNA, 15 bp, Homo sapiens
ttgttagtgagaggt

SEQ ID NO: 695093 - DNA, 15 bp, Homo sapiens
tgttagtgagaggtg

SEQ ID NO: 695094 - DNA, 15 bp, Homo sapiens
gttagtgagaggtgt

SEQ ID NO: 695095 - DNA, 15 bp, Homo sapiens
ttagtgagaggtgtt

SEQ ID NO: 695096 - DNA, 15 bp, Homo sapiens
tagtgagaggtgttt

SEQ ID NO: 695097 - DNA, 15 bp, Homo sapiens
agtgagaggtgtttc

SEQ ID NO: 695098 - DNA, 15 bp, Homo sapiens
gtgagaggtgtttct

SEQ ID NO: 695099 - DNA, 15 bp, Homo sapiens
tgagaggtgtttctt

SEQ ID NO: 695100 - DNA, 15 bp, Homo sapiens
gagaggtgtttctta

SEQ ID NO: 695101 - DNA, 15 bp, Homo sapiens
agaggtgtttcttaa

SEQ ID NO: 695102 - DNA, 15 bp, Homo sapiens
gaggtgtttcttaac

SEQ ID NO: 695103 - DNA, 15 bp, Homo sapiens
aggtgtttcttaaca

SEQ ID NO: 695104 - DNA, 15 bp, Homo sapiens
ggtgtttcttaacat

SEQ ID NO: 695105 - DNA, 15 bp, Homo sapiens
gtgtttcttaacatc

SEQ ID NO: 695106 - DNA, 15 bp, Homo sapiens
tgtttcttaacatct

SEQ ID NO: 695107 - DNA, 15 bp, Homo sapiens
gtttcttaacatcta

SEQ ID NO: 695108 - DNA, 15 bp, Homo sapiens
tttcttaacatctac

SEQ ID NO: 695109 - DNA, 15 bp, Homo sapiens
ttcttaacatctacc

SEQ ID NO: 695110 - DNA, 15 bp, Homo sapiens
tcttaacatctacct

SEQ ID NO: 695111 - DNA, 15 bp, Homo sapiens
cttaacatctacctc

SEQ ID NO: 695112 - DNA, 15 bp, Homo sapiens
ttaacatctacctca

SEQ ID NO: 695113 - DNA, 15 bp, Homo sapiens
taacatctacctcaa

SEQ ID NO: 695114 - DNA, 15 bp, Homo sapiens
aacatctacctcaag

SEQ ID NO: 695115 - DNA, 15 bp, Homo sapiens
acatctacctcaaga

SEQ ID NO: 695116 - DNA, 15 bp, Homo sapiens
catctacctcaagaa

SEQ ID NO: 695117 - DNA, 15 bp, Homo sapiens
atctacctcaagaac

SEQ ID NO: 695118 - DNA, 15 bp, Homo sapiens
tctacctcaagaaca

SEQ ID NO: 695119 - DNA, 15 bp, Homo sapiens
ctacctcaagaacat

SEQ ID NO: 695120 - DNA, 15 bp, Homo sapiens
tacctcaagaacata

SEQ ID NO: 695121 - DNA, 15 bp, Homo sapiens
acctcaagaacatat

SEQ ID NO: 695122 - DNA, 15 bp, Homo sapiens
cctcaagaacatata

SEQ ID NO: 695123 - DNA, 15 bp, Homo sapiens
ctcaagaacatatag

SEQ ID NO: 695124 - DNA, 15 bp, Homo sapiens
tcaagaacatatagg

SEQ ID NO: 695125 - DNA, 15 bp, Homo sapiens
caagaacatataggg

SEQ ID NO: 695126 - DNA, 15 bp, Homo sapiens
aagaacatataggga

SEQ ID NO: 695127 - DNA, 15 bp, Homo sapiens
agaacatatagggaa

SEQ ID NO: 695128 - DNA, 15 bp, Homo sapiens
gaacatatagggaat

SEQ ID NO: 695129 - DNA, 15 bp, Homo sapiens
aacatatagggaatt

SEQ ID NO: 695130 - DNA, 15 bp, Homo sapiens
acatatagggaattt

SEQ ID NO: 695131 - DNA, 15 bp, Homo sapiens
catatagggaattta

SEQ ID NO: 695132 - DNA, 15 bp, Homo sapiens
atatagggaatttaa

SEQ ID NO: 695133 - DNA, 15 bp, Homo sapiens
tatagggaatttaat

SEQ ID NO: 695134 - DNA, 15 bp, Homo sapiens
atagggaatttaatg

SEQ ID NO: 695135 - DNA, 15 bp, Homo sapiens
tagggaatttaatga

SEQ ID NO: 695136 - DNA, 15 bp, Homo sapiens
agggaatttaatgaa

SEQ ID NO: 695137 - DNA, 15 bp, Homo sapiens
gggaatttaatgaat

SEQ ID NO: 695138 - DNA, 15 bp, Homo sapiens
ggaatttaatgaata

SEQ ID NO: 695139 - DNA, 15 bp, Homo sapiens
gaatttaatgaataa

SEQ ID NO: 695140 - DNA, 15 bp, Homo sapiens
aatttaatgaataat

SEQ ID NO: 695141 - DNA, 15 bp, Homo sapiens
atttaatgaataatg

SEQ ID NO: 695142 - DNA, 15 bp, Homo sapiens
tttaatgaataatgt

SEQ ID NO: 695143 - DNA, 15 bp, Homo sapiens
ttaatgaataatgtt

SEQ ID NO: 695144 - DNA, 15 bp, Homo sapiens
taatgaataatgtta

SEQ ID NO: 695145 - DNA, 15 bp, Homo sapiens
aatgaataatgttat

SEQ ID NO: 695146 - DNA, 15 bp, Homo sapiens
atgaataatgttatt

SEQ ID NO: 695147 - DNA, 15 bp, Homo sapiens
tgaataatgttattt

SEQ ID NO: 695148 - DNA, 15 bp, Homo sapiens
gaataatgttatttc

SEQ ID NO: 695149 - DNA, 15 bp, Homo sapiens
aataatgttatttca

SEQ ID NO: 695150 - DNA, 15 bp, Homo sapiens
ataatgttatttcag

SEQ ID NO: 695151 - DNA, 15 bp, Homo sapiens
taatgttatttcagt

SEQ ID NO: 695152 - DNA, 15 bp, Homo sapiens
aatgttatttcagtc

SEQ ID NO: 695153 - DNA, 15 bp, Homo sapiens
atgttatttcagtct

SEQ ID NO: 695154 - DNA, 15 bp, Homo sapiens
tgttatttcagtcta

SEQ ID NO: 695155 - DNA, 15 bp, Homo sapiens
gttatttcagtctat

SEQ ID NO: 695156 - DNA, 15 bp, Homo sapiens
ttatttcagtctata

SEQ ID NO: 695157 - DNA, 15 bp, Homo sapiens
tatttcagtctatag

SEQ ID NO: 695158 - DNA, 15 bp, Homo sapiens
atttcagtctatagc

SEQ ID NO: 695159 - DNA, 15 bp, Homo sapiens
tttcagtctatagcc

SEQ ID NO: 695160 - DNA, 15 bp, Homo sapiens
ttcagtctatagccc

SEQ ID NO: 695161 - DNA, 15 bp, Homo sapiens
tcagtctatagccca

SEQ ID NO: 695162 - DNA, 15 bp, Homo sapiens
cagtctatagcccaa

SEQ ID NO: 695163 - DNA, 15 bp, Homo sapiens
agtctatagcccaag

SEQ ID NO: 695164 - DNA, 15 bp, Homo sapiens
gtctatagcccaagg

SEQ ID NO: 695165 - DNA, 15 bp, Homo sapiens
tctatagcccaagga

SEQ ID NO: 695166 - DNA, 15 bp, Homo sapiens
ctatagcccaaggat

SEQ ID NO: 695167 - DNA, 15 bp, Homo sapiens
tatagcccaaggatc

SEQ ID NO: 695168 - DNA, 15 bp, Homo sapiens
atagcccaaggatca

SEQ ID NO: 695169 - DNA, 15 bp, Homo sapiens
tagcccaaggatcaa

SEQ ID NO: 695170 - DNA, 15 bp, Homo sapiens
agcccaaggatcaag

SEQ ID NO: 695171 - DNA, 15 bp, Homo sapiens
gcccaaggatcaagt

SEQ ID NO: 695172 - DNA, 15 bp, Homo sapiens
cccaaggatcaagtg

SEQ ID NO: 695173 - DNA, 15 bp, Homo sapiens
ccaaggatcaagtgg

SEQ ID NO: 695174 - DNA, 15 bp, Homo sapiens
caaggatcaagtgga

SEQ ID NO: 695175 - DNA, 15 bp, Homo sapiens
aaggatcaagtggaa

SEQ ID NO: 695176 - DNA, 15 bp, Homo sapiens
aggatcaagtggaat

SEQ ID NO: 695177 - DNA, 15 bp, Homo sapiens
ggatcaagtggaata

SEQ ID NO: 695178 - DNA, 15 bp, Homo sapiens
gatcaagtggaatat

SEQ ID NO: 695179 - DNA, 15 bp, Homo sapiens
atcaagtggaatatt

SEQ ID NO: 695180 - DNA, 15 bp, Homo sapiens
tcaagtggaatatta

SEQ ID NO: 695181 - DNA, 15 bp, Homo sapiens
caagtggaatattag

SEQ ID NO: 695182 - DNA, 15 bp, Homo sapiens
aagtggaatattaga

SEQ ID NO: 695183 - DNA, 15 bp, Homo sapiens
agtggaatattagaa

SEQ ID NO: 695184 - DNA, 15 bp, Homo sapiens
gtggaatattagaat

SEQ ID NO: 695185 - DNA, 15 bp, Homo sapiens
tggaatattagaatg

SEQ ID NO: 695186 - DNA, 15 bp, Homo sapiens
ggaatattagaatgg

SEQ ID NO: 695187 - DNA, 15 bp, Homo sapiens
gaatattagaatgga

SEQ ID NO: 695188 - DNA, 15 bp, Homo sapiens
aatattagaatggag

SEQ ID NO: 695189 - DNA, 15 bp, Homo sapiens
atattagaatggagc

SEQ ID NO: 695190 - DNA, 15 bp, Homo sapiens
tattagaatggagct

SEQ ID NO: 695191 - DNA, 15 bp, Homo sapiens
attagaatggagctt

SEQ ID NO: 695192 - DNA, 15 bp, Homo sapiens
ttagaatggagcttt

SEQ ID NO: 695193 - DNA, 15 bp, Homo sapiens
tagaatggagcttta

SEQ ID NO: 695194 - DNA, 15 bp, Homo sapiens
agaatggagctttaa

SEQ ID NO: 695195 - DNA, 15 bp, Homo sapiens
gaatggagctttaat

SEQ ID NO: 695196 - DNA, 15 bp, Homo sapiens
aatggagctttaatc

SEQ ID NO: 695197 - DNA, 15 bp, Homo sapiens
atggagctttaatcg

SEQ ID NO: 695198 - DNA, 15 bp, Homo sapiens
tggagctttaatcga

SEQ ID NO: 695199 - DNA, 15 bp, Homo sapiens
ggagctttaatcgag

SEQ ID NO: 695200 - DNA, 15 bp, Homo sapiens
gagctttaatcgagc

SEQ ID NO: 695201 - DNA, 15 bp, Homo sapiens
agctttaatcgagca

SEQ ID NO: 695202 - DNA, 15 bp, Homo sapiens
gctttaatcgagcac

SEQ ID NO: 695203 - DNA, 15 bp, Homo sapiens
ctttaatcgagcacc

SEQ ID NO: 695204 - DNA, 15 bp, Homo sapiens
tttaatcgagcaccc

SEQ ID NO: 695205 - DNA, 15 bp, Homo sapiens
ttaatcgagcaccct

SEQ ID NO: 695206 - DNA, 15 bp, Homo sapiens
taatcgagcacccta

SEQ ID NO: 695207 - DNA, 15 bp, Homo sapiens
aatcgagcaccctaa

SEQ ID NO: 695208 - DNA, 15 bp, Homo sapiens
atcgagcaccctaaa

SEQ ID NO: 695209 - DNA, 15 bp, Homo sapiens
tcgagcaccctaaac

SEQ ID NO: 695210 - DNA, 15 bp, Homo sapiens
cgagcaccctaaacc

SEQ ID NO: 695211 - DNA, 15 bp, Homo sapiens
gagcaccctaaacca

SEQ ID NO: 695212 - DNA, 15 bp, Homo sapiens
agcaccctaaaccat

SEQ ID NO: 695213 - DNA, 15 bp, Homo sapiens
gcaccctaaaccatc

SEQ ID NO: 695214 - DNA, 15 bp, Homo sapiens
caccctaaaccatct

SEQ ID NO: 695215 - DNA, 15 bp, Homo sapiens
accctaaaccatcta

SEQ ID NO: 695216 - DNA, 15 bp, Homo sapiens
ccctaaaccatctaa

SEQ ID NO: 695217 - DNA, 15 bp, Homo sapiens
cctaaaccatctaat

SEQ ID NO: 695218 - DNA, 15 bp, Homo sapiens
ctaaaccatctaata

SEQ ID NO: 695219 - DNA, 15 bp, Homo sapiens
taaaccatctaatac

SEQ ID NO: 695220 - DNA, 15 bp, Homo sapiens
aaaccatctaataca

SEQ ID NO: 695221 - DNA, 15 bp, Homo sapiens
aaccatctaatacag

SEQ ID NO: 695222 - DNA, 15 bp, Homo sapiens
accatctaatacagc

SEQ ID NO: 695223 - DNA, 15 bp, Homo sapiens
ccatctaatacagca

SEQ ID NO: 695224 - DNA, 15 bp, Homo sapiens
catctaatacagcac

SEQ ID NO: 695225 - DNA, 15 bp, Homo sapiens
atctaatacagcaca

SEQ ID NO: 695226 - DNA, 15 bp, Homo sapiens
tctaatacagcacag

SEQ ID NO: 695227 - DNA, 15 bp, Homo sapiens
ctaatacagcacagt

SEQ ID NO: 695228 - DNA, 15 bp, Homo sapiens
taatacagcacagtg

SEQ ID NO: 695229 - DNA, 15 bp, Homo sapiens
aatacagcacagtga

SEQ ID NO: 695230 - DNA, 15 bp, Homo sapiens
atacagcacagtgat

SEQ ID NO: 695231 - DNA, 15 bp, Homo sapiens
tacagcacagtgatt

SEQ ID NO: 695232 - DNA, 15 bp, Homo sapiens
acagcacagtgattt

SEQ ID NO: 695233 - DNA, 15 bp, Homo sapiens
cagcacagtgattta

SEQ ID NO: 695234 - DNA, 15 bp, Homo sapiens
agcacagtgatttat

SEQ ID NO: 695235 - DNA, 15 bp, Homo sapiens
gcacagtgatttatt

SEQ ID NO: 695236 - DNA, 15 bp, Homo sapiens
cacagtgatttattt

SEQ ID NO: 695237 - DNA, 15 bp, Homo sapiens
acagtgatttattta

SEQ ID NO: 695238 - DNA, 15 bp, Homo sapiens
cagtgatttatttaa

SEQ ID NO: 695239 - DNA, 15 bp, Homo sapiens
agtgatttatttaag

SEQ ID NO: 695240 - DNA, 15 bp, Homo sapiens
gtgatttatttaaga

SEQ ID NO: 695241 - DNA, 15 bp, Homo sapiens
tgatttatttaagaa

SEQ ID NO: 695242 - DNA, 15 bp, Homo sapiens
gatttatttaagaat

SEQ ID NO: 695243 - DNA, 15 bp, Homo sapiens
atttatttaagaata

SEQ ID NO: 695244 - DNA, 15 bp, Homo sapiens
tttatttaagaatag

SEQ ID NO: 695245 - DNA, 15 bp, Homo sapiens
ttatttaagaatagc

SEQ ID NO: 695246 - DNA, 15 bp, Homo sapiens
tatttaagaatagct

SEQ ID NO: 695247 - DNA, 15 bp, Homo sapiens
atttaagaatagctt

SEQ ID NO: 695248 - DNA, 15 bp, Homo sapiens
tttaagaatagcttt

SEQ ID NO: 695249 - DNA, 15 bp, Homo sapiens
ttaagaatagctttt

SEQ ID NO: 695250 - DNA, 15 bp, Homo sapiens
taagaatagcttttc

SEQ ID NO: 695251 - DNA, 15 bp, Homo sapiens
aagaatagcttttct

SEQ ID NO: 695252 - DNA, 15 bp, Homo sapiens
agaatagcttttctt

SEQ ID NO: 695253 - DNA, 15 bp, Homo sapiens
gaatagcttttctta

SEQ ID NO: 695254 - DNA, 15 bp, Homo sapiens
aatagcttttcttaa

SEQ ID NO: 695255 - DNA, 15 bp, Homo sapiens
atagcttttcttaaa

SEQ ID NO: 695256 - DNA, 15 bp, Homo sapiens
tagcttttcttaaaa

SEQ ID NO: 695257 - DNA, 15 bp, Homo sapiens
agcttttcttaaaac

SEQ ID NO: 695258 - DNA, 15 bp, Homo sapiens
gcttttcttaaaaca

SEQ ID NO: 695259 - DNA, 15 bp, Homo sapiens
cttttcttaaaacat

SEQ ID NO: 695260 - DNA, 15 bp, Homo sapiens
ttttcttaaaacatg

SEQ ID NO: 695261 - DNA, 15 bp, Homo sapiens
tttcttaaaacatgc

SEQ ID NO: 695262 - DNA, 15 bp, Homo sapiens
ttcttaaaacatgcc

SEQ ID NO: 695263 - DNA, 15 bp, Homo sapiens
tcttaaaacatgcca

SEQ ID NO: 695264 - DNA, 15 bp, Homo sapiens
cttaaaacatgccac

SEQ ID NO: 695265 - DNA, 15 bp, Homo sapiens
ttaaaacatgccact

SEQ ID NO: 695266 - DNA, 15 bp, Homo sapiens
taaaacatgccactt

SEQ ID NO: 695267 - DNA, 15 bp, Homo sapiens
aaaacatgccacttt

SEQ ID NO: 695268 - DNA, 15 bp, Homo sapiens
aaacatgccacttta

SEQ ID NO: 695269 - DNA, 15 bp, Homo sapiens
aacatgccactttaa

SEQ ID NO: 695270 - DNA, 15 bp, Homo sapiens
acatgccactttaaa

SEQ ID NO: 695271 - DNA, 15 bp, Homo sapiens
catgccactttaaaa

SEQ ID NO: 695272 - DNA, 15 bp, Homo sapiens
atgccactttaaaac

SEQ ID NO: 695273 - DNA, 15 bp, Homo sapiens
tgccactttaaaaca

SEQ ID NO: 695274 - DNA, 15 bp, Homo sapiens
gccactttaaaacaa

SEQ ID NO: 695275 - DNA, 15 bp, Homo sapiens
ccactttaaaacaaa

SEQ ID NO: 695276 - DNA, 15 bp, Homo sapiens
cactttaaaacaaaa

SEQ ID NO: 695277 - DNA, 15 bp, Homo sapiens
actttaaaacaaaac

SEQ ID NO: 695278 - DNA, 15 bp, Homo sapiens
ctttaaaacaaaacg

SEQ ID NO: 695279 - DNA, 15 bp, Homo sapiens
tttaaaacaaaacgg

SEQ ID NO: 695280 - DNA, 15 bp, Homo sapiens
ttaaaacaaaacgga

SEQ ID NO: 695281 - DNA, 15 bp, Homo sapiens
taaaacaaaacggat

SEQ ID NO: 695282 - DNA, 15 bp, Homo sapiens
aaaacaaaacggatt

SEQ ID NO: 695283 - DNA, 15 bp, Homo sapiens
aaacaaaacggattt

SEQ ID NO: 695284 - DNA, 15 bp, Homo sapiens
aacaaaacggatttt

SEQ ID NO: 695285 - DNA, 15 bp, Homo sapiens
acaaaacggattttt

SEQ ID NO: 695286 - DNA, 15 bp, Homo sapiens
caaaacggatttttt

SEQ ID NO: 695287 - DNA, 15 bp, Homo sapiens
aaaacggattttttt

SEQ ID NO: 695288 - DNA, 15 bp, Homo sapiens
aaacggatttttttt

SEQ ID NO: 695289 - DNA, 15 bp, Homo sapiens
aacggattttttttt

SEQ ID NO: 695290 - DNA, 15 bp, Homo sapiens
acggatttttttttt

SEQ ID NO: 695291 - DNA, 15 bp, Homo sapiens
cggatttttttttta

SEQ ID NO: 695292 - DNA, 15 bp, Homo sapiens
gattttttttttata

SEQ ID NO: 695293 - DNA, 15 bp, Homo sapiens
attttttttttatac

SEQ ID NO: 695294 - DNA, 15 bp, Homo sapiens
ttttttttttatact

SEQ ID NO: 695295 - DNA, 15 bp, Homo sapiens
tttttttttatactt

SEQ ID NO: 695296 - DNA, 15 bp, Homo sapiens
ttttttttatacttt

SEQ ID NO: 695297 - DNA, 15 bp, Homo sapiens
tttttttatacttta

SEQ ID NO: 695298 - DNA, 15 bp, Homo sapiens
ttttttatactttaa

SEQ ID NO: 695299 - DNA, 15 bp, Homo sapiens
tttttatactttaag

SEQ ID NO: 695300 - DNA, 15 bp, Homo sapiens
ttttatactttaagt

SEQ ID NO: 695301 - DNA, 15 bp, Homo sapiens
tttatactttaagtt

SEQ ID NO: 695302 - DNA, 15 bp, Homo sapiens
ttatactttaagttc

SEQ ID NO: 695303 - DNA, 15 bp, Homo sapiens
tatactttaagttct

SEQ ID NO: 695304 - DNA, 15 bp, Homo sapiens
atactttaagttcta

SEQ ID NO: 695305 - DNA, 15 bp, Homo sapiens
tactttaagttctag

SEQ ID NO: 695306 - DNA, 15 bp, Homo sapiens
actttaagttctagg

SEQ ID NO: 695307 - DNA, 15 bp, Homo sapiens
ctttaagttctaggg

SEQ ID NO: 695308 - DNA, 15 bp, Homo sapiens
tttaagttctagggt

SEQ ID NO: 695309 - DNA, 15 bp, Homo sapiens
ttaagttctagggta

SEQ ID NO: 695310 - DNA, 15 bp, Homo sapiens
taagttctagggtac

SEQ ID NO: 695311 - DNA, 15 bp, Homo sapiens
aagttctagggtaca

SEQ ID NO: 695312 - DNA, 15 bp, Homo sapiens
agttctagggtacat

SEQ ID NO: 695313 - DNA, 15 bp, Homo sapiens
gttctagggtacatg

SEQ ID NO: 695314 - DNA, 15 bp, Homo sapiens
ttctagggtacatgt

SEQ ID NO: 695315 - DNA, 15 bp, Homo sapiens
tctagggtacatgtg

SEQ ID NO: 695316 - DNA, 15 bp, Homo sapiens
ctagggtacatgtgc

SEQ ID NO: 695317 - DNA, 15 bp, Homo sapiens
tagggtacatgtgca

SEQ ID NO: 695318 - DNA, 15 bp, Homo sapiens
agggtacatgtgcac

SEQ ID NO: 695319 - DNA, 15 bp, Homo sapiens
gggtacatgtgcaca

SEQ ID NO: 695320 - DNA, 15 bp, Homo sapiens
ggtacatgtgcacaa

SEQ ID NO: 695321 - DNA, 15 bp, Homo sapiens
gtacatgtgcacaac

SEQ ID NO: 695322 - DNA, 15 bp, Homo sapiens
tacatgtgcacaacg

SEQ ID NO: 695323 - DNA, 15 bp, Homo sapiens
acatgtgcacaacgt

SEQ ID NO: 695324 - DNA, 15 bp, Homo sapiens
catgtgcacaacgtg

SEQ ID NO: 695325 - DNA, 15 bp, Homo sapiens
atgtgcacaacgtgc

SEQ ID NO: 695326 - DNA, 15 bp, Homo sapiens
tgtgcacaacgtgca

SEQ ID NO: 695327 - DNA, 15 bp, Homo sapiens
gtgcacaacgtgcag

SEQ ID NO: 695328 - DNA, 15 bp, Homo sapiens
tgcacaacgtgcagg

SEQ ID NO: 695329 - DNA, 15 bp, Homo sapiens
gcacaacgtgcaggt

SEQ ID NO: 695330 - DNA, 15 bp, Homo sapiens
cacaacgtgcaggtt

SEQ ID NO: 695331 - DNA, 15 bp, Homo sapiens
acaacgtgcaggttt

SEQ ID NO: 695332 - DNA, 15 bp, Homo sapiens
caacgtgcaggtttg

SEQ ID NO: 695333 - DNA, 15 bp, Homo sapiens
aacgtgcaggtttgt

SEQ ID NO: 695334 - DNA, 15 bp, Homo sapiens
acgtgcaggtttgtt

SEQ ID NO: 695335 - DNA, 15 bp, Homo sapiens
cgtgcaggtttgtta

SEQ ID NO: 695336 - DNA, 15 bp, Homo sapiens
gcaggtttgttacat

SEQ ID NO: 695337 - DNA, 15 bp, Homo sapiens
caggtttgttacata

SEQ ID NO: 695338 - DNA, 15 bp, Homo sapiens
aggtttgttacatat

SEQ ID NO: 695339 - DNA, 15 bp, Homo sapiens
ggtttgttacatatg

SEQ ID NO: 695340 - DNA, 15 bp, Homo sapiens
gtttgttacatatgt

SEQ ID NO: 695341 - DNA, 15 bp, Homo sapiens
tttgttacatatgta

SEQ ID NO: 695342 - DNA, 15 bp, Homo sapiens
ttgttacatatgtat

SEQ ID NO: 695343 - DNA, 15 bp, Homo sapiens
tgttacatatgtata

SEQ ID NO: 695344 - DNA, 15 bp, Homo sapiens
gttacatatgtatac

SEQ ID NO: 695345 - DNA, 15 bp, Homo sapiens
ttacatatgtataca

SEQ ID NO: 695346 - DNA, 15 bp, Homo sapiens
tacatatgtatacat

SEQ ID NO: 695347 - DNA, 15 bp, Homo sapiens
acatatgtatacatg

SEQ ID NO: 695348 - DNA, 15 bp, Homo sapiens
catatgtatacatgt

SEQ ID NO: 695349 - DNA, 15 bp, Homo sapiens
atatgtatacatgtg

SEQ ID NO: 695350 - DNA, 15 bp, Homo sapiens
tatgtatacatgtgc

SEQ ID NO: 695351 - DNA, 15 bp, Homo sapiens
atgtatacatgtgcc

SEQ ID NO: 695352 - DNA, 15 bp, Homo sapiens
tgtatacatgtgcca

SEQ ID NO: 695353 - DNA, 15 bp, Homo sapiens
gtatacatgtgccat

SEQ ID NO: 695354 - DNA, 15 bp, Homo sapiens
tatacatgtgccata

SEQ ID NO: 695355 - DNA, 15 bp, Homo sapiens
atacatgtgccatat

SEQ ID NO: 695356 - DNA, 15 bp, Homo sapiens
tacatgtgccatatt

SEQ ID NO: 695357 - DNA, 15 bp, Homo sapiens
acatgtgccatattg

SEQ ID NO: 695358 - DNA, 15 bp, Homo sapiens
catgtgccatattgg

SEQ ID NO: 695359 - DNA, 15 bp, Homo sapiens
atgtgccatattggt

SEQ ID NO: 695360 - DNA, 15 bp, Homo sapiens
tgtgccatattggtg

SEQ ID NO: 695361 - DNA, 15 bp, Homo sapiens
gtgccatattggtgt

SEQ ID NO: 695362 - DNA, 15 bp, Homo sapiens
tgccatattggtgtg

SEQ ID NO: 695363 - DNA, 15 bp, Homo sapiens
gccatattggtgtgc

SEQ ID NO: 695364 - DNA, 15 bp, Homo sapiens
ccatattggtgtgct

SEQ ID NO: 695365 - DNA, 15 bp, Homo sapiens
catattggtgtgctg

SEQ ID NO: 695366 - DNA, 15 bp, Homo sapiens
atattggtgtgctgc

SEQ ID NO: 695367 - DNA, 15 bp, Homo sapiens
tattggtgtgctgca

SEQ ID NO: 695368 - DNA, 15 bp, Homo sapiens
attggtgtgctgcac

SEQ ID NO: 695369 - DNA, 15 bp, Homo sapiens
ttggtgtgctgcacc

SEQ ID NO: 695370 - DNA, 15 bp, Homo sapiens
tggtgtgctgcaccc

SEQ ID NO: 695371 - DNA, 15 bp, Homo sapiens
ggtgtgctgcaccca

SEQ ID NO: 695372 - DNA, 15 bp, Homo sapiens
gtgtgctgcacccat

SEQ ID NO: 695373 - DNA, 15 bp, Homo sapiens
tgtgctgcacccatt

SEQ ID NO: 695374 - DNA, 15 bp, Homo sapiens
gtgctgcacccatta

SEQ ID NO: 695375 - DNA, 15 bp, Homo sapiens
tgctgcacccattaa

SEQ ID NO: 695376 - DNA, 15 bp, Homo sapiens
gctgcacccattaac

SEQ ID NO: 695377 - DNA, 15 bp, Homo sapiens
ctgcacccattaact

SEQ ID NO: 695378 - DNA, 15 bp, Homo sapiens
tgcacccattaactt

SEQ ID NO: 695379 - DNA, 15 bp, Homo sapiens
gcacccattaacttg

SEQ ID NO: 695380 - DNA, 15 bp, Homo sapiens
cacccattaacttgt

SEQ ID NO: 695381 - DNA, 15 bp, Homo sapiens
acccattaacttgtc

SEQ ID NO: 695382 - DNA, 15 bp, Homo sapiens
cccattaacttgtca

SEQ ID NO: 695383 - DNA, 15 bp, Homo sapiens
ccattaacttgtcat

SEQ ID NO: 695384 - DNA, 15 bp, Homo sapiens
cattaacttgtcatt

SEQ ID NO: 695385 - DNA, 15 bp, Homo sapiens
attaacttgtcattt

SEQ ID NO: 695386 - DNA, 15 bp, Homo sapiens
ttaacttgtcattta

SEQ ID NO: 695387 - DNA, 15 bp, Homo sapiens
taacttgtcatttac

SEQ ID NO: 695388 - DNA, 15 bp, Homo sapiens
aacttgtcatttaca

SEQ ID NO: 695389 - DNA, 15 bp, Homo sapiens
acttgtcatttacat

SEQ ID NO: 695390 - DNA, 15 bp, Homo sapiens
cttgtcatttacatt

SEQ ID NO: 695391 - DNA, 15 bp, Homo sapiens
tgtcatttacattag

SEQ ID NO: 695392 - DNA, 15 bp, Homo sapiens
gtcatttacattaga

SEQ ID NO: 695393 - DNA, 15 bp, Homo sapiens
tcatttacattagat

SEQ ID NO: 695394 - DNA, 15 bp, Homo sapiens
catttacattagata

SEQ ID NO: 695395 - DNA, 15 bp, Homo sapiens
atttacattagatat

SEQ ID NO: 695396 - DNA, 15 bp, Homo sapiens
tttacattagatata

SEQ ID NO: 695397 - DNA, 15 bp, Homo sapiens
ttacattagatatat

SEQ ID NO: 695398 - DNA, 15 bp, Homo sapiens
tacattagatatatc

SEQ ID NO: 695399 - DNA, 15 bp, Homo sapiens
acattagatatatct

SEQ ID NO: 695400 - DNA, 15 bp, Homo sapiens
cattagatatatctc

SEQ ID NO: 695401 - DNA, 15 bp, Homo sapiens
attagatatatctcc

SEQ ID NO: 695402 - DNA, 15 bp, Homo sapiens
ttagatatatctcct

SEQ ID NO: 695403 - DNA, 15 bp, Homo sapiens
tagatatatctccta

SEQ ID NO: 695404 - DNA, 15 bp, Homo sapiens
agatatatctcctaa

SEQ ID NO: 695405 - DNA, 15 bp, Homo sapiens
gatatatctcctaat

SEQ ID NO: 695406 - DNA, 15 bp, Homo sapiens
atatatctcctaatg

SEQ ID NO: 695407 - DNA, 15 bp, Homo sapiens
tatatctcctaatgc

SEQ ID NO: 695408 - DNA, 15 bp, Homo sapiens
atatctcctaatgct

SEQ ID NO: 695409 - DNA, 15 bp, Homo sapiens
tatctcctaatgcta

SEQ ID NO: 695410 - DNA, 15 bp, Homo sapiens
atctcctaatgctat

SEQ ID NO: 695411 - DNA, 15 bp, Homo sapiens
tctcctaatgctatc

SEQ ID NO: 695412 - DNA, 15 bp, Homo sapiens
ctcctaatgctatcc

SEQ ID NO: 695413 - DNA, 15 bp, Homo sapiens
tcctaatgctatccc

SEQ ID NO: 695414 - DNA, 15 bp, Homo sapiens
cctaatgctatccct

SEQ ID NO: 695415 - DNA, 15 bp, Homo sapiens
ctaatgctatccctc

SEQ ID NO: 695416 - DNA, 15 bp, Homo sapiens
taatgctatccctcc

SEQ ID NO: 695417 - DNA, 15 bp, Homo sapiens
aatgctatccctccc

SEQ ID NO: 695418 - DNA, 15 bp, Homo sapiens
atgctatccctccct

SEQ ID NO: 695419 - DNA, 15 bp, Homo sapiens
tgctatccctccctc

SEQ ID NO: 695420 - DNA, 15 bp, Homo sapiens
gctatccctccctcc

SEQ ID NO: 695421 - DNA, 15 bp, Homo sapiens
ctatccctccctcct

SEQ ID NO: 695422 - DNA, 15 bp, Homo sapiens
tatccctccctcctc

SEQ ID NO: 695423 - DNA, 15 bp, Homo sapiens
atccctccctcctct

SEQ ID NO: 695424 - DNA, 15 bp, Homo sapiens
tccctccctcctctc

SEQ ID NO: 695425 - DNA, 15 bp, Homo sapiens
ccctccctcctctcc

SEQ ID NO: 695426 - DNA, 15 bp, Homo sapiens
cctccctcctctccc

SEQ ID NO: 695427 - DNA, 15 bp, Homo sapiens
ctccctcctctccct

SEQ ID NO: 695428 - DNA, 15 bp, Homo sapiens
tccctcctctcccta

SEQ ID NO: 695429 - DNA, 15 bp, Homo sapiens
ccctcctctccctac

SEQ ID NO: 695430 - DNA, 15 bp, Homo sapiens
cctcctctccctacc

SEQ ID NO: 695431 - DNA, 15 bp, Homo sapiens
ctcctctccctaccc

SEQ ID NO: 695432 - DNA, 15 bp, Homo sapiens
tcctctccctacccc

SEQ ID NO: 695433 - DNA, 15 bp, Homo sapiens
cctctccctacccca

SEQ ID NO: 695434 - DNA, 15 bp, Homo sapiens
ctctccctaccccat

SEQ ID NO: 695435 - DNA, 15 bp, Homo sapiens
tctccctaccccatg

SEQ ID NO: 695436 - DNA, 15 bp, Homo sapiens
ctccctaccccatga

SEQ ID NO: 695437 - DNA, 15 bp, Homo sapiens
tccctaccccatgac

SEQ ID NO: 695438 - DNA, 15 bp, Homo sapiens
ccctaccccatgaca

SEQ ID NO: 695439 - DNA, 15 bp, Homo sapiens
cctaccccatgacag

SEQ ID NO: 695440 - DNA, 15 bp, Homo sapiens
ctaccccatgacagg

SEQ ID NO: 695441 - DNA, 15 bp, Homo sapiens
taccccatgacaggc

SEQ ID NO: 695442 - DNA, 15 bp, Homo sapiens
accccatgacaggcc

SEQ ID NO: 695443 - DNA, 15 bp, Homo sapiens
ccccatgacaggccc

SEQ ID NO: 695444 - DNA, 15 bp, Homo sapiens
cccatgacaggcccc

SEQ ID NO: 695445 - DNA, 15 bp, Homo sapiens
ccatgacaggcccca

SEQ ID NO: 695446 - DNA, 15 bp, Homo sapiens
catgacaggccccag

SEQ ID NO: 695447 - DNA, 15 bp, Homo sapiens
atgacaggccccagt

SEQ ID NO: 695448 - DNA, 15 bp, Homo sapiens
tgacaggccccagtg

SEQ ID NO: 695449 - DNA, 15 bp, Homo sapiens
gacaggccccagtgt

SEQ ID NO: 695450 - DNA, 15 bp, Homo sapiens
ggccccagtgtgtga

SEQ ID NO: 695451 - DNA, 15 bp, Homo sapiens
gccccagtgtgtgat

SEQ ID NO: 695452 - DNA, 15 bp, Homo sapiens
ccccagtgtgtgatg

SEQ ID NO: 695453 - DNA, 15 bp, Homo sapiens
cccagtgtgtgatgt

SEQ ID NO: 695454 - DNA, 15 bp, Homo sapiens
ccagtgtgtgatgtt

SEQ ID NO: 695455 - DNA, 15 bp, Homo sapiens
cagtgtgtgatgttc

SEQ ID NO: 695456 - DNA, 15 bp, Homo sapiens
agtgtgtgatgttcc

SEQ ID NO: 695457 - DNA, 15 bp, Homo sapiens
gtgtgtgatgttccc

SEQ ID NO: 695458 - DNA, 15 bp, Homo sapiens
tgtgtgatgttcccc

SEQ ID NO: 695459 - DNA, 15 bp, Homo sapiens
gtgtgatgttcccca

SEQ ID NO: 695460 - DNA, 15 bp, Homo sapiens
tgtgatgttccccac

SEQ ID NO: 695461 - DNA, 15 bp, Homo sapiens
gtgatgttccccacc

SEQ ID NO: 695462 - DNA, 15 bp, Homo sapiens
tgatgttccccaccc

SEQ ID NO: 695463 - DNA, 15 bp, Homo sapiens
gatgttccccaccct

SEQ ID NO: 695464 - DNA, 15 bp, Homo sapiens
atgttccccaccctg

SEQ ID NO: 695465 - DNA, 15 bp, Homo sapiens
tgttccccaccctgt

SEQ ID NO: 695466 - DNA, 15 bp, Homo sapiens
gttccccaccctgtg

SEQ ID NO: 695467 - DNA, 15 bp, Homo sapiens
ttccccaccctgtgt

SEQ ID NO: 695468 - DNA, 15 bp, Homo sapiens
tccccaccctgtgtc

SEQ ID NO: 695469 - DNA, 15 bp, Homo sapiens
ccccaccctgtgtcc

SEQ ID NO: 695470 - DNA, 15 bp, Homo sapiens
cccaccctgtgtcca

SEQ ID NO: 695471 - DNA, 15 bp, Homo sapiens
ccaccctgtgtccac

SEQ ID NO: 695472 - DNA, 15 bp, Homo sapiens
caccctgtgtccacg

SEQ ID NO: 695473 - DNA, 15 bp, Homo sapiens
accctgtgtccacgt

SEQ ID NO: 695474 - DNA, 15 bp, Homo sapiens
ccctgtgtccacgtg

SEQ ID NO: 695475 - DNA, 15 bp, Homo sapiens
cctgtgtccacgtgt

SEQ ID NO: 695476 - DNA, 15 bp, Homo sapiens
ctgtgtccacgtgtt

SEQ ID NO: 695477 - DNA, 15 bp, Homo sapiens
tgtgtccacgtgttc

SEQ ID NO: 695478 - DNA, 15 bp, Homo sapiens
gtgtccacgtgttct

SEQ ID NO: 695479 - DNA, 15 bp, Homo sapiens
tgtccacgtgttctc

SEQ ID NO: 695480 - DNA, 15 bp, Homo sapiens
gtccacgtgttctca

SEQ ID NO: 695481 - DNA, 15 bp, Homo sapiens
tccacgtgttctcat

SEQ ID NO: 695482 - DNA, 15 bp, Homo sapiens
ccacgtgttctcatt

SEQ ID NO: 695483 - DNA, 15 bp, Homo sapiens
cacgtgttctcattg

SEQ ID NO: 695484 - DNA, 15 bp, Homo sapiens
acgtgttctcattgt

SEQ ID NO: 695485 - DNA, 15 bp, Homo sapiens
cgtgttctcattgtt

SEQ ID NO: 695486 - DNA, 15 bp, Homo sapiens
gtgttctcattgttc

SEQ ID NO: 695487 - DNA, 15 bp, Homo sapiens
tgttctcattgttca

SEQ ID NO: 695488 - DNA, 15 bp, Homo sapiens
gttctcattgttcat

SEQ ID NO: 695489 - DNA, 15 bp, Homo sapiens
ttctcattgttcatt

SEQ ID NO: 695490 - DNA, 15 bp, Homo sapiens
tctcattgttcattt

SEQ ID NO: 695491 - DNA, 15 bp, Homo sapiens
ctcattgttcatttc

SEQ ID NO: 695492 - DNA, 15 bp, Homo sapiens
tcattgttcatttcc

SEQ ID NO: 695493 - DNA, 15 bp, Homo sapiens
cattgttcatttccc

SEQ ID NO: 695494 - DNA, 15 bp, Homo sapiens
attgttcatttccca

SEQ ID NO: 695495 - DNA, 15 bp, Homo sapiens
ttgttcatttcccac

SEQ ID NO: 695496 - DNA, 15 bp, Homo sapiens
tgttcatttcccacc

SEQ ID NO: 695497 - DNA, 15 bp, Homo sapiens
gttcatttcccacct

SEQ ID NO: 695498 - DNA, 15 bp, Homo sapiens
ttcatttcccaccta

SEQ ID NO: 695499 - DNA, 15 bp, Homo sapiens
tcatttcccacctat

SEQ ID NO: 695500 - DNA, 15 bp, Homo sapiens
catttcccacctatg

SEQ ID NO: 695501 - DNA, 15 bp, Homo sapiens
atttcccacctatga

SEQ ID NO: 695502 - DNA, 15 bp, Homo sapiens
tttcccacctatgag

SEQ ID NO: 695503 - DNA, 15 bp, Homo sapiens
ttcccacctatgagt

SEQ ID NO: 695504 - DNA, 15 bp, Homo sapiens
tcccacctatgagtg

SEQ ID NO: 695505 - DNA, 15 bp, Homo sapiens
cccacctatgagtga

SEQ ID NO: 695506 - DNA, 15 bp, Homo sapiens
ccacctatgagtgag

SEQ ID NO: 695507 - DNA, 15 bp, Homo sapiens
cacctatgagtgaga

SEQ ID NO: 695508 - DNA, 15 bp, Homo sapiens
acctatgagtgagaa

SEQ ID NO: 695509 - DNA, 15 bp, Homo sapiens
cctatgagtgagaac

SEQ ID NO: 695510 - DNA, 15 bp, Homo sapiens
ctatgagtgagaaca

SEQ ID NO: 695511 - DNA, 15 bp, Homo sapiens
tatgagtgagaacat

SEQ ID NO: 695512 - DNA, 15 bp, Homo sapiens
atgagtgagaacatg

SEQ ID NO: 695513 - DNA, 15 bp, Homo sapiens
tgagtgagaacatgc

SEQ ID NO: 695514 - DNA, 15 bp, Homo sapiens
gagtgagaacatgca

SEQ ID NO: 695515 - DNA, 15 bp, Homo sapiens
gtttggttttctgtc

SEQ ID NO: 695516 - DNA, 15 bp, Homo sapiens
tttggttttctgtct

SEQ ID NO: 695517 - DNA, 15 bp, Homo sapiens
ttggttttctgtctt

SEQ ID NO: 695518 - DNA, 15 bp, Homo sapiens
tggttttctgtcttg

SEQ ID NO: 695519 - DNA, 15 bp, Homo sapiens
ggttttctgtcttgg

SEQ ID NO: 695520 - DNA, 15 bp, Homo sapiens
gttttctgtcttggc

SEQ ID NO: 695521 - DNA, 15 bp, Homo sapiens
ttttctgtcttggca

SEQ ID NO: 695522 - DNA, 15 bp, Homo sapiens
tttctgtcttggcaa

SEQ ID NO: 695523 - DNA, 15 bp, Homo sapiens
ttctgtcttggcaat

SEQ ID NO: 695524 - DNA, 15 bp, Homo sapiens
tctgtcttggcaata

SEQ ID NO: 695525 - DNA, 15 bp, Homo sapiens
ctgtcttggcaatag

SEQ ID NO: 695526 - DNA, 15 bp, Homo sapiens
tgtcttggcaatagt

SEQ ID NO: 695527 - DNA, 15 bp, Homo sapiens
gtcttggcaatagtt

SEQ ID NO: 695528 - DNA, 15 bp, Homo sapiens
tcttggcaatagttt

SEQ ID NO: 695529 - DNA, 15 bp, Homo sapiens
cttggcaatagtttg

SEQ ID NO: 695530 - DNA, 15 bp, Homo sapiens
ttggcaatagtttgc

SEQ ID NO: 695531 - DNA, 15 bp, Homo sapiens
tggcaatagtttgct

SEQ ID NO: 695532 - DNA, 15 bp, Homo sapiens
ggcaatagtttgctc

SEQ ID NO: 695533 - DNA, 15 bp, Homo sapiens
gcaatagtttgctca

SEQ ID NO: 695534 - DNA, 15 bp, Homo sapiens
caatagtttgctcag

SEQ ID NO: 695535 - DNA, 15 bp, Homo sapiens
aatagtttgctcaga

SEQ ID NO: 695536 - DNA, 15 bp, Homo sapiens
atagtttgctcagaa

SEQ ID NO: 695537 - DNA, 15 bp, Homo sapiens
tagtttgctcagaat

SEQ ID NO: 695538 - DNA, 15 bp, Homo sapiens
agtttgctcagaatg

SEQ ID NO: 695539 - DNA, 15 bp, Homo sapiens
gtttgctcagaatga

SEQ ID NO: 695540 - DNA, 15 bp, Homo sapiens
tttgctcagaatgat

SEQ ID NO: 695541 - DNA, 15 bp, Homo sapiens
ttgctcagaatgatg

SEQ ID NO: 695542 - DNA, 15 bp, Homo sapiens
tgctcagaatgatgg

SEQ ID NO: 695543 - DNA, 15 bp, Homo sapiens
gctcagaatgatggt

SEQ ID NO: 695544 - DNA, 15 bp, Homo sapiens
ctcagaatgatggtt

SEQ ID NO: 695545 - DNA, 15 bp, Homo sapiens
tcagaatgatggttt

SEQ ID NO: 695546 - DNA, 15 bp, Homo sapiens
cagaatgatggtttc

SEQ ID NO: 695547 - DNA, 15 bp, Homo sapiens
agaatgatggtttcc

SEQ ID NO: 695548 - DNA, 15 bp, Homo sapiens
gaatgatggtttcca

SEQ ID NO: 695549 - DNA, 15 bp, Homo sapiens
aatgatggtttccag

SEQ ID NO: 695550 - DNA, 15 bp, Homo sapiens
atgatggtttccagc

SEQ ID NO: 695551 - DNA, 15 bp, Homo sapiens
tgatggtttccagct

SEQ ID NO: 695552 - DNA, 15 bp, Homo sapiens
gatggtttccagctt

SEQ ID NO: 695553 - DNA, 15 bp, Homo sapiens
atggtttccagcttc

SEQ ID NO: 695554 - DNA, 15 bp, Homo sapiens
tggtttccagcttca

SEQ ID NO: 695555 - DNA, 15 bp, Homo sapiens
ggtttccagcttcat

SEQ ID NO: 695556 - DNA, 15 bp, Homo sapiens
gtttccagcttcatc

SEQ ID NO: 695557 - DNA, 15 bp, Homo sapiens
tttccagcttcatcc

SEQ ID NO: 695558 - DNA, 15 bp, Homo sapiens
ttccagcttcatcca

SEQ ID NO: 695559 - DNA, 15 bp, Homo sapiens
tccagcttcatccat

SEQ ID NO: 695560 - DNA, 15 bp, Homo sapiens
ccagcttcatccatg

SEQ ID NO: 695561 - DNA, 15 bp, Homo sapiens
cagcttcatccatgt

SEQ ID NO: 695562 - DNA, 15 bp, Homo sapiens
agcttcatccatgtc

SEQ ID NO: 695563 - DNA, 15 bp, Homo sapiens
gcttcatccatgtcc

SEQ ID NO: 695564 - DNA, 15 bp, Homo sapiens
cttcatccatgtccc

SEQ ID NO: 695565 - DNA, 15 bp, Homo sapiens
ttcatccatgtccct

SEQ ID NO: 695566 - DNA, 15 bp, Homo sapiens
tcatccatgtcccta

SEQ ID NO: 695567 - DNA, 15 bp, Homo sapiens
catccatgtccctac

SEQ ID NO: 695568 - DNA, 15 bp, Homo sapiens
atccatgtccctaca

SEQ ID NO: 695569 - DNA, 15 bp, Homo sapiens
tccatgtccctacaa

SEQ ID NO: 695570 - DNA, 15 bp, Homo sapiens
ccatgtccctacaaa

SEQ ID NO: 695571 - DNA, 15 bp, Homo sapiens
catgtccctacaaag

SEQ ID NO: 695572 - DNA, 15 bp, Homo sapiens
atgtccctacaaagg

SEQ ID NO: 695573 - DNA, 15 bp, Homo sapiens
tgtccctacaaagga

SEQ ID NO: 695574 - DNA, 15 bp, Homo sapiens
gtccctacaaaggac

SEQ ID NO: 695575 - DNA, 15 bp, Homo sapiens
tccctacaaaggaca

SEQ ID NO: 695576 - DNA, 15 bp, Homo sapiens
ccctacaaaggacat

SEQ ID NO: 695577 - DNA, 15 bp, Homo sapiens
cctacaaaggacatg

SEQ ID NO: 695578 - DNA, 15 bp, Homo sapiens
ctacaaaggacatga

SEQ ID NO: 695579 - DNA, 15 bp, Homo sapiens
tacaaaggacatgaa

SEQ ID NO: 695580 - DNA, 15 bp, Homo sapiens
acaaaggacatgaac

SEQ ID NO: 695581 - DNA, 15 bp, Homo sapiens
caaaggacatgaact

SEQ ID NO: 695582 - DNA, 15 bp, Homo sapiens
aaaggacatgaactc

SEQ ID NO: 695583 - DNA, 15 bp, Homo sapiens
aaggacatgaactca

SEQ ID NO: 695584 - DNA, 15 bp, Homo sapiens
aggacatgaactcat

SEQ ID NO: 695585 - DNA, 15 bp, Homo sapiens
ggacatgaactcatc

SEQ ID NO: 695586 - DNA, 15 bp, Homo sapiens
gacatgaactcatcc

SEQ ID NO: 695587 - DNA, 15 bp, Homo sapiens
acatgaactcatcct

SEQ ID NO: 695588 - DNA, 15 bp, Homo sapiens
catgaactcatcctt

SEQ ID NO: 695589 - DNA, 15 bp, Homo sapiens
atgaactcatccttt

SEQ ID NO: 695590 - DNA, 15 bp, Homo sapiens
tgaactcatcctttt

SEQ ID NO: 695591 - DNA, 15 bp, Homo sapiens
gaactcatccttttt

SEQ ID NO: 695592 - DNA, 15 bp, Homo sapiens
aactcatcctttttt

SEQ ID NO: 695593 - DNA, 15 bp, Homo sapiens
actcatcctttttta

SEQ ID NO: 695594 - DNA, 15 bp, Homo sapiens
ctcatccttttttat

SEQ ID NO: 695595 - DNA, 15 bp, Homo sapiens
tcatccttttttatg

SEQ ID NO: 695596 - DNA, 15 bp, Homo sapiens
catccttttttatgg

SEQ ID NO: 695597 - DNA, 15 bp, Homo sapiens
atccttttttatggc

SEQ ID NO: 695598 - DNA, 15 bp, Homo sapiens
tccttttttatggct

SEQ ID NO: 695599 - DNA, 15 bp, Homo sapiens
ccttttttatggctg

SEQ ID NO: 695600 - DNA, 15 bp, Homo sapiens
cttttttatggctgc

SEQ ID NO: 695601 - DNA, 15 bp, Homo sapiens
ttttttatggctgca

SEQ ID NO: 695602 - DNA, 15 bp, Homo sapiens
tttttatggctgcat

SEQ ID NO: 695603 - DNA, 15 bp, Homo sapiens
ttttatggctgcata

SEQ ID NO: 695604 - DNA, 15 bp, Homo sapiens
tttatggctgcatag

SEQ ID NO: 695605 - DNA, 15 bp, Homo sapiens
ttatggctgcatagt

SEQ ID NO: 695606 - DNA, 15 bp, Homo sapiens
tatggctgcatagta

SEQ ID NO: 695607 - DNA, 15 bp, Homo sapiens
atggctgcatagtat

SEQ ID NO: 695608 - DNA, 15 bp, Homo sapiens
tggctgcatagtata

SEQ ID NO: 695609 - DNA, 15 bp, Homo sapiens
ggctgcatagtatat

SEQ ID NO: 695610 - DNA, 15 bp, Homo sapiens
gctgcatagtatata

SEQ ID NO: 695611 - DNA, 15 bp, Homo sapiens
ctgcatagtatatat

SEQ ID NO: 695612 - DNA, 15 bp, Homo sapiens
tgcatagtatatatg

SEQ ID NO: 695613 - DNA, 15 bp, Homo sapiens
gcatagtatatatgt

SEQ ID NO: 695614 - DNA, 15 bp, Homo sapiens
catagtatatatgtg

SEQ ID NO: 695615 - DNA, 15 bp, Homo sapiens
atagtatatatgtgc

SEQ ID NO: 695616 - DNA, 15 bp, Homo sapiens
tagtatatatgtgcc

SEQ ID NO: 695617 - DNA, 15 bp, Homo sapiens
agtatatatgtgcca

SEQ ID NO: 695618 - DNA, 15 bp, Homo sapiens
gtatatatgtgccac

SEQ ID NO: 695619 - DNA, 15 bp, Homo sapiens
tatatatgtgccaca

SEQ ID NO: 695620 - DNA, 15 bp, Homo sapiens
atatatgtgccacat

SEQ ID NO: 695621 - DNA, 15 bp, Homo sapiens
tatatgtgccacata

SEQ ID NO: 695622 - DNA, 15 bp, Homo sapiens
atatgtgccacatat

SEQ ID NO: 695623 - DNA, 15 bp, Homo sapiens
tatgtgccacatatt

SEQ ID NO: 695624 - DNA, 15 bp, Homo sapiens
atgtgccacatattc

SEQ ID NO: 695625 - DNA, 15 bp, Homo sapiens
tgtgccacatattcc

SEQ ID NO: 695626 - DNA, 15 bp, Homo sapiens
gtgccacatattcca

SEQ ID NO: 695627 - DNA, 15 bp, Homo sapiens
tgccacatattccat

SEQ ID NO: 695628 - DNA, 15 bp, Homo sapiens
gccacatattccatg

SEQ ID NO: 695629 - DNA, 15 bp, Homo sapiens
ccacatattccatgg

SEQ ID NO: 695630 - DNA, 15 bp, Homo sapiens
cacatattccatggt

SEQ ID NO: 695631 - DNA, 15 bp, Homo sapiens
acatattccatggta

SEQ ID NO: 695632 - DNA, 15 bp, Homo sapiens
catattccatggtat

SEQ ID NO: 695633 - DNA, 15 bp, Homo sapiens
atattccatggtata

SEQ ID NO: 695634 - DNA, 15 bp, Homo sapiens
tattccatggtatat

SEQ ID NO: 695635 - DNA, 15 bp, Homo sapiens
catggtatatatgtg

SEQ ID NO: 695636 - DNA, 15 bp, Homo sapiens
atggtatatatgtgc

SEQ ID NO: 695637 - DNA, 15 bp, Homo sapiens
tggtatatatgtgcc

SEQ ID NO: 695638 - DNA, 15 bp, Homo sapiens
ggtatatatgtgcca

SEQ ID NO: 695639 - DNA, 15 bp, Homo sapiens
tatatgtgccacatt

SEQ ID NO: 695640 - DNA, 15 bp, Homo sapiens
atatgtgccacattt

SEQ ID NO: 695641 - DNA, 15 bp, Homo sapiens
tatgtgccacatttt

SEQ ID NO: 695642 - DNA, 15 bp, Homo sapiens
atgtgccacattttc

SEQ ID NO: 695643 - DNA, 15 bp, Homo sapiens
tgtgccacattttct

SEQ ID NO: 695644 - DNA, 15 bp, Homo sapiens
gtgccacattttctt

SEQ ID NO: 695645 - DNA, 15 bp, Homo sapiens
tgccacattttctta

SEQ ID NO: 695646 - DNA, 15 bp, Homo sapiens
gccacattttcttac

SEQ ID NO: 695647 - DNA, 15 bp, Homo sapiens
ccacattttcttact

SEQ ID NO: 695648 - DNA, 15 bp, Homo sapiens
cacattttcttactc

SEQ ID NO: 695649 - DNA, 15 bp, Homo sapiens
acattttcttactcc

SEQ ID NO: 695650 - DNA, 15 bp, Homo sapiens
cattttcttactcca

SEQ ID NO: 695651 - DNA, 15 bp, Homo sapiens
attttcttactccag

SEQ ID NO: 695652 - DNA, 15 bp, Homo sapiens
ttttcttactccagt

SEQ ID NO: 695653 - DNA, 15 bp, Homo sapiens
tttcttactccagtc

SEQ ID NO: 695654 - DNA, 15 bp, Homo sapiens
ttcttactccagtct

SEQ ID NO: 695655 - DNA, 15 bp, Homo sapiens
tcttactccagtcta

SEQ ID NO: 695656 - DNA, 15 bp, Homo sapiens
cttactccagtctat

SEQ ID NO: 695657 - DNA, 15 bp, Homo sapiens
ttactccagtctatt

SEQ ID NO: 695658 - DNA, 15 bp, Homo sapiens
tactccagtctatta

SEQ ID NO: 695659 - DNA, 15 bp, Homo sapiens
actccagtctattat

SEQ ID NO: 695660 - DNA, 15 bp, Homo sapiens
ctccagtctattatt

SEQ ID NO: 695661 - DNA, 15 bp, Homo sapiens
tccagtctattattg

SEQ ID NO: 695662 - DNA, 15 bp, Homo sapiens
ccagtctattattgt

SEQ ID NO: 695663 - DNA, 15 bp, Homo sapiens
cagtctattattgtt

SEQ ID NO: 695664 - DNA, 15 bp, Homo sapiens
agtctattattgttg

SEQ ID NO: 695665 - DNA, 15 bp, Homo sapiens
gtctattattgttgg

SEQ ID NO: 695666 - DNA, 15 bp, Homo sapiens
tctattattgttgga

SEQ ID NO: 695667 - DNA, 15 bp, Homo sapiens
ctattattgttggac

SEQ ID NO: 695668 - DNA, 15 bp, Homo sapiens
tattattgttggaca

SEQ ID NO: 695669 - DNA, 15 bp, Homo sapiens
attattgttggacat

SEQ ID NO: 695670 - DNA, 15 bp, Homo sapiens
ttattgttggacatt

SEQ ID NO: 695671 - DNA, 15 bp, Homo sapiens
tattgttggacattt

SEQ ID NO: 695672 - DNA, 15 bp, Homo sapiens
attgttggacatttg

SEQ ID NO: 695673 - DNA, 15 bp, Homo sapiens
ttgttggacatttgg

SEQ ID NO: 695674 - DNA, 15 bp, Homo sapiens
tgttggacatttggg

SEQ ID NO: 695675 - DNA, 15 bp, Homo sapiens
gttggacatttgggt

SEQ ID NO: 695676 - DNA, 15 bp, Homo sapiens
ttggacatttgggtt

SEQ ID NO: 695677 - DNA, 15 bp, Homo sapiens
tggacatttgggttg

SEQ ID NO: 695678 - DNA, 15 bp, Homo sapiens
ggacatttgggttgc

SEQ ID NO: 695679 - DNA, 15 bp, Homo sapiens
gacatttgggttgct

SEQ ID NO: 695680 - DNA, 15 bp, Homo sapiens
acatttgggttgctt

SEQ ID NO: 695681 - DNA, 15 bp, Homo sapiens
catttgggttgcttc

SEQ ID NO: 695682 - DNA, 15 bp, Homo sapiens
atttgggttgcttcc

SEQ ID NO: 695683 - DNA, 15 bp, Homo sapiens
tttgggttgcttcca

SEQ ID NO: 695684 - DNA, 15 bp, Homo sapiens
ttgggttgcttccaa

SEQ ID NO: 695685 - DNA, 15 bp, Homo sapiens
tgggttgcttccaag

SEQ ID NO: 695686 - DNA, 15 bp, Homo sapiens
gggttgcttccaagt

SEQ ID NO: 695687 - DNA, 15 bp, Homo sapiens
ggttgcttccaagtc

SEQ ID NO: 695688 - DNA, 15 bp, Homo sapiens
gttgcttccaagtct

SEQ ID NO: 695689 - DNA, 15 bp, Homo sapiens
ttgcttccaagtctt

SEQ ID NO: 695690 - DNA, 15 bp, Homo sapiens
tgcttccaagtcttt

SEQ ID NO: 695691 - DNA, 15 bp, Homo sapiens
gcttccaagtctttg

SEQ ID NO: 695692 - DNA, 15 bp, Homo sapiens
cttccaagtctttgc

SEQ ID NO: 695693 - DNA, 15 bp, Homo sapiens
ttccaagtctttgct

SEQ ID NO: 695694 - DNA, 15 bp, Homo sapiens
tccaagtctttgcta

SEQ ID NO: 695695 - DNA, 15 bp, Homo sapiens
ccaagtctttgctat

SEQ ID NO: 695696 - DNA, 15 bp, Homo sapiens
caagtctttgctatt

SEQ ID NO: 695697 - DNA, 15 bp, Homo sapiens
aagtctttgctattg

SEQ ID NO: 695698 - DNA, 15 bp, Homo sapiens
agtctttgctattgt

SEQ ID NO: 695699 - DNA, 15 bp, Homo sapiens
gctattgtgaatagt

SEQ ID NO: 695700 - DNA, 15 bp, Homo sapiens
ctattgtgaatagtg

SEQ ID NO: 695701 - DNA, 15 bp, Homo sapiens
tattgtgaatagtgc

SEQ ID NO: 695702 - DNA, 15 bp, Homo sapiens
attgtgaatagtgcc

SEQ ID NO: 695703 - DNA, 15 bp, Homo sapiens
ttgtgaatagtgcca

SEQ ID NO: 695704 - DNA, 15 bp, Homo sapiens
tgtgaatagtgccac

SEQ ID NO: 695705 - DNA, 15 bp, Homo sapiens
gtgaatagtgccaca

SEQ ID NO: 695706 - DNA, 15 bp, Homo sapiens
tgaatagtgccacaa

SEQ ID NO: 695707 - DNA, 15 bp, Homo sapiens
gaatagtgccacaat

SEQ ID NO: 695708 - DNA, 15 bp, Homo sapiens
aatagtgccacaata

SEQ ID NO: 695709 - DNA, 15 bp, Homo sapiens
atagtgccacaataa

SEQ ID NO: 695710 - DNA, 15 bp, Homo sapiens
tagtgccacaataaa

SEQ ID NO: 695711 - DNA, 15 bp, Homo sapiens
agtgccacaataaac

SEQ ID NO: 695712 - DNA, 15 bp, Homo sapiens
gtgccacaataaaca

SEQ ID NO: 695713 - DNA, 15 bp, Homo sapiens
tgccacaataaacat

SEQ ID NO: 695714 - DNA, 15 bp, Homo sapiens
gccacaataaacata

SEQ ID NO: 695715 - DNA, 15 bp, Homo sapiens
ccacaataaacatac

SEQ ID NO: 695716 - DNA, 15 bp, Homo sapiens
cacaataaacatacg

SEQ ID NO: 695717 - DNA, 15 bp, Homo sapiens
acaataaacatacgt

SEQ ID NO: 695718 - DNA, 15 bp, Homo sapiens
caataaacatacgtg

SEQ ID NO: 695719 - DNA, 15 bp, Homo sapiens
aataaacatacgtgt

SEQ ID NO: 695720 - DNA, 15 bp, Homo sapiens
ataaacatacgtgtg

SEQ ID NO: 695721 - DNA, 15 bp, Homo sapiens
taaacatacgtgtgc

SEQ ID NO: 695722 - DNA, 15 bp, Homo sapiens
aaacatacgtgtgca

SEQ ID NO: 695723 - DNA, 15 bp, Homo sapiens
aacatacgtgtgcat

SEQ ID NO: 695724 - DNA, 15 bp, Homo sapiens
acatacgtgtgcatg

SEQ ID NO: 695725 - DNA, 15 bp, Homo sapiens
catacgtgtgcatgt

SEQ ID NO: 695726 - DNA, 15 bp, Homo sapiens
atacgtgtgcatgtg

SEQ ID NO: 695727 - DNA, 15 bp, Homo sapiens
tacgtgtgcatgtgt

SEQ ID NO: 695728 - DNA, 15 bp, Homo sapiens
acgtgtgcatgtgtc

SEQ ID NO: 695729 - DNA, 15 bp, Homo sapiens
cgtgtgcatgtgtct

SEQ ID NO: 695730 - DNA, 15 bp, Homo sapiens
gtgtgcatgtgtctt

SEQ ID NO: 695731 - DNA, 15 bp, Homo sapiens
tgtgcatgtgtcttt

SEQ ID NO: 695732 - DNA, 15 bp, Homo sapiens
gtgcatgtgtcttta

SEQ ID NO: 695733 - DNA, 15 bp, Homo sapiens
tgcatgtgtctttat

SEQ ID NO: 695734 - DNA, 15 bp, Homo sapiens
gcatgtgtctttata

SEQ ID NO: 695735 - DNA, 15 bp, Homo sapiens
catgtgtctttatag

SEQ ID NO: 695736 - DNA, 15 bp, Homo sapiens
atgtgtctttatagc

SEQ ID NO: 695737 - DNA, 15 bp, Homo sapiens
tgtgtctttatagca

SEQ ID NO: 695738 - DNA, 15 bp, Homo sapiens
gtgtctttatagcag

SEQ ID NO: 695739 - DNA, 15 bp, Homo sapiens
tgtctttatagcagc

SEQ ID NO: 695740 - DNA, 15 bp, Homo sapiens
gtctttatagcagca

SEQ ID NO: 695741 - DNA, 15 bp, Homo sapiens
tctttatagcagcat

SEQ ID NO: 695742 - DNA, 15 bp, Homo sapiens
ctttatagcagcatg

SEQ ID NO: 695743 - DNA, 15 bp, Homo sapiens
tttatagcagcatga

SEQ ID NO: 695744 - DNA, 15 bp, Homo sapiens
ttatagcagcatgat

SEQ ID NO: 695745 - DNA, 15 bp, Homo sapiens
tatagcagcatgatt

SEQ ID NO: 695746 - DNA, 15 bp, Homo sapiens
atagcagcatgattt

SEQ ID NO: 695747 - DNA, 15 bp, Homo sapiens
tagcagcatgattta

SEQ ID NO: 695748 - DNA, 15 bp, Homo sapiens
agcagcatgatttat

SEQ ID NO: 695749 - DNA, 15 bp, Homo sapiens
gcagcatgatttata

SEQ ID NO: 695750 - DNA, 15 bp, Homo sapiens
cagcatgatttataa

SEQ ID NO: 695751 - DNA, 15 bp, Homo sapiens
agcatgatttataat

SEQ ID NO: 695752 - DNA, 15 bp, Homo sapiens
gcatgatttataatc

SEQ ID NO: 695753 - DNA, 15 bp, Homo sapiens
catgatttataatcc

SEQ ID NO: 695754 - DNA, 15 bp, Homo sapiens
atgatttataatcct

SEQ ID NO: 695755 - DNA, 15 bp, Homo sapiens
tgatttataatcctt

SEQ ID NO: 695756 - DNA, 15 bp, Homo sapiens
gatttataatccttt

SEQ ID NO: 695757 - DNA, 15 bp, Homo sapiens
atttataatcctttg

SEQ ID NO: 695758 - DNA, 15 bp, Homo sapiens
tttataatcctttgg

SEQ ID NO: 695759 - DNA, 15 bp, Homo sapiens
ttataatcctttggg

SEQ ID NO: 695760 - DNA, 15 bp, Homo sapiens
tataatcctttgggt

SEQ ID NO: 695761 - DNA, 15 bp, Homo sapiens
ataatcctttgggta

SEQ ID NO: 695762 - DNA, 15 bp, Homo sapiens
taatcctttgggtat

SEQ ID NO: 695763 - DNA, 15 bp, Homo sapiens
aatcctttgggtata

SEQ ID NO: 695764 - DNA, 15 bp, Homo sapiens
atcctttgggtatat

SEQ ID NO: 695765 - DNA, 15 bp, Homo sapiens
tcctttgggtatata

SEQ ID NO: 695766 - DNA, 15 bp, Homo sapiens
cctttgggtatatac

SEQ ID NO: 695767 - DNA, 15 bp, Homo sapiens
ctttgggtatatacc

SEQ ID NO: 695768 - DNA, 15 bp, Homo sapiens
tttgggtatataccc

SEQ ID NO: 695769 - DNA, 15 bp, Homo sapiens
ttgggtatataccca

SEQ ID NO: 695770 - DNA, 15 bp, Homo sapiens
tgggtatatacccag

SEQ ID NO: 695771 - DNA, 15 bp, Homo sapiens
gggtatatacccagt

SEQ ID NO: 695772 - DNA, 15 bp, Homo sapiens
ggtatatacccagta

SEQ ID NO: 695773 - DNA, 15 bp, Homo sapiens
gtatatacccagtaa

SEQ ID NO: 695774 - DNA, 15 bp, Homo sapiens
tatatacccagtaat

SEQ ID NO: 695775 - DNA, 15 bp, Homo sapiens
atatacccagtaatg

SEQ ID NO: 695776 - DNA, 15 bp, Homo sapiens
tatacccagtaatga

SEQ ID NO: 695777 - DNA, 15 bp, Homo sapiens
atacccagtaatgag

SEQ ID NO: 695778 - DNA, 15 bp, Homo sapiens
tacccagtaatgaga

SEQ ID NO: 695779 - DNA, 15 bp, Homo sapiens
acccagtaatgagat

SEQ ID NO: 695780 - DNA, 15 bp, Homo sapiens
cccagtaatgagatg

SEQ ID NO: 695781 - DNA, 15 bp, Homo sapiens
ccagtaatgagatgg

SEQ ID NO: 695782 - DNA, 15 bp, Homo sapiens
cagtaatgagatggc

SEQ ID NO: 695783 - DNA, 15 bp, Homo sapiens
agtaatgagatggct

SEQ ID NO: 695784 - DNA, 15 bp, Homo sapiens
gtaatgagatggctg

SEQ ID NO: 695785 - DNA, 15 bp, Homo sapiens
taatgagatggctgg

SEQ ID NO: 695786 - DNA, 15 bp, Homo sapiens
aatgagatggctggg

SEQ ID NO: 695787 - DNA, 15 bp, Homo sapiens
atgagatggctgggt

SEQ ID NO: 695788 - DNA, 15 bp, Homo sapiens
tgagatggctgggtc

SEQ ID NO: 695789 - DNA, 15 bp, Homo sapiens
gagatggctgggtca

SEQ ID NO: 695790 - DNA, 15 bp, Homo sapiens
agatggctgggtcaa

SEQ ID NO: 695791 - DNA, 15 bp, Homo sapiens
gatggctgggtcaaa

SEQ ID NO: 695792 - DNA, 15 bp, Homo sapiens
atggctgggtcaaat

SEQ ID NO: 695793 - DNA, 15 bp, Homo sapiens
tggctgggtcaaatg

SEQ ID NO: 695794 - DNA, 15 bp, Homo sapiens
ggctgggtcaaatgc

SEQ ID NO: 695795 - DNA, 15 bp, Homo sapiens
gctgggtcaaatgct

SEQ ID NO: 695796 - DNA, 15 bp, Homo sapiens
ctgggtcaaatgcta

SEQ ID NO: 695797 - DNA, 15 bp, Homo sapiens
tgggtcaaatgctat

SEQ ID NO: 695798 - DNA, 15 bp, Homo sapiens
gggtcaaatgctatt

SEQ ID NO: 695799 - DNA, 15 bp, Homo sapiens
ggtcaaatgctattt

SEQ ID NO: 695800 - DNA, 15 bp, Homo sapiens
gtcaaatgctatttt

SEQ ID NO: 695801 - DNA, 15 bp, Homo sapiens
tcaaatgctattttt

SEQ ID NO: 695802 - DNA, 15 bp, Homo sapiens
caaatgctatttttg

SEQ ID NO: 695803 - DNA, 15 bp, Homo sapiens
aaatgctatttttgg

SEQ ID NO: 695804 - DNA, 15 bp, Homo sapiens
aatgctatttttggt

SEQ ID NO: 695805 - DNA, 15 bp, Homo sapiens
atgctatttttggtt

SEQ ID NO: 695806 - DNA, 15 bp, Homo sapiens
tgctatttttggttt

SEQ ID NO: 695807 - DNA, 15 bp, Homo sapiens
gctatttttggtttt

SEQ ID NO: 695808 - DNA, 15 bp, Homo sapiens
ctatttttggtttta

SEQ ID NO: 695809 - DNA, 15 bp, Homo sapiens
tatttttggttttag

SEQ ID NO: 695810 - DNA, 15 bp, Homo sapiens
atttttggttttaga

SEQ ID NO: 695811 - DNA, 15 bp, Homo sapiens
tttttggttttagat

SEQ ID NO: 695812 - DNA, 15 bp, Homo sapiens
ttttggttttagatc

SEQ ID NO: 695813 - DNA, 15 bp, Homo sapiens
tttggttttagatcc

SEQ ID NO: 695814 - DNA, 15 bp, Homo sapiens
ttggttttagatcct

SEQ ID NO: 695815 - DNA, 15 bp, Homo sapiens
tggttttagatcctt

SEQ ID NO: 695816 - DNA, 15 bp, Homo sapiens
ggttttagatccttg

SEQ ID NO: 695817 - DNA, 15 bp, Homo sapiens
gttttagatccttga

SEQ ID NO: 695818 - DNA, 15 bp, Homo sapiens
ttttagatccttgag

SEQ ID NO: 695819 - DNA, 15 bp, Homo sapiens
tttagatccttgagg

SEQ ID NO: 695820 - DNA, 15 bp, Homo sapiens
ttagatccttgagga

SEQ ID NO: 695821 - DNA, 15 bp, Homo sapiens
tagatccttgaggaa

SEQ ID NO: 695822 - DNA, 15 bp, Homo sapiens
agatccttgaggaat

SEQ ID NO: 695823 - DNA, 15 bp, Homo sapiens
gatccttgaggaatc

SEQ ID NO: 695824 - DNA, 15 bp, Homo sapiens
atccttgaggaatcg

SEQ ID NO: 695825 - DNA, 15 bp, Homo sapiens
tccttgaggaatcgc

SEQ ID NO: 695826 - DNA, 15 bp, Homo sapiens
ccttgaggaatcgcc

SEQ ID NO: 695827 - DNA, 15 bp, Homo sapiens
cttgaggaatcgcca

SEQ ID NO: 695828 - DNA, 15 bp, Homo sapiens
ttgaggaatcgccac

SEQ ID NO: 695829 - DNA, 15 bp, Homo sapiens
tgaggaatcgccaca

SEQ ID NO: 695830 - DNA, 15 bp, Homo sapiens
gaggaatcgccacac

SEQ ID NO: 695831 - DNA, 15 bp, Homo sapiens
aggaatcgccacact

SEQ ID NO: 695832 - DNA, 15 bp, Homo sapiens
ggaatcgccacactg

SEQ ID NO: 695833 - DNA, 15 bp, Homo sapiens
gaatcgccacactgt

SEQ ID NO: 695834 - DNA, 15 bp, Homo sapiens
aatcgccacactgtt

SEQ ID NO: 695835 - DNA, 15 bp, Homo sapiens
atcgccacactgttg

SEQ ID NO: 695836 - DNA, 15 bp, Homo sapiens
tcgccacactgttga

SEQ ID NO: 695837 - DNA, 15 bp, Homo sapiens
cgccacactgttgaa

SEQ ID NO: 695838 - DNA, 15 bp, Homo sapiens
gccacactgttgaac

SEQ ID NO: 695839 - DNA, 15 bp, Homo sapiens
ccacactgttgaact

SEQ ID NO: 695840 - DNA, 15 bp, Homo sapiens
cacactgttgaacta

SEQ ID NO: 695841 - DNA, 15 bp, Homo sapiens
acactgttgaactag

SEQ ID NO: 695842 - DNA, 15 bp, Homo sapiens
cactgttgaactagt

SEQ ID NO: 695843 - DNA, 15 bp, Homo sapiens
actgttgaactagtt

SEQ ID NO: 695844 - DNA, 15 bp, Homo sapiens
ctgttgaactagttt

SEQ ID NO: 695845 - DNA, 15 bp, Homo sapiens
tgttgaactagttta

SEQ ID NO: 695846 - DNA, 15 bp, Homo sapiens
gttgaactagtttac

SEQ ID NO: 695847 - DNA, 15 bp, Homo sapiens
ttgaactagtttaca

SEQ ID NO: 695848 - DNA, 15 bp, Homo sapiens
tgaactagtttacag

SEQ ID NO: 695849 - DNA, 15 bp, Homo sapiens
gaactagtttacagt

SEQ ID NO: 695850 - DNA, 15 bp, Homo sapiens
aactagtttacagtc

SEQ ID NO: 695851 - DNA, 15 bp, Homo sapiens
actagtttacagtcc

SEQ ID NO: 695852 - DNA, 15 bp, Homo sapiens
ctagtttacagtccc

SEQ ID NO: 695853 - DNA, 15 bp, Homo sapiens
tagtttacagtccca

SEQ ID NO: 695854 - DNA, 15 bp, Homo sapiens
agtttacagtcccac

SEQ ID NO: 695855 - DNA, 15 bp, Homo sapiens
gtttacagtcccacc

SEQ ID NO: 695856 - DNA, 15 bp, Homo sapiens
tttacagtcccacca

SEQ ID NO: 695857 - DNA, 15 bp, Homo sapiens
ttacagtcccaccaa

SEQ ID NO: 695858 - DNA, 15 bp, Homo sapiens
tacagtcccaccaac

SEQ ID NO: 695859 - DNA, 15 bp, Homo sapiens
acagtcccaccaaca

SEQ ID NO: 695860 - DNA, 15 bp, Homo sapiens
cagtcccaccaacag

SEQ ID NO: 695861 - DNA, 15 bp, Homo sapiens
agtcccaccaacagt

SEQ ID NO: 695862 - DNA, 15 bp, Homo sapiens
gtcccaccaacagtg

SEQ ID NO: 695863 - DNA, 15 bp, Homo sapiens
tcccaccaacagtgt

SEQ ID NO: 695864 - DNA, 15 bp, Homo sapiens
cccaccaacagtgta

SEQ ID NO: 695865 - DNA, 15 bp, Homo sapiens
ccaccaacagtgtaa

SEQ ID NO: 695866 - DNA, 15 bp, Homo sapiens
caccaacagtgtaaa

SEQ ID NO: 695867 - DNA, 15 bp, Homo sapiens
accaacagtgtaaaa

SEQ ID NO: 695868 - DNA, 15 bp, Homo sapiens
ccaacagtgtaaaag

SEQ ID NO: 695869 - DNA, 15 bp, Homo sapiens
caacagtgtaaaagt

SEQ ID NO: 695870 - DNA, 15 bp, Homo sapiens
aacagtgtaaaagtg

SEQ ID NO: 695871 - DNA, 15 bp, Homo sapiens
acagtgtaaaagtgt

SEQ ID NO: 695872 - DNA, 15 bp, Homo sapiens
cagtgtaaaagtgtt

SEQ ID NO: 695873 - DNA, 15 bp, Homo sapiens
agtgtaaaagtgttc

SEQ ID NO: 695874 - DNA, 15 bp, Homo sapiens
gtgtaaaagtgttcc

SEQ ID NO: 695875 - DNA, 15 bp, Homo sapiens
tgtaaaagtgttcct

SEQ ID NO: 695876 - DNA, 15 bp, Homo sapiens
gtaaaagtgttccta

SEQ ID NO: 695877 - DNA, 15 bp, Homo sapiens
taaaagtgttcctat

SEQ ID NO: 695878 - DNA, 15 bp, Homo sapiens
aaaagtgttcctatt

SEQ ID NO: 695879 - DNA, 15 bp, Homo sapiens
aaagtgttcctattt

SEQ ID NO: 695880 - DNA, 15 bp, Homo sapiens
aagtgttcctatttc

SEQ ID NO: 695881 - DNA, 15 bp, Homo sapiens
agtgttcctatttct

SEQ ID NO: 695882 - DNA, 15 bp, Homo sapiens
gtgttcctatttctt

SEQ ID NO: 695883 - DNA, 15 bp, Homo sapiens
tgttcctatttcttc

SEQ ID NO: 695884 - DNA, 15 bp, Homo sapiens
gttcctatttcttca

SEQ ID NO: 695885 - DNA, 15 bp, Homo sapiens
ttcctatttcttcac

SEQ ID NO: 695886 - DNA, 15 bp, Homo sapiens
tcctatttcttcaca

SEQ ID NO: 695887 - DNA, 15 bp, Homo sapiens
cctatttcttcacat

SEQ ID NO: 695888 - DNA, 15 bp, Homo sapiens
ctatttcttcacatc

SEQ ID NO: 695889 - DNA, 15 bp, Homo sapiens
tatttcttcacatcc

SEQ ID NO: 695890 - DNA, 15 bp, Homo sapiens
atttcttcacatcct

SEQ ID NO: 695891 - DNA, 15 bp, Homo sapiens
tttcttcacatcctc

SEQ ID NO: 695892 - DNA, 15 bp, Homo sapiens
ttcttcacatcctct

SEQ ID NO: 695893 - DNA, 15 bp, Homo sapiens
tcttcacatcctctc

SEQ ID NO: 695894 - DNA, 15 bp, Homo sapiens
cttcacatcctctcc

SEQ ID NO: 695895 - DNA, 15 bp, Homo sapiens
ttcacatcctctcca

SEQ ID NO: 695896 - DNA, 15 bp, Homo sapiens
tcacatcctctccag

SEQ ID NO: 695897 - DNA, 15 bp, Homo sapiens
cacatcctctccagc

SEQ ID NO: 695898 - DNA, 15 bp, Homo sapiens
acatcctctccagca

SEQ ID NO: 695899 - DNA, 15 bp, Homo sapiens
catcctctccagcat

SEQ ID NO: 695900 - DNA, 15 bp, Homo sapiens
atcctctccagcatc

SEQ ID NO: 695901 - DNA, 15 bp, Homo sapiens
tcctctccagcatct

SEQ ID NO: 695902 - DNA, 15 bp, Homo sapiens
cctctccagcatctg

SEQ ID NO: 695903 - DNA, 15 bp, Homo sapiens
ctctccagcatctgt

SEQ ID NO: 695904 - DNA, 15 bp, Homo sapiens
tctccagcatctgtt

SEQ ID NO: 695905 - DNA, 15 bp, Homo sapiens
ctccagcatctgttg

SEQ ID NO: 695906 - DNA, 15 bp, Homo sapiens
tccagcatctgttgt

SEQ ID NO: 695907 - DNA, 15 bp, Homo sapiens
ccagcatctgttgtt

SEQ ID NO: 695908 - DNA, 15 bp, Homo sapiens
cagcatctgttgttt

SEQ ID NO: 695909 - DNA, 15 bp, Homo sapiens
agcatctgttgtttc

SEQ ID NO: 695910 - DNA, 15 bp, Homo sapiens
gcatctgttgtttcc

SEQ ID NO: 695911 - DNA, 15 bp, Homo sapiens
catctgttgtttcct

SEQ ID NO: 695912 - DNA, 15 bp, Homo sapiens
atctgttgtttcctg

SEQ ID NO: 695913 - DNA, 15 bp, Homo sapiens
tctgttgtttcctga

SEQ ID NO: 695914 - DNA, 15 bp, Homo sapiens
ctgttgtttcctgac

SEQ ID NO: 695915 - DNA, 15 bp, Homo sapiens
tgttgtttcctgact

SEQ ID NO: 695916 - DNA, 15 bp, Homo sapiens
gttgtttcctgactt

SEQ ID NO: 695917 - DNA, 15 bp, Homo sapiens
ttgtttcctgacttt

SEQ ID NO: 695918 - DNA, 15 bp, Homo sapiens
tgtttcctgactttt

SEQ ID NO: 695919 - DNA, 15 bp, Homo sapiens
gtttcctgacttttt

SEQ ID NO: 695920 - DNA, 15 bp, Homo sapiens
tttcctgacttttta

SEQ ID NO: 695921 - DNA, 15 bp, Homo sapiens
ttcctgactttttaa

SEQ ID NO: 695922 - DNA, 15 bp, Homo sapiens
tcctgactttttaat

SEQ ID NO: 695923 - DNA, 15 bp, Homo sapiens
cctgactttttaatg

SEQ ID NO: 695924 - DNA, 15 bp, Homo sapiens
ctgactttttaatga

SEQ ID NO: 695925 - DNA, 15 bp, Homo sapiens
tgactttttaatgat

SEQ ID NO: 695926 - DNA, 15 bp, Homo sapiens
gactttttaatgatc

SEQ ID NO: 695927 - DNA, 15 bp, Homo sapiens
actttttaatgatcg

SEQ ID NO: 695928 - DNA, 15 bp, Homo sapiens
ctttttaatgatcgc

SEQ ID NO: 695929 - DNA, 15 bp, Homo sapiens
tttttaatgatcgcc

SEQ ID NO: 695930 - DNA, 15 bp, Homo sapiens
ttttaatgatcgcca

SEQ ID NO: 695931 - DNA, 15 bp, Homo sapiens
tttaatgatcgccat

SEQ ID NO: 695932 - DNA, 15 bp, Homo sapiens
ttaatgatcgccatt

SEQ ID NO: 695933 - DNA, 15 bp, Homo sapiens
taatgatcgccattc

SEQ ID NO: 695934 - DNA, 15 bp, Homo sapiens
aatgatcgccattct

SEQ ID NO: 695935 - DNA, 15 bp, Homo sapiens
atgatcgccattcta

SEQ ID NO: 695936 - DNA, 15 bp, Homo sapiens
tgatcgccattctaa

SEQ ID NO: 695937 - DNA, 15 bp, Homo sapiens
gatcgccattctaac

SEQ ID NO: 695938 - DNA, 15 bp, Homo sapiens
atcgccattctaact

SEQ ID NO: 695939 - DNA, 15 bp, Homo sapiens
tcgccattctaactg

SEQ ID NO: 695940 - DNA, 15 bp, Homo sapiens
cgccattctaactgg

SEQ ID NO: 695941 - DNA, 15 bp, Homo sapiens
gccattctaactggt

SEQ ID NO: 695942 - DNA, 15 bp, Homo sapiens
ccattctaactggtg

SEQ ID NO: 695943 - DNA, 15 bp, Homo sapiens
cattctaactggtgt

SEQ ID NO: 695944 - DNA, 15 bp, Homo sapiens
attctaactggtgtg

SEQ ID NO: 695945 - DNA, 15 bp, Homo sapiens
ttctaactggtgtga

SEQ ID NO: 695946 - DNA, 15 bp, Homo sapiens
tctaactggtgtgag

SEQ ID NO: 695947 - DNA, 15 bp, Homo sapiens
ctaactggtgtgaga

SEQ ID NO: 695948 - DNA, 15 bp, Homo sapiens
taactggtgtgagat

SEQ ID NO: 695949 - DNA, 15 bp, Homo sapiens
aactggtgtgagatg

SEQ ID NO: 695950 - DNA, 15 bp, Homo sapiens
actggtgtgagatgg

SEQ ID NO: 695951 - DNA, 15 bp, Homo sapiens
ctggtgtgagatggt

SEQ ID NO: 695952 - DNA, 15 bp, Homo sapiens
tggtgtgagatggta

SEQ ID NO: 695953 - DNA, 15 bp, Homo sapiens
ggtgtgagatggtat

SEQ ID NO: 695954 - DNA, 15 bp, Homo sapiens
gtgtgagatggtatt

SEQ ID NO: 695955 - DNA, 15 bp, Homo sapiens
tgtgagatggtattt

SEQ ID NO: 695956 - DNA, 15 bp, Homo sapiens
gtgagatggtatttc

SEQ ID NO: 695957 - DNA, 15 bp, Homo sapiens
tgagatggtatttca

SEQ ID NO: 695958 - DNA, 15 bp, Homo sapiens
gagatggtatttcat

SEQ ID NO: 695959 - DNA, 15 bp, Homo sapiens
agatggtatttcatt

SEQ ID NO: 695960 - DNA, 15 bp, Homo sapiens
gatggtatttcattg

SEQ ID NO: 695961 - DNA, 15 bp, Homo sapiens
atggtatttcattgt

SEQ ID NO: 695962 - DNA, 15 bp, Homo sapiens
tggtatttcattgtg

SEQ ID NO: 695963 - DNA, 15 bp, Homo sapiens
ggtatttcattgtgg

SEQ ID NO: 695964 - DNA, 15 bp, Homo sapiens
gtatttcattgtggt

SEQ ID NO: 695965 - DNA, 15 bp, Homo sapiens
tatttcattgtggtt

SEQ ID NO: 695966 - DNA, 15 bp, Homo sapiens
atttcattgtggttt

SEQ ID NO: 695967 - DNA, 15 bp, Homo sapiens
tttcattgtggtttt

SEQ ID NO: 695968 - DNA, 15 bp, Homo sapiens
ttcattgtggttttg

SEQ ID NO: 695969 - DNA, 15 bp, Homo sapiens
atttgcatttctctg

SEQ ID NO: 695970 - DNA, 15 bp, Homo sapiens
tttgcatttctctga

SEQ ID NO: 695971 - DNA, 15 bp, Homo sapiens
ttgcatttctctgat

SEQ ID NO: 695972 - DNA, 15 bp, Homo sapiens
tgcatttctctgatg

SEQ ID NO: 695973 - DNA, 15 bp, Homo sapiens
gcatttctctgatgg

SEQ ID NO: 695974 - DNA, 15 bp, Homo sapiens
catttctctgatggc

SEQ ID NO: 695975 - DNA, 15 bp, Homo sapiens
atttctctgatggcc

SEQ ID NO: 695976 - DNA, 15 bp, Homo sapiens
tttctctgatggcca

SEQ ID NO: 695977 - DNA, 15 bp, Homo sapiens
ttctctgatggccag

SEQ ID NO: 695978 - DNA, 15 bp, Homo sapiens
tctctgatggccagt

SEQ ID NO: 695979 - DNA, 15 bp, Homo sapiens
ctctgatggccagtg

SEQ ID NO: 695980 - DNA, 15 bp, Homo sapiens
tctgatggccagtga

SEQ ID NO: 695981 - DNA, 15 bp, Homo sapiens
ctgatggccagtgat

SEQ ID NO: 695982 - DNA, 15 bp, Homo sapiens
tgatggccagtgatg

SEQ ID NO: 695983 - DNA, 15 bp, Homo sapiens
gatggccagtgatga

SEQ ID NO: 695984 - DNA, 15 bp, Homo sapiens
atggccagtgatgat

SEQ ID NO: 695985 - DNA, 15 bp, Homo sapiens
tggccagtgatgatg

SEQ ID NO: 695986 - DNA, 15 bp, Homo sapiens
ggccagtgatgatga

SEQ ID NO: 695987 - DNA, 15 bp, Homo sapiens
gccagtgatgatgag

SEQ ID NO: 695988 - DNA, 15 bp, Homo sapiens
ccagtgatgatgagc

SEQ ID NO: 695989 - DNA, 15 bp, Homo sapiens
cagtgatgatgagca

SEQ ID NO: 695990 - DNA, 15 bp, Homo sapiens
agtgatgatgagcat

SEQ ID NO: 695991 - DNA, 15 bp, Homo sapiens
gtgatgatgagcatt

SEQ ID NO: 695992 - DNA, 15 bp, Homo sapiens
tgatgatgagcattt

SEQ ID NO: 695993 - DNA, 15 bp, Homo sapiens
gatgatgagcatttt

SEQ ID NO: 695994 - DNA, 15 bp, Homo sapiens
atgatgagcattttt

SEQ ID NO: 695995 - DNA, 15 bp, Homo sapiens
tgatgagcatttttt

SEQ ID NO: 695996 - DNA, 15 bp, Homo sapiens
gatgagcattttttc

SEQ ID NO: 695997 - DNA, 15 bp, Homo sapiens
atgagcattttttca

SEQ ID NO: 695998 - DNA, 15 bp, Homo sapiens
tgagcattttttcat

SEQ ID NO: 695999 - DNA, 15 bp, Homo sapiens
gagcattttttcatg

SEQ ID NO: 696000 - DNA, 15 bp, Homo sapiens
agcattttttcatgt

SEQ ID NO: 696001 - DNA, 15 bp, Homo sapiens
gcattttttcatgtg

SEQ ID NO: 696002 - DNA, 15 bp, Homo sapiens
cattttttcatgtgt

SEQ ID NO: 696003 - DNA, 15 bp, Homo sapiens
attttttcatgtgtc

SEQ ID NO: 696004 - DNA, 15 bp, Homo sapiens
ttttttcatgtgtct

SEQ ID NO: 696005 - DNA, 15 bp, Homo sapiens
tttttcatgtgtctt

SEQ ID NO: 696006 - DNA, 15 bp, Homo sapiens
ttttcatgtgtcttt

SEQ ID NO: 696007 - DNA, 15 bp, Homo sapiens
tttcatgtgtctttt

SEQ ID NO: 696008 - DNA, 15 bp, Homo sapiens
ttcatgtgtcttttg

SEQ ID NO: 696009 - DNA, 15 bp, Homo sapiens
tcatgtgtcttttgg

SEQ ID NO: 696010 - DNA, 15 bp, Homo sapiens
catgtgtcttttggc

SEQ ID NO: 696011 - DNA, 15 bp, Homo sapiens
atgtgtcttttggct

SEQ ID NO: 696012 - DNA, 15 bp, Homo sapiens
tgtgtcttttggctg

SEQ ID NO: 696013 - DNA, 15 bp, Homo sapiens
gtgtcttttggctgc

SEQ ID NO: 696014 - DNA, 15 bp, Homo sapiens
tgtcttttggctgca

SEQ ID NO: 696015 - DNA, 15 bp, Homo sapiens
gtcttttggctgcat

SEQ ID NO: 696016 - DNA, 15 bp, Homo sapiens
tcttttggctgcata

SEQ ID NO: 696017 - DNA, 15 bp, Homo sapiens
cttttggctgcataa

SEQ ID NO: 696018 - DNA, 15 bp, Homo sapiens
ttttggctgcataaa

SEQ ID NO: 696019 - DNA, 15 bp, Homo sapiens
tttggctgcataaat

SEQ ID NO: 696020 - DNA, 15 bp, Homo sapiens
ttggctgcataaatg

SEQ ID NO: 696021 - DNA, 15 bp, Homo sapiens
tggctgcataaatgt

SEQ ID NO: 696022 - DNA, 15 bp, Homo sapiens
ggctgcataaatgtc

SEQ ID NO: 696023 - DNA, 15 bp, Homo sapiens
gctgcataaatgtct

SEQ ID NO: 696024 - DNA, 15 bp, Homo sapiens
ctgcataaatgtctt

SEQ ID NO: 696025 - DNA, 15 bp, Homo sapiens
tgcataaatgtcttc

SEQ ID NO: 696026 - DNA, 15 bp, Homo sapiens
gcataaatgtcttct

SEQ ID NO: 696027 - DNA, 15 bp, Homo sapiens
cataaatgtcttctt

SEQ ID NO: 696028 - DNA, 15 bp, Homo sapiens
ataaatgtcttcttt

SEQ ID NO: 696029 - DNA, 15 bp, Homo sapiens
taaatgtcttctttt

SEQ ID NO: 696030 - DNA, 15 bp, Homo sapiens
aaatgtcttcttttg

SEQ ID NO: 696031 - DNA, 15 bp, Homo sapiens
aatgtcttcttttga

SEQ ID NO: 696032 - DNA, 15 bp, Homo sapiens
atgtcttcttttgag

SEQ ID NO: 696033 - DNA, 15 bp, Homo sapiens
tgtcttcttttgaga

SEQ ID NO: 696034 - DNA, 15 bp, Homo sapiens
gtcttcttttgagaa

SEQ ID NO: 696035 - DNA, 15 bp, Homo sapiens
tcttcttttgagaag

SEQ ID NO: 696036 - DNA, 15 bp, Homo sapiens
cttcttttgagaagt

SEQ ID NO: 696037 - DNA, 15 bp, Homo sapiens
ttcttttgagaagtg

SEQ ID NO: 696038 - DNA, 15 bp, Homo sapiens
tcttttgagaagtgt

SEQ ID NO: 696039 - DNA, 15 bp, Homo sapiens
cttttgagaagtgtc

SEQ ID NO: 696040 - DNA, 15 bp, Homo sapiens
ttttgagaagtgtct

SEQ ID NO: 696041 - DNA, 15 bp, Homo sapiens
tttgagaagtgtctg

SEQ ID NO: 696042 - DNA, 15 bp, Homo sapiens
ttgagaagtgtctgt

SEQ ID NO: 696043 - DNA, 15 bp, Homo sapiens
tgagaagtgtctgtt

SEQ ID NO: 696044 - DNA, 15 bp, Homo sapiens
gagaagtgtctgttc

SEQ ID NO: 696045 - DNA, 15 bp, Homo sapiens
agaagtgtctgttca

SEQ ID NO: 696046 - DNA, 15 bp, Homo sapiens
gaagtgtctgttcat

SEQ ID NO: 696047 - DNA, 15 bp, Homo sapiens
aagtgtctgttcata

SEQ ID NO: 696048 - DNA, 15 bp, Homo sapiens
agtgtctgttcatat

SEQ ID NO: 696049 - DNA, 15 bp, Homo sapiens
gtgtctgttcatatc

SEQ ID NO: 696050 - DNA, 15 bp, Homo sapiens
tgtctgttcatatct

SEQ ID NO: 696051 - DNA, 15 bp, Homo sapiens
gtctgttcatatctt

SEQ ID NO: 696052 - DNA, 15 bp, Homo sapiens
tctgttcatatcttt

SEQ ID NO: 696053 - DNA, 15 bp, Homo sapiens
ctgttcatatctttc

SEQ ID NO: 696054 - DNA, 15 bp, Homo sapiens
tgttcatatctttca

SEQ ID NO: 696055 - DNA, 15 bp, Homo sapiens
gttcatatctttcac

SEQ ID NO: 696056 - DNA, 15 bp, Homo sapiens
ttcatatctttcacc

SEQ ID NO: 696057 - DNA, 15 bp, Homo sapiens
tcatatctttcaccc

SEQ ID NO: 696058 - DNA, 15 bp, Homo sapiens
catatctttcaccca

SEQ ID NO: 696059 - DNA, 15 bp, Homo sapiens
atatctttcacccac

SEQ ID NO: 696060 - DNA, 15 bp, Homo sapiens
tatctttcacccact

SEQ ID NO: 696061 - DNA, 15 bp, Homo sapiens
atctttcacccactt

SEQ ID NO: 696062 - DNA, 15 bp, Homo sapiens
tctttcacccacttt

SEQ ID NO: 696063 - DNA, 15 bp, Homo sapiens
ctttcacccactttt

SEQ ID NO: 696064 - DNA, 15 bp, Homo sapiens
tttcacccacttttt

SEQ ID NO: 696065 - DNA, 15 bp, Homo sapiens
ttcacccactttttg

SEQ ID NO: 696066 - DNA, 15 bp, Homo sapiens
tcacccactttttga

SEQ ID NO: 696067 - DNA, 15 bp, Homo sapiens
cacccactttttgat

SEQ ID NO: 696068 - DNA, 15 bp, Homo sapiens
acccactttttgatg

SEQ ID NO: 696069 - DNA, 15 bp, Homo sapiens
cccactttttgatgg

SEQ ID NO: 696070 - DNA, 15 bp, Homo sapiens
ccactttttgatggg

SEQ ID NO: 696071 - DNA, 15 bp, Homo sapiens
cactttttgatgggg

SEQ ID NO: 696072 - DNA, 15 bp, Homo sapiens
actttttgatggggt

SEQ ID NO: 696073 - DNA, 15 bp, Homo sapiens
ctttttgatggggtt

SEQ ID NO: 696074 - DNA, 15 bp, Homo sapiens
tttttgatggggttg

SEQ ID NO: 696075 - DNA, 15 bp, Homo sapiens
ttttgatggggttga

SEQ ID NO: 696076 - DNA, 15 bp, Homo sapiens
tttgatggggttgat

SEQ ID NO: 696077 - DNA, 15 bp, Homo sapiens
ttgatggggttgatt

SEQ ID NO: 696078 - DNA, 15 bp, Homo sapiens
tgatggggttgattt

SEQ ID NO: 696079 - DNA, 15 bp, Homo sapiens
gatggggttgatttt

SEQ ID NO: 696080 - DNA, 15 bp, Homo sapiens
atggggttgattttt

SEQ ID NO: 696081 - DNA, 15 bp, Homo sapiens
tggggttgatttttt

SEQ ID NO: 696082 - DNA, 15 bp, Homo sapiens
ggggttgattttttc

SEQ ID NO: 696083 - DNA, 15 bp, Homo sapiens
gggttgattttttct

SEQ ID NO: 696084 - DNA, 15 bp, Homo sapiens
ggttgattttttctt

SEQ ID NO: 696085 - DNA, 15 bp, Homo sapiens
gttgattttttcttg

SEQ ID NO: 696086 - DNA, 15 bp, Homo sapiens
ttgattttttcttgt

SEQ ID NO: 696087 - DNA, 15 bp, Homo sapiens
tgattttttcttgta

SEQ ID NO: 696088 - DNA, 15 bp, Homo sapiens
gattttttcttgtaa

SEQ ID NO: 696089 - DNA, 15 bp, Homo sapiens
attttttcttgtaaa

SEQ ID NO: 696090 - DNA, 15 bp, Homo sapiens
ttttttcttgtaaat

SEQ ID NO: 696091 - DNA, 15 bp, Homo sapiens
tttttcttgtaaatt

SEQ ID NO: 696092 - DNA, 15 bp, Homo sapiens
ttttcttgtaaattt

SEQ ID NO: 696093 - DNA, 15 bp, Homo sapiens
tttcttgtaaatttg

SEQ ID NO: 696094 - DNA, 15 bp, Homo sapiens
ttcttgtaaatttgt

SEQ ID NO: 696095 - DNA, 15 bp, Homo sapiens
tcttgtaaatttgtt

SEQ ID NO: 696096 - DNA, 15 bp, Homo sapiens
cttgtaaatttgttt

SEQ ID NO: 696097 - DNA, 15 bp, Homo sapiens
ttgtaaatttgtttg

SEQ ID NO: 696098 - DNA, 15 bp, Homo sapiens
tgtaaatttgtttga

SEQ ID NO: 696099 - DNA, 15 bp, Homo sapiens
gtaaatttgtttgag

SEQ ID NO: 696100 - DNA, 15 bp, Homo sapiens
taaatttgtttgagt

SEQ ID NO: 696101 - DNA, 15 bp, Homo sapiens
aaatttgtttgagtt

SEQ ID NO: 696102 - DNA, 15 bp, Homo sapiens
aatttgtttgagttc

SEQ ID NO: 696103 - DNA, 15 bp, Homo sapiens
atttgtttgagttct

SEQ ID NO: 696104 - DNA, 15 bp, Homo sapiens
tttgtttgagttctt

SEQ ID NO: 696105 - DNA, 15 bp, Homo sapiens
ttgtttgagttcttt

SEQ ID NO: 696106 - DNA, 15 bp, Homo sapiens
tgtttgagttctttg

SEQ ID NO: 696107 - DNA, 15 bp, Homo sapiens
gtttgagttctttgt

SEQ ID NO: 696108 - DNA, 15 bp, Homo sapiens
tttgagttctttgta

SEQ ID NO: 696109 - DNA, 15 bp, Homo sapiens
ttgagttctttgtag

SEQ ID NO: 696110 - DNA, 15 bp, Homo sapiens
tgagttctttgtaga

SEQ ID NO: 696111 - DNA, 15 bp, Homo sapiens
gagttctttgtagat

SEQ ID NO: 696112 - DNA, 15 bp, Homo sapiens
agttctttgtagatt

SEQ ID NO: 696113 - DNA, 15 bp, Homo sapiens
gttctttgtagattc

SEQ ID NO: 696114 - DNA, 15 bp, Homo sapiens
ttctttgtagattct

SEQ ID NO: 696115 - DNA, 15 bp, Homo sapiens
tctttgtagattctg

SEQ ID NO: 696116 - DNA, 15 bp, Homo sapiens
ctttgtagattctgg

SEQ ID NO: 696117 - DNA, 15 bp, Homo sapiens
tttgtagattctgga

SEQ ID NO: 696118 - DNA, 15 bp, Homo sapiens
tgtagattctggata

SEQ ID NO: 696119 - DNA, 15 bp, Homo sapiens
gtagattctggatat

SEQ ID NO: 696120 - DNA, 15 bp, Homo sapiens
tagattctggatatt

SEQ ID NO: 696121 - DNA, 15 bp, Homo sapiens
agattctggatatta

SEQ ID NO: 696122 - DNA, 15 bp, Homo sapiens
gattctggatattag

SEQ ID NO: 696123 - DNA, 15 bp, Homo sapiens
attctggatattagc

SEQ ID NO: 696124 - DNA, 15 bp, Homo sapiens
ttctggatattagcc

SEQ ID NO: 696125 - DNA, 15 bp, Homo sapiens
tctggatattagccc

SEQ ID NO: 696126 - DNA, 15 bp, Homo sapiens
ctggatattagccct

SEQ ID NO: 696127 - DNA, 15 bp, Homo sapiens
tggatattagccctt

SEQ ID NO: 696128 - DNA, 15 bp, Homo sapiens
ggatattagcccttt

SEQ ID NO: 696129 - DNA, 15 bp, Homo sapiens
gatattagccctttg

SEQ ID NO: 696130 - DNA, 15 bp, Homo sapiens
atattagccctttgt

SEQ ID NO: 696131 - DNA, 15 bp, Homo sapiens
tattagccctttgtc

SEQ ID NO: 696132 - DNA, 15 bp, Homo sapiens
attagccctttgtca

SEQ ID NO: 696133 - DNA, 15 bp, Homo sapiens
ttagccctttgtcag

SEQ ID NO: 696134 - DNA, 15 bp, Homo sapiens
tagccctttgtcaga

SEQ ID NO: 696135 - DNA, 15 bp, Homo sapiens
agccctttgtcagat

SEQ ID NO: 696136 - DNA, 15 bp, Homo sapiens
gccctttgtcagatg

SEQ ID NO: 696137 - DNA, 15 bp, Homo sapiens
ccctttgtcagatgg

SEQ ID NO: 696138 - DNA, 15 bp, Homo sapiens
cctttgtcagatggg

SEQ ID NO: 696139 - DNA, 15 bp, Homo sapiens
ctttgtcagatgggt

SEQ ID NO: 696140 - DNA, 15 bp, Homo sapiens
tttgtcagatgggta

SEQ ID NO: 696141 - DNA, 15 bp, Homo sapiens
ttgtcagatgggtag

SEQ ID NO: 696142 - DNA, 15 bp, Homo sapiens
tgtcagatgggtaga

SEQ ID NO: 696143 - DNA, 15 bp, Homo sapiens
gtcagatgggtagat

SEQ ID NO: 696144 - DNA, 15 bp, Homo sapiens
tcagatgggtagatt

SEQ ID NO: 696145 - DNA, 15 bp, Homo sapiens
cagatgggtagattg

SEQ ID NO: 696146 - DNA, 15 bp, Homo sapiens
agatgggtagattgt

SEQ ID NO: 696147 - DNA, 15 bp, Homo sapiens
gatgggtagattgta

SEQ ID NO: 696148 - DNA, 15 bp, Homo sapiens
atgggtagattgtaa

SEQ ID NO: 696149 - DNA, 15 bp, Homo sapiens
tgggtagattgtaaa

SEQ ID NO: 696150 - DNA, 15 bp, Homo sapiens
gggtagattgtaaaa

SEQ ID NO: 696151 - DNA, 15 bp, Homo sapiens
ggtagattgtaaaag

SEQ ID NO: 696152 - DNA, 15 bp, Homo sapiens
gtagattgtaaaagt

SEQ ID NO: 696153 - DNA, 15 bp, Homo sapiens
tagattgtaaaagtt

SEQ ID NO: 696154 - DNA, 15 bp, Homo sapiens
agattgtaaaagttt

SEQ ID NO: 696155 - DNA, 15 bp, Homo sapiens
gattgtaaaagtttt

SEQ ID NO: 696156 - DNA, 15 bp, Homo sapiens
attgtaaaagttttc

SEQ ID NO: 696157 - DNA, 15 bp, Homo sapiens
ttgtaaaagttttct

SEQ ID NO: 696158 - DNA, 15 bp, Homo sapiens
tgtaaaagttttctc

SEQ ID NO: 696159 - DNA, 15 bp, Homo sapiens
gtaaaagttttctcc

SEQ ID NO: 696160 - DNA, 15 bp, Homo sapiens
taaaagttttctccc

SEQ ID NO: 696161 - DNA, 15 bp, Homo sapiens
aaaagttttctccca

SEQ ID NO: 696162 - DNA, 15 bp, Homo sapiens
aaagttttctcccat

SEQ ID NO: 696163 - DNA, 15 bp, Homo sapiens
aagttttctcccatt

SEQ ID NO: 696164 - DNA, 15 bp, Homo sapiens
agttttctcccattc

SEQ ID NO: 696165 - DNA, 15 bp, Homo sapiens
gttttctcccattct

SEQ ID NO: 696166 - DNA, 15 bp, Homo sapiens
tttctcccattctgt

SEQ ID NO: 696167 - DNA, 15 bp, Homo sapiens
ttctcccattctgta

SEQ ID NO: 696168 - DNA, 15 bp, Homo sapiens
tctcccattctgtag

SEQ ID NO: 696169 - DNA, 15 bp, Homo sapiens
ctcccattctgtagg

SEQ ID NO: 696170 - DNA, 15 bp, Homo sapiens
tcccattctgtaggt

SEQ ID NO: 696171 - DNA, 15 bp, Homo sapiens
cattctgtaggttgc

SEQ ID NO: 696172 - DNA, 15 bp, Homo sapiens
attctgtaggttgcc

SEQ ID NO: 696173 - DNA, 15 bp, Homo sapiens
ttctgtaggttgcct

SEQ ID NO: 696174 - DNA, 15 bp, Homo sapiens
tctgtaggttgcctg

SEQ ID NO: 696175 - DNA, 15 bp, Homo sapiens
ctgtaggttgcctgt

SEQ ID NO: 696176 - DNA, 15 bp, Homo sapiens
tgtaggttgcctgtt

SEQ ID NO: 696177 - DNA, 15 bp, Homo sapiens
gtaggttgcctgttc

SEQ ID NO: 696178 - DNA, 15 bp, Homo sapiens
taggttgcctgttca

SEQ ID NO: 696179 - DNA, 15 bp, Homo sapiens
aggttgcctgttcac

SEQ ID NO: 696180 - DNA, 15 bp, Homo sapiens
ggttgcctgttcact

SEQ ID NO: 696181 - DNA, 15 bp, Homo sapiens
gttgcctgttcactc

SEQ ID NO: 696182 - DNA, 15 bp, Homo sapiens
ttgcctgttcactct

SEQ ID NO: 696183 - DNA, 15 bp, Homo sapiens
tgcctgttcactctg

SEQ ID NO: 696184 - DNA, 15 bp, Homo sapiens
gcctgttcactctga

SEQ ID NO: 696185 - DNA, 15 bp, Homo sapiens
cctgttcactctgat

SEQ ID NO: 696186 - DNA, 15 bp, Homo sapiens
ctgttcactctgatc

SEQ ID NO: 696187 - DNA, 15 bp, Homo sapiens
tgttcactctgatcg

SEQ ID NO: 696188 - DNA, 15 bp, Homo sapiens
gttcactctgatcgt

SEQ ID NO: 696189 - DNA, 15 bp, Homo sapiens
ttcactctgatcgta

SEQ ID NO: 696190 - DNA, 15 bp, Homo sapiens
tcactctgatcgtag

SEQ ID NO: 696191 - DNA, 15 bp, Homo sapiens
cactctgatcgtagt

SEQ ID NO: 696192 - DNA, 15 bp, Homo sapiens
actctgatcgtagtt

SEQ ID NO: 696193 - DNA, 15 bp, Homo sapiens
ctctgatcgtagttt

SEQ ID NO: 696194 - DNA, 15 bp, Homo sapiens
tctgatcgtagtttc

SEQ ID NO: 696195 - DNA, 15 bp, Homo sapiens
ctgatcgtagtttct

SEQ ID NO: 696196 - DNA, 15 bp, Homo sapiens
tgatcgtagtttctt

SEQ ID NO: 696197 - DNA, 15 bp, Homo sapiens
gatcgtagtttcttt

SEQ ID NO: 696198 - DNA, 15 bp, Homo sapiens
atcgtagtttctttt

SEQ ID NO: 696199 - DNA, 15 bp, Homo sapiens
tcgtagtttcttttg

SEQ ID NO: 696200 - DNA, 15 bp, Homo sapiens
cgtagtttcttttgc

SEQ ID NO: 696201 - DNA, 15 bp, Homo sapiens
gtagtttcttttgct

SEQ ID NO: 696202 - DNA, 15 bp, Homo sapiens
tagtttcttttgctg

SEQ ID NO: 696203 - DNA, 15 bp, Homo sapiens
agtttcttttgctgt

SEQ ID NO: 696204 - DNA, 15 bp, Homo sapiens
gtgcagaagctcttt

SEQ ID NO: 696205 - DNA, 15 bp, Homo sapiens
tgcagaagctcttta

SEQ ID NO: 696206 - DNA, 15 bp, Homo sapiens
gcagaagctctttag

SEQ ID NO: 696207 - DNA, 15 bp, Homo sapiens
cagaagctctttagt

SEQ ID NO: 696208 - DNA, 15 bp, Homo sapiens
agaagctctttagtt

SEQ ID NO: 696209 - DNA, 15 bp, Homo sapiens
gaagctctttagttt

SEQ ID NO: 696210 - DNA, 15 bp, Homo sapiens
aagctctttagttta

SEQ ID NO: 696211 - DNA, 15 bp, Homo sapiens
agctctttagtttaa

SEQ ID NO: 696212 - DNA, 15 bp, Homo sapiens
gctctttagtttaat

SEQ ID NO: 696213 - DNA, 15 bp, Homo sapiens
ctctttagtttaatt

SEQ ID NO: 696214 - DNA, 15 bp, Homo sapiens
tctttagtttaatta

SEQ ID NO: 696215 - DNA, 15 bp, Homo sapiens
ctttagtttaattag

SEQ ID NO: 696216 - DNA, 15 bp, Homo sapiens
tttagtttaattaga

SEQ ID NO: 696217 - DNA, 15 bp, Homo sapiens
ttagtttaattagat

SEQ ID NO: 696218 - DNA, 15 bp, Homo sapiens
tagtttaattagatc

SEQ ID NO: 696219 - DNA, 15 bp, Homo sapiens
agtttaattagatcc

SEQ ID NO: 696220 - DNA, 15 bp, Homo sapiens
gtttaattagatccc

SEQ ID NO: 696221 - DNA, 15 bp, Homo sapiens
tttaattagatccca

SEQ ID NO: 696222 - DNA, 15 bp, Homo sapiens
ttaattagatcccat

SEQ ID NO: 696223 - DNA, 15 bp, Homo sapiens
taattagatcccatt

SEQ ID NO: 696224 - DNA, 15 bp, Homo sapiens
aattagatcccattt

SEQ ID NO: 696225 - DNA, 15 bp, Homo sapiens
attagatcccatttg

SEQ ID NO: 696226 - DNA, 15 bp, Homo sapiens
ttagatcccatttgt

SEQ ID NO: 696227 - DNA, 15 bp, Homo sapiens
tagatcccatttgtc

SEQ ID NO: 696228 - DNA, 15 bp, Homo sapiens
agatcccatttgtca

SEQ ID NO: 696229 - DNA, 15 bp, Homo sapiens
gatcccatttgtcaa

SEQ ID NO: 696230 - DNA, 15 bp, Homo sapiens
atcccatttgtcaat

SEQ ID NO: 696231 - DNA, 15 bp, Homo sapiens
tcccatttgtcaatt

SEQ ID NO: 696232 - DNA, 15 bp, Homo sapiens
cccatttgtcaattt

SEQ ID NO: 696233 - DNA, 15 bp, Homo sapiens
ccatttgtcaatttt

SEQ ID NO: 696234 - DNA, 15 bp, Homo sapiens
catttgtcaattttg

SEQ ID NO: 696235 - DNA, 15 bp, Homo sapiens
atttgtcaattttgg

SEQ ID NO: 696236 - DNA, 15 bp, Homo sapiens
tttgtcaattttggc

SEQ ID NO: 696237 - DNA, 15 bp, Homo sapiens
ttgtcaattttggct

SEQ ID NO: 696238 - DNA, 15 bp, Homo sapiens
tgtcaattttggctt

SEQ ID NO: 696239 - DNA, 15 bp, Homo sapiens
gtcaattttggcttt

SEQ ID NO: 696240 - DNA, 15 bp, Homo sapiens
tcaattttggctttt

SEQ ID NO: 696241 - DNA, 15 bp, Homo sapiens
caattttggcttttg

SEQ ID NO: 696242 - DNA, 15 bp, Homo sapiens
aattttggcttttgt

SEQ ID NO: 696243 - DNA, 15 bp, Homo sapiens
attttggcttttgtt

SEQ ID NO: 696244 - DNA, 15 bp, Homo sapiens
ttttggcttttgttg

SEQ ID NO: 696245 - DNA, 15 bp, Homo sapiens
tttggcttttgttgc

SEQ ID NO: 696246 - DNA, 15 bp, Homo sapiens
ttggcttttgttgct

SEQ ID NO: 696247 - DNA, 15 bp, Homo sapiens
tggcttttgttgcta

SEQ ID NO: 696248 - DNA, 15 bp, Homo sapiens
ggcttttgttgctat

SEQ ID NO: 696249 - DNA, 15 bp, Homo sapiens
gcttttgttgctatt

SEQ ID NO: 696250 - DNA, 15 bp, Homo sapiens
cttttgttgctattg

SEQ ID NO: 696251 - DNA, 15 bp, Homo sapiens
ttttgttgctattgc

SEQ ID NO: 696252 - DNA, 15 bp, Homo sapiens
tttgttgctattgct

SEQ ID NO: 696253 - DNA, 15 bp, Homo sapiens
ttgttgctattgctt

SEQ ID NO: 696254 - DNA, 15 bp, Homo sapiens
tgttgctattgcttt

SEQ ID NO: 696255 - DNA, 15 bp, Homo sapiens
gttgctattgctttt

SEQ ID NO: 696256 - DNA, 15 bp, Homo sapiens
ttgctattgcttttg

SEQ ID NO: 696257 - DNA, 15 bp, Homo sapiens
tgctattgcttttgg

SEQ ID NO: 696258 - DNA, 15 bp, Homo sapiens
gctattgcttttggt

SEQ ID NO: 696259 - DNA, 15 bp, Homo sapiens
ctattgcttttggtg

SEQ ID NO: 696260 - DNA, 15 bp, Homo sapiens
tattgcttttggtgt

SEQ ID NO: 696261 - DNA, 15 bp, Homo sapiens
attgcttttggtgtt

SEQ ID NO: 696262 - DNA, 15 bp, Homo sapiens
ttgcttttggtgttt

SEQ ID NO: 696263 - DNA, 15 bp, Homo sapiens
tgcttttggtgtttt

SEQ ID NO: 696264 - DNA, 15 bp, Homo sapiens
gcttttggtgtttta

SEQ ID NO: 696265 - DNA, 15 bp, Homo sapiens
cttttggtgttttag

SEQ ID NO: 696266 - DNA, 15 bp, Homo sapiens
ttttggtgttttagt

SEQ ID NO: 696267 - DNA, 15 bp, Homo sapiens
tttggtgttttagtc

SEQ ID NO: 696268 - DNA, 15 bp, Homo sapiens
ttggtgttttagtca

SEQ ID NO: 696269 - DNA, 15 bp, Homo sapiens
tggtgttttagtcat

SEQ ID NO: 696270 - DNA, 15 bp, Homo sapiens
ggtgttttagtcatg

SEQ ID NO: 696271 - DNA, 15 bp, Homo sapiens
gtgttttagtcatga

SEQ ID NO: 696272 - DNA, 15 bp, Homo sapiens
tgttttagtcatgaa

SEQ ID NO: 696273 - DNA, 15 bp, Homo sapiens
gttttagtcatgaag

SEQ ID NO: 696274 - DNA, 15 bp, Homo sapiens
ttttagtcatgaagt

SEQ ID NO: 696275 - DNA, 15 bp, Homo sapiens
tttagtcatgaagtc

SEQ ID NO: 696276 - DNA, 15 bp, Homo sapiens
ttagtcatgaagtcc

SEQ ID NO: 696277 - DNA, 15 bp, Homo sapiens
tagtcatgaagtcct

SEQ ID NO: 696278 - DNA, 15 bp, Homo sapiens
agtcatgaagtcctt

SEQ ID NO: 696279 - DNA, 15 bp, Homo sapiens
gtcatgaagtccttg

SEQ ID NO: 696280 - DNA, 15 bp, Homo sapiens
tcatgaagtccttgc

SEQ ID NO: 696281 - DNA, 15 bp, Homo sapiens
catgaagtccttgcc

SEQ ID NO: 696282 - DNA, 15 bp, Homo sapiens
atgaagtccttgccc

SEQ ID NO: 696283 - DNA, 15 bp, Homo sapiens
tgaagtccttgccca

SEQ ID NO: 696284 - DNA, 15 bp, Homo sapiens
gaagtccttgcccat

SEQ ID NO: 696285 - DNA, 15 bp, Homo sapiens
aagtccttgcccatg

SEQ ID NO: 696286 - DNA, 15 bp, Homo sapiens
agtccttgcccatgc

SEQ ID NO: 696287 - DNA, 15 bp, Homo sapiens
gtccttgcccatgcc

SEQ ID NO: 696288 - DNA, 15 bp, Homo sapiens
tccttgcccatgccg

SEQ ID NO: 696289 - DNA, 15 bp, Homo sapiens
ccttgcccatgccga

SEQ ID NO: 696290 - DNA, 15 bp, Homo sapiens
cttgcccatgccgat

SEQ ID NO: 696291 - DNA, 15 bp, Homo sapiens
ttgcccatgccgatg

SEQ ID NO: 696292 - DNA, 15 bp, Homo sapiens
tgcccatgccgatgt

SEQ ID NO: 696293 - DNA, 15 bp, Homo sapiens
gcccatgccgatgtc

SEQ ID NO: 696294 - DNA, 15 bp, Homo sapiens
cccatgccgatgtcc

SEQ ID NO: 696295 - DNA, 15 bp, Homo sapiens
ccatgccgatgtcct

SEQ ID NO: 696296 - DNA, 15 bp, Homo sapiens
catgccgatgtcctg

SEQ ID NO: 696297 - DNA, 15 bp, Homo sapiens
atgccgatgtcctga

SEQ ID NO: 696298 - DNA, 15 bp, Homo sapiens
tgccgatgtcctgaa

SEQ ID NO: 696299 - DNA, 15 bp, Homo sapiens
gccgatgtcctgaat

SEQ ID NO: 696300 - DNA, 15 bp, Homo sapiens
ccgatgtcctgaatg

SEQ ID NO: 696301 - DNA, 15 bp, Homo sapiens
cgatgtcctgaatgg

SEQ ID NO: 696302 - DNA, 15 bp, Homo sapiens
gatgtcctgaatggt

SEQ ID NO: 696303 - DNA, 15 bp, Homo sapiens
atgtcctgaatggta

SEQ ID NO: 696304 - DNA, 15 bp, Homo sapiens
tgtcctgaatggtat

SEQ ID NO: 696305 - DNA, 15 bp, Homo sapiens
gtcctgaatggtatt

SEQ ID NO: 696306 - DNA, 15 bp, Homo sapiens
tcctgaatggtattg

SEQ ID NO: 696307 - DNA, 15 bp, Homo sapiens
cctgaatggtattgc

SEQ ID NO: 696308 - DNA, 15 bp, Homo sapiens
ctgaatggtattgcc

SEQ ID NO: 696309 - DNA, 15 bp, Homo sapiens
tgaatggtattgcct

SEQ ID NO: 696310 - DNA, 15 bp, Homo sapiens
gaatggtattgccta

SEQ ID NO: 696311 - DNA, 15 bp, Homo sapiens
aatggtattgcctag

SEQ ID NO: 696312 - DNA, 15 bp, Homo sapiens
atggtattgcctagg

SEQ ID NO: 696313 - DNA, 15 bp, Homo sapiens
tggtattgcctaggt

SEQ ID NO: 696314 - DNA, 15 bp, Homo sapiens
ggtattgcctaggtt

SEQ ID NO: 696315 - DNA, 15 bp, Homo sapiens
gtattgcctaggttt

SEQ ID NO: 696316 - DNA, 15 bp, Homo sapiens
tattgcctaggtttt

SEQ ID NO: 696317 - DNA, 15 bp, Homo sapiens
attgcctaggttttc

SEQ ID NO: 696318 - DNA, 15 bp, Homo sapiens
ttgcctaggttttct

SEQ ID NO: 696319 - DNA, 15 bp, Homo sapiens
tgcctaggttttctt

SEQ ID NO: 696320 - DNA, 15 bp, Homo sapiens
gcctaggttttcttc

SEQ ID NO: 696321 - DNA, 15 bp, Homo sapiens
cctaggttttcttct

SEQ ID NO: 696322 - DNA, 15 bp, Homo sapiens
ctaggttttcttcta

SEQ ID NO: 696323 - DNA, 15 bp, Homo sapiens
taggttttcttctag

SEQ ID NO: 696324 - DNA, 15 bp, Homo sapiens
aggttttcttctagg

SEQ ID NO: 696325 - DNA, 15 bp, Homo sapiens
ggttttcttctaggg

SEQ ID NO: 696326 - DNA, 15 bp, Homo sapiens
gttttcttctagggt

SEQ ID NO: 696327 - DNA, 15 bp, Homo sapiens
ttttcttctagggtt

SEQ ID NO: 696328 - DNA, 15 bp, Homo sapiens
tttcttctagggttt

SEQ ID NO: 696329 - DNA, 15 bp, Homo sapiens
ttcttctagggtttt

SEQ ID NO: 696330 - DNA, 15 bp, Homo sapiens
tcttctagggttttt

SEQ ID NO: 696331 - DNA, 15 bp, Homo sapiens
cttctagggttttta

SEQ ID NO: 696332 - DNA, 15 bp, Homo sapiens
ttctagggtttttat

SEQ ID NO: 696333 - DNA, 15 bp, Homo sapiens
tctagggtttttatg

SEQ ID NO: 696334 - DNA, 15 bp, Homo sapiens
ctagggtttttatgg

SEQ ID NO: 696335 - DNA, 15 bp, Homo sapiens
tagggtttttatggt

SEQ ID NO: 696336 - DNA, 15 bp, Homo sapiens
agggtttttatggtt

SEQ ID NO: 696337 - DNA, 15 bp, Homo sapiens
gggtttttatggttt

SEQ ID NO: 696338 - DNA, 15 bp, Homo sapiens
ggtttttatggtttt

SEQ ID NO: 696339 - DNA, 15 bp, Homo sapiens
gtttttatggtttta

SEQ ID NO: 696340 - DNA, 15 bp, Homo sapiens
tttttatggttttag

SEQ ID NO: 696341 - DNA, 15 bp, Homo sapiens
ttttatggttttagg

SEQ ID NO: 696342 - DNA, 15 bp, Homo sapiens
tttatggttttaggt

SEQ ID NO: 696343 - DNA, 15 bp, Homo sapiens
ttatggttttaggtc

SEQ ID NO: 696344 - DNA, 15 bp, Homo sapiens
tatggttttaggtct

SEQ ID NO: 696345 - DNA, 15 bp, Homo sapiens
atggttttaggtcta

SEQ ID NO: 696346 - DNA, 15 bp, Homo sapiens
tggttttaggtctaa

SEQ ID NO: 696347 - DNA, 15 bp, Homo sapiens
ggttttaggtctaac

SEQ ID NO: 696348 - DNA, 15 bp, Homo sapiens
gttttaggtctaaca

SEQ ID NO: 696349 - DNA, 15 bp, Homo sapiens
ttttaggtctaacat

SEQ ID NO: 696350 - DNA, 15 bp, Homo sapiens
tttaggtctaacatt

SEQ ID NO: 696351 - DNA, 15 bp, Homo sapiens
ttaggtctaacattt

SEQ ID NO: 696352 - DNA, 15 bp, Homo sapiens
taggtctaacattta

SEQ ID NO: 696353 - DNA, 15 bp, Homo sapiens
aggtctaacatttaa

SEQ ID NO: 696354 - DNA, 15 bp, Homo sapiens
ggtctaacatttaag

SEQ ID NO: 696355 - DNA, 15 bp, Homo sapiens
gtctaacatttaagt

SEQ ID NO: 696356 - DNA, 15 bp, Homo sapiens
tctaacatttaagtc

SEQ ID NO: 696357 - DNA, 15 bp, Homo sapiens
ctaacatttaagtct

SEQ ID NO: 696358 - DNA, 15 bp, Homo sapiens
taacatttaagtctt

SEQ ID NO: 696359 - DNA, 15 bp, Homo sapiens
aacatttaagtcttt

SEQ ID NO: 696360 - DNA, 15 bp, Homo sapiens
acatttaagtcttta

SEQ ID NO: 696361 - DNA, 15 bp, Homo sapiens
catttaagtctttaa

SEQ ID NO: 696362 - DNA, 15 bp, Homo sapiens
atttaagtctttaat

SEQ ID NO: 696363 - DNA, 15 bp, Homo sapiens
tttaagtctttaatc

SEQ ID NO: 696364 - DNA, 15 bp, Homo sapiens
ttaagtctttaatcc

SEQ ID NO: 696365 - DNA, 15 bp, Homo sapiens
taagtctttaatcca

SEQ ID NO: 696366 - DNA, 15 bp, Homo sapiens
aagtctttaatccat

SEQ ID NO: 696367 - DNA, 15 bp, Homo sapiens
agtctttaatccatc

SEQ ID NO: 696368 - DNA, 15 bp, Homo sapiens
gtctttaatccatct

SEQ ID NO: 696369 - DNA, 15 bp, Homo sapiens
tctttaatccatctt

SEQ ID NO: 696370 - DNA, 15 bp, Homo sapiens
ctttaatccatcttg

SEQ ID NO: 696371 - DNA, 15 bp, Homo sapiens
tttaatccatcttga

SEQ ID NO: 696372 - DNA, 15 bp, Homo sapiens
ttaatccatcttgaa

SEQ ID NO: 696373 - DNA, 15 bp, Homo sapiens
taatccatcttgaat

SEQ ID NO: 696374 - DNA, 15 bp, Homo sapiens
aatccatcttgaatt

SEQ ID NO: 696375 - DNA, 15 bp, Homo sapiens
atccatcttgaatta

SEQ ID NO: 696376 - DNA, 15 bp, Homo sapiens
tccatcttgaattaa

SEQ ID NO: 696377 - DNA, 15 bp, Homo sapiens
ccatcttgaattaat

SEQ ID NO: 696378 - DNA, 15 bp, Homo sapiens
catcttgaattaatt

SEQ ID NO: 696379 - DNA, 15 bp, Homo sapiens
atcttgaattaattt

SEQ ID NO: 696380 - DNA, 15 bp, Homo sapiens
tcttgaattaatttt

SEQ ID NO: 696381 - DNA, 15 bp, Homo sapiens
cttgaattaattttt

SEQ ID NO: 696382 - DNA, 15 bp, Homo sapiens
ttgaattaatttttg

SEQ ID NO: 696383 - DNA, 15 bp, Homo sapiens
tgaattaatttttgt

SEQ ID NO: 696384 - DNA, 15 bp, Homo sapiens
gaattaatttttgta

SEQ ID NO: 696385 - DNA, 15 bp, Homo sapiens
aattaatttttgtac

SEQ ID NO: 696386 - DNA, 15 bp, Homo sapiens
attaatttttgtaca

SEQ ID NO: 696387 - DNA, 15 bp, Homo sapiens
ttaatttttgtacaa

SEQ ID NO: 696388 - DNA, 15 bp, Homo sapiens
taatttttgtacaag

SEQ ID NO: 696389 - DNA, 15 bp, Homo sapiens
aatttttgtacaagg

SEQ ID NO: 696390 - DNA, 15 bp, Homo sapiens
atttttgtacaaggt

SEQ ID NO: 696391 - DNA, 15 bp, Homo sapiens
tttttgtacaaggtg

SEQ ID NO: 696392 - DNA, 15 bp, Homo sapiens
ttttgtacaaggtgt

SEQ ID NO: 696393 - DNA, 15 bp, Homo sapiens
tttgtacaaggtgta

SEQ ID NO: 696394 - DNA, 15 bp, Homo sapiens
ttgtacaaggtgtaa

SEQ ID NO: 696395 - DNA, 15 bp, Homo sapiens
tgtacaaggtgtaag

SEQ ID NO: 696396 - DNA, 15 bp, Homo sapiens
gtacaaggtgtaagg

SEQ ID NO: 696397 - DNA, 15 bp, Homo sapiens
tacaaggtgtaagga

SEQ ID NO: 696398 - DNA, 15 bp, Homo sapiens
acaaggtgtaaggaa

SEQ ID NO: 696399 - DNA, 15 bp, Homo sapiens
caaggtgtaaggaag

SEQ ID NO: 696400 - DNA, 15 bp, Homo sapiens
aaggtgtaaggaagg

SEQ ID NO: 696401 - DNA, 15 bp, Homo sapiens
aggtgtaaggaaggg

SEQ ID NO: 696402 - DNA, 15 bp, Homo sapiens
ggtgtaaggaaggga

SEQ ID NO: 696403 - DNA, 15 bp, Homo sapiens
gtgtaaggaagggat

SEQ ID NO: 696404 - DNA, 15 bp, Homo sapiens
tgtaaggaagggatc

SEQ ID NO: 696405 - DNA, 15 bp, Homo sapiens
gtaaggaagggatcc

SEQ ID NO: 696406 - DNA, 15 bp, Homo sapiens
taaggaagggatcca

SEQ ID NO: 696407 - DNA, 15 bp, Homo sapiens
aaggaagggatccag

SEQ ID NO: 696408 - DNA, 15 bp, Homo sapiens
aggaagggatccagt

SEQ ID NO: 696409 - DNA, 15 bp, Homo sapiens
agtagctgggactac

SEQ ID NO: 696410 - DNA, 15 bp, Homo sapiens
gtagctgggactaca

SEQ ID NO: 696411 - DNA, 15 bp, Homo sapiens
tagctgggactacag

SEQ ID NO: 696412 - DNA, 15 bp, Homo sapiens
ggactacaggcatgt

SEQ ID NO: 696413 - DNA, 15 bp, Homo sapiens
gactacaggcatgtg

SEQ ID NO: 696414 - DNA, 15 bp, Homo sapiens
actacaggcatgtgc

SEQ ID NO: 696415 - DNA, 15 bp, Homo sapiens
ctacaggcatgtgcc

SEQ ID NO: 696416 - DNA, 15 bp, Homo sapiens
tacaggcatgtgcca

SEQ ID NO: 696417 - DNA, 15 bp, Homo sapiens
acaggcatgtgccac

SEQ ID NO: 696418 - DNA, 15 bp, Homo sapiens
caggcatgtgccacc

SEQ ID NO: 696419 - DNA, 15 bp, Homo sapiens
aggcatgtgccacca

SEQ ID NO: 696420 - DNA, 15 bp, Homo sapiens
ggcatgtgccaccac

SEQ ID NO: 696421 - DNA, 15 bp, Homo sapiens
gcatgtgccaccaca

SEQ ID NO: 696422 - DNA, 15 bp, Homo sapiens
catgtgccaccacac

SEQ ID NO: 696423 - DNA, 15 bp, Homo sapiens
atgtgccaccacacc

SEQ ID NO: 696424 - DNA, 15 bp, Homo sapiens
tgtgccaccacaccc

SEQ ID NO: 696425 - DNA, 15 bp, Homo sapiens
gtgccaccacaccca

SEQ ID NO: 696426 - DNA, 15 bp, Homo sapiens
tgccaccacacccag

SEQ ID NO: 696427 - DNA, 15 bp, Homo sapiens
ccaccacacccagct

SEQ ID NO: 696428 - DNA, 15 bp, Homo sapiens
caccacacccagcta

SEQ ID NO: 696429 - DNA, 15 bp, Homo sapiens
accacacccagctaa

SEQ ID NO: 696430 - DNA, 15 bp, Homo sapiens
ccacacccagctaat

SEQ ID NO: 696431 - DNA, 15 bp, Homo sapiens
cccagctaatttttg

SEQ ID NO: 696432 - DNA, 15 bp, Homo sapiens
ccagctaatttttgt

SEQ ID NO: 696433 - DNA, 15 bp, Homo sapiens
cagctaatttttgta

SEQ ID NO: 696434 - DNA, 15 bp, Homo sapiens
agctaatttttgtat

SEQ ID NO: 696435 - DNA, 15 bp, Homo sapiens
gacggggtttcacca

SEQ ID NO: 696436 - DNA, 15 bp, Homo sapiens
acggggtttcaccat

SEQ ID NO: 696437 - DNA, 15 bp, Homo sapiens
cggggtttcaccatg

SEQ ID NO: 696438 - DNA, 15 bp, Homo sapiens
ggggtttcaccatgt

SEQ ID NO: 696439 - DNA, 15 bp, Homo sapiens
gtttcaccatgttgg

SEQ ID NO: 696440 - DNA, 15 bp, Homo sapiens
tttcaccatgttggc

SEQ ID NO: 696441 - DNA, 15 bp, Homo sapiens
ttcaccatgttggcc

SEQ ID NO: 696442 - DNA, 15 bp, Homo sapiens
tcaccatgttggcca

SEQ ID NO: 696443 - DNA, 15 bp, Homo sapiens
caccatgttggccag

SEQ ID NO: 696444 - DNA, 15 bp, Homo sapiens
accatgttggccagg

SEQ ID NO: 696445 - DNA, 15 bp, Homo sapiens
ccatgttggccagga

SEQ ID NO: 696446 - DNA, 15 bp, Homo sapiens
catgttggccaggag

SEQ ID NO: 696447 - DNA, 15 bp, Homo sapiens
atgttggccaggagg

SEQ ID NO: 696448 - DNA, 15 bp, Homo sapiens
tgttggccaggaggg

SEQ ID NO: 696449 - DNA, 15 bp, Homo sapiens
gttggccaggagggt

SEQ ID NO: 696450 - DNA, 15 bp, Homo sapiens
ttggccaggagggtc

SEQ ID NO: 696451 - DNA, 15 bp, Homo sapiens
tggccaggagggtct

SEQ ID NO: 696452 - DNA, 15 bp, Homo sapiens
ggccaggagggtctt

SEQ ID NO: 696453 - DNA, 15 bp, Homo sapiens
gccaggagggtcttg

SEQ ID NO: 696454 - DNA, 15 bp, Homo sapiens
ccaggagggtcttga

SEQ ID NO: 696455 - DNA, 15 bp, Homo sapiens
caggagggtcttgat

SEQ ID NO: 696456 - DNA, 15 bp, Homo sapiens
aggagggtcttgatc

SEQ ID NO: 696457 - DNA, 15 bp, Homo sapiens
ggagggtcttgatct

SEQ ID NO: 696458 - DNA, 15 bp, Homo sapiens
gagggtcttgatctc

SEQ ID NO: 696459 - DNA, 15 bp, Homo sapiens
agggtcttgatctct

SEQ ID NO: 696460 - DNA, 15 bp, Homo sapiens
gggtcttgatctctt

SEQ ID NO: 696461 - DNA, 15 bp, Homo sapiens
ggtcttgatctcttg

SEQ ID NO: 696462 - DNA, 15 bp, Homo sapiens
gtcttgatctcttga

SEQ ID NO: 696463 - DNA, 15 bp, Homo sapiens
tcttgatctcttgac

SEQ ID NO: 696464 - DNA, 15 bp, Homo sapiens
cttgatctcttgacc

SEQ ID NO: 696465 - DNA, 15 bp, Homo sapiens
ttgatctcttgacct

SEQ ID NO: 696466 - DNA, 15 bp, Homo sapiens
tgatctcttgacctt

SEQ ID NO: 696467 - DNA, 15 bp, Homo sapiens
gatctcttgacctta

SEQ ID NO: 696468 - DNA, 15 bp, Homo sapiens
atctcttgaccttat

SEQ ID NO: 696469 - DNA, 15 bp, Homo sapiens
tctcttgaccttatg

SEQ ID NO: 696470 - DNA, 15 bp, Homo sapiens
ctcttgaccttatga

SEQ ID NO: 696471 - DNA, 15 bp, Homo sapiens
tcttgaccttatgat

SEQ ID NO: 696472 - DNA, 15 bp, Homo sapiens
cttgaccttatgatc

SEQ ID NO: 696473 - DNA, 15 bp, Homo sapiens
ttgaccttatgatcc

SEQ ID NO: 696474 - DNA, 15 bp, Homo sapiens
tgaccttatgatcca

SEQ ID NO: 696475 - DNA, 15 bp, Homo sapiens
gaccttatgatccac

SEQ ID NO: 696476 - DNA, 15 bp, Homo sapiens
accttatgatccacc

SEQ ID NO: 696477 - DNA, 15 bp, Homo sapiens
ccttatgatccaccc

SEQ ID NO: 696478 - DNA, 15 bp, Homo sapiens
cttatgatccacccg

SEQ ID NO: 696479 - DNA, 15 bp, Homo sapiens
ttatgatccacccgc

SEQ ID NO: 696480 - DNA, 15 bp, Homo sapiens
tatgatccacccgcc

SEQ ID NO: 696481 - DNA, 15 bp, Homo sapiens
atgatccacccgcct

SEQ ID NO: 696482 - DNA, 15 bp, Homo sapiens
tgatccacccgcctc

SEQ ID NO: 696483 - DNA, 15 bp, Homo sapiens
gatccacccgcctca

SEQ ID NO: 696484 - DNA, 15 bp, Homo sapiens
atccacccgcctcag

SEQ ID NO: 696485 - DNA, 15 bp, Homo sapiens
tccacccgcctcagc

SEQ ID NO: 696486 - DNA, 15 bp, Homo sapiens
ccacccgcctcagcc

SEQ ID NO: 696487 - DNA, 15 bp, Homo sapiens
cacccgcctcagcca

SEQ ID NO: 696488 - DNA, 15 bp, Homo sapiens
acccgcctcagccac

SEQ ID NO: 696489 - DNA, 15 bp, Homo sapiens
cccgcctcagccacc

SEQ ID NO: 696490 - DNA, 15 bp, Homo sapiens
ccgcctcagccaccc

SEQ ID NO: 696491 - DNA, 15 bp, Homo sapiens
cgcctcagccaccca

SEQ ID NO: 696492 - DNA, 15 bp, Homo sapiens
gcctcagccacccaa

SEQ ID NO: 696493 - DNA, 15 bp, Homo sapiens
cctcagccacccaaa

SEQ ID NO: 696494 - DNA, 15 bp, Homo sapiens
ctcagccacccaaag

SEQ ID NO: 696495 - DNA, 15 bp, Homo sapiens
tcagccacccaaagt

SEQ ID NO: 696496 - DNA, 15 bp, Homo sapiens
cagccacccaaagtg

SEQ ID NO: 696497 - DNA, 15 bp, Homo sapiens
agccacccaaagtgc

SEQ ID NO: 696498 - DNA, 15 bp, Homo sapiens
gccacccaaagtgct

SEQ ID NO: 696499 - DNA, 15 bp, Homo sapiens
ccacccaaagtgcta

SEQ ID NO: 696500 - DNA, 15 bp, Homo sapiens
cacccaaagtgctag

SEQ ID NO: 696501 - DNA, 15 bp, Homo sapiens
acccaaagtgctagg

SEQ ID NO: 696502 - DNA, 15 bp, Homo sapiens
gctaggattacaggt

SEQ ID NO: 696503 - DNA, 15 bp, Homo sapiens
ctaggattacaggtg

SEQ ID NO: 696504 - DNA, 15 bp, Homo sapiens
taggattacaggtgt

SEQ ID NO: 696505 - DNA, 15 bp, Homo sapiens
aggattacaggtgtg

SEQ ID NO: 696506 - DNA, 15 bp, Homo sapiens
ggattacaggtgtga

SEQ ID NO: 696507 - DNA, 15 bp, Homo sapiens
gattacaggtgtgaa

SEQ ID NO: 696508 - DNA, 15 bp, Homo sapiens
attacaggtgtgaac

SEQ ID NO: 696509 - DNA, 15 bp, Homo sapiens
ttacaggtgtgaacc

SEQ ID NO: 696510 - DNA, 15 bp, Homo sapiens
tacaggtgtgaacca

SEQ ID NO: 696511 - DNA, 15 bp, Homo sapiens
acaggtgtgaaccac

SEQ ID NO: 696512 - DNA, 15 bp, Homo sapiens
caggtgtgaaccacc

SEQ ID NO: 696513 - DNA, 15 bp, Homo sapiens
aggtgtgaaccaccg

SEQ ID NO: 696514 - DNA, 15 bp, Homo sapiens
ggtgtgaaccaccgt

SEQ ID NO: 696515 - DNA, 15 bp, Homo sapiens
gtgtgaaccaccgtg

SEQ ID NO: 696516 - DNA, 15 bp, Homo sapiens
tgtgaaccaccgtgc

SEQ ID NO: 696517 - DNA, 15 bp, Homo sapiens
gtgaaccaccgtgcc

SEQ ID NO: 696518 - DNA, 15 bp, Homo sapiens
tgaaccaccgtgccc

SEQ ID NO: 696519 - DNA, 15 bp, Homo sapiens
gaaccaccgtgcccg

SEQ ID NO: 696520 - DNA, 15 bp, Homo sapiens
aaccaccgtgcccgg

SEQ ID NO: 696521 - DNA, 15 bp, Homo sapiens
accaccgtgcccggc

SEQ ID NO: 696522 - DNA, 15 bp, Homo sapiens
ccaccgtgcccggcc

SEQ ID NO: 696523 - DNA, 15 bp, Homo sapiens
caccgtgcccggcct

SEQ ID NO: 696524 - DNA, 15 bp, Homo sapiens
accgtgcccggcctg

SEQ ID NO: 696525 - DNA, 15 bp, Homo sapiens
ccgtgcccggcctga

SEQ ID NO: 696526 - DNA, 15 bp, Homo sapiens
cgtgcccggcctgaa

SEQ ID NO: 696527 - DNA, 15 bp, Homo sapiens
gtgcccggcctgaat

SEQ ID NO: 696528 - DNA, 15 bp, Homo sapiens
tgcccggcctgaatt

SEQ ID NO: 696529 - DNA, 15 bp, Homo sapiens
gcccggcctgaattt

SEQ ID NO: 696530 - DNA, 15 bp, Homo sapiens
cccggcctgaatttt

SEQ ID NO: 696531 - DNA, 15 bp, Homo sapiens
ccggcctgaattttt

SEQ ID NO: 696532 - DNA, 15 bp, Homo sapiens
cggcctgaatttttt

SEQ ID NO: 696533 - DNA, 15 bp, Homo sapiens
ggcctgaattttttt

SEQ ID NO: 696534 - DNA, 15 bp, Homo sapiens
gcctgaattttttta

SEQ ID NO: 696535 - DNA, 15 bp, Homo sapiens
cctgaatttttttaa

SEQ ID NO: 696536 - DNA, 15 bp, Homo sapiens
ctgaatttttttaaa

SEQ ID NO: 696537 - DNA, 15 bp, Homo sapiens
tgaatttttttaaaa

SEQ ID NO: 696538 - DNA, 15 bp, Homo sapiens
gaatttttttaaaaa

SEQ ID NO: 696539 - DNA, 15 bp, Homo sapiens
aatttttttaaaaaa

SEQ ID NO: 696540 - DNA, 15 bp, Homo sapiens
atttttttaaaaaag

SEQ ID NO: 696541 - DNA, 15 bp, Homo sapiens
tttttttaaaaaagg

SEQ ID NO: 696542 - DNA, 15 bp, Homo sapiens
ttttttaaaaaagga

SEQ ID NO: 696543 - DNA, 15 bp, Homo sapiens
tttttaaaaaaggaa

SEQ ID NO: 696544 - DNA, 15 bp, Homo sapiens
ttttaaaaaaggaat

SEQ ID NO: 696545 - DNA, 15 bp, Homo sapiens
tttaaaaaaggaata

SEQ ID NO: 696546 - DNA, 15 bp, Homo sapiens
ttaaaaaaggaatat

SEQ ID NO: 696547 - DNA, 15 bp, Homo sapiens
taaaaaaggaatatg

SEQ ID NO: 696548 - DNA, 15 bp, Homo sapiens
aaaaaaggaatatgt

SEQ ID NO: 696549 - DNA, 15 bp, Homo sapiens
aaaaaggaatatgtt

SEQ ID NO: 696550 - DNA, 15 bp, Homo sapiens
aaaaggaatatgttg

SEQ ID NO: 696551 - DNA, 15 bp, Homo sapiens
aaaggaatatgttgg

SEQ ID NO: 696552 - DNA, 15 bp, Homo sapiens
aaggaatatgttgga

SEQ ID NO: 696553 - DNA, 15 bp, Homo sapiens
aggaatatgttggat

SEQ ID NO: 696554 - DNA, 15 bp, Homo sapiens
ggaatatgttggata

SEQ ID NO: 696555 - DNA, 15 bp, Homo sapiens
gaatatgttggataa

SEQ ID NO: 696556 - DNA, 15 bp, Homo sapiens
aatatgttggataat

SEQ ID NO: 696557 - DNA, 15 bp, Homo sapiens
atatgttggataata

SEQ ID NO: 696558 - DNA, 15 bp, Homo sapiens
tatgttggataataa

SEQ ID NO: 696559 - DNA, 15 bp, Homo sapiens
atgttggataataaa

SEQ ID NO: 696560 - DNA, 15 bp, Homo sapiens
tgttggataataaaa

SEQ ID NO: 696561 - DNA, 15 bp, Homo sapiens
gttggataataaaaa

SEQ ID NO: 696562 - DNA, 15 bp, Homo sapiens
ttggataataaaaaa

SEQ ID NO: 696563 - DNA, 15 bp, Homo sapiens
tggataataaaaaag

SEQ ID NO: 696564 - DNA, 15 bp, Homo sapiens
ggataataaaaaagt

SEQ ID NO: 696565 - DNA, 15 bp, Homo sapiens
gataataaaaaagtt

SEQ ID NO: 696566 - DNA, 15 bp, Homo sapiens
ataataaaaaagttt

SEQ ID NO: 696567 - DNA, 15 bp, Homo sapiens
taataaaaaagtttt

SEQ ID NO: 696568 - DNA, 15 bp, Homo sapiens
aataaaaaagtttta

SEQ ID NO: 696569 - DNA, 15 bp, Homo sapiens
ataaaaaagttttag

SEQ ID NO: 696570 - DNA, 15 bp, Homo sapiens
taaaaaagttttagt

SEQ ID NO: 696571 - DNA, 15 bp, Homo sapiens
aaaaaagttttagtg

SEQ ID NO: 696572 - DNA, 15 bp, Homo sapiens
aaaaagttttagtgt

SEQ ID NO: 696573 - DNA, 15 bp, Homo sapiens
aaaagttttagtgta

SEQ ID NO: 696574 - DNA, 15 bp, Homo sapiens
aaagttttagtgtac

SEQ ID NO: 696575 - DNA, 15 bp, Homo sapiens
aagttttagtgtact

SEQ ID NO: 696576 - DNA, 15 bp, Homo sapiens
agttttagtgtactt

SEQ ID NO: 696577 - DNA, 15 bp, Homo sapiens
gttttagtgtacttg

SEQ ID NO: 696578 - DNA, 15 bp, Homo sapiens
ttttagtgtacttgg

SEQ ID NO: 696579 - DNA, 15 bp, Homo sapiens
tttagtgtacttggt

SEQ ID NO: 696580 - DNA, 15 bp, Homo sapiens
ttagtgtacttggta

SEQ ID NO: 696581 - DNA, 15 bp, Homo sapiens
tagtgtacttggtac

SEQ ID NO: 696582 - DNA, 15 bp, Homo sapiens
agtgtacttggtact

SEQ ID NO: 696583 - DNA, 15 bp, Homo sapiens
gtgtacttggtactt

SEQ ID NO: 696584 - DNA, 15 bp, Homo sapiens
tgtacttggtacttt

SEQ ID NO: 696585 - DNA, 15 bp, Homo sapiens
gtacttggtactttt

SEQ ID NO: 696586 - DNA, 15 bp, Homo sapiens
tacttggtacttttt

SEQ ID NO: 696587 - DNA, 15 bp, Homo sapiens
acttggtactttttt

SEQ ID NO: 696588 - DNA, 15 bp, Homo sapiens
cttggtacttttttt

SEQ ID NO: 696589 - DNA, 15 bp, Homo sapiens
ttggtactttttttc

SEQ ID NO: 696590 - DNA, 15 bp, Homo sapiens
tggtactttttttct

SEQ ID NO: 696591 - DNA, 15 bp, Homo sapiens
ggtactttttttcta

SEQ ID NO: 696592 - DNA, 15 bp, Homo sapiens
gtactttttttctaa

SEQ ID NO: 696593 - DNA, 15 bp, Homo sapiens
tactttttttctaaa

SEQ ID NO: 696594 - DNA, 15 bp, Homo sapiens
actttttttctaaag

SEQ ID NO: 696595 - DNA, 15 bp, Homo sapiens
ctttttttctaaagt

SEQ ID NO: 696596 - DNA, 15 bp, Homo sapiens
tttttttctaaagta

SEQ ID NO: 696597 - DNA, 15 bp, Homo sapiens
ttttttctaaagtat

SEQ ID NO: 696598 - DNA, 15 bp, Homo sapiens
tttttctaaagtata

SEQ ID NO: 696599 - DNA, 15 bp, Homo sapiens
ttttctaaagtatac

SEQ ID NO: 696600 - DNA, 15 bp, Homo sapiens
tttctaaagtatacc

SEQ ID NO: 696601 - DNA, 15 bp, Homo sapiens
ttctaaagtatacct

SEQ ID NO: 696602 - DNA, 15 bp, Homo sapiens
tctaaagtatacctc

SEQ ID NO: 696603 - DNA, 15 bp, Homo sapiens
ctaaagtatacctca

SEQ ID NO: 696604 - DNA, 15 bp, Homo sapiens
taaagtatacctcag

SEQ ID NO: 696605 - DNA, 15 bp, Homo sapiens
aaagtatacctcaga

SEQ ID NO: 696606 - DNA, 15 bp, Homo sapiens
aagtatacctcagag

SEQ ID NO: 696607 - DNA, 15 bp, Homo sapiens
agtatacctcagagc

SEQ ID NO: 696608 - DNA, 15 bp, Homo sapiens
gtatacctcagagcc

SEQ ID NO: 696609 - DNA, 15 bp, Homo sapiens
tatacctcagagcca

SEQ ID NO: 696610 - DNA, 15 bp, Homo sapiens
atacctcagagccag

SEQ ID NO: 696611 - DNA, 15 bp, Homo sapiens
tacctcagagccaga

SEQ ID NO: 696612 - DNA, 15 bp, Homo sapiens
acctcagagccagac

SEQ ID NO: 696613 - DNA, 15 bp, Homo sapiens
cctcagagccagacc

SEQ ID NO: 696614 - DNA, 15 bp, Homo sapiens
ctcagagccagacct

SEQ ID NO: 696615 - DNA, 15 bp, Homo sapiens
tcagagccagaccta

SEQ ID NO: 696616 - DNA, 15 bp, Homo sapiens
cagagccagacctat

SEQ ID NO: 696617 - DNA, 15 bp, Homo sapiens
agagccagacctatt

SEQ ID NO: 696618 - DNA, 15 bp, Homo sapiens
gagccagacctattt

SEQ ID NO: 696619 - DNA, 15 bp, Homo sapiens
agccagacctatttt

SEQ ID NO: 696620 - DNA, 15 bp, Homo sapiens
gccagacctatttta

SEQ ID NO: 696621 - DNA, 15 bp, Homo sapiens
ccagacctattttat

SEQ ID NO: 696622 - DNA, 15 bp, Homo sapiens
cagacctattttatg

SEQ ID NO: 696623 - DNA, 15 bp, Homo sapiens
agacctattttatgt

SEQ ID NO: 696624 - DNA, 15 bp, Homo sapiens
gacctattttatgtt

SEQ ID NO: 696625 - DNA, 15 bp, Homo sapiens
acctattttatgttt

SEQ ID NO: 696626 - DNA, 15 bp, Homo sapiens
cctattttatgttta

SEQ ID NO: 696627 - DNA, 15 bp, Homo sapiens
ctattttatgtttag

SEQ ID NO: 696628 - DNA, 15 bp, Homo sapiens
tattttatgtttagt

SEQ ID NO: 696629 - DNA, 15 bp, Homo sapiens
attttatgtttagtg

SEQ ID NO: 696630 - DNA, 15 bp, Homo sapiens
ttttatgtttagtga

SEQ ID NO: 696631 - DNA, 15 bp, Homo sapiens
tttatgtttagtgaa

SEQ ID NO: 696632 - DNA, 15 bp, Homo sapiens
ttatgtttagtgaaa

SEQ ID NO: 696633 - DNA, 15 bp, Homo sapiens
tatgtttagtgaaat

SEQ ID NO: 696634 - DNA, 15 bp, Homo sapiens
atgtttagtgaaatg

SEQ ID NO: 696635 - DNA, 15 bp, Homo sapiens
tgtttagtgaaatga

SEQ ID NO: 696636 - DNA, 15 bp, Homo sapiens
gtttagtgaaatgaa

SEQ ID NO: 696637 - DNA, 15 bp, Homo sapiens
tttagtgaaatgaaa

SEQ ID NO: 696638 - DNA, 15 bp, Homo sapiens
ttagtgaaatgaaaa

SEQ ID NO: 696639 - DNA, 15 bp, Homo sapiens
tagtgaaatgaaaat

SEQ ID NO: 696640 - DNA, 15 bp, Homo sapiens
agtgaaatgaaaata

SEQ ID NO: 696641 - DNA, 15 bp, Homo sapiens
gtgaaatgaaaatat

SEQ ID NO: 696642 - DNA, 15 bp, Homo sapiens
tgaaatgaaaatata

SEQ ID NO: 696643 - DNA, 15 bp, Homo sapiens
gaaatgaaaatatag

SEQ ID NO: 696644 - DNA, 15 bp, Homo sapiens
aaatgaaaatatagt

SEQ ID NO: 696645 - DNA, 15 bp, Homo sapiens
aatgaaaatatagtt

SEQ ID NO: 696646 - DNA, 15 bp, Homo sapiens
atgaaaatatagttt

SEQ ID NO: 696647 - DNA, 15 bp, Homo sapiens
tgaaaatatagtttt

SEQ ID NO: 696648 - DNA, 15 bp, Homo sapiens
gaaaatatagttttg

SEQ ID NO: 696649 - DNA, 15 bp, Homo sapiens
aaaatatagttttgt

SEQ ID NO: 696650 - DNA, 15 bp, Homo sapiens
aaatatagttttgtt

SEQ ID NO: 696651 - DNA, 15 bp, Homo sapiens
aatatagttttgttt

SEQ ID NO: 696652 - DNA, 15 bp, Homo sapiens
atatagttttgttta

SEQ ID NO: 696653 - DNA, 15 bp, Homo sapiens
tatagttttgtttag

SEQ ID NO: 696654 - DNA, 15 bp, Homo sapiens
atagttttgtttagt

SEQ ID NO: 696655 - DNA, 15 bp, Homo sapiens
tagttttgtttagtt

SEQ ID NO: 696656 - DNA, 15 bp, Homo sapiens
agttttgtttagtta

SEQ ID NO: 696657 - DNA, 15 bp, Homo sapiens
gttttgtttagttat

SEQ ID NO: 696658 - DNA, 15 bp, Homo sapiens
ttttgtttagttatt

SEQ ID NO: 696659 - DNA, 15 bp, Homo sapiens
tttgtttagttattt

SEQ ID NO: 696660 - DNA, 15 bp, Homo sapiens
ttgtttagttatttg

SEQ ID NO: 696661 - DNA, 15 bp, Homo sapiens
tgtttagttatttgg

SEQ ID NO: 696662 - DNA, 15 bp, Homo sapiens
gtttagttatttggc

SEQ ID NO: 696663 - DNA, 15 bp, Homo sapiens
tttagttatttggcc

SEQ ID NO: 696664 - DNA, 15 bp, Homo sapiens
ttagttatttggcct

SEQ ID NO: 696665 - DNA, 15 bp, Homo sapiens
tagttatttggcctt

SEQ ID NO: 696666 - DNA, 15 bp, Homo sapiens
agttatttggccttg

SEQ ID NO: 696667 - DNA, 15 bp, Homo sapiens
gttatttggccttgt

SEQ ID NO: 696668 - DNA, 15 bp, Homo sapiens
ttatttggccttgta

SEQ ID NO: 696669 - DNA, 15 bp, Homo sapiens
tatttggccttgtag

SEQ ID NO: 696670 - DNA, 15 bp, Homo sapiens
atttggccttgtagt

SEQ ID NO: 696671 - DNA, 15 bp, Homo sapiens
tttggccttgtagtt

SEQ ID NO: 696672 - DNA, 15 bp, Homo sapiens
ttggccttgtagttt

SEQ ID NO: 696673 - DNA, 15 bp, Homo sapiens
tggccttgtagtttt

SEQ ID NO: 696674 - DNA, 15 bp, Homo sapiens
ggccttgtagttttg

SEQ ID NO: 696675 - DNA, 15 bp, Homo sapiens
gccttgtagttttgt

SEQ ID NO: 696676 - DNA, 15 bp, Homo sapiens
ccttgtagttttgtt

SEQ ID NO: 696677 - DNA, 15 bp, Homo sapiens
cttgtagttttgtta

SEQ ID NO: 696678 - DNA, 15 bp, Homo sapiens
ttgtagttttgttac

SEQ ID NO: 696679 - DNA, 15 bp, Homo sapiens
tgtagttttgttact

SEQ ID NO: 696680 - DNA, 15 bp, Homo sapiens
gtagttttgttactt

SEQ ID NO: 696681 - DNA, 15 bp, Homo sapiens
tagttttgttacttt

SEQ ID NO: 696682 - DNA, 15 bp, Homo sapiens
agttttgttacttta

SEQ ID NO: 696683 - DNA, 15 bp, Homo sapiens
gttttgttactttat

SEQ ID NO: 696684 - DNA, 15 bp, Homo sapiens
ttttgttactttata

SEQ ID NO: 696685 - DNA, 15 bp, Homo sapiens
tttgttactttataa

SEQ ID NO: 696686 - DNA, 15 bp, Homo sapiens
ttgttactttataat

SEQ ID NO: 696687 - DNA, 15 bp, Homo sapiens
tgttactttataatg

SEQ ID NO: 696688 - DNA, 15 bp, Homo sapiens
gttactttataatgt

SEQ ID NO: 696689 - DNA, 15 bp, Homo sapiens
ttactttataatgta

SEQ ID NO: 696690 - DNA, 15 bp, Homo sapiens
tactttataatgtaa

SEQ ID NO: 696691 - DNA, 15 bp, Homo sapiens
actttataatgtaag

SEQ ID NO: 696692 - DNA, 15 bp, Homo sapiens
ctttataatgtaagg

SEQ ID NO: 696693 - DNA, 15 bp, Homo sapiens
tttataatgtaagga

SEQ ID NO: 696694 - DNA, 15 bp, Homo sapiens
ttataatgtaaggaa

SEQ ID NO: 696695 - DNA, 15 bp, Homo sapiens
tataatgtaaggaac

SEQ ID NO: 696696 - DNA, 15 bp, Homo sapiens
ataatgtaaggaact

SEQ ID NO: 696697 - DNA, 15 bp, Homo sapiens
taatgtaaggaactg

SEQ ID NO: 696698 - DNA, 15 bp, Homo sapiens
aatgtaaggaactgt

SEQ ID NO: 696699 - DNA, 15 bp, Homo sapiens
atgtaaggaactgtg

SEQ ID NO: 696700 - DNA, 15 bp, Homo sapiens
tgtaaggaactgtgt

SEQ ID NO: 696701 - DNA, 15 bp, Homo sapiens
gtaaggaactgtgtc

SEQ ID NO: 696702 - DNA, 15 bp, Homo sapiens
taaggaactgtgtcc

SEQ ID NO: 696703 - DNA, 15 bp, Homo sapiens
aaggaactgtgtcct

SEQ ID NO: 696704 - DNA, 15 bp, Homo sapiens
aggaactgtgtcctt

SEQ ID NO: 696705 - DNA, 15 bp, Homo sapiens
ggaactgtgtcctta

SEQ ID NO: 696706 - DNA, 15 bp, Homo sapiens
gaactgtgtccttaa

SEQ ID NO: 696707 - DNA, 15 bp, Homo sapiens
aactgtgtccttaat

SEQ ID NO: 696708 - DNA, 15 bp, Homo sapiens
actgtgtccttaatt

SEQ ID NO: 696709 - DNA, 15 bp, Homo sapiens
ctgtgtccttaatta

SEQ ID NO: 696710 - DNA, 15 bp, Homo sapiens
tgtgtccttaattaa

SEQ ID NO: 696711 - DNA, 15 bp, Homo sapiens
gtgtccttaattaat

SEQ ID NO: 696712 - DNA, 15 bp, Homo sapiens
tgtccttaattaatc

SEQ ID NO: 696713 - DNA, 15 bp, Homo sapiens
gtccttaattaatca

SEQ ID NO: 696714 - DNA, 15 bp, Homo sapiens
tccttaattaatcat

SEQ ID NO: 696715 - DNA, 15 bp, Homo sapiens
ccttaattaatcatt

SEQ ID NO: 696716 - DNA, 15 bp, Homo sapiens
cttaattaatcattt

SEQ ID NO: 696717 - DNA, 15 bp, Homo sapiens
ttaattaatcatttt

SEQ ID NO: 696718 - DNA, 15 bp, Homo sapiens
taattaatcattttg

SEQ ID NO: 696719 - DNA, 15 bp, Homo sapiens
aattaatcattttga

SEQ ID NO: 696720 - DNA, 15 bp, Homo sapiens
attaatcattttgac

SEQ ID NO: 696721 - DNA, 15 bp, Homo sapiens
ttaatcattttgacg

SEQ ID NO: 696722 - DNA, 15 bp, Homo sapiens
taatcattttgacgt

SEQ ID NO: 696723 - DNA, 15 bp, Homo sapiens
aatcattttgacgta

SEQ ID NO: 696724 - DNA, 15 bp, Homo sapiens
atcattttgacgtac

SEQ ID NO: 696725 - DNA, 15 bp, Homo sapiens
tcattttgacgtaca

SEQ ID NO: 696726 - DNA, 15 bp, Homo sapiens
cattttgacgtacaa

SEQ ID NO: 696727 - DNA, 15 bp, Homo sapiens
attttgacgtacaat

SEQ ID NO: 696728 - DNA, 15 bp, Homo sapiens
ttttgacgtacaata

SEQ ID NO: 696729 - DNA, 15 bp, Homo sapiens
tttgacgtacaataa

SEQ ID NO: 696730 - DNA, 15 bp, Homo sapiens
ttgacgtacaataac

SEQ ID NO: 696731 - DNA, 15 bp, Homo sapiens
tgacgtacaataaca

SEQ ID NO: 696732 - DNA, 15 bp, Homo sapiens
gacgtacaataacat

SEQ ID NO: 696733 - DNA, 15 bp, Homo sapiens
acgtacaataacatc

SEQ ID NO: 696734 - DNA, 15 bp, Homo sapiens
cgtacaataacatct

SEQ ID NO: 696735 - DNA, 15 bp, Homo sapiens
gtacaataacatctt

SEQ ID NO: 696736 - DNA, 15 bp, Homo sapiens
tacaataacatcttg

SEQ ID NO: 696737 - DNA, 15 bp, Homo sapiens
acaataacatcttgc

SEQ ID NO: 696738 - DNA, 15 bp, Homo sapiens
caataacatcttgcc

SEQ ID NO: 696739 - DNA, 15 bp, Homo sapiens
aataacatcttgcct

SEQ ID NO: 696740 - DNA, 15 bp, Homo sapiens
ataacatcttgccta

SEQ ID NO: 696741 - DNA, 15 bp, Homo sapiens
taacatcttgcctac

SEQ ID NO: 696742 - DNA, 15 bp, Homo sapiens
aacatcttgcctact

SEQ ID NO: 696743 - DNA, 15 bp, Homo sapiens
acatcttgcctactt

SEQ ID NO: 696744 - DNA, 15 bp, Homo sapiens
catcttgcctacttg

SEQ ID NO: 696745 - DNA, 15 bp, Homo sapiens
atcttgcctacttga

SEQ ID NO: 696746 - DNA, 15 bp, Homo sapiens
tcttgcctacttgaa

SEQ ID NO: 696747 - DNA, 15 bp, Homo sapiens
cttgcctacttgaaa

SEQ ID NO: 696748 - DNA, 15 bp, Homo sapiens
ttgcctacttgaaat

SEQ ID NO: 696749 - DNA, 15 bp, Homo sapiens
tgcctacttgaaata

SEQ ID NO: 696750 - DNA, 15 bp, Homo sapiens
gcctacttgaaataa

SEQ ID NO: 696751 - DNA, 15 bp, Homo sapiens
cctacttgaaataat

SEQ ID NO: 696752 - DNA, 15 bp, Homo sapiens
ctacttgaaataatg

SEQ ID NO: 696753 - DNA, 15 bp, Homo sapiens
tacttgaaataatgt

SEQ ID NO: 696754 - DNA, 15 bp, Homo sapiens
acttgaaataatgtt

SEQ ID NO: 696755 - DNA, 15 bp, Homo sapiens
cttgaaataatgttt

SEQ ID NO: 696756 - DNA, 15 bp, Homo sapiens
ttgaaataatgtttt

SEQ ID NO: 696757 - DNA, 15 bp, Homo sapiens
tgaaataatgttttg

SEQ ID NO: 696758 - DNA, 15 bp, Homo sapiens
gaaataatgttttga

SEQ ID NO: 696759 - DNA, 15 bp, Homo sapiens
aaataatgttttgaa

SEQ ID NO: 696760 - DNA, 15 bp, Homo sapiens
aataatgttttgaac

SEQ ID NO: 696761 - DNA, 15 bp, Homo sapiens
ataatgttttgaact

SEQ ID NO: 696762 - DNA, 15 bp, Homo sapiens
taatgttttgaactt

SEQ ID NO: 696763 - DNA, 15 bp, Homo sapiens
aatgttttgaacttc

SEQ ID NO: 696764 - DNA, 15 bp, Homo sapiens
atgttttgaacttcc

SEQ ID NO: 696765 - DNA, 15 bp, Homo sapiens
tgttttgaacttccc

SEQ ID NO: 696766 - DNA, 15 bp, Homo sapiens
gttttgaacttccca

SEQ ID NO: 696767 - DNA, 15 bp, Homo sapiens
ttttgaacttcccaa

SEQ ID NO: 696768 - DNA, 15 bp, Homo sapiens
tttgaacttcccaat

SEQ ID NO: 696769 - DNA, 15 bp, Homo sapiens
ttgaacttcccaata

SEQ ID NO: 696770 - DNA, 15 bp, Homo sapiens
tgaacttcccaatat

SEQ ID NO: 696771 - DNA, 15 bp, Homo sapiens
gaacttcccaatatt

SEQ ID NO: 696772 - DNA, 15 bp, Homo sapiens
aacttcccaatattt

SEQ ID NO: 696773 - DNA, 15 bp, Homo sapiens
acttcccaatatttg

SEQ ID NO: 696774 - DNA, 15 bp, Homo sapiens
cttcccaatatttgg

SEQ ID NO: 696775 - DNA, 15 bp, Homo sapiens
ttcccaatatttggc

SEQ ID NO: 696776 - DNA, 15 bp, Homo sapiens
tcccaatatttggct

SEQ ID NO: 696777 - DNA, 15 bp, Homo sapiens
cccaatatttggctt

SEQ ID NO: 696778 - DNA, 15 bp, Homo sapiens
ccaatatttggctta

SEQ ID NO: 696779 - DNA, 15 bp, Homo sapiens
caatatttggcttaa

SEQ ID NO: 696780 - DNA, 15 bp, Homo sapiens
aatatttggcttaaa

SEQ ID NO: 696781 - DNA, 15 bp, Homo sapiens
atatttggcttaaaa

SEQ ID NO: 696782 - DNA, 15 bp, Homo sapiens
tatttggcttaaaat

SEQ ID NO: 696783 - DNA, 15 bp, Homo sapiens
atttggcttaaaatg

SEQ ID NO: 696784 - DNA, 15 bp, Homo sapiens
tttggcttaaaatgg

SEQ ID NO: 696785 - DNA, 15 bp, Homo sapiens
ttggcttaaaatggc

SEQ ID NO: 696786 - DNA, 15 bp, Homo sapiens
tggcttaaaatggcc

SEQ ID NO: 696787 - DNA, 15 bp, Homo sapiens
ggcttaaaatggcca

SEQ ID NO: 696788 - DNA, 15 bp, Homo sapiens
gcttaaaatggccag

SEQ ID NO: 696789 - DNA, 15 bp, Homo sapiens
cttaaaatggccaga

SEQ ID NO: 696790 - DNA, 15 bp, Homo sapiens
ttaaaatggccagaa

SEQ ID NO: 696791 - DNA, 15 bp, Homo sapiens
taaaatggccagaag

SEQ ID NO: 696792 - DNA, 15 bp, Homo sapiens
aaaatggccagaaga

SEQ ID NO: 696793 - DNA, 15 bp, Homo sapiens
aaatggccagaagag

SEQ ID NO: 696794 - DNA, 15 bp, Homo sapiens
aatggccagaagagt

SEQ ID NO: 696795 - DNA, 15 bp, Homo sapiens
atggccagaagagtg

SEQ ID NO: 696796 - DNA, 15 bp, Homo sapiens
tggccagaagagtga

SEQ ID NO: 696797 - DNA, 15 bp, Homo sapiens
ggccagaagagtgaa

SEQ ID NO: 696798 - DNA, 15 bp, Homo sapiens
gccagaagagtgaag

SEQ ID NO: 696799 - DNA, 15 bp, Homo sapiens
ccagaagagtgaagg

SEQ ID NO: 696800 - DNA, 15 bp, Homo sapiens
cagaagagtgaagga

SEQ ID NO: 696801 - DNA, 15 bp, Homo sapiens
agaagagtgaaggaa

SEQ ID NO: 696802 - DNA, 15 bp, Homo sapiens
gaagagtgaaggaaa

SEQ ID NO: 696803 - DNA, 15 bp, Homo sapiens
aagagtgaaggaaaa

SEQ ID NO: 696804 - DNA, 15 bp, Homo sapiens
agagtgaaggaaaag

SEQ ID NO: 696805 - DNA, 15 bp, Homo sapiens
gagtgaaggaaaaga

SEQ ID NO: 696806 - DNA, 15 bp, Homo sapiens
agtgaaggaaaagaa

SEQ ID NO: 696807 - DNA, 15 bp, Homo sapiens
gtgaaggaaaagaaa

SEQ ID NO: 696808 - DNA, 15 bp, Homo sapiens
tgaaggaaaagaaaa

SEQ ID NO: 696809 - DNA, 15 bp, Homo sapiens
gaaggaaaagaaaat

SEQ ID NO: 696810 - DNA, 15 bp, Homo sapiens
aaggaaaagaaaata

SEQ ID NO: 696811 - DNA, 15 bp, Homo sapiens
aggaaaagaaaatat

SEQ ID NO: 696812 - DNA, 15 bp, Homo sapiens
ggaaaagaaaatatt

SEQ ID NO: 696813 - DNA, 15 bp, Homo sapiens
gaaaagaaaatattt

SEQ ID NO: 696814 - DNA, 15 bp, Homo sapiens
aaaagaaaatattta

SEQ ID NO: 696815 - DNA, 15 bp, Homo sapiens
aaagaaaatatttac

SEQ ID NO: 696816 - DNA, 15 bp, Homo sapiens
aagaaaatatttaca

SEQ ID NO: 696817 - DNA, 15 bp, Homo sapiens
agaaaatatttacag

SEQ ID NO: 696818 - DNA, 15 bp, Homo sapiens
gaaaatatttacagt

SEQ ID NO: 696819 - DNA, 15 bp, Homo sapiens
aaaatatttacagtc

SEQ ID NO: 696820 - DNA, 15 bp, Homo sapiens
aaatatttacagtca

SEQ ID NO: 696821 - DNA, 15 bp, Homo sapiens
aatatttacagtcat

SEQ ID NO: 696822 - DNA, 15 bp, Homo sapiens
atatttacagtcatg

SEQ ID NO: 696823 - DNA, 15 bp, Homo sapiens
tatttacagtcatgc

SEQ ID NO: 696824 - DNA, 15 bp, Homo sapiens
atttacagtcatgca

SEQ ID NO: 696825 - DNA, 15 bp, Homo sapiens
tttacagtcatgcat

SEQ ID NO: 696826 - DNA, 15 bp, Homo sapiens
ttacagtcatgcatc

SEQ ID NO: 696827 - DNA, 15 bp, Homo sapiens
tacagtcatgcatca

SEQ ID NO: 696828 - DNA, 15 bp, Homo sapiens
acagtcatgcatcac

SEQ ID NO: 696829 - DNA, 15 bp, Homo sapiens
cagtcatgcatcacg

SEQ ID NO: 696830 - DNA, 15 bp, Homo sapiens
agtcatgcatcacgt

SEQ ID NO: 696831 - DNA, 15 bp, Homo sapiens
gtcatgcatcacgta

SEQ ID NO: 696832 - DNA, 15 bp, Homo sapiens
tcatgcatcacgtaa

SEQ ID NO: 696833 - DNA, 15 bp, Homo sapiens
catgcatcacgtaat

SEQ ID NO: 696834 - DNA, 15 bp, Homo sapiens
atgcatcacgtaata

SEQ ID NO: 696835 - DNA, 15 bp, Homo sapiens
tgcatcacgtaatag

SEQ ID NO: 696836 - DNA, 15 bp, Homo sapiens
gcatcacgtaatagc

SEQ ID NO: 696837 - DNA, 15 bp, Homo sapiens
catcacgtaatagca

SEQ ID NO: 696838 - DNA, 15 bp, Homo sapiens
atcacgtaatagcat

SEQ ID NO: 696839 - DNA, 15 bp, Homo sapiens
tcacgtaatagcatt

SEQ ID NO: 696840 - DNA, 15 bp, Homo sapiens
cacgtaatagcattt

SEQ ID NO: 696841 - DNA, 15 bp, Homo sapiens
acgtaatagcatttt

SEQ ID NO: 696842 - DNA, 15 bp, Homo sapiens
cgtaatagcattttg

SEQ ID NO: 696843 - DNA, 15 bp, Homo sapiens
gtaatagcattttgg

SEQ ID NO: 696844 - DNA, 15 bp, Homo sapiens
taatagcattttggt

SEQ ID NO: 696845 - DNA, 15 bp, Homo sapiens
aatagcattttggtc

SEQ ID NO: 696846 - DNA, 15 bp, Homo sapiens
atagcattttggtca

SEQ ID NO: 696847 - DNA, 15 bp, Homo sapiens
tagcattttggtcaa

SEQ ID NO: 696848 - DNA, 15 bp, Homo sapiens
agcattttggtcaat

SEQ ID NO: 696849 - DNA, 15 bp, Homo sapiens
gcattttggtcaatg

SEQ ID NO: 696850 - DNA, 15 bp, Homo sapiens
cattttggtcaatga

SEQ ID NO: 696851 - DNA, 15 bp, Homo sapiens
attttggtcaatgac

SEQ ID NO: 696852 - DNA, 15 bp, Homo sapiens
ttttggtcaatgacc

SEQ ID NO: 696853 - DNA, 15 bp, Homo sapiens
tttggtcaatgaccg

SEQ ID NO: 696854 - DNA, 15 bp, Homo sapiens
ttggtcaatgaccgc

SEQ ID NO: 696855 - DNA, 15 bp, Homo sapiens
tggtcaatgaccgca

SEQ ID NO: 696856 - DNA, 15 bp, Homo sapiens
ggtcaatgaccgcat

SEQ ID NO: 696857 - DNA, 15 bp, Homo sapiens
gtcaatgaccgcata

SEQ ID NO: 696858 - DNA, 15 bp, Homo sapiens
tcaatgaccgcataa

SEQ ID NO: 696859 - DNA, 15 bp, Homo sapiens
caatgaccgcataaa

SEQ ID NO: 696860 - DNA, 15 bp, Homo sapiens
aatgaccgcataaac

SEQ ID NO: 696861 - DNA, 15 bp, Homo sapiens
atgaccgcataaacg

SEQ ID NO: 696862 - DNA, 15 bp, Homo sapiens
tgaccgcataaacga

SEQ ID NO: 696863 - DNA, 15 bp, Homo sapiens
gaccgcataaacgat

SEQ ID NO: 696864 - DNA, 15 bp, Homo sapiens
accgcataaacgatg

SEQ ID NO: 696865 - DNA, 15 bp, Homo sapiens
ccgcataaacgatgg

SEQ ID NO: 696866 - DNA, 15 bp, Homo sapiens
cgcataaacgatggt

SEQ ID NO: 696867 - DNA, 15 bp, Homo sapiens
gcataaacgatggtg

SEQ ID NO: 696868 - DNA, 15 bp, Homo sapiens
cataaacgatggtgg

SEQ ID NO: 696869 - DNA, 15 bp, Homo sapiens
ataaacgatggtggt

SEQ ID NO: 696870 - DNA, 15 bp, Homo sapiens
taaacgatggtggtc

SEQ ID NO: 696871 - DNA, 15 bp, Homo sapiens
aaacgatggtggtct

SEQ ID NO: 696872 - DNA, 15 bp, Homo sapiens
aacgatggtggtctc

SEQ ID NO: 696873 - DNA, 15 bp, Homo sapiens
acgatggtggtctca

SEQ ID NO: 696874 - DNA, 15 bp, Homo sapiens
cgatggtggtctcat

SEQ ID NO: 696875 - DNA, 15 bp, Homo sapiens
gatggtggtctcata

SEQ ID NO: 696876 - DNA, 15 bp, Homo sapiens
atggtggtctcataa

SEQ ID NO: 696877 - DNA, 15 bp, Homo sapiens
tggtggtctcataag

SEQ ID NO: 696878 - DNA, 15 bp, Homo sapiens
ggtggtctcataaga

SEQ ID NO: 696879 - DNA, 15 bp, Homo sapiens
gtggtctcataagat

SEQ ID NO: 696880 - DNA, 15 bp, Homo sapiens
tggtctcataagatt

SEQ ID NO: 696881 - DNA, 15 bp, Homo sapiens
ggtctcataagatta

SEQ ID NO: 696882 - DNA, 15 bp, Homo sapiens
gtctcataagattat

SEQ ID NO: 696883 - DNA, 15 bp, Homo sapiens
tctcataagattatc

SEQ ID NO: 696884 - DNA, 15 bp, Homo sapiens
ctcataagattatca

SEQ ID NO: 696885 - DNA, 15 bp, Homo sapiens
tcataagattatcat

SEQ ID NO: 696886 - DNA, 15 bp, Homo sapiens
cataagattatcata

SEQ ID NO: 696887 - DNA, 15 bp, Homo sapiens
ataagattatcatac

SEQ ID NO: 696888 - DNA, 15 bp, Homo sapiens
taagattatcatact

SEQ ID NO: 696889 - DNA, 15 bp, Homo sapiens
aagattatcatacta

SEQ ID NO: 696890 - DNA, 15 bp, Homo sapiens
agattatcatactat

SEQ ID NO: 696891 - DNA, 15 bp, Homo sapiens
gattatcatactata

SEQ ID NO: 696892 - DNA, 15 bp, Homo sapiens
attatcatactatat

SEQ ID NO: 696893 - DNA, 15 bp, Homo sapiens
ttatcatactatatt

SEQ ID NO: 696894 - DNA, 15 bp, Homo sapiens
tatcatactatattt

SEQ ID NO: 696895 - DNA, 15 bp, Homo sapiens
atcatactatatttt

SEQ ID NO: 696896 - DNA, 15 bp, Homo sapiens
tcatactatattttt

SEQ ID NO: 696897 - DNA, 15 bp, Homo sapiens
catactatattttta

SEQ ID NO: 696898 - DNA, 15 bp, Homo sapiens
atactatatttttac

SEQ ID NO: 696899 - DNA, 15 bp, Homo sapiens
tactatatttttact

SEQ ID NO: 696900 - DNA, 15 bp, Homo sapiens
actatatttttactg

SEQ ID NO: 696901 - DNA, 15 bp, Homo sapiens
ctatatttttactgt

SEQ ID NO: 696902 - DNA, 15 bp, Homo sapiens
tatatttttactgta

SEQ ID NO: 696903 - DNA, 15 bp, Homo sapiens
atatttttactgtac

SEQ ID NO: 696904 - DNA, 15 bp, Homo sapiens
tatttttactgtacc

SEQ ID NO: 696905 - DNA, 15 bp, Homo sapiens
atttttactgtacct

SEQ ID NO: 696906 - DNA, 15 bp, Homo sapiens
tttttactgtacctt

SEQ ID NO: 696907 - DNA, 15 bp, Homo sapiens
ttttactgtaccttt

SEQ ID NO: 696908 - DNA, 15 bp, Homo sapiens
tttactgtacctttt

SEQ ID NO: 696909 - DNA, 15 bp, Homo sapiens
ttactgtaccttttc

SEQ ID NO: 696910 - DNA, 15 bp, Homo sapiens
tactgtaccttttct

SEQ ID NO: 696911 - DNA, 15 bp, Homo sapiens
actgtaccttttctg

SEQ ID NO: 696912 - DNA, 15 bp, Homo sapiens
ctgtaccttttctgt

SEQ ID NO: 696913 - DNA, 15 bp, Homo sapiens
tgtaccttttctgtg

SEQ ID NO: 696914 - DNA, 15 bp, Homo sapiens
gtaccttttctgtgt

SEQ ID NO: 696915 - DNA, 15 bp, Homo sapiens
taccttttctgtgtt

SEQ ID NO: 696916 - DNA, 15 bp, Homo sapiens
accttttctgtgttg

SEQ ID NO: 696917 - DNA, 15 bp, Homo sapiens
ccttttctgtgttga

SEQ ID NO: 696918 - DNA, 15 bp, Homo sapiens
cttttctgtgttgag

SEQ ID NO: 696919 - DNA, 15 bp, Homo sapiens
ttttctgtgttgaga

SEQ ID NO: 696920 - DNA, 15 bp, Homo sapiens
tttctgtgttgagat

SEQ ID NO: 696921 - DNA, 15 bp, Homo sapiens
ttctgtgttgagatg

SEQ ID NO: 696922 - DNA, 15 bp, Homo sapiens
tctgtgttgagatgt

SEQ ID NO: 696923 - DNA, 15 bp, Homo sapiens
ctgtgttgagatgta

SEQ ID NO: 696924 - DNA, 15 bp, Homo sapiens
tgtgttgagatgtat

SEQ ID NO: 696925 - DNA, 15 bp, Homo sapiens
gtgttgagatgtatt

SEQ ID NO: 696926 - DNA, 15 bp, Homo sapiens
tgttgagatgtattt

SEQ ID NO: 696927 - DNA, 15 bp, Homo sapiens
gttgagatgtattta

SEQ ID NO: 696928 - DNA, 15 bp, Homo sapiens
ttgagatgtatttag

SEQ ID NO: 696929 - DNA, 15 bp, Homo sapiens
tgagatgtatttaga

SEQ ID NO: 696930 - DNA, 15 bp, Homo sapiens
gagatgtatttagat

SEQ ID NO: 696931 - DNA, 15 bp, Homo sapiens
agatgtatttagata

SEQ ID NO: 696932 - DNA, 15 bp, Homo sapiens
gatgtatttagatac

SEQ ID NO: 696933 - DNA, 15 bp, Homo sapiens
atgtatttagataca

SEQ ID NO: 696934 - DNA, 15 bp, Homo sapiens
tgtatttagatacac

SEQ ID NO: 696935 - DNA, 15 bp, Homo sapiens
gtatttagatacaca

SEQ ID NO: 696936 - DNA, 15 bp, Homo sapiens
tatttagatacacaa

SEQ ID NO: 696937 - DNA, 15 bp, Homo sapiens
atttagatacacaag

SEQ ID NO: 696938 - DNA, 15 bp, Homo sapiens
tttagatacacaagt

SEQ ID NO: 696939 - DNA, 15 bp, Homo sapiens
ttagatacacaagta

SEQ ID NO: 696940 - DNA, 15 bp, Homo sapiens
tagatacacaagtac

SEQ ID NO: 696941 - DNA, 15 bp, Homo sapiens
agatacacaagtacc

SEQ ID NO: 696942 - DNA, 15 bp, Homo sapiens
gatacacaagtacca

SEQ ID NO: 696943 - DNA, 15 bp, Homo sapiens
atacacaagtaccat

SEQ ID NO: 696944 - DNA, 15 bp, Homo sapiens
tacacaagtaccatt

SEQ ID NO: 696945 - DNA, 15 bp, Homo sapiens
acacaagtaccatta

SEQ ID NO: 696946 - DNA, 15 bp, Homo sapiens
cacaagtaccattat

SEQ ID NO: 696947 - DNA, 15 bp, Homo sapiens
acaagtaccattatt

SEQ ID NO: 696948 - DNA, 15 bp, Homo sapiens
caagtaccattattt

SEQ ID NO: 696949 - DNA, 15 bp, Homo sapiens
aagtaccattatttt

SEQ ID NO: 696950 - DNA, 15 bp, Homo sapiens
agtaccattatttta

SEQ ID NO: 696951 - DNA, 15 bp, Homo sapiens
gtaccattattttac

SEQ ID NO: 696952 - DNA, 15 bp, Homo sapiens
taccattattttaca

SEQ ID NO: 696953 - DNA, 15 bp, Homo sapiens
accattattttacag

SEQ ID NO: 696954 - DNA, 15 bp, Homo sapiens
ccattattttacagt

SEQ ID NO: 696955 - DNA, 15 bp, Homo sapiens
cattattttacagtt

SEQ ID NO: 696956 - DNA, 15 bp, Homo sapiens
attattttacagttg

SEQ ID NO: 696957 - DNA, 15 bp, Homo sapiens
ttattttacagttgc

SEQ ID NO: 696958 - DNA, 15 bp, Homo sapiens
tattttacagttgcc

SEQ ID NO: 696959 - DNA, 15 bp, Homo sapiens
attttacagttgcct

SEQ ID NO: 696960 - DNA, 15 bp, Homo sapiens
ttttacagttgccta

SEQ ID NO: 696961 - DNA, 15 bp, Homo sapiens
tttacagttgcctac

SEQ ID NO: 696962 - DNA, 15 bp, Homo sapiens
ttacagttgcctaca

SEQ ID NO: 696963 - DNA, 15 bp, Homo sapiens
tacagttgcctacag

SEQ ID NO: 696964 - DNA, 15 bp, Homo sapiens
acagttgcctacagt

SEQ ID NO: 696965 - DNA, 15 bp, Homo sapiens
cagttgcctacagta

SEQ ID NO: 696966 - DNA, 15 bp, Homo sapiens
agttgcctacagtat

SEQ ID NO: 696967 - DNA, 15 bp, Homo sapiens
gttgcctacagtatt

SEQ ID NO: 696968 - DNA, 15 bp, Homo sapiens
ttgcctacagtattc

SEQ ID NO: 696969 - DNA, 15 bp, Homo sapiens
tgcctacagtattct

SEQ ID NO: 696970 - DNA, 15 bp, Homo sapiens
gcctacagtattctt

SEQ ID NO: 696971 - DNA, 15 bp, Homo sapiens
cctacagtattcttt

SEQ ID NO: 696972 - DNA, 15 bp, Homo sapiens
ctacagtattctttg

SEQ ID NO: 696973 - DNA, 15 bp, Homo sapiens
tacagtattctttgc

SEQ ID NO: 696974 - DNA, 15 bp, Homo sapiens
acagtattctttgca

SEQ ID NO: 696975 - DNA, 15 bp, Homo sapiens
cagtattctttgcag

SEQ ID NO: 696976 - DNA, 15 bp, Homo sapiens
agtattctttgcagt

SEQ ID NO: 696977 - DNA, 15 bp, Homo sapiens
gtattctttgcagta

SEQ ID NO: 696978 - DNA, 15 bp, Homo sapiens
tattctttgcagtag

SEQ ID NO: 696979 - DNA, 15 bp, Homo sapiens
attctttgcagtagc

SEQ ID NO: 696980 - DNA, 15 bp, Homo sapiens
ttctttgcagtagca

SEQ ID NO: 696981 - DNA, 15 bp, Homo sapiens
tctttgcagtagcat

SEQ ID NO: 696982 - DNA, 15 bp, Homo sapiens
ctttgcagtagcatg

SEQ ID NO: 696983 - DNA, 15 bp, Homo sapiens
tttgcagtagcatgc

SEQ ID NO: 696984 - DNA, 15 bp, Homo sapiens
ttgcagtagcatgct

SEQ ID NO: 696985 - DNA, 15 bp, Homo sapiens
tgcagtagcatgctg

SEQ ID NO: 696986 - DNA, 15 bp, Homo sapiens
gcagtagcatgctgt

SEQ ID NO: 696987 - DNA, 15 bp, Homo sapiens
cagtagcatgctgta

SEQ ID NO: 696988 - DNA, 15 bp, Homo sapiens
agtagcatgctgtat

SEQ ID NO: 696989 - DNA, 15 bp, Homo sapiens
gtagcatgctgtata

SEQ ID NO: 696990 - DNA, 15 bp, Homo sapiens
tagcatgctgtatag

SEQ ID NO: 696991 - DNA, 15 bp, Homo sapiens
agcatgctgtatagg

SEQ ID NO: 696992 - DNA, 15 bp, Homo sapiens
gcatgctgtataggt

SEQ ID NO: 696993 - DNA, 15 bp, Homo sapiens
catgctgtataggtt

SEQ ID NO: 696994 - DNA, 15 bp, Homo sapiens
atgctgtataggttt

SEQ ID NO: 696995 - DNA, 15 bp, Homo sapiens
tgctgtataggtttg

SEQ ID NO: 696996 - DNA, 15 bp, Homo sapiens
gctgtataggtttgt

SEQ ID NO: 696997 - DNA, 15 bp, Homo sapiens
ctgtataggtttgta

SEQ ID NO: 696998 - DNA, 15 bp, Homo sapiens
tgtataggtttgtag

SEQ ID NO: 696999 - DNA, 15 bp, Homo sapiens
gtataggtttgtagc

SEQ ID NO: 697000 - DNA, 15 bp, Homo sapiens
tataggtttgtagcc

SEQ ID NO: 697001 - DNA, 15 bp, Homo sapiens
ataggtttgtagcct

SEQ ID NO: 697002 - DNA, 15 bp, Homo sapiens
taggtttgtagccta

SEQ ID NO: 697003 - DNA, 15 bp, Homo sapiens
aggtttgtagcctag

SEQ ID NO: 697004 - DNA, 15 bp, Homo sapiens
ggtttgtagcctaga

SEQ ID NO: 697005 - DNA, 15 bp, Homo sapiens
gtttgtagcctagaa

SEQ ID NO: 697006 - DNA, 15 bp, Homo sapiens
tttgtagcctagaag

SEQ ID NO: 697007 - DNA, 15 bp, Homo sapiens
ttgtagcctagaagc

SEQ ID NO: 697008 - DNA, 15 bp, Homo sapiens
tgtagcctagaagca

SEQ ID NO: 697009 - DNA, 15 bp, Homo sapiens
gtagcctagaagcag

SEQ ID NO: 697010 - DNA, 15 bp, Homo sapiens
tagcctagaagcagt

SEQ ID NO: 697011 - DNA, 15 bp, Homo sapiens
agcctagaagcagta

SEQ ID NO: 697012 - DNA, 15 bp, Homo sapiens
gcctagaagcagtag

SEQ ID NO: 697013 - DNA, 15 bp, Homo sapiens
cctagaagcagtagg

SEQ ID NO: 697014 - DNA, 15 bp, Homo sapiens
ctagaagcagtaggg

SEQ ID NO: 697015 - DNA, 15 bp, Homo sapiens
tagaagcagtagggt

SEQ ID NO: 697016 - DNA, 15 bp, Homo sapiens
agaagcagtagggtg

SEQ ID NO: 697017 - DNA, 15 bp, Homo sapiens
gaagcagtagggtgt

SEQ ID NO: 697018 - DNA, 15 bp, Homo sapiens
aagcagtagggtgta

SEQ ID NO: 697019 - DNA, 15 bp, Homo sapiens
agcagtagggtgtac

SEQ ID NO: 697020 - DNA, 15 bp, Homo sapiens
gcagtagggtgtacc

SEQ ID NO: 697021 - DNA, 15 bp, Homo sapiens
cagtagggtgtacca

SEQ ID NO: 697022 - DNA, 15 bp, Homo sapiens
agtagggtgtaccat

SEQ ID NO: 697023 - DNA, 15 bp, Homo sapiens
gtagggtgtaccata

SEQ ID NO: 697024 - DNA, 15 bp, Homo sapiens
tagggtgtaccatat

SEQ ID NO: 697025 - DNA, 15 bp, Homo sapiens
agggtgtaccatata

SEQ ID NO: 697026 - DNA, 15 bp, Homo sapiens
gggtgtaccatataa

SEQ ID NO: 697027 - DNA, 15 bp, Homo sapiens
ggtgtaccatataag

SEQ ID NO: 697028 - DNA, 15 bp, Homo sapiens
gtgtaccatataagc

SEQ ID NO: 697029 - DNA, 15 bp, Homo sapiens
tgtaccatataagcc

SEQ ID NO: 697030 - DNA, 15 bp, Homo sapiens
gtaccatataagcct

SEQ ID NO: 697031 - DNA, 15 bp, Homo sapiens
taccatataagccta

SEQ ID NO: 697032 - DNA, 15 bp, Homo sapiens
accatataagcctag

SEQ ID NO: 697033 - DNA, 15 bp, Homo sapiens
ccatataagcctagg

SEQ ID NO: 697034 - DNA, 15 bp, Homo sapiens
catataagcctaggt

SEQ ID NO: 697035 - DNA, 15 bp, Homo sapiens
atataagcctaggtg

SEQ ID NO: 697036 - DNA, 15 bp, Homo sapiens
tataagcctaggtgt

SEQ ID NO: 697037 - DNA, 15 bp, Homo sapiens
ataagcctaggtgtg

SEQ ID NO: 697038 - DNA, 15 bp, Homo sapiens
taagcctaggtgtgt

SEQ ID NO: 697039 - DNA, 15 bp, Homo sapiens
aagcctaggtgtgta

SEQ ID NO: 697040 - DNA, 15 bp, Homo sapiens
agcctaggtgtgtaa

SEQ ID NO: 697041 - DNA, 15 bp, Homo sapiens
gcctaggtgtgtaat

SEQ ID NO: 697042 - DNA, 15 bp, Homo sapiens
cctaggtgtgtaata

SEQ ID NO: 697043 - DNA, 15 bp, Homo sapiens
ctaggtgtgtaatag

SEQ ID NO: 697044 - DNA, 15 bp, Homo sapiens
taggtgtgtaatagt

SEQ ID NO: 697045 - DNA, 15 bp, Homo sapiens
aggtgtgtaatagtg

SEQ ID NO: 697046 - DNA, 15 bp, Homo sapiens
ggtgtgtaatagtgt

SEQ ID NO: 697047 - DNA, 15 bp, Homo sapiens
gtgtgtaatagtgta

SEQ ID NO: 697048 - DNA, 15 bp, Homo sapiens
tgtgtaatagtgtat

SEQ ID NO: 697049 - DNA, 15 bp, Homo sapiens
gtgtaatagtgtata

SEQ ID NO: 697050 - DNA, 15 bp, Homo sapiens
tgtaatagtgtatac

SEQ ID NO: 697051 - DNA, 15 bp, Homo sapiens
gtaatagtgtatacc

SEQ ID NO: 697052 - DNA, 15 bp, Homo sapiens
taatagtgtatacct

SEQ ID NO: 697053 - DNA, 15 bp, Homo sapiens
aatagtgtatacctt

SEQ ID NO: 697054 - DNA, 15 bp, Homo sapiens
atagtgtataccttc

SEQ ID NO: 697055 - DNA, 15 bp, Homo sapiens
tagtgtataccttct

SEQ ID NO: 697056 - DNA, 15 bp, Homo sapiens
agtgtataccttcta

SEQ ID NO: 697057 - DNA, 15 bp, Homo sapiens
gtgtataccttctag

SEQ ID NO: 697058 - DNA, 15 bp, Homo sapiens
tgtataccttctaga

SEQ ID NO: 697059 - DNA, 15 bp, Homo sapiens
gtataccttctagag

SEQ ID NO: 697060 - DNA, 15 bp, Homo sapiens
tataccttctagagt

SEQ ID NO: 697061 - DNA, 15 bp, Homo sapiens
ataccttctagagtt

SEQ ID NO: 697062 - DNA, 15 bp, Homo sapiens
taccttctagagttg

SEQ ID NO: 697063 - DNA, 15 bp, Homo sapiens
accttctagagttgt

SEQ ID NO: 697064 - DNA, 15 bp, Homo sapiens
ccttctagagttgtg

SEQ ID NO: 697065 - DNA, 15 bp, Homo sapiens
cttctagagttgtgt

SEQ ID NO: 697066 - DNA, 15 bp, Homo sapiens
ttctagagttgtgta

SEQ ID NO: 697067 - DNA, 15 bp, Homo sapiens
tctagagttgtgtaa

SEQ ID NO: 697068 - DNA, 15 bp, Homo sapiens
ctagagttgtgtaag

SEQ ID NO: 697069 - DNA, 15 bp, Homo sapiens
tagagttgtgtaagt

SEQ ID NO: 697070 - DNA, 15 bp, Homo sapiens
agagttgtgtaagta

SEQ ID NO: 697071 - DNA, 15 bp, Homo sapiens
gagttgtgtaagtac

SEQ ID NO: 697072 - DNA, 15 bp, Homo sapiens
agttgtgtaagtaca

SEQ ID NO: 697073 - DNA, 15 bp, Homo sapiens
gttgtgtaagtacac

SEQ ID NO: 697074 - DNA, 15 bp, Homo sapiens
ttgtgtaagtacaca

SEQ ID NO: 697075 - DNA, 15 bp, Homo sapiens
tgtgtaagtacacac

SEQ ID NO: 697076 - DNA, 15 bp, Homo sapiens
gtgtaagtacacact

SEQ ID NO: 697077 - DNA, 15 bp, Homo sapiens
tgtaagtacacactg

SEQ ID NO: 697078 - DNA, 15 bp, Homo sapiens
gtaagtacacactgt

SEQ ID NO: 697079 - DNA, 15 bp, Homo sapiens
taagtacacactgtg

SEQ ID NO: 697080 - DNA, 15 bp, Homo sapiens
aagtacacactgtga

SEQ ID NO: 697081 - DNA, 15 bp, Homo sapiens
agtacacactgtgat

SEQ ID NO: 697082 - DNA, 15 bp, Homo sapiens
gtacacactgtgatg

SEQ ID NO: 697083 - DNA, 15 bp, Homo sapiens
tacacactgtgatgt

SEQ ID NO: 697084 - DNA, 15 bp, Homo sapiens
acacactgtgatgtt

SEQ ID NO: 697085 - DNA, 15 bp, Homo sapiens
cacactgtgatgttt

SEQ ID NO: 697086 - DNA, 15 bp, Homo sapiens
acactgtgatgtttg

SEQ ID NO: 697087 - DNA, 15 bp, Homo sapiens
cactgtgatgtttgc

SEQ ID NO: 697088 - DNA, 15 bp, Homo sapiens
actgtgatgtttgca

SEQ ID NO: 697089 - DNA, 15 bp, Homo sapiens
ctgtgatgtttgcac

SEQ ID NO: 697090 - DNA, 15 bp, Homo sapiens
tgtgatgtttgcacg

SEQ ID NO: 697091 - DNA, 15 bp, Homo sapiens
gtgatgtttgcacga

SEQ ID NO: 697092 - DNA, 15 bp, Homo sapiens
tgatgtttgcacgac

SEQ ID NO: 697093 - DNA, 15 bp, Homo sapiens
gatgtttgcacgaca

SEQ ID NO: 697094 - DNA, 15 bp, Homo sapiens
atgtttgcacgacat

SEQ ID NO: 697095 - DNA, 15 bp, Homo sapiens
tgtttgcacgacata

SEQ ID NO: 697096 - DNA, 15 bp, Homo sapiens
gtttgcacgacataa

SEQ ID NO: 697097 - DNA, 15 bp, Homo sapiens
tttgcacgacataat

SEQ ID NO: 697098 - DNA, 15 bp, Homo sapiens
ttgcacgacataatt

SEQ ID NO: 697099 - DNA, 15 bp, Homo sapiens
tgcacgacataatta

SEQ ID NO: 697100 - DNA, 15 bp, Homo sapiens
gcacgacataattac

SEQ ID NO: 697101 - DNA, 15 bp, Homo sapiens
cacgacataattacc

SEQ ID NO: 697102 - DNA, 15 bp, Homo sapiens
acgacataattacct

SEQ ID NO: 697103 - DNA, 15 bp, Homo sapiens
cgacataattaccta

SEQ ID NO: 697104 - DNA, 15 bp, Homo sapiens
gacataattacctaa

SEQ ID NO: 697105 - DNA, 15 bp, Homo sapiens
acataattacctaag

SEQ ID NO: 697106 - DNA, 15 bp, Homo sapiens
cataattacctaagc

SEQ ID NO: 697107 - DNA, 15 bp, Homo sapiens
ataattacctaagca

SEQ ID NO: 697108 - DNA, 15 bp, Homo sapiens
taattacctaagcaa

SEQ ID NO: 697109 - DNA, 15 bp, Homo sapiens
aattacctaagcaag

SEQ ID NO: 697110 - DNA, 15 bp, Homo sapiens
attacctaagcaagc

SEQ ID NO: 697111 - DNA, 15 bp, Homo sapiens
ttacctaagcaagca

SEQ ID NO: 697112 - DNA, 15 bp, Homo sapiens
tacctaagcaagcat

SEQ ID NO: 697113 - DNA, 15 bp, Homo sapiens
acctaagcaagcatc

SEQ ID NO: 697114 - DNA, 15 bp, Homo sapiens
cctaagcaagcatca

SEQ ID NO: 697115 - DNA, 15 bp, Homo sapiens
ctaagcaagcatcat

SEQ ID NO: 697116 - DNA, 15 bp, Homo sapiens
taagcaagcatcata

SEQ ID NO: 697117 - DNA, 15 bp, Homo sapiens
aagcaagcatcataa

SEQ ID NO: 697118 - DNA, 15 bp, Homo sapiens
agcaagcatcataag

SEQ ID NO: 697119 - DNA, 15 bp, Homo sapiens
gcaagcatcataagc

SEQ ID NO: 697120 - DNA, 15 bp, Homo sapiens
caagcatcataagca

SEQ ID NO: 697121 - DNA, 15 bp, Homo sapiens
aagcatcataagcaa

SEQ ID NO: 697122 - DNA, 15 bp, Homo sapiens
agcatcataagcaac

SEQ ID NO: 697123 - DNA, 15 bp, Homo sapiens
gcatcataagcaaca

SEQ ID NO: 697124 - DNA, 15 bp, Homo sapiens
catcataagcaacac

SEQ ID NO: 697125 - DNA, 15 bp, Homo sapiens
atcataagcaacacg

SEQ ID NO: 697126 - DNA, 15 bp, Homo sapiens
tcataagcaacacgt

SEQ ID NO: 697127 - DNA, 15 bp, Homo sapiens
cataagcaacacgtg

SEQ ID NO: 697128 - DNA, 15 bp, Homo sapiens
ataagcaacacgtga

SEQ ID NO: 697129 - DNA, 15 bp, Homo sapiens
taagcaacacgtgac

SEQ ID NO: 697130 - DNA, 15 bp, Homo sapiens
aagcaacacgtgaca

SEQ ID NO: 697131 - DNA, 15 bp, Homo sapiens
agcaacacgtgacag

SEQ ID NO: 697132 - DNA, 15 bp, Homo sapiens
gcaacacgtgacagt

SEQ ID NO: 697133 - DNA, 15 bp, Homo sapiens
caacacgtgacagta

SEQ ID NO: 697134 - DNA, 15 bp, Homo sapiens
aacacgtgacagtat

SEQ ID NO: 697135 - DNA, 15 bp, Homo sapiens
acacgtgacagtata

SEQ ID NO: 697136 - DNA, 15 bp, Homo sapiens
cacgtgacagtatat

SEQ ID NO: 697137 - DNA, 15 bp, Homo sapiens
acgtgacagtatatt

SEQ ID NO: 697138 - DNA, 15 bp, Homo sapiens
cgtgacagtatatta

SEQ ID NO: 697139 - DNA, 15 bp, Homo sapiens
gtgacagtatattac

SEQ ID NO: 697140 - DNA, 15 bp, Homo sapiens
tgacagtatattact

SEQ ID NO: 697141 - DNA, 15 bp, Homo sapiens
gacagtatattactt

SEQ ID NO: 697142 - DNA, 15 bp, Homo sapiens
acagtatattacttt

SEQ ID NO: 697143 - DNA, 15 bp, Homo sapiens
cagtatattactttc

SEQ ID NO: 697144 - DNA, 15 bp, Homo sapiens
agtatattactttct

SEQ ID NO: 697145 - DNA, 15 bp, Homo sapiens
gtatattactttcta

SEQ ID NO: 697146 - DNA, 15 bp, Homo sapiens
tatattactttctaa

SEQ ID NO: 697147 - DNA, 15 bp, Homo sapiens
atattactttctaaa

SEQ ID NO: 697148 - DNA, 15 bp, Homo sapiens
tattactttctaaat

SEQ ID NO: 697149 - DNA, 15 bp, Homo sapiens
attactttctaaatg

SEQ ID NO: 697150 - DNA, 15 bp, Homo sapiens
ttactttctaaatgc

SEQ ID NO: 697151 - DNA, 15 bp, Homo sapiens
tactttctaaatgcc

SEQ ID NO: 697152 - DNA, 15 bp, Homo sapiens
actttctaaatgcca

SEQ ID NO: 697153 - DNA, 15 bp, Homo sapiens
ctttctaaatgccaa

SEQ ID NO: 697154 - DNA, 15 bp, Homo sapiens
tttctaaatgccaag

SEQ ID NO: 697155 - DNA, 15 bp, Homo sapiens
ttctaaatgccaagt

SEQ ID NO: 697156 - DNA, 15 bp, Homo sapiens
tctaaatgccaagta

SEQ ID NO: 697157 - DNA, 15 bp, Homo sapiens
ctaaatgccaagtac

SEQ ID NO: 697158 - DNA, 15 bp, Homo sapiens
taaatgccaagtact

SEQ ID NO: 697159 - DNA, 15 bp, Homo sapiens
aaatgccaagtacta

SEQ ID NO: 697160 - DNA, 15 bp, Homo sapiens
aatgccaagtactat

SEQ ID NO: 697161 - DNA, 15 bp, Homo sapiens
atgccaagtactata

SEQ ID NO: 697162 - DNA, 15 bp, Homo sapiens
tgccaagtactatat

SEQ ID NO: 697163 - DNA, 15 bp, Homo sapiens
gccaagtactatatt

SEQ ID NO: 697164 - DNA, 15 bp, Homo sapiens
ccaagtactatattt

SEQ ID NO: 697165 - DNA, 15 bp, Homo sapiens
caagtactatatttc

SEQ ID NO: 697166 - DNA, 15 bp, Homo sapiens
aagtactatatttca

SEQ ID NO: 697167 - DNA, 15 bp, Homo sapiens
agtactatatttcac

SEQ ID NO: 697168 - DNA, 15 bp, Homo sapiens
gtactatatttcact

SEQ ID NO: 697169 - DNA, 15 bp, Homo sapiens
tactatatttcacta

SEQ ID NO: 697170 - DNA, 15 bp, Homo sapiens
actatatttcactat

SEQ ID NO: 697171 - DNA, 15 bp, Homo sapiens
ctatatttcactatc

SEQ ID NO: 697172 - DNA, 15 bp, Homo sapiens
tatatttcactatct

SEQ ID NO: 697173 - DNA, 15 bp, Homo sapiens
atatttcactatctc

SEQ ID NO: 697174 - DNA, 15 bp, Homo sapiens
tatttcactatctct

SEQ ID NO: 697175 - DNA, 15 bp, Homo sapiens
atttcactatctctg

SEQ ID NO: 697176 - DNA, 15 bp, Homo sapiens
tttcactatctctga

SEQ ID NO: 697177 - DNA, 15 bp, Homo sapiens
ttcactatctctgat

SEQ ID NO: 697178 - DNA, 15 bp, Homo sapiens
tcactatctctgatg

SEQ ID NO: 697179 - DNA, 15 bp, Homo sapiens
cactatctctgatgt

SEQ ID NO: 697180 - DNA, 15 bp, Homo sapiens
actatctctgatgtt

SEQ ID NO: 697181 - DNA, 15 bp, Homo sapiens
ctatctctgatgttt

SEQ ID NO: 697182 - DNA, 15 bp, Homo sapiens
tatctctgatgtttc

SEQ ID NO: 697183 - DNA, 15 bp, Homo sapiens
atctctgatgtttct

SEQ ID NO: 697184 - DNA, 15 bp, Homo sapiens
tctctgatgtttctc

SEQ ID NO: 697185 - DNA, 15 bp, Homo sapiens
ctctgatgtttctcc

SEQ ID NO: 697186 - DNA, 15 bp, Homo sapiens
tctgatgtttctccg

SEQ ID NO: 697187 - DNA, 15 bp, Homo sapiens
ctgatgtttctccga

SEQ ID NO: 697188 - DNA, 15 bp, Homo sapiens
tgatgtttctccgac

SEQ ID NO: 697189 - DNA, 15 bp, Homo sapiens
gatgtttctccgacc

SEQ ID NO: 697190 - DNA, 15 bp, Homo sapiens
atgtttctccgacct

SEQ ID NO: 697191 - DNA, 15 bp, Homo sapiens
tgtttctccgaccta

SEQ ID NO: 697192 - DNA, 15 bp, Homo sapiens
gtttctccgacctaa

SEQ ID NO: 697193 - DNA, 15 bp, Homo sapiens
tttctccgacctaac

SEQ ID NO: 697194 - DNA, 15 bp, Homo sapiens
ttctccgacctaaca

SEQ ID NO: 697195 - DNA, 15 bp, Homo sapiens
tctccgacctaacat

SEQ ID NO: 697196 - DNA, 15 bp, Homo sapiens
ctccgacctaacata

SEQ ID NO: 697197 - DNA, 15 bp, Homo sapiens
tccgacctaacatac

SEQ ID NO: 697198 - DNA, 15 bp, Homo sapiens
ccgacctaacatact

SEQ ID NO: 697199 - DNA, 15 bp, Homo sapiens
cgacctaacatactt

SEQ ID NO: 697200 - DNA, 15 bp, Homo sapiens
gacctaacatactta

SEQ ID NO: 697201 - DNA, 15 bp, Homo sapiens
acctaacatacttaa

SEQ ID NO: 697202 - DNA, 15 bp, Homo sapiens
cctaacatacttaaa

SEQ ID NO: 697203 - DNA, 15 bp, Homo sapiens
ctaacatacttaaaa

SEQ ID NO: 697204 - DNA, 15 bp, Homo sapiens
taacatacttaaaac

SEQ ID NO: 697205 - DNA, 15 bp, Homo sapiens
aacatacttaaaaca

SEQ ID NO: 697206 - DNA, 15 bp, Homo sapiens
acatacttaaaacat

SEQ ID NO: 697207 - DNA, 15 bp, Homo sapiens
catacttaaaacata

SEQ ID NO: 697208 - DNA, 15 bp, Homo sapiens
atacttaaaacataa

SEQ ID NO: 697209 - DNA, 15 bp, Homo sapiens
tacttaaaacataag

SEQ ID NO: 697210 - DNA, 15 bp, Homo sapiens
acttaaaacataagt

SEQ ID NO: 697211 - DNA, 15 bp, Homo sapiens
cttaaaacataagtt

SEQ ID NO: 697212 - DNA, 15 bp, Homo sapiens
ttaaaacataagttc

SEQ ID NO: 697213 - DNA, 15 bp, Homo sapiens
taaaacataagttct

SEQ ID NO: 697214 - DNA, 15 bp, Homo sapiens
aaaacataagttctt

SEQ ID NO: 697215 - DNA, 15 bp, Homo sapiens
aaacataagttcttg

SEQ ID NO: 697216 - DNA, 15 bp, Homo sapiens
aacataagttcttga

SEQ ID NO: 697217 - DNA, 15 bp, Homo sapiens
acataagttcttgac

SEQ ID NO: 697218 - DNA, 15 bp, Homo sapiens
cataagttcttgact

SEQ ID NO: 697219 - DNA, 15 bp, Homo sapiens
ataagttcttgactg

SEQ ID NO: 697220 - DNA, 15 bp, Homo sapiens
taagttcttgactgt

SEQ ID NO: 697221 - DNA, 15 bp, Homo sapiens
aagttcttgactgtg

SEQ ID NO: 697222 - DNA, 15 bp, Homo sapiens
agttcttgactgtga

SEQ ID NO: 697223 - DNA, 15 bp, Homo sapiens
gttcttgactgtgat

SEQ ID NO: 697224 - DNA, 15 bp, Homo sapiens
ttcttgactgtgatg

SEQ ID NO: 697225 - DNA, 15 bp, Homo sapiens
tcttgactgtgatgt

SEQ ID NO: 697226 - DNA, 15 bp, Homo sapiens
cttgactgtgatgta

SEQ ID NO: 697227 - DNA, 15 bp, Homo sapiens
ttgactgtgatgtaa

SEQ ID NO: 697228 - DNA, 15 bp, Homo sapiens
tgactgtgatgtaag

SEQ ID NO: 697229 - DNA, 15 bp, Homo sapiens
gactgtgatgtaagt

SEQ ID NO: 697230 - DNA, 15 bp, Homo sapiens
actgtgatgtaagtg

SEQ ID NO: 697231 - DNA, 15 bp, Homo sapiens
ctgtgatgtaagtgc

SEQ ID NO: 697232 - DNA, 15 bp, Homo sapiens
tgtgatgtaagtgca

SEQ ID NO: 697233 - DNA, 15 bp, Homo sapiens
gtgatgtaagtgcac

SEQ ID NO: 697234 - DNA, 15 bp, Homo sapiens
tgatgtaagtgcacc

SEQ ID NO: 697235 - DNA, 15 bp, Homo sapiens
gatgtaagtgcacct

SEQ ID NO: 697236 - DNA, 15 bp, Homo sapiens
atgtaagtgcacctt

SEQ ID NO: 697237 - DNA, 15 bp, Homo sapiens
tgtaagtgcaccttt

SEQ ID NO: 697238 - DNA, 15 bp, Homo sapiens
gtaagtgcaccttta

SEQ ID NO: 697239 - DNA, 15 bp, Homo sapiens
taagtgcacctttaa

SEQ ID NO: 697240 - DNA, 15 bp, Homo sapiens
aagtgcacctttaaa

SEQ ID NO: 697241 - DNA, 15 bp, Homo sapiens
agtgcacctttaaaa

SEQ ID NO: 697242 - DNA, 15 bp, Homo sapiens
gtgcacctttaaaat

SEQ ID NO: 697243 - DNA, 15 bp, Homo sapiens
tgcacctttaaaatg

SEQ ID NO: 697244 - DNA, 15 bp, Homo sapiens
gcacctttaaaatgt

SEQ ID NO: 697245 - DNA, 15 bp, Homo sapiens
cacctttaaaatgta

SEQ ID NO: 697246 - DNA, 15 bp, Homo sapiens
acctttaaaatgtac

SEQ ID NO: 697247 - DNA, 15 bp, Homo sapiens
cctttaaaatgtacc

SEQ ID NO: 697248 - DNA, 15 bp, Homo sapiens
ctttaaaatgtacct

SEQ ID NO: 697249 - DNA, 15 bp, Homo sapiens
tttaaaatgtacctc

SEQ ID NO: 697250 - DNA, 15 bp, Homo sapiens
ttaaaatgtacctct

SEQ ID NO: 697251 - DNA, 15 bp, Homo sapiens
taaaatgtacctctg

SEQ ID NO: 697252 - DNA, 15 bp, Homo sapiens
aaaatgtacctctgg

SEQ ID NO: 697253 - DNA, 15 bp, Homo sapiens
aaatgtacctctggt

SEQ ID NO: 697254 - DNA, 15 bp, Homo sapiens
aatgtacctctggta

SEQ ID NO: 697255 - DNA, 15 bp, Homo sapiens
atgtacctctggtag

SEQ ID NO: 697256 - DNA, 15 bp, Homo sapiens
tgtacctctggtagt

SEQ ID NO: 697257 - DNA, 15 bp, Homo sapiens
gtacctctggtagta

SEQ ID NO: 697258 - DNA, 15 bp, Homo sapiens
tacctctggtagtat

SEQ ID NO: 697259 - DNA, 15 bp, Homo sapiens
acctctggtagtatt

SEQ ID NO: 697260 - DNA, 15 bp, Homo sapiens
cctctggtagtattt

SEQ ID NO: 697261 - DNA, 15 bp, Homo sapiens
ctctggtagtatttt

SEQ ID NO: 697262 - DNA, 15 bp, Homo sapiens
tctggtagtatttta

SEQ ID NO: 697263 - DNA, 15 bp, Homo sapiens
ctggtagtattttat

SEQ ID NO: 697264 - DNA, 15 bp, Homo sapiens
tggtagtattttatt

SEQ ID NO: 697265 - DNA, 15 bp, Homo sapiens
ggtagtattttattt

SEQ ID NO: 697266 - DNA, 15 bp, Homo sapiens
gtagtattttatttt

SEQ ID NO: 697267 - DNA, 15 bp, Homo sapiens
tagtattttattttt

SEQ ID NO: 697268 - DNA, 15 bp, Homo sapiens
agtattttatttttt

SEQ ID NO: 697269 - DNA, 15 bp, Homo sapiens
gtattttattttttt

SEQ ID NO: 697270 - DNA, 15 bp, Homo sapiens
tattttatttttttg

SEQ ID NO: 697271 - DNA, 15 bp, Homo sapiens
attttatttttttgc

SEQ ID NO: 697272 - DNA, 15 bp, Homo sapiens
ttttatttttttgct

SEQ ID NO: 697273 - DNA, 15 bp, Homo sapiens
tttatttttttgcta

SEQ ID NO: 697274 - DNA, 15 bp, Homo sapiens
ttatttttttgctaa

SEQ ID NO: 697275 - DNA, 15 bp, Homo sapiens
tatttttttgctaag

SEQ ID NO: 697276 - DNA, 15 bp, Homo sapiens
atttttttgctaagt

SEQ ID NO: 697277 - DNA, 15 bp, Homo sapiens
tttttttgctaagta

SEQ ID NO: 697278 - DNA, 15 bp, Homo sapiens
ttttttgctaagtaa

SEQ ID NO: 697279 - DNA, 15 bp, Homo sapiens
tttttgctaagtaaa

SEQ ID NO: 697280 - DNA, 15 bp, Homo sapiens
ttttgctaagtaaaa

SEQ ID NO: 697281 - DNA, 15 bp, Homo sapiens
tttgctaagtaaaaa

SEQ ID NO: 697282 - DNA, 15 bp, Homo sapiens
ttgctaagtaaaaac

SEQ ID NO: 697283 - DNA, 15 bp, Homo sapiens
tgctaagtaaaaact

SEQ ID NO: 697284 - DNA, 15 bp, Homo sapiens
gctaagtaaaaactt

SEQ ID NO: 697285 - DNA, 15 bp, Homo sapiens
ctaagtaaaaactta

SEQ ID NO: 697286 - DNA, 15 bp, Homo sapiens
taagtaaaaacttag

SEQ ID NO: 697287 - DNA, 15 bp, Homo sapiens
aagtaaaaacttagc

SEQ ID NO: 697288 - DNA, 15 bp, Homo sapiens
agtaaaaacttagca

SEQ ID NO: 697289 - DNA, 15 bp, Homo sapiens
gtaaaaacttagcaa

SEQ ID NO: 697290 - DNA, 15 bp, Homo sapiens
taaaaacttagcaaa

SEQ ID NO: 697291 - DNA, 15 bp, Homo sapiens
aaaaacttagcaaaa

SEQ ID NO: 697292 - DNA, 15 bp, Homo sapiens
aaaacttagcaaaat

SEQ ID NO: 697293 - DNA, 15 bp, Homo sapiens
aaacttagcaaaatg

SEQ ID NO: 697294 - DNA, 15 bp, Homo sapiens
aacttagcaaaatga

SEQ ID NO: 697295 - DNA, 15 bp, Homo sapiens
acttagcaaaatgac

SEQ ID NO: 697296 - DNA, 15 bp, Homo sapiens
cttagcaaaatgaca

SEQ ID NO: 697297 - DNA, 15 bp, Homo sapiens
ttagcaaaatgacat

SEQ ID NO: 697298 - DNA, 15 bp, Homo sapiens
tagcaaaatgacatt

SEQ ID NO: 697299 - DNA, 15 bp, Homo sapiens
agcaaaatgacattt

SEQ ID NO: 697300 - DNA, 15 bp, Homo sapiens
gcaaaatgacatttt

SEQ ID NO: 697301 - DNA, 15 bp, Homo sapiens
caaaatgacatttta

SEQ ID NO: 697302 - DNA, 15 bp, Homo sapiens
aaaatgacattttat

SEQ ID NO: 697303 - DNA, 15 bp, Homo sapiens
aaatgacattttatt

SEQ ID NO: 697304 - DNA, 15 bp, Homo sapiens
aatgacattttatta

SEQ ID NO: 697305 - DNA, 15 bp, Homo sapiens
atgacattttattag

SEQ ID NO: 697306 - DNA, 15 bp, Homo sapiens
tgacattttattagt

SEQ ID NO: 697307 - DNA, 15 bp, Homo sapiens
gacattttattagtt

SEQ ID NO: 697308 - DNA, 15 bp, Homo sapiens
acattttattagttt

SEQ ID NO: 697309 - DNA, 15 bp, Homo sapiens
cattttattagtttt

SEQ ID NO: 697310 - DNA, 15 bp, Homo sapiens
attttattagttttc

SEQ ID NO: 697311 - DNA, 15 bp, Homo sapiens
ttttattagttttct

SEQ ID NO: 697312 - DNA, 15 bp, Homo sapiens
tttattagttttctc

SEQ ID NO: 697313 - DNA, 15 bp, Homo sapiens
ttattagttttctcc

SEQ ID NO: 697314 - DNA, 15 bp, Homo sapiens
tattagttttctccc

SEQ ID NO: 697315 - DNA, 15 bp, Homo sapiens
attagttttctccct

SEQ ID NO: 697316 - DNA, 15 bp, Homo sapiens
ttagttttctccctc

SEQ ID NO: 697317 - DNA, 15 bp, Homo sapiens
tagttttctccctct

SEQ ID NO: 697318 - DNA, 15 bp, Homo sapiens
agttttctccctctc

SEQ ID NO: 697319 - DNA, 15 bp, Homo sapiens
gttttctccctctca

SEQ ID NO: 697320 - DNA, 15 bp, Homo sapiens
ttttctccctctcaa

SEQ ID NO: 697321 - DNA, 15 bp, Homo sapiens
tttctccctctcaat

SEQ ID NO: 697322 - DNA, 15 bp, Homo sapiens
ttctccctctcaatt

SEQ ID NO: 697323 - DNA, 15 bp, Homo sapiens
tctccctctcaattt

SEQ ID NO: 697324 - DNA, 15 bp, Homo sapiens
ctccctctcaatttt

SEQ ID NO: 697325 - DNA, 15 bp, Homo sapiens
tccctctcaattttt

SEQ ID NO: 697326 - DNA, 15 bp, Homo sapiens
ccctctcaatttttg

SEQ ID NO: 697327 - DNA, 15 bp, Homo sapiens
cctctcaatttttgt

SEQ ID NO: 697328 - DNA, 15 bp, Homo sapiens
ctctcaatttttgtg

SEQ ID NO: 697329 - DNA, 15 bp, Homo sapiens
tctcaatttttgtgg

SEQ ID NO: 697330 - DNA, 15 bp, Homo sapiens
ctcaatttttgtggc

SEQ ID NO: 697331 - DNA, 15 bp, Homo sapiens
tcaatttttgtggca

SEQ ID NO: 697332 - DNA, 15 bp, Homo sapiens
caatttttgtggcat

SEQ ID NO: 697333 - DNA, 15 bp, Homo sapiens
aatttttgtggcata

SEQ ID NO: 697334 - DNA, 15 bp, Homo sapiens
atttttgtggcatat

SEQ ID NO: 697335 - DNA, 15 bp, Homo sapiens
tttttgtggcatata

SEQ ID NO: 697336 - DNA, 15 bp, Homo sapiens
ttttgtggcatatat

SEQ ID NO: 697337 - DNA, 15 bp, Homo sapiens
tttgtggcatatatc

SEQ ID NO: 697338 - DNA, 15 bp, Homo sapiens
ttgtggcatatatca

SEQ ID NO: 697339 - DNA, 15 bp, Homo sapiens
tgtggcatatatcat

SEQ ID NO: 697340 - DNA, 15 bp, Homo sapiens
gtggcatatatcatt

SEQ ID NO: 697341 - DNA, 15 bp, Homo sapiens
tggcatatatcattt

SEQ ID NO: 697342 - DNA, 15 bp, Homo sapiens
ggcatatatcatttt

SEQ ID NO: 697343 - DNA, 15 bp, Homo sapiens
gcatatatcattttg

SEQ ID NO: 697344 - DNA, 15 bp, Homo sapiens
catatatcattttga

SEQ ID NO: 697345 - DNA, 15 bp, Homo sapiens
atatatcattttgaa

SEQ ID NO: 697346 - DNA, 15 bp, Homo sapiens
tatatcattttgaaa

SEQ ID NO: 697347 - DNA, 15 bp, Homo sapiens
atatcattttgaaat

SEQ ID NO: 697348 - DNA, 15 bp, Homo sapiens
tatcattttgaaatt

SEQ ID NO: 697349 - DNA, 15 bp, Homo sapiens
atcattttgaaattg

SEQ ID NO: 697350 - DNA, 15 bp, Homo sapiens
tcattttgaaattgg

SEQ ID NO: 697351 - DNA, 15 bp, Homo sapiens
cattttgaaattggg

SEQ ID NO: 697352 - DNA, 15 bp, Homo sapiens
attttgaaattgggt

SEQ ID NO: 697353 - DNA, 15 bp, Homo sapiens
ttttgaaattgggtg

SEQ ID NO: 697354 - DNA, 15 bp, Homo sapiens
tttgaaattgggtgc

SEQ ID NO: 697355 - DNA, 15 bp, Homo sapiens
ttgaaattgggtgca

SEQ ID NO: 697356 - DNA, 15 bp, Homo sapiens
tgaaattgggtgcat

SEQ ID NO: 697357 - DNA, 15 bp, Homo sapiens
gaaattgggtgcatt

SEQ ID NO: 697358 - DNA, 15 bp, Homo sapiens
aaattgggtgcatta

SEQ ID NO: 697359 - DNA, 15 bp, Homo sapiens
aattgggtgcattat

SEQ ID NO: 697360 - DNA, 15 bp, Homo sapiens
attgggtgcattata

SEQ ID NO: 697361 - DNA, 15 bp, Homo sapiens
ttgggtgcattatat

SEQ ID NO: 697362 - DNA, 15 bp, Homo sapiens
tgggtgcattatata

SEQ ID NO: 697363 - DNA, 15 bp, Homo sapiens
gggtgcattatatac

SEQ ID NO: 697364 - DNA, 15 bp, Homo sapiens
ggtgcattatataca

SEQ ID NO: 697365 - DNA, 15 bp, Homo sapiens
gtgcattatatacag

SEQ ID NO: 697366 - DNA, 15 bp, Homo sapiens
tgcattatatacaga

SEQ ID NO: 697367 - DNA, 15 bp, Homo sapiens
gcattatatacagaa

SEQ ID NO: 697368 - DNA, 15 bp, Homo sapiens
cattatatacagaaa

SEQ ID NO: 697369 - DNA, 15 bp, Homo sapiens
ttatatacagaaaat

SEQ ID NO: 697370 - DNA, 15 bp, Homo sapiens
tatatacagaaaatc

SEQ ID NO: 697371 - DNA, 15 bp, Homo sapiens
atatacagaaaatca

SEQ ID NO: 697372 - DNA, 15 bp, Homo sapiens
tatacagaaaatcaa

SEQ ID NO: 697373 - DNA, 15 bp, Homo sapiens
atacagaaaatcaaa

SEQ ID NO: 697374 - DNA, 15 bp, Homo sapiens
tacagaaaatcaaaa

SEQ ID NO: 697375 - DNA, 15 bp, Homo sapiens
acagaaaatcaaaat

SEQ ID NO: 697376 - DNA, 15 bp, Homo sapiens
cagaaaatcaaaata

SEQ ID NO: 697377 - DNA, 15 bp, Homo sapiens
agaaaatcaaaatag

SEQ ID NO: 697378 - DNA, 15 bp, Homo sapiens
gaaaatcaaaatagt

SEQ ID NO: 697379 - DNA, 15 bp, Homo sapiens
aaaatcaaaatagta

SEQ ID NO: 697380 - DNA, 15 bp, Homo sapiens
aaatcaaaatagtaa

SEQ ID NO: 697381 - DNA, 15 bp, Homo sapiens
aatcaaaatagtaac

SEQ ID NO: 697382 - DNA, 15 bp, Homo sapiens
atcaaaatagtaact

SEQ ID NO: 697383 - DNA, 15 bp, Homo sapiens
tcaaaatagtaactt

SEQ ID NO: 697384 - DNA, 15 bp, Homo sapiens
caaaatagtaacttc

SEQ ID NO: 697385 - DNA, 15 bp, Homo sapiens
aaaatagtaacttca

SEQ ID NO: 697386 - DNA, 15 bp, Homo sapiens
aaatagtaacttcaa

SEQ ID NO: 697387 - DNA, 15 bp, Homo sapiens
aatagtaacttcaaa

SEQ ID NO: 697388 - DNA, 15 bp, Homo sapiens
atagtaacttcaaag

SEQ ID NO: 697389 - DNA, 15 bp, Homo sapiens
tagtaacttcaaagc

SEQ ID NO: 697390 - DNA, 15 bp, Homo sapiens
agtaacttcaaagca

SEQ ID NO: 697391 - DNA, 15 bp, Homo sapiens
gtaacttcaaagcat

SEQ ID NO: 697392 - DNA, 15 bp, Homo sapiens
taacttcaaagcata

SEQ ID NO: 697393 - DNA, 15 bp, Homo sapiens
aacttcaaagcatac

SEQ ID NO: 697394 - DNA, 15 bp, Homo sapiens
acttcaaagcatacc

SEQ ID NO: 697395 - DNA, 15 bp, Homo sapiens
cttcaaagcatacca

SEQ ID NO: 697396 - DNA, 15 bp, Homo sapiens
ttcaaagcataccat

SEQ ID NO: 697397 - DNA, 15 bp, Homo sapiens
tcaaagcataccata

SEQ ID NO: 697398 - DNA, 15 bp, Homo sapiens
caaagcataccatat

SEQ ID NO: 697399 - DNA, 15 bp, Homo sapiens
aaagcataccatata

SEQ ID NO: 697400 - DNA, 15 bp, Homo sapiens
aagcataccatatag

SEQ ID NO: 697401 - DNA, 15 bp, Homo sapiens
agcataccatataga

SEQ ID NO: 697402 - DNA, 15 bp, Homo sapiens
gcataccatatagat

SEQ ID NO: 697403 - DNA, 15 bp, Homo sapiens
cataccatatagata

SEQ ID NO: 697404 - DNA, 15 bp, Homo sapiens
ataccatatagatag

SEQ ID NO: 697405 - DNA, 15 bp, Homo sapiens
taccatatagatagc

SEQ ID NO: 697406 - DNA, 15 bp, Homo sapiens
accatatagatagca

SEQ ID NO: 697407 - DNA, 15 bp, Homo sapiens
ccatatagatagcat

SEQ ID NO: 697408 - DNA, 15 bp, Homo sapiens
catatagatagcatc

SEQ ID NO: 697409 - DNA, 15 bp, Homo sapiens
atatagatagcatct

SEQ ID NO: 697410 - DNA, 15 bp, Homo sapiens
tatagatagcatctg

SEQ ID NO: 697411 - DNA, 15 bp, Homo sapiens
atagatagcatctgc

SEQ ID NO: 697412 - DNA, 15 bp, Homo sapiens
tagatagcatctgct

SEQ ID NO: 697413 - DNA, 15 bp, Homo sapiens
agatagcatctgctt

SEQ ID NO: 697414 - DNA, 15 bp, Homo sapiens
gatagcatctgcttt

SEQ ID NO: 697415 - DNA, 15 bp, Homo sapiens
atagcatctgctttc

SEQ ID NO: 697416 - DNA, 15 bp, Homo sapiens
tagcatctgctttct

SEQ ID NO: 697417 - DNA, 15 bp, Homo sapiens
agcatctgctttcta

SEQ ID NO: 697418 - DNA, 15 bp, Homo sapiens
gcatctgctttctac

SEQ ID NO: 697419 - DNA, 15 bp, Homo sapiens
catctgctttctaca

SEQ ID NO: 697420 - DNA, 15 bp, Homo sapiens
atctgctttctacaa

SEQ ID NO: 697421 - DNA, 15 bp, Homo sapiens
tctgctttctacaaa

SEQ ID NO: 697422 - DNA, 15 bp, Homo sapiens
ctgctttctacaaat

SEQ ID NO: 697423 - DNA, 15 bp, Homo sapiens
tgctttctacaaatt

SEQ ID NO: 697424 - DNA, 15 bp, Homo sapiens
gctttctacaaattg

SEQ ID NO: 697425 - DNA, 15 bp, Homo sapiens
ctttctacaaattgc

SEQ ID NO: 697426 - DNA, 15 bp, Homo sapiens
tttctacaaattgcc

SEQ ID NO: 697427 - DNA, 15 bp, Homo sapiens
ttctacaaattgcct

SEQ ID NO: 697428 - DNA, 15 bp, Homo sapiens
tctacaaattgccta

SEQ ID NO: 697429 - DNA, 15 bp, Homo sapiens
ctacaaattgcctac

SEQ ID NO: 697430 - DNA, 15 bp, Homo sapiens
tacaaattgcctaca

SEQ ID NO: 697431 - DNA, 15 bp, Homo sapiens
acaaattgcctacac

SEQ ID NO: 697432 - DNA, 15 bp, Homo sapiens
caaattgcctacaca

SEQ ID NO: 697433 - DNA, 15 bp, Homo sapiens
aaattgcctacacag

SEQ ID NO: 697434 - DNA, 15 bp, Homo sapiens
aattgcctacacaga

SEQ ID NO: 697435 - DNA, 15 bp, Homo sapiens
attgcctacacagac

SEQ ID NO: 697436 - DNA, 15 bp, Homo sapiens
ttgcctacacagacc

SEQ ID NO: 697437 - DNA, 15 bp, Homo sapiens
tgcctacacagacca

SEQ ID NO: 697438 - DNA, 15 bp, Homo sapiens
gcctacacagaccaa

SEQ ID NO: 697439 - DNA, 15 bp, Homo sapiens
cctacacagaccaaa

SEQ ID NO: 697440 - DNA, 15 bp, Homo sapiens
ctacacagaccaaac

SEQ ID NO: 697441 - DNA, 15 bp, Homo sapiens
tacacagaccaaact

SEQ ID NO: 697442 - DNA, 15 bp, Homo sapiens
acacagaccaaactc

SEQ ID NO: 697443 - DNA, 15 bp, Homo sapiens
cacagaccaaactcc

SEQ ID NO: 697444 - DNA, 15 bp, Homo sapiens
acagaccaaactccc

SEQ ID NO: 697445 - DNA, 15 bp, Homo sapiens
cagaccaaactccca

SEQ ID NO: 697446 - DNA, 15 bp, Homo sapiens
agaccaaactcccaa

SEQ ID NO: 697447 - DNA, 15 bp, Homo sapiens
gaccaaactcccaaa

SEQ ID NO: 697448 - DNA, 15 bp, Homo sapiens
accaaactcccaaaa

SEQ ID NO: 697449 - DNA, 15 bp, Homo sapiens
ccaaactcccaaaat

SEQ ID NO: 697450 - DNA, 15 bp, Homo sapiens
caaactcccaaaatg

SEQ ID NO: 697451 - DNA, 15 bp, Homo sapiens
aaactcccaaaatgt

SEQ ID NO: 697452 - DNA, 15 bp, Homo sapiens
aactcccaaaatgtt

SEQ ID NO: 697453 - DNA, 15 bp, Homo sapiens
actcccaaaatgtta

SEQ ID NO: 697454 - DNA, 15 bp, Homo sapiens
ctcccaaaatgttat

SEQ ID NO: 697455 - DNA, 15 bp, Homo sapiens
tcccaaaatgttatc

SEQ ID NO: 697456 - DNA, 15 bp, Homo sapiens
cccaaaatgttatca

SEQ ID NO: 697457 - DNA, 15 bp, Homo sapiens
ccaaaatgttatcaa

SEQ ID NO: 697458 - DNA, 15 bp, Homo sapiens
caaaatgttatcaat

SEQ ID NO: 697459 - DNA, 15 bp, Homo sapiens
aaaatgttatcaatg

SEQ ID NO: 697460 - DNA, 15 bp, Homo sapiens
aaatgttatcaatgt

SEQ ID NO: 697461 - DNA, 15 bp, Homo sapiens
aatgttatcaatgtg

SEQ ID NO: 697462 - DNA, 15 bp, Homo sapiens
atgttatcaatgtgt

SEQ ID NO: 697463 - DNA, 15 bp, Homo sapiens
tgttatcaatgtgtt

SEQ ID NO: 697464 - DNA, 15 bp, Homo sapiens
gttatcaatgtgtta

SEQ ID NO: 697465 - DNA, 15 bp, Homo sapiens
ttatcaatgtgttac

SEQ ID NO: 697466 - DNA, 15 bp, Homo sapiens
tatcaatgtgttact

SEQ ID NO: 697467 - DNA, 15 bp, Homo sapiens
atcaatgtgttactg

SEQ ID NO: 697468 - DNA, 15 bp, Homo sapiens
tcaatgtgttactgc

SEQ ID NO: 697469 - DNA, 15 bp, Homo sapiens
caatgtgttactgct

SEQ ID NO: 697470 - DNA, 15 bp, Homo sapiens
aatgtgttactgctc

SEQ ID NO: 697471 - DNA, 15 bp, Homo sapiens
atgtgttactgctca

SEQ ID NO: 697472 - DNA, 15 bp, Homo sapiens
tgtgttactgctcaa

SEQ ID NO: 697473 - DNA, 15 bp, Homo sapiens
gtgttactgctcaag

SEQ ID NO: 697474 - DNA, 15 bp, Homo sapiens
tgttactgctcaaga

SEQ ID NO: 697475 - DNA, 15 bp, Homo sapiens
gttactgctcaagat

SEQ ID NO: 697476 - DNA, 15 bp, Homo sapiens
ttactgctcaagatc

SEQ ID NO: 697477 - DNA, 15 bp, Homo sapiens
tactgctcaagatct

SEQ ID NO: 697478 - DNA, 15 bp, Homo sapiens
actgctcaagatctt

SEQ ID NO: 697479 - DNA, 15 bp, Homo sapiens
ctgctcaagatcttc

SEQ ID NO: 697480 - DNA, 15 bp, Homo sapiens
tgctcaagatcttcc

SEQ ID NO: 697481 - DNA, 15 bp, Homo sapiens
gctcaagatcttcca

SEQ ID NO: 697482 - DNA, 15 bp, Homo sapiens
ctcaagatcttccaa

SEQ ID NO: 697483 - DNA, 15 bp, Homo sapiens
tcaagatcttccaac

SEQ ID NO: 697484 - DNA, 15 bp, Homo sapiens
caagatcttccaaca

SEQ ID NO: 697485 - DNA, 15 bp, Homo sapiens
aagatcttccaacaa

SEQ ID NO: 697486 - DNA, 15 bp, Homo sapiens
agatcttccaacaat

SEQ ID NO: 697487 - DNA, 15 bp, Homo sapiens
gatcttccaacaatg

SEQ ID NO: 697488 - DNA, 15 bp, Homo sapiens
atcttccaacaatgt

SEQ ID NO: 697489 - DNA, 15 bp, Homo sapiens
tcttccaacaatgtt

SEQ ID NO: 697490 - DNA, 15 bp, Homo sapiens
cttccaacaatgtta

SEQ ID NO: 697491 - DNA, 15 bp, Homo sapiens
ttccaacaatgttaa

SEQ ID NO: 697492 - DNA, 15 bp, Homo sapiens
tccaacaatgttaat

SEQ ID NO: 697493 - DNA, 15 bp, Homo sapiens
ccaacaatgttaata

SEQ ID NO: 697494 - DNA, 15 bp, Homo sapiens
caacaatgttaatat

SEQ ID NO: 697495 - DNA, 15 bp, Homo sapiens
aacaatgttaatatg

SEQ ID NO: 697496 - DNA, 15 bp, Homo sapiens
acaatgttaatatgt

SEQ ID NO: 697497 - DNA, 15 bp, Homo sapiens
caatgttaatatgtc

SEQ ID NO: 697498 - DNA, 15 bp, Homo sapiens
aatgttaatatgtca

SEQ ID NO: 697499 - DNA, 15 bp, Homo sapiens
atgttaatatgtcat

SEQ ID NO: 697500 - DNA, 15 bp, Homo sapiens
tgttaatatgtcatc

SEQ ID NO: 697501 - DNA, 15 bp, Homo sapiens
gttaatatgtcatca

SEQ ID NO: 697502 - DNA, 15 bp, Homo sapiens
ttaatatgtcatcat

SEQ ID NO: 697503 - DNA, 15 bp, Homo sapiens
taatatgtcatcatt

SEQ ID NO: 697504 - DNA, 15 bp, Homo sapiens
aatatgtcatcattt

SEQ ID NO: 697505 - DNA, 15 bp, Homo sapiens
atatgtcatcatttc

SEQ ID NO: 697506 - DNA, 15 bp, Homo sapiens
tatgtcatcatttct

SEQ ID NO: 697507 - DNA, 15 bp, Homo sapiens
atgtcatcatttcta

SEQ ID NO: 697508 - DNA, 15 bp, Homo sapiens
tgtcatcatttctac

SEQ ID NO: 697509 - DNA, 15 bp, Homo sapiens
gtcatcatttctaca

SEQ ID NO: 697510 - DNA, 15 bp, Homo sapiens
tcatcatttctacag

SEQ ID NO: 697511 - DNA, 15 bp, Homo sapiens
catcatttctacaga

SEQ ID NO: 697512 - DNA, 15 bp, Homo sapiens
atcatttctacagaa

SEQ ID NO: 697513 - DNA, 15 bp, Homo sapiens
tcatttctacagaag

SEQ ID NO: 697514 - DNA, 15 bp, Homo sapiens
catttctacagaaga

SEQ ID NO: 697515 - DNA, 15 bp, Homo sapiens
atttctacagaagac

SEQ ID NO: 697516 - DNA, 15 bp, Homo sapiens
tttctacagaagact

SEQ ID NO: 697517 - DNA, 15 bp, Homo sapiens
ttctacagaagacta

SEQ ID NO: 697518 - DNA, 15 bp, Homo sapiens
tctacagaagactac

SEQ ID NO: 697519 - DNA, 15 bp, Homo sapiens
ctacagaagactacg

SEQ ID NO: 697520 - DNA, 15 bp, Homo sapiens
tacagaagactacgt

SEQ ID NO: 697521 - DNA, 15 bp, Homo sapiens
acagaagactacgtt

SEQ ID NO: 697522 - DNA, 15 bp, Homo sapiens
cagaagactacgttt

SEQ ID NO: 697523 - DNA, 15 bp, Homo sapiens
agaagactacgtttt

SEQ ID NO: 697524 - DNA, 15 bp, Homo sapiens
gaagactacgttttt

SEQ ID NO: 697525 - DNA, 15 bp, Homo sapiens
aagactacgttttta

SEQ ID NO: 697526 - DNA, 15 bp, Homo sapiens
agactacgtttttag

SEQ ID NO: 697527 - DNA, 15 bp, Homo sapiens
gactacgtttttagt

SEQ ID NO: 697528 - DNA, 15 bp, Homo sapiens
actacgtttttagtt

SEQ ID NO: 697529 - DNA, 15 bp, Homo sapiens
ctacgtttttagtta

SEQ ID NO: 697530 - DNA, 15 bp, Homo sapiens
tacgtttttagttat

SEQ ID NO: 697531 - DNA, 15 bp, Homo sapiens
acgtttttagttata

SEQ ID NO: 697532 - DNA, 15 bp, Homo sapiens
cgtttttagttatac

SEQ ID NO: 697533 - DNA, 15 bp, Homo sapiens
gtttttagttataca

SEQ ID NO: 697534 - DNA, 15 bp, Homo sapiens
tttttagttatacat

SEQ ID NO: 697535 - DNA, 15 bp, Homo sapiens
ttttagttatacata

SEQ ID NO: 697536 - DNA, 15 bp, Homo sapiens
tttagttatacatat

SEQ ID NO: 697537 - DNA, 15 bp, Homo sapiens
ttagttatacatata

SEQ ID NO: 697538 - DNA, 15 bp, Homo sapiens
tagttatacatatat

SEQ ID NO: 697539 - DNA, 15 bp, Homo sapiens
agttatacatatatt

SEQ ID NO: 697540 - DNA, 15 bp, Homo sapiens
gttatacatatattt

SEQ ID NO: 697541 - DNA, 15 bp, Homo sapiens
ttatacatatatttt

SEQ ID NO: 697542 - DNA, 15 bp, Homo sapiens
tatacatatatttta

SEQ ID NO: 697543 - DNA, 15 bp, Homo sapiens
atacatatattttaa

SEQ ID NO: 697544 - DNA, 15 bp, Homo sapiens
tacatatattttaaa

SEQ ID NO: 697545 - DNA, 15 bp, Homo sapiens
acatatattttaaaa

SEQ ID NO: 697546 - DNA, 15 bp, Homo sapiens
catatattttaaaat

SEQ ID NO: 697547 - DNA, 15 bp, Homo sapiens
atatattttaaaata

SEQ ID NO: 697548 - DNA, 15 bp, Homo sapiens
tatattttaaaatac

SEQ ID NO: 697549 - DNA, 15 bp, Homo sapiens
atattttaaaatact

SEQ ID NO: 697550 - DNA, 15 bp, Homo sapiens
tattttaaaatactc

SEQ ID NO: 697551 - DNA, 15 bp, Homo sapiens
attttaaaatactcc

SEQ ID NO: 697552 - DNA, 15 bp, Homo sapiens
ttttaaaatactccc

SEQ ID NO: 697553 - DNA, 15 bp, Homo sapiens
tttaaaatactccca

SEQ ID NO: 697554 - DNA, 15 bp, Homo sapiens
ttaaaatactcccaa

SEQ ID NO: 697555 - DNA, 15 bp, Homo sapiens
taaaatactcccaaa

SEQ ID NO: 697556 - DNA, 15 bp, Homo sapiens
aaaatactcccaaaa

SEQ ID NO: 697557 - DNA, 15 bp, Homo sapiens
aaatactcccaaaac

SEQ ID NO: 697558 - DNA, 15 bp, Homo sapiens
aatactcccaaaaca

SEQ ID NO: 697559 - DNA, 15 bp, Homo sapiens
atactcccaaaacat

SEQ ID NO: 697560 - DNA, 15 bp, Homo sapiens
tactcccaaaacatt

SEQ ID NO: 697561 - DNA, 15 bp, Homo sapiens
actcccaaaacattt

SEQ ID NO: 697562 - DNA, 15 bp, Homo sapiens
ctcccaaaacattta

SEQ ID NO: 697563 - DNA, 15 bp, Homo sapiens
tcccaaaacatttat

SEQ ID NO: 697564 - DNA, 15 bp, Homo sapiens
cccaaaacatttatt

SEQ ID NO: 697565 - DNA, 15 bp, Homo sapiens
ccaaaacatttattt

SEQ ID NO: 697566 - DNA, 15 bp, Homo sapiens
caaaacatttatttc

SEQ ID NO: 697567 - DNA, 15 bp, Homo sapiens
aaaacatttatttca

SEQ ID NO: 697568 - DNA, 15 bp, Homo sapiens
aaacatttatttcaa

SEQ ID NO: 697569 - DNA, 15 bp, Homo sapiens
aacatttatttcaaa

SEQ ID NO: 697570 - DNA, 15 bp, Homo sapiens
acatttatttcaaat

SEQ ID NO: 697571 - DNA, 15 bp, Homo sapiens
catttatttcaaatt

SEQ ID NO: 697572 - DNA, 15 bp, Homo sapiens
atttatttcaaatta

SEQ ID NO: 697573 - DNA, 15 bp, Homo sapiens
tttatttcaaattac

SEQ ID NO: 697574 - DNA, 15 bp, Homo sapiens
ttatttcaaattact

SEQ ID NO: 697575 - DNA, 15 bp, Homo sapiens
tatttcaaattactc

SEQ ID NO: 697576 - DNA, 15 bp, Homo sapiens
atttcaaattactct

SEQ ID NO: 697577 - DNA, 15 bp, Homo sapiens
tttcaaattactctt

SEQ ID NO: 697578 - DNA, 15 bp, Homo sapiens
ttcaaattactcttc

SEQ ID NO: 697579 - DNA, 15 bp, Homo sapiens
tcaaattactcttct

SEQ ID NO: 697580 - DNA, 15 bp, Homo sapiens
caaattactcttctt

SEQ ID NO: 697581 - DNA, 15 bp, Homo sapiens
aaattactcttcttt

SEQ ID NO: 697582 - DNA, 15 bp, Homo sapiens
aattactcttctttc

SEQ ID NO: 697583 - DNA, 15 bp, Homo sapiens
attactcttctttct

SEQ ID NO: 697584 - DNA, 15 bp, Homo sapiens
ttactcttctttctc

SEQ ID NO: 697585 - DNA, 15 bp, Homo sapiens
tactcttctttctca

SEQ ID NO: 697586 - DNA, 15 bp, Homo sapiens
actcttctttctcat

SEQ ID NO: 697587 - DNA, 15 bp, Homo sapiens
ctcttctttctcatt

SEQ ID NO: 697588 - DNA, 15 bp, Homo sapiens
tcttctttctcattt

SEQ ID NO: 697589 - DNA, 15 bp, Homo sapiens
cttctttctcatttg

SEQ ID NO: 697590 - DNA, 15 bp, Homo sapiens
ttctttctcatttgt

SEQ ID NO: 697591 - DNA, 15 bp, Homo sapiens
tctttctcatttgtt

SEQ ID NO: 697592 - DNA, 15 bp, Homo sapiens
ctttctcatttgtta

SEQ ID NO: 697593 - DNA, 15 bp, Homo sapiens
tttctcatttgttaa

SEQ ID NO: 697594 - DNA, 15 bp, Homo sapiens
ttctcatttgttaat

SEQ ID NO: 697595 - DNA, 15 bp, Homo sapiens
tctcatttgttaatc

SEQ ID NO: 697596 - DNA, 15 bp, Homo sapiens
ctcatttgttaatca

SEQ ID NO: 697597 - DNA, 15 bp, Homo sapiens
tcatttgttaatcat

SEQ ID NO: 697598 - DNA, 15 bp, Homo sapiens
catttgttaatcata

SEQ ID NO: 697599 - DNA, 15 bp, Homo sapiens
atttgttaatcatag

SEQ ID NO: 697600 - DNA, 15 bp, Homo sapiens
tttgttaatcatagt

SEQ ID NO: 697601 - DNA, 15 bp, Homo sapiens
ttgttaatcatagtt

SEQ ID NO: 697602 - DNA, 15 bp, Homo sapiens
tgttaatcatagttt

SEQ ID NO: 697603 - DNA, 15 bp, Homo sapiens
gttaatcatagttta

SEQ ID NO: 697604 - DNA, 15 bp, Homo sapiens
ttaatcatagtttaa

SEQ ID NO: 697605 - DNA, 15 bp, Homo sapiens
taatcatagtttaag

SEQ ID NO: 697606 - DNA, 15 bp, Homo sapiens
aatcatagtttaaga

SEQ ID NO: 697607 - DNA, 15 bp, Homo sapiens
atcatagtttaagaa

SEQ ID NO: 697608 - DNA, 15 bp, Homo sapiens
tcatagtttaagaaa

SEQ ID NO: 697609 - DNA, 15 bp, Homo sapiens
catagtttaagaaat

SEQ ID NO: 697610 - DNA, 15 bp, Homo sapiens
atagtttaagaaata

SEQ ID NO: 697611 - DNA, 15 bp, Homo sapiens
tagtttaagaaatat

SEQ ID NO: 697612 - DNA, 15 bp, Homo sapiens
agtttaagaaatatg

SEQ ID NO: 697613 - DNA, 15 bp, Homo sapiens
gtttaagaaatatga

SEQ ID NO: 697614 - DNA, 15 bp, Homo sapiens
tttaagaaatatgat

SEQ ID NO: 697615 - DNA, 15 bp, Homo sapiens
ttaagaaatatgatt

SEQ ID NO: 697616 - DNA, 15 bp, Homo sapiens
taagaaatatgatta

SEQ ID NO: 697617 - DNA, 15 bp, Homo sapiens
aagaaatatgattag

SEQ ID NO: 697618 - DNA, 15 bp, Homo sapiens
agaaatatgattagt

SEQ ID NO: 697619 - DNA, 15 bp, Homo sapiens
gaaatatgattagta

SEQ ID NO: 697620 - DNA, 15 bp, Homo sapiens
aaatatgattagtag

SEQ ID NO: 697621 - DNA, 15 bp, Homo sapiens
aatatgattagtagt

SEQ ID NO: 697622 - DNA, 15 bp, Homo sapiens
atatgattagtagtt

SEQ ID NO: 697623 - DNA, 15 bp, Homo sapiens
tatgattagtagttt

SEQ ID NO: 697624 - DNA, 15 bp, Homo sapiens
atgattagtagtttt

SEQ ID NO: 697625 - DNA, 15 bp, Homo sapiens
tgattagtagtttta

SEQ ID NO: 697626 - DNA, 15 bp, Homo sapiens
gattagtagttttaa

SEQ ID NO: 697627 - DNA, 15 bp, Homo sapiens
attagtagttttaat

SEQ ID NO: 697628 - DNA, 15 bp, Homo sapiens
ttagtagttttaatt

SEQ ID NO: 697629 - DNA, 15 bp, Homo sapiens
tagtagttttaattc

SEQ ID NO: 697630 - DNA, 15 bp, Homo sapiens
agtagttttaattca

SEQ ID NO: 697631 - DNA, 15 bp, Homo sapiens
gtagttttaattcaa

SEQ ID NO: 697632 - DNA, 15 bp, Homo sapiens
tagttttaattcaaa

SEQ ID NO: 697633 - DNA, 15 bp, Homo sapiens
agttttaattcaaaa

SEQ ID NO: 697634 - DNA, 15 bp, Homo sapiens
gttttaattcaaaat

SEQ ID NO: 697635 - DNA, 15 bp, Homo sapiens
ttttaattcaaaata

SEQ ID NO: 697636 - DNA, 15 bp, Homo sapiens
tttaattcaaaataa

SEQ ID NO: 697637 - DNA, 15 bp, Homo sapiens
ttaattcaaaataaa

SEQ ID NO: 697638 - DNA, 15 bp, Homo sapiens
taattcaaaataaaa

SEQ ID NO: 697639 - DNA, 15 bp, Homo sapiens
aattcaaaataaaaa

SEQ ID NO: 697640 - DNA, 15 bp, Homo sapiens
attcaaaataaaaat

SEQ ID NO: 697641 - DNA, 15 bp, Homo sapiens
ttcaaaataaaaatg

SEQ ID NO: 697642 - DNA, 15 bp, Homo sapiens
tcaaaataaaaatgg

SEQ ID NO: 697643 - DNA, 15 bp, Homo sapiens
caaaataaaaatggt

SEQ ID NO: 697644 - DNA, 15 bp, Homo sapiens
aaaataaaaatggta

SEQ ID NO: 697645 - DNA, 15 bp, Homo sapiens
aaataaaaatggtat

SEQ ID NO: 697646 - DNA, 15 bp, Homo sapiens
aataaaaatggtatg

SEQ ID NO: 697647 - DNA, 15 bp, Homo sapiens
ataaaaatggtatgt

SEQ ID NO: 697648 - DNA, 15 bp, Homo sapiens
taaaaatggtatgtt

SEQ ID NO: 697649 - DNA, 15 bp, Homo sapiens
aaaaatggtatgttg

SEQ ID NO: 697650 - DNA, 15 bp, Homo sapiens
aaaatggtatgttga

SEQ ID NO: 697651 - DNA, 15 bp, Homo sapiens
aaatggtatgttgaa

SEQ ID NO: 697652 - DNA, 15 bp, Homo sapiens
aatggtatgttgaat

SEQ ID NO: 697653 - DNA, 15 bp, Homo sapiens
atggtatgttgaata

SEQ ID NO: 697654 - DNA, 15 bp, Homo sapiens
tggtatgttgaataa

SEQ ID NO: 697655 - DNA, 15 bp, Homo sapiens
ggtatgttgaataaa

SEQ ID NO: 697656 - DNA, 15 bp, Homo sapiens
gtatgttgaataaaa

SEQ ID NO: 697657 - DNA, 15 bp, Homo sapiens
tatgttgaataaaat

SEQ ID NO: 697658 - DNA, 15 bp, Homo sapiens
atgttgaataaaata

SEQ ID NO: 697659 - DNA, 15 bp, Homo sapiens
tgttgaataaaatat

SEQ ID NO: 697660 - DNA, 15 bp, Homo sapiens
gttgaataaaatatt

SEQ ID NO: 697661 - DNA, 15 bp, Homo sapiens
ttgaataaaatatta

SEQ ID NO: 697662 - DNA, 15 bp, Homo sapiens
tgaataaaatattac

SEQ ID NO: 697663 - DNA, 15 bp, Homo sapiens
gaataaaatattaca

SEQ ID NO: 697664 - DNA, 15 bp, Homo sapiens
aataaaatattacat

SEQ ID NO: 697665 - DNA, 15 bp, Homo sapiens
ataaaatattacata

SEQ ID NO: 697666 - DNA, 15 bp, Homo sapiens
taaaatattacataa

SEQ ID NO: 697667 - DNA, 15 bp, Homo sapiens
aaaatattacataaa

SEQ ID NO: 697668 - DNA, 15 bp, Homo sapiens
aaatattacataaac

SEQ ID NO: 697669 - DNA, 15 bp, Homo sapiens
aatattacataaaca

SEQ ID NO: 697670 - DNA, 15 bp, Homo sapiens
atattacataaacat

SEQ ID NO: 697671 - DNA, 15 bp, Homo sapiens
tattacataaacata

SEQ ID NO: 697672 - DNA, 15 bp, Homo sapiens
attacataaacataa

SEQ ID NO: 697673 - DNA, 15 bp, Homo sapiens
ttacataaacataaa

SEQ ID NO: 697674 - DNA, 15 bp, Homo sapiens
tacataaacataaat

SEQ ID NO: 697675 - DNA, 15 bp, Homo sapiens
acataaacataaatt

SEQ ID NO: 697676 - DNA, 15 bp, Homo sapiens
cataaacataaatta

SEQ ID NO: 697677 - DNA, 15 bp, Homo sapiens
ataaacataaattag

SEQ ID NO: 697678 - DNA, 15 bp, Homo sapiens
taaacataaattagt

SEQ ID NO: 697679 - DNA, 15 bp, Homo sapiens
aaacataaattagta

SEQ ID NO: 697680 - DNA, 15 bp, Homo sapiens
aacataaattagtat

SEQ ID NO: 697681 - DNA, 15 bp, Homo sapiens
acataaattagtata

SEQ ID NO: 697682 - DNA, 15 bp, Homo sapiens
cataaattagtataa

SEQ ID NO: 697683 - DNA, 15 bp, Homo sapiens
ataaattagtataaa

SEQ ID NO: 697684 - DNA, 15 bp, Homo sapiens
taaattagtataaaa

SEQ ID NO: 697685 - DNA, 15 bp, Homo sapiens
aaattagtataaaat

SEQ ID NO: 697686 - DNA, 15 bp, Homo sapiens
aattagtataaaata

SEQ ID NO: 697687 - DNA, 15 bp, Homo sapiens
attagtataaaataa

SEQ ID NO: 697688 - DNA, 15 bp, Homo sapiens
ttagtataaaataat

SEQ ID NO: 697689 - DNA, 15 bp, Homo sapiens
tagtataaaataatt

SEQ ID NO: 697690 - DNA, 15 bp, Homo sapiens
agtataaaataattt

SEQ ID NO: 697691 - DNA, 15 bp, Homo sapiens
gtataaaataattta

SEQ ID NO: 697692 - DNA, 15 bp, Homo sapiens
tataaaataatttag

SEQ ID NO: 697693 - DNA, 15 bp, Homo sapiens
ataaaataatttagt

SEQ ID NO: 697694 - DNA, 15 bp, Homo sapiens
taaaataatttagta

SEQ ID NO: 697695 - DNA, 15 bp, Homo sapiens
aaaataatttagtaa

SEQ ID NO: 697696 - DNA, 15 bp, Homo sapiens
aaataatttagtaaa

SEQ ID NO: 697697 - DNA, 15 bp, Homo sapiens
aataatttagtaaat

SEQ ID NO: 697698 - DNA, 15 bp, Homo sapiens
ataatttagtaaatt

SEQ ID NO: 697699 - DNA, 15 bp, Homo sapiens
taatttagtaaatta

SEQ ID NO: 697700 - DNA, 15 bp, Homo sapiens
aatttagtaaattaa

SEQ ID NO: 697701 - DNA, 15 bp, Homo sapiens
atttagtaaattaaa

SEQ ID NO: 697702 - DNA, 15 bp, Homo sapiens
tttagtaaattaaat

SEQ ID NO: 697703 - DNA, 15 bp, Homo sapiens
ttagtaaattaaatc

SEQ ID NO: 697704 - DNA, 15 bp, Homo sapiens
tagtaaattaaatca

SEQ ID NO: 697705 - DNA, 15 bp, Homo sapiens
agtaaattaaatcat

SEQ ID NO: 697706 - DNA, 15 bp, Homo sapiens
gtaaattaaatcatt

SEQ ID NO: 697707 - DNA, 15 bp, Homo sapiens
taaattaaatcattt

SEQ ID NO: 697708 - DNA, 15 bp, Homo sapiens
aaattaaatcattta

SEQ ID NO: 697709 - DNA, 15 bp, Homo sapiens
aattaaatcatttaa

SEQ ID NO: 697710 - DNA, 15 bp, Homo sapiens
attaaatcatttaat

SEQ ID NO: 697711 - DNA, 15 bp, Homo sapiens
ttaaatcatttaata

SEQ ID NO: 697712 - DNA, 15 bp, Homo sapiens
taaatcatttaatat

SEQ ID NO: 697713 - DNA, 15 bp, Homo sapiens
aaatcatttaatata

SEQ ID NO: 697714 - DNA, 15 bp, Homo sapiens
aatcatttaatataa

SEQ ID NO: 697715 - DNA, 15 bp, Homo sapiens
atcatttaatataaa

SEQ ID NO: 697716 - DNA, 15 bp, Homo sapiens
tcatttaatataaaa

SEQ ID NO: 697717 - DNA, 15 bp, Homo sapiens
catttaatataaaaa

SEQ ID NO: 697718 - DNA, 15 bp, Homo sapiens
atttaatataaaaag

SEQ ID NO: 697719 - DNA, 15 bp, Homo sapiens
tttaatataaaaagg

SEQ ID NO: 697720 - DNA, 15 bp, Homo sapiens
ttaatataaaaagga

SEQ ID NO: 697721 - DNA, 15 bp, Homo sapiens
taatataaaaaggaa

SEQ ID NO: 697722 - DNA, 15 bp, Homo sapiens
aatataaaaaggaat

SEQ ID NO: 697723 - DNA, 15 bp, Homo sapiens
atataaaaaggaatt

SEQ ID NO: 697724 - DNA, 15 bp, Homo sapiens
tataaaaaggaattc

SEQ ID NO: 697725 - DNA, 15 bp, Homo sapiens
ataaaaaggaattca

SEQ ID NO: 697726 - DNA, 15 bp, Homo sapiens
taaaaaggaattcaa

SEQ ID NO: 697727 - DNA, 15 bp, Homo sapiens
aaaaaggaattcaaa

SEQ ID NO: 697728 - DNA, 15 bp, Homo sapiens
aaaaggaattcaaag

SEQ ID NO: 697729 - DNA, 15 bp, Homo sapiens
aaaggaattcaaaga

SEQ ID NO: 697730 - DNA, 15 bp, Homo sapiens
aaggaattcaaagac

SEQ ID NO: 697731 - DNA, 15 bp, Homo sapiens
aggaattcaaagaca

SEQ ID NO: 697732 - DNA, 15 bp, Homo sapiens
ggaattcaaagacat

SEQ ID NO: 697733 - DNA, 15 bp, Homo sapiens
gaattcaaagacatt

SEQ ID NO: 697734 - DNA, 15 bp, Homo sapiens
aattcaaagacatta

SEQ ID NO: 697735 - DNA, 15 bp, Homo sapiens
attcaaagacattac

SEQ ID NO: 697736 - DNA, 15 bp, Homo sapiens
ttcaaagacattaca

SEQ ID NO: 697737 - DNA, 15 bp, Homo sapiens
tcaaagacattacag

SEQ ID NO: 697738 - DNA, 15 bp, Homo sapiens
caaagacattacaga

SEQ ID NO: 697739 - DNA, 15 bp, Homo sapiens
aaagacattacagat

SEQ ID NO: 697740 - DNA, 15 bp, Homo sapiens
aagacattacagatt

SEQ ID NO: 697741 - DNA, 15 bp, Homo sapiens
agacattacagattg

SEQ ID NO: 697742 - DNA, 15 bp, Homo sapiens
gacattacagattgg

SEQ ID NO: 697743 - DNA, 15 bp, Homo sapiens
acattacagattggc

SEQ ID NO: 697744 - DNA, 15 bp, Homo sapiens
cattacagattggca

SEQ ID NO: 697745 - DNA, 15 bp, Homo sapiens
attacagattggcac

SEQ ID NO: 697746 - DNA, 15 bp, Homo sapiens
ttacagattggcacc

SEQ ID NO: 697747 - DNA, 15 bp, Homo sapiens
tacagattggcacca

SEQ ID NO: 697748 - DNA, 15 bp, Homo sapiens
acagattggcaccac

SEQ ID NO: 697749 - DNA, 15 bp, Homo sapiens
cagattggcaccaca

SEQ ID NO: 697750 - DNA, 15 bp, Homo sapiens
agattggcaccacat

SEQ ID NO: 697751 - DNA, 15 bp, Homo sapiens
gattggcaccacata

SEQ ID NO: 697752 - DNA, 15 bp, Homo sapiens
attggcaccacataa

SEQ ID NO: 697753 - DNA, 15 bp, Homo sapiens
ttggcaccacataat

SEQ ID NO: 697754 - DNA, 15 bp, Homo sapiens
tggcaccacataatt

SEQ ID NO: 697755 - DNA, 15 bp, Homo sapiens
ggcaccacataattt

SEQ ID NO: 697756 - DNA, 15 bp, Homo sapiens
gcaccacataattta

SEQ ID NO: 697757 - DNA, 15 bp, Homo sapiens
caccacataatttaa

SEQ ID NO: 697758 - DNA, 15 bp, Homo sapiens
accacataatttaag

SEQ ID NO: 697759 - DNA, 15 bp, Homo sapiens
ccacataatttaagt

SEQ ID NO: 697760 - DNA, 15 bp, Homo sapiens
cacataatttaagtc

SEQ ID NO: 697761 - DNA, 15 bp, Homo sapiens
acataatttaagtca

SEQ ID NO: 697762 - DNA, 15 bp, Homo sapiens
cataatttaagtcag

SEQ ID NO: 697763 - DNA, 15 bp, Homo sapiens
ataatttaagtcagt

SEQ ID NO: 697764 - DNA, 15 bp, Homo sapiens
taatttaagtcagtc

SEQ ID NO: 697765 - DNA, 15 bp, Homo sapiens
aatttaagtcagtca

SEQ ID NO: 697766 - DNA, 15 bp, Homo sapiens
atttaagtcagtcac

SEQ ID NO: 697767 - DNA, 15 bp, Homo sapiens
tttaagtcagtcact

SEQ ID NO: 697768 - DNA, 15 bp, Homo sapiens
ttaagtcagtcactt

SEQ ID NO: 697769 - DNA, 15 bp, Homo sapiens
taagtcagtcacttt

SEQ ID NO: 697770 - DNA, 15 bp, Homo sapiens
aagtcagtcactttt

SEQ ID NO: 697771 - DNA, 15 bp, Homo sapiens
agtcagtcactttta

SEQ ID NO: 697772 - DNA, 15 bp, Homo sapiens
gtcagtcacttttag

SEQ ID NO: 697773 - DNA, 15 bp, Homo sapiens
tcagtcacttttaga

SEQ ID NO: 697774 - DNA, 15 bp, Homo sapiens
cagtcacttttagac

SEQ ID NO: 697775 - DNA, 15 bp, Homo sapiens
agtcacttttagaca

SEQ ID NO: 697776 - DNA, 15 bp, Homo sapiens
gtcacttttagacac

SEQ ID NO: 697777 - DNA, 15 bp, Homo sapiens
tcacttttagacact

SEQ ID NO: 697778 - DNA, 15 bp, Homo sapiens
cacttttagacacta

SEQ ID NO: 697779 - DNA, 15 bp, Homo sapiens
acttttagacactaa

SEQ ID NO: 697780 - DNA, 15 bp, Homo sapiens
cttttagacactaaa

SEQ ID NO: 697781 - DNA, 15 bp, Homo sapiens
ttttagacactaaat

SEQ ID NO: 697782 - DNA, 15 bp, Homo sapiens
tttagacactaaata

SEQ ID NO: 697783 - DNA, 15 bp, Homo sapiens
ttagacactaaataa

SEQ ID NO: 697784 - DNA, 15 bp, Homo sapiens
tagacactaaataac

SEQ ID NO: 697785 - DNA, 15 bp, Homo sapiens
agacactaaataact

SEQ ID NO: 697786 - DNA, 15 bp, Homo sapiens
gacactaaataactt

SEQ ID NO: 697787 - DNA, 15 bp, Homo sapiens
acactaaataacttt

SEQ ID NO: 697788 - DNA, 15 bp, Homo sapiens
cactaaataacttta

SEQ ID NO: 697789 - DNA, 15 bp, Homo sapiens
actaaataactttaa

SEQ ID NO: 697790 - DNA, 15 bp, Homo sapiens
ctaaataactttaag

SEQ ID NO: 697791 - DNA, 15 bp, Homo sapiens
taaataactttaaga

SEQ ID NO: 697792 - DNA, 15 bp, Homo sapiens
aaataactttaagag

SEQ ID NO: 697793 - DNA, 15 bp, Homo sapiens
aataactttaagaga

SEQ ID NO: 697794 - DNA, 15 bp, Homo sapiens
ataactttaagagat

SEQ ID NO: 697795 - DNA, 15 bp, Homo sapiens
taactttaagagatt

SEQ ID NO: 697796 - DNA, 15 bp, Homo sapiens
aactttaagagattt

SEQ ID NO: 697797 - DNA, 15 bp, Homo sapiens
actttaagagatttt

SEQ ID NO: 697798 - DNA, 15 bp, Homo sapiens
ctttaagagattttt

SEQ ID NO: 697799 - DNA, 15 bp, Homo sapiens
tttaagagatttttt

SEQ ID NO: 697800 - DNA, 15 bp, Homo sapiens
ttaagagattttttt

SEQ ID NO: 697801 - DNA, 15 bp, Homo sapiens
taagagatttttttt

SEQ ID NO: 697802 - DNA, 15 bp, Homo sapiens
aagagatttttttta

SEQ ID NO: 697803 - DNA, 15 bp, Homo sapiens
agagattttttttaa

SEQ ID NO: 697804 - DNA, 15 bp, Homo sapiens
gagattttttttaat

SEQ ID NO: 697805 - DNA, 15 bp, Homo sapiens
agattttttttaatg

SEQ ID NO: 697806 - DNA, 15 bp, Homo sapiens
gattttttttaatga

SEQ ID NO: 697807 - DNA, 15 bp, Homo sapiens
attttttttaatgaa

SEQ ID NO: 697808 - DNA, 15 bp, Homo sapiens
ttttttttaatgaag

SEQ ID NO: 697809 - DNA, 15 bp, Homo sapiens
tttttttaatgaagg

SEQ ID NO: 697810 - DNA, 15 bp, Homo sapiens
ttttttaatgaagga

SEQ ID NO: 697811 - DNA, 15 bp, Homo sapiens
tttttaatgaaggaa

SEQ ID NO: 697812 - DNA, 15 bp, Homo sapiens
ttttaatgaaggaac

SEQ ID NO: 697813 - DNA, 15 bp, Homo sapiens
tttaatgaaggaaca

SEQ ID NO: 697814 - DNA, 15 bp, Homo sapiens
ttaatgaaggaacaa

SEQ ID NO: 697815 - DNA, 15 bp, Homo sapiens
taatgaaggaacaaa

SEQ ID NO: 697816 - DNA, 15 bp, Homo sapiens
aatgaaggaacaaat

SEQ ID NO: 697817 - DNA, 15 bp, Homo sapiens
atgaaggaacaaatc

SEQ ID NO: 697818 - DNA, 15 bp, Homo sapiens
tgaaggaacaaatca

SEQ ID NO: 697819 - DNA, 15 bp, Homo sapiens
gaaggaacaaatcaa

SEQ ID NO: 697820 - DNA, 15 bp, Homo sapiens
aaggaacaaatcaaa

SEQ ID NO: 697821 - DNA, 15 bp, Homo sapiens
aggaacaaatcaaaa

SEQ ID NO: 697822 - DNA, 15 bp, Homo sapiens
ggaacaaatcaaaat

SEQ ID NO: 697823 - DNA, 15 bp, Homo sapiens
gaacaaatcaaaatg

SEQ ID NO: 697824 - DNA, 15 bp, Homo sapiens
aacaaatcaaaatgg

SEQ ID NO: 697825 - DNA, 15 bp, Homo sapiens
acaaatcaaaatggc

SEQ ID NO: 697826 - DNA, 15 bp, Homo sapiens
caaatcaaaatggct

SEQ ID NO: 697827 - DNA, 15 bp, Homo sapiens
aaatcaaaatggctc

SEQ ID NO: 697828 - DNA, 15 bp, Homo sapiens
aatcaaaatggctca

SEQ ID NO: 697829 - DNA, 15 bp, Homo sapiens
atcaaaatggctcag

SEQ ID NO: 697830 - DNA, 15 bp, Homo sapiens
tcaaaatggctcaga

SEQ ID NO: 697831 - DNA, 15 bp, Homo sapiens
caaaatggctcagaa

SEQ ID NO: 697832 - DNA, 15 bp, Homo sapiens
aaaatggctcagaaa

SEQ ID NO: 697833 - DNA, 15 bp, Homo sapiens
aaatggctcagaaaa

SEQ ID NO: 697834 - DNA, 15 bp, Homo sapiens
aatggctcagaaaaa

SEQ ID NO: 697835 - DNA, 15 bp, Homo sapiens
atggctcagaaaaat

SEQ ID NO: 697836 - DNA, 15 bp, Homo sapiens
tggctcagaaaaatc

SEQ ID NO: 697837 - DNA, 15 bp, Homo sapiens
ggctcagaaaaatca

SEQ ID NO: 697838 - DNA, 15 bp, Homo sapiens
gctcagaaaaatcag

SEQ ID NO: 697839 - DNA, 15 bp, Homo sapiens
ctcagaaaaatcaga

SEQ ID NO: 697840 - DNA, 15 bp, Homo sapiens
tcagaaaaatcagat

SEQ ID NO: 697841 - DNA, 15 bp, Homo sapiens
cagaaaaatcagatg

SEQ ID NO: 697842 - DNA, 15 bp, Homo sapiens
agaaaaatcagatgg

SEQ ID NO: 697843 - DNA, 15 bp, Homo sapiens
gaaaaatcagatgga

SEQ ID NO: 697844 - DNA, 15 bp, Homo sapiens
aaaaatcagatggag

SEQ ID NO: 697845 - DNA, 15 bp, Homo sapiens
aaaatcagatggagt

SEQ ID NO: 697846 - DNA, 15 bp, Homo sapiens
aaatcagatggagtg

SEQ ID NO: 697847 - DNA, 15 bp, Homo sapiens
aatcagatggagtgg

SEQ ID NO: 697848 - DNA, 15 bp, Homo sapiens
atcagatggagtgga

SEQ ID NO: 697849 - DNA, 15 bp, Homo sapiens
tcagatggagtggat

SEQ ID NO: 697850 - DNA, 15 bp, Homo sapiens
cagatggagtggata

SEQ ID NO: 697851 - DNA, 15 bp, Homo sapiens
agatggagtggatac

SEQ ID NO: 697852 - DNA, 15 bp, Homo sapiens
gatggagtggataca

SEQ ID NO: 697853 - DNA, 15 bp, Homo sapiens
atggagtggatacac

SEQ ID NO: 697854 - DNA, 15 bp, Homo sapiens
tggagtggatacaca

SEQ ID NO: 697855 - DNA, 15 bp, Homo sapiens
ggagtggatacacaa

SEQ ID NO: 697856 - DNA, 15 bp, Homo sapiens
gagtggatacacaaa

SEQ ID NO: 697857 - DNA, 15 bp, Homo sapiens
agtggatacacaaat

SEQ ID NO: 697858 - DNA, 15 bp, Homo sapiens
gtggatacacaaata

SEQ ID NO: 697859 - DNA, 15 bp, Homo sapiens
tggatacacaaataa

SEQ ID NO: 697860 - DNA, 15 bp, Homo sapiens
ggatacacaaataaa

SEQ ID NO: 697861 - DNA, 15 bp, Homo sapiens
gatacacaaataaaa

SEQ ID NO: 697862 - DNA, 15 bp, Homo sapiens
atacacaaataaaat

SEQ ID NO: 697863 - DNA, 15 bp, Homo sapiens
tacacaaataaaata

SEQ ID NO: 697864 - DNA, 15 bp, Homo sapiens
acacaaataaaatac

SEQ ID NO: 697865 - DNA, 15 bp, Homo sapiens
cacaaataaaataca

SEQ ID NO: 697866 - DNA, 15 bp, Homo sapiens
acaaataaaatacat

SEQ ID NO: 697867 - DNA, 15 bp, Homo sapiens
caaataaaatacatg

SEQ ID NO: 697868 - DNA, 15 bp, Homo sapiens
aaataaaatacatgt

SEQ ID NO: 697869 - DNA, 15 bp, Homo sapiens
aataaaatacatgtt

SEQ ID NO: 697870 - DNA, 15 bp, Homo sapiens
ataaaatacatgtta

SEQ ID NO: 697871 - DNA, 15 bp, Homo sapiens
taaaatacatgttaa

SEQ ID NO: 697872 - DNA, 15 bp, Homo sapiens
aaaatacatgttaat

SEQ ID NO: 697873 - DNA, 15 bp, Homo sapiens
aaatacatgttaatg

SEQ ID NO: 697874 - DNA, 15 bp, Homo sapiens
aatacatgttaatgc

SEQ ID NO: 697875 - DNA, 15 bp, Homo sapiens
atacatgttaatgct

SEQ ID NO: 697876 - DNA, 15 bp, Homo sapiens
tacatgttaatgctt

SEQ ID NO: 697877 - DNA, 15 bp, Homo sapiens
acatgttaatgctta

SEQ ID NO: 697878 - DNA, 15 bp, Homo sapiens
catgttaatgcttaa

SEQ ID NO: 697879 - DNA, 15 bp, Homo sapiens
atgttaatgcttaac

SEQ ID NO: 697880 - DNA, 15 bp, Homo sapiens
tgttaatgcttaaca

SEQ ID NO: 697881 - DNA, 15 bp, Homo sapiens
gttaatgcttaacac

SEQ ID NO: 697882 - DNA, 15 bp, Homo sapiens
ttaatgcttaacaca

SEQ ID NO: 697883 - DNA, 15 bp, Homo sapiens
taatgcttaacacat

SEQ ID NO: 697884 - DNA, 15 bp, Homo sapiens
aatgcttaacacatt

SEQ ID NO: 697885 - DNA, 15 bp, Homo sapiens
atgcttaacacattg

SEQ ID NO: 697886 - DNA, 15 bp, Homo sapiens
tgcttaacacattga

SEQ ID NO: 697887 - DNA, 15 bp, Homo sapiens
gcttaacacattgaa

SEQ ID NO: 697888 - DNA, 15 bp, Homo sapiens
cttaacacattgaat

SEQ ID NO: 697889 - DNA, 15 bp, Homo sapiens
ttaacacattgaata

SEQ ID NO: 697890 - DNA, 15 bp, Homo sapiens
taacacattgaatac

SEQ ID NO: 697891 - DNA, 15 bp, Homo sapiens
aacacattgaataca

SEQ ID NO: 697892 - DNA, 15 bp, Homo sapiens
acacattgaatacaa

SEQ ID NO: 697893 - DNA, 15 bp, Homo sapiens
cacattgaatacaaa

SEQ ID NO: 697894 - DNA, 15 bp, Homo sapiens
acattgaatacaaat

SEQ ID NO: 697895 - DNA, 15 bp, Homo sapiens
cattgaatacaaatt

SEQ ID NO: 697896 - DNA, 15 bp, Homo sapiens
attgaatacaaattt

SEQ ID NO: 697897 - DNA, 15 bp, Homo sapiens
ttgaatacaaatttt

SEQ ID NO: 697898 - DNA, 15 bp, Homo sapiens
tgaatacaaattttc

SEQ ID NO: 697899 - DNA, 15 bp, Homo sapiens
gaatacaaattttct

SEQ ID NO: 697900 - DNA, 15 bp, Homo sapiens
aatacaaattttctt

SEQ ID NO: 697901 - DNA, 15 bp, Homo sapiens
atacaaattttcttt

SEQ ID NO: 697902 - DNA, 15 bp, Homo sapiens
tacaaattttcttta

SEQ ID NO: 697903 - DNA, 15 bp, Homo sapiens
acaaattttctttat

SEQ ID NO: 697904 - DNA, 15 bp, Homo sapiens
caaattttctttata

SEQ ID NO: 697905 - DNA, 15 bp, Homo sapiens
aaattttctttatac

SEQ ID NO: 697906 - DNA, 15 bp, Homo sapiens
aattttctttatact

SEQ ID NO: 697907 - DNA, 15 bp, Homo sapiens
attttctttatacta

SEQ ID NO: 697908 - DNA, 15 bp, Homo sapiens
ttttctttatactaa

SEQ ID NO: 697909 - DNA, 15 bp, Homo sapiens
tttctttatactaaa

SEQ ID NO: 697910 - DNA, 15 bp, Homo sapiens
ttctttatactaaag

SEQ ID NO: 697911 - DNA, 15 bp, Homo sapiens
tctttatactaaaga

SEQ ID NO: 697912 - DNA, 15 bp, Homo sapiens
ctttatactaaagac

SEQ ID NO: 697913 - DNA, 15 bp, Homo sapiens
tttatactaaagact

SEQ ID NO: 697914 - DNA, 15 bp, Homo sapiens
ttatactaaagactt

SEQ ID NO: 697915 - DNA, 15 bp, Homo sapiens
tatactaaagacttt

SEQ ID NO: 697916 - DNA, 15 bp, Homo sapiens
atactaaagacttta

SEQ ID NO: 697917 - DNA, 15 bp, Homo sapiens
tactaaagactttaa

SEQ ID NO: 697918 - DNA, 15 bp, Homo sapiens
actaaagactttaaa

SEQ ID NO: 697919 - DNA, 15 bp, Homo sapiens
ctaaagactttaaaa

SEQ ID NO: 697920 - DNA, 15 bp, Homo sapiens
taaagactttaaaat

SEQ ID NO: 697921 - DNA, 15 bp, Homo sapiens
aaagactttaaaatg

SEQ ID NO: 697922 - DNA, 15 bp, Homo sapiens
aagactttaaaatgt

SEQ ID NO: 697923 - DNA, 15 bp, Homo sapiens
agactttaaaatgtc

SEQ ID NO: 697924 - DNA, 15 bp, Homo sapiens
gactttaaaatgtcc

SEQ ID NO: 697925 - DNA, 15 bp, Homo sapiens
actttaaaatgtcca

SEQ ID NO: 697926 - DNA, 15 bp, Homo sapiens
ctttaaaatgtccat

SEQ ID NO: 697927 - DNA, 15 bp, Homo sapiens
tttaaaatgtccatg

SEQ ID NO: 697928 - DNA, 15 bp, Homo sapiens
ttaaaatgtccatgt

SEQ ID NO: 697929 - DNA, 15 bp, Homo sapiens
taaaatgtccatgtg

SEQ ID NO: 697930 - DNA, 15 bp, Homo sapiens
aaaatgtccatgtgt

SEQ ID NO: 697931 - DNA, 15 bp, Homo sapiens
aaatgtccatgtgtt

SEQ ID NO: 697932 - DNA, 15 bp, Homo sapiens
aatgtccatgtgtta

SEQ ID NO: 697933 - DNA, 15 bp, Homo sapiens
atgtccatgtgttaa

SEQ ID NO: 697934 - DNA, 15 bp, Homo sapiens
tgtccatgtgttaat

SEQ ID NO: 697935 - DNA, 15 bp, Homo sapiens
gtccatgtgttaatt

SEQ ID NO: 697936 - DNA, 15 bp, Homo sapiens
tccatgtgttaattt

SEQ ID NO: 697937 - DNA, 15 bp, Homo sapiens
ccatgtgttaatttc

SEQ ID NO: 697938 - DNA, 15 bp, Homo sapiens
catgtgttaatttct

SEQ ID NO: 697939 - DNA, 15 bp, Homo sapiens
atgtgttaatttctt

SEQ ID NO: 697940 - DNA, 15 bp, Homo sapiens
tgtgttaatttcttt

SEQ ID NO: 697941 - DNA, 15 bp, Homo sapiens
gtgttaatttctttt

SEQ ID NO: 697942 - DNA, 15 bp, Homo sapiens
tgttaatttcttttg

SEQ ID NO: 697943 - DNA, 15 bp, Homo sapiens
gttaatttcttttgg

SEQ ID NO: 697944 - DNA, 15 bp, Homo sapiens
ttaatttcttttgga

SEQ ID NO: 697945 - DNA, 15 bp, Homo sapiens
taatttcttttggag

SEQ ID NO: 697946 - DNA, 15 bp, Homo sapiens
aatttcttttggagg

SEQ ID NO: 697947 - DNA, 15 bp, Homo sapiens
atttcttttggaggt

SEQ ID NO: 697948 - DNA, 15 bp, Homo sapiens
tttcttttggaggtg

SEQ ID NO: 697949 - DNA, 15 bp, Homo sapiens
ttcttttggaggtgg

SEQ ID NO: 697950 - DNA, 15 bp, Homo sapiens
tcttttggaggtgga

SEQ ID NO: 697951 - DNA, 15 bp, Homo sapiens
cttttggaggtggaa

SEQ ID NO: 697952 - DNA, 15 bp, Homo sapiens
ttttggaggtggaaa

SEQ ID NO: 697953 - DNA, 15 bp, Homo sapiens
tttggaggtggaaaa

SEQ ID NO: 697954 - DNA, 15 bp, Homo sapiens
ttggaggtggaaaaa

SEQ ID NO: 697955 - DNA, 15 bp, Homo sapiens
tggaggtggaaaaat

SEQ ID NO: 697956 - DNA, 15 bp, Homo sapiens
ggaggtggaaaaata

SEQ ID NO: 697957 - DNA, 15 bp, Homo sapiens
gaggtggaaaaatag

SEQ ID NO: 697958 - DNA, 15 bp, Homo sapiens
aggtggaaaaatagt

SEQ ID NO: 697959 - DNA, 15 bp, Homo sapiens
ggtggaaaaatagtt

SEQ ID NO: 697960 - DNA, 15 bp, Homo sapiens
gtggaaaaatagttt

SEQ ID NO: 697961 - DNA, 15 bp, Homo sapiens
tggaaaaatagtttg

SEQ ID NO: 697962 - DNA, 15 bp, Homo sapiens
ggaaaaatagtttgt

SEQ ID NO: 697963 - DNA, 15 bp, Homo sapiens
gaaaaatagtttgtc

SEQ ID NO: 697964 - DNA, 15 bp, Homo sapiens
aaaaatagtttgtcc

SEQ ID NO: 697965 - DNA, 15 bp, Homo sapiens
aaaatagtttgtcca

SEQ ID NO: 697966 - DNA, 15 bp, Homo sapiens
aaatagtttgtccaa

SEQ ID NO: 697967 - DNA, 15 bp, Homo sapiens
aatagtttgtccaaa

SEQ ID NO: 697968 - DNA, 15 bp, Homo sapiens
atagtttgtccaaaa

SEQ ID NO: 697969 - DNA, 15 bp, Homo sapiens
tagtttgtccaaaaa

SEQ ID NO: 697970 - DNA, 15 bp, Homo sapiens
agtttgtccaaaaag

SEQ ID NO: 697971 - DNA, 15 bp, Homo sapiens
gtttgtccaaaaaga

SEQ ID NO: 697972 - DNA, 15 bp, Homo sapiens
tttgtccaaaaagac

SEQ ID NO: 697973 - DNA, 15 bp, Homo sapiens
ttgtccaaaaagaca

SEQ ID NO: 697974 - DNA, 15 bp, Homo sapiens
tgtccaaaaagacac

SEQ ID NO: 697975 - DNA, 15 bp, Homo sapiens
gtccaaaaagacact

SEQ ID NO: 697976 - DNA, 15 bp, Homo sapiens
tccaaaaagacactt

SEQ ID NO: 697977 - DNA, 15 bp, Homo sapiens
ccaaaaagacacttt

SEQ ID NO: 697978 - DNA, 15 bp, Homo sapiens
caaaaagacactttt

SEQ ID NO: 697979 - DNA, 15 bp, Homo sapiens
aaaaagacacttttc

SEQ ID NO: 697980 - DNA, 15 bp, Homo sapiens
aaaagacacttttca

SEQ ID NO: 697981 - DNA, 15 bp, Homo sapiens
aaagacacttttcac

SEQ ID NO: 697982 - DNA, 15 bp, Homo sapiens
aagacacttttcaca

SEQ ID NO: 697983 - DNA, 15 bp, Homo sapiens
agacacttttcacag

SEQ ID NO: 697984 - DNA, 15 bp, Homo sapiens
gacacttttcacagt

SEQ ID NO: 697985 - DNA, 15 bp, Homo sapiens
acacttttcacagtt

SEQ ID NO: 697986 - DNA, 15 bp, Homo sapiens
cacttttcacagttg

SEQ ID NO: 697987 - DNA, 15 bp, Homo sapiens
acttttcacagttga

SEQ ID NO: 697988 - DNA, 15 bp, Homo sapiens
cttttcacagttgaa

SEQ ID NO: 697989 - DNA, 15 bp, Homo sapiens
ttttcacagttgaag

SEQ ID NO: 697990 - DNA, 15 bp, Homo sapiens
tttcacagttgaagg

SEQ ID NO: 697991 - DNA, 15 bp, Homo sapiens
ttcacagttgaagga

SEQ ID NO: 697992 - DNA, 15 bp, Homo sapiens
tcacagttgaaggaa

SEQ ID NO: 697993 - DNA, 15 bp, Homo sapiens
cacagttgaaggaac

SEQ ID NO: 697994 - DNA, 15 bp, Homo sapiens
acagttgaaggaact

SEQ ID NO: 697995 - DNA, 15 bp, Homo sapiens
cagttgaaggaactt

SEQ ID NO: 697996 - DNA, 15 bp, Homo sapiens
agttgaaggaacttg

SEQ ID NO: 697997 - DNA, 15 bp, Homo sapiens
gttgaaggaacttga

SEQ ID NO: 697998 - DNA, 15 bp, Homo sapiens
ttgaaggaacttgaa

SEQ ID NO: 697999 - DNA, 15 bp, Homo sapiens
tgaaggaacttgaaa

SEQ ID NO: 698000 - DNA, 15 bp, Homo sapiens
gaaggaacttgaaag

SEQ ID NO: 698001 - DNA, 15 bp, Homo sapiens
aaggaacttgaaagt

SEQ ID NO: 698002 - DNA, 15 bp, Homo sapiens
aggaacttgaaagtt

SEQ ID NO: 698003 - DNA, 15 bp, Homo sapiens
ggaacttgaaagttc

SEQ ID NO: 698004 - DNA, 15 bp, Homo sapiens
gaacttgaaagttct

SEQ ID NO: 698005 - DNA, 15 bp, Homo sapiens
aacttgaaagttctg

SEQ ID NO: 698006 - DNA, 15 bp, Homo sapiens
acttgaaagttctgt

SEQ ID NO: 698007 - DNA, 15 bp, Homo sapiens
cttgaaagttctgtc

SEQ ID NO: 698008 - DNA, 15 bp, Homo sapiens
ttgaaagttctgtcc

SEQ ID NO: 698009 - DNA, 15 bp, Homo sapiens
tgaaagttctgtccc

SEQ ID NO: 698010 - DNA, 15 bp, Homo sapiens
gaaagttctgtccca

SEQ ID NO: 698011 - DNA, 15 bp, Homo sapiens
aaagttctgtcccag

SEQ ID NO: 698012 - DNA, 15 bp, Homo sapiens
aagttctgtcccagt

SEQ ID NO: 698013 - DNA, 15 bp, Homo sapiens
agttctgtcccagtg

SEQ ID NO: 698014 - DNA, 15 bp, Homo sapiens
gttctgtcccagtga

SEQ ID NO: 698015 - DNA, 15 bp, Homo sapiens
ttctgtcccagtgag

SEQ ID NO: 698016 - DNA, 15 bp, Homo sapiens
tctgtcccagtgagt

SEQ ID NO: 698017 - DNA, 15 bp, Homo sapiens
ctgtcccagtgagtc

SEQ ID NO: 698018 - DNA, 15 bp, Homo sapiens
tgtcccagtgagtcc

SEQ ID NO: 698019 - DNA, 15 bp, Homo sapiens
gtcccagtgagtcct

SEQ ID NO: 698020 - DNA, 15 bp, Homo sapiens
tcccagtgagtccta

SEQ ID NO: 698021 - DNA, 15 bp, Homo sapiens
cccagtgagtcctaa

SEQ ID NO: 698022 - DNA, 15 bp, Homo sapiens
ccagtgagtcctaat

SEQ ID NO: 698023 - DNA, 15 bp, Homo sapiens
cagtgagtcctaatg

SEQ ID NO: 698024 - DNA, 15 bp, Homo sapiens
agtgagtcctaatgg

SEQ ID NO: 698025 - DNA, 15 bp, Homo sapiens
gtgagtcctaatggt

SEQ ID NO: 698026 - DNA, 15 bp, Homo sapiens
tgagtcctaatggtt

SEQ ID NO: 698027 - DNA, 15 bp, Homo sapiens
gagtcctaatggttt

SEQ ID NO: 698028 - DNA, 15 bp, Homo sapiens
agtcctaatggtttt

SEQ ID NO: 698029 - DNA, 15 bp, Homo sapiens
gtcctaatggtttta

SEQ ID NO: 698030 - DNA, 15 bp, Homo sapiens
tcctaatggttttat

SEQ ID NO: 698031 - DNA, 15 bp, Homo sapiens
cctaatggttttatt

SEQ ID NO: 698032 - DNA, 15 bp, Homo sapiens
ctaatggttttattt

SEQ ID NO: 698033 - DNA, 15 bp, Homo sapiens
taatggttttatttc

SEQ ID NO: 698034 - DNA, 15 bp, Homo sapiens
aatggttttatttca

SEQ ID NO: 698035 - DNA, 15 bp, Homo sapiens
atggttttatttcag

SEQ ID NO: 698036 - DNA, 15 bp, Homo sapiens
tggttttatttcagg

SEQ ID NO: 698037 - DNA, 15 bp, Homo sapiens
ggttttatttcaggc

SEQ ID NO: 698038 - DNA, 15 bp, Homo sapiens
gttttatttcaggca

SEQ ID NO: 698039 - DNA, 15 bp, Homo sapiens
ttttatttcaggcag

SEQ ID NO: 698040 - DNA, 15 bp, Homo sapiens
tttatttcaggcagc

SEQ ID NO: 698041 - DNA, 15 bp, Homo sapiens
ttatttcaggcagca

SEQ ID NO: 698042 - DNA, 15 bp, Homo sapiens
tatttcaggcagcag

SEQ ID NO: 698043 - DNA, 15 bp, Homo sapiens
atttcaggcagcaga

SEQ ID NO: 698044 - DNA, 15 bp, Homo sapiens
tttcaggcagcagat

SEQ ID NO: 698045 - DNA, 15 bp, Homo sapiens
ttcaggcagcagatt

SEQ ID NO: 698046 - DNA, 15 bp, Homo sapiens
tcaggcagcagattc

SEQ ID NO: 698047 - DNA, 15 bp, Homo sapiens
caggcagcagattca

SEQ ID NO: 698048 - DNA, 15 bp, Homo sapiens
aggcagcagattcat

SEQ ID NO: 698049 - DNA, 15 bp, Homo sapiens
ggcagcagattcatt

SEQ ID NO: 698050 - DNA, 15 bp, Homo sapiens
gcagcagattcattg

SEQ ID NO: 698051 - DNA, 15 bp, Homo sapiens
cagcagattcattgt

SEQ ID NO: 698052 - DNA, 15 bp, Homo sapiens
agcagattcattgtc

SEQ ID NO: 698053 - DNA, 15 bp, Homo sapiens
gcagattcattgtca

SEQ ID NO: 698054 - DNA, 15 bp, Homo sapiens
cagattcattgtcaa

SEQ ID NO: 698055 - DNA, 15 bp, Homo sapiens
agattcattgtcaaa

SEQ ID NO: 698056 - DNA, 15 bp, Homo sapiens
gattcattgtcaaat

SEQ ID NO: 698057 - DNA, 15 bp, Homo sapiens
attcattgtcaaata

SEQ ID NO: 698058 - DNA, 15 bp, Homo sapiens
ttcattgtcaaatat

SEQ ID NO: 698059 - DNA, 15 bp, Homo sapiens
tcattgtcaaatatc

SEQ ID NO: 698060 - DNA, 15 bp, Homo sapiens
cattgtcaaatatct

SEQ ID NO: 698061 - DNA, 15 bp, Homo sapiens
attgtcaaatatctt

SEQ ID NO: 698062 - DNA, 15 bp, Homo sapiens
ttgtcaaatatctta

SEQ ID NO: 698063 - DNA, 15 bp, Homo sapiens
tgtcaaatatcttac

SEQ ID NO: 698064 - DNA, 15 bp, Homo sapiens
gtcaaatatcttact

SEQ ID NO: 698065 - DNA, 15 bp, Homo sapiens
tcaaatatcttactt

SEQ ID NO: 698066 - DNA, 15 bp, Homo sapiens
caaatatcttacttt

SEQ ID NO: 698067 - DNA, 15 bp, Homo sapiens
aaatatcttactttt

SEQ ID NO: 698068 - DNA, 15 bp, Homo sapiens
aatatcttacttttt

SEQ ID NO: 698069 - DNA, 15 bp, Homo sapiens
atatcttacttttta

SEQ ID NO: 698070 - DNA, 15 bp, Homo sapiens
tatcttactttttaa

SEQ ID NO: 698071 - DNA, 15 bp, Homo sapiens
atcttactttttaag

SEQ ID NO: 698072 - DNA, 15 bp, Homo sapiens
tcttactttttaagg

SEQ ID NO: 698073 - DNA, 15 bp, Homo sapiens
cttactttttaaggt

SEQ ID NO: 698074 - DNA, 15 bp, Homo sapiens
ttactttttaaggtc

SEQ ID NO: 698075 - DNA, 15 bp, Homo sapiens
tactttttaaggtct

SEQ ID NO: 698076 - DNA, 15 bp, Homo sapiens
actttttaaggtctg

SEQ ID NO: 698077 - DNA, 15 bp, Homo sapiens
ctttttaaggtctgt

SEQ ID NO: 698078 - DNA, 15 bp, Homo sapiens
tttttaaggtctgta

SEQ ID NO: 698079 - DNA, 15 bp, Homo sapiens
ttttaaggtctgtag

SEQ ID NO: 698080 - DNA, 15 bp, Homo sapiens
tttaaggtctgtagg

SEQ ID NO: 698081 - DNA, 15 bp, Homo sapiens
ttaaggtctgtaggt

SEQ ID NO: 698082 - DNA, 15 bp, Homo sapiens
taaggtctgtaggtt

SEQ ID NO: 698083 - DNA, 15 bp, Homo sapiens
aaggtctgtaggtta

SEQ ID NO: 698084 - DNA, 15 bp, Homo sapiens
aggtctgtaggttat

SEQ ID NO: 698085 - DNA, 15 bp, Homo sapiens
ggtctgtaggttatg

SEQ ID NO: 698086 - DNA, 15 bp, Homo sapiens
gtctgtaggttatgc

SEQ ID NO: 698087 - DNA, 15 bp, Homo sapiens
tctgtaggttatgct

SEQ ID NO: 698088 - DNA, 15 bp, Homo sapiens
ctgtaggttatgctg

SEQ ID NO: 698089 - DNA, 15 bp, Homo sapiens
tgtaggttatgctga

SEQ ID NO: 698090 - DNA, 15 bp, Homo sapiens
gtaggttatgctgaa

SEQ ID NO: 698091 - DNA, 15 bp, Homo sapiens
taggttatgctgaat

SEQ ID NO: 698092 - DNA, 15 bp, Homo sapiens
aggttatgctgaata

SEQ ID NO: 698093 - DNA, 15 bp, Homo sapiens
ggttatgctgaataa

SEQ ID NO: 698094 - DNA, 15 bp, Homo sapiens
gttatgctgaataaa

SEQ ID NO: 698095 - DNA, 15 bp, Homo sapiens
ttatgctgaataaaa

SEQ ID NO: 698096 - DNA, 15 bp, Homo sapiens
tatgctgaataaaat

SEQ ID NO: 698097 - DNA, 15 bp, Homo sapiens
atgctgaataaaatt

SEQ ID NO: 698098 - DNA, 15 bp, Homo sapiens
tgctgaataaaattc

SEQ ID NO: 698099 - DNA, 15 bp, Homo sapiens
gctgaataaaattct

SEQ ID NO: 698100 - DNA, 15 bp, Homo sapiens
ctgaataaaattctc

SEQ ID NO: 698101 - DNA, 15 bp, Homo sapiens
tgaataaaattctct

SEQ ID NO: 698102 - DNA, 15 bp, Homo sapiens
gaataaaattctctg

SEQ ID NO: 698103 - DNA, 15 bp, Homo sapiens
aataaaattctctgc

SEQ ID NO: 698104 - DNA, 15 bp, Homo sapiens
ataaaattctctgca

SEQ ID NO: 698105 - DNA, 15 bp, Homo sapiens
taaaattctctgcac

SEQ ID NO: 698106 - DNA, 15 bp, Homo sapiens
aaaattctctgcacc

SEQ ID NO: 698107 - DNA, 15 bp, Homo sapiens
aaattctctgcacca

SEQ ID NO: 698108 - DNA, 15 bp, Homo sapiens
aattctctgcaccat

SEQ ID NO: 698109 - DNA, 15 bp, Homo sapiens
attctctgcaccatg

SEQ ID NO: 698110 - DNA, 15 bp, Homo sapiens
ttctctgcaccatga

SEQ ID NO: 698111 - DNA, 15 bp, Homo sapiens
tctctgcaccatgaa

SEQ ID NO: 698112 - DNA, 15 bp, Homo sapiens
ctctgcaccatgaac

SEQ ID NO: 698113 - DNA, 15 bp, Homo sapiens
tctgcaccatgaact

SEQ ID NO: 698114 - DNA, 15 bp, Homo sapiens
ctgcaccatgaactt

SEQ ID NO: 698115 - DNA, 15 bp, Homo sapiens
tgcaccatgaacttc

SEQ ID NO: 698116 - DNA, 15 bp, Homo sapiens
gcaccatgaacttca

SEQ ID NO: 698117 - DNA, 15 bp, Homo sapiens
caccatgaacttcag

SEQ ID NO: 698118 - DNA, 15 bp, Homo sapiens
accatgaacttcaga

SEQ ID NO: 698119 - DNA, 15 bp, Homo sapiens
ccatgaacttcagag

SEQ ID NO: 698120 - DNA, 15 bp, Homo sapiens
catgaacttcagaga

SEQ ID NO: 698121 - DNA, 15 bp, Homo sapiens
atgaacttcagagaa

SEQ ID NO: 698122 - DNA, 15 bp, Homo sapiens
tgaacttcagagaat

SEQ ID NO: 698123 - DNA, 15 bp, Homo sapiens
gaacttcagagaatc

SEQ ID NO: 698124 - DNA, 15 bp, Homo sapiens
aacttcagagaatct

SEQ ID NO: 698125 - DNA, 15 bp, Homo sapiens
acttcagagaatctg

SEQ ID NO: 698126 - DNA, 15 bp, Homo sapiens
cttcagagaatctga

SEQ ID NO: 698127 - DNA, 15 bp, Homo sapiens
ttcagagaatctgaa

SEQ ID NO: 698128 - DNA, 15 bp, Homo sapiens
tcagagaatctgaag

SEQ ID NO: 698129 - DNA, 15 bp, Homo sapiens
cagagaatctgaagt

SEQ ID NO: 698130 - DNA, 15 bp, Homo sapiens
agagaatctgaagtc

SEQ ID NO: 698131 - DNA, 15 bp, Homo sapiens
gagaatctgaagtca

SEQ ID NO: 698132 - DNA, 15 bp, Homo sapiens
agaatctgaagtcac

SEQ ID NO: 698133 - DNA, 15 bp, Homo sapiens
gaatctgaagtcact

SEQ ID NO: 698134 - DNA, 15 bp, Homo sapiens
aatctgaagtcactt

SEQ ID NO: 698135 - DNA, 15 bp, Homo sapiens
atctgaagtcacttc

SEQ ID NO: 698136 - DNA, 15 bp, Homo sapiens
tctgaagtcacttct

SEQ ID NO: 698137 - DNA, 15 bp, Homo sapiens
ctgaagtcacttctc

SEQ ID NO: 698138 - DNA, 15 bp, Homo sapiens
tgaagtcacttctcc

SEQ ID NO: 698139 - DNA, 15 bp, Homo sapiens
gaagtcacttctcct

SEQ ID NO: 698140 - DNA, 15 bp, Homo sapiens
aagtcacttctcctg

SEQ ID NO: 698141 - DNA, 15 bp, Homo sapiens
agtcacttctcctga

SEQ ID NO: 698142 - DNA, 15 bp, Homo sapiens
gtcacttctcctgac

SEQ ID NO: 698143 - DNA, 15 bp, Homo sapiens
tcacttctcctgaca

SEQ ID NO: 698144 - DNA, 15 bp, Homo sapiens
cacttctcctgacag

SEQ ID NO: 698145 - DNA, 15 bp, Homo sapiens
acttctcctgacaga

SEQ ID NO: 698146 - DNA, 15 bp, Homo sapiens
cttctcctgacagac

SEQ ID NO: 698147 - DNA, 15 bp, Homo sapiens
ttctcctgacagacc

SEQ ID NO: 698148 - DNA, 15 bp, Homo sapiens
tctcctgacagacca

SEQ ID NO: 698149 - DNA, 15 bp, Homo sapiens
ctcctgacagaccag

SEQ ID NO: 698150 - DNA, 15 bp, Homo sapiens
tcctgacagaccagt

SEQ ID NO: 698151 - DNA, 15 bp, Homo sapiens
cctgacagaccagtt

SEQ ID NO: 698152 - DNA, 15 bp, Homo sapiens
ctgacagaccagttt

SEQ ID NO: 698153 - DNA, 15 bp, Homo sapiens
tgacagaccagtttt

SEQ ID NO: 698154 - DNA, 15 bp, Homo sapiens
gacagaccagttttt

SEQ ID NO: 698155 - DNA, 15 bp, Homo sapiens
acagaccagtttttc

SEQ ID NO: 698156 - DNA, 15 bp, Homo sapiens
cagaccagtttttca

SEQ ID NO: 698157 - DNA, 15 bp, Homo sapiens
agaccagtttttcat

SEQ ID NO: 698158 - DNA, 15 bp, Homo sapiens
gaccagtttttcatt

SEQ ID NO: 698159 - DNA, 15 bp, Homo sapiens
accagtttttcattt

SEQ ID NO: 698160 - DNA, 15 bp, Homo sapiens
ccagtttttcatttt

SEQ ID NO: 698161 - DNA, 15 bp, Homo sapiens
cagtttttcattttt

SEQ ID NO: 698162 - DNA, 15 bp, Homo sapiens
agtttttcattttta

SEQ ID NO: 698163 - DNA, 15 bp, Homo sapiens
gtttttcatttttat

SEQ ID NO: 698164 - DNA, 15 bp, Homo sapiens
tttttcatttttatt

SEQ ID NO: 698165 - DNA, 15 bp, Homo sapiens
ttttcatttttattg

SEQ ID NO: 698166 - DNA, 15 bp, Homo sapiens
tttcatttttattga

SEQ ID NO: 698167 - DNA, 15 bp, Homo sapiens
ttcatttttattgaa

SEQ ID NO: 698168 - DNA, 15 bp, Homo sapiens
tcatttttattgaat

SEQ ID NO: 698169 - DNA, 15 bp, Homo sapiens
atttttattgaattc

SEQ ID NO: 698170 - DNA, 15 bp, Homo sapiens
tttttattgaattct

SEQ ID NO: 698171 - DNA, 15 bp, Homo sapiens
ttttattgaattctg

SEQ ID NO: 698172 - DNA, 15 bp, Homo sapiens
tttattgaattctga

SEQ ID NO: 698173 - DNA, 15 bp, Homo sapiens
ttattgaattctgaa

SEQ ID NO: 698174 - DNA, 15 bp, Homo sapiens
tattgaattctgaat

SEQ ID NO: 698175 - DNA, 15 bp, Homo sapiens
attgaattctgaatt

SEQ ID NO: 698176 - DNA, 15 bp, Homo sapiens
ttgaattctgaattg

SEQ ID NO: 698177 - DNA, 15 bp, Homo sapiens
tgaattctgaattgt

SEQ ID NO: 698178 - DNA, 15 bp, Homo sapiens
gaattctgaattgtg

SEQ ID NO: 698179 - DNA, 15 bp, Homo sapiens
aattctgaattgtgt

SEQ ID NO: 698180 - DNA, 15 bp, Homo sapiens
attctgaattgtgtc

SEQ ID NO: 698181 - DNA, 15 bp, Homo sapiens
ttctgaattgtgtcc

SEQ ID NO: 698182 - DNA, 15 bp, Homo sapiens
tctgaattgtgtccg

SEQ ID NO: 698183 - DNA, 15 bp, Homo sapiens
ctgaattgtgtccga

SEQ ID NO: 698184 - DNA, 15 bp, Homo sapiens
tgaattgtgtccgat

SEQ ID NO: 698185 - DNA, 15 bp, Homo sapiens
gaattgtgtccgatg

SEQ ID NO: 698186 - DNA, 15 bp, Homo sapiens
aattgtgtccgatgt

SEQ ID NO: 698187 - DNA, 15 bp, Homo sapiens
attgtgtccgatgta

SEQ ID NO: 698188 - DNA, 15 bp, Homo sapiens
ttgtgtccgatgtaa

SEQ ID NO: 698189 - DNA, 15 bp, Homo sapiens
tgtgtccgatgtaaa

SEQ ID NO: 698190 - DNA, 15 bp, Homo sapiens
gtgtccgatgtaaag

SEQ ID NO: 698191 - DNA, 15 bp, Homo sapiens
tgtccgatgtaaagt

SEQ ID NO: 698192 - DNA, 15 bp, Homo sapiens
gtccgatgtaaagta

SEQ ID NO: 698193 - DNA, 15 bp, Homo sapiens
tccgatgtaaagtag

SEQ ID NO: 698194 - DNA, 15 bp, Homo sapiens
ccgatgtaaagtagt

SEQ ID NO: 698195 - DNA, 15 bp, Homo sapiens
cgatgtaaagtagta

SEQ ID NO: 698196 - DNA, 15 bp, Homo sapiens
gatgtaaagtagtaa

SEQ ID NO: 698197 - DNA, 15 bp, Homo sapiens
atgtaaagtagtaaa

SEQ ID NO: 698198 - DNA, 15 bp, Homo sapiens
tgtaaagtagtaaac

SEQ ID NO: 698199 - DNA, 15 bp, Homo sapiens
gtaaagtagtaaact

SEQ ID NO: 698200 - DNA, 15 bp, Homo sapiens
taaagtagtaaacta

SEQ ID NO: 698201 - DNA, 15 bp, Homo sapiens
aaagtagtaaactat

SEQ ID NO: 698202 - DNA, 15 bp, Homo sapiens
aagtagtaaactata

SEQ ID NO: 698203 - DNA, 15 bp, Homo sapiens
agtagtaaactatag

SEQ ID NO: 698204 - DNA, 15 bp, Homo sapiens
gtagtaaactatagg

SEQ ID NO: 698205 - DNA, 15 bp, Homo sapiens
tagtaaactataggg

SEQ ID NO: 698206 - DNA, 15 bp, Homo sapiens
agtaaactatagggt

SEQ ID NO: 698207 - DNA, 15 bp, Homo sapiens
gtaaactatagggtc

SEQ ID NO: 698208 - DNA, 15 bp, Homo sapiens
taaactatagggtca

SEQ ID NO: 698209 - DNA, 15 bp, Homo sapiens
aaactatagggtcaa

SEQ ID NO: 698210 - DNA, 15 bp, Homo sapiens
aactatagggtcaaa

SEQ ID NO: 698211 - DNA, 15 bp, Homo sapiens
actatagggtcaaaa

SEQ ID NO: 698212 - DNA, 15 bp, Homo sapiens
ctatagggtcaaaac

SEQ ID NO: 698213 - DNA, 15 bp, Homo sapiens
tatagggtcaaaaca

SEQ ID NO: 698214 - DNA, 15 bp, Homo sapiens
atagggtcaaaacaa

SEQ ID NO: 698215 - DNA, 15 bp, Homo sapiens
tagggtcaaaacaac

SEQ ID NO: 698216 - DNA, 15 bp, Homo sapiens
agggtcaaaacaaca

SEQ ID NO: 698217 - DNA, 15 bp, Homo sapiens
gggtcaaaacaacag

SEQ ID NO: 698218 - DNA, 15 bp, Homo sapiens
ggtcaaaacaacagt

SEQ ID NO: 698219 - DNA, 15 bp, Homo sapiens
gtcaaaacaacagtt

SEQ ID NO: 698220 - DNA, 15 bp, Homo sapiens
tcaaaacaacagttg

SEQ ID NO: 698221 - DNA, 15 bp, Homo sapiens
caaaacaacagttgg

SEQ ID NO: 698222 - DNA, 15 bp, Homo sapiens
aaaacaacagttgga

SEQ ID NO: 698223 - DNA, 15 bp, Homo sapiens
aaacaacagttggaa

SEQ ID NO: 698224 - DNA, 15 bp, Homo sapiens
aacaacagttggaaa

SEQ ID NO: 698225 - DNA, 15 bp, Homo sapiens
acaacagttggaaac

SEQ ID NO: 698226 - DNA, 15 bp, Homo sapiens
caacagttggaaaca

SEQ ID NO: 698227 - DNA, 15 bp, Homo sapiens
aacagttggaaacag

SEQ ID NO: 698228 - DNA, 15 bp, Homo sapiens
acagttggaaacagc

SEQ ID NO: 698229 - DNA, 15 bp, Homo sapiens
cagttggaaacagca

SEQ ID NO: 698230 - DNA, 15 bp, Homo sapiens
agttggaaacagcaa

SEQ ID NO: 698231 - DNA, 15 bp, Homo sapiens
gttggaaacagcaat

SEQ ID NO: 698232 - DNA, 15 bp, Homo sapiens
ttggaaacagcaata

SEQ ID NO: 698233 - DNA, 15 bp, Homo sapiens
tggaaacagcaatac

SEQ ID NO: 698234 - DNA, 15 bp, Homo sapiens
ggaaacagcaataca

SEQ ID NO: 698235 - DNA, 15 bp, Homo sapiens
gaaacagcaatacag

SEQ ID NO: 698236 - DNA, 15 bp, Homo sapiens
aaacagcaatacaga

SEQ ID NO: 698237 - DNA, 15 bp, Homo sapiens
aacagcaatacagag

SEQ ID NO: 698238 - DNA, 15 bp, Homo sapiens
acagcaatacagaga

SEQ ID NO: 698239 - DNA, 15 bp, Homo sapiens
cagcaatacagagag

SEQ ID NO: 698240 - DNA, 15 bp, Homo sapiens
agcaatacagagagt

SEQ ID NO: 698241 - DNA, 15 bp, Homo sapiens
gcaatacagagagtg

SEQ ID NO: 698242 - DNA, 15 bp, Homo sapiens
caatacagagagtga

SEQ ID NO: 698243 - DNA, 15 bp, Homo sapiens
aatacagagagtgat

SEQ ID NO: 698244 - DNA, 15 bp, Homo sapiens
atacagagagtgatt

SEQ ID NO: 698245 - DNA, 15 bp, Homo sapiens
tacagagagtgattg

SEQ ID NO: 698246 - DNA, 15 bp, Homo sapiens
acagagagtgattgg

SEQ ID NO: 698247 - DNA, 15 bp, Homo sapiens
cagagagtgattggg

SEQ ID NO: 698248 - DNA, 15 bp, Homo sapiens
agagagtgattgggt

SEQ ID NO: 698249 - DNA, 15 bp, Homo sapiens
gagagtgattgggta

SEQ ID NO: 698250 - DNA, 15 bp, Homo sapiens
agagtgattgggtac

SEQ ID NO: 698251 - DNA, 15 bp, Homo sapiens
gagtgattgggtaca

SEQ ID NO: 698252 - DNA, 15 bp, Homo sapiens
agtgattgggtacat

SEQ ID NO: 698253 - DNA, 15 bp, Homo sapiens
gtgattgggtacatt

SEQ ID NO: 698254 - DNA, 15 bp, Homo sapiens
tgattgggtacattg

SEQ ID NO: 698255 - DNA, 15 bp, Homo sapiens
gattgggtacattgt

SEQ ID NO: 698256 - DNA, 15 bp, Homo sapiens
attgggtacattgtc

SEQ ID NO: 698257 - DNA, 15 bp, Homo sapiens
ttgggtacattgtcc

SEQ ID NO: 698258 - DNA, 15 bp, Homo sapiens
tgggtacattgtcct

SEQ ID NO: 698259 - DNA, 15 bp, Homo sapiens
gggtacattgtcctt

SEQ ID NO: 698260 - DNA, 15 bp, Homo sapiens
ggtacattgtcctta

SEQ ID NO: 698261 - DNA, 15 bp, Homo sapiens
gtacattgtccttac

SEQ ID NO: 698262 - DNA, 15 bp, Homo sapiens
tacattgtccttact

SEQ ID NO: 698263 - DNA, 15 bp, Homo sapiens
acattgtccttactg

SEQ ID NO: 698264 - DNA, 15 bp, Homo sapiens
cattgtccttactgc

SEQ ID NO: 698265 - DNA, 15 bp, Homo sapiens
attgtccttactgct

SEQ ID NO: 698266 - DNA, 15 bp, Homo sapiens
ttgtccttactgctg

SEQ ID NO: 698267 - DNA, 15 bp, Homo sapiens
tgtccttactgctgc

SEQ ID NO: 698268 - DNA, 15 bp, Homo sapiens
gtccttactgctgcc

SEQ ID NO: 698269 - DNA, 15 bp, Homo sapiens
tccttactgctgcca

SEQ ID NO: 698270 - DNA, 15 bp, Homo sapiens
ccttactgctgccac

SEQ ID NO: 698271 - DNA, 15 bp, Homo sapiens
cttactgctgccact

SEQ ID NO: 698272 - DNA, 15 bp, Homo sapiens
ttactgctgccacta

SEQ ID NO: 698273 - DNA, 15 bp, Homo sapiens
tactgctgccactac

SEQ ID NO: 698274 - DNA, 15 bp, Homo sapiens
actgctgccactact

SEQ ID NO: 698275 - DNA, 15 bp, Homo sapiens
ctgctgccactactg

SEQ ID NO: 698276 - DNA, 15 bp, Homo sapiens
tgctgccactactga

SEQ ID NO: 698277 - DNA, 15 bp, Homo sapiens
gctgccactactgag

SEQ ID NO: 698278 - DNA, 15 bp, Homo sapiens
ctgccactactgagc

SEQ ID NO: 698279 - DNA, 15 bp, Homo sapiens
tgccactactgagca

SEQ ID NO: 698280 - DNA, 15 bp, Homo sapiens
gccactactgagcaa

SEQ ID NO: 698281 - DNA, 15 bp, Homo sapiens
ccactactgagcaat

SEQ ID NO: 698282 - DNA, 15 bp, Homo sapiens
cactactgagcaatt

SEQ ID NO: 698283 - DNA, 15 bp, Homo sapiens
actactgagcaatta

SEQ ID NO: 698284 - DNA, 15 bp, Homo sapiens
ctactgagcaattaa

SEQ ID NO: 698285 - DNA, 15 bp, Homo sapiens
tactgagcaattaac

SEQ ID NO: 698286 - DNA, 15 bp, Homo sapiens
actgagcaattaaca

SEQ ID NO: 698287 - DNA, 15 bp, Homo sapiens
ctgagcaattaacaa

SEQ ID NO: 698288 - DNA, 15 bp, Homo sapiens
tgagcaattaacaaa

SEQ ID NO: 698289 - DNA, 15 bp, Homo sapiens
gagcaattaacaaat

SEQ ID NO: 698290 - DNA, 15 bp, Homo sapiens
agcaattaacaaatg

SEQ ID NO: 698291 - DNA, 15 bp, Homo sapiens
gcaattaacaaatgt

SEQ ID NO: 698292 - DNA, 15 bp, Homo sapiens
caattaacaaatgtt

SEQ ID NO: 698293 - DNA, 15 bp, Homo sapiens
aattaacaaatgttt

SEQ ID NO: 698294 - DNA, 15 bp, Homo sapiens
attaacaaatgtttg

SEQ ID NO: 698295 - DNA, 15 bp, Homo sapiens
ttaacaaatgtttgt

SEQ ID NO: 698296 - DNA, 15 bp, Homo sapiens
taacaaatgtttgtg

SEQ ID NO: 698297 - DNA, 15 bp, Homo sapiens
aacaaatgtttgtgt

SEQ ID NO: 698298 - DNA, 15 bp, Homo sapiens
acaaatgtttgtgtt

SEQ ID NO: 698299 - DNA, 15 bp, Homo sapiens
caaatgtttgtgttc

SEQ ID NO: 698300 - DNA, 15 bp, Homo sapiens
aaatgtttgtgttct

SEQ ID NO: 698301 - DNA, 15 bp, Homo sapiens
aatgtttgtgttctc

SEQ ID NO: 698302 - DNA, 15 bp, Homo sapiens
atgtttgtgttctca

SEQ ID NO: 698303 - DNA, 15 bp, Homo sapiens
tgtttgtgttctcac

SEQ ID NO: 698304 - DNA, 15 bp, Homo sapiens
gtttgtgttctcaca

SEQ ID NO: 698305 - DNA, 15 bp, Homo sapiens
tttgtgttctcacaa

SEQ ID NO: 698306 - DNA, 15 bp, Homo sapiens
ttgtgttctcacaag

SEQ ID NO: 698307 - DNA, 15 bp, Homo sapiens
tgtgttctcacaaga

SEQ ID NO: 698308 - DNA, 15 bp, Homo sapiens
gtgttctcacaagag

SEQ ID NO: 698309 - DNA, 15 bp, Homo sapiens
tgttctcacaagaga

SEQ ID NO: 698310 - DNA, 15 bp, Homo sapiens
gttctcacaagagaa

SEQ ID NO: 698311 - DNA, 15 bp, Homo sapiens
ttctcacaagagaat

SEQ ID NO: 698312 - DNA, 15 bp, Homo sapiens
tctcacaagagaata

SEQ ID NO: 698313 - DNA, 15 bp, Homo sapiens
ctcacaagagaatat

SEQ ID NO: 698314 - DNA, 15 bp, Homo sapiens
tcacaagagaatata

SEQ ID NO: 698315 - DNA, 15 bp, Homo sapiens
cacaagagaatataa

SEQ ID NO: 698316 - DNA, 15 bp, Homo sapiens
acaagagaatataaa

SEQ ID NO: 698317 - DNA, 15 bp, Homo sapiens
caagagaatataaaa

SEQ ID NO: 698318 - DNA, 15 bp, Homo sapiens
aagagaatataaaat

SEQ ID NO: 698319 - DNA, 15 bp, Homo sapiens
agagaatataaaata

SEQ ID NO: 698320 - DNA, 15 bp, Homo sapiens
gagaatataaaataa

SEQ ID NO: 698321 - DNA, 15 bp, Homo sapiens
agaatataaaataag

SEQ ID NO: 698322 - DNA, 15 bp, Homo sapiens
gaatataaaataaga

SEQ ID NO: 698323 - DNA, 15 bp, Homo sapiens
aatataaaataagat

SEQ ID NO: 698324 - DNA, 15 bp, Homo sapiens
atataaaataagatt

SEQ ID NO: 698325 - DNA, 15 bp, Homo sapiens
tataaaataagattg

SEQ ID NO: 698326 - DNA, 15 bp, Homo sapiens
ataaaataagattga

SEQ ID NO: 698327 - DNA, 15 bp, Homo sapiens
taaaataagattgat

SEQ ID NO: 698328 - DNA, 15 bp, Homo sapiens
aaaataagattgata

SEQ ID NO: 698329 - DNA, 15 bp, Homo sapiens
aaataagattgatat

SEQ ID NO: 698330 - DNA, 15 bp, Homo sapiens
aataagattgatatt

SEQ ID NO: 698331 - DNA, 15 bp, Homo sapiens
ataagattgatattg

SEQ ID NO: 698332 - DNA, 15 bp, Homo sapiens
taagattgatattgt

SEQ ID NO: 698333 - DNA, 15 bp, Homo sapiens
aagattgatattgta

SEQ ID NO: 698334 - DNA, 15 bp, Homo sapiens
agattgatattgtaa

SEQ ID NO: 698335 - DNA, 15 bp, Homo sapiens
gattgatattgtaag

SEQ ID NO: 698336 - DNA, 15 bp, Homo sapiens
attgatattgtaagg

SEQ ID NO: 698337 - DNA, 15 bp, Homo sapiens
ttgatattgtaagga

SEQ ID NO: 698338 - DNA, 15 bp, Homo sapiens
tgatattgtaaggaa

SEQ ID NO: 698339 - DNA, 15 bp, Homo sapiens
gatattgtaaggaac

SEQ ID NO: 698340 - DNA, 15 bp, Homo sapiens
atattgtaaggaaca

SEQ ID NO: 698341 - DNA, 15 bp, Homo sapiens
tattgtaaggaacaa

SEQ ID NO: 698342 - DNA, 15 bp, Homo sapiens
attgtaaggaacaaa

SEQ ID NO: 698343 - DNA, 15 bp, Homo sapiens
ttgtaaggaacaaaa

SEQ ID NO: 698344 - DNA, 15 bp, Homo sapiens
tgtaaggaacaaaac

SEQ ID NO: 698345 - DNA, 15 bp, Homo sapiens
gtaaggaacaaaaca

SEQ ID NO: 698346 - DNA, 15 bp, Homo sapiens
taaggaacaaaacag

SEQ ID NO: 698347 - DNA, 15 bp, Homo sapiens
aaggaacaaaacaga

SEQ ID NO: 698348 - DNA, 15 bp, Homo sapiens
aggaacaaaacagaa

SEQ ID NO: 698349 - DNA, 15 bp, Homo sapiens
ggaacaaaacagaaa

SEQ ID NO: 698350 - DNA, 15 bp, Homo sapiens
gaacaaaacagaaac

SEQ ID NO: 698351 - DNA, 15 bp, Homo sapiens
aacaaaacagaaaca

SEQ ID NO: 698352 - DNA, 15 bp, Homo sapiens
acaaaacagaaacag

SEQ ID NO: 698353 - DNA, 15 bp, Homo sapiens
caaaacagaaacaga

SEQ ID NO: 698354 - DNA, 15 bp, Homo sapiens
aaaacagaaacagaa

SEQ ID NO: 698355 - DNA, 15 bp, Homo sapiens
aaacagaaacagaat

SEQ ID NO: 698356 - DNA, 15 bp, Homo sapiens
aacagaaacagaata

SEQ ID NO: 698357 - DNA, 15 bp, Homo sapiens
acagaaacagaatat

SEQ ID NO: 698358 - DNA, 15 bp, Homo sapiens
cagaaacagaatatg

SEQ ID NO: 698359 - DNA, 15 bp, Homo sapiens
agaaacagaatatga

SEQ ID NO: 698360 - DNA, 15 bp, Homo sapiens
gaaacagaatatgat

SEQ ID NO: 698361 - DNA, 15 bp, Homo sapiens
aaacagaatatgatc

SEQ ID NO: 698362 - DNA, 15 bp, Homo sapiens
aacagaatatgatca

SEQ ID NO: 698363 - DNA, 15 bp, Homo sapiens
acagaatatgatcaa

SEQ ID NO: 698364 - DNA, 15 bp, Homo sapiens
cagaatatgatcaaa

SEQ ID NO: 698365 - DNA, 15 bp, Homo sapiens
agaatatgatcaaat

SEQ ID NO: 698366 - DNA, 15 bp, Homo sapiens
gaatatgatcaaatg

SEQ ID NO: 698367 - DNA, 15 bp, Homo sapiens
aatatgatcaaatgt

SEQ ID NO: 698368 - DNA, 15 bp, Homo sapiens
atatgatcaaatgta

SEQ ID NO: 698369 - DNA, 15 bp, Homo sapiens
tatgatcaaatgtac

SEQ ID NO: 698370 - DNA, 15 bp, Homo sapiens
atgatcaaatgtaca

SEQ ID NO: 698371 - DNA, 15 bp, Homo sapiens
tgatcaaatgtacaa

SEQ ID NO: 698372 - DNA, 15 bp, Homo sapiens
gatcaaatgtacaaa

SEQ ID NO: 698373 - DNA, 15 bp, Homo sapiens
atcaaatgtacaaaa

SEQ ID NO: 698374 - DNA, 15 bp, Homo sapiens
tcaaatgtacaaaaa

SEQ ID NO: 698375 - DNA, 15 bp, Homo sapiens
caaatgtacaaaaat

SEQ ID NO: 698376 - DNA, 15 bp, Homo sapiens
aaatgtacaaaaatc

SEQ ID NO: 698377 - DNA, 15 bp, Homo sapiens
aatgtacaaaaatca

SEQ ID NO: 698378 - DNA, 15 bp, Homo sapiens
atgtacaaaaatcat

SEQ ID NO: 698379 - DNA, 15 bp, Homo sapiens
tgtacaaaaatcatt

SEQ ID NO: 698380 - DNA, 15 bp, Homo sapiens
gtacaaaaatcattt

SEQ ID NO: 698381 - DNA, 15 bp, Homo sapiens
tacaaaaatcatttt

SEQ ID NO: 698382 - DNA, 15 bp, Homo sapiens
acaaaaatcattttt

SEQ ID NO: 698383 - DNA, 15 bp, Homo sapiens
caaaaatcattttta

SEQ ID NO: 698384 - DNA, 15 bp, Homo sapiens
aaaaatcatttttaa

SEQ ID NO: 698385 - DNA, 15 bp, Homo sapiens
aaaatcatttttaaa

SEQ ID NO: 698386 - DNA, 15 bp, Homo sapiens
aaatcatttttaaaa

SEQ ID NO: 698387 - DNA, 15 bp, Homo sapiens
aatcatttttaaaac

SEQ ID NO: 698388 - DNA, 15 bp, Homo sapiens
atcatttttaaaacc

SEQ ID NO: 698389 - DNA, 15 bp, Homo sapiens
tcatttttaaaacct

SEQ ID NO: 698390 - DNA, 15 bp, Homo sapiens
catttttaaaacctt

SEQ ID NO: 698391 - DNA, 15 bp, Homo sapiens
atttttaaaacctta

SEQ ID NO: 698392 - DNA, 15 bp, Homo sapiens
tttttaaaaccttag

SEQ ID NO: 698393 - DNA, 15 bp, Homo sapiens
ttttaaaaccttagt

SEQ ID NO: 698394 - DNA, 15 bp, Homo sapiens
tttaaaaccttagtt

SEQ ID NO: 698395 - DNA, 15 bp, Homo sapiens
ttaaaaccttagttt

SEQ ID NO: 698396 - DNA, 15 bp, Homo sapiens
taaaaccttagtttt

SEQ ID NO: 698397 - DNA, 15 bp, Homo sapiens
aaaaccttagttttg

SEQ ID NO: 698398 - DNA, 15 bp, Homo sapiens
aaaccttagttttgt

SEQ ID NO: 698399 - DNA, 15 bp, Homo sapiens
aaccttagttttgtt

SEQ ID NO: 698400 - DNA, 15 bp, Homo sapiens
accttagttttgttt

SEQ ID NO: 698401 - DNA, 15 bp, Homo sapiens
ccttagttttgttta

SEQ ID NO: 698402 - DNA, 15 bp, Homo sapiens
cttagttttgtttat

SEQ ID NO: 698403 - DNA, 15 bp, Homo sapiens
ttagttttgtttatt

SEQ ID NO: 698404 - DNA, 15 bp, Homo sapiens
tagttttgtttattt

SEQ ID NO: 698405 - DNA, 15 bp, Homo sapiens
agttttgtttatttt

SEQ ID NO: 698406 - DNA, 15 bp, Homo sapiens
gttttgtttattttg

SEQ ID NO: 698407 - DNA, 15 bp, Homo sapiens
ttttgtttattttgc

SEQ ID NO: 698408 - DNA, 15 bp, Homo sapiens
tttgtttattttgct

SEQ ID NO: 698409 - DNA, 15 bp, Homo sapiens
ttgtttattttgctt

SEQ ID NO: 698410 - DNA, 15 bp, Homo sapiens
tgtttattttgcttc

SEQ ID NO: 698411 - DNA, 15 bp, Homo sapiens
gtttattttgcttct

SEQ ID NO: 698412 - DNA, 15 bp, Homo sapiens
tttattttgcttcta

SEQ ID NO: 698413 - DNA, 15 bp, Homo sapiens
ttattttgcttctac

SEQ ID NO: 698414 - DNA, 15 bp, Homo sapiens
tattttgcttctact

SEQ ID NO: 698415 - DNA, 15 bp, Homo sapiens
attttgcttctactt

SEQ ID NO: 698416 - DNA, 15 bp, Homo sapiens
ttttgcttctactta

SEQ ID NO: 698417 - DNA, 15 bp, Homo sapiens
tttgcttctacttaa

SEQ ID NO: 698418 - DNA, 15 bp, Homo sapiens
ttgcttctacttaat

SEQ ID NO: 698419 - DNA, 15 bp, Homo sapiens
tgcttctacttaatg

SEQ ID NO: 698420 - DNA, 15 bp, Homo sapiens
gcttctacttaatgt

SEQ ID NO: 698421 - DNA, 15 bp, Homo sapiens
cttctacttaatgta

SEQ ID NO: 698422 - DNA, 15 bp, Homo sapiens
ttctacttaatgtaa

SEQ ID NO: 698423 - DNA, 15 bp, Homo sapiens
tctacttaatgtaac

SEQ ID NO: 698424 - DNA, 15 bp, Homo sapiens
ctacttaatgtaaca

SEQ ID NO: 698425 - DNA, 15 bp, Homo sapiens
tacttaatgtaacag

SEQ ID NO: 698426 - DNA, 15 bp, Homo sapiens
acttaatgtaacagg

SEQ ID NO: 698427 - DNA, 15 bp, Homo sapiens
cttaatgtaacaggt

SEQ ID NO: 698428 - DNA, 15 bp, Homo sapiens
ttaatgtaacaggtt

SEQ ID NO: 698429 - DNA, 15 bp, Homo sapiens
taatgtaacaggttt

SEQ ID NO: 698430 - DNA, 15 bp, Homo sapiens
aatgtaacaggtttg

SEQ ID NO: 698431 - DNA, 15 bp, Homo sapiens
atgtaacaggtttgg

SEQ ID NO: 698432 - DNA, 15 bp, Homo sapiens
tgtaacaggtttggt

SEQ ID NO: 698433 - DNA, 15 bp, Homo sapiens
gtaacaggtttggtt

SEQ ID NO: 698434 - DNA, 15 bp, Homo sapiens
taacaggtttggtta

SEQ ID NO: 698435 - DNA, 15 bp, Homo sapiens
aacaggtttggttaa

SEQ ID NO: 698436 - DNA, 15 bp, Homo sapiens
acaggtttggttaaa

SEQ ID NO: 698437 - DNA, 15 bp, Homo sapiens
caggtttggttaaag

SEQ ID NO: 698438 - DNA, 15 bp, Homo sapiens
aggtttggttaaagt

SEQ ID NO: 698439 - DNA, 15 bp, Homo sapiens
ggtttggttaaagtt

SEQ ID NO: 698440 - DNA, 15 bp, Homo sapiens
gtttggttaaagttt

SEQ ID NO: 698441 - DNA, 15 bp, Homo sapiens
tttggttaaagtttt

SEQ ID NO: 698442 - DNA, 15 bp, Homo sapiens
ttggttaaagttttt

SEQ ID NO: 698443 - DNA, 15 bp, Homo sapiens
tggttaaagttttta

SEQ ID NO: 698444 - DNA, 15 bp, Homo sapiens
ggttaaagtttttag

SEQ ID NO: 698445 - DNA, 15 bp, Homo sapiens
gttaaagtttttagc

SEQ ID NO: 698446 - DNA, 15 bp, Homo sapiens
ttaaagtttttagca

SEQ ID NO: 698447 - DNA, 15 bp, Homo sapiens
taaagtttttagcac

SEQ ID NO: 698448 - DNA, 15 bp, Homo sapiens
aaagtttttagcacc

SEQ ID NO: 698449 - DNA, 15 bp, Homo sapiens
aagtttttagcacca

SEQ ID NO: 698450 - DNA, 15 bp, Homo sapiens
agtttttagcaccat

SEQ ID NO: 698451 - DNA, 15 bp, Homo sapiens
gtttttagcaccata

SEQ ID NO: 698452 - DNA, 15 bp, Homo sapiens
tttttagcaccatac

SEQ ID NO: 698453 - DNA, 15 bp, Homo sapiens
ttttagcaccatact

SEQ ID NO: 698454 - DNA, 15 bp, Homo sapiens
tttagcaccatacta

SEQ ID NO: 698455 - DNA, 15 bp, Homo sapiens
ttagcaccatactag

SEQ ID NO: 698456 - DNA, 15 bp, Homo sapiens
tagcaccatactaga

SEQ ID NO: 698457 - DNA, 15 bp, Homo sapiens
agcaccatactagaa

SEQ ID NO: 698458 - DNA, 15 bp, Homo sapiens
gcaccatactagaac

SEQ ID NO: 698459 - DNA, 15 bp, Homo sapiens
caccatactagaaca

SEQ ID NO: 698460 - DNA, 15 bp, Homo sapiens
accatactagaacaa

SEQ ID NO: 698461 - DNA, 15 bp, Homo sapiens
ccatactagaacaag

SEQ ID NO: 698462 - DNA, 15 bp, Homo sapiens
catactagaacaagt

SEQ ID NO: 698463 - DNA, 15 bp, Homo sapiens
atactagaacaagtt

SEQ ID NO: 698464 - DNA, 15 bp, Homo sapiens
tactagaacaagtta

SEQ ID NO: 698465 - DNA, 15 bp, Homo sapiens
actagaacaagttac

SEQ ID NO: 698466 - DNA, 15 bp, Homo sapiens
ctagaacaagttaca

SEQ ID NO: 698467 - DNA, 15 bp, Homo sapiens
tagaacaagttacat

SEQ ID NO: 698468 - DNA, 15 bp, Homo sapiens
agaacaagttacatt

SEQ ID NO: 698469 - DNA, 15 bp, Homo sapiens
gaacaagttacattt

SEQ ID NO: 698470 - DNA, 15 bp, Homo sapiens
aacaagttacattta

SEQ ID NO: 698471 - DNA, 15 bp, Homo sapiens
acaagttacatttaa

SEQ ID NO: 698472 - DNA, 15 bp, Homo sapiens
caagttacatttaaa

SEQ ID NO: 698473 - DNA, 15 bp, Homo sapiens
aagttacatttaaaa

SEQ ID NO: 698474 - DNA, 15 bp, Homo sapiens
agttacatttaaaat

SEQ ID NO: 698475 - DNA, 15 bp, Homo sapiens
gttacatttaaaatt

SEQ ID NO: 698476 - DNA, 15 bp, Homo sapiens
ttacatttaaaatta

SEQ ID NO: 698477 - DNA, 15 bp, Homo sapiens
tacatttaaaattag

SEQ ID NO: 698478 - DNA, 15 bp, Homo sapiens
acatttaaaattaga

SEQ ID NO: 698479 - DNA, 15 bp, Homo sapiens
catttaaaattagag

SEQ ID NO: 698480 - DNA, 15 bp, Homo sapiens
atttaaaattagagg

SEQ ID NO: 698481 - DNA, 15 bp, Homo sapiens
tttaaaattagagga

SEQ ID NO: 698482 - DNA, 15 bp, Homo sapiens
ttaaaattagaggaa

SEQ ID NO: 698483 - DNA, 15 bp, Homo sapiens
taaaattagaggaat

SEQ ID NO: 698484 - DNA, 15 bp, Homo sapiens
aaaattagaggaata

SEQ ID NO: 698485 - DNA, 15 bp, Homo sapiens
aaattagaggaataa

SEQ ID NO: 698486 - DNA, 15 bp, Homo sapiens
aattagaggaataaa

SEQ ID NO: 698487 - DNA, 15 bp, Homo sapiens
attagaggaataaaa

SEQ ID NO: 698488 - DNA, 15 bp, Homo sapiens
ttagaggaataaaaa

SEQ ID NO: 698489 - DNA, 15 bp, Homo sapiens
tagaggaataaaaaa

SEQ ID NO: 698490 - DNA, 15 bp, Homo sapiens
agaggaataaaaaat

SEQ ID NO: 698491 - DNA, 15 bp, Homo sapiens
gaggaataaaaaatc

SEQ ID NO: 698492 - DNA, 15 bp, Homo sapiens
aggaataaaaaatcc

SEQ ID NO: 698493 - DNA, 15 bp, Homo sapiens
ggaataaaaaatccc

SEQ ID NO: 698494 - DNA, 15 bp, Homo sapiens
gaataaaaaatccca

SEQ ID NO: 698495 - DNA, 15 bp, Homo sapiens
aataaaaaatcccac

SEQ ID NO: 698496 - DNA, 15 bp, Homo sapiens
ataaaaaatcccact

SEQ ID NO: 698497 - DNA, 15 bp, Homo sapiens
taaaaaatcccacta

SEQ ID NO: 698498 - DNA, 15 bp, Homo sapiens
aaaaaatcccactat

SEQ ID NO: 698499 - DNA, 15 bp, Homo sapiens
aaaaatcccactatt

SEQ ID NO: 698500 - DNA, 15 bp, Homo sapiens
aaaatcccactattt

SEQ ID NO: 698501 - DNA, 15 bp, Homo sapiens
aaatcccactatttc

SEQ ID NO: 698502 - DNA, 15 bp, Homo sapiens
aatcccactatttcg

SEQ ID NO: 698503 - DNA, 15 bp, Homo sapiens
atcccactatttcga

SEQ ID NO: 698504 - DNA, 15 bp, Homo sapiens
tcccactatttcgat

SEQ ID NO: 698505 - DNA, 15 bp, Homo sapiens
cccactatttcgatg

SEQ ID NO: 698506 - DNA, 15 bp, Homo sapiens
ccactatttcgatga

SEQ ID NO: 698507 - DNA, 15 bp, Homo sapiens
cactatttcgatgaa

SEQ ID NO: 698508 - DNA, 15 bp, Homo sapiens
actatttcgatgaaa

SEQ ID NO: 698509 - DNA, 15 bp, Homo sapiens
ctatttcgatgaaaa

SEQ ID NO: 698510 - DNA, 15 bp, Homo sapiens
tatttcgatgaaaat

SEQ ID NO: 698511 - DNA, 15 bp, Homo sapiens
atttcgatgaaaatt

SEQ ID NO: 698512 - DNA, 15 bp, Homo sapiens
tttcgatgaaaatta

SEQ ID NO: 698513 - DNA, 15 bp, Homo sapiens
ttcgatgaaaattac

SEQ ID NO: 698514 - DNA, 15 bp, Homo sapiens
tcgatgaaaattaca

SEQ ID NO: 698515 - DNA, 15 bp, Homo sapiens
cgatgaaaattacaa

SEQ ID NO: 698516 - DNA, 15 bp, Homo sapiens
gatgaaaattacaat

SEQ ID NO: 698517 - DNA, 15 bp, Homo sapiens
atgaaaattacaatc

SEQ ID NO: 698518 - DNA, 15 bp, Homo sapiens
tgaaaattacaatcc

SEQ ID NO: 698519 - DNA, 15 bp, Homo sapiens
gaaaattacaatcct

SEQ ID NO: 698520 - DNA, 15 bp, Homo sapiens
aaaattacaatcctt

SEQ ID NO: 698521 - DNA, 15 bp, Homo sapiens
aaattacaatccttg

SEQ ID NO: 698522 - DNA, 15 bp, Homo sapiens
aattacaatccttga

SEQ ID NO: 698523 - DNA, 15 bp, Homo sapiens
attacaatccttgag

SEQ ID NO: 698524 - DNA, 15 bp, Homo sapiens
ttacaatccttgaga

SEQ ID NO: 698525 - DNA, 15 bp, Homo sapiens
tacaatccttgagag

SEQ ID NO: 698526 - DNA, 15 bp, Homo sapiens
acaatccttgagaga

SEQ ID NO: 698527 - DNA, 15 bp, Homo sapiens
caatccttgagagat

SEQ ID NO: 698528 - DNA, 15 bp, Homo sapiens
aatccttgagagata

SEQ ID NO: 698529 - DNA, 15 bp, Homo sapiens
atccttgagagatat

SEQ ID NO: 698530 - DNA, 15 bp, Homo sapiens
tccttgagagatatg

SEQ ID NO: 698531 - DNA, 15 bp, Homo sapiens
ccttgagagatatgt

SEQ ID NO: 698532 - DNA, 15 bp, Homo sapiens
cttgagagatatgtt

SEQ ID NO: 698533 - DNA, 15 bp, Homo sapiens
ttgagagatatgttt

SEQ ID NO: 698534 - DNA, 15 bp, Homo sapiens
tgagagatatgtttt

SEQ ID NO: 698535 - DNA, 15 bp, Homo sapiens
gagagatatgttttc

SEQ ID NO: 698536 - DNA, 15 bp, Homo sapiens
agagatatgttttcc

SEQ ID NO: 698537 - DNA, 15 bp, Homo sapiens
gagatatgttttcca

SEQ ID NO: 698538 - DNA, 15 bp, Homo sapiens
agatatgttttccat

SEQ ID NO: 698539 - DNA, 15 bp, Homo sapiens
gatatgttttccatg

SEQ ID NO: 698540 - DNA, 15 bp, Homo sapiens
atatgttttccatgt

SEQ ID NO: 698541 - DNA, 15 bp, Homo sapiens
tatgttttccatgtg

SEQ ID NO: 698542 - DNA, 15 bp, Homo sapiens
atgttttccatgtgg

SEQ ID NO: 698543 - DNA, 15 bp, Homo sapiens
tgttttccatgtggc

SEQ ID NO: 698544 - DNA, 15 bp, Homo sapiens
gttttccatgtggct

SEQ ID NO: 698545 - DNA, 15 bp, Homo sapiens
ttttccatgtggctt

SEQ ID NO: 698546 - DNA, 15 bp, Homo sapiens
tttccatgtggcttc

SEQ ID NO: 698547 - DNA, 15 bp, Homo sapiens
ttccatgtggcttct

SEQ ID NO: 698548 - DNA, 15 bp, Homo sapiens
tccatgtggcttctg

SEQ ID NO: 698549 - DNA, 15 bp, Homo sapiens
ccatgtggcttctgg

SEQ ID NO: 698550 - DNA, 15 bp, Homo sapiens
catgtggcttctgga

SEQ ID NO: 698551 - DNA, 15 bp, Homo sapiens
atgtggcttctggaa

SEQ ID NO: 698552 - DNA, 15 bp, Homo sapiens
tgtggcttctggaaa

SEQ ID NO: 698553 - DNA, 15 bp, Homo sapiens
gtggcttctggaaaa

SEQ ID NO: 698554 - DNA, 15 bp, Homo sapiens
tggcttctggaaaat

SEQ ID NO: 698555 - DNA, 15 bp, Homo sapiens
ggcttctggaaaatt

SEQ ID NO: 698556 - DNA, 15 bp, Homo sapiens
gcttctggaaaattt

SEQ ID NO: 698557 - DNA, 15 bp, Homo sapiens
cttctggaaaatttt

SEQ ID NO: 698558 - DNA, 15 bp, Homo sapiens
ttctggaaaattttc

SEQ ID NO: 698559 - DNA, 15 bp, Homo sapiens
tctggaaaattttca

SEQ ID NO: 698560 - DNA, 15 bp, Homo sapiens
ctggaaaattttcaa

SEQ ID NO: 698561 - DNA, 15 bp, Homo sapiens
tggaaaattttcaaa

SEQ ID NO: 698562 - DNA, 15 bp, Homo sapiens
ggaaaattttcaaag

SEQ ID NO: 698563 - DNA, 15 bp, Homo sapiens
gaaaattttcaaagc

SEQ ID NO: 698564 - DNA, 15 bp, Homo sapiens
aaaattttcaaagca

SEQ ID NO: 698565 - DNA, 15 bp, Homo sapiens
aaattttcaaagcag

SEQ ID NO: 698566 - DNA, 15 bp, Homo sapiens
aattttcaaagcagg

SEQ ID NO: 698567 - DNA, 15 bp, Homo sapiens
attttcaaagcaggc

SEQ ID NO: 698568 - DNA, 15 bp, Homo sapiens
ttttcaaagcaggct

SEQ ID NO: 698569 - DNA, 15 bp, Homo sapiens
tttcaaagcaggctt

SEQ ID NO: 698570 - DNA, 15 bp, Homo sapiens
ttcaaagcaggcttc

SEQ ID NO: 698571 - DNA, 15 bp, Homo sapiens
tcaaagcaggcttct

SEQ ID NO: 698572 - DNA, 15 bp, Homo sapiens
caaagcaggcttctg

SEQ ID NO: 698573 - DNA, 15 bp, Homo sapiens
aaagcaggcttctga

SEQ ID NO: 698574 - DNA, 15 bp, Homo sapiens
aagcaggcttctgag

SEQ ID NO: 698575 - DNA, 15 bp, Homo sapiens
agcaggcttctgagg

SEQ ID NO: 698576 - DNA, 15 bp, Homo sapiens
gcaggcttctgaggc

SEQ ID NO: 698577 - DNA, 15 bp, Homo sapiens
caggcttctgaggca

SEQ ID NO: 698578 - DNA, 15 bp, Homo sapiens
aggcttctgaggcat

SEQ ID NO: 698579 - DNA, 15 bp, Homo sapiens
ggcttctgaggcatt

SEQ ID NO: 698580 - DNA, 15 bp, Homo sapiens
gcttctgaggcattg

SEQ ID NO: 698581 - DNA, 15 bp, Homo sapiens
cttctgaggcattgt

SEQ ID NO: 698582 - DNA, 15 bp, Homo sapiens
ttctgaggcattgtt

SEQ ID NO: 698583 - DNA, 15 bp, Homo sapiens
tctgaggcattgtta

SEQ ID NO: 698584 - DNA, 15 bp, Homo sapiens
ctgaggcattgttac

SEQ ID NO: 698585 - DNA, 15 bp, Homo sapiens
tgaggcattgttacc

SEQ ID NO: 698586 - DNA, 15 bp, Homo sapiens
gaggcattgttaccc

SEQ ID NO: 698587 - DNA, 15 bp, Homo sapiens
aggcattgttaccct

SEQ ID NO: 698588 - DNA, 15 bp, Homo sapiens
ggcattgttaccctg

SEQ ID NO: 698589 - DNA, 15 bp, Homo sapiens
gcattgttaccctga

SEQ ID NO: 698590 - DNA, 15 bp, Homo sapiens
cattgttaccctgag

SEQ ID NO: 698591 - DNA, 15 bp, Homo sapiens
attgttaccctgaga

SEQ ID NO: 698592 - DNA, 15 bp, Homo sapiens
ttgttaccctgagag

SEQ ID NO: 698593 - DNA, 15 bp, Homo sapiens
tgttaccctgagagt

SEQ ID NO: 698594 - DNA, 15 bp, Homo sapiens
gttaccctgagagtg

SEQ ID NO: 698595 - DNA, 15 bp, Homo sapiens
ttaccctgagagtgg

SEQ ID NO: 698596 - DNA, 15 bp, Homo sapiens
taccctgagagtggg

SEQ ID NO: 698597 - DNA, 15 bp, Homo sapiens
accctgagagtgggt

SEQ ID NO: 698598 - DNA, 15 bp, Homo sapiens
ccctgagagtgggta

SEQ ID NO: 698599 - DNA, 15 bp, Homo sapiens
cctgagagtgggtag

SEQ ID NO: 698600 - DNA, 15 bp, Homo sapiens
ctgagagtgggtaga

SEQ ID NO: 698601 - DNA, 15 bp, Homo sapiens
tgagagtgggtagac

SEQ ID NO: 698602 - DNA, 15 bp, Homo sapiens
gagagtgggtagact

SEQ ID NO: 698603 - DNA, 15 bp, Homo sapiens
agagtgggtagactg

SEQ ID NO: 698604 - DNA, 15 bp, Homo sapiens
gagtgggtagactga

SEQ ID NO: 698605 - DNA, 15 bp, Homo sapiens
agtgggtagactgaa

SEQ ID NO: 698606 - DNA, 15 bp, Homo sapiens
gtgggtagactgaac

SEQ ID NO: 698607 - DNA, 15 bp, Homo sapiens
tgggtagactgaaca

SEQ ID NO: 698608 - DNA, 15 bp, Homo sapiens
gggtagactgaacaa

SEQ ID NO: 698609 - DNA, 15 bp, Homo sapiens
ggtagactgaacaaa

SEQ ID NO: 698610 - DNA, 15 bp, Homo sapiens
gtagactgaacaaaa

SEQ ID NO: 698611 - DNA, 15 bp, Homo sapiens
tagactgaacaaaaa

SEQ ID NO: 698612 - DNA, 15 bp, Homo sapiens
agactgaacaaaaac

SEQ ID NO: 698613 - DNA, 15 bp, Homo sapiens
gactgaacaaaaacg

SEQ ID NO: 698614 - DNA, 15 bp, Homo sapiens
actgaacaaaaacgg

SEQ ID NO: 698615 - DNA, 15 bp, Homo sapiens
ctgaacaaaaacggc

SEQ ID NO: 698616 - DNA, 15 bp, Homo sapiens
tgaacaaaaacggcg

SEQ ID NO: 698617 - DNA, 15 bp, Homo sapiens
gaacaaaaacggcgg

SEQ ID NO: 698618 - DNA, 15 bp, Homo sapiens
aacaaaaacggcggg

SEQ ID NO: 698619 - DNA, 15 bp, Homo sapiens
acaaaaacggcgggt

SEQ ID NO: 698620 - DNA, 15 bp, Homo sapiens
caaaaacggcgggtg

SEQ ID NO: 698621 - DNA, 15 bp, Homo sapiens
aaaaacggcgggtgc

SEQ ID NO: 698622 - DNA, 15 bp, Homo sapiens
aaaacggcgggtgca

SEQ ID NO: 698623 - DNA, 15 bp, Homo sapiens
aaacggcgggtgcac

SEQ ID NO: 698624 - DNA, 15 bp, Homo sapiens
aacggcgggtgcact

SEQ ID NO: 698625 - DNA, 15 bp, Homo sapiens
acggcgggtgcactt

SEQ ID NO: 698626 - DNA, 15 bp, Homo sapiens
cggcgggtgcacttc

SEQ ID NO: 698627 - DNA, 15 bp, Homo sapiens
ggcgggtgcacttcc

SEQ ID NO: 698628 - DNA, 15 bp, Homo sapiens
gcgggtgcacttcct

SEQ ID NO: 698629 - DNA, 15 bp, Homo sapiens
cgggtgcacttcctc

SEQ ID NO: 698630 - DNA, 15 bp, Homo sapiens
gggtgcacttcctcc

SEQ ID NO: 698631 - DNA, 15 bp, Homo sapiens
ggtgcacttcctccg

SEQ ID NO: 698632 - DNA, 15 bp, Homo sapiens
gtgcacttcctccga

SEQ ID NO: 698633 - DNA, 15 bp, Homo sapiens
tgcacttcctccgat

SEQ ID NO: 698634 - DNA, 15 bp, Homo sapiens
gcacttcctccgatc

SEQ ID NO: 698635 - DNA, 15 bp, Homo sapiens
cacttcctccgatca

SEQ ID NO: 698636 - DNA, 15 bp, Homo sapiens
acttcctccgatcac

SEQ ID NO: 698637 - DNA, 15 bp, Homo sapiens
cttcctccgatcaca

SEQ ID NO: 698638 - DNA, 15 bp, Homo sapiens
ttcctccgatcacag

SEQ ID NO: 698639 - DNA, 15 bp, Homo sapiens
tcctccgatcacagt

SEQ ID NO: 698640 - DNA, 15 bp, Homo sapiens
cctccgatcacagtt

SEQ ID NO: 698641 - DNA, 15 bp, Homo sapiens
ctccgatcacagtta

SEQ ID NO: 698642 - DNA, 15 bp, Homo sapiens
tccgatcacagttaa

SEQ ID NO: 698643 - DNA, 15 bp, Homo sapiens
ccgatcacagttaac

SEQ ID NO: 698644 - DNA, 15 bp, Homo sapiens
cgatcacagttaacc

SEQ ID NO: 698645 - DNA, 15 bp, Homo sapiens
gatcacagttaacca

SEQ ID NO: 698646 - DNA, 15 bp, Homo sapiens
atcacagttaaccac

SEQ ID NO: 698647 - DNA, 15 bp, Homo sapiens
tcacagttaaccaca

SEQ ID NO: 698648 - DNA, 15 bp, Homo sapiens
cacagttaaccacac

SEQ ID NO: 698649 - DNA, 15 bp, Homo sapiens
acagttaaccacacg

SEQ ID NO: 698650 - DNA, 15 bp, Homo sapiens
cagttaaccacacgc

SEQ ID NO: 698651 - DNA, 15 bp, Homo sapiens
agttaaccacacgcc

SEQ ID NO: 698652 - DNA, 15 bp, Homo sapiens
gttaaccacacgcca

SEQ ID NO: 698653 - DNA, 15 bp, Homo sapiens
ttaaccacacgccag

SEQ ID NO: 698654 - DNA, 15 bp, Homo sapiens
taaccacacgccagt

SEQ ID NO: 698655 - DNA, 15 bp, Homo sapiens
aaccacacgccagtg

SEQ ID NO: 698656 - DNA, 15 bp, Homo sapiens
accacacgccagtgc

SEQ ID NO: 698657 - DNA, 15 bp, Homo sapiens
ccacacgccagtgca

SEQ ID NO: 698658 - DNA, 15 bp, Homo sapiens
cacacgccagtgcaa

SEQ ID NO: 698659 - DNA, 15 bp, Homo sapiens
acacgccagtgcaaa

SEQ ID NO: 698660 - DNA, 15 bp, Homo sapiens
cacgccagtgcaaac

SEQ ID NO: 698661 - DNA, 15 bp, Homo sapiens
acgccagtgcaaaca

SEQ ID NO: 698662 - DNA, 15 bp, Homo sapiens
cgccagtgcaaacaa

SEQ ID NO: 698663 - DNA, 15 bp, Homo sapiens
gccagtgcaaacaat

SEQ ID NO: 698664 - DNA, 15 bp, Homo sapiens
ccagtgcaaacaatc

SEQ ID NO: 698665 - DNA, 15 bp, Homo sapiens
cagtgcaaacaatct

SEQ ID NO: 698666 - DNA, 15 bp, Homo sapiens
agtgcaaacaatctt

SEQ ID NO: 698667 - DNA, 15 bp, Homo sapiens
gtgcaaacaatcttt

SEQ ID NO: 698668 - DNA, 15 bp, Homo sapiens
tgcaaacaatctttg

SEQ ID NO: 698669 - DNA, 15 bp, Homo sapiens
gcaaacaatctttgc

SEQ ID NO: 698670 - DNA, 15 bp, Homo sapiens
caaacaatctttgca

SEQ ID NO: 698671 - DNA, 15 bp, Homo sapiens
aaacaatctttgcat

SEQ ID NO: 698672 - DNA, 15 bp, Homo sapiens
aacaatctttgcatt

SEQ ID NO: 698673 - DNA, 15 bp, Homo sapiens
acaatctttgcattt

SEQ ID NO: 698674 - DNA, 15 bp, Homo sapiens
caatctttgcatttc

SEQ ID NO: 698675 - DNA, 15 bp, Homo sapiens
aatctttgcatttct

SEQ ID NO: 698676 - DNA, 15 bp, Homo sapiens
atctttgcatttctt

SEQ ID NO: 698677 - DNA, 15 bp, Homo sapiens
tctttgcatttcttt

SEQ ID NO: 698678 - DNA, 15 bp, Homo sapiens
ctttgcatttctttt

SEQ ID NO: 698679 - DNA, 15 bp, Homo sapiens
tttgcatttcttttg

SEQ ID NO: 698680 - DNA, 15 bp, Homo sapiens
ttgcatttcttttgg

SEQ ID NO: 698681 - DNA, 15 bp, Homo sapiens
tgcatttcttttggt

SEQ ID NO: 698682 - DNA, 15 bp, Homo sapiens
gcatttcttttggtt

SEQ ID NO: 698683 - DNA, 15 bp, Homo sapiens
catttcttttggttc

SEQ ID NO: 698684 - DNA, 15 bp, Homo sapiens
atttcttttggttct

SEQ ID NO: 698685 - DNA, 15 bp, Homo sapiens
tttcttttggttctt

SEQ ID NO: 698686 - DNA, 15 bp, Homo sapiens
ttcttttggttctta

SEQ ID NO: 698687 - DNA, 15 bp, Homo sapiens
tcttttggttcttag

SEQ ID NO: 698688 - DNA, 15 bp, Homo sapiens
cttttggttcttaga

SEQ ID NO: 698689 - DNA, 15 bp, Homo sapiens
ttttggttcttagag

SEQ ID NO: 698690 - DNA, 15 bp, Homo sapiens
tttggttcttagagt

SEQ ID NO: 698691 - DNA, 15 bp, Homo sapiens
ttggttcttagagtc

SEQ ID NO: 698692 - DNA, 15 bp, Homo sapiens
tggttcttagagtct

SEQ ID NO: 698693 - DNA, 15 bp, Homo sapiens
ggttcttagagtctt

SEQ ID NO: 698694 - DNA, 15 bp, Homo sapiens
gttcttagagtcttt

SEQ ID NO: 698695 - DNA, 15 bp, Homo sapiens
ttcttagagtctttg

SEQ ID NO: 698696 - DNA, 15 bp, Homo sapiens
tcttagagtctttga

SEQ ID NO: 698697 - DNA, 15 bp, Homo sapiens
cttagagtctttgac

SEQ ID NO: 698698 - DNA, 15 bp, Homo sapiens
ttagagtctttgact

SEQ ID NO: 698699 - DNA, 15 bp, Homo sapiens
tagagtctttgactt

SEQ ID NO: 698700 - DNA, 15 bp, Homo sapiens
agagtctttgactta

SEQ ID NO: 698701 - DNA, 15 bp, Homo sapiens
gagtctttgacttaa

SEQ ID NO: 698702 - DNA, 15 bp, Homo sapiens
agtctttgacttaaa

SEQ ID NO: 698703 - DNA, 15 bp, Homo sapiens
gtctttgacttaaat

SEQ ID NO: 698704 - DNA, 15 bp, Homo sapiens
tctttgacttaaatg

SEQ ID NO: 698705 - DNA, 15 bp, Homo sapiens
ctttgacttaaatgg

SEQ ID NO: 698706 - DNA, 15 bp, Homo sapiens
tttgacttaaatggg

SEQ ID NO: 698707 - DNA, 15 bp, Homo sapiens
ttgacttaaatgggt

SEQ ID NO: 698708 - DNA, 15 bp, Homo sapiens
tgacttaaatgggta

SEQ ID NO: 698709 - DNA, 15 bp, Homo sapiens
gacttaaatgggtag

SEQ ID NO: 698710 - DNA, 15 bp, Homo sapiens
acttaaatgggtaga

SEQ ID NO: 698711 - DNA, 15 bp, Homo sapiens
cttaaatgggtagac

SEQ ID NO: 698712 - DNA, 15 bp, Homo sapiens
ttaaatgggtagaca

SEQ ID NO: 698713 - DNA, 15 bp, Homo sapiens
taaatgggtagacaa

SEQ ID NO: 698714 - DNA, 15 bp, Homo sapiens
aaatgggtagacaat

SEQ ID NO: 698715 - DNA, 15 bp, Homo sapiens
aatgggtagacaatt

SEQ ID NO: 698716 - DNA, 15 bp, Homo sapiens
atgggtagacaattg

SEQ ID NO: 698717 - DNA, 15 bp, Homo sapiens
tgggtagacaattgc

SEQ ID NO: 698718 - DNA, 15 bp, Homo sapiens
gggtagacaattgcc

SEQ ID NO: 698719 - DNA, 15 bp, Homo sapiens
ggtagacaattgcca

SEQ ID NO: 698720 - DNA, 15 bp, Homo sapiens
gtagacaattgccag

SEQ ID NO: 698721 - DNA, 15 bp, Homo sapiens
tagacaattgccaga

SEQ ID NO: 698722 - DNA, 15 bp, Homo sapiens
agacaattgccagaa

SEQ ID NO: 698723 - DNA, 15 bp, Homo sapiens
gacaattgccagaaa

SEQ ID NO: 698724 - DNA, 15 bp, Homo sapiens
acaattgccagaaat

SEQ ID NO: 698725 - DNA, 15 bp, Homo sapiens
caattgccagaaatc

SEQ ID NO: 698726 - DNA, 15 bp, Homo sapiens
aattgccagaaatcg

SEQ ID NO: 698727 - DNA, 15 bp, Homo sapiens
attgccagaaatcga

SEQ ID NO: 698728 - DNA, 15 bp, Homo sapiens
ttgccagaaatcgat

SEQ ID NO: 698729 - DNA, 15 bp, Homo sapiens
tgccagaaatcgatc

SEQ ID NO: 698730 - DNA, 15 bp, Homo sapiens
gccagaaatcgatct

SEQ ID NO: 698731 - DNA, 15 bp, Homo sapiens
ccagaaatcgatcta

SEQ ID NO: 698732 - DNA, 15 bp, Homo sapiens
cagaaatcgatctac

SEQ ID NO: 698733 - DNA, 15 bp, Homo sapiens
agaaatcgatctaca

SEQ ID NO: 698734 - DNA, 15 bp, Homo sapiens
gaaatcgatctacac

SEQ ID NO: 698735 - DNA, 15 bp, Homo sapiens
aaatcgatctacact

SEQ ID NO: 698736 - DNA, 15 bp, Homo sapiens
aatcgatctacacta

SEQ ID NO: 698737 - DNA, 15 bp, Homo sapiens
atcgatctacactaa

SEQ ID NO: 698738 - DNA, 15 bp, Homo sapiens
tcgatctacactaat

SEQ ID NO: 698739 - DNA, 15 bp, Homo sapiens
cgatctacactaata

SEQ ID NO: 698740 - DNA, 15 bp, Homo sapiens
gatctacactaatac

SEQ ID NO: 698741 - DNA, 15 bp, Homo sapiens
atctacactaataca

SEQ ID NO: 698742 - DNA, 15 bp, Homo sapiens
tctacactaatacag

SEQ ID NO: 698743 - DNA, 15 bp, Homo sapiens
ctacactaatacagg

SEQ ID NO: 698744 - DNA, 15 bp, Homo sapiens
tacactaatacaggt

SEQ ID NO: 698745 - DNA, 15 bp, Homo sapiens
acactaatacaggtt

SEQ ID NO: 698746 - DNA, 15 bp, Homo sapiens
cactaatacaggtta

SEQ ID NO: 698747 - DNA, 15 bp, Homo sapiens
actaatacaggttaa

SEQ ID NO: 698748 - DNA, 15 bp, Homo sapiens
ctaatacaggttaag

SEQ ID NO: 698749 - DNA, 15 bp, Homo sapiens
taatacaggttaaga

SEQ ID NO: 698750 - DNA, 15 bp, Homo sapiens
aatacaggttaagaa

SEQ ID NO: 698751 - DNA, 15 bp, Homo sapiens
atacaggttaagaac

SEQ ID NO: 698752 - DNA, 15 bp, Homo sapiens
tacaggttaagaaca

SEQ ID NO: 698753 - DNA, 15 bp, Homo sapiens
acaggttaagaacag

SEQ ID NO: 698754 - DNA, 15 bp, Homo sapiens
caggttaagaacaga

SEQ ID NO: 698755 - DNA, 15 bp, Homo sapiens
aggttaagaacagaa

SEQ ID NO: 698756 - DNA, 15 bp, Homo sapiens
ggttaagaacagaat

SEQ ID NO: 698757 - DNA, 15 bp, Homo sapiens
gttaagaacagaatg

SEQ ID NO: 698758 - DNA, 15 bp, Homo sapiens
ttaagaacagaatgc

SEQ ID NO: 698759 - DNA, 15 bp, Homo sapiens
taagaacagaatgct

SEQ ID NO: 698760 - DNA, 15 bp, Homo sapiens
aagaacagaatgctt

SEQ ID NO: 698761 - DNA, 15 bp, Homo sapiens
agaacagaatgcttc

SEQ ID NO: 698762 - DNA, 15 bp, Homo sapiens
gaacagaatgcttcc

SEQ ID NO: 698763 - DNA, 15 bp, Homo sapiens
aacagaatgcttccg

SEQ ID NO: 698764 - DNA, 15 bp, Homo sapiens
acagaatgcttccgt

SEQ ID NO: 698765 - DNA, 15 bp, Homo sapiens
cagaatgcttccgta

SEQ ID NO: 698766 - DNA, 15 bp, Homo sapiens
agaatgcttccgtac

SEQ ID NO: 698767 - DNA, 15 bp, Homo sapiens
gaatgcttccgtaca

SEQ ID NO: 698768 - DNA, 15 bp, Homo sapiens
aatgcttccgtacat

SEQ ID NO: 698769 - DNA, 15 bp, Homo sapiens
atgcttccgtacatg

SEQ ID NO: 698770 - DNA, 15 bp, Homo sapiens
tgcttccgtacatgt

SEQ ID NO: 698771 - DNA, 15 bp, Homo sapiens
gcttccgtacatgtt

SEQ ID NO: 698772 - DNA, 15 bp, Homo sapiens
cttccgtacatgttg

SEQ ID NO: 698773 - DNA, 15 bp, Homo sapiens
ttccgtacatgttgg

SEQ ID NO: 698774 - DNA, 15 bp, Homo sapiens
tccgtacatgttggt

SEQ ID NO: 698775 - DNA, 15 bp, Homo sapiens
ccgtacatgttggta

SEQ ID NO: 698776 - DNA, 15 bp, Homo sapiens
cgtacatgttggtat

SEQ ID NO: 698777 - DNA, 15 bp, Homo sapiens
gtacatgttggtata

SEQ ID NO: 698778 - DNA, 15 bp, Homo sapiens
tacatgttggtataa

SEQ ID NO: 698779 - DNA, 15 bp, Homo sapiens
acatgttggtataaa

SEQ ID NO: 698780 - DNA, 15 bp, Homo sapiens
catgttggtataaaa

SEQ ID NO: 698781 - DNA, 15 bp, Homo sapiens
atgttggtataaaac

SEQ ID NO: 698782 - DNA, 15 bp, Homo sapiens
tgttggtataaaaca

SEQ ID NO: 698783 - DNA, 15 bp, Homo sapiens
gttggtataaaacag

SEQ ID NO: 698784 - DNA, 15 bp, Homo sapiens
ttggtataaaacagc

SEQ ID NO: 698785 - DNA, 15 bp, Homo sapiens
tggtataaaacagca

SEQ ID NO: 698786 - DNA, 15 bp, Homo sapiens
ggtataaaacagcat

SEQ ID NO: 698787 - DNA, 15 bp, Homo sapiens
gtataaaacagcatc

SEQ ID NO: 698788 - DNA, 15 bp, Homo sapiens
tataaaacagcatca

SEQ ID NO: 698789 - DNA, 15 bp, Homo sapiens
ataaaacagcatcac

SEQ ID NO: 698790 - DNA, 15 bp, Homo sapiens
taaaacagcatcaca

SEQ ID NO: 698791 - DNA, 15 bp, Homo sapiens
aaaacagcatcacag

SEQ ID NO: 698792 - DNA, 15 bp, Homo sapiens
aaacagcatcacaga

SEQ ID NO: 698793 - DNA, 15 bp, Homo sapiens
aacagcatcacagaa

SEQ ID NO: 698794 - DNA, 15 bp, Homo sapiens
acagcatcacagaaa

SEQ ID NO: 698795 - DNA, 15 bp, Homo sapiens
cagcatcacagaaat

SEQ ID NO: 698796 - DNA, 15 bp, Homo sapiens
agcatcacagaaatc

SEQ ID NO: 698797 - DNA, 15 bp, Homo sapiens
gcatcacagaaatct

SEQ ID NO: 698798 - DNA, 15 bp, Homo sapiens
catcacagaaatctt

SEQ ID NO: 698799 - DNA, 15 bp, Homo sapiens
atcacagaaatctta

SEQ ID NO: 698800 - DNA, 15 bp, Homo sapiens
tcacagaaatcttac

SEQ ID NO: 698801 - DNA, 15 bp, Homo sapiens
cacagaaatcttaca

SEQ ID NO: 698802 - DNA, 15 bp, Homo sapiens
acagaaatcttacaa

SEQ ID NO: 698803 - DNA, 15 bp, Homo sapiens
cagaaatcttacaaa

SEQ ID NO: 698804 - DNA, 15 bp, Homo sapiens
agaaatcttacaaag

SEQ ID NO: 698805 - DNA, 15 bp, Homo sapiens
gaaatcttacaaagt

SEQ ID NO: 698806 - DNA, 15 bp, Homo sapiens
aaatcttacaaagta

SEQ ID NO: 698807 - DNA, 15 bp, Homo sapiens
aatcttacaaagtaa

SEQ ID NO: 698808 - DNA, 15 bp, Homo sapiens
atcttacaaagtaaa

SEQ ID NO: 698809 - DNA, 15 bp, Homo sapiens
tcttacaaagtaaat

SEQ ID NO: 698810 - DNA, 15 bp, Homo sapiens
cttacaaagtaaatc

SEQ ID NO: 698811 - DNA, 15 bp, Homo sapiens
ttacaaagtaaatct

SEQ ID NO: 698812 - DNA, 15 bp, Homo sapiens
tacaaagtaaatctc

SEQ ID NO: 698813 - DNA, 15 bp, Homo sapiens
acaaagtaaatctcc

SEQ ID NO: 698814 - DNA, 15 bp, Homo sapiens
caaagtaaatctcca

SEQ ID NO: 698815 - DNA, 15 bp, Homo sapiens
aaagtaaatctccaa

SEQ ID NO: 698816 - DNA, 15 bp, Homo sapiens
aagtaaatctccaaa

SEQ ID NO: 698817 - DNA, 15 bp, Homo sapiens
agtaaatctccaaat

SEQ ID NO: 698818 - DNA, 15 bp, Homo sapiens
gtaaatctccaaatg

SEQ ID NO: 698819 - DNA, 15 bp, Homo sapiens
taaatctccaaatgg

SEQ ID NO: 698820 - DNA, 15 bp, Homo sapiens
aaatctccaaatggc

SEQ ID NO: 698821 - DNA, 15 bp, Homo sapiens
aatctccaaatggcc

SEQ ID NO: 698822 - DNA, 15 bp, Homo sapiens
atctccaaatggcca

SEQ ID NO: 698823 - DNA, 15 bp, Homo sapiens
tctccaaatggccaa

SEQ ID NO: 698824 - DNA, 15 bp, Homo sapiens
ctccaaatggccaat

SEQ ID NO: 698825 - DNA, 15 bp, Homo sapiens
tccaaatggccaatt

SEQ ID NO: 698826 - DNA, 15 bp, Homo sapiens
ccaaatggccaattc

SEQ ID NO: 698827 - DNA, 15 bp, Homo sapiens
caaatggccaattcc

SEQ ID NO: 698828 - DNA, 15 bp, Homo sapiens
aaatggccaattccg

SEQ ID NO: 698829 - DNA, 15 bp, Homo sapiens
aatggccaattccgt

SEQ ID NO: 698830 - DNA, 15 bp, Homo sapiens
atggccaattccgtg

SEQ ID NO: 698831 - DNA, 15 bp, Homo sapiens
tggccaattccgtgt

SEQ ID NO: 698832 - DNA, 15 bp, Homo sapiens
ggccaattccgtgtt

SEQ ID NO: 698833 - DNA, 15 bp, Homo sapiens
gccaattccgtgttg

SEQ ID NO: 698834 - DNA, 15 bp, Homo sapiens
ccaattccgtgttgt

SEQ ID NO: 698835 - DNA, 15 bp, Homo sapiens
caattccgtgttgtg

SEQ ID NO: 698836 - DNA, 15 bp, Homo sapiens
aattccgtgttgtga

SEQ ID NO: 698837 - DNA, 15 bp, Homo sapiens
attccgtgttgtgaa

SEQ ID NO: 698838 - DNA, 15 bp, Homo sapiens
ttccgtgttgtgaag

SEQ ID NO: 698839 - DNA, 15 bp, Homo sapiens
tccgtgttgtgaagt

SEQ ID NO: 698840 - DNA, 15 bp, Homo sapiens
ccgtgttgtgaagta

SEQ ID NO: 698841 - DNA, 15 bp, Homo sapiens
cgtgttgtgaagtaa

SEQ ID NO: 698842 - DNA, 15 bp, Homo sapiens
gtgttgtgaagtaaa

SEQ ID NO: 698843 - DNA, 15 bp, Homo sapiens
tgttgtgaagtaaaa

SEQ ID NO: 698844 - DNA, 15 bp, Homo sapiens
gttgtgaagtaaaaa

SEQ ID NO: 698845 - DNA, 15 bp, Homo sapiens
ttgtgaagtaaaaaa

SEQ ID NO: 698846 - DNA, 15 bp, Homo sapiens
tgtgaagtaaaaaat

SEQ ID NO: 698847 - DNA, 15 bp, Homo sapiens
gtgaagtaaaaaatc

SEQ ID NO: 698848 - DNA, 15 bp, Homo sapiens
tgaagtaaaaaatcc

SEQ ID NO: 698849 - DNA, 15 bp, Homo sapiens
gaagtaaaaaatcct

SEQ ID NO: 698850 - DNA, 15 bp, Homo sapiens
aagtaaaaaatcctg

SEQ ID NO: 698851 - DNA, 15 bp, Homo sapiens
agtaaaaaatcctga

SEQ ID NO: 698852 - DNA, 15 bp, Homo sapiens
gtaaaaaatcctgaa

SEQ ID NO: 698853 - DNA, 15 bp, Homo sapiens
taaaaaatcctgaag

SEQ ID NO: 698854 - DNA, 15 bp, Homo sapiens
aaaaaatcctgaagg

SEQ ID NO: 698855 - DNA, 15 bp, Homo sapiens
aaaaatcctgaaggg

SEQ ID NO: 698856 - DNA, 15 bp, Homo sapiens
aaaatcctgaagggt

SEQ ID NO: 698857 - DNA, 15 bp, Homo sapiens
aaatcctgaagggta

SEQ ID NO: 698858 - DNA, 15 bp, Homo sapiens
aatcctgaagggtaa

SEQ ID NO: 698859 - DNA, 15 bp, Homo sapiens
atcctgaagggtaaa

SEQ ID NO: 698860 - DNA, 15 bp, Homo sapiens
tcctgaagggtaaag

SEQ ID NO: 698861 - DNA, 15 bp, Homo sapiens
cctgaagggtaaagt

SEQ ID NO: 698862 - DNA, 15 bp, Homo sapiens
ctgaagggtaaagta

SEQ ID NO: 698863 - DNA, 15 bp, Homo sapiens
tgaagggtaaagtaa

SEQ ID NO: 698864 - DNA, 15 bp, Homo sapiens
gaagggtaaagtaaa

SEQ ID NO: 698865 - DNA, 15 bp, Homo sapiens
aagggtaaagtaaaa

SEQ ID NO: 698866 - DNA, 15 bp, Homo sapiens
agggtaaagtaaaaa

SEQ ID NO: 698867 - DNA, 15 bp, Homo sapiens
gggtaaagtaaaaac

SEQ ID NO: 698868 - DNA, 15 bp, Homo sapiens
ggtaaagtaaaaaca

SEQ ID NO: 698869 - DNA, 15 bp, Homo sapiens
gtaaagtaaaaacaa

SEQ ID NO: 698870 - DNA, 15 bp, Homo sapiens
taaagtaaaaacaaa

SEQ ID NO: 698871 - DNA, 15 bp, Homo sapiens
aaagtaaaaacaaaa

SEQ ID NO: 698872 - DNA, 15 bp, Homo sapiens
aagtaaaaacaaaaa

SEQ ID NO: 698873 - DNA, 15 bp, Homo sapiens
agtaaaaacaaaaag

SEQ ID NO: 698874 - DNA, 15 bp, Homo sapiens
gtaaaaacaaaaagc

SEQ ID NO: 698875 - DNA, 15 bp, Homo sapiens
taaaaacaaaaagca

SEQ ID NO: 698876 - DNA, 15 bp, Homo sapiens
aaaaacaaaaagcaa

SEQ ID NO: 698877 - DNA, 15 bp, Homo sapiens
aaaacaaaaagcaag

SEQ ID NO: 698878 - DNA, 15 bp, Homo sapiens
aaacaaaaagcaagt

SEQ ID NO: 698879 - DNA, 15 bp, Homo sapiens
aacaaaaagcaagtc

SEQ ID NO: 698880 - DNA, 15 bp, Homo sapiens
acaaaaagcaagtct

SEQ ID NO: 698881 - DNA, 15 bp, Homo sapiens
caaaaagcaagtctg

SEQ ID NO: 698882 - DNA, 15 bp, Homo sapiens
aaaaagcaagtctga

SEQ ID NO: 698883 - DNA, 15 bp, Homo sapiens
aaaagcaagtctgac

SEQ ID NO: 698884 - DNA, 15 bp, Homo sapiens
aaagcaagtctgaca

SEQ ID NO: 698885 - DNA, 15 bp, Homo sapiens
aagcaagtctgacat

SEQ ID NO: 698886 - DNA, 15 bp, Homo sapiens
agcaagtctgacatt

SEQ ID NO: 698887 - DNA, 15 bp, Homo sapiens
gcaagtctgacattg

SEQ ID NO: 698888 - DNA, 15 bp, Homo sapiens
caagtctgacattgc

SEQ ID NO: 698889 - DNA, 15 bp, Homo sapiens
aagtctgacattgcc

SEQ ID NO: 698890 - DNA, 15 bp, Homo sapiens
agtctgacattgcca

SEQ ID NO: 698891 - DNA, 15 bp, Homo sapiens
gtctgacattgccaa

SEQ ID NO: 698892 - DNA, 15 bp, Homo sapiens
tctgacattgccaag

SEQ ID NO: 698893 - DNA, 15 bp, Homo sapiens
ctgacattgccaagt

SEQ ID NO: 698894 - DNA, 15 bp, Homo sapiens
tgacattgccaagtt

SEQ ID NO: 698895 - DNA, 15 bp, Homo sapiens
gacattgccaagtta

SEQ ID NO: 698896 - DNA, 15 bp, Homo sapiens
acattgccaagttaa

SEQ ID NO: 698897 - DNA, 15 bp, Homo sapiens
cattgccaagttaat

SEQ ID NO: 698898 - DNA, 15 bp, Homo sapiens
attgccaagttaatc

SEQ ID NO: 698899 - DNA, 15 bp, Homo sapiens
ttgccaagttaatca

SEQ ID NO: 698900 - DNA, 15 bp, Homo sapiens
tgccaagttaatcat

SEQ ID NO: 698901 - DNA, 15 bp, Homo sapiens
gccaagttaatcatg

SEQ ID NO: 698902 - DNA, 15 bp, Homo sapiens
ccaagttaatcatgt

SEQ ID NO: 698903 - DNA, 15 bp, Homo sapiens
caagttaatcatgta

SEQ ID NO: 698904 - DNA, 15 bp, Homo sapiens
aagttaatcatgtaa

SEQ ID NO: 698905 - DNA, 15 bp, Homo sapiens
agttaatcatgtaag

SEQ ID NO: 698906 - DNA, 15 bp, Homo sapiens
gttaatcatgtaagt

SEQ ID NO: 698907 - DNA, 15 bp, Homo sapiens
ttaatcatgtaagtt

SEQ ID NO: 698908 - DNA, 15 bp, Homo sapiens
taatcatgtaagttg

SEQ ID NO: 698909 - DNA, 15 bp, Homo sapiens
aatcatgtaagttgt

SEQ ID NO: 698910 - DNA, 15 bp, Homo sapiens
atcatgtaagttgta

SEQ ID NO: 698911 - DNA, 15 bp, Homo sapiens
tcatgtaagttgtag

SEQ ID NO: 698912 - DNA, 15 bp, Homo sapiens
catgtaagttgtagt

SEQ ID NO: 698913 - DNA, 15 bp, Homo sapiens
atgtaagttgtagtt

SEQ ID NO: 698914 - DNA, 15 bp, Homo sapiens
tgtaagttgtagttt

SEQ ID NO: 698915 - DNA, 15 bp, Homo sapiens
gtaagttgtagtttc

SEQ ID NO: 698916 - DNA, 15 bp, Homo sapiens
taagttgtagtttca

SEQ ID NO: 698917 - DNA, 15 bp, Homo sapiens
aagttgtagtttcat

SEQ ID NO: 698918 - DNA, 15 bp, Homo sapiens
agttgtagtttcatt

SEQ ID NO: 698919 - DNA, 15 bp, Homo sapiens
gttgtagtttcattt

SEQ ID NO: 698920 - DNA, 15 bp, Homo sapiens
ttgtagtttcatttc

SEQ ID NO: 698921 - DNA, 15 bp, Homo sapiens
tgtagtttcatttcg

SEQ ID NO: 698922 - DNA, 15 bp, Homo sapiens
gtagtttcatttcgg

SEQ ID NO: 698923 - DNA, 15 bp, Homo sapiens
tagtttcatttcgga

SEQ ID NO: 698924 - DNA, 15 bp, Homo sapiens
agtttcatttcggac

SEQ ID NO: 698925 - DNA, 15 bp, Homo sapiens
gtttcatttcggact

SEQ ID NO: 698926 - DNA, 15 bp, Homo sapiens
tttcatttcggactt

SEQ ID NO: 698927 - DNA, 15 bp, Homo sapiens
ttcatttcggacttt

SEQ ID NO: 698928 - DNA, 15 bp, Homo sapiens
tcatttcggactttg

SEQ ID NO: 698929 - DNA, 15 bp, Homo sapiens
catttcggactttga

SEQ ID NO: 698930 - DNA, 15 bp, Homo sapiens
atttcggactttgag

SEQ ID NO: 698931 - DNA, 15 bp, Homo sapiens
tttcggactttgagg

SEQ ID NO: 698932 - DNA, 15 bp, Homo sapiens
ttcggactttgagga

SEQ ID NO: 698933 - DNA, 15 bp, Homo sapiens
tcggactttgaggac

SEQ ID NO: 698934 - DNA, 15 bp, Homo sapiens
cggactttgaggacg

SEQ ID NO: 698935 - DNA, 15 bp, Homo sapiens
ggactttgaggacgc

SEQ ID NO: 698936 - DNA, 15 bp, Homo sapiens
gactttgaggacgca

SEQ ID NO: 698937 - DNA, 15 bp, Homo sapiens
actttgaggacgcag

SEQ ID NO: 698938 - DNA, 15 bp, Homo sapiens
ctttgaggacgcaga

SEQ ID NO: 698939 - DNA, 15 bp, Homo sapiens
tttgaggacgcagat

SEQ ID NO: 698940 - DNA, 15 bp, Homo sapiens
ttgaggacgcagatg

SEQ ID NO: 698941 - DNA, 15 bp, Homo sapiens
tgaggacgcagatga

SEQ ID NO: 698942 - DNA, 15 bp, Homo sapiens
gaggacgcagatgaa

SEQ ID NO: 698943 - DNA, 15 bp, Homo sapiens
aggacgcagatgaaa

SEQ ID NO: 698944 - DNA, 15 bp, Homo sapiens
ggacgcagatgaaaa

SEQ ID NO: 698945 - DNA, 15 bp, Homo sapiens
gacgcagatgaaaat

SEQ ID NO: 698946 - DNA, 15 bp, Homo sapiens
acgcagatgaaaatg

SEQ ID NO: 698947 - DNA, 15 bp, Homo sapiens
cgcagatgaaaatgt

SEQ ID NO: 698948 - DNA, 15 bp, Homo sapiens
gcagatgaaaatgta

SEQ ID NO: 698949 - DNA, 15 bp, Homo sapiens
cagatgaaaatgtat

SEQ ID NO: 698950 - DNA, 15 bp, Homo sapiens
agatgaaaatgtata

SEQ ID NO: 698951 - DNA, 15 bp, Homo sapiens
gatgaaaatgtatat

SEQ ID NO: 698952 - DNA, 15 bp, Homo sapiens
atgaaaatgtatatg

SEQ ID NO: 698953 - DNA, 15 bp, Homo sapiens
tgaaaatgtatatgg

SEQ ID NO: 698954 - DNA, 15 bp, Homo sapiens
gaaaatgtatatggc

SEQ ID NO: 698955 - DNA, 15 bp, Homo sapiens
aaaatgtatatggca

SEQ ID NO: 698956 - DNA, 15 bp, Homo sapiens
aaatgtatatggcaa

SEQ ID NO: 698957 - DNA, 15 bp, Homo sapiens
aatgtatatggcaac

SEQ ID NO: 698958 - DNA, 15 bp, Homo sapiens
atgtatatggcaaca

SEQ ID NO: 698959 - DNA, 15 bp, Homo sapiens
tgtatatggcaacac

SEQ ID NO: 698960 - DNA, 15 bp, Homo sapiens
gtatatggcaacaca

SEQ ID NO: 698961 - DNA, 15 bp, Homo sapiens
tatatggcaacacaa

SEQ ID NO: 698962 - DNA, 15 bp, Homo sapiens
atatggcaacacaat

SEQ ID NO: 698963 - DNA, 15 bp, Homo sapiens
tatggcaacacaatt

SEQ ID NO: 698964 - DNA, 15 bp, Homo sapiens
atggcaacacaattg

SEQ ID NO: 698965 - DNA, 15 bp, Homo sapiens
tggcaacacaattgg

SEQ ID NO: 698966 - DNA, 15 bp, Homo sapiens
ggcaacacaattgga

SEQ ID NO: 698967 - DNA, 15 bp, Homo sapiens
gcaacacaattggat

SEQ ID NO: 698968 - DNA, 15 bp, Homo sapiens
caacacaattggata

SEQ ID NO: 698969 - DNA, 15 bp, Homo sapiens
aacacaattggatat

SEQ ID NO: 698970 - DNA, 15 bp, Homo sapiens
acacaattggatatt

SEQ ID NO: 698971 - DNA, 15 bp, Homo sapiens
cacaattggatatta

SEQ ID NO: 698972 - DNA, 15 bp, Homo sapiens
acaattggatattaa

SEQ ID NO: 698973 - DNA, 15 bp, Homo sapiens
caattggatattaac

SEQ ID NO: 698974 - DNA, 15 bp, Homo sapiens
aattggatattaacc

SEQ ID NO: 698975 - DNA, 15 bp, Homo sapiens
attggatattaaccc

SEQ ID NO: 698976 - DNA, 15 bp, Homo sapiens
ttggatattaaccca

SEQ ID NO: 698977 - DNA, 15 bp, Homo sapiens
tggatattaacccaa

SEQ ID NO: 698978 - DNA, 15 bp, Homo sapiens
ggatattaacccaag

SEQ ID NO: 698979 - DNA, 15 bp, Homo sapiens
gatattaacccaagc

SEQ ID NO: 698980 - DNA, 15 bp, Homo sapiens
atattaacccaagca

SEQ ID NO: 698981 - DNA, 15 bp, Homo sapiens
tattaacccaagcac

SEQ ID NO: 698982 - DNA, 15 bp, Homo sapiens
attaacccaagcaca

SEQ ID NO: 698983 - DNA, 15 bp, Homo sapiens
ttaacccaagcacaa

SEQ ID NO: 698984 - DNA, 15 bp, Homo sapiens
taacccaagcacaaa

SEQ ID NO: 698985 - DNA, 15 bp, Homo sapiens
aacccaagcacaaac

SEQ ID NO: 698986 - DNA, 15 bp, Homo sapiens
acccaagcacaaaca

SEQ ID NO: 698987 - DNA, 15 bp, Homo sapiens
cccaagcacaaacac

SEQ ID NO: 698988 - DNA, 15 bp, Homo sapiens
ccaagcacaaacacc

SEQ ID NO: 698989 - DNA, 15 bp, Homo sapiens
caagcacaaacacca

SEQ ID NO: 698990 - DNA, 15 bp, Homo sapiens
aagcacaaacaccat

SEQ ID NO: 698991 - DNA, 15 bp, Homo sapiens
agcacaaacaccatg

SEQ ID NO: 698992 - DNA, 15 bp, Homo sapiens
gcacaaacaccatgc

SEQ ID NO: 698993 - DNA, 15 bp, Homo sapiens
cacaaacaccatgct

SEQ ID NO: 698994 - DNA, 15 bp, Homo sapiens
acaaacaccatgctg

SEQ ID NO: 698995 - DNA, 15 bp, Homo sapiens
caaacaccatgctga

SEQ ID NO: 698996 - DNA, 15 bp, Homo sapiens
aaacaccatgctgaa

SEQ ID NO: 698997 - DNA, 15 bp, Homo sapiens
aacaccatgctgaac

SEQ ID NO: 698998 - DNA, 15 bp, Homo sapiens
acaccatgctgaaca

SEQ ID NO: 698999 - DNA, 15 bp, Homo sapiens
caccatgctgaacat

SEQ ID NO: 699000 - DNA, 15 bp, Homo sapiens
accatgctgaacatg

SEQ ID NO: 699001 - DNA, 15 bp, Homo sapiens
ccatgctgaacatgc

SEQ ID NO: 699002 - DNA, 15 bp, Homo sapiens
catgctgaacatgca

SEQ ID NO: 699003 - DNA, 15 bp, Homo sapiens
atgctgaacatgcac

SEQ ID NO: 699004 - DNA, 15 bp, Homo sapiens
tgctgaacatgcacc

SEQ ID NO: 699005 - DNA, 15 bp, Homo sapiens
gctgaacatgcaccc

SEQ ID NO: 699006 - DNA, 15 bp, Homo sapiens
ctgaacatgcaccca

SEQ ID NO: 699007 - DNA, 15 bp, Homo sapiens
tgaacatgcacccat

SEQ ID NO: 699008 - DNA, 15 bp, Homo sapiens
gaacatgcacccata

SEQ ID NO: 699009 - DNA, 15 bp, Homo sapiens
aacatgcacccatac

SEQ ID NO: 699010 - DNA, 15 bp, Homo sapiens
acatgcacccataca

SEQ ID NO: 699011 - DNA, 15 bp, Homo sapiens
catgcacccatacaa

SEQ ID NO: 699012 - DNA, 15 bp, Homo sapiens
atgcacccatacaaa

SEQ ID NO: 699013 - DNA, 15 bp, Homo sapiens
tgcacccatacaaag

SEQ ID NO: 699014 - DNA, 15 bp, Homo sapiens
gcacccatacaaagt

SEQ ID NO: 699015 - DNA, 15 bp, Homo sapiens
cacccatacaaagtg

SEQ ID NO: 699016 - DNA, 15 bp, Homo sapiens
acccatacaaagtgt

SEQ ID NO: 699017 - DNA, 15 bp, Homo sapiens
cccatacaaagtgta

SEQ ID NO: 699018 - DNA, 15 bp, Homo sapiens
ccatacaaagtgtac

SEQ ID NO: 699019 - DNA, 15 bp, Homo sapiens
catacaaagtgtact

SEQ ID NO: 699020 - DNA, 15 bp, Homo sapiens
atacaaagtgtactt

SEQ ID NO: 699021 - DNA, 15 bp, Homo sapiens
tacaaagtgtactta

SEQ ID NO: 699022 - DNA, 15 bp, Homo sapiens
acaaagtgtacttaa

SEQ ID NO: 699023 - DNA, 15 bp, Homo sapiens
caaagtgtacttaaa

SEQ ID NO: 699024 - DNA, 15 bp, Homo sapiens
aaagtgtacttaaag

SEQ ID NO: 699025 - DNA, 15 bp, Homo sapiens
aagtgtacttaaagg

SEQ ID NO: 699026 - DNA, 15 bp, Homo sapiens
agtgtacttaaagga

SEQ ID NO: 699027 - DNA, 15 bp, Homo sapiens
gtgtacttaaaggag

SEQ ID NO: 699028 - DNA, 15 bp, Homo sapiens
tgtacttaaaggagt

SEQ ID NO: 699029 - DNA, 15 bp, Homo sapiens
gtacttaaaggagtc

SEQ ID NO: 699030 - DNA, 15 bp, Homo sapiens
tacttaaaggagtca

SEQ ID NO: 699031 - DNA, 15 bp, Homo sapiens
acttaaaggagtcat

SEQ ID NO: 699032 - DNA, 15 bp, Homo sapiens
cttaaaggagtcatt

SEQ ID NO: 699033 - DNA, 15 bp, Homo sapiens
ttaaaggagtcatta

SEQ ID NO: 699034 - DNA, 15 bp, Homo sapiens
taaaggagtcattat

SEQ ID NO: 699035 - DNA, 15 bp, Homo sapiens
aaaggagtcattata

SEQ ID NO: 699036 - DNA, 15 bp, Homo sapiens
aaggagtcattatag

SEQ ID NO: 699037 - DNA, 15 bp, Homo sapiens
aggagtcattataga

SEQ ID NO: 699038 - DNA, 15 bp, Homo sapiens
ggagtcattatagaa

SEQ ID NO: 699039 - DNA, 15 bp, Homo sapiens
gagtcattatagaag

SEQ ID NO: 699040 - DNA, 15 bp, Homo sapiens
agtcattatagaagc

SEQ ID NO: 699041 - DNA, 15 bp, Homo sapiens
gtcattatagaagca

SEQ ID NO: 699042 - DNA, 15 bp, Homo sapiens
tcattatagaagcag

SEQ ID NO: 699043 - DNA, 15 bp, Homo sapiens
cattatagaagcagt

SEQ ID NO: 699044 - DNA, 15 bp, Homo sapiens
attatagaagcagtg

SEQ ID NO: 699045 - DNA, 15 bp, Homo sapiens
ttatagaagcagtgg

SEQ ID NO: 699046 - DNA, 15 bp, Homo sapiens
tatagaagcagtggg

SEQ ID NO: 699047 - DNA, 15 bp, Homo sapiens
atagaagcagtggga

SEQ ID NO: 699048 - DNA, 15 bp, Homo sapiens
tagaagcagtgggag

SEQ ID NO: 699049 - DNA, 15 bp, Homo sapiens
agaagcagtgggagc

SEQ ID NO: 699050 - DNA, 15 bp, Homo sapiens
gaagcagtgggagct

SEQ ID NO: 699051 - DNA, 15 bp, Homo sapiens
aagcagtgggagctg

SEQ ID NO: 699052 - DNA, 15 bp, Homo sapiens
agcagtgggagctgt

SEQ ID NO: 699053 - DNA, 15 bp, Homo sapiens
gcagtgggagctgtt

SEQ ID NO: 699054 - DNA, 15 bp, Homo sapiens
cagtgggagctgtta

SEQ ID NO: 699055 - DNA, 15 bp, Homo sapiens
agtgggagctgttaa

SEQ ID NO: 699056 - DNA, 15 bp, Homo sapiens
gtgggagctgttaac

SEQ ID NO: 699057 - DNA, 15 bp, Homo sapiens
tgggagctgttaacg

SEQ ID NO: 699058 - DNA, 15 bp, Homo sapiens
gggagctgttaacgc

SEQ ID NO: 699059 - DNA, 15 bp, Homo sapiens
ggagctgttaacgct

SEQ ID NO: 699060 - DNA, 15 bp, Homo sapiens
gagctgttaacgctt

SEQ ID NO: 699061 - DNA, 15 bp, Homo sapiens
agctgttaacgctta

SEQ ID NO: 699062 - DNA, 15 bp, Homo sapiens
gctgttaacgcttac

SEQ ID NO: 699063 - DNA, 15 bp, Homo sapiens
ctgttaacgcttacc

SEQ ID NO: 699064 - DNA, 15 bp, Homo sapiens
tgttaacgcttacca

SEQ ID NO: 699065 - DNA, 15 bp, Homo sapiens
gttaacgcttaccat

SEQ ID NO: 699066 - DNA, 15 bp, Homo sapiens
ttaacgcttaccatc

SEQ ID NO: 699067 - DNA, 15 bp, Homo sapiens
taacgcttaccatcg

SEQ ID NO: 699068 - DNA, 15 bp, Homo sapiens
aacgcttaccatcgt

SEQ ID NO: 699069 - DNA, 15 bp, Homo sapiens
acgcttaccatcgta

SEQ ID NO: 699070 - DNA, 15 bp, Homo sapiens
cgcttaccatcgtaa

SEQ ID NO: 699071 - DNA, 15 bp, Homo sapiens
gcttaccatcgtaaa

SEQ ID NO: 699072 - DNA, 15 bp, Homo sapiens
cttaccatcgtaaag

SEQ ID NO: 699073 - DNA, 15 bp, Homo sapiens
ttaccatcgtaaagg

SEQ ID NO: 699074 - DNA, 15 bp, Homo sapiens
taccatcgtaaaggc

SEQ ID NO: 699075 - DNA, 15 bp, Homo sapiens
accatcgtaaaggca

SEQ ID NO: 699076 - DNA, 15 bp, Homo sapiens
ccatcgtaaaggcac

SEQ ID NO: 699077 - DNA, 15 bp, Homo sapiens
catcgtaaaggcacg

SEQ ID NO: 699078 - DNA, 15 bp, Homo sapiens
atcgtaaaggcacgt

SEQ ID NO: 699079 - DNA, 15 bp, Homo sapiens
tcgtaaaggcacgtc

SEQ ID NO: 699080 - DNA, 15 bp, Homo sapiens
cgtaaaggcacgtcc

SEQ ID NO: 699081 - DNA, 15 bp, Homo sapiens
gtaaaggcacgtcca

SEQ ID NO: 699082 - DNA, 15 bp, Homo sapiens
taaaggcacgtccaa

SEQ ID NO: 699083 - DNA, 15 bp, Homo sapiens
aaaggcacgtccaat

SEQ ID NO: 699084 - DNA, 15 bp, Homo sapiens
aaggcacgtccaatt

SEQ ID NO: 699085 - DNA, 15 bp, Homo sapiens
aggcacgtccaattt

SEQ ID NO: 699086 - DNA, 15 bp, Homo sapiens
ggcacgtccaatttt

SEQ ID NO: 699087 - DNA, 15 bp, Homo sapiens
gcacgtccaattttc

SEQ ID NO: 699088 - DNA, 15 bp, Homo sapiens
cacgtccaattttca

SEQ ID NO: 699089 - DNA, 15 bp, Homo sapiens
acgtccaattttcag

SEQ ID NO: 699090 - DNA, 15 bp, Homo sapiens
cgtccaattttcagt

SEQ ID NO: 699091 - DNA, 15 bp, Homo sapiens
gtccaattttcagtt

SEQ ID NO: 699092 - DNA, 15 bp, Homo sapiens
tccaattttcagttt

SEQ ID NO: 699093 - DNA, 15 bp, Homo sapiens
ccaattttcagtttg

SEQ ID NO: 699094 - DNA, 15 bp, Homo sapiens
caattttcagtttgg

SEQ ID NO: 699095 - DNA, 15 bp, Homo sapiens
aattttcagtttgga

SEQ ID NO: 699096 - DNA, 15 bp, Homo sapiens
attttcagtttggaa

SEQ ID NO: 699097 - DNA, 15 bp, Homo sapiens
ttttcagtttggaag

SEQ ID NO: 699098 - DNA, 15 bp, Homo sapiens
tttcagtttggaagc

SEQ ID NO: 699099 - DNA, 15 bp, Homo sapiens
ttcagtttggaagca

SEQ ID NO: 699100 - DNA, 15 bp, Homo sapiens
tcagtttggaagcac

SEQ ID NO: 699101 - DNA, 15 bp, Homo sapiens
cagtttggaagcact

SEQ ID NO: 699102 - DNA, 15 bp, Homo sapiens
agtttggaagcactt

SEQ ID NO: 699103 - DNA, 15 bp, Homo sapiens
gtttggaagcacttt

SEQ ID NO: 699104 - DNA, 15 bp, Homo sapiens
tttggaagcactttc

SEQ ID NO: 699105 - DNA, 15 bp, Homo sapiens
ttggaagcactttca

SEQ ID NO: 699106 - DNA, 15 bp, Homo sapiens
tggaagcactttcat

SEQ ID NO: 699107 - DNA, 15 bp, Homo sapiens
ggaagcactttcatc

SEQ ID NO: 699108 - DNA, 15 bp, Homo sapiens
gaagcactttcatca

SEQ ID NO: 699109 - DNA, 15 bp, Homo sapiens
aagcactttcatcag

SEQ ID NO: 699110 - DNA, 15 bp, Homo sapiens
agcactttcatcagc

SEQ ID NO: 699111 - DNA, 15 bp, Homo sapiens
gcactttcatcagct

SEQ ID NO: 699112 - DNA, 15 bp, Homo sapiens
cactttcatcagctg

SEQ ID NO: 699113 - DNA, 15 bp, Homo sapiens
actttcatcagctgc

SEQ ID NO: 699114 - DNA, 15 bp, Homo sapiens
ctttcatcagctgca

SEQ ID NO: 699115 - DNA, 15 bp, Homo sapiens
tttcatcagctgcag

SEQ ID NO: 699116 - DNA, 15 bp, Homo sapiens
ttcatcagctgcagt

SEQ ID NO: 699117 - DNA, 15 bp, Homo sapiens
tcatcagctgcagtc

SEQ ID NO: 699118 - DNA, 15 bp, Homo sapiens
catcagctgcagtct

SEQ ID NO: 699119 - DNA, 15 bp, Homo sapiens
atcagctgcagtctc

SEQ ID NO: 699120 - DNA, 15 bp, Homo sapiens
tcagctgcagtctcc

SEQ ID NO: 699121 - DNA, 15 bp, Homo sapiens
cagctgcagtctcct

SEQ ID NO: 699122 - DNA, 15 bp, Homo sapiens
agctgcagtctcctt

SEQ ID NO: 699123 - DNA, 15 bp, Homo sapiens
gctgcagtctccttt

SEQ ID NO: 699124 - DNA, 15 bp, Homo sapiens
ctgcagtctcctttg

SEQ ID NO: 699125 - DNA, 15 bp, Homo sapiens
tgcagtctcctttgg

SEQ ID NO: 699126 - DNA, 15 bp, Homo sapiens
gcagtctcctttggg

SEQ ID NO: 699127 - DNA, 15 bp, Homo sapiens
cagtctcctttggga

SEQ ID NO: 699128 - DNA, 15 bp, Homo sapiens
agtctcctttgggat

SEQ ID NO: 699129 - DNA, 15 bp, Homo sapiens
gtctcctttgggatt

SEQ ID NO: 699130 - DNA, 15 bp, Homo sapiens
tctcctttgggattc

SEQ ID NO: 699131 - DNA, 15 bp, Homo sapiens
ctcctttgggattca

SEQ ID NO: 699132 - DNA, 15 bp, Homo sapiens
tcctttgggattcag

SEQ ID NO: 699133 - DNA, 15 bp, Homo sapiens
cctttgggattcaga

SEQ ID NO: 699134 - DNA, 15 bp, Homo sapiens
ctttgggattcagat

SEQ ID NO: 699135 - DNA, 15 bp, Homo sapiens
tttgggattcagatt

SEQ ID NO: 699136 - DNA, 15 bp, Homo sapiens
ttgggattcagatta

SEQ ID NO: 699137 - DNA, 15 bp, Homo sapiens
tgggattcagattat

SEQ ID NO: 699138 - DNA, 15 bp, Homo sapiens
gggattcagattata

SEQ ID NO: 699139 - DNA, 15 bp, Homo sapiens
ggattcagattataa

SEQ ID NO: 699140 - DNA, 15 bp, Homo sapiens
gattcagattataac

SEQ ID NO: 699141 - DNA, 15 bp, Homo sapiens
attcagattataacc

SEQ ID NO: 699142 - DNA, 15 bp, Homo sapiens
ttcagattataacct

SEQ ID NO: 699143 - DNA, 15 bp, Homo sapiens
tcagattataacctc

SEQ ID NO: 699144 - DNA, 15 bp, Homo sapiens
cagattataacctct

SEQ ID NO: 699145 - DNA, 15 bp, Homo sapiens
agattataacctcta

SEQ ID NO: 699146 - DNA, 15 bp, Homo sapiens
gattataacctctat

SEQ ID NO: 699147 - DNA, 15 bp, Homo sapiens
attataacctctata

SEQ ID NO: 699148 - DNA, 15 bp, Homo sapiens
ttataacctctataa

SEQ ID NO: 699149 - DNA, 15 bp, Homo sapiens
tataacctctataac

SEQ ID NO: 699150 - DNA, 15 bp, Homo sapiens
ataacctctataacc

SEQ ID NO: 699151 - DNA, 15 bp, Homo sapiens
taacctctataacct

SEQ ID NO: 699152 - DNA, 15 bp, Homo sapiens
aacctctataacctc

SEQ ID NO: 699153 - DNA, 15 bp, Homo sapiens
acctctataacctcc

SEQ ID NO: 699154 - DNA, 15 bp, Homo sapiens
cctctataacctcca

SEQ ID NO: 699155 - DNA, 15 bp, Homo sapiens
ctctataacctccaa

SEQ ID NO: 699156 - DNA, 15 bp, Homo sapiens
tctataacctccaat

SEQ ID NO: 699157 - DNA, 15 bp, Homo sapiens
ctataacctccaatt

SEQ ID NO: 699158 - DNA, 15 bp, Homo sapiens
tataacctccaattt

SEQ ID NO: 699159 - DNA, 15 bp, Homo sapiens
ataacctccaattta

SEQ ID NO: 699160 - DNA, 15 bp, Homo sapiens
taacctccaatttat

SEQ ID NO: 699161 - DNA, 15 bp, Homo sapiens
aacctccaatttatt

SEQ ID NO: 699162 - DNA, 15 bp, Homo sapiens
acctccaatttattt

SEQ ID NO: 699163 - DNA, 15 bp, Homo sapiens
cctccaatttatttg

SEQ ID NO: 699164 - DNA, 15 bp, Homo sapiens
ctccaatttatttgc

SEQ ID NO: 699165 - DNA, 15 bp, Homo sapiens
tccaatttatttgca

SEQ ID NO: 699166 - DNA, 15 bp, Homo sapiens
ccaatttatttgcaa

SEQ ID NO: 699167 - DNA, 15 bp, Homo sapiens
caatttatttgcaaa

SEQ ID NO: 699168 - DNA, 15 bp, Homo sapiens
aatttatttgcaaat

SEQ ID NO: 699169 - DNA, 15 bp, Homo sapiens
atttatttgcaaatt

SEQ ID NO: 699170 - DNA, 15 bp, Homo sapiens
tttatttgcaaatta

SEQ ID NO: 699171 - DNA, 15 bp, Homo sapiens
ttatttgcaaattat

SEQ ID NO: 699172 - DNA, 15 bp, Homo sapiens
tatttgcaaattatc

SEQ ID NO: 699173 - DNA, 15 bp, Homo sapiens
atttgcaaattatct

SEQ ID NO: 699174 - DNA, 15 bp, Homo sapiens
tttgcaaattatctg

SEQ ID NO: 699175 - DNA, 15 bp, Homo sapiens
ttgcaaattatctgg

SEQ ID NO: 699176 - DNA, 15 bp, Homo sapiens
tgcaaattatctgga

SEQ ID NO: 699177 - DNA, 15 bp, Homo sapiens
gcaaattatctggat

SEQ ID NO: 699178 - DNA, 15 bp, Homo sapiens
caaattatctggatc

SEQ ID NO: 699179 - DNA, 15 bp, Homo sapiens
aaattatctggatct

SEQ ID NO: 699180 - DNA, 15 bp, Homo sapiens
aattatctggatctt

SEQ ID NO: 699181 - DNA, 15 bp, Homo sapiens
attatctggatcttt

SEQ ID NO: 699182 - DNA, 15 bp, Homo sapiens
ttatctggatctttg

SEQ ID NO: 699183 - DNA, 15 bp, Homo sapiens
tatctggatctttgg

SEQ ID NO: 699184 - DNA, 15 bp, Homo sapiens
atctggatctttgga

SEQ ID NO: 699185 - DNA, 15 bp, Homo sapiens
tctggatctttggat

SEQ ID NO: 699186 - DNA, 15 bp, Homo sapiens
ctggatctttggatg

SEQ ID NO: 699187 - DNA, 15 bp, Homo sapiens
tggatctttggatgg

SEQ ID NO: 699188 - DNA, 15 bp, Homo sapiens
ggatctttggatggt

SEQ ID NO: 699189 - DNA, 15 bp, Homo sapiens
gatctttggatggtt

SEQ ID NO: 699190 - DNA, 15 bp, Homo sapiens
atctttggatggttt

SEQ ID NO: 699191 - DNA, 15 bp, Homo sapiens
tctttggatggtttt

SEQ ID NO: 699192 - DNA, 15 bp, Homo sapiens
ctttggatggtttta

SEQ ID NO: 699193 - DNA, 15 bp, Homo sapiens
tttggatggttttat

SEQ ID NO: 699194 - DNA, 15 bp, Homo sapiens
ttggatggttttata

SEQ ID NO: 699195 - DNA, 15 bp, Homo sapiens
tggatggttttataa

SEQ ID NO: 699196 - DNA, 15 bp, Homo sapiens
ggatggttttataaa

SEQ ID NO: 699197 - DNA, 15 bp, Homo sapiens
gatggttttataaat

SEQ ID NO: 699198 - DNA, 15 bp, Homo sapiens
atggttttataaata

SEQ ID NO: 699199 - DNA, 15 bp, Homo sapiens
tggttttataaatat

SEQ ID NO: 699200 - DNA, 15 bp, Homo sapiens
ggttttataaatatt

SEQ ID NO: 699201 - DNA, 15 bp, Homo sapiens
gttttataaatattt

SEQ ID NO: 699202 - DNA, 15 bp, Homo sapiens
ttttataaatatttc

SEQ ID NO: 699203 - DNA, 15 bp, Homo sapiens
tttataaatatttcc

SEQ ID NO: 699204 - DNA, 15 bp, Homo sapiens
ttataaatatttcct

SEQ ID NO: 699205 - DNA, 15 bp, Homo sapiens
tataaatatttcctt

SEQ ID NO: 699206 - DNA, 15 bp, Homo sapiens
ataaatatttccttt

SEQ ID NO: 699207 - DNA, 15 bp, Homo sapiens
taaatatttcctttt

SEQ ID NO: 699208 - DNA, 15 bp, Homo sapiens
aaatatttccttttt

SEQ ID NO: 699209 - DNA, 15 bp, Homo sapiens
aatatttcctttttc

SEQ ID NO: 699210 - DNA, 15 bp, Homo sapiens
atatttcctttttct

SEQ ID NO: 699211 - DNA, 15 bp, Homo sapiens
tatttcctttttctc

SEQ ID NO: 699212 - DNA, 15 bp, Homo sapiens
atttcctttttctca

SEQ ID NO: 699213 - DNA, 15 bp, Homo sapiens
tttcctttttctcag

SEQ ID NO: 699214 - DNA, 15 bp, Homo sapiens
ttcctttttctcaga

SEQ ID NO: 699215 - DNA, 15 bp, Homo sapiens
tcctttttctcagaa

SEQ ID NO: 699216 - DNA, 15 bp, Homo sapiens
cctttttctcagaaa

SEQ ID NO: 699217 - DNA, 15 bp, Homo sapiens
ctttttctcagaaat

SEQ ID NO: 699218 - DNA, 15 bp, Homo sapiens
tttttctcagaaata

SEQ ID NO: 699219 - DNA, 15 bp, Homo sapiens
ttttctcagaaatac

SEQ ID NO: 699220 - DNA, 15 bp, Homo sapiens
tttctcagaaatacc

SEQ ID NO: 699221 - DNA, 15 bp, Homo sapiens
ttctcagaaataccc

SEQ ID NO: 699222 - DNA, 15 bp, Homo sapiens
tctcagaaataccca

SEQ ID NO: 699223 - DNA, 15 bp, Homo sapiens
ctcagaaatacccaa

SEQ ID NO: 699224 - DNA, 15 bp, Homo sapiens
tcagaaatacccaaa

SEQ ID NO: 699225 - DNA, 15 bp, Homo sapiens
cagaaatacccaaaa

SEQ ID NO: 699226 - DNA, 15 bp, Homo sapiens
agaaatacccaaaag

SEQ ID NO: 699227 - DNA, 15 bp, Homo sapiens
gaaatacccaaaaga

SEQ ID NO: 699228 - DNA, 15 bp, Homo sapiens
aaatacccaaaagaa

SEQ ID NO: 699229 - DNA, 15 bp, Homo sapiens
aatacccaaaagaaa

SEQ ID NO: 699230 - DNA, 15 bp, Homo sapiens
atacccaaaagaaac

SEQ ID NO: 699231 - DNA, 15 bp, Homo sapiens
tacccaaaagaaaca

SEQ ID NO: 699232 - DNA, 15 bp, Homo sapiens
acccaaaagaaacat

SEQ ID NO: 699233 - DNA, 15 bp, Homo sapiens
cccaaaagaaacatg

SEQ ID NO: 699234 - DNA, 15 bp, Homo sapiens
ccaaaagaaacatga

SEQ ID NO: 699235 - DNA, 15 bp, Homo sapiens
caaaagaaacatgaa

SEQ ID NO: 699236 - DNA, 15 bp, Homo sapiens
aaaagaaacatgaaa

SEQ ID NO: 699237 - DNA, 15 bp, Homo sapiens
aaagaaacatgaaat

SEQ ID NO: 699238 - DNA, 15 bp, Homo sapiens
aagaaacatgaaatt

SEQ ID NO: 699239 - DNA, 15 bp, Homo sapiens
agaaacatgaaattt

SEQ ID NO: 699240 - DNA, 15 bp, Homo sapiens
gaaacatgaaatttg

SEQ ID NO: 699241 - DNA, 15 bp, Homo sapiens
aaacatgaaatttgt

SEQ ID NO: 699242 - DNA, 15 bp, Homo sapiens
aacatgaaatttgtt

SEQ ID NO: 699243 - DNA, 15 bp, Homo sapiens
acatgaaatttgttg

SEQ ID NO: 699244 - DNA, 15 bp, Homo sapiens
catgaaatttgttgc

SEQ ID NO: 699245 - DNA, 15 bp, Homo sapiens
atgaaatttgttgct

SEQ ID NO: 699246 - DNA, 15 bp, Homo sapiens
tgaaatttgttgctg

SEQ ID NO: 699247 - DNA, 15 bp, Homo sapiens
gaaatttgttgctgt

SEQ ID NO: 699248 - DNA, 15 bp, Homo sapiens
aaatttgttgctgta

SEQ ID NO: 699249 - DNA, 15 bp, Homo sapiens
aatttgttgctgtaa

SEQ ID NO: 699250 - DNA, 15 bp, Homo sapiens
atttgttgctgtaaa

SEQ ID NO: 699251 - DNA, 15 bp, Homo sapiens
tttgttgctgtaaaa

SEQ ID NO: 699252 - DNA, 15 bp, Homo sapiens
ttgttgctgtaaaat

SEQ ID NO: 699253 - DNA, 15 bp, Homo sapiens
tgttgctgtaaaatt

SEQ ID NO: 699254 - DNA, 15 bp, Homo sapiens
gttgctgtaaaattt

SEQ ID NO: 699255 - DNA, 15 bp, Homo sapiens
ttgctgtaaaatttc

SEQ ID NO: 699256 - DNA, 15 bp, Homo sapiens
tgctgtaaaatttcc

SEQ ID NO: 699257 - DNA, 15 bp, Homo sapiens
gctgtaaaatttccg

SEQ ID NO: 699258 - DNA, 15 bp, Homo sapiens
ctgtaaaatttccgc

SEQ ID NO: 699259 - DNA, 15 bp, Homo sapiens
tgtaaaatttccgct

SEQ ID NO: 699260 - DNA, 15 bp, Homo sapiens
gtaaaatttccgctg

SEQ ID NO: 699261 - DNA, 15 bp, Homo sapiens
taaaatttccgctgg

SEQ ID NO: 699262 - DNA, 15 bp, Homo sapiens
aaaatttccgctggg

SEQ ID NO: 699263 - DNA, 15 bp, Homo sapiens
aaatttccgctgggt

SEQ ID NO: 699264 - DNA, 15 bp, Homo sapiens
aatttccgctgggtt

SEQ ID NO: 699265 - DNA, 15 bp, Homo sapiens
atttccgctgggttc

SEQ ID NO: 699266 - DNA, 15 bp, Homo sapiens
tttccgctgggttct

SEQ ID NO: 699267 - DNA, 15 bp, Homo sapiens
ttccgctgggttctt

SEQ ID NO: 699268 - DNA, 15 bp, Homo sapiens
tccgctgggttcttc

SEQ ID NO: 699269 - DNA, 15 bp, Homo sapiens
ccgctgggttcttca

SEQ ID NO: 699270 - DNA, 15 bp, Homo sapiens
cgctgggttcttcaa

SEQ ID NO: 699271 - DNA, 15 bp, Homo sapiens
gctgggttcttcaac

SEQ ID NO: 699272 - DNA, 15 bp, Homo sapiens
ctgggttcttcaaca

SEQ ID NO: 699273 - DNA, 15 bp, Homo sapiens
tgggttcttcaacag

SEQ ID NO: 699274 - DNA, 15 bp, Homo sapiens
gggttcttcaacagg

SEQ ID NO: 699275 - DNA, 15 bp, Homo sapiens
ggttcttcaacagga

SEQ ID NO: 699276 - DNA, 15 bp, Homo sapiens
gttcttcaacaggaa

SEQ ID NO: 699277 - DNA, 15 bp, Homo sapiens
ttcttcaacaggaaa

SEQ ID NO: 699278 - DNA, 15 bp, Homo sapiens
tcttcaacaggaaaa

SEQ ID NO: 699279 - DNA, 15 bp, Homo sapiens
cttcaacaggaaaat

SEQ ID NO: 699280 - DNA, 15 bp, Homo sapiens
ttcaacaggaaaata

SEQ ID NO: 699281 - DNA, 15 bp, Homo sapiens
tcaacaggaaaatat

SEQ ID NO: 699282 - DNA, 15 bp, Homo sapiens
caacaggaaaatatt

SEQ ID NO: 699283 - DNA, 15 bp, Homo sapiens
aacaggaaaatattt

SEQ ID NO: 699284 - DNA, 15 bp, Homo sapiens
acaggaaaatatttt

SEQ ID NO: 699285 - DNA, 15 bp, Homo sapiens
caggaaaatattttc

SEQ ID NO: 699286 - DNA, 15 bp, Homo sapiens
aggaaaatattttca

SEQ ID NO: 699287 - DNA, 15 bp, Homo sapiens
ggaaaatattttcat

SEQ ID NO: 699288 - DNA, 15 bp, Homo sapiens
gaaaatattttcatt

SEQ ID NO: 699289 - DNA, 15 bp, Homo sapiens
aaaatattttcattt

SEQ ID NO: 699290 - DNA, 15 bp, Homo sapiens
aaatattttcatttg

SEQ ID NO: 699291 - DNA, 15 bp, Homo sapiens
aatattttcatttgt

SEQ ID NO: 699292 - DNA, 15 bp, Homo sapiens
atattttcatttgtt

SEQ ID NO: 699293 - DNA, 15 bp, Homo sapiens
tattttcatttgtta

SEQ ID NO: 699294 - DNA, 15 bp, Homo sapiens
attttcatttgttag

SEQ ID NO: 699295 - DNA, 15 bp, Homo sapiens
ttttcatttgttagt

SEQ ID NO: 699296 - DNA, 15 bp, Homo sapiens
tttcatttgttagtc

SEQ ID NO: 699297 - DNA, 15 bp, Homo sapiens
ttcatttgttagtct

SEQ ID NO: 699298 - DNA, 15 bp, Homo sapiens
tcatttgttagtctt

SEQ ID NO: 699299 - DNA, 15 bp, Homo sapiens
catttgttagtcttt

SEQ ID NO: 699300 - DNA, 15 bp, Homo sapiens
atttgttagtcttta

SEQ ID NO: 699301 - DNA, 15 bp, Homo sapiens
tttgttagtctttag

SEQ ID NO: 699302 - DNA, 15 bp, Homo sapiens
ttgttagtctttaga

SEQ ID NO: 699303 - DNA, 15 bp, Homo sapiens
tgttagtctttagaa

SEQ ID NO: 699304 - DNA, 15 bp, Homo sapiens
gttagtctttagaaa

SEQ ID NO: 699305 - DNA, 15 bp, Homo sapiens
ttagtctttagaaaa

SEQ ID NO: 699306 - DNA, 15 bp, Homo sapiens
tagtctttagaaaat

SEQ ID NO: 699307 - DNA, 15 bp, Homo sapiens
agtctttagaaaatc

SEQ ID NO: 699308 - DNA, 15 bp, Homo sapiens
gtctttagaaaatcc

SEQ ID NO: 699309 - DNA, 15 bp, Homo sapiens
tctttagaaaatcca

SEQ ID NO: 699310 - DNA, 15 bp, Homo sapiens
ctttagaaaatccat

SEQ ID NO: 699311 - DNA, 15 bp, Homo sapiens
tttagaaaatccatg

SEQ ID NO: 699312 - DNA, 15 bp, Homo sapiens
ttagaaaatccatga

SEQ ID NO: 699313 - DNA, 15 bp, Homo sapiens
tagaaaatccatgaa

SEQ ID NO: 699314 - DNA, 15 bp, Homo sapiens
agaaaatccatgaat

SEQ ID NO: 699315 - DNA, 15 bp, Homo sapiens
gaaaatccatgaatt

SEQ ID NO: 699316 - DNA, 15 bp, Homo sapiens
aaaatccatgaattc

SEQ ID NO: 699317 - DNA, 15 bp, Homo sapiens
aaatccatgaattcc

SEQ ID NO: 699318 - DNA, 15 bp, Homo sapiens
aatccatgaattcca

SEQ ID NO: 699319 - DNA, 15 bp, Homo sapiens
atccatgaattccaa

SEQ ID NO: 699320 - DNA, 15 bp, Homo sapiens
tccatgaattccaag

SEQ ID NO: 699321 - DNA, 15 bp, Homo sapiens
ccatgaattccaagg

SEQ ID NO: 699322 - DNA, 15 bp, Homo sapiens
catgaattccaaggc

SEQ ID NO: 699323 - DNA, 15 bp, Homo sapiens
atgaattccaaggct

SEQ ID NO: 699324 - DNA, 15 bp, Homo sapiens
tgaattccaaggctc

SEQ ID NO: 699325 - DNA, 15 bp, Homo sapiens
gaattccaaggctca

SEQ ID NO: 699326 - DNA, 15 bp, Homo sapiens
aattccaaggctcag

SEQ ID NO: 699327 - DNA, 15 bp, Homo sapiens
attccaaggctcagt

SEQ ID NO: 699328 - DNA, 15 bp, Homo sapiens
ttccaaggctcagtt

SEQ ID NO: 699329 - DNA, 15 bp, Homo sapiens
tccaaggctcagtta

SEQ ID NO: 699330 - DNA, 15 bp, Homo sapiens
ccaaggctcagttaa

SEQ ID NO: 699331 - DNA, 15 bp, Homo sapiens
caaggctcagttaac

SEQ ID NO: 699332 - DNA, 15 bp, Homo sapiens
aaggctcagttaact

SEQ ID NO: 699333 - DNA, 15 bp, Homo sapiens
aggctcagttaactg

SEQ ID NO: 699334 - DNA, 15 bp, Homo sapiens
ggctcagttaactga

SEQ ID NO: 699335 - DNA, 15 bp, Homo sapiens
gctcagttaactgac

SEQ ID NO: 699336 - DNA, 15 bp, Homo sapiens
ctcagttaactgacg

SEQ ID NO: 699337 - DNA, 15 bp, Homo sapiens
tcagttaactgacga

SEQ ID NO: 699338 - DNA, 15 bp, Homo sapiens
cagttaactgacgag

SEQ ID NO: 699339 - DNA, 15 bp, Homo sapiens
agttaactgacgagc

SEQ ID NO: 699340 - DNA, 15 bp, Homo sapiens
gttaactgacgagca

SEQ ID NO: 699341 - DNA, 15 bp, Homo sapiens
ttaactgacgagcaa

SEQ ID NO: 699342 - DNA, 15 bp, Homo sapiens
taactgacgagcaac

SEQ ID NO: 699343 - DNA, 15 bp, Homo sapiens
aactgacgagcaacc

SEQ ID NO: 699344 - DNA, 15 bp, Homo sapiens
actgacgagcaacct

SEQ ID NO: 699345 - DNA, 15 bp, Homo sapiens
ctgacgagcaacctt

SEQ ID NO: 699346 - DNA, 15 bp, Homo sapiens
tgacgagcaaccttt

SEQ ID NO: 699347 - DNA, 15 bp, Homo sapiens
gacgagcaaccttta

SEQ ID NO: 699348 - DNA, 15 bp, Homo sapiens
acgagcaacctttaa

SEQ ID NO: 699349 - DNA, 15 bp, Homo sapiens
cgagcaacctttaaa

SEQ ID NO: 699350 - DNA, 15 bp, Homo sapiens
gagcaacctttaaaa

SEQ ID NO: 699351 - DNA, 15 bp, Homo sapiens
agcaacctttaaaaa

SEQ ID NO: 699352 - DNA, 15 bp, Homo sapiens
gcaacctttaaaaaa

SEQ ID NO: 699353 - DNA, 15 bp, Homo sapiens
caacctttaaaaaat

SEQ ID NO: 699354 - DNA, 15 bp, Homo sapiens
aacctttaaaaaata

SEQ ID NO: 699355 - DNA, 15 bp, Homo sapiens
acctttaaaaaatac

SEQ ID NO: 699356 - DNA, 15 bp, Homo sapiens
cctttaaaaaataca

SEQ ID NO: 699357 - DNA, 15 bp, Homo sapiens
ctttaaaaaatacag

SEQ ID NO: 699358 - DNA, 15 bp, Homo sapiens
tttaaaaaatacagt

SEQ ID NO: 699359 - DNA, 15 bp, Homo sapiens
ttaaaaaatacagtc

SEQ ID NO: 699360 - DNA, 15 bp, Homo sapiens
taaaaaatacagtca

SEQ ID NO: 699361 - DNA, 15 bp, Homo sapiens
aaaaaatacagtcaa

SEQ ID NO: 699362 - DNA, 15 bp, Homo sapiens
aaaaatacagtcaac

SEQ ID NO: 699363 - DNA, 15 bp, Homo sapiens
aaaatacagtcaacg

SEQ ID NO: 699364 - DNA, 15 bp, Homo sapiens
aaatacagtcaacga

SEQ ID NO: 699365 - DNA, 15 bp, Homo sapiens
aatacagtcaacgag

SEQ ID NO: 699366 - DNA, 15 bp, Homo sapiens
atacagtcaacgagt

SEQ ID NO: 699367 - DNA, 15 bp, Homo sapiens
tacagtcaacgagtc

SEQ ID NO: 699368 - DNA, 15 bp, Homo sapiens
acagtcaacgagtcc

SEQ ID NO: 699369 - DNA, 15 bp, Homo sapiens
cagtcaacgagtcca

SEQ ID NO: 699370 - DNA, 15 bp, Homo sapiens
agtcaacgagtccaa

SEQ ID NO: 699371 - DNA, 15 bp, Homo sapiens
gtcaacgagtccaac

SEQ ID NO: 699372 - DNA, 15 bp, Homo sapiens
tcaacgagtccaacc

SEQ ID NO: 699373 - DNA, 15 bp, Homo sapiens
caacgagtccaaccc

SEQ ID NO: 699374 - DNA, 15 bp, Homo sapiens
aacgagtccaaccca

SEQ ID NO: 699375 - DNA, 15 bp, Homo sapiens
acgagtccaacccat

SEQ ID NO: 699376 - DNA, 15 bp, Homo sapiens
cgagtccaacccata

SEQ ID NO: 699377 - DNA, 15 bp, Homo sapiens
gagtccaacccatag

SEQ ID NO: 699378 - DNA, 15 bp, Homo sapiens
agtccaacccatagg

SEQ ID NO: 699379 - DNA, 15 bp, Homo sapiens
gtccaacccatagga

SEQ ID NO: 699380 - DNA, 15 bp, Homo sapiens
tccaacccataggat

SEQ ID NO: 699381 - DNA, 15 bp, Homo sapiens
ccaacccataggatt

SEQ ID NO: 699382 - DNA, 15 bp, Homo sapiens
caacccataggatta

SEQ ID NO: 699383 - DNA, 15 bp, Homo sapiens
aacccataggattat

SEQ ID NO: 699384 - DNA, 15 bp, Homo sapiens
acccataggattata

SEQ ID NO: 699385 - DNA, 15 bp, Homo sapiens
cccataggattataa

SEQ ID NO: 699386 - DNA, 15 bp, Homo sapiens
ccataggattataaa

SEQ ID NO: 699387 - DNA, 15 bp, Homo sapiens
cataggattataaat

SEQ ID NO: 699388 - DNA, 15 bp, Homo sapiens
ataggattataaatt

SEQ ID NO: 699389 - DNA, 15 bp, Homo sapiens
taggattataaattt

SEQ ID NO: 699390 - DNA, 15 bp, Homo sapiens
aggattataaattta

SEQ ID NO: 699391 - DNA, 15 bp, Homo sapiens
ggattataaatttaa

SEQ ID NO: 699392 - DNA, 15 bp, Homo sapiens
gattataaatttaaa

SEQ ID NO: 699393 - DNA, 15 bp, Homo sapiens
attataaatttaaag

SEQ ID NO: 699394 - DNA, 15 bp, Homo sapiens
ttataaatttaaaga

SEQ ID NO: 699395 - DNA, 15 bp, Homo sapiens
tataaatttaaagaa

SEQ ID NO: 699396 - DNA, 15 bp, Homo sapiens
ataaatttaaagaaa

SEQ ID NO: 699397 - DNA, 15 bp, Homo sapiens
taaatttaaagaaaa

SEQ ID NO: 699398 - DNA, 15 bp, Homo sapiens
aaatttaaagaaaag

SEQ ID NO: 699399 - DNA, 15 bp, Homo sapiens
aatttaaagaaaagc

SEQ ID NO: 699400 - DNA, 15 bp, Homo sapiens
atttaaagaaaagct

SEQ ID NO: 699401 - DNA, 15 bp, Homo sapiens
tttaaagaaaagctg

SEQ ID NO: 699402 - DNA, 15 bp, Homo sapiens
ttaaagaaaagctgt

SEQ ID NO: 699403 - DNA, 15 bp, Homo sapiens
taaagaaaagctgtg

SEQ ID NO: 699404 - DNA, 15 bp, Homo sapiens
aaagaaaagctgtga

SEQ ID NO: 699405 - DNA, 15 bp, Homo sapiens
aagaaaagctgtgat

SEQ ID NO: 699406 - DNA, 15 bp, Homo sapiens
agaaaagctgtgatc

SEQ ID NO: 699407 - DNA, 15 bp, Homo sapiens
gaaaagctgtgatct

SEQ ID NO: 699408 - DNA, 15 bp, Homo sapiens
aaaagctgtgatctg

SEQ ID NO: 699409 - DNA, 15 bp, Homo sapiens
aaagctgtgatctgt

SEQ ID NO: 699410 - DNA, 15 bp, Homo sapiens
aagctgtgatctgtg

SEQ ID NO: 699411 - DNA, 15 bp, Homo sapiens
agctgtgatctgtga

SEQ ID NO: 699412 - DNA, 15 bp, Homo sapiens
gctgtgatctgtgac

SEQ ID NO: 699413 - DNA, 15 bp, Homo sapiens
ctgtgatctgtgacc

SEQ ID NO: 699414 - DNA, 15 bp, Homo sapiens
tgtgatctgtgacca

SEQ ID NO: 699415 - DNA, 15 bp, Homo sapiens
gtgatctgtgaccag

SEQ ID NO: 699416 - DNA, 15 bp, Homo sapiens
tgatctgtgaccaga

SEQ ID NO: 699417 - DNA, 15 bp, Homo sapiens
gatctgtgaccagaa

SEQ ID NO: 699418 - DNA, 15 bp, Homo sapiens
atctgtgaccagaat

SEQ ID NO: 699419 - DNA, 15 bp, Homo sapiens
tctgtgaccagaatg

SEQ ID NO: 699420 - DNA, 15 bp, Homo sapiens
ctgtgaccagaatga

SEQ ID NO: 699421 - DNA, 15 bp, Homo sapiens
tgtgaccagaatgaa

SEQ ID NO: 699422 - DNA, 15 bp, Homo sapiens
gtgaccagaatgaaa

SEQ ID NO: 699423 - DNA, 15 bp, Homo sapiens
tgaccagaatgaaac

SEQ ID NO: 699424 - DNA, 15 bp, Homo sapiens
gaccagaatgaaacc

SEQ ID NO: 699425 - DNA, 15 bp, Homo sapiens
accagaatgaaacca

SEQ ID NO: 699426 - DNA, 15 bp, Homo sapiens
ccagaatgaaaccac

SEQ ID NO: 699427 - DNA, 15 bp, Homo sapiens
cagaatgaaaccact

SEQ ID NO: 699428 - DNA, 15 bp, Homo sapiens
agaatgaaaccactt

SEQ ID NO: 699429 - DNA, 15 bp, Homo sapiens
gaatgaaaccacttg

SEQ ID NO: 699430 - DNA, 15 bp, Homo sapiens
aatgaaaccacttgt

SEQ ID NO: 699431 - DNA, 15 bp, Homo sapiens
atgaaaccacttgtc

SEQ ID NO: 699432 - DNA, 15 bp, Homo sapiens
tgaaaccacttgtct

SEQ ID NO: 699433 - DNA, 15 bp, Homo sapiens
gaaaccacttgtctt

SEQ ID NO: 699434 - DNA, 15 bp, Homo sapiens
aaaccacttgtcttc

SEQ ID NO: 699435 - DNA, 15 bp, Homo sapiens
aaccacttgtcttct

SEQ ID NO: 699436 - DNA, 15 bp, Homo sapiens
accacttgtcttcta

SEQ ID NO: 699437 - DNA, 15 bp, Homo sapiens
ccacttgtcttctaa

SEQ ID NO: 699438 - DNA, 15 bp, Homo sapiens
cacttgtcttctaaa

SEQ ID NO: 699439 - DNA, 15 bp, Homo sapiens
acttgtcttctaaac

SEQ ID NO: 699440 - DNA, 15 bp, Homo sapiens
cttgtcttctaaact

SEQ ID NO: 699441 - DNA, 15 bp, Homo sapiens
ttgtcttctaaactt

SEQ ID NO: 699442 - DNA, 15 bp, Homo sapiens
tgtcttctaaacttg

SEQ ID NO: 699443 - DNA, 15 bp, Homo sapiens
gtcttctaaacttgt

SEQ ID NO: 699444 - DNA, 15 bp, Homo sapiens
tcttctaaacttgta

SEQ ID NO: 699445 - DNA, 15 bp, Homo sapiens
cttctaaacttgtat

SEQ ID NO: 699446 - DNA, 15 bp, Homo sapiens
ttctaaacttgtatt

SEQ ID NO: 699447 - DNA, 15 bp, Homo sapiens
tctaaacttgtattt

SEQ ID NO: 699448 - DNA, 15 bp, Homo sapiens
ctaaacttgtatttc

SEQ ID NO: 699449 - DNA, 15 bp, Homo sapiens
taaacttgtatttca

SEQ ID NO: 699450 - DNA, 15 bp, Homo sapiens
aaacttgtatttcag

SEQ ID NO: 699451 - DNA, 15 bp, Homo sapiens
aacttgtatttcagt

SEQ ID NO: 699452 - DNA, 15 bp, Homo sapiens
acttgtatttcagta

SEQ ID NO: 699453 - DNA, 15 bp, Homo sapiens
cttgtatttcagtag

SEQ ID NO: 699454 - DNA, 15 bp, Homo sapiens
ttgtatttcagtagt

SEQ ID NO: 699455 - DNA, 15 bp, Homo sapiens
tgtatttcagtagtc

SEQ ID NO: 699456 - DNA, 15 bp, Homo sapiens
gtatttcagtagtca

SEQ ID NO: 699457 - DNA, 15 bp, Homo sapiens
tatttcagtagtcaa

SEQ ID NO: 699458 - DNA, 15 bp, Homo sapiens
atttcagtagtcaag

SEQ ID NO: 699459 - DNA, 15 bp, Homo sapiens
tttcagtagtcaaga

SEQ ID NO: 699460 - DNA, 15 bp, Homo sapiens
ttcagtagtcaagat

SEQ ID NO: 699461 - DNA, 15 bp, Homo sapiens
tcagtagtcaagatg

SEQ ID NO: 699462 - DNA, 15 bp, Homo sapiens
cagtagtcaagatga

SEQ ID NO: 699463 - DNA, 15 bp, Homo sapiens
agtagtcaagatgaa

SEQ ID NO: 699464 - DNA, 15 bp, Homo sapiens
gtagtcaagatgaat

SEQ ID NO: 699465 - DNA, 15 bp, Homo sapiens
tagtcaagatgaata

SEQ ID NO: 699466 - DNA, 15 bp, Homo sapiens
agtcaagatgaatac

SEQ ID NO: 699467 - DNA, 15 bp, Homo sapiens
gtcaagatgaatact

SEQ ID NO: 699468 - DNA, 15 bp, Homo sapiens
tcaagatgaatactc

SEQ ID NO: 699469 - DNA, 15 bp, Homo sapiens
caagatgaatactcc

SEQ ID NO: 699470 - DNA, 15 bp, Homo sapiens
aagatgaatactcca

SEQ ID NO: 699471 - DNA, 15 bp, Homo sapiens
agatgaatactccaa

SEQ ID NO: 699472 - DNA, 15 bp, Homo sapiens
gatgaatactccaaa

SEQ ID NO: 699473 - DNA, 15 bp, Homo sapiens
atgaatactccaaag

SEQ ID NO: 699474 - DNA, 15 bp, Homo sapiens
tgaatactccaaagt

SEQ ID NO: 699475 - DNA, 15 bp, Homo sapiens
gaatactccaaagtt

SEQ ID NO: 699476 - DNA, 15 bp, Homo sapiens
aatactccaaagtta

SEQ ID NO: 699477 - DNA, 15 bp, Homo sapiens
atactccaaagttaa

SEQ ID NO: 699478 - DNA, 15 bp, Homo sapiens
tactccaaagttaat

SEQ ID NO: 699479 - DNA, 15 bp, Homo sapiens
actccaaagttaatg

SEQ ID NO: 699480 - DNA, 15 bp, Homo sapiens
ctccaaagttaatgt

SEQ ID NO: 699481 - DNA, 15 bp, Homo sapiens
tccaaagttaatgtt

SEQ ID NO: 699482 - DNA, 15 bp, Homo sapiens
ccaaagttaatgttt

SEQ ID NO: 699483 - DNA, 15 bp, Homo sapiens
caaagttaatgtttc

SEQ ID NO: 699484 - DNA, 15 bp, Homo sapiens
aaagttaatgtttct

SEQ ID NO: 699485 - DNA, 15 bp, Homo sapiens
aagttaatgtttctt

SEQ ID NO: 699486 - DNA, 15 bp, Homo sapiens
agttaatgtttcttt

SEQ ID NO: 699487 - DNA, 15 bp, Homo sapiens
gttaatgtttcttta

SEQ ID NO: 699488 - DNA, 15 bp, Homo sapiens
ttaatgtttctttat

SEQ ID NO: 699489 - DNA, 15 bp, Homo sapiens
taatgtttctttatg

SEQ ID NO: 699490 - DNA, 15 bp, Homo sapiens
aatgtttctttatgc

SEQ ID NO: 699491 - DNA, 15 bp, Homo sapiens
atgtttctttatgcc

SEQ ID NO: 699492 - DNA, 15 bp, Homo sapiens
tgtttctttatgcct

SEQ ID NO: 699493 - DNA, 15 bp, Homo sapiens
gtttctttatgcctc

SEQ ID NO: 699494 - DNA, 15 bp, Homo sapiens
tttctttatgcctca

SEQ ID NO: 699495 - DNA, 15 bp, Homo sapiens
ttctttatgcctcag

SEQ ID NO: 699496 - DNA, 15 bp, Homo sapiens
tctttatgcctcaga

SEQ ID NO: 699497 - DNA, 15 bp, Homo sapiens
ctttatgcctcagaa

SEQ ID NO: 699498 - DNA, 15 bp, Homo sapiens
tttatgcctcagaat

SEQ ID NO: 699499 - DNA, 15 bp, Homo sapiens
ttatgcctcagaatg

SEQ ID NO: 699500 - DNA, 15 bp, Homo sapiens
tatgcctcagaatgt

SEQ ID NO: 699501 - DNA, 15 bp, Homo sapiens
atgcctcagaatgtt

SEQ ID NO: 699502 - DNA, 15 bp, Homo sapiens
tgcctcagaatgtta

SEQ ID NO: 699503 - DNA, 15 bp, Homo sapiens
gcctcagaatgttaa

SEQ ID NO: 699504 - DNA, 15 bp, Homo sapiens
cctcagaatgttaag

SEQ ID NO: 699505 - DNA, 15 bp, Homo sapiens
ctcagaatgttaagc

SEQ ID NO: 699506 - DNA, 15 bp, Homo sapiens
tcagaatgttaagct

SEQ ID NO: 699507 - DNA, 15 bp, Homo sapiens
cagaatgttaagctt

SEQ ID NO: 699508 - DNA, 15 bp, Homo sapiens
agaatgttaagctta

SEQ ID NO: 699509 - DNA, 15 bp, Homo sapiens
gaatgttaagcttaa

SEQ ID NO: 699510 - DNA, 15 bp, Homo sapiens
aatgttaagcttaag

SEQ ID NO: 699511 - DNA, 15 bp, Homo sapiens
atgttaagcttaagt

SEQ ID NO: 699512 - DNA, 15 bp, Homo sapiens
tgttaagcttaagtt

SEQ ID NO: 699513 - DNA, 15 bp, Homo sapiens
gttaagcttaagtta

SEQ ID NO: 699514 - DNA, 15 bp, Homo sapiens
ttaagcttaagttat

SEQ ID NO: 699515 - DNA, 15 bp, Homo sapiens
taagcttaagttatc

SEQ ID NO: 699516 - DNA, 15 bp, Homo sapiens
aagcttaagttatca

SEQ ID NO: 699517 - DNA, 15 bp, Homo sapiens
agcttaagttatcaa

SEQ ID NO: 699518 - DNA, 15 bp, Homo sapiens
gcttaagttatcaat

SEQ ID NO: 699519 - DNA, 15 bp, Homo sapiens
cttaagttatcaatc

SEQ ID NO: 699520 - DNA, 15 bp, Homo sapiens
ttaagttatcaatct

SEQ ID NO: 699521 - DNA, 15 bp, Homo sapiens
taagttatcaatctt

SEQ ID NO: 699522 - DNA, 15 bp, Homo sapiens
aagttatcaatctta

SEQ ID NO: 699523 - DNA, 15 bp, Homo sapiens
agttatcaatcttat

SEQ ID NO: 699524 - DNA, 15 bp, Homo sapiens
gttatcaatcttatt

SEQ ID NO: 699525 - DNA, 15 bp, Homo sapiens
ttatcaatcttattt

SEQ ID NO: 699526 - DNA, 15 bp, Homo sapiens
tatcaatcttatttt

SEQ ID NO: 699527 - DNA, 15 bp, Homo sapiens
atcaatcttattttc

SEQ ID NO: 699528 - DNA, 15 bp, Homo sapiens
tcaatcttattttct

SEQ ID NO: 699529 - DNA, 15 bp, Homo sapiens
caatcttattttctt

SEQ ID NO: 699530 - DNA, 15 bp, Homo sapiens
aatcttattttcttt

SEQ ID NO: 699531 - DNA, 15 bp, Homo sapiens
atcttattttctttt

SEQ ID NO: 699532 - DNA, 15 bp, Homo sapiens
tcttattttcttttc

SEQ ID NO: 699533 - DNA, 15 bp, Homo sapiens
cttattttcttttca

SEQ ID NO: 699534 - DNA, 15 bp, Homo sapiens
ttattttcttttcag

SEQ ID NO: 699535 - DNA, 15 bp, Homo sapiens
tattttcttttcagt

SEQ ID NO: 699536 - DNA, 15 bp, Homo sapiens
attttcttttcagtg

SEQ ID NO: 699537 - DNA, 15 bp, Homo sapiens
ttttcttttcagtgc

SEQ ID NO: 699538 - DNA, 15 bp, Homo sapiens
tttcttttcagtgca

SEQ ID NO: 699539 - DNA, 15 bp, Homo sapiens
ttcttttcagtgcag

SEQ ID NO: 699540 - DNA, 15 bp, Homo sapiens
tcttttcagtgcaga

SEQ ID NO: 699541 - DNA, 15 bp, Homo sapiens
cttttcagtgcagag

SEQ ID NO: 699542 - DNA, 15 bp, Homo sapiens
ttttcagtgcagagt

SEQ ID NO: 699543 - DNA, 15 bp, Homo sapiens
tttcagtgcagagtt

SEQ ID NO: 699544 - DNA, 15 bp, Homo sapiens
ttcagtgcagagttt

SEQ ID NO: 699545 - DNA, 15 bp, Homo sapiens
tcagtgcagagtttc

SEQ ID NO: 699546 - DNA, 15 bp, Homo sapiens
cagtgcagagtttca

SEQ ID NO: 699547 - DNA, 15 bp, Homo sapiens
agtgcagagtttcag

SEQ ID NO: 699548 - DNA, 15 bp, Homo sapiens
gtgcagagtttcaga

SEQ ID NO: 699549 - DNA, 15 bp, Homo sapiens
tgcagagtttcagag

SEQ ID NO: 699550 - DNA, 15 bp, Homo sapiens
gcagagtttcagaga

SEQ ID NO: 699551 - DNA, 15 bp, Homo sapiens
cagagtttcagagac

SEQ ID NO: 699552 - DNA, 15 bp, Homo sapiens
agagtttcagagact

SEQ ID NO: 699553 - DNA, 15 bp, Homo sapiens
gagtttcagagactt

SEQ ID NO: 699554 - DNA, 15 bp, Homo sapiens
agtttcagagactta

SEQ ID NO: 699555 - DNA, 15 bp, Homo sapiens
gtttcagagacttaa

SEQ ID NO: 699556 - DNA, 15 bp, Homo sapiens
tttcagagacttaaa

SEQ ID NO: 699557 - DNA, 15 bp, Homo sapiens
ttcagagacttaaac

SEQ ID NO: 699558 - DNA, 15 bp, Homo sapiens
tcagagacttaaaca

SEQ ID NO: 699559 - DNA, 15 bp, Homo sapiens
cagagacttaaacat

SEQ ID NO: 699560 - DNA, 15 bp, Homo sapiens
agagacttaaacatt

SEQ ID NO: 699561 - DNA, 15 bp, Homo sapiens
gagacttaaacattc

SEQ ID NO: 699562 - DNA, 15 bp, Homo sapiens
gacttaaacattccc

SEQ ID NO: 699563 - DNA, 15 bp, Homo sapiens
acttaaacattccca

SEQ ID NO: 699564 - DNA, 15 bp, Homo sapiens
cttaaacattcccaa

SEQ ID NO: 699565 - DNA, 15 bp, Homo sapiens
ttaaacattcccaat

SEQ ID NO: 699566 - DNA, 15 bp, Homo sapiens
taaacattcccaatt

SEQ ID NO: 699567 - DNA, 15 bp, Homo sapiens
aaacattcccaattt

SEQ ID NO: 699568 - DNA, 15 bp, Homo sapiens
aacattcccaatttg

SEQ ID NO: 699569 - DNA, 15 bp, Homo sapiens
acattcccaatttgt

SEQ ID NO: 699570 - DNA, 15 bp, Homo sapiens
cattcccaatttgtc

SEQ ID NO: 699571 - DNA, 15 bp, Homo sapiens
attcccaatttgtcc

SEQ ID NO: 699572 - DNA, 15 bp, Homo sapiens
ttcccaatttgtccc

SEQ ID NO: 699573 - DNA, 15 bp, Homo sapiens
tcccaatttgtccca

SEQ ID NO: 699574 - DNA, 15 bp, Homo sapiens
cccaatttgtcccat

SEQ ID NO: 699575 - DNA, 15 bp, Homo sapiens
ccaatttgtcccatt

SEQ ID NO: 699576 - DNA, 15 bp, Homo sapiens
caatttgtcccattt

SEQ ID NO: 699577 - DNA, 15 bp, Homo sapiens
aatttgtcccatttt

SEQ ID NO: 699578 - DNA, 15 bp, Homo sapiens
atttgtcccatttta

SEQ ID NO: 699579 - DNA, 15 bp, Homo sapiens
tttgtcccattttac

SEQ ID NO: 699580 - DNA, 15 bp, Homo sapiens
ttgtcccattttact

SEQ ID NO: 699581 - DNA, 15 bp, Homo sapiens
tgtcccattttactt

SEQ ID NO: 699582 - DNA, 15 bp, Homo sapiens
gtcccattttacttc

SEQ ID NO: 699583 - DNA, 15 bp, Homo sapiens
tcccattttacttct

SEQ ID NO: 699584 - DNA, 15 bp, Homo sapiens
cccattttacttctt

SEQ ID NO: 699585 - DNA, 15 bp, Homo sapiens
ccattttacttcttg

SEQ ID NO: 699586 - DNA, 15 bp, Homo sapiens
cattttacttcttgc

SEQ ID NO: 699587 - DNA, 15 bp, Homo sapiens
attttacttcttgct

SEQ ID NO: 699588 - DNA, 15 bp, Homo sapiens
ttttacttcttgctt

SEQ ID NO: 699589 - DNA, 15 bp, Homo sapiens
tttacttcttgcttc

SEQ ID NO: 699590 - DNA, 15 bp, Homo sapiens
ttacttcttgcttct

SEQ ID NO: 699591 - DNA, 15 bp, Homo sapiens
tacttcttgcttctt

SEQ ID NO: 699592 - DNA, 15 bp, Homo sapiens
acttcttgcttcttt

SEQ ID NO: 699593 - DNA, 15 bp, Homo sapiens
cttcttgcttctttt

SEQ ID NO: 699594 - DNA, 15 bp, Homo sapiens
ttcttgcttctttta

SEQ ID NO: 699595 - DNA, 15 bp, Homo sapiens
tcttgcttcttttaa

SEQ ID NO: 699596 - DNA, 15 bp, Homo sapiens
cttgcttcttttaaa

SEQ ID NO: 699597 - DNA, 15 bp, Homo sapiens
ttgcttcttttaaat

SEQ ID NO: 699598 - DNA, 15 bp, Homo sapiens
tgcttcttttaaatg

SEQ ID NO: 699599 - DNA, 15 bp, Homo sapiens
gcttcttttaaatga

SEQ ID NO: 699600 - DNA, 15 bp, Homo sapiens
cttcttttaaatgaa

SEQ ID NO: 699601 - DNA, 15 bp, Homo sapiens
ttcttttaaatgaag

SEQ ID NO: 699602 - DNA, 15 bp, Homo sapiens
tcttttaaatgaagt

SEQ ID NO: 699603 - DNA, 15 bp, Homo sapiens
cttttaaatgaagtt

SEQ ID NO: 699604 - DNA, 15 bp, Homo sapiens
ttttaaatgaagttt

SEQ ID NO: 699605 - DNA, 15 bp, Homo sapiens
tttaaatgaagtttt

SEQ ID NO: 699606 - DNA, 15 bp, Homo sapiens
ttaaatgaagttttc

SEQ ID NO: 699607 - DNA, 15 bp, Homo sapiens
taaatgaagttttcc

SEQ ID NO: 699608 - DNA, 15 bp, Homo sapiens
aaatgaagttttcct

SEQ ID NO: 699609 - DNA, 15 bp, Homo sapiens
aatgaagttttcctt

SEQ ID NO: 699610 - DNA, 15 bp, Homo sapiens
atgaagttttccttt

SEQ ID NO: 699611 - DNA, 15 bp, Homo sapiens
tgaagttttcctttt

SEQ ID NO: 699612 - DNA, 15 bp, Homo sapiens
gaagttttccttttt

SEQ ID NO: 699613 - DNA, 15 bp, Homo sapiens
aagttttcctttttt

SEQ ID NO: 699614 - DNA, 15 bp, Homo sapiens
agttttccttttttg

SEQ ID NO: 699615 - DNA, 15 bp, Homo sapiens
gttttccttttttgt

SEQ ID NO: 699616 - DNA, 15 bp, Homo sapiens
ttttccttttttgtt

SEQ ID NO: 699617 - DNA, 15 bp, Homo sapiens
tttccttttttgttt

SEQ ID NO: 699618 - DNA, 15 bp, Homo sapiens
ttccttttttgtttt

SEQ ID NO: 699619 - DNA, 15 bp, Homo sapiens
tccttttttgttttc

SEQ ID NO: 699620 - DNA, 15 bp, Homo sapiens
ccttttttgttttcc

SEQ ID NO: 699621 - DNA, 15 bp, Homo sapiens
cttttttgttttcct

SEQ ID NO: 699622 - DNA, 15 bp, Homo sapiens
ttttttgttttcctg

SEQ ID NO: 699623 - DNA, 15 bp, Homo sapiens
tttttgttttcctgc

SEQ ID NO: 699624 - DNA, 15 bp, Homo sapiens
ttttgttttcctgca

SEQ ID NO: 699625 - DNA, 15 bp, Homo sapiens
tttgttttcctgcag

SEQ ID NO: 699626 - DNA, 15 bp, Homo sapiens
ttgttttcctgcagt

SEQ ID NO: 699627 - DNA, 15 bp, Homo sapiens
tgttttcctgcagtg

SEQ ID NO: 699628 - DNA, 15 bp, Homo sapiens
gttttcctgcagtgg

SEQ ID NO: 699629 - DNA, 15 bp, Homo sapiens
ttttcctgcagtgga

SEQ ID NO: 699630 - DNA, 15 bp, Homo sapiens
tttcctgcagtggat

SEQ ID NO: 699631 - DNA, 15 bp, Homo sapiens
ttcctgcagtggatc

SEQ ID NO: 699632 - DNA, 15 bp, Homo sapiens
tcctgcagtggatcc

SEQ ID NO: 699633 - DNA, 15 bp, Homo sapiens
cctgcagtggatccc

SEQ ID NO: 699634 - DNA, 15 bp, Homo sapiens
ctgcagtggatccca

SEQ ID NO: 699635 - DNA, 15 bp, Homo sapiens
tgcagtggatcccag

SEQ ID NO: 699636 - DNA, 15 bp, Homo sapiens
gcagtggatcccaga

SEQ ID NO: 699637 - DNA, 15 bp, Homo sapiens
cagtggatcccagat

SEQ ID NO: 699638 - DNA, 15 bp, Homo sapiens
agtggatcccagatt

SEQ ID NO: 699639 - DNA, 15 bp, Homo sapiens
gtggatcccagattg

SEQ ID NO: 699640 - DNA, 15 bp, Homo sapiens
tggatcccagattgt

SEQ ID NO: 699641 - DNA, 15 bp, Homo sapiens
ggatcccagattgtg

SEQ ID NO: 699642 - DNA, 15 bp, Homo sapiens
gatcccagattgtgg

SEQ ID NO: 699643 - DNA, 15 bp, Homo sapiens
atcccagattgtggg

SEQ ID NO: 699644 - DNA, 15 bp, Homo sapiens
tcccagattgtgggt

SEQ ID NO: 699645 - DNA, 15 bp, Homo sapiens
cccagattgtgggta

SEQ ID NO: 699646 - DNA, 15 bp, Homo sapiens
ccagattgtgggtaa

SEQ ID NO: 699647 - DNA, 15 bp, Homo sapiens
cagattgtgggtaag

SEQ ID NO: 699648 - DNA, 15 bp, Homo sapiens
agattgtgggtaagc

SEQ ID NO: 699649 - DNA, 15 bp, Homo sapiens
gattgtgggtaagca

SEQ ID NO: 699650 - DNA, 15 bp, Homo sapiens
attgtgggtaagcag

SEQ ID NO: 699651 - DNA, 15 bp, Homo sapiens
ttgtgggtaagcaga

SEQ ID NO: 699652 - DNA, 15 bp, Homo sapiens
tgtgggtaagcagaa

SEQ ID NO: 699653 - DNA, 15 bp, Homo sapiens
gtgggtaagcagaag

SEQ ID NO: 699654 - DNA, 15 bp, Homo sapiens
tgggtaagcagaaga

SEQ ID NO: 699655 - DNA, 15 bp, Homo sapiens
gggtaagcagaagag

SEQ ID NO: 699656 - DNA, 15 bp, Homo sapiens
ggtaagcagaagagt

SEQ ID NO: 699657 - DNA, 15 bp, Homo sapiens
gtaagcagaagagtc

SEQ ID NO: 699658 - DNA, 15 bp, Homo sapiens
taagcagaagagtct

SEQ ID NO: 699659 - DNA, 15 bp, Homo sapiens
aagcagaagagtctt

SEQ ID NO: 699660 - DNA, 15 bp, Homo sapiens
agcagaagagtcttt

SEQ ID NO: 699661 - DNA, 15 bp, Homo sapiens
gcagaagagtctttt

SEQ ID NO: 699662 - DNA, 15 bp, Homo sapiens
cagaagagtctttta

SEQ ID NO: 699663 - DNA, 15 bp, Homo sapiens
agaagagtcttttaa

SEQ ID NO: 699664 - DNA, 15 bp, Homo sapiens
gaagagtcttttaaa

SEQ ID NO: 699665 - DNA, 15 bp, Homo sapiens
aagagtcttttaaag

SEQ ID NO: 699666 - DNA, 15 bp, Homo sapiens
agagtcttttaaaga

SEQ ID NO: 699667 - DNA, 15 bp, Homo sapiens
gagtcttttaaagat

SEQ ID NO: 699668 - DNA, 15 bp, Homo sapiens
agtcttttaaagatt

SEQ ID NO: 699669 - DNA, 15 bp, Homo sapiens
gtcttttaaagattc

SEQ ID NO: 699670 - DNA, 15 bp, Homo sapiens
tcttttaaagattcc

SEQ ID NO: 699671 - DNA, 15 bp, Homo sapiens
cttttaaagattccg

SEQ ID NO: 699672 - DNA, 15 bp, Homo sapiens
ttttaaagattccga

SEQ ID NO: 699673 - DNA, 15 bp, Homo sapiens
tttaaagattccgaa

SEQ ID NO: 699674 - DNA, 15 bp, Homo sapiens
ttaaagattccgaaa

SEQ ID NO: 699675 - DNA, 15 bp, Homo sapiens
taaagattccgaaat

SEQ ID NO: 699676 - DNA, 15 bp, Homo sapiens
aaagattccgaaata

SEQ ID NO: 699677 - DNA, 15 bp, Homo sapiens
aagattccgaaataa

SEQ ID NO: 699678 - DNA, 15 bp, Homo sapiens
agattccgaaataaa

SEQ ID NO: 699679 - DNA, 15 bp, Homo sapiens
gattccgaaataaac

SEQ ID NO: 699680 - DNA, 15 bp, Homo sapiens
attccgaaataaact

SEQ ID NO: 699681 - DNA, 15 bp, Homo sapiens
ttccgaaataaactc

SEQ ID NO: 699682 - DNA, 15 bp, Homo sapiens
tccgaaataaactcc

SEQ ID NO: 699683 - DNA, 15 bp, Homo sapiens
ccgaaataaactccc

SEQ ID NO: 699684 - DNA, 15 bp, Homo sapiens
cgaaataaactccca

SEQ ID NO: 699685 - DNA, 15 bp, Homo sapiens
gaaataaactcccaa

SEQ ID NO: 699686 - DNA, 15 bp, Homo sapiens
aaataaactcccaag

SEQ ID NO: 699687 - DNA, 15 bp, Homo sapiens
aataaactcccaagc

SEQ ID NO: 699688 - DNA, 15 bp, Homo sapiens
ataaactcccaagct

SEQ ID NO: 699689 - DNA, 15 bp, Homo sapiens
taaactcccaagctt

SEQ ID NO: 699690 - DNA, 15 bp, Homo sapiens
aaactcccaagcttg

SEQ ID NO: 699691 - DNA, 15 bp, Homo sapiens
aactcccaagcttgt

SEQ ID NO: 699692 - DNA, 15 bp, Homo sapiens
actcccaagcttgtt

SEQ ID NO: 699693 - DNA, 15 bp, Homo sapiens
ctcccaagcttgtta

SEQ ID NO: 699694 - DNA, 15 bp, Homo sapiens
tcccaagcttgttag

SEQ ID NO: 699695 - DNA, 15 bp, Homo sapiens
cccaagcttgttagc

SEQ ID NO: 699696 - DNA, 15 bp, Homo sapiens
ccaagcttgttagct

SEQ ID NO: 699697 - DNA, 15 bp, Homo sapiens
caagcttgttagctc

SEQ ID NO: 699698 - DNA, 15 bp, Homo sapiens
aagcttgttagctct

SEQ ID NO: 699699 - DNA, 15 bp, Homo sapiens
agcttgttagctctt

SEQ ID NO: 699700 - DNA, 15 bp, Homo sapiens
gcttgttagctcttg

SEQ ID NO: 699701 - DNA, 15 bp, Homo sapiens
cttgttagctcttgt

SEQ ID NO: 699702 - DNA, 15 bp, Homo sapiens
ttgttagctcttgtt

SEQ ID NO: 699703 - DNA, 15 bp, Homo sapiens
tgttagctcttgttg

SEQ ID NO: 699704 - DNA, 15 bp, Homo sapiens
gttagctcttgttga

SEQ ID NO: 699705 - DNA, 15 bp, Homo sapiens
ttagctcttgttgaa

SEQ ID NO: 699706 - DNA, 15 bp, Homo sapiens
tagctcttgttgaat

SEQ ID NO: 699707 - DNA, 15 bp, Homo sapiens
agctcttgttgaatt

SEQ ID NO: 699708 - DNA, 15 bp, Homo sapiens
gctcttgttgaattg

SEQ ID NO: 699709 - DNA, 15 bp, Homo sapiens
ctcttgttgaattga

SEQ ID NO: 699710 - DNA, 15 bp, Homo sapiens
tcttgttgaattgag

SEQ ID NO: 699711 - DNA, 15 bp, Homo sapiens
cttgttgaattgagg

SEQ ID NO: 699712 - DNA, 15 bp, Homo sapiens
ttgttgaattgaggc

SEQ ID NO: 699713 - DNA, 15 bp, Homo sapiens
tgttgaattgaggcc

SEQ ID NO: 699714 - DNA, 15 bp, Homo sapiens
gttgaattgaggcct

SEQ ID NO: 699715 - DNA, 15 bp, Homo sapiens
ttgaattgaggcctt

SEQ ID NO: 699716 - DNA, 15 bp, Homo sapiens
tgaattgaggccttt

SEQ ID NO: 699717 - DNA, 15 bp, Homo sapiens
gaattgaggcctttt

SEQ ID NO: 699718 - DNA, 15 bp, Homo sapiens
aattgaggccttttc

SEQ ID NO: 699719 - DNA, 15 bp, Homo sapiens
attgaggccttttcc

SEQ ID NO: 699720 - DNA, 15 bp, Homo sapiens
ttgaggccttttcct

SEQ ID NO: 699721 - DNA, 15 bp, Homo sapiens
tgaggccttttcctc

SEQ ID NO: 699722 - DNA, 15 bp, Homo sapiens
gaggccttttcctca

SEQ ID NO: 699723 - DNA, 15 bp, Homo sapiens
aggccttttcctcag

SEQ ID NO: 699724 - DNA, 15 bp, Homo sapiens
ggccttttcctcagt

SEQ ID NO: 699725 - DNA, 15 bp, Homo sapiens
gccttttcctcagtt

SEQ ID NO: 699726 - DNA, 15 bp, Homo sapiens
ccttttcctcagttg

SEQ ID NO: 699727 - DNA, 15 bp, Homo sapiens
cttttcctcagttgc

SEQ ID NO: 699728 - DNA, 15 bp, Homo sapiens
ttttcctcagttgcc

SEQ ID NO: 699729 - DNA, 15 bp, Homo sapiens
tttcctcagttgcca

SEQ ID NO: 699730 - DNA, 15 bp, Homo sapiens
ttcctcagttgccag

SEQ ID NO: 699731 - DNA, 15 bp, Homo sapiens
tcctcagttgccagt

SEQ ID NO: 699732 - DNA, 15 bp, Homo sapiens
cctcagttgccagtt

SEQ ID NO: 699733 - DNA, 15 bp, Homo sapiens
ctcagttgccagttg

SEQ ID NO: 699734 - DNA, 15 bp, Homo sapiens
tcagttgccagttgt

SEQ ID NO: 699735 - DNA, 15 bp, Homo sapiens
cagttgccagttgta

SEQ ID NO: 699736 - DNA, 15 bp, Homo sapiens
agttgccagttgtat

SEQ ID NO: 699737 - DNA, 15 bp, Homo sapiens
gttgccagttgtatc

SEQ ID NO: 699738 - DNA, 15 bp, Homo sapiens
ttgccagttgtatct

SEQ ID NO: 699739 - DNA, 15 bp, Homo sapiens
tgccagttgtatctt

SEQ ID NO: 699740 - DNA, 15 bp, Homo sapiens
gccagttgtatcttg

SEQ ID NO: 699741 - DNA, 15 bp, Homo sapiens
ccagttgtatcttga

SEQ ID NO: 699742 - DNA, 15 bp, Homo sapiens
cagttgtatcttgag

SEQ ID NO: 699743 - DNA, 15 bp, Homo sapiens
agttgtatcttgagg

SEQ ID NO: 699744 - DNA, 15 bp, Homo sapiens
gttgtatcttgaggt

SEQ ID NO: 699745 - DNA, 15 bp, Homo sapiens
ttgtatcttgaggtc

SEQ ID NO: 699746 - DNA, 15 bp, Homo sapiens
tgtatcttgaggtcg

SEQ ID NO: 699747 - DNA, 15 bp, Homo sapiens
gtatcttgaggtcgc

SEQ ID NO: 699748 - DNA, 15 bp, Homo sapiens
tatcttgaggtcgct

SEQ ID NO: 699749 - DNA, 15 bp, Homo sapiens
atcttgaggtcgctt

SEQ ID NO: 699750 - DNA, 15 bp, Homo sapiens
tcttgaggtcgcttt

SEQ ID NO: 699751 - DNA, 15 bp, Homo sapiens
cttgaggtcgctttc

SEQ ID NO: 699752 - DNA, 15 bp, Homo sapiens
ttgaggtcgctttct

SEQ ID NO: 699753 - DNA, 15 bp, Homo sapiens
tgaggtcgctttctc

SEQ ID NO: 699754 - DNA, 15 bp, Homo sapiens
gaggtcgctttctct

SEQ ID NO: 699755 - DNA, 15 bp, Homo sapiens
aggtcgctttctctg

SEQ ID NO: 699756 - DNA, 15 bp, Homo sapiens
ggtcgctttctctga

SEQ ID NO: 699757 - DNA, 15 bp, Homo sapiens
gtcgctttctctgaa

SEQ ID NO: 699758 - DNA, 15 bp, Homo sapiens
tcgctttctctgaag

SEQ ID NO: 699759 - DNA, 15 bp, Homo sapiens
cgctttctctgaagt

SEQ ID NO: 699760 - DNA, 15 bp, Homo sapiens
gctttctctgaagtg

SEQ ID NO: 699761 - DNA, 15 bp, Homo sapiens
ctttctctgaagtga

SEQ ID NO: 699762 - DNA, 15 bp, Homo sapiens
tttctctgaagtgaa

SEQ ID NO: 699763 - DNA, 15 bp, Homo sapiens
ttctctgaagtgaaa

SEQ ID NO: 699764 - DNA, 15 bp, Homo sapiens
tctctgaagtgaaaa

SEQ ID NO: 699765 - DNA, 15 bp, Homo sapiens
ctctgaagtgaaaaa

SEQ ID NO: 699766 - DNA, 15 bp, Homo sapiens
tctgaagtgaaaaag

SEQ ID NO: 699767 - DNA, 15 bp, Homo sapiens
ctgaagtgaaaaaga

SEQ ID NO: 699768 - DNA, 15 bp, Homo sapiens
tgaagtgaaaaagaa

SEQ ID NO: 699769 - DNA, 15 bp, Homo sapiens
gaagtgaaaaagaaa

SEQ ID NO: 699770 - DNA, 15 bp, Homo sapiens
aagtgaaaaagaaag

SEQ ID NO: 699771 - DNA, 15 bp, Homo sapiens
agtgaaaaagaaagg

SEQ ID NO: 699772 - DNA, 15 bp, Homo sapiens
gtgaaaaagaaaggc

SEQ ID NO: 699773 - DNA, 15 bp, Homo sapiens
tgaaaaagaaaggct

SEQ ID NO: 699774 - DNA, 15 bp, Homo sapiens
gaaaaagaaaggctt

SEQ ID NO: 699775 - DNA, 15 bp, Homo sapiens
aaaaagaaaggcttc

SEQ ID NO: 699776 - DNA, 15 bp, Homo sapiens
aaaagaaaggcttcc

SEQ ID NO: 699777 - DNA, 15 bp, Homo sapiens
aaagaaaggcttcct

SEQ ID NO: 699778 - DNA, 15 bp, Homo sapiens
aagaaaggcttccta

SEQ ID NO: 699779 - DNA, 15 bp, Homo sapiens
agaaaggcttcctag

SEQ ID NO: 699780 - DNA, 15 bp, Homo sapiens
gaaaggcttcctaga

SEQ ID NO: 699781 - DNA, 15 bp, Homo sapiens
aaaggcttcctagat

SEQ ID NO: 699782 - DNA, 15 bp, Homo sapiens
aaggcttcctagatt

SEQ ID NO: 699783 - DNA, 15 bp, Homo sapiens
aggcttcctagattt

SEQ ID NO: 699784 - DNA, 15 bp, Homo sapiens
ggcttcctagatttg

SEQ ID NO: 699785 - DNA, 15 bp, Homo sapiens
gcttcctagatttgt

SEQ ID NO: 699786 - DNA, 15 bp, Homo sapiens
cttcctagatttgta

SEQ ID NO: 699787 - DNA, 15 bp, Homo sapiens
ttcctagatttgtaa

SEQ ID NO: 699788 - DNA, 15 bp, Homo sapiens
tcctagatttgtaat

SEQ ID NO: 699789 - DNA, 15 bp, Homo sapiens
cctagatttgtaata

SEQ ID NO: 699790 - DNA, 15 bp, Homo sapiens
ctagatttgtaatat

SEQ ID NO: 699791 - DNA, 15 bp, Homo sapiens
tagatttgtaatatg

SEQ ID NO: 699792 - DNA, 15 bp, Homo sapiens
agatttgtaatatga

SEQ ID NO: 699793 - DNA, 15 bp, Homo sapiens
gatttgtaatatgac

SEQ ID NO: 699794 - DNA, 15 bp, Homo sapiens
atttgtaatatgaca

SEQ ID NO: 699795 - DNA, 15 bp, Homo sapiens
tttgtaatatgacat

SEQ ID NO: 699796 - DNA, 15 bp, Homo sapiens
ttgtaatatgacatc

SEQ ID NO: 699797 - DNA, 15 bp, Homo sapiens
tgtaatatgacatca

SEQ ID NO: 699798 - DNA, 15 bp, Homo sapiens
gtaatatgacatcac

SEQ ID NO: 699799 - DNA, 15 bp, Homo sapiens
taatatgacatcaca

SEQ ID NO: 699800 - DNA, 15 bp, Homo sapiens
aatatgacatcacag

SEQ ID NO: 699801 - DNA, 15 bp, Homo sapiens
atatgacatcacagg

SEQ ID NO: 699802 - DNA, 15 bp, Homo sapiens
tatgacatcacagga

SEQ ID NO: 699803 - DNA, 15 bp, Homo sapiens
atgacatcacaggaa

SEQ ID NO: 699804 - DNA, 15 bp, Homo sapiens
tgacatcacaggaag

SEQ ID NO: 699805 - DNA, 15 bp, Homo sapiens
gacatcacaggaaga

SEQ ID NO: 699806 - DNA, 15 bp, Homo sapiens
acatcacaggaagaa

SEQ ID NO: 699807 - DNA, 15 bp, Homo sapiens
catcacaggaagaag

SEQ ID NO: 699808 - DNA, 15 bp, Homo sapiens
atcacaggaagaaga

SEQ ID NO: 699809 - DNA, 15 bp, Homo sapiens
tcacaggaagaagag

SEQ ID NO: 699810 - DNA, 15 bp, Homo sapiens
cacaggaagaagagg

SEQ ID NO: 699811 - DNA, 15 bp, Homo sapiens
acaggaagaagaggc

SEQ ID NO: 699812 - DNA, 15 bp, Homo sapiens
caggaagaagaggct

SEQ ID NO: 699813 - DNA, 15 bp, Homo sapiens
aggaagaagaggctg

SEQ ID NO: 699814 - DNA, 15 bp, Homo sapiens
ggaagaagaggctgg

SEQ ID NO: 699815 - DNA, 15 bp, Homo sapiens
gaagaagaggctggg

SEQ ID NO: 699816 - DNA, 15 bp, Homo sapiens
aagaagaggctgggt

SEQ ID NO: 699817 - DNA, 15 bp, Homo sapiens
agaagaggctgggtt

SEQ ID NO: 699818 - DNA, 15 bp, Homo sapiens
gaagaggctgggttt

SEQ ID NO: 699819 - DNA, 15 bp, Homo sapiens
aagaggctgggtttg

SEQ ID NO: 699820 - DNA, 15 bp, Homo sapiens
agaggctgggtttgg

SEQ ID NO: 699821 - DNA, 15 bp, Homo sapiens
gaggctgggtttgga

SEQ ID NO: 699822 - DNA, 15 bp, Homo sapiens
aggctgggtttggac

SEQ ID NO: 699823 - DNA, 15 bp, Homo sapiens
ggctgggtttggaca

SEQ ID NO: 699824 - DNA, 15 bp, Homo sapiens
gctgggtttggacaa

SEQ ID NO: 699825 - DNA, 15 bp, Homo sapiens
ctgggtttggacaaa

SEQ ID NO: 699826 - DNA, 15 bp, Homo sapiens
tgggtttggacaaag

SEQ ID NO: 699827 - DNA, 15 bp, Homo sapiens
gggtttggacaaaga

SEQ ID NO: 699828 - DNA, 15 bp, Homo sapiens
ggtttggacaaagaa

SEQ ID NO: 699829 - DNA, 15 bp, Homo sapiens
gtttggacaaagaaa

SEQ ID NO: 699830 - DNA, 15 bp, Homo sapiens
tttggacaaagaaac

SEQ ID NO: 699831 - DNA, 15 bp, Homo sapiens
ttggacaaagaaact

SEQ ID NO: 699832 - DNA, 15 bp, Homo sapiens
tggacaaagaaactt

SEQ ID NO: 699833 - DNA, 15 bp, Homo sapiens
ggacaaagaaacttt

SEQ ID NO: 699834 - DNA, 15 bp, Homo sapiens
gacaaagaaactttc

SEQ ID NO: 699835 - DNA, 15 bp, Homo sapiens
acaaagaaactttca

SEQ ID NO: 699836 - DNA, 15 bp, Homo sapiens
caaagaaactttcag

SEQ ID NO: 699837 - DNA, 15 bp, Homo sapiens
aaagaaactttcagc

SEQ ID NO: 699838 - DNA, 15 bp, Homo sapiens
aagaaactttcagcc

SEQ ID NO: 699839 - DNA, 15 bp, Homo sapiens
agaaactttcagccc

SEQ ID NO: 699840 - DNA, 15 bp, Homo sapiens
gaaactttcagccca

SEQ ID NO: 699841 - DNA, 15 bp, Homo sapiens
aaactttcagcccag

SEQ ID NO: 699842 - DNA, 15 bp, Homo sapiens
aactttcagcccagt

SEQ ID NO: 699843 - DNA, 15 bp, Homo sapiens
actttcagcccagtt

SEQ ID NO: 699844 - DNA, 15 bp, Homo sapiens
ctttcagcccagttt

SEQ ID NO: 699845 - DNA, 15 bp, Homo sapiens
tttcagcccagtttg

SEQ ID NO: 699846 - DNA, 15 bp, Homo sapiens
ttcagcccagtttgt

SEQ ID NO: 699847 - DNA, 15 bp, Homo sapiens
tcagcccagtttgtt

SEQ ID NO: 699848 - DNA, 15 bp, Homo sapiens
cagcccagtttgttt

SEQ ID NO: 699849 - DNA, 15 bp, Homo sapiens
agcccagtttgtttg

SEQ ID NO: 699850 - DNA, 15 bp, Homo sapiens
gcccagtttgtttgc

SEQ ID NO: 699851 - DNA, 15 bp, Homo sapiens
cccagtttgtttgca

SEQ ID NO: 699852 - DNA, 15 bp, Homo sapiens
ccagtttgtttgcac

SEQ ID NO: 699853 - DNA, 15 bp, Homo sapiens
cagtttgtttgcact

SEQ ID NO: 699854 - DNA, 15 bp, Homo sapiens
agtttgtttgcactt

SEQ ID NO: 699855 - DNA, 15 bp, Homo sapiens
gtttgtttgcacttc

SEQ ID NO: 699856 - DNA, 15 bp, Homo sapiens
tttgtttgcacttcc

SEQ ID NO: 699857 - DNA, 15 bp, Homo sapiens
ttgtttgcacttcct

SEQ ID NO: 699858 - DNA, 15 bp, Homo sapiens
tgtttgcacttcctt

SEQ ID NO: 699859 - DNA, 15 bp, Homo sapiens
gtttgcacttccttt

SEQ ID NO: 699860 - DNA, 15 bp, Homo sapiens
tttgcacttccttta

SEQ ID NO: 699861 - DNA, 15 bp, Homo sapiens
ttgcacttcctttaa

SEQ ID NO: 699862 - DNA, 15 bp, Homo sapiens
tgcacttcctttaat

SEQ ID NO: 699863 - DNA, 15 bp, Homo sapiens
gcacttcctttaatc

SEQ ID NO: 699864 - DNA, 15 bp, Homo sapiens
cacttcctttaatct

SEQ ID NO: 699865 - DNA, 15 bp, Homo sapiens
acttcctttaatctg

SEQ ID NO: 699866 - DNA, 15 bp, Homo sapiens
cttcctttaatctga

SEQ ID NO: 699867 - DNA, 15 bp, Homo sapiens
ttcctttaatctgat

SEQ ID NO: 699868 - DNA, 15 bp, Homo sapiens
tcctttaatctgata

SEQ ID NO: 699869 - DNA, 15 bp, Homo sapiens
cctttaatctgataa

SEQ ID NO: 699870 - DNA, 15 bp, Homo sapiens
ctttaatctgataat

SEQ ID NO: 699871 - DNA, 15 bp, Homo sapiens
tttaatctgataatg

SEQ ID NO: 699872 - DNA, 15 bp, Homo sapiens
ttaatctgataatgt

SEQ ID NO: 699873 - DNA, 15 bp, Homo sapiens
taatctgataatgtg

SEQ ID NO: 699874 - DNA, 15 bp, Homo sapiens
aatctgataatgtgt

SEQ ID NO: 699875 - DNA, 15 bp, Homo sapiens
atctgataatgtgtc

SEQ ID NO: 699876 - DNA, 15 bp, Homo sapiens
tctgataatgtgtct

SEQ ID NO: 699877 - DNA, 15 bp, Homo sapiens
ctgataatgtgtctg

SEQ ID NO: 699878 - DNA, 15 bp, Homo sapiens
tgataatgtgtctgc

SEQ ID NO: 699879 - DNA, 15 bp, Homo sapiens
gataatgtgtctgct

SEQ ID NO: 699880 - DNA, 15 bp, Homo sapiens
ataatgtgtctgctg

SEQ ID NO: 699881 - DNA, 15 bp, Homo sapiens
taatgtgtctgctgg

SEQ ID NO: 699882 - DNA, 15 bp, Homo sapiens
aatgtgtctgctggg

SEQ ID NO: 699883 - DNA, 15 bp, Homo sapiens
atgtgtctgctggga

SEQ ID NO: 699884 - DNA, 15 bp, Homo sapiens
tgtgtctgctgggaa

SEQ ID NO: 699885 - DNA, 15 bp, Homo sapiens
gtgtctgctgggaat

SEQ ID NO: 699886 - DNA, 15 bp, Homo sapiens
tgtctgctgggaata

SEQ ID NO: 699887 - DNA, 15 bp, Homo sapiens
gtctgctgggaatat

SEQ ID NO: 699888 - DNA, 15 bp, Homo sapiens
tctgctgggaatata

SEQ ID NO: 699889 - DNA, 15 bp, Homo sapiens
ctgctgggaatatac

SEQ ID NO: 699890 - DNA, 15 bp, Homo sapiens
tgctgggaatatacc

SEQ ID NO: 699891 - DNA, 15 bp, Homo sapiens
gctgggaatatacct

SEQ ID NO: 699892 - DNA, 15 bp, Homo sapiens
ctgggaatataccta

SEQ ID NO: 699893 - DNA, 15 bp, Homo sapiens
tgggaatatacctag

SEQ ID NO: 699894 - DNA, 15 bp, Homo sapiens
gggaatatacctagg

SEQ ID NO: 699895 - DNA, 15 bp, Homo sapiens
ggaatatacctagga

SEQ ID NO: 699896 - DNA, 15 bp, Homo sapiens
gaatatacctaggag

SEQ ID NO: 699897 - DNA, 15 bp, Homo sapiens
aatatacctaggagg

SEQ ID NO: 699898 - DNA, 15 bp, Homo sapiens
atatacctaggaggc

SEQ ID NO: 699899 - DNA, 15 bp, Homo sapiens
tatacctaggaggct

SEQ ID NO: 699900 - DNA, 15 bp, Homo sapiens
atacctaggaggctt

SEQ ID NO: 699901 - DNA, 15 bp, Homo sapiens
tacctaggaggcttg

SEQ ID NO: 699902 - DNA, 15 bp, Homo sapiens
acctaggaggcttgc

SEQ ID NO: 699903 - DNA, 15 bp, Homo sapiens
cctaggaggcttgca

SEQ ID NO: 699904 - DNA, 15 bp, Homo sapiens
ctaggaggcttgcaa

SEQ ID NO: 699905 - DNA, 15 bp, Homo sapiens
taggaggcttgcaaa

SEQ ID NO: 699906 - DNA, 15 bp, Homo sapiens
aggaggcttgcaaat

SEQ ID NO: 699907 - DNA, 15 bp, Homo sapiens
ggaggcttgcaaatg

SEQ ID NO: 699908 - DNA, 15 bp, Homo sapiens
gaggcttgcaaatgg

SEQ ID NO: 699909 - DNA, 15 bp, Homo sapiens
aggcttgcaaatggt

SEQ ID NO: 699910 - DNA, 15 bp, Homo sapiens
ggcttgcaaatggtc

SEQ ID NO: 699911 - DNA, 15 bp, Homo sapiens
gcttgcaaatggtca

SEQ ID NO: 699912 - DNA, 15 bp, Homo sapiens
cttgcaaatggtcac

SEQ ID NO: 699913 - DNA, 15 bp, Homo sapiens
ttgcaaatggtcact

SEQ ID NO: 699914 - DNA, 15 bp, Homo sapiens
tgcaaatggtcactg

SEQ ID NO: 699915 - DNA, 15 bp, Homo sapiens
gcaaatggtcactgg

SEQ ID NO: 699916 - DNA, 15 bp, Homo sapiens
caaatggtcactggc

SEQ ID NO: 699917 - DNA, 15 bp, Homo sapiens
aaatggtcactggct

SEQ ID NO: 699918 - DNA, 15 bp, Homo sapiens
aatggtcactggctg

SEQ ID NO: 699919 - DNA, 15 bp, Homo sapiens
atggtcactggctgt

SEQ ID NO: 699920 - DNA, 15 bp, Homo sapiens
tggtcactggctgtt

SEQ ID NO: 699921 - DNA, 15 bp, Homo sapiens
ggtcactggctgttg

SEQ ID NO: 699922 - DNA, 15 bp, Homo sapiens
gtcactggctgttga

SEQ ID NO: 699923 - DNA, 15 bp, Homo sapiens
tcactggctgttgaa

SEQ ID NO: 699924 - DNA, 15 bp, Homo sapiens
cactggctgttgaac

SEQ ID NO: 699925 - DNA, 15 bp, Homo sapiens
actggctgttgaact

SEQ ID NO: 699926 - DNA, 15 bp, Homo sapiens
ctggctgttgaactg

SEQ ID NO: 699927 - DNA, 15 bp, Homo sapiens
tggctgttgaactgc

SEQ ID NO: 699928 - DNA, 15 bp, Homo sapiens
ggctgttgaactgcg

SEQ ID NO: 699929 - DNA, 15 bp, Homo sapiens
gctgttgaactgcgt

SEQ ID NO: 699930 - DNA, 15 bp, Homo sapiens
ctgttgaactgcgtg

SEQ ID NO: 699931 - DNA, 15 bp, Homo sapiens
tgttgaactgcgtgg

SEQ ID NO: 699932 - DNA, 15 bp, Homo sapiens
gttgaactgcgtggt

SEQ ID NO: 699933 - DNA, 15 bp, Homo sapiens
ttgaactgcgtggtc

SEQ ID NO: 699934 - DNA, 15 bp, Homo sapiens
tgaactgcgtggtct

SEQ ID NO: 699935 - DNA, 15 bp, Homo sapiens
gaactgcgtggtctg

SEQ ID NO: 699936 - DNA, 15 bp, Homo sapiens
aactgcgtggtctgc

SEQ ID NO: 699937 - DNA, 15 bp, Homo sapiens
actgcgtggtctgct

SEQ ID NO: 699938 - DNA, 15 bp, Homo sapiens
ctgcgtggtctgctc

SEQ ID NO: 699939 - DNA, 15 bp, Homo sapiens
tgcgtggtctgctca

SEQ ID NO: 699940 - DNA, 15 bp, Homo sapiens
gcgtggtctgctcat

SEQ ID NO: 699941 - DNA, 15 bp, Homo sapiens
cgtggtctgctcatt

SEQ ID NO: 699942 - DNA, 15 bp, Homo sapiens
gtggtctgctcatta

SEQ ID NO: 699943 - DNA, 15 bp, Homo sapiens
tggtctgctcattaa

SEQ ID NO: 699944 - DNA, 15 bp, Homo sapiens
ggtctgctcattaac

SEQ ID NO: 699945 - DNA, 15 bp, Homo sapiens
gtctgctcattaact

SEQ ID NO: 699946 - DNA, 15 bp, Homo sapiens
tctgctcattaactc

SEQ ID NO: 699947 - DNA, 15 bp, Homo sapiens
ctgctcattaactct

SEQ ID NO: 699948 - DNA, 15 bp, Homo sapiens
tgctcattaactctt

SEQ ID NO: 699949 - DNA, 15 bp, Homo sapiens
gctcattaactcttt

SEQ ID NO: 699950 - DNA, 15 bp, Homo sapiens
ctcattaactctttt

SEQ ID NO: 699951 - DNA, 15 bp, Homo sapiens
tcattaactcttttt

SEQ ID NO: 699952 - DNA, 15 bp, Homo sapiens
cattaactcttttta

SEQ ID NO: 699953 - DNA, 15 bp, Homo sapiens
attaactctttttat

SEQ ID NO: 699954 - DNA, 15 bp, Homo sapiens
ttaactctttttatg

SEQ ID NO: 699955 - DNA, 15 bp, Homo sapiens
taactctttttatgt

SEQ ID NO: 699956 - DNA, 15 bp, Homo sapiens
aactctttttatgtg

SEQ ID NO: 699957 - DNA, 15 bp, Homo sapiens
actctttttatgtgg

SEQ ID NO: 699958 - DNA, 15 bp, Homo sapiens
ctctttttatgtgga

SEQ ID NO: 699959 - DNA, 15 bp, Homo sapiens
tctttttatgtggaa

SEQ ID NO: 699960 - DNA, 15 bp, Homo sapiens
ctttttatgtggaaa

SEQ ID NO: 699961 - DNA, 15 bp, Homo sapiens
tttttatgtggaaat

SEQ ID NO: 699962 - DNA, 15 bp, Homo sapiens
ttttatgtggaaatg

SEQ ID NO: 699963 - DNA, 15 bp, Homo sapiens
tttatgtggaaatgc

SEQ ID NO: 699964 - DNA, 15 bp, Homo sapiens
ttatgtggaaatgcc

SEQ ID NO: 699965 - DNA, 15 bp, Homo sapiens
tatgtggaaatgcct

SEQ ID NO: 699966 - DNA, 15 bp, Homo sapiens
atgtggaaatgcctt

SEQ ID NO: 699967 - DNA, 15 bp, Homo sapiens
tgtggaaatgccttc

SEQ ID NO: 699968 - DNA, 15 bp, Homo sapiens
gtggaaatgccttct

SEQ ID NO: 699969 - DNA, 15 bp, Homo sapiens
tggaaatgccttctg

SEQ ID NO: 699970 - DNA, 15 bp, Homo sapiens
ggaaatgccttctgc

SEQ ID NO: 699971 - DNA, 15 bp, Homo sapiens
gaaatgccttctgcg

SEQ ID NO: 699972 - DNA, 15 bp, Homo sapiens
aaatgccttctgcgg

SEQ ID NO: 699973 - DNA, 15 bp, Homo sapiens
aatgccttctgcggt

SEQ ID NO: 699974 - DNA, 15 bp, Homo sapiens
atgccttctgcggtg

SEQ ID NO: 699975 - DNA, 15 bp, Homo sapiens
tgccttctgcggtgc

SEQ ID NO: 699976 - DNA, 15 bp, Homo sapiens
gccttctgcggtgct

SEQ ID NO: 699977 - DNA, 15 bp, Homo sapiens
ccttctgcggtgctg

SEQ ID NO: 699978 - DNA, 15 bp, Homo sapiens
cttctgcggtgctgg

SEQ ID NO: 699979 - DNA, 15 bp, Homo sapiens
ttctgcggtgctggc

SEQ ID NO: 699980 - DNA, 15 bp, Homo sapiens
tctgcggtgctggca

SEQ ID NO: 699981 - DNA, 15 bp, Homo sapiens
ctgcggtgctggcaa

SEQ ID NO: 699982 - DNA, 15 bp, Homo sapiens
tgcggtgctggcaac

SEQ ID NO: 699983 - DNA, 15 bp, Homo sapiens
gcggtgctggcaacc

SEQ ID NO: 699984 - DNA, 15 bp, Homo sapiens
cggtgctggcaacct

SEQ ID NO: 699985 - DNA, 15 bp, Homo sapiens
ggtgctggcaacctc

SEQ ID NO: 699986 - DNA, 15 bp, Homo sapiens
gtgctggcaacctct

SEQ ID NO: 699987 - DNA, 15 bp, Homo sapiens
tgctggcaacctctc

SEQ ID NO: 699988 - DNA, 15 bp, Homo sapiens
gctggcaacctctca

SEQ ID NO: 699989 - DNA, 15 bp, Homo sapiens
ctggcaacctctcag

SEQ ID NO: 699990 - DNA, 15 bp, Homo sapiens
tggcaacctctcaga

SEQ ID NO: 699991 - DNA, 15 bp, Homo sapiens
ggcaacctctcagag

SEQ ID NO: 699992 - DNA, 15 bp, Homo sapiens
gcaacctctcagagt

SEQ ID NO: 699993 - DNA, 15 bp, Homo sapiens
caacctctcagagtt

SEQ ID NO: 699994 - DNA, 15 bp, Homo sapiens
aacctctcagagttg

SEQ ID NO: 699995 - DNA, 15 bp, Homo sapiens
acctctcagagttgt

SEQ ID NO: 699996 - DNA, 15 bp, Homo sapiens
cctctcagagttgtt

SEQ ID NO: 699997 - DNA, 15 bp, Homo sapiens
ctctcagagttgttt

SEQ ID NO: 699998 - DNA, 15 bp, Homo sapiens
tctcagagttgtttt

SEQ ID NO: 699999 - DNA, 15 bp, Homo sapiens
ctcagagttgttttg

SEQ ID NO: 700000 - DNA, 15 bp, Homo sapiens
tcagagttgttttga

SEQ ID NO: 700001 - DNA, 15 bp, Homo sapiens
cagagttgttttgat

SEQ ID NO: 700002 - DNA, 15 bp, Homo sapiens
agagttgttttgatt

SEQ ID NO: 700003 - DNA, 15 bp, Homo sapiens
gagttgttttgattt

SEQ ID NO: 700004 - DNA, 15 bp, Homo sapiens
agttgttttgatttg

SEQ ID NO: 700005 - DNA, 15 bp, Homo sapiens
gttgttttgatttgt

SEQ ID NO: 700006 - DNA, 15 bp, Homo sapiens
ttgttttgatttgtt

SEQ ID NO: 700007 - DNA, 15 bp, Homo sapiens
tgttttgatttgttt

SEQ ID NO: 700008 - DNA, 15 bp, Homo sapiens
gttttgatttgtttc

SEQ ID NO: 700009 - DNA, 15 bp, Homo sapiens
ttttgatttgtttca

SEQ ID NO: 700010 - DNA, 15 bp, Homo sapiens
tttgatttgtttcag

SEQ ID NO: 700011 - DNA, 15 bp, Homo sapiens
ttgatttgtttcagt

SEQ ID NO: 700012 - DNA, 15 bp, Homo sapiens
tgatttgtttcagta

SEQ ID NO: 700013 - DNA, 15 bp, Homo sapiens
gatttgtttcagtag

SEQ ID NO: 700014 - DNA, 15 bp, Homo sapiens
atttgtttcagtagt

SEQ ID NO: 700015 - DNA, 15 bp, Homo sapiens
tttgtttcagtagta

SEQ ID NO: 700016 - DNA, 15 bp, Homo sapiens
ttgtttcagtagtaa

SEQ ID NO: 700017 - DNA, 15 bp, Homo sapiens
tgtttcagtagtaat

SEQ ID NO: 700018 - DNA, 15 bp, Homo sapiens
gtttcagtagtaata

SEQ ID NO: 700019 - DNA, 15 bp, Homo sapiens
tttcagtagtaataa

SEQ ID NO: 700020 - DNA, 15 bp, Homo sapiens
ttcagtagtaataat

SEQ ID NO: 700021 - DNA, 15 bp, Homo sapiens
tcagtagtaataatt

SEQ ID NO: 700022 - DNA, 15 bp, Homo sapiens
cagtagtaataattg

SEQ ID NO: 700023 - DNA, 15 bp, Homo sapiens
agtagtaataattga

SEQ ID NO: 700024 - DNA, 15 bp, Homo sapiens
gtagtaataattgaa

SEQ ID NO: 700025 - DNA, 15 bp, Homo sapiens
tagtaataattgaaa

SEQ ID NO: 700026 - DNA, 15 bp, Homo sapiens
agtaataattgaaag

SEQ ID NO: 700027 - DNA, 15 bp, Homo sapiens
gtaataattgaaaga

SEQ ID NO: 700028 - DNA, 15 bp, Homo sapiens
taataattgaaagaa

SEQ ID NO: 700029 - DNA, 15 bp, Homo sapiens
aataattgaaagaaa

SEQ ID NO: 700030 - DNA, 15 bp, Homo sapiens
ataattgaaagaaaa

SEQ ID NO: 700031 - DNA, 15 bp, Homo sapiens
taattgaaagaaaaa

SEQ ID NO: 700032 - DNA, 15 bp, Homo sapiens
aattgaaagaaaaaa

SEQ ID NO: 700033 - DNA, 15 bp, Homo sapiens
attgaaagaaaaaaa

SEQ ID NO: 700034 - DNA, 15 bp, Homo sapiens
ttgaaagaaaaaaat

SEQ ID NO: 700035 - DNA, 15 bp, Homo sapiens
tgaaagaaaaaaatc

SEQ ID NO: 700036 - DNA, 15 bp, Homo sapiens
gaaagaaaaaaatca

SEQ ID NO: 700037 - DNA, 15 bp, Homo sapiens
aaagaaaaaaatcac

SEQ ID NO: 700038 - DNA, 15 bp, Homo sapiens
aagaaaaaaatcact

SEQ ID NO: 700039 - DNA, 15 bp, Homo sapiens
agaaaaaaatcacta

SEQ ID NO: 700040 - DNA, 15 bp, Homo sapiens
gaaaaaaatcactat

SEQ ID NO: 700041 - DNA, 15 bp, Homo sapiens
aaaaaaatcactatt

SEQ ID NO: 700042 - DNA, 15 bp, Homo sapiens
aaaaaatcactattc

SEQ ID NO: 700043 - DNA, 15 bp, Homo sapiens
aaaaatcactattca

SEQ ID NO: 700044 - DNA, 15 bp, Homo sapiens
aaaatcactattcag

SEQ ID NO: 700045 - DNA, 15 bp, Homo sapiens
aaatcactattcagc

SEQ ID NO: 700046 - DNA, 15 bp, Homo sapiens
aatcactattcagcc

SEQ ID NO: 700047 - DNA, 15 bp, Homo sapiens
atcactattcagcct

SEQ ID NO: 700048 - DNA, 15 bp, Homo sapiens
tcactattcagcctg

SEQ ID NO: 700049 - DNA, 15 bp, Homo sapiens
cactattcagcctgt

SEQ ID NO: 700050 - DNA, 15 bp, Homo sapiens
actattcagcctgtt

SEQ ID NO: 700051 - DNA, 15 bp, Homo sapiens
ctattcagcctgttc

SEQ ID NO: 700052 - DNA, 15 bp, Homo sapiens
tattcagcctgttct

SEQ ID NO: 700053 - DNA, 15 bp, Homo sapiens
attcagcctgttctc

SEQ ID NO: 700054 - DNA, 15 bp, Homo sapiens
ttcagcctgttctct

SEQ ID NO: 700055 - DNA, 15 bp, Homo sapiens
tcagcctgttctctt

SEQ ID NO: 700056 - DNA, 15 bp, Homo sapiens
cagcctgttctctta

SEQ ID NO: 700057 - DNA, 15 bp, Homo sapiens
agcctgttctcttat

SEQ ID NO: 700058 - DNA, 15 bp, Homo sapiens
gcctgttctcttatt

SEQ ID NO: 700059 - DNA, 15 bp, Homo sapiens
cctgttctcttattc

SEQ ID NO: 700060 - DNA, 15 bp, Homo sapiens
ctgttctcttattcg

SEQ ID NO: 700061 - DNA, 15 bp, Homo sapiens
tgttctcttattcga

SEQ ID NO: 700062 - DNA, 15 bp, Homo sapiens
gttctcttattcgat

SEQ ID NO: 700063 - DNA, 15 bp, Homo sapiens
ttctcttattcgatt

SEQ ID NO: 700064 - DNA, 15 bp, Homo sapiens
tctcttattcgattg

SEQ ID NO: 700065 - DNA, 15 bp, Homo sapiens
ctcttattcgattgt

SEQ ID NO: 700066 - DNA, 15 bp, Homo sapiens
tcttattcgattgtt

SEQ ID NO: 700067 - DNA, 15 bp, Homo sapiens
cttattcgattgttt

SEQ ID NO: 700068 - DNA, 15 bp, Homo sapiens
ttattcgattgtttt

SEQ ID NO: 700069 - DNA, 15 bp, Homo sapiens
tattcgattgttttc

SEQ ID NO: 700070 - DNA, 15 bp, Homo sapiens
attcgattgttttcg

SEQ ID NO: 700071 - DNA, 15 bp, Homo sapiens
ttcgattgttttcgt

SEQ ID NO: 700072 - DNA, 15 bp, Homo sapiens
tcgattgttttcgtg

SEQ ID NO: 700073 - DNA, 15 bp, Homo sapiens
cgattgttttcgtgt

SEQ ID NO: 700074 - DNA, 15 bp, Homo sapiens
gattgttttcgtgtt

SEQ ID NO: 700075 - DNA, 15 bp, Homo sapiens
attgttttcgtgttt

SEQ ID NO: 700076 - DNA, 15 bp, Homo sapiens
ttgttttcgtgtttg

SEQ ID NO: 700077 - DNA, 15 bp, Homo sapiens
tgttttcgtgtttgg

SEQ ID NO: 700078 - DNA, 15 bp, Homo sapiens
gttttcgtgtttggg

SEQ ID NO: 700079 - DNA, 15 bp, Homo sapiens
ttttcgtgtttggga

SEQ ID NO: 700080 - DNA, 15 bp, Homo sapiens
tttcgtgtttgggat

SEQ ID NO: 700081 - DNA, 15 bp, Homo sapiens
ttcgtgtttgggata

SEQ ID NO: 700082 - DNA, 15 bp, Homo sapiens
tcgtgtttgggatat

SEQ ID NO: 700083 - DNA, 15 bp, Homo sapiens
cgtgtttgggatatg

SEQ ID NO: 700084 - DNA, 15 bp, Homo sapiens
gtgtttgggatatga

SEQ ID NO: 700085 - DNA, 15 bp, Homo sapiens
tgtttgggatatgac

SEQ ID NO: 700086 - DNA, 15 bp, Homo sapiens
gtttgggatatgaca

SEQ ID NO: 700087 - DNA, 15 bp, Homo sapiens
tttgggatatgacaa

SEQ ID NO: 700088 - DNA, 15 bp, Homo sapiens
ttgggatatgacaat

SEQ ID NO: 700089 - DNA, 15 bp, Homo sapiens
tgggatatgacaatt

SEQ ID NO: 700090 - DNA, 15 bp, Homo sapiens
gggatatgacaattt

SEQ ID NO: 700091 - DNA, 15 bp, Homo sapiens
ggatatgacaattta

SEQ ID NO: 700092 - DNA, 15 bp, Homo sapiens
gatatgacaatttag

SEQ ID NO: 700093 - DNA, 15 bp, Homo sapiens
atatgacaatttaga

SEQ ID NO: 700094 - DNA, 15 bp, Homo sapiens
tatgacaatttagaa

SEQ ID NO: 700095 - DNA, 15 bp, Homo sapiens
atgacaatttagaaa

SEQ ID NO: 700096 - DNA, 15 bp, Homo sapiens
tgacaatttagaaaa

SEQ ID NO: 700097 - DNA, 15 bp, Homo sapiens
gacaatttagaaaag

SEQ ID NO: 700098 - DNA, 15 bp, Homo sapiens
acaatttagaaaaga

SEQ ID NO: 700099 - DNA, 15 bp, Homo sapiens
caatttagaaaagaa

SEQ ID NO: 700100 - DNA, 15 bp, Homo sapiens
aatttagaaaagaaa

SEQ ID NO: 700101 - DNA, 15 bp, Homo sapiens
atttagaaaagaaaa

SEQ ID NO: 700102 - DNA, 15 bp, Homo sapiens
tttagaaaagaaaat

SEQ ID NO: 700103 - DNA, 15 bp, Homo sapiens
ttagaaaagaaaatg

SEQ ID NO: 700104 - DNA, 15 bp, Homo sapiens
tagaaaagaaaatgt

SEQ ID NO: 700105 - DNA, 15 bp, Homo sapiens
agaaaagaaaatgtg

SEQ ID NO: 700106 - DNA, 15 bp, Homo sapiens
gaaaagaaaatgtgt

SEQ ID NO: 700107 - DNA, 15 bp, Homo sapiens
aaaagaaaatgtgta

SEQ ID NO: 700108 - DNA, 15 bp, Homo sapiens
aaagaaaatgtgtat

SEQ ID NO: 700109 - DNA, 15 bp, Homo sapiens
aagaaaatgtgtatg

SEQ ID NO: 700110 - DNA, 15 bp, Homo sapiens
agaaaatgtgtatgg

SEQ ID NO: 700111 - DNA, 15 bp, Homo sapiens
gaaaatgtgtatggg

SEQ ID NO: 700112 - DNA, 15 bp, Homo sapiens
aaaatgtgtatgggt

SEQ ID NO: 700113 - DNA, 15 bp, Homo sapiens
aaatgtgtatgggtg

SEQ ID NO: 700114 - DNA, 15 bp, Homo sapiens
aatgtgtatgggtgt

SEQ ID NO: 700115 - DNA, 15 bp, Homo sapiens
atgtgtatgggtgtg

SEQ ID NO: 700116 - DNA, 15 bp, Homo sapiens
tgtgtatgggtgtgt

SEQ ID NO: 700117 - DNA, 15 bp, Homo sapiens
gtgtatgggtgtgta

SEQ ID NO: 700118 - DNA, 15 bp, Homo sapiens
tgtatgggtgtgtat

SEQ ID NO: 700119 - DNA, 15 bp, Homo sapiens
gtatgggtgtgtatt

SEQ ID NO: 700120 - DNA, 15 bp, Homo sapiens
tatgggtgtgtattt

SEQ ID NO: 700121 - DNA, 15 bp, Homo sapiens
atgggtgtgtattta

SEQ ID NO: 700122 - DNA, 15 bp, Homo sapiens
tgggtgtgtatttat

SEQ ID NO: 700123 - DNA, 15 bp, Homo sapiens
gggtgtgtatttata

SEQ ID NO: 700124 - DNA, 15 bp, Homo sapiens
ggtgtgtatttataa

SEQ ID NO: 700125 - DNA, 15 bp, Homo sapiens
gtgtgtatttataaa

SEQ ID NO: 700126 - DNA, 15 bp, Homo sapiens
tgtgtatttataaat

SEQ ID NO: 700127 - DNA, 15 bp, Homo sapiens
gtgtatttataaatt

SEQ ID NO: 700128 - DNA, 15 bp, Homo sapiens
tgtatttataaattg

SEQ ID NO: 700129 - DNA, 15 bp, Homo sapiens
gtatttataaattga

SEQ ID NO: 700130 - DNA, 15 bp, Homo sapiens
tatttataaattgaa

SEQ ID NO: 700131 - DNA, 15 bp, Homo sapiens
atttataaattgaaa

SEQ ID NO: 700132 - DNA, 15 bp, Homo sapiens
tttataaattgaaat

SEQ ID NO: 700133 - DNA, 15 bp, Homo sapiens
ttataaattgaaatt

SEQ ID NO: 700134 - DNA, 15 bp, Homo sapiens
tataaattgaaattg

SEQ ID NO: 700135 - DNA, 15 bp, Homo sapiens
ataaattgaaattgt

SEQ ID NO: 700136 - DNA, 15 bp, Homo sapiens
taaattgaaattgtt

SEQ ID NO: 700137 - DNA, 15 bp, Homo sapiens
aaattgaaattgtta

SEQ ID NO: 700138 - DNA, 15 bp, Homo sapiens
aattgaaattgttag

SEQ ID NO: 700139 - DNA, 15 bp, Homo sapiens
attgaaattgttagt

SEQ ID NO: 700140 - DNA, 15 bp, Homo sapiens
ttgaaattgttagtg

SEQ ID NO: 700141 - DNA, 15 bp, Homo sapiens
tgaaattgttagtga

SEQ ID NO: 700142 - DNA, 15 bp, Homo sapiens
gaaattgttagtgat

SEQ ID NO: 700143 - DNA, 15 bp, Homo sapiens
aaattgttagtgata

SEQ ID NO: 700144 - DNA, 15 bp, Homo sapiens
aattgttagtgatat

SEQ ID NO: 700145 - DNA, 15 bp, Homo sapiens
attgttagtgatatc

SEQ ID NO: 700146 - DNA, 15 bp, Homo sapiens
ttgttagtgatatct

SEQ ID NO: 700147 - DNA, 15 bp, Homo sapiens
tgttagtgatatctt

SEQ ID NO: 700148 - DNA, 15 bp, Homo sapiens
gttagtgatatctta

SEQ ID NO: 700149 - DNA, 15 bp, Homo sapiens
ttagtgatatcttaa

SEQ ID NO: 700150 - DNA, 15 bp, Homo sapiens
tagtgatatcttaac

SEQ ID NO: 700151 - DNA, 15 bp, Homo sapiens
agtgatatcttaaca

SEQ ID NO: 700152 - DNA, 15 bp, Homo sapiens
gtgatatcttaacat

SEQ ID NO: 700153 - DNA, 15 bp, Homo sapiens
tgatatcttaacata

SEQ ID NO: 700154 - DNA, 15 bp, Homo sapiens
gatatcttaacatag

SEQ ID NO: 700155 - DNA, 15 bp, Homo sapiens
atatcttaacatagc

SEQ ID NO: 700156 - DNA, 15 bp, Homo sapiens
tatcttaacatagca

SEQ ID NO: 700157 - DNA, 15 bp, Homo sapiens
atcttaacatagcat

SEQ ID NO: 700158 - DNA, 15 bp, Homo sapiens
tcttaacatagcatt

SEQ ID NO: 700159 - DNA, 15 bp, Homo sapiens
cttaacatagcattt

SEQ ID NO: 700160 - DNA, 15 bp, Homo sapiens
ttaacatagcatttc

SEQ ID NO: 700161 - DNA, 15 bp, Homo sapiens
taacatagcatttca

SEQ ID NO: 700162 - DNA, 15 bp, Homo sapiens
aacatagcatttcaa

SEQ ID NO: 700163 - DNA, 15 bp, Homo sapiens
acatagcatttcaaa

SEQ ID NO: 700164 - DNA, 15 bp, Homo sapiens
catagcatttcaaag

SEQ ID NO: 700165 - DNA, 15 bp, Homo sapiens
atagcatttcaaaga

SEQ ID NO: 700166 - DNA, 15 bp, Homo sapiens
tagcatttcaaagaa

SEQ ID NO: 700167 - DNA, 15 bp, Homo sapiens
agcatttcaaagaac

SEQ ID NO: 700168 - DNA, 15 bp, Homo sapiens
gcatttcaaagaact

SEQ ID NO: 700169 - DNA, 15 bp, Homo sapiens
catttcaaagaactg

SEQ ID NO: 700170 - DNA, 15 bp, Homo sapiens
atttcaaagaactgt

SEQ ID NO: 700171 - DNA, 15 bp, Homo sapiens
tttcaaagaactgtt

SEQ ID NO: 700172 - DNA, 15 bp, Homo sapiens
ttcaaagaactgttt

SEQ ID NO: 700173 - DNA, 15 bp, Homo sapiens
tcaaagaactgttta

SEQ ID NO: 700174 - DNA, 15 bp, Homo sapiens
caaagaactgtttaa

SEQ ID NO: 700175 - DNA, 15 bp, Homo sapiens
aaagaactgtttaat

SEQ ID NO: 700176 - DNA, 15 bp, Homo sapiens
aagaactgtttaatg

SEQ ID NO: 700177 - DNA, 15 bp, Homo sapiens
agaactgtttaatga

SEQ ID NO: 700178 - DNA, 15 bp, Homo sapiens
gaactgtttaatgac

SEQ ID NO: 700179 - DNA, 15 bp, Homo sapiens
aactgtttaatgact

SEQ ID NO: 700180 - DNA, 15 bp, Homo sapiens
actgtttaatgacta

SEQ ID NO: 700181 - DNA, 15 bp, Homo sapiens
ctgtttaatgactat

SEQ ID NO: 700182 - DNA, 15 bp, Homo sapiens
tgtttaatgactatg

SEQ ID NO: 700183 - DNA, 15 bp, Homo sapiens
gtttaatgactatga

SEQ ID NO: 700184 - DNA, 15 bp, Homo sapiens
tttaatgactatgaa

SEQ ID NO: 700185 - DNA, 15 bp, Homo sapiens
ttaatgactatgaaa

SEQ ID NO: 700186 - DNA, 15 bp, Homo sapiens
taatgactatgaaac

SEQ ID NO: 700187 - DNA, 15 bp, Homo sapiens
aatgactatgaaaca

SEQ ID NO: 700188 - DNA, 15 bp, Homo sapiens
atgactatgaaacag

SEQ ID NO: 700189 - DNA, 15 bp, Homo sapiens
tgactatgaaacagg

SEQ ID NO: 700190 - DNA, 15 bp, Homo sapiens
gactatgaaacaggg

SEQ ID NO: 700191 - DNA, 15 bp, Homo sapiens
actatgaaacagggg

SEQ ID NO: 700192 - DNA, 15 bp, Homo sapiens
ctatgaaacaggggc

SEQ ID NO: 700193 - DNA, 15 bp, Homo sapiens
tatgaaacaggggcc

SEQ ID NO: 700194 - DNA, 15 bp, Homo sapiens
atgaaacaggggcct

SEQ ID NO: 700195 - DNA, 15 bp, Homo sapiens
tgaaacaggggcctt

SEQ ID NO: 700196 - DNA, 15 bp, Homo sapiens
gaaacaggggccttt

SEQ ID NO: 700197 - DNA, 15 bp, Homo sapiens
aaacaggggccttta

SEQ ID NO: 700198 - DNA, 15 bp, Homo sapiens
aacaggggcctttaa

SEQ ID NO: 700199 - DNA, 15 bp, Homo sapiens
acaggggcctttaac

SEQ ID NO: 700200 - DNA, 15 bp, Homo sapiens
caggggcctttaacc

SEQ ID NO: 700201 - DNA, 15 bp, Homo sapiens
aggggcctttaacct

SEQ ID NO: 700202 - DNA, 15 bp, Homo sapiens
ggggcctttaacctt

SEQ ID NO: 700203 - DNA, 15 bp, Homo sapiens
gggcctttaaccttt

SEQ ID NO: 700204 - DNA, 15 bp, Homo sapiens
ggcctttaaccttta

SEQ ID NO: 700205 - DNA, 15 bp, Homo sapiens
gcctttaacctttaa

SEQ ID NO: 700206 - DNA, 15 bp, Homo sapiens
cctttaacctttaag

SEQ ID NO: 700207 - DNA, 15 bp, Homo sapiens
ctttaacctttaagg

SEQ ID NO: 700208 - DNA, 15 bp, Homo sapiens
tttaacctttaaggt

SEQ ID NO: 700209 - DNA, 15 bp, Homo sapiens
ttaacctttaaggta

SEQ ID NO: 700210 - DNA, 15 bp, Homo sapiens
taacctttaaggtat

SEQ ID NO: 700211 - DNA, 15 bp, Homo sapiens
aacctttaaggtata

SEQ ID NO: 700212 - DNA, 15 bp, Homo sapiens
acctttaaggtataa

SEQ ID NO: 700213 - DNA, 15 bp, Homo sapiens
cctttaaggtataac

SEQ ID NO: 700214 - DNA, 15 bp, Homo sapiens
ctttaaggtataaca

SEQ ID NO: 700215 - DNA, 15 bp, Homo sapiens
tttaaggtataacaa

SEQ ID NO: 700216 - DNA, 15 bp, Homo sapiens
ttaaggtataacaag

SEQ ID NO: 700217 - DNA, 15 bp, Homo sapiens
taaggtataacaagc

SEQ ID NO: 700218 - DNA, 15 bp, Homo sapiens
aaggtataacaagca

SEQ ID NO: 700219 - DNA, 15 bp, Homo sapiens
aggtataacaagcat

SEQ ID NO: 700220 - DNA, 15 bp, Homo sapiens
ggtataacaagcatt

SEQ ID NO: 700221 - DNA, 15 bp, Homo sapiens
gtataacaagcattt

SEQ ID NO: 700222 - DNA, 15 bp, Homo sapiens
tataacaagcatttg

SEQ ID NO: 700223 - DNA, 15 bp, Homo sapiens
ataacaagcatttga

SEQ ID NO: 700224 - DNA, 15 bp, Homo sapiens
taacaagcatttgac

SEQ ID NO: 700225 - DNA, 15 bp, Homo sapiens
aacaagcatttgact

SEQ ID NO: 700226 - DNA, 15 bp, Homo sapiens
acaagcatttgactc

SEQ ID NO: 700227 - DNA, 15 bp, Homo sapiens
caagcatttgactct

SEQ ID NO: 700228 - DNA, 15 bp, Homo sapiens
aagcatttgactctt

SEQ ID NO: 700229 - DNA, 15 bp, Homo sapiens
agcatttgactcttg

SEQ ID NO: 700230 - DNA, 15 bp, Homo sapiens
gcatttgactcttgg

SEQ ID NO: 700231 - DNA, 15 bp, Homo sapiens
catttgactcttggt

SEQ ID NO: 700232 - DNA, 15 bp, Homo sapiens
atttgactcttggtt

SEQ ID NO: 700233 - DNA, 15 bp, Homo sapiens
tttgactcttggttt

SEQ ID NO: 700234 - DNA, 15 bp, Homo sapiens
ttgactcttggtttc

SEQ ID NO: 700235 - DNA, 15 bp, Homo sapiens
tgactcttggtttct

SEQ ID NO: 700236 - DNA, 15 bp, Homo sapiens
gactcttggtttctg

SEQ ID NO: 700237 - DNA, 15 bp, Homo sapiens
actcttggtttctga

SEQ ID NO: 700238 - DNA, 15 bp, Homo sapiens
ctcttggtttctgaa

SEQ ID NO: 700239 - DNA, 15 bp, Homo sapiens
tcttggtttctgaaa

SEQ ID NO: 700240 - DNA, 15 bp, Homo sapiens
cttggtttctgaaaa

SEQ ID NO: 700241 - DNA, 15 bp, Homo sapiens
ttggtttctgaaaaa

SEQ ID NO: 700242 - DNA, 15 bp, Homo sapiens
tggtttctgaaaaat

SEQ ID NO: 700243 - DNA, 15 bp, Homo sapiens
ggtttctgaaaaata

SEQ ID NO: 700244 - DNA, 15 bp, Homo sapiens
gtttctgaaaaatac

SEQ ID NO: 700245 - DNA, 15 bp, Homo sapiens
tttctgaaaaatact

SEQ ID NO: 700246 - DNA, 15 bp, Homo sapiens
ttctgaaaaatactc

SEQ ID NO: 700247 - DNA, 15 bp, Homo sapiens
tctgaaaaatactca

SEQ ID NO: 700248 - DNA, 15 bp, Homo sapiens
ctgaaaaatactcaa

SEQ ID NO: 700249 - DNA, 15 bp, Homo sapiens
tgaaaaatactcaat

SEQ ID NO: 700250 - DNA, 15 bp, Homo sapiens
gaaaaatactcaata

SEQ ID NO: 700251 - DNA, 15 bp, Homo sapiens
aaaaatactcaatat

SEQ ID NO: 700252 - DNA, 15 bp, Homo sapiens
aaaatactcaatatt

SEQ ID NO: 700253 - DNA, 15 bp, Homo sapiens
aaatactcaatattt

SEQ ID NO: 700254 - DNA, 15 bp, Homo sapiens
aatactcaatattta

SEQ ID NO: 700255 - DNA, 15 bp, Homo sapiens
atactcaatatttaa

SEQ ID NO: 700256 - DNA, 15 bp, Homo sapiens
tactcaatatttaat

SEQ ID NO: 700257 - DNA, 15 bp, Homo sapiens
actcaatatttaatt

SEQ ID NO: 700258 - DNA, 15 bp, Homo sapiens
ctcaatatttaattg

SEQ ID NO: 700259 - DNA, 15 bp, Homo sapiens
tcaatatttaattgt

SEQ ID NO: 700260 - DNA, 15 bp, Homo sapiens
caatatttaattgtt

SEQ ID NO: 700261 - DNA, 15 bp, Homo sapiens
aatatttaattgtta

SEQ ID NO: 700262 - DNA, 15 bp, Homo sapiens
atatttaattgttat

SEQ ID NO: 700263 - DNA, 15 bp, Homo sapiens
tatttaattgttatc

SEQ ID NO: 700264 - DNA, 15 bp, Homo sapiens
atttaattgttatca

SEQ ID NO: 700265 - DNA, 15 bp, Homo sapiens
tttaattgttatcat

SEQ ID NO: 700266 - DNA, 15 bp, Homo sapiens
ttaattgttatcatt

SEQ ID NO: 700267 - DNA, 15 bp, Homo sapiens
taattgttatcatta

SEQ ID NO: 700268 - DNA, 15 bp, Homo sapiens
aattgttatcattat

SEQ ID NO: 700269 - DNA, 15 bp, Homo sapiens
attgttatcattatg

SEQ ID NO: 700270 - DNA, 15 bp, Homo sapiens
ttgttatcattatga

SEQ ID NO: 700271 - DNA, 15 bp, Homo sapiens
tgttatcattatgag

SEQ ID NO: 700272 - DNA, 15 bp, Homo sapiens
gttatcattatgagt

SEQ ID NO: 700273 - DNA, 15 bp, Homo sapiens
ttatcattatgagta

SEQ ID NO: 700274 - DNA, 15 bp, Homo sapiens
tatcattatgagtag

SEQ ID NO: 700275 - DNA, 15 bp, Homo sapiens
atcattatgagtagc

SEQ ID NO: 700276 - DNA, 15 bp, Homo sapiens
tcattatgagtagct

SEQ ID NO: 700277 - DNA, 15 bp, Homo sapiens
cattatgagtagctc

SEQ ID NO: 700278 - DNA, 15 bp, Homo sapiens
attatgagtagctct

SEQ ID NO: 700279 - DNA, 15 bp, Homo sapiens
ttatgagtagctctt

SEQ ID NO: 700280 - DNA, 15 bp, Homo sapiens
tatgagtagctctta

SEQ ID NO: 700281 - DNA, 15 bp, Homo sapiens
atgagtagctcttat

SEQ ID NO: 700282 - DNA, 15 bp, Homo sapiens
tgagtagctcttatc

SEQ ID NO: 700283 - DNA, 15 bp, Homo sapiens
gagtagctcttatcc

SEQ ID NO: 700284 - DNA, 15 bp, Homo sapiens
agtagctcttatcct

SEQ ID NO: 700285 - DNA, 15 bp, Homo sapiens
gtagctcttatcctg

SEQ ID NO: 700286 - DNA, 15 bp, Homo sapiens
tagctcttatcctgg

SEQ ID NO: 700287 - DNA, 15 bp, Homo sapiens
agctcttatcctggg

SEQ ID NO: 700288 - DNA, 15 bp, Homo sapiens
gctcttatcctgggt

SEQ ID NO: 700289 - DNA, 15 bp, Homo sapiens
ctcttatcctgggtc

SEQ ID NO: 700290 - DNA, 15 bp, Homo sapiens
tcttatcctgggtct

SEQ ID NO: 700291 - DNA, 15 bp, Homo sapiens
cttatcctgggtctc

SEQ ID NO: 700292 - DNA, 15 bp, Homo sapiens
ttatcctgggtctca

SEQ ID NO: 700293 - DNA, 15 bp, Homo sapiens
tatcctgggtctcat

SEQ ID NO: 700294 - DNA, 15 bp, Homo sapiens
atcctgggtctcatt

SEQ ID NO: 700295 - DNA, 15 bp, Homo sapiens
tcctgggtctcatta

SEQ ID NO: 700296 - DNA, 15 bp, Homo sapiens
cctgggtctcattag

SEQ ID NO: 700297 - DNA, 15 bp, Homo sapiens
ctgggtctcattagt

SEQ ID NO: 700298 - DNA, 15 bp, Homo sapiens
tgggtctcattagtt

SEQ ID NO: 700299 - DNA, 15 bp, Homo sapiens
gggtctcattagttt

SEQ ID NO: 700300 - DNA, 15 bp, Homo sapiens
ggtctcattagtttt

SEQ ID NO: 700301 - DNA, 15 bp, Homo sapiens
gtctcattagttttt

SEQ ID NO: 700302 - DNA, 15 bp, Homo sapiens
tctcattagtttttg

SEQ ID NO: 700303 - DNA, 15 bp, Homo sapiens
ctcattagtttttga

SEQ ID NO: 700304 - DNA, 15 bp, Homo sapiens
tcattagtttttgat

SEQ ID NO: 700305 - DNA, 15 bp, Homo sapiens
cattagtttttgata

SEQ ID NO: 700306 - DNA, 15 bp, Homo sapiens
attagtttttgataa

SEQ ID NO: 700307 - DNA, 15 bp, Homo sapiens
ttagtttttgataag

SEQ ID NO: 700308 - DNA, 15 bp, Homo sapiens
tagtttttgataagc

SEQ ID NO: 700309 - DNA, 15 bp, Homo sapiens
agtttttgataagca

SEQ ID NO: 700310 - DNA, 15 bp, Homo sapiens
gtttttgataagcaa

SEQ ID NO: 700311 - DNA, 15 bp, Homo sapiens
tttttgataagcaat

SEQ ID NO: 700312 - DNA, 15 bp, Homo sapiens
ttttgataagcaatt

SEQ ID NO: 700313 - DNA, 15 bp, Homo sapiens
tttgataagcaattt

SEQ ID NO: 700314 - DNA, 15 bp, Homo sapiens
ttgataagcaatttt

SEQ ID NO: 700315 - DNA, 15 bp, Homo sapiens
tgataagcaattttc

SEQ ID NO: 700316 - DNA, 15 bp, Homo sapiens
gataagcaattttct

SEQ ID NO: 700317 - DNA, 15 bp, Homo sapiens
ataagcaattttcta

SEQ ID NO: 700318 - DNA, 15 bp, Homo sapiens
taagcaattttctaa

SEQ ID NO: 700319 - DNA, 15 bp, Homo sapiens
aagcaattttctaac

SEQ ID NO: 700320 - DNA, 15 bp, Homo sapiens
agcaattttctaaca

SEQ ID NO: 700321 - DNA, 15 bp, Homo sapiens
gcaattttctaacat

SEQ ID NO: 700322 - DNA, 15 bp, Homo sapiens
caattttctaacatt

SEQ ID NO: 700323 - DNA, 15 bp, Homo sapiens
aattttctaacattc

SEQ ID NO: 700324 - DNA, 15 bp, Homo sapiens
attttctaacattct

SEQ ID NO: 700325 - DNA, 15 bp, Homo sapiens
ttttctaacattctt

SEQ ID NO: 700326 - DNA, 15 bp, Homo sapiens
tttctaacattcttt

SEQ ID NO: 700327 - DNA, 15 bp, Homo sapiens
ttctaacattctttc

SEQ ID NO: 700328 - DNA, 15 bp, Homo sapiens
tctaacattctttcc

SEQ ID NO: 700329 - DNA, 15 bp, Homo sapiens
ctaacattctttcct

SEQ ID NO: 700330 - DNA, 15 bp, Homo sapiens
taacattctttcctc

SEQ ID NO: 700331 - DNA, 15 bp, Homo sapiens
aacattctttcctct

SEQ ID NO: 700332 - DNA, 15 bp, Homo sapiens
acattctttcctctt

SEQ ID NO: 700333 - DNA, 15 bp, Homo sapiens
cattctttcctcttt

SEQ ID NO: 700334 - DNA, 15 bp, Homo sapiens
attctttcctctttc

SEQ ID NO: 700335 - DNA, 15 bp, Homo sapiens
ttctttcctctttcc

SEQ ID NO: 700336 - DNA, 15 bp, Homo sapiens
tctttcctctttcct

SEQ ID NO: 700337 - DNA, 15 bp, Homo sapiens
ctttcctctttccta

SEQ ID NO: 700338 - DNA, 15 bp, Homo sapiens
tttcctctttcctat

SEQ ID NO: 700339 - DNA, 15 bp, Homo sapiens
ttcctctttcctatg

SEQ ID NO: 700340 - DNA, 15 bp, Homo sapiens
tcctctttcctatgc

SEQ ID NO: 700341 - DNA, 15 bp, Homo sapiens
cctctttcctatgca

SEQ ID NO: 700342 - DNA, 15 bp, Homo sapiens
ctctttcctatgcag

SEQ ID NO: 700343 - DNA, 15 bp, Homo sapiens
tctttcctatgcagt

SEQ ID NO: 700344 - DNA, 15 bp, Homo sapiens
ctttcctatgcagtt

SEQ ID NO: 700345 - DNA, 15 bp, Homo sapiens
tttcctatgcagttg

SEQ ID NO: 700346 - DNA, 15 bp, Homo sapiens
ttcctatgcagttgt

SEQ ID NO: 700347 - DNA, 15 bp, Homo sapiens
tcctatgcagttgta

SEQ ID NO: 700348 - DNA, 15 bp, Homo sapiens
cctatgcagttgtat

SEQ ID NO: 700349 - DNA, 15 bp, Homo sapiens
ctatgcagttgtatt

SEQ ID NO: 700350 - DNA, 15 bp, Homo sapiens
tatgcagttgtatta

SEQ ID NO: 700351 - DNA, 15 bp, Homo sapiens
atgcagttgtattaa

SEQ ID NO: 700352 - DNA, 15 bp, Homo sapiens
tgcagttgtattaat

SEQ ID NO: 700353 - DNA, 15 bp, Homo sapiens
gcagttgtattaata

SEQ ID NO: 700354 - DNA, 15 bp, Homo sapiens
cagttgtattaatat

SEQ ID NO: 700355 - DNA, 15 bp, Homo sapiens
agttgtattaatatt

SEQ ID NO: 700356 - DNA, 15 bp, Homo sapiens
gttgtattaatattt

SEQ ID NO: 700357 - DNA, 15 bp, Homo sapiens
ttgtattaatatttt

SEQ ID NO: 700358 - DNA, 15 bp, Homo sapiens
tgtattaatatttta

SEQ ID NO: 700359 - DNA, 15 bp, Homo sapiens
gtattaatattttag

SEQ ID NO: 700360 - DNA, 15 bp, Homo sapiens
tattaatattttaga

SEQ ID NO: 700361 - DNA, 15 bp, Homo sapiens
attaatattttagag

SEQ ID NO: 700362 - DNA, 15 bp, Homo sapiens
ttaatattttagagc

SEQ ID NO: 700363 - DNA, 15 bp, Homo sapiens
taatattttagagct

SEQ ID NO: 700364 - DNA, 15 bp, Homo sapiens
aatattttagagctg

SEQ ID NO: 700365 - DNA, 15 bp, Homo sapiens
atattttagagctgt

SEQ ID NO: 700366 - DNA, 15 bp, Homo sapiens
tattttagagctgtt

SEQ ID NO: 700367 - DNA, 15 bp, Homo sapiens
attttagagctgttt

SEQ ID NO: 700368 - DNA, 15 bp, Homo sapiens
ttttagagctgttta

SEQ ID NO: 700369 - DNA, 15 bp, Homo sapiens
tttagagctgtttaa

SEQ ID NO: 700370 - DNA, 15 bp, Homo sapiens
ttagagctgtttaaa

SEQ ID NO: 700371 - DNA, 15 bp, Homo sapiens
tagagctgtttaaat

SEQ ID NO: 700372 - DNA, 15 bp, Homo sapiens
agagctgtttaaatt

SEQ ID NO: 700373 - DNA, 15 bp, Homo sapiens
gagctgtttaaattt

SEQ ID NO: 700374 - DNA, 15 bp, Homo sapiens
agctgtttaaatttt

SEQ ID NO: 700375 - DNA, 15 bp, Homo sapiens
gctgtttaaattttt

SEQ ID NO: 700376 - DNA, 15 bp, Homo sapiens
ctgtttaaattttta

SEQ ID NO: 700377 - DNA, 15 bp, Homo sapiens
tgtttaaatttttaa

SEQ ID NO: 700378 - DNA, 15 bp, Homo sapiens
gtttaaatttttaaa

SEQ ID NO: 700379 - DNA, 15 bp, Homo sapiens
tttaaatttttaaat

SEQ ID NO: 700380 - DNA, 15 bp, Homo sapiens
ttaaatttttaaatt

SEQ ID NO: 700381 - DNA, 15 bp, Homo sapiens
taaatttttaaatta

SEQ ID NO: 700382 - DNA, 15 bp, Homo sapiens
aaatttttaaattac

SEQ ID NO: 700383 - DNA, 15 bp, Homo sapiens
aatttttaaattact

SEQ ID NO: 700384 - DNA, 15 bp, Homo sapiens
atttttaaattactc

SEQ ID NO: 700385 - DNA, 15 bp, Homo sapiens
tttttaaattactca

SEQ ID NO: 700386 - DNA, 15 bp, Homo sapiens
ttttaaattactcat

SEQ ID NO: 700387 - DNA, 15 bp, Homo sapiens
tttaaattactcatt

SEQ ID NO: 700388 - DNA, 15 bp, Homo sapiens
ttaaattactcattt

SEQ ID NO: 700389 - DNA, 15 bp, Homo sapiens
taaattactcatttc

SEQ ID NO: 700390 - DNA, 15 bp, Homo sapiens
aaattactcatttct

SEQ ID NO: 700391 - DNA, 15 bp, Homo sapiens
aattactcatttctc

SEQ ID NO: 700392 - DNA, 15 bp, Homo sapiens
attactcatttctcc

SEQ ID NO: 700393 - DNA, 15 bp, Homo sapiens
ttactcatttctcca

SEQ ID NO: 700394 - DNA, 15 bp, Homo sapiens
tactcatttctccaa

SEQ ID NO: 700395 - DNA, 15 bp, Homo sapiens
actcatttctccaaa

SEQ ID NO: 700396 - DNA, 15 bp, Homo sapiens
ctcatttctccaaaa

SEQ ID NO: 700397 - DNA, 15 bp, Homo sapiens
tcatttctccaaaag

SEQ ID NO: 700398 - DNA, 15 bp, Homo sapiens
catttctccaaaaga

SEQ ID NO: 700399 - DNA, 15 bp, Homo sapiens
atttctccaaaagaa

SEQ ID NO: 700400 - DNA, 15 bp, Homo sapiens
tttctccaaaagaac

SEQ ID NO: 700401 - DNA, 15 bp, Homo sapiens
ttctccaaaagaaca

SEQ ID NO: 700402 - DNA, 15 bp, Homo sapiens
tctccaaaagaacaa

SEQ ID NO: 700403 - DNA, 15 bp, Homo sapiens
ctccaaaagaacaaa

SEQ ID NO: 700404 - DNA, 15 bp, Homo sapiens
tccaaaagaacaaac

SEQ ID NO: 700405 - DNA, 15 bp, Homo sapiens
ccaaaagaacaaact

SEQ ID NO: 700406 - DNA, 15 bp, Homo sapiens
caaaagaacaaactc

SEQ ID NO: 700407 - DNA, 15 bp, Homo sapiens
aaaagaacaaactca

SEQ ID NO: 700408 - DNA, 15 bp, Homo sapiens
aaagaacaaactcaa

SEQ ID NO: 700409 - DNA, 15 bp, Homo sapiens
aagaacaaactcaag

SEQ ID NO: 700410 - DNA, 15 bp, Homo sapiens
agaacaaactcaaga

SEQ ID NO: 700411 - DNA, 15 bp, Homo sapiens
gaacaaactcaagaa

SEQ ID NO: 700412 - DNA, 15 bp, Homo sapiens
aacaaactcaagaat

SEQ ID NO: 700413 - DNA, 15 bp, Homo sapiens
acaaactcaagaatg

SEQ ID NO: 700414 - DNA, 15 bp, Homo sapiens
caaactcaagaatgt

SEQ ID NO: 700415 - DNA, 15 bp, Homo sapiens
aaactcaagaatgtt

SEQ ID NO: 700416 - DNA, 15 bp, Homo sapiens
aactcaagaatgttt

SEQ ID NO: 700417 - DNA, 15 bp, Homo sapiens
actcaagaatgttta

SEQ ID NO: 700418 - DNA, 15 bp, Homo sapiens
ctcaagaatgtttat

SEQ ID NO: 700419 - DNA, 15 bp, Homo sapiens
tcaagaatgtttatc

SEQ ID NO: 700420 - DNA, 15 bp, Homo sapiens
caagaatgtttatct

SEQ ID NO: 700421 - DNA, 15 bp, Homo sapiens
tctttcactgtttta

SEQ ID NO: 700422 - DNA, 15 bp, Homo sapiens
ctttcactgttttat

SEQ ID NO: 700423 - DNA, 15 bp, Homo sapiens
tttcactgttttata

SEQ ID NO: 700424 - DNA, 15 bp, Homo sapiens
ttcactgttttataa

SEQ ID NO: 700425 - DNA, 15 bp, Homo sapiens
tcactgttttataaa

SEQ ID NO: 700426 - DNA, 15 bp, Homo sapiens
cactgttttataaaa

SEQ ID NO: 700427 - DNA, 15 bp, Homo sapiens
actgttttataaaaa

SEQ ID NO: 700428 - DNA, 15 bp, Homo sapiens
ctgttttataaaaaa

SEQ ID NO: 700429 - DNA, 15 bp, Homo sapiens
tgttttataaaaaag

SEQ ID NO: 700430 - DNA, 15 bp, Homo sapiens
gttttataaaaaagg

SEQ ID NO: 700431 - DNA, 15 bp, Homo sapiens
ttttataaaaaaggt

SEQ ID NO: 700432 - DNA, 15 bp, Homo sapiens
tttataaaaaaggtt

SEQ ID NO: 700433 - DNA, 15 bp, Homo sapiens
ttataaaaaaggtta

SEQ ID NO: 700434 - DNA, 15 bp, Homo sapiens
tataaaaaaggttag

SEQ ID NO: 700435 - DNA, 15 bp, Homo sapiens
ataaaaaaggttagt

SEQ ID NO: 700436 - DNA, 15 bp, Homo sapiens
taaaaaaggttagta

SEQ ID NO: 700437 - DNA, 15 bp, Homo sapiens
aaaaaaggttagtag

SEQ ID NO: 700438 - DNA, 15 bp, Homo sapiens
aaaaaggttagtaga

SEQ ID NO: 700439 - DNA, 15 bp, Homo sapiens
aaaaggttagtagat

SEQ ID NO: 700440 - DNA, 15 bp, Homo sapiens
aaaggttagtagatg

SEQ ID NO: 700441 - DNA, 15 bp, Homo sapiens
aaggttagtagatga

SEQ ID NO: 700442 - DNA, 15 bp, Homo sapiens
aggttagtagatgat

SEQ ID NO: 700443 - DNA, 15 bp, Homo sapiens
ggttagtagatgatt

SEQ ID NO: 700444 - DNA, 15 bp, Homo sapiens
gttagtagatgatta

SEQ ID NO: 700445 - DNA, 15 bp, Homo sapiens
ttagtagatgattat

SEQ ID NO: 700446 - DNA, 15 bp, Homo sapiens
tagtagatgattatt

SEQ ID NO: 700447 - DNA, 15 bp, Homo sapiens
agtagatgattattt

SEQ ID NO: 700448 - DNA, 15 bp, Homo sapiens
gtagatgattatttt

SEQ ID NO: 700449 - DNA, 15 bp, Homo sapiens
tagatgattattttc

SEQ ID NO: 700450 - DNA, 15 bp, Homo sapiens
agatgattattttca

SEQ ID NO: 700451 - DNA, 15 bp, Homo sapiens
gatgattattttcaa

SEQ ID NO: 700452 - DNA, 15 bp, Homo sapiens
atgattattttcaag

SEQ ID NO: 700453 - DNA, 15 bp, Homo sapiens
tgattattttcaaga

SEQ ID NO: 700454 - DNA, 15 bp, Homo sapiens
gattattttcaagag

SEQ ID NO: 700455 - DNA, 15 bp, Homo sapiens
attattttcaagagc

SEQ ID NO: 700456 - DNA, 15 bp, Homo sapiens
ttattttcaagagca

SEQ ID NO: 700457 - DNA, 15 bp, Homo sapiens
tattttcaagagcat

SEQ ID NO: 700458 - DNA, 15 bp, Homo sapiens
attttcaagagcatg

SEQ ID NO: 700459 - DNA, 15 bp, Homo sapiens
ttttcaagagcatgg

SEQ ID NO: 700460 - DNA, 15 bp, Homo sapiens
tttcaagagcatgga

SEQ ID NO: 700461 - DNA, 15 bp, Homo sapiens
ttcaagagcatggac

SEQ ID NO: 700462 - DNA, 15 bp, Homo sapiens
tcaagagcatggact

SEQ ID NO: 700463 - DNA, 15 bp, Homo sapiens
caagagcatggactc

SEQ ID NO: 700464 - DNA, 15 bp, Homo sapiens
aagagcatggactct

SEQ ID NO: 700465 - DNA, 15 bp, Homo sapiens
agagcatggactctg

SEQ ID NO: 700466 - DNA, 15 bp, Homo sapiens
gagcatggactctga

SEQ ID NO: 700467 - DNA, 15 bp, Homo sapiens
agcatggactctgaa

SEQ ID NO: 700468 - DNA, 15 bp, Homo sapiens
gcatggactctgaaa

SEQ ID NO: 700469 - DNA, 15 bp, Homo sapiens
catggactctgaaac

SEQ ID NO: 700470 - DNA, 15 bp, Homo sapiens
atggactctgaaact

SEQ ID NO: 700471 - DNA, 15 bp, Homo sapiens
tggactctgaaacta

SEQ ID NO: 700472 - DNA, 15 bp, Homo sapiens
ggactctgaaactag

SEQ ID NO: 700473 - DNA, 15 bp, Homo sapiens
gactctgaaactagg

SEQ ID NO: 700474 - DNA, 15 bp, Homo sapiens
actctgaaactaggc

SEQ ID NO: 700475 - DNA, 15 bp, Homo sapiens
ctctgaaactaggct

SEQ ID NO: 700476 - DNA, 15 bp, Homo sapiens
tctgaaactaggctg

SEQ ID NO: 700477 - DNA, 15 bp, Homo sapiens
ctgaaactaggctga

SEQ ID NO: 700478 - DNA, 15 bp, Homo sapiens
tgaaactaggctgac

SEQ ID NO: 700479 - DNA, 15 bp, Homo sapiens
gaaactaggctgact

SEQ ID NO: 700480 - DNA, 15 bp, Homo sapiens
aaactaggctgactg

SEQ ID NO: 700481 - DNA, 15 bp, Homo sapiens
aactaggctgactgg

SEQ ID NO: 700482 - DNA, 15 bp, Homo sapiens
actaggctgactggg

SEQ ID NO: 700483 - DNA, 15 bp, Homo sapiens
ctaggctgactgggt

SEQ ID NO: 700484 - DNA, 15 bp, Homo sapiens
taggctgactgggtt

SEQ ID NO: 700485 - DNA, 15 bp, Homo sapiens
aggctgactgggttc

SEQ ID NO: 700486 - DNA, 15 bp, Homo sapiens
ggctgactgggttca

SEQ ID NO: 700487 - DNA, 15 bp, Homo sapiens
gctgactgggttcaa

SEQ ID NO: 700488 - DNA, 15 bp, Homo sapiens
ctgactgggttcaaa

SEQ ID NO: 700489 - DNA, 15 bp, Homo sapiens
tgactgggttcaaat

SEQ ID NO: 700490 - DNA, 15 bp, Homo sapiens
gactgggttcaaatc

SEQ ID NO: 700491 - DNA, 15 bp, Homo sapiens
actgggttcaaatca

SEQ ID NO: 700492 - DNA, 15 bp, Homo sapiens
ctgggttcaaatcat

SEQ ID NO: 700493 - DNA, 15 bp, Homo sapiens
tgggttcaaatcatg

SEQ ID NO: 700494 - DNA, 15 bp, Homo sapiens
gggttcaaatcatgt

SEQ ID NO: 700495 - DNA, 15 bp, Homo sapiens
ggttcaaatcatgtt

SEQ ID NO: 700496 - DNA, 15 bp, Homo sapiens
gttcaaatcatgttt

SEQ ID NO: 700497 - DNA, 15 bp, Homo sapiens
ttcaaatcatgtttc

SEQ ID NO: 700498 - DNA, 15 bp, Homo sapiens
tcaaatcatgtttct

SEQ ID NO: 700499 - DNA, 15 bp, Homo sapiens
caaatcatgtttctt

SEQ ID NO: 700500 - DNA, 15 bp, Homo sapiens
aaatcatgtttcttc

SEQ ID NO: 700501 - DNA, 15 bp, Homo sapiens
aatcatgtttcttct

SEQ ID NO: 700502 - DNA, 15 bp, Homo sapiens
atcatgtttcttcta

SEQ ID NO: 700503 - DNA, 15 bp, Homo sapiens
tcatgtttcttctac

SEQ ID NO: 700504 - DNA, 15 bp, Homo sapiens
catgtttcttctact

SEQ ID NO: 700505 - DNA, 15 bp, Homo sapiens
atgtttcttctactt

SEQ ID NO: 700506 - DNA, 15 bp, Homo sapiens
tgtttcttctacttt

SEQ ID NO: 700507 - DNA, 15 bp, Homo sapiens
gtttcttctactttc

SEQ ID NO: 700508 - DNA, 15 bp, Homo sapiens
tttcttctactttct

SEQ ID NO: 700509 - DNA, 15 bp, Homo sapiens
ttcttctactttcta

SEQ ID NO: 700510 - DNA, 15 bp, Homo sapiens
tcttctactttctag

SEQ ID NO: 700511 - DNA, 15 bp, Homo sapiens
cttctactttctagg

SEQ ID NO: 700512 - DNA, 15 bp, Homo sapiens
ttctactttctaggt

SEQ ID NO: 700513 - DNA, 15 bp, Homo sapiens
tctactttctaggta

SEQ ID NO: 700514 - DNA, 15 bp, Homo sapiens
ctactttctaggtac

SEQ ID NO: 700515 - DNA, 15 bp, Homo sapiens
tactttctaggtaca

SEQ ID NO: 700516 - DNA, 15 bp, Homo sapiens
actttctaggtacat

SEQ ID NO: 700517 - DNA, 15 bp, Homo sapiens
ctttctaggtacatt

SEQ ID NO: 700518 - DNA, 15 bp, Homo sapiens
tttctaggtacatta

SEQ ID NO: 700519 - DNA, 15 bp, Homo sapiens
ttctaggtacattac

SEQ ID NO: 700520 - DNA, 15 bp, Homo sapiens
tctaggtacattact

SEQ ID NO: 700521 - DNA, 15 bp, Homo sapiens
ctaggtacattactg

SEQ ID NO: 700522 - DNA, 15 bp, Homo sapiens
taggtacattactgg

SEQ ID NO: 700523 - DNA, 15 bp, Homo sapiens
aggtacattactggg

SEQ ID NO: 700524 - DNA, 15 bp, Homo sapiens
ggtacattactgggc

SEQ ID NO: 700525 - DNA, 15 bp, Homo sapiens
gtacattactgggca

SEQ ID NO: 700526 - DNA, 15 bp, Homo sapiens
tacattactgggcaa

SEQ ID NO: 700527 - DNA, 15 bp, Homo sapiens
acattactgggcaag

SEQ ID NO: 700528 - DNA, 15 bp, Homo sapiens
cattactgggcaagt

SEQ ID NO: 700529 - DNA, 15 bp, Homo sapiens
attactgggcaagtc

SEQ ID NO: 700530 - DNA, 15 bp, Homo sapiens
ttactgggcaagtca

SEQ ID NO: 700531 - DNA, 15 bp, Homo sapiens
tactgggcaagtcac

SEQ ID NO: 700532 - DNA, 15 bp, Homo sapiens
actgggcaagtcact

SEQ ID NO: 700533 - DNA, 15 bp, Homo sapiens
ctgggcaagtcactt

SEQ ID NO: 700534 - DNA, 15 bp, Homo sapiens
tgggcaagtcactta

SEQ ID NO: 700535 - DNA, 15 bp, Homo sapiens
gggcaagtcacttaa

SEQ ID NO: 700536 - DNA, 15 bp, Homo sapiens
ggcaagtcacttaat

SEQ ID NO: 700537 - DNA, 15 bp, Homo sapiens
gcaagtcacttaata

SEQ ID NO: 700538 - DNA, 15 bp, Homo sapiens
caagtcacttaatat

SEQ ID NO: 700539 - DNA, 15 bp, Homo sapiens
aagtcacttaatatc

SEQ ID NO: 700540 - DNA, 15 bp, Homo sapiens
agtcacttaatatct

SEQ ID NO: 700541 - DNA, 15 bp, Homo sapiens
gtcacttaatatctc

SEQ ID NO: 700542 - DNA, 15 bp, Homo sapiens
tcacttaatatctct

SEQ ID NO: 700543 - DNA, 15 bp, Homo sapiens
cacttaatatctctg

SEQ ID NO: 700544 - DNA, 15 bp, Homo sapiens
acttaatatctctgt

SEQ ID NO: 700545 - DNA, 15 bp, Homo sapiens
cttaatatctctgtg

SEQ ID NO: 700546 - DNA, 15 bp, Homo sapiens
ttaatatctctgtgt

SEQ ID NO: 700547 - DNA, 15 bp, Homo sapiens
taatatctctgtgtc

SEQ ID NO: 700548 - DNA, 15 bp, Homo sapiens
aatatctctgtgtct

SEQ ID NO: 700549 - DNA, 15 bp, Homo sapiens
atatctctgtgtctc

SEQ ID NO: 700550 - DNA, 15 bp, Homo sapiens
tatctctgtgtctca

SEQ ID NO: 700551 - DNA, 15 bp, Homo sapiens
atctctgtgtctcag

SEQ ID NO: 700552 - DNA, 15 bp, Homo sapiens
tctctgtgtctcagt

SEQ ID NO: 700553 - DNA, 15 bp, Homo sapiens
ctctgtgtctcagtt

SEQ ID NO: 700554 - DNA, 15 bp, Homo sapiens
tctgtgtctcagttt

SEQ ID NO: 700555 - DNA, 15 bp, Homo sapiens
ctgtgtctcagtttc

SEQ ID NO: 700556 - DNA, 15 bp, Homo sapiens
tgtgtctcagtttcc

SEQ ID NO: 700557 - DNA, 15 bp, Homo sapiens
gtgtctcagtttcct

SEQ ID NO: 700558 - DNA, 15 bp, Homo sapiens
tgtctcagtttcctc

SEQ ID NO: 700559 - DNA, 15 bp, Homo sapiens
gtctcagtttcctca

SEQ ID NO: 700560 - DNA, 15 bp, Homo sapiens
tctcagtttcctcat

SEQ ID NO: 700561 - DNA, 15 bp, Homo sapiens
ctcagtttcctcatc

SEQ ID NO: 700562 - DNA, 15 bp, Homo sapiens
tcagtttcctcatct

SEQ ID NO: 700563 - DNA, 15 bp, Homo sapiens
cagtttcctcatcta

SEQ ID NO: 700564 - DNA, 15 bp, Homo sapiens
agtttcctcatctat

SEQ ID NO: 700565 - DNA, 15 bp, Homo sapiens
gtttcctcatctata

SEQ ID NO: 700566 - DNA, 15 bp, Homo sapiens
tttcctcatctataa

SEQ ID NO: 700567 - DNA, 15 bp, Homo sapiens
ttcctcatctataaa

SEQ ID NO: 700568 - DNA, 15 bp, Homo sapiens
tcctcatctataaaa

SEQ ID NO: 700569 - DNA, 15 bp, Homo sapiens
cctcatctataaaat

SEQ ID NO: 700570 - DNA, 15 bp, Homo sapiens
ctcatctataaaatg

SEQ ID NO: 700571 - DNA, 15 bp, Homo sapiens
tcatctataaaatgg

SEQ ID NO: 700572 - DNA, 15 bp, Homo sapiens
catctataaaatgga

SEQ ID NO: 700573 - DNA, 15 bp, Homo sapiens
atctataaaatggaa

SEQ ID NO: 700574 - DNA, 15 bp, Homo sapiens
tctataaaatggaaa

SEQ ID NO: 700575 - DNA, 15 bp, Homo sapiens
ctataaaatggaaat

SEQ ID NO: 700576 - DNA, 15 bp, Homo sapiens
tataaaatggaaatg

SEQ ID NO: 700577 - DNA, 15 bp, Homo sapiens
ataaaatggaaatga

SEQ ID NO: 700578 - DNA, 15 bp, Homo sapiens
taaaatggaaatgat

SEQ ID NO: 700579 - DNA, 15 bp, Homo sapiens
aaaatggaaatgata

SEQ ID NO: 700580 - DNA, 15 bp, Homo sapiens
aaatggaaatgataa

SEQ ID NO: 700581 - DNA, 15 bp, Homo sapiens
aatggaaatgataat

SEQ ID NO: 700582 - DNA, 15 bp, Homo sapiens
atggaaatgataatg

SEQ ID NO: 700583 - DNA, 15 bp, Homo sapiens
tggaaatgataatgt

SEQ ID NO: 700584 - DNA, 15 bp, Homo sapiens
ggaaatgataatgtt

SEQ ID NO: 700585 - DNA, 15 bp, Homo sapiens
gaaatgataatgttg

SEQ ID NO: 700586 - DNA, 15 bp, Homo sapiens
aaatgataatgttgc

SEQ ID NO: 700587 - DNA, 15 bp, Homo sapiens
aatgataatgttgcg

SEQ ID NO: 700588 - DNA, 15 bp, Homo sapiens
atgataatgttgcga

SEQ ID NO: 700589 - DNA, 15 bp, Homo sapiens
tgataatgttgcgag

SEQ ID NO: 700590 - DNA, 15 bp, Homo sapiens
gataatgttgcgaga

SEQ ID NO: 700591 - DNA, 15 bp, Homo sapiens
ataatgttgcgagat

SEQ ID NO: 700592 - DNA, 15 bp, Homo sapiens
taatgttgcgagatc

SEQ ID NO: 700593 - DNA, 15 bp, Homo sapiens
aatgttgcgagatct

SEQ ID NO: 700594 - DNA, 15 bp, Homo sapiens
atgttgcgagatctt

SEQ ID NO: 700595 - DNA, 15 bp, Homo sapiens
tgttgcgagatcttt

SEQ ID NO: 700596 - DNA, 15 bp, Homo sapiens
gttgcgagatctttc

SEQ ID NO: 700597 - DNA, 15 bp, Homo sapiens
ttgcgagatctttct

SEQ ID NO: 700598 - DNA, 15 bp, Homo sapiens
tgcgagatctttctt

SEQ ID NO: 700599 - DNA, 15 bp, Homo sapiens
gcgagatctttcttg

SEQ ID NO: 700600 - DNA, 15 bp, Homo sapiens
cgagatctttcttga

SEQ ID NO: 700601 - DNA, 15 bp, Homo sapiens
gagatctttcttgac

SEQ ID NO: 700602 - DNA, 15 bp, Homo sapiens
agatctttcttgact

SEQ ID NO: 700603 - DNA, 15 bp, Homo sapiens
gatctttcttgacta

SEQ ID NO: 700604 - DNA, 15 bp, Homo sapiens
atctttcttgactat

SEQ ID NO: 700605 - DNA, 15 bp, Homo sapiens
tctttcttgactatt

SEQ ID NO: 700606 - DNA, 15 bp, Homo sapiens
ctttcttgactattc

SEQ ID NO: 700607 - DNA, 15 bp, Homo sapiens
tttcttgactattca

SEQ ID NO: 700608 - DNA, 15 bp, Homo sapiens
ttcttgactattcag

SEQ ID NO: 700609 - DNA, 15 bp, Homo sapiens
tcttgactattcaga

SEQ ID NO: 700610 - DNA, 15 bp, Homo sapiens
cttgactattcagag

SEQ ID NO: 700611 - DNA, 15 bp, Homo sapiens
ttgactattcagagt

SEQ ID NO: 700612 - DNA, 15 bp, Homo sapiens
tgactattcagagtc

SEQ ID NO: 700613 - DNA, 15 bp, Homo sapiens
gactattcagagtcg

SEQ ID NO: 700614 - DNA, 15 bp, Homo sapiens
actattcagagtcgt

SEQ ID NO: 700615 - DNA, 15 bp, Homo sapiens
ctattcagagtcgtt

SEQ ID NO: 700616 - DNA, 15 bp, Homo sapiens
tattcagagtcgttt

SEQ ID NO: 700617 - DNA, 15 bp, Homo sapiens
attcagagtcgtttt

SEQ ID NO: 700618 - DNA, 15 bp, Homo sapiens
ttcagagtcgttttt

SEQ ID NO: 700619 - DNA, 15 bp, Homo sapiens
tcagagtcgtttttc

SEQ ID NO: 700620 - DNA, 15 bp, Homo sapiens
cagagtcgtttttct

SEQ ID NO: 700621 - DNA, 15 bp, Homo sapiens
agagtcgtttttctg

SEQ ID NO: 700622 - DNA, 15 bp, Homo sapiens
gagtcgtttttctgg

SEQ ID NO: 700623 - DNA, 15 bp, Homo sapiens
agtcgtttttctggc

SEQ ID NO: 700624 - DNA, 15 bp, Homo sapiens
gtcgtttttctggcc

SEQ ID NO: 700625 - DNA, 15 bp, Homo sapiens
tcgtttttctggccg

SEQ ID NO: 700626 - DNA, 15 bp, Homo sapiens
cgtttttctggccgg

SEQ ID NO: 700627 - DNA, 15 bp, Homo sapiens
gtttttctggccgga

SEQ ID NO: 700628 - DNA, 15 bp, Homo sapiens
tttttctggccggaa

SEQ ID NO: 700629 - DNA, 15 bp, Homo sapiens
ttttctggccggaaa

SEQ ID NO: 700630 - DNA, 15 bp, Homo sapiens
tttctggccggaaac

SEQ ID NO: 700631 - DNA, 15 bp, Homo sapiens
ttctggccggaaacc

SEQ ID NO: 700632 - DNA, 15 bp, Homo sapiens
tctggccggaaacct

SEQ ID NO: 700633 - DNA, 15 bp, Homo sapiens
ctggccggaaacctc

SEQ ID NO: 700634 - DNA, 15 bp, Homo sapiens
tggccggaaacctct

SEQ ID NO: 700635 - DNA, 15 bp, Homo sapiens
ggccggaaacctctg

SEQ ID NO: 700636 - DNA, 15 bp, Homo sapiens
gccggaaacctctgt

SEQ ID NO: 700637 - DNA, 15 bp, Homo sapiens
ccggaaacctctgtg

SEQ ID NO: 700638 - DNA, 15 bp, Homo sapiens
cggaaacctctgtga

SEQ ID NO: 700639 - DNA, 15 bp, Homo sapiens
ggaaacctctgtgac

SEQ ID NO: 700640 - DNA, 15 bp, Homo sapiens
gaaacctctgtgacc

SEQ ID NO: 700641 - DNA, 15 bp, Homo sapiens
aaacctctgtgaccg

SEQ ID NO: 700642 - DNA, 15 bp, Homo sapiens
aacctctgtgaccgg

SEQ ID NO: 700643 - DNA, 15 bp, Homo sapiens
acctctgtgaccggt

SEQ ID NO: 700644 - DNA, 15 bp, Homo sapiens
cctctgtgaccggtg

SEQ ID NO: 700645 - DNA, 15 bp, Homo sapiens
ctctgtgaccggtgg

SEQ ID NO: 700646 - DNA, 15 bp, Homo sapiens
tctgtgaccggtggc

SEQ ID NO: 700647 - DNA, 15 bp, Homo sapiens
ctgtgaccggtggcg

SEQ ID NO: 700648 - DNA, 15 bp, Homo sapiens
tgtgaccggtggcgc

SEQ ID NO: 700649 - DNA, 15 bp, Homo sapiens
gtgaccggtggcgcc

SEQ ID NO: 700650 - DNA, 15 bp, Homo sapiens
tgaccggtggcgccc

SEQ ID NO: 700651 - DNA, 15 bp, Homo sapiens
gaccggtggcgccct

SEQ ID NO: 700652 - DNA, 15 bp, Homo sapiens
accggtggcgccctt

SEQ ID NO: 700653 - DNA, 15 bp, Homo sapiens
ccggtggcgcccttg

SEQ ID NO: 700654 - DNA, 15 bp, Homo sapiens
cggtggcgcccttga

SEQ ID NO: 700655 - DNA, 15 bp, Homo sapiens
ggtggcgcccttgat

SEQ ID NO: 700656 - DNA, 15 bp, Homo sapiens
gtggcgcccttgatc

SEQ ID NO: 700657 - DNA, 15 bp, Homo sapiens
tggcgcccttgatca

SEQ ID NO: 700658 - DNA, 15 bp, Homo sapiens
ggcgcccttgatcaa

SEQ ID NO: 700659 - DNA, 15 bp, Homo sapiens
gcgcccttgatcaat

SEQ ID NO: 700660 - DNA, 15 bp, Homo sapiens
cgcccttgatcaatt

SEQ ID NO: 700661 - DNA, 15 bp, Homo sapiens
gcccttgatcaattt

SEQ ID NO: 700662 - DNA, 15 bp, Homo sapiens
cccttgatcaatttt

SEQ ID NO: 700663 - DNA, 15 bp, Homo sapiens
ccttgatcaattttt

SEQ ID NO: 700664 - DNA, 15 bp, Homo sapiens
cttgatcaatttttg

SEQ ID NO: 700665 - DNA, 15 bp, Homo sapiens
ttgatcaatttttgc

SEQ ID NO: 700666 - DNA, 15 bp, Homo sapiens
tgatcaatttttgct

SEQ ID NO: 700667 - DNA, 15 bp, Homo sapiens
gatcaatttttgctc

SEQ ID NO: 700668 - DNA, 15 bp, Homo sapiens
atcaatttttgctca

SEQ ID NO: 700669 - DNA, 15 bp, Homo sapiens
tcaatttttgctcag

SEQ ID NO: 700670 - DNA, 15 bp, Homo sapiens
caatttttgctcagg

SEQ ID NO: 700671 - DNA, 15 bp, Homo sapiens
aatttttgctcaggc

SEQ ID NO: 700672 - DNA, 15 bp, Homo sapiens
atttttgctcaggcc

SEQ ID NO: 700673 - DNA, 15 bp, Homo sapiens
tttttgctcaggccc

SEQ ID NO: 700674 - DNA, 15 bp, Homo sapiens
ttttgctcaggccca

SEQ ID NO: 700675 - DNA, 15 bp, Homo sapiens
tttgctcaggcccac

SEQ ID NO: 700676 - DNA, 15 bp, Homo sapiens
ttgctcaggcccacc

SEQ ID NO: 700677 - DNA, 15 bp, Homo sapiens
tgctcaggcccaccg

SEQ ID NO: 700678 - DNA, 15 bp, Homo sapiens
gctcaggcccaccgg

SEQ ID NO: 700679 - DNA, 15 bp, Homo sapiens
ctcaggcccaccggg

SEQ ID NO: 700680 - DNA, 15 bp, Homo sapiens
tcaggcccaccgggc

SEQ ID NO: 700681 - DNA, 15 bp, Homo sapiens
caggcccaccgggct

SEQ ID NO: 700682 - DNA, 15 bp, Homo sapiens
aggcccaccgggctc

SEQ ID NO: 700683 - DNA, 15 bp, Homo sapiens
ggcccaccgggctca

SEQ ID NO: 700684 - DNA, 15 bp, Homo sapiens
gcccaccgggctcat

SEQ ID NO: 700685 - DNA, 15 bp, Homo sapiens
cccaccgggctcatt

SEQ ID NO: 700686 - DNA, 15 bp, Homo sapiens
ccaccgggctcattt

SEQ ID NO: 700687 - DNA, 15 bp, Homo sapiens
caccgggctcatttc

SEQ ID NO: 700688 - DNA, 15 bp, Homo sapiens
accgggctcatttca

SEQ ID NO: 700689 - DNA, 15 bp, Homo sapiens
ccgggctcatttcag

SEQ ID NO: 700690 - DNA, 15 bp, Homo sapiens
cgggctcatttcagc

SEQ ID NO: 700691 - DNA, 15 bp, Homo sapiens
gggctcatttcagcc

SEQ ID NO: 700692 - DNA, 15 bp, Homo sapiens
ggctcatttcagccc

SEQ ID NO: 700693 - DNA, 15 bp, Homo sapiens
gctcatttcagcccc

SEQ ID NO: 700694 - DNA, 15 bp, Homo sapiens
ctcatttcagcccct

SEQ ID NO: 700695 - DNA, 15 bp, Homo sapiens
tcatttcagcccctt

SEQ ID NO: 700696 - DNA, 15 bp, Homo sapiens
catttcagccccttg

SEQ ID NO: 700697 - DNA, 15 bp, Homo sapiens
atttcagccccttgg

SEQ ID NO: 700698 - DNA, 15 bp, Homo sapiens
tttcagccccttggt

SEQ ID NO: 700699 - DNA, 15 bp, Homo sapiens
ttcagccccttggtc

SEQ ID NO: 700700 - DNA, 15 bp, Homo sapiens
tcagccccttggtct

SEQ ID NO: 700701 - DNA, 15 bp, Homo sapiens
cagccccttggtctg

SEQ ID NO: 700702 - DNA, 15 bp, Homo sapiens
agccccttggtctga

SEQ ID NO: 700703 - DNA, 15 bp, Homo sapiens
gccccttggtctgac

SEQ ID NO: 700704 - DNA, 15 bp, Homo sapiens
ccccttggtctgaca

SEQ ID NO: 700705 - DNA, 15 bp, Homo sapiens
cccttggtctgacag

SEQ ID NO: 700706 - DNA, 15 bp, Homo sapiens
ccttggtctgacagg

SEQ ID NO: 700707 - DNA, 15 bp, Homo sapiens
cttggtctgacaggc

SEQ ID NO: 700708 - DNA, 15 bp, Homo sapiens
ttggtctgacaggct

SEQ ID NO: 700709 - DNA, 15 bp, Homo sapiens
tggtctgacaggctg

SEQ ID NO: 700710 - DNA, 15 bp, Homo sapiens
ggtctgacaggctgc

SEQ ID NO: 700711 - DNA, 15 bp, Homo sapiens
gtctgacaggctgca

SEQ ID NO: 700712 - DNA, 15 bp, Homo sapiens
tctgacaggctgcac

SEQ ID NO: 700713 - DNA, 15 bp, Homo sapiens
ctgacaggctgcact

SEQ ID NO: 700714 - DNA, 15 bp, Homo sapiens
tgacaggctgcactc

SEQ ID NO: 700715 - DNA, 15 bp, Homo sapiens
gacaggctgcactcg

SEQ ID NO: 700716 - DNA, 15 bp, Homo sapiens
acaggctgcactcgg

SEQ ID NO: 700717 - DNA, 15 bp, Homo sapiens
caggctgcactcggc

SEQ ID NO: 700718 - DNA, 15 bp, Homo sapiens
aggctgcactcggct

SEQ ID NO: 700719 - DNA, 15 bp, Homo sapiens
ggctgcactcggctc

SEQ ID NO: 700720 - DNA, 15 bp, Homo sapiens
gctgcactcggctca

SEQ ID NO: 700721 - DNA, 15 bp, Homo sapiens
ctgcactcggctcac

SEQ ID NO: 700722 - DNA, 15 bp, Homo sapiens
tgcactcggctcaca

SEQ ID NO: 700723 - DNA, 15 bp, Homo sapiens
gcactcggctcacac

SEQ ID NO: 700724 - DNA, 15 bp, Homo sapiens
cactcggctcacact

SEQ ID NO: 700725 - DNA, 15 bp, Homo sapiens
actcggctcacacta

SEQ ID NO: 700726 - DNA, 15 bp, Homo sapiens
ctcggctcacactac

SEQ ID NO: 700727 - DNA, 15 bp, Homo sapiens
tcggctcacactacc

SEQ ID NO: 700728 - DNA, 15 bp, Homo sapiens
cggctcacactaccg

SEQ ID NO: 700729 - DNA, 15 bp, Homo sapiens
ggctcacactaccgg

SEQ ID NO: 700730 - DNA, 15 bp, Homo sapiens
gctcacactaccggc

SEQ ID NO: 700731 - DNA, 15 bp, Homo sapiens
ctcacactaccggcc

SEQ ID NO: 700732 - DNA, 15 bp, Homo sapiens
tcacactaccggcct

SEQ ID NO: 700733 - DNA, 15 bp, Homo sapiens
cacactaccggcctg

SEQ ID NO: 700734 - DNA, 15 bp, Homo sapiens
acactaccggcctgg

SEQ ID NO: 700735 - DNA, 15 bp, Homo sapiens
cactaccggcctggg

SEQ ID NO: 700736 - DNA, 15 bp, Homo sapiens
actaccggcctgggt

SEQ ID NO: 700737 - DNA, 15 bp, Homo sapiens
ctaccggcctgggtc

SEQ ID NO: 700738 - DNA, 15 bp, Homo sapiens
taccggcctgggtcc

SEQ ID NO: 700739 - DNA, 15 bp, Homo sapiens
accggcctgggtcca

SEQ ID NO: 700740 - DNA, 15 bp, Homo sapiens
ccggcctgggtccat

SEQ ID NO: 700741 - DNA, 15 bp, Homo sapiens
cggcctgggtccatg

SEQ ID NO: 700742 - DNA, 15 bp, Homo sapiens
ggcctgggtccatgc

SEQ ID NO: 700743 - DNA, 15 bp, Homo sapiens
gcctgggtccatgcc

SEQ ID NO: 700744 - DNA, 15 bp, Homo sapiens
cctgggtccatgcca

SEQ ID NO: 700745 - DNA, 15 bp, Homo sapiens
ctgggtccatgccag

SEQ ID NO: 700746 - DNA, 15 bp, Homo sapiens
tgggtccatgccagc

SEQ ID NO: 700747 - DNA, 15 bp, Homo sapiens
gggtccatgccagcc

SEQ ID NO: 700748 - DNA, 15 bp, Homo sapiens
ggtccatgccagcca

SEQ ID NO: 700749 - DNA, 15 bp, Homo sapiens
gtccatgccagccag

SEQ ID NO: 700750 - DNA, 15 bp, Homo sapiens
tccatgccagccagg

SEQ ID NO: 700751 - DNA, 15 bp, Homo sapiens
ccatgccagccagga

SEQ ID NO: 700752 - DNA, 15 bp, Homo sapiens
catgccagccaggag

SEQ ID NO: 700753 - DNA, 15 bp, Homo sapiens
atgccagccaggagc

SEQ ID NO: 700754 - DNA, 15 bp, Homo sapiens
tgccagccaggagca

SEQ ID NO: 700755 - DNA, 15 bp, Homo sapiens
gccagccaggagcaa

SEQ ID NO: 700756 - DNA, 15 bp, Homo sapiens
ccagccaggagcaag

SEQ ID NO: 700757 - DNA, 15 bp, Homo sapiens
cagccaggagcaagt

SEQ ID NO: 700758 - DNA, 15 bp, Homo sapiens
agccaggagcaagtc

SEQ ID NO: 700759 - DNA, 15 bp, Homo sapiens
gccaggagcaagtca

SEQ ID NO: 700760 - DNA, 15 bp, Homo sapiens
ccaggagcaagtcag

SEQ ID NO: 700761 - DNA, 15 bp, Homo sapiens
caggagcaagtcaga

SEQ ID NO: 700762 - DNA, 15 bp, Homo sapiens
aggagcaagtcagac

SEQ ID NO: 700763 - DNA, 15 bp, Homo sapiens
ggagcaagtcagaca

SEQ ID NO: 700764 - DNA, 15 bp, Homo sapiens
gagcaagtcagacat

SEQ ID NO: 700765 - DNA, 15 bp, Homo sapiens
agcaagtcagacatg

SEQ ID NO: 700766 - DNA, 15 bp, Homo sapiens
gcaagtcagacatgg

SEQ ID NO: 700767 - DNA, 15 bp, Homo sapiens
caagtcagacatgga

SEQ ID NO: 700768 - DNA, 15 bp, Homo sapiens
aagtcagacatggaa

SEQ ID NO: 700769 - DNA, 15 bp, Homo sapiens
agtcagacatggaac

SEQ ID NO: 700770 - DNA, 15 bp, Homo sapiens
gtcagacatggaacg

SEQ ID NO: 700771 - DNA, 15 bp, Homo sapiens
tcagacatggaacgg

SEQ ID NO: 700772 - DNA, 15 bp, Homo sapiens
cagacatggaacgga

SEQ ID NO: 700773 - DNA, 15 bp, Homo sapiens
agacatggaacggag

SEQ ID NO: 700774 - DNA, 15 bp, Homo sapiens
gacatggaacggaga

SEQ ID NO: 700775 - DNA, 15 bp, Homo sapiens
acatggaacggagag

SEQ ID NO: 700776 - DNA, 15 bp, Homo sapiens
catggaacggagagg

SEQ ID NO: 700777 - DNA, 15 bp, Homo sapiens
atggaacggagaggg

SEQ ID NO: 700778 - DNA, 15 bp, Homo sapiens
tggaacggagagggg

SEQ ID NO: 700779 - DNA, 15 bp, Homo sapiens
ggaacggagaggggt

SEQ ID NO: 700780 - DNA, 15 bp, Homo sapiens
gaacggagaggggtg

SEQ ID NO: 700781 - DNA, 15 bp, Homo sapiens
aacggagaggggtgt

SEQ ID NO: 700782 - DNA, 15 bp, Homo sapiens
acggagaggggtgtg

SEQ ID NO: 700783 - DNA, 15 bp, Homo sapiens
cggagaggggtgtgt

SEQ ID NO: 700784 - DNA, 15 bp, Homo sapiens
ggagaggggtgtgtg

SEQ ID NO: 700785 - DNA, 15 bp, Homo sapiens
gagaggggtgtgtgg

SEQ ID NO: 700786 - DNA, 15 bp, Homo sapiens
agaggggtgtgtggg

SEQ ID NO: 700787 - DNA, 15 bp, Homo sapiens
gaggggtgtgtgggc

SEQ ID NO: 700788 - DNA, 15 bp, Homo sapiens
aggggtgtgtgggca

SEQ ID NO: 700789 - DNA, 15 bp, Homo sapiens
ggggtgtgtgggcaa

SEQ ID NO: 700790 - DNA, 15 bp, Homo sapiens
gggtgtgtgggcaag

SEQ ID NO: 700791 - DNA, 15 bp, Homo sapiens
ggtgtgtgggcaagc

SEQ ID NO: 700792 - DNA, 15 bp, Homo sapiens
gtgtgtgggcaagca

SEQ ID NO: 700793 - DNA, 15 bp, Homo sapiens
tgtgtgggcaagcat

SEQ ID NO: 700794 - DNA, 15 bp, Homo sapiens
gtgtgggcaagcatg

SEQ ID NO: 700795 - DNA, 15 bp, Homo sapiens
tgtgggcaagcatga

SEQ ID NO: 700796 - DNA, 15 bp, Homo sapiens
gtgggcaagcatgag

SEQ ID NO: 700797 - DNA, 15 bp, Homo sapiens
tgggcaagcatgaga

SEQ ID NO: 700798 - DNA, 15 bp, Homo sapiens
gggcaagcatgagat

SEQ ID NO: 700799 - DNA, 15 bp, Homo sapiens
ggcaagcatgagatc

SEQ ID NO: 700800 - DNA, 15 bp, Homo sapiens
gcaagcatgagatct

SEQ ID NO: 700801 - DNA, 15 bp, Homo sapiens
caagcatgagatctg

SEQ ID NO: 700802 - DNA, 15 bp, Homo sapiens
aagcatgagatctgg

SEQ ID NO: 700803 - DNA, 15 bp, Homo sapiens
agcatgagatctggc

SEQ ID NO: 700804 - DNA, 15 bp, Homo sapiens
gcatgagatctggcc

SEQ ID NO: 700805 - DNA, 15 bp, Homo sapiens
catgagatctggcca

SEQ ID NO: 700806 - DNA, 15 bp, Homo sapiens
atgagatctggccat

SEQ ID NO: 700807 - DNA, 15 bp, Homo sapiens
tgagatctggccatt

SEQ ID NO: 700808 - DNA, 15 bp, Homo sapiens
gagatctggccattg

SEQ ID NO: 700809 - DNA, 15 bp, Homo sapiens
agatctggccattgc

SEQ ID NO: 700810 - DNA, 15 bp, Homo sapiens
gatctggccattgcc

SEQ ID NO: 700811 - DNA, 15 bp, Homo sapiens
atctggccattgccc

SEQ ID NO: 700812 - DNA, 15 bp, Homo sapiens
tctggccattgccca

SEQ ID NO: 700813 - DNA, 15 bp, Homo sapiens
ctggccattgcccac

SEQ ID NO: 700814 - DNA, 15 bp, Homo sapiens
tggccattgcccaca

SEQ ID NO: 700815 - DNA, 15 bp, Homo sapiens
ggccattgcccacag

SEQ ID NO: 700816 - DNA, 15 bp, Homo sapiens
gccattgcccacagt

SEQ ID NO: 700817 - DNA, 15 bp, Homo sapiens
ccattgcccacagtc

SEQ ID NO: 700818 - DNA, 15 bp, Homo sapiens
cattgcccacagtca

SEQ ID NO: 700819 - DNA, 15 bp, Homo sapiens
attgcccacagtcag

SEQ ID NO: 700820 - DNA, 15 bp, Homo sapiens
ttgcccacagtcaga

SEQ ID NO: 700821 - DNA, 15 bp, Homo sapiens
tgcccacagtcagaa

SEQ ID NO: 700822 - DNA, 15 bp, Homo sapiens
gcccacagtcagaaa

SEQ ID NO: 700823 - DNA, 15 bp, Homo sapiens
cccacagtcagaaat

SEQ ID NO: 700824 - DNA, 15 bp, Homo sapiens
ccacagtcagaaatg

SEQ ID NO: 700825 - DNA, 15 bp, Homo sapiens
cacagtcagaaatgc

SEQ ID NO: 700826 - DNA, 15 bp, Homo sapiens
acagtcagaaatgct

SEQ ID NO: 700827 - DNA, 15 bp, Homo sapiens
cagtcagaaatgctg

SEQ ID NO: 700828 - DNA, 15 bp, Homo sapiens
agtcagaaatgctgg

SEQ ID NO: 700829 - DNA, 15 bp, Homo sapiens
gtcagaaatgctggc

SEQ ID NO: 700830 - DNA, 15 bp, Homo sapiens
tcagaaatgctggct

SEQ ID NO: 700831 - DNA, 15 bp, Homo sapiens
cagaaatgctggctg

SEQ ID NO: 700832 - DNA, 15 bp, Homo sapiens
agaaatgctggctgc

SEQ ID NO: 700833 - DNA, 15 bp, Homo sapiens
gaaatgctggctgct

SEQ ID NO: 700834 - DNA, 15 bp, Homo sapiens
aaatgctggctgctg

SEQ ID NO: 700835 - DNA, 15 bp, Homo sapiens
aatgctggctgctgc

SEQ ID NO: 700836 - DNA, 15 bp, Homo sapiens
atgctggctgctgca

SEQ ID NO: 700837 - DNA, 15 bp, Homo sapiens
tgctggctgctgcag

SEQ ID NO: 700838 - DNA, 15 bp, Homo sapiens
gctggctgctgcagc

SEQ ID NO: 700839 - DNA, 15 bp, Homo sapiens
ctggctgctgcagcg

SEQ ID NO: 700840 - DNA, 15 bp, Homo sapiens
tggctgctgcagcgg

SEQ ID NO: 700841 - DNA, 15 bp, Homo sapiens
ggctgctgcagcggg

SEQ ID NO: 700842 - DNA, 15 bp, Homo sapiens
gctgctgcagcgggg

SEQ ID NO: 700843 - DNA, 15 bp, Homo sapiens
ctgctgcagcggggc

SEQ ID NO: 700844 - DNA, 15 bp, Homo sapiens
tgctgcagcggggcg

SEQ ID NO: 700845 - DNA, 15 bp, Homo sapiens
gctgcagcggggcgg

SEQ ID NO: 700846 - DNA, 15 bp, Homo sapiens
ctgcagcggggcggg

SEQ ID NO: 700847 - DNA, 15 bp, Homo sapiens
tgcagcggggcgggc

SEQ ID NO: 700848 - DNA, 15 bp, Homo sapiens
gcagcggggcgggca

SEQ ID NO: 700849 - DNA, 15 bp, Homo sapiens
cagcggggcgggcag

SEQ ID NO: 700850 - DNA, 15 bp, Homo sapiens
agcggggcgggcagc

SEQ ID NO: 700851 - DNA, 15 bp, Homo sapiens
gcggggcgggcagct

SEQ ID NO: 700852 - DNA, 15 bp, Homo sapiens
cggggcgggcagctc

SEQ ID NO: 700853 - DNA, 15 bp, Homo sapiens
ggggcgggcagctcc

SEQ ID NO: 700854 - DNA, 15 bp, Homo sapiens
gggcgggcagctcca

SEQ ID NO: 700855 - DNA, 15 bp, Homo sapiens
ggcgggcagctccag

SEQ ID NO: 700856 - DNA, 15 bp, Homo sapiens
gcgggcagctccagg

SEQ ID NO: 700857 - DNA, 15 bp, Homo sapiens
cgggcagctccaggt

SEQ ID NO: 700858 - DNA, 15 bp, Homo sapiens
gggcagctccaggtg

SEQ ID NO: 700859 - DNA, 15 bp, Homo sapiens
ggcagctccaggtgc

SEQ ID NO: 700860 - DNA, 15 bp, Homo sapiens
gcagctccaggtgct

SEQ ID NO: 700861 - DNA, 15 bp, Homo sapiens
cagctccaggtgctg

SEQ ID NO: 700862 - DNA, 15 bp, Homo sapiens
agctccaggtgctgg

SEQ ID NO: 700863 - DNA, 15 bp, Homo sapiens
gctccaggtgctggc

SEQ ID NO: 700864 - DNA, 15 bp, Homo sapiens
ctccaggtgctggca

SEQ ID NO: 700865 - DNA, 15 bp, Homo sapiens
tccaggtgctggcac

SEQ ID NO: 700866 - DNA, 15 bp, Homo sapiens
ccaggtgctggcaca

SEQ ID NO: 700867 - DNA, 15 bp, Homo sapiens
caggtgctggcacag

SEQ ID NO: 700868 - DNA, 15 bp, Homo sapiens
aggtgctggcacagg

SEQ ID NO: 700869 - DNA, 15 bp, Homo sapiens
ggtgctggcacaggt

SEQ ID NO: 700870 - DNA, 15 bp, Homo sapiens
gtgctggcacaggtg

SEQ ID NO: 700871 - DNA, 15 bp, Homo sapiens
tgctggcacaggtgc

SEQ ID NO: 700872 - DNA, 15 bp, Homo sapiens
gctggcacaggtgcc

SEQ ID NO: 700873 - DNA, 15 bp, Homo sapiens
ctggcacaggtgcca

SEQ ID NO: 700874 - DNA, 15 bp, Homo sapiens
tggcacaggtgccaa

SEQ ID NO: 700875 - DNA, 15 bp, Homo sapiens
ggcacaggtgccaac

SEQ ID NO: 700876 - DNA, 15 bp, Homo sapiens
gcacaggtgccaact

SEQ ID NO: 700877 - DNA, 15 bp, Homo sapiens
cacaggtgccaactc

SEQ ID NO: 700878 - DNA, 15 bp, Homo sapiens
acaggtgccaactct

SEQ ID NO: 700879 - DNA, 15 bp, Homo sapiens
caggtgccaactctc

SEQ ID NO: 700880 - DNA, 15 bp, Homo sapiens
aggtgccaactctct

SEQ ID NO: 700881 - DNA, 15 bp, Homo sapiens
ggtgccaactctctg

SEQ ID NO: 700882 - DNA, 15 bp, Homo sapiens
gtgccaactctctgt

SEQ ID NO: 700883 - DNA, 15 bp, Homo sapiens
tgccaactctctgtg

SEQ ID NO: 700884 - DNA, 15 bp, Homo sapiens
gccaactctctgtga

SEQ ID NO: 700885 - DNA, 15 bp, Homo sapiens
ccaactctctgtgag

SEQ ID NO: 700886 - DNA, 15 bp, Homo sapiens
caactctctgtgagg

SEQ ID NO: 700887 - DNA, 15 bp, Homo sapiens
aactctctgtgaggc

SEQ ID NO: 700888 - DNA, 15 bp, Homo sapiens
actctctgtgaggct

SEQ ID NO: 700889 - DNA, 15 bp, Homo sapiens
ctctctgtgaggctg

SEQ ID NO: 700890 - DNA, 15 bp, Homo sapiens
tctctgtgaggctgc

SEQ ID NO: 700891 - DNA, 15 bp, Homo sapiens
ctctgtgaggctgca

SEQ ID NO: 700892 - DNA, 15 bp, Homo sapiens
tctgtgaggctgcac

SEQ ID NO: 700893 - DNA, 15 bp, Homo sapiens
ctgtgaggctgcacc

SEQ ID NO: 700894 - DNA, 15 bp, Homo sapiens
tgtgaggctgcacct

SEQ ID NO: 700895 - DNA, 15 bp, Homo sapiens
gtgaggctgcacctg

SEQ ID NO: 700896 - DNA, 15 bp, Homo sapiens
tgaggctgcacctgg

SEQ ID NO: 700897 - DNA, 15 bp, Homo sapiens
gaggctgcacctgga

SEQ ID NO: 700898 - DNA, 15 bp, Homo sapiens
aggctgcacctggac

SEQ ID NO: 700899 - DNA, 15 bp, Homo sapiens
ggctgcacctggacc

SEQ ID NO: 700900 - DNA, 15 bp, Homo sapiens
gctgcacctggacca

SEQ ID NO: 700901 - DNA, 15 bp, Homo sapiens
ctgcacctggaccag

SEQ ID NO: 700902 - DNA, 15 bp, Homo sapiens
tgcacctggaccaga

SEQ ID NO: 700903 - DNA, 15 bp, Homo sapiens
gcacctggaccagac

SEQ ID NO: 700904 - DNA, 15 bp, Homo sapiens
cacctggaccagaca

SEQ ID NO: 700905 - DNA, 15 bp, Homo sapiens
acctggaccagacac

SEQ ID NO: 700906 - DNA, 15 bp, Homo sapiens
cctggaccagacaca

SEQ ID NO: 700907 - DNA, 15 bp, Homo sapiens
ctggaccagacacac

SEQ ID NO: 700908 - DNA, 15 bp, Homo sapiens
tggaccagacacacc

SEQ ID NO: 700909 - DNA, 15 bp, Homo sapiens
ggaccagacacacca

SEQ ID NO: 700910 - DNA, 15 bp, Homo sapiens
gaccagacacaccac

SEQ ID NO: 700911 - DNA, 15 bp, Homo sapiens
accagacacaccaca

SEQ ID NO: 700912 - DNA, 15 bp, Homo sapiens
ccagacacaccacaa

SEQ ID NO: 700913 - DNA, 15 bp, Homo sapiens
cagacacaccacaag

SEQ ID NO: 700914 - DNA, 15 bp, Homo sapiens
agacacaccacaagc

SEQ ID NO: 700915 - DNA, 15 bp, Homo sapiens
gacacaccacaagcg

SEQ ID NO: 700916 - DNA, 15 bp, Homo sapiens
acacaccacaagcgg

SEQ ID NO: 700917 - DNA, 15 bp, Homo sapiens
cacaccacaagcggt

SEQ ID NO: 700918 - DNA, 15 bp, Homo sapiens
acaccacaagcggtt

SEQ ID NO: 700919 - DNA, 15 bp, Homo sapiens
caccacaagcggttt

SEQ ID NO: 700920 - DNA, 15 bp, Homo sapiens
accacaagcggtttc

SEQ ID NO: 700921 - DNA, 15 bp, Homo sapiens
ccacaagcggtttcc

SEQ ID NO: 700922 - DNA, 15 bp, Homo sapiens
cacaagcggtttcca

SEQ ID NO: 700923 - DNA, 15 bp, Homo sapiens
acaagcggtttccac

SEQ ID NO: 700924 - DNA, 15 bp, Homo sapiens
caagcggtttccaca

SEQ ID NO: 700925 - DNA, 15 bp, Homo sapiens
aagcggtttccacag

SEQ ID NO: 700926 - DNA, 15 bp, Homo sapiens
agcggtttccacagc

SEQ ID NO: 700927 - DNA, 15 bp, Homo sapiens
gcggtttccacagct

SEQ ID NO: 700928 - DNA, 15 bp, Homo sapiens
cggtttccacagctg

SEQ ID NO: 700929 - DNA, 15 bp, Homo sapiens
ggtttccacagctgg

SEQ ID NO: 700930 - DNA, 15 bp, Homo sapiens
gtttccacagctggc

SEQ ID NO: 700931 - DNA, 15 bp, Homo sapiens
tttccacagctggca

SEQ ID NO: 700932 - DNA, 15 bp, Homo sapiens
ttccacagctggcac

SEQ ID NO: 700933 - DNA, 15 bp, Homo sapiens
tccacagctggcact

SEQ ID NO: 700934 - DNA, 15 bp, Homo sapiens
ccacagctggcactg

SEQ ID NO: 700935 - DNA, 15 bp, Homo sapiens
cacagctggcactgg

SEQ ID NO: 700936 - DNA, 15 bp, Homo sapiens
acagctggcactggg

SEQ ID NO: 700937 - DNA, 15 bp, Homo sapiens
cagctggcactgggg

SEQ ID NO: 700938 - DNA, 15 bp, Homo sapiens
agctggcactgggga

SEQ ID NO: 700939 - DNA, 15 bp, Homo sapiens
gctggcactggggaa

SEQ ID NO: 700940 - DNA, 15 bp, Homo sapiens
ctggcactggggaac

SEQ ID NO: 700941 - DNA, 15 bp, Homo sapiens
tggcactggggaaca

SEQ ID NO: 700942 - DNA, 15 bp, Homo sapiens
ggcactggggaacaa

SEQ ID NO: 700943 - DNA, 15 bp, Homo sapiens
gcactggggaacaat

SEQ ID NO: 700944 - DNA, 15 bp, Homo sapiens
cactggggaacaata

SEQ ID NO: 700945 - DNA, 15 bp, Homo sapiens
actggggaacaataa

SEQ ID NO: 700946 - DNA, 15 bp, Homo sapiens
ctggggaacaataaa

SEQ ID NO: 700947 - DNA, 15 bp, Homo sapiens
tggggaacaataaaa

SEQ ID NO: 700948 - DNA, 15 bp, Homo sapiens
ggggaacaataaaat

SEQ ID NO: 700949 - DNA, 15 bp, Homo sapiens
gggaacaataaaatg

SEQ ID NO: 700950 - DNA, 15 bp, Homo sapiens
ggaacaataaaatgg

SEQ ID NO: 700951 - DNA, 15 bp, Homo sapiens
gaacaataaaatggc

SEQ ID NO: 700952 - DNA, 15 bp, Homo sapiens
aacaataaaatggct

SEQ ID NO: 700953 - DNA, 15 bp, Homo sapiens
acaataaaatggctc

SEQ ID NO: 700954 - DNA, 15 bp, Homo sapiens
caataaaatggctcc

SEQ ID NO: 700955 - DNA, 15 bp, Homo sapiens
aataaaatggctccc

SEQ ID NO: 700956 - DNA, 15 bp, Homo sapiens
ataaaatggctccca

SEQ ID NO: 700957 - DNA, 15 bp, Homo sapiens
taaaatggctcccag

SEQ ID NO: 700958 - DNA, 15 bp, Homo sapiens
aaaatggctcccaga

SEQ ID NO: 700959 - DNA, 15 bp, Homo sapiens
aaatggctcccagaa

SEQ ID NO: 700960 - DNA, 15 bp, Homo sapiens
aatggctcccagaag

SEQ ID NO: 700961 - DNA, 15 bp, Homo sapiens
atggctcccagaagc

SEQ ID NO: 700962 - DNA, 15 bp, Homo sapiens
tggctcccagaagct

SEQ ID NO: 700963 - DNA, 15 bp, Homo sapiens
ggctcccagaagctt

SEQ ID NO: 700964 - DNA, 15 bp, Homo sapiens
gctcccagaagcttg

SEQ ID NO: 700965 - DNA, 15 bp, Homo sapiens
ctcccagaagcttgg

SEQ ID NO: 700966 - DNA, 15 bp, Homo sapiens
tcccagaagcttgga

SEQ ID NO: 700967 - DNA, 15 bp, Homo sapiens
cccagaagcttggag

SEQ ID NO: 700968 - DNA, 15 bp, Homo sapiens
ccagaagcttggaga

SEQ ID NO: 700969 - DNA, 15 bp, Homo sapiens
cagaagcttggagac

SEQ ID NO: 700970 - DNA, 15 bp, Homo sapiens
agaagcttggagacg

SEQ ID NO: 700971 - DNA, 15 bp, Homo sapiens
gaagcttggagacgc

SEQ ID NO: 700972 - DNA, 15 bp, Homo sapiens
aagcttggagacgcc

SEQ ID NO: 700973 - DNA, 15 bp, Homo sapiens
agcttggagacgcca

SEQ ID NO: 700974 - DNA, 15 bp, Homo sapiens
gcttggagacgccag

SEQ ID NO: 700975 - DNA, 15 bp, Homo sapiens
cttggagacgccaga

SEQ ID NO: 700976 - DNA, 15 bp, Homo sapiens
ttggagacgccagaa

SEQ ID NO: 700977 - DNA, 15 bp, Homo sapiens
tggagacgccagaaa

SEQ ID NO: 700978 - DNA, 15 bp, Homo sapiens
ggagacgccagaaac

SEQ ID NO: 700979 - DNA, 15 bp, Homo sapiens
gagacgccagaaacc

SEQ ID NO: 700980 - DNA, 15 bp, Homo sapiens
agacgccagaaacca

SEQ ID NO: 700981 - DNA, 15 bp, Homo sapiens
gacgccagaaaccac

SEQ ID NO: 700982 - DNA, 15 bp, Homo sapiens
acgccagaaaccaca

SEQ ID NO: 700983 - DNA, 15 bp, Homo sapiens
cgccagaaaccacag

SEQ ID NO: 700984 - DNA, 15 bp, Homo sapiens
gccagaaaccacagg

SEQ ID NO: 700985 - DNA, 15 bp, Homo sapiens
ccagaaaccacaggg

SEQ ID NO: 700986 - DNA, 15 bp, Homo sapiens
cagaaaccacagggc

SEQ ID NO: 700987 - DNA, 15 bp, Homo sapiens
agaaaccacagggcc

SEQ ID NO: 700988 - DNA, 15 bp, Homo sapiens
gaaaccacagggccc

SEQ ID NO: 700989 - DNA, 15 bp, Homo sapiens
aaaccacagggcccc

SEQ ID NO: 700990 - DNA, 15 bp, Homo sapiens
aaccacagggcccca

SEQ ID NO: 700991 - DNA, 15 bp, Homo sapiens
accacagggccccaa

SEQ ID NO: 700992 - DNA, 15 bp, Homo sapiens
ccacagggccccaaa

SEQ ID NO: 700993 - DNA, 15 bp, Homo sapiens
cacagggccccaaag

SEQ ID NO: 700994 - DNA, 15 bp, Homo sapiens
acagggccccaaaga

SEQ ID NO: 700995 - DNA, 15 bp, Homo sapiens
cagggccccaaagag

SEQ ID NO: 700996 - DNA, 15 bp, Homo sapiens
agggccccaaagagg

SEQ ID NO: 700997 - DNA, 15 bp, Homo sapiens
gggccccaaagaggg

SEQ ID NO: 700998 - DNA, 15 bp, Homo sapiens
ggccccaaagaggga

SEQ ID NO: 700999 - DNA, 15 bp, Homo sapiens
gccccaaagagggag

SEQ ID NO: 701000 - DNA, 15 bp, Homo sapiens
ccccaaagagggagt

SEQ ID NO: 701001 - DNA, 15 bp, Homo sapiens
cccaaagagggagtc

SEQ ID NO: 701002 - DNA, 15 bp, Homo sapiens
ccaaagagggagtca

SEQ ID NO: 701003 - DNA, 15 bp, Homo sapiens
caaagagggagtcac

SEQ ID NO: 701004 - DNA, 15 bp, Homo sapiens
aaagagggagtcaca

SEQ ID NO: 701005 - DNA, 15 bp, Homo sapiens
aagagggagtcacag

SEQ ID NO: 701006 - DNA, 15 bp, Homo sapiens
agagggagtcacagc

SEQ ID NO: 701007 - DNA, 15 bp, Homo sapiens
gagggagtcacagcc

SEQ ID NO: 701008 - DNA, 15 bp, Homo sapiens
agggagtcacagccc

SEQ ID NO: 701009 - DNA, 15 bp, Homo sapiens
gggagtcacagccct

SEQ ID NO: 701010 - DNA, 15 bp, Homo sapiens
ggagtcacagccctg

SEQ ID NO: 701011 - DNA, 15 bp, Homo sapiens
gagtcacagccctgg

SEQ ID NO: 701012 - DNA, 15 bp, Homo sapiens
agtcacagccctggc

SEQ ID NO: 701013 - DNA, 15 bp, Homo sapiens
gtcacagccctggct

SEQ ID NO: 701014 - DNA, 15 bp, Homo sapiens
tcacagccctggctc

SEQ ID NO: 701015 - DNA, 15 bp, Homo sapiens
cacagccctggctca

SEQ ID NO: 701016 - DNA, 15 bp, Homo sapiens
acagccctggctcaa

SEQ ID NO: 701017 - DNA, 15 bp, Homo sapiens
cagccctggctcaag

SEQ ID NO: 701018 - DNA, 15 bp, Homo sapiens
agccctggctcaagg

SEQ ID NO: 701019 - DNA, 15 bp, Homo sapiens
gccctggctcaagga

SEQ ID NO: 701020 - DNA, 15 bp, Homo sapiens
ccctggctcaaggag

SEQ ID NO: 701021 - DNA, 15 bp, Homo sapiens
cctggctcaaggagc

SEQ ID NO: 701022 - DNA, 15 bp, Homo sapiens
ctggctcaaggagct

SEQ ID NO: 701023 - DNA, 15 bp, Homo sapiens
tggctcaaggagctc

SEQ ID NO: 701024 - DNA, 15 bp, Homo sapiens
ggctcaaggagctcc

SEQ ID NO: 701025 - DNA, 15 bp, Homo sapiens
gctcaaggagctccc

SEQ ID NO: 701026 - DNA, 15 bp, Homo sapiens
ctcaaggagctccca

SEQ ID NO: 701027 - DNA, 15 bp, Homo sapiens
tcaaggagctcccaa

SEQ ID NO: 701028 - DNA, 15 bp, Homo sapiens
caaggagctcccaat

SEQ ID NO: 701029 - DNA, 15 bp, Homo sapiens
aaggagctcccaatt

SEQ ID NO: 701030 - DNA, 15 bp, Homo sapiens
aggagctcccaattc

SEQ ID NO: 701031 - DNA, 15 bp, Homo sapiens
ggagctcccaattct

SEQ ID NO: 701032 - DNA, 15 bp, Homo sapiens
gagctcccaattctg

SEQ ID NO: 701033 - DNA, 15 bp, Homo sapiens
agctcccaattctgg

SEQ ID NO: 701034 - DNA, 15 bp, Homo sapiens
gctcccaattctggg

SEQ ID NO: 701035 - DNA, 15 bp, Homo sapiens
ctcccaattctgggc

SEQ ID NO: 701036 - DNA, 15 bp, Homo sapiens
tcccaattctgggct

SEQ ID NO: 701037 - DNA, 15 bp, Homo sapiens
cccaattctgggctc

SEQ ID NO: 701038 - DNA, 15 bp, Homo sapiens
ccaattctgggctcc

SEQ ID NO: 701039 - DNA, 15 bp, Homo sapiens
caattctgggctccc

SEQ ID NO: 701040 - DNA, 15 bp, Homo sapiens
aattctgggctcccc

SEQ ID NO: 701041 - DNA, 15 bp, Homo sapiens
attctgggctccccg

SEQ ID NO: 701042 - DNA, 15 bp, Homo sapiens
ttctgggctccccga

SEQ ID NO: 701043 - DNA, 15 bp, Homo sapiens
tctgggctccccgaa

SEQ ID NO: 701044 - DNA, 15 bp, Homo sapiens
ctgggctccccgaag

SEQ ID NO: 701045 - DNA, 15 bp, Homo sapiens
tgggctccccgaagg

SEQ ID NO: 701046 - DNA, 15 bp, Homo sapiens
gggctccccgaaggg

SEQ ID NO: 701047 - DNA, 15 bp, Homo sapiens
ggctccccgaagggc

SEQ ID NO: 701048 - DNA, 15 bp, Homo sapiens
gctccccgaagggcc

SEQ ID NO: 701049 - DNA, 15 bp, Homo sapiens
ctccccgaagggccg

SEQ ID NO: 701050 - DNA, 15 bp, Homo sapiens
tccccgaagggccgc

SEQ ID NO: 701051 - DNA, 15 bp, Homo sapiens
ccccgaagggccgca

SEQ ID NO: 701052 - DNA, 15 bp, Homo sapiens
cccgaagggccgcag

SEQ ID NO: 701053 - DNA, 15 bp, Homo sapiens
ccgaagggccgcagc

SEQ ID NO: 701054 - DNA, 15 bp, Homo sapiens
cgaagggccgcagct

SEQ ID NO: 701055 - DNA, 15 bp, Homo sapiens
gaagggccgcagctc

SEQ ID NO: 701056 - DNA, 15 bp, Homo sapiens
aagggccgcagctct

SEQ ID NO: 701057 - DNA, 15 bp, Homo sapiens
agggccgcagctctt

SEQ ID NO: 701058 - DNA, 15 bp, Homo sapiens
gggccgcagctcttc

SEQ ID NO: 701059 - DNA, 15 bp, Homo sapiens
ggccgcagctcttct

SEQ ID NO: 701060 - DNA, 15 bp, Homo sapiens
gccgcagctcttctc

SEQ ID NO: 701061 - DNA, 15 bp, Homo sapiens
ccgcagctcttctct

SEQ ID NO: 701062 - DNA, 15 bp, Homo sapiens
cgcagctcttctctc

SEQ ID NO: 701063 - DNA, 15 bp, Homo sapiens
gcagctcttctctct

SEQ ID NO: 701064 - DNA, 15 bp, Homo sapiens
cagctcttctctctt

SEQ ID NO: 701065 - DNA, 15 bp, Homo sapiens
agctcttctctcttc

SEQ ID NO: 701066 - DNA, 15 bp, Homo sapiens
gctcttctctcttct

SEQ ID NO: 701067 - DNA, 15 bp, Homo sapiens
ctcttctctcttctt

SEQ ID NO: 701068 - DNA, 15 bp, Homo sapiens
tcttctctcttcttt

SEQ ID NO: 701069 - DNA, 15 bp, Homo sapiens
cttctctcttcttta

SEQ ID NO: 701070 - DNA, 15 bp, Homo sapiens
ttctctcttctttac

SEQ ID NO: 701071 - DNA, 15 bp, Homo sapiens
tctctcttctttacc

SEQ ID NO: 701072 - DNA, 15 bp, Homo sapiens
ctctcttctttaccc

SEQ ID NO: 701073 - DNA, 15 bp, Homo sapiens
tctcttctttaccca

SEQ ID NO: 701074 - DNA, 15 bp, Homo sapiens
ctcttctttacccac

SEQ ID NO: 701075 - DNA, 15 bp, Homo sapiens
tcttctttacccaca

SEQ ID NO: 701076 - DNA, 15 bp, Homo sapiens
cttctttacccacaa

SEQ ID NO: 701077 - DNA, 15 bp, Homo sapiens
ttctttacccacaac

SEQ ID NO: 701078 - DNA, 15 bp, Homo sapiens
tctttacccacaaca

SEQ ID NO: 701079 - DNA, 15 bp, Homo sapiens
ctttacccacaacat

SEQ ID NO: 701080 - DNA, 15 bp, Homo sapiens
tttacccacaacatg

SEQ ID NO: 701081 - DNA, 15 bp, Homo sapiens
ttacccacaacatgg

SEQ ID NO: 701082 - DNA, 15 bp, Homo sapiens
tacccacaacatggc

SEQ ID NO: 701083 - DNA, 15 bp, Homo sapiens
acccacaacatggcg

SEQ ID NO: 701084 - DNA, 15 bp, Homo sapiens
cccacaacatggcga

SEQ ID NO: 701085 - DNA, 15 bp, Homo sapiens
ccacaacatggcgag

SEQ ID NO: 701086 - DNA, 15 bp, Homo sapiens
cacaacatggcgagc

SEQ ID NO: 701087 - DNA, 15 bp, Homo sapiens
acaacatggcgagca

SEQ ID NO: 701088 - DNA, 15 bp, Homo sapiens
caacatggcgagcaa

SEQ ID NO: 701089 - DNA, 15 bp, Homo sapiens
aacatggcgagcaag

SEQ ID NO: 701090 - DNA, 15 bp, Homo sapiens
acatggcgagcaagg

SEQ ID NO: 701091 - DNA, 15 bp, Homo sapiens
catggcgagcaaggg

SEQ ID NO: 701092 - DNA, 15 bp, Homo sapiens
atggcgagcaagggg

SEQ ID NO: 701093 - DNA, 15 bp, Homo sapiens
tggcgagcaaggggc

SEQ ID NO: 701094 - DNA, 15 bp, Homo sapiens
ggcgagcaaggggca

SEQ ID NO: 701095 - DNA, 15 bp, Homo sapiens
gcgagcaaggggcat

SEQ ID NO: 701096 - DNA, 15 bp, Homo sapiens
cgagcaaggggcatg

SEQ ID NO: 701097 - DNA, 15 bp, Homo sapiens
gagcaaggggcatgt

SEQ ID NO: 701098 - DNA, 15 bp, Homo sapiens
agcaaggggcatgtt

SEQ ID NO: 701099 - DNA, 15 bp, Homo sapiens
gcaaggggcatgttt

SEQ ID NO: 701100 - DNA, 15 bp, Homo sapiens
caaggggcatgtttc

SEQ ID NO: 701101 - DNA, 15 bp, Homo sapiens
aaggggcatgtttca

SEQ ID NO: 701102 - DNA, 15 bp, Homo sapiens
aggggcatgtttcag

SEQ ID NO: 701103 - DNA, 15 bp, Homo sapiens
ggggcatgtttcagc

SEQ ID NO: 701104 - DNA, 15 bp, Homo sapiens
gggcatgtttcagcc

SEQ ID NO: 701105 - DNA, 15 bp, Homo sapiens
ggcatgtttcagccc

SEQ ID NO: 701106 - DNA, 15 bp, Homo sapiens
gcatgtttcagccct

SEQ ID NO: 701107 - DNA, 15 bp, Homo sapiens
catgtttcagccctg

SEQ ID NO: 701108 - DNA, 15 bp, Homo sapiens
atgtttcagccctgt

SEQ ID NO: 701109 - DNA, 15 bp, Homo sapiens
tgtttcagccctgtt

SEQ ID NO: 701110 - DNA, 15 bp, Homo sapiens
gtttcagccctgttt

SEQ ID NO: 701111 - DNA, 15 bp, Homo sapiens
tttcagccctgtttg

SEQ ID NO: 701112 - DNA, 15 bp, Homo sapiens
ttcagccctgtttgt

SEQ ID NO: 701113 - DNA, 15 bp, Homo sapiens
tcagccctgtttgtg

SEQ ID NO: 701114 - DNA, 15 bp, Homo sapiens
cagccctgtttgtgt

SEQ ID NO: 701115 - DNA, 15 bp, Homo sapiens
agccctgtttgtgtt

SEQ ID NO: 701116 - DNA, 15 bp, Homo sapiens
gccctgtttgtgtta

SEQ ID NO: 701117 - DNA, 15 bp, Homo sapiens
ccctgtttgtgttac

SEQ ID NO: 701118 - DNA, 15 bp, Homo sapiens
cctgtttgtgttaca

SEQ ID NO: 701119 - DNA, 15 bp, Homo sapiens
ctgtttgtgttacag

SEQ ID NO: 701120 - DNA, 15 bp, Homo sapiens
tgtttgtgttacagc

SEQ ID NO: 701121 - DNA, 15 bp, Homo sapiens
gtttgtgttacagcc

SEQ ID NO: 701122 - DNA, 15 bp, Homo sapiens
tttgtgttacagccc

SEQ ID NO: 701123 - DNA, 15 bp, Homo sapiens
ttgtgttacagccct

SEQ ID NO: 701124 - DNA, 15 bp, Homo sapiens
tgtgttacagccctt

SEQ ID NO: 701125 - DNA, 15 bp, Homo sapiens
gtgttacagcccttt

SEQ ID NO: 701126 - DNA, 15 bp, Homo sapiens
tgttacagccctttc

SEQ ID NO: 701127 - DNA, 15 bp, Homo sapiens
gttacagccctttca

SEQ ID NO: 701128 - DNA, 15 bp, Homo sapiens
ttacagccctttcag

SEQ ID NO: 701129 - DNA, 15 bp, Homo sapiens
tacagccctttcagc

SEQ ID NO: 701130 - DNA, 15 bp, Homo sapiens
acagccctttcagcc

SEQ ID NO: 701131 - DNA, 15 bp, Homo sapiens
cagccctttcagcct

SEQ ID NO: 701132 - DNA, 15 bp, Homo sapiens
agccctttcagcctc

SEQ ID NO: 701133 - DNA, 15 bp, Homo sapiens
gccctttcagcctcg

SEQ ID NO: 701134 - DNA, 15 bp, Homo sapiens
ccctttcagcctcgc

SEQ ID NO: 701135 - DNA, 15 bp, Homo sapiens
cctttcagcctcgcc

SEQ ID NO: 701136 - DNA, 15 bp, Homo sapiens
ctttcagcctcgcca

SEQ ID NO: 701137 - DNA, 15 bp, Homo sapiens
tttcagcctcgccat

SEQ ID NO: 701138 - DNA, 15 bp, Homo sapiens
ttcagcctcgccatt

SEQ ID NO: 701139 - DNA, 15 bp, Homo sapiens
tcagcctcgccattt

SEQ ID NO: 701140 - DNA, 15 bp, Homo sapiens
cagcctcgccatttg

SEQ ID NO: 701141 - DNA, 15 bp, Homo sapiens
agcctcgccatttgg

SEQ ID NO: 701142 - DNA, 15 bp, Homo sapiens
gcctcgccatttggt

SEQ ID NO: 701143 - DNA, 15 bp, Homo sapiens
cctcgccatttggtg

SEQ ID NO: 701144 - DNA, 15 bp, Homo sapiens
ctcgccatttggtgg

SEQ ID NO: 701145 - DNA, 15 bp, Homo sapiens
tcgccatttggtggg

SEQ ID NO: 701146 - DNA, 15 bp, Homo sapiens
cgccatttggtgggt

SEQ ID NO: 701147 - DNA, 15 bp, Homo sapiens
gccatttggtgggtc

SEQ ID NO: 701148 - DNA, 15 bp, Homo sapiens
ccatttggtgggtcc

SEQ ID NO: 701149 - DNA, 15 bp, Homo sapiens
catttggtgggtcct

SEQ ID NO: 701150 - DNA, 15 bp, Homo sapiens
atttggtgggtcctg

SEQ ID NO: 701151 - DNA, 15 bp, Homo sapiens
tttggtgggtcctga

SEQ ID NO: 701152 - DNA, 15 bp, Homo sapiens
ttggtgggtcctgag

SEQ ID NO: 701153 - DNA, 15 bp, Homo sapiens
tggtgggtcctgagt

SEQ ID NO: 701154 - DNA, 15 bp, Homo sapiens
ggtgggtcctgagtt

SEQ ID NO: 701155 - DNA, 15 bp, Homo sapiens
gtgggtcctgagttc

SEQ ID NO: 701156 - DNA, 15 bp, Homo sapiens
tgggtcctgagttct

SEQ ID NO: 701157 - DNA, 15 bp, Homo sapiens
gggtcctgagttctt

SEQ ID NO: 701158 - DNA, 15 bp, Homo sapiens
ggtcctgagttcttg

SEQ ID NO: 701159 - DNA, 15 bp, Homo sapiens
gtcctgagttcttgt

SEQ ID NO: 701160 - DNA, 15 bp, Homo sapiens
tcctgagttcttgtc

SEQ ID NO: 701161 - DNA, 15 bp, Homo sapiens
cctgagttcttgtcc

SEQ ID NO: 701162 - DNA, 15 bp, Homo sapiens
ctgagttcttgtcct

SEQ ID NO: 701163 - DNA, 15 bp, Homo sapiens
tgagttcttgtcctg

SEQ ID NO: 701164 - DNA, 15 bp, Homo sapiens
gagttcttgtcctgc

SEQ ID NO: 701165 - DNA, 15 bp, Homo sapiens
agttcttgtcctgca

SEQ ID NO: 701166 - DNA, 15 bp, Homo sapiens
gttcttgtcctgcag

SEQ ID NO: 701167 - DNA, 15 bp, Homo sapiens
ttcttgtcctgcagc

SEQ ID NO: 701168 - DNA, 15 bp, Homo sapiens
tcttgtcctgcagcc

SEQ ID NO: 701169 - DNA, 15 bp, Homo sapiens
cttgtcctgcagcca

SEQ ID NO: 701170 - DNA, 15 bp, Homo sapiens
ttgtcctgcagccag

SEQ ID NO: 701171 - DNA, 15 bp, Homo sapiens
tgtcctgcagccagg

SEQ ID NO: 701172 - DNA, 15 bp, Homo sapiens
gtcctgcagccagga

SEQ ID NO: 701173 - DNA, 15 bp, Homo sapiens
tcctgcagccaggaa

SEQ ID NO: 701174 - DNA, 15 bp, Homo sapiens
cctgcagccaggaag

SEQ ID NO: 701175 - DNA, 15 bp, Homo sapiens
ctgcagccaggaaga

SEQ ID NO: 701176 - DNA, 15 bp, Homo sapiens
tgcagccaggaagaa

SEQ ID NO: 701177 - DNA, 15 bp, Homo sapiens
gcagccaggaagaat

SEQ ID NO: 701178 - DNA, 15 bp, Homo sapiens
cagccaggaagaatg

SEQ ID NO: 701179 - DNA, 15 bp, Homo sapiens
agccaggaagaatga

SEQ ID NO: 701180 - DNA, 15 bp, Homo sapiens
gccaggaagaatgag

SEQ ID NO: 701181 - DNA, 15 bp, Homo sapiens
ccaggaagaatgagg

SEQ ID NO: 701182 - DNA, 15 bp, Homo sapiens
caggaagaatgaggt

SEQ ID NO: 701183 - DNA, 15 bp, Homo sapiens
aggaagaatgaggta

SEQ ID NO: 701184 - DNA, 15 bp, Homo sapiens
ggaagaatgaggtac

SEQ ID NO: 701185 - DNA, 15 bp, Homo sapiens
gaagaatgaggtaca

SEQ ID NO: 701186 - DNA, 15 bp, Homo sapiens
aagaatgaggtacac

SEQ ID NO: 701187 - DNA, 15 bp, Homo sapiens
agaatgaggtacaca

SEQ ID NO: 701188 - DNA, 15 bp, Homo sapiens
gaatgaggtacacag

SEQ ID NO: 701189 - DNA, 15 bp, Homo sapiens
aatgaggtacacaga

SEQ ID NO: 701190 - DNA, 15 bp, Homo sapiens
atgaggtacacagac

SEQ ID NO: 701191 - DNA, 15 bp, Homo sapiens
tgaggtacacagaca

SEQ ID NO: 701192 - DNA, 15 bp, Homo sapiens
gaggtacacagacaa

SEQ ID NO: 701193 - DNA, 15 bp, Homo sapiens
aggtacacagacaag

SEQ ID NO: 701194 - DNA, 15 bp, Homo sapiens
ggtacacagacaagt

SEQ ID NO: 701195 - DNA, 15 bp, Homo sapiens
gtacacagacaagtg

SEQ ID NO: 701196 - DNA, 15 bp, Homo sapiens
tacacagacaagtgg

SEQ ID NO: 701197 - DNA, 15 bp, Homo sapiens
acacagacaagtgga

SEQ ID NO: 701198 - DNA, 15 bp, Homo sapiens
cacagacaagtggag

SEQ ID NO: 701199 - DNA, 15 bp, Homo sapiens
acagacaagtggagg

SEQ ID NO: 701200 - DNA, 15 bp, Homo sapiens
cagacaagtggaggg

SEQ ID NO: 701201 - DNA, 15 bp, Homo sapiens
agacaagtggagggt

SEQ ID NO: 701202 - DNA, 15 bp, Homo sapiens
gacaagtggagggtg

SEQ ID NO: 701203 - DNA, 15 bp, Homo sapiens
acaagtggagggtga

SEQ ID NO: 701204 - DNA, 15 bp, Homo sapiens
caagtggagggtgag

SEQ ID NO: 701205 - DNA, 15 bp, Homo sapiens
aagtggagggtgagc

SEQ ID NO: 701206 - DNA, 15 bp, Homo sapiens
agtggagggtgagca

SEQ ID NO: 701207 - DNA, 15 bp, Homo sapiens
gtggagggtgagcaa

SEQ ID NO: 701208 - DNA, 15 bp, Homo sapiens
tggagggtgagcaag

SEQ ID NO: 701209 - DNA, 15 bp, Homo sapiens
ggagggtgagcaaga

SEQ ID NO: 701210 - DNA, 15 bp, Homo sapiens
gagggtgagcaagat

SEQ ID NO: 701211 - DNA, 15 bp, Homo sapiens
agggtgagcaagatg

SEQ ID NO: 701212 - DNA, 15 bp, Homo sapiens
gggtgagcaagatga

SEQ ID NO: 701213 - DNA, 15 bp, Homo sapiens
ggtgagcaagatgaa

SEQ ID NO: 701214 - DNA, 15 bp, Homo sapiens
gtgagcaagatgaag

SEQ ID NO: 701215 - DNA, 15 bp, Homo sapiens
tgagcaagatgaaga

SEQ ID NO: 701216 - DNA, 15 bp, Homo sapiens
gagcaagatgaagag

SEQ ID NO: 701217 - DNA, 15 bp, Homo sapiens
agcaagatgaagagg

SEQ ID NO: 701218 - DNA, 15 bp, Homo sapiens
gcaagatgaagagga

SEQ ID NO: 701219 - DNA, 15 bp, Homo sapiens
caagatgaagaggag

SEQ ID NO: 701220 - DNA, 15 bp, Homo sapiens
aagatgaagaggaga

SEQ ID NO: 701221 - DNA, 15 bp, Homo sapiens
agatgaagaggagat

SEQ ID NO: 701222 - DNA, 15 bp, Homo sapiens
gatgaagaggagatt

SEQ ID NO: 701223 - DNA, 15 bp, Homo sapiens
atgaagaggagattt

SEQ ID NO: 701224 - DNA, 15 bp, Homo sapiens
tgaagaggagattta

SEQ ID NO: 701225 - DNA, 15 bp, Homo sapiens
gaagaggagatttat

SEQ ID NO: 701226 - DNA, 15 bp, Homo sapiens
aagaggagatttatt

SEQ ID NO: 701227 - DNA, 15 bp, Homo sapiens
agaggagatttattg

SEQ ID NO: 701228 - DNA, 15 bp, Homo sapiens
gaggagatttattga

SEQ ID NO: 701229 - DNA, 15 bp, Homo sapiens
aggagatttattgag

SEQ ID NO: 701230 - DNA, 15 bp, Homo sapiens
ggagatttattgagc

SEQ ID NO: 701231 - DNA, 15 bp, Homo sapiens
gagatttattgagca

SEQ ID NO: 701232 - DNA, 15 bp, Homo sapiens
agatttattgagcaa

SEQ ID NO: 701233 - DNA, 15 bp, Homo sapiens
gatttattgagcaat

SEQ ID NO: 701234 - DNA, 15 bp, Homo sapiens
atttattgagcaata

SEQ ID NO: 701235 - DNA, 15 bp, Homo sapiens
tttattgagcaatag

SEQ ID NO: 701236 - DNA, 15 bp, Homo sapiens
ttattgagcaataga

SEQ ID NO: 701237 - DNA, 15 bp, Homo sapiens
tattgagcaatagaa

SEQ ID NO: 701238 - DNA, 15 bp, Homo sapiens
attgagcaatagaac

SEQ ID NO: 701239 - DNA, 15 bp, Homo sapiens
ttgagcaatagaaca

SEQ ID NO: 701240 - DNA, 15 bp, Homo sapiens
tgagcaatagaacag

SEQ ID NO: 701241 - DNA, 15 bp, Homo sapiens
gagcaatagaacagc

SEQ ID NO: 701242 - DNA, 15 bp, Homo sapiens
agcaatagaacagct

SEQ ID NO: 701243 - DNA, 15 bp, Homo sapiens
gcaatagaacagctt

SEQ ID NO: 701244 - DNA, 15 bp, Homo sapiens
caatagaacagctta

SEQ ID NO: 701245 - DNA, 15 bp, Homo sapiens
aatagaacagcttag

SEQ ID NO: 701246 - DNA, 15 bp, Homo sapiens
atagaacagcttaga

SEQ ID NO: 701247 - DNA, 15 bp, Homo sapiens
tagaacagcttagag

SEQ ID NO: 701248 - DNA, 15 bp, Homo sapiens
agaacagcttagaga

SEQ ID NO: 701249 - DNA, 15 bp, Homo sapiens
gaacagcttagagaa

SEQ ID NO: 701250 - DNA, 15 bp, Homo sapiens
aacagcttagagaag

SEQ ID NO: 701251 - DNA, 15 bp, Homo sapiens
acagcttagagaaga

SEQ ID NO: 701252 - DNA, 15 bp, Homo sapiens
cagcttagagaagac

SEQ ID NO: 701253 - DNA, 15 bp, Homo sapiens
agcttagagaagacc

SEQ ID NO: 701254 - DNA, 15 bp, Homo sapiens
gcttagagaagaccc

SEQ ID NO: 701255 - DNA, 15 bp, Homo sapiens
cttagagaagaccca

SEQ ID NO: 701256 - DNA, 15 bp, Homo sapiens
ttagagaagacccat

SEQ ID NO: 701257 - DNA, 15 bp, Homo sapiens
tagagaagacccata

SEQ ID NO: 701258 - DNA, 15 bp, Homo sapiens
agagaagacccatag

SEQ ID NO: 701259 - DNA, 15 bp, Homo sapiens
gagaagacccatagt

SEQ ID NO: 701260 - DNA, 15 bp, Homo sapiens
agaagacccatagtg

SEQ ID NO: 701261 - DNA, 15 bp, Homo sapiens
gaagacccatagtgg

SEQ ID NO: 701262 - DNA, 15 bp, Homo sapiens
aagacccatagtggg

SEQ ID NO: 701263 - DNA, 15 bp, Homo sapiens
agacccatagtgggc

SEQ ID NO: 701264 - DNA, 15 bp, Homo sapiens
gacccatagtgggca

SEQ ID NO: 701265 - DNA, 15 bp, Homo sapiens
acccatagtgggcag

SEQ ID NO: 701266 - DNA, 15 bp, Homo sapiens
cccatagtgggcagc

SEQ ID NO: 701267 - DNA, 15 bp, Homo sapiens
ccatagtgggcagct

SEQ ID NO: 701268 - DNA, 15 bp, Homo sapiens
catagtgggcagctc

SEQ ID NO: 701269 - DNA, 15 bp, Homo sapiens
atagtgggcagctcc

SEQ ID NO: 701270 - DNA, 15 bp, Homo sapiens
tagtgggcagctcct

SEQ ID NO: 701271 - DNA, 15 bp, Homo sapiens
agtgggcagctcctc

SEQ ID NO: 701272 - DNA, 15 bp, Homo sapiens
gtgggcagctcctct

SEQ ID NO: 701273 - DNA, 15 bp, Homo sapiens
tgggcagctcctctc

SEQ ID NO: 701274 - DNA, 15 bp, Homo sapiens
gggcagctcctctct

SEQ ID NO: 701275 - DNA, 15 bp, Homo sapiens
ggcagctcctctctg

SEQ ID NO: 701276 - DNA, 15 bp, Homo sapiens
gcagctcctctctgt

SEQ ID NO: 701277 - DNA, 15 bp, Homo sapiens
cagctcctctctgta

SEQ ID NO: 701278 - DNA, 15 bp, Homo sapiens
agctcctctctgtaa

SEQ ID NO: 701279 - DNA, 15 bp, Homo sapiens
gctcctctctgtaac

SEQ ID NO: 701280 - DNA, 15 bp, Homo sapiens
ctcctctctgtaacc

SEQ ID NO: 701281 - DNA, 15 bp, Homo sapiens
tcctctctgtaacca

SEQ ID NO: 701282 - DNA, 15 bp, Homo sapiens
cctctctgtaaccac

SEQ ID NO: 701283 - DNA, 15 bp, Homo sapiens
ctctctgtaaccaca

SEQ ID NO: 701284 - DNA, 15 bp, Homo sapiens
tctctgtaaccacaa

SEQ ID NO: 701285 - DNA, 15 bp, Homo sapiens
ctctgtaaccacaaa

SEQ ID NO: 701286 - DNA, 15 bp, Homo sapiens
tctgtaaccacaaag

SEQ ID NO: 701287 - DNA, 15 bp, Homo sapiens
ctgtaaccacaaagt

SEQ ID NO: 701288 - DNA, 15 bp, Homo sapiens
tgtaaccacaaagtc

SEQ ID NO: 701289 - DNA, 15 bp, Homo sapiens
gtaaccacaaagtcc

SEQ ID NO: 701290 - DNA, 15 bp, Homo sapiens
taaccacaaagtccc

SEQ ID NO: 701291 - DNA, 15 bp, Homo sapiens
aaccacaaagtcccg

SEQ ID NO: 701292 - DNA, 15 bp, Homo sapiens
accacaaagtcccga

SEQ ID NO: 701293 - DNA, 15 bp, Homo sapiens
ccacaaagtcccgat

SEQ ID NO: 701294 - DNA, 15 bp, Homo sapiens
cacaaagtcccgatg

SEQ ID NO: 701295 - DNA, 15 bp, Homo sapiens
acaaagtcccgatga

SEQ ID NO: 701296 - DNA, 15 bp, Homo sapiens
caaagtcccgatgag

SEQ ID NO: 701297 - DNA, 15 bp, Homo sapiens
aaagtcccgatgagt

SEQ ID NO: 701298 - DNA, 15 bp, Homo sapiens
aagtcccgatgagtg

SEQ ID NO: 701299 - DNA, 15 bp, Homo sapiens
agtcccgatgagtgt

SEQ ID NO: 701300 - DNA, 15 bp, Homo sapiens
gtcccgatgagtgtt

SEQ ID NO: 701301 - DNA, 15 bp, Homo sapiens
tcccgatgagtgttc

SEQ ID NO: 701302 - DNA, 15 bp, Homo sapiens
cccgatgagtgttca

SEQ ID NO: 701303 - DNA, 15 bp, Homo sapiens
ccgatgagtgttcag

SEQ ID NO: 701304 - DNA, 15 bp, Homo sapiens
cgatgagtgttcagc

SEQ ID NO: 701305 - DNA, 15 bp, Homo sapiens
gatgagtgttcagct

SEQ ID NO: 701306 - DNA, 15 bp, Homo sapiens
atgagtgttcagctc

SEQ ID NO: 701307 - DNA, 15 bp, Homo sapiens
tgagtgttcagctcc

SEQ ID NO: 701308 - DNA, 15 bp, Homo sapiens
gagtgttcagctcct

SEQ ID NO: 701309 - DNA, 15 bp, Homo sapiens
agtgttcagctccta

SEQ ID NO: 701310 - DNA, 15 bp, Homo sapiens
gtgttcagctcctag

SEQ ID NO: 701311 - DNA, 15 bp, Homo sapiens
tgttcagctcctagc

SEQ ID NO: 701312 - DNA, 15 bp, Homo sapiens
gttcagctcctagca

SEQ ID NO: 701313 - DNA, 15 bp, Homo sapiens
ttcagctcctagcag

SEQ ID NO: 701314 - DNA, 15 bp, Homo sapiens
tcagctcctagcaga

SEQ ID NO: 701315 - DNA, 15 bp, Homo sapiens
cagctcctagcagag

SEQ ID NO: 701316 - DNA, 15 bp, Homo sapiens
agctcctagcagaga

SEQ ID NO: 701317 - DNA, 15 bp, Homo sapiens
gctcctagcagagaa

SEQ ID NO: 701318 - DNA, 15 bp, Homo sapiens
ctcctagcagagaag

SEQ ID NO: 701319 - DNA, 15 bp, Homo sapiens
tcctagcagagaagg

SEQ ID NO: 701320 - DNA, 15 bp, Homo sapiens
cctagcagagaaggt

SEQ ID NO: 701321 - DNA, 15 bp, Homo sapiens
ctagcagagaaggta

SEQ ID NO: 701322 - DNA, 15 bp, Homo sapiens
tagcagagaaggtag

SEQ ID NO: 701323 - DNA, 15 bp, Homo sapiens
agcagagaaggtagc

SEQ ID NO: 701324 - DNA, 15 bp, Homo sapiens
gcagagaaggtagct

SEQ ID NO: 701325 - DNA, 15 bp, Homo sapiens
cagagaaggtagctc

SEQ ID NO: 701326 - DNA, 15 bp, Homo sapiens
agagaaggtagctcc

SEQ ID NO: 701327 - DNA, 15 bp, Homo sapiens
gagaaggtagctcct

SEQ ID NO: 701328 - DNA, 15 bp, Homo sapiens
agaaggtagctcctc

SEQ ID NO: 701329 - DNA, 15 bp, Homo sapiens
gaaggtagctcctct

SEQ ID NO: 701330 - DNA, 15 bp, Homo sapiens
aaggtagctcctctc

SEQ ID NO: 701331 - DNA, 15 bp, Homo sapiens
aggtagctcctctct

SEQ ID NO: 701332 - DNA, 15 bp, Homo sapiens
ggtagctcctctctg

SEQ ID NO: 701333 - DNA, 15 bp, Homo sapiens
gtagctcctctctgc

SEQ ID NO: 701334 - DNA, 15 bp, Homo sapiens
tagctcctctctgca

SEQ ID NO: 701335 - DNA, 15 bp, Homo sapiens
agctcctctctgcag

SEQ ID NO: 701336 - DNA, 15 bp, Homo sapiens
gctcctctctgcagg

SEQ ID NO: 701337 - DNA, 15 bp, Homo sapiens
ctcctctctgcaggc

SEQ ID NO: 701338 - DNA, 15 bp, Homo sapiens
tcctctctgcaggca

SEQ ID NO: 701339 - DNA, 15 bp, Homo sapiens
cctctctgcaggcag

SEQ ID NO: 701340 - DNA, 15 bp, Homo sapiens
ctctctgcaggcagg

SEQ ID NO: 701341 - DNA, 15 bp, Homo sapiens
tctctgcaggcaggt

SEQ ID NO: 701342 - DNA, 15 bp, Homo sapiens
ctctgcaggcaggtc

SEQ ID NO: 701343 - DNA, 15 bp, Homo sapiens
tctgcaggcaggtcg

SEQ ID NO: 701344 - DNA, 15 bp, Homo sapiens
ctgcaggcaggtcgt

SEQ ID NO: 701345 - DNA, 15 bp, Homo sapiens
tgcaggcaggtcgtc

SEQ ID NO: 701346 - DNA, 15 bp, Homo sapiens
gcaggcaggtcgtcc

SEQ ID NO: 701347 - DNA, 15 bp, Homo sapiens
caggcaggtcgtccc

SEQ ID NO: 701348 - DNA, 15 bp, Homo sapiens
aggcaggtcgtccca

SEQ ID NO: 701349 - DNA, 15 bp, Homo sapiens
ggcaggtcgtcccaa

SEQ ID NO: 701350 - DNA, 15 bp, Homo sapiens
gcaggtcgtcccaac

SEQ ID NO: 701351 - DNA, 15 bp, Homo sapiens
caggtcgtcccaaca

SEQ ID NO: 701352 - DNA, 15 bp, Homo sapiens
aggtcgtcccaacaa

SEQ ID NO: 701353 - DNA, 15 bp, Homo sapiens
ggtcgtcccaacaag

SEQ ID NO: 701354 - DNA, 15 bp, Homo sapiens
gtcgtcccaacaagt

SEQ ID NO: 701355 - DNA, 15 bp, Homo sapiens
tcgtcccaacaagtg

SEQ ID NO: 701356 - DNA, 15 bp, Homo sapiens
cgtcccaacaagtgt

SEQ ID NO: 701357 - DNA, 15 bp, Homo sapiens
gtcccaacaagtgtt

SEQ ID NO: 701358 - DNA, 15 bp, Homo sapiens
tcccaacaagtgttc

SEQ ID NO: 701359 - DNA, 15 bp, Homo sapiens
cccaacaagtgttca

SEQ ID NO: 701360 - DNA, 15 bp, Homo sapiens
ccaacaagtgttcag

SEQ ID NO: 701361 - DNA, 15 bp, Homo sapiens
caacaagtgttcagt

SEQ ID NO: 701362 - DNA, 15 bp, Homo sapiens
aacaagtgttcagtt

SEQ ID NO: 701363 - DNA, 15 bp, Homo sapiens
acaagtgttcagttc

SEQ ID NO: 701364 - DNA, 15 bp, Homo sapiens
caagtgttcagttct

SEQ ID NO: 701365 - DNA, 15 bp, Homo sapiens
aagtgttcagttctc

SEQ ID NO: 701366 - DNA, 15 bp, Homo sapiens
agtgttcagttctca

SEQ ID NO: 701367 - DNA, 15 bp, Homo sapiens
gtgttcagttctcag

SEQ ID NO: 701368 - DNA, 15 bp, Homo sapiens
tgttcagttctcagc

SEQ ID NO: 701369 - DNA, 15 bp, Homo sapiens
gttcagttctcagca

SEQ ID NO: 701370 - DNA, 15 bp, Homo sapiens
ttcagttctcagcag

SEQ ID NO: 701371 - DNA, 15 bp, Homo sapiens
tcagttctcagcaga

SEQ ID NO: 701372 - DNA, 15 bp, Homo sapiens
cagttctcagcagaa

SEQ ID NO: 701373 - DNA, 15 bp, Homo sapiens
agttctcagcagaaa

SEQ ID NO: 701374 - DNA, 15 bp, Homo sapiens
gttctcagcagaaag

SEQ ID NO: 701375 - DNA, 15 bp, Homo sapiens
ttctcagcagaaagg

SEQ ID NO: 701376 - DNA, 15 bp, Homo sapiens
tctcagcagaaaggg

SEQ ID NO: 701377 - DNA, 15 bp, Homo sapiens
ctcagcagaaagggt

SEQ ID NO: 701378 - DNA, 15 bp, Homo sapiens
tcagcagaaagggta

SEQ ID NO: 701379 - DNA, 15 bp, Homo sapiens
cagcagaaagggtag

SEQ ID NO: 701380 - DNA, 15 bp, Homo sapiens
agcagaaagggtagc

SEQ ID NO: 701381 - DNA, 15 bp, Homo sapiens
gcagaaagggtagct

SEQ ID NO: 701382 - DNA, 15 bp, Homo sapiens
cagaaagggtagctc

SEQ ID NO: 701383 - DNA, 15 bp, Homo sapiens
agaaagggtagctcc

SEQ ID NO: 701384 - DNA, 15 bp, Homo sapiens
gaaagggtagctcct

SEQ ID NO: 701385 - DNA, 15 bp, Homo sapiens
aaagggtagctcctc

SEQ ID NO: 701386 - DNA, 15 bp, Homo sapiens
aagggtagctcctct

SEQ ID NO: 701387 - DNA, 15 bp, Homo sapiens
agggtagctcctctc

SEQ ID NO: 701388 - DNA, 15 bp, Homo sapiens
gggtagctcctctct

SEQ ID NO: 701389 - DNA, 15 bp, Homo sapiens
gctcctctctgcagc

SEQ ID NO: 701390 - DNA, 15 bp, Homo sapiens
ctcctctctgcagct

SEQ ID NO: 701391 - DNA, 15 bp, Homo sapiens
tcctctctgcagctg

SEQ ID NO: 701392 - DNA, 15 bp, Homo sapiens
cctctctgcagctgc

SEQ ID NO: 701393 - DNA, 15 bp, Homo sapiens
ctctctgcagctgct

SEQ ID NO: 701394 - DNA, 15 bp, Homo sapiens
tctctgcagctgctc

SEQ ID NO: 701395 - DNA, 15 bp, Homo sapiens
ctctgcagctgctcg

SEQ ID NO: 701396 - DNA, 15 bp, Homo sapiens
tctgcagctgctcgt

SEQ ID NO: 701397 - DNA, 15 bp, Homo sapiens
ctgcagctgctcgtc

SEQ ID NO: 701398 - DNA, 15 bp, Homo sapiens
tgcagctgctcgtcc

SEQ ID NO: 701399 - DNA, 15 bp, Homo sapiens
gcagctgctcgtcct

SEQ ID NO: 701400 - DNA, 15 bp, Homo sapiens
cagctgctcgtcctg

SEQ ID NO: 701401 - DNA, 15 bp, Homo sapiens
agctgctcgtcctga

SEQ ID NO: 701402 - DNA, 15 bp, Homo sapiens
gctgctcgtcctgac

SEQ ID NO: 701403 - DNA, 15 bp, Homo sapiens
ctgctcgtcctgaca

SEQ ID NO: 701404 - DNA, 15 bp, Homo sapiens
tgctcgtcctgacaa

SEQ ID NO: 701405 - DNA, 15 bp, Homo sapiens
gctcgtcctgacaag

SEQ ID NO: 701406 - DNA, 15 bp, Homo sapiens
ctcgtcctgacaagt

SEQ ID NO: 701407 - DNA, 15 bp, Homo sapiens
tcgtcctgacaagtg

SEQ ID NO: 701408 - DNA, 15 bp, Homo sapiens
cgtcctgacaagtgt

SEQ ID NO: 701409 - DNA, 15 bp, Homo sapiens
gtcctgacaagtgtt

SEQ ID NO: 701410 - DNA, 15 bp, Homo sapiens
tcctgacaagtgttc

SEQ ID NO: 701411 - DNA, 15 bp, Homo sapiens
cctgacaagtgttca

SEQ ID NO: 701412 - DNA, 15 bp, Homo sapiens
ctgacaagtgttcag

SEQ ID NO: 701413 - DNA, 15 bp, Homo sapiens
tgacaagtgttcagc

SEQ ID NO: 701414 - DNA, 15 bp, Homo sapiens
gacaagtgttcagct

SEQ ID NO: 701415 - DNA, 15 bp, Homo sapiens
acaagtgttcagcta

SEQ ID NO: 701416 - DNA, 15 bp, Homo sapiens
caagtgttcagctat

SEQ ID NO: 701417 - DNA, 15 bp, Homo sapiens
aagtgttcagctatc

SEQ ID NO: 701418 - DNA, 15 bp, Homo sapiens
agtgttcagctatca

SEQ ID NO: 701419 - DNA, 15 bp, Homo sapiens
gtgttcagctatcag

SEQ ID NO: 701420 - DNA, 15 bp, Homo sapiens
tgttcagctatcagt

SEQ ID NO: 701421 - DNA, 15 bp, Homo sapiens
gttcagctatcagta

SEQ ID NO: 701422 - DNA, 15 bp, Homo sapiens
ttcagctatcagtag

SEQ ID NO: 701423 - DNA, 15 bp, Homo sapiens
tcagctatcagtaga

SEQ ID NO: 701424 - DNA, 15 bp, Homo sapiens
cagctatcagtagag

SEQ ID NO: 701425 - DNA, 15 bp, Homo sapiens
agctatcagtagaga

SEQ ID NO: 701426 - DNA, 15 bp, Homo sapiens
gctatcagtagagag

SEQ ID NO: 701427 - DNA, 15 bp, Homo sapiens
ctatcagtagagagg

SEQ ID NO: 701428 - DNA, 15 bp, Homo sapiens
tatcagtagagaggg

SEQ ID NO: 701429 - DNA, 15 bp, Homo sapiens
atcagtagagagggt

SEQ ID NO: 701430 - DNA, 15 bp, Homo sapiens
tcagtagagagggta

SEQ ID NO: 701431 - DNA, 15 bp, Homo sapiens
cagtagagagggtag

SEQ ID NO: 701432 - DNA, 15 bp, Homo sapiens
agtagagagggtagt

SEQ ID NO: 701433 - DNA, 15 bp, Homo sapiens
gtagagagggtagtt

SEQ ID NO: 701434 - DNA, 15 bp, Homo sapiens
tagagagggtagttc

SEQ ID NO: 701435 - DNA, 15 bp, Homo sapiens
agagagggtagttcc

SEQ ID NO: 701436 - DNA, 15 bp, Homo sapiens
gagagggtagttcct

SEQ ID NO: 701437 - DNA, 15 bp, Homo sapiens
agagggtagttcctc

SEQ ID NO: 701438 - DNA, 15 bp, Homo sapiens
gagggtagttcctct

SEQ ID NO: 701439 - DNA, 15 bp, Homo sapiens
agggtagttcctctc

SEQ ID NO: 701440 - DNA, 15 bp, Homo sapiens
gggtagttcctctct

SEQ ID NO: 701441 - DNA, 15 bp, Homo sapiens
ggtagttcctctctg

SEQ ID NO: 701442 - DNA, 15 bp, Homo sapiens
gtagttcctctctgc

SEQ ID NO: 701443 - DNA, 15 bp, Homo sapiens
tagttcctctctgca

SEQ ID NO: 701444 - DNA, 15 bp, Homo sapiens
agttcctctctgcag

SEQ ID NO: 701445 - DNA, 15 bp, Homo sapiens
gttcctctctgcagc

SEQ ID NO: 701446 - DNA, 15 bp, Homo sapiens
ttcctctctgcagct

SEQ ID NO: 701447 - DNA, 15 bp, Homo sapiens
tcctctctgcagcta

SEQ ID NO: 701448 - DNA, 15 bp, Homo sapiens
cctctctgcagctag

SEQ ID NO: 701449 - DNA, 15 bp, Homo sapiens
ctctctgcagctagt

SEQ ID NO: 701450 - DNA, 15 bp, Homo sapiens
tctctgcagctagtt

SEQ ID NO: 701451 - DNA, 15 bp, Homo sapiens
ctctgcagctagttg

SEQ ID NO: 701452 - DNA, 15 bp, Homo sapiens
tctgcagctagttgt

SEQ ID NO: 701453 - DNA, 15 bp, Homo sapiens
ctgcagctagttgtc

SEQ ID NO: 701454 - DNA, 15 bp, Homo sapiens
tgcagctagttgtct

SEQ ID NO: 701455 - DNA, 15 bp, Homo sapiens
gcagctagttgtctc

SEQ ID NO: 701456 - DNA, 15 bp, Homo sapiens
cagctagttgtctct

SEQ ID NO: 701457 - DNA, 15 bp, Homo sapiens
agctagttgtctctc

SEQ ID NO: 701458 - DNA, 15 bp, Homo sapiens
gctagttgtctctcc

SEQ ID NO: 701459 - DNA, 15 bp, Homo sapiens
ctagttgtctctcca

SEQ ID NO: 701460 - DNA, 15 bp, Homo sapiens
tagttgtctctccat

SEQ ID NO: 701461 - DNA, 15 bp, Homo sapiens
agttgtctctccatc

SEQ ID NO: 701462 - DNA, 15 bp, Homo sapiens
gttgtctctccatcc

SEQ ID NO: 701463 - DNA, 15 bp, Homo sapiens
ttgtctctccatcct

SEQ ID NO: 701464 - DNA, 15 bp, Homo sapiens
tgtctctccatcctc

SEQ ID NO: 701465 - DNA, 15 bp, Homo sapiens
gtctctccatcctct

SEQ ID NO: 701466 - DNA, 15 bp, Homo sapiens
tctctccatcctctg

SEQ ID NO: 701467 - DNA, 15 bp, Homo sapiens
ctctccatcctctgc

SEQ ID NO: 701468 - DNA, 15 bp, Homo sapiens
tctccatcctctgct

SEQ ID NO: 701469 - DNA, 15 bp, Homo sapiens
ctccatcctctgctc

SEQ ID NO: 701470 - DNA, 15 bp, Homo sapiens
tccatcctctgctct

SEQ ID NO: 701471 - DNA, 15 bp, Homo sapiens
ccatcctctgctctg

SEQ ID NO: 701472 - DNA, 15 bp, Homo sapiens
catcctctgctctgc

SEQ ID NO: 701473 - DNA, 15 bp, Homo sapiens
atcctctgctctgct

SEQ ID NO: 701474 - DNA, 15 bp, Homo sapiens
tcctctgctctgctc

SEQ ID NO: 701475 - DNA, 15 bp, Homo sapiens
cctctgctctgctct

SEQ ID NO: 701476 - DNA, 15 bp, Homo sapiens
ctctgctctgctctg

SEQ ID NO: 701477 - DNA, 15 bp, Homo sapiens
tctgctctgctctgg

SEQ ID NO: 701478 - DNA, 15 bp, Homo sapiens
ctgctctgctctggc

SEQ ID NO: 701479 - DNA, 15 bp, Homo sapiens
tgctctgctctggct

SEQ ID NO: 701480 - DNA, 15 bp, Homo sapiens
gctctgctctggctg

SEQ ID NO: 701481 - DNA, 15 bp, Homo sapiens
ctctgctctggctga

SEQ ID NO: 701482 - DNA, 15 bp, Homo sapiens
tctgctctggctgag

SEQ ID NO: 701483 - DNA, 15 bp, Homo sapiens
ctgctctggctgaga

SEQ ID NO: 701484 - DNA, 15 bp, Homo sapiens
tgctctggctgagac

SEQ ID NO: 701485 - DNA, 15 bp, Homo sapiens
gctctggctgagact

SEQ ID NO: 701486 - DNA, 15 bp, Homo sapiens
ctctggctgagactc

SEQ ID NO: 701487 - DNA, 15 bp, Homo sapiens
tctggctgagactcg

SEQ ID NO: 701488 - DNA, 15 bp, Homo sapiens
ctggctgagactcgg

SEQ ID NO: 701489 - DNA, 15 bp, Homo sapiens
tggctgagactcggg

SEQ ID NO: 701490 - DNA, 15 bp, Homo sapiens
ggctgagactcgggc

SEQ ID NO: 701491 - DNA, 15 bp, Homo sapiens
gctgagactcgggct

SEQ ID NO: 701492 - DNA, 15 bp, Homo sapiens
ctgagactcgggctt

SEQ ID NO: 701493 - DNA, 15 bp, Homo sapiens
tgagactcgggcttc

SEQ ID NO: 701494 - DNA, 15 bp, Homo sapiens
gagactcgggcttct

SEQ ID NO: 701495 - DNA, 15 bp, Homo sapiens
agactcgggcttctg

SEQ ID NO: 701496 - DNA, 15 bp, Homo sapiens
gactcgggcttctgt

SEQ ID NO: 701497 - DNA, 15 bp, Homo sapiens
actcgggcttctgtg

SEQ ID NO: 701498 - DNA, 15 bp, Homo sapiens
ctcgggcttctgtgg

SEQ ID NO: 701499 - DNA, 15 bp, Homo sapiens
tcgggcttctgtggg

SEQ ID NO: 701500 - DNA, 15 bp, Homo sapiens
cgggcttctgtgggc

SEQ ID NO: 701501 - DNA, 15 bp, Homo sapiens
gggcttctgtgggcc

SEQ ID NO: 701502 - DNA, 15 bp, Homo sapiens
ggcttctgtgggcct

SEQ ID NO: 701503 - DNA, 15 bp, Homo sapiens
gcttctgtgggcctc

SEQ ID NO: 701504 - DNA, 15 bp, Homo sapiens
cttctgtgggcctca

SEQ ID NO: 701505 - DNA, 15 bp, Homo sapiens
ttctgtgggcctcag

SEQ ID NO: 701506 - DNA, 15 bp, Homo sapiens
tctgtgggcctcagc

SEQ ID NO: 701507 - DNA, 15 bp, Homo sapiens
ctgtgggcctcagcg

SEQ ID NO: 701508 - DNA, 15 bp, Homo sapiens
tgtgggcctcagcgg

SEQ ID NO: 701509 - DNA, 15 bp, Homo sapiens
gtgggcctcagcggg

SEQ ID NO: 701510 - DNA, 15 bp, Homo sapiens
tgggcctcagcggga

SEQ ID NO: 701511 - DNA, 15 bp, Homo sapiens
gggcctcagcgggaa

SEQ ID NO: 701512 - DNA, 15 bp, Homo sapiens
ggcctcagcgggaag

SEQ ID NO: 701513 - DNA, 15 bp, Homo sapiens
gcctcagcgggaaga

SEQ ID NO: 701514 - DNA, 15 bp, Homo sapiens
cctcagcgggaagaa

SEQ ID NO: 701515 - DNA, 15 bp, Homo sapiens
ctcagcgggaagaaa

SEQ ID NO: 701516 - DNA, 15 bp, Homo sapiens
tcagcgggaagaaag

SEQ ID NO: 701517 - DNA, 15 bp, Homo sapiens
cagcgggaagaaagt

SEQ ID NO: 701518 - DNA, 15 bp, Homo sapiens
agcgggaagaaagtg

SEQ ID NO: 701519 - DNA, 15 bp, Homo sapiens
gcgggaagaaagtgt

SEQ ID NO: 701520 - DNA, 15 bp, Homo sapiens
cgggaagaaagtgtg

SEQ ID NO: 701521 - DNA, 15 bp, Homo sapiens
gggaagaaagtgtgc

SEQ ID NO: 701522 - DNA, 15 bp, Homo sapiens
ggaagaaagtgtgca

SEQ ID NO: 701523 - DNA, 15 bp, Homo sapiens
gaagaaagtgtgcac

SEQ ID NO: 701524 - DNA, 15 bp, Homo sapiens
aagaaagtgtgcacc

SEQ ID NO: 701525 - DNA, 15 bp, Homo sapiens
agaaagtgtgcaccg

SEQ ID NO: 701526 - DNA, 15 bp, Homo sapiens
gaaagtgtgcaccga

SEQ ID NO: 701527 - DNA, 15 bp, Homo sapiens
aaagtgtgcaccgat

SEQ ID NO: 701528 - DNA, 15 bp, Homo sapiens
aagtgtgcaccgatt

SEQ ID NO: 701529 - DNA, 15 bp, Homo sapiens
agtgtgcaccgattg

SEQ ID NO: 701530 - DNA, 15 bp, Homo sapiens
gtgtgcaccgattgg

SEQ ID NO: 701531 - DNA, 15 bp, Homo sapiens
tgtgcaccgattggt

SEQ ID NO: 701532 - DNA, 15 bp, Homo sapiens
gtgcaccgattggta

SEQ ID NO: 701533 - DNA, 15 bp, Homo sapiens
tgcaccgattggtac

SEQ ID NO: 701534 - DNA, 15 bp, Homo sapiens
gcaccgattggtaca

SEQ ID NO: 701535 - DNA, 15 bp, Homo sapiens
caccgattggtacat

SEQ ID NO: 701536 - DNA, 15 bp, Homo sapiens
accgattggtacatg

SEQ ID NO: 701537 - DNA, 15 bp, Homo sapiens
ccgattggtacatgg

SEQ ID NO: 701538 - DNA, 15 bp, Homo sapiens
cgattggtacatggg

SEQ ID NO: 701539 - DNA, 15 bp, Homo sapiens
gattggtacatgggc

SEQ ID NO: 701540 - DNA, 15 bp, Homo sapiens
attggtacatgggcg

SEQ ID NO: 701541 - DNA, 15 bp, Homo sapiens
ttggtacatgggcgg

SEQ ID NO: 701542 - DNA, 15 bp, Homo sapiens
tggtacatgggcggc

SEQ ID NO: 701543 - DNA, 15 bp, Homo sapiens
ggtacatgggcggcc

SEQ ID NO: 701544 - DNA, 15 bp, Homo sapiens
gtacatgggcggcca

SEQ ID NO: 701545 - DNA, 15 bp, Homo sapiens
tacatgggcggccac

SEQ ID NO: 701546 - DNA, 15 bp, Homo sapiens
acatgggcggccact

SEQ ID NO: 701547 - DNA, 15 bp, Homo sapiens
catgggcggccacta

SEQ ID NO: 701548 - DNA, 15 bp, Homo sapiens
atgggcggccactag

SEQ ID NO: 701549 - DNA, 15 bp, Homo sapiens
tgggcggccactagt

SEQ ID NO: 701550 - DNA, 15 bp, Homo sapiens
gggcggccactagtg

SEQ ID NO: 701551 - DNA, 15 bp, Homo sapiens
ggcggccactagtgg

SEQ ID NO: 701552 - DNA, 15 bp, Homo sapiens
gcggccactagtggg

SEQ ID NO: 701553 - DNA, 15 bp, Homo sapiens
cggccactagtgggc

SEQ ID NO: 701554 - DNA, 15 bp, Homo sapiens
ggccactagtgggcc

SEQ ID NO: 701555 - DNA, 15 bp, Homo sapiens
gccactagtgggccc

SEQ ID NO: 701556 - DNA, 15 bp, Homo sapiens
ccactagtgggccca

SEQ ID NO: 701557 - DNA, 15 bp, Homo sapiens
cactagtgggcccag

SEQ ID NO: 701558 - DNA, 15 bp, Homo sapiens
actagtgggcccaga

SEQ ID NO: 701559 - DNA, 15 bp, Homo sapiens
ctagtgggcccagaa

SEQ ID NO: 701560 - DNA, 15 bp, Homo sapiens
tagtgggcccagaaa

SEQ ID NO: 701561 - DNA, 15 bp, Homo sapiens
agtgggcccagaaaa

SEQ ID NO: 701562 - DNA, 15 bp, Homo sapiens
gtgggcccagaaaag

SEQ ID NO: 701563 - DNA, 15 bp, Homo sapiens
tgggcccagaaaagg

SEQ ID NO: 701564 - DNA, 15 bp, Homo sapiens
gggcccagaaaaggt

SEQ ID NO: 701565 - DNA, 15 bp, Homo sapiens
ggcccagaaaaggta

SEQ ID NO: 701566 - DNA, 15 bp, Homo sapiens
gcccagaaaaggtac

SEQ ID NO: 701567 - DNA, 15 bp, Homo sapiens
cccagaaaaggtacc

SEQ ID NO: 701568 - DNA, 15 bp, Homo sapiens
ccagaaaaggtacca

SEQ ID NO: 701569 - DNA, 15 bp, Homo sapiens
cagaaaaggtaccac

SEQ ID NO: 701570 - DNA, 15 bp, Homo sapiens
agaaaaggtaccaca

SEQ ID NO: 701571 - DNA, 15 bp, Homo sapiens
gaaaaggtaccacaa

SEQ ID NO: 701572 - DNA, 15 bp, Homo sapiens
aaaaggtaccacaag

SEQ ID NO: 701573 - DNA, 15 bp, Homo sapiens
aaaggtaccacaagt

SEQ ID NO: 701574 - DNA, 15 bp, Homo sapiens
aaggtaccacaagtc

SEQ ID NO: 701575 - DNA, 15 bp, Homo sapiens
aggtaccacaagtcc

SEQ ID NO: 701576 - DNA, 15 bp, Homo sapiens
ggtaccacaagtcct

SEQ ID NO: 701577 - DNA, 15 bp, Homo sapiens
gtaccacaagtcctc

SEQ ID NO: 701578 - DNA, 15 bp, Homo sapiens
taccacaagtcctca

SEQ ID NO: 701579 - DNA, 15 bp, Homo sapiens
accacaagtcctcac

SEQ ID NO: 701580 - DNA, 15 bp, Homo sapiens
ccacaagtcctcact

SEQ ID NO: 701581 - DNA, 15 bp, Homo sapiens
cacaagtcctcactc

SEQ ID NO: 701582 - DNA, 15 bp, Homo sapiens
acaagtcctcactcc

SEQ ID NO: 701583 - DNA, 15 bp, Homo sapiens
caagtcctcactcct

SEQ ID NO: 701584 - DNA, 15 bp, Homo sapiens
aagtcctcactcctg

SEQ ID NO: 701585 - DNA, 15 bp, Homo sapiens
agtcctcactcctgt

SEQ ID NO: 701586 - DNA, 15 bp, Homo sapiens
gtcctcactcctgtc

SEQ ID NO: 701587 - DNA, 15 bp, Homo sapiens
tcctcactcctgtcc

SEQ ID NO: 701588 - DNA, 15 bp, Homo sapiens
cctcactcctgtccg

SEQ ID NO: 701589 - DNA, 15 bp, Homo sapiens
ctcactcctgtccgt

SEQ ID NO: 701590 - DNA, 15 bp, Homo sapiens
tcactcctgtccgtg

SEQ ID NO: 701591 - DNA, 15 bp, Homo sapiens
cactcctgtccgtgg

SEQ ID NO: 701592 - DNA, 15 bp, Homo sapiens
actcctgtccgtggg

SEQ ID NO: 701593 - DNA, 15 bp, Homo sapiens
ctcctgtccgtggga

SEQ ID NO: 701594 - DNA, 15 bp, Homo sapiens
tcctgtccgtgggac

SEQ ID NO: 701595 - DNA, 15 bp, Homo sapiens
cctgtccgtgggact

SEQ ID NO: 701596 - DNA, 15 bp, Homo sapiens
ctgtccgtgggactg

SEQ ID NO: 701597 - DNA, 15 bp, Homo sapiens
tgtccgtgggactgg

SEQ ID NO: 701598 - DNA, 15 bp, Homo sapiens
gtccgtgggactggc

SEQ ID NO: 701599 - DNA, 15 bp, Homo sapiens
tccgtgggactggca

SEQ ID NO: 701600 - DNA, 15 bp, Homo sapiens
ccgtgggactggcag

SEQ ID NO: 701601 - DNA, 15 bp, Homo sapiens
cgtgggactggcagc

SEQ ID NO: 701602 - DNA, 15 bp, Homo sapiens
gtgggactggcagcg

SEQ ID NO: 701603 - DNA, 15 bp, Homo sapiens
tgggactggcagcgc

SEQ ID NO: 701604 - DNA, 15 bp, Homo sapiens
gggactggcagcgcc

SEQ ID NO: 701605 - DNA, 15 bp, Homo sapiens
ggactggcagcgccc

SEQ ID NO: 701606 - DNA, 15 bp, Homo sapiens
gactggcagcgccca

SEQ ID NO: 701607 - DNA, 15 bp, Homo sapiens
actggcagcgcccac

SEQ ID NO: 701608 - DNA, 15 bp, Homo sapiens
ctggcagcgcccacc

SEQ ID NO: 701609 - DNA, 15 bp, Homo sapiens
tggcagcgcccaccc

SEQ ID NO: 701610 - DNA, 15 bp, Homo sapiens
ggcagcgcccacccc

SEQ ID NO: 701611 - DNA, 15 bp, Homo sapiens
gcagcgcccaccccc

SEQ ID NO: 701612 - DNA, 15 bp, Homo sapiens
cagcgcccaccccca

SEQ ID NO: 701613 - DNA, 15 bp, Homo sapiens
agcgcccacccccag

SEQ ID NO: 701614 - DNA, 15 bp, Homo sapiens
gcgcccacccccagc

SEQ ID NO: 701615 - DNA, 15 bp, Homo sapiens
cgcccacccccagcc

SEQ ID NO: 701616 - DNA, 15 bp, Homo sapiens
gcccacccccagcct

SEQ ID NO: 701617 - DNA, 15 bp, Homo sapiens
cccacccccagcctt

SEQ ID NO: 701618 - DNA, 15 bp, Homo sapiens
ccacccccagccttc

SEQ ID NO: 701619 - DNA, 15 bp, Homo sapiens
cacccccagccttca

SEQ ID NO: 701620 - DNA, 15 bp, Homo sapiens
acccccagccttcag

SEQ ID NO: 701621 - DNA, 15 bp, Homo sapiens
cccccagccttcagg

SEQ ID NO: 701622 - DNA, 15 bp, Homo sapiens
ccccagccttcaggc

SEQ ID NO: 701623 - DNA, 15 bp, Homo sapiens
cccagccttcaggcg

SEQ ID NO: 701624 - DNA, 15 bp, Homo sapiens
ccagccttcaggcgc

SEQ ID NO: 701625 - DNA, 15 bp, Homo sapiens
cagccttcaggcgct

SEQ ID NO: 701626 - DNA, 15 bp, Homo sapiens
agccttcaggcgctc

SEQ ID NO: 701627 - DNA, 15 bp, Homo sapiens
gccttcaggcgctcc

SEQ ID NO: 701628 - DNA, 15 bp, Homo sapiens
ccttcaggcgctccc

SEQ ID NO: 701629 - DNA, 15 bp, Homo sapiens
cttcaggcgctccct

SEQ ID NO: 701630 - DNA, 15 bp, Homo sapiens
ttcaggcgctccctg

SEQ ID NO: 701631 - DNA, 15 bp, Homo sapiens
tcaggcgctccctgg

SEQ ID NO: 701632 - DNA, 15 bp, Homo sapiens
caggcgctccctggc

SEQ ID NO: 701633 - DNA, 15 bp, Homo sapiens
aggcgctccctggcc

SEQ ID NO: 701634 - DNA, 15 bp, Homo sapiens
ggcgctccctggcct

SEQ ID NO: 701635 - DNA, 15 bp, Homo sapiens
gcgctccctggcctg

SEQ ID NO: 701636 - DNA, 15 bp, Homo sapiens
cgctccctggcctga

SEQ ID NO: 701637 - DNA, 15 bp, Homo sapiens
gctccctggcctgaa

SEQ ID NO: 701638 - DNA, 15 bp, Homo sapiens
ctccctggcctgaag

SEQ ID NO: 701639 - DNA, 15 bp, Homo sapiens
tccctggcctgaagg

SEQ ID NO: 701640 - DNA, 15 bp, Homo sapiens
ccctggcctgaaggt

SEQ ID NO: 701641 - DNA, 15 bp, Homo sapiens
cctggcctgaaggtg

SEQ ID NO: 701642 - DNA, 15 bp, Homo sapiens
ctggcctgaaggtgg

SEQ ID NO: 701643 - DNA, 15 bp, Homo sapiens
tggcctgaaggtggg

SEQ ID NO: 701644 - DNA, 15 bp, Homo sapiens
ggcctgaaggtgggg

SEQ ID NO: 701645 - DNA, 15 bp, Homo sapiens
gcctgaaggtggggc

SEQ ID NO: 701646 - DNA, 15 bp, Homo sapiens
cctgaaggtggggcc

SEQ ID NO: 701647 - DNA, 15 bp, Homo sapiens
ctgaaggtggggcct

SEQ ID NO: 701648 - DNA, 15 bp, Homo sapiens
tgaaggtggggcctc

SEQ ID NO: 701649 - DNA, 15 bp, Homo sapiens
gaaggtggggcctca

SEQ ID NO: 701650 - DNA, 15 bp, Homo sapiens
aaggtggggcctcaa

SEQ ID NO: 701651 - DNA, 15 bp, Homo sapiens
aggtggggcctcaac

SEQ ID NO: 701652 - DNA, 15 bp, Homo sapiens
ggtggggcctcaaca

SEQ ID NO: 701653 - DNA, 15 bp, Homo sapiens
gtggggcctcaacag

SEQ ID NO: 701654 - DNA, 15 bp, Homo sapiens
tggggcctcaacagg

SEQ ID NO: 701655 - DNA, 15 bp, Homo sapiens
ggggcctcaacaggg

SEQ ID NO: 701656 - DNA, 15 bp, Homo sapiens
gggcctcaacaggga

SEQ ID NO: 701657 - DNA, 15 bp, Homo sapiens
ggcctcaacagggac

SEQ ID NO: 701658 - DNA, 15 bp, Homo sapiens
gcctcaacagggact

SEQ ID NO: 701659 - DNA, 15 bp, Homo sapiens
cctcaacagggactc

SEQ ID NO: 701660 - DNA, 15 bp, Homo sapiens
ctcaacagggactca

SEQ ID NO: 701661 - DNA, 15 bp, Homo sapiens
tcaacagggactcat

SEQ ID NO: 701662 - DNA, 15 bp, Homo sapiens
caacagggactcatc

SEQ ID NO: 701663 - DNA, 15 bp, Homo sapiens
aacagggactcatcc

SEQ ID NO: 701664 - DNA, 15 bp, Homo sapiens
acagggactcatcct

SEQ ID NO: 701665 - DNA, 15 bp, Homo sapiens
cagggactcatcctc

SEQ ID NO: 701666 - DNA, 15 bp, Homo sapiens
agggactcatcctct

SEQ ID NO: 701667 - DNA, 15 bp, Homo sapiens
gggactcatcctcta

SEQ ID NO: 701668 - DNA, 15 bp, Homo sapiens
ggactcatcctctac

SEQ ID NO: 701669 - DNA, 15 bp, Homo sapiens
gactcatcctctact

SEQ ID NO: 701670 - DNA, 15 bp, Homo sapiens
actcatcctctactg

SEQ ID NO: 701671 - DNA, 15 bp, Homo sapiens
ctcatcctctactgc

SEQ ID NO: 701672 - DNA, 15 bp, Homo sapiens
tcatcctctactgct

SEQ ID NO: 701673 - DNA, 15 bp, Homo sapiens
catcctctactgctc

SEQ ID NO: 701674 - DNA, 15 bp, Homo sapiens
atcctctactgctca

SEQ ID NO: 701675 - DNA, 15 bp, Homo sapiens
tcctctactgctcag

SEQ ID NO: 701676 - DNA, 15 bp, Homo sapiens
cctctactgctcagg

SEQ ID NO: 701677 - DNA, 15 bp, Homo sapiens
ctctactgctcagga

SEQ ID NO: 701678 - DNA, 15 bp, Homo sapiens
tctactgctcaggag

SEQ ID NO: 701679 - DNA, 15 bp, Homo sapiens
ctactgctcaggagc

SEQ ID NO: 701680 - DNA, 15 bp, Homo sapiens
tactgctcaggagcc

SEQ ID NO: 701681 - DNA, 15 bp, Homo sapiens
actgctcaggagccc

SEQ ID NO: 701682 - DNA, 15 bp, Homo sapiens
ctgctcaggagccca

SEQ ID NO: 701683 - DNA, 15 bp, Homo sapiens
tgctcaggagcccat

SEQ ID NO: 701684 - DNA, 15 bp, Homo sapiens
gctcaggagcccatc

SEQ ID NO: 701685 - DNA, 15 bp, Homo sapiens
ctcaggagcccatct

SEQ ID NO: 701686 - DNA, 15 bp, Homo sapiens
tcaggagcccatctg

SEQ ID NO: 701687 - DNA, 15 bp, Homo sapiens
caggagcccatctgc

SEQ ID NO: 701688 - DNA, 15 bp, Homo sapiens
aggagcccatctgcc

SEQ ID NO: 701689 - DNA, 15 bp, Homo sapiens
ggagcccatctgcct

SEQ ID NO: 701690 - DNA, 15 bp, Homo sapiens
gagcccatctgcctc

SEQ ID NO: 701691 - DNA, 15 bp, Homo sapiens
agcccatctgcctcc

SEQ ID NO: 701692 - DNA, 15 bp, Homo sapiens
gcccatctgcctcct

SEQ ID NO: 701693 - DNA, 15 bp, Homo sapiens
cccatctgcctcctg

SEQ ID NO: 701694 - DNA, 15 bp, Homo sapiens
ccatctgcctcctgc

SEQ ID NO: 701695 - DNA, 15 bp, Homo sapiens
catctgcctcctgcc

SEQ ID NO: 701696 - DNA, 15 bp, Homo sapiens
atctgcctcctgccg

SEQ ID NO: 701697 - DNA, 15 bp, Homo sapiens
tctgcctcctgccgc

SEQ ID NO: 701698 - DNA, 15 bp, Homo sapiens
ctgcctcctgccgcc

SEQ ID NO: 701699 - DNA, 15 bp, Homo sapiens
tgcctcctgccgcca

SEQ ID NO: 701700 - DNA, 15 bp, Homo sapiens
gcctcctgccgccat

SEQ ID NO: 701701 - DNA, 15 bp, Homo sapiens
cctcctgccgccatc

SEQ ID NO: 701702 - DNA, 15 bp, Homo sapiens
ctcctgccgccatcc

SEQ ID NO: 701703 - DNA, 15 bp, Homo sapiens
tcctgccgccatcca

SEQ ID NO: 701704 - DNA, 15 bp, Homo sapiens
cctgccgccatccat

SEQ ID NO: 701705 - DNA, 15 bp, Homo sapiens
ctgccgccatccatg

SEQ ID NO: 701706 - DNA, 15 bp, Homo sapiens
tgccgccatccatgc

SEQ ID NO: 701707 - DNA, 15 bp, Homo sapiens
gccgccatccatgcg

SEQ ID NO: 701708 - DNA, 15 bp, Homo sapiens
ccgccatccatgcgt

SEQ ID NO: 701709 - DNA, 15 bp, Homo sapiens
cgccatccatgcgtc

SEQ ID NO: 701710 - DNA, 15 bp, Homo sapiens
gccatccatgcgtca

SEQ ID NO: 701711 - DNA, 15 bp, Homo sapiens
ccatccatgcgtcaa

SEQ ID NO: 701712 - DNA, 15 bp, Homo sapiens
catccatgcgtcaag

SEQ ID NO: 701713 - DNA, 15 bp, Homo sapiens
atccatgcgtcaagg

SEQ ID NO: 701714 - DNA, 15 bp, Homo sapiens
tccatgcgtcaaggg

SEQ ID NO: 701715 - DNA, 15 bp, Homo sapiens
ccatgcgtcaagggg

SEQ ID NO: 701716 - DNA, 15 bp, Homo sapiens
catgcgtcaaggggc

SEQ ID NO: 701717 - DNA, 15 bp, Homo sapiens
atgcgtcaaggggca

SEQ ID NO: 701718 - DNA, 15 bp, Homo sapiens
tgcgtcaaggggcac

SEQ ID NO: 701719 - DNA, 15 bp, Homo sapiens
gcgtcaaggggcacc

SEQ ID NO: 701720 - DNA, 15 bp, Homo sapiens
cgtcaaggggcacct

SEQ ID NO: 701721 - DNA, 15 bp, Homo sapiens
gtcaaggggcacctg

SEQ ID NO: 701722 - DNA, 15 bp, Homo sapiens
tcaaggggcacctgt

SEQ ID NO: 701723 - DNA, 15 bp, Homo sapiens
caaggggcacctgta

SEQ ID NO: 701724 - DNA, 15 bp, Homo sapiens
aaggggcacctgtag

SEQ ID NO: 701725 - DNA, 15 bp, Homo sapiens
aggggcacctgtagg

SEQ ID NO: 701726 - DNA, 15 bp, Homo sapiens
ggggcacctgtaggc

SEQ ID NO: 701727 - DNA, 15 bp, Homo sapiens
gggcacctgtaggcc

SEQ ID NO: 701728 - DNA, 15 bp, Homo sapiens
ggcacctgtaggcca

SEQ ID NO: 701729 - DNA, 15 bp, Homo sapiens
gcacctgtaggccag

SEQ ID NO: 701730 - DNA, 15 bp, Homo sapiens
cacctgtaggccagt

SEQ ID NO: 701731 - DNA, 15 bp, Homo sapiens
acctgtaggccagtg

SEQ ID NO: 701732 - DNA, 15 bp, Homo sapiens
cctgtaggccagtgc

SEQ ID NO: 701733 - DNA, 15 bp, Homo sapiens
ctgtaggccagtgcc

SEQ ID NO: 701734 - DNA, 15 bp, Homo sapiens
tgtaggccagtgcca

SEQ ID NO: 701735 - DNA, 15 bp, Homo sapiens
gtaggccagtgccaa

SEQ ID NO: 701736 - DNA, 15 bp, Homo sapiens
taggccagtgccaag

SEQ ID NO: 701737 - DNA, 15 bp, Homo sapiens
aggccagtgccaagc

SEQ ID NO: 701738 - DNA, 15 bp, Homo sapiens
ggccagtgccaagct

SEQ ID NO: 701739 - DNA, 15 bp, Homo sapiens
gccagtgccaagctg

SEQ ID NO: 701740 - DNA, 15 bp, Homo sapiens
ccagtgccaagctgc

SEQ ID NO: 701741 - DNA, 15 bp, Homo sapiens
cagtgccaagctgcc

SEQ ID NO: 701742 - DNA, 15 bp, Homo sapiens
agtgccaagctgccc

SEQ ID NO: 701743 - DNA, 15 bp, Homo sapiens
gtgccaagctgccct

SEQ ID NO: 701744 - DNA, 15 bp, Homo sapiens
tgccaagctgccctc

SEQ ID NO: 701745 - DNA, 15 bp, Homo sapiens
gccaagctgccctca

SEQ ID NO: 701746 - DNA, 15 bp, Homo sapiens
ccaagctgccctcag

SEQ ID NO: 701747 - DNA, 15 bp, Homo sapiens
caagctgccctcagc

SEQ ID NO: 701748 - DNA, 15 bp, Homo sapiens
aagctgccctcagcc

SEQ ID NO: 701749 - DNA, 15 bp, Homo sapiens
agctgccctcagccc

SEQ ID NO: 701750 - DNA, 15 bp, Homo sapiens
gctgccctcagcccc

SEQ ID NO: 701751 - DNA, 15 bp, Homo sapiens
ctgccctcagccccc

SEQ ID NO: 701752 - DNA, 15 bp, Homo sapiens
tgccctcagcccccg

SEQ ID NO: 701753 - DNA, 15 bp, Homo sapiens
gccctcagcccccgc

SEQ ID NO: 701754 - DNA, 15 bp, Homo sapiens
ccctcagcccccgcc

SEQ ID NO: 701755 - DNA, 15 bp, Homo sapiens
cctcagcccccgcct

SEQ ID NO: 701756 - DNA, 15 bp, Homo sapiens
ctcagcccccgcctc

SEQ ID NO: 701757 - DNA, 15 bp, Homo sapiens
tcagcccccgcctcg

SEQ ID NO: 701758 - DNA, 15 bp, Homo sapiens
cagcccccgcctcgg

SEQ ID NO: 701759 - DNA, 15 bp, Homo sapiens
agcccccgcctcggc

SEQ ID NO: 701760 - DNA, 15 bp, Homo sapiens
gcccccgcctcggct

SEQ ID NO: 701761 - DNA, 15 bp, Homo sapiens
cccccgcctcggctt

SEQ ID NO: 701762 - DNA, 15 bp, Homo sapiens
ccccgcctcggcttc

SEQ ID NO: 701763 - DNA, 15 bp, Homo sapiens
cccgcctcggcttcc

SEQ ID NO: 701764 - DNA, 15 bp, Homo sapiens
ccgcctcggcttccc

SEQ ID NO: 701765 - DNA, 15 bp, Homo sapiens
cgcctcggcttcccc

SEQ ID NO: 701766 - DNA, 15 bp, Homo sapiens
gcctcggcttccccc

SEQ ID NO: 701767 - DNA, 15 bp, Homo sapiens
cctcggcttcccccc

SEQ ID NO: 701768 - DNA, 15 bp, Homo sapiens
ctcggcttccccccc

SEQ ID NO: 701769 - DNA, 15 bp, Homo sapiens
tcggcttcccccccg

SEQ ID NO: 701770 - DNA, 15 bp, Homo sapiens
cggcttcccccccgt

SEQ ID NO: 701771 - DNA, 15 bp, Homo sapiens
ggcttcccccccgtg

SEQ ID NO: 701772 - DNA, 15 bp, Homo sapiens
gcttcccccccgtgc

SEQ ID NO: 701773 - DNA, 15 bp, Homo sapiens
cttcccccccgtgct

SEQ ID NO: 701774 - DNA, 15 bp, Homo sapiens
ttcccccccgtgctc

SEQ ID NO: 701775 - DNA, 15 bp, Homo sapiens
tcccccccgtgctcg

SEQ ID NO: 701776 - DNA, 15 bp, Homo sapiens
cccccccgtgctcgt

SEQ ID NO: 701777 - DNA, 15 bp, Homo sapiens
ccccccgtgctcgtc

SEQ ID NO: 701778 - DNA, 15 bp, Homo sapiens
cccccgtgctcgtca

SEQ ID NO: 701779 - DNA, 15 bp, Homo sapiens
ccccgtgctcgtcag

SEQ ID NO: 701780 - DNA, 15 bp, Homo sapiens
cccgtgctcgtcagc

SEQ ID NO: 701781 - DNA, 15 bp, Homo sapiens
ccgtgctcgtcagcg

SEQ ID NO: 701782 - DNA, 15 bp, Homo sapiens
cgtgctcgtcagcgc

SEQ ID NO: 701783 - DNA, 15 bp, Homo sapiens
gtgctcgtcagcgcc

SEQ ID NO: 701784 - DNA, 15 bp, Homo sapiens
tgctcgtcagcgccc

SEQ ID NO: 701785 - DNA, 15 bp, Homo sapiens
gctcgtcagcgccca

SEQ ID NO: 701786 - DNA, 15 bp, Homo sapiens
ctcgtcagcgcccaa

SEQ ID NO: 701787 - DNA, 15 bp, Homo sapiens
tcgtcagcgcccaaa

SEQ ID NO: 701788 - DNA, 15 bp, Homo sapiens
cgtcagcgcccaaag

SEQ ID NO: 701789 - DNA, 15 bp, Homo sapiens
gtcagcgcccaaagt

SEQ ID NO: 701790 - DNA, 15 bp, Homo sapiens
tcagcgcccaaagtc

SEQ ID NO: 701791 - DNA, 15 bp, Homo sapiens
cagcgcccaaagtct

SEQ ID NO: 701792 - DNA, 15 bp, Homo sapiens
agcgcccaaagtctg

SEQ ID NO: 701793 - DNA, 15 bp, Homo sapiens
gcgcccaaagtctgg

SEQ ID NO: 701794 - DNA, 15 bp, Homo sapiens
cgcccaaagtctgga

SEQ ID NO: 701795 - DNA, 15 bp, Homo sapiens
gcccaaagtctggag

SEQ ID NO: 701796 - DNA, 15 bp, Homo sapiens
cccaaagtctggaga

SEQ ID NO: 701797 - DNA, 15 bp, Homo sapiens
ccaaagtctggagag

SEQ ID NO: 701798 - DNA, 15 bp, Homo sapiens
caaagtctggagagg

SEQ ID NO: 701799 - DNA, 15 bp, Homo sapiens
aaagtctggagaggg

SEQ ID NO: 701800 - DNA, 15 bp, Homo sapiens
aagtctggagagggc

SEQ ID NO: 701801 - DNA, 15 bp, Homo sapiens
agtctggagagggct

SEQ ID NO: 701802 - DNA, 15 bp, Homo sapiens
gtctggagagggctg

SEQ ID NO: 701803 - DNA, 15 bp, Homo sapiens
tctggagagggctga

SEQ ID NO: 701804 - DNA, 15 bp, Homo sapiens
ctggagagggctgag

SEQ ID NO: 701805 - DNA, 15 bp, Homo sapiens
tggagagggctgagg

SEQ ID NO: 701806 - DNA, 15 bp, Homo sapiens
ggagagggctgaggc

SEQ ID NO: 701807 - DNA, 15 bp, Homo sapiens
gagagggctgaggcg

SEQ ID NO: 701808 - DNA, 15 bp, Homo sapiens
agagggctgaggcgg

SEQ ID NO: 701809 - DNA, 15 bp, Homo sapiens
gagggctgaggcggc

SEQ ID NO: 701810 - DNA, 15 bp, Homo sapiens
agggctgaggcggca

SEQ ID NO: 701811 - DNA, 15 bp, Homo sapiens
gggctgaggcggcag

SEQ ID NO: 701812 - DNA, 15 bp, Homo sapiens
ggctgaggcggcagg

SEQ ID NO: 701813 - DNA, 15 bp, Homo sapiens
gctgaggcggcaggg

SEQ ID NO: 701814 - DNA, 15 bp, Homo sapiens
ctgaggcggcagggg

SEQ ID NO: 701815 - DNA, 15 bp, Homo sapiens
tgaggcggcaggggg

SEQ ID NO: 701816 - DNA, 15 bp, Homo sapiens
gaggcggcagggggc

SEQ ID NO: 701817 - DNA, 15 bp, Homo sapiens
aggcggcagggggct

SEQ ID NO: 701818 - DNA, 15 bp, Homo sapiens
ggcggcagggggctg

SEQ ID NO: 701819 - DNA, 15 bp, Homo sapiens
gcggcagggggctgg

SEQ ID NO: 701820 - DNA, 15 bp, Homo sapiens
cggcagggggctggc

SEQ ID NO: 701821 - DNA, 15 bp, Homo sapiens
ggcagggggctggcg

SEQ ID NO: 701822 - DNA, 15 bp, Homo sapiens
gcagggggctggcgt

SEQ ID NO: 701823 - DNA, 15 bp, Homo sapiens
cagggggctggcgtg

SEQ ID NO: 701824 - DNA, 15 bp, Homo sapiens
agggggctggcgtgt

SEQ ID NO: 701825 - DNA, 15 bp, Homo sapiens
gggggctggcgtgtc

SEQ ID NO: 701826 - DNA, 15 bp, Homo sapiens
ggggctggcgtgtca

SEQ ID NO: 701827 - DNA, 15 bp, Homo sapiens
gggctggcgtgtcag

SEQ ID NO: 701828 - DNA, 15 bp, Homo sapiens
ggctggcgtgtcagc

SEQ ID NO: 701829 - DNA, 15 bp, Homo sapiens
gctggcgtgtcagcg

SEQ ID NO: 701830 - DNA, 15 bp, Homo sapiens
ctggcgtgtcagcgc

SEQ ID NO: 701831 - DNA, 15 bp, Homo sapiens
tggcgtgtcagcgct

SEQ ID NO: 701832 - DNA, 15 bp, Homo sapiens
ggcgtgtcagcgctg

SEQ ID NO: 701833 - DNA, 15 bp, Homo sapiens
gcgtgtcagcgctgc

SEQ ID NO: 701834 - DNA, 15 bp, Homo sapiens
cgtgtcagcgctgcc

SEQ ID NO: 701835 - DNA, 15 bp, Homo sapiens
gtgtcagcgctgcct

SEQ ID NO: 701836 - DNA, 15 bp, Homo sapiens
tgtcagcgctgcctt

SEQ ID NO: 701837 - DNA, 15 bp, Homo sapiens
gtcagcgctgccttg

SEQ ID NO: 701838 - DNA, 15 bp, Homo sapiens
tcagcgctgccttga

SEQ ID NO: 701839 - DNA, 15 bp, Homo sapiens
cagcgctgccttgag

SEQ ID NO: 701840 - DNA, 15 bp, Homo sapiens
agcgctgccttgagc

SEQ ID NO: 701841 - DNA, 15 bp, Homo sapiens
gcgctgccttgagcg

SEQ ID NO: 701842 - DNA, 15 bp, Homo sapiens
cgctgccttgagcgt

SEQ ID NO: 701843 - DNA, 15 bp, Homo sapiens
gctgccttgagcgtg

SEQ ID NO: 701844 - DNA, 15 bp, Homo sapiens
ctgccttgagcgtgc

SEQ ID NO: 701845 - DNA, 15 bp, Homo sapiens
tgccttgagcgtgcg

SEQ ID NO: 701846 - DNA, 15 bp, Homo sapiens
gccttgagcgtgcgc

SEQ ID NO: 701847 - DNA, 15 bp, Homo sapiens
ccttgagcgtgcgca

SEQ ID NO: 701848 - DNA, 15 bp, Homo sapiens
cttgagcgtgcgcac

SEQ ID NO: 701849 - DNA, 15 bp, Homo sapiens
ttgagcgtgcgcaca

SEQ ID NO: 701850 - DNA, 15 bp, Homo sapiens
tgagcgtgcgcacat

SEQ ID NO: 701851 - DNA, 15 bp, Homo sapiens
gagcgtgcgcacatc

SEQ ID NO: 701852 - DNA, 15 bp, Homo sapiens
agcgtgcgcacatct

SEQ ID NO: 701853 - DNA, 15 bp, Homo sapiens
gcgtgcgcacatctg

SEQ ID NO: 701854 - DNA, 15 bp, Homo sapiens
cgtgcgcacatctgg

SEQ ID NO: 701855 - DNA, 15 bp, Homo sapiens
gtgcgcacatctggc

SEQ ID NO: 701856 - DNA, 15 bp, Homo sapiens
tgcgcacatctggct

SEQ ID NO: 701857 - DNA, 15 bp, Homo sapiens
gcgcacatctggctg

SEQ ID NO: 701858 - DNA, 15 bp, Homo sapiens
cgcacatctggctgg

SEQ ID NO: 701859 - DNA, 15 bp, Homo sapiens
gcacatctggctggg

SEQ ID NO: 701860 - DNA, 15 bp, Homo sapiens
cacatctggctgggc

SEQ ID NO: 701861 - DNA, 15 bp, Homo sapiens
acatctggctgggct

SEQ ID NO: 701862 - DNA, 15 bp, Homo sapiens
catctggctgggctg

SEQ ID NO: 701863 - DNA, 15 bp, Homo sapiens
atctggctgggctgc

SEQ ID NO: 701864 - DNA, 15 bp, Homo sapiens
tctggctgggctgca

SEQ ID NO: 701865 - DNA, 15 bp, Homo sapiens
ctggctgggctgcag

SEQ ID NO: 701866 - DNA, 15 bp, Homo sapiens
tggctgggctgcagc

SEQ ID NO: 701867 - DNA, 15 bp, Homo sapiens
ggctgggctgcagca

SEQ ID NO: 701868 - DNA, 15 bp, Homo sapiens
gctgggctgcagcag

SEQ ID NO: 701869 - DNA, 15 bp, Homo sapiens
ctgggctgcagcagc

SEQ ID NO: 701870 - DNA, 15 bp, Homo sapiens
tgggctgcagcagca

SEQ ID NO: 701871 - DNA, 15 bp, Homo sapiens
gggctgcagcagcac

SEQ ID NO: 701872 - DNA, 15 bp, Homo sapiens
ggctgcagcagcacc

SEQ ID NO: 701873 - DNA, 15 bp, Homo sapiens
gctgcagcagcaccc

SEQ ID NO: 701874 - DNA, 15 bp, Homo sapiens
ctgcagcagcaccca

SEQ ID NO: 701875 - DNA, 15 bp, Homo sapiens
tgcagcagcacccag

SEQ ID NO: 701876 - DNA, 15 bp, Homo sapiens
gcagcagcacccagg

SEQ ID NO: 701877 - DNA, 15 bp, Homo sapiens
cagcagcacccaggc

SEQ ID NO: 701878 - DNA, 15 bp, Homo sapiens
agcagcacccaggct

SEQ ID NO: 701879 - DNA, 15 bp, Homo sapiens
gcagcacccaggctc

SEQ ID NO: 701880 - DNA, 15 bp, Homo sapiens
cagcacccaggctca

SEQ ID NO: 701881 - DNA, 15 bp, Homo sapiens
agcacccaggctcag

SEQ ID NO: 701882 - DNA, 15 bp, Homo sapiens
gcacccaggctcagc

SEQ ID NO: 701883 - DNA, 15 bp, Homo sapiens
cacccaggctcagcc

SEQ ID NO: 701884 - DNA, 15 bp, Homo sapiens
acccaggctcagccc

SEQ ID NO: 701885 - DNA, 15 bp, Homo sapiens
cccaggctcagccct

SEQ ID NO: 701886 - DNA, 15 bp, Homo sapiens
ccaggctcagccctg

SEQ ID NO: 701887 - DNA, 15 bp, Homo sapiens
caggctcagccctga

SEQ ID NO: 701888 - DNA, 15 bp, Homo sapiens
aggctcagccctgac

SEQ ID NO: 701889 - DNA, 15 bp, Homo sapiens
ggctcagccctgact

SEQ ID NO: 701890 - DNA, 15 bp, Homo sapiens
gctcagccctgactt

SEQ ID NO: 701891 - DNA, 15 bp, Homo sapiens
ctcagccctgacttt

SEQ ID NO: 701892 - DNA, 15 bp, Homo sapiens
tcagccctgactttg

SEQ ID NO: 701893 - DNA, 15 bp, Homo sapiens
cagccctgactttgc

SEQ ID NO: 701894 - DNA, 15 bp, Homo sapiens
agccctgactttgct

SEQ ID NO: 701895 - DNA, 15 bp, Homo sapiens
gccctgactttgctc

SEQ ID NO: 701896 - DNA, 15 bp, Homo sapiens
ccctgactttgctcc

SEQ ID NO: 701897 - DNA, 15 bp, Homo sapiens
cctgactttgctccg

SEQ ID NO: 701898 - DNA, 15 bp, Homo sapiens
ctgactttgctccga

SEQ ID NO: 701899 - DNA, 15 bp, Homo sapiens
tgactttgctccgag

SEQ ID NO: 701900 - DNA, 15 bp, Homo sapiens
gactttgctccgaga

SEQ ID NO: 701901 - DNA, 15 bp, Homo sapiens
actttgctccgagat

SEQ ID NO: 701902 - DNA, 15 bp, Homo sapiens
ctttgctccgagatt

SEQ ID NO: 701903 - DNA, 15 bp, Homo sapiens
tttgctccgagattg

SEQ ID NO: 701904 - DNA, 15 bp, Homo sapiens
ttgctccgagattgg

SEQ ID NO: 701905 - DNA, 15 bp, Homo sapiens
tgctccgagattgga

SEQ ID NO: 701906 - DNA, 15 bp, Homo sapiens
gctccgagattggag

SEQ ID NO: 701907 - DNA, 15 bp, Homo sapiens
ctccgagattggagt

SEQ ID NO: 701908 - DNA, 15 bp, Homo sapiens
tccgagattggagtg

SEQ ID NO: 701909 - DNA, 15 bp, Homo sapiens
ccgagattggagtgg

SEQ ID NO: 701910 - DNA, 15 bp, Homo sapiens
cgagattggagtggg

SEQ ID NO: 701911 - DNA, 15 bp, Homo sapiens
gagattggagtgggc

SEQ ID NO: 701912 - DNA, 15 bp, Homo sapiens
agattggagtgggcg

SEQ ID NO: 701913 - DNA, 15 bp, Homo sapiens
gattggagtgggcgc

SEQ ID NO: 701914 - DNA, 15 bp, Homo sapiens
attggagtgggcgct

SEQ ID NO: 701915 - DNA, 15 bp, Homo sapiens
ttggagtgggcgctg

SEQ ID NO: 701916 - DNA, 15 bp, Homo sapiens
tggagtgggcgctgg

SEQ ID NO: 701917 - DNA, 15 bp, Homo sapiens
ggagtgggcgctggc

SEQ ID NO: 701918 - DNA, 15 bp, Homo sapiens
gagtgggcgctggca

SEQ ID NO: 701919 - DNA, 15 bp, Homo sapiens
agtgggcgctggcag

SEQ ID NO: 701920 - DNA, 15 bp, Homo sapiens
gtgggcgctggcagc

SEQ ID NO: 701921 - DNA, 15 bp, Homo sapiens
tgggcgctggcagca

SEQ ID NO: 701922 - DNA, 15 bp, Homo sapiens
gggcgctggcagcag

SEQ ID NO: 701923 - DNA, 15 bp, Homo sapiens
ggcgctggcagcagg

SEQ ID NO: 701924 - DNA, 15 bp, Homo sapiens
gcgctggcagcaggg

SEQ ID NO: 701925 - DNA, 15 bp, Homo sapiens
cgctggcagcaggga

SEQ ID NO: 701926 - DNA, 15 bp, Homo sapiens
gctggcagcagggag

SEQ ID NO: 701927 - DNA, 15 bp, Homo sapiens
ctggcagcagggaga

SEQ ID NO: 701928 - DNA, 15 bp, Homo sapiens
tggcagcagggagaa

SEQ ID NO: 701929 - DNA, 15 bp, Homo sapiens
ggcagcagggagaaa

SEQ ID NO: 701930 - DNA, 15 bp, Homo sapiens
gcagcagggagaaac

SEQ ID NO: 701931 - DNA, 15 bp, Homo sapiens
cagcagggagaaacc

SEQ ID NO: 701932 - DNA, 15 bp, Homo sapiens
agcagggagaaacca

SEQ ID NO: 701933 - DNA, 15 bp, Homo sapiens
gcagggagaaaccag

SEQ ID NO: 701934 - DNA, 15 bp, Homo sapiens
cagggagaaaccagg

SEQ ID NO: 701935 - DNA, 15 bp, Homo sapiens
agggagaaaccaggc

SEQ ID NO: 701936 - DNA, 15 bp, Homo sapiens
gggagaaaccaggca

SEQ ID NO: 701937 - DNA, 15 bp, Homo sapiens
ggagaaaccaggcag

SEQ ID NO: 701938 - DNA, 15 bp, Homo sapiens
gagaaaccaggcagt

SEQ ID NO: 701939 - DNA, 15 bp, Homo sapiens
agaaaccaggcagtg

SEQ ID NO: 701940 - DNA, 15 bp, Homo sapiens
gaaaccaggcagtgg

SEQ ID NO: 701941 - DNA, 15 bp, Homo sapiens
aaaccaggcagtggg

SEQ ID NO: 701942 - DNA, 15 bp, Homo sapiens
aaccaggcagtggga

SEQ ID NO: 701943 - DNA, 15 bp, Homo sapiens
accaggcagtgggag

SEQ ID NO: 701944 - DNA, 15 bp, Homo sapiens
ccaggcagtgggagc

SEQ ID NO: 701945 - DNA, 15 bp, Homo sapiens
caggcagtgggagca

SEQ ID NO: 701946 - DNA, 15 bp, Homo sapiens
aggcagtgggagcag

SEQ ID NO: 701947 - DNA, 15 bp, Homo sapiens
ggcagtgggagcagg

SEQ ID NO: 701948 - DNA, 15 bp, Homo sapiens
gcagtgggagcaggc

SEQ ID NO: 701949 - DNA, 15 bp, Homo sapiens
cagtgggagcaggca

SEQ ID NO: 701950 - DNA, 15 bp, Homo sapiens
agtgggagcaggcac

SEQ ID NO: 701951 - DNA, 15 bp, Homo sapiens
gtgggagcaggcact

SEQ ID NO: 701952 - DNA, 15 bp, Homo sapiens
tgggagcaggcactt

SEQ ID NO: 701953 - DNA, 15 bp, Homo sapiens
gggagcaggcacttc

SEQ ID NO: 701954 - DNA, 15 bp, Homo sapiens
ggagcaggcacttct

SEQ ID NO: 701955 - DNA, 15 bp, Homo sapiens
gagcaggcacttctg

SEQ ID NO: 701956 - DNA, 15 bp, Homo sapiens
agcaggcacttctga

SEQ ID NO: 701957 - DNA, 15 bp, Homo sapiens
gcaggcacttctgag

SEQ ID NO: 701958 - DNA, 15 bp, Homo sapiens
caggcacttctgagc

SEQ ID NO: 701959 - DNA, 15 bp, Homo sapiens
aggcacttctgagcc

SEQ ID NO: 701960 - DNA, 15 bp, Homo sapiens
ggcacttctgagcct

SEQ ID NO: 701961 - DNA, 15 bp, Homo sapiens
gcacttctgagcctg

SEQ ID NO: 701962 - DNA, 15 bp, Homo sapiens
cacttctgagcctgc

SEQ ID NO: 701963 - DNA, 15 bp, Homo sapiens
acttctgagcctgcg

SEQ ID NO: 701964 - DNA, 15 bp, Homo sapiens
cttctgagcctgcga

SEQ ID NO: 701965 - DNA, 15 bp, Homo sapiens
ttctgagcctgcgag

SEQ ID NO: 701966 - DNA, 15 bp, Homo sapiens
tctgagcctgcgagg

SEQ ID NO: 701967 - DNA, 15 bp, Homo sapiens
ctgagcctgcgaggg

SEQ ID NO: 701968 - DNA, 15 bp, Homo sapiens
tgagcctgcgagggc

SEQ ID NO: 701969 - DNA, 15 bp, Homo sapiens
gagcctgcgagggcg

SEQ ID NO: 701970 - DNA, 15 bp, Homo sapiens
agcctgcgagggcgg

SEQ ID NO: 701971 - DNA, 15 bp, Homo sapiens
gcctgcgagggcggt

SEQ ID NO: 701972 - DNA, 15 bp, Homo sapiens
cctgcgagggcggtg

SEQ ID NO: 701973 - DNA, 15 bp, Homo sapiens
ctgcgagggcggtgg

SEQ ID NO: 701974 - DNA, 15 bp, Homo sapiens
tgcgagggcggtggc

SEQ ID NO: 701975 - DNA, 15 bp, Homo sapiens
gcgagggcggtggca

SEQ ID NO: 701976 - DNA, 15 bp, Homo sapiens
cgagggcggtggcag

SEQ ID NO: 701977 - DNA, 15 bp, Homo sapiens
gagggcggtggcagt

SEQ ID NO: 701978 - DNA, 15 bp, Homo sapiens
agggcggtggcagtt

SEQ ID NO: 701979 - DNA, 15 bp, Homo sapiens
gggcggtggcagttg

SEQ ID NO: 701980 - DNA, 15 bp, Homo sapiens
ggcggtggcagttgg

SEQ ID NO: 701981 - DNA, 15 bp, Homo sapiens
gcggtggcagttggg

SEQ ID NO: 701982 - DNA, 15 bp, Homo sapiens
cggtggcagttgggg

SEQ ID NO: 701983 - DNA, 15 bp, Homo sapiens
ggtggcagttggggg

SEQ ID NO: 701984 - DNA, 15 bp, Homo sapiens
gtggcagttgggggg

SEQ ID NO: 701985 - DNA, 15 bp, Homo sapiens
tggcagttggggggt

SEQ ID NO: 701986 - DNA, 15 bp, Homo sapiens
ggcagttggggggtg

SEQ ID NO: 701987 - DNA, 15 bp, Homo sapiens
gcagttggggggtgc

SEQ ID NO: 701988 - DNA, 15 bp, Homo sapiens
cagttggggggtgcc

SEQ ID NO: 701989 - DNA, 15 bp, Homo sapiens
agttggggggtgcct

SEQ ID NO: 701990 - DNA, 15 bp, Homo sapiens
gttggggggtgcctt

SEQ ID NO: 701991 - DNA, 15 bp, Homo sapiens
ttggggggtgccttc

SEQ ID NO: 701992 - DNA, 15 bp, Homo sapiens
tggggggtgccttcc

SEQ ID NO: 701993 - DNA, 15 bp, Homo sapiens
ggggggtgccttccc

SEQ ID NO: 701994 - DNA, 15 bp, Homo sapiens
gggggtgccttcccc

SEQ ID NO: 701995 - DNA, 15 bp, Homo sapiens
ggggtgccttccccg

SEQ ID NO: 701996 - DNA, 15 bp, Homo sapiens
gggtgccttccccgg

SEQ ID NO: 701997 - DNA, 15 bp, Homo sapiens
ggtgccttccccggc

SEQ ID NO: 701998 - DNA, 15 bp, Homo sapiens
gtgccttccccggcc

SEQ ID NO: 701999 - DNA, 15 bp, Homo sapiens
tgccttccccggccc

SEQ ID NO: 702000 - DNA, 15 bp, Homo sapiens
gccttccccggcccc

SEQ ID NO: 702001 - DNA, 15 bp, Homo sapiens
ccttccccggccccc

SEQ ID NO: 702002 - DNA, 15 bp, Homo sapiens
cttccccggccccca

SEQ ID NO: 702003 - DNA, 15 bp, Homo sapiens
ttccccggcccccaa

SEQ ID NO: 702004 - DNA, 15 bp, Homo sapiens
tccccggcccccaag

SEQ ID NO: 702005 - DNA, 15 bp, Homo sapiens
ccccggcccccaagt

SEQ ID NO: 702006 - DNA, 15 bp, Homo sapiens
cccggcccccaagta

SEQ ID NO: 702007 - DNA, 15 bp, Homo sapiens
ccggcccccaagtat

SEQ ID NO: 702008 - DNA, 15 bp, Homo sapiens
cggcccccaagtata

SEQ ID NO: 702009 - DNA, 15 bp, Homo sapiens
ggcccccaagtatac

SEQ ID NO: 702010 - DNA, 15 bp, Homo sapiens
gcccccaagtataca

SEQ ID NO: 702011 - DNA, 15 bp, Homo sapiens
cccccaagtatacag

SEQ ID NO: 702012 - DNA, 15 bp, Homo sapiens
ccccaagtatacaga

SEQ ID NO: 702013 - DNA, 15 bp, Homo sapiens
cccaagtatacagag

SEQ ID NO: 702014 - DNA, 15 bp, Homo sapiens
ccaagtatacagaga

SEQ ID NO: 702015 - DNA, 15 bp, Homo sapiens
caagtatacagagat

SEQ ID NO: 702016 - DNA, 15 bp, Homo sapiens
aagtatacagagatg

SEQ ID NO: 702017 - DNA, 15 bp, Homo sapiens
agtatacagagatgc

SEQ ID NO: 702018 - DNA, 15 bp, Homo sapiens
gtatacagagatgcc

SEQ ID NO: 702019 - DNA, 15 bp, Homo sapiens
tatacagagatgcct

SEQ ID NO: 702020 - DNA, 15 bp, Homo sapiens
atacagagatgcctg

SEQ ID NO: 702021 - DNA, 15 bp, Homo sapiens
tacagagatgcctgg

SEQ ID NO: 702022 - DNA, 15 bp, Homo sapiens
acagagatgcctggg

SEQ ID NO: 702023 - DNA, 15 bp, Homo sapiens
cagagatgcctgggt

SEQ ID NO: 702024 - DNA, 15 bp, Homo sapiens
agagatgcctgggtc

SEQ ID NO: 702025 - DNA, 15 bp, Homo sapiens
gagatgcctgggtcc

SEQ ID NO: 702026 - DNA, 15 bp, Homo sapiens
agatgcctgggtcca

SEQ ID NO: 702027 - DNA, 15 bp, Homo sapiens
gatgcctgggtccac

SEQ ID NO: 702028 - DNA, 15 bp, Homo sapiens
atgcctgggtccaca

SEQ ID NO: 702029 - DNA, 15 bp, Homo sapiens
tgcctgggtccacag

SEQ ID NO: 702030 - DNA, 15 bp, Homo sapiens
gcctgggtccacagc

SEQ ID NO: 702031 - DNA, 15 bp, Homo sapiens
cctgggtccacagcc

SEQ ID NO: 702032 - DNA, 15 bp, Homo sapiens
ctgggtccacagcca

SEQ ID NO: 702033 - DNA, 15 bp, Homo sapiens
tgggtccacagccac

SEQ ID NO: 702034 - DNA, 15 bp, Homo sapiens
gggtccacagccacg

SEQ ID NO: 702035 - DNA, 15 bp, Homo sapiens
ggtccacagccacgg

SEQ ID NO: 702036 - DNA, 15 bp, Homo sapiens
gtccacagccacggt

SEQ ID NO: 702037 - DNA, 15 bp, Homo sapiens
tccacagccacggtt

SEQ ID NO: 702038 - DNA, 15 bp, Homo sapiens
ccacagccacggttt

SEQ ID NO: 702039 - DNA, 15 bp, Homo sapiens
cacagccacggtttg

SEQ ID NO: 702040 - DNA, 15 bp, Homo sapiens
acagccacggtttgg

SEQ ID NO: 702041 - DNA, 15 bp, Homo sapiens
cagccacggtttggg

SEQ ID NO: 702042 - DNA, 15 bp, Homo sapiens
agccacggtttgggt

SEQ ID NO: 702043 - DNA, 15 bp, Homo sapiens
gccacggtttgggta

SEQ ID NO: 702044 - DNA, 15 bp, Homo sapiens
ccacggtttgggtag

SEQ ID NO: 702045 - DNA, 15 bp, Homo sapiens
cacggtttgggtagc

SEQ ID NO: 702046 - DNA, 15 bp, Homo sapiens
acggtttgggtagct

SEQ ID NO: 702047 - DNA, 15 bp, Homo sapiens
cggtttgggtagctg

SEQ ID NO: 702048 - DNA, 15 bp, Homo sapiens
ggtttgggtagctgc

SEQ ID NO: 702049 - DNA, 15 bp, Homo sapiens
gtttgggtagctgca

SEQ ID NO: 702050 - DNA, 15 bp, Homo sapiens
tttgggtagctgcag

SEQ ID NO: 702051 - DNA, 15 bp, Homo sapiens
ttgggtagctgcagc

SEQ ID NO: 702052 - DNA, 15 bp, Homo sapiens
tgggtagctgcagct

SEQ ID NO: 702053 - DNA, 15 bp, Homo sapiens
gggtagctgcagctg

SEQ ID NO: 702054 - DNA, 15 bp, Homo sapiens
ggtagctgcagctgc

SEQ ID NO: 702055 - DNA, 15 bp, Homo sapiens
gtagctgcagctgca

SEQ ID NO: 702056 - DNA, 15 bp, Homo sapiens
tagctgcagctgcac

SEQ ID NO: 702057 - DNA, 15 bp, Homo sapiens
agctgcagctgcact

SEQ ID NO: 702058 - DNA, 15 bp, Homo sapiens
gctgcagctgcactg

SEQ ID NO: 702059 - DNA, 15 bp, Homo sapiens
ctgcagctgcactgg

SEQ ID NO: 702060 - DNA, 15 bp, Homo sapiens
tgcagctgcactggg

SEQ ID NO: 702061 - DNA, 15 bp, Homo sapiens
gcagctgcactgggg

SEQ ID NO: 702062 - DNA, 15 bp, Homo sapiens
cagctgcactgggga

SEQ ID NO: 702063 - DNA, 15 bp, Homo sapiens
agctgcactggggag

SEQ ID NO: 702064 - DNA, 15 bp, Homo sapiens
gctgcactggggagg

SEQ ID NO: 702065 - DNA, 15 bp, Homo sapiens
ctgcactggggaggg

SEQ ID NO: 702066 - DNA, 15 bp, Homo sapiens
tgcactggggagggt

SEQ ID NO: 702067 - DNA, 15 bp, Homo sapiens
gcactggggagggtg

SEQ ID NO: 702068 - DNA, 15 bp, Homo sapiens
cactggggagggtgg

SEQ ID NO: 702069 - DNA, 15 bp, Homo sapiens
actggggagggtggg

SEQ ID NO: 702070 - DNA, 15 bp, Homo sapiens
ctggggagggtggga

SEQ ID NO: 702071 - DNA, 15 bp, Homo sapiens
tggggagggtgggac

SEQ ID NO: 702072 - DNA, 15 bp, Homo sapiens
ggggagggtgggact

SEQ ID NO: 702073 - DNA, 15 bp, Homo sapiens
gggagggtgggactc

SEQ ID NO: 702074 - DNA, 15 bp, Homo sapiens
ggagggtgggactcc

SEQ ID NO: 702075 - DNA, 15 bp, Homo sapiens
gagggtgggactcct

SEQ ID NO: 702076 - DNA, 15 bp, Homo sapiens
agggtgggactccta

SEQ ID NO: 702077 - DNA, 15 bp, Homo sapiens
gggtgggactcctac

SEQ ID NO: 702078 - DNA, 15 bp, Homo sapiens
ggtgggactcctacc

SEQ ID NO: 702079 - DNA, 15 bp, Homo sapiens
gtgggactcctacct

SEQ ID NO: 702080 - DNA, 15 bp, Homo sapiens
tgggactcctacctg

SEQ ID NO: 702081 - DNA, 15 bp, Homo sapiens
gggactcctacctgc

SEQ ID NO: 702082 - DNA, 15 bp, Homo sapiens
ggactcctacctgct

SEQ ID NO: 702083 - DNA, 15 bp, Homo sapiens
gactcctacctgctc

SEQ ID NO: 702084 - DNA, 15 bp, Homo sapiens
actcctacctgctcc

SEQ ID NO: 702085 - DNA, 15 bp, Homo sapiens
ctcctacctgctccc

SEQ ID NO: 702086 - DNA, 15 bp, Homo sapiens
tcctacctgctcccc

SEQ ID NO: 702087 - DNA, 15 bp, Homo sapiens
cctacctgctcccca

SEQ ID NO: 702088 - DNA, 15 bp, Homo sapiens
ctacctgctccccag

SEQ ID NO: 702089 - DNA, 15 bp, Homo sapiens
tacctgctccccagc

SEQ ID NO: 702090 - DNA, 15 bp, Homo sapiens
acctgctccccagcc

SEQ ID NO: 702091 - DNA, 15 bp, Homo sapiens
cctgctccccagccc

SEQ ID NO: 702092 - DNA, 15 bp, Homo sapiens
ctgctccccagccca

SEQ ID NO: 702093 - DNA, 15 bp, Homo sapiens
tgctccccagcccag

SEQ ID NO: 702094 - DNA, 15 bp, Homo sapiens
gctccccagcccaga

SEQ ID NO: 702095 - DNA, 15 bp, Homo sapiens
ctccccagcccagag

SEQ ID NO: 702096 - DNA, 15 bp, Homo sapiens
tccccagcccagaga

SEQ ID NO: 702097 - DNA, 15 bp, Homo sapiens
ccccagcccagagag

SEQ ID NO: 702098 - DNA, 15 bp, Homo sapiens
cccagcccagagagc

SEQ ID NO: 702099 - DNA, 15 bp, Homo sapiens
ccagcccagagagca

SEQ ID NO: 702100 - DNA, 15 bp, Homo sapiens
cagcccagagagcac

SEQ ID NO: 702101 - DNA, 15 bp, Homo sapiens
agcccagagagcaca

SEQ ID NO: 702102 - DNA, 15 bp, Homo sapiens
gcccagagagcacag

SEQ ID NO: 702103 - DNA, 15 bp, Homo sapiens
cccagagagcacagg

SEQ ID NO: 702104 - DNA, 15 bp, Homo sapiens
ccagagagcacaggg

SEQ ID NO: 702105 - DNA, 15 bp, Homo sapiens
cagagagcacaggga

SEQ ID NO: 702106 - DNA, 15 bp, Homo sapiens
agagagcacagggat

SEQ ID NO: 702107 - DNA, 15 bp, Homo sapiens
gagagcacagggatg

SEQ ID NO: 702108 - DNA, 15 bp, Homo sapiens
agagcacagggatgc

SEQ ID NO: 702109 - DNA, 15 bp, Homo sapiens
gagcacagggatgcc

SEQ ID NO: 702110 - DNA, 15 bp, Homo sapiens
agcacagggatgcct

SEQ ID NO: 702111 - DNA, 15 bp, Homo sapiens
gcacagggatgcctg

SEQ ID NO: 702112 - DNA, 15 bp, Homo sapiens
cacagggatgcctgg

SEQ ID NO: 702113 - DNA, 15 bp, Homo sapiens
acagggatgcctggg

SEQ ID NO: 702114 - DNA, 15 bp, Homo sapiens
cagggatgcctgggt

SEQ ID NO: 702115 - DNA, 15 bp, Homo sapiens
agggatgcctgggtc

SEQ ID NO: 702116 - DNA, 15 bp, Homo sapiens
gggatgcctgggtcc

SEQ ID NO: 702117 - DNA, 15 bp, Homo sapiens
ggatgcctgggtccg

SEQ ID NO: 702118 - DNA, 15 bp, Homo sapiens
gatgcctgggtccgc

SEQ ID NO: 702119 - DNA, 15 bp, Homo sapiens
atgcctgggtccgca

SEQ ID NO: 702120 - DNA, 15 bp, Homo sapiens
tgcctgggtccgcag

SEQ ID NO: 702121 - DNA, 15 bp, Homo sapiens
gcctgggtccgcagc

SEQ ID NO: 702122 - DNA, 15 bp, Homo sapiens
cctgggtccgcagcg

SEQ ID NO: 702123 - DNA, 15 bp, Homo sapiens
ctgggtccgcagcgg

SEQ ID NO: 702124 - DNA, 15 bp, Homo sapiens
tgggtccgcagcggt

SEQ ID NO: 702125 - DNA, 15 bp, Homo sapiens
gggtccgcagcggtg

SEQ ID NO: 702126 - DNA, 15 bp, Homo sapiens
ggtccgcagcggtgg

SEQ ID NO: 702127 - DNA, 15 bp, Homo sapiens
gtccgcagcggtggc

SEQ ID NO: 702128 - DNA, 15 bp, Homo sapiens
tccgcagcggtggct

SEQ ID NO: 702129 - DNA, 15 bp, Homo sapiens
ccgcagcggtggctt

SEQ ID NO: 702130 - DNA, 15 bp, Homo sapiens
cgcagcggtggcttg

SEQ ID NO: 702131 - DNA, 15 bp, Homo sapiens
gcagcggtggcttgg

SEQ ID NO: 702132 - DNA, 15 bp, Homo sapiens
cagcggtggcttggg

SEQ ID NO: 702133 - DNA, 15 bp, Homo sapiens
agcggtggcttgggc

SEQ ID NO: 702134 - DNA, 15 bp, Homo sapiens
gcggtggcttgggcg

SEQ ID NO: 702135 - DNA, 15 bp, Homo sapiens
cggtggcttgggcgg

SEQ ID NO: 702136 - DNA, 15 bp, Homo sapiens
ggtggcttgggcggc

SEQ ID NO: 702137 - DNA, 15 bp, Homo sapiens
gtggcttgggcggct

SEQ ID NO: 702138 - DNA, 15 bp, Homo sapiens
tggcttgggcggctg

SEQ ID NO: 702139 - DNA, 15 bp, Homo sapiens
ggcttgggcggctgc

SEQ ID NO: 702140 - DNA, 15 bp, Homo sapiens
gcttgggcggctgca

SEQ ID NO: 702141 - DNA, 15 bp, Homo sapiens
cttgggcggctgcag

SEQ ID NO: 702142 - DNA, 15 bp, Homo sapiens
ttgggcggctgcaga

SEQ ID NO: 702143 - DNA, 15 bp, Homo sapiens
tgggcggctgcagaa

SEQ ID NO: 702144 - DNA, 15 bp, Homo sapiens
gggcggctgcagaag

SEQ ID NO: 702145 - DNA, 15 bp, Homo sapiens
ggcggctgcagaagc

SEQ ID NO: 702146 - DNA, 15 bp, Homo sapiens
gcggctgcagaagca

SEQ ID NO: 702147 - DNA, 15 bp, Homo sapiens
cggctgcagaagcac

SEQ ID NO: 702148 - DNA, 15 bp, Homo sapiens
ggctgcagaagcact

SEQ ID NO: 702149 - DNA, 15 bp, Homo sapiens
gctgcagaagcactg

SEQ ID NO: 702150 - DNA, 15 bp, Homo sapiens
ctgcagaagcactgg

SEQ ID NO: 702151 - DNA, 15 bp, Homo sapiens
tgcagaagcactggg

SEQ ID NO: 702152 - DNA, 15 bp, Homo sapiens
gcagaagcactgggg

SEQ ID NO: 702153 - DNA, 15 bp, Homo sapiens
cagaagcactgggga

SEQ ID NO: 702154 - DNA, 15 bp, Homo sapiens
agaagcactggggag

SEQ ID NO: 702155 - DNA, 15 bp, Homo sapiens
gaagcactggggagc

SEQ ID NO: 702156 - DNA, 15 bp, Homo sapiens
aagcactggggagct

SEQ ID NO: 702157 - DNA, 15 bp, Homo sapiens
agcactggggagctc

SEQ ID NO: 702158 - DNA, 15 bp, Homo sapiens
gcactggggagctcc

SEQ ID NO: 702159 - DNA, 15 bp, Homo sapiens
cactggggagctcct

SEQ ID NO: 702160 - DNA, 15 bp, Homo sapiens
actggggagctcctg

SEQ ID NO: 702161 - DNA, 15 bp, Homo sapiens
ctggggagctcctgt

SEQ ID NO: 702162 - DNA, 15 bp, Homo sapiens
tggggagctcctgtc

SEQ ID NO: 702163 - DNA, 15 bp, Homo sapiens
ggggagctcctgtcc

SEQ ID NO: 702164 - DNA, 15 bp, Homo sapiens
gggagctcctgtccc

SEQ ID NO: 702165 - DNA, 15 bp, Homo sapiens
ggagctcctgtccca

SEQ ID NO: 702166 - DNA, 15 bp, Homo sapiens
gagctcctgtcccaa

SEQ ID NO: 702167 - DNA, 15 bp, Homo sapiens
agctcctgtcccaac

SEQ ID NO: 702168 - DNA, 15 bp, Homo sapiens
gctcctgtcccaact

SEQ ID NO: 702169 - DNA, 15 bp, Homo sapiens
ctcctgtcccaactc

SEQ ID NO: 702170 - DNA, 15 bp, Homo sapiens
tcctgtcccaactcg

SEQ ID NO: 702171 - DNA, 15 bp, Homo sapiens
cctgtcccaactcgg

SEQ ID NO: 702172 - DNA, 15 bp, Homo sapiens
ctgtcccaactcgga

SEQ ID NO: 702173 - DNA, 15 bp, Homo sapiens
tgtcccaactcggaa

SEQ ID NO: 702174 - DNA, 15 bp, Homo sapiens
gtcccaactcggaag

SEQ ID NO: 702175 - DNA, 15 bp, Homo sapiens
tcccaactcggaagg

SEQ ID NO: 702176 - DNA, 15 bp, Homo sapiens
cccaactcggaaggg

SEQ ID NO: 702177 - DNA, 15 bp, Homo sapiens
ccaactcggaagggg

SEQ ID NO: 702178 - DNA, 15 bp, Homo sapiens
caactcggaaggggc

SEQ ID NO: 702179 - DNA, 15 bp, Homo sapiens
aactcggaaggggcg

SEQ ID NO: 702180 - DNA, 15 bp, Homo sapiens
actcggaaggggcgg

SEQ ID NO: 702181 - DNA, 15 bp, Homo sapiens
ctcggaaggggcggg

SEQ ID NO: 702182 - DNA, 15 bp, Homo sapiens
tcggaaggggcgggg

SEQ ID NO: 702183 - DNA, 15 bp, Homo sapiens
cggaaggggcggggt

SEQ ID NO: 702184 - DNA, 15 bp, Homo sapiens
ggaaggggcggggtt

SEQ ID NO: 702185 - DNA, 15 bp, Homo sapiens
gaaggggcggggttc

SEQ ID NO: 702186 - DNA, 15 bp, Homo sapiens
aaggggcggggttcc

SEQ ID NO: 702187 - DNA, 15 bp, Homo sapiens
aggggcggggttcct

SEQ ID NO: 702188 - DNA, 15 bp, Homo sapiens
ggggcggggttcctg

SEQ ID NO: 702189 - DNA, 15 bp, Homo sapiens
gggcggggttcctgc

SEQ ID NO: 702190 - DNA, 15 bp, Homo sapiens
ggcggggttcctgct

SEQ ID NO: 702191 - DNA, 15 bp, Homo sapiens
gcggggttcctgctt

SEQ ID NO: 702192 - DNA, 15 bp, Homo sapiens
cggggttcctgcttg

SEQ ID NO: 702193 - DNA, 15 bp, Homo sapiens
ggggttcctgcttgt

SEQ ID NO: 702194 - DNA, 15 bp, Homo sapiens
gggttcctgcttgtc

SEQ ID NO: 702195 - DNA, 15 bp, Homo sapiens
ggttcctgcttgtcc

SEQ ID NO: 702196 - DNA, 15 bp, Homo sapiens
gttcctgcttgtccc

SEQ ID NO: 702197 - DNA, 15 bp, Homo sapiens
ttcctgcttgtcccc

SEQ ID NO: 702198 - DNA, 15 bp, Homo sapiens
tcctgcttgtccccg

SEQ ID NO: 702199 - DNA, 15 bp, Homo sapiens
cctgcttgtccccgg

SEQ ID NO: 702200 - DNA, 15 bp, Homo sapiens
ctgcttgtccccggc

SEQ ID NO: 702201 - DNA, 15 bp, Homo sapiens
tgcttgtccccggct

SEQ ID NO: 702202 - DNA, 15 bp, Homo sapiens
gcttgtccccggctc

SEQ ID NO: 702203 - DNA, 15 bp, Homo sapiens
cttgtccccggctcc

SEQ ID NO: 702204 - DNA, 15 bp, Homo sapiens
ttgtccccggctcct

SEQ ID NO: 702205 - DNA, 15 bp, Homo sapiens
tgtccccggctcctc

SEQ ID NO: 702206 - DNA, 15 bp, Homo sapiens
gtccccggctcctcc

SEQ ID NO: 702207 - DNA, 15 bp, Homo sapiens
tccccggctcctccg

SEQ ID NO: 702208 - DNA, 15 bp, Homo sapiens
ccccggctcctccgg

SEQ ID NO: 702209 - DNA, 15 bp, Homo sapiens
cccggctcctccggg

SEQ ID NO: 702210 - DNA, 15 bp, Homo sapiens
ccggctcctccgggc

SEQ ID NO: 702211 - DNA, 15 bp, Homo sapiens
cggctcctccgggct

SEQ ID NO: 702212 - DNA, 15 bp, Homo sapiens
ggctcctccgggctt

SEQ ID NO: 702213 - DNA, 15 bp, Homo sapiens
gctcctccgggcttc

SEQ ID NO: 702214 - DNA, 15 bp, Homo sapiens
ctcctccgggcttcc

SEQ ID NO: 702215 - DNA, 15 bp, Homo sapiens
tcctccgggcttcct

SEQ ID NO: 702216 - DNA, 15 bp, Homo sapiens
cctccgggcttcctg

SEQ ID NO: 702217 - DNA, 15 bp, Homo sapiens
ctccgggcttcctgg

SEQ ID NO: 702218 - DNA, 15 bp, Homo sapiens
tccgggcttcctgga

SEQ ID NO: 702219 - DNA, 15 bp, Homo sapiens
ccgggcttcctggag

SEQ ID NO: 702220 - DNA, 15 bp, Homo sapiens
cgggcttcctggagc

SEQ ID NO: 702221 - DNA, 15 bp, Homo sapiens
gggcttcctggagcg

SEQ ID NO: 702222 - DNA, 15 bp, Homo sapiens
ggcttcctggagcgt

SEQ ID NO: 702223 - DNA, 15 bp, Homo sapiens
gcttcctggagcgtg

SEQ ID NO: 702224 - DNA, 15 bp, Homo sapiens
cttcctggagcgtgc

SEQ ID NO: 702225 - DNA, 15 bp, Homo sapiens
ttcctggagcgtgcc

SEQ ID NO: 702226 - DNA, 15 bp, Homo sapiens
tcctggagcgtgccg

SEQ ID NO: 702227 - DNA, 15 bp, Homo sapiens
cctggagcgtgccgc

SEQ ID NO: 702228 - DNA, 15 bp, Homo sapiens
ctggagcgtgccgcc

SEQ ID NO: 702229 - DNA, 15 bp, Homo sapiens
tggagcgtgccgccc

SEQ ID NO: 702230 - DNA, 15 bp, Homo sapiens
ggagcgtgccgcccc

SEQ ID NO: 702231 - DNA, 15 bp, Homo sapiens
gagcgtgccgcccca

SEQ ID NO: 702232 - DNA, 15 bp, Homo sapiens
agcgtgccgccccat

SEQ ID NO: 702233 - DNA, 15 bp, Homo sapiens
gcgtgccgccccatc

SEQ ID NO: 702234 - DNA, 15 bp, Homo sapiens
cgtgccgccccatcc

SEQ ID NO: 702235 - DNA, 15 bp, Homo sapiens
gtgccgccccatcca

SEQ ID NO: 702236 - DNA, 15 bp, Homo sapiens
tgccgccccatccac

SEQ ID NO: 702237 - DNA, 15 bp, Homo sapiens
gccgccccatccacg

SEQ ID NO: 702238 - DNA, 15 bp, Homo sapiens
ccgccccatccacgc

SEQ ID NO: 702239 - DNA, 15 bp, Homo sapiens
cgccccatccacgcc

SEQ ID NO: 702240 - DNA, 15 bp, Homo sapiens
gccccatccacgcct

SEQ ID NO: 702241 - DNA, 15 bp, Homo sapiens
ccccatccacgcctc

SEQ ID NO: 702242 - DNA, 15 bp, Homo sapiens
cccatccacgcctct

SEQ ID NO: 702243 - DNA, 15 bp, Homo sapiens
ccatccacgcctctc

SEQ ID NO: 702244 - DNA, 15 bp, Homo sapiens
catccacgcctctct

SEQ ID NO: 702245 - DNA, 15 bp, Homo sapiens
atccacgcctctctg

SEQ ID NO: 702246 - DNA, 15 bp, Homo sapiens
tccacgcctctctgc

SEQ ID NO: 702247 - DNA, 15 bp, Homo sapiens
ccacgcctctctgct

SEQ ID NO: 702248 - DNA, 15 bp, Homo sapiens
cacgcctctctgctg

SEQ ID NO: 702249 - DNA, 15 bp, Homo sapiens
acgcctctctgctgc

SEQ ID NO: 702250 - DNA, 15 bp, Homo sapiens
cgcctctctgctgca

SEQ ID NO: 702251 - DNA, 15 bp, Homo sapiens
gcctctctgctgcag

SEQ ID NO: 702252 - DNA, 15 bp, Homo sapiens
cctctctgctgcagc

SEQ ID NO: 702253 - DNA, 15 bp, Homo sapiens
ctctctgctgcagca

SEQ ID NO: 702254 - DNA, 15 bp, Homo sapiens
tctctgctgcagcag

SEQ ID NO: 702255 - DNA, 15 bp, Homo sapiens
ctctgctgcagcagg

SEQ ID NO: 702256 - DNA, 15 bp, Homo sapiens
tctgctgcagcaggt

SEQ ID NO: 702257 - DNA, 15 bp, Homo sapiens
ctgctgcagcaggtg

SEQ ID NO: 702258 - DNA, 15 bp, Homo sapiens
tgctgcagcaggtgt

SEQ ID NO: 702259 - DNA, 15 bp, Homo sapiens
gctgcagcaggtgtg

SEQ ID NO: 702260 - DNA, 15 bp, Homo sapiens
ctgcagcaggtgtga

SEQ ID NO: 702261 - DNA, 15 bp, Homo sapiens
tgcagcaggtgtgat

SEQ ID NO: 702262 - DNA, 15 bp, Homo sapiens
gcagcaggtgtgatg

SEQ ID NO: 702263 - DNA, 15 bp, Homo sapiens
cagcaggtgtgatgt

SEQ ID NO: 702264 - DNA, 15 bp, Homo sapiens
agcaggtgtgatgta

SEQ ID NO: 702265 - DNA, 15 bp, Homo sapiens
gcaggtgtgatgtac

SEQ ID NO: 702266 - DNA, 15 bp, Homo sapiens
caggtgtgatgtaca

SEQ ID NO: 702267 - DNA, 15 bp, Homo sapiens
aggtgtgatgtacat

SEQ ID NO: 702268 - DNA, 15 bp, Homo sapiens
ggtgtgatgtacata

SEQ ID NO: 702269 - DNA, 15 bp, Homo sapiens
gtgtgatgtacatac

SEQ ID NO: 702270 - DNA, 15 bp, Homo sapiens
tgtgatgtacataca

SEQ ID NO: 702271 - DNA, 15 bp, Homo sapiens
gtgatgtacatacaa

SEQ ID NO: 702272 - DNA, 15 bp, Homo sapiens
tgatgtacatacaaa

SEQ ID NO: 702273 - DNA, 15 bp, Homo sapiens
gatgtacatacaaaa

SEQ ID NO: 702274 - DNA, 15 bp, Homo sapiens
atgtacatacaaaag

SEQ ID NO: 702275 - DNA, 15 bp, Homo sapiens
tgtacatacaaaagt

SEQ ID NO: 702276 - DNA, 15 bp, Homo sapiens
gtacatacaaaagta

SEQ ID NO: 702277 - DNA, 15 bp, Homo sapiens
tacatacaaaagtag

SEQ ID NO: 702278 - DNA, 15 bp, Homo sapiens
acatacaaaagtagt

SEQ ID NO: 702279 - DNA, 15 bp, Homo sapiens
catacaaaagtagtg

SEQ ID NO: 702280 - DNA, 15 bp, Homo sapiens
atacaaaagtagtgt

SEQ ID NO: 702281 - DNA, 15 bp, Homo sapiens
tacaaaagtagtgtg

SEQ ID NO: 702282 - DNA, 15 bp, Homo sapiens
acaaaagtagtgtgt

SEQ ID NO: 702283 - DNA, 15 bp, Homo sapiens
caaaagtagtgtgtt

SEQ ID NO: 702284 - DNA, 15 bp, Homo sapiens
aaaagtagtgtgttg

SEQ ID NO: 702285 - DNA, 15 bp, Homo sapiens
aaagtagtgtgttgt

SEQ ID NO: 702286 - DNA, 15 bp, Homo sapiens
aagtagtgtgttgtt

SEQ ID NO: 702287 - DNA, 15 bp, Homo sapiens
agtagtgtgttgttg

SEQ ID NO: 702288 - DNA, 15 bp, Homo sapiens
gtagtgtgttgttgc

SEQ ID NO: 702289 - DNA, 15 bp, Homo sapiens
tagtgtgttgttgcc

SEQ ID NO: 702290 - DNA, 15 bp, Homo sapiens
agtgtgttgttgcct

SEQ ID NO: 702291 - DNA, 15 bp, Homo sapiens
gtgtgttgttgccta

SEQ ID NO: 702292 - DNA, 15 bp, Homo sapiens
tgtgttgttgcctac

SEQ ID NO: 702293 - DNA, 15 bp, Homo sapiens
gtgttgttgcctact

SEQ ID NO: 702294 - DNA, 15 bp, Homo sapiens
tgttgttgcctactg

SEQ ID NO: 702295 - DNA, 15 bp, Homo sapiens
gttgttgcctactgc

SEQ ID NO: 702296 - DNA, 15 bp, Homo sapiens
ttgttgcctactgca

SEQ ID NO: 702297 - DNA, 15 bp, Homo sapiens
tgttgcctactgcag

SEQ ID NO: 702298 - DNA, 15 bp, Homo sapiens
gttgcctactgcaga

SEQ ID NO: 702299 - DNA, 15 bp, Homo sapiens
ttgcctactgcagac

SEQ ID NO: 702300 - DNA, 15 bp, Homo sapiens
tgcctactgcagaca

SEQ ID NO: 702301 - DNA, 15 bp, Homo sapiens
gcctactgcagacac

SEQ ID NO: 702302 - DNA, 15 bp, Homo sapiens
cctactgcagacaca

SEQ ID NO: 702303 - DNA, 15 bp, Homo sapiens
ctactgcagacacat

SEQ ID NO: 702304 - DNA, 15 bp, Homo sapiens
tactgcagacacatt

SEQ ID NO: 702305 - DNA, 15 bp, Homo sapiens
actgcagacacattt

SEQ ID NO: 702306 - DNA, 15 bp, Homo sapiens
ctgcagacacatttc

SEQ ID NO: 702307 - DNA, 15 bp, Homo sapiens
tgcagacacatttcc

SEQ ID NO: 702308 - DNA, 15 bp, Homo sapiens
gcagacacatttcct

SEQ ID NO: 702309 - DNA, 15 bp, Homo sapiens
cagacacatttcctg

SEQ ID NO: 702310 - DNA, 15 bp, Homo sapiens
agacacatttcctgg

SEQ ID NO: 702311 - DNA, 15 bp, Homo sapiens
gacacatttcctgga

SEQ ID NO: 702312 - DNA, 15 bp, Homo sapiens
acacatttcctggat

SEQ ID NO: 702313 - DNA, 15 bp, Homo sapiens
cacatttcctggata

SEQ ID NO: 702314 - DNA, 15 bp, Homo sapiens
acatttcctggatat

SEQ ID NO: 702315 - DNA, 15 bp, Homo sapiens
catttcctggatatt

SEQ ID NO: 702316 - DNA, 15 bp, Homo sapiens
atttcctggatattt

SEQ ID NO: 702317 - DNA, 15 bp, Homo sapiens
tttcctggatatttt

SEQ ID NO: 702318 - DNA, 15 bp, Homo sapiens
ttcctggatattttc

SEQ ID NO: 702319 - DNA, 15 bp, Homo sapiens
tcctggatattttca

SEQ ID NO: 702320 - DNA, 15 bp, Homo sapiens
cctggatattttcag

SEQ ID NO: 702321 - DNA, 15 bp, Homo sapiens
ctggatattttcagg

SEQ ID NO: 702322 - DNA, 15 bp, Homo sapiens
tggatattttcagga

SEQ ID NO: 702323 - DNA, 15 bp, Homo sapiens
ggatattttcaggac

SEQ ID NO: 702324 - DNA, 15 bp, Homo sapiens
gatattttcaggaca

SEQ ID NO: 702325 - DNA, 15 bp, Homo sapiens
atattttcaggacat

SEQ ID NO: 702326 - DNA, 15 bp, Homo sapiens
tattttcaggacatt

SEQ ID NO: 702327 - DNA, 15 bp, Homo sapiens
attttcaggacattt

SEQ ID NO: 702328 - DNA, 15 bp, Homo sapiens
ttttcaggacattta

SEQ ID NO: 702329 - DNA, 15 bp, Homo sapiens
tttcaggacatttaa

SEQ ID NO: 702330 - DNA, 15 bp, Homo sapiens
ttcaggacatttaag

SEQ ID NO: 702331 - DNA, 15 bp, Homo sapiens
tcaggacatttaaga

SEQ ID NO: 702332 - DNA, 15 bp, Homo sapiens
caggacatttaagaa

SEQ ID NO: 702333 - DNA, 15 bp, Homo sapiens
aggacatttaagaag

SEQ ID NO: 702334 - DNA, 15 bp, Homo sapiens
ggacatttaagaagg

SEQ ID NO: 702335 - DNA, 15 bp, Homo sapiens
gacatttaagaaggc

SEQ ID NO: 702336 - DNA, 15 bp, Homo sapiens
acatttaagaaggcc

SEQ ID NO: 702337 - DNA, 15 bp, Homo sapiens
catttaagaaggcca

SEQ ID NO: 702338 - DNA, 15 bp, Homo sapiens
atttaagaaggccag

SEQ ID NO: 702339 - DNA, 15 bp, Homo sapiens
tttaagaaggccagt

SEQ ID NO: 702340 - DNA, 15 bp, Homo sapiens
ttaagaaggccagta

SEQ ID NO: 702341 - DNA, 15 bp, Homo sapiens
taagaaggccagtaa

SEQ ID NO: 702342 - DNA, 15 bp, Homo sapiens
aagaaggccagtaac

SEQ ID NO: 702343 - DNA, 15 bp, Homo sapiens
agaaggccagtaacc

SEQ ID NO: 702344 - DNA, 15 bp, Homo sapiens
gaaggccagtaacca

SEQ ID NO: 702345 - DNA, 15 bp, Homo sapiens
aaggccagtaaccag

SEQ ID NO: 702346 - DNA, 15 bp, Homo sapiens
aggccagtaaccagg

SEQ ID NO: 702347 - DNA, 15 bp, Homo sapiens
ggccagtaaccaggt

SEQ ID NO: 702348 - DNA, 15 bp, Homo sapiens
gccagtaaccaggtc

SEQ ID NO: 702349 - DNA, 15 bp, Homo sapiens
ccagtaaccaggtca

SEQ ID NO: 702350 - DNA, 15 bp, Homo sapiens
cagtaaccaggtcat

SEQ ID NO: 702351 - DNA, 15 bp, Homo sapiens
agtaaccaggtcatg

SEQ ID NO: 702352 - DNA, 15 bp, Homo sapiens
gtaaccaggtcatgt

SEQ ID NO: 702353 - DNA, 15 bp, Homo sapiens
taaccaggtcatgta

SEQ ID NO: 702354 - DNA, 15 bp, Homo sapiens
aaccaggtcatgtag

SEQ ID NO: 702355 - DNA, 15 bp, Homo sapiens
accaggtcatgtagc

SEQ ID NO: 702356 - DNA, 15 bp, Homo sapiens
ccaggtcatgtagca

SEQ ID NO: 702357 - DNA, 15 bp, Homo sapiens
caggtcatgtagcat

SEQ ID NO: 702358 - DNA, 15 bp, Homo sapiens
aggtcatgtagcatt

SEQ ID NO: 702359 - DNA, 15 bp, Homo sapiens
ggtcatgtagcattc

SEQ ID NO: 702360 - DNA, 15 bp, Homo sapiens
gtcatgtagcattct

SEQ ID NO: 702361 - DNA, 15 bp, Homo sapiens
tcatgtagcattctc

SEQ ID NO: 702362 - DNA, 15 bp, Homo sapiens
catgtagcattctct

SEQ ID NO: 702363 - DNA, 15 bp, Homo sapiens
atgtagcattctctg

SEQ ID NO: 702364 - DNA, 15 bp, Homo sapiens
tgtagcattctctga

SEQ ID NO: 702365 - DNA, 15 bp, Homo sapiens
gtagcattctctgag

SEQ ID NO: 702366 - DNA, 15 bp, Homo sapiens
tagcattctctgagt

SEQ ID NO: 702367 - DNA, 15 bp, Homo sapiens
agcattctctgagtg

SEQ ID NO: 702368 - DNA, 15 bp, Homo sapiens
gcattctctgagtgt

SEQ ID NO: 702369 - DNA, 15 bp, Homo sapiens
cattctctgagtgtg

SEQ ID NO: 702370 - DNA, 15 bp, Homo sapiens
attctctgagtgtgt

SEQ ID NO: 702371 - DNA, 15 bp, Homo sapiens
ttctctgagtgtgta

SEQ ID NO: 702372 - DNA, 15 bp, Homo sapiens
tctctgagtgtgtat

SEQ ID NO: 702373 - DNA, 15 bp, Homo sapiens
ctctgagtgtgtata

SEQ ID NO: 702374 - DNA, 15 bp, Homo sapiens
tctgagtgtgtatat

SEQ ID NO: 702375 - DNA, 15 bp, Homo sapiens
ctgagtgtgtatata

SEQ ID NO: 702376 - DNA, 15 bp, Homo sapiens
tgagtgtgtatatat

SEQ ID NO: 702377 - DNA, 15 bp, Homo sapiens
gagtgtgtatatatg

SEQ ID NO: 702378 - DNA, 15 bp, Homo sapiens
agtgtgtatatatgg

SEQ ID NO: 702379 - DNA, 15 bp, Homo sapiens
gtgtgtatatatggt

SEQ ID NO: 702380 - DNA, 15 bp, Homo sapiens
tgtgtatatatggtg

SEQ ID NO: 702381 - DNA, 15 bp, Homo sapiens
gtgtatatatggtgg

SEQ ID NO: 702382 - DNA, 15 bp, Homo sapiens
tgtatatatggtggg

SEQ ID NO: 702383 - DNA, 15 bp, Homo sapiens
gtatatatggtgggg

SEQ ID NO: 702384 - DNA, 15 bp, Homo sapiens
tatatatggtggggt

SEQ ID NO: 702385 - DNA, 15 bp, Homo sapiens
atatatggtggggtg

SEQ ID NO: 702386 - DNA, 15 bp, Homo sapiens
tatatggtggggtgg

SEQ ID NO: 702387 - DNA, 15 bp, Homo sapiens
atatggtggggtggg

SEQ ID NO: 702388 - DNA, 15 bp, Homo sapiens
tatggtggggtgggg

SEQ ID NO: 702389 - DNA, 15 bp, Homo sapiens
atggtggggtgggga

SEQ ID NO: 702390 - DNA, 15 bp, Homo sapiens
tggtggggtggggag

SEQ ID NO: 702391 - DNA, 15 bp, Homo sapiens
ggtggggtggggagg

SEQ ID NO: 702392 - DNA, 15 bp, Homo sapiens
gtggggtggggaggt

SEQ ID NO: 702393 - DNA, 15 bp, Homo sapiens
tggggtggggaggtt

SEQ ID NO: 702394 - DNA, 15 bp, Homo sapiens
ggggtggggaggttg

SEQ ID NO: 702395 - DNA, 15 bp, Homo sapiens
gggtggggaggttga

SEQ ID NO: 702396 - DNA, 15 bp, Homo sapiens
ggtggggaggttgat

SEQ ID NO: 702397 - DNA, 15 bp, Homo sapiens
gtggggaggttgatt

SEQ ID NO: 702398 - DNA, 15 bp, Homo sapiens
tggggaggttgattt

SEQ ID NO: 702399 - DNA, 15 bp, Homo sapiens
ggggaggttgatttg

SEQ ID NO: 702400 - DNA, 15 bp, Homo sapiens
gggaggttgatttga

SEQ ID NO: 702401 - DNA, 15 bp, Homo sapiens
ggaggttgatttgag

SEQ ID NO: 702402 - DNA, 15 bp, Homo sapiens
gaggttgatttgagt

SEQ ID NO: 702403 - DNA, 15 bp, Homo sapiens
aggttgatttgagtg

SEQ ID NO: 702404 - DNA, 15 bp, Homo sapiens
ggttgatttgagtgt

SEQ ID NO: 702405 - DNA, 15 bp, Homo sapiens
gttgatttgagtgtc

SEQ ID NO: 702406 - DNA, 15 bp, Homo sapiens
ttgatttgagtgtct

SEQ ID NO: 702407 - DNA, 15 bp, Homo sapiens
tgatttgagtgtctg

SEQ ID NO: 702408 - DNA, 15 bp, Homo sapiens
gatttgagtgtctgt

SEQ ID NO: 702409 - DNA, 15 bp, Homo sapiens
atttgagtgtctgtg

SEQ ID NO: 702410 - DNA, 15 bp, Homo sapiens
tttgagtgtctgtgc

SEQ ID NO: 702411 - DNA, 15 bp, Homo sapiens
ttgagtgtctgtgca

SEQ ID NO: 702412 - DNA, 15 bp, Homo sapiens
tgagtgtctgtgcat

SEQ ID NO: 702413 - DNA, 15 bp, Homo sapiens
gagtgtctgtgcatg

SEQ ID NO: 702414 - DNA, 15 bp, Homo sapiens
agtgtctgtgcatgc

SEQ ID NO: 702415 - DNA, 15 bp, Homo sapiens
gtgtctgtgcatgcg

SEQ ID NO: 702416 - DNA, 15 bp, Homo sapiens
tgtctgtgcatgcgt

SEQ ID NO: 702417 - DNA, 15 bp, Homo sapiens
gtctgtgcatgcgta

SEQ ID NO: 702418 - DNA, 15 bp, Homo sapiens
tctgtgcatgcgtat

SEQ ID NO: 702419 - DNA, 15 bp, Homo sapiens
ctgtgcatgcgtata

SEQ ID NO: 702420 - DNA, 15 bp, Homo sapiens
tgtgcatgcgtatat

SEQ ID NO: 702421 - DNA, 15 bp, Homo sapiens
gtgcatgcgtatata

SEQ ID NO: 702422 - DNA, 15 bp, Homo sapiens
tgcatgcgtatatac

SEQ ID NO: 702423 - DNA, 15 bp, Homo sapiens
gcatgcgtatatact

SEQ ID NO: 702424 - DNA, 15 bp, Homo sapiens
catgcgtatatactt

SEQ ID NO: 702425 - DNA, 15 bp, Homo sapiens
atgcgtatatacttc

SEQ ID NO: 702426 - DNA, 15 bp, Homo sapiens
tgcgtatatacttcc

SEQ ID NO: 702427 - DNA, 15 bp, Homo sapiens
gcgtatatacttcct

SEQ ID NO: 702428 - DNA, 15 bp, Homo sapiens
cgtatatacttccta

SEQ ID NO: 702429 - DNA, 15 bp, Homo sapiens
gtatatacttcctag

SEQ ID NO: 702430 - DNA, 15 bp, Homo sapiens
tatatacttcctagt

SEQ ID NO: 702431 - DNA, 15 bp, Homo sapiens
atatacttcctagtg

SEQ ID NO: 702432 - DNA, 15 bp, Homo sapiens
tatacttcctagtgc

SEQ ID NO: 702433 - DNA, 15 bp, Homo sapiens
atacttcctagtgca

SEQ ID NO: 702434 - DNA, 15 bp, Homo sapiens
tgaaaagacaagcca

SEQ ID NO: 702435 - DNA, 15 bp, Homo sapiens
gaaaagacaagccac

SEQ ID NO: 702436 - DNA, 15 bp, Homo sapiens
aaaagacaagccaca

SEQ ID NO: 702437 - DNA, 15 bp, Homo sapiens
aaagacaagccacaa

SEQ ID NO: 702438 - DNA, 15 bp, Homo sapiens
aagacaagccacaaa

SEQ ID NO: 702439 - DNA, 15 bp, Homo sapiens
agacaagccacaaac

SEQ ID NO: 702440 - DNA, 15 bp, Homo sapiens
gacaagccacaaact

SEQ ID NO: 702441 - DNA, 15 bp, Homo sapiens
acaagccacaaactg

SEQ ID NO: 702442 - DNA, 15 bp, Homo sapiens
caagccacaaactgg

SEQ ID NO: 702443 - DNA, 15 bp, Homo sapiens
aagccacaaactggg

SEQ ID NO: 702444 - DNA, 15 bp, Homo sapiens
agccacaaactggga

SEQ ID NO: 702445 - DNA, 15 bp, Homo sapiens
gccacaaactgggag

SEQ ID NO: 702446 - DNA, 15 bp, Homo sapiens
ccacaaactgggaga

SEQ ID NO: 702447 - DNA, 15 bp, Homo sapiens
cacaaactgggagaa

SEQ ID NO: 702448 - DNA, 15 bp, Homo sapiens
acaaactgggagaaa

SEQ ID NO: 702449 - DNA, 15 bp, Homo sapiens
caaactgggagaaaa

SEQ ID NO: 702450 - DNA, 15 bp, Homo sapiens
aaactgggagaaaat

SEQ ID NO: 702451 - DNA, 15 bp, Homo sapiens
aactgggagaaaata

SEQ ID NO: 702452 - DNA, 15 bp, Homo sapiens
actgggagaaaatat

SEQ ID NO: 702453 - DNA, 15 bp, Homo sapiens
ctgggagaaaatatt

SEQ ID NO: 702454 - DNA, 15 bp, Homo sapiens
tgggagaaaatattt

SEQ ID NO: 702455 - DNA, 15 bp, Homo sapiens
gggagaaaatatttg

SEQ ID NO: 702456 - DNA, 15 bp, Homo sapiens
ggagaaaatatttgc

SEQ ID NO: 702457 - DNA, 15 bp, Homo sapiens
gagaaaatatttgca

SEQ ID NO: 702458 - DNA, 15 bp, Homo sapiens
agaaaatatttgcaa

SEQ ID NO: 702459 - DNA, 15 bp, Homo sapiens
gaaaatatttgcaaa

SEQ ID NO: 702460 - DNA, 15 bp, Homo sapiens
aaaatatttgcaaaa

SEQ ID NO: 702461 - DNA, 15 bp, Homo sapiens
aaatatttgcaaaag

SEQ ID NO: 702462 - DNA, 15 bp, Homo sapiens
aatatttgcaaaaga

SEQ ID NO: 702463 - DNA, 15 bp, Homo sapiens
atatttgcaaaagac

SEQ ID NO: 702464 - DNA, 15 bp, Homo sapiens
tatttgcaaaagaca

SEQ ID NO: 702465 - DNA, 15 bp, Homo sapiens
atttgcaaaagacat

SEQ ID NO: 702466 - DNA, 15 bp, Homo sapiens
tttgcaaaagacata

SEQ ID NO: 702467 - DNA, 15 bp, Homo sapiens
ttgcaaaagacatat

SEQ ID NO: 702468 - DNA, 15 bp, Homo sapiens
tgcaaaagacatatc

SEQ ID NO: 702469 - DNA, 15 bp, Homo sapiens
gcaaaagacatatca

SEQ ID NO: 702470 - DNA, 15 bp, Homo sapiens
caaaagacatatcag

SEQ ID NO: 702471 - DNA, 15 bp, Homo sapiens
aaaagacatatcaga

SEQ ID NO: 702472 - DNA, 15 bp, Homo sapiens
aaagacatatcagat

SEQ ID NO: 702473 - DNA, 15 bp, Homo sapiens
aagacatatcagata

SEQ ID NO: 702474 - DNA, 15 bp, Homo sapiens
agacatatcagataa

SEQ ID NO: 702475 - DNA, 15 bp, Homo sapiens
gacatatcagataaa

SEQ ID NO: 702476 - DNA, 15 bp, Homo sapiens
acatatcagataaag

SEQ ID NO: 702477 - DNA, 15 bp, Homo sapiens
catatcagataaagg

SEQ ID NO: 702478 - DNA, 15 bp, Homo sapiens
atatcagataaagga

SEQ ID NO: 702479 - DNA, 15 bp, Homo sapiens
tatcagataaaggac

SEQ ID NO: 702480 - DNA, 15 bp, Homo sapiens
atcagataaaggact

SEQ ID NO: 702481 - DNA, 15 bp, Homo sapiens
tcagataaaggactg

SEQ ID NO: 702482 - DNA, 15 bp, Homo sapiens
cagataaaggactgt

SEQ ID NO: 702483 - DNA, 15 bp, Homo sapiens
agataaaggactgtt

SEQ ID NO: 702484 - DNA, 15 bp, Homo sapiens
gataaaggactgtta

SEQ ID NO: 702485 - DNA, 15 bp, Homo sapiens
ataaaggactgttac

SEQ ID NO: 702486 - DNA, 15 bp, Homo sapiens
taaaggactgttacc

SEQ ID NO: 702487 - DNA, 15 bp, Homo sapiens
aaaggactgttaccc

SEQ ID NO: 702488 - DNA, 15 bp, Homo sapiens
aaggactgttaccca

SEQ ID NO: 702489 - DNA, 15 bp, Homo sapiens
aggactgttacccaa

SEQ ID NO: 702490 - DNA, 15 bp, Homo sapiens
ggactgttacccaaa

SEQ ID NO: 702491 - DNA, 15 bp, Homo sapiens
gactgttacccaaaa

SEQ ID NO: 702492 - DNA, 15 bp, Homo sapiens
actgttacccaaaat

SEQ ID NO: 702493 - DNA, 15 bp, Homo sapiens
ctgttacccaaaata

SEQ ID NO: 702494 - DNA, 15 bp, Homo sapiens
tgttacccaaaatat

SEQ ID NO: 702495 - DNA, 15 bp, Homo sapiens
gttacccaaaatata

SEQ ID NO: 702496 - DNA, 15 bp, Homo sapiens
ttacccaaaatatac

SEQ ID NO: 702497 - DNA, 15 bp, Homo sapiens
tacccaaaatataca

SEQ ID NO: 702498 - DNA, 15 bp, Homo sapiens
acccaaaatatacaa

SEQ ID NO: 702499 - DNA, 15 bp, Homo sapiens
cccaaaatatacaat

SEQ ID NO: 702500 - DNA, 15 bp, Homo sapiens
ccaaaatatacaatg

SEQ ID NO: 702501 - DNA, 15 bp, Homo sapiens
caaaatatacaatga

SEQ ID NO: 702502 - DNA, 15 bp, Homo sapiens
aaaatatacaatgaa

SEQ ID NO: 702503 - DNA, 15 bp, Homo sapiens
aaatatacaatgaac

SEQ ID NO: 702504 - DNA, 15 bp, Homo sapiens
aatatacaatgaact

SEQ ID NO: 702505 - DNA, 15 bp, Homo sapiens
atatacaatgaactc

SEQ ID NO: 702506 - DNA, 15 bp, Homo sapiens
tatacaatgaactca

SEQ ID NO: 702507 - DNA, 15 bp, Homo sapiens
atacaatgaactcaa

SEQ ID NO: 702508 - DNA, 15 bp, Homo sapiens
acaatgaactcaaaa

SEQ ID NO: 702509 - DNA, 15 bp, Homo sapiens
caatgaactcaaaac

SEQ ID NO: 702510 - DNA, 15 bp, Homo sapiens
aatgaactcaaaaca

SEQ ID NO: 702511 - DNA, 15 bp, Homo sapiens
atgaactcaaaacaa

SEQ ID NO: 702512 - DNA, 15 bp, Homo sapiens
tgaactcaaaacaat

SEQ ID NO: 702513 - DNA, 15 bp, Homo sapiens
gaactcaaaacaatt

SEQ ID NO: 702514 - DNA, 15 bp, Homo sapiens
aactcaaaacaattt

SEQ ID NO: 702515 - DNA, 15 bp, Homo sapiens
actcaaaacaatttt

SEQ ID NO: 702516 - DNA, 15 bp, Homo sapiens
ctcaaaacaatttta

SEQ ID NO: 702517 - DNA, 15 bp, Homo sapiens
tcaaaacaattttaa

SEQ ID NO: 702518 - DNA, 15 bp, Homo sapiens
caaaacaattttaaa

SEQ ID NO: 702519 - DNA, 15 bp, Homo sapiens
aaacaattttaaaaa

SEQ ID NO: 702520 - DNA, 15 bp, Homo sapiens
aacaattttaaaaaa

SEQ ID NO: 702521 - DNA, 15 bp, Homo sapiens
acaattttaaaaaaa

SEQ ID NO: 702522 - DNA, 15 bp, Homo sapiens
caattttaaaaaaag

SEQ ID NO: 702523 - DNA, 15 bp, Homo sapiens
aattttaaaaaaaga

SEQ ID NO: 702524 - DNA, 15 bp, Homo sapiens
attttaaaaaaagat

SEQ ID NO: 702525 - DNA, 15 bp, Homo sapiens
ttttaaaaaaagatt

SEQ ID NO: 702526 - DNA, 15 bp, Homo sapiens
tttaaaaaaagattt

SEQ ID NO: 702527 - DNA, 15 bp, Homo sapiens
ttaaaaaaagattta

SEQ ID NO: 702528 - DNA, 15 bp, Homo sapiens
taaaaaaagatttaa

SEQ ID NO: 702529 - DNA, 15 bp, Homo sapiens
aaaaaaagatttaaa

SEQ ID NO: 702530 - DNA, 15 bp, Homo sapiens
aaaaaagatttaaaa

SEQ ID NO: 702531 - DNA, 15 bp, Homo sapiens
aaaaagatttaaaaa

SEQ ID NO: 702532 - DNA, 15 bp, Homo sapiens
aaaagatttaaaaat

SEQ ID NO: 702533 - DNA, 15 bp, Homo sapiens
aaagatttaaaaatt

SEQ ID NO: 702534 - DNA, 15 bp, Homo sapiens
aagatttaaaaattg

SEQ ID NO: 702535 - DNA, 15 bp, Homo sapiens
agatttaaaaattgg

SEQ ID NO: 702536 - DNA, 15 bp, Homo sapiens
gatttaaaaattggc

SEQ ID NO: 702537 - DNA, 15 bp, Homo sapiens
atttaaaaattggct

SEQ ID NO: 702538 - DNA, 15 bp, Homo sapiens
tttaaaaattggcta

SEQ ID NO: 702539 - DNA, 15 bp, Homo sapiens
ttaaaaattggctac

SEQ ID NO: 702540 - DNA, 15 bp, Homo sapiens
taaaaattggctacc

SEQ ID NO: 702541 - DNA, 15 bp, Homo sapiens
aaaaattggctacca

SEQ ID NO: 702542 - DNA, 15 bp, Homo sapiens
aaaattggctaccaa

SEQ ID NO: 702543 - DNA, 15 bp, Homo sapiens
aaattggctaccaat

SEQ ID NO: 702544 - DNA, 15 bp, Homo sapiens
aattggctaccaatc

SEQ ID NO: 702545 - DNA, 15 bp, Homo sapiens
attggctaccaatct

SEQ ID NO: 702546 - DNA, 15 bp, Homo sapiens
ttggctaccaatctg

SEQ ID NO: 702547 - DNA, 15 bp, Homo sapiens
tggctaccaatctga

SEQ ID NO: 702548 - DNA, 15 bp, Homo sapiens
ggctaccaatctgaa

SEQ ID NO: 702549 - DNA, 15 bp, Homo sapiens
gctaccaatctgaac

SEQ ID NO: 702550 - DNA, 15 bp, Homo sapiens
ctaccaatctgaaca

SEQ ID NO: 702551 - DNA, 15 bp, Homo sapiens
taccaatctgaacag

SEQ ID NO: 702552 - DNA, 15 bp, Homo sapiens
accaatctgaacaga

SEQ ID NO: 702553 - DNA, 15 bp, Homo sapiens
ccaatctgaacagat

SEQ ID NO: 702554 - DNA, 15 bp, Homo sapiens
caatctgaacagatg

SEQ ID NO: 702555 - DNA, 15 bp, Homo sapiens
aatctgaacagatgc

SEQ ID NO: 702556 - DNA, 15 bp, Homo sapiens
atctgaacagatgcc

SEQ ID NO: 702557 - DNA, 15 bp, Homo sapiens
tctgaacagatgcct

SEQ ID NO: 702558 - DNA, 15 bp, Homo sapiens
ctgaacagatgcctc

SEQ ID NO: 702559 - DNA, 15 bp, Homo sapiens
tgaacagatgcctca

SEQ ID NO: 702560 - DNA, 15 bp, Homo sapiens
gaacagatgcctcat

SEQ ID NO: 702561 - DNA, 15 bp, Homo sapiens
aacagatgcctcatc

SEQ ID NO: 702562 - DNA, 15 bp, Homo sapiens
acagatgcctcatca

SEQ ID NO: 702563 - DNA, 15 bp, Homo sapiens
cagatgcctcatcaa

SEQ ID NO: 702564 - DNA, 15 bp, Homo sapiens
agatgcctcatcaaa

SEQ ID NO: 702565 - DNA, 15 bp, Homo sapiens
gatgcctcatcaaag

SEQ ID NO: 702566 - DNA, 15 bp, Homo sapiens
atgcctcatcaaaga

SEQ ID NO: 702567 - DNA, 15 bp, Homo sapiens
tgcctcatcaaagaa

SEQ ID NO: 702568 - DNA, 15 bp, Homo sapiens
gcctcatcaaagaag

SEQ ID NO: 702569 - DNA, 15 bp, Homo sapiens
cctcatcaaagaaga

SEQ ID NO: 702570 - DNA, 15 bp, Homo sapiens
ctcatcaaagaagat

SEQ ID NO: 702571 - DNA, 15 bp, Homo sapiens
tcatcaaagaagata

SEQ ID NO: 702572 - DNA, 15 bp, Homo sapiens
catcaaagaagatat

SEQ ID NO: 702573 - DNA, 15 bp, Homo sapiens
atcaaagaagatatg

SEQ ID NO: 702574 - DNA, 15 bp, Homo sapiens
tcaaagaagatatgc

SEQ ID NO: 702575 - DNA, 15 bp, Homo sapiens
caaagaagatatgca

SEQ ID NO: 702576 - DNA, 15 bp, Homo sapiens
aaagaagatatgcag

SEQ ID NO: 702577 - DNA, 15 bp, Homo sapiens
aagaagatatgcaga

SEQ ID NO: 702578 - DNA, 15 bp, Homo sapiens
agaagatatgcagat

SEQ ID NO: 702579 - DNA, 15 bp, Homo sapiens
gaagatatgcagata

SEQ ID NO: 702580 - DNA, 15 bp, Homo sapiens
aagatatgcagatag

SEQ ID NO: 702581 - DNA, 15 bp, Homo sapiens
agatatgcagatagc

SEQ ID NO: 702582 - DNA, 15 bp, Homo sapiens
gatatgcagatagca

SEQ ID NO: 702583 - DNA, 15 bp, Homo sapiens
atatgcagatagcaa

SEQ ID NO: 702584 - DNA, 15 bp, Homo sapiens
tatgcagatagcaaa

SEQ ID NO: 702585 - DNA, 15 bp, Homo sapiens
atgcagatagcaaat

SEQ ID NO: 702586 - DNA, 15 bp, Homo sapiens
tgcagatagcaaata

SEQ ID NO: 702587 - DNA, 15 bp, Homo sapiens
gcagatagcaaataa

SEQ ID NO: 702588 - DNA, 15 bp, Homo sapiens
cagatagcaaataag

SEQ ID NO: 702589 - DNA, 15 bp, Homo sapiens
agatagcaaataagc

SEQ ID NO: 702590 - DNA, 15 bp, Homo sapiens
gatagcaaataagca

SEQ ID NO: 702591 - DNA, 15 bp, Homo sapiens
atagcaaataagcac

SEQ ID NO: 702592 - DNA, 15 bp, Homo sapiens
tagcaaataagcaca

SEQ ID NO: 702593 - DNA, 15 bp, Homo sapiens
agcaaataagcacat

SEQ ID NO: 702594 - DNA, 15 bp, Homo sapiens
gcaaataagcacatg

SEQ ID NO: 702595 - DNA, 15 bp, Homo sapiens
caaataagcacatga

SEQ ID NO: 702596 - DNA, 15 bp, Homo sapiens
aaataagcacatgaa

SEQ ID NO: 702597 - DNA, 15 bp, Homo sapiens
aataagcacatgaaa

SEQ ID NO: 702598 - DNA, 15 bp, Homo sapiens
ataagcacatgaaaa

SEQ ID NO: 702599 - DNA, 15 bp, Homo sapiens
taagcacatgaaaaa

SEQ ID NO: 702600 - DNA, 15 bp, Homo sapiens
aagcacatgaaaaaa

SEQ ID NO: 702601 - DNA, 15 bp, Homo sapiens
agcacatgaaaaaat

SEQ ID NO: 702602 - DNA, 15 bp, Homo sapiens
gcacatgaaaaaata

SEQ ID NO: 702603 - DNA, 15 bp, Homo sapiens
cacatgaaaaaatac

SEQ ID NO: 702604 - DNA, 15 bp, Homo sapiens
acatgaaaaaatact

SEQ ID NO: 702605 - DNA, 15 bp, Homo sapiens
catgaaaaaatactc

SEQ ID NO: 702606 - DNA, 15 bp, Homo sapiens
atgaaaaaatactcc

SEQ ID NO: 702607 - DNA, 15 bp, Homo sapiens
tgaaaaaatactcca

SEQ ID NO: 702608 - DNA, 15 bp, Homo sapiens
gaaaaaatactccac

SEQ ID NO: 702609 - DNA, 15 bp, Homo sapiens
aaaaaatactccaca

SEQ ID NO: 702610 - DNA, 15 bp, Homo sapiens
aaaaatactccacat

SEQ ID NO: 702611 - DNA, 15 bp, Homo sapiens
aaaatactccacatc

SEQ ID NO: 702612 - DNA, 15 bp, Homo sapiens
aaatactccacatcc

SEQ ID NO: 702613 - DNA, 15 bp, Homo sapiens
aatactccacatcct

SEQ ID NO: 702614 - DNA, 15 bp, Homo sapiens
atactccacatccta

SEQ ID NO: 702615 - DNA, 15 bp, Homo sapiens
tactccacatcctat

SEQ ID NO: 702616 - DNA, 15 bp, Homo sapiens
actccacatcctatg

SEQ ID NO: 702617 - DNA, 15 bp, Homo sapiens
ctccacatcctatgt

SEQ ID NO: 702618 - DNA, 15 bp, Homo sapiens
tccacatcctatgtt

SEQ ID NO: 702619 - DNA, 15 bp, Homo sapiens
ccacatcctatgtta

SEQ ID NO: 702620 - DNA, 15 bp, Homo sapiens
cacatcctatgttat

SEQ ID NO: 702621 - DNA, 15 bp, Homo sapiens
acatcctatgttatc

SEQ ID NO: 702622 - DNA, 15 bp, Homo sapiens
catcctatgttatca

SEQ ID NO: 702623 - DNA, 15 bp, Homo sapiens
atcctatgttatcag

SEQ ID NO: 702624 - DNA, 15 bp, Homo sapiens
tcctatgttatcagg

SEQ ID NO: 702625 - DNA, 15 bp, Homo sapiens
cctatgttatcaggg

SEQ ID NO: 702626 - DNA, 15 bp, Homo sapiens
ctatgttatcaggga

SEQ ID NO: 702627 - DNA, 15 bp, Homo sapiens
tatgttatcagggaa

SEQ ID NO: 702628 - DNA, 15 bp, Homo sapiens
atgttatcagggaaa

SEQ ID NO: 702629 - DNA, 15 bp, Homo sapiens
tgttatcagggaaat

SEQ ID NO: 702630 - DNA, 15 bp, Homo sapiens
gttatcagggaaatg

SEQ ID NO: 702631 - DNA, 15 bp, Homo sapiens
ttatcagggaaatgc

SEQ ID NO: 702632 - DNA, 15 bp, Homo sapiens
tatcagggaaatgca

SEQ ID NO: 702633 - DNA, 15 bp, Homo sapiens
atcagggaaatgcaa

SEQ ID NO: 702634 - DNA, 15 bp, Homo sapiens
tcagggaaatgcaaa

SEQ ID NO: 702635 - DNA, 15 bp, Homo sapiens
cagggaaatgcaaat

SEQ ID NO: 702636 - DNA, 15 bp, Homo sapiens
agggaaatgcaaatt

SEQ ID NO: 702637 - DNA, 15 bp, Homo sapiens
gggaaatgcaaatta

SEQ ID NO: 702638 - DNA, 15 bp, Homo sapiens
ggaaatgcaaattaa

SEQ ID NO: 702639 - DNA, 15 bp, Homo sapiens
gaaatgcaaattaaa

SEQ ID NO: 702640 - DNA, 15 bp, Homo sapiens
aaatgcaaattaaaa

SEQ ID NO: 702641 - DNA, 15 bp, Homo sapiens
aatgcaaattaaaac

SEQ ID NO: 702642 - DNA, 15 bp, Homo sapiens
atgcaaattaaaaca

SEQ ID NO: 702643 - DNA, 15 bp, Homo sapiens
tgcaaattaaaacaa

SEQ ID NO: 702644 - DNA, 15 bp, Homo sapiens
gcaaattaaaacaaa

SEQ ID NO: 702645 - DNA, 15 bp, Homo sapiens
caaattaaaacaaaa

SEQ ID NO: 702646 - DNA, 15 bp, Homo sapiens
aaattaaaacaaaaa

SEQ ID NO: 702647 - DNA, 15 bp, Homo sapiens
aattaaaacaaaaat

SEQ ID NO: 702648 - DNA, 15 bp, Homo sapiens
attaaaacaaaaatg

SEQ ID NO: 702649 - DNA, 15 bp, Homo sapiens
ttaaaacaaaaatga

SEQ ID NO: 702650 - DNA, 15 bp, Homo sapiens
taaaacaaaaatgag

SEQ ID NO: 702651 - DNA, 15 bp, Homo sapiens
aaaacaaaaatgaga

SEQ ID NO: 702652 - DNA, 15 bp, Homo sapiens
aaacaaaaatgagat

SEQ ID NO: 702653 - DNA, 15 bp, Homo sapiens
aacaaaaatgagatg

SEQ ID NO: 702654 - DNA, 15 bp, Homo sapiens
acaaaaatgagatgg

SEQ ID NO: 702655 - DNA, 15 bp, Homo sapiens
caaaaatgagatggc

SEQ ID NO: 702656 - DNA, 15 bp, Homo sapiens
aaaaatgagatggca

SEQ ID NO: 702657 - DNA, 15 bp, Homo sapiens
aaaatgagatggcac

SEQ ID NO: 702658 - DNA, 15 bp, Homo sapiens
aaatgagatggcact

SEQ ID NO: 702659 - DNA, 15 bp, Homo sapiens
aatgagatggcacta

SEQ ID NO: 702660 - DNA, 15 bp, Homo sapiens
atgagatggcactat

SEQ ID NO: 702661 - DNA, 15 bp, Homo sapiens
tgagatggcactata

SEQ ID NO: 702662 - DNA, 15 bp, Homo sapiens
gagatggcactatac

SEQ ID NO: 702663 - DNA, 15 bp, Homo sapiens
agatggcactataca

SEQ ID NO: 702664 - DNA, 15 bp, Homo sapiens
gatggcactatacac

SEQ ID NO: 702665 - DNA, 15 bp, Homo sapiens
atggcactatacacc

SEQ ID NO: 702666 - DNA, 15 bp, Homo sapiens
tggcactatacacct

SEQ ID NO: 702667 - DNA, 15 bp, Homo sapiens
ggcactatacaccta

SEQ ID NO: 702668 - DNA, 15 bp, Homo sapiens
gcactatacacctat

SEQ ID NO: 702669 - DNA, 15 bp, Homo sapiens
cactatacacctatt

SEQ ID NO: 702670 - DNA, 15 bp, Homo sapiens
actatacacctatta

SEQ ID NO: 702671 - DNA, 15 bp, Homo sapiens
ctatacacctattag

SEQ ID NO: 702672 - DNA, 15 bp, Homo sapiens
tatacacctattaga

SEQ ID NO: 702673 - DNA, 15 bp, Homo sapiens
atacacctattagaa

SEQ ID NO: 702674 - DNA, 15 bp, Homo sapiens
tacacctattagaat

SEQ ID NO: 702675 - DNA, 15 bp, Homo sapiens
acacctattagaatg

SEQ ID NO: 702676 - DNA, 15 bp, Homo sapiens
cacctattagaatgg

SEQ ID NO: 702677 - DNA, 15 bp, Homo sapiens
acctattagaatggc

SEQ ID NO: 702678 - DNA, 15 bp, Homo sapiens
cctattagaatggcc

SEQ ID NO: 702679 - DNA, 15 bp, Homo sapiens
ctattagaatggccc

SEQ ID NO: 702680 - DNA, 15 bp, Homo sapiens
tattagaatggccca

SEQ ID NO: 702681 - DNA, 15 bp, Homo sapiens
attagaatggcccaa

SEQ ID NO: 702682 - DNA, 15 bp, Homo sapiens
ttagaatggcccaaa

SEQ ID NO: 702683 - DNA, 15 bp, Homo sapiens
tagaatggcccaaat

SEQ ID NO: 702684 - DNA, 15 bp, Homo sapiens
agaatggcccaaatc

SEQ ID NO: 702685 - DNA, 15 bp, Homo sapiens
gaatggcccaaatct

SEQ ID NO: 702686 - DNA, 15 bp, Homo sapiens
aatggcccaaatctg

SEQ ID NO: 702687 - DNA, 15 bp, Homo sapiens
atggcccaaatctgg

SEQ ID NO: 702688 - DNA, 15 bp, Homo sapiens
tggcccaaatctgga

SEQ ID NO: 702689 - DNA, 15 bp, Homo sapiens
ggcccaaatctggaa

SEQ ID NO: 702690 - DNA, 15 bp, Homo sapiens
gcccaaatctggaac

SEQ ID NO: 702691 - DNA, 15 bp, Homo sapiens
cccaaatctggaaca

SEQ ID NO: 702692 - DNA, 15 bp, Homo sapiens
ccaaatctggaacac

SEQ ID NO: 702693 - DNA, 15 bp, Homo sapiens
caaatctggaacact

SEQ ID NO: 702694 - DNA, 15 bp, Homo sapiens
aaatctggaacactg

SEQ ID NO: 702695 - DNA, 15 bp, Homo sapiens
aatctggaacactga

SEQ ID NO: 702696 - DNA, 15 bp, Homo sapiens
atctggaacactgac

SEQ ID NO: 702697 - DNA, 15 bp, Homo sapiens
tctggaacactgaca

SEQ ID NO: 702698 - DNA, 15 bp, Homo sapiens
ctggaacactgacaa

SEQ ID NO: 702699 - DNA, 15 bp, Homo sapiens
tggaacactgacaac

SEQ ID NO: 702700 - DNA, 15 bp, Homo sapiens
ggaacactgacaaca

SEQ ID NO: 702701 - DNA, 15 bp, Homo sapiens
gaacactgacaacac

SEQ ID NO: 702702 - DNA, 15 bp, Homo sapiens
aacactgacaacacc

SEQ ID NO: 702703 - DNA, 15 bp, Homo sapiens
acactgacaacacct

SEQ ID NO: 702704 - DNA, 15 bp, Homo sapiens
cactgacaacaccta

SEQ ID NO: 702705 - DNA, 15 bp, Homo sapiens
actgacaacacctaa

SEQ ID NO: 702706 - DNA, 15 bp, Homo sapiens
ctgacaacacctaat

SEQ ID NO: 702707 - DNA, 15 bp, Homo sapiens
tgacaacacctaatg

SEQ ID NO: 702708 - DNA, 15 bp, Homo sapiens
gacaacacctaatgc

SEQ ID NO: 702709 - DNA, 15 bp, Homo sapiens
acaacacctaatgct

SEQ ID NO: 702710 - DNA, 15 bp, Homo sapiens
caacacctaatgctg

SEQ ID NO: 702711 - DNA, 15 bp, Homo sapiens
aacacctaatgctgg

SEQ ID NO: 702712 - DNA, 15 bp, Homo sapiens
acacctaatgctggt

SEQ ID NO: 702713 - DNA, 15 bp, Homo sapiens
cacctaatgctggtg

SEQ ID NO: 702714 - DNA, 15 bp, Homo sapiens
acctaatgctggtga

SEQ ID NO: 702715 - DNA, 15 bp, Homo sapiens
cctaatgctggtgag

SEQ ID NO: 702716 - DNA, 15 bp, Homo sapiens
ctaatgctggtgagg

SEQ ID NO: 702717 - DNA, 15 bp, Homo sapiens
taatgctggtgagga

SEQ ID NO: 702718 - DNA, 15 bp, Homo sapiens
aatgctggtgaggat

SEQ ID NO: 702719 - DNA, 15 bp, Homo sapiens
atgctggtgaggatg

SEQ ID NO: 702720 - DNA, 15 bp, Homo sapiens
tgctggtgaggatgt

SEQ ID NO: 702721 - DNA, 15 bp, Homo sapiens
gctggtgaggatgtg

SEQ ID NO: 702722 - DNA, 15 bp, Homo sapiens
ctggtgaggatgtgg

SEQ ID NO: 702723 - DNA, 15 bp, Homo sapiens
tggtgaggatgtgga

SEQ ID NO: 702724 - DNA, 15 bp, Homo sapiens
ggtgaggatgtggag

SEQ ID NO: 702725 - DNA, 15 bp, Homo sapiens
gtgaggatgtggagc

SEQ ID NO: 702726 - DNA, 15 bp, Homo sapiens
tgaggatgtggagca

SEQ ID NO: 702727 - DNA, 15 bp, Homo sapiens
gaggatgtggagcaa

SEQ ID NO: 702728 - DNA, 15 bp, Homo sapiens
aggatgtggagcaac

SEQ ID NO: 702729 - DNA, 15 bp, Homo sapiens
ggatgtggagcaact

SEQ ID NO: 702730 - DNA, 15 bp, Homo sapiens
gatgtggagcaacta

SEQ ID NO: 702731 - DNA, 15 bp, Homo sapiens
atgtggagcaactag

SEQ ID NO: 702732 - DNA, 15 bp, Homo sapiens
tgtggagcaactaga

SEQ ID NO: 702733 - DNA, 15 bp, Homo sapiens
gtggagcaactagaa

SEQ ID NO: 702734 - DNA, 15 bp, Homo sapiens
tggagcaactagaac

SEQ ID NO: 702735 - DNA, 15 bp, Homo sapiens
ggagcaactagaact

SEQ ID NO: 702736 - DNA, 15 bp, Homo sapiens
gagcaactagaactc

SEQ ID NO: 702737 - DNA, 15 bp, Homo sapiens
agcaactagaactct

SEQ ID NO: 702738 - DNA, 15 bp, Homo sapiens
gcaactagaactctc

SEQ ID NO: 702739 - DNA, 15 bp, Homo sapiens
caactagaactctca

SEQ ID NO: 702740 - DNA, 15 bp, Homo sapiens
aactagaactctcat

SEQ ID NO: 702741 - DNA, 15 bp, Homo sapiens
actagaactctcatt

SEQ ID NO: 702742 - DNA, 15 bp, Homo sapiens
ctagaactctcattc

SEQ ID NO: 702743 - DNA, 15 bp, Homo sapiens
tagaactctcattca

SEQ ID NO: 702744 - DNA, 15 bp, Homo sapiens
agaactctcattcac

SEQ ID NO: 702745 - DNA, 15 bp, Homo sapiens
gaactctcattcact

SEQ ID NO: 702746 - DNA, 15 bp, Homo sapiens
aactctcattcactg

SEQ ID NO: 702747 - DNA, 15 bp, Homo sapiens
actctcattcactgc

SEQ ID NO: 702748 - DNA, 15 bp, Homo sapiens
ctctcattcactgct

SEQ ID NO: 702749 - DNA, 15 bp, Homo sapiens
tctcattcactgctc

SEQ ID NO: 702750 - DNA, 15 bp, Homo sapiens
ctcattcactgctca

SEQ ID NO: 702751 - DNA, 15 bp, Homo sapiens
tcattcactgctcat

SEQ ID NO: 702752 - DNA, 15 bp, Homo sapiens
cattcactgctcatg

SEQ ID NO: 702753 - DNA, 15 bp, Homo sapiens
attcactgctcatgg

SEQ ID NO: 702754 - DNA, 15 bp, Homo sapiens
ttcactgctcatgga

SEQ ID NO: 702755 - DNA, 15 bp, Homo sapiens
tcactgctcatggac

SEQ ID NO: 702756 - DNA, 15 bp, Homo sapiens
cactgctcatggaca

SEQ ID NO: 702757 - DNA, 15 bp, Homo sapiens
actgctcatggacat

SEQ ID NO: 702758 - DNA, 15 bp, Homo sapiens
ctgctcatggacatg

SEQ ID NO: 702759 - DNA, 15 bp, Homo sapiens
tgctcatggacatga

SEQ ID NO: 702760 - DNA, 15 bp, Homo sapiens
gctcatggacatgaa

SEQ ID NO: 702761 - DNA, 15 bp, Homo sapiens
ctcatggacatgaaa

SEQ ID NO: 702762 - DNA, 15 bp, Homo sapiens
tcatggacatgaaaa

SEQ ID NO: 702763 - DNA, 15 bp, Homo sapiens
catggacatgaaaaa

SEQ ID NO: 702764 - DNA, 15 bp, Homo sapiens
atggacatgaaaaac

SEQ ID NO: 702765 - DNA, 15 bp, Homo sapiens
tggacatgaaaaacg

SEQ ID NO: 702766 - DNA, 15 bp, Homo sapiens
ggacatgaaaaacgg

SEQ ID NO: 702767 - DNA, 15 bp, Homo sapiens
gacatgaaaaacggt

SEQ ID NO: 702768 - DNA, 15 bp, Homo sapiens
acatgaaaaacggta

SEQ ID NO: 702769 - DNA, 15 bp, Homo sapiens
catgaaaaacggtac

SEQ ID NO: 702770 - DNA, 15 bp, Homo sapiens
atgaaaaacggtaca

SEQ ID NO: 702771 - DNA, 15 bp, Homo sapiens
tgaaaaacggtacag

SEQ ID NO: 702772 - DNA, 15 bp, Homo sapiens
gaaaaacggtacagc

SEQ ID NO: 702773 - DNA, 15 bp, Homo sapiens
aaaaacggtacagcc

SEQ ID NO: 702774 - DNA, 15 bp, Homo sapiens
aaaacggtacagcca

SEQ ID NO: 702775 - DNA, 15 bp, Homo sapiens
aaacggtacagccac

SEQ ID NO: 702776 - DNA, 15 bp, Homo sapiens
aacggtacagccact

SEQ ID NO: 702777 - DNA, 15 bp, Homo sapiens
acggtacagccactt

SEQ ID NO: 702778 - DNA, 15 bp, Homo sapiens
cggtacagccacttt

SEQ ID NO: 702779 - DNA, 15 bp, Homo sapiens
ggtacagccactttg

SEQ ID NO: 702780 - DNA, 15 bp, Homo sapiens
gtacagccactttga

SEQ ID NO: 702781 - DNA, 15 bp, Homo sapiens
tacagccactttgaa

SEQ ID NO: 702782 - DNA, 15 bp, Homo sapiens
acagccactttgaac

SEQ ID NO: 702783 - DNA, 15 bp, Homo sapiens
cagccactttgaact

SEQ ID NO: 702784 - DNA, 15 bp, Homo sapiens
agccactttgaacta

SEQ ID NO: 702785 - DNA, 15 bp, Homo sapiens
gccactttgaactac

SEQ ID NO: 702786 - DNA, 15 bp, Homo sapiens
ccactttgaactaca

SEQ ID NO: 702787 - DNA, 15 bp, Homo sapiens
cactttgaactacag

SEQ ID NO: 702788 - DNA, 15 bp, Homo sapiens
actttgaactacagt

SEQ ID NO: 702789 - DNA, 15 bp, Homo sapiens
ctttgaactacagtt

SEQ ID NO: 702790 - DNA, 15 bp, Homo sapiens
tttgaactacagttt

SEQ ID NO: 702791 - DNA, 15 bp, Homo sapiens
ttgaactacagtttg

SEQ ID NO: 702792 - DNA, 15 bp, Homo sapiens
tgaactacagtttga

SEQ ID NO: 702793 - DNA, 15 bp, Homo sapiens
gaactacagtttgac

SEQ ID NO: 702794 - DNA, 15 bp, Homo sapiens
aactacagtttgaca

SEQ ID NO: 702795 - DNA, 15 bp, Homo sapiens
actacagtttgacag

SEQ ID NO: 702796 - DNA, 15 bp, Homo sapiens
ctacagtttgacagt

SEQ ID NO: 702797 - DNA, 15 bp, Homo sapiens
tacagtttgacagtt

SEQ ID NO: 702798 - DNA, 15 bp, Homo sapiens
acagtttgacagttt

SEQ ID NO: 702799 - DNA, 15 bp, Homo sapiens
cagtttgacagtttc

SEQ ID NO: 702800 - DNA, 15 bp, Homo sapiens
agtttgacagtttct

SEQ ID NO: 702801 - DNA, 15 bp, Homo sapiens
gtttgacagtttctt

SEQ ID NO: 702802 - DNA, 15 bp, Homo sapiens
tttgacagtttctta

SEQ ID NO: 702803 - DNA, 15 bp, Homo sapiens
ttgacagtttcttaa

SEQ ID NO: 702804 - DNA, 15 bp, Homo sapiens
tgacagtttcttaaa

SEQ ID NO: 702805 - DNA, 15 bp, Homo sapiens
gacagtttcttaaaa

SEQ ID NO: 702806 - DNA, 15 bp, Homo sapiens
acagtttcttaaaaa

SEQ ID NO: 702807 - DNA, 15 bp, Homo sapiens
cagtttcttaaaaaa

SEQ ID NO: 702808 - DNA, 15 bp, Homo sapiens
agtttcttaaaaaaa

SEQ ID NO: 702809 - DNA, 15 bp, Homo sapiens
gtttcttaaaaaaaa

SEQ ID NO: 702810 - DNA, 15 bp, Homo sapiens
tttcttaaaaaaaaa

SEQ ID NO: 702811 - DNA, 15 bp, Homo sapiens
ttcttaaaaaaaaaa

SEQ ID NO: 702812 - DNA, 15 bp, Homo sapiens
taaaaaaaaaaaaat

SEQ ID NO: 702813 - DNA, 15 bp, Homo sapiens
aaaaaaaaaaaaata

SEQ ID NO: 702814 - DNA, 15 bp, Homo sapiens
aaaaaaaaaaaatac

SEQ ID NO: 702815 - DNA, 15 bp, Homo sapiens
aaaaaaaaaaatact

SEQ ID NO: 702816 - DNA, 15 bp, Homo sapiens
aaaaaaaaaatactc

SEQ ID NO: 702817 - DNA, 15 bp, Homo sapiens
aaaaaaaaatactct

SEQ ID NO: 702818 - DNA, 15 bp, Homo sapiens
aaaaaaaatactctt

SEQ ID NO: 702819 - DNA, 15 bp, Homo sapiens
aaaaaaatactctta

SEQ ID NO: 702820 - DNA, 15 bp, Homo sapiens
aaaaaatactcttaa

SEQ ID NO: 702821 - DNA, 15 bp, Homo sapiens
aaaaatactcttaac

SEQ ID NO: 702822 - DNA, 15 bp, Homo sapiens
aaaatactcttaaca

SEQ ID NO: 702823 - DNA, 15 bp, Homo sapiens
aaatactcttaacat

SEQ ID NO: 702824 - DNA, 15 bp, Homo sapiens
aatactcttaacata

SEQ ID NO: 702825 - DNA, 15 bp, Homo sapiens
atactcttaacatat

SEQ ID NO: 702826 - DNA, 15 bp, Homo sapiens
tactcttaacatata

SEQ ID NO: 702827 - DNA, 15 bp, Homo sapiens
actcttaacatataa

SEQ ID NO: 702828 - DNA, 15 bp, Homo sapiens
ctcttaacatataat

SEQ ID NO: 702829 - DNA, 15 bp, Homo sapiens
tcttaacatataatc

SEQ ID NO: 702830 - DNA, 15 bp, Homo sapiens
cttaacatataatcc

SEQ ID NO: 702831 - DNA, 15 bp, Homo sapiens
ttaacatataatcca

SEQ ID NO: 702832 - DNA, 15 bp, Homo sapiens
taacatataatccag

SEQ ID NO: 702833 - DNA, 15 bp, Homo sapiens
aacatataatccagt

SEQ ID NO: 702834 - DNA, 15 bp, Homo sapiens
acatataatccagta

SEQ ID NO: 702835 - DNA, 15 bp, Homo sapiens
catataatccagtaa

SEQ ID NO: 702836 - DNA, 15 bp, Homo sapiens
atataatccagtaat

SEQ ID NO: 702837 - DNA, 15 bp, Homo sapiens
tataatccagtaatc

SEQ ID NO: 702838 - DNA, 15 bp, Homo sapiens
ataatccagtaatca

SEQ ID NO: 702839 - DNA, 15 bp, Homo sapiens
taatccagtaatcat

SEQ ID NO: 702840 - DNA, 15 bp, Homo sapiens
aatccagtaatcatg

SEQ ID NO: 702841 - DNA, 15 bp, Homo sapiens
atccagtaatcatgc

SEQ ID NO: 702842 - DNA, 15 bp, Homo sapiens
tccagtaatcatgct

SEQ ID NO: 702843 - DNA, 15 bp, Homo sapiens
ccagtaatcatgctc

SEQ ID NO: 702844 - DNA, 15 bp, Homo sapiens
cagtaatcatgctcc

SEQ ID NO: 702845 - DNA, 15 bp, Homo sapiens
agtaatcatgctcct

SEQ ID NO: 702846 - DNA, 15 bp, Homo sapiens
gtaatcatgctcctt

SEQ ID NO: 702847 - DNA, 15 bp, Homo sapiens
taatcatgctccttg

SEQ ID NO: 702848 - DNA, 15 bp, Homo sapiens
aatcatgctccttgg

SEQ ID NO: 702849 - DNA, 15 bp, Homo sapiens
atcatgctccttggt

SEQ ID NO: 702850 - DNA, 15 bp, Homo sapiens
tcatgctccttggta

SEQ ID NO: 702851 - DNA, 15 bp, Homo sapiens
catgctccttggtat

SEQ ID NO: 702852 - DNA, 15 bp, Homo sapiens
atgctccttggtatt

SEQ ID NO: 702853 - DNA, 15 bp, Homo sapiens
tgctccttggtattt

SEQ ID NO: 702854 - DNA, 15 bp, Homo sapiens
gctccttggtattta

SEQ ID NO: 702855 - DNA, 15 bp, Homo sapiens
ctccttggtatttac

SEQ ID NO: 702856 - DNA, 15 bp, Homo sapiens
tccttggtatttacc

SEQ ID NO: 702857 - DNA, 15 bp, Homo sapiens
ccttggtatttaccc

SEQ ID NO: 702858 - DNA, 15 bp, Homo sapiens
cttggtatttaccca

SEQ ID NO: 702859 - DNA, 15 bp, Homo sapiens
ttggtatttacccaa

SEQ ID NO: 702860 - DNA, 15 bp, Homo sapiens
tggtatttacccaaa

SEQ ID NO: 702861 - DNA, 15 bp, Homo sapiens
ggtatttacccaaag

SEQ ID NO: 702862 - DNA, 15 bp, Homo sapiens
gtatttacccaaagg

SEQ ID NO: 702863 - DNA, 15 bp, Homo sapiens
tatttacccaaagga

SEQ ID NO: 702864 - DNA, 15 bp, Homo sapiens
atttacccaaaggag

SEQ ID NO: 702865 - DNA, 15 bp, Homo sapiens
tttacccaaaggagt

SEQ ID NO: 702866 - DNA, 15 bp, Homo sapiens
ttacccaaaggagtt

SEQ ID NO: 702867 - DNA, 15 bp, Homo sapiens
tacccaaaggagttg

SEQ ID NO: 702868 - DNA, 15 bp, Homo sapiens
acccaaaggagttga

SEQ ID NO: 702869 - DNA, 15 bp, Homo sapiens
cccaaaggagttgaa

SEQ ID NO: 702870 - DNA, 15 bp, Homo sapiens
ccaaaggagttgaaa

SEQ ID NO: 702871 - DNA, 15 bp, Homo sapiens
caaaggagttgaaaa

SEQ ID NO: 702872 - DNA, 15 bp, Homo sapiens
aaaggagttgaaaac

SEQ ID NO: 702873 - DNA, 15 bp, Homo sapiens
aaggagttgaaaact

SEQ ID NO: 702874 - DNA, 15 bp, Homo sapiens
aggagttgaaaactt

SEQ ID NO: 702875 - DNA, 15 bp, Homo sapiens
ggagttgaaaactta

SEQ ID NO: 702876 - DNA, 15 bp, Homo sapiens
gagttgaaaacttat

SEQ ID NO: 702877 - DNA, 15 bp, Homo sapiens
agttgaaaacttatg

SEQ ID NO: 702878 - DNA, 15 bp, Homo sapiens
gttgaaaacttatgt

SEQ ID NO: 702879 - DNA, 15 bp, Homo sapiens
ttgaaaacttatgtc

SEQ ID NO: 702880 - DNA, 15 bp, Homo sapiens
tgaaaacttatgtcc

SEQ ID NO: 702881 - DNA, 15 bp, Homo sapiens
gaaaacttatgtcca

SEQ ID NO: 702882 - DNA, 15 bp, Homo sapiens
aaaacttatgtccac

SEQ ID NO: 702883 - DNA, 15 bp, Homo sapiens
aaacttatgtccaca

SEQ ID NO: 702884 - DNA, 15 bp, Homo sapiens
aacttatgtccacac

SEQ ID NO: 702885 - DNA, 15 bp, Homo sapiens
acttatgtccacaca

SEQ ID NO: 702886 - DNA, 15 bp, Homo sapiens
cttatgtccacacaa

SEQ ID NO: 702887 - DNA, 15 bp, Homo sapiens
ttatgtccacacaaa

SEQ ID NO: 702888 - DNA, 15 bp, Homo sapiens
tatgtccacacaaaa

SEQ ID NO: 702889 - DNA, 15 bp, Homo sapiens
atgtccacacaaaaa

SEQ ID NO: 702890 - DNA, 15 bp, Homo sapiens
tgtccacacaaaaac

SEQ ID NO: 702891 - DNA, 15 bp, Homo sapiens
gtccacacaaaaacc

SEQ ID NO: 702892 - DNA, 15 bp, Homo sapiens
tccacacaaaaacct

SEQ ID NO: 702893 - DNA, 15 bp, Homo sapiens
ccacacaaaaacctg

SEQ ID NO: 702894 - DNA, 15 bp, Homo sapiens
cacacaaaaacctgt

SEQ ID NO: 702895 - DNA, 15 bp, Homo sapiens
acacaaaaacctgta

SEQ ID NO: 702896 - DNA, 15 bp, Homo sapiens
cacaaaaacctgtac

SEQ ID NO: 702897 - DNA, 15 bp, Homo sapiens
acaaaaacctgtaca

SEQ ID NO: 702898 - DNA, 15 bp, Homo sapiens
caaaaacctgtacac

SEQ ID NO: 702899 - DNA, 15 bp, Homo sapiens
aaaaacctgtacaca

SEQ ID NO: 702900 - DNA, 15 bp, Homo sapiens
aaaacctgtacacag

SEQ ID NO: 702901 - DNA, 15 bp, Homo sapiens
aaacctgtacacaga

SEQ ID NO: 702902 - DNA, 15 bp, Homo sapiens
aacctgtacacagat

SEQ ID NO: 702903 - DNA, 15 bp, Homo sapiens
acctgtacacagatg

SEQ ID NO: 702904 - DNA, 15 bp, Homo sapiens
cctgtacacagatgt

SEQ ID NO: 702905 - DNA, 15 bp, Homo sapiens
ctgtacacagatgtt

SEQ ID NO: 702906 - DNA, 15 bp, Homo sapiens
tgtacacagatgttt

SEQ ID NO: 702907 - DNA, 15 bp, Homo sapiens
gtacacagatgttta

SEQ ID NO: 702908 - DNA, 15 bp, Homo sapiens
tacacagatgtttat

SEQ ID NO: 702909 - DNA, 15 bp, Homo sapiens
acacagatgtttata

SEQ ID NO: 702910 - DNA, 15 bp, Homo sapiens
cacagatgtttatag

SEQ ID NO: 702911 - DNA, 15 bp, Homo sapiens
acagatgtttatagt

SEQ ID NO: 702912 - DNA, 15 bp, Homo sapiens
cagatgtttatagta

SEQ ID NO: 702913 - DNA, 15 bp, Homo sapiens
agatgtttatagtag

SEQ ID NO: 702914 - DNA, 15 bp, Homo sapiens
gatgtttatagtagc

SEQ ID NO: 702915 - DNA, 15 bp, Homo sapiens
atgtttatagtagct

SEQ ID NO: 702916 - DNA, 15 bp, Homo sapiens
tgtttatagtagctt

SEQ ID NO: 702917 - DNA, 15 bp, Homo sapiens
gtttatagtagcttt

SEQ ID NO: 702918 - DNA, 15 bp, Homo sapiens
tttatagtagcttta

SEQ ID NO: 702919 - DNA, 15 bp, Homo sapiens
ttatagtagctttat

SEQ ID NO: 702920 - DNA, 15 bp, Homo sapiens
tatagtagctttatt

SEQ ID NO: 702921 - DNA, 15 bp, Homo sapiens
atagtagctttattt

SEQ ID NO: 702922 - DNA, 15 bp, Homo sapiens
tagtagctttatttg

SEQ ID NO: 702923 - DNA, 15 bp, Homo sapiens
agtagctttatttgt

SEQ ID NO: 702924 - DNA, 15 bp, Homo sapiens
gtagctttatttgta

SEQ ID NO: 702925 - DNA, 15 bp, Homo sapiens
tagctttatttgtaa

SEQ ID NO: 702926 - DNA, 15 bp, Homo sapiens
agctttatttgtaat

SEQ ID NO: 702927 - DNA, 15 bp, Homo sapiens
gctttatttgtaatt

SEQ ID NO: 702928 - DNA, 15 bp, Homo sapiens
ctttatttgtaattg

SEQ ID NO: 702929 - DNA, 15 bp, Homo sapiens
tttatttgtaattgc

SEQ ID NO: 702930 - DNA, 15 bp, Homo sapiens
ttatttgtaattgcc

SEQ ID NO: 702931 - DNA, 15 bp, Homo sapiens
tatttgtaattgcca

SEQ ID NO: 702932 - DNA, 15 bp, Homo sapiens
atttgtaattgccaa

SEQ ID NO: 702933 - DNA, 15 bp, Homo sapiens
tttgtaattgccaaa

SEQ ID NO: 702934 - DNA, 15 bp, Homo sapiens
ttgtaattgccaaaa

SEQ ID NO: 702935 - DNA, 15 bp, Homo sapiens
tgtaattgccaaaac

SEQ ID NO: 702936 - DNA, 15 bp, Homo sapiens
gtaattgccaaaact

SEQ ID NO: 702937 - DNA, 15 bp, Homo sapiens
taattgccaaaactt

SEQ ID NO: 702938 - DNA, 15 bp, Homo sapiens
aattgccaaaacttg

SEQ ID NO: 702939 - DNA, 15 bp, Homo sapiens
attgccaaaacttgg

SEQ ID NO: 702940 - DNA, 15 bp, Homo sapiens
ttgccaaaacttgga

SEQ ID NO: 702941 - DNA, 15 bp, Homo sapiens
tgccaaaacttggaa

SEQ ID NO: 702942 - DNA, 15 bp, Homo sapiens
gccaaaacttggaag

SEQ ID NO: 702943 - DNA, 15 bp, Homo sapiens
ccaaaacttggaaga

SEQ ID NO: 702944 - DNA, 15 bp, Homo sapiens
caaaacttggaagaa

SEQ ID NO: 702945 - DNA, 15 bp, Homo sapiens
aaaacttggaagaaa

SEQ ID NO: 702946 - DNA, 15 bp, Homo sapiens
aaacttggaagaaac

SEQ ID NO: 702947 - DNA, 15 bp, Homo sapiens
aacttggaagaaacc

SEQ ID NO: 702948 - DNA, 15 bp, Homo sapiens
acttggaagaaacca

SEQ ID NO: 702949 - DNA, 15 bp, Homo sapiens
cttggaagaaaccaa

SEQ ID NO: 702950 - DNA, 15 bp, Homo sapiens
ttggaagaaaccaag

SEQ ID NO: 702951 - DNA, 15 bp, Homo sapiens
tggaagaaaccaaga

SEQ ID NO: 702952 - DNA, 15 bp, Homo sapiens
ggaagaaaccaagat

SEQ ID NO: 702953 - DNA, 15 bp, Homo sapiens
gaagaaaccaagatg

SEQ ID NO: 702954 - DNA, 15 bp, Homo sapiens
aagaaaccaagatgt

SEQ ID NO: 702955 - DNA, 15 bp, Homo sapiens
agaaaccaagatgtc

SEQ ID NO: 702956 - DNA, 15 bp, Homo sapiens
gaaaccaagatgtcc

SEQ ID NO: 702957 - DNA, 15 bp, Homo sapiens
aaaccaagatgtcct

SEQ ID NO: 702958 - DNA, 15 bp, Homo sapiens
aaccaagatgtcctt

SEQ ID NO: 702959 - DNA, 15 bp, Homo sapiens
accaagatgtccttc

SEQ ID NO: 702960 - DNA, 15 bp, Homo sapiens
ccaagatgtccttca

SEQ ID NO: 702961 - DNA, 15 bp, Homo sapiens
caagatgtccttcag

SEQ ID NO: 702962 - DNA, 15 bp, Homo sapiens
aagatgtccttcagg

SEQ ID NO: 702963 - DNA, 15 bp, Homo sapiens
agatgtccttcagga

SEQ ID NO: 702964 - DNA, 15 bp, Homo sapiens
gatgtccttcaggag

SEQ ID NO: 702965 - DNA, 15 bp, Homo sapiens
atgtccttcaggagg

SEQ ID NO: 702966 - DNA, 15 bp, Homo sapiens
tgtccttcaggaggt

SEQ ID NO: 702967 - DNA, 15 bp, Homo sapiens
gtccttcaggaggtg

SEQ ID NO: 702968 - DNA, 15 bp, Homo sapiens
tccttcaggaggtga

SEQ ID NO: 702969 - DNA, 15 bp, Homo sapiens
ccttcaggaggtgaa

SEQ ID NO: 702970 - DNA, 15 bp, Homo sapiens
cttcaggaggtgaat

SEQ ID NO: 702971 - DNA, 15 bp, Homo sapiens
ttcaggaggtgaatg

SEQ ID NO: 702972 - DNA, 15 bp, Homo sapiens
tcaggaggtgaatgg

SEQ ID NO: 702973 - DNA, 15 bp, Homo sapiens
caggaggtgaatgga

SEQ ID NO: 702974 - DNA, 15 bp, Homo sapiens
aggaggtgaatggat

SEQ ID NO: 702975 - DNA, 15 bp, Homo sapiens
ggaggtgaatggata

SEQ ID NO: 702976 - DNA, 15 bp, Homo sapiens
gaggtgaatggataa

SEQ ID NO: 702977 - DNA, 15 bp, Homo sapiens
aggtgaatggataaa

SEQ ID NO: 702978 - DNA, 15 bp, Homo sapiens
ggtgaatggataaac

SEQ ID NO: 702979 - DNA, 15 bp, Homo sapiens
gtgaatggataaact

SEQ ID NO: 702980 - DNA, 15 bp, Homo sapiens
tgaatggataaactg

SEQ ID NO: 702981 - DNA, 15 bp, Homo sapiens
gaatggataaactgt

SEQ ID NO: 702982 - DNA, 15 bp, Homo sapiens
aatggataaactgtg

SEQ ID NO: 702983 - DNA, 15 bp, Homo sapiens
atggataaactgtgg

SEQ ID NO: 702984 - DNA, 15 bp, Homo sapiens
tggataaactgtggt

SEQ ID NO: 702985 - DNA, 15 bp, Homo sapiens
ggataaactgtggta

SEQ ID NO: 702986 - DNA, 15 bp, Homo sapiens
gataaactgtggtac

SEQ ID NO: 702987 - DNA, 15 bp, Homo sapiens
ataaactgtggtaca

SEQ ID NO: 702988 - DNA, 15 bp, Homo sapiens
taaactgtggtacat

SEQ ID NO: 702989 - DNA, 15 bp, Homo sapiens
aaactgtggtacatc

SEQ ID NO: 702990 - DNA, 15 bp, Homo sapiens
aactgtggtacatcc

SEQ ID NO: 702991 - DNA, 15 bp, Homo sapiens
actgtggtacatcca

SEQ ID NO: 702992 - DNA, 15 bp, Homo sapiens
ctgtggtacatccag

SEQ ID NO: 702993 - DNA, 15 bp, Homo sapiens
tgtggtacatccagg

SEQ ID NO: 702994 - DNA, 15 bp, Homo sapiens
gtggtacatccaggc

SEQ ID NO: 702995 - DNA, 15 bp, Homo sapiens
tggtacatccaggca

SEQ ID NO: 702996 - DNA, 15 bp, Homo sapiens
ggtacatccaggcaa

SEQ ID NO: 702997 - DNA, 15 bp, Homo sapiens
gtacatccaggcaat

SEQ ID NO: 702998 - DNA, 15 bp, Homo sapiens
tacatccaggcaatg

SEQ ID NO: 702999 - DNA, 15 bp, Homo sapiens
acatccaggcaatgg

SEQ ID NO: 703000 - DNA, 15 bp, Homo sapiens
catccaggcaatgga

SEQ ID NO: 703001 - DNA, 15 bp, Homo sapiens
atccaggcaatggag

SEQ ID NO: 703002 - DNA, 15 bp, Homo sapiens
tccaggcaatggagt

SEQ ID NO: 703003 - DNA, 15 bp, Homo sapiens
ccaggcaatggagta

SEQ ID NO: 703004 - DNA, 15 bp, Homo sapiens
caggcaatggagtat

SEQ ID NO: 703005 - DNA, 15 bp, Homo sapiens
aggcaatggagtatt

SEQ ID NO: 703006 - DNA, 15 bp, Homo sapiens
ggcaatggagtatta

SEQ ID NO: 703007 - DNA, 15 bp, Homo sapiens
gcaatggagtattat

SEQ ID NO: 703008 - DNA, 15 bp, Homo sapiens
caatggagtattatt

SEQ ID NO: 703009 - DNA, 15 bp, Homo sapiens
aatggagtattattc

SEQ ID NO: 703010 - DNA, 15 bp, Homo sapiens
atggagtattattca

SEQ ID NO: 703011 - DNA, 15 bp, Homo sapiens
tggagtattattcag

SEQ ID NO: 703012 - DNA, 15 bp, Homo sapiens
ggagtattattcagc

SEQ ID NO: 703013 - DNA, 15 bp, Homo sapiens
gagtattattcagca

SEQ ID NO: 703014 - DNA, 15 bp, Homo sapiens
agtattattcagcac

SEQ ID NO: 703015 - DNA, 15 bp, Homo sapiens
gtattattcagcact

SEQ ID NO: 703016 - DNA, 15 bp, Homo sapiens
tattattcagcacta

SEQ ID NO: 703017 - DNA, 15 bp, Homo sapiens
attattcagcactaa

SEQ ID NO: 703018 - DNA, 15 bp, Homo sapiens
ttattcagcactaaa

SEQ ID NO: 703019 - DNA, 15 bp, Homo sapiens
tattcagcactaaaa

SEQ ID NO: 703020 - DNA, 15 bp, Homo sapiens
attcagcactaaaaa

SEQ ID NO: 703021 - DNA, 15 bp, Homo sapiens
ttcagcactaaaaag

SEQ ID NO: 703022 - DNA, 15 bp, Homo sapiens
tcagcactaaaaaga

SEQ ID NO: 703023 - DNA, 15 bp, Homo sapiens
cagcactaaaaagaa

SEQ ID NO: 703024 - DNA, 15 bp, Homo sapiens
agcactaaaaagaaa

SEQ ID NO: 703025 - DNA, 15 bp, Homo sapiens
gcactaaaaagaaat

SEQ ID NO: 703026 - DNA, 15 bp, Homo sapiens
cactaaaaagaaatg

SEQ ID NO: 703027 - DNA, 15 bp, Homo sapiens
actaaaaagaaatga

SEQ ID NO: 703028 - DNA, 15 bp, Homo sapiens
ctaaaaagaaatgag

SEQ ID NO: 703029 - DNA, 15 bp, Homo sapiens
aaaaagaaatgagct

SEQ ID NO: 703030 - DNA, 15 bp, Homo sapiens
aaaagaaatgagcta

SEQ ID NO: 703031 - DNA, 15 bp, Homo sapiens
aaagaaatgagctat

SEQ ID NO: 703032 - DNA, 15 bp, Homo sapiens
aagaaatgagctatc

SEQ ID NO: 703033 - DNA, 15 bp, Homo sapiens
agaaatgagctatca

SEQ ID NO: 703034 - DNA, 15 bp, Homo sapiens
gaaatgagctatcaa

SEQ ID NO: 703035 - DNA, 15 bp, Homo sapiens
aaatgagctatcaag

SEQ ID NO: 703036 - DNA, 15 bp, Homo sapiens
aatgagctatcaagc

SEQ ID NO: 703037 - DNA, 15 bp, Homo sapiens
atgagctatcaagcc

SEQ ID NO: 703038 - DNA, 15 bp, Homo sapiens
tgagctatcaagcca

SEQ ID NO: 703039 - DNA, 15 bp, Homo sapiens
gagctatcaagccac

SEQ ID NO: 703040 - DNA, 15 bp, Homo sapiens
agctatcaagccacg

SEQ ID NO: 703041 - DNA, 15 bp, Homo sapiens
gctatcaagccacga

SEQ ID NO: 703042 - DNA, 15 bp, Homo sapiens
ctatcaagccacgaa

SEQ ID NO: 703043 - DNA, 15 bp, Homo sapiens
tatcaagccacgaaa

SEQ ID NO: 703044 - DNA, 15 bp, Homo sapiens
atcaagccacgaaaa

SEQ ID NO: 703045 - DNA, 15 bp, Homo sapiens
tcaagccacgaaaag

SEQ ID NO: 703046 - DNA, 15 bp, Homo sapiens
caagccacgaaaaga

SEQ ID NO: 703047 - DNA, 15 bp, Homo sapiens
aagccacgaaaagac

SEQ ID NO: 703048 - DNA, 15 bp, Homo sapiens
agccacgaaaagact

SEQ ID NO: 703049 - DNA, 15 bp, Homo sapiens
gccacgaaaagactt

SEQ ID NO: 703050 - DNA, 15 bp, Homo sapiens
ccacgaaaagacttg

SEQ ID NO: 703051 - DNA, 15 bp, Homo sapiens
cacgaaaagacttgt

SEQ ID NO: 703052 - DNA, 15 bp, Homo sapiens
acgaaaagacttgtg

SEQ ID NO: 703053 - DNA, 15 bp, Homo sapiens
cgaaaagacttgtgg

SEQ ID NO: 703054 - DNA, 15 bp, Homo sapiens
gaaaagacttgtgga

SEQ ID NO: 703055 - DNA, 15 bp, Homo sapiens
aaaagacttgtggaa

SEQ ID NO: 703056 - DNA, 15 bp, Homo sapiens
aaagacttgtggaaa

SEQ ID NO: 703057 - DNA, 15 bp, Homo sapiens
aagacttgtggaaac

SEQ ID NO: 703058 - DNA, 15 bp, Homo sapiens
agacttgtggaaact

SEQ ID NO: 703059 - DNA, 15 bp, Homo sapiens
gacttgtggaaactt

SEQ ID NO: 703060 - DNA, 15 bp, Homo sapiens
acttgtggaaactta

SEQ ID NO: 703061 - DNA, 15 bp, Homo sapiens
cttgtggaaacttaa

SEQ ID NO: 703062 - DNA, 15 bp, Homo sapiens
ttgtggaaacttaat

SEQ ID NO: 703063 - DNA, 15 bp, Homo sapiens
tgtggaaacttaatt

SEQ ID NO: 703064 - DNA, 15 bp, Homo sapiens
gtggaaacttaattg

SEQ ID NO: 703065 - DNA, 15 bp, Homo sapiens
tggaaacttaattgc

SEQ ID NO: 703066 - DNA, 15 bp, Homo sapiens
ggaaacttaattgca

SEQ ID NO: 703067 - DNA, 15 bp, Homo sapiens
gaaacttaattgcat

SEQ ID NO: 703068 - DNA, 15 bp, Homo sapiens
aaacttaattgcata

SEQ ID NO: 703069 - DNA, 15 bp, Homo sapiens
aacttaattgcatat

SEQ ID NO: 703070 - DNA, 15 bp, Homo sapiens
acttaattgcatatt

SEQ ID NO: 703071 - DNA, 15 bp, Homo sapiens
cttaattgcatatta

SEQ ID NO: 703072 - DNA, 15 bp, Homo sapiens
ttaattgcatattat

SEQ ID NO: 703073 - DNA, 15 bp, Homo sapiens
taattgcatattatt

SEQ ID NO: 703074 - DNA, 15 bp, Homo sapiens
aattgcatattatta

SEQ ID NO: 703075 - DNA, 15 bp, Homo sapiens
attgcatattattaa

SEQ ID NO: 703076 - DNA, 15 bp, Homo sapiens
ttgcatattattaag

SEQ ID NO: 703077 - DNA, 15 bp, Homo sapiens
tgcatattattaagt

SEQ ID NO: 703078 - DNA, 15 bp, Homo sapiens
gcatattattaagtg

SEQ ID NO: 703079 - DNA, 15 bp, Homo sapiens
catattattaagtga

SEQ ID NO: 703080 - DNA, 15 bp, Homo sapiens
atattattaagtgaa

SEQ ID NO: 703081 - DNA, 15 bp, Homo sapiens
tattattaagtgaaa

SEQ ID NO: 703082 - DNA, 15 bp, Homo sapiens
attattaagtgaaaa

SEQ ID NO: 703083 - DNA, 15 bp, Homo sapiens
ttattaagtgaaaaa

SEQ ID NO: 703084 - DNA, 15 bp, Homo sapiens
tattaagtgaaaaac

SEQ ID NO: 703085 - DNA, 15 bp, Homo sapiens
attaagtgaaaaacc

SEQ ID NO: 703086 - DNA, 15 bp, Homo sapiens
ttaagtgaaaaacca

SEQ ID NO: 703087 - DNA, 15 bp, Homo sapiens
taagtgaaaaaccaa

SEQ ID NO: 703088 - DNA, 15 bp, Homo sapiens
aagtgaaaaaccaat

SEQ ID NO: 703089 - DNA, 15 bp, Homo sapiens
agtgaaaaaccaatc

SEQ ID NO: 703090 - DNA, 15 bp, Homo sapiens
gtgaaaaaccaatcc

SEQ ID NO: 703091 - DNA, 15 bp, Homo sapiens
tgaaaaaccaatcca

SEQ ID NO: 703092 - DNA, 15 bp, Homo sapiens
gaaaaaccaatccaa

SEQ ID NO: 703093 - DNA, 15 bp, Homo sapiens
aaaaaccaatccaaa

SEQ ID NO: 703094 - DNA, 15 bp, Homo sapiens
aaaaccaatccaaaa

SEQ ID NO: 703095 - DNA, 15 bp, Homo sapiens
aaaccaatccaaaaa

SEQ ID NO: 703096 - DNA, 15 bp, Homo sapiens
aaccaatccaaaaag

SEQ ID NO: 703097 - DNA, 15 bp, Homo sapiens
accaatccaaaaagg

SEQ ID NO: 703098 - DNA, 15 bp, Homo sapiens
ccaatccaaaaaggc

SEQ ID NO: 703099 - DNA, 15 bp, Homo sapiens
caatccaaaaaggct

SEQ ID NO: 703100 - DNA, 15 bp, Homo sapiens
aatccaaaaaggcta

SEQ ID NO: 703101 - DNA, 15 bp, Homo sapiens
atccaaaaaggctat

SEQ ID NO: 703102 - DNA, 15 bp, Homo sapiens
tccaaaaaggctata

SEQ ID NO: 703103 - DNA, 15 bp, Homo sapiens
ccaaaaaggctatat

SEQ ID NO: 703104 - DNA, 15 bp, Homo sapiens
caaaaaggctatata

SEQ ID NO: 703105 - DNA, 15 bp, Homo sapiens
aaaaaggctatatac

SEQ ID NO: 703106 - DNA, 15 bp, Homo sapiens
aaaaggctatatact

SEQ ID NO: 703107 - DNA, 15 bp, Homo sapiens
aaaggctatatactg

SEQ ID NO: 703108 - DNA, 15 bp, Homo sapiens
aaggctatatactgt

SEQ ID NO: 703109 - DNA, 15 bp, Homo sapiens
aggctatatactgta

SEQ ID NO: 703110 - DNA, 15 bp, Homo sapiens
ggctatatactgtat

SEQ ID NO: 703111 - DNA, 15 bp, Homo sapiens
gctatatactgtatg

SEQ ID NO: 703112 - DNA, 15 bp, Homo sapiens
ctatatactgtatga

SEQ ID NO: 703113 - DNA, 15 bp, Homo sapiens
tatatactgtatgat

SEQ ID NO: 703114 - DNA, 15 bp, Homo sapiens
atatactgtatgatt

SEQ ID NO: 703115 - DNA, 15 bp, Homo sapiens
tatactgtatgattc

SEQ ID NO: 703116 - DNA, 15 bp, Homo sapiens
atactgtatgattcc

SEQ ID NO: 703117 - DNA, 15 bp, Homo sapiens
tactgtatgattcca

SEQ ID NO: 703118 - DNA, 15 bp, Homo sapiens
actgtatgattccaa

SEQ ID NO: 703119 - DNA, 15 bp, Homo sapiens
ctgtatgattccaac

SEQ ID NO: 703120 - DNA, 15 bp, Homo sapiens
tgtatgattccaacg

SEQ ID NO: 703121 - DNA, 15 bp, Homo sapiens
gtatgattccaacga

SEQ ID NO: 703122 - DNA, 15 bp, Homo sapiens
tatgattccaacgat

SEQ ID NO: 703123 - DNA, 15 bp, Homo sapiens
atgattccaacgata

SEQ ID NO: 703124 - DNA, 15 bp, Homo sapiens
tgattccaacgatag

SEQ ID NO: 703125 - DNA, 15 bp, Homo sapiens
gattccaacgatagg

SEQ ID NO: 703126 - DNA, 15 bp, Homo sapiens
attccaacgatagga

SEQ ID NO: 703127 - DNA, 15 bp, Homo sapiens
ttccaacgataggac

SEQ ID NO: 703128 - DNA, 15 bp, Homo sapiens
tccaacgataggaca

SEQ ID NO: 703129 - DNA, 15 bp, Homo sapiens
ccaacgataggacat

SEQ ID NO: 703130 - DNA, 15 bp, Homo sapiens
caacgataggacatt

SEQ ID NO: 703131 - DNA, 15 bp, Homo sapiens
aacgataggacattc

SEQ ID NO: 703132 - DNA, 15 bp, Homo sapiens
acgataggacattct

SEQ ID NO: 703133 - DNA, 15 bp, Homo sapiens
cgataggacattctg

SEQ ID NO: 703134 - DNA, 15 bp, Homo sapiens
gataggacattctgg

SEQ ID NO: 703135 - DNA, 15 bp, Homo sapiens
ataggacattctgga

SEQ ID NO: 703136 - DNA, 15 bp, Homo sapiens
taggacattctggaa

SEQ ID NO: 703137 - DNA, 15 bp, Homo sapiens
aggacattctggaaa

SEQ ID NO: 703138 - DNA, 15 bp, Homo sapiens
ggacattctggaaaa

SEQ ID NO: 703139 - DNA, 15 bp, Homo sapiens
gacattctggaaaag

SEQ ID NO: 703140 - DNA, 15 bp, Homo sapiens
acattctggaaaagg

SEQ ID NO: 703141 - DNA, 15 bp, Homo sapiens
cattctggaaaaggc

SEQ ID NO: 703142 - DNA, 15 bp, Homo sapiens
attctggaaaaggca

SEQ ID NO: 703143 - DNA, 15 bp, Homo sapiens
ttctggaaaaggcaa

SEQ ID NO: 703144 - DNA, 15 bp, Homo sapiens
tctggaaaaggcaaa

SEQ ID NO: 703145 - DNA, 15 bp, Homo sapiens
ctggaaaaggcaaaa

SEQ ID NO: 703146 - DNA, 15 bp, Homo sapiens
tggaaaaggcaaaac

SEQ ID NO: 703147 - DNA, 15 bp, Homo sapiens
ggaaaaggcaaaact

SEQ ID NO: 703148 - DNA, 15 bp, Homo sapiens
gaaaaggcaaaacta

SEQ ID NO: 703149 - DNA, 15 bp, Homo sapiens
aaaaggcaaaactat

SEQ ID NO: 703150 - DNA, 15 bp, Homo sapiens
aaaggcaaaactatg

SEQ ID NO: 703151 - DNA, 15 bp, Homo sapiens
aaggcaaaactatgg

SEQ ID NO: 703152 - DNA, 15 bp, Homo sapiens
aggcaaaactatgga

SEQ ID NO: 703153 - DNA, 15 bp, Homo sapiens
ggcaaaactatggat

SEQ ID NO: 703154 - DNA, 15 bp, Homo sapiens
gcaaaactatggata

SEQ ID NO: 703155 - DNA, 15 bp, Homo sapiens
caaaactatggatac

SEQ ID NO: 703156 - DNA, 15 bp, Homo sapiens
aaaactatggataca

SEQ ID NO: 703157 - DNA, 15 bp, Homo sapiens
aaactatggatacag

SEQ ID NO: 703158 - DNA, 15 bp, Homo sapiens
aactatggatacagt

SEQ ID NO: 703159 - DNA, 15 bp, Homo sapiens
actatggatacagta

SEQ ID NO: 703160 - DNA, 15 bp, Homo sapiens
ctatggatacagtaa

SEQ ID NO: 703161 - DNA, 15 bp, Homo sapiens
tatggatacagtaaa

SEQ ID NO: 703162 - DNA, 15 bp, Homo sapiens
atggatacagtaaaa

SEQ ID NO: 703163 - DNA, 15 bp, Homo sapiens
tggatacagtaaaaa

SEQ ID NO: 703164 - DNA, 15 bp, Homo sapiens
ggatacagtaaaaag

SEQ ID NO: 703165 - DNA, 15 bp, Homo sapiens
gatacagtaaaaaga

SEQ ID NO: 703166 - DNA, 15 bp, Homo sapiens
atacagtaaaaagat

SEQ ID NO: 703167 - DNA, 15 bp, Homo sapiens
tacagtaaaaagatc

SEQ ID NO: 703168 - DNA, 15 bp, Homo sapiens
acagtaaaaagatcc

SEQ ID NO: 703169 - DNA, 15 bp, Homo sapiens
cagtaaaaagatcca

SEQ ID NO: 703170 - DNA, 15 bp, Homo sapiens
agtaaaaagatccat

SEQ ID NO: 703171 - DNA, 15 bp, Homo sapiens
gtaaaaagatccatg

SEQ ID NO: 703172 - DNA, 15 bp, Homo sapiens
taaaaagatccatgg

SEQ ID NO: 703173 - DNA, 15 bp, Homo sapiens
aaaaagatccatggc

SEQ ID NO: 703174 - DNA, 15 bp, Homo sapiens
aaaagatccatggct

SEQ ID NO: 703175 - DNA, 15 bp, Homo sapiens
aaagatccatggctg

SEQ ID NO: 703176 - DNA, 15 bp, Homo sapiens
aagatccatggctgc

SEQ ID NO: 703177 - DNA, 15 bp, Homo sapiens
agatccatggctgcc

SEQ ID NO: 703178 - DNA, 15 bp, Homo sapiens
gatccatggctgcca

SEQ ID NO: 703179 - DNA, 15 bp, Homo sapiens
atccatggctgccag

SEQ ID NO: 703180 - DNA, 15 bp, Homo sapiens
tccatggctgccagg

SEQ ID NO: 703181 - DNA, 15 bp, Homo sapiens
ccatggctgccagga

SEQ ID NO: 703182 - DNA, 15 bp, Homo sapiens
catggctgccaggag

SEQ ID NO: 703183 - DNA, 15 bp, Homo sapiens
atggctgccaggagt

SEQ ID NO: 703184 - DNA, 15 bp, Homo sapiens
tggctgccaggagtt

SEQ ID NO: 703185 - DNA, 15 bp, Homo sapiens
ggctgccaggagtta

SEQ ID NO: 703186 - DNA, 15 bp, Homo sapiens
gctgccaggagttag

SEQ ID NO: 703187 - DNA, 15 bp, Homo sapiens
ctgccaggagttagg

SEQ ID NO: 703188 - DNA, 15 bp, Homo sapiens
tgccaggagttaggg

SEQ ID NO: 703189 - DNA, 15 bp, Homo sapiens
gccaggagttagggg

SEQ ID NO: 703190 - DNA, 15 bp, Homo sapiens
ccaggagttaggggc

SEQ ID NO: 703191 - DNA, 15 bp, Homo sapiens
caggagttaggggca

SEQ ID NO: 703192 - DNA, 15 bp, Homo sapiens
aggagttaggggcaa

SEQ ID NO: 703193 - DNA, 15 bp, Homo sapiens
ggagttaggggcaaa

SEQ ID NO: 703194 - DNA, 15 bp, Homo sapiens
gagttaggggcaaag

SEQ ID NO: 703195 - DNA, 15 bp, Homo sapiens
agttaggggcaaagg

SEQ ID NO: 703196 - DNA, 15 bp, Homo sapiens
gttaggggcaaagga

SEQ ID NO: 703197 - DNA, 15 bp, Homo sapiens
ttaggggcaaaggag

SEQ ID NO: 703198 - DNA, 15 bp, Homo sapiens
taggggcaaaggagg

SEQ ID NO: 703199 - DNA, 15 bp, Homo sapiens
aggggcaaaggagga

SEQ ID NO: 703200 - DNA, 15 bp, Homo sapiens
ggggcaaaggaggaa

SEQ ID NO: 703201 - DNA, 15 bp, Homo sapiens
gggcaaaggaggaag

SEQ ID NO: 703202 - DNA, 15 bp, Homo sapiens
ggcaaaggaggaagg

SEQ ID NO: 703203 - DNA, 15 bp, Homo sapiens
gcaaaggaggaaggg

SEQ ID NO: 703204 - DNA, 15 bp, Homo sapiens
caaaggaggaaggga

SEQ ID NO: 703205 - DNA, 15 bp, Homo sapiens
aaaggaggaagggat

SEQ ID NO: 703206 - DNA, 15 bp, Homo sapiens
aaggaggaagggatg

SEQ ID NO: 703207 - DNA, 15 bp, Homo sapiens
aggaggaagggatga

SEQ ID NO: 703208 - DNA, 15 bp, Homo sapiens
ggaggaagggatgaa

SEQ ID NO: 703209 - DNA, 15 bp, Homo sapiens
gaggaagggatgaat

SEQ ID NO: 703210 - DNA, 15 bp, Homo sapiens
aggaagggatgaatt

SEQ ID NO: 703211 - DNA, 15 bp, Homo sapiens
ggaagggatgaattc

SEQ ID NO: 703212 - DNA, 15 bp, Homo sapiens
gaagggatgaattcc

SEQ ID NO: 703213 - DNA, 15 bp, Homo sapiens
aagggatgaattccg

SEQ ID NO: 703214 - DNA, 15 bp, Homo sapiens
agggatgaattccgc

SEQ ID NO: 703215 - DNA, 15 bp, Homo sapiens
gggatgaattccgca

SEQ ID NO: 703216 - DNA, 15 bp, Homo sapiens
ggatgaattccgcag

SEQ ID NO: 703217 - DNA, 15 bp, Homo sapiens
gatgaattccgcaga

SEQ ID NO: 703218 - DNA, 15 bp, Homo sapiens
atgaattccgcagag

SEQ ID NO: 703219 - DNA, 15 bp, Homo sapiens
tgaattccgcagagc

SEQ ID NO: 703220 - DNA, 15 bp, Homo sapiens
gaattccgcagagct

SEQ ID NO: 703221 - DNA, 15 bp, Homo sapiens
aattccgcagagctc

SEQ ID NO: 703222 - DNA, 15 bp, Homo sapiens
attccgcagagctca

SEQ ID NO: 703223 - DNA, 15 bp, Homo sapiens
ttccgcagagctcag

SEQ ID NO: 703224 - DNA, 15 bp, Homo sapiens
tccgcagagctcaga

SEQ ID NO: 703225 - DNA, 15 bp, Homo sapiens
ccgcagagctcagag

SEQ ID NO: 703226 - DNA, 15 bp, Homo sapiens
cgcagagctcagagg

SEQ ID NO: 703227 - DNA, 15 bp, Homo sapiens
gcagagctcagagga

SEQ ID NO: 703228 - DNA, 15 bp, Homo sapiens
cagagctcagaggat

SEQ ID NO: 703229 - DNA, 15 bp, Homo sapiens
agagctcagaggatt

SEQ ID NO: 703230 - DNA, 15 bp, Homo sapiens
gagctcagaggattt

SEQ ID NO: 703231 - DNA, 15 bp, Homo sapiens
agctcagaggatttt

SEQ ID NO: 703232 - DNA, 15 bp, Homo sapiens
gctcagaggattttt

SEQ ID NO: 703233 - DNA, 15 bp, Homo sapiens
ctcagaggattttta

SEQ ID NO: 703234 - DNA, 15 bp, Homo sapiens
tcagaggatttttag

SEQ ID NO: 703235 - DNA, 15 bp, Homo sapiens
cagaggatttttagg

SEQ ID NO: 703236 - DNA, 15 bp, Homo sapiens
agaggatttttaggg

SEQ ID NO: 703237 - DNA, 15 bp, Homo sapiens
gaggatttttagggc

SEQ ID NO: 703238 - DNA, 15 bp, Homo sapiens
aggatttttagggca

SEQ ID NO: 703239 - DNA, 15 bp, Homo sapiens
ggatttttagggcaa

SEQ ID NO: 703240 - DNA, 15 bp, Homo sapiens
gatttttagggcaat

SEQ ID NO: 703241 - DNA, 15 bp, Homo sapiens
atttttagggcaatg

SEQ ID NO: 703242 - DNA, 15 bp, Homo sapiens
tttttagggcaatga

SEQ ID NO: 703243 - DNA, 15 bp, Homo sapiens
ttttagggcaatgaa

SEQ ID NO: 703244 - DNA, 15 bp, Homo sapiens
tttagggcaatgaaa

SEQ ID NO: 703245 - DNA, 15 bp, Homo sapiens
ttagggcaatgaaac

SEQ ID NO: 703246 - DNA, 15 bp, Homo sapiens
tagggcaatgaaacc

SEQ ID NO: 703247 - DNA, 15 bp, Homo sapiens
agggcaatgaaacca

SEQ ID NO: 703248 - DNA, 15 bp, Homo sapiens
gggcaatgaaaccac

SEQ ID NO: 703249 - DNA, 15 bp, Homo sapiens
ggcaatgaaaccact

SEQ ID NO: 703250 - DNA, 15 bp, Homo sapiens
gcaatgaaaccactc

SEQ ID NO: 703251 - DNA, 15 bp, Homo sapiens
caatgaaaccactct

SEQ ID NO: 703252 - DNA, 15 bp, Homo sapiens
aatgaaaccactctc

SEQ ID NO: 703253 - DNA, 15 bp, Homo sapiens
atgaaaccactctct

SEQ ID NO: 703254 - DNA, 15 bp, Homo sapiens
tgaaaccactctcta

SEQ ID NO: 703255 - DNA, 15 bp, Homo sapiens
gaaaccactctctat

SEQ ID NO: 703256 - DNA, 15 bp, Homo sapiens
aaaccactctctatg

SEQ ID NO: 703257 - DNA, 15 bp, Homo sapiens
aaccactctctatga

SEQ ID NO: 703258 - DNA, 15 bp, Homo sapiens
accactctctatgat

SEQ ID NO: 703259 - DNA, 15 bp, Homo sapiens
ccactctctatgata

SEQ ID NO: 703260 - DNA, 15 bp, Homo sapiens
cactctctatgatac

SEQ ID NO: 703261 - DNA, 15 bp, Homo sapiens
actctctatgataca

SEQ ID NO: 703262 - DNA, 15 bp, Homo sapiens
ctctctatgatacaa

SEQ ID NO: 703263 - DNA, 15 bp, Homo sapiens
tctctatgatacaat

SEQ ID NO: 703264 - DNA, 15 bp, Homo sapiens
ctctatgatacaata

SEQ ID NO: 703265 - DNA, 15 bp, Homo sapiens
tctatgatacaataa

SEQ ID NO: 703266 - DNA, 15 bp, Homo sapiens
ctatgatacaataat

SEQ ID NO: 703267 - DNA, 15 bp, Homo sapiens
tatgatacaataatg

SEQ ID NO: 703268 - DNA, 15 bp, Homo sapiens
atgatacaataatga

SEQ ID NO: 703269 - DNA, 15 bp, Homo sapiens
tgatacaataatgat

SEQ ID NO: 703270 - DNA, 15 bp, Homo sapiens
gatacaataatgatg

SEQ ID NO: 703271 - DNA, 15 bp, Homo sapiens
atacaataatgatgg

SEQ ID NO: 703272 - DNA, 15 bp, Homo sapiens
tacaataatgatgga

SEQ ID NO: 703273 - DNA, 15 bp, Homo sapiens
acaataatgatggac

SEQ ID NO: 703274 - DNA, 15 bp, Homo sapiens
caataatgatggaca

SEQ ID NO: 703275 - DNA, 15 bp, Homo sapiens
aataatgatggacac

SEQ ID NO: 703276 - DNA, 15 bp, Homo sapiens
ataatgatggacaca

SEQ ID NO: 703277 - DNA, 15 bp, Homo sapiens
taatgatggacacag

SEQ ID NO: 703278 - DNA, 15 bp, Homo sapiens
aatgatggacacagg

SEQ ID NO: 703279 - DNA, 15 bp, Homo sapiens
atgatggacacaggt

SEQ ID NO: 703280 - DNA, 15 bp, Homo sapiens
tgatggacacaggtc

SEQ ID NO: 703281 - DNA, 15 bp, Homo sapiens
gatggacacaggtca

SEQ ID NO: 703282 - DNA, 15 bp, Homo sapiens
atggacacaggtcat

SEQ ID NO: 703283 - DNA, 15 bp, Homo sapiens
tggacacaggtcatt

SEQ ID NO: 703284 - DNA, 15 bp, Homo sapiens
ggacacaggtcatta

SEQ ID NO: 703285 - DNA, 15 bp, Homo sapiens
gacacaggtcattat

SEQ ID NO: 703286 - DNA, 15 bp, Homo sapiens
acacaggtcattata

SEQ ID NO: 703287 - DNA, 15 bp, Homo sapiens
cacaggtcattatac

SEQ ID NO: 703288 - DNA, 15 bp, Homo sapiens
acaggtcattataca

SEQ ID NO: 703289 - DNA, 15 bp, Homo sapiens
caggtcattatacat

SEQ ID NO: 703290 - DNA, 15 bp, Homo sapiens
aggtcattatacatt

SEQ ID NO: 703291 - DNA, 15 bp, Homo sapiens
ggtcattatacattt

SEQ ID NO: 703292 - DNA, 15 bp, Homo sapiens
gtcattatacatttg

SEQ ID NO: 703293 - DNA, 15 bp, Homo sapiens
tcattatacatttgt

SEQ ID NO: 703294 - DNA, 15 bp, Homo sapiens
cattatacatttgtc

SEQ ID NO: 703295 - DNA, 15 bp, Homo sapiens
attatacatttgtcc

SEQ ID NO: 703296 - DNA, 15 bp, Homo sapiens
ttatacatttgtcca

SEQ ID NO: 703297 - DNA, 15 bp, Homo sapiens
tatacatttgtccaa

SEQ ID NO: 703298 - DNA, 15 bp, Homo sapiens
atacatttgtccaaa

SEQ ID NO: 703299 - DNA, 15 bp, Homo sapiens
tacatttgtccaaac

SEQ ID NO: 703300 - DNA, 15 bp, Homo sapiens
acatttgtccaaact

SEQ ID NO: 703301 - DNA, 15 bp, Homo sapiens
catttgtccaaactc

SEQ ID NO: 703302 - DNA, 15 bp, Homo sapiens
atttgtccaaactca

SEQ ID NO: 703303 - DNA, 15 bp, Homo sapiens
tttgtccaaactcac

SEQ ID NO: 703304 - DNA, 15 bp, Homo sapiens
ttgtccaaactcaca

SEQ ID NO: 703305 - DNA, 15 bp, Homo sapiens
tgtccaaactcacag

SEQ ID NO: 703306 - DNA, 15 bp, Homo sapiens
gtccaaactcacaga

SEQ ID NO: 703307 - DNA, 15 bp, Homo sapiens
tccaaactcacagaa

SEQ ID NO: 703308 - DNA, 15 bp, Homo sapiens
ccaaactcacagaat

SEQ ID NO: 703309 - DNA, 15 bp, Homo sapiens
caaactcacagaatg

SEQ ID NO: 703310 - DNA, 15 bp, Homo sapiens
aaactcacagaatgt

SEQ ID NO: 703311 - DNA, 15 bp, Homo sapiens
aactcacagaatgtg

SEQ ID NO: 703312 - DNA, 15 bp, Homo sapiens
actcacagaatgtgc

SEQ ID NO: 703313 - DNA, 15 bp, Homo sapiens
ctcacagaatgtgca

SEQ ID NO: 703314 - DNA, 15 bp, Homo sapiens
tcacagaatgtgcac

SEQ ID NO: 703315 - DNA, 15 bp, Homo sapiens
cacagaatgtgcacc

SEQ ID NO: 703316 - DNA, 15 bp, Homo sapiens
acagaatgtgcacca

SEQ ID NO: 703317 - DNA, 15 bp, Homo sapiens
cagaatgtgcaccac

SEQ ID NO: 703318 - DNA, 15 bp, Homo sapiens
agaatgtgcaccacc

SEQ ID NO: 703319 - DNA, 15 bp, Homo sapiens
gaatgtgcaccacca

SEQ ID NO: 703320 - DNA, 15 bp, Homo sapiens
aatgtgcaccaccaa

SEQ ID NO: 703321 - DNA, 15 bp, Homo sapiens
atgtgcaccaccaac

SEQ ID NO: 703322 - DNA, 15 bp, Homo sapiens
tgtgcaccaccaaca

SEQ ID NO: 703323 - DNA, 15 bp, Homo sapiens
gtgcaccaccaacaa

SEQ ID NO: 703324 - DNA, 15 bp, Homo sapiens
tgcaccaccaacaat

SEQ ID NO: 703325 - DNA, 15 bp, Homo sapiens
gcaccaccaacaatg

SEQ ID NO: 703326 - DNA, 15 bp, Homo sapiens
caccaccaacaatgg

SEQ ID NO: 703327 - DNA, 15 bp, Homo sapiens
accaccaacaatgga

SEQ ID NO: 703328 - DNA, 15 bp, Homo sapiens
ccaccaacaatggac

SEQ ID NO: 703329 - DNA, 15 bp, Homo sapiens
caccaacaatggacc

SEQ ID NO: 703330 - DNA, 15 bp, Homo sapiens
accaacaatggaccc

SEQ ID NO: 703331 - DNA, 15 bp, Homo sapiens
ccaacaatggaccct

SEQ ID NO: 703332 - DNA, 15 bp, Homo sapiens
caacaatggacccta

SEQ ID NO: 703333 - DNA, 15 bp, Homo sapiens
aacaatggaccctaa

SEQ ID NO: 703334 - DNA, 15 bp, Homo sapiens
acaatggaccctaat

SEQ ID NO: 703335 - DNA, 15 bp, Homo sapiens
caatggaccctaatg

SEQ ID NO: 703336 - DNA, 15 bp, Homo sapiens
aatggaccctaatgt

SEQ ID NO: 703337 - DNA, 15 bp, Homo sapiens
atggaccctaatgta

SEQ ID NO: 703338 - DNA, 15 bp, Homo sapiens
tggaccctaatgtaa

SEQ ID NO: 703339 - DNA, 15 bp, Homo sapiens
ggaccctaatgtaaa

SEQ ID NO: 703340 - DNA, 15 bp, Homo sapiens
gaccctaatgtaaac

SEQ ID NO: 703341 - DNA, 15 bp, Homo sapiens
accctaatgtaaact

SEQ ID NO: 703342 - DNA, 15 bp, Homo sapiens
ccctaatgtaaacta

SEQ ID NO: 703343 - DNA, 15 bp, Homo sapiens
cctaatgtaaactat

SEQ ID NO: 703344 - DNA, 15 bp, Homo sapiens
ctaatgtaaactatg

SEQ ID NO: 703345 - DNA, 15 bp, Homo sapiens
taatgtaaactatgg

SEQ ID NO: 703346 - DNA, 15 bp, Homo sapiens
aatgtaaactatgga

SEQ ID NO: 703347 - DNA, 15 bp, Homo sapiens
atgtaaactatggac

SEQ ID NO: 703348 - DNA, 15 bp, Homo sapiens
tgtaaactatggacc

SEQ ID NO: 703349 - DNA, 15 bp, Homo sapiens
gtaaactatggaccg

SEQ ID NO: 703350 - DNA, 15 bp, Homo sapiens
taaactatggaccgt

SEQ ID NO: 703351 - DNA, 15 bp, Homo sapiens
aaactatggaccgtg

SEQ ID NO: 703352 - DNA, 15 bp, Homo sapiens
aactatggaccgtgg

SEQ ID NO: 703353 - DNA, 15 bp, Homo sapiens
actatggaccgtggg

SEQ ID NO: 703354 - DNA, 15 bp, Homo sapiens
ctatggaccgtgggt

SEQ ID NO: 703355 - DNA, 15 bp, Homo sapiens
tatggaccgtgggtg

SEQ ID NO: 703356 - DNA, 15 bp, Homo sapiens
atggaccgtgggtga

SEQ ID NO: 703357 - DNA, 15 bp, Homo sapiens
tggaccgtgggtgat

SEQ ID NO: 703358 - DNA, 15 bp, Homo sapiens
ggaccgtgggtgata

SEQ ID NO: 703359 - DNA, 15 bp, Homo sapiens
gaccgtgggtgataa

SEQ ID NO: 703360 - DNA, 15 bp, Homo sapiens
accgtgggtgataat

SEQ ID NO: 703361 - DNA, 15 bp, Homo sapiens
ccgtgggtgataatg

SEQ ID NO: 703362 - DNA, 15 bp, Homo sapiens
cgtgggtgataatga

SEQ ID NO: 703363 - DNA, 15 bp, Homo sapiens
gtgggtgataatgat

SEQ ID NO: 703364 - DNA, 15 bp, Homo sapiens
tgggtgataatgatg

SEQ ID NO: 703365 - DNA, 15 bp, Homo sapiens
gggtgataatgatgt

SEQ ID NO: 703366 - DNA, 15 bp, Homo sapiens
ggtgataatgatgtg

SEQ ID NO: 703367 - DNA, 15 bp, Homo sapiens
gtgataatgatgtgt

SEQ ID NO: 703368 - DNA, 15 bp, Homo sapiens
tgataatgatgtgtc

SEQ ID NO: 703369 - DNA, 15 bp, Homo sapiens
gataatgatgtgtcc

SEQ ID NO: 703370 - DNA, 15 bp, Homo sapiens
ataatgatgtgtcca

SEQ ID NO: 703371 - DNA, 15 bp, Homo sapiens
taatgatgtgtccaa

SEQ ID NO: 703372 - DNA, 15 bp, Homo sapiens
aatgatgtgtccaag

SEQ ID NO: 703373 - DNA, 15 bp, Homo sapiens
atgatgtgtccaagc

SEQ ID NO: 703374 - DNA, 15 bp, Homo sapiens
tgatgtgtccaagca

SEQ ID NO: 703375 - DNA, 15 bp, Homo sapiens
gatgtgtccaagcag

SEQ ID NO: 703376 - DNA, 15 bp, Homo sapiens
atgtgtccaagcagg

SEQ ID NO: 703377 - DNA, 15 bp, Homo sapiens
tgtgtccaagcaggt

SEQ ID NO: 703378 - DNA, 15 bp, Homo sapiens
gtgtccaagcaggtt

SEQ ID NO: 703379 - DNA, 15 bp, Homo sapiens
tgtccaagcaggttc

SEQ ID NO: 703380 - DNA, 15 bp, Homo sapiens
gtccaagcaggttca

SEQ ID NO: 703381 - DNA, 15 bp, Homo sapiens
tccaagcaggttcat

SEQ ID NO: 703382 - DNA, 15 bp, Homo sapiens
ccaagcaggttcatc

SEQ ID NO: 703383 - DNA, 15 bp, Homo sapiens
caagcaggttcatca

SEQ ID NO: 703384 - DNA, 15 bp, Homo sapiens
aagcaggttcatcag

SEQ ID NO: 703385 - DNA, 15 bp, Homo sapiens
agcaggttcatcagg

SEQ ID NO: 703386 - DNA, 15 bp, Homo sapiens
gcaggttcatcaggt

SEQ ID NO: 703387 - DNA, 15 bp, Homo sapiens
caggttcatcaggta

SEQ ID NO: 703388 - DNA, 15 bp, Homo sapiens
aggttcatcaggtat

SEQ ID NO: 703389 - DNA, 15 bp, Homo sapiens
ggttcatcaggtata

SEQ ID NO: 703390 - DNA, 15 bp, Homo sapiens
gttcatcaggtataa

SEQ ID NO: 703391 - DNA, 15 bp, Homo sapiens
ttcatcaggtataac

SEQ ID NO: 703392 - DNA, 15 bp, Homo sapiens
tcatcaggtataaca

SEQ ID NO: 703393 - DNA, 15 bp, Homo sapiens
catcaggtataacaa

SEQ ID NO: 703394 - DNA, 15 bp, Homo sapiens
atcaggtataacaaa

SEQ ID NO: 703395 - DNA, 15 bp, Homo sapiens
tcaggtataacaaat

SEQ ID NO: 703396 - DNA, 15 bp, Homo sapiens
caggtataacaaatg

SEQ ID NO: 703397 - DNA, 15 bp, Homo sapiens
aggtataacaaatgc

SEQ ID NO: 703398 - DNA, 15 bp, Homo sapiens
ggtataacaaatgca

SEQ ID NO: 703399 - DNA, 15 bp, Homo sapiens
gtataacaaatgcac

SEQ ID NO: 703400 - DNA, 15 bp, Homo sapiens
tataacaaatgcacc

SEQ ID NO: 703401 - DNA, 15 bp, Homo sapiens
ataacaaatgcacca

SEQ ID NO: 703402 - DNA, 15 bp, Homo sapiens
taacaaatgcaccac

SEQ ID NO: 703403 - DNA, 15 bp, Homo sapiens
aacaaatgcaccact

SEQ ID NO: 703404 - DNA, 15 bp, Homo sapiens
acaaatgcaccactc

SEQ ID NO: 703405 - DNA, 15 bp, Homo sapiens
caaatgcaccactct

SEQ ID NO: 703406 - DNA, 15 bp, Homo sapiens
aaatgcaccactctg

SEQ ID NO: 703407 - DNA, 15 bp, Homo sapiens
aatgcaccactctgg

SEQ ID NO: 703408 - DNA, 15 bp, Homo sapiens
atgcaccactctggt

SEQ ID NO: 703409 - DNA, 15 bp, Homo sapiens
tgcaccactctggtg

SEQ ID NO: 703410 - DNA, 15 bp, Homo sapiens
gcaccactctggtgg

SEQ ID NO: 703411 - DNA, 15 bp, Homo sapiens
caccactctggtggg

SEQ ID NO: 703412 - DNA, 15 bp, Homo sapiens
accactctggtgggg

SEQ ID NO: 703413 - DNA, 15 bp, Homo sapiens
ccactctggtggggg

SEQ ID NO: 703414 - DNA, 15 bp, Homo sapiens
cactctggtgggggg

SEQ ID NO: 703415 - DNA, 15 bp, Homo sapiens
actctggtggggggt

SEQ ID NO: 703416 - DNA, 15 bp, Homo sapiens
ctctggtggggggtg

SEQ ID NO: 703417 - DNA, 15 bp, Homo sapiens
tctggtggggggtgt

SEQ ID NO: 703418 - DNA, 15 bp, Homo sapiens
ctggtggggggtgtt

SEQ ID NO: 703419 - DNA, 15 bp, Homo sapiens
tggtggggggtgttg

SEQ ID NO: 703420 - DNA, 15 bp, Homo sapiens
ggtggggggtgttga

SEQ ID NO: 703421 - DNA, 15 bp, Homo sapiens
gtggggggtgttgac

SEQ ID NO: 703422 - DNA, 15 bp, Homo sapiens
tggggggtgttgaca

SEQ ID NO: 703423 - DNA, 15 bp, Homo sapiens
ggggggtgttgacag

SEQ ID NO: 703424 - DNA, 15 bp, Homo sapiens
gggggtgttgacagc

SEQ ID NO: 703425 - DNA, 15 bp, Homo sapiens
ggggtgttgacagca

SEQ ID NO: 703426 - DNA, 15 bp, Homo sapiens
gggtgttgacagcag

SEQ ID NO: 703427 - DNA, 15 bp, Homo sapiens
ggtgttgacagcagg

SEQ ID NO: 703428 - DNA, 15 bp, Homo sapiens
gtgttgacagcaggg

SEQ ID NO: 703429 - DNA, 15 bp, Homo sapiens
tgttgacagcaggga

SEQ ID NO: 703430 - DNA, 15 bp, Homo sapiens
gttgacagcagggaa

SEQ ID NO: 703431 - DNA, 15 bp, Homo sapiens
ttgacagcagggaag

SEQ ID NO: 703432 - DNA, 15 bp, Homo sapiens
tgacagcagggaagg

SEQ ID NO: 703433 - DNA, 15 bp, Homo sapiens
gacagcagggaaggc

SEQ ID NO: 703434 - DNA, 15 bp, Homo sapiens
acagcagggaaggct

SEQ ID NO: 703435 - DNA, 15 bp, Homo sapiens
cagcagggaaggctg

SEQ ID NO: 703436 - DNA, 15 bp, Homo sapiens
agcagggaaggctgc

SEQ ID NO: 703437 - DNA, 15 bp, Homo sapiens
gcagggaaggctgcg

SEQ ID NO: 703438 - DNA, 15 bp, Homo sapiens
cagggaaggctgcgc

SEQ ID NO: 703439 - DNA, 15 bp, Homo sapiens
agggaaggctgcgca

SEQ ID NO: 703440 - DNA, 15 bp, Homo sapiens
gggaaggctgcgcat

SEQ ID NO: 703441 - DNA, 15 bp, Homo sapiens
ggaaggctgcgcatg

SEQ ID NO: 703442 - DNA, 15 bp, Homo sapiens
gaaggctgcgcatgt

SEQ ID NO: 703443 - DNA, 15 bp, Homo sapiens
aaggctgcgcatgtg

SEQ ID NO: 703444 - DNA, 15 bp, Homo sapiens
aggctgcgcatgtgt

SEQ ID NO: 703445 - DNA, 15 bp, Homo sapiens
ggctgcgcatgtgta

SEQ ID NO: 703446 - DNA, 15 bp, Homo sapiens
gctgcgcatgtgtag

SEQ ID NO: 703447 - DNA, 15 bp, Homo sapiens
ctgcgcatgtgtagg

SEQ ID NO: 703448 - DNA, 15 bp, Homo sapiens
tgcgcatgtgtaggg

SEQ ID NO: 703449 - DNA, 15 bp, Homo sapiens
gcgcatgtgtagggc

SEQ ID NO: 703450 - DNA, 15 bp, Homo sapiens
cgcatgtgtagggca

SEQ ID NO: 703451 - DNA, 15 bp, Homo sapiens
gcatgtgtagggcat

SEQ ID NO: 703452 - DNA, 15 bp, Homo sapiens
catgtgtagggcatg

SEQ ID NO: 703453 - DNA, 15 bp, Homo sapiens
atgtgtagggcatga

SEQ ID NO: 703454 - DNA, 15 bp, Homo sapiens
tgtgtagggcatgag

SEQ ID NO: 703455 - DNA, 15 bp, Homo sapiens
gtgtagggcatgagg

SEQ ID NO: 703456 - DNA, 15 bp, Homo sapiens
tgtagggcatgaggc

SEQ ID NO: 703457 - DNA, 15 bp, Homo sapiens
gtagggcatgaggca

SEQ ID NO: 703458 - DNA, 15 bp, Homo sapiens
tagggcatgaggcat

SEQ ID NO: 703459 - DNA, 15 bp, Homo sapiens
agggcatgaggcata

SEQ ID NO: 703460 - DNA, 15 bp, Homo sapiens
gggcatgaggcataa

SEQ ID NO: 703461 - DNA, 15 bp, Homo sapiens
ggcatgaggcataag

SEQ ID NO: 703462 - DNA, 15 bp, Homo sapiens
gcatgaggcataagg

SEQ ID NO: 703463 - DNA, 15 bp, Homo sapiens
catgaggcataaggg

SEQ ID NO: 703464 - DNA, 15 bp, Homo sapiens
atgaggcataaggga

SEQ ID NO: 703465 - DNA, 15 bp, Homo sapiens
tgaggcataagggaa

SEQ ID NO: 703466 - DNA, 15 bp, Homo sapiens
gaggcataagggaaa

SEQ ID NO: 703467 - DNA, 15 bp, Homo sapiens
aggcataagggaaaa

SEQ ID NO: 703468 - DNA, 15 bp, Homo sapiens
ggcataagggaaaac

SEQ ID NO: 703469 - DNA, 15 bp, Homo sapiens
gcataagggaaaact

SEQ ID NO: 703470 - DNA, 15 bp, Homo sapiens
cataagggaaaactg

SEQ ID NO: 703471 - DNA, 15 bp, Homo sapiens
ataagggaaaactgt

SEQ ID NO: 703472 - DNA, 15 bp, Homo sapiens
taagggaaaactgtg

SEQ ID NO: 703473 - DNA, 15 bp, Homo sapiens
aagggaaaactgtgt

SEQ ID NO: 703474 - DNA, 15 bp, Homo sapiens
agggaaaactgtgtt

SEQ ID NO: 703475 - DNA, 15 bp, Homo sapiens
gggaaaactgtgttt

SEQ ID NO: 703476 - DNA, 15 bp, Homo sapiens
ggaaaactgtgtttt

SEQ ID NO: 703477 - DNA, 15 bp, Homo sapiens
gaaaactgtgttttc

SEQ ID NO: 703478 - DNA, 15 bp, Homo sapiens
aaaactgtgttttct

SEQ ID NO: 703479 - DNA, 15 bp, Homo sapiens
aaactgtgttttctt

SEQ ID NO: 703480 - DNA, 15 bp, Homo sapiens
aactgtgttttcttc

SEQ ID NO: 703481 - DNA, 15 bp, Homo sapiens
actgtgttttcttca

SEQ ID NO: 703482 - DNA, 15 bp, Homo sapiens
ctgtgttttcttcac

SEQ ID NO: 703483 - DNA, 15 bp, Homo sapiens
tgtgttttcttcaca

SEQ ID NO: 703484 - DNA, 15 bp, Homo sapiens
gtgttttcttcacag

SEQ ID NO: 703485 - DNA, 15 bp, Homo sapiens
tgttttcttcacagt

SEQ ID NO: 703486 - DNA, 15 bp, Homo sapiens
gttttcttcacagtt

SEQ ID NO: 703487 - DNA, 15 bp, Homo sapiens
ttttcttcacagttt

SEQ ID NO: 703488 - DNA, 15 bp, Homo sapiens
tttcttcacagtttt

SEQ ID NO: 703489 - DNA, 15 bp, Homo sapiens
ttcttcacagttttg

SEQ ID NO: 703490 - DNA, 15 bp, Homo sapiens
tcttcacagttttgc

SEQ ID NO: 703491 - DNA, 15 bp, Homo sapiens
cttcacagttttgct

SEQ ID NO: 703492 - DNA, 15 bp, Homo sapiens
ttcacagttttgctg

SEQ ID NO: 703493 - DNA, 15 bp, Homo sapiens
tcacagttttgctgt

SEQ ID NO: 703494 - DNA, 15 bp, Homo sapiens
cacagttttgctgtg

SEQ ID NO: 703495 - DNA, 15 bp, Homo sapiens
acagttttgctgtga

SEQ ID NO: 703496 - DNA, 15 bp, Homo sapiens
cagttttgctgtgaa

SEQ ID NO: 703497 - DNA, 15 bp, Homo sapiens
agttttgctgtgaac

SEQ ID NO: 703498 - DNA, 15 bp, Homo sapiens
gttttgctgtgaacc

SEQ ID NO: 703499 - DNA, 15 bp, Homo sapiens
ttttgctgtgaacct

SEQ ID NO: 703500 - DNA, 15 bp, Homo sapiens
tttgctgtgaaccta

SEQ ID NO: 703501 - DNA, 15 bp, Homo sapiens
ttgctgtgaacctaa

SEQ ID NO: 703502 - DNA, 15 bp, Homo sapiens
tgctgtgaacctaaa

SEQ ID NO: 703503 - DNA, 15 bp, Homo sapiens
gctgtgaacctaaaa

SEQ ID NO: 703504 - DNA, 15 bp, Homo sapiens
ctgtgaacctaaaac

SEQ ID NO: 703505 - DNA, 15 bp, Homo sapiens
tgtgaacctaaaact

SEQ ID NO: 703506 - DNA, 15 bp, Homo sapiens
gtgaacctaaaactg

SEQ ID NO: 703507 - DNA, 15 bp, Homo sapiens
tgaacctaaaactgc

SEQ ID NO: 703508 - DNA, 15 bp, Homo sapiens
gaacctaaaactgct

SEQ ID NO: 703509 - DNA, 15 bp, Homo sapiens
aacctaaaactgctc

SEQ ID NO: 703510 - DNA, 15 bp, Homo sapiens
acctaaaactgctct

SEQ ID NO: 703511 - DNA, 15 bp, Homo sapiens
cctaaaactgctcta

SEQ ID NO: 703512 - DNA, 15 bp, Homo sapiens
ctaaaactgctctac

SEQ ID NO: 703513 - DNA, 15 bp, Homo sapiens
taaaactgctctaca

SEQ ID NO: 703514 - DNA, 15 bp, Homo sapiens
aaaactgctctacaa

SEQ ID NO: 703515 - DNA, 15 bp, Homo sapiens
aaactgctctacaaa

SEQ ID NO: 703516 - DNA, 15 bp, Homo sapiens
aactgctctacaaaa

SEQ ID NO: 703517 - DNA, 15 bp, Homo sapiens
actgctctacaaaaa

SEQ ID NO: 703518 - DNA, 15 bp, Homo sapiens
ctgctctacaaaaat

SEQ ID NO: 703519 - DNA, 15 bp, Homo sapiens
tgctctacaaaaata

SEQ ID NO: 703520 - DNA, 15 bp, Homo sapiens
gctctacaaaaatag

SEQ ID NO: 703521 - DNA, 15 bp, Homo sapiens
ctctacaaaaatagt

SEQ ID NO: 703522 - DNA, 15 bp, Homo sapiens
tctacaaaaatagtc

SEQ ID NO: 703523 - DNA, 15 bp, Homo sapiens
ctacaaaaatagtct

SEQ ID NO: 703524 - DNA, 15 bp, Homo sapiens
tacaaaaatagtctt

SEQ ID NO: 703525 - DNA, 15 bp, Homo sapiens
acaaaaatagtcttc

SEQ ID NO: 703526 - DNA, 15 bp, Homo sapiens
caaaaatagtcttca

SEQ ID NO: 703527 - DNA, 15 bp, Homo sapiens
aaaaatagtcttcaa

SEQ ID NO: 703528 - DNA, 15 bp, Homo sapiens
aaaatagtcttcaaa

SEQ ID NO: 703529 - DNA, 15 bp, Homo sapiens
aaatagtcttcaaaa

SEQ ID NO: 703530 - DNA, 15 bp, Homo sapiens
aatagtcttcaaaaa

SEQ ID NO: 703531 - DNA, 15 bp, Homo sapiens
atagtcttcaaaaaa

SEQ ID NO: 703532 - DNA, 15 bp, Homo sapiens
tagtcttcaaaaaag

SEQ ID NO: 703533 - DNA, 15 bp, Homo sapiens
agtcttcaaaaaagt

SEQ ID NO: 703534 - DNA, 15 bp, Homo sapiens
gtcttcaaaaaagtc

SEQ ID NO: 703535 - DNA, 15 bp, Homo sapiens
tcttcaaaaaagtca

SEQ ID NO: 703536 - DNA, 15 bp, Homo sapiens
cttcaaaaaagtcac

SEQ ID NO: 703537 - DNA, 15 bp, Homo sapiens
ttcaaaaaagtcacc

SEQ ID NO: 703538 - DNA, 15 bp, Homo sapiens
tcaaaaaagtcacct

SEQ ID NO: 703539 - DNA, 15 bp, Homo sapiens
caaaaaagtcacctc

SEQ ID NO: 703540 - DNA, 15 bp, Homo sapiens
aaaaaagtcacctca

SEQ ID NO: 703541 - DNA, 15 bp, Homo sapiens
aaaaagtcacctcac

SEQ ID NO: 703542 - DNA, 15 bp, Homo sapiens
aaaagtcacctcacc

SEQ ID NO: 703543 - DNA, 15 bp, Homo sapiens
aaagtcacctcacca

SEQ ID NO: 703544 - DNA, 15 bp, Homo sapiens
aagtcacctcaccaa

SEQ ID NO: 703545 - DNA, 15 bp, Homo sapiens
agtcacctcaccaat

SEQ ID NO: 703546 - DNA, 15 bp, Homo sapiens
gtcacctcaccaata

SEQ ID NO: 703547 - DNA, 15 bp, Homo sapiens
tcacctcaccaataa

SEQ ID NO: 703548 - DNA, 15 bp, Homo sapiens
cacctcaccaataaa

SEQ ID NO: 703549 - DNA, 15 bp, Homo sapiens
acctcaccaataaag

SEQ ID NO: 703550 - DNA, 15 bp, Homo sapiens
cctcaccaataaaga

SEQ ID NO: 703551 - DNA, 15 bp, Homo sapiens
ctcaccaataaagag

SEQ ID NO: 703552 - DNA, 15 bp, Homo sapiens
tcaccaataaagagc

SEQ ID NO: 703553 - DNA, 15 bp, Homo sapiens
caccaataaagagca

SEQ ID NO: 703554 - DNA, 15 bp, Homo sapiens
accaataaagagcag

SEQ ID NO: 703555 - DNA, 15 bp, Homo sapiens
ccaataaagagcaga

SEQ ID NO: 703556 - DNA, 15 bp, Homo sapiens
caataaagagcagac

SEQ ID NO: 703557 - DNA, 15 bp, Homo sapiens
aataaagagcagacc

SEQ ID NO: 703558 - DNA, 15 bp, Homo sapiens
ataaagagcagacca

SEQ ID NO: 703559 - DNA, 15 bp, Homo sapiens
taaagagcagaccaa

SEQ ID NO: 703560 - DNA, 15 bp, Homo sapiens
aaagagcagaccaag

SEQ ID NO: 703561 - DNA, 15 bp, Homo sapiens
aagagcagaccaaga

SEQ ID NO: 703562 - DNA, 15 bp, Homo sapiens
agagcagaccaagac

SEQ ID NO: 703563 - DNA, 15 bp, Homo sapiens
gagcagaccaagaca

SEQ ID NO: 703564 - DNA, 15 bp, Homo sapiens
agcagaccaagacaa

SEQ ID NO: 703565 - DNA, 15 bp, Homo sapiens
gcagaccaagacaat

SEQ ID NO: 703566 - DNA, 15 bp, Homo sapiens
cagaccaagacaata

SEQ ID NO: 703567 - DNA, 15 bp, Homo sapiens
agaccaagacaataa

SEQ ID NO: 703568 - DNA, 15 bp, Homo sapiens
gaccaagacaataat

SEQ ID NO: 703569 - DNA, 15 bp, Homo sapiens
accaagacaataata

SEQ ID NO: 703570 - DNA, 15 bp, Homo sapiens
ccaagacaataatat

SEQ ID NO: 703571 - DNA, 15 bp, Homo sapiens
caagacaataatatg

SEQ ID NO: 703572 - DNA, 15 bp, Homo sapiens
aagacaataatatga

SEQ ID NO: 703573 - DNA, 15 bp, Homo sapiens
agacaataatatgaa

SEQ ID NO: 703574 - DNA, 15 bp, Homo sapiens
gacaataatatgaat

SEQ ID NO: 703575 - DNA, 15 bp, Homo sapiens
acaataatatgaatg

SEQ ID NO: 703576 - DNA, 15 bp, Homo sapiens
caataatatgaatga

SEQ ID NO: 703577 - DNA, 15 bp, Homo sapiens
aataatatgaatgat

SEQ ID NO: 703578 - DNA, 15 bp, Homo sapiens
ataatatgaatgata

SEQ ID NO: 703579 - DNA, 15 bp, Homo sapiens
taatatgaatgataa

SEQ ID NO: 703580 - DNA, 15 bp, Homo sapiens
aatatgaatgataat

SEQ ID NO: 703581 - DNA, 15 bp, Homo sapiens
atatgaatgataatt

SEQ ID NO: 703582 - DNA, 15 bp, Homo sapiens
tatgaatgataatta

SEQ ID NO: 703583 - DNA, 15 bp, Homo sapiens
atgaatgataattag

SEQ ID NO: 703584 - DNA, 15 bp, Homo sapiens
tgaatgataattagg

SEQ ID NO: 703585 - DNA, 15 bp, Homo sapiens
gaatgataattaggt

SEQ ID NO: 703586 - DNA, 15 bp, Homo sapiens
aatgataattaggtt

SEQ ID NO: 703587 - DNA, 15 bp, Homo sapiens
atgataattaggttg

SEQ ID NO: 703588 - DNA, 15 bp, Homo sapiens
tgataattaggttgt

SEQ ID NO: 703589 - DNA, 15 bp, Homo sapiens
gataattaggttgtt

SEQ ID NO: 703590 - DNA, 15 bp, Homo sapiens
ataattaggttgttt

SEQ ID NO: 703591 - DNA, 15 bp, Homo sapiens
taattaggttgttta

SEQ ID NO: 703592 - DNA, 15 bp, Homo sapiens
aattaggttgtttat

SEQ ID NO: 703593 - DNA, 15 bp, Homo sapiens
attaggttgtttata

SEQ ID NO: 703594 - DNA, 15 bp, Homo sapiens
ttaggttgtttataa

SEQ ID NO: 703595 - DNA, 15 bp, Homo sapiens
taggttgtttataag

SEQ ID NO: 703596 - DNA, 15 bp, Homo sapiens
aggttgtttataagc

SEQ ID NO: 703597 - DNA, 15 bp, Homo sapiens
ggttgtttataagct

SEQ ID NO: 703598 - DNA, 15 bp, Homo sapiens
gttgtttataagcta

SEQ ID NO: 703599 - DNA, 15 bp, Homo sapiens
ttgtttataagctat

SEQ ID NO: 703600 - DNA, 15 bp, Homo sapiens
tgtttataagctatt

SEQ ID NO: 703601 - DNA, 15 bp, Homo sapiens
gtttataagctattt

SEQ ID NO: 703602 - DNA, 15 bp, Homo sapiens
tttataagctatttg

SEQ ID NO: 703603 - DNA, 15 bp, Homo sapiens
ttataagctatttgt

SEQ ID NO: 703604 - DNA, 15 bp, Homo sapiens
tataagctatttgtg

SEQ ID NO: 703605 - DNA, 15 bp, Homo sapiens
ataagctatttgtgg

SEQ ID NO: 703606 - DNA, 15 bp, Homo sapiens
taagctatttgtggt

SEQ ID NO: 703607 - DNA, 15 bp, Homo sapiens
aagctatttgtggtc

SEQ ID NO: 703608 - DNA, 15 bp, Homo sapiens
agctatttgtggtct

SEQ ID NO: 703609 - DNA, 15 bp, Homo sapiens
gctatttgtggtcta

SEQ ID NO: 703610 - DNA, 15 bp, Homo sapiens
ctatttgtggtctag

SEQ ID NO: 703611 - DNA, 15 bp, Homo sapiens
tatttgtggtctagg

SEQ ID NO: 703612 - DNA, 15 bp, Homo sapiens
atttgtggtctaggg

SEQ ID NO: 703613 - DNA, 15 bp, Homo sapiens
tttgtggtctagggt

SEQ ID NO: 703614 - DNA, 15 bp, Homo sapiens
ttgtggtctagggtg

SEQ ID NO: 703615 - DNA, 15 bp, Homo sapiens
tgtggtctagggtgg

SEQ ID NO: 703616 - DNA, 15 bp, Homo sapiens
gtggtctagggtggg

SEQ ID NO: 703617 - DNA, 15 bp, Homo sapiens
tggtctagggtgggc

SEQ ID NO: 703618 - DNA, 15 bp, Homo sapiens
ggtctagggtgggct

SEQ ID NO: 703619 - DNA, 15 bp, Homo sapiens
gtctagggtgggctt

SEQ ID NO: 703620 - DNA, 15 bp, Homo sapiens
tctagggtgggcttt

SEQ ID NO: 703621 - DNA, 15 bp, Homo sapiens
ctagggtgggctttc

SEQ ID NO: 703622 - DNA, 15 bp, Homo sapiens
tagggtgggctttcc

SEQ ID NO: 703623 - DNA, 15 bp, Homo sapiens
agggtgggctttcct

SEQ ID NO: 703624 - DNA, 15 bp, Homo sapiens
gggtgggctttccta

SEQ ID NO: 703625 - DNA, 15 bp, Homo sapiens
ggtgggctttcctat

SEQ ID NO: 703626 - DNA, 15 bp, Homo sapiens
gtgggctttcctatg

SEQ ID NO: 703627 - DNA, 15 bp, Homo sapiens
tgggctttcctatga

SEQ ID NO: 703628 - DNA, 15 bp, Homo sapiens
gggctttcctatgag

SEQ ID NO: 703629 - DNA, 15 bp, Homo sapiens
ggctttcctatgaga

SEQ ID NO: 703630 - DNA, 15 bp, Homo sapiens
gctttcctatgagac

SEQ ID NO: 703631 - DNA, 15 bp, Homo sapiens
ctttcctatgagact

SEQ ID NO: 703632 - DNA, 15 bp, Homo sapiens
tttcctatgagactt

SEQ ID NO: 703633 - DNA, 15 bp, Homo sapiens
ttcctatgagacttt

SEQ ID NO: 703634 - DNA, 15 bp, Homo sapiens
tcctatgagacttta

SEQ ID NO: 703635 - DNA, 15 bp, Homo sapiens
cctatgagactttat

SEQ ID NO: 703636 - DNA, 15 bp, Homo sapiens
ctatgagactttatc

SEQ ID NO: 703637 - DNA, 15 bp, Homo sapiens
tatgagactttatcc

SEQ ID NO: 703638 - DNA, 15 bp, Homo sapiens
atgagactttatccg

SEQ ID NO: 703639 - DNA, 15 bp, Homo sapiens
tgagactttatccga

SEQ ID NO: 703640 - DNA, 15 bp, Homo sapiens
gagactttatccgag

SEQ ID NO: 703641 - DNA, 15 bp, Homo sapiens
agactttatccgagt

SEQ ID NO: 703642 - DNA, 15 bp, Homo sapiens
gactttatccgagta

SEQ ID NO: 703643 - DNA, 15 bp, Homo sapiens
actttatccgagtaa

SEQ ID NO: 703644 - DNA, 15 bp, Homo sapiens
ctttatccgagtaac

SEQ ID NO: 703645 - DNA, 15 bp, Homo sapiens
tttatccgagtaact

SEQ ID NO: 703646 - DNA, 15 bp, Homo sapiens
ttatccgagtaactg

SEQ ID NO: 703647 - DNA, 15 bp, Homo sapiens
tatccgagtaactgc

SEQ ID NO: 703648 - DNA, 15 bp, Homo sapiens
atccgagtaactgct

SEQ ID NO: 703649 - DNA, 15 bp, Homo sapiens
tccgagtaactgctt

SEQ ID NO: 703650 - DNA, 15 bp, Homo sapiens
ccgagtaactgcttg

SEQ ID NO: 703651 - DNA, 15 bp, Homo sapiens
cgagtaactgcttga

SEQ ID NO: 703652 - DNA, 15 bp, Homo sapiens
gagtaactgcttgat

SEQ ID NO: 703653 - DNA, 15 bp, Homo sapiens
agtaactgcttgata

SEQ ID NO: 703654 - DNA, 15 bp, Homo sapiens
gtaactgcttgataa

SEQ ID NO: 703655 - DNA, 15 bp, Homo sapiens
taactgcttgataag

SEQ ID NO: 703656 - DNA, 15 bp, Homo sapiens
aactgcttgataaga

SEQ ID NO: 703657 - DNA, 15 bp, Homo sapiens
actgcttgataagag

SEQ ID NO: 703658 - DNA, 15 bp, Homo sapiens
ctgcttgataagagc

SEQ ID NO: 703659 - DNA, 15 bp, Homo sapiens
tgcttgataagagca

SEQ ID NO: 703660 - DNA, 15 bp, Homo sapiens
gcttgataagagcat

SEQ ID NO: 703661 - DNA, 15 bp, Homo sapiens
cttgataagagcata

SEQ ID NO: 703662 - DNA, 15 bp, Homo sapiens
ttgataagagcataa

SEQ ID NO: 703663 - DNA, 15 bp, Homo sapiens
tgataagagcataat

SEQ ID NO: 703664 - DNA, 15 bp, Homo sapiens
gataagagcataata

SEQ ID NO: 703665 - DNA, 15 bp, Homo sapiens
ataagagcataatat

SEQ ID NO: 703666 - DNA, 15 bp, Homo sapiens
taagagcataatata

SEQ ID NO: 703667 - DNA, 15 bp, Homo sapiens
aagagcataatatat

SEQ ID NO: 703668 - DNA, 15 bp, Homo sapiens
agagcataatatatc

SEQ ID NO: 703669 - DNA, 15 bp, Homo sapiens
gagcataatatatcc

SEQ ID NO: 703670 - DNA, 15 bp, Homo sapiens
agcataatatatcca

SEQ ID NO: 703671 - DNA, 15 bp, Homo sapiens
gcataatatatccaa

SEQ ID NO: 703672 - DNA, 15 bp, Homo sapiens
cataatatatccaat

SEQ ID NO: 703673 - DNA, 15 bp, Homo sapiens
ataatatatccaatt

SEQ ID NO: 703674 - DNA, 15 bp, Homo sapiens
taatatatccaattt

SEQ ID NO: 703675 - DNA, 15 bp, Homo sapiens
aatatatccaattta

SEQ ID NO: 703676 - DNA, 15 bp, Homo sapiens
atatatccaatttat

SEQ ID NO: 703677 - DNA, 15 bp, Homo sapiens
tatatccaatttatt

SEQ ID NO: 703678 - DNA, 15 bp, Homo sapiens
atatccaatttattt

SEQ ID NO: 703679 - DNA, 15 bp, Homo sapiens
tatccaatttattta

SEQ ID NO: 703680 - DNA, 15 bp, Homo sapiens
atccaatttatttat

SEQ ID NO: 703681 - DNA, 15 bp, Homo sapiens
tccaatttatttatg

SEQ ID NO: 703682 - DNA, 15 bp, Homo sapiens
ccaatttatttatgt

SEQ ID NO: 703683 - DNA, 15 bp, Homo sapiens
caatttatttatgta

SEQ ID NO: 703684 - DNA, 15 bp, Homo sapiens
aatttatttatgtac

SEQ ID NO: 703685 - DNA, 15 bp, Homo sapiens
atttatttatgtaca

SEQ ID NO: 703686 - DNA, 15 bp, Homo sapiens
tttatttatgtacat

SEQ ID NO: 703687 - DNA, 15 bp, Homo sapiens
ttatttatgtacatc

SEQ ID NO: 703688 - DNA, 15 bp, Homo sapiens
tatttatgtacatct

SEQ ID NO: 703689 - DNA, 15 bp, Homo sapiens
atttatgtacatcta

SEQ ID NO: 703690 - DNA, 15 bp, Homo sapiens
tttatgtacatctaa

SEQ ID NO: 703691 - DNA, 15 bp, Homo sapiens
ttatgtacatctaag

SEQ ID NO: 703692 - DNA, 15 bp, Homo sapiens
tatgtacatctaaga

SEQ ID NO: 703693 - DNA, 15 bp, Homo sapiens
atgtacatctaagag

SEQ ID NO: 703694 - DNA, 15 bp, Homo sapiens
tgtacatctaagaga

SEQ ID NO: 703695 - DNA, 15 bp, Homo sapiens
gtacatctaagagac

SEQ ID NO: 703696 - DNA, 15 bp, Homo sapiens
tacatctaagagaca

SEQ ID NO: 703697 - DNA, 15 bp, Homo sapiens
acatctaagagacat

SEQ ID NO: 703698 - DNA, 15 bp, Homo sapiens
catctaagagacatg

SEQ ID NO: 703699 - DNA, 15 bp, Homo sapiens
atctaagagacatga

SEQ ID NO: 703700 - DNA, 15 bp, Homo sapiens
tctaagagacatgag

SEQ ID NO: 703701 - DNA, 15 bp, Homo sapiens
ctaagagacatgagg

SEQ ID NO: 703702 - DNA, 15 bp, Homo sapiens
taagagacatgaggt

SEQ ID NO: 703703 - DNA, 15 bp, Homo sapiens
aagagacatgaggtt

SEQ ID NO: 703704 - DNA, 15 bp, Homo sapiens
agagacatgaggttg

SEQ ID NO: 703705 - DNA, 15 bp, Homo sapiens
gagacatgaggttga

SEQ ID NO: 703706 - DNA, 15 bp, Homo sapiens
agacatgaggttgac

SEQ ID NO: 703707 - DNA, 15 bp, Homo sapiens
gacatgaggttgaca

SEQ ID NO: 703708 - DNA, 15 bp, Homo sapiens
acatgaggttgacat

SEQ ID NO: 703709 - DNA, 15 bp, Homo sapiens
catgaggttgacatt

SEQ ID NO: 703710 - DNA, 15 bp, Homo sapiens
atgaggttgacattt

SEQ ID NO: 703711 - DNA, 15 bp, Homo sapiens
tgaggttgacatttt

SEQ ID NO: 703712 - DNA, 15 bp, Homo sapiens
gaggttgacatttta

SEQ ID NO: 703713 - DNA, 15 bp, Homo sapiens
aggttgacattttat

SEQ ID NO: 703714 - DNA, 15 bp, Homo sapiens
ggttgacattttata

SEQ ID NO: 703715 - DNA, 15 bp, Homo sapiens
gttgacattttataa

SEQ ID NO: 703716 - DNA, 15 bp, Homo sapiens
ttgacattttataat

SEQ ID NO: 703717 - DNA, 15 bp, Homo sapiens
tgacattttataatt

SEQ ID NO: 703718 - DNA, 15 bp, Homo sapiens
gacattttataattt

SEQ ID NO: 703719 - DNA, 15 bp, Homo sapiens
acattttataatttt

SEQ ID NO: 703720 - DNA, 15 bp, Homo sapiens
cattttataattttg

SEQ ID NO: 703721 - DNA, 15 bp, Homo sapiens
attttataattttgc

SEQ ID NO: 703722 - DNA, 15 bp, Homo sapiens
ttttataattttgct

SEQ ID NO: 703723 - DNA, 15 bp, Homo sapiens
tttataattttgctg

SEQ ID NO: 703724 - DNA, 15 bp, Homo sapiens
ttataattttgctgc

SEQ ID NO: 703725 - DNA, 15 bp, Homo sapiens
tataattttgctgct

SEQ ID NO: 703726 - DNA, 15 bp, Homo sapiens
ataattttgctgctg

SEQ ID NO: 703727 - DNA, 15 bp, Homo sapiens
taattttgctgctgt

SEQ ID NO: 703728 - DNA, 15 bp, Homo sapiens
aattttgctgctgtt

SEQ ID NO: 703729 - DNA, 15 bp, Homo sapiens
attttgctgctgttt

SEQ ID NO: 703730 - DNA, 15 bp, Homo sapiens
ttttgctgctgtttt

SEQ ID NO: 703731 - DNA, 15 bp, Homo sapiens
tttgctgctgttttg

SEQ ID NO: 703732 - DNA, 15 bp, Homo sapiens
ttgctgctgttttgg

SEQ ID NO: 703733 - DNA, 15 bp, Homo sapiens
tgctgctgttttggg

SEQ ID NO: 703734 - DNA, 15 bp, Homo sapiens
gctgctgttttggga

SEQ ID NO: 703735 - DNA, 15 bp, Homo sapiens
ctgctgttttgggat

SEQ ID NO: 703736 - DNA, 15 bp, Homo sapiens
tgctgttttgggatt

SEQ ID NO: 703737 - DNA, 15 bp, Homo sapiens
gctgttttgggatta

SEQ ID NO: 703738 - DNA, 15 bp, Homo sapiens
ctgttttgggattaa

SEQ ID NO: 703739 - DNA, 15 bp, Homo sapiens
tgttttgggattaaa

SEQ ID NO: 703740 - DNA, 15 bp, Homo sapiens
gttttgggattaaaa

SEQ ID NO: 703741 - DNA, 15 bp, Homo sapiens
ttttgggattaaaaa

SEQ ID NO: 703742 - DNA, 15 bp, Homo sapiens
tttgggattaaaaaa

SEQ ID NO: 703743 - DNA, 15 bp, Homo sapiens
ttgggattaaaaaaa

SEQ ID NO: 703744 - DNA, 15 bp, Homo sapiens
tgggattaaaaaaaa

SEQ ID NO: 703745 - DNA, 15 bp, Homo sapiens
gggattaaaaaaaac

SEQ ID NO: 703746 - DNA, 15 bp, Homo sapiens
ggattaaaaaaaacc

SEQ ID NO: 703747 - DNA, 15 bp, Homo sapiens
gattaaaaaaaaccc

SEQ ID NO: 703748 - DNA, 15 bp, Homo sapiens
attaaaaaaaacccc

SEQ ID NO: 703749 - DNA, 15 bp, Homo sapiens
ttaaaaaaaacccca

SEQ ID NO: 703750 - DNA, 15 bp, Homo sapiens
taaaaaaaaccccaa

SEQ ID NO: 703751 - DNA, 15 bp, Homo sapiens
aaaaaaaaccccaac

SEQ ID NO: 703752 - DNA, 15 bp, Homo sapiens
aaaaaaaccccaaca

SEQ ID NO: 703753 - DNA, 15 bp, Homo sapiens
aaaaaaccccaacac

SEQ ID NO: 703754 - DNA, 15 bp, Homo sapiens
aaaaaccccaacaca

SEQ ID NO: 703755 - DNA, 15 bp, Homo sapiens
aaaaccccaacacat

SEQ ID NO: 703756 - DNA, 15 bp, Homo sapiens
aaaccccaacacatt

SEQ ID NO: 703757 - DNA, 15 bp, Homo sapiens
aaccccaacacattt

SEQ ID NO: 703758 - DNA, 15 bp, Homo sapiens
accccaacacatttg

SEQ ID NO: 703759 - DNA, 15 bp, Homo sapiens
ccccaacacatttgt

SEQ ID NO: 703760 - DNA, 15 bp, Homo sapiens
cccaacacatttgtt

SEQ ID NO: 703761 - DNA, 15 bp, Homo sapiens
ccaacacatttgttc

SEQ ID NO: 703762 - DNA, 15 bp, Homo sapiens
caacacatttgttct

SEQ ID NO: 703763 - DNA, 15 bp, Homo sapiens
aacacatttgttctg

SEQ ID NO: 703764 - DNA, 15 bp, Homo sapiens
acacatttgttctgt

SEQ ID NO: 703765 - DNA, 15 bp, Homo sapiens
cacatttgttctgtt

SEQ ID NO: 703766 - DNA, 15 bp, Homo sapiens
acatttgttctgtta

SEQ ID NO: 703767 - DNA, 15 bp, Homo sapiens
catttgttctgttat

SEQ ID NO: 703768 - DNA, 15 bp, Homo sapiens
atttgttctgttatc

SEQ ID NO: 703769 - DNA, 15 bp, Homo sapiens
tttgttctgttatct

SEQ ID NO: 703770 - DNA, 15 bp, Homo sapiens
ttgttctgttatctg

SEQ ID NO: 703771 - DNA, 15 bp, Homo sapiens
tgttctgttatctgc

SEQ ID NO: 703772 - DNA, 15 bp, Homo sapiens
gttctgttatctgca

SEQ ID NO: 703773 - DNA, 15 bp, Homo sapiens
ttctgttatctgcaa

SEQ ID NO: 703774 - DNA, 15 bp, Homo sapiens
tctgttatctgcaaa

SEQ ID NO: 703775 - DNA, 15 bp, Homo sapiens
ctgttatctgcaaat

SEQ ID NO: 703776 - DNA, 15 bp, Homo sapiens
tgttatctgcaaata

SEQ ID NO: 703777 - DNA, 15 bp, Homo sapiens
gttatctgcaaataa

SEQ ID NO: 703778 - DNA, 15 bp, Homo sapiens
ttatctgcaaataag

SEQ ID NO: 703779 - DNA, 15 bp, Homo sapiens
tatctgcaaataagc

SEQ ID NO: 703780 - DNA, 15 bp, Homo sapiens
atctgcaaataagca

SEQ ID NO: 703781 - DNA, 15 bp, Homo sapiens
tctgcaaataagcac

SEQ ID NO: 703782 - DNA, 15 bp, Homo sapiens
ctgcaaataagcact

SEQ ID NO: 703783 - DNA, 15 bp, Homo sapiens
tgcaaataagcactt

SEQ ID NO: 703784 - DNA, 15 bp, Homo sapiens
gcaaataagcacttt

SEQ ID NO: 703785 - DNA, 15 bp, Homo sapiens
caaataagcacttta

SEQ ID NO: 703786 - DNA, 15 bp, Homo sapiens
aaataagcactttat

SEQ ID NO: 703787 - DNA, 15 bp, Homo sapiens
aataagcactttatt

SEQ ID NO: 703788 - DNA, 15 bp, Homo sapiens
ataagcactttatta

SEQ ID NO: 703789 - DNA, 15 bp, Homo sapiens
taagcactttattac

SEQ ID NO: 703790 - DNA, 15 bp, Homo sapiens
aagcactttattacc

SEQ ID NO: 703791 - DNA, 15 bp, Homo sapiens
agcactttattacca

SEQ ID NO: 703792 - DNA, 15 bp, Homo sapiens
gcactttattaccaa

SEQ ID NO: 703793 - DNA, 15 bp, Homo sapiens
cactttattaccaaa

SEQ ID NO: 703794 - DNA, 15 bp, Homo sapiens
actttattaccaaat

SEQ ID NO: 703795 - DNA, 15 bp, Homo sapiens
ctttattaccaaata

SEQ ID NO: 703796 - DNA, 15 bp, Homo sapiens
tttattaccaaatag

SEQ ID NO: 703797 - DNA, 15 bp, Homo sapiens
ttattaccaaatagt

SEQ ID NO: 703798 - DNA, 15 bp, Homo sapiens
tattaccaaatagtt

SEQ ID NO: 703799 - DNA, 15 bp, Homo sapiens
attaccaaatagttc

SEQ ID NO: 703800 - DNA, 15 bp, Homo sapiens
ttaccaaatagttca

SEQ ID NO: 703801 - DNA, 15 bp, Homo sapiens
taccaaatagttcag

SEQ ID NO: 703802 - DNA, 15 bp, Homo sapiens
accaaatagttcagc

SEQ ID NO: 703803 - DNA, 15 bp, Homo sapiens
ccaaatagttcagca

SEQ ID NO: 703804 - DNA, 15 bp, Homo sapiens
caaatagttcagcat

SEQ ID NO: 703805 - DNA, 15 bp, Homo sapiens
aaatagttcagcatc

SEQ ID NO: 703806 - DNA, 15 bp, Homo sapiens
aatagttcagcatca

SEQ ID NO: 703807 - DNA, 15 bp, Homo sapiens
atagttcagcatcag

SEQ ID NO: 703808 - DNA, 15 bp, Homo sapiens
tagttcagcatcaga

SEQ ID NO: 703809 - DNA, 15 bp, Homo sapiens
agttcagcatcagaa

SEQ ID NO: 703810 - DNA, 15 bp, Homo sapiens
gttcagcatcagaac

SEQ ID NO: 703811 - DNA, 15 bp, Homo sapiens
ttcagcatcagaaca

SEQ ID NO: 703812 - DNA, 15 bp, Homo sapiens
tcagcatcagaacaa

SEQ ID NO: 703813 - DNA, 15 bp, Homo sapiens
cagcatcagaacaag

SEQ ID NO: 703814 - DNA, 15 bp, Homo sapiens
agcatcagaacaaga

SEQ ID NO: 703815 - DNA, 15 bp, Homo sapiens
gcatcagaacaagaa

SEQ ID NO: 703816 - DNA, 15 bp, Homo sapiens
catcagaacaagaat

SEQ ID NO: 703817 - DNA, 15 bp, Homo sapiens
atcagaacaagaatt

SEQ ID NO: 703818 - DNA, 15 bp, Homo sapiens
tcagaacaagaattc

SEQ ID NO: 703819 - DNA, 15 bp, Homo sapiens
cagaacaagaattct

SEQ ID NO: 703820 - DNA, 15 bp, Homo sapiens
agaacaagaattcta

SEQ ID NO: 703821 - DNA, 15 bp, Homo sapiens
gaacaagaattctaa

SEQ ID NO: 703822 - DNA, 15 bp, Homo sapiens
aacaagaattctaat

SEQ ID NO: 703823 - DNA, 15 bp, Homo sapiens
acaagaattctaatt

SEQ ID NO: 703824 - DNA, 15 bp, Homo sapiens
caagaattctaattc

SEQ ID NO: 703825 - DNA, 15 bp, Homo sapiens
aagaattctaattcc

SEQ ID NO: 703826 - DNA, 15 bp, Homo sapiens
agaattctaattcca

SEQ ID NO: 703827 - DNA, 15 bp, Homo sapiens
gaattctaattccaa

SEQ ID NO: 703828 - DNA, 15 bp, Homo sapiens
aattctaattccaaa

SEQ ID NO: 703829 - DNA, 15 bp, Homo sapiens
attctaattccaaaa

SEQ ID NO: 703830 - DNA, 15 bp, Homo sapiens
ttctaattccaaaag

SEQ ID NO: 703831 - DNA, 15 bp, Homo sapiens
tctaattccaaaagg

SEQ ID NO: 703832 - DNA, 15 bp, Homo sapiens
ctaattccaaaaggg

SEQ ID NO: 703833 - DNA, 15 bp, Homo sapiens
taattccaaaagggt

SEQ ID NO: 703834 - DNA, 15 bp, Homo sapiens
aattccaaaagggtt

SEQ ID NO: 703835 - DNA, 15 bp, Homo sapiens
attccaaaagggttt

SEQ ID NO: 703836 - DNA, 15 bp, Homo sapiens
ttccaaaagggtttc

SEQ ID NO: 703837 - DNA, 15 bp, Homo sapiens
tccaaaagggtttcc

SEQ ID NO: 703838 - DNA, 15 bp, Homo sapiens
ccaaaagggtttcct

SEQ ID NO: 703839 - DNA, 15 bp, Homo sapiens
caaaagggtttcctt

SEQ ID NO: 703840 - DNA, 15 bp, Homo sapiens
aaaagggtttccttt

SEQ ID NO: 703841 - DNA, 15 bp, Homo sapiens
aaagggtttccttta

SEQ ID NO: 703842 - DNA, 15 bp, Homo sapiens
aagggtttcctttac

SEQ ID NO: 703843 - DNA, 15 bp, Homo sapiens
agggtttcctttaca

SEQ ID NO: 703844 - DNA, 15 bp, Homo sapiens
gggtttcctttacat

SEQ ID NO: 703845 - DNA, 15 bp, Homo sapiens
ggtttcctttacatt

SEQ ID NO: 703846 - DNA, 15 bp, Homo sapiens
gtttcctttacatta

SEQ ID NO: 703847 - DNA, 15 bp, Homo sapiens
tttcctttacattac

SEQ ID NO: 703848 - DNA, 15 bp, Homo sapiens
ttcctttacattaca

SEQ ID NO: 703849 - DNA, 15 bp, Homo sapiens
tcctttacattacat

SEQ ID NO: 703850 - DNA, 15 bp, Homo sapiens
cctttacattacatg

SEQ ID NO: 703851 - DNA, 15 bp, Homo sapiens
ctttacattacatga

SEQ ID NO: 703852 - DNA, 15 bp, Homo sapiens
tttacattacatgac

SEQ ID NO: 703853 - DNA, 15 bp, Homo sapiens
ttacattacatgaca

SEQ ID NO: 703854 - DNA, 15 bp, Homo sapiens
tacattacatgacat

SEQ ID NO: 703855 - DNA, 15 bp, Homo sapiens
acattacatgacatt

SEQ ID NO: 703856 - DNA, 15 bp, Homo sapiens
cattacatgacattg

SEQ ID NO: 703857 - DNA, 15 bp, Homo sapiens
attacatgacattgt

SEQ ID NO: 703858 - DNA, 15 bp, Homo sapiens
ttacatgacattgtg

SEQ ID NO: 703859 - DNA, 15 bp, Homo sapiens
tacatgacattgtga

SEQ ID NO: 703860 - DNA, 15 bp, Homo sapiens
acatgacattgtgag

SEQ ID NO: 703861 - DNA, 15 bp, Homo sapiens
catgacattgtgaga

SEQ ID NO: 703862 - DNA, 15 bp, Homo sapiens
atgacattgtgagat

SEQ ID NO: 703863 - DNA, 15 bp, Homo sapiens
tgacattgtgagata

SEQ ID NO: 703864 - DNA, 15 bp, Homo sapiens
gacattgtgagatac

SEQ ID NO: 703865 - DNA, 15 bp, Homo sapiens
acattgtgagataca

SEQ ID NO: 703866 - DNA, 15 bp, Homo sapiens
cattgtgagatacac

SEQ ID NO: 703867 - DNA, 15 bp, Homo sapiens
attgtgagatacaca

SEQ ID NO: 703868 - DNA, 15 bp, Homo sapiens
ttgtgagatacacat

SEQ ID NO: 703869 - DNA, 15 bp, Homo sapiens
tgtgagatacacatt

SEQ ID NO: 703870 - DNA, 15 bp, Homo sapiens
gtgagatacacatta

SEQ ID NO: 703871 - DNA, 15 bp, Homo sapiens
tgagatacacattag

SEQ ID NO: 703872 - DNA, 15 bp, Homo sapiens
gagatacacattaga

SEQ ID NO: 703873 - DNA, 15 bp, Homo sapiens
agatacacattagaa

SEQ ID NO: 703874 - DNA, 15 bp, Homo sapiens
gatacacattagaag

SEQ ID NO: 703875 - DNA, 15 bp, Homo sapiens
atacacattagaaga

SEQ ID NO: 703876 - DNA, 15 bp, Homo sapiens
tacacattagaagaa

SEQ ID NO: 703877 - DNA, 15 bp, Homo sapiens
acacattagaagaat

SEQ ID NO: 703878 - DNA, 15 bp, Homo sapiens
cacattagaagaatc

SEQ ID NO: 703879 - DNA, 15 bp, Homo sapiens
acattagaagaatct

SEQ ID NO: 703880 - DNA, 15 bp, Homo sapiens
cattagaagaatctg

SEQ ID NO: 703881 - DNA, 15 bp, Homo sapiens
attagaagaatctga

SEQ ID NO: 703882 - DNA, 15 bp, Homo sapiens
ttagaagaatctgag

SEQ ID NO: 703883 - DNA, 15 bp, Homo sapiens
tagaagaatctgaga

SEQ ID NO: 703884 - DNA, 15 bp, Homo sapiens
agaagaatctgagac

SEQ ID NO: 703885 - DNA, 15 bp, Homo sapiens
gaagaatctgagact

SEQ ID NO: 703886 - DNA, 15 bp, Homo sapiens
aagaatctgagacta

SEQ ID NO: 703887 - DNA, 15 bp, Homo sapiens
agaatctgagactat

SEQ ID NO: 703888 - DNA, 15 bp, Homo sapiens
gaatctgagactatg

SEQ ID NO: 703889 - DNA, 15 bp, Homo sapiens
aatctgagactatgt

SEQ ID NO: 703890 - DNA, 15 bp, Homo sapiens
atctgagactatgtt

SEQ ID NO: 703891 - DNA, 15 bp, Homo sapiens
tctgagactatgttc

SEQ ID NO: 703892 - DNA, 15 bp, Homo sapiens
ctgagactatgttcc

SEQ ID NO: 703893 - DNA, 15 bp, Homo sapiens
tgagactatgttcca

SEQ ID NO: 703894 - DNA, 15 bp, Homo sapiens
gagactatgttccat

SEQ ID NO: 703895 - DNA, 15 bp, Homo sapiens
agactatgttccatt

SEQ ID NO: 703896 - DNA, 15 bp, Homo sapiens
gactatgttccattt

SEQ ID NO: 703897 - DNA, 15 bp, Homo sapiens
actatgttccatttc

SEQ ID NO: 703898 - DNA, 15 bp, Homo sapiens
ctatgttccatttca

SEQ ID NO: 703899 - DNA, 15 bp, Homo sapiens
tatgttccatttcag

SEQ ID NO: 703900 - DNA, 15 bp, Homo sapiens
atgttccatttcagt

SEQ ID NO: 703901 - DNA, 15 bp, Homo sapiens
tgttccatttcagtt

SEQ ID NO: 703902 - DNA, 15 bp, Homo sapiens
gttccatttcagttt

SEQ ID NO: 703903 - DNA, 15 bp, Homo sapiens
ttccatttcagtttc

SEQ ID NO: 703904 - DNA, 15 bp, Homo sapiens
tccatttcagtttct

SEQ ID NO: 703905 - DNA, 15 bp, Homo sapiens
ccatttcagtttctc

SEQ ID NO: 703906 - DNA, 15 bp, Homo sapiens
catttcagtttctct

SEQ ID NO: 703907 - DNA, 15 bp, Homo sapiens
atttcagtttctctt

SEQ ID NO: 703908 - DNA, 15 bp, Homo sapiens
tttcagtttctcttt

SEQ ID NO: 703909 - DNA, 15 bp, Homo sapiens
ttcagtttctctttt

SEQ ID NO: 703910 - DNA, 15 bp, Homo sapiens
tcagtttctcttttg

SEQ ID NO: 703911 - DNA, 15 bp, Homo sapiens
cagtttctcttttgc

SEQ ID NO: 703912 - DNA, 15 bp, Homo sapiens
agtttctcttttgca

SEQ ID NO: 703913 - DNA, 15 bp, Homo sapiens
gtttctcttttgcaa

SEQ ID NO: 703914 - DNA, 15 bp, Homo sapiens
tttctcttttgcaat

SEQ ID NO: 703915 - DNA, 15 bp, Homo sapiens
ttctcttttgcaatt

SEQ ID NO: 703916 - DNA, 15 bp, Homo sapiens
tctcttttgcaatta

SEQ ID NO: 703917 - DNA, 15 bp, Homo sapiens
ctcttttgcaattag

SEQ ID NO: 703918 - DNA, 15 bp, Homo sapiens
tcttttgcaattagg

SEQ ID NO: 703919 - DNA, 15 bp, Homo sapiens
cttttgcaattaggt

SEQ ID NO: 703920 - DNA, 15 bp, Homo sapiens
ttttgcaattaggta

SEQ ID NO: 703921 - DNA, 15 bp, Homo sapiens
tttgcaattaggtaa

SEQ ID NO: 703922 - DNA, 15 bp, Homo sapiens
ttgcaattaggtaat

SEQ ID NO: 703923 - DNA, 15 bp, Homo sapiens
tgcaattaggtaatt

SEQ ID NO: 703924 - DNA, 15 bp, Homo sapiens
gcaattaggtaattt

SEQ ID NO: 703925 - DNA, 15 bp, Homo sapiens
caattaggtaatttg

SEQ ID NO: 703926 - DNA, 15 bp, Homo sapiens
aattaggtaatttgt

SEQ ID NO: 703927 - DNA, 15 bp, Homo sapiens
attaggtaatttgtt

SEQ ID NO: 703928 - DNA, 15 bp, Homo sapiens
ttaggtaatttgttt

SEQ ID NO: 703929 - DNA, 15 bp, Homo sapiens
taggtaatttgtttt

SEQ ID NO: 703930 - DNA, 15 bp, Homo sapiens
aggtaatttgttttg

SEQ ID NO: 703931 - DNA, 15 bp, Homo sapiens
ggtaatttgttttga

SEQ ID NO: 703932 - DNA, 15 bp, Homo sapiens
gtaatttgttttgat

SEQ ID NO: 703933 - DNA, 15 bp, Homo sapiens
taatttgttttgatc

SEQ ID NO: 703934 - DNA, 15 bp, Homo sapiens
aatttgttttgatct

SEQ ID NO: 703935 - DNA, 15 bp, Homo sapiens
atttgttttgatcta

SEQ ID NO: 703936 - DNA, 15 bp, Homo sapiens
tttgttttgatctaa

SEQ ID NO: 703937 - DNA, 15 bp, Homo sapiens
ttgttttgatctaaa

SEQ ID NO: 703938 - DNA, 15 bp, Homo sapiens
tgttttgatctaaaa

SEQ ID NO: 703939 - DNA, 15 bp, Homo sapiens
gttttgatctaaaaa

SEQ ID NO: 703940 - DNA, 15 bp, Homo sapiens
ttttgatctaaaaag

SEQ ID NO: 703941 - DNA, 15 bp, Homo sapiens
tttgatctaaaaagt

SEQ ID NO: 703942 - DNA, 15 bp, Homo sapiens
ttgatctaaaaagta

SEQ ID NO: 703943 - DNA, 15 bp, Homo sapiens
tgatctaaaaagtac

SEQ ID NO: 703944 - DNA, 15 bp, Homo sapiens
gatctaaaaagtaca

SEQ ID NO: 703945 - DNA, 15 bp, Homo sapiens
atctaaaaagtacaa

SEQ ID NO: 703946 - DNA, 15 bp, Homo sapiens
tctaaaaagtacaaa

SEQ ID NO: 703947 - DNA, 15 bp, Homo sapiens
ctaaaaagtacaaat

SEQ ID NO: 703948 - DNA, 15 bp, Homo sapiens
taaaaagtacaaatt

SEQ ID NO: 703949 - DNA, 15 bp, Homo sapiens
aaaaagtacaaattt

SEQ ID NO: 703950 - DNA, 15 bp, Homo sapiens
aaaagtacaaattta

SEQ ID NO: 703951 - DNA, 15 bp, Homo sapiens
aaagtacaaatttat

SEQ ID NO: 703952 - DNA, 15 bp, Homo sapiens
aagtacaaatttatc

SEQ ID NO: 703953 - DNA, 15 bp, Homo sapiens
agtacaaatttatct

SEQ ID NO: 703954 - DNA, 15 bp, Homo sapiens
gtacaaatttatctc

SEQ ID NO: 703955 - DNA, 15 bp, Homo sapiens
tacaaatttatctca

SEQ ID NO: 703956 - DNA, 15 bp, Homo sapiens
acaaatttatctcat

SEQ ID NO: 703957 - DNA, 15 bp, Homo sapiens
caaatttatctcatt

SEQ ID NO: 703958 - DNA, 15 bp, Homo sapiens
aaatttatctcattc

SEQ ID NO: 703959 - DNA, 15 bp, Homo sapiens
aatttatctcattct

SEQ ID NO: 703960 - DNA, 15 bp, Homo sapiens
atttatctcattctt

SEQ ID NO: 703961 - DNA, 15 bp, Homo sapiens
tttatctcattcttg

SEQ ID NO: 703962 - DNA, 15 bp, Homo sapiens
ttatctcattcttgt

SEQ ID NO: 703963 - DNA, 15 bp, Homo sapiens
tatctcattcttgtt

SEQ ID NO: 703964 - DNA, 15 bp, Homo sapiens
atctcattcttgtta

SEQ ID NO: 703965 - DNA, 15 bp, Homo sapiens
tctcattcttgttaa

SEQ ID NO: 703966 - DNA, 15 bp, Homo sapiens
ctcattcttgttaat

SEQ ID NO: 703967 - DNA, 15 bp, Homo sapiens
tcattcttgttaatg

SEQ ID NO: 703968 - DNA, 15 bp, Homo sapiens
cattcttgttaatgc

SEQ ID NO: 703969 - DNA, 15 bp, Homo sapiens
attcttgttaatgct

SEQ ID NO: 703970 - DNA, 15 bp, Homo sapiens
ttcttgttaatgctg

SEQ ID NO: 703971 - DNA, 15 bp, Homo sapiens
tcttgttaatgctgt

SEQ ID NO: 703972 - DNA, 15 bp, Homo sapiens
cttgttaatgctgtc

SEQ ID NO: 703973 - DNA, 15 bp, Homo sapiens
ttgttaatgctgtcc

SEQ ID NO: 703974 - DNA, 15 bp, Homo sapiens
tgttaatgctgtcca

SEQ ID NO: 703975 - DNA, 15 bp, Homo sapiens
gttaatgctgtccat

SEQ ID NO: 703976 - DNA, 15 bp, Homo sapiens
ttaatgctgtccatg

SEQ ID NO: 703977 - DNA, 15 bp, Homo sapiens
taatgctgtccatga

SEQ ID NO: 703978 - DNA, 15 bp, Homo sapiens
aatgctgtccatgaa

SEQ ID NO: 703979 - DNA, 15 bp, Homo sapiens
atgctgtccatgaaa

SEQ ID NO: 703980 - DNA, 15 bp, Homo sapiens
tgctgtccatgaaat

SEQ ID NO: 703981 - DNA, 15 bp, Homo sapiens
gctgtccatgaaatg

SEQ ID NO: 703982 - DNA, 15 bp, Homo sapiens
ctgtccatgaaatgt

SEQ ID NO: 703983 - DNA, 15 bp, Homo sapiens
tgtccatgaaatgta

SEQ ID NO: 703984 - DNA, 15 bp, Homo sapiens
gtccatgaaatgtaa

SEQ ID NO: 703985 - DNA, 15 bp, Homo sapiens
tccatgaaatgtaag

SEQ ID NO: 703986 - DNA, 15 bp, Homo sapiens
ccatgaaatgtaagt

SEQ ID NO: 703987 - DNA, 15 bp, Homo sapiens
catgaaatgtaagta

SEQ ID NO: 703988 - DNA, 15 bp, Homo sapiens
atgaaatgtaagtat

SEQ ID NO: 703989 - DNA, 15 bp, Homo sapiens
tgaaatgtaagtatc

SEQ ID NO: 703990 - DNA, 15 bp, Homo sapiens
gaaatgtaagtatca

SEQ ID NO: 703991 - DNA, 15 bp, Homo sapiens
aaatgtaagtatcag

SEQ ID NO: 703992 - DNA, 15 bp, Homo sapiens
aatgtaagtatcagt

SEQ ID NO: 703993 - DNA, 15 bp, Homo sapiens
atgtaagtatcagtt

SEQ ID NO: 703994 - DNA, 15 bp, Homo sapiens
tgtaagtatcagttc

SEQ ID NO: 703995 - DNA, 15 bp, Homo sapiens
gtaagtatcagttcc

SEQ ID NO: 703996 - DNA, 15 bp, Homo sapiens
taagtatcagttcct

SEQ ID NO: 703997 - DNA, 15 bp, Homo sapiens
aagtatcagttcctt

SEQ ID NO: 703998 - DNA, 15 bp, Homo sapiens
agtatcagttccttc

SEQ ID NO: 703999 - DNA, 15 bp, Homo sapiens
gtatcagttccttct

SEQ ID NO: 704000 - DNA, 15 bp, Homo sapiens
tatcagttccttctc

SEQ ID NO: 704001 - DNA, 15 bp, Homo sapiens
atcagttccttctca

SEQ ID NO: 704002 - DNA, 15 bp, Homo sapiens
tcagttccttctcag

SEQ ID NO: 704003 - DNA, 15 bp, Homo sapiens
cagttccttctcagc

SEQ ID NO: 704004 - DNA, 15 bp, Homo sapiens
agttccttctcagct

SEQ ID NO: 704005 - DNA, 15 bp, Homo sapiens
gttccttctcagcta

SEQ ID NO: 704006 - DNA, 15 bp, Homo sapiens
ttccttctcagctag

SEQ ID NO: 704007 - DNA, 15 bp, Homo sapiens
tccttctcagctagt

SEQ ID NO: 704008 - DNA, 15 bp, Homo sapiens
ccttctcagctagtg

SEQ ID NO: 704009 - DNA, 15 bp, Homo sapiens
cttctcagctagtgc

SEQ ID NO: 704010 - DNA, 15 bp, Homo sapiens
ttctcagctagtgct

SEQ ID NO: 704011 - DNA, 15 bp, Homo sapiens
tctcagctagtgctt

SEQ ID NO: 704012 - DNA, 15 bp, Homo sapiens
ctcagctagtgcttt

SEQ ID NO: 704013 - DNA, 15 bp, Homo sapiens
tcagctagtgcttta

SEQ ID NO: 704014 - DNA, 15 bp, Homo sapiens
cagctagtgctttat

SEQ ID NO: 704015 - DNA, 15 bp, Homo sapiens
agctagtgctttata

SEQ ID NO: 704016 - DNA, 15 bp, Homo sapiens
gctagtgctttatag

SEQ ID NO: 704017 - DNA, 15 bp, Homo sapiens
ctagtgctttatagt

SEQ ID NO: 704018 - DNA, 15 bp, Homo sapiens
tagtgctttatagtt

SEQ ID NO: 704019 - DNA, 15 bp, Homo sapiens
agtgctttatagtta

SEQ ID NO: 704020 - DNA, 15 bp, Homo sapiens
gtgctttatagttat

SEQ ID NO: 704021 - DNA, 15 bp, Homo sapiens
tgctttatagttata

SEQ ID NO: 704022 - DNA, 15 bp, Homo sapiens
gctttatagttatac

SEQ ID NO: 704023 - DNA, 15 bp, Homo sapiens
ctttatagttatact

SEQ ID NO: 704024 - DNA, 15 bp, Homo sapiens
tttatagttatactg

SEQ ID NO: 704025 - DNA, 15 bp, Homo sapiens
ttatagttatactgg

SEQ ID NO: 704026 - DNA, 15 bp, Homo sapiens
tatagttatactggt

SEQ ID NO: 704027 - DNA, 15 bp, Homo sapiens
atagttatactggtg

SEQ ID NO: 704028 - DNA, 15 bp, Homo sapiens
tagttatactggtgc

SEQ ID NO: 704029 - DNA, 15 bp, Homo sapiens
agttatactggtgcc

SEQ ID NO: 704030 - DNA, 15 bp, Homo sapiens
gttatactggtgcca

SEQ ID NO: 704031 - DNA, 15 bp, Homo sapiens
ttatactggtgccag

SEQ ID NO: 704032 - DNA, 15 bp, Homo sapiens
tatactggtgccagg

SEQ ID NO: 704033 - DNA, 15 bp, Homo sapiens
atactggtgccaggt

SEQ ID NO: 704034 - DNA, 15 bp, Homo sapiens
tactggtgccaggtt

SEQ ID NO: 704035 - DNA, 15 bp, Homo sapiens
actggtgccaggtta

SEQ ID NO: 704036 - DNA, 15 bp, Homo sapiens
ctggtgccaggttaa

SEQ ID NO: 704037 - DNA, 15 bp, Homo sapiens
tggtgccaggttaag

SEQ ID NO: 704038 - DNA, 15 bp, Homo sapiens
ggtgccaggttaaga

SEQ ID NO: 704039 - DNA, 15 bp, Homo sapiens
gtgccaggttaagag

SEQ ID NO: 704040 - DNA, 15 bp, Homo sapiens
tgccaggttaagaga

SEQ ID NO: 704041 - DNA, 15 bp, Homo sapiens
gccaggttaagagac

SEQ ID NO: 704042 - DNA, 15 bp, Homo sapiens
ccaggttaagagacc

SEQ ID NO: 704043 - DNA, 15 bp, Homo sapiens
caggttaagagacct

SEQ ID NO: 704044 - DNA, 15 bp, Homo sapiens
aggttaagagaccta

SEQ ID NO: 704045 - DNA, 15 bp, Homo sapiens
ggttaagagacctat

SEQ ID NO: 704046 - DNA, 15 bp, Homo sapiens
gttaagagacctatt

SEQ ID NO: 704047 - DNA, 15 bp, Homo sapiens
ttaagagacctattt

SEQ ID NO: 704048 - DNA, 15 bp, Homo sapiens
taagagacctatttt

SEQ ID NO: 704049 - DNA, 15 bp, Homo sapiens
aagagacctatttta

SEQ ID NO: 704050 - DNA, 15 bp, Homo sapiens
agagacctattttat

SEQ ID NO: 704051 - DNA, 15 bp, Homo sapiens
gagacctattttata

SEQ ID NO: 704052 - DNA, 15 bp, Homo sapiens
agacctattttatag

SEQ ID NO: 704053 - DNA, 15 bp, Homo sapiens
gacctattttatagt

SEQ ID NO: 704054 - DNA, 15 bp, Homo sapiens
acctattttatagtg

SEQ ID NO: 704055 - DNA, 15 bp, Homo sapiens
cctattttatagtga

SEQ ID NO: 704056 - DNA, 15 bp, Homo sapiens
ctattttatagtgag

SEQ ID NO: 704057 - DNA, 15 bp, Homo sapiens
tattttatagtgagt

SEQ ID NO: 704058 - DNA, 15 bp, Homo sapiens
attttatagtgagtg

SEQ ID NO: 704059 - DNA, 15 bp, Homo sapiens
ttttatagtgagtga

SEQ ID NO: 704060 - DNA, 15 bp, Homo sapiens
tttatagtgagtgac

SEQ ID NO: 704061 - DNA, 15 bp, Homo sapiens
ttatagtgagtgaca

SEQ ID NO: 704062 - DNA, 15 bp, Homo sapiens
tatagtgagtgacat

SEQ ID NO: 704063 - DNA, 15 bp, Homo sapiens
atagtgagtgacatg

SEQ ID NO: 704064 - DNA, 15 bp, Homo sapiens
tagtgagtgacatga

SEQ ID NO: 704065 - DNA, 15 bp, Homo sapiens
agtgagtgacatgaa

SEQ ID NO: 704066 - DNA, 15 bp, Homo sapiens
gtgagtgacatgaaa

SEQ ID NO: 704067 - DNA, 15 bp, Homo sapiens
tgagtgacatgaaag

SEQ ID NO: 704068 - DNA, 15 bp, Homo sapiens
gagtgacatgaaagt

SEQ ID NO: 704069 - DNA, 15 bp, Homo sapiens
agtgacatgaaagtc

SEQ ID NO: 704070 - DNA, 15 bp, Homo sapiens
gtgacatgaaagtca

SEQ ID NO: 704071 - DNA, 15 bp, Homo sapiens
tgacatgaaagtcaa

SEQ ID NO: 704072 - DNA, 15 bp, Homo sapiens
gacatgaaagtcaac

SEQ ID NO: 704073 - DNA, 15 bp, Homo sapiens
acatgaaagtcaact

SEQ ID NO: 704074 - DNA, 15 bp, Homo sapiens
catgaaagtcaacta

SEQ ID NO: 704075 - DNA, 15 bp, Homo sapiens
atgaaagtcaactac

SEQ ID NO: 704076 - DNA, 15 bp, Homo sapiens
tgaaagtcaactaca

SEQ ID NO: 704077 - DNA, 15 bp, Homo sapiens
gaaagtcaactacaa

SEQ ID NO: 704078 - DNA, 15 bp, Homo sapiens
aaagtcaactacaag

SEQ ID NO: 704079 - DNA, 15 bp, Homo sapiens
aagtcaactacaaga

SEQ ID NO: 704080 - DNA, 15 bp, Homo sapiens
agtcaactacaagaa

SEQ ID NO: 704081 - DNA, 15 bp, Homo sapiens
gtcaactacaagaaa

SEQ ID NO: 704082 - DNA, 15 bp, Homo sapiens
tcaactacaagaaaa

SEQ ID NO: 704083 - DNA, 15 bp, Homo sapiens
caactacaagaaaag

SEQ ID NO: 704084 - DNA, 15 bp, Homo sapiens
aactacaagaaaagc

SEQ ID NO: 704085 - DNA, 15 bp, Homo sapiens
actacaagaaaagca

SEQ ID NO: 704086 - DNA, 15 bp, Homo sapiens
ctacaagaaaagcac

SEQ ID NO: 704087 - DNA, 15 bp, Homo sapiens
tacaagaaaagcaca

SEQ ID NO: 704088 - DNA, 15 bp, Homo sapiens
acaagaaaagcacat

SEQ ID NO: 704089 - DNA, 15 bp, Homo sapiens
caagaaaagcacatt

SEQ ID NO: 704090 - DNA, 15 bp, Homo sapiens
aagaaaagcacattg

SEQ ID NO: 704091 - DNA, 15 bp, Homo sapiens
agaaaagcacattgt

SEQ ID NO: 704092 - DNA, 15 bp, Homo sapiens
gaaaagcacattgtc

SEQ ID NO: 704093 - DNA, 15 bp, Homo sapiens
aaaagcacattgtca

SEQ ID NO: 704094 - DNA, 15 bp, Homo sapiens
aaagcacattgtcat

SEQ ID NO: 704095 - DNA, 15 bp, Homo sapiens
aagcacattgtcatt

SEQ ID NO: 704096 - DNA, 15 bp, Homo sapiens
agcacattgtcattt

SEQ ID NO: 704097 - DNA, 15 bp, Homo sapiens
gcacattgtcatttt

SEQ ID NO: 704098 - DNA, 15 bp, Homo sapiens
cacattgtcattttc

SEQ ID NO: 704099 - DNA, 15 bp, Homo sapiens
acattgtcattttca

SEQ ID NO: 704100 - DNA, 15 bp, Homo sapiens
cattgtcattttcat

SEQ ID NO: 704101 - DNA, 15 bp, Homo sapiens
attgtcattttcatt

SEQ ID NO: 704102 - DNA, 15 bp, Homo sapiens
ttgtcattttcattt

SEQ ID NO: 704103 - DNA, 15 bp, Homo sapiens
tgtcattttcattta

SEQ ID NO: 704104 - DNA, 15 bp, Homo sapiens
gtcattttcatttac

SEQ ID NO: 704105 - DNA, 15 bp, Homo sapiens
tcattttcatttaca

SEQ ID NO: 704106 - DNA, 15 bp, Homo sapiens
cattttcatttacag

SEQ ID NO: 704107 - DNA, 15 bp, Homo sapiens
attttcatttacaga

SEQ ID NO: 704108 - DNA, 15 bp, Homo sapiens
ttttcatttacagag

SEQ ID NO: 704109 - DNA, 15 bp, Homo sapiens
tttcatttacagagg

SEQ ID NO: 704110 - DNA, 15 bp, Homo sapiens
ttcatttacagaggc

SEQ ID NO: 704111 - DNA, 15 bp, Homo sapiens
tcatttacagaggca

SEQ ID NO: 704112 - DNA, 15 bp, Homo sapiens
catttacagaggcaa

SEQ ID NO: 704113 - DNA, 15 bp, Homo sapiens
atttacagaggcaag

SEQ ID NO: 704114 - DNA, 15 bp, Homo sapiens
tttacagaggcaagt

SEQ ID NO: 704115 - DNA, 15 bp, Homo sapiens
ttacagaggcaagtc

SEQ ID NO: 704116 - DNA, 15 bp, Homo sapiens
tacagaggcaagtcc

SEQ ID NO: 704117 - DNA, 15 bp, Homo sapiens
acagaggcaagtccc

SEQ ID NO: 704118 - DNA, 15 bp, Homo sapiens
cagaggcaagtccct

SEQ ID NO: 704119 - DNA, 15 bp, Homo sapiens
agaggcaagtccctc

SEQ ID NO: 704120 - DNA, 15 bp, Homo sapiens
gaggcaagtccctct

SEQ ID NO: 704121 - DNA, 15 bp, Homo sapiens
aggcaagtccctctt

SEQ ID NO: 704122 - DNA, 15 bp, Homo sapiens
ggcaagtccctctta

SEQ ID NO: 704123 - DNA, 15 bp, Homo sapiens
gcaagtccctcttaa

SEQ ID NO: 704124 - DNA, 15 bp, Homo sapiens
caagtccctcttaac

SEQ ID NO: 704125 - DNA, 15 bp, Homo sapiens
aagtccctcttaaca

SEQ ID NO: 704126 - DNA, 15 bp, Homo sapiens
agtccctcttaacac

SEQ ID NO: 704127 - DNA, 15 bp, Homo sapiens
gtccctcttaacaca

SEQ ID NO: 704128 - DNA, 15 bp, Homo sapiens
tccctcttaacacaa

SEQ ID NO: 704129 - DNA, 15 bp, Homo sapiens
ccctcttaacacaaa

SEQ ID NO: 704130 - DNA, 15 bp, Homo sapiens
cctcttaacacaaag

SEQ ID NO: 704131 - DNA, 15 bp, Homo sapiens
ctcttaacacaaaga

SEQ ID NO: 704132 - DNA, 15 bp, Homo sapiens
tcttaacacaaagaa

SEQ ID NO: 704133 - DNA, 15 bp, Homo sapiens
cttaacacaaagaaa

SEQ ID NO: 704134 - DNA, 15 bp, Homo sapiens
ttaacacaaagaaaa

SEQ ID NO: 704135 - DNA, 15 bp, Homo sapiens
taacacaaagaaaag

SEQ ID NO: 704136 - DNA, 15 bp, Homo sapiens
aacacaaagaaaagc

SEQ ID NO: 704137 - DNA, 15 bp, Homo sapiens
acacaaagaaaagca

SEQ ID NO: 704138 - DNA, 15 bp, Homo sapiens
cacaaagaaaagcaa

SEQ ID NO: 704139 - DNA, 15 bp, Homo sapiens
acaaagaaaagcaaa

SEQ ID NO: 704140 - DNA, 15 bp, Homo sapiens
caaagaaaagcaaag

SEQ ID NO: 704141 - DNA, 15 bp, Homo sapiens
aaagaaaagcaaagg

SEQ ID NO: 704142 - DNA, 15 bp, Homo sapiens
aagaaaagcaaagga

SEQ ID NO: 704143 - DNA, 15 bp, Homo sapiens
agaaaagcaaaggac

SEQ ID NO: 704144 - DNA, 15 bp, Homo sapiens
gaaaagcaaaggacc

SEQ ID NO: 704145 - DNA, 15 bp, Homo sapiens
aaaagcaaaggacct

SEQ ID NO: 704146 - DNA, 15 bp, Homo sapiens
aaagcaaaggacctt

SEQ ID NO: 704147 - DNA, 15 bp, Homo sapiens
aagcaaaggacctta

SEQ ID NO: 704148 - DNA, 15 bp, Homo sapiens
agcaaaggaccttat

SEQ ID NO: 704149 - DNA, 15 bp, Homo sapiens
gcaaaggaccttatg

SEQ ID NO: 704150 - DNA, 15 bp, Homo sapiens
caaaggaccttatgt

SEQ ID NO: 704151 - DNA, 15 bp, Homo sapiens
aaaggaccttatgtg

SEQ ID NO: 704152 - DNA, 15 bp, Homo sapiens
aaggaccttatgtga

SEQ ID NO: 704153 - DNA, 15 bp, Homo sapiens
aggaccttatgtgat

SEQ ID NO: 704154 - DNA, 15 bp, Homo sapiens
ggaccttatgtgatt

SEQ ID NO: 704155 - DNA, 15 bp, Homo sapiens
gaccttatgtgatta

SEQ ID NO: 704156 - DNA, 15 bp, Homo sapiens
accttatgtgattat

SEQ ID NO: 704157 - DNA, 15 bp, Homo sapiens
ccttatgtgattatg

SEQ ID NO: 704158 - DNA, 15 bp, Homo sapiens
cttatgtgattatgt

SEQ ID NO: 704159 - DNA, 15 bp, Homo sapiens
ttatgtgattatgta

SEQ ID NO: 704160 - DNA, 15 bp, Homo sapiens
tatgtgattatgtaa

SEQ ID NO: 704161 - DNA, 15 bp, Homo sapiens
atgtgattatgtaag

SEQ ID NO: 704162 - DNA, 15 bp, Homo sapiens
tgtgattatgtaagg

SEQ ID NO: 704163 - DNA, 15 bp, Homo sapiens
gtgattatgtaaggc

SEQ ID NO: 704164 - DNA, 15 bp, Homo sapiens
tgattatgtaaggca

SEQ ID NO: 704165 - DNA, 15 bp, Homo sapiens
gattatgtaaggcag

SEQ ID NO: 704166 - DNA, 15 bp, Homo sapiens
attatgtaaggcaga

SEQ ID NO: 704167 - DNA, 15 bp, Homo sapiens
ttatgtaaggcagat

SEQ ID NO: 704168 - DNA, 15 bp, Homo sapiens
tatgtaaggcagatc

SEQ ID NO: 704169 - DNA, 15 bp, Homo sapiens
atgtaaggcagatca

SEQ ID NO: 704170 - DNA, 15 bp, Homo sapiens
tgtaaggcagatcag

SEQ ID NO: 704171 - DNA, 15 bp, Homo sapiens
gtaaggcagatcagc

SEQ ID NO: 704172 - DNA, 15 bp, Homo sapiens
taaggcagatcagcc

SEQ ID NO: 704173 - DNA, 15 bp, Homo sapiens
aaggcagatcagccc

SEQ ID NO: 704174 - DNA, 15 bp, Homo sapiens
aggcagatcagccca

SEQ ID NO: 704175 - DNA, 15 bp, Homo sapiens
ggcagatcagcccag

SEQ ID NO: 704176 - DNA, 15 bp, Homo sapiens
gcagatcagcccagg

SEQ ID NO: 704177 - DNA, 15 bp, Homo sapiens
cagatcagcccagga

SEQ ID NO: 704178 - DNA, 15 bp, Homo sapiens
agatcagcccaggaa

SEQ ID NO: 704179 - DNA, 15 bp, Homo sapiens
gatcagcccaggaat

SEQ ID NO: 704180 - DNA, 15 bp, Homo sapiens
atcagcccaggaatt

SEQ ID NO: 704181 - DNA, 15 bp, Homo sapiens
tcagcccaggaattt

SEQ ID NO: 704182 - DNA, 15 bp, Homo sapiens
cagcccaggaatttc

SEQ ID NO: 704183 - DNA, 15 bp, Homo sapiens
agcccaggaatttca

SEQ ID NO: 704184 - DNA, 15 bp, Homo sapiens
gcccaggaatttcat

SEQ ID NO: 704185 - DNA, 15 bp, Homo sapiens
cccaggaatttcatt

SEQ ID NO: 704186 - DNA, 15 bp, Homo sapiens
ccaggaatttcattc

SEQ ID NO: 704187 - DNA, 15 bp, Homo sapiens
caggaatttcattca

SEQ ID NO: 704188 - DNA, 15 bp, Homo sapiens
aggaatttcattcaa

SEQ ID NO: 704189 - DNA, 15 bp, Homo sapiens
ggaatttcattcaaa

SEQ ID NO: 704190 - DNA, 15 bp, Homo sapiens
gaatttcattcaaag

SEQ ID NO: 704191 - DNA, 15 bp, Homo sapiens
aatttcattcaaaga

SEQ ID NO: 704192 - DNA, 15 bp, Homo sapiens
atttcattcaaagat

SEQ ID NO: 704193 - DNA, 15 bp, Homo sapiens
tttcattcaaagata

SEQ ID NO: 704194 - DNA, 15 bp, Homo sapiens
ttcattcaaagataa

SEQ ID NO: 704195 - DNA, 15 bp, Homo sapiens
tcattcaaagataat

SEQ ID NO: 704196 - DNA, 15 bp, Homo sapiens
cattcaaagataata

SEQ ID NO: 704197 - DNA, 15 bp, Homo sapiens
attcaaagataatac

SEQ ID NO: 704198 - DNA, 15 bp, Homo sapiens
ttcaaagataatact

SEQ ID NO: 704199 - DNA, 15 bp, Homo sapiens
tcaaagataatactt

SEQ ID NO: 704200 - DNA, 15 bp, Homo sapiens
caaagataatacttc

SEQ ID NO: 704201 - DNA, 15 bp, Homo sapiens
aaagataatacttca

SEQ ID NO: 704202 - DNA, 15 bp, Homo sapiens
aagataatacttcat

SEQ ID NO: 704203 - DNA, 15 bp, Homo sapiens
agataatacttcata

SEQ ID NO: 704204 - DNA, 15 bp, Homo sapiens
gataatacttcatac

SEQ ID NO: 704205 - DNA, 15 bp, Homo sapiens
ataatacttcatact

SEQ ID NO: 704206 - DNA, 15 bp, Homo sapiens
taatacttcatactc

SEQ ID NO: 704207 - DNA, 15 bp, Homo sapiens
aatacttcatactcc

SEQ ID NO: 704208 - DNA, 15 bp, Homo sapiens
atacttcatactcca

SEQ ID NO: 704209 - DNA, 15 bp, Homo sapiens
tacttcatactccat

SEQ ID NO: 704210 - DNA, 15 bp, Homo sapiens
acttcatactccata

SEQ ID NO: 704211 - DNA, 15 bp, Homo sapiens
cttcatactccataa

SEQ ID NO: 704212 - DNA, 15 bp, Homo sapiens
ttcatactccataat

SEQ ID NO: 704213 - DNA, 15 bp, Homo sapiens
tcatactccataatc

SEQ ID NO: 704214 - DNA, 15 bp, Homo sapiens
catactccataatcc

SEQ ID NO: 704215 - DNA, 15 bp, Homo sapiens
atactccataatccc

SEQ ID NO: 704216 - DNA, 15 bp, Homo sapiens
tactccataatccca

SEQ ID NO: 704217 - DNA, 15 bp, Homo sapiens
actccataatcccat

SEQ ID NO: 704218 - DNA, 15 bp, Homo sapiens
ctccataatcccatg

SEQ ID NO: 704219 - DNA, 15 bp, Homo sapiens
tccataatcccatgt

SEQ ID NO: 704220 - DNA, 15 bp, Homo sapiens
ccataatcccatgtg

SEQ ID NO: 704221 - DNA, 15 bp, Homo sapiens
cataatcccatgtga

SEQ ID NO: 704222 - DNA, 15 bp, Homo sapiens
ataatcccatgtgag

SEQ ID NO: 704223 - DNA, 15 bp, Homo sapiens
taatcccatgtgaga

SEQ ID NO: 704224 - DNA, 15 bp, Homo sapiens
aatcccatgtgagaa

SEQ ID NO: 704225 - DNA, 15 bp, Homo sapiens
atcccatgtgagaaa

SEQ ID NO: 704226 - DNA, 15 bp, Homo sapiens
tcccatgtgagaaat

SEQ ID NO: 704227 - DNA, 15 bp, Homo sapiens
cccatgtgagaaatt

SEQ ID NO: 704228 - DNA, 15 bp, Homo sapiens
ccatgtgagaaatta

SEQ ID NO: 704229 - DNA, 15 bp, Homo sapiens
catgtgagaaattaa

SEQ ID NO: 704230 - DNA, 15 bp, Homo sapiens
atgtgagaaattaat

SEQ ID NO: 704231 - DNA, 15 bp, Homo sapiens
tgtgagaaattaatg

SEQ ID NO: 704232 - DNA, 15 bp, Homo sapiens
gtgagaaattaatga

SEQ ID NO: 704233 - DNA, 15 bp, Homo sapiens
tgagaaattaatgaa

SEQ ID NO: 704234 - DNA, 15 bp, Homo sapiens
gagaaattaatgaat

SEQ ID NO: 704235 - DNA, 15 bp, Homo sapiens
agaaattaatgaatg

SEQ ID NO: 704236 - DNA, 15 bp, Homo sapiens
gaaattaatgaatga

SEQ ID NO: 704237 - DNA, 15 bp, Homo sapiens
aaattaatgaatgac

SEQ ID NO: 704238 - DNA, 15 bp, Homo sapiens
aattaatgaatgact

SEQ ID NO: 704239 - DNA, 15 bp, Homo sapiens
attaatgaatgactc

SEQ ID NO: 704240 - DNA, 15 bp, Homo sapiens
ttaatgaatgactcc

SEQ ID NO: 704241 - DNA, 15 bp, Homo sapiens
taatgaatgactcca

SEQ ID NO: 704242 - DNA, 15 bp, Homo sapiens
aatgaatgactccaa

SEQ ID NO: 704243 - DNA, 15 bp, Homo sapiens
atgaatgactccaag

SEQ ID NO: 704244 - DNA, 15 bp, Homo sapiens
tgaatgactccaagt

SEQ ID NO: 704245 - DNA, 15 bp, Homo sapiens
gaatgactccaagta

SEQ ID NO: 704246 - DNA, 15 bp, Homo sapiens
aatgactccaagtaa

SEQ ID NO: 704247 - DNA, 15 bp, Homo sapiens
atgactccaagtaaa

SEQ ID NO: 704248 - DNA, 15 bp, Homo sapiens
tgactccaagtaaaa

SEQ ID NO: 704249 - DNA, 15 bp, Homo sapiens
gactccaagtaaaaa

SEQ ID NO: 704250 - DNA, 15 bp, Homo sapiens
actccaagtaaaaag

SEQ ID NO: 704251 - DNA, 15 bp, Homo sapiens
ctccaagtaaaaaga

SEQ ID NO: 704252 - DNA, 15 bp, Homo sapiens
tccaagtaaaaagaa

SEQ ID NO: 704253 - DNA, 15 bp, Homo sapiens
ccaagtaaaaagaaa

SEQ ID NO: 704254 - DNA, 15 bp, Homo sapiens
caagtaaaaagaaaa

SEQ ID NO: 704255 - DNA, 15 bp, Homo sapiens
aagtaaaaagaaaat

SEQ ID NO: 704256 - DNA, 15 bp, Homo sapiens
agtaaaaagaaaatt

SEQ ID NO: 704257 - DNA, 15 bp, Homo sapiens
gtaaaaagaaaatta

SEQ ID NO: 704258 - DNA, 15 bp, Homo sapiens
taaaaagaaaattaa

SEQ ID NO: 704259 - DNA, 15 bp, Homo sapiens
aaaaagaaaattaaa

SEQ ID NO: 704260 - DNA, 15 bp, Homo sapiens
aaaagaaaattaaaa

SEQ ID NO: 704261 - DNA, 15 bp, Homo sapiens
aaagaaaattaaaat

SEQ ID NO: 704262 - DNA, 15 bp, Homo sapiens
aagaaaattaaaatt

SEQ ID NO: 704263 - DNA, 15 bp, Homo sapiens
agaaaattaaaatta

SEQ ID NO: 704264 - DNA, 15 bp, Homo sapiens
gaaaattaaaattag

SEQ ID NO: 704265 - DNA, 15 bp, Homo sapiens
aaaattaaaattagc

SEQ ID NO: 704266 - DNA, 15 bp, Homo sapiens
aaattaaaattagcc

SEQ ID NO: 704267 - DNA, 15 bp, Homo sapiens
aattaaaattagccc

SEQ ID NO: 704268 - DNA, 15 bp, Homo sapiens
attaaaattagccct

SEQ ID NO: 704269 - DNA, 15 bp, Homo sapiens
ttaaaattagccctt

SEQ ID NO: 704270 - DNA, 15 bp, Homo sapiens
taaaattagcccttg

SEQ ID NO: 704271 - DNA, 15 bp, Homo sapiens
aaaattagcccttgg

SEQ ID NO: 704272 - DNA, 15 bp, Homo sapiens
aaattagcccttggg

SEQ ID NO: 704273 - DNA, 15 bp, Homo sapiens
aattagcccttgggc

SEQ ID NO: 704274 - DNA, 15 bp, Homo sapiens
attagcccttgggcc

SEQ ID NO: 704275 - DNA, 15 bp, Homo sapiens
ttagcccttgggcct

SEQ ID NO: 704276 - DNA, 15 bp, Homo sapiens
tagcccttgggcctt

SEQ ID NO: 704277 - DNA, 15 bp, Homo sapiens
agcccttgggccttg

SEQ ID NO: 704278 - DNA, 15 bp, Homo sapiens
gcccttgggccttga

SEQ ID NO: 704279 - DNA, 15 bp, Homo sapiens
cccttgggccttgac

SEQ ID NO: 704280 - DNA, 15 bp, Homo sapiens
ccttgggccttgaca

SEQ ID NO: 704281 - DNA, 15 bp, Homo sapiens
cttgggccttgacaa

SEQ ID NO: 704282 - DNA, 15 bp, Homo sapiens
ttgggccttgacaat

SEQ ID NO: 704283 - DNA, 15 bp, Homo sapiens
tgggccttgacaatt

SEQ ID NO: 704284 - DNA, 15 bp, Homo sapiens
gggccttgacaattt

SEQ ID NO: 704285 - DNA, 15 bp, Homo sapiens
ggccttgacaattta

SEQ ID NO: 704286 - DNA, 15 bp, Homo sapiens
gccttgacaatttaa

SEQ ID NO: 704287 - DNA, 15 bp, Homo sapiens
ccttgacaatttaat

SEQ ID NO: 704288 - DNA, 15 bp, Homo sapiens
cttgacaatttaatt

SEQ ID NO: 704289 - DNA, 15 bp, Homo sapiens
ttgacaatttaattg

SEQ ID NO: 704290 - DNA, 15 bp, Homo sapiens
tgacaatttaattgc

SEQ ID NO: 704291 - DNA, 15 bp, Homo sapiens
gacaatttaattgcc

SEQ ID NO: 704292 - DNA, 15 bp, Homo sapiens
acaatttaattgcca

SEQ ID NO: 704293 - DNA, 15 bp, Homo sapiens
caatttaattgccag

SEQ ID NO: 704294 - DNA, 15 bp, Homo sapiens
aatttaattgccagg

SEQ ID NO: 704295 - DNA, 15 bp, Homo sapiens
atttaattgccaggg

SEQ ID NO: 704296 - DNA, 15 bp, Homo sapiens
tttaattgccagggc

SEQ ID NO: 704297 - DNA, 15 bp, Homo sapiens
ttaattgccagggcc

SEQ ID NO: 704298 - DNA, 15 bp, Homo sapiens
taattgccagggcct

SEQ ID NO: 704299 - DNA, 15 bp, Homo sapiens
aattgccagggcctt

SEQ ID NO: 704300 - DNA, 15 bp, Homo sapiens
attgccagggccttt

SEQ ID NO: 704301 - DNA, 15 bp, Homo sapiens
ttgccagggcctttt

SEQ ID NO: 704302 - DNA, 15 bp, Homo sapiens
tgccagggccttttg

SEQ ID NO: 704303 - DNA, 15 bp, Homo sapiens
gccagggccttttgt

SEQ ID NO: 704304 - DNA, 15 bp, Homo sapiens
ccagggccttttgtc

SEQ ID NO: 704305 - DNA, 15 bp, Homo sapiens
cagggccttttgtca

SEQ ID NO: 704306 - DNA, 15 bp, Homo sapiens
agggccttttgtcaa

SEQ ID NO: 704307 - DNA, 15 bp, Homo sapiens
gggccttttgtcaat

SEQ ID NO: 704308 - DNA, 15 bp, Homo sapiens
ggccttttgtcaatt

SEQ ID NO: 704309 - DNA, 15 bp, Homo sapiens
gccttttgtcaattc

SEQ ID NO: 704310 - DNA, 15 bp, Homo sapiens
ccttttgtcaattct

SEQ ID NO: 704311 - DNA, 15 bp, Homo sapiens
cttttgtcaattcta

SEQ ID NO: 704312 - DNA, 15 bp, Homo sapiens
ttttgtcaattctaa

SEQ ID NO: 704313 - DNA, 15 bp, Homo sapiens
tttgtcaattctaaa

SEQ ID NO: 704314 - DNA, 15 bp, Homo sapiens
ttgtcaattctaaac

SEQ ID NO: 704315 - DNA, 15 bp, Homo sapiens
tgtcaattctaaaca

SEQ ID NO: 704316 - DNA, 15 bp, Homo sapiens
gtcaattctaaacaa

SEQ ID NO: 704317 - DNA, 15 bp, Homo sapiens
tcaattctaaacaat

SEQ ID NO: 704318 - DNA, 15 bp, Homo sapiens
caattctaaacaatg

SEQ ID NO: 704319 - DNA, 15 bp, Homo sapiens
aattctaaacaatgt

SEQ ID NO: 704320 - DNA, 15 bp, Homo sapiens
attctaaacaatgtt

SEQ ID NO: 704321 - DNA, 15 bp, Homo sapiens
ttctaaacaatgttc

SEQ ID NO: 704322 - DNA, 15 bp, Homo sapiens
tctaaacaatgttct

SEQ ID NO: 704323 - DNA, 15 bp, Homo sapiens
ctaaacaatgttcta

SEQ ID NO: 704324 - DNA, 15 bp, Homo sapiens
taaacaatgttctaa

SEQ ID NO: 704325 - DNA, 15 bp, Homo sapiens
aaacaatgttctaaa

SEQ ID NO: 704326 - DNA, 15 bp, Homo sapiens
aacaatgttctaaat

SEQ ID NO: 704327 - DNA, 15 bp, Homo sapiens
acaatgttctaaatt

SEQ ID NO: 704328 - DNA, 15 bp, Homo sapiens
caatgttctaaatta

SEQ ID NO: 704329 - DNA, 15 bp, Homo sapiens
aatgttctaaattag

SEQ ID NO: 704330 - DNA, 15 bp, Homo sapiens
atgttctaaattagc

SEQ ID NO: 704331 - DNA, 15 bp, Homo sapiens
tgttctaaattagcc

SEQ ID NO: 704332 - DNA, 15 bp, Homo sapiens
gttctaaattagcca

SEQ ID NO: 704333 - DNA, 15 bp, Homo sapiens
ttctaaattagccac

SEQ ID NO: 704334 - DNA, 15 bp, Homo sapiens
tctaaattagccaca

SEQ ID NO: 704335 - DNA, 15 bp, Homo sapiens
ctaaattagccacaa

SEQ ID NO: 704336 - DNA, 15 bp, Homo sapiens
taaattagccacaat

SEQ ID NO: 704337 - DNA, 15 bp, Homo sapiens
aaattagccacaatt

SEQ ID NO: 704338 - DNA, 15 bp, Homo sapiens
aattagccacaattt

SEQ ID NO: 704339 - DNA, 15 bp, Homo sapiens
attagccacaatttc

SEQ ID NO: 704340 - DNA, 15 bp, Homo sapiens
ttagccacaatttct

SEQ ID NO: 704341 - DNA, 15 bp, Homo sapiens
tagccacaatttctc

SEQ ID NO: 704342 - DNA, 15 bp, Homo sapiens
agccacaatttctca

SEQ ID NO: 704343 - DNA, 15 bp, Homo sapiens
gccacaatttctcag

SEQ ID NO: 704344 - DNA, 15 bp, Homo sapiens
ccacaatttctcaga

SEQ ID NO: 704345 - DNA, 15 bp, Homo sapiens
cacaatttctcagaa

SEQ ID NO: 704346 - DNA, 15 bp, Homo sapiens
acaatttctcagaat

SEQ ID NO: 704347 - DNA, 15 bp, Homo sapiens
caatttctcagaatg

SEQ ID NO: 704348 - DNA, 15 bp, Homo sapiens
aatttctcagaatga

SEQ ID NO: 704349 - DNA, 15 bp, Homo sapiens
atttctcagaatgat

SEQ ID NO: 704350 - DNA, 15 bp, Homo sapiens
tttctcagaatgata

SEQ ID NO: 704351 - DNA, 15 bp, Homo sapiens
ttctcagaatgatat

SEQ ID NO: 704352 - DNA, 15 bp, Homo sapiens
tctcagaatgatata

SEQ ID NO: 704353 - DNA, 15 bp, Homo sapiens
ctcagaatgatatac

SEQ ID NO: 704354 - DNA, 15 bp, Homo sapiens
tcagaatgatatacc

SEQ ID NO: 704355 - DNA, 15 bp, Homo sapiens
cagaatgatatacca

SEQ ID NO: 704356 - DNA, 15 bp, Homo sapiens
agaatgatataccag

SEQ ID NO: 704357 - DNA, 15 bp, Homo sapiens
gaatgatataccaga

SEQ ID NO: 704358 - DNA, 15 bp, Homo sapiens
aatgatataccagaa

SEQ ID NO: 704359 - DNA, 15 bp, Homo sapiens
atgatataccagaag

SEQ ID NO: 704360 - DNA, 15 bp, Homo sapiens
tgatataccagaaga

SEQ ID NO: 704361 - DNA, 15 bp, Homo sapiens
gatataccagaagaa

SEQ ID NO: 704362 - DNA, 15 bp, Homo sapiens
atataccagaagaat

SEQ ID NO: 704363 - DNA, 15 bp, Homo sapiens
tataccagaagaata

SEQ ID NO: 704364 - DNA, 15 bp, Homo sapiens
ataccagaagaatat

SEQ ID NO: 704365 - DNA, 15 bp, Homo sapiens
taccagaagaatatg

SEQ ID NO: 704366 - DNA, 15 bp, Homo sapiens
accagaagaatatga

SEQ ID NO: 704367 - DNA, 15 bp, Homo sapiens
ccagaagaatatgaa

SEQ ID NO: 704368 - DNA, 15 bp, Homo sapiens
cagaagaatatgaac

SEQ ID NO: 704369 - DNA, 15 bp, Homo sapiens
agaagaatatgaacc

SEQ ID NO: 704370 - DNA, 15 bp, Homo sapiens
gaagaatatgaacct

SEQ ID NO: 704371 - DNA, 15 bp, Homo sapiens
aagaatatgaacctc

SEQ ID NO: 704372 - DNA, 15 bp, Homo sapiens
agaatatgaacctca

SEQ ID NO: 704373 - DNA, 15 bp, Homo sapiens
gaatatgaacctcaa

SEQ ID NO: 704374 - DNA, 15 bp, Homo sapiens
aatatgaacctcaat

SEQ ID NO: 704375 - DNA, 15 bp, Homo sapiens
atatgaacctcaata

SEQ ID NO: 704376 - DNA, 15 bp, Homo sapiens
tatgaacctcaataa

SEQ ID NO: 704377 - DNA, 15 bp, Homo sapiens
atgaacctcaataat

SEQ ID NO: 704378 - DNA, 15 bp, Homo sapiens
tgaacctcaataatt

SEQ ID NO: 704379 - DNA, 15 bp, Homo sapiens
gaacctcaataatta

SEQ ID NO: 704380 - DNA, 15 bp, Homo sapiens
aacctcaataattac

SEQ ID NO: 704381 - DNA, 15 bp, Homo sapiens
acctcaataattaca

SEQ ID NO: 704382 - DNA, 15 bp, Homo sapiens
cctcaataattacag

SEQ ID NO: 704383 - DNA, 15 bp, Homo sapiens
ctcaataattacagg

SEQ ID NO: 704384 - DNA, 15 bp, Homo sapiens
tcaataattacaggc

SEQ ID NO: 704385 - DNA, 15 bp, Homo sapiens
caataattacaggct

SEQ ID NO: 704386 - DNA, 15 bp, Homo sapiens
aataattacaggctg

SEQ ID NO: 704387 - DNA, 15 bp, Homo sapiens
ataattacaggctgt

SEQ ID NO: 704388 - DNA, 15 bp, Homo sapiens
taattacaggctgtt

SEQ ID NO: 704389 - DNA, 15 bp, Homo sapiens
aattacaggctgttt

SEQ ID NO: 704390 - DNA, 15 bp, Homo sapiens
attacaggctgtttt

SEQ ID NO: 704391 - DNA, 15 bp, Homo sapiens
ttacaggctgtttta

SEQ ID NO: 704392 - DNA, 15 bp, Homo sapiens
tacaggctgttttaa

SEQ ID NO: 704393 - DNA, 15 bp, Homo sapiens
acaggctgttttaag

SEQ ID NO: 704394 - DNA, 15 bp, Homo sapiens
caggctgttttaagt

SEQ ID NO: 704395 - DNA, 15 bp, Homo sapiens
aggctgttttaagtt

SEQ ID NO: 704396 - DNA, 15 bp, Homo sapiens
ggctgttttaagttt

SEQ ID NO: 704397 - DNA, 15 bp, Homo sapiens
gctgttttaagttta

SEQ ID NO: 704398 - DNA, 15 bp, Homo sapiens
ctgttttaagtttat

SEQ ID NO: 704399 - DNA, 15 bp, Homo sapiens
tgttttaagtttatt

SEQ ID NO: 704400 - DNA, 15 bp, Homo sapiens
gttttaagtttattt

SEQ ID NO: 704401 - DNA, 15 bp, Homo sapiens
tttaagtttattttg

SEQ ID NO: 704402 - DNA, 15 bp, Homo sapiens
ttaagtttattttgt

SEQ ID NO: 704403 - DNA, 15 bp, Homo sapiens
taagtttattttgtg

SEQ ID NO: 704404 - DNA, 15 bp, Homo sapiens
aagtttattttgtga

SEQ ID NO: 704405 - DNA, 15 bp, Homo sapiens
agtttattttgtgaa

SEQ ID NO: 704406 - DNA, 15 bp, Homo sapiens
gtttattttgtgaaa

SEQ ID NO: 704407 - DNA, 15 bp, Homo sapiens
tttattttgtgaaag

SEQ ID NO: 704408 - DNA, 15 bp, Homo sapiens
ttattttgtgaaagt

SEQ ID NO: 704409 - DNA, 15 bp, Homo sapiens
tattttgtgaaagtt

SEQ ID NO: 704410 - DNA, 15 bp, Homo sapiens
attttgtgaaagtta

SEQ ID NO: 704411 - DNA, 15 bp, Homo sapiens
ttttgtgaaagttat

SEQ ID NO: 704412 - DNA, 15 bp, Homo sapiens
tttgtgaaagttatt

SEQ ID NO: 704413 - DNA, 15 bp, Homo sapiens
ttgtgaaagttattc

SEQ ID NO: 704414 - DNA, 15 bp, Homo sapiens
tgtgaaagttattcc

SEQ ID NO: 704415 - DNA, 15 bp, Homo sapiens
gtgaaagttattcct

SEQ ID NO: 704416 - DNA, 15 bp, Homo sapiens
tgaaagttattcctt

SEQ ID NO: 704417 - DNA, 15 bp, Homo sapiens
gaaagttattccttc

SEQ ID NO: 704418 - DNA, 15 bp, Homo sapiens
aaagttattccttct

SEQ ID NO: 704419 - DNA, 15 bp, Homo sapiens
aagttattccttctc

SEQ ID NO: 704420 - DNA, 15 bp, Homo sapiens
agttattccttctcc

SEQ ID NO: 704421 - DNA, 15 bp, Homo sapiens
gttattccttctccc

SEQ ID NO: 704422 - DNA, 15 bp, Homo sapiens
ttattccttctccca

SEQ ID NO: 704423 - DNA, 15 bp, Homo sapiens
tattccttctcccag

SEQ ID NO: 704424 - DNA, 15 bp, Homo sapiens
attccttctcccagt

SEQ ID NO: 704425 - DNA, 15 bp, Homo sapiens
ttccttctcccagta

SEQ ID NO: 704426 - DNA, 15 bp, Homo sapiens
tccttctcccagtat

SEQ ID NO: 704427 - DNA, 15 bp, Homo sapiens
ccttctcccagtatt

SEQ ID NO: 704428 - DNA, 15 bp, Homo sapiens
cttctcccagtattc

SEQ ID NO: 704429 - DNA, 15 bp, Homo sapiens
ttctcccagtattcc

SEQ ID NO: 704430 - DNA, 15 bp, Homo sapiens
tctcccagtattcca

SEQ ID NO: 704431 - DNA, 15 bp, Homo sapiens
ctcccagtattccat

SEQ ID NO: 704432 - DNA, 15 bp, Homo sapiens
tcccagtattccatg

SEQ ID NO: 704433 - DNA, 15 bp, Homo sapiens
cccagtattccatga

SEQ ID NO: 704434 - DNA, 15 bp, Homo sapiens
ccagtattccatgac

SEQ ID NO: 704435 - DNA, 15 bp, Homo sapiens
cagtattccatgact

SEQ ID NO: 704436 - DNA, 15 bp, Homo sapiens
agtattccatgacta

SEQ ID NO: 704437 - DNA, 15 bp, Homo sapiens
gtattccatgactaa

SEQ ID NO: 704438 - DNA, 15 bp, Homo sapiens
tattccatgactaaa

SEQ ID NO: 704439 - DNA, 15 bp, Homo sapiens
attccatgactaaag

SEQ ID NO: 704440 - DNA, 15 bp, Homo sapiens
ttccatgactaaagc

SEQ ID NO: 704441 - DNA, 15 bp, Homo sapiens
tccatgactaaagct

SEQ ID NO: 704442 - DNA, 15 bp, Homo sapiens
ccatgactaaagctg

SEQ ID NO: 704443 - DNA, 15 bp, Homo sapiens
catgactaaagctgt

SEQ ID NO: 704444 - DNA, 15 bp, Homo sapiens
atgactaaagctgtt

SEQ ID NO: 704445 - DNA, 15 bp, Homo sapiens
tgactaaagctgttc

SEQ ID NO: 704446 - DNA, 15 bp, Homo sapiens
gactaaagctgttct

SEQ ID NO: 704447 - DNA, 15 bp, Homo sapiens
actaaagctgttctc

SEQ ID NO: 704448 - DNA, 15 bp, Homo sapiens
ctaaagctgttctca

SEQ ID NO: 704449 - DNA, 15 bp, Homo sapiens
taaagctgttctcag

SEQ ID NO: 704450 - DNA, 15 bp, Homo sapiens
aaagctgttctcagg

SEQ ID NO: 704451 - DNA, 15 bp, Homo sapiens
aagctgttctcagga

SEQ ID NO: 704452 - DNA, 15 bp, Homo sapiens
agctgttctcaggac

SEQ ID NO: 704453 - DNA, 15 bp, Homo sapiens
gctgttctcaggaca

SEQ ID NO: 704454 - DNA, 15 bp, Homo sapiens
ctgttctcaggacat

SEQ ID NO: 704455 - DNA, 15 bp, Homo sapiens
tgttctcaggacata

SEQ ID NO: 704456 - DNA, 15 bp, Homo sapiens
gttctcaggacatac

SEQ ID NO: 704457 - DNA, 15 bp, Homo sapiens
ttctcaggacatact

SEQ ID NO: 704458 - DNA, 15 bp, Homo sapiens
tctcaggacatactg

SEQ ID NO: 704459 - DNA, 15 bp, Homo sapiens
ctcaggacatactga

SEQ ID NO: 704460 - DNA, 15 bp, Homo sapiens
tcaggacatactgaa

SEQ ID NO: 704461 - DNA, 15 bp, Homo sapiens
caggacatactgaag

SEQ ID NO: 704462 - DNA, 15 bp, Homo sapiens
aggacatactgaaga

SEQ ID NO: 704463 - DNA, 15 bp, Homo sapiens
ggacatactgaagat

SEQ ID NO: 704464 - DNA, 15 bp, Homo sapiens
gacatactgaagatt

SEQ ID NO: 704465 - DNA, 15 bp, Homo sapiens
acatactgaagattt

SEQ ID NO: 704466 - DNA, 15 bp, Homo sapiens
catactgaagattta

SEQ ID NO: 704467 - DNA, 15 bp, Homo sapiens
atactgaagatttat

SEQ ID NO: 704468 - DNA, 15 bp, Homo sapiens
tactgaagatttata

SEQ ID NO: 704469 - DNA, 15 bp, Homo sapiens
actgaagatttataa

SEQ ID NO: 704470 - DNA, 15 bp, Homo sapiens
ctgaagatttataat

SEQ ID NO: 704471 - DNA, 15 bp, Homo sapiens
tgaagatttataata

SEQ ID NO: 704472 - DNA, 15 bp, Homo sapiens
gaagatttataataa

SEQ ID NO: 704473 - DNA, 15 bp, Homo sapiens
aagatttataataaa

SEQ ID NO: 704474 - DNA, 15 bp, Homo sapiens
agatttataataaat

SEQ ID NO: 704475 - DNA, 15 bp, Homo sapiens
gatttataataaatt

SEQ ID NO: 704476 - DNA, 15 bp, Homo sapiens
atttataataaattg

SEQ ID NO: 704477 - DNA, 15 bp, Homo sapiens
tttataataaattga

SEQ ID NO: 704478 - DNA, 15 bp, Homo sapiens
ttataataaattgag

SEQ ID NO: 704479 - DNA, 15 bp, Homo sapiens
tataataaattgagt

SEQ ID NO: 704480 - DNA, 15 bp, Homo sapiens
ataataaattgagtg

SEQ ID NO: 704481 - DNA, 15 bp, Homo sapiens
taataaattgagtgc

SEQ ID NO: 704482 - DNA, 15 bp, Homo sapiens
aataaattgagtgcc

SEQ ID NO: 704483 - DNA, 15 bp, Homo sapiens
ataaattgagtgcct

SEQ ID NO: 704484 - DNA, 15 bp, Homo sapiens
taaattgagtgccta

SEQ ID NO: 704485 - DNA, 15 bp, Homo sapiens
aaattgagtgcctat

SEQ ID NO: 704486 - DNA, 15 bp, Homo sapiens
aattgagtgcctatt

SEQ ID NO: 704487 - DNA, 15 bp, Homo sapiens
attgagtgcctatta

SEQ ID NO: 704488 - DNA, 15 bp, Homo sapiens
ttgagtgcctattat

SEQ ID NO: 704489 - DNA, 15 bp, Homo sapiens
tgagtgcctattata

SEQ ID NO: 704490 - DNA, 15 bp, Homo sapiens
gagtgcctattatac

SEQ ID NO: 704491 - DNA, 15 bp, Homo sapiens
agtgcctattataca

SEQ ID NO: 704492 - DNA, 15 bp, Homo sapiens
gtgcctattatacac

SEQ ID NO: 704493 - DNA, 15 bp, Homo sapiens
tgcctattatacaca

SEQ ID NO: 704494 - DNA, 15 bp, Homo sapiens
gcctattatacacaa

SEQ ID NO: 704495 - DNA, 15 bp, Homo sapiens
cctattatacacaag

SEQ ID NO: 704496 - DNA, 15 bp, Homo sapiens
ctattatacacaagg

SEQ ID NO: 704497 - DNA, 15 bp, Homo sapiens
tattatacacaaggc

SEQ ID NO: 704498 - DNA, 15 bp, Homo sapiens
attatacacaaggca

SEQ ID NO: 704499 - DNA, 15 bp, Homo sapiens
ttatacacaaggcac

SEQ ID NO: 704500 - DNA, 15 bp, Homo sapiens
tatacacaaggcact

SEQ ID NO: 704501 - DNA, 15 bp, Homo sapiens
atacacaaggcactg

SEQ ID NO: 704502 - DNA, 15 bp, Homo sapiens
tacacaaggcactgt

SEQ ID NO: 704503 - DNA, 15 bp, Homo sapiens
acacaaggcactgtg

SEQ ID NO: 704504 - DNA, 15 bp, Homo sapiens
cacaaggcactgtgc

SEQ ID NO: 704505 - DNA, 15 bp, Homo sapiens
acaaggcactgtgct

SEQ ID NO: 704506 - DNA, 15 bp, Homo sapiens
caaggcactgtgctg

SEQ ID NO: 704507 - DNA, 15 bp, Homo sapiens
aaggcactgtgctga

SEQ ID NO: 704508 - DNA, 15 bp, Homo sapiens
aggcactgtgctgag

SEQ ID NO: 704509 - DNA, 15 bp, Homo sapiens
ggcactgtgctgagt

SEQ ID NO: 704510 - DNA, 15 bp, Homo sapiens
gcactgtgctgagtg

SEQ ID NO: 704511 - DNA, 15 bp, Homo sapiens
cactgtgctgagtgc

SEQ ID NO: 704512 - DNA, 15 bp, Homo sapiens
actgtgctgagtgct

SEQ ID NO: 704513 - DNA, 15 bp, Homo sapiens
ctgtgctgagtgctg

SEQ ID NO: 704514 - DNA, 15 bp, Homo sapiens
tgtgctgagtgctga

SEQ ID NO: 704515 - DNA, 15 bp, Homo sapiens
gtgctgagtgctgaa

SEQ ID NO: 704516 - DNA, 15 bp, Homo sapiens
tgctgagtgctgaaa

SEQ ID NO: 704517 - DNA, 15 bp, Homo sapiens
gctgagtgctgaaaa

SEQ ID NO: 704518 - DNA, 15 bp, Homo sapiens
ctgagtgctgaaaat

SEQ ID NO: 704519 - DNA, 15 bp, Homo sapiens
tgagtgctgaaaatg

SEQ ID NO: 704520 - DNA, 15 bp, Homo sapiens
gagtgctgaaaatgt

SEQ ID NO: 704521 - DNA, 15 bp, Homo sapiens
agtgctgaaaatgtg

SEQ ID NO: 704522 - DNA, 15 bp, Homo sapiens
gtgctgaaaatgtgg

SEQ ID NO: 704523 - DNA, 15 bp, Homo sapiens
tgctgaaaatgtggt

SEQ ID NO: 704524 - DNA, 15 bp, Homo sapiens
gctgaaaatgtggta

SEQ ID NO: 704525 - DNA, 15 bp, Homo sapiens
ctgaaaatgtggtaa

SEQ ID NO: 704526 - DNA, 15 bp, Homo sapiens
tgaaaatgtggtaag

SEQ ID NO: 704527 - DNA, 15 bp, Homo sapiens
gaaaatgtggtaagg

SEQ ID NO: 704528 - DNA, 15 bp, Homo sapiens
aaaatgtggtaagga

SEQ ID NO: 704529 - DNA, 15 bp, Homo sapiens
aaatgtggtaaggac

SEQ ID NO: 704530 - DNA, 15 bp, Homo sapiens
aatgtggtaaggaca

SEQ ID NO: 704531 - DNA, 15 bp, Homo sapiens
atgtggtaaggacag

SEQ ID NO: 704532 - DNA, 15 bp, Homo sapiens
tgtggtaaggacaga

SEQ ID NO: 704533 - DNA, 15 bp, Homo sapiens
gtggtaaggacagac

SEQ ID NO: 704534 - DNA, 15 bp, Homo sapiens
tggtaaggacagaca

SEQ ID NO: 704535 - DNA, 15 bp, Homo sapiens
ggtaaggacagacag

SEQ ID NO: 704536 - DNA, 15 bp, Homo sapiens
gtaaggacagacagc

SEQ ID NO: 704537 - DNA, 15 bp, Homo sapiens
taaggacagacagca

SEQ ID NO: 704538 - DNA, 15 bp, Homo sapiens
aaggacagacagcac

SEQ ID NO: 704539 - DNA, 15 bp, Homo sapiens
aggacagacagcact

SEQ ID NO: 704540 - DNA, 15 bp, Homo sapiens
ggacagacagcactc

SEQ ID NO: 704541 - DNA, 15 bp, Homo sapiens
gacagacagcactcc

SEQ ID NO: 704542 - DNA, 15 bp, Homo sapiens
acagacagcactcct

SEQ ID NO: 704543 - DNA, 15 bp, Homo sapiens
cagacagcactcctt

SEQ ID NO: 704544 - DNA, 15 bp, Homo sapiens
agacagcactccttg

SEQ ID NO: 704545 - DNA, 15 bp, Homo sapiens
gacagcactccttgt

SEQ ID NO: 704546 - DNA, 15 bp, Homo sapiens
acagcactccttgtc

SEQ ID NO: 704547 - DNA, 15 bp, Homo sapiens
cagcactccttgtca

SEQ ID NO: 704548 - DNA, 15 bp, Homo sapiens
agcactccttgtcaa

SEQ ID NO: 704549 - DNA, 15 bp, Homo sapiens
gcactccttgtcaag

SEQ ID NO: 704550 - DNA, 15 bp, Homo sapiens
cactccttgtcaagc

SEQ ID NO: 704551 - DNA, 15 bp, Homo sapiens
actccttgtcaagct

SEQ ID NO: 704552 - DNA, 15 bp, Homo sapiens
ctccttgtcaagcta

SEQ ID NO: 704553 - DNA, 15 bp, Homo sapiens
tccttgtcaagctat

SEQ ID NO: 704554 - DNA, 15 bp, Homo sapiens
ccttgtcaagctatc

SEQ ID NO: 704555 - DNA, 15 bp, Homo sapiens
cttgtcaagctatct

SEQ ID NO: 704556 - DNA, 15 bp, Homo sapiens
ttgtcaagctatcta

SEQ ID NO: 704557 - DNA, 15 bp, Homo sapiens
tgtcaagctatctat

SEQ ID NO: 704558 - DNA, 15 bp, Homo sapiens
gtcaagctatctatg

SEQ ID NO: 704559 - DNA, 15 bp, Homo sapiens
tcaagctatctatgt

SEQ ID NO: 704560 - DNA, 15 bp, Homo sapiens
caagctatctatgtg

SEQ ID NO: 704561 - DNA, 15 bp, Homo sapiens
aagctatctatgtgg

SEQ ID NO: 704562 - DNA, 15 bp, Homo sapiens
agctatctatgtggt

SEQ ID NO: 704563 - DNA, 15 bp, Homo sapiens
gctatctatgtggta

SEQ ID NO: 704564 - DNA, 15 bp, Homo sapiens
ctatctatgtggtat

SEQ ID NO: 704565 - DNA, 15 bp, Homo sapiens
tatctatgtggtatc

SEQ ID NO: 704566 - DNA, 15 bp, Homo sapiens
atctatgtggtatca

SEQ ID NO: 704567 - DNA, 15 bp, Homo sapiens
tctatgtggtatcag

SEQ ID NO: 704568 - DNA, 15 bp, Homo sapiens
ctatgtggtatcagc

SEQ ID NO: 704569 - DNA, 15 bp, Homo sapiens
tatgtggtatcagcc

SEQ ID NO: 704570 - DNA, 15 bp, Homo sapiens
atgtggtatcagcca

SEQ ID NO: 704571 - DNA, 15 bp, Homo sapiens
tgtggtatcagccag

SEQ ID NO: 704572 - DNA, 15 bp, Homo sapiens
gtggtatcagccagc

SEQ ID NO: 704573 - DNA, 15 bp, Homo sapiens
tggtatcagccagct

SEQ ID NO: 704574 - DNA, 15 bp, Homo sapiens
ggtatcagccagctg

SEQ ID NO: 704575 - DNA, 15 bp, Homo sapiens
gtatcagccagctga

SEQ ID NO: 704576 - DNA, 15 bp, Homo sapiens
tatcagccagctgaa

SEQ ID NO: 704577 - DNA, 15 bp, Homo sapiens
atcagccagctgaat

SEQ ID NO: 704578 - DNA, 15 bp, Homo sapiens
tcagccagctgaata

SEQ ID NO: 704579 - DNA, 15 bp, Homo sapiens
cagccagctgaataa

SEQ ID NO: 704580 - DNA, 15 bp, Homo sapiens
agccagctgaataat

SEQ ID NO: 704581 - DNA, 15 bp, Homo sapiens
gccagctgaataatg

SEQ ID NO: 704582 - DNA, 15 bp, Homo sapiens
ccagctgaataatgg

SEQ ID NO: 704583 - DNA, 15 bp, Homo sapiens
cagctgaataatgga

SEQ ID NO: 704584 - DNA, 15 bp, Homo sapiens
agctgaataatggaa

SEQ ID NO: 704585 - DNA, 15 bp, Homo sapiens
gctgaataatggaac

SEQ ID NO: 704586 - DNA, 15 bp, Homo sapiens
ctgaataatggaaca

SEQ ID NO: 704587 - DNA, 15 bp, Homo sapiens
tgaataatggaacat

SEQ ID NO: 704588 - DNA, 15 bp, Homo sapiens
gaataatggaacatt

SEQ ID NO: 704589 - DNA, 15 bp, Homo sapiens
aataatggaacattt

SEQ ID NO: 704590 - DNA, 15 bp, Homo sapiens
ataatggaacatttg

SEQ ID NO: 704591 - DNA, 15 bp, Homo sapiens
taatggaacatttgg

SEQ ID NO: 704592 - DNA, 15 bp, Homo sapiens
aatggaacatttggg

SEQ ID NO: 704593 - DNA, 15 bp, Homo sapiens
atggaacatttgggc

SEQ ID NO: 704594 - DNA, 15 bp, Homo sapiens
tggaacatttgggcc

SEQ ID NO: 704595 - DNA, 15 bp, Homo sapiens
ggaacatttgggcca

SEQ ID NO: 704596 - DNA, 15 bp, Homo sapiens
gaacatttgggccag

SEQ ID NO: 704597 - DNA, 15 bp, Homo sapiens
aacatttgggccaga

SEQ ID NO: 704598 - DNA, 15 bp, Homo sapiens
acatttgggccagaa

SEQ ID NO: 704599 - DNA, 15 bp, Homo sapiens
catttgggccagaat

SEQ ID NO: 704600 - DNA, 15 bp, Homo sapiens
atttgggccagaata

SEQ ID NO: 704601 - DNA, 15 bp, Homo sapiens
tttgggccagaatag

SEQ ID NO: 704602 - DNA, 15 bp, Homo sapiens
ttgggccagaatagc

SEQ ID NO: 704603 - DNA, 15 bp, Homo sapiens
tgggccagaatagca

SEQ ID NO: 704604 - DNA, 15 bp, Homo sapiens
gggccagaatagcat

SEQ ID NO: 704605 - DNA, 15 bp, Homo sapiens
ggccagaatagcata

SEQ ID NO: 704606 - DNA, 15 bp, Homo sapiens
gccagaatagcatat

SEQ ID NO: 704607 - DNA, 15 bp, Homo sapiens
ccagaatagcatata

SEQ ID NO: 704608 - DNA, 15 bp, Homo sapiens
cagaatagcatatac

SEQ ID NO: 704609 - DNA, 15 bp, Homo sapiens
agaatagcatatact

SEQ ID NO: 704610 - DNA, 15 bp, Homo sapiens
gaatagcatatactg

SEQ ID NO: 704611 - DNA, 15 bp, Homo sapiens
aatagcatatactga

SEQ ID NO: 704612 - DNA, 15 bp, Homo sapiens
atagcatatactgag

SEQ ID NO: 704613 - DNA, 15 bp, Homo sapiens
tagcatatactgaga

SEQ ID NO: 704614 - DNA, 15 bp, Homo sapiens
agcatatactgagac

SEQ ID NO: 704615 - DNA, 15 bp, Homo sapiens
gcatatactgagacc

SEQ ID NO: 704616 - DNA, 15 bp, Homo sapiens
catatactgagacca

SEQ ID NO: 704617 - DNA, 15 bp, Homo sapiens
atatactgagaccag

SEQ ID NO: 704618 - DNA, 15 bp, Homo sapiens
tatactgagaccagg

SEQ ID NO: 704619 - DNA, 15 bp, Homo sapiens
atactgagaccaggg

SEQ ID NO: 704620 - DNA, 15 bp, Homo sapiens
tactgagaccagggt

SEQ ID NO: 704621 - DNA, 15 bp, Homo sapiens
actgagaccagggta

SEQ ID NO: 704622 - DNA, 15 bp, Homo sapiens
ctgagaccagggtac

SEQ ID NO: 704623 - DNA, 15 bp, Homo sapiens
tgagaccagggtacc

SEQ ID NO: 704624 - DNA, 15 bp, Homo sapiens
gagaccagggtacca

SEQ ID NO: 704625 - DNA, 15 bp, Homo sapiens
agaccagggtaccaa

SEQ ID NO: 704626 - DNA, 15 bp, Homo sapiens
gaccagggtaccaaa

SEQ ID NO: 704627 - DNA, 15 bp, Homo sapiens
accagggtaccaaag

SEQ ID NO: 704628 - DNA, 15 bp, Homo sapiens
ccagggtaccaaagg

SEQ ID NO: 704629 - DNA, 15 bp, Homo sapiens
cagggtaccaaaggt

SEQ ID NO: 704630 - DNA, 15 bp, Homo sapiens
agggtaccaaaggtg

SEQ ID NO: 704631 - DNA, 15 bp, Homo sapiens
gggtaccaaaggtgt

SEQ ID NO: 704632 - DNA, 15 bp, Homo sapiens
ggtaccaaaggtgtc

SEQ ID NO: 704633 - DNA, 15 bp, Homo sapiens
gtaccaaaggtgtcc

SEQ ID NO: 704634 - DNA, 15 bp, Homo sapiens
taccaaaggtgtcca

SEQ ID NO: 704635 - DNA, 15 bp, Homo sapiens
accaaaggtgtccaa

SEQ ID NO: 704636 - DNA, 15 bp, Homo sapiens
ccaaaggtgtccaat

SEQ ID NO: 704637 - DNA, 15 bp, Homo sapiens
caaaggtgtccaatt

SEQ ID NO: 704638 - DNA, 15 bp, Homo sapiens
aaaggtgtccaattt

SEQ ID NO: 704639 - DNA, 15 bp, Homo sapiens
aaggtgtccaattta

SEQ ID NO: 704640 - DNA, 15 bp, Homo sapiens
aggtgtccaatttaa

SEQ ID NO: 704641 - DNA, 15 bp, Homo sapiens
ggtgtccaatttaag

SEQ ID NO: 704642 - DNA, 15 bp, Homo sapiens
gtgtccaatttaagt

SEQ ID NO: 704643 - DNA, 15 bp, Homo sapiens
tgtccaatttaagtg

SEQ ID NO: 704644 - DNA, 15 bp, Homo sapiens
gtccaatttaagtga

SEQ ID NO: 704645 - DNA, 15 bp, Homo sapiens
tccaatttaagtgac

SEQ ID NO: 704646 - DNA, 15 bp, Homo sapiens
ccaatttaagtgact

SEQ ID NO: 704647 - DNA, 15 bp, Homo sapiens
caatttaagtgactc

SEQ ID NO: 704648 - DNA, 15 bp, Homo sapiens
aatttaagtgactca

SEQ ID NO: 704649 - DNA, 15 bp, Homo sapiens
atttaagtgactcaa

SEQ ID NO: 704650 - DNA, 15 bp, Homo sapiens
tttaagtgactcaaa

SEQ ID NO: 704651 - DNA, 15 bp, Homo sapiens
ttaagtgactcaaaa

SEQ ID NO: 704652 - DNA, 15 bp, Homo sapiens
taagtgactcaaaaa

SEQ ID NO: 704653 - DNA, 15 bp, Homo sapiens
aagtgactcaaaaag

SEQ ID NO: 704654 - DNA, 15 bp, Homo sapiens
agtgactcaaaaaga

SEQ ID NO: 704655 - DNA, 15 bp, Homo sapiens
gtgactcaaaaagag

SEQ ID NO: 704656 - DNA, 15 bp, Homo sapiens
tgactcaaaaagagg

SEQ ID NO: 704657 - DNA, 15 bp, Homo sapiens
gactcaaaaagagga

SEQ ID NO: 704658 - DNA, 15 bp, Homo sapiens
actcaaaaagaggaa

SEQ ID NO: 704659 - DNA, 15 bp, Homo sapiens
ctcaaaaagaggaaa

SEQ ID NO: 704660 - DNA, 15 bp, Homo sapiens
tcaaaaagaggaaat

SEQ ID NO: 704661 - DNA, 15 bp, Homo sapiens
caaaaagaggaaatg

SEQ ID NO: 704662 - DNA, 15 bp, Homo sapiens
aaaaagaggaaatgg

SEQ ID NO: 704663 - DNA, 15 bp, Homo sapiens
aaaagaggaaatggt

SEQ ID NO: 704664 - DNA, 15 bp, Homo sapiens
aaagaggaaatggta

SEQ ID NO: 704665 - DNA, 15 bp, Homo sapiens
aagaggaaatggtaa

SEQ ID NO: 704666 - DNA, 15 bp, Homo sapiens
agaggaaatggtaaa

SEQ ID NO: 704667 - DNA, 15 bp, Homo sapiens
gaggaaatggtaaat

SEQ ID NO: 704668 - DNA, 15 bp, Homo sapiens
aggaaatggtaaata

SEQ ID NO: 704669 - DNA, 15 bp, Homo sapiens
ggaaatggtaaataa

SEQ ID NO: 704670 - DNA, 15 bp, Homo sapiens
gaaatggtaaataag

SEQ ID NO: 704671 - DNA, 15 bp, Homo sapiens
aaatggtaaataaga

SEQ ID NO: 704672 - DNA, 15 bp, Homo sapiens
aatggtaaataagat

SEQ ID NO: 704673 - DNA, 15 bp, Homo sapiens
atggtaaataagata

SEQ ID NO: 704674 - DNA, 15 bp, Homo sapiens
tggtaaataagatat

SEQ ID NO: 704675 - DNA, 15 bp, Homo sapiens
ggtaaataagatatt

SEQ ID NO: 704676 - DNA, 15 bp, Homo sapiens
gtaaataagatattt

SEQ ID NO: 704677 - DNA, 15 bp, Homo sapiens
taaataagatatttc

SEQ ID NO: 704678 - DNA, 15 bp, Homo sapiens
aaataagatatttca

SEQ ID NO: 704679 - DNA, 15 bp, Homo sapiens
aataagatatttcaa

SEQ ID NO: 704680 - DNA, 15 bp, Homo sapiens
ataagatatttcaat

SEQ ID NO: 704681 - DNA, 15 bp, Homo sapiens
taagatatttcaatt

SEQ ID NO: 704682 - DNA, 15 bp, Homo sapiens
aagatatttcaattt

SEQ ID NO: 704683 - DNA, 15 bp, Homo sapiens
agatatttcaatttt

SEQ ID NO: 704684 - DNA, 15 bp, Homo sapiens
gatatttcaattttt

SEQ ID NO: 704685 - DNA, 15 bp, Homo sapiens
atatttcaatttttt

SEQ ID NO: 704686 - DNA, 15 bp, Homo sapiens
tatttcaattttttt

SEQ ID NO: 704687 - DNA, 15 bp, Homo sapiens
atttcaatttttttt

SEQ ID NO: 704688 - DNA, 15 bp, Homo sapiens
tttcaattttttttc

SEQ ID NO: 704689 - DNA, 15 bp, Homo sapiens
ttcaattttttttcc

SEQ ID NO: 704690 - DNA, 15 bp, Homo sapiens
tcaattttttttcct

SEQ ID NO: 704691 - DNA, 15 bp, Homo sapiens
caattttttttcctt

SEQ ID NO: 704692 - DNA, 15 bp, Homo sapiens
aattttttttccttg

SEQ ID NO: 704693 - DNA, 15 bp, Homo sapiens
attttttttccttga

SEQ ID NO: 704694 - DNA, 15 bp, Homo sapiens
ttttttttccttgac

SEQ ID NO: 704695 - DNA, 15 bp, Homo sapiens
tttttttccttgacc

SEQ ID NO: 704696 - DNA, 15 bp, Homo sapiens
ttttttccttgacct

SEQ ID NO: 704697 - DNA, 15 bp, Homo sapiens
tttttccttgacctt

SEQ ID NO: 704698 - DNA, 15 bp, Homo sapiens
ttttccttgacctta

SEQ ID NO: 704699 - DNA, 15 bp, Homo sapiens
tttccttgaccttag

SEQ ID NO: 704700 - DNA, 15 bp, Homo sapiens
ttccttgaccttagt

SEQ ID NO: 704701 - DNA, 15 bp, Homo sapiens
tccttgaccttagtc

SEQ ID NO: 704702 - DNA, 15 bp, Homo sapiens
ccttgaccttagtca

SEQ ID NO: 704703 - DNA, 15 bp, Homo sapiens
cttgaccttagtcac

SEQ ID NO: 704704 - DNA, 15 bp, Homo sapiens
ttgaccttagtcaca

SEQ ID NO: 704705 - DNA, 15 bp, Homo sapiens
tgaccttagtcacat

SEQ ID NO: 704706 - DNA, 15 bp, Homo sapiens
gaccttagtcacatc

SEQ ID NO: 704707 - DNA, 15 bp, Homo sapiens
accttagtcacatct

SEQ ID NO: 704708 - DNA, 15 bp, Homo sapiens
ccttagtcacatctg

SEQ ID NO: 704709 - DNA, 15 bp, Homo sapiens
cttagtcacatctga

SEQ ID NO: 704710 - DNA, 15 bp, Homo sapiens
ttagtcacatctgat

SEQ ID NO: 704711 - DNA, 15 bp, Homo sapiens
tagtcacatctgatc

SEQ ID NO: 704712 - DNA, 15 bp, Homo sapiens
agtcacatctgatca

SEQ ID NO: 704713 - DNA, 15 bp, Homo sapiens
gtcacatctgatcag

SEQ ID NO: 704714 - DNA, 15 bp, Homo sapiens
tcacatctgatcaga

SEQ ID NO: 704715 - DNA, 15 bp, Homo sapiens
cacatctgatcagaa

SEQ ID NO: 704716 - DNA, 15 bp, Homo sapiens
acatctgatcagaac

SEQ ID NO: 704717 - DNA, 15 bp, Homo sapiens
catctgatcagaaca

SEQ ID NO: 704718 - DNA, 15 bp, Homo sapiens
atctgatcagaacat

SEQ ID NO: 704719 - DNA, 15 bp, Homo sapiens
tctgatcagaacatt

SEQ ID NO: 704720 - DNA, 15 bp, Homo sapiens
ctgatcagaacattc

SEQ ID NO: 704721 - DNA, 15 bp, Homo sapiens
tgatcagaacattca

SEQ ID NO: 704722 - DNA, 15 bp, Homo sapiens
gatcagaacattcaa

SEQ ID NO: 704723 - DNA, 15 bp, Homo sapiens
atcagaacattcaat

SEQ ID NO: 704724 - DNA, 15 bp, Homo sapiens
tcagaacattcaatg

SEQ ID NO: 704725 - DNA, 15 bp, Homo sapiens
cagaacattcaatgc

SEQ ID NO: 704726 - DNA, 15 bp, Homo sapiens
agaacattcaatgct

SEQ ID NO: 704727 - DNA, 15 bp, Homo sapiens
gaacattcaatgctt

SEQ ID NO: 704728 - DNA, 15 bp, Homo sapiens
aacattcaatgcttt

SEQ ID NO: 704729 - DNA, 15 bp, Homo sapiens
acattcaatgctttc

SEQ ID NO: 704730 - DNA, 15 bp, Homo sapiens
cattcaatgctttct

SEQ ID NO: 704731 - DNA, 15 bp, Homo sapiens
attcaatgctttcta

SEQ ID NO: 704732 - DNA, 15 bp, Homo sapiens
ttcaatgctttctac

SEQ ID NO: 704733 - DNA, 15 bp, Homo sapiens
tcaatgctttctaca

SEQ ID NO: 704734 - DNA, 15 bp, Homo sapiens
caatgctttctacat

SEQ ID NO: 704735 - DNA, 15 bp, Homo sapiens
aatgctttctacata

SEQ ID NO: 704736 - DNA, 15 bp, Homo sapiens
atgctttctacataa

SEQ ID NO: 704737 - DNA, 15 bp, Homo sapiens
tgctttctacataaa

SEQ ID NO: 704738 - DNA, 15 bp, Homo sapiens
gctttctacataaac

SEQ ID NO: 704739 - DNA, 15 bp, Homo sapiens
ctttctacataaact

SEQ ID NO: 704740 - DNA, 15 bp, Homo sapiens
tttctacataaactc

SEQ ID NO: 704741 - DNA, 15 bp, Homo sapiens
ttctacataaactct

SEQ ID NO: 704742 - DNA, 15 bp, Homo sapiens
tctacataaactctg

SEQ ID NO: 704743 - DNA, 15 bp, Homo sapiens
ctacataaactctgg

SEQ ID NO: 704744 - DNA, 15 bp, Homo sapiens
tacataaactctggg

SEQ ID NO: 704745 - DNA, 15 bp, Homo sapiens
acataaactctgggt

SEQ ID NO: 704746 - DNA, 15 bp, Homo sapiens
cataaactctgggtt

SEQ ID NO: 704747 - DNA, 15 bp, Homo sapiens
ataaactctgggttt

SEQ ID NO: 704748 - DNA, 15 bp, Homo sapiens
taaactctgggttta

SEQ ID NO: 704749 - DNA, 15 bp, Homo sapiens
aaactctgggtttag

SEQ ID NO: 704750 - DNA, 15 bp, Homo sapiens
aactctgggtttagg

SEQ ID NO: 704751 - DNA, 15 bp, Homo sapiens
actctgggtttaggc

SEQ ID NO: 704752 - DNA, 15 bp, Homo sapiens
ctctgggtttaggca

SEQ ID NO: 704753 - DNA, 15 bp, Homo sapiens
tctgggtttaggcag

SEQ ID NO: 704754 - DNA, 15 bp, Homo sapiens
ctgggtttaggcaga

SEQ ID NO: 704755 - DNA, 15 bp, Homo sapiens
tgggtttaggcagac

SEQ ID NO: 704756 - DNA, 15 bp, Homo sapiens
gggtttaggcagaca

SEQ ID NO: 704757 - DNA, 15 bp, Homo sapiens
ggtttaggcagacaa

SEQ ID NO: 704758 - DNA, 15 bp, Homo sapiens
gtttaggcagacaaa

SEQ ID NO: 704759 - DNA, 15 bp, Homo sapiens
tttaggcagacaaag

SEQ ID NO: 704760 - DNA, 15 bp, Homo sapiens
ttaggcagacaaaga

SEQ ID NO: 704761 - DNA, 15 bp, Homo sapiens
taggcagacaaagac

SEQ ID NO: 704762 - DNA, 15 bp, Homo sapiens
aggcagacaaagacc

SEQ ID NO: 704763 - DNA, 15 bp, Homo sapiens
ggcagacaaagacca

SEQ ID NO: 704764 - DNA, 15 bp, Homo sapiens
gcagacaaagaccac

SEQ ID NO: 704765 - DNA, 15 bp, Homo sapiens
cagacaaagaccact

SEQ ID NO: 704766 - DNA, 15 bp, Homo sapiens
agacaaagaccactc

SEQ ID NO: 704767 - DNA, 15 bp, Homo sapiens
gacaaagaccactca

SEQ ID NO: 704768 - DNA, 15 bp, Homo sapiens
acaaagaccactcac

SEQ ID NO: 704769 - DNA, 15 bp, Homo sapiens
caaagaccactcacc

SEQ ID NO: 704770 - DNA, 15 bp, Homo sapiens
aaagaccactcacca

SEQ ID NO: 704771 - DNA, 15 bp, Homo sapiens
aagaccactcaccac

SEQ ID NO: 704772 - DNA, 15 bp, Homo sapiens
agaccactcaccacc

SEQ ID NO: 704773 - DNA, 15 bp, Homo sapiens
gaccactcaccacca

SEQ ID NO: 704774 - DNA, 15 bp, Homo sapiens
accactcaccaccat

SEQ ID NO: 704775 - DNA, 15 bp, Homo sapiens
ccactcaccaccatc

SEQ ID NO: 704776 - DNA, 15 bp, Homo sapiens
cactcaccaccatcc

SEQ ID NO: 704777 - DNA, 15 bp, Homo sapiens
actcaccaccatcct

SEQ ID NO: 704778 - DNA, 15 bp, Homo sapiens
ctcaccaccatcctt

SEQ ID NO: 704779 - DNA, 15 bp, Homo sapiens
tcaccaccatccttc

SEQ ID NO: 704780 - DNA, 15 bp, Homo sapiens
caccaccatccttct

SEQ ID NO: 704781 - DNA, 15 bp, Homo sapiens
accaccatccttctt

SEQ ID NO: 704782 - DNA, 15 bp, Homo sapiens
ccaccatccttcttc

SEQ ID NO: 704783 - DNA, 15 bp, Homo sapiens
caccatccttcttct

SEQ ID NO: 704784 - DNA, 15 bp, Homo sapiens
accatccttcttctg

SEQ ID NO: 704785 - DNA, 15 bp, Homo sapiens
ccatccttcttctga

SEQ ID NO: 704786 - DNA, 15 bp, Homo sapiens
catccttcttctgac

SEQ ID NO: 704787 - DNA, 15 bp, Homo sapiens
atccttcttctgaca

SEQ ID NO: 704788 - DNA, 15 bp, Homo sapiens
tccttcttctgacag

SEQ ID NO: 704789 - DNA, 15 bp, Homo sapiens
ccttcttctgacagt

SEQ ID NO: 704790 - DNA, 15 bp, Homo sapiens
cttcttctgacagtt

SEQ ID NO: 704791 - DNA, 15 bp, Homo sapiens
ttcttctgacagtta

SEQ ID NO: 704792 - DNA, 15 bp, Homo sapiens
tcttctgacagttac

SEQ ID NO: 704793 - DNA, 15 bp, Homo sapiens
cttctgacagttaca

SEQ ID NO: 704794 - DNA, 15 bp, Homo sapiens
ttctgacagttacaa

SEQ ID NO: 704795 - DNA, 15 bp, Homo sapiens
tctgacagttacaag

SEQ ID NO: 704796 - DNA, 15 bp, Homo sapiens
ctgacagttacaagt

SEQ ID NO: 704797 - DNA, 15 bp, Homo sapiens
tgacagttacaagta

SEQ ID NO: 704798 - DNA, 15 bp, Homo sapiens
gacagttacaagtac

SEQ ID NO: 704799 - DNA, 15 bp, Homo sapiens
acagttacaagtact

SEQ ID NO: 704800 - DNA, 15 bp, Homo sapiens
cagttacaagtactc

SEQ ID NO: 704801 - DNA, 15 bp, Homo sapiens
agttacaagtactca

SEQ ID NO: 704802 - DNA, 15 bp, Homo sapiens
gttacaagtactcag

SEQ ID NO: 704803 - DNA, 15 bp, Homo sapiens
ttacaagtactcagc

SEQ ID NO: 704804 - DNA, 15 bp, Homo sapiens
tacaagtactcagcc

SEQ ID NO: 704805 - DNA, 15 bp, Homo sapiens
acaagtactcagcca

SEQ ID NO: 704806 - DNA, 15 bp, Homo sapiens
caagtactcagccaa

SEQ ID NO: 704807 - DNA, 15 bp, Homo sapiens
aagtactcagccaaa

SEQ ID NO: 704808 - DNA, 15 bp, Homo sapiens
agtactcagccaaac

SEQ ID NO: 704809 - DNA, 15 bp, Homo sapiens
gtactcagccaaaca

SEQ ID NO: 704810 - DNA, 15 bp, Homo sapiens
tactcagccaaacat

SEQ ID NO: 704811 - DNA, 15 bp, Homo sapiens
actcagccaaacata

SEQ ID NO: 704812 - DNA, 15 bp, Homo sapiens
ctcagccaaacatag

SEQ ID NO: 704813 - DNA, 15 bp, Homo sapiens
tcagccaaacatagc

SEQ ID NO: 704814 - DNA, 15 bp, Homo sapiens
cagccaaacatagct

SEQ ID NO: 704815 - DNA, 15 bp, Homo sapiens
agccaaacatagctc

SEQ ID NO: 704816 - DNA, 15 bp, Homo sapiens
gccaaacatagctca

SEQ ID NO: 704817 - DNA, 15 bp, Homo sapiens
ccaaacatagctcat

SEQ ID NO: 704818 - DNA, 15 bp, Homo sapiens
caaacatagctcatc

SEQ ID NO: 704819 - DNA, 15 bp, Homo sapiens
aaacatagctcatca

SEQ ID NO: 704820 - DNA, 15 bp, Homo sapiens
aacatagctcatcat

SEQ ID NO: 704821 - DNA, 15 bp, Homo sapiens
acatagctcatcata

SEQ ID NO: 704822 - DNA, 15 bp, Homo sapiens
catagctcatcatac

SEQ ID NO: 704823 - DNA, 15 bp, Homo sapiens
atagctcatcataca

SEQ ID NO: 704824 - DNA, 15 bp, Homo sapiens
tagctcatcatacat

SEQ ID NO: 704825 - DNA, 15 bp, Homo sapiens
agctcatcatacata

SEQ ID NO: 704826 - DNA, 15 bp, Homo sapiens
gctcatcatacatac

SEQ ID NO: 704827 - DNA, 15 bp, Homo sapiens
ctcatcatacatact

SEQ ID NO: 704828 - DNA, 15 bp, Homo sapiens
tcatcatacatacta

SEQ ID NO: 704829 - DNA, 15 bp, Homo sapiens
catcatacatactat

SEQ ID NO: 704830 - DNA, 15 bp, Homo sapiens
atcatacatactatt

SEQ ID NO: 704831 - DNA, 15 bp, Homo sapiens
tcatacatactatta

SEQ ID NO: 704832 - DNA, 15 bp, Homo sapiens
catacatactattaa

SEQ ID NO: 704833 - DNA, 15 bp, Homo sapiens
atacatactattaat

SEQ ID NO: 704834 - DNA, 15 bp, Homo sapiens
tacatactattaatt

SEQ ID NO: 704835 - DNA, 15 bp, Homo sapiens
acatactattaatta

SEQ ID NO: 704836 - DNA, 15 bp, Homo sapiens
catactattaattaa

SEQ ID NO: 704837 - DNA, 15 bp, Homo sapiens
atactattaattaaa

SEQ ID NO: 704838 - DNA, 15 bp, Homo sapiens
tactattaattaaag

SEQ ID NO: 704839 - DNA, 15 bp, Homo sapiens
actattaattaaaga

SEQ ID NO: 704840 - DNA, 15 bp, Homo sapiens
ctattaattaaagag

SEQ ID NO: 704841 - DNA, 15 bp, Homo sapiens
tattaattaaagaga

SEQ ID NO: 704842 - DNA, 15 bp, Homo sapiens
attaattaaagagaa

SEQ ID NO: 704843 - DNA, 15 bp, Homo sapiens
ttaattaaagagaag

SEQ ID NO: 704844 - DNA, 15 bp, Homo sapiens
taattaaagagaagt

SEQ ID NO: 704845 - DNA, 15 bp, Homo sapiens
aattaaagagaagtg

SEQ ID NO: 704846 - DNA, 15 bp, Homo sapiens
attaaagagaagtga

SEQ ID NO: 704847 - DNA, 15 bp, Homo sapiens
ttaaagagaagtgat

SEQ ID NO: 704848 - DNA, 15 bp, Homo sapiens
taaagagaagtgatt

SEQ ID NO: 704849 - DNA, 15 bp, Homo sapiens
aaagagaagtgattc

SEQ ID NO: 704850 - DNA, 15 bp, Homo sapiens
aagagaagtgattca

SEQ ID NO: 704851 - DNA, 15 bp, Homo sapiens
agagaagtgattcat

SEQ ID NO: 704852 - DNA, 15 bp, Homo sapiens
gagaagtgattcatc

SEQ ID NO: 704853 - DNA, 15 bp, Homo sapiens
agaagtgattcatct

SEQ ID NO: 704854 - DNA, 15 bp, Homo sapiens
gaagtgattcatctc

SEQ ID NO: 704855 - DNA, 15 bp, Homo sapiens
aagtgattcatctct

SEQ ID NO: 704856 - DNA, 15 bp, Homo sapiens
agtgattcatctctg

SEQ ID NO: 704857 - DNA, 15 bp, Homo sapiens
gtgattcatctctgg

SEQ ID NO: 704858 - DNA, 15 bp, Homo sapiens
tgattcatctctggc

SEQ ID NO: 704859 - DNA, 15 bp, Homo sapiens
gattcatctctggct

SEQ ID NO: 704860 - DNA, 15 bp, Homo sapiens
attcatctctggctt

SEQ ID NO: 704861 - DNA, 15 bp, Homo sapiens
ttcatctctggcttt

SEQ ID NO: 704862 - DNA, 15 bp, Homo sapiens
tcatctctggctttt

SEQ ID NO: 704863 - DNA, 15 bp, Homo sapiens
catctctggcttttg

SEQ ID NO: 704864 - DNA, 15 bp, Homo sapiens
atctctggcttttgc

SEQ ID NO: 704865 - DNA, 15 bp, Homo sapiens
tctctggcttttgca

SEQ ID NO: 704866 - DNA, 15 bp, Homo sapiens
ctctggcttttgcag

SEQ ID NO: 704867 - DNA, 15 bp, Homo sapiens
tctggcttttgcagg

SEQ ID NO: 704868 - DNA, 15 bp, Homo sapiens
ctggcttttgcaggg

SEQ ID NO: 704869 - DNA, 15 bp, Homo sapiens
tggcttttgcagggg

SEQ ID NO: 704870 - DNA, 15 bp, Homo sapiens
ggcttttgcagggga

SEQ ID NO: 704871 - DNA, 15 bp, Homo sapiens
gcttttgcaggggaa

SEQ ID NO: 704872 - DNA, 15 bp, Homo sapiens
cttttgcaggggaaa

SEQ ID NO: 704873 - DNA, 15 bp, Homo sapiens
ttttgcaggggaaat

SEQ ID NO: 704874 - DNA, 15 bp, Homo sapiens
tttgcaggggaaatg

SEQ ID NO: 704875 - DNA, 15 bp, Homo sapiens
ttgcaggggaaatgg

SEQ ID NO: 704876 - DNA, 15 bp, Homo sapiens
tgcaggggaaatgga

SEQ ID NO: 704877 - DNA, 15 bp, Homo sapiens
gcaggggaaatggaa

SEQ ID NO: 704878 - DNA, 15 bp, Homo sapiens
caggggaaatggaaa

SEQ ID NO: 704879 - DNA, 15 bp, Homo sapiens
aggggaaatggaaag

SEQ ID NO: 704880 - DNA, 15 bp, Homo sapiens
ggggaaatggaaagg

SEQ ID NO: 704881 - DNA, 15 bp, Homo sapiens
gggaaatggaaaggc

SEQ ID NO: 704882 - DNA, 15 bp, Homo sapiens
ggaaatggaaaggct

SEQ ID NO: 704883 - DNA, 15 bp, Homo sapiens
gaaatggaaaggctc

SEQ ID NO: 704884 - DNA, 15 bp, Homo sapiens
aaatggaaaggctca

SEQ ID NO: 704885 - DNA, 15 bp, Homo sapiens
aatggaaaggctcaa

SEQ ID NO: 704886 - DNA, 15 bp, Homo sapiens
atggaaaggctcaaa

SEQ ID NO: 704887 - DNA, 15 bp, Homo sapiens
tggaaaggctcaaaa

SEQ ID NO: 704888 - DNA, 15 bp, Homo sapiens
ggaaaggctcaaaaa

SEQ ID NO: 704889 - DNA, 15 bp, Homo sapiens
gaaaggctcaaaaac

SEQ ID NO: 704890 - DNA, 15 bp, Homo sapiens
aaaggctcaaaaact

SEQ ID NO: 704891 - DNA, 15 bp, Homo sapiens
aaggctcaaaaactt

SEQ ID NO: 704892 - DNA, 15 bp, Homo sapiens
aggctcaaaaacttt

SEQ ID NO: 704893 - DNA, 15 bp, Homo sapiens
ggctcaaaaactttc

SEQ ID NO: 704894 - DNA, 15 bp, Homo sapiens
gctcaaaaactttcc

SEQ ID NO: 704895 - DNA, 15 bp, Homo sapiens
ctcaaaaactttcct

SEQ ID NO: 704896 - DNA, 15 bp, Homo sapiens
tcaaaaactttcctg

SEQ ID NO: 704897 - DNA, 15 bp, Homo sapiens
caaaaactttcctgc

SEQ ID NO: 704898 - DNA, 15 bp, Homo sapiens
aaaaactttcctgca

SEQ ID NO: 704899 - DNA, 15 bp, Homo sapiens
aaaactttcctgcag

SEQ ID NO: 704900 - DNA, 15 bp, Homo sapiens
aaactttcctgcaga

SEQ ID NO: 704901 - DNA, 15 bp, Homo sapiens
aactttcctgcagat

SEQ ID NO: 704902 - DNA, 15 bp, Homo sapiens
actttcctgcagatg

SEQ ID NO: 704903 - DNA, 15 bp, Homo sapiens
ctttcctgcagatgg

SEQ ID NO: 704904 - DNA, 15 bp, Homo sapiens
tttcctgcagatggg

SEQ ID NO: 704905 - DNA, 15 bp, Homo sapiens
ttcctgcagatggga

SEQ ID NO: 704906 - DNA, 15 bp, Homo sapiens
tcctgcagatgggat

SEQ ID NO: 704907 - DNA, 15 bp, Homo sapiens
cctgcagatgggatc

SEQ ID NO: 704908 - DNA, 15 bp, Homo sapiens
ctgcagatgggatca

SEQ ID NO: 704909 - DNA, 15 bp, Homo sapiens
tgcagatgggatcaa

SEQ ID NO: 704910 - DNA, 15 bp, Homo sapiens
gcagatgggatcaat

SEQ ID NO: 704911 - DNA, 15 bp, Homo sapiens
cagatgggatcaatt

SEQ ID NO: 704912 - DNA, 15 bp, Homo sapiens
agatgggatcaattt

SEQ ID NO: 704913 - DNA, 15 bp, Homo sapiens
gatgggatcaatttt

SEQ ID NO: 704914 - DNA, 15 bp, Homo sapiens
atgggatcaattttt

SEQ ID NO: 704915 - DNA, 15 bp, Homo sapiens
tgggatcaattttta

SEQ ID NO: 704916 - DNA, 15 bp, Homo sapiens
gggatcaatttttaa

SEQ ID NO: 704917 - DNA, 15 bp, Homo sapiens
ggatcaatttttaaa

SEQ ID NO: 704918 - DNA, 15 bp, Homo sapiens
gatcaatttttaaag

SEQ ID NO: 704919 - DNA, 15 bp, Homo sapiens
atcaatttttaaagg

SEQ ID NO: 704920 - DNA, 15 bp, Homo sapiens
tcaatttttaaaggc

SEQ ID NO: 704921 - DNA, 15 bp, Homo sapiens
caatttttaaaggct

SEQ ID NO: 704922 - DNA, 15 bp, Homo sapiens
aatttttaaaggctc

SEQ ID NO: 704923 - DNA, 15 bp, Homo sapiens
atttttaaaggctcc

SEQ ID NO: 704924 - DNA, 15 bp, Homo sapiens
tttttaaaggctcca

SEQ ID NO: 704925 - DNA, 15 bp, Homo sapiens
ttttaaaggctccaa

SEQ ID NO: 704926 - DNA, 15 bp, Homo sapiens
tttaaaggctccaac

SEQ ID NO: 704927 - DNA, 15 bp, Homo sapiens
ttaaaggctccaact

SEQ ID NO: 704928 - DNA, 15 bp, Homo sapiens
taaaggctccaactc

SEQ ID NO: 704929 - DNA, 15 bp, Homo sapiens
aaaggctccaactct

SEQ ID NO: 704930 - DNA, 15 bp, Homo sapiens
aaggctccaactctg

SEQ ID NO: 704931 - DNA, 15 bp, Homo sapiens
aggctccaactctgc

SEQ ID NO: 704932 - DNA, 15 bp, Homo sapiens
ggctccaactctgct

SEQ ID NO: 704933 - DNA, 15 bp, Homo sapiens
gctccaactctgctt

SEQ ID NO: 704934 - DNA, 15 bp, Homo sapiens
ctccaactctgcttg

SEQ ID NO: 704935 - DNA, 15 bp, Homo sapiens
tccaactctgcttgc

SEQ ID NO: 704936 - DNA, 15 bp, Homo sapiens
ccaactctgcttgct

SEQ ID NO: 704937 - DNA, 15 bp, Homo sapiens
caactctgcttgctt

SEQ ID NO: 704938 - DNA, 15 bp, Homo sapiens
aactctgcttgcttt

SEQ ID NO: 704939 - DNA, 15 bp, Homo sapiens
actctgcttgctttg

SEQ ID NO: 704940 - DNA, 15 bp, Homo sapiens
ctctgcttgctttgc

SEQ ID NO: 704941 - DNA, 15 bp, Homo sapiens
tctgcttgctttgct

SEQ ID NO: 704942 - DNA, 15 bp, Homo sapiens
ctgcttgctttgctg

SEQ ID NO: 704943 - DNA, 15 bp, Homo sapiens
tgcttgctttgctga

SEQ ID NO: 704944 - DNA, 15 bp, Homo sapiens
gcttgctttgctgat

SEQ ID NO: 704945 - DNA, 15 bp, Homo sapiens
cttgctttgctgata

SEQ ID NO: 704946 - DNA, 15 bp, Homo sapiens
ttgctttgctgataa

SEQ ID NO: 704947 - DNA, 15 bp, Homo sapiens
tgctttgctgataaa

SEQ ID NO: 704948 - DNA, 15 bp, Homo sapiens
gctttgctgataaag

SEQ ID NO: 704949 - DNA, 15 bp, Homo sapiens
ctttgctgataaagt

SEQ ID NO: 704950 - DNA, 15 bp, Homo sapiens
tttgctgataaagtt

SEQ ID NO: 704951 - DNA, 15 bp, Homo sapiens
ttgctgataaagttc

SEQ ID NO: 704952 - DNA, 15 bp, Homo sapiens
tgctgataaagttct

SEQ ID NO: 704953 - DNA, 15 bp, Homo sapiens
gctgataaagttctt

SEQ ID NO: 704954 - DNA, 15 bp, Homo sapiens
ctgataaagttcttc

SEQ ID NO: 704955 - DNA, 15 bp, Homo sapiens
tgataaagttcttca

SEQ ID NO: 704956 - DNA, 15 bp, Homo sapiens
gataaagttcttcag

SEQ ID NO: 704957 - DNA, 15 bp, Homo sapiens
ataaagttcttcagg

SEQ ID NO: 704958 - DNA, 15 bp, Homo sapiens
taaagttcttcagga

SEQ ID NO: 704959 - DNA, 15 bp, Homo sapiens
aaagttcttcaggag

SEQ ID NO: 704960 - DNA, 15 bp, Homo sapiens
aagttcttcaggaga

SEQ ID NO: 704961 - DNA, 15 bp, Homo sapiens
agttcttcaggagat

SEQ ID NO: 704962 - DNA, 15 bp, Homo sapiens
gttcttcaggagatc

SEQ ID NO: 704963 - DNA, 15 bp, Homo sapiens
ttcttcaggagatca

SEQ ID NO: 704964 - DNA, 15 bp, Homo sapiens
tcttcaggagatcat

SEQ ID NO: 704965 - DNA, 15 bp, Homo sapiens
cttcaggagatcatg

SEQ ID NO: 704966 - DNA, 15 bp, Homo sapiens
ttcaggagatcatgg

SEQ ID NO: 704967 - DNA, 15 bp, Homo sapiens
tcaggagatcatggt

SEQ ID NO: 704968 - DNA, 15 bp, Homo sapiens
caggagatcatggtc

SEQ ID NO: 704969 - DNA, 15 bp, Homo sapiens
aggagatcatggtcc

SEQ ID NO: 704970 - DNA, 15 bp, Homo sapiens
ggagatcatggtcca

SEQ ID NO: 704971 - DNA, 15 bp, Homo sapiens
gagatcatggtccat

SEQ ID NO: 704972 - DNA, 15 bp, Homo sapiens
agatcatggtccatt

SEQ ID NO: 704973 - DNA, 15 bp, Homo sapiens
gatcatggtccattt

SEQ ID NO: 704974 - DNA, 15 bp, Homo sapiens
atcatggtccatttc

SEQ ID NO: 704975 - DNA, 15 bp, Homo sapiens
tcatggtccatttct

SEQ ID NO: 704976 - DNA, 15 bp, Homo sapiens
catggtccatttctg

SEQ ID NO: 704977 - DNA, 15 bp, Homo sapiens
atggtccatttctgc

SEQ ID NO: 704978 - DNA, 15 bp, Homo sapiens
tggtccatttctgca

SEQ ID NO: 704979 - DNA, 15 bp, Homo sapiens
ggtccatttctgcaa

SEQ ID NO: 704980 - DNA, 15 bp, Homo sapiens
gtccatttctgcaaa

SEQ ID NO: 704981 - DNA, 15 bp, Homo sapiens
tccatttctgcaaaa

SEQ ID NO: 704982 - DNA, 15 bp, Homo sapiens
ccatttctgcaaaac

SEQ ID NO: 704983 - DNA, 15 bp, Homo sapiens
catttctgcaaaacc

SEQ ID NO: 704984 - DNA, 15 bp, Homo sapiens
atttctgcaaaacct

SEQ ID NO: 704985 - DNA, 15 bp, Homo sapiens
tttctgcaaaacctg

SEQ ID NO: 704986 - DNA, 15 bp, Homo sapiens
ttctgcaaaacctga

SEQ ID NO: 704987 - DNA, 15 bp, Homo sapiens
tctgcaaaacctgat

SEQ ID NO: 704988 - DNA, 15 bp, Homo sapiens
ctgcaaaacctgatg

SEQ ID NO: 704989 - DNA, 15 bp, Homo sapiens
tgcaaaacctgatgt

SEQ ID NO: 704990 - DNA, 15 bp, Homo sapiens
gcaaaacctgatgtt

SEQ ID NO: 704991 - DNA, 15 bp, Homo sapiens
caaaacctgatgttt

SEQ ID NO: 704992 - DNA, 15 bp, Homo sapiens
aaaacctgatgtttg

SEQ ID NO: 704993 - DNA, 15 bp, Homo sapiens
aaacctgatgtttgt

SEQ ID NO: 704994 - DNA, 15 bp, Homo sapiens
aacctgatgtttgtg

SEQ ID NO: 704995 - DNA, 15 bp, Homo sapiens
acctgatgtttgtgt

SEQ ID NO: 704996 - DNA, 15 bp, Homo sapiens
cctgatgtttgtgtt

SEQ ID NO: 704997 - DNA, 15 bp, Homo sapiens
ctgatgtttgtgtta

SEQ ID NO: 704998 - DNA, 15 bp, Homo sapiens
tgatgtttgtgttac

SEQ ID NO: 704999 - DNA, 15 bp, Homo sapiens
gatgtttgtgttact

SEQ ID NO: 705000 - DNA, 15 bp, Homo sapiens
atgtttgtgttacta

SEQ ID NO: 705001 - DNA, 15 bp, Homo sapiens
tgtttgtgttactac

SEQ ID NO: 705002 - DNA, 15 bp, Homo sapiens
gtttgtgttactaca

SEQ ID NO: 705003 - DNA, 15 bp, Homo sapiens
tttgtgttactacag

SEQ ID NO: 705004 - DNA, 15 bp, Homo sapiens
ttgtgttactacagt

SEQ ID NO: 705005 - DNA, 15 bp, Homo sapiens
tgtgttactacagtc

SEQ ID NO: 705006 - DNA, 15 bp, Homo sapiens
gtgttactacagtca

SEQ ID NO: 705007 - DNA, 15 bp, Homo sapiens
tgttactacagtcag

SEQ ID NO: 705008 - DNA, 15 bp, Homo sapiens
gttactacagtcaga

SEQ ID NO: 705009 - DNA, 15 bp, Homo sapiens
ttactacagtcagat

SEQ ID NO: 705010 - DNA, 15 bp, Homo sapiens
tactacagtcagatg

SEQ ID NO: 705011 - DNA, 15 bp, Homo sapiens
actacagtcagatgg

SEQ ID NO: 705012 - DNA, 15 bp, Homo sapiens
ctacagtcagatggt

SEQ ID NO: 705013 - DNA, 15 bp, Homo sapiens
tacagtcagatggtt

SEQ ID NO: 705014 - DNA, 15 bp, Homo sapiens
acagtcagatggttt

SEQ ID NO: 705015 - DNA, 15 bp, Homo sapiens
cagtcagatggttta

SEQ ID NO: 705016 - DNA, 15 bp, Homo sapiens
agtcagatggtttat

SEQ ID NO: 705017 - DNA, 15 bp, Homo sapiens
gtcagatggtttatg

SEQ ID NO: 705018 - DNA, 15 bp, Homo sapiens
tcagatggtttatgc

SEQ ID NO: 705019 - DNA, 15 bp, Homo sapiens
cagatggtttatgca

SEQ ID NO: 705020 - DNA, 15 bp, Homo sapiens
agatggtttatgcaa

SEQ ID NO: 705021 - DNA, 15 bp, Homo sapiens
gatggtttatgcaaa

SEQ ID NO: 705022 - DNA, 15 bp, Homo sapiens
atggtttatgcaaaa

SEQ ID NO: 705023 - DNA, 15 bp, Homo sapiens
tggtttatgcaaaac

SEQ ID NO: 705024 - DNA, 15 bp, Homo sapiens
ggtttatgcaaaacc

SEQ ID NO: 705025 - DNA, 15 bp, Homo sapiens
gtttatgcaaaacct

SEQ ID NO: 705026 - DNA, 15 bp, Homo sapiens
tttatgcaaaacctg

SEQ ID NO: 705027 - DNA, 15 bp, Homo sapiens
ttatgcaaaacctga

SEQ ID NO: 705028 - DNA, 15 bp, Homo sapiens
tatgcaaaacctgaa

SEQ ID NO: 705029 - DNA, 15 bp, Homo sapiens
atgcaaaacctgaag

SEQ ID NO: 705030 - DNA, 15 bp, Homo sapiens
tgcaaaacctgaagc

SEQ ID NO: 705031 - DNA, 15 bp, Homo sapiens
gcaaaacctgaagca

SEQ ID NO: 705032 - DNA, 15 bp, Homo sapiens
caaaacctgaagcag

SEQ ID NO: 705033 - DNA, 15 bp, Homo sapiens
aaaacctgaagcaga

SEQ ID NO: 705034 - DNA, 15 bp, Homo sapiens
aaacctgaagcagaa

SEQ ID NO: 705035 - DNA, 15 bp, Homo sapiens
aacctgaagcagaat

SEQ ID NO: 705036 - DNA, 15 bp, Homo sapiens
acctgaagcagaatt

SEQ ID NO: 705037 - DNA, 15 bp, Homo sapiens
cctgaagcagaattc

SEQ ID NO: 705038 - DNA, 15 bp, Homo sapiens
ctgaagcagaattct

SEQ ID NO: 705039 - DNA, 15 bp, Homo sapiens
tgaagcagaattctt

SEQ ID NO: 705040 - DNA, 15 bp, Homo sapiens
gaagcagaattcttc

SEQ ID NO: 705041 - DNA, 15 bp, Homo sapiens
aagcagaattcttct

SEQ ID NO: 705042 - DNA, 15 bp, Homo sapiens
agcagaattcttcta

SEQ ID NO: 705043 - DNA, 15 bp, Homo sapiens
gcagaattcttctaa

SEQ ID NO: 705044 - DNA, 15 bp, Homo sapiens
cagaattcttctaaa

SEQ ID NO: 705045 - DNA, 15 bp, Homo sapiens
agaattcttctaaat

SEQ ID NO: 705046 - DNA, 15 bp, Homo sapiens
gaattcttctaaatc

SEQ ID NO: 705047 - DNA, 15 bp, Homo sapiens
aattcttctaaatcc

SEQ ID NO: 705048 - DNA, 15 bp, Homo sapiens
attcttctaaatcct

SEQ ID NO: 705049 - DNA, 15 bp, Homo sapiens
ttcttctaaatccta

SEQ ID NO: 705050 - DNA, 15 bp, Homo sapiens
tcttctaaatcctag

SEQ ID NO: 705051 - DNA, 15 bp, Homo sapiens
cttctaaatcctagg

SEQ ID NO: 705052 - DNA, 15 bp, Homo sapiens
ttctaaatcctagga

SEQ ID NO: 705053 - DNA, 15 bp, Homo sapiens
tctaaatcctaggaa

SEQ ID NO: 705054 - DNA, 15 bp, Homo sapiens
ctaaatcctaggaac

SEQ ID NO: 705055 - DNA, 15 bp, Homo sapiens
taaatcctaggaaca

SEQ ID NO: 705056 - DNA, 15 bp, Homo sapiens
aaatcctaggaacaa

SEQ ID NO: 705057 - DNA, 15 bp, Homo sapiens
aatcctaggaacaac

SEQ ID NO: 705058 - DNA, 15 bp, Homo sapiens
atcctaggaacaaca

SEQ ID NO: 705059 - DNA, 15 bp, Homo sapiens
tcctaggaacaacaa

SEQ ID NO: 705060 - DNA, 15 bp, Homo sapiens
cctaggaacaacaac

SEQ ID NO: 705061 - DNA, 15 bp, Homo sapiens
ctaggaacaacaaca

SEQ ID NO: 705062 - DNA, 15 bp, Homo sapiens
taggaacaacaacaa

SEQ ID NO: 705063 - DNA, 15 bp, Homo sapiens
aggaacaacaacaaa

SEQ ID NO: 705064 - DNA, 15 bp, Homo sapiens
ggaacaacaacaaag

SEQ ID NO: 705065 - DNA, 15 bp, Homo sapiens
gaacaacaacaaaga

SEQ ID NO: 705066 - DNA, 15 bp, Homo sapiens
aacaacaacaaagat

SEQ ID NO: 705067 - DNA, 15 bp, Homo sapiens
acaacaacaaagatg

SEQ ID NO: 705068 - DNA, 15 bp, Homo sapiens
caacaacaaagatgg

SEQ ID NO: 705069 - DNA, 15 bp, Homo sapiens
aacaacaaagatggt

SEQ ID NO: 705070 - DNA, 15 bp, Homo sapiens
acaacaaagatggtt

SEQ ID NO: 705071 - DNA, 15 bp, Homo sapiens
caacaaagatggttt

SEQ ID NO: 705072 - DNA, 15 bp, Homo sapiens
aacaaagatggttta

SEQ ID NO: 705073 - DNA, 15 bp, Homo sapiens
acaaagatggtttaa

SEQ ID NO: 705074 - DNA, 15 bp, Homo sapiens
caaagatggtttaat

SEQ ID NO: 705075 - DNA, 15 bp, Homo sapiens
aaagatggtttaata

SEQ ID NO: 705076 - DNA, 15 bp, Homo sapiens
aagatggtttaataa

SEQ ID NO: 705077 - DNA, 15 bp, Homo sapiens
agatggtttaataaa

SEQ ID NO: 705078 - DNA, 15 bp, Homo sapiens
gatggtttaataaat

SEQ ID NO: 705079 - DNA, 15 bp, Homo sapiens
atggtttaataaatt

SEQ ID NO: 705080 - DNA, 15 bp, Homo sapiens
tggtttaataaattc

SEQ ID NO: 705081 - DNA, 15 bp, Homo sapiens
ggtttaataaattca

SEQ ID NO: 705082 - DNA, 15 bp, Homo sapiens
gtttaataaattcat

SEQ ID NO: 705083 - DNA, 15 bp, Homo sapiens
tttaataaattcata

SEQ ID NO: 705084 - DNA, 15 bp, Homo sapiens
ttaataaattcatat

SEQ ID NO: 705085 - DNA, 15 bp, Homo sapiens
taataaattcatatt

SEQ ID NO: 705086 - DNA, 15 bp, Homo sapiens
aataaattcatattt

SEQ ID NO: 705087 - DNA, 15 bp, Homo sapiens
ataaattcatattta

SEQ ID NO: 705088 - DNA, 15 bp, Homo sapiens
taaattcatatttac

SEQ ID NO: 705089 - DNA, 15 bp, Homo sapiens
aaattcatatttact

SEQ ID NO: 705090 - DNA, 15 bp, Homo sapiens
aattcatatttacta

SEQ ID NO: 705091 - DNA, 15 bp, Homo sapiens
attcatatttactaa

SEQ ID NO: 705092 - DNA, 15 bp, Homo sapiens
ttcatatttactaat

SEQ ID NO: 705093 - DNA, 15 bp, Homo sapiens
tcatatttactaatt

SEQ ID NO: 705094 - DNA, 15 bp, Homo sapiens
catatttactaattc

SEQ ID NO: 705095 - DNA, 15 bp, Homo sapiens
atatttactaattca

SEQ ID NO: 705096 - DNA, 15 bp, Homo sapiens
tatttactaattcaa

SEQ ID NO: 705097 - DNA, 15 bp, Homo sapiens
atttactaattcaat

SEQ ID NO: 705098 - DNA, 15 bp, Homo sapiens
tttactaattcaatg

SEQ ID NO: 705099 - DNA, 15 bp, Homo sapiens
ttactaattcaatgc

SEQ ID NO: 705100 - DNA, 15 bp, Homo sapiens
tactaattcaatgca

SEQ ID NO: 705101 - DNA, 15 bp, Homo sapiens
actaattcaatgcaa

SEQ ID NO: 705102 - DNA, 15 bp, Homo sapiens
ctaattcaatgcaac

SEQ ID NO: 705103 - DNA, 15 bp, Homo sapiens
taattcaatgcaaca

SEQ ID NO: 705104 - DNA, 15 bp, Homo sapiens
aattcaatgcaacat

SEQ ID NO: 705105 - DNA, 15 bp, Homo sapiens
attcaatgcaacata

SEQ ID NO: 705106 - DNA, 15 bp, Homo sapiens
ttcaatgcaacatag

SEQ ID NO: 705107 - DNA, 15 bp, Homo sapiens
tcaatgcaacatagc

SEQ ID NO: 705108 - DNA, 15 bp, Homo sapiens
caatgcaacatagca

SEQ ID NO: 705109 - DNA, 15 bp, Homo sapiens
aatgcaacatagcat

SEQ ID NO: 705110 - DNA, 15 bp, Homo sapiens
atgcaacatagcatg

SEQ ID NO: 705111 - DNA, 15 bp, Homo sapiens
tgcaacatagcatga

SEQ ID NO: 705112 - DNA, 15 bp, Homo sapiens
gcaacatagcatgaa

SEQ ID NO: 705113 - DNA, 15 bp, Homo sapiens
caacatagcatgaaa

SEQ ID NO: 705114 - DNA, 15 bp, Homo sapiens
aacatagcatgaaaa

SEQ ID NO: 705115 - DNA, 15 bp, Homo sapiens
acatagcatgaaaat

SEQ ID NO: 705116 - DNA, 15 bp, Homo sapiens
catagcatgaaaatc

SEQ ID NO: 705117 - DNA, 15 bp, Homo sapiens
atagcatgaaaatcg

SEQ ID NO: 705118 - DNA, 15 bp, Homo sapiens
tagcatgaaaatcgc

SEQ ID NO: 705119 - DNA, 15 bp, Homo sapiens
agcatgaaaatcgct

SEQ ID NO: 705120 - DNA, 15 bp, Homo sapiens
gcatgaaaatcgcta

SEQ ID NO: 705121 - DNA, 15 bp, Homo sapiens
catgaaaatcgctaa

SEQ ID NO: 705122 - DNA, 15 bp, Homo sapiens
atgaaaatcgctaaa

SEQ ID NO: 705123 - DNA, 15 bp, Homo sapiens
tgaaaatcgctaaaa

SEQ ID NO: 705124 - DNA, 15 bp, Homo sapiens
gaaaatcgctaaaac

SEQ ID NO: 705125 - DNA, 15 bp, Homo sapiens
aaaatcgctaaaaca

SEQ ID NO: 705126 - DNA, 15 bp, Homo sapiens
aaatcgctaaaacaa

SEQ ID NO: 705127 - DNA, 15 bp, Homo sapiens
aatcgctaaaacaag

SEQ ID NO: 705128 - DNA, 15 bp, Homo sapiens
atcgctaaaacaagt

SEQ ID NO: 705129 - DNA, 15 bp, Homo sapiens
tcgctaaaacaagtt

SEQ ID NO: 705130 - DNA, 15 bp, Homo sapiens
cgctaaaacaagtta

SEQ ID NO: 705131 - DNA, 15 bp, Homo sapiens
gctaaaacaagttag

SEQ ID NO: 705132 - DNA, 15 bp, Homo sapiens
ctaaaacaagttagg

SEQ ID NO: 705133 - DNA, 15 bp, Homo sapiens
taaaacaagttaggc

SEQ ID NO: 705134 - DNA, 15 bp, Homo sapiens
aaaacaagttaggca

SEQ ID NO: 705135 - DNA, 15 bp, Homo sapiens
aaacaagttaggcaa

SEQ ID NO: 705136 - DNA, 15 bp, Homo sapiens
aacaagttaggcaaa

SEQ ID NO: 705137 - DNA, 15 bp, Homo sapiens
acaagttaggcaaag

SEQ ID NO: 705138 - DNA, 15 bp, Homo sapiens
caagttaggcaaaga

SEQ ID NO: 705139 - DNA, 15 bp, Homo sapiens
aagttaggcaaagaa

SEQ ID NO: 705140 - DNA, 15 bp, Homo sapiens
agttaggcaaagaaa

SEQ ID NO: 705141 - DNA, 15 bp, Homo sapiens
gttaggcaaagaaaa

SEQ ID NO: 705142 - DNA, 15 bp, Homo sapiens
ttaggcaaagaaaaa

SEQ ID NO: 705143 - DNA, 15 bp, Homo sapiens
taggcaaagaaaaag

SEQ ID NO: 705144 - DNA, 15 bp, Homo sapiens
aggcaaagaaaaagg

SEQ ID NO: 705145 - DNA, 15 bp, Homo sapiens
ggcaaagaaaaagga

SEQ ID NO: 705146 - DNA, 15 bp, Homo sapiens
gcaaagaaaaaggat

SEQ ID NO: 705147 - DNA, 15 bp, Homo sapiens
caaagaaaaaggatt

SEQ ID NO: 705148 - DNA, 15 bp, Homo sapiens
aaagaaaaaggattt

SEQ ID NO: 705149 - DNA, 15 bp, Homo sapiens
aagaaaaaggattta

SEQ ID NO: 705150 - DNA, 15 bp, Homo sapiens
agaaaaaggatttaa

SEQ ID NO: 705151 - DNA, 15 bp, Homo sapiens
gaaaaaggatttaat

SEQ ID NO: 705152 - DNA, 15 bp, Homo sapiens
aaaaaggatttaata

SEQ ID NO: 705153 - DNA, 15 bp, Homo sapiens
aaaaggatttaatag

SEQ ID NO: 705154 - DNA, 15 bp, Homo sapiens
aaaggatttaatagg

SEQ ID NO: 705155 - DNA, 15 bp, Homo sapiens
aaggatttaataggc

SEQ ID NO: 705156 - DNA, 15 bp, Homo sapiens
aggatttaataggca

SEQ ID NO: 705157 - DNA, 15 bp, Homo sapiens
ggatttaataggcaa

SEQ ID NO: 705158 - DNA, 15 bp, Homo sapiens
gatttaataggcaag

SEQ ID NO: 705159 - DNA, 15 bp, Homo sapiens
atttaataggcaagt

SEQ ID NO: 705160 - DNA, 15 bp, Homo sapiens
tttaataggcaagtg

SEQ ID NO: 705161 - DNA, 15 bp, Homo sapiens
ttaataggcaagtgg

SEQ ID NO: 705162 - DNA, 15 bp, Homo sapiens
taataggcaagtgga

SEQ ID NO: 705163 - DNA, 15 bp, Homo sapiens
aataggcaagtggag

SEQ ID NO: 705164 - DNA, 15 bp, Homo sapiens
ataggcaagtggagg

SEQ ID NO: 705165 - DNA, 15 bp, Homo sapiens
taggcaagtggagga

SEQ ID NO: 705166 - DNA, 15 bp, Homo sapiens
aggcaagtggaggaa

SEQ ID NO: 705167 - DNA, 15 bp, Homo sapiens
ggcaagtggaggaaa

SEQ ID NO: 705168 - DNA, 15 bp, Homo sapiens
gcaagtggaggaaat

SEQ ID NO: 705169 - DNA, 15 bp, Homo sapiens
caagtggaggaaatg

SEQ ID NO: 705170 - DNA, 15 bp, Homo sapiens
aagtggaggaaatga

SEQ ID NO: 705171 - DNA, 15 bp, Homo sapiens
agtggaggaaatgat

SEQ ID NO: 705172 - DNA, 15 bp, Homo sapiens
gtggaggaaatgatg

SEQ ID NO: 705173 - DNA, 15 bp, Homo sapiens
tggaggaaatgatgg

SEQ ID NO: 705174 - DNA, 15 bp, Homo sapiens
ggaggaaatgatggc

SEQ ID NO: 705175 - DNA, 15 bp, Homo sapiens
gaggaaatgatggca

SEQ ID NO: 705176 - DNA, 15 bp, Homo sapiens
aggaaatgatggcat

SEQ ID NO: 705177 - DNA, 15 bp, Homo sapiens
ggaaatgatggcatg

SEQ ID NO: 705178 - DNA, 15 bp, Homo sapiens
gaaatgatggcatgg

SEQ ID NO: 705179 - DNA, 15 bp, Homo sapiens
aaatgatggcatggt

SEQ ID NO: 705180 - DNA, 15 bp, Homo sapiens
aatgatggcatggta

SEQ ID NO: 705181 - DNA, 15 bp, Homo sapiens
atgatggcatggtaa

SEQ ID NO: 705182 - DNA, 15 bp, Homo sapiens
tgatggcatggtaat

SEQ ID NO: 705183 - DNA, 15 bp, Homo sapiens
gatggcatggtaata

SEQ ID NO: 705184 - DNA, 15 bp, Homo sapiens
atggcatggtaatac

SEQ ID NO: 705185 - DNA, 15 bp, Homo sapiens
tggcatggtaatacc

SEQ ID NO: 705186 - DNA, 15 bp, Homo sapiens
ggcatggtaatacct

SEQ ID NO: 705187 - DNA, 15 bp, Homo sapiens
gcatggtaataccta

SEQ ID NO: 705188 - DNA, 15 bp, Homo sapiens
catggtaatacctaa

SEQ ID NO: 705189 - DNA, 15 bp, Homo sapiens
atggtaatacctaaa

SEQ ID NO: 705190 - DNA, 15 bp, Homo sapiens
tggtaatacctaaag

SEQ ID NO: 705191 - DNA, 15 bp, Homo sapiens
ggtaatacctaaaga

SEQ ID NO: 705192 - DNA, 15 bp, Homo sapiens
gtaatacctaaagaa

SEQ ID NO: 705193 - DNA, 15 bp, Homo sapiens
taatacctaaagaat

SEQ ID NO: 705194 - DNA, 15 bp, Homo sapiens
aatacctaaagaata

SEQ ID NO: 705195 - DNA, 15 bp, Homo sapiens
atacctaaagaatag

SEQ ID NO: 705196 - DNA, 15 bp, Homo sapiens
tacctaaagaatagt

SEQ ID NO: 705197 - DNA, 15 bp, Homo sapiens
acctaaagaatagtc

SEQ ID NO: 705198 - DNA, 15 bp, Homo sapiens
cctaaagaatagtca

SEQ ID NO: 705199 - DNA, 15 bp, Homo sapiens
ctaaagaatagtcat

SEQ ID NO: 705200 - DNA, 15 bp, Homo sapiens
taaagaatagtcata

SEQ ID NO: 705201 - DNA, 15 bp, Homo sapiens
aaagaatagtcataa

SEQ ID NO: 705202 - DNA, 15 bp, Homo sapiens
aagaatagtcataaa

SEQ ID NO: 705203 - DNA, 15 bp, Homo sapiens
agaatagtcataaaa

SEQ ID NO: 705204 - DNA, 15 bp, Homo sapiens
gaatagtcataaaaa

SEQ ID NO: 705205 - DNA, 15 bp, Homo sapiens
aatagtcataaaaag

SEQ ID NO: 705206 - DNA, 15 bp, Homo sapiens
atagtcataaaaagt

SEQ ID NO: 705207 - DNA, 15 bp, Homo sapiens
tagtcataaaaagta

SEQ ID NO: 705208 - DNA, 15 bp, Homo sapiens
agtcataaaaagtat

SEQ ID NO: 705209 - DNA, 15 bp, Homo sapiens
gtcataaaaagtata

SEQ ID NO: 705210 - DNA, 15 bp, Homo sapiens
tcataaaaagtataa

SEQ ID NO: 705211 - DNA, 15 bp, Homo sapiens
cataaaaagtataac

SEQ ID NO: 705212 - DNA, 15 bp, Homo sapiens
ataaaaagtataaca

SEQ ID NO: 705213 - DNA, 15 bp, Homo sapiens
taaaaagtataacaa

SEQ ID NO: 705214 - DNA, 15 bp, Homo sapiens
aaaaagtataacaag

SEQ ID NO: 705215 - DNA, 15 bp, Homo sapiens
aaaagtataacaagt

SEQ ID NO: 705216 - DNA, 15 bp, Homo sapiens
aaagtataacaagta

SEQ ID NO: 705217 - DNA, 15 bp, Homo sapiens
aagtataacaagtat

SEQ ID NO: 705218 - DNA, 15 bp, Homo sapiens
agtataacaagtatg

SEQ ID NO: 705219 - DNA, 15 bp, Homo sapiens
gtataacaagtatga

SEQ ID NO: 705220 - DNA, 15 bp, Homo sapiens
tataacaagtatgaa

SEQ ID NO: 705221 - DNA, 15 bp, Homo sapiens
ataacaagtatgaat

SEQ ID NO: 705222 - DNA, 15 bp, Homo sapiens
taacaagtatgaatc

SEQ ID NO: 705223 - DNA, 15 bp, Homo sapiens
aacaagtatgaatca

SEQ ID NO: 705224 - DNA, 15 bp, Homo sapiens
acaagtatgaatcat

SEQ ID NO: 705225 - DNA, 15 bp, Homo sapiens
caagtatgaatcatc

SEQ ID NO: 705226 - DNA, 15 bp, Homo sapiens
aagtatgaatcatct

SEQ ID NO: 705227 - DNA, 15 bp, Homo sapiens
agtatgaatcatcta

SEQ ID NO: 705228 - DNA, 15 bp, Homo sapiens
gtatgaatcatctat

SEQ ID NO: 705229 - DNA, 15 bp, Homo sapiens
tatgaatcatctatg

SEQ ID NO: 705230 - DNA, 15 bp, Homo sapiens
atgaatcatctatgc

SEQ ID NO: 705231 - DNA, 15 bp, Homo sapiens
tgaatcatctatgct

SEQ ID NO: 705232 - DNA, 15 bp, Homo sapiens
gaatcatctatgctt

SEQ ID NO: 705233 - DNA, 15 bp, Homo sapiens
aatcatctatgcttg

SEQ ID NO: 705234 - DNA, 15 bp, Homo sapiens
atcatctatgcttgt

SEQ ID NO: 705235 - DNA, 15 bp, Homo sapiens
tcatctatgcttgta

SEQ ID NO: 705236 - DNA, 15 bp, Homo sapiens
catctatgcttgtaa

SEQ ID NO: 705237 - DNA, 15 bp, Homo sapiens
atctatgcttgtaaa

SEQ ID NO: 705238 - DNA, 15 bp, Homo sapiens
tctatgcttgtaaaa

SEQ ID NO: 705239 - DNA, 15 bp, Homo sapiens
ctatgcttgtaaaaa

SEQ ID NO: 705240 - DNA, 15 bp, Homo sapiens
tatgcttgtaaaaat

SEQ ID NO: 705241 - DNA, 15 bp, Homo sapiens
atgcttgtaaaaatt

SEQ ID NO: 705242 - DNA, 15 bp, Homo sapiens
tgcttgtaaaaattt

SEQ ID NO: 705243 - DNA, 15 bp, Homo sapiens
gcttgtaaaaattta

SEQ ID NO: 705244 - DNA, 15 bp, Homo sapiens
cttgtaaaaatttaa

SEQ ID NO: 705245 - DNA, 15 bp, Homo sapiens
ttgtaaaaatttaag

SEQ ID NO: 705246 - DNA, 15 bp, Homo sapiens
tgtaaaaatttaagt

SEQ ID NO: 705247 - DNA, 15 bp, Homo sapiens
gtaaaaatttaagta

SEQ ID NO: 705248 - DNA, 15 bp, Homo sapiens
taaaaatttaagtag

SEQ ID NO: 705249 - DNA, 15 bp, Homo sapiens
aaaaatttaagtagc

SEQ ID NO: 705250 - DNA, 15 bp, Homo sapiens
aaaatttaagtagca

SEQ ID NO: 705251 - DNA, 15 bp, Homo sapiens
aaatttaagtagcac

SEQ ID NO: 705252 - DNA, 15 bp, Homo sapiens
aatttaagtagcaca

SEQ ID NO: 705253 - DNA, 15 bp, Homo sapiens
atttaagtagcacag

SEQ ID NO: 705254 - DNA, 15 bp, Homo sapiens
tttaagtagcacaga

SEQ ID NO: 705255 - DNA, 15 bp, Homo sapiens
ttaagtagcacagag

SEQ ID NO: 705256 - DNA, 15 bp, Homo sapiens
taagtagcacagagt

SEQ ID NO: 705257 - DNA, 15 bp, Homo sapiens
aagtagcacagagta

SEQ ID NO: 705258 - DNA, 15 bp, Homo sapiens
agtagcacagagtaa

SEQ ID NO: 705259 - DNA, 15 bp, Homo sapiens
gtagcacagagtaac

SEQ ID NO: 705260 - DNA, 15 bp, Homo sapiens
tagcacagagtaaca

SEQ ID NO: 705261 - DNA, 15 bp, Homo sapiens
agcacagagtaacat

SEQ ID NO: 705262 - DNA, 15 bp, Homo sapiens
gcacagagtaacatt

SEQ ID NO: 705263 - DNA, 15 bp, Homo sapiens
cacagagtaacattc

SEQ ID NO: 705264 - DNA, 15 bp, Homo sapiens
acagagtaacattca

SEQ ID NO: 705265 - DNA, 15 bp, Homo sapiens
cagagtaacattcaa

SEQ ID NO: 705266 - DNA, 15 bp, Homo sapiens
agagtaacattcaag

SEQ ID NO: 705267 - DNA, 15 bp, Homo sapiens
gagtaacattcaagt

SEQ ID NO: 705268 - DNA, 15 bp, Homo sapiens
agtaacattcaagtt

SEQ ID NO: 705269 - DNA, 15 bp, Homo sapiens
gtaacattcaagttc

SEQ ID NO: 705270 - DNA, 15 bp, Homo sapiens
taacattcaagttcc

SEQ ID NO: 705271 - DNA, 15 bp, Homo sapiens
aacattcaagttcct

SEQ ID NO: 705272 - DNA, 15 bp, Homo sapiens
acattcaagttcctc

SEQ ID NO: 705273 - DNA, 15 bp, Homo sapiens
cattcaagttcctcc

SEQ ID NO: 705274 - DNA, 15 bp, Homo sapiens
attcaagttcctccg

SEQ ID NO: 705275 - DNA, 15 bp, Homo sapiens
ttcaagttcctccgc

SEQ ID NO: 705276 - DNA, 15 bp, Homo sapiens
tcaagttcctccgca

SEQ ID NO: 705277 - DNA, 15 bp, Homo sapiens
caagttcctccgcac

SEQ ID NO: 705278 - DNA, 15 bp, Homo sapiens
aagttcctccgcact

SEQ ID NO: 705279 - DNA, 15 bp, Homo sapiens
agttcctccgcacta

SEQ ID NO: 705280 - DNA, 15 bp, Homo sapiens
gttcctccgcactaa

SEQ ID NO: 705281 - DNA, 15 bp, Homo sapiens
ttcctccgcactaac

SEQ ID NO: 705282 - DNA, 15 bp, Homo sapiens
tcctccgcactaacc

SEQ ID NO: 705283 - DNA, 15 bp, Homo sapiens
cctccgcactaacct

SEQ ID NO: 705284 - DNA, 15 bp, Homo sapiens
ctccgcactaaccta

SEQ ID NO: 705285 - DNA, 15 bp, Homo sapiens
tccgcactaacctag

SEQ ID NO: 705286 - DNA, 15 bp, Homo sapiens
ccgcactaacctagg

SEQ ID NO: 705287 - DNA, 15 bp, Homo sapiens
cgcactaacctaggt

SEQ ID NO: 705288 - DNA, 15 bp, Homo sapiens
gcactaacctaggta

SEQ ID NO: 705289 - DNA, 15 bp, Homo sapiens
cactaacctaggtaa

SEQ ID NO: 705290 - DNA, 15 bp, Homo sapiens
actaacctaggtaaa

SEQ ID NO: 705291 - DNA, 15 bp, Homo sapiens
ctaacctaggtaaag

SEQ ID NO: 705292 - DNA, 15 bp, Homo sapiens
taacctaggtaaaga

SEQ ID NO: 705293 - DNA, 15 bp, Homo sapiens
aacctaggtaaagaa

SEQ ID NO: 705294 - DNA, 15 bp, Homo sapiens
acctaggtaaagaat

SEQ ID NO: 705295 - DNA, 15 bp, Homo sapiens
cctaggtaaagaatc

SEQ ID NO: 705296 - DNA, 15 bp, Homo sapiens
ctaggtaaagaatct

SEQ ID NO: 705297 - DNA, 15 bp, Homo sapiens
taggtaaagaatcta

SEQ ID NO: 705298 - DNA, 15 bp, Homo sapiens
aggtaaagaatctaa

SEQ ID NO: 705299 - DNA, 15 bp, Homo sapiens
ggtaaagaatctaac

SEQ ID NO: 705300 - DNA, 15 bp, Homo sapiens
gtaaagaatctaact

SEQ ID NO: 705301 - DNA, 15 bp, Homo sapiens
taaagaatctaactt

SEQ ID NO: 705302 - DNA, 15 bp, Homo sapiens
aaagaatctaacttt

SEQ ID NO: 705303 - DNA, 15 bp, Homo sapiens
aagaatctaactttt

SEQ ID NO: 705304 - DNA, 15 bp, Homo sapiens
agaatctaacttttt

SEQ ID NO: 705305 - DNA, 15 bp, Homo sapiens
gaatctaactttttc

SEQ ID NO: 705306 - DNA, 15 bp, Homo sapiens
aatctaactttttct

SEQ ID NO: 705307 - DNA, 15 bp, Homo sapiens
atctaactttttctt

SEQ ID NO: 705308 - DNA, 15 bp, Homo sapiens
tctaactttttcttc

SEQ ID NO: 705309 - DNA, 15 bp, Homo sapiens
ctaactttttcttcc

SEQ ID NO: 705310 - DNA, 15 bp, Homo sapiens
taactttttcttccc

SEQ ID NO: 705311 - DNA, 15 bp, Homo sapiens
aactttttcttccca

SEQ ID NO: 705312 - DNA, 15 bp, Homo sapiens
actttttcttcccag

SEQ ID NO: 705313 - DNA, 15 bp, Homo sapiens
ctttttcttcccaga

SEQ ID NO: 705314 - DNA, 15 bp, Homo sapiens
tttttcttcccagag

SEQ ID NO: 705315 - DNA, 15 bp, Homo sapiens
ttttcttcccagaga

SEQ ID NO: 705316 - DNA, 15 bp, Homo sapiens
tttcttcccagagat

SEQ ID NO: 705317 - DNA, 15 bp, Homo sapiens
ttcttcccagagata

SEQ ID NO: 705318 - DNA, 15 bp, Homo sapiens
tcttcccagagatag

SEQ ID NO: 705319 - DNA, 15 bp, Homo sapiens
cttcccagagatagg

SEQ ID NO: 705320 - DNA, 15 bp, Homo sapiens
ttcccagagataggc

SEQ ID NO: 705321 - DNA, 15 bp, Homo sapiens
tcccagagataggca

SEQ ID NO: 705322 - DNA, 15 bp, Homo sapiens
cccagagataggcat

SEQ ID NO: 705323 - DNA, 15 bp, Homo sapiens
ccagagataggcatg

SEQ ID NO: 705324 - DNA, 15 bp, Homo sapiens
cagagataggcatgt

SEQ ID NO: 705325 - DNA, 15 bp, Homo sapiens
agagataggcatgtg

SEQ ID NO: 705326 - DNA, 15 bp, Homo sapiens
gagataggcatgtga

SEQ ID NO: 705327 - DNA, 15 bp, Homo sapiens
agataggcatgtgag

SEQ ID NO: 705328 - DNA, 15 bp, Homo sapiens
gataggcatgtgagt

SEQ ID NO: 705329 - DNA, 15 bp, Homo sapiens
ataggcatgtgagtg

SEQ ID NO: 705330 - DNA, 15 bp, Homo sapiens
taggcatgtgagtgt

SEQ ID NO: 705331 - DNA, 15 bp, Homo sapiens
aggcatgtgagtgtg

SEQ ID NO: 705332 - DNA, 15 bp, Homo sapiens
ggcatgtgagtgtgt

SEQ ID NO: 705333 - DNA, 15 bp, Homo sapiens
gcatgtgagtgtgtg

SEQ ID NO: 705334 - DNA, 15 bp, Homo sapiens
catgtgagtgtgtga

SEQ ID NO: 705335 - DNA, 15 bp, Homo sapiens
atgtgagtgtgtgaa

SEQ ID NO: 705336 - DNA, 15 bp, Homo sapiens
tgtgagtgtgtgaat

SEQ ID NO: 705337 - DNA, 15 bp, Homo sapiens
gtgagtgtgtgaatt

SEQ ID NO: 705338 - DNA, 15 bp, Homo sapiens
tgagtgtgtgaattc

SEQ ID NO: 705339 - DNA, 15 bp, Homo sapiens
gagtgtgtgaattcc

SEQ ID NO: 705340 - DNA, 15 bp, Homo sapiens
agtgtgtgaattcct

SEQ ID NO: 705341 - DNA, 15 bp, Homo sapiens
gtgtgtgaattcctt

SEQ ID NO: 705342 - DNA, 15 bp, Homo sapiens
tgtgtgaattccttg

SEQ ID NO: 705343 - DNA, 15 bp, Homo sapiens
gtgtgaattccttgg

SEQ ID NO: 705344 - DNA, 15 bp, Homo sapiens
tgtgaattccttggt

SEQ ID NO: 705345 - DNA, 15 bp, Homo sapiens
gtgaattccttggta

SEQ ID NO: 705346 - DNA, 15 bp, Homo sapiens
tgaattccttggtac

SEQ ID NO: 705347 - DNA, 15 bp, Homo sapiens
gaattccttggtacc

SEQ ID NO: 705348 - DNA, 15 bp, Homo sapiens
aattccttggtacct

SEQ ID NO: 705349 - DNA, 15 bp, Homo sapiens
attccttggtacctt

SEQ ID NO: 705350 - DNA, 15 bp, Homo sapiens
ttccttggtaccttt

SEQ ID NO: 705351 - DNA, 15 bp, Homo sapiens
tccttggtacctttg

SEQ ID NO: 705352 - DNA, 15 bp, Homo sapiens
ccttggtacctttgt

SEQ ID NO: 705353 - DNA, 15 bp, Homo sapiens
cttggtacctttgtc

SEQ ID NO: 705354 - DNA, 15 bp, Homo sapiens
ttggtacctttgtct

SEQ ID NO: 705355 - DNA, 15 bp, Homo sapiens
tggtacctttgtcta

SEQ ID NO: 705356 - DNA, 15 bp, Homo sapiens
ggtacctttgtctag

SEQ ID NO: 705357 - DNA, 15 bp, Homo sapiens
gtacctttgtctagt

SEQ ID NO: 705358 - DNA, 15 bp, Homo sapiens
tacctttgtctagtg

SEQ ID NO: 705359 - DNA, 15 bp, Homo sapiens
acctttgtctagtga

SEQ ID NO: 705360 - DNA, 15 bp, Homo sapiens
cctttgtctagtgac

SEQ ID NO: 705361 - DNA, 15 bp, Homo sapiens
ctttgtctagtgaca

SEQ ID NO: 705362 - DNA, 15 bp, Homo sapiens
tttgtctagtgacag

SEQ ID NO: 705363 - DNA, 15 bp, Homo sapiens
ttgtctagtgacagt

SEQ ID NO: 705364 - DNA, 15 bp, Homo sapiens
tgtctagtgacagta

SEQ ID NO: 705365 - DNA, 15 bp, Homo sapiens
gtctagtgacagtat

SEQ ID NO: 705366 - DNA, 15 bp, Homo sapiens
tctagtgacagtatt

SEQ ID NO: 705367 - DNA, 15 bp, Homo sapiens
ctagtgacagtattt

SEQ ID NO: 705368 - DNA, 15 bp, Homo sapiens
tagtgacagtatttg

SEQ ID NO: 705369 - DNA, 15 bp, Homo sapiens
agtgacagtatttgt

SEQ ID NO: 705370 - DNA, 15 bp, Homo sapiens
gtgacagtatttgta

SEQ ID NO: 705371 - DNA, 15 bp, Homo sapiens
tgacagtatttgtaa

SEQ ID NO: 705372 - DNA, 15 bp, Homo sapiens
gacagtatttgtaac

SEQ ID NO: 705373 - DNA, 15 bp, Homo sapiens
acagtatttgtaact

SEQ ID NO: 705374 - DNA, 15 bp, Homo sapiens
cagtatttgtaactg

SEQ ID NO: 705375 - DNA, 15 bp, Homo sapiens
agtatttgtaactgt

SEQ ID NO: 705376 - DNA, 15 bp, Homo sapiens
gtatttgtaactgtt

SEQ ID NO: 705377 - DNA, 15 bp, Homo sapiens
tatttgtaactgttg

SEQ ID NO: 705378 - DNA, 15 bp, Homo sapiens
atttgtaactgttga

SEQ ID NO: 705379 - DNA, 15 bp, Homo sapiens
tttgtaactgttgat

SEQ ID NO: 705380 - DNA, 15 bp, Homo sapiens
ttgtaactgttgatt

SEQ ID NO: 705381 - DNA, 15 bp, Homo sapiens
tgtaactgttgattt

SEQ ID NO: 705382 - DNA, 15 bp, Homo sapiens
gtaactgttgatttc

SEQ ID NO: 705383 - DNA, 15 bp, Homo sapiens
taactgttgatttca

SEQ ID NO: 705384 - DNA, 15 bp, Homo sapiens
aactgttgatttcac

SEQ ID NO: 705385 - DNA, 15 bp, Homo sapiens
actgttgatttcact

SEQ ID NO: 705386 - DNA, 15 bp, Homo sapiens
ctgttgatttcactt

SEQ ID NO: 705387 - DNA, 15 bp, Homo sapiens
tgttgatttcacttt

SEQ ID NO: 705388 - DNA, 15 bp, Homo sapiens
gttgatttcactttc

SEQ ID NO: 705389 - DNA, 15 bp, Homo sapiens
ttgatttcactttca

SEQ ID NO: 705390 - DNA, 15 bp, Homo sapiens
tgatttcactttcaa

SEQ ID NO: 705391 - DNA, 15 bp, Homo sapiens
gatttcactttcaat

SEQ ID NO: 705392 - DNA, 15 bp, Homo sapiens
atttcactttcaata

SEQ ID NO: 705393 - DNA, 15 bp, Homo sapiens
tttcactttcaataa

SEQ ID NO: 705394 - DNA, 15 bp, Homo sapiens
ttcactttcaataat

SEQ ID NO: 705395 - DNA, 15 bp, Homo sapiens
tcactttcaataatt

SEQ ID NO: 705396 - DNA, 15 bp, Homo sapiens
cactttcaataattg

SEQ ID NO: 705397 - DNA, 15 bp, Homo sapiens
actttcaataattgt

SEQ ID NO: 705398 - DNA, 15 bp, Homo sapiens
ctttcaataattgtt

SEQ ID NO: 705399 - DNA, 15 bp, Homo sapiens
tttcaataattgtta

SEQ ID NO: 705400 - DNA, 15 bp, Homo sapiens
ttcaataattgttaa

SEQ ID NO: 705401 - DNA, 15 bp, Homo sapiens
tcaataattgttaaa

SEQ ID NO: 705402 - DNA, 15 bp, Homo sapiens
caataattgttaaaa

SEQ ID NO: 705403 - DNA, 15 bp, Homo sapiens
aataattgttaaaag

SEQ ID NO: 705404 - DNA, 15 bp, Homo sapiens
ataattgttaaaagc

SEQ ID NO: 705405 - DNA, 15 bp, Homo sapiens
taattgttaaaagcc

SEQ ID NO: 705406 - DNA, 15 bp, Homo sapiens
aattgttaaaagccc

SEQ ID NO: 705407 - DNA, 15 bp, Homo sapiens
attgttaaaagccct

SEQ ID NO: 705408 - DNA, 15 bp, Homo sapiens
ttgttaaaagcccta

SEQ ID NO: 705409 - DNA, 15 bp, Homo sapiens
tgttaaaagccctat

SEQ ID NO: 705410 - DNA, 15 bp, Homo sapiens
gttaaaagccctata

SEQ ID NO: 705411 - DNA, 15 bp, Homo sapiens
ttaaaagccctatac

SEQ ID NO: 705412 - DNA, 15 bp, Homo sapiens
taaaagccctatact

SEQ ID NO: 705413 - DNA, 15 bp, Homo sapiens
aaaagccctatactc

SEQ ID NO: 705414 - DNA, 15 bp, Homo sapiens
aaagccctatactcc

SEQ ID NO: 705415 - DNA, 15 bp, Homo sapiens
aagccctatactcct

SEQ ID NO: 705416 - DNA, 15 bp, Homo sapiens
agccctatactcctc

SEQ ID NO: 705417 - DNA, 15 bp, Homo sapiens
gccctatactcctct

SEQ ID NO: 705418 - DNA, 15 bp, Homo sapiens
ccctatactcctctt

SEQ ID NO: 705419 - DNA, 15 bp, Homo sapiens
cctatactcctcttt

SEQ ID NO: 705420 - DNA, 15 bp, Homo sapiens
ctatactcctctttt

SEQ ID NO: 705421 - DNA, 15 bp, Homo sapiens
tatactcctctttta

SEQ ID NO: 705422 - DNA, 15 bp, Homo sapiens
atactcctcttttat

SEQ ID NO: 705423 - DNA, 15 bp, Homo sapiens
tactcctcttttata

SEQ ID NO: 705424 - DNA, 15 bp, Homo sapiens
actcctcttttatat

SEQ ID NO: 705425 - DNA, 15 bp, Homo sapiens
ctcctcttttatatt

SEQ ID NO: 705426 - DNA, 15 bp, Homo sapiens
tcctcttttatattt

SEQ ID NO: 705427 - DNA, 15 bp, Homo sapiens
cctcttttatattta

SEQ ID NO: 705428 - DNA, 15 bp, Homo sapiens
ctcttttatatttat

SEQ ID NO: 705429 - DNA, 15 bp, Homo sapiens
tcttttatatttata

SEQ ID NO: 705430 - DNA, 15 bp, Homo sapiens
cttttatatttatat

SEQ ID NO: 705431 - DNA, 15 bp, Homo sapiens
ttttatatttatatc

SEQ ID NO: 705432 - DNA, 15 bp, Homo sapiens
tttatatttatatca

SEQ ID NO: 705433 - DNA, 15 bp, Homo sapiens
ttatatttatatcag

SEQ ID NO: 705434 - DNA, 15 bp, Homo sapiens
tatatttatatcagc

SEQ ID NO: 705435 - DNA, 15 bp, Homo sapiens
atatttatatcagcg

SEQ ID NO: 705436 - DNA, 15 bp, Homo sapiens
tatttatatcagcgt

SEQ ID NO: 705437 - DNA, 15 bp, Homo sapiens
atttatatcagcgtc

SEQ ID NO: 705438 - DNA, 15 bp, Homo sapiens
tttatatcagcgtct

SEQ ID NO: 705439 - DNA, 15 bp, Homo sapiens
ttatatcagcgtctt

SEQ ID NO: 705440 - DNA, 15 bp, Homo sapiens
tatatcagcgtcttt

SEQ ID NO: 705441 - DNA, 15 bp, Homo sapiens
atatcagcgtcttta

SEQ ID NO: 705442 - DNA, 15 bp, Homo sapiens
tatcagcgtctttaa

SEQ ID NO: 705443 - DNA, 15 bp, Homo sapiens
atcagcgtctttaag

SEQ ID NO: 705444 - DNA, 15 bp, Homo sapiens
tcagcgtctttaagt

SEQ ID NO: 705445 - DNA, 15 bp, Homo sapiens
cagcgtctttaagta

SEQ ID NO: 705446 - DNA, 15 bp, Homo sapiens
agcgtctttaagtat

SEQ ID NO: 705447 - DNA, 15 bp, Homo sapiens
gcgtctttaagtatg

SEQ ID NO: 705448 - DNA, 15 bp, Homo sapiens
cgtctttaagtatgt

SEQ ID NO: 705449 - DNA, 15 bp, Homo sapiens
gtctttaagtatgtc

SEQ ID NO: 705450 - DNA, 15 bp, Homo sapiens
tctttaagtatgtct

SEQ ID NO: 705451 - DNA, 15 bp, Homo sapiens
ctttaagtatgtctg

SEQ ID NO: 705452 - DNA, 15 bp, Homo sapiens
tttaagtatgtctgc

SEQ ID NO: 705453 - DNA, 15 bp, Homo sapiens
ttaagtatgtctgcc

SEQ ID NO: 705454 - DNA, 15 bp, Homo sapiens
taagtatgtctgcct

SEQ ID NO: 705455 - DNA, 15 bp, Homo sapiens
aagtatgtctgccta

SEQ ID NO: 705456 - DNA, 15 bp, Homo sapiens
agtatgtctgcctat

SEQ ID NO: 705457 - DNA, 15 bp, Homo sapiens
gtatgtctgcctata

SEQ ID NO: 705458 - DNA, 15 bp, Homo sapiens
tatgtctgcctataa

SEQ ID NO: 705459 - DNA, 15 bp, Homo sapiens
atgtctgcctataaa

SEQ ID NO: 705460 - DNA, 15 bp, Homo sapiens
tgtctgcctataaag

SEQ ID NO: 705461 - DNA, 15 bp, Homo sapiens
gtctgcctataaaga

SEQ ID NO: 705462 - DNA, 15 bp, Homo sapiens
tctgcctataaagag

SEQ ID NO: 705463 - DNA, 15 bp, Homo sapiens
ctgcctataaagagt

SEQ ID NO: 705464 - DNA, 15 bp, Homo sapiens
tgcctataaagagtt

SEQ ID NO: 705465 - DNA, 15 bp, Homo sapiens
gcctataaagagttg

SEQ ID NO: 705466 - DNA, 15 bp, Homo sapiens
cctataaagagttga

SEQ ID NO: 705467 - DNA, 15 bp, Homo sapiens
ctataaagagttgat

SEQ ID NO: 705468 - DNA, 15 bp, Homo sapiens
tataaagagttgatg

SEQ ID NO: 705469 - DNA, 15 bp, Homo sapiens
ataaagagttgatgg

SEQ ID NO: 705470 - DNA, 15 bp, Homo sapiens
taaagagttgatgga

SEQ ID NO: 705471 - DNA, 15 bp, Homo sapiens
aaagagttgatggaa

SEQ ID NO: 705472 - DNA, 15 bp, Homo sapiens
aagagttgatggaag

SEQ ID NO: 705473 - DNA, 15 bp, Homo sapiens
agagttgatggaaga

SEQ ID NO: 705474 - DNA, 15 bp, Homo sapiens
gagttgatggaagaa

SEQ ID NO: 705475 - DNA, 15 bp, Homo sapiens
agttgatggaagaaa

SEQ ID NO: 705476 - DNA, 15 bp, Homo sapiens
gttgatggaagaaaa

SEQ ID NO: 705477 - DNA, 15 bp, Homo sapiens
ttgatggaagaaaaa

SEQ ID NO: 705478 - DNA, 15 bp, Homo sapiens
tgatggaagaaaaag

SEQ ID NO: 705479 - DNA, 15 bp, Homo sapiens
gatggaagaaaaagg

SEQ ID NO: 705480 - DNA, 15 bp, Homo sapiens
atggaagaaaaaggt

SEQ ID NO: 705481 - DNA, 15 bp, Homo sapiens
tggaagaaaaaggta

SEQ ID NO: 705482 - DNA, 15 bp, Homo sapiens
ggaagaaaaaggtaa

SEQ ID NO: 705483 - DNA, 15 bp, Homo sapiens
gaagaaaaaggtaag

SEQ ID NO: 705484 - DNA, 15 bp, Homo sapiens
aagaaaaaggtaagc

SEQ ID NO: 705485 - DNA, 15 bp, Homo sapiens
agaaaaaggtaagcc

SEQ ID NO: 705486 - DNA, 15 bp, Homo sapiens
gaaaaaggtaagcca

SEQ ID NO: 705487 - DNA, 15 bp, Homo sapiens
aaaaaggtaagccat

SEQ ID NO: 705488 - DNA, 15 bp, Homo sapiens
aaaaggtaagccata

SEQ ID NO: 705489 - DNA, 15 bp, Homo sapiens
aaaggtaagccataa

SEQ ID NO: 705490 - DNA, 15 bp, Homo sapiens
aaggtaagccataaa

SEQ ID NO: 705491 - DNA, 15 bp, Homo sapiens
aggtaagccataaaa

SEQ ID NO: 705492 - DNA, 15 bp, Homo sapiens
ggtaagccataaaaa

SEQ ID NO: 705493 - DNA, 15 bp, Homo sapiens
gtaagccataaaaag

SEQ ID NO: 705494 - DNA, 15 bp, Homo sapiens
taagccataaaaagc

SEQ ID NO: 705495 - DNA, 15 bp, Homo sapiens
aagccataaaaagca

SEQ ID NO: 705496 - DNA, 15 bp, Homo sapiens
agccataaaaagcag

SEQ ID NO: 705497 - DNA, 15 bp, Homo sapiens
gccataaaaagcagt

SEQ ID NO: 705498 - DNA, 15 bp, Homo sapiens
ccataaaaagcagta

SEQ ID NO: 705499 - DNA, 15 bp, Homo sapiens
cataaaaagcagtaa

SEQ ID NO: 705500 - DNA, 15 bp, Homo sapiens
ataaaaagcagtaat

SEQ ID NO: 705501 - DNA, 15 bp, Homo sapiens
taaaaagcagtaatg

SEQ ID NO: 705502 - DNA, 15 bp, Homo sapiens
aaaaagcagtaatgc

SEQ ID NO: 705503 - DNA, 15 bp, Homo sapiens
aaaagcagtaatgcc

SEQ ID NO: 705504 - DNA, 15 bp, Homo sapiens
aaagcagtaatgcca

SEQ ID NO: 705505 - DNA, 15 bp, Homo sapiens
aagcagtaatgccaa

SEQ ID NO: 705506 - DNA, 15 bp, Homo sapiens
agcagtaatgccaag

SEQ ID NO: 705507 - DNA, 15 bp, Homo sapiens
gcagtaatgccaaga

SEQ ID NO: 705508 - DNA, 15 bp, Homo sapiens
cagtaatgccaagaa

SEQ ID NO: 705509 - DNA, 15 bp, Homo sapiens
agtaatgccaagaaa

SEQ ID NO: 705510 - DNA, 15 bp, Homo sapiens
gtaatgccaagaaat

SEQ ID NO: 705511 - DNA, 15 bp, Homo sapiens
taatgccaagaaatt

SEQ ID NO: 705512 - DNA, 15 bp, Homo sapiens
aatgccaagaaattg

SEQ ID NO: 705513 - DNA, 15 bp, Homo sapiens
atgccaagaaattgc

SEQ ID NO: 705514 - DNA, 15 bp, Homo sapiens
tgccaagaaattgct

SEQ ID NO: 705515 - DNA, 15 bp, Homo sapiens
gccaagaaattgctg

SEQ ID NO: 705516 - DNA, 15 bp, Homo sapiens
ccaagaaattgctgc

SEQ ID NO: 705517 - DNA, 15 bp, Homo sapiens
caagaaattgctgct

SEQ ID NO: 705518 - DNA, 15 bp, Homo sapiens
aagaaattgctgctc

SEQ ID NO: 705519 - DNA, 15 bp, Homo sapiens
agaaattgctgctct

SEQ ID NO: 705520 - DNA, 15 bp, Homo sapiens
gaaattgctgctctg

SEQ ID NO: 705521 - DNA, 15 bp, Homo sapiens
aaattgctgctctga

SEQ ID NO: 705522 - DNA, 15 bp, Homo sapiens
aattgctgctctgaa

SEQ ID NO: 705523 - DNA, 15 bp, Homo sapiens
attgctgctctgaag

SEQ ID NO: 705524 - DNA, 15 bp, Homo sapiens
ttgctgctctgaagt

SEQ ID NO: 705525 - DNA, 15 bp, Homo sapiens
tgctgctctgaagtc

SEQ ID NO: 705526 - DNA, 15 bp, Homo sapiens
gctgctctgaagtca

SEQ ID NO: 705527 - DNA, 15 bp, Homo sapiens
ctgctctgaagtcat

SEQ ID NO: 705528 - DNA, 15 bp, Homo sapiens
tgctctgaagtcatt

SEQ ID NO: 705529 - DNA, 15 bp, Homo sapiens
gctctgaagtcatta

SEQ ID NO: 705530 - DNA, 15 bp, Homo sapiens
ctctgaagtcattaa

SEQ ID NO: 705531 - DNA, 15 bp, Homo sapiens
tctgaagtcattaac

SEQ ID NO: 705532 - DNA, 15 bp, Homo sapiens
ctgaagtcattaaca

SEQ ID NO: 705533 - DNA, 15 bp, Homo sapiens
tgaagtcattaacag

SEQ ID NO: 705534 - DNA, 15 bp, Homo sapiens
gaagtcattaacagg

SEQ ID NO: 705535 - DNA, 15 bp, Homo sapiens
aagtcattaacaggc

SEQ ID NO: 705536 - DNA, 15 bp, Homo sapiens
agtcattaacaggcc

SEQ ID NO: 705537 - DNA, 15 bp, Homo sapiens
gtcattaacaggcca

SEQ ID NO: 705538 - DNA, 15 bp, Homo sapiens
tcattaacaggccac

SEQ ID NO: 705539 - DNA, 15 bp, Homo sapiens
cattaacaggccacc

SEQ ID NO: 705540 - DNA, 15 bp, Homo sapiens
attaacaggccaccg

SEQ ID NO: 705541 - DNA, 15 bp, Homo sapiens
ttaacaggccaccgc

SEQ ID NO: 705542 - DNA, 15 bp, Homo sapiens
taacaggccaccgct

SEQ ID NO: 705543 - DNA, 15 bp, Homo sapiens
aacaggccaccgctt

SEQ ID NO: 705544 - DNA, 15 bp, Homo sapiens
acaggccaccgcttt

SEQ ID NO: 705545 - DNA, 15 bp, Homo sapiens
caggccaccgctttt

SEQ ID NO: 705546 - DNA, 15 bp, Homo sapiens
aggccaccgcttttt

SEQ ID NO: 705547 - DNA, 15 bp, Homo sapiens
ggccaccgctttttc

SEQ ID NO: 705548 - DNA, 15 bp, Homo sapiens
gccaccgctttttct

SEQ ID NO: 705549 - DNA, 15 bp, Homo sapiens
ccaccgctttttctc

SEQ ID NO: 705550 - DNA, 15 bp, Homo sapiens
caccgctttttctct

SEQ ID NO: 705551 - DNA, 15 bp, Homo sapiens
accgctttttctctt

SEQ ID NO: 705552 - DNA, 15 bp, Homo sapiens
ccgctttttctcttt

SEQ ID NO: 705553 - DNA, 15 bp, Homo sapiens
cgctttttctcttta

SEQ ID NO: 705554 - DNA, 15 bp, Homo sapiens
gctttttctctttat

SEQ ID NO: 705555 - DNA, 15 bp, Homo sapiens
ctttttctctttatg

SEQ ID NO: 705556 - DNA, 15 bp, Homo sapiens
tttttctctttatga

SEQ ID NO: 705557 - DNA, 15 bp, Homo sapiens
ttttctctttatgag

SEQ ID NO: 705558 - DNA, 15 bp, Homo sapiens
tttctctttatgaga

SEQ ID NO: 705559 - DNA, 15 bp, Homo sapiens
ttctctttatgagac

SEQ ID NO: 705560 - DNA, 15 bp, Homo sapiens
tctctttatgagacg

SEQ ID NO: 705561 - DNA, 15 bp, Homo sapiens
ctctttatgagacga

SEQ ID NO: 705562 - DNA, 15 bp, Homo sapiens
tctttatgagacgac

SEQ ID NO: 705563 - DNA, 15 bp, Homo sapiens
ctttatgagacgaca

SEQ ID NO: 705564 - DNA, 15 bp, Homo sapiens
tttatgagacgacac

SEQ ID NO: 705565 - DNA, 15 bp, Homo sapiens
ttatgagacgacaca

SEQ ID NO: 705566 - DNA, 15 bp, Homo sapiens
tatgagacgacacag

SEQ ID NO: 705567 - DNA, 15 bp, Homo sapiens
atgagacgacacagg

SEQ ID NO: 705568 - DNA, 15 bp, Homo sapiens
tgagacgacacagga

SEQ ID NO: 705569 - DNA, 15 bp, Homo sapiens
gagacgacacaggat

SEQ ID NO: 705570 - DNA, 15 bp, Homo sapiens
agacgacacaggatg

SEQ ID NO: 705571 - DNA, 15 bp, Homo sapiens
gacgacacaggatgg

SEQ ID NO: 705572 - DNA, 15 bp, Homo sapiens
acgacacaggatggg

SEQ ID NO: 705573 - DNA, 15 bp, Homo sapiens
cgacacaggatggga

SEQ ID NO: 705574 - DNA, 15 bp, Homo sapiens
gacacaggatgggat

SEQ ID NO: 705575 - DNA, 15 bp, Homo sapiens
acacaggatgggatg

SEQ ID NO: 705576 - DNA, 15 bp, Homo sapiens
cacaggatgggatgg

SEQ ID NO: 705577 - DNA, 15 bp, Homo sapiens
acaggatgggatgga

SEQ ID NO: 705578 - DNA, 15 bp, Homo sapiens
caggatgggatggat

SEQ ID NO: 705579 - DNA, 15 bp, Homo sapiens
aggatgggatggatg

SEQ ID NO: 705580 - DNA, 15 bp, Homo sapiens
ggatgggatggatgg

SEQ ID NO: 705581 - DNA, 15 bp, Homo sapiens
gatgggatggatgga

SEQ ID NO: 705582 - DNA, 15 bp, Homo sapiens
atgggatggatggat

SEQ ID NO: 705583 - DNA, 15 bp, Homo sapiens
tgggatggatggatt

SEQ ID NO: 705584 - DNA, 15 bp, Homo sapiens
gggatggatggattt

SEQ ID NO: 705585 - DNA, 15 bp, Homo sapiens
ggatggatggatttg

SEQ ID NO: 705586 - DNA, 15 bp, Homo sapiens
gatggatggatttga

SEQ ID NO: 705587 - DNA, 15 bp, Homo sapiens
atggatggatttgat

SEQ ID NO: 705588 - DNA, 15 bp, Homo sapiens
tggatggatttgatc

SEQ ID NO: 705589 - DNA, 15 bp, Homo sapiens
ggatggatttgatca

SEQ ID NO: 705590 - DNA, 15 bp, Homo sapiens
gatggatttgatcac

SEQ ID NO: 705591 - DNA, 15 bp, Homo sapiens
atggatttgatcaca

SEQ ID NO: 705592 - DNA, 15 bp, Homo sapiens
tggatttgatcacac

SEQ ID NO: 705593 - DNA, 15 bp, Homo sapiens
ggatttgatcacact

SEQ ID NO: 705594 - DNA, 15 bp, Homo sapiens
gatttgatcacacta

SEQ ID NO: 705595 - DNA, 15 bp, Homo sapiens
atttgatcacactac

SEQ ID NO: 705596 - DNA, 15 bp, Homo sapiens
tttgatcacactaca

SEQ ID NO: 705597 - DNA, 15 bp, Homo sapiens
ttgatcacactacat

SEQ ID NO: 705598 - DNA, 15 bp, Homo sapiens
tgatcacactacata

SEQ ID NO: 705599 - DNA, 15 bp, Homo sapiens
gatcacactacatat

SEQ ID NO: 705600 - DNA, 15 bp, Homo sapiens
atcacactacatatg

SEQ ID NO: 705601 - DNA, 15 bp, Homo sapiens
tcacactacatatgc

SEQ ID NO: 705602 - DNA, 15 bp, Homo sapiens
cacactacatatgcc

SEQ ID NO: 705603 - DNA, 15 bp, Homo sapiens
acactacatatgcct

SEQ ID NO: 705604 - DNA, 15 bp, Homo sapiens
cactacatatgcctt

SEQ ID NO: 705605 - DNA, 15 bp, Homo sapiens
actacatatgccttc

SEQ ID NO: 705606 - DNA, 15 bp, Homo sapiens
ctacatatgccttca

SEQ ID NO: 705607 - DNA, 15 bp, Homo sapiens
tacatatgccttcaa

SEQ ID NO: 705608 - DNA, 15 bp, Homo sapiens
acatatgccttcaat

SEQ ID NO: 705609 - DNA, 15 bp, Homo sapiens
catatgccttcaata

SEQ ID NO: 705610 - DNA, 15 bp, Homo sapiens
atatgccttcaataa

SEQ ID NO: 705611 - DNA, 15 bp, Homo sapiens
tatgccttcaataat

SEQ ID NO: 705612 - DNA, 15 bp, Homo sapiens
atgccttcaataatc

SEQ ID NO: 705613 - DNA, 15 bp, Homo sapiens
tgccttcaataatct

SEQ ID NO: 705614 - DNA, 15 bp, Homo sapiens
gccttcaataatctc

SEQ ID NO: 705615 - DNA, 15 bp, Homo sapiens
ccttcaataatctca

SEQ ID NO: 705616 - DNA, 15 bp, Homo sapiens
cttcaataatctcaa

SEQ ID NO: 705617 - DNA, 15 bp, Homo sapiens
ttcaataatctcaac

SEQ ID NO: 705618 - DNA, 15 bp, Homo sapiens
tcaataatctcaact

SEQ ID NO: 705619 - DNA, 15 bp, Homo sapiens
caataatctcaactg

SEQ ID NO: 705620 - DNA, 15 bp, Homo sapiens
aataatctcaactgg

SEQ ID NO: 705621 - DNA, 15 bp, Homo sapiens
ataatctcaactggg

SEQ ID NO: 705622 - DNA, 15 bp, Homo sapiens
taatctcaactggga

SEQ ID NO: 705623 - DNA, 15 bp, Homo sapiens
aatctcaactgggaa

SEQ ID NO: 705624 - DNA, 15 bp, Homo sapiens
atctcaactgggaaa

SEQ ID NO: 705625 - DNA, 15 bp, Homo sapiens
tctcaactgggaaaa

SEQ ID NO: 705626 - DNA, 15 bp, Homo sapiens
ctcaactgggaaaat

SEQ ID NO: 705627 - DNA, 15 bp, Homo sapiens
tcaactgggaaaatg

SEQ ID NO: 705628 - DNA, 15 bp, Homo sapiens
caactgggaaaatgc

SEQ ID NO: 705629 - DNA, 15 bp, Homo sapiens
aactgggaaaatgct

SEQ ID NO: 705630 - DNA, 15 bp, Homo sapiens
actgggaaaatgctt

SEQ ID NO: 705631 - DNA, 15 bp, Homo sapiens
ctgggaaaatgcttt

SEQ ID NO: 705632 - DNA, 15 bp, Homo sapiens
tgggaaaatgcttta

SEQ ID NO: 705633 - DNA, 15 bp, Homo sapiens
gggaaaatgctttaa

SEQ ID NO: 705634 - DNA, 15 bp, Homo sapiens
ggaaaatgctttaaa

SEQ ID NO: 705635 - DNA, 15 bp, Homo sapiens
gaaaatgctttaaag

SEQ ID NO: 705636 - DNA, 15 bp, Homo sapiens
aaaatgctttaaaga

SEQ ID NO: 705637 - DNA, 15 bp, Homo sapiens
aaatgctttaaagaa

SEQ ID NO: 705638 - DNA, 15 bp, Homo sapiens
aatgctttaaagaaa

SEQ ID NO: 705639 - DNA, 15 bp, Homo sapiens
atgctttaaagaaat

SEQ ID NO: 705640 - DNA, 15 bp, Homo sapiens
tgctttaaagaaatc

SEQ ID NO: 705641 - DNA, 15 bp, Homo sapiens
gctttaaagaaatca

SEQ ID NO: 705642 - DNA, 15 bp, Homo sapiens
ctttaaagaaatcat

SEQ ID NO: 705643 - DNA, 15 bp, Homo sapiens
tttaaagaaatcatg

SEQ ID NO: 705644 - DNA, 15 bp, Homo sapiens
ttaaagaaatcatga

SEQ ID NO: 705645 - DNA, 15 bp, Homo sapiens
taaagaaatcatgac

SEQ ID NO: 705646 - DNA, 15 bp, Homo sapiens
aaagaaatcatgact

SEQ ID NO: 705647 - DNA, 15 bp, Homo sapiens
aagaaatcatgactt

SEQ ID NO: 705648 - DNA, 15 bp, Homo sapiens
agaaatcatgacttc

SEQ ID NO: 705649 - DNA, 15 bp, Homo sapiens
gaaatcatgacttcc

SEQ ID NO: 705650 - DNA, 15 bp, Homo sapiens
aaatcatgacttcca

SEQ ID NO: 705651 - DNA, 15 bp, Homo sapiens
aatcatgacttccaa

SEQ ID NO: 705652 - DNA, 15 bp, Homo sapiens
atcatgacttccaag

SEQ ID NO: 705653 - DNA, 15 bp, Homo sapiens
tcatgacttccaagt

SEQ ID NO: 705654 - DNA, 15 bp, Homo sapiens
catgacttccaagtc

SEQ ID NO: 705655 - DNA, 15 bp, Homo sapiens
atgacttccaagtct

SEQ ID NO: 705656 - DNA, 15 bp, Homo sapiens
tgacttccaagtctc

SEQ ID NO: 705657 - DNA, 15 bp, Homo sapiens
gacttccaagtctct

SEQ ID NO: 705658 - DNA, 15 bp, Homo sapiens
acttccaagtctctg

SEQ ID NO: 705659 - DNA, 15 bp, Homo sapiens
cttccaagtctctgg

SEQ ID NO: 705660 - DNA, 15 bp, Homo sapiens
ttccaagtctctggt

SEQ ID NO: 705661 - DNA, 15 bp, Homo sapiens
tccaagtctctggta

SEQ ID NO: 705662 - DNA, 15 bp, Homo sapiens
ccaagtctctggtaa

SEQ ID NO: 705663 - DNA, 15 bp, Homo sapiens
caagtctctggtaag

SEQ ID NO: 705664 - DNA, 15 bp, Homo sapiens
aagtctctggtaaga

SEQ ID NO: 705665 - DNA, 15 bp, Homo sapiens
agtctctggtaagag

SEQ ID NO: 705666 - DNA, 15 bp, Homo sapiens
gtctctggtaagaga

SEQ ID NO: 705667 - DNA, 15 bp, Homo sapiens
tctctggtaagagag

SEQ ID NO: 705668 - DNA, 15 bp, Homo sapiens
ctctggtaagagaga

SEQ ID NO: 705669 - DNA, 15 bp, Homo sapiens
tctggtaagagagac

SEQ ID NO: 705670 - DNA, 15 bp, Homo sapiens
ctggtaagagagacc

SEQ ID NO: 705671 - DNA, 15 bp, Homo sapiens
tggtaagagagaccc

SEQ ID NO: 705672 - DNA, 15 bp, Homo sapiens
ggtaagagagaccca

SEQ ID NO: 705673 - DNA, 15 bp, Homo sapiens
gtaagagagacccaa

SEQ ID NO: 705674 - DNA, 15 bp, Homo sapiens
taagagagacccaac

SEQ ID NO: 705675 - DNA, 15 bp, Homo sapiens
aagagagacccaaca

SEQ ID NO: 705676 - DNA, 15 bp, Homo sapiens
agagagacccaacag

SEQ ID NO: 705677 - DNA, 15 bp, Homo sapiens
gagagacccaacaga

SEQ ID NO: 705678 - DNA, 15 bp, Homo sapiens
agagacccaacagat

SEQ ID NO: 705679 - DNA, 15 bp, Homo sapiens
gagacccaacagatt

SEQ ID NO: 705680 - DNA, 15 bp, Homo sapiens
agacccaacagattg

SEQ ID NO: 705681 - DNA, 15 bp, Homo sapiens
gacccaacagattgg

SEQ ID NO: 705682 - DNA, 15 bp, Homo sapiens
acccaacagattggt

SEQ ID NO: 705683 - DNA, 15 bp, Homo sapiens
cccaacagattggtg

SEQ ID NO: 705684 - DNA, 15 bp, Homo sapiens
ccaacagattggtgt

SEQ ID NO: 705685 - DNA, 15 bp, Homo sapiens
caacagattggtgtt

SEQ ID NO: 705686 - DNA, 15 bp, Homo sapiens
aacagattggtgttt

SEQ ID NO: 705687 - DNA, 15 bp, Homo sapiens
acagattggtgtttt

SEQ ID NO: 705688 - DNA, 15 bp, Homo sapiens
cagattggtgttttc

SEQ ID NO: 705689 - DNA, 15 bp, Homo sapiens
agattggtgttttct

SEQ ID NO: 705690 - DNA, 15 bp, Homo sapiens
gattggtgttttctg

SEQ ID NO: 705691 - DNA, 15 bp, Homo sapiens
attggtgttttctgg

SEQ ID NO: 705692 - DNA, 15 bp, Homo sapiens
ttggtgttttctggc

SEQ ID NO: 705693 - DNA, 15 bp, Homo sapiens
tggtgttttctggct

SEQ ID NO: 705694 - DNA, 15 bp, Homo sapiens
ggtgttttctggctt

SEQ ID NO: 705695 - DNA, 15 bp, Homo sapiens
gtgttttctggctta

SEQ ID NO: 705696 - DNA, 15 bp, Homo sapiens
tgttttctggcttac

SEQ ID NO: 705697 - DNA, 15 bp, Homo sapiens
gttttctggcttact

SEQ ID NO: 705698 - DNA, 15 bp, Homo sapiens
ttttctggcttactg

SEQ ID NO: 705699 - DNA, 15 bp, Homo sapiens
tttctggcttactgt

SEQ ID NO: 705700 - DNA, 15 bp, Homo sapiens
ttctggcttactgta

SEQ ID NO: 705701 - DNA, 15 bp, Homo sapiens
tctggcttactgtaa

SEQ ID NO: 705702 - DNA, 15 bp, Homo sapiens
ctggcttactgtaat

SEQ ID NO: 705703 - DNA, 15 bp, Homo sapiens
tggcttactgtaatg

SEQ ID NO: 705704 - DNA, 15 bp, Homo sapiens
ggcttactgtaatgc

SEQ ID NO: 705705 - DNA, 15 bp, Homo sapiens
gcttactgtaatgca

SEQ ID NO: 705706 - DNA, 15 bp, Homo sapiens
cttactgtaatgcac

SEQ ID NO: 705707 - DNA, 15 bp, Homo sapiens
ttactgtaatgcact

SEQ ID NO: 705708 - DNA, 15 bp, Homo sapiens
tactgtaatgcactc

SEQ ID NO: 705709 - DNA, 15 bp, Homo sapiens
actgtaatgcactct

SEQ ID NO: 705710 - DNA, 15 bp, Homo sapiens
ctgtaatgcactctg

SEQ ID NO: 705711 - DNA, 15 bp, Homo sapiens
tgtaatgcactctgg

SEQ ID NO: 705712 - DNA, 15 bp, Homo sapiens
gtaatgcactctggg

SEQ ID NO: 705713 - DNA, 15 bp, Homo sapiens
taatgcactctgggc

SEQ ID NO: 705714 - DNA, 15 bp, Homo sapiens
aatgcactctgggcc

SEQ ID NO: 705715 - DNA, 15 bp, Homo sapiens
atgcactctgggcca

SEQ ID NO: 705716 - DNA, 15 bp, Homo sapiens
tgcactctgggccaa

SEQ ID NO: 705717 - DNA, 15 bp, Homo sapiens
gcactctgggccaaa

SEQ ID NO: 705718 - DNA, 15 bp, Homo sapiens
cactctgggccaaag

SEQ ID NO: 705719 - DNA, 15 bp, Homo sapiens
actctgggccaaaga

SEQ ID NO: 705720 - DNA, 15 bp, Homo sapiens
ctctgggccaaagaa

SEQ ID NO: 705721 - DNA, 15 bp, Homo sapiens
tctgggccaaagaat

SEQ ID NO: 705722 - DNA, 15 bp, Homo sapiens
ctgggccaaagaata

SEQ ID NO: 705723 - DNA, 15 bp, Homo sapiens
tgggccaaagaataa

SEQ ID NO: 705724 - DNA, 15 bp, Homo sapiens
gggccaaagaataat

SEQ ID NO: 705725 - DNA, 15 bp, Homo sapiens
ggccaaagaataatg

SEQ ID NO: 705726 - DNA, 15 bp, Homo sapiens
gccaaagaataatgc

SEQ ID NO: 705727 - DNA, 15 bp, Homo sapiens
ccaaagaataatgct

SEQ ID NO: 705728 - DNA, 15 bp, Homo sapiens
caaagaataatgctg

SEQ ID NO: 705729 - DNA, 15 bp, Homo sapiens
aaagaataatgctgt

SEQ ID NO: 705730 - DNA, 15 bp, Homo sapiens
aagaataatgctgta

SEQ ID NO: 705731 - DNA, 15 bp, Homo sapiens
agaataatgctgtaa

SEQ ID NO: 705732 - DNA, 15 bp, Homo sapiens
gaataatgctgtaat

SEQ ID NO: 705733 - DNA, 15 bp, Homo sapiens
aataatgctgtaata

SEQ ID NO: 705734 - DNA, 15 bp, Homo sapiens
ataatgctgtaataa

SEQ ID NO: 705735 - DNA, 15 bp, Homo sapiens
taatgctgtaataat

SEQ ID NO: 705736 - DNA, 15 bp, Homo sapiens
aatgctgtaataatt

SEQ ID NO: 705737 - DNA, 15 bp, Homo sapiens
atgctgtaataattc

SEQ ID NO: 705738 - DNA, 15 bp, Homo sapiens
tgctgtaataattct

SEQ ID NO: 705739 - DNA, 15 bp, Homo sapiens
gctgtaataattctc

SEQ ID NO: 705740 - DNA, 15 bp, Homo sapiens
ctgtaataattctct

SEQ ID NO: 705741 - DNA, 15 bp, Homo sapiens
tgtaataattctctt

SEQ ID NO: 705742 - DNA, 15 bp, Homo sapiens
gtaataattctcttg

SEQ ID NO: 705743 - DNA, 15 bp, Homo sapiens
taataattctcttga

SEQ ID NO: 705744 - DNA, 15 bp, Homo sapiens
aataattctcttgat

SEQ ID NO: 705745 - DNA, 15 bp, Homo sapiens
ataattctcttgatt

SEQ ID NO: 705746 - DNA, 15 bp, Homo sapiens
taattctcttgatta

SEQ ID NO: 705747 - DNA, 15 bp, Homo sapiens
aattctcttgattag

SEQ ID NO: 705748 - DNA, 15 bp, Homo sapiens
attctcttgattaga

SEQ ID NO: 705749 - DNA, 15 bp, Homo sapiens
ttctcttgattagaa

SEQ ID NO: 705750 - DNA, 15 bp, Homo sapiens
tctcttgattagaac

SEQ ID NO: 705751 - DNA, 15 bp, Homo sapiens
ctcttgattagaact

SEQ ID NO: 705752 - DNA, 15 bp, Homo sapiens
tcttgattagaacta

SEQ ID NO: 705753 - DNA, 15 bp, Homo sapiens
cttgattagaactat

SEQ ID NO: 705754 - DNA, 15 bp, Homo sapiens
ttgattagaactata

SEQ ID NO: 705755 - DNA, 15 bp, Homo sapiens
tgattagaactataa

SEQ ID NO: 705756 - DNA, 15 bp, Homo sapiens
gattagaactataac

SEQ ID NO: 705757 - DNA, 15 bp, Homo sapiens
attagaactataact

SEQ ID NO: 705758 - DNA, 15 bp, Homo sapiens
ttagaactataactt

SEQ ID NO: 705759 - DNA, 15 bp, Homo sapiens
tagaactataacttg

SEQ ID NO: 705760 - DNA, 15 bp, Homo sapiens
agaactataacttga

SEQ ID NO: 705761 - DNA, 15 bp, Homo sapiens
gaactataacttgaa

SEQ ID NO: 705762 - DNA, 15 bp, Homo sapiens
aactataacttgaaa

SEQ ID NO: 705763 - DNA, 15 bp, Homo sapiens
actataacttgaaaa

SEQ ID NO: 705764 - DNA, 15 bp, Homo sapiens
ctataacttgaaaat

SEQ ID NO: 705765 - DNA, 15 bp, Homo sapiens
tataacttgaaaatc

SEQ ID NO: 705766 - DNA, 15 bp, Homo sapiens
ataacttgaaaatca

SEQ ID NO: 705767 - DNA, 15 bp, Homo sapiens
taacttgaaaatcag

SEQ ID NO: 705768 - DNA, 15 bp, Homo sapiens
aacttgaaaatcaga

SEQ ID NO: 705769 - DNA, 15 bp, Homo sapiens
acttgaaaatcagaa

SEQ ID NO: 705770 - DNA, 15 bp, Homo sapiens
cttgaaaatcagaat

SEQ ID NO: 705771 - DNA, 15 bp, Homo sapiens
ttgaaaatcagaatg

SEQ ID NO: 705772 - DNA, 15 bp, Homo sapiens
tgaaaatcagaatga

SEQ ID NO: 705773 - DNA, 15 bp, Homo sapiens
gaaaatcagaatgag

SEQ ID NO: 705774 - DNA, 15 bp, Homo sapiens
aaaatcagaatgagg

SEQ ID NO: 705775 - DNA, 15 bp, Homo sapiens
aaatcagaatgaggc

SEQ ID NO: 705776 - DNA, 15 bp, Homo sapiens
aatcagaatgaggct

SEQ ID NO: 705777 - DNA, 15 bp, Homo sapiens
atcagaatgaggctg

SEQ ID NO: 705778 - DNA, 15 bp, Homo sapiens
tcagaatgaggctga

SEQ ID NO: 705779 - DNA, 15 bp, Homo sapiens
cagaatgaggctgac

SEQ ID NO: 705780 - DNA, 15 bp, Homo sapiens
agaatgaggctgacc

SEQ ID NO: 705781 - DNA, 15 bp, Homo sapiens
gaatgaggctgacca

SEQ ID NO: 705782 - DNA, 15 bp, Homo sapiens
aatgaggctgaccag

SEQ ID NO: 705783 - DNA, 15 bp, Homo sapiens
atgaggctgaccaga

SEQ ID NO: 705784 - DNA, 15 bp, Homo sapiens
tgaggctgaccagat

SEQ ID NO: 705785 - DNA, 15 bp, Homo sapiens
gaggctgaccagatg

SEQ ID NO: 705786 - DNA, 15 bp, Homo sapiens
aggctgaccagatgc

SEQ ID NO: 705787 - DNA, 15 bp, Homo sapiens
ggctgaccagatgct

SEQ ID NO: 705788 - DNA, 15 bp, Homo sapiens
gctgaccagatgctt

SEQ ID NO: 705789 - DNA, 15 bp, Homo sapiens
ctgaccagatgcttt

SEQ ID NO: 705790 - DNA, 15 bp, Homo sapiens
tgaccagatgctttt

SEQ ID NO: 705791 - DNA, 15 bp, Homo sapiens
gaccagatgcttttt

SEQ ID NO: 705792 - DNA, 15 bp, Homo sapiens
accagatgctttttg

SEQ ID NO: 705793 - DNA, 15 bp, Homo sapiens
ccagatgctttttgg

SEQ ID NO: 705794 - DNA, 15 bp, Homo sapiens
cagatgctttttggc

SEQ ID NO: 705795 - DNA, 15 bp, Homo sapiens
agatgctttttggcc

SEQ ID NO: 705796 - DNA, 15 bp, Homo sapiens
gatgctttttggccc

SEQ ID NO: 705797 - DNA, 15 bp, Homo sapiens
atgctttttggccct

SEQ ID NO: 705798 - DNA, 15 bp, Homo sapiens
tgctttttggccctg

SEQ ID NO: 705799 - DNA, 15 bp, Homo sapiens
gctttttggccctgg

SEQ ID NO: 705800 - DNA, 15 bp, Homo sapiens
ctttttggccctgga

SEQ ID NO: 705801 - DNA, 15 bp, Homo sapiens
tttttggccctggag

SEQ ID NO: 705802 - DNA, 15 bp, Homo sapiens
ttttggccctggaga

SEQ ID NO: 705803 - DNA, 15 bp, Homo sapiens
tttggccctggagaa

SEQ ID NO: 705804 - DNA, 15 bp, Homo sapiens
ttggccctggagaag

SEQ ID NO: 705805 - DNA, 15 bp, Homo sapiens
tggccctggagaagt

SEQ ID NO: 705806 - DNA, 15 bp, Homo sapiens
ggccctggagaagtg

SEQ ID NO: 705807 - DNA, 15 bp, Homo sapiens
gccctggagaagtga

SEQ ID NO: 705808 - DNA, 15 bp, Homo sapiens
ccctggagaagtgag

SEQ ID NO: 705809 - DNA, 15 bp, Homo sapiens
cctggagaagtgagg

SEQ ID NO: 705810 - DNA, 15 bp, Homo sapiens
ctggagaagtgaggg

SEQ ID NO: 705811 - DNA, 15 bp, Homo sapiens
tggagaagtgagggc

SEQ ID NO: 705812 - DNA, 15 bp, Homo sapiens
ggagaagtgagggca

SEQ ID NO: 705813 - DNA, 15 bp, Homo sapiens
gagaagtgagggcag

SEQ ID NO: 705814 - DNA, 15 bp, Homo sapiens
agaagtgagggcagg

SEQ ID NO: 705815 - DNA, 15 bp, Homo sapiens
gaagtgagggcaggg

SEQ ID NO: 705816 - DNA, 15 bp, Homo sapiens
aagtgagggcagggt

SEQ ID NO: 705817 - DNA, 15 bp, Homo sapiens
agtgagggcagggtg

SEQ ID NO: 705818 - DNA, 15 bp, Homo sapiens
gtgagggcagggtgc

SEQ ID NO: 705819 - DNA, 15 bp, Homo sapiens
tgagggcagggtgct

SEQ ID NO: 705820 - DNA, 15 bp, Homo sapiens
gagggcagggtgctg

SEQ ID NO: 705821 - DNA, 15 bp, Homo sapiens
agggcagggtgctga

SEQ ID NO: 705822 - DNA, 15 bp, Homo sapiens
gggcagggtgctgag

SEQ ID NO: 705823 - DNA, 15 bp, Homo sapiens
ggcagggtgctgaga

SEQ ID NO: 705824 - DNA, 15 bp, Homo sapiens
gcagggtgctgagac

SEQ ID NO: 705825 - DNA, 15 bp, Homo sapiens
cagggtgctgagacc

SEQ ID NO: 705826 - DNA, 15 bp, Homo sapiens
agggtgctgagacct

SEQ ID NO: 705827 - DNA, 15 bp, Homo sapiens
gggtgctgagacctc

SEQ ID NO: 705828 - DNA, 15 bp, Homo sapiens
ggtgctgagacctcc

SEQ ID NO: 705829 - DNA, 15 bp, Homo sapiens
gtgctgagacctcca

SEQ ID NO: 705830 - DNA, 15 bp, Homo sapiens
tgctgagacctccaa

SEQ ID NO: 705831 - DNA, 15 bp, Homo sapiens
gctgagacctccaat

SEQ ID NO: 705832 - DNA, 15 bp, Homo sapiens
ctgagacctccaata

SEQ ID NO: 705833 - DNA, 15 bp, Homo sapiens
tgagacctccaatat

SEQ ID NO: 705834 - DNA, 15 bp, Homo sapiens
gagacctccaatatg

SEQ ID NO: 705835 - DNA, 15 bp, Homo sapiens
agacctccaatatgc

SEQ ID NO: 705836 - DNA, 15 bp, Homo sapiens
gacctccaatatgcc

SEQ ID NO: 705837 - DNA, 15 bp, Homo sapiens
acctccaatatgcct

SEQ ID NO: 705838 - DNA, 15 bp, Homo sapiens
cctccaatatgcctc

SEQ ID NO: 705839 - DNA, 15 bp, Homo sapiens
ctccaatatgcctca

SEQ ID NO: 705840 - DNA, 15 bp, Homo sapiens
tccaatatgcctcaa

SEQ ID NO: 705841 - DNA, 15 bp, Homo sapiens
ccaatatgcctcaaa

SEQ ID NO: 705842 - DNA, 15 bp, Homo sapiens
caatatgcctcaaac

SEQ ID NO: 705843 - DNA, 15 bp, Homo sapiens
aatatgcctcaaacc

SEQ ID NO: 705844 - DNA, 15 bp, Homo sapiens
atatgcctcaaaccc

SEQ ID NO: 705845 - DNA, 15 bp, Homo sapiens
tatgcctcaaaccct

SEQ ID NO: 705846 - DNA, 15 bp, Homo sapiens
atgcctcaaacccta

SEQ ID NO: 705847 - DNA, 15 bp, Homo sapiens
tgcctcaaaccctag

SEQ ID NO: 705848 - DNA, 15 bp, Homo sapiens
gcctcaaaccctagg

SEQ ID NO: 705849 - DNA, 15 bp, Homo sapiens
cctcaaaccctaggc

SEQ ID NO: 705850 - DNA, 15 bp, Homo sapiens
ctcaaaccctaggct

SEQ ID NO: 705851 - DNA, 15 bp, Homo sapiens
tcaaaccctaggcta

SEQ ID NO: 705852 - DNA, 15 bp, Homo sapiens
caaaccctaggctac

SEQ ID NO: 705853 - DNA, 15 bp, Homo sapiens
aaaccctaggctact

SEQ ID NO: 705854 - DNA, 15 bp, Homo sapiens
aaccctaggctactt

SEQ ID NO: 705855 - DNA, 15 bp, Homo sapiens
accctaggctacttg

SEQ ID NO: 705856 - DNA, 15 bp, Homo sapiens
ccctaggctacttgg

SEQ ID NO: 705857 - DNA, 15 bp, Homo sapiens
cctaggctacttggc

SEQ ID NO: 705858 - DNA, 15 bp, Homo sapiens
ctaggctacttggcc

SEQ ID NO: 705859 - DNA, 15 bp, Homo sapiens
taggctacttggcct

SEQ ID NO: 705860 - DNA, 15 bp, Homo sapiens
aggctacttggccta

SEQ ID NO: 705861 - DNA, 15 bp, Homo sapiens
ggctacttggcctag

SEQ ID NO: 705862 - DNA, 15 bp, Homo sapiens
gctacttggcctagg

SEQ ID NO: 705863 - DNA, 15 bp, Homo sapiens
ctacttggcctagga

SEQ ID NO: 705864 - DNA, 15 bp, Homo sapiens
tacttggcctaggac

SEQ ID NO: 705865 - DNA, 15 bp, Homo sapiens
acttggcctaggaca

SEQ ID NO: 705866 - DNA, 15 bp, Homo sapiens
cttggcctaggacaa

SEQ ID NO: 705867 - DNA, 15 bp, Homo sapiens
ttggcctaggacaag

SEQ ID NO: 705868 - DNA, 15 bp, Homo sapiens
tggcctaggacaaga

SEQ ID NO: 705869 - DNA, 15 bp, Homo sapiens
ggcctaggacaagat

SEQ ID NO: 705870 - DNA, 15 bp, Homo sapiens
gcctaggacaagatg

SEQ ID NO: 705871 - DNA, 15 bp, Homo sapiens
cctaggacaagatgc

SEQ ID NO: 705872 - DNA, 15 bp, Homo sapiens
ctaggacaagatgct

SEQ ID NO: 705873 - DNA, 15 bp, Homo sapiens
taggacaagatgctg

SEQ ID NO: 705874 - DNA, 15 bp, Homo sapiens
aggacaagatgctgc

SEQ ID NO: 705875 - DNA, 15 bp, Homo sapiens
ggacaagatgctgct

SEQ ID NO: 705876 - DNA, 15 bp, Homo sapiens
gacaagatgctgcta

SEQ ID NO: 705877 - DNA, 15 bp, Homo sapiens
acaagatgctgctag

SEQ ID NO: 705878 - DNA, 15 bp, Homo sapiens
caagatgctgctagg

SEQ ID NO: 705879 - DNA, 15 bp, Homo sapiens
aagatgctgctaggt

SEQ ID NO: 705880 - DNA, 15 bp, Homo sapiens
agatgctgctaggtg

SEQ ID NO: 705881 - DNA, 15 bp, Homo sapiens
gatgctgctaggtgg

SEQ ID NO: 705882 - DNA, 15 bp, Homo sapiens
atgctgctaggtggt

SEQ ID NO: 705883 - DNA, 15 bp, Homo sapiens
tgctgctaggtggtg

SEQ ID NO: 705884 - DNA, 15 bp, Homo sapiens
gctgctaggtggtgg

SEQ ID NO: 705885 - DNA, 15 bp, Homo sapiens
ctgctaggtggtggt

SEQ ID NO: 705886 - DNA, 15 bp, Homo sapiens
tgctaggtggtggtc

SEQ ID NO: 705887 - DNA, 15 bp, Homo sapiens
gctaggtggtggtca

SEQ ID NO: 705888 - DNA, 15 bp, Homo sapiens
ctaggtggtggtcaa

SEQ ID NO: 705889 - DNA, 15 bp, Homo sapiens
taggtggtggtcaat

SEQ ID NO: 705890 - DNA, 15 bp, Homo sapiens
aggtggtggtcaatt

SEQ ID NO: 705891 - DNA, 15 bp, Homo sapiens
ggtggtggtcaattt

SEQ ID NO: 705892 - DNA, 15 bp, Homo sapiens
gtggtggtcaatttt

SEQ ID NO: 705893 - DNA, 15 bp, Homo sapiens
tggtggtcaattttt

SEQ ID NO: 705894 - DNA, 15 bp, Homo sapiens
ggtggtcaattttta

SEQ ID NO: 705895 - DNA, 15 bp, Homo sapiens
gtggtcaatttttaa

SEQ ID NO: 705896 - DNA, 15 bp, Homo sapiens
tggtcaatttttaaa

SEQ ID NO: 705897 - DNA, 15 bp, Homo sapiens
ggtcaatttttaaaa

SEQ ID NO: 705898 - DNA, 15 bp, Homo sapiens
gtcaatttttaaaag

SEQ ID NO: 705899 - DNA, 15 bp, Homo sapiens
tcaatttttaaaagt

SEQ ID NO: 705900 - DNA, 15 bp, Homo sapiens
caatttttaaaagtt

SEQ ID NO: 705901 - DNA, 15 bp, Homo sapiens
aatttttaaaagttt

SEQ ID NO: 705902 - DNA, 15 bp, Homo sapiens
atttttaaaagtttc

SEQ ID NO: 705903 - DNA, 15 bp, Homo sapiens
tttttaaaagtttcc

SEQ ID NO: 705904 - DNA, 15 bp, Homo sapiens
ttttaaaagtttcct

SEQ ID NO: 705905 - DNA, 15 bp, Homo sapiens
tttaaaagtttcctc

SEQ ID NO: 705906 - DNA, 15 bp, Homo sapiens
ttaaaagtttcctct

SEQ ID NO: 705907 - DNA, 15 bp, Homo sapiens
taaaagtttcctctc

SEQ ID NO: 705908 - DNA, 15 bp, Homo sapiens
aaaagtttcctctcc

SEQ ID NO: 705909 - DNA, 15 bp, Homo sapiens
aaagtttcctctcca

SEQ ID NO: 705910 - DNA, 15 bp, Homo sapiens
aagtttcctctccaa

SEQ ID NO: 705911 - DNA, 15 bp, Homo sapiens
agtttcctctccaag

SEQ ID NO: 705912 - DNA, 15 bp, Homo sapiens
gtttcctctccaagc

SEQ ID NO: 705913 - DNA, 15 bp, Homo sapiens
tttcctctccaagct

SEQ ID NO: 705914 - DNA, 15 bp, Homo sapiens
ttcctctccaagcta

SEQ ID NO: 705915 - DNA, 15 bp, Homo sapiens
tcctctccaagctac

SEQ ID NO: 705916 - DNA, 15 bp, Homo sapiens
cctctccaagctact

SEQ ID NO: 705917 - DNA, 15 bp, Homo sapiens
ctctccaagctactg

SEQ ID NO: 705918 - DNA, 15 bp, Homo sapiens
tctccaagctactgt

SEQ ID NO: 705919 - DNA, 15 bp, Homo sapiens
ctccaagctactgta

SEQ ID NO: 705920 - DNA, 15 bp, Homo sapiens
tccaagctactgtag

SEQ ID NO: 705921 - DNA, 15 bp, Homo sapiens
ccaagctactgtagg

SEQ ID NO: 705922 - DNA, 15 bp, Homo sapiens
caagctactgtaggt

SEQ ID NO: 705923 - DNA, 15 bp, Homo sapiens
aagctactgtaggta

SEQ ID NO: 705924 - DNA, 15 bp, Homo sapiens
agctactgtaggtaa

SEQ ID NO: 705925 - DNA, 15 bp, Homo sapiens
gctactgtaggtaat

SEQ ID NO: 705926 - DNA, 15 bp, Homo sapiens
ctactgtaggtaatt

SEQ ID NO: 705927 - DNA, 15 bp, Homo sapiens
tactgtaggtaattt

SEQ ID NO: 705928 - DNA, 15 bp, Homo sapiens
actgtaggtaattta

SEQ ID NO: 705929 - DNA, 15 bp, Homo sapiens
ctgtaggtaatttat

SEQ ID NO: 705930 - DNA, 15 bp, Homo sapiens
tgtaggtaatttata

SEQ ID NO: 705931 - DNA, 15 bp, Homo sapiens
gtaggtaatttataa

SEQ ID NO: 705932 - DNA, 15 bp, Homo sapiens
taggtaatttataaa

SEQ ID NO: 705933 - DNA, 15 bp, Homo sapiens
aggtaatttataaaa

SEQ ID NO: 705934 - DNA, 15 bp, Homo sapiens
ggtaatttataaaaa

SEQ ID NO: 705935 - DNA, 15 bp, Homo sapiens
gtaatttataaaaaa

SEQ ID NO: 705936 - DNA, 15 bp, Homo sapiens
taatttataaaaaat

SEQ ID NO: 705937 - DNA, 15 bp, Homo sapiens
aatttataaaaaata

SEQ ID NO: 705938 - DNA, 15 bp, Homo sapiens
atttataaaaaataa

SEQ ID NO: 705939 - DNA, 15 bp, Homo sapiens
tttataaaaaataaa

SEQ ID NO: 705940 - DNA, 15 bp, Homo sapiens
ttataaaaaataaaa

SEQ ID NO: 705941 - DNA, 15 bp, Homo sapiens
tataaaaaataaaag

SEQ ID NO: 705942 - DNA, 15 bp, Homo sapiens
ataaaaaataaaagc

SEQ ID NO: 705943 - DNA, 15 bp, Homo sapiens
taaaaaataaaagcc

SEQ ID NO: 705944 - DNA, 15 bp, Homo sapiens
aaaaaataaaagccc

SEQ ID NO: 705945 - DNA, 15 bp, Homo sapiens
aaaaataaaagcccc

SEQ ID NO: 705946 - DNA, 15 bp, Homo sapiens
aaaataaaagcccca

SEQ ID NO: 705947 - DNA, 15 bp, Homo sapiens
aaataaaagccccaa

SEQ ID NO: 705948 - DNA, 15 bp, Homo sapiens
aataaaagccccaaa

SEQ ID NO: 705949 - DNA, 15 bp, Homo sapiens
ataaaagccccaaat

SEQ ID NO: 705950 - DNA, 15 bp, Homo sapiens
taaaagccccaaata

SEQ ID NO: 705951 - DNA, 15 bp, Homo sapiens
aaaagccccaaatac

SEQ ID NO: 705952 - DNA, 15 bp, Homo sapiens
aaagccccaaatact

SEQ ID NO: 705953 - DNA, 15 bp, Homo sapiens
aagccccaaatactt

SEQ ID NO: 705954 - DNA, 15 bp, Homo sapiens
agccccaaatacttt

SEQ ID NO: 705955 - DNA, 15 bp, Homo sapiens
gccccaaatactttc

SEQ ID NO: 705956 - DNA, 15 bp, Homo sapiens
ccccaaatactttct

SEQ ID NO: 705957 - DNA, 15 bp, Homo sapiens
cccaaatactttcta

SEQ ID NO: 705958 - DNA, 15 bp, Homo sapiens
ccaaatactttctaa

SEQ ID NO: 705959 - DNA, 15 bp, Homo sapiens
caaatactttctaag

SEQ ID NO: 705960 - DNA, 15 bp, Homo sapiens
aaatactttctaagc

SEQ ID NO: 705961 - DNA, 15 bp, Homo sapiens
aatactttctaagca

SEQ ID NO: 705962 - DNA, 15 bp, Homo sapiens
atactttctaagcaa

SEQ ID NO: 705963 - DNA, 15 bp, Homo sapiens
tactttctaagcaat

SEQ ID NO: 705964 - DNA, 15 bp, Homo sapiens
actttctaagcaatt

SEQ ID NO: 705965 - DNA, 15 bp, Homo sapiens
ctttctaagcaatta

SEQ ID NO: 705966 - DNA, 15 bp, Homo sapiens
tttctaagcaattac

SEQ ID NO: 705967 - DNA, 15 bp, Homo sapiens
ttctaagcaattaca

SEQ ID NO: 705968 - DNA, 15 bp, Homo sapiens
tctaagcaattacat

SEQ ID NO: 705969 - DNA, 15 bp, Homo sapiens
ctaagcaattacata

SEQ ID NO: 705970 - DNA, 15 bp, Homo sapiens
taagcaattacatat

SEQ ID NO: 705971 - DNA, 15 bp, Homo sapiens
aagcaattacatatg

SEQ ID NO: 705972 - DNA, 15 bp, Homo sapiens
agcaattacatatga

SEQ ID NO: 705973 - DNA, 15 bp, Homo sapiens
gcaattacatatgaa

SEQ ID NO: 705974 - DNA, 15 bp, Homo sapiens
caattacatatgaac

SEQ ID NO: 705975 - DNA, 15 bp, Homo sapiens
aattacatatgaaca

SEQ ID NO: 705976 - DNA, 15 bp, Homo sapiens
attacatatgaacat

SEQ ID NO: 705977 - DNA, 15 bp, Homo sapiens
ttacatatgaacatt

SEQ ID NO: 705978 - DNA, 15 bp, Homo sapiens
tacatatgaacatta

SEQ ID NO: 705979 - DNA, 15 bp, Homo sapiens
acatatgaacattac

SEQ ID NO: 705980 - DNA, 15 bp, Homo sapiens
catatgaacattaca

SEQ ID NO: 705981 - DNA, 15 bp, Homo sapiens
atatgaacattacac

SEQ ID NO: 705982 - DNA, 15 bp, Homo sapiens
tatgaacattacaca

SEQ ID NO: 705983 - DNA, 15 bp, Homo sapiens
atgaacattacacac

SEQ ID NO: 705984 - DNA, 15 bp, Homo sapiens
tgaacattacacacg

SEQ ID NO: 705985 - DNA, 15 bp, Homo sapiens
gaacattacacacga

SEQ ID NO: 705986 - DNA, 15 bp, Homo sapiens
aacattacacacgat

SEQ ID NO: 705987 - DNA, 15 bp, Homo sapiens
acattacacacgata

SEQ ID NO: 705988 - DNA, 15 bp, Homo sapiens
cattacacacgatag

SEQ ID NO: 705989 - DNA, 15 bp, Homo sapiens
attacacacgatagt

SEQ ID NO: 705990 - DNA, 15 bp, Homo sapiens
ttacacacgatagtc

SEQ ID NO: 705991 - DNA, 15 bp, Homo sapiens
tacacacgatagtct

SEQ ID NO: 705992 - DNA, 15 bp, Homo sapiens
acacacgatagtctt

SEQ ID NO: 705993 - DNA, 15 bp, Homo sapiens
cacacgatagtcttt

SEQ ID NO: 705994 - DNA, 15 bp, Homo sapiens
acacgatagtctttt

SEQ ID NO: 705995 - DNA, 15 bp, Homo sapiens
cacgatagtcttttc

SEQ ID NO: 705996 - DNA, 15 bp, Homo sapiens
acgatagtcttttct

SEQ ID NO: 705997 - DNA, 15 bp, Homo sapiens
cgatagtcttttctt

SEQ ID NO: 705998 - DNA, 15 bp, Homo sapiens
gatagtcttttcttc

SEQ ID NO: 705999 - DNA, 15 bp, Homo sapiens
atagtcttttcttct

SEQ ID NO: 706000 - DNA, 15 bp, Homo sapiens
tagtcttttcttctt

SEQ ID NO: 706001 - DNA, 15 bp, Homo sapiens
agtcttttcttcttt

SEQ ID NO: 706002 - DNA, 15 bp, Homo sapiens
gtcttttcttcttta

SEQ ID NO: 706003 - DNA, 15 bp, Homo sapiens
tcttttcttctttag

SEQ ID NO: 706004 - DNA, 15 bp, Homo sapiens
cttttcttctttaga

SEQ ID NO: 706005 - DNA, 15 bp, Homo sapiens
ttttcttctttagac

SEQ ID NO: 706006 - DNA, 15 bp, Homo sapiens
tttcttctttagaca

SEQ ID NO: 706007 - DNA, 15 bp, Homo sapiens
ttcttctttagacat

SEQ ID NO: 706008 - DNA, 15 bp, Homo sapiens
tcttctttagacata

SEQ ID NO: 706009 - DNA, 15 bp, Homo sapiens
cttctttagacataa

SEQ ID NO: 706010 - DNA, 15 bp, Homo sapiens
ttctttagacataaa

SEQ ID NO: 706011 - DNA, 15 bp, Homo sapiens
tctttagacataaat

SEQ ID NO: 706012 - DNA, 15 bp, Homo sapiens
ctttagacataaatt

SEQ ID NO: 706013 - DNA, 15 bp, Homo sapiens
tttagacataaatta

SEQ ID NO: 706014 - DNA, 15 bp, Homo sapiens
ttagacataaattat

SEQ ID NO: 706015 - DNA, 15 bp, Homo sapiens
tagacataaattata

SEQ ID NO: 706016 - DNA, 15 bp, Homo sapiens
agacataaattatag

SEQ ID NO: 706017 - DNA, 15 bp, Homo sapiens
gacataaattatagc

SEQ ID NO: 706018 - DNA, 15 bp, Homo sapiens
acataaattatagca

SEQ ID NO: 706019 - DNA, 15 bp, Homo sapiens
cataaattatagcaa

SEQ ID NO: 706020 - DNA, 15 bp, Homo sapiens
ataaattatagcaaa

SEQ ID NO: 706021 - DNA, 15 bp, Homo sapiens
taaattatagcaaat

SEQ ID NO: 706022 - DNA, 15 bp, Homo sapiens
aaattatagcaaatg

SEQ ID NO: 706023 - DNA, 15 bp, Homo sapiens
aattatagcaaatgc

SEQ ID NO: 706024 - DNA, 15 bp, Homo sapiens
attatagcaaatgct

SEQ ID NO: 706025 - DNA, 15 bp, Homo sapiens
ttatagcaaatgctg

SEQ ID NO: 706026 - DNA, 15 bp, Homo sapiens
tatagcaaatgctga

SEQ ID NO: 706027 - DNA, 15 bp, Homo sapiens
atagcaaatgctgaa

SEQ ID NO: 706028 - DNA, 15 bp, Homo sapiens
tagcaaatgctgaag

SEQ ID NO: 706029 - DNA, 15 bp, Homo sapiens
agcaaatgctgaaga

SEQ ID NO: 706030 - DNA, 15 bp, Homo sapiens
gcaaatgctgaagat

SEQ ID NO: 706031 - DNA, 15 bp, Homo sapiens
caaatgctgaagatg

SEQ ID NO: 706032 - DNA, 15 bp, Homo sapiens
aaatgctgaagatgg

SEQ ID NO: 706033 - DNA, 15 bp, Homo sapiens
aatgctgaagatgga

SEQ ID NO: 706034 - DNA, 15 bp, Homo sapiens
atgctgaagatggaa

SEQ ID NO: 706035 - DNA, 15 bp, Homo sapiens
tgctgaagatggaaa

SEQ ID NO: 706036 - DNA, 15 bp, Homo sapiens
gctgaagatggaaaa

SEQ ID NO: 706037 - DNA, 15 bp, Homo sapiens
ctgaagatggaaaaa

SEQ ID NO: 706038 - DNA, 15 bp, Homo sapiens
tgaagatggaaaaaa

SEQ ID NO: 706039 - DNA, 15 bp, Homo sapiens
gaagatggaaaaaat

SEQ ID NO: 706040 - DNA, 15 bp, Homo sapiens
aagatggaaaaaata

SEQ ID NO: 706041 - DNA, 15 bp, Homo sapiens
agatggaaaaaataa

SEQ ID NO: 706042 - DNA, 15 bp, Homo sapiens
gatggaaaaaataaa

SEQ ID NO: 706043 - DNA, 15 bp, Homo sapiens
atggaaaaaataaaa

SEQ ID NO: 706044 - DNA, 15 bp, Homo sapiens
aaaaaataaaaaaaa

SEQ ID NO: 706045 - DNA, 15 bp, Homo sapiens
aaaaataaaaaaaat

SEQ ID NO: 706046 - DNA, 15 bp, Homo sapiens
aaaataaaaaaaata

SEQ ID NO: 706047 - DNA, 15 bp, Homo sapiens
aaataaaaaaaatag

SEQ ID NO: 706048 - DNA, 15 bp, Homo sapiens
aataaaaaaaatagc

SEQ ID NO: 706049 - DNA, 15 bp, Homo sapiens
ataaaaaaaatagca

SEQ ID NO: 706050 - DNA, 15 bp, Homo sapiens
taaaaaaaatagcaa

SEQ ID NO: 706051 - DNA, 15 bp, Homo sapiens
aaaaaaaatagcaat

SEQ ID NO: 706052 - DNA, 15 bp, Homo sapiens
aaaaaaatagcaatg

SEQ ID NO: 706053 - DNA, 15 bp, Homo sapiens
aaaaaatagcaatgc

SEQ ID NO: 706054 - DNA, 15 bp, Homo sapiens
aaaaatagcaatgct

SEQ ID NO: 706055 - DNA, 15 bp, Homo sapiens
aaaatagcaatgctg

SEQ ID NO: 706056 - DNA, 15 bp, Homo sapiens
aaatagcaatgctga

SEQ ID NO: 706057 - DNA, 15 bp, Homo sapiens
aatagcaatgctgat

SEQ ID NO: 706058 - DNA, 15 bp, Homo sapiens
atagcaatgctgata

SEQ ID NO: 706059 - DNA, 15 bp, Homo sapiens
tagcaatgctgatag

SEQ ID NO: 706060 - DNA, 15 bp, Homo sapiens
agcaatgctgatagc

SEQ ID NO: 706061 - DNA, 15 bp, Homo sapiens
gcaatgctgatagcc

SEQ ID NO: 706062 - DNA, 15 bp, Homo sapiens
caatgctgatagcct

SEQ ID NO: 706063 - DNA, 15 bp, Homo sapiens
aatgctgatagcctt

SEQ ID NO: 706064 - DNA, 15 bp, Homo sapiens
atgctgatagccttg

SEQ ID NO: 706065 - DNA, 15 bp, Homo sapiens
tgctgatagccttgc

SEQ ID NO: 706066 - DNA, 15 bp, Homo sapiens
gctgatagccttgcc

SEQ ID NO: 706067 - DNA, 15 bp, Homo sapiens
ctgatagccttgcca

SEQ ID NO: 706068 - DNA, 15 bp, Homo sapiens
tgatagccttgccaa

SEQ ID NO: 706069 - DNA, 15 bp, Homo sapiens
gatagccttgccaat

SEQ ID NO: 706070 - DNA, 15 bp, Homo sapiens
atagccttgccaatg

SEQ ID NO: 706071 - DNA, 15 bp, Homo sapiens
tagccttgccaatgt

SEQ ID NO: 706072 - DNA, 15 bp, Homo sapiens
agccttgccaatgta

SEQ ID NO: 706073 - DNA, 15 bp, Homo sapiens
gccttgccaatgtac

SEQ ID NO: 706074 - DNA, 15 bp, Homo sapiens
ccttgccaatgtaca

SEQ ID NO: 706075 - DNA, 15 bp, Homo sapiens
cttgccaatgtacat

SEQ ID NO: 706076 - DNA, 15 bp, Homo sapiens
ttgccaatgtacata

SEQ ID NO: 706077 - DNA, 15 bp, Homo sapiens
tgccaatgtacatat

SEQ ID NO: 706078 - DNA, 15 bp, Homo sapiens
gccaatgtacatata

SEQ ID NO: 706079 - DNA, 15 bp, Homo sapiens
ccaatgtacatataa

SEQ ID NO: 706080 - DNA, 15 bp, Homo sapiens
caatgtacatataaa

SEQ ID NO: 706081 - DNA, 15 bp, Homo sapiens
aatgtacatataaac

SEQ ID NO: 706082 - DNA, 15 bp, Homo sapiens
atgtacatataaacc

SEQ ID NO: 706083 - DNA, 15 bp, Homo sapiens
tgtacatataaacct

SEQ ID NO: 706084 - DNA, 15 bp, Homo sapiens
gtacatataaaccta

SEQ ID NO: 706085 - DNA, 15 bp, Homo sapiens
tacatataaacctac

SEQ ID NO: 706086 - DNA, 15 bp, Homo sapiens
acatataaacctacg

SEQ ID NO: 706087 - DNA, 15 bp, Homo sapiens
catataaacctacgg

SEQ ID NO: 706088 - DNA, 15 bp, Homo sapiens
atataaacctacggt

SEQ ID NO: 706089 - DNA, 15 bp, Homo sapiens
tataaacctacggta

SEQ ID NO: 706090 - DNA, 15 bp, Homo sapiens
ataaacctacggtac

SEQ ID NO: 706091 - DNA, 15 bp, Homo sapiens
taaacctacggtaca

SEQ ID NO: 706092 - DNA, 15 bp, Homo sapiens
aaacctacggtacat

SEQ ID NO: 706093 - DNA, 15 bp, Homo sapiens
aacctacggtacatt

SEQ ID NO: 706094 - DNA, 15 bp, Homo sapiens
acctacggtacattt

SEQ ID NO: 706095 - DNA, 15 bp, Homo sapiens
cctacggtacatttt

SEQ ID NO: 706096 - DNA, 15 bp, Homo sapiens
ctacggtacattttc

SEQ ID NO: 706097 - DNA, 15 bp, Homo sapiens
tacggtacattttct

SEQ ID NO: 706098 - DNA, 15 bp, Homo sapiens
acggtacattttctt

SEQ ID NO: 706099 - DNA, 15 bp, Homo sapiens
cggtacattttcttt

SEQ ID NO: 706100 - DNA, 15 bp, Homo sapiens
ggtacattttctttt

SEQ ID NO: 706101 - DNA, 15 bp, Homo sapiens
gtacattttctttta

SEQ ID NO: 706102 - DNA, 15 bp, Homo sapiens
tacattttcttttaa

SEQ ID NO: 706103 - DNA, 15 bp, Homo sapiens
acattttcttttaag

SEQ ID NO: 706104 - DNA, 15 bp, Homo sapiens
cattttcttttaaga

SEQ ID NO: 706105 - DNA, 15 bp, Homo sapiens
attttcttttaagaa

SEQ ID NO: 706106 - DNA, 15 bp, Homo sapiens
ttttcttttaagaaa

SEQ ID NO: 706107 - DNA, 15 bp, Homo sapiens
tttcttttaagaaaa

SEQ ID NO: 706108 - DNA, 15 bp, Homo sapiens
ttcttttaagaaaag

SEQ ID NO: 706109 - DNA, 15 bp, Homo sapiens
tcttttaagaaaaga

SEQ ID NO: 706110 - DNA, 15 bp, Homo sapiens
cttttaagaaaagaa

SEQ ID NO: 706111 - DNA, 15 bp, Homo sapiens
ttttaagaaaagaaa

SEQ ID NO: 706112 - DNA, 15 bp, Homo sapiens
tttaagaaaagaaag

SEQ ID NO: 706113 - DNA, 15 bp, Homo sapiens
ttaagaaaagaaaga

SEQ ID NO: 706114 - DNA, 15 bp, Homo sapiens
taagaaaagaaagaa

SEQ ID NO: 706115 - DNA, 15 bp, Homo sapiens
agaaaagaaagaaac

SEQ ID NO: 706116 - DNA, 15 bp, Homo sapiens
gaaaagaaagaaact

SEQ ID NO: 706117 - DNA, 15 bp, Homo sapiens
aaaagaaagaaacta

SEQ ID NO: 706118 - DNA, 15 bp, Homo sapiens
aaagaaagaaactat

SEQ ID NO: 706119 - DNA, 15 bp, Homo sapiens
aagaaagaaactata

SEQ ID NO: 706120 - DNA, 15 bp, Homo sapiens
agaaagaaactatac

SEQ ID NO: 706121 - DNA, 15 bp, Homo sapiens
gaaagaaactatact

SEQ ID NO: 706122 - DNA, 15 bp, Homo sapiens
aaagaaactatacta

SEQ ID NO: 706123 - DNA, 15 bp, Homo sapiens
aagaaactatactag

SEQ ID NO: 706124 - DNA, 15 bp, Homo sapiens
agaaactatactagg

SEQ ID NO: 706125 - DNA, 15 bp, Homo sapiens
gaaactatactagga

SEQ ID NO: 706126 - DNA, 15 bp, Homo sapiens
aaactatactaggaa

SEQ ID NO: 706127 - DNA, 15 bp, Homo sapiens
aactatactaggaaa

SEQ ID NO: 706128 - DNA, 15 bp, Homo sapiens
actatactaggaaaa

SEQ ID NO: 706129 - DNA, 15 bp, Homo sapiens
ctatactaggaaaat

SEQ ID NO: 706130 - DNA, 15 bp, Homo sapiens
tatactaggaaaatg

SEQ ID NO: 706131 - DNA, 15 bp, Homo sapiens
atactaggaaaatgt

SEQ ID NO: 706132 - DNA, 15 bp, Homo sapiens
tactaggaaaatgtt

SEQ ID NO: 706133 - DNA, 15 bp, Homo sapiens
actaggaaaatgttt

SEQ ID NO: 706134 - DNA, 15 bp, Homo sapiens
ctaggaaaatgttta

SEQ ID NO: 706135 - DNA, 15 bp, Homo sapiens
taggaaaatgtttat

SEQ ID NO: 706136 - DNA, 15 bp, Homo sapiens
aggaaaatgtttatt

SEQ ID NO: 706137 - DNA, 15 bp, Homo sapiens
ggaaaatgtttattt

SEQ ID NO: 706138 - DNA, 15 bp, Homo sapiens
gaaaatgtttatttc

SEQ ID NO: 706139 - DNA, 15 bp, Homo sapiens
aaatgtttatttcat

SEQ ID NO: 706140 - DNA, 15 bp, Homo sapiens
aatgtttatttcatg

SEQ ID NO: 706141 - DNA, 15 bp, Homo sapiens
atgtttatttcatgc

SEQ ID NO: 706142 - DNA, 15 bp, Homo sapiens
tgtttatttcatgcc

SEQ ID NO: 706143 - DNA, 15 bp, Homo sapiens
gtttatttcatgcct

SEQ ID NO: 706144 - DNA, 15 bp, Homo sapiens
tttatttcatgcctg

SEQ ID NO: 706145 - DNA, 15 bp, Homo sapiens
ttatttcatgcctga

SEQ ID NO: 706146 - DNA, 15 bp, Homo sapiens
tatttcatgcctgaa

SEQ ID NO: 706147 - DNA, 15 bp, Homo sapiens
atttcatgcctgaag

SEQ ID NO: 706148 - DNA, 15 bp, Homo sapiens
tttcatgcctgaaga

SEQ ID NO: 706149 - DNA, 15 bp, Homo sapiens
ttcatgcctgaagat

SEQ ID NO: 706150 - DNA, 15 bp, Homo sapiens
tcatgcctgaagata

SEQ ID NO: 706151 - DNA, 15 bp, Homo sapiens
catgcctgaagataa

SEQ ID NO: 706152 - DNA, 15 bp, Homo sapiens
atgcctgaagataac

SEQ ID NO: 706153 - DNA, 15 bp, Homo sapiens
tgcctgaagataact

SEQ ID NO: 706154 - DNA, 15 bp, Homo sapiens
gcctgaagataactg

SEQ ID NO: 706155 - DNA, 15 bp, Homo sapiens
cctgaagataactgg

SEQ ID NO: 706156 - DNA, 15 bp, Homo sapiens
ctgaagataactggg

SEQ ID NO: 706157 - DNA, 15 bp, Homo sapiens
tgaagataactgggc

SEQ ID NO: 706158 - DNA, 15 bp, Homo sapiens
gaagataactgggca

SEQ ID NO: 706159 - DNA, 15 bp, Homo sapiens
aagataactgggcag

SEQ ID NO: 706160 - DNA, 15 bp, Homo sapiens
agataactgggcagg

SEQ ID NO: 706161 - DNA, 15 bp, Homo sapiens
gataactgggcaggc

SEQ ID NO: 706162 - DNA, 15 bp, Homo sapiens
ataactgggcaggct

SEQ ID NO: 706163 - DNA, 15 bp, Homo sapiens
taactgggcaggctg

SEQ ID NO: 706164 - DNA, 15 bp, Homo sapiens
aactgggcaggctgt

SEQ ID NO: 706165 - DNA, 15 bp, Homo sapiens
actgggcaggctgtt

SEQ ID NO: 706166 - DNA, 15 bp, Homo sapiens
ctgggcaggctgttg

SEQ ID NO: 706167 - DNA, 15 bp, Homo sapiens
tgggcaggctgttgg

SEQ ID NO: 706168 - DNA, 15 bp, Homo sapiens
gggcaggctgttggt

SEQ ID NO: 706169 - DNA, 15 bp, Homo sapiens
ggcaggctgttggta

SEQ ID NO: 706170 - DNA, 15 bp, Homo sapiens
gcaggctgttggtac

SEQ ID NO: 706171 - DNA, 15 bp, Homo sapiens
caggctgttggtacc

SEQ ID NO: 706172 - DNA, 15 bp, Homo sapiens
aggctgttggtacca

SEQ ID NO: 706173 - DNA, 15 bp, Homo sapiens
ggctgttggtaccac

SEQ ID NO: 706174 - DNA, 15 bp, Homo sapiens
gctgttggtaccaca

SEQ ID NO: 706175 - DNA, 15 bp, Homo sapiens
ctgttggtaccacac

SEQ ID NO: 706176 - DNA, 15 bp, Homo sapiens
tgttggtaccacacc

SEQ ID NO: 706177 - DNA, 15 bp, Homo sapiens
gttggtaccacacca

SEQ ID NO: 706178 - DNA, 15 bp, Homo sapiens
ttggtaccacaccag

SEQ ID NO: 706179 - DNA, 15 bp, Homo sapiens
tggtaccacaccagc

SEQ ID NO: 706180 - DNA, 15 bp, Homo sapiens
ggtaccacaccagca

SEQ ID NO: 706181 - DNA, 15 bp, Homo sapiens
gtaccacaccagcaa

SEQ ID NO: 706182 - DNA, 15 bp, Homo sapiens
taccacaccagcaat

SEQ ID NO: 706183 - DNA, 15 bp, Homo sapiens
accacaccagcaata

SEQ ID NO: 706184 - DNA, 15 bp, Homo sapiens
ccacaccagcaatat

SEQ ID NO: 706185 - DNA, 15 bp, Homo sapiens
cacaccagcaatatg

SEQ ID NO: 706186 - DNA, 15 bp, Homo sapiens
acaccagcaatatga

SEQ ID NO: 706187 - DNA, 15 bp, Homo sapiens
caccagcaatatgat

SEQ ID NO: 706188 - DNA, 15 bp, Homo sapiens
accagcaatatgatg

SEQ ID NO: 706189 - DNA, 15 bp, Homo sapiens
ccagcaatatgatgt

SEQ ID NO: 706190 - DNA, 15 bp, Homo sapiens
cagcaatatgatgtg

SEQ ID NO: 706191 - DNA, 15 bp, Homo sapiens
agcaatatgatgtgt

SEQ ID NO: 706192 - DNA, 15 bp, Homo sapiens
gcaatatgatgtgtc

SEQ ID NO: 706193 - DNA, 15 bp, Homo sapiens
caatatgatgtgtct

SEQ ID NO: 706194 - DNA, 15 bp, Homo sapiens
aatatgatgtgtctc

SEQ ID NO: 706195 - DNA, 15 bp, Homo sapiens
atatgatgtgtctct

SEQ ID NO: 706196 - DNA, 15 bp, Homo sapiens
tatgatgtgtctctg

SEQ ID NO: 706197 - DNA, 15 bp, Homo sapiens
atgatgtgtctctgt

SEQ ID NO: 706198 - DNA, 15 bp, Homo sapiens
tgatgtgtctctgtc

SEQ ID NO: 706199 - DNA, 15 bp, Homo sapiens
gatgtgtctctgtcc

SEQ ID NO: 706200 - DNA, 15 bp, Homo sapiens
atgtgtctctgtccc

SEQ ID NO: 706201 - DNA, 15 bp, Homo sapiens
tgtgtctctgtccca

SEQ ID NO: 706202 - DNA, 15 bp, Homo sapiens
gtgtctctgtcccag

SEQ ID NO: 706203 - DNA, 15 bp, Homo sapiens
tgtctctgtcccagg

SEQ ID NO: 706204 - DNA, 15 bp, Homo sapiens
gtctctgtcccaggt

SEQ ID NO: 706205 - DNA, 15 bp, Homo sapiens
tctctgtcccaggta

SEQ ID NO: 706206 - DNA, 15 bp, Homo sapiens
ctctgtcccaggtaa

SEQ ID NO: 706207 - DNA, 15 bp, Homo sapiens
tctgtcccaggtaag

SEQ ID NO: 706208 - DNA, 15 bp, Homo sapiens
ctgtcccaggtaagc

SEQ ID NO: 706209 - DNA, 15 bp, Homo sapiens
tgtcccaggtaagcc

SEQ ID NO: 706210 - DNA, 15 bp, Homo sapiens
gtcccaggtaagccc

SEQ ID NO: 706211 - DNA, 15 bp, Homo sapiens
tcccaggtaagccct

SEQ ID NO: 706212 - DNA, 15 bp, Homo sapiens
cccaggtaagccctc

SEQ ID NO: 706213 - DNA, 15 bp, Homo sapiens
ccaggtaagccctca

SEQ ID NO: 706214 - DNA, 15 bp, Homo sapiens
caggtaagccctcag

SEQ ID NO: 706215 - DNA, 15 bp, Homo sapiens
aggtaagccctcagt

SEQ ID NO: 706216 - DNA, 15 bp, Homo sapiens
ggtaagccctcagtg

SEQ ID NO: 706217 - DNA, 15 bp, Homo sapiens
gtaagccctcagtga

SEQ ID NO: 706218 - DNA, 15 bp, Homo sapiens
taagccctcagtgat

SEQ ID NO: 706219 - DNA, 15 bp, Homo sapiens
aagccctcagtgata

SEQ ID NO: 706220 - DNA, 15 bp, Homo sapiens
agccctcagtgataa

SEQ ID NO: 706221 - DNA, 15 bp, Homo sapiens
gccctcagtgataaa

SEQ ID NO: 706222 - DNA, 15 bp, Homo sapiens
ccctcagtgataaac

SEQ ID NO: 706223 - DNA, 15 bp, Homo sapiens
cctcagtgataaaca

SEQ ID NO: 706224 - DNA, 15 bp, Homo sapiens
ctcagtgataaacag

SEQ ID NO: 706225 - DNA, 15 bp, Homo sapiens
tcagtgataaacagg

SEQ ID NO: 706226 - DNA, 15 bp, Homo sapiens
cagtgataaacaggg

SEQ ID NO: 706227 - DNA, 15 bp, Homo sapiens
agtgataaacaggga

SEQ ID NO: 706228 - DNA, 15 bp, Homo sapiens
gtgataaacagggaa

SEQ ID NO: 706229 - DNA, 15 bp, Homo sapiens
tgataaacagggaaa

SEQ ID NO: 706230 - DNA, 15 bp, Homo sapiens
gataaacagggaaaa

SEQ ID NO: 706231 - DNA, 15 bp, Homo sapiens
ataaacagggaaaat

SEQ ID NO: 706232 - DNA, 15 bp, Homo sapiens
taaacagggaaaatt

SEQ ID NO: 706233 - DNA, 15 bp, Homo sapiens
aaacagggaaaattc

SEQ ID NO: 706234 - DNA, 15 bp, Homo sapiens
aacagggaaaattca

SEQ ID NO: 706235 - DNA, 15 bp, Homo sapiens
acagggaaaattcac

SEQ ID NO: 706236 - DNA, 15 bp, Homo sapiens
cagggaaaattcaca

SEQ ID NO: 706237 - DNA, 15 bp, Homo sapiens
agggaaaattcacac

SEQ ID NO: 706238 - DNA, 15 bp, Homo sapiens
gggaaaattcacaca

SEQ ID NO: 706239 - DNA, 15 bp, Homo sapiens
ggaaaattcacacac

SEQ ID NO: 706240 - DNA, 15 bp, Homo sapiens
gaaaattcacacacc

SEQ ID NO: 706241 - DNA, 15 bp, Homo sapiens
aaaattcacacaccc

SEQ ID NO: 706242 - DNA, 15 bp, Homo sapiens
aaattcacacaccca

SEQ ID NO: 706243 - DNA, 15 bp, Homo sapiens
aattcacacacccac

SEQ ID NO: 706244 - DNA, 15 bp, Homo sapiens
attcacacacccact

SEQ ID NO: 706245 - DNA, 15 bp, Homo sapiens
ttcacacacccactt

SEQ ID NO: 706246 - DNA, 15 bp, Homo sapiens
tcacacacccacttg

SEQ ID NO: 706247 - DNA, 15 bp, Homo sapiens
cacacacccacttgt

SEQ ID NO: 706248 - DNA, 15 bp, Homo sapiens
acacacccacttgtc

SEQ ID NO: 706249 - DNA, 15 bp, Homo sapiens
cacacccacttgtca

SEQ ID NO: 706250 - DNA, 15 bp, Homo sapiens
acacccacttgtcat

SEQ ID NO: 706251 - DNA, 15 bp, Homo sapiens
cacccacttgtcatc

SEQ ID NO: 706252 - DNA, 15 bp, Homo sapiens
acccacttgtcatca

SEQ ID NO: 706253 - DNA, 15 bp, Homo sapiens
cccacttgtcatcac

SEQ ID NO: 706254 - DNA, 15 bp, Homo sapiens
ccacttgtcatcaca

SEQ ID NO: 706255 - DNA, 15 bp, Homo sapiens
cacttgtcatcacag

SEQ ID NO: 706256 - DNA, 15 bp, Homo sapiens
acttgtcatcacagc

SEQ ID NO: 706257 - DNA, 15 bp, Homo sapiens
cttgtcatcacagca

SEQ ID NO: 706258 - DNA, 15 bp, Homo sapiens
ttgtcatcacagcat

SEQ ID NO: 706259 - DNA, 15 bp, Homo sapiens
tgtcatcacagcata

SEQ ID NO: 706260 - DNA, 15 bp, Homo sapiens
gtcatcacagcatac

SEQ ID NO: 706261 - DNA, 15 bp, Homo sapiens
tcatcacagcatact

SEQ ID NO: 706262 - DNA, 15 bp, Homo sapiens
catcacagcatacta

SEQ ID NO: 706263 - DNA, 15 bp, Homo sapiens
atcacagcatactat

SEQ ID NO: 706264 - DNA, 15 bp, Homo sapiens
tcacagcatactata

SEQ ID NO: 706265 - DNA, 15 bp, Homo sapiens
cacagcatactatac

SEQ ID NO: 706266 - DNA, 15 bp, Homo sapiens
acagcatactataca

SEQ ID NO: 706267 - DNA, 15 bp, Homo sapiens
cagcatactatacat

SEQ ID NO: 706268 - DNA, 15 bp, Homo sapiens
agcatactatacata

SEQ ID NO: 706269 - DNA, 15 bp, Homo sapiens
gcatactatacataa

SEQ ID NO: 706270 - DNA, 15 bp, Homo sapiens
catactatacataaa

SEQ ID NO: 706271 - DNA, 15 bp, Homo sapiens
atactatacataaaa

SEQ ID NO: 706272 - DNA, 15 bp, Homo sapiens
tactatacataaaaa

SEQ ID NO: 706273 - DNA, 15 bp, Homo sapiens
actatacataaaaat

SEQ ID NO: 706274 - DNA, 15 bp, Homo sapiens
ctatacataaaaatg

SEQ ID NO: 706275 - DNA, 15 bp, Homo sapiens
tatacataaaaatgt

SEQ ID NO: 706276 - DNA, 15 bp, Homo sapiens
atacataaaaatgtg

SEQ ID NO: 706277 - DNA, 15 bp, Homo sapiens
tacataaaaatgtgc

SEQ ID NO: 706278 - DNA, 15 bp, Homo sapiens
acataaaaatgtgct

SEQ ID NO: 706279 - DNA, 15 bp, Homo sapiens
cataaaaatgtgctt

SEQ ID NO: 706280 - DNA, 15 bp, Homo sapiens
ataaaaatgtgcttc

SEQ ID NO: 706281 - DNA, 15 bp, Homo sapiens
taaaaatgtgcttca

SEQ ID NO: 706282 - DNA, 15 bp, Homo sapiens
aaaaatgtgcttcaa

SEQ ID NO: 706283 - DNA, 15 bp, Homo sapiens
aaaatgtgcttcaat

SEQ ID NO: 706284 - DNA, 15 bp, Homo sapiens
aaatgtgcttcaatg

SEQ ID NO: 706285 - DNA, 15 bp, Homo sapiens
aatgtgcttcaatga

SEQ ID NO: 706286 - DNA, 15 bp, Homo sapiens
atgtgcttcaatgat

SEQ ID NO: 706287 - DNA, 15 bp, Homo sapiens
tgtgcttcaatgata

SEQ ID NO: 706288 - DNA, 15 bp, Homo sapiens
gtgcttcaatgatac

SEQ ID NO: 706289 - DNA, 15 bp, Homo sapiens
tgcttcaatgataca

SEQ ID NO: 706290 - DNA, 15 bp, Homo sapiens
gcttcaatgatacat

SEQ ID NO: 706291 - DNA, 15 bp, Homo sapiens
cttcaatgatacatg

SEQ ID NO: 706292 - DNA, 15 bp, Homo sapiens
ttcaatgatacatgc

SEQ ID NO: 706293 - DNA, 15 bp, Homo sapiens
tcaatgatacatgct

SEQ ID NO: 706294 - DNA, 15 bp, Homo sapiens
caatgatacatgctg

SEQ ID NO: 706295 - DNA, 15 bp, Homo sapiens
aatgatacatgctga

SEQ ID NO: 706296 - DNA, 15 bp, Homo sapiens
atgatacatgctgaa

SEQ ID NO: 706297 - DNA, 15 bp, Homo sapiens
tgatacatgctgaat

SEQ ID NO: 706298 - DNA, 15 bp, Homo sapiens
gatacatgctgaata

SEQ ID NO: 706299 - DNA, 15 bp, Homo sapiens
atacatgctgaatat

SEQ ID NO: 706300 - DNA, 15 bp, Homo sapiens
tacatgctgaatatc

SEQ ID NO: 706301 - DNA, 15 bp, Homo sapiens
acatgctgaatatct

SEQ ID NO: 706302 - DNA, 15 bp, Homo sapiens
catgctgaatatctc

SEQ ID NO: 706303 - DNA, 15 bp, Homo sapiens
atgctgaatatctca

SEQ ID NO: 706304 - DNA, 15 bp, Homo sapiens
tgctgaatatctcag

SEQ ID NO: 706305 - DNA, 15 bp, Homo sapiens
gctgaatatctcaga

SEQ ID NO: 706306 - DNA, 15 bp, Homo sapiens
ctgaatatctcagag

SEQ ID NO: 706307 - DNA, 15 bp, Homo sapiens
tgaatatctcagagt

SEQ ID NO: 706308 - DNA, 15 bp, Homo sapiens
gaatatctcagagtc

SEQ ID NO: 706309 - DNA, 15 bp, Homo sapiens
aatatctcagagtcc

SEQ ID NO: 706310 - DNA, 15 bp, Homo sapiens
atatctcagagtcca

SEQ ID NO: 706311 - DNA, 15 bp, Homo sapiens
tatctcagagtccat

SEQ ID NO: 706312 - DNA, 15 bp, Homo sapiens
atctcagagtccatt

SEQ ID NO: 706313 - DNA, 15 bp, Homo sapiens
tctcagagtccattt

SEQ ID NO: 706314 - DNA, 15 bp, Homo sapiens
ctcagagtccattta

SEQ ID NO: 706315 - DNA, 15 bp, Homo sapiens
tcagagtccatttaa

SEQ ID NO: 706316 - DNA, 15 bp, Homo sapiens
cagagtccatttaaa

SEQ ID NO: 706317 - DNA, 15 bp, Homo sapiens
agagtccatttaaaa

SEQ ID NO: 706318 - DNA, 15 bp, Homo sapiens
gagtccatttaaaat

SEQ ID NO: 706319 - DNA, 15 bp, Homo sapiens
agtccatttaaaatt

SEQ ID NO: 706320 - DNA, 15 bp, Homo sapiens
gtccatttaaaatta

SEQ ID NO: 706321 - DNA, 15 bp, Homo sapiens
tccatttaaaattat

SEQ ID NO: 706322 - DNA, 15 bp, Homo sapiens
ccatttaaaattatg

SEQ ID NO: 706323 - DNA, 15 bp, Homo sapiens
catttaaaattatgt

SEQ ID NO: 706324 - DNA, 15 bp, Homo sapiens
atttaaaattatgtg

SEQ ID NO: 706325 - DNA, 15 bp, Homo sapiens
tttaaaattatgtgc

SEQ ID NO: 706326 - DNA, 15 bp, Homo sapiens
ttaaaattatgtgct

SEQ ID NO: 706327 - DNA, 15 bp, Homo sapiens
taaaattatgtgctg

SEQ ID NO: 706328 - DNA, 15 bp, Homo sapiens
aaaattatgtgctgt

SEQ ID NO: 706329 - DNA, 15 bp, Homo sapiens
aaattatgtgctgtt

SEQ ID NO: 706330 - DNA, 15 bp, Homo sapiens
aattatgtgctgttg

SEQ ID NO: 706331 - DNA, 15 bp, Homo sapiens
attatgtgctgttgc

SEQ ID NO: 706332 - DNA, 15 bp, Homo sapiens
ttatgtgctgttgct

SEQ ID NO: 706333 - DNA, 15 bp, Homo sapiens
tatgtgctgttgctt

SEQ ID NO: 706334 - DNA, 15 bp, Homo sapiens
atgtgctgttgctta

SEQ ID NO: 706335 - DNA, 15 bp, Homo sapiens
tgtgctgttgcttaa

SEQ ID NO: 706336 - DNA, 15 bp, Homo sapiens
gtgctgttgcttaaa

SEQ ID NO: 706337 - DNA, 15 bp, Homo sapiens
tgctgttgcttaaat

SEQ ID NO: 706338 - DNA, 15 bp, Homo sapiens
gctgttgcttaaatt

SEQ ID NO: 706339 - DNA, 15 bp, Homo sapiens
ctgttgcttaaattt

SEQ ID NO: 706340 - DNA, 15 bp, Homo sapiens
tgttgcttaaatttt

SEQ ID NO: 706341 - DNA, 15 bp, Homo sapiens
gttgcttaaattttt

SEQ ID NO: 706342 - DNA, 15 bp, Homo sapiens
ttgcttaaattttta

SEQ ID NO: 706343 - DNA, 15 bp, Homo sapiens
tgcttaaatttttag

SEQ ID NO: 706344 - DNA, 15 bp, Homo sapiens
gcttaaatttttaga

SEQ ID NO: 706345 - DNA, 15 bp, Homo sapiens
cttaaatttttagaa

SEQ ID NO: 706346 - DNA, 15 bp, Homo sapiens
ttaaatttttagaaa

SEQ ID NO: 706347 - DNA, 15 bp, Homo sapiens
taaatttttagaaat

SEQ ID NO: 706348 - DNA, 15 bp, Homo sapiens
aaatttttagaaatg

SEQ ID NO: 706349 - DNA, 15 bp, Homo sapiens
aatttttagaaatga

SEQ ID NO: 706350 - DNA, 15 bp, Homo sapiens
atttttagaaatgac

SEQ ID NO: 706351 - DNA, 15 bp, Homo sapiens
tttttagaaatgaca

SEQ ID NO: 706352 - DNA, 15 bp, Homo sapiens
ttttagaaatgacat

SEQ ID NO: 706353 - DNA, 15 bp, Homo sapiens
tttagaaatgacatt

SEQ ID NO: 706354 - DNA, 15 bp, Homo sapiens
ttagaaatgacattt

SEQ ID NO: 706355 - DNA, 15 bp, Homo sapiens
tagaaatgacatttt

SEQ ID NO: 706356 - DNA, 15 bp, Homo sapiens
agaaatgacattttt

SEQ ID NO: 706357 - DNA, 15 bp, Homo sapiens
gaaatgacatttttg

SEQ ID NO: 706358 - DNA, 15 bp, Homo sapiens
aaatgacatttttgc

SEQ ID NO: 706359 - DNA, 15 bp, Homo sapiens
aatgacatttttgcc

SEQ ID NO: 706360 - DNA, 15 bp, Homo sapiens
atgacatttttgcct

SEQ ID NO: 706361 - DNA, 15 bp, Homo sapiens
tgacatttttgccta

SEQ ID NO: 706362 - DNA, 15 bp, Homo sapiens
gacatttttgcctac

SEQ ID NO: 706363 - DNA, 15 bp, Homo sapiens
acatttttgcctaca

SEQ ID NO: 706364 - DNA, 15 bp, Homo sapiens
catttttgcctacag

SEQ ID NO: 706365 - DNA, 15 bp, Homo sapiens
atttttgcctacagc

SEQ ID NO: 706366 - DNA, 15 bp, Homo sapiens
tttttgcctacagca

SEQ ID NO: 706367 - DNA, 15 bp, Homo sapiens
ttttgcctacagcac

SEQ ID NO: 706368 - DNA, 15 bp, Homo sapiens
tttgcctacagcaca

SEQ ID NO: 706369 - DNA, 15 bp, Homo sapiens
ttgcctacagcacac

SEQ ID NO: 706370 - DNA, 15 bp, Homo sapiens
tgcctacagcacaca

SEQ ID NO: 706371 - DNA, 15 bp, Homo sapiens
gcctacagcacacaa

SEQ ID NO: 706372 - DNA, 15 bp, Homo sapiens
cctacagcacacaaa

SEQ ID NO: 706373 - DNA, 15 bp, Homo sapiens
ctacagcacacaaaa

SEQ ID NO: 706374 - DNA, 15 bp, Homo sapiens
tacagcacacaaaag

SEQ ID NO: 706375 - DNA, 15 bp, Homo sapiens
acagcacacaaaagt

SEQ ID NO: 706376 - DNA, 15 bp, Homo sapiens
cagcacacaaaagtg

SEQ ID NO: 706377 - DNA, 15 bp, Homo sapiens
agcacacaaaagtga

SEQ ID NO: 706378 - DNA, 15 bp, Homo sapiens
gcacacaaaagtgaa

SEQ ID NO: 706379 - DNA, 15 bp, Homo sapiens
cacacaaaagtgaaa

SEQ ID NO: 706380 - DNA, 15 bp, Homo sapiens
acacaaaagtgaaac

SEQ ID NO: 706381 - DNA, 15 bp, Homo sapiens
cacaaaagtgaaacc

SEQ ID NO: 706382 - DNA, 15 bp, Homo sapiens
acaaaagtgaaacca

SEQ ID NO: 706383 - DNA, 15 bp, Homo sapiens
caaaagtgaaaccag

SEQ ID NO: 706384 - DNA, 15 bp, Homo sapiens
aaaagtgaaaccaga

SEQ ID NO: 706385 - DNA, 15 bp, Homo sapiens
aaagtgaaaccagat

SEQ ID NO: 706386 - DNA, 15 bp, Homo sapiens
aagtgaaaccagata

SEQ ID NO: 706387 - DNA, 15 bp, Homo sapiens
agtgaaaccagatag

SEQ ID NO: 706388 - DNA, 15 bp, Homo sapiens
gtgaaaccagataga

SEQ ID NO: 706389 - DNA, 15 bp, Homo sapiens
tgaaaccagatagag

SEQ ID NO: 706390 - DNA, 15 bp, Homo sapiens
gaaaccagatagaga

SEQ ID NO: 706391 - DNA, 15 bp, Homo sapiens
aaaccagatagagat

SEQ ID NO: 706392 - DNA, 15 bp, Homo sapiens
aaccagatagagatg

SEQ ID NO: 706393 - DNA, 15 bp, Homo sapiens
accagatagagatgc

SEQ ID NO: 706394 - DNA, 15 bp, Homo sapiens
ccagatagagatgca

SEQ ID NO: 706395 - DNA, 15 bp, Homo sapiens
cagatagagatgcat

SEQ ID NO: 706396 - DNA, 15 bp, Homo sapiens
agatagagatgcatc

SEQ ID NO: 706397 - DNA, 15 bp, Homo sapiens
gatagagatgcatca

SEQ ID NO: 706398 - DNA, 15 bp, Homo sapiens
atagagatgcatcat

SEQ ID NO: 706399 - DNA, 15 bp, Homo sapiens
tagagatgcatcatc

SEQ ID NO: 706400 - DNA, 15 bp, Homo sapiens
agagatgcatcatct

SEQ ID NO: 706401 - DNA, 15 bp, Homo sapiens
gagatgcatcatctc

SEQ ID NO: 706402 - DNA, 15 bp, Homo sapiens
agatgcatcatctct

SEQ ID NO: 706403 - DNA, 15 bp, Homo sapiens
gatgcatcatctctt

SEQ ID NO: 706404 - DNA, 15 bp, Homo sapiens
atgcatcatctcttt

SEQ ID NO: 706405 - DNA, 15 bp, Homo sapiens
tgcatcatctctttg

SEQ ID NO: 706406 - DNA, 15 bp, Homo sapiens
gcatcatctctttgg

SEQ ID NO: 706407 - DNA, 15 bp, Homo sapiens
catcatctctttggc

SEQ ID NO: 706408 - DNA, 15 bp, Homo sapiens
atcatctctttggct

SEQ ID NO: 706409 - DNA, 15 bp, Homo sapiens
tcatctctttggctg

SEQ ID NO: 706410 - DNA, 15 bp, Homo sapiens
catctctttggctga

SEQ ID NO: 706411 - DNA, 15 bp, Homo sapiens
atctctttggctgaa

SEQ ID NO: 706412 - DNA, 15 bp, Homo sapiens
tctctttggctgaag

SEQ ID NO: 706413 - DNA, 15 bp, Homo sapiens
ctctttggctgaagt

SEQ ID NO: 706414 - DNA, 15 bp, Homo sapiens
tctttggctgaagtc

SEQ ID NO: 706415 - DNA, 15 bp, Homo sapiens
ctttggctgaagtct

SEQ ID NO: 706416 - DNA, 15 bp, Homo sapiens
tttggctgaagtcta

SEQ ID NO: 706417 - DNA, 15 bp, Homo sapiens
ttggctgaagtctac

SEQ ID NO: 706418 - DNA, 15 bp, Homo sapiens
tggctgaagtctaca

SEQ ID NO: 706419 - DNA, 15 bp, Homo sapiens
ggctgaagtctacag

SEQ ID NO: 706420 - DNA, 15 bp, Homo sapiens
gctgaagtctacaga

SEQ ID NO: 706421 - DNA, 15 bp, Homo sapiens
ctgaagtctacagag

SEQ ID NO: 706422 - DNA, 15 bp, Homo sapiens
tgaagtctacagaga

SEQ ID NO: 706423 - DNA, 15 bp, Homo sapiens
gaagtctacagagag

SEQ ID NO: 706424 - DNA, 15 bp, Homo sapiens
aagtctacagagagg

SEQ ID NO: 706425 - DNA, 15 bp, Homo sapiens
agtctacagagagga

SEQ ID NO: 706426 - DNA, 15 bp, Homo sapiens
gtctacagagaggaa

SEQ ID NO: 706427 - DNA, 15 bp, Homo sapiens
tctacagagaggaat

SEQ ID NO: 706428 - DNA, 15 bp, Homo sapiens
ctacagagaggaatg

SEQ ID NO: 706429 - DNA, 15 bp, Homo sapiens
tacagagaggaatgg

SEQ ID NO: 706430 - DNA, 15 bp, Homo sapiens
acagagaggaatgga

SEQ ID NO: 706431 - DNA, 15 bp, Homo sapiens
cagagaggaatggag

SEQ ID NO: 706432 - DNA, 15 bp, Homo sapiens
agagaggaatggagg

SEQ ID NO: 706433 - DNA, 15 bp, Homo sapiens
gagaggaatggagga

SEQ ID NO: 706434 - DNA, 15 bp, Homo sapiens
agaggaatggaggaa

SEQ ID NO: 706435 - DNA, 15 bp, Homo sapiens
gaggaatggaggaat

SEQ ID NO: 706436 - DNA, 15 bp, Homo sapiens
aggaatggaggaatt

SEQ ID NO: 706437 - DNA, 15 bp, Homo sapiens
ggaatggaggaattc

SEQ ID NO: 706438 - DNA, 15 bp, Homo sapiens
gaatggaggaattca

SEQ ID NO: 706439 - DNA, 15 bp, Homo sapiens
aatggaggaattcat

SEQ ID NO: 706440 - DNA, 15 bp, Homo sapiens
atggaggaattcata

SEQ ID NO: 706441 - DNA, 15 bp, Homo sapiens
tggaggaattcatac

SEQ ID NO: 706442 - DNA, 15 bp, Homo sapiens
ggaggaattcatacc

SEQ ID NO: 706443 - DNA, 15 bp, Homo sapiens
gaggaattcatacct

SEQ ID NO: 706444 - DNA, 15 bp, Homo sapiens
aggaattcataccta

SEQ ID NO: 706445 - DNA, 15 bp, Homo sapiens
ggaattcatacctac

SEQ ID NO: 706446 - DNA, 15 bp, Homo sapiens
gaattcatacctaca

SEQ ID NO: 706447 - DNA, 15 bp, Homo sapiens
aattcatacctacac

SEQ ID NO: 706448 - DNA, 15 bp, Homo sapiens
attcatacctacacc

SEQ ID NO: 706449 - DNA, 15 bp, Homo sapiens
ttcatacctacacca

SEQ ID NO: 706450 - DNA, 15 bp, Homo sapiens
tcatacctacaccac

SEQ ID NO: 706451 - DNA, 15 bp, Homo sapiens
catacctacaccaca

SEQ ID NO: 706452 - DNA, 15 bp, Homo sapiens
atacctacaccacac

SEQ ID NO: 706453 - DNA, 15 bp, Homo sapiens
tacctacaccacaca

SEQ ID NO: 706454 - DNA, 15 bp, Homo sapiens
acctacaccacacac

SEQ ID NO: 706455 - DNA, 15 bp, Homo sapiens
cctacaccacacaca

SEQ ID NO: 706456 - DNA, 15 bp, Homo sapiens
ctacaccacacacat

SEQ ID NO: 706457 - DNA, 15 bp, Homo sapiens
tacaccacacacatt

SEQ ID NO: 706458 - DNA, 15 bp, Homo sapiens
acaccacacacatta

SEQ ID NO: 706459 - DNA, 15 bp, Homo sapiens
caccacacacattag

SEQ ID NO: 706460 - DNA, 15 bp, Homo sapiens
accacacacattaga

SEQ ID NO: 706461 - DNA, 15 bp, Homo sapiens
ccacacacattagag

SEQ ID NO: 706462 - DNA, 15 bp, Homo sapiens
cacacacattagagt

SEQ ID NO: 706463 - DNA, 15 bp, Homo sapiens
acacacattagagtg

SEQ ID NO: 706464 - DNA, 15 bp, Homo sapiens
cacacattagagtgt

SEQ ID NO: 706465 - DNA, 15 bp, Homo sapiens
acacattagagtgtg

SEQ ID NO: 706466 - DNA, 15 bp, Homo sapiens
cacattagagtgtgt

SEQ ID NO: 706467 - DNA, 15 bp, Homo sapiens
acattagagtgtgtc

SEQ ID NO: 706468 - DNA, 15 bp, Homo sapiens
cattagagtgtgtct

SEQ ID NO: 706469 - DNA, 15 bp, Homo sapiens
attagagtgtgtctg

SEQ ID NO: 706470 - DNA, 15 bp, Homo sapiens
ttagagtgtgtctgg

SEQ ID NO: 706471 - DNA, 15 bp, Homo sapiens
tagagtgtgtctgga

SEQ ID NO: 706472 - DNA, 15 bp, Homo sapiens
agagtgtgtctggag

SEQ ID NO: 706473 - DNA, 15 bp, Homo sapiens
gagtgtgtctggagt

SEQ ID NO: 706474 - DNA, 15 bp, Homo sapiens
agtgtgtctggagtt

SEQ ID NO: 706475 - DNA, 15 bp, Homo sapiens
gtgtgtctggagtta

SEQ ID NO: 706476 - DNA, 15 bp, Homo sapiens
tgtgtctggagttag

SEQ ID NO: 706477 - DNA, 15 bp, Homo sapiens
gtgtctggagttagg

SEQ ID NO: 706478 - DNA, 15 bp, Homo sapiens
tgtctggagttaggt

SEQ ID NO: 706479 - DNA, 15 bp, Homo sapiens
gtctggagttaggtg

SEQ ID NO: 706480 - DNA, 15 bp, Homo sapiens
tctggagttaggtgg

SEQ ID NO: 706481 - DNA, 15 bp, Homo sapiens
ctggagttaggtggc

SEQ ID NO: 706482 - DNA, 15 bp, Homo sapiens
tggagttaggtggct

SEQ ID NO: 706483 - DNA, 15 bp, Homo sapiens
ggagttaggtggctg

SEQ ID NO: 706484 - DNA, 15 bp, Homo sapiens
gagttaggtggctgg

SEQ ID NO: 706485 - DNA, 15 bp, Homo sapiens
agttaggtggctggg

SEQ ID NO: 706486 - DNA, 15 bp, Homo sapiens
gttaggtggctgggc

SEQ ID NO: 706487 - DNA, 15 bp, Homo sapiens
aactcctgacctcag

SEQ ID NO: 706488 - DNA, 15 bp, Homo sapiens
actcctgacctcagg

SEQ ID NO: 706489 - DNA, 15 bp, Homo sapiens
ctcctgacctcaggt

SEQ ID NO: 706490 - DNA, 15 bp, Homo sapiens
tcctgacctcaggtg

SEQ ID NO: 706491 - DNA, 15 bp, Homo sapiens
cctgacctcaggtga

SEQ ID NO: 706492 - DNA, 15 bp, Homo sapiens
ctgacctcaggtgat

SEQ ID NO: 706493 - DNA, 15 bp, Homo sapiens
tgacctcaggtgatc

SEQ ID NO: 706494 - DNA, 15 bp, Homo sapiens
gacctcaggtgatct

SEQ ID NO: 706495 - DNA, 15 bp, Homo sapiens
acctcaggtgatctg

SEQ ID NO: 706496 - DNA, 15 bp, Homo sapiens
cctcaggtgatctgc

SEQ ID NO: 706497 - DNA, 15 bp, Homo sapiens
ctcaggtgatctgcc

SEQ ID NO: 706498 - DNA, 15 bp, Homo sapiens
tcaggtgatctgcct

SEQ ID NO: 706499 - DNA, 15 bp, Homo sapiens
caggtgatctgcctg

SEQ ID NO: 706500 - DNA, 15 bp, Homo sapiens
aggtgatctgcctgc

SEQ ID NO: 706501 - DNA, 15 bp, Homo sapiens
ggtgatctgcctgcc

SEQ ID NO: 706502 - DNA, 15 bp, Homo sapiens
gtgatctgcctgcct

SEQ ID NO: 706503 - DNA, 15 bp, Homo sapiens
tgatctgcctgcctc

SEQ ID NO: 706504 - DNA, 15 bp, Homo sapiens
gatctgcctgcctcg

SEQ ID NO: 706505 - DNA, 15 bp, Homo sapiens
atctgcctgcctcgg

SEQ ID NO: 706506 - DNA, 15 bp, Homo sapiens
tctgcctgcctcggc

SEQ ID NO: 706507 - DNA, 15 bp, Homo sapiens
ctgcctgcctcggcc

SEQ ID NO: 706508 - DNA, 15 bp, Homo sapiens
tgcctgcctcggcct

SEQ ID NO: 706509 - DNA, 15 bp, Homo sapiens
gcctgcctcggcctc

SEQ ID NO: 706510 - DNA, 15 bp, Homo sapiens
cctgcctcggcctcc

SEQ ID NO: 706511 - DNA, 15 bp, Homo sapiens
ctgcctcggcctccc

SEQ ID NO: 706512 - DNA, 15 bp, Homo sapiens
tgcctcggcctccca

SEQ ID NO: 706513 - DNA, 15 bp, Homo sapiens
gcctcggcctcccaa

SEQ ID NO: 706514 - DNA, 15 bp, Homo sapiens
cctcggcctcccaaa

SEQ ID NO: 706515 - DNA, 15 bp, Homo sapiens
ctcggcctcccaaag

SEQ ID NO: 706516 - DNA, 15 bp, Homo sapiens
tcggcctcccaaagt

SEQ ID NO: 706517 - DNA, 15 bp, Homo sapiens
cggcctcccaaagtg

SEQ ID NO: 706518 - DNA, 15 bp, Homo sapiens
cctcccaaagtgcta

SEQ ID NO: 706519 - DNA, 15 bp, Homo sapiens
ctcccaaagtgctag

SEQ ID NO: 706520 - DNA, 15 bp, Homo sapiens
tcccaaagtgctagg

SEQ ID NO: 706521 - DNA, 15 bp, Homo sapiens
cccaaagtgctagga

SEQ ID NO: 706522 - DNA, 15 bp, Homo sapiens
ccaaagtgctaggat

SEQ ID NO: 706523 - DNA, 15 bp, Homo sapiens
caaagtgctaggatt

SEQ ID NO: 706524 - DNA, 15 bp, Homo sapiens
aaagtgctaggatta

SEQ ID NO: 706525 - DNA, 15 bp, Homo sapiens
aagtgctaggattac

SEQ ID NO: 706526 - DNA, 15 bp, Homo sapiens
agtgctaggattaca

SEQ ID NO: 706527 - DNA, 15 bp, Homo sapiens
gtgctaggattacag

SEQ ID NO: 706528 - DNA, 15 bp, Homo sapiens
tgctaggattacagg

SEQ ID NO: 706529 - DNA, 15 bp, Homo sapiens
gctaggattacaggc

SEQ ID NO: 706530 - DNA, 15 bp, Homo sapiens
ctaggattacaggcg

SEQ ID NO: 706531 - DNA, 15 bp, Homo sapiens
taggattacaggcgt

SEQ ID NO: 706532 - DNA, 15 bp, Homo sapiens
aggattacaggcgtg

SEQ ID NO: 706533 - DNA, 15 bp, Homo sapiens
ggattacaggcgtga

SEQ ID NO: 706534 - DNA, 15 bp, Homo sapiens
gattacaggcgtgag

SEQ ID NO: 706535 - DNA, 15 bp, Homo sapiens
attacaggcgtgagc

SEQ ID NO: 706536 - DNA, 15 bp, Homo sapiens
ttacaggcgtgagcc

SEQ ID NO: 706537 - DNA, 15 bp, Homo sapiens
tacaggcgtgagccc

SEQ ID NO: 706538 - DNA, 15 bp, Homo sapiens
acaggcgtgagcccc

SEQ ID NO: 706539 - DNA, 15 bp, Homo sapiens
caggcgtgagccccc

SEQ ID NO: 706540 - DNA, 15 bp, Homo sapiens
aggcgtgagccccca

SEQ ID NO: 706541 - DNA, 15 bp, Homo sapiens
ggcgtgagcccccat

SEQ ID NO: 706542 - DNA, 15 bp, Homo sapiens
gcgtgagcccccatg

SEQ ID NO: 706543 - DNA, 15 bp, Homo sapiens
cgtgagcccccatgc

SEQ ID NO: 706544 - DNA, 15 bp, Homo sapiens
gtgagcccccatgcc

SEQ ID NO: 706545 - DNA, 15 bp, Homo sapiens
tgagcccccatgccc

SEQ ID NO: 706546 - DNA, 15 bp, Homo sapiens
gagcccccatgcccg

SEQ ID NO: 706547 - DNA, 15 bp, Homo sapiens
agcccccatgcccgg

SEQ ID NO: 706548 - DNA, 15 bp, Homo sapiens
gcccccatgcccggc

SEQ ID NO: 706549 - DNA, 15 bp, Homo sapiens
cccccatgcccggcc

SEQ ID NO: 706550 - DNA, 15 bp, Homo sapiens
ccccatgcccggcca

SEQ ID NO: 706551 - DNA, 15 bp, Homo sapiens
cccatgcccggccac

SEQ ID NO: 706552 - DNA, 15 bp, Homo sapiens
ccatgcccggccaca

SEQ ID NO: 706553 - DNA, 15 bp, Homo sapiens
catgcccggccacac

SEQ ID NO: 706554 - DNA, 15 bp, Homo sapiens
atgcccggccacact

SEQ ID NO: 706555 - DNA, 15 bp, Homo sapiens
tgcccggccacactg

SEQ ID NO: 706556 - DNA, 15 bp, Homo sapiens
gcccggccacactgc

SEQ ID NO: 706557 - DNA, 15 bp, Homo sapiens
cccggccacactgct

SEQ ID NO: 706558 - DNA, 15 bp, Homo sapiens
ccggccacactgcta

SEQ ID NO: 706559 - DNA, 15 bp, Homo sapiens
cggccacactgctag

SEQ ID NO: 706560 - DNA, 15 bp, Homo sapiens
ggccacactgctaga

SEQ ID NO: 706561 - DNA, 15 bp, Homo sapiens
gccacactgctagaa

SEQ ID NO: 706562 - DNA, 15 bp, Homo sapiens
ccacactgctagaaa

SEQ ID NO: 706563 - DNA, 15 bp, Homo sapiens
cacactgctagaaac

SEQ ID NO: 706564 - DNA, 15 bp, Homo sapiens
acactgctagaaact

SEQ ID NO: 706565 - DNA, 15 bp, Homo sapiens
cactgctagaaactt

SEQ ID NO: 706566 - DNA, 15 bp, Homo sapiens
actgctagaaacttt

SEQ ID NO: 706567 - DNA, 15 bp, Homo sapiens
ctgctagaaacttta

SEQ ID NO: 706568 - DNA, 15 bp, Homo sapiens
tgctagaaactttaa

SEQ ID NO: 706569 - DNA, 15 bp, Homo sapiens
gctagaaactttaaa

SEQ ID NO: 706570 - DNA, 15 bp, Homo sapiens
ctagaaactttaaaa

SEQ ID NO: 706571 - DNA, 15 bp, Homo sapiens
tagaaactttaaaag

SEQ ID NO: 706572 - DNA, 15 bp, Homo sapiens
agaaactttaaaagc

SEQ ID NO: 706573 - DNA, 15 bp, Homo sapiens
gaaactttaaaagca

SEQ ID NO: 706574 - DNA, 15 bp, Homo sapiens
aaactttaaaagcat

SEQ ID NO: 706575 - DNA, 15 bp, Homo sapiens
aactttaaaagcatc

SEQ ID NO: 706576 - DNA, 15 bp, Homo sapiens
actttaaaagcatct

SEQ ID NO: 706577 - DNA, 15 bp, Homo sapiens
ctttaaaagcatctc

SEQ ID NO: 706578 - DNA, 15 bp, Homo sapiens
tttaaaagcatctca

SEQ ID NO: 706579 - DNA, 15 bp, Homo sapiens
ttaaaagcatctcat

SEQ ID NO: 706580 - DNA, 15 bp, Homo sapiens
taaaagcatctcatt

SEQ ID NO: 706581 - DNA, 15 bp, Homo sapiens
aaaagcatctcattc

SEQ ID NO: 706582 - DNA, 15 bp, Homo sapiens
aaagcatctcattcg

SEQ ID NO: 706583 - DNA, 15 bp, Homo sapiens
aagcatctcattcgg

SEQ ID NO: 706584 - DNA, 15 bp, Homo sapiens
agcatctcattcggt

SEQ ID NO: 706585 - DNA, 15 bp, Homo sapiens
gcatctcattcggtt

SEQ ID NO: 706586 - DNA, 15 bp, Homo sapiens
catctcattcggtta

SEQ ID NO: 706587 - DNA, 15 bp, Homo sapiens
atctcattcggttac

SEQ ID NO: 706588 - DNA, 15 bp, Homo sapiens
tctcattcggttacg

SEQ ID NO: 706589 - DNA, 15 bp, Homo sapiens
ctcattcggttacgt

SEQ ID NO: 706590 - DNA, 15 bp, Homo sapiens
tcattcggttacgtg

SEQ ID NO: 706591 - DNA, 15 bp, Homo sapiens
cattcggttacgtgt

SEQ ID NO: 706592 - DNA, 15 bp, Homo sapiens
attcggttacgtgtc

SEQ ID NO: 706593 - DNA, 15 bp, Homo sapiens
ttcggttacgtgtcc

SEQ ID NO: 706594 - DNA, 15 bp, Homo sapiens
tcggttacgtgtccg

SEQ ID NO: 706595 - DNA, 15 bp, Homo sapiens
cggttacgtgtccgc

SEQ ID NO: 706596 - DNA, 15 bp, Homo sapiens
ggttacgtgtccgcc

SEQ ID NO: 706597 - DNA, 15 bp, Homo sapiens
gttacgtgtccgcct

SEQ ID NO: 706598 - DNA, 15 bp, Homo sapiens
ttacgtgtccgcctg

SEQ ID NO: 706599 - DNA, 15 bp, Homo sapiens
tacgtgtccgcctgc

SEQ ID NO: 706600 - DNA, 15 bp, Homo sapiens
acgtgtccgcctgca

SEQ ID NO: 706601 - DNA, 15 bp, Homo sapiens
cgtgtccgcctgcag

SEQ ID NO: 706602 - DNA, 15 bp, Homo sapiens
gtgtccgcctgcagt

SEQ ID NO: 706603 - DNA, 15 bp, Homo sapiens
tgtccgcctgcagtg

SEQ ID NO: 706604 - DNA, 15 bp, Homo sapiens
gtccgcctgcagtgg

SEQ ID NO: 706605 - DNA, 15 bp, Homo sapiens
tccgcctgcagtggg

SEQ ID NO: 706606 - DNA, 15 bp, Homo sapiens
ccgcctgcagtggga

SEQ ID NO: 706607 - DNA, 15 bp, Homo sapiens
cgcctgcagtgggac

SEQ ID NO: 706608 - DNA, 15 bp, Homo sapiens
gcctgcagtgggaca

SEQ ID NO: 706609 - DNA, 15 bp, Homo sapiens
cctgcagtgggacag

SEQ ID NO: 706610 - DNA, 15 bp, Homo sapiens
ctgcagtgggacagg

SEQ ID NO: 706611 - DNA, 15 bp, Homo sapiens
tgcagtgggacaggt

SEQ ID NO: 706612 - DNA, 15 bp, Homo sapiens
gcagtgggacaggta

SEQ ID NO: 706613 - DNA, 15 bp, Homo sapiens
cagtgggacaggtag

SEQ ID NO: 706614 - DNA, 15 bp, Homo sapiens
agtgggacaggtagt

SEQ ID NO: 706615 - DNA, 15 bp, Homo sapiens
gtgggacaggtagta

SEQ ID NO: 706616 - DNA, 15 bp, Homo sapiens
tgggacaggtagtat

SEQ ID NO: 706617 - DNA, 15 bp, Homo sapiens
gggacaggtagtatg

SEQ ID NO: 706618 - DNA, 15 bp, Homo sapiens
ggacaggtagtatga

SEQ ID NO: 706619 - DNA, 15 bp, Homo sapiens
gacaggtagtatgac

SEQ ID NO: 706620 - DNA, 15 bp, Homo sapiens
acaggtagtatgact

SEQ ID NO: 706621 - DNA, 15 bp, Homo sapiens
caggtagtatgactc

SEQ ID NO: 706622 - DNA, 15 bp, Homo sapiens
aggtagtatgactcc

SEQ ID NO: 706623 - DNA, 15 bp, Homo sapiens
ggtagtatgactcca

SEQ ID NO: 706624 - DNA, 15 bp, Homo sapiens
gtagtatgactccac

SEQ ID NO: 706625 - DNA, 15 bp, Homo sapiens
tagtatgactccacc

SEQ ID NO: 706626 - DNA, 15 bp, Homo sapiens
agtatgactccaccc

SEQ ID NO: 706627 - DNA, 15 bp, Homo sapiens
gtatgactccacccc

SEQ ID NO: 706628 - DNA, 15 bp, Homo sapiens
tatgactccacccca

SEQ ID NO: 706629 - DNA, 15 bp, Homo sapiens
atgactccaccccac

SEQ ID NO: 706630 - DNA, 15 bp, Homo sapiens
tgactccaccccact

SEQ ID NO: 706631 - DNA, 15 bp, Homo sapiens
gactccaccccactg

SEQ ID NO: 706632 - DNA, 15 bp, Homo sapiens
actccaccccactgt

SEQ ID NO: 706633 - DNA, 15 bp, Homo sapiens
ctccaccccactgtg

SEQ ID NO: 706634 - DNA, 15 bp, Homo sapiens
tccaccccactgtga

SEQ ID NO: 706635 - DNA, 15 bp, Homo sapiens
ccaccccactgtgag

SEQ ID NO: 706636 - DNA, 15 bp, Homo sapiens
caccccactgtgagg

SEQ ID NO: 706637 - DNA, 15 bp, Homo sapiens
accccactgtgagga

SEQ ID NO: 706638 - DNA, 15 bp, Homo sapiens
ccccactgtgaggaa

SEQ ID NO: 706639 - DNA, 15 bp, Homo sapiens
cccactgtgaggaag

SEQ ID NO: 706640 - DNA, 15 bp, Homo sapiens
ccactgtgaggaagt

SEQ ID NO: 706641 - DNA, 15 bp, Homo sapiens
cactgtgaggaagtg

SEQ ID NO: 706642 - DNA, 15 bp, Homo sapiens
actgtgaggaagtgg

SEQ ID NO: 706643 - DNA, 15 bp, Homo sapiens
ctgtgaggaagtgga

SEQ ID NO: 706644 - DNA, 15 bp, Homo sapiens
tgtgaggaagtggag

SEQ ID NO: 706645 - DNA, 15 bp, Homo sapiens
gtgaggaagtggagg

SEQ ID NO: 706646 - DNA, 15 bp, Homo sapiens
tgaggaagtggagga

SEQ ID NO: 706647 - DNA, 15 bp, Homo sapiens
gaggaagtggaggag

SEQ ID NO: 706648 - DNA, 15 bp, Homo sapiens
aggaagtggaggagc

SEQ ID NO: 706649 - DNA, 15 bp, Homo sapiens
ggaagtggaggagca

SEQ ID NO: 706650 - DNA, 15 bp, Homo sapiens
gaagtggaggagcag

SEQ ID NO: 706651 - DNA, 15 bp, Homo sapiens
aagtggaggagcagt

SEQ ID NO: 706652 - DNA, 15 bp, Homo sapiens
agtggaggagcagtg

SEQ ID NO: 706653 - DNA, 15 bp, Homo sapiens
gtggaggagcagtgg

SEQ ID NO: 706654 - DNA, 15 bp, Homo sapiens
tggaggagcagtggg

SEQ ID NO: 706655 - DNA, 15 bp, Homo sapiens
ggaggagcagtgggg

SEQ ID NO: 706656 - DNA, 15 bp, Homo sapiens
gaggagcagtggggt

SEQ ID NO: 706657 - DNA, 15 bp, Homo sapiens
aggagcagtggggtc

SEQ ID NO: 706658 - DNA, 15 bp, Homo sapiens
ggagcagtggggtca

SEQ ID NO: 706659 - DNA, 15 bp, Homo sapiens
gagcagtggggtcag

SEQ ID NO: 706660 - DNA, 15 bp, Homo sapiens
agcagtggggtcagt

SEQ ID NO: 706661 - DNA, 15 bp, Homo sapiens
gcagtggggtcagtc

SEQ ID NO: 706662 - DNA, 15 bp, Homo sapiens
cagtggggtcagtca

SEQ ID NO: 706663 - DNA, 15 bp, Homo sapiens
agtggggtcagtcac

SEQ ID NO: 706664 - DNA, 15 bp, Homo sapiens
gtggggtcagtcaca

SEQ ID NO: 706665 - DNA, 15 bp, Homo sapiens
tggggtcagtcacac

SEQ ID NO: 706666 - DNA, 15 bp, Homo sapiens
ggggtcagtcacacg

SEQ ID NO: 706667 - DNA, 15 bp, Homo sapiens
gggtcagtcacacgc

SEQ ID NO: 706668 - DNA, 15 bp, Homo sapiens
ggtcagtcacacgcc

SEQ ID NO: 706669 - DNA, 15 bp, Homo sapiens
gtcagtcacacgcct

SEQ ID NO: 706670 - DNA, 15 bp, Homo sapiens
tcagtcacacgcctg

SEQ ID NO: 706671 - DNA, 15 bp, Homo sapiens
cagtcacacgcctgg

SEQ ID NO: 706672 - DNA, 15 bp, Homo sapiens
agtcacacgcctggc

SEQ ID NO: 706673 - DNA, 15 bp, Homo sapiens
gtcacacgcctggca

SEQ ID NO: 706674 - DNA, 15 bp, Homo sapiens
tcacacgcctggcag

SEQ ID NO: 706675 - DNA, 15 bp, Homo sapiens
cacacgcctggcagg

SEQ ID NO: 706676 - DNA, 15 bp, Homo sapiens
acacgcctggcagga

SEQ ID NO: 706677 - DNA, 15 bp, Homo sapiens
cacgcctggcaggat

SEQ ID NO: 706678 - DNA, 15 bp, Homo sapiens
acgcctggcaggatg

SEQ ID NO: 706679 - DNA, 15 bp, Homo sapiens
cgcctggcaggatgg

SEQ ID NO: 706680 - DNA, 15 bp, Homo sapiens
gcctggcaggatggc

SEQ ID NO: 706681 - DNA, 15 bp, Homo sapiens
cctggcaggatggcc

SEQ ID NO: 706682 - DNA, 15 bp, Homo sapiens
ctggcaggatggcca

SEQ ID NO: 706683 - DNA, 15 bp, Homo sapiens
tggcaggatggccag

SEQ ID NO: 706684 - DNA, 15 bp, Homo sapiens
ggcaggatggccagg

SEQ ID NO: 706685 - DNA, 15 bp, Homo sapiens
gcaggatggccagga

SEQ ID NO: 706686 - DNA, 15 bp, Homo sapiens
caggatggccaggag

SEQ ID NO: 706687 - DNA, 15 bp, Homo sapiens
aggatggccaggagc

SEQ ID NO: 706688 - DNA, 15 bp, Homo sapiens
ggatggccaggagcc

SEQ ID NO: 706689 - DNA, 15 bp, Homo sapiens
gatggccaggagccc

SEQ ID NO: 706690 - DNA, 15 bp, Homo sapiens
atggccaggagcccc

SEQ ID NO: 706691 - DNA, 15 bp, Homo sapiens
tggccaggagcccca

SEQ ID NO: 706692 - DNA, 15 bp, Homo sapiens
ggccaggagccccat

SEQ ID NO: 706693 - DNA, 15 bp, Homo sapiens
gccaggagccccatt

SEQ ID NO: 706694 - DNA, 15 bp, Homo sapiens
ccaggagccccattg

SEQ ID NO: 706695 - DNA, 15 bp, Homo sapiens
caggagccccattgt

SEQ ID NO: 706696 - DNA, 15 bp, Homo sapiens
aggagccccattgtc

SEQ ID NO: 706697 - DNA, 15 bp, Homo sapiens
ggagccccattgtct

SEQ ID NO: 706698 - DNA, 15 bp, Homo sapiens
gagccccattgtctg

SEQ ID NO: 706699 - DNA, 15 bp, Homo sapiens
agccccattgtctgc

SEQ ID NO: 706700 - DNA, 15 bp, Homo sapiens
gccccattgtctgcc

SEQ ID NO: 706701 - DNA, 15 bp, Homo sapiens
ccccattgtctgcct

SEQ ID NO: 706702 - DNA, 15 bp, Homo sapiens
cccattgtctgcctt

SEQ ID NO: 706703 - DNA, 15 bp, Homo sapiens
ccattgtctgcctta

SEQ ID NO: 706704 - DNA, 15 bp, Homo sapiens
cattgtctgccttag

SEQ ID NO: 706705 - DNA, 15 bp, Homo sapiens
attgtctgccttagg

SEQ ID NO: 706706 - DNA, 15 bp, Homo sapiens
ttgtctgccttagga

SEQ ID NO: 706707 - DNA, 15 bp, Homo sapiens
tgtctgccttaggag

SEQ ID NO: 706708 - DNA, 15 bp, Homo sapiens
gtctgccttaggagc

SEQ ID NO: 706709 - DNA, 15 bp, Homo sapiens
tctgccttaggagca

SEQ ID NO: 706710 - DNA, 15 bp, Homo sapiens
ctgccttaggagcac

SEQ ID NO: 706711 - DNA, 15 bp, Homo sapiens
tgccttaggagcacc

SEQ ID NO: 706712 - DNA, 15 bp, Homo sapiens
gccttaggagcacct

SEQ ID NO: 706713 - DNA, 15 bp, Homo sapiens
ccttaggagcacctg

SEQ ID NO: 706714 - DNA, 15 bp, Homo sapiens
cttaggagcacctgc

SEQ ID NO: 706715 - DNA, 15 bp, Homo sapiens
ttaggagcacctgct

SEQ ID NO: 706716 - DNA, 15 bp, Homo sapiens
taggagcacctgctg

SEQ ID NO: 706717 - DNA, 15 bp, Homo sapiens
aggagcacctgctgg

SEQ ID NO: 706718 - DNA, 15 bp, Homo sapiens
ggagcacctgctggc

SEQ ID NO: 706719 - DNA, 15 bp, Homo sapiens
gagcacctgctggcc

SEQ ID NO: 706720 - DNA, 15 bp, Homo sapiens
agcacctgctggccc

SEQ ID NO: 706721 - DNA, 15 bp, Homo sapiens
gcacctgctggcccc

SEQ ID NO: 706722 - DNA, 15 bp, Homo sapiens
cacctgctggcccca

SEQ ID NO: 706723 - DNA, 15 bp, Homo sapiens
acctgctggccccac

SEQ ID NO: 706724 - DNA, 15 bp, Homo sapiens
cctgctggccccacc

SEQ ID NO: 706725 - DNA, 15 bp, Homo sapiens
ctgctggccccaccc

SEQ ID NO: 706726 - DNA, 15 bp, Homo sapiens
tgctggccccacccc

SEQ ID NO: 706727 - DNA, 15 bp, Homo sapiens
gctggccccaccccc

SEQ ID NO: 706728 - DNA, 15 bp, Homo sapiens
ctggccccaccccca

SEQ ID NO: 706729 - DNA, 15 bp, Homo sapiens
tggccccacccccac

SEQ ID NO: 706730 - DNA, 15 bp, Homo sapiens
ggccccacccccact

SEQ ID NO: 706731 - DNA, 15 bp, Homo sapiens
gccccacccccactt

SEQ ID NO: 706732 - DNA, 15 bp, Homo sapiens
ccccacccccactta

SEQ ID NO: 706733 - DNA, 15 bp, Homo sapiens
cccacccccacttag

SEQ ID NO: 706734 - DNA, 15 bp, Homo sapiens
ccacccccacttagc

SEQ ID NO: 706735 - DNA, 15 bp, Homo sapiens
cacccccacttagct

SEQ ID NO: 706736 - DNA, 15 bp, Homo sapiens
acccccacttagctt

SEQ ID NO: 706737 - DNA, 15 bp, Homo sapiens
cccccacttagcttc

SEQ ID NO: 706738 - DNA, 15 bp, Homo sapiens
ccccacttagcttcg

SEQ ID NO: 706739 - DNA, 15 bp, Homo sapiens
cccacttagcttcgg

SEQ ID NO: 706740 - DNA, 15 bp, Homo sapiens
ccacttagcttcggg

SEQ ID NO: 706741 - DNA, 15 bp, Homo sapiens
cacttagcttcgggg

SEQ ID NO: 706742 - DNA, 15 bp, Homo sapiens
acttagcttcggggc

SEQ ID NO: 706743 - DNA, 15 bp, Homo sapiens
cttagcttcggggct

SEQ ID NO: 706744 - DNA, 15 bp, Homo sapiens
ttagcttcggggctt

SEQ ID NO: 706745 - DNA, 15 bp, Homo sapiens
tagcttcggggcttt

SEQ ID NO: 706746 - DNA, 15 bp, Homo sapiens
agcttcggggctttc

SEQ ID NO: 706747 - DNA, 15 bp, Homo sapiens
gcttcggggctttct

SEQ ID NO: 706748 - DNA, 15 bp, Homo sapiens
cttcggggctttctg

SEQ ID NO: 706749 - DNA, 15 bp, Homo sapiens
ttcggggctttctgt

SEQ ID NO: 706750 - DNA, 15 bp, Homo sapiens
tcggggctttctgtc

SEQ ID NO: 706751 - DNA, 15 bp, Homo sapiens
cggggctttctgtcc

SEQ ID NO: 706752 - DNA, 15 bp, Homo sapiens
ggggctttctgtcct

SEQ ID NO: 706753 - DNA, 15 bp, Homo sapiens
gggctttctgtcctc

SEQ ID NO: 706754 - DNA, 15 bp, Homo sapiens
ggctttctgtcctca

SEQ ID NO: 706755 - DNA, 15 bp, Homo sapiens
gctttctgtcctcat

SEQ ID NO: 706756 - DNA, 15 bp, Homo sapiens
ctttctgtcctcatg

SEQ ID NO: 706757 - DNA, 15 bp, Homo sapiens
tttctgtcctcatgc

SEQ ID NO: 706758 - DNA, 15 bp, Homo sapiens
ttctgtcctcatgct

SEQ ID NO: 706759 - DNA, 15 bp, Homo sapiens
tctgtcctcatgctc

SEQ ID NO: 706760 - DNA, 15 bp, Homo sapiens
ctgtcctcatgctct

SEQ ID NO: 706761 - DNA, 15 bp, Homo sapiens
tgtcctcatgctctt

SEQ ID NO: 706762 - DNA, 15 bp, Homo sapiens
gtcctcatgctcttc

SEQ ID NO: 706763 - DNA, 15 bp, Homo sapiens
tcctcatgctcttcc

SEQ ID NO: 706764 - DNA, 15 bp, Homo sapiens
cctcatgctcttccc

SEQ ID NO: 706765 - DNA, 15 bp, Homo sapiens
ctcatgctcttccct

SEQ ID NO: 706766 - DNA, 15 bp, Homo sapiens
tcatgctcttccctt

SEQ ID NO: 706767 - DNA, 15 bp, Homo sapiens
catgctcttcccttc

SEQ ID NO: 706768 - DNA, 15 bp, Homo sapiens
atgctcttcccttcc

SEQ ID NO: 706769 - DNA, 15 bp, Homo sapiens
tgctcttcccttccc

SEQ ID NO: 706770 - DNA, 15 bp, Homo sapiens
gctcttcccttccct

SEQ ID NO: 706771 - DNA, 15 bp, Homo sapiens
ctcttcccttccctt

SEQ ID NO: 706772 - DNA, 15 bp, Homo sapiens
tcttcccttcccttt

SEQ ID NO: 706773 - DNA, 15 bp, Homo sapiens
cttcccttccctttt

SEQ ID NO: 706774 - DNA, 15 bp, Homo sapiens
ttcccttcccttttc

SEQ ID NO: 706775 - DNA, 15 bp, Homo sapiens
tcccttcccttttct

SEQ ID NO: 706776 - DNA, 15 bp, Homo sapiens
cccttcccttttctg

SEQ ID NO: 706777 - DNA, 15 bp, Homo sapiens
ccttcccttttctgt

SEQ ID NO: 706778 - DNA, 15 bp, Homo sapiens
cttcccttttctgta

SEQ ID NO: 706779 - DNA, 15 bp, Homo sapiens
ttcccttttctgtag

SEQ ID NO: 706780 - DNA, 15 bp, Homo sapiens
tcccttttctgtagg

SEQ ID NO: 706781 - DNA, 15 bp, Homo sapiens
cccttttctgtaggt

SEQ ID NO: 706782 - DNA, 15 bp, Homo sapiens
ccttttctgtaggtg

SEQ ID NO: 706783 - DNA, 15 bp, Homo sapiens
cttttctgtaggtgg

SEQ ID NO: 706784 - DNA, 15 bp, Homo sapiens
ttttctgtaggtggc

SEQ ID NO: 706785 - DNA, 15 bp, Homo sapiens
tttctgtaggtggct

SEQ ID NO: 706786 - DNA, 15 bp, Homo sapiens
ttctgtaggtggctc

SEQ ID NO: 706787 - DNA, 15 bp, Homo sapiens
tctgtaggtggctca

SEQ ID NO: 706788 - DNA, 15 bp, Homo sapiens
ctgtaggtggctcat

SEQ ID NO: 706789 - DNA, 15 bp, Homo sapiens
tgtaggtggctcatt

SEQ ID NO: 706790 - DNA, 15 bp, Homo sapiens
gtaggtggctcattt

SEQ ID NO: 706791 - DNA, 15 bp, Homo sapiens
taggtggctcatttc

SEQ ID NO: 706792 - DNA, 15 bp, Homo sapiens
aggtggctcatttcc

SEQ ID NO: 706793 - DNA, 15 bp, Homo sapiens
ggtggctcatttccc

SEQ ID NO: 706794 - DNA, 15 bp, Homo sapiens
gtggctcatttcccc

SEQ ID NO: 706795 - DNA, 15 bp, Homo sapiens
tggctcatttcccct

SEQ ID NO: 706796 - DNA, 15 bp, Homo sapiens
ggctcatttcccctt

SEQ ID NO: 706797 - DNA, 15 bp, Homo sapiens
gctcatttccccttt

SEQ ID NO: 706798 - DNA, 15 bp, Homo sapiens
ctcatttccccttta

SEQ ID NO: 706799 - DNA, 15 bp, Homo sapiens
tcatttcccctttaa

SEQ ID NO: 706800 - DNA, 15 bp, Homo sapiens
catttcccctttaag

SEQ ID NO: 706801 - DNA, 15 bp, Homo sapiens
atttcccctttaaga

SEQ ID NO: 706802 - DNA, 15 bp, Homo sapiens
tttcccctttaagaa

SEQ ID NO: 706803 - DNA, 15 bp, Homo sapiens
ttcccctttaagaac

SEQ ID NO: 706804 - DNA, 15 bp, Homo sapiens
tcccctttaagaaca

SEQ ID NO: 706805 - DNA, 15 bp, Homo sapiens
cccctttaagaacaa

SEQ ID NO: 706806 - DNA, 15 bp, Homo sapiens
ccctttaagaacaac

SEQ ID NO: 706807 - DNA, 15 bp, Homo sapiens
cctttaagaacaaca

SEQ ID NO: 706808 - DNA, 15 bp, Homo sapiens
ctttaagaacaacat

SEQ ID NO: 706809 - DNA, 15 bp, Homo sapiens
tttaagaacaacatg

SEQ ID NO: 706810 - DNA, 15 bp, Homo sapiens
ttaagaacaacatga

SEQ ID NO: 706811 - DNA, 15 bp, Homo sapiens
taagaacaacatgag

SEQ ID NO: 706812 - DNA, 15 bp, Homo sapiens
aagaacaacatgagc

SEQ ID NO: 706813 - DNA, 15 bp, Homo sapiens
agaacaacatgagct

SEQ ID NO: 706814 - DNA, 15 bp, Homo sapiens
gaacaacatgagctt

SEQ ID NO: 706815 - DNA, 15 bp, Homo sapiens
aacaacatgagcttt

SEQ ID NO: 706816 - DNA, 15 bp, Homo sapiens
acaacatgagctttg

SEQ ID NO: 706817 - DNA, 15 bp, Homo sapiens
caacatgagctttgt

SEQ ID NO: 706818 - DNA, 15 bp, Homo sapiens
aacatgagctttgtg

SEQ ID NO: 706819 - DNA, 15 bp, Homo sapiens
acatgagctttgtgg

SEQ ID NO: 706820 - DNA, 15 bp, Homo sapiens
catgagctttgtggt

SEQ ID NO: 706821 - DNA, 15 bp, Homo sapiens
atgagctttgtggtc

SEQ ID NO: 706822 - DNA, 15 bp, Homo sapiens
tgagctttgtggtcc

SEQ ID NO: 706823 - DNA, 15 bp, Homo sapiens
gagctttgtggtcct

SEQ ID NO: 706824 - DNA, 15 bp, Homo sapiens
agctttgtggtcctt

SEQ ID NO: 706825 - DNA, 15 bp, Homo sapiens
gctttgtggtccttg

SEQ ID NO: 706826 - DNA, 15 bp, Homo sapiens
ctttgtggtccttgt

SEQ ID NO: 706827 - DNA, 15 bp, Homo sapiens
tttgtggtccttgta

SEQ ID NO: 706828 - DNA, 15 bp, Homo sapiens
ttgtggtccttgtac

SEQ ID NO: 706829 - DNA, 15 bp, Homo sapiens
tgtggtccttgtacc

SEQ ID NO: 706830 - DNA, 15 bp, Homo sapiens
gtggtccttgtaccc

SEQ ID NO: 706831 - DNA, 15 bp, Homo sapiens
tggtccttgtaccca

SEQ ID NO: 706832 - DNA, 15 bp, Homo sapiens
ggtccttgtacccac

SEQ ID NO: 706833 - DNA, 15 bp, Homo sapiens
gtccttgtacccacc

SEQ ID NO: 706834 - DNA, 15 bp, Homo sapiens
tccttgtacccaccc

SEQ ID NO: 706835 - DNA, 15 bp, Homo sapiens
ccttgtacccaccca

SEQ ID NO: 706836 - DNA, 15 bp, Homo sapiens
cttgtacccacccac

SEQ ID NO: 706837 - DNA, 15 bp, Homo sapiens
ttgtacccacccact

SEQ ID NO: 706838 - DNA, 15 bp, Homo sapiens
tgtacccacccactt

SEQ ID NO: 706839 - DNA, 15 bp, Homo sapiens
gtacccacccacttt

SEQ ID NO: 706840 - DNA, 15 bp, Homo sapiens
tacccacccactttg

SEQ ID NO: 706841 - DNA, 15 bp, Homo sapiens
acccacccactttga

SEQ ID NO: 706842 - DNA, 15 bp, Homo sapiens
cccacccactttgaa

SEQ ID NO: 706843 - DNA, 15 bp, Homo sapiens
ccacccactttgaat

SEQ ID NO: 706844 - DNA, 15 bp, Homo sapiens
cacccactttgaatg

SEQ ID NO: 706845 - DNA, 15 bp, Homo sapiens
acccactttgaatgg

SEQ ID NO: 706846 - DNA, 15 bp, Homo sapiens
cccactttgaatgga

SEQ ID NO: 706847 - DNA, 15 bp, Homo sapiens
ccactttgaatggaa

SEQ ID NO: 706848 - DNA, 15 bp, Homo sapiens
cactttgaatggaac

SEQ ID NO: 706849 - DNA, 15 bp, Homo sapiens
actttgaatggaacg

SEQ ID NO: 706850 - DNA, 15 bp, Homo sapiens
ctttgaatggaacgt

SEQ ID NO: 706851 - DNA, 15 bp, Homo sapiens
tttgaatggaacgtg

SEQ ID NO: 706852 - DNA, 15 bp, Homo sapiens
ttgaatggaacgtgt

SEQ ID NO: 706853 - DNA, 15 bp, Homo sapiens
tgaatggaacgtgtc

SEQ ID NO: 706854 - DNA, 15 bp, Homo sapiens
gaatggaacgtgtcc

SEQ ID NO: 706855 - DNA, 15 bp, Homo sapiens
aatggaacgtgtccc

SEQ ID NO: 706856 - DNA, 15 bp, Homo sapiens
atggaacgtgtccca

SEQ ID NO: 706857 - DNA, 15 bp, Homo sapiens
tggaacgtgtcccag

SEQ ID NO: 706858 - DNA, 15 bp, Homo sapiens
ggaacgtgtcccagg

SEQ ID NO: 706859 - DNA, 15 bp, Homo sapiens
gaacgtgtcccaggt

SEQ ID NO: 706860 - DNA, 15 bp, Homo sapiens
aacgtgtcccaggta

SEQ ID NO: 706861 - DNA, 15 bp, Homo sapiens
acgtgtcccaggtac

SEQ ID NO: 706862 - DNA, 15 bp, Homo sapiens
cgtgtcccaggtact

SEQ ID NO: 706863 - DNA, 15 bp, Homo sapiens
gtgtcccaggtactg

SEQ ID NO: 706864 - DNA, 15 bp, Homo sapiens
tgtcccaggtactgg

SEQ ID NO: 706865 - DNA, 15 bp, Homo sapiens
gtcccaggtactggc

SEQ ID NO: 706866 - DNA, 15 bp, Homo sapiens
tcccaggtactggcc

SEQ ID NO: 706867 - DNA, 15 bp, Homo sapiens
cccaggtactggcca

SEQ ID NO: 706868 - DNA, 15 bp, Homo sapiens
ccaggtactggccaa

SEQ ID NO: 706869 - DNA, 15 bp, Homo sapiens
caggtactggccaac

SEQ ID NO: 706870 - DNA, 15 bp, Homo sapiens
aggtactggccaacc

SEQ ID NO: 706871 - DNA, 15 bp, Homo sapiens
ggtactggccaacct

SEQ ID NO: 706872 - DNA, 15 bp, Homo sapiens
gtactggccaacctg

SEQ ID NO: 706873 - DNA, 15 bp, Homo sapiens
tactggccaacctga

SEQ ID NO: 706874 - DNA, 15 bp, Homo sapiens
actggccaacctgag

SEQ ID NO: 706875 - DNA, 15 bp, Homo sapiens
ctggccaacctgagt

SEQ ID NO: 706876 - DNA, 15 bp, Homo sapiens
tggccaacctgagtt

SEQ ID NO: 706877 - DNA, 15 bp, Homo sapiens
ggccaacctgagttg

SEQ ID NO: 706878 - DNA, 15 bp, Homo sapiens
gccaacctgagttgg

SEQ ID NO: 706879 - DNA, 15 bp, Homo sapiens
ccaacctgagttggg

SEQ ID NO: 706880 - DNA, 15 bp, Homo sapiens
caacctgagttggga

SEQ ID NO: 706881 - DNA, 15 bp, Homo sapiens
aacctgagttgggac

SEQ ID NO: 706882 - DNA, 15 bp, Homo sapiens
acctgagttgggaca

SEQ ID NO: 706883 - DNA, 15 bp, Homo sapiens
cctgagttgggacac

SEQ ID NO: 706884 - DNA, 15 bp, Homo sapiens
ctgagttgggacacc

SEQ ID NO: 706885 - DNA, 15 bp, Homo sapiens
tgagttgggacaccc

SEQ ID NO: 706886 - DNA, 15 bp, Homo sapiens
gagttgggacaccct

SEQ ID NO: 706887 - DNA, 15 bp, Homo sapiens
agttgggacaccctg

SEQ ID NO: 706888 - DNA, 15 bp, Homo sapiens
gttgggacaccctgc

SEQ ID NO: 706889 - DNA, 15 bp, Homo sapiens
ttgggacaccctgca

SEQ ID NO: 706890 - DNA, 15 bp, Homo sapiens
tgggacaccctgcac

SEQ ID NO: 706891 - DNA, 15 bp, Homo sapiens
gggacaccctgcacc

SEQ ID NO: 706892 - DNA, 15 bp, Homo sapiens
ggacaccctgcaccc

SEQ ID NO: 706893 - DNA, 15 bp, Homo sapiens
gacaccctgcaccca

SEQ ID NO: 706894 - DNA, 15 bp, Homo sapiens
acaccctgcacccac

SEQ ID NO: 706895 - DNA, 15 bp, Homo sapiens
caccctgcacccacc

SEQ ID NO: 706896 - DNA, 15 bp, Homo sapiens
accctgcacccacct

SEQ ID NO: 706897 - DNA, 15 bp, Homo sapiens
ccctgcacccacctc

SEQ ID NO: 706898 - DNA, 15 bp, Homo sapiens
cctgcacccacctct

SEQ ID NO: 706899 - DNA, 15 bp, Homo sapiens
ctgcacccacctctg

SEQ ID NO: 706900 - DNA, 15 bp, Homo sapiens
tgcacccacctctgg

SEQ ID NO: 706901 - DNA, 15 bp, Homo sapiens
gcacccacctctggt

SEQ ID NO: 706902 - DNA, 15 bp, Homo sapiens
cacccacctctggtg

SEQ ID NO: 706903 - DNA, 15 bp, Homo sapiens
acccacctctggtgt

SEQ ID NO: 706904 - DNA, 15 bp, Homo sapiens
cccacctctggtgtg

SEQ ID NO: 706905 - DNA, 15 bp, Homo sapiens
ccacctctggtgtgg

SEQ ID NO: 706906 - DNA, 15 bp, Homo sapiens
cacctctggtgtggg

SEQ ID NO: 706907 - DNA, 15 bp, Homo sapiens
acctctggtgtggga

SEQ ID NO: 706908 - DNA, 15 bp, Homo sapiens
cctctggtgtgggag

SEQ ID NO: 706909 - DNA, 15 bp, Homo sapiens
ctctggtgtgggaga

SEQ ID NO: 706910 - DNA, 15 bp, Homo sapiens
tctggtgtgggagag

SEQ ID NO: 706911 - DNA, 15 bp, Homo sapiens
ctggtgtgggagagg

SEQ ID NO: 706912 - DNA, 15 bp, Homo sapiens
tggtgtgggagaggc

SEQ ID NO: 706913 - DNA, 15 bp, Homo sapiens
ggtgtgggagaggcc

SEQ ID NO: 706914 - DNA, 15 bp, Homo sapiens
gtgtgggagaggccc

SEQ ID NO: 706915 - DNA, 15 bp, Homo sapiens
tgtgggagaggccca

SEQ ID NO: 706916 - DNA, 15 bp, Homo sapiens
gtgggagaggcccac

SEQ ID NO: 706917 - DNA, 15 bp, Homo sapiens
tgggagaggcccacc

SEQ ID NO: 706918 - DNA, 15 bp, Homo sapiens
gggagaggcccacca

SEQ ID NO: 706919 - DNA, 15 bp, Homo sapiens
ggagaggcccaccaa

SEQ ID NO: 706920 - DNA, 15 bp, Homo sapiens
gagaggcccaccaag

SEQ ID NO: 706921 - DNA, 15 bp, Homo sapiens
agaggcccaccaagg

SEQ ID NO: 706922 - DNA, 15 bp, Homo sapiens
gaggcccaccaaggt

SEQ ID NO: 706923 - DNA, 15 bp, Homo sapiens
aggcccaccaaggtc

SEQ ID NO: 706924 - DNA, 15 bp, Homo sapiens
ggcccaccaaggtcc

SEQ ID NO: 706925 - DNA, 15 bp, Homo sapiens
gcccaccaaggtccg

SEQ ID NO: 706926 - DNA, 15 bp, Homo sapiens
cccaccaaggtccgg

SEQ ID NO: 706927 - DNA, 15 bp, Homo sapiens
ccaccaaggtccggc

SEQ ID NO: 706928 - DNA, 15 bp, Homo sapiens
caccaaggtccggct

SEQ ID NO: 706929 - DNA, 15 bp, Homo sapiens
accaaggtccggctg

SEQ ID NO: 706930 - DNA, 15 bp, Homo sapiens
ccaaggtccggctgc

SEQ ID NO: 706931 - DNA, 15 bp, Homo sapiens
caaggtccggctgcc

SEQ ID NO: 706932 - DNA, 15 bp, Homo sapiens
aaggtccggctgcct

SEQ ID NO: 706933 - DNA, 15 bp, Homo sapiens
aggtccggctgccta

SEQ ID NO: 706934 - DNA, 15 bp, Homo sapiens
ggtccggctgcctaa

SEQ ID NO: 706935 - DNA, 15 bp, Homo sapiens
gtccggctgcctaag

SEQ ID NO: 706936 - DNA, 15 bp, Homo sapiens
tccggctgcctaagc

SEQ ID NO: 706937 - DNA, 15 bp, Homo sapiens
ccggctgcctaagct

SEQ ID NO: 706938 - DNA, 15 bp, Homo sapiens
cggctgcctaagctg

SEQ ID NO: 706939 - DNA, 15 bp, Homo sapiens
ggctgcctaagctgt

SEQ ID NO: 706940 - DNA, 15 bp, Homo sapiens
gctgcctaagctgta

SEQ ID NO: 706941 - DNA, 15 bp, Homo sapiens
ctgcctaagctgtat

SEQ ID NO: 706942 - DNA, 15 bp, Homo sapiens
tgcctaagctgtatc

SEQ ID NO: 706943 - DNA, 15 bp, Homo sapiens
gcctaagctgtatct

SEQ ID NO: 706944 - DNA, 15 bp, Homo sapiens
cctaagctgtatctg

SEQ ID NO: 706945 - DNA, 15 bp, Homo sapiens
ctaagctgtatctga

SEQ ID NO: 706946 - DNA, 15 bp, Homo sapiens
taagctgtatctgaa

SEQ ID NO: 706947 - DNA, 15 bp, Homo sapiens
aagctgtatctgaaa

SEQ ID NO: 706948 - DNA, 15 bp, Homo sapiens
agctgtatctgaaac

SEQ ID NO: 706949 - DNA, 15 bp, Homo sapiens
gctgtatctgaaaca

SEQ ID NO: 706950 - DNA, 15 bp, Homo sapiens
ctgtatctgaaacac

SEQ ID NO: 706951 - DNA, 15 bp, Homo sapiens
tgtatctgaaacacc

SEQ ID NO: 706952 - DNA, 15 bp, Homo sapiens
gtatctgaaacacca

SEQ ID NO: 706953 - DNA, 15 bp, Homo sapiens
tatctgaaacaccaa

SEQ ID NO: 706954 - DNA, 15 bp, Homo sapiens
atctgaaacaccaaa

SEQ ID NO: 706955 - DNA, 15 bp, Homo sapiens
tctgaaacaccaaat

SEQ ID NO: 706956 - DNA, 15 bp, Homo sapiens
ctgaaacaccaaatg

SEQ ID NO: 706957 - DNA, 15 bp, Homo sapiens
tgaaacaccaaatgg

SEQ ID NO: 706958 - DNA, 15 bp, Homo sapiens
gaaacaccaaatgga

SEQ ID NO: 706959 - DNA, 15 bp, Homo sapiens
aaacaccaaatggac

SEQ ID NO: 706960 - DNA, 15 bp, Homo sapiens
aacaccaaatggacc

SEQ ID NO: 706961 - DNA, 15 bp, Homo sapiens
acaccaaatggacct

SEQ ID NO: 706962 - DNA, 15 bp, Homo sapiens
caccaaatggacctg

SEQ ID NO: 706963 - DNA, 15 bp, Homo sapiens
accaaatggacctgg

SEQ ID NO: 706964 - DNA, 15 bp, Homo sapiens
ccaaatggacctggt

SEQ ID NO: 706965 - DNA, 15 bp, Homo sapiens
caaatggacctggtg

SEQ ID NO: 706966 - DNA, 15 bp, Homo sapiens
aaatggacctggtgg

SEQ ID NO: 706967 - DNA, 15 bp, Homo sapiens
aatggacctggtggc

SEQ ID NO: 706968 - DNA, 15 bp, Homo sapiens
atggacctggtggcc

SEQ ID NO: 706969 - DNA, 15 bp, Homo sapiens
tggacctggtggcca

SEQ ID NO: 706970 - DNA, 15 bp, Homo sapiens
ggacctggtggccac

SEQ ID NO: 706971 - DNA, 15 bp, Homo sapiens
gacctggtggccacc

SEQ ID NO: 706972 - DNA, 15 bp, Homo sapiens
acctggtggccaccc

SEQ ID NO: 706973 - DNA, 15 bp, Homo sapiens
cctggtggccaccct

SEQ ID NO: 706974 - DNA, 15 bp, Homo sapiens
ctggtggccaccctc

SEQ ID NO: 706975 - DNA, 15 bp, Homo sapiens
tggtggccaccctca

SEQ ID NO: 706976 - DNA, 15 bp, Homo sapiens
ggtggccaccctcag

SEQ ID NO: 706977 - DNA, 15 bp, Homo sapiens
gtggccaccctcagc

SEQ ID NO: 706978 - DNA, 15 bp, Homo sapiens
tggccaccctcagcc

SEQ ID NO: 706979 - DNA, 15 bp, Homo sapiens
ggccaccctcagcca

SEQ ID NO: 706980 - DNA, 15 bp, Homo sapiens
gccaccctcagccag

SEQ ID NO: 706981 - DNA, 15 bp, Homo sapiens
ccaccctcagccagc

SEQ ID NO: 706982 - DNA, 15 bp, Homo sapiens
caccctcagccagct

SEQ ID NO: 706983 - DNA, 15 bp, Homo sapiens
accctcagccagctg

SEQ ID NO: 706984 - DNA, 15 bp, Homo sapiens
ccctcagccagctgg

SEQ ID NO: 706985 - DNA, 15 bp, Homo sapiens
cctcagccagctggg

SEQ ID NO: 706986 - DNA, 15 bp, Homo sapiens
ctcagccagctgggt

SEQ ID NO: 706987 - DNA, 15 bp, Homo sapiens
tcagccagctgggta

SEQ ID NO: 706988 - DNA, 15 bp, Homo sapiens
cagccagctgggtaa

SEQ ID NO: 706989 - DNA, 15 bp, Homo sapiens
agccagctgggtaag

SEQ ID NO: 706990 - DNA, 15 bp, Homo sapiens
gccagctgggtaagg

SEQ ID NO: 706991 - DNA, 15 bp, Homo sapiens
ccagctgggtaagga

SEQ ID NO: 706992 - DNA, 15 bp, Homo sapiens
cagctgggtaaggag

SEQ ID NO: 706993 - DNA, 15 bp, Homo sapiens
agctgggtaaggagg

SEQ ID NO: 706994 - DNA, 15 bp, Homo sapiens
gctgggtaaggagga

SEQ ID NO: 706995 - DNA, 15 bp, Homo sapiens
ctgggtaaggaggag

SEQ ID NO: 706996 - DNA, 15 bp, Homo sapiens
tgggtaaggaggagg

SEQ ID NO: 706997 - DNA, 15 bp, Homo sapiens
gggtaaggaggaggg

SEQ ID NO: 706998 - DNA, 15 bp, Homo sapiens
ggtaaggaggagggt

SEQ ID NO: 706999 - DNA, 15 bp, Homo sapiens
gtaaggaggagggtg

SEQ ID NO: 707000 - DNA, 15 bp, Homo sapiens
taaggaggagggtgc

SEQ ID NO: 707001 - DNA, 15 bp, Homo sapiens
aaggaggagggtgcg

SEQ ID NO: 707002 - DNA, 15 bp, Homo sapiens
aggaggagggtgcgg

SEQ ID NO: 707003 - DNA, 15 bp, Homo sapiens
ggaggagggtgcggg

SEQ ID NO: 707004 - DNA, 15 bp, Homo sapiens
gaggagggtgcgggc

SEQ ID NO: 707005 - DNA, 15 bp, Homo sapiens
aggagggtgcgggcg

SEQ ID NO: 707006 - DNA, 15 bp, Homo sapiens
ggagggtgcgggcga

SEQ ID NO: 707007 - DNA, 15 bp, Homo sapiens
gagggtgcgggcgag

SEQ ID NO: 707008 - DNA, 15 bp, Homo sapiens
agggtgcgggcgagc

SEQ ID NO: 707009 - DNA, 15 bp, Homo sapiens
gggtgcgggcgagcc

SEQ ID NO: 707010 - DNA, 15 bp, Homo sapiens
ggtgcgggcgagccc

SEQ ID NO: 707011 - DNA, 15 bp, Homo sapiens
gtgcgggcgagcccc

SEQ ID NO: 707012 - DNA, 15 bp, Homo sapiens
tgcgggcgagccccc

SEQ ID NO: 707013 - DNA, 15 bp, Homo sapiens
gcgggcgagcccccg

SEQ ID NO: 707014 - DNA, 15 bp, Homo sapiens
cgggcgagcccccga

SEQ ID NO: 707015 - DNA, 15 bp, Homo sapiens
gggcgagcccccgag

SEQ ID NO: 707016 - DNA, 15 bp, Homo sapiens
ggcgagcccccgagg

SEQ ID NO: 707017 - DNA, 15 bp, Homo sapiens
gcgagcccccgaggt

SEQ ID NO: 707018 - DNA, 15 bp, Homo sapiens
cgagcccccgaggtc

SEQ ID NO: 707019 - DNA, 15 bp, Homo sapiens
gagcccccgaggtca

SEQ ID NO: 707020 - DNA, 15 bp, Homo sapiens
agcccccgaggtcag

SEQ ID NO: 707021 - DNA, 15 bp, Homo sapiens
gcccccgaggtcagg

SEQ ID NO: 707022 - DNA, 15 bp, Homo sapiens
cccccgaggtcaggc

SEQ ID NO: 707023 - DNA, 15 bp, Homo sapiens
ccccgaggtcaggct

SEQ ID NO: 707024 - DNA, 15 bp, Homo sapiens
cccgaggtcaggctg

SEQ ID NO: 707025 - DNA, 15 bp, Homo sapiens
ccgaggtcaggctgg

SEQ ID NO: 707026 - DNA, 15 bp, Homo sapiens
cgaggtcaggctggg

SEQ ID NO: 707027 - DNA, 15 bp, Homo sapiens
gaggtcaggctgggc

SEQ ID NO: 707028 - DNA, 15 bp, Homo sapiens
aggtcaggctgggca

SEQ ID NO: 707029 - DNA, 15 bp, Homo sapiens
ggtcaggctgggcag

SEQ ID NO: 707030 - DNA, 15 bp, Homo sapiens
gtcaggctgggcagg

SEQ ID NO: 707031 - DNA, 15 bp, Homo sapiens
tcaggctgggcaggg

SEQ ID NO: 707032 - DNA, 15 bp, Homo sapiens
caggctgggcagggc

SEQ ID NO: 707033 - DNA, 15 bp, Homo sapiens
aggctgggcagggcg

SEQ ID NO: 707034 - DNA, 15 bp, Homo sapiens
ggctgggcagggcgg

SEQ ID NO: 707035 - DNA, 15 bp, Homo sapiens
gctgggcagggcggg

SEQ ID NO: 707036 - DNA, 15 bp, Homo sapiens
ctgggcagggcgggt

SEQ ID NO: 707037 - DNA, 15 bp, Homo sapiens
tgggcagggcgggta

SEQ ID NO: 707038 - DNA, 15 bp, Homo sapiens
gggcagggcgggtaa

SEQ ID NO: 707039 - DNA, 15 bp, Homo sapiens
ggcagggcgggtaag

SEQ ID NO: 707040 - DNA, 15 bp, Homo sapiens
gcagggcgggtaagg

SEQ ID NO: 707041 - DNA, 15 bp, Homo sapiens
cagggcgggtaagga

SEQ ID NO: 707042 - DNA, 15 bp, Homo sapiens
agggcgggtaaggag

SEQ ID NO: 707043 - DNA, 15 bp, Homo sapiens
gggcgggtaaggagg

SEQ ID NO: 707044 - DNA, 15 bp, Homo sapiens
ggcgggtaaggagga

SEQ ID NO: 707045 - DNA, 15 bp, Homo sapiens
gcgggtaaggaggaa

SEQ ID NO: 707046 - DNA, 15 bp, Homo sapiens
cgggtaaggaggaag

SEQ ID NO: 707047 - DNA, 15 bp, Homo sapiens
gggtaaggaggaagc

SEQ ID NO: 707048 - DNA, 15 bp, Homo sapiens
ggtaaggaggaagcg

SEQ ID NO: 707049 - DNA, 15 bp, Homo sapiens
gtaaggaggaagcgt

SEQ ID NO: 707050 - DNA, 15 bp, Homo sapiens
taaggaggaagcgtc

SEQ ID NO: 707051 - DNA, 15 bp, Homo sapiens
aaggaggaagcgtct

SEQ ID NO: 707052 - DNA, 15 bp, Homo sapiens
aggaggaagcgtctg

SEQ ID NO: 707053 - DNA, 15 bp, Homo sapiens
ggaggaagcgtctgg

SEQ ID NO: 707054 - DNA, 15 bp, Homo sapiens
gaggaagcgtctggc

SEQ ID NO: 707055 - DNA, 15 bp, Homo sapiens
aggaagcgtctggct

SEQ ID NO: 707056 - DNA, 15 bp, Homo sapiens
ggaagcgtctggctg

SEQ ID NO: 707057 - DNA, 15 bp, Homo sapiens
gaagcgtctggctgg

SEQ ID NO: 707058 - DNA, 15 bp, Homo sapiens
aagcgtctggctggc

SEQ ID NO: 707059 - DNA, 15 bp, Homo sapiens
agcgtctggctggca

SEQ ID NO: 707060 - DNA, 15 bp, Homo sapiens
gcgtctggctggcag

SEQ ID NO: 707061 - DNA, 15 bp, Homo sapiens
cgtctggctggcagt

SEQ ID NO: 707062 - DNA, 15 bp, Homo sapiens
gtctggctggcagtg

SEQ ID NO: 707063 - DNA, 15 bp, Homo sapiens
tctggctggcagtgg

SEQ ID NO: 707064 - DNA, 15 bp, Homo sapiens
ctggctggcagtgga

SEQ ID NO: 707065 - DNA, 15 bp, Homo sapiens
tggctggcagtggag

SEQ ID NO: 707066 - DNA, 15 bp, Homo sapiens
ggctggcagtggagc

SEQ ID NO: 707067 - DNA, 15 bp, Homo sapiens
gctggcagtggagct

SEQ ID NO: 707068 - DNA, 15 bp, Homo sapiens
ctggcagtggagctg

SEQ ID NO: 707069 - DNA, 15 bp, Homo sapiens
tggcagtggagctga

SEQ ID NO: 707070 - DNA, 15 bp, Homo sapiens
ggcagtggagctgag

SEQ ID NO: 707071 - DNA, 15 bp, Homo sapiens
gcagtggagctgagt

SEQ ID NO: 707072 - DNA, 15 bp, Homo sapiens
cagtggagctgagtc

SEQ ID NO: 707073 - DNA, 15 bp, Homo sapiens
agtggagctgagtca

SEQ ID NO: 707074 - DNA, 15 bp, Homo sapiens
gtggagctgagtcag

SEQ ID NO: 707075 - DNA, 15 bp, Homo sapiens
tggagctgagtcaga

SEQ ID NO: 707076 - DNA, 15 bp, Homo sapiens
ggagctgagtcagag

SEQ ID NO: 707077 - DNA, 15 bp, Homo sapiens
gagctgagtcagagc

SEQ ID NO: 707078 - DNA, 15 bp, Homo sapiens
agctgagtcagagct

SEQ ID NO: 707079 - DNA, 15 bp, Homo sapiens
gctgagtcagagctg

SEQ ID NO: 707080 - DNA, 15 bp, Homo sapiens
ctgagtcagagctgt

SEQ ID NO: 707081 - DNA, 15 bp, Homo sapiens
tgagtcagagctgtc

SEQ ID NO: 707082 - DNA, 15 bp, Homo sapiens
gagtcagagctgtcc

SEQ ID NO: 707083 - DNA, 15 bp, Homo sapiens
agtcagagctgtcct

SEQ ID NO: 707084 - DNA, 15 bp, Homo sapiens
gtcagagctgtcctg

SEQ ID NO: 707085 - DNA, 15 bp, Homo sapiens
tcagagctgtcctgt

SEQ ID NO: 707086 - DNA, 15 bp, Homo sapiens
cagagctgtcctgtg

SEQ ID NO: 707087 - DNA, 15 bp, Homo sapiens
agagctgtcctgtgt

SEQ ID NO: 707088 - DNA, 15 bp, Homo sapiens
gagctgtcctgtgtc

SEQ ID NO: 707089 - DNA, 15 bp, Homo sapiens
agctgtcctgtgtcc

SEQ ID NO: 707090 - DNA, 15 bp, Homo sapiens
gctgtcctgtgtcct

SEQ ID NO: 707091 - DNA, 15 bp, Homo sapiens
ctgtcctgtgtcctg

SEQ ID NO: 707092 - DNA, 15 bp, Homo sapiens
tgtcctgtgtcctgc

SEQ ID NO: 707093 - DNA, 15 bp, Homo sapiens
gtcctgtgtcctgct

SEQ ID NO: 707094 - DNA, 15 bp, Homo sapiens
tcctgtgtcctgctc

SEQ ID NO: 707095 - DNA, 15 bp, Homo sapiens
cctgtgtcctgctct

SEQ ID NO: 707096 - DNA, 15 bp, Homo sapiens
ctgtgtcctgctctt

SEQ ID NO: 707097 - DNA, 15 bp, Homo sapiens
tgtgtcctgctcttt

SEQ ID NO: 707098 - DNA, 15 bp, Homo sapiens
gtgtcctgctctttt

SEQ ID NO: 707099 - DNA, 15 bp, Homo sapiens
tgtcctgctcttttc

SEQ ID NO: 707100 - DNA, 15 bp, Homo sapiens
gtcctgctcttttcc

SEQ ID NO: 707101 - DNA, 15 bp, Homo sapiens
tcctgctcttttcca

SEQ ID NO: 707102 - DNA, 15 bp, Homo sapiens
cctgctcttttccag

SEQ ID NO: 707103 - DNA, 15 bp, Homo sapiens
ctgctcttttccagg

SEQ ID NO: 707104 - DNA, 15 bp, Homo sapiens
tgctcttttccaggg

SEQ ID NO: 707105 - DNA, 15 bp, Homo sapiens
gctcttttccagggc

SEQ ID NO: 707106 - DNA, 15 bp, Homo sapiens
ctcttttccagggct

SEQ ID NO: 707107 - DNA, 15 bp, Homo sapiens
tcttttccagggctt

SEQ ID NO: 707108 - DNA, 15 bp, Homo sapiens
cttttccagggcttc

SEQ ID NO: 707109 - DNA, 15 bp, Homo sapiens
ttttccagggcttcg

SEQ ID NO: 707110 - DNA, 15 bp, Homo sapiens
tttccagggcttcgg

SEQ ID NO: 707111 - DNA, 15 bp, Homo sapiens
ttccagggcttcggg

SEQ ID NO: 707112 - DNA, 15 bp, Homo sapiens
tccagggcttcggga

SEQ ID NO: 707113 - DNA, 15 bp, Homo sapiens
ccagggcttcgggag

SEQ ID NO: 707114 - DNA, 15 bp, Homo sapiens
cagggcttcgggagc

SEQ ID NO: 707115 - DNA, 15 bp, Homo sapiens
agggcttcgggagcg

SEQ ID NO: 707116 - DNA, 15 bp, Homo sapiens
gggcttcgggagcgg

SEQ ID NO: 707117 - DNA, 15 bp, Homo sapiens
ggcttcgggagcggg

SEQ ID NO: 707118 - DNA, 15 bp, Homo sapiens
gcttcgggagcgggg

SEQ ID NO: 707119 - DNA, 15 bp, Homo sapiens
cttcgggagcgggga

SEQ ID NO: 707120 - DNA, 15 bp, Homo sapiens
ttcgggagcggggag

SEQ ID NO: 707121 - DNA, 15 bp, Homo sapiens
tcgggagcggggaga

SEQ ID NO: 707122 - DNA, 15 bp, Homo sapiens
cgggagcggggagag

SEQ ID NO: 707123 - DNA, 15 bp, Homo sapiens
gggagcggggagagg

SEQ ID NO: 707124 - DNA, 15 bp, Homo sapiens
ggagcggggagaggg

SEQ ID NO: 707125 - DNA, 15 bp, Homo sapiens
gagcggggagagggt

SEQ ID NO: 707126 - DNA, 15 bp, Homo sapiens
agcggggagagggtt

SEQ ID NO: 707127 - DNA, 15 bp, Homo sapiens
gcggggagagggttg

SEQ ID NO: 707128 - DNA, 15 bp, Homo sapiens
cggggagagggttga

SEQ ID NO: 707129 - DNA, 15 bp, Homo sapiens
ggggagagggttgaa

SEQ ID NO: 707130 - DNA, 15 bp, Homo sapiens
gggagagggttgaat

SEQ ID NO: 707131 - DNA, 15 bp, Homo sapiens
ggagagggttgaata

SEQ ID NO: 707132 - DNA, 15 bp, Homo sapiens
gagagggttgaatat

SEQ ID NO: 707133 - DNA, 15 bp, Homo sapiens
agagggttgaatatg

SEQ ID NO: 707134 - DNA, 15 bp, Homo sapiens
gagggttgaatatga

SEQ ID NO: 707135 - DNA, 15 bp, Homo sapiens
agggttgaatatgag

SEQ ID NO: 707136 - DNA, 15 bp, Homo sapiens
gggttgaatatgagc

SEQ ID NO: 707137 - DNA, 15 bp, Homo sapiens
ggttgaatatgagcc

SEQ ID NO: 707138 - DNA, 15 bp, Homo sapiens
gttgaatatgagccc

SEQ ID NO: 707139 - DNA, 15 bp, Homo sapiens
ttgaatatgagcccc

SEQ ID NO: 707140 - DNA, 15 bp, Homo sapiens
tgaatatgagccccc

SEQ ID NO: 707141 - DNA, 15 bp, Homo sapiens
gaatatgagccccca

SEQ ID NO: 707142 - DNA, 15 bp, Homo sapiens
aatatgagcccccag

SEQ ID NO: 707143 - DNA, 15 bp, Homo sapiens
atatgagcccccaga

SEQ ID NO: 707144 - DNA, 15 bp, Homo sapiens
tatgagcccccagac

SEQ ID NO: 707145 - DNA, 15 bp, Homo sapiens
atgagcccccagacc

SEQ ID NO: 707146 - DNA, 15 bp, Homo sapiens
tgagcccccagaccc

SEQ ID NO: 707147 - DNA, 15 bp, Homo sapiens
gagcccccagaccct

SEQ ID NO: 707148 - DNA, 15 bp, Homo sapiens
agcccccagaccctc

SEQ ID NO: 707149 - DNA, 15 bp, Homo sapiens
gcccccagaccctct

SEQ ID NO: 707150 - DNA, 15 bp, Homo sapiens
cccccagaccctctg

SEQ ID NO: 707151 - DNA, 15 bp, Homo sapiens
ccccagaccctctgt

SEQ ID NO: 707152 - DNA, 15 bp, Homo sapiens
cccagaccctctgtc

SEQ ID NO: 707153 - DNA, 15 bp, Homo sapiens
ccagaccctctgtcc

SEQ ID NO: 707154 - DNA, 15 bp, Homo sapiens
cagaccctctgtcct

SEQ ID NO: 707155 - DNA, 15 bp, Homo sapiens
agaccctctgtccta

SEQ ID NO: 707156 - DNA, 15 bp, Homo sapiens
gaccctctgtcctag

SEQ ID NO: 707157 - DNA, 15 bp, Homo sapiens
accctctgtcctaga

SEQ ID NO: 707158 - DNA, 15 bp, Homo sapiens
ccctctgtcctagag

SEQ ID NO: 707159 - DNA, 15 bp, Homo sapiens
cctctgtcctagagg

SEQ ID NO: 707160 - DNA, 15 bp, Homo sapiens
ctctgtcctagagga

SEQ ID NO: 707161 - DNA, 15 bp, Homo sapiens
tctgtcctagaggaa

SEQ ID NO: 707162 - DNA, 15 bp, Homo sapiens
ctgtcctagaggaag

SEQ ID NO: 707163 - DNA, 15 bp, Homo sapiens
tgtcctagaggaagt

SEQ ID NO: 707164 - DNA, 15 bp, Homo sapiens
gtcctagaggaagtt

SEQ ID NO: 707165 - DNA, 15 bp, Homo sapiens
tcctagaggaagttg

SEQ ID NO: 707166 - DNA, 15 bp, Homo sapiens
cctagaggaagttgg

SEQ ID NO: 707167 - DNA, 15 bp, Homo sapiens
ctagaggaagttggg

SEQ ID NO: 707168 - DNA, 15 bp, Homo sapiens
tagaggaagttgggg

SEQ ID NO: 707169 - DNA, 15 bp, Homo sapiens
agaggaagttggggt

SEQ ID NO: 707170 - DNA, 15 bp, Homo sapiens
gaggaagttggggtg

SEQ ID NO: 707171 - DNA, 15 bp, Homo sapiens
aggaagttggggtgg

SEQ ID NO: 707172 - DNA, 15 bp, Homo sapiens
ggaagttggggtggc

SEQ ID NO: 707173 - DNA, 15 bp, Homo sapiens
gaagttggggtggcc

SEQ ID NO: 707174 - DNA, 15 bp, Homo sapiens
aagttggggtggccc

SEQ ID NO: 707175 - DNA, 15 bp, Homo sapiens
agttggggtggcccg

SEQ ID NO: 707176 - DNA, 15 bp, Homo sapiens
gttggggtggcccgg

SEQ ID NO: 707177 - DNA, 15 bp, Homo sapiens
ttggggtggcccggg

SEQ ID NO: 707178 - DNA, 15 bp, Homo sapiens
tggggtggcccgggg

SEQ ID NO: 707179 - DNA, 15 bp, Homo sapiens
ggggtggcccgggga

SEQ ID NO: 707180 - DNA, 15 bp, Homo sapiens
gggtggcccggggaa

SEQ ID NO: 707181 - DNA, 15 bp, Homo sapiens
ggtggcccggggaat

SEQ ID NO: 707182 - DNA, 15 bp, Homo sapiens
gtggcccggggaatg

SEQ ID NO: 707183 - DNA, 15 bp, Homo sapiens
tggcccggggaatgg

SEQ ID NO: 707184 - DNA, 15 bp, Homo sapiens
ggcccggggaatggg

SEQ ID NO: 707185 - DNA, 15 bp, Homo sapiens
gcccggggaatgggg

SEQ ID NO: 707186 - DNA, 15 bp, Homo sapiens
cccggggaatggggc

SEQ ID NO: 707187 - DNA, 15 bp, Homo sapiens
ccggggaatggggct

SEQ ID NO: 707188 - DNA, 15 bp, Homo sapiens
cggggaatggggctc

SEQ ID NO: 707189 - DNA, 15 bp, Homo sapiens
ggggaatggggctct

SEQ ID NO: 707190 - DNA, 15 bp, Homo sapiens
gggaatggggctctg

SEQ ID NO: 707191 - DNA, 15 bp, Homo sapiens
ggaatggggctctgc

SEQ ID NO: 707192 - DNA, 15 bp, Homo sapiens
gaatggggctctgct

SEQ ID NO: 707193 - DNA, 15 bp, Homo sapiens
aatggggctctgctt

SEQ ID NO: 707194 - DNA, 15 bp, Homo sapiens
atggggctctgcttt

SEQ ID NO: 707195 - DNA, 15 bp, Homo sapiens
tggggctctgctttg

SEQ ID NO: 707196 - DNA, 15 bp, Homo sapiens
ggggctctgctttgc

SEQ ID NO: 707197 - DNA, 15 bp, Homo sapiens
gggctctgctttgct

SEQ ID NO: 707198 - DNA, 15 bp, Homo sapiens
ggctctgctttgctg

SEQ ID NO: 707199 - DNA, 15 bp, Homo sapiens
gctctgctttgctgc

SEQ ID NO: 707200 - DNA, 15 bp, Homo sapiens
ctctgctttgctgcc

SEQ ID NO: 707201 - DNA, 15 bp, Homo sapiens
tctgctttgctgccc

SEQ ID NO: 707202 - DNA, 15 bp, Homo sapiens
ctgctttgctgccca

SEQ ID NO: 707203 - DNA, 15 bp, Homo sapiens
tgctttgctgcccaa

SEQ ID NO: 707204 - DNA, 15 bp, Homo sapiens
gctttgctgcccaag

SEQ ID NO: 707205 - DNA, 15 bp, Homo sapiens
ctttgctgcccaaga

SEQ ID NO: 707206 - DNA, 15 bp, Homo sapiens
tttgctgcccaagac

SEQ ID NO: 707207 - DNA, 15 bp, Homo sapiens
ttgctgcccaagacc

SEQ ID NO: 707208 - DNA, 15 bp, Homo sapiens
tgctgcccaagacct

SEQ ID NO: 707209 - DNA, 15 bp, Homo sapiens
gctgcccaagacctc

SEQ ID NO: 707210 - DNA, 15 bp, Homo sapiens
ctgcccaagacctcg

SEQ ID NO: 707211 - DNA, 15 bp, Homo sapiens
tgcccaagacctcgc

SEQ ID NO: 707212 - DNA, 15 bp, Homo sapiens
gcccaagacctcgca

SEQ ID NO: 707213 - DNA, 15 bp, Homo sapiens
cccaagacctcgcat

SEQ ID NO: 707214 - DNA, 15 bp, Homo sapiens
ccaagacctcgcatt

SEQ ID NO: 707215 - DNA, 15 bp, Homo sapiens
caagacctcgcattg

SEQ ID NO: 707216 - DNA, 15 bp, Homo sapiens
aagacctcgcattgc

SEQ ID NO: 707217 - DNA, 15 bp, Homo sapiens
agacctcgcattgca

SEQ ID NO: 707218 - DNA, 15 bp, Homo sapiens
gacctcgcattgcaa

SEQ ID NO: 707219 - DNA, 15 bp, Homo sapiens
acctcgcattgcaag

SEQ ID NO: 707220 - DNA, 15 bp, Homo sapiens
cctcgcattgcaagg

SEQ ID NO: 707221 - DNA, 15 bp, Homo sapiens
ctcgcattgcaagga

SEQ ID NO: 707222 - DNA, 15 bp, Homo sapiens
tcgcattgcaaggag

SEQ ID NO: 707223 - DNA, 15 bp, Homo sapiens
cgcattgcaaggaga

SEQ ID NO: 707224 - DNA, 15 bp, Homo sapiens
gcattgcaaggagag

SEQ ID NO: 707225 - DNA, 15 bp, Homo sapiens
cattgcaaggagagt

SEQ ID NO: 707226 - DNA, 15 bp, Homo sapiens
attgcaaggagagtc

SEQ ID NO: 707227 - DNA, 15 bp, Homo sapiens
ttgcaaggagagtct

SEQ ID NO: 707228 - DNA, 15 bp, Homo sapiens
tgcaaggagagtctg

SEQ ID NO: 707229 - DNA, 15 bp, Homo sapiens
gcaaggagagtctgg

SEQ ID NO: 707230 - DNA, 15 bp, Homo sapiens
caaggagagtctggg

SEQ ID NO: 707231 - DNA, 15 bp, Homo sapiens
aaggagagtctgggt

SEQ ID NO: 707232 - DNA, 15 bp, Homo sapiens
aggagagtctgggta

SEQ ID NO: 707233 - DNA, 15 bp, Homo sapiens
ggagagtctgggtag

SEQ ID NO: 707234 - DNA, 15 bp, Homo sapiens
gagagtctgggtaga

SEQ ID NO: 707235 - DNA, 15 bp, Homo sapiens
agagtctgggtagag

SEQ ID NO: 707236 - DNA, 15 bp, Homo sapiens
gagtctgggtagaga

SEQ ID NO: 707237 - DNA, 15 bp, Homo sapiens
agtctgggtagagag

SEQ ID NO: 707238 - DNA, 15 bp, Homo sapiens
gtctgggtagagagc

SEQ ID NO: 707239 - DNA, 15 bp, Homo sapiens
tctgggtagagagcc

SEQ ID NO: 707240 - DNA, 15 bp, Homo sapiens
ctgggtagagagcct

SEQ ID NO: 707241 - DNA, 15 bp, Homo sapiens
tgggtagagagcctg

SEQ ID NO: 707242 - DNA, 15 bp, Homo sapiens
gggtagagagcctgg

SEQ ID NO: 707243 - DNA, 15 bp, Homo sapiens
ggtagagagcctggg

SEQ ID NO: 707244 - DNA, 15 bp, Homo sapiens
gtagagagcctggga

SEQ ID NO: 707245 - DNA, 15 bp, Homo sapiens
tagagagcctgggat

SEQ ID NO: 707246 - DNA, 15 bp, Homo sapiens
agagagcctgggatg

SEQ ID NO: 707247 - DNA, 15 bp, Homo sapiens
gagagcctgggatgg

SEQ ID NO: 707248 - DNA, 15 bp, Homo sapiens
agagcctgggatggc

SEQ ID NO: 707249 - DNA, 15 bp, Homo sapiens
gagcctgggatggca

SEQ ID NO: 707250 - DNA, 15 bp, Homo sapiens
agcctgggatggcat

SEQ ID NO: 707251 - DNA, 15 bp, Homo sapiens
gcctgggatggcatg

SEQ ID NO: 707252 - DNA, 15 bp, Homo sapiens
cctgggatggcatgt

SEQ ID NO: 707253 - DNA, 15 bp, Homo sapiens
ctgggatggcatgtg

SEQ ID NO: 707254 - DNA, 15 bp, Homo sapiens
tgggatggcatgtga

SEQ ID NO: 707255 - DNA, 15 bp, Homo sapiens
gggatggcatgtgag

SEQ ID NO: 707256 - DNA, 15 bp, Homo sapiens
ggatggcatgtgagc

SEQ ID NO: 707257 - DNA, 15 bp, Homo sapiens
gatggcatgtgagcc

SEQ ID NO: 707258 - DNA, 15 bp, Homo sapiens
atggcatgtgagcct

SEQ ID NO: 707259 - DNA, 15 bp, Homo sapiens
tggcatgtgagcctc

SEQ ID NO: 707260 - DNA, 15 bp, Homo sapiens
ggcatgtgagcctcg

SEQ ID NO: 707261 - DNA, 15 bp, Homo sapiens
gcatgtgagcctcgc

SEQ ID NO: 707262 - DNA, 15 bp, Homo sapiens
catgtgagcctcgct

SEQ ID NO: 707263 - DNA, 15 bp, Homo sapiens
atgtgagcctcgctg

SEQ ID NO: 707264 - DNA, 15 bp, Homo sapiens
tgtgagcctcgctgg

SEQ ID NO: 707265 - DNA, 15 bp, Homo sapiens
gtgagcctcgctggc

SEQ ID NO: 707266 - DNA, 15 bp, Homo sapiens
tgagcctcgctggct

SEQ ID NO: 707267 - DNA, 15 bp, Homo sapiens
gagcctcgctggctt

SEQ ID NO: 707268 - DNA, 15 bp, Homo sapiens
agcctcgctggcttc

SEQ ID NO: 707269 - DNA, 15 bp, Homo sapiens
gcctcgctggcttcc

SEQ ID NO: 707270 - DNA, 15 bp, Homo sapiens
cctcgctggcttccc

SEQ ID NO: 707271 - DNA, 15 bp, Homo sapiens
ctcgctggcttccct

SEQ ID NO: 707272 - DNA, 15 bp, Homo sapiens
tcgctggcttccctg

SEQ ID NO: 707273 - DNA, 15 bp, Homo sapiens
cgctggcttccctgg

SEQ ID NO: 707274 - DNA, 15 bp, Homo sapiens
gctggcttccctgga

SEQ ID NO: 707275 - DNA, 15 bp, Homo sapiens
ctggcttccctggaa

SEQ ID NO: 707276 - DNA, 15 bp, Homo sapiens
tggcttccctggaag

SEQ ID NO: 707277 - DNA, 15 bp, Homo sapiens
ggcttccctggaagg

SEQ ID NO: 707278 - DNA, 15 bp, Homo sapiens
gcttccctggaaggg

SEQ ID NO: 707279 - DNA, 15 bp, Homo sapiens
cttccctggaagggg

SEQ ID NO: 707280 - DNA, 15 bp, Homo sapiens
ttccctggaagggga

SEQ ID NO: 707281 - DNA, 15 bp, Homo sapiens
tccctggaaggggaa

SEQ ID NO: 707282 - DNA, 15 bp, Homo sapiens
ccctggaaggggaag

SEQ ID NO: 707283 - DNA, 15 bp, Homo sapiens
cctggaaggggaagg

SEQ ID NO: 707284 - DNA, 15 bp, Homo sapiens
ctggaaggggaagga

SEQ ID NO: 707285 - DNA, 15 bp, Homo sapiens
tggaaggggaaggag

SEQ ID NO: 707286 - DNA, 15 bp, Homo sapiens
ggaaggggaaggagg

SEQ ID NO: 707287 - DNA, 15 bp, Homo sapiens
gaaggggaaggagga

SEQ ID NO: 707288 - DNA, 15 bp, Homo sapiens
aaggggaaggaggag

SEQ ID NO: 707289 - DNA, 15 bp, Homo sapiens
aggggaaggaggaga

SEQ ID NO: 707290 - DNA, 15 bp, Homo sapiens
ggggaaggaggagaa

SEQ ID NO: 707291 - DNA, 15 bp, Homo sapiens
gggaaggaggagaag

SEQ ID NO: 707292 - DNA, 15 bp, Homo sapiens
ggaaggaggagaagc

SEQ ID NO: 707293 - DNA, 15 bp, Homo sapiens
gaaggaggagaagct

SEQ ID NO: 707294 - DNA, 15 bp, Homo sapiens
aaggaggagaagctg

SEQ ID NO: 707295 - DNA, 15 bp, Homo sapiens
aggaggagaagctgg

SEQ ID NO: 707296 - DNA, 15 bp, Homo sapiens
ggaggagaagctggg

SEQ ID NO: 707297 - DNA, 15 bp, Homo sapiens
gaggagaagctgggg

SEQ ID NO: 707298 - DNA, 15 bp, Homo sapiens
aggagaagctggggt

SEQ ID NO: 707299 - DNA, 15 bp, Homo sapiens
ggagaagctggggtg

SEQ ID NO: 707300 - DNA, 15 bp, Homo sapiens
gagaagctggggtgt

SEQ ID NO: 707301 - DNA, 15 bp, Homo sapiens
agaagctggggtgtc

SEQ ID NO: 707302 - DNA, 15 bp, Homo sapiens
gaagctggggtgtca

SEQ ID NO: 707303 - DNA, 15 bp, Homo sapiens
aagctggggtgtcac

SEQ ID NO: 707304 - DNA, 15 bp, Homo sapiens
agctggggtgtcaca

SEQ ID NO: 707305 - DNA, 15 bp, Homo sapiens
gctggggtgtcacac

SEQ ID NO: 707306 - DNA, 15 bp, Homo sapiens
ctggggtgtcacact

SEQ ID NO: 707307 - DNA, 15 bp, Homo sapiens
tggggtgtcacactg

SEQ ID NO: 707308 - DNA, 15 bp, Homo sapiens
ggggtgtcacactgt

SEQ ID NO: 707309 - DNA, 15 bp, Homo sapiens
gggtgtcacactgtt

SEQ ID NO: 707310 - DNA, 15 bp, Homo sapiens
ggtgtcacactgtta

SEQ ID NO: 707311 - DNA, 15 bp, Homo sapiens
gtgtcacactgttaa

SEQ ID NO: 707312 - DNA, 15 bp, Homo sapiens
tgtcacactgttaaa

SEQ ID NO: 707313 - DNA, 15 bp, Homo sapiens
gtcacactgttaaag

SEQ ID NO: 707314 - DNA, 15 bp, Homo sapiens
tcacactgttaaaga

SEQ ID NO: 707315 - DNA, 15 bp, Homo sapiens
cacactgttaaagaa

SEQ ID NO: 707316 - DNA, 15 bp, Homo sapiens
acactgttaaagaaa

SEQ ID NO: 707317 - DNA, 15 bp, Homo sapiens
cactgttaaagaaat

SEQ ID NO: 707318 - DNA, 15 bp, Homo sapiens
actgttaaagaaatg

SEQ ID NO: 707319 - DNA, 15 bp, Homo sapiens
ctgttaaagaaatgc

SEQ ID NO: 707320 - DNA, 15 bp, Homo sapiens
tgttaaagaaatgct

SEQ ID NO: 707321 - DNA, 15 bp, Homo sapiens
gttaaagaaatgctg

SEQ ID NO: 707322 - DNA, 15 bp, Homo sapiens
ttaaagaaatgctgg

SEQ ID NO: 707323 - DNA, 15 bp, Homo sapiens
taaagaaatgctggg

SEQ ID NO: 707324 - DNA, 15 bp, Homo sapiens
aaagaaatgctgggt

SEQ ID NO: 707325 - DNA, 15 bp, Homo sapiens
aagaaatgctgggtg

SEQ ID NO: 707326 - DNA, 15 bp, Homo sapiens
agaaatgctgggtgg

SEQ ID NO: 707327 - DNA, 15 bp, Homo sapiens
gaaatgctgggtgga

SEQ ID NO: 707328 - DNA, 15 bp, Homo sapiens
aaatgctgggtggag

SEQ ID NO: 707329 - DNA, 15 bp, Homo sapiens
aatgctgggtggagt

SEQ ID NO: 707330 - DNA, 15 bp, Homo sapiens
atgctgggtggagtg

SEQ ID NO: 707331 - DNA, 15 bp, Homo sapiens
tgctgggtggagtgg

SEQ ID NO: 707332 - DNA, 15 bp, Homo sapiens
gctgggtggagtggc

SEQ ID NO: 707333 - DNA, 15 bp, Homo sapiens
ctgggtggagtggct

SEQ ID NO: 707334 - DNA, 15 bp, Homo sapiens
tgggtggagtggctc

SEQ ID NO: 707335 - DNA, 15 bp, Homo sapiens
gggtggagtggctca

SEQ ID NO: 707336 - DNA, 15 bp, Homo sapiens
ggtggagtggctcat

SEQ ID NO: 707337 - DNA, 15 bp, Homo sapiens
gtggagtggctcatg

SEQ ID NO: 707338 - DNA, 15 bp, Homo sapiens
tggagtggctcatgc

SEQ ID NO: 707339 - DNA, 15 bp, Homo sapiens
ggagtggctcatgcc

SEQ ID NO: 707340 - DNA, 15 bp, Homo sapiens
gagtggctcatgcct

SEQ ID NO: 707341 - DNA, 15 bp, Homo sapiens
agtggctcatgcctg

SEQ ID NO: 707342 - DNA, 15 bp, Homo sapiens
gtggctcatgcctgt

SEQ ID NO: 707343 - DNA, 15 bp, Homo sapiens
tggctcatgcctgta

SEQ ID NO: 707344 - DNA, 15 bp, Homo sapiens
tgtaatcccagcacg

SEQ ID NO: 707345 - DNA, 15 bp, Homo sapiens
gtaatcccagcacgt

SEQ ID NO: 707346 - DNA, 15 bp, Homo sapiens
taatcccagcacgtt

SEQ ID NO: 707347 - DNA, 15 bp, Homo sapiens
aatcccagcacgttg

SEQ ID NO: 707348 - DNA, 15 bp, Homo sapiens
atcccagcacgttgg

SEQ ID NO: 707349 - DNA, 15 bp, Homo sapiens
tcccagcacgttggg

SEQ ID NO: 707350 - DNA, 15 bp, Homo sapiens
cccagcacgttggga

SEQ ID NO: 707351 - DNA, 15 bp, Homo sapiens
ccagcacgttgggaa

SEQ ID NO: 707352 - DNA, 15 bp, Homo sapiens
cagcacgttgggaag

SEQ ID NO: 707353 - DNA, 15 bp, Homo sapiens
agcacgttgggaagc

SEQ ID NO: 707354 - DNA, 15 bp, Homo sapiens
gcacgttgggaagct

SEQ ID NO: 707355 - DNA, 15 bp, Homo sapiens
cacgttgggaagctg

SEQ ID NO: 707356 - DNA, 15 bp, Homo sapiens
acgttgggaagctga

SEQ ID NO: 707357 - DNA, 15 bp, Homo sapiens
cgttgggaagctgaa

SEQ ID NO: 707358 - DNA, 15 bp, Homo sapiens
gttgggaagctgaag

SEQ ID NO: 707359 - DNA, 15 bp, Homo sapiens
ttgggaagctgaagt

SEQ ID NO: 707360 - DNA, 15 bp, Homo sapiens
tgggaagctgaagtg

SEQ ID NO: 707361 - DNA, 15 bp, Homo sapiens
gggaagctgaagtgg

SEQ ID NO: 707362 - DNA, 15 bp, Homo sapiens
ggaagctgaagtggg

SEQ ID NO: 707363 - DNA, 15 bp, Homo sapiens
gaagctgaagtgggt

SEQ ID NO: 707364 - DNA, 15 bp, Homo sapiens
aagctgaagtgggtg

SEQ ID NO: 707365 - DNA, 15 bp, Homo sapiens
agctgaagtgggtgg

SEQ ID NO: 707366 - DNA, 15 bp, Homo sapiens
gctgaagtgggtgga

SEQ ID NO: 707367 - DNA, 15 bp, Homo sapiens
ctgaagtgggtggat

SEQ ID NO: 707368 - DNA, 15 bp, Homo sapiens
tgaagtgggtggatt

SEQ ID NO: 707369 - DNA, 15 bp, Homo sapiens
gaagtgggtggattg

SEQ ID NO: 707370 - DNA, 15 bp, Homo sapiens
aagtgggtggattgc

SEQ ID NO: 707371 - DNA, 15 bp, Homo sapiens
agtgggtggattgct

SEQ ID NO: 707372 - DNA, 15 bp, Homo sapiens
gtgggtggattgctt

SEQ ID NO: 707373 - DNA, 15 bp, Homo sapiens
tgggtggattgcttg

SEQ ID NO: 707374 - DNA, 15 bp, Homo sapiens
gggtggattgcttga

SEQ ID NO: 707375 - DNA, 15 bp, Homo sapiens
ggtggattgcttgag

SEQ ID NO: 707376 - DNA, 15 bp, Homo sapiens
gtggattgcttgagc

SEQ ID NO: 707377 - DNA, 15 bp, Homo sapiens
tggattgcttgagcc

SEQ ID NO: 707378 - DNA, 15 bp, Homo sapiens
ggattgcttgagccc

SEQ ID NO: 707379 - DNA, 15 bp, Homo sapiens
gattgcttgagcccg

SEQ ID NO: 707380 - DNA, 15 bp, Homo sapiens
attgcttgagcccgg

SEQ ID NO: 707381 - DNA, 15 bp, Homo sapiens
ttgcttgagcccggg

SEQ ID NO: 707382 - DNA, 15 bp, Homo sapiens
tgcttgagcccggga

SEQ ID NO: 707383 - DNA, 15 bp, Homo sapiens
gcttgagcccgggag

SEQ ID NO: 707384 - DNA, 15 bp, Homo sapiens
cttgagcccgggagt

SEQ ID NO: 707385 - DNA, 15 bp, Homo sapiens
ttgagcccgggagtc

SEQ ID NO: 707386 - DNA, 15 bp, Homo sapiens
tgagcccgggagtcc

SEQ ID NO: 707387 - DNA, 15 bp, Homo sapiens
gagcccgggagtccg

SEQ ID NO: 707388 - DNA, 15 bp, Homo sapiens
agcccgggagtccga

SEQ ID NO: 707389 - DNA, 15 bp, Homo sapiens
gcccgggagtccgac

SEQ ID NO: 707390 - DNA, 15 bp, Homo sapiens
cccgggagtccgaca

SEQ ID NO: 707391 - DNA, 15 bp, Homo sapiens
ccgggagtccgacac

SEQ ID NO: 707392 - DNA, 15 bp, Homo sapiens
cgggagtccgacacc

SEQ ID NO: 707393 - DNA, 15 bp, Homo sapiens
gggagtccgacacca

SEQ ID NO: 707394 - DNA, 15 bp, Homo sapiens
ggagtccgacaccag

SEQ ID NO: 707395 - DNA, 15 bp, Homo sapiens
gagtccgacaccagc

SEQ ID NO: 707396 - DNA, 15 bp, Homo sapiens
agtccgacaccagcc

SEQ ID NO: 707397 - DNA, 15 bp, Homo sapiens
gtccgacaccagcct

SEQ ID NO: 707398 - DNA, 15 bp, Homo sapiens
tccgacaccagcctg

SEQ ID NO: 707399 - DNA, 15 bp, Homo sapiens
ccgacaccagcctgt

SEQ ID NO: 707400 - DNA, 15 bp, Homo sapiens
cgacaccagcctgtg

SEQ ID NO: 707401 - DNA, 15 bp, Homo sapiens
gacaccagcctgtgc

SEQ ID NO: 707402 - DNA, 15 bp, Homo sapiens
acaccagcctgtgca

SEQ ID NO: 707403 - DNA, 15 bp, Homo sapiens
caccagcctgtgcaa

SEQ ID NO: 707404 - DNA, 15 bp, Homo sapiens
accagcctgtgcaac

SEQ ID NO: 707405 - DNA, 15 bp, Homo sapiens
ccagcctgtgcaaca

SEQ ID NO: 707406 - DNA, 15 bp, Homo sapiens
cagcctgtgcaacac

SEQ ID NO: 707407 - DNA, 15 bp, Homo sapiens
agcctgtgcaacaca

SEQ ID NO: 707408 - DNA, 15 bp, Homo sapiens
gcctgtgcaacacat

SEQ ID NO: 707409 - DNA, 15 bp, Homo sapiens
cctgtgcaacacatt

SEQ ID NO: 707410 - DNA, 15 bp, Homo sapiens
ctgtgcaacacattg

SEQ ID NO: 707411 - DNA, 15 bp, Homo sapiens
tgtgcaacacattga

SEQ ID NO: 707412 - DNA, 15 bp, Homo sapiens
gtgcaacacattgaa

SEQ ID NO: 707413 - DNA, 15 bp, Homo sapiens
tgcaacacattgaaa

SEQ ID NO: 707414 - DNA, 15 bp, Homo sapiens
gcaacacattgaaac

SEQ ID NO: 707415 - DNA, 15 bp, Homo sapiens
caacacattgaaact

SEQ ID NO: 707416 - DNA, 15 bp, Homo sapiens
aacacattgaaactc

SEQ ID NO: 707417 - DNA, 15 bp, Homo sapiens
acacattgaaactcc

SEQ ID NO: 707418 - DNA, 15 bp, Homo sapiens
cacattgaaactccg

SEQ ID NO: 707419 - DNA, 15 bp, Homo sapiens
acattgaaactccgt

SEQ ID NO: 707420 - DNA, 15 bp, Homo sapiens
cattgaaactccgtc

SEQ ID NO: 707421 - DNA, 15 bp, Homo sapiens
attgaaactccgtcc

SEQ ID NO: 707422 - DNA, 15 bp, Homo sapiens
ttgaaactccgtccc

SEQ ID NO: 707423 - DNA, 15 bp, Homo sapiens
tgaaactccgtccct

SEQ ID NO: 707424 - DNA, 15 bp, Homo sapiens
gaaactccgtcccta

SEQ ID NO: 707425 - DNA, 15 bp, Homo sapiens
aaactccgtccctac

SEQ ID NO: 707426 - DNA, 15 bp, Homo sapiens
aactccgtccctaca

SEQ ID NO: 707427 - DNA, 15 bp, Homo sapiens
actccgtccctacaa

SEQ ID NO: 707428 - DNA, 15 bp, Homo sapiens
ctccgtccctacaaa

SEQ ID NO: 707429 - DNA, 15 bp, Homo sapiens
tccgtccctacaaaa

SEQ ID NO: 707430 - DNA, 15 bp, Homo sapiens
ccgtccctacaaaaa

SEQ ID NO: 707431 - DNA, 15 bp, Homo sapiens
cgtccctacaaaaaa

SEQ ID NO: 707432 - DNA, 15 bp, Homo sapiens
gtccctacaaaaaat

SEQ ID NO: 707433 - DNA, 15 bp, Homo sapiens
tccctacaaaaaata

SEQ ID NO: 707434 - DNA, 15 bp, Homo sapiens
ccctacaaaaaatac

SEQ ID NO: 707435 - DNA, 15 bp, Homo sapiens
cctacaaaaaataca

SEQ ID NO: 707436 - DNA, 15 bp, Homo sapiens
ctacaaaaaatacaa

SEQ ID NO: 707437 - DNA, 15 bp, Homo sapiens
tacaaaaaatacaaa

SEQ ID NO: 707438 - DNA, 15 bp, Homo sapiens
acaaaaaatacaaaa

SEQ ID NO: 707439 - DNA, 15 bp, Homo sapiens
caaaaaatacaaaaa

SEQ ID NO: 707440 - DNA, 15 bp, Homo sapiens
aaaaaatacaaaaat

SEQ ID NO: 707441 - DNA, 15 bp, Homo sapiens
aaaaatacaaaaatt

SEQ ID NO: 707442 - DNA, 15 bp, Homo sapiens
aaaatacaaaaatta

SEQ ID NO: 707443 - DNA, 15 bp, Homo sapiens
aaatacaaaaattag

SEQ ID NO: 707444 - DNA, 15 bp, Homo sapiens
aatacaaaaattagc

SEQ ID NO: 707445 - DNA, 15 bp, Homo sapiens
atacaaaaattagcc

SEQ ID NO: 707446 - DNA, 15 bp, Homo sapiens
tacaaaaattagcca

SEQ ID NO: 707447 - DNA, 15 bp, Homo sapiens
acaaaaattagccag

SEQ ID NO: 707448 - DNA, 15 bp, Homo sapiens
caaaaattagccagg

SEQ ID NO: 707449 - DNA, 15 bp, Homo sapiens
aaaaattagccaggt

SEQ ID NO: 707450 - DNA, 15 bp, Homo sapiens
aaaattagccaggtg

SEQ ID NO: 707451 - DNA, 15 bp, Homo sapiens
aaattagccaggtgt

SEQ ID NO: 707452 - DNA, 15 bp, Homo sapiens
aattagccaggtgtg

SEQ ID NO: 707453 - DNA, 15 bp, Homo sapiens
attagccaggtgtgg

SEQ ID NO: 707454 - DNA, 15 bp, Homo sapiens
ttagccaggtgtggt

SEQ ID NO: 707455 - DNA, 15 bp, Homo sapiens
tagccaggtgtggtg

SEQ ID NO: 707456 - DNA, 15 bp, Homo sapiens
agccaggtgtggtgc

SEQ ID NO: 707457 - DNA, 15 bp, Homo sapiens
gccaggtgtggtgca

SEQ ID NO: 707458 - DNA, 15 bp, Homo sapiens
ccaggtgtggtgcat

SEQ ID NO: 707459 - DNA, 15 bp, Homo sapiens
caggtgtggtgcatg

SEQ ID NO: 707460 - DNA, 15 bp, Homo sapiens
aggtgtggtgcatgc

SEQ ID NO: 707461 - DNA, 15 bp, Homo sapiens
ggtgtggtgcatgct

SEQ ID NO: 707462 - DNA, 15 bp, Homo sapiens
gtgtggtgcatgcta

SEQ ID NO: 707463 - DNA, 15 bp, Homo sapiens
tgtggtgcatgctac

SEQ ID NO: 707464 - DNA, 15 bp, Homo sapiens
gtggtgcatgctact

SEQ ID NO: 707465 - DNA, 15 bp, Homo sapiens
tggtgcatgctactg

SEQ ID NO: 707466 - DNA, 15 bp, Homo sapiens
ggtgcatgctactgg

SEQ ID NO: 707467 - DNA, 15 bp, Homo sapiens
gtgcatgctactggg

SEQ ID NO: 707468 - DNA, 15 bp, Homo sapiens
tgcatgctactgggg

SEQ ID NO: 707469 - DNA, 15 bp, Homo sapiens
gcatgctactgggga

SEQ ID NO: 707470 - DNA, 15 bp, Homo sapiens
catgctactggggag

SEQ ID NO: 707471 - DNA, 15 bp, Homo sapiens
atgctactggggagg

SEQ ID NO: 707472 - DNA, 15 bp, Homo sapiens
tgctactggggaggt

SEQ ID NO: 707473 - DNA, 15 bp, Homo sapiens
gctactggggaggtt

SEQ ID NO: 707474 - DNA, 15 bp, Homo sapiens
ctactggggaggttg

SEQ ID NO: 707475 - DNA, 15 bp, Homo sapiens
tactggggaggttga

SEQ ID NO: 707476 - DNA, 15 bp, Homo sapiens
actggggaggttgag

SEQ ID NO: 707477 - DNA, 15 bp, Homo sapiens
ctggggaggttgagg

SEQ ID NO: 707478 - DNA, 15 bp, Homo sapiens
tggggaggttgaggt

SEQ ID NO: 707479 - DNA, 15 bp, Homo sapiens
ggggaggttgaggtg

SEQ ID NO: 707480 - DNA, 15 bp, Homo sapiens
gggaggttgaggtgg

SEQ ID NO: 707481 - DNA, 15 bp, Homo sapiens
ggaggttgaggtggg

SEQ ID NO: 707482 - DNA, 15 bp, Homo sapiens
gaggttgaggtggga

SEQ ID NO: 707483 - DNA, 15 bp, Homo sapiens
aggttgaggtgggag

SEQ ID NO: 707484 - DNA, 15 bp, Homo sapiens
ggttgaggtgggagg

SEQ ID NO: 707485 - DNA, 15 bp, Homo sapiens
gttgaggtgggaggc

SEQ ID NO: 707486 - DNA, 15 bp, Homo sapiens
ttgaggtgggaggcc

SEQ ID NO: 707487 - DNA, 15 bp, Homo sapiens
tgaggtgggaggccc

SEQ ID NO: 707488 - DNA, 15 bp, Homo sapiens
gaggtgggaggccct

SEQ ID NO: 707489 - DNA, 15 bp, Homo sapiens
aggtgggaggccctc

SEQ ID NO: 707490 - DNA, 15 bp, Homo sapiens
ggtgggaggccctct

SEQ ID NO: 707491 - DNA, 15 bp, Homo sapiens
gtgggaggccctctt

SEQ ID NO: 707492 - DNA, 15 bp, Homo sapiens
tgggaggccctcttg

SEQ ID NO: 707493 - DNA, 15 bp, Homo sapiens
gggaggccctcttga

SEQ ID NO: 707494 - DNA, 15 bp, Homo sapiens
ggaggccctcttgac

SEQ ID NO: 707495 - DNA, 15 bp, Homo sapiens
gaggccctcttgacc

SEQ ID NO: 707496 - DNA, 15 bp, Homo sapiens
aggccctcttgaccc

SEQ ID NO: 707497 - DNA, 15 bp, Homo sapiens
ggccctcttgacccc

SEQ ID NO: 707498 - DNA, 15 bp, Homo sapiens
gccctcttgacccca

SEQ ID NO: 707499 - DNA, 15 bp, Homo sapiens
ccctcttgaccccag

SEQ ID NO: 707500 - DNA, 15 bp, Homo sapiens
cctcttgaccccagg

SEQ ID NO: 707501 - DNA, 15 bp, Homo sapiens
ctcttgaccccaggt

SEQ ID NO: 707502 - DNA, 15 bp, Homo sapiens
tcttgaccccaggtg

SEQ ID NO: 707503 - DNA, 15 bp, Homo sapiens
cttgaccccaggtgg

SEQ ID NO: 707504 - DNA, 15 bp, Homo sapiens
ttgaccccaggtggc

SEQ ID NO: 707505 - DNA, 15 bp, Homo sapiens
tgaccccaggtggct

SEQ ID NO: 707506 - DNA, 15 bp, Homo sapiens
gaccccaggtggctg

SEQ ID NO: 707507 - DNA, 15 bp, Homo sapiens
accccaggtggctga

SEQ ID NO: 707508 - DNA, 15 bp, Homo sapiens
ccccaggtggctgag

SEQ ID NO: 707509 - DNA, 15 bp, Homo sapiens
cccaggtggctgagg

SEQ ID NO: 707510 - DNA, 15 bp, Homo sapiens
ccaggtggctgaggc

SEQ ID NO: 707511 - DNA, 15 bp, Homo sapiens
caggtggctgaggct

SEQ ID NO: 707512 - DNA, 15 bp, Homo sapiens
aggtggctgaggctg

SEQ ID NO: 707513 - DNA, 15 bp, Homo sapiens
ggtggctgaggctgc

SEQ ID NO: 707514 - DNA, 15 bp, Homo sapiens
gtggctgaggctgca

SEQ ID NO: 707515 - DNA, 15 bp, Homo sapiens
tggctgaggctgcag

SEQ ID NO: 707516 - DNA, 15 bp, Homo sapiens
ggctgaggctgcagt

SEQ ID NO: 707517 - DNA, 15 bp, Homo sapiens
gctgaggctgcagtg

SEQ ID NO: 707518 - DNA, 15 bp, Homo sapiens
ctgaggctgcagtga

SEQ ID NO: 707519 - DNA, 15 bp, Homo sapiens
tgaggctgcagtgag

SEQ ID NO: 707520 - DNA, 15 bp, Homo sapiens
gaggctgcagtgagc

SEQ ID NO: 707521 - DNA, 15 bp, Homo sapiens
aggctgcagtgagcc

SEQ ID NO: 707522 - DNA, 15 bp, Homo sapiens
ggctgcagtgagcca

SEQ ID NO: 707523 - DNA, 15 bp, Homo sapiens
gctgcagtgagccat

SEQ ID NO: 707524 - DNA, 15 bp, Homo sapiens
ctgcagtgagccata

SEQ ID NO: 707525 - DNA, 15 bp, Homo sapiens
tgcagtgagccataa

SEQ ID NO: 707526 - DNA, 15 bp, Homo sapiens
gcagtgagccataat

SEQ ID NO: 707527 - DNA, 15 bp, Homo sapiens
cagtgagccataatt

SEQ ID NO: 707528 - DNA, 15 bp, Homo sapiens
agtgagccataattg

SEQ ID NO: 707529 - DNA, 15 bp, Homo sapiens
gtgagccataattgt

SEQ ID NO: 707530 - DNA, 15 bp, Homo sapiens
tgagccataattgtg

SEQ ID NO: 707531 - DNA, 15 bp, Homo sapiens
gagccataattgtgc

SEQ ID NO: 707532 - DNA, 15 bp, Homo sapiens
agccataattgtgcc

SEQ ID NO: 707533 - DNA, 15 bp, Homo sapiens
gccataattgtgcca

SEQ ID NO: 707534 - DNA, 15 bp, Homo sapiens
ccataattgtgccac

SEQ ID NO: 707535 - DNA, 15 bp, Homo sapiens
cataattgtgccact

SEQ ID NO: 707536 - DNA, 15 bp, Homo sapiens
ataattgtgccactg

SEQ ID NO: 707537 - DNA, 15 bp, Homo sapiens
taattgtgccactgc

SEQ ID NO: 707538 - DNA, 15 bp, Homo sapiens
aattgtgccactgca

SEQ ID NO: 707539 - DNA, 15 bp, Homo sapiens
attgtgccactgcac

SEQ ID NO: 707540 - DNA, 15 bp, Homo sapiens
ttgtgccactgcact

SEQ ID NO: 707541 - DNA, 15 bp, Homo sapiens
tgtgccactgcactc

SEQ ID NO: 707542 - DNA, 15 bp, Homo sapiens
gtgccactgcactcc

SEQ ID NO: 707543 - DNA, 15 bp, Homo sapiens
ctgcactccagcctc

SEQ ID NO: 707544 - DNA, 15 bp, Homo sapiens
tgcactccagcctca

SEQ ID NO: 707545 - DNA, 15 bp, Homo sapiens
gcactccagcctcag

SEQ ID NO: 707546 - DNA, 15 bp, Homo sapiens
cactccagcctcagc

SEQ ID NO: 707547 - DNA, 15 bp, Homo sapiens
actccagcctcagca

SEQ ID NO: 707548 - DNA, 15 bp, Homo sapiens
ctccagcctcagcaa

SEQ ID NO: 707549 - DNA, 15 bp, Homo sapiens
tccagcctcagcaaa

SEQ ID NO: 707550 - DNA, 15 bp, Homo sapiens
ccagcctcagcaaaa

SEQ ID NO: 707551 - DNA, 15 bp, Homo sapiens
cagcctcagcaaaag

SEQ ID NO: 707552 - DNA, 15 bp, Homo sapiens
agcctcagcaaaaga

SEQ ID NO: 707553 - DNA, 15 bp, Homo sapiens
gcctcagcaaaagaa

SEQ ID NO: 707554 - DNA, 15 bp, Homo sapiens
cctcagcaaaagaac

SEQ ID NO: 707555 - DNA, 15 bp, Homo sapiens
ctcagcaaaagaact

SEQ ID NO: 707556 - DNA, 15 bp, Homo sapiens
tcagcaaaagaacta

SEQ ID NO: 707557 - DNA, 15 bp, Homo sapiens
cagcaaaagaactaa

SEQ ID NO: 707558 - DNA, 15 bp, Homo sapiens
agcaaaagaactaag

SEQ ID NO: 707559 - DNA, 15 bp, Homo sapiens
gcaaaagaactaaga

SEQ ID NO: 707560 - DNA, 15 bp, Homo sapiens
caaaagaactaagac

SEQ ID NO: 707561 - DNA, 15 bp, Homo sapiens
aaaagaactaagacc

SEQ ID NO: 707562 - DNA, 15 bp, Homo sapiens
aaagaactaagacct

SEQ ID NO: 707563 - DNA, 15 bp, Homo sapiens
aagaactaagacctt

SEQ ID NO: 707564 - DNA, 15 bp, Homo sapiens
agaactaagaccttg

SEQ ID NO: 707565 - DNA, 15 bp, Homo sapiens
gaactaagaccttgt

SEQ ID NO: 707566 - DNA, 15 bp, Homo sapiens
aactaagaccttgtc

SEQ ID NO: 707567 - DNA, 15 bp, Homo sapiens
actaagaccttgtct

SEQ ID NO: 707568 - DNA, 15 bp, Homo sapiens
ctaagaccttgtctc

SEQ ID NO: 707569 - DNA, 15 bp, Homo sapiens
taagaccttgtctca

SEQ ID NO: 707570 - DNA, 15 bp, Homo sapiens
aagaccttgtctcaa

SEQ ID NO: 707571 - DNA, 15 bp, Homo sapiens
agaccttgtctcaaa

SEQ ID NO: 707572 - DNA, 15 bp, Homo sapiens
gaccttgtctcaaaa

SEQ ID NO: 707573 - DNA, 15 bp, Homo sapiens
accttgtctcaaaaa

SEQ ID NO: 707574 - DNA, 15 bp, Homo sapiens
ccttgtctcaaaaat

SEQ ID NO: 707575 - DNA, 15 bp, Homo sapiens
cttgtctcaaaaata

SEQ ID NO: 707576 - DNA, 15 bp, Homo sapiens
ttgtctcaaaaataa

SEQ ID NO: 707577 - DNA, 15 bp, Homo sapiens
tgtctcaaaaataaa

SEQ ID NO: 707578 - DNA, 15 bp, Homo sapiens
gtctcaaaaataaaa

SEQ ID NO: 707579 - DNA, 15 bp, Homo sapiens
tctcaaaaataaaaa

SEQ ID NO: 707580 - DNA, 15 bp, Homo sapiens
ctcaaaaataaaaat

SEQ ID NO: 707581 - DNA, 15 bp, Homo sapiens
tcaaaaataaaaata

SEQ ID NO: 707582 - DNA, 15 bp, Homo sapiens
caaaaataaaaataa

SEQ ID NO: 707583 - DNA, 15 bp, Homo sapiens
aaaaataaaaataaa

SEQ ID NO: 707584 - DNA, 15 bp, Homo sapiens
aaaataaaaataaag

SEQ ID NO: 707585 - DNA, 15 bp, Homo sapiens
aaataaaaataaagg

SEQ ID NO: 707586 - DNA, 15 bp, Homo sapiens
aataaaaataaaggc

SEQ ID NO: 707587 - DNA, 15 bp, Homo sapiens
ataaaaataaaggcc

SEQ ID NO: 707588 - DNA, 15 bp, Homo sapiens
taaaaataaaggccg

SEQ ID NO: 707589 - DNA, 15 bp, Homo sapiens
aaaaataaaggccgg

SEQ ID NO: 707590 - DNA, 15 bp, Homo sapiens
aaaataaaggccggg

SEQ ID NO: 707591 - DNA, 15 bp, Homo sapiens
aaataaaggccgggc

SEQ ID NO: 707592 - DNA, 15 bp, Homo sapiens
aataaaggccgggca

SEQ ID NO: 707593 - DNA, 15 bp, Homo sapiens
ataaaggccgggcat

SEQ ID NO: 707594 - DNA, 15 bp, Homo sapiens
taaaggccgggcatg

SEQ ID NO: 707595 - DNA, 15 bp, Homo sapiens
aaaggccgggcatgg

SEQ ID NO: 707596 - DNA, 15 bp, Homo sapiens
aaggccgggcatggt

SEQ ID NO: 707597 - DNA, 15 bp, Homo sapiens
aggccgggcatggtg

SEQ ID NO: 707598 - DNA, 15 bp, Homo sapiens
ggccgggcatggtgg

SEQ ID NO: 707599 - DNA, 15 bp, Homo sapiens
gccgggcatggtggc

SEQ ID NO: 707600 - DNA, 15 bp, Homo sapiens
ccgggcatggtggct

SEQ ID NO: 707601 - DNA, 15 bp, Homo sapiens
cgggcatggtggctc

SEQ ID NO: 707602 - DNA, 15 bp, Homo sapiens
gggcatggtggctca

SEQ ID NO: 707603 - DNA, 15 bp, Homo sapiens
ggcatggtggctcac

SEQ ID NO: 707604 - DNA, 15 bp, Homo sapiens
gcatggtggctcacg

SEQ ID NO: 707605 - DNA, 15 bp, Homo sapiens
catggtggctcacgt

SEQ ID NO: 707606 - DNA, 15 bp, Homo sapiens
atggtggctcacgtc

SEQ ID NO: 707607 - DNA, 15 bp, Homo sapiens
tggtggctcacgtct

SEQ ID NO: 707608 - DNA, 15 bp, Homo sapiens
ggtggctcacgtctg

SEQ ID NO: 707609 - DNA, 15 bp, Homo sapiens
gtggctcacgtctgt

SEQ ID NO: 707610 - DNA, 15 bp, Homo sapiens
tggctcacgtctgta

SEQ ID NO: 707611 - DNA, 15 bp, Homo sapiens
ggctcacgtctgtaa

SEQ ID NO: 707612 - DNA, 15 bp, Homo sapiens
gctcacgtctgtaat

SEQ ID NO: 707613 - DNA, 15 bp, Homo sapiens
ctcacgtctgtaatc

SEQ ID NO: 707614 - DNA, 15 bp, Homo sapiens
tcacgtctgtaatcc

SEQ ID NO: 707615 - DNA, 15 bp, Homo sapiens
cacgtctgtaatcct

SEQ ID NO: 707616 - DNA, 15 bp, Homo sapiens
acgtctgtaatccta

SEQ ID NO: 707617 - DNA, 15 bp, Homo sapiens
cgtctgtaatcctag

SEQ ID NO: 707618 - DNA, 15 bp, Homo sapiens
gtctgtaatcctagc

SEQ ID NO: 707619 - DNA, 15 bp, Homo sapiens
tctgtaatcctagca

SEQ ID NO: 707620 - DNA, 15 bp, Homo sapiens
ctgtaatcctagcac

SEQ ID NO: 707621 - DNA, 15 bp, Homo sapiens
tgtaatcctagcact

SEQ ID NO: 707622 - DNA, 15 bp, Homo sapiens
gtaatcctagcactt

SEQ ID NO: 707623 - DNA, 15 bp, Homo sapiens
taatcctagcacttt

SEQ ID NO: 707624 - DNA, 15 bp, Homo sapiens
aatcctagcactttg

SEQ ID NO: 707625 - DNA, 15 bp, Homo sapiens
atcctagcactttgg

SEQ ID NO: 707626 - DNA, 15 bp, Homo sapiens
tcctagcactttggg

SEQ ID NO: 707627 - DNA, 15 bp, Homo sapiens
cctagcactttggga

SEQ ID NO: 707628 - DNA, 15 bp, Homo sapiens
ctagcactttgggag

SEQ ID NO: 707629 - DNA, 15 bp, Homo sapiens
tagcactttgggagg

SEQ ID NO: 707630 - DNA, 15 bp, Homo sapiens
ctttgggaggccaaa

SEQ ID NO: 707631 - DNA, 15 bp, Homo sapiens
tttgggaggccaaag

SEQ ID NO: 707632 - DNA, 15 bp, Homo sapiens
ttgggaggccaaaga

SEQ ID NO: 707633 - DNA, 15 bp, Homo sapiens
tgggaggccaaagag

SEQ ID NO: 707634 - DNA, 15 bp, Homo sapiens
gggaggccaaagagg

SEQ ID NO: 707635 - DNA, 15 bp, Homo sapiens
ggaggccaaagaggg

SEQ ID NO: 707636 - DNA, 15 bp, Homo sapiens
gaggccaaagagggt

SEQ ID NO: 707637 - DNA, 15 bp, Homo sapiens
aggccaaagagggtg

SEQ ID NO: 707638 - DNA, 15 bp, Homo sapiens
ggccaaagagggtgg

SEQ ID NO: 707639 - DNA, 15 bp, Homo sapiens
gccaaagagggtgga

SEQ ID NO: 707640 - DNA, 15 bp, Homo sapiens
ccaaagagggtggat

SEQ ID NO: 707641 - DNA, 15 bp, Homo sapiens
caaagagggtggatc

SEQ ID NO: 707642 - DNA, 15 bp, Homo sapiens
aaagagggtggatca

SEQ ID NO: 707643 - DNA, 15 bp, Homo sapiens
aagagggtggatcac

SEQ ID NO: 707644 - DNA, 15 bp, Homo sapiens
agagggtggatcacc

SEQ ID NO: 707645 - DNA, 15 bp, Homo sapiens
gagggtggatcacct

SEQ ID NO: 707646 - DNA, 15 bp, Homo sapiens
agggtggatcacctg

SEQ ID NO: 707647 - DNA, 15 bp, Homo sapiens
gggtggatcacctga

SEQ ID NO: 707648 - DNA, 15 bp, Homo sapiens
gatcacctgaggtca

SEQ ID NO: 707649 - DNA, 15 bp, Homo sapiens
atcacctgaggtcat

SEQ ID NO: 707650 - DNA, 15 bp, Homo sapiens
tcacctgaggtcatg

SEQ ID NO: 707651 - DNA, 15 bp, Homo sapiens
cacctgaggtcatga

SEQ ID NO: 707652 - DNA, 15 bp, Homo sapiens
acctgaggtcatgag

SEQ ID NO: 707653 - DNA, 15 bp, Homo sapiens
cctgaggtcatgagt

SEQ ID NO: 707654 - DNA, 15 bp, Homo sapiens
ctgaggtcatgagtt

SEQ ID NO: 707655 - DNA, 15 bp, Homo sapiens
tgaggtcatgagttt

SEQ ID NO: 707656 - DNA, 15 bp, Homo sapiens
gaggtcatgagtttg

SEQ ID NO: 707657 - DNA, 15 bp, Homo sapiens
aggtcatgagtttga

SEQ ID NO: 707658 - DNA, 15 bp, Homo sapiens
ggtcatgagtttgag

SEQ ID NO: 707659 - DNA, 15 bp, Homo sapiens
gtcatgagtttgaga

SEQ ID NO: 707660 - DNA, 15 bp, Homo sapiens
tcatgagtttgagac

SEQ ID NO: 707661 - DNA, 15 bp, Homo sapiens
catgagtttgagacc

SEQ ID NO: 707662 - DNA, 15 bp, Homo sapiens
atgagtttgagacca

SEQ ID NO: 707663 - DNA, 15 bp, Homo sapiens
tgagtttgagaccag

SEQ ID NO: 707664 - DNA, 15 bp, Homo sapiens
agaccagcctggcca

SEQ ID NO: 707665 - DNA, 15 bp, Homo sapiens
gaccagcctggccaa

SEQ ID NO: 707666 - DNA, 15 bp, Homo sapiens
accagcctggccaac

SEQ ID NO: 707667 - DNA, 15 bp, Homo sapiens
ccagcctggccaaca

SEQ ID NO: 707668 - DNA, 15 bp, Homo sapiens
cagcctggccaacat

SEQ ID NO: 707669 - DNA, 15 bp, Homo sapiens
agcctggccaacatg

SEQ ID NO: 707670 - DNA, 15 bp, Homo sapiens
gcctggccaacatgg

SEQ ID NO: 707671 - DNA, 15 bp, Homo sapiens
cctggccaacatggc

SEQ ID NO: 707672 - DNA, 15 bp, Homo sapiens
ctggccaacatggcc

SEQ ID NO: 707673 - DNA, 15 bp, Homo sapiens
tggccaacatggcca

SEQ ID NO: 707674 - DNA, 15 bp, Homo sapiens
ggccaacatggccaa

SEQ ID NO: 707675 - DNA, 15 bp, Homo sapiens
gccaacatggccaaa

SEQ ID NO: 707676 - DNA, 15 bp, Homo sapiens
ccaacatggccaaac

SEQ ID NO: 707677 - DNA, 15 bp, Homo sapiens
caacatggccaaacc

SEQ ID NO: 707678 - DNA, 15 bp, Homo sapiens
aacatggccaaaccc

SEQ ID NO: 707679 - DNA, 15 bp, Homo sapiens
acatggccaaacccg

SEQ ID NO: 707680 - DNA, 15 bp, Homo sapiens
catggccaaacccgt

SEQ ID NO: 707681 - DNA, 15 bp, Homo sapiens
atggccaaacccgtc

SEQ ID NO: 707682 - DNA, 15 bp, Homo sapiens
tggccaaacccgtct

SEQ ID NO: 707683 - DNA, 15 bp, Homo sapiens
ggccaaacccgtctc

SEQ ID NO: 707684 - DNA, 15 bp, Homo sapiens
gccaaacccgtctcc

SEQ ID NO: 707685 - DNA, 15 bp, Homo sapiens
ccaaacccgtctcca

SEQ ID NO: 707686 - DNA, 15 bp, Homo sapiens
caaacccgtctccac

SEQ ID NO: 707687 - DNA, 15 bp, Homo sapiens
aaacccgtctccact

SEQ ID NO: 707688 - DNA, 15 bp, Homo sapiens
aacccgtctccacta

SEQ ID NO: 707689 - DNA, 15 bp, Homo sapiens
acccgtctccactaa

SEQ ID NO: 707690 - DNA, 15 bp, Homo sapiens
cccgtctccactaaa

SEQ ID NO: 707691 - DNA, 15 bp, Homo sapiens
ccgtctccactaaaa

SEQ ID NO: 707692 - DNA, 15 bp, Homo sapiens
cgtctccactaaaaa

SEQ ID NO: 707693 - DNA, 15 bp, Homo sapiens
gtctccactaaaaat

SEQ ID NO: 707694 - DNA, 15 bp, Homo sapiens
tctccactaaaaata

SEQ ID NO: 707695 - DNA, 15 bp, Homo sapiens
ctccactaaaaatac

SEQ ID NO: 707696 - DNA, 15 bp, Homo sapiens
tccactaaaaataca

SEQ ID NO: 707697 - DNA, 15 bp, Homo sapiens
ccactaaaaatacaa

SEQ ID NO: 707698 - DNA, 15 bp, Homo sapiens
cactaaaaatacaaa

SEQ ID NO: 707699 - DNA, 15 bp, Homo sapiens
actaaaaatacaaaa

SEQ ID NO: 707700 - DNA, 15 bp, Homo sapiens
taaaaatacaaaaat

SEQ ID NO: 707701 - DNA, 15 bp, Homo sapiens
tacaaaaattagccg

SEQ ID NO: 707702 - DNA, 15 bp, Homo sapiens
acaaaaattagccgg

SEQ ID NO: 707703 - DNA, 15 bp, Homo sapiens
caaaaattagccggg

SEQ ID NO: 707704 - DNA, 15 bp, Homo sapiens
aattagccgggcgtg

SEQ ID NO: 707705 - DNA, 15 bp, Homo sapiens
attagccgggcgtgg

SEQ ID NO: 707706 - DNA, 15 bp, Homo sapiens
ttagccgggcgtggt

SEQ ID NO: 707707 - DNA, 15 bp, Homo sapiens
tagccgggcgtggtg

SEQ ID NO: 707708 - DNA, 15 bp, Homo sapiens
agccgggcgtggtgg

SEQ ID NO: 707709 - DNA, 15 bp, Homo sapiens
gccgggcgtggtggc

SEQ ID NO: 707710 - DNA, 15 bp, Homo sapiens
ccgggcgtggtggcg

SEQ ID NO: 707711 - DNA, 15 bp, Homo sapiens
cgggcgtggtggcgc

SEQ ID NO: 707712 - DNA, 15 bp, Homo sapiens
gggcgtggtggcgca

SEQ ID NO: 707713 - DNA, 15 bp, Homo sapiens
ggcgtggtggcgcat

SEQ ID NO: 707714 - DNA, 15 bp, Homo sapiens
gcgtggtggcgcatg

SEQ ID NO: 707715 - DNA, 15 bp, Homo sapiens
cgtggtggcgcatgc

SEQ ID NO: 707716 - DNA, 15 bp, Homo sapiens
gtggtggcgcatgcc

SEQ ID NO: 707717 - DNA, 15 bp, Homo sapiens
tggtggcgcatgccc

SEQ ID NO: 707718 - DNA, 15 bp, Homo sapiens
ggtggcgcatgccca

SEQ ID NO: 707719 - DNA, 15 bp, Homo sapiens
gtggcgcatgcccat

SEQ ID NO: 707720 - DNA, 15 bp, Homo sapiens
tggcgcatgcccata

SEQ ID NO: 707721 - DNA, 15 bp, Homo sapiens
ggcgcatgcccataa

SEQ ID NO: 707722 - DNA, 15 bp, Homo sapiens
gcgcatgcccataat

SEQ ID NO: 707723 - DNA, 15 bp, Homo sapiens
cgcatgcccataatc

SEQ ID NO: 707724 - DNA, 15 bp, Homo sapiens
gcatgcccataatcc

SEQ ID NO: 707725 - DNA, 15 bp, Homo sapiens
catgcccataatccc

SEQ ID NO: 707726 - DNA, 15 bp, Homo sapiens
atgcccataatccca

SEQ ID NO: 707727 - DNA, 15 bp, Homo sapiens
tgcccataatcccag

SEQ ID NO: 707728 - DNA, 15 bp, Homo sapiens
gcccataatcccagc

SEQ ID NO: 707729 - DNA, 15 bp, Homo sapiens
cccataatcccagct

SEQ ID NO: 707730 - DNA, 15 bp, Homo sapiens
ccataatcccagcta

SEQ ID NO: 707731 - DNA, 15 bp, Homo sapiens
cataatcccagctac

SEQ ID NO: 707732 - DNA, 15 bp, Homo sapiens
ataatcccagctact

SEQ ID NO: 707733 - DNA, 15 bp, Homo sapiens
taatcccagctactt

SEQ ID NO: 707734 - DNA, 15 bp, Homo sapiens
aatcccagctacttg

SEQ ID NO: 707735 - DNA, 15 bp, Homo sapiens
atcccagctacttgg

SEQ ID NO: 707736 - DNA, 15 bp, Homo sapiens
tcccagctacttggg

SEQ ID NO: 707737 - DNA, 15 bp, Homo sapiens
cccagctacttggga

SEQ ID NO: 707738 - DNA, 15 bp, Homo sapiens
ccagctacttgggag

SEQ ID NO: 707739 - DNA, 15 bp, Homo sapiens
cagctacttgggagg

SEQ ID NO: 707740 - DNA, 15 bp, Homo sapiens
agctacttgggaggc

SEQ ID NO: 707741 - DNA, 15 bp, Homo sapiens
gctacttgggaggct

SEQ ID NO: 707742 - DNA, 15 bp, Homo sapiens
ctacttgggaggctg

SEQ ID NO: 707743 - DNA, 15 bp, Homo sapiens
tacttgggaggctga

SEQ ID NO: 707744 - DNA, 15 bp, Homo sapiens
acttgggaggctgag

SEQ ID NO: 707745 - DNA, 15 bp, Homo sapiens
cttgggaggctgagg

SEQ ID NO: 707746 - DNA, 15 bp, Homo sapiens
ttgggaggctgaggc

SEQ ID NO: 707747 - DNA, 15 bp, Homo sapiens
tgaggcaggagaatt

SEQ ID NO: 707748 - DNA, 15 bp, Homo sapiens
gaggcaggagaattg

SEQ ID NO: 707749 - DNA, 15 bp, Homo sapiens
aggcaggagaattgc

SEQ ID NO: 707750 - DNA, 15 bp, Homo sapiens
ggcaggagaattgct

SEQ ID NO: 707751 - DNA, 15 bp, Homo sapiens
gcaggagaattgctt

SEQ ID NO: 707752 - DNA, 15 bp, Homo sapiens
caggagaattgcttg

SEQ ID NO: 707753 - DNA, 15 bp, Homo sapiens
aggagaattgcttga

SEQ ID NO: 707754 - DNA, 15 bp, Homo sapiens
ggagaattgcttgaa

SEQ ID NO: 707755 - DNA, 15 bp, Homo sapiens
gagaattgcttgaac

SEQ ID NO: 707756 - DNA, 15 bp, Homo sapiens
agaattgcttgaacc

SEQ ID NO: 707757 - DNA, 15 bp, Homo sapiens
gaattgcttgaacct

SEQ ID NO: 707758 - DNA, 15 bp, Homo sapiens
aattgcttgaacctg

SEQ ID NO: 707759 - DNA, 15 bp, Homo sapiens
attgcttgaacctgg

SEQ ID NO: 707760 - DNA, 15 bp, Homo sapiens
ttgcttgaacctggg

SEQ ID NO: 707761 - DNA, 15 bp, Homo sapiens
tgcttgaacctggga

SEQ ID NO: 707762 - DNA, 15 bp, Homo sapiens
gcttgaacctgggag

SEQ ID NO: 707763 - DNA, 15 bp, Homo sapiens
cttgaacctgggagg

SEQ ID NO: 707764 - DNA, 15 bp, Homo sapiens
ttgaacctgggagga

SEQ ID NO: 707765 - DNA, 15 bp, Homo sapiens
tgaacctgggaggag

SEQ ID NO: 707766 - DNA, 15 bp, Homo sapiens
gaacctgggaggagg

SEQ ID NO: 707767 - DNA, 15 bp, Homo sapiens
aacctgggaggagga

SEQ ID NO: 707768 - DNA, 15 bp, Homo sapiens
acctgggaggaggag

SEQ ID NO: 707769 - DNA, 15 bp, Homo sapiens
cctgggaggaggagg

SEQ ID NO: 707770 - DNA, 15 bp, Homo sapiens
ctgggaggaggaggt

SEQ ID NO: 707771 - DNA, 15 bp, Homo sapiens
tgggaggaggaggtt

SEQ ID NO: 707772 - DNA, 15 bp, Homo sapiens
gggaggaggaggttg

SEQ ID NO: 707773 - DNA, 15 bp, Homo sapiens
ggaggaggaggttgc

SEQ ID NO: 707774 - DNA, 15 bp, Homo sapiens
gaggaggaggttgca

SEQ ID NO: 707775 - DNA, 15 bp, Homo sapiens
aggaggaggttgcag

SEQ ID NO: 707776 - DNA, 15 bp, Homo sapiens
ggaggaggttgcagt

SEQ ID NO: 707777 - DNA, 15 bp, Homo sapiens
gaggaggttgcagtg

SEQ ID NO: 707778 - DNA, 15 bp, Homo sapiens
aggaggttgcagtga

SEQ ID NO: 707779 - DNA, 15 bp, Homo sapiens
ggaggttgcagtgag

SEQ ID NO: 707780 - DNA, 15 bp, Homo sapiens
ggttgcagtgagccg

SEQ ID NO: 707781 - DNA, 15 bp, Homo sapiens
gttgcagtgagccga

SEQ ID NO: 707782 - DNA, 15 bp, Homo sapiens
ttgcagtgagccgag

SEQ ID NO: 707783 - DNA, 15 bp, Homo sapiens
tgcagtgagccgaga

SEQ ID NO: 707784 - DNA, 15 bp, Homo sapiens
gcagtgagccgagat

SEQ ID NO: 707785 - DNA, 15 bp, Homo sapiens
cagtgagccgagatc

SEQ ID NO: 707786 - DNA, 15 bp, Homo sapiens
agtgagccgagatca

SEQ ID NO: 707787 - DNA, 15 bp, Homo sapiens
gtgagccgagatcac

SEQ ID NO: 707788 - DNA, 15 bp, Homo sapiens
tgagccgagatcacg

SEQ ID NO: 707789 - DNA, 15 bp, Homo sapiens
gagccgagatcacgc

SEQ ID NO: 707790 - DNA, 15 bp, Homo sapiens
agccgagatcacgcc

SEQ ID NO: 707791 - DNA, 15 bp, Homo sapiens
gccgagatcacgcca

SEQ ID NO: 707792 - DNA, 15 bp, Homo sapiens
ccgagatcacgccac

SEQ ID NO: 707793 - DNA, 15 bp, Homo sapiens
cgagatcacgccact

SEQ ID NO: 707794 - DNA, 15 bp, Homo sapiens
gagatcacgccactg

SEQ ID NO: 707795 - DNA, 15 bp, Homo sapiens
agatcacgccactgt

SEQ ID NO: 707796 - DNA, 15 bp, Homo sapiens
gatcacgccactgta

SEQ ID NO: 707797 - DNA, 15 bp, Homo sapiens
atcacgccactgtac

SEQ ID NO: 707798 - DNA, 15 bp, Homo sapiens
tcacgccactgtact

SEQ ID NO: 707799 - DNA, 15 bp, Homo sapiens
cacgccactgtactc

SEQ ID NO: 707800 - DNA, 15 bp, Homo sapiens
acgccactgtactcc

SEQ ID NO: 707801 - DNA, 15 bp, Homo sapiens
cgccactgtactcca

SEQ ID NO: 707802 - DNA, 15 bp, Homo sapiens
gccactgtactccag

SEQ ID NO: 707803 - DNA, 15 bp, Homo sapiens
ccactgtactccagc

SEQ ID NO: 707804 - DNA, 15 bp, Homo sapiens
cactgtactccagcc

SEQ ID NO: 707805 - DNA, 15 bp, Homo sapiens
actgtactccagcct

SEQ ID NO: 707806 - DNA, 15 bp, Homo sapiens
ctgtactccagcctg

SEQ ID NO: 707807 - DNA, 15 bp, Homo sapiens
tgtactccagcctgg

SEQ ID NO: 707808 - DNA, 15 bp, Homo sapiens
gtactccagcctgga

SEQ ID NO: 707809 - DNA, 15 bp, Homo sapiens
tactccagcctggat

SEQ ID NO: 707810 - DNA, 15 bp, Homo sapiens
actccagcctggatg

SEQ ID NO: 707811 - DNA, 15 bp, Homo sapiens
ctccagcctggatga

SEQ ID NO: 707812 - DNA, 15 bp, Homo sapiens
tccagcctggatgac

SEQ ID NO: 707813 - DNA, 15 bp, Homo sapiens
ccagcctggatgaca

SEQ ID NO: 707814 - DNA, 15 bp, Homo sapiens
cagcctggatgacag

SEQ ID NO: 707815 - DNA, 15 bp, Homo sapiens
agcctggatgacaga

SEQ ID NO: 707816 - DNA, 15 bp, Homo sapiens
gcctggatgacagag

SEQ ID NO: 707817 - DNA, 15 bp, Homo sapiens
cctggatgacagagt

SEQ ID NO: 707818 - DNA, 15 bp, Homo sapiens
ctggatgacagagtg

SEQ ID NO: 707819 - DNA, 15 bp, Homo sapiens
tggatgacagagtga

SEQ ID NO: 707820 - DNA, 15 bp, Homo sapiens
ggatgacagagtgag

SEQ ID NO: 707821 - DNA, 15 bp, Homo sapiens
gatgacagagtgaga

SEQ ID NO: 707822 - DNA, 15 bp, Homo sapiens
atgacagagtgagac

SEQ ID NO: 707823 - DNA, 15 bp, Homo sapiens
tgacagagtgagact

SEQ ID NO: 707824 - DNA, 15 bp, Homo sapiens
gacagagtgagactc

SEQ ID NO: 707825 - DNA, 15 bp, Homo sapiens
acagagtgagactcc

SEQ ID NO: 707826 - DNA, 15 bp, Homo sapiens
cagagtgagactcca

SEQ ID NO: 707827 - DNA, 15 bp, Homo sapiens
agagtgagactccat

SEQ ID NO: 707828 - DNA, 15 bp, Homo sapiens
gagtgagactccatc

SEQ ID NO: 707829 - DNA, 15 bp, Homo sapiens
agtgagactccatct

SEQ ID NO: 707830 - DNA, 15 bp, Homo sapiens
gtgagactccatctc

SEQ ID NO: 707831 - DNA, 15 bp, Homo sapiens
tgagactccatctca

SEQ ID NO: 707832 - DNA, 15 bp, Homo sapiens
gagactccatctcaa

SEQ ID NO: 707833 - DNA, 15 bp, Homo sapiens
agactccatctcaaa

SEQ ID NO: 707834 - DNA, 15 bp, Homo sapiens
gactccatctcaaaa

SEQ ID NO: 707835 - DNA, 15 bp, Homo sapiens
actccatctcaaaaa

SEQ ID NO: 707836 - DNA, 15 bp, Homo sapiens
ctccatctcaaaaaa

SEQ ID NO: 707837 - DNA, 15 bp, Homo sapiens
tccatctcaaaaaaa

SEQ ID NO: 707838 - DNA, 15 bp, Homo sapiens
ccatctcaaaaaaaa

SEQ ID NO: 707839 - DNA, 15 bp, Homo sapiens
catctcaaaaaaaaa

SEQ ID NO: 707840 - DNA, 15 bp, Homo sapiens
atctcaaaaaaaaat

SEQ ID NO: 707841 - DNA, 15 bp, Homo sapiens
tctcaaaaaaaaatt

SEQ ID NO: 707842 - DNA, 15 bp, Homo sapiens
ctcaaaaaaaaatta

SEQ ID NO: 707843 - DNA, 15 bp, Homo sapiens
tcaaaaaaaaattat

SEQ ID NO: 707844 - DNA, 15 bp, Homo sapiens
caaaaaaaaattata

SEQ ID NO: 707845 - DNA, 15 bp, Homo sapiens
aaaaaaaaattataa

SEQ ID NO: 707846 - DNA, 15 bp, Homo sapiens
aaaaaaaattataat

SEQ ID NO: 707847 - DNA, 15 bp, Homo sapiens
aaaaaaattataata

SEQ ID NO: 707848 - DNA, 15 bp, Homo sapiens
aaaaaattataataa

SEQ ID NO: 707849 - DNA, 15 bp, Homo sapiens
aaaaattataataac

SEQ ID NO: 707850 - DNA, 15 bp, Homo sapiens
aaaattataataact

SEQ ID NO: 707851 - DNA, 15 bp, Homo sapiens
aaattataataacta

SEQ ID NO: 707852 - DNA, 15 bp, Homo sapiens
aattataataactaa

SEQ ID NO: 707853 - DNA, 15 bp, Homo sapiens
attataataactaaa

SEQ ID NO: 707854 - DNA, 15 bp, Homo sapiens
ttataataactaaaa

SEQ ID NO: 707855 - DNA, 15 bp, Homo sapiens
tataataactaaaat

SEQ ID NO: 707856 - DNA, 15 bp, Homo sapiens
ataataactaaaata

SEQ ID NO: 707857 - DNA, 15 bp, Homo sapiens
taataactaaaataa

SEQ ID NO: 707858 - DNA, 15 bp, Homo sapiens
aataactaaaataaa

SEQ ID NO: 707859 - DNA, 15 bp, Homo sapiens
ataactaaaataaat

SEQ ID NO: 707860 - DNA, 15 bp, Homo sapiens
taactaaaataaata

SEQ ID NO: 707861 - DNA, 15 bp, Homo sapiens
aactaaaataaataa

SEQ ID NO: 707862 - DNA, 15 bp, Homo sapiens
actaaaataaataaa

SEQ ID NO: 707863 - DNA, 15 bp, Homo sapiens
ctaaaataaataaat

SEQ ID NO: 707864 - DNA, 15 bp, Homo sapiens
taaaataaataaata

SEQ ID NO: 707865 - DNA, 15 bp, Homo sapiens
aaaataaataaataa

SEQ ID NO: 707866 - DNA, 15 bp, Homo sapiens
aaataaataaataaa

SEQ ID NO: 707867 - DNA, 15 bp, Homo sapiens
aataaataaataaag

SEQ ID NO: 707868 - DNA, 15 bp, Homo sapiens
ataaataaataaagc

SEQ ID NO: 707869 - DNA, 15 bp, Homo sapiens
taaataaataaagca

SEQ ID NO: 707870 - DNA, 15 bp, Homo sapiens
aaataaataaagcat

SEQ ID NO: 707871 - DNA, 15 bp, Homo sapiens
aataaataaagcatc

SEQ ID NO: 707872 - DNA, 15 bp, Homo sapiens
ataaataaagcatct

SEQ ID NO: 707873 - DNA, 15 bp, Homo sapiens
taaataaagcatcta

SEQ ID NO: 707874 - DNA, 15 bp, Homo sapiens
aaataaagcatctat

SEQ ID NO: 707875 - DNA, 15 bp, Homo sapiens
aataaagcatctatc

SEQ ID NO: 707876 - DNA, 15 bp, Homo sapiens
ataaagcatctatcc

SEQ ID NO: 707877 - DNA, 15 bp, Homo sapiens
taaagcatctatcct

SEQ ID NO: 707878 - DNA, 15 bp, Homo sapiens
aaagcatctatcctt

SEQ ID NO: 707879 - DNA, 15 bp, Homo sapiens
aagcatctatccttc

SEQ ID NO: 707880 - DNA, 15 bp, Homo sapiens
agcatctatccttca

SEQ ID NO: 707881 - DNA, 15 bp, Homo sapiens
gcatctatccttcag

SEQ ID NO: 707882 - DNA, 15 bp, Homo sapiens
catctatccttcagc

SEQ ID NO: 707883 - DNA, 15 bp, Homo sapiens
atctatccttcagcc

SEQ ID NO: 707884 - DNA, 15 bp, Homo sapiens
tctatccttcagcca

SEQ ID NO: 707885 - DNA, 15 bp, Homo sapiens
ctatccttcagccat

SEQ ID NO: 707886 - DNA, 15 bp, Homo sapiens
tatccttcagccatt

SEQ ID NO: 707887 - DNA, 15 bp, Homo sapiens
atccttcagccattt

SEQ ID NO: 707888 - DNA, 15 bp, Homo sapiens
tccttcagccatttg

SEQ ID NO: 707889 - DNA, 15 bp, Homo sapiens
ccttcagccatttgc

SEQ ID NO: 707890 - DNA, 15 bp, Homo sapiens
cttcagccatttgct

SEQ ID NO: 707891 - DNA, 15 bp, Homo sapiens
ttcagccatttgcta

SEQ ID NO: 707892 - DNA, 15 bp, Homo sapiens
tcagccatttgctaa

SEQ ID NO: 707893 - DNA, 15 bp, Homo sapiens
cagccatttgctaag

SEQ ID NO: 707894 - DNA, 15 bp, Homo sapiens
agccatttgctaagc

SEQ ID NO: 707895 - DNA, 15 bp, Homo sapiens
gccatttgctaagca

SEQ ID NO: 707896 - DNA, 15 bp, Homo sapiens
ccatttgctaagcag

SEQ ID NO: 707897 - DNA, 15 bp, Homo sapiens
catttgctaagcagc

SEQ ID NO: 707898 - DNA, 15 bp, Homo sapiens
atttgctaagcagct

SEQ ID NO: 707899 - DNA, 15 bp, Homo sapiens
tttgctaagcagctg

SEQ ID NO: 707900 - DNA, 15 bp, Homo sapiens
ttgctaagcagctgc

SEQ ID NO: 707901 - DNA, 15 bp, Homo sapiens
tgctaagcagctgct

SEQ ID NO: 707902 - DNA, 15 bp, Homo sapiens
gctaagcagctgctg

SEQ ID NO: 707903 - DNA, 15 bp, Homo sapiens
ctaagcagctgctgt

SEQ ID NO: 707904 - DNA, 15 bp, Homo sapiens
taagcagctgctgta

SEQ ID NO: 707905 - DNA, 15 bp, Homo sapiens
aagcagctgctgtat

SEQ ID NO: 707906 - DNA, 15 bp, Homo sapiens
agcagctgctgtatt

SEQ ID NO: 707907 - DNA, 15 bp, Homo sapiens
gcagctgctgtattc

SEQ ID NO: 707908 - DNA, 15 bp, Homo sapiens
cagctgctgtattcc

SEQ ID NO: 707909 - DNA, 15 bp, Homo sapiens
agctgctgtattcca

SEQ ID NO: 707910 - DNA, 15 bp, Homo sapiens
gctgctgtattccag

SEQ ID NO: 707911 - DNA, 15 bp, Homo sapiens
ctgctgtattccagg

SEQ ID NO: 707912 - DNA, 15 bp, Homo sapiens
tgctgtattccaggc

SEQ ID NO: 707913 - DNA, 15 bp, Homo sapiens
gctgtattccaggca

SEQ ID NO: 707914 - DNA, 15 bp, Homo sapiens
ctgtattccaggcac

SEQ ID NO: 707915 - DNA, 15 bp, Homo sapiens
tgtattccaggcact

SEQ ID NO: 707916 - DNA, 15 bp, Homo sapiens
gtattccaggcactg

SEQ ID NO: 707917 - DNA, 15 bp, Homo sapiens
tattccaggcactgt

SEQ ID NO: 707918 - DNA, 15 bp, Homo sapiens
attccaggcactgta

SEQ ID NO: 707919 - DNA, 15 bp, Homo sapiens
ttccaggcactgtac

SEQ ID NO: 707920 - DNA, 15 bp, Homo sapiens
tccaggcactgtacc

SEQ ID NO: 707921 - DNA, 15 bp, Homo sapiens
ccaggcactgtacca

SEQ ID NO: 707922 - DNA, 15 bp, Homo sapiens
caggcactgtaccag

SEQ ID NO: 707923 - DNA, 15 bp, Homo sapiens
aggcactgtaccagg

SEQ ID NO: 707924 - DNA, 15 bp, Homo sapiens
ggcactgtaccaggt

SEQ ID NO: 707925 - DNA, 15 bp, Homo sapiens
gcactgtaccaggta

SEQ ID NO: 707926 - DNA, 15 bp, Homo sapiens
cactgtaccaggtac

SEQ ID NO: 707927 - DNA, 15 bp, Homo sapiens
actgtaccaggtacc

SEQ ID NO: 707928 - DNA, 15 bp, Homo sapiens
ctgtaccaggtaccg

SEQ ID NO: 707929 - DNA, 15 bp, Homo sapiens
tgtaccaggtaccgg

SEQ ID NO: 707930 - DNA, 15 bp, Homo sapiens
gtaccaggtaccggg

SEQ ID NO: 707931 - DNA, 15 bp, Homo sapiens
taccaggtaccggga

SEQ ID NO: 707932 - DNA, 15 bp, Homo sapiens
accaggtaccgggag

SEQ ID NO: 707933 - DNA, 15 bp, Homo sapiens
ccaggtaccgggagc

SEQ ID NO: 707934 - DNA, 15 bp, Homo sapiens
caggtaccgggagcc

SEQ ID NO: 707935 - DNA, 15 bp, Homo sapiens
aggtaccgggagccc

SEQ ID NO: 707936 - DNA, 15 bp, Homo sapiens
ggtaccgggagccca

SEQ ID NO: 707937 - DNA, 15 bp, Homo sapiens
gtaccgggagcccac

SEQ ID NO: 707938 - DNA, 15 bp, Homo sapiens
taccgggagcccacc

SEQ ID NO: 707939 - DNA, 15 bp, Homo sapiens
accgggagcccacca

SEQ ID NO: 707940 - DNA, 15 bp, Homo sapiens
ccgggagcccaccat

SEQ ID NO: 707941 - DNA, 15 bp, Homo sapiens
cgggagcccaccatg

SEQ ID NO: 707942 - DNA, 15 bp, Homo sapiens
gggagcccaccatgt

SEQ ID NO: 707943 - DNA, 15 bp, Homo sapiens
ggagcccaccatgta

SEQ ID NO: 707944 - DNA, 15 bp, Homo sapiens
gagcccaccatgtac

SEQ ID NO: 707945 - DNA, 15 bp, Homo sapiens
agcccaccatgtaca

SEQ ID NO: 707946 - DNA, 15 bp, Homo sapiens
gcccaccatgtacaa

SEQ ID NO: 707947 - DNA, 15 bp, Homo sapiens
cccaccatgtacaaa

SEQ ID NO: 707948 - DNA, 15 bp, Homo sapiens
ccaccatgtacaaac

SEQ ID NO: 707949 - DNA, 15 bp, Homo sapiens
caccatgtacaaaca

SEQ ID NO: 707950 - DNA, 15 bp, Homo sapiens
accatgtacaaacag

SEQ ID NO: 707951 - DNA, 15 bp, Homo sapiens
ccatgtacaaacagc

SEQ ID NO: 707952 - DNA, 15 bp, Homo sapiens
catgtacaaacagct

SEQ ID NO: 707953 - DNA, 15 bp, Homo sapiens
atgtacaaacagctg

SEQ ID NO: 707954 - DNA, 15 bp, Homo sapiens
tgtacaaacagctga

SEQ ID NO: 707955 - DNA, 15 bp, Homo sapiens
gtacaaacagctgag

SEQ ID NO: 707956 - DNA, 15 bp, Homo sapiens
tacaaacagctgagt

SEQ ID NO: 707957 - DNA, 15 bp, Homo sapiens
acaaacagctgagtc

SEQ ID NO: 707958 - DNA, 15 bp, Homo sapiens
caaacagctgagtct

SEQ ID NO: 707959 - DNA, 15 bp, Homo sapiens
aaacagctgagtcta

SEQ ID NO: 707960 - DNA, 15 bp, Homo sapiens
aacagctgagtctaa

SEQ ID NO: 707961 - DNA, 15 bp, Homo sapiens
acagctgagtctaat

SEQ ID NO: 707962 - DNA, 15 bp, Homo sapiens
cagctgagtctaatg

SEQ ID NO: 707963 - DNA, 15 bp, Homo sapiens
agctgagtctaatgg

SEQ ID NO: 707964 - DNA, 15 bp, Homo sapiens
gctgagtctaatggg

SEQ ID NO: 707965 - DNA, 15 bp, Homo sapiens
ctgagtctaatgggg

SEQ ID NO: 707966 - DNA, 15 bp, Homo sapiens
tgagtctaatggggt

SEQ ID NO: 707967 - DNA, 15 bp, Homo sapiens
gagtctaatggggtg

SEQ ID NO: 707968 - DNA, 15 bp, Homo sapiens
agtctaatggggtgg

SEQ ID NO: 707969 - DNA, 15 bp, Homo sapiens
gtctaatggggtggg

SEQ ID NO: 707970 - DNA, 15 bp, Homo sapiens
tctaatggggtgggc

SEQ ID NO: 707971 - DNA, 15 bp, Homo sapiens
ctaatggggtgggca

SEQ ID NO: 707972 - DNA, 15 bp, Homo sapiens
taatggggtgggcag

SEQ ID NO: 707973 - DNA, 15 bp, Homo sapiens
aatggggtgggcaga

SEQ ID NO: 707974 - DNA, 15 bp, Homo sapiens
atggggtgggcagac

SEQ ID NO: 707975 - DNA, 15 bp, Homo sapiens
tggggtgggcagacg

SEQ ID NO: 707976 - DNA, 15 bp, Homo sapiens
ggggtgggcagacga

SEQ ID NO: 707977 - DNA, 15 bp, Homo sapiens
gggtgggcagacgag

SEQ ID NO: 707978 - DNA, 15 bp, Homo sapiens
ggtgggcagacgagc

SEQ ID NO: 707979 - DNA, 15 bp, Homo sapiens
gtgggcagacgagca

SEQ ID NO: 707980 - DNA, 15 bp, Homo sapiens
tgggcagacgagcaa

SEQ ID NO: 707981 - DNA, 15 bp, Homo sapiens
gggcagacgagcaat

SEQ ID NO: 707982 - DNA, 15 bp, Homo sapiens
ggcagacgagcaatc

SEQ ID NO: 707983 - DNA, 15 bp, Homo sapiens
gcagacgagcaatca

SEQ ID NO: 707984 - DNA, 15 bp, Homo sapiens
cagacgagcaatcac

SEQ ID NO: 707985 - DNA, 15 bp, Homo sapiens
agacgagcaatcaca

SEQ ID NO: 707986 - DNA, 15 bp, Homo sapiens
gacgagcaatcacat

SEQ ID NO: 707987 - DNA, 15 bp, Homo sapiens
acgagcaatcacata

SEQ ID NO: 707988 - DNA, 15 bp, Homo sapiens
cgagcaatcacatac

SEQ ID NO: 707989 - DNA, 15 bp, Homo sapiens
gagcaatcacatact

SEQ ID NO: 707990 - DNA, 15 bp, Homo sapiens
agcaatcacatactt

SEQ ID NO: 707991 - DNA, 15 bp, Homo sapiens
gcaatcacatactta

SEQ ID NO: 707992 - DNA, 15 bp, Homo sapiens
caatcacatacttac

SEQ ID NO: 707993 - DNA, 15 bp, Homo sapiens
aatcacatacttact

SEQ ID NO: 707994 - DNA, 15 bp, Homo sapiens
atcacatacttacta

SEQ ID NO: 707995 - DNA, 15 bp, Homo sapiens
tcacatacttactac

SEQ ID NO: 707996 - DNA, 15 bp, Homo sapiens
cacatacttactaca

SEQ ID NO: 707997 - DNA, 15 bp, Homo sapiens
acatacttactacag

SEQ ID NO: 707998 - DNA, 15 bp, Homo sapiens
catacttactacagc

SEQ ID NO: 707999 - DNA, 15 bp, Homo sapiens
atacttactacagca

SEQ ID NO: 708000 - DNA, 15 bp, Homo sapiens
tacttactacagcat

SEQ ID NO: 708001 - DNA, 15 bp, Homo sapiens
acttactacagcata

SEQ ID NO: 708002 - DNA, 15 bp, Homo sapiens
cttactacagcataa

SEQ ID NO: 708003 - DNA, 15 bp, Homo sapiens
ttactacagcataag

SEQ ID NO: 708004 - DNA, 15 bp, Homo sapiens
tactacagcataagc

SEQ ID NO: 708005 - DNA, 15 bp, Homo sapiens
actacagcataagcg

SEQ ID NO: 708006 - DNA, 15 bp, Homo sapiens
ctacagcataagcga

SEQ ID NO: 708007 - DNA, 15 bp, Homo sapiens
tacagcataagcgat

SEQ ID NO: 708008 - DNA, 15 bp, Homo sapiens
acagcataagcgata

SEQ ID NO: 708009 - DNA, 15 bp, Homo sapiens
cagcataagcgataa

SEQ ID NO: 708010 - DNA, 15 bp, Homo sapiens
agcataagcgataag

SEQ ID NO: 708011 - DNA, 15 bp, Homo sapiens
gcataagcgataaga

SEQ ID NO: 708012 - DNA, 15 bp, Homo sapiens
cataagcgataagac

SEQ ID NO: 708013 - DNA, 15 bp, Homo sapiens
ataagcgataagaca

SEQ ID NO: 708014 - DNA, 15 bp, Homo sapiens
taagcgataagacag

SEQ ID NO: 708015 - DNA, 15 bp, Homo sapiens
aagcgataagacaga

SEQ ID NO: 708016 - DNA, 15 bp, Homo sapiens
agcgataagacagag

SEQ ID NO: 708017 - DNA, 15 bp, Homo sapiens
gcgataagacagaga

SEQ ID NO: 708018 - DNA, 15 bp, Homo sapiens
cgataagacagagag

SEQ ID NO: 708019 - DNA, 15 bp, Homo sapiens
gataagacagagagg

SEQ ID NO: 708020 - DNA, 15 bp, Homo sapiens
ataagacagagaggg

SEQ ID NO: 708021 - DNA, 15 bp, Homo sapiens
taagacagagagggc

SEQ ID NO: 708022 - DNA, 15 bp, Homo sapiens
aagacagagagggct

SEQ ID NO: 708023 - DNA, 15 bp, Homo sapiens
agacagagagggctt

SEQ ID NO: 708024 - DNA, 15 bp, Homo sapiens
gacagagagggcttc

SEQ ID NO: 708025 - DNA, 15 bp, Homo sapiens
acagagagggcttct

SEQ ID NO: 708026 - DNA, 15 bp, Homo sapiens
cagagagggcttctc

SEQ ID NO: 708027 - DNA, 15 bp, Homo sapiens
agagagggcttctct

SEQ ID NO: 708028 - DNA, 15 bp, Homo sapiens
gagagggcttctctc

SEQ ID NO: 708029 - DNA, 15 bp, Homo sapiens
agagggcttctctcc

SEQ ID NO: 708030 - DNA, 15 bp, Homo sapiens
gagggcttctctcca

SEQ ID NO: 708031 - DNA, 15 bp, Homo sapiens
agggcttctctccag

SEQ ID NO: 708032 - DNA, 15 bp, Homo sapiens
gggcttctctccagc

SEQ ID NO: 708033 - DNA, 15 bp, Homo sapiens
ggcttctctccagct

SEQ ID NO: 708034 - DNA, 15 bp, Homo sapiens
gcttctctccagctc

SEQ ID NO: 708035 - DNA, 15 bp, Homo sapiens
cttctctccagctca

SEQ ID NO: 708036 - DNA, 15 bp, Homo sapiens
ttctctccagctcac

SEQ ID NO: 708037 - DNA, 15 bp, Homo sapiens
tctctccagctcacc

SEQ ID NO: 708038 - DNA, 15 bp, Homo sapiens
ctctccagctcacct

SEQ ID NO: 708039 - DNA, 15 bp, Homo sapiens
tctccagctcacctg

SEQ ID NO: 708040 - DNA, 15 bp, Homo sapiens
ctccagctcacctgg

SEQ ID NO: 708041 - DNA, 15 bp, Homo sapiens
tccagctcacctggg

SEQ ID NO: 708042 - DNA, 15 bp, Homo sapiens
ccagctcacctggga

SEQ ID NO: 708043 - DNA, 15 bp, Homo sapiens
cagctcacctgggag

SEQ ID NO: 708044 - DNA, 15 bp, Homo sapiens
agctcacctgggaga

SEQ ID NO: 708045 - DNA, 15 bp, Homo sapiens
gctcacctgggagaa

SEQ ID NO: 708046 - DNA, 15 bp, Homo sapiens
ctcacctgggagaac

SEQ ID NO: 708047 - DNA, 15 bp, Homo sapiens
tcacctgggagaaca

SEQ ID NO: 708048 - DNA, 15 bp, Homo sapiens
cacctgggagaacac

SEQ ID NO: 708049 - DNA, 15 bp, Homo sapiens
acctgggagaacact

SEQ ID NO: 708050 - DNA, 15 bp, Homo sapiens
cctgggagaacactg

SEQ ID NO: 708051 - DNA, 15 bp, Homo sapiens
ctgggagaacactga

SEQ ID NO: 708052 - DNA, 15 bp, Homo sapiens
tgggagaacactgaa

SEQ ID NO: 708053 - DNA, 15 bp, Homo sapiens
gggagaacactgaaa

SEQ ID NO: 708054 - DNA, 15 bp, Homo sapiens
ggagaacactgaaaa

SEQ ID NO: 708055 - DNA, 15 bp, Homo sapiens
gagaacactgaaaat

SEQ ID NO: 708056 - DNA, 15 bp, Homo sapiens
agaacactgaaaatg

SEQ ID NO: 708057 - DNA, 15 bp, Homo sapiens
gaacactgaaaatgt

SEQ ID NO: 708058 - DNA, 15 bp, Homo sapiens
aacactgaaaatgta

SEQ ID NO: 708059 - DNA, 15 bp, Homo sapiens
acactgaaaatgtac

SEQ ID NO: 708060 - DNA, 15 bp, Homo sapiens
cactgaaaatgtacc

SEQ ID NO: 708061 - DNA, 15 bp, Homo sapiens
actgaaaatgtacct

SEQ ID NO: 708062 - DNA, 15 bp, Homo sapiens
ctgaaaatgtacctt

SEQ ID NO: 708063 - DNA, 15 bp, Homo sapiens
tgaaaatgtaccttg

SEQ ID NO: 708064 - DNA, 15 bp, Homo sapiens
gaaaatgtaccttgg

SEQ ID NO: 708065 - DNA, 15 bp, Homo sapiens
aaaatgtaccttggt

SEQ ID NO: 708066 - DNA, 15 bp, Homo sapiens
aaatgtaccttggtt

SEQ ID NO: 708067 - DNA, 15 bp, Homo sapiens
aatgtaccttggttg

SEQ ID NO: 708068 - DNA, 15 bp, Homo sapiens
atgtaccttggttgg

SEQ ID NO: 708069 - DNA, 15 bp, Homo sapiens
tgtaccttggttgga

SEQ ID NO: 708070 - DNA, 15 bp, Homo sapiens
gtaccttggttggac

SEQ ID NO: 708071 - DNA, 15 bp, Homo sapiens
taccttggttggact

SEQ ID NO: 708072 - DNA, 15 bp, Homo sapiens
accttggttggactt

SEQ ID NO: 708073 - DNA, 15 bp, Homo sapiens
ccttggttggacttt

SEQ ID NO: 708074 - DNA, 15 bp, Homo sapiens
cttggttggacttta

SEQ ID NO: 708075 - DNA, 15 bp, Homo sapiens
ttggttggactttag

SEQ ID NO: 708076 - DNA, 15 bp, Homo sapiens
tggttggactttaga

SEQ ID NO: 708077 - DNA, 15 bp, Homo sapiens
ggttggactttagag

SEQ ID NO: 708078 - DNA, 15 bp, Homo sapiens
gttggactttagagc

SEQ ID NO: 708079 - DNA, 15 bp, Homo sapiens
ttggactttagagct

SEQ ID NO: 708080 - DNA, 15 bp, Homo sapiens
tggactttagagctg

SEQ ID NO: 708081 - DNA, 15 bp, Homo sapiens
ggactttagagctgg

SEQ ID NO: 708082 - DNA, 15 bp, Homo sapiens
gactttagagctggg

SEQ ID NO: 708083 - DNA, 15 bp, Homo sapiens
actttagagctgggg

SEQ ID NO: 708084 - DNA, 15 bp, Homo sapiens
ctttagagctgggga

SEQ ID NO: 708085 - DNA, 15 bp, Homo sapiens
tttagagctggggat

SEQ ID NO: 708086 - DNA, 15 bp, Homo sapiens
ttagagctggggatc

SEQ ID NO: 708087 - DNA, 15 bp, Homo sapiens
tagagctggggatca

SEQ ID NO: 708088 - DNA, 15 bp, Homo sapiens
agagctggggatcag

SEQ ID NO: 708089 - DNA, 15 bp, Homo sapiens
gagctggggatcagg

SEQ ID NO: 708090 - DNA, 15 bp, Homo sapiens
agctggggatcaggg

SEQ ID NO: 708091 - DNA, 15 bp, Homo sapiens
gctggggatcaggga

SEQ ID NO: 708092 - DNA, 15 bp, Homo sapiens
ctggggatcagggaa

SEQ ID NO: 708093 - DNA, 15 bp, Homo sapiens
tggggatcagggaag

SEQ ID NO: 708094 - DNA, 15 bp, Homo sapiens
ggggatcagggaagg

SEQ ID NO: 708095 - DNA, 15 bp, Homo sapiens
gggatcagggaaggc

SEQ ID NO: 708096 - DNA, 15 bp, Homo sapiens
ggatcagggaaggct

SEQ ID NO: 708097 - DNA, 15 bp, Homo sapiens
gatcagggaaggctt

SEQ ID NO: 708098 - DNA, 15 bp, Homo sapiens
atcagggaaggcttc

SEQ ID NO: 708099 - DNA, 15 bp, Homo sapiens
tcagggaaggcttcc

SEQ ID NO: 708100 - DNA, 15 bp, Homo sapiens
cagggaaggcttcct

SEQ ID NO: 708101 - DNA, 15 bp, Homo sapiens
agggaaggcttcctg

SEQ ID NO: 708102 - DNA, 15 bp, Homo sapiens
gggaaggcttcctgg

SEQ ID NO: 708103 - DNA, 15 bp, Homo sapiens
ggaaggcttcctgga

SEQ ID NO: 708104 - DNA, 15 bp, Homo sapiens
gaaggcttcctggag

SEQ ID NO: 708105 - DNA, 15 bp, Homo sapiens
aaggcttcctggagg

SEQ ID NO: 708106 - DNA, 15 bp, Homo sapiens
aggcttcctggagga

SEQ ID NO: 708107 - DNA, 15 bp, Homo sapiens
ggcttcctggaggag

SEQ ID NO: 708108 - DNA, 15 bp, Homo sapiens
gcttcctggaggagg

SEQ ID NO: 708109 - DNA, 15 bp, Homo sapiens
cttcctggaggaggt

SEQ ID NO: 708110 - DNA, 15 bp, Homo sapiens
ttcctggaggaggtg

SEQ ID NO: 708111 - DNA, 15 bp, Homo sapiens
tcctggaggaggtgg

SEQ ID NO: 708112 - DNA, 15 bp, Homo sapiens
cctggaggaggtggt

SEQ ID NO: 708113 - DNA, 15 bp, Homo sapiens
ctggaggaggtggtg

SEQ ID NO: 708114 - DNA, 15 bp, Homo sapiens
tggaggaggtggtgt

SEQ ID NO: 708115 - DNA, 15 bp, Homo sapiens
ggaggaggtggtgtt

SEQ ID NO: 708116 - DNA, 15 bp, Homo sapiens
gaggaggtggtgttt

SEQ ID NO: 708117 - DNA, 15 bp, Homo sapiens
aggaggtggtgttta

SEQ ID NO: 708118 - DNA, 15 bp, Homo sapiens
ggaggtggtgtttaa

SEQ ID NO: 708119 - DNA, 15 bp, Homo sapiens
gaggtggtgtttaag

SEQ ID NO: 708120 - DNA, 15 bp, Homo sapiens
aggtggtgtttaagc

SEQ ID NO: 708121 - DNA, 15 bp, Homo sapiens
ggtggtgtttaagct

SEQ ID NO: 708122 - DNA, 15 bp, Homo sapiens
gtggtgtttaagctg

SEQ ID NO: 708123 - DNA, 15 bp, Homo sapiens
tggtgtttaagctga

SEQ ID NO: 708124 - DNA, 15 bp, Homo sapiens
ggtgtttaagctgag

SEQ ID NO: 708125 - DNA, 15 bp, Homo sapiens
gtgtttaagctgagt

SEQ ID NO: 708126 - DNA, 15 bp, Homo sapiens
tgtttaagctgagtc

SEQ ID NO: 708127 - DNA, 15 bp, Homo sapiens
gtttaagctgagtct

SEQ ID NO: 708128 - DNA, 15 bp, Homo sapiens
tttaagctgagtctt

SEQ ID NO: 708129 - DNA, 15 bp, Homo sapiens
ttaagctgagtcttg

SEQ ID NO: 708130 - DNA, 15 bp, Homo sapiens
taagctgagtcttgg

SEQ ID NO: 708131 - DNA, 15 bp, Homo sapiens
aagctgagtcttgga

SEQ ID NO: 708132 - DNA, 15 bp, Homo sapiens
agctgagtcttggaa

SEQ ID NO: 708133 - DNA, 15 bp, Homo sapiens
gctgagtcttggaaa

SEQ ID NO: 708134 - DNA, 15 bp, Homo sapiens
ctgagtcttggaaac

SEQ ID NO: 708135 - DNA, 15 bp, Homo sapiens
tgagtcttggaaacc

SEQ ID NO: 708136 - DNA, 15 bp, Homo sapiens
gagtcttggaaaccg

SEQ ID NO: 708137 - DNA, 15 bp, Homo sapiens
agtcttggaaaccgg

SEQ ID NO: 708138 - DNA, 15 bp, Homo sapiens
gtcttggaaaccgga

SEQ ID NO: 708139 - DNA, 15 bp, Homo sapiens
tcttggaaaccggat

SEQ ID NO: 708140 - DNA, 15 bp, Homo sapiens
cttggaaaccggata

SEQ ID NO: 708141 - DNA, 15 bp, Homo sapiens
ttggaaaccggatag

SEQ ID NO: 708142 - DNA, 15 bp, Homo sapiens
tggaaaccggatagg

SEQ ID NO: 708143 - DNA, 15 bp, Homo sapiens
ggaaaccggatagga

SEQ ID NO: 708144 - DNA, 15 bp, Homo sapiens
gaaaccggataggaa

SEQ ID NO: 708145 - DNA, 15 bp, Homo sapiens
aaaccggataggaat

SEQ ID NO: 708146 - DNA, 15 bp, Homo sapiens
aaccggataggaatg

SEQ ID NO: 708147 - DNA, 15 bp, Homo sapiens
accggataggaatga

SEQ ID NO: 708148 - DNA, 15 bp, Homo sapiens
ccggataggaatgaa

SEQ ID NO: 708149 - DNA, 15 bp, Homo sapiens
cggataggaatgaag

SEQ ID NO: 708150 - DNA, 15 bp, Homo sapiens
ggataggaatgaagc

SEQ ID NO: 708151 - DNA, 15 bp, Homo sapiens
gataggaatgaagca

SEQ ID NO: 708152 - DNA, 15 bp, Homo sapiens
ataggaatgaagcag

SEQ ID NO: 708153 - DNA, 15 bp, Homo sapiens
taggaatgaagcagg

SEQ ID NO: 708154 - DNA, 15 bp, Homo sapiens
aggaatgaagcaggt

SEQ ID NO: 708155 - DNA, 15 bp, Homo sapiens
ggaatgaagcaggta

SEQ ID NO: 708156 - DNA, 15 bp, Homo sapiens
gaatgaagcaggtat

SEQ ID NO: 708157 - DNA, 15 bp, Homo sapiens
aatgaagcaggtatc

SEQ ID NO: 708158 - DNA, 15 bp, Homo sapiens
atgaagcaggtatct

SEQ ID NO: 708159 - DNA, 15 bp, Homo sapiens
tgaagcaggtatctg

SEQ ID NO: 708160 - DNA, 15 bp, Homo sapiens
gaagcaggtatctgt

SEQ ID NO: 708161 - DNA, 15 bp, Homo sapiens
aagcaggtatctgtg

SEQ ID NO: 708162 - DNA, 15 bp, Homo sapiens
agcaggtatctgtga

SEQ ID NO: 708163 - DNA, 15 bp, Homo sapiens
gcaggtatctgtgag

SEQ ID NO: 708164 - DNA, 15 bp, Homo sapiens
caggtatctgtgagt

SEQ ID NO: 708165 - DNA, 15 bp, Homo sapiens
aggtatctgtgagtt

SEQ ID NO: 708166 - DNA, 15 bp, Homo sapiens
ggtatctgtgagttc

SEQ ID NO: 708167 - DNA, 15 bp, Homo sapiens
gtatctgtgagttca

SEQ ID NO: 708168 - DNA, 15 bp, Homo sapiens
tatctgtgagttcaa

SEQ ID NO: 708169 - DNA, 15 bp, Homo sapiens
atctgtgagttcaag

SEQ ID NO: 708170 - DNA, 15 bp, Homo sapiens
tctgtgagttcaagc

SEQ ID NO: 708171 - DNA, 15 bp, Homo sapiens
ctgtgagttcaagct

SEQ ID NO: 708172 - DNA, 15 bp, Homo sapiens
tgtgagttcaagctg

SEQ ID NO: 708173 - DNA, 15 bp, Homo sapiens
gtgagttcaagctgt

SEQ ID NO: 708174 - DNA, 15 bp, Homo sapiens
tgagttcaagctgtt

SEQ ID NO: 708175 - DNA, 15 bp, Homo sapiens
gagttcaagctgttc

SEQ ID NO: 708176 - DNA, 15 bp, Homo sapiens
agttcaagctgttcc

SEQ ID NO: 708177 - DNA, 15 bp, Homo sapiens
gttcaagctgttccc

SEQ ID NO: 708178 - DNA, 15 bp, Homo sapiens
ttcaagctgttccct

SEQ ID NO: 708179 - DNA, 15 bp, Homo sapiens
tcaagctgttccctg

SEQ ID NO: 708180 - DNA, 15 bp, Homo sapiens
caagctgttccctgg

SEQ ID NO: 708181 - DNA, 15 bp, Homo sapiens
aagctgttccctggc

SEQ ID NO: 708182 - DNA, 15 bp, Homo sapiens
agctgttccctggcc

SEQ ID NO: 708183 - DNA, 15 bp, Homo sapiens
gctgttccctggcca

SEQ ID NO: 708184 - DNA, 15 bp, Homo sapiens
ctgttccctggccag

SEQ ID NO: 708185 - DNA, 15 bp, Homo sapiens
tgttccctggccagg

SEQ ID NO: 708186 - DNA, 15 bp, Homo sapiens
gttccctggccagga

SEQ ID NO: 708187 - DNA, 15 bp, Homo sapiens
ttccctggccaggat

SEQ ID NO: 708188 - DNA, 15 bp, Homo sapiens
tccctggccaggatc

SEQ ID NO: 708189 - DNA, 15 bp, Homo sapiens
ccctggccaggatct

SEQ ID NO: 708190 - DNA, 15 bp, Homo sapiens
cctggccaggatctc

SEQ ID NO: 708191 - DNA, 15 bp, Homo sapiens
ctggccaggatctca

SEQ ID NO: 708192 - DNA, 15 bp, Homo sapiens
tggccaggatctcag

SEQ ID NO: 708193 - DNA, 15 bp, Homo sapiens
ggccaggatctcaga

SEQ ID NO: 708194 - DNA, 15 bp, Homo sapiens
gccaggatctcagac

SEQ ID NO: 708195 - DNA, 15 bp, Homo sapiens
ccaggatctcagaca

SEQ ID NO: 708196 - DNA, 15 bp, Homo sapiens
caggatctcagacac

SEQ ID NO: 708197 - DNA, 15 bp, Homo sapiens
aggatctcagacacc

SEQ ID NO: 708198 - DNA, 15 bp, Homo sapiens
ggatctcagacaccc

SEQ ID NO: 708199 - DNA, 15 bp, Homo sapiens
gatctcagacaccct

SEQ ID NO: 708200 - DNA, 15 bp, Homo sapiens
atctcagacaccctc

SEQ ID NO: 708201 - DNA, 15 bp, Homo sapiens
tctcagacaccctcc

SEQ ID NO: 708202 - DNA, 15 bp, Homo sapiens
ctcagacaccctccc

SEQ ID NO: 708203 - DNA, 15 bp, Homo sapiens
tcagacaccctccca

SEQ ID NO: 708204 - DNA, 15 bp, Homo sapiens
cagacaccctcccaa

SEQ ID NO: 708205 - DNA, 15 bp, Homo sapiens
agacaccctcccaag

SEQ ID NO: 708206 - DNA, 15 bp, Homo sapiens
gacaccctcccaagc

SEQ ID NO: 708207 - DNA, 15 bp, Homo sapiens
acaccctcccaagca

SEQ ID NO: 708208 - DNA, 15 bp, Homo sapiens
caccctcccaagcag

SEQ ID NO: 708209 - DNA, 15 bp, Homo sapiens
accctcccaagcagc

SEQ ID NO: 708210 - DNA, 15 bp, Homo sapiens
ccctcccaagcagct

SEQ ID NO: 708211 - DNA, 15 bp, Homo sapiens
cctcccaagcagctc

SEQ ID NO: 708212 - DNA, 15 bp, Homo sapiens
ctcccaagcagctcc

SEQ ID NO: 708213 - DNA, 15 bp, Homo sapiens
tcccaagcagctcca

SEQ ID NO: 708214 - DNA, 15 bp, Homo sapiens
cccaagcagctccag

SEQ ID NO: 708215 - DNA, 15 bp, Homo sapiens
ccaagcagctccagg

SEQ ID NO: 708216 - DNA, 15 bp, Homo sapiens
caagcagctccagga

SEQ ID NO: 708217 - DNA, 15 bp, Homo sapiens
aagcagctccaggag

SEQ ID NO: 708218 - DNA, 15 bp, Homo sapiens
agcagctccaggagc

SEQ ID NO: 708219 - DNA, 15 bp, Homo sapiens
gcagctccaggagcc

SEQ ID NO: 708220 - DNA, 15 bp, Homo sapiens
cagctccaggagcct

SEQ ID NO: 708221 - DNA, 15 bp, Homo sapiens
agctccaggagcctg

SEQ ID NO: 708222 - DNA, 15 bp, Homo sapiens
gctccaggagcctgt

SEQ ID NO: 708223 - DNA, 15 bp, Homo sapiens
ctccaggagcctgtg

SEQ ID NO: 708224 - DNA, 15 bp, Homo sapiens
tccaggagcctgtga

SEQ ID NO: 708225 - DNA, 15 bp, Homo sapiens
ccaggagcctgtgag

SEQ ID NO: 708226 - DNA, 15 bp, Homo sapiens
caggagcctgtgagg

SEQ ID NO: 708227 - DNA, 15 bp, Homo sapiens
aggagcctgtgaggc

SEQ ID NO: 708228 - DNA, 15 bp, Homo sapiens
ggagcctgtgaggcc

SEQ ID NO: 708229 - DNA, 15 bp, Homo sapiens
gagcctgtgaggcca

SEQ ID NO: 708230 - DNA, 15 bp, Homo sapiens
agcctgtgaggccaa

SEQ ID NO: 708231 - DNA, 15 bp, Homo sapiens
gcctgtgaggccaag

SEQ ID NO: 708232 - DNA, 15 bp, Homo sapiens
cctgtgaggccaagg

SEQ ID NO: 708233 - DNA, 15 bp, Homo sapiens
ctgtgaggccaaggg

SEQ ID NO: 708234 - DNA, 15 bp, Homo sapiens
tgtgaggccaagggc

SEQ ID NO: 708235 - DNA, 15 bp, Homo sapiens
gtgaggccaagggca

SEQ ID NO: 708236 - DNA, 15 bp, Homo sapiens
tgaggccaagggcag

SEQ ID NO: 708237 - DNA, 15 bp, Homo sapiens
gaggccaagggcagc

SEQ ID NO: 708238 - DNA, 15 bp, Homo sapiens
aggccaagggcagct

SEQ ID NO: 708239 - DNA, 15 bp, Homo sapiens
ggccaagggcagctc

SEQ ID NO: 708240 - DNA, 15 bp, Homo sapiens
gccaagggcagctct

SEQ ID NO: 708241 - DNA, 15 bp, Homo sapiens
ccaagggcagctctg

SEQ ID NO: 708242 - DNA, 15 bp, Homo sapiens
caagggcagctctga

SEQ ID NO: 708243 - DNA, 15 bp, Homo sapiens
aagggcagctctgac

SEQ ID NO: 708244 - DNA, 15 bp, Homo sapiens
agggcagctctgacc

SEQ ID NO: 708245 - DNA, 15 bp, Homo sapiens
gggcagctctgacca

SEQ ID NO: 708246 - DNA, 15 bp, Homo sapiens
ggcagctctgaccag

SEQ ID NO: 708247 - DNA, 15 bp, Homo sapiens
gcagctctgaccagc

SEQ ID NO: 708248 - DNA, 15 bp, Homo sapiens
cagctctgaccagcc

SEQ ID NO: 708249 - DNA, 15 bp, Homo sapiens
agctctgaccagcca

SEQ ID NO: 708250 - DNA, 15 bp, Homo sapiens
gctctgaccagccat

SEQ ID NO: 708251 - DNA, 15 bp, Homo sapiens
ctctgaccagccatc

SEQ ID NO: 708252 - DNA, 15 bp, Homo sapiens
tctgaccagccatct

SEQ ID NO: 708253 - DNA, 15 bp, Homo sapiens
ctgaccagccatctc

SEQ ID NO: 708254 - DNA, 15 bp, Homo sapiens
tgaccagccatctct

SEQ ID NO: 708255 - DNA, 15 bp, Homo sapiens
gaccagccatctctg

SEQ ID NO: 708256 - DNA, 15 bp, Homo sapiens
accagccatctctgg

SEQ ID NO: 708257 - DNA, 15 bp, Homo sapiens
ccagccatctctggc

SEQ ID NO: 708258 - DNA, 15 bp, Homo sapiens
cagccatctctggcc

SEQ ID NO: 708259 - DNA, 15 bp, Homo sapiens
agccatctctggccc

SEQ ID NO: 708260 - DNA, 15 bp, Homo sapiens
gccatctctggccct

SEQ ID NO: 708261 - DNA, 15 bp, Homo sapiens
ccatctctggccctg

SEQ ID NO: 708262 - DNA, 15 bp, Homo sapiens
catctctggccctgg

SEQ ID NO: 708263 - DNA, 15 bp, Homo sapiens
atctctggccctggg

SEQ ID NO: 708264 - DNA, 15 bp, Homo sapiens
tctctggccctgggc

SEQ ID NO: 708265 - DNA, 15 bp, Homo sapiens
ctctggccctgggca

SEQ ID NO: 708266 - DNA, 15 bp, Homo sapiens
tctggccctgggcag

SEQ ID NO: 708267 - DNA, 15 bp, Homo sapiens
ctggccctgggcagg

SEQ ID NO: 708268 - DNA, 15 bp, Homo sapiens
tggccctgggcaggc

SEQ ID NO: 708269 - DNA, 15 bp, Homo sapiens
ggccctgggcaggcc

SEQ ID NO: 708270 - DNA, 15 bp, Homo sapiens
gccctgggcaggcct

SEQ ID NO: 708271 - DNA, 15 bp, Homo sapiens
ccctgggcaggcctg

SEQ ID NO: 708272 - DNA, 15 bp, Homo sapiens
cctgggcaggcctgc

SEQ ID NO: 708273 - DNA, 15 bp, Homo sapiens
ctgggcaggcctgca

SEQ ID NO: 708274 - DNA, 15 bp, Homo sapiens
tgggcaggcctgcag

SEQ ID NO: 708275 - DNA, 15 bp, Homo sapiens
gggcaggcctgcagg

SEQ ID NO: 708276 - DNA, 15 bp, Homo sapiens
ggcaggcctgcagga

SEQ ID NO: 708277 - DNA, 15 bp, Homo sapiens
gcaggcctgcaggag

SEQ ID NO: 708278 - DNA, 15 bp, Homo sapiens
caggcctgcaggagt

SEQ ID NO: 708279 - DNA, 15 bp, Homo sapiens
aggcctgcaggagtt

SEQ ID NO: 708280 - DNA, 15 bp, Homo sapiens
ggcctgcaggagttg

SEQ ID NO: 708281 - DNA, 15 bp, Homo sapiens
gcctgcaggagttgt

SEQ ID NO: 708282 - DNA, 15 bp, Homo sapiens
cctgcaggagttgtt

SEQ ID NO: 708283 - DNA, 15 bp, Homo sapiens
ctgcaggagttgttc

SEQ ID NO: 708284 - DNA, 15 bp, Homo sapiens
tgcaggagttgttcc

SEQ ID NO: 708285 - DNA, 15 bp, Homo sapiens
gcaggagttgttcca

SEQ ID NO: 708286 - DNA, 15 bp, Homo sapiens
caggagttgttccag

SEQ ID NO: 708287 - DNA, 15 bp, Homo sapiens
aggagttgttccagg

SEQ ID NO: 708288 - DNA, 15 bp, Homo sapiens
ggagttgttccaggc

SEQ ID NO: 708289 - DNA, 15 bp, Homo sapiens
gagttgttccaggcc

SEQ ID NO: 708290 - DNA, 15 bp, Homo sapiens
agttgttccaggccc

SEQ ID NO: 708291 - DNA, 15 bp, Homo sapiens
gttgttccaggcccc

SEQ ID NO: 708292 - DNA, 15 bp, Homo sapiens
ttgttccaggcccca

SEQ ID NO: 708293 - DNA, 15 bp, Homo sapiens
tgttccaggccccag

SEQ ID NO: 708294 - DNA, 15 bp, Homo sapiens
gttccaggccccaga

SEQ ID NO: 708295 - DNA, 15 bp, Homo sapiens
ttccaggccccagac

SEQ ID NO: 708296 - DNA, 15 bp, Homo sapiens
tccaggccccagacc

SEQ ID NO: 708297 - DNA, 15 bp, Homo sapiens
ccaggccccagacct

SEQ ID NO: 708298 - DNA, 15 bp, Homo sapiens
caggccccagacctg

SEQ ID NO: 708299 - DNA, 15 bp, Homo sapiens
aggccccagacctgc

SEQ ID NO: 708300 - DNA, 15 bp, Homo sapiens
ggccccagacctgcg

SEQ ID NO: 708301 - DNA, 15 bp, Homo sapiens
gccccagacctgcgt

SEQ ID NO: 708302 - DNA, 15 bp, Homo sapiens
ccccagacctgcgtg

SEQ ID NO: 708303 - DNA, 15 bp, Homo sapiens
cccagacctgcgtgg

SEQ ID NO: 708304 - DNA, 15 bp, Homo sapiens
ccagacctgcgtggg

SEQ ID NO: 708305 - DNA, 15 bp, Homo sapiens
cagacctgcgtggga

SEQ ID NO: 708306 - DNA, 15 bp, Homo sapiens
agacctgcgtgggat

SEQ ID NO: 708307 - DNA, 15 bp, Homo sapiens
gacctgcgtgggatc

SEQ ID NO: 708308 - DNA, 15 bp, Homo sapiens
acctgcgtgggatct

SEQ ID NO: 708309 - DNA, 15 bp, Homo sapiens
cctgcgtgggatctc

SEQ ID NO: 708310 - DNA, 15 bp, Homo sapiens
ctgcgtgggatctcc

SEQ ID NO: 708311 - DNA, 15 bp, Homo sapiens
tgcgtgggatctccg

SEQ ID NO: 708312 - DNA, 15 bp, Homo sapiens
gcgtgggatctccga

SEQ ID NO: 708313 - DNA, 15 bp, Homo sapiens
cgtgggatctccgag

SEQ ID NO: 708314 - DNA, 15 bp, Homo sapiens
gtgggatctccgagc

SEQ ID NO: 708315 - DNA, 15 bp, Homo sapiens
tgggatctccgagca

SEQ ID NO: 708316 - DNA, 15 bp, Homo sapiens
gggatctccgagcag

SEQ ID NO: 708317 - DNA, 15 bp, Homo sapiens
ggatctccgagcaga

SEQ ID NO: 708318 - DNA, 15 bp, Homo sapiens
gatctccgagcagag

SEQ ID NO: 708319 - DNA, 15 bp, Homo sapiens
atctccgagcagagc

SEQ ID NO: 708320 - DNA, 15 bp, Homo sapiens
tctccgagcagagcc

SEQ ID NO: 708321 - DNA, 15 bp, Homo sapiens
ctccgagcagagcct

SEQ ID NO: 708322 - DNA, 15 bp, Homo sapiens
tccgagcagagcctg

SEQ ID NO: 708323 - DNA, 15 bp, Homo sapiens
ccgagcagagcctgg

SEQ ID NO: 708324 - DNA, 15 bp, Homo sapiens
cgagcagagcctggt

SEQ ID NO: 708325 - DNA, 15 bp, Homo sapiens
gagcagagcctggtg

SEQ ID NO: 708326 - DNA, 15 bp, Homo sapiens
agcagagcctggtgg

SEQ ID NO: 708327 - DNA, 15 bp, Homo sapiens
gcagagcctggtggt

SEQ ID NO: 708328 - DNA, 15 bp, Homo sapiens
cagagcctggtggtg

SEQ ID NO: 708329 - DNA, 15 bp, Homo sapiens
agagcctggtggtgt

SEQ ID NO: 708330 - DNA, 15 bp, Homo sapiens
gagcctggtggtgtc

SEQ ID NO: 708331 - DNA, 15 bp, Homo sapiens
agcctggtggtgtcc

SEQ ID NO: 708332 - DNA, 15 bp, Homo sapiens
gcctggtggtgtccg

SEQ ID NO: 708333 - DNA, 15 bp, Homo sapiens
cctggtggtgtccgg

SEQ ID NO: 708334 - DNA, 15 bp, Homo sapiens
ctggtggtgtccggc

SEQ ID NO: 708335 - DNA, 15 bp, Homo sapiens
tggtggtgtccggcg

SEQ ID NO: 708336 - DNA, 15 bp, Homo sapiens
ggtggtgtccggcgt

SEQ ID NO: 708337 - DNA, 15 bp, Homo sapiens
gtggtgtccggcgtg

SEQ ID NO: 708338 - DNA, 15 bp, Homo sapiens
tggtgtccggcgtgc

SEQ ID NO: 708339 - DNA, 15 bp, Homo sapiens
ggtgtccggcgtgca

SEQ ID NO: 708340 - DNA, 15 bp, Homo sapiens
gtgtccggcgtgcag

SEQ ID NO: 708341 - DNA, 15 bp, Homo sapiens
tgtccggcgtgcagc

SEQ ID NO: 708342 - DNA, 15 bp, Homo sapiens
gtccggcgtgcagca

SEQ ID NO: 708343 - DNA, 15 bp, Homo sapiens
tccggcgtgcagcat

SEQ ID NO: 708344 - DNA, 15 bp, Homo sapiens
ccggcgtgcagcatc

SEQ ID NO: 708345 - DNA, 15 bp, Homo sapiens
cggcgtgcagcatca

SEQ ID NO: 708346 - DNA, 15 bp, Homo sapiens
ggcgtgcagcatcag

SEQ ID NO: 708347 - DNA, 15 bp, Homo sapiens
gcgtgcagcatcagt

SEQ ID NO: 708348 - DNA, 15 bp, Homo sapiens
cgtgcagcatcagtc

SEQ ID NO: 708349 - DNA, 15 bp, Homo sapiens
gtgcagcatcagtcc

SEQ ID NO: 708350 - DNA, 15 bp, Homo sapiens
tgcagcatcagtcca

SEQ ID NO: 708351 - DNA, 15 bp, Homo sapiens
gcagcatcagtccac

SEQ ID NO: 708352 - DNA, 15 bp, Homo sapiens
cagcatcagtccacc

SEQ ID NO: 708353 - DNA, 15 bp, Homo sapiens
agcatcagtccaccc

SEQ ID NO: 708354 - DNA, 15 bp, Homo sapiens
gcatcagtccaccct

SEQ ID NO: 708355 - DNA, 15 bp, Homo sapiens
catcagtccaccctg

SEQ ID NO: 708356 - DNA, 15 bp, Homo sapiens
atcagtccaccctgg

SEQ ID NO: 708357 - DNA, 15 bp, Homo sapiens
tcagtccaccctgga

SEQ ID NO: 708358 - DNA, 15 bp, Homo sapiens
cagtccaccctggag

SEQ ID NO: 708359 - DNA, 15 bp, Homo sapiens
agtccaccctggagc

SEQ ID NO: 708360 - DNA, 15 bp, Homo sapiens
gtccaccctggagct

SEQ ID NO: 708361 - DNA, 15 bp, Homo sapiens
tccaccctggagctc

SEQ ID NO: 708362 - DNA, 15 bp, Homo sapiens
ccaccctggagctca

SEQ ID NO: 708363 - DNA, 15 bp, Homo sapiens
caccctggagctcag

SEQ ID NO: 708364 - DNA, 15 bp, Homo sapiens
accctggagctcagc

SEQ ID NO: 708365 - DNA, 15 bp, Homo sapiens
ccctggagctcagcg

SEQ ID NO: 708366 - DNA, 15 bp, Homo sapiens
cctggagctcagcga

SEQ ID NO: 708367 - DNA, 15 bp, Homo sapiens
ctggagctcagcgag

SEQ ID NO: 708368 - DNA, 15 bp, Homo sapiens
tggagctcagcgagg

SEQ ID NO: 708369 - DNA, 15 bp, Homo sapiens
ggagctcagcgaggt

SEQ ID NO: 708370 - DNA, 15 bp, Homo sapiens
gagctcagcgaggtc

SEQ ID NO: 708371 - DNA, 15 bp, Homo sapiens
agctcagcgaggtcg

SEQ ID NO: 708372 - DNA, 15 bp, Homo sapiens
gctcagcgaggtcgg

SEQ ID NO: 708373 - DNA, 15 bp, Homo sapiens
ctcagcgaggtcggc

SEQ ID NO: 708374 - DNA, 15 bp, Homo sapiens
tcagcgaggtcggcg

SEQ ID NO: 708375 - DNA, 15 bp, Homo sapiens
cagcgaggtcggcgt

SEQ ID NO: 708376 - DNA, 15 bp, Homo sapiens
agcgaggtcggcgtg

SEQ ID NO: 708377 - DNA, 15 bp, Homo sapiens
gcgaggtcggcgtgg

SEQ ID NO: 708378 - DNA, 15 bp, Homo sapiens
cgaggtcggcgtgga

SEQ ID NO: 708379 - DNA, 15 bp, Homo sapiens
gaggtcggcgtggag

SEQ ID NO: 708380 - DNA, 15 bp, Homo sapiens
aggtcggcgtggagg

SEQ ID NO: 708381 - DNA, 15 bp, Homo sapiens
ggtcggcgtggaggc

SEQ ID NO: 708382 - DNA, 15 bp, Homo sapiens
gtcggcgtggaggcg

SEQ ID NO: 708383 - DNA, 15 bp, Homo sapiens
tcggcgtggaggcgg

SEQ ID NO: 708384 - DNA, 15 bp, Homo sapiens
cggcgtggaggcggc

SEQ ID NO: 708385 - DNA, 15 bp, Homo sapiens
ggcgtggaggcggcg

SEQ ID NO: 708386 - DNA, 15 bp, Homo sapiens
gcgtggaggcggcgg

SEQ ID NO: 708387 - DNA, 15 bp, Homo sapiens
cgtggaggcggcggc

SEQ ID NO: 708388 - DNA, 15 bp, Homo sapiens
gtggaggcggcggcg

SEQ ID NO: 708389 - DNA, 15 bp, Homo sapiens
tggaggcggcggcgg

SEQ ID NO: 708390 - DNA, 15 bp, Homo sapiens
ggaggcggcggcggc

SEQ ID NO: 708391 - DNA, 15 bp, Homo sapiens
gaggcggcggcggcc

SEQ ID NO: 708392 - DNA, 15 bp, Homo sapiens
aggcggcggcggcca

SEQ ID NO: 708393 - DNA, 15 bp, Homo sapiens
ggcggcggcggccac

SEQ ID NO: 708394 - DNA, 15 bp, Homo sapiens
gcggcggcggccacc

SEQ ID NO: 708395 - DNA, 15 bp, Homo sapiens
cggcggcggccacca

SEQ ID NO: 708396 - DNA, 15 bp, Homo sapiens
ggcggcggccaccag

SEQ ID NO: 708397 - DNA, 15 bp, Homo sapiens
gcggcggccaccagc

SEQ ID NO: 708398 - DNA, 15 bp, Homo sapiens
cggcggccaccagca

SEQ ID NO: 708399 - DNA, 15 bp, Homo sapiens
ggcggccaccagcat

SEQ ID NO: 708400 - DNA, 15 bp, Homo sapiens
gcggccaccagcatt

SEQ ID NO: 708401 - DNA, 15 bp, Homo sapiens
cggccaccagcattg

SEQ ID NO: 708402 - DNA, 15 bp, Homo sapiens
ggccaccagcattgc

SEQ ID NO: 708403 - DNA, 15 bp, Homo sapiens
gccaccagcattgcc

SEQ ID NO: 708404 - DNA, 15 bp, Homo sapiens
ccaccagcattgcca

SEQ ID NO: 708405 - DNA, 15 bp, Homo sapiens
caccagcattgccat

SEQ ID NO: 708406 - DNA, 15 bp, Homo sapiens
accagcattgccatg

SEQ ID NO: 708407 - DNA, 15 bp, Homo sapiens
ccagcattgccatgt

SEQ ID NO: 708408 - DNA, 15 bp, Homo sapiens
cagcattgccatgtc

SEQ ID NO: 708409 - DNA, 15 bp, Homo sapiens
agcattgccatgtcc

SEQ ID NO: 708410 - DNA, 15 bp, Homo sapiens
gcattgccatgtccc

SEQ ID NO: 708411 - DNA, 15 bp, Homo sapiens
cattgccatgtcccg

SEQ ID NO: 708412 - DNA, 15 bp, Homo sapiens
attgccatgtcccgc

SEQ ID NO: 708413 - DNA, 15 bp, Homo sapiens
ttgccatgtcccgca

SEQ ID NO: 708414 - DNA, 15 bp, Homo sapiens
tgccatgtcccgcat

SEQ ID NO: 708415 - DNA, 15 bp, Homo sapiens
gccatgtcccgcatg

SEQ ID NO: 708416 - DNA, 15 bp, Homo sapiens
ccatgtcccgcatgt

SEQ ID NO: 708417 - DNA, 15 bp, Homo sapiens
catgtcccgcatgtc

SEQ ID NO: 708418 - DNA, 15 bp, Homo sapiens
atgtcccgcatgtcc

SEQ ID NO: 708419 - DNA, 15 bp, Homo sapiens
tgtcccgcatgtccc

SEQ ID NO: 708420 - DNA, 15 bp, Homo sapiens
gtcccgcatgtccct

SEQ ID NO: 708421 - DNA, 15 bp, Homo sapiens
tcccgcatgtccctg

SEQ ID NO: 708422 - DNA, 15 bp, Homo sapiens
cccgcatgtccctgt

SEQ ID NO: 708423 - DNA, 15 bp, Homo sapiens
ccgcatgtccctgtc

SEQ ID NO: 708424 - DNA, 15 bp, Homo sapiens
cgcatgtccctgtcc

SEQ ID NO: 708425 - DNA, 15 bp, Homo sapiens
gcatgtccctgtcct

SEQ ID NO: 708426 - DNA, 15 bp, Homo sapiens
catgtccctgtcctc

SEQ ID NO: 708427 - DNA, 15 bp, Homo sapiens
atgtccctgtcctcc

SEQ ID NO: 708428 - DNA, 15 bp, Homo sapiens
tgtccctgtcctcct

SEQ ID NO: 708429 - DNA, 15 bp, Homo sapiens
gtccctgtcctcctt

SEQ ID NO: 708430 - DNA, 15 bp, Homo sapiens
tccctgtcctccttc

SEQ ID NO: 708431 - DNA, 15 bp, Homo sapiens
ccctgtcctccttca

SEQ ID NO: 708432 - DNA, 15 bp, Homo sapiens
cctgtcctccttcag

SEQ ID NO: 708433 - DNA, 15 bp, Homo sapiens
ctgtcctccttcagc

SEQ ID NO: 708434 - DNA, 15 bp, Homo sapiens
tgtcctccttcagcg

SEQ ID NO: 708435 - DNA, 15 bp, Homo sapiens
gtcctccttcagcgt

SEQ ID NO: 708436 - DNA, 15 bp, Homo sapiens
tcctccttcagcgtg

SEQ ID NO: 708437 - DNA, 15 bp, Homo sapiens
cctccttcagcgtga

SEQ ID NO: 708438 - DNA, 15 bp, Homo sapiens
ctccttcagcgtgaa

SEQ ID NO: 708439 - DNA, 15 bp, Homo sapiens
tccttcagcgtgaac

SEQ ID NO: 708440 - DNA, 15 bp, Homo sapiens
ccttcagcgtgaacc

SEQ ID NO: 708441 - DNA, 15 bp, Homo sapiens
cttcagcgtgaaccg

SEQ ID NO: 708442 - DNA, 15 bp, Homo sapiens
ttcagcgtgaaccgc

SEQ ID NO: 708443 - DNA, 15 bp, Homo sapiens
tcagcgtgaaccgcc

SEQ ID NO: 708444 - DNA, 15 bp, Homo sapiens
cagcgtgaaccgccc

SEQ ID NO: 708445 - DNA, 15 bp, Homo sapiens
agcgtgaaccgcccc

SEQ ID NO: 708446 - DNA, 15 bp, Homo sapiens
gcgtgaaccgcccct

SEQ ID NO: 708447 - DNA, 15 bp, Homo sapiens
cgtgaaccgcccctt

SEQ ID NO: 708448 - DNA, 15 bp, Homo sapiens
gtgaaccgccccttc

SEQ ID NO: 708449 - DNA, 15 bp, Homo sapiens
tgaaccgccccttcc

SEQ ID NO: 708450 - DNA, 15 bp, Homo sapiens
gaaccgccccttcct

SEQ ID NO: 708451 - DNA, 15 bp, Homo sapiens
aaccgccccttcctc

SEQ ID NO: 708452 - DNA, 15 bp, Homo sapiens
accgccccttcctct

SEQ ID NO: 708453 - DNA, 15 bp, Homo sapiens
ccgccccttcctctt

SEQ ID NO: 708454 - DNA, 15 bp, Homo sapiens
cgccccttcctcttc

SEQ ID NO: 708455 - DNA, 15 bp, Homo sapiens
gccccttcctcttct

SEQ ID NO: 708456 - DNA, 15 bp, Homo sapiens
ccccttcctcttctt

SEQ ID NO: 708457 - DNA, 15 bp, Homo sapiens
cccttcctcttcttc

SEQ ID NO: 708458 - DNA, 15 bp, Homo sapiens
ccttcctcttcttca

SEQ ID NO: 708459 - DNA, 15 bp, Homo sapiens
cttcctcttcttcat

SEQ ID NO: 708460 - DNA, 15 bp, Homo sapiens
ttcctcttcttcatc

SEQ ID NO: 708461 - DNA, 15 bp, Homo sapiens
tcctcttcttcatct

SEQ ID NO: 708462 - DNA, 15 bp, Homo sapiens
cctcttcttcatctt

SEQ ID NO: 708463 - DNA, 15 bp, Homo sapiens
ctcttcttcatcttc

SEQ ID NO: 708464 - DNA, 15 bp, Homo sapiens
tcttcttcatcttcg

SEQ ID NO: 708465 - DNA, 15 bp, Homo sapiens
cttcttcatcttcga

SEQ ID NO: 708466 - DNA, 15 bp, Homo sapiens
ttcttcatcttcgag

SEQ ID NO: 708467 - DNA, 15 bp, Homo sapiens
tcttcatcttcgagg

SEQ ID NO: 708468 - DNA, 15 bp, Homo sapiens
cttcatcttcgagga

SEQ ID NO: 708469 - DNA, 15 bp, Homo sapiens
ttcatcttcgaggac

SEQ ID NO: 708470 - DNA, 15 bp, Homo sapiens
tcatcttcgaggaca

SEQ ID NO: 708471 - DNA, 15 bp, Homo sapiens
catcttcgaggacac

SEQ ID NO: 708472 - DNA, 15 bp, Homo sapiens
atcttcgaggacacc

SEQ ID NO: 708473 - DNA, 15 bp, Homo sapiens
tcttcgaggacacca

SEQ ID NO: 708474 - DNA, 15 bp, Homo sapiens
cttcgaggacaccac

SEQ ID NO: 708475 - DNA, 15 bp, Homo sapiens
ttcgaggacaccaca

SEQ ID NO: 708476 - DNA, 15 bp, Homo sapiens
tcgaggacaccacag

SEQ ID NO: 708477 - DNA, 15 bp, Homo sapiens
cgaggacaccacagg

SEQ ID NO: 708478 - DNA, 15 bp, Homo sapiens
gaggacaccacaggc

SEQ ID NO: 708479 - DNA, 15 bp, Homo sapiens
aggacaccacaggcc

SEQ ID NO: 708480 - DNA, 15 bp, Homo sapiens
ggacaccacaggcct

SEQ ID NO: 708481 - DNA, 15 bp, Homo sapiens
gacaccacaggcctt

SEQ ID NO: 708482 - DNA, 15 bp, Homo sapiens
acaccacaggccttc

SEQ ID NO: 708483 - DNA, 15 bp, Homo sapiens
caccacaggccttcc

SEQ ID NO: 708484 - DNA, 15 bp, Homo sapiens
accacaggccttccc

SEQ ID NO: 708485 - DNA, 15 bp, Homo sapiens
ccacaggccttcccc

SEQ ID NO: 708486 - DNA, 15 bp, Homo sapiens
cacaggccttcccct

SEQ ID NO: 708487 - DNA, 15 bp, Homo sapiens
acaggccttcccctc

SEQ ID NO: 708488 - DNA, 15 bp, Homo sapiens
caggccttcccctct

SEQ ID NO: 708489 - DNA, 15 bp, Homo sapiens
aggccttcccctctt

SEQ ID NO: 708490 - DNA, 15 bp, Homo sapiens
ggccttcccctcttc

SEQ ID NO: 708491 - DNA, 15 bp, Homo sapiens
gccttcccctcttcg

SEQ ID NO: 708492 - DNA, 15 bp, Homo sapiens
ccttcccctcttcgt

SEQ ID NO: 708493 - DNA, 15 bp, Homo sapiens
cttcccctcttcgtg

SEQ ID NO: 708494 - DNA, 15 bp, Homo sapiens
ttcccctcttcgtgg

SEQ ID NO: 708495 - DNA, 15 bp, Homo sapiens
tcccctcttcgtggg

SEQ ID NO: 708496 - DNA, 15 bp, Homo sapiens
cccctcttcgtgggc

SEQ ID NO: 708497 - DNA, 15 bp, Homo sapiens
ccctcttcgtgggca

SEQ ID NO: 708498 - DNA, 15 bp, Homo sapiens
cctcttcgtgggcag

SEQ ID NO: 708499 - DNA, 15 bp, Homo sapiens
ctcttcgtgggcagc

SEQ ID NO: 708500 - DNA, 15 bp, Homo sapiens
tcttcgtgggcagcg

SEQ ID NO: 708501 - DNA, 15 bp, Homo sapiens
cttcgtgggcagcgt

SEQ ID NO: 708502 - DNA, 15 bp, Homo sapiens
ttcgtgggcagcgtg

SEQ ID NO: 708503 - DNA, 15 bp, Homo sapiens
tcgtgggcagcgtga

SEQ ID NO: 708504 - DNA, 15 bp, Homo sapiens
cgtgggcagcgtgag

SEQ ID NO: 708505 - DNA, 15 bp, Homo sapiens
gtgggcagcgtgagg

SEQ ID NO: 708506 - DNA, 15 bp, Homo sapiens
tgggcagcgtgagga

SEQ ID NO: 708507 - DNA, 15 bp, Homo sapiens
gggcagcgtgaggaa

SEQ ID NO: 708508 - DNA, 15 bp, Homo sapiens
ggcagcgtgaggaac

SEQ ID NO: 708509 - DNA, 15 bp, Homo sapiens
gcagcgtgaggaacc

SEQ ID NO: 708510 - DNA, 15 bp, Homo sapiens
cagcgtgaggaaccc

SEQ ID NO: 708511 - DNA, 15 bp, Homo sapiens
agcgtgaggaacccc

SEQ ID NO: 708512 - DNA, 15 bp, Homo sapiens
gcgtgaggaacccca

SEQ ID NO: 708513 - DNA, 15 bp, Homo sapiens
cgtgaggaaccccaa

SEQ ID NO: 708514 - DNA, 15 bp, Homo sapiens
gtgaggaaccccaac

SEQ ID NO: 708515 - DNA, 15 bp, Homo sapiens
tgaggaaccccaacc

SEQ ID NO: 708516 - DNA, 15 bp, Homo sapiens
gaggaaccccaaccc

SEQ ID NO: 708517 - DNA, 15 bp, Homo sapiens
aggaaccccaacccc

SEQ ID NO: 708518 - DNA, 15 bp, Homo sapiens
ggaaccccaacccca

SEQ ID NO: 708519 - DNA, 15 bp, Homo sapiens
gaaccccaaccccag

SEQ ID NO: 708520 - DNA, 15 bp, Homo sapiens
aaccccaaccccagt

SEQ ID NO: 708521 - DNA, 15 bp, Homo sapiens
accccaaccccagtg

SEQ ID NO: 708522 - DNA, 15 bp, Homo sapiens
ccccaaccccagtgc

SEQ ID NO: 708523 - DNA, 15 bp, Homo sapiens
cccaaccccagtgca

SEQ ID NO: 708524 - DNA, 15 bp, Homo sapiens
ccaaccccagtgcac

SEQ ID NO: 708525 - DNA, 15 bp, Homo sapiens
caaccccagtgcacc

SEQ ID NO: 708526 - DNA, 15 bp, Homo sapiens
aaccccagtgcaccg

SEQ ID NO: 708527 - DNA, 15 bp, Homo sapiens
accccagtgcaccgc

SEQ ID NO: 708528 - DNA, 15 bp, Homo sapiens
ccccagtgcaccgcg

SEQ ID NO: 708529 - DNA, 15 bp, Homo sapiens
cccagtgcaccgcgg

SEQ ID NO: 708530 - DNA, 15 bp, Homo sapiens
ccagtgcaccgcggg

SEQ ID NO: 708531 - DNA, 15 bp, Homo sapiens
cagtgcaccgcggga

SEQ ID NO: 708532 - DNA, 15 bp, Homo sapiens
agtgcaccgcgggag

SEQ ID NO: 708533 - DNA, 15 bp, Homo sapiens
gtgcaccgcgggagc

SEQ ID NO: 708534 - DNA, 15 bp, Homo sapiens
tgcaccgcgggagct

SEQ ID NO: 708535 - DNA, 15 bp, Homo sapiens
gcaccgcgggagctc

SEQ ID NO: 708536 - DNA, 15 bp, Homo sapiens
caccgcgggagctca

SEQ ID NO: 708537 - DNA, 15 bp, Homo sapiens
accgcgggagctcaa

SEQ ID NO: 708538 - DNA, 15 bp, Homo sapiens
ccgcgggagctcaag

SEQ ID NO: 708539 - DNA, 15 bp, Homo sapiens
cgcgggagctcaagg

SEQ ID NO: 708540 - DNA, 15 bp, Homo sapiens
gcgggagctcaagga

SEQ ID NO: 708541 - DNA, 15 bp, Homo sapiens
cgggagctcaaggaa

SEQ ID NO: 708542 - DNA, 15 bp, Homo sapiens
gggagctcaaggaac

SEQ ID NO: 708543 - DNA, 15 bp, Homo sapiens
ggagctcaaggaaca

SEQ ID NO: 708544 - DNA, 15 bp, Homo sapiens
gagctcaaggaacag

SEQ ID NO: 708545 - DNA, 15 bp, Homo sapiens
agctcaaggaacagc

SEQ ID NO: 708546 - DNA, 15 bp, Homo sapiens
gctcaaggaacagca

SEQ ID NO: 708547 - DNA, 15 bp, Homo sapiens
ctcaaggaacagcag

SEQ ID NO: 708548 - DNA, 15 bp, Homo sapiens
tcaaggaacagcagg

SEQ ID NO: 708549 - DNA, 15 bp, Homo sapiens
caaggaacagcagga

SEQ ID NO: 708550 - DNA, 15 bp, Homo sapiens
aaggaacagcaggat

SEQ ID NO: 708551 - DNA, 15 bp, Homo sapiens
aggaacagcaggatt

SEQ ID NO: 708552 - DNA, 15 bp, Homo sapiens
ggaacagcaggattc

SEQ ID NO: 708553 - DNA, 15 bp, Homo sapiens
gaacagcaggattcc

SEQ ID NO: 708554 - DNA, 15 bp, Homo sapiens
aacagcaggattccc

SEQ ID NO: 708555 - DNA, 15 bp, Homo sapiens
acagcaggattcccc

SEQ ID NO: 708556 - DNA, 15 bp, Homo sapiens
cagcaggattccccg

SEQ ID NO: 708557 - DNA, 15 bp, Homo sapiens
agcaggattccccgg

SEQ ID NO: 708558 - DNA, 15 bp, Homo sapiens
gcaggattccccggg

SEQ ID NO: 708559 - DNA, 15 bp, Homo sapiens
caggattccccgggc

SEQ ID NO: 708560 - DNA, 15 bp, Homo sapiens
aggattccccgggca

SEQ ID NO: 708561 - DNA, 15 bp, Homo sapiens
ggattccccgggcaa

SEQ ID NO: 708562 - DNA, 15 bp, Homo sapiens
gattccccgggcaac

SEQ ID NO: 708563 - DNA, 15 bp, Homo sapiens
attccccgggcaaca

SEQ ID NO: 708564 - DNA, 15 bp, Homo sapiens
ttccccgggcaacaa

SEQ ID NO: 708565 - DNA, 15 bp, Homo sapiens
tccccgggcaacaag

SEQ ID NO: 708566 - DNA, 15 bp, Homo sapiens
ccccgggcaacaagg

SEQ ID NO: 708567 - DNA, 15 bp, Homo sapiens
cccgggcaacaagga

SEQ ID NO: 708568 - DNA, 15 bp, Homo sapiens
ccgggcaacaaggac

SEQ ID NO: 708569 - DNA, 15 bp, Homo sapiens
cgggcaacaaggact

SEQ ID NO: 708570 - DNA, 15 bp, Homo sapiens
gggcaacaaggactt

SEQ ID NO: 708571 - DNA, 15 bp, Homo sapiens
ggcaacaaggacttc

SEQ ID NO: 708572 - DNA, 15 bp, Homo sapiens
gcaacaaggacttcc

SEQ ID NO: 708573 - DNA, 15 bp, Homo sapiens
caacaaggacttcct

SEQ ID NO: 708574 - DNA, 15 bp, Homo sapiens
aacaaggacttcctc

SEQ ID NO: 708575 - DNA, 15 bp, Homo sapiens
acaaggacttcctcc

SEQ ID NO: 708576 - DNA, 15 bp, Homo sapiens
caaggacttcctcca

SEQ ID NO: 708577 - DNA, 15 bp, Homo sapiens
aaggacttcctccag

SEQ ID NO: 708578 - DNA, 15 bp, Homo sapiens
aggacttcctccaga

SEQ ID NO: 708579 - DNA, 15 bp, Homo sapiens
ggacttcctccagag

SEQ ID NO: 708580 - DNA, 15 bp, Homo sapiens
gacttcctccagagc

SEQ ID NO: 708581 - DNA, 15 bp, Homo sapiens
acttcctccagagcc

SEQ ID NO: 708582 - DNA, 15 bp, Homo sapiens
cttcctccagagcct

SEQ ID NO: 708583 - DNA, 15 bp, Homo sapiens
ttcctccagagcctg

SEQ ID NO: 708584 - DNA, 15 bp, Homo sapiens
tcctccagagcctga

SEQ ID NO: 708585 - DNA, 15 bp, Homo sapiens
cctccagagcctgaa

SEQ ID NO: 708586 - DNA, 15 bp, Homo sapiens
ctccagagcctgaaa

SEQ ID NO: 708587 - DNA, 15 bp, Homo sapiens
tccagagcctgaaag

SEQ ID NO: 708588 - DNA, 15 bp, Homo sapiens
ccagagcctgaaagg

SEQ ID NO: 708589 - DNA, 15 bp, Homo sapiens
cagagcctgaaaggc

SEQ ID NO: 708590 - DNA, 15 bp, Homo sapiens
agagcctgaaaggct

SEQ ID NO: 708591 - DNA, 15 bp, Homo sapiens
gagcctgaaaggctt

SEQ ID NO: 708592 - DNA, 15 bp, Homo sapiens
agcctgaaaggcttc

SEQ ID NO: 708593 - DNA, 15 bp, Homo sapiens
gcctgaaaggcttcc

SEQ ID NO: 708594 - DNA, 15 bp, Homo sapiens
cctgaaaggcttccc

SEQ ID NO: 708595 - DNA, 15 bp, Homo sapiens
ctgaaaggcttcccc

SEQ ID NO: 708596 - DNA, 15 bp, Homo sapiens
tgaaaggcttccccc

SEQ ID NO: 708597 - DNA, 15 bp, Homo sapiens
gaaaggcttcccccg

SEQ ID NO: 708598 - DNA, 15 bp, Homo sapiens
aaaggcttcccccgc

SEQ ID NO: 708599 - DNA, 15 bp, Homo sapiens
aaggcttcccccgcg

SEQ ID NO: 708600 - DNA, 15 bp, Homo sapiens
aggcttcccccgcgg

SEQ ID NO: 708601 - DNA, 15 bp, Homo sapiens
ggcttcccccgcgga

SEQ ID NO: 708602 - DNA, 15 bp, Homo sapiens
gcttcccccgcggag

SEQ ID NO: 708603 - DNA, 15 bp, Homo sapiens
cttcccccgcggaga

SEQ ID NO: 708604 - DNA, 15 bp, Homo sapiens
ttcccccgcggagac

SEQ ID NO: 708605 - DNA, 15 bp, Homo sapiens
tcccccgcggagaca

SEQ ID NO: 708606 - DNA, 15 bp, Homo sapiens
cccccgcggagacaa

SEQ ID NO: 708607 - DNA, 15 bp, Homo sapiens
ccccgcggagacaag

SEQ ID NO: 708608 - DNA, 15 bp, Homo sapiens
cccgcggagacaagc

SEQ ID NO: 708609 - DNA, 15 bp, Homo sapiens
ccgcggagacaagct

SEQ ID NO: 708610 - DNA, 15 bp, Homo sapiens
cgcggagacaagctt

SEQ ID NO: 708611 - DNA, 15 bp, Homo sapiens
gcggagacaagcttt

SEQ ID NO: 708612 - DNA, 15 bp, Homo sapiens
cggagacaagctttt

SEQ ID NO: 708613 - DNA, 15 bp, Homo sapiens
ggagacaagcttttc

SEQ ID NO: 708614 - DNA, 15 bp, Homo sapiens
gagacaagcttttcg

SEQ ID NO: 708615 - DNA, 15 bp, Homo sapiens
agacaagcttttcgg

SEQ ID NO: 708616 - DNA, 15 bp, Homo sapiens
gacaagcttttcggc

SEQ ID NO: 708617 - DNA, 15 bp, Homo sapiens
acaagcttttcggcc

SEQ ID NO: 708618 - DNA, 15 bp, Homo sapiens
caagcttttcggccc

SEQ ID NO: 708619 - DNA, 15 bp, Homo sapiens
aagcttttcggccct

SEQ ID NO: 708620 - DNA, 15 bp, Homo sapiens
agcttttcggccctg

SEQ ID NO: 708621 - DNA, 15 bp, Homo sapiens
gcttttcggccctga

SEQ ID NO: 708622 - DNA, 15 bp, Homo sapiens
cttttcggccctgac

SEQ ID NO: 708623 - DNA, 15 bp, Homo sapiens
ttttcggccctgact

SEQ ID NO: 708624 - DNA, 15 bp, Homo sapiens
tttcggccctgactt

SEQ ID NO: 708625 - DNA, 15 bp, Homo sapiens
ttcggccctgactta

SEQ ID NO: 708626 - DNA, 15 bp, Homo sapiens
tcggccctgacttaa

SEQ ID NO: 708627 - DNA, 15 bp, Homo sapiens
cggccctgacttaaa

SEQ ID NO: 708628 - DNA, 15 bp, Homo sapiens
ggccctgacttaaaa

SEQ ID NO: 708629 - DNA, 15 bp, Homo sapiens
gccctgacttaaaac

SEQ ID NO: 708630 - DNA, 15 bp, Homo sapiens
ccctgacttaaaact

SEQ ID NO: 708631 - DNA, 15 bp, Homo sapiens
cctgacttaaaactt

SEQ ID NO: 708632 - DNA, 15 bp, Homo sapiens
ctgacttaaaacttg

SEQ ID NO: 708633 - DNA, 15 bp, Homo sapiens
tgacttaaaacttgt

SEQ ID NO: 708634 - DNA, 15 bp, Homo sapiens
gacttaaaacttgtg

SEQ ID NO: 708635 - DNA, 15 bp, Homo sapiens
acttaaaacttgtgc

SEQ ID NO: 708636 - DNA, 15 bp, Homo sapiens
cttaaaacttgtgcc

SEQ ID NO: 708637 - DNA, 15 bp, Homo sapiens
ttaaaacttgtgccc

SEQ ID NO: 708638 - DNA, 15 bp, Homo sapiens
taaaacttgtgcccc

SEQ ID NO: 708639 - DNA, 15 bp, Homo sapiens
aaaacttgtgccccc

SEQ ID NO: 708640 - DNA, 15 bp, Homo sapiens
aaacttgtgcccccc

SEQ ID NO: 708641 - DNA, 15 bp, Homo sapiens
aacttgtgcccccca

SEQ ID NO: 708642 - DNA, 15 bp, Homo sapiens
acttgtgccccccat

SEQ ID NO: 708643 - DNA, 15 bp, Homo sapiens
cttgtgccccccatg

SEQ ID NO: 708644 - DNA, 15 bp, Homo sapiens
ttgtgccccccatgg

SEQ ID NO: 708645 - DNA, 15 bp, Homo sapiens
tgtgccccccatgga

SEQ ID NO: 708646 - DNA, 15 bp, Homo sapiens
gtgccccccatggag

SEQ ID NO: 708647 - DNA, 15 bp, Homo sapiens
tgccccccatggagg

SEQ ID NO: 708648 - DNA, 15 bp, Homo sapiens
gccccccatggagga

SEQ ID NO: 708649 - DNA, 15 bp, Homo sapiens
ccccccatggaggag

SEQ ID NO: 708650 - DNA, 15 bp, Homo sapiens
cccccatggaggagg

SEQ ID NO: 708651 - DNA, 15 bp, Homo sapiens
ccccatggaggagga

SEQ ID NO: 708652 - DNA, 15 bp, Homo sapiens
cccatggaggaggat

SEQ ID NO: 708653 - DNA, 15 bp, Homo sapiens
ccatggaggaggatt

SEQ ID NO: 708654 - DNA, 15 bp, Homo sapiens
catggaggaggatta

SEQ ID NO: 708655 - DNA, 15 bp, Homo sapiens
atggaggaggattac

SEQ ID NO: 708656 - DNA, 15 bp, Homo sapiens
tggaggaggattacc

SEQ ID NO: 708657 - DNA, 15 bp, Homo sapiens
ggaggaggattaccc

SEQ ID NO: 708658 - DNA, 15 bp, Homo sapiens
gaggaggattacccc

SEQ ID NO: 708659 - DNA, 15 bp, Homo sapiens
aggaggattaccccc

SEQ ID NO: 708660 - DNA, 15 bp, Homo sapiens
ggaggattaccccca

SEQ ID NO: 708661 - DNA, 15 bp, Homo sapiens
gaggattacccccag

SEQ ID NO: 708662 - DNA, 15 bp, Homo sapiens
aggattacccccagt

SEQ ID NO: 708663 - DNA, 15 bp, Homo sapiens
ggattacccccagtt

SEQ ID NO: 708664 - DNA, 15 bp, Homo sapiens
gattacccccagttt

SEQ ID NO: 708665 - DNA, 15 bp, Homo sapiens
attacccccagtttg

SEQ ID NO: 708666 - DNA, 15 bp, Homo sapiens
ttacccccagtttgg

SEQ ID NO: 708667 - DNA, 15 bp, Homo sapiens
tacccccagtttggc

SEQ ID NO: 708668 - DNA, 15 bp, Homo sapiens
acccccagtttggca

SEQ ID NO: 708669 - DNA, 15 bp, Homo sapiens
cccccagtttggcag

SEQ ID NO: 708670 - DNA, 15 bp, Homo sapiens
ccccagtttggcagc

SEQ ID NO: 708671 - DNA, 15 bp, Homo sapiens
cccagtttggcagcc

SEQ ID NO: 708672 - DNA, 15 bp, Homo sapiens
ccagtttggcagccc

SEQ ID NO: 708673 - DNA, 15 bp, Homo sapiens
cagtttggcagcccc

SEQ ID NO: 708674 - DNA, 15 bp, Homo sapiens
agtttggcagcccca

SEQ ID NO: 708675 - DNA, 15 bp, Homo sapiens
gtttggcagccccaa

SEQ ID NO: 708676 - DNA, 15 bp, Homo sapiens
tttggcagccccaag

SEQ ID NO: 708677 - DNA, 15 bp, Homo sapiens
ttggcagccccaagt

SEQ ID NO: 708678 - DNA, 15 bp, Homo sapiens
tggcagccccaagtg

SEQ ID NO: 708679 - DNA, 15 bp, Homo sapiens
ggcagccccaagtga

SEQ ID NO: 708680 - DNA, 15 bp, Homo sapiens
gcagccccaagtgag

SEQ ID NO: 708681 - DNA, 15 bp, Homo sapiens
cagccccaagtgagg

SEQ ID NO: 708682 - DNA, 15 bp, Homo sapiens
agccccaagtgaggg

SEQ ID NO: 708683 - DNA, 15 bp, Homo sapiens
gccccaagtgagggg

SEQ ID NO: 708684 - DNA, 15 bp, Homo sapiens
ccccaagtgaggggc

SEQ ID NO: 708685 - DNA, 15 bp, Homo sapiens
cccaagtgaggggcc

SEQ ID NO: 708686 - DNA, 15 bp, Homo sapiens
ccaagtgaggggccg

SEQ ID NO: 708687 - DNA, 15 bp, Homo sapiens
caagtgaggggccgt

SEQ ID NO: 708688 - DNA, 15 bp, Homo sapiens
aagtgaggggccgtg

SEQ ID NO: 708689 - DNA, 15 bp, Homo sapiens
agtgaggggccgtgg

SEQ ID NO: 708690 - DNA, 15 bp, Homo sapiens
gtgaggggccgtggc

SEQ ID NO: 708691 - DNA, 15 bp, Homo sapiens
tgaggggccgtggct

SEQ ID NO: 708692 - DNA, 15 bp, Homo sapiens
gaggggccgtggctg

SEQ ID NO: 708693 - DNA, 15 bp, Homo sapiens
aggggccgtggctgt

SEQ ID NO: 708694 - DNA, 15 bp, Homo sapiens
ggggccgtggctgtg

SEQ ID NO: 708695 - DNA, 15 bp, Homo sapiens
gggccgtggctgtgg

SEQ ID NO: 708696 - DNA, 15 bp, Homo sapiens
ggccgtggctgtggc

SEQ ID NO: 708697 - DNA, 15 bp, Homo sapiens
gccgtggctgtggca

SEQ ID NO: 708698 - DNA, 15 bp, Homo sapiens
ccgtggctgtggcat

SEQ ID NO: 708699 - DNA, 15 bp, Homo sapiens
cgtggctgtggcatc

SEQ ID NO: 708700 - DNA, 15 bp, Homo sapiens
gtggctgtggcatcc

SEQ ID NO: 708701 - DNA, 15 bp, Homo sapiens
tggctgtggcatcca

SEQ ID NO: 708702 - DNA, 15 bp, Homo sapiens
ggctgtggcatccag

SEQ ID NO: 708703 - DNA, 15 bp, Homo sapiens
gctgtggcatccaga

SEQ ID NO: 708704 - DNA, 15 bp, Homo sapiens
ctgtggcatccagag

SEQ ID NO: 708705 - DNA, 15 bp, Homo sapiens
tgtggcatccagagt

SEQ ID NO: 708706 - DNA, 15 bp, Homo sapiens
gtggcatccagagtc

SEQ ID NO: 708707 - DNA, 15 bp, Homo sapiens
tggcatccagagtcc

SEQ ID NO: 708708 - DNA, 15 bp, Homo sapiens
ggcatccagagtccc

SEQ ID NO: 708709 - DNA, 15 bp, Homo sapiens
gcatccagagtccct

SEQ ID NO: 708710 - DNA, 15 bp, Homo sapiens
catccagagtccctg

SEQ ID NO: 708711 - DNA, 15 bp, Homo sapiens
atccagagtccctgc

SEQ ID NO: 708712 - DNA, 15 bp, Homo sapiens
tccagagtccctgcc

SEQ ID NO: 708713 - DNA, 15 bp, Homo sapiens
ccagagtccctgcct

SEQ ID NO: 708714 - DNA, 15 bp, Homo sapiens
cagagtccctgcctg

SEQ ID NO: 708715 - DNA, 15 bp, Homo sapiens
agagtccctgcctgg

SEQ ID NO: 708716 - DNA, 15 bp, Homo sapiens
gagtccctgcctgga

SEQ ID NO: 708717 - DNA, 15 bp, Homo sapiens
agtccctgcctggac

SEQ ID NO: 708718 - DNA, 15 bp, Homo sapiens
gtccctgcctggacc

SEQ ID NO: 708719 - DNA, 15 bp, Homo sapiens
tccctgcctggacca

SEQ ID NO: 708720 - DNA, 15 bp, Homo sapiens
ccctgcctggaccag

SEQ ID NO: 708721 - DNA, 15 bp, Homo sapiens
cctgcctggaccagc

SEQ ID NO: 708722 - DNA, 15 bp, Homo sapiens
ctgcctggaccagcc

SEQ ID NO: 708723 - DNA, 15 bp, Homo sapiens
tgcctggaccagcct

SEQ ID NO: 708724 - DNA, 15 bp, Homo sapiens
gcctggaccagcctc

SEQ ID NO: 708725 - DNA, 15 bp, Homo sapiens
cctggaccagcctct

SEQ ID NO: 708726 - DNA, 15 bp, Homo sapiens
ctggaccagcctctc

SEQ ID NO: 708727 - DNA, 15 bp, Homo sapiens
tggaccagcctctcc

SEQ ID NO: 708728 - DNA, 15 bp, Homo sapiens
ggaccagcctctcca

SEQ ID NO: 708729 - DNA, 15 bp, Homo sapiens
gaccagcctctccac

SEQ ID NO: 708730 - DNA, 15 bp, Homo sapiens
accagcctctccact

SEQ ID NO: 708731 - DNA, 15 bp, Homo sapiens
ccagcctctccactc

SEQ ID NO: 708732 - DNA, 15 bp, Homo sapiens
cagcctctccactca

SEQ ID NO: 708733 - DNA, 15 bp, Homo sapiens
agcctctccactcat

SEQ ID NO: 708734 - DNA, 15 bp, Homo sapiens
gcctctccactcatg

SEQ ID NO: 708735 - DNA, 15 bp, Homo sapiens
cctctccactcatgt

SEQ ID NO: 708736 - DNA, 15 bp, Homo sapiens
ctctccactcatgtg

SEQ ID NO: 708737 - DNA, 15 bp, Homo sapiens
tctccactcatgtga

SEQ ID NO: 708738 - DNA, 15 bp, Homo sapiens
ctccactcatgtgac

SEQ ID NO: 708739 - DNA, 15 bp, Homo sapiens
tccactcatgtgact

SEQ ID NO: 708740 - DNA, 15 bp, Homo sapiens
ccactcatgtgactc

SEQ ID NO: 708741 - DNA, 15 bp, Homo sapiens
cactcatgtgactct

SEQ ID NO: 708742 - DNA, 15 bp, Homo sapiens
actcatgtgactctt

SEQ ID NO: 708743 - DNA, 15 bp, Homo sapiens
ctcatgtgactcttt

SEQ ID NO: 708744 - DNA, 15 bp, Homo sapiens
tcatgtgactctttc

SEQ ID NO: 708745 - DNA, 15 bp, Homo sapiens
catgtgactctttcc

SEQ ID NO: 708746 - DNA, 15 bp, Homo sapiens
atgtgactctttcca

SEQ ID NO: 708747 - DNA, 15 bp, Homo sapiens
tgtgactctttccaa

SEQ ID NO: 708748 - DNA, 15 bp, Homo sapiens
gtgactctttccaac

SEQ ID NO: 708749 - DNA, 15 bp, Homo sapiens
tgactctttccaacc

SEQ ID NO: 708750 - DNA, 15 bp, Homo sapiens
gactctttccaaccg

SEQ ID NO: 708751 - DNA, 15 bp, Homo sapiens
actctttccaaccgg

SEQ ID NO: 708752 - DNA, 15 bp, Homo sapiens
ctctttccaaccggc

SEQ ID NO: 708753 - DNA, 15 bp, Homo sapiens
tctttccaaccggct

SEQ ID NO: 708754 - DNA, 15 bp, Homo sapiens
ctttccaaccggctt

SEQ ID NO: 708755 - DNA, 15 bp, Homo sapiens
tttccaaccggcttt

SEQ ID NO: 708756 - DNA, 15 bp, Homo sapiens
ttccaaccggctttg

SEQ ID NO: 708757 - DNA, 15 bp, Homo sapiens
tccaaccggctttgt

SEQ ID NO: 708758 - DNA, 15 bp, Homo sapiens
ccaaccggctttgtg

SEQ ID NO: 708759 - DNA, 15 bp, Homo sapiens
caaccggctttgtgg

SEQ ID NO: 708760 - DNA, 15 bp, Homo sapiens
aaccggctttgtggc

SEQ ID NO: 708761 - DNA, 15 bp, Homo sapiens
accggctttgtggca

SEQ ID NO: 708762 - DNA, 15 bp, Homo sapiens
ccggctttgtggcac

SEQ ID NO: 708763 - DNA, 15 bp, Homo sapiens
cggctttgtggcact

SEQ ID NO: 708764 - DNA, 15 bp, Homo sapiens
ggctttgtggcactg

SEQ ID NO: 708765 - DNA, 15 bp, Homo sapiens
gctttgtggcactgg

SEQ ID NO: 708766 - DNA, 15 bp, Homo sapiens
ctttgtggcactggg

SEQ ID NO: 708767 - DNA, 15 bp, Homo sapiens
tttgtggcactgggg

SEQ ID NO: 708768 - DNA, 15 bp, Homo sapiens
ttgtggcactggggc

SEQ ID NO: 708769 - DNA, 15 bp, Homo sapiens
tgtggcactggggca

SEQ ID NO: 708770 - DNA, 15 bp, Homo sapiens
gtggcactggggcag

SEQ ID NO: 708771 - DNA, 15 bp, Homo sapiens
tggcactggggcagg

SEQ ID NO: 708772 - DNA, 15 bp, Homo sapiens
ggcactggggcaggg

SEQ ID NO: 708773 - DNA, 15 bp, Homo sapiens
gcactggggcagggg

SEQ ID NO: 708774 - DNA, 15 bp, Homo sapiens
cactggggcaggggc

SEQ ID NO: 708775 - DNA, 15 bp, Homo sapiens
actggggcaggggcc

SEQ ID NO: 708776 - DNA, 15 bp, Homo sapiens
ctggggcaggggccg

SEQ ID NO: 708777 - DNA, 15 bp, Homo sapiens
tggggcaggggccgg

SEQ ID NO: 708778 - DNA, 15 bp, Homo sapiens
ggggcaggggccggg

SEQ ID NO: 708779 - DNA, 15 bp, Homo sapiens
gggcaggggccgggg

SEQ ID NO: 708780 - DNA, 15 bp, Homo sapiens
ggcaggggccggggg

SEQ ID NO: 708781 - DNA, 15 bp, Homo sapiens
gcaggggccgggggc

SEQ ID NO: 708782 - DNA, 15 bp, Homo sapiens
caggggccgggggca

SEQ ID NO: 708783 - DNA, 15 bp, Homo sapiens
aggggccgggggcag

SEQ ID NO: 708784 - DNA, 15 bp, Homo sapiens
ggggccgggggcagt

SEQ ID NO: 708785 - DNA, 15 bp, Homo sapiens
gggccgggggcagtc

SEQ ID NO: 708786 - DNA, 15 bp, Homo sapiens
ggccgggggcagtct

SEQ ID NO: 708787 - DNA, 15 bp, Homo sapiens
gccgggggcagtctg

SEQ ID NO: 708788 - DNA, 15 bp, Homo sapiens
ccgggggcagtctga

SEQ ID NO: 708789 - DNA, 15 bp, Homo sapiens
cgggggcagtctgag

SEQ ID NO: 708790 - DNA, 15 bp, Homo sapiens
gggggcagtctgaga

SEQ ID NO: 708791 - DNA, 15 bp, Homo sapiens
ggggcagtctgagag

SEQ ID NO: 708792 - DNA, 15 bp, Homo sapiens
gggcagtctgagaga

SEQ ID NO: 708793 - DNA, 15 bp, Homo sapiens
ggcagtctgagagag

SEQ ID NO: 708794 - DNA, 15 bp, Homo sapiens
gcagtctgagagagg

SEQ ID NO: 708795 - DNA, 15 bp, Homo sapiens
cagtctgagagaggc

SEQ ID NO: 708796 - DNA, 15 bp, Homo sapiens
agtctgagagaggcc

SEQ ID NO: 708797 - DNA, 15 bp, Homo sapiens
gtctgagagaggcca

SEQ ID NO: 708798 - DNA, 15 bp, Homo sapiens
tctgagagaggccat

SEQ ID NO: 708799 - DNA, 15 bp, Homo sapiens
ctgagagaggccatt

SEQ ID NO: 708800 - DNA, 15 bp, Homo sapiens
tgagagaggccattc

SEQ ID NO: 708801 - DNA, 15 bp, Homo sapiens
gagagaggccattct

SEQ ID NO: 708802 - DNA, 15 bp, Homo sapiens
agagaggccattctt

SEQ ID NO: 708803 - DNA, 15 bp, Homo sapiens
gagaggccattcttt

SEQ ID NO: 708804 - DNA, 15 bp, Homo sapiens
agaggccattctttc

SEQ ID NO: 708805 - DNA, 15 bp, Homo sapiens
gaggccattctttcc

SEQ ID NO: 708806 - DNA, 15 bp, Homo sapiens
aggccattctttccc

SEQ ID NO: 708807 - DNA, 15 bp, Homo sapiens
ggccattctttccca

SEQ ID NO: 708808 - DNA, 15 bp, Homo sapiens
gccattctttcccaa

SEQ ID NO: 708809 - DNA, 15 bp, Homo sapiens
ccattctttcccaac

SEQ ID NO: 708810 - DNA, 15 bp, Homo sapiens
cattctttcccaaca

SEQ ID NO: 708811 - DNA, 15 bp, Homo sapiens
attctttcccaacac

SEQ ID NO: 708812 - DNA, 15 bp, Homo sapiens
ttctttcccaacacc

SEQ ID NO: 708813 - DNA, 15 bp, Homo sapiens
tctttcccaacacct

SEQ ID NO: 708814 - DNA, 15 bp, Homo sapiens
ctttcccaacacctc

SEQ ID NO: 708815 - DNA, 15 bp, Homo sapiens
tttcccaacacctct

SEQ ID NO: 708816 - DNA, 15 bp, Homo sapiens
ttcccaacacctctt

SEQ ID NO: 708817 - DNA, 15 bp, Homo sapiens
tcccaacacctcttg

SEQ ID NO: 708818 - DNA, 15 bp, Homo sapiens
cccaacacctcttgg

SEQ ID NO: 708819 - DNA, 15 bp, Homo sapiens
ccaacacctcttggg

SEQ ID NO: 708820 - DNA, 15 bp, Homo sapiens
caacacctcttgggg

SEQ ID NO: 708821 - DNA, 15 bp, Homo sapiens
aacacctcttgggga

SEQ ID NO: 708822 - DNA, 15 bp, Homo sapiens
acacctcttggggag

SEQ ID NO: 708823 - DNA, 15 bp, Homo sapiens
cacctcttggggagt

SEQ ID NO: 708824 - DNA, 15 bp, Homo sapiens
acctcttggggagtt

SEQ ID NO: 708825 - DNA, 15 bp, Homo sapiens
cctcttggggagttt

SEQ ID NO: 708826 - DNA, 15 bp, Homo sapiens
ctcttggggagttta

SEQ ID NO: 708827 - DNA, 15 bp, Homo sapiens
tcttggggagtttag

SEQ ID NO: 708828 - DNA, 15 bp, Homo sapiens
cttggggagtttagg

SEQ ID NO: 708829 - DNA, 15 bp, Homo sapiens
ttggggagtttaggg

SEQ ID NO: 708830 - DNA, 15 bp, Homo sapiens
tggggagtttagggt

SEQ ID NO: 708831 - DNA, 15 bp, Homo sapiens
ggggagtttagggtg

SEQ ID NO: 708832 - DNA, 15 bp, Homo sapiens
gggagtttagggtgg

SEQ ID NO: 708833 - DNA, 15 bp, Homo sapiens
ggagtttagggtggg

SEQ ID NO: 708834 - DNA, 15 bp, Homo sapiens
gagtttagggtgggg

SEQ ID NO: 708835 - DNA, 15 bp, Homo sapiens
agtttagggtggggg

SEQ ID NO: 708836 - DNA, 15 bp, Homo sapiens
gtttagggtgggggg

SEQ ID NO: 708837 - DNA, 15 bp, Homo sapiens
tttagggtggggggg

SEQ ID NO: 708838 - DNA, 15 bp, Homo sapiens
ttagggtgggggggg

SEQ ID NO: 708839 - DNA, 15 bp, Homo sapiens
tagggtggggggggg

SEQ ID NO: 708840 - DNA, 15 bp, Homo sapiens
agggtgggggggggg

SEQ ID NO: 708841 - DNA, 15 bp, Homo sapiens
gggtggggggggggc

SEQ ID NO: 708842 - DNA, 15 bp, Homo sapiens
ggtggggggggggcg

SEQ ID NO: 708843 - DNA, 15 bp, Homo sapiens
gtggggggggggcgc

SEQ ID NO: 708844 - DNA, 15 bp, Homo sapiens
tggggggggggcgcg

SEQ ID NO: 708845 - DNA, 15 bp, Homo sapiens
ggggggggggcgcgg

SEQ ID NO: 708846 - DNA, 15 bp, Homo sapiens
gggggggggcgcggc

SEQ ID NO: 708847 - DNA, 15 bp, Homo sapiens
ggggggggcgcggct

SEQ ID NO: 708848 - DNA, 15 bp, Homo sapiens
gggggggcgcggctg

SEQ ID NO: 708849 - DNA, 15 bp, Homo sapiens
ggggggcgcggctgg

SEQ ID NO: 708850 - DNA, 15 bp, Homo sapiens
gggggcgcggctggg

SEQ ID NO: 708851 - DNA, 15 bp, Homo sapiens
ggggcgcggctggga

SEQ ID NO: 708852 - DNA, 15 bp, Homo sapiens
gggcgcggctgggag

SEQ ID NO: 708853 - DNA, 15 bp, Homo sapiens
ggcgcggctgggagg

SEQ ID NO: 708854 - DNA, 15 bp, Homo sapiens
gcgcggctgggagga

SEQ ID NO: 708855 - DNA, 15 bp, Homo sapiens
cgcggctgggaggag

SEQ ID NO: 708856 - DNA, 15 bp, Homo sapiens
gcggctgggaggagg

SEQ ID NO: 708857 - DNA, 15 bp, Homo sapiens
cggctgggaggaggg

SEQ ID NO: 708858 - DNA, 15 bp, Homo sapiens
ggctgggaggagggc

SEQ ID NO: 708859 - DNA, 15 bp, Homo sapiens
gctgggaggagggca

SEQ ID NO: 708860 - DNA, 15 bp, Homo sapiens
ctgggaggagggcag

SEQ ID NO: 708861 - DNA, 15 bp, Homo sapiens
tgggaggagggcagg

SEQ ID NO: 708862 - DNA, 15 bp, Homo sapiens
gggaggagggcaggc

SEQ ID NO: 708863 - DNA, 15 bp, Homo sapiens
ggaggagggcaggca

SEQ ID NO: 708864 - DNA, 15 bp, Homo sapiens
gaggagggcaggcat

SEQ ID NO: 708865 - DNA, 15 bp, Homo sapiens
aggagggcaggcatc

SEQ ID NO: 708866 - DNA, 15 bp, Homo sapiens
ggagggcaggcatcg

SEQ ID NO: 708867 - DNA, 15 bp, Homo sapiens
gagggcaggcatcgg

SEQ ID NO: 708868 - DNA, 15 bp, Homo sapiens
agggcaggcatcggg

SEQ ID NO: 708869 - DNA, 15 bp, Homo sapiens
gggcaggcatcgggg

SEQ ID NO: 708870 - DNA, 15 bp, Homo sapiens
ggcaggcatcgggga

SEQ ID NO: 708871 - DNA, 15 bp, Homo sapiens
gcaggcatcggggag

SEQ ID NO: 708872 - DNA, 15 bp, Homo sapiens
caggcatcggggagc

SEQ ID NO: 708873 - DNA, 15 bp, Homo sapiens
aggcatcggggagcc

SEQ ID NO: 708874 - DNA, 15 bp, Homo sapiens
ggcatcggggagccg

SEQ ID NO: 708875 - DNA, 15 bp, Homo sapiens
gcatcggggagccgg

SEQ ID NO: 708876 - DNA, 15 bp, Homo sapiens
catcggggagccggg

SEQ ID NO: 708877 - DNA, 15 bp, Homo sapiens
atcggggagccggga

SEQ ID NO: 708878 - DNA, 15 bp, Homo sapiens
tcggggagccgggag

SEQ ID NO: 708879 - DNA, 15 bp, Homo sapiens
cggggagccgggagc

SEQ ID NO: 708880 - DNA, 15 bp, Homo sapiens
ggggagccgggagcc

SEQ ID NO: 708881 - DNA, 15 bp, Homo sapiens
gggagccgggagcct

SEQ ID NO: 708882 - DNA, 15 bp, Homo sapiens
ggagccgggagcctg

SEQ ID NO: 708883 - DNA, 15 bp, Homo sapiens
gagccgggagcctga

SEQ ID NO: 708884 - DNA, 15 bp, Homo sapiens
agccgggagcctgac

SEQ ID NO: 708885 - DNA, 15 bp, Homo sapiens
gccgggagcctgacc

SEQ ID NO: 708886 - DNA, 15 bp, Homo sapiens
ccgggagcctgaccc

SEQ ID NO: 708887 - DNA, 15 bp, Homo sapiens
cgggagcctgaccct

SEQ ID NO: 708888 - DNA, 15 bp, Homo sapiens
gggagcctgaccctc

SEQ ID NO: 708889 - DNA, 15 bp, Homo sapiens
ggagcctgaccctca

SEQ ID NO: 708890 - DNA, 15 bp, Homo sapiens
gagcctgaccctcat

SEQ ID NO: 708891 - DNA, 15 bp, Homo sapiens
agcctgaccctcatc

SEQ ID NO: 708892 - DNA, 15 bp, Homo sapiens
gcctgaccctcatct

SEQ ID NO: 708893 - DNA, 15 bp, Homo sapiens
cctgaccctcatctt

SEQ ID NO: 708894 - DNA, 15 bp, Homo sapiens
ctgaccctcatcttt

SEQ ID NO: 708895 - DNA, 15 bp, Homo sapiens
tgaccctcatctttc

SEQ ID NO: 708896 - DNA, 15 bp, Homo sapiens
gaccctcatctttct

SEQ ID NO: 708897 - DNA, 15 bp, Homo sapiens
accctcatctttctt

SEQ ID NO: 708898 - DNA, 15 bp, Homo sapiens
ccctcatctttcttc

SEQ ID NO: 708899 - DNA, 15 bp, Homo sapiens
cctcatctttcttcc

SEQ ID NO: 708900 - DNA, 15 bp, Homo sapiens
ctcatctttcttcca

SEQ ID NO: 708901 - DNA, 15 bp, Homo sapiens
tcatctttcttccaa

SEQ ID NO: 708902 - DNA, 15 bp, Homo sapiens
catctttcttccaaa

SEQ ID NO: 708903 - DNA, 15 bp, Homo sapiens
atctttcttccaaac

SEQ ID NO: 708904 - DNA, 15 bp, Homo sapiens
tctttcttccaaaca

SEQ ID NO: 708905 - DNA, 15 bp, Homo sapiens
ctttcttccaaacag

SEQ ID NO: 708906 - DNA, 15 bp, Homo sapiens
tttcttccaaacagg

SEQ ID NO: 708907 - DNA, 15 bp, Homo sapiens
ttcttccaaacaggc

SEQ ID NO: 708908 - DNA, 15 bp, Homo sapiens
tcttccaaacaggct

SEQ ID NO: 708909 - DNA, 15 bp, Homo sapiens
cttccaaacaggctc

SEQ ID NO: 708910 - DNA, 15 bp, Homo sapiens
ttccaaacaggctca

SEQ ID NO: 708911 - DNA, 15 bp, Homo sapiens
tccaaacaggctcag

SEQ ID NO: 708912 - DNA, 15 bp, Homo sapiens
ccaaacaggctcaga

SEQ ID NO: 708913 - DNA, 15 bp, Homo sapiens
caaacaggctcagag

SEQ ID NO: 708914 - DNA, 15 bp, Homo sapiens
aaacaggctcagagg

SEQ ID NO: 708915 - DNA, 15 bp, Homo sapiens
aacaggctcagaggg

SEQ ID NO: 708916 - DNA, 15 bp, Homo sapiens
acaggctcagagggt

SEQ ID NO: 708917 - DNA, 15 bp, Homo sapiens
caggctcagagggtg

SEQ ID NO: 708918 - DNA, 15 bp, Homo sapiens
aggctcagagggtgt

SEQ ID NO: 708919 - DNA, 15 bp, Homo sapiens
ggctcagagggtgtc

SEQ ID NO: 708920 - DNA, 15 bp, Homo sapiens
gctcagagggtgtcc

SEQ ID NO: 708921 - DNA, 15 bp, Homo sapiens
ctcagagggtgtcct

SEQ ID NO: 708922 - DNA, 15 bp, Homo sapiens
tcagagggtgtcctg

SEQ ID NO: 708923 - DNA, 15 bp, Homo sapiens
cagagggtgtcctgc

SEQ ID NO: 708924 - DNA, 15 bp, Homo sapiens
agagggtgtcctgca

SEQ ID NO: 708925 - DNA, 15 bp, Homo sapiens
gagggtgtcctgcac

SEQ ID NO: 708926 - DNA, 15 bp, Homo sapiens
agggtgtcctgcacc

SEQ ID NO: 708927 - DNA, 15 bp, Homo sapiens
gggtgtcctgcaccg

SEQ ID NO: 708928 - DNA, 15 bp, Homo sapiens
ggtgtcctgcaccgg

SEQ ID NO: 708929 - DNA, 15 bp, Homo sapiens
gtgtcctgcaccggg

SEQ ID NO: 708930 - DNA, 15 bp, Homo sapiens
tgtcctgcaccgggg

SEQ ID NO: 708931 - DNA, 15 bp, Homo sapiens
gtcctgcaccggggc

SEQ ID NO: 708932 - DNA, 15 bp, Homo sapiens
tcctgcaccggggcc

SEQ ID NO: 708933 - DNA, 15 bp, Homo sapiens
cctgcaccggggcct

SEQ ID NO: 708934 - DNA, 15 bp, Homo sapiens
ctgcaccggggcctg

SEQ ID NO: 708935 - DNA, 15 bp, Homo sapiens
tgcaccggggcctgg

SEQ ID NO: 708936 - DNA, 15 bp, Homo sapiens
gcaccggggcctggg

SEQ ID NO: 708937 - DNA, 15 bp, Homo sapiens
caccggggcctgggc

SEQ ID NO: 708938 - DNA, 15 bp, Homo sapiens
accggggcctgggca

SEQ ID NO: 708939 - DNA, 15 bp, Homo sapiens
ccggggcctgggcag

SEQ ID NO: 708940 - DNA, 15 bp, Homo sapiens
cggggcctgggcagg

SEQ ID NO: 708941 - DNA, 15 bp, Homo sapiens
ggggcctgggcagga

SEQ ID NO: 708942 - DNA, 15 bp, Homo sapiens
gggcctgggcaggag

SEQ ID NO: 708943 - DNA, 15 bp, Homo sapiens
ggcctgggcaggagg

SEQ ID NO: 708944 - DNA, 15 bp, Homo sapiens
gcctgggcaggaggg

SEQ ID NO: 708945 - DNA, 15 bp, Homo sapiens
cctgggcaggaggga

SEQ ID NO: 708946 - DNA, 15 bp, Homo sapiens
ctgggcaggagggag

SEQ ID NO: 708947 - DNA, 15 bp, Homo sapiens
tgggcaggagggagg

SEQ ID NO: 708948 - DNA, 15 bp, Homo sapiens
gggcaggagggaggt

SEQ ID NO: 708949 - DNA, 15 bp, Homo sapiens
ggcaggagggaggtg

SEQ ID NO: 708950 - DNA, 15 bp, Homo sapiens
gcaggagggaggtgc

SEQ ID NO: 708951 - DNA, 15 bp, Homo sapiens
caggagggaggtgct

SEQ ID NO: 708952 - DNA, 15 bp, Homo sapiens
aggagggaggtgctt

SEQ ID NO: 708953 - DNA, 15 bp, Homo sapiens
ggagggaggtgcttc

SEQ ID NO: 708954 - DNA, 15 bp, Homo sapiens
gagggaggtgcttct

SEQ ID NO: 708955 - DNA, 15 bp, Homo sapiens
agggaggtgcttcta

SEQ ID NO: 708956 - DNA, 15 bp, Homo sapiens
gggaggtgcttctag

SEQ ID NO: 708957 - DNA, 15 bp, Homo sapiens
ggaggtgcttctagt

SEQ ID NO: 708958 - DNA, 15 bp, Homo sapiens
gaggtgcttctagtt

SEQ ID NO: 708959 - DNA, 15 bp, Homo sapiens
aggtgcttctagttc

SEQ ID NO: 708960 - DNA, 15 bp, Homo sapiens
ggtgcttctagttct

SEQ ID NO: 708961 - DNA, 15 bp, Homo sapiens
gtgcttctagttctg

SEQ ID NO: 708962 - DNA, 15 bp, Homo sapiens
tgcttctagttctgc

SEQ ID NO: 708963 - DNA, 15 bp, Homo sapiens
gcttctagttctgcc

SEQ ID NO: 708964 - DNA, 15 bp, Homo sapiens
cttctagttctgcca

SEQ ID NO: 708965 - DNA, 15 bp, Homo sapiens
ttctagttctgccag

SEQ ID NO: 708966 - DNA, 15 bp, Homo sapiens
tctagttctgccagg

SEQ ID NO: 708967 - DNA, 15 bp, Homo sapiens
ctagttctgccagga

SEQ ID NO: 708968 - DNA, 15 bp, Homo sapiens
tagttctgccaggag

SEQ ID NO: 708969 - DNA, 15 bp, Homo sapiens
agttctgccaggaga

SEQ ID NO: 708970 - DNA, 15 bp, Homo sapiens
gttctgccaggagac

SEQ ID NO: 708971 - DNA, 15 bp, Homo sapiens
ttctgccaggagaca

SEQ ID NO: 708972 - DNA, 15 bp, Homo sapiens
tctgccaggagacag

SEQ ID NO: 708973 - DNA, 15 bp, Homo sapiens
ctgccaggagacagg

SEQ ID NO: 708974 - DNA, 15 bp, Homo sapiens
tgccaggagacaggt

SEQ ID NO: 708975 - DNA, 15 bp, Homo sapiens
gccaggagacaggtt

SEQ ID NO: 708976 - DNA, 15 bp, Homo sapiens
ccaggagacaggtta

SEQ ID NO: 708977 - DNA, 15 bp, Homo sapiens
caggagacaggttag

SEQ ID NO: 708978 - DNA, 15 bp, Homo sapiens
aggagacaggttagc

SEQ ID NO: 708979 - DNA, 15 bp, Homo sapiens
ggagacaggttagct

SEQ ID NO: 708980 - DNA, 15 bp, Homo sapiens
gagacaggttagctg

SEQ ID NO: 708981 - DNA, 15 bp, Homo sapiens
agacaggttagctgc

SEQ ID NO: 708982 - DNA, 15 bp, Homo sapiens
gacaggttagctgct

SEQ ID NO: 708983 - DNA, 15 bp, Homo sapiens
acaggttagctgctc

SEQ ID NO: 708984 - DNA, 15 bp, Homo sapiens
caggttagctgctcc

SEQ ID NO: 708985 - DNA, 15 bp, Homo sapiens
aggttagctgctccc

SEQ ID NO: 708986 - DNA, 15 bp, Homo sapiens
ggttagctgctcccc

SEQ ID NO: 708987 - DNA, 15 bp, Homo sapiens
gttagctgctcccca

SEQ ID NO: 708988 - DNA, 15 bp, Homo sapiens
ttagctgctccccac

SEQ ID NO: 708989 - DNA, 15 bp, Homo sapiens
tagctgctccccacg

SEQ ID NO: 708990 - DNA, 15 bp, Homo sapiens
agctgctccccacgt

SEQ ID NO: 708991 - DNA, 15 bp, Homo sapiens
gctgctccccacgtc

SEQ ID NO: 708992 - DNA, 15 bp, Homo sapiens
ctgctccccacgtca

SEQ ID NO: 708993 - DNA, 15 bp, Homo sapiens
tgctccccacgtcag

SEQ ID NO: 708994 - DNA, 15 bp, Homo sapiens
gctccccacgtcagc

SEQ ID NO: 708995 - DNA, 15 bp, Homo sapiens
ctccccacgtcagct

SEQ ID NO: 708996 - DNA, 15 bp, Homo sapiens
tccccacgtcagctg

SEQ ID NO: 708997 - DNA, 15 bp, Homo sapiens
ccccacgtcagctgg

SEQ ID NO: 708998 - DNA, 15 bp, Homo sapiens
cccacgtcagctggg

SEQ ID NO: 708999 - DNA, 15 bp, Homo sapiens
ccacgtcagctggga

SEQ ID NO: 709000 - DNA, 15 bp, Homo sapiens
cacgtcagctgggac

SEQ ID NO: 709001 - DNA, 15 bp, Homo sapiens
acgtcagctgggaca

SEQ ID NO: 709002 - DNA, 15 bp, Homo sapiens
cgtcagctgggacac

SEQ ID NO: 709003 - DNA, 15 bp, Homo sapiens
gtcagctgggacacc

SEQ ID NO: 709004 - DNA, 15 bp, Homo sapiens
tcagctgggacaccc

SEQ ID NO: 709005 - DNA, 15 bp, Homo sapiens
cagctgggacacccc

SEQ ID NO: 709006 - DNA, 15 bp, Homo sapiens
agctgggacaccccg

SEQ ID NO: 709007 - DNA, 15 bp, Homo sapiens
gctgggacaccccga

SEQ ID NO: 709008 - DNA, 15 bp, Homo sapiens
ctgggacaccccgac

SEQ ID NO: 709009 - DNA, 15 bp, Homo sapiens
tgggacaccccgact

SEQ ID NO: 709010 - DNA, 15 bp, Homo sapiens
gggacaccccgactt

SEQ ID NO: 709011 - DNA, 15 bp, Homo sapiens
ggacaccccgacttt

SEQ ID NO: 709012 - DNA, 15 bp, Homo sapiens
gacaccccgactttt

SEQ ID NO: 709013 - DNA, 15 bp, Homo sapiens
acaccccgacttttg

SEQ ID NO: 709014 - DNA, 15 bp, Homo sapiens
caccccgacttttgt

SEQ ID NO: 709015 - DNA, 15 bp, Homo sapiens
accccgacttttgtt

SEQ ID NO: 709016 - DNA, 15 bp, Homo sapiens
ccccgacttttgttt

SEQ ID NO: 709017 - DNA, 15 bp, Homo sapiens
cccgacttttgttta

SEQ ID NO: 709018 - DNA, 15 bp, Homo sapiens
ccgacttttgtttac

SEQ ID NO: 709019 - DNA, 15 bp, Homo sapiens
cgacttttgtttacc

SEQ ID NO: 709020 - DNA, 15 bp, Homo sapiens
gacttttgtttacca

SEQ ID NO: 709021 - DNA, 15 bp, Homo sapiens
acttttgtttaccag

SEQ ID NO: 709022 - DNA, 15 bp, Homo sapiens
cttttgtttaccaga

SEQ ID NO: 709023 - DNA, 15 bp, Homo sapiens
ttttgtttaccagag

SEQ ID NO: 709024 - DNA, 15 bp, Homo sapiens
tttgtttaccagaga

SEQ ID NO: 709025 - DNA, 15 bp, Homo sapiens
ttgtttaccagagaa

SEQ ID NO: 709026 - DNA, 15 bp, Homo sapiens
tgtttaccagagaaa

SEQ ID NO: 709027 - DNA, 15 bp, Homo sapiens
gtttaccagagaaaa

SEQ ID NO: 709028 - DNA, 15 bp, Homo sapiens
tttaccagagaaaaa

SEQ ID NO: 709029 - DNA, 15 bp, Homo sapiens
ttaccagagaaaaag

SEQ ID NO: 709030 - DNA, 15 bp, Homo sapiens
taccagagaaaaagg

SEQ ID NO: 709031 - DNA, 15 bp, Homo sapiens
accagagaaaaaggg

SEQ ID NO: 709032 - DNA, 15 bp, Homo sapiens
ccagagaaaaaggga

SEQ ID NO: 709033 - DNA, 15 bp, Homo sapiens
cagagaaaaagggag

SEQ ID NO: 709034 - DNA, 15 bp, Homo sapiens
agagaaaaagggagg

SEQ ID NO: 709035 - DNA, 15 bp, Homo sapiens
gagaaaaagggaggg

SEQ ID NO: 709036 - DNA, 15 bp, Homo sapiens
agaaaaagggagggg

SEQ ID NO: 709037 - DNA, 15 bp, Homo sapiens
gaaaaagggaggggg

SEQ ID NO: 709038 - DNA, 15 bp, Homo sapiens
aaaaagggaggggga

SEQ ID NO: 709039 - DNA, 15 bp, Homo sapiens
aaaagggagggggag

SEQ ID NO: 709040 - DNA, 15 bp, Homo sapiens
aaagggagggggaga

SEQ ID NO: 709041 - DNA, 15 bp, Homo sapiens
aagggagggggagag

SEQ ID NO: 709042 - DNA, 15 bp, Homo sapiens
agggagggggagagg

SEQ ID NO: 709043 - DNA, 15 bp, Homo sapiens
gggagggggagaggg

SEQ ID NO: 709044 - DNA, 15 bp, Homo sapiens
ggagggggagagggc

SEQ ID NO: 709045 - DNA, 15 bp, Homo sapiens
gagggggagagggct

SEQ ID NO: 709046 - DNA, 15 bp, Homo sapiens
agggggagagggctg

SEQ ID NO: 709047 - DNA, 15 bp, Homo sapiens
gggggagagggctgc

SEQ ID NO: 709048 - DNA, 15 bp, Homo sapiens
ggggagagggctgcc

SEQ ID NO: 709049 - DNA, 15 bp, Homo sapiens
gggagagggctgcct

SEQ ID NO: 709050 - DNA, 15 bp, Homo sapiens
ggagagggctgcctt

SEQ ID NO: 709051 - DNA, 15 bp, Homo sapiens
gagagggctgccttt

SEQ ID NO: 709052 - DNA, 15 bp, Homo sapiens
agagggctgcctttg

SEQ ID NO: 709053 - DNA, 15 bp, Homo sapiens
gagggctgcctttgg

SEQ ID NO: 709054 - DNA, 15 bp, Homo sapiens
agggctgcctttgga

SEQ ID NO: 709055 - DNA, 15 bp, Homo sapiens
gggctgcctttggac

SEQ ID NO: 709056 - DNA, 15 bp, Homo sapiens
ggctgcctttggact

SEQ ID NO: 709057 - DNA, 15 bp, Homo sapiens
gctgcctttggactt

SEQ ID NO: 709058 - DNA, 15 bp, Homo sapiens
ctgcctttggacttg

SEQ ID NO: 709059 - DNA, 15 bp, Homo sapiens
tgcctttggacttgt

SEQ ID NO: 709060 - DNA, 15 bp, Homo sapiens
gcctttggacttgtc

SEQ ID NO: 709061 - DNA, 15 bp, Homo sapiens
cctttggacttgtcc

SEQ ID NO: 709062 - DNA, 15 bp, Homo sapiens
ctttggacttgtccc

SEQ ID NO: 709063 - DNA, 15 bp, Homo sapiens
tttggacttgtcccg

SEQ ID NO: 709064 - DNA, 15 bp, Homo sapiens
ttggacttgtcccgg

SEQ ID NO: 709065 - DNA, 15 bp, Homo sapiens
tggacttgtcccggg

SEQ ID NO: 709066 - DNA, 15 bp, Homo sapiens
ggacttgtcccggga

SEQ ID NO: 709067 - DNA, 15 bp, Homo sapiens
gacttgtcccgggac

SEQ ID NO: 709068 - DNA, 15 bp, Homo sapiens
acttgtcccgggaca

SEQ ID NO: 709069 - DNA, 15 bp, Homo sapiens
cttgtcccgggacac

SEQ ID NO: 709070 - DNA, 15 bp, Homo sapiens
ttgtcccgggacacc

SEQ ID NO: 709071 - DNA, 15 bp, Homo sapiens
tgtcccgggacacct

SEQ ID NO: 709072 - DNA, 15 bp, Homo sapiens
gtcccgggacaccta

SEQ ID NO: 709073 - DNA, 15 bp, Homo sapiens
tcccgggacacctag

SEQ ID NO: 709074 - DNA, 15 bp, Homo sapiens
cccgggacacctagg

SEQ ID NO: 709075 - DNA, 15 bp, Homo sapiens
ccgggacacctaggc

SEQ ID NO: 709076 - DNA, 15 bp, Homo sapiens
cgggacacctaggct

SEQ ID NO: 709077 - DNA, 15 bp, Homo sapiens
gggacacctaggcta

SEQ ID NO: 709078 - DNA, 15 bp, Homo sapiens
ggacacctaggctag

SEQ ID NO: 709079 - DNA, 15 bp, Homo sapiens
gacacctaggctagg

SEQ ID NO: 709080 - DNA, 15 bp, Homo sapiens
acacctaggctaggg

SEQ ID NO: 709081 - DNA, 15 bp, Homo sapiens
cacctaggctagggt

SEQ ID NO: 709082 - DNA, 15 bp, Homo sapiens
acctaggctagggtg

SEQ ID NO: 709083 - DNA, 15 bp, Homo sapiens
cctaggctagggtgg

SEQ ID NO: 709084 - DNA, 15 bp, Homo sapiens
ctaggctagggtggg

SEQ ID NO: 709085 - DNA, 15 bp, Homo sapiens
taggctagggtgggg

SEQ ID NO: 709086 - DNA, 15 bp, Homo sapiens
aggctagggtgggga

SEQ ID NO: 709087 - DNA, 15 bp, Homo sapiens
ggctagggtggggag

SEQ ID NO: 709088 - DNA, 15 bp, Homo sapiens
gctagggtggggaga

SEQ ID NO: 709089 - DNA, 15 bp, Homo sapiens
ctagggtggggagag

SEQ ID NO: 709090 - DNA, 15 bp, Homo sapiens
tagggtggggagaga

SEQ ID NO: 709091 - DNA, 15 bp, Homo sapiens
agggtggggagagac

SEQ ID NO: 709092 - DNA, 15 bp, Homo sapiens
gggtggggagagacg

SEQ ID NO: 709093 - DNA, 15 bp, Homo sapiens
ggtggggagagacgg

SEQ ID NO: 709094 - DNA, 15 bp, Homo sapiens
gtggggagagacggg

SEQ ID NO: 709095 - DNA, 15 bp, Homo sapiens
tggggagagacgggc

SEQ ID NO: 709096 - DNA, 15 bp, Homo sapiens
ggggagagacgggcc

SEQ ID NO: 709097 - DNA, 15 bp, Homo sapiens
gggagagacgggccc

SEQ ID NO: 709098 - DNA, 15 bp, Homo sapiens
ggagagacgggccct

SEQ ID NO: 709099 - DNA, 15 bp, Homo sapiens
gagagacgggccctg

SEQ ID NO: 709100 - DNA, 15 bp, Homo sapiens
agagacgggccctgg

SEQ ID NO: 709101 - DNA, 15 bp, Homo sapiens
gagacgggccctggt

SEQ ID NO: 709102 - DNA, 15 bp, Homo sapiens
agacgggccctggtg

SEQ ID NO: 709103 - DNA, 15 bp, Homo sapiens
gacgggccctggtgg

SEQ ID NO: 709104 - DNA, 15 bp, Homo sapiens
acgggccctggtggt

SEQ ID NO: 709105 - DNA, 15 bp, Homo sapiens
cgggccctggtggtg

SEQ ID NO: 709106 - DNA, 15 bp, Homo sapiens
gggccctggtggtgg

SEQ ID NO: 709107 - DNA, 15 bp, Homo sapiens
ggccctggtggtggc

SEQ ID NO: 709108 - DNA, 15 bp, Homo sapiens
gccctggtggtggct

SEQ ID NO: 709109 - DNA, 15 bp, Homo sapiens
ccctggtggtggctc

SEQ ID NO: 709110 - DNA, 15 bp, Homo sapiens
cctggtggtggctcg

SEQ ID NO: 709111 - DNA, 15 bp, Homo sapiens
ctggtggtggctcgg

SEQ ID NO: 709112 - DNA, 15 bp, Homo sapiens
tggtggtggctcggg

SEQ ID NO: 709113 - DNA, 15 bp, Homo sapiens
ggtggtggctcggga

SEQ ID NO: 709114 - DNA, 15 bp, Homo sapiens
gtggtggctcgggag

SEQ ID NO: 709115 - DNA, 15 bp, Homo sapiens
tggtggctcgggagg

SEQ ID NO: 709116 - DNA, 15 bp, Homo sapiens
ggtggctcgggaggc

SEQ ID NO: 709117 - DNA, 15 bp, Homo sapiens
gtggctcgggaggcg

SEQ ID NO: 709118 - DNA, 15 bp, Homo sapiens
tggctcgggaggcga

SEQ ID NO: 709119 - DNA, 15 bp, Homo sapiens
ggctcgggaggcgaa

SEQ ID NO: 709120 - DNA, 15 bp, Homo sapiens
gctcgggaggcgaag

SEQ ID NO: 709121 - DNA, 15 bp, Homo sapiens
ctcgggaggcgaagc

SEQ ID NO: 709122 - DNA, 15 bp, Homo sapiens
tcgggaggcgaagcg

SEQ ID NO: 709123 - DNA, 15 bp, Homo sapiens
cgggaggcgaagcgt

SEQ ID NO: 709124 - DNA, 15 bp, Homo sapiens
gggaggcgaagcgtt

SEQ ID NO: 709125 - DNA, 15 bp, Homo sapiens
ggaggcgaagcgttg

SEQ ID NO: 709126 - DNA, 15 bp, Homo sapiens
gaggcgaagcgttgt

SEQ ID NO: 709127 - DNA, 15 bp, Homo sapiens
aggcgaagcgttgtc

SEQ ID NO: 709128 - DNA, 15 bp, Homo sapiens
ggcgaagcgttgtcc

SEQ ID NO: 709129 - DNA, 15 bp, Homo sapiens
gcgaagcgttgtcct

SEQ ID NO: 709130 - DNA, 15 bp, Homo sapiens
cgaagcgttgtcctc

SEQ ID NO: 709131 - DNA, 15 bp, Homo sapiens
gaagcgttgtcctca

SEQ ID NO: 709132 - DNA, 15 bp, Homo sapiens
aagcgttgtcctcag

SEQ ID NO: 709133 - DNA, 15 bp, Homo sapiens
agcgttgtcctcagc

SEQ ID NO: 709134 - DNA, 15 bp, Homo sapiens
gcgttgtcctcagcc

SEQ ID NO: 709135 - DNA, 15 bp, Homo sapiens
cgttgtcctcagccc

SEQ ID NO: 709136 - DNA, 15 bp, Homo sapiens
gttgtcctcagcccc

SEQ ID NO: 709137 - DNA, 15 bp, Homo sapiens
ttgtcctcagccccg

SEQ ID NO: 709138 - DNA, 15 bp, Homo sapiens
tgtcctcagccccgc

SEQ ID NO: 709139 - DNA, 15 bp, Homo sapiens
gtcctcagccccgcg

SEQ ID NO: 709140 - DNA, 15 bp, Homo sapiens
tcctcagccccgcgt

SEQ ID NO: 709141 - DNA, 15 bp, Homo sapiens
cctcagccccgcgtg

SEQ ID NO: 709142 - DNA, 15 bp, Homo sapiens
ctcagccccgcgtgg

SEQ ID NO: 709143 - DNA, 15 bp, Homo sapiens
tcagccccgcgtgga

SEQ ID NO: 709144 - DNA, 15 bp, Homo sapiens
cagccccgcgtggaa

SEQ ID NO: 709145 - DNA, 15 bp, Homo sapiens
agccccgcgtggaac

SEQ ID NO: 709146 - DNA, 15 bp, Homo sapiens
gccccgcgtggaact

SEQ ID NO: 709147 - DNA, 15 bp, Homo sapiens
ccccgcgtggaactc

SEQ ID NO: 709148 - DNA, 15 bp, Homo sapiens
cccgcgtggaactcg

SEQ ID NO: 709149 - DNA, 15 bp, Homo sapiens
ccgcgtggaactcgt

SEQ ID NO: 709150 - DNA, 15 bp, Homo sapiens
cgcgtggaactcgtg

SEQ ID NO: 709151 - DNA, 15 bp, Homo sapiens
gcgtggaactcgtgt

SEQ ID NO: 709152 - DNA, 15 bp, Homo sapiens
cgtggaactcgtgtc

SEQ ID NO: 709153 - DNA, 15 bp, Homo sapiens
gtggaactcgtgtct

SEQ ID NO: 709154 - DNA, 15 bp, Homo sapiens
tggaactcgtgtctg

SEQ ID NO: 709155 - DNA, 15 bp, Homo sapiens
ggaactcgtgtctgg

SEQ ID NO: 709156 - DNA, 15 bp, Homo sapiens
gaactcgtgtctggc

SEQ ID NO: 709157 - DNA, 15 bp, Homo sapiens
aactcgtgtctggca

SEQ ID NO: 709158 - DNA, 15 bp, Homo sapiens
actcgtgtctggcac

SEQ ID NO: 709159 - DNA, 15 bp, Homo sapiens
ctcgtgtctggcaca

SEQ ID NO: 709160 - DNA, 15 bp, Homo sapiens
tcgtgtctggcacag

SEQ ID NO: 709161 - DNA, 15 bp, Homo sapiens
cgtgtctggcacagc

SEQ ID NO: 709162 - DNA, 15 bp, Homo sapiens
gtgtctggcacagcc

SEQ ID NO: 709163 - DNA, 15 bp, Homo sapiens
tgtctggcacagcct

SEQ ID NO: 709164 - DNA, 15 bp, Homo sapiens
gtctggcacagcctg

SEQ ID NO: 709165 - DNA, 15 bp, Homo sapiens
tctggcacagcctgg

SEQ ID NO: 709166 - DNA, 15 bp, Homo sapiens
ctggcacagcctggc

SEQ ID NO: 709167 - DNA, 15 bp, Homo sapiens
tggcacagcctggct

SEQ ID NO: 709168 - DNA, 15 bp, Homo sapiens
ggcacagcctggctg

SEQ ID NO: 709169 - DNA, 15 bp, Homo sapiens
gcacagcctggctgt

SEQ ID NO: 709170 - DNA, 15 bp, Homo sapiens
cacagcctggctgtg

SEQ ID NO: 709171 - DNA, 15 bp, Homo sapiens
acagcctggctgtgg

SEQ ID NO: 709172 - DNA, 15 bp, Homo sapiens
cagcctggctgtggc

SEQ ID NO: 709173 - DNA, 15 bp, Homo sapiens
agcctggctgtggcc

SEQ ID NO: 709174 - DNA, 15 bp, Homo sapiens
gcctggctgtggcct

SEQ ID NO: 709175 - DNA, 15 bp, Homo sapiens
cctggctgtggccta

SEQ ID NO: 709176 - DNA, 15 bp, Homo sapiens
ctggctgtggcctaa

SEQ ID NO: 709177 - DNA, 15 bp, Homo sapiens
tggctgtggcctaac

SEQ ID NO: 709178 - DNA, 15 bp, Homo sapiens
ggctgtggcctaacc

SEQ ID NO: 709179 - DNA, 15 bp, Homo sapiens
gctgtggcctaacct

SEQ ID NO: 709180 - DNA, 15 bp, Homo sapiens
ctgtggcctaacctg

SEQ ID NO: 709181 - DNA, 15 bp, Homo sapiens
tgtggcctaacctgc

SEQ ID NO: 709182 - DNA, 15 bp, Homo sapiens
gtggcctaacctgcc

SEQ ID NO: 709183 - DNA, 15 bp, Homo sapiens
tggcctaacctgccg

SEQ ID NO: 709184 - DNA, 15 bp, Homo sapiens
ggcctaacctgccga

SEQ ID NO: 709185 - DNA, 15 bp, Homo sapiens
gcctaacctgccgag

SEQ ID NO: 709186 - DNA, 15 bp, Homo sapiens
cctaacctgccgaga

SEQ ID NO: 709187 - DNA, 15 bp, Homo sapiens
ctaacctgccgagag

SEQ ID NO: 709188 - DNA, 15 bp, Homo sapiens
taacctgccgagagt

SEQ ID NO: 709189 - DNA, 15 bp, Homo sapiens
aacctgccgagagtc

SEQ ID NO: 709190 - DNA, 15 bp, Homo sapiens
acctgccgagagtcc

SEQ ID NO: 709191 - DNA, 15 bp, Homo sapiens
cctgccgagagtcca

SEQ ID NO: 709192 - DNA, 15 bp, Homo sapiens
ctgccgagagtccat

SEQ ID NO: 709193 - DNA, 15 bp, Homo sapiens
tgccgagagtccatc

SEQ ID NO: 709194 - DNA, 15 bp, Homo sapiens
gccgagagtccatca

SEQ ID NO: 709195 - DNA, 15 bp, Homo sapiens
ccgagagtccatcag

SEQ ID NO: 709196 - DNA, 15 bp, Homo sapiens
cgagagtccatcagc

SEQ ID NO: 709197 - DNA, 15 bp, Homo sapiens
gagagtccatcagcc

SEQ ID NO: 709198 - DNA, 15 bp, Homo sapiens
agagtccatcagcct

SEQ ID NO: 709199 - DNA, 15 bp, Homo sapiens
gagtccatcagcctc

SEQ ID NO: 709200 - DNA, 15 bp, Homo sapiens
agtccatcagcctcc

SEQ ID NO: 709201 - DNA, 15 bp, Homo sapiens
gtccatcagcctcca

SEQ ID NO: 709202 - DNA, 15 bp, Homo sapiens
tccatcagcctccat

SEQ ID NO: 709203 - DNA, 15 bp, Homo sapiens
ccatcagcctccatc

SEQ ID NO: 709204 - DNA, 15 bp, Homo sapiens
catcagcctccatcc

SEQ ID NO: 709205 - DNA, 15 bp, Homo sapiens
atcagcctccatcct

SEQ ID NO: 709206 - DNA, 15 bp, Homo sapiens
tcagcctccatccta

SEQ ID NO: 709207 - DNA, 15 bp, Homo sapiens
cagcctccatcctac

SEQ ID NO: 709208 - DNA, 15 bp, Homo sapiens
agcctccatcctacc

SEQ ID NO: 709209 - DNA, 15 bp, Homo sapiens
gcctccatcctaccc

SEQ ID NO: 709210 - DNA, 15 bp, Homo sapiens
cctccatcctacccc

SEQ ID NO: 709211 - DNA, 15 bp, Homo sapiens
ctccatcctaccccc

SEQ ID NO: 709212 - DNA, 15 bp, Homo sapiens
tccatcctaccccct

SEQ ID NO: 709213 - DNA, 15 bp, Homo sapiens
ccatcctaccccctg

SEQ ID NO: 709214 - DNA, 15 bp, Homo sapiens
catcctaccccctgt

SEQ ID NO: 709215 - DNA, 15 bp, Homo sapiens
atcctaccccctgtg

SEQ ID NO: 709216 - DNA, 15 bp, Homo sapiens
tcctaccccctgtgc

SEQ ID NO: 709217 - DNA, 15 bp, Homo sapiens
cctaccccctgtgcc

SEQ ID NO: 709218 - DNA, 15 bp, Homo sapiens
ctaccccctgtgcct

SEQ ID NO: 709219 - DNA, 15 bp, Homo sapiens
taccccctgtgcctt

SEQ ID NO: 709220 - DNA, 15 bp, Homo sapiens
accccctgtgccttg

SEQ ID NO: 709221 - DNA, 15 bp, Homo sapiens
ccccctgtgccttgt

SEQ ID NO: 709222 - DNA, 15 bp, Homo sapiens
cccctgtgccttgtc

SEQ ID NO: 709223 - DNA, 15 bp, Homo sapiens
ccctgtgccttgtca

SEQ ID NO: 709224 - DNA, 15 bp, Homo sapiens
cctgtgccttgtcac

SEQ ID NO: 709225 - DNA, 15 bp, Homo sapiens
ctgtgccttgtcacg

SEQ ID NO: 709226 - DNA, 15 bp, Homo sapiens
tgtgccttgtcacgc

SEQ ID NO: 709227 - DNA, 15 bp, Homo sapiens
gtgccttgtcacgcc

SEQ ID NO: 709228 - DNA, 15 bp, Homo sapiens
tgccttgtcacgcca

SEQ ID NO: 709229 - DNA, 15 bp, Homo sapiens
gccttgtcacgccag

SEQ ID NO: 709230 - DNA, 15 bp, Homo sapiens
ccttgtcacgccaga

SEQ ID NO: 709231 - DNA, 15 bp, Homo sapiens
cttgtcacgccagac

SEQ ID NO: 709232 - DNA, 15 bp, Homo sapiens
ttgtcacgccagact

SEQ ID NO: 709233 - DNA, 15 bp, Homo sapiens
tgtcacgccagactt

SEQ ID NO: 709234 - DNA, 15 bp, Homo sapiens
gtcacgccagacttc

SEQ ID NO: 709235 - DNA, 15 bp, Homo sapiens
tcacgccagacttcc

SEQ ID NO: 709236 - DNA, 15 bp, Homo sapiens
cacgccagacttccc

SEQ ID NO: 709237 - DNA, 15 bp, Homo sapiens
acgccagacttccca

SEQ ID NO: 709238 - DNA, 15 bp, Homo sapiens
cgccagacttcccac

SEQ ID NO: 709239 - DNA, 15 bp, Homo sapiens
gccagacttcccacg

SEQ ID NO: 709240 - DNA, 15 bp, Homo sapiens
ccagacttcccacgg

SEQ ID NO: 709241 - DNA, 15 bp, Homo sapiens
cagacttcccacggc

SEQ ID NO: 709242 - DNA, 15 bp, Homo sapiens
agacttcccacggct

SEQ ID NO: 709243 - DNA, 15 bp, Homo sapiens
gacttcccacggctc

SEQ ID NO: 709244 - DNA, 15 bp, Homo sapiens
acttcccacggctcc

SEQ ID NO: 709245 - DNA, 15 bp, Homo sapiens
cttcccacggctcct

SEQ ID NO: 709246 - DNA, 15 bp, Homo sapiens
ttcccacggctcctc

SEQ ID NO: 709247 - DNA, 15 bp, Homo sapiens
tcccacggctcctcg

SEQ ID NO: 709248 - DNA, 15 bp, Homo sapiens
cccacggctcctcga

SEQ ID NO: 709249 - DNA, 15 bp, Homo sapiens
ccacggctcctcgag

SEQ ID NO: 709250 - DNA, 15 bp, Homo sapiens
cacggctcctcgaga

SEQ ID NO: 709251 - DNA, 15 bp, Homo sapiens
acggctcctcgagat

SEQ ID NO: 709252 - DNA, 15 bp, Homo sapiens
cggctcctcgagatc

SEQ ID NO: 709253 - DNA, 15 bp, Homo sapiens
ggctcctcgagatcc

SEQ ID NO: 709254 - DNA, 15 bp, Homo sapiens
gctcctcgagatccc

SEQ ID NO: 709255 - DNA, 15 bp, Homo sapiens
ctcctcgagatccca

SEQ ID NO: 709256 - DNA, 15 bp, Homo sapiens
tcctcgagatcccaa

SEQ ID NO: 709257 - DNA, 15 bp, Homo sapiens
cctcgagatcccaac

SEQ ID NO: 709258 - DNA, 15 bp, Homo sapiens
ctcgagatcccaaca

SEQ ID NO: 709259 - DNA, 15 bp, Homo sapiens
tcgagatcccaacac

SEQ ID NO: 709260 - DNA, 15 bp, Homo sapiens
cgagatcccaacact

SEQ ID NO: 709261 - DNA, 15 bp, Homo sapiens
gagatcccaacactg

SEQ ID NO: 709262 - DNA, 15 bp, Homo sapiens
agatcccaacactgc

SEQ ID NO: 709263 - DNA, 15 bp, Homo sapiens
gatcccaacactgcc

SEQ ID NO: 709264 - DNA, 15 bp, Homo sapiens
atcccaacactgcca

SEQ ID NO: 709265 - DNA, 15 bp, Homo sapiens
tcccaacactgccag

SEQ ID NO: 709266 - DNA, 15 bp, Homo sapiens
cccaacactgccagc

SEQ ID NO: 709267 - DNA, 15 bp, Homo sapiens
ccaacactgccagca

SEQ ID NO: 709268 - DNA, 15 bp, Homo sapiens
caacactgccagcat

SEQ ID NO: 709269 - DNA, 15 bp, Homo sapiens
aacactgccagcatt

SEQ ID NO: 709270 - DNA, 15 bp, Homo sapiens
acactgccagcattt

SEQ ID NO: 709271 - DNA, 15 bp, Homo sapiens
cactgccagcatttc

SEQ ID NO: 709272 - DNA, 15 bp, Homo sapiens
actgccagcatttcc

SEQ ID NO: 709273 - DNA, 15 bp, Homo sapiens
ctgccagcatttccc

SEQ ID NO: 709274 - DNA, 15 bp, Homo sapiens
tgccagcatttccct

SEQ ID NO: 709275 - DNA, 15 bp, Homo sapiens
gccagcatttccctt

SEQ ID NO: 709276 - DNA, 15 bp, Homo sapiens
ccagcatttcccttc

SEQ ID NO: 709277 - DNA, 15 bp, Homo sapiens
cagcatttcccttcc

SEQ ID NO: 709278 - DNA, 15 bp, Homo sapiens
agcatttcccttcct

SEQ ID NO: 709279 - DNA, 15 bp, Homo sapiens
gcatttcccttcctt

SEQ ID NO: 709280 - DNA, 15 bp, Homo sapiens
catttcccttccttc

SEQ ID NO: 709281 - DNA, 15 bp, Homo sapiens
atttcccttccttcc

SEQ ID NO: 709282 - DNA, 15 bp, Homo sapiens
tttcccttccttcct

SEQ ID NO: 709283 - DNA, 15 bp, Homo sapiens
ttcccttccttcctc

SEQ ID NO: 709284 - DNA, 15 bp, Homo sapiens
tcccttccttcctct

SEQ ID NO: 709285 - DNA, 15 bp, Homo sapiens
cccttccttcctctc

SEQ ID NO: 709286 - DNA, 15 bp, Homo sapiens
ccttccttcctctcc

SEQ ID NO: 709287 - DNA, 15 bp, Homo sapiens
cttccttcctctcct

SEQ ID NO: 709288 - DNA, 15 bp, Homo sapiens
ttccttcctctcctg

SEQ ID NO: 709289 - DNA, 15 bp, Homo sapiens
tccttcctctcctgt

SEQ ID NO: 709290 - DNA, 15 bp, Homo sapiens
ccttcctctcctgtc

SEQ ID NO: 709291 - DNA, 15 bp, Homo sapiens
cttcctctcctgtct

SEQ ID NO: 709292 - DNA, 15 bp, Homo sapiens
ttcctctcctgtctc

SEQ ID NO: 709293 - DNA, 15 bp, Homo sapiens
tcctctcctgtctcc

SEQ ID NO: 709294 - DNA, 15 bp, Homo sapiens
cctctcctgtctccc

SEQ ID NO: 709295 - DNA, 15 bp, Homo sapiens
ctctcctgtctccct

SEQ ID NO: 709296 - DNA, 15 bp, Homo sapiens
tctcctgtctccctc

SEQ ID NO: 709297 - DNA, 15 bp, Homo sapiens
ctcctgtctccctcc

SEQ ID NO: 709298 - DNA, 15 bp, Homo sapiens
tcctgtctccctcct

SEQ ID NO: 709299 - DNA, 15 bp, Homo sapiens
cctgtctccctcctc

SEQ ID NO: 709300 - DNA, 15 bp, Homo sapiens
ctgtctccctcctct

SEQ ID NO: 709301 - DNA, 15 bp, Homo sapiens
tgtctccctcctctg

SEQ ID NO: 709302 - DNA, 15 bp, Homo sapiens
gtctccctcctctgc

SEQ ID NO: 709303 - DNA, 15 bp, Homo sapiens
tctccctcctctgcc

SEQ ID NO: 709304 - DNA, 15 bp, Homo sapiens
ctccctcctctgccc

SEQ ID NO: 709305 - DNA, 15 bp, Homo sapiens
tccctcctctgcccg

SEQ ID NO: 709306 - DNA, 15 bp, Homo sapiens
ccctcctctgcccgg

SEQ ID NO: 709307 - DNA, 15 bp, Homo sapiens
cctcctctgcccggg

SEQ ID NO: 709308 - DNA, 15 bp, Homo sapiens
ctcctctgcccggga

SEQ ID NO: 709309 - DNA, 15 bp, Homo sapiens
tcctctgcccgggag

SEQ ID NO: 709310 - DNA, 15 bp, Homo sapiens
cctctgcccgggagc

SEQ ID NO: 709311 - DNA, 15 bp, Homo sapiens
ctctgcccgggagct

SEQ ID NO: 709312 - DNA, 15 bp, Homo sapiens
tctgcccgggagctc

SEQ ID NO: 709313 - DNA, 15 bp, Homo sapiens
ctgcccgggagctca

SEQ ID NO: 709314 - DNA, 15 bp, Homo sapiens
tgcccgggagctcag

SEQ ID NO: 709315 - DNA, 15 bp, Homo sapiens
gcccgggagctcagg

SEQ ID NO: 709316 - DNA, 15 bp, Homo sapiens
cccgggagctcagga

SEQ ID NO: 709317 - DNA, 15 bp, Homo sapiens
ccgggagctcaggaa

SEQ ID NO: 709318 - DNA, 15 bp, Homo sapiens
cgggagctcaggaac

SEQ ID NO: 709319 - DNA, 15 bp, Homo sapiens
gggagctcaggaacc

SEQ ID NO: 709320 - DNA, 15 bp, Homo sapiens
ggagctcaggaaccg

SEQ ID NO: 709321 - DNA, 15 bp, Homo sapiens
gagctcaggaaccga

SEQ ID NO: 709322 - DNA, 15 bp, Homo sapiens
agctcaggaaccgag

SEQ ID NO: 709323 - DNA, 15 bp, Homo sapiens
gctcaggaaccgagg

SEQ ID NO: 709324 - DNA, 15 bp, Homo sapiens
ctcaggaaccgaggc

SEQ ID NO: 709325 - DNA, 15 bp, Homo sapiens
tcaggaaccgaggca

SEQ ID NO: 709326 - DNA, 15 bp, Homo sapiens
caggaaccgaggcag

SEQ ID NO: 709327 - DNA, 15 bp, Homo sapiens
aggaaccgaggcagg

SEQ ID NO: 709328 - DNA, 15 bp, Homo sapiens
ggaaccgaggcaggg

SEQ ID NO: 709329 - DNA, 15 bp, Homo sapiens
gaaccgaggcaggga

SEQ ID NO: 709330 - DNA, 15 bp, Homo sapiens
aaccgaggcagggaa

SEQ ID NO: 709331 - DNA, 15 bp, Homo sapiens
accgaggcagggaag

SEQ ID NO: 709332 - DNA, 15 bp, Homo sapiens
ccgaggcagggaagg

SEQ ID NO: 709333 - DNA, 15 bp, Homo sapiens
cgaggcagggaagga

SEQ ID NO: 709334 - DNA, 15 bp, Homo sapiens
gaggcagggaaggat

SEQ ID NO: 709335 - DNA, 15 bp, Homo sapiens
aggcagggaaggatc

SEQ ID NO: 709336 - DNA, 15 bp, Homo sapiens
ggcagggaaggatcc

SEQ ID NO: 709337 - DNA, 15 bp, Homo sapiens
gcagggaaggatccc

SEQ ID NO: 709338 - DNA, 15 bp, Homo sapiens
cagggaaggatccca

SEQ ID NO: 709339 - DNA, 15 bp, Homo sapiens
agggaaggatcccat

SEQ ID NO: 709340 - DNA, 15 bp, Homo sapiens
gggaaggatcccatg

SEQ ID NO: 709341 - DNA, 15 bp, Homo sapiens
ggaaggatcccatga

SEQ ID NO: 709342 - DNA, 15 bp, Homo sapiens
gaaggatcccatgag

SEQ ID NO: 709343 - DNA, 15 bp, Homo sapiens
aaggatcccatgagc

SEQ ID NO: 709344 - DNA, 15 bp, Homo sapiens
aggatcccatgagct

SEQ ID NO: 709345 - DNA, 15 bp, Homo sapiens
ggatcccatgagctc

SEQ ID NO: 709346 - DNA, 15 bp, Homo sapiens
gatcccatgagctcc

SEQ ID NO: 709347 - DNA, 15 bp, Homo sapiens
atcccatgagctcct

SEQ ID NO: 709348 - DNA, 15 bp, Homo sapiens
tcccatgagctcctt

SEQ ID NO: 709349 - DNA, 15 bp, Homo sapiens
cccatgagctcctta

SEQ ID NO: 709350 - DNA, 15 bp, Homo sapiens
ccatgagctccttaa

SEQ ID NO: 709351 - DNA, 15 bp, Homo sapiens
catgagctccttaag

SEQ ID NO: 709352 - DNA, 15 bp, Homo sapiens
atgagctccttaagg

SEQ ID NO: 709353 - DNA, 15 bp, Homo sapiens
tgagctccttaaggc

SEQ ID NO: 709354 - DNA, 15 bp, Homo sapiens
gagctccttaaggct

SEQ ID NO: 709355 - DNA, 15 bp, Homo sapiens
agctccttaaggctc

SEQ ID NO: 709356 - DNA, 15 bp, Homo sapiens
gctccttaaggctct

SEQ ID NO: 709357 - DNA, 15 bp, Homo sapiens
ctccttaaggctctt

SEQ ID NO: 709358 - DNA, 15 bp, Homo sapiens
tccttaaggctcttt

SEQ ID NO: 709359 - DNA, 15 bp, Homo sapiens
ccttaaggctctttt

SEQ ID NO: 709360 - DNA, 15 bp, Homo sapiens
cttaaggctcttttg

SEQ ID NO: 709361 - DNA, 15 bp, Homo sapiens
ttaaggctcttttgt

SEQ ID NO: 709362 - DNA, 15 bp, Homo sapiens
taaggctcttttgta

SEQ ID NO: 709363 - DNA, 15 bp, Homo sapiens
aaggctcttttgtaa

SEQ ID NO: 709364 - DNA, 15 bp, Homo sapiens
aggctcttttgtaag

SEQ ID NO: 709365 - DNA, 15 bp, Homo sapiens
ggctcttttgtaagg

SEQ ID NO: 709366 - DNA, 15 bp, Homo sapiens
gctcttttgtaaggt

SEQ ID NO: 709367 - DNA, 15 bp, Homo sapiens
ctcttttgtaaggtt

SEQ ID NO: 709368 - DNA, 15 bp, Homo sapiens
tcttttgtaaggttt

SEQ ID NO: 709369 - DNA, 15 bp, Homo sapiens
cttttgtaaggtttt

SEQ ID NO: 709370 - DNA, 15 bp, Homo sapiens
ttttgtaaggttttt

SEQ ID NO: 709371 - DNA, 15 bp, Homo sapiens
tttgtaaggtttttg

SEQ ID NO: 709372 - DNA, 15 bp, Homo sapiens
ttgtaaggtttttgt

SEQ ID NO: 709373 - DNA, 15 bp, Homo sapiens
tgtaaggtttttgta

SEQ ID NO: 709374 - DNA, 15 bp, Homo sapiens
gtaaggtttttgtag

SEQ ID NO: 709375 - DNA, 15 bp, Homo sapiens
taaggtttttgtagt

SEQ ID NO: 709376 - DNA, 15 bp, Homo sapiens
aaggtttttgtagtg

SEQ ID NO: 709377 - DNA, 15 bp, Homo sapiens
aggtttttgtagtga

SEQ ID NO: 709378 - DNA, 15 bp, Homo sapiens
ggtttttgtagtgat

SEQ ID NO: 709379 - DNA, 15 bp, Homo sapiens
gtttttgtagtgatt

SEQ ID NO: 709380 - DNA, 15 bp, Homo sapiens
tttttgtagtgattt

SEQ ID NO: 709381 - DNA, 15 bp, Homo sapiens
ttttgtagtgatttt

SEQ ID NO: 709382 - DNA, 15 bp, Homo sapiens
tttgtagtgattttt

SEQ ID NO: 709383 - DNA, 15 bp, Homo sapiens
ttgtagtgattttta

SEQ ID NO: 709384 - DNA, 15 bp, Homo sapiens
tgtagtgatttttat

SEQ ID NO: 709385 - DNA, 15 bp, Homo sapiens
gtagtgatttttatg

SEQ ID NO: 709386 - DNA, 15 bp, Homo sapiens
tagtgatttttatgc

SEQ ID NO: 709387 - DNA, 15 bp, Homo sapiens
agtgatttttatgcc

SEQ ID NO: 709388 - DNA, 15 bp, Homo sapiens
gtgatttttatgcca

SEQ ID NO: 709389 - DNA, 15 bp, Homo sapiens
tgatttttatgccac

SEQ ID NO: 709390 - DNA, 15 bp, Homo sapiens
gatttttatgccacc

SEQ ID NO: 709391 - DNA, 15 bp, Homo sapiens
atttttatgccacct

SEQ ID NO: 709392 - DNA, 15 bp, Homo sapiens
tttttatgccacctg

SEQ ID NO: 709393 - DNA, 15 bp, Homo sapiens
ttttatgccacctga

SEQ ID NO: 709394 - DNA, 15 bp, Homo sapiens
tttatgccacctgaa

SEQ ID NO: 709395 - DNA, 15 bp, Homo sapiens
ttatgccacctgaat

SEQ ID NO: 709396 - DNA, 15 bp, Homo sapiens
tatgccacctgaata

SEQ ID NO: 709397 - DNA, 15 bp, Homo sapiens
atgccacctgaataa

SEQ ID NO: 709398 - DNA, 15 bp, Homo sapiens
tgccacctgaataaa

SEQ ID NO: 709399 - DNA, 15 bp, Homo sapiens
gccacctgaataaag

SEQ ID NO: 709400 - DNA, 15 bp, Homo sapiens
ccacctgaataaaga

SEQ ID NO: 709401 - DNA, 15 bp, Homo sapiens
cacctgaataaagaa

SEQ ID NO: 709402 - DNA, 15 bp, Homo sapiens
acctgaataaagaat

SEQ ID NO: 709403 - DNA, 15 bp, Homo sapiens
cctgaataaagaatg

SEQ ID NO: 709404 - DNA, 15 bp, Homo sapiens
ctgaataaagaatga

SEQ ID NO: 709405 - DNA, 15 bp, Homo sapiens
tgaataaagaatgaa

SEQ ID NO: 709406 - DNA, 15 bp, Homo sapiens
gaataaagaatgaat

SEQ ID NO: 709407 - DNA, 15 bp, Homo sapiens
aataaagaatgaatg

SEQ ID NO: 709408 - DNA, 15 bp, Homo sapiens
ataaagaatgaatgg

SEQ ID NO: 709409 - DNA, 15 bp, Homo sapiens
taaagaatgaatggg

SEQ ID NO: 709410 - DNA, 15 bp, Homo sapiens
aaagaatgaatgggc

SEQ ID NO: 709411 - DNA, 15 bp, Homo sapiens
aagaatgaatgggcc

SEQ ID NO: 709412 - DNA, 15 bp, Homo sapiens
agaatgaatgggcct

SEQ ID NO: 709413 - DNA, 15 bp, Homo sapiens
gaatgaatgggcctg

SEQ ID NO: 709414 - DNA, 15 bp, Homo sapiens
aatgaatgggcctgg

SEQ ID NO: 709415 - DNA, 15 bp, Homo sapiens
atgaatgggcctggc

SEQ ID NO: 709416 - DNA, 15 bp, Homo sapiens
tgaatgggcctggct

SEQ ID NO: 709417 - DNA, 15 bp, Homo sapiens
gaatgggcctggctg

SEQ ID NO: 709418 - DNA, 15 bp, Homo sapiens
aatgggcctggctgg

SEQ ID NO: 709419 - DNA, 15 bp, Homo sapiens
atgggcctggctggt

SEQ ID NO: 709420 - DNA, 15 bp, Homo sapiens
tgggcctggctggtt

SEQ ID NO: 709421 - DNA, 15 bp, Homo sapiens
gggcctggctggttt

SEQ ID NO: 709422 - DNA, 15 bp, Homo sapiens
ggcctggctggtttg

SEQ ID NO: 709423 - DNA, 15 bp, Homo sapiens
gcctggctggtttga

SEQ ID NO: 709424 - DNA, 15 bp, Homo sapiens
cctggctggtttgat

SEQ ID NO: 709425 - DNA, 15 bp, Homo sapiens
ctggctggtttgatg

SEQ ID NO: 709426 - DNA, 15 bp, Homo sapiens
tggctggtttgatgt

SEQ ID NO: 709427 - DNA, 15 bp, Homo sapiens
ggctggtttgatgtc

SEQ ID NO: 709428 - DNA, 15 bp, Homo sapiens
gctggtttgatgtca

SEQ ID NO: 709429 - DNA, 15 bp, Homo sapiens
ctggtttgatgtcac

SEQ ID NO: 709430 - DNA, 15 bp, Homo sapiens
tggtttgatgtcacc

SEQ ID NO: 709431 - DNA, 15 bp, Homo sapiens
ggtttgatgtcaccg

SEQ ID NO: 709432 - DNA, 15 bp, Homo sapiens
gtttgatgtcaccgt

SEQ ID NO: 709433 - DNA, 15 bp, Homo sapiens
tttgatgtcaccgtt

SEQ ID NO: 709434 - DNA, 15 bp, Homo sapiens
ttgatgtcaccgttc

SEQ ID NO: 709435 - DNA, 15 bp, Homo sapiens
tgatgtcaccgttct

SEQ ID NO: 709436 - DNA, 15 bp, Homo sapiens
gatgtcaccgttctg

SEQ ID NO: 709437 - DNA, 15 bp, Homo sapiens
atgtcaccgttctgg

SEQ ID NO: 709438 - DNA, 15 bp, Homo sapiens
tgtcaccgttctggg

SEQ ID NO: 709439 - DNA, 15 bp, Homo sapiens
gtcaccgttctgggc

SEQ ID NO: 709440 - DNA, 15 bp, Homo sapiens
tcaccgttctgggca

SEQ ID NO: 709441 - DNA, 15 bp, Homo sapiens
caccgttctgggcat

SEQ ID NO: 709442 - DNA, 15 bp, Homo sapiens
accgttctgggcatg

SEQ ID NO: 709443 - DNA, 15 bp, Homo sapiens
ccgttctgggcatgg

SEQ ID NO: 709444 - DNA, 15 bp, Homo sapiens
cgttctgggcatggg

SEQ ID NO: 709445 - DNA, 15 bp, Homo sapiens
gttctgggcatgggt

SEQ ID NO: 709446 - DNA, 15 bp, Homo sapiens
ttctgggcatgggtg

SEQ ID NO: 709447 - DNA, 15 bp, Homo sapiens
tctgggcatgggtgg

SEQ ID NO: 709448 - DNA, 15 bp, Homo sapiens
ctgggcatgggtggg

SEQ ID NO: 709449 - DNA, 15 bp, Homo sapiens
tgggcatgggtgggg

SEQ ID NO: 709450 - DNA, 15 bp, Homo sapiens
gggcatgggtgggga

SEQ ID NO: 709451 - DNA, 15 bp, Homo sapiens
ggcatgggtggggac

SEQ ID NO: 709452 - DNA, 15 bp, Homo sapiens
gcatgggtggggaca

SEQ ID NO: 709453 - DNA, 15 bp, Homo sapiens
catgggtggggacaa

SEQ ID NO: 709454 - DNA, 15 bp, Homo sapiens
atgggtggggacaag

SEQ ID NO: 709455 - DNA, 15 bp, Homo sapiens
tgggtggggacaagt

SEQ ID NO: 709456 - DNA, 15 bp, Homo sapiens
gggtggggacaagtg

SEQ ID NO: 709457 - DNA, 15 bp, Homo sapiens
ggtggggacaagtga

SEQ ID NO: 709458 - DNA, 15 bp, Homo sapiens
gtggggacaagtgag

SEQ ID NO: 709459 - DNA, 15 bp, Homo sapiens
tggggacaagtgagg

SEQ ID NO: 709460 - DNA, 15 bp, Homo sapiens
ggggacaagtgagga

SEQ ID NO: 709461 - DNA, 15 bp, Homo sapiens
gggacaagtgaggat

SEQ ID NO: 709462 - DNA, 15 bp, Homo sapiens
ggacaagtgaggatg

SEQ ID NO: 709463 - DNA, 15 bp, Homo sapiens
gacaagtgaggatgg

SEQ ID NO: 709464 - DNA, 15 bp, Homo sapiens
acaagtgaggatggt

SEQ ID NO: 709465 - DNA, 15 bp, Homo sapiens
caagtgaggatggtg

SEQ ID NO: 709466 - DNA, 15 bp, Homo sapiens
aagtgaggatggtgg

SEQ ID NO: 709467 - DNA, 15 bp, Homo sapiens
agtgaggatggtggg

SEQ ID NO: 709468 - DNA, 15 bp, Homo sapiens
gtgaggatggtgggg

SEQ ID NO: 709469 - DNA, 15 bp, Homo sapiens
tgaggatggtgggga

SEQ ID NO: 709470 - DNA, 15 bp, Homo sapiens
gaggatggtggggaa

SEQ ID NO: 709471 - DNA, 15 bp, Homo sapiens
aggatggtggggaag

SEQ ID NO: 709472 - DNA, 15 bp, Homo sapiens
ggatggtggggaagg

SEQ ID NO: 709473 - DNA, 15 bp, Homo sapiens
gatggtggggaaggc

SEQ ID NO: 709474 - DNA, 15 bp, Homo sapiens
atggtggggaaggca

SEQ ID NO: 709475 - DNA, 15 bp, Homo sapiens
tggtggggaaggcag

SEQ ID NO: 709476 - DNA, 15 bp, Homo sapiens
ggtggggaaggcagg

SEQ ID NO: 709477 - DNA, 15 bp, Homo sapiens
gtggggaaggcaggg

SEQ ID NO: 709478 - DNA, 15 bp, Homo sapiens
tggggaaggcaggga

SEQ ID NO: 709479 - DNA, 15 bp, Homo sapiens
ggggaaggcagggag

SEQ ID NO: 709480 - DNA, 15 bp, Homo sapiens
gggaaggcagggagg

SEQ ID NO: 709481 - DNA, 15 bp, Homo sapiens
ggaaggcagggaggc

SEQ ID NO: 709482 - DNA, 15 bp, Homo sapiens
gaaggcagggaggcg

SEQ ID NO: 709483 - DNA, 15 bp, Homo sapiens
aaggcagggaggcgg

SEQ ID NO: 709484 - DNA, 15 bp, Homo sapiens
aggcagggaggcggc

SEQ ID NO: 709485 - DNA, 15 bp, Homo sapiens
ggcagggaggcggcc

SEQ ID NO: 709486 - DNA, 15 bp, Homo sapiens
gcagggaggcggccg

SEQ ID NO: 709487 - DNA, 15 bp, Homo sapiens
cagggaggcggccgc

SEQ ID NO: 709488 - DNA, 15 bp, Homo sapiens
agggaggcggccgca

SEQ ID NO: 709489 - DNA, 15 bp, Homo sapiens
gggaggcggccgcag

SEQ ID NO: 709490 - DNA, 15 bp, Homo sapiens
ggaggcggccgcagg

SEQ ID NO: 709491 - DNA, 15 bp, Homo sapiens
gaggcggccgcaggg

SEQ ID NO: 709492 - DNA, 15 bp, Homo sapiens
aggcggccgcagggt

SEQ ID NO: 709493 - DNA, 15 bp, Homo sapiens
ggcggccgcagggtg

SEQ ID NO: 709494 - DNA, 15 bp, Homo sapiens
gcggccgcagggtgg

SEQ ID NO: 709495 - DNA, 15 bp, Homo sapiens
cggccgcagggtgga

SEQ ID NO: 709496 - DNA, 15 bp, Homo sapiens
ggccgcagggtggac

SEQ ID NO: 709497 - DNA, 15 bp, Homo sapiens
gccgcagggtggact

SEQ ID NO: 709498 - DNA, 15 bp, Homo sapiens
ccgcagggtggactg

SEQ ID NO: 709499 - DNA, 15 bp, Homo sapiens
cgcagggtggactgt

SEQ ID NO: 709500 - DNA, 15 bp, Homo sapiens
gcagggtggactgtg

SEQ ID NO: 709501 - DNA, 15 bp, Homo sapiens
cagggtggactgtgc

SEQ ID NO: 709502 - DNA, 15 bp, Homo sapiens
agggtggactgtgct

SEQ ID NO: 709503 - DNA, 15 bp, Homo sapiens
gggtggactgtgctg

SEQ ID NO: 709504 - DNA, 15 bp, Homo sapiens
ggtggactgtgctga

SEQ ID NO: 709505 - DNA, 15 bp, Homo sapiens
gtggactgtgctgag

SEQ ID NO: 709506 - DNA, 15 bp, Homo sapiens
tggactgtgctgagg

SEQ ID NO: 709507 - DNA, 15 bp, Homo sapiens
ggactgtgctgagga

SEQ ID NO: 709508 - DNA, 15 bp, Homo sapiens
gactgtgctgaggaa

SEQ ID NO: 709509 - DNA, 15 bp, Homo sapiens
actgtgctgaggaac

SEQ ID NO: 709510 - DNA, 15 bp, Homo sapiens
ctgtgctgaggaacc

SEQ ID NO: 709511 - DNA, 15 bp, Homo sapiens
tgtgctgaggaaccc

SEQ ID NO: 709512 - DNA, 15 bp, Homo sapiens
gtgctgaggaaccct

SEQ ID NO: 709513 - DNA, 15 bp, Homo sapiens
tgctgaggaaccctg

SEQ ID NO: 709514 - DNA, 15 bp, Homo sapiens
gctgaggaaccctgg

SEQ ID NO: 709515 - DNA, 15 bp, Homo sapiens
ctgaggaaccctggg

SEQ ID NO: 709516 - DNA, 15 bp, Homo sapiens
tgaggaaccctgggc

SEQ ID NO: 709517 - DNA, 15 bp, Homo sapiens
gaggaaccctgggcc

SEQ ID NO: 709518 - DNA, 15 bp, Homo sapiens
aggaaccctgggccc

SEQ ID NO: 709519 - DNA, 15 bp, Homo sapiens
ggaaccctgggccca

SEQ ID NO: 709520 - DNA, 15 bp, Homo sapiens
gaaccctgggcccag

SEQ ID NO: 709521 - DNA, 15 bp, Homo sapiens
aaccctgggcccagc

SEQ ID NO: 709522 - DNA, 15 bp, Homo sapiens
accctgggcccagca

SEQ ID NO: 709523 - DNA, 15 bp, Homo sapiens
ccctgggcccagcag

SEQ ID NO: 709524 - DNA, 15 bp, Homo sapiens
cctgggcccagcagg

SEQ ID NO: 709525 - DNA, 15 bp, Homo sapiens
ctgggcccagcaggg

SEQ ID NO: 709526 - DNA, 15 bp, Homo sapiens
tgggcccagcagggg

SEQ ID NO: 709527 - DNA, 15 bp, Homo sapiens
gggcccagcaggggt

SEQ ID NO: 709528 - DNA, 15 bp, Homo sapiens
ggcccagcaggggtg

SEQ ID NO: 709529 - DNA, 15 bp, Homo sapiens
gcccagcaggggtgg

SEQ ID NO: 709530 - DNA, 15 bp, Homo sapiens
cccagcaggggtggc

SEQ ID NO: 709531 - DNA, 15 bp, Homo sapiens
ccagcaggggtggca

SEQ ID NO: 709532 - DNA, 15 bp, Homo sapiens
cagcaggggtggcag

SEQ ID NO: 709533 - DNA, 15 bp, Homo sapiens
agcaggggtggcagc

SEQ ID NO: 709534 - DNA, 15 bp, Homo sapiens
gcaggggtggcagcc

SEQ ID NO: 709535 - DNA, 15 bp, Homo sapiens
caggggtggcagccc

SEQ ID NO: 709536 - DNA, 15 bp, Homo sapiens
aggggtggcagcccg

SEQ ID NO: 709537 - DNA, 15 bp, Homo sapiens
ggggtggcagcccgc

SEQ ID NO: 709538 - DNA, 15 bp, Homo sapiens
gggtggcagcccgcg

SEQ ID NO: 709539 - DNA, 15 bp, Homo sapiens
ggtggcagcccgcgc

SEQ ID NO: 709540 - DNA, 15 bp, Homo sapiens
gtggcagcccgcgca

SEQ ID NO: 709541 - DNA, 15 bp, Homo sapiens
tggcagcccgcgcag

SEQ ID NO: 709542 - DNA, 15 bp, Homo sapiens
ggcagcccgcgcagt

SEQ ID NO: 709543 - DNA, 15 bp, Homo sapiens
gcagcccgcgcagtg

SEQ ID NO: 709544 - DNA, 15 bp, Homo sapiens
cagcccgcgcagtgc

SEQ ID NO: 709545 - DNA, 15 bp, Homo sapiens
agcccgcgcagtgcc

SEQ ID NO: 709546 - DNA, 15 bp, Homo sapiens
gcccgcgcagtgcca

SEQ ID NO: 709547 - DNA, 15 bp, Homo sapiens
cccgcgcagtgccac

SEQ ID NO: 709548 - DNA, 15 bp, Homo sapiens
ccgcgcagtgccacg

SEQ ID NO: 709549 - DNA, 15 bp, Homo sapiens
cgcgcagtgccacgt

SEQ ID NO: 709550 - DNA, 15 bp, Homo sapiens
gcgcagtgccacgtt

SEQ ID NO: 709551 - DNA, 15 bp, Homo sapiens
cgcagtgccacgttt

SEQ ID NO: 709552 - DNA, 15 bp, Homo sapiens
gcagtgccacgtttg

SEQ ID NO: 709553 - DNA, 15 bp, Homo sapiens
cagtgccacgtttgg

SEQ ID NO: 709554 - DNA, 15 bp, Homo sapiens
agtgccacgtttggc

SEQ ID NO: 709555 - DNA, 15 bp, Homo sapiens
gtgccacgtttggcc

SEQ ID NO: 709556 - DNA, 15 bp, Homo sapiens
tgccacgtttggcct

SEQ ID NO: 709557 - DNA, 15 bp, Homo sapiens
gccacgtttggcctc

SEQ ID NO: 709558 - DNA, 15 bp, Homo sapiens
ccacgtttggcctct

SEQ ID NO: 709559 - DNA, 15 bp, Homo sapiens
cacgtttggcctctg

SEQ ID NO: 709560 - DNA, 15 bp, Homo sapiens
acgtttggcctctgg

SEQ ID NO: 709561 - DNA, 15 bp, Homo sapiens
cgtttggcctctggc

SEQ ID NO: 709562 - DNA, 15 bp, Homo sapiens
gtttggcctctggcc

SEQ ID NO: 709563 - DNA, 15 bp, Homo sapiens
tttggcctctggccg

SEQ ID NO: 709564 - DNA, 15 bp, Homo sapiens
ttggcctctggccgc

SEQ ID NO: 709565 - DNA, 15 bp, Homo sapiens
tggcctctggccgct

SEQ ID NO: 709566 - DNA, 15 bp, Homo sapiens
ggcctctggccgctc

SEQ ID NO: 709567 - DNA, 15 bp, Homo sapiens
gcctctggccgctcg

SEQ ID NO: 709568 - DNA, 15 bp, Homo sapiens
cctctggccgctcgc

SEQ ID NO: 709569 - DNA, 15 bp, Homo sapiens
ctctggccgctcgcc

SEQ ID NO: 709570 - DNA, 15 bp, Homo sapiens
tctggccgctcgcca

SEQ ID NO: 709571 - DNA, 15 bp, Homo sapiens
ctggccgctcgccag

SEQ ID NO: 709572 - DNA, 15 bp, Homo sapiens
tggccgctcgccagg

SEQ ID NO: 709573 - DNA, 15 bp, Homo sapiens
ggccgctcgccaggc

SEQ ID NO: 709574 - DNA, 15 bp, Homo sapiens
gccgctcgccaggca

SEQ ID NO: 709575 - DNA, 15 bp, Homo sapiens
ccgctcgccaggcat

SEQ ID NO: 709576 - DNA, 15 bp, Homo sapiens
cgctcgccaggcatc

SEQ ID NO: 709577 - DNA, 15 bp, Homo sapiens
gctcgccaggcatcc

SEQ ID NO: 709578 - DNA, 15 bp, Homo sapiens
ctcgccaggcatcct

SEQ ID NO: 709579 - DNA, 15 bp, Homo sapiens
tcgccaggcatcctc

SEQ ID NO: 709580 - DNA, 15 bp, Homo sapiens
cgccaggcatcctcc

SEQ ID NO: 709581 - DNA, 15 bp, Homo sapiens
gccaggcatcctcca

SEQ ID NO: 709582 - DNA, 15 bp, Homo sapiens
ccaggcatcctccac

SEQ ID NO: 709583 - DNA, 15 bp, Homo sapiens
caggcatcctccacc

SEQ ID NO: 709584 - DNA, 15 bp, Homo sapiens
aggcatcctccaccc

SEQ ID NO: 709585 - DNA, 15 bp, Homo sapiens
ggcatcctccacccc

SEQ ID NO: 709586 - DNA, 15 bp, Homo sapiens
gcatcctccaccccg

SEQ ID NO: 709587 - DNA, 15 bp, Homo sapiens
catcctccaccccgt

SEQ ID NO: 709588 - DNA, 15 bp, Homo sapiens
atcctccaccccgtg

SEQ ID NO: 709589 - DNA, 15 bp, Homo sapiens
tcctccaccccgtgg

SEQ ID NO: 709590 - DNA, 15 bp, Homo sapiens
cctccaccccgtggt

SEQ ID NO: 709591 - DNA, 15 bp, Homo sapiens
ctccaccccgtggtc

SEQ ID NO: 709592 - DNA, 15 bp, Homo sapiens
tccaccccgtggtcc

SEQ ID NO: 709593 - DNA, 15 bp, Homo sapiens
ccaccccgtggtccc

SEQ ID NO: 709594 - DNA, 15 bp, Homo sapiens
caccccgtggtcccc

SEQ ID NO: 709595 - DNA, 15 bp, Homo sapiens
accccgtggtcccct

SEQ ID NO: 709596 - DNA, 15 bp, Homo sapiens
ccccgtggtcccctc

SEQ ID NO: 709597 - DNA, 15 bp, Homo sapiens
cccgtggtcccctct

SEQ ID NO: 709598 - DNA, 15 bp, Homo sapiens
ccgtggtcccctctg

SEQ ID NO: 709599 - DNA, 15 bp, Homo sapiens
cgtggtcccctctga

SEQ ID NO: 709600 - DNA, 15 bp, Homo sapiens
gtggtcccctctgac

SEQ ID NO: 709601 - DNA, 15 bp, Homo sapiens
tggtcccctctgacc

SEQ ID NO: 709602 - DNA, 15 bp, Homo sapiens
ggtcccctctgacct

SEQ ID NO: 709603 - DNA, 15 bp, Homo sapiens
gtcccctctgacctc

SEQ ID NO: 709604 - DNA, 15 bp, Homo sapiens
tcccctctgacctcg

SEQ ID NO: 709605 - DNA, 15 bp, Homo sapiens
cccctctgacctcgc

SEQ ID NO: 709606 - DNA, 15 bp, Homo sapiens
ccctctgacctcgcc

SEQ ID NO: 709607 - DNA, 15 bp, Homo sapiens
cctctgacctcgcca

SEQ ID NO: 709608 - DNA, 15 bp, Homo sapiens
ctctgacctcgccag

SEQ ID NO: 709609 - DNA, 15 bp, Homo sapiens
tctgacctcgccagc

SEQ ID NO: 709610 - DNA, 15 bp, Homo sapiens
ctgacctcgccagcc

SEQ ID NO: 709611 - DNA, 15 bp, Homo sapiens
tgacctcgccagccc

SEQ ID NO: 709612 - DNA, 15 bp, Homo sapiens
gacctcgccagccct

SEQ ID NO: 709613 - DNA, 15 bp, Homo sapiens
acctcgccagccctc

SEQ ID NO: 709614 - DNA, 15 bp, Homo sapiens
cctcgccagccctcc

SEQ ID NO: 709615 - DNA, 15 bp, Homo sapiens
ctcgccagccctccc

SEQ ID NO: 709616 - DNA, 15 bp, Homo sapiens
tcgccagccctcccc

SEQ ID NO: 709617 - DNA, 15 bp, Homo sapiens
cgccagccctccccc

SEQ ID NO: 709618 - DNA, 15 bp, Homo sapiens
gccagccctcccccg

SEQ ID NO: 709619 - DNA, 15 bp, Homo sapiens
ccagccctcccccgg

SEQ ID NO: 709620 - DNA, 15 bp, Homo sapiens
cagccctcccccggg

SEQ ID NO: 709621 - DNA, 15 bp, Homo sapiens
agccctcccccggga

SEQ ID NO: 709622 - DNA, 15 bp, Homo sapiens
gccctcccccgggac

SEQ ID NO: 709623 - DNA, 15 bp, Homo sapiens
ccctcccccgggaca

SEQ ID NO: 709624 - DNA, 15 bp, Homo sapiens
cctcccccgggacac

SEQ ID NO: 709625 - DNA, 15 bp, Homo sapiens
ctcccccgggacacc

SEQ ID NO: 709626 - DNA, 15 bp, Homo sapiens
tcccccgggacacct

SEQ ID NO: 709627 - DNA, 15 bp, Homo sapiens
cccccgggacacctc

SEQ ID NO: 709628 - DNA, 15 bp, Homo sapiens
ccccgggacacctcc

SEQ ID NO: 709629 - DNA, 15 bp, Homo sapiens
cccgggacacctcca

SEQ ID NO: 709630 - DNA, 15 bp, Homo sapiens
ccgggacacctccac

SEQ ID NO: 709631 - DNA, 15 bp, Homo sapiens
cgggacacctccacg

SEQ ID NO: 709632 - DNA, 15 bp, Homo sapiens
gggacacctccacgc

SEQ ID NO: 709633 - DNA, 15 bp, Homo sapiens
ggacacctccacgcc

SEQ ID NO: 709634 - DNA, 15 bp, Homo sapiens
gacacctccacgcca

SEQ ID NO: 709635 - DNA, 15 bp, Homo sapiens
acacctccacgccag

SEQ ID NO: 709636 - DNA, 15 bp, Homo sapiens
cacctccacgccagc

SEQ ID NO: 709637 - DNA, 15 bp, Homo sapiens
acctccacgccagcc

SEQ ID NO: 709638 - DNA, 15 bp, Homo sapiens
cctccacgccagcct

SEQ ID NO: 709639 - DNA, 15 bp, Homo sapiens
ctccacgccagcctg

SEQ ID NO: 709640 - DNA, 15 bp, Homo sapiens
tccacgccagcctgg

SEQ ID NO: 709641 - DNA, 15 bp, Homo sapiens
ccacgccagcctggc

SEQ ID NO: 709642 - DNA, 15 bp, Homo sapiens
cacgccagcctggct

SEQ ID NO: 709643 - DNA, 15 bp, Homo sapiens
acgccagcctggctc

SEQ ID NO: 709644 - DNA, 15 bp, Homo sapiens
cgccagcctggctct

SEQ ID NO: 709645 - DNA, 15 bp, Homo sapiens
gccagcctggctctg

SEQ ID NO: 709646 - DNA, 15 bp, Homo sapiens
ccagcctggctctgc

SEQ ID NO: 709647 - DNA, 15 bp, Homo sapiens
cagcctggctctgct

SEQ ID NO: 709648 - DNA, 15 bp, Homo sapiens
agcctggctctgctc

SEQ ID NO: 709649 - DNA, 15 bp, Homo sapiens
gcctggctctgctcc

SEQ ID NO: 709650 - DNA, 15 bp, Homo sapiens
cctggctctgctcct

SEQ ID NO: 709651 - DNA, 15 bp, Homo sapiens
ctggctctgctcctg

SEQ ID NO: 709652 - DNA, 15 bp, Homo sapiens
tggctctgctcctgg

SEQ ID NO: 709653 - DNA, 15 bp, Homo sapiens
ggctctgctcctggc

SEQ ID NO: 709654 - DNA, 15 bp, Homo sapiens
gctctgctcctggct

SEQ ID NO: 709655 - DNA, 15 bp, Homo sapiens
ctctgctcctggctt

SEQ ID NO: 709656 - DNA, 15 bp, Homo sapiens
tctgctcctggcttc

SEQ ID NO: 709657 - DNA, 15 bp, Homo sapiens
ctgctcctggcttct

SEQ ID NO: 709658 - DNA, 15 bp, Homo sapiens
tgctcctggcttctt

SEQ ID NO: 709659 - DNA, 15 bp, Homo sapiens
gctcctggcttcttc

SEQ ID NO: 709660 - DNA, 15 bp, Homo sapiens
ctcctggcttcttct

SEQ ID NO: 709661 - DNA, 15 bp, Homo sapiens
tcctggcttcttctt

SEQ ID NO: 709662 - DNA, 15 bp, Homo sapiens
cctggcttcttcttc

SEQ ID NO: 709663 - DNA, 15 bp, Homo sapiens
ctggcttcttcttct

SEQ ID NO: 709664 - DNA, 15 bp, Homo sapiens
tggcttcttcttctc

SEQ ID NO: 709665 - DNA, 15 bp, Homo sapiens
ggcttcttcttctct

SEQ ID NO: 709666 - DNA, 15 bp, Homo sapiens
gcttcttcttctctc

SEQ ID NO: 709667 - DNA, 15 bp, Homo sapiens
cttcttcttctctct

SEQ ID NO: 709668 - DNA, 15 bp, Homo sapiens
ttcttcttctctcta

SEQ ID NO: 709669 - DNA, 15 bp, Homo sapiens
tcttcttctctctat

SEQ ID NO: 709670 - DNA, 15 bp, Homo sapiens
cttcttctctctatg

SEQ ID NO: 709671 - DNA, 15 bp, Homo sapiens
ttcttctctctatgc

SEQ ID NO: 709672 - DNA, 15 bp, Homo sapiens
tcttctctctatgcc

SEQ ID NO: 709673 - DNA, 15 bp, Homo sapiens
cttctctctatgcct

SEQ ID NO: 709674 - DNA, 15 bp, Homo sapiens
ttctctctatgcctc

SEQ ID NO: 709675 - DNA, 15 bp, Homo sapiens
tctctctatgcctca

SEQ ID NO: 709676 - DNA, 15 bp, Homo sapiens
ctctctatgcctcag

SEQ ID NO: 709677 - DNA, 15 bp, Homo sapiens
tctctatgcctcagg

SEQ ID NO: 709678 - DNA, 15 bp, Homo sapiens
ctctatgcctcaggc

SEQ ID NO: 709679 - DNA, 15 bp, Homo sapiens
tctatgcctcaggca

SEQ ID NO: 709680 - DNA, 15 bp, Homo sapiens
ctatgcctcaggcag

SEQ ID NO: 709681 - DNA, 15 bp, Homo sapiens
tatgcctcaggcagc

SEQ ID NO: 709682 - DNA, 15 bp, Homo sapiens
atgcctcaggcagcc

SEQ ID NO: 709683 - DNA, 15 bp, Homo sapiens
tgcctcaggcagccg

SEQ ID NO: 709684 - DNA, 15 bp, Homo sapiens
gcctcaggcagccgg

SEQ ID NO: 709685 - DNA, 15 bp, Homo sapiens
cctcaggcagccggc

SEQ ID NO: 709686 - DNA, 15 bp, Homo sapiens
ctcaggcagccggca

SEQ ID NO: 709687 - DNA, 15 bp, Homo sapiens
tcaggcagccggcaa

SEQ ID NO: 709688 - DNA, 15 bp, Homo sapiens
caggcagccggcaac

SEQ ID NO: 709689 - DNA, 15 bp, Homo sapiens
aggcagccggcaaca

SEQ ID NO: 709690 - DNA, 15 bp, Homo sapiens
ggcagccggcaacag

SEQ ID NO: 709691 - DNA, 15 bp, Homo sapiens
gcagccggcaacagg

SEQ ID NO: 709692 - DNA, 15 bp, Homo sapiens
cagccggcaacaggg

SEQ ID NO: 709693 - DNA, 15 bp, Homo sapiens
agccggcaacagggc

SEQ ID NO: 709694 - DNA, 15 bp, Homo sapiens
gccggcaacagggcg

SEQ ID NO: 709695 - DNA, 15 bp, Homo sapiens
ccggcaacagggcgg

SEQ ID NO: 709696 - DNA, 15 bp, Homo sapiens
cggcaacagggcggc

SEQ ID NO: 709697 - DNA, 15 bp, Homo sapiens
ggcaacagggcggct

SEQ ID NO: 709698 - DNA, 15 bp, Homo sapiens
gcaacagggcggctc

SEQ ID NO: 709699 - DNA, 15 bp, Homo sapiens
caacagggcggctca

SEQ ID NO: 709700 - DNA, 15 bp, Homo sapiens
aacagggcggctcag

SEQ ID NO: 709701 - DNA, 15 bp, Homo sapiens
acagggcggctcaga

SEQ ID NO: 709702 - DNA, 15 bp, Homo sapiens
cagggcggctcagaa

SEQ ID NO: 709703 - DNA, 15 bp, Homo sapiens
agggcggctcagaac

SEQ ID NO: 709704 - DNA, 15 bp, Homo sapiens
gggcggctcagaaca

SEQ ID NO: 709705 - DNA, 15 bp, Homo sapiens
ggcggctcagaacag

SEQ ID NO: 709706 - DNA, 15 bp, Homo sapiens
gcggctcagaacagc

SEQ ID NO: 709707 - DNA, 15 bp, Homo sapiens
cggctcagaacagcg

SEQ ID NO: 709708 - DNA, 15 bp, Homo sapiens
ggctcagaacagcgc

SEQ ID NO: 709709 - DNA, 15 bp, Homo sapiens
gctcagaacagcgcc

SEQ ID NO: 709710 - DNA, 15 bp, Homo sapiens
ctcagaacagcgcca

SEQ ID NO: 709711 - DNA, 15 bp, Homo sapiens
tcagaacagcgccag

SEQ ID NO: 709712 - DNA, 15 bp, Homo sapiens
cagaacagcgccagc

SEQ ID NO: 709713 - DNA, 15 bp, Homo sapiens
agaacagcgccagcc

SEQ ID NO: 709714 - DNA, 15 bp, Homo sapiens
gaacagcgccagcct

SEQ ID NO: 709715 - DNA, 15 bp, Homo sapiens
aacagcgccagcctc

SEQ ID NO: 709716 - DNA, 15 bp, Homo sapiens
acagcgccagcctcc

SEQ ID NO: 709717 - DNA, 15 bp, Homo sapiens
cagcgccagcctcct

SEQ ID NO: 709718 - DNA, 15 bp, Homo sapiens
agcgccagcctcctg

SEQ ID NO: 709719 - DNA, 15 bp, Homo sapiens
gcgccagcctcctgg

SEQ ID NO: 709720 - DNA, 15 bp, Homo sapiens
cgccagcctcctggt

SEQ ID NO: 709721 - DNA, 15 bp, Homo sapiens
gccagcctcctggtt

SEQ ID NO: 709722 - DNA, 15 bp, Homo sapiens
ccagcctcctggttt

SEQ ID NO: 709723 - DNA, 15 bp, Homo sapiens
cagcctcctggtttg

SEQ ID NO: 709724 - DNA, 15 bp, Homo sapiens
agcctcctggtttgg

SEQ ID NO: 709725 - DNA, 15 bp, Homo sapiens
gcctcctggtttggg

SEQ ID NO: 709726 - DNA, 15 bp, Homo sapiens
cctcctggtttggga

SEQ ID NO: 709727 - DNA, 15 bp, Homo sapiens
ctcctggtttgggag

SEQ ID NO: 709728 - DNA, 15 bp, Homo sapiens
tcctggtttgggaga

SEQ ID NO: 709729 - DNA, 15 bp, Homo sapiens
cctggtttgggagaa

SEQ ID NO: 709730 - DNA, 15 bp, Homo sapiens
ctggtttgggagaag

SEQ ID NO: 709731 - DNA, 15 bp, Homo sapiens
tggtttgggagaaga

SEQ ID NO: 709732 - DNA, 15 bp, Homo sapiens
ggtttgggagaagaa

SEQ ID NO: 709733 - DNA, 15 bp, Homo sapiens
gtttgggagaagaac

SEQ ID NO: 709734 - DNA, 15 bp, Homo sapiens
tttgggagaagaact

SEQ ID NO: 709735 - DNA, 15 bp, Homo sapiens
ttgggagaagaactg

SEQ ID NO: 709736 - DNA, 15 bp, Homo sapiens
tgggagaagaactgg

SEQ ID NO: 709737 - DNA, 15 bp, Homo sapiens
gggagaagaactggc

SEQ ID NO: 709738 - DNA, 15 bp, Homo sapiens
ggagaagaactggca

SEQ ID NO: 709739 - DNA, 15 bp, Homo sapiens
gagaagaactggcaa

SEQ ID NO: 709740 - DNA, 15 bp, Homo sapiens
agaagaactggcaat

SEQ ID NO: 709741 - DNA, 15 bp, Homo sapiens
gaagaactggcaatt

SEQ ID NO: 709742 - DNA, 15 bp, Homo sapiens
aagaactggcaatta

SEQ ID NO: 709743 - DNA, 15 bp, Homo sapiens
agaactggcaattag

SEQ ID NO: 709744 - DNA, 15 bp, Homo sapiens
gaactggcaattagg

SEQ ID NO: 709745 - DNA, 15 bp, Homo sapiens
aactggcaattaggg

SEQ ID NO: 709746 - DNA, 15 bp, Homo sapiens
actggcaattaggga

SEQ ID NO: 709747 - DNA, 15 bp, Homo sapiens
ctggcaattagggag

SEQ ID NO: 709748 - DNA, 15 bp, Homo sapiens
tggcaattagggagt

SEQ ID NO: 709749 - DNA, 15 bp, Homo sapiens
ggcaattagggagtt

SEQ ID NO: 709750 - DNA, 15 bp, Homo sapiens
gcaattagggagttt

SEQ ID NO: 709751 - DNA, 15 bp, Homo sapiens
caattagggagtttg

SEQ ID NO: 709752 - DNA, 15 bp, Homo sapiens
aattagggagtttgt

SEQ ID NO: 709753 - DNA, 15 bp, Homo sapiens
attagggagtttgtg

SEQ ID NO: 709754 - DNA, 15 bp, Homo sapiens
ttagggagtttgtgg

SEQ ID NO: 709755 - DNA, 15 bp, Homo sapiens
tagggagtttgtgga

SEQ ID NO: 709756 - DNA, 15 bp, Homo sapiens
agggagtttgtggag

SEQ ID NO: 709757 - DNA, 15 bp, Homo sapiens
gggagtttgtggagc

SEQ ID NO: 709758 - DNA, 15 bp, Homo sapiens
ggagtttgtggagct

SEQ ID NO: 709759 - DNA, 15 bp, Homo sapiens
gagtttgtggagctt

SEQ ID NO: 709760 - DNA, 15 bp, Homo sapiens
agtttgtggagcttc

SEQ ID NO: 709761 - DNA, 15 bp, Homo sapiens
gtttgtggagcttct

SEQ ID NO: 709762 - DNA, 15 bp, Homo sapiens
tttgtggagcttcta

SEQ ID NO: 709763 - DNA, 15 bp, Homo sapiens
ttgtggagcttctaa

SEQ ID NO: 709764 - DNA, 15 bp, Homo sapiens
tgtggagcttctaat

SEQ ID NO: 709765 - DNA, 15 bp, Homo sapiens
gtggagcttctaatt

SEQ ID NO: 709766 - DNA, 15 bp, Homo sapiens
tggagcttctaatta

SEQ ID NO: 709767 - DNA, 15 bp, Homo sapiens
ggagcttctaattac

SEQ ID NO: 709768 - DNA, 15 bp, Homo sapiens
gagcttctaattaca

SEQ ID NO: 709769 - DNA, 15 bp, Homo sapiens
agcttctaattacac

SEQ ID NO: 709770 - DNA, 15 bp, Homo sapiens
gcttctaattacaca

SEQ ID NO: 709771 - DNA, 15 bp, Homo sapiens
cttctaattacacac

SEQ ID NO: 709772 - DNA, 15 bp, Homo sapiens
ttctaattacacacc

SEQ ID NO: 709773 - DNA, 15 bp, Homo sapiens
tctaattacacacca

SEQ ID NO: 709774 - DNA, 15 bp, Homo sapiens
ctaattacacaccag

SEQ ID NO: 709775 - DNA, 15 bp, Homo sapiens
taattacacaccagc

SEQ ID NO: 709776 - DNA, 15 bp, Homo sapiens
aattacacaccagcc

SEQ ID NO: 709777 - DNA, 15 bp, Homo sapiens
attacacaccagccc

SEQ ID NO: 709778 - DNA, 15 bp, Homo sapiens
ttacacaccagcccc

SEQ ID NO: 709779 - DNA, 15 bp, Homo sapiens
tacacaccagcccct

SEQ ID NO: 709780 - DNA, 15 bp, Homo sapiens
acacaccagcccctc

SEQ ID NO: 709781 - DNA, 15 bp, Homo sapiens
cacaccagcccctct

SEQ ID NO: 709782 - DNA, 15 bp, Homo sapiens
acaccagcccctctg

SEQ ID NO: 709783 - DNA, 15 bp, Homo sapiens
caccagcccctctgc

SEQ ID NO: 709784 - DNA, 15 bp, Homo sapiens
accagcccctctgcc

SEQ ID NO: 709785 - DNA, 15 bp, Homo sapiens
ccagcccctctgcca

SEQ ID NO: 709786 - DNA, 15 bp, Homo sapiens
cagcccctctgccag

SEQ ID NO: 709787 - DNA, 15 bp, Homo sapiens
agcccctctgccagg

SEQ ID NO: 709788 - DNA, 15 bp, Homo sapiens
gcccctctgccagga

SEQ ID NO: 709789 - DNA, 15 bp, Homo sapiens
cccctctgccaggag

SEQ ID NO: 709790 - DNA, 15 bp, Homo sapiens
ccctctgccaggagc

SEQ ID NO: 709791 - DNA, 15 bp, Homo sapiens
cctctgccaggagct

SEQ ID NO: 709792 - DNA, 15 bp, Homo sapiens
ctctgccaggagctg

SEQ ID NO: 709793 - DNA, 15 bp, Homo sapiens
tctgccaggagctgg

SEQ ID NO: 709794 - DNA, 15 bp, Homo sapiens
ctgccaggagctggt

SEQ ID NO: 709795 - DNA, 15 bp, Homo sapiens
tgccaggagctggtg

SEQ ID NO: 709796 - DNA, 15 bp, Homo sapiens
gccaggagctggtgc

SEQ ID NO: 709797 - DNA, 15 bp, Homo sapiens
ccaggagctggtgcc

SEQ ID NO: 709798 - DNA, 15 bp, Homo sapiens
caggagctggtgccc

SEQ ID NO: 709799 - DNA, 15 bp, Homo sapiens
aggagctggtgcccg

SEQ ID NO: 709800 - DNA, 15 bp, Homo sapiens
ggagctggtgcccgc

SEQ ID NO: 709801 - DNA, 15 bp, Homo sapiens
gagctggtgcccgcc

SEQ ID NO: 709802 - DNA, 15 bp, Homo sapiens
agctggtgcccgcca

SEQ ID NO: 709803 - DNA, 15 bp, Homo sapiens
gctggtgcccgccag

SEQ ID NO: 709804 - DNA, 15 bp, Homo sapiens
ctggtgcccgccagc

SEQ ID NO: 709805 - DNA, 15 bp, Homo sapiens
tggtgcccgccagcc

SEQ ID NO: 709806 - DNA, 15 bp, Homo sapiens
ggtgcccgccagccg

SEQ ID NO: 709807 - DNA, 15 bp, Homo sapiens
gtgcccgccagccgg

SEQ ID NO: 709808 - DNA, 15 bp, Homo sapiens
tgcccgccagccggg

SEQ ID NO: 709809 - DNA, 15 bp, Homo sapiens
gcccgccagccgggg

SEQ ID NO: 709810 - DNA, 15 bp, Homo sapiens
cccgccagccggggg

SEQ ID NO: 709811 - DNA, 15 bp, Homo sapiens
ccgccagccgggggc

SEQ ID NO: 709812 - DNA, 15 bp, Homo sapiens
cgccagccgggggca

SEQ ID NO: 709813 - DNA, 15 bp, Homo sapiens
gccagccgggggcag

SEQ ID NO: 709814 - DNA, 15 bp, Homo sapiens
ccagccgggggcagg

SEQ ID NO: 709815 - DNA, 15 bp, Homo sapiens
cagccgggggcaggc

SEQ ID NO: 709816 - DNA, 15 bp, Homo sapiens
agccgggggcaggct

SEQ ID NO: 709817 - DNA, 15 bp, Homo sapiens
gccgggggcaggctg

SEQ ID NO: 709818 - DNA, 15 bp, Homo sapiens
ccgggggcaggctgc

SEQ ID NO: 709819 - DNA, 15 bp, Homo sapiens
cgggggcaggctgcc

SEQ ID NO: 709820 - DNA, 15 bp, Homo sapiens
gggggcaggctgccg

SEQ ID NO: 709821 - DNA, 15 bp, Homo sapiens
ggggcaggctgccgg

SEQ ID NO: 709822 - DNA, 15 bp, Homo sapiens
gggcaggctgccggg

SEQ ID NO: 709823 - DNA, 15 bp, Homo sapiens
ggcaggctgccggga

SEQ ID NO: 709824 - DNA, 15 bp, Homo sapiens
gcaggctgccgggag

SEQ ID NO: 709825 - DNA, 15 bp, Homo sapiens
caggctgccgggagt

SEQ ID NO: 709826 - DNA, 15 bp, Homo sapiens
aggctgccgggagta

SEQ ID NO: 709827 - DNA, 15 bp, Homo sapiens
ggctgccgggagtac

SEQ ID NO: 709828 - DNA, 15 bp, Homo sapiens
gctgccgggagtacc

SEQ ID NO: 709829 - DNA, 15 bp, Homo sapiens
ctgccgggagtaccc

SEQ ID NO: 709830 - DNA, 15 bp, Homo sapiens
tgccgggagtaccca

SEQ ID NO: 709831 - DNA, 15 bp, Homo sapiens
gccgggagtacccag

SEQ ID NO: 709832 - DNA, 15 bp, Homo sapiens
ccgggagtacccagc

SEQ ID NO: 709833 - DNA, 15 bp, Homo sapiens
cgggagtacccagct

SEQ ID NO: 709834 - DNA, 15 bp, Homo sapiens
gggagtacccagctc

SEQ ID NO: 709835 - DNA, 15 bp, Homo sapiens
ggagtacccagctcc

SEQ ID NO: 709836 - DNA, 15 bp, Homo sapiens
gagtacccagctcca

SEQ ID NO: 709837 - DNA, 15 bp, Homo sapiens
agtacccagctccag

SEQ ID NO: 709838 - DNA, 15 bp, Homo sapiens
gtacccagctccagc

SEQ ID NO: 709839 - DNA, 15 bp, Homo sapiens
tacccagctccagct

SEQ ID NO: 709840 - DNA, 15 bp, Homo sapiens
acccagctccagctg

SEQ ID NO: 709841 - DNA, 15 bp, Homo sapiens
cccagctccagctgg

SEQ ID NO: 709842 - DNA, 15 bp, Homo sapiens
ccagctccagctgga

SEQ ID NO: 709843 - DNA, 15 bp, Homo sapiens
cagctccagctggag

SEQ ID NO: 709844 - DNA, 15 bp, Homo sapiens
agctccagctggaga

SEQ ID NO: 709845 - DNA, 15 bp, Homo sapiens
gctccagctggagac

SEQ ID NO: 709846 - DNA, 15 bp, Homo sapiens
ctccagctggagaca

SEQ ID NO: 709847 - DNA, 15 bp, Homo sapiens
tccagctggagacag

SEQ ID NO: 709848 - DNA, 15 bp, Homo sapiens
ccagctggagacagt

SEQ ID NO: 709849 - DNA, 15 bp, Homo sapiens
cagctggagacagtc

SEQ ID NO: 709850 - DNA, 15 bp, Homo sapiens
agctggagacagtca

SEQ ID NO: 709851 - DNA, 15 bp, Homo sapiens
gctggagacagtcag

SEQ ID NO: 709852 - DNA, 15 bp, Homo sapiens
ctggagacagtcagt

SEQ ID NO: 709853 - DNA, 15 bp, Homo sapiens
tggagacagtcagtg

SEQ ID NO: 709854 - DNA, 15 bp, Homo sapiens
ggagacagtcagtgc

SEQ ID NO: 709855 - DNA, 15 bp, Homo sapiens
gagacagtcagtgcc

SEQ ID NO: 709856 - DNA, 15 bp, Homo sapiens
agacagtcagtgcct

SEQ ID NO: 709857 - DNA, 15 bp, Homo sapiens
gacagtcagtgcctg

SEQ ID NO: 709858 - DNA, 15 bp, Homo sapiens
acagtcagtgcctga

SEQ ID NO: 709859 - DNA, 15 bp, Homo sapiens
cagtcagtgcctgag

SEQ ID NO: 709860 - DNA, 15 bp, Homo sapiens
agtcagtgcctgagg

SEQ ID NO: 709861 - DNA, 15 bp, Homo sapiens
gtcagtgcctgagga

SEQ ID NO: 709862 - DNA, 15 bp, Homo sapiens
tcagtgcctgaggat

SEQ ID NO: 709863 - DNA, 15 bp, Homo sapiens
cagtgcctgaggatt

SEQ ID NO: 709864 - DNA, 15 bp, Homo sapiens
agtgcctgaggattt

SEQ ID NO: 709865 - DNA, 15 bp, Homo sapiens
gtgcctgaggatttg

SEQ ID NO: 709866 - DNA, 15 bp, Homo sapiens
tgcctgaggatttgg

SEQ ID NO: 709867 - DNA, 15 bp, Homo sapiens
gcctgaggatttggg

SEQ ID NO: 709868 - DNA, 15 bp, Homo sapiens
cctgaggatttgggg

SEQ ID NO: 709869 - DNA, 15 bp, Homo sapiens
ctgaggatttggggg

SEQ ID NO: 709870 - DNA, 15 bp, Homo sapiens
tgaggatttggggga

SEQ ID NO: 709871 - DNA, 15 bp, Homo sapiens
gaggatttgggggaa

SEQ ID NO: 709872 - DNA, 15 bp, Homo sapiens
aggatttgggggaag

SEQ ID NO: 709873 - DNA, 15 bp, Homo sapiens
ggatttgggggaagc

SEQ ID NO: 709874 - DNA, 15 bp, Homo sapiens
gatttgggggaagca

SEQ ID NO: 709875 - DNA, 15 bp, Homo sapiens
atttgggggaagcag

SEQ ID NO: 709876 - DNA, 15 bp, Homo sapiens
tttgggggaagcagg

SEQ ID NO: 709877 - DNA, 15 bp, Homo sapiens
ttgggggaagcaggt

SEQ ID NO: 709878 - DNA, 15 bp, Homo sapiens
tgggggaagcaggtg

SEQ ID NO: 709879 - DNA, 15 bp, Homo sapiens
gggggaagcaggtgg

SEQ ID NO: 709880 - DNA, 15 bp, Homo sapiens
ggggaagcaggtggg

SEQ ID NO: 709881 - DNA, 15 bp, Homo sapiens
gggaagcaggtgggg

SEQ ID NO: 709882 - DNA, 15 bp, Homo sapiens
ggaagcaggtgggga

SEQ ID NO: 709883 - DNA, 15 bp, Homo sapiens
gaagcaggtggggaa

SEQ ID NO: 709884 - DNA, 15 bp, Homo sapiens
aagcaggtggggaaa

SEQ ID NO: 709885 - DNA, 15 bp, Homo sapiens
agcaggtggggaaac

SEQ ID NO: 709886 - DNA, 15 bp, Homo sapiens
gcaggtggggaaacc

SEQ ID NO: 709887 - DNA, 15 bp, Homo sapiens
caggtggggaaacct

SEQ ID NO: 709888 - DNA, 15 bp, Homo sapiens
aggtggggaaacctt

SEQ ID NO: 709889 - DNA, 15 bp, Homo sapiens
ggtggggaaaccttg

SEQ ID NO: 709890 - DNA, 15 bp, Homo sapiens
gtggggaaaccttgg

SEQ ID NO: 709891 - DNA, 15 bp, Homo sapiens
tggggaaaccttggc

SEQ ID NO: 709892 - DNA, 15 bp, Homo sapiens
ggggaaaccttggca

SEQ ID NO: 709893 - DNA, 15 bp, Homo sapiens
gggaaaccttggcac

SEQ ID NO: 709894 - DNA, 15 bp, Homo sapiens
ggaaaccttggcaca

SEQ ID NO: 709895 - DNA, 15 bp, Homo sapiens
gaaaccttggcacag

SEQ ID NO: 709896 - DNA, 15 bp, Homo sapiens
aaaccttggcacagg

SEQ ID NO: 709897 - DNA, 15 bp, Homo sapiens
aaccttggcacaggg

SEQ ID NO: 709898 - DNA, 15 bp, Homo sapiens
accttggcacagggc

SEQ ID NO: 709899 - DNA, 15 bp, Homo sapiens
ccttggcacagggct

SEQ ID NO: 709900 - DNA, 15 bp, Homo sapiens
cttggcacagggctg

SEQ ID NO: 709901 - DNA, 15 bp, Homo sapiens
ttggcacagggctga

SEQ ID NO: 709902 - DNA, 15 bp, Homo sapiens
tggcacagggctgac

SEQ ID NO: 709903 - DNA, 15 bp, Homo sapiens
ggcacagggctgaca

SEQ ID NO: 709904 - DNA, 15 bp, Homo sapiens
gcacagggctgacac

SEQ ID NO: 709905 - DNA, 15 bp, Homo sapiens
cacagggctgacacc

SEQ ID NO: 709906 - DNA, 15 bp, Homo sapiens
acagggctgacacct

SEQ ID NO: 709907 - DNA, 15 bp, Homo sapiens
cagggctgacacctt

SEQ ID NO: 709908 - DNA, 15 bp, Homo sapiens
agggctgacaccttc

SEQ ID NO: 709909 - DNA, 15 bp, Homo sapiens
gggctgacaccttcc

SEQ ID NO: 709910 - DNA, 15 bp, Homo sapiens
ggctgacaccttcct

SEQ ID NO: 709911 - DNA, 15 bp, Homo sapiens
gctgacaccttcctc

SEQ ID NO: 709912 - DNA, 15 bp, Homo sapiens
ctgacaccttcctct

SEQ ID NO: 709913 - DNA, 15 bp, Homo sapiens
tgacaccttcctctg

SEQ ID NO: 709914 - DNA, 15 bp, Homo sapiens
gacaccttcctctgt

SEQ ID NO: 709915 - DNA, 15 bp, Homo sapiens
acaccttcctctgtg

SEQ ID NO: 709916 - DNA, 15 bp, Homo sapiens
caccttcctctgtgc

SEQ ID NO: 709917 - DNA, 15 bp, Homo sapiens
accttcctctgtgcc

SEQ ID NO: 709918 - DNA, 15 bp, Homo sapiens
ccttcctctgtgcca

SEQ ID NO: 709919 - DNA, 15 bp, Homo sapiens
cttcctctgtgccag

SEQ ID NO: 709920 - DNA, 15 bp, Homo sapiens
ttcctctgtgccaga

SEQ ID NO: 709921 - DNA, 15 bp, Homo sapiens
tcctctgtgccagag

SEQ ID NO: 709922 - DNA, 15 bp, Homo sapiens
cctctgtgccagagc

SEQ ID NO: 709923 - DNA, 15 bp, Homo sapiens
ctctgtgccagagcc

SEQ ID NO: 709924 - DNA, 15 bp, Homo sapiens
tctgtgccagagccc

SEQ ID NO: 709925 - DNA, 15 bp, Homo sapiens
ctgtgccagagccca

SEQ ID NO: 709926 - DNA, 15 bp, Homo sapiens
tgtgccagagcccag

SEQ ID NO: 709927 - DNA, 15 bp, Homo sapiens
gtgccagagcccagg

SEQ ID NO: 709928 - DNA, 15 bp, Homo sapiens
tgccagagcccagga

SEQ ID NO: 709929 - DNA, 15 bp, Homo sapiens
gccagagcccaggag

SEQ ID NO: 709930 - DNA, 15 bp, Homo sapiens
ccagagcccaggagc

SEQ ID NO: 709931 - DNA, 15 bp, Homo sapiens
cagagcccaggagct

SEQ ID NO: 709932 - DNA, 15 bp, Homo sapiens
agagcccaggagctg

SEQ ID NO: 709933 - DNA, 15 bp, Homo sapiens
gagcccaggagctgg

SEQ ID NO: 709934 - DNA, 15 bp, Homo sapiens
agcccaggagctggg

SEQ ID NO: 709935 - DNA, 15 bp, Homo sapiens
gcccaggagctgggg

SEQ ID NO: 709936 - DNA, 15 bp, Homo sapiens
cccaggagctggggc

SEQ ID NO: 709937 - DNA, 15 bp, Homo sapiens
ccaggagctggggca

SEQ ID NO: 709938 - DNA, 15 bp, Homo sapiens
caggagctggggcag

SEQ ID NO: 709939 - DNA, 15 bp, Homo sapiens
aggagctggggcagc

SEQ ID NO: 709940 - DNA, 15 bp, Homo sapiens
ggagctggggcagcg

SEQ ID NO: 709941 - DNA, 15 bp, Homo sapiens
gagctggggcagcgt

SEQ ID NO: 709942 - DNA, 15 bp, Homo sapiens
agctggggcagcgtg

SEQ ID NO: 709943 - DNA, 15 bp, Homo sapiens
gctggggcagcgtgg

SEQ ID NO: 709944 - DNA, 15 bp, Homo sapiens
ctggggcagcgtggg

SEQ ID NO: 709945 - DNA, 15 bp, Homo sapiens
tggggcagcgtgggt

SEQ ID NO: 709946 - DNA, 15 bp, Homo sapiens
ggggcagcgtgggtg

SEQ ID NO: 709947 - DNA, 15 bp, Homo sapiens
gggcagcgtgggtga

SEQ ID NO: 709948 - DNA, 15 bp, Homo sapiens
ggcagcgtgggtgac

SEQ ID NO: 709949 - DNA, 15 bp, Homo sapiens
gcagcgtgggtgacc

SEQ ID NO: 709950 - DNA, 15 bp, Homo sapiens
cagcgtgggtgacca

SEQ ID NO: 709951 - DNA, 15 bp, Homo sapiens
agcgtgggtgaccat

SEQ ID NO: 709952 - DNA, 15 bp, Homo sapiens
gcgtgggtgaccatg

SEQ ID NO: 709953 - DNA, 15 bp, Homo sapiens
cgtgggtgaccatgt

SEQ ID NO: 709954 - DNA, 15 bp, Homo sapiens
gtgggtgaccatgtg

SEQ ID NO: 709955 - DNA, 15 bp, Homo sapiens
tgggtgaccatgtgg

SEQ ID NO: 709956 - DNA, 15 bp, Homo sapiens
gggtgaccatgtggg

SEQ ID NO: 709957 - DNA, 15 bp, Homo sapiens
ggtgaccatgtgggt

SEQ ID NO: 709958 - DNA, 15 bp, Homo sapiens
gtgaccatgtgggtg

SEQ ID NO: 709959 - DNA, 15 bp, Homo sapiens
tgaccatgtgggtgg

SEQ ID NO: 709960 - DNA, 15 bp, Homo sapiens
gaccatgtgggtggg

SEQ ID NO: 709961 - DNA, 15 bp, Homo sapiens
accatgtgggtgggc

SEQ ID NO: 709962 - DNA, 15 bp, Homo sapiens
ccatgtgggtgggca

SEQ ID NO: 709963 - DNA, 15 bp, Homo sapiens
catgtgggtgggcac

SEQ ID NO: 709964 - DNA, 15 bp, Homo sapiens
atgtgggtgggcacg

SEQ ID NO: 709965 - DNA, 15 bp, Homo sapiens
tgtgggtgggcacgc

SEQ ID NO: 709966 - DNA, 15 bp, Homo sapiens
gtgggtgggcacgct

SEQ ID NO: 709967 - DNA, 15 bp, Homo sapiens
tgggtgggcacgctt

SEQ ID NO: 709968 - DNA, 15 bp, Homo sapiens
gggtgggcacgcttc

SEQ ID NO: 709969 - DNA, 15 bp, Homo sapiens
ggtgggcacgcttcc

SEQ ID NO: 709970 - DNA, 15 bp, Homo sapiens
gtgggcacgcttccc

SEQ ID NO: 709971 - DNA, 15 bp, Homo sapiens
tgggcacgcttccct

SEQ ID NO: 709972 - DNA, 15 bp, Homo sapiens
gggcacgcttccctg

SEQ ID NO: 709973 - DNA, 15 bp, Homo sapiens
ggcacgcttccctgc

SEQ ID NO: 709974 - DNA, 15 bp, Homo sapiens
gcacgcttccctgct

SEQ ID NO: 709975 - DNA, 15 bp, Homo sapiens
cacgcttccctgctg

SEQ ID NO: 709976 - DNA, 15 bp, Homo sapiens
acgcttccctgctgg

SEQ ID NO: 709977 - DNA, 15 bp, Homo sapiens
cgcttccctgctgga

SEQ ID NO: 709978 - DNA, 15 bp, Homo sapiens
gcttccctgctggag

SEQ ID NO: 709979 - DNA, 15 bp, Homo sapiens
cttccctgctggagg

SEQ ID NO: 709980 - DNA, 15 bp, Homo sapiens
ttccctgctggaggt

SEQ ID NO: 709981 - DNA, 15 bp, Homo sapiens
tccctgctggaggtg

SEQ ID NO: 709982 - DNA, 15 bp, Homo sapiens
ccctgctggaggtgc

SEQ ID NO: 709983 - DNA, 15 bp, Homo sapiens
cctgctggaggtgca

SEQ ID NO: 709984 - DNA, 15 bp, Homo sapiens
ctgctggaggtgcag

SEQ ID NO: 709985 - DNA, 15 bp, Homo sapiens
tgctggaggtgcagg

SEQ ID NO: 709986 - DNA, 15 bp, Homo sapiens
gctggaggtgcaggg

SEQ ID NO: 709987 - DNA, 15 bp, Homo sapiens
ctggaggtgcagggg

SEQ ID NO: 709988 - DNA, 15 bp, Homo sapiens
tggaggtgcaggggg

SEQ ID NO: 709989 - DNA, 15 bp, Homo sapiens
ggaggtgcagggggt

SEQ ID NO: 709990 - DNA, 15 bp, Homo sapiens
gaggtgcagggggtc

SEQ ID NO: 709991 - DNA, 15 bp, Homo sapiens
aggtgcagggggtcc

SEQ ID NO: 709992 - DNA, 15 bp, Homo sapiens
ggtgcagggggtcca

SEQ ID NO: 709993 - DNA, 15 bp, Homo sapiens
gtgcagggggtccac

SEQ ID NO: 709994 - DNA, 15 bp, Homo sapiens
tgcagggggtccacg

SEQ ID NO: 709995 - DNA, 15 bp, Homo sapiens
gcagggggtccacgt

SEQ ID NO: 709996 - DNA, 15 bp, Homo sapiens
cagggggtccacgtg

SEQ ID NO: 709997 - DNA, 15 bp, Homo sapiens
agggggtccacgtgg

SEQ ID NO: 709998 - DNA, 15 bp, Homo sapiens
gggggtccacgtggc

SEQ ID NO: 709999 - DNA, 15 bp, Homo sapiens
ggggtccacgtggca

SEQ ID NO: 710000 - DNA, 15 bp, Homo sapiens
gggtccacgtggcag

SEQ ID NO: 710001 - DNA, 15 bp, Homo sapiens
ggtccacgtggcagc

SEQ ID NO: 710002 - DNA, 15 bp, Homo sapiens
gtccacgtggcagcg

SEQ ID NO: 710003 - DNA, 15 bp, Homo sapiens
tccacgtggcagcgg

SEQ ID NO: 710004 - DNA, 15 bp, Homo sapiens
ccacgtggcagcggc

SEQ ID NO: 710005 - DNA, 15 bp, Homo sapiens
cacgtggcagcggcc

SEQ ID NO: 710006 - DNA, 15 bp, Homo sapiens
acgtggcagcggcca

SEQ ID NO: 710007 - DNA, 15 bp, Homo sapiens
cgtggcagcggccac

SEQ ID NO: 710008 - DNA, 15 bp, Homo sapiens
gtggcagcggccacc

SEQ ID NO: 710009 - DNA, 15 bp, Homo sapiens
tggcagcggccacct

SEQ ID NO: 710010 - DNA, 15 bp, Homo sapiens
ggcagcggccacctg

SEQ ID NO: 710011 - DNA, 15 bp, Homo sapiens
gcagcggccacctgg

SEQ ID NO: 710012 - DNA, 15 bp, Homo sapiens
cagcggccacctgga

SEQ ID NO: 710013 - DNA, 15 bp, Homo sapiens
agcggccacctggag

SEQ ID NO: 710014 - DNA, 15 bp, Homo sapiens
gcggccacctggagc

SEQ ID NO: 710015 - DNA, 15 bp, Homo sapiens
cggccacctggagcc

SEQ ID NO: 710016 - DNA, 15 bp, Homo sapiens
ggccacctggagccc

SEQ ID NO: 710017 - DNA, 15 bp, Homo sapiens
gccacctggagccct

SEQ ID NO: 710018 - DNA, 15 bp, Homo sapiens
ccacctggagcccta

SEQ ID NO: 710019 - DNA, 15 bp, Homo sapiens
cacctggagccctaa

SEQ ID NO: 710020 - DNA, 15 bp, Homo sapiens
acctggagccctaat

SEQ ID NO: 710021 - DNA, 15 bp, Homo sapiens
cctggagccctaatg

SEQ ID NO: 710022 - DNA, 15 bp, Homo sapiens
ctggagccctaatgt

SEQ ID NO: 710023 - DNA, 15 bp, Homo sapiens
tggagccctaatgtg

SEQ ID NO: 710024 - DNA, 15 bp, Homo sapiens
ggagccctaatgtgc

SEQ ID NO: 710025 - DNA, 15 bp, Homo sapiens
gagccctaatgtgca

SEQ ID NO: 710026 - DNA, 15 bp, Homo sapiens
agccctaatgtgcag

SEQ ID NO: 710027 - DNA, 15 bp, Homo sapiens
gccctaatgtgcagc

SEQ ID NO: 710028 - DNA, 15 bp, Homo sapiens
ccctaatgtgcagcg

SEQ ID NO: 710029 - DNA, 15 bp, Homo sapiens
cctaatgtgcagcgg

SEQ ID NO: 710030 - DNA, 15 bp, Homo sapiens
ctaatgtgcagcggt

SEQ ID NO: 710031 - DNA, 15 bp, Homo sapiens
taatgtgcagcggtt

SEQ ID NO: 710032 - DNA, 15 bp, Homo sapiens
aatgtgcagcggtta

SEQ ID NO: 710033 - DNA, 15 bp, Homo sapiens
atgtgcagcggttaa

SEQ ID NO: 710034 - DNA, 15 bp, Homo sapiens
tgtgcagcggttaag

SEQ ID NO: 710035 - DNA, 15 bp, Homo sapiens
gtgcagcggttaaga

SEQ ID NO: 710036 - DNA, 15 bp, Homo sapiens
tgcagcggttaagag

SEQ ID NO: 710037 - DNA, 15 bp, Homo sapiens
gcagcggttaagagc

SEQ ID NO: 710038 - DNA, 15 bp, Homo sapiens
cagcggttaagagca

SEQ ID NO: 710039 - DNA, 15 bp, Homo sapiens
agcggttaagagcaa

SEQ ID NO: 710040 - DNA, 15 bp, Homo sapiens
gcggttaagagcaag

SEQ ID NO: 710041 - DNA, 15 bp, Homo sapiens
cggttaagagcaagc

SEQ ID NO: 710042 - DNA, 15 bp, Homo sapiens
ggttaagagcaagcc

SEQ ID NO: 710043 - DNA, 15 bp, Homo sapiens
gttaagagcaagccc

SEQ ID NO: 710044 - DNA, 15 bp, Homo sapiens
ttaagagcaagcccc

SEQ ID NO: 710045 - DNA, 15 bp, Homo sapiens
taagagcaagcccct

SEQ ID NO: 710046 - DNA, 15 bp, Homo sapiens
aagagcaagcccctg

SEQ ID NO: 710047 - DNA, 15 bp, Homo sapiens
agagcaagcccctgg

SEQ ID NO: 710048 - DNA, 15 bp, Homo sapiens
gagcaagcccctgga

SEQ ID NO: 710049 - DNA, 15 bp, Homo sapiens
agcaagcccctggaa

SEQ ID NO: 710050 - DNA, 15 bp, Homo sapiens
gcaagcccctggaag

SEQ ID NO: 710051 - DNA, 15 bp, Homo sapiens
caagcccctggaagt

SEQ ID NO: 710052 - DNA, 15 bp, Homo sapiens
aagcccctggaagtc

SEQ ID NO: 710053 - DNA, 15 bp, Homo sapiens
agcccctggaagtca

SEQ ID NO: 710054 - DNA, 15 bp, Homo sapiens
gcccctggaagtcag

SEQ ID NO: 710055 - DNA, 15 bp, Homo sapiens
cccctggaagtcaga

SEQ ID NO: 710056 - DNA, 15 bp, Homo sapiens
ccctggaagtcagag

SEQ ID NO: 710057 - DNA, 15 bp, Homo sapiens
cctggaagtcagaga

SEQ ID NO: 710058 - DNA, 15 bp, Homo sapiens
ctggaagtcagagag

SEQ ID NO: 710059 - DNA, 15 bp, Homo sapiens
tggaagtcagagagg

SEQ ID NO: 710060 - DNA, 15 bp, Homo sapiens
ggaagtcagagaggc

SEQ ID NO: 710061 - DNA, 15 bp, Homo sapiens
gaagtcagagaggcc

SEQ ID NO: 710062 - DNA, 15 bp, Homo sapiens
aagtcagagaggcct

SEQ ID NO: 710063 - DNA, 15 bp, Homo sapiens
agtcagagaggcctg

SEQ ID NO: 710064 - DNA, 15 bp, Homo sapiens
gtcagagaggcctgg

SEQ ID NO: 710065 - DNA, 15 bp, Homo sapiens
tcagagaggcctggc

SEQ ID NO: 710066 - DNA, 15 bp, Homo sapiens
cagagaggcctggca

SEQ ID NO: 710067 - DNA, 15 bp, Homo sapiens
agagaggcctggcat

SEQ ID NO: 710068 - DNA, 15 bp, Homo sapiens
gagaggcctggcatg

SEQ ID NO: 710069 - DNA, 15 bp, Homo sapiens
agaggcctggcatgg

SEQ ID NO: 710070 - DNA, 15 bp, Homo sapiens
gaggcctggcatgga

SEQ ID NO: 710071 - DNA, 15 bp, Homo sapiens
aggcctggcatggag

SEQ ID NO: 710072 - DNA, 15 bp, Homo sapiens
ggcctggcatggagt

SEQ ID NO: 710073 - DNA, 15 bp, Homo sapiens
gcctggcatggagtc

SEQ ID NO: 710074 - DNA, 15 bp, Homo sapiens
cctggcatggagtct

SEQ ID NO: 710075 - DNA, 15 bp, Homo sapiens
ctggcatggagtctt

SEQ ID NO: 710076 - DNA, 15 bp, Homo sapiens
tggcatggagtcttg

SEQ ID NO: 710077 - DNA, 15 bp, Homo sapiens
ggcatggagtcttgc

SEQ ID NO: 710078 - DNA, 15 bp, Homo sapiens
gcatggagtcttgct

SEQ ID NO: 710079 - DNA, 15 bp, Homo sapiens
catggagtcttgctt

SEQ ID NO: 710080 - DNA, 15 bp, Homo sapiens
atggagtcttgcttc

SEQ ID NO: 710081 - DNA, 15 bp, Homo sapiens
tggagtcttgcttct

SEQ ID NO: 710082 - DNA, 15 bp, Homo sapiens
ggagtcttgcttctt

SEQ ID NO: 710083 - DNA, 15 bp, Homo sapiens
gagtcttgcttcttg

SEQ ID NO: 710084 - DNA, 15 bp, Homo sapiens
agtcttgcttcttgc

SEQ ID NO: 710085 - DNA, 15 bp, Homo sapiens
gtcttgcttcttgca

SEQ ID NO: 710086 - DNA, 15 bp, Homo sapiens
tcttgcttcttgcaa

SEQ ID NO: 710087 - DNA, 15 bp, Homo sapiens
cttgcttcttgcaaa

SEQ ID NO: 710088 - DNA, 15 bp, Homo sapiens
ttgcttcttgcaaac

SEQ ID NO: 710089 - DNA, 15 bp, Homo sapiens
tgcttcttgcaaacg

SEQ ID NO: 710090 - DNA, 15 bp, Homo sapiens
gcttcttgcaaacga

SEQ ID NO: 710091 - DNA, 15 bp, Homo sapiens
cttcttgcaaacgag

SEQ ID NO: 710092 - DNA, 15 bp, Homo sapiens
ttcttgcaaacgagc

SEQ ID NO: 710093 - DNA, 15 bp, Homo sapiens
tcttgcaaacgagcc

SEQ ID NO: 710094 - DNA, 15 bp, Homo sapiens
cttgcaaacgagccg

SEQ ID NO: 710095 - DNA, 15 bp, Homo sapiens
ttgcaaacgagccgt

SEQ ID NO: 710096 - DNA, 15 bp, Homo sapiens
tgcaaacgagccgtg

SEQ ID NO: 710097 - DNA, 15 bp, Homo sapiens
gcaaacgagccgtgt

SEQ ID NO: 710098 - DNA, 15 bp, Homo sapiens
caaacgagccgtgtg

SEQ ID NO: 710099 - DNA, 15 bp, Homo sapiens
aaacgagccgtgtgg

SEQ ID NO: 710100 - DNA, 15 bp, Homo sapiens
aacgagccgtgtgga

SEQ ID NO: 710101 - DNA, 15 bp, Homo sapiens
acgagccgtgtggag

SEQ ID NO: 710102 - DNA, 15 bp, Homo sapiens
cgagccgtgtggaga

SEQ ID NO: 710103 - DNA, 15 bp, Homo sapiens
gagccgtgtggagag

SEQ ID NO: 710104 - DNA, 15 bp, Homo sapiens
agccgtgtggagaga

SEQ ID NO: 710105 - DNA, 15 bp, Homo sapiens
gccgtgtggagagag

SEQ ID NO: 710106 - DNA, 15 bp, Homo sapiens
ccgtgtggagagaga

SEQ ID NO: 710107 - DNA, 15 bp, Homo sapiens
cgtgtggagagagag

SEQ ID NO: 710108 - DNA, 15 bp, Homo sapiens
gtgtggagagagaga

SEQ ID NO: 710109 - DNA, 15 bp, Homo sapiens
tgtggagagagagat

SEQ ID NO: 710110 - DNA, 15 bp, Homo sapiens
gtggagagagagata

SEQ ID NO: 710111 - DNA, 15 bp, Homo sapiens
tggagagagagatag

SEQ ID NO: 710112 - DNA, 15 bp, Homo sapiens
ggagagagagatagt

SEQ ID NO: 710113 - DNA, 15 bp, Homo sapiens
gagagagagatagta

SEQ ID NO: 710114 - DNA, 15 bp, Homo sapiens
agagagagatagtaa

SEQ ID NO: 710115 - DNA, 15 bp, Homo sapiens
gagagagatagtaaa

SEQ ID NO: 710116 - DNA, 15 bp, Homo sapiens
agagagatagtaaat

SEQ ID NO: 710117 - DNA, 15 bp, Homo sapiens
gagagatagtaaatc

SEQ ID NO: 710118 - DNA, 15 bp, Homo sapiens
agagatagtaaatca

SEQ ID NO: 710119 - DNA, 15 bp, Homo sapiens
gagatagtaaatcaa

SEQ ID NO: 710120 - DNA, 15 bp, Homo sapiens
agatagtaaatcaac

SEQ ID NO: 710121 - DNA, 15 bp, Homo sapiens
gatagtaaatcaaca

SEQ ID NO: 710122 - DNA, 15 bp, Homo sapiens
atagtaaatcaacaa

SEQ ID NO: 710123 - DNA, 15 bp, Homo sapiens
tagtaaatcaacaaa

SEQ ID NO: 710124 - DNA, 15 bp, Homo sapiens
agtaaatcaacaaag

SEQ ID NO: 710125 - DNA, 15 bp, Homo sapiens
gtaaatcaacaaagg

SEQ ID NO: 710126 - DNA, 15 bp, Homo sapiens
taaatcaacaaaggg

SEQ ID NO: 710127 - DNA, 15 bp, Homo sapiens
aaatcaacaaaggga

SEQ ID NO: 710128 - DNA, 15 bp, Homo sapiens
aatcaacaaagggaa

SEQ ID NO: 710129 - DNA, 15 bp, Homo sapiens
atcaacaaagggaaa

SEQ ID NO: 710130 - DNA, 15 bp, Homo sapiens
tcaacaaagggaaat

SEQ ID NO: 710131 - DNA, 15 bp, Homo sapiens
caacaaagggaaata

SEQ ID NO: 710132 - DNA, 15 bp, Homo sapiens
aacaaagggaaatac

SEQ ID NO: 710133 - DNA, 15 bp, Homo sapiens
acaaagggaaataca

SEQ ID NO: 710134 - DNA, 15 bp, Homo sapiens
caaagggaaatacat

SEQ ID NO: 710135 - DNA, 15 bp, Homo sapiens
aaagggaaatacatg

SEQ ID NO: 710136 - DNA, 15 bp, Homo sapiens
aagggaaatacatgg

SEQ ID NO: 710137 - DNA, 15 bp, Homo sapiens
agggaaatacatggt

SEQ ID NO: 710138 - DNA, 15 bp, Homo sapiens
gggaaatacatggtc

SEQ ID NO: 710139 - DNA, 15 bp, Homo sapiens
ggaaatacatggtct

SEQ ID NO: 710140 - DNA, 15 bp, Homo sapiens
gaaatacatggtctg

SEQ ID NO: 710141 - DNA, 15 bp, Homo sapiens
aaatacatggtctgt

SEQ ID NO: 710142 - DNA, 15 bp, Homo sapiens
aatacatggtctgtc

SEQ ID NO: 710143 - DNA, 15 bp, Homo sapiens
atacatggtctgtcc

SEQ ID NO: 710144 - DNA, 15 bp, Homo sapiens
tacatggtctgtccg

SEQ ID NO: 710145 - DNA, 15 bp, Homo sapiens
acatggtctgtccga

SEQ ID NO: 710146 - DNA, 15 bp, Homo sapiens
catggtctgtccgag

SEQ ID NO: 710147 - DNA, 15 bp, Homo sapiens
atggtctgtccgagg

SEQ ID NO: 710148 - DNA, 15 bp, Homo sapiens
tggtctgtccgagga

SEQ ID NO: 710149 - DNA, 15 bp, Homo sapiens
ggtctgtccgaggat

SEQ ID NO: 710150 - DNA, 15 bp, Homo sapiens
gtctgtccgaggatg

SEQ ID NO: 710151 - DNA, 15 bp, Homo sapiens
tctgtccgaggatga

SEQ ID NO: 710152 - DNA, 15 bp, Homo sapiens
ctgtccgaggatgag

SEQ ID NO: 710153 - DNA, 15 bp, Homo sapiens
tgtccgaggatgagc

SEQ ID NO: 710154 - DNA, 15 bp, Homo sapiens
gtccgaggatgagct

SEQ ID NO: 710155 - DNA, 15 bp, Homo sapiens
tccgaggatgagctg

SEQ ID NO: 710156 - DNA, 15 bp, Homo sapiens
ccgaggatgagctgc

SEQ ID NO: 710157 - DNA, 15 bp, Homo sapiens
cgaggatgagctgcc

SEQ ID NO: 710158 - DNA, 15 bp, Homo sapiens
gaggatgagctgccg

SEQ ID NO: 710159 - DNA, 15 bp, Homo sapiens
aggatgagctgccgg

SEQ ID NO: 710160 - DNA, 15 bp, Homo sapiens
ggatgagctgccgga

SEQ ID NO: 710161 - DNA, 15 bp, Homo sapiens
gatgagctgccggag

SEQ ID NO: 710162 - DNA, 15 bp, Homo sapiens
atgagctgccggaga

SEQ ID NO: 710163 - DNA, 15 bp, Homo sapiens
tgagctgccggagag

SEQ ID NO: 710164 - DNA, 15 bp, Homo sapiens
gagctgccggagagc

SEQ ID NO: 710165 - DNA, 15 bp, Homo sapiens
agctgccggagagca

SEQ ID NO: 710166 - DNA, 15 bp, Homo sapiens
gctgccggagagcaa

SEQ ID NO: 710167 - DNA, 15 bp, Homo sapiens
ctgccggagagcaat

SEQ ID NO: 710168 - DNA, 15 bp, Homo sapiens
tgccggagagcaatg

SEQ ID NO: 710169 - DNA, 15 bp, Homo sapiens
gccggagagcaatgg

SEQ ID NO: 710170 - DNA, 15 bp, Homo sapiens
ccggagagcaatggt

SEQ ID NO: 710171 - DNA, 15 bp, Homo sapiens
cggagagcaatggtg

SEQ ID NO: 710172 - DNA, 15 bp, Homo sapiens
ggagagcaatggtga

SEQ ID NO: 710173 - DNA, 15 bp, Homo sapiens
gagagcaatggtgaa

SEQ ID NO: 710174 - DNA, 15 bp, Homo sapiens
agagcaatggtgaaa

SEQ ID NO: 710175 - DNA, 15 bp, Homo sapiens
gagcaatggtgaaag

SEQ ID NO: 710176 - DNA, 15 bp, Homo sapiens
agcaatggtgaaagt

SEQ ID NO: 710177 - DNA, 15 bp, Homo sapiens
gcaatggtgaaagtg

SEQ ID NO: 710178 - DNA, 15 bp, Homo sapiens
caatggtgaaagtga

SEQ ID NO: 710179 - DNA, 15 bp, Homo sapiens
aatggtgaaagtgaa

SEQ ID NO: 710180 - DNA, 15 bp, Homo sapiens
atggtgaaagtgaag

SEQ ID NO: 710181 - DNA, 15 bp, Homo sapiens
tggtgaaagtgaagt

SEQ ID NO: 710182 - DNA, 15 bp, Homo sapiens
ggtgaaagtgaagtg

SEQ ID NO: 710183 - DNA, 15 bp, Homo sapiens
gtgaaagtgaagtgg

SEQ ID NO: 710184 - DNA, 15 bp, Homo sapiens
tgaaagtgaagtggg

SEQ ID NO: 710185 - DNA, 15 bp, Homo sapiens
gaaagtgaagtgggg

SEQ ID NO: 710186 - DNA, 15 bp, Homo sapiens
aaagtgaagtggggg

SEQ ID NO: 710187 - DNA, 15 bp, Homo sapiens
aagtgaagtggggga

SEQ ID NO: 710188 - DNA, 15 bp, Homo sapiens
agtgaagtgggggag

SEQ ID NO: 710189 - DNA, 15 bp, Homo sapiens
gtgaagtgggggagg

SEQ ID NO: 710190 - DNA, 15 bp, Homo sapiens
tgaagtgggggaggg

SEQ ID NO: 710191 - DNA, 15 bp, Homo sapiens
gaagtgggggagggg

SEQ ID NO: 710192 - DNA, 15 bp, Homo sapiens
aagtgggggaggggg

SEQ ID NO: 710193 - DNA, 15 bp, Homo sapiens
agtgggggagggggc

SEQ ID NO: 710194 - DNA, 15 bp, Homo sapiens
gtgggggagggggcg

SEQ ID NO: 710195 - DNA, 15 bp, Homo sapiens
tgggggagggggcgg

SEQ ID NO: 710196 - DNA, 15 bp, Homo sapiens
gggggagggggcggg

SEQ ID NO: 710197 - DNA, 15 bp, Homo sapiens
ggggagggggcgggg

SEQ ID NO: 710198 - DNA, 15 bp, Homo sapiens
gggagggggcggggc

SEQ ID NO: 710199 - DNA, 15 bp, Homo sapiens
ggagggggcggggct

SEQ ID NO: 710200 - DNA, 15 bp, Homo sapiens
gagggggcggggctg

SEQ ID NO: 710201 - DNA, 15 bp, Homo sapiens
agggggcggggctgg

SEQ ID NO: 710202 - DNA, 15 bp, Homo sapiens
gggggcggggctggg

SEQ ID NO: 710203 - DNA, 15 bp, Homo sapiens
ggggcggggctggga

SEQ ID NO: 710204 - DNA, 15 bp, Homo sapiens
gggcggggctgggag

SEQ ID NO: 710205 - DNA, 15 bp, Homo sapiens
ggcggggctgggagg

SEQ ID NO: 710206 - DNA, 15 bp, Homo sapiens
gcggggctgggagga

SEQ ID NO: 710207 - DNA, 15 bp, Homo sapiens
cggggctgggaggaa

SEQ ID NO: 710208 - DNA, 15 bp, Homo sapiens
ggggctgggaggaaa

SEQ ID NO: 710209 - DNA, 15 bp, Homo sapiens
gggctgggaggaaaa

SEQ ID NO: 710210 - DNA, 15 bp, Homo sapiens
ggctgggaggaaaag

SEQ ID NO: 710211 - DNA, 15 bp, Homo sapiens
gctgggaggaaaagc

SEQ ID NO: 710212 - DNA, 15 bp, Homo sapiens
ctgggaggaaaagcc

SEQ ID NO: 710213 - DNA, 15 bp, Homo sapiens
tgggaggaaaagcct

SEQ ID NO: 710214 - DNA, 15 bp, Homo sapiens
gggaggaaaagcctt

SEQ ID NO: 710215 - DNA, 15 bp, Homo sapiens
ggaggaaaagccttg

SEQ ID NO: 710216 - DNA, 15 bp, Homo sapiens
gaggaaaagccttgt

SEQ ID NO: 710217 - DNA, 15 bp, Homo sapiens
aggaaaagccttgtg

SEQ ID NO: 710218 - DNA, 15 bp, Homo sapiens
ggaaaagccttgtga

SEQ ID NO: 710219 - DNA, 15 bp, Homo sapiens
gaaaagccttgtgag

SEQ ID NO: 710220 - DNA, 15 bp, Homo sapiens
aaaagccttgtgaga

SEQ ID NO: 710221 - DNA, 15 bp, Homo sapiens
aaagccttgtgagaa

SEQ ID NO: 710222 - DNA, 15 bp, Homo sapiens
aagccttgtgagaag

SEQ ID NO: 710223 - DNA, 15 bp, Homo sapiens
agccttgtgagaagg

SEQ ID NO: 710224 - DNA, 15 bp, Homo sapiens
gccttgtgagaaggt

SEQ ID NO: 710225 - DNA, 15 bp, Homo sapiens
ccttgtgagaaggtg

SEQ ID NO: 710226 - DNA, 15 bp, Homo sapiens
cttgtgagaaggtga

SEQ ID NO: 710227 - DNA, 15 bp, Homo sapiens
ttgtgagaaggtgac

SEQ ID NO: 710228 - DNA, 15 bp, Homo sapiens
tgtgagaaggtgaca

SEQ ID NO: 710229 - DNA, 15 bp, Homo sapiens
gtgagaaggtgacac

SEQ ID NO: 710230 - DNA, 15 bp, Homo sapiens
tgagaaggtgacacg

SEQ ID NO: 710231 - DNA, 15 bp, Homo sapiens
gagaaggtgacacga

SEQ ID NO: 710232 - DNA, 15 bp, Homo sapiens
agaaggtgacacgag

SEQ ID NO: 710233 - DNA, 15 bp, Homo sapiens
gaaggtgacacgaga

SEQ ID NO: 710234 - DNA, 15 bp, Homo sapiens
aaggtgacacgagag

SEQ ID NO: 710235 - DNA, 15 bp, Homo sapiens
aggtgacacgagagc

SEQ ID NO: 710236 - DNA, 15 bp, Homo sapiens
ggtgacacgagagca

SEQ ID NO: 710237 - DNA, 15 bp, Homo sapiens
gtgacacgagagcac

SEQ ID NO: 710238 - DNA, 15 bp, Homo sapiens
tgacacgagagcacg

SEQ ID NO: 710239 - DNA, 15 bp, Homo sapiens
gacacgagagcacgg

SEQ ID NO: 710240 - DNA, 15 bp, Homo sapiens
acacgagagcacggc

SEQ ID NO: 710241 - DNA, 15 bp, Homo sapiens
cacgagagcacggcc

SEQ ID NO: 710242 - DNA, 15 bp, Homo sapiens
acgagagcacggcct

SEQ ID NO: 710243 - DNA, 15 bp, Homo sapiens
cgagagcacggcctt

SEQ ID NO: 710244 - DNA, 15 bp, Homo sapiens
gagagcacggccttg

SEQ ID NO: 710245 - DNA, 15 bp, Homo sapiens
agagcacggccttga

SEQ ID NO: 710246 - DNA, 15 bp, Homo sapiens
gagcacggccttgaa

SEQ ID NO: 710247 - DNA, 15 bp, Homo sapiens
agcacggccttgaag

SEQ ID NO: 710248 - DNA, 15 bp, Homo sapiens
gcacggccttgaagg

SEQ ID NO: 710249 - DNA, 15 bp, Homo sapiens
cacggccttgaaggg

SEQ ID NO: 710250 - DNA, 15 bp, Homo sapiens
acggccttgaagggg

SEQ ID NO: 710251 - DNA, 15 bp, Homo sapiens
cggccttgaagggga

SEQ ID NO: 710252 - DNA, 15 bp, Homo sapiens
ggccttgaaggggaa

SEQ ID NO: 710253 - DNA, 15 bp, Homo sapiens
gccttgaaggggaag

SEQ ID NO: 710254 - DNA, 15 bp, Homo sapiens
ccttgaaggggaaga

SEQ ID NO: 710255 - DNA, 15 bp, Homo sapiens
cttgaaggggaagaa

SEQ ID NO: 710256 - DNA, 15 bp, Homo sapiens
ttgaaggggaagaag

SEQ ID NO: 710257 - DNA, 15 bp, Homo sapiens
tgaaggggaagaagg

SEQ ID NO: 710258 - DNA, 15 bp, Homo sapiens
gaaggggaagaagga

SEQ ID NO: 710259 - DNA, 15 bp, Homo sapiens
aaggggaagaaggag

SEQ ID NO: 710260 - DNA, 15 bp, Homo sapiens
aggggaagaaggagg

SEQ ID NO: 710261 - DNA, 15 bp, Homo sapiens
ggggaagaaggaggg

SEQ ID NO: 710262 - DNA, 15 bp, Homo sapiens
gggaagaaggagggc

SEQ ID NO: 710263 - DNA, 15 bp, Homo sapiens
ggaagaaggagggca

SEQ ID NO: 710264 - DNA, 15 bp, Homo sapiens
gaagaaggagggcac

SEQ ID NO: 710265 - DNA, 15 bp, Homo sapiens
aagaaggagggcact

SEQ ID NO: 710266 - DNA, 15 bp, Homo sapiens
agaaggagggcacta

SEQ ID NO: 710267 - DNA, 15 bp, Homo sapiens
gaaggagggcactat

SEQ ID NO: 710268 - DNA, 15 bp, Homo sapiens
aaggagggcactatg

SEQ ID NO: 710269 - DNA, 15 bp, Homo sapiens
aggagggcactatgg

SEQ ID NO: 710270 - DNA, 15 bp, Homo sapiens
ggagggcactatgga

SEQ ID NO: 710271 - DNA, 15 bp, Homo sapiens
gagggcactatggag

SEQ ID NO: 710272 - DNA, 15 bp, Homo sapiens
agggcactatggagg

SEQ ID NO: 710273 - DNA, 15 bp, Homo sapiens
gggcactatggaggt

SEQ ID NO: 710274 - DNA, 15 bp, Homo sapiens
ggcactatggaggtc

SEQ ID NO: 710275 - DNA, 15 bp, Homo sapiens
gcactatggaggtcc

SEQ ID NO: 710276 - DNA, 15 bp, Homo sapiens
cactatggaggtccc

SEQ ID NO: 710277 - DNA, 15 bp, Homo sapiens
actatggaggtcccg

SEQ ID NO: 710278 - DNA, 15 bp, Homo sapiens
ctatggaggtcccgg

SEQ ID NO: 710279 - DNA, 15 bp, Homo sapiens
tatggaggtcccggc

SEQ ID NO: 710280 - DNA, 15 bp, Homo sapiens
atggaggtcccggcg

SEQ ID NO: 710281 - DNA, 15 bp, Homo sapiens
tggaggtcccggcga

SEQ ID NO: 710282 - DNA, 15 bp, Homo sapiens
ggaggtcccggcgaa

SEQ ID NO: 710283 - DNA, 15 bp, Homo sapiens
gaggtcccggcgaag

SEQ ID NO: 710284 - DNA, 15 bp, Homo sapiens
aggtcccggcgaagc

SEQ ID NO: 710285 - DNA, 15 bp, Homo sapiens
ggtcccggcgaagcg

SEQ ID NO: 710286 - DNA, 15 bp, Homo sapiens
gtcccggcgaagcgt

SEQ ID NO: 710287 - DNA, 15 bp, Homo sapiens
tcccggcgaagcgtg

SEQ ID NO: 710288 - DNA, 15 bp, Homo sapiens
cccggcgaagcgtgg

SEQ ID NO: 710289 - DNA, 15 bp, Homo sapiens
ccggcgaagcgtggc

SEQ ID NO: 710290 - DNA, 15 bp, Homo sapiens
cggcgaagcgtggcc

SEQ ID NO: 710291 - DNA, 15 bp, Homo sapiens
ggcgaagcgtggcct

SEQ ID NO: 710292 - DNA, 15 bp, Homo sapiens
gcgaagcgtggcctg

SEQ ID NO: 710293 - DNA, 15 bp, Homo sapiens
cgaagcgtggcctgg

SEQ ID NO: 710294 - DNA, 15 bp, Homo sapiens
gaagcgtggcctggc

SEQ ID NO: 710295 - DNA, 15 bp, Homo sapiens
aagcgtggcctggcc

SEQ ID NO: 710296 - DNA, 15 bp, Homo sapiens
agcgtggcctggccg

SEQ ID NO: 710297 - DNA, 15 bp, Homo sapiens
gcgtggcctggccga

SEQ ID NO: 710298 - DNA, 15 bp, Homo sapiens
cgtggcctggccgag

SEQ ID NO: 710299 - DNA, 15 bp, Homo sapiens
gtggcctggccgagg

SEQ ID NO: 710300 - DNA, 15 bp, Homo sapiens
tggcctggccgagga

SEQ ID NO: 710301 - DNA, 15 bp, Homo sapiens
ggcctggccgaggaa

SEQ ID NO: 710302 - DNA, 15 bp, Homo sapiens
gcctggccgaggaac

SEQ ID NO: 710303 - DNA, 15 bp, Homo sapiens
cctggccgaggaacg

SEQ ID NO: 710304 - DNA, 15 bp, Homo sapiens
ctggccgaggaacgg

SEQ ID NO: 710305 - DNA, 15 bp, Homo sapiens
tggccgaggaacggc

SEQ ID NO: 710306 - DNA, 15 bp, Homo sapiens
ggccgaggaacggca

SEQ ID NO: 710307 - DNA, 15 bp, Homo sapiens
gccgaggaacggcat

SEQ ID NO: 710308 - DNA, 15 bp, Homo sapiens
ccgaggaacggcatg

SEQ ID NO: 710309 - DNA, 15 bp, Homo sapiens
cgaggaacggcatgt

SEQ ID NO: 710310 - DNA, 15 bp, Homo sapiens
gaggaacggcatgtg

SEQ ID NO: 710311 - DNA, 15 bp, Homo sapiens
aggaacggcatgtgc

SEQ ID NO: 710312 - DNA, 15 bp, Homo sapiens
ggaacggcatgtgca

SEQ ID NO: 710313 - DNA, 15 bp, Homo sapiens
gaacggcatgtgcag

SEQ ID NO: 710314 - DNA, 15 bp, Homo sapiens
aacggcatgtgcaga

SEQ ID NO: 710315 - DNA, 15 bp, Homo sapiens
acggcatgtgcagag

SEQ ID NO: 710316 - DNA, 15 bp, Homo sapiens
cggcatgtgcagagg

SEQ ID NO: 710317 - DNA, 15 bp, Homo sapiens
ggcatgtgcagaggt

SEQ ID NO: 710318 - DNA, 15 bp, Homo sapiens
gcatgtgcagaggtc

SEQ ID NO: 710319 - DNA, 15 bp, Homo sapiens
catgtgcagaggtcc

SEQ ID NO: 710320 - DNA, 15 bp, Homo sapiens
atgtgcagaggtcct

SEQ ID NO: 710321 - DNA, 15 bp, Homo sapiens
tgtgcagaggtcctg

SEQ ID NO: 710322 - DNA, 15 bp, Homo sapiens
gtgcagaggtcctgc

SEQ ID NO: 710323 - DNA, 15 bp, Homo sapiens
tgcagaggtcctgcc

SEQ ID NO: 710324 - DNA, 15 bp, Homo sapiens
gcagaggtcctgccg

SEQ ID NO: 710325 - DNA, 15 bp, Homo sapiens
cagaggtcctgccga

SEQ ID NO: 710326 - DNA, 15 bp, Homo sapiens
agaggtcctgccgag

SEQ ID NO: 710327 - DNA, 15 bp, Homo sapiens
gaggtcctgccgagg

SEQ ID NO: 710328 - DNA, 15 bp, Homo sapiens
aggtcctgccgagga

SEQ ID NO: 710329 - DNA, 15 bp, Homo sapiens
ggtcctgccgaggag

SEQ ID NO: 710330 - DNA, 15 bp, Homo sapiens
gtcctgccgaggagc

SEQ ID NO: 710331 - DNA, 15 bp, Homo sapiens
tcctgccgaggagct

SEQ ID NO: 710332 - DNA, 15 bp, Homo sapiens
cctgccgaggagctc

SEQ ID NO: 710333 - DNA, 15 bp, Homo sapiens
ctgccgaggagctca

SEQ ID NO: 710334 - DNA, 15 bp, Homo sapiens
tgccgaggagctcaa

SEQ ID NO: 710335 - DNA, 15 bp, Homo sapiens
gccgaggagctcaag

SEQ ID NO: 710336 - DNA, 15 bp, Homo sapiens
ccgaggagctcaaga

SEQ ID NO: 710337 - DNA, 15 bp, Homo sapiens
cgaggagctcaagac

SEQ ID NO: 710338 - DNA, 15 bp, Homo sapiens
gaggagctcaagaca

SEQ ID NO: 710339 - DNA, 15 bp, Homo sapiens
aggagctcaagacaa

SEQ ID NO: 710340 - DNA, 15 bp, Homo sapiens
ggagctcaagacaag

SEQ ID NO: 710341 - DNA, 15 bp, Homo sapiens
gagctcaagacaagt

SEQ ID NO: 710342 - DNA, 15 bp, Homo sapiens
agctcaagacaagta

SEQ ID NO: 710343 - DNA, 15 bp, Homo sapiens
gctcaagacaagtag

SEQ ID NO: 710344 - DNA, 15 bp, Homo sapiens
ctcaagacaagtagg

SEQ ID NO: 710345 - DNA, 15 bp, Homo sapiens
tcaagacaagtaggg

SEQ ID NO: 710346 - DNA, 15 bp, Homo sapiens
caagacaagtagggg

SEQ ID NO: 710347 - DNA, 15 bp, Homo sapiens
aagacaagtagggga

SEQ ID NO: 710348 - DNA, 15 bp, Homo sapiens
agacaagtaggggac

SEQ ID NO: 710349 - DNA, 15 bp, Homo sapiens
gacaagtaggggacg

SEQ ID NO: 710350 - DNA, 15 bp, Homo sapiens
acaagtaggggacgg

SEQ ID NO: 710351 - DNA, 15 bp, Homo sapiens
caagtaggggacggt

SEQ ID NO: 710352 - DNA, 15 bp, Homo sapiens
aagtaggggacggtg

SEQ ID NO: 710353 - DNA, 15 bp, Homo sapiens
agtaggggacggtgg

SEQ ID NO: 710354 - DNA, 15 bp, Homo sapiens
gtaggggacggtggg

SEQ ID NO: 710355 - DNA, 15 bp, Homo sapiens
taggggacggtgggg

SEQ ID NO: 710356 - DNA, 15 bp, Homo sapiens
aggggacggtggggc

SEQ ID NO: 710357 - DNA, 15 bp, Homo sapiens
ggggacggtggggct

SEQ ID NO: 710358 - DNA, 15 bp, Homo sapiens
gggacggtggggctg

SEQ ID NO: 710359 - DNA, 15 bp, Homo sapiens
ggacggtggggctgg

SEQ ID NO: 710360 - DNA, 15 bp, Homo sapiens
gacggtggggctgga

SEQ ID NO: 710361 - DNA, 15 bp, Homo sapiens
acggtggggctggag

SEQ ID NO: 710362 - DNA, 15 bp, Homo sapiens
cggtggggctggagt

SEQ ID NO: 710363 - DNA, 15 bp, Homo sapiens
ggtggggctggagtg

SEQ ID NO: 710364 - DNA, 15 bp, Homo sapiens
gtggggctggagtgg

SEQ ID NO: 710365 - DNA, 15 bp, Homo sapiens
tggggctggagtgga

SEQ ID NO: 710366 - DNA, 15 bp, Homo sapiens
ggggctggagtggag

SEQ ID NO: 710367 - DNA, 15 bp, Homo sapiens
gggctggagtggaga

SEQ ID NO: 710368 - DNA, 15 bp, Homo sapiens
ggctggagtggagag

SEQ ID NO: 710369 - DNA, 15 bp, Homo sapiens
gctggagtggagaga

SEQ ID NO: 710370 - DNA, 15 bp, Homo sapiens
ctggagtggagagag

SEQ ID NO: 710371 - DNA, 15 bp, Homo sapiens
tggagtggagagagt

SEQ ID NO: 710372 - DNA, 15 bp, Homo sapiens
ggagtggagagagtg

SEQ ID NO: 710373 - DNA, 15 bp, Homo sapiens
gagtggagagagtga

SEQ ID NO: 710374 - DNA, 15 bp, Homo sapiens
agtggagagagtgag

SEQ ID NO: 710375 - DNA, 15 bp, Homo sapiens
gtggagagagtgagt

SEQ ID NO: 710376 - DNA, 15 bp, Homo sapiens
tggagagagtgagtg

SEQ ID NO: 710377 - DNA, 15 bp, Homo sapiens
ggagagagtgagtgg

SEQ ID NO: 710378 - DNA, 15 bp, Homo sapiens
gagagagtgagtggg

SEQ ID NO: 710379 - DNA, 15 bp, Homo sapiens
agagagtgagtggga

SEQ ID NO: 710380 - DNA, 15 bp, Homo sapiens
gagagtgagtgggag

SEQ ID NO: 710381 - DNA, 15 bp, Homo sapiens
agagtgagtgggagg

SEQ ID NO: 710382 - DNA, 15 bp, Homo sapiens
gagtgagtgggagga

SEQ ID NO: 710383 - DNA, 15 bp, Homo sapiens
agtgagtgggaggag

SEQ ID NO: 710384 - DNA, 15 bp, Homo sapiens
gtgagtgggaggagg

SEQ ID NO: 710385 - DNA, 15 bp, Homo sapiens
tgagtgggaggagga

SEQ ID NO: 710386 - DNA, 15 bp, Homo sapiens
gagtgggaggaggag

SEQ ID NO: 710387 - DNA, 15 bp, Homo sapiens
agtgggaggaggagt

SEQ ID NO: 710388 - DNA, 15 bp, Homo sapiens
gtgggaggaggagta

SEQ ID NO: 710389 - DNA, 15 bp, Homo sapiens
tgggaggaggagtag

SEQ ID NO: 710390 - DNA, 15 bp, Homo sapiens
gggaggaggagtagg

SEQ ID NO: 710391 - DNA, 15 bp, Homo sapiens
ggaggaggagtagga

SEQ ID NO: 710392 - DNA, 15 bp, Homo sapiens
gaggaggagtaggag

SEQ ID NO: 710393 - DNA, 15 bp, Homo sapiens
aggaggagtaggagt

SEQ ID NO: 710394 - DNA, 15 bp, Homo sapiens
ggaggagtaggagtc

SEQ ID NO: 710395 - DNA, 15 bp, Homo sapiens
gaggagtaggagtca

SEQ ID NO: 710396 - DNA, 15 bp, Homo sapiens
aggagtaggagtcag

SEQ ID NO: 710397 - DNA, 15 bp, Homo sapiens
ggagtaggagtcaga

SEQ ID NO: 710398 - DNA, 15 bp, Homo sapiens
gagtaggagtcagag

SEQ ID NO: 710399 - DNA, 15 bp, Homo sapiens
agtaggagtcagaga

SEQ ID NO: 710400 - DNA, 15 bp, Homo sapiens
gtaggagtcagagag

SEQ ID NO: 710401 - DNA, 15 bp, Homo sapiens
taggagtcagagagg

SEQ ID NO: 710402 - DNA, 15 bp, Homo sapiens
aggagtcagagagga

SEQ ID NO: 710403 - DNA, 15 bp, Homo sapiens
ggagtcagagaggag

SEQ ID NO: 710404 - DNA, 15 bp, Homo sapiens
gagtcagagaggagc

SEQ ID NO: 710405 - DNA, 15 bp, Homo sapiens
agtcagagaggagct

SEQ ID NO: 710406 - DNA, 15 bp, Homo sapiens
gtcagagaggagctc

SEQ ID NO: 710407 - DNA, 15 bp, Homo sapiens
tcagagaggagctca

SEQ ID NO: 710408 - DNA, 15 bp, Homo sapiens
cagagaggagctcag

SEQ ID NO: 710409 - DNA, 15 bp, Homo sapiens
agagaggagctcagg

SEQ ID NO: 710410 - DNA, 15 bp, Homo sapiens
gagaggagctcagga

SEQ ID NO: 710411 - DNA, 15 bp, Homo sapiens
agaggagctcaggac

SEQ ID NO: 710412 - DNA, 15 bp, Homo sapiens
gaggagctcaggaca

SEQ ID NO: 710413 - DNA, 15 bp, Homo sapiens
aggagctcaggacag

SEQ ID NO: 710414 - DNA, 15 bp, Homo sapiens
ggagctcaggacaga

SEQ ID NO: 710415 - DNA, 15 bp, Homo sapiens
gagctcaggacagat

SEQ ID NO: 710416 - DNA, 15 bp, Homo sapiens
agctcaggacagatc

SEQ ID NO: 710417 - DNA, 15 bp, Homo sapiens
gctcaggacagatcc

SEQ ID NO: 710418 - DNA, 15 bp, Homo sapiens
ctcaggacagatcct

SEQ ID NO: 710419 - DNA, 15 bp, Homo sapiens
tcaggacagatcctt

SEQ ID NO: 710420 - DNA, 15 bp, Homo sapiens
caggacagatccttt

SEQ ID NO: 710421 - DNA, 15 bp, Homo sapiens
aggacagatccttta

SEQ ID NO: 710422 - DNA, 15 bp, Homo sapiens
ggacagatcctttag

SEQ ID NO: 710423 - DNA, 15 bp, Homo sapiens
gacagatcctttagg

SEQ ID NO: 710424 - DNA, 15 bp, Homo sapiens
acagatcctttaggc

SEQ ID NO: 710425 - DNA, 15 bp, Homo sapiens
cagatcctttaggct

SEQ ID NO: 710426 - DNA, 15 bp, Homo sapiens
agatcctttaggctc

SEQ ID NO: 710427 - DNA, 15 bp, Homo sapiens
gatcctttaggctct

SEQ ID NO: 710428 - DNA, 15 bp, Homo sapiens
atcctttaggctcta

SEQ ID NO: 710429 - DNA, 15 bp, Homo sapiens
tcctttaggctctag

SEQ ID NO: 710430 - DNA, 15 bp, Homo sapiens
cctttaggctctagg

SEQ ID NO: 710431 - DNA, 15 bp, Homo sapiens
ctttaggctctaggg

SEQ ID NO: 710432 - DNA, 15 bp, Homo sapiens
tttaggctctaggga

SEQ ID NO: 710433 - DNA, 15 bp, Homo sapiens
ttaggctctagggac

SEQ ID NO: 710434 - DNA, 15 bp, Homo sapiens
taggctctagggaca

SEQ ID NO: 710435 - DNA, 15 bp, Homo sapiens
aggctctagggacac

SEQ ID NO: 710436 - DNA, 15 bp, Homo sapiens
ggctctagggacacg

SEQ ID NO: 710437 - DNA, 15 bp, Homo sapiens
gctctagggacacga

SEQ ID NO: 710438 - DNA, 15 bp, Homo sapiens
ctctagggacacgat

SEQ ID NO: 710439 - DNA, 15 bp, Homo sapiens
tctagggacacgata

SEQ ID NO: 710440 - DNA, 15 bp, Homo sapiens
ctagggacacgataa

SEQ ID NO: 710441 - DNA, 15 bp, Homo sapiens
tagggacacgataaa

SEQ ID NO: 710442 - DNA, 15 bp, Homo sapiens
agggacacgataaac

SEQ ID NO: 710443 - DNA, 15 bp, Homo sapiens
gggacacgataaaca

SEQ ID NO: 710444 - DNA, 15 bp, Homo sapiens
ggacacgataaacac

SEQ ID NO: 710445 - DNA, 15 bp, Homo sapiens
gacacgataaacaca

SEQ ID NO: 710446 - DNA, 15 bp, Homo sapiens
acacgataaacacag

SEQ ID NO: 710447 - DNA, 15 bp, Homo sapiens
cacgataaacacagt

SEQ ID NO: 710448 - DNA, 15 bp, Homo sapiens
acgataaacacagtg

SEQ ID NO: 710449 - DNA, 15 bp, Homo sapiens
cgataaacacagtgt

SEQ ID NO: 710450 - DNA, 15 bp, Homo sapiens
gataaacacagtgtt

SEQ ID NO: 710451 - DNA, 15 bp, Homo sapiens
ataaacacagtgttt

SEQ ID NO: 710452 - DNA, 15 bp, Homo sapiens
taaacacagtgtttt

SEQ ID NO: 710453 - DNA, 15 bp, Homo sapiens
aaacacagtgttttt

SEQ ID NO: 710454 - DNA, 15 bp, Homo sapiens
aacacagtgtttttt

SEQ ID NO: 710455 - DNA, 15 bp, Homo sapiens
acacagtgttttttg

SEQ ID NO: 710456 - DNA, 15 bp, Homo sapiens
cacagtgttttttgt

SEQ ID NO: 710457 - DNA, 15 bp, Homo sapiens
acagtgttttttgtc

SEQ ID NO: 710458 - DNA, 15 bp, Homo sapiens
cagtgttttttgtct

SEQ ID NO: 710459 - DNA, 15 bp, Homo sapiens
agtgttttttgtctt

SEQ ID NO: 710460 - DNA, 15 bp, Homo sapiens
gtgttttttgtcttg

SEQ ID NO: 710461 - DNA, 15 bp, Homo sapiens
tgttttttgtcttgt

SEQ ID NO: 710462 - DNA, 15 bp, Homo sapiens
gttttttgtcttgtc

SEQ ID NO: 710463 - DNA, 15 bp, Homo sapiens
ttttttgtcttgtca

SEQ ID NO: 710464 - DNA, 15 bp, Homo sapiens
tttttgtcttgtcaa

SEQ ID NO: 710465 - DNA, 15 bp, Homo sapiens
ttttgtcttgtcaag

SEQ ID NO: 710466 - DNA, 15 bp, Homo sapiens
tttgtcttgtcaagt

SEQ ID NO: 710467 - DNA, 15 bp, Homo sapiens
ttgtcttgtcaagtg

SEQ ID NO: 710468 - DNA, 15 bp, Homo sapiens
tgtcttgtcaagtgt

SEQ ID NO: 710469 - DNA, 15 bp, Homo sapiens
gtcttgtcaagtgtg

SEQ ID NO: 710470 - DNA, 15 bp, Homo sapiens
tcttgtcaagtgtgt

SEQ ID NO: 710471 - DNA, 15 bp, Homo sapiens
cttgtcaagtgtgtc

SEQ ID NO: 710472 - DNA, 15 bp, Homo sapiens
ttgtcaagtgtgtcc

SEQ ID NO: 710473 - DNA, 15 bp, Homo sapiens
tgtcaagtgtgtcct

SEQ ID NO: 710474 - DNA, 15 bp, Homo sapiens
gtcaagtgtgtcctt

SEQ ID NO: 710475 - DNA, 15 bp, Homo sapiens
tcaagtgtgtccttt

SEQ ID NO: 710476 - DNA, 15 bp, Homo sapiens
caagtgtgtcctttt

SEQ ID NO: 710477 - DNA, 15 bp, Homo sapiens
aagtgtgtccttttt

SEQ ID NO: 710478 - DNA, 15 bp, Homo sapiens
agtgtgtccttttta

SEQ ID NO: 710479 - DNA, 15 bp, Homo sapiens
gtgtgtcctttttat

SEQ ID NO: 710480 - DNA, 15 bp, Homo sapiens
tgtgtcctttttatt

SEQ ID NO: 710481 - DNA, 15 bp, Homo sapiens
gtgtcctttttattt

SEQ ID NO: 710482 - DNA, 15 bp, Homo sapiens
tgtcctttttatttt

SEQ ID NO: 710483 - DNA, 15 bp, Homo sapiens
gtcctttttattttt

SEQ ID NO: 710484 - DNA, 15 bp, Homo sapiens
tcctttttatttttt

SEQ ID NO: 710485 - DNA, 15 bp, Homo sapiens
cctttttattttttt

SEQ ID NO: 710486 - DNA, 15 bp, Homo sapiens
ctttttatttttttg

SEQ ID NO: 710487 - DNA, 15 bp, Homo sapiens
tttttatttttttga

SEQ ID NO: 710488 - DNA, 15 bp, Homo sapiens
ttttatttttttgaa

SEQ ID NO: 710489 - DNA, 15 bp, Homo sapiens
tttatttttttgaaa

SEQ ID NO: 710490 - DNA, 15 bp, Homo sapiens
ttatttttttgaaag

SEQ ID NO: 710491 - DNA, 15 bp, Homo sapiens
tatttttttgaaaga

SEQ ID NO: 710492 - DNA, 15 bp, Homo sapiens
aaaaaaaaaaagaaa

SEQ ID NO: 710493 - DNA, 15 bp, Homo sapiens
aaaaaaaaaagaaag

SEQ ID NO: 710494 - DNA, 15 bp, Homo sapiens
aaaaaaaaagaaaga

SEQ ID NO: 710495 - DNA, 15 bp, Homo sapiens
aaaaaaaagaaagaa

SEQ ID NO: 710496 - DNA, 15 bp, Homo sapiens
aaaaaaagaaagaaa

SEQ ID NO: 710497 - DNA, 15 bp, Homo sapiens
aaaaaagaaagaaag

SEQ ID NO: 710498 - DNA, 15 bp, Homo sapiens
aaaaagaaagaaaga

SEQ ID NO: 710499 - DNA, 15 bp, Homo sapiens
aaaagaaagaaagaa

SEQ ID NO: 710500 - DNA, 15 bp, Homo sapiens
aaagaaagaaagaaa

SEQ ID NO: 710501 - DNA, 15 bp, Homo sapiens
aagaaagaaagaaaa

SEQ ID NO: 710502 - DNA, 15 bp, Homo sapiens
agaaagaaagaaaaa

SEQ ID NO: 710503 - DNA, 15 bp, Homo sapiens
gaaagaaagaaaaac

SEQ ID NO: 710504 - DNA, 15 bp, Homo sapiens
aaagaaagaaaaact

SEQ ID NO: 710505 - DNA, 15 bp, Homo sapiens
aagaaagaaaaactg

SEQ ID NO: 710506 - DNA, 15 bp, Homo sapiens
agaaagaaaaactga

SEQ ID NO: 710507 - DNA, 15 bp, Homo sapiens
gaaagaaaaactgag

SEQ ID NO: 710508 - DNA, 15 bp, Homo sapiens
aaagaaaaactgagt

SEQ ID NO: 710509 - DNA, 15 bp, Homo sapiens
aagaaaaactgagtt

SEQ ID NO: 710510 - DNA, 15 bp, Homo sapiens
agaaaaactgagttc

SEQ ID NO: 710511 - DNA, 15 bp, Homo sapiens
gaaaaactgagttct

SEQ ID NO: 710512 - DNA, 15 bp, Homo sapiens
aaaaactgagttctt

SEQ ID NO: 710513 - DNA, 15 bp, Homo sapiens
aaaactgagttcttt

SEQ ID NO: 710514 - DNA, 15 bp, Homo sapiens
aaactgagttctttt

SEQ ID NO: 710515 - DNA, 15 bp, Homo sapiens
aactgagttcttttt

SEQ ID NO: 710516 - DNA, 15 bp, Homo sapiens
actgagttctttttt

SEQ ID NO: 710517 - DNA, 15 bp, Homo sapiens
ctgagttcttttttt

SEQ ID NO: 710518 - DNA, 15 bp, Homo sapiens
tgagttctttttttt

SEQ ID NO: 710519 - DNA, 15 bp, Homo sapiens
gagttctttttttta

SEQ ID NO: 710520 - DNA, 15 bp, Homo sapiens
agttcttttttttaa

SEQ ID NO: 710521 - DNA, 15 bp, Homo sapiens
gttcttttttttaac

SEQ ID NO: 710522 - DNA, 15 bp, Homo sapiens
ttcttttttttaact

SEQ ID NO: 710523 - DNA, 15 bp, Homo sapiens
tcttttttttaactt

SEQ ID NO: 710524 - DNA, 15 bp, Homo sapiens
cttttttttaacttt

SEQ ID NO: 710525 - DNA, 15 bp, Homo sapiens
ttttttttaactttc

SEQ ID NO: 710526 - DNA, 15 bp, Homo sapiens
tttttttaactttct

SEQ ID NO: 710527 - DNA, 15 bp, Homo sapiens
ttttttaactttctt

SEQ ID NO: 710528 - DNA, 15 bp, Homo sapiens
tttttaactttcttt

SEQ ID NO: 710529 - DNA, 15 bp, Homo sapiens
ttttaactttctttt

SEQ ID NO: 710530 - DNA, 15 bp, Homo sapiens
tttaactttcttttt

SEQ ID NO: 710531 - DNA, 15 bp, Homo sapiens
ttaactttctttttt

SEQ ID NO: 710532 - DNA, 15 bp, Homo sapiens
taactttcttttttt

SEQ ID NO: 710533 - DNA, 15 bp, Homo sapiens
aactttcttttttta

SEQ ID NO: 710534 - DNA, 15 bp, Homo sapiens
actttctttttttag

SEQ ID NO: 710535 - DNA, 15 bp, Homo sapiens
ctttctttttttaga

SEQ ID NO: 710536 - DNA, 15 bp, Homo sapiens
tttctttttttagag

SEQ ID NO: 710537 - DNA, 15 bp, Homo sapiens
ttctttttttagaga

SEQ ID NO: 710538 - DNA, 15 bp, Homo sapiens
tctttttttagagac

SEQ ID NO: 710539 - DNA, 15 bp, Homo sapiens
ctttttttagagaca

SEQ ID NO: 710540 - DNA, 15 bp, Homo sapiens
tttttttagagacag

SEQ ID NO: 710541 - DNA, 15 bp, Homo sapiens
ttttttagagacaga

SEQ ID NO: 710542 - DNA, 15 bp, Homo sapiens
tttttagagacagag

SEQ ID NO: 710543 - DNA, 15 bp, Homo sapiens
ttttagagacagagt

SEQ ID NO: 710544 - DNA, 15 bp, Homo sapiens
tttagagacagagtc

SEQ ID NO: 710545 - DNA, 15 bp, Homo sapiens
ttagagacagagtct

SEQ ID NO: 710546 - DNA, 15 bp, Homo sapiens
tagagacagagtctc

SEQ ID NO: 710547 - DNA, 15 bp, Homo sapiens
agagacagagtctca

SEQ ID NO: 710548 - DNA, 15 bp, Homo sapiens
gagacagagtctcac

SEQ ID NO: 710549 - DNA, 15 bp, Homo sapiens
agacagagtctcact

SEQ ID NO: 710550 - DNA, 15 bp, Homo sapiens
gacagagtctcactc

SEQ ID NO: 710551 - DNA, 15 bp, Homo sapiens
acagagtctcactcc

SEQ ID NO: 710552 - DNA, 15 bp, Homo sapiens
cagagtctcactcca

SEQ ID NO: 710553 - DNA, 15 bp, Homo sapiens
agagtctcactccat

SEQ ID NO: 710554 - DNA, 15 bp, Homo sapiens
gagtctcactccatc

SEQ ID NO: 710555 - DNA, 15 bp, Homo sapiens
agtctcactccatca

SEQ ID NO: 710556 - DNA, 15 bp, Homo sapiens
gtctcactccatcac

SEQ ID NO: 710557 - DNA, 15 bp, Homo sapiens
tctcactccatcacc

SEQ ID NO: 710558 - DNA, 15 bp, Homo sapiens
ctcactccatcaccc

SEQ ID NO: 710559 - DNA, 15 bp, Homo sapiens
tcactccatcaccca

SEQ ID NO: 710560 - DNA, 15 bp, Homo sapiens
cactccatcacccat

SEQ ID NO: 710561 - DNA, 15 bp, Homo sapiens
actccatcacccatg

SEQ ID NO: 710562 - DNA, 15 bp, Homo sapiens
ctccatcacccatgc

SEQ ID NO: 710563 - DNA, 15 bp, Homo sapiens
tccatcacccatgct

SEQ ID NO: 710564 - DNA, 15 bp, Homo sapiens
ccatcacccatgctg

SEQ ID NO: 710565 - DNA, 15 bp, Homo sapiens
catcacccatgctgg

SEQ ID NO: 710566 - DNA, 15 bp, Homo sapiens
atcacccatgctgga

SEQ ID NO: 710567 - DNA, 15 bp, Homo sapiens
tcacccatgctggag

SEQ ID NO: 710568 - DNA, 15 bp, Homo sapiens
cacccatgctggagt

SEQ ID NO: 710569 - DNA, 15 bp, Homo sapiens
acccatgctggagta

SEQ ID NO: 710570 - DNA, 15 bp, Homo sapiens
cccatgctggagtac

SEQ ID NO: 710571 - DNA, 15 bp, Homo sapiens
ccatgctggagtaca

SEQ ID NO: 710572 - DNA, 15 bp, Homo sapiens
catgctggagtacag

SEQ ID NO: 710573 - DNA, 15 bp, Homo sapiens
atgctggagtacagt

SEQ ID NO: 710574 - DNA, 15 bp, Homo sapiens
tgctggagtacagtg

SEQ ID NO: 710575 - DNA, 15 bp, Homo sapiens
gctggagtacagtgg

SEQ ID NO: 710576 - DNA, 15 bp, Homo sapiens
ctggagtacagtggt

SEQ ID NO: 710577 - DNA, 15 bp, Homo sapiens
tggagtacagtggtg

SEQ ID NO: 710578 - DNA, 15 bp, Homo sapiens
ggagtacagtggtgc

SEQ ID NO: 710579 - DNA, 15 bp, Homo sapiens
gagtacagtggtgcg

SEQ ID NO: 710580 - DNA, 15 bp, Homo sapiens
agtacagtggtgcga

SEQ ID NO: 710581 - DNA, 15 bp, Homo sapiens
gtacagtggtgcgat

SEQ ID NO: 710582 - DNA, 15 bp, Homo sapiens
tacagtggtgcgatc

SEQ ID NO: 710583 - DNA, 15 bp, Homo sapiens
acagtggtgcgatct

SEQ ID NO: 710584 - DNA, 15 bp, Homo sapiens
ttggctcactgcaat

SEQ ID NO: 710585 - DNA, 15 bp, Homo sapiens
tggctcactgcaatc

SEQ ID NO: 710586 - DNA, 15 bp, Homo sapiens
ggctcactgcaatct

SEQ ID NO: 710587 - DNA, 15 bp, Homo sapiens
gctcactgcaatctt

SEQ ID NO: 710588 - DNA, 15 bp, Homo sapiens
ctcactgcaatcttg

SEQ ID NO: 710589 - DNA, 15 bp, Homo sapiens
tcactgcaatcttgg

SEQ ID NO: 710590 - DNA, 15 bp, Homo sapiens
cactgcaatcttggc

SEQ ID NO: 710591 - DNA, 15 bp, Homo sapiens
actgcaatcttggcc

SEQ ID NO: 710592 - DNA, 15 bp, Homo sapiens
ctgcaatcttggcct

SEQ ID NO: 710593 - DNA, 15 bp, Homo sapiens
tgcaatcttggcctc

SEQ ID NO: 710594 - DNA, 15 bp, Homo sapiens
gcaatcttggcctcc

SEQ ID NO: 710595 - DNA, 15 bp, Homo sapiens
caatcttggcctcct

SEQ ID NO: 710596 - DNA, 15 bp, Homo sapiens
aatcttggcctcctg

SEQ ID NO: 710597 - DNA, 15 bp, Homo sapiens
atcttggcctcctga

SEQ ID NO: 710598 - DNA, 15 bp, Homo sapiens
tcttggcctcctgag

SEQ ID NO: 710599 - DNA, 15 bp, Homo sapiens
cttggcctcctgagt

SEQ ID NO: 710600 - DNA, 15 bp, Homo sapiens
ttggcctcctgagtt

SEQ ID NO: 710601 - DNA, 15 bp, Homo sapiens
tggcctcctgagttc

SEQ ID NO: 710602 - DNA, 15 bp, Homo sapiens
ggcctcctgagttca

SEQ ID NO: 710603 - DNA, 15 bp, Homo sapiens
gcctcctgagttcaa

SEQ ID NO: 710604 - DNA, 15 bp, Homo sapiens
cctcctgagttcaac

SEQ ID NO: 710605 - DNA, 15 bp, Homo sapiens
ctcctgagttcaacc

SEQ ID NO: 710606 - DNA, 15 bp, Homo sapiens
tcctgagttcaacca

SEQ ID NO: 710607 - DNA, 15 bp, Homo sapiens
cctgagttcaaccaa

SEQ ID NO: 710608 - DNA, 15 bp, Homo sapiens
ctgagttcaaccaat

SEQ ID NO: 710609 - DNA, 15 bp, Homo sapiens
tgagttcaaccaatt

SEQ ID NO: 710610 - DNA, 15 bp, Homo sapiens
gagttcaaccaattc

SEQ ID NO: 710611 - DNA, 15 bp, Homo sapiens
agttcaaccaattct

SEQ ID NO: 710612 - DNA, 15 bp, Homo sapiens
gttcaaccaattctc

SEQ ID NO: 710613 - DNA, 15 bp, Homo sapiens
ttcaaccaattctca

SEQ ID NO: 710614 - DNA, 15 bp, Homo sapiens
tcaaccaattctcat

SEQ ID NO: 710615 - DNA, 15 bp, Homo sapiens
caaccaattctcatg

SEQ ID NO: 710616 - DNA, 15 bp, Homo sapiens
aaccaattctcatgc

SEQ ID NO: 710617 - DNA, 15 bp, Homo sapiens
accaattctcatgcc

SEQ ID NO: 710618 - DNA, 15 bp, Homo sapiens
ccaattctcatgcct

SEQ ID NO: 710619 - DNA, 15 bp, Homo sapiens
caattctcatgcctc

SEQ ID NO: 710620 - DNA, 15 bp, Homo sapiens
aattctcatgcctca

SEQ ID NO: 710621 - DNA, 15 bp, Homo sapiens
attctcatgcctcag

SEQ ID NO: 710622 - DNA, 15 bp, Homo sapiens
ttctcatgcctcagc

SEQ ID NO: 710623 - DNA, 15 bp, Homo sapiens
tctcatgcctcagcc

SEQ ID NO: 710624 - DNA, 15 bp, Homo sapiens
ctcatgcctcagcct

SEQ ID NO: 710625 - DNA, 15 bp, Homo sapiens
tcatgcctcagcctc

SEQ ID NO: 710626 - DNA, 15 bp, Homo sapiens
catgcctcagcctcc

SEQ ID NO: 710627 - DNA, 15 bp, Homo sapiens
atgcctcagcctccc

SEQ ID NO: 710628 - DNA, 15 bp, Homo sapiens
ctcagcctcccaaat

SEQ ID NO: 710629 - DNA, 15 bp, Homo sapiens
tcagcctcccaaata

SEQ ID NO: 710630 - DNA, 15 bp, Homo sapiens
cagcctcccaaatag

SEQ ID NO: 710631 - DNA, 15 bp, Homo sapiens
agcctcccaaatagc

SEQ ID NO: 710632 - DNA, 15 bp, Homo sapiens
gcctcccaaatagct

SEQ ID NO: 710633 - DNA, 15 bp, Homo sapiens
cctcccaaatagctg

SEQ ID NO: 710634 - DNA, 15 bp, Homo sapiens
ctcccaaatagctgg

SEQ ID NO: 710635 - DNA, 15 bp, Homo sapiens
tcccaaatagctggg

SEQ ID NO: 710636 - DNA, 15 bp, Homo sapiens
cccaaatagctggga

SEQ ID NO: 710637 - DNA, 15 bp, Homo sapiens
ccaaatagctgggac

SEQ ID NO: 710638 - DNA, 15 bp, Homo sapiens
caaatagctgggacc

SEQ ID NO: 710639 - DNA, 15 bp, Homo sapiens
aaatagctgggacca

SEQ ID NO: 710640 - DNA, 15 bp, Homo sapiens
aatagctgggaccac

SEQ ID NO: 710641 - DNA, 15 bp, Homo sapiens
atagctgggaccaca

SEQ ID NO: 710642 - DNA, 15 bp, Homo sapiens
tagctgggaccacag

SEQ ID NO: 710643 - DNA, 15 bp, Homo sapiens
agctgggaccacagg

SEQ ID NO: 710644 - DNA, 15 bp, Homo sapiens
gctgggaccacaggc

SEQ ID NO: 710645 - DNA, 15 bp, Homo sapiens
ctgggaccacaggca

SEQ ID NO: 710646 - DNA, 15 bp, Homo sapiens
tgggaccacaggcac

SEQ ID NO: 710647 - DNA, 15 bp, Homo sapiens
gggaccacaggcacg

SEQ ID NO: 710648 - DNA, 15 bp, Homo sapiens
ggaccacaggcacgt

SEQ ID NO: 710649 - DNA, 15 bp, Homo sapiens
gaccacaggcacgtt

SEQ ID NO: 710650 - DNA, 15 bp, Homo sapiens
accacaggcacgttc

SEQ ID NO: 710651 - DNA, 15 bp, Homo sapiens
ccacaggcacgttcc

SEQ ID NO: 710652 - DNA, 15 bp, Homo sapiens
cacaggcacgttcca

SEQ ID NO: 710653 - DNA, 15 bp, Homo sapiens
acaggcacgttccac

SEQ ID NO: 710654 - DNA, 15 bp, Homo sapiens
caggcacgttccacc

SEQ ID NO: 710655 - DNA, 15 bp, Homo sapiens
aggcacgttccacca

SEQ ID NO: 710656 - DNA, 15 bp, Homo sapiens
ggcacgttccaccac

SEQ ID NO: 710657 - DNA, 15 bp, Homo sapiens
gcacgttccaccacg

SEQ ID NO: 710658 - DNA, 15 bp, Homo sapiens
cacgttccaccacgc

SEQ ID NO: 710659 - DNA, 15 bp, Homo sapiens
acgttccaccacgcc

SEQ ID NO: 710660 - DNA, 15 bp, Homo sapiens
cgttccaccacgccc

SEQ ID NO: 710661 - DNA, 15 bp, Homo sapiens
gttccaccacgccca

SEQ ID NO: 710662 - DNA, 15 bp, Homo sapiens
ttccaccacgcccag

SEQ ID NO: 710663 - DNA, 15 bp, Homo sapiens
tccaccacgcccagc

SEQ ID NO: 710664 - DNA, 15 bp, Homo sapiens
ccaccacgcccagct

SEQ ID NO: 710665 - DNA, 15 bp, Homo sapiens
caccacgcccagcta

SEQ ID NO: 710666 - DNA, 15 bp, Homo sapiens
accacgcccagctaa

SEQ ID NO: 710667 - DNA, 15 bp, Homo sapiens
ccacgcccagctaat

SEQ ID NO: 710668 - DNA, 15 bp, Homo sapiens
cacgcccagctaatt

SEQ ID NO: 710669 - DNA, 15 bp, Homo sapiens
acgcccagctaattt

SEQ ID NO: 710670 - DNA, 15 bp, Homo sapiens
cgcccagctaatttt

SEQ ID NO: 710671 - DNA, 15 bp, Homo sapiens
cccagctaatttttt

SEQ ID NO: 710672 - DNA, 15 bp, Homo sapiens
ccagctaattttttg

SEQ ID NO: 710673 - DNA, 15 bp, Homo sapiens
cagctaattttttgg

SEQ ID NO: 710674 - DNA, 15 bp, Homo sapiens
agctaattttttggg

SEQ ID NO: 710675 - DNA, 15 bp, Homo sapiens
gctaattttttgggt

SEQ ID NO: 710676 - DNA, 15 bp, Homo sapiens
ctaattttttgggta

SEQ ID NO: 710677 - DNA, 15 bp, Homo sapiens
taattttttgggtat

SEQ ID NO: 710678 - DNA, 15 bp, Homo sapiens
aattttttgggtatt

SEQ ID NO: 710679 - DNA, 15 bp, Homo sapiens
attttttgggtattt

SEQ ID NO: 710680 - DNA, 15 bp, Homo sapiens
ttttttgggtatttt

SEQ ID NO: 710681 - DNA, 15 bp, Homo sapiens
tttttgggtattttt

SEQ ID NO: 710682 - DNA, 15 bp, Homo sapiens
ttttgggtattttta

SEQ ID NO: 710683 - DNA, 15 bp, Homo sapiens
tttgggtatttttag

SEQ ID NO: 710684 - DNA, 15 bp, Homo sapiens
ttgggtatttttagt

SEQ ID NO: 710685 - DNA, 15 bp, Homo sapiens
tgggtatttttagta

SEQ ID NO: 710686 - DNA, 15 bp, Homo sapiens
gggtatttttagtag

SEQ ID NO: 710687 - DNA, 15 bp, Homo sapiens
ggtatttttagtaga

SEQ ID NO: 710688 - DNA, 15 bp, Homo sapiens
tagtagagatggggc

SEQ ID NO: 710689 - DNA, 15 bp, Homo sapiens
agtagagatggggcc

SEQ ID NO: 710690 - DNA, 15 bp, Homo sapiens
gtagagatggggcct

SEQ ID NO: 710691 - DNA, 15 bp, Homo sapiens
tagagatggggcctc

SEQ ID NO: 710692 - DNA, 15 bp, Homo sapiens
agagatggggcctca

SEQ ID NO: 710693 - DNA, 15 bp, Homo sapiens
gagatggggcctcac

SEQ ID NO: 710694 - DNA, 15 bp, Homo sapiens
agatggggcctcacc

SEQ ID NO: 710695 - DNA, 15 bp, Homo sapiens
gatggggcctcacca

SEQ ID NO: 710696 - DNA, 15 bp, Homo sapiens
atggggcctcaccat

SEQ ID NO: 710697 - DNA, 15 bp, Homo sapiens
tggggcctcaccatg

SEQ ID NO: 710698 - DNA, 15 bp, Homo sapiens
ggggcctcaccatgt

SEQ ID NO: 710699 - DNA, 15 bp, Homo sapiens
gggcctcaccatgtt

SEQ ID NO: 710700 - DNA, 15 bp, Homo sapiens
ggcctcaccatgttg

SEQ ID NO: 710701 - DNA, 15 bp, Homo sapiens
gcctcaccatgttgc

SEQ ID NO: 710702 - DNA, 15 bp, Homo sapiens
cctcaccatgttgct

SEQ ID NO: 710703 - DNA, 15 bp, Homo sapiens
ctcaccatgttgctc

SEQ ID NO: 710704 - DNA, 15 bp, Homo sapiens
tcaccatgttgctca

SEQ ID NO: 710705 - DNA, 15 bp, Homo sapiens
caccatgttgctcag

SEQ ID NO: 710706 - DNA, 15 bp, Homo sapiens
accatgttgctcagg

SEQ ID NO: 710707 - DNA, 15 bp, Homo sapiens
ccatgttgctcaggt

SEQ ID NO: 710708 - DNA, 15 bp, Homo sapiens
catgttgctcaggtt

SEQ ID NO: 710709 - DNA, 15 bp, Homo sapiens
atgttgctcaggttg

SEQ ID NO: 710710 - DNA, 15 bp, Homo sapiens
tgttgctcaggttgg

SEQ ID NO: 710711 - DNA, 15 bp, Homo sapiens
gttgctcaggttggt

SEQ ID NO: 710712 - DNA, 15 bp, Homo sapiens
ttgctcaggttggtc

SEQ ID NO: 710713 - DNA, 15 bp, Homo sapiens
tgctcaggttggtct

SEQ ID NO: 710714 - DNA, 15 bp, Homo sapiens
gctcaggttggtctg

SEQ ID NO: 710715 - DNA, 15 bp, Homo sapiens
ctcaggttggtctga

SEQ ID NO: 710716 - DNA, 15 bp, Homo sapiens
tcaggttggtctgaa

SEQ ID NO: 710717 - DNA, 15 bp, Homo sapiens
caggttggtctgaaa

SEQ ID NO: 710718 - DNA, 15 bp, Homo sapiens
aggttggtctgaaac

SEQ ID NO: 710719 - DNA, 15 bp, Homo sapiens
ggttggtctgaaact

SEQ ID NO: 710720 - DNA, 15 bp, Homo sapiens
gttggtctgaaactc

SEQ ID NO: 710721 - DNA, 15 bp, Homo sapiens
ttggtctgaaactcc

SEQ ID NO: 710722 - DNA, 15 bp, Homo sapiens
tggtctgaaactcct

SEQ ID NO: 710723 - DNA, 15 bp, Homo sapiens
ggtctgaaactcctg

SEQ ID NO: 710724 - DNA, 15 bp, Homo sapiens
gtctgaaactcctga

SEQ ID NO: 710725 - DNA, 15 bp, Homo sapiens
tctgaaactcctgag

SEQ ID NO: 710726 - DNA, 15 bp, Homo sapiens
ctgaaactcctgagc

SEQ ID NO: 710727 - DNA, 15 bp, Homo sapiens
tgaaactcctgagct

SEQ ID NO: 710728 - DNA, 15 bp, Homo sapiens
gaaactcctgagctc

SEQ ID NO: 710729 - DNA, 15 bp, Homo sapiens
aaactcctgagctca

SEQ ID NO: 710730 - DNA, 15 bp, Homo sapiens
aactcctgagctcaa

SEQ ID NO: 710731 - DNA, 15 bp, Homo sapiens
actcctgagctcaag

SEQ ID NO: 710732 - DNA, 15 bp, Homo sapiens
ctcctgagctcaagt

SEQ ID NO: 710733 - DNA, 15 bp, Homo sapiens
tcctgagctcaagtg

SEQ ID NO: 710734 - DNA, 15 bp, Homo sapiens
cctgagctcaagtga

SEQ ID NO: 710735 - DNA, 15 bp, Homo sapiens
ctgagctcaagtgat

SEQ ID NO: 710736 - DNA, 15 bp, Homo sapiens
tgagctcaagtgatc

SEQ ID NO: 710737 - DNA, 15 bp, Homo sapiens
gagctcaagtgatcc

SEQ ID NO: 710738 - DNA, 15 bp, Homo sapiens
agctcaagtgatcca

SEQ ID NO: 710739 - DNA, 15 bp, Homo sapiens
gctcaagtgatccat

SEQ ID NO: 710740 - DNA, 15 bp, Homo sapiens
ctcaagtgatccatc

SEQ ID NO: 710741 - DNA, 15 bp, Homo sapiens
tcaagtgatccatct

SEQ ID NO: 710742 - DNA, 15 bp, Homo sapiens
caagtgatccatctt

SEQ ID NO: 710743 - DNA, 15 bp, Homo sapiens
aagtgatccatcttc

SEQ ID NO: 710744 - DNA, 15 bp, Homo sapiens
agtgatccatcttcc

SEQ ID NO: 710745 - DNA, 15 bp, Homo sapiens
gtgatccatcttcct

SEQ ID NO: 710746 - DNA, 15 bp, Homo sapiens
tgatccatcttcctc

SEQ ID NO: 710747 - DNA, 15 bp, Homo sapiens
gatccatcttcctcg

SEQ ID NO: 710748 - DNA, 15 bp, Homo sapiens
atccatcttcctcgg

SEQ ID NO: 710749 - DNA, 15 bp, Homo sapiens
tccatcttcctcggc

SEQ ID NO: 710750 - DNA, 15 bp, Homo sapiens
ccatcttcctcggcc

SEQ ID NO: 710751 - DNA, 15 bp, Homo sapiens
catcttcctcggcct

SEQ ID NO: 710752 - DNA, 15 bp, Homo sapiens
atcttcctcggcctg

SEQ ID NO: 710753 - DNA, 15 bp, Homo sapiens
tcttcctcggcctgc

SEQ ID NO: 710754 - DNA, 15 bp, Homo sapiens
cttcctcggcctgcc

SEQ ID NO: 710755 - DNA, 15 bp, Homo sapiens
ttcctcggcctgcca

SEQ ID NO: 710756 - DNA, 15 bp, Homo sapiens
tcctcggcctgccaa

SEQ ID NO: 710757 - DNA, 15 bp, Homo sapiens
cctcggcctgccaaa

SEQ ID NO: 710758 - DNA, 15 bp, Homo sapiens
ctcggcctgccaaag

SEQ ID NO: 710759 - DNA, 15 bp, Homo sapiens
tcggcctgccaaagt

SEQ ID NO: 710760 - DNA, 15 bp, Homo sapiens
cggcctgccaaagtg

SEQ ID NO: 710761 - DNA, 15 bp, Homo sapiens
ggcctgccaaagtgc

SEQ ID NO: 710762 - DNA, 15 bp, Homo sapiens
gcctgccaaagtgct

SEQ ID NO: 710763 - DNA, 15 bp, Homo sapiens
cctgccaaagtgctg

SEQ ID NO: 710764 - DNA, 15 bp, Homo sapiens
ctgccaaagtgctgg

SEQ ID NO: 710765 - DNA, 15 bp, Homo sapiens
tgccaaagtgctggg

SEQ ID NO: 710766 - DNA, 15 bp, Homo sapiens
gccaaagtgctggga

SEQ ID NO: 710767 - DNA, 15 bp, Homo sapiens
gggattataggcata

SEQ ID NO: 710768 - DNA, 15 bp, Homo sapiens
ggattataggcataa

SEQ ID NO: 710769 - DNA, 15 bp, Homo sapiens
gattataggcataag

SEQ ID NO: 710770 - DNA, 15 bp, Homo sapiens
attataggcataagc

SEQ ID NO: 710771 - DNA, 15 bp, Homo sapiens
ttataggcataagcc

SEQ ID NO: 710772 - DNA, 15 bp, Homo sapiens
tataggcataagcca

SEQ ID NO: 710773 - DNA, 15 bp, Homo sapiens
ataggcataagccac

SEQ ID NO: 710774 - DNA, 15 bp, Homo sapiens
taggcataagccact

SEQ ID NO: 710775 - DNA, 15 bp, Homo sapiens
aggcataagccactg

SEQ ID NO: 710776 - DNA, 15 bp, Homo sapiens
ggcataagccactgc

SEQ ID NO: 710777 - DNA, 15 bp, Homo sapiens
gcataagccactgca

SEQ ID NO: 710778 - DNA, 15 bp, Homo sapiens
cataagccactgcac

SEQ ID NO: 710779 - DNA, 15 bp, Homo sapiens
ataagccactgcacc

SEQ ID NO: 710780 - DNA, 15 bp, Homo sapiens
taagccactgcacct

SEQ ID NO: 710781 - DNA, 15 bp, Homo sapiens
aagccactgcacctg

SEQ ID NO: 710782 - DNA, 15 bp, Homo sapiens
agccactgcacctgg

SEQ ID NO: 710783 - DNA, 15 bp, Homo sapiens
gccactgcacctggc

SEQ ID NO: 710784 - DNA, 15 bp, Homo sapiens
ccactgcacctggct

SEQ ID NO: 710785 - DNA, 15 bp, Homo sapiens
cactgcacctggctc

SEQ ID NO: 710786 - DNA, 15 bp, Homo sapiens
actgcacctggctcc

SEQ ID NO: 710787 - DNA, 15 bp, Homo sapiens
ctgcacctggctccc

SEQ ID NO: 710788 - DNA, 15 bp, Homo sapiens
tgcacctggctccca

SEQ ID NO: 710789 - DNA, 15 bp, Homo sapiens
gcacctggctcccaa

SEQ ID NO: 710790 - DNA, 15 bp, Homo sapiens
cacctggctcccaat

SEQ ID NO: 710791 - DNA, 15 bp, Homo sapiens
acctggctcccaatt

SEQ ID NO: 710792 - DNA, 15 bp, Homo sapiens
cctggctcccaattt

SEQ ID NO: 710793 - DNA, 15 bp, Homo sapiens
ctggctcccaatttt

SEQ ID NO: 710794 - DNA, 15 bp, Homo sapiens
tggctcccaattttt

SEQ ID NO: 710795 - DNA, 15 bp, Homo sapiens
ggctcccaattttta

SEQ ID NO: 710796 - DNA, 15 bp, Homo sapiens
gctcccaatttttat

SEQ ID NO: 710797 - DNA, 15 bp, Homo sapiens
ctcccaatttttata

SEQ ID NO: 710798 - DNA, 15 bp, Homo sapiens
tcccaatttttatat

SEQ ID NO: 710799 - DNA, 15 bp, Homo sapiens
cccaatttttatatt

SEQ ID NO: 710800 - DNA, 15 bp, Homo sapiens
ccaatttttatattt

SEQ ID NO: 710801 - DNA, 15 bp, Homo sapiens
caatttttatattta

SEQ ID NO: 710802 - DNA, 15 bp, Homo sapiens
aatttttatatttat

SEQ ID NO: 710803 - DNA, 15 bp, Homo sapiens
atttttatatttata

SEQ ID NO: 710804 - DNA, 15 bp, Homo sapiens
tttttatatttatat

SEQ ID NO: 710805 - DNA, 15 bp, Homo sapiens
ttttatatttatatt

SEQ ID NO: 710806 - DNA, 15 bp, Homo sapiens
tttatatttatattt

SEQ ID NO: 710807 - DNA, 15 bp, Homo sapiens
ttatatttatattta

SEQ ID NO: 710808 - DNA, 15 bp, Homo sapiens
tatatttatatttat

SEQ ID NO: 710809 - DNA, 15 bp, Homo sapiens
atatttatatttatt

SEQ ID NO: 710810 - DNA, 15 bp, Homo sapiens
tatttatatttattt

SEQ ID NO: 710811 - DNA, 15 bp, Homo sapiens
atttatatttatttt

SEQ ID NO: 710812 - DNA, 15 bp, Homo sapiens
tttatatttattttt

SEQ ID NO: 710813 - DNA, 15 bp, Homo sapiens
ttatatttattttta

SEQ ID NO: 710814 - DNA, 15 bp, Homo sapiens
tatatttatttttat

SEQ ID NO: 710815 - DNA, 15 bp, Homo sapiens
atatttatttttatt

SEQ ID NO: 710816 - DNA, 15 bp, Homo sapiens
tatttatttttattt

SEQ ID NO: 710817 - DNA, 15 bp, Homo sapiens
atttatttttattta

SEQ ID NO: 710818 - DNA, 15 bp, Homo sapiens
tttatttttatttac

SEQ ID NO: 710819 - DNA, 15 bp, Homo sapiens
ttatttttatttact

SEQ ID NO: 710820 - DNA, 15 bp, Homo sapiens
tatttttatttactt

SEQ ID NO: 710821 - DNA, 15 bp, Homo sapiens
atttttatttactta

SEQ ID NO: 710822 - DNA, 15 bp, Homo sapiens
tttttatttacttat

SEQ ID NO: 710823 - DNA, 15 bp, Homo sapiens
ttttatttacttatt

SEQ ID NO: 710824 - DNA, 15 bp, Homo sapiens
tttatttacttattt

SEQ ID NO: 710825 - DNA, 15 bp, Homo sapiens
ttatttacttattta

SEQ ID NO: 710826 - DNA, 15 bp, Homo sapiens
tatttacttatttat

SEQ ID NO: 710827 - DNA, 15 bp, Homo sapiens
atttacttatttatt

SEQ ID NO: 710828 - DNA, 15 bp, Homo sapiens
tttacttatttattt

SEQ ID NO: 710829 - DNA, 15 bp, Homo sapiens
ttacttatttatttt

SEQ ID NO: 710830 - DNA, 15 bp, Homo sapiens
tacttatttattttt

SEQ ID NO: 710831 - DNA, 15 bp, Homo sapiens
acttatttatttttt

SEQ ID NO: 710832 - DNA, 15 bp, Homo sapiens
cttatttattttttg

SEQ ID NO: 710833 - DNA, 15 bp, Homo sapiens
ttatttattttttga

SEQ ID NO: 710834 - DNA, 15 bp, Homo sapiens
tatttattttttgag

SEQ ID NO: 710835 - DNA, 15 bp, Homo sapiens
atttattttttgaga

SEQ ID NO: 710836 - DNA, 15 bp, Homo sapiens
tttattttttgagac

SEQ ID NO: 710837 - DNA, 15 bp, Homo sapiens
ttattttttgagaca

SEQ ID NO: 710838 - DNA, 15 bp, Homo sapiens
tattttttgagacag

SEQ ID NO: 710839 - DNA, 15 bp, Homo sapiens
attttttgagacagg

SEQ ID NO: 710840 - DNA, 15 bp, Homo sapiens
ttttttgagacaggg

SEQ ID NO: 710841 - DNA, 15 bp, Homo sapiens
tttttgagacagggt

SEQ ID NO: 710842 - DNA, 15 bp, Homo sapiens
ttttgagacagggtc

SEQ ID NO: 710843 - DNA, 15 bp, Homo sapiens
tttgagacagggtct

SEQ ID NO: 710844 - DNA, 15 bp, Homo sapiens
ttgagacagggtctc

SEQ ID NO: 710845 - DNA, 15 bp, Homo sapiens
tgagacagggtctca

SEQ ID NO: 710846 - DNA, 15 bp, Homo sapiens
gagacagggtctcac

SEQ ID NO: 710847 - DNA, 15 bp, Homo sapiens
agacagggtctcact

SEQ ID NO: 710848 - DNA, 15 bp, Homo sapiens
gacagggtctcactc

SEQ ID NO: 710849 - DNA, 15 bp, Homo sapiens
acagggtctcactct

SEQ ID NO: 710850 - DNA, 15 bp, Homo sapiens
cagggtctcactctg

SEQ ID NO: 710851 - DNA, 15 bp, Homo sapiens
agggtctcactctgt

SEQ ID NO: 710852 - DNA, 15 bp, Homo sapiens
gggtctcactctgtc

SEQ ID NO: 710853 - DNA, 15 bp, Homo sapiens
ggtctcactctgtca

SEQ ID NO: 710854 - DNA, 15 bp, Homo sapiens
gtctcactctgtcac

SEQ ID NO: 710855 - DNA, 15 bp, Homo sapiens
tctcactctgtcacc

SEQ ID NO: 710856 - DNA, 15 bp, Homo sapiens
ctcactctgtcaccc

SEQ ID NO: 710857 - DNA, 15 bp, Homo sapiens
tcactctgtcaccca

SEQ ID NO: 710858 - DNA, 15 bp, Homo sapiens
cactctgtcacccag

SEQ ID NO: 710859 - DNA, 15 bp, Homo sapiens
actctgtcacccagg

SEQ ID NO: 710860 - DNA, 15 bp, Homo sapiens
acccaggctggagta

SEQ ID NO: 710861 - DNA, 15 bp, Homo sapiens
cccaggctggagtac

SEQ ID NO: 710862 - DNA, 15 bp, Homo sapiens
ccaggctggagtaca

SEQ ID NO: 710863 - DNA, 15 bp, Homo sapiens
caggctggagtacag

SEQ ID NO: 710864 - DNA, 15 bp, Homo sapiens
aggctggagtacagt

SEQ ID NO: 710865 - DNA, 15 bp, Homo sapiens
ggctggagtacagtg

SEQ ID NO: 710866 - DNA, 15 bp, Homo sapiens
ctggagtacagtggc

SEQ ID NO: 710867 - DNA, 15 bp, Homo sapiens
tggagtacagtggca

SEQ ID NO: 710868 - DNA, 15 bp, Homo sapiens
ggagtacagtggcac

SEQ ID NO: 710869 - DNA, 15 bp, Homo sapiens
gagtacagtggcact

SEQ ID NO: 710870 - DNA, 15 bp, Homo sapiens
agtacagtggcacta

SEQ ID NO: 710871 - DNA, 15 bp, Homo sapiens
gtacagtggcactat

SEQ ID NO: 710872 - DNA, 15 bp, Homo sapiens
tacagtggcactatc

SEQ ID NO: 710873 - DNA, 15 bp, Homo sapiens
acagtggcactatct

SEQ ID NO: 710874 - DNA, 15 bp, Homo sapiens
cagtggcactatctc

SEQ ID NO: 710875 - DNA, 15 bp, Homo sapiens
agtggcactatctca

SEQ ID NO: 710876 - DNA, 15 bp, Homo sapiens
gtggcactatctcag

SEQ ID NO: 710877 - DNA, 15 bp, Homo sapiens
tggcactatctcagc

SEQ ID NO: 710878 - DNA, 15 bp, Homo sapiens
ggcactatctcagct

SEQ ID NO: 710879 - DNA, 15 bp, Homo sapiens
gcactatctcagctc

SEQ ID NO: 710880 - DNA, 15 bp, Homo sapiens
cactatctcagctca

SEQ ID NO: 710881 - DNA, 15 bp, Homo sapiens
actatctcagctcat

SEQ ID NO: 710882 - DNA, 15 bp, Homo sapiens
ctatctcagctcatt

SEQ ID NO: 710883 - DNA, 15 bp, Homo sapiens
tatctcagctcattg

SEQ ID NO: 710884 - DNA, 15 bp, Homo sapiens
atctcagctcattgc

SEQ ID NO: 710885 - DNA, 15 bp, Homo sapiens
tctcagctcattgca

SEQ ID NO: 710886 - DNA, 15 bp, Homo sapiens
ctcagctcattgcaa

SEQ ID NO: 710887 - DNA, 15 bp, Homo sapiens
tcagctcattgcaac

SEQ ID NO: 710888 - DNA, 15 bp, Homo sapiens
cagctcattgcaacc

SEQ ID NO: 710889 - DNA, 15 bp, Homo sapiens
agctcattgcaacct

SEQ ID NO: 710890 - DNA, 15 bp, Homo sapiens
gctcattgcaacctc

SEQ ID NO: 710891 - DNA, 15 bp, Homo sapiens
ctcattgcaacctct

SEQ ID NO: 710892 - DNA, 15 bp, Homo sapiens
tcattgcaacctctg

SEQ ID NO: 710893 - DNA, 15 bp, Homo sapiens
cattgcaacctctgc

SEQ ID NO: 710894 - DNA, 15 bp, Homo sapiens
attgcaacctctgcc

SEQ ID NO: 710895 - DNA, 15 bp, Homo sapiens
ttgcaacctctgcct

SEQ ID NO: 710896 - DNA, 15 bp, Homo sapiens
caacctctgcctcct

SEQ ID NO: 710897 - DNA, 15 bp, Homo sapiens
aacctctgcctcctg

SEQ ID NO: 710898 - DNA, 15 bp, Homo sapiens
acctctgcctcctgg

SEQ ID NO: 710899 - DNA, 15 bp, Homo sapiens
tcctgggttcaagcg

SEQ ID NO: 710900 - DNA, 15 bp, Homo sapiens
cctgggttcaagcga

SEQ ID NO: 710901 - DNA, 15 bp, Homo sapiens
ctgggttcaagcgaa

SEQ ID NO: 710902 - DNA, 15 bp, Homo sapiens
tgggttcaagcgaat

SEQ ID NO: 710903 - DNA, 15 bp, Homo sapiens
gggttcaagcgaatc

SEQ ID NO: 710904 - DNA, 15 bp, Homo sapiens
ggttcaagcgaatct

SEQ ID NO: 710905 - DNA, 15 bp, Homo sapiens
gttcaagcgaatctc

SEQ ID NO: 710906 - DNA, 15 bp, Homo sapiens
ttcaagcgaatctcg

SEQ ID NO: 710907 - DNA, 15 bp, Homo sapiens
tcaagcgaatctcgt

SEQ ID NO: 710908 - DNA, 15 bp, Homo sapiens
caagcgaatctcgtg

SEQ ID NO: 710909 - DNA, 15 bp, Homo sapiens
aagcgaatctcgtgc

SEQ ID NO: 710910 - DNA, 15 bp, Homo sapiens
agcgaatctcgtgcc

SEQ ID NO: 710911 - DNA, 15 bp, Homo sapiens
gcgaatctcgtgcct

SEQ ID NO: 710912 - DNA, 15 bp, Homo sapiens
cgaatctcgtgcctc

SEQ ID NO: 710913 - DNA, 15 bp, Homo sapiens
gaatctcgtgcctca

SEQ ID NO: 710914 - DNA, 15 bp, Homo sapiens
aatctcgtgcctcag

SEQ ID NO: 710915 - DNA, 15 bp, Homo sapiens
atctcgtgcctcagc

SEQ ID NO: 710916 - DNA, 15 bp, Homo sapiens
tctcgtgcctcagcc

SEQ ID NO: 710917 - DNA, 15 bp, Homo sapiens
ctcgtgcctcagcct

SEQ ID NO: 710918 - DNA, 15 bp, Homo sapiens
tcgtgcctcagcctc

SEQ ID NO: 710919 - DNA, 15 bp, Homo sapiens
cgtgcctcagcctcc

SEQ ID NO: 710920 - DNA, 15 bp, Homo sapiens
gtgcctcagcctcct

SEQ ID NO: 710921 - DNA, 15 bp, Homo sapiens
cagcctcctgagtag

SEQ ID NO: 710922 - DNA, 15 bp, Homo sapiens
agcctcctgagtagc

SEQ ID NO: 710923 - DNA, 15 bp, Homo sapiens
gcctcctgagtagct

SEQ ID NO: 710924 - DNA, 15 bp, Homo sapiens
cctcctgagtagctg

SEQ ID NO: 710925 - DNA, 15 bp, Homo sapiens
ctcctgagtagctgg

SEQ ID NO: 710926 - DNA, 15 bp, Homo sapiens
tcctgagtagctggg

SEQ ID NO: 710927 - DNA, 15 bp, Homo sapiens
cctgagtagctggga

SEQ ID NO: 710928 - DNA, 15 bp, Homo sapiens
ctgagtagctgggat

SEQ ID NO: 710929 - DNA, 15 bp, Homo sapiens
tgagtagctgggatt

SEQ ID NO: 710930 - DNA, 15 bp, Homo sapiens
ggcatgcaccaccat

SEQ ID NO: 710931 - DNA, 15 bp, Homo sapiens
gcatgcaccaccatg

SEQ ID NO: 710932 - DNA, 15 bp, Homo sapiens
catgcaccaccatgc

SEQ ID NO: 710933 - DNA, 15 bp, Homo sapiens
atgcaccaccatgcc

SEQ ID NO: 710934 - DNA, 15 bp, Homo sapiens
tgcaccaccatgccc

SEQ ID NO: 710935 - DNA, 15 bp, Homo sapiens
gcaccaccatgcccc

SEQ ID NO: 710936 - DNA, 15 bp, Homo sapiens
caccaccatgccccg

SEQ ID NO: 710937 - DNA, 15 bp, Homo sapiens
accaccatgccccgt

SEQ ID NO: 710938 - DNA, 15 bp, Homo sapiens
ccaccatgccccgtt

SEQ ID NO: 710939 - DNA, 15 bp, Homo sapiens
caccatgccccgtta

SEQ ID NO: 710940 - DNA, 15 bp, Homo sapiens
accatgccccgttaa

SEQ ID NO: 710941 - DNA, 15 bp, Homo sapiens
ccatgccccgttaat

SEQ ID NO: 710942 - DNA, 15 bp, Homo sapiens
catgccccgttaatt

SEQ ID NO: 710943 - DNA, 15 bp, Homo sapiens
atgccccgttaattt

SEQ ID NO: 710944 - DNA, 15 bp, Homo sapiens
tgccccgttaatttt

SEQ ID NO: 710945 - DNA, 15 bp, Homo sapiens
gccccgttaattttt

SEQ ID NO: 710946 - DNA, 15 bp, Homo sapiens
ccccgttaatttttt

SEQ ID NO: 710947 - DNA, 15 bp, Homo sapiens
cccgttaattttttt

SEQ ID NO: 710948 - DNA, 15 bp, Homo sapiens
ccgttaatttttttg

SEQ ID NO: 710949 - DNA, 15 bp, Homo sapiens
cgttaatttttttgt

SEQ ID NO: 710950 - DNA, 15 bp, Homo sapiens
gttaatttttttgta

SEQ ID NO: 710951 - DNA, 15 bp, Homo sapiens
ttaatttttttgtat

SEQ ID NO: 710952 - DNA, 15 bp, Homo sapiens
taatttttttgtatt

SEQ ID NO: 710953 - DNA, 15 bp, Homo sapiens
aatttttttgtattt

SEQ ID NO: 710954 - DNA, 15 bp, Homo sapiens
ttagtagagacgggt

SEQ ID NO: 710955 - DNA, 15 bp, Homo sapiens
tagtagagacgggtt

SEQ ID NO: 710956 - DNA, 15 bp, Homo sapiens
agtagagacgggttt

SEQ ID NO: 710957 - DNA, 15 bp, Homo sapiens
gtagagacgggtttc

SEQ ID NO: 710958 - DNA, 15 bp, Homo sapiens
tagagacgggtttca

SEQ ID NO: 710959 - DNA, 15 bp, Homo sapiens
agagacgggtttcac

SEQ ID NO: 710960 - DNA, 15 bp, Homo sapiens
gagacgggtttcacc

SEQ ID NO: 710961 - DNA, 15 bp, Homo sapiens
agacgggtttcaccg

SEQ ID NO: 710962 - DNA, 15 bp, Homo sapiens
gacgggtttcaccgt

SEQ ID NO: 710963 - DNA, 15 bp, Homo sapiens
acgggtttcaccgtg

SEQ ID NO: 710964 - DNA, 15 bp, Homo sapiens
cgggtttcaccgtgt

SEQ ID NO: 710965 - DNA, 15 bp, Homo sapiens
gtttcaccgtgttgc

SEQ ID NO: 710966 - DNA, 15 bp, Homo sapiens
tttcaccgtgttgcc

SEQ ID NO: 710967 - DNA, 15 bp, Homo sapiens
ttcaccgtgttgccc

SEQ ID NO: 710968 - DNA, 15 bp, Homo sapiens
tcaccgtgttgccca

SEQ ID NO: 710969 - DNA, 15 bp, Homo sapiens
caccgtgttgcccag

SEQ ID NO: 710970 - DNA, 15 bp, Homo sapiens
accgtgttgcccagg

SEQ ID NO: 710971 - DNA, 15 bp, Homo sapiens
ccgtgttgcccagga

SEQ ID NO: 710972 - DNA, 15 bp, Homo sapiens
cgtgttgcccaggat

SEQ ID NO: 710973 - DNA, 15 bp, Homo sapiens
gtgttgcccaggatg

SEQ ID NO: 710974 - DNA, 15 bp, Homo sapiens
tgttgcccaggatgg

SEQ ID NO: 710975 - DNA, 15 bp, Homo sapiens
gttgcccaggatggt

SEQ ID NO: 710976 - DNA, 15 bp, Homo sapiens
ttgcccaggatggtc

SEQ ID NO: 710977 - DNA, 15 bp, Homo sapiens
tgcccaggatggtct

SEQ ID NO: 710978 - DNA, 15 bp, Homo sapiens
gcccaggatggtctc

SEQ ID NO: 710979 - DNA, 15 bp, Homo sapiens
cccaggatggtctcg

SEQ ID NO: 710980 - DNA, 15 bp, Homo sapiens
caggatggtctcgaa

SEQ ID NO: 710981 - DNA, 15 bp, Homo sapiens
aggatggtctcgaac

SEQ ID NO: 710982 - DNA, 15 bp, Homo sapiens
ggatggtctcgaact

SEQ ID NO: 710983 - DNA, 15 bp, Homo sapiens
gatggtctcgaactc

SEQ ID NO: 710984 - DNA, 15 bp, Homo sapiens
atggtctcgaactcc

SEQ ID NO: 710985 - DNA, 15 bp, Homo sapiens
tgacctcaagtgatt

SEQ ID NO: 710986 - DNA, 15 bp, Homo sapiens
acctcaagtgattca

SEQ ID NO: 710987 - DNA, 15 bp, Homo sapiens
cctcaagtgattcac

SEQ ID NO: 710988 - DNA, 15 bp, Homo sapiens
ctcaagtgattcacc

SEQ ID NO: 710989 - DNA, 15 bp, Homo sapiens
tcaagtgattcaccc

SEQ ID NO: 710990 - DNA, 15 bp, Homo sapiens
caagtgattcaccca

SEQ ID NO: 710991 - DNA, 15 bp, Homo sapiens
aagtgattcacccac

SEQ ID NO: 710992 - DNA, 15 bp, Homo sapiens
agtgattcacccacc

SEQ ID NO: 710993 - DNA, 15 bp, Homo sapiens
gtgattcacccacct

SEQ ID NO: 710994 - DNA, 15 bp, Homo sapiens
tgattcacccacctc

SEQ ID NO: 710995 - DNA, 15 bp, Homo sapiens
gattcacccacctca

SEQ ID NO: 710996 - DNA, 15 bp, Homo sapiens
attcacccacctcag

SEQ ID NO: 710997 - DNA, 15 bp, Homo sapiens
ttcacccacctcagc

SEQ ID NO: 710998 - DNA, 15 bp, Homo sapiens
tcacccacctcagcc

SEQ ID NO: 710999 - DNA, 15 bp, Homo sapiens
cacctcagcctccca

SEQ ID NO: 711000 - DNA, 15 bp, Homo sapiens
acctcagcctcccaa

SEQ ID NO: 711001 - DNA, 15 bp, Homo sapiens
gctgggattataggt

SEQ ID NO: 711002 - DNA, 15 bp, Homo sapiens
ctgggattataggtg

SEQ ID NO: 711003 - DNA, 15 bp, Homo sapiens
tgggattataggtgt

SEQ ID NO: 711004 - DNA, 15 bp, Homo sapiens
gggattataggtgtg

SEQ ID NO: 711005 - DNA, 15 bp, Homo sapiens
ggattataggtgtga

SEQ ID NO: 711006 - DNA, 15 bp, Homo sapiens
gattataggtgtgag

SEQ ID NO: 711007 - DNA, 15 bp, Homo sapiens
attataggtgtgagc

SEQ ID NO: 711008 - DNA, 15 bp, Homo sapiens
ttataggtgtgagcc

SEQ ID NO: 711009 - DNA, 15 bp, Homo sapiens
tataggtgtgagcca

SEQ ID NO: 711010 - DNA, 15 bp, Homo sapiens
ataggtgtgagccac

SEQ ID NO: 711011 - DNA, 15 bp, Homo sapiens
taggtgtgagccact

SEQ ID NO: 711012 - DNA, 15 bp, Homo sapiens
aggtgtgagccactc

SEQ ID NO: 711013 - DNA, 15 bp, Homo sapiens
ggtgtgagccactcg

SEQ ID NO: 711014 - DNA, 15 bp, Homo sapiens
gtgtgagccactcgg

SEQ ID NO: 711015 - DNA, 15 bp, Homo sapiens
tgtgagccactcggc

SEQ ID NO: 711016 - DNA, 15 bp, Homo sapiens
gtgagccactcggct

SEQ ID NO: 711017 - DNA, 15 bp, Homo sapiens
tgagccactcggctg

SEQ ID NO: 711018 - DNA, 15 bp, Homo sapiens
gagccactcggctga

SEQ ID NO: 711019 - DNA, 15 bp, Homo sapiens
agccactcggctgat

SEQ ID NO: 711020 - DNA, 15 bp, Homo sapiens
gccactcggctgatg

SEQ ID NO: 711021 - DNA, 15 bp, Homo sapiens
ccactcggctgatgg

SEQ ID NO: 711022 - DNA, 15 bp, Homo sapiens
cactcggctgatggt

SEQ ID NO: 711023 - DNA, 15 bp, Homo sapiens
actcggctgatggtt

SEQ ID NO: 711024 - DNA, 15 bp, Homo sapiens
ctcggctgatggttt

SEQ ID NO: 711025 - DNA, 15 bp, Homo sapiens
tcggctgatggtttt

SEQ ID NO: 711026 - DNA, 15 bp, Homo sapiens
cggctgatggttttt

SEQ ID NO: 711027 - DNA, 15 bp, Homo sapiens
ggctgatggttttta

SEQ ID NO: 711028 - DNA, 15 bp, Homo sapiens
gctgatggtttttaa

SEQ ID NO: 711029 - DNA, 15 bp, Homo sapiens
ctgatggtttttaaa

SEQ ID NO: 711030 - DNA, 15 bp, Homo sapiens
tgatggtttttaaaa

SEQ ID NO: 711031 - DNA, 15 bp, Homo sapiens
gatggtttttaaaaa

SEQ ID NO: 711032 - DNA, 15 bp, Homo sapiens
atggtttttaaaaag

SEQ ID NO: 711033 - DNA, 15 bp, Homo sapiens
tggtttttaaaaagt

SEQ ID NO: 711034 - DNA, 15 bp, Homo sapiens
ggtttttaaaaagtg

SEQ ID NO: 711035 - DNA, 15 bp, Homo sapiens
gtttttaaaaagtgg

SEQ ID NO: 711036 - DNA, 15 bp, Homo sapiens
tttttaaaaagtggg

SEQ ID NO: 711037 - DNA, 15 bp, Homo sapiens
ttttaaaaagtgggt

SEQ ID NO: 711038 - DNA, 15 bp, Homo sapiens
tttaaaaagtgggtc

SEQ ID NO: 711039 - DNA, 15 bp, Homo sapiens
ttaaaaagtgggtca

SEQ ID NO: 711040 - DNA, 15 bp, Homo sapiens
taaaaagtgggtcat

SEQ ID NO: 711041 - DNA, 15 bp, Homo sapiens
aaaaagtgggtcatg

SEQ ID NO: 711042 - DNA, 15 bp, Homo sapiens
aaaagtgggtcatgg

SEQ ID NO: 711043 - DNA, 15 bp, Homo sapiens
aaagtgggtcatggg

SEQ ID NO: 711044 - DNA, 15 bp, Homo sapiens
aagtgggtcatgggg

SEQ ID NO: 711045 - DNA, 15 bp, Homo sapiens
agtgggtcatggggc

SEQ ID NO: 711046 - DNA, 15 bp, Homo sapiens
gtgggtcatggggct

SEQ ID NO: 711047 - DNA, 15 bp, Homo sapiens
tgggtcatggggctg

SEQ ID NO: 711048 - DNA, 15 bp, Homo sapiens
gggtcatggggctgg

SEQ ID NO: 711049 - DNA, 15 bp, Homo sapiens
ggtcatggggctggg

SEQ ID NO: 711050 - DNA, 15 bp, Homo sapiens
gtcatggggctgggc

SEQ ID NO: 711051 - DNA, 15 bp, Homo sapiens
tcatggggctgggcg

SEQ ID NO: 711052 - DNA, 15 bp, Homo sapiens
catggggctgggcgc

SEQ ID NO: 711053 - DNA, 15 bp, Homo sapiens
atggggctgggcgcg

SEQ ID NO: 711054 - DNA, 15 bp, Homo sapiens
tggggctgggcgcgg

SEQ ID NO: 711055 - DNA, 15 bp, Homo sapiens
ggggctgggcgcggt

SEQ ID NO: 711056 - DNA, 15 bp, Homo sapiens
gggctgggcgcggtg

SEQ ID NO: 711057 - DNA, 15 bp, Homo sapiens
ggctgggcgcggtgg

SEQ ID NO: 711058 - DNA, 15 bp, Homo sapiens
gctgggcgcggtggc

SEQ ID NO: 711059 - DNA, 15 bp, Homo sapiens
ctgggcgcggtggct

SEQ ID NO: 711060 - DNA, 15 bp, Homo sapiens
tgggcgcggtggctc

SEQ ID NO: 711061 - DNA, 15 bp, Homo sapiens
ggcgcggtggctcat

SEQ ID NO: 711062 - DNA, 15 bp, Homo sapiens
gcgcggtggctcatg

SEQ ID NO: 711063 - DNA, 15 bp, Homo sapiens
cgcggtggctcatgc

SEQ ID NO: 711064 - DNA, 15 bp, Homo sapiens
gcggtggctcatgcc

SEQ ID NO: 711065 - DNA, 15 bp, Homo sapiens
ggtggctcatgcctg

SEQ ID NO: 711066 - DNA, 15 bp, Homo sapiens
tcccagcactttggt

SEQ ID NO: 711067 - DNA, 15 bp, Homo sapiens
cccagcactttggta

SEQ ID NO: 711068 - DNA, 15 bp, Homo sapiens
ccagcactttggtag

SEQ ID NO: 711069 - DNA, 15 bp, Homo sapiens
cagcactttggtaga

SEQ ID NO: 711070 - DNA, 15 bp, Homo sapiens
agcactttggtagac

SEQ ID NO: 711071 - DNA, 15 bp, Homo sapiens
gcactttggtagacc

SEQ ID NO: 711072 - DNA, 15 bp, Homo sapiens
cactttggtagaccg

SEQ ID NO: 711073 - DNA, 15 bp, Homo sapiens
actttggtagaccga

SEQ ID NO: 711074 - DNA, 15 bp, Homo sapiens
ctttggtagaccgag

SEQ ID NO: 711075 - DNA, 15 bp, Homo sapiens
tttggtagaccgagg

SEQ ID NO: 711076 - DNA, 15 bp, Homo sapiens
ttggtagaccgaggc

SEQ ID NO: 711077 - DNA, 15 bp, Homo sapiens
tggtagaccgaggcg

SEQ ID NO: 711078 - DNA, 15 bp, Homo sapiens
ggtagaccgaggcgg

SEQ ID NO: 711079 - DNA, 15 bp, Homo sapiens
gtagaccgaggcggg

SEQ ID NO: 711080 - DNA, 15 bp, Homo sapiens
tagaccgaggcgggt

SEQ ID NO: 711081 - DNA, 15 bp, Homo sapiens
agaccgaggcgggtg

SEQ ID NO: 711082 - DNA, 15 bp, Homo sapiens
gaccgaggcgggtgg

SEQ ID NO: 711083 - DNA, 15 bp, Homo sapiens
accgaggcgggtgga

SEQ ID NO: 711084 - DNA, 15 bp, Homo sapiens
ccgaggcgggtggat

SEQ ID NO: 711085 - DNA, 15 bp, Homo sapiens
cgaggcgggtggatc

SEQ ID NO: 711086 - DNA, 15 bp, Homo sapiens
gaggcgggtggatca

SEQ ID NO: 711087 - DNA, 15 bp, Homo sapiens
aggcgggtggatcac

SEQ ID NO: 711088 - DNA, 15 bp, Homo sapiens
ggcgggtggatcaca

SEQ ID NO: 711089 - DNA, 15 bp, Homo sapiens
gcgggtggatcacaa

SEQ ID NO: 711090 - DNA, 15 bp, Homo sapiens
cgggtggatcacaag

SEQ ID NO: 711091 - DNA, 15 bp, Homo sapiens
gggtggatcacaagg

SEQ ID NO: 711092 - DNA, 15 bp, Homo sapiens
ggtggatcacaaggt

SEQ ID NO: 711093 - DNA, 15 bp, Homo sapiens
gtggatcacaaggtc

SEQ ID NO: 711094 - DNA, 15 bp, Homo sapiens
tggatcacaaggtca

SEQ ID NO: 711095 - DNA, 15 bp, Homo sapiens
ggatcacaaggtcag

SEQ ID NO: 711096 - DNA, 15 bp, Homo sapiens
gatcacaaggtcagg

SEQ ID NO: 711097 - DNA, 15 bp, Homo sapiens
atcacaaggtcagga

SEQ ID NO: 711098 - DNA, 15 bp, Homo sapiens
tcacaaggtcaggag

SEQ ID NO: 711099 - DNA, 15 bp, Homo sapiens
cacaaggtcaggaga

SEQ ID NO: 711100 - DNA, 15 bp, Homo sapiens
acaaggtcaggagat

SEQ ID NO: 711101 - DNA, 15 bp, Homo sapiens
caaggtcaggagatc

SEQ ID NO: 711102 - DNA, 15 bp, Homo sapiens
tcgagaccatcctgc

SEQ ID NO: 711103 - DNA, 15 bp, Homo sapiens
cgagaccatcctgcc

SEQ ID NO: 711104 - DNA, 15 bp, Homo sapiens
gagaccatcctgcct

SEQ ID NO: 711105 - DNA, 15 bp, Homo sapiens
agaccatcctgccta

SEQ ID NO: 711106 - DNA, 15 bp, Homo sapiens
gaccatcctgcctaa

SEQ ID NO: 711107 - DNA, 15 bp, Homo sapiens
accatcctgcctaac

SEQ ID NO: 711108 - DNA, 15 bp, Homo sapiens
ccatcctgcctaaca

SEQ ID NO: 711109 - DNA, 15 bp, Homo sapiens
catcctgcctaacac

SEQ ID NO: 711110 - DNA, 15 bp, Homo sapiens
atcctgcctaacacg

SEQ ID NO: 711111 - DNA, 15 bp, Homo sapiens
tcctgcctaacacgg

SEQ ID NO: 711112 - DNA, 15 bp, Homo sapiens
cctgcctaacacggt

SEQ ID NO: 711113 - DNA, 15 bp, Homo sapiens
ctgcctaacacggtg

SEQ ID NO: 711114 - DNA, 15 bp, Homo sapiens
tgcctaacacggtga

SEQ ID NO: 711115 - DNA, 15 bp, Homo sapiens
gcctaacacggtgaa

SEQ ID NO: 711116 - DNA, 15 bp, Homo sapiens
cctaacacggtgaaa

SEQ ID NO: 711117 - DNA, 15 bp, Homo sapiens
aatacaaaaaattac

SEQ ID NO: 711118 - DNA, 15 bp, Homo sapiens
atacaaaaaattacc

SEQ ID NO: 711119 - DNA, 15 bp, Homo sapiens
tacaaaaaattaccc

SEQ ID NO: 711120 - DNA, 15 bp, Homo sapiens
acaaaaaattaccca

SEQ ID NO: 711121 - DNA, 15 bp, Homo sapiens
caaaaaattacccag

SEQ ID NO: 711122 - DNA, 15 bp, Homo sapiens
aaaaaattacccagg

SEQ ID NO: 711123 - DNA, 15 bp, Homo sapiens
aaaaattacccaggc

SEQ ID NO: 711124 - DNA, 15 bp, Homo sapiens
aaaattacccaggca

SEQ ID NO: 711125 - DNA, 15 bp, Homo sapiens
aaattacccaggcat

SEQ ID NO: 711126 - DNA, 15 bp, Homo sapiens
aattacccaggcatg

SEQ ID NO: 711127 - DNA, 15 bp, Homo sapiens
attacccaggcatgg

SEQ ID NO: 711128 - DNA, 15 bp, Homo sapiens
ttacccaggcatggt

SEQ ID NO: 711129 - DNA, 15 bp, Homo sapiens
tacccaggcatggtg

SEQ ID NO: 711130 - DNA, 15 bp, Homo sapiens
acccaggcatggtgg

SEQ ID NO: 711131 - DNA, 15 bp, Homo sapiens
cccaggcatggtggt

SEQ ID NO: 711132 - DNA, 15 bp, Homo sapiens
ccaggcatggtggtg

SEQ ID NO: 711133 - DNA, 15 bp, Homo sapiens
caggcatggtggtgg

SEQ ID NO: 711134 - DNA, 15 bp, Homo sapiens
aggcatggtggtggg

SEQ ID NO: 711135 - DNA, 15 bp, Homo sapiens
ggcatggtggtgggc

SEQ ID NO: 711136 - DNA, 15 bp, Homo sapiens
gcatggtggtgggcg

SEQ ID NO: 711137 - DNA, 15 bp, Homo sapiens
catggtggtgggcgc

SEQ ID NO: 711138 - DNA, 15 bp, Homo sapiens
atggtggtgggcgcc

SEQ ID NO: 711139 - DNA, 15 bp, Homo sapiens
tggtggtgggcgcct

SEQ ID NO: 711140 - DNA, 15 bp, Homo sapiens
ggtggtgggcgcctg

SEQ ID NO: 711141 - DNA, 15 bp, Homo sapiens
gtggtgggcgcctgt

SEQ ID NO: 711142 - DNA, 15 bp, Homo sapiens
tggtgggcgcctgta

SEQ ID NO: 711143 - DNA, 15 bp, Homo sapiens
ggtgggcgcctgtag

SEQ ID NO: 711144 - DNA, 15 bp, Homo sapiens
gtgggcgcctgtagt

SEQ ID NO: 711145 - DNA, 15 bp, Homo sapiens
tgggcgcctgtagtc

SEQ ID NO: 711146 - DNA, 15 bp, Homo sapiens
gtgaacccgggaggc

SEQ ID NO: 711147 - DNA, 15 bp, Homo sapiens
tgaacccgggaggcg

SEQ ID NO: 711148 - DNA, 15 bp, Homo sapiens
gaacccgggaggcgg

SEQ ID NO: 711149 - DNA, 15 bp, Homo sapiens
aacccgggaggcgga

SEQ ID NO: 711150 - DNA, 15 bp, Homo sapiens
acccgggaggcggag

SEQ ID NO: 711151 - DNA, 15 bp, Homo sapiens
cccgggaggcggagc

SEQ ID NO: 711152 - DNA, 15 bp, Homo sapiens
ccgggaggcggagct

SEQ ID NO: 711153 - DNA, 15 bp, Homo sapiens
cgggaggcggagctt

SEQ ID NO: 711154 - DNA, 15 bp, Homo sapiens
gggaggcggagcttg

SEQ ID NO: 711155 - DNA, 15 bp, Homo sapiens
ggaggcggagcttgc

SEQ ID NO: 711156 - DNA, 15 bp, Homo sapiens
gaggcggagcttgca

SEQ ID NO: 711157 - DNA, 15 bp, Homo sapiens
aggcggagcttgcag

SEQ ID NO: 711158 - DNA, 15 bp, Homo sapiens
ggcggagcttgcagt

SEQ ID NO: 711159 - DNA, 15 bp, Homo sapiens
gcggagcttgcagtg

SEQ ID NO: 711160 - DNA, 15 bp, Homo sapiens
cggagcttgcagtga

SEQ ID NO: 711161 - DNA, 15 bp, Homo sapiens
ggagcttgcagtgag

SEQ ID NO: 711162 - DNA, 15 bp, Homo sapiens
gagcttgcagtgagc

SEQ ID NO: 711163 - DNA, 15 bp, Homo sapiens
agcttgcagtgagcc

SEQ ID NO: 711164 - DNA, 15 bp, Homo sapiens
gcttgcagtgagccg

SEQ ID NO: 711165 - DNA, 15 bp, Homo sapiens
cttgcagtgagccga

SEQ ID NO: 711166 - DNA, 15 bp, Homo sapiens
cgagatcacgccacc

SEQ ID NO: 711167 - DNA, 15 bp, Homo sapiens
gagatcacgccaccg

SEQ ID NO: 711168 - DNA, 15 bp, Homo sapiens
agatcacgccaccgt

SEQ ID NO: 711169 - DNA, 15 bp, Homo sapiens
gatcacgccaccgta

SEQ ID NO: 711170 - DNA, 15 bp, Homo sapiens
atcacgccaccgtac

SEQ ID NO: 711171 - DNA, 15 bp, Homo sapiens
tcacgccaccgtact

SEQ ID NO: 711172 - DNA, 15 bp, Homo sapiens
cacgccaccgtactc

SEQ ID NO: 711173 - DNA, 15 bp, Homo sapiens
acgccaccgtactcc

SEQ ID NO: 711174 - DNA, 15 bp, Homo sapiens
cgccaccgtactcca

SEQ ID NO: 711175 - DNA, 15 bp, Homo sapiens
gccaccgtactccag

SEQ ID NO: 711176 - DNA, 15 bp, Homo sapiens
ccaccgtactccagc

SEQ ID NO: 711177 - DNA, 15 bp, Homo sapiens
caccgtactccagcc

SEQ ID NO: 711178 - DNA, 15 bp, Homo sapiens
accgtactccagcct

SEQ ID NO: 711179 - DNA, 15 bp, Homo sapiens
ccgtactccagcctg

SEQ ID NO: 711180 - DNA, 15 bp, Homo sapiens
cgtactccagcctga

SEQ ID NO: 711181 - DNA, 15 bp, Homo sapiens
gtactccagcctgag

SEQ ID NO: 711182 - DNA, 15 bp, Homo sapiens
tactccagcctgagc

SEQ ID NO: 711183 - DNA, 15 bp, Homo sapiens
actccagcctgagcg

SEQ ID NO: 711184 - DNA, 15 bp, Homo sapiens
ctccagcctgagcga

SEQ ID NO: 711185 - DNA, 15 bp, Homo sapiens
tccagcctgagcgac

SEQ ID NO: 711186 - DNA, 15 bp, Homo sapiens
ccagcctgagcgaca

SEQ ID NO: 711187 - DNA, 15 bp, Homo sapiens
cagcctgagcgacag

SEQ ID NO: 711188 - DNA, 15 bp, Homo sapiens
agcctgagcgacaga

SEQ ID NO: 711189 - DNA, 15 bp, Homo sapiens
gcctgagcgacagag

SEQ ID NO: 711190 - DNA, 15 bp, Homo sapiens
cctgagcgacagagc

SEQ ID NO: 711191 - DNA, 15 bp, Homo sapiens
ctgagcgacagagcg

SEQ ID NO: 711192 - DNA, 15 bp, Homo sapiens
tgagcgacagagcga

SEQ ID NO: 711193 - DNA, 15 bp, Homo sapiens
gagcgacagagcgag

SEQ ID NO: 711194 - DNA, 15 bp, Homo sapiens
agcgacagagcgaga

SEQ ID NO: 711195 - DNA, 15 bp, Homo sapiens
gcgacagagcgagac

SEQ ID NO: 711196 - DNA, 15 bp, Homo sapiens
cgacagagcgagact

SEQ ID NO: 711197 - DNA, 15 bp, Homo sapiens
gacagagcgagactc

SEQ ID NO: 711198 - DNA, 15 bp, Homo sapiens
acagagcgagactcc

SEQ ID NO: 711199 - DNA, 15 bp, Homo sapiens
cagagcgagactccg

SEQ ID NO: 711200 - DNA, 15 bp, Homo sapiens
agagcgagactccgt

SEQ ID NO: 711201 - DNA, 15 bp, Homo sapiens
aaaaaaaaaaaaagt

SEQ ID NO: 711202 - DNA, 15 bp, Homo sapiens
aaaaaaaaaaaagtg

SEQ ID NO: 711203 - DNA, 15 bp, Homo sapiens
aaaaaaaaaaagtgg

SEQ ID NO: 711204 - DNA, 15 bp, Homo sapiens
aaaaaaaaaagtggg

SEQ ID NO: 711205 - DNA, 15 bp, Homo sapiens
aaaaaaaaagtgggt

SEQ ID NO: 711206 - DNA, 15 bp, Homo sapiens
aaaaaaaagtgggtc

SEQ ID NO: 711207 - DNA, 15 bp, Homo sapiens
aaaaaaagtgggtca

SEQ ID NO: 711208 - DNA, 15 bp, Homo sapiens
aaaaaagtgggtcat

SEQ ID NO: 711209 - DNA, 15 bp, Homo sapiens
aaaaagtgggtcata

SEQ ID NO: 711210 - DNA, 15 bp, Homo sapiens
aaaagtgggtcatag

SEQ ID NO: 711211 - DNA, 15 bp, Homo sapiens
aaagtgggtcatagg

SEQ ID NO: 711212 - DNA, 15 bp, Homo sapiens
aagtgggtcataggt

SEQ ID NO: 711213 - DNA, 15 bp, Homo sapiens
agtgggtcataggtt

SEQ ID NO: 711214 - DNA, 15 bp, Homo sapiens
gtgggtcataggttt

SEQ ID NO: 711215 - DNA, 15 bp, Homo sapiens
tgggtcataggtttc

SEQ ID NO: 711216 - DNA, 15 bp, Homo sapiens
gggtcataggtttcg

SEQ ID NO: 711217 - DNA, 15 bp, Homo sapiens
ggtcataggtttcgg

SEQ ID NO: 711218 - DNA, 15 bp, Homo sapiens
gtcataggtttcggc

SEQ ID NO: 711219 - DNA, 15 bp, Homo sapiens
tcataggtttcggct

SEQ ID NO: 711220 - DNA, 15 bp, Homo sapiens
cataggtttcggctt

SEQ ID NO: 711221 - DNA, 15 bp, Homo sapiens
ataggtttcggctta

SEQ ID NO: 711222 - DNA, 15 bp, Homo sapiens
taggtttcggcttat

SEQ ID NO: 711223 - DNA, 15 bp, Homo sapiens
aggtttcggcttata

SEQ ID NO: 711224 - DNA, 15 bp, Homo sapiens
ggtttcggcttatag

SEQ ID NO: 711225 - DNA, 15 bp, Homo sapiens
gtttcggcttatagg

SEQ ID NO: 711226 - DNA, 15 bp, Homo sapiens
tttcggcttataggt

SEQ ID NO: 711227 - DNA, 15 bp, Homo sapiens
ttcggcttataggtc

SEQ ID NO: 711228 - DNA, 15 bp, Homo sapiens
tcggcttataggtca

SEQ ID NO: 711229 - DNA, 15 bp, Homo sapiens
cggcttataggtcac

SEQ ID NO: 711230 - DNA, 15 bp, Homo sapiens
ggcttataggtcaca

SEQ ID NO: 711231 - DNA, 15 bp, Homo sapiens
gcttataggtcacaa

SEQ ID NO: 711232 - DNA, 15 bp, Homo sapiens
cttataggtcacaag

SEQ ID NO: 711233 - DNA, 15 bp, Homo sapiens
ttataggtcacaagt

SEQ ID NO: 711234 - DNA, 15 bp, Homo sapiens
tataggtcacaagtg

SEQ ID NO: 711235 - DNA, 15 bp, Homo sapiens
ataggtcacaagtgt

SEQ ID NO: 711236 - DNA, 15 bp, Homo sapiens
taggtcacaagtgtt

SEQ ID NO: 711237 - DNA, 15 bp, Homo sapiens
aggtcacaagtgttt

SEQ ID NO: 711238 - DNA, 15 bp, Homo sapiens
ggtcacaagtgttta

SEQ ID NO: 711239 - DNA, 15 bp, Homo sapiens
gtcacaagtgtttaa

SEQ ID NO: 711240 - DNA, 15 bp, Homo sapiens
tcacaagtgtttaaa

SEQ ID NO: 711241 - DNA, 15 bp, Homo sapiens
cacaagtgtttaaac

SEQ ID NO: 711242 - DNA, 15 bp, Homo sapiens
acaagtgtttaaacc

SEQ ID NO: 711243 - DNA, 15 bp, Homo sapiens
caagtgtttaaacct

SEQ ID NO: 711244 - DNA, 15 bp, Homo sapiens
aagtgtttaaacctg

SEQ ID NO: 711245 - DNA, 15 bp, Homo sapiens
agtgtttaaacctgg

SEQ ID NO: 711246 - DNA, 15 bp, Homo sapiens
gtgtttaaacctggc

SEQ ID NO: 711247 - DNA, 15 bp, Homo sapiens
tgtttaaacctggcc

SEQ ID NO: 711248 - DNA, 15 bp, Homo sapiens
gtttaaacctggcca

SEQ ID NO: 711249 - DNA, 15 bp, Homo sapiens
tttaaacctggccat

SEQ ID NO: 711250 - DNA, 15 bp, Homo sapiens
ttaaacctggccatg

SEQ ID NO: 711251 - DNA, 15 bp, Homo sapiens
taaacctggccatga

SEQ ID NO: 711252 - DNA, 15 bp, Homo sapiens
aaacctggccatgag

SEQ ID NO: 711253 - DNA, 15 bp, Homo sapiens
aacctggccatgagg

SEQ ID NO: 711254 - DNA, 15 bp, Homo sapiens
acctggccatgaggc

SEQ ID NO: 711255 - DNA, 15 bp, Homo sapiens
cctggccatgaggcc

SEQ ID NO: 711256 - DNA, 15 bp, Homo sapiens
ctggccatgaggcca

SEQ ID NO: 711257 - DNA, 15 bp, Homo sapiens
tggccatgaggccag

SEQ ID NO: 711258 - DNA, 15 bp, Homo sapiens
ggccatgaggccagg

SEQ ID NO: 711259 - DNA, 15 bp, Homo sapiens
gccatgaggccaggc

SEQ ID NO: 711260 - DNA, 15 bp, Homo sapiens
ccatgaggccaggcg

SEQ ID NO: 711261 - DNA, 15 bp, Homo sapiens
catgaggccaggcgc

SEQ ID NO: 711262 - DNA, 15 bp, Homo sapiens
atgaggccaggcgca

SEQ ID NO: 711263 - DNA, 15 bp, Homo sapiens
tgaggccaggcgcag

SEQ ID NO: 711264 - DNA, 15 bp, Homo sapiens
gaggccaggcgcagt

SEQ ID NO: 711265 - DNA, 15 bp, Homo sapiens
aggccaggcgcagtg

SEQ ID NO: 711266 - DNA, 15 bp, Homo sapiens
ggccaggcgcagtgg

SEQ ID NO: 711267 - DNA, 15 bp, Homo sapiens
gccaggcgcagtggc

SEQ ID NO: 711268 - DNA, 15 bp, Homo sapiens
ccaggcgcagtggcg

SEQ ID NO: 711269 - DNA, 15 bp, Homo sapiens
caggcgcagtggcgc

SEQ ID NO: 711270 - DNA, 15 bp, Homo sapiens
aggcgcagtggcgca

SEQ ID NO: 711271 - DNA, 15 bp, Homo sapiens
ggcgcagtggcgcat

SEQ ID NO: 711272 - DNA, 15 bp, Homo sapiens
gcgcagtggcgcatg

SEQ ID NO: 711273 - DNA, 15 bp, Homo sapiens
cgcagtggcgcatgc

SEQ ID NO: 711274 - DNA, 15 bp, Homo sapiens
gcagtggcgcatgcc

SEQ ID NO: 711275 - DNA, 15 bp, Homo sapiens
cagtggcgcatgcct

SEQ ID NO: 711276 - DNA, 15 bp, Homo sapiens
agtggcgcatgcctg

SEQ ID NO: 711277 - DNA, 15 bp, Homo sapiens
gtggcgcatgcctgt

SEQ ID NO: 711278 - DNA, 15 bp, Homo sapiens
tggcgcatgcctgta

SEQ ID NO: 711279 - DNA, 15 bp, Homo sapiens
ggcgcatgcctgtaa

SEQ ID NO: 711280 - DNA, 15 bp, Homo sapiens
gcgcatgcctgtaat

SEQ ID NO: 711281 - DNA, 15 bp, Homo sapiens
cgcatgcctgtaatc

SEQ ID NO: 711282 - DNA, 15 bp, Homo sapiens
gcatgcctgtaatcc

SEQ ID NO: 711283 - DNA, 15 bp, Homo sapiens
tgtaatcccagccat

SEQ ID NO: 711284 - DNA, 15 bp, Homo sapiens
gtaatcccagccatt

SEQ ID NO: 711285 - DNA, 15 bp, Homo sapiens
taatcccagccattt

SEQ ID NO: 711286 - DNA, 15 bp, Homo sapiens
aatcccagccatttg

SEQ ID NO: 711287 - DNA, 15 bp, Homo sapiens
atcccagccatttgg

SEQ ID NO: 711288 - DNA, 15 bp, Homo sapiens
tcccagccatttggg

SEQ ID NO: 711289 - DNA, 15 bp, Homo sapiens
cccagccatttggga

SEQ ID NO: 711290 - DNA, 15 bp, Homo sapiens
ccagccatttgggag

SEQ ID NO: 711291 - DNA, 15 bp, Homo sapiens
cagccatttgggagg

SEQ ID NO: 711292 - DNA, 15 bp, Homo sapiens
agccatttgggaggc

SEQ ID NO: 711293 - DNA, 15 bp, Homo sapiens
gccatttgggaggct

SEQ ID NO: 711294 - DNA, 15 bp, Homo sapiens
ccatttgggaggcta

SEQ ID NO: 711295 - DNA, 15 bp, Homo sapiens
catttgggaggctaa

SEQ ID NO: 711296 - DNA, 15 bp, Homo sapiens
atttgggaggctaag

SEQ ID NO: 711297 - DNA, 15 bp, Homo sapiens
tttgggaggctaagg

SEQ ID NO: 711298 - DNA, 15 bp, Homo sapiens
ttgggaggctaaggc

SEQ ID NO: 711299 - DNA, 15 bp, Homo sapiens
tgggaggctaaggca

SEQ ID NO: 711300 - DNA, 15 bp, Homo sapiens
gggaggctaaggcag

SEQ ID NO: 711301 - DNA, 15 bp, Homo sapiens
ggaggctaaggcagg

SEQ ID NO: 711302 - DNA, 15 bp, Homo sapiens
gaggctaaggcagga

SEQ ID NO: 711303 - DNA, 15 bp, Homo sapiens
aggctaaggcaggaa

SEQ ID NO: 711304 - DNA, 15 bp, Homo sapiens
ggctaaggcaggaaa

SEQ ID NO: 711305 - DNA, 15 bp, Homo sapiens
gctaaggcaggaaaa

SEQ ID NO: 711306 - DNA, 15 bp, Homo sapiens
ctaaggcaggaaaat

SEQ ID NO: 711307 - DNA, 15 bp, Homo sapiens
taaggcaggaaaatc

SEQ ID NO: 711308 - DNA, 15 bp, Homo sapiens
aaggcaggaaaatcg

SEQ ID NO: 711309 - DNA, 15 bp, Homo sapiens
aggcaggaaaatcgc

SEQ ID NO: 711310 - DNA, 15 bp, Homo sapiens
ggcaggaaaatcgct

SEQ ID NO: 711311 - DNA, 15 bp, Homo sapiens
gcaggaaaatcgctt

SEQ ID NO: 711312 - DNA, 15 bp, Homo sapiens
caggaaaatcgcttg

SEQ ID NO: 711313 - DNA, 15 bp, Homo sapiens
aggaaaatcgcttga

SEQ ID NO: 711314 - DNA, 15 bp, Homo sapiens
ggaaaatcgcttgaa

SEQ ID NO: 711315 - DNA, 15 bp, Homo sapiens
gaaaatcgcttgaac

SEQ ID NO: 711316 - DNA, 15 bp, Homo sapiens
aaaatcgcttgaacc

SEQ ID NO: 711317 - DNA, 15 bp, Homo sapiens
aaatcgcttgaaccg

SEQ ID NO: 711318 - DNA, 15 bp, Homo sapiens
aatcgcttgaaccgg

SEQ ID NO: 711319 - DNA, 15 bp, Homo sapiens
atcgcttgaaccggg

SEQ ID NO: 711320 - DNA, 15 bp, Homo sapiens
tcgcttgaaccgggg

SEQ ID NO: 711321 - DNA, 15 bp, Homo sapiens
cgcttgaaccgggga

SEQ ID NO: 711322 - DNA, 15 bp, Homo sapiens
gcttgaaccggggag

SEQ ID NO: 711323 - DNA, 15 bp, Homo sapiens
cttgaaccggggagg

SEQ ID NO: 711324 - DNA, 15 bp, Homo sapiens
ttgaaccggggaggt

SEQ ID NO: 711325 - DNA, 15 bp, Homo sapiens
tgaaccggggaggtg

SEQ ID NO: 711326 - DNA, 15 bp, Homo sapiens
gaaccggggaggtgg

SEQ ID NO: 711327 - DNA, 15 bp, Homo sapiens
aaccggggaggtgga

SEQ ID NO: 711328 - DNA, 15 bp, Homo sapiens
accggggaggtggag

SEQ ID NO: 711329 - DNA, 15 bp, Homo sapiens
ccggggaggtggagg

SEQ ID NO: 711330 - DNA, 15 bp, Homo sapiens
cggggaggtggaggt

SEQ ID NO: 711331 - DNA, 15 bp, Homo sapiens
ggggaggtggaggtt

SEQ ID NO: 711332 - DNA, 15 bp, Homo sapiens
tgcagtgagctgaga

SEQ ID NO: 711333 - DNA, 15 bp, Homo sapiens
gcagtgagctgagat

SEQ ID NO: 711334 - DNA, 15 bp, Homo sapiens
cagtgagctgagatc

SEQ ID NO: 711335 - DNA, 15 bp, Homo sapiens
agtgagctgagatcg

SEQ ID NO: 711336 - DNA, 15 bp, Homo sapiens
gtgagctgagatcgc

SEQ ID NO: 711337 - DNA, 15 bp, Homo sapiens
agatcgcgccactga

SEQ ID NO: 711338 - DNA, 15 bp, Homo sapiens
gatcgcgccactgaa

SEQ ID NO: 711339 - DNA, 15 bp, Homo sapiens
atcgcgccactgaac

SEQ ID NO: 711340 - DNA, 15 bp, Homo sapiens
tcgcgccactgaact

SEQ ID NO: 711341 - DNA, 15 bp, Homo sapiens
cgcgccactgaactc

SEQ ID NO: 711342 - DNA, 15 bp, Homo sapiens
gcgccactgaactct

SEQ ID NO: 711343 - DNA, 15 bp, Homo sapiens
cgccactgaactcta

SEQ ID NO: 711344 - DNA, 15 bp, Homo sapiens
gccactgaactctag

SEQ ID NO: 711345 - DNA, 15 bp, Homo sapiens
ccactgaactctagc

SEQ ID NO: 711346 - DNA, 15 bp, Homo sapiens
cactgaactctagcc

SEQ ID NO: 711347 - DNA, 15 bp, Homo sapiens
actgaactctagcct

SEQ ID NO: 711348 - DNA, 15 bp, Homo sapiens
ctgaactctagcctg

SEQ ID NO: 711349 - DNA, 15 bp, Homo sapiens
tgaactctagcctgg

SEQ ID NO: 711350 - DNA, 15 bp, Homo sapiens
gaactctagcctggg

SEQ ID NO: 711351 - DNA, 15 bp, Homo sapiens
aactctagcctgggt

SEQ ID NO: 711352 - DNA, 15 bp, Homo sapiens
actctagcctgggtg

SEQ ID NO: 711353 - DNA, 15 bp, Homo sapiens
ctctagcctgggtga

SEQ ID NO: 711354 - DNA, 15 bp, Homo sapiens
tctagcctgggtgac

SEQ ID NO: 711355 - DNA, 15 bp, Homo sapiens
ctagcctgggtgaca

SEQ ID NO: 711356 - DNA, 15 bp, Homo sapiens
tagcctgggtgacac

SEQ ID NO: 711357 - DNA, 15 bp, Homo sapiens
agcctgggtgacaca

SEQ ID NO: 711358 - DNA, 15 bp, Homo sapiens
gcctgggtgacacag

SEQ ID NO: 711359 - DNA, 15 bp, Homo sapiens
cctgggtgacacagt

SEQ ID NO: 711360 - DNA, 15 bp, Homo sapiens
ctgggtgacacagta

SEQ ID NO: 711361 - DNA, 15 bp, Homo sapiens
tgggtgacacagtaa

SEQ ID NO: 711362 - DNA, 15 bp, Homo sapiens
gggtgacacagtaag

SEQ ID NO: 711363 - DNA, 15 bp, Homo sapiens
ggtgacacagtaaga

SEQ ID NO: 711364 - DNA, 15 bp, Homo sapiens
gtgacacagtaagac

SEQ ID NO: 711365 - DNA, 15 bp, Homo sapiens
tgacacagtaagact

SEQ ID NO: 711366 - DNA, 15 bp, Homo sapiens
gacacagtaagactc

SEQ ID NO: 711367 - DNA, 15 bp, Homo sapiens
acacagtaagactct

SEQ ID NO: 711368 - DNA, 15 bp, Homo sapiens
cacagtaagactctg

SEQ ID NO: 711369 - DNA, 15 bp, Homo sapiens
acagtaagactctgt

SEQ ID NO: 711370 - DNA, 15 bp, Homo sapiens
cagtaagactctgtc

SEQ ID NO: 711371 - DNA, 15 bp, Homo sapiens
agtaagactctgtct

SEQ ID NO: 711372 - DNA, 15 bp, Homo sapiens
gtaagactctgtctc

SEQ ID NO: 711373 - DNA, 15 bp, Homo sapiens
taagactctgtctca

SEQ ID NO: 711374 - DNA, 15 bp, Homo sapiens
aagactctgtctcaa

SEQ ID NO: 711375 - DNA, 15 bp, Homo sapiens
agactctgtctcaaa

SEQ ID NO: 711376 - DNA, 15 bp, Homo sapiens
gactctgtctcaaat

SEQ ID NO: 711377 - DNA, 15 bp, Homo sapiens
actctgtctcaaata

SEQ ID NO: 711378 - DNA, 15 bp, Homo sapiens
ctctgtctcaaataa

SEQ ID NO: 711379 - DNA, 15 bp, Homo sapiens
tctgtctcaaataaa

SEQ ID NO: 711380 - DNA, 15 bp, Homo sapiens
ctgtctcaaataaaa

SEQ ID NO: 711381 - DNA, 15 bp, Homo sapiens
tgtctcaaataaaaa

SEQ ID NO: 711382 - DNA, 15 bp, Homo sapiens
gtctcaaataaaaaa

SEQ ID NO: 711383 - DNA, 15 bp, Homo sapiens
tctcaaataaaaaaa

SEQ ID NO: 711384 - DNA, 15 bp, Homo sapiens
ctcaaataaaaaaaa

SEQ ID NO: 711385 - DNA, 15 bp, Homo sapiens
tcaaataaaaaaaaa

SEQ ID NO: 711386 - DNA, 15 bp, Homo sapiens
caaataaaaaaaaaa

SEQ ID NO: 711387 - DNA, 15 bp, Homo sapiens
aaataaaaaaaaaac

SEQ ID NO: 711388 - DNA, 15 bp, Homo sapiens
aataaaaaaaaaaca

SEQ ID NO: 711389 - DNA, 15 bp, Homo sapiens
ataaaaaaaaaacag

SEQ ID NO: 711390 - DNA, 15 bp, Homo sapiens
taaaaaaaaaacagc

SEQ ID NO: 711391 - DNA, 15 bp, Homo sapiens
aaaaaaaaaacagct

SEQ ID NO: 711392 - DNA, 15 bp, Homo sapiens
aaaaaaaaacagctg

SEQ ID NO: 711393 - DNA, 15 bp, Homo sapiens
aaaaaaaacagctga

SEQ ID NO: 711394 - DNA, 15 bp, Homo sapiens
aaaaaaacagctgat

SEQ ID NO: 711395 - DNA, 15 bp, Homo sapiens
aaaaaacagctgatc

SEQ ID NO: 711396 - DNA, 15 bp, Homo sapiens
aaaaacagctgatct

SEQ ID NO: 711397 - DNA, 15 bp, Homo sapiens
aaaacagctgatctc

SEQ ID NO: 711398 - DNA, 15 bp, Homo sapiens
aaacagctgatctct

SEQ ID NO: 711399 - DNA, 15 bp, Homo sapiens
aacagctgatctctc

SEQ ID NO: 711400 - DNA, 15 bp, Homo sapiens
acagctgatctctct

SEQ ID NO: 711401 - DNA, 15 bp, Homo sapiens
cagctgatctctctt

SEQ ID NO: 711402 - DNA, 15 bp, Homo sapiens
agctgatctctcttc

SEQ ID NO: 711403 - DNA, 15 bp, Homo sapiens
gctgatctctcttct

SEQ ID NO: 711404 - DNA, 15 bp, Homo sapiens
ctgatctctcttctg

SEQ ID NO: 711405 - DNA, 15 bp, Homo sapiens
tgatctctcttctgc

SEQ ID NO: 711406 - DNA, 15 bp, Homo sapiens
gatctctcttctgcg

SEQ ID NO: 711407 - DNA, 15 bp, Homo sapiens
atctctcttctgcgc

SEQ ID NO: 711408 - DNA, 15 bp, Homo sapiens
tctctcttctgcgct

SEQ ID NO: 711409 - DNA, 15 bp, Homo sapiens
ctctcttctgcgctg

SEQ ID NO: 711410 - DNA, 15 bp, Homo sapiens
tctcttctgcgctgt

SEQ ID NO: 711411 - DNA, 15 bp, Homo sapiens
ctcttctgcgctgtc

SEQ ID NO: 711412 - DNA, 15 bp, Homo sapiens
tcttctgcgctgtct

SEQ ID NO: 711413 - DNA, 15 bp, Homo sapiens
cttctgcgctgtctc

SEQ ID NO: 711414 - DNA, 15 bp, Homo sapiens
ttctgcgctgtctct

SEQ ID NO: 711415 - DNA, 15 bp, Homo sapiens
tctgcgctgtctctc

SEQ ID NO: 711416 - DNA, 15 bp, Homo sapiens
ctgcgctgtctctcc

SEQ ID NO: 711417 - DNA, 15 bp, Homo sapiens
tgcgctgtctctcca

SEQ ID NO: 711418 - DNA, 15 bp, Homo sapiens
gcgctgtctctccac

SEQ ID NO: 711419 - DNA, 15 bp, Homo sapiens
cgctgtctctccaca

SEQ ID NO: 711420 - DNA, 15 bp, Homo sapiens
gctgtctctccacag

SEQ ID NO: 711421 - DNA, 15 bp, Homo sapiens
ctgtctctccacaga

SEQ ID NO: 711422 - DNA, 15 bp, Homo sapiens
tgtctctccacagag

SEQ ID NO: 711423 - DNA, 15 bp, Homo sapiens
gtctctccacagaga

SEQ ID NO: 711424 - DNA, 15 bp, Homo sapiens
tctctccacagagag

SEQ ID NO: 711425 - DNA, 15 bp, Homo sapiens
ctctccacagagagc

SEQ ID NO: 711426 - DNA, 15 bp, Homo sapiens
tctccacagagagct

SEQ ID NO: 711427 - DNA, 15 bp, Homo sapiens
ctccacagagagctc

SEQ ID NO: 711428 - DNA, 15 bp, Homo sapiens
tccacagagagctca

SEQ ID NO: 711429 - DNA, 15 bp, Homo sapiens
ccacagagagctcat

SEQ ID NO: 711430 - DNA, 15 bp, Homo sapiens
cacagagagctcatg

SEQ ID NO: 711431 - DNA, 15 bp, Homo sapiens
acagagagctcatgc

SEQ ID NO: 711432 - DNA, 15 bp, Homo sapiens
cagagagctcatgcg

SEQ ID NO: 711433 - DNA, 15 bp, Homo sapiens
agagagctcatgcgt

SEQ ID NO: 711434 - DNA, 15 bp, Homo sapiens
gagagctcatgcgtg

SEQ ID NO: 711435 - DNA, 15 bp, Homo sapiens
agagctcatgcgtga

SEQ ID NO: 711436 - DNA, 15 bp, Homo sapiens
gagctcatgcgtgat

SEQ ID NO: 711437 - DNA, 15 bp, Homo sapiens
agctcatgcgtgatc

SEQ ID NO: 711438 - DNA, 15 bp, Homo sapiens
gctcatgcgtgatca

SEQ ID NO: 711439 - DNA, 15 bp, Homo sapiens
ctcatgcgtgatcag

SEQ ID NO: 711440 - DNA, 15 bp, Homo sapiens
tcatgcgtgatcagg

SEQ ID NO: 711441 - DNA, 15 bp, Homo sapiens
catgcgtgatcaggg

SEQ ID NO: 711442 - DNA, 15 bp, Homo sapiens
atgcgtgatcaggga

SEQ ID NO: 711443 - DNA, 15 bp, Homo sapiens
tgcgtgatcagggag

SEQ ID NO: 711444 - DNA, 15 bp, Homo sapiens
gcgtgatcagggagt

SEQ ID NO: 711445 - DNA, 15 bp, Homo sapiens
cgtgatcagggagta

SEQ ID NO: 711446 - DNA, 15 bp, Homo sapiens
gtgatcagggagtaa

SEQ ID NO: 711447 - DNA, 15 bp, Homo sapiens
tgatcagggagtaaa

SEQ ID NO: 711448 - DNA, 15 bp, Homo sapiens
gatcagggagtaaaa

SEQ ID NO: 711449 - DNA, 15 bp, Homo sapiens
atcagggagtaaaac

SEQ ID NO: 711450 - DNA, 15 bp, Homo sapiens
tcagggagtaaaact

SEQ ID NO: 711451 - DNA, 15 bp, Homo sapiens
cagggagtaaaactc

SEQ ID NO: 711452 - DNA, 15 bp, Homo sapiens
agggagtaaaactca

SEQ ID NO: 711453 - DNA, 15 bp, Homo sapiens
gggagtaaaactcat

SEQ ID NO: 711454 - DNA, 15 bp, Homo sapiens
ggagtaaaactcatt

SEQ ID NO: 711455 - DNA, 15 bp, Homo sapiens
gagtaaaactcattc

SEQ ID NO: 711456 - DNA, 15 bp, Homo sapiens
agtaaaactcattcc

SEQ ID NO: 711457 - DNA, 15 bp, Homo sapiens
gtaaaactcattccc

SEQ ID NO: 711458 - DNA, 15 bp, Homo sapiens
taaaactcattcccg

SEQ ID NO: 711459 - DNA, 15 bp, Homo sapiens
aaaactcattcccgt

SEQ ID NO: 711460 - DNA, 15 bp, Homo sapiens
aaactcattcccgtt

SEQ ID NO: 711461 - DNA, 15 bp, Homo sapiens
aactcattcccgttt

SEQ ID NO: 711462 - DNA, 15 bp, Homo sapiens
actcattcccgtttt

SEQ ID NO: 711463 - DNA, 15 bp, Homo sapiens
ctcattcccgtttta

SEQ ID NO: 711464 - DNA, 15 bp, Homo sapiens
tcattcccgttttag

SEQ ID NO: 711465 - DNA, 15 bp, Homo sapiens
cattcccgttttagg

SEQ ID NO: 711466 - DNA, 15 bp, Homo sapiens
attcccgttttaggc

SEQ ID NO: 711467 - DNA, 15 bp, Homo sapiens
ttcccgttttaggcc

SEQ ID NO: 711468 - DNA, 15 bp, Homo sapiens
tcccgttttaggcca

SEQ ID NO: 711469 - DNA, 15 bp, Homo sapiens
cccgttttaggccaa

SEQ ID NO: 711470 - DNA, 15 bp, Homo sapiens
ccgttttaggccaaa

SEQ ID NO: 711471 - DNA, 15 bp, Homo sapiens
cgttttaggccaaac

SEQ ID NO: 711472 - DNA, 15 bp, Homo sapiens
gttttaggccaaaca

SEQ ID NO: 711473 - DNA, 15 bp, Homo sapiens
ttttaggccaaacac

SEQ ID NO: 711474 - DNA, 15 bp, Homo sapiens
tttaggccaaacaca

SEQ ID NO: 711475 - DNA, 15 bp, Homo sapiens
ttaggccaaacacag

SEQ ID NO: 711476 - DNA, 15 bp, Homo sapiens
taggccaaacacaga

SEQ ID NO: 711477 - DNA, 15 bp, Homo sapiens
aggccaaacacagaa

SEQ ID NO: 711478 - DNA, 15 bp, Homo sapiens
ggccaaacacagaaa

SEQ ID NO: 711479 - DNA, 15 bp, Homo sapiens
gccaaacacagaaaa

SEQ ID NO: 711480 - DNA, 15 bp, Homo sapiens
ccaaacacagaaaaa

SEQ ID NO: 711481 - DNA, 15 bp, Homo sapiens
caaacacagaaaaat

SEQ ID NO: 711482 - DNA, 15 bp, Homo sapiens
aaacacagaaaaatt

SEQ ID NO: 711483 - DNA, 15 bp, Homo sapiens
aacacagaaaaatta

SEQ ID NO: 711484 - DNA, 15 bp, Homo sapiens
acacagaaaaattag

SEQ ID NO: 711485 - DNA, 15 bp, Homo sapiens
cacagaaaaattagg

SEQ ID NO: 711486 - DNA, 15 bp, Homo sapiens
acagaaaaattagga

SEQ ID NO: 711487 - DNA, 15 bp, Homo sapiens
cagaaaaattaggaa

SEQ ID NO: 711488 - DNA, 15 bp, Homo sapiens
agaaaaattaggaag

SEQ ID NO: 711489 - DNA, 15 bp, Homo sapiens
gaaaaattaggaagg

SEQ ID NO: 711490 - DNA, 15 bp, Homo sapiens
aaaaattaggaagga

SEQ ID NO: 711491 - DNA, 15 bp, Homo sapiens
aaaattaggaaggac

SEQ ID NO: 711492 - DNA, 15 bp, Homo sapiens
aaattaggaaggaca

SEQ ID NO: 711493 - DNA, 15 bp, Homo sapiens
aattaggaaggacag

SEQ ID NO: 711494 - DNA, 15 bp, Homo sapiens
attaggaaggacagc

SEQ ID NO: 711495 - DNA, 15 bp, Homo sapiens
ttaggaaggacagcc

SEQ ID NO: 711496 - DNA, 15 bp, Homo sapiens
taggaaggacagccc

SEQ ID NO: 711497 - DNA, 15 bp, Homo sapiens
aggaaggacagcccc

SEQ ID NO: 711498 - DNA, 15 bp, Homo sapiens
ggaaggacagcccca

SEQ ID NO: 711499 - DNA, 15 bp, Homo sapiens
gaaggacagccccaa

SEQ ID NO: 711500 - DNA, 15 bp, Homo sapiens
aaggacagccccaag

SEQ ID NO: 711501 - DNA, 15 bp, Homo sapiens
aggacagccccaagg

SEQ ID NO: 711502 - DNA, 15 bp, Homo sapiens
ggacagccccaaggg

SEQ ID NO: 711503 - DNA, 15 bp, Homo sapiens
gacagccccaagggg

SEQ ID NO: 711504 - DNA, 15 bp, Homo sapiens
acagccccaaggggc

SEQ ID NO: 711505 - DNA, 15 bp, Homo sapiens
cagccccaaggggcc

SEQ ID NO: 711506 - DNA, 15 bp, Homo sapiens
agccccaaggggcca

SEQ ID NO: 711507 - DNA, 15 bp, Homo sapiens
gccccaaggggccag

SEQ ID NO: 711508 - DNA, 15 bp, Homo sapiens
ccccaaggggccaga

SEQ ID NO: 711509 - DNA, 15 bp, Homo sapiens
cccaaggggccagaa

SEQ ID NO: 711510 - DNA, 15 bp, Homo sapiens
ccaaggggccagaac

SEQ ID NO: 711511 - DNA, 15 bp, Homo sapiens
caaggggccagaacc

SEQ ID NO: 711512 - DNA, 15 bp, Homo sapiens
aaggggccagaacca

SEQ ID NO: 711513 - DNA, 15 bp, Homo sapiens
aggggccagaaccac

SEQ ID NO: 711514 - DNA, 15 bp, Homo sapiens
ggggccagaaccacc

SEQ ID NO: 711515 - DNA, 15 bp, Homo sapiens
gggccagaaccacca

SEQ ID NO: 711516 - DNA, 15 bp, Homo sapiens
ggccagaaccaccac

SEQ ID NO: 711517 - DNA, 15 bp, Homo sapiens
gccagaaccaccacc

SEQ ID NO: 711518 - DNA, 15 bp, Homo sapiens
ccagaaccaccaccc

SEQ ID NO: 711519 - DNA, 15 bp, Homo sapiens
cagaaccaccaccct

SEQ ID NO: 711520 - DNA, 15 bp, Homo sapiens
agaaccaccacccta

SEQ ID NO: 711521 - DNA, 15 bp, Homo sapiens
gaaccaccaccctac

SEQ ID NO: 711522 - DNA, 15 bp, Homo sapiens
aaccaccaccctaca

SEQ ID NO: 711523 - DNA, 15 bp, Homo sapiens
accaccaccctacac

SEQ ID NO: 711524 - DNA, 15 bp, Homo sapiens
ccaccaccctacaca

SEQ ID NO: 711525 - DNA, 15 bp, Homo sapiens
caccaccctacacaa

SEQ ID NO: 711526 - DNA, 15 bp, Homo sapiens
accaccctacacaaa

SEQ ID NO: 711527 - DNA, 15 bp, Homo sapiens
ccaccctacacaaag

SEQ ID NO: 711528 - DNA, 15 bp, Homo sapiens
caccctacacaaagc

SEQ ID NO: 711529 - DNA, 15 bp, Homo sapiens
accctacacaaagcc

SEQ ID NO: 711530 - DNA, 15 bp, Homo sapiens
ccctacacaaagccg

SEQ ID NO: 711531 - DNA, 15 bp, Homo sapiens
cctacacaaagccgt

SEQ ID NO: 711532 - DNA, 15 bp, Homo sapiens
ctacacaaagccgtg

SEQ ID NO: 711533 - DNA, 15 bp, Homo sapiens
tacacaaagccgtga

SEQ ID NO: 711534 - DNA, 15 bp, Homo sapiens
acacaaagccgtgag

SEQ ID NO: 711535 - DNA, 15 bp, Homo sapiens
cacaaagccgtgagg

SEQ ID NO: 711536 - DNA, 15 bp, Homo sapiens
acaaagccgtgagga

SEQ ID NO: 711537 - DNA, 15 bp, Homo sapiens
caaagccgtgaggag

SEQ ID NO: 711538 - DNA, 15 bp, Homo sapiens
aaagccgtgaggaga

SEQ ID NO: 711539 - DNA, 15 bp, Homo sapiens
aagccgtgaggagac

SEQ ID NO: 711540 - DNA, 15 bp, Homo sapiens
agccgtgaggagaca

SEQ ID NO: 711541 - DNA, 15 bp, Homo sapiens
gccgtgaggagacag

SEQ ID NO: 711542 - DNA, 15 bp, Homo sapiens
ccgtgaggagacagt

SEQ ID NO: 711543 - DNA, 15 bp, Homo sapiens
cgtgaggagacagtc

SEQ ID NO: 711544 - DNA, 15 bp, Homo sapiens
gtgaggagacagtcc

SEQ ID NO: 711545 - DNA, 15 bp, Homo sapiens
tgaggagacagtccc

SEQ ID NO: 711546 - DNA, 15 bp, Homo sapiens
gaggagacagtccct

SEQ ID NO: 711547 - DNA, 15 bp, Homo sapiens
aggagacagtccctg

SEQ ID NO: 711548 - DNA, 15 bp, Homo sapiens
ggagacagtccctgt

SEQ ID NO: 711549 - DNA, 15 bp, Homo sapiens
gagacagtccctgtg

SEQ ID NO: 711550 - DNA, 15 bp, Homo sapiens
agacagtccctgtgc

SEQ ID NO: 711551 - DNA, 15 bp, Homo sapiens
gacagtccctgtgca

SEQ ID NO: 711552 - DNA, 15 bp, Homo sapiens
acagtccctgtgcat

SEQ ID NO: 711553 - DNA, 15 bp, Homo sapiens
cagtccctgtgcatc

SEQ ID NO: 711554 - DNA, 15 bp, Homo sapiens
agtccctgtgcatct

SEQ ID NO: 711555 - DNA, 15 bp, Homo sapiens
gtccctgtgcatctc

SEQ ID NO: 711556 - DNA, 15 bp, Homo sapiens
tccctgtgcatctct

SEQ ID NO: 711557 - DNA, 15 bp, Homo sapiens
ccctgtgcatctctg

SEQ ID NO: 711558 - DNA, 15 bp, Homo sapiens
cctgtgcatctctgc

SEQ ID NO: 711559 - DNA, 15 bp, Homo sapiens
ctgtgcatctctgcg

SEQ ID NO: 711560 - DNA, 15 bp, Homo sapiens
tgtgcatctctgcga

SEQ ID NO: 711561 - DNA, 15 bp, Homo sapiens
gtgcatctctgcgag

SEQ ID NO: 711562 - DNA, 15 bp, Homo sapiens
tgcatctctgcgagt

SEQ ID NO: 711563 - DNA, 15 bp, Homo sapiens
gcatctctgcgagtc

SEQ ID NO: 711564 - DNA, 15 bp, Homo sapiens
catctctgcgagtcc

SEQ ID NO: 711565 - DNA, 15 bp, Homo sapiens
atctctgcgagtccc

SEQ ID NO: 711566 - DNA, 15 bp, Homo sapiens
tctctgcgagtccct

SEQ ID NO: 711567 - DNA, 15 bp, Homo sapiens
ctctgcgagtccctg

SEQ ID NO: 711568 - DNA, 15 bp, Homo sapiens
tctgcgagtccctga

SEQ ID NO: 711569 - DNA, 15 bp, Homo sapiens
ctgcgagtccctgaa

SEQ ID NO: 711570 - DNA, 15 bp, Homo sapiens
tgcgagtccctgaac

SEQ ID NO: 711571 - DNA, 15 bp, Homo sapiens
gcgagtccctgaact

SEQ ID NO: 711572 - DNA, 15 bp, Homo sapiens
cgagtccctgaactc

SEQ ID NO: 711573 - DNA, 15 bp, Homo sapiens
gagtccctgaactca

SEQ ID NO: 711574 - DNA, 15 bp, Homo sapiens
agtccctgaactcaa

SEQ ID NO: 711575 - DNA, 15 bp, Homo sapiens
gtccctgaactcaaa

SEQ ID NO: 711576 - DNA, 15 bp, Homo sapiens
tccctgaactcaaac

SEQ ID NO: 711577 - DNA, 15 bp, Homo sapiens
ccctgaactcaaacc

SEQ ID NO: 711578 - DNA, 15 bp, Homo sapiens
cctgaactcaaaccc

SEQ ID NO: 711579 - DNA, 15 bp, Homo sapiens
ctgaactcaaaccca

SEQ ID NO: 711580 - DNA, 15 bp, Homo sapiens
tgaactcaaacccaa

SEQ ID NO: 711581 - DNA, 15 bp, Homo sapiens
gaactcaaacccaag

SEQ ID NO: 711582 - DNA, 15 bp, Homo sapiens
aactcaaacccaaga

SEQ ID NO: 711583 - DNA, 15 bp, Homo sapiens
actcaaacccaagac

SEQ ID NO: 711584 - DNA, 15 bp, Homo sapiens
ctcaaacccaagact

SEQ ID NO: 711585 - DNA, 15 bp, Homo sapiens
tcaaacccaagactt

SEQ ID NO: 711586 - DNA, 15 bp, Homo sapiens
caaacccaagacttc

SEQ ID NO: 711587 - DNA, 15 bp, Homo sapiens
aaacccaagacttcc

SEQ ID NO: 711588 - DNA, 15 bp, Homo sapiens
aacccaagacttcct

SEQ ID NO: 711589 - DNA, 15 bp, Homo sapiens
acccaagacttcctg

SEQ ID NO: 711590 - DNA, 15 bp, Homo sapiens
cccaagacttcctgt

SEQ ID NO: 711591 - DNA, 15 bp, Homo sapiens
ccaagacttcctgtc

SEQ ID NO: 711592 - DNA, 15 bp, Homo sapiens
caagacttcctgtct

SEQ ID NO: 711593 - DNA, 15 bp, Homo sapiens
aagacttcctgtctc

SEQ ID NO: 711594 - DNA, 15 bp, Homo sapiens
agacttcctgtctcc

SEQ ID NO: 711595 - DNA, 15 bp, Homo sapiens
gacttcctgtctcct

SEQ ID NO: 711596 - DNA, 15 bp, Homo sapiens
acttcctgtctcctg

SEQ ID NO: 711597 - DNA, 15 bp, Homo sapiens
cttcctgtctcctgc

SEQ ID NO: 711598 - DNA, 15 bp, Homo sapiens
ttcctgtctcctgcc

SEQ ID NO: 711599 - DNA, 15 bp, Homo sapiens
tcctgtctcctgcca

SEQ ID NO: 711600 - DNA, 15 bp, Homo sapiens
cctgtctcctgccag

SEQ ID NO: 711601 - DNA, 15 bp, Homo sapiens
ctgtctcctgccagg

SEQ ID NO: 711602 - DNA, 15 bp, Homo sapiens
tgtctcctgccaggg

SEQ ID NO: 711603 - DNA, 15 bp, Homo sapiens
gtctcctgccagggc

SEQ ID NO: 711604 - DNA, 15 bp, Homo sapiens
tctcctgccagggct

SEQ ID NO: 711605 - DNA, 15 bp, Homo sapiens
ctcctgccagggctc

SEQ ID NO: 711606 - DNA, 15 bp, Homo sapiens
tcctgccagggctcc

SEQ ID NO: 711607 - DNA, 15 bp, Homo sapiens
cctgccagggctccc

SEQ ID NO: 711608 - DNA, 15 bp, Homo sapiens
ctgccagggctcccc

SEQ ID NO: 711609 - DNA, 15 bp, Homo sapiens
tgccagggctcccca

SEQ ID NO: 711610 - DNA, 15 bp, Homo sapiens
gccagggctccccag

SEQ ID NO: 711611 - DNA, 15 bp, Homo sapiens
ccagggctccccaga

SEQ ID NO: 711612 - DNA, 15 bp, Homo sapiens
cagggctccccagac

SEQ ID NO: 711613 - DNA, 15 bp, Homo sapiens
agggctccccagacc

SEQ ID NO: 711614 - DNA, 15 bp, Homo sapiens
gggctccccagaccc

SEQ ID NO: 711615 - DNA, 15 bp, Homo sapiens
ggctccccagacccc

SEQ ID NO: 711616 - DNA, 15 bp, Homo sapiens
gctccccagaccccg

SEQ ID NO: 711617 - DNA, 15 bp, Homo sapiens
ctccccagaccccga

SEQ ID NO: 711618 - DNA, 15 bp, Homo sapiens
tccccagaccccgac

SEQ ID NO: 711619 - DNA, 15 bp, Homo sapiens
ccccagaccccgaca

SEQ ID NO: 711620 - DNA, 15 bp, Homo sapiens
cccagaccccgacag

SEQ ID NO: 711621 - DNA, 15 bp, Homo sapiens
ccagaccccgacagc

SEQ ID NO: 711622 - DNA, 15 bp, Homo sapiens
cagaccccgacagca

SEQ ID NO: 711623 - DNA, 15 bp, Homo sapiens
agaccccgacagcac

SEQ ID NO: 711624 - DNA, 15 bp, Homo sapiens
gaccccgacagcaca

SEQ ID NO: 711625 - DNA, 15 bp, Homo sapiens
accccgacagcacag

SEQ ID NO: 711626 - DNA, 15 bp, Homo sapiens
ccccgacagcacagg

SEQ ID NO: 711627 - DNA, 15 bp, Homo sapiens
cccgacagcacaggg

SEQ ID NO: 711628 - DNA, 15 bp, Homo sapiens
ccgacagcacagggg

SEQ ID NO: 711629 - DNA, 15 bp, Homo sapiens
cgacagcacaggggc

SEQ ID NO: 711630 - DNA, 15 bp, Homo sapiens
gacagcacaggggcg

SEQ ID NO: 711631 - DNA, 15 bp, Homo sapiens
acagcacaggggcgc

SEQ ID NO: 711632 - DNA, 15 bp, Homo sapiens
cagcacaggggcgct

SEQ ID NO: 711633 - DNA, 15 bp, Homo sapiens
agcacaggggcgctg

SEQ ID NO: 711634 - DNA, 15 bp, Homo sapiens
gcacaggggcgctgg

SEQ ID NO: 711635 - DNA, 15 bp, Homo sapiens
cacaggggcgctggt

SEQ ID NO: 711636 - DNA, 15 bp, Homo sapiens
acaggggcgctggtg

SEQ ID NO: 711637 - DNA, 15 bp, Homo sapiens
caggggcgctggtgg

SEQ ID NO: 711638 - DNA, 15 bp, Homo sapiens
aggggcgctggtgga

SEQ ID NO: 711639 - DNA, 15 bp, Homo sapiens
ggggcgctggtggag

SEQ ID NO: 711640 - DNA, 15 bp, Homo sapiens
gggcgctggtggagg

SEQ ID NO: 711641 - DNA, 15 bp, Homo sapiens
ggcgctggtggagga

SEQ ID NO: 711642 - DNA, 15 bp, Homo sapiens
gcgctggtggaggag

SEQ ID NO: 711643 - DNA, 15 bp, Homo sapiens
cgctggtggaggagg

SEQ ID NO: 711644 - DNA, 15 bp, Homo sapiens
gctggtggaggagga

SEQ ID NO: 711645 - DNA, 15 bp, Homo sapiens
ctggtggaggaggag

SEQ ID NO: 711646 - DNA, 15 bp, Homo sapiens
tggtggaggaggagg

SEQ ID NO: 711647 - DNA, 15 bp, Homo sapiens
ggtggaggaggagga

SEQ ID NO: 711648 - DNA, 15 bp, Homo sapiens
gtggaggaggaggat

SEQ ID NO: 711649 - DNA, 15 bp, Homo sapiens
tggaggaggaggatc

SEQ ID NO: 711650 - DNA, 15 bp, Homo sapiens
ggaggaggaggatcc

SEQ ID NO: 711651 - DNA, 15 bp, Homo sapiens
gaggaggaggatcct

SEQ ID NO: 711652 - DNA, 15 bp, Homo sapiens
aggaggaggatcctt

SEQ ID NO: 711653 - DNA, 15 bp, Homo sapiens
ggaggaggatccttt

SEQ ID NO: 711654 - DNA, 15 bp, Homo sapiens
gaggaggatcctttc

SEQ ID NO: 711655 - DNA, 15 bp, Homo sapiens
aggaggatcctttct

SEQ ID NO: 711656 - DNA, 15 bp, Homo sapiens
ggaggatcctttctt

SEQ ID NO: 711657 - DNA, 15 bp, Homo sapiens
gaggatcctttcttc

SEQ ID NO: 711658 - DNA, 15 bp, Homo sapiens
aggatcctttcttca

SEQ ID NO: 711659 - DNA, 15 bp, Homo sapiens
ggatcctttcttcaa

SEQ ID NO: 711660 - DNA, 15 bp, Homo sapiens
gatcctttcttcaaa

SEQ ID NO: 711661 - DNA, 15 bp, Homo sapiens
atcctttcttcaaag

SEQ ID NO: 711662 - DNA, 15 bp, Homo sapiens
tcctttcttcaaagt

SEQ ID NO: 711663 - DNA, 15 bp, Homo sapiens
cctttcttcaaagtc

SEQ ID NO: 711664 - DNA, 15 bp, Homo sapiens
ctttcttcaaagtcc

SEQ ID NO: 711665 - DNA, 15 bp, Homo sapiens
tttcttcaaagtccc

SEQ ID NO: 711666 - DNA, 15 bp, Homo sapiens
ttcttcaaagtcccc

SEQ ID NO: 711667 - DNA, 15 bp, Homo sapiens
tcttcaaagtccccg

SEQ ID NO: 711668 - DNA, 15 bp, Homo sapiens
cttcaaagtccccgt

SEQ ID NO: 711669 - DNA, 15 bp, Homo sapiens
ttcaaagtccccgtg

SEQ ID NO: 711670 - DNA, 15 bp, Homo sapiens
tcaaagtccccgtga

SEQ ID NO: 711671 - DNA, 15 bp, Homo sapiens
caaagtccccgtgaa

SEQ ID NO: 711672 - DNA, 15 bp, Homo sapiens
aaagtccccgtgaac

SEQ ID NO: 711673 - DNA, 15 bp, Homo sapiens
aagtccccgtgaaca

SEQ ID NO: 711674 - DNA, 15 bp, Homo sapiens
agtccccgtgaacaa

SEQ ID NO: 711675 - DNA, 15 bp, Homo sapiens
gtccccgtgaacaag

SEQ ID NO: 711676 - DNA, 15 bp, Homo sapiens
tccccgtgaacaagc

SEQ ID NO: 711677 - DNA, 15 bp, Homo sapiens
ccccgtgaacaagct

SEQ ID NO: 711678 - DNA, 15 bp, Homo sapiens
cccgtgaacaagctg

SEQ ID NO: 711679 - DNA, 15 bp, Homo sapiens
ccgtgaacaagctgg

SEQ ID NO: 711680 - DNA, 15 bp, Homo sapiens
cgtgaacaagctggc

SEQ ID NO: 711681 - DNA, 15 bp, Homo sapiens
gtgaacaagctggca

SEQ ID NO: 711682 - DNA, 15 bp, Homo sapiens
tgaacaagctggcag

SEQ ID NO: 711683 - DNA, 15 bp, Homo sapiens
gaacaagctggcagc

SEQ ID NO: 711684 - DNA, 15 bp, Homo sapiens
aacaagctggcagcg

SEQ ID NO: 711685 - DNA, 15 bp, Homo sapiens
acaagctggcagcgg

SEQ ID NO: 711686 - DNA, 15 bp, Homo sapiens
caagctggcagcggc

SEQ ID NO: 711687 - DNA, 15 bp, Homo sapiens
aagctggcagcggct

SEQ ID NO: 711688 - DNA, 15 bp, Homo sapiens
agctggcagcggctg

SEQ ID NO: 711689 - DNA, 15 bp, Homo sapiens
gctggcagcggctgt

SEQ ID NO: 711690 - DNA, 15 bp, Homo sapiens
ctggcagcggctgtc

SEQ ID NO: 711691 - DNA, 15 bp, Homo sapiens
tggcagcggctgtct

SEQ ID NO: 711692 - DNA, 15 bp, Homo sapiens
ggcagcggctgtctc

SEQ ID NO: 711693 - DNA, 15 bp, Homo sapiens
gcagcggctgtctcc

SEQ ID NO: 711694 - DNA, 15 bp, Homo sapiens
cagcggctgtctcca

SEQ ID NO: 711695 - DNA, 15 bp, Homo sapiens
agcggctgtctccaa

SEQ ID NO: 711696 - DNA, 15 bp, Homo sapiens
gcggctgtctccaac

SEQ ID NO: 711697 - DNA, 15 bp, Homo sapiens
cggctgtctccaact

SEQ ID NO: 711698 - DNA, 15 bp, Homo sapiens
ggctgtctccaactt

SEQ ID NO: 711699 - DNA, 15 bp, Homo sapiens
gctgtctccaacttc

SEQ ID NO: 711700 - DNA, 15 bp, Homo sapiens
ctgtctccaacttcg

SEQ ID NO: 711701 - DNA, 15 bp, Homo sapiens
tgtctccaacttcgg

SEQ ID NO: 711702 - DNA, 15 bp, Homo sapiens
gtctccaacttcggc

SEQ ID NO: 711703 - DNA, 15 bp, Homo sapiens
tctccaacttcggct

SEQ ID NO: 711704 - DNA, 15 bp, Homo sapiens
ctccaacttcggcta

SEQ ID NO: 711705 - DNA, 15 bp, Homo sapiens
tccaacttcggctat

SEQ ID NO: 711706 - DNA, 15 bp, Homo sapiens
ccaacttcggctatg

SEQ ID NO: 711707 - DNA, 15 bp, Homo sapiens
caacttcggctatga

SEQ ID NO: 711708 - DNA, 15 bp, Homo sapiens
aacttcggctatgac

SEQ ID NO: 711709 - DNA, 15 bp, Homo sapiens
acttcggctatgacc

SEQ ID NO: 711710 - DNA, 15 bp, Homo sapiens
cttcggctatgacct

SEQ ID NO: 711711 - DNA, 15 bp, Homo sapiens
ttcggctatgacctg

SEQ ID NO: 711712 - DNA, 15 bp, Homo sapiens
tcggctatgacctgt

SEQ ID NO: 711713 - DNA, 15 bp, Homo sapiens
cggctatgacctgta

SEQ ID NO: 711714 - DNA, 15 bp, Homo sapiens
ggctatgacctgtac

SEQ ID NO: 711715 - DNA, 15 bp, Homo sapiens
gctatgacctgtacc

SEQ ID NO: 711716 - DNA, 15 bp, Homo sapiens
ctatgacctgtaccg

SEQ ID NO: 711717 - DNA, 15 bp, Homo sapiens
tatgacctgtaccgg

SEQ ID NO: 711718 - DNA, 15 bp, Homo sapiens
atgacctgtaccggg

SEQ ID NO: 711719 - DNA, 15 bp, Homo sapiens
tgacctgtaccgggt

SEQ ID NO: 711720 - DNA, 15 bp, Homo sapiens
gacctgtaccgggtg

SEQ ID NO: 711721 - DNA, 15 bp, Homo sapiens
acctgtaccgggtgc

SEQ ID NO: 711722 - DNA, 15 bp, Homo sapiens
cctgtaccgggtgcg

SEQ ID NO: 711723 - DNA, 15 bp, Homo sapiens
ctgtaccgggtgcga

SEQ ID NO: 711724 - DNA, 15 bp, Homo sapiens
tgtaccgggtgcgat

SEQ ID NO: 711725 - DNA, 15 bp, Homo sapiens
gtaccgggtgcgatc

SEQ ID NO: 711726 - DNA, 15 bp, Homo sapiens
taccgggtgcgatcc

SEQ ID NO: 711727 - DNA, 15 bp, Homo sapiens
accgggtgcgatcca

SEQ ID NO: 711728 - DNA, 15 bp, Homo sapiens
ccgggtgcgatccag

SEQ ID NO: 711729 - DNA, 15 bp, Homo sapiens
cgggtgcgatccagc

SEQ ID NO: 711730 - DNA, 15 bp, Homo sapiens
gggtgcgatccagca

SEQ ID NO: 711731 - DNA, 15 bp, Homo sapiens
ggtgcgatccagcac

SEQ ID NO: 711732 - DNA, 15 bp, Homo sapiens
gtgcgatccagcacg

SEQ ID NO: 711733 - DNA, 15 bp, Homo sapiens
tgcgatccagcacga

SEQ ID NO: 711734 - DNA, 15 bp, Homo sapiens
gcgatccagcacgag

SEQ ID NO: 711735 - DNA, 15 bp, Homo sapiens
cgatccagcacgagc

SEQ ID NO: 711736 - DNA, 15 bp, Homo sapiens
gatccagcacgagcc

SEQ ID NO: 711737 - DNA, 15 bp, Homo sapiens
atccagcacgagccc

SEQ ID NO: 711738 - DNA, 15 bp, Homo sapiens
tccagcacgagcccc

SEQ ID NO: 711739 - DNA, 15 bp, Homo sapiens
ccagcacgagcccca

SEQ ID NO: 711740 - DNA, 15 bp, Homo sapiens
cagcacgagccccac

SEQ ID NO: 711741 - DNA, 15 bp, Homo sapiens
agcacgagccccacg

SEQ ID NO: 711742 - DNA, 15 bp, Homo sapiens
gcacgagccccacga

SEQ ID NO: 711743 - DNA, 15 bp, Homo sapiens
cacgagccccacgac

SEQ ID NO: 711744 - DNA, 15 bp, Homo sapiens
acgagccccacgacc

SEQ ID NO: 711745 - DNA, 15 bp, Homo sapiens
cgagccccacgacca

SEQ ID NO: 711746 - DNA, 15 bp, Homo sapiens
gagccccacgaccaa

SEQ ID NO: 711747 - DNA, 15 bp, Homo sapiens
agccccacgaccaac

SEQ ID NO: 711748 - DNA, 15 bp, Homo sapiens
gccccacgaccaacg

SEQ ID NO: 711749 - DNA, 15 bp, Homo sapiens
ccccacgaccaacgt

SEQ ID NO: 711750 - DNA, 15 bp, Homo sapiens
cccacgaccaacgtg

SEQ ID NO: 711751 - DNA, 15 bp, Homo sapiens
ccacgaccaacgtgc

SEQ ID NO: 711752 - DNA, 15 bp, Homo sapiens
cacgaccaacgtgct

SEQ ID NO: 711753 - DNA, 15 bp, Homo sapiens
acgaccaacgtgctc

SEQ ID NO: 711754 - DNA, 15 bp, Homo sapiens
cgaccaacgtgctcc

SEQ ID NO: 711755 - DNA, 15 bp, Homo sapiens
gaccaacgtgctcct

SEQ ID NO: 711756 - DNA, 15 bp, Homo sapiens
accaacgtgctcctg

SEQ ID NO: 711757 - DNA, 15 bp, Homo sapiens
ccaacgtgctcctgt

SEQ ID NO: 711758 - DNA, 15 bp, Homo sapiens
caacgtgctcctgtc

SEQ ID NO: 711759 - DNA, 15 bp, Homo sapiens
aacgtgctcctgtct

SEQ ID NO: 711760 - DNA, 15 bp, Homo sapiens
acgtgctcctgtctc

SEQ ID NO: 711761 - DNA, 15 bp, Homo sapiens
cgtgctcctgtctcc

SEQ ID NO: 711762 - DNA, 15 bp, Homo sapiens
gtgctcctgtctcct

SEQ ID NO: 711763 - DNA, 15 bp, Homo sapiens
tgctcctgtctcctc

SEQ ID NO: 711764 - DNA, 15 bp, Homo sapiens
gctcctgtctcctct

SEQ ID NO: 711765 - DNA, 15 bp, Homo sapiens
ctcctgtctcctctc

SEQ ID NO: 711766 - DNA, 15 bp, Homo sapiens
tcctgtctcctctca

SEQ ID NO: 711767 - DNA, 15 bp, Homo sapiens
cctgtctcctctcag

SEQ ID NO: 711768 - DNA, 15 bp, Homo sapiens
ctgtctcctctcagt

SEQ ID NO: 711769 - DNA, 15 bp, Homo sapiens
tgtctcctctcagtg

SEQ ID NO: 711770 - DNA, 15 bp, Homo sapiens
gtctcctctcagtgt

SEQ ID NO: 711771 - DNA, 15 bp, Homo sapiens
tctcctctcagtgtg

SEQ ID NO: 711772 - DNA, 15 bp, Homo sapiens
ctcctctcagtgtgg

SEQ ID NO: 711773 - DNA, 15 bp, Homo sapiens
tcctctcagtgtggc

SEQ ID NO: 711774 - DNA, 15 bp, Homo sapiens
cctctcagtgtggcc

SEQ ID NO: 711775 - DNA, 15 bp, Homo sapiens
ctctcagtgtggcca

SEQ ID NO: 711776 - DNA, 15 bp, Homo sapiens
tctcagtgtggccac

SEQ ID NO: 711777 - DNA, 15 bp, Homo sapiens
ctcagtgtggccacg

SEQ ID NO: 711778 - DNA, 15 bp, Homo sapiens
tcagtgtggccacgg

SEQ ID NO: 711779 - DNA, 15 bp, Homo sapiens
cagtgtggccacggc

SEQ ID NO: 711780 - DNA, 15 bp, Homo sapiens
agtgtggccacggcc

SEQ ID NO: 711781 - DNA, 15 bp, Homo sapiens
gtgtggccacggccc

SEQ ID NO: 711782 - DNA, 15 bp, Homo sapiens
tgtggccacggccct

SEQ ID NO: 711783 - DNA, 15 bp, Homo sapiens
gtggccacggccctc

SEQ ID NO: 711784 - DNA, 15 bp, Homo sapiens
tggccacggccctct

SEQ ID NO: 711785 - DNA, 15 bp, Homo sapiens
ggccacggccctctc

SEQ ID NO: 711786 - DNA, 15 bp, Homo sapiens
gccacggccctctcg

SEQ ID NO: 711787 - DNA, 15 bp, Homo sapiens
ccacggccctctcgg

SEQ ID NO: 711788 - DNA, 15 bp, Homo sapiens
cacggccctctcggc

SEQ ID NO: 711789 - DNA, 15 bp, Homo sapiens
acggccctctcggcc

SEQ ID NO: 711790 - DNA, 15 bp, Homo sapiens
cggccctctcggccc

SEQ ID NO: 711791 - DNA, 15 bp, Homo sapiens
ggccctctcggccct

SEQ ID NO: 711792 - DNA, 15 bp, Homo sapiens
gccctctcggccctc

SEQ ID NO: 711793 - DNA, 15 bp, Homo sapiens
ccctctcggccctct

SEQ ID NO: 711794 - DNA, 15 bp, Homo sapiens
cctctcggccctctc

SEQ ID NO: 711795 - DNA, 15 bp, Homo sapiens
ctctcggccctctcg

SEQ ID NO: 711796 - DNA, 15 bp, Homo sapiens
tctcggccctctcgc

SEQ ID NO: 711797 - DNA, 15 bp, Homo sapiens
ctcggccctctcgct

SEQ ID NO: 711798 - DNA, 15 bp, Homo sapiens
tcggccctctcgctg

SEQ ID NO: 711799 - DNA, 15 bp, Homo sapiens
cggccctctcgctgg

SEQ ID NO: 711800 - DNA, 15 bp, Homo sapiens
ggccctctcgctggg

SEQ ID NO: 711801 - DNA, 15 bp, Homo sapiens
gccctctcgctgggt

SEQ ID NO: 711802 - DNA, 15 bp, Homo sapiens
ccctctcgctgggtg

SEQ ID NO: 711803 - DNA, 15 bp, Homo sapiens
cctctcgctgggtga

SEQ ID NO: 711804 - DNA, 15 bp, Homo sapiens
ctctcgctgggtgag

SEQ ID NO: 711805 - DNA, 15 bp, Homo sapiens
tctcgctgggtgagt

SEQ ID NO: 711806 - DNA, 15 bp, Homo sapiens
ctcgctgggtgagtg

SEQ ID NO: 711807 - DNA, 15 bp, Homo sapiens
tcgctgggtgagtgc

SEQ ID NO: 711808 - DNA, 15 bp, Homo sapiens
cgctgggtgagtgct

SEQ ID NO: 711809 - DNA, 15 bp, Homo sapiens
gctgggtgagtgctc

SEQ ID NO: 711810 - DNA, 15 bp, Homo sapiens
ctgggtgagtgctca

SEQ ID NO: 711811 - DNA, 15 bp, Homo sapiens
tgggtgagtgctcag

SEQ ID NO: 711812 - DNA, 15 bp, Homo sapiens
gggtgagtgctcaga

SEQ ID NO: 711813 - DNA, 15 bp, Homo sapiens
ggtgagtgctcagat

SEQ ID NO: 711814 - DNA, 15 bp, Homo sapiens
gtgagtgctcagatg

SEQ ID NO: 711815 - DNA, 15 bp, Homo sapiens
tgagtgctcagatgc

SEQ ID NO: 711816 - DNA, 15 bp, Homo sapiens
gagtgctcagatgca

SEQ ID NO: 711817 - DNA, 15 bp, Homo sapiens
agtgctcagatgcag

SEQ ID NO: 711818 - DNA, 15 bp, Homo sapiens
gtgctcagatgcagg

SEQ ID NO: 711819 - DNA, 15 bp, Homo sapiens
tgctcagatgcagga

SEQ ID NO: 711820 - DNA, 15 bp, Homo sapiens
gctcagatgcaggaa

SEQ ID NO: 711821 - DNA, 15 bp, Homo sapiens
ctcagatgcaggaag

SEQ ID NO: 711822 - DNA, 15 bp, Homo sapiens
tcagatgcaggaagc

SEQ ID NO: 711823 - DNA, 15 bp, Homo sapiens
cagatgcaggaagcc

SEQ ID NO: 711824 - DNA, 15 bp, Homo sapiens
agatgcaggaagccc

SEQ ID NO: 711825 - DNA, 15 bp, Homo sapiens
gatgcaggaagcccc

SEQ ID NO: 711826 - DNA, 15 bp, Homo sapiens
atgcaggaagcccca

SEQ ID NO: 711827 - DNA, 15 bp, Homo sapiens
tgcaggaagccccag

SEQ ID NO: 711828 - DNA, 15 bp, Homo sapiens
gcaggaagccccagg

SEQ ID NO: 711829 - DNA, 15 bp, Homo sapiens
caggaagccccaggc

SEQ ID NO: 711830 - DNA, 15 bp, Homo sapiens
aggaagccccaggca

SEQ ID NO: 711831 - DNA, 15 bp, Homo sapiens
ggaagccccaggcag

SEQ ID NO: 711832 - DNA, 15 bp, Homo sapiens
gaagccccaggcaga

SEQ ID NO: 711833 - DNA, 15 bp, Homo sapiens
aagccccaggcagac

SEQ ID NO: 711834 - DNA, 15 bp, Homo sapiens
agccccaggcagacc

SEQ ID NO: 711835 - DNA, 15 bp, Homo sapiens
gccccaggcagacct

SEQ ID NO: 711836 - DNA, 15 bp, Homo sapiens
ccccaggcagacctg

SEQ ID NO: 711837 - DNA, 15 bp, Homo sapiens
cccaggcagacctgg

SEQ ID NO: 711838 - DNA, 15 bp, Homo sapiens
ccaggcagacctgga

SEQ ID NO: 711839 - DNA, 15 bp, Homo sapiens
caggcagacctggag

SEQ ID NO: 711840 - DNA, 15 bp, Homo sapiens
aggcagacctggaga

SEQ ID NO: 711841 - DNA, 15 bp, Homo sapiens
ggcagacctggagag

SEQ ID NO: 711842 - DNA, 15 bp, Homo sapiens
gcagacctggagagg

SEQ ID NO: 711843 - DNA, 15 bp, Homo sapiens
cagacctggagaggc

SEQ ID NO: 711844 - DNA, 15 bp, Homo sapiens
agacctggagaggcc

SEQ ID NO: 711845 - DNA, 15 bp, Homo sapiens
gacctggagaggccc

SEQ ID NO: 711846 - DNA, 15 bp, Homo sapiens
acctggagaggcccc

SEQ ID NO: 711847 - DNA, 15 bp, Homo sapiens
cctggagaggccccc

SEQ ID NO: 711848 - DNA, 15 bp, Homo sapiens
ctggagaggccccct

SEQ ID NO: 711849 - DNA, 15 bp, Homo sapiens
tggagaggccccctg

SEQ ID NO: 711850 - DNA, 15 bp, Homo sapiens
ggagaggccccctgt

SEQ ID NO: 711851 - DNA, 15 bp, Homo sapiens
gagaggccccctgtg

SEQ ID NO: 711852 - DNA, 15 bp, Homo sapiens
agaggccccctgtgg

SEQ ID NO: 711853 - DNA, 15 bp, Homo sapiens
gaggccccctgtggc

SEQ ID NO: 711854 - DNA, 15 bp, Homo sapiens
aggccccctgtggcc

SEQ ID NO: 711855 - DNA, 15 bp, Homo sapiens
ggccccctgtggcct

SEQ ID NO: 711856 - DNA, 15 bp, Homo sapiens
gccccctgtggcctc

SEQ ID NO: 711857 - DNA, 15 bp, Homo sapiens
ccccctgtggcctct

SEQ ID NO: 711858 - DNA, 15 bp, Homo sapiens
cccctgtggcctctg

SEQ ID NO: 711859 - DNA, 15 bp, Homo sapiens
ccctgtggcctctgc

SEQ ID NO: 711860 - DNA, 15 bp, Homo sapiens
cctgtggcctctgcg

SEQ ID NO: 711861 - DNA, 15 bp, Homo sapiens
ctgtggcctctgcgt

SEQ ID NO: 711862 - DNA, 15 bp, Homo sapiens
tgtggcctctgcgta

SEQ ID NO: 711863 - DNA, 15 bp, Homo sapiens
gtggcctctgcgtaa

SEQ ID NO: 711864 - DNA, 15 bp, Homo sapiens
tggcctctgcgtaaa

SEQ ID NO: 711865 - DNA, 15 bp, Homo sapiens
ggcctctgcgtaaac

SEQ ID NO: 711866 - DNA, 15 bp, Homo sapiens
gcctctgcgtaaacg

SEQ ID NO: 711867 - DNA, 15 bp, Homo sapiens
cctctgcgtaaacgt

SEQ ID NO: 711868 - DNA, 15 bp, Homo sapiens
ctctgcgtaaacgtg

SEQ ID NO: 711869 - DNA, 15 bp, Homo sapiens
tctgcgtaaacgtgg

SEQ ID NO: 711870 - DNA, 15 bp, Homo sapiens
ctgcgtaaacgtggc

SEQ ID NO: 711871 - DNA, 15 bp, Homo sapiens
tgcgtaaacgtggct

SEQ ID NO: 711872 - DNA, 15 bp, Homo sapiens
gcgtaaacgtggctg

SEQ ID NO: 711873 - DNA, 15 bp, Homo sapiens
cgtaaacgtggctga

SEQ ID NO: 711874 - DNA, 15 bp, Homo sapiens
gtaaacgtggctgag

SEQ ID NO: 711875 - DNA, 15 bp, Homo sapiens
taaacgtggctgagt

SEQ ID NO: 711876 - DNA, 15 bp, Homo sapiens
aaacgtggctgagtt

SEQ ID NO: 711877 - DNA, 15 bp, Homo sapiens
aacgtggctgagttt

SEQ ID NO: 711878 - DNA, 15 bp, Homo sapiens
acgtggctgagttta

SEQ ID NO: 711879 - DNA, 15 bp, Homo sapiens
cgtggctgagtttat

SEQ ID NO: 711880 - DNA, 15 bp, Homo sapiens
gtggctgagtttatt

SEQ ID NO: 711881 - DNA, 15 bp, Homo sapiens
tggctgagtttattg

SEQ ID NO: 711882 - DNA, 15 bp, Homo sapiens
ggctgagtttattga

SEQ ID NO: 711883 - DNA, 15 bp, Homo sapiens
gctgagtttattgac

SEQ ID NO: 711884 - DNA, 15 bp, Homo sapiens
ctgagtttattgaca

SEQ ID NO: 711885 - DNA, 15 bp, Homo sapiens
tgagtttattgacat

SEQ ID NO: 711886 - DNA, 15 bp, Homo sapiens
gagtttattgacatt

SEQ ID NO: 711887 - DNA, 15 bp, Homo sapiens
agtttattgacattt

SEQ ID NO: 711888 - DNA, 15 bp, Homo sapiens
gtttattgacatttc

SEQ ID NO: 711889 - DNA, 15 bp, Homo sapiens
tttattgacatttca

SEQ ID NO: 711890 - DNA, 15 bp, Homo sapiens
ttattgacatttcag

SEQ ID NO: 711891 - DNA, 15 bp, Homo sapiens
tattgacatttcagt

SEQ ID NO: 711892 - DNA, 15 bp, Homo sapiens
attgacatttcagtt

SEQ ID NO: 711893 - DNA, 15 bp, Homo sapiens
ttgacatttcagttc

SEQ ID NO: 711894 - DNA, 15 bp, Homo sapiens
tgacatttcagttca

SEQ ID NO: 711895 - DNA, 15 bp, Homo sapiens
gacatttcagttcag

SEQ ID NO: 711896 - DNA, 15 bp, Homo sapiens
acatttcagttcagc

SEQ ID NO: 711897 - DNA, 15 bp, Homo sapiens
catttcagttcagcg

SEQ ID NO: 711898 - DNA, 15 bp, Homo sapiens
atttcagttcagcga

SEQ ID NO: 711899 - DNA, 15 bp, Homo sapiens
tttcagttcagcgag

SEQ ID NO: 711900 - DNA, 15 bp, Homo sapiens
ttcagttcagcgagg

SEQ ID NO: 711901 - DNA, 15 bp, Homo sapiens
tcagttcagcgaggg

SEQ ID NO: 711902 - DNA, 15 bp, Homo sapiens
cagttcagcgagggg

SEQ ID NO: 711903 - DNA, 15 bp, Homo sapiens
agttcagcgaggggt

SEQ ID NO: 711904 - DNA, 15 bp, Homo sapiens
gttcagcgaggggtg

SEQ ID NO: 711905 - DNA, 15 bp, Homo sapiens
ttcagcgaggggtga

SEQ ID NO: 711906 - DNA, 15 bp, Homo sapiens
tcagcgaggggtgaa

SEQ ID NO: 711907 - DNA, 15 bp, Homo sapiens
cagcgaggggtgaag

SEQ ID NO: 711908 - DNA, 15 bp, Homo sapiens
agcgaggggtgaagt

SEQ ID NO: 711909 - DNA, 15 bp, Homo sapiens
gcgaggggtgaagta

SEQ ID NO: 711910 - DNA, 15 bp, Homo sapiens
cgaggggtgaagtag

SEQ ID NO: 711911 - DNA, 15 bp, Homo sapiens
gaggggtgaagtagc

SEQ ID NO: 711912 - DNA, 15 bp, Homo sapiens
aggggtgaagtagca

SEQ ID NO: 711913 - DNA, 15 bp, Homo sapiens
ggggtgaagtagcac

SEQ ID NO: 711914 - DNA, 15 bp, Homo sapiens
gggtgaagtagcacc

SEQ ID NO: 711915 - DNA, 15 bp, Homo sapiens
ggtgaagtagcacca

SEQ ID NO: 711916 - DNA, 15 bp, Homo sapiens
gtgaagtagcaccag

SEQ ID NO: 711917 - DNA, 15 bp, Homo sapiens
tgaagtagcaccagg

SEQ ID NO: 711918 - DNA, 15 bp, Homo sapiens
gaagtagcaccaggg

SEQ ID NO: 711919 - DNA, 15 bp, Homo sapiens
aagtagcaccagggg

SEQ ID NO: 711920 - DNA, 15 bp, Homo sapiens
agtagcaccaggggc

SEQ ID NO: 711921 - DNA, 15 bp, Homo sapiens
gtagcaccaggggcc

SEQ ID NO: 711922 - DNA, 15 bp, Homo sapiens
tagcaccaggggcct

SEQ ID NO: 711923 - DNA, 15 bp, Homo sapiens
agcaccaggggcctg

SEQ ID NO: 711924 - DNA, 15 bp, Homo sapiens
gcaccaggggcctgg

SEQ ID NO: 711925 - DNA, 15 bp, Homo sapiens
caccaggggcctggc

SEQ ID NO: 711926 - DNA, 15 bp, Homo sapiens
accaggggcctggcc

SEQ ID NO: 711927 - DNA, 15 bp, Homo sapiens
ccaggggcctggcct

SEQ ID NO: 711928 - DNA, 15 bp, Homo sapiens
caggggcctggcctg

SEQ ID NO: 711929 - DNA, 15 bp, Homo sapiens
aggggcctggcctgg

SEQ ID NO: 711930 - DNA, 15 bp, Homo sapiens
ggggcctggcctggg

SEQ ID NO: 711931 - DNA, 15 bp, Homo sapiens
gggcctggcctgggg

SEQ ID NO: 711932 - DNA, 15 bp, Homo sapiens
ggcctggcctggggg

SEQ ID NO: 711933 - DNA, 15 bp, Homo sapiens
gcctggcctgggggt

SEQ ID NO: 711934 - DNA, 15 bp, Homo sapiens
cctggcctgggggtc

SEQ ID NO: 711935 - DNA, 15 bp, Homo sapiens
ctggcctgggggtcc

SEQ ID NO: 711936 - DNA, 15 bp, Homo sapiens
tggcctgggggtccc

SEQ ID NO: 711937 - DNA, 15 bp, Homo sapiens
ggcctgggggtccca

SEQ ID NO: 711938 - DNA, 15 bp, Homo sapiens
gcctgggggtcccag

SEQ ID NO: 711939 - DNA, 15 bp, Homo sapiens
cctgggggtcccagc

SEQ ID NO: 711940 - DNA, 15 bp, Homo sapiens
ctgggggtcccagct

SEQ ID NO: 711941 - DNA, 15 bp, Homo sapiens
tgggggtcccagctg

SEQ ID NO: 711942 - DNA, 15 bp, Homo sapiens
gggggtcccagctgt

SEQ ID NO: 711943 - DNA, 15 bp, Homo sapiens
ggggtcccagctgtg

SEQ ID NO: 711944 - DNA, 15 bp, Homo sapiens
gggtcccagctgtgt

SEQ ID NO: 711945 - DNA, 15 bp, Homo sapiens
ggtcccagctgtgta

SEQ ID NO: 711946 - DNA, 15 bp, Homo sapiens
gtcccagctgtgtaa

SEQ ID NO: 711947 - DNA, 15 bp, Homo sapiens
tcccagctgtgtaag

SEQ ID NO: 711948 - DNA, 15 bp, Homo sapiens
cccagctgtgtaagc

SEQ ID NO: 711949 - DNA, 15 bp, Homo sapiens
ccagctgtgtaagca

SEQ ID NO: 711950 - DNA, 15 bp, Homo sapiens
cagctgtgtaagcag

SEQ ID NO: 711951 - DNA, 15 bp, Homo sapiens
agctgtgtaagcagg

SEQ ID NO: 711952 - DNA, 15 bp, Homo sapiens
gctgtgtaagcagga

SEQ ID NO: 711953 - DNA, 15 bp, Homo sapiens
ctgtgtaagcaggag

SEQ ID NO: 711954 - DNA, 15 bp, Homo sapiens
tgtgtaagcaggagc

SEQ ID NO: 711955 - DNA, 15 bp, Homo sapiens
gtgtaagcaggagct

SEQ ID NO: 711956 - DNA, 15 bp, Homo sapiens
tgtaagcaggagctc

SEQ ID NO: 711957 - DNA, 15 bp, Homo sapiens
gtaagcaggagctca

SEQ ID NO: 711958 - DNA, 15 bp, Homo sapiens
taagcaggagctcag

SEQ ID NO: 711959 - DNA, 15 bp, Homo sapiens
aagcaggagctcagg

SEQ ID NO: 711960 - DNA, 15 bp, Homo sapiens
agcaggagctcaggg

SEQ ID NO: 711961 - DNA, 15 bp, Homo sapiens
gcaggagctcagggg

SEQ ID NO: 711962 - DNA, 15 bp, Homo sapiens
caggagctcaggggc

SEQ ID NO: 711963 - DNA, 15 bp, Homo sapiens
aggagctcaggggct

SEQ ID NO: 711964 - DNA, 15 bp, Homo sapiens
ggagctcaggggctg

SEQ ID NO: 711965 - DNA, 15 bp, Homo sapiens
gagctcaggggctgc

SEQ ID NO: 711966 - DNA, 15 bp, Homo sapiens
agctcaggggctgca

SEQ ID NO: 711967 - DNA, 15 bp, Homo sapiens
gctcaggggctgcac

SEQ ID NO: 711968 - DNA, 15 bp, Homo sapiens
ctcaggggctgcaca

SEQ ID NO: 711969 - DNA, 15 bp, Homo sapiens
tcaggggctgcacac

SEQ ID NO: 711970 - DNA, 15 bp, Homo sapiens
caggggctgcacaca

SEQ ID NO: 711971 - DNA, 15 bp, Homo sapiens
aggggctgcacacac

SEQ ID NO: 711972 - DNA, 15 bp, Homo sapiens
ggggctgcacacaca

SEQ ID NO: 711973 - DNA, 15 bp, Homo sapiens
gggctgcacacacac

SEQ ID NO: 711974 - DNA, 15 bp, Homo sapiens
ggctgcacacacacg

SEQ ID NO: 711975 - DNA, 15 bp, Homo sapiens
gctgcacacacacga

SEQ ID NO: 711976 - DNA, 15 bp, Homo sapiens
ctgcacacacacgat

SEQ ID NO: 711977 - DNA, 15 bp, Homo sapiens
tgcacacacacgatt

SEQ ID NO: 711978 - DNA, 15 bp, Homo sapiens
gcacacacacgattc

SEQ ID NO: 711979 - DNA, 15 bp, Homo sapiens
cacacacacgattcc

SEQ ID NO: 711980 - DNA, 15 bp, Homo sapiens
acacacacgattccc

SEQ ID NO: 711981 - DNA, 15 bp, Homo sapiens
cacacacgattcccc

SEQ ID NO: 711982 - DNA, 15 bp, Homo sapiens
acacacgattcccca

SEQ ID NO: 711983 - DNA, 15 bp, Homo sapiens
cacacgattccccag

SEQ ID NO: 711984 - DNA, 15 bp, Homo sapiens
acacgattccccagc

SEQ ID NO: 711985 - DNA, 15 bp, Homo sapiens
cacgattccccagct

SEQ ID NO: 711986 - DNA, 15 bp, Homo sapiens
acgattccccagctc

SEQ ID NO: 711987 - DNA, 15 bp, Homo sapiens
cgattccccagctcc

SEQ ID NO: 711988 - DNA, 15 bp, Homo sapiens
gattccccagctccc

SEQ ID NO: 711989 - DNA, 15 bp, Homo sapiens
attccccagctcccc

SEQ ID NO: 711990 - DNA, 15 bp, Homo sapiens
ttccccagctccccg

SEQ ID NO: 711991 - DNA, 15 bp, Homo sapiens
tccccagctccccga

SEQ ID NO: 711992 - DNA, 15 bp, Homo sapiens
ccccagctccccgaa

SEQ ID NO: 711993 - DNA, 15 bp, Homo sapiens
cccagctccccgaaa

SEQ ID NO: 711994 - DNA, 15 bp, Homo sapiens
ccagctccccgaaag

SEQ ID NO: 711995 - DNA, 15 bp, Homo sapiens
cagctccccgaaagg

SEQ ID NO: 711996 - DNA, 15 bp, Homo sapiens
agctccccgaaaggg

SEQ ID NO: 711997 - DNA, 15 bp, Homo sapiens
gctccccgaaagggg

SEQ ID NO: 711998 - DNA, 15 bp, Homo sapiens
ctccccgaaaggggc

SEQ ID NO: 711999 - DNA, 15 bp, Homo sapiens
tccccgaaaggggct

SEQ ID NO: 712000 - DNA, 15 bp, Homo sapiens
ccccgaaaggggctg

SEQ ID NO: 712001 - DNA, 15 bp, Homo sapiens
cccgaaaggggctgg

SEQ ID NO: 712002 - DNA, 15 bp, Homo sapiens
ccgaaaggggctggg

SEQ ID NO: 712003 - DNA, 15 bp, Homo sapiens
cgaaaggggctgggc

SEQ ID NO: 712004 - DNA, 15 bp, Homo sapiens
gaaaggggctgggca

SEQ ID NO: 712005 - DNA, 15 bp, Homo sapiens
aaaggggctgggcac

SEQ ID NO: 712006 - DNA, 15 bp, Homo sapiens
aaggggctgggcacc

SEQ ID NO: 712007 - DNA, 15 bp, Homo sapiens
aggggctgggcacca

SEQ ID NO: 712008 - DNA, 15 bp, Homo sapiens
ggggctgggcaccac

SEQ ID NO: 712009 - DNA, 15 bp, Homo sapiens
gggctgggcaccact

SEQ ID NO: 712010 - DNA, 15 bp, Homo sapiens
ggctgggcaccactg

SEQ ID NO: 712011 - DNA, 15 bp, Homo sapiens
gctgggcaccactga

SEQ ID NO: 712012 - DNA, 15 bp, Homo sapiens
ctgggcaccactgac

SEQ ID NO: 712013 - DNA, 15 bp, Homo sapiens
tgggcaccactgaca

SEQ ID NO: 712014 - DNA, 15 bp, Homo sapiens
gggcaccactgacat

SEQ ID NO: 712015 - DNA, 15 bp, Homo sapiens
ggcaccactgacatg

SEQ ID NO: 712016 - DNA, 15 bp, Homo sapiens
gcaccactgacatgg

SEQ ID NO: 712017 - DNA, 15 bp, Homo sapiens
caccactgacatggc

SEQ ID NO: 712018 - DNA, 15 bp, Homo sapiens
accactgacatggcg

SEQ ID NO: 712019 - DNA, 15 bp, Homo sapiens
ccactgacatggcgc

SEQ ID NO: 712020 - DNA, 15 bp, Homo sapiens
cactgacatggcgct

SEQ ID NO: 712021 - DNA, 15 bp, Homo sapiens
actgacatggcgctt

SEQ ID NO: 712022 - DNA, 15 bp, Homo sapiens
ctgacatggcgcttg

SEQ ID NO: 712023 - DNA, 15 bp, Homo sapiens
tgacatggcgcttgg

SEQ ID NO: 712024 - DNA, 15 bp, Homo sapiens
gacatggcgcttggc

SEQ ID NO: 712025 - DNA, 15 bp, Homo sapiens
acatggcgcttggcc

SEQ ID NO: 712026 - DNA, 15 bp, Homo sapiens
catggcgcttggcct

SEQ ID NO: 712027 - DNA, 15 bp, Homo sapiens
atggcgcttggcctc

SEQ ID NO: 712028 - DNA, 15 bp, Homo sapiens
tggcgcttggcctca

SEQ ID NO: 712029 - DNA, 15 bp, Homo sapiens
ggcgcttggcctcag

SEQ ID NO: 712030 - DNA, 15 bp, Homo sapiens
gcgcttggcctcagg

SEQ ID NO: 712031 - DNA, 15 bp, Homo sapiens
cgcttggcctcaggg

SEQ ID NO: 712032 - DNA, 15 bp, Homo sapiens
gcttggcctcagggt

SEQ ID NO: 712033 - DNA, 15 bp, Homo sapiens
cttggcctcagggtt

SEQ ID NO: 712034 - DNA, 15 bp, Homo sapiens
ttggcctcagggttc

SEQ ID NO: 712035 - DNA, 15 bp, Homo sapiens
tggcctcagggttcg

SEQ ID NO: 712036 - DNA, 15 bp, Homo sapiens
ggcctcagggttcgc

SEQ ID NO: 712037 - DNA, 15 bp, Homo sapiens
gcctcagggttcgct

SEQ ID NO: 712038 - DNA, 15 bp, Homo sapiens
cctcagggttcgctt

SEQ ID NO: 712039 - DNA, 15 bp, Homo sapiens
ctcagggttcgctta

SEQ ID NO: 712040 - DNA, 15 bp, Homo sapiens
tcagggttcgcttat

SEQ ID NO: 712041 - DNA, 15 bp, Homo sapiens
cagggttcgcttatt

SEQ ID NO: 712042 - DNA, 15 bp, Homo sapiens
agggttcgcttattg

SEQ ID NO: 712043 - DNA, 15 bp, Homo sapiens
gggttcgcttattga

SEQ ID NO: 712044 - DNA, 15 bp, Homo sapiens
ggttcgcttattgac

SEQ ID NO: 712045 - DNA, 15 bp, Homo sapiens
gttcgcttattgaca

SEQ ID NO: 712046 - DNA, 15 bp, Homo sapiens
ttcgcttattgacac

SEQ ID NO: 712047 - DNA, 15 bp, Homo sapiens
tcgcttattgacaca

SEQ ID NO: 712048 - DNA, 15 bp, Homo sapiens
cgcttattgacacag

SEQ ID NO: 712049 - DNA, 15 bp, Homo sapiens
gcttattgacacagt

SEQ ID NO: 712050 - DNA, 15 bp, Homo sapiens
cttattgacacagtg

SEQ ID NO: 712051 - DNA, 15 bp, Homo sapiens
ttattgacacagtga

SEQ ID NO: 712052 - DNA, 15 bp, Homo sapiens
tattgacacagtgac

SEQ ID NO: 712053 - DNA, 15 bp, Homo sapiens
attgacacagtgact

SEQ ID NO: 712054 - DNA, 15 bp, Homo sapiens
ttgacacagtgactt

SEQ ID NO: 712055 - DNA, 15 bp, Homo sapiens
tgacacagtgacttc

SEQ ID NO: 712056 - DNA, 15 bp, Homo sapiens
gacacagtgacttca

SEQ ID NO: 712057 - DNA, 15 bp, Homo sapiens
acacagtgacttcaa

SEQ ID NO: 712058 - DNA, 15 bp, Homo sapiens
cacagtgacttcaag

SEQ ID NO: 712059 - DNA, 15 bp, Homo sapiens
acagtgacttcaagg

SEQ ID NO: 712060 - DNA, 15 bp, Homo sapiens
cagtgacttcaaggc

SEQ ID NO: 712061 - DNA, 15 bp, Homo sapiens
agtgacttcaaggca

SEQ ID NO: 712062 - DNA, 15 bp, Homo sapiens
gtgacttcaaggcac

SEQ ID NO: 712063 - DNA, 15 bp, Homo sapiens
tgacttcaaggcaca

SEQ ID NO: 712064 - DNA, 15 bp, Homo sapiens
gacttcaaggcacat

SEQ ID NO: 712065 - DNA, 15 bp, Homo sapiens
acttcaaggcacatt

SEQ ID NO: 712066 - DNA, 15 bp, Homo sapiens
cttcaaggcacattc

SEQ ID NO: 712067 - DNA, 15 bp, Homo sapiens
ttcaaggcacattct

SEQ ID NO: 712068 - DNA, 15 bp, Homo sapiens
tcaaggcacattctt

SEQ ID NO: 712069 - DNA, 15 bp, Homo sapiens
caaggcacattcttg

SEQ ID NO: 712070 - DNA, 15 bp, Homo sapiens
aaggcacattcttgc

SEQ ID NO: 712071 - DNA, 15 bp, Homo sapiens
aggcacattcttgca

SEQ ID NO: 712072 - DNA, 15 bp, Homo sapiens
ggcacattcttgcat

SEQ ID NO: 712073 - DNA, 15 bp, Homo sapiens
gcacattcttgcatt

SEQ ID NO: 712074 - DNA, 15 bp, Homo sapiens
cacattcttgcattc

SEQ ID NO: 712075 - DNA, 15 bp, Homo sapiens
acattcttgcattcc

SEQ ID NO: 712076 - DNA, 15 bp, Homo sapiens
cattcttgcattcct

SEQ ID NO: 712077 - DNA, 15 bp, Homo sapiens
attcttgcattcctt

SEQ ID NO: 712078 - DNA, 15 bp, Homo sapiens
ttcttgcattcctta

SEQ ID NO: 712079 - DNA, 15 bp, Homo sapiens
tcttgcattccttaa

SEQ ID NO: 712080 - DNA, 15 bp, Homo sapiens
cttgcattccttaac

SEQ ID NO: 712081 - DNA, 15 bp, Homo sapiens
ttgcattccttaacc

SEQ ID NO: 712082 - DNA, 15 bp, Homo sapiens
tgcattccttaacca

SEQ ID NO: 712083 - DNA, 15 bp, Homo sapiens
gcattccttaaccaa

SEQ ID NO: 712084 - DNA, 15 bp, Homo sapiens
cattccttaaccaag

SEQ ID NO: 712085 - DNA, 15 bp, Homo sapiens
attccttaaccaagc

SEQ ID NO: 712086 - DNA, 15 bp, Homo sapiens
ttccttaaccaagct

SEQ ID NO: 712087 - DNA, 15 bp, Homo sapiens
tccttaaccaagctg

SEQ ID NO: 712088 - DNA, 15 bp, Homo sapiens
ccttaaccaagctgg

SEQ ID NO: 712089 - DNA, 15 bp, Homo sapiens
cttaaccaagctggt

SEQ ID NO: 712090 - DNA, 15 bp, Homo sapiens
ttaaccaagctggtg

SEQ ID NO: 712091 - DNA, 15 bp, Homo sapiens
taaccaagctggtgc

SEQ ID NO: 712092 - DNA, 15 bp, Homo sapiens
aaccaagctggtgct

SEQ ID NO: 712093 - DNA, 15 bp, Homo sapiens
accaagctggtgcta

SEQ ID NO: 712094 - DNA, 15 bp, Homo sapiens
ccaagctggtgctag

SEQ ID NO: 712095 - DNA, 15 bp, Homo sapiens
caagctggtgctagc

SEQ ID NO: 712096 - DNA, 15 bp, Homo sapiens
aagctggtgctagcc

SEQ ID NO: 712097 - DNA, 15 bp, Homo sapiens
agctggtgctagcct

SEQ ID NO: 712098 - DNA, 15 bp, Homo sapiens
gctggtgctagccta

SEQ ID NO: 712099 - DNA, 15 bp, Homo sapiens
ctggtgctagcctag

SEQ ID NO: 712100 - DNA, 15 bp, Homo sapiens
tggtgctagcctagg

SEQ ID NO: 712101 - DNA, 15 bp, Homo sapiens
ggtgctagcctaggt

SEQ ID NO: 712102 - DNA, 15 bp, Homo sapiens
gtgctagcctaggtt

SEQ ID NO: 712103 - DNA, 15 bp, Homo sapiens
tgctagcctaggttc

SEQ ID NO: 712104 - DNA, 15 bp, Homo sapiens
gctagcctaggttcc

SEQ ID NO: 712105 - DNA, 15 bp, Homo sapiens
ctagcctaggttcct

SEQ ID NO: 712106 - DNA, 15 bp, Homo sapiens
tagcctaggttcctg

SEQ ID NO: 712107 - DNA, 15 bp, Homo sapiens
agcctaggttcctgg

SEQ ID NO: 712108 - DNA, 15 bp, Homo sapiens
gcctaggttcctggg

SEQ ID NO: 712109 - DNA, 15 bp, Homo sapiens
cctaggttcctggga

SEQ ID NO: 712110 - DNA, 15 bp, Homo sapiens
ctaggttcctgggat

SEQ ID NO: 712111 - DNA, 15 bp, Homo sapiens
taggttcctgggatg

SEQ ID NO: 712112 - DNA, 15 bp, Homo sapiens
aggttcctgggatgt

SEQ ID NO: 712113 - DNA, 15 bp, Homo sapiens
ggttcctgggatgta

SEQ ID NO: 712114 - DNA, 15 bp, Homo sapiens
gttcctgggatgtaa

SEQ ID NO: 712115 - DNA, 15 bp, Homo sapiens
ttcctgggatgtaac

SEQ ID NO: 712116 - DNA, 15 bp, Homo sapiens
tcctgggatgtaact

SEQ ID NO: 712117 - DNA, 15 bp, Homo sapiens
cctgggatgtaactg

SEQ ID NO: 712118 - DNA, 15 bp, Homo sapiens
ctgggatgtaactgc

SEQ ID NO: 712119 - DNA, 15 bp, Homo sapiens
tgggatgtaactgca

SEQ ID NO: 712120 - DNA, 15 bp, Homo sapiens
gggatgtaactgcaa

SEQ ID NO: 712121 - DNA, 15 bp, Homo sapiens
ggatgtaactgcaaa

SEQ ID NO: 712122 - DNA, 15 bp, Homo sapiens
gatgtaactgcaaac

SEQ ID NO: 712123 - DNA, 15 bp, Homo sapiens
atgtaactgcaaaca

SEQ ID NO: 712124 - DNA, 15 bp, Homo sapiens
tgtaactgcaaacaa

SEQ ID NO: 712125 - DNA, 15 bp, Homo sapiens
gtaactgcaaacaag

SEQ ID NO: 712126 - DNA, 15 bp, Homo sapiens
taactgcaaacaagc

SEQ ID NO: 712127 - DNA, 15 bp, Homo sapiens
aactgcaaacaagca

SEQ ID NO: 712128 - DNA, 15 bp, Homo sapiens
actgcaaacaagcag

SEQ ID NO: 712129 - DNA, 15 bp, Homo sapiens
ctgcaaacaagcagg

SEQ ID NO: 712130 - DNA, 15 bp, Homo sapiens
tgcaaacaagcaggt

SEQ ID NO: 712131 - DNA, 15 bp, Homo sapiens
gcaaacaagcaggtg

SEQ ID NO: 712132 - DNA, 15 bp, Homo sapiens
caaacaagcaggtgt

SEQ ID NO: 712133 - DNA, 15 bp, Homo sapiens
aaacaagcaggtgtg

SEQ ID NO: 712134 - DNA, 15 bp, Homo sapiens
aacaagcaggtgtgg

SEQ ID NO: 712135 - DNA, 15 bp, Homo sapiens
acaagcaggtgtggg

SEQ ID NO: 712136 - DNA, 15 bp, Homo sapiens
caagcaggtgtgggc

SEQ ID NO: 712137 - DNA, 15 bp, Homo sapiens
aagcaggtgtgggct

SEQ ID NO: 712138 - DNA, 15 bp, Homo sapiens
agcaggtgtgggctt

SEQ ID NO: 712139 - DNA, 15 bp, Homo sapiens
gcaggtgtgggcttg

SEQ ID NO: 712140 - DNA, 15 bp, Homo sapiens
caggtgtgggcttgc

SEQ ID NO: 712141 - DNA, 15 bp, Homo sapiens
aggtgtgggcttgcc

SEQ ID NO: 712142 - DNA, 15 bp, Homo sapiens
ggtgtgggcttgccc

SEQ ID NO: 712143 - DNA, 15 bp, Homo sapiens
gtgtgggcttgccct

SEQ ID NO: 712144 - DNA, 15 bp, Homo sapiens
tgtgggcttgccctc

SEQ ID NO: 712145 - DNA, 15 bp, Homo sapiens
gtgggcttgccctca

SEQ ID NO: 712146 - DNA, 15 bp, Homo sapiens
tgggcttgccctcac

SEQ ID NO: 712147 - DNA, 15 bp, Homo sapiens
gggcttgccctcacc

SEQ ID NO: 712148 - DNA, 15 bp, Homo sapiens
ggcttgccctcaccg

SEQ ID NO: 712149 - DNA, 15 bp, Homo sapiens
gcttgccctcaccga

SEQ ID NO: 712150 - DNA, 15 bp, Homo sapiens
cttgccctcaccgag

SEQ ID NO: 712151 - DNA, 15 bp, Homo sapiens
ttgccctcaccgagg

SEQ ID NO: 712152 - DNA, 15 bp, Homo sapiens
tgccctcaccgagga

SEQ ID NO: 712153 - DNA, 15 bp, Homo sapiens
gccctcaccgaggac

SEQ ID NO: 712154 - DNA, 15 bp, Homo sapiens
ccctcaccgaggaca

SEQ ID NO: 712155 - DNA, 15 bp, Homo sapiens
cctcaccgaggacac

SEQ ID NO: 712156 - DNA, 15 bp, Homo sapiens
ctcaccgaggacaca

SEQ ID NO: 712157 - DNA, 15 bp, Homo sapiens
tcaccgaggacacag

SEQ ID NO: 712158 - DNA, 15 bp, Homo sapiens
caccgaggacacagc

SEQ ID NO: 712159 - DNA, 15 bp, Homo sapiens
accgaggacacagct

SEQ ID NO: 712160 - DNA, 15 bp, Homo sapiens
ccgaggacacagctg

SEQ ID NO: 712161 - DNA, 15 bp, Homo sapiens
cgaggacacagctgg

SEQ ID NO: 712162 - DNA, 15 bp, Homo sapiens
gaggacacagctggg

SEQ ID NO: 712163 - DNA, 15 bp, Homo sapiens
aggacacagctgggt

SEQ ID NO: 712164 - DNA, 15 bp, Homo sapiens
ggacacagctgggtt

SEQ ID NO: 712165 - DNA, 15 bp, Homo sapiens
gacacagctgggttc

SEQ ID NO: 712166 - DNA, 15 bp, Homo sapiens
acacagctgggttca

SEQ ID NO: 712167 - DNA, 15 bp, Homo sapiens
cacagctgggttcac

SEQ ID NO: 712168 - DNA, 15 bp, Homo sapiens
acagctgggttcaca

SEQ ID NO: 712169 - DNA, 15 bp, Homo sapiens
cagctgggttcacag

SEQ ID NO: 712170 - DNA, 15 bp, Homo sapiens
agctgggttcacagg

SEQ ID NO: 712171 - DNA, 15 bp, Homo sapiens
gctgggttcacaggg

SEQ ID NO: 712172 - DNA, 15 bp, Homo sapiens
ctgggttcacagggg

SEQ ID NO: 712173 - DNA, 15 bp, Homo sapiens
tgggttcacagggga

SEQ ID NO: 712174 - DNA, 15 bp, Homo sapiens
gggttcacaggggaa

SEQ ID NO: 712175 - DNA, 15 bp, Homo sapiens
ggttcacaggggaac

SEQ ID NO: 712176 - DNA, 15 bp, Homo sapiens
gttcacaggggaact

SEQ ID NO: 712177 - DNA, 15 bp, Homo sapiens
ttcacaggggaacta

SEQ ID NO: 712178 - DNA, 15 bp, Homo sapiens
tcacaggggaactaa

SEQ ID NO: 712179 - DNA, 15 bp, Homo sapiens
cacaggggaactaat

SEQ ID NO: 712180 - DNA, 15 bp, Homo sapiens
acaggggaactaata

SEQ ID NO: 712181 - DNA, 15 bp, Homo sapiens
caggggaactaatac

SEQ ID NO: 712182 - DNA, 15 bp, Homo sapiens
aggggaactaatacc

SEQ ID NO: 712183 - DNA, 15 bp, Homo sapiens
ggggaactaatacca

SEQ ID NO: 712184 - DNA, 15 bp, Homo sapiens
gggaactaataccag

SEQ ID NO: 712185 - DNA, 15 bp, Homo sapiens
ggaactaataccagc

SEQ ID NO: 712186 - DNA, 15 bp, Homo sapiens
gaactaataccagct

SEQ ID NO: 712187 - DNA, 15 bp, Homo sapiens
aactaataccagctc

SEQ ID NO: 712188 - DNA, 15 bp, Homo sapiens
actaataccagctca

SEQ ID NO: 712189 - DNA, 15 bp, Homo sapiens
ctaataccagctcac

SEQ ID NO: 712190 - DNA, 15 bp, Homo sapiens
taataccagctcact

SEQ ID NO: 712191 - DNA, 15 bp, Homo sapiens
aataccagctcacta

SEQ ID NO: 712192 - DNA, 15 bp, Homo sapiens
ataccagctcactac

SEQ ID NO: 712193 - DNA, 15 bp, Homo sapiens
taccagctcactaca

SEQ ID NO: 712194 - DNA, 15 bp, Homo sapiens
accagctcactacag

SEQ ID NO: 712195 - DNA, 15 bp, Homo sapiens
ccagctcactacaga

SEQ ID NO: 712196 - DNA, 15 bp, Homo sapiens
cagctcactacagaa

SEQ ID NO: 712197 - DNA, 15 bp, Homo sapiens
agctcactacagaat

SEQ ID NO: 712198 - DNA, 15 bp, Homo sapiens
gctcactacagaata

SEQ ID NO: 712199 - DNA, 15 bp, Homo sapiens
ctcactacagaatag

SEQ ID NO: 712200 - DNA, 15 bp, Homo sapiens
tcactacagaatagt

SEQ ID NO: 712201 - DNA, 15 bp, Homo sapiens
cactacagaatagtc

SEQ ID NO: 712202 - DNA, 15 bp, Homo sapiens
actacagaatagtct

SEQ ID NO: 712203 - DNA, 15 bp, Homo sapiens
ctacagaatagtctt

SEQ ID NO: 712204 - DNA, 15 bp, Homo sapiens
tacagaatagtcttt

SEQ ID NO: 712205 - DNA, 15 bp, Homo sapiens
acagaatagtctttt

SEQ ID NO: 712206 - DNA, 15 bp, Homo sapiens
cagaatagtcttttt

SEQ ID NO: 712207 - DNA, 15 bp, Homo sapiens
agaatagtctttttt

SEQ ID NO: 712208 - DNA, 15 bp, Homo sapiens
gaatagtcttttttt

SEQ ID NO: 712209 - DNA, 15 bp, Homo sapiens
aatagtctttttttt

SEQ ID NO: 712210 - DNA, 15 bp, Homo sapiens
atagtcttttttttt

SEQ ID NO: 712211 - DNA, 15 bp, Homo sapiens
tagtctttttttttt

SEQ ID NO: 712212 - DNA, 15 bp, Homo sapiens
agtcttttttttttt

SEQ ID NO: 712213 - DNA, 15 bp, Homo sapiens
gtctttttttttttt

SEQ ID NO: 712214 - DNA, 15 bp, Homo sapiens
ttttttttttttttc

SEQ ID NO: 712215 - DNA, 15 bp, Homo sapiens
tttttttttttttct

SEQ ID NO: 712216 - DNA, 15 bp, Homo sapiens
ttttttttttttctt

SEQ ID NO: 712217 - DNA, 15 bp, Homo sapiens
tttttttttttcttt

SEQ ID NO: 712218 - DNA, 15 bp, Homo sapiens
ttttttttttctttc

SEQ ID NO: 712219 - DNA, 15 bp, Homo sapiens
tttttttttctttct

SEQ ID NO: 712220 - DNA, 15 bp, Homo sapiens
ttttttttctttctg

SEQ ID NO: 712221 - DNA, 15 bp, Homo sapiens
tttttttctttctga

SEQ ID NO: 712222 - DNA, 15 bp, Homo sapiens
ttttttctttctgag

SEQ ID NO: 712223 - DNA, 15 bp, Homo sapiens
tttttctttctgaga

SEQ ID NO: 712224 - DNA, 15 bp, Homo sapiens
ttttctttctgagac

SEQ ID NO: 712225 - DNA, 15 bp, Homo sapiens
tttctttctgagacg

SEQ ID NO: 712226 - DNA, 15 bp, Homo sapiens
ttctttctgagacgg

SEQ ID NO: 712227 - DNA, 15 bp, Homo sapiens
tctttctgagacgga

SEQ ID NO: 712228 - DNA, 15 bp, Homo sapiens
ctttctgagacggag

SEQ ID NO: 712229 - DNA, 15 bp, Homo sapiens
tttctgagacggagt

SEQ ID NO: 712230 - DNA, 15 bp, Homo sapiens
ttctgagacggagtc

SEQ ID NO: 712231 - DNA, 15 bp, Homo sapiens
tctgagacggagtct

SEQ ID NO: 712232 - DNA, 15 bp, Homo sapiens
ctgagacggagtctc

SEQ ID NO: 712233 - DNA, 15 bp, Homo sapiens
tgagacggagtctcg

SEQ ID NO: 712234 - DNA, 15 bp, Homo sapiens
gagacggagtctcgc

SEQ ID NO: 712235 - DNA, 15 bp, Homo sapiens
agacggagtctcgct

SEQ ID NO: 712236 - DNA, 15 bp, Homo sapiens
gacggagtctcgctt

SEQ ID NO: 712237 - DNA, 15 bp, Homo sapiens
acggagtctcgcttt

SEQ ID NO: 712238 - DNA, 15 bp, Homo sapiens
cggagtctcgctttg

SEQ ID NO: 712239 - DNA, 15 bp, Homo sapiens
ggagtctcgctttgt

SEQ ID NO: 712240 - DNA, 15 bp, Homo sapiens
gagtctcgctttgtc

SEQ ID NO: 712241 - DNA, 15 bp, Homo sapiens
agtctcgctttgtcg

SEQ ID NO: 712242 - DNA, 15 bp, Homo sapiens
gtctcgctttgtcgc

SEQ ID NO: 712243 - DNA, 15 bp, Homo sapiens
tctcgctttgtcgcc

SEQ ID NO: 712244 - DNA, 15 bp, Homo sapiens
ctcgctttgtcgcca

SEQ ID NO: 712245 - DNA, 15 bp, Homo sapiens
tcgctttgtcgccaa

SEQ ID NO: 712246 - DNA, 15 bp, Homo sapiens
cgctttgtcgccaag

SEQ ID NO: 712247 - DNA, 15 bp, Homo sapiens
gctttgtcgccaagg

SEQ ID NO: 712248 - DNA, 15 bp, Homo sapiens
ctttgtcgccaaggc

SEQ ID NO: 712249 - DNA, 15 bp, Homo sapiens
tttgtcgccaaggct

SEQ ID NO: 712250 - DNA, 15 bp, Homo sapiens
ttgtcgccaaggctg

SEQ ID NO: 712251 - DNA, 15 bp, Homo sapiens
tgtcgccaaggctgg

SEQ ID NO: 712252 - DNA, 15 bp, Homo sapiens
gtcgccaaggctgga

SEQ ID NO: 712253 - DNA, 15 bp, Homo sapiens
tcgccaaggctggag

SEQ ID NO: 712254 - DNA, 15 bp, Homo sapiens
cgccaaggctggagt

SEQ ID NO: 712255 - DNA, 15 bp, Homo sapiens
gccaaggctggagtg

SEQ ID NO: 712256 - DNA, 15 bp, Homo sapiens
ccaaggctggagtgc

SEQ ID NO: 712257 - DNA, 15 bp, Homo sapiens
caaggctggagtgca

SEQ ID NO: 712258 - DNA, 15 bp, Homo sapiens
aaggctggagtgcag

SEQ ID NO: 712259 - DNA, 15 bp, Homo sapiens
gtcactgccccccag

SEQ ID NO: 712260 - DNA, 15 bp, Homo sapiens
tcactgccccccaga

SEQ ID NO: 712261 - DNA, 15 bp, Homo sapiens
cactgccccccagaa

SEQ ID NO: 712262 - DNA, 15 bp, Homo sapiens
actgccccccagaag

SEQ ID NO: 712263 - DNA, 15 bp, Homo sapiens
ctgccccccagaaga

SEQ ID NO: 712264 - DNA, 15 bp, Homo sapiens
tgccccccagaagaa

SEQ ID NO: 712265 - DNA, 15 bp, Homo sapiens
gccccccagaagaac

SEQ ID NO: 712266 - DNA, 15 bp, Homo sapiens
ccccccagaagaacc

SEQ ID NO: 712267 - DNA, 15 bp, Homo sapiens
cccccagaagaacct

SEQ ID NO: 712268 - DNA, 15 bp, Homo sapiens
ccccagaagaacctc

SEQ ID NO: 712269 - DNA, 15 bp, Homo sapiens
cccagaagaacctca

SEQ ID NO: 712270 - DNA, 15 bp, Homo sapiens
ccagaagaacctcaa

SEQ ID NO: 712271 - DNA, 15 bp, Homo sapiens
cagaagaacctcaag

SEQ ID NO: 712272 - DNA, 15 bp, Homo sapiens
agaagaacctcaaga

SEQ ID NO: 712273 - DNA, 15 bp, Homo sapiens
gaagaacctcaagag

SEQ ID NO: 712274 - DNA, 15 bp, Homo sapiens
aagaacctcaagagt

SEQ ID NO: 712275 - DNA, 15 bp, Homo sapiens
agaacctcaagagtg

SEQ ID NO: 712276 - DNA, 15 bp, Homo sapiens
gaacctcaagagtgc

SEQ ID NO: 712277 - DNA, 15 bp, Homo sapiens
aacctcaagagtgcc

SEQ ID NO: 712278 - DNA, 15 bp, Homo sapiens
acctcaagagtgcct

SEQ ID NO: 712279 - DNA, 15 bp, Homo sapiens
cctcaagagtgcctc

SEQ ID NO: 712280 - DNA, 15 bp, Homo sapiens
ctcaagagtgcctcc

SEQ ID NO: 712281 - DNA, 15 bp, Homo sapiens
tcaagagtgcctccc

SEQ ID NO: 712282 - DNA, 15 bp, Homo sapiens
caagagtgcctcccg

SEQ ID NO: 712283 - DNA, 15 bp, Homo sapiens
aagagtgcctcccgg

SEQ ID NO: 712284 - DNA, 15 bp, Homo sapiens
agagtgcctcccgga

SEQ ID NO: 712285 - DNA, 15 bp, Homo sapiens
gagtgcctcccggat

SEQ ID NO: 712286 - DNA, 15 bp, Homo sapiens
agtgcctcccggatc

SEQ ID NO: 712287 - DNA, 15 bp, Homo sapiens
gtgcctcccggatcg

SEQ ID NO: 712288 - DNA, 15 bp, Homo sapiens
tgcctcccggatcgt

SEQ ID NO: 712289 - DNA, 15 bp, Homo sapiens
gcctcccggatcgtc

SEQ ID NO: 712290 - DNA, 15 bp, Homo sapiens
cctcccggatcgtct

SEQ ID NO: 712291 - DNA, 15 bp, Homo sapiens
ctcccggatcgtctt

SEQ ID NO: 712292 - DNA, 15 bp, Homo sapiens
tcccggatcgtcttt

SEQ ID NO: 712293 - DNA, 15 bp, Homo sapiens
cccggatcgtctttg

SEQ ID NO: 712294 - DNA, 15 bp, Homo sapiens
ccggatcgtctttga

SEQ ID NO: 712295 - DNA, 15 bp, Homo sapiens
cggatcgtctttgag

SEQ ID NO: 712296 - DNA, 15 bp, Homo sapiens
ggatcgtctttgaga

SEQ ID NO: 712297 - DNA, 15 bp, Homo sapiens
gatcgtctttgagaa

SEQ ID NO: 712298 - DNA, 15 bp, Homo sapiens
atcgtctttgagaag

SEQ ID NO: 712299 - DNA, 15 bp, Homo sapiens
tcgtctttgagaaga

SEQ ID NO: 712300 - DNA, 15 bp, Homo sapiens
cgtctttgagaagag

SEQ ID NO: 712301 - DNA, 15 bp, Homo sapiens
gtctttgagaagagt

SEQ ID NO: 712302 - DNA, 15 bp, Homo sapiens
tctttgagaagagtg

SEQ ID NO: 712303 - DNA, 15 bp, Homo sapiens
ctttgagaagagtga

SEQ ID NO: 712304 - DNA, 15 bp, Homo sapiens
tttgagaagagtgag

SEQ ID NO: 712305 - DNA, 15 bp, Homo sapiens
ttgagaagagtgagt

SEQ ID NO: 712306 - DNA, 15 bp, Homo sapiens
tgagaagagtgagtc

SEQ ID NO: 712307 - DNA, 15 bp, Homo sapiens
gagaagagtgagtcg

SEQ ID NO: 712308 - DNA, 15 bp, Homo sapiens
agaagagtgagtcgc

SEQ ID NO: 712309 - DNA, 15 bp, Homo sapiens
gaagagtgagtcgcc

SEQ ID NO: 712310 - DNA, 15 bp, Homo sapiens
aagagtgagtcgcct

SEQ ID NO: 712311 - DNA, 15 bp, Homo sapiens
agagtgagtcgcctt

SEQ ID NO: 712312 - DNA, 15 bp, Homo sapiens
gagtgagtcgccttt

SEQ ID NO: 712313 - DNA, 15 bp, Homo sapiens
agtgagtcgcctttg

SEQ ID NO: 712314 - DNA, 15 bp, Homo sapiens
gtgagtcgcctttgc

SEQ ID NO: 712315 - DNA, 15 bp, Homo sapiens
tgagtcgcctttgca

SEQ ID NO: 712316 - DNA, 15 bp, Homo sapiens
gagtcgcctttgcag

SEQ ID NO: 712317 - DNA, 15 bp, Homo sapiens
agtcgcctttgcagc

SEQ ID NO: 712318 - DNA, 15 bp, Homo sapiens
gtcgcctttgcagcc

SEQ ID NO: 712319 - DNA, 15 bp, Homo sapiens
tcgcctttgcagccc

SEQ ID NO: 712320 - DNA, 15 bp, Homo sapiens
cgcctttgcagccca

SEQ ID NO: 712321 - DNA, 15 bp, Homo sapiens
gcctttgcagcccaa

SEQ ID NO: 712322 - DNA, 15 bp, Homo sapiens
cctttgcagcccaag

SEQ ID NO: 712323 - DNA, 15 bp, Homo sapiens
ctttgcagcccaagt

SEQ ID NO: 712324 - DNA, 15 bp, Homo sapiens
tttgcagcccaagtt

SEQ ID NO: 712325 - DNA, 15 bp, Homo sapiens
ttgcagcccaagttg

SEQ ID NO: 712326 - DNA, 15 bp, Homo sapiens
tgcagcccaagttgc

SEQ ID NO: 712327 - DNA, 15 bp, Homo sapiens
gcagcccaagttgcc

SEQ ID NO: 712328 - DNA, 15 bp, Homo sapiens
cagcccaagttgcct

SEQ ID NO: 712329 - DNA, 15 bp, Homo sapiens
agcccaagttgcctg

SEQ ID NO: 712330 - DNA, 15 bp, Homo sapiens
gcccaagttgcctga

SEQ ID NO: 712331 - DNA, 15 bp, Homo sapiens
cccaagttgcctgag

SEQ ID NO: 712332 - DNA, 15 bp, Homo sapiens
ccaagttgcctgagg

SEQ ID NO: 712333 - DNA, 15 bp, Homo sapiens
caagttgcctgaggc

SEQ ID NO: 712334 - DNA, 15 bp, Homo sapiens
aagttgcctgaggca

SEQ ID NO: 712335 - DNA, 15 bp, Homo sapiens
agttgcctgaggcat

SEQ ID NO: 712336 - DNA, 15 bp, Homo sapiens
gttgcctgaggcatg

SEQ ID NO: 712337 - DNA, 15 bp, Homo sapiens
ttgcctgaggcatgt

SEQ ID NO: 712338 - DNA, 15 bp, Homo sapiens
tgcctgaggcatgtg

SEQ ID NO: 712339 - DNA, 15 bp, Homo sapiens
gcctgaggcatgtgg

SEQ ID NO: 712340 - DNA, 15 bp, Homo sapiens
cctgaggcatgtggg

SEQ ID NO: 712341 - DNA, 15 bp, Homo sapiens
ctgaggcatgtgggc

SEQ ID NO: 712342 - DNA, 15 bp, Homo sapiens
tgaggcatgtgggct

SEQ ID NO: 712343 - DNA, 15 bp, Homo sapiens
gaggcatgtgggctc

SEQ ID NO: 712344 - DNA, 15 bp, Homo sapiens
aggcatgtgggctcc

SEQ ID NO: 712345 - DNA, 15 bp, Homo sapiens
ggcatgtgggctcca

SEQ ID NO: 712346 - DNA, 15 bp, Homo sapiens
gcatgtgggctccat

SEQ ID NO: 712347 - DNA, 15 bp, Homo sapiens
catgtgggctccatg

SEQ ID NO: 712348 - DNA, 15 bp, Homo sapiens
atgtgggctccatgc

SEQ ID NO: 712349 - DNA, 15 bp, Homo sapiens
tgtgggctccatgct

SEQ ID NO: 712350 - DNA, 15 bp, Homo sapiens
gtgggctccatgctg

SEQ ID NO: 712351 - DNA, 15 bp, Homo sapiens
tgggctccatgctgc

SEQ ID NO: 712352 - DNA, 15 bp, Homo sapiens
gggctccatgctgca

SEQ ID NO: 712353 - DNA, 15 bp, Homo sapiens
ggctccatgctgcag

SEQ ID NO: 712354 - DNA, 15 bp, Homo sapiens
gctccatgctgcagg

SEQ ID NO: 712355 - DNA, 15 bp, Homo sapiens
ctccatgctgcaggc

SEQ ID NO: 712356 - DNA, 15 bp, Homo sapiens
tccatgctgcaggct

SEQ ID NO: 712357 - DNA, 15 bp, Homo sapiens
ccatgctgcaggctg

SEQ ID NO: 712358 - DNA, 15 bp, Homo sapiens
catgctgcaggctgg

SEQ ID NO: 712359 - DNA, 15 bp, Homo sapiens
atgctgcaggctggg

SEQ ID NO: 712360 - DNA, 15 bp, Homo sapiens
tgctgcaggctgggg

SEQ ID NO: 712361 - DNA, 15 bp, Homo sapiens
gctgcaggctggggg

SEQ ID NO: 712362 - DNA, 15 bp, Homo sapiens
ctgcaggctgggggg

SEQ ID NO: 712363 - DNA, 15 bp, Homo sapiens
tgcaggctggggggg

SEQ ID NO: 712364 - DNA, 15 bp, Homo sapiens
gcaggctgggggggt

SEQ ID NO: 712365 - DNA, 15 bp, Homo sapiens
caggctgggggggtc

SEQ ID NO: 712366 - DNA, 15 bp, Homo sapiens
aggctgggggggtct

SEQ ID NO: 712367 - DNA, 15 bp, Homo sapiens
ggctgggggggtctt

SEQ ID NO: 712368 - DNA, 15 bp, Homo sapiens
gctgggggggtcttt

SEQ ID NO: 712369 - DNA, 15 bp, Homo sapiens
ctgggggggtctttt

SEQ ID NO: 712370 - DNA, 15 bp, Homo sapiens
tgggggggtcttttt

SEQ ID NO: 712371 - DNA, 15 bp, Homo sapiens
gggggggtctttttt

SEQ ID NO: 712372 - DNA, 15 bp, Homo sapiens
ggggggtcttttttt

SEQ ID NO: 712373 - DNA, 15 bp, Homo sapiens
gggggtctttttttt

SEQ ID NO: 712374 - DNA, 15 bp, Homo sapiens
ggggtcttttttttt

SEQ ID NO: 712375 - DNA, 15 bp, Homo sapiens
gggtctttttttttt

SEQ ID NO: 712376 - DNA, 15 bp, Homo sapiens
ggtcttttttttttt

SEQ ID NO: 712377 - DNA, 15 bp, Homo sapiens
tttttttttgagacg

SEQ ID NO: 712378 - DNA, 15 bp, Homo sapiens
ttttttttgagacgg

SEQ ID NO: 712379 - DNA, 15 bp, Homo sapiens
ttttttgagacggag

SEQ ID NO: 712380 - DNA, 15 bp, Homo sapiens
ttgagacggagtctc

SEQ ID NO: 712381 - DNA, 15 bp, Homo sapiens
gacggagtctcgctc

SEQ ID NO: 712382 - DNA, 15 bp, Homo sapiens
acggagtctcgctct

SEQ ID NO: 712383 - DNA, 15 bp, Homo sapiens
cggagtctcgctctg

SEQ ID NO: 712384 - DNA, 15 bp, Homo sapiens
ggagtctcgctctgt

SEQ ID NO: 712385 - DNA, 15 bp, Homo sapiens
gagtctcgctctgtt

SEQ ID NO: 712386 - DNA, 15 bp, Homo sapiens
agtctcgctctgttg

SEQ ID NO: 712387 - DNA, 15 bp, Homo sapiens
gtctcgctctgttgc

SEQ ID NO: 712388 - DNA, 15 bp, Homo sapiens
tctcgctctgttgcc

SEQ ID NO: 712389 - DNA, 15 bp, Homo sapiens
ctcgctctgttgccc

SEQ ID NO: 712390 - DNA, 15 bp, Homo sapiens
tcgctctgttgccca

SEQ ID NO: 712391 - DNA, 15 bp, Homo sapiens
cgctctgttgcccag

SEQ ID NO: 712392 - DNA, 15 bp, Homo sapiens
ggagtgcagtggcgt

SEQ ID NO: 712393 - DNA, 15 bp, Homo sapiens
gagtgcagtggcgtg

SEQ ID NO: 712394 - DNA, 15 bp, Homo sapiens
agtgcagtggcgtga

SEQ ID NO: 712395 - DNA, 15 bp, Homo sapiens
gtgcagtggcgtgat

SEQ ID NO: 712396 - DNA, 15 bp, Homo sapiens
tgcagtggcgtgatc

SEQ ID NO: 712397 - DNA, 15 bp, Homo sapiens
gcagtggcgtgatct

SEQ ID NO: 712398 - DNA, 15 bp, Homo sapiens
cagtggcgtgatctc

SEQ ID NO: 712399 - DNA, 15 bp, Homo sapiens
agtggcgtgatctcg

SEQ ID NO: 712400 - DNA, 15 bp, Homo sapiens
gtggcgtgatctcgg

SEQ ID NO: 712401 - DNA, 15 bp, Homo sapiens
tggcgtgatctcggc

SEQ ID NO: 712402 - DNA, 15 bp, Homo sapiens
ggcgtgatctcggct

SEQ ID NO: 712403 - DNA, 15 bp, Homo sapiens
gcgtgatctcggctc

SEQ ID NO: 712404 - DNA, 15 bp, Homo sapiens
cgtgatctcggctca

SEQ ID NO: 712405 - DNA, 15 bp, Homo sapiens
gtgatctcggctcac

SEQ ID NO: 712406 - DNA, 15 bp, Homo sapiens
tgatctcggctcact

SEQ ID NO: 712407 - DNA, 15 bp, Homo sapiens
aacctccacctcccg

SEQ ID NO: 712408 - DNA, 15 bp, Homo sapiens
acctccacctcccgg

SEQ ID NO: 712409 - DNA, 15 bp, Homo sapiens
cctccacctcccggg

SEQ ID NO: 712410 - DNA, 15 bp, Homo sapiens
ctccacctcccgggt

SEQ ID NO: 712411 - DNA, 15 bp, Homo sapiens
tccacctcccgggtt

SEQ ID NO: 712412 - DNA, 15 bp, Homo sapiens
ccacctcccgggttc

SEQ ID NO: 712413 - DNA, 15 bp, Homo sapiens
cacctcccgggttca

SEQ ID NO: 712414 - DNA, 15 bp, Homo sapiens
acctcccgggttcac

SEQ ID NO: 712415 - DNA, 15 bp, Homo sapiens
cctcccgggttcaca

SEQ ID NO: 712416 - DNA, 15 bp, Homo sapiens
ctcccgggttcacac

SEQ ID NO: 712417 - DNA, 15 bp, Homo sapiens
tcccgggttcacacc

SEQ ID NO: 712418 - DNA, 15 bp, Homo sapiens
cccgggttcacacca

SEQ ID NO: 712419 - DNA, 15 bp, Homo sapiens
ccgggttcacaccat

SEQ ID NO: 712420 - DNA, 15 bp, Homo sapiens
cgggttcacaccatc

SEQ ID NO: 712421 - DNA, 15 bp, Homo sapiens
gggttcacaccatcc

SEQ ID NO: 712422 - DNA, 15 bp, Homo sapiens
ggttcacaccatcct

SEQ ID NO: 712423 - DNA, 15 bp, Homo sapiens
gttcacaccatcctc

SEQ ID NO: 712424 - DNA, 15 bp, Homo sapiens
ttcacaccatcctcc

SEQ ID NO: 712425 - DNA, 15 bp, Homo sapiens
tcacaccatcctcct

SEQ ID NO: 712426 - DNA, 15 bp, Homo sapiens
cacaccatcctcctg

SEQ ID NO: 712427 - DNA, 15 bp, Homo sapiens
acaccatcctcctgc

SEQ ID NO: 712428 - DNA, 15 bp, Homo sapiens
caccatcctcctgcc

SEQ ID NO: 712429 - DNA, 15 bp, Homo sapiens
accatcctcctgcct

SEQ ID NO: 712430 - DNA, 15 bp, Homo sapiens
ccatcctcctgcctc

SEQ ID NO: 712431 - DNA, 15 bp, Homo sapiens
catcctcctgcctca

SEQ ID NO: 712432 - DNA, 15 bp, Homo sapiens
atcctcctgcctcag

SEQ ID NO: 712433 - DNA, 15 bp, Homo sapiens
tcctcctgcctcagc

SEQ ID NO: 712434 - DNA, 15 bp, Homo sapiens
cctcctgcctcagcc

SEQ ID NO: 712435 - DNA, 15 bp, Homo sapiens
ccgagtagctgggac

SEQ ID NO: 712436 - DNA, 15 bp, Homo sapiens
cgagtagctgggact

SEQ ID NO: 712437 - DNA, 15 bp, Homo sapiens
gagtagctgggactg

SEQ ID NO: 712438 - DNA, 15 bp, Homo sapiens
agtagctgggactgc

SEQ ID NO: 712439 - DNA, 15 bp, Homo sapiens
gtagctgggactgca

SEQ ID NO: 712440 - DNA, 15 bp, Homo sapiens
tagctgggactgcag

SEQ ID NO: 712441 - DNA, 15 bp, Homo sapiens
agctgggactgcagg

SEQ ID NO: 712442 - DNA, 15 bp, Homo sapiens
gctgggactgcaggt

SEQ ID NO: 712443 - DNA, 15 bp, Homo sapiens
ctgggactgcaggtg

SEQ ID NO: 712444 - DNA, 15 bp, Homo sapiens
tgggactgcaggtgc

SEQ ID NO: 712445 - DNA, 15 bp, Homo sapiens
gggactgcaggtgcc

SEQ ID NO: 712446 - DNA, 15 bp, Homo sapiens
ggactgcaggtgccc

SEQ ID NO: 712447 - DNA, 15 bp, Homo sapiens
gactgcaggtgccca

SEQ ID NO: 712448 - DNA, 15 bp, Homo sapiens
actgcaggtgcccag

SEQ ID NO: 712449 - DNA, 15 bp, Homo sapiens
ctgcaggtgcccagc

SEQ ID NO: 712450 - DNA, 15 bp, Homo sapiens
tgcaggtgcccagct

SEQ ID NO: 712451 - DNA, 15 bp, Homo sapiens
gcaggtgcccagcta

SEQ ID NO: 712452 - DNA, 15 bp, Homo sapiens
caggtgcccagctaa

SEQ ID NO: 712453 - DNA, 15 bp, Homo sapiens
aggtgcccagctaat

SEQ ID NO: 712454 - DNA, 15 bp, Homo sapiens
ggtgcccagctaatc

SEQ ID NO: 712455 - DNA, 15 bp, Homo sapiens
gtgcccagctaatct

SEQ ID NO: 712456 - DNA, 15 bp, Homo sapiens
tgcccagctaatctt

SEQ ID NO: 712457 - DNA, 15 bp, Homo sapiens
gcccagctaatcttt

SEQ ID NO: 712458 - DNA, 15 bp, Homo sapiens
cccagctaatctttt

SEQ ID NO: 712459 - DNA, 15 bp, Homo sapiens
ccagctaatcttttt

SEQ ID NO: 712460 - DNA, 15 bp, Homo sapiens
cagctaatctttttt

SEQ ID NO: 712461 - DNA, 15 bp, Homo sapiens
agctaatcttttttg

SEQ ID NO: 712462 - DNA, 15 bp, Homo sapiens
gctaatcttttttgt

SEQ ID NO: 712463 - DNA, 15 bp, Homo sapiens
ctaatcttttttgta

SEQ ID NO: 712464 - DNA, 15 bp, Homo sapiens
taatcttttttgtat

SEQ ID NO: 712465 - DNA, 15 bp, Homo sapiens
aatcttttttgtatt

SEQ ID NO: 712466 - DNA, 15 bp, Homo sapiens
atcttttttgtattt

SEQ ID NO: 712467 - DNA, 15 bp, Homo sapiens
tcttttttgtatttt

SEQ ID NO: 712468 - DNA, 15 bp, Homo sapiens
cttttttgtattttt

SEQ ID NO: 712469 - DNA, 15 bp, Homo sapiens
ttttgtatttttagc

SEQ ID NO: 712470 - DNA, 15 bp, Homo sapiens
tttgtatttttagca

SEQ ID NO: 712471 - DNA, 15 bp, Homo sapiens
ttgtatttttagcag

SEQ ID NO: 712472 - DNA, 15 bp, Homo sapiens
tgtatttttagcaga

SEQ ID NO: 712473 - DNA, 15 bp, Homo sapiens
gtatttttagcagag

SEQ ID NO: 712474 - DNA, 15 bp, Homo sapiens
tatttttagcagaga

SEQ ID NO: 712475 - DNA, 15 bp, Homo sapiens
atttttagcagagac

SEQ ID NO: 712476 - DNA, 15 bp, Homo sapiens
tttttagcagagacg

SEQ ID NO: 712477 - DNA, 15 bp, Homo sapiens
ttttagcagagacgg

SEQ ID NO: 712478 - DNA, 15 bp, Homo sapiens
tttagcagagacggg

SEQ ID NO: 712479 - DNA, 15 bp, Homo sapiens
ttagcagagacgggg

SEQ ID NO: 712480 - DNA, 15 bp, Homo sapiens
tagcagagacggggt

SEQ ID NO: 712481 - DNA, 15 bp, Homo sapiens
agcagagacggggtt

SEQ ID NO: 712482 - DNA, 15 bp, Homo sapiens
gcagagacggggttt

SEQ ID NO: 712483 - DNA, 15 bp, Homo sapiens
cagagacggggtttc

SEQ ID NO: 712484 - DNA, 15 bp, Homo sapiens
ggtttcaccgtgttt

SEQ ID NO: 712485 - DNA, 15 bp, Homo sapiens
gtttcaccgtgtttg

SEQ ID NO: 712486 - DNA, 15 bp, Homo sapiens
tttcaccgtgtttgc

SEQ ID NO: 712487 - DNA, 15 bp, Homo sapiens
ttcaccgtgtttgcc

SEQ ID NO: 712488 - DNA, 15 bp, Homo sapiens
tcaccgtgtttgcca

SEQ ID NO: 712489 - DNA, 15 bp, Homo sapiens
caccgtgtttgccag

SEQ ID NO: 712490 - DNA, 15 bp, Homo sapiens
accgtgtttgccagg

SEQ ID NO: 712491 - DNA, 15 bp, Homo sapiens
ccgtgtttgccagga

SEQ ID NO: 712492 - DNA, 15 bp, Homo sapiens
cgtgtttgccaggat

SEQ ID NO: 712493 - DNA, 15 bp, Homo sapiens
gtgtttgccaggata

SEQ ID NO: 712494 - DNA, 15 bp, Homo sapiens
tgtttgccaggatag

SEQ ID NO: 712495 - DNA, 15 bp, Homo sapiens
gtttgccaggatagt

SEQ ID NO: 712496 - DNA, 15 bp, Homo sapiens
tttgccaggatagtc

SEQ ID NO: 712497 - DNA, 15 bp, Homo sapiens
ttgccaggatagtct

SEQ ID NO: 712498 - DNA, 15 bp, Homo sapiens
tgccaggatagtctc

SEQ ID NO: 712499 - DNA, 15 bp, Homo sapiens
gccaggatagtctcg

SEQ ID NO: 712500 - DNA, 15 bp, Homo sapiens
ccaggatagtctcga

SEQ ID NO: 712501 - DNA, 15 bp, Homo sapiens
caggatagtctcgat

SEQ ID NO: 712502 - DNA, 15 bp, Homo sapiens
aggatagtctcgatc

SEQ ID NO: 712503 - DNA, 15 bp, Homo sapiens
ggatagtctcgatct

SEQ ID NO: 712504 - DNA, 15 bp, Homo sapiens
gatagtctcgatctc

SEQ ID NO: 712505 - DNA, 15 bp, Homo sapiens
atagtctcgatctcc

SEQ ID NO: 712506 - DNA, 15 bp, Homo sapiens
tagtctcgatctcct

SEQ ID NO: 712507 - DNA, 15 bp, Homo sapiens
agtctcgatctcctg

SEQ ID NO: 712508 - DNA, 15 bp, Homo sapiens
cgatctcctgacctg

SEQ ID NO: 712509 - DNA, 15 bp, Homo sapiens
gatctcctgacctgg

SEQ ID NO: 712510 - DNA, 15 bp, Homo sapiens
atctcctgacctggt

SEQ ID NO: 712511 - DNA, 15 bp, Homo sapiens
tctcctgacctggtg

SEQ ID NO: 712512 - DNA, 15 bp, Homo sapiens
ctcctgacctggtgt

SEQ ID NO: 712513 - DNA, 15 bp, Homo sapiens
tcctgacctggtgtt

SEQ ID NO: 712514 - DNA, 15 bp, Homo sapiens
cctgacctggtgttc

SEQ ID NO: 712515 - DNA, 15 bp, Homo sapiens
ctgacctggtgttct

SEQ ID NO: 712516 - DNA, 15 bp, Homo sapiens
tgacctggtgttctg

SEQ ID NO: 712517 - DNA, 15 bp, Homo sapiens
gacctggtgttctgc

SEQ ID NO: 712518 - DNA, 15 bp, Homo sapiens
acctggtgttctgcc

SEQ ID NO: 712519 - DNA, 15 bp, Homo sapiens
cctggtgttctgccc

SEQ ID NO: 712520 - DNA, 15 bp, Homo sapiens
ctggtgttctgcccg

SEQ ID NO: 712521 - DNA, 15 bp, Homo sapiens
tggtgttctgcccgc

SEQ ID NO: 712522 - DNA, 15 bp, Homo sapiens
ggtgttctgcccgcc

SEQ ID NO: 712523 - DNA, 15 bp, Homo sapiens
gtgttctgcccgcct

SEQ ID NO: 712524 - DNA, 15 bp, Homo sapiens
tgttctgcccgcctc

SEQ ID NO: 712525 - DNA, 15 bp, Homo sapiens
gttctgcccgcctcg

SEQ ID NO: 712526 - DNA, 15 bp, Homo sapiens
ttctgcccgcctcga

SEQ ID NO: 712527 - DNA, 15 bp, Homo sapiens
tctgcccgcctcgac

SEQ ID NO: 712528 - DNA, 15 bp, Homo sapiens
ctgcccgcctcgacc

SEQ ID NO: 712529 - DNA, 15 bp, Homo sapiens
tgcccgcctcgacct

SEQ ID NO: 712530 - DNA, 15 bp, Homo sapiens
gcccgcctcgacctc

SEQ ID NO: 712531 - DNA, 15 bp, Homo sapiens
cccgcctcgacctcc

SEQ ID NO: 712532 - DNA, 15 bp, Homo sapiens
ccgcctcgacctccc

SEQ ID NO: 712533 - DNA, 15 bp, Homo sapiens
cgcctcgacctccca

SEQ ID NO: 712534 - DNA, 15 bp, Homo sapiens
gcctcgacctcccaa

SEQ ID NO: 712535 - DNA, 15 bp, Homo sapiens
cctcgacctcccaaa

SEQ ID NO: 712536 - DNA, 15 bp, Homo sapiens
ctcgacctcccaaag

SEQ ID NO: 712537 - DNA, 15 bp, Homo sapiens
tcgacctcccaaagt

SEQ ID NO: 712538 - DNA, 15 bp, Homo sapiens
cgacctcccaaagtg

SEQ ID NO: 712539 - DNA, 15 bp, Homo sapiens
gacctcccaaagtgc

SEQ ID NO: 712540 - DNA, 15 bp, Homo sapiens
acctcccaaagtgct

SEQ ID NO: 712541 - DNA, 15 bp, Homo sapiens
gtgtgagccaccgcg

SEQ ID NO: 712542 - DNA, 15 bp, Homo sapiens
ccctcgcttggacct

SEQ ID NO: 712543 - DNA, 15 bp, Homo sapiens
cctcgcttggacctg

SEQ ID NO: 712544 - DNA, 15 bp, Homo sapiens
ctcgcttggacctgc

SEQ ID NO: 712545 - DNA, 15 bp, Homo sapiens
tcgcttggacctgca

SEQ ID NO: 712546 - DNA, 15 bp, Homo sapiens
cgcttggacctgcaa

SEQ ID NO: 712547 - DNA, 15 bp, Homo sapiens
gcttggacctgcaag

SEQ ID NO: 712548 - DNA, 15 bp, Homo sapiens
cttggacctgcaaga

SEQ ID NO: 712549 - DNA, 15 bp, Homo sapiens
ttggacctgcaagag

SEQ ID NO: 712550 - DNA, 15 bp, Homo sapiens
tggacctgcaagaga

SEQ ID NO: 712551 - DNA, 15 bp, Homo sapiens
ggacctgcaagagat

SEQ ID NO: 712552 - DNA, 15 bp, Homo sapiens
gacctgcaagagatc

SEQ ID NO: 712553 - DNA, 15 bp, Homo sapiens
acctgcaagagatca

SEQ ID NO: 712554 - DNA, 15 bp, Homo sapiens
cctgcaagagatcaa

SEQ ID NO: 712555 - DNA, 15 bp, Homo sapiens
ctgcaagagatcaac

SEQ ID NO: 712556 - DNA, 15 bp, Homo sapiens
tgcaagagatcaaca

SEQ ID NO: 712557 - DNA, 15 bp, Homo sapiens
gcaagagatcaacaa

SEQ ID NO: 712558 - DNA, 15 bp, Homo sapiens
caagagatcaacaac

SEQ ID NO: 712559 - DNA, 15 bp, Homo sapiens
aagagatcaacaact

SEQ ID NO: 712560 - DNA, 15 bp, Homo sapiens
agagatcaacaactg

SEQ ID NO: 712561 - DNA, 15 bp, Homo sapiens
gagatcaacaactgg

SEQ ID NO: 712562 - DNA, 15 bp, Homo sapiens
agatcaacaactggg

SEQ ID NO: 712563 - DNA, 15 bp, Homo sapiens
gatcaacaactgggt

SEQ ID NO: 712564 - DNA, 15 bp, Homo sapiens
atcaacaactgggtg

SEQ ID NO: 712565 - DNA, 15 bp, Homo sapiens
tcaacaactgggtgc

SEQ ID NO: 712566 - DNA, 15 bp, Homo sapiens
caacaactgggtgca

SEQ ID NO: 712567 - DNA, 15 bp, Homo sapiens
aacaactgggtgcag

SEQ ID NO: 712568 - DNA, 15 bp, Homo sapiens
acaactgggtgcagg

SEQ ID NO: 712569 - DNA, 15 bp, Homo sapiens
caactgggtgcaggc

SEQ ID NO: 712570 - DNA, 15 bp, Homo sapiens
aactgggtgcaggcg

SEQ ID NO: 712571 - DNA, 15 bp, Homo sapiens
actgggtgcaggcgc

SEQ ID NO: 712572 - DNA, 15 bp, Homo sapiens
ctgggtgcaggcgca

SEQ ID NO: 712573 - DNA, 15 bp, Homo sapiens
tgggtgcaggcgcag

SEQ ID NO: 712574 - DNA, 15 bp, Homo sapiens
gggtgcaggcgcaga

SEQ ID NO: 712575 - DNA, 15 bp, Homo sapiens
ggtgcaggcgcagat

SEQ ID NO: 712576 - DNA, 15 bp, Homo sapiens
gtgcaggcgcagatg

SEQ ID NO: 712577 - DNA, 15 bp, Homo sapiens
tgcaggcgcagatga

SEQ ID NO: 712578 - DNA, 15 bp, Homo sapiens
gcaggcgcagatgaa

SEQ ID NO: 712579 - DNA, 15 bp, Homo sapiens
caggcgcagatgaaa

SEQ ID NO: 712580 - DNA, 15 bp, Homo sapiens
aggcgcagatgaaag

SEQ ID NO: 712581 - DNA, 15 bp, Homo sapiens
ggcgcagatgaaagg

SEQ ID NO: 712582 - DNA, 15 bp, Homo sapiens
gcgcagatgaaaggg

SEQ ID NO: 712583 - DNA, 15 bp, Homo sapiens
cgcagatgaaaggga

SEQ ID NO: 712584 - DNA, 15 bp, Homo sapiens
gcagatgaaagggaa

SEQ ID NO: 712585 - DNA, 15 bp, Homo sapiens
cagatgaaagggaag

SEQ ID NO: 712586 - DNA, 15 bp, Homo sapiens
agatgaaagggaagc

SEQ ID NO: 712587 - DNA, 15 bp, Homo sapiens
gatgaaagggaagct

SEQ ID NO: 712588 - DNA, 15 bp, Homo sapiens
atgaaagggaagctc

SEQ ID NO: 712589 - DNA, 15 bp, Homo sapiens
tgaaagggaagctcg

SEQ ID NO: 712590 - DNA, 15 bp, Homo sapiens
gaaagggaagctcgc

SEQ ID NO: 712591 - DNA, 15 bp, Homo sapiens
aaagggaagctcgcc

SEQ ID NO: 712592 - DNA, 15 bp, Homo sapiens
aagggaagctcgcca

SEQ ID NO: 712593 - DNA, 15 bp, Homo sapiens
agggaagctcgccag

SEQ ID NO: 712594 - DNA, 15 bp, Homo sapiens
gggaagctcgccagg

SEQ ID NO: 712595 - DNA, 15 bp, Homo sapiens
ggaagctcgccaggt

SEQ ID NO: 712596 - DNA, 15 bp, Homo sapiens
gaagctcgccaggtc

SEQ ID NO: 712597 - DNA, 15 bp, Homo sapiens
aagctcgccaggtcc

SEQ ID NO: 712598 - DNA, 15 bp, Homo sapiens
agctcgccaggtcca

SEQ ID NO: 712599 - DNA, 15 bp, Homo sapiens
gctcgccaggtccac

SEQ ID NO: 712600 - DNA, 15 bp, Homo sapiens
ctcgccaggtccaca

SEQ ID NO: 712601 - DNA, 15 bp, Homo sapiens
tcgccaggtccacaa

SEQ ID NO: 712602 - DNA, 15 bp, Homo sapiens
cgccaggtccacaaa

SEQ ID NO: 712603 - DNA, 15 bp, Homo sapiens
gccaggtccacaaag

SEQ ID NO: 712604 - DNA, 15 bp, Homo sapiens
ccaggtccacaaagg

SEQ ID NO: 712605 - DNA, 15 bp, Homo sapiens
caggtccacaaagga

SEQ ID NO: 712606 - DNA, 15 bp, Homo sapiens
ggatgaagagaggac

SEQ ID NO: 712607 - DNA, 15 bp, Homo sapiens
gatgaagagaggacc

SEQ ID NO: 712608 - DNA, 15 bp, Homo sapiens
atgaagagaggaccg

SEQ ID NO: 712609 - DNA, 15 bp, Homo sapiens
tgaagagaggaccgt

SEQ ID NO: 712610 - DNA, 15 bp, Homo sapiens
gaagagaggaccgtg

SEQ ID NO: 712611 - DNA, 15 bp, Homo sapiens
aagagaggaccgtga

SEQ ID NO: 712612 - DNA, 15 bp, Homo sapiens
agagaggaccgtgag

SEQ ID NO: 712613 - DNA, 15 bp, Homo sapiens
gagaggaccgtgagg

SEQ ID NO: 712614 - DNA, 15 bp, Homo sapiens
agaggaccgtgaggg

SEQ ID NO: 712615 - DNA, 15 bp, Homo sapiens
gaggaccgtgagggt

SEQ ID NO: 712616 - DNA, 15 bp, Homo sapiens
aggaccgtgagggtc

SEQ ID NO: 712617 - DNA, 15 bp, Homo sapiens
ggaccgtgagggtcc

SEQ ID NO: 712618 - DNA, 15 bp, Homo sapiens
gaccgtgagggtccc

SEQ ID NO: 712619 - DNA, 15 bp, Homo sapiens
accgtgagggtcccc

SEQ ID NO: 712620 - DNA, 15 bp, Homo sapiens
ccgtgagggtcccca

SEQ ID NO: 712621 - DNA, 15 bp, Homo sapiens
cgtgagggtccccat

SEQ ID NO: 712622 - DNA, 15 bp, Homo sapiens
gtgagggtccccatg

SEQ ID NO: 712623 - DNA, 15 bp, Homo sapiens
tgagggtccccatga

SEQ ID NO: 712624 - DNA, 15 bp, Homo sapiens
gagggtccccatgat

SEQ ID NO: 712625 - DNA, 15 bp, Homo sapiens
agggtccccatgatg

SEQ ID NO: 712626 - DNA, 15 bp, Homo sapiens
gggtccccatgatgt

SEQ ID NO: 712627 - DNA, 15 bp, Homo sapiens
ggtccccatgatgtc

SEQ ID NO: 712628 - DNA, 15 bp, Homo sapiens
gtccccatgatgtcg

SEQ ID NO: 712629 - DNA, 15 bp, Homo sapiens
tccccatgatgtcgg

SEQ ID NO: 712630 - DNA, 15 bp, Homo sapiens
ccccatgatgtcgga

SEQ ID NO: 712631 - DNA, 15 bp, Homo sapiens
cccatgatgtcggac

SEQ ID NO: 712632 - DNA, 15 bp, Homo sapiens
ccatgatgtcggacc

SEQ ID NO: 712633 - DNA, 15 bp, Homo sapiens
catgatgtcggaccc

SEQ ID NO: 712634 - DNA, 15 bp, Homo sapiens
atgatgtcggaccct

SEQ ID NO: 712635 - DNA, 15 bp, Homo sapiens
tgatgtcggacccta

SEQ ID NO: 712636 - DNA, 15 bp, Homo sapiens
gatgtcggaccctaa

SEQ ID NO: 712637 - DNA, 15 bp, Homo sapiens
atgtcggaccctaag

SEQ ID NO: 712638 - DNA, 15 bp, Homo sapiens
tgtcggaccctaagg

SEQ ID NO: 712639 - DNA, 15 bp, Homo sapiens
gtcggaccctaaggc

SEQ ID NO: 712640 - DNA, 15 bp, Homo sapiens
tcggaccctaaggct

SEQ ID NO: 712641 - DNA, 15 bp, Homo sapiens
cggaccctaaggctg

SEQ ID NO: 712642 - DNA, 15 bp, Homo sapiens
gttggggaaggcagg

SEQ ID NO: 712643 - DNA, 15 bp, Homo sapiens
ttggggaaggcaggg

SEQ ID NO: 712644 - DNA, 15 bp, Homo sapiens
tggggaaggcagggt

SEQ ID NO: 712645 - DNA, 15 bp, Homo sapiens
ggggaaggcagggtt

SEQ ID NO: 712646 - DNA, 15 bp, Homo sapiens
gggaaggcagggttt

SEQ ID NO: 712647 - DNA, 15 bp, Homo sapiens
ggaaggcagggtttt

SEQ ID NO: 712648 - DNA, 15 bp, Homo sapiens
gaaggcagggtttta

SEQ ID NO: 712649 - DNA, 15 bp, Homo sapiens
aaggcagggttttaa

SEQ ID NO: 712650 - DNA, 15 bp, Homo sapiens
aggcagggttttaac

SEQ ID NO: 712651 - DNA, 15 bp, Homo sapiens
ggcagggttttaacg

SEQ ID NO: 712652 - DNA, 15 bp, Homo sapiens
gcagggttttaacgg

SEQ ID NO: 712653 - DNA, 15 bp, Homo sapiens
cagggttttaacgga

SEQ ID NO: 712654 - DNA, 15 bp, Homo sapiens
agggttttaacggaa

SEQ ID NO: 712655 - DNA, 15 bp, Homo sapiens
gggttttaacggaaa

SEQ ID NO: 712656 - DNA, 15 bp, Homo sapiens
ggttttaacggaaat

SEQ ID NO: 712657 - DNA, 15 bp, Homo sapiens
gttttaacggaaatc

SEQ ID NO: 712658 - DNA, 15 bp, Homo sapiens
ttttaacggaaatct

SEQ ID NO: 712659 - DNA, 15 bp, Homo sapiens
tttaacggaaatctc

SEQ ID NO: 712660 - DNA, 15 bp, Homo sapiens
ttaacggaaatctct

SEQ ID NO: 712661 - DNA, 15 bp, Homo sapiens
taacggaaatctctc

SEQ ID NO: 712662 - DNA, 15 bp, Homo sapiens
aacggaaatctctct

SEQ ID NO: 712663 - DNA, 15 bp, Homo sapiens
acggaaatctctctc

SEQ ID NO: 712664 - DNA, 15 bp, Homo sapiens
cggaaatctctctcc

SEQ ID NO: 712665 - DNA, 15 bp, Homo sapiens
ggaaatctctctcca

SEQ ID NO: 712666 - DNA, 15 bp, Homo sapiens
gaaatctctctccat

SEQ ID NO: 712667 - DNA, 15 bp, Homo sapiens
aaatctctctccatc

SEQ ID NO: 712668 - DNA, 15 bp, Homo sapiens
aatctctctccatct

SEQ ID NO: 712669 - DNA, 15 bp, Homo sapiens
atctctctccatctc

SEQ ID NO: 712670 - DNA, 15 bp, Homo sapiens
tctctctccatctct

SEQ ID NO: 712671 - DNA, 15 bp, Homo sapiens
ctctctccatctcta

SEQ ID NO: 712672 - DNA, 15 bp, Homo sapiens
tctctccatctctac

SEQ ID NO: 712673 - DNA, 15 bp, Homo sapiens
ctctccatctctaca

SEQ ID NO: 712674 - DNA, 15 bp, Homo sapiens
tctccatctctacag

SEQ ID NO: 712675 - DNA, 15 bp, Homo sapiens
ctccatctctacaga

SEQ ID NO: 712676 - DNA, 15 bp, Homo sapiens
tccatctctacagag

SEQ ID NO: 712677 - DNA, 15 bp, Homo sapiens
ccatctctacagagc

SEQ ID NO: 712678 - DNA, 15 bp, Homo sapiens
catctctacagagct

SEQ ID NO: 712679 - DNA, 15 bp, Homo sapiens
atctctacagagctg

SEQ ID NO: 712680 - DNA, 15 bp, Homo sapiens
tctctacagagctgc

SEQ ID NO: 712681 - DNA, 15 bp, Homo sapiens
ctctacagagctgca

SEQ ID NO: 712682 - DNA, 15 bp, Homo sapiens
tctacagagctgcaa

SEQ ID NO: 712683 - DNA, 15 bp, Homo sapiens
ctacagagctgcaat

SEQ ID NO: 712684 - DNA, 15 bp, Homo sapiens
tacagagctgcaatc

SEQ ID NO: 712685 - DNA, 15 bp, Homo sapiens
acagagctgcaatcc

SEQ ID NO: 712686 - DNA, 15 bp, Homo sapiens
cagagctgcaatcct

SEQ ID NO: 712687 - DNA, 15 bp, Homo sapiens
agagctgcaatcctt

SEQ ID NO: 712688 - DNA, 15 bp, Homo sapiens
gagctgcaatccttg

SEQ ID NO: 712689 - DNA, 15 bp, Homo sapiens
agctgcaatccttgt

SEQ ID NO: 712690 - DNA, 15 bp, Homo sapiens
gctgcaatccttgtt

SEQ ID NO: 712691 - DNA, 15 bp, Homo sapiens
ctgcaatccttgttt

SEQ ID NO: 712692 - DNA, 15 bp, Homo sapiens
tgcaatccttgtttg

SEQ ID NO: 712693 - DNA, 15 bp, Homo sapiens
gcaatccttgtttga

SEQ ID NO: 712694 - DNA, 15 bp, Homo sapiens
caatccttgtttgat

SEQ ID NO: 712695 - DNA, 15 bp, Homo sapiens
aatccttgtttgatt

SEQ ID NO: 712696 - DNA, 15 bp, Homo sapiens
atccttgtttgattc

SEQ ID NO: 712697 - DNA, 15 bp, Homo sapiens
gtctgtattctactc

SEQ ID NO: 712698 - DNA, 15 bp, Homo sapiens
tctgtattctactcg

SEQ ID NO: 712699 - DNA, 15 bp, Homo sapiens
ctgtattctactcgc

SEQ ID NO: 712700 - DNA, 15 bp, Homo sapiens
tgtattctactcgcc

SEQ ID NO: 712701 - DNA, 15 bp, Homo sapiens
gtattctactcgcca

SEQ ID NO: 712702 - DNA, 15 bp, Homo sapiens
tattctactcgccag

SEQ ID NO: 712703 - DNA, 15 bp, Homo sapiens
attctactcgccagt

SEQ ID NO: 712704 - DNA, 15 bp, Homo sapiens
ttctactcgccagtt

SEQ ID NO: 712705 - DNA, 15 bp, Homo sapiens
tctactcgccagttt

SEQ ID NO: 712706 - DNA, 15 bp, Homo sapiens
ctactcgccagtttg

SEQ ID NO: 712707 - DNA, 15 bp, Homo sapiens
tactcgccagtttgg

SEQ ID NO: 712708 - DNA, 15 bp, Homo sapiens
actcgccagtttgga

SEQ ID NO: 712709 - DNA, 15 bp, Homo sapiens
ctcgccagtttggag

SEQ ID NO: 712710 - DNA, 15 bp, Homo sapiens
tcgccagtttggaga

SEQ ID NO: 712711 - DNA, 15 bp, Homo sapiens
cgccagtttggagag

SEQ ID NO: 712712 - DNA, 15 bp, Homo sapiens
gccagtttggagagg

SEQ ID NO: 712713 - DNA, 15 bp, Homo sapiens
ccagtttggagaggt

SEQ ID NO: 712714 - DNA, 15 bp, Homo sapiens
cagtttggagaggtc

SEQ ID NO: 712715 - DNA, 15 bp, Homo sapiens
agtttggagaggtct

SEQ ID NO: 712716 - DNA, 15 bp, Homo sapiens
gtttggagaggtctg

SEQ ID NO: 712717 - DNA, 15 bp, Homo sapiens
tttggagaggtctgg

SEQ ID NO: 712718 - DNA, 15 bp, Homo sapiens
ttggagaggtctggt

SEQ ID NO: 712719 - DNA, 15 bp, Homo sapiens
tggagaggtctggtg

SEQ ID NO: 712720 - DNA, 15 bp, Homo sapiens
ggagaggtctggtgg

SEQ ID NO: 712721 - DNA, 15 bp, Homo sapiens
gagaggtctggtgga

SEQ ID NO: 712722 - DNA, 15 bp, Homo sapiens
agaggtctggtggag

SEQ ID NO: 712723 - DNA, 15 bp, Homo sapiens
gaggtctggtggaga

SEQ ID NO: 712724 - DNA, 15 bp, Homo sapiens
aggtctggtggagaa

SEQ ID NO: 712725 - DNA, 15 bp, Homo sapiens
ggtctggtggagaaa

SEQ ID NO: 712726 - DNA, 15 bp, Homo sapiens
gtctggtggagaaaa

SEQ ID NO: 712727 - DNA, 15 bp, Homo sapiens
tctggtggagaaaag

SEQ ID NO: 712728 - DNA, 15 bp, Homo sapiens
ctggtggagaaaagg

SEQ ID NO: 712729 - DNA, 15 bp, Homo sapiens
tggtggagaaaagga

SEQ ID NO: 712730 - DNA, 15 bp, Homo sapiens
ggtggagaaaaggag

SEQ ID NO: 712731 - DNA, 15 bp, Homo sapiens
gtggagaaaaggagt

SEQ ID NO: 712732 - DNA, 15 bp, Homo sapiens
tggagaaaaggagtc

SEQ ID NO: 712733 - DNA, 15 bp, Homo sapiens
ggagaaaaggagtct

SEQ ID NO: 712734 - DNA, 15 bp, Homo sapiens
gagaaaaggagtctc

SEQ ID NO: 712735 - DNA, 15 bp, Homo sapiens
agaaaaggagtctct

SEQ ID NO: 712736 - DNA, 15 bp, Homo sapiens
gaaaaggagtctctt

SEQ ID NO: 712737 - DNA, 15 bp, Homo sapiens
aaaaggagtctcttt

SEQ ID NO: 712738 - DNA, 15 bp, Homo sapiens
aaaggagtctctttt

SEQ ID NO: 712739 - DNA, 15 bp, Homo sapiens
aaggagtctcttttc

SEQ ID NO: 712740 - DNA, 15 bp, Homo sapiens
aggagtctcttttca

SEQ ID NO: 712741 - DNA, 15 bp, Homo sapiens
ggagtctcttttcag

SEQ ID NO: 712742 - DNA, 15 bp, Homo sapiens
gagtctcttttcagg

SEQ ID NO: 712743 - DNA, 15 bp, Homo sapiens
agtctcttttcaggc

SEQ ID NO: 712744 - DNA, 15 bp, Homo sapiens
gtctcttttcaggct

SEQ ID NO: 712745 - DNA, 15 bp, Homo sapiens
tctcttttcaggctt

SEQ ID NO: 712746 - DNA, 15 bp, Homo sapiens
ctcttttcaggcttg

SEQ ID NO: 712747 - DNA, 15 bp, Homo sapiens
tcttttcaggcttga

SEQ ID NO: 712748 - DNA, 15 bp, Homo sapiens
cttttcaggcttgac

SEQ ID NO: 712749 - DNA, 15 bp, Homo sapiens
ttttcaggcttgaca

SEQ ID NO: 712750 - DNA, 15 bp, Homo sapiens
tttcaggcttgacaa

SEQ ID NO: 712751 - DNA, 15 bp, Homo sapiens
ttcaggcttgacaac

SEQ ID NO: 712752 - DNA, 15 bp, Homo sapiens
tcaggcttgacaaca

SEQ ID NO: 712753 - DNA, 15 bp, Homo sapiens
caggcttgacaacaa

SEQ ID NO: 712754 - DNA, 15 bp, Homo sapiens
aggcttgacaacaaa

SEQ ID NO: 712755 - DNA, 15 bp, Homo sapiens
ggcttgacaacaaat

SEQ ID NO: 712756 - DNA, 15 bp, Homo sapiens
gcttgacaacaaata

SEQ ID NO: 712757 - DNA, 15 bp, Homo sapiens
cttgacaacaaatag

SEQ ID NO: 712758 - DNA, 15 bp, Homo sapiens
ttgacaacaaataga

SEQ ID NO: 712759 - DNA, 15 bp, Homo sapiens
tgacaacaaatagaa

SEQ ID NO: 712760 - DNA, 15 bp, Homo sapiens
gacaacaaatagaac

SEQ ID NO: 712761 - DNA, 15 bp, Homo sapiens
acaacaaatagaact

SEQ ID NO: 712762 - DNA, 15 bp, Homo sapiens
caacaaatagaactc

SEQ ID NO: 712763 - DNA, 15 bp, Homo sapiens
aacaaatagaactca

SEQ ID NO: 712764 - DNA, 15 bp, Homo sapiens
acaaatagaactcag

SEQ ID NO: 712765 - DNA, 15 bp, Homo sapiens
caaatagaactcagg

SEQ ID NO: 712766 - DNA, 15 bp, Homo sapiens
aaatagaactcaggg

SEQ ID NO: 712767 - DNA, 15 bp, Homo sapiens
aatagaactcagggc

SEQ ID NO: 712768 - DNA, 15 bp, Homo sapiens
atagaactcagggcc

SEQ ID NO: 712769 - DNA, 15 bp, Homo sapiens
tagaactcagggccg

SEQ ID NO: 712770 - DNA, 15 bp, Homo sapiens
agaactcagggccgg

SEQ ID NO: 712771 - DNA, 15 bp, Homo sapiens
gaactcagggccggg

SEQ ID NO: 712772 - DNA, 15 bp, Homo sapiens
aactcagggccgggc

SEQ ID NO: 712773 - DNA, 15 bp, Homo sapiens
actcagggccgggcg

SEQ ID NO: 712774 - DNA, 15 bp, Homo sapiens
ctcagggccgggcgc

SEQ ID NO: 712775 - DNA, 15 bp, Homo sapiens
tcagggccgggcgcg

SEQ ID NO: 712776 - DNA, 15 bp, Homo sapiens
cagggccgggcgcgg

SEQ ID NO: 712777 - DNA, 15 bp, Homo sapiens
agggccgggcgcggt

SEQ ID NO: 712778 - DNA, 15 bp, Homo sapiens
tggctcacgcctgtc

SEQ ID NO: 712779 - DNA, 15 bp, Homo sapiens
ggctcacgcctgtca

SEQ ID NO: 712780 - DNA, 15 bp, Homo sapiens
gctcacgcctgtcat

SEQ ID NO: 712781 - DNA, 15 bp, Homo sapiens
ctcacgcctgtcatc

SEQ ID NO: 712782 - DNA, 15 bp, Homo sapiens
tcacgcctgtcatcc

SEQ ID NO: 712783 - DNA, 15 bp, Homo sapiens
cacgcctgtcatccc

SEQ ID NO: 712784 - DNA, 15 bp, Homo sapiens
acgcctgtcatccca

SEQ ID NO: 712785 - DNA, 15 bp, Homo sapiens
cgcctgtcatcccag

SEQ ID NO: 712786 - DNA, 15 bp, Homo sapiens
gcctgtcatcccagc

SEQ ID NO: 712787 - DNA, 15 bp, Homo sapiens
cctgtcatcccagca

SEQ ID NO: 712788 - DNA, 15 bp, Homo sapiens
ctgtcatcccagcac

SEQ ID NO: 712789 - DNA, 15 bp, Homo sapiens
tgtcatcccagcact

SEQ ID NO: 712790 - DNA, 15 bp, Homo sapiens
gtcatcccagcactg

SEQ ID NO: 712791 - DNA, 15 bp, Homo sapiens
tcatcccagcactgt

SEQ ID NO: 712792 - DNA, 15 bp, Homo sapiens
catcccagcactgtg

SEQ ID NO: 712793 - DNA, 15 bp, Homo sapiens
gcactgtgggaggcc

SEQ ID NO: 712794 - DNA, 15 bp, Homo sapiens
cactgtgggaggccg

SEQ ID NO: 712795 - DNA, 15 bp, Homo sapiens
actgtgggaggccga

SEQ ID NO: 712796 - DNA, 15 bp, Homo sapiens
ctgtgggaggccgaa

SEQ ID NO: 712797 - DNA, 15 bp, Homo sapiens
tgtgggaggccgaag

SEQ ID NO: 712798 - DNA, 15 bp, Homo sapiens
gtgggaggccgaagc

SEQ ID NO: 712799 - DNA, 15 bp, Homo sapiens
tgggaggccgaagcg

SEQ ID NO: 712800 - DNA, 15 bp, Homo sapiens
gggaggccgaagcgg

SEQ ID NO: 712801 - DNA, 15 bp, Homo sapiens
ggaggccgaagcggg

SEQ ID NO: 712802 - DNA, 15 bp, Homo sapiens
gaggccgaagcgggc

SEQ ID NO: 712803 - DNA, 15 bp, Homo sapiens
aggccgaagcgggcg

SEQ ID NO: 712804 - DNA, 15 bp, Homo sapiens
ggccgaagcgggcgg

SEQ ID NO: 712805 - DNA, 15 bp, Homo sapiens
gccgaagcgggcgga

SEQ ID NO: 712806 - DNA, 15 bp, Homo sapiens
ccgaagcgggcggat

SEQ ID NO: 712807 - DNA, 15 bp, Homo sapiens
cgaagcgggcggatc

SEQ ID NO: 712808 - DNA, 15 bp, Homo sapiens
gaagcgggcggatca

SEQ ID NO: 712809 - DNA, 15 bp, Homo sapiens
aagcgggcggatcac

SEQ ID NO: 712810 - DNA, 15 bp, Homo sapiens
agcgggcggatcacc

SEQ ID NO: 712811 - DNA, 15 bp, Homo sapiens
gcggatcacctgagg

SEQ ID NO: 712812 - DNA, 15 bp, Homo sapiens
cggatcacctgaggt

SEQ ID NO: 712813 - DNA, 15 bp, Homo sapiens
gatcacctgaggtcg

SEQ ID NO: 712814 - DNA, 15 bp, Homo sapiens
atcacctgaggtcgg

SEQ ID NO: 712815 - DNA, 15 bp, Homo sapiens
tcacctgaggtcggg

SEQ ID NO: 712816 - DNA, 15 bp, Homo sapiens
cacctgaggtcggga

SEQ ID NO: 712817 - DNA, 15 bp, Homo sapiens
acctgaggtcgggag

SEQ ID NO: 712818 - DNA, 15 bp, Homo sapiens
cctgaggtcgggagc

SEQ ID NO: 712819 - DNA, 15 bp, Homo sapiens
ctgaggtcgggagct

SEQ ID NO: 712820 - DNA, 15 bp, Homo sapiens
tgaggtcgggagctc

SEQ ID NO: 712821 - DNA, 15 bp, Homo sapiens
gaggtcgggagctca

SEQ ID NO: 712822 - DNA, 15 bp, Homo sapiens
aggtcgggagctcaa

SEQ ID NO: 712823 - DNA, 15 bp, Homo sapiens
ggtcgggagctcaag

SEQ ID NO: 712824 - DNA, 15 bp, Homo sapiens
gtcgggagctcaaga

SEQ ID NO: 712825 - DNA, 15 bp, Homo sapiens
tcgggagctcaagac

SEQ ID NO: 712826 - DNA, 15 bp, Homo sapiens
cgggagctcaagacc

SEQ ID NO: 712827 - DNA, 15 bp, Homo sapiens
gggagctcaagacca

SEQ ID NO: 712828 - DNA, 15 bp, Homo sapiens
ggagctcaagaccag

SEQ ID NO: 712829 - DNA, 15 bp, Homo sapiens
gagctcaagaccagc

SEQ ID NO: 712830 - DNA, 15 bp, Homo sapiens
agctcaagaccagcc

SEQ ID NO: 712831 - DNA, 15 bp, Homo sapiens
gctcaagaccagcct

SEQ ID NO: 712832 - DNA, 15 bp, Homo sapiens
ctcaagaccagcctg

SEQ ID NO: 712833 - DNA, 15 bp, Homo sapiens
cctggccaacatgga

SEQ ID NO: 712834 - DNA, 15 bp, Homo sapiens
ctggccaacatggag

SEQ ID NO: 712835 - DNA, 15 bp, Homo sapiens
tggccaacatggaga

SEQ ID NO: 712836 - DNA, 15 bp, Homo sapiens
ggccaacatggagaa

SEQ ID NO: 712837 - DNA, 15 bp, Homo sapiens
gccaacatggagaaa

SEQ ID NO: 712838 - DNA, 15 bp, Homo sapiens
ccaacatggagaaat

SEQ ID NO: 712839 - DNA, 15 bp, Homo sapiens
caacatggagaaatc

SEQ ID NO: 712840 - DNA, 15 bp, Homo sapiens
aacatggagaaatcc

SEQ ID NO: 712841 - DNA, 15 bp, Homo sapiens
acatggagaaatccc

SEQ ID NO: 712842 - DNA, 15 bp, Homo sapiens
catggagaaatccca

SEQ ID NO: 712843 - DNA, 15 bp, Homo sapiens
atggagaaatcccat

SEQ ID NO: 712844 - DNA, 15 bp, Homo sapiens
tggagaaatcccatc

SEQ ID NO: 712845 - DNA, 15 bp, Homo sapiens
ggagaaatcccatct

SEQ ID NO: 712846 - DNA, 15 bp, Homo sapiens
gagaaatcccatctt

SEQ ID NO: 712847 - DNA, 15 bp, Homo sapiens
agaaatcccatcttt

SEQ ID NO: 712848 - DNA, 15 bp, Homo sapiens
gaaatcccatcttta

SEQ ID NO: 712849 - DNA, 15 bp, Homo sapiens
aaatcccatctttac

SEQ ID NO: 712850 - DNA, 15 bp, Homo sapiens
aatcccatctttact

SEQ ID NO: 712851 - DNA, 15 bp, Homo sapiens
atcccatctttacta

SEQ ID NO: 712852 - DNA, 15 bp, Homo sapiens
tcccatctttactaa

SEQ ID NO: 712853 - DNA, 15 bp, Homo sapiens
cccatctttactaaa

SEQ ID NO: 712854 - DNA, 15 bp, Homo sapiens
ccatctttactaaaa

SEQ ID NO: 712855 - DNA, 15 bp, Homo sapiens
catctttactaaaaa

SEQ ID NO: 712856 - DNA, 15 bp, Homo sapiens
atctttactaaaaat

SEQ ID NO: 712857 - DNA, 15 bp, Homo sapiens
tctttactaaaaata

SEQ ID NO: 712858 - DNA, 15 bp, Homo sapiens
ctttactaaaaatac

SEQ ID NO: 712859 - DNA, 15 bp, Homo sapiens
tttactaaaaataca

SEQ ID NO: 712860 - DNA, 15 bp, Homo sapiens
ttactaaaaatacaa

SEQ ID NO: 712861 - DNA, 15 bp, Homo sapiens
aatacaaaattagcc

SEQ ID NO: 712862 - DNA, 15 bp, Homo sapiens
atacaaaattagccg

SEQ ID NO: 712863 - DNA, 15 bp, Homo sapiens
tacaaaattagccgg

SEQ ID NO: 712864 - DNA, 15 bp, Homo sapiens
acaaaattagccggg

SEQ ID NO: 712865 - DNA, 15 bp, Homo sapiens
caaaattagccgggc

SEQ ID NO: 712866 - DNA, 15 bp, Homo sapiens
attagccgggcgtac

SEQ ID NO: 712867 - DNA, 15 bp, Homo sapiens
ttagccgggcgtact

SEQ ID NO: 712868 - DNA, 15 bp, Homo sapiens
tagccgggcgtactg

SEQ ID NO: 712869 - DNA, 15 bp, Homo sapiens
agccgggcgtactgg

SEQ ID NO: 712870 - DNA, 15 bp, Homo sapiens
gccgggcgtactggc

SEQ ID NO: 712871 - DNA, 15 bp, Homo sapiens
ccgggcgtactggcg

SEQ ID NO: 712872 - DNA, 15 bp, Homo sapiens
cgggcgtactggcga

SEQ ID NO: 712873 - DNA, 15 bp, Homo sapiens
gggcgtactggcgaa

SEQ ID NO: 712874 - DNA, 15 bp, Homo sapiens
ggcgtactggcgaat

SEQ ID NO: 712875 - DNA, 15 bp, Homo sapiens
gcgtactggcgaatg

SEQ ID NO: 712876 - DNA, 15 bp, Homo sapiens
cgtactggcgaatgc

SEQ ID NO: 712877 - DNA, 15 bp, Homo sapiens
gtactggcgaatgcc

SEQ ID NO: 712878 - DNA, 15 bp, Homo sapiens
tactggcgaatgcct

SEQ ID NO: 712879 - DNA, 15 bp, Homo sapiens
actggcgaatgcctg

SEQ ID NO: 712880 - DNA, 15 bp, Homo sapiens
ctggcgaatgcctgt

SEQ ID NO: 712881 - DNA, 15 bp, Homo sapiens
tggcgaatgcctgta

SEQ ID NO: 712882 - DNA, 15 bp, Homo sapiens
ggcgaatgcctgtaa

SEQ ID NO: 712883 - DNA, 15 bp, Homo sapiens
gcgaatgcctgtaat

SEQ ID NO: 712884 - DNA, 15 bp, Homo sapiens
cgaatgcctgtaatg

SEQ ID NO: 712885 - DNA, 15 bp, Homo sapiens
gaatgcctgtaatgc

SEQ ID NO: 712886 - DNA, 15 bp, Homo sapiens
aatgcctgtaatgcc

SEQ ID NO: 712887 - DNA, 15 bp, Homo sapiens
atgcctgtaatgcca

SEQ ID NO: 712888 - DNA, 15 bp, Homo sapiens
tgcctgtaatgccag

SEQ ID NO: 712889 - DNA, 15 bp, Homo sapiens
gcctgtaatgccagc

SEQ ID NO: 712890 - DNA, 15 bp, Homo sapiens
cctgtaatgccagct

SEQ ID NO: 712891 - DNA, 15 bp, Homo sapiens
ctgtaatgccagctt

SEQ ID NO: 712892 - DNA, 15 bp, Homo sapiens
tgtaatgccagcttc

SEQ ID NO: 712893 - DNA, 15 bp, Homo sapiens
gtaatgccagcttct

SEQ ID NO: 712894 - DNA, 15 bp, Homo sapiens
taatgccagcttctc

SEQ ID NO: 712895 - DNA, 15 bp, Homo sapiens
aatgccagcttctcg

SEQ ID NO: 712896 - DNA, 15 bp, Homo sapiens
atgccagcttctcgg

SEQ ID NO: 712897 - DNA, 15 bp, Homo sapiens
tgccagcttctcggg

SEQ ID NO: 712898 - DNA, 15 bp, Homo sapiens
gccagcttctcggga

SEQ ID NO: 712899 - DNA, 15 bp, Homo sapiens
ccagcttctcgggag

SEQ ID NO: 712900 - DNA, 15 bp, Homo sapiens
cagcttctcgggagg

SEQ ID NO: 712901 - DNA, 15 bp, Homo sapiens
agcttctcgggaggc

SEQ ID NO: 712902 - DNA, 15 bp, Homo sapiens
gcttctcgggaggct

SEQ ID NO: 712903 - DNA, 15 bp, Homo sapiens
cttctcgggaggctg

SEQ ID NO: 712904 - DNA, 15 bp, Homo sapiens
ttctcgggaggctga

SEQ ID NO: 712905 - DNA, 15 bp, Homo sapiens
tctcgggaggctgag

SEQ ID NO: 712906 - DNA, 15 bp, Homo sapiens
gaggcagaggttgcg

SEQ ID NO: 712907 - DNA, 15 bp, Homo sapiens
aggcagaggttgcgg

SEQ ID NO: 712908 - DNA, 15 bp, Homo sapiens
ggcagaggttgcggt

SEQ ID NO: 712909 - DNA, 15 bp, Homo sapiens
gcagaggttgcggtg

SEQ ID NO: 712910 - DNA, 15 bp, Homo sapiens
cagaggttgcggtga

SEQ ID NO: 712911 - DNA, 15 bp, Homo sapiens
agaggttgcggtgaa

SEQ ID NO: 712912 - DNA, 15 bp, Homo sapiens
gaggttgcggtgaac

SEQ ID NO: 712913 - DNA, 15 bp, Homo sapiens
aggttgcggtgaacc

SEQ ID NO: 712914 - DNA, 15 bp, Homo sapiens
ggttgcggtgaacca

SEQ ID NO: 712915 - DNA, 15 bp, Homo sapiens
gttgcggtgaaccaa

SEQ ID NO: 712916 - DNA, 15 bp, Homo sapiens
ttgcggtgaaccaag

SEQ ID NO: 712917 - DNA, 15 bp, Homo sapiens
tgcggtgaaccaaga

SEQ ID NO: 712918 - DNA, 15 bp, Homo sapiens
gcggtgaaccaagac

SEQ ID NO: 712919 - DNA, 15 bp, Homo sapiens
cggtgaaccaagact

SEQ ID NO: 712920 - DNA, 15 bp, Homo sapiens
ggtgaaccaagactg

SEQ ID NO: 712921 - DNA, 15 bp, Homo sapiens
gtgaaccaagactgt

SEQ ID NO: 712922 - DNA, 15 bp, Homo sapiens
tgaaccaagactgtg

SEQ ID NO: 712923 - DNA, 15 bp, Homo sapiens
gaaccaagactgtgc

SEQ ID NO: 712924 - DNA, 15 bp, Homo sapiens
aaccaagactgtgcc

SEQ ID NO: 712925 - DNA, 15 bp, Homo sapiens
accaagactgtgcca

SEQ ID NO: 712926 - DNA, 15 bp, Homo sapiens
ccaagactgtgccac

SEQ ID NO: 712927 - DNA, 15 bp, Homo sapiens
caagactgtgccact

SEQ ID NO: 712928 - DNA, 15 bp, Homo sapiens
aagactgtgccactg

SEQ ID NO: 712929 - DNA, 15 bp, Homo sapiens
agactgtgccactgt

SEQ ID NO: 712930 - DNA, 15 bp, Homo sapiens
gactgtgccactgta

SEQ ID NO: 712931 - DNA, 15 bp, Homo sapiens
actgtgccactgtac

SEQ ID NO: 712932 - DNA, 15 bp, Homo sapiens
ctgtgccactgtact

SEQ ID NO: 712933 - DNA, 15 bp, Homo sapiens
ctgtactccagcctt

SEQ ID NO: 712934 - DNA, 15 bp, Homo sapiens
tgtactccagccttg

SEQ ID NO: 712935 - DNA, 15 bp, Homo sapiens
gtactccagccttgg

SEQ ID NO: 712936 - DNA, 15 bp, Homo sapiens
tactccagccttggt

SEQ ID NO: 712937 - DNA, 15 bp, Homo sapiens
actccagccttggtg

SEQ ID NO: 712938 - DNA, 15 bp, Homo sapiens
ctccagccttggtga

SEQ ID NO: 712939 - DNA, 15 bp, Homo sapiens
tccagccttggtgac

SEQ ID NO: 712940 - DNA, 15 bp, Homo sapiens
ccagccttggtgaca

SEQ ID NO: 712941 - DNA, 15 bp, Homo sapiens
cagccttggtgacag

SEQ ID NO: 712942 - DNA, 15 bp, Homo sapiens
agccttggtgacaga

SEQ ID NO: 712943 - DNA, 15 bp, Homo sapiens
gccttggtgacagag

SEQ ID NO: 712944 - DNA, 15 bp, Homo sapiens
ccttggtgacagagg

SEQ ID NO: 712945 - DNA, 15 bp, Homo sapiens
cttggtgacagaggg

SEQ ID NO: 712946 - DNA, 15 bp, Homo sapiens
ttggtgacagaggga

SEQ ID NO: 712947 - DNA, 15 bp, Homo sapiens
tggtgacagagggag

SEQ ID NO: 712948 - DNA, 15 bp, Homo sapiens
ggtgacagagggaga

SEQ ID NO: 712949 - DNA, 15 bp, Homo sapiens
gtgacagagggagac

SEQ ID NO: 712950 - DNA, 15 bp, Homo sapiens
tgacagagggagact

SEQ ID NO: 712951 - DNA, 15 bp, Homo sapiens
gacagagggagactc

SEQ ID NO: 712952 - DNA, 15 bp, Homo sapiens
acagagggagactct

SEQ ID NO: 712953 - DNA, 15 bp, Homo sapiens
cagagggagactctg

SEQ ID NO: 712954 - DNA, 15 bp, Homo sapiens
agagggagactctgt

SEQ ID NO: 712955 - DNA, 15 bp, Homo sapiens
gagggagactctgtc

SEQ ID NO: 712956 - DNA, 15 bp, Homo sapiens
agggagactctgtct

SEQ ID NO: 712957 - DNA, 15 bp, Homo sapiens
gggagactctgtctt

SEQ ID NO: 712958 - DNA, 15 bp, Homo sapiens
ggagactctgtctta

SEQ ID NO: 712959 - DNA, 15 bp, Homo sapiens
gagactctgtcttaa

SEQ ID NO: 712960 - DNA, 15 bp, Homo sapiens
agactctgtcttaag

SEQ ID NO: 712961 - DNA, 15 bp, Homo sapiens
gactctgtcttaaga

SEQ ID NO: 712962 - DNA, 15 bp, Homo sapiens
actctgtcttaagaa

SEQ ID NO: 712963 - DNA, 15 bp, Homo sapiens
ctctgtcttaagaaa

SEQ ID NO: 712964 - DNA, 15 bp, Homo sapiens
tctgtcttaagaaaa

SEQ ID NO: 712965 - DNA, 15 bp, Homo sapiens
ctgtcttaagaaaaa

SEQ ID NO: 712966 - DNA, 15 bp, Homo sapiens
tgtcttaagaaaaaa

SEQ ID NO: 712967 - DNA, 15 bp, Homo sapiens
gtcttaagaaaaaaa

SEQ ID NO: 712968 - DNA, 15 bp, Homo sapiens
tcttaagaaaaaaag

SEQ ID NO: 712969 - DNA, 15 bp, Homo sapiens
cttaagaaaaaaaga

SEQ ID NO: 712970 - DNA, 15 bp, Homo sapiens
ttaagaaaaaaagaa

SEQ ID NO: 712971 - DNA, 15 bp, Homo sapiens
taagaaaaaaagaaa

SEQ ID NO: 712972 - DNA, 15 bp, Homo sapiens
aagaaaaaaagaaaa

SEQ ID NO: 712973 - DNA, 15 bp, Homo sapiens
agaaaaaaagaaaaa

SEQ ID NO: 712974 - DNA, 15 bp, Homo sapiens
gaaaaaaagaaaaaa

SEQ ID NO: 712975 - DNA, 15 bp, Homo sapiens
aaaaaaagaaaaaaa

SEQ ID NO: 712976 - DNA, 15 bp, Homo sapiens
aaaaaagaaaaaaaa

SEQ ID NO: 712977 - DNA, 15 bp, Homo sapiens
aaaaagaaaaaaaaa

SEQ ID NO: 712978 - DNA, 15 bp, Homo sapiens
aaaagaaaaaaaaaa

SEQ ID NO: 712979 - DNA, 15 bp, Homo sapiens
aaagaaaaaaaaaaa

SEQ ID NO: 712980 - DNA, 15 bp, Homo sapiens
aagaaaaaaaaaaaa

SEQ ID NO: 712981 - DNA, 15 bp, Homo sapiens
agaaaaaaaaaaaaa

SEQ ID NO: 712982 - DNA, 15 bp, Homo sapiens
aaaaaaaaaaaaagg

SEQ ID NO: 712983 - DNA, 15 bp, Homo sapiens
aaaaaaaaaaaaggg

SEQ ID NO: 712984 - DNA, 15 bp, Homo sapiens
aaaaaaaaaaagggc

SEQ ID NO: 712985 - DNA, 15 bp, Homo sapiens
aaaaaaaaaagggcc

SEQ ID NO: 712986 - DNA, 15 bp, Homo sapiens
aaaaaaaaagggccg

SEQ ID NO: 712987 - DNA, 15 bp, Homo sapiens
aaaaaaaagggccgg

SEQ ID NO: 712988 - DNA, 15 bp, Homo sapiens
aaaaaaagggccggg

SEQ ID NO: 712989 - DNA, 15 bp, Homo sapiens
aaaaaagggccgggc

SEQ ID NO: 712990 - DNA, 15 bp, Homo sapiens
aaaaagggccgggct

SEQ ID NO: 712991 - DNA, 15 bp, Homo sapiens
aaaagggccgggctc

SEQ ID NO: 712992 - DNA, 15 bp, Homo sapiens
aaagggccgggctca

SEQ ID NO: 712993 - DNA, 15 bp, Homo sapiens
aagggccgggctcac

SEQ ID NO: 712994 - DNA, 15 bp, Homo sapiens
agggccgggctcacg

SEQ ID NO: 712995 - DNA, 15 bp, Homo sapiens
gggccgggctcacgc

SEQ ID NO: 712996 - DNA, 15 bp, Homo sapiens
ggccgggctcacgcc

SEQ ID NO: 712997 - DNA, 15 bp, Homo sapiens
gccgggctcacgcct

SEQ ID NO: 712998 - DNA, 15 bp, Homo sapiens
ccgggctcacgcctg

SEQ ID NO: 712999 - DNA, 15 bp, Homo sapiens
cgggctcacgcctgt

SEQ ID NO: 713000 - DNA, 15 bp, Homo sapiens
gggctcacgcctgta

SEQ ID NO: 713001 - DNA, 15 bp, Homo sapiens
tttgggaggccaaat

SEQ ID NO: 713002 - DNA, 15 bp, Homo sapiens
ttgggaggccaaatc

SEQ ID NO: 713003 - DNA, 15 bp, Homo sapiens
tgggaggccaaatca

SEQ ID NO: 713004 - DNA, 15 bp, Homo sapiens
gggaggccaaatcac

SEQ ID NO: 713005 - DNA, 15 bp, Homo sapiens
ggaggccaaatcacc

SEQ ID NO: 713006 - DNA, 15 bp, Homo sapiens
gaggccaaatcacct

SEQ ID NO: 713007 - DNA, 15 bp, Homo sapiens
aggccaaatcaccta

SEQ ID NO: 713008 - DNA, 15 bp, Homo sapiens
ggccaaatcacctaa

SEQ ID NO: 713009 - DNA, 15 bp, Homo sapiens
gccaaatcacctaag

SEQ ID NO: 713010 - DNA, 15 bp, Homo sapiens
ccaaatcacctaagg

SEQ ID NO: 713011 - DNA, 15 bp, Homo sapiens
caaatcacctaaggc

SEQ ID NO: 713012 - DNA, 15 bp, Homo sapiens
aaatcacctaaggcc

SEQ ID NO: 713013 - DNA, 15 bp, Homo sapiens
aatcacctaaggccg

SEQ ID NO: 713014 - DNA, 15 bp, Homo sapiens
atcacctaaggccgg

SEQ ID NO: 713015 - DNA, 15 bp, Homo sapiens
tcacctaaggccggg

SEQ ID NO: 713016 - DNA, 15 bp, Homo sapiens
cacctaaggccggga

SEQ ID NO: 713017 - DNA, 15 bp, Homo sapiens
acctaaggccgggag

SEQ ID NO: 713018 - DNA, 15 bp, Homo sapiens
cctaaggccgggagt

SEQ ID NO: 713019 - DNA, 15 bp, Homo sapiens
ctaaggccgggagtt

SEQ ID NO: 713020 - DNA, 15 bp, Homo sapiens
taaggccgggagttt

SEQ ID NO: 713021 - DNA, 15 bp, Homo sapiens
aaggccgggagtttg

SEQ ID NO: 713022 - DNA, 15 bp, Homo sapiens
aggccgggagtttga

SEQ ID NO: 713023 - DNA, 15 bp, Homo sapiens
ggccgggagtttgat

SEQ ID NO: 713024 - DNA, 15 bp, Homo sapiens
gccgggagtttgata

SEQ ID NO: 713025 - DNA, 15 bp, Homo sapiens
ccgggagtttgatac

SEQ ID NO: 713026 - DNA, 15 bp, Homo sapiens
cgggagtttgatacc

SEQ ID NO: 713027 - DNA, 15 bp, Homo sapiens
gggagtttgatacca

SEQ ID NO: 713028 - DNA, 15 bp, Homo sapiens
ggagtttgataccaa

SEQ ID NO: 713029 - DNA, 15 bp, Homo sapiens
gagtttgataccaac

SEQ ID NO: 713030 - DNA, 15 bp, Homo sapiens
agtttgataccaacc

SEQ ID NO: 713031 - DNA, 15 bp, Homo sapiens
gtttgataccaacct

SEQ ID NO: 713032 - DNA, 15 bp, Homo sapiens
tttgataccaacctg

SEQ ID NO: 713033 - DNA, 15 bp, Homo sapiens
ttgataccaacctga

SEQ ID NO: 713034 - DNA, 15 bp, Homo sapiens
tgataccaacctgac

SEQ ID NO: 713035 - DNA, 15 bp, Homo sapiens
gataccaacctgacc

SEQ ID NO: 713036 - DNA, 15 bp, Homo sapiens
ataccaacctgacca

SEQ ID NO: 713037 - DNA, 15 bp, Homo sapiens
taccaacctgaccaa

SEQ ID NO: 713038 - DNA, 15 bp, Homo sapiens
accaacctgaccaac

SEQ ID NO: 713039 - DNA, 15 bp, Homo sapiens
ccaacctgaccaaca

SEQ ID NO: 713040 - DNA, 15 bp, Homo sapiens
caacctgaccaacat

SEQ ID NO: 713041 - DNA, 15 bp, Homo sapiens
aacctgaccaacata

SEQ ID NO: 713042 - DNA, 15 bp, Homo sapiens
acctgaccaacatag

SEQ ID NO: 713043 - DNA, 15 bp, Homo sapiens
cctgaccaacatagt

SEQ ID NO: 713044 - DNA, 15 bp, Homo sapiens
ctgaccaacatagtg

SEQ ID NO: 713045 - DNA, 15 bp, Homo sapiens
tgaccaacatagtga

SEQ ID NO: 713046 - DNA, 15 bp, Homo sapiens
gaccaacatagtgaa

SEQ ID NO: 713047 - DNA, 15 bp, Homo sapiens
accaacatagtgaaa

SEQ ID NO: 713048 - DNA, 15 bp, Homo sapiens
ccaacatagtgaaat

SEQ ID NO: 713049 - DNA, 15 bp, Homo sapiens
caacatagtgaaatc

SEQ ID NO: 713050 - DNA, 15 bp, Homo sapiens
aacatagtgaaatcc

SEQ ID NO: 713051 - DNA, 15 bp, Homo sapiens
acatagtgaaatccc

SEQ ID NO: 713052 - DNA, 15 bp, Homo sapiens
catagtgaaatcccg

SEQ ID NO: 713053 - DNA, 15 bp, Homo sapiens
atagtgaaatcccgt

SEQ ID NO: 713054 - DNA, 15 bp, Homo sapiens
tagtgaaatcccgtc

SEQ ID NO: 713055 - DNA, 15 bp, Homo sapiens
agtgaaatcccgtct

SEQ ID NO: 713056 - DNA, 15 bp, Homo sapiens
gtgaaatcccgtctc

SEQ ID NO: 713057 - DNA, 15 bp, Homo sapiens
tgaaatcccgtctct

SEQ ID NO: 713058 - DNA, 15 bp, Homo sapiens
gaaatcccgtctcta

SEQ ID NO: 713059 - DNA, 15 bp, Homo sapiens
aaatcccgtctctac

SEQ ID NO: 713060 - DNA, 15 bp, Homo sapiens
aatcccgtctctact

SEQ ID NO: 713061 - DNA, 15 bp, Homo sapiens
atcccgtctctacta

SEQ ID NO: 713062 - DNA, 15 bp, Homo sapiens
tcccgtctctactaa

SEQ ID NO: 713063 - DNA, 15 bp, Homo sapiens
atacaaaattagcca

SEQ ID NO: 713064 - DNA, 15 bp, Homo sapiens
tacaaaattagccag

SEQ ID NO: 713065 - DNA, 15 bp, Homo sapiens
acaaaattagccagg

SEQ ID NO: 713066 - DNA, 15 bp, Homo sapiens
caaaattagccaggc

SEQ ID NO: 713067 - DNA, 15 bp, Homo sapiens
aaaattagccaggcg

SEQ ID NO: 713068 - DNA, 15 bp, Homo sapiens
aaattagccaggcgt

SEQ ID NO: 713069 - DNA, 15 bp, Homo sapiens
aattagccaggcgtg

SEQ ID NO: 713070 - DNA, 15 bp, Homo sapiens
attagccaggcgtgg

SEQ ID NO: 713071 - DNA, 15 bp, Homo sapiens
ttagccaggcgtggt

SEQ ID NO: 713072 - DNA, 15 bp, Homo sapiens
tagccaggcgtggtg

SEQ ID NO: 713073 - DNA, 15 bp, Homo sapiens
agccaggcgtggtgg

SEQ ID NO: 713074 - DNA, 15 bp, Homo sapiens
gccaggcgtggtggc

SEQ ID NO: 713075 - DNA, 15 bp, Homo sapiens
ccaggcgtggtggcg

SEQ ID NO: 713076 - DNA, 15 bp, Homo sapiens
caggcgtggtggcgg

SEQ ID NO: 713077 - DNA, 15 bp, Homo sapiens
aggcgtggtggcggg

SEQ ID NO: 713078 - DNA, 15 bp, Homo sapiens
ggcgtggtggcgggc

SEQ ID NO: 713079 - DNA, 15 bp, Homo sapiens
gcgtggtggcgggcg

SEQ ID NO: 713080 - DNA, 15 bp, Homo sapiens
cgtggtggcgggcgc

SEQ ID NO: 713081 - DNA, 15 bp, Homo sapiens
gtggtggcgggcgcc

SEQ ID NO: 713082 - DNA, 15 bp, Homo sapiens
tggtggcgggcgcct

SEQ ID NO: 713083 - DNA, 15 bp, Homo sapiens
ggtggcgggcgcctg

SEQ ID NO: 713084 - DNA, 15 bp, Homo sapiens
ggcgggcgcctgtaa

SEQ ID NO: 713085 - DNA, 15 bp, Homo sapiens
gcgggcgcctgtaat

SEQ ID NO: 713086 - DNA, 15 bp, Homo sapiens
cgggcgcctgtaatc

SEQ ID NO: 713087 - DNA, 15 bp, Homo sapiens
gggcgcctgtaatcc

SEQ ID NO: 713088 - DNA, 15 bp, Homo sapiens
ggcgcctgtaatccc

SEQ ID NO: 713089 - DNA, 15 bp, Homo sapiens
gcgcctgtaatccca

SEQ ID NO: 713090 - DNA, 15 bp, Homo sapiens
actcgggaggctgaa

SEQ ID NO: 713091 - DNA, 15 bp, Homo sapiens
ctcgggaggctgaag

SEQ ID NO: 713092 - DNA, 15 bp, Homo sapiens
tcgggaggctgaagc

SEQ ID NO: 713093 - DNA, 15 bp, Homo sapiens
cgggaggctgaagca

SEQ ID NO: 713094 - DNA, 15 bp, Homo sapiens
gaggctgaagcagga

SEQ ID NO: 713095 - DNA, 15 bp, Homo sapiens
aggctgaagcaggag

SEQ ID NO: 713096 - DNA, 15 bp, Homo sapiens
ggctgaagcaggaga

SEQ ID NO: 713097 - DNA, 15 bp, Homo sapiens
gctgaagcaggagaa

SEQ ID NO: 713098 - DNA, 15 bp, Homo sapiens
ctgaagcaggagaat

SEQ ID NO: 713099 - DNA, 15 bp, Homo sapiens
tgaagcaggagaatc

SEQ ID NO: 713100 - DNA, 15 bp, Homo sapiens
gaagcaggagaatca

SEQ ID NO: 713101 - DNA, 15 bp, Homo sapiens
aagcaggagaatcac

SEQ ID NO: 713102 - DNA, 15 bp, Homo sapiens
agcaggagaatcact

SEQ ID NO: 713103 - DNA, 15 bp, Homo sapiens
tcacttgaacccgga

SEQ ID NO: 713104 - DNA, 15 bp, Homo sapiens
cacttgaacccggaa

SEQ ID NO: 713105 - DNA, 15 bp, Homo sapiens
acttgaacccggaag

SEQ ID NO: 713106 - DNA, 15 bp, Homo sapiens
cttgaacccggaagg

SEQ ID NO: 713107 - DNA, 15 bp, Homo sapiens
ttgaacccggaaggc

SEQ ID NO: 713108 - DNA, 15 bp, Homo sapiens
tgaacccggaaggcg

SEQ ID NO: 713109 - DNA, 15 bp, Homo sapiens
gaacccggaaggcgg

SEQ ID NO: 713110 - DNA, 15 bp, Homo sapiens
aacccggaaggcgga

SEQ ID NO: 713111 - DNA, 15 bp, Homo sapiens
acccggaaggcggag

SEQ ID NO: 713112 - DNA, 15 bp, Homo sapiens
cccggaaggcggagg

SEQ ID NO: 713113 - DNA, 15 bp, Homo sapiens
ccggaaggcggaggt

SEQ ID NO: 713114 - DNA, 15 bp, Homo sapiens
cggaaggcggaggtt

SEQ ID NO: 713115 - DNA, 15 bp, Homo sapiens
ggaaggcggaggttg

SEQ ID NO: 713116 - DNA, 15 bp, Homo sapiens
gaaggcggaggttgc

SEQ ID NO: 713117 - DNA, 15 bp, Homo sapiens
aaggcggaggttgcc

SEQ ID NO: 713118 - DNA, 15 bp, Homo sapiens
aggcggaggttgccg

SEQ ID NO: 713119 - DNA, 15 bp, Homo sapiens
ggcggaggttgccgt

SEQ ID NO: 713120 - DNA, 15 bp, Homo sapiens
gcggaggttgccgta

SEQ ID NO: 713121 - DNA, 15 bp, Homo sapiens
cggaggttgccgtaa

SEQ ID NO: 713122 - DNA, 15 bp, Homo sapiens
ggaggttgccgtaag

SEQ ID NO: 713123 - DNA, 15 bp, Homo sapiens
gaggttgccgtaagc

SEQ ID NO: 713124 - DNA, 15 bp, Homo sapiens
aggttgccgtaagcc

SEQ ID NO: 713125 - DNA, 15 bp, Homo sapiens
ggttgccgtaagcca

SEQ ID NO: 713126 - DNA, 15 bp, Homo sapiens
gttgccgtaagccaa

SEQ ID NO: 713127 - DNA, 15 bp, Homo sapiens
ttgccgtaagccaag

SEQ ID NO: 713128 - DNA, 15 bp, Homo sapiens
tgccgtaagccaaga

SEQ ID NO: 713129 - DNA, 15 bp, Homo sapiens
gccgtaagccaagat

SEQ ID NO: 713130 - DNA, 15 bp, Homo sapiens
ccgtaagccaagatc

SEQ ID NO: 713131 - DNA, 15 bp, Homo sapiens
cgtaagccaagatcg

SEQ ID NO: 713132 - DNA, 15 bp, Homo sapiens
gtaagccaagatcgc

SEQ ID NO: 713133 - DNA, 15 bp, Homo sapiens
taagccaagatcgcg

SEQ ID NO: 713134 - DNA, 15 bp, Homo sapiens
aagccaagatcgcgc

SEQ ID NO: 713135 - DNA, 15 bp, Homo sapiens
ccaagatcgcgccat

SEQ ID NO: 713136 - DNA, 15 bp, Homo sapiens
caagatcgcgccatt

SEQ ID NO: 713137 - DNA, 15 bp, Homo sapiens
aagatcgcgccattg

SEQ ID NO: 713138 - DNA, 15 bp, Homo sapiens
agatcgcgccattgc

SEQ ID NO: 713139 - DNA, 15 bp, Homo sapiens
gatcgcgccattgcg

SEQ ID NO: 713140 - DNA, 15 bp, Homo sapiens
atcgcgccattgcgc

SEQ ID NO: 713141 - DNA, 15 bp, Homo sapiens
tcgcgccattgcgct

SEQ ID NO: 713142 - DNA, 15 bp, Homo sapiens
cgcgccattgcgctc

SEQ ID NO: 713143 - DNA, 15 bp, Homo sapiens
gcgccattgcgctcc

SEQ ID NO: 713144 - DNA, 15 bp, Homo sapiens
cgccattgcgctcca

SEQ ID NO: 713145 - DNA, 15 bp, Homo sapiens
gccattgcgctccag

SEQ ID NO: 713146 - DNA, 15 bp, Homo sapiens
ccattgcgctccagc

SEQ ID NO: 713147 - DNA, 15 bp, Homo sapiens
cattgcgctccagcc

SEQ ID NO: 713148 - DNA, 15 bp, Homo sapiens
attgcgctccagcct

SEQ ID NO: 713149 - DNA, 15 bp, Homo sapiens
ttgcgctccagcctg

SEQ ID NO: 713150 - DNA, 15 bp, Homo sapiens
tgcgctccagcctgg

SEQ ID NO: 713151 - DNA, 15 bp, Homo sapiens
gcgctccagcctggg

SEQ ID NO: 713152 - DNA, 15 bp, Homo sapiens
cgctccagcctgggc

SEQ ID NO: 713153 - DNA, 15 bp, Homo sapiens
gctccagcctgggca

SEQ ID NO: 713154 - DNA, 15 bp, Homo sapiens
ctccagcctgggcaa

SEQ ID NO: 713155 - DNA, 15 bp, Homo sapiens
tccagcctgggcaac

SEQ ID NO: 713156 - DNA, 15 bp, Homo sapiens
ccagcctgggcaaca

SEQ ID NO: 713157 - DNA, 15 bp, Homo sapiens
cagcctgggcaacaa

SEQ ID NO: 713158 - DNA, 15 bp, Homo sapiens
agcctgggcaacaag

SEQ ID NO: 713159 - DNA, 15 bp, Homo sapiens
gcctgggcaacaaga

SEQ ID NO: 713160 - DNA, 15 bp, Homo sapiens
cctgggcaacaagag

SEQ ID NO: 713161 - DNA, 15 bp, Homo sapiens
ctgggcaacaagagt

SEQ ID NO: 713162 - DNA, 15 bp, Homo sapiens
tgggcaacaagagtg

SEQ ID NO: 713163 - DNA, 15 bp, Homo sapiens
gggcaacaagagtga

SEQ ID NO: 713164 - DNA, 15 bp, Homo sapiens
ggcaacaagagtgaa

SEQ ID NO: 713165 - DNA, 15 bp, Homo sapiens
gcaacaagagtgaaa

SEQ ID NO: 713166 - DNA, 15 bp, Homo sapiens
caacaagagtgaaac

SEQ ID NO: 713167 - DNA, 15 bp, Homo sapiens
aacaagagtgaaact

SEQ ID NO: 713168 - DNA, 15 bp, Homo sapiens
caagagtgaaactcc

SEQ ID NO: 713169 - DNA, 15 bp, Homo sapiens
aagagtgaaactcca

SEQ ID NO: 713170 - DNA, 15 bp, Homo sapiens
agagtgaaactccat

SEQ ID NO: 713171 - DNA, 15 bp, Homo sapiens
gagtgaaactccatc

SEQ ID NO: 713172 - DNA, 15 bp, Homo sapiens
agtgaaactccatct

SEQ ID NO: 713173 - DNA, 15 bp, Homo sapiens
gtgaaactccatctc

SEQ ID NO: 713174 - DNA, 15 bp, Homo sapiens
tgaaactccatctca

SEQ ID NO: 713175 - DNA, 15 bp, Homo sapiens
gaaactccatctcaa

SEQ ID NO: 713176 - DNA, 15 bp, Homo sapiens
aaactccatctcaaa

SEQ ID NO: 713177 - DNA, 15 bp, Homo sapiens
aactccatctcaaaa

SEQ ID NO: 713178 - DNA, 15 bp, Homo sapiens
ctccatctcaaaaac

SEQ ID NO: 713179 - DNA, 15 bp, Homo sapiens
tccatctcaaaaaca

SEQ ID NO: 713180 - DNA, 15 bp, Homo sapiens
ccatctcaaaaacaa

SEQ ID NO: 713181 - DNA, 15 bp, Homo sapiens
catctcaaaaacaaa

SEQ ID NO: 713182 - DNA, 15 bp, Homo sapiens
atctcaaaaacaaaa

SEQ ID NO: 713183 - DNA, 15 bp, Homo sapiens
tctcaaaaacaaaac

SEQ ID NO: 713184 - DNA, 15 bp, Homo sapiens
ctcaaaaacaaaaca

SEQ ID NO: 713185 - DNA, 15 bp, Homo sapiens
tcaaaaacaaaacaa

SEQ ID NO: 713186 - DNA, 15 bp, Homo sapiens
caaaaacaaaacaaa

SEQ ID NO: 713187 - DNA, 15 bp, Homo sapiens
aaacaaaacaaaacc

SEQ ID NO: 713188 - DNA, 15 bp, Homo sapiens
aacaaaacaaaacca

SEQ ID NO: 713189 - DNA, 15 bp, Homo sapiens
acaaaacaaaaccaa

SEQ ID NO: 713190 - DNA, 15 bp, Homo sapiens
caaaacaaaaccaac

SEQ ID NO: 713191 - DNA, 15 bp, Homo sapiens
aaaacaaaaccaaca

SEQ ID NO: 713192 - DNA, 15 bp, Homo sapiens
aaacaaaaccaacaa

SEQ ID NO: 713193 - DNA, 15 bp, Homo sapiens
aacaaaaccaacaac

SEQ ID NO: 713194 - DNA, 15 bp, Homo sapiens
acaaaaccaacaact

SEQ ID NO: 713195 - DNA, 15 bp, Homo sapiens
caaaaccaacaactc

SEQ ID NO: 713196 - DNA, 15 bp, Homo sapiens
aaaaccaacaactca

SEQ ID NO: 713197 - DNA, 15 bp, Homo sapiens
aaaccaacaactcag

SEQ ID NO: 713198 - DNA, 15 bp, Homo sapiens
aaccaacaactcaga

SEQ ID NO: 713199 - DNA, 15 bp, Homo sapiens
accaacaactcagaa

SEQ ID NO: 713200 - DNA, 15 bp, Homo sapiens
ccaacaactcagaag

SEQ ID NO: 713201 - DNA, 15 bp, Homo sapiens
caacaactcagaagg

SEQ ID NO: 713202 - DNA, 15 bp, Homo sapiens
aacaactcagaagga

SEQ ID NO: 713203 - DNA, 15 bp, Homo sapiens
acaactcagaaggag

SEQ ID NO: 713204 - DNA, 15 bp, Homo sapiens
caactcagaaggagg

SEQ ID NO: 713205 - DNA, 15 bp, Homo sapiens
aactcagaaggaggc

SEQ ID NO: 713206 - DNA, 15 bp, Homo sapiens
actcagaaggaggca

SEQ ID NO: 713207 - DNA, 15 bp, Homo sapiens
ctcagaaggaggcat

SEQ ID NO: 713208 - DNA, 15 bp, Homo sapiens
tcagaaggaggcata

SEQ ID NO: 713209 - DNA, 15 bp, Homo sapiens
cagaaggaggcatat

SEQ ID NO: 713210 - DNA, 15 bp, Homo sapiens
agaaggaggcatatg

SEQ ID NO: 713211 - DNA, 15 bp, Homo sapiens
gaaggaggcatatgt

SEQ ID NO: 713212 - DNA, 15 bp, Homo sapiens
aaggaggcatatgtg

SEQ ID NO: 713213 - DNA, 15 bp, Homo sapiens
aggaggcatatgtgt

SEQ ID NO: 713214 - DNA, 15 bp, Homo sapiens
ggaggcatatgtgtt

SEQ ID NO: 713215 - DNA, 15 bp, Homo sapiens
gaggcatatgtgtta

SEQ ID NO: 713216 - DNA, 15 bp, Homo sapiens
aggcatatgtgttat

SEQ ID NO: 713217 - DNA, 15 bp, Homo sapiens
ggcatatgtgttata

SEQ ID NO: 713218 - DNA, 15 bp, Homo sapiens
gcatatgtgttataa

SEQ ID NO: 713219 - DNA, 15 bp, Homo sapiens
catatgtgttataaa

SEQ ID NO: 713220 - DNA, 15 bp, Homo sapiens
atatgtgttataaag

SEQ ID NO: 713221 - DNA, 15 bp, Homo sapiens
tatgtgttataaagt

SEQ ID NO: 713222 - DNA, 15 bp, Homo sapiens
atgtgttataaagtc

SEQ ID NO: 713223 - DNA, 15 bp, Homo sapiens
tgtgttataaagtct

SEQ ID NO: 713224 - DNA, 15 bp, Homo sapiens
gtgttataaagtctt

SEQ ID NO: 713225 - DNA, 15 bp, Homo sapiens
tgttataaagtcttt

SEQ ID NO: 713226 - DNA, 15 bp, Homo sapiens
gttataaagtcttta

SEQ ID NO: 713227 - DNA, 15 bp, Homo sapiens
ttataaagtctttac

SEQ ID NO: 713228 - DNA, 15 bp, Homo sapiens
tataaagtctttact

SEQ ID NO: 713229 - DNA, 15 bp, Homo sapiens
ataaagtctttacta

SEQ ID NO: 713230 - DNA, 15 bp, Homo sapiens
taaagtctttactac

SEQ ID NO: 713231 - DNA, 15 bp, Homo sapiens
aaagtctttactaca

SEQ ID NO: 713232 - DNA, 15 bp, Homo sapiens
aagtctttactacaa

SEQ ID NO: 713233 - DNA, 15 bp, Homo sapiens
agtctttactacaac

SEQ ID NO: 713234 - DNA, 15 bp, Homo sapiens
gtctttactacaact

SEQ ID NO: 713235 - DNA, 15 bp, Homo sapiens
tctttactacaactt

SEQ ID NO: 713236 - DNA, 15 bp, Homo sapiens
ctttactacaacttt

SEQ ID NO: 713237 - DNA, 15 bp, Homo sapiens
tttactacaactttg

SEQ ID NO: 713238 - DNA, 15 bp, Homo sapiens
ttactacaactttga

SEQ ID NO: 713239 - DNA, 15 bp, Homo sapiens
tactacaactttgat

SEQ ID NO: 713240 - DNA, 15 bp, Homo sapiens
actacaactttgatt

SEQ ID NO: 713241 - DNA, 15 bp, Homo sapiens
ctacaactttgattt

SEQ ID NO: 713242 - DNA, 15 bp, Homo sapiens
tacaactttgatttt

SEQ ID NO: 713243 - DNA, 15 bp, Homo sapiens
acaactttgatttta

SEQ ID NO: 713244 - DNA, 15 bp, Homo sapiens
caactttgattttat

SEQ ID NO: 713245 - DNA, 15 bp, Homo sapiens
aactttgattttatt

SEQ ID NO: 713246 - DNA, 15 bp, Homo sapiens
actttgattttatta

SEQ ID NO: 713247 - DNA, 15 bp, Homo sapiens
ctttgattttattag

SEQ ID NO: 713248 - DNA, 15 bp, Homo sapiens
tttgattttattagt

SEQ ID NO: 713249 - DNA, 15 bp, Homo sapiens
ttgattttattagtg

SEQ ID NO: 713250 - DNA, 15 bp, Homo sapiens
tgattttattagtgg

SEQ ID NO: 713251 - DNA, 15 bp, Homo sapiens
gattttattagtggt

SEQ ID NO: 713252 - DNA, 15 bp, Homo sapiens
attttattagtggtt

SEQ ID NO: 713253 - DNA, 15 bp, Homo sapiens
ttttattagtggttg

SEQ ID NO: 713254 - DNA, 15 bp, Homo sapiens
tttattagtggttgg

SEQ ID NO: 713255 - DNA, 15 bp, Homo sapiens
ttattagtggttggt

SEQ ID NO: 713256 - DNA, 15 bp, Homo sapiens
tattagtggttggtt

SEQ ID NO: 713257 - DNA, 15 bp, Homo sapiens
attagtggttggtta

SEQ ID NO: 713258 - DNA, 15 bp, Homo sapiens
ttagtggttggttac

SEQ ID NO: 713259 - DNA, 15 bp, Homo sapiens
tagtggttggttact

SEQ ID NO: 713260 - DNA, 15 bp, Homo sapiens
agtggttggttactg

SEQ ID NO: 713261 - DNA, 15 bp, Homo sapiens
gtggttggttactga

SEQ ID NO: 713262 - DNA, 15 bp, Homo sapiens
tggttggttactgac

SEQ ID NO: 713263 - DNA, 15 bp, Homo sapiens
ggttggttactgact

SEQ ID NO: 713264 - DNA, 15 bp, Homo sapiens
gttggttactgactc

SEQ ID NO: 713265 - DNA, 15 bp, Homo sapiens
ttggttactgactct

SEQ ID NO: 713266 - DNA, 15 bp, Homo sapiens
tggttactgactctg

SEQ ID NO: 713267 - DNA, 15 bp, Homo sapiens
ggttactgactctgc

SEQ ID NO: 713268 - DNA, 15 bp, Homo sapiens
gttactgactctgcc

SEQ ID NO: 713269 - DNA, 15 bp, Homo sapiens
ttactgactctgcca

SEQ ID NO: 713270 - DNA, 15 bp, Homo sapiens
tactgactctgccaa

SEQ ID NO: 713271 - DNA, 15 bp, Homo sapiens
actgactctgccaag

SEQ ID NO: 713272 - DNA, 15 bp, Homo sapiens
ctgactctgccaaga

SEQ ID NO: 713273 - DNA, 15 bp, Homo sapiens
tgactctgccaagag

SEQ ID NO: 713274 - DNA, 15 bp, Homo sapiens
gactctgccaagagt

SEQ ID NO: 713275 - DNA, 15 bp, Homo sapiens
actctgccaagagta

SEQ ID NO: 713276 - DNA, 15 bp, Homo sapiens
ctctgccaagagtac

SEQ ID NO: 713277 - DNA, 15 bp, Homo sapiens
tctgccaagagtaca

SEQ ID NO: 713278 - DNA, 15 bp, Homo sapiens
ctgccaagagtacag

SEQ ID NO: 713279 - DNA, 15 bp, Homo sapiens
tgccaagagtacaga

SEQ ID NO: 713280 - DNA, 15 bp, Homo sapiens
gccaagagtacagaa

SEQ ID NO: 713281 - DNA, 15 bp, Homo sapiens
ccaagagtacagaat

SEQ ID NO: 713282 - DNA, 15 bp, Homo sapiens
caagagtacagaatg

SEQ ID NO: 713283 - DNA, 15 bp, Homo sapiens
aagagtacagaatga

SEQ ID NO: 713284 - DNA, 15 bp, Homo sapiens
agagtacagaatgaa

SEQ ID NO: 713285 - DNA, 15 bp, Homo sapiens
gagtacagaatgaag

SEQ ID NO: 713286 - DNA, 15 bp, Homo sapiens
agtacagaatgaagg

SEQ ID NO: 713287 - DNA, 15 bp, Homo sapiens
gtacagaatgaaggg

SEQ ID NO: 713288 - DNA, 15 bp, Homo sapiens
tacagaatgaagggc

SEQ ID NO: 713289 - DNA, 15 bp, Homo sapiens
acagaatgaagggca

SEQ ID NO: 713290 - DNA, 15 bp, Homo sapiens
cagaatgaagggcag

SEQ ID NO: 713291 - DNA, 15 bp, Homo sapiens
agaatgaagggcaga

SEQ ID NO: 713292 - DNA, 15 bp, Homo sapiens
gaatgaagggcagag

SEQ ID NO: 713293 - DNA, 15 bp, Homo sapiens
aatgaagggcagaga

SEQ ID NO: 713294 - DNA, 15 bp, Homo sapiens
atgaagggcagagag

SEQ ID NO: 713295 - DNA, 15 bp, Homo sapiens
tgaagggcagagagt

SEQ ID NO: 713296 - DNA, 15 bp, Homo sapiens
gaagggcagagagta

SEQ ID NO: 713297 - DNA, 15 bp, Homo sapiens
aagggcagagagtaa

SEQ ID NO: 713298 - DNA, 15 bp, Homo sapiens
agggcagagagtaag

SEQ ID NO: 713299 - DNA, 15 bp, Homo sapiens
gggcagagagtaagg

SEQ ID NO: 713300 - DNA, 15 bp, Homo sapiens
ggcagagagtaagga

SEQ ID NO: 713301 - DNA, 15 bp, Homo sapiens
gcagagagtaaggac

SEQ ID NO: 713302 - DNA, 15 bp, Homo sapiens
cagagagtaaggact

SEQ ID NO: 713303 - DNA, 15 bp, Homo sapiens
agagagtaaggactg

SEQ ID NO: 713304 - DNA, 15 bp, Homo sapiens
gagagtaaggactgg

SEQ ID NO: 713305 - DNA, 15 bp, Homo sapiens
agagtaaggactgga

SEQ ID NO: 713306 - DNA, 15 bp, Homo sapiens
gagtaaggactggaa

SEQ ID NO: 713307 - DNA, 15 bp, Homo sapiens
agtaaggactggaaa

SEQ ID NO: 713308 - DNA, 15 bp, Homo sapiens
gtaaggactggaaaa

SEQ ID NO: 713309 - DNA, 15 bp, Homo sapiens
taaggactggaaaac

SEQ ID NO: 713310 - DNA, 15 bp, Homo sapiens
aaggactggaaaact

SEQ ID NO: 713311 - DNA, 15 bp, Homo sapiens
aggactggaaaactg

SEQ ID NO: 713312 - DNA, 15 bp, Homo sapiens
ggactggaaaactgg

SEQ ID NO: 713313 - DNA, 15 bp, Homo sapiens
gactggaaaactggc

SEQ ID NO: 713314 - DNA, 15 bp, Homo sapiens
actggaaaactggca

SEQ ID NO: 713315 - DNA, 15 bp, Homo sapiens
ctggaaaactggcag

SEQ ID NO: 713316 - DNA, 15 bp, Homo sapiens
tggaaaactggcagg

SEQ ID NO: 713317 - DNA, 15 bp, Homo sapiens
ggaaaactggcagga

SEQ ID NO: 713318 - DNA, 15 bp, Homo sapiens
gaaaactggcaggaa

SEQ ID NO: 713319 - DNA, 15 bp, Homo sapiens
aaaactggcaggaaa

SEQ ID NO: 713320 - DNA, 15 bp, Homo sapiens
aaactggcaggaaac

SEQ ID NO: 713321 - DNA, 15 bp, Homo sapiens
aactggcaggaaaca

SEQ ID NO: 713322 - DNA, 15 bp, Homo sapiens
actggcaggaaacac

SEQ ID NO: 713323 - DNA, 15 bp, Homo sapiens
ctggcaggaaacaca

SEQ ID NO: 713324 - DNA, 15 bp, Homo sapiens
tggcaggaaacacac

SEQ ID NO: 713325 - DNA, 15 bp, Homo sapiens
ggcaggaaacacact

SEQ ID NO: 713326 - DNA, 15 bp, Homo sapiens
gcaggaaacacactg

SEQ ID NO: 713327 - DNA, 15 bp, Homo sapiens
caggaaacacactga

SEQ ID NO: 713328 - DNA, 15 bp, Homo sapiens
aggaaacacactgac

SEQ ID NO: 713329 - DNA, 15 bp, Homo sapiens
ggaaacacactgaca

SEQ ID NO: 713330 - DNA, 15 bp, Homo sapiens
gaaacacactgacag

SEQ ID NO: 713331 - DNA, 15 bp, Homo sapiens
aaacacactgacagc

SEQ ID NO: 713332 - DNA, 15 bp, Homo sapiens
aacacactgacagcc

SEQ ID NO: 713333 - DNA, 15 bp, Homo sapiens
acacactgacagccg

SEQ ID NO: 713334 - DNA, 15 bp, Homo sapiens
cacactgacagccgt

SEQ ID NO: 713335 - DNA, 15 bp, Homo sapiens
acactgacagccgtc

SEQ ID NO: 713336 - DNA, 15 bp, Homo sapiens
cactgacagccgtca

SEQ ID NO: 713337 - DNA, 15 bp, Homo sapiens
actgacagccgtcat

SEQ ID NO: 713338 - DNA, 15 bp, Homo sapiens
ctgacagccgtcatc

SEQ ID NO: 713339 - DNA, 15 bp, Homo sapiens
tgacagccgtcatcc

SEQ ID NO: 713340 - DNA, 15 bp, Homo sapiens
gacagccgtcatccc

SEQ ID NO: 713341 - DNA, 15 bp, Homo sapiens
acagccgtcatccct

SEQ ID NO: 713342 - DNA, 15 bp, Homo sapiens
cagccgtcatccctg

SEQ ID NO: 713343 - DNA, 15 bp, Homo sapiens
agccgtcatccctgg

SEQ ID NO: 713344 - DNA, 15 bp, Homo sapiens
gccgtcatccctgga

SEQ ID NO: 713345 - DNA, 15 bp, Homo sapiens
ccgtcatccctggag

SEQ ID NO: 713346 - DNA, 15 bp, Homo sapiens
cgtcatccctggagg

SEQ ID NO: 713347 - DNA, 15 bp, Homo sapiens
gtcatccctggagga

SEQ ID NO: 713348 - DNA, 15 bp, Homo sapiens
tcatccctggaggaa

SEQ ID NO: 713349 - DNA, 15 bp, Homo sapiens
catccctggaggaaa

SEQ ID NO: 713350 - DNA, 15 bp, Homo sapiens
atccctggaggaaac

SEQ ID NO: 713351 - DNA, 15 bp, Homo sapiens
tccctggaggaaact

SEQ ID NO: 713352 - DNA, 15 bp, Homo sapiens
ccctggaggaaactg

SEQ ID NO: 713353 - DNA, 15 bp, Homo sapiens
cctggaggaaactgc

SEQ ID NO: 713354 - DNA, 15 bp, Homo sapiens
ctggaggaaactgct

SEQ ID NO: 713355 - DNA, 15 bp, Homo sapiens
tggaggaaactgctc

SEQ ID NO: 713356 - DNA, 15 bp, Homo sapiens
ggaggaaactgctca

SEQ ID NO: 713357 - DNA, 15 bp, Homo sapiens
gaggaaactgctcaa

SEQ ID NO: 713358 - DNA, 15 bp, Homo sapiens
aggaaactgctcaat

SEQ ID NO: 713359 - DNA, 15 bp, Homo sapiens
ggaaactgctcaata

SEQ ID NO: 713360 - DNA, 15 bp, Homo sapiens
gaaactgctcaataa

SEQ ID NO: 713361 - DNA, 15 bp, Homo sapiens
aaactgctcaataaa

SEQ ID NO: 713362 - DNA, 15 bp, Homo sapiens
aactgctcaataaaa

SEQ ID NO: 713363 - DNA, 15 bp, Homo sapiens
actgctcaataaaac

SEQ ID NO: 713364 - DNA, 15 bp, Homo sapiens
ctgctcaataaaacg

SEQ ID NO: 713365 - DNA, 15 bp, Homo sapiens
tgctcaataaaacgg

SEQ ID NO: 713366 - DNA, 15 bp, Homo sapiens
gctcaataaaacggc

SEQ ID NO: 713367 - DNA, 15 bp, Homo sapiens
ctcaataaaacggct

SEQ ID NO: 713368 - DNA, 15 bp, Homo sapiens
tcaataaaacggctc

SEQ ID NO: 713369 - DNA, 15 bp, Homo sapiens
caataaaacggctcc

SEQ ID NO: 713370 - DNA, 15 bp, Homo sapiens
aataaaacggctcca

SEQ ID NO: 713371 - DNA, 15 bp, Homo sapiens
ataaaacggctccat

SEQ ID NO: 713372 - DNA, 15 bp, Homo sapiens
taaaacggctccata

SEQ ID NO: 713373 - DNA, 15 bp, Homo sapiens
aaaacggctccatat

SEQ ID NO: 713374 - DNA, 15 bp, Homo sapiens
aaacggctccatatt

SEQ ID NO: 713375 - DNA, 15 bp, Homo sapiens
aacggctccatattt

SEQ ID NO: 713376 - DNA, 15 bp, Homo sapiens
acggctccatattta

SEQ ID NO: 713377 - DNA, 15 bp, Homo sapiens
cggctccatatttac

SEQ ID NO: 713378 - DNA, 15 bp, Homo sapiens
ggctccatatttact

SEQ ID NO: 713379 - DNA, 15 bp, Homo sapiens
gctccatatttactt

SEQ ID NO: 713380 - DNA, 15 bp, Homo sapiens
ctccatatttacttc

SEQ ID NO: 713381 - DNA, 15 bp, Homo sapiens
tccatatttacttct

SEQ ID NO: 713382 - DNA, 15 bp, Homo sapiens
ccatatttacttctc

SEQ ID NO: 713383 - DNA, 15 bp, Homo sapiens
catatttacttctct

SEQ ID NO: 713384 - DNA, 15 bp, Homo sapiens
atatttacttctctg

SEQ ID NO: 713385 - DNA, 15 bp, Homo sapiens
tatttacttctctgg

SEQ ID NO: 713386 - DNA, 15 bp, Homo sapiens
atttacttctctggt

SEQ ID NO: 713387 - DNA, 15 bp, Homo sapiens
tttacttctctggtc

SEQ ID NO: 713388 - DNA, 15 bp, Homo sapiens
ttacttctctggtca

SEQ ID NO: 713389 - DNA, 15 bp, Homo sapiens
tacttctctggtcac

SEQ ID NO: 713390 - DNA, 15 bp, Homo sapiens
acttctctggtcacg

SEQ ID NO: 713391 - DNA, 15 bp, Homo sapiens
cttctctggtcacgg

SEQ ID NO: 713392 - DNA, 15 bp, Homo sapiens
ttctctggtcacggt

SEQ ID NO: 713393 - DNA, 15 bp, Homo sapiens
tctctggtcacggtt

SEQ ID NO: 713394 - DNA, 15 bp, Homo sapiens
ctctggtcacggttc

SEQ ID NO: 713395 - DNA, 15 bp, Homo sapiens
tctggtcacggttca

SEQ ID NO: 713396 - DNA, 15 bp, Homo sapiens
ctggtcacggttcat

SEQ ID NO: 713397 - DNA, 15 bp, Homo sapiens
tggtcacggttcata

SEQ ID NO: 713398 - DNA, 15 bp, Homo sapiens
ggtcacggttcatac

SEQ ID NO: 713399 - DNA, 15 bp, Homo sapiens
gtcacggttcatact

SEQ ID NO: 713400 - DNA, 15 bp, Homo sapiens
tcacggttcatactc

SEQ ID NO: 713401 - DNA, 15 bp, Homo sapiens
cacggttcatactcc

SEQ ID NO: 713402 - DNA, 15 bp, Homo sapiens
acggttcatactcca

SEQ ID NO: 713403 - DNA, 15 bp, Homo sapiens
cggttcatactccac

SEQ ID NO: 713404 - DNA, 15 bp, Homo sapiens
ggttcatactccacg

SEQ ID NO: 713405 - DNA, 15 bp, Homo sapiens
gttcatactccacga

SEQ ID NO: 713406 - DNA, 15 bp, Homo sapiens
ttcatactccacgat

SEQ ID NO: 713407 - DNA, 15 bp, Homo sapiens
tcatactccacgatt

SEQ ID NO: 713408 - DNA, 15 bp, Homo sapiens
catactccacgattt

SEQ ID NO: 713409 - DNA, 15 bp, Homo sapiens
atactccacgatttt

SEQ ID NO: 713410 - DNA, 15 bp, Homo sapiens
tactccacgatttta

SEQ ID NO: 713411 - DNA, 15 bp, Homo sapiens
actccacgattttaa

SEQ ID NO: 713412 - DNA, 15 bp, Homo sapiens
ctccacgattttaac

SEQ ID NO: 713413 - DNA, 15 bp, Homo sapiens
tccacgattttaaca

SEQ ID NO: 713414 - DNA, 15 bp, Homo sapiens
ccacgattttaacaa

SEQ ID NO: 713415 - DNA, 15 bp, Homo sapiens
cacgattttaacaaa

SEQ ID NO: 713416 - DNA, 15 bp, Homo sapiens
acgattttaacaaag

SEQ ID NO: 713417 - DNA, 15 bp, Homo sapiens
cgattttaacaaagg

SEQ ID NO: 713418 - DNA, 15 bp, Homo sapiens
gattttaacaaagga

SEQ ID NO: 713419 - DNA, 15 bp, Homo sapiens
attttaacaaaggag

SEQ ID NO: 713420 - DNA, 15 bp, Homo sapiens
ttttaacaaaggagt

SEQ ID NO: 713421 - DNA, 15 bp, Homo sapiens
tttaacaaaggagtc

SEQ ID NO: 713422 - DNA, 15 bp, Homo sapiens
ttaacaaaggagtcg

SEQ ID NO: 713423 - DNA, 15 bp, Homo sapiens
taacaaaggagtcga

SEQ ID NO: 713424 - DNA, 15 bp, Homo sapiens
aacaaaggagtcgag

SEQ ID NO: 713425 - DNA, 15 bp, Homo sapiens
acaaaggagtcgagg

SEQ ID NO: 713426 - DNA, 15 bp, Homo sapiens
caaaggagtcgagga

SEQ ID NO: 713427 - DNA, 15 bp, Homo sapiens
aaaggagtcgaggaa

SEQ ID NO: 713428 - DNA, 15 bp, Homo sapiens
aaggagtcgaggaag

SEQ ID NO: 713429 - DNA, 15 bp, Homo sapiens
aggagtcgaggaagc

SEQ ID NO: 713430 - DNA, 15 bp, Homo sapiens
ggagtcgaggaagct

SEQ ID NO: 713431 - DNA, 15 bp, Homo sapiens
gagtcgaggaagcta

SEQ ID NO: 713432 - DNA, 15 bp, Homo sapiens
agtcgaggaagctag

SEQ ID NO: 713433 - DNA, 15 bp, Homo sapiens
gtcgaggaagctaga

SEQ ID NO: 713434 - DNA, 15 bp, Homo sapiens
tcgaggaagctagat

SEQ ID NO: 713435 - DNA, 15 bp, Homo sapiens
cgaggaagctagata

SEQ ID NO: 713436 - DNA, 15 bp, Homo sapiens
gaggaagctagatac

SEQ ID NO: 713437 - DNA, 15 bp, Homo sapiens
aggaagctagatact

SEQ ID NO: 713438 - DNA, 15 bp, Homo sapiens
ggaagctagatactg

SEQ ID NO: 713439 - DNA, 15 bp, Homo sapiens
gaagctagatactgt

SEQ ID NO: 713440 - DNA, 15 bp, Homo sapiens
aagctagatactgta

SEQ ID NO: 713441 - DNA, 15 bp, Homo sapiens
agctagatactgtaa

SEQ ID NO: 713442 - DNA, 15 bp, Homo sapiens
gctagatactgtaag

SEQ ID NO: 713443 - DNA, 15 bp, Homo sapiens
ctagatactgtaagt

SEQ ID NO: 713444 - DNA, 15 bp, Homo sapiens
tagatactgtaagtg

SEQ ID NO: 713445 - DNA, 15 bp, Homo sapiens
agatactgtaagtgg

SEQ ID NO: 713446 - DNA, 15 bp, Homo sapiens
gatactgtaagtgga

SEQ ID NO: 713447 - DNA, 15 bp, Homo sapiens
atactgtaagtggaa

SEQ ID NO: 713448 - DNA, 15 bp, Homo sapiens
tactgtaagtggaac

SEQ ID NO: 713449 - DNA, 15 bp, Homo sapiens
actgtaagtggaacg

SEQ ID NO: 713450 - DNA, 15 bp, Homo sapiens
ctgtaagtggaacgg

SEQ ID NO: 713451 - DNA, 15 bp, Homo sapiens
tgtaagtggaacggt

SEQ ID NO: 713452 - DNA, 15 bp, Homo sapiens
gtaagtggaacggtg

SEQ ID NO: 713453 - DNA, 15 bp, Homo sapiens
taagtggaacggtgt

SEQ ID NO: 713454 - DNA, 15 bp, Homo sapiens
aagtggaacggtgtg

SEQ ID NO: 713455 - DNA, 15 bp, Homo sapiens
agtggaacggtgtgt

SEQ ID NO: 713456 - DNA, 15 bp, Homo sapiens
gtggaacggtgtgtc

SEQ ID NO: 713457 - DNA, 15 bp, Homo sapiens
tggaacggtgtgtct

SEQ ID NO: 713458 - DNA, 15 bp, Homo sapiens
ggaacggtgtgtctc

SEQ ID NO: 713459 - DNA, 15 bp, Homo sapiens
gaacggtgtgtctct

SEQ ID NO: 713460 - DNA, 15 bp, Homo sapiens
aacggtgtgtctctg

SEQ ID NO: 713461 - DNA, 15 bp, Homo sapiens
acggtgtgtctctgg

SEQ ID NO: 713462 - DNA, 15 bp, Homo sapiens
cggtgtgtctctgga

SEQ ID NO: 713463 - DNA, 15 bp, Homo sapiens
ggtgtgtctctggag

SEQ ID NO: 713464 - DNA, 15 bp, Homo sapiens
gtgtgtctctggagg

SEQ ID NO: 713465 - DNA, 15 bp, Homo sapiens
tgtgtctctggaggt

SEQ ID NO: 713466 - DNA, 15 bp, Homo sapiens
gtgtctctggaggta

SEQ ID NO: 713467 - DNA, 15 bp, Homo sapiens
tgtctctggaggtaa

SEQ ID NO: 713468 - DNA, 15 bp, Homo sapiens
gtctctggaggtaag

SEQ ID NO: 713469 - DNA, 15 bp, Homo sapiens
tctctggaggtaagc

SEQ ID NO: 713470 - DNA, 15 bp, Homo sapiens
ctctggaggtaagca

SEQ ID NO: 713471 - DNA, 15 bp, Homo sapiens
tctggaggtaagcag

SEQ ID NO: 713472 - DNA, 15 bp, Homo sapiens
ctggaggtaagcagg

SEQ ID NO: 713473 - DNA, 15 bp, Homo sapiens
tggaggtaagcaggc

SEQ ID NO: 713474 - DNA, 15 bp, Homo sapiens
ggaggtaagcaggct

SEQ ID NO: 713475 - DNA, 15 bp, Homo sapiens
gaggtaagcaggctt

SEQ ID NO: 713476 - DNA, 15 bp, Homo sapiens
aggtaagcaggcttg

SEQ ID NO: 713477 - DNA, 15 bp, Homo sapiens
ggtaagcaggcttgc

SEQ ID NO: 713478 - DNA, 15 bp, Homo sapiens
gtaagcaggcttgct

SEQ ID NO: 713479 - DNA, 15 bp, Homo sapiens
taagcaggcttgctg

SEQ ID NO: 713480 - DNA, 15 bp, Homo sapiens
aagcaggcttgctga

SEQ ID NO: 713481 - DNA, 15 bp, Homo sapiens
agcaggcttgctgat

SEQ ID NO: 713482 - DNA, 15 bp, Homo sapiens
gcaggcttgctgatt

SEQ ID NO: 713483 - DNA, 15 bp, Homo sapiens
caggcttgctgattt

SEQ ID NO: 713484 - DNA, 15 bp, Homo sapiens
aggcttgctgatttc

SEQ ID NO: 713485 - DNA, 15 bp, Homo sapiens
ggcttgctgatttct

SEQ ID NO: 713486 - DNA, 15 bp, Homo sapiens
gcttgctgatttctt

SEQ ID NO: 713487 - DNA, 15 bp, Homo sapiens
cttgctgatttcttg

SEQ ID NO: 713488 - DNA, 15 bp, Homo sapiens
ttgctgatttcttgt

SEQ ID NO: 713489 - DNA, 15 bp, Homo sapiens
tgctgatttcttgtt

SEQ ID NO: 713490 - DNA, 15 bp, Homo sapiens
gctgatttcttgttt

SEQ ID NO: 713491 - DNA, 15 bp, Homo sapiens
ctgatttcttgtttt

SEQ ID NO: 713492 - DNA, 15 bp, Homo sapiens
tgatttcttgtttta

SEQ ID NO: 713493 - DNA, 15 bp, Homo sapiens
gatttcttgttttat

SEQ ID NO: 713494 - DNA, 15 bp, Homo sapiens
atttcttgttttata

SEQ ID NO: 713495 - DNA, 15 bp, Homo sapiens
tttcttgttttataa

SEQ ID NO: 713496 - DNA, 15 bp, Homo sapiens
ttcttgttttataat

SEQ ID NO: 713497 - DNA, 15 bp, Homo sapiens
tcttgttttataatt

SEQ ID NO: 713498 - DNA, 15 bp, Homo sapiens
cttgttttataattc

SEQ ID NO: 713499 - DNA, 15 bp, Homo sapiens
ttgttttataattct

SEQ ID NO: 713500 - DNA, 15 bp, Homo sapiens
tgttttataattctt

SEQ ID NO: 713501 - DNA, 15 bp, Homo sapiens
gttttataattcttt

SEQ ID NO: 713502 - DNA, 15 bp, Homo sapiens
ttttataattctttt

SEQ ID NO: 713503 - DNA, 15 bp, Homo sapiens
tttataattcttttt

SEQ ID NO: 713504 - DNA, 15 bp, Homo sapiens
ttataattctttttt

SEQ ID NO: 713505 - DNA, 15 bp, Homo sapiens
tataattctttttta

SEQ ID NO: 713506 - DNA, 15 bp, Homo sapiens
ataattcttttttaa

SEQ ID NO: 713507 - DNA, 15 bp, Homo sapiens
taattcttttttaat

SEQ ID NO: 713508 - DNA, 15 bp, Homo sapiens
aattcttttttaatt

SEQ ID NO: 713509 - DNA, 15 bp, Homo sapiens
attcttttttaatta

SEQ ID NO: 713510 - DNA, 15 bp, Homo sapiens
ttcttttttaattac

SEQ ID NO: 713511 - DNA, 15 bp, Homo sapiens
tcttttttaattaca

SEQ ID NO: 713512 - DNA, 15 bp, Homo sapiens
cttttttaattacaa

SEQ ID NO: 713513 - DNA, 15 bp, Homo sapiens
ttttttaattacaat

SEQ ID NO: 713514 - DNA, 15 bp, Homo sapiens
tttttaattacaatg

SEQ ID NO: 713515 - DNA, 15 bp, Homo sapiens
ttttaattacaatgt

SEQ ID NO: 713516 - DNA, 15 bp, Homo sapiens
tttaattacaatgta

SEQ ID NO: 713517 - DNA, 15 bp, Homo sapiens
ttaattacaatgtaa

SEQ ID NO: 713518 - DNA, 15 bp, Homo sapiens
taattacaatgtaac

SEQ ID NO: 713519 - DNA, 15 bp, Homo sapiens
aattacaatgtaact

SEQ ID NO: 713520 - DNA, 15 bp, Homo sapiens
attacaatgtaacta

SEQ ID NO: 713521 - DNA, 15 bp, Homo sapiens
ttacaatgtaactac

SEQ ID NO: 713522 - DNA, 15 bp, Homo sapiens
tacaatgtaactact

SEQ ID NO: 713523 - DNA, 15 bp, Homo sapiens
acaatgtaactacta

SEQ ID NO: 713524 - DNA, 15 bp, Homo sapiens
caatgtaactactaa

SEQ ID NO: 713525 - DNA, 15 bp, Homo sapiens
aatgtaactactaag

SEQ ID NO: 713526 - DNA, 15 bp, Homo sapiens
atgtaactactaaga

SEQ ID NO: 713527 - DNA, 15 bp, Homo sapiens
tgtaactactaagag

SEQ ID NO: 713528 - DNA, 15 bp, Homo sapiens
gtaactactaagagc

SEQ ID NO: 713529 - DNA, 15 bp, Homo sapiens
taactactaagagct

SEQ ID NO: 713530 - DNA, 15 bp, Homo sapiens
aactactaagagctt

SEQ ID NO: 713531 - DNA, 15 bp, Homo sapiens
actactaagagcttc

SEQ ID NO: 713532 - DNA, 15 bp, Homo sapiens
ctactaagagcttca

SEQ ID NO: 713533 - DNA, 15 bp, Homo sapiens
tactaagagcttcag

SEQ ID NO: 713534 - DNA, 15 bp, Homo sapiens
actaagagcttcagt

SEQ ID NO: 713535 - DNA, 15 bp, Homo sapiens
ctaagagcttcagtt

SEQ ID NO: 713536 - DNA, 15 bp, Homo sapiens
taagagcttcagttc

SEQ ID NO: 713537 - DNA, 15 bp, Homo sapiens
aagagcttcagttcc

SEQ ID NO: 713538 - DNA, 15 bp, Homo sapiens
agagcttcagttccc

SEQ ID NO: 713539 - DNA, 15 bp, Homo sapiens
gagcttcagttccca

SEQ ID NO: 713540 - DNA, 15 bp, Homo sapiens
agcttcagttcccac

SEQ ID NO: 713541 - DNA, 15 bp, Homo sapiens
gcttcagttcccact

SEQ ID NO: 713542 - DNA, 15 bp, Homo sapiens
cttcagttcccactg

SEQ ID NO: 713543 - DNA, 15 bp, Homo sapiens
ttcagttcccactgg

SEQ ID NO: 713544 - DNA, 15 bp, Homo sapiens
tcagttcccactgga

SEQ ID NO: 713545 - DNA, 15 bp, Homo sapiens
cagttcccactggag

SEQ ID NO: 713546 - DNA, 15 bp, Homo sapiens
agttcccactggagt

SEQ ID NO: 713547 - DNA, 15 bp, Homo sapiens
gttcccactggagtg

SEQ ID NO: 713548 - DNA, 15 bp, Homo sapiens
ttcccactggagtgg

SEQ ID NO: 713549 - DNA, 15 bp, Homo sapiens
tcccactggagtggt

SEQ ID NO: 713550 - DNA, 15 bp, Homo sapiens
cccactggagtggtg

SEQ ID NO: 713551 - DNA, 15 bp, Homo sapiens
ccactggagtggtgc

SEQ ID NO: 713552 - DNA, 15 bp, Homo sapiens
cactggagtggtgca

SEQ ID NO: 713553 - DNA, 15 bp, Homo sapiens
actggagtggtgcac

SEQ ID NO: 713554 - DNA, 15 bp, Homo sapiens
ctggagtggtgcaca

SEQ ID NO: 713555 - DNA, 15 bp, Homo sapiens
tggagtggtgcacac

SEQ ID NO: 713556 - DNA, 15 bp, Homo sapiens
ggagtggtgcacaca

SEQ ID NO: 713557 - DNA, 15 bp, Homo sapiens
gagtggtgcacacat

SEQ ID NO: 713558 - DNA, 15 bp, Homo sapiens
agtggtgcacacatc

SEQ ID NO: 713559 - DNA, 15 bp, Homo sapiens
gtggtgcacacatct

SEQ ID NO: 713560 - DNA, 15 bp, Homo sapiens
tggtgcacacatctc

SEQ ID NO: 713561 - DNA, 15 bp, Homo sapiens
ggtgcacacatctca

SEQ ID NO: 713562 - DNA, 15 bp, Homo sapiens
gtgcacacatctcat

SEQ ID NO: 713563 - DNA, 15 bp, Homo sapiens
tgcacacatctcatt

SEQ ID NO: 713564 - DNA, 15 bp, Homo sapiens
gcacacatctcatta

SEQ ID NO: 713565 - DNA, 15 bp, Homo sapiens
cacacatctcattac

SEQ ID NO: 713566 - DNA, 15 bp, Homo sapiens
acacatctcattact

SEQ ID NO: 713567 - DNA, 15 bp, Homo sapiens
cacatctcattacta

SEQ ID NO: 713568 - DNA, 15 bp, Homo sapiens
acatctcattactac

SEQ ID NO: 713569 - DNA, 15 bp, Homo sapiens
catctcattactact

SEQ ID NO: 713570 - DNA, 15 bp, Homo sapiens
atctcattactacta

SEQ ID NO: 713571 - DNA, 15 bp, Homo sapiens
tctcattactactaa

SEQ ID NO: 713572 - DNA, 15 bp, Homo sapiens
ctcattactactaaa

SEQ ID NO: 713573 - DNA, 15 bp, Homo sapiens
tcattactactaaaa

SEQ ID NO: 713574 - DNA, 15 bp, Homo sapiens
cattactactaaaac

SEQ ID NO: 713575 - DNA, 15 bp, Homo sapiens
attactactaaaacc

SEQ ID NO: 713576 - DNA, 15 bp, Homo sapiens
ttactactaaaacca

SEQ ID NO: 713577 - DNA, 15 bp, Homo sapiens
tactactaaaaccac

SEQ ID NO: 713578 - DNA, 15 bp, Homo sapiens
actactaaaaccaca

SEQ ID NO: 713579 - DNA, 15 bp, Homo sapiens
ctactaaaaccacag

SEQ ID NO: 713580 - DNA, 15 bp, Homo sapiens
tactaaaaccacagg

SEQ ID NO: 713581 - DNA, 15 bp, Homo sapiens
actaaaaccacagga

SEQ ID NO: 713582 - DNA, 15 bp, Homo sapiens
ctaaaaccacaggaa

SEQ ID NO: 713583 - DNA, 15 bp, Homo sapiens
taaaaccacaggaat

SEQ ID NO: 713584 - DNA, 15 bp, Homo sapiens
aaaaccacaggaatg

SEQ ID NO: 713585 - DNA, 15 bp, Homo sapiens
aaaccacaggaatgt

SEQ ID NO: 713586 - DNA, 15 bp, Homo sapiens
aaccacaggaatgtt

SEQ ID NO: 713587 - DNA, 15 bp, Homo sapiens
accacaggaatgttc

SEQ ID NO: 713588 - DNA, 15 bp, Homo sapiens
ccacaggaatgttcc

SEQ ID NO: 713589 - DNA, 15 bp, Homo sapiens
cacaggaatgttcca

SEQ ID NO: 713590 - DNA, 15 bp, Homo sapiens
acaggaatgttccag

SEQ ID NO: 713591 - DNA, 15 bp, Homo sapiens
caggaatgttccagg

SEQ ID NO: 713592 - DNA, 15 bp, Homo sapiens
aggaatgttccaggg

SEQ ID NO: 713593 - DNA, 15 bp, Homo sapiens
ggaatgttccaggga

SEQ ID NO: 713594 - DNA, 15 bp, Homo sapiens
gaatgttccagggaa

SEQ ID NO: 713595 - DNA, 15 bp, Homo sapiens
aatgttccagggaaa

SEQ ID NO: 713596 - DNA, 15 bp, Homo sapiens
atgttccagggaaac

SEQ ID NO: 713597 - DNA, 15 bp, Homo sapiens
tgttccagggaaaca

SEQ ID NO: 713598 - DNA, 15 bp, Homo sapiens
gttccagggaaacag

SEQ ID NO: 713599 - DNA, 15 bp, Homo sapiens
ttccagggaaacaga

SEQ ID NO: 713600 - DNA, 15 bp, Homo sapiens
tccagggaaacagac

SEQ ID NO: 713601 - DNA, 15 bp, Homo sapiens
ccagggaaacagact

SEQ ID NO: 713602 - DNA, 15 bp, Homo sapiens
cagggaaacagacta

SEQ ID NO: 713603 - DNA, 15 bp, Homo sapiens
agggaaacagactat

SEQ ID NO: 713604 - DNA, 15 bp, Homo sapiens
gggaaacagactatc

SEQ ID NO: 713605 - DNA, 15 bp, Homo sapiens
ggaaacagactatca

SEQ ID NO: 713606 - DNA, 15 bp, Homo sapiens
gaaacagactatcat

SEQ ID NO: 713607 - DNA, 15 bp, Homo sapiens
aaacagactatcatc

SEQ ID NO: 713608 - DNA, 15 bp, Homo sapiens
aacagactatcatca

SEQ ID NO: 713609 - DNA, 15 bp, Homo sapiens
acagactatcatcac

SEQ ID NO: 713610 - DNA, 15 bp, Homo sapiens
cagactatcatcact

SEQ ID NO: 713611 - DNA, 15 bp, Homo sapiens
agactatcatcactg

SEQ ID NO: 713612 - DNA, 15 bp, Homo sapiens
gactatcatcactga

SEQ ID NO: 713613 - DNA, 15 bp, Homo sapiens
actatcatcactgag

SEQ ID NO: 713614 - DNA, 15 bp, Homo sapiens
ctatcatcactgagc

SEQ ID NO: 713615 - DNA, 15 bp, Homo sapiens
tatcatcactgagcg

SEQ ID NO: 713616 - DNA, 15 bp, Homo sapiens
atcatcactgagcga

SEQ ID NO: 713617 - DNA, 15 bp, Homo sapiens
tcatcactgagcgag

SEQ ID NO: 713618 - DNA, 15 bp, Homo sapiens
catcactgagcgagg

SEQ ID NO: 713619 - DNA, 15 bp, Homo sapiens
atcactgagcgaggt

SEQ ID NO: 713620 - DNA, 15 bp, Homo sapiens
tcactgagcgaggtg

SEQ ID NO: 713621 - DNA, 15 bp, Homo sapiens
cactgagcgaggtgg

SEQ ID NO: 713622 - DNA, 15 bp, Homo sapiens
actgagcgaggtgga

SEQ ID NO: 713623 - DNA, 15 bp, Homo sapiens
ctgagcgaggtggaa

SEQ ID NO: 713624 - DNA, 15 bp, Homo sapiens
tgagcgaggtggaat

SEQ ID NO: 713625 - DNA, 15 bp, Homo sapiens
gagcgaggtggaatc

SEQ ID NO: 713626 - DNA, 15 bp, Homo sapiens
agcgaggtggaatcc

SEQ ID NO: 713627 - DNA, 15 bp, Homo sapiens
gcgaggtggaatcca

SEQ ID NO: 713628 - DNA, 15 bp, Homo sapiens
cgaggtggaatccag

SEQ ID NO: 713629 - DNA, 15 bp, Homo sapiens
gaggtggaatccagc

SEQ ID NO: 713630 - DNA, 15 bp, Homo sapiens
aggtggaatccagcc

SEQ ID NO: 713631 - DNA, 15 bp, Homo sapiens
ggtggaatccagcca

SEQ ID NO: 713632 - DNA, 15 bp, Homo sapiens
gtggaatccagccaa

SEQ ID NO: 713633 - DNA, 15 bp, Homo sapiens
tggaatccagccaaa

SEQ ID NO: 713634 - DNA, 15 bp, Homo sapiens
ggaatccagccaaaa

SEQ ID NO: 713635 - DNA, 15 bp, Homo sapiens
gaatccagccaaaac

SEQ ID NO: 713636 - DNA, 15 bp, Homo sapiens
aatccagccaaaacc

SEQ ID NO: 713637 - DNA, 15 bp, Homo sapiens
atccagccaaaaccc

SEQ ID NO: 713638 - DNA, 15 bp, Homo sapiens
tccagccaaaacccc

SEQ ID NO: 713639 - DNA, 15 bp, Homo sapiens
ccagccaaaacccca

SEQ ID NO: 713640 - DNA, 15 bp, Homo sapiens
cagccaaaaccccag

SEQ ID NO: 713641 - DNA, 15 bp, Homo sapiens
agccaaaaccccagg

SEQ ID NO: 713642 - DNA, 15 bp, Homo sapiens
gccaaaaccccaggc

SEQ ID NO: 713643 - DNA, 15 bp, Homo sapiens
ccaaaaccccaggct

SEQ ID NO: 713644 - DNA, 15 bp, Homo sapiens
caaaaccccaggcta

SEQ ID NO: 713645 - DNA, 15 bp, Homo sapiens
aaaaccccaggctaa

SEQ ID NO: 713646 - DNA, 15 bp, Homo sapiens
aaaccccaggctaac

SEQ ID NO: 713647 - DNA, 15 bp, Homo sapiens
aaccccaggctaaca

SEQ ID NO: 713648 - DNA, 15 bp, Homo sapiens
accccaggctaacat

SEQ ID NO: 713649 - DNA, 15 bp, Homo sapiens
ccccaggctaacatc

SEQ ID NO: 713650 - DNA, 15 bp, Homo sapiens
cccaggctaacatcc

SEQ ID NO: 713651 - DNA, 15 bp, Homo sapiens
ccaggctaacatcca

SEQ ID NO: 713652 - DNA, 15 bp, Homo sapiens
caggctaacatccag

SEQ ID NO: 713653 - DNA, 15 bp, Homo sapiens
aggctaacatccaga

SEQ ID NO: 713654 - DNA, 15 bp, Homo sapiens
ggctaacatccagat

SEQ ID NO: 713655 - DNA, 15 bp, Homo sapiens
gctaacatccagatg

SEQ ID NO: 713656 - DNA, 15 bp, Homo sapiens
ctaacatccagatgc

SEQ ID NO: 713657 - DNA, 15 bp, Homo sapiens
taacatccagatgcc

SEQ ID NO: 713658 - DNA, 15 bp, Homo sapiens
aacatccagatgcct

SEQ ID NO: 713659 - DNA, 15 bp, Homo sapiens
acatccagatgcctg

SEQ ID NO: 713660 - DNA, 15 bp, Homo sapiens
catccagatgcctgc

SEQ ID NO: 713661 - DNA, 15 bp, Homo sapiens
atccagatgcctgca

SEQ ID NO: 713662 - DNA, 15 bp, Homo sapiens
tccagatgcctgcag

SEQ ID NO: 713663 - DNA, 15 bp, Homo sapiens
ccagatgcctgcaga

SEQ ID NO: 713664 - DNA, 15 bp, Homo sapiens
cagatgcctgcagat

SEQ ID NO: 713665 - DNA, 15 bp, Homo sapiens
agatgcctgcagatc

SEQ ID NO: 713666 - DNA, 15 bp, Homo sapiens
gatgcctgcagatca

SEQ ID NO: 713667 - DNA, 15 bp, Homo sapiens
atgcctgcagatcag

SEQ ID NO: 713668 - DNA, 15 bp, Homo sapiens
tgcctgcagatcagc

SEQ ID NO: 713669 - DNA, 15 bp, Homo sapiens
gcctgcagatcagct

SEQ ID NO: 713670 - DNA, 15 bp, Homo sapiens
cctgcagatcagcta

SEQ ID NO: 713671 - DNA, 15 bp, Homo sapiens
ctgcagatcagctaa

SEQ ID NO: 713672 - DNA, 15 bp, Homo sapiens
tgcagatcagctaaa

SEQ ID NO: 713673 - DNA, 15 bp, Homo sapiens
gcagatcagctaaaa

SEQ ID NO: 713674 - DNA, 15 bp, Homo sapiens
cagatcagctaaaat

SEQ ID NO: 713675 - DNA, 15 bp, Homo sapiens
agatcagctaaaatc

SEQ ID NO: 713676 - DNA, 15 bp, Homo sapiens
gatcagctaaaatcc

SEQ ID NO: 713677 - DNA, 15 bp, Homo sapiens
atcagctaaaatcct

SEQ ID NO: 713678 - DNA, 15 bp, Homo sapiens
tcagctaaaatcctt

SEQ ID NO: 713679 - DNA, 15 bp, Homo sapiens
cagctaaaatccttt

SEQ ID NO: 713680 - DNA, 15 bp, Homo sapiens
agctaaaatcctttt

SEQ ID NO: 713681 - DNA, 15 bp, Homo sapiens
gctaaaatcctttta

SEQ ID NO: 713682 - DNA, 15 bp, Homo sapiens
ctaaaatccttttaa

SEQ ID NO: 713683 - DNA, 15 bp, Homo sapiens
taaaatccttttaaa

SEQ ID NO: 713684 - DNA, 15 bp, Homo sapiens
aaaatccttttaaag

SEQ ID NO: 713685 - DNA, 15 bp, Homo sapiens
aaatccttttaaagg

SEQ ID NO: 713686 - DNA, 15 bp, Homo sapiens
aatccttttaaagga

SEQ ID NO: 713687 - DNA, 15 bp, Homo sapiens
atccttttaaaggac

SEQ ID NO: 713688 - DNA, 15 bp, Homo sapiens
tccttttaaaggact

SEQ ID NO: 713689 - DNA, 15 bp, Homo sapiens
ccttttaaaggactt

SEQ ID NO: 713690 - DNA, 15 bp, Homo sapiens
cttttaaaggacttg

SEQ ID NO: 713691 - DNA, 15 bp, Homo sapiens
ttttaaaggacttgg

SEQ ID NO: 713692 - DNA, 15 bp, Homo sapiens
tttaaaggacttgga

SEQ ID NO: 713693 - DNA, 15 bp, Homo sapiens
ttaaaggacttggaa

SEQ ID NO: 713694 - DNA, 15 bp, Homo sapiens
taaaggacttggaat

SEQ ID NO: 713695 - DNA, 15 bp, Homo sapiens
aaaggacttggaatc

SEQ ID NO: 713696 - DNA, 15 bp, Homo sapiens
aaggacttggaatct

SEQ ID NO: 713697 - DNA, 15 bp, Homo sapiens
aggacttggaatctc

SEQ ID NO: 713698 - DNA, 15 bp, Homo sapiens
ggacttggaatctcc

SEQ ID NO: 713699 - DNA, 15 bp, Homo sapiens
gacttggaatctcca

SEQ ID NO: 713700 - DNA, 15 bp, Homo sapiens
acttggaatctccag

SEQ ID NO: 713701 - DNA, 15 bp, Homo sapiens
cttggaatctccaga

SEQ ID NO: 713702 - DNA, 15 bp, Homo sapiens
ttggaatctccagat

SEQ ID NO: 713703 - DNA, 15 bp, Homo sapiens
tggaatctccagata

SEQ ID NO: 713704 - DNA, 15 bp, Homo sapiens
ggaatctccagatac

SEQ ID NO: 713705 - DNA, 15 bp, Homo sapiens
gaatctccagatact

SEQ ID NO: 713706 - DNA, 15 bp, Homo sapiens
aatctccagatacta

SEQ ID NO: 713707 - DNA, 15 bp, Homo sapiens
atctccagatactag

SEQ ID NO: 713708 - DNA, 15 bp, Homo sapiens
tctccagatactagt

SEQ ID NO: 713709 - DNA, 15 bp, Homo sapiens
ctccagatactagtt

SEQ ID NO: 713710 - DNA, 15 bp, Homo sapiens
tccagatactagttt

SEQ ID NO: 713711 - DNA, 15 bp, Homo sapiens
ccagatactagtttt

SEQ ID NO: 713712 - DNA, 15 bp, Homo sapiens
cagatactagtttta

SEQ ID NO: 713713 - DNA, 15 bp, Homo sapiens
agatactagttttaa

SEQ ID NO: 713714 - DNA, 15 bp, Homo sapiens
gatactagttttaag

SEQ ID NO: 713715 - DNA, 15 bp, Homo sapiens
atactagttttaagt

SEQ ID NO: 713716 - DNA, 15 bp, Homo sapiens
tactagttttaagtc

SEQ ID NO: 713717 - DNA, 15 bp, Homo sapiens
actagttttaagtct

SEQ ID NO: 713718 - DNA, 15 bp, Homo sapiens
ctagttttaagtctt

SEQ ID NO: 713719 - DNA, 15 bp, Homo sapiens
tagttttaagtcttt

SEQ ID NO: 713720 - DNA, 15 bp, Homo sapiens
agttttaagtctttt

SEQ ID NO: 713721 - DNA, 15 bp, Homo sapiens
gttttaagtcttttc

SEQ ID NO: 713722 - DNA, 15 bp, Homo sapiens
ttttaagtcttttct

SEQ ID NO: 713723 - DNA, 15 bp, Homo sapiens
tttaagtcttttctg

SEQ ID NO: 713724 - DNA, 15 bp, Homo sapiens
ttaagtcttttctgg

SEQ ID NO: 713725 - DNA, 15 bp, Homo sapiens
taagtcttttctggg

SEQ ID NO: 713726 - DNA, 15 bp, Homo sapiens
aagtcttttctggga

SEQ ID NO: 713727 - DNA, 15 bp, Homo sapiens
agtcttttctgggaa

SEQ ID NO: 713728 - DNA, 15 bp, Homo sapiens
gtcttttctgggaac

SEQ ID NO: 713729 - DNA, 15 bp, Homo sapiens
tcttttctgggaact

SEQ ID NO: 713730 - DNA, 15 bp, Homo sapiens
cttttctgggaactg

SEQ ID NO: 713731 - DNA, 15 bp, Homo sapiens
ttttctgggaactgg

SEQ ID NO: 713732 - DNA, 15 bp, Homo sapiens
tttctgggaactggg

SEQ ID NO: 713733 - DNA, 15 bp, Homo sapiens
ttctgggaactggga

SEQ ID NO: 713734 - DNA, 15 bp, Homo sapiens
tctgggaactgggag

SEQ ID NO: 713735 - DNA, 15 bp, Homo sapiens
ctgggaactgggagt

SEQ ID NO: 713736 - DNA, 15 bp, Homo sapiens
tgggaactgggagtt

SEQ ID NO: 713737 - DNA, 15 bp, Homo sapiens
gggaactgggagttt

SEQ ID NO: 713738 - DNA, 15 bp, Homo sapiens
ggaactgggagtttg

SEQ ID NO: 713739 - DNA, 15 bp, Homo sapiens
gaactgggagtttgt

SEQ ID NO: 713740 - DNA, 15 bp, Homo sapiens
aactgggagtttgta

SEQ ID NO: 713741 - DNA, 15 bp, Homo sapiens
actgggagtttgtac

SEQ ID NO: 713742 - DNA, 15 bp, Homo sapiens
ctgggagtttgtact

SEQ ID NO: 713743 - DNA, 15 bp, Homo sapiens
tgggagtttgtactg

SEQ ID NO: 713744 - DNA, 15 bp, Homo sapiens
gggagtttgtactgg

SEQ ID NO: 713745 - DNA, 15 bp, Homo sapiens
ggagtttgtactgga

SEQ ID NO: 713746 - DNA, 15 bp, Homo sapiens
gagtttgtactggag

SEQ ID NO: 713747 - DNA, 15 bp, Homo sapiens
agtttgtactggagg

SEQ ID NO: 713748 - DNA, 15 bp, Homo sapiens
gtttgtactggaggc

SEQ ID NO: 713749 - DNA, 15 bp, Homo sapiens
tttgtactggaggcc

SEQ ID NO: 713750 - DNA, 15 bp, Homo sapiens
ttgtactggaggcca

SEQ ID NO: 713751 - DNA, 15 bp, Homo sapiens
tgtactggaggccac

SEQ ID NO: 713752 - DNA, 15 bp, Homo sapiens
gtactggaggccact

SEQ ID NO: 713753 - DNA, 15 bp, Homo sapiens
tactggaggccactt

SEQ ID NO: 713754 - DNA, 15 bp, Homo sapiens
actggaggccactta

SEQ ID NO: 713755 - DNA, 15 bp, Homo sapiens
ctggaggccacttaa

SEQ ID NO: 713756 - DNA, 15 bp, Homo sapiens
tggaggccacttaac

SEQ ID NO: 713757 - DNA, 15 bp, Homo sapiens
ggaggccacttaact

SEQ ID NO: 713758 - DNA, 15 bp, Homo sapiens
gaggccacttaacta

SEQ ID NO: 713759 - DNA, 15 bp, Homo sapiens
aggccacttaactat

SEQ ID NO: 713760 - DNA, 15 bp, Homo sapiens
ggccacttaactatt

SEQ ID NO: 713761 - DNA, 15 bp, Homo sapiens
gccacttaactattt

SEQ ID NO: 713762 - DNA, 15 bp, Homo sapiens
ccacttaactatttc

SEQ ID NO: 713763 - DNA, 15 bp, Homo sapiens
cacttaactatttca

SEQ ID NO: 713764 - DNA, 15 bp, Homo sapiens
acttaactatttcaa

SEQ ID NO: 713765 - DNA, 15 bp, Homo sapiens
cttaactatttcaaa

SEQ ID NO: 713766 - DNA, 15 bp, Homo sapiens
ttaactatttcaaaa

SEQ ID NO: 713767 - DNA, 15 bp, Homo sapiens
taactatttcaaaaa

SEQ ID NO: 713768 - DNA, 15 bp, Homo sapiens
aactatttcaaaaaa

SEQ ID NO: 713769 - DNA, 15 bp, Homo sapiens
actatttcaaaaaat

SEQ ID NO: 713770 - DNA, 15 bp, Homo sapiens
ctatttcaaaaaata

SEQ ID NO: 713771 - DNA, 15 bp, Homo sapiens
tatttcaaaaaatat

SEQ ID NO: 713772 - DNA, 15 bp, Homo sapiens
atttcaaaaaatatt

SEQ ID NO: 713773 - DNA, 15 bp, Homo sapiens
tttcaaaaaatattc

SEQ ID NO: 713774 - DNA, 15 bp, Homo sapiens
ttcaaaaaatattca

SEQ ID NO: 713775 - DNA, 15 bp, Homo sapiens
tcaaaaaatattcac

SEQ ID NO: 713776 - DNA, 15 bp, Homo sapiens
caaaaaatattcacc

SEQ ID NO: 713777 - DNA, 15 bp, Homo sapiens
aaaaaatattcacca

SEQ ID NO: 713778 - DNA, 15 bp, Homo sapiens
aaaaatattcaccaa

SEQ ID NO: 713779 - DNA, 15 bp, Homo sapiens
aaaatattcaccaaa

SEQ ID NO: 713780 - DNA, 15 bp, Homo sapiens
aaatattcaccaaaa

SEQ ID NO: 713781 - DNA, 15 bp, Homo sapiens
aatattcaccaaaat

SEQ ID NO: 713782 - DNA, 15 bp, Homo sapiens
atattcaccaaaata

SEQ ID NO: 713783 - DNA, 15 bp, Homo sapiens
tattcaccaaaatag

SEQ ID NO: 713784 - DNA, 15 bp, Homo sapiens
attcaccaaaatagg

SEQ ID NO: 713785 - DNA, 15 bp, Homo sapiens
ttcaccaaaataggt

SEQ ID NO: 713786 - DNA, 15 bp, Homo sapiens
tcaccaaaataggtg

SEQ ID NO: 713787 - DNA, 15 bp, Homo sapiens
caccaaaataggtgt

SEQ ID NO: 713788 - DNA, 15 bp, Homo sapiens
accaaaataggtgtc

SEQ ID NO: 713789 - DNA, 15 bp, Homo sapiens
ccaaaataggtgtct

SEQ ID NO: 713790 - DNA, 15 bp, Homo sapiens
caaaataggtgtctc

SEQ ID NO: 713791 - DNA, 15 bp, Homo sapiens
aaaataggtgtctct

SEQ ID NO: 713792 - DNA, 15 bp, Homo sapiens
aaataggtgtctctc

SEQ ID NO: 713793 - DNA, 15 bp, Homo sapiens
aataggtgtctctct

SEQ ID NO: 713794 - DNA, 15 bp, Homo sapiens
ataggtgtctctctg

SEQ ID NO: 713795 - DNA, 15 bp, Homo sapiens
taggtgtctctctga

SEQ ID NO: 713796 - DNA, 15 bp, Homo sapiens
aggtgtctctctgac

SEQ ID NO: 713797 - DNA, 15 bp, Homo sapiens
ggtgtctctctgact

SEQ ID NO: 713798 - DNA, 15 bp, Homo sapiens
gtgtctctctgactg

SEQ ID NO: 713799 - DNA, 15 bp, Homo sapiens
tgtctctctgactgc

SEQ ID NO: 713800 - DNA, 15 bp, Homo sapiens
gtctctctgactgca

SEQ ID NO: 713801 - DNA, 15 bp, Homo sapiens
tctctctgactgcaa

SEQ ID NO: 713802 - DNA, 15 bp, Homo sapiens
ctctctgactgcaac

SEQ ID NO: 713803 - DNA, 15 bp, Homo sapiens
tctctgactgcaacg

SEQ ID NO: 713804 - DNA, 15 bp, Homo sapiens
ctctgactgcaacgg

SEQ ID NO: 713805 - DNA, 15 bp, Homo sapiens
tctgactgcaacggt

SEQ ID NO: 713806 - DNA, 15 bp, Homo sapiens
ctgactgcaacggtt

SEQ ID NO: 713807 - DNA, 15 bp, Homo sapiens
tgactgcaacggttt

SEQ ID NO: 713808 - DNA, 15 bp, Homo sapiens
gactgcaacggtttg

SEQ ID NO: 713809 - DNA, 15 bp, Homo sapiens
actgcaacggtttga

SEQ ID NO: 713810 - DNA, 15 bp, Homo sapiens
ctgcaacggtttgag

SEQ ID NO: 713811 - DNA, 15 bp, Homo sapiens
tgcaacggtttgagt

SEQ ID NO: 713812 - DNA, 15 bp, Homo sapiens
gcaacggtttgagtc

SEQ ID NO: 713813 - DNA, 15 bp, Homo sapiens
caacggtttgagtcc

SEQ ID NO: 713814 - DNA, 15 bp, Homo sapiens
aacggtttgagtcct

SEQ ID NO: 713815 - DNA, 15 bp, Homo sapiens
acggtttgagtcctc

SEQ ID NO: 713816 - DNA, 15 bp, Homo sapiens
cggtttgagtcctcc

SEQ ID NO: 713817 - DNA, 15 bp, Homo sapiens
ggtttgagtcctcct

SEQ ID NO: 713818 - DNA, 15 bp, Homo sapiens
gtttgagtcctcctc

SEQ ID NO: 713819 - DNA, 15 bp, Homo sapiens
tttgagtcctcctca

SEQ ID NO: 713820 - DNA, 15 bp, Homo sapiens
ttgagtcctcctcag

SEQ ID NO: 713821 - DNA, 15 bp, Homo sapiens
tgagtcctcctcagc

SEQ ID NO: 713822 - DNA, 15 bp, Homo sapiens
gagtcctcctcagcc

SEQ ID NO: 713823 - DNA, 15 bp, Homo sapiens
agtcctcctcagccc

SEQ ID NO: 713824 - DNA, 15 bp, Homo sapiens
gtcctcctcagccct

SEQ ID NO: 713825 - DNA, 15 bp, Homo sapiens
tcctcctcagccctc

SEQ ID NO: 713826 - DNA, 15 bp, Homo sapiens
cctcctcagccctca

SEQ ID NO: 713827 - DNA, 15 bp, Homo sapiens
ctcctcagccctcat

SEQ ID NO: 713828 - DNA, 15 bp, Homo sapiens
tcctcagccctcata

SEQ ID NO: 713829 - DNA, 15 bp, Homo sapiens
cctcagccctcatat

SEQ ID NO: 713830 - DNA, 15 bp, Homo sapiens
ctcagccctcatatc

SEQ ID NO: 713831 - DNA, 15 bp, Homo sapiens
tcagccctcatatcc

SEQ ID NO: 713832 - DNA, 15 bp, Homo sapiens
cagccctcatatcct

SEQ ID NO: 713833 - DNA, 15 bp, Homo sapiens
agccctcatatccta

SEQ ID NO: 713834 - DNA, 15 bp, Homo sapiens
gccctcatatcctag

SEQ ID NO: 713835 - DNA, 15 bp, Homo sapiens
ccctcatatcctagg

SEQ ID NO: 713836 - DNA, 15 bp, Homo sapiens
cctcatatcctaggc

SEQ ID NO: 713837 - DNA, 15 bp, Homo sapiens
ctcatatcctaggct

SEQ ID NO: 713838 - DNA, 15 bp, Homo sapiens
tcatatcctaggctt

SEQ ID NO: 713839 - DNA, 15 bp, Homo sapiens
catatcctaggcttc

SEQ ID NO: 713840 - DNA, 15 bp, Homo sapiens
atatcctaggcttcg

SEQ ID NO: 713841 - DNA, 15 bp, Homo sapiens
tatcctaggcttcgg

SEQ ID NO: 713842 - DNA, 15 bp, Homo sapiens
atcctaggcttcgga

SEQ ID NO: 713843 - DNA, 15 bp, Homo sapiens
tcctaggcttcggac

SEQ ID NO: 713844 - DNA, 15 bp, Homo sapiens
cctaggcttcggact

SEQ ID NO: 713845 - DNA, 15 bp, Homo sapiens
ctaggcttcggactg

SEQ ID NO: 713846 - DNA, 15 bp, Homo sapiens
taggcttcggactgt

SEQ ID NO: 713847 - DNA, 15 bp, Homo sapiens
aggcttcggactgtt

SEQ ID NO: 713848 - DNA, 15 bp, Homo sapiens
ggcttcggactgttg

SEQ ID NO: 713849 - DNA, 15 bp, Homo sapiens
gcttcggactgttgg

SEQ ID NO: 713850 - DNA, 15 bp, Homo sapiens
cttcggactgttggg

SEQ ID NO: 713851 - DNA, 15 bp, Homo sapiens
ttcggactgttggga

SEQ ID NO: 713852 - DNA, 15 bp, Homo sapiens
tcggactgttgggaa

SEQ ID NO: 713853 - DNA, 15 bp, Homo sapiens
cggactgttgggaaa

SEQ ID NO: 713854 - DNA, 15 bp, Homo sapiens
ggactgttgggaaag

SEQ ID NO: 713855 - DNA, 15 bp, Homo sapiens
gactgttgggaaagt

SEQ ID NO: 713856 - DNA, 15 bp, Homo sapiens
actgttgggaaagtc

SEQ ID NO: 713857 - DNA, 15 bp, Homo sapiens
ctgttgggaaagtct

SEQ ID NO: 713858 - DNA, 15 bp, Homo sapiens
tgttgggaaagtctt

SEQ ID NO: 713859 - DNA, 15 bp, Homo sapiens
gttgggaaagtctta

SEQ ID NO: 713860 - DNA, 15 bp, Homo sapiens
ttgggaaagtcttat

SEQ ID NO: 713861 - DNA, 15 bp, Homo sapiens
tgggaaagtcttatc

SEQ ID NO: 713862 - DNA, 15 bp, Homo sapiens
gggaaagtcttatct

SEQ ID NO: 713863 - DNA, 15 bp, Homo sapiens
ggaaagtcttatctt

SEQ ID NO: 713864 - DNA, 15 bp, Homo sapiens
gaaagtcttatcttc

SEQ ID NO: 713865 - DNA, 15 bp, Homo sapiens
aaagtcttatcttcc

SEQ ID NO: 713866 - DNA, 15 bp, Homo sapiens
aagtcttatcttcct

SEQ ID NO: 713867 - DNA, 15 bp, Homo sapiens
agtcttatcttcctg

SEQ ID NO: 713868 - DNA, 15 bp, Homo sapiens
gtcttatcttcctga

SEQ ID NO: 713869 - DNA, 15 bp, Homo sapiens
tcttatcttcctgac

SEQ ID NO: 713870 - DNA, 15 bp, Homo sapiens
cttatcttcctgacg

SEQ ID NO: 713871 - DNA, 15 bp, Homo sapiens
ttatcttcctgacga

SEQ ID NO: 713872 - DNA, 15 bp, Homo sapiens
tatcttcctgacgaa

SEQ ID NO: 713873 - DNA, 15 bp, Homo sapiens
atcttcctgacgaaa

SEQ ID NO: 713874 - DNA, 15 bp, Homo sapiens
tcttcctgacgaaag

SEQ ID NO: 713875 - DNA, 15 bp, Homo sapiens
cttcctgacgaaagc

SEQ ID NO: 713876 - DNA, 15 bp, Homo sapiens
ttcctgacgaaagct

SEQ ID NO: 713877 - DNA, 15 bp, Homo sapiens
tcctgacgaaagctc

SEQ ID NO: 713878 - DNA, 15 bp, Homo sapiens
cctgacgaaagctca

SEQ ID NO: 713879 - DNA, 15 bp, Homo sapiens
ctgacgaaagctcag

SEQ ID NO: 713880 - DNA, 15 bp, Homo sapiens
tgacgaaagctcagc

SEQ ID NO: 713881 - DNA, 15 bp, Homo sapiens
gacgaaagctcagca

SEQ ID NO: 713882 - DNA, 15 bp, Homo sapiens
acgaaagctcagcag

SEQ ID NO: 713883 - DNA, 15 bp, Homo sapiens
cgaaagctcagcagc

SEQ ID NO: 713884 - DNA, 15 bp, Homo sapiens
gaaagctcagcagca

SEQ ID NO: 713885 - DNA, 15 bp, Homo sapiens
aaagctcagcagcaa

SEQ ID NO: 713886 - DNA, 15 bp, Homo sapiens
aagctcagcagcaac

SEQ ID NO: 713887 - DNA, 15 bp, Homo sapiens
agctcagcagcaaca

SEQ ID NO: 713888 - DNA, 15 bp, Homo sapiens
gctcagcagcaacag

SEQ ID NO: 713889 - DNA, 15 bp, Homo sapiens
ctcagcagcaacaga

SEQ ID NO: 713890 - DNA, 15 bp, Homo sapiens
tcagcagcaacagaa

SEQ ID NO: 713891 - DNA, 15 bp, Homo sapiens
cagcagcaacagaac

SEQ ID NO: 713892 - DNA, 15 bp, Homo sapiens
agcagcaacagaacc

SEQ ID NO: 713893 - DNA, 15 bp, Homo sapiens
gcagcaacagaacct

SEQ ID NO: 713894 - DNA, 15 bp, Homo sapiens
cagcaacagaacctg

SEQ ID NO: 713895 - DNA, 15 bp, Homo sapiens
agcaacagaacctgt

SEQ ID NO: 713896 - DNA, 15 bp, Homo sapiens
gcaacagaacctgtt

SEQ ID NO: 713897 - DNA, 15 bp, Homo sapiens
caacagaacctgtta

SEQ ID NO: 713898 - DNA, 15 bp, Homo sapiens
aacagaacctgttat

SEQ ID NO: 713899 - DNA, 15 bp, Homo sapiens
acagaacctgttatt

SEQ ID NO: 713900 - DNA, 15 bp, Homo sapiens
cagaacctgttattt

SEQ ID NO: 713901 - DNA, 15 bp, Homo sapiens
agaacctgttatttt

SEQ ID NO: 713902 - DNA, 15 bp, Homo sapiens
gaacctgttattttt

SEQ ID NO: 713903 - DNA, 15 bp, Homo sapiens
aacctgttatttttt

SEQ ID NO: 713904 - DNA, 15 bp, Homo sapiens
acctgttattttttt

SEQ ID NO: 713905 - DNA, 15 bp, Homo sapiens
cctgttatttttttg

SEQ ID NO: 713906 - DNA, 15 bp, Homo sapiens
ctgttatttttttgt

SEQ ID NO: 713907 - DNA, 15 bp, Homo sapiens
tgttatttttttgtt

SEQ ID NO: 713908 - DNA, 15 bp, Homo sapiens
gttatttttttgttg

SEQ ID NO: 713909 - DNA, 15 bp, Homo sapiens
ttatttttttgttga

SEQ ID NO: 713910 - DNA, 15 bp, Homo sapiens
tatttttttgttgag

SEQ ID NO: 713911 - DNA, 15 bp, Homo sapiens
atttttttgttgaga

SEQ ID NO: 713912 - DNA, 15 bp, Homo sapiens
tttttttgttgagac

SEQ ID NO: 713913 - DNA, 15 bp, Homo sapiens
ttttttgttgagaca

SEQ ID NO: 713914 - DNA, 15 bp, Homo sapiens
tttttgttgagacag

SEQ ID NO: 713915 - DNA, 15 bp, Homo sapiens
ttttgttgagacagg

SEQ ID NO: 713916 - DNA, 15 bp, Homo sapiens
tttgttgagacaggg

SEQ ID NO: 713917 - DNA, 15 bp, Homo sapiens
ttgttgagacagggt

SEQ ID NO: 713918 - DNA, 15 bp, Homo sapiens
tgttgagacagggtc

SEQ ID NO: 713919 - DNA, 15 bp, Homo sapiens
gttgagacagggtct

SEQ ID NO: 713920 - DNA, 15 bp, Homo sapiens
ttgagacagggtctt

SEQ ID NO: 713921 - DNA, 15 bp, Homo sapiens
tgagacagggtctta

SEQ ID NO: 713922 - DNA, 15 bp, Homo sapiens
gagacagggtcttac

SEQ ID NO: 713923 - DNA, 15 bp, Homo sapiens
agacagggtcttact

SEQ ID NO: 713924 - DNA, 15 bp, Homo sapiens
gacagggtcttactc

SEQ ID NO: 713925 - DNA, 15 bp, Homo sapiens
acagggtcttactct

SEQ ID NO: 713926 - DNA, 15 bp, Homo sapiens
cagggtcttactctg

SEQ ID NO: 713927 - DNA, 15 bp, Homo sapiens
agggtcttactctgt

SEQ ID NO: 713928 - DNA, 15 bp, Homo sapiens
gggtcttactctgtc

SEQ ID NO: 713929 - DNA, 15 bp, Homo sapiens
ggtcttactctgtca

SEQ ID NO: 713930 - DNA, 15 bp, Homo sapiens
gtcttactctgtcac

SEQ ID NO: 713931 - DNA, 15 bp, Homo sapiens
tcttactctgtcacc

SEQ ID NO: 713932 - DNA, 15 bp, Homo sapiens
cttactctgtcaccc

SEQ ID NO: 713933 - DNA, 15 bp, Homo sapiens
ttactctgtcaccca

SEQ ID NO: 713934 - DNA, 15 bp, Homo sapiens
tactctgtcacccag

SEQ ID NO: 713935 - DNA, 15 bp, Homo sapiens
ggctggagtgcagta

SEQ ID NO: 713936 - DNA, 15 bp, Homo sapiens
gctggagtgcagtag

SEQ ID NO: 713937 - DNA, 15 bp, Homo sapiens
ctggagtgcagtagt

SEQ ID NO: 713938 - DNA, 15 bp, Homo sapiens
tggagtgcagtagtg

SEQ ID NO: 713939 - DNA, 15 bp, Homo sapiens
ggagtgcagtagtgc

SEQ ID NO: 713940 - DNA, 15 bp, Homo sapiens
gagtgcagtagtgcg

SEQ ID NO: 713941 - DNA, 15 bp, Homo sapiens
agtgcagtagtgcga

SEQ ID NO: 713942 - DNA, 15 bp, Homo sapiens
gtgcagtagtgcgat

SEQ ID NO: 713943 - DNA, 15 bp, Homo sapiens
tgcagtagtgcgatc

SEQ ID NO: 713944 - DNA, 15 bp, Homo sapiens
gcagtagtgcgatct

SEQ ID NO: 713945 - DNA, 15 bp, Homo sapiens
cagtagtgcgatctt

SEQ ID NO: 713946 - DNA, 15 bp, Homo sapiens
agtagtgcgatcttg

SEQ ID NO: 713947 - DNA, 15 bp, Homo sapiens
gtagtgcgatcttgg

SEQ ID NO: 713948 - DNA, 15 bp, Homo sapiens
tagtgcgatcttggc

SEQ ID NO: 713949 - DNA, 15 bp, Homo sapiens
agtgcgatcttggct

SEQ ID NO: 713950 - DNA, 15 bp, Homo sapiens
cttggctcactgcag

SEQ ID NO: 713951 - DNA, 15 bp, Homo sapiens
ttggctcactgcagc

SEQ ID NO: 713952 - DNA, 15 bp, Homo sapiens
tggctcactgcagcc

SEQ ID NO: 713953 - DNA, 15 bp, Homo sapiens
ctcactgcagcctca

SEQ ID NO: 713954 - DNA, 15 bp, Homo sapiens
tcactgcagcctcag

SEQ ID NO: 713955 - DNA, 15 bp, Homo sapiens
cactgcagcctcagc

SEQ ID NO: 713956 - DNA, 15 bp, Homo sapiens
actgcagcctcagcc

SEQ ID NO: 713957 - DNA, 15 bp, Homo sapiens
ctgcagcctcagcct

SEQ ID NO: 713958 - DNA, 15 bp, Homo sapiens
tgcagcctcagccta

SEQ ID NO: 713959 - DNA, 15 bp, Homo sapiens
gcagcctcagcctac

SEQ ID NO: 713960 - DNA, 15 bp, Homo sapiens
cagcctcagcctacc

SEQ ID NO: 713961 - DNA, 15 bp, Homo sapiens
agcctcagcctacca

SEQ ID NO: 713962 - DNA, 15 bp, Homo sapiens
gcctcagcctaccag

SEQ ID NO: 713963 - DNA, 15 bp, Homo sapiens
cctcagcctaccagg

SEQ ID NO: 713964 - DNA, 15 bp, Homo sapiens
ctcagcctaccaggc

SEQ ID NO: 713965 - DNA, 15 bp, Homo sapiens
tcagcctaccaggct

SEQ ID NO: 713966 - DNA, 15 bp, Homo sapiens
cagcctaccaggctc

SEQ ID NO: 713967 - DNA, 15 bp, Homo sapiens
agcctaccaggctca

SEQ ID NO: 713968 - DNA, 15 bp, Homo sapiens
gcctaccaggctcag

SEQ ID NO: 713969 - DNA, 15 bp, Homo sapiens
cctaccaggctcagg

SEQ ID NO: 713970 - DNA, 15 bp, Homo sapiens
ctaccaggctcaggt

SEQ ID NO: 713971 - DNA, 15 bp, Homo sapiens
taccaggctcaggtg

SEQ ID NO: 713972 - DNA, 15 bp, Homo sapiens
accaggctcaggtga

SEQ ID NO: 713973 - DNA, 15 bp, Homo sapiens
ccaggctcaggtgac

SEQ ID NO: 713974 - DNA, 15 bp, Homo sapiens
caggctcaggtgacc

SEQ ID NO: 713975 - DNA, 15 bp, Homo sapiens
aggctcaggtgaccc

SEQ ID NO: 713976 - DNA, 15 bp, Homo sapiens
ggctcaggtgaccct

SEQ ID NO: 713977 - DNA, 15 bp, Homo sapiens
gctcaggtgacccta

SEQ ID NO: 713978 - DNA, 15 bp, Homo sapiens
ctcaggtgaccctat

SEQ ID NO: 713979 - DNA, 15 bp, Homo sapiens
tcaggtgaccctatc

SEQ ID NO: 713980 - DNA, 15 bp, Homo sapiens
caggtgaccctatct

SEQ ID NO: 713981 - DNA, 15 bp, Homo sapiens
aggtgaccctatctc

SEQ ID NO: 713982 - DNA, 15 bp, Homo sapiens
ggtgaccctatctca

SEQ ID NO: 713983 - DNA, 15 bp, Homo sapiens
gtgaccctatctcag

SEQ ID NO: 713984 - DNA, 15 bp, Homo sapiens
tgaccctatctcagc

SEQ ID NO: 713985 - DNA, 15 bp, Homo sapiens
gaccctatctcagct

SEQ ID NO: 713986 - DNA, 15 bp, Homo sapiens
accctatctcagctt

SEQ ID NO: 713987 - DNA, 15 bp, Homo sapiens
ccctatctcagcttc

SEQ ID NO: 713988 - DNA, 15 bp, Homo sapiens
cctatctcagcttct

SEQ ID NO: 713989 - DNA, 15 bp, Homo sapiens
ctatctcagcttctc

SEQ ID NO: 713990 - DNA, 15 bp, Homo sapiens
tatctcagcttctcg

SEQ ID NO: 713991 - DNA, 15 bp, Homo sapiens
atctcagcttctcga

SEQ ID NO: 713992 - DNA, 15 bp, Homo sapiens
tctcagcttctcgag

SEQ ID NO: 713993 - DNA, 15 bp, Homo sapiens
ctcagcttctcgagt

SEQ ID NO: 713994 - DNA, 15 bp, Homo sapiens
tcagcttctcgagta

SEQ ID NO: 713995 - DNA, 15 bp, Homo sapiens
cagcttctcgagtag

SEQ ID NO: 713996 - DNA, 15 bp, Homo sapiens
agcttctcgagtagg

SEQ ID NO: 713997 - DNA, 15 bp, Homo sapiens
gcttctcgagtaggt

SEQ ID NO: 713998 - DNA, 15 bp, Homo sapiens
cttctcgagtaggtg

SEQ ID NO: 713999 - DNA, 15 bp, Homo sapiens
ttctcgagtaggtgg

SEQ ID NO: 714000 - DNA, 15 bp, Homo sapiens
tctcgagtaggtggg

SEQ ID NO: 714001 - DNA, 15 bp, Homo sapiens
ctcgagtaggtggga

SEQ ID NO: 714002 - DNA, 15 bp, Homo sapiens
tcgagtaggtgggac

SEQ ID NO: 714003 - DNA, 15 bp, Homo sapiens
cgagtaggtgggact

SEQ ID NO: 714004 - DNA, 15 bp, Homo sapiens
gagtaggtgggacta

SEQ ID NO: 714005 - DNA, 15 bp, Homo sapiens
agtaggtgggactac

SEQ ID NO: 714006 - DNA, 15 bp, Homo sapiens
gtaggtgggactaca

SEQ ID NO: 714007 - DNA, 15 bp, Homo sapiens
taggtgggactacag

SEQ ID NO: 714008 - DNA, 15 bp, Homo sapiens
aggtgggactacagg

SEQ ID NO: 714009 - DNA, 15 bp, Homo sapiens
ggtgggactacaggc

SEQ ID NO: 714010 - DNA, 15 bp, Homo sapiens
gtgggactacaggca

SEQ ID NO: 714011 - DNA, 15 bp, Homo sapiens
tgggactacaggcat

SEQ ID NO: 714012 - DNA, 15 bp, Homo sapiens
gggactacaggcatg

SEQ ID NO: 714013 - DNA, 15 bp, Homo sapiens
ggactacaggcatgt

SEQ ID NO: 714014 - DNA, 15 bp, Homo sapiens
gactacaggcatgtg

SEQ ID NO: 714015 - DNA, 15 bp, Homo sapiens
actacaggcatgtgc

SEQ ID NO: 714016 - DNA, 15 bp, Homo sapiens
ctacaggcatgtgcc

SEQ ID NO: 714017 - DNA, 15 bp, Homo sapiens
tacaggcatgtgcca

SEQ ID NO: 714018 - DNA, 15 bp, Homo sapiens
acaggcatgtgccac

SEQ ID NO: 714019 - DNA, 15 bp, Homo sapiens
caggcatgtgccacc

SEQ ID NO: 714020 - DNA, 15 bp, Homo sapiens
aggcatgtgccacca

SEQ ID NO: 714021 - DNA, 15 bp, Homo sapiens
ggcatgtgccaccat

SEQ ID NO: 714022 - DNA, 15 bp, Homo sapiens
gcatgtgccaccatg

SEQ ID NO: 714023 - DNA, 15 bp, Homo sapiens
catgtgccaccatgc

SEQ ID NO: 714024 - DNA, 15 bp, Homo sapiens
atgtgccaccatgct

SEQ ID NO: 714025 - DNA, 15 bp, Homo sapiens
tgtgccaccatgctc

SEQ ID NO: 714026 - DNA, 15 bp, Homo sapiens
gtgccaccatgctcg

SEQ ID NO: 714027 - DNA, 15 bp, Homo sapiens
tgccaccatgctcgg

SEQ ID NO: 714028 - DNA, 15 bp, Homo sapiens
gccaccatgctcggt

SEQ ID NO: 714029 - DNA, 15 bp, Homo sapiens
ccaccatgctcggtg

SEQ ID NO: 714030 - DNA, 15 bp, Homo sapiens
caccatgctcggtga

SEQ ID NO: 714031 - DNA, 15 bp, Homo sapiens
accatgctcggtgaa

SEQ ID NO: 714032 - DNA, 15 bp, Homo sapiens
ccatgctcggtgaac

SEQ ID NO: 714033 - DNA, 15 bp, Homo sapiens
catgctcggtgaact

SEQ ID NO: 714034 - DNA, 15 bp, Homo sapiens
atgctcggtgaacta

SEQ ID NO: 714035 - DNA, 15 bp, Homo sapiens
tgctcggtgaactaa

SEQ ID NO: 714036 - DNA, 15 bp, Homo sapiens
gctcggtgaactaaa

SEQ ID NO: 714037 - DNA, 15 bp, Homo sapiens
ctcggtgaactaaaa

SEQ ID NO: 714038 - DNA, 15 bp, Homo sapiens
tcggtgaactaaaaa

SEQ ID NO: 714039 - DNA, 15 bp, Homo sapiens
cggtgaactaaaaaa

SEQ ID NO: 714040 - DNA, 15 bp, Homo sapiens
ggtgaactaaaaaaa

SEQ ID NO: 714041 - DNA, 15 bp, Homo sapiens
gtgaactaaaaaaac

SEQ ID NO: 714042 - DNA, 15 bp, Homo sapiens
tgaactaaaaaaact

SEQ ID NO: 714043 - DNA, 15 bp, Homo sapiens
gaactaaaaaaactt

SEQ ID NO: 714044 - DNA, 15 bp, Homo sapiens
aactaaaaaaacttt

SEQ ID NO: 714045 - DNA, 15 bp, Homo sapiens
actaaaaaaactttt

SEQ ID NO: 714046 - DNA, 15 bp, Homo sapiens
ctaaaaaaacttttt

SEQ ID NO: 714047 - DNA, 15 bp, Homo sapiens
taaaaaaactttttt

SEQ ID NO: 714048 - DNA, 15 bp, Homo sapiens
aaaaaaacttttttg

SEQ ID NO: 714049 - DNA, 15 bp, Homo sapiens
aaaaaacttttttgt

SEQ ID NO: 714050 - DNA, 15 bp, Homo sapiens
aaaaacttttttgta

SEQ ID NO: 714051 - DNA, 15 bp, Homo sapiens
aaaacttttttgtag

SEQ ID NO: 714052 - DNA, 15 bp, Homo sapiens
aaacttttttgtagt

SEQ ID NO: 714053 - DNA, 15 bp, Homo sapiens
aacttttttgtagtg

SEQ ID NO: 714054 - DNA, 15 bp, Homo sapiens
acttttttgtagtga

SEQ ID NO: 714055 - DNA, 15 bp, Homo sapiens
cttttttgtagtgat

SEQ ID NO: 714056 - DNA, 15 bp, Homo sapiens
ttttttgtagtgata

SEQ ID NO: 714057 - DNA, 15 bp, Homo sapiens
tttttgtagtgatac

SEQ ID NO: 714058 - DNA, 15 bp, Homo sapiens
ttttgtagtgatacg

SEQ ID NO: 714059 - DNA, 15 bp, Homo sapiens
tttgtagtgatacgg

SEQ ID NO: 714060 - DNA, 15 bp, Homo sapiens
ttgtagtgatacggt

SEQ ID NO: 714061 - DNA, 15 bp, Homo sapiens
tgtagtgatacggtc

SEQ ID NO: 714062 - DNA, 15 bp, Homo sapiens
gtagtgatacggtct

SEQ ID NO: 714063 - DNA, 15 bp, Homo sapiens
tagtgatacggtctc

SEQ ID NO: 714064 - DNA, 15 bp, Homo sapiens
agtgatacggtctca

SEQ ID NO: 714065 - DNA, 15 bp, Homo sapiens
gtgatacggtctcac

SEQ ID NO: 714066 - DNA, 15 bp, Homo sapiens
tgatacggtctcact

SEQ ID NO: 714067 - DNA, 15 bp, Homo sapiens
gatacggtctcacta

SEQ ID NO: 714068 - DNA, 15 bp, Homo sapiens
atacggtctcactat

SEQ ID NO: 714069 - DNA, 15 bp, Homo sapiens
tacggtctcactata

SEQ ID NO: 714070 - DNA, 15 bp, Homo sapiens
acggtctcactatat

SEQ ID NO: 714071 - DNA, 15 bp, Homo sapiens
cggtctcactatatt

SEQ ID NO: 714072 - DNA, 15 bp, Homo sapiens
ggtctcactatattg

SEQ ID NO: 714073 - DNA, 15 bp, Homo sapiens
gtctcactatattgc

SEQ ID NO: 714074 - DNA, 15 bp, Homo sapiens
tctcactatattgcc

SEQ ID NO: 714075 - DNA, 15 bp, Homo sapiens
ctcactatattgccc

SEQ ID NO: 714076 - DNA, 15 bp, Homo sapiens
tcactatattgccca

SEQ ID NO: 714077 - DNA, 15 bp, Homo sapiens
cactatattgcccag

SEQ ID NO: 714078 - DNA, 15 bp, Homo sapiens
actatattgcccagg

SEQ ID NO: 714079 - DNA, 15 bp, Homo sapiens
ctatattgcccaggc

SEQ ID NO: 714080 - DNA, 15 bp, Homo sapiens
tatattgcccaggct

SEQ ID NO: 714081 - DNA, 15 bp, Homo sapiens
atattgcccaggctg

SEQ ID NO: 714082 - DNA, 15 bp, Homo sapiens
tattgcccaggctgg

SEQ ID NO: 714083 - DNA, 15 bp, Homo sapiens
attgcccaggctggt

SEQ ID NO: 714084 - DNA, 15 bp, Homo sapiens
ttgcccaggctggtt

SEQ ID NO: 714085 - DNA, 15 bp, Homo sapiens
tgcccaggctggttt

SEQ ID NO: 714086 - DNA, 15 bp, Homo sapiens
gcccaggctggtttt

SEQ ID NO: 714087 - DNA, 15 bp, Homo sapiens
cccaggctggttttg

SEQ ID NO: 714088 - DNA, 15 bp, Homo sapiens
ccaggctggttttga

SEQ ID NO: 714089 - DNA, 15 bp, Homo sapiens
caggctggttttgaa

SEQ ID NO: 714090 - DNA, 15 bp, Homo sapiens
aggctggttttgaac

SEQ ID NO: 714091 - DNA, 15 bp, Homo sapiens
ggctggttttgaact

SEQ ID NO: 714092 - DNA, 15 bp, Homo sapiens
gctggttttgaactc

SEQ ID NO: 714093 - DNA, 15 bp, Homo sapiens
ctggttttgaactcc

SEQ ID NO: 714094 - DNA, 15 bp, Homo sapiens
tggttttgaactcct

SEQ ID NO: 714095 - DNA, 15 bp, Homo sapiens
ggttttgaactcctg

SEQ ID NO: 714096 - DNA, 15 bp, Homo sapiens
gttttgaactcctgg

SEQ ID NO: 714097 - DNA, 15 bp, Homo sapiens
ttttgaactcctggg

SEQ ID NO: 714098 - DNA, 15 bp, Homo sapiens
tttgaactcctgggc

SEQ ID NO: 714099 - DNA, 15 bp, Homo sapiens
ttgaactcctgggct

SEQ ID NO: 714100 - DNA, 15 bp, Homo sapiens
tgaactcctgggctc

SEQ ID NO: 714101 - DNA, 15 bp, Homo sapiens
cctgggctcaagtga

SEQ ID NO: 714102 - DNA, 15 bp, Homo sapiens
ctgggctcaagtgat

SEQ ID NO: 714103 - DNA, 15 bp, Homo sapiens
tgggctcaagtgatc

SEQ ID NO: 714104 - DNA, 15 bp, Homo sapiens
gggctcaagtgatcc

SEQ ID NO: 714105 - DNA, 15 bp, Homo sapiens
ggctcaagtgatcct

SEQ ID NO: 714106 - DNA, 15 bp, Homo sapiens
gctcaagtgatcctc

SEQ ID NO: 714107 - DNA, 15 bp, Homo sapiens
ctcaagtgatcctcc

SEQ ID NO: 714108 - DNA, 15 bp, Homo sapiens
tcaagtgatcctccc

SEQ ID NO: 714109 - DNA, 15 bp, Homo sapiens
caagtgatcctccca

SEQ ID NO: 714110 - DNA, 15 bp, Homo sapiens
gatcctcccacctca

SEQ ID NO: 714111 - DNA, 15 bp, Homo sapiens
atcctcccacctcag

SEQ ID NO: 714112 - DNA, 15 bp, Homo sapiens
tcctcccacctcagc

SEQ ID NO: 714113 - DNA, 15 bp, Homo sapiens
cctcccacctcagcg

SEQ ID NO: 714114 - DNA, 15 bp, Homo sapiens
ctcccacctcagcgt

SEQ ID NO: 714115 - DNA, 15 bp, Homo sapiens
tcccacctcagcgtc

SEQ ID NO: 714116 - DNA, 15 bp, Homo sapiens
cccacctcagcgtct

SEQ ID NO: 714117 - DNA, 15 bp, Homo sapiens
ccacctcagcgtctc

SEQ ID NO: 714118 - DNA, 15 bp, Homo sapiens
cacctcagcgtctca

SEQ ID NO: 714119 - DNA, 15 bp, Homo sapiens
acctcagcgtctcaa

SEQ ID NO: 714120 - DNA, 15 bp, Homo sapiens
cctcagcgtctcaaa

SEQ ID NO: 714121 - DNA, 15 bp, Homo sapiens
ctcagcgtctcaaag

SEQ ID NO: 714122 - DNA, 15 bp, Homo sapiens
tcagcgtctcaaagt

SEQ ID NO: 714123 - DNA, 15 bp, Homo sapiens
cagcgtctcaaagta

SEQ ID NO: 714124 - DNA, 15 bp, Homo sapiens
agcgtctcaaagtac

SEQ ID NO: 714125 - DNA, 15 bp, Homo sapiens
gcgtctcaaagtact

SEQ ID NO: 714126 - DNA, 15 bp, Homo sapiens
cgtctcaaagtactg

SEQ ID NO: 714127 - DNA, 15 bp, Homo sapiens
gtctcaaagtactgg

SEQ ID NO: 714128 - DNA, 15 bp, Homo sapiens
tctcaaagtactggg

SEQ ID NO: 714129 - DNA, 15 bp, Homo sapiens
ctcaaagtactggga

SEQ ID NO: 714130 - DNA, 15 bp, Homo sapiens
tcaaagtactgggat

SEQ ID NO: 714131 - DNA, 15 bp, Homo sapiens
caaagtactgggatt

SEQ ID NO: 714132 - DNA, 15 bp, Homo sapiens
aaagtactgggatta

SEQ ID NO: 714133 - DNA, 15 bp, Homo sapiens
aagtactgggattac

SEQ ID NO: 714134 - DNA, 15 bp, Homo sapiens
agtactgggattaca

SEQ ID NO: 714135 - DNA, 15 bp, Homo sapiens
gtactgggattacag

SEQ ID NO: 714136 - DNA, 15 bp, Homo sapiens
tactgggattacagg

SEQ ID NO: 714137 - DNA, 15 bp, Homo sapiens
actgggattacaggt

SEQ ID NO: 714138 - DNA, 15 bp, Homo sapiens
tacaggtgtgagcct

SEQ ID NO: 714139 - DNA, 15 bp, Homo sapiens
acaggtgtgagcctc

SEQ ID NO: 714140 - DNA, 15 bp, Homo sapiens
caggtgtgagcctct

SEQ ID NO: 714141 - DNA, 15 bp, Homo sapiens
aggtgtgagcctcta

SEQ ID NO: 714142 - DNA, 15 bp, Homo sapiens
ggtgtgagcctctac

SEQ ID NO: 714143 - DNA, 15 bp, Homo sapiens
gtgtgagcctctaca

SEQ ID NO: 714144 - DNA, 15 bp, Homo sapiens
tgtgagcctctacac

SEQ ID NO: 714145 - DNA, 15 bp, Homo sapiens
gtgagcctctacact

SEQ ID NO: 714146 - DNA, 15 bp, Homo sapiens
tgagcctctacactg

SEQ ID NO: 714147 - DNA, 15 bp, Homo sapiens
gagcctctacactgg

SEQ ID NO: 714148 - DNA, 15 bp, Homo sapiens
agcctctacactggg

SEQ ID NO: 714149 - DNA, 15 bp, Homo sapiens
gcctctacactgggc

SEQ ID NO: 714150 - DNA, 15 bp, Homo sapiens
cctctacactgggcc

SEQ ID NO: 714151 - DNA, 15 bp, Homo sapiens
ctctacactgggcct

SEQ ID NO: 714152 - DNA, 15 bp, Homo sapiens
tctacactgggcctg

SEQ ID NO: 714153 - DNA, 15 bp, Homo sapiens
ctacactgggcctgc

SEQ ID NO: 714154 - DNA, 15 bp, Homo sapiens
tacactgggcctgca

SEQ ID NO: 714155 - DNA, 15 bp, Homo sapiens
acactgggcctgcag

SEQ ID NO: 714156 - DNA, 15 bp, Homo sapiens
cactgggcctgcaga

SEQ ID NO: 714157 - DNA, 15 bp, Homo sapiens
actgggcctgcagaa

SEQ ID NO: 714158 - DNA, 15 bp, Homo sapiens
ctgggcctgcagaac

SEQ ID NO: 714159 - DNA, 15 bp, Homo sapiens
tgggcctgcagaacc

SEQ ID NO: 714160 - DNA, 15 bp, Homo sapiens
gggcctgcagaacct

SEQ ID NO: 714161 - DNA, 15 bp, Homo sapiens
ggcctgcagaaccta

SEQ ID NO: 714162 - DNA, 15 bp, Homo sapiens
gcctgcagaacctac

SEQ ID NO: 714163 - DNA, 15 bp, Homo sapiens
cctgcagaacctaca

SEQ ID NO: 714164 - DNA, 15 bp, Homo sapiens
ctgcagaacctacac

SEQ ID NO: 714165 - DNA, 15 bp, Homo sapiens
tgcagaacctacaca

SEQ ID NO: 714166 - DNA, 15 bp, Homo sapiens
gcagaacctacacag

SEQ ID NO: 714167 - DNA, 15 bp, Homo sapiens
cagaacctacacaga

SEQ ID NO: 714168 - DNA, 15 bp, Homo sapiens
agaacctacacagaa

SEQ ID NO: 714169 - DNA, 15 bp, Homo sapiens
gaacctacacagaat

SEQ ID NO: 714170 - DNA, 15 bp, Homo sapiens
aacctacacagaatc

SEQ ID NO: 714171 - DNA, 15 bp, Homo sapiens
acctacacagaatcc

SEQ ID NO: 714172 - DNA, 15 bp, Homo sapiens
cctacacagaatccg

SEQ ID NO: 714173 - DNA, 15 bp, Homo sapiens
ctacacagaatccgc

SEQ ID NO: 714174 - DNA, 15 bp, Homo sapiens
tacacagaatccgca

SEQ ID NO: 714175 - DNA, 15 bp, Homo sapiens
acacagaatccgcac

SEQ ID NO: 714176 - DNA, 15 bp, Homo sapiens
cacagaatccgcacc

SEQ ID NO: 714177 - DNA, 15 bp, Homo sapiens
acagaatccgcacct

SEQ ID NO: 714178 - DNA, 15 bp, Homo sapiens
cagaatccgcacctg

SEQ ID NO: 714179 - DNA, 15 bp, Homo sapiens
agaatccgcacctgg

SEQ ID NO: 714180 - DNA, 15 bp, Homo sapiens
gaatccgcacctggt

SEQ ID NO: 714181 - DNA, 15 bp, Homo sapiens
aatccgcacctggtc

SEQ ID NO: 714182 - DNA, 15 bp, Homo sapiens
atccgcacctggtct

SEQ ID NO: 714183 - DNA, 15 bp, Homo sapiens
tccgcacctggtctg

SEQ ID NO: 714184 - DNA, 15 bp, Homo sapiens
ccgcacctggtctgc

SEQ ID NO: 714185 - DNA, 15 bp, Homo sapiens
cgcacctggtctgca

SEQ ID NO: 714186 - DNA, 15 bp, Homo sapiens
gcacctggtctgcag

SEQ ID NO: 714187 - DNA, 15 bp, Homo sapiens
cacctggtctgcaga

SEQ ID NO: 714188 - DNA, 15 bp, Homo sapiens
acctggtctgcagaa

SEQ ID NO: 714189 - DNA, 15 bp, Homo sapiens
cctggtctgcagaac

SEQ ID NO: 714190 - DNA, 15 bp, Homo sapiens
ctggtctgcagaacc

SEQ ID NO: 714191 - DNA, 15 bp, Homo sapiens
tggtctgcagaaccc

SEQ ID NO: 714192 - DNA, 15 bp, Homo sapiens
ggtctgcagaaccca

SEQ ID NO: 714193 - DNA, 15 bp, Homo sapiens
gtctgcagaacccac

SEQ ID NO: 714194 - DNA, 15 bp, Homo sapiens
tctgcagaacccaca

SEQ ID NO: 714195 - DNA, 15 bp, Homo sapiens
ctgcagaacccacac

SEQ ID NO: 714196 - DNA, 15 bp, Homo sapiens
tgcagaacccacacc

SEQ ID NO: 714197 - DNA, 15 bp, Homo sapiens
gcagaacccacaccc

SEQ ID NO: 714198 - DNA, 15 bp, Homo sapiens
cagaacccacacccg

SEQ ID NO: 714199 - DNA, 15 bp, Homo sapiens
agaacccacacccga

SEQ ID NO: 714200 - DNA, 15 bp, Homo sapiens
gaacccacacccgac

SEQ ID NO: 714201 - DNA, 15 bp, Homo sapiens
aacccacacccgacc

SEQ ID NO: 714202 - DNA, 15 bp, Homo sapiens
acccacacccgaccc

SEQ ID NO: 714203 - DNA, 15 bp, Homo sapiens
cccacacccgaccca

SEQ ID NO: 714204 - DNA, 15 bp, Homo sapiens
ccacacccgacccac

SEQ ID NO: 714205 - DNA, 15 bp, Homo sapiens
cacacccgacccaca

SEQ ID NO: 714206 - DNA, 15 bp, Homo sapiens
acacccgacccacag

SEQ ID NO: 714207 - DNA, 15 bp, Homo sapiens
cacccgacccacaga

SEQ ID NO: 714208 - DNA, 15 bp, Homo sapiens
acccgacccacagaa

SEQ ID NO: 714209 - DNA, 15 bp, Homo sapiens
cccgacccacagaac

SEQ ID NO: 714210 - DNA, 15 bp, Homo sapiens
ccgacccacagaacc

SEQ ID NO: 714211 - DNA, 15 bp, Homo sapiens
cgacccacagaaccc

SEQ ID NO: 714212 - DNA, 15 bp, Homo sapiens
gacccacagaaccca

SEQ ID NO: 714213 - DNA, 15 bp, Homo sapiens
acccacagaacccac

SEQ ID NO: 714214 - DNA, 15 bp, Homo sapiens
cccacagaacccaca

SEQ ID NO: 714215 - DNA, 15 bp, Homo sapiens
ccacagaacccacac

SEQ ID NO: 714216 - DNA, 15 bp, Homo sapiens
cacagaacccacacc

SEQ ID NO: 714217 - DNA, 15 bp, Homo sapiens
acagaacccacaccc

SEQ ID NO: 714218 - DNA, 15 bp, Homo sapiens
ccacagaacccacat

SEQ ID NO: 714219 - DNA, 15 bp, Homo sapiens
cacagaacccacatc

SEQ ID NO: 714220 - DNA, 15 bp, Homo sapiens
acagaacccacatct

SEQ ID NO: 714221 - DNA, 15 bp, Homo sapiens
cagaacccacatctg

SEQ ID NO: 714222 - DNA, 15 bp, Homo sapiens
agaacccacatctgg

SEQ ID NO: 714223 - DNA, 15 bp, Homo sapiens
gaacccacatctggc

SEQ ID NO: 714224 - DNA, 15 bp, Homo sapiens
aacccacatctggca

SEQ ID NO: 714225 - DNA, 15 bp, Homo sapiens
acccacatctggcag

SEQ ID NO: 714226 - DNA, 15 bp, Homo sapiens
cccacatctggcagc

SEQ ID NO: 714227 - DNA, 15 bp, Homo sapiens
ccacatctggcagca

SEQ ID NO: 714228 - DNA, 15 bp, Homo sapiens
cacatctggcagcag

SEQ ID NO: 714229 - DNA, 15 bp, Homo sapiens
acatctggcagcaga

SEQ ID NO: 714230 - DNA, 15 bp, Homo sapiens
catctggcagcagaa

SEQ ID NO: 714231 - DNA, 15 bp, Homo sapiens
atctggcagcagaac

SEQ ID NO: 714232 - DNA, 15 bp, Homo sapiens
tctggcagcagaacc

SEQ ID NO: 714233 - DNA, 15 bp, Homo sapiens
ctggcagcagaacct

SEQ ID NO: 714234 - DNA, 15 bp, Homo sapiens
tggcagcagaacctc

SEQ ID NO: 714235 - DNA, 15 bp, Homo sapiens
ggcagcagaacctct

SEQ ID NO: 714236 - DNA, 15 bp, Homo sapiens
gcagcagaacctctt

SEQ ID NO: 714237 - DNA, 15 bp, Homo sapiens
cagcagaacctctta

SEQ ID NO: 714238 - DNA, 15 bp, Homo sapiens
agcagaacctcttaa

SEQ ID NO: 714239 - DNA, 15 bp, Homo sapiens
gcagaacctcttaat

SEQ ID NO: 714240 - DNA, 15 bp, Homo sapiens
cagaacctcttaata

SEQ ID NO: 714241 - DNA, 15 bp, Homo sapiens
agaacctcttaatat

SEQ ID NO: 714242 - DNA, 15 bp, Homo sapiens
gaacctcttaatatt

SEQ ID NO: 714243 - DNA, 15 bp, Homo sapiens
aacctcttaatattt

SEQ ID NO: 714244 - DNA, 15 bp, Homo sapiens
acctcttaatatttt

SEQ ID NO: 714245 - DNA, 15 bp, Homo sapiens
cctcttaatattttt

SEQ ID NO: 714246 - DNA, 15 bp, Homo sapiens
ctcttaatatttttt

SEQ ID NO: 714247 - DNA, 15 bp, Homo sapiens
tcttaatattttttt

SEQ ID NO: 714248 - DNA, 15 bp, Homo sapiens
cttaatatttttttt

SEQ ID NO: 714249 - DNA, 15 bp, Homo sapiens
ttaatattttttttt

SEQ ID NO: 714250 - DNA, 15 bp, Homo sapiens
taatatttttttttt

SEQ ID NO: 714251 - DNA, 15 bp, Homo sapiens
aatattttttttttt

SEQ ID NO: 714252 - DNA, 15 bp, Homo sapiens
atatttttttttttt

SEQ ID NO: 714253 - DNA, 15 bp, Homo sapiens
tattttttttttttc

SEQ ID NO: 714254 - DNA, 15 bp, Homo sapiens
attttttttttttct

SEQ ID NO: 714255 - DNA, 15 bp, Homo sapiens
ttttttttttctttg

SEQ ID NO: 714256 - DNA, 15 bp, Homo sapiens
tttttttttctttga

SEQ ID NO: 714257 - DNA, 15 bp, Homo sapiens
ttttttttctttgag

SEQ ID NO: 714258 - DNA, 15 bp, Homo sapiens
tttttttctttgaga

SEQ ID NO: 714259 - DNA, 15 bp, Homo sapiens
ttttttctttgagat

SEQ ID NO: 714260 - DNA, 15 bp, Homo sapiens
tttttctttgagatg

SEQ ID NO: 714261 - DNA, 15 bp, Homo sapiens
ttttctttgagatgg

SEQ ID NO: 714262 - DNA, 15 bp, Homo sapiens
tttctttgagatgga

SEQ ID NO: 714263 - DNA, 15 bp, Homo sapiens
ttctttgagatggag

SEQ ID NO: 714264 - DNA, 15 bp, Homo sapiens
tctttgagatggagt

SEQ ID NO: 714265 - DNA, 15 bp, Homo sapiens
ctttgagatggagtc

SEQ ID NO: 714266 - DNA, 15 bp, Homo sapiens
ttgagatggagtctg

SEQ ID NO: 714267 - DNA, 15 bp, Homo sapiens
tgagatggagtctgg

SEQ ID NO: 714268 - DNA, 15 bp, Homo sapiens
gagatggagtctggc

SEQ ID NO: 714269 - DNA, 15 bp, Homo sapiens
agatggagtctggct

SEQ ID NO: 714270 - DNA, 15 bp, Homo sapiens
gatggagtctggctc

SEQ ID NO: 714271 - DNA, 15 bp, Homo sapiens
atggagtctggctct

SEQ ID NO: 714272 - DNA, 15 bp, Homo sapiens
tggagtctggctctg

SEQ ID NO: 714273 - DNA, 15 bp, Homo sapiens
ggagtctggctctgt

SEQ ID NO: 714274 - DNA, 15 bp, Homo sapiens
gagtctggctctgtc

SEQ ID NO: 714275 - DNA, 15 bp, Homo sapiens
agtctggctctgtca

SEQ ID NO: 714276 - DNA, 15 bp, Homo sapiens
gtctggctctgtcac

SEQ ID NO: 714277 - DNA, 15 bp, Homo sapiens
tctggctctgtcacc

SEQ ID NO: 714278 - DNA, 15 bp, Homo sapiens
ctggctctgtcaccc

SEQ ID NO: 714279 - DNA, 15 bp, Homo sapiens
tggctctgtcaccca

SEQ ID NO: 714280 - DNA, 15 bp, Homo sapiens
ggctctgtcacccag

SEQ ID NO: 714281 - DNA, 15 bp, Homo sapiens
tcactgcaagctctt

SEQ ID NO: 714282 - DNA, 15 bp, Homo sapiens
cactgcaagctcttc

SEQ ID NO: 714283 - DNA, 15 bp, Homo sapiens
actgcaagctcttcc

SEQ ID NO: 714284 - DNA, 15 bp, Homo sapiens
ctgcaagctcttcct

SEQ ID NO: 714285 - DNA, 15 bp, Homo sapiens
tgcaagctcttcctc

SEQ ID NO: 714286 - DNA, 15 bp, Homo sapiens
gcaagctcttcctcc

SEQ ID NO: 714287 - DNA, 15 bp, Homo sapiens
caagctcttcctccc

SEQ ID NO: 714288 - DNA, 15 bp, Homo sapiens
aagctcttcctcccg

SEQ ID NO: 714289 - DNA, 15 bp, Homo sapiens
agctcttcctcccgg

SEQ ID NO: 714290 - DNA, 15 bp, Homo sapiens
gctcttcctcccggg

SEQ ID NO: 714291 - DNA, 15 bp, Homo sapiens
ctcttcctcccgggt

SEQ ID NO: 714292 - DNA, 15 bp, Homo sapiens
tcttcctcccgggtt

SEQ ID NO: 714293 - DNA, 15 bp, Homo sapiens
cttcctcccgggttc

SEQ ID NO: 714294 - DNA, 15 bp, Homo sapiens
ttcctcccgggttca

SEQ ID NO: 714295 - DNA, 15 bp, Homo sapiens
tcctcccgggttcac

SEQ ID NO: 714296 - DNA, 15 bp, Homo sapiens
cctcccgggttcacc

SEQ ID NO: 714297 - DNA, 15 bp, Homo sapiens
ctcccgggttcaccc

SEQ ID NO: 714298 - DNA, 15 bp, Homo sapiens
tcccgggttcacccc

SEQ ID NO: 714299 - DNA, 15 bp, Homo sapiens
cccgggttcacccca

SEQ ID NO: 714300 - DNA, 15 bp, Homo sapiens
ccgggttcaccccat

SEQ ID NO: 714301 - DNA, 15 bp, Homo sapiens
cgggttcaccccatt

SEQ ID NO: 714302 - DNA, 15 bp, Homo sapiens
gggttcaccccattc

SEQ ID NO: 714303 - DNA, 15 bp, Homo sapiens
ggttcaccccattct

SEQ ID NO: 714304 - DNA, 15 bp, Homo sapiens
gttcaccccattctc

SEQ ID NO: 714305 - DNA, 15 bp, Homo sapiens
ttcaccccattctcc

SEQ ID NO: 714306 - DNA, 15 bp, Homo sapiens
tcaccccattctcct

SEQ ID NO: 714307 - DNA, 15 bp, Homo sapiens
caccccattctcctg

SEQ ID NO: 714308 - DNA, 15 bp, Homo sapiens
accccattctcctgc

SEQ ID NO: 714309 - DNA, 15 bp, Homo sapiens
ccccattctcctgcc

SEQ ID NO: 714310 - DNA, 15 bp, Homo sapiens
cccattctcctgcct

SEQ ID NO: 714311 - DNA, 15 bp, Homo sapiens
attctcctgcctcaa

SEQ ID NO: 714312 - DNA, 15 bp, Homo sapiens
ttctcctgcctcaac

SEQ ID NO: 714313 - DNA, 15 bp, Homo sapiens
cctgcctcaacctcc

SEQ ID NO: 714314 - DNA, 15 bp, Homo sapiens
ctgcctcaacctccc

SEQ ID NO: 714315 - DNA, 15 bp, Homo sapiens
tgcctcaacctcccg

SEQ ID NO: 714316 - DNA, 15 bp, Homo sapiens
gcctcaacctcccga

SEQ ID NO: 714317 - DNA, 15 bp, Homo sapiens
cctcaacctcccgag

SEQ ID NO: 714318 - DNA, 15 bp, Homo sapiens
ctcaacctcccgagt

SEQ ID NO: 714319 - DNA, 15 bp, Homo sapiens
tcaacctcccgagta

SEQ ID NO: 714320 - DNA, 15 bp, Homo sapiens
caacctcccgagtag

SEQ ID NO: 714321 - DNA, 15 bp, Homo sapiens
aacctcccgagtagc

SEQ ID NO: 714322 - DNA, 15 bp, Homo sapiens
ctcccgagtagctgt

SEQ ID NO: 714323 - DNA, 15 bp, Homo sapiens
tcccgagtagctgtg

SEQ ID NO: 714324 - DNA, 15 bp, Homo sapiens
cccgagtagctgtga

SEQ ID NO: 714325 - DNA, 15 bp, Homo sapiens
ccgagtagctgtgaa

SEQ ID NO: 714326 - DNA, 15 bp, Homo sapiens
cgagtagctgtgaat

SEQ ID NO: 714327 - DNA, 15 bp, Homo sapiens
gagtagctgtgaata

SEQ ID NO: 714328 - DNA, 15 bp, Homo sapiens
agtagctgtgaatac

SEQ ID NO: 714329 - DNA, 15 bp, Homo sapiens
gtagctgtgaataca

SEQ ID NO: 714330 - DNA, 15 bp, Homo sapiens
tagctgtgaatacag

SEQ ID NO: 714331 - DNA, 15 bp, Homo sapiens
agctgtgaatacagg

SEQ ID NO: 714332 - DNA, 15 bp, Homo sapiens
gctgtgaatacaggc

SEQ ID NO: 714333 - DNA, 15 bp, Homo sapiens
ctgtgaatacaggcg

SEQ ID NO: 714334 - DNA, 15 bp, Homo sapiens
tgtgaatacaggcgt

SEQ ID NO: 714335 - DNA, 15 bp, Homo sapiens
gtgaatacaggcgtc

SEQ ID NO: 714336 - DNA, 15 bp, Homo sapiens
tgaatacaggcgtcc

SEQ ID NO: 714337 - DNA, 15 bp, Homo sapiens
gaatacaggcgtccg

SEQ ID NO: 714338 - DNA, 15 bp, Homo sapiens
aatacaggcgtccgc

SEQ ID NO: 714339 - DNA, 15 bp, Homo sapiens
atacaggcgtccgcc

SEQ ID NO: 714340 - DNA, 15 bp, Homo sapiens
tacaggcgtccgcca

SEQ ID NO: 714341 - DNA, 15 bp, Homo sapiens
acaggcgtccgccac

SEQ ID NO: 714342 - DNA, 15 bp, Homo sapiens
caggcgtccgccacc

SEQ ID NO: 714343 - DNA, 15 bp, Homo sapiens
aggcgtccgccacca

SEQ ID NO: 714344 - DNA, 15 bp, Homo sapiens
ggcgtccgccaccac

SEQ ID NO: 714345 - DNA, 15 bp, Homo sapiens
gcgtccgccaccacg

SEQ ID NO: 714346 - DNA, 15 bp, Homo sapiens
cgtccgccaccacgc

SEQ ID NO: 714347 - DNA, 15 bp, Homo sapiens
gtccgccaccacgcc

SEQ ID NO: 714348 - DNA, 15 bp, Homo sapiens
tccgccaccacgccc

SEQ ID NO: 714349 - DNA, 15 bp, Homo sapiens
ccgccaccacgcccg

SEQ ID NO: 714350 - DNA, 15 bp, Homo sapiens
cgccaccacgcccga

SEQ ID NO: 714351 - DNA, 15 bp, Homo sapiens
gccaccacgcccgac

SEQ ID NO: 714352 - DNA, 15 bp, Homo sapiens
ccaccacgcccgact

SEQ ID NO: 714353 - DNA, 15 bp, Homo sapiens
caccacgcccgacta

SEQ ID NO: 714354 - DNA, 15 bp, Homo sapiens
accacgcccgactaa

SEQ ID NO: 714355 - DNA, 15 bp, Homo sapiens
ccacgcccgactaat

SEQ ID NO: 714356 - DNA, 15 bp, Homo sapiens
cacgcccgactaatt

SEQ ID NO: 714357 - DNA, 15 bp, Homo sapiens
acgcccgactaattt

SEQ ID NO: 714358 - DNA, 15 bp, Homo sapiens
cgcccgactaatttt

SEQ ID NO: 714359 - DNA, 15 bp, Homo sapiens
gcccgactaattttt

SEQ ID NO: 714360 - DNA, 15 bp, Homo sapiens
cccgactaatttttt

SEQ ID NO: 714361 - DNA, 15 bp, Homo sapiens
ccgactaattttttt

SEQ ID NO: 714362 - DNA, 15 bp, Homo sapiens
cgactaatttttttg

SEQ ID NO: 714363 - DNA, 15 bp, Homo sapiens
gactaatttttttgt

SEQ ID NO: 714364 - DNA, 15 bp, Homo sapiens
actaatttttttgta

SEQ ID NO: 714365 - DNA, 15 bp, Homo sapiens
ctaatttttttgtat

SEQ ID NO: 714366 - DNA, 15 bp, Homo sapiens
agccaggatggtctg

SEQ ID NO: 714367 - DNA, 15 bp, Homo sapiens
gccaggatggtctgg

SEQ ID NO: 714368 - DNA, 15 bp, Homo sapiens
ccaggatggtctgga

SEQ ID NO: 714369 - DNA, 15 bp, Homo sapiens
caggatggtctggat

SEQ ID NO: 714370 - DNA, 15 bp, Homo sapiens
aggatggtctggatc

SEQ ID NO: 714371 - DNA, 15 bp, Homo sapiens
ggatggtctggatct

SEQ ID NO: 714372 - DNA, 15 bp, Homo sapiens
gatggtctggatctc

SEQ ID NO: 714373 - DNA, 15 bp, Homo sapiens
atggtctggatctcc

SEQ ID NO: 714374 - DNA, 15 bp, Homo sapiens
tggtctggatctcct

SEQ ID NO: 714375 - DNA, 15 bp, Homo sapiens
ggtctggatctcctg

SEQ ID NO: 714376 - DNA, 15 bp, Homo sapiens
gtctggatctcctga

SEQ ID NO: 714377 - DNA, 15 bp, Homo sapiens
tctggatctcctgac

SEQ ID NO: 714378 - DNA, 15 bp, Homo sapiens
ctggatctcctgacc

SEQ ID NO: 714379 - DNA, 15 bp, Homo sapiens
tggatctcctgacct

SEQ ID NO: 714380 - DNA, 15 bp, Homo sapiens
ggatctcctgacctc

SEQ ID NO: 714381 - DNA, 15 bp, Homo sapiens
ctgacctcgtgatct

SEQ ID NO: 714382 - DNA, 15 bp, Homo sapiens
tgacctcgtgatctg

SEQ ID NO: 714383 - DNA, 15 bp, Homo sapiens
gacctcgtgatctgc

SEQ ID NO: 714384 - DNA, 15 bp, Homo sapiens
acctcgtgatctgcc

SEQ ID NO: 714385 - DNA, 15 bp, Homo sapiens
cctcgtgatctgcct

SEQ ID NO: 714386 - DNA, 15 bp, Homo sapiens
ctcgtgatctgcctg

SEQ ID NO: 714387 - DNA, 15 bp, Homo sapiens
tcgtgatctgcctgc

SEQ ID NO: 714388 - DNA, 15 bp, Homo sapiens
cgtgatctgcctgcc

SEQ ID NO: 714389 - DNA, 15 bp, Homo sapiens
ctgggattacaggct

SEQ ID NO: 714390 - DNA, 15 bp, Homo sapiens
tgggattacaggctt

SEQ ID NO: 714391 - DNA, 15 bp, Homo sapiens
gggattacaggcttg

SEQ ID NO: 714392 - DNA, 15 bp, Homo sapiens
ggattacaggcttga

SEQ ID NO: 714393 - DNA, 15 bp, Homo sapiens
gattacaggcttgag

SEQ ID NO: 714394 - DNA, 15 bp, Homo sapiens
attacaggcttgagc

SEQ ID NO: 714395 - DNA, 15 bp, Homo sapiens
ttacaggcttgagcc

SEQ ID NO: 714396 - DNA, 15 bp, Homo sapiens
tacaggcttgagcca

SEQ ID NO: 714397 - DNA, 15 bp, Homo sapiens
acaggcttgagccac

SEQ ID NO: 714398 - DNA, 15 bp, Homo sapiens
caggcttgagccacc

SEQ ID NO: 714399 - DNA, 15 bp, Homo sapiens
aggcttgagccaccg

SEQ ID NO: 714400 - DNA, 15 bp, Homo sapiens
ggcttgagccaccgc

SEQ ID NO: 714401 - DNA, 15 bp, Homo sapiens
gcttgagccaccgca

SEQ ID NO: 714402 - DNA, 15 bp, Homo sapiens
cttgagccaccgcac

SEQ ID NO: 714403 - DNA, 15 bp, Homo sapiens
ttgagccaccgcacc

SEQ ID NO: 714404 - DNA, 15 bp, Homo sapiens
tgagccaccgcaccc

SEQ ID NO: 714405 - DNA, 15 bp, Homo sapiens
gagccaccgcacccg

SEQ ID NO: 714406 - DNA, 15 bp, Homo sapiens
agccaccgcacccgg

SEQ ID NO: 714407 - DNA, 15 bp, Homo sapiens
gccaccgcacccggc

SEQ ID NO: 714408 - DNA, 15 bp, Homo sapiens
ccaccgcacccggcc

SEQ ID NO: 714409 - DNA, 15 bp, Homo sapiens
caccgcacccggcct

SEQ ID NO: 714410 - DNA, 15 bp, Homo sapiens
accgcacccggcctc

SEQ ID NO: 714411 - DNA, 15 bp, Homo sapiens
ccgcacccggcctct

SEQ ID NO: 714412 - DNA, 15 bp, Homo sapiens
cgcacccggcctctt

SEQ ID NO: 714413 - DNA, 15 bp, Homo sapiens
gcacccggcctctta

SEQ ID NO: 714414 - DNA, 15 bp, Homo sapiens
cacccggcctcttat

SEQ ID NO: 714415 - DNA, 15 bp, Homo sapiens
acccggcctcttatt

SEQ ID NO: 714416 - DNA, 15 bp, Homo sapiens
cccggcctcttattt

SEQ ID NO: 714417 - DNA, 15 bp, Homo sapiens
ccggcctcttatttt

SEQ ID NO: 714418 - DNA, 15 bp, Homo sapiens
cggcctcttattttt

SEQ ID NO: 714419 - DNA, 15 bp, Homo sapiens
ggcctcttatttttt

SEQ ID NO: 714420 - DNA, 15 bp, Homo sapiens
gcctcttattttttt

SEQ ID NO: 714421 - DNA, 15 bp, Homo sapiens
cctcttatttttttt

SEQ ID NO: 714422 - DNA, 15 bp, Homo sapiens
ctcttattttttttt

SEQ ID NO: 714423 - DNA, 15 bp, Homo sapiens
tcttatttttttttt

SEQ ID NO: 714424 - DNA, 15 bp, Homo sapiens
cttattttttttttt

SEQ ID NO: 714425 - DNA, 15 bp, Homo sapiens
ttatttttttttttg

SEQ ID NO: 714426 - DNA, 15 bp, Homo sapiens
tatttttttttttga

SEQ ID NO: 714427 - DNA, 15 bp, Homo sapiens
atttttttttttgag

SEQ ID NO: 714428 - DNA, 15 bp, Homo sapiens
ttgagatggagtctc

SEQ ID NO: 714429 - DNA, 15 bp, Homo sapiens
tgagatggagtctca

SEQ ID NO: 714430 - DNA, 15 bp, Homo sapiens
gagatggagtctcac

SEQ ID NO: 714431 - DNA, 15 bp, Homo sapiens
agatggagtctcaca

SEQ ID NO: 714432 - DNA, 15 bp, Homo sapiens
gatggagtctcacac

SEQ ID NO: 714433 - DNA, 15 bp, Homo sapiens
atggagtctcacact

SEQ ID NO: 714434 - DNA, 15 bp, Homo sapiens
tggagtctcacactg

SEQ ID NO: 714435 - DNA, 15 bp, Homo sapiens
ggagtctcacactgt

SEQ ID NO: 714436 - DNA, 15 bp, Homo sapiens
gagtctcacactgtc

SEQ ID NO: 714437 - DNA, 15 bp, Homo sapiens
agtctcacactgtca

SEQ ID NO: 714438 - DNA, 15 bp, Homo sapiens
gtctcacactgtcac

SEQ ID NO: 714439 - DNA, 15 bp, Homo sapiens
tctcacactgtcacc

SEQ ID NO: 714440 - DNA, 15 bp, Homo sapiens
ctcacactgtcacct

SEQ ID NO: 714441 - DNA, 15 bp, Homo sapiens
tcacactgtcacctg

SEQ ID NO: 714442 - DNA, 15 bp, Homo sapiens
cacactgtcacctgg

SEQ ID NO: 714443 - DNA, 15 bp, Homo sapiens
acactgtcacctggg

SEQ ID NO: 714444 - DNA, 15 bp, Homo sapiens
cactgtcacctgggc

SEQ ID NO: 714445 - DNA, 15 bp, Homo sapiens
actgtcacctgggct

SEQ ID NO: 714446 - DNA, 15 bp, Homo sapiens
ctgtcacctgggctg

SEQ ID NO: 714447 - DNA, 15 bp, Homo sapiens
tgtcacctgggctgg

SEQ ID NO: 714448 - DNA, 15 bp, Homo sapiens
gtcacctgggctgga

SEQ ID NO: 714449 - DNA, 15 bp, Homo sapiens
tcacctgggctggag

SEQ ID NO: 714450 - DNA, 15 bp, Homo sapiens
cacctgggctggagt

SEQ ID NO: 714451 - DNA, 15 bp, Homo sapiens
acctgggctggagtg

SEQ ID NO: 714452 - DNA, 15 bp, Homo sapiens
cctgggctggagtgc

SEQ ID NO: 714453 - DNA, 15 bp, Homo sapiens
ctgggctggagtgca

SEQ ID NO: 714454 - DNA, 15 bp, Homo sapiens
tgggctggagtgcag

SEQ ID NO: 714455 - DNA, 15 bp, Homo sapiens
gggctggagtgcagt

SEQ ID NO: 714456 - DNA, 15 bp, Homo sapiens
ctggagtgcagtgga

SEQ ID NO: 714457 - DNA, 15 bp, Homo sapiens
tggagtgcagtggag

SEQ ID NO: 714458 - DNA, 15 bp, Homo sapiens
ggagtgcagtggagc

SEQ ID NO: 714459 - DNA, 15 bp, Homo sapiens
gagtgcagtggagcg

SEQ ID NO: 714460 - DNA, 15 bp, Homo sapiens
agtgcagtggagcga

SEQ ID NO: 714461 - DNA, 15 bp, Homo sapiens
gtgcagtggagcgat

SEQ ID NO: 714462 - DNA, 15 bp, Homo sapiens
tgcagtggagcgatc

SEQ ID NO: 714463 - DNA, 15 bp, Homo sapiens
gcagtggagcgatct

SEQ ID NO: 714464 - DNA, 15 bp, Homo sapiens
cagtggagcgatctc

SEQ ID NO: 714465 - DNA, 15 bp, Homo sapiens
agtggagcgatctcg

SEQ ID NO: 714466 - DNA, 15 bp, Homo sapiens
gtggagcgatctcgg

SEQ ID NO: 714467 - DNA, 15 bp, Homo sapiens
tggagcgatctcggc

SEQ ID NO: 714468 - DNA, 15 bp, Homo sapiens
ggagcgatctcggct

SEQ ID NO: 714469 - DNA, 15 bp, Homo sapiens
gagcgatctcggctc

SEQ ID NO: 714470 - DNA, 15 bp, Homo sapiens
agcgatctcggctca

SEQ ID NO: 714471 - DNA, 15 bp, Homo sapiens
caacctccgcctcct

SEQ ID NO: 714472 - DNA, 15 bp, Homo sapiens
aacctccgcctcctg

SEQ ID NO: 714473 - DNA, 15 bp, Homo sapiens
acctccgcctcctgg

SEQ ID NO: 714474 - DNA, 15 bp, Homo sapiens
cctccgcctcctggg

SEQ ID NO: 714475 - DNA, 15 bp, Homo sapiens
ctccgcctcctgggt

SEQ ID NO: 714476 - DNA, 15 bp, Homo sapiens
tccgcctcctgggtt

SEQ ID NO: 714477 - DNA, 15 bp, Homo sapiens
ccgcctcctgggttc

SEQ ID NO: 714478 - DNA, 15 bp, Homo sapiens
cgcctcctgggttca

SEQ ID NO: 714479 - DNA, 15 bp, Homo sapiens
ctcctgggttcaaga

SEQ ID NO: 714480 - DNA, 15 bp, Homo sapiens
tcctgggttcaagag

SEQ ID NO: 714481 - DNA, 15 bp, Homo sapiens
cctgggttcaagaga

SEQ ID NO: 714482 - DNA, 15 bp, Homo sapiens
ctgggttcaagagat

SEQ ID NO: 714483 - DNA, 15 bp, Homo sapiens
tgggttcaagagatt

SEQ ID NO: 714484 - DNA, 15 bp, Homo sapiens
gggttcaagagattc

SEQ ID NO: 714485 - DNA, 15 bp, Homo sapiens
ggttcaagagattct

SEQ ID NO: 714486 - DNA, 15 bp, Homo sapiens
gttcaagagattctc

SEQ ID NO: 714487 - DNA, 15 bp, Homo sapiens
ttcaagagattctcc

SEQ ID NO: 714488 - DNA, 15 bp, Homo sapiens
tcaagagattctcct

SEQ ID NO: 714489 - DNA, 15 bp, Homo sapiens
caagagattctcctg

SEQ ID NO: 714490 - DNA, 15 bp, Homo sapiens
aagagattctcctgc

SEQ ID NO: 714491 - DNA, 15 bp, Homo sapiens
agagattctcctgcc

SEQ ID NO: 714492 - DNA, 15 bp, Homo sapiens
gagattctcctgcct

SEQ ID NO: 714493 - DNA, 15 bp, Homo sapiens
agattctcctgcctc

SEQ ID NO: 714494 - DNA, 15 bp, Homo sapiens
cctcagcctcccaag

SEQ ID NO: 714495 - DNA, 15 bp, Homo sapiens
ctcagcctcccaagt

SEQ ID NO: 714496 - DNA, 15 bp, Homo sapiens
tcagcctcccaagta

SEQ ID NO: 714497 - DNA, 15 bp, Homo sapiens
cagcctcccaagtag

SEQ ID NO: 714498 - DNA, 15 bp, Homo sapiens
tgggattacaggtgc

SEQ ID NO: 714499 - DNA, 15 bp, Homo sapiens
gggattacaggtgcc

SEQ ID NO: 714500 - DNA, 15 bp, Homo sapiens
ggattacaggtgccc

SEQ ID NO: 714501 - DNA, 15 bp, Homo sapiens
gattacaggtgccca

SEQ ID NO: 714502 - DNA, 15 bp, Homo sapiens
attacaggtgcccac

SEQ ID NO: 714503 - DNA, 15 bp, Homo sapiens
ttacaggtgcccacc

SEQ ID NO: 714504 - DNA, 15 bp, Homo sapiens
tacaggtgcccacca

SEQ ID NO: 714505 - DNA, 15 bp, Homo sapiens
acaggtgcccaccac

SEQ ID NO: 714506 - DNA, 15 bp, Homo sapiens
caggtgcccaccacc

SEQ ID NO: 714507 - DNA, 15 bp, Homo sapiens
aggtgcccaccacca

SEQ ID NO: 714508 - DNA, 15 bp, Homo sapiens
ggtgcccaccaccac

SEQ ID NO: 714509 - DNA, 15 bp, Homo sapiens
gtgcccaccaccacg

SEQ ID NO: 714510 - DNA, 15 bp, Homo sapiens
tgcccaccaccacgc

SEQ ID NO: 714511 - DNA, 15 bp, Homo sapiens
gcccaccaccacgcc

SEQ ID NO: 714512 - DNA, 15 bp, Homo sapiens
cccaccaccacgcct

SEQ ID NO: 714513 - DNA, 15 bp, Homo sapiens
ccaccaccacgcctg

SEQ ID NO: 714514 - DNA, 15 bp, Homo sapiens
accacgcctggctag

SEQ ID NO: 714515 - DNA, 15 bp, Homo sapiens
ccacgcctggctagt

SEQ ID NO: 714516 - DNA, 15 bp, Homo sapiens
cacgcctggctagtt

SEQ ID NO: 714517 - DNA, 15 bp, Homo sapiens
acgcctggctagttt

SEQ ID NO: 714518 - DNA, 15 bp, Homo sapiens
cgcctggctagtttt

SEQ ID NO: 714519 - DNA, 15 bp, Homo sapiens
gcctggctagttttt

SEQ ID NO: 714520 - DNA, 15 bp, Homo sapiens
cctggctagtttttt

SEQ ID NO: 714521 - DNA, 15 bp, Homo sapiens
ctggctagttttttg

SEQ ID NO: 714522 - DNA, 15 bp, Homo sapiens
tggctagttttttgt

SEQ ID NO: 714523 - DNA, 15 bp, Homo sapiens
ggctagttttttgta

SEQ ID NO: 714524 - DNA, 15 bp, Homo sapiens
gctagttttttgtat

SEQ ID NO: 714525 - DNA, 15 bp, Homo sapiens
ctagttttttgtatt

SEQ ID NO: 714526 - DNA, 15 bp, Homo sapiens
tagttttttgtattt

SEQ ID NO: 714527 - DNA, 15 bp, Homo sapiens
agttttttgtatttt

SEQ ID NO: 714528 - DNA, 15 bp, Homo sapiens
gttttttgtattttt

SEQ ID NO: 714529 - DNA, 15 bp, Homo sapiens
ttgtatttttagtaa

SEQ ID NO: 714530 - DNA, 15 bp, Homo sapiens
tgtatttttagtaaa

SEQ ID NO: 714531 - DNA, 15 bp, Homo sapiens
gtatttttagtaaag

SEQ ID NO: 714532 - DNA, 15 bp, Homo sapiens
tatttttagtaaaga

SEQ ID NO: 714533 - DNA, 15 bp, Homo sapiens
atttttagtaaagat

SEQ ID NO: 714534 - DNA, 15 bp, Homo sapiens
tttttagtaaagatg

SEQ ID NO: 714535 - DNA, 15 bp, Homo sapiens
ttttagtaaagatgg

SEQ ID NO: 714536 - DNA, 15 bp, Homo sapiens
tttagtaaagatggg

SEQ ID NO: 714537 - DNA, 15 bp, Homo sapiens
ttagtaaagatgggg

SEQ ID NO: 714538 - DNA, 15 bp, Homo sapiens
tagtaaagatggggt

SEQ ID NO: 714539 - DNA, 15 bp, Homo sapiens
agtaaagatggggtt

SEQ ID NO: 714540 - DNA, 15 bp, Homo sapiens
gtaaagatggggttt

SEQ ID NO: 714541 - DNA, 15 bp, Homo sapiens
taaagatggggtttc

SEQ ID NO: 714542 - DNA, 15 bp, Homo sapiens
aaagatggggtttca

SEQ ID NO: 714543 - DNA, 15 bp, Homo sapiens
aagatggggtttcac

SEQ ID NO: 714544 - DNA, 15 bp, Homo sapiens
cttgaactcctgaca

SEQ ID NO: 714545 - DNA, 15 bp, Homo sapiens
ttgaactcctgacat

SEQ ID NO: 714546 - DNA, 15 bp, Homo sapiens
tgaactcctgacatc

SEQ ID NO: 714547 - DNA, 15 bp, Homo sapiens
gaactcctgacatca

SEQ ID NO: 714548 - DNA, 15 bp, Homo sapiens
aactcctgacatcag

SEQ ID NO: 714549 - DNA, 15 bp, Homo sapiens
actcctgacatcagg

SEQ ID NO: 714550 - DNA, 15 bp, Homo sapiens
ctcctgacatcaggt

SEQ ID NO: 714551 - DNA, 15 bp, Homo sapiens
tcctgacatcaggtg

SEQ ID NO: 714552 - DNA, 15 bp, Homo sapiens
cctgacatcaggtga

SEQ ID NO: 714553 - DNA, 15 bp, Homo sapiens
ctgacatcaggtgat

SEQ ID NO: 714554 - DNA, 15 bp, Homo sapiens
tgacatcaggtgatc

SEQ ID NO: 714555 - DNA, 15 bp, Homo sapiens
gacatcaggtgatcc

SEQ ID NO: 714556 - DNA, 15 bp, Homo sapiens
acatcaggtgatccg

SEQ ID NO: 714557 - DNA, 15 bp, Homo sapiens
catcaggtgatccgc

SEQ ID NO: 714558 - DNA, 15 bp, Homo sapiens
atcaggtgatccgcc

SEQ ID NO: 714559 - DNA, 15 bp, Homo sapiens
caggtgatccgccca

SEQ ID NO: 714560 - DNA, 15 bp, Homo sapiens
aggtgatccgcccac

SEQ ID NO: 714561 - DNA, 15 bp, Homo sapiens
ggtgatccgcccacc

SEQ ID NO: 714562 - DNA, 15 bp, Homo sapiens
tgatccgcccacctt

SEQ ID NO: 714563 - DNA, 15 bp, Homo sapiens
gatccgcccacctta

SEQ ID NO: 714564 - DNA, 15 bp, Homo sapiens
atccgcccaccttag

SEQ ID NO: 714565 - DNA, 15 bp, Homo sapiens
tccgcccaccttagc

SEQ ID NO: 714566 - DNA, 15 bp, Homo sapiens
ccgcccaccttagcc

SEQ ID NO: 714567 - DNA, 15 bp, Homo sapiens
cgcccaccttagcct

SEQ ID NO: 714568 - DNA, 15 bp, Homo sapiens
gcccaccttagcctc

SEQ ID NO: 714569 - DNA, 15 bp, Homo sapiens
cccaccttagcctcc

SEQ ID NO: 714570 - DNA, 15 bp, Homo sapiens
ccaccttagcctccc

SEQ ID NO: 714571 - DNA, 15 bp, Homo sapiens
caccttagcctccca

SEQ ID NO: 714572 - DNA, 15 bp, Homo sapiens
accttagcctcccaa

SEQ ID NO: 714573 - DNA, 15 bp, Homo sapiens
ccttagcctcccaaa

SEQ ID NO: 714574 - DNA, 15 bp, Homo sapiens
cttagcctcccaaag

SEQ ID NO: 714575 - DNA, 15 bp, Homo sapiens
ttagcctcccaaagt

SEQ ID NO: 714576 - DNA, 15 bp, Homo sapiens
tagcctcccaaagtg

SEQ ID NO: 714577 - DNA, 15 bp, Homo sapiens
aggcgtgagccacca

SEQ ID NO: 714578 - DNA, 15 bp, Homo sapiens
ggcgtgagccaccat

SEQ ID NO: 714579 - DNA, 15 bp, Homo sapiens
gcgtgagccaccata

SEQ ID NO: 714580 - DNA, 15 bp, Homo sapiens
cgtgagccaccatac

SEQ ID NO: 714581 - DNA, 15 bp, Homo sapiens
gtgagccaccatacc

SEQ ID NO: 714582 - DNA, 15 bp, Homo sapiens
tgagccaccatacct

SEQ ID NO: 714583 - DNA, 15 bp, Homo sapiens
gagccaccatacctg

SEQ ID NO: 714584 - DNA, 15 bp, Homo sapiens
agccaccatacctgg

SEQ ID NO: 714585 - DNA, 15 bp, Homo sapiens
gccaccatacctggc

SEQ ID NO: 714586 - DNA, 15 bp, Homo sapiens
ccaccatacctggcc

SEQ ID NO: 714587 - DNA, 15 bp, Homo sapiens
caccatacctggcca

SEQ ID NO: 714588 - DNA, 15 bp, Homo sapiens
accatacctggccag

SEQ ID NO: 714589 - DNA, 15 bp, Homo sapiens
ccatacctggccagc

SEQ ID NO: 714590 - DNA, 15 bp, Homo sapiens
catacctggccagca

SEQ ID NO: 714591 - DNA, 15 bp, Homo sapiens
atacctggccagcaa

SEQ ID NO: 714592 - DNA, 15 bp, Homo sapiens
tacctggccagcaaa

SEQ ID NO: 714593 - DNA, 15 bp, Homo sapiens
acctggccagcaaaa

SEQ ID NO: 714594 - DNA, 15 bp, Homo sapiens
cctggccagcaaaac

SEQ ID NO: 714595 - DNA, 15 bp, Homo sapiens
ctggccagcaaaacc

SEQ ID NO: 714596 - DNA, 15 bp, Homo sapiens
tggccagcaaaacct

SEQ ID NO: 714597 - DNA, 15 bp, Homo sapiens
ggccagcaaaacctc

SEQ ID NO: 714598 - DNA, 15 bp, Homo sapiens
gccagcaaaacctct

SEQ ID NO: 714599 - DNA, 15 bp, Homo sapiens
ccagcaaaacctctt

SEQ ID NO: 714600 - DNA, 15 bp, Homo sapiens
cagcaaaacctcttt

SEQ ID NO: 714601 - DNA, 15 bp, Homo sapiens
agcaaaacctcttta

SEQ ID NO: 714602 - DNA, 15 bp, Homo sapiens
gcaaaacctctttaa

SEQ ID NO: 714603 - DNA, 15 bp, Homo sapiens
caaaacctctttaac

SEQ ID NO: 714604 - DNA, 15 bp, Homo sapiens
aaaacctctttaact

SEQ ID NO: 714605 - DNA, 15 bp, Homo sapiens
aaacctctttaactt

SEQ ID NO: 714606 - DNA, 15 bp, Homo sapiens
aacctctttaacttg

SEQ ID NO: 714607 - DNA, 15 bp, Homo sapiens
acctctttaacttgt

SEQ ID NO: 714608 - DNA, 15 bp, Homo sapiens
cctctttaacttgtg

SEQ ID NO: 714609 - DNA, 15 bp, Homo sapiens
ctctttaacttgtgt

SEQ ID NO: 714610 - DNA, 15 bp, Homo sapiens
tctttaacttgtgtt

SEQ ID NO: 714611 - DNA, 15 bp, Homo sapiens
ctttaacttgtgttc

SEQ ID NO: 714612 - DNA, 15 bp, Homo sapiens
tttaacttgtgttcc

SEQ ID NO: 714613 - DNA, 15 bp, Homo sapiens
ttaacttgtgttcca

SEQ ID NO: 714614 - DNA, 15 bp, Homo sapiens
taacttgtgttccat

SEQ ID NO: 714615 - DNA, 15 bp, Homo sapiens
aacttgtgttccatg

SEQ ID NO: 714616 - DNA, 15 bp, Homo sapiens
acttgtgttccatgg

SEQ ID NO: 714617 - DNA, 15 bp, Homo sapiens
cttgtgttccatggg

SEQ ID NO: 714618 - DNA, 15 bp, Homo sapiens
ttgtgttccatgggc

SEQ ID NO: 714619 - DNA, 15 bp, Homo sapiens
tgtgttccatgggct

SEQ ID NO: 714620 - DNA, 15 bp, Homo sapiens
gtgttccatgggctc

SEQ ID NO: 714621 - DNA, 15 bp, Homo sapiens
tgttccatgggctcc

SEQ ID NO: 714622 - DNA, 15 bp, Homo sapiens
gttccatgggctcct

SEQ ID NO: 714623 - DNA, 15 bp, Homo sapiens
ttccatgggctcctt

SEQ ID NO: 714624 - DNA, 15 bp, Homo sapiens
tccatgggctccttt

SEQ ID NO: 714625 - DNA, 15 bp, Homo sapiens
ccatgggctcctttt

SEQ ID NO: 714626 - DNA, 15 bp, Homo sapiens
catgggctccttttc

SEQ ID NO: 714627 - DNA, 15 bp, Homo sapiens
atgggctccttttct

SEQ ID NO: 714628 - DNA, 15 bp, Homo sapiens
tgggctccttttctg

SEQ ID NO: 714629 - DNA, 15 bp, Homo sapiens
gggctccttttctgt

SEQ ID NO: 714630 - DNA, 15 bp, Homo sapiens
ggctccttttctgtg

SEQ ID NO: 714631 - DNA, 15 bp, Homo sapiens
gctccttttctgtgg

SEQ ID NO: 714632 - DNA, 15 bp, Homo sapiens
ctccttttctgtggg

SEQ ID NO: 714633 - DNA, 15 bp, Homo sapiens
tccttttctgtgggt

SEQ ID NO: 714634 - DNA, 15 bp, Homo sapiens
ccttttctgtgggtc

SEQ ID NO: 714635 - DNA, 15 bp, Homo sapiens
cttttctgtgggtca

SEQ ID NO: 714636 - DNA, 15 bp, Homo sapiens
ttttctgtgggtcaa

SEQ ID NO: 714637 - DNA, 15 bp, Homo sapiens
tttctgtgggtcaaa

SEQ ID NO: 714638 - DNA, 15 bp, Homo sapiens
ttctgtgggtcaaaa

SEQ ID NO: 714639 - DNA, 15 bp, Homo sapiens
tctgtgggtcaaaat

SEQ ID NO: 714640 - DNA, 15 bp, Homo sapiens
ctgtgggtcaaaatc

SEQ ID NO: 714641 - DNA, 15 bp, Homo sapiens
tgtgggtcaaaatcc

SEQ ID NO: 714642 - DNA, 15 bp, Homo sapiens
gtgggtcaaaatcct

SEQ ID NO: 714643 - DNA, 15 bp, Homo sapiens
tgggtcaaaatcctc

SEQ ID NO: 714644 - DNA, 15 bp, Homo sapiens
gggtcaaaatcctcc

SEQ ID NO: 714645 - DNA, 15 bp, Homo sapiens
ggtcaaaatcctcct

SEQ ID NO: 714646 - DNA, 15 bp, Homo sapiens
gtcaaaatcctcctg

SEQ ID NO: 714647 - DNA, 15 bp, Homo sapiens
tcaaaatcctcctgg

SEQ ID NO: 714648 - DNA, 15 bp, Homo sapiens
caaaatcctcctgga

SEQ ID NO: 714649 - DNA, 15 bp, Homo sapiens
aaaatcctcctggaa

SEQ ID NO: 714650 - DNA, 15 bp, Homo sapiens
aaatcctcctggaac

SEQ ID NO: 714651 - DNA, 15 bp, Homo sapiens
aatcctcctggaacc

SEQ ID NO: 714652 - DNA, 15 bp, Homo sapiens
atcctcctggaaccc

SEQ ID NO: 714653 - DNA, 15 bp, Homo sapiens
tcctcctggaaccct

SEQ ID NO: 714654 - DNA, 15 bp, Homo sapiens
cctcctggaacccta

SEQ ID NO: 714655 - DNA, 15 bp, Homo sapiens
ctcctggaaccctac

SEQ ID NO: 714656 - DNA, 15 bp, Homo sapiens
tcctggaaccctaca

SEQ ID NO: 714657 - DNA, 15 bp, Homo sapiens
cctggaaccctacaa

SEQ ID NO: 714658 - DNA, 15 bp, Homo sapiens
ctggaaccctacaat

SEQ ID NO: 714659 - DNA, 15 bp, Homo sapiens
tggaaccctacaatg

SEQ ID NO: 714660 - DNA, 15 bp, Homo sapiens
ggaaccctacaatgc

SEQ ID NO: 714661 - DNA, 15 bp, Homo sapiens
gaaccctacaatgca

SEQ ID NO: 714662 - DNA, 15 bp, Homo sapiens
aaccctacaatgcag

SEQ ID NO: 714663 - DNA, 15 bp, Homo sapiens
accctacaatgcagg

SEQ ID NO: 714664 - DNA, 15 bp, Homo sapiens
ccctacaatgcaggc

SEQ ID NO: 714665 - DNA, 15 bp, Homo sapiens
cctacaatgcaggcc

SEQ ID NO: 714666 - DNA, 15 bp, Homo sapiens
ctacaatgcaggccc

SEQ ID NO: 714667 - DNA, 15 bp, Homo sapiens
tacaatgcaggccct

SEQ ID NO: 714668 - DNA, 15 bp, Homo sapiens
acaatgcaggcccta

SEQ ID NO: 714669 - DNA, 15 bp, Homo sapiens
caatgcaggccctac

SEQ ID NO: 714670 - DNA, 15 bp, Homo sapiens
aatgcaggccctaca

SEQ ID NO: 714671 - DNA, 15 bp, Homo sapiens
atgcaggccctacag

SEQ ID NO: 714672 - DNA, 15 bp, Homo sapiens
tgcaggccctacagg

SEQ ID NO: 714673 - DNA, 15 bp, Homo sapiens
gcaggccctacaggg

SEQ ID NO: 714674 - DNA, 15 bp, Homo sapiens
caggccctacagggg

SEQ ID NO: 714675 - DNA, 15 bp, Homo sapiens
aggccctacaggggt

SEQ ID NO: 714676 - DNA, 15 bp, Homo sapiens
ggccctacaggggtg

SEQ ID NO: 714677 - DNA, 15 bp, Homo sapiens
gccctacaggggtgg

SEQ ID NO: 714678 - DNA, 15 bp, Homo sapiens
ccctacaggggtggg

SEQ ID NO: 714679 - DNA, 15 bp, Homo sapiens
cctacaggggtgggt

SEQ ID NO: 714680 - DNA, 15 bp, Homo sapiens
ctacaggggtgggtg

SEQ ID NO: 714681 - DNA, 15 bp, Homo sapiens
tacaggggtgggtgg

SEQ ID NO: 714682 - DNA, 15 bp, Homo sapiens
acaggggtgggtggt

SEQ ID NO: 714683 - DNA, 15 bp, Homo sapiens
caggggtgggtggta

SEQ ID NO: 714684 - DNA, 15 bp, Homo sapiens
aggggtgggtggtaa

SEQ ID NO: 714685 - DNA, 15 bp, Homo sapiens
ggggtgggtggtaag

SEQ ID NO: 714686 - DNA, 15 bp, Homo sapiens
gggtgggtggtaagt

SEQ ID NO: 714687 - DNA, 15 bp, Homo sapiens
ggtgggtggtaagtc

SEQ ID NO: 714688 - DNA, 15 bp, Homo sapiens
gtgggtggtaagtcc

SEQ ID NO: 714689 - DNA, 15 bp, Homo sapiens
tgggtggtaagtcca

SEQ ID NO: 714690 - DNA, 15 bp, Homo sapiens
gggtggtaagtccaa

SEQ ID NO: 714691 - DNA, 15 bp, Homo sapiens
ggtggtaagtccaac

SEQ ID NO: 714692 - DNA, 15 bp, Homo sapiens
gtggtaagtccaaca

SEQ ID NO: 714693 - DNA, 15 bp, Homo sapiens
tggtaagtccaacaa

SEQ ID NO: 714694 - DNA, 15 bp, Homo sapiens
ggtaagtccaacaaa

SEQ ID NO: 714695 - DNA, 15 bp, Homo sapiens
gtaagtccaacaaac

SEQ ID NO: 714696 - DNA, 15 bp, Homo sapiens
taagtccaacaaaca

SEQ ID NO: 714697 - DNA, 15 bp, Homo sapiens
aagtccaacaaacag

SEQ ID NO: 714698 - DNA, 15 bp, Homo sapiens
agtccaacaaacagg

SEQ ID NO: 714699 - DNA, 15 bp, Homo sapiens
gtccaacaaacagga

SEQ ID NO: 714700 - DNA, 15 bp, Homo sapiens
tccaacaaacaggat

SEQ ID NO: 714701 - DNA, 15 bp, Homo sapiens
ccaacaaacaggatt

SEQ ID NO: 714702 - DNA, 15 bp, Homo sapiens
caacaaacaggattt

SEQ ID NO: 714703 - DNA, 15 bp, Homo sapiens
aacaaacaggatttc

SEQ ID NO: 714704 - DNA, 15 bp, Homo sapiens
acaaacaggatttca

SEQ ID NO: 714705 - DNA, 15 bp, Homo sapiens
caaacaggatttcat

SEQ ID NO: 714706 - DNA, 15 bp, Homo sapiens
aaacaggatttcatc

SEQ ID NO: 714707 - DNA, 15 bp, Homo sapiens
aacaggatttcatct

SEQ ID NO: 714708 - DNA, 15 bp, Homo sapiens
acaggatttcatctt

SEQ ID NO: 714709 - DNA, 15 bp, Homo sapiens
caggatttcatcttc

SEQ ID NO: 714710 - DNA, 15 bp, Homo sapiens
aggatttcatcttct

SEQ ID NO: 714711 - DNA, 15 bp, Homo sapiens
ggatttcatcttctg

SEQ ID NO: 714712 - DNA, 15 bp, Homo sapiens
gatttcatcttctgg

SEQ ID NO: 714713 - DNA, 15 bp, Homo sapiens
atttcatcttctgga

SEQ ID NO: 714714 - DNA, 15 bp, Homo sapiens
tttcatcttctggag

SEQ ID NO: 714715 - DNA, 15 bp, Homo sapiens
ttcatcttctggagc

SEQ ID NO: 714716 - DNA, 15 bp, Homo sapiens
tcatcttctggagct

SEQ ID NO: 714717 - DNA, 15 bp, Homo sapiens
catcttctggagctc

SEQ ID NO: 714718 - DNA, 15 bp, Homo sapiens
atcttctggagctcc

SEQ ID NO: 714719 - DNA, 15 bp, Homo sapiens
tcttctggagctcct

SEQ ID NO: 714720 - DNA, 15 bp, Homo sapiens
cttctggagctcctg

SEQ ID NO: 714721 - DNA, 15 bp, Homo sapiens
ttctggagctcctgg

SEQ ID NO: 714722 - DNA, 15 bp, Homo sapiens
tctggagctcctgga

SEQ ID NO: 714723 - DNA, 15 bp, Homo sapiens
ctggagctcctggat

SEQ ID NO: 714724 - DNA, 15 bp, Homo sapiens
tggagctcctggatt

SEQ ID NO: 714725 - DNA, 15 bp, Homo sapiens
ggagctcctggattt

SEQ ID NO: 714726 - DNA, 15 bp, Homo sapiens
gagctcctggatttc

SEQ ID NO: 714727 - DNA, 15 bp, Homo sapiens
agctcctggatttca

SEQ ID NO: 714728 - DNA, 15 bp, Homo sapiens
gctcctggatttcat

SEQ ID NO: 714729 - DNA, 15 bp, Homo sapiens
ctcctggatttcatc

SEQ ID NO: 714730 - DNA, 15 bp, Homo sapiens
tcctggatttcatcg

SEQ ID NO: 714731 - DNA, 15 bp, Homo sapiens
cctggatttcatcgt

SEQ ID NO: 714732 - DNA, 15 bp, Homo sapiens
ctggatttcatcgtc

SEQ ID NO: 714733 - DNA, 15 bp, Homo sapiens
tggatttcatcgtcc

SEQ ID NO: 714734 - DNA, 15 bp, Homo sapiens
ggatttcatcgtccc

SEQ ID NO: 714735 - DNA, 15 bp, Homo sapiens
gatttcatcgtccca

SEQ ID NO: 714736 - DNA, 15 bp, Homo sapiens
atttcatcgtcccat

SEQ ID NO: 714737 - DNA, 15 bp, Homo sapiens
tttcatcgtcccatg

SEQ ID NO: 714738 - DNA, 15 bp, Homo sapiens
ttcatcgtcccatgg

SEQ ID NO: 714739 - DNA, 15 bp, Homo sapiens
tcatcgtcccatggg

SEQ ID NO: 714740 - DNA, 15 bp, Homo sapiens
catcgtcccatgggc

SEQ ID NO: 714741 - DNA, 15 bp, Homo sapiens
atcgtcccatgggcc

SEQ ID NO: 714742 - DNA, 15 bp, Homo sapiens
tcgtcccatgggcca

SEQ ID NO: 714743 - DNA, 15 bp, Homo sapiens
cgtcccatgggccac

SEQ ID NO: 714744 - DNA, 15 bp, Homo sapiens
gtcccatgggccaca

SEQ ID NO: 714745 - DNA, 15 bp, Homo sapiens
tcccatgggccacag

SEQ ID NO: 714746 - DNA, 15 bp, Homo sapiens
cccatgggccacagt

SEQ ID NO: 714747 - DNA, 15 bp, Homo sapiens
ccatgggccacagtg

SEQ ID NO: 714748 - DNA, 15 bp, Homo sapiens
catgggccacagtgc

SEQ ID NO: 714749 - DNA, 15 bp, Homo sapiens
atgggccacagtgca

SEQ ID NO: 714750 - DNA, 15 bp, Homo sapiens
tgggccacagtgcag

SEQ ID NO: 714751 - DNA, 15 bp, Homo sapiens
gggccacagtgcagc

SEQ ID NO: 714752 - DNA, 15 bp, Homo sapiens
ggccacagtgcagcg

SEQ ID NO: 714753 - DNA, 15 bp, Homo sapiens
gccacagtgcagcga

SEQ ID NO: 714754 - DNA, 15 bp, Homo sapiens
ccacagtgcagcgac

SEQ ID NO: 714755 - DNA, 15 bp, Homo sapiens
cacagtgcagcgaca

SEQ ID NO: 714756 - DNA, 15 bp, Homo sapiens
acagtgcagcgacag

SEQ ID NO: 714757 - DNA, 15 bp, Homo sapiens
cagtgcagcgacaga

SEQ ID NO: 714758 - DNA, 15 bp, Homo sapiens
agtgcagcgacagaa

SEQ ID NO: 714759 - DNA, 15 bp, Homo sapiens
gtgcagcgacagaac

SEQ ID NO: 714760 - DNA, 15 bp, Homo sapiens
tgcagcgacagaacc

SEQ ID NO: 714761 - DNA, 15 bp, Homo sapiens
gcagcgacagaacct

SEQ ID NO: 714762 - DNA, 15 bp, Homo sapiens
cagcgacagaacctc

SEQ ID NO: 714763 - DNA, 15 bp, Homo sapiens
agcgacagaacctcc

SEQ ID NO: 714764 - DNA, 15 bp, Homo sapiens
gcgacagaacctcct

SEQ ID NO: 714765 - DNA, 15 bp, Homo sapiens
cgacagaacctcctc

SEQ ID NO: 714766 - DNA, 15 bp, Homo sapiens
gacagaacctcctca

SEQ ID NO: 714767 - DNA, 15 bp, Homo sapiens
acagaacctcctcag

SEQ ID NO: 714768 - DNA, 15 bp, Homo sapiens
cagaacctcctcagc

SEQ ID NO: 714769 - DNA, 15 bp, Homo sapiens
agaacctcctcagct

SEQ ID NO: 714770 - DNA, 15 bp, Homo sapiens
gaacctcctcagctt

SEQ ID NO: 714771 - DNA, 15 bp, Homo sapiens
aacctcctcagcttt

SEQ ID NO: 714772 - DNA, 15 bp, Homo sapiens
acctcctcagctttc

SEQ ID NO: 714773 - DNA, 15 bp, Homo sapiens
cctcctcagctttct

SEQ ID NO: 714774 - DNA, 15 bp, Homo sapiens
ctcctcagctttctg

SEQ ID NO: 714775 - DNA, 15 bp, Homo sapiens
tcctcagctttctgt

SEQ ID NO: 714776 - DNA, 15 bp, Homo sapiens
cctcagctttctgta

SEQ ID NO: 714777 - DNA, 15 bp, Homo sapiens
ctcagctttctgtat

SEQ ID NO: 714778 - DNA, 15 bp, Homo sapiens
tcagctttctgtatt

SEQ ID NO: 714779 - DNA, 15 bp, Homo sapiens
cagctttctgtattg

SEQ ID NO: 714780 - DNA, 15 bp, Homo sapiens
agctttctgtattgt

SEQ ID NO: 714781 - DNA, 15 bp, Homo sapiens
gctttctgtattgtg

SEQ ID NO: 714782 - DNA, 15 bp, Homo sapiens
ctttctgtattgtgc

SEQ ID NO: 714783 - DNA, 15 bp, Homo sapiens
tttctgtattgtgct

SEQ ID NO: 714784 - DNA, 15 bp, Homo sapiens
ttctgtattgtgctc

SEQ ID NO: 714785 - DNA, 15 bp, Homo sapiens
tctgtattgtgctca

SEQ ID NO: 714786 - DNA, 15 bp, Homo sapiens
ctgtattgtgctcag

SEQ ID NO: 714787 - DNA, 15 bp, Homo sapiens
tgtattgtgctcagg

SEQ ID NO: 714788 - DNA, 15 bp, Homo sapiens
gtattgtgctcaggg

SEQ ID NO: 714789 - DNA, 15 bp, Homo sapiens
tattgtgctcagggc

SEQ ID NO: 714790 - DNA, 15 bp, Homo sapiens
attgtgctcagggct

SEQ ID NO: 714791 - DNA, 15 bp, Homo sapiens
ttgtgctcagggctt

SEQ ID NO: 714792 - DNA, 15 bp, Homo sapiens
tgtgctcagggcttc

SEQ ID NO: 714793 - DNA, 15 bp, Homo sapiens
gtgctcagggcttcg

SEQ ID NO: 714794 - DNA, 15 bp, Homo sapiens
tgctcagggcttcgg

SEQ ID NO: 714795 - DNA, 15 bp, Homo sapiens
gctcagggcttcggg

SEQ ID NO: 714796 - DNA, 15 bp, Homo sapiens
ctcagggcttcgggt

SEQ ID NO: 714797 - DNA, 15 bp, Homo sapiens
tcagggcttcgggta

SEQ ID NO: 714798 - DNA, 15 bp, Homo sapiens
cagggcttcgggtac

SEQ ID NO: 714799 - DNA, 15 bp, Homo sapiens
agggcttcgggtact

SEQ ID NO: 714800 - DNA, 15 bp, Homo sapiens
gggcttcgggtactg

SEQ ID NO: 714801 - DNA, 15 bp, Homo sapiens
ggcttcgggtactgc

SEQ ID NO: 714802 - DNA, 15 bp, Homo sapiens
gcttcgggtactgca

SEQ ID NO: 714803 - DNA, 15 bp, Homo sapiens
cttcgggtactgcaa

SEQ ID NO: 714804 - DNA, 15 bp, Homo sapiens
ttcgggtactgcaaa

SEQ ID NO: 714805 - DNA, 15 bp, Homo sapiens
tcgggtactgcaaac

SEQ ID NO: 714806 - DNA, 15 bp, Homo sapiens
cgggtactgcaaacc

SEQ ID NO: 714807 - DNA, 15 bp, Homo sapiens
gggtactgcaaacct

SEQ ID NO: 714808 - DNA, 15 bp, Homo sapiens
ggtactgcaaacctg

SEQ ID NO: 714809 - DNA, 15 bp, Homo sapiens
gtactgcaaacctga

SEQ ID NO: 714810 - DNA, 15 bp, Homo sapiens
tactgcaaacctgag

SEQ ID NO: 714811 - DNA, 15 bp, Homo sapiens
actgcaaacctgagc

SEQ ID NO: 714812 - DNA, 15 bp, Homo sapiens
ctgcaaacctgagcc

SEQ ID NO: 714813 - DNA, 15 bp, Homo sapiens
tgcaaacctgagcca

SEQ ID NO: 714814 - DNA, 15 bp, Homo sapiens
gcaaacctgagccaa

SEQ ID NO: 714815 - DNA, 15 bp, Homo sapiens
caaacctgagccaag

SEQ ID NO: 714816 - DNA, 15 bp, Homo sapiens
aaacctgagccaagg

SEQ ID NO: 714817 - DNA, 15 bp, Homo sapiens
aacctgagccaaggg

SEQ ID NO: 714818 - DNA, 15 bp, Homo sapiens
acctgagccaaggga

SEQ ID NO: 714819 - DNA, 15 bp, Homo sapiens
cctgagccaagggag

SEQ ID NO: 714820 - DNA, 15 bp, Homo sapiens
ctgagccaagggagg

SEQ ID NO: 714821 - DNA, 15 bp, Homo sapiens
tgagccaagggaggt

SEQ ID NO: 714822 - DNA, 15 bp, Homo sapiens
gagccaagggaggta

SEQ ID NO: 714823 - DNA, 15 bp, Homo sapiens
agccaagggaggtaa

SEQ ID NO: 714824 - DNA, 15 bp, Homo sapiens
gccaagggaggtaag

SEQ ID NO: 714825 - DNA, 15 bp, Homo sapiens
ccaagggaggtaaga

SEQ ID NO: 714826 - DNA, 15 bp, Homo sapiens
caagggaggtaagag

SEQ ID NO: 714827 - DNA, 15 bp, Homo sapiens
aagggaggtaagagg

SEQ ID NO: 714828 - DNA, 15 bp, Homo sapiens
agggaggtaagagga

SEQ ID NO: 714829 - DNA, 15 bp, Homo sapiens
gggaggtaagaggag

SEQ ID NO: 714830 - DNA, 15 bp, Homo sapiens
ggaggtaagaggagt

SEQ ID NO: 714831 - DNA, 15 bp, Homo sapiens
gaggtaagaggagtt

SEQ ID NO: 714832 - DNA, 15 bp, Homo sapiens
aggtaagaggagtta

SEQ ID NO: 714833 - DNA, 15 bp, Homo sapiens
ggtaagaggagttag

SEQ ID NO: 714834 - DNA, 15 bp, Homo sapiens
gtaagaggagttagt

SEQ ID NO: 714835 - DNA, 15 bp, Homo sapiens
taagaggagttagtt

SEQ ID NO: 714836 - DNA, 15 bp, Homo sapiens
aagaggagttagttc

SEQ ID NO: 714837 - DNA, 15 bp, Homo sapiens
agaggagttagttca

SEQ ID NO: 714838 - DNA, 15 bp, Homo sapiens
gaggagttagttcac

SEQ ID NO: 714839 - DNA, 15 bp, Homo sapiens
aggagttagttcact

SEQ ID NO: 714840 - DNA, 15 bp, Homo sapiens
ggagttagttcactg

SEQ ID NO: 714841 - DNA, 15 bp, Homo sapiens
gagttagttcactga

SEQ ID NO: 714842 - DNA, 15 bp, Homo sapiens
agttagttcactgat

SEQ ID NO: 714843 - DNA, 15 bp, Homo sapiens
gttagttcactgatt

SEQ ID NO: 714844 - DNA, 15 bp, Homo sapiens
ttagttcactgattt

SEQ ID NO: 714845 - DNA, 15 bp, Homo sapiens
tagttcactgatttg

SEQ ID NO: 714846 - DNA, 15 bp, Homo sapiens
agttcactgatttgt

SEQ ID NO: 714847 - DNA, 15 bp, Homo sapiens
gttcactgatttgtg

SEQ ID NO: 714848 - DNA, 15 bp, Homo sapiens
ttcactgatttgtga

SEQ ID NO: 714849 - DNA, 15 bp, Homo sapiens
tcactgatttgtgag

SEQ ID NO: 714850 - DNA, 15 bp, Homo sapiens
cactgatttgtgagg

SEQ ID NO: 714851 - DNA, 15 bp, Homo sapiens
actgatttgtgaggc

SEQ ID NO: 714852 - DNA, 15 bp, Homo sapiens
ctgatttgtgaggca

SEQ ID NO: 714853 - DNA, 15 bp, Homo sapiens
tgatttgtgaggcaa

SEQ ID NO: 714854 - DNA, 15 bp, Homo sapiens
gatttgtgaggcaaa

SEQ ID NO: 714855 - DNA, 15 bp, Homo sapiens
atttgtgaggcaaat

SEQ ID NO: 714856 - DNA, 15 bp, Homo sapiens
tttgtgaggcaaatg

SEQ ID NO: 714857 - DNA, 15 bp, Homo sapiens
ttgtgaggcaaatgt

SEQ ID NO: 714858 - DNA, 15 bp, Homo sapiens
tgtgaggcaaatgtt

SEQ ID NO: 714859 - DNA, 15 bp, Homo sapiens
gtgaggcaaatgtta

SEQ ID NO: 714860 - DNA, 15 bp, Homo sapiens
tgaggcaaatgttaa

SEQ ID NO: 714861 - DNA, 15 bp, Homo sapiens
gaggcaaatgttaat

SEQ ID NO: 714862 - DNA, 15 bp, Homo sapiens
aggcaaatgttaatt

SEQ ID NO: 714863 - DNA, 15 bp, Homo sapiens
ggcaaatgttaattg

SEQ ID NO: 714864 - DNA, 15 bp, Homo sapiens
gcaaatgttaattga

SEQ ID NO: 714865 - DNA, 15 bp, Homo sapiens
caaatgttaattgag

SEQ ID NO: 714866 - DNA, 15 bp, Homo sapiens
aaatgttaattgagg

SEQ ID NO: 714867 - DNA, 15 bp, Homo sapiens
aatgttaattgaggg

SEQ ID NO: 714868 - DNA, 15 bp, Homo sapiens
atgttaattgagggc

SEQ ID NO: 714869 - DNA, 15 bp, Homo sapiens
tgttaattgagggcc

SEQ ID NO: 714870 - DNA, 15 bp, Homo sapiens
gttaattgagggcct

SEQ ID NO: 714871 - DNA, 15 bp, Homo sapiens
ttaattgagggccta

SEQ ID NO: 714872 - DNA, 15 bp, Homo sapiens
taattgagggcctac

SEQ ID NO: 714873 - DNA, 15 bp, Homo sapiens
aattgagggcctact

SEQ ID NO: 714874 - DNA, 15 bp, Homo sapiens
attgagggcctactc

SEQ ID NO: 714875 - DNA, 15 bp, Homo sapiens
ttgagggcctactca

SEQ ID NO: 714876 - DNA, 15 bp, Homo sapiens
tgagggcctactcac

SEQ ID NO: 714877 - DNA, 15 bp, Homo sapiens
gagggcctactcaca

SEQ ID NO: 714878 - DNA, 15 bp, Homo sapiens
agggcctactcacac

SEQ ID NO: 714879 - DNA, 15 bp, Homo sapiens
gggcctactcacaca

SEQ ID NO: 714880 - DNA, 15 bp, Homo sapiens
ggcctactcacacac

SEQ ID NO: 714881 - DNA, 15 bp, Homo sapiens
gcctactcacacacc

SEQ ID NO: 714882 - DNA, 15 bp, Homo sapiens
cctactcacacaccg

SEQ ID NO: 714883 - DNA, 15 bp, Homo sapiens
ctactcacacaccgt

SEQ ID NO: 714884 - DNA, 15 bp, Homo sapiens
tactcacacaccgtg

SEQ ID NO: 714885 - DNA, 15 bp, Homo sapiens
actcacacaccgtga

SEQ ID NO: 714886 - DNA, 15 bp, Homo sapiens
ctcacacaccgtgaa

SEQ ID NO: 714887 - DNA, 15 bp, Homo sapiens
tcacacaccgtgaag

SEQ ID NO: 714888 - DNA, 15 bp, Homo sapiens
cacacaccgtgaaga

SEQ ID NO: 714889 - DNA, 15 bp, Homo sapiens
acacaccgtgaagaa

SEQ ID NO: 714890 - DNA, 15 bp, Homo sapiens
cacaccgtgaagaat

SEQ ID NO: 714891 - DNA, 15 bp, Homo sapiens
acaccgtgaagaatg

SEQ ID NO: 714892 - DNA, 15 bp, Homo sapiens
caccgtgaagaatgt

SEQ ID NO: 714893 - DNA, 15 bp, Homo sapiens
accgtgaagaatgta

SEQ ID NO: 714894 - DNA, 15 bp, Homo sapiens
ccgtgaagaatgtaa

SEQ ID NO: 714895 - DNA, 15 bp, Homo sapiens
cgtgaagaatgtaag

SEQ ID NO: 714896 - DNA, 15 bp, Homo sapiens
gtgaagaatgtaaga

SEQ ID NO: 714897 - DNA, 15 bp, Homo sapiens
tgaagaatgtaagat

SEQ ID NO: 714898 - DNA, 15 bp, Homo sapiens
gaagaatgtaagatc

SEQ ID NO: 714899 - DNA, 15 bp, Homo sapiens
aagaatgtaagatca

SEQ ID NO: 714900 - DNA, 15 bp, Homo sapiens
agaatgtaagatcat

SEQ ID NO: 714901 - DNA, 15 bp, Homo sapiens
gaatgtaagatcatt

SEQ ID NO: 714902 - DNA, 15 bp, Homo sapiens
aatgtaagatcattt

SEQ ID NO: 714903 - DNA, 15 bp, Homo sapiens
atgtaagatcatttc

SEQ ID NO: 714904 - DNA, 15 bp, Homo sapiens
tgtaagatcatttct

SEQ ID NO: 714905 - DNA, 15 bp, Homo sapiens
gtaagatcatttctg

SEQ ID NO: 714906 - DNA, 15 bp, Homo sapiens
taagatcatttctgt

SEQ ID NO: 714907 - DNA, 15 bp, Homo sapiens
aagatcatttctgtc

SEQ ID NO: 714908 - DNA, 15 bp, Homo sapiens
agatcatttctgtca

SEQ ID NO: 714909 - DNA, 15 bp, Homo sapiens
gatcatttctgtcat

SEQ ID NO: 714910 - DNA, 15 bp, Homo sapiens
atcatttctgtcatc

SEQ ID NO: 714911 - DNA, 15 bp, Homo sapiens
tcatttctgtcatca

SEQ ID NO: 714912 - DNA, 15 bp, Homo sapiens
catttctgtcatcaa

SEQ ID NO: 714913 - DNA, 15 bp, Homo sapiens
atttctgtcatcaag

SEQ ID NO: 714914 - DNA, 15 bp, Homo sapiens
tttctgtcatcaagg

SEQ ID NO: 714915 - DNA, 15 bp, Homo sapiens
ttctgtcatcaagga

SEQ ID NO: 714916 - DNA, 15 bp, Homo sapiens
tctgtcatcaaggat

SEQ ID NO: 714917 - DNA, 15 bp, Homo sapiens
ctgtcatcaaggatc

SEQ ID NO: 714918 - DNA, 15 bp, Homo sapiens
tgtcatcaaggatcc

SEQ ID NO: 714919 - DNA, 15 bp, Homo sapiens
gtcatcaaggatcct

SEQ ID NO: 714920 - DNA, 15 bp, Homo sapiens
tcatcaaggatccta

SEQ ID NO: 714921 - DNA, 15 bp, Homo sapiens
catcaaggatcctac

SEQ ID NO: 714922 - DNA, 15 bp, Homo sapiens
atcaaggatcctaca

SEQ ID NO: 714923 - DNA, 15 bp, Homo sapiens
tcaaggatcctacaa

SEQ ID NO: 714924 - DNA, 15 bp, Homo sapiens
caaggatcctacaat

SEQ ID NO: 714925 - DNA, 15 bp, Homo sapiens
aaggatcctacaatc

SEQ ID NO: 714926 - DNA, 15 bp, Homo sapiens
aggatcctacaatct

SEQ ID NO: 714927 - DNA, 15 bp, Homo sapiens
ggatcctacaatcta

SEQ ID NO: 714928 - DNA, 15 bp, Homo sapiens
gatcctacaatctag

SEQ ID NO: 714929 - DNA, 15 bp, Homo sapiens
atcctacaatctaga

SEQ ID NO: 714930 - DNA, 15 bp, Homo sapiens
tcctacaatctagaa

SEQ ID NO: 714931 - DNA, 15 bp, Homo sapiens
cctacaatctagaac

SEQ ID NO: 714932 - DNA, 15 bp, Homo sapiens
ctacaatctagaaca

SEQ ID NO: 714933 - DNA, 15 bp, Homo sapiens
tacaatctagaacag

SEQ ID NO: 714934 - DNA, 15 bp, Homo sapiens
acaatctagaacagt

SEQ ID NO: 714935 - DNA, 15 bp, Homo sapiens
caatctagaacagta

SEQ ID NO: 714936 - DNA, 15 bp, Homo sapiens
aatctagaacagtaa

SEQ ID NO: 714937 - DNA, 15 bp, Homo sapiens
atctagaacagtaag

SEQ ID NO: 714938 - DNA, 15 bp, Homo sapiens
tctagaacagtaagt

SEQ ID NO: 714939 - DNA, 15 bp, Homo sapiens
ctagaacagtaagta

SEQ ID NO: 714940 - DNA, 15 bp, Homo sapiens
tagaacagtaagtaa

SEQ ID NO: 714941 - DNA, 15 bp, Homo sapiens
agaacagtaagtaag

SEQ ID NO: 714942 - DNA, 15 bp, Homo sapiens
gaacagtaagtaaga

SEQ ID NO: 714943 - DNA, 15 bp, Homo sapiens
aacagtaagtaagac

SEQ ID NO: 714944 - DNA, 15 bp, Homo sapiens
acagtaagtaagaca

SEQ ID NO: 714945 - DNA, 15 bp, Homo sapiens
cagtaagtaagacac

SEQ ID NO: 714946 - DNA, 15 bp, Homo sapiens
agtaagtaagacact

SEQ ID NO: 714947 - DNA, 15 bp, Homo sapiens
gtaagtaagacactg

SEQ ID NO: 714948 - DNA, 15 bp, Homo sapiens
taagtaagacactgt

SEQ ID NO: 714949 - DNA, 15 bp, Homo sapiens
aagtaagacactgtc

SEQ ID NO: 714950 - DNA, 15 bp, Homo sapiens
agtaagacactgtca

SEQ ID NO: 714951 - DNA, 15 bp, Homo sapiens
gtaagacactgtcac

SEQ ID NO: 714952 - DNA, 15 bp, Homo sapiens
taagacactgtcaca

SEQ ID NO: 714953 - DNA, 15 bp, Homo sapiens
aagacactgtcacaa

SEQ ID NO: 714954 - DNA, 15 bp, Homo sapiens
agacactgtcacaaa

SEQ ID NO: 714955 - DNA, 15 bp, Homo sapiens
gacactgtcacaaac

SEQ ID NO: 714956 - DNA, 15 bp, Homo sapiens
acactgtcacaaaca

SEQ ID NO: 714957 - DNA, 15 bp, Homo sapiens
cactgtcacaaacac

SEQ ID NO: 714958 - DNA, 15 bp, Homo sapiens
actgtcacaaacacg

SEQ ID NO: 714959 - DNA, 15 bp, Homo sapiens
ctgtcacaaacacgc

SEQ ID NO: 714960 - DNA, 15 bp, Homo sapiens
tgtcacaaacacgct

SEQ ID NO: 714961 - DNA, 15 bp, Homo sapiens
gtcacaaacacgctg

SEQ ID NO: 714962 - DNA, 15 bp, Homo sapiens
tcacaaacacgctgc

SEQ ID NO: 714963 - DNA, 15 bp, Homo sapiens
cacaaacacgctgca

SEQ ID NO: 714964 - DNA, 15 bp, Homo sapiens
acaaacacgctgcaa

SEQ ID NO: 714965 - DNA, 15 bp, Homo sapiens
caaacacgctgcaaa

SEQ ID NO: 714966 - DNA, 15 bp, Homo sapiens
aaacacgctgcaaaa

SEQ ID NO: 714967 - DNA, 15 bp, Homo sapiens
aacacgctgcaaaac

SEQ ID NO: 714968 - DNA, 15 bp, Homo sapiens
acacgctgcaaaaca

SEQ ID NO: 714969 - DNA, 15 bp, Homo sapiens
cacgctgcaaaacaa

SEQ ID NO: 714970 - DNA, 15 bp, Homo sapiens
acgctgcaaaacaaa

SEQ ID NO: 714971 - DNA, 15 bp, Homo sapiens
cgctgcaaaacaaaa

SEQ ID NO: 714972 - DNA, 15 bp, Homo sapiens
gctgcaaaacaaaag

SEQ ID NO: 714973 - DNA, 15 bp, Homo sapiens
ctgcaaaacaaaagt

SEQ ID NO: 714974 - DNA, 15 bp, Homo sapiens
tgcaaaacaaaagtg

SEQ ID NO: 714975 - DNA, 15 bp, Homo sapiens
gcaaaacaaaagtgt

SEQ ID NO: 714976 - DNA, 15 bp, Homo sapiens
caaaacaaaagtgtg

SEQ ID NO: 714977 - DNA, 15 bp, Homo sapiens
aaaacaaaagtgtga

SEQ ID NO: 714978 - DNA, 15 bp, Homo sapiens
aaacaaaagtgtgag

SEQ ID NO: 714979 - DNA, 15 bp, Homo sapiens
aacaaaagtgtgaga

SEQ ID NO: 714980 - DNA, 15 bp, Homo sapiens
acaaaagtgtgagaa

SEQ ID NO: 714981 - DNA, 15 bp, Homo sapiens
caaaagtgtgagaaa

SEQ ID NO: 714982 - DNA, 15 bp, Homo sapiens
aaaagtgtgagaaaa

SEQ ID NO: 714983 - DNA, 15 bp, Homo sapiens
aaagtgtgagaaaac

SEQ ID NO: 714984 - DNA, 15 bp, Homo sapiens
aagtgtgagaaaaca

SEQ ID NO: 714985 - DNA, 15 bp, Homo sapiens
agtgtgagaaaacag

SEQ ID NO: 714986 - DNA, 15 bp, Homo sapiens
gtgtgagaaaacagt

SEQ ID NO: 714987 - DNA, 15 bp, Homo sapiens
tgtgagaaaacagtt

SEQ ID NO: 714988 - DNA, 15 bp, Homo sapiens
gtgagaaaacagtta

SEQ ID NO: 714989 - DNA, 15 bp, Homo sapiens
tgagaaaacagttat

SEQ ID NO: 714990 - DNA, 15 bp, Homo sapiens
gagaaaacagttata

SEQ ID NO: 714991 - DNA, 15 bp, Homo sapiens
agaaaacagttataa

SEQ ID NO: 714992 - DNA, 15 bp, Homo sapiens
gaaaacagttataaa

SEQ ID NO: 714993 - DNA, 15 bp, Homo sapiens
aaaacagttataaaa

SEQ ID NO: 714994 - DNA, 15 bp, Homo sapiens
aaacagttataaaag

SEQ ID NO: 714995 - DNA, 15 bp, Homo sapiens
aacagttataaaaga

SEQ ID NO: 714996 - DNA, 15 bp, Homo sapiens
acagttataaaagat

SEQ ID NO: 714997 - DNA, 15 bp, Homo sapiens
cagttataaaagata

SEQ ID NO: 714998 - DNA, 15 bp, Homo sapiens
agttataaaagatag

SEQ ID NO: 714999 - DNA, 15 bp, Homo sapiens
gttataaaagatagt

SEQ ID NO: 715000 - DNA, 15 bp, Homo sapiens
ttataaaagatagta

SEQ ID NO: 715001 - DNA, 15 bp, Homo sapiens
tataaaagatagtat

SEQ ID NO: 715002 - DNA, 15 bp, Homo sapiens
ataaaagatagtata

SEQ ID NO: 715003 - DNA, 15 bp, Homo sapiens
taaaagatagtatag

SEQ ID NO: 715004 - DNA, 15 bp, Homo sapiens
aaaagatagtataga

SEQ ID NO: 715005 - DNA, 15 bp, Homo sapiens
aaagatagtatagac

SEQ ID NO: 715006 - DNA, 15 bp, Homo sapiens
aagatagtatagacg

SEQ ID NO: 715007 - DNA, 15 bp, Homo sapiens
agatagtatagacgc

SEQ ID NO: 715008 - DNA, 15 bp, Homo sapiens
gatagtatagacgcc

SEQ ID NO: 715009 - DNA, 15 bp, Homo sapiens
atagtatagacgcca

SEQ ID NO: 715010 - DNA, 15 bp, Homo sapiens
tagtatagacgccag

SEQ ID NO: 715011 - DNA, 15 bp, Homo sapiens
agtatagacgccagg

SEQ ID NO: 715012 - DNA, 15 bp, Homo sapiens
gtatagacgccagga

SEQ ID NO: 715013 - DNA, 15 bp, Homo sapiens
tatagacgccaggat

SEQ ID NO: 715014 - DNA, 15 bp, Homo sapiens
atagacgccaggatc

SEQ ID NO: 715015 - DNA, 15 bp, Homo sapiens
tagacgccaggatcc

SEQ ID NO: 715016 - DNA, 15 bp, Homo sapiens
agacgccaggatcct

SEQ ID NO: 715017 - DNA, 15 bp, Homo sapiens
gacgccaggatcctg

SEQ ID NO: 715018 - DNA, 15 bp, Homo sapiens
acgccaggatcctga

SEQ ID NO: 715019 - DNA, 15 bp, Homo sapiens
cgccaggatcctgag

SEQ ID NO: 715020 - DNA, 15 bp, Homo sapiens
gccaggatcctgaga

SEQ ID NO: 715021 - DNA, 15 bp, Homo sapiens
ccaggatcctgagaa

SEQ ID NO: 715022 - DNA, 15 bp, Homo sapiens
caggatcctgagaac

SEQ ID NO: 715023 - DNA, 15 bp, Homo sapiens
aggatcctgagaaca

SEQ ID NO: 715024 - DNA, 15 bp, Homo sapiens
ggatcctgagaacac

SEQ ID NO: 715025 - DNA, 15 bp, Homo sapiens
gatcctgagaacacg

SEQ ID NO: 715026 - DNA, 15 bp, Homo sapiens
atcctgagaacacga

SEQ ID NO: 715027 - DNA, 15 bp, Homo sapiens
tcctgagaacacgag

SEQ ID NO: 715028 - DNA, 15 bp, Homo sapiens
cctgagaacacgagg

SEQ ID NO: 715029 - DNA, 15 bp, Homo sapiens
ctgagaacacgaggc

SEQ ID NO: 715030 - DNA, 15 bp, Homo sapiens
tgagaacacgaggca

SEQ ID NO: 715031 - DNA, 15 bp, Homo sapiens
gagaacacgaggcaa

SEQ ID NO: 715032 - DNA, 15 bp, Homo sapiens
agaacacgaggcaaa

SEQ ID NO: 715033 - DNA, 15 bp, Homo sapiens
gaacacgaggcaaat

SEQ ID NO: 715034 - DNA, 15 bp, Homo sapiens
aacacgaggcaaatc

SEQ ID NO: 715035 - DNA, 15 bp, Homo sapiens
acacgaggcaaatct

SEQ ID NO: 715036 - DNA, 15 bp, Homo sapiens
cacgaggcaaatctc

SEQ ID NO: 715037 - DNA, 15 bp, Homo sapiens
acgaggcaaatctca

SEQ ID NO: 715038 - DNA, 15 bp, Homo sapiens
cgaggcaaatctcaa

SEQ ID NO: 715039 - DNA, 15 bp, Homo sapiens
gaggcaaatctcaaa

SEQ ID NO: 715040 - DNA, 15 bp, Homo sapiens
aggcaaatctcaaag

SEQ ID NO: 715041 - DNA, 15 bp, Homo sapiens
ggcaaatctcaaagc

SEQ ID NO: 715042 - DNA, 15 bp, Homo sapiens
gcaaatctcaaagct

SEQ ID NO: 715043 - DNA, 15 bp, Homo sapiens
caaatctcaaagctt

SEQ ID NO: 715044 - DNA, 15 bp, Homo sapiens
aaatctcaaagcttt

SEQ ID NO: 715045 - DNA, 15 bp, Homo sapiens
aatctcaaagctttt

SEQ ID NO: 715046 - DNA, 15 bp, Homo sapiens
atctcaaagcttttt

SEQ ID NO: 715047 - DNA, 15 bp, Homo sapiens
tctcaaagctttttt

SEQ ID NO: 715048 - DNA, 15 bp, Homo sapiens
ctcaaagcttttttt

SEQ ID NO: 715049 - DNA, 15 bp, Homo sapiens
tcaaagctttttttt

SEQ ID NO: 715050 - DNA, 15 bp, Homo sapiens
caaagcttttttttt

SEQ ID NO: 715051 - DNA, 15 bp, Homo sapiens
aaagctttttttttt

SEQ ID NO: 715052 - DNA, 15 bp, Homo sapiens
aagcttttttttttt

SEQ ID NO: 715053 - DNA, 15 bp, Homo sapiens
agctttttttttttt

SEQ ID NO: 715054 - DNA, 15 bp, Homo sapiens
gcttttttttttttt

SEQ ID NO: 715055 - DNA, 15 bp, Homo sapiens
ttttttttgagacaa

SEQ ID NO: 715056 - DNA, 15 bp, Homo sapiens
tttttttgagacaag

SEQ ID NO: 715057 - DNA, 15 bp, Homo sapiens
ttttttgagacaaga

SEQ ID NO: 715058 - DNA, 15 bp, Homo sapiens
tttttgagacaagag

SEQ ID NO: 715059 - DNA, 15 bp, Homo sapiens
ttttgagacaagagt

SEQ ID NO: 715060 - DNA, 15 bp, Homo sapiens
tttgagacaagagtt

SEQ ID NO: 715061 - DNA, 15 bp, Homo sapiens
ttgagacaagagttt

SEQ ID NO: 715062 - DNA, 15 bp, Homo sapiens
tgagacaagagtttc

SEQ ID NO: 715063 - DNA, 15 bp, Homo sapiens
gagacaagagtttca

SEQ ID NO: 715064 - DNA, 15 bp, Homo sapiens
agacaagagtttcac

SEQ ID NO: 715065 - DNA, 15 bp, Homo sapiens
gacaagagtttcact

SEQ ID NO: 715066 - DNA, 15 bp, Homo sapiens
acaagagtttcactc

SEQ ID NO: 715067 - DNA, 15 bp, Homo sapiens
caagagtttcactct

SEQ ID NO: 715068 - DNA, 15 bp, Homo sapiens
aagagtttcactctt

SEQ ID NO: 715069 - DNA, 15 bp, Homo sapiens
agagtttcactcttg

SEQ ID NO: 715070 - DNA, 15 bp, Homo sapiens
gagtttcactcttgt

SEQ ID NO: 715071 - DNA, 15 bp, Homo sapiens
agtttcactcttgtc

SEQ ID NO: 715072 - DNA, 15 bp, Homo sapiens
gtttcactcttgtcg

SEQ ID NO: 715073 - DNA, 15 bp, Homo sapiens
tttcactcttgtcgc

SEQ ID NO: 715074 - DNA, 15 bp, Homo sapiens
ttcactcttgtcgcc

SEQ ID NO: 715075 - DNA, 15 bp, Homo sapiens
tcactcttgtcgccc

SEQ ID NO: 715076 - DNA, 15 bp, Homo sapiens
cactcttgtcgccca

SEQ ID NO: 715077 - DNA, 15 bp, Homo sapiens
actcttgtcgcccag

SEQ ID NO: 715078 - DNA, 15 bp, Homo sapiens
ctcttgtcgcccagg

SEQ ID NO: 715079 - DNA, 15 bp, Homo sapiens
tcttgtcgcccaggt

SEQ ID NO: 715080 - DNA, 15 bp, Homo sapiens
cttgtcgcccaggta

SEQ ID NO: 715081 - DNA, 15 bp, Homo sapiens
ttgtcgcccaggtat

SEQ ID NO: 715082 - DNA, 15 bp, Homo sapiens
tgtcgcccaggtatt

SEQ ID NO: 715083 - DNA, 15 bp, Homo sapiens
gtcgcccaggtattt

SEQ ID NO: 715084 - DNA, 15 bp, Homo sapiens
tcgcccaggtatttg

SEQ ID NO: 715085 - DNA, 15 bp, Homo sapiens
cgcccaggtatttgt

SEQ ID NO: 715086 - DNA, 15 bp, Homo sapiens
gcccaggtatttgtg

SEQ ID NO: 715087 - DNA, 15 bp, Homo sapiens
cccaggtatttgtgc

SEQ ID NO: 715088 - DNA, 15 bp, Homo sapiens
ccaggtatttgtgcg

SEQ ID NO: 715089 - DNA, 15 bp, Homo sapiens
caggtatttgtgcga

SEQ ID NO: 715090 - DNA, 15 bp, Homo sapiens
aggtatttgtgcgac

SEQ ID NO: 715091 - DNA, 15 bp, Homo sapiens
ggtatttgtgcgacc

SEQ ID NO: 715092 - DNA, 15 bp, Homo sapiens
gtatttgtgcgacct

SEQ ID NO: 715093 - DNA, 15 bp, Homo sapiens
tatttgtgcgacctc

SEQ ID NO: 715094 - DNA, 15 bp, Homo sapiens
atttgtgcgacctcg

SEQ ID NO: 715095 - DNA, 15 bp, Homo sapiens
tttgtgcgacctcgg

SEQ ID NO: 715096 - DNA, 15 bp, Homo sapiens
ttgtgcgacctcggc

SEQ ID NO: 715097 - DNA, 15 bp, Homo sapiens
tgtgcgacctcggct

SEQ ID NO: 715098 - DNA, 15 bp, Homo sapiens
aacctccgcctcccg

SEQ ID NO: 715099 - DNA, 15 bp, Homo sapiens
acctccgcctcccgg

SEQ ID NO: 715100 - DNA, 15 bp, Homo sapiens
cctccgcctcccggg

SEQ ID NO: 715101 - DNA, 15 bp, Homo sapiens
ctccgcctcccgggt

SEQ ID NO: 715102 - DNA, 15 bp, Homo sapiens
tccgcctcccgggtt

SEQ ID NO: 715103 - DNA, 15 bp, Homo sapiens
ccgcctcccgggttc

SEQ ID NO: 715104 - DNA, 15 bp, Homo sapiens
cgcctcccgggttca

SEQ ID NO: 715105 - DNA, 15 bp, Homo sapiens
ctcccgggttcaagt

SEQ ID NO: 715106 - DNA, 15 bp, Homo sapiens
tcccgggttcaagtg

SEQ ID NO: 715107 - DNA, 15 bp, Homo sapiens
cccgggttcaagtga

SEQ ID NO: 715108 - DNA, 15 bp, Homo sapiens
ccgggttcaagtgat

SEQ ID NO: 715109 - DNA, 15 bp, Homo sapiens
cgggttcaagtgatt

SEQ ID NO: 715110 - DNA, 15 bp, Homo sapiens
gggttcaagtgattc

SEQ ID NO: 715111 - DNA, 15 bp, Homo sapiens
ctgcctcaacctcct

SEQ ID NO: 715112 - DNA, 15 bp, Homo sapiens
tgcctcaacctcctg

SEQ ID NO: 715113 - DNA, 15 bp, Homo sapiens
gcctcaacctcctgg

SEQ ID NO: 715114 - DNA, 15 bp, Homo sapiens
cctcaacctcctggg

SEQ ID NO: 715115 - DNA, 15 bp, Homo sapiens
ctcaacctcctgggc

SEQ ID NO: 715116 - DNA, 15 bp, Homo sapiens
tcaacctcctgggca

SEQ ID NO: 715117 - DNA, 15 bp, Homo sapiens
caacctcctgggcag

SEQ ID NO: 715118 - DNA, 15 bp, Homo sapiens
aacctcctgggcagc

SEQ ID NO: 715119 - DNA, 15 bp, Homo sapiens
acctcctgggcagct

SEQ ID NO: 715120 - DNA, 15 bp, Homo sapiens
cctcctgggcagctg

SEQ ID NO: 715121 - DNA, 15 bp, Homo sapiens
ctcctgggcagctgg

SEQ ID NO: 715122 - DNA, 15 bp, Homo sapiens
tcctgggcagctgga

SEQ ID NO: 715123 - DNA, 15 bp, Homo sapiens
cctgggcagctggat

SEQ ID NO: 715124 - DNA, 15 bp, Homo sapiens
ctgggcagctggatt

SEQ ID NO: 715125 - DNA, 15 bp, Homo sapiens
tgggcagctggatta

SEQ ID NO: 715126 - DNA, 15 bp, Homo sapiens
gggcagctggattac

SEQ ID NO: 715127 - DNA, 15 bp, Homo sapiens
ggcagctggattaca

SEQ ID NO: 715128 - DNA, 15 bp, Homo sapiens
gcagctggattacag

SEQ ID NO: 715129 - DNA, 15 bp, Homo sapiens
cagctggattacagg

SEQ ID NO: 715130 - DNA, 15 bp, Homo sapiens
agctggattacaggc

SEQ ID NO: 715131 - DNA, 15 bp, Homo sapiens
tggattacaggcgtg

SEQ ID NO: 715132 - DNA, 15 bp, Homo sapiens
ttacaggcgtgagct

SEQ ID NO: 715133 - DNA, 15 bp, Homo sapiens
tacaggcgtgagcta

SEQ ID NO: 715134 - DNA, 15 bp, Homo sapiens
acaggcgtgagctac

SEQ ID NO: 715135 - DNA, 15 bp, Homo sapiens
caggcgtgagctacc

SEQ ID NO: 715136 - DNA, 15 bp, Homo sapiens
aggcgtgagctacca

SEQ ID NO: 715137 - DNA, 15 bp, Homo sapiens
ggcgtgagctaccac

SEQ ID NO: 715138 - DNA, 15 bp, Homo sapiens
gcgtgagctaccaca

SEQ ID NO: 715139 - DNA, 15 bp, Homo sapiens
cgtgagctaccacac

SEQ ID NO: 715140 - DNA, 15 bp, Homo sapiens
gtgagctaccacacc

SEQ ID NO: 715141 - DNA, 15 bp, Homo sapiens
tgagctaccacaccc

SEQ ID NO: 715142 - DNA, 15 bp, Homo sapiens
gagctaccacacccg

SEQ ID NO: 715143 - DNA, 15 bp, Homo sapiens
agctaccacacccgg

SEQ ID NO: 715144 - DNA, 15 bp, Homo sapiens
gctaccacacccggc

SEQ ID NO: 715145 - DNA, 15 bp, Homo sapiens
ctaccacacccggcc

SEQ ID NO: 715146 - DNA, 15 bp, Homo sapiens
taccacacccggcct

SEQ ID NO: 715147 - DNA, 15 bp, Homo sapiens
accacacccggcctc

SEQ ID NO: 715148 - DNA, 15 bp, Homo sapiens
ccacacccggcctca

SEQ ID NO: 715149 - DNA, 15 bp, Homo sapiens
cacacccggcctcaa

SEQ ID NO: 715150 - DNA, 15 bp, Homo sapiens
acacccggcctcaaa

SEQ ID NO: 715151 - DNA, 15 bp, Homo sapiens
cacccggcctcaaag

SEQ ID NO: 715152 - DNA, 15 bp, Homo sapiens
acccggcctcaaagt

SEQ ID NO: 715153 - DNA, 15 bp, Homo sapiens
cccggcctcaaagtt

SEQ ID NO: 715154 - DNA, 15 bp, Homo sapiens
ccggcctcaaagttt

SEQ ID NO: 715155 - DNA, 15 bp, Homo sapiens
cggcctcaaagtttt

SEQ ID NO: 715156 - DNA, 15 bp, Homo sapiens
ggcctcaaagttttc

SEQ ID NO: 715157 - DNA, 15 bp, Homo sapiens
gcctcaaagttttca

SEQ ID NO: 715158 - DNA, 15 bp, Homo sapiens
cctcaaagttttcat

SEQ ID NO: 715159 - DNA, 15 bp, Homo sapiens
ctcaaagttttcatc

SEQ ID NO: 715160 - DNA, 15 bp, Homo sapiens
tcaaagttttcatct

SEQ ID NO: 715161 - DNA, 15 bp, Homo sapiens
caaagttttcatctg

SEQ ID NO: 715162 - DNA, 15 bp, Homo sapiens
aaagttttcatctgg

SEQ ID NO: 715163 - DNA, 15 bp, Homo sapiens
aagttttcatctggt

SEQ ID NO: 715164 - DNA, 15 bp, Homo sapiens
agttttcatctggta

SEQ ID NO: 715165 - DNA, 15 bp, Homo sapiens
gttttcatctggtat

SEQ ID NO: 715166 - DNA, 15 bp, Homo sapiens
ttttcatctggtatt

SEQ ID NO: 715167 - DNA, 15 bp, Homo sapiens
tttcatctggtattt

SEQ ID NO: 715168 - DNA, 15 bp, Homo sapiens
ttcatctggtattta

SEQ ID NO: 715169 - DNA, 15 bp, Homo sapiens
tcatctggtatttac

SEQ ID NO: 715170 - DNA, 15 bp, Homo sapiens
catctggtatttacc

SEQ ID NO: 715171 - DNA, 15 bp, Homo sapiens
atctggtatttacca

SEQ ID NO: 715172 - DNA, 15 bp, Homo sapiens
tctggtatttaccac

SEQ ID NO: 715173 - DNA, 15 bp, Homo sapiens
ctggtatttaccaca

SEQ ID NO: 715174 - DNA, 15 bp, Homo sapiens
tggtatttaccacag

SEQ ID NO: 715175 - DNA, 15 bp, Homo sapiens
ggtatttaccacagg

SEQ ID NO: 715176 - DNA, 15 bp, Homo sapiens
gtatttaccacaggt

SEQ ID NO: 715177 - DNA, 15 bp, Homo sapiens
tatttaccacaggtt

SEQ ID NO: 715178 - DNA, 15 bp, Homo sapiens
atttaccacaggttt

SEQ ID NO: 715179 - DNA, 15 bp, Homo sapiens
tttaccacaggttta

SEQ ID NO: 715180 - DNA, 15 bp, Homo sapiens
ttaccacaggtttac

SEQ ID NO: 715181 - DNA, 15 bp, Homo sapiens
taccacaggtttaca

SEQ ID NO: 715182 - DNA, 15 bp, Homo sapiens
accacaggtttacat

SEQ ID NO: 715183 - DNA, 15 bp, Homo sapiens
ccacaggtttacata

SEQ ID NO: 715184 - DNA, 15 bp, Homo sapiens
cacaggtttacatag

SEQ ID NO: 715185 - DNA, 15 bp, Homo sapiens
acaggtttacatagc

SEQ ID NO: 715186 - DNA, 15 bp, Homo sapiens
caggtttacatagca

SEQ ID NO: 715187 - DNA, 15 bp, Homo sapiens
aggtttacatagcag

SEQ ID NO: 715188 - DNA, 15 bp, Homo sapiens
ggtttacatagcagt

SEQ ID NO: 715189 - DNA, 15 bp, Homo sapiens
gtttacatagcagtt

SEQ ID NO: 715190 - DNA, 15 bp, Homo sapiens
tttacatagcagttt

SEQ ID NO: 715191 - DNA, 15 bp, Homo sapiens
ttacatagcagtttt

SEQ ID NO: 715192 - DNA, 15 bp, Homo sapiens
tacatagcagttttc

SEQ ID NO: 715193 - DNA, 15 bp, Homo sapiens
acatagcagttttca

SEQ ID NO: 715194 - DNA, 15 bp, Homo sapiens
catagcagttttcat

SEQ ID NO: 715195 - DNA, 15 bp, Homo sapiens
atagcagttttcatt

SEQ ID NO: 715196 - DNA, 15 bp, Homo sapiens
tagcagttttcattt

SEQ ID NO: 715197 - DNA, 15 bp, Homo sapiens
agcagttttcatttt

SEQ ID NO: 715198 - DNA, 15 bp, Homo sapiens
gcagttttcatttta

SEQ ID NO: 715199 - DNA, 15 bp, Homo sapiens
cagttttcattttag

SEQ ID NO: 715200 - DNA, 15 bp, Homo sapiens
agttttcattttagg

SEQ ID NO: 715201 - DNA, 15 bp, Homo sapiens
gttttcattttaggg

SEQ ID NO: 715202 - DNA, 15 bp, Homo sapiens
ttttcattttagggt

SEQ ID NO: 715203 - DNA, 15 bp, Homo sapiens
tttcattttagggtg

SEQ ID NO: 715204 - DNA, 15 bp, Homo sapiens
ttcattttagggtga

SEQ ID NO: 715205 - DNA, 15 bp, Homo sapiens
tcattttagggtgac

SEQ ID NO: 715206 - DNA, 15 bp, Homo sapiens
cattttagggtgacc

SEQ ID NO: 715207 - DNA, 15 bp, Homo sapiens
attttagggtgacca

SEQ ID NO: 715208 - DNA, 15 bp, Homo sapiens
ttttagggtgaccat

SEQ ID NO: 715209 - DNA, 15 bp, Homo sapiens
tttagggtgaccatc

SEQ ID NO: 715210 - DNA, 15 bp, Homo sapiens
ttagggtgaccatct

SEQ ID NO: 715211 - DNA, 15 bp, Homo sapiens
tagggtgaccatctt

SEQ ID NO: 715212 - DNA, 15 bp, Homo sapiens
agggtgaccatctta

SEQ ID NO: 715213 - DNA, 15 bp, Homo sapiens
gggtgaccatcttag

SEQ ID NO: 715214 - DNA, 15 bp, Homo sapiens
ggtgaccatcttagg

SEQ ID NO: 715215 - DNA, 15 bp, Homo sapiens
gtgaccatcttaggg

SEQ ID NO: 715216 - DNA, 15 bp, Homo sapiens
tgaccatcttagggc

SEQ ID NO: 715217 - DNA, 15 bp, Homo sapiens
gaccatcttagggct

SEQ ID NO: 715218 - DNA, 15 bp, Homo sapiens
accatcttagggctg

SEQ ID NO: 715219 - DNA, 15 bp, Homo sapiens
ccatcttagggctga

SEQ ID NO: 715220 - DNA, 15 bp, Homo sapiens
catcttagggctgac

SEQ ID NO: 715221 - DNA, 15 bp, Homo sapiens
atcttagggctgacc

SEQ ID NO: 715222 - DNA, 15 bp, Homo sapiens
tcttagggctgacct

SEQ ID NO: 715223 - DNA, 15 bp, Homo sapiens
cttagggctgacctc

SEQ ID NO: 715224 - DNA, 15 bp, Homo sapiens
ttagggctgacctct

SEQ ID NO: 715225 - DNA, 15 bp, Homo sapiens
tagggctgacctctg

SEQ ID NO: 715226 - DNA, 15 bp, Homo sapiens
agggctgacctctga

SEQ ID NO: 715227 - DNA, 15 bp, Homo sapiens
gggctgacctctgac

SEQ ID NO: 715228 - DNA, 15 bp, Homo sapiens
ggctgacctctgacc

SEQ ID NO: 715229 - DNA, 15 bp, Homo sapiens
gctgacctctgacct

SEQ ID NO: 715230 - DNA, 15 bp, Homo sapiens
ctgacctctgaccta

SEQ ID NO: 715231 - DNA, 15 bp, Homo sapiens
tgacctctgacctaa

SEQ ID NO: 715232 - DNA, 15 bp, Homo sapiens
gacctctgacctaac

SEQ ID NO: 715233 - DNA, 15 bp, Homo sapiens
acctctgacctaact

SEQ ID NO: 715234 - DNA, 15 bp, Homo sapiens
cctctgacctaactc

SEQ ID NO: 715235 - DNA, 15 bp, Homo sapiens
ctctgacctaactct

SEQ ID NO: 715236 - DNA, 15 bp, Homo sapiens
tctgacctaactctg

SEQ ID NO: 715237 - DNA, 15 bp, Homo sapiens
ctgacctaactctgc

SEQ ID NO: 715238 - DNA, 15 bp, Homo sapiens
tgacctaactctgca

SEQ ID NO: 715239 - DNA, 15 bp, Homo sapiens
gacctaactctgcag

SEQ ID NO: 715240 - DNA, 15 bp, Homo sapiens
acctaactctgcagc

SEQ ID NO: 715241 - DNA, 15 bp, Homo sapiens
cctaactctgcagcc

SEQ ID NO: 715242 - DNA, 15 bp, Homo sapiens
ctaactctgcagccc

SEQ ID NO: 715243 - DNA, 15 bp, Homo sapiens
taactctgcagccct

SEQ ID NO: 715244 - DNA, 15 bp, Homo sapiens
aactctgcagccctt

SEQ ID NO: 715245 - DNA, 15 bp, Homo sapiens
actctgcagcccttt

SEQ ID NO: 715246 - DNA, 15 bp, Homo sapiens
ctctgcagccctttt

SEQ ID NO: 715247 - DNA, 15 bp, Homo sapiens
tctgcagcccttttc

SEQ ID NO: 715248 - DNA, 15 bp, Homo sapiens
ctgcagcccttttct

SEQ ID NO: 715249 - DNA, 15 bp, Homo sapiens
tgcagcccttttctc

SEQ ID NO: 715250 - DNA, 15 bp, Homo sapiens
gcagcccttttctct

SEQ ID NO: 715251 - DNA, 15 bp, Homo sapiens
cagcccttttctctc

SEQ ID NO: 715252 - DNA, 15 bp, Homo sapiens
agcccttttctctct

SEQ ID NO: 715253 - DNA, 15 bp, Homo sapiens
gcccttttctctctc

SEQ ID NO: 715254 - DNA, 15 bp, Homo sapiens
cccttttctctctct

SEQ ID NO: 715255 - DNA, 15 bp, Homo sapiens
ccttttctctctctc

SEQ ID NO: 715256 - DNA, 15 bp, Homo sapiens
cttttctctctctct

SEQ ID NO: 715257 - DNA, 15 bp, Homo sapiens
ttttctctctctctg

SEQ ID NO: 715258 - DNA, 15 bp, Homo sapiens
tttctctctctctga

SEQ ID NO: 715259 - DNA, 15 bp, Homo sapiens
ttctctctctctgac

SEQ ID NO: 715260 - DNA, 15 bp, Homo sapiens
tctctctctctgacc

SEQ ID NO: 715261 - DNA, 15 bp, Homo sapiens
ctctctctctgacca

SEQ ID NO: 715262 - DNA, 15 bp, Homo sapiens
tctctctctgaccaa

SEQ ID NO: 715263 - DNA, 15 bp, Homo sapiens
ctctctctgaccaaa

SEQ ID NO: 715264 - DNA, 15 bp, Homo sapiens
tctctctgaccaaac

SEQ ID NO: 715265 - DNA, 15 bp, Homo sapiens
ctctctgaccaaaca

SEQ ID NO: 715266 - DNA, 15 bp, Homo sapiens
tctctgaccaaacag

SEQ ID NO: 715267 - DNA, 15 bp, Homo sapiens
ctctgaccaaacaga

SEQ ID NO: 715268 - DNA, 15 bp, Homo sapiens
tctgaccaaacagaa

SEQ ID NO: 715269 - DNA, 15 bp, Homo sapiens
ctgaccaaacagaat

SEQ ID NO: 715270 - DNA, 15 bp, Homo sapiens
tgaccaaacagaatg

SEQ ID NO: 715271 - DNA, 15 bp, Homo sapiens
gaccaaacagaatgt

SEQ ID NO: 715272 - DNA, 15 bp, Homo sapiens
accaaacagaatgtc

SEQ ID NO: 715273 - DNA, 15 bp, Homo sapiens
ccaaacagaatgtct

SEQ ID NO: 715274 - DNA, 15 bp, Homo sapiens
caaacagaatgtctc

SEQ ID NO: 715275 - DNA, 15 bp, Homo sapiens
aaacagaatgtctct

SEQ ID NO: 715276 - DNA, 15 bp, Homo sapiens
aacagaatgtctctg

SEQ ID NO: 715277 - DNA, 15 bp, Homo sapiens
acagaatgtctctgt

SEQ ID NO: 715278 - DNA, 15 bp, Homo sapiens
cagaatgtctctgtg

SEQ ID NO: 715279 - DNA, 15 bp, Homo sapiens
agaatgtctctgtgt

SEQ ID NO: 715280 - DNA, 15 bp, Homo sapiens
gaatgtctctgtgtc

SEQ ID NO: 715281 - DNA, 15 bp, Homo sapiens
aatgtctctgtgtct

SEQ ID NO: 715282 - DNA, 15 bp, Homo sapiens
atgtctctgtgtctt

SEQ ID NO: 715283 - DNA, 15 bp, Homo sapiens
tgtctctgtgtcttg

SEQ ID NO: 715284 - DNA, 15 bp, Homo sapiens
gtctctgtgtcttgg

SEQ ID NO: 715285 - DNA, 15 bp, Homo sapiens
tctctgtgtcttggg

SEQ ID NO: 715286 - DNA, 15 bp, Homo sapiens
ctctgtgtcttgggt

SEQ ID NO: 715287 - DNA, 15 bp, Homo sapiens
tctgtgtcttgggta

SEQ ID NO: 715288 - DNA, 15 bp, Homo sapiens
ctgtgtcttgggtac

SEQ ID NO: 715289 - DNA, 15 bp, Homo sapiens
tgtgtcttgggtacc

SEQ ID NO: 715290 - DNA, 15 bp, Homo sapiens
gtgtcttgggtacca

SEQ ID NO: 715291 - DNA, 15 bp, Homo sapiens
tgtcttgggtaccag

SEQ ID NO: 715292 - DNA, 15 bp, Homo sapiens
gtcttgggtaccagg

SEQ ID NO: 715293 - DNA, 15 bp, Homo sapiens
tcttgggtaccaggc

SEQ ID NO: 715294 - DNA, 15 bp, Homo sapiens
cttgggtaccaggcc

SEQ ID NO: 715295 - DNA, 15 bp, Homo sapiens
ttgggtaccaggccc

SEQ ID NO: 715296 - DNA, 15 bp, Homo sapiens
tgggtaccaggccca

SEQ ID NO: 715297 - DNA, 15 bp, Homo sapiens
gggtaccaggcccac

SEQ ID NO: 715298 - DNA, 15 bp, Homo sapiens
ggtaccaggcccact

SEQ ID NO: 715299 - DNA, 15 bp, Homo sapiens
gtaccaggcccactc

SEQ ID NO: 715300 - DNA, 15 bp, Homo sapiens
taccaggcccactca

SEQ ID NO: 715301 - DNA, 15 bp, Homo sapiens
accaggcccactcag

SEQ ID NO: 715302 - DNA, 15 bp, Homo sapiens
ccaggcccactcagc

SEQ ID NO: 715303 - DNA, 15 bp, Homo sapiens
caggcccactcagca

SEQ ID NO: 715304 - DNA, 15 bp, Homo sapiens
aggcccactcagcac

SEQ ID NO: 715305 - DNA, 15 bp, Homo sapiens
ggcccactcagcaca

SEQ ID NO: 715306 - DNA, 15 bp, Homo sapiens
gcccactcagcacag

SEQ ID NO: 715307 - DNA, 15 bp, Homo sapiens
cccactcagcacagc

SEQ ID NO: 715308 - DNA, 15 bp, Homo sapiens
ccactcagcacagcc

SEQ ID NO: 715309 - DNA, 15 bp, Homo sapiens
cactcagcacagcct

SEQ ID NO: 715310 - DNA, 15 bp, Homo sapiens
actcagcacagcctt

SEQ ID NO: 715311 - DNA, 15 bp, Homo sapiens
ctcagcacagcctta

SEQ ID NO: 715312 - DNA, 15 bp, Homo sapiens
tcagcacagccttag

SEQ ID NO: 715313 - DNA, 15 bp, Homo sapiens
cagcacagccttagg

SEQ ID NO: 715314 - DNA, 15 bp, Homo sapiens
agcacagccttaggt

SEQ ID NO: 715315 - DNA, 15 bp, Homo sapiens
gcacagccttaggtt

SEQ ID NO: 715316 - DNA, 15 bp, Homo sapiens
cacagccttaggttg

SEQ ID NO: 715317 - DNA, 15 bp, Homo sapiens
acagccttaggttga

SEQ ID NO: 715318 - DNA, 15 bp, Homo sapiens
cagccttaggttgaa

SEQ ID NO: 715319 - DNA, 15 bp, Homo sapiens
agccttaggttgaag

SEQ ID NO: 715320 - DNA, 15 bp, Homo sapiens
gccttaggttgaagc

SEQ ID NO: 715321 - DNA, 15 bp, Homo sapiens
ccttaggttgaagct

SEQ ID NO: 715322 - DNA, 15 bp, Homo sapiens
cttaggttgaagctt

SEQ ID NO: 715323 - DNA, 15 bp, Homo sapiens
ttaggttgaagcttt

SEQ ID NO: 715324 - DNA, 15 bp, Homo sapiens
taggttgaagcttta

SEQ ID NO: 715325 - DNA, 15 bp, Homo sapiens
aggttgaagctttaa

SEQ ID NO: 715326 - DNA, 15 bp, Homo sapiens
ggttgaagctttaag

SEQ ID NO: 715327 - DNA, 15 bp, Homo sapiens
gttgaagctttaagc

SEQ ID NO: 715328 - DNA, 15 bp, Homo sapiens
ttgaagctttaagca

SEQ ID NO: 715329 - DNA, 15 bp, Homo sapiens
tgaagctttaagcac

SEQ ID NO: 715330 - DNA, 15 bp, Homo sapiens
gaagctttaagcact

SEQ ID NO: 715331 - DNA, 15 bp, Homo sapiens
aagctttaagcactt

SEQ ID NO: 715332 - DNA, 15 bp, Homo sapiens
agctttaagcacttt

SEQ ID NO: 715333 - DNA, 15 bp, Homo sapiens
gctttaagcactttc

SEQ ID NO: 715334 - DNA, 15 bp, Homo sapiens
ctttaagcactttct

SEQ ID NO: 715335 - DNA, 15 bp, Homo sapiens
tttaagcactttctc

SEQ ID NO: 715336 - DNA, 15 bp, Homo sapiens
ttaagcactttctca

SEQ ID NO: 715337 - DNA, 15 bp, Homo sapiens
taagcactttctcat

SEQ ID NO: 715338 - DNA, 15 bp, Homo sapiens
aagcactttctcata

SEQ ID NO: 715339 - DNA, 15 bp, Homo sapiens
agcactttctcatag

SEQ ID NO: 715340 - DNA, 15 bp, Homo sapiens
gcactttctcatagc

SEQ ID NO: 715341 - DNA, 15 bp, Homo sapiens
cactttctcatagcc

SEQ ID NO: 715342 - DNA, 15 bp, Homo sapiens
actttctcatagcca

SEQ ID NO: 715343 - DNA, 15 bp, Homo sapiens
ctttctcatagccac

SEQ ID NO: 715344 - DNA, 15 bp, Homo sapiens
tttctcatagccaca

SEQ ID NO: 715345 - DNA, 15 bp, Homo sapiens
ttctcatagccacat

SEQ ID NO: 715346 - DNA, 15 bp, Homo sapiens
tctcatagccacata

SEQ ID NO: 715347 - DNA, 15 bp, Homo sapiens
ctcatagccacatac

SEQ ID NO: 715348 - DNA, 15 bp, Homo sapiens
tcatagccacataca

SEQ ID NO: 715349 - DNA, 15 bp, Homo sapiens
catagccacatacac

SEQ ID NO: 715350 - DNA, 15 bp, Homo sapiens
atagccacatacacc

SEQ ID NO: 715351 - DNA, 15 bp, Homo sapiens
tagccacatacacca

SEQ ID NO: 715352 - DNA, 15 bp, Homo sapiens
agccacatacaccaa

SEQ ID NO: 715353 - DNA, 15 bp, Homo sapiens
gccacatacaccaag

SEQ ID NO: 715354 - DNA, 15 bp, Homo sapiens
ccacatacaccaagg

SEQ ID NO: 715355 - DNA, 15 bp, Homo sapiens
cacatacaccaaggg

SEQ ID NO: 715356 - DNA, 15 bp, Homo sapiens
acatacaccaagggc

SEQ ID NO: 715357 - DNA, 15 bp, Homo sapiens
catacaccaagggca

SEQ ID NO: 715358 - DNA, 15 bp, Homo sapiens
atacaccaagggcag

SEQ ID NO: 715359 - DNA, 15 bp, Homo sapiens
tacaccaagggcagc

SEQ ID NO: 715360 - DNA, 15 bp, Homo sapiens
acaccaagggcagct

SEQ ID NO: 715361 - DNA, 15 bp, Homo sapiens
caccaagggcagctt

SEQ ID NO: 715362 - DNA, 15 bp, Homo sapiens
accaagggcagcttt

SEQ ID NO: 715363 - DNA, 15 bp, Homo sapiens
ccaagggcagcttta

SEQ ID NO: 715364 - DNA, 15 bp, Homo sapiens
caagggcagctttac

SEQ ID NO: 715365 - DNA, 15 bp, Homo sapiens
aagggcagctttacc

SEQ ID NO: 715366 - DNA, 15 bp, Homo sapiens
agggcagctttacca

SEQ ID NO: 715367 - DNA, 15 bp, Homo sapiens
gggcagctttaccag

SEQ ID NO: 715368 - DNA, 15 bp, Homo sapiens
ggcagctttaccagg

SEQ ID NO: 715369 - DNA, 15 bp, Homo sapiens
gcagctttaccaggg

SEQ ID NO: 715370 - DNA, 15 bp, Homo sapiens
cagctttaccagggt

SEQ ID NO: 715371 - DNA, 15 bp, Homo sapiens
agctttaccagggtt

SEQ ID NO: 715372 - DNA, 15 bp, Homo sapiens
gctttaccagggttg

SEQ ID NO: 715373 - DNA, 15 bp, Homo sapiens
ctttaccagggttgg

SEQ ID NO: 715374 - DNA, 15 bp, Homo sapiens
tttaccagggttgga

SEQ ID NO: 715375 - DNA, 15 bp, Homo sapiens
ttaccagggttggag

SEQ ID NO: 715376 - DNA, 15 bp, Homo sapiens
taccagggttggagg

SEQ ID NO: 715377 - DNA, 15 bp, Homo sapiens
accagggttggaggt

SEQ ID NO: 715378 - DNA, 15 bp, Homo sapiens
ccagggttggaggtt

SEQ ID NO: 715379 - DNA, 15 bp, Homo sapiens
cagggttggaggttc

SEQ ID NO: 715380 - DNA, 15 bp, Homo sapiens
agggttggaggttcc

SEQ ID NO: 715381 - DNA, 15 bp, Homo sapiens
gggttggaggttcca

SEQ ID NO: 715382 - DNA, 15 bp, Homo sapiens
ggttggaggttccac

SEQ ID NO: 715383 - DNA, 15 bp, Homo sapiens
gttggaggttccacc

SEQ ID NO: 715384 - DNA, 15 bp, Homo sapiens
ttggaggttccaccc

SEQ ID NO: 715385 - DNA, 15 bp, Homo sapiens
tggaggttccacccg

SEQ ID NO: 715386 - DNA, 15 bp, Homo sapiens
ggaggttccacccgg

SEQ ID NO: 715387 - DNA, 15 bp, Homo sapiens
gaggttccacccgga

SEQ ID NO: 715388 - DNA, 15 bp, Homo sapiens
aggttccacccggaa

SEQ ID NO: 715389 - DNA, 15 bp, Homo sapiens
ggttccacccggaaa

SEQ ID NO: 715390 - DNA, 15 bp, Homo sapiens
gttccacccggaaat

SEQ ID NO: 715391 - DNA, 15 bp, Homo sapiens
ttccacccggaaatc

SEQ ID NO: 715392 - DNA, 15 bp, Homo sapiens
tccacccggaaatcc

SEQ ID NO: 715393 - DNA, 15 bp, Homo sapiens
ccacccggaaatcct

SEQ ID NO: 715394 - DNA, 15 bp, Homo sapiens
cacccggaaatcctg

SEQ ID NO: 715395 - DNA, 15 bp, Homo sapiens
acccggaaatcctga

SEQ ID NO: 715396 - DNA, 15 bp, Homo sapiens
cccggaaatcctgaa

SEQ ID NO: 715397 - DNA, 15 bp, Homo sapiens
ccggaaatcctgaaa

SEQ ID NO: 715398 - DNA, 15 bp, Homo sapiens
cggaaatcctgaaat

SEQ ID NO: 715399 - DNA, 15 bp, Homo sapiens
ggaaatcctgaaatt

SEQ ID NO: 715400 - DNA, 15 bp, Homo sapiens
gaaatcctgaaattg

SEQ ID NO: 715401 - DNA, 15 bp, Homo sapiens
aaatcctgaaattgg

SEQ ID NO: 715402 - DNA, 15 bp, Homo sapiens
aatcctgaaattggg

SEQ ID NO: 715403 - DNA, 15 bp, Homo sapiens
atcctgaaattgggc

SEQ ID NO: 715404 - DNA, 15 bp, Homo sapiens
tcctgaaattgggcc

SEQ ID NO: 715405 - DNA, 15 bp, Homo sapiens
cctgaaattgggccc

SEQ ID NO: 715406 - DNA, 15 bp, Homo sapiens
ctgaaattgggccct

SEQ ID NO: 715407 - DNA, 15 bp, Homo sapiens
tgaaattgggcccta

SEQ ID NO: 715408 - DNA, 15 bp, Homo sapiens
gaaattgggccctaa

SEQ ID NO: 715409 - DNA, 15 bp, Homo sapiens
aaattgggccctaaa

SEQ ID NO: 715410 - DNA, 15 bp, Homo sapiens
aattgggccctaaat

SEQ ID NO: 715411 - DNA, 15 bp, Homo sapiens
attgggccctaaatg

SEQ ID NO: 715412 - DNA, 15 bp, Homo sapiens
ttgggccctaaatgg

SEQ ID NO: 715413 - DNA, 15 bp, Homo sapiens
tgggccctaaatggt

SEQ ID NO: 715414 - DNA, 15 bp, Homo sapiens
gggccctaaatggtc

SEQ ID NO: 715415 - DNA, 15 bp, Homo sapiens
ggccctaaatggtct

SEQ ID NO: 715416 - DNA, 15 bp, Homo sapiens
gccctaaatggtctc

SEQ ID NO: 715417 - DNA, 15 bp, Homo sapiens
ccctaaatggtctca

SEQ ID NO: 715418 - DNA, 15 bp, Homo sapiens
cctaaatggtctcag

SEQ ID NO: 715419 - DNA, 15 bp, Homo sapiens
ctaaatggtctcagt

SEQ ID NO: 715420 - DNA, 15 bp, Homo sapiens
taaatggtctcagta

SEQ ID NO: 715421 - DNA, 15 bp, Homo sapiens
aaatggtctcagtag

SEQ ID NO: 715422 - DNA, 15 bp, Homo sapiens
aatggtctcagtagc

SEQ ID NO: 715423 - DNA, 15 bp, Homo sapiens
atggtctcagtagca

SEQ ID NO: 715424 - DNA, 15 bp, Homo sapiens
tggtctcagtagcaa

SEQ ID NO: 715425 - DNA, 15 bp, Homo sapiens
ggtctcagtagcaaa

SEQ ID NO: 715426 - DNA, 15 bp, Homo sapiens
gtctcagtagcaaaa

SEQ ID NO: 715427 - DNA, 15 bp, Homo sapiens
tctcagtagcaaaag

SEQ ID NO: 715428 - DNA, 15 bp, Homo sapiens
ctcagtagcaaaagt

SEQ ID NO: 715429 - DNA, 15 bp, Homo sapiens
tcagtagcaaaagtg

SEQ ID NO: 715430 - DNA, 15 bp, Homo sapiens
cagtagcaaaagtgg

SEQ ID NO: 715431 - DNA, 15 bp, Homo sapiens
agtagcaaaagtgga

SEQ ID NO: 715432 - DNA, 15 bp, Homo sapiens
gtagcaaaagtggat

SEQ ID NO: 715433 - DNA, 15 bp, Homo sapiens
tagcaaaagtggatt

SEQ ID NO: 715434 - DNA, 15 bp, Homo sapiens
agcaaaagtggattt

SEQ ID NO: 715435 - DNA, 15 bp, Homo sapiens
gcaaaagtggatttg

SEQ ID NO: 715436 - DNA, 15 bp, Homo sapiens
caaaagtggatttgg

SEQ ID NO: 715437 - DNA, 15 bp, Homo sapiens
aaaagtggatttggc

SEQ ID NO: 715438 - DNA, 15 bp, Homo sapiens
aaagtggatttggca

SEQ ID NO: 715439 - DNA, 15 bp, Homo sapiens
aagtggatttggcat

SEQ ID NO: 715440 - DNA, 15 bp, Homo sapiens
agtggatttggcatc

SEQ ID NO: 715441 - DNA, 15 bp, Homo sapiens
gtggatttggcatca

SEQ ID NO: 715442 - DNA, 15 bp, Homo sapiens
tggatttggcatcag

SEQ ID NO: 715443 - DNA, 15 bp, Homo sapiens
ggatttggcatcagc

SEQ ID NO: 715444 - DNA, 15 bp, Homo sapiens
gatttggcatcagct

SEQ ID NO: 715445 - DNA, 15 bp, Homo sapiens
atttggcatcagctc

SEQ ID NO: 715446 - DNA, 15 bp, Homo sapiens
tttggcatcagctca

SEQ ID NO: 715447 - DNA, 15 bp, Homo sapiens
ttggcatcagctcat

SEQ ID NO: 715448 - DNA, 15 bp, Homo sapiens
tggcatcagctcatc

SEQ ID NO: 715449 - DNA, 15 bp, Homo sapiens
ggcatcagctcatca

SEQ ID NO: 715450 - DNA, 15 bp, Homo sapiens
gcatcagctcatcag

SEQ ID NO: 715451 - DNA, 15 bp, Homo sapiens
catcagctcatcagc

SEQ ID NO: 715452 - DNA, 15 bp, Homo sapiens
atcagctcatcagcg

SEQ ID NO: 715453 - DNA, 15 bp, Homo sapiens
tcagctcatcagcgt

SEQ ID NO: 715454 - DNA, 15 bp, Homo sapiens
cagctcatcagcgtg

SEQ ID NO: 715455 - DNA, 15 bp, Homo sapiens
agctcatcagcgtgc

SEQ ID NO: 715456 - DNA, 15 bp, Homo sapiens
gctcatcagcgtgct

SEQ ID NO: 715457 - DNA, 15 bp, Homo sapiens
ctcatcagcgtgctg

SEQ ID NO: 715458 - DNA, 15 bp, Homo sapiens
tcatcagcgtgctgt

SEQ ID NO: 715459 - DNA, 15 bp, Homo sapiens
catcagcgtgctgtt

SEQ ID NO: 715460 - DNA, 15 bp, Homo sapiens
atcagcgtgctgttc

SEQ ID NO: 715461 - DNA, 15 bp, Homo sapiens
tcagcgtgctgttct

SEQ ID NO: 715462 - DNA, 15 bp, Homo sapiens
cagcgtgctgttctt

SEQ ID NO: 715463 - DNA, 15 bp, Homo sapiens
agcgtgctgttcttt

SEQ ID NO: 715464 - DNA, 15 bp, Homo sapiens
gcgtgctgttctttc

SEQ ID NO: 715465 - DNA, 15 bp, Homo sapiens
cgtgctgttctttcc

SEQ ID NO: 715466 - DNA, 15 bp, Homo sapiens
gtgctgttctttcct

SEQ ID NO: 715467 - DNA, 15 bp, Homo sapiens
tgctgttctttcctt

SEQ ID NO: 715468 - DNA, 15 bp, Homo sapiens
gctgttctttccttt

SEQ ID NO: 715469 - DNA, 15 bp, Homo sapiens
ctgttctttcctttt

SEQ ID NO: 715470 - DNA, 15 bp, Homo sapiens
tgttctttcctttta

SEQ ID NO: 715471 - DNA, 15 bp, Homo sapiens
gttctttccttttaa

SEQ ID NO: 715472 - DNA, 15 bp, Homo sapiens
ttctttccttttaac

SEQ ID NO: 715473 - DNA, 15 bp, Homo sapiens
tctttccttttaacc

SEQ ID NO: 715474 - DNA, 15 bp, Homo sapiens
ctttccttttaacct

SEQ ID NO: 715475 - DNA, 15 bp, Homo sapiens
tttccttttaacctt

SEQ ID NO: 715476 - DNA, 15 bp, Homo sapiens
ttccttttaaccttc

SEQ ID NO: 715477 - DNA, 15 bp, Homo sapiens
tccttttaaccttca

SEQ ID NO: 715478 - DNA, 15 bp, Homo sapiens
ccttttaaccttcaa

SEQ ID NO: 715479 - DNA, 15 bp, Homo sapiens
cttttaaccttcaaa

SEQ ID NO: 715480 - DNA, 15 bp, Homo sapiens
ttttaaccttcaaag

SEQ ID NO: 715481 - DNA, 15 bp, Homo sapiens
tttaaccttcaaagt

SEQ ID NO: 715482 - DNA, 15 bp, Homo sapiens
ttaaccttcaaagta

SEQ ID NO: 715483 - DNA, 15 bp, Homo sapiens
taaccttcaaagtag

SEQ ID NO: 715484 - DNA, 15 bp, Homo sapiens
aaccttcaaagtaga

SEQ ID NO: 715485 - DNA, 15 bp, Homo sapiens
accttcaaagtagaa

SEQ ID NO: 715486 - DNA, 15 bp, Homo sapiens
ccttcaaagtagaac

SEQ ID NO: 715487 - DNA, 15 bp, Homo sapiens
cttcaaagtagaaca

SEQ ID NO: 715488 - DNA, 15 bp, Homo sapiens
ttcaaagtagaacag

SEQ ID NO: 715489 - DNA, 15 bp, Homo sapiens
tcaaagtagaacagg

SEQ ID NO: 715490 - DNA, 15 bp, Homo sapiens
caaagtagaacaggg

SEQ ID NO: 715491 - DNA, 15 bp, Homo sapiens
aaagtagaacagggg

SEQ ID NO: 715492 - DNA, 15 bp, Homo sapiens
aagtagaacagggga

SEQ ID NO: 715493 - DNA, 15 bp, Homo sapiens
agtagaacaggggat

SEQ ID NO: 715494 - DNA, 15 bp, Homo sapiens
gtagaacaggggatt

SEQ ID NO: 715495 - DNA, 15 bp, Homo sapiens
tagaacaggggattt

SEQ ID NO: 715496 - DNA, 15 bp, Homo sapiens
agaacaggggattta

SEQ ID NO: 715497 - DNA, 15 bp, Homo sapiens
gaacaggggatttaa

SEQ ID NO: 715498 - DNA, 15 bp, Homo sapiens
aacaggggatttaaa

SEQ ID NO: 715499 - DNA, 15 bp, Homo sapiens
acaggggatttaaaa

SEQ ID NO: 715500 - DNA, 15 bp, Homo sapiens
caggggatttaaaac

SEQ ID NO: 715501 - DNA, 15 bp, Homo sapiens
aggggatttaaaaca

SEQ ID NO: 715502 - DNA, 15 bp, Homo sapiens
ggggatttaaaacaa

SEQ ID NO: 715503 - DNA, 15 bp, Homo sapiens
gggatttaaaacaaa

SEQ ID NO: 715504 - DNA, 15 bp, Homo sapiens
ggatttaaaacaaaa

SEQ ID NO: 715505 - DNA, 15 bp, Homo sapiens
gatttaaaacaaaaa

SEQ ID NO: 715506 - DNA, 15 bp, Homo sapiens
atttaaaacaaaaaa

SEQ ID NO: 715507 - DNA, 15 bp, Homo sapiens
tttaaaacaaaaaac

SEQ ID NO: 715508 - DNA, 15 bp, Homo sapiens
ttaaaacaaaaaaca

SEQ ID NO: 715509 - DNA, 15 bp, Homo sapiens
taaaacaaaaaacaa

SEQ ID NO: 715510 - DNA, 15 bp, Homo sapiens
aaaacaaaaaacaaa

SEQ ID NO: 715511 - DNA, 15 bp, Homo sapiens
aaacaaaaaacaaac

SEQ ID NO: 715512 - DNA, 15 bp, Homo sapiens
aacaaaaaacaaaca

SEQ ID NO: 715513 - DNA, 15 bp, Homo sapiens
acaaaaaacaaacaa

SEQ ID NO: 715514 - DNA, 15 bp, Homo sapiens
caaaaaacaaacaac

SEQ ID NO: 715515 - DNA, 15 bp, Homo sapiens
aaaaaacaaacaaca

SEQ ID NO: 715516 - DNA, 15 bp, Homo sapiens
aaaaacaaacaacag

SEQ ID NO: 715517 - DNA, 15 bp, Homo sapiens
aaaacaaacaacagc

SEQ ID NO: 715518 - DNA, 15 bp, Homo sapiens
aaacaaacaacagca

SEQ ID NO: 715519 - DNA, 15 bp, Homo sapiens
aacaaacaacagcag

SEQ ID NO: 715520 - DNA, 15 bp, Homo sapiens
acaaacaacagcagc

SEQ ID NO: 715521 - DNA, 15 bp, Homo sapiens
caaacaacagcagca

SEQ ID NO: 715522 - DNA, 15 bp, Homo sapiens
aaacaacagcagcaa

SEQ ID NO: 715523 - DNA, 15 bp, Homo sapiens
aacaacagcagcaaa

SEQ ID NO: 715524 - DNA, 15 bp, Homo sapiens
acaacagcagcaaaa

SEQ ID NO: 715525 - DNA, 15 bp, Homo sapiens
caacagcagcaaaaa

SEQ ID NO: 715526 - DNA, 15 bp, Homo sapiens
aacagcagcaaaaaa

SEQ ID NO: 715527 - DNA, 15 bp, Homo sapiens
acagcagcaaaaaag

SEQ ID NO: 715528 - DNA, 15 bp, Homo sapiens
cagcagcaaaaaagc

SEQ ID NO: 715529 - DNA, 15 bp, Homo sapiens
agcagcaaaaaagca

SEQ ID NO: 715530 - DNA, 15 bp, Homo sapiens
gcagcaaaaaagcag

SEQ ID NO: 715531 - DNA, 15 bp, Homo sapiens
cagcaaaaaagcagg

SEQ ID NO: 715532 - DNA, 15 bp, Homo sapiens
agcaaaaaagcaggg

SEQ ID NO: 715533 - DNA, 15 bp, Homo sapiens
gcaaaaaagcagggt

SEQ ID NO: 715534 - DNA, 15 bp, Homo sapiens
caaaaaagcagggtt

SEQ ID NO: 715535 - DNA, 15 bp, Homo sapiens
aaaaaagcagggttt

SEQ ID NO: 715536 - DNA, 15 bp, Homo sapiens
aaaaagcagggtttc

SEQ ID NO: 715537 - DNA, 15 bp, Homo sapiens
aaaagcagggtttct

SEQ ID NO: 715538 - DNA, 15 bp, Homo sapiens
aaagcagggtttctc

SEQ ID NO: 715539 - DNA, 15 bp, Homo sapiens
aagcagggtttctcg

SEQ ID NO: 715540 - DNA, 15 bp, Homo sapiens
agcagggtttctcga

SEQ ID NO: 715541 - DNA, 15 bp, Homo sapiens
gcagggtttctcgac

SEQ ID NO: 715542 - DNA, 15 bp, Homo sapiens
cagggtttctcgacc

SEQ ID NO: 715543 - DNA, 15 bp, Homo sapiens
agggtttctcgaccc

SEQ ID NO: 715544 - DNA, 15 bp, Homo sapiens
gggtttctcgaccct

SEQ ID NO: 715545 - DNA, 15 bp, Homo sapiens
ggtttctcgaccctg

SEQ ID NO: 715546 - DNA, 15 bp, Homo sapiens
gtttctcgaccctga

SEQ ID NO: 715547 - DNA, 15 bp, Homo sapiens
tttctcgaccctgac

SEQ ID NO: 715548 - DNA, 15 bp, Homo sapiens
ttctcgaccctgaca

SEQ ID NO: 715549 - DNA, 15 bp, Homo sapiens
tctcgaccctgacac

SEQ ID NO: 715550 - DNA, 15 bp, Homo sapiens
ctcgaccctgacact

SEQ ID NO: 715551 - DNA, 15 bp, Homo sapiens
tcgaccctgacacta

SEQ ID NO: 715552 - DNA, 15 bp, Homo sapiens
cgaccctgacactat

SEQ ID NO: 715553 - DNA, 15 bp, Homo sapiens
gaccctgacactatt

SEQ ID NO: 715554 - DNA, 15 bp, Homo sapiens
accctgacactattg

SEQ ID NO: 715555 - DNA, 15 bp, Homo sapiens
ccctgacactattga

SEQ ID NO: 715556 - DNA, 15 bp, Homo sapiens
cctgacactattgac

SEQ ID NO: 715557 - DNA, 15 bp, Homo sapiens
ctgacactattgaca

SEQ ID NO: 715558 - DNA, 15 bp, Homo sapiens
tgacactattgacac

SEQ ID NO: 715559 - DNA, 15 bp, Homo sapiens
gacactattgacact

SEQ ID NO: 715560 - DNA, 15 bp, Homo sapiens
acactattgacactg

SEQ ID NO: 715561 - DNA, 15 bp, Homo sapiens
cactattgacactgt

SEQ ID NO: 715562 - DNA, 15 bp, Homo sapiens
actattgacactgtt

SEQ ID NO: 715563 - DNA, 15 bp, Homo sapiens
ctattgacactgttg

SEQ ID NO: 715564 - DNA, 15 bp, Homo sapiens
tattgacactgttgc

SEQ ID NO: 715565 - DNA, 15 bp, Homo sapiens
attgacactgttgct

SEQ ID NO: 715566 - DNA, 15 bp, Homo sapiens
ttgacactgttgctg

SEQ ID NO: 715567 - DNA, 15 bp, Homo sapiens
tgacactgttgctgg

SEQ ID NO: 715568 - DNA, 15 bp, Homo sapiens
gacactgttgctggc

SEQ ID NO: 715569 - DNA, 15 bp, Homo sapiens
acactgttgctggct

SEQ ID NO: 715570 - DNA, 15 bp, Homo sapiens
cactgttgctggctc

SEQ ID NO: 715571 - DNA, 15 bp, Homo sapiens
actgttgctggctcc

SEQ ID NO: 715572 - DNA, 15 bp, Homo sapiens
ctgttgctggctcct

SEQ ID NO: 715573 - DNA, 15 bp, Homo sapiens
tgttgctggctcctt

SEQ ID NO: 715574 - DNA, 15 bp, Homo sapiens
gttgctggctccttc

SEQ ID NO: 715575 - DNA, 15 bp, Homo sapiens
ttgctggctccttct

SEQ ID NO: 715576 - DNA, 15 bp, Homo sapiens
tgctggctccttctt

SEQ ID NO: 715577 - DNA, 15 bp, Homo sapiens
gctggctccttcttt

SEQ ID NO: 715578 - DNA, 15 bp, Homo sapiens
ctggctccttctttg

SEQ ID NO: 715579 - DNA, 15 bp, Homo sapiens
tggctccttctttgc

SEQ ID NO: 715580 - DNA, 15 bp, Homo sapiens
ggctccttctttgct

SEQ ID NO: 715581 - DNA, 15 bp, Homo sapiens
gctccttctttgctg

SEQ ID NO: 715582 - DNA, 15 bp, Homo sapiens
ctccttctttgctgg

SEQ ID NO: 715583 - DNA, 15 bp, Homo sapiens
tccttctttgctggg

SEQ ID NO: 715584 - DNA, 15 bp, Homo sapiens
ccttctttgctgggg

SEQ ID NO: 715585 - DNA, 15 bp, Homo sapiens
cttctttgctggggt

SEQ ID NO: 715586 - DNA, 15 bp, Homo sapiens
ttctttgctggggtt

SEQ ID NO: 715587 - DNA, 15 bp, Homo sapiens
tctttgctggggttg

SEQ ID NO: 715588 - DNA, 15 bp, Homo sapiens
ctttgctggggttgg

SEQ ID NO: 715589 - DNA, 15 bp, Homo sapiens
tttgctggggttggt

SEQ ID NO: 715590 - DNA, 15 bp, Homo sapiens
ttgctggggttggtg

SEQ ID NO: 715591 - DNA, 15 bp, Homo sapiens
tgctggggttggtgg

SEQ ID NO: 715592 - DNA, 15 bp, Homo sapiens
gctggggttggtggg

SEQ ID NO: 715593 - DNA, 15 bp, Homo sapiens
ctggggttggtgggg

SEQ ID NO: 715594 - DNA, 15 bp, Homo sapiens
tggggttggtggggg

SEQ ID NO: 715595 - DNA, 15 bp, Homo sapiens
ggggttggtgggggg

SEQ ID NO: 715596 - DNA, 15 bp, Homo sapiens
gggttggtggggggg

SEQ ID NO: 715597 - DNA, 15 bp, Homo sapiens
ggttggtgggggggg

SEQ ID NO: 715598 - DNA, 15 bp, Homo sapiens
gttggtggggggggc

SEQ ID NO: 715599 - DNA, 15 bp, Homo sapiens
ttggtggggggggca

SEQ ID NO: 715600 - DNA, 15 bp, Homo sapiens
tggtggggggggcac

SEQ ID NO: 715601 - DNA, 15 bp, Homo sapiens
ggtggggggggcact

SEQ ID NO: 715602 - DNA, 15 bp, Homo sapiens
gtggggggggcactg

SEQ ID NO: 715603 - DNA, 15 bp, Homo sapiens
tggggggggcactgt

SEQ ID NO: 715604 - DNA, 15 bp, Homo sapiens
ggggggggcactgtc

SEQ ID NO: 715605 - DNA, 15 bp, Homo sapiens
gggggggcactgtct

SEQ ID NO: 715606 - DNA, 15 bp, Homo sapiens
ggggggcactgtctt

SEQ ID NO: 715607 - DNA, 15 bp, Homo sapiens
gggggcactgtcttg

SEQ ID NO: 715608 - DNA, 15 bp, Homo sapiens
ggggcactgtcttgt

SEQ ID NO: 715609 - DNA, 15 bp, Homo sapiens
gggcactgtcttgta

SEQ ID NO: 715610 - DNA, 15 bp, Homo sapiens
ggcactgtcttgtac

SEQ ID NO: 715611 - DNA, 15 bp, Homo sapiens
gcactgtcttgtacc

SEQ ID NO: 715612 - DNA, 15 bp, Homo sapiens
cactgtcttgtaccc

SEQ ID NO: 715613 - DNA, 15 bp, Homo sapiens
actgtcttgtacccg

SEQ ID NO: 715614 - DNA, 15 bp, Homo sapiens
ctgtcttgtacccgg

SEQ ID NO: 715615 - DNA, 15 bp, Homo sapiens
tgtcttgtacccggg

SEQ ID NO: 715616 - DNA, 15 bp, Homo sapiens
gtcttgtacccggga

SEQ ID NO: 715617 - DNA, 15 bp, Homo sapiens
tcttgtacccgggag

SEQ ID NO: 715618 - DNA, 15 bp, Homo sapiens
cttgtacccgggagg

SEQ ID NO: 715619 - DNA, 15 bp, Homo sapiens
ttgtacccgggagga

SEQ ID NO: 715620 - DNA, 15 bp, Homo sapiens
tgtacccgggaggat

SEQ ID NO: 715621 - DNA, 15 bp, Homo sapiens
gtacccgggaggatg

SEQ ID NO: 715622 - DNA, 15 bp, Homo sapiens
tacccgggaggatgc

SEQ ID NO: 715623 - DNA, 15 bp, Homo sapiens
acccgggaggatgct

SEQ ID NO: 715624 - DNA, 15 bp, Homo sapiens
cccgggaggatgctt

SEQ ID NO: 715625 - DNA, 15 bp, Homo sapiens
ccgggaggatgctta

SEQ ID NO: 715626 - DNA, 15 bp, Homo sapiens
cgggaggatgcttag

SEQ ID NO: 715627 - DNA, 15 bp, Homo sapiens
gggaggatgcttagc

SEQ ID NO: 715628 - DNA, 15 bp, Homo sapiens
ggaggatgcttagca

SEQ ID NO: 715629 - DNA, 15 bp, Homo sapiens
gaggatgcttagcag

SEQ ID NO: 715630 - DNA, 15 bp, Homo sapiens
aggatgcttagcagc

SEQ ID NO: 715631 - DNA, 15 bp, Homo sapiens
ggccacggcgaagtg

SEQ ID NO: 715632 - DNA, 15 bp, Homo sapiens
gccacggcgaagtgc

SEQ ID NO: 715633 - DNA, 15 bp, Homo sapiens
ccacggcgaagtgcc

SEQ ID NO: 715634 - DNA, 15 bp, Homo sapiens
cacggcgaagtgccc

SEQ ID NO: 715635 - DNA, 15 bp, Homo sapiens
acggcgaagtgccca

SEQ ID NO: 715636 - DNA, 15 bp, Homo sapiens
cggcgaagtgcccac

SEQ ID NO: 715637 - DNA, 15 bp, Homo sapiens
ggcgaagtgcccaca

SEQ ID NO: 715638 - DNA, 15 bp, Homo sapiens
gcgaagtgcccacag

SEQ ID NO: 715639 - DNA, 15 bp, Homo sapiens
cgaagtgcccacagc

SEQ ID NO: 715640 - DNA, 15 bp, Homo sapiens
gaagtgcccacagca

SEQ ID NO: 715641 - DNA, 15 bp, Homo sapiens
aagtgcccacagcag

SEQ ID NO: 715642 - DNA, 15 bp, Homo sapiens
agtgcccacagcaga

SEQ ID NO: 715643 - DNA, 15 bp, Homo sapiens
gtgcccacagcagac

SEQ ID NO: 715644 - DNA, 15 bp, Homo sapiens
tgcccacagcagact

SEQ ID NO: 715645 - DNA, 15 bp, Homo sapiens
gcccacagcagactg

SEQ ID NO: 715646 - DNA, 15 bp, Homo sapiens
cccacagcagactgt

SEQ ID NO: 715647 - DNA, 15 bp, Homo sapiens
ccacagcagactgtt

SEQ ID NO: 715648 - DNA, 15 bp, Homo sapiens
cacagcagactgttc

SEQ ID NO: 715649 - DNA, 15 bp, Homo sapiens
acagcagactgttcc

SEQ ID NO: 715650 - DNA, 15 bp, Homo sapiens
cagcagactgttccc

SEQ ID NO: 715651 - DNA, 15 bp, Homo sapiens
agcagactgttcccg

SEQ ID NO: 715652 - DNA, 15 bp, Homo sapiens
gcagactgttcccga

SEQ ID NO: 715653 - DNA, 15 bp, Homo sapiens
cagactgttcccgac

SEQ ID NO: 715654 - DNA, 15 bp, Homo sapiens
agactgttcccgacg

SEQ ID NO: 715655 - DNA, 15 bp, Homo sapiens
gactgttcccgacgc

SEQ ID NO: 715656 - DNA, 15 bp, Homo sapiens
actgttcccgacgca

SEQ ID NO: 715657 - DNA, 15 bp, Homo sapiens
ctgttcccgacgcag

SEQ ID NO: 715658 - DNA, 15 bp, Homo sapiens
tgttcccgacgcaga

SEQ ID NO: 715659 - DNA, 15 bp, Homo sapiens
gttcccgacgcagaa

SEQ ID NO: 715660 - DNA, 15 bp, Homo sapiens
ttcccgacgcagaac

SEQ ID NO: 715661 - DNA, 15 bp, Homo sapiens
tcccgacgcagaacg

SEQ ID NO: 715662 - DNA, 15 bp, Homo sapiens
cccgacgcagaacgt

SEQ ID NO: 715663 - DNA, 15 bp, Homo sapiens
ccgacgcagaacgtg

SEQ ID NO: 715664 - DNA, 15 bp, Homo sapiens
cgacgcagaacgtga

SEQ ID NO: 715665 - DNA, 15 bp, Homo sapiens
gacgcagaacgtgaa

SEQ ID NO: 715666 - DNA, 15 bp, Homo sapiens
acgcagaacgtgaag

SEQ ID NO: 715667 - DNA, 15 bp, Homo sapiens
cgcagaacgtgaagg

SEQ ID NO: 715668 - DNA, 15 bp, Homo sapiens
gcagaacgtgaaggc

SEQ ID NO: 715669 - DNA, 15 bp, Homo sapiens
cagaacgtgaaggct

SEQ ID NO: 715670 - DNA, 15 bp, Homo sapiens
agaacgtgaaggctc

SEQ ID NO: 715671 - DNA, 15 bp, Homo sapiens
gaacgtgaaggctca

SEQ ID NO: 715672 - DNA, 15 bp, Homo sapiens
aacgtgaaggctcat

SEQ ID NO: 715673 - DNA, 15 bp, Homo sapiens
acgtgaaggctcatg

SEQ ID NO: 715674 - DNA, 15 bp, Homo sapiens
cgtgaaggctcatgc

SEQ ID NO: 715675 - DNA, 15 bp, Homo sapiens
gtgaaggctcatgct

SEQ ID NO: 715676 - DNA, 15 bp, Homo sapiens
tgaaggctcatgctg

SEQ ID NO: 715677 - DNA, 15 bp, Homo sapiens
gaaggctcatgctgt

SEQ ID NO: 715678 - DNA, 15 bp, Homo sapiens
aaggctcatgctgta

SEQ ID NO: 715679 - DNA, 15 bp, Homo sapiens
aggctcatgctgtac

SEQ ID NO: 715680 - DNA, 15 bp, Homo sapiens
ggctcatgctgtacc

SEQ ID NO: 715681 - DNA, 15 bp, Homo sapiens
gctcatgctgtacct

SEQ ID NO: 715682 - DNA, 15 bp, Homo sapiens
ctcatgctgtaccta

SEQ ID NO: 715683 - DNA, 15 bp, Homo sapiens
tcatgctgtacctaa

SEQ ID NO: 715684 - DNA, 15 bp, Homo sapiens
catgctgtacctaag

SEQ ID NO: 715685 - DNA, 15 bp, Homo sapiens
atgctgtacctaagg

SEQ ID NO: 715686 - DNA, 15 bp, Homo sapiens
tgctgtacctaaggc

SEQ ID NO: 715687 - DNA, 15 bp, Homo sapiens
gctgtacctaaggca

SEQ ID NO: 715688 - DNA, 15 bp, Homo sapiens
ctgtacctaaggcag

SEQ ID NO: 715689 - DNA, 15 bp, Homo sapiens
tgtacctaaggcagc

SEQ ID NO: 715690 - DNA, 15 bp, Homo sapiens
gtacctaaggcagca

SEQ ID NO: 715691 - DNA, 15 bp, Homo sapiens
tacctaaggcagcac

SEQ ID NO: 715692 - DNA, 15 bp, Homo sapiens
acctaaggcagcaca

SEQ ID NO: 715693 - DNA, 15 bp, Homo sapiens
cctaaggcagcacag

SEQ ID NO: 715694 - DNA, 15 bp, Homo sapiens
ctaaggcagcacagg

SEQ ID NO: 715695 - DNA, 15 bp, Homo sapiens
taaggcagcacaggc

SEQ ID NO: 715696 - DNA, 15 bp, Homo sapiens
aaggcagcacaggcc

SEQ ID NO: 715697 - DNA, 15 bp, Homo sapiens
aggcagcacaggccc

SEQ ID NO: 715698 - DNA, 15 bp, Homo sapiens
ggcagcacaggcccg

SEQ ID NO: 715699 - DNA, 15 bp, Homo sapiens
gcagcacaggcccgg

SEQ ID NO: 715700 - DNA, 15 bp, Homo sapiens
cagcacaggcccggg

SEQ ID NO: 715701 - DNA, 15 bp, Homo sapiens
agcacaggcccgggc

SEQ ID NO: 715702 - DNA, 15 bp, Homo sapiens
gcacaggcccgggcc

SEQ ID NO: 715703 - DNA, 15 bp, Homo sapiens
cacaggcccgggcca

SEQ ID NO: 715704 - DNA, 15 bp, Homo sapiens
acaggcccgggccag

SEQ ID NO: 715705 - DNA, 15 bp, Homo sapiens
caggcccgggccagg

SEQ ID NO: 715706 - DNA, 15 bp, Homo sapiens
aggcccgggccaggc

SEQ ID NO: 715707 - DNA, 15 bp, Homo sapiens
ggcccgggccaggcc

SEQ ID NO: 715708 - DNA, 15 bp, Homo sapiens
gcccgggccaggcca

SEQ ID NO: 715709 - DNA, 15 bp, Homo sapiens
cccgggccaggccat

SEQ ID NO: 715710 - DNA, 15 bp, Homo sapiens
ccgggccaggccatc

SEQ ID NO: 715711 - DNA, 15 bp, Homo sapiens
cgggccaggccatcc

SEQ ID NO: 715712 - DNA, 15 bp, Homo sapiens
gggccaggccatccg

SEQ ID NO: 715713 - DNA, 15 bp, Homo sapiens
ggccaggccatccgc

SEQ ID NO: 715714 - DNA, 15 bp, Homo sapiens
gccaggccatccgcg

SEQ ID NO: 715715 - DNA, 15 bp, Homo sapiens
ccaggccatccgcga

SEQ ID NO: 715716 - DNA, 15 bp, Homo sapiens
caggccatccgcgat

SEQ ID NO: 715717 - DNA, 15 bp, Homo sapiens
aggccatccgcgatc

SEQ ID NO: 715718 - DNA, 15 bp, Homo sapiens
ggccatccgcgatct

SEQ ID NO: 715719 - DNA, 15 bp, Homo sapiens
gccatccgcgatctc

SEQ ID NO: 715720 - DNA, 15 bp, Homo sapiens
ccatccgcgatctct

SEQ ID NO: 715721 - DNA, 15 bp, Homo sapiens
catccgcgatctctc

SEQ ID NO: 715722 - DNA, 15 bp, Homo sapiens
atccgcgatctctcc

SEQ ID NO: 715723 - DNA, 15 bp, Homo sapiens
tccgcgatctctccc

SEQ ID NO: 715724 - DNA, 15 bp, Homo sapiens
ccgcgatctctccca

SEQ ID NO: 715725 - DNA, 15 bp, Homo sapiens
cgcgatctctcccac

SEQ ID NO: 715726 - DNA, 15 bp, Homo sapiens
gcgatctctcccacc

SEQ ID NO: 715727 - DNA, 15 bp, Homo sapiens
cgatctctcccacca

SEQ ID NO: 715728 - DNA, 15 bp, Homo sapiens
gatctctcccaccac

SEQ ID NO: 715729 - DNA, 15 bp, Homo sapiens
atctctcccaccacg

SEQ ID NO: 715730 - DNA, 15 bp, Homo sapiens
tctctcccaccacgg

SEQ ID NO: 715731 - DNA, 15 bp, Homo sapiens
ctctcccaccacggc

SEQ ID NO: 715732 - DNA, 15 bp, Homo sapiens
tctcccaccacggcg

SEQ ID NO: 715733 - DNA, 15 bp, Homo sapiens
ctcccaccacggcgt

SEQ ID NO: 715734 - DNA, 15 bp, Homo sapiens
tcccaccacggcgtg

SEQ ID NO: 715735 - DNA, 15 bp, Homo sapiens
cccaccacggcgtgc

SEQ ID NO: 715736 - DNA, 15 bp, Homo sapiens
ccaccacggcgtgct

SEQ ID NO: 715737 - DNA, 15 bp, Homo sapiens
caccacggcgtgctc

SEQ ID NO: 715738 - DNA, 15 bp, Homo sapiens
accacggcgtgctct

SEQ ID NO: 715739 - DNA, 15 bp, Homo sapiens
ccacggcgtgctctg

SEQ ID NO: 715740 - DNA, 15 bp, Homo sapiens
cacggcgtgctctgc

SEQ ID NO: 715741 - DNA, 15 bp, Homo sapiens
acggcgtgctctgcc

SEQ ID NO: 715742 - DNA, 15 bp, Homo sapiens
cggcgtgctctgccc

SEQ ID NO: 715743 - DNA, 15 bp, Homo sapiens
ggcgtgctctgccca

SEQ ID NO: 715744 - DNA, 15 bp, Homo sapiens
gcgtgctctgcccac

SEQ ID NO: 715745 - DNA, 15 bp, Homo sapiens
cgtgctctgcccaca

SEQ ID NO: 715746 - DNA, 15 bp, Homo sapiens
gtgctctgcccacag

SEQ ID NO: 715747 - DNA, 15 bp, Homo sapiens
tgctctgcccacagg

SEQ ID NO: 715748 - DNA, 15 bp, Homo sapiens
gctctgcccacagga

SEQ ID NO: 715749 - DNA, 15 bp, Homo sapiens
ctctgcccacaggaa

SEQ ID NO: 715750 - DNA, 15 bp, Homo sapiens
tctgcccacaggaag

SEQ ID NO: 715751 - DNA, 15 bp, Homo sapiens
ctgcccacaggaagc

SEQ ID NO: 715752 - DNA, 15 bp, Homo sapiens
tgcccacaggaagct

SEQ ID NO: 715753 - DNA, 15 bp, Homo sapiens
gcccacaggaagctc

SEQ ID NO: 715754 - DNA, 15 bp, Homo sapiens
cccacaggaagctct

SEQ ID NO: 715755 - DNA, 15 bp, Homo sapiens
ccacaggaagctctc

SEQ ID NO: 715756 - DNA, 15 bp, Homo sapiens
cacaggaagctctcg

SEQ ID NO: 715757 - DNA, 15 bp, Homo sapiens
acaggaagctctcgg

SEQ ID NO: 715758 - DNA, 15 bp, Homo sapiens
caggaagctctcggc

SEQ ID NO: 715759 - DNA, 15 bp, Homo sapiens
aggaagctctcggcg

SEQ ID NO: 715760 - DNA, 15 bp, Homo sapiens
ggaagctctcggcgt

SEQ ID NO: 715761 - DNA, 15 bp, Homo sapiens
gaagctctcggcgtc

SEQ ID NO: 715762 - DNA, 15 bp, Homo sapiens
aagctctcggcgtca

SEQ ID NO: 715763 - DNA, 15 bp, Homo sapiens
agctctcggcgtcac

SEQ ID NO: 715764 - DNA, 15 bp, Homo sapiens
gctctcggcgtcacg

SEQ ID NO: 715765 - DNA, 15 bp, Homo sapiens
ctctcggcgtcacgc

SEQ ID NO: 715766 - DNA, 15 bp, Homo sapiens
tctcggcgtcacgct

SEQ ID NO: 715767 - DNA, 15 bp, Homo sapiens
ctcggcgtcacgctg

SEQ ID NO: 715768 - DNA, 15 bp, Homo sapiens
tcggcgtcacgctgg

SEQ ID NO: 715769 - DNA, 15 bp, Homo sapiens
cggcgtcacgctggc

SEQ ID NO: 715770 - DNA, 15 bp, Homo sapiens
ggcgtcacgctggca

SEQ ID NO: 715771 - DNA, 15 bp, Homo sapiens
gcgtcacgctggcac

SEQ ID NO: 715772 - DNA, 15 bp, Homo sapiens
cgtcacgctggcacc

SEQ ID NO: 715773 - DNA, 15 bp, Homo sapiens
gtcacgctggcaccc

SEQ ID NO: 715774 - DNA, 15 bp, Homo sapiens
tcacgctggcacccc

SEQ ID NO: 715775 - DNA, 15 bp, Homo sapiens
cacgctggcaccccg

SEQ ID NO: 715776 - DNA, 15 bp, Homo sapiens
acgctggcaccccga

SEQ ID NO: 715777 - DNA, 15 bp, Homo sapiens
cgctggcaccccgac

SEQ ID NO: 715778 - DNA, 15 bp, Homo sapiens
gctggcaccccgaca

SEQ ID NO: 715779 - DNA, 15 bp, Homo sapiens
ctggcaccccgacag

SEQ ID NO: 715780 - DNA, 15 bp, Homo sapiens
tggcaccccgacagc

SEQ ID NO: 715781 - DNA, 15 bp, Homo sapiens
ggcaccccgacagcc

SEQ ID NO: 715782 - DNA, 15 bp, Homo sapiens
gcaccccgacagccg

SEQ ID NO: 715783 - DNA, 15 bp, Homo sapiens
caccccgacagccgc

SEQ ID NO: 715784 - DNA, 15 bp, Homo sapiens
accccgacagccgct

SEQ ID NO: 715785 - DNA, 15 bp, Homo sapiens
ccccgacagccgctg

SEQ ID NO: 715786 - DNA, 15 bp, Homo sapiens
cccgacagccgctga

SEQ ID NO: 715787 - DNA, 15 bp, Homo sapiens
ccgacagccgctgaa

SEQ ID NO: 715788 - DNA, 15 bp, Homo sapiens
cgacagccgctgaac

SEQ ID NO: 715789 - DNA, 15 bp, Homo sapiens
gacagccgctgaaca

SEQ ID NO: 715790 - DNA, 15 bp, Homo sapiens
acagccgctgaacag

SEQ ID NO: 715791 - DNA, 15 bp, Homo sapiens
cagccgctgaacagc

SEQ ID NO: 715792 - DNA, 15 bp, Homo sapiens
agccgctgaacagct

SEQ ID NO: 715793 - DNA, 15 bp, Homo sapiens
gccgctgaacagctc

SEQ ID NO: 715794 - DNA, 15 bp, Homo sapiens
ccgctgaacagctcg

SEQ ID NO: 715795 - DNA, 15 bp, Homo sapiens
cgctgaacagctcgc

SEQ ID NO: 715796 - DNA, 15 bp, Homo sapiens
gctgaacagctcgct

SEQ ID NO: 715797 - DNA, 15 bp, Homo sapiens
ctgaacagctcgctc

SEQ ID NO: 715798 - DNA, 15 bp, Homo sapiens
tgaacagctcgctct

SEQ ID NO: 715799 - DNA, 15 bp, Homo sapiens
gaacagctcgctctg

SEQ ID NO: 715800 - DNA, 15 bp, Homo sapiens
aacagctcgctctgt

SEQ ID NO: 715801 - DNA, 15 bp, Homo sapiens
acagctcgctctgtc

SEQ ID NO: 715802 - DNA, 15 bp, Homo sapiens
cagctcgctctgtca

SEQ ID NO: 715803 - DNA, 15 bp, Homo sapiens
agctcgctctgtcaa

SEQ ID NO: 715804 - DNA, 15 bp, Homo sapiens
gctcgctctgtcaat

SEQ ID NO: 715805 - DNA, 15 bp, Homo sapiens
ctcgctctgtcaatg

SEQ ID NO: 715806 - DNA, 15 bp, Homo sapiens
tcgctctgtcaatgc

SEQ ID NO: 715807 - DNA, 15 bp, Homo sapiens
cgctctgtcaatgca

SEQ ID NO: 715808 - DNA, 15 bp, Homo sapiens
gctctgtcaatgcag

SEQ ID NO: 715809 - DNA, 15 bp, Homo sapiens
ctctgtcaatgcaga

SEQ ID NO: 715810 - DNA, 15 bp, Homo sapiens
tctgtcaatgcagag

SEQ ID NO: 715811 - DNA, 15 bp, Homo sapiens
ctgtcaatgcagagg

SEQ ID NO: 715812 - DNA, 15 bp, Homo sapiens
tgtcaatgcagagga

SEQ ID NO: 715813 - DNA, 15 bp, Homo sapiens
gtcaatgcagaggaa

SEQ ID NO: 715814 - DNA, 15 bp, Homo sapiens
tcaatgcagaggaaa

SEQ ID NO: 715815 - DNA, 15 bp, Homo sapiens
caatgcagaggaaag

SEQ ID NO: 715816 - DNA, 15 bp, Homo sapiens
aatgcagaggaaaga

SEQ ID NO: 715817 - DNA, 15 bp, Homo sapiens
atgcagaggaaagac

SEQ ID NO: 715818 - DNA, 15 bp, Homo sapiens
tgcagaggaaagacg

SEQ ID NO: 715819 - DNA, 15 bp, Homo sapiens
gcagaggaaagacgt

SEQ ID NO: 715820 - DNA, 15 bp, Homo sapiens
cagaggaaagacgtc

SEQ ID NO: 715821 - DNA, 15 bp, Homo sapiens
agaggaaagacgtct

SEQ ID NO: 715822 - DNA, 15 bp, Homo sapiens
gaggaaagacgtctc

SEQ ID NO: 715823 - DNA, 15 bp, Homo sapiens
aggaaagacgtctca

SEQ ID NO: 715824 - DNA, 15 bp, Homo sapiens
ggaaagacgtctcac

SEQ ID NO: 715825 - DNA, 15 bp, Homo sapiens
gaaagacgtctcact

SEQ ID NO: 715826 - DNA, 15 bp, Homo sapiens
aaagacgtctcacta

SEQ ID NO: 715827 - DNA, 15 bp, Homo sapiens
aagacgtctcactat

SEQ ID NO: 715828 - DNA, 15 bp, Homo sapiens
agacgtctcactata

SEQ ID NO: 715829 - DNA, 15 bp, Homo sapiens
gacgtctcactatag

SEQ ID NO: 715830 - DNA, 15 bp, Homo sapiens
acgtctcactataga

SEQ ID NO: 715831 - DNA, 15 bp, Homo sapiens
cgtctcactatagac

SEQ ID NO: 715832 - DNA, 15 bp, Homo sapiens
gtctcactatagaca

SEQ ID NO: 715833 - DNA, 15 bp, Homo sapiens
tctcactatagacag

SEQ ID NO: 715834 - DNA, 15 bp, Homo sapiens
ctcactatagacaga

SEQ ID NO: 715835 - DNA, 15 bp, Homo sapiens
tcactatagacagaa

SEQ ID NO: 715836 - DNA, 15 bp, Homo sapiens
cactatagacagaag

SEQ ID NO: 715837 - DNA, 15 bp, Homo sapiens
actatagacagaagc

SEQ ID NO: 715838 - DNA, 15 bp, Homo sapiens
ctatagacagaagcc

SEQ ID NO: 715839 - DNA, 15 bp, Homo sapiens
tatagacagaagccc

SEQ ID NO: 715840 - DNA, 15 bp, Homo sapiens
atagacagaagccca

SEQ ID NO: 715841 - DNA, 15 bp, Homo sapiens
tagacagaagcccag

SEQ ID NO: 715842 - DNA, 15 bp, Homo sapiens
agacagaagcccagt

SEQ ID NO: 715843 - DNA, 15 bp, Homo sapiens
gacagaagcccagtc

SEQ ID NO: 715844 - DNA, 15 bp, Homo sapiens
acagaagcccagtcc

SEQ ID NO: 715845 - DNA, 15 bp, Homo sapiens
cagaagcccagtcct

SEQ ID NO: 715846 - DNA, 15 bp, Homo sapiens
agaagcccagtccta

SEQ ID NO: 715847 - DNA, 15 bp, Homo sapiens
gaagcccagtcctag

SEQ ID NO: 715848 - DNA, 15 bp, Homo sapiens
aagcccagtcctagg

SEQ ID NO: 715849 - DNA, 15 bp, Homo sapiens
agcccagtcctagga

SEQ ID NO: 715850 - DNA, 15 bp, Homo sapiens
gcccagtcctaggaa

SEQ ID NO: 715851 - DNA, 15 bp, Homo sapiens
cccagtcctaggaat

SEQ ID NO: 715852 - DNA, 15 bp, Homo sapiens
ccagtcctaggaatg

SEQ ID NO: 715853 - DNA, 15 bp, Homo sapiens
cagtcctaggaatga

SEQ ID NO: 715854 - DNA, 15 bp, Homo sapiens
agtcctaggaatgag

SEQ ID NO: 715855 - DNA, 15 bp, Homo sapiens
gtcctaggaatgaga

SEQ ID NO: 715856 - DNA, 15 bp, Homo sapiens
tcctaggaatgagaa

SEQ ID NO: 715857 - DNA, 15 bp, Homo sapiens
cctaggaatgagaat

SEQ ID NO: 715858 - DNA, 15 bp, Homo sapiens
ctaggaatgagaatc

SEQ ID NO: 715859 - DNA, 15 bp, Homo sapiens
taggaatgagaatcc

SEQ ID NO: 715860 - DNA, 15 bp, Homo sapiens
aggaatgagaatcca

SEQ ID NO: 715861 - DNA, 15 bp, Homo sapiens
ggaatgagaatccag

SEQ ID NO: 715862 - DNA, 15 bp, Homo sapiens
gaatgagaatccagg

SEQ ID NO: 715863 - DNA, 15 bp, Homo sapiens
aatgagaatccaggt

SEQ ID NO: 715864 - DNA, 15 bp, Homo sapiens
atgagaatccaggtc

SEQ ID NO: 715865 - DNA, 15 bp, Homo sapiens
tgagaatccaggtct

SEQ ID NO: 715866 - DNA, 15 bp, Homo sapiens
gagaatccaggtctc

SEQ ID NO: 715867 - DNA, 15 bp, Homo sapiens
agaatccaggtctca

SEQ ID NO: 715868 - DNA, 15 bp, Homo sapiens
gaatccaggtctcaa

SEQ ID NO: 715869 - DNA, 15 bp, Homo sapiens
aatccaggtctcaaa

SEQ ID NO: 715870 - DNA, 15 bp, Homo sapiens
atccaggtctcaaat

SEQ ID NO: 715871 - DNA, 15 bp, Homo sapiens
tccaggtctcaaatc

SEQ ID NO: 715872 - DNA, 15 bp, Homo sapiens
ccaggtctcaaatcc

SEQ ID NO: 715873 - DNA, 15 bp, Homo sapiens
caggtctcaaatcct

SEQ ID NO: 715874 - DNA, 15 bp, Homo sapiens
aggtctcaaatcctc

SEQ ID NO: 715875 - DNA, 15 bp, Homo sapiens
ggtctcaaatcctct

SEQ ID NO: 715876 - DNA, 15 bp, Homo sapiens
gtctcaaatcctctg

SEQ ID NO: 715877 - DNA, 15 bp, Homo sapiens
tctcaaatcctctga

SEQ ID NO: 715878 - DNA, 15 bp, Homo sapiens
ctcaaatcctctgaa

SEQ ID NO: 715879 - DNA, 15 bp, Homo sapiens
tcaaatcctctgaat

SEQ ID NO: 715880 - DNA, 15 bp, Homo sapiens
caaatcctctgaatc

SEQ ID NO: 715881 - DNA, 15 bp, Homo sapiens
aaatcctctgaatca

SEQ ID NO: 715882 - DNA, 15 bp, Homo sapiens
aatcctctgaatcag

SEQ ID NO: 715883 - DNA, 15 bp, Homo sapiens
atcctctgaatcagc

SEQ ID NO: 715884 - DNA, 15 bp, Homo sapiens
tcctctgaatcagct

SEQ ID NO: 715885 - DNA, 15 bp, Homo sapiens
cctctgaatcagctg

SEQ ID NO: 715886 - DNA, 15 bp, Homo sapiens
ctctgaatcagctgg

SEQ ID NO: 715887 - DNA, 15 bp, Homo sapiens
tctgaatcagctggg

SEQ ID NO: 715888 - DNA, 15 bp, Homo sapiens
ctgaatcagctgggc

SEQ ID NO: 715889 - DNA, 15 bp, Homo sapiens
tgaatcagctgggct

SEQ ID NO: 715890 - DNA, 15 bp, Homo sapiens
gaatcagctgggctg

SEQ ID NO: 715891 - DNA, 15 bp, Homo sapiens
aatcagctgggctga

SEQ ID NO: 715892 - DNA, 15 bp, Homo sapiens
atcagctgggctgaa

SEQ ID NO: 715893 - DNA, 15 bp, Homo sapiens
tcagctgggctgaat

SEQ ID NO: 715894 - DNA, 15 bp, Homo sapiens
cagctgggctgaatg

SEQ ID NO: 715895 - DNA, 15 bp, Homo sapiens
agctgggctgaatgt

SEQ ID NO: 715896 - DNA, 15 bp, Homo sapiens
gctgggctgaatgtg

SEQ ID NO: 715897 - DNA, 15 bp, Homo sapiens
ctgggctgaatgtgg

SEQ ID NO: 715898 - DNA, 15 bp, Homo sapiens
tgggctgaatgtgga

SEQ ID NO: 715899 - DNA, 15 bp, Homo sapiens
gggctgaatgtggaa

SEQ ID NO: 715900 - DNA, 15 bp, Homo sapiens
ggctgaatgtggaaa

SEQ ID NO: 715901 - DNA, 15 bp, Homo sapiens
gctgaatgtggaaat

SEQ ID NO: 715902 - DNA, 15 bp, Homo sapiens
ctgaatgtggaaatt

SEQ ID NO: 715903 - DNA, 15 bp, Homo sapiens
tgaatgtggaaattc

SEQ ID NO: 715904 - DNA, 15 bp, Homo sapiens
gaatgtggaaattcc

SEQ ID NO: 715905 - DNA, 15 bp, Homo sapiens
aatgtggaaattccc

SEQ ID NO: 715906 - DNA, 15 bp, Homo sapiens
atgtggaaattcccc

SEQ ID NO: 715907 - DNA, 15 bp, Homo sapiens
tgtggaaattccccc

SEQ ID NO: 715908 - DNA, 15 bp, Homo sapiens
gtggaaattccccct

SEQ ID NO: 715909 - DNA, 15 bp, Homo sapiens
tggaaattccccctg

SEQ ID NO: 715910 - DNA, 15 bp, Homo sapiens
ggaaattccccctgg

SEQ ID NO: 715911 - DNA, 15 bp, Homo sapiens
gaaattccccctggc

SEQ ID NO: 715912 - DNA, 15 bp, Homo sapiens
aaattccccctggcc

SEQ ID NO: 715913 - DNA, 15 bp, Homo sapiens
aattccccctggcct

SEQ ID NO: 715914 - DNA, 15 bp, Homo sapiens
attccccctggcctc

SEQ ID NO: 715915 - DNA, 15 bp, Homo sapiens
ttccccctggcctcc

SEQ ID NO: 715916 - DNA, 15 bp, Homo sapiens
tccccctggcctccc

SEQ ID NO: 715917 - DNA, 15 bp, Homo sapiens
ccccctggcctccct

SEQ ID NO: 715918 - DNA, 15 bp, Homo sapiens
cccctggcctccctg

SEQ ID NO: 715919 - DNA, 15 bp, Homo sapiens
ccctggcctccctgg

SEQ ID NO: 715920 - DNA, 15 bp, Homo sapiens
cctggcctccctggg

SEQ ID NO: 715921 - DNA, 15 bp, Homo sapiens
ctggcctccctgggt

SEQ ID NO: 715922 - DNA, 15 bp, Homo sapiens
tggcctccctgggtt

SEQ ID NO: 715923 - DNA, 15 bp, Homo sapiens
ggcctccctgggttg

SEQ ID NO: 715924 - DNA, 15 bp, Homo sapiens
gcctccctgggttgt

SEQ ID NO: 715925 - DNA, 15 bp, Homo sapiens
cctccctgggttgtc

SEQ ID NO: 715926 - DNA, 15 bp, Homo sapiens
ctccctgggttgtca

SEQ ID NO: 715927 - DNA, 15 bp, Homo sapiens
tccctgggttgtcac

SEQ ID NO: 715928 - DNA, 15 bp, Homo sapiens
ccctgggttgtcacc

SEQ ID NO: 715929 - DNA, 15 bp, Homo sapiens
cctgggttgtcacca

SEQ ID NO: 715930 - DNA, 15 bp, Homo sapiens
ctgggttgtcaccaa

SEQ ID NO: 715931 - DNA, 15 bp, Homo sapiens
tgggttgtcaccaac

SEQ ID NO: 715932 - DNA, 15 bp, Homo sapiens
gggttgtcaccaacg

SEQ ID NO: 715933 - DNA, 15 bp, Homo sapiens
ggttgtcaccaacgc

SEQ ID NO: 715934 - DNA, 15 bp, Homo sapiens
gttgtcaccaacgca

SEQ ID NO: 715935 - DNA, 15 bp, Homo sapiens
ttgtcaccaacgcac

SEQ ID NO: 715936 - DNA, 15 bp, Homo sapiens
tgtcaccaacgcaca

SEQ ID NO: 715937 - DNA, 15 bp, Homo sapiens
gtcaccaacgcacaa

SEQ ID NO: 715938 - DNA, 15 bp, Homo sapiens
tcaccaacgcacaat

SEQ ID NO: 715939 - DNA, 15 bp, Homo sapiens
caccaacgcacaatg

SEQ ID NO: 715940 - DNA, 15 bp, Homo sapiens
accaacgcacaatgt

SEQ ID NO: 715941 - DNA, 15 bp, Homo sapiens
ccaacgcacaatgtc

SEQ ID NO: 715942 - DNA, 15 bp, Homo sapiens
caacgcacaatgtct

SEQ ID NO: 715943 - DNA, 15 bp, Homo sapiens
aacgcacaatgtctg

SEQ ID NO: 715944 - DNA, 15 bp, Homo sapiens
acgcacaatgtctgt

SEQ ID NO: 715945 - DNA, 15 bp, Homo sapiens
cgcacaatgtctgtt

SEQ ID NO: 715946 - DNA, 15 bp, Homo sapiens
gcacaatgtctgttc

SEQ ID NO: 715947 - DNA, 15 bp, Homo sapiens
cacaatgtctgttcc

SEQ ID NO: 715948 - DNA, 15 bp, Homo sapiens
acaatgtctgttcca

SEQ ID NO: 715949 - DNA, 15 bp, Homo sapiens
caatgtctgttccaa

SEQ ID NO: 715950 - DNA, 15 bp, Homo sapiens
aatgtctgttccaat

SEQ ID NO: 715951 - DNA, 15 bp, Homo sapiens
atgtctgttccaata

SEQ ID NO: 715952 - DNA, 15 bp, Homo sapiens
tgtctgttccaataa

SEQ ID NO: 715953 - DNA, 15 bp, Homo sapiens
gtctgttccaataaa

SEQ ID NO: 715954 - DNA, 15 bp, Homo sapiens
tctgttccaataaag

SEQ ID NO: 715955 - DNA, 15 bp, Homo sapiens
ctgttccaataaagc

SEQ ID NO: 715956 - DNA, 15 bp, Homo sapiens
tgttccaataaagct

SEQ ID NO: 715957 - DNA, 15 bp, Homo sapiens
gttccaataaagctg

SEQ ID NO: 715958 - DNA, 15 bp, Homo sapiens
ttccaataaagctgc

SEQ ID NO: 715959 - DNA, 15 bp, Homo sapiens
tccaataaagctgct

SEQ ID NO: 715960 - DNA, 15 bp, Homo sapiens
ccaataaagctgctg

SEQ ID NO: 715961 - DNA, 15 bp, Homo sapiens
caataaagctgctgt

SEQ ID NO: 715962 - DNA, 15 bp, Homo sapiens
aataaagctgctgtt

SEQ ID NO: 715963 - DNA, 15 bp, Homo sapiens
ataaagctgctgttt

SEQ ID NO: 715964 - DNA, 15 bp, Homo sapiens
taaagctgctgtttt

SEQ ID NO: 715965 - DNA, 15 bp, Homo sapiens
aaagctgctgttttc

SEQ ID NO: 715966 - DNA, 15 bp, Homo sapiens
aagctgctgttttct

SEQ ID NO: 715967 - DNA, 15 bp, Homo sapiens
agctgctgttttctt

SEQ ID NO: 715968 - DNA, 15 bp, Homo sapiens
gctgctgttttcttc

SEQ ID NO: 715969 - DNA, 15 bp, Homo sapiens
ctgctgttttcttct

SEQ ID NO: 715970 - DNA, 15 bp, Homo sapiens
tgctgttttcttctg

SEQ ID NO: 715971 - DNA, 15 bp, Homo sapiens
gctgttttcttctgt

SEQ ID NO: 715972 - DNA, 15 bp, Homo sapiens
ctgttttcttctgtt

SEQ ID NO: 715973 - DNA, 15 bp, Homo sapiens
tgttttcttctgttt

SEQ ID NO: 715974 - DNA, 15 bp, Homo sapiens
gttttcttctgtttt

SEQ ID NO: 715975 - DNA, 15 bp, Homo sapiens
ttttcttctgttttc

SEQ ID NO: 715976 - DNA, 15 bp, Homo sapiens
tttcttctgttttct

SEQ ID NO: 715977 - DNA, 15 bp, Homo sapiens
ttcttctgttttctc

SEQ ID NO: 715978 - DNA, 15 bp, Homo sapiens
tcttctgttttctct

SEQ ID NO: 715979 - DNA, 15 bp, Homo sapiens
cttctgttttctctg

SEQ ID NO: 715980 - DNA, 15 bp, Homo sapiens
ttctgttttctctgt

SEQ ID NO: 715981 - DNA, 15 bp, Homo sapiens
tctgttttctctgtc

SEQ ID NO: 715982 - DNA, 15 bp, Homo sapiens
ctgttttctctgtca

SEQ ID NO: 715983 - DNA, 15 bp, Homo sapiens
tgttttctctgtcag

SEQ ID NO: 715984 - DNA, 15 bp, Homo sapiens
gttttctctgtcagt

SEQ ID NO: 715985 - DNA, 15 bp, Homo sapiens
ttttctctgtcagtg

SEQ ID NO: 715986 - DNA, 15 bp, Homo sapiens
tttctctgtcagtgg

SEQ ID NO: 715987 - DNA, 15 bp, Homo sapiens
ttctctgtcagtgga

SEQ ID NO: 715988 - DNA, 15 bp, Homo sapiens
tctctgtcagtggag

SEQ ID NO: 715989 - DNA, 15 bp, Homo sapiens
ctctgtcagtggaga

SEQ ID NO: 715990 - DNA, 15 bp, Homo sapiens
tctgtcagtggagaa

SEQ ID NO: 715991 - DNA, 15 bp, Homo sapiens
ctgtcagtggagaaa

SEQ ID NO: 715992 - DNA, 15 bp, Homo sapiens
tgtcagtggagaaag

SEQ ID NO: 715993 - DNA, 15 bp, Homo sapiens
gtcagtggagaaagg

SEQ ID NO: 715994 - DNA, 15 bp, Homo sapiens
tcagtggagaaaggc

SEQ ID NO: 715995 - DNA, 15 bp, Homo sapiens
cagtggagaaaggcg

SEQ ID NO: 715996 - DNA, 15 bp, Homo sapiens
agtggagaaaggcgc

SEQ ID NO: 715997 - DNA, 15 bp, Homo sapiens
gtggagaaaggcgct

SEQ ID NO: 715998 - DNA, 15 bp, Homo sapiens
tggagaaaggcgcta

SEQ ID NO: 715999 - DNA, 15 bp, Homo sapiens
ggagaaaggcgctag

SEQ ID NO: 716000 - DNA, 15 bp, Homo sapiens
gagaaaggcgctagg

SEQ ID NO: 716001 - DNA, 15 bp, Homo sapiens
agaaaggcgctaggg

SEQ ID NO: 716002 - DNA, 15 bp, Homo sapiens
gaaaggcgctagggg

SEQ ID NO: 716003 - DNA, 15 bp, Homo sapiens
aaaggcgctagggga

SEQ ID NO: 716004 - DNA, 15 bp, Homo sapiens
aaggcgctaggggag

SEQ ID NO: 716005 - DNA, 15 bp, Homo sapiens
aggcgctaggggagg

SEQ ID NO: 716006 - DNA, 15 bp, Homo sapiens
ggcgctaggggaggc

SEQ ID NO: 716007 - DNA, 15 bp, Homo sapiens
gcgctaggggaggcc

SEQ ID NO: 716008 - DNA, 15 bp, Homo sapiens
cgctaggggaggcct

SEQ ID NO: 716009 - DNA, 15 bp, Homo sapiens
gctaggggaggcctc

SEQ ID NO: 716010 - DNA, 15 bp, Homo sapiens
ctaggggaggcctcc

SEQ ID NO: 716011 - DNA, 15 bp, Homo sapiens
taggggaggcctccc

SEQ ID NO: 716012 - DNA, 15 bp, Homo sapiens
aggggaggcctcccc

SEQ ID NO: 716013 - DNA, 15 bp, Homo sapiens
ggggaggcctcccca

SEQ ID NO: 716014 - DNA, 15 bp, Homo sapiens
gggaggcctccccac

SEQ ID NO: 716015 - DNA, 15 bp, Homo sapiens
ggaggcctccccaca

SEQ ID NO: 716016 - DNA, 15 bp, Homo sapiens
gaggcctccccacat

SEQ ID NO: 716017 - DNA, 15 bp, Homo sapiens
aggcctccccacatt

SEQ ID NO: 716018 - DNA, 15 bp, Homo sapiens
ggcctccccacattt

SEQ ID NO: 716019 - DNA, 15 bp, Homo sapiens
gcctccccacattta

SEQ ID NO: 716020 - DNA, 15 bp, Homo sapiens
cctccccacatttac

SEQ ID NO: 716021 - DNA, 15 bp, Homo sapiens
ctccccacatttaca

SEQ ID NO: 716022 - DNA, 15 bp, Homo sapiens
tccccacatttacac

SEQ ID NO: 716023 - DNA, 15 bp, Homo sapiens
ccccacatttacact

SEQ ID NO: 716024 - DNA, 15 bp, Homo sapiens
cccacatttacactg

SEQ ID NO: 716025 - DNA, 15 bp, Homo sapiens
ccacatttacactgt

SEQ ID NO: 716026 - DNA, 15 bp, Homo sapiens
cacatttacactgta

SEQ ID NO: 716027 - DNA, 15 bp, Homo sapiens
acatttacactgtat

SEQ ID NO: 716028 - DNA, 15 bp, Homo sapiens
catttacactgtatt

SEQ ID NO: 716029 - DNA, 15 bp, Homo sapiens
atttacactgtattt

SEQ ID NO: 716030 - DNA, 15 bp, Homo sapiens
tttacactgtatttt

SEQ ID NO: 716031 - DNA, 15 bp, Homo sapiens
ttacactgtattttc

SEQ ID NO: 716032 - DNA, 15 bp, Homo sapiens
tacactgtattttca

SEQ ID NO: 716033 - DNA, 15 bp, Homo sapiens
acactgtattttcaa

SEQ ID NO: 716034 - DNA, 15 bp, Homo sapiens
cactgtattttcaac

SEQ ID NO: 716035 - DNA, 15 bp, Homo sapiens
actgtattttcaaca

SEQ ID NO: 716036 - DNA, 15 bp, Homo sapiens
ctgtattttcaacat

SEQ ID NO: 716037 - DNA, 15 bp, Homo sapiens
tgtattttcaacatt

SEQ ID NO: 716038 - DNA, 15 bp, Homo sapiens
gtattttcaacatta

SEQ ID NO: 716039 - DNA, 15 bp, Homo sapiens
tattttcaacattaa

SEQ ID NO: 716040 - DNA, 15 bp, Homo sapiens
attttcaacattaac

SEQ ID NO: 716041 - DNA, 15 bp, Homo sapiens
ttttcaacattaact

SEQ ID NO: 716042 - DNA, 15 bp, Homo sapiens
tttcaacattaactt

SEQ ID NO: 716043 - DNA, 15 bp, Homo sapiens
ttcaacattaacttc

SEQ ID NO: 716044 - DNA, 15 bp, Homo sapiens
tcaacattaacttcc

SEQ ID NO: 716045 - DNA, 15 bp, Homo sapiens
caacattaacttccc

SEQ ID NO: 716046 - DNA, 15 bp, Homo sapiens
aacattaacttccca

SEQ ID NO: 716047 - DNA, 15 bp, Homo sapiens
acattaacttcccaa

SEQ ID NO: 716048 - DNA, 15 bp, Homo sapiens
cattaacttcccaac

SEQ ID NO: 716049 - DNA, 15 bp, Homo sapiens
attaacttcccaact

SEQ ID NO: 716050 - DNA, 15 bp, Homo sapiens
ttaacttcccaactc

SEQ ID NO: 716051 - DNA, 15 bp, Homo sapiens
taacttcccaactcg

SEQ ID NO: 716052 - DNA, 15 bp, Homo sapiens
aacttcccaactcga

SEQ ID NO: 716053 - DNA, 15 bp, Homo sapiens
acttcccaactcgac

SEQ ID NO: 716054 - DNA, 15 bp, Homo sapiens
cttcccaactcgacc

SEQ ID NO: 716055 - DNA, 15 bp, Homo sapiens
ttcccaactcgacca

SEQ ID NO: 716056 - DNA, 15 bp, Homo sapiens
tcccaactcgaccaa

SEQ ID NO: 716057 - DNA, 15 bp, Homo sapiens
cccaactcgaccaac

SEQ ID NO: 716058 - DNA, 15 bp, Homo sapiens
ccaactcgaccaact

SEQ ID NO: 716059 - DNA, 15 bp, Homo sapiens
caactcgaccaactc

SEQ ID NO: 716060 - DNA, 15 bp, Homo sapiens
aactcgaccaactct

SEQ ID NO: 716061 - DNA, 15 bp, Homo sapiens
actcgaccaactcta

SEQ ID NO: 716062 - DNA, 15 bp, Homo sapiens
ctcgaccaactctac

SEQ ID NO: 716063 - DNA, 15 bp, Homo sapiens
tcgaccaactctacc

SEQ ID NO: 716064 - DNA, 15 bp, Homo sapiens
cgaccaactctacct

SEQ ID NO: 716065 - DNA, 15 bp, Homo sapiens
gaccaactctacctt

SEQ ID NO: 716066 - DNA, 15 bp, Homo sapiens
accaactctaccttt

SEQ ID NO: 716067 - DNA, 15 bp, Homo sapiens
ccaactctacctttc

SEQ ID NO: 716068 - DNA, 15 bp, Homo sapiens
caactctacctttca

SEQ ID NO: 716069 - DNA, 15 bp, Homo sapiens
aactctacctttcac

SEQ ID NO: 716070 - DNA, 15 bp, Homo sapiens
actctacctttcacg

SEQ ID NO: 716071 - DNA, 15 bp, Homo sapiens
ctctacctttcacgt

SEQ ID NO: 716072 - DNA, 15 bp, Homo sapiens
tctacctttcacgta

SEQ ID NO: 716073 - DNA, 15 bp, Homo sapiens
ctacctttcacgtac

SEQ ID NO: 716074 - DNA, 15 bp, Homo sapiens
tacctttcacgtacg

SEQ ID NO: 716075 - DNA, 15 bp, Homo sapiens
acctttcacgtacgg

SEQ ID NO: 716076 - DNA, 15 bp, Homo sapiens
cctttcacgtacggc

SEQ ID NO: 716077 - DNA, 15 bp, Homo sapiens
ctttcacgtacggcc

SEQ ID NO: 716078 - DNA, 15 bp, Homo sapiens
tttcacgtacggcca

SEQ ID NO: 716079 - DNA, 15 bp, Homo sapiens
ttcacgtacggccat

SEQ ID NO: 716080 - DNA, 15 bp, Homo sapiens
tcacgtacggccatg

SEQ ID NO: 716081 - DNA, 15 bp, Homo sapiens
cacgtacggccatga

SEQ ID NO: 716082 - DNA, 15 bp, Homo sapiens
acgtacggccatgat

SEQ ID NO: 716083 - DNA, 15 bp, Homo sapiens
cgtacggccatgatt

SEQ ID NO: 716084 - DNA, 15 bp, Homo sapiens
gtacggccatgattt

SEQ ID NO: 716085 - DNA, 15 bp, Homo sapiens
tacggccatgatttc

SEQ ID NO: 716086 - DNA, 15 bp, Homo sapiens
acggccatgatttct

SEQ ID NO: 716087 - DNA, 15 bp, Homo sapiens
cggccatgatttctc

SEQ ID NO: 716088 - DNA, 15 bp, Homo sapiens
ggccatgatttctct

SEQ ID NO: 716089 - DNA, 15 bp, Homo sapiens
gccatgatttctctt

SEQ ID NO: 716090 - DNA, 15 bp, Homo sapiens
ccatgatttctcttg

SEQ ID NO: 716091 - DNA, 15 bp, Homo sapiens
catgatttctcttga

SEQ ID NO: 716092 - DNA, 15 bp, Homo sapiens
atgatttctcttgac

SEQ ID NO: 716093 - DNA, 15 bp, Homo sapiens
tgatttctcttgacc

SEQ ID NO: 716094 - DNA, 15 bp, Homo sapiens
gatttctcttgaccc

SEQ ID NO: 716095 - DNA, 15 bp, Homo sapiens
atttctcttgaccct

SEQ ID NO: 716096 - DNA, 15 bp, Homo sapiens
tttctcttgaccctg

SEQ ID NO: 716097 - DNA, 15 bp, Homo sapiens
ttctcttgaccctga

SEQ ID NO: 716098 - DNA, 15 bp, Homo sapiens
tctcttgaccctgaa

SEQ ID NO: 716099 - DNA, 15 bp, Homo sapiens
ctcttgaccctgaaa

SEQ ID NO: 716100 - DNA, 15 bp, Homo sapiens
tcttgaccctgaaat

SEQ ID NO: 716101 - DNA, 15 bp, Homo sapiens
cttgaccctgaaatc

SEQ ID NO: 716102 - DNA, 15 bp, Homo sapiens
ttgaccctgaaatct

SEQ ID NO: 716103 - DNA, 15 bp, Homo sapiens
tgaccctgaaatcta

SEQ ID NO: 716104 - DNA, 15 bp, Homo sapiens
gaccctgaaatctaa

SEQ ID NO: 716105 - DNA, 15 bp, Homo sapiens
accctgaaatctaag

SEQ ID NO: 716106 - DNA, 15 bp, Homo sapiens
ccctgaaatctaagc

SEQ ID NO: 716107 - DNA, 15 bp, Homo sapiens
cctgaaatctaagct

SEQ ID NO: 716108 - DNA, 15 bp, Homo sapiens
ctgaaatctaagcta

SEQ ID NO: 716109 - DNA, 15 bp, Homo sapiens
tgaaatctaagctaa

SEQ ID NO: 716110 - DNA, 15 bp, Homo sapiens
gaaatctaagctaaa

SEQ ID NO: 716111 - DNA, 15 bp, Homo sapiens
aaatctaagctaaag

SEQ ID NO: 716112 - DNA, 15 bp, Homo sapiens
aatctaagctaaagg

SEQ ID NO: 716113 - DNA, 15 bp, Homo sapiens
atctaagctaaaggt

SEQ ID NO: 716114 - DNA, 15 bp, Homo sapiens
tctaagctaaaggtc

SEQ ID NO: 716115 - DNA, 15 bp, Homo sapiens
ctaagctaaaggtca

SEQ ID NO: 716116 - DNA, 15 bp, Homo sapiens
taagctaaaggtcaa

SEQ ID NO: 716117 - DNA, 15 bp, Homo sapiens
aagctaaaggtcaac

SEQ ID NO: 716118 - DNA, 15 bp, Homo sapiens
agctaaaggtcaact

SEQ ID NO: 716119 - DNA, 15 bp, Homo sapiens
gctaaaggtcaactt

SEQ ID NO: 716120 - DNA, 15 bp, Homo sapiens
ctaaaggtcaacttt

SEQ ID NO: 716121 - DNA, 15 bp, Homo sapiens
taaaggtcaactttc

SEQ ID NO: 716122 - DNA, 15 bp, Homo sapiens
aaaggtcaactttca

SEQ ID NO: 716123 - DNA, 15 bp, Homo sapiens
aaggtcaactttcat

SEQ ID NO: 716124 - DNA, 15 bp, Homo sapiens
aggtcaactttcata

SEQ ID NO: 716125 - DNA, 15 bp, Homo sapiens
ggtcaactttcataa

SEQ ID NO: 716126 - DNA, 15 bp, Homo sapiens
gtcaactttcataaa

SEQ ID NO: 716127 - DNA, 15 bp, Homo sapiens
tcaactttcataaag

SEQ ID NO: 716128 - DNA, 15 bp, Homo sapiens
caactttcataaagc

SEQ ID NO: 716129 - DNA, 15 bp, Homo sapiens
aactttcataaagca

SEQ ID NO: 716130 - DNA, 15 bp, Homo sapiens
actttcataaagcag

SEQ ID NO: 716131 - DNA, 15 bp, Homo sapiens
ctttcataaagcagg

SEQ ID NO: 716132 - DNA, 15 bp, Homo sapiens
tttcataaagcaggg

SEQ ID NO: 716133 - DNA, 15 bp, Homo sapiens
ttcataaagcagggt

SEQ ID NO: 716134 - DNA, 15 bp, Homo sapiens
tcataaagcagggta

SEQ ID NO: 716135 - DNA, 15 bp, Homo sapiens
cataaagcagggtaa

SEQ ID NO: 716136 - DNA, 15 bp, Homo sapiens
ataaagcagggtaaa

SEQ ID NO: 716137 - DNA, 15 bp, Homo sapiens
taaagcagggtaaat

SEQ ID NO: 716138 - DNA, 15 bp, Homo sapiens
aaagcagggtaaata

SEQ ID NO: 716139 - DNA, 15 bp, Homo sapiens
aagcagggtaaataa

SEQ ID NO: 716140 - DNA, 15 bp, Homo sapiens
agcagggtaaataaa

SEQ ID NO: 716141 - DNA, 15 bp, Homo sapiens
gcagggtaaataaaa

SEQ ID NO: 716142 - DNA, 15 bp, Homo sapiens
cagggtaaataaaaa

SEQ ID NO: 716143 - DNA, 15 bp, Homo sapiens
agggtaaataaaaat

SEQ ID NO: 716144 - DNA, 15 bp, Homo sapiens
gggtaaataaaaatc

SEQ ID NO: 716145 - DNA, 15 bp, Homo sapiens
ggtaaataaaaatcc

SEQ ID NO: 716146 - DNA, 15 bp, Homo sapiens
gtaaataaaaatccc

SEQ ID NO: 716147 - DNA, 15 bp, Homo sapiens
taaataaaaatccca

SEQ ID NO: 716148 - DNA, 15 bp, Homo sapiens
aaataaaaatcccat

SEQ ID NO: 716149 - DNA, 15 bp, Homo sapiens
aataaaaatcccatg

SEQ ID NO: 716150 - DNA, 15 bp, Homo sapiens
ataaaaatcccatga

SEQ ID NO: 716151 - DNA, 15 bp, Homo sapiens
taaaaatcccatgat

SEQ ID NO: 716152 - DNA, 15 bp, Homo sapiens
aaaaatcccatgatg

SEQ ID NO: 716153 - DNA, 15 bp, Homo sapiens
aaaatcccatgatgt

SEQ ID NO: 716154 - DNA, 15 bp, Homo sapiens
aaatcccatgatgtc

SEQ ID NO: 716155 - DNA, 15 bp, Homo sapiens
aatcccatgatgtca

SEQ ID NO: 716156 - DNA, 15 bp, Homo sapiens
atcccatgatgtcaa

SEQ ID NO: 716157 - DNA, 15 bp, Homo sapiens
tcccatgatgtcaag

SEQ ID NO: 716158 - DNA, 15 bp, Homo sapiens
cccatgatgtcaagc

SEQ ID NO: 716159 - DNA, 15 bp, Homo sapiens
ccatgatgtcaagct

SEQ ID NO: 716160 - DNA, 15 bp, Homo sapiens
catgatgtcaagctc

SEQ ID NO: 716161 - DNA, 15 bp, Homo sapiens
atgatgtcaagctct

SEQ ID NO: 716162 - DNA, 15 bp, Homo sapiens
tgatgtcaagctcta

SEQ ID NO: 716163 - DNA, 15 bp, Homo sapiens
gatgtcaagctctaa

SEQ ID NO: 716164 - DNA, 15 bp, Homo sapiens
atgtcaagctctaag

SEQ ID NO: 716165 - DNA, 15 bp, Homo sapiens
tgtcaagctctaagg

SEQ ID NO: 716166 - DNA, 15 bp, Homo sapiens
gtcaagctctaaggc

SEQ ID NO: 716167 - DNA, 15 bp, Homo sapiens
tcaagctctaaggca

SEQ ID NO: 716168 - DNA, 15 bp, Homo sapiens
caagctctaaggcag

SEQ ID NO: 716169 - DNA, 15 bp, Homo sapiens
aagctctaaggcagg

SEQ ID NO: 716170 - DNA, 15 bp, Homo sapiens
agctctaaggcaggg

SEQ ID NO: 716171 - DNA, 15 bp, Homo sapiens
gctctaaggcagggt

SEQ ID NO: 716172 - DNA, 15 bp, Homo sapiens
ctctaaggcagggtt

SEQ ID NO: 716173 - DNA, 15 bp, Homo sapiens
tctaaggcagggttt

SEQ ID NO: 716174 - DNA, 15 bp, Homo sapiens
ctaaggcagggtttt

SEQ ID NO: 716175 - DNA, 15 bp, Homo sapiens
taaggcagggttttc

SEQ ID NO: 716176 - DNA, 15 bp, Homo sapiens
aaggcagggttttca

SEQ ID NO: 716177 - DNA, 15 bp, Homo sapiens
aggcagggttttcaa

SEQ ID NO: 716178 - DNA, 15 bp, Homo sapiens
ggcagggttttcaag

SEQ ID NO: 716179 - DNA, 15 bp, Homo sapiens
gcagggttttcaagg

SEQ ID NO: 716180 - DNA, 15 bp, Homo sapiens
cagggttttcaaggg

SEQ ID NO: 716181 - DNA, 15 bp, Homo sapiens
agggttttcaagggc

SEQ ID NO: 716182 - DNA, 15 bp, Homo sapiens
gggttttcaagggca

SEQ ID NO: 716183 - DNA, 15 bp, Homo sapiens
ggttttcaagggcaa

SEQ ID NO: 716184 - DNA, 15 bp, Homo sapiens
gttttcaagggcaat

SEQ ID NO: 716185 - DNA, 15 bp, Homo sapiens
ttttcaagggcaatg

SEQ ID NO: 716186 - DNA, 15 bp, Homo sapiens
tttcaagggcaatgg

SEQ ID NO: 716187 - DNA, 15 bp, Homo sapiens
ttcaagggcaatggg

SEQ ID NO: 716188 - DNA, 15 bp, Homo sapiens
tcaagggcaatgggg

SEQ ID NO: 716189 - DNA, 15 bp, Homo sapiens
caagggcaatgggga

SEQ ID NO: 716190 - DNA, 15 bp, Homo sapiens
aagggcaatggggag

SEQ ID NO: 716191 - DNA, 15 bp, Homo sapiens
agggcaatggggagc

SEQ ID NO: 716192 - DNA, 15 bp, Homo sapiens
gggcaatggggagct

SEQ ID NO: 716193 - DNA, 15 bp, Homo sapiens
ggcaatggggagctc

SEQ ID NO: 716194 - DNA, 15 bp, Homo sapiens
gcaatggggagctcc

SEQ ID NO: 716195 - DNA, 15 bp, Homo sapiens
caatggggagctccg

SEQ ID NO: 716196 - DNA, 15 bp, Homo sapiens
aatggggagctccgc

SEQ ID NO: 716197 - DNA, 15 bp, Homo sapiens
atggggagctccgca

SEQ ID NO: 716198 - DNA, 15 bp, Homo sapiens
tggggagctccgcaa

SEQ ID NO: 716199 - DNA, 15 bp, Homo sapiens
ggggagctccgcaag

SEQ ID NO: 716200 - DNA, 15 bp, Homo sapiens
gggagctccgcaagt

SEQ ID NO: 716201 - DNA, 15 bp, Homo sapiens
ggagctccgcaagtc

SEQ ID NO: 716202 - DNA, 15 bp, Homo sapiens
gagctccgcaagtct

SEQ ID NO: 716203 - DNA, 15 bp, Homo sapiens
agctccgcaagtctc

SEQ ID NO: 716204 - DNA, 15 bp, Homo sapiens
gctccgcaagtctca

SEQ ID NO: 716205 - DNA, 15 bp, Homo sapiens
ctccgcaagtctcag

SEQ ID NO: 716206 - DNA, 15 bp, Homo sapiens
tccgcaagtctcaga

SEQ ID NO: 716207 - DNA, 15 bp, Homo sapiens
ccgcaagtctcagac

SEQ ID NO: 716208 - DNA, 15 bp, Homo sapiens
cgcaagtctcagaca

SEQ ID NO: 716209 - DNA, 15 bp, Homo sapiens
gcaagtctcagacaa

SEQ ID NO: 716210 - DNA, 15 bp, Homo sapiens
caagtctcagacaaa

SEQ ID NO: 716211 - DNA, 15 bp, Homo sapiens
aagtctcagacaaaa

SEQ ID NO: 716212 - DNA, 15 bp, Homo sapiens
agtctcagacaaaag

SEQ ID NO: 716213 - DNA, 15 bp, Homo sapiens
gtctcagacaaaagc

SEQ ID NO: 716214 - DNA, 15 bp, Homo sapiens
tctcagacaaaagca

SEQ ID NO: 716215 - DNA, 15 bp, Homo sapiens
ctcagacaaaagcaa

SEQ ID NO: 716216 - DNA, 15 bp, Homo sapiens
tcagacaaaagcaag

SEQ ID NO: 716217 - DNA, 15 bp, Homo sapiens
cagacaaaagcaaga

SEQ ID NO: 716218 - DNA, 15 bp, Homo sapiens
agacaaaagcaagac

SEQ ID NO: 716219 - DNA, 15 bp, Homo sapiens
gacaaaagcaagaca

SEQ ID NO: 716220 - DNA, 15 bp, Homo sapiens
acaaaagcaagacac

SEQ ID NO: 716221 - DNA, 15 bp, Homo sapiens
caaaagcaagacact

SEQ ID NO: 716222 - DNA, 15 bp, Homo sapiens
aaaagcaagacactc

SEQ ID NO: 716223 - DNA, 15 bp, Homo sapiens
aaagcaagacactcc

SEQ ID NO: 716224 - DNA, 15 bp, Homo sapiens
aagcaagacactcct

SEQ ID NO: 716225 - DNA, 15 bp, Homo sapiens
agcaagacactccta

SEQ ID NO: 716226 - DNA, 15 bp, Homo sapiens
gcaagacactcctat

SEQ ID NO: 716227 - DNA, 15 bp, Homo sapiens
caagacactcctatc

SEQ ID NO: 716228 - DNA, 15 bp, Homo sapiens
aagacactcctatca

SEQ ID NO: 716229 - DNA, 15 bp, Homo sapiens
agacactcctatcag

SEQ ID NO: 716230 - DNA, 15 bp, Homo sapiens
gacactcctatcagc

SEQ ID NO: 716231 - DNA, 15 bp, Homo sapiens
acactcctatcagct

SEQ ID NO: 716232 - DNA, 15 bp, Homo sapiens
cactcctatcagctg

SEQ ID NO: 716233 - DNA, 15 bp, Homo sapiens
actcctatcagctgg

SEQ ID NO: 716234 - DNA, 15 bp, Homo sapiens
ctcctatcagctggg

SEQ ID NO: 716235 - DNA, 15 bp, Homo sapiens
tcctatcagctgggc

SEQ ID NO: 716236 - DNA, 15 bp, Homo sapiens
cctatcagctgggct

SEQ ID NO: 716237 - DNA, 15 bp, Homo sapiens
ctatcagctgggctc

SEQ ID NO: 716238 - DNA, 15 bp, Homo sapiens
tatcagctgggctca

SEQ ID NO: 716239 - DNA, 15 bp, Homo sapiens
atcagctgggctcac

SEQ ID NO: 716240 - DNA, 15 bp, Homo sapiens
tcagctgggctcacg

SEQ ID NO: 716241 - DNA, 15 bp, Homo sapiens
cagctgggctcacgc

SEQ ID NO: 716242 - DNA, 15 bp, Homo sapiens
agctgggctcacgcc

SEQ ID NO: 716243 - DNA, 15 bp, Homo sapiens
gctgggctcacgccc

SEQ ID NO: 716244 - DNA, 15 bp, Homo sapiens
ctgggctcacgcccc

SEQ ID NO: 716245 - DNA, 15 bp, Homo sapiens
tgggctcacgcccca

SEQ ID NO: 716246 - DNA, 15 bp, Homo sapiens
gggctcacgccccac

SEQ ID NO: 716247 - DNA, 15 bp, Homo sapiens
ggctcacgccccact

SEQ ID NO: 716248 - DNA, 15 bp, Homo sapiens
gctcacgccccactg

SEQ ID NO: 716249 - DNA, 15 bp, Homo sapiens
ctcacgccccactgc

SEQ ID NO: 716250 - DNA, 15 bp, Homo sapiens
tcacgccccactgct

SEQ ID NO: 716251 - DNA, 15 bp, Homo sapiens
cacgccccactgctc

SEQ ID NO: 716252 - DNA, 15 bp, Homo sapiens
acgccccactgctct

SEQ ID NO: 716253 - DNA, 15 bp, Homo sapiens
cgccccactgctctc

SEQ ID NO: 716254 - DNA, 15 bp, Homo sapiens
gccccactgctctct

SEQ ID NO: 716255 - DNA, 15 bp, Homo sapiens
ccccactgctctcta

SEQ ID NO: 716256 - DNA, 15 bp, Homo sapiens
cccactgctctctag

SEQ ID NO: 716257 - DNA, 15 bp, Homo sapiens
ccactgctctctagc

SEQ ID NO: 716258 - DNA, 15 bp, Homo sapiens
cactgctctctagca

SEQ ID NO: 716259 - DNA, 15 bp, Homo sapiens
actgctctctagcag

SEQ ID NO: 716260 - DNA, 15 bp, Homo sapiens
ctgctctctagcaga

SEQ ID NO: 716261 - DNA, 15 bp, Homo sapiens
tgctctctagcagag

SEQ ID NO: 716262 - DNA, 15 bp, Homo sapiens
gctctctagcagaga

SEQ ID NO: 716263 - DNA, 15 bp, Homo sapiens
ctctctagcagagac

SEQ ID NO: 716264 - DNA, 15 bp, Homo sapiens
tctctagcagagact

SEQ ID NO: 716265 - DNA, 15 bp, Homo sapiens
ctctagcagagacta

SEQ ID NO: 716266 - DNA, 15 bp, Homo sapiens
tctagcagagactag

SEQ ID NO: 716267 - DNA, 15 bp, Homo sapiens
ctagcagagactagc

SEQ ID NO: 716268 - DNA, 15 bp, Homo sapiens
tagcagagactagct

SEQ ID NO: 716269 - DNA, 15 bp, Homo sapiens
agcagagactagctc

SEQ ID NO: 716270 - DNA, 15 bp, Homo sapiens
gcagagactagctct

SEQ ID NO: 716271 - DNA, 15 bp, Homo sapiens
cagagactagctctg

SEQ ID NO: 716272 - DNA, 15 bp, Homo sapiens
agagactagctctga

SEQ ID NO: 716273 - DNA, 15 bp, Homo sapiens
gagactagctctgag

SEQ ID NO: 716274 - DNA, 15 bp, Homo sapiens
agactagctctgagg

SEQ ID NO: 716275 - DNA, 15 bp, Homo sapiens
gactagctctgagga

SEQ ID NO: 716276 - DNA, 15 bp, Homo sapiens
actagctctgaggag

SEQ ID NO: 716277 - DNA, 15 bp, Homo sapiens
ctagctctgaggagg

SEQ ID NO: 716278 - DNA, 15 bp, Homo sapiens
tagctctgaggaggg

SEQ ID NO: 716279 - DNA, 15 bp, Homo sapiens
agctctgaggaggga

SEQ ID NO: 716280 - DNA, 15 bp, Homo sapiens
gctctgaggagggaa

SEQ ID NO: 716281 - DNA, 15 bp, Homo sapiens
ctctgaggagggaag

SEQ ID NO: 716282 - DNA, 15 bp, Homo sapiens
tctgaggagggaaga

SEQ ID NO: 716283 - DNA, 15 bp, Homo sapiens
ctgaggagggaagaa

SEQ ID NO: 716284 - DNA, 15 bp, Homo sapiens
tgaggagggaagaac

SEQ ID NO: 716285 - DNA, 15 bp, Homo sapiens
gaggagggaagaacc

SEQ ID NO: 716286 - DNA, 15 bp, Homo sapiens
aggagggaagaaccg

SEQ ID NO: 716287 - DNA, 15 bp, Homo sapiens
ggagggaagaaccgc

SEQ ID NO: 716288 - DNA, 15 bp, Homo sapiens
gagggaagaaccgcc

SEQ ID NO: 716289 - DNA, 15 bp, Homo sapiens
agggaagaaccgccc

SEQ ID NO: 716290 - DNA, 15 bp, Homo sapiens
gggaagaaccgccct

SEQ ID NO: 716291 - DNA, 15 bp, Homo sapiens
ggaagaaccgccctt

SEQ ID NO: 716292 - DNA, 15 bp, Homo sapiens
gaagaaccgcccttc

SEQ ID NO: 716293 - DNA, 15 bp, Homo sapiens
aagaaccgcccttct

SEQ ID NO: 716294 - DNA, 15 bp, Homo sapiens
agaaccgcccttcta

SEQ ID NO: 716295 - DNA, 15 bp, Homo sapiens
gaaccgcccttctag

SEQ ID NO: 716296 - DNA, 15 bp, Homo sapiens
aaccgcccttctagg

SEQ ID NO: 716297 - DNA, 15 bp, Homo sapiens
accgcccttctagga

SEQ ID NO: 716298 - DNA, 15 bp, Homo sapiens
ccgcccttctaggaa

SEQ ID NO: 716299 - DNA, 15 bp, Homo sapiens
cgcccttctaggaag

SEQ ID NO: 716300 - DNA, 15 bp, Homo sapiens
gcccttctaggaagt

SEQ ID NO: 716301 - DNA, 15 bp, Homo sapiens
cccttctaggaagtt

SEQ ID NO: 716302 - DNA, 15 bp, Homo sapiens
ccttctaggaagtta

SEQ ID NO: 716303 - DNA, 15 bp, Homo sapiens
cttctaggaagttac

SEQ ID NO: 716304 - DNA, 15 bp, Homo sapiens
ttctaggaagttaca

SEQ ID NO: 716305 - DNA, 15 bp, Homo sapiens
tctaggaagttacat

SEQ ID NO: 716306 - DNA, 15 bp, Homo sapiens
ctaggaagttacatc

SEQ ID NO: 716307 - DNA, 15 bp, Homo sapiens
taggaagttacatca

SEQ ID NO: 716308 - DNA, 15 bp, Homo sapiens
aggaagttacatcac

SEQ ID NO: 716309 - DNA, 15 bp, Homo sapiens
ggaagttacatcact

SEQ ID NO: 716310 - DNA, 15 bp, Homo sapiens
gaagttacatcacta

SEQ ID NO: 716311 - DNA, 15 bp, Homo sapiens
aagttacatcactag

SEQ ID NO: 716312 - DNA, 15 bp, Homo sapiens
agttacatcactagg

SEQ ID NO: 716313 - DNA, 15 bp, Homo sapiens
gttacatcactaggc

SEQ ID NO: 716314 - DNA, 15 bp, Homo sapiens
ttacatcactaggcc

SEQ ID NO: 716315 - DNA, 15 bp, Homo sapiens
tacatcactaggccc

SEQ ID NO: 716316 - DNA, 15 bp, Homo sapiens
acatcactaggccct

SEQ ID NO: 716317 - DNA, 15 bp, Homo sapiens
catcactaggccctg

SEQ ID NO: 716318 - DNA, 15 bp, Homo sapiens
atcactaggccctgg

SEQ ID NO: 716319 - DNA, 15 bp, Homo sapiens
tcactaggccctgga

SEQ ID NO: 716320 - DNA, 15 bp, Homo sapiens
cactaggccctggaa

SEQ ID NO: 716321 - DNA, 15 bp, Homo sapiens
actaggccctggaat

SEQ ID NO: 716322 - DNA, 15 bp, Homo sapiens
ctaggccctggaatt

SEQ ID NO: 716323 - DNA, 15 bp, Homo sapiens
taggccctggaatta

SEQ ID NO: 716324 - DNA, 15 bp, Homo sapiens
aggccctggaattaa

SEQ ID NO: 716325 - DNA, 15 bp, Homo sapiens
ggccctggaattaaa

SEQ ID NO: 716326 - DNA, 15 bp, Homo sapiens
gccctggaattaaaa

SEQ ID NO: 716327 - DNA, 15 bp, Homo sapiens
ccctggaattaaaat

SEQ ID NO: 716328 - DNA, 15 bp, Homo sapiens
cctggaattaaaata

SEQ ID NO: 716329 - DNA, 15 bp, Homo sapiens
ctggaattaaaataa

SEQ ID NO: 716330 - DNA, 15 bp, Homo sapiens
tggaattaaaataaa

SEQ ID NO: 716331 - DNA, 15 bp, Homo sapiens
ggaattaaaataaat

SEQ ID NO: 716332 - DNA, 15 bp, Homo sapiens
gaattaaaataaatg

SEQ ID NO: 716333 - DNA, 15 bp, Homo sapiens
aattaaaataaatga

SEQ ID NO: 716334 - DNA, 15 bp, Homo sapiens
attaaaataaatgac

SEQ ID NO: 716335 - DNA, 15 bp, Homo sapiens
ttaaaataaatgaca

SEQ ID NO: 716336 - DNA, 15 bp, Homo sapiens
taaaataaatgacac

SEQ ID NO: 716337 - DNA, 15 bp, Homo sapiens
aaaataaatgacact

SEQ ID NO: 716338 - DNA, 15 bp, Homo sapiens
aaataaatgacactc

SEQ ID NO: 716339 - DNA, 15 bp, Homo sapiens
aataaatgacactca

SEQ ID NO: 716340 - DNA, 15 bp, Homo sapiens
ataaatgacactcaa

SEQ ID NO: 716341 - DNA, 15 bp, Homo sapiens
taaatgacactcaac

SEQ ID NO: 716342 - DNA, 15 bp, Homo sapiens
aaatgacactcaact

SEQ ID NO: 716343 - DNA, 15 bp, Homo sapiens
aatgacactcaactt

SEQ ID NO: 716344 - DNA, 15 bp, Homo sapiens
atgacactcaacttc

SEQ ID NO: 716345 - DNA, 15 bp, Homo sapiens
tgacactcaacttct

SEQ ID NO: 716346 - DNA, 15 bp, Homo sapiens
gacactcaacttctg

SEQ ID NO: 716347 - DNA, 15 bp, Homo sapiens
acactcaacttctgg

SEQ ID NO: 716348 - DNA, 15 bp, Homo sapiens
cactcaacttctgga

SEQ ID NO: 716349 - DNA, 15 bp, Homo sapiens
actcaacttctggaa

SEQ ID NO: 716350 - DNA, 15 bp, Homo sapiens
ctcaacttctggaac

SEQ ID NO: 716351 - DNA, 15 bp, Homo sapiens
tcaacttctggaact

SEQ ID NO: 716352 - DNA, 15 bp, Homo sapiens
caacttctggaactg

SEQ ID NO: 716353 - DNA, 15 bp, Homo sapiens
aacttctggaactgc

SEQ ID NO: 716354 - DNA, 15 bp, Homo sapiens
acttctggaactgca

SEQ ID NO: 716355 - DNA, 15 bp, Homo sapiens
cttctggaactgcac

SEQ ID NO: 716356 - DNA, 15 bp, Homo sapiens
ttctggaactgcaca

SEQ ID NO: 716357 - DNA, 15 bp, Homo sapiens
tctggaactgcacac

SEQ ID NO: 716358 - DNA, 15 bp, Homo sapiens
ctggaactgcacaca

SEQ ID NO: 716359 - DNA, 15 bp, Homo sapiens
tggaactgcacacag

SEQ ID NO: 716360 - DNA, 15 bp, Homo sapiens
ggaactgcacacagc

SEQ ID NO: 716361 - DNA, 15 bp, Homo sapiens
gaactgcacacagct

SEQ ID NO: 716362 - DNA, 15 bp, Homo sapiens
aactgcacacagctc

SEQ ID NO: 716363 - DNA, 15 bp, Homo sapiens
actgcacacagctca

SEQ ID NO: 716364 - DNA, 15 bp, Homo sapiens
ctgcacacagctcac

SEQ ID NO: 716365 - DNA, 15 bp, Homo sapiens
tgcacacagctcacg

SEQ ID NO: 716366 - DNA, 15 bp, Homo sapiens
gcacacagctcacgg

SEQ ID NO: 716367 - DNA, 15 bp, Homo sapiens
cacacagctcacgga

SEQ ID NO: 716368 - DNA, 15 bp, Homo sapiens
acacagctcacggat

SEQ ID NO: 716369 - DNA, 15 bp, Homo sapiens
cacagctcacggatg

SEQ ID NO: 716370 - DNA, 15 bp, Homo sapiens
acagctcacggatgt

SEQ ID NO: 716371 - DNA, 15 bp, Homo sapiens
cagctcacggatgtc

SEQ ID NO: 716372 - DNA, 15 bp, Homo sapiens
agctcacggatgtca

SEQ ID NO: 716373 - DNA, 15 bp, Homo sapiens
gctcacggatgtcag

SEQ ID NO: 716374 - DNA, 15 bp, Homo sapiens
ctcacggatgtcagc

SEQ ID NO: 716375 - DNA, 15 bp, Homo sapiens
tcacggatgtcagcg

SEQ ID NO: 716376 - DNA, 15 bp, Homo sapiens
cacggatgtcagcga

SEQ ID NO: 716377 - DNA, 15 bp, Homo sapiens
acggatgtcagcgat

SEQ ID NO: 716378 - DNA, 15 bp, Homo sapiens
cggatgtcagcgatg

SEQ ID NO: 716379 - DNA, 15 bp, Homo sapiens
ggatgtcagcgatga

SEQ ID NO: 716380 - DNA, 15 bp, Homo sapiens
gatgtcagcgatgac

SEQ ID NO: 716381 - DNA, 15 bp, Homo sapiens
atgtcagcgatgacc

SEQ ID NO: 716382 - DNA, 15 bp, Homo sapiens
tgtcagcgatgaccc

SEQ ID NO: 716383 - DNA, 15 bp, Homo sapiens
gtcagcgatgacccg

SEQ ID NO: 716384 - DNA, 15 bp, Homo sapiens
tcagcgatgacccgt

SEQ ID NO: 716385 - DNA, 15 bp, Homo sapiens
cagcgatgacccgtt

SEQ ID NO: 716386 - DNA, 15 bp, Homo sapiens
agcgatgacccgtta

SEQ ID NO: 716387 - DNA, 15 bp, Homo sapiens
gcgatgacccgttag

SEQ ID NO: 716388 - DNA, 15 bp, Homo sapiens
cgatgacccgttagt

SEQ ID NO: 716389 - DNA, 15 bp, Homo sapiens
gatgacccgttagtt

SEQ ID NO: 716390 - DNA, 15 bp, Homo sapiens
atgacccgttagttg

SEQ ID NO: 716391 - DNA, 15 bp, Homo sapiens
tgacccgttagttgg

SEQ ID NO: 716392 - DNA, 15 bp, Homo sapiens
gacccgttagttggc

SEQ ID NO: 716393 - DNA, 15 bp, Homo sapiens
acccgttagttggca

SEQ ID NO: 716394 - DNA, 15 bp, Homo sapiens
cccgttagttggcag

SEQ ID NO: 716395 - DNA, 15 bp, Homo sapiens
ccgttagttggcagg

SEQ ID NO: 716396 - DNA, 15 bp, Homo sapiens
cgttagttggcaggg

SEQ ID NO: 716397 - DNA, 15 bp, Homo sapiens
gttagttggcagggg

SEQ ID NO: 716398 - DNA, 15 bp, Homo sapiens
ttagttggcaggggt

SEQ ID NO: 716399 - DNA, 15 bp, Homo sapiens
tagttggcaggggta

SEQ ID NO: 716400 - DNA, 15 bp, Homo sapiens
agttggcaggggtac

SEQ ID NO: 716401 - DNA, 15 bp, Homo sapiens
gttggcaggggtact

SEQ ID NO: 716402 - DNA, 15 bp, Homo sapiens
ttggcaggggtactt

SEQ ID NO: 716403 - DNA, 15 bp, Homo sapiens
tggcaggggtacttc

SEQ ID NO: 716404 - DNA, 15 bp, Homo sapiens
ggcaggggtacttca

SEQ ID NO: 716405 - DNA, 15 bp, Homo sapiens
gcaggggtacttcaa

SEQ ID NO: 716406 - DNA, 15 bp, Homo sapiens
caggggtacttcaac

SEQ ID NO: 716407 - DNA, 15 bp, Homo sapiens
aggggtacttcaact

SEQ ID NO: 716408 - DNA, 15 bp, Homo sapiens
ggggtacttcaactt

SEQ ID NO: 716409 - DNA, 15 bp, Homo sapiens
gggtacttcaactta

SEQ ID NO: 716410 - DNA, 15 bp, Homo sapiens
ggtacttcaacttag

SEQ ID NO: 716411 - DNA, 15 bp, Homo sapiens
gtacttcaacttagc

SEQ ID NO: 716412 - DNA, 15 bp, Homo sapiens
tacttcaacttagca

SEQ ID NO: 716413 - DNA, 15 bp, Homo sapiens
acttcaacttagcaa

SEQ ID NO: 716414 - DNA, 15 bp, Homo sapiens
cttcaacttagcaat

SEQ ID NO: 716415 - DNA, 15 bp, Homo sapiens
ttcaacttagcaatc

SEQ ID NO: 716416 - DNA, 15 bp, Homo sapiens
tcaacttagcaatca

SEQ ID NO: 716417 - DNA, 15 bp, Homo sapiens
caacttagcaatcag

SEQ ID NO: 716418 - DNA, 15 bp, Homo sapiens
aacttagcaatcaga

SEQ ID NO: 716419 - DNA, 15 bp, Homo sapiens
acttagcaatcagat

SEQ ID NO: 716420 - DNA, 15 bp, Homo sapiens
cttagcaatcagatg

SEQ ID NO: 716421 - DNA, 15 bp, Homo sapiens
ttagcaatcagatgc

SEQ ID NO: 716422 - DNA, 15 bp, Homo sapiens
tagcaatcagatgca

SEQ ID NO: 716423 - DNA, 15 bp, Homo sapiens
agcaatcagatgcag

SEQ ID NO: 716424 - DNA, 15 bp, Homo sapiens
gcaatcagatgcaga

SEQ ID NO: 716425 - DNA, 15 bp, Homo sapiens
caatcagatgcagaa

SEQ ID NO: 716426 - DNA, 15 bp, Homo sapiens
aatcagatgcagaag

SEQ ID NO: 716427 - DNA, 15 bp, Homo sapiens
atcagatgcagaaga

SEQ ID NO: 716428 - DNA, 15 bp, Homo sapiens
tcagatgcagaagaa

SEQ ID NO: 716429 - DNA, 15 bp, Homo sapiens
cagatgcagaagaaa

SEQ ID NO: 716430 - DNA, 15 bp, Homo sapiens
agatgcagaagaaaa

SEQ ID NO: 716431 - DNA, 15 bp, Homo sapiens
gatgcagaagaaaac

SEQ ID NO: 716432 - DNA, 15 bp, Homo sapiens
atgcagaagaaaaca

SEQ ID NO: 716433 - DNA, 15 bp, Homo sapiens
tgcagaagaaaacaa

SEQ ID NO: 716434 - DNA, 15 bp, Homo sapiens
gcagaagaaaacaac

SEQ ID NO: 716435 - DNA, 15 bp, Homo sapiens
cagaagaaaacaaca

SEQ ID NO: 716436 - DNA, 15 bp, Homo sapiens
agaagaaaacaacag

SEQ ID NO: 716437 - DNA, 15 bp, Homo sapiens
gaagaaaacaacagc

SEQ ID NO: 716438 - DNA, 15 bp, Homo sapiens
aagaaaacaacagct

SEQ ID NO: 716439 - DNA, 15 bp, Homo sapiens
agaaaacaacagctg

SEQ ID NO: 716440 - DNA, 15 bp, Homo sapiens
gaaaacaacagctga

SEQ ID NO: 716441 - DNA, 15 bp, Homo sapiens
aaaacaacagctgaa

SEQ ID NO: 716442 - DNA, 15 bp, Homo sapiens
aaacaacagctgaaa

SEQ ID NO: 716443 - DNA, 15 bp, Homo sapiens
aacaacagctgaaat

SEQ ID NO: 716444 - DNA, 15 bp, Homo sapiens
acaacagctgaaatc

SEQ ID NO: 716445 - DNA, 15 bp, Homo sapiens
caacagctgaaatca

SEQ ID NO: 716446 - DNA, 15 bp, Homo sapiens
aacagctgaaatcac

SEQ ID NO: 716447 - DNA, 15 bp, Homo sapiens
acagctgaaatcacc

SEQ ID NO: 716448 - DNA, 15 bp, Homo sapiens
cagctgaaatcacct

SEQ ID NO: 716449 - DNA, 15 bp, Homo sapiens
agctgaaatcacctg

SEQ ID NO: 716450 - DNA, 15 bp, Homo sapiens
gctgaaatcacctgg

SEQ ID NO: 716451 - DNA, 15 bp, Homo sapiens
ctgaaatcacctggc

SEQ ID NO: 716452 - DNA, 15 bp, Homo sapiens
tgaaatcacctggcc

SEQ ID NO: 716453 - DNA, 15 bp, Homo sapiens
gaaatcacctggccc

SEQ ID NO: 716454 - DNA, 15 bp, Homo sapiens
aaatcacctggcccc

SEQ ID NO: 716455 - DNA, 15 bp, Homo sapiens
aatcacctggcccct

SEQ ID NO: 716456 - DNA, 15 bp, Homo sapiens
atcacctggcccctt

SEQ ID NO: 716457 - DNA, 15 bp, Homo sapiens
tcacctggccccttt

SEQ ID NO: 716458 - DNA, 15 bp, Homo sapiens
cacctggcccctttt

SEQ ID NO: 716459 - DNA, 15 bp, Homo sapiens
acctggccccttttc

SEQ ID NO: 716460 - DNA, 15 bp, Homo sapiens
cctggccccttttca

SEQ ID NO: 716461 - DNA, 15 bp, Homo sapiens
ctggccccttttcaa

SEQ ID NO: 716462 - DNA, 15 bp, Homo sapiens
tggccccttttcaag

SEQ ID NO: 716463 - DNA, 15 bp, Homo sapiens
ggccccttttcaagg

SEQ ID NO: 716464 - DNA, 15 bp, Homo sapiens
gccccttttcaaggg

SEQ ID NO: 716465 - DNA, 15 bp, Homo sapiens
ccccttttcaagggc

SEQ ID NO: 716466 - DNA, 15 bp, Homo sapiens
cccttttcaagggcc

SEQ ID NO: 716467 - DNA, 15 bp, Homo sapiens
ccttttcaagggccc

SEQ ID NO: 716468 - DNA, 15 bp, Homo sapiens
cttttcaagggcccc

SEQ ID NO: 716469 - DNA, 15 bp, Homo sapiens
ttttcaagggcccca

SEQ ID NO: 716470 - DNA, 15 bp, Homo sapiens
tttcaagggccccac

SEQ ID NO: 716471 - DNA, 15 bp, Homo sapiens
ttcaagggccccaca

SEQ ID NO: 716472 - DNA, 15 bp, Homo sapiens
tcaagggccccacag

SEQ ID NO: 716473 - DNA, 15 bp, Homo sapiens
caagggccccacagt

SEQ ID NO: 716474 - DNA, 15 bp, Homo sapiens
aagggccccacagta

SEQ ID NO: 716475 - DNA, 15 bp, Homo sapiens
agggccccacagtaa

SEQ ID NO: 716476 - DNA, 15 bp, Homo sapiens
gggccccacagtaac

SEQ ID NO: 716477 - DNA, 15 bp, Homo sapiens
ggccccacagtaaca

SEQ ID NO: 716478 - DNA, 15 bp, Homo sapiens
gccccacagtaacaa

SEQ ID NO: 716479 - DNA, 15 bp, Homo sapiens
ccccacagtaacaaa

SEQ ID NO: 716480 - DNA, 15 bp, Homo sapiens
cccacagtaacaaag

SEQ ID NO: 716481 - DNA, 15 bp, Homo sapiens
ccacagtaacaaagc

SEQ ID NO: 716482 - DNA, 15 bp, Homo sapiens
cacagtaacaaagct

SEQ ID NO: 716483 - DNA, 15 bp, Homo sapiens
acagtaacaaagctg

SEQ ID NO: 716484 - DNA, 15 bp, Homo sapiens
cagtaacaaagctgg

SEQ ID NO: 716485 - DNA, 15 bp, Homo sapiens
agtaacaaagctggt

SEQ ID NO: 716486 - DNA, 15 bp, Homo sapiens
gtaacaaagctggtc

SEQ ID NO: 716487 - DNA, 15 bp, Homo sapiens
taacaaagctggtca

SEQ ID NO: 716488 - DNA, 15 bp, Homo sapiens
aacaaagctggtcag

SEQ ID NO: 716489 - DNA, 15 bp, Homo sapiens
acaaagctggtcagg

SEQ ID NO: 716490 - DNA, 15 bp, Homo sapiens
caaagctggtcaggg

SEQ ID NO: 716491 - DNA, 15 bp, Homo sapiens
aaagctggtcagggt

SEQ ID NO: 716492 - DNA, 15 bp, Homo sapiens
aagctggtcagggtt

SEQ ID NO: 716493 - DNA, 15 bp, Homo sapiens
agctggtcagggttt

SEQ ID NO: 716494 - DNA, 15 bp, Homo sapiens
gctggtcagggtttg

SEQ ID NO: 716495 - DNA, 15 bp, Homo sapiens
ctggtcagggtttgg

SEQ ID NO: 716496 - DNA, 15 bp, Homo sapiens
tggtcagggtttgga

SEQ ID NO: 716497 - DNA, 15 bp, Homo sapiens
ggtcagggtttggac

SEQ ID NO: 716498 - DNA, 15 bp, Homo sapiens
gtcagggtttggact

SEQ ID NO: 716499 - DNA, 15 bp, Homo sapiens
tcagggtttggactc

SEQ ID NO: 716500 - DNA, 15 bp, Homo sapiens
cagggtttggactca

SEQ ID NO: 716501 - DNA, 15 bp, Homo sapiens
agggtttggactcac

SEQ ID NO: 716502 - DNA, 15 bp, Homo sapiens
gggtttggactcact

SEQ ID NO: 716503 - DNA, 15 bp, Homo sapiens
ggtttggactcactg

SEQ ID NO: 716504 - DNA, 15 bp, Homo sapiens
gtttggactcactgg

SEQ ID NO: 716505 - DNA, 15 bp, Homo sapiens
tttggactcactggc

SEQ ID NO: 716506 - DNA, 15 bp, Homo sapiens
ttggactcactggcc

SEQ ID NO: 716507 - DNA, 15 bp, Homo sapiens
tggactcactggcct

SEQ ID NO: 716508 - DNA, 15 bp, Homo sapiens
ggactcactggccta

SEQ ID NO: 716509 - DNA, 15 bp, Homo sapiens
gactcactggcctat

SEQ ID NO: 716510 - DNA, 15 bp, Homo sapiens
actcactggcctata

SEQ ID NO: 716511 - DNA, 15 bp, Homo sapiens
ctcactggcctatat

SEQ ID NO: 716512 - DNA, 15 bp, Homo sapiens
tcactggcctatata

SEQ ID NO: 716513 - DNA, 15 bp, Homo sapiens
cactggcctatatag

SEQ ID NO: 716514 - DNA, 15 bp, Homo sapiens
actggcctatatagc

SEQ ID NO: 716515 - DNA, 15 bp, Homo sapiens
ctggcctatatagcc

SEQ ID NO: 716516 - DNA, 15 bp, Homo sapiens
tggcctatatagcca

SEQ ID NO: 716517 - DNA, 15 bp, Homo sapiens
ggcctatatagccat

SEQ ID NO: 716518 - DNA, 15 bp, Homo sapiens
gcctatatagccatc

SEQ ID NO: 716519 - DNA, 15 bp, Homo sapiens
cctatatagccatct

SEQ ID NO: 716520 - DNA, 15 bp, Homo sapiens
ctatatagccatctt

SEQ ID NO: 716521 - DNA, 15 bp, Homo sapiens
tatatagccatcttg

SEQ ID NO: 716522 - DNA, 15 bp, Homo sapiens
atatagccatcttgt

SEQ ID NO: 716523 - DNA, 15 bp, Homo sapiens
tatagccatcttgtg

SEQ ID NO: 716524 - DNA, 15 bp, Homo sapiens
atagccatcttgtgg

SEQ ID NO: 716525 - DNA, 15 bp, Homo sapiens
tagccatcttgtggc

SEQ ID NO: 716526 - DNA, 15 bp, Homo sapiens
agccatcttgtggct

SEQ ID NO: 716527 - DNA, 15 bp, Homo sapiens
gccatcttgtggctg

SEQ ID NO: 716528 - DNA, 15 bp, Homo sapiens
ccatcttgtggctgg

SEQ ID NO: 716529 - DNA, 15 bp, Homo sapiens
catcttgtggctggc

SEQ ID NO: 716530 - DNA, 15 bp, Homo sapiens
atcttgtggctggca

SEQ ID NO: 716531 - DNA, 15 bp, Homo sapiens
tcttgtggctggcat

SEQ ID NO: 716532 - DNA, 15 bp, Homo sapiens
cttgtggctggcatg

SEQ ID NO: 716533 - DNA, 15 bp, Homo sapiens
ttgtggctggcatgg

SEQ ID NO: 716534 - DNA, 15 bp, Homo sapiens
tgtggctggcatggg

SEQ ID NO: 716535 - DNA, 15 bp, Homo sapiens
gtggctggcatgggg

SEQ ID NO: 716536 - DNA, 15 bp, Homo sapiens
tggctggcatgggga

SEQ ID NO: 716537 - DNA, 15 bp, Homo sapiens
ggctggcatggggat

SEQ ID NO: 716538 - DNA, 15 bp, Homo sapiens
gctggcatggggata

SEQ ID NO: 716539 - DNA, 15 bp, Homo sapiens
ctggcatggggataa

SEQ ID NO: 716540 - DNA, 15 bp, Homo sapiens
tggcatggggataat

SEQ ID NO: 716541 - DNA, 15 bp, Homo sapiens
ggcatggggataatt

SEQ ID NO: 716542 - DNA, 15 bp, Homo sapiens
gcatggggataatta

SEQ ID NO: 716543 - DNA, 15 bp, Homo sapiens
catggggataattac

SEQ ID NO: 716544 - DNA, 15 bp, Homo sapiens
atggggataattaca

SEQ ID NO: 716545 - DNA, 15 bp, Homo sapiens
tggggataattacat

SEQ ID NO: 716546 - DNA, 15 bp, Homo sapiens
ggggataattacatc

SEQ ID NO: 716547 - DNA, 15 bp, Homo sapiens
gggataattacatcc

SEQ ID NO: 716548 - DNA, 15 bp, Homo sapiens
ggataattacatcca

SEQ ID NO: 716549 - DNA, 15 bp, Homo sapiens
gataattacatccaa

SEQ ID NO: 716550 - DNA, 15 bp, Homo sapiens
ataattacatccaat

SEQ ID NO: 716551 - DNA, 15 bp, Homo sapiens
taattacatccaatt

SEQ ID NO: 716552 - DNA, 15 bp, Homo sapiens
aattacatccaattc

SEQ ID NO: 716553 - DNA, 15 bp, Homo sapiens
attacatccaattct

SEQ ID NO: 716554 - DNA, 15 bp, Homo sapiens
ttacatccaattctc

SEQ ID NO: 716555 - DNA, 15 bp, Homo sapiens
tacatccaattctcc

SEQ ID NO: 716556 - DNA, 15 bp, Homo sapiens
acatccaattctccc

SEQ ID NO: 716557 - DNA, 15 bp, Homo sapiens
catccaattctccca

SEQ ID NO: 716558 - DNA, 15 bp, Homo sapiens
atccaattctcccat

SEQ ID NO: 716559 - DNA, 15 bp, Homo sapiens
tccaattctcccatc

SEQ ID NO: 716560 - DNA, 15 bp, Homo sapiens
ccaattctcccatca

SEQ ID NO: 716561 - DNA, 15 bp, Homo sapiens
caattctcccatcag

SEQ ID NO: 716562 - DNA, 15 bp, Homo sapiens
aattctcccatcagt

SEQ ID NO: 716563 - DNA, 15 bp, Homo sapiens
attctcccatcagta

SEQ ID NO: 716564 - DNA, 15 bp, Homo sapiens
ttctcccatcagtac

SEQ ID NO: 716565 - DNA, 15 bp, Homo sapiens
tctcccatcagtact

SEQ ID NO: 716566 - DNA, 15 bp, Homo sapiens
ctcccatcagtactg

SEQ ID NO: 716567 - DNA, 15 bp, Homo sapiens
tcccatcagtactga

SEQ ID NO: 716568 - DNA, 15 bp, Homo sapiens
cccatcagtactgag

SEQ ID NO: 716569 - DNA, 15 bp, Homo sapiens
ccatcagtactgagt

SEQ ID NO: 716570 - DNA, 15 bp, Homo sapiens
catcagtactgagta

SEQ ID NO: 716571 - DNA, 15 bp, Homo sapiens
atcagtactgagtat

SEQ ID NO: 716572 - DNA, 15 bp, Homo sapiens
tcagtactgagtatc

SEQ ID NO: 716573 - DNA, 15 bp, Homo sapiens
cagtactgagtatcc

SEQ ID NO: 716574 - DNA, 15 bp, Homo sapiens
agtactgagtatccc

SEQ ID NO: 716575 - DNA, 15 bp, Homo sapiens
gtactgagtatccct

SEQ ID NO: 716576 - DNA, 15 bp, Homo sapiens
tactgagtatccctg

SEQ ID NO: 716577 - DNA, 15 bp, Homo sapiens
actgagtatccctga

SEQ ID NO: 716578 - DNA, 15 bp, Homo sapiens
ctgagtatccctgag

SEQ ID NO: 716579 - DNA, 15 bp, Homo sapiens
tgagtatccctgagt

SEQ ID NO: 716580 - DNA, 15 bp, Homo sapiens
gagtatccctgagtc

SEQ ID NO: 716581 - DNA, 15 bp, Homo sapiens
agtatccctgagtcc

SEQ ID NO: 716582 - DNA, 15 bp, Homo sapiens
gtatccctgagtcca

SEQ ID NO: 716583 - DNA, 15 bp, Homo sapiens
tatccctgagtccaa

SEQ ID NO: 716584 - DNA, 15 bp, Homo sapiens
atccctgagtccaaa

SEQ ID NO: 716585 - DNA, 15 bp, Homo sapiens
tccctgagtccaaaa

SEQ ID NO: 716586 - DNA, 15 bp, Homo sapiens
ccctgagtccaaaac

SEQ ID NO: 716587 - DNA, 15 bp, Homo sapiens
cctgagtccaaaacg

SEQ ID NO: 716588 - DNA, 15 bp, Homo sapiens
ctgagtccaaaacgg

SEQ ID NO: 716589 - DNA, 15 bp, Homo sapiens
tgagtccaaaacggt

SEQ ID NO: 716590 - DNA, 15 bp, Homo sapiens
gagtccaaaacggta

SEQ ID NO: 716591 - DNA, 15 bp, Homo sapiens
agtccaaaacggtat

SEQ ID NO: 716592 - DNA, 15 bp, Homo sapiens
gtccaaaacggtatc

SEQ ID NO: 716593 - DNA, 15 bp, Homo sapiens
tccaaaacggtatca

SEQ ID NO: 716594 - DNA, 15 bp, Homo sapiens
ccaaaacggtatcag

SEQ ID NO: 716595 - DNA, 15 bp, Homo sapiens
caaaacggtatcaga

SEQ ID NO: 716596 - DNA, 15 bp, Homo sapiens
aaaacggtatcagaa

SEQ ID NO: 716597 - DNA, 15 bp, Homo sapiens
aaacggtatcagaac

SEQ ID NO: 716598 - DNA, 15 bp, Homo sapiens
aacggtatcagaaca

SEQ ID NO: 716599 - DNA, 15 bp, Homo sapiens
acggtatcagaacaa

SEQ ID NO: 716600 - DNA, 15 bp, Homo sapiens
cggtatcagaacaaa

SEQ ID NO: 716601 - DNA, 15 bp, Homo sapiens
ggtatcagaacaaat

SEQ ID NO: 716602 - DNA, 15 bp, Homo sapiens
gtatcagaacaaata

SEQ ID NO: 716603 - DNA, 15 bp, Homo sapiens
tatcagaacaaataa

SEQ ID NO: 716604 - DNA, 15 bp, Homo sapiens
atcagaacaaataaa

SEQ ID NO: 716605 - DNA, 15 bp, Homo sapiens
tcagaacaaataaaa

SEQ ID NO: 716606 - DNA, 15 bp, Homo sapiens
cagaacaaataaaag

SEQ ID NO: 716607 - DNA, 15 bp, Homo sapiens
agaacaaataaaagg

SEQ ID NO: 716608 - DNA, 15 bp, Homo sapiens
gaacaaataaaaggg

SEQ ID NO: 716609 - DNA, 15 bp, Homo sapiens
aacaaataaaaggga

SEQ ID NO: 716610 - DNA, 15 bp, Homo sapiens
acaaataaaagggaa

SEQ ID NO: 716611 - DNA, 15 bp, Homo sapiens
caaataaaagggaag

SEQ ID NO: 716612 - DNA, 15 bp, Homo sapiens
aaataaaagggaagg

SEQ ID NO: 716613 - DNA, 15 bp, Homo sapiens
aataaaagggaaggg

SEQ ID NO: 716614 - DNA, 15 bp, Homo sapiens
ataaaagggaagggg

SEQ ID NO: 716615 - DNA, 15 bp, Homo sapiens
taaaagggaaggggc

SEQ ID NO: 716616 - DNA, 15 bp, Homo sapiens
aaaagggaaggggct

SEQ ID NO: 716617 - DNA, 15 bp, Homo sapiens
aaagggaaggggctg

SEQ ID NO: 716618 - DNA, 15 bp, Homo sapiens
aagggaaggggctgg

SEQ ID NO: 716619 - DNA, 15 bp, Homo sapiens
agggaaggggctgga

SEQ ID NO: 716620 - DNA, 15 bp, Homo sapiens
gggaaggggctggag

SEQ ID NO: 716621 - DNA, 15 bp, Homo sapiens
ggaaggggctggagg

SEQ ID NO: 716622 - DNA, 15 bp, Homo sapiens
gaaggggctggagga

SEQ ID NO: 716623 - DNA, 15 bp, Homo sapiens
aaggggctggaggac

SEQ ID NO: 716624 - DNA, 15 bp, Homo sapiens
aggggctggaggacc

SEQ ID NO: 716625 - DNA, 15 bp, Homo sapiens
ggggctggaggacca

SEQ ID NO: 716626 - DNA, 15 bp, Homo sapiens
gggctggaggaccaa

SEQ ID NO: 716627 - DNA, 15 bp, Homo sapiens
ggctggaggaccaaa

SEQ ID NO: 716628 - DNA, 15 bp, Homo sapiens
gctggaggaccaaag

SEQ ID NO: 716629 - DNA, 15 bp, Homo sapiens
ctggaggaccaaagc

SEQ ID NO: 716630 - DNA, 15 bp, Homo sapiens
tggaggaccaaagca

SEQ ID NO: 716631 - DNA, 15 bp, Homo sapiens
ggaggaccaaagcag

SEQ ID NO: 716632 - DNA, 15 bp, Homo sapiens
gaggaccaaagcagg

SEQ ID NO: 716633 - DNA, 15 bp, Homo sapiens
aggaccaaagcaggg

SEQ ID NO: 716634 - DNA, 15 bp, Homo sapiens
ggaccaaagcaggga

SEQ ID NO: 716635 - DNA, 15 bp, Homo sapiens
gaccaaagcagggag

SEQ ID NO: 716636 - DNA, 15 bp, Homo sapiens
accaaagcagggagc

SEQ ID NO: 716637 - DNA, 15 bp, Homo sapiens
ccaaagcagggagcc

SEQ ID NO: 716638 - DNA, 15 bp, Homo sapiens
caaagcagggagcca

SEQ ID NO: 716639 - DNA, 15 bp, Homo sapiens
aaagcagggagccag

SEQ ID NO: 716640 - DNA, 15 bp, Homo sapiens
aagcagggagccagt

SEQ ID NO: 716641 - DNA, 15 bp, Homo sapiens
agcagggagccagtc

SEQ ID NO: 716642 - DNA, 15 bp, Homo sapiens
gcagggagccagtct

SEQ ID NO: 716643 - DNA, 15 bp, Homo sapiens
cagggagccagtctc

SEQ ID NO: 716644 - DNA, 15 bp, Homo sapiens
agggagccagtctca

SEQ ID NO: 716645 - DNA, 15 bp, Homo sapiens
gggagccagtctcac

SEQ ID NO: 716646 - DNA, 15 bp, Homo sapiens
ggagccagtctcacc

SEQ ID NO: 716647 - DNA, 15 bp, Homo sapiens
gagccagtctcacct

SEQ ID NO: 716648 - DNA, 15 bp, Homo sapiens
agccagtctcaccta

SEQ ID NO: 716649 - DNA, 15 bp, Homo sapiens
gccagtctcacctag

SEQ ID NO: 716650 - DNA, 15 bp, Homo sapiens
ccagtctcacctagt

SEQ ID NO: 716651 - DNA, 15 bp, Homo sapiens
cagtctcacctagtt

SEQ ID NO: 716652 - DNA, 15 bp, Homo sapiens
agtctcacctagttc

SEQ ID NO: 716653 - DNA, 15 bp, Homo sapiens
gtctcacctagttca

SEQ ID NO: 716654 - DNA, 15 bp, Homo sapiens
tctcacctagttcac

SEQ ID NO: 716655 - DNA, 15 bp, Homo sapiens
ctcacctagttcacc

SEQ ID NO: 716656 - DNA, 15 bp, Homo sapiens
tcacctagttcacca

SEQ ID NO: 716657 - DNA, 15 bp, Homo sapiens
cacctagttcaccat

SEQ ID NO: 716658 - DNA, 15 bp, Homo sapiens
acctagttcaccatc

SEQ ID NO: 716659 - DNA, 15 bp, Homo sapiens
cctagttcaccatct

SEQ ID NO: 716660 - DNA, 15 bp, Homo sapiens
ctagttcaccatctc

SEQ ID NO: 716661 - DNA, 15 bp, Homo sapiens
tagttcaccatctct

SEQ ID NO: 716662 - DNA, 15 bp, Homo sapiens
agttcaccatctctg

SEQ ID NO: 716663 - DNA, 15 bp, Homo sapiens
gttcaccatctctga

SEQ ID NO: 716664 - DNA, 15 bp, Homo sapiens
ttcaccatctctgag

SEQ ID NO: 716665 - DNA, 15 bp, Homo sapiens
tcaccatctctgaga

SEQ ID NO: 716666 - DNA, 15 bp, Homo sapiens
caccatctctgagaa

SEQ ID NO: 716667 - DNA, 15 bp, Homo sapiens
accatctctgagaag

SEQ ID NO: 716668 - DNA, 15 bp, Homo sapiens
ccatctctgagaagc

SEQ ID NO: 716669 - DNA, 15 bp, Homo sapiens
catctctgagaagct

SEQ ID NO: 716670 - DNA, 15 bp, Homo sapiens
atctctgagaagctt

SEQ ID NO: 716671 - DNA, 15 bp, Homo sapiens
tctctgagaagcttc

SEQ ID NO: 716672 - DNA, 15 bp, Homo sapiens
ctctgagaagcttct

SEQ ID NO: 716673 - DNA, 15 bp, Homo sapiens
tctgagaagcttctg

SEQ ID NO: 716674 - DNA, 15 bp, Homo sapiens
ctgagaagcttctgg

SEQ ID NO: 716675 - DNA, 15 bp, Homo sapiens
tgagaagcttctggg

SEQ ID NO: 716676 - DNA, 15 bp, Homo sapiens
gagaagcttctgggc

SEQ ID NO: 716677 - DNA, 15 bp, Homo sapiens
agaagcttctgggcc

SEQ ID NO: 716678 - DNA, 15 bp, Homo sapiens
gaagcttctgggcca

SEQ ID NO: 716679 - DNA, 15 bp, Homo sapiens
aagcttctgggccac

SEQ ID NO: 716680 - DNA, 15 bp, Homo sapiens
agcttctgggccact

SEQ ID NO: 716681 - DNA, 15 bp, Homo sapiens
gcttctgggccactc

SEQ ID NO: 716682 - DNA, 15 bp, Homo sapiens
cttctgggccactct

SEQ ID NO: 716683 - DNA, 15 bp, Homo sapiens
ttctgggccactctg

SEQ ID NO: 716684 - DNA, 15 bp, Homo sapiens
tctgggccactctga

SEQ ID NO: 716685 - DNA, 15 bp, Homo sapiens
ctgggccactctgac

SEQ ID NO: 716686 - DNA, 15 bp, Homo sapiens
tgggccactctgacc

SEQ ID NO: 716687 - DNA, 15 bp, Homo sapiens
gggccactctgacct

SEQ ID NO: 716688 - DNA, 15 bp, Homo sapiens
ggccactctgacctg

SEQ ID NO: 716689 - DNA, 15 bp, Homo sapiens
gccactctgacctgc

SEQ ID NO: 716690 - DNA, 15 bp, Homo sapiens
ccactctgacctgct

SEQ ID NO: 716691 - DNA, 15 bp, Homo sapiens
cactctgacctgctg

SEQ ID NO: 716692 - DNA, 15 bp, Homo sapiens
actctgacctgctgc

SEQ ID NO: 716693 - DNA, 15 bp, Homo sapiens
ctctgacctgctgct

SEQ ID NO: 716694 - DNA, 15 bp, Homo sapiens
tctgacctgctgctg

SEQ ID NO: 716695 - DNA, 15 bp, Homo sapiens
ctgacctgctgctgt

SEQ ID NO: 716696 - DNA, 15 bp, Homo sapiens
tgacctgctgctgta

SEQ ID NO: 716697 - DNA, 15 bp, Homo sapiens
gacctgctgctgtag

SEQ ID NO: 716698 - DNA, 15 bp, Homo sapiens
acctgctgctgtagg

SEQ ID NO: 716699 - DNA, 15 bp, Homo sapiens
cctgctgctgtaggt

SEQ ID NO: 716700 - DNA, 15 bp, Homo sapiens
ctgctgctgtaggtc

SEQ ID NO: 716701 - DNA, 15 bp, Homo sapiens
tgctgctgtaggtcc

SEQ ID NO: 716702 - DNA, 15 bp, Homo sapiens
gctgctgtaggtcct

SEQ ID NO: 716703 - DNA, 15 bp, Homo sapiens
ctgctgtaggtcctg

SEQ ID NO: 716704 - DNA, 15 bp, Homo sapiens
tgctgtaggtcctgt

SEQ ID NO: 716705 - DNA, 15 bp, Homo sapiens
gctgtaggtcctgta

SEQ ID NO: 716706 - DNA, 15 bp, Homo sapiens
ctgtaggtcctgtaa

SEQ ID NO: 716707 - DNA, 15 bp, Homo sapiens
tgtaggtcctgtaac

SEQ ID NO: 716708 - DNA, 15 bp, Homo sapiens
gtaggtcctgtaacc

SEQ ID NO: 716709 - DNA, 15 bp, Homo sapiens
taggtcctgtaaccg

SEQ ID NO: 716710 - DNA, 15 bp, Homo sapiens
aggtcctgtaaccga

SEQ ID NO: 716711 - DNA, 15 bp, Homo sapiens
ggtcctgtaaccgag

SEQ ID NO: 716712 - DNA, 15 bp, Homo sapiens
gtcctgtaaccgaga

SEQ ID NO: 716713 - DNA, 15 bp, Homo sapiens
tcctgtaaccgagag

SEQ ID NO: 716714 - DNA, 15 bp, Homo sapiens
cctgtaaccgagaga

SEQ ID NO: 716715 - DNA, 15 bp, Homo sapiens
ctgtaaccgagagac

SEQ ID NO: 716716 - DNA, 15 bp, Homo sapiens
tgtaaccgagagacc

SEQ ID NO: 716717 - DNA, 15 bp, Homo sapiens
gtaaccgagagacca

SEQ ID NO: 716718 - DNA, 15 bp, Homo sapiens
taaccgagagaccag

SEQ ID NO: 716719 - DNA, 15 bp, Homo sapiens
aaccgagagaccagg

SEQ ID NO: 716720 - DNA, 15 bp, Homo sapiens
accgagagaccaggt

SEQ ID NO: 716721 - DNA, 15 bp, Homo sapiens
ccgagagaccaggtg

SEQ ID NO: 716722 - DNA, 15 bp, Homo sapiens
cgagagaccaggtgg

SEQ ID NO: 716723 - DNA, 15 bp, Homo sapiens
gagagaccaggtggt

SEQ ID NO: 716724 - DNA, 15 bp, Homo sapiens
agagaccaggtggtc

SEQ ID NO: 716725 - DNA, 15 bp, Homo sapiens
gagaccaggtggtcc

SEQ ID NO: 716726 - DNA, 15 bp, Homo sapiens
agaccaggtggtccc

SEQ ID NO: 716727 - DNA, 15 bp, Homo sapiens
gaccaggtggtccct

SEQ ID NO: 716728 - DNA, 15 bp, Homo sapiens
accaggtggtccctg

SEQ ID NO: 716729 - DNA, 15 bp, Homo sapiens
ccaggtggtccctgc

SEQ ID NO: 716730 - DNA, 15 bp, Homo sapiens
caggtggtccctgct

SEQ ID NO: 716731 - DNA, 15 bp, Homo sapiens
aggtggtccctgctg

SEQ ID NO: 716732 - DNA, 15 bp, Homo sapiens
ggtggtccctgctga

SEQ ID NO: 716733 - DNA, 15 bp, Homo sapiens
gtggtccctgctgac

SEQ ID NO: 716734 - DNA, 15 bp, Homo sapiens
tggtccctgctgacg

SEQ ID NO: 716735 - DNA, 15 bp, Homo sapiens
ggtccctgctgacgg

SEQ ID NO: 716736 - DNA, 15 bp, Homo sapiens
gtccctgctgacggc

SEQ ID NO: 716737 - DNA, 15 bp, Homo sapiens
tccctgctgacggcg

SEQ ID NO: 716738 - DNA, 15 bp, Homo sapiens
ccctgctgacggcgg

SEQ ID NO: 716739 - DNA, 15 bp, Homo sapiens
cctgctgacggcgga

SEQ ID NO: 716740 - DNA, 15 bp, Homo sapiens
ctgctgacggcggat

SEQ ID NO: 716741 - DNA, 15 bp, Homo sapiens
tgctgacggcggatt

SEQ ID NO: 716742 - DNA, 15 bp, Homo sapiens
gctgacggcggattc

SEQ ID NO: 716743 - DNA, 15 bp, Homo sapiens
ctgacggcggattct

SEQ ID NO: 716744 - DNA, 15 bp, Homo sapiens
tgacggcggattctg

SEQ ID NO: 716745 - DNA, 15 bp, Homo sapiens
gacggcggattctgc

SEQ ID NO: 716746 - DNA, 15 bp, Homo sapiens
acggcggattctgca

SEQ ID NO: 716747 - DNA, 15 bp, Homo sapiens
cggcggattctgcac

SEQ ID NO: 716748 - DNA, 15 bp, Homo sapiens
ggcggattctgcaca

SEQ ID NO: 716749 - DNA, 15 bp, Homo sapiens
gcggattctgcacaa

SEQ ID NO: 716750 - DNA, 15 bp, Homo sapiens
cggattctgcacaag

SEQ ID NO: 716751 - DNA, 15 bp, Homo sapiens
ggattctgcacaaga

SEQ ID NO: 716752 - DNA, 15 bp, Homo sapiens
gattctgcacaagat

SEQ ID NO: 716753 - DNA, 15 bp, Homo sapiens
attctgcacaagatc

SEQ ID NO: 716754 - DNA, 15 bp, Homo sapiens
ttctgcacaagatct

SEQ ID NO: 716755 - DNA, 15 bp, Homo sapiens
tctgcacaagatctg

SEQ ID NO: 716756 - DNA, 15 bp, Homo sapiens
ctgcacaagatctgc

SEQ ID NO: 716757 - DNA, 15 bp, Homo sapiens
tgcacaagatctgct

SEQ ID NO: 716758 - DNA, 15 bp, Homo sapiens
gcacaagatctgctg

SEQ ID NO: 716759 - DNA, 15 bp, Homo sapiens
cacaagatctgctgc

SEQ ID NO: 716760 - DNA, 15 bp, Homo sapiens
acaagatctgctgcc

SEQ ID NO: 716761 - DNA, 15 bp, Homo sapiens
caagatctgctgcca

SEQ ID NO: 716762 - DNA, 15 bp, Homo sapiens
aagatctgctgccac

SEQ ID NO: 716763 - DNA, 15 bp, Homo sapiens
agatctgctgccaca

SEQ ID NO: 716764 - DNA, 15 bp, Homo sapiens
gatctgctgccacag

SEQ ID NO: 716765 - DNA, 15 bp, Homo sapiens
atctgctgccacagc

SEQ ID NO: 716766 - DNA, 15 bp, Homo sapiens
tctgctgccacagcg

SEQ ID NO: 716767 - DNA, 15 bp, Homo sapiens
ctgctgccacagcgc

SEQ ID NO: 716768 - DNA, 15 bp, Homo sapiens
tgctgccacagcgca

SEQ ID NO: 716769 - DNA, 15 bp, Homo sapiens
gctgccacagcgcag

SEQ ID NO: 716770 - DNA, 15 bp, Homo sapiens
ctgccacagcgcagc

SEQ ID NO: 716771 - DNA, 15 bp, Homo sapiens
tgccacagcgcagca

SEQ ID NO: 716772 - DNA, 15 bp, Homo sapiens
gccacagcgcagcac

SEQ ID NO: 716773 - DNA, 15 bp, Homo sapiens
ccacagcgcagcacg

SEQ ID NO: 716774 - DNA, 15 bp, Homo sapiens
cacagcgcagcacgt

SEQ ID NO: 716775 - DNA, 15 bp, Homo sapiens
acagcgcagcacgtc

SEQ ID NO: 716776 - DNA, 15 bp, Homo sapiens
cagcgcagcacgtca

SEQ ID NO: 716777 - DNA, 15 bp, Homo sapiens
agcgcagcacgtcat

SEQ ID NO: 716778 - DNA, 15 bp, Homo sapiens
gcgcagcacgtcatc

SEQ ID NO: 716779 - DNA, 15 bp, Homo sapiens
cgcagcacgtcatct

SEQ ID NO: 716780 - DNA, 15 bp, Homo sapiens
gcagcacgtcatctc

SEQ ID NO: 716781 - DNA, 15 bp, Homo sapiens
cagcacgtcatctcc

SEQ ID NO: 716782 - DNA, 15 bp, Homo sapiens
agcacgtcatctccc

SEQ ID NO: 716783 - DNA, 15 bp, Homo sapiens
gcacgtcatctccct

SEQ ID NO: 716784 - DNA, 15 bp, Homo sapiens
cacgtcatctccctg

SEQ ID NO: 716785 - DNA, 15 bp, Homo sapiens
acgtcatctccctgt

SEQ ID NO: 716786 - DNA, 15 bp, Homo sapiens
cgtcatctccctgtg

SEQ ID NO: 716787 - DNA, 15 bp, Homo sapiens
gtcatctccctgtgg

SEQ ID NO: 716788 - DNA, 15 bp, Homo sapiens
tcatctccctgtgga

SEQ ID NO: 716789 - DNA, 15 bp, Homo sapiens
catctccctgtggaa

SEQ ID NO: 716790 - DNA, 15 bp, Homo sapiens
atctccctgtggaag

SEQ ID NO: 716791 - DNA, 15 bp, Homo sapiens
tctccctgtggaagt

SEQ ID NO: 716792 - DNA, 15 bp, Homo sapiens
ctccctgtggaagtc

SEQ ID NO: 716793 - DNA, 15 bp, Homo sapiens
tccctgtggaagtca

SEQ ID NO: 716794 - DNA, 15 bp, Homo sapiens
ccctgtggaagtcag

SEQ ID NO: 716795 - DNA, 15 bp, Homo sapiens
cctgtggaagtcagt

SEQ ID NO: 716796 - DNA, 15 bp, Homo sapiens
ctgtggaagtcagtt

SEQ ID NO: 716797 - DNA, 15 bp, Homo sapiens
tgtggaagtcagttt

SEQ ID NO: 716798 - DNA, 15 bp, Homo sapiens
gtggaagtcagtttt

SEQ ID NO: 716799 - DNA, 15 bp, Homo sapiens
tggaagtcagttttc

SEQ ID NO: 716800 - DNA, 15 bp, Homo sapiens
ggaagtcagttttct

SEQ ID NO: 716801 - DNA, 15 bp, Homo sapiens
gaagtcagttttctc

SEQ ID NO: 716802 - DNA, 15 bp, Homo sapiens
aagtcagttttctct

SEQ ID NO: 716803 - DNA, 15 bp, Homo sapiens
agtcagttttctctt

SEQ ID NO: 716804 - DNA, 15 bp, Homo sapiens
gtcagttttctcttt

SEQ ID NO: 716805 - DNA, 15 bp, Homo sapiens
tcagttttctcttta

SEQ ID NO: 716806 - DNA, 15 bp, Homo sapiens
cagttttctctttat

SEQ ID NO: 716807 - DNA, 15 bp, Homo sapiens
agttttctctttatt

SEQ ID NO: 716808 - DNA, 15 bp, Homo sapiens
gttttctctttattc

SEQ ID NO: 716809 - DNA, 15 bp, Homo sapiens
ttttctctttattcc

SEQ ID NO: 716810 - DNA, 15 bp, Homo sapiens
tttctctttattcca

SEQ ID NO: 716811 - DNA, 15 bp, Homo sapiens
ttctctttattccaa

SEQ ID NO: 716812 - DNA, 15 bp, Homo sapiens
tctctttattccaat

SEQ ID NO: 716813 - DNA, 15 bp, Homo sapiens
ctctttattccaatg

SEQ ID NO: 716814 - DNA, 15 bp, Homo sapiens
tctttattccaatgc

SEQ ID NO: 716815 - DNA, 15 bp, Homo sapiens
ctttattccaatgcc

SEQ ID NO: 716816 - DNA, 15 bp, Homo sapiens
tttattccaatgcca

SEQ ID NO: 716817 - DNA, 15 bp, Homo sapiens
ttattccaatgccag

SEQ ID NO: 716818 - DNA, 15 bp, Homo sapiens
tattccaatgccagg

SEQ ID NO: 716819 - DNA, 15 bp, Homo sapiens
attccaatgccaggg

SEQ ID NO: 716820 - DNA, 15 bp, Homo sapiens
ttccaatgccagggt

SEQ ID NO: 716821 - DNA, 15 bp, Homo sapiens
tccaatgccagggtc

SEQ ID NO: 716822 - DNA, 15 bp, Homo sapiens
ccaatgccagggtca

SEQ ID NO: 716823 - DNA, 15 bp, Homo sapiens
caatgccagggtcag

SEQ ID NO: 716824 - DNA, 15 bp, Homo sapiens
aatgccagggtcagt

SEQ ID NO: 716825 - DNA, 15 bp, Homo sapiens
atgccagggtcagtt

SEQ ID NO: 716826 - DNA, 15 bp, Homo sapiens
tgccagggtcagtta

SEQ ID NO: 716827 - DNA, 15 bp, Homo sapiens
gccagggtcagttat

SEQ ID NO: 716828 - DNA, 15 bp, Homo sapiens
ccagggtcagttatc

SEQ ID NO: 716829 - DNA, 15 bp, Homo sapiens
cagggtcagttatca

SEQ ID NO: 716830 - DNA, 15 bp, Homo sapiens
agggtcagttatcaa

SEQ ID NO: 716831 - DNA, 15 bp, Homo sapiens
gggtcagttatcaac

SEQ ID NO: 716832 - DNA, 15 bp, Homo sapiens
ggtcagttatcaaca

SEQ ID NO: 716833 - DNA, 15 bp, Homo sapiens
gtcagttatcaacac

SEQ ID NO: 716834 - DNA, 15 bp, Homo sapiens
tcagttatcaacacc

SEQ ID NO: 716835 - DNA, 15 bp, Homo sapiens
cagttatcaacaccg

SEQ ID NO: 716836 - DNA, 15 bp, Homo sapiens
agttatcaacaccgc

SEQ ID NO: 716837 - DNA, 15 bp, Homo sapiens
gttatcaacaccgcc

SEQ ID NO: 716838 - DNA, 15 bp, Homo sapiens
ttatcaacaccgcct

SEQ ID NO: 716839 - DNA, 15 bp, Homo sapiens
tatcaacaccgcctg

SEQ ID NO: 716840 - DNA, 15 bp, Homo sapiens
atcaacaccgcctgt

SEQ ID NO: 716841 - DNA, 15 bp, Homo sapiens
tcaacaccgcctgtg

SEQ ID NO: 716842 - DNA, 15 bp, Homo sapiens
caacaccgcctgtgc

SEQ ID NO: 716843 - DNA, 15 bp, Homo sapiens
aacaccgcctgtgct

SEQ ID NO: 716844 - DNA, 15 bp, Homo sapiens
acaccgcctgtgctt

SEQ ID NO: 716845 - DNA, 15 bp, Homo sapiens
caccgcctgtgctta

SEQ ID NO: 716846 - DNA, 15 bp, Homo sapiens
accgcctgtgcttac

SEQ ID NO: 716847 - DNA, 15 bp, Homo sapiens
ccgcctgtgcttaca

SEQ ID NO: 716848 - DNA, 15 bp, Homo sapiens
cgcctgtgcttacat

SEQ ID NO: 716849 - DNA, 15 bp, Homo sapiens
gcctgtgcttacatt

SEQ ID NO: 716850 - DNA, 15 bp, Homo sapiens
cctgtgcttacatta

SEQ ID NO: 716851 - DNA, 15 bp, Homo sapiens
ctgtgcttacattac

SEQ ID NO: 716852 - DNA, 15 bp, Homo sapiens
tgtgcttacattaca

SEQ ID NO: 716853 - DNA, 15 bp, Homo sapiens
gtgcttacattacag

SEQ ID NO: 716854 - DNA, 15 bp, Homo sapiens
tgcttacattacagg

SEQ ID NO: 716855 - DNA, 15 bp, Homo sapiens
gcttacattacagga

SEQ ID NO: 716856 - DNA, 15 bp, Homo sapiens
cttacattacaggac

SEQ ID NO: 716857 - DNA, 15 bp, Homo sapiens
ttacattacaggact

SEQ ID NO: 716858 - DNA, 15 bp, Homo sapiens
tacattacaggactg

SEQ ID NO: 716859 - DNA, 15 bp, Homo sapiens
acattacaggactgc

SEQ ID NO: 716860 - DNA, 15 bp, Homo sapiens
cattacaggactgct

SEQ ID NO: 716861 - DNA, 15 bp, Homo sapiens
attacaggactgctc

SEQ ID NO: 716862 - DNA, 15 bp, Homo sapiens
ttacaggactgctcc

SEQ ID NO: 716863 - DNA, 15 bp, Homo sapiens
tacaggactgctcca

SEQ ID NO: 716864 - DNA, 15 bp, Homo sapiens
acaggactgctccat

SEQ ID NO: 716865 - DNA, 15 bp, Homo sapiens
caggactgctccata

SEQ ID NO: 716866 - DNA, 15 bp, Homo sapiens
aggactgctccatag

SEQ ID NO: 716867 - DNA, 15 bp, Homo sapiens
ggactgctccatagt

SEQ ID NO: 716868 - DNA, 15 bp, Homo sapiens
gactgctccatagtt

SEQ ID NO: 716869 - DNA, 15 bp, Homo sapiens
actgctccatagttt

SEQ ID NO: 716870 - DNA, 15 bp, Homo sapiens
ctgctccatagtttc

SEQ ID NO: 716871 - DNA, 15 bp, Homo sapiens
tgctccatagtttct

SEQ ID NO: 716872 - DNA, 15 bp, Homo sapiens
gctccatagtttctt

SEQ ID NO: 716873 - DNA, 15 bp, Homo sapiens
ctccatagtttctta

SEQ ID NO: 716874 - DNA, 15 bp, Homo sapiens
tccatagtttcttac

SEQ ID NO: 716875 - DNA, 15 bp, Homo sapiens
ccatagtttcttacc

SEQ ID NO: 716876 - DNA, 15 bp, Homo sapiens
catagtttcttacct

SEQ ID NO: 716877 - DNA, 15 bp, Homo sapiens
atagtttcttacctc

SEQ ID NO: 716878 - DNA, 15 bp, Homo sapiens
tagtttcttacctca

SEQ ID NO: 716879 - DNA, 15 bp, Homo sapiens
agtttcttacctcat

SEQ ID NO: 716880 - DNA, 15 bp, Homo sapiens
gtttcttacctcatg

SEQ ID NO: 716881 - DNA, 15 bp, Homo sapiens
tttcttacctcatgg

SEQ ID NO: 716882 - DNA, 15 bp, Homo sapiens
ttcttacctcatggg

SEQ ID NO: 716883 - DNA, 15 bp, Homo sapiens
tcttacctcatgggg

SEQ ID NO: 716884 - DNA, 15 bp, Homo sapiens
cttacctcatggggg

SEQ ID NO: 716885 - DNA, 15 bp, Homo sapiens
ttacctcatggggga

SEQ ID NO: 716886 - DNA, 15 bp, Homo sapiens
tacctcatgggggaa

SEQ ID NO: 716887 - DNA, 15 bp, Homo sapiens
acctcatgggggaaa

SEQ ID NO: 716888 - DNA, 15 bp, Homo sapiens
cctcatgggggaaag

SEQ ID NO: 716889 - DNA, 15 bp, Homo sapiens
ctcatgggggaaaga

SEQ ID NO: 716890 - DNA, 15 bp, Homo sapiens
tcatgggggaaagag

SEQ ID NO: 716891 - DNA, 15 bp, Homo sapiens
catgggggaaagaga

SEQ ID NO: 716892 - DNA, 15 bp, Homo sapiens
atgggggaaagagac

SEQ ID NO: 716893 - DNA, 15 bp, Homo sapiens
tgggggaaagagact

SEQ ID NO: 716894 - DNA, 15 bp, Homo sapiens
gggggaaagagactc

SEQ ID NO: 716895 - DNA, 15 bp, Homo sapiens
ggggaaagagactcc

SEQ ID NO: 716896 - DNA, 15 bp, Homo sapiens
gggaaagagactcct

SEQ ID NO: 716897 - DNA, 15 bp, Homo sapiens
ggaaagagactcctg

SEQ ID NO: 716898 - DNA, 15 bp, Homo sapiens
gaaagagactcctgt

SEQ ID NO: 716899 - DNA, 15 bp, Homo sapiens
aaagagactcctgta

SEQ ID NO: 716900 - DNA, 15 bp, Homo sapiens
aagagactcctgtaa

SEQ ID NO: 716901 - DNA, 15 bp, Homo sapiens
agagactcctgtaac

SEQ ID NO: 716902 - DNA, 15 bp, Homo sapiens
gagactcctgtaaca

SEQ ID NO: 716903 - DNA, 15 bp, Homo sapiens
agactcctgtaacaa

SEQ ID NO: 716904 - DNA, 15 bp, Homo sapiens
gactcctgtaacaat

SEQ ID NO: 716905 - DNA, 15 bp, Homo sapiens
actcctgtaacaata

SEQ ID NO: 716906 - DNA, 15 bp, Homo sapiens
ctcctgtaacaatac

SEQ ID NO: 716907 - DNA, 15 bp, Homo sapiens
tcctgtaacaataca

SEQ ID NO: 716908 - DNA, 15 bp, Homo sapiens
cctgtaacaatacat

SEQ ID NO: 716909 - DNA, 15 bp, Homo sapiens
ctgtaacaatacatc

SEQ ID NO: 716910 - DNA, 15 bp, Homo sapiens
tgtaacaatacatcg

SEQ ID NO: 716911 - DNA, 15 bp, Homo sapiens
gtaacaatacatcgt

SEQ ID NO: 716912 - DNA, 15 bp, Homo sapiens
taacaatacatcgtg

SEQ ID NO: 716913 - DNA, 15 bp, Homo sapiens
aacaatacatcgtga

SEQ ID NO: 716914 - DNA, 15 bp, Homo sapiens
acaatacatcgtgac

SEQ ID NO: 716915 - DNA, 15 bp, Homo sapiens
caatacatcgtgacg

SEQ ID NO: 716916 - DNA, 15 bp, Homo sapiens
aatacatcgtgacga

SEQ ID NO: 716917 - DNA, 15 bp, Homo sapiens
atacatcgtgacgaa

SEQ ID NO: 716918 - DNA, 15 bp, Homo sapiens
tacatcgtgacgaaa

SEQ ID NO: 716919 - DNA, 15 bp, Homo sapiens
acatcgtgacgaaag

SEQ ID NO: 716920 - DNA, 15 bp, Homo sapiens
catcgtgacgaaagt

SEQ ID NO: 716921 - DNA, 15 bp, Homo sapiens
atcgtgacgaaagtc

SEQ ID NO: 716922 - DNA, 15 bp, Homo sapiens
tcgtgacgaaagtct

SEQ ID NO: 716923 - DNA, 15 bp, Homo sapiens
cgtgacgaaagtctg

SEQ ID NO: 716924 - DNA, 15 bp, Homo sapiens
gtgacgaaagtctga

SEQ ID NO: 716925 - DNA, 15 bp, Homo sapiens
tgacgaaagtctgag

SEQ ID NO: 716926 - DNA, 15 bp, Homo sapiens
gacgaaagtctgagc

SEQ ID NO: 716927 - DNA, 15 bp, Homo sapiens
acgaaagtctgagcg

SEQ ID NO: 716928 - DNA, 15 bp, Homo sapiens
cgaaagtctgagcga

SEQ ID NO: 716929 - DNA, 15 bp, Homo sapiens
gaaagtctgagcgaa

SEQ ID NO: 716930 - DNA, 15 bp, Homo sapiens
aaagtctgagcgaat

SEQ ID NO: 716931 - DNA, 15 bp, Homo sapiens
aagtctgagcgaatt

SEQ ID NO: 716932 - DNA, 15 bp, Homo sapiens
agtctgagcgaattt

SEQ ID NO: 716933 - DNA, 15 bp, Homo sapiens
gtctgagcgaatttt

SEQ ID NO: 716934 - DNA, 15 bp, Homo sapiens
tctgagcgaattttg

SEQ ID NO: 716935 - DNA, 15 bp, Homo sapiens
ctgagcgaattttgt

SEQ ID NO: 716936 - DNA, 15 bp, Homo sapiens
tgagcgaattttgtt

SEQ ID NO: 716937 - DNA, 15 bp, Homo sapiens
gagcgaattttgttt

SEQ ID NO: 716938 - DNA, 15 bp, Homo sapiens
agcgaattttgtttg

SEQ ID NO: 716939 - DNA, 15 bp, Homo sapiens
gcgaattttgtttga

SEQ ID NO: 716940 - DNA, 15 bp, Homo sapiens
cgaattttgtttgat

SEQ ID NO: 716941 - DNA, 15 bp, Homo sapiens
gaattttgtttgatg

SEQ ID NO: 716942 - DNA, 15 bp, Homo sapiens
aattttgtttgatgg

SEQ ID NO: 716943 - DNA, 15 bp, Homo sapiens
attttgtttgatggc

SEQ ID NO: 716944 - DNA, 15 bp, Homo sapiens
ttttgtttgatggcg

SEQ ID NO: 716945 - DNA, 15 bp, Homo sapiens
tttgtttgatggcgg

SEQ ID NO: 716946 - DNA, 15 bp, Homo sapiens
ttgtttgatggcggc

SEQ ID NO: 716947 - DNA, 15 bp, Homo sapiens
tgtttgatggcggca

SEQ ID NO: 716948 - DNA, 15 bp, Homo sapiens
gtttgatggcggcaa

SEQ ID NO: 716949 - DNA, 15 bp, Homo sapiens
tttgatggcggcaat

SEQ ID NO: 716950 - DNA, 15 bp, Homo sapiens
ttgatggcggcaatg

SEQ ID NO: 716951 - DNA, 15 bp, Homo sapiens
tgatggcggcaatgg

SEQ ID NO: 716952 - DNA, 15 bp, Homo sapiens
gatggcggcaatggc

SEQ ID NO: 716953 - DNA, 15 bp, Homo sapiens
atggcggcaatggcg

SEQ ID NO: 716954 - DNA, 15 bp, Homo sapiens
tggcggcaatggcgg

SEQ ID NO: 716955 - DNA, 15 bp, Homo sapiens
ggcggcaatggcggc

SEQ ID NO: 716956 - DNA, 15 bp, Homo sapiens
gcggcaatggcggca

SEQ ID NO: 716957 - DNA, 15 bp, Homo sapiens
cggcaatggcggcaa

SEQ ID NO: 716958 - DNA, 15 bp, Homo sapiens
ggcaatggcggcaat

SEQ ID NO: 716959 - DNA, 15 bp, Homo sapiens
gcaatggcggcaatt

SEQ ID NO: 716960 - DNA, 15 bp, Homo sapiens
caatggcggcaattc

SEQ ID NO: 716961 - DNA, 15 bp, Homo sapiens
aatggcggcaattct

SEQ ID NO: 716962 - DNA, 15 bp, Homo sapiens
atggcggcaattcta

SEQ ID NO: 716963 - DNA, 15 bp, Homo sapiens
tggcggcaattctaa

SEQ ID NO: 716964 - DNA, 15 bp, Homo sapiens
ggcggcaattctaat

SEQ ID NO: 716965 - DNA, 15 bp, Homo sapiens
gcggcaattctaatg

SEQ ID NO: 716966 - DNA, 15 bp, Homo sapiens
cggcaattctaatga

SEQ ID NO: 716967 - DNA, 15 bp, Homo sapiens
ggcaattctaatgaa

SEQ ID NO: 716968 - DNA, 15 bp, Homo sapiens
gcaattctaatgaag

SEQ ID NO: 716969 - DNA, 15 bp, Homo sapiens
caattctaatgaagt

SEQ ID NO: 716970 - DNA, 15 bp, Homo sapiens
aattctaatgaagtg

SEQ ID NO: 716971 - DNA, 15 bp, Homo sapiens
attctaatgaagtgt

SEQ ID NO: 716972 - DNA, 15 bp, Homo sapiens
ttctaatgaagtgta

SEQ ID NO: 716973 - DNA, 15 bp, Homo sapiens
tctaatgaagtgtat

SEQ ID NO: 716974 - DNA, 15 bp, Homo sapiens
ctaatgaagtgtatc

SEQ ID NO: 716975 - DNA, 15 bp, Homo sapiens
taatgaagtgtatca

SEQ ID NO: 716976 - DNA, 15 bp, Homo sapiens
aatgaagtgtatcag

SEQ ID NO: 716977 - DNA, 15 bp, Homo sapiens
atgaagtgtatcagc

SEQ ID NO: 716978 - DNA, 15 bp, Homo sapiens
tgaagtgtatcagca

SEQ ID NO: 716979 - DNA, 15 bp, Homo sapiens
gaagtgtatcagcag

SEQ ID NO: 716980 - DNA, 15 bp, Homo sapiens
aagtgtatcagcagt

SEQ ID NO: 716981 - DNA, 15 bp, Homo sapiens
agtgtatcagcagta

SEQ ID NO: 716982 - DNA, 15 bp, Homo sapiens
gtgtatcagcagtag

SEQ ID NO: 716983 - DNA, 15 bp, Homo sapiens
tgtatcagcagtagc

SEQ ID NO: 716984 - DNA, 15 bp, Homo sapiens
gtatcagcagtagct

SEQ ID NO: 716985 - DNA, 15 bp, Homo sapiens
tatcagcagtagctg

SEQ ID NO: 716986 - DNA, 15 bp, Homo sapiens
atcagcagtagctga

SEQ ID NO: 716987 - DNA, 15 bp, Homo sapiens
tcagcagtagctgat

SEQ ID NO: 716988 - DNA, 15 bp, Homo sapiens
cagcagtagctgatc

SEQ ID NO: 716989 - DNA, 15 bp, Homo sapiens
agcagtagctgatcc

SEQ ID NO: 716990 - DNA, 15 bp, Homo sapiens
gcagtagctgatccc

SEQ ID NO: 716991 - DNA, 15 bp, Homo sapiens
cagtagctgatccca

SEQ ID NO: 716992 - DNA, 15 bp, Homo sapiens
agtagctgatcccac

SEQ ID NO: 716993 - DNA, 15 bp, Homo sapiens
gtagctgatcccacc

SEQ ID NO: 716994 - DNA, 15 bp, Homo sapiens
tagctgatcccacct

SEQ ID NO: 716995 - DNA, 15 bp, Homo sapiens
agctgatcccacctg

SEQ ID NO: 716996 - DNA, 15 bp, Homo sapiens
gctgatcccacctga

SEQ ID NO: 716997 - DNA, 15 bp, Homo sapiens
ctgatcccacctgag

SEQ ID NO: 716998 - DNA, 15 bp, Homo sapiens
tgatcccacctgaga

SEQ ID NO: 716999 - DNA, 15 bp, Homo sapiens
gatcccacctgagat

SEQ ID NO: 717000 - DNA, 15 bp, Homo sapiens
atcccacctgagatt

SEQ ID NO: 717001 - DNA, 15 bp, Homo sapiens
tcccacctgagattt

SEQ ID NO: 717002 - DNA, 15 bp, Homo sapiens
cccacctgagatttc

SEQ ID NO: 717003 - DNA, 15 bp, Homo sapiens
ccacctgagatttca

SEQ ID NO: 717004 - DNA, 15 bp, Homo sapiens
cacctgagatttcat

SEQ ID NO: 717005 - DNA, 15 bp, Homo sapiens
acctgagatttcatt

SEQ ID NO: 717006 - DNA, 15 bp, Homo sapiens
cctgagatttcattt

SEQ ID NO: 717007 - DNA, 15 bp, Homo sapiens
ctgagatttcatttt

SEQ ID NO: 717008 - DNA, 15 bp, Homo sapiens
tgagatttcattttt

SEQ ID NO: 717009 - DNA, 15 bp, Homo sapiens
gagatttcatttttg

SEQ ID NO: 717010 - DNA, 15 bp, Homo sapiens
agatttcatttttgg

SEQ ID NO: 717011 - DNA, 15 bp, Homo sapiens
gatttcatttttgga

SEQ ID NO: 717012 - DNA, 15 bp, Homo sapiens
atttcatttttggaa

SEQ ID NO: 717013 - DNA, 15 bp, Homo sapiens
tttcatttttggaac

SEQ ID NO: 717014 - DNA, 15 bp, Homo sapiens
ttcatttttggaaca

SEQ ID NO: 717015 - DNA, 15 bp, Homo sapiens
tcatttttggaacag

SEQ ID NO: 717016 - DNA, 15 bp, Homo sapiens
catttttggaacaga

SEQ ID NO: 717017 - DNA, 15 bp, Homo sapiens
atttttggaacagaa

SEQ ID NO: 717018 - DNA, 15 bp, Homo sapiens
tttttggaacagaac

SEQ ID NO: 717019 - DNA, 15 bp, Homo sapiens
ttttggaacagaact

SEQ ID NO: 717020 - DNA, 15 bp, Homo sapiens
tttggaacagaactg

SEQ ID NO: 717021 - DNA, 15 bp, Homo sapiens
ttggaacagaactgg

SEQ ID NO: 717022 - DNA, 15 bp, Homo sapiens
tggaacagaactggt

SEQ ID NO: 717023 - DNA, 15 bp, Homo sapiens
ggaacagaactggta

SEQ ID NO: 717024 - DNA, 15 bp, Homo sapiens
gaacagaactggtac

SEQ ID NO: 717025 - DNA, 15 bp, Homo sapiens
aacagaactggtaca

SEQ ID NO: 717026 - DNA, 15 bp, Homo sapiens
acagaactggtacag

SEQ ID NO: 717027 - DNA, 15 bp, Homo sapiens
cagaactggtacagt

SEQ ID NO: 717028 - DNA, 15 bp, Homo sapiens
agaactggtacagtg

SEQ ID NO: 717029 - DNA, 15 bp, Homo sapiens
gaactggtacagtgc

SEQ ID NO: 717030 - DNA, 15 bp, Homo sapiens
aactggtacagtgca

SEQ ID NO: 717031 - DNA, 15 bp, Homo sapiens
actggtacagtgcac

SEQ ID NO: 717032 - DNA, 15 bp, Homo sapiens
ctggtacagtgcaca

SEQ ID NO: 717033 - DNA, 15 bp, Homo sapiens
tggtacagtgcacaa

SEQ ID NO: 717034 - DNA, 15 bp, Homo sapiens
ggtacagtgcacaat

SEQ ID NO: 717035 - DNA, 15 bp, Homo sapiens
gtacagtgcacaatt

SEQ ID NO: 717036 - DNA, 15 bp, Homo sapiens
tacagtgcacaattt

SEQ ID NO: 717037 - DNA, 15 bp, Homo sapiens
acagtgcacaatttc

SEQ ID NO: 717038 - DNA, 15 bp, Homo sapiens
cagtgcacaatttct

SEQ ID NO: 717039 - DNA, 15 bp, Homo sapiens
agtgcacaatttctt

SEQ ID NO: 717040 - DNA, 15 bp, Homo sapiens
gtgcacaatttcttt

SEQ ID NO: 717041 - DNA, 15 bp, Homo sapiens
tgcacaatttctttc

SEQ ID NO: 717042 - DNA, 15 bp, Homo sapiens
gcacaatttctttcc

SEQ ID NO: 717043 - DNA, 15 bp, Homo sapiens
cacaatttctttcca

SEQ ID NO: 717044 - DNA, 15 bp, Homo sapiens
acaatttctttccac

SEQ ID NO: 717045 - DNA, 15 bp, Homo sapiens
caatttctttccact

SEQ ID NO: 717046 - DNA, 15 bp, Homo sapiens
aatttctttccactt

SEQ ID NO: 717047 - DNA, 15 bp, Homo sapiens
atttctttccacttc

SEQ ID NO: 717048 - DNA, 15 bp, Homo sapiens
tttctttccacttct

SEQ ID NO: 717049 - DNA, 15 bp, Homo sapiens
ttctttccacttcta

SEQ ID NO: 717050 - DNA, 15 bp, Homo sapiens
tctttccacttctat

SEQ ID NO: 717051 - DNA, 15 bp, Homo sapiens
ctttccacttctata

SEQ ID NO: 717052 - DNA, 15 bp, Homo sapiens
tttccacttctatag

SEQ ID NO: 717053 - DNA, 15 bp, Homo sapiens
ttccacttctatagc

SEQ ID NO: 717054 - DNA, 15 bp, Homo sapiens
tccacttctatagcc

SEQ ID NO: 717055 - DNA, 15 bp, Homo sapiens
ccacttctatagccc

SEQ ID NO: 717056 - DNA, 15 bp, Homo sapiens
cacttctatagcccc

SEQ ID NO: 717057 - DNA, 15 bp, Homo sapiens
acttctatagcccct

SEQ ID NO: 717058 - DNA, 15 bp, Homo sapiens
cttctatagcccctc

SEQ ID NO: 717059 - DNA, 15 bp, Homo sapiens
ttctatagcccctct

SEQ ID NO: 717060 - DNA, 15 bp, Homo sapiens
tctatagcccctctt

SEQ ID NO: 717061 - DNA, 15 bp, Homo sapiens
ctatagcccctcttg

SEQ ID NO: 717062 - DNA, 15 bp, Homo sapiens
tatagcccctcttgt

SEQ ID NO: 717063 - DNA, 15 bp, Homo sapiens
atagcccctcttgtc

SEQ ID NO: 717064 - DNA, 15 bp, Homo sapiens
tagcccctcttgtcg

SEQ ID NO: 717065 - DNA, 15 bp, Homo sapiens
agcccctcttgtcgc

SEQ ID NO: 717066 - DNA, 15 bp, Homo sapiens
gcccctcttgtcgct

SEQ ID NO: 717067 - DNA, 15 bp, Homo sapiens
cccctcttgtcgctt

SEQ ID NO: 717068 - DNA, 15 bp, Homo sapiens
ccctcttgtcgcttt

SEQ ID NO: 717069 - DNA, 15 bp, Homo sapiens
cctcttgtcgctttt

SEQ ID NO: 717070 - DNA, 15 bp, Homo sapiens
ctcttgtcgcttttt

SEQ ID NO: 717071 - DNA, 15 bp, Homo sapiens
tcttgtcgctttttg

SEQ ID NO: 717072 - DNA, 15 bp, Homo sapiens
cttgtcgctttttgg

SEQ ID NO: 717073 - DNA, 15 bp, Homo sapiens
ttgtcgctttttggg

SEQ ID NO: 717074 - DNA, 15 bp, Homo sapiens
tgtcgctttttgggg

SEQ ID NO: 717075 - DNA, 15 bp, Homo sapiens
gtcgctttttggggc

SEQ ID NO: 717076 - DNA, 15 bp, Homo sapiens
tcgctttttggggcc

SEQ ID NO: 717077 - DNA, 15 bp, Homo sapiens
cgctttttggggcca

SEQ ID NO: 717078 - DNA, 15 bp, Homo sapiens
gctttttggggccag

SEQ ID NO: 717079 - DNA, 15 bp, Homo sapiens
ctttttggggccagg

SEQ ID NO: 717080 - DNA, 15 bp, Homo sapiens
tttttggggccagga

SEQ ID NO: 717081 - DNA, 15 bp, Homo sapiens
ttttggggccaggac

SEQ ID NO: 717082 - DNA, 15 bp, Homo sapiens
tttggggccaggact

SEQ ID NO: 717083 - DNA, 15 bp, Homo sapiens
ttggggccaggactt

SEQ ID NO: 717084 - DNA, 15 bp, Homo sapiens
tggggccaggacttt

SEQ ID NO: 717085 - DNA, 15 bp, Homo sapiens
ggggccaggacttta

SEQ ID NO: 717086 - DNA, 15 bp, Homo sapiens
gggccaggactttag

SEQ ID NO: 717087 - DNA, 15 bp, Homo sapiens
ggccaggactttaga

SEQ ID NO: 717088 - DNA, 15 bp, Homo sapiens
gccaggactttagat

SEQ ID NO: 717089 - DNA, 15 bp, Homo sapiens
ccaggactttagatg

SEQ ID NO: 717090 - DNA, 15 bp, Homo sapiens
caggactttagatga

SEQ ID NO: 717091 - DNA, 15 bp, Homo sapiens
aggactttagatgac

SEQ ID NO: 717092 - DNA, 15 bp, Homo sapiens
ggactttagatgaca

SEQ ID NO: 717093 - DNA, 15 bp, Homo sapiens
gactttagatgacaa

SEQ ID NO: 717094 - DNA, 15 bp, Homo sapiens
actttagatgacaaa

SEQ ID NO: 717095 - DNA, 15 bp, Homo sapiens
ctttagatgacaaac

SEQ ID NO: 717096 - DNA, 15 bp, Homo sapiens
tttagatgacaaaca

SEQ ID NO: 717097 - DNA, 15 bp, Homo sapiens
ttagatgacaaacat

SEQ ID NO: 717098 - DNA, 15 bp, Homo sapiens
tagatgacaaacatt

SEQ ID NO: 717099 - DNA, 15 bp, Homo sapiens
agatgacaaacattt

SEQ ID NO: 717100 - DNA, 15 bp, Homo sapiens
gatgacaaacatttc

SEQ ID NO: 717101 - DNA, 15 bp, Homo sapiens
atgacaaacatttct

SEQ ID NO: 717102 - DNA, 15 bp, Homo sapiens
tgacaaacatttctt

SEQ ID NO: 717103 - DNA, 15 bp, Homo sapiens
gacaaacatttcttt

SEQ ID NO: 717104 - DNA, 15 bp, Homo sapiens
acaaacatttctttt

SEQ ID NO: 717105 - DNA, 15 bp, Homo sapiens
caaacatttcttttt

SEQ ID NO: 717106 - DNA, 15 bp, Homo sapiens
aaacatttctttttt

SEQ ID NO: 717107 - DNA, 15 bp, Homo sapiens
aacatttcttttttt

SEQ ID NO: 717108 - DNA, 15 bp, Homo sapiens
acatttctttttttt

SEQ ID NO: 717109 - DNA, 15 bp, Homo sapiens
catttcttttttttg

SEQ ID NO: 717110 - DNA, 15 bp, Homo sapiens
atttcttttttttga

SEQ ID NO: 717111 - DNA, 15 bp, Homo sapiens
tttcttttttttgag

SEQ ID NO: 717112 - DNA, 15 bp, Homo sapiens
ttcttttttttgaga

SEQ ID NO: 717113 - DNA, 15 bp, Homo sapiens
tcttttttttgagat

SEQ ID NO: 717114 - DNA, 15 bp, Homo sapiens
cttttttttgagatg

SEQ ID NO: 717115 - DNA, 15 bp, Homo sapiens
atggagtctcgctcg

SEQ ID NO: 717116 - DNA, 15 bp, Homo sapiens
tggagtctcgctcgg

SEQ ID NO: 717117 - DNA, 15 bp, Homo sapiens
ggagtctcgctcggt

SEQ ID NO: 717118 - DNA, 15 bp, Homo sapiens
gagtctcgctcggtc

SEQ ID NO: 717119 - DNA, 15 bp, Homo sapiens
agtctcgctcggtct

SEQ ID NO: 717120 - DNA, 15 bp, Homo sapiens
gtctcgctcggtctc

SEQ ID NO: 717121 - DNA, 15 bp, Homo sapiens
tctcgctcggtctcc

SEQ ID NO: 717122 - DNA, 15 bp, Homo sapiens
ctcgctcggtctcca

SEQ ID NO: 717123 - DNA, 15 bp, Homo sapiens
tcgctcggtctccag

SEQ ID NO: 717124 - DNA, 15 bp, Homo sapiens
cgctcggtctccagg

SEQ ID NO: 717125 - DNA, 15 bp, Homo sapiens
gctcggtctccaggc

SEQ ID NO: 717126 - DNA, 15 bp, Homo sapiens
ctcggtctccaggct

SEQ ID NO: 717127 - DNA, 15 bp, Homo sapiens
tcggtctccaggctg

SEQ ID NO: 717128 - DNA, 15 bp, Homo sapiens
cggtctccaggctgg

SEQ ID NO: 717129 - DNA, 15 bp, Homo sapiens
ggtctccaggctgga

SEQ ID NO: 717130 - DNA, 15 bp, Homo sapiens
gtctccaggctggag

SEQ ID NO: 717131 - DNA, 15 bp, Homo sapiens
tctccaggctggagt

SEQ ID NO: 717132 - DNA, 15 bp, Homo sapiens
ctccaggctggagtg

SEQ ID NO: 717133 - DNA, 15 bp, Homo sapiens
tccaggctggagtgc

SEQ ID NO: 717134 - DNA, 15 bp, Homo sapiens
gatctcggctcactc

SEQ ID NO: 717135 - DNA, 15 bp, Homo sapiens
atctcggctcactcc

SEQ ID NO: 717136 - DNA, 15 bp, Homo sapiens
tctcggctcactcca

SEQ ID NO: 717137 - DNA, 15 bp, Homo sapiens
ctcggctcactccaa

SEQ ID NO: 717138 - DNA, 15 bp, Homo sapiens
tcggctcactccaag

SEQ ID NO: 717139 - DNA, 15 bp, Homo sapiens
cggctcactccaagc

SEQ ID NO: 717140 - DNA, 15 bp, Homo sapiens
ggctcactccaagct

SEQ ID NO: 717141 - DNA, 15 bp, Homo sapiens
gctcactccaagctc

SEQ ID NO: 717142 - DNA, 15 bp, Homo sapiens
ctcactccaagctcc

SEQ ID NO: 717143 - DNA, 15 bp, Homo sapiens
tcactccaagctccg

SEQ ID NO: 717144 - DNA, 15 bp, Homo sapiens
cactccaagctccgc

SEQ ID NO: 717145 - DNA, 15 bp, Homo sapiens
actccaagctccgcc

SEQ ID NO: 717146 - DNA, 15 bp, Homo sapiens
ctccaagctccgcct

SEQ ID NO: 717147 - DNA, 15 bp, Homo sapiens
tccaagctccgcctc

SEQ ID NO: 717148 - DNA, 15 bp, Homo sapiens
ccaagctccgcctcc

SEQ ID NO: 717149 - DNA, 15 bp, Homo sapiens
aagctccgcctcccg

SEQ ID NO: 717150 - DNA, 15 bp, Homo sapiens
agctccgcctcccgg

SEQ ID NO: 717151 - DNA, 15 bp, Homo sapiens
gctccgcctcccggg

SEQ ID NO: 717152 - DNA, 15 bp, Homo sapiens
gcctcccgggttcac

SEQ ID NO: 717153 - DNA, 15 bp, Homo sapiens
cctcccgggttcacg

SEQ ID NO: 717154 - DNA, 15 bp, Homo sapiens
ctcccgggttcacgc

SEQ ID NO: 717155 - DNA, 15 bp, Homo sapiens
tcccgggttcacgcc

SEQ ID NO: 717156 - DNA, 15 bp, Homo sapiens
cccgggttcacgcca

SEQ ID NO: 717157 - DNA, 15 bp, Homo sapiens
ccgggttcacgccat

SEQ ID NO: 717158 - DNA, 15 bp, Homo sapiens
cgggttcacgccatt

SEQ ID NO: 717159 - DNA, 15 bp, Homo sapiens
gggttcacgccattc

SEQ ID NO: 717160 - DNA, 15 bp, Homo sapiens
ggttcacgccattct

SEQ ID NO: 717161 - DNA, 15 bp, Homo sapiens
gttcacgccattctc

SEQ ID NO: 717162 - DNA, 15 bp, Homo sapiens
ttcacgccattctcc

SEQ ID NO: 717163 - DNA, 15 bp, Homo sapiens
tcacgccattctcct

SEQ ID NO: 717164 - DNA, 15 bp, Homo sapiens
cacgccattctcctg

SEQ ID NO: 717165 - DNA, 15 bp, Homo sapiens
acgccattctcctgc

SEQ ID NO: 717166 - DNA, 15 bp, Homo sapiens
cgccattctcctgcc

SEQ ID NO: 717167 - DNA, 15 bp, Homo sapiens
ttctcctgcctcagt

SEQ ID NO: 717168 - DNA, 15 bp, Homo sapiens
tctcctgcctcagtc

SEQ ID NO: 717169 - DNA, 15 bp, Homo sapiens
ctcctgcctcagtct

SEQ ID NO: 717170 - DNA, 15 bp, Homo sapiens
tcctgcctcagtctc

SEQ ID NO: 717171 - DNA, 15 bp, Homo sapiens
tgcctcagtctcccg

SEQ ID NO: 717172 - DNA, 15 bp, Homo sapiens
gcctcagtctcccga

SEQ ID NO: 717173 - DNA, 15 bp, Homo sapiens
cctcagtctcccgag

SEQ ID NO: 717174 - DNA, 15 bp, Homo sapiens
ctcagtctcccgagt

SEQ ID NO: 717175 - DNA, 15 bp, Homo sapiens
tcagtctcccgagta

SEQ ID NO: 717176 - DNA, 15 bp, Homo sapiens
cagtctcccgagtag

SEQ ID NO: 717177 - DNA, 15 bp, Homo sapiens
agtctcccgagtagc

SEQ ID NO: 717178 - DNA, 15 bp, Homo sapiens
gtctcccgagtagct

SEQ ID NO: 717179 - DNA, 15 bp, Homo sapiens
tctcccgagtagctg

SEQ ID NO: 717180 - DNA, 15 bp, Homo sapiens
gactacaggtgccca

SEQ ID NO: 717181 - DNA, 15 bp, Homo sapiens
actacaggtgcccac

SEQ ID NO: 717182 - DNA, 15 bp, Homo sapiens
ctacaggtgcccacc

SEQ ID NO: 717183 - DNA, 15 bp, Homo sapiens
ggtgcccaccaccaa

SEQ ID NO: 717184 - DNA, 15 bp, Homo sapiens
gtgcccaccaccaag

SEQ ID NO: 717185 - DNA, 15 bp, Homo sapiens
tgcccaccaccaagc

SEQ ID NO: 717186 - DNA, 15 bp, Homo sapiens
gcccaccaccaagcc

SEQ ID NO: 717187 - DNA, 15 bp, Homo sapiens
cccaccaccaagccc

SEQ ID NO: 717188 - DNA, 15 bp, Homo sapiens
ccaccaccaagcccg

SEQ ID NO: 717189 - DNA, 15 bp, Homo sapiens
caccaagcccggcta

SEQ ID NO: 717190 - DNA, 15 bp, Homo sapiens
accaagcccggctaa

SEQ ID NO: 717191 - DNA, 15 bp, Homo sapiens
ccaagcccggctaaa

SEQ ID NO: 717192 - DNA, 15 bp, Homo sapiens
caagcccggctaaat

SEQ ID NO: 717193 - DNA, 15 bp, Homo sapiens
aagcccggctaaatt

SEQ ID NO: 717194 - DNA, 15 bp, Homo sapiens
agcccggctaaattt

SEQ ID NO: 717195 - DNA, 15 bp, Homo sapiens
gcccggctaaatttt

SEQ ID NO: 717196 - DNA, 15 bp, Homo sapiens
cccggctaaattttt

SEQ ID NO: 717197 - DNA, 15 bp, Homo sapiens
ccggctaaatttttg

SEQ ID NO: 717198 - DNA, 15 bp, Homo sapiens
cggctaaatttttgt

SEQ ID NO: 717199 - DNA, 15 bp, Homo sapiens
ggctaaatttttgtg

SEQ ID NO: 717200 - DNA, 15 bp, Homo sapiens
gctaaatttttgtgt

SEQ ID NO: 717201 - DNA, 15 bp, Homo sapiens
ctaaatttttgtgtg

SEQ ID NO: 717202 - DNA, 15 bp, Homo sapiens
taaatttttgtgtgt

SEQ ID NO: 717203 - DNA, 15 bp, Homo sapiens
aaatttttgtgtgtg

SEQ ID NO: 717204 - DNA, 15 bp, Homo sapiens
aatttttgtgtgtgt

SEQ ID NO: 717205 - DNA, 15 bp, Homo sapiens
atttttgtgtgtgtt

SEQ ID NO: 717206 - DNA, 15 bp, Homo sapiens
tttttgtgtgtgtta

SEQ ID NO: 717207 - DNA, 15 bp, Homo sapiens
ttttgtgtgtgttat

SEQ ID NO: 717208 - DNA, 15 bp, Homo sapiens
tttgtgtgtgttatt

SEQ ID NO: 717209 - DNA, 15 bp, Homo sapiens
ttgtgtgtgttattt

SEQ ID NO: 717210 - DNA, 15 bp, Homo sapiens
tgtgtgtgttattta

SEQ ID NO: 717211 - DNA, 15 bp, Homo sapiens
gtgtgtgttatttat

SEQ ID NO: 717212 - DNA, 15 bp, Homo sapiens
tgtgtgttatttatt

SEQ ID NO: 717213 - DNA, 15 bp, Homo sapiens
gtgtgttatttattt

SEQ ID NO: 717214 - DNA, 15 bp, Homo sapiens
tgtgttatttatttt

SEQ ID NO: 717215 - DNA, 15 bp, Homo sapiens
gtgttatttattttt

SEQ ID NO: 717216 - DNA, 15 bp, Homo sapiens
tgttatttatttttt

SEQ ID NO: 717217 - DNA, 15 bp, Homo sapiens
gttatttattttttt

SEQ ID NO: 717218 - DNA, 15 bp, Homo sapiens
ttatttatttttttt

SEQ ID NO: 717219 - DNA, 15 bp, Homo sapiens
tatttattttttttt

SEQ ID NO: 717220 - DNA, 15 bp, Homo sapiens
atttatttttttttt

SEQ ID NO: 717221 - DNA, 15 bp, Homo sapiens
tttattttttttttt

SEQ ID NO: 717222 - DNA, 15 bp, Homo sapiens
ttatttttttttttt

SEQ ID NO: 717223 - DNA, 15 bp, Homo sapiens
gggtttcaccgtgta

SEQ ID NO: 717224 - DNA, 15 bp, Homo sapiens
ggtttcaccgtgtaa

SEQ ID NO: 717225 - DNA, 15 bp, Homo sapiens
gtttcaccgtgtaag

SEQ ID NO: 717226 - DNA, 15 bp, Homo sapiens
tttcaccgtgtaagc

SEQ ID NO: 717227 - DNA, 15 bp, Homo sapiens
ttcaccgtgtaagcc

SEQ ID NO: 717228 - DNA, 15 bp, Homo sapiens
tcaccgtgtaagcca

SEQ ID NO: 717229 - DNA, 15 bp, Homo sapiens
caccgtgtaagccag

SEQ ID NO: 717230 - DNA, 15 bp, Homo sapiens
accgtgtaagccagg

SEQ ID NO: 717231 - DNA, 15 bp, Homo sapiens
ccgtgtaagccagga

SEQ ID NO: 717232 - DNA, 15 bp, Homo sapiens
cgtgtaagccaggat

SEQ ID NO: 717233 - DNA, 15 bp, Homo sapiens
gtgtaagccaggatg

SEQ ID NO: 717234 - DNA, 15 bp, Homo sapiens
tgtaagccaggatgg

SEQ ID NO: 717235 - DNA, 15 bp, Homo sapiens
gtaagccaggatggt

SEQ ID NO: 717236 - DNA, 15 bp, Homo sapiens
taagccaggatggtc

SEQ ID NO: 717237 - DNA, 15 bp, Homo sapiens
aagccaggatggtct

SEQ ID NO: 717238 - DNA, 15 bp, Homo sapiens
aggatggtctcgatt

SEQ ID NO: 717239 - DNA, 15 bp, Homo sapiens
ggatggtctcgattt

SEQ ID NO: 717240 - DNA, 15 bp, Homo sapiens
gatggtctcgatttt

SEQ ID NO: 717241 - DNA, 15 bp, Homo sapiens
atggtctcgattttc

SEQ ID NO: 717242 - DNA, 15 bp, Homo sapiens
tggtctcgattttct

SEQ ID NO: 717243 - DNA, 15 bp, Homo sapiens
ggtctcgattttctg

SEQ ID NO: 717244 - DNA, 15 bp, Homo sapiens
gtctcgattttctga

SEQ ID NO: 717245 - DNA, 15 bp, Homo sapiens
tctcgattttctgac

SEQ ID NO: 717246 - DNA, 15 bp, Homo sapiens
ctcgattttctgacc

SEQ ID NO: 717247 - DNA, 15 bp, Homo sapiens
tcgattttctgacct

SEQ ID NO: 717248 - DNA, 15 bp, Homo sapiens
cgattttctgacctc

SEQ ID NO: 717249 - DNA, 15 bp, Homo sapiens
gattttctgacctca

SEQ ID NO: 717250 - DNA, 15 bp, Homo sapiens
attttctgacctcat

SEQ ID NO: 717251 - DNA, 15 bp, Homo sapiens
ttttctgacctcatg

SEQ ID NO: 717252 - DNA, 15 bp, Homo sapiens
tttctgacctcatga

SEQ ID NO: 717253 - DNA, 15 bp, Homo sapiens
ttctgacctcatgat

SEQ ID NO: 717254 - DNA, 15 bp, Homo sapiens
tctgacctcatgatc

SEQ ID NO: 717255 - DNA, 15 bp, Homo sapiens
ctgacctcatgatcc

SEQ ID NO: 717256 - DNA, 15 bp, Homo sapiens
tgacctcatgatccg

SEQ ID NO: 717257 - DNA, 15 bp, Homo sapiens
gacctcatgatccgc

SEQ ID NO: 717258 - DNA, 15 bp, Homo sapiens
acctcatgatccgct

SEQ ID NO: 717259 - DNA, 15 bp, Homo sapiens
cctcatgatccgctc

SEQ ID NO: 717260 - DNA, 15 bp, Homo sapiens
ctcatgatccgctcg

SEQ ID NO: 717261 - DNA, 15 bp, Homo sapiens
tcatgatccgctcgc

SEQ ID NO: 717262 - DNA, 15 bp, Homo sapiens
catgatccgctcgcc

SEQ ID NO: 717263 - DNA, 15 bp, Homo sapiens
atgatccgctcgcct

SEQ ID NO: 717264 - DNA, 15 bp, Homo sapiens
tgatccgctcgcctc

SEQ ID NO: 717265 - DNA, 15 bp, Homo sapiens
gatccgctcgcctca

SEQ ID NO: 717266 - DNA, 15 bp, Homo sapiens
atccgctcgcctcag

SEQ ID NO: 717267 - DNA, 15 bp, Homo sapiens
tccgctcgcctcagc

SEQ ID NO: 717268 - DNA, 15 bp, Homo sapiens
ccgctcgcctcagcc

SEQ ID NO: 717269 - DNA, 15 bp, Homo sapiens
cgctcgcctcagcct

SEQ ID NO: 717270 - DNA, 15 bp, Homo sapiens
gctcgcctcagcctc

SEQ ID NO: 717271 - DNA, 15 bp, Homo sapiens
ctcgcctcagcctcc

SEQ ID NO: 717272 - DNA, 15 bp, Homo sapiens
tcgcctcagcctccc

SEQ ID NO: 717273 - DNA, 15 bp, Homo sapiens
ggcgtgagccaccgt

SEQ ID NO: 717274 - DNA, 15 bp, Homo sapiens
gcgtgagccaccgtg

SEQ ID NO: 717275 - DNA, 15 bp, Homo sapiens
cgtgagccaccgtgc

SEQ ID NO: 717276 - DNA, 15 bp, Homo sapiens
caccgtgcccggcct

SEQ ID NO: 717277 - DNA, 15 bp, Homo sapiens
accgtgcccggcctt

SEQ ID NO: 717278 - DNA, 15 bp, Homo sapiens
ccgtgcccggccttg

SEQ ID NO: 717279 - DNA, 15 bp, Homo sapiens
cgtgcccggccttga

SEQ ID NO: 717280 - DNA, 15 bp, Homo sapiens
gtgcccggccttgat

SEQ ID NO: 717281 - DNA, 15 bp, Homo sapiens
tgcccggccttgatg

SEQ ID NO: 717282 - DNA, 15 bp, Homo sapiens
gcccggccttgatga

SEQ ID NO: 717283 - DNA, 15 bp, Homo sapiens
cccggccttgatgac

SEQ ID NO: 717284 - DNA, 15 bp, Homo sapiens
ccggccttgatgaca

SEQ ID NO: 717285 - DNA, 15 bp, Homo sapiens
cggccttgatgacaa

SEQ ID NO: 717286 - DNA, 15 bp, Homo sapiens
ggccttgatgacaaa

SEQ ID NO: 717287 - DNA, 15 bp, Homo sapiens
gccttgatgacaaac

SEQ ID NO: 717288 - DNA, 15 bp, Homo sapiens
ccttgatgacaaaca

SEQ ID NO: 717289 - DNA, 15 bp, Homo sapiens
cttgatgacaaacat

SEQ ID NO: 717290 - DNA, 15 bp, Homo sapiens
ttgatgacaaacatt

SEQ ID NO: 717291 - DNA, 15 bp, Homo sapiens
tgatgacaaacattt

SEQ ID NO: 717292 - DNA, 15 bp, Homo sapiens
tgacaaacatttcta

SEQ ID NO: 717293 - DNA, 15 bp, Homo sapiens
gacaaacatttctag

SEQ ID NO: 717294 - DNA, 15 bp, Homo sapiens
acaaacatttctagt

SEQ ID NO: 717295 - DNA, 15 bp, Homo sapiens
caaacatttctagta

SEQ ID NO: 717296 - DNA, 15 bp, Homo sapiens
aaacatttctagtag

SEQ ID NO: 717297 - DNA, 15 bp, Homo sapiens
aacatttctagtagt

SEQ ID NO: 717298 - DNA, 15 bp, Homo sapiens
acatttctagtagtt

SEQ ID NO: 717299 - DNA, 15 bp, Homo sapiens
catttctagtagtta

SEQ ID NO: 717300 - DNA, 15 bp, Homo sapiens
atttctagtagttat

SEQ ID NO: 717301 - DNA, 15 bp, Homo sapiens
tttctagtagttatg

SEQ ID NO: 717302 - DNA, 15 bp, Homo sapiens
ttctagtagttatga

SEQ ID NO: 717303 - DNA, 15 bp, Homo sapiens
tctagtagttatgaa

SEQ ID NO: 717304 - DNA, 15 bp, Homo sapiens
ctagtagttatgaaa

SEQ ID NO: 717305 - DNA, 15 bp, Homo sapiens
tagtagttatgaaaa

SEQ ID NO: 717306 - DNA, 15 bp, Homo sapiens
agtagttatgaaaaa

SEQ ID NO: 717307 - DNA, 15 bp, Homo sapiens
gtagttatgaaaaag

SEQ ID NO: 717308 - DNA, 15 bp, Homo sapiens
tagttatgaaaaagt

SEQ ID NO: 717309 - DNA, 15 bp, Homo sapiens
agttatgaaaaagtc

SEQ ID NO: 717310 - DNA, 15 bp, Homo sapiens
gttatgaaaaagtcc

SEQ ID NO: 717311 - DNA, 15 bp, Homo sapiens
ttatgaaaaagtcct

SEQ ID NO: 717312 - DNA, 15 bp, Homo sapiens
tatgaaaaagtcctc

SEQ ID NO: 717313 - DNA, 15 bp, Homo sapiens
atgaaaaagtcctca

SEQ ID NO: 717314 - DNA, 15 bp, Homo sapiens
tgaaaaagtcctcag

SEQ ID NO: 717315 - DNA, 15 bp, Homo sapiens
gaaaaagtcctcaga

SEQ ID NO: 717316 - DNA, 15 bp, Homo sapiens
aaaaagtcctcagaa

SEQ ID NO: 717317 - DNA, 15 bp, Homo sapiens
aaaagtcctcagaaa

SEQ ID NO: 717318 - DNA, 15 bp, Homo sapiens
aaagtcctcagaaaa

SEQ ID NO: 717319 - DNA, 15 bp, Homo sapiens
aagtcctcagaaaac

SEQ ID NO: 717320 - DNA, 15 bp, Homo sapiens
agtcctcagaaaacc

SEQ ID NO: 717321 - DNA, 15 bp, Homo sapiens
gtcctcagaaaacca

SEQ ID NO: 717322 - DNA, 15 bp, Homo sapiens
tcctcagaaaaccaa

SEQ ID NO: 717323 - DNA, 15 bp, Homo sapiens
cctcagaaaaccaat

SEQ ID NO: 717324 - DNA, 15 bp, Homo sapiens
ctcagaaaaccaata

SEQ ID NO: 717325 - DNA, 15 bp, Homo sapiens
tcagaaaaccaatag

SEQ ID NO: 717326 - DNA, 15 bp, Homo sapiens
cagaaaaccaataga

SEQ ID NO: 717327 - DNA, 15 bp, Homo sapiens
agaaaaccaatagaa

SEQ ID NO: 717328 - DNA, 15 bp, Homo sapiens
gaaaaccaatagaag

SEQ ID NO: 717329 - DNA, 15 bp, Homo sapiens
aaaaccaatagaagg

SEQ ID NO: 717330 - DNA, 15 bp, Homo sapiens
aaaccaatagaaggc

SEQ ID NO: 717331 - DNA, 15 bp, Homo sapiens
aaccaatagaaggcc

SEQ ID NO: 717332 - DNA, 15 bp, Homo sapiens
accaatagaaggcca

SEQ ID NO: 717333 - DNA, 15 bp, Homo sapiens
ccaatagaaggccag

SEQ ID NO: 717334 - DNA, 15 bp, Homo sapiens
caatagaaggccagg

SEQ ID NO: 717335 - DNA, 15 bp, Homo sapiens
aatagaaggccaggt

SEQ ID NO: 717336 - DNA, 15 bp, Homo sapiens
atagaaggccaggtg

SEQ ID NO: 717337 - DNA, 15 bp, Homo sapiens
tagaaggccaggtgc

SEQ ID NO: 717338 - DNA, 15 bp, Homo sapiens
agaaggccaggtgcg

SEQ ID NO: 717339 - DNA, 15 bp, Homo sapiens
gaaggccaggtgcgg
